United States Patent Application Publication US 2018/0305689 A1 - sequence listing, part 67

SEQ ID NO: 917118 - DNA, 4001 bp, Homo sapiens
gaggctgaggcaggagaattgcttgagggcagaggttgcagtgagccaagatcacaccactgcactccagcctgggtgacaagagccagactccgtctcaaaaaaaaaaaaaaaaaaaaaagacaaggaaaagaaaaaaagggggaggagaaactgtcaactgattaagagactcaagacatcaacagagtacaatgtgtggcacttgtttggatcctgattggaacaaacagacatatatactgagacatatatgagacaagtgagggcaagtgaactgagggggcatttgaaatcacagaataaatttaaatctgtgaccactttattgtggtattttaaaaagaaggaccttatctgttagaaataaatgctgaggatttaaagataaaatgtcttcgagttgttttaaaataattcagaaaggaggtgagactgtgagtaatggagagtggatacatatgaagacaggatgaggttttgaaaaattatttttttaatgatttcttgctctggcatttaaaaaacctaagtttcactagttgtgcaacatttgagtacacgagctcatttctccaacatgtttcctcaccagtaaaataatgctaatgataacatatatgtcacagtgttaaagatttaataactcctattaaaccaagtgcaacacaacatatagtaagtactacaatcaataaatggtagctcttatcacttcaagctagtgggaacaaataccgtcagtacaatcccataaaatctgtgcaaaagacccaaagtaaggcagcttcaatctaagaatgtgtgaatccactccccgcccgcaccccgccaaaaatcaatcaatcaatcaatcaatcctggtttgctcaaaaacttgaaaaaacaaaaaagccctaaaccctgaaatctctactagttagggcaagagaggactcctctctcacccagatactatcaacaaagaagtaaggatgcattacattttatctaaactgtaaatttatacaacctctggaaagatggcagagtggccttcctggcagtgctgtctaggtggctaatctgaatgtcaaggaagctgaaatcctctccacttactaactagagggcaggctcattccaaggtgtgcgggagagagttcgccaattttctaccacttaacaatcagcaagtgtttacaatgtttttgtgtttcgagagcaagggcaaagacaatcgagtttgcattctatcgtcctgccttgtttaggggcagtatatttagggtgcttaattctgggacacaatgcgaccccggacaaggcgcctgaggcctgtctctctcgctcaccctgcgtccctagtgggtctcatcgatccacgcatttattcccatttgtaacagatggctgccgtcaaggctccgtcacccctatttgcttaaccacatcagccaagggagcaggctagggagcacaccccttctgggggctcgagacctccctgggtggagcagaactgcagcggctgcaggtcccggagagtctgggagaggtcgaggttgacagaggaggtgggtagggggcgcgggcgccaggggcgatggaagcggcgatgatgccaggccgggtgggtgcgctccagtgtgaaaaaacttacaagtctctgagcacacaaagagataagattccaagggaaaattaaagaaccgaagaaaaggagagtgaaactccaggaaactccgaggtcaggaatttgggggaatctaggggaaaagggacttctccgagaactggtagcgcggaggaggggacgcctgaggagccgcagtctccaggagagcggtaagccccggcctgcgcgggttcccatccctgttctcaccagtacgagggctgcggccgccagcgccgcgccgagcaccgccagctgcaacagaagcggagccattctccatgccgtggcagcccgcccaatcccgcacctccacacaggcggaagcgcgcccgcgcgacccggccccgccgccagagaggtcgcgcccgctggccgcagcgcccccgcgtggcgaggcggagaaaacgccgctctcgtgccctcggcgcccagtcggtggagaggagcgctaggttccacagcggggcgccaggtttatcaagtatgcaagacgtctacttaatttgaatttcagattaaaaaactaatcatgtttttaacagccttattaagatagccacataccatacgactcatccagttacaggtttctggtttattacattagtttttataaactgtggtaaaataaaaagttgccattttaatcattttaagtttacaatagtgagtggcattaattacatacatactgtgcaaccatcaccactatctatctgtaaagccttcccagctccctccaggttctggcaacaactaattgcatgctctatttggggcatactcatgctttaaaaaaaaaaaaacccacaaaaaaacaaaaacaaaaaacaaaaaaaccacgctgtgtttatcagacattcaaatttaacgtggtatcctgtattttatctggtaaccccacctaggagggagatggcagccttgagcacgacacagtctacaacacaaggtgatgcttaggagccctcagctccgggacctgcagagcagaacgtggtgcggacaatgagcgcacagaaagttcaggtttctcggccgagcgccgtggctcacgcctgtaatcccagcactttgggaggacgaggcgggcggatcacaaggtcaggagatcgagaccatcctggctaacacggtgaaaccccgtctgtactaaaaatacaaaaaattagcggggcgcggtggcgggcgtctgtagttccagctactcgggaggctgaggcaggagaatggcgtgaacccgggaggcggagcttgcagtgagccgagatcgcgccactgcactccagcctggacgacagagcgagactctgtctcaaaaaaaaaaaaaaaaaaagttcaggtttctcatgtgttggagcacggagcccttgaccagtgaagaggcaaggccagggctgagcctaagtcacaggcagaaaaaagacgcagaaacattggaataacgctccacacgcactgcttgattctgcgctagaaaccctgttatctccgaactgttggtgttattctgagtcacagcaccagctcttttataaagagggagacccgctccttctttaacagcagattcgtcaaaatacgtccaaggcaaggaaacctagaaaggcgtctgggcaggggaaagtcgatgcgagggcgggccagggacctttcgtcgcgtccccaccttggcatttcccgtggcgtgagcggccccggcatccgtgtcgaaagtgcggcggcggaacaggcgcgcaggagaggagcggcgcaggcgcagacgcgcgggcgggaagatggcggctgggttcaagtgagtgttggcgggtggcgggtagagttctgtaccctggcggacggcagcttcctttaactcttagctgggattctctcacctggaggccgaccccgttggggtgccatttccttcctcgtcgaggcagacgatgggcgggaggacctggaggttgtcacagtgaaaagaaagggcttcttcctcagtgagacgggagatgaaaggactctgtagagttccatacccgctgcgagcgctcgtgagcgtggtgtgtagtgaacgtgcagtcccaggagacatagttgtaatcttttaaagattgtggccgggcgcggcggttcacgcctgtaatcccagcactttggaggacgaggcgggcggatcacctgacgtcaggagttcgagaccagcctggtgtacatggtgaaacactgtctctaataaaaatataaaaattagccgggcgtggtggcgggcgcctgtagtcccagctactcaggaggctgaggcaggagaatcgcttgaacccgggaggcagaggttgtagtgagccgagatcgcgcc

SEQ ID NO: 917119 - DNA, 4001 bp, Homo sapiens
agaaagggcatgcggataaccttgactcccagggccccagaaggcactcaccaccttcactctggccactgcaatgtggcagaactatactcccaaagccatattgtttattagaataataagaaaactatcatacattaagtgcagtaaatgtgccaggcacgggaccaagtgctttgtacccaatgtctcatctaacatggacaaaacccaataagacaggtattatattattgccctttttacagaggaagtgaagcttggagagccccaggaacttggccatagtcatgtgacaagttaaagcccggttctcaaagccaggctgccaggctccaaagccagggaaacccaattgtttctgaatgaccaggggactcaagcaaccggtccaaggtcacatattgacctggagaaggagcaaggcagtgaaccccagagagaggacaagcctcctatgtgttgtggtgcctcaggacctatcaggaaatgatctggccagagagatgaccccttccaagccaagggatagattctcagaaccttgacacagctctaagcggggagtacagtgggtaatatgataagtgccaggaacggagttgcccgcaaaggaaaatgaacactgtggcaagccctaagtttcccaacaggaaccagaggctgtaagctaagtaaagtcattcaacaagtgcccagggtgtgacggcgtaagcttaggagagactggtagccttctcagaggctacagatgccccagcagaacgcccaccaatgtttcccacatctaggatcttctcccctttgaagcatccaagacagccatcagcaggctggagactatgcgctaggtcctggctcaagaactccccaccccccaccccccacctcccacctcccacctccaccaagctctcttgccagcggccacctctcctgggcaggagccagaggaatgcagggagaacaggaaagaatgaatgatgccccccaaaatggagcatctgccctgggcaatgacgggatccctctggttctcactcaagtggatgatgccccacatcgacccgtcaggtctccctctcctgatccttcaccctcagactgggaaaccctctcagtgaggacagagatacagctttttcctgcccaactgcctttctcaggaaagagtagaaaggatcacccagcttccaatggaacagagagatgctgtcagctttttgtgaatctctgagcactcagctcaggcctttttttttttttttttttgaaagttagcacatccatcacatcccctaatgcctattcggcatctgttctctaaagagccagggctaggagttacctccaggggtaactcctgttatttaatgcaaggcagagagttcctttagtgtatgctaggagtctgacaccataattcagatttatggaataaaattctagaagaaatttggttcagaaacaggtagagtttgatatagatcctggggccactctagctgcccaatactgcttctgggagcctcggttcttaaaaaccaccgaacatggccctgggcccaggtcaaatttgtaggaggcatggtagaagatgcacacacatgcgcgtgtgcgcgcacacacacacacaccagcactgatggcttatgttcccaatgtgccccaaggtgccaaaggatttcccaaattcagaagttttcagagtcttctgtgtatgccagggagcatcgtgattaaatgtgagcatttttgtttctgttgacttctggagcctggttcacagtgaagtcagttctacagagttcttgcagaattgtccagatgtgacagggtcctcctcttcaaaaacgggagatgagaggaggtgtgagggggcaaaggtggggtgcaggaatcaggccatgcagagctgcccctccctggagtccgggccctttcaaccccatctttgccagagctgtgaccccttcacctccaaatgcccagataataggaagcaatttctgtcctttttctgagtacctcttgcttcaccagccctccccagaccaaacacaccccagacaaggatgggggcaggtacagtttccaactgtgacatcggggcagtgcaatgtcagagggccagaagttacaacattatctcacttactcatttccttgtaccgtgcagggaggaagtcccatagactcaagtctgtcgaaggacagtgtggacacttcctctttcctgacctttgtgtcactccacttgatctacctcctacccacgaccctctcttcaaagtccccggggcctgatgtcctggccccttcccctccttgggaaattaatccttccctcctccaccaccagttcacccagcccccagccccttctcgtatcttggaaaatccagcatctcaggctttgctcgaactcacacagagtctcttttgcccaacctttgctaagtcaggattggagaaaatggaaggcaaaaaggaagattagtgagctcatgcacgccagcatggccagagagaagttggccttaggcacatcagagccaggacccaaatacccccggatgctccctgcctacagtcctgtgtctgtgcgggttagcttctttctctccagctagagctgggctctagtgcaagcctgatggagatagtgggtgttttattccagtttagactccccagcaatgagaactgcaacagacatcctctgttgttatctagggaagcagccagtcaagtgagactggaaggaaacatattccttctgtctgggcgtggtggtttgtgcctgtagtcccaccacttagggagtccaagacaggtggatcacttgagcgcaggagttcgagaccagcctgggcaacatggtgaaacccagtctctactaaaagaaatatatattttatatatatatatatgtgtgtgtgtgtatatatatatgtatgtatatatatgtatgtatgtgtgtgtgtatatatatacacacacacacacacacaaatatacaaaaattagctgggcatggtgggacacacctgtaattccagctacttaggaggctgaggcaggagaatcgcttgaacctgggagatggcagcggcagtgagccgagattgtaccactgcattccagcctgggtgatggagtgagactgtctcaaaaacaaataaacaaacaaaaacatgttctttctattaacatcactttgttcctggaccttacaaaatgagaatcctggcaccttggtcctggctcaccttacaaactccaggactagtctgtctccgaaactgttatcactggaattttgttcccaaaagatatgtctatgttctaattcctggaacctcagaatgtgaccttatttgcaaacaggatcactgcagatgtaattgtttaagttaagatgaggtcataatggagtagcacgggcctgtaatccaatatgaccgatgttcttatgagaagaaacacagagtcaggcacactgggaaaatgccgtgtgacaatggaggcagagatgggagtgatccgcctgcgggccaaggaacaccagggattgctggcaacaccagaagctaagagaaaaccatggagcagcttctcccctggagccttgattccagatttctagcatccagaactatgagacaatacatgtctgttgtgtaaagcctcccagcttgtgagactagttacggcaactctagaaaatgcagcagccaatatggtggtaccagctcagattgattctttatgatccccaaatctcccctggatagaagatgcttgtgtttcaattcatcccaccaaaatggaaaatcgttttggttgaggctgctctgctgttgcttggctactgtctctaaactcactatcttctaggaacaaggatgacatgctactcaagacgaaacaaatgactcaacagcaggcagtgtaagtggatttacaagtactgcaggcaagaaatgatacaatatcct

SEQ ID NO: 917120 - DNA, 4001 bp, Homo sapiens
actcagacatttggccatctttaatcttacctctacctcccacttgtcccacagaagaagacttaatcctatctgtcaaaaagaattcgaaatctcaccactcacctcaatctgaacagggtttgctagaccatgatggcaaagtccaggagaaagccctgggcagagcagggccagttccctggtgcacctccattaggagaggtgaggagaacctgtccttgaaacagagagctctgaagcttcccacagttcagctctgaattgagagggagctggagagagtgagctcaaacttcgtagctgggttcagccccaactgcacaggcagggagggggcacaaggtcccctgtccaccgatgctcctcagttttattgatgggtgtcaggggagaggccagaggggagatccttccagagctgaataagtgctagccacctgcccacccatacagctacctttgcagagactgcaggcattgctgcaggctgacctgtccatcactgtagctgttttgtttcctgctctatccgcctgtacccagaatactatctgggccagagcagggtctctgtacatgtatgcgggttgaataatggaatccttgccaatttacagggccaagggagccctgtgtgaaatcataatggctcaagaaaatggtggcctaaataagccatttgttccctctctgagctacaactttgttgtgtgtaatttagtataaaaatgtttgggtcagaaagccacaaagtgtagttcttgtagaaaacatacttggagtgtgtgaagctgagcctttctggtgcagaggctgagggggaggcttgctctgtgcccagaaggctacatcaccagcatctgtccacactcaagatgggggaaaatagaatatcccaaagtgattaaatactcaaagttccaaaaacgtgacagcatgtcaatgttcagtaatcaccataaagctacagcagctgcccttagtaattactctttttttctctatcttaataaatataaaacacaaagccactggagatagttatgaaagtggtctgaggcagccctaactcagaactttaggaagacagctctacacaattctcccttttccagatctaggtatcctgcttgttttttgttgttgttgttgtttttaactaatagcaggaataatggaaatgcaaacgctgaacaggacaattttcctctctctctctctctttctgaagtatacactgcatatgaaaaatgcttccaaaattatacgtgctagagaaaaagaaggtatcaccaaaaaaaaaagtttcttcaggagaaaaaaagaaaaaagtaatatagaggaaaaataataagatgattttttctacgcacctcccaaaatcactttctttttagactgcagatgactggtaacttcaattgcactgcagatgttagaaaagcccagtatctgagtaaatgtgtatatcatgttccctttctagtcttctcaccttccaccccttgcctggccacattaattaatagttaaaatgctgatcatagacacttcggtgagggttttagcaaaaccttcaagttgcagccctggctctaaaaatgggactggtaatcaccacaaaagtgaaagactaagaggaggaaaaccccaaatttacacagaaatacacacaaccctatacattcaaataaaaagaagaaaataaagataaggtaaaagtgtttgtgcatgcgcacacacagacacaattgtttaagcctgacttccaaacaaccatcaaagaaaatctccccttctgttcttccctgagtgaagggctttccttaccattctggaccacgctgatgagggtgacgatggccaacaggacaacattgcctacagtttcttgatccatgtttgcttcaggctccccagagaggactgctctgcctccagctgcacaacctgccctgtacaggaaggggaagtgagagcttgcactctttcatcattacaatttctgaagatccccggcacaattacacagtgccttcttcttcctttttttttttttttttttttttttaactaaccaccaaaatgccctggctgtggttcagtgtgtcccaccaggagaagcagggcttggcagaggagcacgcaaagccagcacactctcctacatttccttgtcatgggaaacttccctgagagtctccagaatgaatcctggacccaagaccatgaccagcacgagcccagcacaggcaccagagaatctggaagctgccatcatctctgacttcagcaaagagaaagaagggaaagtaaacccaaaactttcaggtcagacagagtggcataaacctgtaaccccagcattttgggtggctgaggtgggaagattgcttgggcccaggactttgaggctacagtgagccaatgattatgccactgcactccagcctgggcaacagagcaagactgtctcacacacacacacacacgcacacacaaatgtaaaatgaaactttaaaaaaatgtatagaacaccaaaagatctgtgccccaaatactgtccttctttttttgaattccaagaaaaaaagtgaacacttaacacacggtaagtagcagccacataaggtttgaatgaaggaaggaataaatggcagtggggagggacagctgatatctccatttcttcagagaaaagtaataaagggaattcataaattaaaccaaagaattcaaaccaaaccaaagaattcaggtaaaaggcagaaatggagttacagatgatccctaagggaaattcccaaagggaactgacttttctgaggcaatcgcagaaacaccttcctggaaattcttttcaactgaataagagtagagtggctgtgctttctgagaaagtataagagtggacctgctgggtgggtgaggtggctgcctggtattctgcagctcagatcagtgtgaatggcaatccctctgaggttacatggaaaatgcaaaatacctgcaatctttgtcccagacttagctatttggcattggttaagaggtgcttttatcaaaacttcactttgaaagggaacatggaccactgtaactagtggcagcagggagggctgcatctcggcacggaagaggtcagtgtaggggaagatattgctccctcataggtacagtgccagaggcccgcttcaatgccctcggttcagctgagagagaaaggctgatgaaggcagcgtgcagagttgtgtgcggggaagccagcagccagggctgtcgggctggtcatgacacacttgggtactccctgagtacctagggcactttgtagagtatagactttatattagccaaggctctccagagaaactgaaccaatatataaataagtctcctcatatatatatattgcagatttataatagaaattggttcacatgctcatggacaccatgaagtttcatggtttgccatctgcaagctggagactcagaaaagctgctggtggagaccagtctgcattcaaaggcctgagcatcaaggagggcaatggtgcaagacccagtctgaatccaaaagctggagaacaaggggctccagtgtccaagggcaggagaagatggagggcaatggtgcaagacccagtctgaatccaaaagctggagaacaaggggctccagtgtccaagggcaggagaagatggatggcccagctcaagaagaagagggaatttgcccttctgcccgctttttgttctattcaggccctcagtggattgatgacacccaccatattggtgagggtgggaattctttacttagtccgctgattccagtgctgatctctttcagaaacaccctccctaacacacccagaaaaaaacattttaccagctacctgggcattttttagctcaatcaatttgacataaaattaactaccacagagttattacaagattggttagggctcagcacttgcaagatttgtatatt

SEQ ID NO: 917121 - DNA, 4001 bp, Homo sapiens
tctgggagagcatgtcccagaactcctgtagataggtgtcgtccacctcgtccgggctggccatctcttccccgcctccttggtaggccaccacgccggggttctttttagacagagccggcttgcctggcccggggacatgcttgtcacagctgggacctgcctcttcctcttggtctgcaataatatctccacagcctgtaagagagtcaaagcttttcagtgaagtcacgtcagaaaacatcaaacaaatacgatctgccgacgggtctgagggtggatcgacagaggcagggtctggggcggcgggcgcccggccgctgccgccttcggagtcgacaagggggaccgtctttacgggaacggcccccgtcctggaagcgtcctctgccgtgcggacctccccgggccccggctcggcgcgccgatgccccgcggcgtcctctccccgggcgccggtgtcgccggggtgcgcgaggccctctgcctctcggcagctccgcgctggggcgcggtcggcgggggcgggcacctcctctccccctgcgggctcacctgctgggtctcgcggggcgtcctggctgggctcctccggctcgcgcgcggctctgggcgtctcctccttgacgcactccaggctggcggtgagcgagccgggtaggatcaagccgcccccgggcgcgcgcccctccgcggcctccgccttggcccgcttgtctttcctgtgccagcgcatgccgctgaacagcccccgcagcccccgcttttgtttgccgccggccttgctcgcgtccacaggctctcccttgccgttttccgagcgcccgttcttcttcagcagcgagaagaagctgtgcgacttggccaccgagctgctggcgagggagcccccgccgggccctgcggctctggggggccccgggttcggccgccccccgccgcccccgccgctgtcgcccccgccgcgcggctcctccttcctgccgctctccagcaccagcacctcggcaagtccgtcgtgggtcctgctcctcaccagccccgtcggacccgagcttttcccgtcccctttgtttttgaccccaaaaatgctgggcatggtgccacccgatttcctcttcttgaataatttgaaggcagctttattaatcttccccgacggcggctcggcggccggcgtttcggcggcacagtcacaatgcaagtccatgtctgccgcgagggtcccggtcccggccccggcctccgccttcctcctgcagacccccacggacgcgccagctccgccgcgctcgctgacagccccgccgccgccgcggctccggctcgtctccatggaaaccgcgcgggataagccgctttcgtcagcagtgggctcgcgccaggccactgtcacccgtattctaaatcaacctgagccgcgctcgccgccgccgctgcaaaagaaacacacataaaagaccatcttccctcccgcaagggcttatataataccctaacccacttccatccgacttggctcggcgctgcatggcgtttttgtggcaggagcaggcaacacagccgcgagctgattgcagaaattcgagtcgtaattatggaattcaaattccctcaactctcacccaccttcggattccttctctagactcgctcttcacgggagcgcaaccatggatcacgaaatgcctctaaaaacgacaacgcaattcaacccaccacaaaatgcttgtttttcttatcctctctcctagactccctgcatcttcatgcctttcccaagcccttcatgtctgtccttagcattggtgcactaagcccagcaggcaggaagcatgtctgcctacatccatgtcttgtccagagctgagcacacgctaggtccatgctgtgtggctgtcattgtggttatggttcttgtgacaaaagtacacgccaccactcaatcagtctatcagcagcccagcaatgcaagcacaacagctccccggggtggagtttgcctgcacctttgggacaaccatgacttttatcccagactccagccaccacgggatgaagtcacagatgctgcggcacagcccacatctgataacaatagacaagctgaccgagacacacaggctgggaatctcagacccactccacaggtgggccttcgagtccgggttctgccctctcctttcccactcagcaggacagtggcattattcctgtcactgcggtaccactcccctcccccataccaccagggctgacttgtagtccccttccccaatgtacagagcaggaaaagcttggcaggggtccctgtgtgtccagggatctctgcagacattcctacctgcctggtctggggagagggaaaaccttttttctgggaacagctcagtctagggatctgttctgtgttctgatttaaaaagtgactgctaatattctaatcttgacatctgatttcataatcccagctgagtgctttttagcaaaaagaaatttggagaagcatatacatatataaatataacatgtatatatagtatatattatttaatcatttgattatttattaaatatcatttaagaatatatgtaataattacatatatacacaaacagtagtcttttccctactcattttttatatgctctttgcattaggccaataaatcccaatccccatccacataagttggcgttttataaatgacgtatgttggccattgcagcttctgttgttatgagatacagctggttaaaatttagaccttggagttcttagttgtattatttcctttttttgtttatttttttcaagaacactgttttgtaaaacgaagaaatcaatgagttcaggttcaggagaggttgtcacttccagactctaatcccatcaactctttctcactattgatgagcatctctcctggtacaggaagtaaggtgaggccagagagaggctttcccggattctaattgaccgcttgacatgatgaatcagagtcctcagtgctttctggggagaccacgtgtaaggaactgtaaagagaaacccatttgttacgtctttacaaccttttgaagaacaatagaaagtctctcaattttacacacatacacacacacacacacaaacacacacacacccatacagttgcttagatttgtgggttactatgtagctctgtcagtttggaagagtttgtgactgggatcaaggaaaagtaagtcgcctattaaaaaatctccctttctccactgggagaaagtggtctgcttattcacccatcaggacaggtcaaatgtgactctaatttacatgagaatctttgggcctcctgggagaaatctgatagaggactttgggatggatatcattcttttgggacatcaacactcaaacaaagagaaagagacaaagctgtcttcagcctgcggaaggtgccctcactgtgagttactggccctgagatagaagaaagcagggacccctggaacaatctgaaggcactgggcatgggagctgtagaggctgcggtgtgagtgaggaccctccagcgtcctactcaaagtccttgttacagagacagtgggaaaaacgagggtgaagtcagctgaaaggaacttaccccaaaagccagacaggtaaggagagactctgtaggggagagagatgaggcgcaggatggtccaatggtttgttggttagagccaggttatgaatcatcacaaagactgagccataccttatattaaacttcacagtcaagagtggagaaagcaaaatggtgattttttttttccctgagagacagaacatgacagtgaagataattttaccgtaagcactcccatttttgtttatagtttcttctttcattcttttcccccatcctgccccagcttgggagtgaatagaaaattagagtagaaaggaatagagaacaggaccgaggggaaacatttcagggaaaagccattccaaaacaataagacgtatc

SEQ ID NO: 917122 - DNA, 4001 bp, Homo sapiens
gtccttggccgcttccacacacctggtgtctttgggggtctcgggcaccaccttggtttccagcgcagctgccaccttagccgcgccctcctggggctcgggtccctgctcctcggtctgggagagcatgtcccagaactcctgtagataggtgtcgtccacctcgtccgggctggccatctcttccccgcctccttggtaggccaccacgccggggttctttttagacagagccggcttgcctggcccggggacatgcttgtcacagctgggacctgcctcttcctcttggtctgcaataatatctccacagcctgtaagagagtcaaagcttttcagtgaagtcacgtcagaaaacatcaaacaaatacgatctgccgacgggtctgagggtggatcgacagaggcagggtctggggcggcgggcgcccggccgctgccgccttcggagtcgacaagggggaccgtctttacgggaacggcccccgtcctggaagcgtcctctgccgtgcggacctccccgggccccggctcggcgcgccgatgccccgcggcgtcctctccccgggcgccggtgtcgccggggtgcgcgaggccctctgcctctcggcagctccgcgctggggcgcggtcggcgggggcgggcacctcctctccccctgcgggctcacctgctgggtctcgcggggcgtcctggctgggctcctccggctcgcgcgcggctctgggcgtctcctccttgacgcactccaggctggcggtgagcgagccgggtaggatcaagccgcccccgggcgcgcgcccctccgcggcctccgccttggcccgcttgtctttcctgtgccagcgcatgccgctgaacagcccccgcagcccccgcttttgtttgccgccggccttgctcgcgtccacaggctctcccttgccgttttccgagcgcccgttcttcttcagcagcgagaagaagctgtgcgacttggccaccgagctgctggcgagggagcccccgccgggccctgcggctctggggggccccgggttcggccgccccccgccgcccccgccgctgtcgcccccgccgcgcggctcctccttcctgccgctctccagcaccagcacctcggcaagtccgtcgtgggtcctgctcctcaccagccccgtcggacccgagcttttcccgtcccctttgtttttgaccccaaaaatgctgggcatggtgccacccgatttcctcttcttgaataatttgaaggcagctttattaatcttccccgacggcggctcggcggccggcgtttcggcggcacagtcacaatgcaagtccatgtctgccgcgagggtcccggtcccggccccggcctccgccttcctcctgcagacccccacggacgcgccagctccgccgcgctcgctgacagccccgccgccgccgcggctccggctcgtctccatggaaaccgcgcgggataagccgctttcgtcagcagtgggctcgcgccaggccactgtcacccgtattctaaatcaacctgagccgcgctcgccgccgccgctgcaaaagaaacacacataaaagaccatcttccctcccgcaagggcttatataataccctaacccacttccatccgacttggctcggcgctgcatggcgtttttgtggcaggagcaggcaacacagccgcgagctgattgcagaaattcgagtcgtaattatggaattcaaattccctcaactctcacccaccttcggattccttctctagactcgctcttcacgggagcgcaaccatggatcacgaaatgcctctaaaaacgacaacgcaattcaacccaccacaaaatgcttgtttttcttatcctctctcctagactccctgcatcttcatgcctttcccaagcccttcatgtctgtccttagcattggtgcactaagcccagcaggcaggaagcatgtctgcctacatccatgtcttgtccagagctgagcacacgctaggtccatgctgtgtggctgtcattgtggttatggttcttgtgacaaaagtacacgccaccactcaatcagtctatcagcagcccagcaatgcaagcacaacagctccccggggtggagtttgcctgcacctttgggacaaccatgacttttatcccagactccagccaccacgggatgaagtcacagatgctgcggcacagcccacatctgataacaatagacaagctgaccgagacacacaggctgggaatctcagacccactccacaggtgggccttcgagtccgggttctgccctctcctttcccactcagcaggacagtggcattattcctgtcactgcggtaccactcccctcccccataccaccagggctgacttgtagtccccttccccaatgtacagagcaggaaaagcttggcaggggtccctgtgtgtccagggatctctgcagacattcctacctgcctggtctggggagagggaaaaccttttttctgggaacagctcagtctagggatctgttctgtgttctgatttaaaaagtgactgctaatattctaatcttgacatctgatttcataatcccagctgagtgctttttagcaaaaagaaatttggagaagcatatacatatataaatataacatgtatatatagtatatattatttaatcatttgattatttattaaatatcatttaagaatatatgtaataattacatatatacacaaacagtagtcttttccctactcattttttatatgctctttgcattaggccaataaatcccaatccccatccacataagttggcgttttataaatgacgtatgttggccattgcagcttctgttgttatgagatacagctggttaaaatttagaccttggagttcttagttgtattatttcctttttttgtttatttttttcaagaacactgttttgtaaaacgaagaaatcaatgagttcaggttcaggagaggttgtcacttccagactctaatcccatcaactctttctcactattgatgagcatctctcctggtacaggaagtaaggtgaggccagagagaggctttcccggattctaattgaccgcttgacatgatgaatcagagtcctcagtgctttctggggagaccacgtgtaaggaactgtaaagagaaacccatttgttacgtctttacaaccttttgaagaacaatagaaagtctctcaattttacacacatacacacacacacacacaaacacacacacacccatacagttgcttagatttgtgggttactatgtagctctgtcagtttggaagagtttgtgactgggatcaaggaaaagtaagtcgcctattaaaaaatctccctttctccactgggagaaagtggtctgcttattcacccatcaggacaggtcaaatgtgactctaatttacatgagaatctttgggcctcctgggagaaatctgatagaggactttgggatggatatcattcttttgggacatcaacactcaaacaaagagaaagagacaaagctgtcttcagcctgcggaaggtgccctcactgtgagttactggccctgagatagaagaaagcagggacccctggaacaatctgaaggcactgggcatgggagctgtagaggctgcggtgtgagtgaggaccctccagcgtcctactcaaagtccttgttacagagacagtgggaaaaacgagggtgaagtcagctgaaaggaacttaccccaaaagccagacaggtaaggagagactctgtaggggagagagatgaggcgcaggatggtccaatggtttgttggttagagccaggttatgaatcatcacaaagactgagccataccttatattaaacttcacagtcaagagtggagaaagcaaaatggtgattttttttttccctgagagacagaacatgacagtgaagataattttaccgtaagcactcccatttttgtttatagtttcttctttcattcttt

SEQ ID NO: 917123 - DNA, 4001 bp, Homo sapiens
cagagacaagtggaggcaccactggattaaattttctaagtgaccatctgtaatgaggctttaagcattctacagatcgttgttcactgactatcacccagtattgtgtcgttctcaaccagggtagaaaggacagaatcctaaagtttagtgtaaaaataaaccacagcaagagacactctggagggaggaaatcctcagattactgactgcctcgggaaatctatttaaggctgcacgcagaagcgcagggaggaggctttattacttttgtttgttaagaaactcatttcccctgggcacctgttttctccagcaggtactacggttgcacaacttcagagacagtgccacaggaacctaacagcccttgaggactgattaacttgcttgtcccaccccgatcgtcaaaactccttttcatttcttttattgaaagaaaagtgacttttccactttaaaagaatcagaaactgctttccaaaagacacagctgctttgtgaatgtagcaccaggggcagcaaggtaaaccgcaacttcatcagctggtaacgacattaccagggccaggccttcttaaagtaacttatttcacattacctctcacatatttctgcaaaaccatttaaccccatctcatcacttacgagaaaaacactatacacatccctgaatttcagtgaattaagaaatattaattaaaaccagtcacttctgaaatgcacggtgaaatcttatttaagatttctgagagcaagtaccccaacgacttcacagatgaggaaacggtagctatccaaccttttaaaaccttaaagcagcactgtgttcccccagaattttcagtttaagaaaaaagaggggaacgtaaagcctccacgggaagagaattctgcttaatttaaccacttctgcagtaatttagatccaagataaacacagccgtcactaattttgctgaagcggggccagctacaagccttaaagcaaacccagaagctggagagccggcctccatcccacacagctgccggggccttccagtcccgccggggcgcttgctcctcggctgagctcgtccgcagcgcggccctcggctactggcgaggctgtgcggaaccagaaggtcgaccgcgcccgggcattccccgcgcgcctctgaccccagctcggctccccggaagccgcctgggcgacttcgcggcctaatacccggctctgcgaaatcgctcgcgcctccggcccggcctggagggccccgcaccatccgcgcgcgcgcgcgctcgcacaggatccggccaacaggcgccgggacccttggagcccgccttgttagaaacttgctacgcgcgccgccgcacatgcgccctaggcccctccggacgcaggcgccaccgacctcgcttccgccccgcgccccccggctgccccgccgcgactccgggccgcgagcgctgccgcacaggcgccctaggcccctcggggcacaggcgccgtcgatcccgcttccgccccgcgatcccggcacgccccacgtcccccgcacctcagacccgctttccccgactcccactggacagccggggaaaatggcgccttaaagcgttcgcacccaccttgccgaaatgcgcggcccagtgcacgggcgtccagccatagaaggagtcctcagaggccaggtgggcgtggggtgtctgctgcagcagcgagcagagcgtggccaggtccccgtcgcggcaggcgcggtgcagcgggaaacggagcgagagcagctcctcgctggagaagcccgcctctacgcccgcgcccgctcccgccgccgacatggtccgtcaccggagagcgcggggctcgctggcctagaggacgcgtcggggaggactcgagaagccgccgccgcagcacaaaggaacgagactagcgccgcggtcgcgtcccacaggctgccgagcggagcgcgcacagagggggcggggcggggcctggagcggccgggctgggggcggggcctggcccagaggacgccttgtgcagccgggcaggggtcggggcctggagccgcggacctctggagccgccgggcagggggcggggcttgagccggaggccgcctggagcagccgggcggagggcggggcttggagctgcggacgcctggagcggccggtaggtggcggggtctagcctagaggatgcctggagcagccgggtagggagcggagcctggaccagaggacgccagcagcagccgattaggaggcggggcatggggctgtcgacgtctggagcagccgggcattgggcttgggctagaggacgcctggggcggtgggcgcctggagtagccaggcagagggcggggcctggcttgggtccacgcctggggcggccgggggcggggcctggctggaattgacgcgtggagctccggtggagggggcggggcctggctgggccgctgcctacagcggcttccggggcttggaggtcacggggctcggaggtcacggggctcggaggtcacggggctggctgtgtggggggctcaggggcgtagagtggccaagcagcggtctgagcgggtcccggggcctccggcgcggtgggtctcggctgcgccccgggtgcggaccatgatgtttccagcctgggagccggtccgggcggggaatcccggctgccgggggcgcgggttgaggctctgcgggcccgcgcccagagcgggtgggagtcacgggtctcccggaggcccagtagcgcgcggtgaagttgtccagtaaaaatttatggagcgcctacggggagcagggattctcgttaaaatctgggaatcagcaagccctagttccttacagagcaggacagattcctcggttttgtccgagggacgccttcttcggaaccgagtgcggtgggctaggactatacgtttgcaagtttaagagataagcgagaagaccagacagagcaaacaataaaaggctttttgttgagaactgtataaatgtaagggagtaccaaatcccctattttgaatgacagtatcacggactttattacatatgtaattttattctgattatgaaagcatcagtaatttcactattgaggaataaccacaatgtttatgaatatttcctttgcttctaaatatgcggtctttttaaatcatgtattttatttcatttgtatatatagtttttcgctgtgtaaacttcctttttgcaaaattctacgtcacaaattgaacaaggcaattagatgtctagggaagtactgatgcacgagaaagcatattgcagcattggttaataaaacgaaaaaatagaaacctaagatttaacaaagggaagttgttaactagtggtgtaaacactcaacacagacatgtcttcatacagcaaacatttgttgagtacaatgctgaatgaaacacattgagaaacactctatagtggggaagtagcaaatatttcaattcagtgagcaattgctaatgaatggaaaatatgacacatagaatctatcttctcccagggagtttgtaatctgttagtgaagcaggaaagaataatcaagcaatacttttttgtttggaccaaaagggtgagaatagactataaactcatttcaggttttgtttactctagaacgtaatcatttttcttctcacatgccatgttgattttaatctaatctctttaaaatatatccccctgatttccatctttcttaggagagaggtgtcccattttgcgaaaggacgtgagtgtatcttgtcctccatgtaatgaaagggagggattacttgctaggctgcattctgggaatggtgaaacagagatggtggtaagtcaaggaatttgtccaagggcaaactgcatgcctgtggcagagcttagaataatatccagacctaggttccaacccactgttagattttttttaactttggaatttattttgcatagagtattaagggctaggaagataaaatagg

SEQ ID NO: 917124 - DNA, 4001 bp, Homo sapiens
tcatatgtatcactgacagttctaagtacaggaaaaatgagtgttgcatgtgttttaaaggagtgttggaagcaaaacagctccaggtacagcttcctctgtaatattagtgctccagtcctaccttttagtaactttggttttagaaacaagctgtgtgtgtgtgctggaaaatctacctaacacaaacccaactacagaaaactacaaaccacgcagtcaattcagcacacatatactcgcctcgagaaaatcataaattcagtaacgttcttgcttcatgagcactttctaaatattcactgaagaactgaccaagtacggctggttcaatagggagttagtaggactgttcaaatctacttttcaatgcggtttttggaaactgaatacccagagcatcaaagtacgatgatcataaagcaaaacacacaacaaatccctaaattttaaaacccaaaaattcctttagtttgggattatttatccacatctactttcatagccagaaatacttgagagctgacattttcggaaacacactctaactctagttttcactaaatatccttcatgggagcaacgccaaaataaaatcaacccttcaagtgtcttctgaagaagcacagtgtaagggaaacaacaaaactgcacgtgtttgctacaggaatagaaagcaagttaaaaaagcggtaggctttgggatggtgattacacaggtgaattcaaaggtcaaaaaactcatcgcactgtacacttaaggtctatgctttttttttttaacatctcaaggaaggggtgagggtgtaggctcaaggggaaaaaagcaatcccaacaccttaacaacaggaatacactaaagtgaaaatgcatttttctggcggaccacctaaagtgtatgattcccgagattagttaagtcctgtcccaaatttgagcttcaatagaatgcttctggccagctgtgattcgcatctcaaaggttaattcccttctctctcctcctcaagccgaccagcaaacgctcaccaccctccacatctgcaggccggctcgctcccggcctcacaagccaacgcagctctccgacctcactccgaactccacccctacttccgggacaccactcctctctcgcgccaaaatcgccttctcttaaaccctttctgctcaagccctcgaattttccatcccgaacaacttctgggtctgtcccaccccaagctttccaaacgccaagcctgcccgccccgccgccgcctctccgacccgttcccgcgcccggtccccagccccggaccgtccccgccattctcccggcccgcaccgtcccgccccggccccacgccctcgccccgcgccctgctctccgcacgccccggtccctccccgcgcgggcactcacatttttcgctgccgctcgaactccgctttcttctcctcctcctctcgcttctgcttctcgtccaggctgctgcgcttgctcaccgtgcgcccgaagatgtcgatgcggtcgggcggggacgaggcgcgctcccggtcccgctcgcgccgggacacggccgtgttggtggagcgcgaacgggaccgcgactcccgccgccggttccgtttactttcccgagatttggaacgcttccgcacgcgctccttgtcccgggatcgcgaccgggaccggctgcgcttcttgttgtgcttgctgctcttggtgtgcttggagcgggacgagctccggctccgagaccggcccatccttccgggagacgctctaaccgctcgcctcaggcccctcacgcggccagttcccctcgcctccgccttcggacgcgggctggcggttctaccgaggccggaggaaagaaaggtgtcggccaacggactttatgccttttcccggcgtctacagctgccacgaaggccgcctccaacgagaaacccgtagcgccaggcgcccctaagatggcagctgcggctgcaccggccgcccttcccacaatgccctgcgcgaaacgtgccgaagcgtgggccccgcctcctgacgatttttgccgaaggcaggcgagcgcttcggagcggactcgtttttttccgccagtcttggcggaagcctgagacgcaatagatggagactctccttttcgccttggcgtactctttttttttttttcctccctggtaagatgccaacgcctgttgaatgaattaagcacgttttagtgggatttaagtccggcctcgcagaagttgattgattgcattattttctaggagctggtcttgtggggcagccctaaaatgtatctccaagtgaccctgcactcatcacttgctgccttggacttagtttcctcattcgtagaatggagacaccacactttctgaagtgcttatgagacttgcaggaggtaagtaggcagcaggttttgatgaatgtaacctaatgcttactatagggcttaatgtgccttctaaatgctttaatgtattaacaagtgcttaattcttacaattctgaattaagtactactattatccacgtttcagagatgaggaccctgaggtccacagaggttaaataagggtcacacaaccagtaggtgacagagcagggacgtgaacctagatcatattgtgcaaagcccttgcacataaccagcaagccctcctcaaccctagccacgaaaagcttcgtccctatgtggcacaacaaactgtgtcattgttaagacctaaaaggaaaaggcaatgttaatatttgcagatgacaggaacccttgaaaatctaggtgcctcaattttaaaattgagtgcaataataaagcttaagtaagtagaagaaaaattagaattatttgaataagcaaaaacatattaaaaatgaaataatatttcctccacaatggcaacagaaaccataaaatacttagggataaactttaacaagttacacaatctttattataaacctttactgaaaaggcagtaataaggccctagtaaatgtaaaacatgctgtattcttaggtgagtagtcagtatcaaaaatactgtcaattcttcccaagtcaaattacaaaattagtgcaattctcatgagagtcccaaattctcttggggatatgtgttttagaactaattaattttaagttttatatggaagatcacataattaattatcaagaaaacttggaaacaaagaagagtagtgtattagtctgtgttgactgctgtaacaaaatatcataaactaggcagcttatgaacaacaaatttatttctcacagttctgaaagttggaaatccaggatccaggtgctagccaatctggtcgctggtgaggacccagagattcacagatgactcacagaaggcacctactcacagtgccctcacatgatagaaggggaaagctagctctctgagctctcttttagtggcacttctagggtctgaaagtttgtgttccctcagattcatatgttgaaacctaatcaccagtgcaatagtattaaaaggtggggctttgggatattgattaggtcatgagggctctaacctcataactggaattagtgcctatctcagcccatttccactgctataacagaatactttagactgagtgatttataaataatagacattatttctcagagttctgaaggctaagaagtccaagataaaggtaccagcagagtcagtgtctgataagagcttgctatctgcttccaagatagtgccttgttttgctgggtccacagaaggggacgaacactgtgtcctcacatgagggaagggatgggaggcaaaagggcaaaaaaaaaggggggggaactaggacactcctgtcaacctcttttgtaaggatactattcccattcaagagggtggagcctcatttcttaatcacttccaaaacggcttcagctcttaatgttattatagtggattttaggctccaacataggaattctagagagacacatacatttaagccata

SEQ ID NO: 917125 - DNA, 4001 bp, Homo sapiens
aaagaaaatgattattgaagtcggccaatcaatattaatacagttaatatgccaaacaacatattctttgatggcgacatgtttttatcaatacagcatatgacacttcttaaagctttgctcttagggatggaacagaattttatttaagcctattttggtgaactttgcatgcatttcaacacttttcaacatctgtctttcattaccagaggtaccagtatccaaacagcaaagtattttgaatgccttgaaagtcagctcctgctcctcagtcctcctgtcttaaatcataatttcactgtgacatcaggttcatttttaaggaacatttttatttcatggacaggcaggcagccattcactctaatatgcagattctgttttcataaagatgttccaagtaagaaaaatagctaaaagtggaatgcaagccaaattcatattaaataaaatgttttctgacctcatttaaaatgtagcaagagaatatgtacatgtgaatgaaaaaaattaaacattttactttttcaagtcacttacgtggcattttatttacaagttgttgtcatcctgtatgggggccaatacaccccacttaaaaactgaaatccttcttcctaattatggtacacttcaatttctatatttaacaccttttaaataactgttgatcttaacgctatatattggccacccccacccccaccccaccccccgaagaaacaccctgggaataagattttagtattttgagctacagggagacatcgtttttagaaactctcctgcctcctcggccctgctggccggcttgtgggcgatgaaaacaaactttaatcacttccagagattcgggtcagggttcacacgctccagcctgggaaccaccagccggaagggagaagcagtgcctgcaggactaaaggttctgttcagaacgagggagggacctgagaacgaaatctagaattttaacaagccttgaagagtgccaggacttagaccctgtgtctgccgtcctctcggctcggataggtggggaattttctcgaggggaaagtagtagatcgtttcacagcgcagccctcagctacagatgcgtgcctctttaaaaatacagagcaaccggtcaattaacctgggaggcgaaactcacgcaacgccaccggcaagaactgtccacacaaagccagcggagtgagccgcaccgcgtcggaacgcggtttccgatgcggctgctgccagggagcggggccggccccccacgcggaggggcaacttagcgttcgggcggcgcagaagccccgtctcctcgctgcggtgcactctccttcccggggacccccgccgcccgcgccgcccctccccccgaccccgctccccggccccctccccctgccccgcacacaatggcgccccccgagctcccgccacggtcctggcgccggccgcgccgccgctccgcgcacaaaggagggcgcacgggtttcccgagcgcggccggcctcaggtgctccgcgcgcatcccgggccgcagcgggccggaccggggggcgcgggcgggggcgcgggccgggacttactttctcgatggtcccggggagcaggcgctccagcagcctgcagaggaccaccccatccttcagcgacgcctgcagaaagccctccgggtccgagatggtttttttgggcgactccagcacccccagagtgatgagccacgtaacggtttgctcggcggaattcatcgctgcggcccgggaggcaggcggggaggggcgcgcgccttcacctcggagcggcggcccggcccgcggcccccgccgccgccgccgccgcctcgcccatcgagcggccggcgccggcgattggctcggcgcggcccagcaggtccggcccggcccgcttctccgtgcgccccggcccgctgtcaggcgccttctcaggagcggctcgggaacctgcgggcgcccgccgccgccccccggcctcggccgccgtcgcccaatgacatcaccgccaggagaagaaagacgcggccgtccgcccggcccgcgcccggcccgcgccgccccgcgccctgcgcagcctccgctccaggccgtgcgcggggcggcggcggcggctgggagcgggcggggaagggaaaggggaaggggagcggggagcggatggggagggagccgggggtgggggcgggcgcgcacctgcgcttacctgccccgggcccgccgtgcgccccgcgcccctggccggggcactcggaagcctttgtttatgttttgaattcgtgagcgttgaaatgatgaagtacttcccagaatgctctttttatttttgccggttttatttcaaggtggcggggacaggctgaaaacgagacgtttgtttcgctttgctaccttgcaagccggtcatgacggaacagaaatgatggttccatctgaagccatatgggtctgaatcgggaggaaccgactctccggagcgcggcgccgacctcaccggcagggcaggggcctgcgcgactctgctctagacggacggtgacgcttcagaccctgccgggggaaggtcaaggaaacggcgtggcctgaagtggggctgtgcagagggccgggccgggccgggccgggcgcctggctgcgtctcggggacgccgaagatctgggctgtgaaagcagcaggccgaacctggagagcccagacggcaagtgtcgcgtcatgcgcgagcttcctcgaacaactgatgacacgcacacattgacatgcgaggaagaaatggagcctcttcttaaaaggacacgagtctccactcactccatccactgtccctgggcgctcccccagtttgctcgctatgacccgcgggcagtttaacaagcaaagcacttagtctatgccaggcacatacattaatccattcaatgacaaaggctagaaagcatataaagcttccaaaaataatcagaggcttaagtcgtctccccctgccttctgccggtggatttctcttgcaatcactaattgcttttatttctagccttgagttaagtggttaaaattttctttgcaaatacaaaaaatattcaaatggcagtatgaattctggattacgaggacaatgtgctcagtgataacagcgactggttaggaaccgtcacaaagtgctgtctactgcctcgcctcccatcatggtccccttttactgatcagatgccgaacaagtggcagagataagacccaaagctcggctcctaccaggaaaggcatacctaacccgtttcctactgctgccctataagctttctaggaaacaggagggcaattaacagctacatcaaggcttgtacccagtgtcttcgtggaaggaaagatgtcaacccggggcgtggttgtacaccgagacttctgttcactttccttactgctgaattagagaaataatttaatgcagtccttaccatttcgaatcctactaaattcggtttgatacttataaggtggtagacttgagtaagattcaaatagactcaattaaatggtcctatagaaagccaattctagggagtgaccttacgagaccagtgaagcagagagccaattcttgtcggactggagacccacagtccaggtattacaactcgtcttttcttggtggggagaagcccagacttttaaacactttatggttactagttgcgttcttttatgttgggtatttattaatttcagaaaaagagtttacttggaagggattttagaaagtaacattgctcaaagctagatatttttaggtgcttaattgagttgttttagtatccaaagtgggcattttggttaaactttccttagcacttttccaggttcctattacagaggccacgcggagtgcaatctggtgcccatcacttttgggctattgggttagctcgagttaagactattgtctaaggggaagtttagccctttctgtggctctcctctggacttgcctc

SEQ ID NO: 917126 - DNA, 4001 bp, Homo sapiens
aagtgaagcagttaggtcaccgaagagtaacttttatcattttaacacaacatgataaaagtaagtagctcttagctggctaagacacagagaattctccattattcaaaataaggaagacttatcaacacagtatgtattccatggcaaacaaggttttccctttcttctcaaattctaaacacagtaatcacataactgctaacggctgctgttttacagaaatctccaagaaaaaaagacacaaatgcaagtcggccctgaaggagcacattctttcgcagaagcctctcggctgctgatcctctgggggatccagcaccgtgtaggaggaaggcaggcagggaaaggatggatagcagtggactctgacagacatgcacttggctccacccttcacctccaggcacagatgctgctcatccatttctacaggcaactcactctaaaactcagtggcccaaacaacaagcatctgttatctcagtttctgcgtgtcagcgttcagggcagcttagctgggtgaatgtggctctgggtctcaggggaggtcgttgagatgtcagctgaagctgtgggattctggcagcctaaggccttgcagggactgaggaggtgctaccaagacagctccacagcgtggctgtgagcaggaggcctcagttcctgagtcctcagagaacggacaacggactccacagagcgagtgatcccagggcacacgcaggaaggaaagcagggcctgcagcttcaggaatcctatgagctagcctcagcagtcaggcaggctgtgctcggttcataagaaatgagtcatcagccccacctgtactcaaggaaaagagaacaaggctccaactacagaagggatgagcatccaaaaacgggaagacattgcttgaaaatcaccagcagatccacccactctcagagtgctaggtttttctcttccagctgagtgaccacaccttcacactggatgtcagatgtcacagccactctgcctagcggacaaaagttgacaaagaaacgggtcacagaaggacactccaatgtttgggattcgaaaggctcccctactgataccccgatattagtgactttgcctcaccccacttccaaattcataggaagtgtagaaattcaggaatatcttccacagaataaaaacagcaaagcaaactacatcacaaaatagatcgtgtgatatgtctaatatataacacaatgtacattatgaaaatacttcatataataaagatcctgtgtcagaacctttccactacaagcaagtaaacccaactcaaattggcttaaacaaaaaaaggaaattattggttcgcacaacaaacaagtcaggaatggcaagagccacaagctcagaaccggaaggctttctccgctctctttcctactctcctgagtgtgcgccacagtttcaggaacggtctccctcatcaggcaacaggaccactggcagccccaggcccacaccaccaggtcaacacctcagatgcatctcgctggacccagagcccaccacgtgaaccaatttcacagccagtgaagcagaacaaggagagctgtccaaggagccaacaataacggacacagcattctggcaaacccacacataaacatgtattaataatttagagcacaaaaattcagacagtcccccagagctaagggacaccactgtagcactagggccacacaaatgcacgcaaaaggacacactgaccagctctattccagcccaactgctttcacaccaccctcccaatacccacaccaacaagcacagcaaccttaatcaaccccgtcagtactgacacgagagcaaaagaatgcctcctgcctccatggtagcgctggctgatgcacctctacgtagtagaccccaaaaagaccagaccgggaaatggggaaagaagtagtcgtctttttgcttctcctcactttccaccatctcaatactgacggagaggcctctgcaatgtgggactgagcgcacactttctgggctcactgaagctttagtggtctgcgttgccaccagtcagctcgcctcctccaggaacttgagaaagttattcttgacacaagaaattgttatttttagcacagctctggagtgtggtttgcaaagtttaaaaatataattttgtcctatcactgtcaaatggaacttgtgatttcagaacaagagtaaaaaatgaatcttaaataagtggtgctatttaagtttaatgcaaatggtccatattgttggggacatgtgaaaaacagaaatccagcagtacgttttcacttcctggcttctgcagattttgtacttaatcccacccactcctacaccccaggggtaaaattaaagtctgatgacggatgctatcaattacggcactttcacccaacatgcacccaaatgatttatttcactttaaaatgaaaatcaaatcttattcaattttgtggattccactgtatcaacacccaaacactaggacagagaatacatcttcaaaaaagaagtaaccaagtattttaggtagtttccaggaaggggtgagaggagcagagcagggaggcaggagcacagcaacgggaaggcaggcagggctcttcccaacaagatgctctctgccttctgcagaccgggcgcaacctccacacgaggcagggaagcgcagccccaacaggcaggggaaaggaaggacacctccctgcttaggaccacggcatgctgtgctggcccacacagcccgtacctcagtgtagactgcatgccagtttatcttacaggcagaaaacgaaaacacacacacacacacacacacacacacacacacacacacacacgagctcccaaaagacagtgtgacaaagcttacaaaggcagaaccaagatcggagcccaccagcctggctttgcccacaccaccacactgccagccaggaaaggacaccagagacagtggtgtcccacagcggtcatgcaggcagatcaggcagcacccaggggaggaggggtggtctcagacacaactcaccacgtacacacacacagcagcccatacagcctacacaggcccccaaacttctgtcttcgactgctaggagcacatgcctgcaaagaacagcctggctgtcgccagaaagtgagcacataccacaaagaaggatctgggcagatgcaacacactggcttgggctaacagtaagtgaagcagtaacatttacagctataaaggcaatgcgcccattccattaacttcaaaatgcaagcagttacaagactccagttttgagaagtttctcaagatggcccactgcaaacacctatctaactcccatccctcccaaggtgccaccgaaatgagagaaagaaaaagcttcaaaaaattaacagagaaagaacccgctgtagtgctaaaaagggaaaggctatgagcagtctaaacagggtttgaggagatccctggggacaggacgcagatggactctgaatgacctaacagttcagaacagcacttgtaagggagccccaggagcaccaaagacggttttctaacacaggaagggacacgtgacccacctcaggacttcagcacgacagccccttcttcctgatgggaagctcagcacccagacccctctctaattaaaaagaagctgctgcctgcactggattctaaccggaggtgaagtgaccctctctaattaaagagaagcctgcggcctgcactggattctaaccggaacctgatgcaccactaggcccacacaacagtctctgaggaaaaaaaaaaatgacaattctacccagaagcgaaatcccctgggagctccaccaccagcctggactatcccccatctgaagtgtgacacaggaaacaggtgcagagaaagtgtctccctcagctctgctcgtgtagctgcttctagagccctccatccggttctccccacctgctcccagacacacaacccgcaca

SEQ ID NO: 917127 - DNA, 4001 bp, Homo sapiens
aaagtatgttaacgtaaacaaaactcagtagtttcaagaggataatataataaaatccctcacaaaggtgaagaaaaagtaaaacctgccactagcaaggcatattatcacagccaataaggcagctggattacaaatgacaaagctgatacgacaaagggtatcagggaaagactactgaaacactgtctttttcccctttgaaaaggccctaagtttcttggaatctcccctagcactttcacttacgtgtaataatttccttgccaacatgaaatactaccaacaataaatttctttgtgtttacaatcataaacaacgccagtaatactttaatctatgaattcctacatgtctaattcaattaaataaactttccatgtaacctgccctcacagatttgatgttctaggttttccgagaaacctatagcaaaatattcttcgggaagggaaacctctgttgggttatcctacataacaggttctacaaagatgctttcatatacagttgtccctttttatcagcagggaattggttccaggatcccggtggataccaaaaccctcagatgctcaagtcttttatataaaatggcatagtcccgtaaacattaaatcatctctaggtttcatacactacctagtacattataaatgatatgtaaataatcattatactgtgttgttttttattgtttttttttaattggtttccccctcctccagtatttccaatccaaggttggctgaatacacgggtgggtaaccttggatacggagggccgactgtactcttatctgggagcttgatattgcccatctcagtttacagataagaaaactaaggttaagagtgacaaagtggcaacataaacggcaggacttaagtacaggactgactgcaaccacttaagcagatcccaagaaaagcaaagctagatttctgtatttaaagtgctaccccaagtgtaggaagaatcgcaatagcaaaataaaatgaaagagttaaattcccagaaactgccactgaaagactgaaaagacaatgtttagtaaagtgacacaacattttacaacagggaatcgagaccccgcccagtatgttccccgacagcatgttttataaacgtcacatactggttaatgtgaattctctggacattaagtgttgagggtacggaaaaaccaccgaatttctggtctcaggaagaaaaagcagagaaaggagtgcggctgggagaagcaggcggagggctggcccattttatttctgcacgactttgcctgatcacctgctgaggattctaaggcctgacccagacctagatgccagcccttagatgacaatctctaaaagcagagttcatgctgaggcaggtgccaagaaatcggttcacacccctgataaacggttgttgaaaatgtgtgtcacctgcaccaccagcgaccagaaccactcttcctcactggaacgagagcaatgtctggggttccacacgcagactccaccctgccctgggggtggcccgcgcgccgccacctcccggccattacccaaacccgcaacgccccgttccacacatcccggactctcgagcagccggggagggtcggatccgggcgcggaggaggcaggaggtccggctggagcgaagcacccaccccgggcccaaccccgtcttcccggcccctccctcggcccgtggccgcccgcgctcacctccagccgcagggaagccccgcagccgcgcaggaactcgcggatgttgctcaggcactcgctctcgctccggggctcggggtagacctgcaatacagagcacaagcgctgagcgccgtggccggcagcggggacgccgcggacaaggccgagcgacgcccacggcccgcgctcccaacacagcgggcgacgctggcgagcggcccccgacggcctggagcgagcccgctgccccagatgccaacccgctcagccgctgcttctcctcacccttttttcttcctccggggctgcaccaatctctgccccttcccgcaccaggaagtgagccccggcgccggaagtgacgtcctcagaccgcgcccccgccggcccgcgcgggacgtcttcggatagcgtcgggtgttcgcccccgcggacgcagcccaccctgctttgccggcgagctgccacctcctctggcccagtgctgggcctcggtccggtagagggagcccaccggttggccccgcgcgcggccaccgccgcctcctcctgtccagtcttcggtctctaccctagccccgcggacgcagccgacaaggcccggctccgcgctcggcctcctccctgctccaggtccttggcctggccccgcagacacagcgcacccgctcggcccctagcgcagacaccgccgcctcttggcgccaggtcctcggcctctcccaagtggacgcagcctggcccagaggggccccagagaactcgggcggcttgagtaacccctgatcgttgggagagaacctgggattttttcccttctttctagcctaggctcatggagagcgcagttactattctaatgcaatgacttaaaataattaagcaacataaattatgcatgttgggattaaggtgcaatgttttcccaaatataagccacgcgcttcatgaatgattaaccgaaatagttaacatgaaaaccagtaagtcagctgagaagaaattgtggatccaccgcagtggaggagcgcaggaaggcgcctacagactccctagtgctttagtccaaggtagaattgtgagggccaccagcaacacatgtaaggtgtttggaccttacccacggcaagaaactaaggaaaccagaaacagtaccaattactagaaaattttaagaagcctgaggcatacgaaaaactttattttgttttttgctctaaggattattttaactgtaagaaaacttatgttccaaattacatgtgaagacattaagcgttgacatttaaactaatgcgtcatctagaactctagcatttgaggacattaaaggcatttttgtccttctgtactgtaggagaaaatcacgacatttcaccaggctactcaggaatactgtggtttcattttatggtgctcaggtgttttaaaattatacatcaaaaccaagtgttcagcaatgccaaaagggatgaaatgaagcttttttctttctatagttgaaaaattccttcaagcaagtgctgacatgtttccatcgaaactgtacattttttcagtggaatggcaaaagcaaagctgcttcctaatccgttttgctctttaaaataattttcaaaaattatcacatatctaggtaatacctaatttttttcttcatagttttaaatagttgtaaaggatgtaatttctgacattctgatgacatttttaaattaaaccattgcatcctttataaaaaatatatccaatagaatctaagtgtaatagaaacataatacccatttctccatctaaaaagtttctgaacaagtcagacattaattctttctcctttaattcattccacttcacccaaaaagttgtatcctcatatagtctatttttatgcttgaaacacactcttttttggcaagtaacctctacaaatacagtcaatcatcattcaaagagtctgtatttatgaactcagctacttggctaaaaattatgtgtaacccaaaaatcaatacttgaagcactctcagtcatatatggacacaagcagaacagtgaaaaatttggatcaccttatgtacacgttcccagctgtgcttgaataaggccatgctctgccttttttttttagttctcattctgtaaacatatgtcctcttctcactctacttagtgtcacatttttcaaatttctatgctttccgatggtgatttctgtttcaaatggcccccaaacgtagtgctgaaatgctgtctaatgtccctaagcgcaagaaggctgtgatgtgtcttaaca

SEQ ID NO: 917128 - DNA, 4001 bp, Homo sapiens
aggagtttcaaacaagccgaggcaacaaagcaaggacccgccttctctacaaaaattgaaattaaaaatggagcacaaatctgtgcaggcaaacaacggaagagtttttccaaaacaggaaaagtcttcacagggtcagattttaaacagatgcctgggctttgaaggaagtgaggatgtgtgagtcaccatcagctaacctgtctctgggtcagataagagtggtccctgagcagagaagatcaggggcctcctggaagacattcctgaggagttaaagcaaagaggcaaaatgaagttccagtcagacagagctggttcagtagaaattacagaacgatgtcttcaattcttgctggtctgtggcttctaacctcttctcctcctataagcctaaatgctgaaatggaagctaagctgggttccatgcacagagtgagaaggatggttcagctcacggtgacctctctttagagcttcccaaggaccagtactatgtcttggaaacacagtgaggtgtcacttaatgacggggacacattctgagaaatgcttcattaggcaatttcatcattttacaaaatcatagattgtaattacacaaacgtggatggtctagtctactccacacctaggctatatggtatggcccattgctcctgggctacacaccggtacagcattcctgtaatgggtactgtaggctattgtaacacagtgctaagtattcgtgtatctaaacatagaaaaggtagtggttgcaccacaacactaagctgaaaaataggaatttttcagctctgttataatcttatgggaccaccgttgtatatgtggtctgtcgttgactgaaatgtcttcatgcagtgcctgactggggctatttataaatactgtttactgggggcaaatttatgagtcagagcaaagcagtttcctccactgtcttaccaaggtcaatgacttctacaacactccacatgtgcttttttgtttgtttttgggtttttttgttttgttttgttttgttttgttttgagacagggtctcactctgtcgcccaggctggactgcagtggcatgatcacagctcactgcagcctcgacttcccaggctcaagccatcctcccacctcagcctccccagtagctgggactatgggcatgtgccatcacacatttttgttgttgttttgagacagggtctcactgtgtcacccagactggagtgcagtggtgcaatcttggctcatcacaacctctgcctccctgcaacctccgcctcctaggttcaagggattctcctgcctcagcctcccgagtacctgggattacagctactactaccacccagctactttttgtatttatattagagacgaggtttcaccatgttggcctggctggtattgaactcctgacctcaaattatccacctgcccggcctcccaaagtgctgggattacaggcgtgagccactgtgcccagccacatatgtttttaaagaatcccaaattttaagacataagacctgttcccaacttagacgatgcctgcgtggaacagagaagagacatctcaacttccgggaatgggggtggggggatatgagctgcctctggaaggaggtaagcctctactcatccctactcccaagggtagaaaagtaaaaagttaaaattacctctgtgttactattagactgcagctgtgagatcctgcgtggctctcctcccctatggagctgctttctgctggccaggcatgacccaagagcgagatgggaaggaagcagagcagccgttgctgcttctcctttttgtgcttccttttcccaggtggctggggggcggggctggtgtcacggcccctccctcagccctagggcgcctcagagcagtcatcttgctgggcttgccacagagaggtccccggctctgcaggtcctggcagagcaaggcccagtgacagctccattttttagcaactcagacttgggtgcctgaaggagggagcacgagctcggagctgtgtccaagcgcagccgccttctctcttccctcaggatcctctgagctcctcgcagagaattctgacctcttcctttcagtacatgcctcaaggtttttctggtggctagagattctctgatttgcttggaatcacacatggtttgttgttgttgttgttgttgttttgttttgttttctatttgagaccgagtcttgctctgtcgcccaggctggacagcagcctccgcctccagggctcaagcgatcctccctcctcaacctcctaagcaagtgggattataggcaggtgccaccatgcccagctgatttttgtatttttcataaagacaggtttcaccatgatggccaggctgcacatgtgttcttttaaaagctgcctatggccaggcgtggtggctcaggcctgtaatcccaacattttggggggctgaggtgggtggatcacgaggtcaggagttcgagaccagcctggctaacatggtgaaaccccgtctctactaaaaatacaaaaattagctgggcgtggtggcacctacctgtaggcccagctatttgggaggctgaggcaggagaatggcatgaacccgggaggcggaggttgcagtgagcccagatcacaccactgcactccagccttggtgacagagcgagactctgcctcaaaacaaaaacaaaaacaaaaaacaaaaaaagctgtctacatatgatgaaaacattctttaaaaggtatgtatgatgcagatcaacctttaaaattgtgttaatgtagtgattaaagttaccgttcaattttttcttgaatggtgtcactgtgtttttcccagtaaaaatgacacctctagaaaatgtaatttttaaaaaattggctagtcgccgggcatgggggctcatgcctgtaatcccagcactttgggaggccaaggcaggaggatcgctcaagctcaggagttcaagaccagcctggccaatatggtgaaaccacgtctctacaaaaaataataaattaaccaggcatggtgatgtgtgcctgtagttccaggtacttgggagattgaggcccaagaactgcatgagcccaggaggtggaggctgcagtgagctgagatcacagcactgcactccagcctagaagacagagtgagactctgtctctctcctattttttttttttaattgagatggagtctcgctctggcgcccaggctggagtgcaatggcacaatctcggctcactgcaacctccgcctcctaggttcaagcaattctcccacctcagcctcccgagtacctgggattacaggcacgtgctaccatgcctggataatttttttattttcagtagagacagggttttgccatgttggccaggctggtctccagcttctaatctcgagtgatctgcccgcctcggcctcccaaagagctgggattacaggtgtgagccactgcacccagccgagactctgtctcaaaaaaaaaaagaaaaaaagaaaaaaaattgactagtcagaaaccactgattcagtaggtattgaatttggatatggagtcacagtgatttagctcttataaccagtaatctttgtgctgttttctgctttcccatgcattatttcattaaaatatcaagactcaagttggatgttatgactcttccattttacaagaaaagaagcaggctcggttggaaggccgaggcgggcagatcacaaggtcaagaaatcgagaccatcctggccaacatggtgaaaccccatctctactaaaaatacaaaaattagctgggcatggtggcgcacacttgtagtcccagctactcgggtggctgaggcaggagaatcgcttgaacccggaaggcggaggttgcagtgagctgagatcgcgccactgcactccagcctggtgacagagcaagactctgtctcaaaaaaaaaaaaaaagaagcaggctgggacagggtgaatcatt

SEQ ID NO: 917129 - DNA, 4001 bp, Homo sapiens
aaagaggctgcacattagccccacaacgtgaccctcctttttaacactgagtgttagaagggaacggaatgaactgggaacaccgcgggcaaagtgagtgttagtcccttccctcttccatttcgctcgaaggaaacaaagcaggaaaataaggtgtctagggacccacacttctgagcgacacaactgagaacagaagcttccgcccaataaagcatttctcttacactgcaggttacctatagtcactgtgattgggtcttctataacgttaccacagtgaaacacaggtttaccactcacattaggatttgaactgggggctcgagcaccagtgagggagtaacacaaggctcctggagccaagcctttcaagatctagcatcggaatcatcagaatcaccaggggtgagttctctccacttaagtaagtcaggctgaccttcctaaggcttccccgagatcaggaaacgatgtaaggtgcactcaagtctccttgactctccgaggtttttggttaataaataaatccgggggaaagcattgatctggcatcccccactgaaaagaaacctatctatctttggccaaggtctcctatttaaagaaggctcataaatatgaaaggctgcctgaggtaattcctatgccgggaaagaacaaagttcccataatactgccctctctagtatcaaacccggtgcatgcgacttctcgaacctgtgattgaccagtgaccgccagcctctatggaacaatgaagcctcttgtgcaagacagtggcaggaaacgctgtgcttgggacagttttcttcctctcctacacacacacacacacacacacacccttttttttttttttttttgatacagagtctcgctctgtcacccaggttggagtgcagtggctcgatctcggctcattgcaaccaccgcctcccgggttcaagcgattctcctgcctcagcctcctgagtagctgggatcccaggcgcctaccaccacgcccggctaattttcgtattttttagcagagacggggtttcaccatgtcggtccggctggtctcaaactcctgacctcgtgatccgcccgcctcggcctccaaaagtgctgggattacaggcgtgagccaccgcgcccggccacacacccctttttacacctaacgccagggattccggtttcccctcctctggtgtaaaacaaaatcaacttttccccttccgagtcttccctcctgagctcttcacttgcttatcactgaaggggcaaattccagaggaacccaagaagaccccggacttctgatctaattggttactttaaggtaaaaaataaaaagattccaaactccgcttctgaatcccccaggggtgttaaagaacaaacacaattgctacctttttctgcagaagtgtaacgcttcctcccaatcccttaatcttacagacacggctgcgcggaagccgcatctgaaggttcctccccagacccgggccccggcggggtcgaagttggctccctccgggcgcccggtccgccgggacagctcgaaccccagccagcctctccgagggacccccagggcgctgcgggcgggaagggggcgccaggcggccgcggccagggagcaggtggccgcccggggctggggccccgcgctgtgcccacctagaccccgtcggaagccccagggtgtcaactccgaggcccctccccagcatcccgctcgtccccgggggcggtccgagtcccagacatcggagacctcccgggaccccggggctggaccggccacagggtccgggctgcggggccggcccgcgtctgtctggtccccgggtcccccagcccgcgccgggagcactcacgtatctgtgcacgagcgtccgcacgaggctgcagtccatggctcctccggccgctcccgctccgccgttcagcgcccccgcgcccggctcggcgcgcccatgggctccggggtactagtgcggccgcgccccccgctccggtcacggcctcggcgcgccgggcggtgcagggggcggccgcggcccctccgcgctcatgcccggcccggccggcgaatgctgggtccgcggccccgcgcgtcggcagctgctccactggcggcaaggctgctgctcggggccgcgcgcgcgcgctctggcgccttctctctccccgtcggtccgcccgctcggttgggctcggctggagcaccccggccgcggcggagcctgcgctctgctcctcccgagtctcctcctcccctgcccgccgccctctggagcctccgggccccgctggctcctgcccctgctccgggcgcgcacgtcaccggcgcaagtgagcatgcgccccgcggccgcagcccccgccggccccgcgcccacacccgcgctcgcacccgcgcgccggccctgccccctcgcgcctccgcccgggccccagaccctgggggcagagggcagagggcagaggtcagaggccgcggggaggaacccccctgttgcttccgcctcccggggcgcaggcgctgggcgcggcggggaagggactcggcactggggaaacccggagtttcagccagggtcccagggcttccttcccgggttcctgccggaaaacttttctcctccgcccggaagcctcgatggggcagtgagatcgcggggcgaggtgggagtgtgggagggggccgcgggcagagagcgggagtccggctgggtgggagatctcctgagccgaagctgggtctcgccccagcgtggcgccaccgacccgcaggcttttcctgctctgcagatggagagacacagggacgctcctcaggtggctgccctgggctgccagcctgtcagtgggaggggagggtgcagacaagaggcccctgtttccgaaacccctctgtccccaaagctgcgacagcagaagacacttaggcggcctgaggggttggtgaaccacagaggagctcagcttcgcctggtctccagctcccggtggcggtggcgtgtccttaatgctgctggctttgaactggactgagaactatttaccacacaaacaccaccatttcaatcccggagaatgcctgttttccctagggtgacctggccggggtaacaaacacttgttctctaattccacggtcagccttgacttaattgaggtacttgatttccaacttcctgtcttgctgccacagataatcactgatgaaaccaaacaggcaacaccttttggtggcctgtggagagcgctgccccgtctgggtcttaggaaggcaattgaatatgaatgttctcccgagtgcttgtggaaaagagatggtgttggccactttttagacgaagagaaatgagtactagtgaacactaatcatagtgactaaacagtaaacggctcccatttgttgtcggctaaagcactgattcttcattttccatcccagcctgtcctgctctggcctgccctgtgctcaggaagctggcggtccccctcagtggatcttcacccacagggacaacctgctgcagaccgggtaggagggaggcaggggcctcttcccctctccttcctggcctggccccacacccaccagtgttggtttcactctgtggctacgattcttcctgggtgccctttccattgcacaactcctctaggctctacgaacagaacttctccccgcccccaagcctcttagggtgagacatgttgtcggtctgccattgttgctggtccctaaatagcagcaccctttgaaggatccttgaaccatgaccacaccgcaacaaagagtccttcatcaaactcgcttccaaatcccctcccaagaacaccttcagtttcctgcaagaaccctgactgctgaagccggattttgactaagcttctaccttgtaaaccgtgactgtgggattggggtcgaggcgcaatcagaggttgtataaggcactagatcaaggctgcctgtctgtcaggagtgtctg

SEQ ID NO: 917130 - DNA, 4001 bp, Homo sapiens
aggcagcactgaccaatcccagcggcggccccgggaaggaccggactcagcgcagctctatgtggagcttcccacacacccagggcccagtacagggctcggctcttagatggtgcttgagaaatatgaattgaatggacgaatgattgaatggacgaggccaggtgtggtggctcaccctgtaatcccagcactttgtgaggccgaggcaggtggatcacgtgaggtcaggagttcgagaccagcctgactaacatggtaaaccccatctctactaaaaatacaaaaattagccaggcgtggtggcacgtacctgtaatcccagctactcgggaggctgaggggggagaattgcttgaacccaggaggcagaggttgcagtgagccgagatcacgctactgcacttcagcctgagcgacagagtgagactctgtctcaaaaaaaaaaaaaaaaaaaaagagtaaatgtaggaaatgttgctttcactggtcttttggcctaatatatagtattctacattctacctgcataaaccaggtaatgcaaggagcccaaatttgaatactcacagtacttaaaacctgaaactaacaaaggttagaaaaacagaatgaggccctctttctcctgcctggcccggccccaggctccatgtggtaaccctcccctcaccatcacccttgctttacaaacccgcccctgctgtgctttcctgtgctgctggctttatctgagccccccagggcagtcaccaccctgcttgggccccctgctgctgcgcctgtcaggatcattgcgagatccgtgaaacctgaagctgggcactcagtaccgctcccggctgcaggtaggagctgaccgaagggtctgtgtgccccccgtgagccttgacaacctggtcaggaaaagactcgtctccatctcccatctgtgggtggaacaaggaaggctttgcatgtgatgaggaaaacaaaacaaaacaaaaaatgcccatgaacaatcccgaactcttcctgttggcaaaatccttccagtgagattattttcacgaattcagttgttaaatccgtaactcaatcaggccttttaagaattaagcaaggaggcgtggcacggtggctcacgcctgtaatcccactactctgggaggctgaggcaagcggatcatgaggtcatgagtttgagataagcctggccaacatggtgaaaccctgtctctactaaaaaatacaacaattagccggtcatggtggcgcatgcctgtaatcccagctacttgggaggctgagacaggagaatcactggaactcaggaggtggaggttgcagtgagccaagatcgtgccattgcgctccagcctgggtgaaagagtggaactccatctcaaaactacaacaacaacaaaaaagaattaagcaaggccccacccaagacatagaacctaccttttccggcctccttgcccaagctcggtatgattacaaaccagggcttctctgtcgcagggttgcatctccagctcagaagctctggctggacgtgtgagacaggtcccttctccgaagaagcggaaacgtggacatgacactggcatttctggtttgggcaccacttgagcagactggcgtcttccccccgacggtgttcaaaaccctgatggcgttgaagcaaggccacctaaactcagccacgactaaaactccacagctgagctttccagcgtttgtcggtatccttgctgtgtttgcaagggtcattgtttagattctctctgctaaacctggggatggtcaccgtgttgaggggaaaacaacttcagtctgtttttgctttaagcagaggtctgcttgggtactcttgcctgggttcctacgaagtggacacacgaagaaagggcccgttctctttactcccccaccccccagtagcaccctgctccgaatttgcaatagcagatgaaggccggagctgcggcccctttctcagttgtttttgatactgaggcataaacagaacaacattcaaaaactgaggtgagggaattaattattaagcagcctaccacaatcaatacaatattgctggtgtgtttccttttagatatttctggagtttgctttcaatatttaattcaacccaaactggtaggtcaccaccatatgtagcttgtattatacggtcacacaccacagaaagctgaagttctcgatgcagaattcaggtgtgttaggctgtgattttaaaaggcttacccttccagggcaggttacagtaagagacactttcacacactcttttcttgtctgccttttaaaaaacatagtagggttacttgctttgcaaattcttcttaaattaacaatttgtcagagtattggttaaagattgtaagaaatggaataattagtatcaaagtgcaatggctgtgtttctcagaattagtatgtgaacaaccagatgaaagtggggaggagggaatatttcctttttaaatcactttaggaggccgacgtgggcagatcacctgaggtcaggagttccagaccagcctggccaacatggtgaaaccctgtctctactaaaaatacaaaaattagccagccgtggtgacgggctcctgtagtcccagctactcaggaggctgaggcaggagaatcacttcaacctgggaggcagtggaggttgcagtgagccgagccggcaccattgcactccagcctgggtgacagagtgagactccgtctcaaaaaaaaaaaaagtcatcgagttattttgctgaattattgagtgaattcgcctcttccctggccagcatctccttagcagggaaaagggggaggtctgggatgaggaatgatcgggttgtctgatcaggggtgtctgttaccagcagtgcttagaaacagacagttatgccttcccatgtctacatggtcgccttgagcacaattgctcagaaaagtgacatcaaaatgcccaccgttccttcaaaacctgcagatcaaagcagttttctcaaattctcttcttgcattctgagatatgatttctacctgctgagtagctggtccgacgccttcaccattttagatgtttcctcctgagctgagacactgtcctgctttaaaaccttcttggaaaggacaccctggccagtcactgacgcctcctgagttcatgtcctaggactgccgtaacaaagtgtcacacactgcatagtatacacaacagaagtgcgttctctcaccgttctggggaccgaatgcccaaggtcaaagtgtaggcagaaacatgcccccttggcaggctctggggaagacccttcacccctctcccagcccctgctggctgccagccatccttgccatcctcgccatcctcgccgtcctcaccgtcctcgccgtcctcgccatcctcggtgtcctcgccgtcctcgccgtcctcgccgtcctcgccatcctcgccgtcctcgccatgctcaccgtcctctgtgtcctcgccatcctcgccgtcctcgccgtcctcaccgtcctcgccatcctcgccatcctcagtgtcctcgccatcctcgccatcctcgccgtcctcgccgtcctcgccgtcctcggtgtcctcgccgtcctcggtgtcctcgccatcctcaccatcctcactgtcctcgccatcctcgccatcctcggtgtcctctggttggtggacacatcgctccagcctctgccttgaacgtcacttgctggtctcccgtgtgtgtgtgtgtgtgtgtgtgtgtgtgtgtgtgtgtgtgtgtgtgtctgtgttcagatttccttcttcttttttttttgatatggactctcgctctgtcacccaggctggaatgcggtggcaccatctcagctcactgcaacctccgcttcctgggtttaagccattcttgtgcctcagcctcctcagtagctgggatcacaggcgcctgccaccacaccaggctaagttttgtatttttagtagagatggggtt

SEQ ID NO: 917131 - DNA, 4001 bp, Homo sapiens
cacacacacatacacacaccacacaccacacacacaccacacaccacacatatacaccacacactacacacacaccacacgctacacacacaccacacataccatgcacatacacacaccacacatacacaccacacactacacacacaccacacgctacacacacaccacacataccatgcacatacacacaccacacacaccacacacatatataccacacacatacacacaccacacacatacacacaccacacacacaccacacacatatacacaccacacacacacaccacacacacatcacacacacatcacacacaccacacatacacacaccatacacacacaccatacacacacaccacacacatacacacaccacacactacacacaccatatacacacaccacacaccatacacacacaccacacaccatacaccacacaccacacatacacacacacaccacacactacacagacacaccacacatacacacacaccacacatacaccacacacacacaccacacagacacaccacgcagacaccacacaccacacacaatctcaaggggatttcaaatccctcagactgaatgtctgtggtaagaggtgggttctaggggcaagctcttgcggggaagggccatagccggcaggaccccgtggcttaaggctactgaccagatggagttctttctgaaactcctctttgtgatttttctttttgagttccaggcagttgttcttcagacccctatacttctccttgccatcccccttgtctgttttcacgatgtccttagttccgctgagctccacggagtaaatttctggggttttctgaaagagaagcccaggtgcaatattggccccaaatggggtttccgaagaggtgctgagcgcccctctgcggggtcaggacctgcaggagtcaggagccccttctccctttccttccctcctctggggaggccggagggagtcggacagtggagtctctcccccacctcccgccgaccttggcttcctctccgtccgtgtagaggggaggcggggtgggcacaggccagccagcagctcctcagggtgacccttctctgggtggagcaggtgggaagttacccccccaactcctgactgatgcctccaaggagctgtgaggtttccttagaacctcgaggttccttaggcacctcgaggtttcctctgaggtgtccttcccaggggacacaacagctgtgcgtcctgtttcttggggaggaggcacccactaagcttacgaccctcagtcctgatcagggggccctaaccggaagtcttttcagaccgcaacgaatccatgtcaccccatcctccgagtcggagcccgcaggtgccatggagctggcctaggaccccttggccccttctcgctcctctggactggcttctttccccagccagccccggcggccgcacggagccgtggcggggagtcagagaagcggtgcccaggccggggggcgctcagaggaaaggcggcctccccttgccccgggacggggcgtttctcctcttcgccttttcctcgcttcccgtcagcctgctccggtccccggggccttggcccagcgtctcgcatcctcggccggcgcgggggctgcacgcacctggtgcatgctgggctggtggcgccgcgggctgcgggcgtggagcgcggatccgggaccgcagcggcggagcgcacggtggggggcctcgtgtggctgtggcagtggcagtggctgaggtgttggcggtggagataccggcggcggcgcgggccctgcacgcacctccgcggccgatcgccagccgctgcaccggggaggtggcaccagccttaaatgccgcccgccccgcccacgtccccgccagggcgcaggccagcggacgcctcggagggtaggaaacccgccggcgcgcgcgcagggagggggaccgacagctaggggtcgggagagtccaggattgaggaccccctgggaatccccttccctttagtagccgaacgccagggggcggggtctctagggggcgggtccggcatccaggtgagtacagccctggttccgctgggcgcccagagccggaccagctgctccggcgagctcccggcacgcccacgtcctgtccaggcttccctgaaaacccacacatgcctttttttaaaaatgtaatttgcctaccaataaatcaatttataaaaatgtgtatgcagagaaggggaaattgcagtttctaacagcaactactgttggagatgtcccggctagaaaaggccaatgtgtttttgagaatggatttagataggtaaattcaagcttccgagagaatttgggaataactgagagactctgaagagtagctgaattaatttgccggatccagataagaatttggaattctgaaacaatttggagagggaatggggaggagagatgagaggattagggtcggtgagaccacaggaacctggggccccaggctgcgggtgcgcaggagcggaggctgttggctggactgggctggagaggtctgtctccacctatttatgtcactcccagctgagactctatacatgaaggagaaaagaatttctgaccctgaaagttgatgtgcatactaaagcagtggttgttttatactgctaagtttgggttggtttgttatgcagcaatagataactgggacatgctccatgctcttagtgcccagcatgagtttttgcacaggatagaaaaggtattttccccctgacacttgaaacataattactccagatgagaaagatagcctgaaaacaatatatcagagagatatttagcagttaacagtggaggaaatcaaacacgttcttttaaaagaatgaatcgtgaagtcttaaagtcagtgaagaatattaattaatggagaggaacataaaaaataaaacccacgaatagagtttagtaatcagcacctatttagaagaacaataagaaattgacatgattgaaatatatgaaagggagtagagataagtttcaaaagagggggcactttattgggcccttgatgctctgctaataagtttccatttagataaggactaataggagggtgctaagttttattctttttgaaagttatatatcaaatatggtaagaaagattgtcattttgaccatatttaaaatgactaagagtgaggagtccagagaagcagcaaaagtaacaatcccatcatgcagtgactagaacatctggcagaaaacatgaagagcattgggtacatttagaaaaggtagaagaaaaacaataagcttgtgcccggccgggcgcggtggctcacgcctgtaatcccaacgctttgggaggccgaggcgggcggatcacgaagtcaggagatcgagaccatcctggctaacacggtgaaaccccatctctactaaaaatacaaaacaattagccgggcatggtggtgggcgcctgtagtcccagctgctcgggaggctgaggcaggagaatggcatgaacccgggagacggtggagctttcagtgagtggagatcgcgccactgcactccagcctgggcgacagagcgagactctgtcacaataaaaaaattaaaaaaaaaataagaaaaaaaagcttgtgcccaattctaattaggaattaattataacttcctgttcctttcagatgctaaatttccataataatttcagagcatgactatagttggtggtgagggacaattgggaaaagaagcttattttgagggaatttgaagtgttagcagttagagacgtggttttgtaaagtagcagtagagacaaagatactttctcatggcatatttgtgatcttagattttccacacctctctgttcatcatggctttcaaatgagactaagggaatgtgttgtacccgacatagtgaactgtctccatagtgctgcacacataggtctttccccgctctccct

SEQ ID NO: 917132 - DNA, 4001 bp, Homo sapiens
caggtcctgcctcagtgtccccaggtcactcctgatgtggcttctatttgacttggccgcctgtcccccggggacctacgctcgtgacggcaggggtctctgttcccccgctgtgggtcctgtgggtctgctctggggcccgtggtgcacagtggagatgtgggcggtgcgtgtctccccagtggctgctgacccactctgtggcgagtctcagctccaccaggcggctcagccctgcctcccgggtaggagcccgaggttggccaggctgggcccaggctcgggagggccatgctccctgcacttcctgggcccccgcttgcaccacggtgttcagggcacgctgcagtgcacaggggaggggttgggaggtgactgagagtcccattcccgccagctcctggggccggccgggtgcagctcactctgcctctcctgcacctgcacccgtcccccaattagtaagaataacgtgtcctattccttttgtttttgtcatttcacttgagttgtgttttcctggggccctaagactttcttatcccaaacggaggccatgtctaccggccaggcagtgagaccattccagaaggttctctgtggccctgcagccaggaggcggcacatgggagtctcagcatctagaatggcccaaaagatggggcttccaaggacctggccggcagcccccagcccagcccccgccctcagctccttccccatcctggcctcccgctctgccgccccgcctggcccaggaggcccttctgcccccggtccctgcctctctaggaacggggtatttgttctacttcaaatgcgcccatgactccagctggctctggtgccctttgagaccgtggagcctccagcgggggctgcagccttcaccagcactgtggtgagtgtgggggatttggcagcgtgtcacgggcattcccagcacgtctcagctacacacacaggtggggcgggcctggggctttgcattcccacctcggctctgggacccccagagccgggcaccgtgggaattgaggagggcctgaccttccctgggagccggggacggcaccaggccagccagttcagccgcatcccgacgcccaggggtcgcagggggaggtgggggcgcacaggtgcttcctccagactctctcataaggggtgagggcgtttcccggaacgggtgtggcagccctgatgtagacgcagacgcttccaccacctgtgtggccttggaggcccaggcatctgctttcctcccaggagggccaggctgcccgcgcctctgtgcagccacggggacaggaccctgcagggcagacctcgcacaaggcgcaggtgctgcaggctgaggcaggcctggtttactccccacctccgcatctggacgccagcgggtgtcccggaaaggggctggcagccgcgtctcggcagagccccttattcaggtcattgcgtgaatctgtgtgaccaaggaatcaccgttgccacctttcacgttattttcaaaatgattcactttagaaacatacttttaaaatgctgttctcagacatacggctgacatttggggccagtctgtggacgccctccaccggcgttctgcagctggggctccaggtcaactcagccttcaggatgctctggggaccctcgctttccctgggaggcaagtgaggccctggccgaagcccgtccacgccatccaggcagcatcggggtctcactgtcaggggccctctgctcccctcctcctgagctcacctggaggctgcgtcctcagagcggccccctccatgcacccagccggcccgccccccgcacgtaccccaccgggacagggtgcggcccagcatctgccccgtgtccgggttccagcagtaacgctggaactcctccatgcgctggccacacgtcttcttctcctgcagagccgccatcgtccctggcctgagatcctcccgtctgctccctgcaccctctacgcccagactgaggccagatgcccacctctgggctttatagtttcctctgccagaggtcaaaggcatcgcaggcgaaggatcccagggagaggccagggccgtttatcagcgccggccatcgcctcaccaaacaccaggggctgggtgcagcccggctgttgcccctggggcgggccaggcccgctttcctcaccctgctgctcttgggacgcccttggctgcagctttgtctgctctgattgcggtgagggcacgttccggggtgagcagcactcacaggcccttccccttccctcctctccttcaggagggagattgaggtcagagcagagccggcctggacccactgtgtccacgaccttgggctgagccagctggggccgcatccctggcctgggagggcgtgaggcaggcgagtgaggggcgaccggctccctgggccccccgctgcggccgccccgattctgggtcacccagtggaagggtgagcctggcagctggagctgggttggcagggaacacaggggtccccggggactcctctgcctcccagattcacccagagcagcaatagcctcttagatccccagagggcagtggcaccgagggccctttaggatttttttgtgtccatggaggaattcataaacacaaacccctaaatctagtggtcctcaaaatgaagtgcacaggagccctgagcatctgttgaatgcagattcagcccagcgagtcctgtgggggccccagactgcatttctaacagtgctggtgggagggagtaaggcagggtccaggtgggggatgctcagcctgggcagtacctcggggtcaccgggggtccgggcagtgcactggggtcacagggccggggcagggaccatgaagtcatcactgcccacttccgcccggagattctgcctgagcctctcgcccatgggtccgagcaccaggacgtggagggctcccaggcagtcttgttgggcggcgcacttcagaaccccggctcagacgctttgctgttggagacaggggtcctggatggcagatgccattgctgcctgctggctgcagtgcccatctctgcaggaggttgatgggaatgcagggcaaatgaaatgtgctcaggggccttctgacaaatatgattcgaagtcgactagccctgtgtgtccagaattacatgcagagtttcccatactgtcaactctaggccgtccctctcagggacccgtgtaaccaaattcatttcttagaagaaacaaaattcctctaggcattacgctgctttaattttttaggataatttagagtttgcaaaataattgccctaaaattcaaatggaatgatgtcattttagcctggattcctatcatttcttttcttttttttaatttctaatttttatttcttttatttttttgtagagatggggtctccctatgttgcccagactggtttagaactcctgagttcaagggatcctcccacctcggcctcccaaagtgttaggattacaagcgtgagcccctgcgcccagccataatttcttaatggacctatccttcctttaacattgtacccatttctgactttggaatgttagggcgataagaacacagggtctggcagtaaaggccacagtctgattgttcacagactgtggccctgggaccccagagtgccaggggtctgacaacacctggatgcagcaactgttgtctgtgaagggtatagatgctcttgaaatgaacaaagtatgaattatttctaaacatctttgaatttagtcttcctaatgtagtctctgaatttccagaagcaggtacatgtgctgagctgtacacatgttatcagaatgaccttcttctggacacatacgtgtggggaggagggccagagaccttggtagagggcagtttccccacagcatgctctgaaaacatagaactaggtgctctatacaaattgggtgccagacaatgaggggggcccagaatcccacccac

SEQ ID NO: 917133 - DNA, 4001 bp, Homo sapiens
ccaagcttagagcccccacactttctgtaacctcaggatagtataattgtggcaaccaccttgccttcctttgagatcttatgttgtaagactctcacggcacgttagtaaatgtgtatgccttctctcctattaatctgccatttgtcagttgatttttcagtgacgcttcacggggcacaaaagttttcccttaactcctacgctatacatttgtttatccctttttttttcctatctccaactaggatgtaaattcatgagggcaaggtctcggtcctacctaaatccccagtgtctaaaactttgagtactatgtgtttgagcacatagtacacacaaaaaaatttgttgaataaatgttgataacaagatataatacctacatcaaagggtttttgtgaggattaaacgcgagagtgcacatagagggatatgagtgcctaacacaatgcccagcacacagtaagctcaataacgctggtcaacgctattatcagaggattccagaagacaggtcaacatgggcaggagcagttacagaacgtttcaaggaggtggcaggtcttgagcttgatttggaaggataatgatttctttctctaggtggggacactgtaggaagttgaaatctcctctgtacaagccacccctcccaacatttcttcatactcctatcaaatgcatagtcatcataccctacaaaccacctactaaccagcctctctctgtctgtccactaatccgttagttttcatttctgtatcaccggagcctagatgaattcactactaaagggcacccagcaacgtcagtgaattagtttcagaaatctgtggaaaagaaacagcctactgttctgtccagcaatccaggcctaagtatctatcctaaagaaatagtgtcagcattaaaaatcatgtacaaagatgttcacttgcaagagagagagaaaaaaagtagcaaacagaacgtccaccactaggaaaccatgaataaactatgatgcgtccaaactgtgcagaggttgcactgaattagacagttagtgaaacaatctctaagatatatcgttaaactgaaaaaagagaatgcacatacagtgatctcatttaggtaaaacaaaaattttaacacctcatacaaatgaaacctaaagatttctctgaatgtgtgcatattacatatagatacatgtcttgttaaccactgtatcaactcaacactgtgtgcctgaaacatagaaagttctcaataaatatttgccgaatgaagacatatgtacgtgaatagaaaaagactgaaaaatagatctgctttttgtgcaaaatatttctgtgctgtttccatttttaaaagactgtcttaatgtattacttgtacaattaaaatgaatttaaaacagttataaaagttccaggacctcgatataccatatctggtccaagcaccaggctctgagtaacttctccaggtaactaacttcatcgttttgagccattagggctctagcacagcaactcgacgctcactttatctctccagcatcagaccccttaaaagcataaagatgaattttgaggtgcggggttttccattgctcccaaacatcagttgacggcacactttttctaaagggtccttttctcccacgccaagacatccctggagctggggtctggctcggccttccctgcgcaccccctgggggcgagtaagcgccgaacgcggggaggaaaatcctcctggtgggagtgagcacgctgcgcggacgcgggggaacaaaactcactttccgactggccccttctctggctgtgatctgtctctcctgctcaggcatcgtcccgcacggacaccgaattcttctctgatctggctcagagcaaaaggtcacctggtcggtggaggagagcggggtgttaaagtcccgggagaggaggcgcagagtgtgagggcatcggcgcggctcggctctaaagcaaacaggggtccgggaaccgccccttcatttgggaccggggaagccgcagccctcttcacacggatgattcaaagttgcgcgccgccgtcctcccgacctgggggcacggggatgagagcgtgaggggagagtgggcctcggaccctcgcccactccccaggtggctgggagtgcccaccctggaactgccggccccgccggtgccacagtgttctctgccgtgccagtgccacaatgtcctctgccgtgccggcgccgcagggcggaggcctgtcctcctccgcggtctcggccacctcgcgctggtgcgctccgacactgtactgggatctcacgcgtgtgcgggagcgggagggcaggtgagctgcgcagagccgggccgcagactcagctcccagggctcacccaccgcctgcggggaaggtgcccggcggcgccgcgtcgggtccgctctgcgctgccccctcctcggactctgcgcctggctgccggacgccgtgggtcccaaaggaagcaaccgcggcaagagtgaactccgcacctggaaaatcgatccgctgtgcgcaaaggccagccaatggcctccaacgggcggcgggctttgggccgggaacgggggcgcaggcgcccaggcgggggcttctagtgggggaggtggccgagggagggagcgacggctgtcaatcacaggccacgccctcctcagcccaaccccccactgctgtcccgcccacgggggcgggagccgtgtgcgccacgccgaacactagtctacgcctcggcatattctattggctggaaggccgtgggaagcggctaccagtaaccaatagtaacgcacaattggcccgtgggggcggggcgagcacggcttgctttctcaggagccaatagggaaaaggaaagtgaagcgtttcctgagttcgggggtcggcggaagatggcggccggcgaaaggagctggtgcctgtgcaagttgttgaggtgagcagccggtcgtgtgggctcacagacgttttctcttctgtaggggtacttgcccgtccagtgtagctaaattttgcgggcaaatggccttccttgtcatgaatctaaggtaatttctcaggccaatgagcagtctttctttttcttgggggtcttctatatagactggaatagactaggtcttaaagactcaatttaccgcgttttcttctgcttcactgttggccgaggggtcgagttcccttccctgcttcagctttttttttccctttcacactccagttagtctgtcataaattattcatattcattccttatttttctttacgattgagccacgagacattttccaatctatcatgtctcttttcggtaaagaagaaaccggatcttccttctcatcttagtttctactcttaaactcaccaaaactgccattgttaacacgtcacttaaatataaagcttatgttgaatcctctgctttttgataatctgttactttaatttttatgatgtaagaagttacataaaatattattttatttgtattacgtgtatatgctgtttcttctagaaaaattagaaaatagataagtaaaaggaaaaaaccccaggaatgctaccatccggagatagccactgttaacattttggtgaaaaaactcccaggcttttttccacctttgttgttgtagtactactgtattttaaatgccttgccctccactaataaaacagaaggcctagtatattctacctacctagtttttttaccacctacatatttttgttcaggctgaaaatttataattaacaccatagcttcctgaatagcagtatatacctaattctttcaaaagttcaggcatttcttcttcgtttttgtccactctacttcaaattctgtaatcattactttaaacattttgaatgagaaagtctgttatcagagccttttggttcttccctgtcatacgtaatattcctcagtgctttacattataatgtttaaataaactcactaacca

SEQ ID NO: 917134 - DNA, 4001 bp, Homo sapiens
cccctcttttctaagtcacatctgtacacattgacagctgatcacataattcttaggggcccgtgtaaaatgaaaaggtgggccccttgttcaaaaattaagactttcaagacagcaacactgggcagaacatccaagcaagtgctgactcttgtaagagccagactctgagcagctgcagggcatacactcttggagccggtcctgccgacgactcttgaatctctatgtctggccttgcacactccccggagccccagactcataaatccagctctctactaatcatctcctcttggatctatggtaggcatttcagaccaaattcttcacaccctcccttaccgcaaaagagaaccctggtcctccgcagtttccccatctcagcaaggggtgcattcttccggtgtctcagaccaaaacccttgggggcatctttgattcttttcttgtactgaagccccacatccaaatcataagcaaatgcctttggccccacctgcaaaggtacagagggtgtccccaggtctcctcaggctgcctccaccttgggaaattctcacacctgtatgactgcgccctcccactgtctctctgccacagctcttccctgctatttagtcttgaccctgcaccccgtgaccccttcaggctgggattctcctcaaaatgaatgtgaaagtgtcctgactttacccaagtttaacaaacattggcttaaattacctgataagcttgcttccctctcacgttactcaactacagaaatacaaaagtcgcttatttttatgtgcctattttctcaaaacaaataaaaaagcacgaagacaagtgaccccagctccaaactgtacaccctctaccttcctcatgtcaaagatctacctgcaaacttgccgcagtcctgaaacggtaagaaatcatttttggggctcctctttacgtctgcattaactaatggtctaggtaaccctatcaagtgtcatagccacataacatccagctccacgacatcatagtttctaaatgtgttctataatcatagaacgcgggcctctaacagtgtgagtggtcgggtatggtacatgcgtgtttggctttaggtttcgagttccaacacccaggcgcctgcaggcagggtatgtgtacgcgtgcgtgtgtacgtgtgtgtgtacctgtgtgtgtgtgtgcgcgcgcgtgtgcgtgtgtgtgttcgtctccagatggttgtatgcacggatggttatgagccagtacgtcgccgctgtgagcgcgcgaggacccggggctccaagtggtgagaatcactcgagggacccttcggatgcctttttccccctctgcttttgagctctgcagcacagcggtgccggccgccggcagggaaggctgcatcttctctgcgccgccaaaccgtgcccaccatcgcggtgactgccgcctaggtcgcatccctgagccgcatccgcgcgtaggggcgcacgggcacgcgcacagggaggccgcacacacacacacacatctgtacagggacgagccgggggtctctgacgcccgccgctcacctcgccccggcctggagccttttggccccgcaggtgcagcgacgcccagcccccgtgcggccagcgcgccgcgtcggcggatcctgcagcccagagagcccagggagcccagggaggggagcggggcgcgggcggggcagtgtcgcataaccgcaggcgcgccccgcgccgcccccgccccgggcccaccctccctcgccgcgcccctcccagctcacccacggacgagcggatcctcgacctccgcggcagggacatcttaagagctttgtccaggcctgcgccgttcagcatctcgcccgtgtcgggggctcggcggccccgggcgagagacggaggctacgcgcagggctgggcgcaggggccgccgcccgaggaccatgggtgggccagcgcctcgccgggctgctagctggcggggaccgccggcgcctgtgccgggccgcgcccgaggctgcgccgtccgtgccgcagcggccaatgcggcagcatccgcgaacgccaccgcggcgggccccgctggcccgggctgcggcgtgggggcgggggaccggccctgagcggagccccgcgggaggaggagcggacgggaggctgggagggatccgcaatattacgcaggaccggggcttttaggtgtcggggaaggcgatggggagggcttggtggggtgggagattgggcctgtactttcgggggctcttccaggagaggggtgcacctgggggactcggagtctctgcctgtctgctacctatttacctgcctgtcacttgtcctgtgcaagtggaggcgctgtgattccccaggactcatccagtccctttcttttcgcagtttctgttcttccgtgcccagcctggtgggatctgtgtagggacttcgtggaagggttatttccaaggtgtctgatgtgtggcttggcactcagagaagtcgggggtctccagccccccactctccacaacctgcctgacattctaactacgcatattaaagctgcaggtagccctagggaaccttaacagcaaccttctcaacccccgcacgcacacacacacacacacacacccatcgacacacacacacacacacacagacccatcgacacacacacacacacacccatcgacacacacacacacacaccttctttcataaaacaaaaccatcgagaggtaagatgacttgtccaaggtcacttgatctattttttgttttttcttatcgcgtaatgtttagactgtgcttggtctttctgggcacaatcccatgaagataagaagctatctttattgtgcctgatgacattctgacctcggagtaaaaacggaacaaaacaaaaataaaactgttcaggtgaaagtctgaccttgcttttactgatgcgagcattacatttcttttaacctaaattaacattagggactgacaaggagtagtacagagttcagcaaaaagaatctgtgctagcaaagacagcagtgcggcctgagctcctcctgcctggcctctgcatctgattttattttcttttactttttttttttctttgacagagttttgctcttgttgcccaggctggagtgcaatggcgctatctcggcccactgcaacctccgtcgcccgggttcaagtgattcttgtgtctcagcctcccgagtagctgggattacaggcgcccaccaccacgcccagctaatttttgtatttttagtagagacggggtttcactaagttggccaagctggtctcgaactcctgacctcaggcgatccacctgcctcggcctcccaaagtgctgggattacaagcgtgagccaccacccccggcctctgcttctaattttcttaagaacaaacatccaggccgcgcgtggtggctcacgcctgtaatcccagcactttgggaggcaaaggcggtcagatcatgaggtcaggagatggagaccatcctggctaccgcggtgaaaccccgtctctactaaaaatacaaaaaaaaaatcgccgggtgtggtggcaggtgcctgtagtcccagctactcgggaggctgaggcaggagaatcgcttgaacccaggaggtggaggttgcagtgagcggaaatcatgtcactgcactccagcctgggtgccagagtaagactccaccaaaaacaaaacaagacaaaacaaaaaacaacatccaaagggacaggcaacttacactgaaaactgcaggctggcaagaatctacactaaatgtagcttcaggtaggattctttacctgtctcttctgggccctcaaaaaatttttctgataagaaatgaatctttatcaggaagatgaatcaaaataaaattttctaaattgttgagctaagcttcagagtgggagaggttttctcagtggatcttcattgctgctgaggataaatcttaaagctggggctaatcc

SEQ ID NO: 917135 - DNA, 4001 bp, Homo sapiens
agaatacagcctcccgtctgtgccaacccatgaaagccagttcccaaaggccaaatgtctcacagggaccttttaatgcattttatgtcttatttattgtgcttatctgacaacttcacaaggctaatagacatctctaaaaatgtgttgacatcttagtgcattctgaatgtccttcagtgtattatcaaatttggacagtgcaaatattcccctgggggtaataaaaaatagacacagcaatacaaatgtgcatttcagcccatatgttgtatatattatatacaaatattatacccccagtacagcattataaagtgcagtgctataaatagaataccaatttcagctaccacccacccatttggttagttgcaaaacatccaggcaacaagccaactgatgcagccaggagtcacccagtcgctttcccaaacctccaacctccctttctcccagggctgccacccagcaatgcccttcttccactgaagccgattccagccaaattcagtcgctccccaagaccaactacagccttctctgccggaggtgccctaatatttttaattacactgctgcctaattaatcatgcatgtaaacaattaccaactaatcttgctcttttcccacacttactgagcgcctatagaaatgccagaagtacacaaatgcagcaaattaatccttattcagagagcttaaatacaaataaaaacaggctgtcaaggttccggtgggctaacaagagcagtgcgcaataacgctacgtcttttcctaaactgcaccattctgccattactaaaaaatctgaaatcattgccttttcacaccagcaagtctgggttagaggacaaaaactctgtagcagtctgaaaaaaaaataatttttcgctcaagctttcaaagttgaacaaatctgatcatgaaagtcaattacaaggctgctttttttttttttttaacttttatcacatcgttttaagataaaggggggaaatgcccttgcgaggagaaaagaaataaaaaagaatgggcattacagcagcaggagaccgggcaagcactgctctgctcgcagacgtgtcccctgatgtccccagcggagacccgagacaggagcaagcctccccgccgcgccagctcccgcggaggcccagcgggcgcccctgtcctcctccgggtcggaatccgggaagggctggcgccgagctggccgcttatcctcaggggccagggcacgtcccgaaggccctgcggaggggcgcgcggacaccgggaccgcagtcctcgcccccgggggtcgaacaggagccgcggggcctcgagggccgcctcgccggctcccgtccagcctcccgcccggcgcggggcgcgcaggacggcggagcgcgggcggaaggcaggggggcgggaccgccgccgccgccactcgcgctgttgcaaagtttcttcggtggcacagttcctgcgcgcttcctgtgggggcggctgctgcgccctcgccgccccgtcgcccgccggttcggggcggcagaggctgggagacgcgagtctggggccggggcggcagcggggacccaagaccgaaaggggccgagcgggcacgcctcgggtcccgggcccgggtcccacctgggcgccgcgagagggcgctgctgacggcgcggcgcggcggggaccggacggcgggacgcgcgcgccggcggggcagggctgggccgccctgcgcctccctccccgcgccgaccggggcacgggcgactgtgcccgcgaaccccacgcctcgcccttgcgcgcctggccgcccgctacttacccagggagcaggtgaggagcgcgagcagcgccggcggcgcgagcagccaccagcaggcgggcggccgcatcctggcggcggaggctgagcgccctacctgggcgcggggaagggagacgcgcggggagcggagctgcgccgctgccgccgccgccctgccgccgcggctgacccttctctgccggctcccctcctccctccgtctccgccgcgccatcgccggccgcgccctctggcggccgggagcgggagcacccctgtgcgcgcttccagcgtctgccgggctggcggctgcggctggtgtccggcccgacgggctgctgcggtagaggtggccgcggctctgccctcacggcgccctccttcgaggcgtctgacctctgccccctccagccaccagcctccacccctcctcttcctttctcctctgcgtccctcctgacctaggccgcgtcccctgccttcatgccctcccaccttaccgcgtcacccccatcagtagttctacctgtgaagtggaagcgagcagtaatcacttttcctccctgctaatgtattatctgctgtggaaaaaaaaatgtaatcaatagttcaactcttaatattgttggcaccaatgctctactttgatgaaggtgtttttaatcagctcaactaatttacttaatatcccctttaaatggaatttggccaatagcctaggtctgggatttggcttttaaacaagtttgtgtaaatgtaattttctataaatgtaattttaagtgttcaccataatggaagagagtgggtgtaattttattcaaaatataaaaattaattaaactggaatacagagaagtggagcaatgtgggagtgcctcctgttcccgcaggactgcgaagggctttcctccccagcccggtagagtggtggccctgataggggactggtcctgttgtgttgtgtggtgcactgaaggggaaagcattacaagtaagaactagaggctcccttcagtggttctgaactccttcgtgcctccctcaagccttggctcacttctgtttccaaggaagtgcacaggaccaagtgcttttcccagccctagtttagcccatgacctcttgaaggcagtttctatgttttccttcatatttactcatttgttggatacctactatgtgactgcaactctgctaagcaccctaggaatgccagtatctttcacatggacatacaacattcacctacttgctaaacatttaaggaggaggaggccctgggagtacaagtaggatggccctgggaatacaagtaggatgtcctggagacagagaagcaggtgctgaataaacatttgtaggcttgagccctcttaacttgaatgcgtttaggggacttaggctctaatgcattaggacagtattgtctgcaattgtgcaatacctgctgggattgttttgaaaaggaggcctggagacaaagaattttctctctgtgtggtttatattgacttcttaaaactgggaactaaatatttcacgtgtgatccatttagtgtgagtgcaaatagttcccttttgttccattcgcccaaggtttatggtctcttgtcaataccattttgatgggaggaaaaagaaatgtagggatccttccatttcatttcttagtgaagcatttcaaatctatggttgactgaattcattgcttttatccttgggaaattctcaagcttacctgcctagtagttctagattgtttccaatttccaaagctgttttcgcttttttccaagaaaatattccttgcatatgtggggtagtaaacatttaaccaaactgtttaattagacacagaagactaataagcagggtcaaatgcctactccacgtgggtaagcaactcctggtgcttaatcaatgttttcatggaaattcatcatgttagagtattactatgttccagaacaaggtgtggaaaattaagccctaaggacaacagagaacacaccgtttaagtaataaacttgccctggtgtccttcctttccacagtagacatagataaatggcacattacaaagctccataactcacattttaaaaagaattgcctttcacttactctagtcatatgataaatggacttgctgggagttctctctcccaatcacatgtcaggagagtttcctagag

SEQ ID NO: 917136 - DNA, 4001 bp, Homo sapiens
gtaaagccaatcttcatcgcctaggttgtagtcttttcaggttatattttgtctgtattctcaagtatcaagtttatgagagaaccaaacatctctaaaaacctcttcagtaaagccttttcgtataacaaaataccctgatcgatatcctgtatagaaggcaactgaggagcaggggcattccggtgacctcgtaagggtcgaatatgcgcgggagggcgaaaccagaggcgcatagcccccggccgagctaatgccacccttcccacccggtgtcctcccgcgccctccaggccccttcctccccttcagacctgcgggtccccagagccgaggcgccagcctgtcaaaagataccgggagtcctccgcgcctggcgccagcctccagcccgcgcccctggggaggccgggagcgtttccaccaccgtcctctgacaagctcgccgctcggccgggctccgaggccgccgggacggagtagacagtcgcgcaggccaagccccgccgcgcagaaccagtgcgcgcggaggcgacgcgggcagagaggaaggagcgcggctgcgctccctgcccgtggccaacccagcccgcgcctccgcgcgtgtcgcgggcaccccgagtccccagcccgcagagcccaagggccgccgaggcctcctcgcccctactccctcctctaccttccctcaccggccggaagacgaggctctccgccagggggagcgcgccgaggcccgggggtgaccgcctcgaacatgcttgccccgggccccggggacgctgttggtgttaaagggggcccacgggcaattgctgcatccgggctaagagctggggctccgattcgactgtttgagtaaacgagtcggtatcattaataatgacaattgcacaaaagaaaataggaaagaaaccccctttcctggcgccgaaccaggcccgccttggctcggagccaccggctcttctgggttttcggggcagctggcaagagggaggcaggcagaggaggcggctccgggtccgactgccaagctgaccagggcggtgagcccgtgactcctggcggcggcccagacccgggtgctggcgtgcaggggaaggcgacggccgctgcgcgctggttcccggaccctgcccagcgtggcgtggagaccgacggccgcacaggggtcaccggtatccacatggacacctcctaatcgagctttgttcaccagagggctaggcccttctttccctggcgcttctcttccccccgcgacacagctcttccccctactccttcccgggagagcgcgcacccatgcagtggcctccatctggacgccacggggctcggagaggcgatgacccctggcagcccaggccggtatcgaattaagtaaaaattttgaatgcccaggtggctgcgcgtagagcggcagcaggccgggctggcggcgcccaggtgcccagcggagggccaggcgctcagagcgcacagccggccgccacctcggcccctgccccccgccccggggtacctctggcctgtcgggtggggtcgggtcgctgcggccgcggcggaacccggctccggacctggatcacagcatccagcgcgcggccggcgaggcgcctcctgttaccctggggccggcgtccctcgtcccatcggagcgagcgaggatgctgcggtgcccggcgacaggtcgtcggatagcattgacagcaccttcctttcaaggtgctttatgcctgccctctccacgtgcggagggcagggtgaccaacgcaaaaacctgagctgcgcctccagacccgtgcgcccctttgatgggcatctgtggtgtttatctgtcccccgaaagcggtgaccgagaagtaaataaatgggcgagaggtggtaaaatcctggcagtatttccgctcgtcctgtcgcgaactacatatcccagggagcccggggcgccgggacgcgtgtccaccccgccatccacttggagaaggcgttactgagcctggcccgacgcacgggccaatcccctcgccctacaccttggctggaacctgagacggattcgctcccaaatgatgctccagtggcaggagcaactcaagttcatcattgtcctgagagagaggagcagcgcggttctcggccgggacagcagaacgccaggggaccctcacctgggcgcgccggggcacgggctttgattgtcctggggtcgcggagacccgcgcgcctgccctgcacgccgggcggcaacctttgcagtcgcgttggctgctgcgatcggccggcgggtccctgccgaaggctcggctgcttctgtccacctcttacacttcttcatttatcggtggatcatttcgagagtccgtcttgtaaatgtttggcactttgctactttattgcttctttctggcgacagttccagcactcgccgagaccggcggagaaaggcagctgagcccggagaagagcgaaatatggggacccgggctaaaagcagacgtcgtccttcccgcccgctatttctatattcaggcagtggatacatcagggaataagtaagtcgagaaacggctccttacctattttggatggcggttaaatctgtttctccctttaagatttttctttccaagaactcgtttctccacagcagtttatattccaggatatttggttacccatttttctctgtagctgtagaaattgttccgaattataatatatgcaatataatgtattgtatataacatataaaataatctcctagcaattttgattcagattcccacattatcagggcaagacaaagtccctccactttgctggaaatactgtttctaactacttttcgcataagctattataagggatttaaacctagttgttagagacttgatgggcttcatctttctctggtgcggccctcaattttcaaggagacatctgcaggtaagcatgttttgaaactgaaaaagaaaaatgaagtactatttgaaacttcagagttcggaaggaaagtatcgaagtattaatctcctatatgattgtaacaaatattttgttccaatgaatttaatactttaacatcatacttaaaacttatttttataattcctatacttctgaaatgattgtctctattattggtggatgctgactgtgtgtatttcatacagaaaaaaatactggaataaaaggttgtcaagtaaaaggcaggttgtaaattttgttatttggcaaaagatgatacactacctactactttgcttttgcccatggctgagcgtgagttttttttttttaagacagggtttcacttcctagcctagtctggagtgcagtggtgcaatcacagctcactgtaccctcaacctcccaggctgaagctatcctcccacctcagcctccctagtagttgggactacaggcgtgtgccacctcgcctggctatttgttttttattattattattattatttgtagagacaggatctcaccttgttgcccaggctgatctcgaactcctggcctcaagcagtcttccctccttggcctcccaagatgttgagatagtaggcatgggccacagtgccaggcctgagcgtgatttataatactgatattgtaaagattcattggcagagatttttcaaaataagatcattatctttgggagcatcatttgatcacaaatatccagatgtgatagcatgaaataagttagtaagaatatttttccatatggaatgcatgagtatgttctgtgcttatatagattaatagtcttaacatactccattgtgactgtttaatgaaactgtttcatgttatcttggccattgtcatcctcatttttttaaatctctgatccatcatattcattctggtactaaaagcataagagaagaagaagcaatcatatgttagaggaagaatgtggaggagaataatcaagtttccagactgaagagcataacctttgtgtgtttgttcgt

SEQ ID NO: 917137 - DNA, 4001 bp, Homo sapiens
atggtagaaaagtctaaaatcaatgatctaagcttccatcttaagaagtcagaaaatgaagaacaaaataaacccaaagtaagtcagaggaagcaaataataaagagcagaaaccaatgaaatagaaaacaaacaattgagaaaattaacaaaagctagttatttgaaaagattaacaaaattgataaactcctagctagattgatcagttttaaaaaaaatagagaaaataaattaattaccagtattaggatgcaaaaggagttgtcaacaaagattccttagatgttagagggataacattaactttaagcccccaaatttgacaacttaaatgacatggacaaattaaaatttgtcagaaattaacagaaatcaagacaactccataattataaatacagattttaatatctctctgaaaatcctcagaaaacaggaggaaaaaacacttcccaacttttcttagaagatttgcatagccctaattccaaaactggccaaaggcattagacaaaaagaaaattgcagactcattacctacaaatttagacaaaaaaagcaaaatccccctcctacccttaagaattacaaatttacctaaaattctatgaaacaaattgattttgcagataaacaagcagaagcattaaggttttataaaatcatcagagaagactagaagtaaatacaaatcctagtttgacctcctcttattaactctgcaacttcggtctagagatttatcccttctaagcctcaatttcttcacctacaaatggggctaacagtacctgcctcataaaattcctgtattactttgaattcaaaagaaagaagtgtaaagtatttctatctgccataggaccaccccattgcaactgtgaaagttatgcacaacctcggtaaacagcatcctcttaaattgagcagtacacaacccacttggtggtacatggaggctttgctgggtgcctaaaaaattttaacaacaaaaaaagctaaaacattatatagcaggaaaaaaagatgtttggtcaggaaatacaacttcatgtgcctataaaactatgaaacagtagtaagttattctagccatgttattaacatttcattttctaagctaccatctgtttataatattttacattattagattttcaaatctctcaaaatatttgatacaaagcttatgcttgaagtttccagtggaagccccgcaatgaactacatgccctacgtcaaggttactttcctaaaactacattgacagacaagatgatagccatgttccttatctagtattatacaaggaaactatgtgtaatggcaagattaaacaagacatagtgtttgttttctcattattttcacatatgaacttcatggctccctccttacctgatttgtgtttcgaatttgtggtcaccccatcaaattcagatttatcaatttcccatgcgagaggtagcttgcccaggctgttggataagttttccaagctattttcttcattgtagataatttccgatgtactagtcgggataccaatgtatcttgatgaattatttccagcagataaagaggtactatcagggaggcaaggagagcgggatggatttggagttttatagattgaggtcgcctggttgagaaaggcatagtccgaacagatggcataaattttttcccgtgtatgagtcactggacaactccatggataatgaccatctcctttgggacccaagggtgctcctgaggcacttgtgcagaaagattttacagcaccttgtagattctcttcaggtgactttctctcagatttgtgctcaccatttccagaatcatttgacctttctgtttctgcaacgttaggcattgaatgcagtgtaaaagtttctattactagaaacaagttgcaactctatctgtttcttgataaacaactttgacaattgtttacagcatgctataaaagcttgagagctgcaaaatgagctcctaagaggaaggaaaaagaatgatcaacaatccaccagatacacaaagagccactaaaaagcatagcaagttttatgcatacatatgccttcattctatattaattttacaactactatatgactggagtcacaatcactatcttattttttaaattagtctaaaatatgcattaaattattttcaaataattaaaaaataattaaaaagcaaatagcccaatttttttttttttgagatggagtttcactcttgttgcccaggctggagtgcaatggcacaatctcggctcaccgcaacctccgcctcccgggttcaagtgattctcctgcctcagcctcccaagtagctgggattacaggcatgcgccaccacgcccggctaattttgtatttttagtagagatggggtttctccatcttggtcaggctggtctcaaaatcccgacctcaagtgatctgcccacctctgcctcccaaagtgctggaattacagatgtgagccaccatgcccggccagcaaatagcccaatttttaaaaatgggcaaagtatctgaatagtgtcttctccaaaatcagtacagaaattgccaataaggccaggcgcagtcactcacacctgtaatccagcactttgggaggccaaggcaggtggatcacttggggtcaggagttcgagaccagcctggccaacatggtgaaaccccgtcccttctaaaaatacaaaaattagccaggcatggtggcacatgcctgtagtcccagctactcaggaggctgagacataagactcacttgaacctgggaggtagaggttgcagtgagccgagatcgcgccactacactctagcctgggcaacagagcgagactgtatcaaaaataaaaataaatggccaataagcacatgaaaagatgctcagtatcattagccatcatggaaatacaaatcaaaaccacaatgagattaacacctcacacacgctagaatggctataatcaaaaatgttggtgaggacgtggagaaatcataaccctcatacattgctaatggaaatgtaaaatggtccagttgctttggaaaacagttcttccaacaattaaacagagttaccatatggtccagcaatttcatgccaaggtatatatccgtgacagatgaaaatacatcttcacacaaatgttaatagcagcattattcataatggccaaaaaatggaaacaacccaaatgtccaccaactgaggaatgtataaataaaatgtggtatatccatacaatggaatattatttggcaataaaaagaaatgaagtactgacccatgctacaacatggatgaaccccgaaaacattatagtgagtaaaagaagatcgtcacaaaggaccagatagtgtattattctatttatataacatgtccagaacaggcaaatctatgcagacagaaagtagattcatggtttcctagggcttggggtttgggggtgatggagtttctttttgtaataatgataatattctataaatgattgtggcaatgaacacacaacttgtaaataccctaaaagccaatgaattgcataacttaatgggtaaattatatggtgtgtgaattatacctccataaagttgtctaaaaaataatgtattagcaagattttttacgtacataggcataaaggatacatgatgaataacggccacagatttaaataaacacagaatacagaaagtaaattttccaaagattcatcacctgacagaaaaacggatccaatcaaggtgtcactaacttctgatcagtttcaggaaaaactgaatttcaagtctaaactgattcctttagggaagaaaacagaaagcttaaatagcaactgagggcatgcaaggaagctgaagatttataccagaggaagtccttggtgaattgaaccatcccaggacacgcagcagacaaccccaggcaggtgcccgggcagggtatgcgggtttctcagggct

SEQ ID NO: 917138 - DNA, 4001 bp, Homo sapiens
tattgtcctaagtactaatcatatcacctatcacactgccttgatattactcatctagttctgtttaacacattaaaataggggttagtttctttttataatagattgcaagctaagaattattttgacagtttcaaatggttgggaaaacaaacaaaaaaatatcttgtgacatgtgaaaattatatgaaattcaaatgtgtccataaataaagctgtattggaacagagtaacatttatctctttacacattgcctatggctgcttttgtgatacaagacagaagtgagtagttgtgacagagaccaaatgacctgtaaagcttaaatatttactgtctggcccctaacagaaagtttgtgacccatacatcggagtataacctccttaaggatttgtgcctaatgatcctaacttgttcacagtgtaatccctgcttagcactgtatctgacacatagcaacactcaaataatgtttgccaaataagtgagaacagaatattagatgatgcagcttcttctctaatgtattagtagctatatcgtcaaccacagaatgtagctacacccacaactgcaggaagctaacgtatgttcttgaacttaaaaaaaaaaaaatcttctagctaacttattaacctaaccactagattataatgaacactacaatttaaaaaagtatattgcagctatatatgctccataatgtatttcctccttaccttgtaaagacagatgtttacatttaaaattatttgtaattacttacatttaaaattagttgtaaacactagtcaggaataacttactggtaattttgttgatttaaaaacagaaggactggcgagagtttgttcatggagattagaataatcactaggactttcaaaaggatttaaaacagggatccttcctggagtttctggtgttatttgcatctttgattccttgacatctcccatagcacagagagaaaactaaaaagaaatcaagagtatgcatgttaaaattacaaagtcccatagatattaattttaactattaaaatgtactcgacaaatgtgtcacaaaaaacaactcaaaacctcacactcttggggctatgatacagcttacaaaaaaagtatcacatataaatgttctcaactgatcctcgaaacaaccttgaaagctatagcagtaacttactagtgatattattttgcgaaagtattaagctcagagaagtgaagtggcttatacgcagcaatcaaatatgaatgaattcagatctgcctctgaggaaactaaaggttacaacaggcccagatctcttctcaactaaaggacttatagctacaattttttttaaattcatcatctcatgtctcaacactatgaacattcttcggataccctatccaactacagttgctattaaacaattctttgtagcaagcaggtaagagatgaggaagcttgtgcctttcttgcacatgagtcctagccagagaagtatgattgacaggggctaggaaattaactgcctggggtcccctttcctccaaaaatcctcctttcgccaagacctcccctccacccctcccgggatagaaagggagactgcattacttgcaatcaaaggaggctacagaggctacaccttggcggggtggggtggaaaagagtctacttctggaaggttgagatgcagccggcttccctggatggagtgcgaaggaggcgtcgcccccaaccctacgtggccactctttctggtgcccctctcttccacacctactccctgactgctcccattcaccaggggcgagcgggcaggcaagtcaggagctgggaaaagaaacctctccattcagacaggaggaaaggccagggaccacaaagagcgtacctaccggtgcgtacaaaacgaagcccccagtaccgactccagggagctccgggggccaggccagcttccacgacaggcatagactctttaactccccgcttccgcgctgtcttgggccaaccagggcacggggcttgtgagcgactagccaatcgtgtcgtcccgccatccgcgaaccagccaatcgcacggaggccgcgtaggaaattcgaatggcaactcctcgctccacgttccgcgcagaggaacgtggctccaaattcaaatcaacgcagcctcacgccggcggcgagcgcgaggggcggagcctgcccggcgtgggccgagacgcgctgtgtgattgcctcggagagaggaaggcgctccagttccgggtcaggcccttctcccgcctccctcggccttagccatggcgagtagcagcggtgctggggcggcggcggcggccgcggcggcgaatctgaatgcggtgcgggagaccatggacggtgagtttccgttgcgctccctttaccttgcgtgccttcccagagccaaggcccccaggcgggaatgagcctggggaggacttcaggtccccttagtgccccaaacggcatcttccaagatctttggtagggacctgccagggccgcagggctgatggccctatcccttgagagttgtctccgccgctgcgtagtttgtcgcgcgcgctaggcgttgcggcccctagtcagccggttgcgcaccgcgtccctctcgcgcgaatgccgcgccccctctatcccgcatcccaggtccgccctacccgcccgatctcctgcggtgacagcgtcacgcccaccccacccagtacacccgttccctcctgcgtgccgcgtcccacccgattcccgcccggggcgcttcgggggtccccaaggttgggatcccggcggggacaggggccaggtgtttggtcaccgctatgcctcctgttcttcgcacttaagtaggcacctttaatatccggcgaatgaacaagttcccctttggtcataattatcctagtttcctcttgaagcgggtgacaccagtgcccaagtgctatggtgtcgcctgttttcggccccggaggcacgtgtgtgtgaagcctacacaagtgttgcagaacacgaaatttgtgtcttgcggttaccctctgtctaccctctaatgtcggttctgccactttatgcccctgtggtgagcttggactagatacttaaacatcattgagcctgtttagttttttttttttttttttctgtaaaataaaaccctacctccaggagttgtgaatatttaaataagacaaccatgtaaaaacatatcaaagatgatcaattatttttatattatttcagatggcctctctcttgtagtcttctttctttgtctcctttttactcacatccacctgtattatgagtgtttgatcgatgttgttatttgcagtgggcctagacgttttccagggtctactcacgtcagcttccgtctctgttaaaagataaccctatgaaattctcactgctgtatctctctctccttcaccgtaggctctttttttcttttttgagacacagtcttgctgtagttgcccagggtggagtgcaatggcgcaacctcggctcactgcaacctccgcctcccgggttcaggcgattctcctgcctcagcctctggagtagctgggattacaggtgcccgccagaacacccggctaattttttgtatttttagtagagacggagtttccccatgttggccaggttggtctcgaactcctgacttcaggtgatccacatgcctcggcctcccaaaatgctaggattacaggcgtgagccaccatgcccggcctcattttcttatgtagcacttgcagaggggctgctggctttttctgcactggtcctggttttcttttcaaagaattacacttttagagcctttgcatctaatttttcacttgttcagtatctaccttgctgtttttctgagaatgttactcttaatattcagcttatttttctatccttttcgatgtatcaacacttaatagttttattttgtaagtggatttatgtatgaatatatatatgtg

SEQ ID NO: 917139 - DNA, 4001 bp, Homo sapiens
aaaaaaatatcttgtgacatgtgaaaattatatgaaattcaaatgtgtccataaataaagctgtattggaacagagtaacatttatctctttacacattgcctatggctgcttttgtgatacaagacagaagtgagtagttgtgacagagaccaaatgacctgtaaagcttaaatatttactgtctggcccctaacagaaagtttgtgacccatacatcggagtataacctccttaaggatttgtgcctaatgatcctaacttgttcacagtgtaatccctgcttagcactgtatctgacacatagcaacactcaaataatgtttgccaaataagtgagaacagaatattagatgatgcagcttcttctctaatgtattagtagctatatcgtcaaccacagaatgtagctacacccacaactgcaggaagctaacgtatgttcttgaacttaaaaaaaaaaaaatcttctagctaacttattaacctaaccactagattataatgaacactacaatttaaaaaagtatattgcagctatatatgctccataatgtatttcctccttaccttgtaaagacagatgtttacatttaaaattatttgtaattacttacatttaaaattagttgtaaacactagtcaggaataacttactggtaattttgttgatttaaaaacagaaggactggcgagagtttgttcatggagattagaataatcactaggactttcaaaaggatttaaaacagggatccttcctggagtttctggtgttatttgcatctttgattccttgacatctcccatagcacagagagaaaactaaaaagaaatcaagagtatgcatgttaaaattacaaagtcccatagatattaattttaactattaaaatgtactcgacaaatgtgtcacaaaaaacaactcaaaacctcacactcttggggctatgatacagcttacaaaaaaagtatcacatataaatgttctcaactgatcctcgaaacaaccttgaaagctatagcagtaacttactagtgatattattttgcgaaagtattaagctcagagaagtgaagtggcttatacgcagcaatcaaatatgaatgaattcagatctgcctctgaggaaactaaaggttacaacaggcccagatctcttctcaactaaaggacttatagctacaattttttttaaattcatcatctcatgtctcaacactatgaacattcttcggataccctatccaactacagttgctattaaacaattctttgtagcaagcaggtaagagatgaggaagcttgtgcctttcttgcacatgagtcctagccagagaagtatgattgacaggggctaggaaattaactgcctggggtcccctttcctccaaaaatcctcctttcgccaagacctcccctccacccctcccgggatagaaagggagactgcattacttgcaatcaaaggaggctacagaggctacaccttggcggggtggggtggaaaagagtctacttctggaaggttgagatgcagccggcttccctggatggagtgcgaaggaggcgtcgcccccaaccctacgtggccactctttctggtgcccctctcttccacacctactccctgactgctcccattcaccaggggcgagcgggcaggcaagtcaggagctgggaaaagaaacctctccattcagacaggaggaaaggccagggaccacaaagagcgtacctaccggtgcgtacaaaacgaagcccccagtaccgactccagggagctccgggggccaggccagcttccacgacaggcatagactctttaactccccgcttccgcgctgtcttgggccaaccagggcacggggcttgtgagcgactagccaatcgtgtcgtcccgccatccgcgaaccagccaatcgcacggaggccgcgtaggaaattcgaatggcaactcctcgctccacgttccgcgcagaggaacgtggctccaaattcaaatcaacgcagcctcacgccggcggcgagcgcgaggggcggagcctgcccggcgtgggccgagacgcgctgtgtgattgcctcggagagaggaaggcgctccagttccgggtcaggcccttctcccgcctccctcggccttagccatggcgagtagcagcggtgctggggcggcggcggcggccgcggcggcgaatctgaatgcggtgcgggagaccatggacggtgagtttccgttgcgctccctttaccttgcgtgccttcccagagccaaggcccccaggcgggaatgagcctggggaggacttcaggtccccttagtgccccaaacggcatcttccaagatctttggtagggacctgccagggccgcagggctgatggccctatcccttgagagttgtctccgccgctgcgtagtttgtcgcgcgcgctaggcgttgcggcccctagtcagccggttgcgcaccgcgtccctctcgcgcgaatgccgcgccccctctatcccgcatcccaggtccgccctacccgcccgatctcctgcggtgacagcgtcacgcccaccccacccagtacacccgttccctcctgcgtgccgcgtcccacccgattcccgcccggggcgcttcgggggtccccaaggttgggatcccggcggggacaggggccaggtgtttggtcaccgctatgcctcctgttcttcgcacttaagtaggcacctttaatatccggcgaatgaacaagttcccctttggtcataattatcctagtttcctcttgaagcgggtgacaccagtgcccaagtgctatggtgtcgcctgttttcggccccggaggcacgtgtgtgtgaagcctacacaagtgttgcagaacacgaaatttgtgtcttgcggttaccctctgtctaccctctaatgtcggttctgccactttatgcccctgtggtgagcttggactagatacttaaacatcattgagcctgtttagttttttttttttttttttctgtaaaataaaaccctacctccaggagttgtgaatatttaaataagacaaccatgtaaaaacatatcaaagatgatcaattatttttatattatttcagatggcctctctcttgtagtcttctttctttgtctcctttttactcacatccacctgtattatgagtgtttgatcgatgttgttatttgcagtgggcctagacgttttccagggtctactcacgtcagcttccgtctctgttaaaagataaccctatgaaattctcactgctgtatctctctctccttcaccgtaggctctttttttcttttttgagacacagtcttgctgtagttgcccagggtggagtgcaatggcgcaacctcggctcactgcaacctccgcctcccgggttcaggcgattctcctgcctcagcctctggagtagctgggattacaggtgcccgccagaacacccggctaattttttgtatttttagtagagacggagtttccccatgttggccaggttggtctcgaactcctgacttcaggtgatccacatgcctcggcctcccaaaatgctaggattacaggcgtgagccaccatgcccggcctcattttcttatgtagcacttgcagaggggctgctggctttttctgcactggtcctggttttcttttcaaagaattacacttttagagcctttgcatctaatttttcacttgttcagtatctaccttgctgtttttctgagaatgttactcttaatattcagcttatttttctatccttttcgatgtatcaacacttaatagttttattttgtaagtggatttatgtatgaatatatatatgtgtgtgtatataaatataaatttactgtcttgtatatttccttggaaaaaggtagagtataagacctcacttctagcctattttcttaggttagctgtacttaggttccttatgtatatggccacaggatcccatttgaacagaaaactcacatttt

SEQ ID NO: 917140 - DNA, 4001 bp, Homo sapiens
gtaactgaaaactattaaaatattccttttttcaacgtgaggttaattttttttcacatacttctaccaaaataacagattagacacagataagtgaatccagctatctctatttagccagacattaaagagaactgcaaaaatgtaaaaactattccactcacttgttttcaaaaagttatttttcctaagaatgttgtgataatatgcaatgggttagctttcattatttttaagtaaattaactttaaattcttagttttttgtttgtttgtttgttttgagacagagtcatgctatgtggcccaggctagagtgcagtggcatgatcttggctcactgcaacctctgcctccagggttcaagcgattctcctgcctccacctcccgtgtagctgggattacaggcacgcaccaccacacgcagcacattttttgtatttttagtagagatagggtttcaccatgttggccaggctggtctcaaacttctggcctcaagtgatccgcccacctcggcctcccaaagtgctgggattacaggcgtgagccaccacgcccagccttaaattcttagttttaaatttctaatatggtaagctacataaacaaaagcactccgggggtcctagatcatttttaagagtataaggagtactgaaaccaaaaagttggacaacttctgccataaagtaacattaatgcttctgatttgttagtaattgttcctactgctagtcaaggggccagtttcctctttatccactagacgttctatatttatcatgtggttaacctgcaaacgatgattatgttgttaactggatttatacacacataaggaacagtttatggttctaagcaacactgtgacgtactgggtttttagcaagcattttttagaaaacactttctcggtgtaatttataaagttatataaaatttgtcaatacctgctttgttgcagcgtgtcttaaaaatttcaaaaaatgttggcctctctttggatccaataggcatttttacctacgatattcctccaatgcttggtaaataagtctgcaaaacagaagaccaaaatgcacttacacagggatgcattccttattatgtgactgaggtaaaactcagaagcgctggaaaatttgtttgaattctaattcagtcccatctcctggaacggtaacagcttactgtgaggatgggaacattttacagctgtgctgtccaaaccggtgccactagccacattaagcactcgaaacgtggctagtgcgactagagaagaggattttcatacgatttagtttcaatcacgctaaccagtgacgcgtggctagtggggacagagggctccagttagagaccaacgccgcctggtaattcccatcagcatgtcttcggaatacagcaattaccaggggcttaagtaaggcaaatacagcgtgcccagcagctgtaaaacacttccccaaaacagcaatattccgttaaagtgatcgtgtttccaagaaatttcagatggcgtcatctgggacagctgggagggaagttaagtcttgagctgaaggcggagcccaaaggccgggccggaggcgggaaatggagacccagggaaggggcggggctcgaatttgcttggcgaaaatctgccttcgggcaaggacctttctctcaggcatgggtgggggttggcagagacaaaagggcaagaagccgcggcagcgacccggggcgtgaggcgctcccccgccacgctggactgggactgcggaagacgcgctcgtcccaacccactaccaccaccactaacccgctccagaggtgcagttcttttttggccggagtaagctgacaaaaaccgcgccggtcacaaatctgtcccctcacgcttctcccggcggcgacccaccgccgcaaaagacacccgaggcgcagcagaggcgcagcagtgccacagcggctccgcctctgccgcctagtttcagaagctcgcgccacaagcccgcgctggccacgtgacgccgtgacgcgacacgcagcacacgcaccacccggaagtcaggcctgggtgggccgctgcgggtatttctcagtgtggcgaaaggaaattccttgtcaggcatcccaaccgtcagtatctgaccgaataaagcgggagctggagtgtgtgttctcttctcgctgacccttaagagtcccaggccaccctgcttggaggggccgcccctatgcctactccaagtcccccatccctttctttttgctccagctcatgtttgggtgggcgccctcgggacacgacctgggacctatgaaatacctttgttctgaccttaaaagggatgttctctcaagacctgttccccaaagcgagccgatcttacaaaagcttagagtggtcggtgtgtggttgtggatgacttcacttagtggtagtgggcggggctgttatttgaaatcagaggattttagttccagtagctgttctgctattgggtagcaggtgttcaagacctccgagcccgtttccttgcttgaaaaattgtgaaacccatcttaactcgctcatgaagtgtgaggtaccttgctccgcagggcttggtagtatcttttgcttttttttttgagacggagtttcgctcttgtggcccgggctggtgtgcaatggcgcaatctccgctcaccgcaacttccgcctccagggatcaagtggttctcctgcctcagcctcccgagtagctgggaatacaggcatgggccaccacgcacggctaactttgcatttttaagtagagacggggtttctccgttgttggtcagtctggtctcaacctcccgacctcaggtgatctgcctgcctcggcctcccaaagcgctgggattacaggcatgagccaccacacccggcccatcttttgcattcttaggattcggatcacctgtcttcctcgcaggctgaactggaagacctgacttcatctccgaattcgttggttctgtaacatgcctaatacaaggctgaatagggtttgttgtaagacctacaaaaccttcaaatggattcagtgagagttgctcccatgggggccttgctgcttccagaaggtgcttgagcagtaaacagaagcaaccttggattaggaaaagggtgggctccgcttggttccttagggaccattttagtttgataatcagtaatccttagttgtagaaggaggccttactaatgcagatagattctaaagcttttgctctaagtctaattcgcaaagaaatacgtctgtgatccttactaataacagctgccacttaccaaacattttatgagttaggcattctgctttgggttttcaagcaataccatgtttaatcttacagtaatcctgtaaattggtcagtattgtcagatgaggatactgaatcaagtagttaagtaatgtgcctggtagtaaggcccaggtttgaattctagtccatttgacttcatacacttaactaacctgtgatttatttaccctataaatcagaacaatatgctttgtcccctttttgtgggggaggggtgtctcactaggagtggactaatgagaacccgtggcatgtcacacaagtctcagaaataacattttctgtcattttatacagccccccatacctttatgtttcttgttctctttgtaccagggacttgcaacttattagctccaccataatagactttctcacctattctcttctagtgcagctgctcaatttactatttgtattcaatttacaatatgctttaatttttcttaaaaacattatttccagctgggcatggtggctcacgcctgtaatcacagcactttgggaggccaaggtgggcagatcacctgaggtcaggagttcgagaccagcctggccaacatggcaaaaccctgtctctactaaaaatacaaaaattaactgggtgtggtggcatgtgcctgtaatcccagctacttgggaggctgagg

SEQ ID NO: 917141 - DNA, 4001 bp, Homo sapiens
gactcactgggcatacaaccctcccagtaatatatgtaaaaagcgacaacagtcactgccttggacaaatcaagacaagatctctatacattgatatcatatgtatgtatagagaatagaggccatcattctgcagaatgctgtgaccgcatgagccagacatactggcatggtcagggcaaagggacacagactgcaaataactttgaagttaatgttttttagtccccccaaaatagtgttcttatttagttcacttatttctgactcattctccgattctttacctatatctgtcctttgctaaagaatctcttgataaatggtcacccagtgccctcttcctgattaattttctccaagaacatcatatccttaattctacagccaaggttatcactcctcaagattcttaactctccaaaactaagatttaatgtaaacctgctagaaatcagctgagtgatatctcctgggtttccaaacctcagagcctcagcttcctcctgcatgcactggaaaggacgaatgccctcccggatctgacgatctaagagtcaaaatagctctaggctgccttcatcgaatatattgtcttccatgcactctctatattacacactttatacatttcttcaacatatcttttttttttttttttttttttgagacagagcctcgctctgttgcccaggctggagtgcagtggcgcgatctcggctcactgcaagctctgcctcctgggttcacgccattctcctgcctcagcctcccgcgtagctgggactacaggcgcccaccaccacgcctggctaattttttgttttttagtagagacggggtttcaccttgttagccaggatggtcttgatctcctgacctcatgatccacccgcctcagcctcccaaagtgctgggattacaggtgtgagccaccgcgcccagccttcttcaacatatcttgacagttatttttttcctgcactgtaaattagcatagccataaaaatgaaaatgtgtacaatctgaatatgatgaacctgatcaggaaaaaaaagtacacattaaaatttgtgcaaaataatctataagcttctctagaaagctctcttaaaaagatccatcataggccgggcgtggtggctcatgcctgtaatcccagcactttgggaggccgaggcaggcggatcacgaggtcaggagatcgagaccacagtgaaaccccgtttctactaaaaatacaaaaaaaaaaaaaaaagtagccaggcgcggtggcaggctcctgtagtcccagctactcaggaggctgaggcagaagaatggtgtgaacccgggaggcggagcttgcagtgagctgagatcctgccactgcactccagtctggacaacagagtgagactctgtctcaaaaaaaatcccagcactttgggaggccaaagcggttggatcataaggtcaggagttcaagagcagcctggccaagatggtggaaccccatctctactaacaatacaaaaattagcagggtgtggtggcccatgtctgtaatcccagctactcgggagactgaggcagataattgcttgaacccgggaggcgaggttgcagtgagctgaaatcatgacactgcactccagcctgggcgacagagcaagactacatctgaaaaaaagaaaaaaagcccactattcttatgacttattctatggtttttctctctcctcccagccaattgcagagttccagcagaagaatttcaaaatctgcttttatctcctctttagcctcttcctcaagaatgaattttgaaagcggcttacccctttcctacccaaaactgtatagacatctgactattttgcaaataactaagcaggattatcccacagataatataagcgttgttttaggacctagatggcttaaattgaatgtaaagaaatcctttcctgatgaacttacctggaccctagggctgcaggctggacccagatactgtgcaaaccaagaatcaagggccagctaaataaaatcagccttcctgccatacaattccccagtggatatgtctgcaaaatagcaggaaggggagggaacagaggaaggccaagatgtcttggaagagcttcaagaattacagcaacacgtaaatcaggtagcatattctaccagcaccacttagtttagaaaagttaaatccttttgaatgaaatgagggaatactttcaaggggagtctgaaggaaggagtgccccaggcaggtttctttcatatatatatatatatatatatataatactttaagttctagtgtacatgtgcacaacgtgcaggtttgttacatatgtatacatgagccatgttggtgtgctgcacccattaactcctttctttttcaaagtgatgttcatgcctttgcttcagtgcttctccctgaccttggggtaattacgggcaacaggacaaaactgaaggctgctaactgttaagtggctgggtctcatttggatcccggaccattagaattcctaccgcttaattagattttcagatgggtgtgtcgtaatgccttacgagtttaggcatttgtgtaggtaaggattcagtgtccattcccctctcacaatcacacactccacctaccacggagaacgcggtgcaaccatttgttcaatgccagtaatcatggactcactttcctcgtgtctagtagtaacatttatctaaaacttacagtagcttccagaggacagaggagcccagcccggtttcccgagatgccgcagtgcacgcagcaggagcagaggccacgcacagagcaggaggccacgcaaagagcaggagcagaggccgggtgtacgggtgggtgcggggctcaccccagctcggcggcgaggccacgcacagagcaggagcccacgcacagagcaggggcagaggccgagtgtacgggtgggtgcggggctcgccccagctcggcggcgccgactccctctcccgccttactcgcccccgtgcctcaatttccccgtcagtgcagcggacatgacaatgccgtggtcccaggtgggcggcgggatctaattagtcggtgtaaaatgagtgagatctggcttctccccggcaccccgcagcctgcccccactcttggtggctaaacgcaaggagcccctgagtcccagctccgctgggggctctcagcagttctggccgggctccctcttgctcgcgtggctggtctctgacccctgcaccgcaggcggccccgacggaacgcgcgacgggtccccgacctcctgctggggacacccgtctcgctgcccggcccttccccgcttcccgcgcctctgcgccccggagagctctgagacaggaccacctgggcagcctgccggcctggacctctgcctcagagccagcgacggaagcacagcctcgggcctccaccggccacgcgctccccattccgggctctcccacgtctgcacactccagcccagccacgcggagaggcttccagaacctgccctgcggccccgctttgctgacaccccactcactccgtgggttcttcctcccgccaggaccctgccggggcctggggtccgtgggaagccggctcaggaatcaggatcctggcctcctgcttacagggaaaagggctccatcctcctggtgtttcccgactgcagcgcctccagcctccggggctgctgcggcccaggttcagctgggttcactccagctttgctggtctcgccagtgcagagtaggggcgcgcttatgacctaacggtcatctccccacaactctcctggaagaaaatgccacccccatctctttcactgtgtcctatacatggagccactatgctctgccctatgggttctggggctcgccccctccccaccctagcgaccgcccttccccagtgcagcccaaggttgggaggagcagatcactttgggaagcaggtggatattaagagtaaacaaaaagtg

SEQ ID NO: 917142 - DNA, 4001 bp, Homo sapiens
aggtcctgagacaggactgacacaggcagacttatttctgtcacgatgtctgttctcctgggacaccagcgctcctgagtggggccttggtcagcgtgggacctctgaatggagggggcttatccctacatttgcccctccctgcgctccccttccctcccctctactggctgctcccctgtgtcttcctctccttccctctttttgttcccctgcttggctctcgtttctcccattctctagagcagtggcctctgagctttcatgatcacgcaccacaactcacaaagcatgaacacagaccccaatcagtagacatttatatgtttctacattatgcacaggtagtatatgaaaaatatgtttggtataaaacatacacaaaaatacactttaagatggtaagataaaaatgaagtaaatttttagtgtgagcaatgtgattgaatgtccttctaagaaagaatatatattacaaataatacttatgaattacatagaaaaaatagatataacatttgcttctaagaagtatgtaaaacttgaaagaatggacattggtgagcagaggagagaaattcaacacggaagaggtagagaaatttggtattgaatatagaagtgtttgtcttagttctctgtattttgtatcacctatttatctccttttatgtgtaatattttataacaaaaatttaaaaaatgaaaatcctaaacattcagaaataaaatacacacagacacagacatacacacacacacacacacacacacacacaccactgtggtcacagtgtgagggcagaagacctgatttcattaagggtaaggttttagtattcatttggactgggctatttgctaccgggggactggaacagtctcaatgagctggagatgtgaggagccaggagaagacacctcacagagcagatgtgccggttagaaagaaataaagttgcttcctggtgacccttggcttcatccagcccattcaaaaaactatcaggccaccaaatgccataaagtgagacatgttagaaacacaaacttatttgtaaaaaggtccatagaagttttgatattttctttctaatgccactgaactgtgctcttaacccagtgaatcattctgcataagtcttagatatgtgaccctatggtcaagaccaggcctcaagaatggtaccccattcagaaaccaagtctattggttgttgttatggaaagcactcagacttccaggctttggcaaatctccctcccagaggatggattctgtccccagatccccagaccctgcctaggtcatagattcataagcagcagctgtatgtgtcatctgtcactccgcatctcctgcttcatgacatgatatggtattagctctcacctgcactgcagctgggtgcttgctgccaaataattcatgatcagatctctctattggcctcgtgttgccaaaaatccaacatacctgtcacctgaggtgggaggatccatgacattgtatactactgaaaatgtcctgcggtgtcagagatgagagaacccaggagggcaggggtcatggcgatctggccctgtgctctccaccagcacctggcacagagtctggcatggagcagaccccgtgagtgttgctgggcagatgggtggatggatgaatggggtcaggctccagtgaatgttgctgggtggatggatggatgggttgtgagtgggtaggtggaaaaccacacagatgatgagtgaatgagatgaaagtaatgaagagagaagctcaaaggcagccgaagccgtcaggtgagtacctgcatcgcctttgtcacccttcgctccgtctcgtccatctcttccaggcagaccattgtgaccggggttcccagggattccagggtgcccttgcctgcaggtgtcctgtgagtttatgttccctgtgcagatttcaatggcaagcagaagccaccagatcctcatggttcagatgacagactgaactgaaagagggaaacagaaacccagaggagaaacctttgttgctggggccctggacacagcctccgttctgtgcagtgggaaatggatgagctgtcccctgccccagacccacacctggacagacttggcagaagactcagggcaggggagcaagctggttattaccaggatgacattgtccttggaaggtaacacttgtgattggaaccactcttcaagctgaacgggcaataaaaaaaagccaagtttaaggtcaggatactcttccgttcatcatttcactttgaagaaatcacttctcttaaccacagaccaatgcttacttatctcacaggactattgtaaaaatcaaattttatcacaatatgcataaaggcacatgacaaatagtgaagcaaacatagcattaccatctgatccagcaattccactgctgtgcatctacacaaaataattgaaagcaaggactagaacagatgtccatgttcgtagttgcattattttccatagcaacccaagggtccctcagtggataaacagatacatgcaatgtggtaggtccatacaatggaatattcttcagccttagaaagaaaagaaattctgacatgtgttacatgaatggacctcgagaacattatgctaagtgaaactagctagtcacaaacagacagacctggataacttcagttataagaggttcctagagccgtcaaactcatataaagaaaaagtaggatgatggttgccagaggtgaagagagaaggaaatgggagttgtttgatgggtacagagtttgggaagattttaaaagagttctggagatgggtggtggtgatggttgcacaacaaagagaatgtacttaatgccactgaactgtgcccttaagatggttaagctggttagttttatgttatatattttttttaccacattaaacaattaaattaaatttttaaaaaagtaaagcattccaaacagtcttactgtaatgagaggtattctttgagtcagggtcttgtttttctaggaggccactgtgaagaagggccacacacacagaaaacatcacctagttcgggagaagtgcattttcaagtcctttcctctgtagacactgcccccaccccaggttatccatgcagtttcccccgcagcaggagctaagacaacgcttgggcagtgctccaaacggagcagcaaacgcaaggcctggaaggaagatgaaacgtggatggctgggcctcctgactcagcaacgctcccactcagggctgtggagcaccctgttactctcccacatggcgcttgtcatggcaggggcttgacacttgtttacataattgtaggatgaagaatctgactccccgcctgactgtatttcctcattattgccttcccagtactcaatattaaacttggaacagcagattgaacaaatacttgttgaatgaaattaatgtatcatcatgggagatgtcttaggatatatatataatttttggagacaaggtcttgctccatcaccaaggctgaagtacagtcatgcaatcacagctcactgtagtctcaacctcccagctcaagtgatcctcctgcctcaacctcccaagcagctgggactacaggcatgcaccaccacacccggctaattttttttttttttttttttgagatgtagtttcactcttgtgacccaggctggagtgccatctctgctcactgcaaactccgcctcccaggttcaagcaattcagcttctcgagtagctgggattacaggcgccatcaccacgcccggctaatttttgtatttttagtagagacggggtttcaccatgttggccaggctggtctcaaactcctgacctcaggtgatctgcccgtcttggcctcccaaagtgctgggattacaggcatgacccaatgccactggccctaatttctcttctcttcttttcttcttttttccttccttccttccctccctccctccctt

SEQ ID NO: 917143 - DNA, 4001 bp, Homo sapiens
aagctggtgatgctgtcacactccagaaagctgtagacactgctcattttgtctttttttaaaaaatgtatttttaagttctggaatacatatgcagaacgtgcaggtttgttacataaaaatgtgctgtggtggtttgctgcatctgtcaacccatcacctatgcaggtattaagccctgcatgcattagctatttgtcctggtgctttccctcccattttgctcattttctaacctaggttttaatcaccattctatccaacaaatcattgtttgatcattatttgccagacatgaatctctacttgttttctaggatcgccctaataaagtacacaaactgggagtctttaaacaacagaaacggactttctcacagttctgtaggctggaagtttgagatcaccgtagcagcagggccatcctccctccaaaggggatacaggaggatgcagccttgctgcttccagcttctggcagctggtggcagcatcactccagtccccgcctccatcttcaggtggctgtcctcctcctgtatcagccaaattttcctcttcttacaagaacagcttccctaatctagtatgacccatcttaatcataattgcaaactccatattttcaaataaggtcacatgtacaggcaccgagggttaggacttcagcatctattttgggagacacagttcaacccaatctgccctctggttcccaaaattgatttccttctcatgtgcaaaatacattttcgcaccatgtcaacattaccaaaagtcttaacactttccgcatcaactcctctcaccatctacatcatttaaataagctacagaggagacttactgtgtgattcatcgtgtggcaaaatgtctctccatctgtgatcctgtgaagcgagacgagttaatccacttctaaaagaccgggggttggagggggagacaggcatagggtagacaatccattccaaaagagagaaaggggaaggaaaaaagggttcacgggtcccaggcaattctgaaaccctggagggaaaatcccattagacttctttcactatttcccatctaaaatttttaactgagctatgcaagagtaaaaagttaccggacagagacaccaaacagagaagtgcaggataaatttaccaagagagtaggttaaaagggaaacttctccttcaggcctatggtgggcatttcttgtttactcaagtacctgccgtctctcaaagaatatctaatgtccactggaattcgaatatgtcatgattttactcgcgcccacccctagtcaacttgggagggaagcgcaaccctagccttttcttactctggacacagggggcggtaaaccgggagggcggccgagaaggcgagggggagcgacgctcttgctctctggacgacaacgtgcccacgtcctgaggccgcgcccagacccggaagcggggccgtcacgtggggcggcgtgggctgctgccttggaaacgcggagcgcgcgctcccagcgaaagcagcagggcagggatctgcgttggaggaagggactgctctggtgctagaatgctgtgcgtcggaaggctgggcggcttgggagccagagcagcagctctgccgccccgccgggcgggccggggaagcctcgaagccgggatccgggcccgaagggtcagcaccagctggtctcccgtgggcgccgccttcaatgtcaagccccagggcagccgcttggacctgttcggcgagcgccgggtgagcggcgcaggaggagctcccctcagtccccgagctaagccgacccctgctccgcgcggccagcaacaatcagggcgagattgtttgggcctgggaggaggcgagcagcgaacccaccttttacagtggcgtcttgtgtgcgctctcgatgagggcaaggtcacctctgctttgaggggccgggtttagtggtctcctacccagagtgtcgggtccgggaactgcttctgcatgagccccttgctccacgtgaatctgaatagttcgttctggcagtggcggtgaattcgtcctgccaggacccgccctctgcatacactcaggcgcacccctgctaaagccctttagctccagcgctacagtcctgccttaagaggcctatccctgtgcgttcacaggcggcatcacatggtctttttgcaaggacacggctgcctgcagtcgagtaatggtaatttcattaatacctgaaattccatcatctattaattaatttatttcaaagctttgggctttcttgttttaaaacacaaaactctgttgagacgagtctcacttcccatagtgccatggaattggtcactttgatttcttaccccaggaagtcactagcctgcgttgtctagtgaaaggtgagaggaaggcaaggttggaaaggacttacctgatgcctgttctacttggagtttgtacattttgtccgttttaggttaaggattacttttatttttgccttttaaaatttcgttatactgtattgccttataaagacaagtctagggtattgttgcactgagctaaagtgtgtgattcttgttttatctccattatcagttttgtctatttaaaaattattttgtgtgaaatttgctacaccaccttccttaagggtatgtagtgttggtattaacatagttggtgtgaagagacctacttgtaggcgctgagcagaaagacgtgaggggaagcctgattttgggtggatgagatataactaattttagcttttatttttccctttttgtatcatgatattcggcactgatagcagattttcaaattttagaattgatttttgccttgaaaaaaaaaaagccttattcagttttttagcattatggtcactggtaatccgatagttagaattcccgagagcaatatgggcaggttgtactgggaagtggaagtagtctgtgcttgaatcaaattaaatcagtataaagatgacatttgtttttggtcctgattttcctttgtctcccactgactttcttttattttattttttatcttgtaatatattttgaagagagattactagcttaacttcatccatcccttcttgtagaaacagtagggcttgtcaggcctgaaggtttacctgttcgtatttctgaaaatctatgcgttaagcacctacaaagtgaattaacaaagcctagcatctgctccggtcacttgtttctttcattgagttcccccatgtgttagacattctattggatagctggttaaagaaatgaagggcagggctcttgggtctggaagctcaccttttcaggagagaagactttcaaacagataaattgtaatagagaagtatggaaaagtgtgggctttacagatgtacagagcgggttcgagttctgtctttcccaatattaatttgtgacctcaaacaagttttttctaacgtcttaaagcatgtggcctgatctgtaaaagaatgatactctgttctgtaggattgtgtgatttaaatgagaacctatgtaaagtagcaggcacacttcatggtatgcagtaggtgcatattaaatgctttttccccctgccttcctgagtgtgctaacaagtgtgattgaataggtaacaagagaatggtcattaccattagatcagtgatttttgtttttatcaagatattgaaatgtctttgtaacgtataaaatttgctcccagtttcagcctatgattttaatatgttcattacatttttctaaaatatctattgcttcatagtcaactcatcctccctatttgatagttatagaataattggtactatgtactgagatctcaccttgtcagctgctgctgttagtactttacatatacttattacctgtatccatgctgtaaggtatgtatcgtcattcccattgtacatgatgaaaaaaatatttctcctaggaggagaaataacatgaccagggttataagctaataataattatggc

SEQ ID NO: 917144 - DNA, 4001 bp, Homo sapiens
tacgtgagctctgaggaccaggcctctggcagcattgtcctgcagctgaagctcggggatgagatgtggctgcaggtgacaggaggagagaggttcaatggcttgtttgctgatgaggacgatgacacaactttcacagggttccttctgttcagcagccagtgacagaggagagtttataaatctgccagaccatccatcagaatcagcttgggatgaacttattcagatggttttactttattaattcctccaattattacaataatcataaaaaggtgaaaacggaaaagttattcccaaaactgattctatgtaacttactatttttccaggagtaaatatttaaaatagctgcatggtttattctaatttatttcacatttcttattcctattatctgaagaatcctttgtctgtgcatttcttgtgggaagagtgttttgatatcattttagtgctctgaggagtcatatgaagatgtatccctcatctgtgtttctgaggacattaaggggaaattagagggaaatgtttattccatttagtactagtaacagctttaagctggtgatgctgtcacactccagaaagctgtagacactgctcattttgtctttttttaaaaaatgtatttttaagttctggaatacatatgcagaacgtgcaggtttgttacataaaaatgtgctgtggtggtttgctgcatctgtcaacccatcacctatgcaggtattaagccctgcatgcattagctatttgtcctggtgctttccctcccattttgctcattttctaacctaggttttaatcaccattctatccaacaaatcattgtttgatcattatttgccagacatgaatctctacttgttttctaggatcgccctaataaagtacacaaactgggagtctttaaacaacagaaacggactttctcacagttctgtaggctggaagtttgagatcaccgtagcagcagggccatcctccctccaaaggggatacaggaggatgcagccttgctgcttccagcttctggcagctggtggcagcatcactccagtccccgcctccatcttcaggtggctgtcctcctcctgtatcagccaaattttcctcttcttacaagaacagcttccctaatctagtatgacccatcttaatcataattgcaaactccatattttcaaataaggtcacatgtacaggcaccgagggttaggacttcagcatctattttgggagacacagttcaacccaatctgccctctggttcccaaaattgatttccttctcatgtgcaaaatacattttcgcaccatgtcaacattaccaaaagtcttaacactttccgcatcaactcctctcaccatctacatcatttaaataagctacagaggagacttactgtgtgattcatcgtgtggcaaaatgtctctccatctgtgatcctgtgaagcgagacgagttaatccacttctaaaagaccgggggttggagggggagacaggcatagggtagacaatccattccaaaagagagaaaggggaaggaaaaaagggttcacgggtcccaggcaattctgaaaccctggagggaaaatcccattagacttctttcactatttcccatctaaaatttttaactgagctatgcaagagtaaaaagttaccggacagagacaccaaacagagaagtgcaggataaatttaccaagagagtaggttaaaagggaaacttctccttcaggcctatggtgggcatttcttgtttactcaagtacctgccgtctctcaaagaatatctaatgtccactggaattcgaatatgtcatgattttactcgcgcccacccctagtcaacttgggagggaagcgcaaccctagccttttcttactctggacacagggggcggtaaaccgggagggcggccgagaaggcgagggggagcgacgctcttgctctctggacgacaacgtgcccacgtcctgaggccgcgcccagacccggaagcggggccgtcacgtggggcggcgtgggctgctgccttggaaacgcggagcgcgcgctcccagcgaaagcagcagggcagggatctgcgttggaggaagggactgctctggtgctagaatgctgtgcgtcggaaggctgggcggcttgggagccagagcagcagctctgccgccccgccgggcgggccggggaagcctcgaagccgggatccgggcccgaagggtcagcaccagctggtctcccgtgggcgccgccttcaatgtcaagccccagggcagccgcttggacctgttcggcgagcgccgggtgagcggcgcaggaggagctcccctcagtccccgagctaagccgacccctgctccgcgcggccagcaacaatcagggcgagattgtttgggcctgggaggaggcgagcagcgaacccaccttttacagtggcgtcttgtgtgcgctctcgatgagggcaaggtcacctctgctttgaggggccgggtttagtggtctcctacccagagtgtcgggtccgggaactgcttctgcatgagccccttgctccacgtgaatctgaatagttcgttctggcagtggcggtgaattcgtcctgccaggacccgccctctgcatacactcaggcgcacccctgctaaagccctttagctccagcgctacagtcctgccttaagaggcctatccctgtgcgttcacaggcggcatcacatggtctttttgcaaggacacggctgcctgcagtcgagtaatggtaatttcattaatacctgaaattccatcatctattaattaatttatttcaaagctttgggctttcttgttttaaaacacaaaactctgttgagacgagtctcacttcccatagtgccatggaattggtcactttgatttcttaccccaggaagtcactagcctgcgttgtctagtgaaaggtgagaggaaggcaaggttggaaaggacttacctgatgcctgttctacttggagtttgtacattttgtccgttttaggttaaggattacttttatttttgccttttaaaatttcgttatactgtattgccttataaagacaagtctagggtattgttgcactgagctaaagtgtgtgattcttgttttatctccattatcagttttgtctatttaaaaattattttgtgtgaaatttgctacaccaccttccttaagggtatgtagtgttggtattaacatagttggtgtgaagagacctacttgtaggcgctgagcagaaagacgtgaggggaagcctgattttgggtggatgagatataactaattttagcttttatttttccctttttgtatcatgatattcggcactgatagcagattttcaaattttagaattgatttttgccttgaaaaaaaaaaagccttattcagttttttagcattatggtcactggtaatccgatagttagaattcccgagagcaatatgggcaggttgtactgggaagtggaagtagtctgtgcttgaatcaaattaaatcagtataaagatgacatttgtttttggtcctgattttcctttgtctcccactgactttcttttattttattttttatcttgtaatatattttgaagagagattactagcttaacttcatccatcccttcttgtagaaacagtagggcttgtcaggcctgaaggtttacctgttcgtatttctgaaaatctatgcgttaagcacctacaaagtgaattaacaaagcctagcatctgctccggtcacttgtttctttcattgagttcccccatgtgttagacattctattggatagctggttaaagaaatgaagggcagggctcttgggtctggaagctcaccttttcaggagagaagactttcaaacagataaattgtaatagagaagtatggaaaagtgtgggctttacagatgtacagagcgggttcgagttctgtctttcccaatattaatttgtgacctc

SEQ ID NO: 917145 - DNA, 4001 bp, Homo sapiens
cattttcccaatgactattctatacttctttcatttaacacaaaatggtaaccactttcctatgtcattcaacagcctatgccactactctttgaaaacgttccttttaaaaggctgaaaaatataatgatgggatgtgtcataatttataaaaccattcttctaccattagatatttgttatttccaatttttcacaagaacaaaattacactgtgattataaagctttgattctatctctatttccttacaagtttcttagaaaaggtcaaaaggtatatgaacttttgtttctccatgcattttgacaagccaactggaagatacaagtcaagtggaagatacaagcatggaatcaagtaattaagaaaaatgattctcaggccaggtgccgtggctcacacctgtaatcccagcactttgggaggtggaggcgggcagatcatctaaagtcaggagttcaagaccagcctggccaacatggtgaaaccccatctctactaaaaatacaaaaattagctgggcgtgatggccggtgtctgtagtcccagctactcaggaggctgaggcaggagaatcgcttgaaccacggaggcagagttgcagtgagccgagattgcaccattgcactccagcataggcgacaagagactccatctcaaaaaaaaaaaaaaaaaaaaaaaaaaaaaaaacatcaattattttgctgtttgttttgttttttggtattcctgatgcgagatgtctttatcatgtattgttgattaggttgttcatcagttaatcttgaataactgaaatctaagctgaaggcaataatacatcggctttcttttcatgcaagtcaaactgctaaaatctaccacaaaatattagcctttcatcagcttggtcttcagatccaatacattttcccctcaaatgaaagacaatgcaatgccatccacaacaatgctaaaaaaaaaaaaaaaaaaggaggagggaaacaaggttaagtcctgtcttcttcctcctaccccaaaaagagctcagaaattaaggtgctttccctaacaaagcctcctcctgctccatgaagtgaccaagcatgtcatggcagacccagagatttataatcttcaacatatcgttatcggggaaatcaagatttgacaaaattcttccttcacgccccgtttctgcaagaccaccactttctagcttaaaataaagaaaaaaaaaagacagctgcaggaatgcttggctgcccgctaatgtacaattttgcccaaacgcagaacttgacgcccactattaccaaaggatggccttagtaaagtaacccccgcgaagagcaaactgtttagcagccgctccctcgaaaaggacggaagaggaggtctcttctgaacctgaggatagtagagaggcactccccttccactactagctttgctcctttctcaatcaggcagttcatcagctagcctcctttgtcaaagggggttgatggtcagaatctttgcgagacaaaaattactaaaagagctcccaggaaccaatgttaaggcatcaaaggccccgcccagcccccacaatgatcaacaaaccaaaacctgggatccctactattaccaccaccacaaccatcaccaccaccaccaccaccattcctcgctctctctagccagggatgagactcaggcccaggaaacccatcctttccgcaagtaggaaggcgctgggtctcctcccttaggcctctcctttaccccattgttctctccggacccctccactacggccaggcgctatgtatgttttcaacccccaagaagcccagtcccagccacacacaagatggcagcctcacacctaccggaggaaacagctgcgccaccactccagtgatgccggcctctcgactacgagtaactccattggctcagctacagtgcgcgagacaagccgagagcgctagcagtcaatcgggaggcggcgcgctcgggcgccactgcggtgccagcggtaagtgcgccgagtctctgaggcgtgaaccagtggggagtgcgaccaatcaatgggctcctggctgggtggtgggacggccggcgtccgactcctcccatgtagtgatcggtttaggtaggtcggcctggtccccggcggaggttacgccttccctcatccccggtagaggcagggcgggactgttgtggttgagatgaaggctagtaaatggtgaagtacttcccggccagagggcacctgcgctcgggaggtttgggcggcttggcgtcggaggagagccccacccgcggaggaacccagccttgccaacggagctggcggagctcactcctcaggtcaggcgggcggcgtagaaaacgcagcggagccaggtgaaaccaaggcaccgccgtggctggcccccgacagttcctctagccgggaggttggaggagctgaaaacgccgcggagccctcggccgcccgagcaggggctggaccccagcccttgcagcctcccttctcctggcacccaagtgcagtcctggctgcagaaggggccgcgggcgcactgagtttccaacctccatttcagcctgtctgtctcagggtgcagccttaatgagaggtgattcctaagctgctgggaacctgaggttgtcaaaggggcggcaggaaatggacagcagtataaaacccagaagcagaacttgaaggttaaaccactagcccatttcacaggtaagattacacgagcccttaaatacagcaagttcagtcattcatccaagatcatggagttcagattagatagtaacacttctgactcgctatcagccacagcccaataagtaattaagtaaggaaagatatgtaattaactgtgctctttggcatgtggaaacctgcagtgagctctgtaaatactaacacatgaggccaaggagaggagtaaatttgaagaggtcaaatggagtaaccaaagcataggctctgaaaccatgctgcctggttccttatttcgtgtctgccacttacggtatggcattccttagcttcctcatcagcaaacgagctgctaatttaacccacatgactgttagggggattaaataagaacacgtgaagtagttagaagcgtgactaacccgtggttcttaagcgtgacttaacccgtggttctgtcgttacaattaaaacgtaaggagccgagaggaaatggtaaacgtgtttttaaagcctgttttagaaacgaaaaggaaccatacattgaagcaaagcagactggcttaattatttttctaccaaaatgaaaaagtgagaaggggaaaaaagttttttaagcccatttactctctgaaatattaacaccagttgtctctggatgatgggatggtgtttaaattttctcctttatgctttattgtattttgcagattttctccaggaaacatgttttacttgtgcacgttcagttttcaaattttcaggtgtgaacgctggtgagagctgcttaaaaacaaagctatgggccgggcgcggtggctcacacctgtaatccccacactttgggaggctgaggcgggcggatcacctgaggtcaggagttcaagaccagcctggccaacgtggtgaaaccccgtctccactaaaaacacaaaaattagccgggcgtgtggtggcgggcccctgtaatcccagcttctcgggaggctgaggcaggagaatcgcttgaacccgggaggcagaggctgcagtgagccgagatcacgccactgcacccttctcactgcactggtgacagagcgagactccgtctcaaaaaaaaaaaaaaaatctatggccgtgcgcggtgggtggctcacatctataatcccagcactttggcagatcacttgagcccagagttcaagaccaacctgggcaacatagacctcatgtctaaaaaaaaataaaactattactgagtgtgcttaggtggaagtataaattggtagaacctttctggaag

SEQ ID NO: 917146 - DNA, 4001 bp, Homo sapiens
cagttttgagctaaggaatctgggataagctggagacccattccttatctatgaggaacattcgagcccccagcctggctcatggaacacagggcatagaagggatcgaggtcctttgttttgggttaaatgaaggttaccaggtggaggttgttagggagaaggcattaagtgaaaatgctatgtaaactgcatgactgttgcaagcagttggttctcttgcctagcccactgccactggactctcttccctgtatgtaaactccccccaaaaccctctgtctcctttgctggctctgggtctccttggcctctagaacctggtgccatccccactggagttgataggggttcagcacaaattggtgttccttaatattgctgtactacagtttgtttaaccacttctctatatatagacatacaggtaggtgagggtgttgttttttgtttttgttttgctatcttataatctattttaaaattagtcactgataacataaacaaatcagaatttaaaaacacaatgttaattctccttggaaaaaaagccataaagtgattatttgtattattctaataatacagataaataaaatttacctttgccatttaaaaaaaaaaaaatggcaaaaaccacaattacttttgcaccaacctaataataagcatttttttcattttaaatattttggtttctcacagttgataaacatgcaaaatctgtcattgttttcaatacaatgttatcaataattctgaaaatttacacatgcaactcattttcaaattaactgcacattatggcctttggatatgcattggatacccaatgtgtttgagggctaaatctcactaattctccactattactcaattacgttaagccagcagtccccaacctttttcgcaccagaggatggttttgtggaaagccattcttccacggacctggaggttgggatgcaggggatggtttcgggatgaaactgttgcatctcaggtcatcaggcattagagtctcataaggagcctgcaacctagatccctcacatgcacagttcacagaagggtttgtgctgtctatgagactctaattctgccactgatctaacaggaggcggaattcagatggtaatgcttgccagccagccactcacctcctactgtgctgcccggttcctaacaggccatggacaggtacaggtctgcagcccaggggtaagggacccctgcattaagcaactcttgattggtgttttcagaagcctagtgtgatactaggttctctaaggaattcaaaagaggtctgtgataaaagatctgtcttcaaggagcttgtacaacttttgtgaaaacaaaacaaaacaaaacaaaacaaaaaaccttagctatctatataaaatcattacacctgaatacaaagttttgaagaaaatacaaaaggaagaagaaatatgcaagggaccaaggtatattttaccgtattttatcataaggtaaaatatagagattacctaagtgaggaaagaaaaggagtaagtgaaagaaatgggacttttttaattgtacaaaaatcatagactttataaattcttctaaaacaacatatttcctgaggatttgttagcaaatacctaagaaatgggaatttagatgcactttgaaaaagtactaggatttggatatagtgagatagaaaaaggaacaatatcccagcataggaaaattttttagcaaaaatgcaaagactggaatgaaagtagaaaagggacggaaagagaggtagggaaatgggagaaaagaaaattgtggttaaaagggaaatacatagggaagtttttgaggtggagtggtggacagggagggcacatatatttgttgtcaaaggaagaagcctggagagaggtaaaaagctattccctgtacacttggcccaacacgttttggtcccatttcaaccaatactcacccttttaactggcttctacaagaaatccagatacaccaagtatttcctggcttttgtaagtttttatatgtgaggtcacagtgaagtgtcacaatacacgacatagcatttctccagagttcctattcctttcctgctggattttccctgtgcctttcaagtttttcttcccttttttaaacagaaaatttaaactctatctcttctagttccaaatatgtattcctaactcatcctaaactgcaacaaaacagagactcttccaacggcaaggacatacctccttaaaaggcaatttaacaaccgtctccaaatacttgaacaaaccctttgtggagtcaacattcatcacaaatgaattatccatgcttttcttccaaacaaattctgcattttctatacaattcttaatgcttactaaaagattaacaatttctccattgggatagagtcaaaactgcagatgaaagatttgccttagtaaaaagaagcataatgttataaaaaatgaatcattcttttcaagaaatagaggcagcaacagttcttaaaattaaataagaactagaagaatgtagtgagacagaatcttgtatactgctgagtagaacaaaatccccaggaacctttctagaaaacaatttaccagaatattcatgctttttaacatatcaattctactaacaaaaagctatcctgagaaaatagagatggctagatggtaaatgatgttattgcaatgttatttacaaaggaaagccaagagtatctacaaaagggaaacagttgaataaattatgttatgctaccatcttagaatattatagacatataaaaatattttaagtgccatatatagtcacataataaaatatgttaaataaaaatcaagaaataggactaatacttcaaattcattttaaaatcataaatattatatatatacaactatgtgtgtgtgtacagagacatgcataattttatatagataaaagactagaaggaaatacaacaaaattttaacagtaattttctctgggtagtaagactacagattacttttttcttctttataattttctgtaacaatcaaattttctacaatagcatttataagtggaaaatttgttttaaaaaaggagcagctttgtttcgccattaagtaggcattaaaaaaaaatgtaggcttgctgggcacggtggctcatgcctttaatcccagcactttgggaggccgaggtggaggtggatcacttgaggtcaggcgttcgagaccagcctggccaacatggtgaaatcccatctctactaaaaatacaaaaagttagctgggtgtggtggtgcgtgcctgtggtcctagctacttgggacgctgaggtgggagaatcactgaagcctgggaagtcgaggctgcagttagccaagatcatgccactgcactccagtctgggcaacacagtgagaccctgtctctagaaattttaaaaataaaaataaaaaataaaaaatgtggccaggcgcggtggctcacacctgtaatcccagcactttgggaagctgaggtgggtggatcatgaggtcaagagttcaagaccagcctggccaatatggtgaaaccccttctctactaaaaaaaaaaatacaaaaattagcggggtgtggtggtacacacctgtaatcccagctactcaggaggctgaggcaggagaatcacttgaatctgggaggcagaggctgcagtgagccaagatcgtgccactgcactccagtctgggtgacagagcaagactctgtcttggaaaaaaaaaaaattaaattaaaataaaattaaaaatgtgggctctgatatatttatgatctatacactctacactatggtactggtgaagcctatagacttctgagtttccattataaccccatgttgagtaaagttttaagggcacaggaagggtgctgatttggacctcatacagaacaactttagtgacactagaatgtgagctttgtgagggcaggatgttggtgt

SEQ ID NO: 917147 - DNA, 4001 bp, Homo sapiens
ttagactataataaacgcccaacagtcacttgataaactgtttcccagggaaaatgggttctaaatttccaacaacccattcacaagtaaacttctcaaatacaaagtgtttgtaaattgggaatgcattattctttatttctatatttacattcctatgggcctgggaaatggtaccatcactaaggtaacacagtgaatgattagtttaaaataaaaaattattctgaagagtgtgaagctgtatgcaaataattttccaccagtctaagaaggactgagcatgggaaaatctataaagaagtaaaagtaagtttgtgatattatctctatgatgtttacttttaagtgcaagatactaactagcccagaaaaggttcccacagaccagttgagctgcttcttatacataggtcaacagtctaaaaaaaaaattaaaacctgcaaaatcccacaaaacaaaacctgttttacaggcttctgtacacgtagaggaaatgttagagaaattacagccattttatggtctatctagggtacaagcccttctaatgtgtttactgatactctgcagaagttttcatttcagttgttttgccttaaaggattcacttgaatcaataactaaagacatatatattttttgaggctagcagagggtagattagaaactctgcttagagtggtgtatcctcatgcagtgactcaatttcacagttaacaacatacactttcttcctcctacagaacaatgattacatgcctccctccatgcctttaaaaagatatatataattggcatacactctcctattttaagattatacaaaaaaagttttattggaatgtgaatagatatttttaagagtttatttttctttgctctattgcttatacaaacacaaacacacacacacacacacacacacacacacacacatggttatattagctcttcaacagaataagattatacgagaggaaagcttggtataaactgtaagaacaaaataactgctttattccttacttagaaacccaaatgcattcattcattttacataaagtaggaaaaatcaggtgtcacttattgggtctaaaagaagcagtcaacatttaaattatatatcctttgaagtaacagtatcaacatttttatttaaattatgagagaatgctgtaatttataatacaaaacagtgataattcaaaatttactaacaatagacagaaagagataactttctaattttcatgcagttgaaagagaaacatgaaaaaaggtatactgtactgccactattttatttttggaaactctttgtaaataaaaacccatttccaaaataagatattccatgaacacagaatagttggtaatggttcaagtgccttaggcaacagagaagtattgttttgtagtttttttaaacctctcctagtaacagcaattcattatgcacaaagaaacaaggtaacagcatggtttataatgcatatataagtaataactgcagaacctcaattaaaactaaagtttaccatattccttccatttctataaaccagtatagataaccttgttgatactcaccaaatgttacagaaatgcctaggcttttctaagcaacaaaatgtagacacatggtgaggtgctgaagacagctctttcttgagctcaaagcactttagatgaagtagcctttatcgtccatttaatagaggttgcctcctattaccaagcgtggcagagaaaagagtttccacaattaggtcttgactttctgtccctctttttgaagagtaacagttaccactggaaaacgttaccagaaaatgatcacttgaacactcacatagggcagctgtaaatttccactctctttgcttgctctcagattccaagccttgcttgtctcttaatctgtcacaggcagttctgtttctggtcaaaccagcttgcttatgcgttctccactccctctctaacacttgctttcagatacgtaccacagtcacagctcccttttacttcctccctcctcagtcctgtaacgtcacaagaatgcgtgtaaagctgaggcaaaataaattcttgggccaaaaaagaaaaaagtctagagataaacaaaattttttctcatcacttttttctgtcttaagtcttatacttgttcatgcatggggttttgtcaactgattaaactggctggaccaccttgtttaaaaatgtaaataaaggttatttttaaaaaagtcatgttgatagtaataataacagattcacctgctaatatgctagctcctgaaggaagatgctattcccaaccataagaaagtggagcaagtaaacacacaagtacttgtattagaaacttaatcttaacatttaaaaagcaaggaaggttttagagtacttataatttaaactgtgcaattttatgaaaaaaatgtatttcttaatacggtatattttgaaacttggaccaaaatttgcagttataaaagggaaaattataaagaacatagaaaaatattgacaccaaaaacaaaagagcagtttaatcatgtatgtgcaaaccaaatgtaattattgctgttggaaagaaggttttttttccccctaaacattaccggtcagaatgcataacacctcttataagaattacaaagtctaaaggctacaaaaaattattaaagtgattatacacatacaattatagagtaaagtatcttaaaattacgaaactctctgtaaggtttggggatgaggaattaggtagaaagctgagtgggctcgtggttggcaggtttagatggcatttgtaggattctttggaattaggaggcaatgtatgcagcttggaatacgtgctggctctgtatgaatgctagtcagatcctgctttggagttctgttccagttccttagcccagaacacttttaggttctccatctcccactatgtccccagtcaaaagtcttgggcccttctactgacggatcttccaagtacagaaggaacagaagtagttattagacctattattaagtaacacattcttattctctgcagaattaaaatctctctaagaatataagcttaagtaaggtgaaaggtaaacatctataaacagttgtttatatcccttaagaaaaataagtcagtaaaagtcggccttaaaatataggtgttttgatctcgtttatttaaagtagaattaaaatttaactatattatacagttatttggttatttcttagcacctattaaataggtatcaaagacgactagagattagtctgccaatttttctttcaattagtagttttataatttttagagttttatttctcctttttaaagagatgttaaatggaaataattctaaatcactgagggtatgaagtgtctagtaccttaggttatactccgagagttgtagtataattaaagaaattcagaatttataaaagtggttcttaggataactgcaaggttaatttaaaactgggagactgtatatcaatctatagtggattcaaaggcacaaagtcaagtcaaggactttaaaacatataattactaagattatttatgattgtttgtatatttaattcctattaaataccattccattttccaacagcaagagtgcagaaatctcataatatacaggaaactgggttgagtattcagaaggatattgcctcagtagcggaaccaaattagttttagattaaaggttgttctggtccctcttaatagagattaaaagtaagccccgaaaggatcgaattacttccaaataactgcaacccagagtaaaattttaaaatatttatataaattttttaaaatctagcacacaataacgtaaaattcacaatatctgacatccagtcaaaaatcaccaggcatgcaaagaagcaggaaaacataatgcataaggagaaaatcgatcattagaaaaagactcagaaatgacacaaataatag

SEQ ID NO: 917148 - DNA, 4001 bp, Homo sapiens
ctaagataaacagcttctgttagcaaaagggccaaagcaggtcaactaaacttcccagcacttggcagtgaagcaagttccagctggcttactgacgtcaccatttgaacttaacatttcaaatgttaacacagaaacatttacatataaagatcaaagttctgaaggataaaaaggccttgacaataggcgacttaagatgtatcccattcggtaactcttcagacaattctgagtctggaagaacaggttaaatttgtttggcttttgttttaaggaagcgtgtctggggaagactatcactgctgctttgtgctaaaagtgcttttagtactggaaaattctacttaaaaaaacaaaaatactttaagttaatgtgagttataactaatttagagcatttaaccacaatccctaagttaactgaaatatttcctaaagcctcagtaatatacaactctacctggcttttcgtaaaagtttaggcagtctgataataaatcctcaaccaagcgcaatgaaaaatcttgctactaatcacggtgtgtgaatttaaggtaaagagctacaaataaatctctaaataaagtgttaagaagcctccctgctggtgtgagtgaggtgcagtgtagagtaccctctcagcgccacccagtgcattctcagtgtgtgctgatgaaaacaaaaagccaaactctctgacgatgcccaacatacacacaaggtaaaatctatctaatgactacagcaacaaatggtgcgtttaaccatttcggccactcactggctggagaatcctggctaagtcactttctctgagcttctatttatcttctataccaaggtggataacagcaatctctccttatgagaaatgagatatacacgaactacttcctgtataaaatatgttagatacaccaataccaacaaggcaaacagaaagacaaaaaaaccctatgaagagatggggctccaagcacttgctcagctcctgtttaaattctttctaccttatccgttctatttgaaaaggcatctcagcgtgcaaggaccagccaaggccagggcagggccctcggggacatctggccagcacttcaggttctggggatgactcaggtgagcctccctccccaagggacctcctacacgcacacacacaccccgaaccgggggcgggcgaaggaggcctggctggtggagtccttttctgcggcccaggcgtcgcaatatccagtccctctcgtccaaggacgtgcagggtctgtacttgcccagtcgcactgggacttcaaattggggatgcagacacggccctgctcctggtgtgcgcgaagcccgctcagccggccagctcgcctgcacgcccgccgcgtccctgggccccaggagggcccccgtatccagctccgaccaaacagcaagcccgcagttggcgagcatctttcccagaccgggagcggggacagagcagagcagacggatccgaccagcgcaccacggcgccccagggccctcctaccgtcctcggccctcggccccccgttccccggccaccgcgcgggctccgccgctcctgggacgcgcactggctccggcccggcgccaccctctgcccctctgtcaccccgcacggaggctcccatcacccaagccgcgcccagccgtcgccgcgccgttccaggaggcctccgtcctctccctactccgccccgcaggccacacggcgccccggccccgcgcgcgggctgcccctcggcggcgcttcccccccgcgagccagcagaggcggtcagcggtcgggtacctgcgtccagtggcggcccgtacagcgcgagtgcggccgagagcaatgcgacaacgaccgcgccggcgacggcagttccggcccccgcgcgtgtgaccatccccgggccaaatggaatcgaccttacctcgtctgcaagcccggattgccccacagcgaggacccagggccatcgggcagcattccggattcccagctgcccccgcgccgtcgccggaaacacagccattggaagcgttttccggtttcccgaccgcctccgcgcggctgtcggcagtgggatcccaactcgctcaatcacacccggttctagatgattgacaagcgcgacgcccaacccggcctggtcccagctctggcctaagaggttcggctggaaggcaggttgaagagttaacaacgatctggttcagggtctggtttgtgtttatcggcccatttttaggcttgcggcgttatagaaaatgattttgctggcaggtggagtgccgaggcccactatgtgcccccagtatagcagtcaggtgcctttctgctccaggcgcaacctctgccctgaaccccaaaccagctcgctgcgaggccccttcgctttccaccgtctcaggtcagggcagctccatcactccaacgctgaggcccaaacccctggaaggcattctgacctctcctgccctcccacccacgctcctcctgtggctgatggcctcttacctccactgccgccctatttgaagccaccgtcatggtgctaaaagaaacttgtggggccaggtgcggtggctcgcgcgtgtgatcccaatgctttgggaggccaagatggaaggatcgtttgagcccaggagtttgagaccagcctggacaacataaggagacccccttctctaccaaaatttttttggaaaattagcaggggatggtgtggcacacctgtagtccagctacttgagaggctgaggtgaaaggatggctcaacatgtcagaggccttttaaccagagcgattccatcttgaatagggactgggtaaaatgagggtgagacctactgggctgcattcccagggggttagacattcttggccacaggatgaggtggtgggcacaagatacaggtcacaaagaccgcactgataagatgacacagtaaagaaactggcccaaagcctaccaaaaccaagatggccacaaaagtgacctctgtgtcctcattgctcattatttgctgattataacgtattagcatgctaaaggacactcctaccagcgccatgagagtttacaaatgctatggcaacatcaggaaattactctatatggtctaaaaaggggaggaaccctcagttccagcaattgccaacctctttcccagaaaactcatgaataatcccctccttatttagcctataatcaagagataactataactatgtgtggagttagttcctgccggtgggttcatggtctcactgacttcaagaatgaagctgcggaccttcacagtgttacagctcttaaaggtggcatagacccaaagagtgagcagcagcaagatttattatgaagaggccgggcgtggtggctcatgcctgtaagcccagcactttgggaggccgaggcgggtggatcacaaggtcaggagatcgagaccatcttggctaacacggtgaaaccctgtctctactaaaaatacaaaaaattagccggacatggtggcgggcgcctgtaatcccagctacccaggaggctgaggcaggagaatggcgtgaacctgggaggcagagcttccagtgagccgagatcgggccactgcactccagcctgggccacagagcgagactccacctcaaaaaaaaaaaaaaaaagattcattatgaagagcaaaagaacaaagcttccacagcatggaaggggacccaagtggattgctgctgctggctggcgggggtgggggggtggggcagcttttattcccttatttctcccctcccatgttctgtttctgccctatcggaatgcccttttttcaatctttcctgcaattggctacttttaggatcctgctgattggtgcgttttacagagcactgattggtgcattttacaatcctcttgctagctacagagcgctcattggtgcattttacaatcctagctacagagtgctgattggtgcattttacaatcctcttg

SEQ ID NO: 917149 - DNA, 4001 bp, Homo sapiens
gttaacacagaaacatttacatataaagatcaaagttctgaaggataaaaaggccttgacaataggcgacttaagatgtatcccattcggtaactcttcagacaattctgagtctggaagaacaggttaaatttgtttggcttttgttttaaggaagcgtgtctggggaagactatcactgctgctttgtgctaaaagtgcttttagtactggaaaattctacttaaaaaaacaaaaatactttaagttaatgtgagttataactaatttagagcatttaaccacaatccctaagttaactgaaatatttcctaaagcctcagtaatatacaactctacctggcttttcgtaaaagtttaggcagtctgataataaatcctcaaccaagcgcaatgaaaaatcttgctactaatcacggtgtgtgaatttaaggtaaagagctacaaataaatctctaaataaagtgttaagaagcctccctgctggtgtgagtgaggtgcagtgtagagtaccctctcagcgccacccagtgcattctcagtgtgtgctgatgaaaacaaaaagccaaactctctgacgatgcccaacatacacacaaggtaaaatctatctaatgactacagcaacaaatggtgcgtttaaccatttcggccactcactggctggagaatcctggctaagtcactttctctgagcttctatttatcttctataccaaggtggataacagcaatctctccttatgagaaatgagatatacacgaactacttcctgtataaaatatgttagatacaccaataccaacaaggcaaacagaaagacaaaaaaaccctatgaagagatggggctccaagcacttgctcagctcctgtttaaattctttctaccttatccgttctatttgaaaaggcatctcagcgtgcaaggaccagccaaggccagggcagggccctcggggacatctggccagcacttcaggttctggggatgactcaggtgagcctccctccccaagggacctcctacacgcacacacacaccccgaaccgggggcgggcgaaggaggcctggctggtggagtccttttctgcggcccaggcgtcgcaatatccagtccctctcgtccaaggacgtgcagggtctgtacttgcccagtcgcactgggacttcaaattggggatgcagacacggccctgctcctggtgtgcgcgaagcccgctcagccggccagctcgcctgcacgcccgccgcgtccctgggccccaggagggcccccgtatccagctccgaccaaacagcaagcccgcagttggcgagcatctttcccagaccgggagcggggacagagcagagcagacggatccgaccagcgcaccacggcgccccagggccctcctaccgtcctcggccctcggccccccgttccccggccaccgcgcgggctccgccgctcctgggacgcgcactggctccggcccggcgccaccctctgcccctctgtcaccccgcacggaggctcccatcacccaagccgcgcccagccgtcgccgcgccgttccaggaggcctccgtcctctccctactccgccccgcaggccacacggcgccccggccccgcgcgcgggctgcccctcggcggcgcttcccccccgcgagccagcagaggcggtcagcggtcgggtacctgcgtccagtggcggcccgtacagcgcgagtgcggccgagagcaatgcgacaacgaccgcgccggcgacggcagttccggcccccgcgcgtgtgaccatccccgggccaaatggaatcgaccttacctcgtctgcaagcccggattgccccacagcgaggacccagggccatcgggcagcattccggattcccagctgcccccgcgccgtcgccggaaacacagccattggaagcgttttccggtttcccgaccgcctccgcgcggctgtcggcagtgggatcccaactcgctcaatcacacccggttctagatgattgacaagcgcgacgcccaacccggcctggtcccagctctggcctaagaggttcggctggaaggcaggttgaagagttaacaacgatctggttcagggtctggtttgtgtttatcggcccatttttaggcttgcggcgttatagaaaatgattttgctggcaggtggagtgccgaggcccactatgtgcccccagtatagcagtcaggtgcctttctgctccaggcgcaacctctgccctgaaccccaaaccagctcgctgcgaggccccttcgctttccaccgtctcaggtcagggcagctccatcactccaacgctgaggcccaaacccctggaaggcattctgacctctcctgccctcccacccacgctcctcctgtggctgatggcctcttacctccactgccgccctatttgaagccaccgtcatggtgctaaaagaaacttgtggggccaggtgcggtggctcgcgcgtgtgatcccaatgctttgggaggccaagatggaaggatcgtttgagcccaggagtttgagaccagcctggacaacataaggagacccccttctctaccaaaatttttttggaaaattagcaggggatggtgtggcacacctgtagtccagctacttgagaggctgaggtgaaaggatggctcaacatgtcagaggccttttaaccagagcgattccatcttgaatagggactgggtaaaatgagggtgagacctactgggctgcattcccagggggttagacattcttggccacaggatgaggtggtgggcacaagatacaggtcacaaagaccgcactgataagatgacacagtaaagaaactggcccaaagcctaccaaaaccaagatggccacaaaagtgacctctgtgtcctcattgctcattatttgctgattataacgtattagcatgctaaaggacactcctaccagcgccatgagagtttacaaatgctatggcaacatcaggaaattactctatatggtctaaaaaggggaggaaccctcagttccagcaattgccaacctctttcccagaaaactcatgaataatcccctccttatttagcctataatcaagagataactataactatgtgtggagttagttcctgccggtgggttcatggtctcactgacttcaagaatgaagctgcggaccttcacagtgttacagctcttaaaggtggcatagacccaaagagtgagcagcagcaagatttattatgaagaggccgggcgtggtggctcatgcctgtaagcccagcactttgggaggccgaggcgggtggatcacaaggtcaggagatcgagaccatcttggctaacacggtgaaaccctgtctctactaaaaatacaaaaaattagccggacatggtggcgggcgcctgtaatcccagctacccaggaggctgaggcaggagaatggcgtgaacctgggaggcagagcttccagtgagccgagatcgggccactgcactccagcctgggccacagagcgagactccacctcaaaaaaaaaaaaaaaaagattcattatgaagagcaaaagaacaaagcttccacagcatggaaggggacccaagtggattgctgctgctggctggcgggggtgggggggtggggcagcttttattcccttatttctcccctcccatgttctgtttctgccctatcggaatgcccttttttcaatctttcctgcaattggctacttttaggatcctgctgattggtgcgttttacagagcactgattggtgcattttacaatcctcttgctagctacagagcgctcattggtgcattttacaatcctagctacagagtgctgattggtgcattttacaatcctcttgtaagacagaaaagttctccaagtccccactcgacccaggaagtccagctggcttcaagtctcataagtatattcagtcaagcagccagtgccactgctctgcctatggagtagccattctttta

SEQ ID NO: 917150 - DNA, 4001 bp, Homo sapiens
ttttgttacagcagactcatagactgagacaggctgtatccccaaagctccatagaaggatgagatttctttctgtctttgcagttattttagctcatccccttctggtttaaggcttattcagtaacagaactgttttctttctcttctacctttgtggaaaggttttccagggtgggggttttgtttttaatatttccccaacatattttataattcaagaaagatgtcgaaatatgcttttgataattaaaagtatgttagcccaaagtaaaggggaaaaatgtatatttaaagtatacagagtatgccgggcatggtggttcatgcctgtaatcccaacactttgggaggccaaggcaggtggatcatttgaggtcaggagttcgagaccagcctggctgacatggtgaaactccgtctctactaaaaatacaaaaattagccgggcgtggtggtacatgcctgtaatcccagctactccggaggctgaggcaggagaattgctgccaggaggcggcaactggacctgggaggcagaggttgcagtgagccgagattgcaccactgcactccagcctgggcgacagagcgactccgtctcaagaaaaaaaaaaagtatacagagtaaatgtaactttttacttttagtctaggactgaacaatactaagttttaaaaaatctataatatgtcatttttgtacattatattttggaaatgtacaaaatattaggaaaagtggtaattttggcaaatgtaggaggcagtacatcttacagttaaagaggtcaagagagcaaccacttcgcagtcagagaaaccaagcctcaccccagttccaatacctcttcaatgtgtcatcttaggaaagttactcaatcactattgagccccgtgacatctcacatgtgaggtacagtgttaagcagcattttatgggcattatttactaaaattgttataagatccaagttatcattcccatctcaaagatgaagaaaccaggactcaaagcaataaagtgacctgctcagtgctgtgaagctaagaagtggtggggcccaggaatgactgatcagcaggaccccgggaccccgcaaaggcctcttgatgtcactaaacccagcaaaaaacatctagttccaaaacgggtcatttttcagtgctccattgtctccctgagtttcctcacctgtaaaacgggtgtaagtgctcagaatccctataagaaccaaatgaggttgtaacatttcccacaatgcctggaatgtaggaattattctgcatccctaagttgccacttaagagataaaagaaatcagcaaaaggctttcaaaaataaatggtcctttgaagtatgaaaattcaaatccaggaaactcaccaagcatggccaaggtgcgcatgatcatatacagttggtccacagctatacctggaaacaaagttaaaatccatcgtgtggaacatatttgcaagaaaggacattcgattctgagttataatgatcatataatttttaaagtaatcacttctgggggatgaatagccggggttttcatacttgctcaattcacacccaaacctgcaaaagcaccgcgcacccccagcttctagaacggcgccctccatgcagcttcctaaacgccctccccgagcccagatcccgttcagccgtgggaagtctccgccacgatcggcccccgcccgtgccccagtcccgcgcggcccaccaggaggcggcttcggcgtgcgccacgattaggggttccttcctcccggtgaggctgttgtacacctgcacacccgtctcccggcccgtgggctgcagccaggcccgcccgcgccccccgctcgccgcccggcccgcaggccagtgccacccagcccgcccaaggcccagcgcggcctggagcagcggggggcccaggcctgggccgcgcgtagtcctcaacatgtcagcggccagcgcctacgactgggcggagacgggagccacgccgggtacgctgccggtcgctcaagagcagcacggccccgccccgccccgcccacgcccttggggccacgcccactcccggaagcagtcctcaggtagcgcctccctttggcctggctcgagtcgcccgcggcaagggtggagaaccagggcccgaagaggttggggcggggaaggcccggggtggagggaggagggcggtgccgcgccgggaggccgtgggaagaggcggtaccgtgccgatctcctctccttattagcccaggtcctgcgaggcgtccgtgtgcgcgcggtaccagcctggagctgtgtccgccgcgcgggaggagcgtttacagtgcaagcttctgttgccgggccctggcctgttagcgaagcacgtgtgcatcccagcacagcccacgtcagcacgctaatacacagtgtccaccccagaacacacgtcagcaccccaatacagtgtgcaccccaatacagtgtgcaccccaaacacacatctgcgccccaatacagtgtgcactgcagcacaccgttagcatcccaacacagtgcaccccgatacacaatgtgcaacccaacacacagtctgcaccccaagaagtgtgcaccccaatacacagtatgcaccccagcacacacatcagcatcccaatacagtgtgcaccccaatacagtgtgcaccccagcacacacatctgcaccccaatagtgtgcactgcagcacaccatcagcatcccaacacagtgcaccccgatacacagtgtgcaacccagcatacagtctgcaccccaatacacagtatgcaccctagcacacaccacatcagcatcccaatacagtgtgcactccaatacagtgtgcaccccagcacacaccatgtctgcaccccagtacagtgtacaccccaatacagtgtgcacccctaatacactgtgcactctaacacacaccatgtctgcaccccagtacagtgtgcaccccaacacagcacatgtgcatcccagcaaacactgtctgcattccaatgcaatgtgcacctcaatagagtgtgcgcccccacacatctacaccccaatacagtgtgcaccccaatacacagtgtgcaacccaacacacaccatgtctgcactccaatacacagcatgcctcccccaccatgatcccgtatcttgagaacaaaaacattctgaaagttactcacaatagcttgacaaacgtgcctctattgggccaggcgcagtggctcacacctgtaatcccagcactttgggaggctgaggcggatggatcacctgaggtcaggagttcgagaccagcctgaccaatatggtgaaaccccgtctctactaaaaatacacaaattagccgggcgtggtggcgtgcatctgtagtcccagctactggggaggctgagacaagagaatcgcttgaacccaggaggcagagctcacagtgagctgaggtcacaccactgcactgcagcctgggcaacagagggagactccgcctgaaaaaaaaaaaaagtgcctctattggtgtcttgcaatacgatgtctcaaaaaaaagaaaaagtcccctttgcttttccagttctcaaaacaggagacgttcctctggttttttgttgttgtttttagtttgctttggtgttttattaaaaagcaaaggtttaagtagagacaaacaagtgtgtacctagagtagtttctcaatatcctggagtccaactctgcaattctgtttcaagctaactgtagtctaatgtaatctattgtctaatttaataaggttaaaatgttagaattaggagaccctatagcctacatcaatgctaaccactcatgttacctaactactctaaattctcctgaatattatcacttcttgcctgccttatgttattttgtaactttccagtgctgtgtgtatatttatctccctgagtatcttaaattgtacattattttgaacttctcactgtgccctgcactaaattca

SEQ ID NO: 917151 - DNA, 4001 bp, Homo sapiens
tgtaaagaatgaaatcatgtggcctccaaagaacagcttttatttgagtggcttgggaatagggtgtttttattttttcaaacttaattatgcatctaactcatacatagaggttaaaacaaaacaaaaaagcaaagcaaaacatgctcaggcctaactcctagagattctgattcaatgtatatttgggatagagtctctacattaattattttttttttcagttgcacttgcagttctgatttgcagccaagactgagaaccactggagtaggatagagtgaaaatgggatgaggaagtgttaggacatgacactaggaccagatggtgaaaggaaatggtatgcaaatacaatataacaaactctcttccctgacaacttcattcttttgaaatattttctttttcattttttttttactgccactacttttgcatgaaagaatacgaatcccaccattgtaaaaacagagataaatgtttaaaacctttgtaactaaaagacctctgttttgcttgaggtattaagctggtgcaaaagtaattgtggtctttgtcaatggcaaaaaccgcaattacctttgcaccaatctaatgatatttaacataaacaaactcagggcagagtgcaccttctgattgggtgtaccatctaccgctcggggctctttaacaaatgaccaaagaaaacatgaattttgacataactggtgctagggttattgaagggtgggtttccattctgggttagtgctcccagtctctagtcaagcacaagaacatgcctaccccagagggctcttccaaattcccagctatctgagattatgagacaaaggttctttagcgcctaccaaatgagcaacaatgaagataaaagggacctctccttccatcataaccagttccccaggaagcaccatttctcttactcttggaaggtcggatattttttccctttaccatacactggccttccatgtcctaactgctattttcaaataaatgaacgttatattcttggaggacagatcagggatgctaaactgcacctttatcatgattttagggatgagcgccttttacttaagtcctgctagtggcacatattttaaaaggccatagaggacatccgtgttgtcaacacaagtgaaggcgctcggaagagtgttggtcagcaagaatcagcacaaagacattggaggagagacaacagcttgtttctggaaacaaatgaacaacaaaaaaacactaaaacatctcgagggggcccctgacttgagccctgcatgggaaaagctgccaagagctagcatgacaagggactggccctgggctgcggtgaggaaacccagcgtcctgaccacactgctgggtcagcgaggcgtccctcagagaccggaaacgcggacttcagctcgcttgggaaacggcttccattagcagaagggagactgcggtttagtcccgaggtcgctccagcagcccggcctcacgcgacccaccattcccgccgccccctcacggtgcccgccgttcccgccgcccggctttctaaccgggcccctagttccccgccccgtgccctctggagacctgcagctcctgccgccctgcgcccgctcccagggcccgtcgttccgccgccctatccctcctcaaggggcccctagctgcctcctcgcgaccctttccggactcggcctgcccactcctgcccgctaacccgcctggctcccgggcgagagccctcgcgcggctctggttcctgttcctctaacgccgccggggctgcgggatgccgactccgcggaccgcccagacccggaactgctgaggcagcagcgggctcgcggcgcttggctcatcccgggattccccagctctcgcgctgggcccgccgcgttcgcaccaagcacgccaggcggccctggcctacctccctcccgcctcccggcagctggcacgagggaacctggccgtcaggtttcccctgggatcctgggacggtatcaggcggggaatctgtgcggccgcggcgaggtaggtgaggtgaggcggggcgaggtgggcgaggggggcgaggtgaggcggggcgaggcggggcgaggcgaggcggggcgaggtgggcgaggtgggcgaggtgaggcggggcgggtgtcgtcgcgctgggccgagcttacgactccagctgacccgctcgcggctgcccaatttcgttgaggctcaggacgagggacggggcggcaaattgtcacagaggtcgccgtagaccggtgtgcaaccgaaggtgaagagcgggaaggcgaggaccgaatcgcctctggtgtgcgttgtccgacaggaagtcccgaatgggctgtgagccgccggtggaggtgcccgggcaggtgcagagccacagcctgcgccccgtgagccgaggcgggtaggaggaacagggacctggcggcgacacacgttgggcggaaattcacaatgaacagggaaggggggacggtcacccactcaaaactggctaaatgaacctcagagggagccccgagagatggggagcaaaggttaggggaagcggcaggagaaaaccttcttggggcaaagggcgtcaccaaagggggtcaccggagccccgcaggttggggtgggagggctgggctggaggtgagcaaagctgcacggggagaatgaattaagaaagttgagaggaagcctgtctcatccaaatcactatagcttttgtggtcattgctaagtgtggagtactgcgcaaatcctgaagggaactctattagccatctcagcttttatcatcttaaaacgcgaatttcgcgtgcagctccatttagcttcgtaaacttaagcccccgcatatgaaaggatgagacctaatatgacaatcatgtcaggactaatgatatatcacacaggttgacactctgcaatttaaaaacaggactttgtctaaactccacaagtaattccttactcaaaagttctgtgtaaacaaaacagaggaactgtcgtgctgctggaaagatgtaccagcattttcacaaaacgaattaaaagatggctttgctttcactgtcatggttctgttgtgacagagtagactggcttttctgggaggggcctagatttactattttagttacattttaaaatcagtgtaattacttcgtttttaatctaccacaaatttctgttgtaactataagatttatataatcttatattcttacactaatttttatttgcaggtgatttatttggcataaaagtattctttcaaggatggcagaagctgttttgattgatctttttggtttgaaattgaactctcaaaaaaactgccatcagacattactgaagactttgaatgctgtccaataccaccatgctgccaaggccaagtttctctgtataatgtgttgcagtaacatcagctatgaaagggatggagaacaagataattgtgaaatagaaacaagcaatggattatcagctctcttggaagaatttgagattgttagctgtcccagcatggctgccactttgtataccattaaacagaaaattgatgaaaaaaatctgagcagcattaaggtaattgtacccaggcacaggaagacattaatgaaagcttttattgatcaactcttcactgatgtttacaattttgaatttgaagatttgcaagtgacttttaggggagggctttttaaacagtccattgaaataaacgtaatcacagctcaagaactaagaggaattcagaatgaaatagaaacatttttgagaagtctgccagcactgagaggaaaattaactattatcacttcttctttgatcccaggtatattaaccactaactgttgtttttactttgtacatggaaaactagtctttcttcagaggtagttcacctctttttttcctcctttcttttgttgactgttgtgggctgattactcattagcatcagtggcaacacagaggt

SEQ ID NO: 917152 - DNA, 4001 bp, Homo sapiens
gccctctaatatctcaaatgctgaatcttggtctgtccatttggacttattctgattgcactactgacatgctgtagcttgtgctggcattcctgtttccaactggccctcacaagggttctacctactcacacctccagatattgttacagcttcccaagacactcacctgagaactagtgttgctagtacccaatacaacaatatagcaaccagattaaatgaataaagcccttttatacctgacaaatgaaagaaattagacgaacatcaagtaatcctctgattcacacagtgactagtgatctagctgaaacacaaaactgccactcttatgtgtaaccaccagtagtggttattatctacagaattgaatccaggtcttaacatggtatagaaagccgtttatgacctgactcctacctacctcttcacattcatcttccactacttcctgactcaacctcaacattccagcaactctgaaataatagtaatttcttgcacattgctgctgtttctgttcatgtcctggaatgtctttcttatcctcctaaacctctgtccttttcgggctaatgttcattcatcctttaaaattcagctccaggataacattcttcgtgaagccattcccaatgccctaggctggcttaggtatctcctaaatatattaatatttctgtcactgtgtcaccataccacagggcaactttcctgtatgtatacatcttctccacaagaatataagcttcttgagaacagagactatattatggtttgaatcccagtgttggcgtccactatattgtagatatctaataattgttgaatggatttcaattaaaacaattaaaatattgatagcatcaagagttgtgattatgtcagtatttaatccctagcacggagataactttacaattctgataaattctgattttacaaactcctttcatgtcactcatgcagcacctagctcagtgtttgcttggtccacagtaagtgctaaataaatatcttttcagttgaaatataagaactggtgtgttggagagagagttagagtaggaaagcaagtcacttatcctcttcaagctttattttcctcatctgtaagaaactacctgcctcgaaggataatttcaataatatacgaaaagtccttaacacagcttggagcatagcaacaatttaaagtaaatgttagattgaatcatgatattgaacagctaggaaaacccttctctgaaattcagaagtaaaggcaattttgaatagaacacaaccaacctatttcatttagcttcaaaatatttttgtgatatatcacatacctttctcctgaagatgaattaataactgaccaattctctggagctgaataggaataaaaaagtcacagtatcaatgagaaaagctcaggatgaacaagttttatattaaaatgtgaaattgtataatacttaccaagtttcctgcttttggggcaactgtcttccgtctattttaatggaaaaaaaattgttagaggagtaatcggagtatcaaaattcaaaaattttacaaattattcttatgtctgattttgaaaactaggaaaaggggaaatcaaccatttattcttacctcctggacatctgaactacccttttcaggaagtgtgggcttcttccaaaaggatgcacaagctttcatgagtattatctcaaaaataattcctagtaaaattataaagaaaattgccacccaatcattttgaataatccaggactctagaaagtcccataatgtcatgaatgtattatcttccagtccactccctaccccttttttaaaggaataatattgctttgacattttaatgtcatatgtgaaagagactggtgtctcattcagaagtccttgatttcagaggccctgaaatataaaacctcggtatgcccaactcataaccatgtgcaacatttggccagtgctgctggtatcttatcaagtgcagcagtgattgctctgggcctaagttaagtgaggtacgtgtcatagtgggtatttaactgagctcatattagctttagcaataatggaagttcataggtaagatatgtacactgtataagtagttttttactaaaattcaaaaaattaccttctcttaacttcatagatagcaacataattctatcatggattgttgctgccctattataaatatagaataaatttggattggtagaaagcatttgacataaccatttctattaacaccaggaacaatgtattttatgcttctttgtggtaaggaaaatatagtcctttcttagaatgaatatagatagagttgacaggtttagcaaataaaaacattagatgcccaatttaatttgaatttcagagaaatgtcgaataatttttttggtctaagtatgtcccattacaactatgtagaatgtatgatgacttgtcttttatgagtctgatttttttcttaaaatagaacacattttatatttctttttgctagcagggtctgttggcaccatttcccttcaacaatctattgacatgctgaaaactaaagtgtctttggaataacctcctggtgaatttccttttcaccctgtctacagtgatttcagggagctacttgtgatgtcctttccgatgtcagaattaagggtagggcagaggcagatgtaagtacagtactgcccactccccttcaaagtctagtgggtaggcctggaagcttattgagcaaatatgattttagtcacaagtagacaggatagtctggactaataatgaaaaatgttaacactaccttggatttagagtactcttcctttgaaggtgtaattaattaatacttcctttgcagatgtaattcattaatgcttcactttggttttgttttagtacttcacttatccaaggtaggttaagcaaagaagtattattcattacactgaagtattattcattacactgaagtgaacagttcaggcctcttctgtcacatcagtttaaataagtacaacaaagatttatgacttcagctgggcgaagtggctcatgcccgtaatcccagcactttggaaagctgaggtgggtggatggcttgagcccaggagtttgagaccagtactaggcaacataggtggacctccgtctttaccaaaaatttaaaaattaactaggcatagtggtgtgcacctgtagttagtctcagctacttgggagtctgaggtgggaggattgcctgagcctgggagttgaaggctgcagtgagccatgatcctgccactgcactcccatcctggacaacaaagcaagacactgttgcaaaaaaaaaaaaaagaaaagaaaaagaaaaaagaattatcaactcttactgtccctgaacattgaagatcaagagatcaatgacattctaaatgttggaatttacagtcttccagtctcctggaccacaatgtacaggtatttctaatctttatttaagtataattcttatcttgaattttgtcttcgcaaagaatcgccctttagaatgcttggtaggtcttcattggctctgaaagaaacttcagcaattcctcttgatttttctagaactatggtaaagtacaccttccccgtactcccctgcccacaaagacaattgaggtgattttagtctcctgggtttccccataaaattcaagcagctgggccaggcgcagtggctcatgcctataatcccagcactttgggagcccgaggcaggtggatcacctgaggtgaggaattcaagaccagcctggccaacatggtgaaaccccgtctctacctaaaaatacaaaaattagctgggcatggtggcaggtgcctgtaatcccagctactcaggaggctgaggctggagaattgcttgaacccggggaggcggaggttgcagtgaaccgagatcacgccattgccctccagcctgggcaacaacagcaaaattccatctcagg

SEQ ID NO: 917153 - DNA, 4001 bp, Homo sapiens
ccctgttatttaaaatatttttgttgattataattcaattaaaaataacatcagaaaaataatacatagtaacccactactacttcaggaacaatttactatgacacattatttactgaaggactggttaagaaataagactcaggcaaaggaaggcttccaattagtcagttctaggactcaaatatgcactaaagctcaaagacccccaggcaaccattagaaatcttttatttatttttatttatttttttgagacagaatctcgctctgtcgcccaggctggagtgcagtggtgcaaactcggctcactgcaacctccgcctcccgggttcaagcaattctcctgcctcagcctcctgaatagctgggattacaggcatgcgccaccaagccctgctaatttttttgtatttttagaagagacagggtttcaccatattggccaggctggtctcgaactcctaaccttgtgatccgcccagcctcggcctcccaaagtgctgggattacaggcgtgagccaccaggcccggcccttggaaatcctttatttttaacttaaatatcatcctaaagaagttagttacctggtttttcagaaccaagcaaattaggcactgcacattattacagaaaggcatacctagggcaatacataacagctgacaaactgaaacaaagagaaaaaaacaaacactaatttaaaaggttagctatttagggcatcagtaaatagaacattatcatatgacagggccatttattcaataaatatttttgagtgcctattatgttcaaggcattgtattaaatacggaagaattcagtgaacagtgaacagaaaaatagcaatagcggcagcaaagttccactggatgcgtatcacaagccaatgctaagttctttatagtgcatttcattccaacctgggaacaacagcaggaggtatgagatgactatttgtataccagtcttagagctgagaaaactgaggattaaagaggttaattaacttgtctaagattgcatagttactgagtgacaagagatggagtttgtgtttttgcaggactgtcctcaagtacttgctcttattctctacttcctcagaatacacagaacctgtcctcagaacgcgtgtagtttggtagcaaaacaagaaatagacaggcaattaaaatactgtgactggagctacaatagaggaaaacccagaaccctatctaggcacaaaggagagtccaattctcacgggacttgtggatggagttgggagtatgtccaaaaaatactttaaatgtttcaaaaatttaacacgaagtacgaatactgtttttaaaaagcataaaggaggagtaacagttttactaaatgtcattttatgaagttccccttaaagggatgaaagaaaaaaaaaaccccgtataactaaataaaatctttggaattttaagcagaaaacctggatttatggagacatcaaaaccaaacacaacttttggcattacagtatatgggcaaaatacacgccatatgattggatccttaagggcagcacatcctacccggaaagctgcctacttaacaataccaaaggcttactcaaagaggcacgtgaatctttcgcatggaatacttttggaacccagaccgaagtgcccaggggttaatcacggcgccggtcttacagcaccctcagcggcttcagccctgagactctgcaggtgaaggctcggggggtgtggacgggaccccacaccgcgccgcccgccgactcacttcttgcggacttcttccagcaactgctgtttcaggcggttggtgctcacaccgtcgaagttgtagtttctctcttccttcatagtgtcaggccagagacctcccgcgtctttcccctcagcaccttagagcacaagacattaagggccacccagaagccagtacggcacgaggcggtgaaccccaaccgccccccggtcgcacctcccgcgcctgcccgcagaggcacgtggtgacgtcataaagcgatgcccgcaggcggcagggggtggggcgagggcagccggggagactggagaagcctactctgtgcggtggagcgaccctggataacagctccagggacactccttgctcaagacgctggggttagacgtgctccggctacacagcggagtgtcagggggccaagaatatccctctcctttttcttccctcctgctggctttggttgctttcctaaacattgccccggacggcaaagtcggcttcactcttagcccttgttagggaaacgctggatccaagattagctgcgcccttctttgcttcagttgaacaagcaccagagtcgctgatttggcagtgtcggagcgggaggaactggtcttaaaaaggtacctcctgaactcgggaagactgctaaccctccagattattgttttgcatctgtgtgctgttcatgaacatacctcagagctgctcactgcaacttgaaatttcattatatttttaatcacaaagtttgcatcctacccttgatacatctgtgtttccttgacaaaaagagacaaactctgtaaaatatttgaagagatttattctgagccaaatgagtgaccaatggcgggtgacagccctcaggagattctgagaacacgtgcccaaggtggtcagggtacagcttagttctatacattttagggagacatgggacatcaatcaaatgcatgttaagatatacactggttccatcgggaaaggcagggcaattggaaggggtgggggacggggtggcttccaggtcacagctagattcaaagattttctgattggcaattggttgaaaagttactgactaaagacttaggaatgtctttagagaataaaggggttgtggagaccaaggttttagtgagaatgggataattggtgtggaaaacacaatttggtgtcagaagtgttgtgaatacatagttttccaattgagtttctggatgagattaacatttcaattggtagactgagtatagtacattgtcttccccaatgtgggtgggcctcagccaatcgaccgaagacagaatagaacaaaaaggctgacctcccaggagtaagagggagctcctacagccaaacagcttgagctggaacacttttccagccttgggctcagactgggactgcacatcagtttgcttgcatctccagcttgtcaactgcagatcctgagacttctcagccttcataattgtacgggcaaattccttataataaatcttttatacacacactccctattggttctgtttctgtgaattaccctaatataggaggtatgcttatcaaaattttgtctagctgttaagtctgaaagggcaactcacaaccaagtaaacagaatagaatgaagtgaaaaggactagattatctgttgacaaatccaaatatacagaggatttcttttttgagacggagtctcatctgtctcccaggctggagtgcagtggcacaatctcagtttactgcaaactccactcctgtgttaaagcaattctcctgcctcagcctcccaaagtagctgggactacaggcacgcaccaccatgcctggcttaatttttttgtgtatttttagtagagatggggtttcaccatattgctcaggctggtcttgaactcctgacctcgtgatccacccacctctgcctcccaaagtgctgggattataggcatgagccactgcacccgacccagaggatttcttaaaaagatctgttagcaggatctcactgtgggaaattaggagcaaaggcaagcagaaaacaggtttgtcaacaactacagaaaccacagatttgtgtttctggcagagataaaggacctgaatttaccctcctgcctgaaacaactaaaaaactaagaggaacaaaaaaagaacattgaacatcaggcaataagggaaaacgatcaccaagagatgagacacaaatgaggcaag

SEQ ID NO: 917154 - DNA, 4001 bp, Homo sapiens; identical to SEQ ID NO: 917153

SEQ ID NO: 917155 - DNA, 4001 bp, Homo sapiens
agggatgagaaaaagtgctggacataggaaggtggttagagtgcagtaaagagctcagtgttgtcagataaggagtgcaggcacatgctgacagcattgttttccattttgtgctttctggaggaagctgccagggtccggccctcactcagtggatctcaccaacccatcatccgtgagacctattggggaaattttcagggctttctctgtatttttccatttctggtttaggaacagggagtggaggaggagaaaagacacatagctggtgtgtgtgtgtgtgtgtgtgtgtgtgtgtgtgtgtgtctgtgtgcgcgtgcatatgaagacacagtggctaggctgtggacagctggtggcatcaccatccatccagtcacacaaaccagaaccaggggcacatccttgacctttccctctccctcaccagacttctctcctcaaccatcaagccctcctagccgagatccagatccttaacatttcctgaaaccatgcccctgttccatctcccccatgacagccaggtcaggccaggatgcctgtaacagtctcgctgctctctgtattgatcttaccctctcatctgcccctgcactgtagccctacaggtgttttctagaacactctctcgtcctatcacatcagttcacacaccttcaaagaccctgtagcccaaagatcaaagctgaacgccctaggaaggccttgtgcagcccaactccagcttgcttctccctctccttcctacccagcctgcacccaactccaaatctaaggcccagtattaacgggctctattcagctcttggcactctgcctgcagtttcctgcctgtgtggtgaagcacatgtcgcatcctctactgagagccccttttgttcctgtggtgggcttgaattcctgtacatcctttcccctctgaaagctactcggaccctccagacaaagttcctcgccacctctgcgatactgtctgtctgttactccactattacttgtcacacttgattgaaattaggtgtggacatgtcttcctgacatctctgtaacccagcagctatcataatataacgccgcctatataggagggaattggtgaaaatgttggttgaattgaactgaattgaactgcattttggaaatttgattttctatgttgtatggctctttgcctagaatccctccaatatgtgaagtcctccctcacttccatgtcatgctggccccctctccctggatatccttgcccaacctcacttcagttcacctagcgaatccttcagcactcagatacctcctccaggccatctctcctaagctcagactgagcatgtgcccttcctgtcccactagaaacacctcatcttccatctctatgtctggcatccagcgaaatgttctgccacaggataggtgttcaggaaatagtagctggatgaatgggcgtctactgggttaggatgttggaaaacattcacctccaagtttttctcaagtgaacactaaactttctttaagaaagaaagaaaataagaaccatatcaaataggtagatgtgtattaaaatataaagtacaatataaaactgtagatgtgtatctgtatagctgtaaaaacatgcactaaagatacatgcccagttttcagttatactgtaagactaggagcttctttttaaggaaaatattatatattaccttatgcttagaacaaatactatacagtctaaagccaacagttacttactgcttagctgcttcccactggggtaagtcctgtagccctcagagggggcaggcggccattgtcatgtcagatccccagtgatgcgtgcttgcaggcttgccccaacaatgctggcagtgacctgtctgtgccctttcagtcctgactcacaggatggagatggccaagaaggggacccctataaaagactttaaggaaaggagggggcacttgaaaggtttgaaagagttcctcttcaatctttgacttcactgatagggcagtgctgttgatgactcacaagtgattgttaccttagattctgtcagcattggttccgggagcatggttctaggaagtcatgttctggtgggggctttgtgtgggatgaatcacttctcttgctgctttccagattcttcgtctttggcttttgatagtttgactatgatgtgtcttggtcttgaggtttattctacttggagattgttgagcttcttggatatgcagatttgatgccgtttttcatcaaatttcagaagtttttggccattatttcttcaaatattctttcatccattttctctgtctcctctccttctagggctcatattatgtgaatactagtagcgtgagtgtgtcccccaggtctctaaagttacgttcatttttcttcattcttttttctttctgttgcttagattagataatctcaattaacctgtttacaagttcatggatttttttcttctgtcagttcaaatatgctgttgaatccctctttaatttttcattttcaactccagaatttttgtcatgtagtaaaatttttaaatagtcaagtaaattaacatatccatcatctcatatagttacccttttttgtgcactgtagcaagagcacccacaatctactctcttagcaaaaatctttaatacagtgttattaactacagtcctcatgttgtaccttagatctctaaattatttatcctatatatctgcaactttgtaccctttgatttccctcttcccgtccactccccacacgtagcagctgccattttattctttgtctgtgtatttgacttttttcttacttcttctttttaatttttttaatattctacatataagtgaagttgtgcagcatttttctttctgtgtctggcttatttcacttagcataatattctccagtttcatctatcttgtgacaaacggcaggattctctgtttatgactgaataatattccactttatatacatgctgcaatttctttatccattcatctgtcagtggacccctagtccatccagaatttctccagaaattttcactgtgtctccagaatttgtttggttatatatagaaaaggatatatgtgcttttctatatacatatatatacacacacacacacacacacacttctatatatatattttttctatatatctatataaaagtatatgtatacaaagtgtgtgtgtgtgtatatatatatatacacacacacatatatatatgtatgcacacatacttttctgtctctttttggtaaggcatagtttttaattctttcctttaatgctttttttttttttttttgagacatgtttctgtcactcaggctggagtgcaatggcatggtatgatcttggctaactgcagcctcaatttcctggactcaagtgatcatcccacctcagcctctcaagtagctgggactacaggcgtgcgccaccagacctagctaattttttgtgtttttttagagataaggtttctccatgttgcccaggctggcctcaaacttctaggctcaagtgatctacccattcggcttcccaaactgttgggattataggtgtgagccatcacacctggccttgttttcctttaattcttttggaatggtttcttttagttctttaactacatttgtaatagctgactaaaaatcttggtttaatcgcccaatatctgcaattcctcagagacagtttataaccaaaaagacaattactcagagaataacagtttcaggccaggcatggtggctcatgcctgtaatcctagcactttgggaggccgaggagggaggatggtttgagcgtcctcctggtaggagtttgagaccagccagagcaacataacaagaccctgtctctacaaaactaaaataaattagtcagttgtggtggtgcatgcctgtagtcccagctgcttggaaggctgaggaaggaaggatcatttcagtgcagga

SEQ ID NO: 917156 - DNA, 4001 bp, Homo sapiens
gttaaggtatctatgatcagttaagttcacacaactaatatctgagggaccattacctgttagcatagctgcttagtcagtactgggaagatgtctgccttcaaagcacccattttggagtaatctaatctagcctgatctaatcctgattttaacactatccgcaatgaacacagccaagattatccaggtttgctttaggcacagcctgcatcaatgtgaacactgctctaacctggaggaaccccagttccacagtttatttggaagcattcacatttccttttagcccagcccttaaattactttaatatacataacccaaacagttcctagacctatttccttgatagtggaaaaaataacaaagaaaactaatcactatttctagctgaaaaccgaacccctcaaggtgatcttaagaaatcaactggcctgccaccgtggctgacgcctgtaatcccaacactttgggaggccgaggtgggcgggtcacctgaggtcaggagttggtgaccagcctggccaacatggtgaaatcccatctctactaaaaacacaaaaattagccgggcgtggtggtgggtgcctgaaatcccagctactcgggaggctgaggcaggagaatcgcttgaacccgggaggtggaggttgcagtgagccgagatcgcgtcactgcactccagcctggcgacaagagcgaaactccgtctcaaaaaaaaaaaaagaaggaaaggaaaggaaagaaaaaaaaaggaaaggaagaaggaagagaaacaaagaaaaagaaagaaggaaagaaagagaaagaaaagaaagaaagaaagaacgaaagaaagaaagaaagaaagaaagaaagaaagaaagaaagaaagaaagaaagaaagaaagaaagaaagaaaataaatcaatcaactttcctgtagtccagattccagggttgtaatactcagggggagttgtaggtacaagggcaagagaaaagcacctggcaccaaagcaggagagctgttctccacaagcatcattctcaatgcgtctgagtcattacctggccacaggtcctcctgtactgcccatttgcagttagcagccctagcactgtcctctgcgggggatcctggcccagcggggctctggtgagtatctgacaagcatcgggacctcgggccactgtagccagcacaactccactcttggggttgctgcagtgcattgcttcagactccacgggctgctgctaccagggaaagagaaacagacaagctgtttagtcgattccgtccaccccgggctccaaggacacagcgaacctctaggagggagagcaccaagcaatgggactaacaccaattgctgatcttcccagtaattattggggctgaaagggcaggtgcgaccgcacaggcgatcaaagttgctctgaatcaaaacagttatttgaatccctgagggaggctttttatcccaagacttcgtgttgggctggaaggagagaaacattctgacaagcctccaagtcgggatactaaacccacgttacctggaagacgaaatctgggagccccggtccttcccagctgagatactcttctccccagcccccaataaaagatccagggtacatgattgcgggaaagccggtctccatcccaagtgacgagcagggtgctgcgctgcggcctcctcccaccagacaggaggccccaaaacctgcctggaccccaaagcgggccccgctcttcccgtcgttatctttctatgtgtccggaacaactggcaagtgcactggaggatcgcggttaagaggtggccggctgggcggggcagggcggggcagggttgggcagggccgggccgggccgggcggggcagggcggggaagggcagggaagggcagggcacggaagggcggggcgggaaggaccaagtgtcgagggattccagcctgggaggcggccgggcttagcgatgcggctgagctgcccacccgcgtctgttgaatcggccaatcagcggcgcccccggacctagcgggagcgtttccatgccgaccgcggcaggcgtgcgctctccggggccgcatcgccatggcgacctgctcacctgactcgctccgggtggactcgccgcgacccctgggcgttcaggcccctgagggcccaacgggcgacggccctccagctccagctgtgcgtctccgcccgggcgaggtggggctgaccgcggccgtctgcacacgtcccctctggtccgcgcccccggcctgggagggcggactcgcccaccccacgatggccccggctttggaagggactgtttccgtgacccgttctcccaacagccgctaacaaccccctctaacgtctcctgcgcggcccgctcctgagaaccctggctcgggagagcgacgcggggtcctcggggctgcgcaggctgcggcgccctgcccacgctggcccgagggcgcggctcgctccgggtcggctcacacacctacgcttcctgccgggaggcggctgggacgcggcggggctgccccaagtgcagtcgcggcagtgttgcgtctccatcgcgggggtccttgcgggccgcgcctgccccgcccggctcccggtgcatgtggcctgcgaggcggcagaggagatgtggggatttagggtcgcacgtcgtgctcgaggtccccacgagaggtcttcccccgcgggctcctgcgcaactgcgtgaagccggcccgggaaagccaagattgtggcccaggaagaggaaggaacgcgggcgacagagctggggcttgggacgttgagggggtcggtggcagctctccgggctgggggccgggcgggcggcccggccgcgtggggagaggagtccctggggtccttatacggggggctcctggaaacccgggggctcagacgcctgcataggtgactgacaagccaggtgaaataatcgaactttatttttttaaaaataatatgtatatatgcacacacacattaccaatgctatagtctgttactacttttgctttttttaaaacatccatccctaaatctctaaatcagatccaaagtctattcaaatggccactttatgcaagcaacggttatcaccgtttttctaagtgtgcgttattaacattttcaccaagcaaactgagtgtggacattgctttaatgggaagatagtagtattctaacaaaagcgccggttgaaagccttgcagttgaggtaaatattaagaagttggtaagcatctggagaatcaaggctggatgagggaggaacgcagaaacggatcttgttcaacatgaaactcatttctatacgtttgtcacagacttctattccttgagagacagcagtccgcttgcaccccagatttcctgtgcctttgaatatgaaggaaacacgggaattctggtaacatctagattgccgcaacagagagtcagaggccaacggggaccaaatgctctgcttcgaaaggtgaatgaaaggagcatttctgtcctcttgcctgacgccactattggatatcttcccgggcgccctcccccacctgccaacagtgttgttatttcctgggtcgctgaaggactcagtggctaactccgtctgggactctacagcaagtcctgccaagagcctgagtcgcttgggagcggacaagattggctgcgctcacgagacctggtcctttgtacaccccttttcatctgatttcctttgacaaaaatgaccgaaacctcacgcccttttccttttctccaaagtagaggcgccggcgcagtgtttgttcgtggaacctgtcgttttgatccacttttctgggattgaagctgaagccagtgttggagtcggggcgtgcagggagtggggagcgcccaactcctgcagaggcggatctgaggctggtttttctcaactcagatctggccaggaccagatgacaaggctacaaaggtgtccagtgactttcagccgtctttagc

SEQ ID NO: 917157 - DNA, 4001 bp, Homo sapiens
cgtggctgacgcctgtaatcccaacactttgggaggccgaggtgggcgggtcacctgaggtcaggagttggtgaccagcctggccaacatggtgaaatcccatctctactaaaaacacaaaaattagccgggcgtggtggtgggtgcctgaaatcccagctactcgggaggctgaggcaggagaatcgcttgaacccgggaggtggaggttgcagtgagccgagatcgcgtcactgcactccagcctggcgacaagagcgaaactccgtctcaaaaaaaaaaaaagaaggaaaggaaaggaaagaaaaaaaaaggaaaggaagaaggaagagaaacaaagaaaaagaaagaaggaaagaaagagaaagaaaagaaagaaagaaagaacgaaagaaagaaagaaagaaagaaagaaagaaagaaagaaagaaagaaagaaagaaagaaagaaagaaagaaaataaatcaatcaactttcctgtagtccagattccagggttgtaatactcagggggagttgtaggtacaagggcaagagaaaagcacctggcaccaaagcaggagagctgttctccacaagcatcattctcaatgcgtctgagtcattacctggccacaggtcctcctgtactgcccatttgcagttagcagccctagcactgtcctctgcgggggatcctggcccagcggggctctggtgagtatctgacaagcatcgggacctcgggccactgtagccagcacaactccactcttggggttgctgcagtgcattgcttcagactccacgggctgctgctaccagggaaagagaaacagacaagctgtttagtcgattccgtccaccccgggctccaaggacacagcgaacctctaggagggagagcaccaagcaatgggactaacaccaattgctgatcttcccagtaattattggggctgaaagggcaggtgcgaccgcacaggcgatcaaagttgctctgaatcaaaacagttatttgaatccctgagggaggctttttatcccaagacttcgtgttgggctggaaggagagaaacattctgacaagcctccaagtcgggatactaaacccacgttacctggaagacgaaatctgggagccccggtccttcccagctgagatactcttctccccagcccccaataaaagatccagggtacatgattgcgggaaagccggtctccatcccaagtgacgagcagggtgctgcgctgcggcctcctcccaccagacaggaggccccaaaacctgcctggaccccaaagcgggccccgctcttcccgtcgttatctttctatgtgtccggaacaactggcaagtgcactggaggatcgcggttaagaggtggccggctgggcggggcagggcggggcagggttgggcagggccgggccgggccgggcggggcagggcggggaagggcagggaagggcagggcacggaagggcggggcgggaaggaccaagtgtcgagggattccagcctgggaggcggccgggcttagcgatgcggctgagctgcccacccgcgtctgttgaatcggccaatcagcggcgcccccggacctagcgggagcgtttccatgccgaccgcggcaggcgtgcgctctccggggccgcatcgccatggcgacctgctcacctgactcgctccgggtggactcgccgcgacccctgggcgttcaggcccctgagggcccaacgggcgacggccctccagctccagctgtgcgtctccgcccgggcgaggtggggctgaccgcggccgtctgcacacgtcccctctggtccgcgcccccggcctgggagggcggactcgcccaccccacgatggccccggctttggaagggactgtttccgtgacccgttctcccaacagccgctaacaaccccctctaacgtctcctgcgcggcccgctcctgagaaccctggctcgggagagcgacgcggggtcctcggggctgcgcaggctgcggcgccctgcccacgctggcccgagggcgcggctcgctccgggtcggctcacacacctacgcttcctgccgggaggcggctgggacgcggcggggctgccccaagtgcagtcgcggcagtgttgcgtctccatcgcgggggtccttgcgggccgcgcctgccccgcccggctcccggtgcatgtggcctgcgaggcggcagaggagatgtggggatttagggtcgcacgtcgtgctcgaggtccccacgagaggtcttcccccgcgggctcctgcgcaactgcgtgaagccggcccgggaaagccaagattgtggcccaggaagaggaaggaacgcgggcgacagagctggggcttgggacgttgagggggtcggtggcagctctccgggctgggggccgggcgggcggcccggccgcgtggggagaggagtccctggggtccttatacggggggctcctggaaacccgggggctcagacgcctgcataggtgactgacaagccaggtgaaataatcgaactttatttttttaaaaataatatgtatatatgcacacacacattaccaatgctatagtctgttactacttttgctttttttaaaacatccatccctaaatctctaaatcagatccaaagtctattcaaatggccactttatgcaagcaacggttatcaccgtttttctaagtgtgcgttattaacattttcaccaagcaaactgagtgtggacattgctttaatgggaagatagtagtattctaacaaaagcgccggttgaaagccttgcagttgaggtaaatattaagaagttggtaagcatctggagaatcaaggctggatgagggaggaacgcagaaacggatcttgttcaacatgaaactcatttctatacgtttgtcacagacttctattccttgagagacagcagtccgcttgcaccccagatttcctgtgcctttgaatatgaaggaaacacgggaattctggtaacatctagattgccgcaacagagagtcagaggccaacggggaccaaatgctctgcttcgaaaggtgaatgaaaggagcatttctgtcctcttgcctgacgccactattggatatcttcccgggcgccctcccccacctgccaacagtgttgttatttcctgggtcgctgaaggactcagtggctaactccgtctgggactctacagcaagtcctgccaagagcctgagtcgcttgggagcggacaagattggctgcgctcacgagacctggtcctttgtacaccccttttcatctgatttcctttgacaaaaatgaccgaaacctcacgcccttttccttttctccaaagtagaggcgccggcgcagtgtttgttcgtggaacctgtcgttttgatccacttttctgggattgaagctgaagccagtgttggagtcggggcgtgcagggagtggggagcgcccaactcctgcagaggcggatctgaggctggtttttctcaactcagatctggccaggaccagatgacaaggctacaaaggtgtccagtgactttcagccgtctttagccttaaaaaagccttaagaaataatagtaaccaaatgagaccttcggataatttaatacccctccccttatctgaatggctgcaccttaatccagccttaatctatatgaaataggattatcatgaacatcttttttcctgttccatccactttgctaaacttggcaaagggaagtggttagtttatgattgttttattgtgctgtcttagaattctacattgtcgttacaagcctctggtcatatcttaaacaggagagtgagtcccatgaactgatatctatgtgtgcatgtaaattcaggtacgtgtataacttgtgcaatacttatggctttcttggctttaaaaaatatctacactgaggccgggcacggtggcgtacgcctgtagtcccagcactttgggaatccgaggcaggcgaatcacgagatcaagagatcga

SEQ ID NO: 917158 - DNA, 4001 bp, Homo sapiens
atcaaacagaaatgatgagaacctagcatcatgccattccaagcatggaggaaaatgagaacctagccccttgttgccccaagggtaggagaaagaaaagacgcaggatgtttatacttccaattccaatatattggcttttatgattattcttactatacatttctgattttttttttgagatggagtcttgctctgtcacccaggctggagtgcagtggtgcaatctcagctcactgtaacctccaacgattcgttcaagcgattctcatgcctcagcctcccgcgtaactgggactacaggcggataccaccactcctggctaatttttgtatgtttaatagagatggggtttcactatgttgcccaggctggttttgaactcctgacctcaggtgatccacccacctcagcctcacaaagtgctaggattacaggcgtgagccactgcacacagcccatttctaatctgttttgatcctgtctttcaagatccaaaaagagactacttccatccaacattaatcaattagcactcatataatgctagactctaaagggtatatgctaggtaaaataagacatggtctctatctccaggcaatttatatatttctgtggcagaggagtaaactacctagataaaacaccaacagtatatataattgggggaaattatgtggtatagacaataatcttattagccgaactgacatatgaataccattagtacccgataaacatggtattctcagaaagtatttttagaatggaagatgacttattacggctgggaattataaagtgtcatgttaatcaataaagatattttttaaatcttaagccttgttaagtttggttttaggtatgacagaaactggagcaataaactcagattttaaaccactgcttttctaaggggaaaaactatgaaacaaattatacctgagatttttgccgctgggcttctgctggaaagagctccatccagaggctgagcagagtgaaaaggttgactttagaaagccttggtatctgacctacaaaagagacgacaaacactttaaactttgttactaatggtgaaaaagggagccaatctcaatgccacttaggtgctgcagcctaagcccagctgctttcgcaagaggcacagaaaaagataggggacaagagagtcagaggtatcttagcagtagacgcttcagccttagtcgtggctacctccttctccacttaaaaagttgagccttctttctccagccctcaccctgcaggaaaaaacggtacagctaatacacatagctgagggggacaacccaaagcaagctgtgaaaagtcttcgcatctgacgtcgtcgtggtgcaagcttttctttggactgtgatggggcgttgctaaaaggaaagcgattagaacacaacccgaaaaatgcgctgaccttcgacggtaaagcagtcgaaatacaggaaagcgtcacgtgcggttaatttggaaatcaaggcaaaagcgccgtttggaaatgttcaggctctttgacctcagaggccccagctctaggtcctgtgagaagtagctaacaggggtaaaaagcgagacttcaaaagccagtgcgaccgagccgattggtcctggcgaccgcggaggggacacgcagagggcgggcaggagacatccaaaagcagcaggggaggcaaagaggctcagacaaggaatctggagttcaatgacgggagacgcacagggcagagcgaaaggtagggtggcgggagcagggtcccggacactcaccggtcatgctgccagtctgggtgctgactgaccgcccggccctcgcgctctccagattttgcatctgcccagcttctttcatcccaaacctagcgtcctctgctgccaaggaaacctctcccagtcagacatgatctcggccctagcgcccccgcctctcgcctcctctcagcaactgtaaggcaacggcccactaggcgcagccagatgacgcctcaagcttgaccgccacttcagggctcctcgtgtgacgtcatagagaggcggggctttggcgccagagggctgcccctcggccggtgaccgagttaagcaccgagctgtaaatcgcttgagacctgtatttggttgttttgttggttttgccaagtaaggtcacttgaggatttcttggctcgaggtcccaggttgcgcagactctgactgcatcgagttgagaattttggtcagaatgttaaagtggaaacctaccccaggctgtcatggtcagtgttttagagaacttcttgggttggggtgtggagctgggcggtccaggatgttctgtcatcagagactggcgggttctggggaacttggtgccatggaacacagtagggacgttctgcttctcatcaagaacatgaagacattaagaggtggaattgtaatggggaaaaaggtgagaggaggcagtaggagttattttgtttttaatttctaatgtctagtttatttccacaaaacatctgtatcataccagttctttgaaatttgttcagacttgttttatgacctagatcagcactgtccagtaggatttcctgtagtattctatatctgcactgtccaatatggtagccaccagccacatgtggctattgagcatctgaaatgtggccagtacaaccaaggaactgcatttttaacttcatttagttttaattaatttacattttaagtagtgacatgtggctattggctactactgtattggacaacattactctagactctcctcctggaattcctattaggcataggttaaaccttctgaggttctaaattattatttttaaaatattgcatcattttgtttctctgagccacattctggctaatttcttcagatctatctttcagcttgctatttatttctttggcttgtagaattttttctagttcgcctgttctgagggtaaagctcttcaggtgatttgactatatccagagaactccattctgcacctttcctgaagtgtagactttgttgacagtgccttcatggcaattaacactaaggtttaaagacaggccatggactaggagaaaatatttgcaaagcatgtatccaacaaaggactcatatccagaatatataaagaaccatataaactcagagtaagtaaacagtccagttagaaaatggatcaaagacttgaatagtcatttcaccaaagaagatatacagatggcaaataaacatgtaaaacagtgttcagtgtcattggccattagggaaatgtatattaaaaccacaatgagattctactacacacctatttaaatggctaaaataacaagtactgacagcactaaatgctagtgaggatgcagagcaaccggatctctcaaacattgctggtaggactataaaatggcataaccactctagaaaacagtttgacagtttcttataaagttgcacatatgcttatcatatcacccagcaatcacactcctgggtatttatcctagacaaaccaaaacttatgttcaaacaaaactctgtacatgaatgtcatggtggctttatttttaatagtcaaaaactgaaaacaggccaggcatggtggctcacacctgtaatcccagcactttgggaggccaaggcgggcggatcatgaggtcaggagtttgagatcagcctgggcaacatggcgaaaccccgtctctactaaaaatacaaaaaattagccaggcgtggtggcatgtacctgtagtcccacctactcaggaggcttaggcaggagaatcacttgaacccgggaggcagaggttgcagtgagccaagattgcaccactgcactccagcctgggcgacagagtgagactccatctcaaaaacaaaaaaacaaaaaaactgtaaacaagccaaacagtccttagtgaatgaatagaaagcaaactggagtatatccatgccatgggacactactcagccataaaa

SEQ ID NO: 917159 - DNA, 4001 bp, Homo sapiens
ttttcgtgaccgaagtgcatgggcggctctgtgatattgtgctgtcaggtaaagacactgagccaaccaatagatgtcctggggttcttctggagggaaaaattcacataagtggtcagaggtacaaggtgaaatagaaaacgaattttaagattaatcagaaaaccagttagcattttgtcacttaccacgagagagtgaagctactttatctgcccaaaatagagcactttgatactgttgctgcataccaaaaaaaaaaaaaggtggtaactgccctgttattttaatagtcttaaacagttatctaatattattataattctatgtaatatattaatataattctatgtaataaatcttcatctcaagacaacaatttgttacatctctatcttacatctcacgtagggtaaattttagttcagtgtcgcaatacaaacattcctgtaatatctttgtatatgcaacttatgaaggtaattttttaaaactcatacactgtaaaaatgtatcgtgaaacatacaagtgaaatgcaagtgaaacagcaaaagctagtcattaacaattcatgtgtgatttatataacactttcaacgagctgttaatgaatcccaaagtgaaatttagaagacagaacactatactcaaataccttatataacacagtggcagttttaataacactcaagtttaaaaacacacacacataaattaactaagcttcactgaacatggggaagaactcacctcctccaagtctaacaaaaatgaaggagccgacaatgagggccacccacagtgacctacggctagctttagaccctgttctgctcctcagtcctcagtcttctacagtctctgcctcagttcccctggagacaagccaggaccactgctgctagcccgaggcaggaggaatgccaacgggatagttataaatatgctcaataccggtgtctctggctggaaaccgggcctgtcatattcctcactacgtctccgtaccgaagaaaaagtgatcagaaaacactgaattcaactgactcatggtaaataaaaacacagccctccaaatggactgcaaacatttggccacgtcagttagcacccaattccgaaaactctgcattaccatggcttttctttccctttctttccaatttcctgaaagagcaagcatttcaacaaaaaataaacaacaatatagataaaactgatgctgctgattctcgaagacacttcttgccttaaacgctctctgctattcaaaggtagtgcagagaacacagacatagttaacgagaatttttaaagtattgatttgagacaacaggcttcttcacatctttattcacttaaattcagcccagtaaaaattacaactaaacctctcaaaaatgttttattagctagccctgcaactttcctccaaaaattgtccttcaacttgcactgagtagtcagtgtttcctgggcacctcctccgcgccaggtgcagaacgaggctcagacccgactgaggcgccccgtgcgctcgggggcctccactccccgggctgtgcccctcccagctgcagggaccgctcccttctgggcgaggcggagacagcgctgctggccccagatgaaggcccagggccggcccagtccttccccaccaagagccccgacaacagtcaccccagccccacgccgcgcggaaaaagacccggcgaggcctgggccccgcaccccgagtcggggccgcccacctggtcgaggtactgccggacgcgcttccgcagccgctctaggttcatggcggcgcgggcccggcctcacgccacactccgccgctaggcgcgcgcctcctgcaccctaagcaccccgccccgtgcccgtgcccgtgcctgcagccgccgccgccgccccaggactcgaaggccgcggactcgaaggccgcaggtccccacccacacccgcaccccccacccaggccccgtgcactgcccaggctcttccgctccaggcaggccccgccccggaagtccacagcaaacgaatcccatctggcgcgggaaaacggacccgagttgttggttccgatgcctctcctggcacgtgggcttctggttgccttggggcgagagcgcggcctccctggaatcgctgcggcgcctctgggcattggcgagagagtcaggagggctcggggccggaccacccacccgggcaaaaaagcaggtggctgctgagccttctttccccagaatgtagtcaacattttaaaaataagagcaacgcactctcattacaaaaaaaaaaaattgtgtgcacaaacagcaaatgaagtcaaagacaacctagggaaaaatttgaaacctatcacaaaattcgaatttccttataatgtagagccaatattccctttacatatatgtaataagtcagtgggaagagaccaatggctcaggagaaagacaggcaaaaaacagttcacagggaaagaaatgcaaatagactttaacatacgaaagaaagtccaacttaattcataataaaaattaaaattagagtaccacttttcatatgttaacaaagatcacaaaggttgatgacactgctagcaggaatgtcgggaagcaggcaccctcaagttttgtgagtggtattggtatactctctaggatgaacgaattggaatatcttccaaatttaaaggtgttcgtgctgttaaacctaatgatttttattttgggaaatataccatggatttgcatttttgcatgtgtgcaaaatgacctgtggtttcgtttgtaatagcaaaagattgcagacaatttaaacacccatgaagtatggaactgagtaaataggtcatgatacgctcacgtaatggaatactcgctggctgttcaaaagaacagtcagctttgcatggacattgaacgatcttcaagatatagtatgtgggaaaaagcaagtataggatcgtgtttatcgtatgcctgcatttgagtaaaatacgaatttaatgataggtagaaaaatccctaaactgtcccaggaaggaaaaatgagaaaaccggcatagcgcaaggcctctggaaggagtgctggaagatgagagatggtagaagtgggagaggtacttccttggatatctttttgtgcttttgaatttcagtcaatgtgcatatattaccttttgtgaaattaaatcattcaaacttaaaataatttaaacttgaagctgttggaactttgaattacctgagccttgaggggaatgtggctacgcggcctaggtcatgccacacccagctgtaacttctgcctttttccctgtaaacaataaagaccaaatggcaccggagataagaccccctcagatcactacccctcctcatggagttataacgcaatcttccttcaaatacagagatccctaaccaatggaaccgctgcggcgtgtgcccctggtctcatatgagaactgtggtgatcctgctggagcttctgtctccgcctggtaagagagacctgagctccacttggaaaggctgaccccatttgtccaggtggccattctcaggctctgtgctcaaatacacactatatgtaatcatatttctgaatctcaatattaaggttgacacttttaaaaagtaaatataacttttataaatataaaaacctaaaagagtaaaaaaaattcaaagaagcaaaaaaaaaaaaacttgctgtaaagaatcccacccactcaaaaattctctcacgctactgtaagtaatctgccgtgtaattttctatgtgtgtgtatacatatatgactgggtaatattttgaagttgtgtttaaaaatttgtccccctgtatatttccttttcctcctcctttcccacttctgcaagcaggcagtaatcaactctgctcattaacttggggcaggcatgtggtgaggtgtgttttaagccatattttcaacgacttctatccatttaatgagattcctagt

SEQ ID NO: 917160 - DNA, 4001 bp, Homo sapiens
atgtgcttaagtaccccctgccaatacacagtattagttttctaataaaatgtacaacgttaaaacaaatatgcatattttattagcttaaattggtaatttatgaaaacagaaccggcttctctcacacagattaaaaataatgcaaaggcgctagaattttatataacatgtcagtttggtcaaatgtactgtaatgtctaatctcatgggattggggattttatgaatatgcccaaaattacataatactgggggaaggggagatggtttaaagcttttgagaaatattgtatggtgagttaacaaacataattttaaaaatatatgtcattacagagtaaaacttcaacaataagtctaattagacaacaacagagtcagcaatatctccagacgctgatttctccagtgtcaccagactatccattccgctaaaaagtacttttaaatacgtgcggcgcccagaatatcaagttttcaaatccaaatccctaccttctgccgatctgttccactttactgttgcataaaagcactaaaatacacattctaaattaattagaactcctatcttcctcgtagagtccattgtaaatacttttagaaagacatttcagtaaatctaagaaaaatgtccaataaatatacactttcctttccaacatccagaatactaaagtatttgtaaatatgcgcccccctaccccacagtagggaacttcagctttatgaatttttttttcgtgctaatgtagtctgaacatactctcctacctaattggaaattttaagtgattaaacatcatacagcaggtgactaaactgggatgctcaagtaaagctacttcgtttctaataaaatccaaggattatataataagctttgacttttcaataattttctattctgtcaaaggcaacagagacaacatccattttacaagaaaacatggagttaataaaatatattttccccccaactaagaattgccttctcttttgtcaatattacaagacattcatctactgacaaagagaaaaaatgaacaattcacttgcctgttaagaaactaaattggaagcattaccagtcataggtttaattaagttgttactagggaagaatatttaaagcaaagggattatttaaagttcactgccagccgctaaatttgggggaaaccgcctgaacgagatagtccctatgtcacttgccttcttccccaccacccaccctgcaccaaacccccattgttctatgtaaaaattcacagctaataatatctaaatagcaattgcaacatttatgttgcagatgatcactatggggaactctctccagaaccacattcactcgctgccttcctttcctcaaataaaatacaaatttgataaaaaatcgatcacaaactggtgggggaaaggatcacagccttccttctagaccgatggatgacactccagaggcgggtgaggaaatccccagaaggttaccataataaatcgaccaaggaaaaaaaaaaacaaaaaacatttaacccggcgttttagaacgaattttttcatgaatcagctttgaaatccttgaaaagtatacagcccacggtgcagaggctcatcttgcctcttaccaccagagcagaacacagacgcggcacgcaggatttctcgtgggtttggatccctcgtacaccacttcctccccaaacctggctggcggagccagaggccggcgtcgaggaagtcagagcccggcaccccggcggcccgctctccctccgggctacctgcctcggcctgcgggagcgccgcccagcgcggacaccggcccagacacacacactcacccatctttcctcttggctttgtagacgtgaccataagtgcctcggccaactttgcagccctcgtattcaaacaggtcctcgacccgctcccgctcgctgctcagcttcactttaaagtcatagtccattgtcacagcctctgaggccggagagctgggtcggggggccggggggcaggggtggggaccggggaagcacgggcagccgcagcccccgggaacccgcccgctctacgcccgccggccgcagcaccagcccgactgatgcggcaagagcaggaggaggccccgcgaaagcgccagggacatccagggggacggcggggcagaggccggccgggggtggaggaacggggaggatcccccggcgaaggagagccgagggacgagggctgggggtggggagcggtgtctctgcccttgtccccgcgggctccctgggcgccggctccgccgctctctccggccgcgcgttctgctcctgctgcggcgggagcggcggggcggccaggcgggctctcgtcctctcacacgcgcactcacgcctcacgctctcacacacacgctcacactcactcactcactcactctcccatacactcaaacagaagggcagagccgcacaacagccggtacctcctcaaagagaggaggagggagggcactcgcggaacacggccgcggctgtcgcaaaaacgtcgcgaagcctcgggctgcctccgggccacactctagcccgctcccgcggtggctggccgcccctgctggcgctggcaccctgaggaccgtgtggagggagcaggggagccactgcccaaagctgccgccaaatgcaccacgtggaaccagccccagcggtggccgggccccagactacaatacccagaatgcacaggccgccgccgctgccgccccttctacgactccgccccacacggtgggaatatgggagcgttgcatgatgggactcgtagtctagggtgaaattcgtttcaatcatttggggaaaatttatttttatttttacagcgatctaactagagtctgatttcagccacaaacttgatcaaagaggtgcacgtgggaaggagagtcgtttgcattagaaacacattttgtgccactctgaactccagattttaaaggccactatcatcgataaaagccggtatgatatttgtaaacagctcgcgggccagcagttggggtactcttggtgttcacaatctgataagggctgcacaatgatgtcaacatactgacattacaagcaccaataaaagtgaatcaatgaccagtgtccaagctactcctaaacattgttactcttgtgacagatgaccatccaaacctttcctatccatatacaggaagtattgagtacagtacagccttctgcgatactacctataagaacaccagtttctagctatgattacagaaaggatctaaatccatgggaactagtttgttaataatcttaaggtagcaatatgtcctgcttcaggagtcctggtatcttgatactaatctatcattttatcttaccccccttgtctatttttaatttttggttttccaattgttaccatttccactaaagctccccacttcccaaagggaatatgaactttgcagttttaatgtgaactttttaacactttttttcccacctttcctgtgatatttatcaaattcctttcatcttttatttcctctaccttgctagatcctaagttgttataggaagtcatatttgcatcttctgtaaaacctagtgtcatgccttgataatgatgcacagtaaacacttgttaaattaatgaatgaataaacatgtttatctcaaaaagatccatataccaatgatgatgatgatgatatcatcttgtgaaaaagcctccaaagggctttctcttatataattttccttggagaaaattagtgacttcaccactgtgtaaaattaaattgtttttacctagcatactatataagtattgagtattttactatactgggtttgaatcctgcattgtcatttactaatgtgttcttggagcctagaattttttctttgcaaagtgcaaagcacaaaacaaatgtaggctttcattaatggcatattatttgtttccattcagtgatgaaa

SEQ ID NO: 917161 - DNA, 4001 bp, Homo sapiens
ctttgatttatacagttgtaattggctataaacttctgcaaagtgcccataaccagcgtgcctgcccaattggggcatcaaggagcgaagcaagaaaagcggaagcgctgagggctggggaaagactttaaaaggggcactcaactaggactctccccaccgcacttccttgccacctctaggcacactcgaacaccagaaggggcagacccagagtcaatgagccccacagtccggcaaacctaggatctttttcagttgcacacacacactcacagacatccctgacacccttgaaaggaagctttgggagaaatgacccctacctggagcggcggcttaattcccaccagggtttcctccccgtctccctgctctctccgcagacgcctgcccctaggcttcttgcccctagccttccagcttttgcttgaaatgaccccttcacaggtcagaggttcagagacggggcgcgcccccgtcgccttagcagctggggctagcaccttcttcccagcgacagcagctctccctggtctgcctgctcgctgtaccttgaattggcccgagtggccaaacccggtcccacacacagcctagccatcctccgacccccccaggtcacttctcttcttagatggctcagatggggaaagagagagcggagataaatggcctagacctagcccaagaaggttcgagcctccctctctcctcggcggccaggagccacgcaaggaatgcatgccgcagcaagtgccggaggacgcgattctgccggcgtccagcagtgctcacgccgacattccccggagcttcccgaaggtgtcccggggttgcgaatgaggagctcttggaaagaggacgcctgaacacggtgttgagactcagaatattcactcccaggctcagtaggtcagagaagccccgacgggccagaggcccccgaatttgtctccgggccgtgcccctcctggcgccgagctcccagacagcccgggacgcccctgtgcgcactggacgcgcgacgcgcagcagccactggctcgacccgcgccttcccaagcaccctccgaaggggcgcagcctctgcttaccttggctgccgagggactgctgcgccggcttccgcatccactcgcacaggttccgccgctggccgccgggagacagctgctcggcggcagcggtggcggcgggcccaggagggccggggttgagcgtttgcagcagcccagaagcgcaggaaggcgcggcggccgggtggtgcgggtggtgatgcgggtggtggtgcggatggtagtctgcggggctgctgtagcccatggctgcggccggggagccaccgttgaggccgtgagccacggcgttggcggcggccgcggcgcctccgggcgcgtagccattccagtcctcccggagtggggcgccatacgctgccggccaggatggccccggggactgcgcgctgtccaagttcgctgccgctgcagctgcggccgccacgtggtaaccgccgtagtccgggtactgcggggggctgacgaagttctgcggcgccaggttgaggccgccagagtggcgcacggagctagggtacatgctcacgtccttgtccaggaggtagctcacgtacatggtggcgagggtccgggagcagacctcaccatgctgcctggggaccgacgctggaggctgccggggggcacgaagggaaaggggcgaggggactcgaggagcggcgggtggctgcgccccagcccgcggtgctccgctggctcctcgcggctcttctgcctccgaggcggtccctccctctggcctgcctcctccctccctccctttcttccttctttcctcccacctccttcccactaggctgcagaggcggggaagacccgccacaggctggcgtgcggagccccaggccggcggccttccgtgattaacgagtgtttacaagactctattagtaatgacacagacaccaatggttggagacgtcgaggcgcagcgcgcactctacgcacaacccctcgaaacataatttgcattttaaaagataaaggggagggaggctcgtgagagggcagcgacctgacacagctaaatattcaaacctttattgttaagagcttcctccttccaacctggtgcactttaacctccaatcacaggttcaaagaatgaaatcaagagacttacaaaagagaggggaagagaaaaggctatcttggtaggaatctgagcttggagacaggagcagtggttgtttatgcatttgcagggaagagggcggtcaagaaactccttctgtcccaaagagaaaagaaaagagaaccattgctttgatgagaacgtttctgaccaacctggtaggtgacaagcagagagccctaagagatgggccattccttcccgccctgtgctcctggcccggacgactgcagccccaaacaactgtcacctccagttattttcttgcccaaggaaattactcgccctccgcacaagacaaattatgatcctagattcaggctgcatctctgacttcatcttacatttgaaatttgagttaaattcaagcgatttattgttaaacgtttacattcaagaatcagaagttttaaactacagaagtaatgggcatgtggtagaagttaggctagtggttattggcgtgcataactggaggcgagctaggggatcgttggtaaagcagtttcttaggctgctggttacacagaatgtcagtttgtgaaaattcattgagctacacttgtatgtttattatacttaaatataaggaaaagagaatttctgctaatgcttacctaggtatttatgtgtcttacatcatacctgtatctttaaaactctctgtcctttacaaagggaaacgttctccgaagaaatttatttctcatttccaggagatgataaggcaactcagggccattattaacgactgctaatgaaaagctctgagttgagaaaggatctctcttggtttgggaagcgctgcggccaaggggcctagggctggaagtggccgtcttggggaccgaagccgcgcagcccgggatcgggagctgccccgacaggagcgcggaggcggcgagattcggcccccgcgcgcgcccagctcggtttcagcaaccgcgtggagtgggcctgcggccgccgttcacctcctaatacaagcctttgacagcgctgccagattcgggaatgaggatcactgcggcgaggcccggcgggctgggcagcctgactcggcggctttgagcgctctcagaacccgcgggcgctcgcggcactcctggagacctgcacttgtctgttctcattgtcaagcgtttcgctcggatatttgtcaccatcgccttcatcctgtcatttctagggtgctctccagtgtcctttatctcccttgagcctcacatccccctaggatctagaacaaaatctgggaggtgtttttatcctccccattttacaggtgacaaccagcaacttgcctctgcagacacctgaaagcgatcagaactagcctagggctgcgggatcccctgttttctggttcctcccacccttcgtgtttgtaaggaagaaggctggaaatgggggtggtggggtactcaggggccaaggagctgtgcactcaagaggtgggagaccgagctggtcctcctgggggacttccagcgcctggcctggacagccgagtgtcatcggacttcctgagaaatacaaccggaagcaaattgcaaaccccgttacaaaatccgaatcattgagagaagggcagtaggggaggtccgcagacctgatggggtgggaatgtgggaggttaagtggtgggcacttcgaacttttgatctagcaaacatcttcctcctcttcctggagacacaattcccctttccatcccccataccatccccgctcccaggcctgagctctggaagccgaggctgaggctccagcctatgtcttcg

SEQ ID NO: 917162 - DNA, 4001 bp, Homo sapiens
atgctgggattacaggcatgagccaccgcacctggcccatgtttccatgtatatgaagctgaagaacaggcaaaataaacccatagttataaatggcatattggtcgttatccaggaaaatgggagttgtcctgtctgtgtgaaagttgatcatacaaattgagtcattcttatagccaactaaacaatcaagaagtcaagagggaaaggcactcaggacacacaactttgctccaagaatggaattctctataagtcagtatgctgaaactgccggttgtaacccgagaccaatttgatctatagatgctgaggtaacttgctgcaattgtaggactaattttgccctccaccatggcccactcggtaggacctgctgcctccccagaaccttaggagaaccaatgaactttctcgaagagcgacagatataacaattctcttttttataaaacctccagctttctctttgttctttggacatactgaagaccacctggtctgtacgcctggaaccgccattctttcttcccaaataaaacgttaaacttaagagattcatctccaaatttttgacttcaacaactgggaaggttaatacagggggtggatacacttaggctgtacacttaagattagcgcactttactggatatctgttattcctgaataatttgtaaaaactttttctaagcaaattgtttttcagtaggaaaccaatctaaaaaagtaatgactttttttttttcaaaatcaaccacgtaactttgcttaatttcaatgaccttagcagaaaatctttcgaaatccaaattcagaagggagacaaactacaaggtcatttcataatatggaaaactagaaaaattccctactagactgacaagtgcaagcagtcttgggatgcagcagccagacttttgcatctcctcctccaactccccaccaaacacaccttctataccttcaatttcatgaccgcgattctaaaaatatatttaatgtcagcatgaagtataaaaaaagcgtcaccagaacctgctacttattattgatactgaggtcttggtaaagggagcattgataatatatatgccgagataggattagtatgtggactcagactttacagatatcaaaatctgaaggacacgggtgcacgtgtatgtcaaactcatcaaatggaatgcatttaaacatgtgccatttttattgtatagcaattatacctcaataaaacttttaaaaaatgtaacaaactgacagccttgaaatctccagaaagtgctatgtaaacattctttaaagcagtattgaaaaaaagataaattctctgcacggtgagggaggagagtggatacaaacagcaaattcaaagccactcttagaccgtgagaagtaactagttggtctgggaagtgatttagcagtcccctaaaatacaacacgttcttgaaagccatgaatccacacgaagcttcaagagagaagcccttgacaaagctggggcaagaccggcccttaggacagccagcaacgctacttcaccaccctgctccagcggactgcggctgccgcgctgcccacaggaactcaagttccgccacagccaggtcagagagacagacaccccagagaggccggcttccccagctctgcgaagaacaaagcagcgcgaatgaacgaagccactgaactgccgtgggcctcagcgcgcccgtgggcctgagcgcgtcccggcgccccgctccctcctcgccccgccgagccaaccccgaggtccgagcagagtcctgcccgcccaccgccgtccatctccggcgcagggcggcggacaaagagctcctccgctcttttcgcccacaaattaccgctccgtgaagcctgggcagctcagcagcacgaaccgacacctcaatctccgcagcatttacaaatgggccgccacaatcgccgcctctgtcggagccccgcccccgtcccgaggtcctgtgggaagtgaggatctcacccgcgcgtctgcgctaaagcgcaggcaccgctgagcccagtgaaactacaactcccagtgacgccacagcgacgggcgttgcccggcgggggatggactgcgcgccgccttccgaccagcagcgggccagtggtcgacgtaggcgggcggcgtggcggggcggaaaaccgtttccgggagagaccttccgtggtggacgtcgccccaggctcccacacttagaaaactaaagggaacgcctaacggagcgatggatctccgtgttcccagcaaagcagggagcacggagagtcaaagctaacatagagcccaaccgacgcttaaaggaggtgttttgggttttgttttttttttttctatttgcgtacggtctattttgtcgtttttttggtttggtttggtttttttctttgttttccgctttggctgaggtgacttagtaaaggagaaaaagggcagtccgctacaccatttcgtaagacgaaaataaccctatgagaattcactccaaaaataggcatctttcatctctcctcaaatggctaatcggtggtttggcagagtgtgtccattagattctgaaactagtttgaatactgacagtgcagaattcaagaaatttttttgttttgtttcgttttaactgccacggccctttaatctaggaagttacagcaccgtgagttaccacagtactacatacctggcttccatgtctgattaaacagcaggccaagtaaaatgtttaaagaaatcaaatgaagtgccatttataaccgttataactgaaacaaacgactgctaaagacaaaactatttcacagaaatttggtcctccaaaatttgttttgctttctacttcaaaaagagtctacttctctaaatcaagatttcggttttgcttcttttttcaatttttcttttctttttttaatttttattttttgagatggagtctcgctctgttgcccaggctggagtacaatggcgcgatctccgctcactgcaagctctgcctgccgggttcacgccattctcctgcctcagcctcccgagtagctgggattacaggcgcccgccaccacgcctggctaatttttttatttttatttttagtagagaaggggtttcaccgtgttagccaggatggtcttgatcttctgacctcgtgatccgcccgcctcggcctcccaaagtgctggaattacaggcgtgagccaccgcgcccggcccaatttttctttttaattttcactgtgggtgaggaagctaaagcccgagacttccgagatcacacagctacttaagatgccagacaaggacccaaacaatcttccttttcatttatgatagccctttggcttgaaagcatgcccaaaagtctcatcattcttcctaaaatgtgtatctttaaggatagtcgcaatatcctctatttttgtgcctatattttattcgtatgtttttattttaatatagtatgtagtgccacattgtttgttgattgaataaataaatgaatcttttaccacactcaagtcttaactggctgttaaattaaggttataatgtgtaagttttcacctgtagcccatgtaattctcaaaactgcccactaagcttcaagggttcaaatccattacaaggtggaaaggctagtggggaggaacttccatcttctactctgccagacaataaaatgttctaccttatcagtggttcctatccttgttgcatcttcagatggtgctgtagagaaaaattagactaacggttgtggcacaggggttttaatgccagattacccgttctgatacaattctttatgccatcataggagtcaagagggcactcctatgtcatggttaagagtccaggatttatcaggcagacctgggatcaaatcctagcttgataacttacaaacagctttgtagtcttcagcactcaacttttctgaaaccagtcttctcatctgcaaaacaggggt

SEQ ID NO: 917163 - DNA, 4001 bp, Homo sapiens
agcctccccagtagctgggactacaggcgcgcgccaccacaggctcacgcctgtaatcccagcactttgggaggccaaggtgggcggatcacctaaggttgaaagtcagagagcagcctaaccaacgtggagaaacctcgtctctactaaaaatacaaaattagccgggtgtggtggcaggcgcctgtaatcccagctacttgggaggctgaggcaggagaatcgcttaaatccgagagacggaggctgcagtgggccaagatcgcataactgcactccagcccaggcaacaaaagtgaaactctggctcattaaaaaacaaaaacaaaaataaaaacaaaaaacttgccatttaggccggacatggtggttcatgcctgtaatttcagcactttggaaggccgaggcgggtggatcacctgaggtcaggagttcgaaaccagcctgaccaacatggagaaaccctatctctactaaaaatacaaaattagccaggtgtggtggcaagcgcctgtaatgccagctacttgggagaatgaggcaaaagaatcccttgaacccagggggcggaggttgcagtgagccaaggtcgggccattgcactccagcctgggcaacgagagcgaaactcccgtctcaaaaaaaaaaaaaaaaacaaaacttgccatttaatcatttttaaaagcacaatttagttagtttagtactaaaacgttgtgcaaacatcaccactatccacttccagaacttcttcaccacaaacagaaattctgtacccatgaaacagtaacttccactctccactttcagtgctggtaatctcaattctgtgcctgagggggaatcatacagtatgtcttttttgtgtcttatttcactcaacataatgtgttcaatgtgctcgtttatactgtataatgtgttcgtttatattgcagcatgtatcagaatttcattcctttctaaagatgaacaatggtccattcattatatgtatataccacagcttgcctttcatccacatgttgatagacatctggattttgaataatgctgcgatgaacatttgtgaacaagtatctgagtctctgctgtcaatttttgggggtataaacctagaactgaggaacgactaccaatttccatagctgctgcaccaccctactttcccaccagcaatgcacccgagcttcaatttctccacatccccaacactcataatttcccttttttttaatagccaccctaacaggtgtgaggtggtatctcattgtggttttcatctgcatttccttaatggttagtgatgttgagcatcactgcacgtgcttattggccatttgtctctcttctctggagaaatatctattcaaattccttgcccattcttgaactgggttgctttttgttggtcagttgcatctcttcttgtattctagacattaactctttatcaggtttacaaatgtcctctcccactttggaggctgtatagcggatttttaaacagtaataatgacagaagaggaggcagtctagaactaaaacagaaagaatggctttcgtcttgtgccgccctcaacttcccaatggtttcaaacgcaatgtttccagcctcggcagcgactgacaccgggcctccccgctccctgcacaaagacgcactcccgccccggcctgtgggggcgggcccttccctcgggccgtgtgggaagcgaggcagcgcaggcccccttcactcggacccgcggcttcccgggaccgtccccgccaggtcggcggccgacacggggctcggggatgcaggccccaaccacgcccctcccccgctcgctctcgctcctcaccggtccggccgcgggcggcgtccagtgggcgatggaccgcgcggagggcccggctcgcggtcgcgggcggctccgcgaggccctgcagcgcagcggcctcccgaatggcgactggatgcaggagccgggatccgggtgcgcgagcgtgcgcgctcccgcgggacgggcgggggctgacgggaagcaagtttggcgccgcgcgccctcccgcgcgggccaatcagatcgccgatcgcgtggcgcggctgtgccaaaagtgcgtgggcaaaactagcggctcgcgcgggccttcggaagggctgcgtgcccgccccgccccggaagtgccgcacgtgcccactccgcctccgcttcccgcgcgcgcccgggcgcggctccgggagggttccgccgcgtctggcctgtggcctccggccaggcccttggaacggccccggcctgccgccgccgtgcggatatctcttccttttcttgctgttttgattgttgtgtgaatgaatttattaggaaaaaaagagctagacctgccccatacattctcagggatattactggcataatacctatgacaaaagtacaagacaaagttgttggatgacagtaaatattccttttctcatcaccccgcctccactgaaagtcccgattcccagaagttatcttcttcgttttttgttttcagttttatgaatgttaccaccacaattctaattaaaatgcatgcacctctaatgctgatgccatcagtctgtatgctttgaaagactgtaaaattagctcacactgctctctacctttgtacccttctgaagttttgcttgttgtgaatttcatttttgtttttgtggtgaaaatgaactatagaatggccgggcgcggtggctcacgcttgtaatcccagcactttgagaggcctaggcaggtgaatcatctgaggtcaggagttcgagaccagcctgtccaacctggtgaaaccttgtctctgctaaaaatacaatattagccaggcgtggtggcgggcgcgtgtaaccccagctactagggaggctgaggcaggagaatcccatagaaccggggaggcggaggttacagcgagatcgcgccactgcactccagcctgggggagagagtgagactctgtctcaaaaaaataaaaataaaatccatagaatttaccgtcttaactatctttacgtgtacagctcagtggtggtaagtatattcataacaccaccatccatctctgtacctctttcatcttgaaaaacaaactatgcattacatgttaactctcggttcccctctaccttctactttctggcagtcaccatcttacttcctgtgtctctgagtctgactactcataagagtggaatcatacagtatttgtcttgtgactgacttattttacttagcagaacatcctcaaggttcatccatgttgtagcacattgtggaatttccttcctttttaacactgaatactatcccattgtatggatatgccacattttgcttatccactcacctgttgatggacacttggcttgcttccctattcaagatattgtgaataatgctttgacattttcaaagaaccaatttttggtttcattgattttctctatcgttttctattttctatttcatttatcttggctttaatctttattatttccttctttttgccagctttggatttagtttttctttttatagttcattaagttgtaaagttaggttgttaatttgagattttcttggtttttgatgtatttatagctataaactccccctttagcattgcttttgctgtatcacaaaagttgctatattgtgtttacatttttttcttttcttttcttttcttttttttttttttttttttttgagacagagtctcgctctgtcgcccaggctagagtgcagtggcgccatctcggcttactgcaagctccgcctcccgggttcatgccattctcctgcctcagtctcccgagtagctgggactacaggctcccgccaccacgcccggctaatttttttgtatttttttagtagagacggggtttcaccgtgttagccaggatggtctcgatctcctgacctcgtgatccgcccgtctcagcctcccaaagtgctgggattacaggc

SEQ ID NO: 917164 - DNA, 4001 bp, Homo sapiens
tgaactcccccatacactgagtaaaaagctttgctaaataatagaaagactgacctttgtgtggtgtaaacagtaagttgataatctagtctatgcacatactttgctttataattgtttttttctcttagactgtgaattaatttacgtagaaaacgataatctaggccgggcgcggtggctcatccttgtaatcacagcactttcagaggctgaggtgggcggatctcaaggtcaggagtccaagaccagcccggccaacatagtgaaacccggtctctgtttaaaatacaaaaattagcagggaatggtggcacttgcctgtagtcagtcccaggtatttgggaagctgaggcaggagattcacttgaacccagaaggtggaggctgcagtgagccaagatcacgctactgcactccaacctggcaacagagtgagactctgtctcaaaaaaaaaaaaattaataaaacgatgatctaatgctgcaccatccaataaagtagccactagccaatgtggctactgagtgcttgaaatgtggatagaccaaatggaaatgtcctgtaactgtaaaatagacaccagattttaaagacgttgtaccacaaaaagacgtaaaataatatgtaagcagtttttctaaatgtggctactagaaaatttaaaattacagatatggcttactttacattttcattggacagatctgatacaattttacagaagtgaaaagaaataaacttgaccttacctggataacatctcattttcctgcttgtatgcaaaaagcgtttttcttctcaacagatgttccttgagtttttgtcttctttgctctagataacaaaggtaagagctacaagtcaatattagttaaaacatcgataacggcaaataaatcttgttgactaaatgaagagtttacttccaaagctggttccacctgaggtcacatctatataacagaaaattctccaattcaatattgcctttgagaaatcaccttagaagagactgttaccacaacaggtccccaaaacccctctgcataagaatcacattctctactccctgtgaaaaatctggagaacatcattttctacatacagctcctgctagccaagctttaagaaactaaatggtagaagtgaggcactagactcgaaagttctaatttaccagaactgggttagatgagaattactttcttctgctttcccgtgtgtagaataagggaataacaatattagttttgaagacccaaccaaccctcggtttccataaagtcgaaggagaagctgtgaaattggaaataacacatgatgcgaccccagccctgcagaaattcgctagggacctaagaggcggaggacccagcgcaggcgcagtcggtccctgaacctgtgcagccccgcccccaagcggacccagggtctccgacaccgaccccggcctgaggcccgcgcgtttcccctcgcctaacggattccttcttaggagggcccatcccagccagcagcgaccgcacagtaacaccacgcagcggttcctgtttttatgatccgttccacaaggccaagaatgaggcagggcgaggccgacgccgcgttcagggatctcacagagcgggggagaggtgaagcgcgccagcgcggccccgagccccgaccgccgggcccgcgcccgccaccgccaccgccaccgccaccgccaccgccaccgcggccttcacctttgaatgcggactgcgccctctgactcgggggcagctgcaggtcctggggcacggccggtgtgctcatcgtagcctcgggtcgggggatgcgtctccgctttagcgccaagatagaacttcctcagaccaccgccgccgcagtctgcaccgcggctaagccgtcagacggcgcggctgccgtctccgcccattggttcctgcgtgaattgaataagccaatgggcgtagggaggcggagcctggactgcagttgccggggccggtctggtgtctgcccagttcggttgggactgagtctgcaggtttcaaacctaaacagcgctcttcatcctggacgtgcgatgggggaggagtcggcctgctcagtccccacgacatagcaggactaggttgacaaacaaccgagatgggacacatcttgagaccctcacagtccttggaggaaggcagacgagaaaaagacaagaaaagtgttgattggctgcccttcttattaaacatcgacgcgttcactgacgaggacgtaaacaccgatctggcgtaccacgagcgtgtgtattttcgtttcacaaatactgcttcattttgagcatcaattctgaggtgggacgttatcaccactttttccactgagaggtgacaggttcagaggttgtttgtccacgtttgcacagcgtgtgaaggggaactgaaattgggatctactttccatacctttattctaagcaattatcaaatgcaaaaaagggaggagaggaggagaaacagaaaaaaatgaagataaacctcatcccctcctcaaggttatatataattctcctttgaagataaaatagcatttgttacagacgttttgtgtttgtgtggttaagtgtgccgccataatcttcgtttttctcatctaaaaataccaccttcataaaacccacacaaacactcaatccacatgacagaacgaaacaagtcagggctagaaggttttaagagtggcagtggggaagtgagggcgagtctggactgcacctgcctggtttcaagcactgggtttacatttcttgcctgatcactgcagtaaggctggactggactctttcagccaggttttaggtgctccgggcacacagacgggaggatgtgatttccccgtttacccttcccaggtctgagggcctccacagctggccctcggctgtggtcagtttttcccacttctgcctgcttttttcttcagacatcttatggtagcgtcttgctaatgaggaatttggtttgagattttgtgtagttttttacttgatgaaatgtcccagttttagtttaacattgtccatcaccatccttaagatataacttgctgtttaaatacgtctgtcattattgttgattatttactaaagtttcatcagacaggtggggcaaccagggatttctattaagtgagaacaaaatacagcgttaataagtgactcaaaaacctccaaaacattatgctaagtaaaagaagtaatatatgaaaagttacatatggtatgattccatttatatgaaagatctaaaatagatacatccatagtgaaataactcagaatagtagttgccagaggctgagggtagggggagaattgggagacagtttaatggacaagggtttcattaccttgaagtaagtgaaatgttttggaattagaggtagtggttgggtgacattgtaaatgtattaatgccattgagttgttcactttaaaatgattaattttatgttatgtgaacctcaataattttttataagtgggcatggtaaaaaaagaaattgactcaaaggataccatggagatctcagtaggctgagatgaataggaaaacctgccaaactgctaggtttttcaaaatggcaattctcctctaatctccagactcacccactccaatgatatgtctatttttgagacactttttaatattactgctacacaattattgcagagaaagcagacctttttctaaaagatccaaaaaacaaacaaaaaaaacaaaacaaaaaagatttcctttcagaacagttctttgccaacacagctgaccatgaaactgcaggcacctggagtactgatgattaattagtgttagtcgttcctcctgtggtcatgtgaagaaggtaaagtgcctgtgagagaacagggaaggacaatctgaaagttaggaggacaatggggacacaatggggtcacaaagtctggggaagagagaagctgaagaaagaggta

SEQ ID NO: 917165 - DNA, 4001 bp, Homo sapiens
cccaggatccacctattgttaaaatttttatcccatttgcgttatcatttccactctctgaatatgtgtgtgggtggtatatacaattttgtttacctgagacaattttttttttttttgagacggagtctcgctctgtcacccaggctggagtgcaatggcacgatctcggctcactgcaacctccatctcccaggttcaagcgattctcctgcctcagcctccccagtagctgggattacaagcacccaccaccatgcctggctaattttttgtatttttagtagagacggggtttcactgtgttagccaggctggtcttgatctcctgacctcgtgatctgcccacctcagcctcctaaagtgctgggattacaggtgtaagccacagcacccagcctaagcctgtaaggatgttattactggttatccctagagagtgaggggaccttttgcctttctgcttcatctactttcatgggtttttgtttttgctacagctatgtactatctaagatattttaacaaaataataaagatatttctgtggagggttgagactacaactagtaatctctaagcatttgggagggccacccaacccttccctgatgaactcccccatacactgagtaaaaagctttgctaaataatagaaagactgacctttgtgtggtgtaaacagtaagttgataatctagtctatgcacatactttgctttataattgtttttttctcttagactgtgaattaatttacgtagaaaacgataatctaggccgggcgcggtggctcatccttgtaatcacagcactttcagaggctgaggtgggcggatctcaaggtcaggagtccaagaccagcccggccaacatagtgaaacccggtctctgtttaaaatacaaaaattagcagggaatggtggcacttgcctgtagtcagtcccaggtatttgggaagctgaggcaggagattcacttgaacccagaaggtggaggctgcagtgagccaagatcacgctactgcactccaacctggcaacagagtgagactctgtctcaaaaaaaaaaaaattaataaaacgatgatctaatgctgcaccatccaataaagtagccactagccaatgtggctactgagtgcttgaaatgtggatagaccaaatggaaatgtcctgtaactgtaaaatagacaccagattttaaagacgttgtaccacaaaaagacgtaaaataatatgtaagcagtttttctaaatgtggctactagaaaatttaaaattacagatatggcttactttacattttcattggacagatctgatacaattttacagaagtgaaaagaaataaacttgaccttacctggataacatctcattttcctgcttgtatgcaaaaagcgtttttcttctcaacagatgttccttgagtttttgtcttctttgctctagataacaaaggtaagagctacaagtcaatattagttaaaacatcgataacggcaaataaatcttgttgactaaatgaagagtttacttccaaagctggttccacctgaggtcacatctatataacagaaaattctccaattcaatattgcctttgagaaatcaccttagaagagactgttaccacaacaggtccccaaaacccctctgcataagaatcacattctctactccctgtgaaaaatctggagaacatcattttctacatacagctcctgctagccaagctttaagaaactaaatggtagaagtgaggcactagactcgaaagttctaatttaccagaactgggttagatgagaattactttcttctgctttcccgtgtgtagaataagggaataacaatattagttttgaagacccaaccaaccctcggtttccataaagtcgaaggagaagctgtgaaattggaaataacacatgatgcgaccccagccctgcagaaattcgctagggacctaagaggcggaggacccagcgcaggcgcagtcggtccctgaacctgtgcagccccgcccccaagcggacccagggtctccgacaccgaccccggcctgaggcccgcgcgtttcccctcgcctaacggattccttcttaggagggcccatcccagccagcagcgaccgcacagtaacaccacgcagcggttcctgtttttatgatccgttccacaaggccaagaatgaggcagggcgaggccgacgccgcgttcagggatctcacagagcgggggagaggtgaagcgcgccagcgcggccccgagccccgaccgccgggcccgcgcccgccaccgccaccgccaccgccaccgccaccgccaccgcggccttcacctttgaatgcggactgcgccctctgactcgggggcagctgcaggtcctggggcacggccggtgtgctcatcgtagcctcgggtcgggggatgcgtctccgctttagcgccaagatagaacttcctcagaccaccgccgccgcagtctgcaccgcggctaagccgtcagacggcgcggctgccgtctccgcccattggttcctgcgtgaattgaataagccaatgggcgtagggaggcggagcctggactgcagttgccggggccggtctggtgtctgcccagttcggttgggactgagtctgcaggtttcaaacctaaacagcgctcttcatcctggacgtgcgatgggggaggagtcggcctgctcagtccccacgacatagcaggactaggttgacaaacaaccgagatgggacacatcttgagaccctcacagtccttggaggaaggcagacgagaaaaagacaagaaaagtgttgattggctgcccttcttattaaacatcgacgcgttcactgacgaggacgtaaacaccgatctggcgtaccacgagcgtgtgtattttcgtttcacaaatactgcttcattttgagcatcaattctgaggtgggacgttatcaccactttttccactgagaggtgacaggttcagaggttgtttgtccacgtttgcacagcgtgtgaaggggaactgaaattgggatctactttccatacctttattctaagcaattatcaaatgcaaaaaagggaggagaggaggagaaacagaaaaaaatgaagataaacctcatcccctcctcaaggttatatataattctcctttgaagataaaatagcatttgttacagacgttttgtgtttgtgtggttaagtgtgccgccataatcttcgtttttctcatctaaaaataccaccttcataaaacccacacaaacactcaatccacatgacagaacgaaacaagtcagggctagaaggttttaagagtggcagtggggaagtgagggcgagtctggactgcacctgcctggtttcaagcactgggtttacatttcttgcctgatcactgcagtaaggctggactggactctttcagccaggttttaggtgctccgggcacacagacgggaggatgtgatttccccgtttacccttcccaggtctgagggcctccacagctggccctcggctgtggtcagtttttcccacttctgcctgcttttttcttcagacatcttatggtagcgtcttgctaatgaggaatttggtttgagattttgtgtagttttttacttgatgaaatgtcccagttttagtttaacattgtccatcaccatccttaagatataacttgctgtttaaatacgtctgtcattattgttgattatttactaaagtttcatcagacaggtggggcaaccagggatttctattaagtgagaacaaaatacagcgttaataagtgactcaaaaacctccaaaacattatgctaagtaaaagaagtaatatatgaaaagttacatatggtatgattccatttatatgaaagatctaaaatagatacatccatagtgaaataactcagaatagtagttgccagaggctgagggtagggggagaattgggagacagtttaatggacaagggtttc

SEQ ID NO: 917166 - DNA, 4001 bp, Homo sapiens
taagtttagaaattgaccctgaagagagacatagcatggagtcctcaaatgggtacttaggaaagtccatgttatttcagggactaagtgaggcatccacgcttgaatatttcttttgattgtcattagaaatctcctggatttagttaagtattctctctttatcccctggcactcattgtagactaatgatgtgcatacttgacacaaaatctcctaacacattatgctttagtaacttcctagttaaaattttatttcattttctttactggggccaaggtacagttttactatttgactgtgaaaagtctatattttaccaagaaacaaagagcaatttttaaagtaataaacccacaatttgtggcagatttgtaaatgtatcaaatttgcagaaagcagaggcagatagtaattctcataatgacaggaaagcaaatgacaattgtttccctgaaggcattctggagtatgaaaatgtccttaaaaaatatatgttccctctttgagatacgtacacttgtaatagagtttctaatatgcacaacgatgaaagcttgccccatgtattcttagataaataaaatcaggtaaccaaaggggaaagtaaacagcattttctttcacttaaccgctttcaaatttttcttgctgttattttatcattcaatatggttttttgtttcgttttgttttatatctaggctgtgacaaacattaaaaaaaacgtggaaacccttctgaaaatagaattccttccttcgttatcaggaatctaggataaagtagatgtaaggagacatacggattaccttacaggccttttggaatgctcagtgtgactccaaaggaaagagtggaagtggttggattgttttaaaagccagtttgaatttgccatcgtttgccagttccaatctagcaatggcatattacatatatatgtgtgttacatatgtgtgtgcatgaatatatgtatatatattcatatagatacctgtgtgggttatatatgtgaatgtatatatacacacatgtgtgcatatatatatacacacgtgtgcatatatatatacacacacacatatagatacctctgtgtgtgtgtgtgtgtgtgtttgtgggtgtatatatatatagagagagagagacagagagagagagagagaggaagagagggagagacaagtttaaatcaatgagagcatttcctacataggggtgctgacccatcaagattcctccatgactcaaggcaaattgaaactgacttttaaaacaatccagtcacttccactcttccctttggagtcacactgggtattccaaaagccctgtaaggttattcttacatctcctttgtcaaataagataaatgtcattctttcagccaatactcatacaccccatccttcctaggcaaatcttggcactttgattaagcactcagtcttcagagagttaacagccagccatagacagctacttcagcacagtcggggggaaaagtacattttacctccaccccaaacaaagccattatatttacctgctactttgaagatagtaaaatgcggtcggcaatggaaagaacccaacgcgttacctgcgcagttcatccacagaccctggtaaacccaagtggctgttatcaccgaggaggctcgcgtggtcactttccactcattggacgtggtagcagcaacgagagctccaaaccctccgacaccagacaccagagcccagatctgcgccctggacatgtcgcgccgccttctccagtgacactgtccggtcagaacgctttggtggtctaggcatgcagccgatagagaacactttgacaagcgtcacagccagcggatgtgggtaggtgacagcgtttcatgctcggatggcctgaggaagtacaggaatttaggatcaagtatggtttaccaatgacattttaaagatggcctgaaagagtcgttctgattttctacacggatatttattaaaatttcgtagacgaattttaagggttttgatttcgcagacttttttttaacttggcaccatagttaatgcttaattttctgttagcctgaagcttaacgaaccatgcgactaccagatattacaaagtacaaattatacagtaacagttaaagcttatttgaccagttgctttagtctcgcttgcttttgaatctttacataattgaatcatattgtagaaattctcccataacctatttttttcatgtaacactgtatttgagggatttatccatgctcaggaatgtagctgtcattcattaaatattacagctgaatatagtatttcattaaatgcaatttaacgaacatgatttattcatgttcctggagctgactgaacattcgtgctgttccgttttctccgtaataaccattggcgtagctataaacattcttgtgcatttcttcttgtgcacgtgagtgagagtttctctagggcgtatcctacaatcagaattttgctagggtgtaggaaacagtcatctttaactttatagataatgctaaattgtttgactaagtagttatagcaatttagagttccactggcagtgggtaagtcctacgtgttccacttcataacacttggtattgtggggttgtcaagattattattttttcttttggccagcctgatgggtataaaggtgtcacattatgattactaatttatattttctgattactaaggaggttgagcatctttttttgtgtttattggttatgtttttgtctacagtgaaatatgcaacttttgctcacttatctattgagttgtttgattttttataatttatttttagttatctatatactcaagatagtaatcttttgtggattatttatgttgcaggtatcttcccccagtttgtggtttgtctttatgtggccatttgagaaagagtcttggttttaagatagctaaatttatcaagtttcaccaagcgatttgtggtttgagatcttgattaagaaatccctatcttgggcctggcatgatggctcccagctgtaatcccagcactttgggaggccgaggtgggaggatcacttgaggccaggggtttgagactagactgggcaacatattgagacactggctctataaaaaatacaaaaattagctgggtgttgtggtgcaggcctgtagtcccagccagttgggaggctgaggtgggaggaggatgccttgagcctgtgaggtcaaggcttcagtgagccatgattgcgccacacactccaacccaggtgacagagctgagatcttgtctcgaaaaaaaaaaaaaaaaaaacagaaaagaaaaagaaatctctacctaaaaaaaataaatatttcccctttacttcaaaaaacttcaaaattttaacttacgtatttaagtttttaaatcatccagattgatttttctgtgtcttgtgatttgggacctatgttattttgcaatgtggaaacccacttttccagttttattgagtagtcccttgtttctctattgatctgcaatgttacctctgtcatacatgttgggcatcaatattcacatgatctgtttttggattctttactctgctccatttatctgcttgactgttcctgggccagtacaatactttcttaactcctttaattttataaatatatctcaaatcttattggtgagtgttttaccttgcttatcttgctcttctttttcaagaatgttcggattttttttttttttagctcttggctatttcttatataatttattttattttattttatttatttcaagacaaagtctcattctgttgcccaggctggagtgcaatggcgcgatctcagctgactgcaacctccgcctcccaggttcaagtgattcttgtgcctcagcctccggagtagctaggactataggcgcccaccaccacaccctgctaatttttgtattttagtagagacagggtttcaccat

SEQ ID NO: 917167 - DNA, 4001 bp, Homo sapiens
taaagtgttgtacaacagtaggtagtgtcatgccatttatgtttttaaaagtcattttttagtcacatgagcacacaggaaggccattttgcaagctggatggcataaaaatgtcactcctctctgttctcctcccagctaaccaggacaactattcctacttcctcttcactcccggcccgatctgcccccaaacaggtatggtaccacctccactctcactgcagacatgtaggagaaaactttattattctgcacttaataatattcatagagcattcatttccttctctcccttgtcccccaactgtcctacagaaggaagcgtacctatctggcacactatctcagagaacaatagagttacaacagaagagtgttcagaggacagtaacacattgctgactataaatcacaggaacaagagaatgcctgttcatctacctggatgcgtgctctacaaaccacaggaaattcaacggtaatgctggggaataaacactgttccggctgcttattttaccgaacaggacacggacccgggcgccacccttctaaaactagatgcgtattccttatacggaggttccatcaaataccacgttgagcaacagtttgctcttcgtggcaaaccccatcttagaggaatcaactattttctttcatttacccagctatgtaaacaaaacctgcaagtgcggtaataaaagaaaaaaacacctcaaatctagaaatatgtaatgtaaataactcctcttaagtttctgccaggattcgtttgctgtaaaatcctggaagcaacgggcctagaacttgagcaatcaatgggaccgggctgacatcggctgttgtcttgaaactcaacagagccagagttctgtgtgaatatccaccagctgctaccagcataaggcctgactaaccagagcaacgcaggtgaacctccacaaaggaacaacccaggacagcagcaggcaccggggactcggatgcagaactggtcagctcccggcgccacgctctcacggcccaagattccctaccctctgcggactcatcgcggcaccgcaagggctattattttcctaaaactcggaggaagtgtttgtagtgttgcctaggcagacaagtttgtagaagctctttaaagggaaacaataacaacaacaaattctgcaatatgttttcccgcttccaacctctcaacccccacccccgcctacttttaaaagaaccaacgaaatggctcaagggaggtcaggacaaacggatttggcttgcaatgacaccatttttatcagaacccagccttcggggaacgtaggggagggaggtggaggagacaagcccctgcagcatgaactctgggtcccagcggtccccaagatatggggggtgggggagggcagccgcttccttgactctcaggaccgcaaagcttccccatcccccgacgcctgggagtcaccaacccgggcctgtctgcgtgtcccccctcccggggtcccaggctcgaacaggcgccccgcgagacagccatcaggagagggcgggcaccaggagcgtccctggctccctaaggccctgttgggagagacgggtcgggcctcagaggagtccagtctaggggtcccgctgggggtattgggggcgagagggcgcctagcgggctggccatcaaggaaggagggctgagggcgggggccgcggggatgcagaccgtccagcgccagcatggaggggaagtccttgcagttggagacgcccgtggagtcggtaacgcacgccttccacaggttggcccaataggtggcggttgtgatgaccgtgccgtcgatggtagacaccttccagtagtcggtgggcagcgtggaggacaccagtacccagcctgagatggagaccatgaaggcgatgatctccgaagccgtgctagccatgccgccggctgcagccgcgctcgctctccggctcccactctgcgccgcgacccccgcactcccaaccccggggctccgcctcccgcctccgcctccgcccaccgtccccgcccaccaccccgcccagcggacccggcgccagggggcgcacgcgacccctcacacccatgccctgtcccttgaggggcctcagagggctcgcggtcgccccccgggttctccatctgcagctggcccgcgcccgcgtgcgggaggaaggccggcctgcgctcccctgagccaaagggccgcggagaagggctcgcttgttggagcggctcaggttcagactggcaaccgggtgtggacaacctgctgcgcccccacctcaccacccccacccagccctacccaaggcaaatagcttggcttcctgactaccttgtagaagcagagcaggaaaagccttttgcatgccctgaaaggacacggtttggtaactcagccctcggtttgctgaactctaaaggtttgcgtgccacgcttgtttgggtgactctgtttgacttgtcaaggagggatcattgcagattctgggctggaaaccggccttgccctcaaaactctgcagttctttttggcctggtgctatgcggaaagtcatggcaaaacggtgcgtggcacaggcctaaagtcaagatagcagcagatggggcatcctgacgatcttgatcttgctggtgtactcatactaatgcactacgcagagggcatttgttcaacacattttccctgtaggtcccttccagcttccaggtctagaggctattctatgaaaggatgctgttatcccagtcaaaactgctatcttgtcttttatttttttttaaaccacctccatctctcacgcctaattgaaatataaactcattcattccttcatcccttcattgctgtctcaaggtaaacataaagatcaaggtgtacttctggctcctgaggccacaaatctgggcataaatgagagaacaaggacacgggttattatttgtccacttaaaggttcttgcagttttgttatgagcttccaggtttcacttgttgccaaaagtaaggaaaggtctaaaacctatcaatcagtctgctgtgataaatctcgtgctaaccctctgtgtcactatctttaggcagaaacactctggttcaatgtgaagaatttcttaatttccctttgtcactttttttttttaaccaaatgggtgcccagtgaaattagaggcgacaaggtgactggagaagagaggaagctggacatagaatcatcaaaacttagattggaagaatcactgtagaccagcaggacacgctccacactcaaaacaatgttcctgtctatttctagagataatgtttagcccatgctccacccttcaggaccagcagttcagtgcatggcaacgtatctattctgtttttcttcatgttgttttgacagccctttaaaaaagcttttcttcctattgagccccaaatctgtctctcttcaatgtctacccgaatgttgtaatctgtgctctgagaacacgaagtaagtcctactcttgttgcagccgtgcagcggctggcaggtagtgggcttctctgtgcttaatggtcccatggctttcgtgaatgggtacaagggtgacaatgcagacatggttaccctactgttctgctctgaaccccagcttgtcctgatgtatcatgttaggttcactggtaaactaaacttaaaaactgagtttaagaagtatctccctggctgggcgcagtggctcacacctgtaatcccagcactttgggaggccgaggcgggcggatcatgaagtcaggagatcgagactatcctggctaacacggtgaaatcccgtctctactaaaaatacaaaaaaaaaaaaaaaaaaaaaaaaaagtatcttcctaacctcttccttctcattctccttgctatgcaaatcagtcacctttgagcaatgactacaaagcatcctctattcttttgtatggcttgcctttttaaagtgttttatcatctgtttt

SEQ ID NO: 917168 - DNA, 4001 bp, Homo sapiens
atctggcactgggaaagaaagaagtggtggcgacaacagcttctatctaagaatcctagatccccaaggttgtagccagatctaacaaatcttaacaaatcaacaaaaatttctattttaacttaagaagttaaaatctttatgctaatcgaaactattaacgacgctcccaaaagtttctgctacttgggtacagtgttttataggcacttacctggtttaaacaaatacataatcacatggagatttcactgacacagcaaaatctattttagttcaaaggtaatttaagtgtgaacttaataaacttaaatattatattcaattgagggaattagatgggagcacgtacttaatatctgagacttaaaaaaaaaatccactaaaaagccatagtcaacaccttgccctaatgttaaatcaaatcgtttggatttacaattcttgttctattgagtaattttgacttcttacaaacattttattattaacattttccagaaaactagcttcaaccacaaacttctctttccacgtagtatatcacacaaaacaaaaaagtgttgtaaacatttcagtgagcagaatacactatctaggtttgacaacagctggcattttactagatttaatccttccagcaaacctatgaggtacgtgctaccactattcctattttttgactcagggcatgtgggcacagagattctgagtaactttcccaagatccctggtgatgacagagccagatttgacccgcagcaggcagaactccttcccactcatactgtcatacaaaatagctgtttttttcaggtttgttgtgtgcagttttagctgttgattacttatgctagtaagttaaaattatgtccaatgatgcttttggtttaaagaaaaatagctgttttcaaaaactgctggtctttctcctgcctgatgttgacaccatgttttctttctctgtgtttagctatctctgaccgccggaggctgtgtcttctctgtcaaaggctggaatcgacctcccaggtgtgcgggctctgtccccgacttaggaccggcgtcctacctccaggctgaagactggacaaaagcggtgacaatcttcccggtctaaccaggactgcaggagacggggattcccgggatgcgcgacttttgagggcaaaactgggaagtcccaataaggacttcggatcaggttctgatcaggttcaaaccagagcgagttggtcgcccagtaaattgtaccaaatgttccgcggtaataactaacgacagtgcatgatataaataaatgcgatagacagtgtttttaaactactcaagaaatcagctacttgtacccagaagtccctccattaaataacattactctccttttcttcttccacgattcaggactgtcctgagtctgccgcaagtgaccagaggggacgaaaggtcccagggctgcacgtaacgagcggctgcgactccccagtcctcaactttgctctcaagtgcgctccgagcgtcacccggcgctgtccccgcaccatctcgtgacccgacacaaaccacggtgagcaggggtccccgccccagcaccccatcccccatcgtcaacgccgaccccaaccccgacagtgcgcgcgccgccgcactcacttgtagggcaccggccagtggcgccgggaggggatgcccgagacccgggaccagcccggaaccaccgcgagccaaagcagcgccagggcccagcaccaggaagcgcgtccccgagccgcgcccgcgccccgccgcatctcggcgccctgtgccgtgtctacctcctgcgccatcaggctgcacccagtacttccggagcctctcgaggcctgcgacgccggtgggaggagcatgcgcggagccgccagtccgggacgcggggcgccttgcccctgcgcgtcagctccagagcttggccccaagcgcaggttccggcgcatgacacctccccgcgcccggcccgcggcggcttccacactttgcagtccaggaaggtgctttggtctggctcccaggagaattcgatccagacctggggcgtcatcttttatgaattgacctgtccttgcccaaaagccaccaccaaaaccaaaaatctgtcaccggggctcctcccaacaccgaacttttaccccatcccacagggcccacgctaggtgtcaacaaacgttgagtgaacgagaatgtgtatttggagctgagggtgcagggctgggggtgcagtgaggaagaagggacaatagtgcggaaatggctcgtcgtcacccgacctgggccagtcataacagtggttaacactgacaatatgtggtccctgccactccccaagtgcttagtggggaaatgactcgtcctcactcgacctgggccagtgataacagtggttaacaccgacaatatgtggtccctgccactacccgagtgctgccgaatctaccccctcccctaccgctcccctcacaggcaggtgttccttgcttggatctgtcacttcactggaaagaagtttctgcatcaccttctcttctttgactcttcaactaggtcaagaaaacaatggcatcaattacccggcttttgaggagcctcttgtggcatgctttgctgttaggcacaaatactgacttaagtctatacgtagtacattcagggccttgccatagtcacttgtttttaccagacagcagttttgcagggccttagaccgggactttccaattccttcacttcacccacaactcgtgtgaagcatcataatgtttgtaagcctatgggaataagcaaggtggcttcggtagccggagatgaccaccacaatccattggaggatatgtagcttgtgggggtgtcactgacttccttgggccctccaggtctcttgattacatatgggactcagtaccctgccccaaacacacactcctttgcccacttgctgctccaggtttgggggttttgcggaggttcaggctgggctgcattttaccatacgtttgtctaagcgttttgatagctacctagctctcctccgtatactatggccaaattcaaaattaccaaggctaaactggcttcttcaaagacctgcccaagataagagggggaagcattctagccctgagagctgaaatgtaatgtctgatttgaagggcacctgaaggattccgtggccccacacttgagcctagcttaaaaagcaatcagcaggaacagctttaaaaaaaaaaaaaaacattgattagagcatttacaaatcctggaaccatacacagtatgatgtatgagggccacagtagatggcctcaacaaccagagcctccgtggctgcctggagagcggtgatgcaggcagcagcttcatgagatatttgcagtttaatccagtcatctgcaagcacaatctgcccatcagattggactttcttggaggcaaagagaagcaactgcagtggggtgactaaagtcatgcctttagcagagatggctcgagttcaaatcttttcaccaaatacaaagaagggagataggtacttcatgtcttggctactaaaaggacaattaacagtagatggttccaggttccatctactgttagtagagggccacagtagaacctcccattcagttcaggacttcccagagctacaaaaacaaattcaggttgaccttgttcagtggtggaggcctctggtcttgcttctgccatctgtctcttcattctgtgtgcagggagctttcatggtaagaaagcacttcctagtattggtttttattttttatttttttggagacggagtctccttctgtcacccagcctggagtgcagtgatgtgatttcggctcactgcaacctccgcctcccgggttcaagcaattctcctgcctcagcctccctagtggctgggtacaagtgtgtgccagttgtaatttttttttttttttttggtagagacgaggtttcaccatgtt

SEQ ID NO: 917169 - DNA, 4001 bp, Homo sapiens
gagcactgagttaacccccagcgtactggcgtggggactgtgtgcgctcactggacccgctactgaacaggtcacagacgctggccccctcaaaaggcgccagaaaaggacccttctggaccagcctggatacactgcctgagctgctcctctagggcgaggggtgactcccctgtgccaggggcagcggaggaaatgggaaagtgggatgcataagactaggtgggtcctcccataggacatgggtgactgaagagtcacagtgcaagaagacgtaagaagttcagacccaggccgggcacggtggctcacgcctttaatcccaacactttgggaggccgaggcaggtggatcacccgaggtcaggagctccagaccagcctggccaacatggtgaaacctcgtctctattaaaaatacaaaaattagccgggcatggtggcggacgccctgtaatcccaactactccggaggctgcggcaggagaatcacttgaatccgggaggcggaggttgcagtcagctgagatggcgccattgcactccagcctgggcgacaaaagcgaaactccatctcggaaaaaaaaaaaaaaaaaaaaaaaaagaagttccagaccaccaggccggccatggtggctcacgcctgtaatcccagcactttgggaggctgatccgggtggacccccttgaggtcaggagttcgagaacagcctggccaacatggcgaaactctgtctctactaaaaatacaaaaattagccaggggtggtggtgcacacctgtaatgccagccactcaggaggctgaggcatgagaatcgcttgaacccaggaggtggaggttgcagtaagccgagattacaccactgtactacagcctaggtgacagaccgagactctgtctcaaaaaataaaaataaataaataaagaagttccagaccaggagccatacacttagtgtttgaaccaaactctctcattactggtcatagggctttgagaatccttaacctttctgaccctgttttttcatctttataaacatgacacccaacttcttcacatggtggtcaagggaaccaaatgagaccatgtatgtgcacgtacctaggcgatgggcaagtgctagaccagcggttctcaaagtgtggtccaaagacacctgagggggtccctgagacccgttgagagggtctgcttggtcctccctttcccaactaatatctgcatctgcatgagcccagaatttctttcaaatatttccttcaaaacagctgatatgagactccagctgtcctttattaaaccaaagaaattttcaaaaatataaaaaccatgagccaatcttctcactttttttttgagaagttatgcattaaagtgttatttgtattaaaagttaatgggtttgttattaagtgaatattttttaaatttctggtttaattcctcatgcacaaaaatcaatagatataagcaaaagctttggggggtcctcaaattatttttagacgtgtaaacgggtcctgagaccaaaccgtttgggaaccgctgtgttaaacgaaccgcaggtgttcttcaccaggcaagccgcctctcaaagactggcgcgttcacgtttgccatttgggggaggcaggcagttttgtttcctggggctgagtccaggtaattcgacctaaggtgtgtacccattttccgggtgcaacgagggccctcccaaagggaggcgcgggcggcagcgaccttggacgaggtcgagccagcgcgtgggaggcgcatggtgcttccgtccggctgggttcccgtgagggcttggggaggccgcgcccggcccgcggggctgcaacaggagccgacccgcggcgagccgggccgggaaggcggggaacggggacctgcactcacagcctcagcagcgccgccgccgcagctccgcgcgccgccctccgcagcagacgtagcgccatcttcccgacgcgcgcgccccgccctttgcctttagccacgcccaccccacattccacgcccccacggcgacaccgaccccccccccgtcccaggccccgcctcgctctgtcttcgccccgccccgtcccgccagccacaccccgccagccacgccctccttcctcccagcacccgctccgccccgcggcgagtcccgaggtcaactgccctcccggccagggcttaggaccttcgtccccgctgtcatgggggacagagcagaggatctgaatggttggggcctctttgaggggcctctctggtgaccgaatccaactctctgagcttctgagtttttgaggcaactgttgacagactgcgttttcccagccagaagagccaacatttctagggatttcttcgcagcttttgttgttaaaataccgcctaatactttgtgagccccatcatgtgcatatcttggttagcaattaatctagagtggtcaaagtgcaggaaggctgcatcctggaacacacatgcctgcaataggtcagagcagctgttggcactctctgggcagggaaactgacagcagctctttactctgccccctgcagccgttctgcagcggtgagaacgccgaggcgttaaaacaggctgggccctgcccctgcctcttctttcaccttccctgatccagccggcctccacctgccgaccttcacctacccgggcccatgttaccccttaaccatgtcttttccttggcactcggcatgtttctttttcagctgtgactccgttccattcatgctctagacttaaacctgaaaccgtttctcagaaccttccagtggaagctgacttgtgctcttggatgcaaaaagtggccgtttaaacaaacaaaagccttttcagccagagggggttccaagatttggaaaagtccaggtgactgggaacatggatgctaaacttctgctgagcctaagaattattgttatattcgataccaacaggggagactgctcaaccccttggtgccctcccccagctcccacgcctgctccacctcaggcctcgcctgtctactccaatttggtcactttcttgtcaccaccttagtcccagccagtgcccggtccagccatactgaagcctgaggcaaaggcaatttcagtaacaccaatcctgtctttaattaaaattttgatattttgttcataatgggatttttccattatcttggtttttagtttagaatattactttttttttttttttgagacagtcttgctctgtcgcccaggctgtagtgcagtggcacgatctcagctcacacactgtaacctccacctcctaggcttgagtgattctcacccctcagcctcctgagtagctgggactacaggcaagtgccaccacttccaactaattgttttgtatttttagtagagatagggtttcaccatgttggctaggctggtctcgaactcgtggcctcaagtgatccatccgcgtcagcctcccaaagtgctgggcttacaggcatgagccaccatgccaggccaatattacttatctttttttttttttttttttctgagatggagtctcgctctgtcgcccaggctggagtgcagtaattactgagacttctccttaaattttgcatcccaggctggggctgcactcacctcactcaagtctgattctggacatcatcatcctttacctggattatttcaaagcctccttgctcccattcttccctcctacaatcacccgtttgccataaaacctggctgaccttttaaaagcatgacgcagctcctagttccagagttgacttgctgtgtgactttggtcaagtttcttaagctctctgtttcctcatctataaaatgggggtataaatacctcatcacctcataggcttgttataatgatagactgagtttacatatacatagagagagactgcacacttaaaatctaagcaagttctcagtagtgttaactattcctcattattattgtcattgcatc

SEQ ID NO: 917170 - DNA, 4001 bp, Homo sapiens
agagtagggacataacatatgttaaagactgcatgtggctaatgataaatatggaagaatggggtgaaaatgaaagattccatttagttcattccaaacgttctccttcatgctcaatgagaataagaaataatagtttatgacccatgacaatgaaaacaaatttttttgtagaatatgtatctcccccatcacaccctcagtgctattaagtccaagcatcctgctgcagtaggagccaaatcaattataaacagactggaaaatttatagagcaaacaacttttattatccagggtataaaagagtttgatagctgagccaaagaaatttccacctgcgccttcattgatttcagatccacttccggtaccatatcctagaggtggaaaaagaaacccaagaaagaacgcctatttgatggctgagcatacaacagtgaatgtgaagagaacgtttaaatcaaatctctaaagttggaggacagaaaaagttgaagactctaaactcaatctgcatttggacacaattccaaatcgtataaaaagaatgcttcaggccaggcacggtggctcacgactgtaatcccagcattttcggaggccgaggcgggcagatcacttgaggtcaggagttcgagaacagcctggacaacagggcgaaaccccatctctactaaaaatacaaaaaattagccgggtgtagtggcaggcacctgtgatcccagctactcgggaggctgagacaggagaatcgcttgaacccgggaggtggaggttgcagtgagccgaggtcacgccactgcactccagcctgggcgacagagcgagagaaaagaatgcttccaacatcaaaagtaaccatcaccactgcttatataaaataatcctcctaaacctggccctcaaaactggaaaacgtttgtcaaacatctgacaattcatgttacttcctgctattacaactaattgaattgaatcacacaagaagcagtagtgcataatatcctaatggtaagtggattaaacacattgactctaacaccgaaaaccagcactgcttaataatgtactgagccaactttcaaataaaattcatttttattgctttgcaataggtgaaataaatctgatctcccataacttgcacttgattgagagctcatagttcaatgtgcgataaatgaaactcactcaggaccaagttttggtctccccaagacccccatggacaaagcaacctaggtgaatcattaaggcggtaaacgagcacgcgctggagactgtcctgcagcacagcacctcgggttgactgcctctccttctgggagagagtgggcagcaggattacgcctcggctgacaggacgcctcgtctggggcaaaacgttcggtgcaaggctccgggccaaccgtcccatgctgctgggggaggactgggttccggcgagcaccagctgcaggacacccccacagccgtccccaggcagaattagagtcggggtcgcaggcagagcgaagcctgacagcctgggagatgaggcccctcccaccggatccgccaccatggccagggaggagtggagagatatcctgggcagaggctagtgaggccggggtcctgccggggcgcccgaggagaatcccagccccatcgccccggcccggttcctgcccatcacctcacctcagctggcaccggcaagttctctgccgccgccttcagctccaataccgagtccgtctgcctgtcggtcagcggcgccgtcgtgtccggtctccgatcccagagagccagcttttccctagcgtcccgctccgccgccgcctcaggcagcagcaacagcgccgcctccgccatcgccgccgccctcgcggccttcagcagcagcgagatggaggggaccccgacagagagacctgggccacttccgggagaaccggagcttccaacactgcaccggcggcggggcgggacggaatgccctgaccccggaaacggttccgcagtgtggggggcgggaccgaggccagtaccgacgtggctttaaatgggtacgactatttccggttgaaacgtagaaggtggagaagacaggacccaatggaaatagaaatgcccctaccggaagtcttttcctcaacatcaataactttattgttacgtgttgtacagattattgacaactgcgctaaatcaccctgccggcaggagacttggatctacacctctctgcttacagctgggtagtctgggtagaatgtgtggagtgtatgatttccatgttggcatgttgacaatttatgcctcttggatcaaaaccaaaagcataaacttttccaacatccagtaattcccctactagaaaactaatttacggaaacacataaaaaattcaaagatgtgtgtatctcagacatcattaatggtatcaaataactggagacaacctaaatgtccaacattgaagaactggatcaagaatttgtggcacagaccaggcgcgggggctcaggcctgtaatctcagcactttgggagaccgaggtgggcgtatcacctgaggtcaggagtttgagaccagactggccaacatggttgaaccccgtctctactaaaagcacaaaaattagccaggcgtggtggcacatgccagtaatcagcctgagaggctgaggcaggagaatctcctgaacctggaaggtggacgttgcagtgagcagagatcttgccactgcattccggcctgggcatcaagtgagactgtctcaaaatgtataataataataatttgtggtacagacatgtaattctactctaccatttaaatcatattgtagatttgagcaacaaaataaataatgatagtattggatcataatttacagaataaaataaatacccatgagtccatactgctataaataaacgattgaataaataaatggtggagaacagacaatcttctacaagttatggaggcctcttcctgctcctccctggagtcaaggcaggtggaaacagcttcgtagcaattttgaccattgtctgggtaaagtctgaaggctttattcaggctttatagcacaaatcagtgcctggctatgttcccaaatgaaggctctgatcttttaagagcagaatttgagaccgggcgcagtggctcacacctgtaatcccagcactctgggaagccgaggtgggcggattacctgaggtcgggagttcgagaccagcctgatcaacatggagaaatcccgtctctactaaaaatacaaaaaaacttagctgcgcgtggaggtgcatgcctgtaatcccagctactcgggaggctgaggcaggagaatcgcttgaacccaggaggcggaggttgctgtgagccaacgttgcaccattgcactccagcctgggcaacaagagctaaactctgtctcaaaaaaaaaaagaatagaatttgaagttggaagagaattttaaaatcatataatcaagccctttctgtctacagaggagcaaactacaacccgtagaggtgaagcaagcagcctaacatcctgcaatcaggtggttaacatcagcgtcaccactggaacttagatatcctgactgtgtctgacaccctttatataccacagcttctccaagttgcctgctgtacaaagcccttaaaaaatctgcagatccccaatgttgatgtaaataattgtattatattgcttaagtatgaacaaaaataagacttgacataagctttggatgtttataccaaaatagacatgcaagttacatgccaacagaaatataactaacatataacggtatataaccaataacattcacattaacaactcaagtgagatgtgggatattattttgctggaaaacgaaattgcttctggcaacacgaagacagtcctgactactgctatacagctgcttgggagttcatcacacttctgttataccagcagcatgctgtgttccccaccatttgaactactgg

SEQ ID NO: 917171 - DNA, 4001 bp, Homo sapiens
aaaacagtaaaactatttatataaattcaatttaatatttcagaggaagcaaaaatatgtttacaactataaatacttactgtacagaaaaaaaaaacccatgaagtgaagcagtttctttagactatagccttgaaatgtcctaaggtctggttcaaagaagtaatcagtaatgttgaacgaatgaaatcacagactcagatgcaaattacagttccaccagttactagttatatgacaacctagctgcactctctccatgctttattttcctcatggtaaaaagaaggttatgtggccgggcgcagtggttcacgccttgtaatcccagcactttgggaggctgaggcgggcagatcacctgaggtcaggagttcaagaccagcctgaccaacatggagaaaccccgtctctaataaaaatacaaaattagccaggcgtggtggcacatgcctgtaatcccagctacttgggaggctgaggcaggagaatcgcttgaacccgggaggcagaggttgcagtgagccgagactgcgcccattgcactccagcttgggcaaaaagagcaaaactctgtccaaaaaagaaggccatgttatctatatcagagcaagtagcagtcttaaatgatataataaatatcaatatgagacacattaaacacttcataaattttatgataaaattaatatttgttaagaaagagtaagtgccaggctctttgcaaaggactttacctggagtctctcactgagtcctcaaataacaaccatgagaaacttaacagcaggattcctaattcctaaacagaagctgagattagtgaagggacttactcaaatcatgatgcacacatttagtggttctatctaataagtggtagtctccagagccctaatttcttattcattacattgcaatgttatttttttacatatcggaatcaaattgttatcgacagcttattttcagttacctacatattcacctataaaactctctaactttgacatatgttcttctttatgttacactgtcatgaccaatttacctagcgacccacagagacagaagagatggctgggtatgtgaggagctgtaaagtccaacttaagtttcaggaggtacttgtgagagcatgctgtcagtttatcttctaaagaaatacagcctgagcccacaaatcatagcgcttggctcaacaaaaactagtagatatgagttcatttcagccacgggcaaaggtagttctttcgcgctgcaaattattgcaattgttgtcacttgtccgtggaaatgcacccttatccctaccactgctctcttggtctcccgacccccatttgcgctaccttatcttggaatctgctcttttgcatctgtttcatatccagtcttgtgctctcctccactctcccagctcacacagccaaacgcctccaggggtgtttggaggacacttctcgaggcaccaccgttcaccaatcccatccagagagccttgaaggcaccttttcaggtggagagaacacccaggaaaccccttcgcttttccggaggttgctggggctcccccttctcaccgcccccggcgcccgcagagcagcggagcccgcaggtctggggtcactcgcggtccctctgctgccgggacgagggagaccgcggtgggtccctgacagacgccgcccctggcccggctcagccccgcaggaacctgtgactccggccccgccagccccggttaccttgtcgttgtccagccgcgtctccaggatcttatgcagcttgcgcgacagcgggttgcaggtcgtcgccgaggtcccgcctgccccattgttgaggccgttggcagccccggtcgcagacactgcgaccacttccccgctgccctctgccatagcgctgcgcgtcccgccccctgctgccacctcagccaggcagggaccacggaggcagcgcgagtattgcgcatgtgcaaatcggccgcgcatgcgcatcggccccggaagtcttcgccgggtaaccctgcttgggctctcagaagcgtgaggggcggagaagatgtggggggcgggacaagaccctcaggtagaaggagaaaatttataggattagagaggactttggaattatggatctgcgaccttcagagctaattagatgacaaccaaatgtagtatgtaaaatacaccatgacttgtgcctggcatatacattcaatataagttaactgaaagtttaaattacatttgccttatctgaattcatttttttgaaaattatttattgaaggcatagtatgtgccaggtactctggtaggcattggagaatctacattgtgtgtctgaaacagacaaagctgttaatagatgttattaggttgtgatgagtgctcaggggatgaagtagtacagtgaaagaaaatggagggaaaggcccacttcactcagggaggtttggagaggagttgacacttaaactgagatttgaaggagaatcagaatgtgaggagaaatcattcccaggcagaagaaagtgtgtaagtgtacaggcctcaaaacaagatgaacttggccctgacacaaatggaccagagcccatgtagctgtaaagtaatggataaaaatgtaacaagttgaaaaaacttcccgggaaactctggaaaacaaacatcattgctttttttctttcttttctcagtttttaaaatttggatcaaaataaaatcgctgggcttctgtgaattatttgtcagaaacactatttggctcttgtcataaattttccttgtttcatatatgtctatgtacatagttatattgtatatcagacttaagggaaaattacctattacagaggtcacataaagaaagcactgacaaaaccactcatctctactctaatgaagaagagaaggcccaactatccaaaagaaaaaaatatacaaaaagcagcaatatctaggtatgaattcaacaaaaaatacagagaacctagatgaagaaaactttaaaatgctactgggagaacataaaacttaaatcaatgaaaaaatatattgttctcttcaacaggaagactcaatattgtaagatgtcttttctctttcacagataaatttaagttcagtgtaaccaaaattaaaatatcaaaggtttacctaaggtgtatatatccaaatgaatttgcatatatacaaagcaataatataatgtagagcttgcaaatatgtacaattaaaaggaatgacgatgataacatgccaagtcaggagcggtcatgaaataccacatattgtatgacctctttatgtgaaatctcccaaataggtaaatcaatagagatagaaagtagatgagtggttctgggaagaggagtgttgggaagagggaatggggagtgtcagttcatggtacaggttaatttttggggagatgaaaatactctaaagctaaattgtggtgatggttgcacaactctgtaaatatactaaaaaacactgaactgtacactttaaatgaatgaattgaatggcatgcaagtttcatctcaaatctgttttttaggccaggtatggtggctcacacctgtattcccagcactttgggaggcttaggcagggggatctcgagttcaggagttaaagaccagcctgggcaacatagcgagaccctgtctctacaaaaaaaaaaaaaaaaatacgaaaactagtcgagtgtggtggcatgcctgtggtcccagctacttggaaggttgaggtgggagtatcacttgagctcaagcctgcggtaagtcataatcatgccactgccctctactctagcctgggtgatggagcaaggccctatcttaaaattgaaaaaaaaaaaataaagctgtttattttaaaaagtaaattggagataaatagacaaaatgtttaagtaataaaaaatacaaatttatattaatttttaaaatctttatttagatataatttacaggccataaacttcac

SEQ ID NO: 917172 - DNA, 4001 bp, Homo sapiens
tacagagtaatgataatatctgtgaggtcagctgtgatcagaagtgcccacaggctgcatctcttaaaaacagtccatggcacctcaagggacactgcaaagacagtggccgggaatgtaattgagctttaggaaatgattaaagggaagtaaaatcatctccaactcaacattaatgcgtttgatttcccgggtgagaacaggatttgcgtaactgagtggttctttctttctacagtcctggatgtttggaaagccagctcttacagttagctttctttgctttgctaacattatccatcagaaaatcgaaatgcaaacagctcctatttcccaatgaagaactttctctgatttaccttaccatcatcaggcttcaccatctcaccttggaagcgttcaatcttttggtcaatatttctagaccaaaataaagtgctctcaagcctgttctttggaaagtattttgtcatcattaccaaagagtgtttaaataactggctatgaagtttggggagactgggctgggaggtacaatctgaagttaattgctgatgtaatcattagtcctttcaatacccagtggagaagctgcctccagggagataagctctcaattaggagacgtgtgtgtatatcaccagttctctctggcatgtaacagttaacaatttctatacagttaagtggatttagtgagtatcattcttccaggagagaagtaaaatttttttttaaagaggaaaacaaagaacaagattaagaacagtaaaagaataagtatggaaaatctggtaagtagcaaaaatcatttttaagcatttgagggagaaactgcaaaatctgttcagaagccacaccttccggcctgtgggactgcatggctgtgacactgagcaacagctgaagtctttattctctcggaggggaaggaaaaaaggaaacaacagtcagtccaggcttgtccacggctggaagcctcgactcctgcaaacctcctgcaaaccgatctcccagatcctttctgggcaagcacataaccaaaggaaatgaaaactagaaaaacaatttgtgcatggaacaatgacatggagtttcactttggtttcatgctcaaatatgaatgtggttataattttttaaaatatatattaatagaaggcaacgagttgaggatggtggcttcttcaagccgggcgtccagaagagccccacttctgccttggagcgcgccttaggcagcagtcgtgggaaagctcagatacagctgtttccaggcaaagggcccagagcttttcagcctcagccaccagggtctccagacaaggagaaatacgcccaaagctgctcccaggggctaggagctcggagctcccagtgtgggtctctgagcagcgcggggtgggcgctcccggccctccagcccccaactccctcgcgcacccgggacgggtgaaggcgcccagctgccgagcatacccgcgacgcgggttcaaatcccgccggctcccaggcaccctcaccccgccacagcgcgggctgtttctcctcccttccccggaggaattccttaactctccagtacccataccataacaaaggaggctcggtccaccaatgcgcgatcgtagcctacagggacccccaacgaaccccggcccagagaatgcacctggccgtgccacgcgcgacccccgaggggcaggcggacgggtccaggcgcggacaaaggggcctctcggggcgcccaagctcggggcgggacgccgggagcggagctggccgggaactcaccttcgcagcggcccggctgtgctcctcgtggagcagaagggcggcgggcagcagcagcagccagacgctgagccggggccccatggtggcgcgcccgaggcggcgagggacggctgcccggcgtgcgggggccgcggcggacagctagctctcggaaggccggacttccagcgctacgcaccgtcccgggtgcggcggctccaagcggagacctgagcgcggcgggccgagctccccaatttgttggcgctgccccctcccccccggcggtgcgcgggcggcgcctcaaaggggaggaccctgcggcgcgggtaagaggcggcgggagcgcgcggcccgggagtgtggctgcagtgcgccgggacaccagggctccgcgctccgcactcaagaggctcccgcgtcccaacccctcgcgcccgcgcgttcgcggatccaggccgaggaccgaaaggggccgcccgagcccccggggccggcgcccagagagcccagcaaggccggccgccctgccggtgtgccgccggcgggtgcttctggaagggccaatgcgttcgggcagcagcccctgaagccgagcccgaggtgagagcgacccccgagcggcgcccagaccctggcccgagagcaccgacttggagcgccttgtgcaggctagggctgcacgctctcctgcttgggagtagaaagggggagggtgggagagcgaagaccgagctcctcggccaaggagcacccacaggggcctaacgggaggctctccttctttccgggtcgtgggggggacggccctccggtcacccctgcatgcgggccgcgcaccgcgctgtccccgcgtctcgcggaccgagaccggcggtgaggatgggctgcctccctcatcctgcgctaaactcgctttgtctgtcgcctctaggctaagtgggactgaccggggcccagagtggacgaaccgccagcatggggagagaccagcgcgcggtggccggccctgccctacggcggtaagcgactttctgcctggtccccgtgggtcacgcgcgcatggacccttcggtgtaactctcggggactgacaagccgggcccgcacgttcacgtctctcttcctccctttcccatgcaggtggctgctgctggggacagtgaccgtggggttcctcgcccagagcgtcttggcggtaagtcctggctcccgcgcttggacttgcgcgcccgagagtggttgggacgtttgagtggccttggagaaggcagctcgtccgtgcgctcccgagtgtgtgtgtgcgtgtggatgttcgccaggctgcccaccaaggttctgagaaagcttgctcttccctcatcatgctttccacctttccttccccttgggttcccagcgtcaatcctgtgttttgcaagcgtcggcctttcacgggaactgggaacttaaaatgtagcctgaggcaccgttttcgttgctttgggcaaagctgcagccgtagaggccaggaaagtgtgtcagtcactaggcagtgagacgccaggcttagggcgaaaaaagttttcctggaactcgggagctggtggggagtctctgtcacggactgagggttttttgtgtttttaaatgggagtctctgggtaaaggggcggggcgaggaggcgaacgagacaaccttagtattgtttgaattgaagcattgcgagggaacaatggcagaaaaaccgcgttttctcccaagtcctgttccggccctggaagagctgctccgggcgccacactgggatcctgttcgccgagcctgcccctccacgccggccgtgcacagccctgccgataccgtgggtgcagctggcgactgcactgcgaggctttgtccattttatacgttttgtttaaagagtaggagccacttttactgagctttatgtaaccatggctaaaatgaagaggtttggtaggtgaattcggtgcaggactcaaatgtttagacaggagctgaaagcggagggagctttcgagatgtccgctgtccctcctctccttactgtggccgatggagtagccctgccctgtggcagccggggcccaggtggattcctcctgggaacgacccctccctcctcagcgcgcactgtgccagagcagtacacaggtacaaagggcaaacgtgttcatgatttcatttgaattctgttgtttttacatcgttctgccctgat

SEQ ID NO: 917173 - DNA, 4001 bp, Homo sapiens
gagtcctcctcttacttcccaaaccgagctttgaaccggaaccaacagcagcggaaaagtaaagttagcagctcttccccaagtgggagtagctcctcatcactcactgcctttaaaatcctggtttgttttacatcagggcagaacgatgtaaaaacaacagaattcaaatgaaatcatgaacacgtttgccctttgtacctgtgtactgctctggcacagtgcgcgctgaggagggaggggtcgttcccaggaggaatccacctgggccccggctgccacagggcagggctactccatcggccacagtaaggagaggagggacagcggacatctcgaaagctccctccgctttcagctcctgtctaaacatttgagtcctgcaccgaattcacctaccaaacctcttcattttagccatggttacataaagctcagtaaaagtggctcctactctttaaacaaaacgtataaaatggacaaagcctcgcagtgcagtcgccagctgcacccacggtatcggcagggctgtgcacggccggcgtggaggggcaggctcggcgaacaggatcccagtgtggcgcccggagcagctcttccagggccggaacaggacttgggagaaaacgcggtttttctgccattgttccctcgcaatgcttcaattcaaacaatactaaggttgtctcgttcgcctcctcgccccgcccctttacccagagactcccatttaaaaacacaaaaaaccctcagtccgtgacagagactccccaccagctcccgagttccaggaaaacttttttcgccctaagcctggcgtctcactgcctagtgactgacacactttcctggcctctacggctgcagctttgcccaaagcaacgaaaacggtgcctcaggctacattttaagttcccagttcccgtgaaaggccgacgcttgcaaaacacaggattgacgctgggaacccaaggggaaggaaaggtggaaagcatgatgagggaagagcaagctttctcagaaccttggtgggcagcctggcgaacatccacacgcacacacacactcgggagcgcacggacgagctgccttctccaaggccactcaaacgtcccaaccactctcgggcgcgcaagtccaagcgcgggagccaggacttaccgccaagacgctctgggcgaggaaccccacggtcactgtccccagcagcagccacctgcatgggaaagggaggaagagagacgtgaacgtgcgggcccggcttgtcagtccccgagagttacaccgaagggtccatgcgcgcgtgacccacggggaccaggcagaaagtcgcttaccgccgtagggcagggccggccaccgcgcgctggtctctccccatgctggcggttcgtccactctgggccccggtcagtcccacttagcctagaggcgacagacaaagcgagtttagcgcaggatgagggaggcagcccatcctcaccgccggtctcggtccgcgagacgcggggacagcgcggtgcgcggcccgcatgcaggggtgaccggagggccgtcccccccacgacccggaaagaaggagagcctcccgttaggcccctgtgggtgctccttggccgaggagctcggtcttcgctctcccaccctccccctttctactcccaagcaggagagcgtgcagccctagcctgcacaaggcgctccaagtcggtgctctcgggccagggtctgggcgccgctcgggggtcgctctcacctcgggctcggcttcaggggctgctgcccgaacgcattggcccttccagaagcacccgccggcggcacaccggcagggcggccggccttgctgggctctctgggcgccggccccgggggctcgggcggcccctttcggtcctcggcctggatccgcgaacgcgcgggcgcgaggggttgggacgcgggagcctcttgagtgcggagcgcggagccctggtgtcccggcgcactgcagccacactcccgggccgcgcgctcccgccgcctcttacccgcgccgcagggtcctcccctttgaggcgccgcccgcgcaccgccgggggggagggggcagcgccaacaaattggggagctcggcccgccgcgctcaggtctccgcttggagccgccgcacccgggacggtgcgtagcgctggaagtccggccttccgagagctagctgtccgccgcggcccccgcacgccgggcagccgtccctcgccgcctcgggcgcgccaccatggggccccggctcagcgtctggctgctgctgctgcccgccgcccttctgctccacgaggagcacagccgggccgctgcgaaggtgagttcccggccagctccgctcccggcgtcccgccccgagcttgggcgccccgagaggcccctttgtccgcgcctggacccgtccgcctgcccctcgggggtcgcgcgtggcacggccaggtgcattctctgggccggggttcgttgggggtccctgtaggctacgatcgcgcattggtggaccgagcctcctttgttatggtatgggtactggagagttaaggaattcctccggggaagggaggagaaacagcccgcgctgtggcggggtgagggtgcctgggagccggcgggatttgaacccgcgtcgcgggtatgctcggcagctgggcgccttcacccgtcccgggtgcgcgagggagttgggggctggagggccgggagcgcccaccccgcgctgctcagagacccacactgggagctccgagctcctagcccctgggagcagctttgggcgtatttctccttgtctggagaccctggtggctgaggctgaaaagctctgggccctttgcctggaaacagctgtatctgagctttcccacgactgctgcctaaggcgcgctccaaggcagaagtggggctcttctggacgcccggcttgaagaagccaccatcctcaactcgttgccttctattaatatatattttaaaaaattataaccacattcatatttgagcatgaaaccaaagtgaaactccatgtcattgttccatgcacaaattgtttttctagttttcatttcctttggttatgtgcttgcccagaaaggatctgggagatcggtttgcaggaggtttgcaggagtcgaggcttccagccgtggacaagcctggactgactgttgtttccttttttccttcccctccgagagaataaagacttcagctgttgctcagtgtcacagccatgcagtcccacaggccggaaggtgtggcttctgaacagattttgcagtttctccctcaaatgcttaaaaatgatttttgctacttaccagattttccatacttattcttttactgttcttaatcttgttctttgttttcctctttaaaaaaaaattttacttctctcctggaagaatgatactcactaaatccacttaactgtatagaaattgttaactgttacatgccagagagaactggtgatatacacacacgtctcctaattgagagcttatctccctggaggcagcttctccactgggtattgaaaggactaatgattacatcagcaattaacttcagattgtacctcccagcccagtctccccaaacttcatagccagttatttaaacactctttggtaatgatgacaaaatactttccaaagaacaggcttgagagcactttattttggtctagaaatattgaccaaaagattgaacgcttccaaggtgagatggtgaagcctgatgatggtaaggtaaatcagagaaagttcttcattgggaaataggagctgtttgcatttcgattttctgatggataatgttagcaaagcaaagaaagctaactgtaagagctggctttccaaacatccaggactgtagaaagaaagaaccactcagttacgcaaatcctgttctcacccgggaaatcaaacgcattaatgttgagttggagatgattttacttccctttaatcatt

SEQ ID NO: 917174 - DNA, 4001 bp, Homo sapiens
cttgcaagatactccgtaattttttttttttaagagatggagtctcactctgtcactcaggctggactgctgtggtgtaatcacagctcactgctgcctcaaactcctgggctcaagagatcttctcttctcagcctcctgagtagctagtactacaggtctgtgcctccacacctgattaatttttttatttttatagagataaggtcttgctatgttgcccatgctggtctcaaactgctggccttaagcaatcctcccaaagccctgagcttacagtcatgagccaccatggctggcctgtaatttcttcatgttataaatgacatctttaaaattatattttccaactctttatgtctgaactaaagaacgttcaacaatggaatcaccttgctgactctcacattaattctaataatgtttgtaaatgatcttggcttttcctatgcaaacaatcatataatctgtgaatgactgcatagaaggatgtgcagtaggctgaataatggccctcccaaatatgtccacatgctaatcctcaaaatctatgaatatgttaccttaggcaacaaaacagtattggtagatgtgacaaaattaaggacttggagatgtggagattttcctggattatccaggtgggcctaatgtaattgaaagggtccttataagagggaggaaaaagggtcagagtcagagaaggcaatgtgacaacggaagcagaggctggaatgatgtgctttgaagatggaagcagaggccacaagctaaggaggaaacattctcccctaccgcctcagaaggaacaaagccctgcagacaccttgcttttagcaccgtaagactagtttaggacttctgacctccagaactataagataataaatttgtgtttaagccaaaaagagttcaactttaaaaaccccataattagtataattctgtttcagaatatcttaaatacaaaacttaacgtaagagaatggataaaatgacttatgaaagattgactcgaaatgcactaaatcatataactaagcaaagccaggtagacggttgacagctctctgacttcccctacttcccaggaatcctcgaaagcaagatcagttagagaaaaatgacagacagcagtcaatggacacctctttcagcccctgtattctaattatttcttacctcatccctttcttacattttgtatggacttgggtaactcctggcctaaaaatactctagttttagtactcctattctgggaagtgtgttataaattatttgcctacaaatagtttattggctacaacagcacagcagcacttgaaacagaaatggggctaagatatactttaaaagtcaaattcatattcctagcattataaatgcatactctaaaaggctaaaatgctatactccatcttcaaaaataacttagagactaagaaaatgtttgcggtgctatctctgcaaattttcctaacttctttatccaacactttaaaataccgtgttcctggcttcgaataactgtcgcctaatcaaagcccaacaatccttgatctgcattcttcgggctagtgcagggtggggaagaggagctttcattacaatggcaacggctaccggctcaggtgcaaaagagaaggagcaatgcaagagggacggctgaaggtcaccggctcgcggacacaggactaggggagacctggggaaggctcagggtggcacggcctcgcggccgtgggaggcaggctggcggaggacagggcggggcggccgctcacccacctggttggtgacctgaaacggaagcagaaacacaatttagagaaacatctttcttgctccagagcctcgctgcccactctccttccaggttggaactcacatcggacttagcatccagcggcggctcgctggacgcctccatgggcagcgtctgggacttgcggcccggactcgagagaacgcccccagaccagcgcttccgcttccacgtcctgcccctagcggcctggcgcatggggcggacgtagcaggggaagctgaaaaaagcatctttatgtgactcatattttttcttaattcaacatatatcttaggagacattgagctaaaagaaaattattttatggaaaaaggccaaagatttgggagatactttgagaagagaagcgctaattaaatttaggatgccgcttcccccatctaacagtgacacgtgggctcttccagactggagcggggcggggcacagcatcccgctgcgcggctcctcaatcccaaccaaattcggaaggcgctgggcgaccgcacccccggcacatgggagtttgtcctgcaagggaaggctgtgggaaccacagttataggatgagctgcttcgctggcctagctgtgggcggggcatgctttccattatccctgctgttcctcttgaatcccagccctcagtctggctgcggaataccttcccatcttgtcttcccacctctttcctattgacctcaaatccatcctacaggaagtatccacagtgatgttttttccccgccaactttgtattttgaaaaatttatttttttcagaaaaattgcaaaaaataattcaatgaacacctgtatacccttcatctagattcaccaactgttcgcattgtacatatttgctttatctcggcttgtattaaggatgatacttcactcctaaatgcttgagcatgttgtctcctaagaactagggcattcttctaaataaccacaattcaactatcacattcaggaaatttaatattgataaaatactattctctaataaataagtcaaattaaaatttccccacttgtttaaacaatattctttaaagttattccctaccccatccacaactagaatctaatcaagggccgccttgaatttggtgatcatgtctctttagtctcctctaatctagaactgcaccggtaaacggtcagcaggactgtgttcctcaatgaaggttccggggtggtggggtttgggtgggggacaggggtgggatctgctttcagcctcaattcaggttgttggcagagctcagttctgtgcagtttccttgctggcttttagatggggactcccagctcctagaggccatctgcattccttggcttgtggctccttcctccaccttcaaagccaggaagggcaggtcaagtcctcctcacactttaaatctctctgatctccctttctgtatgatctctcctgttcctgttccttcttttgccacatctctctgactctagcctgaaaaaattctctgtttctaggggcctaaaaaattattagatcaaatataaccaaacaattaactttttttttttttgagacagagtctcaaaaaaagacactcactctgtcacccagactggagtgcagtggtgcaatctaagctcattgcaacctctgcctcccaggttcaaacaattctcctgcctcagcctttttgagtagctgagattgcagacatgcatcaccatgcctggctaattttcatatttttagtagagatggggtctctccatattgggcaggttgatctggaactcctgtcctcacgtaatccacccacctcgggccttggcctcccaaagtgctgggattacagacgtgagccactgtgcctggcctctttctatcttaaggtacataaattttaattatatttataaagtcccttcagatcagtacctaaattagtgtttcaatgagtaatcaggatggaaatctttggaggagggcatttttagaataatgcttaccttaaataccctcatagggttgttggagaattacattagttaatgcatgttaagcacctaaaaatgtccctggcatgtagcactcggaaactaggccaaaaaaccaaaaaacaaacaaaaaaaccccccactgactcaaggttattggacgtgattaaatgtactaattagcttgggaggatagtccctgaatga

SEQ ID NO: 917175 - DNA, 4001 bp, Homo sapiens
gatggacagaactttgtaaaacttcaaagtcatatggcaaaggatgtgggtaaagggaagattaaaaaattagaaccagtgatgcccaatcttgggctctgtctcagacttattgaatcaaaatctgcatttcatattccccaggtgtttttatgcacctctgagacatgctgccctcaataccatgataggtacatccataccagacggtgtaggttaaactgtataaaccatataaaccagacggtggaagttaaaatgtacagtttaactctacaaattagagtcctacatttgtaagggttttatgggtctaaaggtctggggtgtgctaggacaacctctgtaaggtgaaagacaagttattgcatcttgcaattcctattcacagcaaaatggcagagaacctactgggcctctttggcttttggagatagaatatacacttgggaatacagcttcaacacatttattgggtggtatggaaagctaccaatttgagtgtatccctagcaagacagtgctctgcagcaagtccctgctgggatgcaaactgtcttgctgtccggccttgtgtctcagcagatccaatgctgctagtgtccctggaagataaagatgctgtgtgaagtcttaagcaaccctaacaggtgaatcacagtgcagaacctcagggatctggaacaaggcaattcctttgacagtaagtaatttgaaaagcagcccctggcatgcactgagtccagcagagactaagagtctggcaatgtaactctagtgataatgcaactaagcccatcacgagctggacactgccagttttaccaagccaaagtgttaggtgagtatagcagcaatccattagataacgatgaagaggagttaaggtaatgaaatacctctgaagtcaaagaacagtggccagaagaacgtgggtgggagagttggaagtttcccaagaaatataagctcagcataatattatctttttctgactccctaactgctctctacctgaatttcctctattaggtgcagaatagtaatatgcactcttccccaggtcaaatttatggagttatcattgataacttctgctcatcaaaggcatcatcccttaaaacagaatctctttaatctgtgcctttctccgtggctactgttttaattttttcagcatttatttctcacacgtttttcacattattgacaagtgatgtttctgcatatctgatcatcccatttattcttcagatgtttaccgagcattttctatgtatcatgcactgggttaggccctggataaataatgtgaagaagaaaaaagagacactgctactgggctcctggaatttgcagtttggtgaaaaagatacatgacaaatcctgcttaagatccttcagtggttccttgctgttttcaggaagcccagatgtcttgaccgggttgcctctgtttacctctacagcatcacctctaatcagcaccctttactctgcagccacagtgcgttttcccttcttcacagcaccttcctctctgcctaggtaaagtctaccatcttttaagggttcagtccaggaatccactttttcaggaagacttctggacactctcttcccccttcctccgtaattccagcacacttcatgccatcactatcatataggtaccacgctttttatcctgattctccgttgtcttgtccactgcctctactctacagtgaactcaactttgtgtcaatacttagtacagtgatttctagtactcgacattttttgtcaaatggaatcggatatatagaaacacccgctgcctcccgcaagagcagacaaggccaacccatcactcctgcaccccgacaaacgaacaacagcaccgtgctgcacggcgtcctccggccttgctgcctggcaatgggtagccacctggcgtctgtctcagaataggactccgcggcacgcctcctagcgcagtcggttgacactgcaagaatgggaaggtgcgggtgaccacgcggtcccagaccggcgcaaggcgcatgcgtagaacgcgagcgctcggcaaggctcggctcggaagagtccaagcgtgaggggagagggctgtggattcagatactgtttttctcccgaaataggaaattggcttatttttttctcctcggcagcatcttaatttaaaatatgacacttgacctacggccctgcacggagcggttaagagggtgagaggcccgtcaaactctttttggtgtttaggcgctcctcctccgggcggtgtgttgggagggcccaggtcaaggcgcgcgtgggcggaagcggcggcggcggcgaaggcggcggctgtcagagctggagggccgggcaccgcggccatggagggtcaacgctggctgccgctggaggccaatcccgaggtgggcgcgcttcggggcagccctgggccgtgggcaggtgcagagggagccggcttgctgccgcgagtccacggtggtttgtctctaaagcgtgttctctgtttcgttttcaggtcaccaaccaggtgagtgaggtgtctgtcgctcgggacctcggagtcttttctgtctgctcggtccgcttccctgctggactccacctccacgcttccagggattctgggatttaatttcttgagggcccctcttgttcggctttacgcgggtccgcccctttcagaaagggccatctcgctgccacctggctcctgaagattctcccaccactcctctggtcccattctgcagtcaccacgtatcttggggactccgggtctgaggtttggagggacttttaccctgtattcctattccccttccttcttcgttttgcctcctgttagtgccgattccataattttcctaccggtgtaccttttggatgactaatttgcccacacttcctgactccaagctttgtaaactcgcccacccagtccttgtaatttcatccaccgcctgcactatgaaatcatcttccaatcatctcttgccccatgaagtcacttttcttccccgccacgccccctttatcttccagtcttttaaagctggacatttagttgctgttgtatcaaagaaagctcagtttaatagttcccacgccattctttgcaatctatagcaatttaagttccttctgggtgttggaggttgggggttggggagggaggagggaacatctcccagccactcagaagagtaagtgctaccaggtataaacttttgatctgctcaggtgtgccttattttaccctgttttttttttttttttcattctcaacagctcatttcttttttactgctctcctagtttatcatactccctttacctccactatcttccttctcatcaccaaggaacaattcaccgtgttcttaaaaatattggtttttggttttcaaagcttgtagcaaattccctggacaaagagacatcctctgtcttgctctctatcttagggaggaaacatttgatctttcaccattaaatatgttagctttaggtttttggtaaatgttttttaaatcaggctaaggaagttcctcttttccccctagtttgctgagagtttttcttatgaatctatgttgacttttcgcaaatgatttttctgcatctcttgagatgatcatttaaggaagaaataataccaattctacataaacataaaagaggggagacggccaggcgcggtggctcacgcctgtaatcctagcactggcgctctgggaggctgaggtgggcggatcacctgaggtcaggagttcgagaccagtctggctggtgaaaccccgtctctgctaaaaatacaaaaattagacgggcgtggtgatacactcctgtaatcccgggtacttgggaggctgaggcaggagaatcgcttgaacccgggaggcggaggttgcattgagccgagattgtgccactgcactccagcctggatgacagagcaagactctgtctcaaaaaaaaaa

SEQ ID NO: 917176 - DNA, 4001 bp, Homo sapiens
gcgttatatttagtgtcactaagctgctatacacgtactcatttgaagagatgtgctaaagcttttagtgtgttttgctattgattatcctatccaagagtttgggttactctacgatcaagatggcggtctgcagtgagcccacctgcccgccaacctctgcaacaaccagctgaggataattgcactgggctgacgccaaggccatgattagatctgctagtgggtgagaaccatgagactgaacctctaatcccgaacctctcttccaagctactttccaaaccaactgctgcctgcaactccctttgactaaatctgaccttccttcaaactggctctcttcctaatttccagattttatggaggcaatgctgtccagtgcatggagttgaaatgaggctaaagtgggtttgaatccaagctctacatttactgtttgatcttgggccaattatttattcttcctgaggctcagtttcctcctttgtaaaatgtcagtaaagattcctagcatgtaggattttatgcatttaaagagataacatttctaagtgactagttcagtgcctggcacaaacacaggcactaaataagcagaggtttcctccctttcccctaactgtcaatggtactgccactgtgtacagtagccaagttggacatgttgataccaatttttctcttctccccctttcccttaactgaagccaattatcaagttatggaatattagaactagcaagaaccttagaaatcctgaccatatgattcaccgataaaatacagagaaagacataagtcactgatcattgcagcaatcttgacccccacgtcaattaaataacaaaaataatatcattttatgatagaatttgttgctcgacattcgacaatcatgttgaacaaaagaagatcaatcaactataatcagttcagtgatcatgtacaaacacagcttcaggctcacaagtcaagatctattttccaaaccattgtcctatggttatttatgaccgtgaacatttttttggtggtagaatgttccttgtcactggtatattcctttgccctatgtctcttctttctttgtcatttactaacatgaggagagggatctgtctcaaagataattggaggagaaagcgatcatagaaccaaaacaaaggggaaaaaataagataattccaaaggaaacaatatcaatgttttaaagcctaaaaattgactacttaataaattacattacatataccctggaactattttctccatgcattgcatgtgctatagcatgaattcatttgtgttcttctagatagtttatcctaagggaatctactaagcaaaataagaatcagataatagttctttatcacacaactcttcttcctttcatattccatgctaaataatcatgcatgatccaaacctcctatttaacacttcaccctcttcttcctcctatgttccatgtacaaggggaaaataaatgatccatagttaactttttttatgtgaagacaggaagaatatgaatcatacatcaagttagagtataaatagttacgtttataaaagatttaatttcttgaatctccatagtcactggatatgcgtatcatccaaggttctcccaataataaaaccagagccaggaaagaaaaaagaccctgtctttagtgatagcccattgtgctaaagtctacttatttgtcagggcaacttggaaagttctgaaagacctggccttcaaagtttaccattttgtccaccagctcagtgcactgacttgacacgacatgaggcaaacaagtgaggagagtggcccaccacagtctaagattctattgggttacctctgaaacgcgaagacatgctgctcacagaagagaacaatgggtacaaggactgcaaggctgcaaagcttcatcccaacagcaattttctgtacaacaaatttctctgaagagaaaaacccagatcattgattgcataacagccttctttacacactggttaaaatataacggcatgttccctcttgttcctgtgggtcaatcaacttagcttccatttccactcccaaaaagagaaatattattggcttagttaggctgttgcttgataattaaacactcaaaaagagtatgatgagagttgctcttaatttagactatctagaaaatgtgtaactccttggggaaggtagggccaagaataaaagggtagtaatacagtaggatcttgtctggtttattgcagaacaatagctatagaatattgactaatggatatatagcccatgttgagggagatctaccgtgaagtactataaatgtcttcccttgcctctgactttttcaacattttaaatttatgaagatgtaaaaagtgagttcctcaaatctggctaatccaatccaatgttgaagtgcagtttgtaaggatgattacaggatctctgttcaaaaagatgtttccttgaccatatggaatgataggcccacccccaataggaatactatttcatggaagctggttcaagcagtaaagacatcaggttactttgaatctcatttatttaaaggtcaccataatagccatcaattaaatccaggcccatcccctatcatcttgaaagtagcatcaaataacattttgtctagtatgaggccatatcctaccctctgtaagtgagtggagccctcttcccctacattcccattggttaatgcacttgaatgttcttgaagtcagaattggcaaatttgcaaaataaatcagcctgcccacaattaacttctgagaagaaaatgattttttttcttttttcttttctttttttttttttttttttgagacagagtctcactctgtagcccaagctggagtgcagaggcgtgatcttggctcactgcaaccttcacctctggggctcaagcaattctcctgcctcagcctcccaagtagctgggactagaggtgtgccccaccacacccagttaattttttttgtatttttagtagagacagggttgcaccatgttgcactggatggtctcaaactcctgagctcaggagatccacctgcctctgccttccaaagtgctgggaatacaggcgtgagccatcgtgcctggccagaagaaaatgattgagatttcaaacttttccttttgagatttaaaactattgaatgatatttaatgaattaaagtgacctccactgtaaccacttgttgtataagaaagaagaagaaataagaaaatatgtgtgtgtctgctcatatgtggagaaagaaacataagaaggatagattagaaatcaatgagactggttatccacgggaggtgagtggaaacacactggaaaagacagggtagaagagacagggagggacgcttctttgggtgaagtgttttgaatagttctgaactttagaactactctgaattttagaaccatgttcttttcacatatgtacttaaaacaagcaaacaaataaattttaaaaaataatacaaacaaaaacgaacctgtgtttcaaatgaataacataatcacactgaaggagagaaagaaaaactaacccaagtaacttttaccttatctttttaacataaaagttaactttaaaacaaacagtcaaaatagttaaaatatgctaataaattctatcaatttttgtgctacttattttgtatctgtgtttcttctttattttatgtcctgtttcctctctggggaaacagaaacaggatacaaaagaaacagagtgcataaaaaacaataaattttaaattacatttcttattgctgaagcaatcttttaaaagttcctatagcaaaagtctacaggtgataaaatcttttatgctctgtatctttaacaataactttcttttgccttcactttcaagtactagtttagctgaatgtaatattcgagtgtgacggatgcgtcattgttgtttgacatttcctgttgcatggtagg

SEQ ID NO: 917177 - DNA, 4001 bp, Homo sapiens
ctgagccacccacagccagataactgcacaatcaactaaaactttacttcacatgtattaggtgcatgcataacactactccaaggcatgatggacctatacaaggccaagcaaggtggctcacaactgtaaccccaacactttgggaggccaaagcgcttgcacccaggagttcaagaccaaccagggcaagatggtgagaccccatctctacctaaaaattttaaaaatcagccgggtatggtgacacatgcctgctgtgggaggatggcttgagcccggaaggtggagatccaccatgatagtgccactgcactccagcctgggcgacagagcgagaccctatcctattaaaattgtgtgtgtgtgcgcgtgcgcgcacgcatgcgtgtaaaaactgtgtgtgtatatatatgtgtgagtgtatatatatacacacacacataaactctggtaactattaataaaatgcaagacagaggtaactaccaccactggtacaaagtgcactttttttttttcagacggagtttcgctcttattgcccagactggagtgcaatggcaccatctcggctcaccgcaacctccgcctcccgggttcaaaggattctcctgcctcagcctcccgagtagctgggactacaggcatgtgccactacgcccggctaattttgtatttttagtagagacggagtttctccatattggtcaggctggtctcgaactcccgacctcagatgatccgcctgcctcggcctcccaacgtgctgggattacaggggtgagccaccgcgcgcggcccaaagtgcactttttaatatgccttcactattcaaccacgggcactcatgggccagaaagaacaaaggcacagttaactccactgctctggagaaaagaaagctgacaacaaggaatctgatgccttccttcagtgggaaggaaacaccctgacattggaagtggtctccacaccgggttgtacactgatggggggcggagtcgggggcaggccaacacctcaacagcagtcaccaaaaaggtgcttttaactatcaatagcaagtattaacatgtttatagattgctgctaacagctggccaaagaaaggtacatacaaatgcccctttttaaaaaacaaaaatagcaaggattgtaaccgtaggggtggggggcggggtgggggaagcacacactaaaaatcagtttgggcagaatttaagctgttaaatggacacacttagcaaactctctgggctccatcggcccccacctcccctctggaaacatcgcctcgcccaggaattaggactgcgtgtatgttcgcctaacacctgctgcggcctccagcgacatcgtcgccgacaggactgcgctggcaccctccctgctgggctagtcctgtctccgtcactaaacgcctgtgaccttaggtaaactgcttagtctcagtattctcattcgtaaaatggggatgagaacacagtcgtcgcaggatcgcagccagaattcgtttcattcaacacggtgcctggcacttctatgtggacctgcgggcagacgcggcgacattcaacagagtccaggaaccgcaggccccgcggcctgggcggtcaacctcggaacctcctgcaacgctggctcccgggaagcagacccaactccgcggggcgcctccacctgccaagcccctccagccgcgcctctccccgagcccgccagcgccgtaggggccgcagggcgcagggcttcggaggaccggaggccggggcggggacagcgacccggcgcccaccccgagggccccacgcgagggcaccacgtccccggcgtctccccgggctccaggggcagcagcgcggctcggagccctttacctgccaacgatcaccacgcagccggccgcggaggacgccatggttgggccggggacgcggcgccgcgggcgctgggaccaggcgccggcggagctgcgagctctgggctccggggagggcgggtcccgcgcccattggctgcgcgcgcggaccgggagggcggggagggccgcttggtccctgagtggggtgcgcgccgcgggcccgagacaccgggagacacacggcgcgccgaccctcgtgggcaggggcaggaccagcgcgggggcacgtcggggggtggaaagcgggaagaccacgcgcttgtgactgtcagcattcaccgtgaagtccgtgtctataggaggggacacgggcaggctggcacgggctctagcgctaaagcaccctagagaaactgtcagagaatgtcccctttgctaattcgtctctgaaagacgcctgccgctgccgccaactgcgaactgggcgcagggactgcgacagcagtgaaagagaacacctgatgcgttcatctgcgctacggaaggacacgtctgaattcctccacggagcacactctgcactcggtttatgtatcagaaaaaggaaatgccctcgtgccctgactcctggccttcttggagcccggaacagaccaagaggaaggggcatcacacattgcctgacagtggtgtgcgtccacacagcacaagctgaacgggaaatgacacagtcattagacagaggagacagtactcaagctggaaccgcagccaacactgagatgataaaaggaagtcttcctttgtttcccctgagtcaggaacgtggaaagagaaatctcaggggaggggttaggtttttttgttttgttttgttttttaaagaacagtttcacaaattatcgataaatatttgtaaagtattcaacctcaagagaaatgaaaagtaacacaaggaagataagtcatctctcactcatcagattggctaagtcacatggattgattatattcccatatccgtaatggagtgtttcggacatgcaacttacacacagtagaaggcaagcttaaatgttgaggactttttggagggaatgttacagtacattgttgagacagccgctagcctgagcaaccgcgcctgctctggctgagaatacaaggctccaaagcttccatcttctgatggagcagtttctgtagtcagttacacaggcagccaatataataatcaaggcacccagggagtgagcatcctgtgactgctcactaccggaggctatgggggcagcagactggcttgtttgctgctccctgcaaagtcatgcctgaaatcccagcgctttgggaagctgagtagtaaataatagcttgaggccaggagttcaagaccagcctgggcaacaaagcgagacccctgtctctaccaaaaaattaaaaaacttatccaggctggtgccgcctgtagtctcagctactcagtaggctgaggcaggaggattgcttgaagccaggagtttgagaccagcctgtgcgagatagtgagaacccccccccccgcatctctagtgtgtgtgtatatatatgtgtgtgtgtgtgtgtgtgtgtgtgtgtttatatatttatttatttatgtgtacatatatttataactttaatccttctggtaccaaacaaaaaaaatacagatttatttaaattagccaggtgtggtggtgcattcctgtagtcccagctactcaggaggatctcttgagccctggagttcaaggctgcagtgagctatgattttgccactctactccagcctggctaacagaacaagactttgtctcaaaagaaagcaaaagtggctggacgcggtggctcacgcctgtaatcccagcactttggaaggccgaggcggacggatcacaaggtcaggagatcgagaccatcctggctaacacggtgaaactccgtctctactaaaaattagccaggcgtggtggcaggcgcctgtagtcccagctactcgggaggctgaggcaggagaatggtgtgaacccaggaggcagagcttgcagtgaaccaagatcacgccactgcactccagcctgggcgacagagcgagacatcatctcaaaaaaaaaaa

SEQ ID NO: 917178 - DNA, 4001 bp, Homo sapiens
caggtaagcaggcggaatctttcctattctcaaaactggaatttttggttactactagatcagctggcttacagacaagaagccaaccattttaagaatgctctttatgtgaacaatttgcaaaccccagggatggagaaaccctaaaaatgctcaatcataagcatttacaacctttgcagctgtggctgaatactgtccttctgaaatgatatctcaaagcagtctagttcaaaataaaaggttttaacaaaaaattggcatatggacaatgtctccaccaattcgtgtgtgtcaaccatttagttaacttttctacttgaataaatgcaatagaaaaccagacaccacgtttcactacctcagttaatattcacaattacagaggctacactttgggatacagcatcaccaacgctccccagagtcagtttatattgaaataaagttttttacaccaactaaatggttgttcacagccactagctggtgtacatatgaactacaatttctagatgtggggagaaacaaatgctgctcgaatcatctgctctgcttcttctgttcctcattcacgcttagttatctttcacattattcttgtttttttcagtttgcttgcctgtctgggtttgggcctgctgaccctgcccactggaagaggctgcctgctgtgctgctttctgctttaacatcgtccaatcaaatgtgtagtcatattggtggttcagggtcctgaaaagaatgcggaatagctgcctcagatacatgtaatctgggacttcctcaaagcgcagcccacgacagtagttcaagtacatggcgaattctgcaggaaaccccttacataaaacttcaacaggggtggacatcttcttctcactaatcttttcatatttttgtttttttgtcatagcccttagtccttgccacggcaggctggttctattaaaatacatgaaaacgtagcctaaggattccatgtcatctcggcggctctgctcaataccaagatgtgcattgatgctggcatatcggacagtgccaatgaggtgtttatcttctctgtacggtatgtgttgcctggtcctgttgtctctgtactttttggccaaaccaaaatcaataaggaacaacttattacagtgacgcccagtacccatcaggaagttatctggtttaatgtctcggtgtagaaaattctttgtatgcacgtattcaattctgctgatcatctggtcggctaacataagtacagttttcatggtgaaccttcttgaacagaaattaaagaggtcttcgaggctgggtcccagaaggtccatgactagcacattgttgtctttttcctgaccataccagtgcatgtgggggatgccaaccccaccttgaagaatcgtgtagagtttgctctcatacagcaactgggggtgcttgaccttctgagattccagcttcactgctacgtcctcgccgttggtggtggtgatgcccagataaacgtctccaaaggagccagacccgatcttccgcaccagtttgtatttccctcccacaacgagttcggctttggagccgctgttgtttgtcatcctgagaggcaaagatggaggctgggctcagccctgacccctctaggggaggatggaggcctccggggcccaccggcccgcaaggctgaggatgagggctgctggaaatggccaccgaggcgtttcccggtgttacagggcgtggagtcagcctgatccctgcagcacaccaggatttccgccaggccacagtttgcgagggtttctcaaggttccaggctgggccaccacctctttctcggtggcggtcgctgcctcgctgtcgtggcgatgtcgtgggctgagaaagggggcacagcgagttggggcagcagtactgctgccaccgctaccaacggctgtgggccagagggcccggtcacgccgccggcgccgccattttgttcctccacctcagccaaccacaaatcgagaatttttggagaagctgttattgtctgagacctctgttaggtgttccactcatctcactccatttaagacaaacttgctagtcttgtaaggtagctattattttccctgatttgttgggtaagaaaggctgagtctcaggtaagcggcctaaggttgcaagagattgtgggcgagctggaattcaaaactgcctaggcttaactcgaagctcaccttctttcaacttaatcgtgcagaaatgggaggcttttataacaaagattttcttgttttcgggcccagtcattgtcccatctacttccttagccatcatgtctccctgggttaatgcgagtcggggtgccacctcttgaggtttttctgtgtgatctcagtggttgcttctttaatgagtttagtcaacaagagttacttactgctagttaaattgaaatgtctttttttttttttttaaagcgatccttttgaaattttttcatagagtgctttgaatttaaataggattccacagagacgttctggcaaaactgactaaatgaaggattcaagtaaaatttaaccaaaatatggagaagaaacagaagccggcagttctgagcattttctcagaagaactggggccagcactagcagaaaaagcggtaccatttcaatatttttatgaaagttcacatcacaaataacaaaacccgtgcgattattttgttttatgaggagatgggataggaactgagtataatcctaacggggcagtagcaacgaatttgggggccaatggcagaaaggcaggagagagaggtgcagctttgaaagcaggtattctcactttactgtctcacataagttagtgctgttaacttttctgacctgcatcaatctatggcgagagaaggagctggtttgagacatagacgggcatagaacattataaagtgctttaaaacatttttaaagtccacttcagacaaatatgtgaggtgggtagcgcagtatattacttggctttgcagcaggaacaactcgcaaatctcagtggcttacaatgacaaagtttatttatcattcaggttttatgtaagctgtagatcagctgcatctctgcttcctgtgtcctctttgttctagaatgcaggctgaaagagcagcctccttaggagcatgctgttctcataataaaaggagtggcaaatgttacattccactgggcaaaacacatcacatggccaggtccaaagacagtggggtgaaaatacatactcctacctcaggtggatagtaatacagtatactgctggcatattttattattatgattgtacttctcattttatacaagtggaaatcaaggcatagagaggttagatgaattgcccaagaccacactacagacaagtgtcagaggccaatttgaaactgaattctgacccaaggtagttactttttataccgtaccaactagaatggcatttctttcatttactcatccaactttgttgaaatttgcctggagaacaatttcctttctaataaccaagaataaaatttatgttgttaacccactgcccattatgcttccttcccgttcagtcttccagtcaatggcttcaacacgaaccttgaaattcaaataatctctatgtgagagaagtcactattcaaaaaagttacagataacccatacatggacaaaagcttgaatcaaaaaatcccctttcaattctggaactagaatagtttaattatagtttatttattgtttactaagtcccatacttttttgtaccagttaaataaaggcactgtctataaagaaggtcaagtgtaacttataatggtggttgggtgaaccttcacttacagggaagttgtgagcatctccagaatggggaggatcagtaactgaagtgatgatatgaccctgaatagcttccaatccagtctcccatgaattctcttaccacaagccggtgggactgcggatttttccccgaacac

SEQ ID NO: 917179 - DNA, 4001 bp, Homo sapiens
ggctgaggcaggagaatcgcttgaacctgcgaggtggaggttgcagtgagccaagatcgtgccatggcactccagcctgggccacaagagtgaaactccgtctcaaagaacaaacaaacaaaaaaccccaaacatggacacccaaatgtccattaactggtgaatggataaaacaactgtggtatacccattctactaggtaataaattacaatcacactgcgttgtgcatgaatctcaaaagcactgtcctaagtgaaagccagatacaaaagactatgaaatacatgactgcatttagataaggttctagaaatcgcaaaatatagtaacagaaagcaaatgggggaccgccaagggctaggagtcaggggagagggctgactgcaaaagtggtcatggcaatttcgggggtggtagcaatattctaccattctaccaagaaagattccatcttgaccgtggtgccggttacgtaactgcatgcatctgttaaaacttcctgaagtgcacattatatgtagactctatctcaaagctggtaagaaaacatcatccacttacacttcagacaaagaatggatgtatgtacaccaaactgtcaacagtagttttctttgggtggtaggagtataggtgattgaagtcttcttttttgtattttttataatttttacaatgcagtcacttgcatatccagaaaaaaagtttttttaattcaagccttttaatagaaataattgtatgacacatcgtgacctaaaatatagatattagactactgaatgaatgttactttacaaaaagaagacaccagaaaaaaagtcgcttataaataaaatatccaagtatggtaaaatgtacttttttgttacttcagaaacggaacaccatcactttgaattaaatgctaccaaatctgtttgaataccttaaaggcaaccactaatcacaaaacacaacagagaacaaaaccactttttctgaattttgaattttttcaaaatctgtttgaatatcttaaaggcaaccattaatcacaaaacacaacagagaaaagaccctcttattactgtggcaagtgacacagtcatgagttttacatataacgagaaaataatttgccgtatacttgcaaaatatgagtcacgtggctcctagaaacacacctccttctcttccgtaatgggataactttaaatatggttctaagcagcttaagcctgaaaacaaaaattccaccacggcaataaacaaaaccacttgttgcctctggggctcccggccctgcagtggaggcaaacgccctgcctttccgctccccggcgagagcctgcgaggcacccggagcggccgcccggccgcgtctgcgtcacgcggggcaggagcggcgtccccagccccggccgccgcctcacctggtagagctcctcgaggttgtacctgatggaggtgctgctctgcacggcccgcaccgcctcgtgcagcttccgccacgtgtcctgcgtgtagttgtcgggcagccgaggtctgtctgcagggcggagggagagcgggcggctcagggcgcgccgcgaagcgccccgcgtagccacccccgacccggccggcgccccggcgcccccgctcccggggcccgcacggatctcggggccttccccccaagtcgggcggggtctcgtggggtccccgcccggggcgcctggccctcgacccggccgccgcacccacctcggaagttcttgatgaccagcttcttggagccgcccgcgccccccggcttggcgggcgcggcggccagggccgcgggcttggtgaggccgttggtgcggcccacgagcgccgagaagctgcccttccgcggggcctcgtccgccatggctgggccggaaccgccgcgccccgccccgagcgccgccgcccgccgagctccgctccgcccgccccggtccgcgcggcctccgccccgtcctcctcgcgcgccccgccccgccccgcccgcgtgcccgagcccaaccgccgccgcgcccggctactcctgagggcttaggaacgcgcgccgggaatccctcctgagggatcggactccccctaagagattcggacaccccctcctggctcgagggcgcgcgccgggactcccgtcctgagggatcgggaccctcacccccggctccggggggcgcaccgagaccctgcccccagggctccgggcaccccctcctggctcggggatgcgtgccgcgggcacccctcctgaggggatcgggagccgggacaccctcctgagggccccggggcgcgcgcctcctgagggctcggcacccccaccccgggcgtgagaccacctcgagggctcaggggtgcgcgccgggacgtgccctaactcctgcaggctcgggagcgcgcggcggaggcaccttatgagagctcgggagcgcgcgccatgtccctccccctccccctcctcgggcgcgcgcgccccgaggccctggcccagccaggcgcggagggtcctccgcggcctggttttcacaaggggcagacgaagggtcagcgcagtgaaaggcagtttagccgtggggctgtcctcgccactggaccccaaacccctcagcccgggcgggcccgaacacacaatcagagccgctggcgtcccggctgagaggacggggccccggcagaaagaccccgggccccctcagcccgagcgcgtcgccgagccggtccccaggttctccctccggaaccaacctgcgcacccgcggcggggccgggggcgccaggacccagacggaccgagggccggaagtgacgccagctggcccgcttgaggcgtagggggtggcgctctccgttcggcggcgctcccatggcgcacattaccattaaccagtacctgcagcaggtgggtcctagccggggagcgcgcggcggcgtggttggccctcggcgtgttccgtgtgtcccctcctgccttggaccctcaggccttttcctttcccgcctcgccacccttcttccgttcgggtccccggcgggcagccgcgcgagccgaacagcggcggccgggactcgggaaggcggcccgagttctcccctgcagggccgccgtgggggccgggcggtgtccgtggatcgcggagtcgtcgcggtgtaagtagacgcggcggtcccaggtcgctgccctcacttgctggcacgtgtggccgcgctcccaggcggtccgaagggcctgcgggccacgccgagggcccgctgtgggcggtgctgtgtcggatggacgctgtttcccagcaggatgcgggatgaattcggggactccaggaggcgatggaggagtaagcgcgaggctgtggccgtgctgcaggccgggctcgtgcccctcgtcctcgctgtcgtttaacgcccttcactctccgagcacaatgcacacttcatatcgctcggtacatgcgtctgacagatgttgttcaacagcttgtaagtagcagaagcacagttaaaagatggacacttgtaaagattcaacgcatattctttccactaaactatgcctgtcttcagaaccagcactgtggtaacagggataggaaatatagggaatggatttttaaaatatttgaaggaaacattaccaagacgtggtgaataagaatgggtgggctgagggacacggaggagttaagaatgattcccaggcttgtaatctgggaaaaagatgaatagagtggatttggagggagaaataaagttttgggcatgttgagtttgaggtgtctgttgacaactgggtaaagatacgtacttgatagctgaaaagtctgacatgattgggcccagcagttgcttggttaattgagaaaactggttaaaacaggaatcacgaagaaatggatgtatgtttttaacttaaaacatgaaagtatacattcacttgccaattttttttttacaccacttacctcaagttctatacttgccaatcttttgatgtaagcc

SEQ ID NO: 917180 - DNA, 4001 bp, Homo sapiens
ttccgctccccggcgagagcctgcgaggcacccggagcggccgcccggccgcgtctgcgtcacgcggggcaggagcggcgtccccagccccggccgccgcctcacctggtagagctcctcgaggttgtacctgatggaggtgctgctctgcacggcccgcaccgcctcgtgcagcttccgccacgtgtcctgcgtgtagttgtcgggcagccgaggtctgtctgcagggcggagggagagcgggcggctcagggcgcgccgcgaagcgccccgcgtagccacccccgacccggccggcgccccggcgcccccgctcccggggcccgcacggatctcggggccttccccccaagtcgggcggggtctcgtggggtccccgcccggggcgcctggccctcgacccggccgccgcacccacctcggaagttcttgatgaccagcttcttggagccgcccgcgccccccggcttggcgggcgcggcggccagggccgcgggcttggtgaggccgttggtgcggcccacgagcgccgagaagctgcccttccgcggggcctcgtccgccatggctgggccggaaccgccgcgccccgccccgagcgccgccgcccgccgagctccgctccgcccgccccggtccgcgcggcctccgccccgtcctcctcgcgcgccccgccccgccccgcccgcgtgcccgagcccaaccgccgccgcgcccggctactcctgagggcttaggaacgcgcgccgggaatccctcctgagggatcggactccccctaagagattcggacaccccctcctggctcgagggcgcgcgccgggactcccgtcctgagggatcgggaccctcacccccggctccggggggcgcaccgagaccctgcccccagggctccgggcaccccctcctggctcggggatgcgtgccgcgggcacccctcctgaggggatcgggagccgggacaccctcctgagggccccggggcgcgcgcctcctgagggctcggcacccccaccccgggcgtgagaccacctcgagggctcaggggtgcgcgccgggacgtgccctaactcctgcaggctcgggagcgcgcggcggaggcaccttatgagagctcgggagcgcgcgccatgtccctccccctccccctcctcgggcgcgcgcgccccgaggccctggcccagccaggcgcggagggtcctccgcggcctggttttcacaaggggcagacgaagggtcagcgcagtgaaaggcagtttagccgtggggctgtcctcgccactggaccccaaacccctcagcccgggcgggcccgaacacacaatcagagccgctggcgtcccggctgagaggacggggccccggcagaaagaccccgggccccctcagcccgagcgcgtcgccgagccggtccccaggttctccctccggaaccaacctgcgcacccgcggcggggccgggggcgccaggacccagacggaccgagggccggaagtgacgccagctggcccgcttgaggcgtagggggtggcgctctccgttcggcggcgctcccatggcgcacattaccattaaccagtacctgcagcaggtgggtcctagccggggagcgcgcggcggcgtggttggccctcggcgtgttccgtgtgtcccctcctgccttggaccctcaggccttttcctttcccgcctcgccacccttcttccgttcgggtccccggcgggcagccgcgcgagccgaacagcggcggccgggactcgggaaggcggcccgagttctcccctgcagggccgccgtgggggccgggcggtgtccgtggatcgcggagtcgtcgcggtgtaagtagacgcggcggtcccaggtcgctgccctcacttgctggcacgtgtggccgcgctcccaggcggtccgaagggcctgcgggccacgccgagggcccgctgtgggcggtgctgtgtcggatggacgctgtttcccagcaggatgcgggatgaattcggggactccaggaggcgatggaggagtaagcgcgaggctgtggccgtgctgcaggccgggctcgtgcccctcgtcctcgctgtcgtttaacgcccttcactctccgagcacaatgcacacttcatatcgctcggtacatgcgtctgacagatgttgttcaacagcttgtaagtagcagaagcacagttaaaagatggacacttgtaaagattcaacgcatattctttccactaaactatgcctgtcttcagaaccagcactgtggtaacagggataggaaatatagggaatggatttttaaaatatttgaaggaaacattaccaagacgtggtgaataagaatgggtgggctgagggacacggaggagttaagaatgattcccaggcttgtaatctgggaaaaagatgaatagagtggatttggagggagaaataaagttttgggcatgttgagtttgaggtgtctgttgacaactgggtaaagatacgtacttgatagctgaaaagtctgacatgattgggcccagcagttgcttggttaattgagaaaactggttaaaacaggaatcacgaagaaatggatgtatgtttttaacttaaaacatgaaagtatacattcacttgccaattttttttttacaccacttacctcaagttctatacttgccaatcttttgatgtaagcccagggccttttctttaggctgtgtctgttttggcctaatcttagcagacttaacattttccaatatcagtttatttaaagttaaacaaggatataggcatttaagaaccaatttgatacgattatctttagaattttcttaatcttttacaatttttcccccatacctaattatttttttaacaaactcaagtgagccttttaaaaacatacaacttagcttatagagaaacaactgtttccttttgcattcatatttcattgatgagcttaaaagtacataactaccataacaggttcgggtagcaaaaatagatttgagaacaaacacatctggatatgagaacacatacaacttagctggcaaaagcttgcgatgtattagagtgaagcctacttgctgaaagtcgtcatcataccttgggcatcagctcgtgtatttcagggagggattggagagagtcatttttccaattcaagtcagttaaagtgagactgataagcgagcttctactctatgtgtgtaaactgaagtttaaacagacagatttgggttaaagatacaaacctgagactccttcgtagtcacatgatgggaaagactgagaagggaaggggtgacccagggaacaagtagagagagtagacaggggctgggcccaggatggacttctatggagatgtgcatgcctacatctccgcaaagggcagtgtagccactggggtgagacagcaaaaagtccgcttcctcctaattctgatggataaaaatatttctggttgaactggcatgttacctaagttttatgtattaacagattcttgaatattttaagaaaataggtgcctcttcgatacagaatggcaaccggttatacatggtaacacatgtttgatttgttgtataggaacataagtgccaatgtcactgtatctctttgggaataaaaccatcatttgcacattcatcaaagctaggaagttgggggaaatcattgactcctcctttagtctcagcaaatagtcctttacctaattggatgtatctccgaagtctctcagatccatcccttctttatctgttgccacatgctccccagccaggacgccctgctgcaggtactggttgatggtttcctttactttgccctttccaagtgagacacagcaaagagaccatagactttaaagacaataagacttcagcccaaatcctggcatttttactaattctgggaccatgacaagttatctaacttctgtgactctccatctctaaacaggcttcacataagttgtgagaattaaaaaga

SEQ ID NO: 917181 - DNA, 4001 bp, Homo sapiens
accagaaaaaaagtcgcttataaataaaatatccaagtatggtaaaatgtacttttttgttacttcagaaacggaacaccatcactttgaattaaatgctaccaaatctgtttgaataccttaaaggcaaccactaatcacaaaacacaacagagaacaaaaccactttttctgaattttgaattttttcaaaatctgtttgaatatcttaaaggcaaccattaatcacaaaacacaacagagaaaagaccctcttattactgtggcaagtgacacagtcatgagttttacatataacgagaaaataatttgccgtatacttgcaaaatatgagtcacgtggctcctagaaacacacctccttctcttccgtaatgggataactttaaatatggttctaagcagcttaagcctgaaaacaaaaattccaccacggcaataaacaaaaccacttgttgcctctggggctcccggccctgcagtggaggcaaacgccctgcctttccgctccccggcgagagcctgcgaggcacccggagcggccgcccggccgcgtctgcgtcacgcggggcaggagcggcgtccccagccccggccgccgcctcacctggtagagctcctcgaggttgtacctgatggaggtgctgctctgcacggcccgcaccgcctcgtgcagcttccgccacgtgtcctgcgtgtagttgtcgggcagccgaggtctgtctgcagggcggagggagagcgggcggctcagggcgcgccgcgaagcgccccgcgtagccacccccgacccggccggcgccccggcgcccccgctcccggggcccgcacggatctcggggccttccccccaagtcgggcggggtctcgtggggtccccgcccggggcgcctggccctcgacccggccgccgcacccacctcggaagttcttgatgaccagcttcttggagccgcccgcgccccccggcttggcgggcgcggcggccagggccgcgggcttggtgaggccgttggtgcggcccacgagcgccgagaagctgcccttccgcggggcctcgtccgccatggctgggccggaaccgccgcgccccgccccgagcgccgccgcccgccgagctccgctccgcccgccccggtccgcgcggcctccgccccgtcctcctcgcgcgccccgccccgccccgcccgcgtgcccgagcccaaccgccgccgcgcccggctactcctgagggcttaggaacgcgcgccgggaatccctcctgagggatcggactccccctaagagattcggacaccccctcctggctcgagggcgcgcgccgggactcccgtcctgagggatcgggaccctcacccccggctccggggggcgcaccgagaccctgcccccagggctccgggcaccccctcctggctcggggatgcgtgccgcgggcacccctcctgaggggatcgggagccgggacaccctcctgagggccccggggcgcgcgcctcctgagggctcggcacccccaccccgggcgtgagaccacctcgagggctcaggggtgcgcgccgggacgtgccctaactcctgcaggctcgggagcgcgcggcggaggcaccttatgagagctcgggagcgcgcgccatgtccctccccctccccctcctcgggcgcgcgcgccccgaggccctggcccagccaggcgcggagggtcctccgcggcctggttttcacaaggggcagacgaagggtcagcgcagtgaaaggcagtttagccgtggggctgtcctcgccactggaccccaaacccctcagcccgggcgggcccgaacacacaatcagagccgctggcgtcccggctgagaggacggggccccggcagaaagaccccgggccccctcagcccgagcgcgtcgccgagccggtccccaggttctccctccggaaccaacctgcgcacccgcggcggggccgggggcgccaggacccagacggaccgagggccggaagtgacgccagctggcccgcttgaggcgtagggggtggcgctctccgttcggcggcgctcccatggcgcacattaccattaaccagtacctgcagcaggtgggtcctagccggggagcgcgcggcggcgtggttggccctcggcgtgttccgtgtgtcccctcctgccttggaccctcaggccttttcctttcccgcctcgccacccttcttccgttcgggtccccggcgggcagccgcgcgagccgaacagcggcggccgggactcgggaaggcggcccgagttctcccctgcagggccgccgtgggggccgggcggtgtccgtggatcgcggagtcgtcgcggtgtaagtagacgcggcggtcccaggtcgctgccctcacttgctggcacgtgtggccgcgctcccaggcggtccgaagggcctgcgggccacgccgagggcccgctgtgggcggtgctgtgtcggatggacgctgtttcccagcaggatgcgggatgaattcggggactccaggaggcgatggaggagtaagcgcgaggctgtggccgtgctgcaggccgggctcgtgcccctcgtcctcgctgtcgtttaacgcccttcactctccgagcacaatgcacacttcatatcgctcggtacatgcgtctgacagatgttgttcaacagcttgtaagtagcagaagcacagttaaaagatggacacttgtaaagattcaacgcatattctttccactaaactatgcctgtcttcagaaccagcactgtggtaacagggataggaaatatagggaatggatttttaaaatatttgaaggaaacattaccaagacgtggtgaataagaatgggtgggctgagggacacggaggagttaagaatgattcccaggcttgtaatctgggaaaaagatgaatagagtggatttggagggagaaataaagttttgggcatgttgagtttgaggtgtctgttgacaactgggtaaagatacgtacttgatagctgaaaagtctgacatgattgggcccagcagttgcttggttaattgagaaaactggttaaaacaggaatcacgaagaaatggatgtatgtttttaacttaaaacatgaaagtatacattcacttgccaattttttttttacaccacttacctcaagttctatacttgccaatcttttgatgtaagcccagggccttttctttaggctgtgtctgttttggcctaatcttagcagacttaacattttccaatatcagtttatttaaagttaaacaaggatataggcatttaagaaccaatttgatacgattatctttagaattttcttaatcttttacaatttttcccccatacctaattatttttttaacaaactcaagtgagccttttaaaaacatacaacttagcttatagagaaacaactgtttccttttgcattcatatttcattgatgagcttaaaagtacataactaccataacaggttcgggtagcaaaaatagatttgagaacaaacacatctggatatgagaacacatacaacttagctggcaaaagcttgcgatgtattagagtgaagcctacttgctgaaagtcgtcatcataccttgggcatcagctcgtgtatttcagggagggattggagagagtcatttttccaattcaagtcagttaaagtgagactgataagcgagcttctactctatgtgtgtaaactgaagtttaaacagacagatttgggttaaagatacaaacctgagactccttcgtagtcacatgatgggaaagactgagaagggaaggggtgacccagggaacaagtagagagagtagacaggggctgggcccaggatggacttctatggagatgtgcatgcctacatctccgcaaagggcagtgtagccactggggtgagacagcaaaaagtccgcttcctcctaattctgatggataaaaatatttctggttgaactggcatgttacctaagttttatgtat

SEQ ID NO: 917182 - DNA, 4001 bp, Homo sapiens
aaataattgtatgacacatcgtgacctaaaatatagatattagactactgaatgaatgttactttacaaaaagaagacaccagaaaaaaagtcgcttataaataaaatatccaagtatggtaaaatgtacttttttgttacttcagaaacggaacaccatcactttgaattaaatgctaccaaatctgtttgaataccttaaaggcaaccactaatcacaaaacacaacagagaacaaaaccactttttctgaattttgaattttttcaaaatctgtttgaatatcttaaaggcaaccattaatcacaaaacacaacagagaaaagaccctcttattactgtggcaagtgacacagtcatgagttttacatataacgagaaaataatttgccgtatacttgcaaaatatgagtcacgtggctcctagaaacacacctccttctcttccgtaatgggataactttaaatatggttctaagcagcttaagcctgaaaacaaaaattccaccacggcaataaacaaaaccacttgttgcctctggggctcccggccctgcagtggaggcaaacgccctgcctttccgctccccggcgagagcctgcgaggcacccggagcggccgcccggccgcgtctgcgtcacgcggggcaggagcggcgtccccagccccggccgccgcctcacctggtagagctcctcgaggttgtacctgatggaggtgctgctctgcacggcccgcaccgcctcgtgcagcttccgccacgtgtcctgcgtgtagttgtcgggcagccgaggtctgtctgcagggcggagggagagcgggcggctcagggcgcgccgcgaagcgccccgcgtagccacccccgacccggccggcgccccggcgcccccgctcccggggcccgcacggatctcggggccttccccccaagtcgggcggggtctcgtggggtccccgcccggggcgcctggccctcgacccggccgccgcacccacctcggaagttcttgatgaccagcttcttggagccgcccgcgccccccggcttggcgggcgcggcggccagggccgcgggcttggtgaggccgttggtgcggcccacgagcgccgagaagctgcccttccgcggggcctcgtccgccatggctgggccggaaccgccgcgccccgccccgagcgccgccgcccgccgagctccgctccgcccgccccggtccgcgcggcctccgccccgtcctcctcgcgcgccccgccccgccccgcccgcgtgcccgagcccaaccgccgccgcgcccggctactcctgagggcttaggaacgcgcgccgggaatccctcctgagggatcggactccccctaagagattcggacaccccctcctggctcgagggcgcgcgccgggactcccgtcctgagggatcgggaccctcacccccggctccggggggcgcaccgagaccctgcccccagggctccgggcaccccctcctggctcggggatgcgtgccgcgggcacccctcctgaggggatcgggagccgggacaccctcctgagggccccggggcgcgcgcctcctgagggctcggcacccccaccccgggcgtgagaccacctcgagggctcaggggtgcgcgccgggacgtgccctaactcctgcaggctcgggagcgcgcggcggaggcaccttatgagagctcgggagcgcgcgccatgtccctccccctccccctcctcgggcgcgcgcgccccgaggccctggcccagccaggcgcggagggtcctccgcggcctggttttcacaaggggcagacgaagggtcagcgcagtgaaaggcagtttagccgtggggctgtcctcgccactggaccccaaacccctcagcccgggcgggcccgaacacacaatcagagccgctggcgtcccggctgagaggacggggccccggcagaaagaccccgggccccctcagcccgagcgcgtcgccgagccggtccccaggttctccctccggaaccaacctgcgcacccgcggcggggccgggggcgccaggacccagacggaccgagggccggaagtgacgccagctggcccgcttgaggcgtagggggtggcgctctccgttcggcggcgctcccatggcgcacattaccattaaccagtacctgcagcaggtgggtcctagccggggagcgcgcggcggcgtggttggccctcggcgtgttccgtgtgtcccctcctgccttggaccctcaggccttttcctttcccgcctcgccacccttcttccgttcgggtccccggcgggcagccgcgcgagccgaacagcggcggccgggactcgggaaggcggcccgagttctcccctgcagggccgccgtgggggccgggcggtgtccgtggatcgcggagtcgtcgcggtgtaagtagacgcggcggtcccaggtcgctgccctcacttgctggcacgtgtggccgcgctcccaggcggtccgaagggcctgcgggccacgccgagggcccgctgtgggcggtgctgtgtcggatggacgctgtttcccagcaggatgcgggatgaattcggggactccaggaggcgatggaggagtaagcgcgaggctgtggccgtgctgcaggccgggctcgtgcccctcgtcctcgctgtcgtttaacgcccttcactctccgagcacaatgcacacttcatatcgctcggtacatgcgtctgacagatgttgttcaacagcttgtaagtagcagaagcacagttaaaagatggacacttgtaaagattcaacgcatattctttccactaaactatgcctgtcttcagaaccagcactgtggtaacagggataggaaatatagggaatggatttttaaaatatttgaaggaaacattaccaagacgtggtgaataagaatgggtgggctgagggacacggaggagttaagaatgattcccaggcttgtaatctgggaaaaagatgaatagagtggatttggagggagaaataaagttttgggcatgttgagtttgaggtgtctgttgacaactgggtaaagatacgtacttgatagctgaaaagtctgacatgattgggcccagcagttgcttggttaattgagaaaactggttaaaacaggaatcacgaagaaatggatgtatgtttttaacttaaaacatgaaagtatacattcacttgccaattttttttttacaccacttacctcaagttctatacttgccaatcttttgatgtaagcccagggccttttctttaggctgtgtctgttttggcctaatcttagcagacttaacattttccaatatcagtttatttaaagttaaacaaggatataggcatttaagaaccaatttgatacgattatctttagaattttcttaatcttttacaatttttcccccatacctaattatttttttaacaaactcaagtgagccttttaaaaacatacaacttagcttatagagaaacaactgtttccttttgcattcatatttcattgatgagcttaaaagtacataactaccataacaggttcgggtagcaaaaatagatttgagaacaaacacatctggatatgagaacacatacaacttagctggcaaaagcttgcgatgtattagagtgaagcctacttgctgaaagtcgtcatcataccttgggcatcagctcgtgtatttcagggagggattggagagagtcatttttccaattcaagtcagttaaagtgagactgataagcgagcttctactctatgtgtgtaaactgaagtttaaacagacagatttgggttaaagatacaaacctgagactccttcgtagtcacatgatgggaaagactgagaagggaaggggtgacccagggaacaagtagagagagtagacaggggctgggcccaggatggacttctatggagatgtgcatgcctacatctccgcaaagggcagtgtagccactggggtgagacagc

SEQ ID NO: 917183 - DNA, 4001 bp, Homo sapiens
cttctgcggaaatgttaatagaatttcaggagtgcaacaacttttgctatttgccctctactccatctttcccttgagtgctcaaccctaatcctcagaggcacctcttttatttttggcttccatcccaatgaattaatgggaaggagaactgcagcaaggtcaactaacctgcatctcaaagaaaatttgagatacatgtccttgatgatcccccttccattctatacacaattctttcatttcctagggcaatgccccagatcctcctcctacttttcctgtccttcctaataccctggcaagagagaaacagtagaaatagggttgccttcagtgtgttagaacctctctcccaatgcaaaatgaaattcttccttcccctacttattgccagttctcttttgctccaatccttctcccccttttctctcactgtccttacttgggacttgatgctgctttgttataggacagccttccttttcacagttagtctttccctgaatcttaggatgtgcttcttttctgctctggggcttccagtagcgtcgttagttggctatatctcaagggattgaagaggacaggggagctggagaagctggggaagttgtggctcttttgaagaatttagaaagcctgatgggccagagatctggttcaatatctgaagaaaagtaggatccaatgtgctttgcattttttcccagtctgatatttcagcccacaggactctagtagggatttttcctcctgtatccctcattaagactcaacaactgaaaatacactgaataaaatttttgaagtaggtcttattaacaaaagtaatggtcaactaaatattaagaatcaacatttgttgggagtgatgtaaatacaaagtcatttggagactatgagtgaatgaagatggacacaaggatacaagaacaggtctcatctaagagctccttatactcttgtttcctttctcaaccacacactaacagggaaaacacactttgtctttgccttctgtggatggccttttctgagtgcagactttagtctgtccttaaaattctccccagcaaagtaatagagcagaggattgaagcaggcattggctgctgccaaggccagtgtgataaccaaagctttatgcagtctgtctttgcataaacccactttccatgtcgtcaagtggacggtcctcagtgtgtgatagggcaggaaacacaagaagaagatgatcaaggtgatgatgatggtggtcagtgccttcctgtgagaaacccgcagccccgattctgggacctccacttttaacagaacccgaatgatcagcagataacagatgctgagtgtgaaaaatggcagcaggcagcccaccaccaaggcaatatagttcatggtctgcagcttagcaattttatagagattcagctctaagcatgatgtgacactgccgttctgctcagagccactgtccaggagcattattgaggaagccatgataaggatccatatgatcccacagaggatccaggcactcctgatgctggtgacatgcagaagccgaaaggggtgaaccattgccaggaaacgcacaacactcagcacggtcaggaaataaatactgctgtacatgttgacatacaaggaataagacataatcctgcaggccaggtctccaaatatccaattggagcctctaagataatagtcagccctgaagggaagcgtgcttatgaacaggagatctgaaatggccagatttagcatgaaaacgttcacagatgtggacttcttataaggctgcaggaaaacatatatggacaacccatttcccaagactccccagaaaaatattatcagatatacaattgggaaaaattctctcttgaagttttcaattgtgcagttcctgctgttgttattgctgaaggtgccatttggttccatttctgatacggagatggatggttgcaaggacataaattttctctccatgctgggttaaaaagaaacagacacaaaaagttactttgtgaatttccctttttccttcttgcttactgattacatctctctaggttttaatgaaacagggagcaatactatcttttctttgaaagttgagttttaaaacactggttaagtctttactacatgctgcattacatttcataataaatttaaatttcctgatttttgaatgtagaatagccattaatttgtttggttgaagctgacgcttcaaacttagagaacttgtgacctactgaccctgttgacatgaataccttactatgatattgcagcctaaaactactgaatagcagatttctcatcagaaactatggaggacagaaagaaatggcacatttctcaaatgctgaaagaaaagacctgccaaactagtattctatgtccagcaaaaatatccttcaagtacaaagagaaaaatcaagactttttcagacggaaaactaagactttgctgccagcagacctatcttaaaagaatgactaggctgggtttggtggctcacgcccgtaatcccagcagtttgggaagctgaggctggcagatcacctgaggtcaggagttcaagaccagtctggccaacatggtgaaactccgtctctactaaaaatacaaaaattagcgggcccagtggcaggcacctgtcacctctgctacccgggaggctgaggcaggagaattgcctgaacctgggaggcagaagttgcaatgagccgagatcatgccattgcactccagctggggcaacaagagcgaaactccatctcaaaaaaaaaaaaaacaacaacaaaacaaaacaaaaaacaaacaaacaaagaatgactaaaggaagttctctaaacagaaaggaatttataaaagaaggaaacttagaatattagaaaataagaaagaacatggtaagccaaaatatgtgtaaatacaataggctgtccttcccttttagagtctaagttacatttaatgttttgaaacaaaaacattaatgctgcctgatgtggttttaaatggatgtagaggaattattgagatagttatattataaatgagggaaggcaaagagacataagaggaaataagaagttttctatacttcacttgaactggtagaatgatgatgctaatagactatcataagatatatatatatgtatatctttatatacatatatattatatatatagagagaaatacctagagcttccactaaaatgatatacaaagggatacactcaaaaacattacagataaataaaaatggaattctaaaaagtgttcagataaccaacaacaaggcaggaaaaagaaaacagataataaaaacagaaaaaaaataaaatggcagacatccctcattcatcaataattacattaaatataagtagtctaaatataccaattaaaagatagaggaatggaatatattttttaaatgaccgaattatgtaccgcctataacaaacacttcaaatagcagtattggctggttgaaagtaaaaggatggaaaaatgcatgttattcaaatcaaaggaaataaggaatggctctttcagtattaactaaaatggacttcaaagcaaatgacattgccagagacagtgagggacactatataaaaataacagggtttaaccactaagaagacgtaccaattctaaatgggtatgcgccaaacaacagagttgcaaaactgaagcaaaactgataaaactgaaaggagagatatttagtgacttcaaggacctctctcagcaattgatgaagcaaatagacaaaaactcagcaaaggtatagaaaaactaaaaacaccatcaaccaacaggatcaaattgacatgtataaaacacttcacccaacaaaagcagaatacttatgcttttatgtgttcacaaaacttataccaagataaaccacatcctgggacataaaacaaacctcgatagatttcaaataattgaaataat

SEQ ID NO: 917184 - DNA, 4001 bp, Homo sapiens
cacacgcacacatgcgcgaacacacagacccctcccctcggctggcttcccctccgggcttcggagctcaagtccccggagcccatcccccgggatggacccggtctctcagcttcgcgggtcatttccctcccgacctcaaagtgccctcctcgggtgctggtccgctccctcgcctttcccagcggggccctcacccggagcgcgtctccccgctccccgagccctgcggagcaggtcacgacctccccccgcccccgggacaccgctcggcgccacagatcagccctgtcggtgccgggaggctggccgtggaacccaggtcctggggagcgcacgaacgcggacagcagcgctgagaggggtctccaggcgcccgcgcgcccggggcagggggctgtggctccagcaaaggcgccgtcctcctccctctcgtcccctccgccccgaggctcggctttcccacatcccacagcagcccatccccgggacccagagggcaaggggaggaccgggccgaagagcgaggtctgggcagggtgaggtgccaacttctcagggggtcgggcgcggctggcgagccccgagcagggagaggagagggccgcgctcgccggggcgcgcggctcgcgggcgcgcagagcgagcggcgccgggaaaggagcgagggcaggcgagcaggctggtgggaaggggcgcgggcggcgggggctatcccccccgactcaccttgcgttggtgcagtcattgtagagggtctcgaagtccttcctggagatgagtttgcagcggttcactcctggctggatggcgcccagtcccctcaggatgcgaacttgttccacattgcacaccaccggcgtgatctccagccgcttcagcttggtgtagaccgtatgcaagccccccaccaagtgcttcaggaacaggtcgaaagcctggggcaggcagatcagctcgcagccctccaccgtgaaggaagccactttggcccccctcagatccaccattttgcactcattattctgaggggtgttttccactggggacggggttgagtacacgggtttcccggggagggggccgcagctgctgctgctactgctgctgctgctactactgctgctgctgctgctgctgctactgctgctgctgctgctgccggtgctggcgttgatgggggtgctggaagcgacgccgccgccagcgctgatgccgccgccgccgccgccgctgccgttgctcgcggccgccaggttggggttgcagttgctgccaccgccgccgccgccaccgccgcctccgttgccgctgctgccgccgccgcctccgctgccgccgccgccgccgccgccgccggtagaggtgactgtggccgccgccgccgccgccgaagcgatgggctccgggcggaacagagttggcccagaggacgccgggggtccgatggaaggagccggagacgaagtcgccgaagaggtggaggtggtggtgccagaggaggaagcagacgtggagattgggggttgaggggggaccagctgggtcggagggatcaaagccgccggcactgccatggtcacatataaggggaaacagacggaggagaagcgagaggaaaagttgccacacacccccgggaggggaaggggaaaaaaggggggagaaggagcgaggggggcaacaacaactccgggagagaacgagaaggagaaagggagagaagggggagaaaaggaggtgaaggtaataaagagcgagcgcaagaggggcgagcacgagaggcgctctggagaggaacgcacaaaagtgtcccgcaagtcgaaatgcgagtcctctccgggggctgggatcgagggctggtttgggggtgggggtggggcggggagggtcggctgttgttgtgtgggtctcgctctagcacaaagttaaggatgaaggtgaaaaggaggaggtttgaaggacttgggctctccctggcaagtacattgatcaaagattgagaggggaatgacagagagaaaatgagctgaaaagtgcaggctgccggctggacgagttgttgttgtcacacggtgcagaggggaggagctccggaaacttgaaataccctttgaagccgcaaaaacctcactcactagtattaacccaaattatccaaccaggaactcggagcagagactccgagagcgcgagacactggagagggagcgtgcgaggaaaggaggaggggagggggaggatacggaaagaaactgtgggagggacggagaggaaaagccggggacacagaagtggcgatcggaaaaggagagggagatcatctacttctcttctactactaccgttagattgcatgtctcacattccatttcgtccgcggggactggtaattttttccaaagcttctaaacaatcgcccgccaacttaaagaggagcctgagcgcgccgagctctctccttccaggatttaggatccatctccacgcgttttggcaatgagctagaaacgaaaacacagcccccacttcacgattattcagaaattattttgaggaaaattcacatgtaagcaaagcgtaatgttcttttgcatctgattgtttatttctctactaaattatttatttatataaagatagtgaaaattccaggacagttttcaagtggtgagaagaaagtcagtccgaaatcgcttaagaataatggaaagctctgtattcaattccatatttcctaataggttgtggaaagaaatgcttgccttgatgtggatgatttagaataacttcactgtctccccaaaagccagtcagaaatacctgttaaacctagagctatcaaggagataaggtatccttgaagatttagaaagtggaaaaagggttttcttacccaaaactctataattaattcacctgtcttacacagtaaccaactatcctcatgtcctttaagacccaaagccaattgctaatgtgttttttggacaacacaatagttttttttttttttttttcatgtttgaaaagtgctgctgtagttttggaaagtccttttcaatttgtcagtaaatatatgttttgtaaataatgggaagaacaaaaacaaagctcactagttgacttgtaaagacttgggtagctgtgcttaaaacaacatgaggctgagtttagactgactctattcctcctttccttcctctttccttttcttttcttttctaacttgttgcactgaagtatttattcaaggatttttgactaacatatcatttgaatatgggtcaaatctatttgctgctcatgtctccaagtatcttcaattagttagcctttgaaccggtccacacatgttcagtaagttcataagatatgaagcaatgctttagcatttgacagatttttaaaataaactgttagtagcaggttcacagggttgggaaattttataataaaatttttgccattctggtgttgaaatgatcacatttctctatatcattttaagcctttgaactctgtgaatcgcagtgtcaaatagtgcaggaactgtctaccgaaaaatagaaatatgacactatggactaattagtgtatgattatactaaaatttttgggacatagcagttaaatcaggaggctttcctgggagataagaattcagaaaatcgattgttgcagaaaagtccatgaacttctgcaaggacaactaaagtttaaacagttgtttggcctggttaaccaatgtattgtaatacattcagaaataatttttatttatgtttcagtcttcaaatttgttatgggtaaaagtaggaattcaatatatatcacatacatcaaaacacttccttaagtatttttgcatgttttagaaaatattacttttttaagacataccaaactactattataatgaggggaggggaggaagaaagtattaagccctgaaaagctaattttattttcgaattctatgcctaactttaataaatttt

SEQ ID NO: 917185 - DNA, 4001 bp, Homo sapiens
cgaccgggaggtggagagtgacctcggttatcctggtgggtccaaggtagtcacaggcatctttataatcagtgaaggtctccctgctgtgcttagagagggggatgctggaagaagagtggtcagagaagcaacattgctgactctaaagacagagggcaggccacgagccaaggcatgcaggaggcctccagaagctggggcaggcaagagaatggactcagccctggagcctccagaaggcatgcagccctgcccattccttgcttttagccaggtaagatgtctgtcagcctgatgagaactatgaaataatgaatgtgcttgtttttttcaccactaaatttgtgcttatttgttatagcagtgatagaaaactaagacaaggctatatcttggcatgtcagattttaagttatctgctatagtgtagaaaagcccagagaaggagctgcaatttgtctctttgaaaaaaaaaaaaaaaaaaggatcaccttctaggggattaaacattaatgggctgggtgttgtggctgacacctgtaatcctagcacttggggaggccgaggcgctgctgcactccagcctgggcaacatagtgagaccctgtctccagaaaaaaaaaaaaaaaagaaaaagaattaaacgttgacagattattaagtgaggcactgtgtgagacctagcttgggtttgcgcctatagatatttaaaagttgatccaggttttcacttgaaagcagaactactgccttaaattcccacttcacaaaaataaatcatggattgagggaaaaatttacttgtttgctttataaaaagagatatcgatctcttcataagttatatatgttttacaaggttgcactgtttgaactgtaagtgtgaatggttgctaacactccagaaaccaagaggtacattttaactggaaaaattttcttcctgtatcttacaaattaattgaagtttgtctacgcttgaaaatatgtcaaaagtattatgtagctttaccacagttttatctaacttctagaagaatttaaattcatataaagataaagagtaacataccaatagagtttagagagttttcagatttgctcagaagaatgctcctttgaaaacctatgaagtagattttacccaatgtatatctggatctaaaaattaaagaaaatatcagtcgtgttcagattcctttataccctgcagaagagagaaagaataagcaacatcaatggagcatataacatgtatggtttagcactttcatatttttaatcttaactattcagccaaatacgtcttatttttttatttttatagatgaagatattgaggtttgcattttttttttataaattgctcagtcatacagttggtaaatagctgacaggagagttcactccaggtcttactggctctcaaacctttgctttttaaaaatctccaaactagcgcctctcccttttaactgcaaaataagcacaaagttatcccagttctacacagtgctaaacaaattcctgtgagcaaacaattagcacaggcagatggagtgagggggaggtggtttataacaatggaaagctgtctgcctgctgtggattaaagattcaaactctttgatcctcctcccagggataggtgagggcctatgtctcctcctcattaacatgagtgatccttggctaggttctcctttgactgacagaatatgggagaaagtaaggctgaaccatatactgggctcaggcttccaaccctgacatgttccacttcctgtctccaggaacattcaccctgggagctctgtgctgccatgcaaatgtcacattgcactgaggccgccatgctgtaaaaaaccccaagctacctacctgaaaagctggagagaatcagcacccatcagcttttccagcattttgggtcctcccagctaaatcatcggcattgtgaagcagagatgagacctcctgccatgccctttccaaatcctggaccaacagaatcatcatatacactagtaagcttttactttaagccactaatttggggtgtagctcttttgcagcaaaagatcatcagaacactgccatgcaggagctgataaacttgctcactgttatgtatgtatccaatgactactcacacacacattacttgcttcactctactttctggctttccattcagcaaattttaagaaatgaaaatgttattcgtgggaaattaactcaagatcaatattgttgtagttaatctctttgtaaatggtaaaatattaaattattgtgagtcatttttatttaaagaagtttggttctttaaatgaaagaagtttgggtcttttgtggatactctgcatatagacattctagacatgaaagaatgttgaagacaaagaatgttgaagaaatatagacatgaaagactgttgaagtttggttttttgtggatactctgcatatagacattctagactggagtgatacatcttgttcaggtttctatgtttttaaaatgataacttgacacgcctaccaatgccaatttttaggatatatatttgtatatctgtgtgaactaaggaaaattcaggaatgattaaacctacatattttgccaggagagactggataatgtaagtctttatatttttcacaacttcaagtttatagcatccaaatgagcaattgctgacatacctaggggatttctctgcaggttcaagtctgatctggcctgagggcaacactcttactgagtgtgttcctaggcactccttggcagttggctccaggccacaataaagagccctgatgattctctgagcaggcccaacttccattcacattcatgggaatatgaggatgacttgtgatcttcaggacttagatagactctttcagttggtgtagggtaagctcagctcatctctagagacttcccacagtggagctcatgcatgactctgtgcaggtggcacaggacagccagagacaggcacctaaggagtgcactaccagcaggtggactctccactgagggaggtagacaagggagaaagccaggtgtccacatggagcaggccttactcagggagactgagattttgctctacacatcataaaacgtggaggtcattaatggaatttttcacaggacatgactgccatagccatgatagggtccctggctaatctttcaattatgatagcatcataagataattttgaatatgaggagagaagaataactctagaactgcaatatccaatatggtaacccctagcaacctaaggctacttaaactaattaaaattaaaactttagttcctcagtgccactagccatatttcaagtactcaataaccacacacacttggctaccatgttggacagcactgacatagaccatttccattactgcagaaagtcctcctatttgacagtccacctctggaaccaatccggagtctttagggacctaaaagactgaggtgctaaatctcagagcagtactctgcttaatgcttagttaaaagacttgctaatctatatagttgatctagagaactttaaaggcagctagttcgtagcaactatgttgctggaccttgaaactgtatgtcaggaacttggtgttctagtggtgacttctcttttatctaccatgttcacacttttcctaccactcatttatccattcagaaagtatttcagaagtccctatgatttaccaggtgctatttcagacactgaggcactgtggggaacaaaacaaacaaagtctcctttctcagggatctcacattccatgtggtgatgcagactgtaaaaattcacacacagaagatactttcatacagtaggaagttttatgaagaatatttcaaaaggggtgtggggtgggagaggttgatgttcaggtgtttgcttgagaatgaactgttcatacaaagaatcaataattcatttgttccacaaatattta

SEQ ID NO: 917186 - DNA, 4001 bp, Homo sapiens
gcttatttgttatagcagtgatagaaaactaagacaaggctatatcttggcatgtcagattttaagttatctgctatagtgtagaaaagcccagagaaggagctgcaatttgtctctttgaaaaaaaaaaaaaaaaaaggatcaccttctaggggattaaacattaatgggctgggtgttgtggctgacacctgtaatcctagcacttggggaggccgaggcgctgctgcactccagcctgggcaacatagtgagaccctgtctccagaaaaaaaaaaaaaaaagaaaaagaattaaacgttgacagattattaagtgaggcactgtgtgagacctagcttgggtttgcgcctatagatatttaaaagttgatccaggttttcacttgaaagcagaactactgccttaaattcccacttcacaaaaataaatcatggattgagggaaaaatttacttgtttgctttataaaaagagatatcgatctcttcataagttatatatgttttacaaggttgcactgtttgaactgtaagtgtgaatggttgctaacactccagaaaccaagaggtacattttaactggaaaaattttcttcctgtatcttacaaattaattgaagtttgtctacgcttgaaaatatgtcaaaagtattatgtagctttaccacagttttatctaacttctagaagaatttaaattcatataaagataaagagtaacataccaatagagtttagagagttttcagatttgctcagaagaatgctcctttgaaaacctatgaagtagattttacccaatgtatatctggatctaaaaattaaagaaaatatcagtcgtgttcagattcctttataccctgcagaagagagaaagaataagcaacatcaatggagcatataacatgtatggtttagcactttcatatttttaatcttaactattcagccaaatacgtcttatttttttatttttatagatgaagatattgaggtttgcattttttttttataaattgctcagtcatacagttggtaaatagctgacaggagagttcactccaggtcttactggctctcaaacctttgctttttaaaaatctccaaactagcgcctctcccttttaactgcaaaataagcacaaagttatcccagttctacacagtgctaaacaaattcctgtgagcaaacaattagcacaggcagatggagtgagggggaggtggtttataacaatggaaagctgtctgcctgctgtggattaaagattcaaactctttgatcctcctcccagggataggtgagggcctatgtctcctcctcattaacatgagtgatccttggctaggttctcctttgactgacagaatatgggagaaagtaaggctgaaccatatactgggctcaggcttccaaccctgacatgttccacttcctgtctccaggaacattcaccctgggagctctgtgctgccatgcaaatgtcacattgcactgaggccgccatgctgtaaaaaaccccaagctacctacctgaaaagctggagagaatcagcacccatcagcttttccagcattttgggtcctcccagctaaatcatcggcattgtgaagcagagatgagacctcctgccatgccctttccaaatcctggaccaacagaatcatcatatacactagtaagcttttactttaagccactaatttggggtgtagctcttttgcagcaaaagatcatcagaacactgccatgcaggagctgataaacttgctcactgttatgtatgtatccaatgactactcacacacacattacttgcttcactctactttctggctttccattcagcaaattttaagaaatgaaaatgttattcgtgggaaattaactcaagatcaatattgttgtagttaatctctttgtaaatggtaaaatattaaattattgtgagtcatttttatttaaagaagtttggttctttaaatgaaagaagtttgggtcttttgtggatactctgcatatagacattctagacatgaaagaatgttgaagacaaagaatgttgaagaaatatagacatgaaagactgttgaagtttggttttttgtggatactctgcatatagacattctagactggagtgatacatcttgttcaggtttctatgtttttaaaatgataacttgacacgcctaccaatgccaatttttaggatatatatttgtatatctgtgtgaactaaggaaaattcaggaatgattaaacctacatattttgccaggagagactggataatgtaagtctttatatttttcacaacttcaagtttatagcatccaaatgagcaattgctgacatacctaggggatttctctgcaggttcaagtctgatctggcctgagggcaacactcttactgagtgtgttcctaggcactccttggcagttggctccaggccacaataaagagccctgatgattctctgagcaggcccaacttccattcacattcatgggaatatgaggatgacttgtgatcttcaggacttagatagactctttcagttggtgtagggtaagctcagctcatctctagagacttcccacagtggagctcatgcatgactctgtgcaggtggcacaggacagccagagacaggcacctaaggagtgcactaccagcaggtggactctccactgagggaggtagacaagggagaaagccaggtgtccacatggagcaggccttactcagggagactgagattttgctctacacatcataaaacgtggaggtcattaatggaatttttcacaggacatgactgccatagccatgatagggtccctggctaatctttcaattatgatagcatcataagataattttgaatatgaggagagaagaataactctagaactgcaatatccaatatggtaacccctagcaacctaaggctacttaaactaattaaaattaaaactttagttcctcagtgccactagccatatttcaagtactcaataaccacacacacttggctaccatgttggacagcactgacatagaccatttccattactgcagaaagtcctcctatttgacagtccacctctggaaccaatccggagtctttagggacctaaaagactgaggtgctaaatctcagagcagtactctgcttaatgcttagttaaaagacttgctaatctatatagttgatctagagaactttaaaggcagctagttcgtagcaactatgttgctggaccttgaaactgtatgtcaggaacttggtgttctagtggtgacttctcttttatctaccatgttcacacttttcctaccactcatttatccattcagaaagtatttcagaagtccctatgatttaccaggtgctatttcagacactgaggcactgtggggaacaaaacaaacaaagtctcctttctcagggatctcacattccatgtggtgatgcagactgtaaaaattcacacacagaagatactttcatacagtaggaagttttatgaagaatatttcaaaaggggtgtggggtgggagaggttgatgttcaggtgtttgcttgagaatgaactgttcatacaaagaatcaataattcatttgttccacaaatatttattgagtacctgttattagcaggctactttattaggttgccagagcagggttttcttagcacaattaaaacacaataacatttgttagaaattcaaagacccatgtccactcttgcataatgaatcagagtctcgaggttatggtccagagactggtgtatttaaaaatcactgaagtaattttaaggtatagccagaatagagaggacaccggcattcttcctgaaactcaacacactagacaatgagaaatcattaaaatgaagtaaatattttgattgagattgttttggcttcaaaattaataatagcttggagaggaaagaaggtaaattataaaagacaattaa

SEQ ID NO: 917187 - DNA, 4001 bp, Homo sapiens
tgacaggataagaacagtagtctctccatcctgaaagaagcactaaccctcaccctcttccttagggtggagaagctaacagtttccagtaactttttcactgtggtctccaagctcagccaaattctccataaatgcaagtagtgatgaaaaggtgctcaatgtgggtttcatccacaaaagcacgtgtcataggttcccatcccctacctcatggaccctctgctgctctggggccccatccataccataagcaattttccaccagggccctcccctccattcacagcacttcttctttcccttaatggtgatatctaatcaaactcatcacaactaagaaggcttacaaactagtgctaataaagcctgtgcattcagaacagaaagaggagagtatgtaaaagtgaagtagcaaaggtgcattcttctcagagttaagatttggacaaggttacagagaagctaaaagccctgagttctagctaaaccaaagcaataagcaacccctcattggtcacctcctgttctagcttagatatcgcctagagacgagcagcacgatttgctggcacctgtacctgtctgcaccaaggctgagacaggtctgaaacaagcagcttgcttatttccttaccctctgcttccgcaggcttcctgggctggtgggtgatgggcttggcgacttgcctgagcgcggagtagagagctgactaccaggggttccattaactagaaatacaaagaatcacacacagagaaaaatggcacgttaaataattttcatgacaaatcatcttctgcaagaaataaacaattatatagagagccatctactagaactctagacacccttccatatgtacactgaggaacagctttggggaagtaaccttcagagagtcacagttttgtaaatcctgtgtttcatagagcagcaggttacagaattattttttaagatgtacctttcacaactttcctgatgaatgtattaatgatgtctttaactgtgccagcagggactttaggaatgtatggtcctgagacattttcaatgagattaatccttaactcttcagtttagctacctagtactacccagcaggaataaatataagcacagatcaccagtgacattccagtgacctgataaatagatcactgtatttgtataattaataactcacttctagaaaaatgtcctgcatccacctgtgtcttgtccatccccctaggctgattgtgatggacctgccttgaacaggacagtcattggccacagacgctgagaaactcctcacagtttctctttgctgcctttgaaaagaaaaactgctaacaagttcaaatcactggaattctacccagttctcaagagttttatgcacattttcactaaactgaactaaagccacagaactcaagtaagccattcttttctctaagtaacatcatctctaacaacagatgaaacacttaaagacatggttttataaagatgtatcaggtcacctctattttacctgtaaaaatggcattacagccccacagtcagtgaagtagaattaaccaggagacacatagattcttgagggtgcaaaataaatgctttccacaagggagagcagcaatgcatttcacttaccttctatgagttctaacatggacacagtcttagtgttggacctgaataccaacggcggaatcccgtctcagcactaagccaagcacccgcggaaatgggaatcggttggatgagtttaaggatggctaaggctgctcccagagcaggctgaatgagatgcaggattcatcagcagatgccttttctgcgtaaagctgacgtctcccaagcagcagtgggaggtgcaggttctgtcttaggctacatcaaaggtgtcaattaagcctcttgccaacagcaacccccatcccgacaccactcccttccggaagccccagtgctgtcagtactttgcactgaatcataatgaagtggccctgggggcaagagatccagtgactcatctgaaaatcgaaatgacaataactcttctaaagcctggtgactaccaggtaatcaggaaaccctcacacaattcagtggcaaggtaggatgtttattgatttttcgcacttgatgttttcccaaaaacttacaaccctggaaagtgggaagctccttgttttgtcatctcctccaaagaccttaaaaaatgtcacataccccatgctgcattaatttgtagttttgcttttgaaatgtatttggcaactcctaaaaatagaaacctaaaaagctatgaatttttgtttgtttgtttgcagagagagtgaactggaaagctgagaatgctttaatttgcttgcatgccaccatcctgtctttgctgagtgaacttcacgctcggacctcatcacattagacttcctcagccagtagcctctaaggaaggggctcagaaatagaaaaggattaaagacaagggcagaagcagagcctataactagtaagaaagggatgccttactggttggctggagaacacattttgtgaatataatattttctttacccacccgcattctactgcacatctttatgtcatacgtaaaggctacatagattggagggaaaaaatgagcaaatagggaagcaaacacagtgttaacacttttcactttgagactctgatcttatccagctaatggaaaatgaagaaaaagagacaaagggctcacaagaaaacagtctcaggaataccttgctttaaaaagcaaaacaaaacaataaaagcctgtaagtatttagtaagtatccattgtatgtgtatttttaaggcattttttgaaagacatttatttttattgaaggcatttttatgcaccagtcaatgcacttagaccttttatatatgaacatatatgcatctgtgtgcatcagtatgtatatatattacatcatttaactcacagaataactctataagattggcagcatcatttccacccattttacaggtgaggaaattgaggcttacagatgatgagtcatttcacaagcaaatatggagcagagcctaaaatctaacctaggcagttcaaaacctgcagtcttactactaccttgccttactgtgccagccctttaacctacaggtaaaccagagaactaagctagaattacaataaagtattttgagaggggaagtgaggcaggatagttagtcaaggaagtgaccatgttctcgggatgcagcattggtggtgacctcacagccaacacaataagccttggcattcacatcataaatgagctcatttaagcaaagctatcttcaggagggactgtcccttctctagggcatgtgcattttgattttaattgtcatcaaactgaccctttgctcatttatagtaaaaaacacacccctgggtggagatttaagatgctaatgagacatgtgatatatgaacacaaacatacagctacagtgcatgtgcacccagaggaccacccagaacatgcttactagcaacacctcttcccaactccttatgaattatcatgtaagactcccacaaagggggtttctctagcaataatcaacactgcctcacccttgcaagcagcccaccctgaactctctctctcagggtatactgtctattctgcatctaactttcaaaatactcttttccttttgcagtgaatgactctctgccgcatctcctttgctgtgtgtcttttgtttaaattcttttaaactaagaagacaagaaccgaggtatcacaacagccattaacagaagtattgggtgttgcaattggaatcctaataaccaacagtgagagttggcctacgcccttcacagagggcagtggatacagaagttagcctggtgaagcaaggggggcacaatgaaggaaaagtgtcctcagcccagggatctcctgtttcagggctggatacgagaaaggaggccagtgtggtacac

SEQ ID NO: 917188 - DNA, 4001 bp, Homo sapiens
acaggttcatccagggcagggctacaccttttacttcccttccctgaatctgtccaaaagtgggcaatggtgtcgacaaaagaaaccatactcagagtgaaatcattttcaaggctacagctacctctaaatggagcacactccacaccctagtgtgctggtaattattcgtggcaacaaaataggtgttctttccctcaccttggcttagtcatacatttgaaccatgcatgagcttctgaagatccactggccttccacaggtttacactttctgcacaggaaggctgcgagaacacacagctcaatgttcagagaccataggtggccaagggcctgagtgcacatgtgcagtggcaccaggatggtaaccacagcacctcagccacagcgaccacagacactggaggtaagaagggccactggctctcatcagagcttttcctataaatcctgccatttcaagaaaccaacatccctgattgttctcggtgggatttctcaccattttgaggaatctatgttcatccttctctagatgagcacatggttcttgtttcagaaatttacacacatatataccaagaaaaaaatggcataaatgctaccacatctaaatagatgctggacctggaagtcccaaggcatattttaaccgtgggattaggattcaggtggactggcatgaaataaaacgcacacataccttccaggcccgtgcaccaccacggacgtagacatcacagggtgtgtgcatatcttttataattttcctctatatgacctctcttaaaaaatcccttctgacctgcatccatgtgacatttcatacttaaaacgctgtcctactttcctttcccactgaaaggcaatatatttaggaacagtcataaaatgtattcacggaacagcctgcagtgtggtcgctgaacgtgtgtgcaccgtgcctggacacactcacaggtgcagcagagagggagccggtttgaatgaaacctttcatcttctctctcaccgaccaagcatctccttgccaaatccaggagcaattccgcgcaaacctggttttcaaaagcagcctcttttgtggggcattgcggggctgtgcgtgcgctcccactaggaggaaaaaatgccatttcctctccgcaagcttttagcactgcaggtactaatttgaacatgaggcagcctcgctgtccctgaaggaacttgagaccctgcaaacgtacttgcaacacccacgctgcagccaccaccacgcacgaatcgaccccatccacaagcacacatcactggcccgggcacacggaaaagcacacacacaataagaggccgggcccggccactccttccttggttcccgctccgcagccagttctgacaatgacaagcacctctcccagctcctccgccctggctctccatctccactaacaacgcgaaaagcctgggagggcccgctcgcctgactccaggtttaaagccccatggcaccaaacaaaagaggcaggtgccagcagccccggggccgcccgcacgcaacgcccccgggtcgggccaggctggccagggcagggcggccgcctttcgaggaactgcgggcggggcggcggggccaagctgagcgcccgccctgccctcggcgccccgcggctgcgggcggagcgggctctgcggagtcccccggccgccctccccgcagctcccgtccccagggaaggcaaaccacgcaccggtccgcggagagacgccgccgggggtctttgtggccgcgctgggggccgcctcctggtgctgtcctcgccgggctgggcgcggccggggctgcggggctgcagggctggggggcggcggcggggccgggctgggcggcagcagctgctggagcgcggcgcctcggttgcggccactagtgcagggatgtgcctcggcccgtcctcattgaaatgcggcgcttcgcacagcctcactccagcctctctctccagaggagggcggcggcggcggcggcggcgggcgcgctcccttttcttgtctcactcgctcacacgccctcccgtctccctcctcctcctcctcctccgcgtgcgcgccccgtcgcccccgcccttcttggcagggcgcacccaccacggctgcgccccaggtcctcctccctcccagcgccctcttcccaccgcagcaacctcggtgcatctggcttgactacacccctaaacctccctagtccccacaagtagtctttgggagatgggggcagatcagatggtggaagagaacgtggacagggctgagtctgagccaggaagtgtgcaaggcacagaggtgatatggccgagagatgaggcccccaccgtcgggggagggaaggaggtacccacactcataccttttgatgtgacctcacggtctgacacctttcccagggtatggaagccagtggatcaccttctcatcctttttgcccgggatgcacccacgcagtgcctcttcggatgaccaaccctcccaagctatgcactctggtgccccccacattgggaagagctggatctgttcatggatcccacccatcatctccacttaaccccaagacatgagtcactcttggaatagtgacctctgcttagagtcaaatatgttccaaagggcccttgagaactgaagggccaggtttcactgctggacactttgtggctgccaaggctgggtctgcggtggaaagccccatgagctcatgcgagcctctcctcccagagggggaatgttctcctagcccaggctgttcacagcttcctccagtctttgcacaaaagtccagggagtgggagcagctcccagatttcggtgaaatcttagactggctcagtacgcagcctgaattttgatccagttaatctgactttcaatcctgtcgtccacaacctgtgtttgtcccaaatacacatgagtatacaaaatacacataagtatttttctctcttcctgagcctacacctttcaatggaacattaaaattttatttttctcttgcccattgatcccagttatgtgtttgactacttattattaaaaagttctattctgaaatactttccaagtatgatgtaaatgttaaataattaccatttgttttaaaacacagctcaaatgagatccatgctacatattccacaagtgatgcgatatttatttttgaactatttaatagcccagagatgagagtacagtgaactcaccaaattaactaaatgcaaagtagtaagcctattctttcacattctgaggcaaaatgagagccataggggtaaattaagagaaaggaagaagccaagtacatcttctggagaacagaaatcagagcttctttttatcttgccaatgacaaatgccaagtgatttcttccaaaatgctaagccaagaaataaatttcatctcttaacccctatggatattctactagggtcatttcttaagagctttaagtaactcaccatcatcttacctcttcctagctgttgtacctagcacacacagataatgtgttcagagaatcaccttggtgtttgactctctcagtagcaaagtgctctcactagaaatagttgggcatcattagctctttaaggaaaccagggggcaactgataattaagtagatgaagacattaaatagtatacattggccctacagtatggtcatatcatttagtccaggacagcaggctggtactaaagttcattccagggcagcttaagcatttggcaaatctaatttatattcaacaataattccttattgaaatgaaatctaactagaaaactcctaattcaagtaattttcaaaaacgaatgctacttcctttatattactaagatattgatcaaagaagtgaatggaactaatacatcctttcccccaggatcatctgaaagtattggagatctcattctagctcccaaaagcaaatgctatttaagctgtaccccaactaccg

SEQ ID NO: 917189 - DNA, 4001 bp, Homo sapiens
tcctacaccaacatcacaggcctttgtatgttcccttagtaatacctattcaaccccttatgaagctcaatgacctatatcctcctatgttccagcatcctatgagaagagaagtaaaaagtatttttaaaaggaaaaagtcttctgcaaccacccagcctacaacagtgtccaagggctttcctgaggttgccacttgtgttttttgtatttcagtggccccctgccaggctttgagtgtttattcccgaagggcatatggctgctggaaactggaggtgggaaagattgaagaggatttgaaaaagccccaaagagctagaggaatgagaaatgcacagagatgtcaaagcaacaggtaatgagagagaccagagtctaaaggaaggacactgagcaaattttgtgatgtccggttcaagtccagagaagagtgacaaaaagccattgttatctaataacaaccccccgcccgccccccccacccccagctcctcgagaaagctctgtcttgccacgtctcgacaattttgtcaaagttacaacctggtcataagctttaatgagaaacatgcaccctgctgaggtcaggagttcgggaccagcttggccaacatggtgaaaccccgtctcgaaatacaaaaattagccaggcatgatggcgggtgcctgtaatcccagctacttgggaggctgaggcaggagaatcacttgaacccgggagatggaggttgcagtgagctgagatagcaccattgcactccagccacggtgacaaagcgagactccatctccaaaaaaaagagagagagagagatctgttcaaatcatgagaaatgctgagaccagaacacctgcctttgactcctgtcttccgaatgccaagcttcacccatcccttttcaacaagtgcaaacccatttcaggagagggcaccgaatccatcttgaaaggacttgctccgagtttcaaagctgacgcttttaagctcttaaattccccttccaacaaacaagccaatagtatgttggcatgcattcatataagcaggcttggcccacgccatatttatttagtcttcataactagatgtactagagggtgtgaagaataaaccagcacatcagccttattgaatatgcttccgaccaaaaccatcattggtttgcctttcaaagcctaatctaagagtctctgtcaagagtctcatctcttccttagaaggagctctttccccagctctggccctccccaccaagcttggagcatgggcctcacctgtgcacttgcaggtccggtggaagaattttcttggccacagctcacggtcatcctggtttcgtaggatgtagggaccactccagggccttgtgtcggctcgcacctctgtgcactgcccccggccttgctgagagccacagacattggccgactctgcacccaggcgtgggcagcactccttgttcactaggctgtccaccgtcatgcagactcgggggaactgaccctgggctcctggcaggattttgcagcccaagcaactgagcagaaacccccaccaaagggggctcatggctttataattgggagagctctctctctctcttactttccttgtctctgtcgtacttttctccttatcttctactctttcagtcttttcttttcagtattttttatttttctttgctttctattcctttcttcttaaaaaaatacccacaagaatcacagaggttacatgtgtgcacatgtgtacatgaacgtgcacacacaattttatgtgattcaaacaactaacagacttaatttccttagaagcgcctctaacaaccaaatttaatgagggtagcgcttctcaccatcttcccccgttaagtcaggctttgtctaattgagttaatttacagagcacccagtcatactacttattatgctggtatttctaaaccctctccctccctccttagctcttgactttaattgccttgaactcagttcaaaagccaaacaccgtgctgcttttattctctctggcttgccaagccacggggccttgggggcttgtgtaagggctgggagaagccttcattagggggattagtattacagaaaccctcatcattagcacatgacccaaagtgcacaataaaggagatcacttctggctttatttcaggagggcaaaaccatcttctttatctgggctcatgtgctccagccaaacttgtgacctcagacatcctggggagtcagtagatgcagtgagctcttcgtcaaagaccctttacacagaagctcacattgccaactacaatgcactcatggctgctttctgacatgtgtgcaaaaaagaccacaacagggggtcatgcaacttcaaaaataaagaaacatttatgtagaaccagggtacaaggaattgctttgttccacaattgggaatcctcttccctccaaataataacttactcttctcctattcagcacatctacgcagcaatttttttttaattacatgaagtagcatgccaccagaaactcacaattgtcattatctgattgtatggaaggcactggaaccatttggaatgaaggcttgcaagcaaatctttttgattagactaaagtgaagcatgactgagcttcagtctagaaagcaatgcctcctggtgcttctggagaatggtcaggtcagcaatggtggccacctgtcagaacatccatttattttttcacagtggaaacaggactgtcttggtaactgtttcacagtggaaacaggacttagtgccacaaggatgcgaaacggcttcagctagtttctaagaatatacttgaatgtaaagacacatattgttatgtttcaaagcaaattcctaaggtgaaacaattatataggtattcccaccccctgtacctctgtgccaccccttgatgttaagttgttgtgactaattaaatggcaattcttatgtctgactctacaccaatatcagcctgtaccacagccctactgaatcagaatctctgaggatgttccagacaccaaccaacctttgttagaaaacatctaggcaattctaatgctcagccagagttgagaatcactgaatcagaatacagcagagctccaaaggaaatattgcatcagcatcagctaaaagagaccatgtgcaatagtttcctgaggcttctgtaacaaatgaccacaaactggatgactgaaaacaacagaaatctattttctcactgttctgaaggccagaagtctaaaatgaaggtgttggcaggactggcgtgtgtcagccaggcggctgcactctccctggagactctaggctagaatcctccttgccttttcaagcttctggcagctgctgtcaatccttggcttgaaaccgcagctccaatgtctgccacagccccatggccttctccccatctgtctgtgtttttcctccatgtctgtttcttataaggacacttattggatgtagagcccactcagataatccaggatgatctcatctcaagattcttcactcaattacatctgcaaagaagactcttttttccagacaaagtcacattcacaggttctgagacatggacatatcttttggggaagtcaccattcaacctaacacatcatgggtgggaagaaacttggggttctaaaatcgcaaaatctcaggggtttttgaaacctttattttggagctcattcattcattccatgtatatttattgactgccacttcatgccagcattgtgacacttgggaattttattccaggtttttgtgaagccttggggctccataaatgttaagataaaatttcttggatgttaaaactgatggagtcaataattcttatgtcagaatgccccaggtcgaagtcctaggatctcttttctttcatttccacacttgctagataactcagctagtctgaggccttaaatgcaggctatcatgactttccaaaattacaac

SEQ ID NO: 917190 - DNA, 4001 bp, Homo sapiens
cacccagacaggactgaacccaggtcaatctaatcaaggtggatacactggaactagggccgcccttcaagctcacaaccttcactgaggcttaccacatcatgcaaattaaattattaaggccagcttttaaagtgtgtacatggggtggggggaaggcattttctaggtttcattatttctgttaaaatgtacacaattcttgaaataaaaatctggacaatccagtggaaacagcaaataaaatctctaaactataaaaaagtctcaaacactttaattgtgaccttgtgaaatacgactcatataatctggcaccaaggatacccatatgtaaaatggaaagaaattactcttaaaatgtccttagggtcaacttacccggggctggcgggccaatcatgttgatcgaataaactacgtaagtttatggatcactttcactctgtttcggtatacagcacgctagagggagggggagttaaattcatccctgctcttggatctccaacctcggcagcagtggaacgctcctctccagcatcctgaacatgttcaagttttccccaaactaagttcctgtccactctgcccctgtcctcctaaaagctggagcaagctatctctacctgcccaggtgtgcatcctaactcaggctacctggctccagcccggcctccgcagtgacccctaaaggtcacaaaagctcggctgctgcggtcagtgggatcttttcagctgctcttttgttcagcactgctgatggctccctcctcctttaaactccatcctcttggtttcgacacattctagtgtcctggtttctcctaccagccccctctcagtctcctttgtggctcttctcccatcctgaagcttgtcctcaccctccactcccctctacacgttaccgtgtcccttctccggtggctctctgtgccttagccaggacaatctttcagctcctatacgtcatcatcgcctaccactaagggtctgtgcattctgtttcttctgcctggagccgcacacggctggctgccccggaacctcactttttctctggctaatttccagagaaattctccacagttcaactcacaccctcagcatctgacaccactcccacagccgcatcctacaagttcctggaacccgtgccttagcctttgtcccaactgtggtcaaacaattgtgcatctggtgcctgtctcccctgctggggcatcaactccctcaacgccaagatcatgcctggcccagcaccagtcacacccagcagcaccttgctggcctctgaaccgatgtggactgaataaatcccatccatcaccatttccaccacatttcaaagtaactgatgtgcacctccagcagcctccctcctgcgctgcggaactctaccagctccacagatgcacacctacagccacgctacagctcccggctagagcccgcgctagggccccgctgtgcctctccctcccctcccggcagcagggcctcccccgcgaatctgagcttctcgcggattccttccttgcgctgttttggtcaacagcctcagcatctgcacagacgcccgcaggagcagccgagccctcgcccgcctcgactgcccgtttcgaagccgccctgggaagcccccggcctgggttcccgctcggccccggcccctgccccaaggcccctacagttcctcccggcccccgccctccgctcactcccggtcgtccctcgcggctccgggtcaaacccgcgctccccgcggtcccgcgcctccgacgccaccgctccggctcgcgggcccgcggcgcgttcctccctcggatccacgcggaacgccccgcgcagctcgctgggctcggcctcccacatccagcgcgccgcctgcgccgaccttggggcccgaccccgaccccgaccccgacgggcagaggcgacgccgggccacctaccatctcccccgcgccgcccgcttctggccggccccggccttctgcgcaggcgcggcggcggctccgccctcgtcctcggacggccgcggccctcggctccggggcagtgccgggagccggccgcggggactcccactcccggcatgctcagcgccgcccgggggcccacgggagctcgcgccccacagcccctgcgcgtccagccctctgcgagggccttggctcgcccctgcggggtccaacgccagcctgcggctgccaggccccacgccggccaggaagtgctcgccgcccgcggccgacgggacccgcccacgccccgcctcttaaagggggcagtgactgcggctgggcgggagtccgggtcggcttggctgagcgggggcggtgctgggcagggcggcggccgctccctcccggactcccggcctcccggcctccctggtcccgcctgggaagggatgcaaggaagccctccggcgctgcgctccgaggcgggagacagcgtccccctccgcccctcgggtcctggcgcctcagagcccggcccaggccgcggaacggtgatgctcgggccggacgggcgggcgcggatccctgcgtcccggtgagcaccaggcccgtccatccggggctctttcccggggtccccttccttccctccctccctggggctcccctcccctctctccctccccggggctcaccttcccttcttcccttcccaagggtccccttccttccttccctccctccctggggctcccctctctccctccccggggctcccattcccttcttcccttcccaggggtccccttccttccttccctccctccctggggctcccctcctctctctccctccctggggctcacctcccctctctctctcctcggggctccccttttcttgcaggtattgtctcccggggtcgggtggtctgtgtggcctggggtcccgctcctccaggccttgcctaggcgctcttcgctgaggcccacgttctaacctggaatggaacctgcgttcccaccctggccgcccgggtggactcggggcctccagggccggccgcagagatgcagccctgtccctggcccccctcctgtgactcctaacggctcctcacggtgtccatgacccagggtgtggacgcctgcgcgggggaagcaagaccgctgcgtatcgggtccctattcactgcctgtttttctgattattctgtcttccaaatttatcttatttaccggctttttcaaaaggagtgtcttaatgattggattacttgtgaaatatttgtagtttttttctcctacaggcttgacttaaatattctaaagcttttttgtggttgttgagacagagttttgctgtcgcccaggctggagtgcagtggctggtcaaggctcaagcgattctcccgcctcagcctccccaggagctggggccacagggagcatcacgcccggctaattatttcatttttaatagagacagggtcttgctgtgttgcccaggatgatctccaactcctgacctcaagcagttcgcccacctcagcctcccagagcgctgggaatacagataattgtgtcgtaatacagcagtggcattaaccaccgcacctggtcttaggtagaatttgaaaacctttttattttgagatggttgtagatcacatgaagttgtaaggagtaatacagagaaatcctacagagtgcctttgccctgttttctccaatggtagcaccttgcaaaaccatagtatatgtggggaattttctttgatcaaatcccctgacctgttgagattgcaccaactatacatgcactagtgagtgtgaatctacacctgtgtgtcttctcaataaaattgagattttttttcactcagccttgagatacatccgcattgttatgtgtatcaattgctcaagatgcagaaattctaagaattcattatttaaaaagtaatcccagcactttgggaggctgaggtgggtggatcacctgaggtcaggagtttgagaccagcctggc

SEQ ID NO: 917191 - DNA, 4001 bp, Homo sapiens
ggccgagaaacgtactctgggcaaaggaggtactctgggcaaaggagctgagagcgtatatactagaaaagaaaaaggacagccaaccctggcacctgacctagcggctctcaacaggcagagggccggcctgagcagactcggagagtccctgggaaaacagcatccgaacacgttgaccggaacatgggtgaggccagaaatttcggacggggcttttcagactggctcacaatgtcaaccaagaaggagtagcaaatatcgaggcagggcgtggagagtcaaaattcgacgccagggaaaaggcagcccacacaggcttccagagctctgagtgagagggggattccggggtggaatccctggagggatgtgagacggttctgtttgaatcggaagagagaaggaagttgagggagtttgagggaacaaatccaaagccccctggtctcttcctccttatcctcgcacacttaagacacgcacacacactactcttggttcctaaaattactcaacctccgcgttgcgtgtgcagcgaaatcccaggcgaaagcgaagtcagctttctgcttcgtccccggcaaaacccgttgcaccctccagacgcccaagctttagcggctggcaggagtcggaggcgtggttctgggctccgcgccgcgctcagcctctccaggcgcgtgtccccgggaacctgcgcgcccaggtgacgaccagggcgcggtctcgacagggaaaaccgggctcctcagactccccacgctgaccgcgcagcctggcttctcctctcccccgcctacattccacggtctcaaagcaagtgaaaagttgaggagtcggtgaagccgggaaacggtcctcgcagggccgtcgccagcggtttgccagcggttcctcggggagagcctcgatcagccggacaaaggcgctccaggcggcgcgcgaggaggagcccgggcggcggaggaagcgctaacccggctgggaagcagctggggacctcatcccgggccatttcctgaacggaacccggcccgggcggggggagcaaaggagaagcgggagggggtgggcgcgggcgcggtacccaccggttcctcccacgctgggctgcgggcgccgggcgcggggcgcacgtgctgaggctccatcgcgccagcccgcgcccgccggccgcccgggcgcgcagacccgggtccccgccgccgccgctgcgccggggctcctggatgcgcttccctcgccgcggtccctctcggccgccgccgccgccgccccggctccccgcccggggccagccaccggcccacccgccgtctccggcttccgccgcgctctcccgcccccgcgccggtcccttcctcctccgccgcctcctccttctccacggtcccgctcccctgcgcggctccgagcggtccgctccccgccaccgccgcagcctcccacgggcgcagaatccgcccctcgctccttcctccgcccccggcgccctccccttttcctccccgctacccgcccctcccccccgccgcccctcctcccggcgggtggcccgggacacacgtgacccccctgtcaggccttataaggcgcggaaccgaaagcggccgccgggtggtcacgggcaccgggcggccgcgcggaaaggagcggcctcccccggggccgggcgcgcggagagcggcgaggaaagcccgggctgggctgggctaggctggccaccgcgctggcgacgggagcagacgcgggtcccgggagacgcctcccagcgcccctgtctctcgctctcgccgtctcccggtgcagcccgcacccgcctccctccaaacgctggcggcccgcgctgcaggcgcctcccctcctgggggtgctgaggcttgagcgaaatcccactggacagtaaccggcttcagcggagcgaaaactcagccgcactccagctacgctccagggcaagctgcgccgggcaccgtttcttccttgtgacgttcaaaagaatgcagatgggttaccaactacaggagaggttaaacttgagggcgtgctttttaaattcattatcaacgttttcatggaaagaaccggctaaggagtcgatctgtcttccagttttatccctagactcaaattaggacatgggctggctctcagtgagcactcagtaaacagcaagtctcctcctgccctttgaaaaagcgtttcggatcatcttggcattgtaagcgattttcatctagttccagtccaagtgtgactggctttacacaggttactccccctcctggactttcaggttcgttctttcagcatcttttcagggccctcaatcatgccatcatgtcaaatgcattcacaaattttaaaaacaaatcgtcaagtcaaaaacacataattgatctagcccgtccccagccctctaattcttcaggatcctgcaaaccgacttctgtgccggctgttccacggggactgcactgacgaaagtcacttcgtggttttgaaaatcccctaaaccattgtatattttccaatgcccgtcttacttgacctatttgcagcgtttgcactgttgatcagatatttatttattttcagacaggatctcgctctgtcgcccaagctggagtgcagtggcgcgatcatggctccctgtatcctcgacctcctgggctaaagcgatcctctcgcctcagcctctccagcactgggactacaggcgggcgccacaaagctcaactaattgttttattgttagtagagacgaggggggactcactacgttacccaagctggcctcaagcgatcctttggtctgggcctcccaaaacgctgggattacaggagtgagccaatgcgcctggccccgatttttattcttgaaaccatcccttccattggctctgtgacacctcggtctccgtgtttcctaaccttttcttgctcagccacctcttgcatgttggagcatctaaatggtcttgcccttagtctgtctctaatgctgcctaggcacatggcttcaattaccaaccatgtgctgataactcataaatttccatttctgtcccacatctccagttctataaaacgaactttttaccagaaatctctacccagatgtcccatcggccttaaactcaacttgactaaaacagaactcaactttcctgccagctggcttttctctctagtctcattctcagtaaatgtcaccacaatccacttagtcacccaaaggagaaatctggaaattatcccaggcttttccttctctcatctgctgtctgcccatccatgcacctatcatttctgtctatcaccttccctccattccactgctttttgcctagtttcaggtctcttgtttcaagaccctgaaacactatattactctccttattagtctcactgcctctaagtttgttgcacctccacccttgccatctcacgttgtgaccgaagtaagccttctaaaatacaaatttttgaccaagtcattccccacatcagccctgccaatggctccccatagcctgcagggtaaagtcccgatatcttagccagggcctaagtctccactctctttaaacagtgagtttcttgcaccaccattccctgttgggccacttacttttatgctgtgccctcacatggagtgtcctttctcttacacagcctaagtttacctgctctttcaagattcaccctaagagtcacattccttatgaaatcatttctgaccctgctgcaggttagaactgatttcactgagctttctctacactaaatgcctctctcccccaattataatgctttagaagactttattaaactcagtttttatttatagtcttcctgatggcaagtattatgacagacttactttcgtcttcttagttcccagtacagttcctgacattagtaggtgctcagtgtttgtggaatgaattaattatgtgatgtaccttgagttattatatttttgtggcttatag

SEQ ID NO: 917192 - DNA, 4001 bp, Homo sapiens
gtttatggaatcctgaatggtctgggcctcaagttctaagaagattgtaattccgtcccctccttcctataacctgggcccctatgatggcacagtttccagtcccagttgggaggcgagttcctcgtttttggtatccaaataatcctattcacaaggccacatactttaaagacagggacctatccctgaaggcaggcagcatagcctttaaatttgtttaaattcaagcaaaaactttttaaaaatttggtactcagtggccaattttttttatttagcactgtatatccaaaatctagcacaaatgcctgctatatataatgaactcttcgataaatatttgttaaataaatgaatgaatgaattctaagggcagtcctggaagtggacagatagatggggagtgggctgctgtgcaacagactaggacagaaaaagtactagaggcagcaggttgaaggttactgagcaggagcactatgttttccgagtcatggatcttcagtaagggcaaggggaacatggtaacaccaggcacagcaaatgatcatgacaccctgactgaaagtccgacacagctctttggatgacaagtgccctctcccaacctattgatagtgtctattaaccacctcggaccctttgatgaaactgatctatgtcctgggactcccctggtctggttttgcaagcaagtcctaggttcccagagctccagagttggcagaagaaccgaggacatgctcactgggtcttgccttactttagaaagcccatttgaaagatttctggaaggctactagtgaaggtggagacaccggttctgttcttcttccacaccttatcttcaccccaagattttcgtctagctacaaaaggaccaatggtttcttacgccctaagactttggtgtgaggaagccaataataaccttaagagctatttctctgggttagtcttggaaaagatgctatatcactaaataaaaagataaatatgaaacacccacagaaacaaagataagatatttcatttctaaaagcccctaatttctaagatagaaaaaggaatatgaattttaaacttaacataaattatcagctttcagagtataaagccatctaaattgtacttaaatcagttttaaaaggcaaaaaacacaaccacttaaattgcattaatatggcatcattttagagtgctataaaatattttaactaatataaatgttaaaatatgaggtttgctgctatcagtcatctaaaaattatgtaagcaaaggtgggaccactgcaatgattaatgaaaggcaagaatcatgtttgtaaacatggtataaaatagtcaagtcattacataaatatttcaatgagggtgcaagaatttatgggtataatatatataaaccaatatcatagggagggattagaaaactgttctctaagccaaaacatgacctaatactttttgtccaaaaaaacccactacagtttacaaatgtcactaattcattcatccaacaaggatatatcccttcatttattcaacaaatatttattagctttccctctgtgccaggcactgtgttagccttgaggattcagtggtaaagaagacacagtctttgcatctgcaaggaaatttcagtttccaccatctctcctcaccccctctcacatgcacacactgtgcaaagaactccccaactgcattctagaaagatggtcatttagctcttgctgtgtggtataatgggcctccatatgtaaagtgtctagcatagtgcccagcagtctctaaatccactcttctttgcctattcccaacaaacatcaagagctgagagccctgaattccatattagctgtgccctgctattagccatctaaccttgagaaattcatttcagcacctaaagctgagtctgctctgagaactctcttcttgaaggcccctttcagctcacagggaatgagatgactaaagatttctaataatgggaagagctattacctcacaaggggcctgttctatcagatgactcaagttagaaagttctctgttatactgagcttgaattattcctccacgaattcaaccacaggtcctgcgcactgcagtaacacaaaacctgtctacagcctctcctatatgataacgcctcaaatattaaaaatacatttgtcacatttttccaaatttttaaaataaagagtgccctgaaatgccaatcaatcccaggattcccagaccttttttataataatggttaccatcctctgtgagctctttagtcaacatttctctttaaagtacagtgccaaaatacaatgaaatattctaaatttgtagtctgaccagcaagtgcttgctattcatctggtgatgcagcataagactctgcttgacttgtagaaaaaacaactgaacatgtaataaccagttagaggaatactacctaaaccacatttatttaaaactccacaataaagacgcagcatagcaaagtcatgaagatagaaattgaggccagatgatgtggacaggttcagattctagtcattatattattagatgttagcctctctgtttcagattcttcatctatcaaatgggaatcacaataattcttgcactctaggattcatataaagaattgaatgagttatcagacataaagcattcagaacagaaatataacagttacaacaaatatcaaataaggtaggcaacttacttgtcagtgattattcaggtgataatctaaataccttttgtgtgtgtgcattcacaagtgatatgaaaagaaagtagcttttagttattgcctttgtaagtaaatattgatagattaatggagaaaaataaactgacagctttttaagttcaaaggatgtgatctccctctaagagagagatgaagtaaactgtattaactgagaggaagctaagggaaaagcagaataaatagaaaggaaacattaaaggaattcttaagaacattttgttctgtaccactaaaacccactctgctcatttcaattatattatgaatgcataatttctgatatttgatgtgccataagagtatgttctcatgtttattggtgtctttttatgtagaccttttaaaccctcgtagaaagaataataatctaatgctaataaactttactcacatctgctgtggaaagggacccctgaactaaaatccctttttcttccagtgatcatttagttctaaatataagtgttaccagagggtgcctgtgtttcatcaaccgagtaagcccatgtgggtgtgccgtacccatgaaatttcacacacacctacagactgcccccagaaaatgttatgggtggttaaataaatgaattaaattacctatgtatttctttctacttcaaacaaacaaataaaaaacacatgctactttctctagcaaacttccataagaagttttaacaataccagtacaaaaatttctttaaaattgtgactcatttaagagttagcctaatcttcattaaaatttaaagaaaacagtcatttgaacagcatgctttgaaaggttaacatatgccatgtgattgtgatgactttcatatcattaaatagctcttctttcgcaaataacatttacctaacatggtcagattataatttcatttattattcccagtcatagttattaatatgagataaaagtggaaataaatctttgctatatctctgaaagataagcagcatggaatgttttctcaagataaagttcatccacattcttcttccaaattcccaaactttcaggaatcggcaacatactgctacttggaaatagggagatgataaactcgggagaataactgccacttttattaaactgcaggtattgtggtgtattatcacatttaatttaatccttataatcctatgaggtaggtactcttgttattctcaatgactgttgaggaaactgggatttagaaaggttaac

SEQ ID NO: 917193 - DNA, 4001 bp, Homo sapiens
ccctatacaatttttttttttacctgccattttgcccatcattaacacagtttatgaacttttttcagaattaagatttgaaatattaaaaacacttttaggaaagtccctaactttgtaaaagccttaatcttaaaaaacacattaaatgccatattcttaatttactacaaactcaaaaacgtcactattaaaaggagttacaagatgtactcttaactaaagtgactgaatccctaactctttagtaagtgcatcttgtcaacagttgttcttgtgtgttgttcttacacacatgtatttcagaaaataaggaggcaggctactacaaacattaatccactagctttttttttgtcgctcaggctggagtgcagtggcacaatctctgctcgccacaacctccgcctcccgggttcaaacgattctcctgcctcagcctcccgaggagctgggatctcaggtgcacgcctcaaagcccagctaatttttttatttttaatagacatggggtttcaccatgttggccaggctggtctggaactcctggcctcaagtgatctgcctgccttggcctcccaaagtgctgggattacaggcatgagccaccgttaccggcctccacaggcactgaataaaaattatgtttccaaataggagttcattgaccttagggaaaatttttcataaaaataactgtagaatgaattttttgcaaatttatttttaaaaacggtaccccaagccaatgattttgtggttccgttttcaatatcctcgttaaatttccctactgataacagactctctctgtgaagatttttaaattacaatgaaaattagaatacataaaaatcctttaatatccataagcatttgctttggtatgttcatgatcaaattaaaaattaactttgagacctcacaggtcgacagcacaagcttcattaacaagagtaacacaccatcctaatgtccacacagcacagaggtaacttctcattattaaaaagaaccatggacgcatggttctgaaccctgcctgcacttggcgggaacctgcgacacgaaagcctggccagcccttggagccatgcagggtgcggttaagccgcgaacaccatgtcccacttgcctgcctcggggcttctgccttccagaccgcagcaggaggcagaggggcaggaaaggctgaccggtgtcaccttccacccaccctctgagtgggcctaagtgggaaagcagcagggctcactgcagcgcaggctggttggccagcacatgcgcacgctcccccgaacggcagggaagaaaaattgaaactctccttttaagttccctaagtaggaactcgcgactgcgcgtcagctttttcccacgctcccgccgagccgcgggttccctgcacccgcctctgccagtcgaactccctgggagcccaggctcgcagcctcccgcgcagccgccgggaatccgtcccgcagcaccgcggtccagcgcccccgggccccgccccacccctccccgccccgcccgcgccccaggccccgccccgcctcaccgtctcaccatccccgccttccccgccttccccgccttccccgccttccccgccttccccgccttccccgccttccccgccttccccgccttcccgggatcgcccggcgcgttccagcgcccccgcgccctctccacctcccgctttccacgcggccctcaggcccgcctcctccgccctaccttggtccggatctgccccgaggtagacactttgcggatcagtttctggggtccctcttgctccgcttcgctgtcagacgaatcctctcccggccccgccgaggcagcggcggaggtgaccgcggcgccggctccggcggccgctcctccagcggcgcccggagggtggtgctggcctccggcccctgccatcctctccgactcctgcggggacacagcaccgcccggcgggggcggcggcgttggtcagcgggtgggctctgcccgagcggagcccggaaccccgtgcccggccgccgccgccatcttccgtttccctagctacccccgcgaggtaagggtcgcccggggcaggcgccctccaggcaggggtccacccggctcctccgctcggttcccgccggagcggcggccacggtgggacgcagaggtaacggacccccgcccgcctcggacccctgcgcacccagcctcggataggaccagcgcgggtagagaggatggggtgacagggtttggagcaacatctcttccactcccttacggtctgggtccctaggatggacaggagggtgggggaggcaggaaacctctgcagcccaccccgtagtggcgatgcccgcacaccccctctcacttctggacagcaggggcaacgccgatccctggggaagaatgggaacctggagcttcctcccagcacccttgggtgcacccgccacctcctgaaccccgaatctctccagagacacttgggcctcgccgcgcggttccagctgaataaaagtcccctctgccaccaagacagtcgggggctgcccctcgtcggtttccccacccccagccccactccgaggaccgtacctctcccgcctccgccagggccgtcgggtcccctcagctctcctgacggcggcgttcagtttctggcccacccccacccccatccggcgcacacggaagagaagagcattttccgggaggttcagctccgctctgagaacttttcgttcagaaagagcgatccccttcggctaacaggaaactgggaagggcgtggagaaagcgcagaaacaagagactacacgcagcccaagacgacagaacgcacaagaagtgtctaagctgaagcgctaaccgagattgcctggaagaaaacaatacactcgagccatgcgaacaccagtacccgagacaaaaagccttggaagtcctggcagagccactccctagcccggactagagcaggaggaagtgggatcaacaggctgtagccaccgcgcacaactcccctgcaagctggctgcgcgggcacttgggaaccgcggactggcagcgggttgtgcacgctcaacgtcaaagaagcctcacaggtgtgagggggctgcggtgagggggctgcgagagaagacattaaaacgacagatccctcttgtcatccaaagagaacaccaaactggtgttagctatatttttaaataggacaaaaagtccctgccagactgtggagtctctccacctggagaaagcattcaatctctgttatgttcatgcctttcagtaccattcctttcgtattttttcagttgacatgacctttaaggttcctccaaactaaggttctaatttttttttttaacttgcagtcttactcccaacaagaaatttgatatattagagctaacagttctaagaagttttaagaaatagtatgcaatcccaatactggacatcacactgtaaattaaattcattaaaatgtaaaatgtgtttagttcaaatatttaaagacaggagactgctgctatgtaataataacagagaggctatttctgcagcttctgttgtctcctttaggaaaggaaggagttgggcaaaatgaattttaagaacgcttagaactctacaaatatgtaattctttatctacaaagaacatatttctggaaattcttaaaagagaaaaataatcaaaataatggccttcattcccacctgtttggtcatggacaagtccaatattttggaaatgtagacaaggacacctagtaaagggtcttttgaaagaataaacttagtttagtcttctcctttaatgtaaagaaactaaggccccaactgacaaactgagaccaaagtcaaaatcatgcggttagtattctaatgttctattcactttatcacactgtataacaaaagtctgtcagttaccatatacttctattcatacattatgtgttttatatagcaacattttcc

SEQ ID NO: 917194 - DNA, 4001 bp, Homo sapiens
tatttttcacacacacacacacacacacacacacacacacacacacacacacacacgactttcccaaggtcaccagaaggtaggtgatcttcttcaacacccagcctcggtgccaaagggcagtccccagacaagctgcatcagcatcatctggaaacctgttggaaatgccctgcctactgactcagaagtgattgcttggcaacctgtggtttcatgtgccttgccagtgattttgactcaagctgagaggacatttgtacttactgtttcctgaagctgaggtgacagggatggggaggaggaagctggcaggtatctgtgtctccccacaccctcaatttacccaaatatgaaatttgcttaggacccatccacacttgcccagggtttaggagtctgtttaaaactgccccagggaattattaggttcagcaaagtttaggaaacagtgattagatcctcctgccttaggagcccaatatagggaggctttataaaaatccttgtgccaagagaaacgttgtaaactctaactccgcgctctcacactgaagtcaaaacaaggttgttgtttttctctcctattcactaaatccacaacagcaggaaaacccatctaactttgccaactgccttcccctcccctcccttcccccaccaatctgtggtggattgggccccttggcctcacttctaccttccctcaaggtggggaaatcagagcgaaagagtcctgggagaaatttttacagtctgctttccttggggcccacccctggttggaaactgacttaagctttcatgctgtgtaatgtggaaagatccagcaattaatggtcattgccagaggacacccctttgaaagaaagaggctgccactgtattcccctaaaaactgtgggacagggctcacgactacactccccaccattctctgcagcaggggctcctgagacagagctgaaccttctccaaaacgatgtggggtgaagagcagggagttgcaactcctacctcccctaggagtgctggccaggttgccgtgggaactgataaagccccagtgcagggagaagcctctcagaggtgagaatcacctggggcatttggatgaaatgccagtccaggcccctgtgcagatccactaaatcagaatctgtagggatggggcctgaaaactgggtacttttaattctcgcccagtgattctgatgtgcagacagggttgagaaccagcggttagcctaatcaattctaagagaaaacctccatctctcctccgtcacaggaacctgtcacctcttaaaaccacaatgaggtggagagccaactagggcacactgagcgtggtcacggggcgacgaaaccaccacgcaccgttccccagaagcacacactggctggaaagttccagctggagccaaaggtcgcagtccaggtgctgcatctttttaaaggaaacacacccaaaggcactaggacagagccttagctagcgatttagatccagccctatctgacgccgccagcagcaccacgaagacacttccacgagcacacccagcggggcgccgaggtgccgcccaagaggctccttggcgccggggccgcctgacgtcagtgggacggccctgggcttgggcgcgccacagccccgcccctcgggcgccagtctcggtcgcgggcattgagcggctggagtctggcgactgccccacgcccagccgtgggtcgctagacggcgggcgcacccgtcgttctggacacgcttagtcggcccagcgagagggcgaaggagccgcgggcgcgtccccgccaaccctgctcgcccgcgccgaggcgggccacgtgacagcccggggccccgcgccccgccgcgccgccttacttggtgtactcgcgcagccccttggcgaaccacacgacgctgcggtacagggacatgccgggagcgccccacgcctagccccaccgcgctcccggcgcggcctccgccctggtcccgccccccgggagtcgcccgccctgacatcatcccggttatgtaagagccgcggcttccggttccttgctccaccggtaaggcaaggggtctcggggccggccggtcgactccgccccagcctcagagggtggagtgagggcggaccggccctggtgggggccgcagtcgaggtccgcagtctcctcggggtcgaaatcgggcatcagcgccgtttagagaacaccgtcctgctgggcatggccgggatgcgaagatggccctgcaacgcacctcctagaatttggttacctagaaaaccatgtggaataaaacgacgaggcttatgatatttaaaagacttctgcatcgaattggtgttatcataagggttattttaataactggcattctctaagtttctacacgtgttgggggatgcagtgccgtgccacatttcccgtctccagcaagcgcagtcagattggcgacatcgcaggcaagaggcagggctggggctcccacccgagaagtaattgtctccaaagttggacttttgccactggttctgcgacttcatgcaatgccagggagagccccttgatttcccccaaatcctcatcagcctctttccacccaagcccagatgaacagtgtgagtaaaaaagagtgtggttgctgcgtgaacccagatctcagactagtcatccagccccattatgtaggactcagacacccctgtccacatctaacctccagccctaacgccacattagaaatgggggtcttactgctgctgtcactcctagtcaccctgttaaattctataccggtttacccaagtcgcccagagactgggccccacttacataagctgaagagaccagctgctttaatagcctcattacctaggatataggatcactgtccaacctcactccacagtgggcaagtttttacttcagaataacttttgaaataaatttccccggaacagctcgcccctctcaacaggactctgaggctccactacgttgctgttattcctgacagagtgatgaaaggaaatttaaacaagtggcattttgtaaaaccaccccagcctgtgtgactttcaatgcctgtccgatttggctgggaaaatattttagatccccagggctacatactgttttttataccctcctctttgtgtcagtgatggaaaaggtgtcaatctgctctgaatctctctgaacacctcaggaaataggcttttggctcgcagagaggggatgagaaatagttttgaaccaccaagtctcttggagggtgtcagcagccccttgaagtaaaagtgtggctgcaaacccagctctctgcattagccaggtgaacctgagcatgctgcatacaccctcagtcttggtttcttaatatgtaaaatgggaatgaatatgcgcacctcgtggggtggttgtgattaaaggcattcattataaagagcttagtttcatacaaagtgatcagaagtgttggtttccctccttaagttttcttctcattcctttttcccctgcgcttacagccatgcagtgtacattcaagaaatttccatgagggcatgaggtgtccagtgttagcctcaaatcaagcatccacgaggtagttagtgtatacattatatacatttaaagaggaggtcttaggaaaagccaaaccctgtctcaaaatgagcttccactctcacctggatgccaagtaacacacacacacaaacaaagggcagtatggagttcacaagggaatgttcccgtttaactggagtcagctgagctggattctagtccaatttctgccagttattccctgtgtgacccatgtgataaaatgtatagaaggcttaaagtgtgccaagcattgtggattatagcacttaattctcacactgatccatatggttactcctgctattatccccattttacagatgagcaaactgagagaggttacataacttgactcaggtcacagtaaa

SEQ ID NO: 917195 - DNA, 4001 bp, Homo sapiens
agtaccaagagtccaaattacttctaaattaactggaagtcatgattcataccagactcccacccaaaaacacagtgttttagatgtgttttttacctttacagcttaagagtgttatcttttagatgtcatttcatctttatgagaatccatttaacaaatggcatgctgagatggtcaatgtgacatacataagaatgaaaaacagcacagagactggaaaccaaatgatgaaatccttcaatgaaacttaacataaatactaatttagatcctgttttcatgacctccttgctgggaatgagtcacagaaaataacacctcctgtattctggaccacagaagttaaaacaaaataaaataagattattaacccagagagtagactataaaaggaagaaaagtcattgccttagtggattcttctcacattaggcaaaaatctttcattgggaagttaactctgtcctattcattcttcagatttgtcaagataatgatcaagtccatacttgatccttctgcaaaatgtcactattcctatgaccattttgatacttaatttggcataattaatctatgctgttcctcattttcaattaatctatgctgtttctcattttcagtattctgatatatctcatgtatcagaatatgggctctcagtcttattcaactattatttttaactaaatgttatagttagcaactggttcacaaaccattattcccttaatttgtgaatcatgacttaaatttctcacaatttttacttgcccacataaggcaaatgctgtactctctctctctctctctctctctctcacacacacacacacacacacacacacacacacacagtttttccatattcctaaggaaaatggtggagtggtcaatgtgaaatttcaattctgttggactcatcccaaatctatcaaccctctatgtgatttatttacacacacaaaccccaaaataatcatcactgcctatactttcactagttgacaccaacgaaaagacaaggtgttaatcatgacactttccttaagtgttaaacacaagcaaaccagaatagcaagtttcaaatatttagaattctttccaagctaagcaaaacattctttagcagtgaccacaccacccgccaagttctaaaactagctgtttcaacttggaaaattatatctaccttaaaagttcttatatgtaattaaaagttcttattaaaataataagcagaaaaaaaacctgtcacctaaaagttcattttgatatatcttataccctcttacactagggaggaagggagaacttcgacttaaaaaatgcaatgtccacctagatgacgtcaatacatatacacgtttgaactgcttttcacatcagcgttaagaaatttgggggcaacacaaagatctgggcatttgtcacaggatccaactacaactagacccggtcgttgtcaatctatgatctttggcacctctggatctctagaataaaacttggtccccaagttcttgtgggcccaccctcggcagtcagccctacggcggggcgggagcggccccaccctagctccaggcgatactcacaaacttggggcgcttctccccaggctcctcggggccactgggcggcggagggtgttgggggcccttcctgcgcggcatcttgctttcccggcagccgcggagagaggctgaggaagggtagggagtcccagcggctgagccttgggccgggtggtgcagccgcggctggtgccgttccatctttccccgcagctccggggaccggaaagaaggtggccactcagcaagccgcaagctggaagctgagggatcgacaacaggttttactcccggggtccgccacccaaacagtcagcacagcctagcccaaccgctgaagtcggggccgcagccaacacatctgaaaactcccgccacccgtgttggcccgggactggccaatcccgcgccgccggatcaatgacacgctgaggcaccgccccttccgggcactgcgaaacatgattggccttgcggcctgtctatgcagccgctcaacccttccggcggtccaggccgctcaccttaaggacgcagagtggcgtcagatttggagaagcgccggggaccgtggaggaagtcatcggcctggatttctttggatttgcagatagggttccagcagaactggaaggtgggcgagacaggccctgcgccaccatttgagcagcgctgggatataaaaccatctgctagccctctccttgcacgtctggggctggaaaaagtagttctgggactgggtacggtgctggaaggggtactaggcaggatgaaacgacggggcccacgacgctccaaaaggaagccttctggacatatttcctgcctaagtgctcgctctggggtggcagaggggtccacccaaaatcagacagagctaggctaggctgagcccttcaggagctcacagtctcctgtagtttccaaaccctaacacaattaaccaaggaatgtaaatgtctatagcagttgttttagaagttccttgagaacaaaaagggaagttattaaatctgaaggagtggatctggaaaggtaaaaggaaagctgcataggttttcactaggcaggaaacagtggcagggcattcatttaaaaggcattccattccaggcaggagcaaggccaagaaagcatagaggtgaagaaactttaaggtcacataacaaagggccttgaactgaaaccatgcaaaagagtttgttgtgtaaacccaaggtcaagctacaaggcaaacaccgttttctcaacacatcaatataccctctttaaaaatgagcttttccttggaactattcctttaagatatctgtcttctgattatatggaggtggtgtaggccaagactcggaaacatgcagtattgattttggtacaagaaacaactctaggtactctgaggagtttggcacagaggttcaaaaaatgagccttagttctcagtaagtcttcacactacagcttttcttttttaatatttgttttactgtgccagactctacagctctgtcctcaaagagcacataatctttagggaaacttacaggagaacagcaaggtcaggagaactacaagtagttccttatatcttgatgacagacccagatacagattttattcctgccatttactagctatttgataccggagatgacgtttaactttctttgctgcttcatctacaaaaggggggtaattatactaatacctatgaaagaggggcattttcaggcctaaataacatagcatatgtaaagcccttagagttttgtcaatgctcctacaggaatactgtagttgaagaagttgggattattactcagggagggagaacatgcactatggggagccatgaagtgtcttaggtaaatggtattagaaagcacttaaaggatttgggctttgattaggtgatttgggaaagactccgtggaaagaggtgggaagggttgctcaagattaagtgccttcaggaagtggagacagttcagtgattatcttatctaggaggatggcaggctaaaagacaagcctaaagctgtaactgacaagcattagtcatccatatcatggagagaggggaatgtttgattttgaaagacaaaacaaattaaagatctaattggcttttatttgcaattccagaataggcaaaacttcattctctaaaatagaatctgttccaatgagctaagcagaggaggttggctttataggcagaaaaaagctagagaacagaaataaggaatgagaagcagatgagttgtttcaaagttactttccttatagggttaaaacaggggaactttcttagcataccagctcagataaacttggccccttctgattgggtgctatgaatttcctgctttttggaaaactggctggtttcagagttgcttttgattatgtggcaat

SEQ ID NO: 917196 - DNA, 4001 bp, Homo sapiens
gctgacaattattaagacaggttaagtagccaaattgagaaagtgggaagcagtcagaaacatgggatttgccaacagaagcatatgaaacaaacagccagatacggaaccagacactgaggccatgaaaatctttttcctgggaaggaaggttggtaagagatatattatcataagcaaacacacagatcaacactgtccaagagaaatataatgtaaaccacatgagtaatttaaaaatttcaagcaagcaaaactattttcaataaaattaatccaatataccccaaatattaccatttcaacatataaccaatataaaacatttattgatgacatttcacttctttttcttcctaaatagttgaaatccagtgtgtattttatactgtagcacatctcaattcagactagccacacttcaaatgctcagaagccacatgtagctaccatattacaaaatacaggcctagatattagcacttagttcataaataagcaaaaactgaaggatgatttgagcagataccatgtagaaactgccacaatgggcacaggtattctaatcacaatggtatttattataaggaaaacaatgcagttgtaaactcattctataaatgagacgattgggattaggataaagtttatttactactgccaggaagtcaaatccaattagaagataagttatgttaatgatgtatctatgaaagataactgtcaaaatacagaagatgaatagaaacaataaaacagtactatttatctagcatgcatctcagaggatcctactaaagcatgagaactgactaatcagagttactaccaaacactaaaaaagggccttattcccaattacaagcctatgaactaaactcaaaatcagcactacatgtaagcattgaagttgaatctataaccagcttagacccaagtactttgattgtgataaaatcctatttataactttcctatcttgtatatggccatttatgcaaagaaaccttgtactgggctgaaatactccatttactttaaaccactatctgagaaacacaggaacaatggagaaagtatgaggaaaggccaagggcccaagaatatgaattttggagagattactctgtcttgttagtaatagggaaaagtttacaacaagacagctaaacagtcaggaaatacttacttttatgatagcctgggctattacctaactggaaaaagaatgaaaaggcaggcacaggaccagaaactacaatatgccttgctaatcattccagggaattgtcaggtttataaagtaccacttagattcaattcagaaagtcagtcaatgattaccaagtacacaagagctggctctgtcctaataaatctgggaattgagtaaagcttgcctctagcatttccccttcttttcccacctacctggttgtccttagctaacacctgcccttctagaatcagaatcctgtgactcctccagccacccaaggtgactcatgctgacttcctccaagtgatactacctgccttctctgccaaaccctctggccctaacctatcatgtatgaaaggtgaaataggagcatactctgatttcacagttttaaccatcatcctgtgaccccaaaagtccatcacaggtaacgttctctgattttggtaatgcaaaaatgtgtcacactcattttaagactggaatgaggccaattactactactcagtatctataaatacagaattgctacttgtataaattactctcaattatttaaaaaacatagcaaaacaaaacaaaaactgttgactctgtgtgagaagttgtcaacttaccagtgctcggattaaagtgcatttaatgagggctgttttaggttagagaggcatgacaaattttgaaaggtctaaggatgtatctttcctgaatgtcaaggacccactccggacaatatggtaactggcctgttctaaactgaggatcaatgccaggttccgcctgcattccacatgaggcctattattagctaatagatggaatttcaggcactgaagatgatgttttaggtagaggaaagttaatgctctaaatcctcgtgtaggacgcccaacatctggacgcacacagcatgactactagtgctgagcagccacccacagtgagttaatcccagtagcagaaataatgtggttaaagttgctggcttcagaagcaaagcacccgcaccttgggtgcactcttcaaagcaacacacacagttaactgaccaaactgaagtctctgttctaattacctttcaatttgaatatactaacttttcatccttattatcttttctttcccctacgcaattaaaattctcttccatttaaaaaatactcttagtccaatttaatgttataagaaattcactttcatgtaatgttatcaaatttgcccattaattgtataattaattactagtaccaaataaggtaccacatttttttcctcttaaaacttatattttcaccattcaatgaatgctaataaagactgtataagtgaggtttaacaaattttgtacttatagatgtgatcaaataaagattaagacaaccattaaccaatcttgaagggaaaaaaaacttcaccaaaaatttcacatattgctaggtttagagttcagacactataatactaagtaacaataacttaaattaactttttattcttaataacacagataaaagcaccaaataaaatggcaatattttatagctccatgtatataaactacaagcaacaaaaatctcttaagagaaaaatagtatattaattagaaaataaagttcaatcttcctcagattcattatgaaacaaagtaagaatattatcttctatttaccaccttaatttaaccatgatattcttcttaaattcaaattatgatccaaatgtccctttggtttaaaaaaagttcctagattttttctacttttggcttttccatcaccaatgaaatttccaatttctatattctcactttaaaaagggcttcctaaaccagttctatgtacttagtgggcaaagacctctccctatcagcaatttgattctttcattcatttactcttaaaacagatatgtaaaaagctaccttatatatctaatatctgattttcaaagaaccgtgaattcagcatagaaaggagttgtgattcctacatcacatattttctttgaaaataatatctgtttagaggaggcaaggaagaaaaaatatttcattggttaaaaatagaaagcttagctccagaaaatgcttaaaaatacacagtttaacaagacaaaaataattagaaaatataaatatttgctaatacatgtagtaaaataaatataaaataaatcaataatttacgtactagtacttaagtgtgtagccctataaaagtttgtttttaaattagaataaggcaaaatattataattaaaattaatcagaaatatacagatgcttttgctataaaacaaaaataatcgtaccaccacaggtaaaatttccccccctgctgtctaacagcaacttaaacacctatcatcacttcacacatcatgaggtaaatgtgtttagatgctggagcttaaagaaacagcataggataatgctaatttctacagttaacagtataaaagcaaaaaagaaacattgctagataaacctaaaatctaacttcagtaaagagcttaagaattcctctttttttctagtttttttgttttgttttgttttgttttgttttgttttgttttgtttaaggacagggattcactttgtctcccaggctggagtgcagtgattcgatcacagttcactataacctcaaactcctgggctcaagccaccctttcatctcagcctcctgagtagctgggactgcaggcatgtgccgccatgcccagctatttgttttactttttgtagagatggcgtctcactatgttgcccaggctg

SEQ ID NO: 917197 - DNA, 4001 bp, Homo sapiens
cagcctgaccaacatggtgaaaccctgtctctactaaaaatacaaaaattagcctggcatagtggtgcgtgactgtaatcccagctactcaggaggctgaggcagaagaatcgcttgaacttgggaggtggaggttgcagtgagcagagatcacaccactgcactccagcctgggtgacagagtgagactccatctcaaaaaaaaaaaaaaaaaaaaaaaaagaattctattccttaacctaatcttgctcaatgtaatcagctgcaaagtattaaacttttaaaaagaccattaagaataaatctactttctatttttaaacaaaatagaaacttcacaaactcatatattttattaccctctgttagttgttcacataatatggtattccaggaacttaagcaaatctcatcttccaagattctatggtccaactcatgctaaaaccaattcaaaatgaaaacattttggaaattaaagtacctattgtagtctaggagtcagcagaccttggttttaggcttgagcccatcaatgcctgtgtgaccttagagagatccacttagcattatcttctgcacagccatgtaagaattaaataaggtatgaaatctatcacttatcttctgacaatgtcataaattactcacaggaaccctctcccgaattttgctaatcctgtggttttctgatatttaacgtaatattcctcctacctatggtgctcattagtgaaagtatagaaatgcttctcttggttattagtcacatctcggatgcgtttatatacgggggcactgcgatttctcacttcttgaagaactgtttgtagcacaattacattcctgatggcagggtcctcaagaacatcaatcttaaagaaagataaagttaatttttcctatattcatttgtaaatagctctgtcaaacataaaatcctgttttatgttgggcataaatactttatgttttaaaaacactgaataagttaagccaagaagctatttggctatagaaaacgagacaatagtcactaaacccttcagatctattaaaaaaagcacacttaaacagaccaatcacaagacttcgtagaattaagggtattaataaaggaatacgttggcccacatagttttttgttcctaggcacttacaagctgcctgggagtcgcaggctggaggccacagaagcccaggtccccggcctccaggcacttacaatctaaggcagaagagacaccaggagttagaaaaataacgtgtctgaactacgactccaagaactaaattttttaaagcacaaggaaaagaacctcggcctggggaacaggaagcttcggtcccgagggggtttccctttcgctaggtatgtgacactgccaaagacccgcctccctgggcctcagtttccctgtcatacccccttgtccccgtggggccgcgctgtccgcggttcgcccgcccacgcacctggtgcagtaacacattagtgtcgggcagcaagtagtgcggttgcgggcagacgctgctcgccgggtcctggggctgcggctccagggccggcccctcgtgcgcccctccacacgctgcgcacccgggcgcaccgcagccgatgtcgtctcgcaggtagtgctcgcgcacgatcttcatcacgccgcccgcccgggtcttttttaagaacgtcttggacttgagcatcttgcctcgccgcgcagaatcctaaccccagcagcgctcttccagcaaaaggcgtcaatctagaatacgcctaaccccggaggttcttccctttccattcccggatattagtaacacttctcgcgggaaaatgccgagataaacattggttggctctctgacggccgcggggattgggcgagagtggggaggggcggcaaagcaaggcgaggagccatttccgcccgtggcctaggcggggcttccttctggacgccacctcacaacgtgtgttgctttccgctcctcggaacatccgggagagttgacttccggcggcttgtgggagtgctggttctgtcctccttgcgggtgcggagatggttgtcttggttacgggtcctaacggtcccctgccttgaaatcccttgttgagggcctgcaaccttgtgcttccgaccggagacgcctttggtccctcggtgtctgcactggctgctggtcaaggcttcagtgtggagtaattgacactttcgaggtaacttgcgactatcatcgctttctttcccgcgtggggcaaggaatcccccgagctgccaagtttggggcttaattttcacgccgagtgtataggcagtccccgtctcgggccctttgtaatcgaggagagaatttgtctttgaattcactttttcttacctatttcccttcaaaaagaaggagggaggccgatcttagtatagttctcgctgtttcccctccacacacctttccttatcattcagtttagaaaaactgaaatatttaatagcataatttgttatatcatgaggtattaaaacaaggtagttgctaacattcttatgagagagttagaagtaagttctatttagaatttcttgaatttttcttatatcctgttgttttcattctgctatctataaaaaatgtttttgtccccgttttccctatttaaaacatcttcaatgatgcctcattgcctgtagaataaaatccaaccctattttgacatttaaggccttccagtcttgatcgttaagggcgtgtgtgtgtgtgtgtgtgtgtgtgtgtgtgtttgtgtttgtgttgggggggcggtgaaaggagtaactattccaagacttggctttgtttttttacttccacttacgtatcattaataactgcatgatttctcctttttaccatgcctgtccaaatctttaaagattctaagtgctacctctgtgtaacgtttccctgaccaactcagacgtgatttctgttatctttgagcatgtgttggttttagtggtgccattcttgattataatgggcttttttcttcatcttgtacatttctttgtttcctccaagtaagattcctccccgcaggaactgtttttttaagtttctcgaaggctgacttcatattaggaattaatgtgtttgatttgagcattaacttaactgcaataatctgttctagatttgggatgcactaaattgcctaatatttatttaaggaatccttagtctctctttaatacagtccatgatttctgtagttaattttatagtacatttgaattaatgttttttaacctacagaatattaaaatcaaattagagaagaaaactgatccataataataaaaatgtctcgaaaaatttcaaaggagtcaaaaaaagtgaacatctctagttctctggaatctgaagatattagtttagaaacaacagttcctacggatgatatttcctcatcagaagagcgagagggcaaagtcagaatcaccaggcagctaattgaacgaaaagaactacttcataatattcagttactaaaaattgagctatcccagaaaactatgatgatcgacaatttgaaagtggattatcttacaaaggtaagatcaggtttaaattttgtgttctatatgctttattgtcttcaaacggcaggtaaataagaattaaatacacacattatctgaacttgaaatgatacatttatatttcttgacaagtacagcctttaaataattttggtgttcatagaagtagagaatagaatggtggttaccaagggctggcatggttaggggtgaaggagggttggggagatgttggtcaaaggatacataattacagttgaataggaggaatacattcaagagatctattggacagcatggtggctatagttaatgacattgtaatcttggaaaacattgtgtttttgaaaaacacagcagatgttaagtgttctcattactaaaataactatgtgaggtaaaacattttttaattagcta

SEQ ID NO: 917198 - DNA, 4001 bp, Homo sapiens
aaaaaaatcccttaaattagcatgtaacttataatcaatggtgtatcatagttcaatgacaggattaaaaaaaattttggtgataccaaaaaaaagtacatcttacattggagagcatttggtgaaatgcagcttcattttctaactttctaaagtgagtgtaggagtgcttctcatcttgcctcccaccccaccgcccccgccacctttggcagtgtctggagacatttttggctgtatcaacttgcggcgaggaatatgctgctggcatctaacaggtagaggcgagagatgctgctaaacatcctctaatacacaggacaacccccgacaacaaagaattagccaggtcaaaatgtgaatagtacagagattgagaaacccctacgtagagaaacaatacctatttgggtatataataggctttattatgtttgattttaaataaatcttttacagtgtatagtgcaacttaatgtatagcaactttttccaaaccttggcttgtacagaatagcaactcttgagacatattctaagctctcctcatcacccctccccaactccttctgctagatgccccagggaaataaaatacagcaatgctcctggtcaaaatctgaaagccagaatgtctcagagagattcgtgaccttaaaccaattaggttagttaatggcaagtccaggactgaaacccagacccccagatttccgcaatctcactcagcctgggagacagctgctcccttcccgggctaaattggctaacacagtttggtaccttaagaggaaatgtgccctacctatatgagctgggtgacttagcaagagtttagcatttagtattcacgctttaacacccgggacccacccagctctcaccccactttatgagaatgtaggttgactctgtaagaccccttagctctgtggggaattggatttatgcaaaaaataatagtgattcatgaatgtgaaggaactttaaataaatgtagatgatttcatcatacaaaaggcagaagggacttagtaagtgtatttaaggctctggaggaagcgttattaatttggaaagtgggtggggggagctgtcctctatccctacaagctgcacgtgtggaaagggcctttctagcgcaggaagctgatttatgtgagagaggaaggagttccagggggaggttttggcaaggcagtccccacatctcggttgtgccagccaggcgggcctcaggtgggtctggggctccctgcccctcctgctgagtccccagagtgtcccccgcccccttccttctcccactggggctgaatcacagtgggcagcagtgtttgggatcctgcgatccacccatcgccatcccagcagccccacccttggaggatgggaggttaccctgcacgccagaggggatggcgggggccagactcaccttcaggtgaatgggaaaggaccgctcctgctggaggggccccagcagcgtctgctccacgctgaccagctccgaagtcgagtccaccacgcgggccagcgcgctgcgcatcgccatctgggccagggtgcagggcccgcggtcccgggggaagggcagcaactcggcgcccccctcagcgcctcgcactacctcctcctctggggagttcgcccgcgccgcggtccgccgactcctggtccccacgcccccgccccgctcctcgcgcccgggccccggccgggcccgcggcgggcctgagcgacgggctggagcggtggacacgtggtctgggtcccgcgggttcccgggggcgactggaccgtccccccagccccactcctgctgcagcagctgcaaggtctgcagagccaccatttggtggctgatggaggccactaagggcgcagggctggccatcgcctccgctggcggcccggcgcgctccgcgtgcaggtggagcagcagcgagggaggcgggggcgttggggtcgccaaggtcacattttctaacccgcggctcctcggcctctgggtctcacagcgtgtgtggtcggccccgcccccggctctgaatcggtgacccgtgctggcctctgccttcgcctgaagtccgaatcaggcgtgttctgacccaaagctgcctgaagcgctgctcggtgtgcacttgaaaatcagcgaaatgctgagcgttgcttcttccctctctccagggctttgatgagaaaacgtgctgctttgtgcgggcgcatccatcggcggggataccccgcccccacctccttcgaaggatgcctgccaatgaccactgaggtctgggaggtgggggtgcaaaagacccactctagggcaaaagtacgaagggctctagaaaaacttgcaaaaggaagactgtgcctttcccaacccgaggggaattttcagaaacttgttgaagcagccttcaaggccttgcatcccccaaacaaaagaaggaggagttgtgtatctggaagttctgctcttctctgctttgctgggtgccacttgagcaccgagagcctggtggctgaactagcatcagcaagcctcaaggcccaggcctggcactgcccagaaaagcctaaatgtttttttgtgacactcccaaaagacttaggcagcaaggttgaagttaatccttttatgagccatgaacttagggacagctgtacaaatagttgctgtttttaattaaacccaacatggctacttccttaacttagaaaaaagcgactagcaatgttatgctttgatagattggaaaccatgggtgtgtgatcacacttaagaaaatagaagatatttgagaggagtggtatggaaaaccagtccggagcagcattgttcctgcttgctttctgcaaggaaaaccactagacaacccaacagcccagtaaagccagggcaatggtgcatgcccacgacagacaggtgggccctggcagacctgaggatggaattgcattactcctttgggagccagactgcacccttggtgctgtgcagatctggagaggcttttgagtgaaaaggccacactggttagtctgtgagcacaaaaggatcatcagaagagatatggagagggatgttgggtcctttaaggtttccttaaccctgggatagtatgaccccatataatcctcccaacttgccagcaaaggttccttctccttcccagtgctttcttcgcctatgaaaacgaatctgaatgccaaggtaaagaaaacctttcttaaacaaaaacgagtatgttcacactaattataactaagtaaaaatgcacgtctgtgcattgacagagaggaaattactttggagggaagtaaatagtttaatgttgattagatttttttgccatgaagttacttaagttcataataaaaaatagaaagaaaaaaattttctttttaaaaaaagtcttcaaatgttgaaatatattaggttcagcagagactaaccagcaatagcaaaaatgaacccctaattttcacagagcatgtcagatctctagggctgcctctctttccagatacacaggaaattcagtttcatgggctaacccttccactatcaaatggctgactgcaaaactttcttgacagttggaattgcagccaagagcagaattgaaatcactagacacaggctgacctgaggccccactcttctacataccacactgagtcagagccatgagaccaactgaacctcagggggcatgacagaagggtgccagaaaaccttggggcctgagggatggcacatgctgcttaaattgctgcctgctttttctagtattcttaggaagccctggatcatctggcaactgagtgttttgtctgttttggctgtgggtcgcactgtgttttgctatgatctcaaaatggcttgtgttccaaagctagagatatgagagcctaactcaggaaaaattttcatagtctatttagatgagtcaatagcatagcagatctacctttggtctaaaacacctccgtag

SEQ ID NO: 917199 - DNA, 4001 bp, Homo sapiens
tacactgaatactatatccagaaatccttatttctaaggagtcagcaagtcataagggaaaaagtgtagcatttggaatcgtagatctgccacttaccagggatgatcctggaccagttacttaaaactttctaaatctctactgcctcatttttttttctttgttggagacagggtctagctctgtctctcaggctggagtgcagtggcgaaatcatagctcactataacctcaactcctgggctcaagtgattctcccgacccagcctcccaagcagctaggactacaggctcacaccaccacacccagctaattttttttttttttttttagcagagatggggtctcctgtgttgcccaggctgtcctccaaactcatggcctcaagtgatcctcctgcctgggcttcctaaagcgctgggattacaagcctaaaccaccacttgggcaatatttcatattgaatgttgaaaattaccatgcaactgtgcatatatcaggttaaagaaaatacatggttaaaatcaaacccacctgtttctcttcagttgtttaatatggctacaaaaaacttaaaaatatgccggacgcggtggctcacgcctgtaatcccagcactttgggaggccgaggcgggcggatcacgaggtaagcagatcgagaccatcctggctaacacggtgaaacccccgtctctactaaaaatacaaaaaattagccgggagtggtggcaggcgcctgtagtcccagctacttgggaggctgaggcaggagaatggcctgaaaccgggaggcggagcttgcagtgagccgagatcgcgccactgcactccagcctgggcgacagagcgagactccgtctcaaaaaaaaaaaaaaaaaaaaaaaacgtaaaaatacgtatgtggctcacaatatgcttctgttggacagttttctgttagacccttcctttttccagctctacagttcatcctgaatacaccacttggagtttccaactgggccctgtttctgtgccggagactttggagacagtagtcctggtacccgaaacactttttccccttctccttgctgaatggactgtttttattcattcagatcttaatttttaactacagctttctccaagaagcgtccctgatcccaccacgtcccctgcaagacgtttttagggcctcctatgagataggaaaatccacatacagcacttattttactgtatttgcaattgcctgttttctggtttgtgtcccagacaagactggaagctccttgaggagacagatcctcagaactgctccgtcttccacgcccaggcgtcaaagcccagcacaaagcggtctctccactgaacaagtgagcgctagggcacagaccgtgagcgaatgcgggggagtacaaaggttcaagggtgaggcggtagagggggctgaagcagaaactacaagggagccagagaggggtgggggccgctggcaggactcaccagtctctgctggtcgacgtcggcgtctggccgtttggccgagggctgcaagtactcagcgtagcgcaaactctcgccaactggagcgatgacaccacgggcagccatggcaaggcggcccggagactcaaggcgccgcggcagtgactacgaggcggccgtagggacaaactagttagcgcggtttcttctcgcagatccagtggactctgcgctcgttgtgctattaaaggcgaggttcccggaagatacccttctcacccgagctgggtaacgtgtcccgtgcaagcacggggtcacactccgaaaggagccaagggcactgggacgttcttgaatcacactcacaggcgcaaagccaacgcggaccctcagggagctttatatacttgggcctggtccctccccaggccgccgtaagggactgggcttaagccctgcgaactgatgttggtcgaatcagatgactgcccagtaagctcggagtctagctgtagtgcctgagggtgggcttgcctgagctttcctgacccccttccgggcagcctttcttcccactctcaacttctgttcgcacttctgtttaatgccacagttctaccaccccgggagagaaattaaagaggcaatttgcttactccacccccaagtaaatggctgtatttaaggtgaaattacacagaagaaagttgtggccgggtgcggtggctcacgctgtaatcccagcactttgggagaccgaggcgggtggatcacaccagcttggccgacatggtgaaacctcgtctctactaaaaatacaaagattagctgggtgtggtggtgcgtccctgtaatcccagctactcaggagcctgaggcaggggaaaaaaagttgtgagcaagtaggtaaatcttactctccctcaaatgagtttgtgctgatttgtatatataaaagcccattttattattaagcttttttttttttttgagatggagtctcgctctgttgcccaggctgagtgcagtggcgcaatctctggctcactgcaccctctgcctcccgagtacctgggattaaaggcacgtgccaccacacctggctaatttgtgtatttttagtagagacgaggtttcaccatgttggccaggctggtctcaaactcctgacctcaggtgatccgcccgcttcagcctcccaaagtgctgagattacaggcgtgagtcaccgcgcctggcctccatcaagtttttagagcaaaaattaaccagcagttgaagcgtatggtgttttccaacttctgtaccaacgtggcagctctttggctccttataccctttgcaaaatcagctgacaggaagaaaaagctttattttttttctattcctgaatttaaagttttgagggtctattaatttgttcacttagttaatattattagcatgtctaagaagttaggtcctagaaatttacaatcttgtagggaagataacactgacacagaataatagtacataccagaacatgagcacatgcattgcatagcagtataaagagaactggactgggaattaaaccgccattgcaaaattacaactgagaaagagatctgacctaatcaacaccatcttgcttctaacctccaagctgtcttgtacattcctggccgtaggccaaactaactttgggaggaatgtaattcatagtttatagtttgaaacaaagatgataaaagccctttcccaaaacaaacctccttcttgcctggggactagactgcctttgtaggactaacaaattagccacaagatcagaaattatgacttaggagtcatgcagctggaggctacaagattctgaccctccccaaattgctgctggagctaacatcactattgtaaaaactaccaccagtgcttgagatattttgcagaccccgcacttgatgaatcagctggcatcacccagatcgataaactggctcatctgatctcgtggcccccacccaggaactgataacgcaagacaacttggactccctgtgatttcatctttgacctgaccaatcagcactcccagctcactggcttccccctactcaccgagttgtccttaaaaattctgatccccagctgggcgcggtggctcatgcctgtaatcccagcactttgggaggccgaaggtgggtgcatcatgaggtcaagagagtgagaccatcctggccaacatggtgaaatcccatctctactaaaaatacaaaaattagctgggcgtggtgggtgcctgtagtcccagctactcgggaggctgaggcaggagaatcgcttgaacctgggaggcagaggttgcagtgagcagagatcgcgccactgcactccagcctgaggacagagtgagactccgtctcaaaaaaataataataataaataaataaataaaaaattctgatccctgaatgctctgggagactgatttgagtaataatgaaactccagtctcctgcacagtcagctctgcatgaattac

SEQ ID NO: 917200 - DNA, 4001 bp, Homo sapiens
caactacttaacttctgtctccagcgtgcacacaaaatgaactttagtaaaacctttggagcctcagttccctggtctgtaaagtaggaatgaataccacacgctttcgtgaataagatatggcttacagaaaggctcctttctttcctttttctgttacctgtactaagtccctgctattttacacagacaatggtcctaaagaagacactctggcactcctctgagaaatgtcaccagtgcctcctacacagaaaagctctcaaatgtggttttcttatggaaaataccacaggagggaaatgaagagttaagagtccttacagactcatatacagaacagcaattctaaaaagtagtgggaaaagcaatcattcaaaattgtgcatctctgtaacttaaaaaaaaaaatcaccattaaacagaacataggcaactttctcttaagtgtccaaaataaattattaatgataactggagataaatactacagatgagggatggtggggtgcgggggcaggaggaatgaagcttttgaaaatgcaaaagaactagaatatatgacccatattaaagtggtacagaccttcaaattccaatcccctagatttttctgggggcagcctcactgtcaaattctttgtcccaatgttgccacactacgtgttctgatttggggttcaaaaaatatggttaccaggggaagcaaaagcaaaagcccattgctatgggtgacacctaaaaactggggagtactactttaaaaaaaaaagttgagaactttcagaagaattcactataaacaattcccaatttttagttcctcgctccctttgaatggaatactcaaaggtttaatttgacctccttgacaactagccctttttatggggatgaaaatagatcagtgcatgtgatgtgtcattacactcgaatatttcgcacagtaaccgcgccagaagcattcgttaaatcggcactatcaactttaattcttactcctccccgctgccatctaagataggacagccctctattttcgctattctggagtagccaacattccagtctgcaggactgaagtgaaatttaatcgttcgtatctttttaagggaacctttttacagcgaacttggaaaagtaatgccagccatacgttgaatgacaccatgttgggagttgtaaaaccacaaactcagtgcctggccgtccgggagatggaattccaacagcggctcctcattgcaccaaactaacaatttctctacacgacagtgcatcttaatggggatggttacacactttttaaatagtcaacactgtcccctccaactcccagccggacatgacactccttccccacccaagaactccagagcgaaggaagtcttttggccaccttagtgcctcctcccagccagcaccaatgactgacagtgtccccaggcgcccagcgagggtcccaagcgaggccaggacccaaaggctgcccaagtctccgcgtcccaggacttcctgaagtcgtagcccggtgcccccgcaccccgcctcctccgactcctgcggcccggttccttagtccaaacccgctgtcccggccccgcggcccgccagtcccctcgattcttccccagacaaacccggaaccgggcgcgggctcaggcccaagccaggccgcgggctcccccagcgctcgccccacctcccgagccgctccgggacaggcgcccgggcgcagacgggaaagcgcggggggcctggtccgggagcccacttcctggccggggcagggcaggactcaccttcgtactgcagatccaccaggactagcaggaaggggaataccgagcccagccggctggtcacggagccgggggccaccatgtccgagggctcgcgagtgaagaggaggaaaggtgtgtggcccaccagcacgcgccggcgctccggcagcagctgcgcccgcccgccgtcggctctcgctcaggcctcagtggctctggagcccagcagaggaaggcagcggtgggcggggcccgggcgacgctacgccccagagcgccgccgccatccaatcgccttctttctggcggctttcctcccgggctcgccggggtcgtggttcgcgctgataggctgcggaggccgccgccccgccccgtccctgataggataacgtggaagcacgagacgaggctgcgcccgccggtcgcagagctgtcagcaagctccaaaccgcggctgccgcccggagggaagcagacggggagtcggtggcggccgccgagtccgcatgcgcaggctgcaaaggcccttttgggccggtcccgccgcgctaggttggcgagtgggactatttgatcctttccaggttcgccagcgtggtgttacgagaggaaagcgcagccgcagcgtacgaatgggaaggccaaacacggtcccggggagtctgagggaagctgcagggcgcctggaattggggtctcgagtgagccggtaaaaaccgcctcccgctgagcgtcccggaacaaatactgtctgaactgagccgtaagcaagaaacggtcaggagaagctggggcgatctgatgattagaacatttcagggactaccagagagaagtgcgtaattgctctaaggcaggtaggtaattggcctggaaacttgggaacgccccgccccccaccccgactttcagcaaaccaccgtgcccaggaaaaagagcgattgtggaagaccctgtgaagaagagaccaggaaggcactgtggcttaagagagcaaggcgttcctgaatgcagccaacatcaactggtaaacaaaaaactgtgagaacggatcctgaatcttgcgcttaccaggggaaattcaggagagatatgaacctgagcaagatgaggttgaagttactcaatgcggcattaagcctgttcacggccacttcctccggcgtcaccaacacacacactgtacaccagcagtatttttacacggggtatgtgtgttaagtactatcaggtggataattattacttcacctgtatttgctgccttgataccattagagaaactcatgaattataaatagcatagtgaatttgtgattccctgaagatatactaaggtggacttttaaaaaggcttctattccaaagggaactaatatggaggaaatggtttcgagaaagaaaaaagaaaaaacggagtccttgattagttgtggggaaggcaacataatgtaatgtgaagaataaaggagtcagatccaggaaaccccataactattatgtaagttatcttcatctgtaaagtggttaggatcctgatagtctcaaaggtttgttttgaggtttcatgaagcagataaatattcttgtaaattgtagaatgttataccagtgttactcattattctaacaagagcagagtagtgaagagaggctccttcagaaattccttgggatttttttttttttggcttctgtttttttatatcacaaggtagtgtctctgaaaaatggtagatgatttcaatgtccacaaatatgcaggtgtagacattcaattgaggtactgtacccaaggcagccagcaaaatgctgaacatagaaaataactttgtaaacaaaatgcaatatttctagacagtgagttatcaccagtgtgctgcctatgaccctggccttaaggaaaaagtagcagagctgaagaagttctaaggatggaaattaaaaattattaaggagataatagacttcgtgttataggaaataaaaatagcaagggtcttcaatggtgagtgattttgagattaattacataactatgaattctgtaatattagaactaagctttacaaagcattccttaaaaaaagataattttacaacaaaggtaacattagacagaaaaaaatgtacaaaactaaaattaagtgattaatgcttgggaatgtttcctccaatgttcatctagtcatggttttcacgaatcactcttgc

SEQ ID NO: 917201 - DNA, 4001 bp, Homo sapiens
ccctgctggaagaagagaaacactgcccgataagaaaaaacttctggtatcactgttggcttcctcactccctcacccctctctgcaggtgcgcagagctgagatcacactgccacaagctgctgggccctgacaagtgttcccaccaaatgcagctgtagccagcacagctttatccattgcagtggaaaaagacccccagaggaactgcctggagtgagatttacctaaacaaatagctaggacataaatggcaaatttcttgagcactagaaagagaagtaagtttaagaagtcacttgtgtgcttaaaaaaaaaaaattgcatagcatctttctacagtgtattcagtcctgtagacaaatatttctacacagctggagaatcactgacagaagatttttaagaatattcacaagggaacctaaaccacacaacttcctccaagaaatcctaagttacatcagctgctttaagcagtgaaatccatacagcctgtgagcaacccaacagagaagtgggctattatattggcagcaaggaatccagaacaatgaattacatttctaaacaatgtagcagagggtgaagaaaagaaacctaaatctctaagatgaaaatctgcagtgaaaaagaccatgatattttactaacttttcagttcagggttagcaatatagttttgaaggcaataaaatatagggcagtctcacgagtcacaaagaaagcaactcagttcaaatcaaatctgttataggaaagtttaagttcagattcttagacattaattgaaaattaagtaaattagtaagcaaacacttcatggtaacatcaactgaacctccacgttaaagaaaaaaaaaaatcactaaataaaatcactacatatcagtttaacaatctctttagcagataatttgaaaggctcaattgtcccccctctgcagggcatgttggtggttttgtgcagcttgcttaaaaaattatgtgcctttattgtactgaagaaattccgagagaagcacaacctactcactgatgataacaacacaaccatttttcacattcctcccctccaaagtccaccaaagcacttggctttagacaaatgctgagagtttagctgatgttaagaacagaaacgtttctatcagctggttcacagtttaggttcttccctactttattcaaggcaaacctcctggtaaaatgagtgagaagaacatatgtgattttatcctttctaaactatgtaatatttccaacagttatgttccttaaaacccccaatgggacctgcctcattttctcaatagcataaataacgtagaaaaggttttaattttgcaaagcacatcttttttcaaccctatagttgcaattaaaatatgcttcctgggtttacatttgcaaacactgcagctaggtgggacataattgtgaacaatacataattgtcccatacaaagaaacctcccagaaaccatattcacccacaaaatgtcaacatttctttcttcacaaagaagaatcaaaggggaatcgaagtcatattacagggaaagagtggagttcacaagggacaagcagagcaagttttgaaatcaaagacaggcaacaggcgtcaaccccgtccacacgcacaataagaacccagcattgggtagacacagcaacactttgtacgagaccctcttaccggcacagggcccgggctctctgcttccacttcgccctgagctgcatccttgtattgcaggggggactcaatcaccagttcctttttgacacttctactacttgtcctgcatttatcagcctgcattctcggctgaaaacgcaagtcagaaagtctgcaactggaacagctgcgagtccctggccgtgcaaggcacaggcatgccagtggtccaaggaaggaaaggaaactggcttcccaggcacaagtggtcagccccgctggctgggtctgcagagcctgtggggtgggaaggcatgacagcaaaggccagcctccaggggtgttactactccatgcaaaaggggaggctcctacttgctggccaaaggaaaacaaactccaagctgaacaatacacagtgtactgcctctctgataaagaccggctttattgtgtctgttccacacagcgtgggccaaatcaatcggaatcaaaatactgcagtgtttaaaagaaaaccagtcacagttagactccttcataattaccttaaatctgaagctcgtggagcttaagagacagcaaggttgtctgcttgttctaaaattcttccagttttggaatgctttcatttgtgttatggttaaaaaccaaatgcctggctgatgattaaagcagggaagagctaccagcaagtatgttcccatagcctgcacctcgtggatacaggtggaggaaatgagtttcaccccgcatgacagaccacagcatgaaacacttaatttatgtactatttgatgccagaaagatgaggtcatcaaaacattttcatgggataccacatatcatagtaaatgcatttattaaacagaatattactttaagtccagatgtgtgggtatcagaaggtacccccagtactaggtgctgagaggatcatactaaaagtataaggtagagtatctctcccttcaaagaacttcacatctagctgggaaggcaagaagagcagacatcataaatgacaaattaataaaattaagagagagatgcacaaaagcacgggaaaatagctggatcaccaacctacggttcaatggtggtttagtagcacccaaaatatgtgttcctaaaagtctgtatttttattatttcctcacatttaacagtggagtcttttttacctcttgggaaaaattaaaacagaggtattaagggatttgtctaaaagttatgtagaaatgaacattaaaggggggatcaaatattactctgtacttcatggataccgcagagcttttcctagttactctgagtatttcctggacatcagggaagatttagtaacagtagacaacaagcagcagcagcagcagcagccgtagcagtagcagtaacagcagtagcagcagcaatagtagtagtagtagtagtagtagtagtagtagtagtagtagtagtagtagcagcagcggcggcagcagcagcagcagtattcagtcagtcaacaacgagagtagttatcatgtagcaacaataggtgccagaggaactctacccagggaaataacataaactattatacaagtcacaggtaaaagtctcccactttccagacaaaggaacgcagccaggagggctcagaggaggcagtggggagaactgagatgccacccagtcctcgcacagccgcctccctctcctagcacctgctgcagctgctctacttcaagagtgaagctgaagctgggtctctgccacttgaacaccaggaacccttctgagtgtgaatatcaattatgtaacgatctcaaaggatcaatgagtccatcaaataaattaatggcttctataattttttttaaactacccaatctctcaaccttgggtagtctttcagggttaatagaagtccccctaccaaatctgtgttccaaaataatattatctataaattttaaaaatctttctttgtaaagttacaacagaaaaaacccagtaagaaaaaactctcacttacctatagagtcgaaattatagtaaagtaaaaacttaggaatgtcctacaaatcaaagaaaggatgaagccacaagcacaaaacagactaactgagccttagtaaaggacagcccaaccaacaactcagaaacctttttgagatggttcaggaagttctaaatagtccagttcttcctcaaatccccatcgccattaagccatcagaatgtctgggcattaataagagaaatgctattctatttgttattgttgttgtttgagacagggtcttgctctgtagtccaggctgagtgcaggggc

SEQ ID NO: 917202 - DNA, 4001 bp, Homo sapiens
aagtgaccacagacagacgagactaagagttaagacaacagccgggcatctggctcttcatgcttaagggtgtccagggaaaacggatgtactactaaagtatcatgagataacacagttggcagcctgtcacacgtgggaatggacactcctaggtcaccattagtaggccatcctccgatgggaagggcagatattcggggactactgcacatcagcagtgttgtgtctgcaccagcactcctgggctccatctacacggcttattaaaccagtacctgcagcactttggaaatcatggcacactggtacactttatttactcttcttctgcctcaaatccctgatgaccacggcaggccccagataaaggaaccaacttctgtgtgagaacagaaaagatgccaaagaagttgcaggctttatccttaacatgcactggcaaaactcaggaagatgcaggaagccacacagaagttagctggttatggaagagatggccaggttctggtctattcccaactcctgctctactccttacctaatcgacttccctaaaatagaaaaattaaatccttgtttactatggatcaaactggagttggagaaatttggagttggcagagctagcaatcgagagaaaattcaaactgagcaaactggatatagaaatcagcgaagcttcatctccaatctccacaaacgtcattcacgcaattctgtgtctgcccaggaagggcatcgatctgccaccaaaatgatgcatccgcccctgtgttaaggggcccggcactctgccccgacaatcccccacagggcccagacaaccacttccaaggcccatcttcttgcactgttccaacaaacacaagtcacacccacccacaaacaagcccgtttcaagaaaacaaatgccggcggcaacgcaaggagctgctaaaagtttccagctgccctgcagagctcgctcctgctcaaacgtcgctccactcccgcaccatccaggtgaatcgggttgtagtgcgtttccaaatacagcaggaccggcgctggctgtgaaaaagttaatcgaaaacttcatcttcctcacacccagaggcctattctctaaagacgttctgccacgggaagattcgttttgggctgatggctttgcttacttagaacccccaaacgtcacaggaatttgcaccaatactaaattagcgagggttcccatcatgccccccaagccttcctaaaaggcggccaaacttcaggataccggcttggaggtggggggcgcaggagaggatgccgaagtccttccctcctggagttcagccaactcaaagggttagcaggggcatctcccaccctgagcgcagactggatgaggaagcccccacctcaattcccctgcgcccctccaaaacatggaaggagagggaggccgggggagggatacgggggagggatgcgggggaggggggagagtgtaatttcccagttgacagaaagcaggtaaattgggagagagcggggtgaaaagagtgacagggcgacatcactctgcggaaatttcccaggaggaaggggacagcgatggggacaggatcttgggtggcggggaggggtctgggagttgcagcccctccaggaccttctcttctcccctgtccaactccctcccgccggccccacctcttgattccgcggacccagcagggtcggccgctctgcctcagccctgccgactaagaggcgcccggcccggggcccgcagctgcctgcgcccccgccatcctcccccggcccgcggtcgtcccgcactcaccaggagcacggagccgcgcaccacctcagacacgctctgccgcagctcggccgccgtgcccggcttactcagcgcccgggtgaacttccgagtctccgccgaggcggggagcagcggcggctgcgacatcctcctgcccccgccgcctccgcctccgcctgctcccgcggcccggcccggccgcgcggccgccaggtgcgccctcggcgcccggcccgctccgcccgccgctcccggcgccgccgccgcctgctccccccgctgctcgccgcgagtccggccgccgcagcccaggccgcgccctctgcaccgtgtcacgccccaaggcgcccccctcggcgtccgcggccccccgcgatcgcagcagcgcccgggctcgctccgggcgaccgtgcgtgtggcggcggcggctcccccatgccaccagcctccctcggcgaccactcgccgggccgcctcctcggggcggggtgtccggcgcggcgcgggcggggcggggcgcccggacggcggaggaggggccgccgcggcgggacggcgggccaggcaggtcggcgcggcccggcgctggagctaggcggccggactggcaggggcggcgtgccgcgcgggaccctcactggggaaggtggggggtcggggccgcctccgccccgggccgcacgtccgaagaccggaggaggggactgcgcacgccaccaagagggcgcacagccgaggctggacgatgcgcggtttcggagcagggtttcctgcccagggagcccggctgcgctcgaggggaccccgaagtcaccggcagggtcggagctcggtgcaccacgccccccctctgcgcccggggcctctgcggggacagaggtctcaggaaagtagcctttatttatgtggcaccgatcggaacccgcggccggccaggcggacctggacggagcgtccctgctcggaacctggcgcggggcgccgcgcgctcgtgtggcgcctcggcctccccaccgttcagtccccggaggcacggagctcgcggcgggacgatgacggttgggccgggccaggcgtgggagactcccagactccggcccgccgggacggccagctgcgtcaccttggacgtgggcaatacttcggagcctcggttatgtcgcctgtaacctgaggacaacggcctggaaggggctcaggtgacacggcggccctcactggggccgatttagccggtctgccgcccctccgcgccggaccgccaggcggggtaccagggaaactgcgatgcgccggcttgcgagcccaccgtgacgcagagctggcggccgctagcgacagccaccctgtgagggactttccccccaataccctaaccgctttcctgtccctaagggcccgctcccgccccggctccgtttctgtctctctgaggaagcccggcgcagcctaaccctcacagggccgcggagagggcgcgccaggcggggatttgcgccaggcccgcggcgcatgctcagtggttggggactgggcgggtaccccgggcggggagcctgactgaacggcggctctgctgattggtcgggctgctcacgccacgcccgttgccttccgatggacagttccttacctgccgggtcggcctccgcagagagtggtggtcttgaaaacccagttttgggagaatacctgccgcgcctcccgcccaaatacccagaggtttcatagccgccatcgctgcggtggaggaggccgcctgttgcgtcccaccccaccagaaagcctaacactggcctgaagcgtaatcttaaagtggtaggggaaaataccgatctagcgcagagagcaaaacacctccgttctgggtttaatgggcaggtctggaggtgaggtatgccgtccgcactcaataattacttgcaggatcggattgtttctccagtgggtggggactgcaggatgtagcattgagtgagcctggcagattgaaagataaaacaagggtgatgataaaaacaattacacactaacccatttcctcctccgtgaaatgagggaatggcccagacattttccagacctcttctgtcctaagagtggagctgggtgacagagcaggtgcaagccggcctttccctgcctccccggggaacgcactctgttcggtgagagcaactcagctcgcattgactcctttcag

SEQ ID NO: 917203 - DNA, 4001 bp, Homo sapiens
accgaattgtgtccttaaagttaagggtacatttttattatatctcaataaagttgttttttaaatgaaatttgcagttaatcatatttgatggcaggctttctagatttctgacacccaagttgctttttaaatggagtctttcttcctttgtaggttagcagcctaaatataacattttgataaaagtacgaaccaaagaactccccaaaatatgtaatacttcacctgtctttccaaaaggatacatactcaaaatgctgaaggtagaaacagatggagggggattttagccatcagctttaccaacaagttttacagggccatggtatttaccttacaaacttgggtcggggctgcattctgggctttggagaggctaaaatatttctagcagcgacttgtagacctcaggcctctcatttctatgggtcttctgggggcctccagtggttaccacagagatcaataagctgaggaaaagccagacattccccaatccaccggggaattcctgcttggaccagacatcaggaatttttttttctttcctaacatccaaatatgtgaacagaagaaaggaaaatacaattcagagtaactggaagcaaagttgtaatatcaaatatatttagcactttcaagatattgttaactagaaataaacccatgcaaaaacatccaggaaataaaacacgcacttcatatggtttcaaataaaccatatgtccaagttaattggcctttattccctgcaaccaggcataaaaagtgctaaagacataaatagtttcaaagtttgattctgtcacttacttgctccctgatctagaacaaattgtcagctctaagacttagcttcctccatctgtttaagagcatcaagacaccgacctggcaggtctgtagattctggactccatccactgggctgcaggatcagcgggaacaagagctgtggtctctcttgctcaagtatacgtccctagaacctagcagaggacaggcacggagaaggcgttcagaatttgctgaatggacacgtgaatgaagaacgatcgaatgacttaggcgcttagttaaggaaacatcagctcctggccctttatccctcctatttttgctgcctctggcctgttagaacgattaacccatgatctgggccaagggcttcagagctgaacgtgggggtggcccgcgcgcccccgctgagatctgggcgcagaggcctgcgggcccgaggtacccatctccgttggccgccacactccatcgtggggcgtcgtgccgctgaccacccctttccccttgcgtggatctcggtcacaagatggccggaacaggaaagaagggggcatgctttcccgttccctccctcccccatcccgggcagggcccccagccttgcgcggcgcctcaagtcccaggcgcatggcaccgccgggcagccgaaccagcagacaaaagccgagagacgcgggttccaggggaacctcggcgcccttccttggaaggcaaacaggcagtgggggcagcggcggctactccagctggatctgcagaggctcggctcgcagcctggagaggcaggagggccggcttcgcgggtatcgggatgccccgtcagccacctcctgtgggcgcctggcgcatccccggtctcggctcaccccagctgcgcgctcctgggcgggtgccgggcgctgcaggcgggcgggggcgacacaggggacccagaccccagggtcgctgctgacgcgggccgggcccgcggaggccgaggagcagcaaagcggagagaggcaggccggctccttcttgcagggcgcaggatgaaacgtgtctggtctgggcaagttgtggcgaggcgggtcgactggcgccgctctagggccttccagactccggaccacggacgactcaggataccccacccccctcccgccccctcccctccgcgatctccctccggcctcttccctcggtgtcccggctcctctggcaactgggcgggaccgcgagcgtctagaccgcagcgctaaaatgcgctcagccaatccggcagctggcgcagacacgtggttcgggggcgcgctccgttgctggccctggatgctaaccctaggaaggcttttcaaagagaaaccagattcgctcctacccggttgttggtctggccctcagcaagctaatttcccagaggagcttcaggtgaattatcttccaaaaagagatgcgttttaatcgcagaagtctgcagatgcgaaggaccttgaaaaggctatctaatgtggccctgcatttgagtgacgtggaaaaccgagattagggacttttcaccaaagccctctaggatttaaacccacgtaggtttctgcgtctctttccgttatgcccacttcaggatgaaaggcacggatctttgttggtagaaagttaggcactgaattacaggagatgtgggtccggagtagtgtgctcatttatgtaacctaaaattggaacacgtgggacaaaagtcagtatttttaagtaacaagtaatccagaacgtatgtatataccatcatgagaaatgaaggcatcttttgcaaaacctaagtgtctaatgcagctatatatatatatatatataatatatatatatatgtttttaaattagagaggagtagctgcagaacttttactggaccaacatgccgttgtaaaagtgcctttccttgtgcttctccctgacagaatcaactttgtaccatactttagcacaaggcttcaaacatagcaacagctaaatatgtatttatgttgaattccttgctttagttttatttgaagccataaggccaagatgaccatgatgggattttaaattggtctaattttaaaattattttgaaagaaaattcaagatctctataaaaatcctctaagtactatggggaaagatttctagatagaaatttcagacaataggccgagcgcagtggctgacgcctgtaatcccagcactttgggagtccgaggcgggtgtatcacgaggtcaggaaatcgagaccatcatggctaacacggtgaaacgccgtctctattaaaaatacaaaaaattagccgggcatggtggtgggcacctgtagtcccagctactcgggaggctgaggcaggagaatggcgtgaacctgggaggcggagcttgcagtgagccgagatcgcgccactgcactccagcctgggcgagagagcgaggctccgtttcaaaaaaaaaaaaaagaaaaaagaaaagaaaagaaaaagaaagaaagaaaaaaaaagaaaggaatttcagacaatatgagatagataggaccattgctctgcaaaatccggtttttgcaaactcggtagctgtctgtgtgtgtgtgtgagagagagagagagatgattgcttaattaatattatttgttgacataccatttgagttacatgtatttcccatccccactgtcagtatattaccctacaggtgtagaattggaataagaagaatcaattgactttggcatgacttagcagccatgatgcattcttgatctatgcacaaaccacttttaccaattgtataatggtatacatatttttaatgattaaggtatctctctcgtcggtcagactataagaacctcaagtattccagcattttgagcatttagtaagtcctcaaataaatatttgctttttgaagacagaaatgatcctaaagaatgaaataataatactggtgaacattaatcattttgtacagtaaataaacaaaagcattgtagctgaatttatttcaaatgattgtttctgtttctctcatttgaaaatagttattgatattacctggctaatgtcctttagtatgaaggcgataaataaagaagggcagaaatcacatgtgttgtctgattcaatacatattaattattttgcctcatattcccatttcagatacctaaccttggttttatatacatggttta

SEQ ID NO: 917204 - DNA, 4001 bp, Homo sapiens
tatgggcaccgtcaccacacctggctaatttttgtatatttagtacagacggggtttcaccatgttggccaggctggtcttgaactcctgacctcgtgatccacccgcctcagcctcccaaaatgctgggattacaggcatgagccactgtgtccgatatgttatacatttttatatatatacattctgatatgctatatacagttatacccagccaatatgttacacagttttctctcactgggcctagcaacatttttgttatgttatacattttgttatacattttttctaaccgggcctagcaatctgctttatctcccttgttctgtgggaaaccttgtgttcaagtgatagcttaaaaatcaattctcggctggtggcggtggcggtggctcacgcctgtcatcccagcactttgggaggccaaggtgggcagatcatctgatgttaggggtttgagaccagtctggccaacatagtgaaacctcatctctactaaaaacacaaaaattagctgggcgtggtgacgggcgcccgtaatcccagctactcgggaggctgaggcaggagaatagctttaacccaaggggcggaggttgcagtgagccgagatagtgccactacactccagcctgggcaacagtgttagactctgtctcaagaacaacaacaaaaaaaaagacaaaaaaaaaaaaaaagaattctataaataaaggagttgagagaaacattcactgtcccttatctctacatgttgattatcagaataaaaagaattccagcaacatcagtcatgggcacaaagccaacccgtaaacatttacagaactcgatgattacccaaaactcggcttgctttctcaatactactgactttggcttcacattagccacaggtgtgtctagagttaaacaaggtcaactttacaaaaaaaaaaaaaaacaaactgatacttgggcatagtttaaaaaaaacttaaaagtgtgtgtgtgtgtgtgcgtgcgcgtgtgtggtggggggcggggcatttcaatataaatgccttaaacacaaccttcctggctattttataaaatgggttgaatctctaaggacacatatttcctaagacctcgactgatacacagagtgcaaacttgggagccagactagactgcctcagaatcatgccagctgtgtggcactggaaagtcacctaattttgcagcgcctaccttcacctctgtaaaatggggaacaataataactaatttatggatgctgtaaagatctgaaattttaaactcagtaatgcgcctggcacacattagacacgggtgtttcgtttgtcttggcaaaggcttcgggttttgcgacaatagccttgctgcctccggagcaagcatctctccttgccccctctggggcatttaaaaatgacctcaattctactctcaattatgtccagttcaacagttacgtgcaggttacaaagccgaggaagctgaggtatcttctaaactaacatagcacgtacagaatttttttaaagtttggtggaggaatcggcagcacaaggtaagctgcgctctgttcacagacctgggaatcagaactccggccgccgcggcctccaggcgcctctcagctaacagacttcctgcagcagggggaggggcggccagctcgctgcaaaaagccgcaggaccccctcaccccgccttgccgcccccgctcccactctctgggatggggagtgcagggtctaggcgatggcacttaccagcgcgaagtgcaccagcgcgtcgtagcagagccagatgagcgccccgcggtccgccgccccctgcccgcggcccaggcgcaggcccagggcgcagcccgccgccagcagcgcggcgcacagcagcagcgaaccgccagcctcggcccccagctcccactcagcgcccatgcttcaggcttccgacgccaacggcccaggaccatgcggcagaggaaagcagggagagaaacgacggggcggggctggccgggaaggggcggagccggatggccaaggaggagcggagctgattggccaaggcggtccggggagggacggggctccccggccgggtcggggccagagcgaggattccgtgcccgcctcgcaccctggccagcctgctgagtccggtggttttgccaggtgccgcccatggaggttccgtagaaggaacgtgctcaccaacttgcgcaaccgcctcgaccaaacctgttcccaaaccgagcccaaaggattggtaatagggccacaccttttgatgttgtttcgcttttaacaaggctcaaactttaagccacaaagtgaagcctaggtagtggaaattttgccagtagaccggggcagaattttaggggcaaaaggttttaattaggctgcagcaagccttaccagggaggctgggggccaagggagttttcagccaccagccggcttaaagcctttatggcctactctgacaatctttccatttcttaaaaatccagaaaagtagaagggtgggtgagaggagcggtaagtcctattggcttggcgatagatgcgtttaacctgtggcaggccaggtttcactatcgcaggcctccatcacaactgcttcagcactgagtggttaaattaaatattaaaagctgaggccgggcgcggtggctcacgcctgtaatcccagcactttttgccaaggcgggcggatcacgaggtcaggaaatcgagaccatcctggctaacacggcgaaaccacgtctctactaaaaatacaaaaaattagccgggcgtggtgacgggcgcctgtagtcccagctactccggaggctgaggcaggagaatggcgtgaacccgggaggcggagcttgcagtgagccgagatcgcgccactgcactccagcctgggcaacagagcgagactccgtctcaaaaaacaaaaaaaaaattaaaagctgaaagagtcagtgcccatataccaaagtctggaatgtaacaaaagcccaccaagagttttgcctaggcctttcttgggccttgaagcatgacaagataactaaggaatttttaacaggacccgtttaggattaaacaagttttattgggggtctgaagaaactccccaggcctccaaaaacaagtttattgggagtctggaggaattccacaagcctccatgatttagcaagagacaaaataagggtaatcatcccagcacccagacctatttagattaagtaaatttactgaggctccagaggaaggtcttcaggattagaagttgttaatcacttacgtctttagatgaatgcactcttacacgtagacatatagcttagaaggtatatacgctctggaaaaactttgtaattatgagttggtctggcaataatttccagaccttctccctgtaaccggttgcagaaataaaaactcttcttccccagttcatctgcacctcattattgggctgcccaacccccagtttggtccgggaacaaacctacattatttaacatcacaacaaccctatgaggtcggtgaaataagccagtcacaaaaacatacttatgattccacttacaggaaatatctaaaataatcaatttgcagaaacaaaatagaatgatggttaccaggggtggggcggggcgggagtggggggggggcgcggggaaaagtggagtgttatttattcggatagtttgatttgcaagatgatgttctggagattggttgcacaacaacgtgaacatactttactgagctgcacacttaaaaatggttaagatggcaaattttatgtgtattttacagttattaaaaaaaatgctggcactgaacacaagaaatttttcccttagtcacttcctataccattttttatagcagttaacaccagatagaatgatccttgtttacacacttattgctaatctcctgccactataatgtaagtcttcaaggccaggggttgtggctagctttttt

SEQ ID NO: 917205 - DNA, 4001 bp, Homo sapiens
acagattttttttttcaattaacattttaaaacttgattaaacctttaaaacaaaacgcacatatttttaaccttttaatgtaggtaaaactttacattcttatgcctccttataattcttctattaaaagtatattttactttttttatataccttgcacataaactgtttctttaatagttttacatttaggaggcctaattacttttaaactagacaacatttcttgcatgaatttccttttataaccttttttttcatgactttcgcaggcagttcttcaacatgcttcaactttctgacttattacaaatatttctttctttaaacaaccagctaatttatttcaggacaagaatttaccatataatactctttttacataaattctgcccccccttttttcctttttttttttttgaagatgataaccatttttttccaaagcaaacttcttttgtgtctgtggactagactgtctaaggccgcaagaatagaagttagtataaaacatgttacactgttaacttttagcaaactttacttttgttgaaaaccttgcaagtttgggattttaattatcttttgctattaataagaccttgttttgtccaaattaacttagaattggtatagatggctttttttttcctaacagaatagccccttgctttaatatttttgagttagtaagctacttttttgcttttttgatttaggatatttctgaactgaactagtgaggtgtgctcacaatgaggtttcctctaaaagttattattattattttactttttttctgttagcaaagtagttgctgctacagattgaatgcatttgggccatccacgggctactgggttaaggatttttgataggaaggcctcagtgcttttgggatacgcccttgtttacactgacaacaaagtagtattggagtgttacaggattatggagaataccttcaattatcaattataggtttcaaatttaccttggcttttaaaggaatagggtacactttttttcttaactacttgtatatctctgtctttctcttctctgtctctctctctcctctctgcctctctctctctctctctctgcctctgccagccacttatgctgcaattctctcaaccactgtgaagggatctaaaaccagcagtaaccaagcatctatgtacgggaactggtctgggtgccctggctttacaggttaccttgtgccatacctttgaaacaagggacctttccaggcttccttctgatggccaacctacctctaatgctggccagtctattttacataaagttctaagttttcctggtgtcatagtctcccttaaatccctttttgaaatttttcaacatagttcctagtagggtgggcttatttgtgcctgacccatgcttctttgaggcaaaacaccacgctcacaccacatgcacaccacaaaacaaagaaccggtaaaaagggcacacacacacttttacagtttacaccaaacaaaaatcaaaaccaaaatcagagtatccagaaattcaagccaagtcaaagacaaaaccaaagtatcaagcaatccaagtcaaatcaaaaacagaaaccaaagtgccggtacaggcacaccatcggtgatcaggccatgcttccactcaaatggagtaggcaagttcccaagaccagtcctgtcaagcaattcaaaccaagtcaaaaccaaaaccaaaaccaaagtgccaataaaggcacaccgtgggtgagcaagccacgcttctactcaaatggagtgggcaagttccaaagactagtcttaccaagtttcagatgtccagactccaagtaccagttccttcccagtgttcagccactgtgttgatcctccacgggggcctgccacacactgctctggcaaggcgtcccaccggggcaaatgcctacctgggagtgctctcaggatccacgttgctcgggctggccagagtcccccaccggaatgttccacagggcaggcttaagtcacctaaggagctgcctcgaccatccaccaatcacctcacttcccagtcagggaaccaggaaatgtagcaggacaagctgcagacaaaattcctcggataccgaattaaagaaagaagaggtttattcggccagaagcatcggcaagactcctgtctcaagagctgagctctctgagtgagcaattcctatcccttttaagggctcacagctctaagggggtctgcgtgaaagggttgtgattgattgagcaagcagcaggtacataactgggggctgcatgcactggtaatcagatcagaacagaacaggacaggaattttcacagtgcttttccatacaatgtctggaatctatagataacataaccggttaggtcaggggtcgatctttaactaccagacccagggtgtggcaccagactgtctgccagtggatttcatttctgccttttagtttttacttattctttcttcagaggcagaaattgggcataagacaatatgaggggtggtatcctcccttaaatggactccaataaatgtaagtcagctgtgggtgtatggattgctctccattagcagggagcagcttaggttgatgcagcagaaaggtggcagagtcttaggtttgagttaggcaagatagatgaggaaaaggcagacagtgaactgctaagatggaatgttcgtgccttatccgagaaatgtccaagtctgcataaccaggagagacagaggatgttctgagatgtctccctgcactcttgctatgtctatagtcaattctccacaccctagccagcaagaccaaatgcaagtctaagtcaattcaagtcattcccctgcttaagactttccaatgtctcccagtagctgaataaagttcatatatatttccaaatataatttggaagataaacaccaaatacatttctaactcattgccattgcctacaaggccctaaatgatccattctggtaagctctccaacttcctttcttaccctgcccccactcatgtccacctataccagcctctttgcagatcctgaaacatgccatgctgaaccttttctcagggacttcttcttgctgaacttcttcccccattcccacctctcccagactgaaatgatctatcctagttgtctgcctgtattgatctctcactttattagggtcctcacttccttctcaagtcttctccttggagaagtcttccctagtacactctctaaaatagtttctccacccgtcatgaggccaaattatttgtttacagtaatatcactttccccctcagctttattgaggtacagctagtatccaaaaagctgcatgtaattaatgttcacagtttggtgggtttggacaagtgtatacatacactcacgttatcattactacaagccaggtaataaacatatccattacctccaaattttccttgtgtcccattgttttgtttttatggtaacaacgcttcacatgagatctactctctttaagtttttaagttcacaaaatcttattgttaactatagtcactgggttgttcagcagatttctggaactcactcatgttgtataactgtaaatttatacacattgaacaacaacttcctatttccccctcccaccaatcccttggtaactatcattctattgtctacttcagtacctttgattattttaggtatctcttacgtataagaggaatatgcagtatttgtccttctgtgacttatcccacttaccataacgtattacagatccacccatgttatcataaatggtaagatctccttcattttattttatttttaaatttaattttattttttgagatggagtttcactcttgtcacccaggctggagtgcaatggcatgatctcagctcactgcaacctccggctcccaggttcaagtgattctcctgcctcagcctcccaaatagctgggattacaggcacccacca

SEQ ID NO: 917206 - DNA, 4001 bp, Homo sapiens
tgctgctgctgctgctgctgctgggaaagttttaaatattttcatatgtctttgaaattttccaactgttttatttagactgcttttttttttttaacaccataaagcctcagtaagtgggcactggcagccttattgtggaattgaggaaactgaggcccagaggtgctgggatgtgtctggagttccaaagcaacctggagcaacctggctctttgtgtgtttctactgacgcccatggtaatcacacaataatgttaactaccgaaacccttacagattttgagtgctccttggtcttgtccatgaaataattgatggggtgccatcatatagcttgcactttggaacctgacagattgggtctgatccccagctccacctctaattcatttactttgatcatcctaccagtcatctgtaaactaattgtaatatctacttgtgggctgctggaaggaataatggaagtaacacatctcacccagtccttggcccactgtagatatttaatacaaagtagctacagtccgtcacagcaggtgaactgtgtttttcctactcaccagtctggatctcttttttccaggccatttatttcctaaatacctactttgtacctgctactttcaaagtcttccaaaacagtccttcccaaagttagtgggcatatcaatcacatgaagatcttaagatgcagattctaacttagtaagtctgaggtagccttgcattcctaacaaactctcaggtaatattgatgctgactgtccatggaccacacacttttgactagaggatgtaccccattaggtgcacttagggactagatccttcaggactagtggttctcaaactttacagttcatcataatcacataaagggcttgttaaaatacaaattactgtgctccactccagagtttctgattcagtaggtctggggtgaggccagaaaaatcttcatgtgcaccaagttcccaaagtgatactaacattgctagactggggactacgcttgtcctaagcttagcagaggtctactgaagacctgaatggaattttattccaatggttactgacttttatgagtggacagaaccaaatggaatttggttccaaagattactgacttttaggaggggcagaaccttaagagggagctaaagggaagctccctctacaagctttctcatctccccgtctccaaccaggcccccttcctcaagcccaccatgatttcagcaggcgccctttaccttgtagacattgatagggatgtcaatgacgatgtgcagcaggtctcccagagccaagctggcgatcaagatattgggaccgtttcgcatgcacttgttcttgtagataattctcagaagtgtggagttcccgatgatccccagcacgaacacaaggcaggacacaaccgtgttgatgtatttgaaagtctccttgatctcgatgggtccttggcacgggggaggggagatggtgcgtggcggagatcctgccgtcctgtctcctttaggcacctccgcaggtgccaacgaccgcgccagactggcgttggaacccttgggccataaggtcttagtgggtggcgtcattatctctgcggtttgcaaaagcggagtggccctgtcaggcgggaagcctctctcctctccccagatccgcgacaggccgcaggcaagaaccagcgcaaccagggcgcgtccgcacagacttggaggcggctgcatgctgctacctgctccagaaggcgtccggtggccgctccgcagtttcagagcctagagacaagcagaggaaggaagacaggacacttgggtcagctgcccgagccaagtcgctgcaaacgctaataccgcccgcagcctcttcgccagtatccacgctcaaaagtaactcaagtttgcgcgccagtgggaaacttggcgctcatgactcgccagcgcgggtcgaaactccttcctgatgccctctcagctgtttttcttcccccgcgtggccaggaggggtaaataatatgcagtggggcggggcgttctggaaggggtgtgccagggagggaatgatgggggtcccaggcaaagctccgaactctttcacgtaacgggaggaatacagacacgtcttagttaagcgtgcgtgggaaccgcggaattaaggcacctagaggccaagggcttgtgtcaagctctgcattttgccccgcaggggaacctctataccccgcgattgaactcgaaagactcctcccggcggatgaaagccgctactccctggctggctgagctacagctcccgcagcgcgcccaggagtgcgccggagattcggaaacccgcagagacttctcaagtcagcaggaacttggaaaccgctgttccctccaaacggcttcaaacactcgcgctccttcctttacccaacctaattttaatttgccctctctataggcttaatttttatttttttaaaatcccaaactagtaagccaaaccgaagccccagaataaggttcaatcaatgattttaattcaacaccaagcccgaatgtttacctctcggatctgacaaaccagatgcagagcgacgaatggagaccaccttcccgggaggcggaacccagctgggttccagcctgctctgggagaggagcacgcctcccttgagctgcaggcgggtccggctctgacgaaacgctgcgagaatgccagacagtgtagcctccaccgtttgctcggggtctctgctgccatcagacaagtacttttattcattcatcccttcccatcaatcaccgccagactcctcccgcgccttccgaccccgctgcaacctttccccttgggcgatgcctggacagcatcagtagtagttgcccgagggaggggggcagtcctcgtccggggacaggtcccaaaaggctgtttatttgttagagttctacgctcttcaaatgaacccaaatcaagggcaagttatcacgcaccatgtgacacccggcagctccagactagaacaaggctctgcactgaacgtgataattgaacttttaatgccaagtgtcacttttctttcaggtaaatgttccgccgctgtgatatttaaggttggtttgtgggcgctgctctttgctctgcttcattttgccctgaagtttcatttcaagccaacattaaccccaacacggaacagctcgatcttttcttcccaggccctctcactgccccgagagaggattacaagtactcctcattttccccagtacagctcttctcctctcttcctgccacagtatcggtgttaggcaatctcaggcatttttatactgtacctatgacagacttgatgcttatcggagacatgaaaataatcagaaagctgccatgcaaattcaacatgatatttatttaccaggtagagcaatacaataaggtctttctatccattcttgagctccatgtttaccgcagagaggaaaataacagcgactggtagttttgcccagagattgtataaaagaggtcaggaagtcaggcttggagatgcactggagagtactgtgccgtcctccaatcagcaaaatccctactggatctgtggaacttcaaacccagaagcacccattccatgtagcagtttcacccagagacaggaggctcgttttttgcttcatgttagttaatggaatagatgggacaagaaccttggatttttggctcttaggcaatgctttctgggacagtggaagtagaaaatcaatttctatttaaaaaggtgaactttaagtgtgaaatgtggttaggaacatggttacggagtaaggctaaaggaatgagaaatatggtctagggttgtgagtgctaattccaaatctggctattttgaattgcagtccttatcctccctgtctcgtaagaacgaggtcaacattcaattgctgagccaagtaacaatatacaatgttgtctgaataaggaattatatggaagct

SEQ ID NO: 917207 - DNA, 4001 bp, Homo sapiens
ggtctggggtgaggccagaaaaatcttcatgtgcaccaagttcccaaagtgatactaacattgctagactggggactacgcttgtcctaagcttagcagaggtctactgaagacctgaatggaattttattccaatggttactgacttttatgagtggacagaaccaaatggaatttggttccaaagattactgacttttaggaggggcagaaccttaagagggagctaaagggaagctccctctacaagctttctcatctccccgtctccaaccaggcccccttcctcaagcccaccatgatttcagcaggcgccctttaccttgtagacattgatagggatgtcaatgacgatgtgcagcaggtctcccagagccaagctggcgatcaagatattgggaccgtttcgcatgcacttgttcttgtagataattctcagaagtgtggagttcccgatgatccccagcacgaacacaaggcaggacacaaccgtgttgatgtatttgaaagtctccttgatctcgatgggtccttggcacgggggaggggagatggtgcgtggcggagatcctgccgtcctgtctcctttaggcacctccgcaggtgccaacgaccgcgccagactggcgttggaacccttgggccataaggtcttagtgggtggcgtcattatctctgcggtttgcaaaagcggagtggccctgtcaggcgggaagcctctctcctctccccagatccgcgacaggccgcaggcaagaaccagcgcaaccagggcgcgtccgcacagacttggaggcggctgcatgctgctacctgctccagaaggcgtccggtggccgctccgcagtttcagagcctagagacaagcagaggaaggaagacaggacacttgggtcagctgcccgagccaagtcgctgcaaacgctaataccgcccgcagcctcttcgccagtatccacgctcaaaagtaactcaagtttgcgcgccagtgggaaacttggcgctcatgactcgccagcgcgggtcgaaactccttcctgatgccctctcagctgtttttcttcccccgcgtggccaggaggggtaaataatatgcagtggggcggggcgttctggaaggggtgtgccagggagggaatgatgggggtcccaggcaaagctccgaactctttcacgtaacgggaggaatacagacacgtcttagttaagcgtgcgtgggaaccgcggaattaaggcacctagaggccaagggcttgtgtcaagctctgcattttgccccgcaggggaacctctataccccgcgattgaactcgaaagactcctcccggcggatgaaagccgctactccctggctggctgagctacagctcccgcagcgcgcccaggagtgcgccggagattcggaaacccgcagagacttctcaagtcagcaggaacttggaaaccgctgttccctccaaacggcttcaaacactcgcgctccttcctttacccaacctaattttaatttgccctctctataggcttaatttttatttttttaaaatcccaaactagtaagccaaaccgaagccccagaataaggttcaatcaatgattttaattcaacaccaagcccgaatgtttacctctcggatctgacaaaccagatgcagagcgacgaatggagaccaccttcccgggaggcggaacccagctgggttccagcctgctctgggagaggagcacgcctcccttgagctgcaggcgggtccggctctgacgaaacgctgcgagaatgccagacagtgtagcctccaccgtttgctcggggtctctgctgccatcagacaagtacttttattcattcatcccttcccatcaatcaccgccagactcctcccgcgccttccgaccccgctgcaacctttccccttgggcgatgcctggacagcatcagtagtagttgcccgagggaggggggcagtcctcgtccggggacaggtcccaaaaggctgtttatttgttagagttctacgctcttcaaatgaacccaaatcaagggcaagttatcacgcaccatgtgacacccggcagctccagactagaacaaggctctgcactgaacgtgataattgaacttttaatgccaagtgtcacttttctttcaggtaaatgttccgccgctgtgatatttaaggttggtttgtgggcgctgctctttgctctgcttcattttgccctgaagtttcatttcaagccaacattaaccccaacacggaacagctcgatcttttcttcccaggccctctcactgccccgagagaggattacaagtactcctcattttccccagtacagctcttctcctctcttcctgccacagtatcggtgttaggcaatctcaggcatttttatactgtacctatgacagacttgatgcttatcggagacatgaaaataatcagaaagctgccatgcaaattcaacatgatatttatttaccaggtagagcaatacaataaggtctttctatccattcttgagctccatgtttaccgcagagaggaaaataacagcgactggtagttttgcccagagattgtataaaagaggtcaggaagtcaggcttggagatgcactggagagtactgtgccgtcctccaatcagcaaaatccctactggatctgtggaacttcaaacccagaagcacccattccatgtagcagtttcacccagagacaggaggctcgttttttgcttcatgttagttaatggaatagatgggacaagaaccttggatttttggctcttaggcaatgctttctgggacagtggaagtagaaaatcaatttctatttaaaaaggtgaactttaagtgtgaaatgtggttaggaacatggttacggagtaaggctaaaggaatgagaaatatggtctagggttgtgagtgctaattccaaatctggctattttgaattgcagtccttatcctccctgtctcgtaagaacgaggtcaacattcaattgctgagccaagtaacaatatacaatgttgtctgaataaggaattatatggaagctttggaatatgaatattttgcttagttgactccacccagtgttggatctgcccttcctatacaagctttgttgggttcatgcctatggctcctgtggggtgacttttctctctccccactggccttctcatcatctccatctccattcaaatttcctccactgagtcctggaagtctgctctaatcctcactgaggtctatctctttacttttcttggagcacttttggactgttaaccacaacttagcaagcacttgatcacataagagacatctatgggtcactattgatttcgtgtgacttaatttcttttacaggacagggacttgaatgagttatatgttctttctgcaccatcccactacctgccacaaaatgagcttaagaaatattttttataaattgataatgatattttaaagtattcagttatactttattaactggtcattgggctcaagaataaggccaaacaattttaaggtaaatatacacattcctcatttggaatttaaaacacagtatcagctactccttacagggtctaccacctgcattagacaccttttcacagtacctcattgattctctgatgtttgtcttccagctctgtattattttctatgatgttataggcagtgaaactgagtctcagtaattcacttaaggtcatgtggctagttagttgtgggaccaggatttggagctaggatttgaatgcatgtctaaatggttacacagactatgctttttattattgtaattgcagaaagcctaagcaaatttttttcttattttggggaaacagtgttctagacatcagtaatatgcaattgaagtttaaccttaaatatttcaccttaacatgtaaagacaaccatgtgaaatgtaaagaattgttcattgatcttcatgaatgactgggtgtcagtttccc

SEQ ID NO: 917208 - DNA, 4001 bp, Homo sapiens
ctgaagaggctaacggaattgctttcaactagatttaaacagaaatattaaatcctcataagaaaaaaaaaaacagcctcaaagagaaccggtcagtgaaagtgcagagtggctggagcaggcggcctgggggaggggcgaggcctggcgctgcgcgattccgcatggaagagtgacctctggaggcaccgggcgggcagcggcgccgcgggctccccgcgaccgcctcgcccgcccgcccgcctctcccggactccgggacccgctgctgcgcgaggtcctagcccggctccttccggcaccacctggcgcctcccgagccggcatcgatgcaaagatgccgccgccagtacttcatcagcaaatacaacaatttacattaaaaatataatccatgcaagagcagactacatggaaggaggcagagctaagtaacttctccgtatgagcggtgttgaaagtgccttctagcatcatacaaacatttgtttaaaccgatttgtaaccgacgttttcgcccttttcatgaagggattcttggttaacatgttagtgaatttgaaatttgacacttttaagagaatggacacactcctttaagacgtgatttctaaatcaatcccccatttcttttctcctaaaaccaggcccaacttgctcaacttcaattaggccattgattttgcttctgatctcaaacgttttctccagaaaccagctaatgtctgcatacttcttctccaagtttcccgagactacaattccaagattctgtaaaatatgttttggctgtgattcgaaataaggggatacacagtactgaatacccagatgactacgagttatgaccacacagatttagggatggatgggattttctaaattctgaatgcactctggtggcccaaactgaaagttactctccacaaggcctggctcgctcccggctgtagagtccggtaagagcaaatctgatcctaaggatcccattcctaccagggtcccgagggagaaggcttcaggagcagtgtcgactgggcagggccctaagcttttataggaagtgcattacaatcaggtcggccatcgagaccgcatactccggggctaccggcttatgaacgaagcgggaggccgaggtgcggcgggccctcagggagaagcctaaggcccgtctccccggcgcggaggaaagggctcgacgcccgagttctcctgcgaagcaggcgagctccccgcgcaccctcgggctggcggcgcggtgccaaggcgccccggctccagggctctgcgggcagcgtagcgactccaggctcccctctccagaacgcgcttcgctgccagcgtcctgccaccccggtcgcccgcccgcgggccccggaccacgccgcccgcgctccccgcgaatgcagcatctccgcctctctccagagcccaccagtccccgcgtgccggccagcctagattgtggccatgtccttcgtcctcgaaaacaggagagggtcaggtatcgccatcggacaccttcccggacttgacacccgagccgatagtagcttttagcgcctgggagcgttcgggggaggaaaggcggagagaccgtccgttccagcggggctcgggttggaaagccgagcgaggagtctccacctagtgaaatggggcgggggttgggggtgggggacggggaaccgaggttccagaaacaggctccgaggccccgcggactgacccctcctcccgcccggacggcgcggcggaccccggggcggggacatagggggatcgcggacgccacttacttggagttcgaggaattccaatagataggctctaaaactatcgatttggaaatcgcagttctgcataaaaccatcaaaacaccccagcagtacttccacacggagtcccttctcacagccatggcgaagccactcccagctccgcgcactccgggccaagaagggactgacgggacgcaggctgggacccccaatcctccggggcagactggcggggaagacggcgtgcgcccgcaggcagctccgaggcgcgctgcgcagctccagcggtcgccgggccaggtgcgctcgctctccggggccctcagggcgcggggcgggagcgcacgcgcggggcgcggcggcgcggcggactcggggttccggggcgccgcgccggacgcagctcggacggccgactcccgtgcggctccagggtgccgggccggccgcggctggcgggtgggcgcggggcgggtgcgggctgggacacaaagacccggagcggagacgaccggcgcgggcggcgggcgctgcgccccgagcggggccgcctgtgactatagatccagtgcagcgggcagcggcccgagcgcgcgggcgccgcgtcggcgcggttccatgtcccggagcacggagcggagtagggcgcctccgggcgcgcaggagccttctcagtccgcgcggctcccggcccccagggcaggaaagagggagctcggtccccgccgcgggctccggacgcgcgcgggcctttgtgtgcggggagggcgccgggacccgctgcgtgcgcagctcctcgctccggccggcgccgcggtccccgccgaggagagtcagcgcggccgccgcgctgtcagagcgctataaacgcggggccccgccccgccgcgcgaagcccattggcccgcggctccgcggccgcgcgctggttggacggccggtccgtccgtccgccatcccctcccgacattgggtgccgcgaggcggggctcgggctgacaggtgagccccgcccctggctcccgcgggcggcgggagcggagcagaagccgggcaggagaagcgctcagcgcgtgcacagggcgcccccggggcggcgagaggccttctgggcgcggtgcagacgtggaaacagcgacggccgagtagcgggccacctgtctccgcgcccgggggcgccttccccctcggcggaatcagagggcgcggctttccctcgagcagtgcggaaggcagcaggctccgctcggcgtcccttctccgcagatgcggcgctgccccgcgtgcaagacttgcactccgcgcgcacccttagagctcccggcttctgcgcgcttctcccgacgcctctcggcgagggcttctcacttgattttggtaccaatcgcctacggctcagtttcagtcagtggggccgggaattgcaagacgattcctgcgacgcggcgccggaatttgcagctctaatcagggcctgagcatcgtcgcctcccgccttctctgcgggcgtctcccttccctcctggccccccgggaaggtggcgcccctggagctttccccgcgtgtcgccggcacaggcacgacgcggggaccgtctcactagcctctaggagacacgcgcgcttcccaaagtgaccagagatttagagggtgtgagatggaaaagtcaaggcatgtgcttctcactcggcgtctgcaagaccccagagcagagctggcaggaactcctcgctactttcccggtcgagcgccggtgctgacgctcgtccgtgacttccacggagccacagcgcccactagcggccagctttgcttctccgcatctcgagcgctctgcggtccaccgacccggatccagcatactgcagcatctaatcaagtcacagttccaaggaaaatctttttatatgtccaacagtaggaagaacacggtagaaataaggcacagtgcaaatgtacgattcagtatgaaaaattaaaatatactgtatgcccacgttttttttcaatttaatgccgtccaccccaggatttatgtttcaaacacaaactgggcagtaattctacaaattatgtatttttaaaacaaagtatccactacgctaaatttaaaaatgcatatggtaaaacaccttgttttctttcactcttctttgtaacaatttctgaagatttttatggtacgttgcttttaagtatccgtttttgaaacatta

SEQ ID NO: 917209 - DNA, 4001 bp, Homo sapiens
atggggatcagtatttaccttacatggttaatacttataaaatccttataacacctgcacaaaatatagattcattttgttagacaaaaacaaataacttaagaaaatacatatatgtacatgctgatgttaagctaacagtaccatctccctttccaaaaacataaataacctctgcaaaacaaactaagtatatcatacatagtaagtgtataagtgttgttttgcaaaactctttttaggctatgtagacacatgtatgaatatggtaccataatgtaaaattcacttctctcatgttccaaagagtgtcaaatccactataactagagcatattagtgagtggcttagggctttgtcctctgctgctacatcctgagatcaaacctcaccacatcaagcctagcatctatatacagcatctttcatttaagagggctgcatagtaaacacactgtttcaaaccttaatatacacacaaacatcctgtcttaaaccaaattcaaaacacctttcttcctaaaatatattttgtattgtctctagattaaatccatatcactattaatatatttttaatcaagactaagcaattctctccctgaacctgttatcctccctagtcaaagctcatcctgctgttaaggcaacttaatccaaatcctcaccttttgtaggtttatttataaactttttgttctgtcacttcaatggacaacacagctaaaaaaattttaattttataaaaatcattaaattcactctgccaaaagtaagaattttattatttgtagtaactatgtttccagaataaaggcattacatattataattggcctattaaaattaggtgttgagcattaggcttatttcagtgataaatcaactttaggttggttctcaaaatatttttcctagtaccctgtctgagtctctccaacacgtacactatttctcccatatcatgtcttacattccctatataacttgtttaaaatgaagttaattgtaaagtcccaagaaactctagcctcgttccagttcttttgtgtgtgtgtgtgttgtggggaggggggaaggagactaaaattaatcttagatcctttactcagtatctcctagatcttttttatgtactgaaaacagtaatttgcacatcttatataaattcactgaaagccgatttagaaattcttcagttcaatcccctcattctgcagatgatgaaatctagatctagagaagttaagtaacttcctcagagtcacatgctttggactgaaatgatgtatgattatgggaccgctaacgttgtctcatctacttgaagaagtagcccatgattacaaacattaattaaccacatacattaaaaggcagtatattctctagaacttttcaaagtacttaaaaataattacttaaggcatttagtgttaagtctcattttacaaaaaaacaagctgaatcccaaaggtattacttccttgttaccatatcaaagctaaggataagacttattcttcatgaattaactggtgcttaaaacatagtataatatttcctccaaatatttcatctataaatttttactttcaataaagtttctctcattgtcttttaaaggaaataattttctgatatgaatagaaaaatcataataaagtcattaaaatgaaattttctctgaatctcatacctgtcgttcatcctccatgacgttactagcaaattcaaatactaggtcgttctgttggacaacagcagccataataaagcattccccttagatccacatgagaaaaattccaagaagattcacgtatcaggcagcaaaatccagtgactgatttgggtaaaaaaccctcagctctgtctgtggagtaattgtatacccaagttttctttagggaaggtgcttcagttttcctggttcattgatattctagtcaaattgagacaatttttctgaaatttttcttctctcaagcttcttggcctaaaaaacaaaagctcagattagttatgaaaaagcaatcacccacttaggatataataactgatacagagggcagtatcgctaaagcatttttttattattaacgtttttaaataaaatcgacacgactaatgcacatacgctcttttttaaaagttacatattttatttgaacagtttgctcctgctaagatcatctgtcactactgaaaattatgcctctctcccccactctccagttaaactactgttaaaagtactcaatattaaaaaaaaaaaaaaggtcaaaaaaccccagcaataatgagggttgtaatcgcaataaaggatatataaacaatttccttcttttcaccaactcagcaaagcacatacatagaaactgctacccaatgagtaatttcacaacgtatatattttcacctttaagaggatttatataaggatttaaaatcaaatacatttaaagtttagtaagaagtatttttaaatcttttaaaaataagcagaaattaaagcccactctttctgttctttaaaaaggcttctgataagtaaaatgttttaaaaattaccatgcttaagcctgtcttcagtggcttcttttttaatgcactgaaatgtatccttatctctagtataggcttgcaagcaacaggaaggaaacagcacttgaccacgtcatggcaaattagaacatgcaaagaactgcactttacaatagtagaaaaacagaaacgcaacttagtagtgaaaacaatttcacagcgaagggacaaaggcttttaaaatgtctgccaaagatgtttgcctatttaaaaaaaaagttatcaatactaacaaaaggaaaaaattctttaggtgtttatcacaatcttactacattttcatcaaatgattatggcctgaaaagaaagatacaaaaataatcacattaaataacattagttctttgaattagcatttacagttttattacaaacactttaaaaaagaagttgactccaaggaaaggatggccagtaatttcctaataattttaaagagacaagtctggggatgaagctgatctagtgaatcagtttccctgaaaacgtaaatccagctagtatgtgtcagccaaatcacttaatcggtttcctaatttctgtaaagccaagtccctatgtgtcctgggctttaggggtcatcatggatgactgtgattttcctagcaagaactcaaaataaaataagaattaagaatccaattcagatgatatttctactcactacactaaattccaacccagcaaatttcccactctcatccactcccttttaacaggaagtttaactccaacactgggaaagtatttttagcacattcaggtggtttttgagcaatgtaccatatctagaagagggaaaaaaaaagtgttttgatttaaattgatcacagatagatacatttggccttgtacttattattatttataatacctttttccttaaattattatccaacccaattcctctgtagtagacctgccttatgttcctccacacaaactattcagtcttgcctcttttctcaacttctgttatttcctatgcctgcaacacacccatcttctacttgccagcattcaatcccatcttttccattcaatgctcaagccccatttatttcacaaagcctcccaacatctatgcctcaaactacaaggactgctcccttcaaaaacacagcaattactgcccgtacaaccaatttagcatgaattgtagtacattgtcttacatttgaaaactgtgtccccttaattcaactgaatacatgtttgagtaccaattatttgcaaggcaatgtgccaggcaccaagacaactgaagcaaaacctcttctggggaaataaccattgtctaaaatttcttctgtacctcccaaacctgtgtgcccacagtgatgacaaaaaggattatattgatgacaaatactgttttaaatatcttatcagg

SEQ ID NO: 917210 - DNA, 4001 bp, Homo sapiens
acctctgtgggccactgtttcttcatctataaaagtgaggcagttggacaatcttcagtcactttcagcactaaagttctataaatcactaattctaaatttaattctgatgggtcagttcaaacttacattcaatcttatggaaggaaaaacgtggagagggaaatacttaataaattgttctggtcttttcttggttctcttctttttacccccccttctcccttctccttgaaactccacttcagtctctatcacgtaagaaaatacataaacaatatctatactactttaactgtaccagcttcttaaatttaagaaaccaaattcctctacttctctttaataaataagatcttaattatgccgcttatttgtgtgcctcttgatttttctcttatggatcaccaccttaaaaaagttaaaaaaaaaaatagaaaagtcttcattagatttttcacacagaccagactagaagtaaatacagcttttgcttactcaaaggctgactaaaccagcaatatgcaaacaaagatgatagcaaatggctcagctgaattggtaaaatgtccgctgtgtctttcttgtaagaccgcaaaattgagatctgttaatatcaacaatccttacaaaagagtaagaaataataactgattgcctttgtctcttccctttaatctgacaggccttcaagcacttagtaagtgcatagcaaattctcaaagaactagctaaatatcattttggtcaacaagaaatgatttggcaagttttatatccaaaaactttattttttggaatcactgcatattccaattttatcttcataaatatgtttcagaaataaaatactactgcactcatctttacagagcacctagaactttaaggcacagtaggatgtatacttgccagccaaaatctcataactacaatgacaagtacttcaggaaaagactgagcaatcttttcatttacagaaggtttttaattcaaggcaggcaaattttaagaacagtaatacaaaaggaaggccaatactcatcactttttctttttacacaaaattgaaataactacgtttccttagaagacagctttacttctaaggttgttactcagaacaagttttcagtgtgaattataaaacttcatttttttctaatagtaaatgaatcattctagtctttcttcctctatttaatattcacttttacttgttatctaaataatctaatattcatttttacttattatctaaataacaattcatttaaatttccattgggtttccaaaatgaaacatttaatataatttcattaactttaaaaaacagagagggagaaaaaaataaataaataacagtcaatgagcaacacctatggctgagttgtcccaaaacttcacccttagctaaaatgccaaaacaaagccactgcccctggatatttaacatctatatcacacaggaataatacggtttacttaactgtaacttcaactaccccaaaaaatacaattaggttttttaaattaaaatttgaccttagtttgctttgtggtacttaaaaacaaataaacaaacaaaaaacctcttttattcttaaattacatagaaaaaaaatcacaaagacatacaaaatgctttagcaagaagatctaaaactttccagaatttcagtgctttgtttccccctagcaattaagttcaatcaggcatgtgactgaccacacacattttatcagagggttaaagaacacattcagccatgttcttcaacaggtaagaaccaccctctgtttatcagctcaagaaaaagccagaagcaaacatacaaaattgtaacaagttaccttcaagtattctttctctatcgtcttttgagcttgaaaataaaaagcaatccgacaagttttagctgttaaaatggctcctgtagattggggaagtggtgtctgtgcttcagcttatgagtcatacatgaaaccaagtgtttctaagggaggcacgcccatgttgctgtggacccaattattctgctaggtcaaacatgcaaatctgcaggtaaaaacggtataggaaagtggggatgaagaggcaaggagcaagatctaccttgattagaccattactaagctcatattaattgccataatttaaaactaacaataaaatagagtaagaacctacaagggagcaaaattaaaaactatatattgttttaaaatataaaaatctcaatttttaaaagttgctttactatatcaaataaaactgtgaaaggaaaaaagtatgaaaggggatggaagggagatagcaaactctgtggctcttaatgtaacaatggactggtgagtgtaatctggctactcattaaccctcatatgaaagagatatattgctatgtagtctggaaaggctagcaaactacaaagccagatgcagatctgtaagttcactaaacagataaaatccactagaaaattcaaagttcagtggaaaaataagtgtgaattaaactggtttacagaatttttaaaaacccacactccaatgttaggaatttaaagtccaacaaagcaaaatgattttaaataaactgcaagcttgataaaacccttttaaaaaagtattggtacgatcatagttcataactctactacttccaaatgatagctacagtttgacttacctttcaagcaaaattttctacatgtatttcaagcctcttgtgccaggcaccctgctacagctccactgcaattgtggcaaggccaacctaaggggacaactgtggccagtgaagctctgccttccaagtcagaatacatctgacaaagtgcccaagccactgaaatattactacacctacttattctggcctctgggtgaatacttattaatttattctaagagcttaaattaatcaaaatggcttgaaagcactaagtacttccaaagcgcttgaaatgataaatgcaactcaatagatagccttcgtcctggtatcttacaaaaagtaaataggatttagcaaggttttctccctttagttaattagttgggagtttattctggcttaccagaggcatagttgagagcacaagctgtcactgacttaggaactttacaaaatgctgcaaaacagcaatgattgtgaaccaactttctgcctgctgtctatttattccttacactgaagattgcttggtttatccttttactgaaaaataatctccatggttttacaaactgttaattaaaaatttattaaaaagaaatatagaccatgttttctcctgtcaaatgtcatatttagcttactttagttcacttacacaaaatgactattcagagcccatgcaccaagaaacaaggtccgctgagcagtcacgggagattcacttgttccctggaaagttccccccaggtaattttccatatctgaaatttattttagataacatgaatgtaaacctaacaatttgattatcttcttttggctaattagaaataaaaactgtaacaggtaaaagagggcaacagtattataaaaggatgtcagaaaaagtgaaatagctgataatgacattaaaaaaacccaccttacaaaactaaaaataaacataactttaaaagtattcagatatgaagccattatataaggtcagtaagttgtaatattccctaagtatattaccatacactaagtgtctccaagtcagcattagtttaagacaggccttcgaaagccaaagtgtgtaacatcaagtgtgtgagatgttttatgtagaacaggtatctaaaaggataagcttctgctattgagaaaatccatttatataatgcacctcattacttaataatggcaaatattccaaacataatttaaaggaagtactctggccaccagtaatgtgaagagaattaaagggaaaataattacacctcttcaacagaaacaaatatcttagctgttcctaaggagatgactccaga

SEQ ID NO: 917211 - DNA, 4001 bp, Homo sapiens
atcattttatcagtttgagtgaactatagaaaccctatctactttgaagtctctttgccttcccccacttaaaatatagttgtcttaaatatttcctctgcatttatttacaacctacatcagacagggttataatttttacttcaactaccaaatatatttattaaattcaaaaggagaaggaaagcttaatgtttacccatgtttacacatgcttttgtttactgtgttctttcttcctttctaatttcccagagtcccttcttttattgtttcttttctatttagagaactttttcaaatcgcatttctagggcaggtttaaggtgactaaatcccttcgtcttccttatcctgagatggtctttatttctccttcattcctgaaggataattccactgggtttagaattatgagttgataatttttctttcagcacttgaaaaatattgtgccactttattctgggtttcattgtttctcaggagaaacacgctgtccttctaattgatttttcctgtgtcattttttttctcactttcaagaatttttcttgaatatagttttcagaagtttaattataatgcatcttagtgtaaacttttttgtgtttattctgtttggggtttcctcagcttcttgaatctgtaggtttatatcttttccaaatttgagaaattttcagccattatatcttcaggtacttttccagcactgctctctttctccttccttctgggacttcgatgccgtgaatgttagatgttttgttataatcccacaggtctgtgaggtgctgttcattatttgcttatcattattctctttactctcatcattgagattggaatttctattgttatgtcttccagttattgatgccttcctttctccccttcactatgctgttgagtctatctgctgagcatcttatttcagtttctgtattctcagttgtaaaatgttcatttagttcctcttcatatttccttggtgagactttctatttctttgctgagctttctatttttgcatttatttcaagtgtaattgctagtttaagcatttctaccatagctgctttcaaatccttttcagataattctgacagtcatcccaatgttggcagctattgactgtctcttttcatacaatttgaggtcctcctggttctttgtataaagagagattttcaattgaaagctgaacatttttatattatgctctgagaccttgaaccttatttaaaccttctgttttcactggcttttcctgaccttgctcccataggggaaggaagaatgccatctcatattgccaggtataaaggtccaggttccccacttggccttcgctgacacccaagtgggaatttattttaactgctggatatggttggggtttctagatctctctgtggcctcctcagacactgatgtgagggtagcaccatgaccactaggcaatggtaaaagtcccaagtctccattaggtctccaatatcacagccccagcaagaaggggcaggggtacataatttttgttaggtagaagtggaaatctaccatctgatactgcagcatgaatgaggagaggggacaagtcgttaccaaccagcagggatgaaagtcctcgctccctactttgtctctgatattaccccacaggagaatagttatagcctctggaaagtgaaagaaagtctagcttctgcactcaggcttccctggcacgggtaagagtggggccacaattatttctgttgtttggcaaagagattagtgtctaaaagtgttctgtcttgctgcaatgtccctttttctacatttctggctagagagagtaggcttcactgggggctttttgtctgtgcccattggtattcccagcttgctagcttcttcagtgtcaagtcttggatatgtaagataagaagacaacacagggaacttaccaccaggttattcctctgggtctcatgtccttaaccagtctacttcctcctctctgcctttcagaatcttgtgtttgttctatatggaatgtccaggagttttcattgtatttagtgggaggaataggaaaatcacatccactccaattactcgaaagtggaattctgtatttttaattcacatagctgttacctaattgccttccatacatgtatcaatttacatttacatttcagttgaaccaattacatttctgcagagttaacactggtttacaccactggttttcattccagaaattgctcttggccatctgtttttgccctcacatctgccattttagagtcaacttaagaactttttttatagaaaattcttcttacagggtagaaaagaagtaatggtattcaggagtgagcttctagtagatgccttcctttcacttgcctgcctcccacctagccctagttcatctaatttgaaggtgattagtggagcttttctaagcctcctccacttaacaaaagtgaacactacgcagagttctgagaagggaatttttattccagttcctggtgtcttctattttattctaaatcagattatattaaacaaaacttccctgaagtttgaggtattttattgggactattccctaatcccaccattctcaccatgtatgcttatttttgtatgttttagtcagtattttgggagaatgtggtggactgctatcattcaaataagcattaagtggacaccctttataggcagcttcttttcaggggcggaaataagccattgcatgtgtaagaactaaggttgagcaacagcaattttgccagatgagtatccactttcgctgtttagtccctcacacttgattacaccacatctttattttctgggcttgtttgtatggtagtccttaaaccctactttcaacactggtgtgaaaagagtattccaagaataagacagcagtaactaggaatccctatcatttaagatagaaatacaattaaaacactctcccctcaattaaagcttattgccattaatacacagtccccagaagggtttttgttggttttacttcaaaagctgaagctcctgccctttactacaaagaaacatatacacatgaagtaaaaggattaccttgtgagcctcaatgtagaatagagggtgtgtgtacagatatactgcaacttctcaaactaaaaaaaaaaaagatatgtaaatacttctgataaaatatttacttatactagaatatttcatacaaaaaatacataaaaatggaactccacataatactatctagctataaattactgtaaaatgttttttggaatattttattctagtctcttcctaggcatttatatatacatacaaccacacacacacatatatatatatatacacacacacacacatatatatacacatatatatacacgcatacatacgtgtgcgtatatgtgtgtgtgtgtttgtgtgtgtgtgtgtgtatgtaatacatataattagatgggctcataccgtaaataccactttgaactctgctttattcacttaacataatgtattttcccatttggttaagtggtctttaaaaacatgagtctttaatgactgcaataataatattctgccttctgaaggtgccataacttaaacattcttctatttgtgggtatttaagtttttacatttttgccacttttaataacactgcaatgcatgtccttttccataaatctttgagtttattttcctcagggtagactgctagaatttggattactgaattgcagctactagctgcactaggctccctcccacagcaggaaacctggttctgggttagggccaaattcactcttggcctcagcactgaaaagagattgcagattctgcacccctctggcaagacactgttgaggttctctttagaattcttatttcctgtcagtggtgcggccaggtaagcctggggctctttcagcttgcacaaagtgtatttgctgcttctgctc

SEQ ID NO: 917212 - DNA, 4001 bp, Homo sapiens
aacaatatgcattttatgcaatgctcatccgtcttccctcacaatattccgaaagcactttaactgtttaacgcatctcctccaagagggctttcactttttcaaactcattatcactttcaaatctgtatattacaagaaactggaatgagcaatatccattacatgaatagacattattaatataaagtctctatcaaagtggcaacgctagtaaaacaaaagcagagtgtgttaaccataaactaagtaccagccaatattaccactttgcttgacagagccgtctccaacagcacgcacccacctctcgagcgggcccaccagctcagctttccaagctcgctcacctgcgtctctcctccaggaatcaatttccttcccactttctccaccctcttcagatcccttaagcacgcttcattgctttctccaaactaccagactcaaatctgcagcccagttggccaggaacctttccatacgcacgtatttcctgcattctcctgggtctgcttttaaaaattgctaccaccaaacaaatgcaatcttaacaaaattgggattacaaagccagtttttttcatgtaatgttacagcagtgaaagattgagggagagaaaaggagagaagcaggagtgtatctgggtgaagaagcgtggctcagtggctatacagtgagacgcagagattccacagagctgggcttgcccacctgtcgaccccactttccccatgtgctcgccgcgggatgacaaccacaacactccagaaccaccccccttccgaaagagggcggggttacgccttcagccaatcaggacccgcgagccccgggtgtccaacctatggggtggctgtggccgtgcagggggaggacgtggggtggtctgggaggggccgcgtccgtgggaggctcgcacgtgtcgggtccggagaggcggggaggcggccggcgtccagcggccgaggcgcgggctctgcaccctggcagcggccgagtccggctgccccagtgcctcctttacctcgcgttgggccaggcagggcgcgctcccgccgacgaagacctgtccaaggtgtccgagctccccgcgagaggggacagtcacgaataacaacagtacccagcgcagactaggcggggaggaaagtttccggcccgcagcagagcggagtccgccaaggctggaggaaaagggatgcagagcgggagggtgaaaacctgaaagaagagggcagcgggaacactgtgtgggcaggaacgggtcccgggggcgacgcccgcagggggagacgggtgcggggtgcgctgtccaaggtgcaggggaggtgactggcgcgcggcgggcgcggagcccggagctgacactggctggcgggcggaggggagagcggggaacagctgtctggggcgctgggcacccccgggcgcgtaaaagtgagggagcttgagacggggcacggcggggaagggcgtgggggctgcaccgaagcccccacgcgtccacgcacccctcctcaccagcctcacctctagctccactcccctcccccctcgcccactcccctctcagtctagatccaggtgccgtggcgggggtgagaccagaggaccccggctcggagcccggacgccccagggaggctgcgggccccggagctgcttacctggggccgccgtatggggagcggaggcaacccgctgcgcggagtggggcgccgggcgcggcgcggctcctcctagcctcggcgtcctcctcctcctttgcttctcccggactctgtcccgggcacggagctgggagacgcggccgggctgcagtcgccgttccctctgctgccgccgccgctgcagcagacagaggacgccccgtggcggctggaagcctgtgtgagtagcggcgcccgggagagcggggatctgctgaggggcgctggagactccgcggctggaggcgcgcgggcgtgcgcacgcgcgcctgcgagtgtgagtgtatgggtgcgcgcgcgcccacggggtgggggagtcgcgaggggagggggagagaggccgagagatgctcgtagggaccgaggcaaaattctacgaccccggaaatccgtaaacgcggggaaggaggatcgaacgcgtgtctcgcttggagaagctgcccacggggcggcagcagaggaggaggggaagtcagcgaggcgcgctagggctccggatcccagcccggcagagccgagcggagcgcgcagccaccgatgcagcagaggcggcgcccgcagcccacggtcgcgctgccccctctcgggaggggccgaggccgctcgctcccgccaccgccgccgcggtcgggactgctctactgggagcgggggaaccgagagagggaccgcacggttgctacggcgaccttggaggggccgggcccgctgaagggccaagagaagaacccgggcgcacgtggccgactccaggctggagcgggcgtgttacaggattgtgggcttggggtagacggtggaattgggccgcgtggcctgggcagatgatgcggggtgtgcggcccagagtggctcggccggggtgcggtcagcattcaggttggtaagggtgaggggatcctaaccccaggtgacatgttgcctttttttcctccttggaggctactttttctcaaagttacccacttcccaggtaagaatgccggcctcctctttgttaggattcaacttagctgtgcaggcatctaagcagtgcctccttagagtcaggctcgtccaagaaccgctcccaccacctccccacacacacccacatcccccgatcctccatcccaactacattgtaatacttcagaaataaatgtttaaagcacatttacattctctgcctcttaacagatatattgtcttagtagtatacttttccttgcttattttaaattctgagtgggattttattcacacaagcatttcttcaagggtcgtaaggtctgggtaatacttgaaataccctttctggcaggaatcctcaatgcagggattgtgttttgcacacttttgcatgccttccagtgcttagcatagtactctgtactttgtgagttccctgtaaatgttgaatgaatgacattgttttctagcttcacgtaacctgaaggcaaagacttggatgctgggaaagtcattaccaccccactaggcttgcctgattttaacttatgccatttccttgtgtgtggctatttttccccctggcggtcagaaccccaatgcaaagaaagaaaataatacttatccattgtgcacccttaacaaaggatgcatgtagaagcactctgcagggaccccagtgggatgccctgggtgtgagggggccaaagctcagaacctaacctctcaaaatgtgaaagtcagtgttcaccagcagtttatactgtcccttctagagcagaaggatggggaaaacagttttaagagaaatacacttttgttttttgttttttgagacggaacctcgctctgtcacccaggctggagtgcagtggcgcgatctcggctcactgcaacctctgcctcccgggttcaagcgaattctcctgcctcagcctcctagtagctaggattacaggcgccggccaccacgctcggctaatttttttttttttttttttttttttttttttttagtttttagtttttagtagagacacagtttcaccatgttttccagactggtctccaactcctgacctcaagtgatccgcctgcctcggcctcccaaagtgctgggattacaggcatgagccaccgctccaggccagaaatacacatttctaatagcttatcaggtacgcatttttctcctgtaaagagtagtgttcatggacactgaccaatacatgcagggtcaccccagactgctaattctgctgtctggtgtagcaccaagtccacatccttcgacctcggtatttctacaatcatcgtcttagaagcagaagtcttca

SEQ ID NO: 917213 - DNA, 4001 bp, Homo sapiens
aaatagtgtacagtgagctcttcagggtattaaggcctggataacccatcagaaagctgcctctttctgagcaatttgatctggcaagattccagggtaattacaaccaaataagaaaacagatgcaacagttaatacttatgcgatgatatgagcttagaaataaatggttgtatctaaataaatgctttttaacagaaaaaagtcatgcaaatcatgttcatcgttaactattcatggacacgagaccatatgtctgtgacctttgttactgttaagtactatagcttgtagatacgtgggttacttgaaagtaattggctgcttctactgtggcgagacactaattattctgaggaggaaagaaatgcaacaatctctaattgatttccagattatccaccccatctaagggtaaacctaagctaaataataatattaaaggcctggtactttccaaaagctaagggatgaaagaaaatctactgtttatcggccataaggttatatactgtttcttagcaaccagggtttgtctttcagagactagaagtcgatgaaaaaggagagactaaaaataaaaccatctggacagttccaattcacagaggcagcacttcaaaggcagtgatgttgtgataaaccatactgttgagttaaagttcattccattggctagaaagagaggctcatgacacttgcttaataaatgtttcccggatactcactgcagtccctgaaccaaagaccaggaataaaagctacctatctgttcctgcatagagcacatatcaacatcagggatgagaggtactatggtcactcacctcctcactctctcagctccactcctctggttgtaagaggctagtttatctgcgagtcttgctgggacgtaggcttgctcctacctagaggcagaatttgaaccttctaccccatatcacatttcttgttgacccttacctgttagtgtctgatacagtaattccgtttaggacaccaagttttgtttttctgttttgttttgttttgagacagtctcgctctgttgcccaggctggagtgcaatggcgcaatttccgctcactgcaacctccgcctcccgggttcaagcgattctcctacctcagcctcccaggtagctgggactacaggcacgtgccatcacacccagcttattttttatttttagtaaagactgggtttcaccatgttggccaggctggtttcgaactcctgacctcaggtgatctgcctgccttggcctcccaaagtgctgggataacaggcttgagccaacgcgcctggcccagcaccaaatttttaaaaacagtaagggaaaagttatttccatactggttggagtatgagttctggagatacctggaaaatgacatcttactggatgcctaggcagttccgacacacccatatctttcaatcctgtagccagtcacaaaaatcaggaaagtagtattcctggaaggaaccgggctggttatttaccaaaggactgcaaactagccgactcaatttataaggtgcggcatggatactttcatttaagcaaatgagctttcattcagtcaaaatccctgttgttgggcccctgtggttttaaactccaaggaccaaggtgcttgtgagtgagtatgtttggggcccgggctcccgccccgaagccaggttgttaaaatactcaccgcctctggcccgcgtgcacgacgctctcccgcgaagggcccttaggggctgcctccaaaccctctctctggtcttccacggggctcagctccccttgccgcccagaagggtcctggggatcccgggtcgggcgggaggcaggggaggcgccgagcccggagttcaccactctattgcgggtgttcatggttcacagcccgcgggtcccgggccgccgtcgctgcgggagggatgcggctgggacgcttagcgagtctcaagatgggattccaaagtgcagaggcagcggttttaacagctgagtttcggtttctcagaatcagcagcagactgcgcccgccccagagaacttccccacgtattctccactgaggccccgtccgaccttatcgcgggttaacagcccaggatgttgacttgagctggcttggtcggctacaggtgagacggtttaaagtctcacaatcaccttagaggttaatcagaataactgggatcagccacggacacctggtgagcgattagcccgcagagtgactacaatcctgaaagatacttgagaaactgtttaacaggcaactctaatttgaggttaccgctggatatttgagactgtaaaaaatatattaaccttaaaataccagagattaggtcaataactaaaatcatctcaacaaaatgtcgccttttatcagtaatgactgctgtgtggctgttaccaatgcacatactttcaagttagaggaaatggaaactgaaatcaaaagaaaacaaaaacctacaaagccggagaagtaagctaaggtagacatgattctccaggcagccttgctaagtaattgactagacattcgagaactattaaaaatacctgctctgtgcagaacagtgtgcaacggtgatgtggggacattttaaaatatggatgtgtaaggctcagttcctgtaggttcaggggtgagctctggcattcatatttttgaaaagctcccagatgattctgatgtgtgccagggttggtcaccagggtcacaatgccgtctacacaaagatgagtgaaggctcttccctcatgctacctgcattctaggagtatcctagtagacaggtaaacaaatgggaatgccactttgggataaatgaaatgacaggcagctgtggaggcacagagaaactggggattagccctctgagtaattcaggaacagggacatttgagaatgagccaccaaagacataggaattcaccaagaagaaggagatgctatggcagaggcttgtcacttaaaatgacatggtgtgtacttaattccaggggttgtcatgtggctggagcaccccagtcctaggtcagcaagacagttaggagctggactgtcttccttatattattggtgcttagaacaaaaagacacatacaggtttgatagctaatgaaagaatgaaattgaagggtgggccagggtgggacaggagaggagaaaataatgacaaggaacatggtaggaaagtcagtcaggatttctatgccatcctaagacattagggttttgtagagtaggccagagtttcacaaatttcagtaagcatcagaaccacttggaggagggtgcgttaaaacagatttatggccaggcacggtggctcactcctgtaattccagtacttttggaggccgaggcaggaggattacctggagatcaggagttgaagaccagcctagccaacgtggcgaaaccccacctccacctgggcgacagagagagactccatctcaaaaatatatatatatagtttctgattcaggtctgggatggggcccaaggatttgcatttctaacaaatttccaggtgataccaatgatgccagtctcaggatcaccctttgggaaccactgttgtaggcaatgtggaaggcacaggaagtttttcaatagggcagttactcaataatatctgttttacaaagttagcttctaacaatgtgaaaacggagattgaaagatgaagagactgaaatcgggaagataaattcagagcctagttacgtctaggtaagaaatacagatctgagctaaggcaacccagaaagtggggagcaaaatcaagacatttcacatgggccaggctcagttgctcatgcctgtaatcccagcacttttggaggctgaggcaggaggatcacctgaggccaggagtttaaggccagcctgggcagcatggtaagacctcatctctacaaaacaaataaataaaacataaaagacatttcacatgagagattagcatagata

SEQ ID NO: 917214 - DNA, 4001 bp, Homo sapiens
ataaaatgatctaaatctttgctgaagttttaagggttcttgtcactgaaaactaacctttaccctttatttctgagaaaatctttagactgcaatgatactaagcaacagcttgagggcagcaacagcgcatgtgctctaaaaaacaaaaaacaaaacaaaacaaaacaaaaatcctttggctttccccaattcaaagtaccctgtataaaaacttttaagccaaaaatcaattacagatttatttaaagattattcacttgcaaaaaatgataatctcattatgttttaaaacttatcaatgtcgttttatttataagttttgtacctactgaagaattagggctccacagtcagggattcctttgctgaacgcccacacactcttgcactccatttcccgtccccaatccccccgcaatcatttacaggactctttccacaagcccacgagcccctagactcatagatccccatttaggaaattggtgtaaggtatcaccagattctgagccagaatagatactcaaaaaaaaaaaaaaaatgactacataacaaagaaaaagataaaaatttcaaaagcagtatcacgttttgctaatgaaaaaagaatttaattccaatgacaaacaaaaccagccaaacatgtacagaaacaatagtccttaaaaagtcaatttaaaaaatgggtaaaacacctgtccacactatccttcctctaagaaacataaatggggcaagactcaagcaaaactaatcgtcgaagtctactctgctctccttactgacctcccggacaggataataactttaagatttactgtattaatcgcactaaacttctctcatgtaggcaatttctttattcctcattccaatcctgtgtgtagatactatcaccacctctactttgcagatgagagaactaaggcagagaggaacataaagcactgccacaaagtgacaaaccaggatgcacaggccgctaagactgcaaagctggggaaagcagacagggcggcccgcctcatcacccgattccgcaatcaacctaccacggatcaaaaatatttgcgatggaaaaaaataaataaataaaacataccaataaaaactacaaaaaattttaaaatacagtataacaactatttacagatcacttacattgcattcggcattacaagtaagctagaaacgatttaaaagattacggaagtgggtagtttatatgcaaataccacgccattatataagggagttgaaggaacttgaacatcgtggtatacggaggaggggctggaaccaaagccccggggataccgagggacgactgtacttagaaaacctagtgacagagattctatagcgaccccgaccccgacccaagaccatcatcctgcagatgccactgtgcccaaggcagagccccgcgaggaatccagccccgaatccctgcaccccaagtcccaacgcggcgttaaggataccaacagccaggatcttcccttccagcgcttcggggctgacctgccgcccggagcactccagcagcttccagagcccctggacccccatgaggcggctgcgtcctaagagcggaccccgacaacttctactctaattcttctacgacggactgcaccgccgcctaggaccccgggaggaagccctccctgctcctacacaacaaagatggcaaataatacagaagccacggttttccagtgggggacggcactaatgggagcgcattaaagcggagagactctggctgcaacacgtctcagcagctgtcaccgcctcccggaagaaagacaggtccagagaatggccgttggcggggaggggcagggcctcgcctcgcccagcgcttaggcccaaacgtctgcgccgctaatggaagaccggggtgcaagggccacgcaggcgacggaaacagccagaagatgtccctgcgacacctcccgccttcgctggtgggtccgcaaacccatgaaaaatgggcccgctcggtttccgtctaatacgacgcgcagggcggaagctccgcctccgcacatgacgtatattttctgcgcttgcagcactccggaagtgagaagtttagcgccagtggtgatgccttggtggttacttgcttccgtcacgctggcatcctgaaggcgttaagcattaaaacaatgtgcaaaagcgccttcttggtggagtaacgggcttttgtttttgtttgagacagggtctcacgctgtcgcccatactggagtccagtggcgcattcttagctcactgcagcctggaactcctgctgcccgagctcaagcaactttcccatctcagcctctcaagtagctgggaccgcaggtgcgcaccactatgcttggcgaattatttttgtagaaatgaggtctccctgtgttgcccaggctgggaactattttctacacgcttttttagtatcggtttctacctttgcgccgccgtgtgtgaagatacttaacacaaagtgttgttttacacgtgaagagacaaccaaaaggtggatgccttcttggttttgtactatttatttatatgctagcacgtagtaactaaagaataataaaatttaaagcctgtgaaaatgttagggtcccaaaattactaagcaaaagggaaaagtcaagctgggaactgctcagggcaaaacctgcctcccattctagtcagtcatccttctgctcactgagatagatgcatattctgattgtctcctttggaaaggcttatcagaaactcgtatgcagccttttgtctctcatctacctgtgacctagaagcccttcctgcttccgagttgtccccacctttctggaaggaaccagtgtacttacatatgttgattgatgtctcctgtctccctaaaatgtataaaaccaatctgtgccccaaccaccttgggcacatgtcatctggacttcctggggctgtgtcacagctgcgcgtccttaacgttggcaaaataaactttctaaattaactgagacctgtcccaaattttgggggttcacaagccttaatccttgacatatagtttagttttcttcagcatctaaaagttataatgccgcggcttgtagatcagaaaggactagaaatcaattaacagagtaaccccagaaaaggccacagctctggaaccctcaggccaagattcaaatccccgcatcgtgcctcactatggtgtttagcatccctgaagtcacagttgttcagaatttgtgtctccatcagtaatcagggcataaaaccaaccttgcagacttcagtaagtattcaaggtgttacatgcaacgcacttagcactagtaactataaaggatagtattagcatccatatttgttcaaattggaacgaaatttaaactcagtgaaaaggctgacttaagggagcaggcaattttttaaagacttctttataacagaagtatacgggaaattgattttttttatttttttattttttatttttttgacagggtctcactctgtcgcccaggctagagtgcagtagtgcagtctcagcttactgcaacttccacctctcaggctcaagtgatgctcttgcctcagcctcccgagtagttgagattacaggcccccaccaccacgccctgatttttttttttttgagacagggtcttgctttgttgcccaaactggtctcaaacaatcctcctgcctcagtctcccaaagtgctggagttacagacatgagccaccgtgctccgtggagaaatccatttttagcaaaaccacttctatgctcaataagatggttcacagtggccatgtttggttgacctagtcacatctaatttgctacaggaataatcctgacaaagtgttttttgcatttcctccatatgtaaagtaatccccagaaactgttcccagttgttattttactgagagtaatataactgcctgttcagtatttgtctcttccccatggtaaactgtaa

SEQ ID NO: 917215 - DNA, 4001 bp, Homo sapiens
tgaaacacagaataagctgtgttattaaactcacacttgctttttttagtgggatagcaagaacataggcaaatgtttctatacaaagacttttttagttatacaacacaagtgaagaggccggtaaaccactaaggtctaggaggagaccaatcggtgttgggctgggggactcatggatacagattcttggctgaggtctggaagggctgaggaatttgctgccagggtctgtcttagcaggatacatcagccccatctccaacaggagaaatgggaggacagggcttcaccctgtctgctggtgcaagagaagccttgagcttcggtagacagttgtatgtgtcccttccaaccagagacctcaatatattaacgggccctcttttttctctgcaggatccagtacatatttctgacggctcctccagagtgggattttatctggagtcccaccctttcttttgaatttccttatcactttatagcaagtttattcactcattaaaacccaacccaaagtcacctcgtctgggaagacacacaagctcttccagaaagagtctctcttttcctgactgctctctcactgcctttctcctattgcacttctccctggtttgtgtgtctgcctcacccatgagactgtagcccggcaccatgtcaggcacgtagcaggatttcaacagaaggatgtggatcgaatggatgatccaacggaaggagaggcacacaggaggctgaccacaaatgaaatttctggtttggacttttcagcccccatcacttcactttccctcctgctatgggggaaactcaagagatgagttatgggtgggctaagacagcaagctgggagctggtgaagaagatggagtgggtgacccttggctttcactgggcttctcccagccgatgcttggaaaccctagatggatcaaggtgagaagcctcatttctgtaaaggactccaaggattccatggtgctctgcaaacgtaatgtgttcttgttgctgttatcatctaccatagctgtttataaccttgttcattaacttgtgtgattcttggctgaagtctgctgctctcccccatgaggggaacaactgatgacctacttctgtgaattccatggtgccaggcctgggctgatctggatctacattaaaacatgccagggggcaaacatgaaatcaaaatgttctggcaacccccttagaccaatcagtgcagtgtttagcactatagacacccagtgcactcattacaacatcatttcctaggaccttttttataaatagaatttcgaatatattcaggtttgaactttcaaggagggtgactttgagccatcacttggaacagaacacttgtaaaaacactgaccttggtcactgctcacatctccctggaaggccagttaggactgctgtttaccccccacattagagaggtaggggaaggaaacaggggaagctgagtgacttgcctttgggccacaggagtcgcttcgtgggcaaggctggagttttcgatctggggaatttgttcctggttgggggactggtctatattcaggctgtcaaggaagaagtcatagtatccacactcgcacttccccccagagctaggggctctctggagagaaagtgaccccttatcctttatttgtagaaatatcatgacccaacaacggccttcacaatgggaagaagctgggtcgaagcagatgtcagaaaggccaagggaatagagaggccgagaaagggcgagagaaacaaagaagtctatgtacttggcgcttctttgttgcccagatcctccactctgctccctgctttctccctcagagaaggagggggaagaggaggaggagagtgggtggagagggaggcggaggagaaagaggaggaggagcgcattgctaacgtgcgcagcccttacccaagccaggctcccgcgcgtgcatccaccgcgatctcaggccccggcgtttgtggcagctctcggttaccatgggaaccgcactccgcagcctccctgggccccatctaatctgcgtgtgtgcgtggcggagaattctaagcctctgcacctgcccttgccttccctttcccagcctctctcctggcggggaactgtttggaccagtcgtcagcggcggccagaaagttttcctgctgtctgcctgaaggtcgcctgtgtcagggggaagttgcagccgtggggattgtgtttccctgaatggagacagtacacgtcagacctccaggctgggactttctagaatcctggggtccagtgctaagcttgtggtggctgcgtagatgaagagatgggacatgtggctctcaaggccctgaatgggctcactggagctggtccccaggaaaggaactgccctgaaagggatagagagacccacaaggggttgatctggggccaagggttggagaaagctgagttcccatgccctggccactgtgagtggacttgcaggagtggcagaatggtcaggtggggtgggaggctgggttgcaaaccacttctatgtaggcattcctggtcagttgtcacagaggtttcagaaggacctcagtctttgaagtgcttgcaatttgcccttccttttctttccttttctttttcttctcattatactttaagttctgggatacatgtgcagaacgtgcaggtttgttacataggtatacacgtgccatggtgttttgctgtacccatcagctcgtcatctacattacgtatttctcctaatgtaatctctccccttgcccccccgcccccgataggccccagtgtgtgatgttcccctccctgtgcccatatgatctcattgttcaactcccacttatgagtgagaacatgtggtgtttggttctctgttcctgtgttagtttgctgagaatgatggtttccagcttcatccatgtccctgcaaaggacatgaactcattcttttttatggctgcatagtattccgtggtgtatatgtgccacattttctttatccagtctatcattgatgggcatttgggttggttcaagtgtttgctgttgtggatagtgctgcaataaacatacgtgtgcatgcgtctttacagcagcatgatttataatcctttgagtatatgcgcagtaatgggattgctgggtcaaatggtatttctggttctagatcctttaggaattgccacaccgtcttccacaatggttgaactaacttacactctcaccaacagtgtaaaagcattcctattgctccacatcctctccaacatccattgattcctgactttttaatgattgccattctaactggcatgagatggtatctcattgtggttttgatttgcatttctctaaagagcagtgatgatgagtttttttttatacgtttcttggccgcataaatgtcttcttttgaaaagtatctgttcatatccttcacccactttttgatggggttgtttgtttcttgtaaatttgtttaagttccttgtagattctggatattagcccttgtcggatggatagattgcaaaaattttctgccattctgtatgttgcctattcactctgatgacagtttcttttgctgtgcagaagctctttagtttaattagatcccatttgtcaattttcgcttttgttgccattgcttttggtggtgtagccatggagtctttgcctatgcctatgtcctgaatggtattgcctaggttttcttctagggtttttatggtttaggtcttactttaaatctttaatccatcttgagtcaattttgtataaggtgtaaggaaggagtccagtttcagttttctgcatatggctagctagttttcccaaaaccatttattaaatagggaatcctttcctcattgcttgtttttgtcaggtttgtcagagatcagatggttgtagatacgtggtgttatttctgaggcctctgttctgttgcattggtctatatctctgc

SEQ ID NO: 917216 - DNA, 4001 bp, Homo sapiens
tcccactacgatcaatcctgcatgaaagcctagggttttaatccacttaatttactggtcaacggatccctaccaacagctcatctgcagcctaatacggcctacgtggaattgttagtcatttttatttagtattttaaaaactgtgataaaaacacatacataatatttactatcttaaccattcctaagtgtgtatttcagtagtgttaagtatccattagtcatatgtaaaaacgcagttcgccagctcacaataatgagcagatgagaactgcctcatcaccccctggctgctgcaggtggagactactaatccctttcgctgttaggccagtcgctgagaaccagaaagtcactgaaatggaagaccatgttaattgtacaattttcttcaagtttaatgccattaaaatttcataaaattaaaaccatgcaggatcactgaaaaaatagatgaataaaactccatataaacttcagtcacactctacctgtgtgcaaacacagtcttttttttcttcttttttttttttttgagacagggtcaaactctgtggcccagattggagtgcagtggcctgatctcggctcactgcaatcatctcggcccccgggctcaggtgatcctcccgcctcagcctctggagtagttgggaccacaggtggcaccaccatgcccaggtaattttttgtagaggaggttttgccatgctgcctaggctgggtctcttttccttcataaaaattcacatggcttgcctaggtaaggatttctattaaactctggggaaaattttttaaaaaaaatatagcatctataaacgccaaacaccttcacatggctctaaatatggtctataatttggtcccagattatttttctggtctcactccctattttgttagttaaactcaactatgcataattctaggatggcctggatgttgctatcgggtggctttactcaatgccacggtacaatggtttcagagcaggttttggggccagaccctccgggttcaaaccctgacttcaccacttattactacatgacactgggcaagctaatctatgcctcatttgcccatctgcaaaatgggtatacagtaatatatatcaatttgatagggttgctctgggaattaaatgagttaattcacgtagtgcttaaaatgctgcttctaccacacacacaaacatgagctattatttttcctgcaacctgaatgccctctccttccaggtgcgctcaatcccatttccctaatgaccccatcagaaatgacttccagtcccccacagcgctctgagagcattttacgacccgaacagattttgtcaaactccaaagacacgtgctcccctcggcaccatcaggtgagtgctcctgaccgcgccattggctcgtgccccgacgcggacgctgcctagagcagcaggtccacactcccccgaaccaggcgccggcggccgctagtaacgcgttgaggccagctccctccttaaaatgcgtacacatctacttcacattttcgcgcggtggctgcgggtctaggaaagtctttctgaacaggaaaaagctgtacaaatgtagcgggcagtaggtaaacgggcgctcgccccgggttacactaggttggaggctcagagaaggaaaagggattagaggcgaggctccgggtcacgggaaaaggtccttggcctcctgtcatggatggtggcgcccaaggcccagggtcgccgtctctgcgctcgtgcctgcggatacctgcaccgcaggactcggcgtccgccccgatcacgcctagccgtgccgcagccgcaggaaggctgacaacgtccaggcctctacccgaacccagtcttacctacggtggcggagtgaccagaagaagcgggccgaagtaaaaggcggggctcaagatggccgccggggcctcgcctcagccccgcccatatgatgccccgcccctccggtcccactcactctcgcttttaactccgagaacccgctcttctccagttcagtctccatggccccgccgcctttgcacattgcacttcccggcagcctccgcgtgggcgccccctccaactcctgccttcgcccgcgtttctgctctgtgtggttactaggaccaacgaggagggcgttaggttagtccctgtcaccttgtcggggatcagtctgctgtgcgtgctcagactcttcccagagccagcagcaagaacccgaggcattaataaacttgagatgtagcttcgcttaactcgtgcagagggtttccgtgtcacttatgtagaaactagggcctaatttcaactccctcaactcctctgtcccaagactatccacgtcacctacttggtagcttgagttaaacaagaaacctttgaaatctccagtggccgacacgcagtgggaactccatcagttttctgttttctcccttcttccctcaataaaaattaagttgaactgactaagatttgctagttgataatttacagcaaatctttccttttggtctctctgatttaagcaaactgttgagtgtactttgcctcttgagaaattaaatctgattacaacagagctaagtatttttcagcaacggttagactgacattgtaaatacacaatctgatagttggggctggcctcatgggcctgcaacctgtgctattacccggcccccagaacagaaggacgctacattttctctcagtaagtgttgaaccagggccccacgtttgtgtctggaattgggccctgcaaattgtgtagctatgggagctgacttaagtatggatgagctgccacacaagagattacctgccagaatctattgtgtggctcaggcccattttgccatagtgatctttggactaaattaacctgtggactgaacctgtggatcaattggaacttagactgaaaataatgtttcatcaaaataatgtttttattttgagaaagcattgaagtaaattgttttaaactttctttttactatctttaagtataaatcattgaaaaggggattttcttcagtttcaaaactgaaacagaataaatacctaaattgcaagttctttataactgatgtttgaacaaagagaaataattgattaaatgatatatttgcctaataagtggactgctgtgaggtgcagactagccaaagaactgtaagtgtgaagttctttactaaagggttcttgtgtgaatacaatgtgagaataagcagaactaaaatttcttttacccagcataaataaaatgttaatagatccacaaaagtcgattgcttaaaaatattaagaatatatataattatcattattatttggacatggaagcaaagaaggctgaaatcagaaattaaggttgacattttaaaaaatggcactaccaataaaaatggatgaatattaagtacacaaagaaatagtccaaaaattatgtgtaaatgtgtggctgagaggatataggactcttggtttgaactaaaatgagtaggaatataatcttaaggaggcaataaagggatgcaataaaaatgagaaaaagtcaaatatacttgaagcctgtaagaaaagagattgttttagtcagttccagcttaacagaaatttattcctcaccattctaaaagtctgggaagtccaagatcaaggtgctgatgaaatctgttcctgctgagagcccttttcctcgtttgcagaggaataccttcttgctgtagtctcacttggtgggtggggtgaggagagctctggttccttcatcttattgtaagggcactagtcccattcacatggactccaccatcatggtgtaattatcttccaaagtctccatctccaaataccatcacgttaaggatttagggttcaatgtttgaattctggggaacacaaacattcaatccatagcaaagatagttttagagagactagaaaagacaccatacatagaaaataatataatctc

SEQ ID NO: 917217 - DNA, 4001 bp, Homo sapiens
agttgtggttctgaattcaccaagttctcttccatcaggacggcagttctctttctaaataaatatgtttatataaaaatagattatacctattacatattttacacatctatcacaagttttacacacacattaaatgttacttcaaatggattaatttaaattacttgaaattcatctttaaaagcagctcgttatcaaaacgcataacatgtacataacctttactcaccagaaatctcctgtaatactccagaggttccacggttctgaaacacgtgttaaaaatatatctgagataaactgatgaatcttaacataaatccagaaattggcaaagatcttaagtgtggtgatgcagcataaatctccacaactttttaactaaaagtaattctagaaagtaaaaatccttgtagtagcaatcacattcaattgctgtccttaactctgccataaacgattagaagattggcgtctaaaagccctttgagtgagctctttaaaagctcaatctgtgtcaaaagaatcatgtcgttcttgctctgaaacaaggattcagagtgatctagtgatcatgaaaaaagattattttaataatctagtgatcatgaatagttaacctcttactagataactcaggaaacaaaaaggtacatctttattttcactgtaagtgaaatttagcatattcttcaattatgactgtaagcaataagccatagtaacattagcagtacctgcaactttaacaaccacggagaccacagatgttttcgtttgcaccctttagctgtgtaaggtatgttcaggctcaccgttactttgaaatcccaggagttactactagtctcgccactagatcttgtttacgaaggttaattttaaaccaagtatatatactactatatcgtgtcttcggagtttatactcatagataactatttcaacataatggatttcctttggaatcctatttattttatccattttttaaaaactttaagaaagtccactggcttcacacacacaaaaaccttccaaacgaggcatgatccttttagaaataaattacgggagagggagaagcaggcggtatgtggttctgatgcaacaatcttgattgattgattctgacagagtctcactctgtcgcccaggctggagtgcagtggcgcgatctcggctcactacaacctctgcctcccgggttcaagcgattctcctgcctcagcctcctgagtagctgggactacaggcgcccgccaccacgcccggctaatttttatatttttattagagacagtgtttcaccatgtacaccaggctggtctcgaactcctgacgtcaggtgatccgcccgcctcgtcctccaaagtgctgggattacaggcgtgaaccgccgcgcccggccacaatctttaaaagattacaactatgtctcctgggactgcacgttcactacacaccacgctcacgagcgctcgcagcgggtatggaactctacagagtcctttcatctcccgtctcactgaggaagaagccctttcttttcactgtgacaacctccaggtcctcccgcccatcgtctgcctcgacgaggaaggaaatggcaccccaacggggtcggcctccaggtgagagaatcccagctaagagttaaaggaagctgccgtccgccagggtacagaactctacccgccacccgccaacactcacttgaacccagccgccatcttcccgcccgcgcgtctgcgcctgcgccgctcctctcctgcgcgcctgttccgccgccgcactttcgacacggatgccggggccgctcacgccacgggaaatgccaaggtggggacgcgacgaaaggtccctggcccgccctcgcatcgactttcccctgcccagacgcctttctaggtttccttgccttggacgtattttgacgaatctgctgttaaagaaggagcgggtctccctctttataaaagagctggtgctgtgactcagaataacaccaacagttcggagataacagggtttctagcgcagaatcaagcagtgcgtgtggagcgttattccaatgtttctgcgtcttttttctgcctgtgacttaggctcagccctggccttgcctcttcactggtcaagggctccgtgctccaacacatgagaaacctgaactttttttttttttttttttgagacagagtctcgctctgtcgtccaggctggagtgcagtggcgcgatctcggctcactgcaagctccgcctcccgggttcacgccattctcctgcctcagcctcccgagtagctggaactacagacgcccgccaccgcgccccgctaattttttgtatttttagtacagacggggtttcaccgtgttagccaggatggtctcgatctcctgaccttgtgatccgcccgcctcgtcctcccaaagtgctgggattacaggcgtgagccacggcgctcggccgagaaacctgaactttctgtgcgctcattgtccgcaccacgttctgctctgcaggtcccggagctgagggctcctaagcatcaccttgtgttgtagactgtgtcgtgctcaaggctgccatctccctcctaggtggggttaccagataaaatacaggataccacgttaaatttgaatgtctgataaacacagcgtggtttttttgttttttgtttttgtttttttgtgggtttttttttttttaaagcatgagtatgccccaaatagagcatgcaattagttgttgccagaacctggagggagctgggaaggctttacagatagatagtggtgatggttgcacagtatgtatgtaattaatgccactcactattgtaaacttaaaatgattaaaatggcaactttttattttaccacagtttataaaaactaatgtaataaaccagaaacctgtaactggatgagtcgtatggtatgtggctatcttaataaggctgttaaaaacatgattagttttttaatctgaaattcaaattaagtagacgtcttgcatacttgataaacctggcgccccgctgtggaacctagcgctcctctccaccgactgggcgccgagggcacgagagcggcgttttctccgcctcgccacgcgggggcgctgcggccagcgggcgcgacctctctggcggcggggccgggtcgcgcgggcgcgcttccgcctgtgtggaggtgcgggattgggcgggctgccacggcatggagaatggctccgcttctgttgcagctggcggtgctcggcgcggcgctggcggccgcagccctcgtactggtgagaacagggatgggaacccgcgcaggccggggcttaccgctctcctggagactgcggctcctcaggcgtcccctcctccgcgctaccagttctcggagaagtcccttttcccctagattcccccaaattcctgacctcggagtttcctggagtttcactctccttttcttcggttctttaattttcccttggaatcttatctctttgtgtgctcagagacttgtaagttttttcacactggagcgcacccacccggcctggcatcatcgccgcttccatcgcccctggcgcccgcgccccctacccacctcctctgtcaacctcgacctctcccagactctccgggacctgcagccgctgcagttctgctccacccagggaggtctcgagcccccagaaggggtgtgctccctagcctgctcccttggctgatgtggttaagcaaataggggtgacggagccttgacggcagccatctgttacaaatgggaataaatgcgtggatcgatgagacccactagggacgcagggtgagcgagagagacaggcctcaggcgccttgtccggggtcgcattgtgtcccagaattaagcaccctaaatatactgcccctaaacaaggcaggacgatagaatgcaaactcgattgtctttgcccttgctctcgaaacacaaaaacattgtaaacactt

SEQ ID NO: 917218 - DNA, 4001 bp, Homo sapiens
ggagaaatgtttctgttgctttaagctacttggtccattgtcctttcttgtagcagtaccagcaaaggaatgctgaggtcccaccgccccagaagaacttccgtgactgccaggacagctgtgctcgtttaaaggctagactgcagatgctgtgcgcattctgattttattaaaatcaaaagtgtgcacagcagggtcctgagtgggaccttctgggacctgtgttcagccccacccaccccacagtgcagctgccgaggcctctgaggcagagtaggggagagagatggcctggccctggctctccggggctggccatgtccacccagggtccaggccggcccccggggacaccacaggccatggttatgagccaggcccgcatcacacagctaagggtgccaataccctgtggacccagaggtccgcgaggtgggcgcctgcatttcccattggcaggaagggaagctggcgctccaccaggactctgcataactcccctagtttcctcctgtgggtctgggtgggctcctggcctgtcttctcatccccaccctctgcttcttcccaggaagaggagtcctgccaacttccattcccaataagccagagcagcttccagagtcccgggccgggcttagggcctcgggagccccgggccgggcttagggcctcaggatcctagagcattccggctgcagaattttctaccaattcgcggaagcatctgtctgtttgcagagtagctttgctgtcgatgatgatggcatgggtccttccagggccttgttccacccacgctgatctcatcccaccacaagcatcacagtgggctcctgcagggggcagtgtggcctgagggggaggaagaaggctgggcgagttggagccacacagtaccccatgaagacgggagtcccgttccgcgtgggagacaggaagatgtggctcaggggacagaggctggggagggcagggggttgagggtgggatggagaagacccccgtgtgatgtgactggagctccaagtcaccaggcggaggggccgtttaggtcagtgatgcactgaggatccactcagccttcccaggggtctcccctttccaccccacgagggtctccccctgctccgtctctccctcacacattcccttcccaggcctgggtccccttggtgcccctgcctgtccactttgtccaggatgcaaacaagtctagggtccctgtctctcgtgtccccaccagaggggcctcctcttcctccgctgtccccaggcttgcctggcttctgtcctgtctgggcctctgcttttggacagacccgggggtcctggacagccctgctgcccccacctgtccagctgtgcattaggcagctccttccccgacggagccagtccgagagtggtggcactggctcggctcagcctcctcctccctgggagctcctctgctgtgcccctcgtcctgtgcctccctgtggtggcagatggctaactgtcctgtctctgcctgccccaacccctccctctctctctgtctccgtctttctacctctgtctctgcctcttggcctcccatctcactgtgtctccgtttctccttccctctccctttctctctctgactctgtccttgtgtttttgtctctgtgacctctgatccgcccgtctgactctcagccccagggagccacagctggccttgaggatgccgttggctggaaaggccaagcccagccatccgagcccagcctctggcagcactcaaggcacccaccgtccaggctgcagagatgagagggtttccccaactgccgcccctccctgctccctggcgctgcttttgggtctgaagggcgaggggcacttacgactttccccgagcagcaggaggccagccagggaggcactgagcaggacgaggtgcagtgggcgccccatggtgtggccgagtactgtgtccctgtcctcactgggacaggctgctggagcaaagtccacgccccagctgggatggctgttgtctggctgcttatcacttggcttaggcctcctgattggagccgagacctgctggcgaggcaggggagtgaccacgctgggaacacatccactctggccccaccttccccaggcagagctgggcggccagagaggccccgcagaacctcatcctcatcagtcaccagggccgcgggtgtggggactttctgttctaagaataaaaacatcatttcgtgctcattttgtagtttccagatgtttacatttaactctcagtcctcacatacaaatatcattttccccatcatttttccagaagagaaaactaagtttagagagcgcagaagcctgagccgaggccgctggcagtgagcgtgggatctgagcccaggacttctgccccaaggccctgcttgtttctgggcgggcccttccgctcacagccactctctgggtggtatcaggtggtctcatgtcacggggggggcttggcatctgcaccatggcctcccacaggccaggctggcacctgccccacccacccccaaaccttctgtgcccgcatggccccaaaacgtacttctgtggggagtgaccttcccgtgaccatctggagggacaggctgtgtctgaagcccctcctgacctgcccaccactggccacactgttccgaggctgagagggcttctgggctcgttctccagtgcagaaacctcccatcacaaggtcctgagtgtctctgctcaatggctgtgggagtcactgggaggtgcagccgggctttttgcctctggggtctctggaataaatggtctaaagcttggccagtgtggcgatcactgcctgctatgccgtagtggccggggagcaatgcccctaacacccacagcactggccactgcctcatggtgcatctgccttgatgggtcgccctgtctcgcagccacctgcacatgagcctggtgtgcacacattgtgcgtcattgtgcctggcacacaggaggcactcactgagccccacccgactgcacaaactgatgatgctggatgccaacgccaggctggcctcccacggcgggcaccacgcacagcctggtcctctgagaagggccttcctggtggcaccagatgtctgactcctgcctctcctggtctccaccctctgacatcgcctctaggcatgtttgtatggagagaccaatgcggtgtgtgcaccaacagcaggatgctcatggcagacacgcagtctttgtcatcaatgctgggtggcgatgctggctttggtggcccaagcctgccgcctcatcccaccctgtcccaggcccatggccagtggcctccccgtattctatctcgccactcacagaaagctggagctgagccgtggcaggtggcacgtcccatatgaaacatgtagcctttgggggcgcccaggcccttcagcgaagcctctggggagtcccgggccccctcctccggcagcaccatgaggtgggcgcctgcatttcccattggcaggaagggaggctggcgctccaccaggaccccgcatgactcccctagtttcctcctgtgggtctgggtgggctcctgaactgtcctctcatccccaccctccgcttcttcccaggaagagtcctgccaacttccactcccaagaagtcagagtggcttccagaaccctgggctgggcttaggccctcaggagccccgggcattctggttgcagaattttctaccaattcactgaagcatctgtctgcagagtggctttgctgtcgatgaccatggcatgggcccttccagggccttgttccatccatgctgatctcatcccaccataagcatcacggtgggctcctgttttacacatgaggaaactgaggcatggtcactcggacaaaagagaaagcagagccagctctgacctggatcagggcccgccactggctcccgtcccgtttagggggcattaggaaccggggtctggcca

SEQ ID NO: 917219 - DNA, 4001 bp, Homo sapiens
acactcccgggacacccacactcccgggacacccacgcccccgggacacccacactcccgggacacccacgcccccgggacacccacactcccgggacacccacgcccccgggacacccacgctcccgggacacccacgcccccgggacacccacactcccgggacaccctcgcctccgggacacccacactcccgggacacccactcccccgggacacccacactcccgggacaccctcgcctccgggacacccacactcccgggacacccactcccccgggacacccacactcccgggacacccacgcccccgggacacccacactcccgggacaccctcgcctccgggacacccacactcccgggacacccactcccccgggacacccacactcccgggacaccctcgcctccgggacacccacactcccgggacacccacgcccccgggacacccacactcccgggacacccacgcccccgggacacccacactcctgggacacccacgcccccgggacacccacactcccgggacacccacacccttggaggctggtgtgagcagagccggtgaccgccctggggtgaaagcagatttgcatcagaaaagctctcaagaactgaggaaaacctgatgaagaacacacgattatctggaaggaacagaatggagcaaagaagataaaatcgcctgcaccccagtcccagggaaggccaagctggagcggtcacttcctctcgagcagggaacaccctccttggggggcactgcagtagccaccccgcgggctggctctttgccatgggaggggaaggaggtgatgttggcccccactgggccccaggacaaaaccagtggcagtccctgctcacctctgtgaggccccggcttccacggcatgtcccgtgtttctcctcctgaggccttagcgaccccgcctggggcaggaaggtggccggggtcataaggccatgctgtgagctagggctgcagccccacatcccaggcactgtccctcacagcccaccccccactcgccatccccacacgccatccccacgccccactagccatcctcacgccacaccccctactcgccatccccatgccccactcaccattcccaggccccagccccactcgccatccccacccccccatgccccatcctctgcaccccacacgccctttccatgccccatcccccacaccccacatgccccatccccgacaccccacacaccccatcccccacacctccatgccccatcccctgcaccccacacgccctttccatgccccatcccccacaccccacacactttcccacacctcacccccacaccccatgccccacatgctgtttcccaggccccacccccccacggcccatcccccacaccccacacgccatccccacccccgatcctccacaccccatcccctacgccccacatgccgtttcccacaccccatcccccatgccccaggcgccatcccccacgcaccgtcccctacctgtgctccccagcctgggagcaccctgtgcgcacttcctgcactctgagaggccccagactccctgcgcttgtccgacctcacaggcaggggcccatgggggccaggaaagcaccacccactcctaaagttctttgaaaaataatcccgccaaagcctgggccaccaagaagggcctcccctcctgtgcctggatgctggtttctagaaggaaagaaattgaacaggagccgccagaaaaccctcctggtggatgggggtgtccggagcaagggcggggtttgggaagcccgggctggctcctggatttgcccactgcccttccaccaagtttatggagaaaacctccccggacgcacctgcagccaggcagccctgaagcccaagcagaaggcagaggagcctgagggcctgggagaccatgatgaaatctctgcagtgctgcccctgcctgttgacattccccatgggactgacgggcaaagttctctgcctccaagggtgacagagggatgggggaggggaggacacaggcgtcctctgaacaccccagctgagagctgcacctggccggccagtggccatgcatcccctgctgcccagccactgagctcaagtgggggggacaggagaaaggtcaggtgaccccagctgtgctgcagagcggacggttttgttgccagcgtgcaggtgttaaggtgtgtgtggcaccaacacttcaaatacgatctagaattccaaacccctaatgtaagttgggaaacagatttaaactgcagatgaaaacttgtcccatagcaatcatgcgagtcaaatctcaagactgtatcttgggtgtggatgtaaatatttgaagagagcctccagaccaggccagctaggccgttgcctgcaagggaggctggtttcttaggtgagccacagagcctcactgagaagtgccgggaataggatcattctggccctgagctgggcacccccactccgttttgactgcaggcagcacccccattctccagcggtccacatcttacgtctttttgtttgttttgttttgtttgtttgagacagagtcttgctctgttgccaggctggagagtgcactggtgcaatctcactgcaacctccacctcccgggttcaagtgattcttgtgcctcagcctcctgagtagctgggaccacaggtgcacgtcaccatgcctggctaatttatatatatatattttttttttttagcagagatggggtttcaccgtgttgaccaggctggtttcgaactcctgacctcaagtgatccacatgcctcagcctcccaaagtgctgggattacaggcgtgagccactgtgcccggctggcggcagtccacgtcatttctacctgctgtcatgggcccaagccacaagctgtggtgactaaccaccccaggttgcccagggactgagggttctcagaatgtggaactttccatcccaaaaacactggggtagacggtcatccaagcctcctgggttgcccagcaggcctgtctgacccctcaagcagggagtatcctccatgtgaacagttgcattgctgatgacttctttggaagctgatgtccagttctttttacggctggagggagggaggtgattccttcccaacagccaagtcttagctcaggggtgcctttcaaagcagcccccagcacccccaaagcctccctgcttgctgctgacctgcatctcagtccagagagcagagcacttgctgaggggccgacagggcatgttttctcttccacccagcacagctgaagcccatctgtgcccctccatgatatcgatcccagggagatcgcttacaaagtagctgctccgtctggaataaagctcacgtccagctcaaatctggtccccgcggctctcggccagcacagcccaaggtaatttcaggacgtggaggggagggggccatatctaaaccctacccctttcccacctgagagtagatggctggctggtcttagggtacccttcccctttggggctccaggtcagaggtcctcaaccctctctgggcagcagaatgacctggggaacctcaagcgccaaaaccccctgagagattcagtggctcatggcctcggggctggtgaagctcttcaggtgatggaccctcacctgcatgcagccctctctgtgcgggcaggcgggagggggcaggaaccgggctatctggctgggctctctgcccgtctcactgctggccagggcggctgcaggtgcccgcctatggccattgtcctggtgtgggtccttgaggacacaggtgtgaggggctccacctggccccggggacccgctccatacctccctgagggggacctgcctgctggtctccctcccacgtctgtcccaggggcatgcctggaaccttgcctggggctggacccggccacacggagtagcaggtgtgggggctgctgcaccatcc

SEQ ID NO: 917220 - DNA, 4001 bp, Homo sapiens
cacacctggctaattctgtatattttttagtagggatgaggtttctccatgttggccaggctggtctcaaactcccgacctcaggtgatccgcccacctcggccacccaaagtgctgggattataggcgcgagctaccgcacctggccaagaattctttaaacaattctgtcctgttacaactacacattttagtgacagaggctgagaacagaagctctggtgtcagcaggagtggggagcccctcccaggaggcctggccgctgtcatgctgatgtccagatcctggggcgatgtcaccccctgggtccaggacttcctctcccttctctaagacagagcccttgaaaaaaatatcagttttaggtgagttctgcaaattgaaaatgaatagactagtgaatgctttatttaacgcagttacaaataagctggttaattttgctttgtttcttctattcatggtccagctaactaatggcagaaaaaaaaagccaataatcttgttaaagttgataaatgccacttacacaaagagtgggaagaagaaaggaagtttggcatttagcatcaggttactccaccagattataattgggtgctgtagagagctatgaataagtttggataacagagaaagcccattgctgggtgaatgccctagggagtaaagtcccgcatttgggctaggagtggtggggcaggaggggccctgtggggagctttgccggggttgggttagaactctgggtcgatcgtgggcctggattctctacctgccctcacagggttgccaaatcctgagattagtctaaaacctctccgaccttccaggaatgaggctttctgtagtctaggcagctcccgccctcccccaggattactccagataggaaaaaacaccctttcctcctgggtcagtacccgcggcctggatgtggtgctgactctgcacaggaaagtcctttagagacagaggctgcctggaagcctttataacgacattcatctcctaaaaggcattttgtcttttcttccgctcaggaaaacagtgtttggagactaactaattagtctccaaaggtttgagcccattgtttgagtccgctgaagcgaagagaatattaaaaaaaaaaaaaggcagggctagatcctaatcccaacaccatctccatcccgccggtacaacaggccaaagggtccagctgggacaggtgcacttagaggtgaggaagttcggcgggactggaggagtcggggagggggactcggcagcacagattaaagtcccacgatgaagccatataacgagaaatgccatcctcctagccgacttcggaaagacttttaggtgcgggtgtcccaccctgcttttcttcctctcccgatctccagggccggactccagggggctccggagctacaggaggaaagtccccgaggaaggaggaaacaagtgcaagagcatctcctgtctctagcgatgcagacaaggggtctttgcatccgcctggcgctctgcatcgcctcacaggatgggtgggcttgcactgaaccttgagtccttccactttcctccccccgggtggtgcccgccctgcccagggcagcgcggcccgcccaggagagagcgggggatccggcaggaggagaagccccgcgccccggtcccgtcgcacggatcaggagggtccccgtccggggaggagccgccgcgcaactcggagagcgccccccgcccgcggcccggcccggcgcggctcaccctccggtctcggcgcccgagtccacgcagtcgtcctcctcgccgccgccgcccgcctttgggtccatggtgcacgtcccggccgcgctcggcttgcgggcgccgtcgtgacccggggcgccctccctcccggccgcccagtccgagccggccgggctccctccgagcgtctggcggcccgggagccggcaaacaactcaagcgccagccgcgaaccccgcgccgcgccctctcccgaccgcgcccggctgggcacccgcgcctgcgcccgcgcccgccccgcccctcgccgtccggcgggacccgcgtgtgcgcgcggcggtgcgcggggagtgcgcgtgcgagcgcgtgtgcgagcgcgtggggggcgtgtgagcgtgagtggccgaggtgtgtggtctcacacccgtgcgtctgtgcatgcggtgtgatgtgggtgcggtgtgcactcctggttgcacgcgactgtggctgtgctgagcgcgtgtgcccgtctgtggtgcgtgaccgcgtgtgtgttgtgggggcggggtaagtgtgcacacgagagccgcctctctcccccaggcccacagtccgggaatcccgagccccagggcttgccacgaggttccccacctcctgatctgggaggagcactgagaaaaccaacctcagcgcatcgtgaaagctgggaaggatttgtttcccttttgggaccaattcgaacacctgggtgttttcttatagtttctgaagaattgctgacgccaaattcattatcacctttctcagtacacgtctgagcggcatcccaccccctcaacttgccagtttacaataggtgtcatgcattcttttgctacttaaaaaaaaaaaagcctttaaaaataatttaaagagcattgaatgaacctgcaattcacgggttgttgcagcaaggggataaccttagggtgagttaatgatcgctattggaggggctcacctcctattaggagggtgaagagggaggcaagttggcagggcgggcggaaggagacttcgaacaacttgaatttagttctgacagccctatccaaaccattgggaggaattgtccttactgagcctaaaatttcttgcaccccaaacagcaatggacatattggtgggcattagctgaaagaaaggagcgtgccagttcttcaagggagattcccctgcccattttttatcttgcagccaggagggaacctgcctttatttactctgtgtgggaacaattcaaactgtgcctcatttgatcctcagggaagtgctgtgaaacaggcttacttttctattttaccgtcaaggaaactaaaccctaccgagttcgagtgcctggtcccaggacaccctatcagtgagcagggaagccaggtagtccacttaaggtagctggagcctgtgccacttacctagaaggctgatgagtgggccagttgtatcctcaggaagatggtactaaggaaaaggccagggaagaaagggtgaaatcagcatgacttttagaagatgggctttggaaaatgagatgctatttaaatgatttctgcctttctcaaatatccagagaaagggcatgccagaccaaaacctcaagccacatctcaaaatgatgcatggattcaggttcccctcgcccacaggggacacagtgttatcattcatcattggcatagcagtctaatggcaactcagtgatgcatttattatatggaagagaagcttgaacggtatcactgtattctagtgatgcatggctttctgcttcagttcccaggttttaaaagcctcacttcattttttgcttgtttgtttgagacagggtcttactctgttgcccaggctagagtacagtggcacaatcacagctcactacagcctccacctccctgattcaagtgatcctcccagcctcctgagtagctgggactacaggcgtgccaccatgcccagctgagttttaatttttttgtagagaaaaatatgttgcctaggctggtctcgaactcctggcctcaagtgatcctcctgcctcggcctctcaaagtgctgggactataggcatgaggcattgcacctggcccattttttgggagggcggggtataagagttgctggcaggtaaccagcacaagaaccttcaagtgatcactgcagggtatctagcccctaaacttacatggttcccacactccatagtccagctgtttaatgtcagtctctttaa

SEQ ID NO: 917221 - DNA, 4001 bp, Homo sapiens
cctcaggtaggcccccagactttctgaacaaccagaactacccctgtaaaaacaggtaattctttttaactaccgaaacaactacaaccactttctcttgctcaaccaacttaatgatgtcactatgagagcgttcctgtgtgcagatctatattgcaaaccacacatgcctgtctcgaactcttctgactttacctgtgagcatcagtgtgcagtctcattgctattttcctgacaagactttttcaacttccttttcttaaaagatgtaacagagtttgagccaactgcatgaatgtaagaaacagttaaagtgccagcttgattatctcagataaccggggacttccctgatcttccaaggactcccagaagaaggcatcagtcagtccaccagcaatccaccaggtattctcatctcaaacagcaagccaagctcttaataaccgcagaaaacacaaagtaacaaaaccatagccaaaaaataataataataaacttgagaagacaccccaaccaagcagagataggaaagtgcaggaaagggggaaacccccgagggttcctaccttacagtcttcaggacaggatttcaccgagtactcctccgactgtaaatatttgtggagcacgctttcaaactcttcgtatttctcctgagcatggtggtcatagtcctggtaagcctcgacgcactgcctgcaagtggtcatctcgccgccttccttgagcaccacatccagactgcagttcaaagtgttgggactggacaaccccgagaacaactcccaaagtgtgtaggaattacaaaacgaaaggtaaaaatccgacaagttccagagcggagtgggatgcttgctcctcacctcctgcccgtcccccccggccgccccccgactccagttcctggcgcacaccgcgtccgcattctccaccgtgaagcactggcccgaggacgcgccctgggggtaacaagtctccaggcgccacacgggcttggcagagtttcctagaaaaagagccttgccccggtcgtctttgcctcggttgcccttgccgccgccgccgccgccgtctcccggggaggggggcagggtgggggacgaggaggcggagaggagtctgtgtgcctgggcggcgggcgaggactcccccatgctcgccaggagcgcgggccaggagggctcctgctgccgccgctgctgctgctgctgctgccgctgcctctgctgctgctgctgctgctgctgctgccgctgctgctgctggtgctccttgtcccgggcccgggtcagcttggcctcggcgcagaaccacaagtgatcagagagcaggactgtgaaaaacaagagagatgccagagacagtcgccatttctgagccctctcggaatcgatgaacggtttctcgttctctcggggtgctgccaaccagatttttaagccgtcgtcatactgccgacacatccaagcacccctggtcatattttgggaacgcacagccctggccgactccaccgtgagggcgcctgtgccggtgtcaccacaatatgcattgacttaaagggtttaatttccttatcccctcctcccgtttcttctctctcctctctctctttctctctcttcccctctccctctctcctctctctctctctccctctccctctcttttatctctctctgtctcttttgcctacataaatattaccaggctttgaaggaaggtctgacttgcttcctaatcatcagccgaccccatcctctgtagagtgggaaacaataatggagagagagagagagagagagacggaggaggctggtgctggtggccggcggcgaggctgggtgcagggggcgatggtggaggtgacagggtggctggcgcggctccggtcacccaggcattgtcagcgcgcgggtccccatggccccgcggagcccagcccgctctcccctgccaggggcatgccgcgcctccgctgcccactgacggcgcccggagcgcctcccctcctcctcctcctcctcctcttcttctcctcctcttcctcctccttcctttccttctccttcttcttctcctccgcctcccgctcctgctccgcgctggctctcccagagtccggagcctgggctgcctccggcggggcgctccctcccccccaccccccaccccgcgctctaagtgctgccgccgccgccgccgccgccgccgctgccgcagggccgcccgcgggcgccgccgccggggctccgactgctgacgccgcctcccgcggagctccgggccgaatcgcctgggctgggcctcccgagagccacagtcatcttcagtccgcgggctaagttgccgccatcttcgtcctggagaaacacttttttggggggagcgctggcttttgcgtcatctcctcccgcgccgagctcgctccatcctggcgcagtggcgccggctcggcccgggaggagggagaaggcgcgcgggggcgggcggcggcggggccgcggggcccgggggcccccgcccggctccccgggctcaggcgcctgctctttcctttctgtccccctgtccacgatattttgttttaatcactgaagagaaaaataaaagtcagactgcggacggcatggccggtgaggctcctcgcggccgcgccgcccgcacgctctggctccgggaagcgtccgagttgcaggcgcccgggcagaggtctctactggtgcgagggtctgggcagagtcctctcaactaaggaccgagccacttcggatggaaggtgggggtccgcggaggaagctcgaattggctagaggagggatgaggtgacatttggtctctgaatgcgtctcggatcccggaccgcgagatccatcgctcccagtgcgtgcagttattccgtcctgctgtgtgacacgggagaatggcgcgcacgcctgtgcacctgcatcgaccgtgtagctgcctgggtgacagccacccatttgtctatgttttctttcctattctaaagtaaacgattagaagtggcctcatagagtcttaggaagaaacagtaagccctgtgccacccggggtcactgcctagccctgccctccgcgcgcaccgtccgcgtctccgagggctcctcctcggacctggaccctctggagcggcttcgaccctccctctgcccccgctgcctgcgtccagaccccctcccgggtgggctcctccgaggacctccgcagccgcgggcgagctgggtgcctgcgagtcgccgccgcagtctgagcctctggtgccccttagcgttggctctcggagttctgagaagggaaaggagacagacactctgggaaaatctggggtcacctcgattccggctcctacgctggatgccgtgggcaagcatcggtctcctttgatctgaagatcctgcccactccgccccttgcccctgccagacccgcgggagcagcaggtggcgtgggtgccagacgctgccggtgcgcaccgagtgcagcgctgccccggctcgccccgggggtcgcgtgggacagcggtttgcggtgtcgccctctctgcggtgctttccaaggaccctcatgccccgcccgggtgcacattcaccacatgggtcttactaggtgacctctttctaagtaaaatgcattgagaaaccaaagggatggggcatccgtatccattttcctttaaggagcgctgtgggtgttggggatgcgggagaagtaggtgttttttaaagagaaaattgcaaaacctcttgggcaggattcgacctactagcctcttctgctgcataataaggtactgtatacactaaattttacccctaaaaattttcagttcttaccaactataggtaatgatcatccaaaagccgcgtcctgtttgatggctggtttactcaagtgtcatgtagtgttttaaaagacgatttgtgtaagtagatcattctagtactttcgatttcagtgtgttgaatttctgagta

SEQ ID NO: 917222 - DNA, 4001 bp, Homo sapiens
caagatgcttaaaggatatgttcattggagcatattggattttggatttttgaatttgggaggctcaactggcaaagataatgtaaattttccagaatcaaaaaaaaaaaatctggaattcaaaacacttctggtcccaagcattttggataaggcatactcaacttgcatctaactatccataattattgttagcatttggttgatttccttttatttgtttatttatttatatgtttttttgagacagagtctcactctatcatccaggctggagcacagtggtgcgactatagctcaccgcagtcttgaactcctgggctcaagccatcctcccacctcagcctcctgagtagctgggactacaggtacacaccccacacccaattattttttaaattgttagtagagataagatctccctatgttccctgggctggtctcaaactcctgggctcaagttatcctgcacctcaggctcccaaagtgctgggattacaggtatgaggcaccatgctgagcttcactttccttttatttatttattttttttttctgtgtacattgtgtgtaattttagaaaagggagatcataatttatacattttgtgcactttctcagatcattaaatattccttaaaaatatgatttttagtggcagtgtagtatgcctttacgtcattctccacttcttgcaatttagatgtgcaattttatagcattgtactataaaactattaaacttgtcatgtttccacttgcctgagaaagatacagaataatagagtcacatttgctatgattaagtctcctttcctggtgatttagggtttagagtctgaagtgtgtataataatatgaatttaacaatccagcaagaatagacatattggaataggttgccaaatcacaaagtgcaaacccagagtattttcccctctgcttactcctttgtctttgttagcagtgtgaattactgaatgatagaaagtaagaccacagcaaatcaaacatagtaacaatctgctaaacgtagattattattaatacctgcacgtatattaactgaagaaaataaactgtaatagaggctgtatggcctttagaactagaaagacttgagtttctttccttctgtaagcctcagccctctcatccttaagacagcagttacaatgcctacctcactgggtgtttgattcactgaaatcgtgaatatagaatgctctcactttatgccagtttcttctctctctacccgaccttcacgcatgttcatgcacacaaacacatgcacactcataggttcataaacatacacatgcttaaggagtattgtaatacatgtggagactgatttgagttcacacatcgaaggttccattcttccagaagagaaatttattaggaaaacattagtcaacatctctgtgtgtactgtttctgctatataaatgtctaaattaaactgtaaatattttagtcagtactgctttcctttaatgtgcactccagaaaccataccaaccaagatatactcctgtaatattctctgtgattgacacctacgctctatcctgtactcaaatcatttcaatatccctcctcccattttccagatctgtagaacagagaataaatatgcttcaagctggaaagatttcttctctcctcaaatagcataaagaaatgactgatgctctttcttatggcaacaattcatgtgtgcttttctggggctactgctgaataaatttatcttacctattcaagtggcctatacctgataaaatttgattaaaatactcatggaattcagggagagaaacatctacaaaataatatatctgaaacaaaaagacagatttgcctaaaaagaacttaccctatactgtagttcccccacttttaaaagctgccattcctattcagtgtagttttcttacgcggactctgtttatatgctggtggtggtggtggaagtctgttgataagctgatatccaagcaacatcatgtgatgaaacaaagagctggggaaatctggctgcatgcctttcttcacttctgggtaacattcagctacacagtttgatattttttcttccacattttgtgtctaatcaagtgtcatcttctaaatctaccatatctgtgttacatgcagatatcgggggtaacatgcatagaggcagagattctaaatattaaaggtcaacaaatccatcagggcaatgggccatgacataaatatttccaaaatttggagtcagtagtccccttcctcattgctcaggatgatgaaggaagagttcctgaatatagaggtatgggcatgaatttgcctgtggtaacctatgaaattattccatagtttaagctaagttccctttcattttgtgggggaataagatattctccatattttatcttaattagaggctacatatgatgataattaacctgtggcgtaagactagagcccacactgacctcatcctttcttctgtgatagcattattctactggcttcctttctttctcaagtgtcctccttctgaatgccagcttatctgcaaagatgaagagttcctaaagaaaagggaagaagaaatatcaaaagaaaatacattcaaaattcttaggagactaaggggaagaaaaaagcagggagatgagagtgatgaatcatatgccttaaagaagaaagggctcaacagatgcaaaagtcttgcattttttccccagtaatttgaatgcagacctcctgggaaataagcacagcacaaacaagtgtctttaaatgccagtaaataacataaaatctttcactggatctgagaggttgatgattctttaccaagagataaagaacagtggtgtgcagagttgacattgtcaatcgagtcttcctcaaacgtttttccaggatatgatgaaattcattctgggtgcactgcatctgctgatgttgcacacacatgctgaaattcctaccagcttgccttggacgctactcaatcaggagaacagtaacagatctgtgtttgacagagggcatttaatgtaaggaatctgttatgaaaatatagaaatgggttagaggagtaaaacaagaagggttaggttatccaaggactggcaattgcactaaactgtgattgcacatagagctggaggacaatagggaaaatgattttacccacagcccatggacactgtgccatagaggctgcttcctttggagaactgctgcctgagcagcgcctcaggaacctgtgctcaccaggcacccttgcttctatgttcttgcccaaactgctaatcttgctgttgctgtcaccactgttgctgtccatgtggctgctgctgctggcactgccacaggtgcaagcagaaagtatttttaaaaaatggcttcttccctccagccttcattcatgtcctgccctccattggatgccagctagcaagggattttgggaaatgtattttgcagtcttcctactactctgataaacagaagggtatagaagaatcaacatgaggccgacagatggtggacactctctaacacaaacacaaatctaagaggtacctttgggacctatgaagtcaggcaggaggatgaaggacttagacatacagtcaatgtttacctaacatcactgaaagttgtcaatttataagaaaagaggaaataagataaaactagctatgtagatggtatcaaagaatgagatctaaatttgtagacatattttaaaatataagaatgagggagtaatgcatatcctaagtttgggacaaaaaatgttttcccaaagactagtttaacatttcaaaaaggatttaaactgattacaaaaaaaatgggaaagaaacacccataatctaattactatagggaatacaatgtcaactattagtagaaaagttgtactatttcacagttaaaatattggtacagcaatgagactcactgcttaagacattggctg

SEQ ID NO: 917223 - DNA, 4001 bp, Homo sapiens
ccaataatgcttctatttattttacccagaagcagatctattagccagacattctaaaaacacaaacgcttcgttgtgcttggagtaactccaatattgatgccttgctgcagaacgatgctgcaggaatataaagtgagccatgtgctagctgtacccacttatgaagcacactgtcagaaactgtcacatcctggagaccaacccatccgaaagactgagaataaaccccctacgagaacactgtggaaggagggagaaagccaaagataggatgaagcagggccctcctaaagtctccggaacaacgaagccaatttttaaggcaactctccctaaagctttcaggaccagaaagatgtttctttctcctctccttgttcagactgaataagaaaagcaagacaatgctggaggatgttctgaaatgggctccgcaagtcaccacgtgcaaagcacattaaacagaagccagtgctaggccagggtttggctctgaagatgttgcctactggaaggagaggggcccccgggggtttccacgcagagaccagggctgggcggtcaaacctggtaaactgacaaggagaagagccttaacaacaatataatgaaacggccagaggccaccggtactccccagggctgggagagacagggaggccgaggctgctaaactgttccagatgacaagcaggctctcccacgtctccacgaactgatcagataccagggcctcgcttctttgtgagcctcagctccctcctttctggggaaccctactcgatccccaacagccgctggcctccagctgccacaaacgagatccagactcattacagggaattcgtatttccccccctcaaataaaacacacacacacacacacacacacagagtctccggggtccagccggatcacacagctaaagtttccggaacttgaatcgtaaaaccacaatcagaagttgtttggaaatactcgccgcaaagcaatctgtcctttgctttaaaaaataaaaaataaaaaaaactttgccctgcataaaggcagacagtaaagagagacacaaatctaacttgggcagagggtgtgttcctctttgtcacccgccgggaaccctcgcgccgcgcgtgggcgagcggcgggcacccggcggcatccgcgccagcggccacctccccggcccgcaaccggcctcaggggccgagattgcggcccgaggtccggaagcggcgtccagcgctgtcagcgggcgggtaggacggaaggaaacgggggaagggcgccggggtcgggggaggcgagcggggaccggcgcggagccccgcagcccgacgtcggcggaggtgaggggagaggggcgcagggggcagcccggagccccgaggcccccgagctcctgcgatggtggccggggctgcccgggcccgacccgccgcccgactgcgcagggcaggacctcggggaccacgcgcccaccttcgcccgcagccgcggccgtgcgctgcgggagcctggactcgcacaagttgccgcccgcggcccggaccccgccggcccccgccctcccgccgcggtcattgttcaccgcgcgcctcctacctccacagcgccggcggctgcggcggctccctctcccggctcgggctccgggatcggcggctcccaagcccccggcggccgagggcgcggcggcgccggctattaatacccgcgggcggcggcggcgcgggcgcgcgagcagggctggcggtggccggctgaggtccgagccatcaaaggtggcgcggggcggaggggagggcggagcaggcggggtgggtggggagcgggctccgggtcgccatggccgcctcgacgccggggccagcgctactcgcgcagggaggagcggcgcaaagcgggcagcggccgcgtccccgccccgcgccccagccgagcgcccgcaccgctgcgcccgcgccggacccgccgcctctgaggccggcgagcgggaagtgcagtggccaccgcccctccccgggtctgggccggcccctcggcggggggaggcgggcgccgcgcagcccgagcagcggggacgcgggagagccacagccccctccagcgtccgggcccgcgccctgcgcccgccccgccccgctccgctccgcccgggcaggtgcgcccaggggcctcccgagcccagcgcgccgccggggatctgcgcctctcttgggcttccggccagggccgggctccgcgcggcgctacctaatgcagcgcggggagcgccactggcgagacgcgaatccagcagctgtggcgaaaaacgaaccggggagagcgggagacgtgtgcacggcgaagccgggagcggcaggcgggcggtcaggggctcggactctgcaggtcgctttttgaggtcctgcctggggctgcttcgcctgcgacgtcgcgcggggaggacagtcttcagggacccaccgagccctcccctcccccggagccacaggcacgggcttccggcaccaccccgggctgcgcgggacttaagcttgggggagcggcggccaccccgcgcccgcccacgtcctggcccagcgccctccgcccgagcgaatcccatgacagttcccgcccgcccagcctcgggggacagtgcccttggggaatggcgtgggggaggttaggagtggcttgcggtgcttgagagccttcggggtttcgggaactctacggagcggggagcaagattcaggacccaggaggcagcgatctaggggcacagtcaccgtccccacccagcagctgccgcgttaccttctcttcccccttctgagcctccagtccctctctctaagcgtggcgggaagaggcctagggcgcagcaagtgacgttctgccagacccggggctagcggattccggccttcggaggccactggctcagaaccgtgggccttttgcgtcttacaggagttccctgacctcagaccgagagggcagatttcacgggagaggcctcaagtgaactcacagctggacaggagctgggcagaagtggagtgtagggaccctgatagaagggcgggttgagacaagaacaggggtcttggaagtagggggtgcttgtgggcagctcctggggaggagcagagatgtaatacttgcagatttggtggtctgtggttgaagagaagaaatggtgggtttgaggctttgctctgtcagcccaaccagctgtgtgtcacagatcagatttttttctgctcgtgattctctaagtgtggttctcagaccacgaccaccaccagcagcccctggaaacgtcaagaaatgaacattcttgggccgcatccccgacctacctaatgaaaccttagcaagcatctgaatcgcctgcagggataaaggactgtcaggctccatccccagagctgccgattcagtaggtttggggtggggcctgagagtttgcatttctaacaaattcccagatagtgatgttgctctggtcctgggatcacacttggaggatcacagtgttaggacagtgggtctcaaactcatggaatcatctgcgattaaaaaacaacaccctggttgcaccccagccaaatatataaagattctaacccaggcatcagtaaagttccgcaggtgattccagtgtgtagccaggtttgagaacagttgctgtaggcggctttttaaactctagtgtatacctgaatcaccagggaatcttgttggaatgcagattctgattcagtaagtctgagactgtttctaacaagctctcaggtgttacttgctggtccaaggactacacgtagtagcaaagtgctatgtcatacctcccaactaaaaggaaaaaattaggccgggcgcggtggctcactcctgtaatcccaatactttgggaggctgaggcaggtggatcacctgaggtcaggaacttgtaaaccagcctggccagcatggggaaacctcgtctctactgaaaatacaaaaa

SEQ ID NO: 917224 - DNA, 4001 bp, Homo sapiens
tttccacgcagagaccagggctgggcggtcaaacctggtaaactgacaaggagaagagccttaacaacaatataatgaaacggccagaggccaccggtactccccagggctgggagagacagggaggccgaggctgctaaactgttccagatgacaagcaggctctcccacgtctccacgaactgatcagataccagggcctcgcttctttgtgagcctcagctccctcctttctggggaaccctactcgatccccaacagccgctggcctccagctgccacaaacgagatccagactcattacagggaattcgtatttccccccctcaaataaaacacacacacacacacacacacacagagtctccggggtccagccggatcacacagctaaagtttccggaacttgaatcgtaaaaccacaatcagaagttgtttggaaatactcgccgcaaagcaatctgtcctttgctttaaaaaataaaaaataaaaaaaactttgccctgcataaaggcagacagtaaagagagacacaaatctaacttgggcagagggtgtgttcctctttgtcacccgccgggaaccctcgcgccgcgcgtgggcgagcggcgggcacccggcggcatccgcgccagcggccacctccccggcccgcaaccggcctcaggggccgagattgcggcccgaggtccggaagcggcgtccagcgctgtcagcgggcgggtaggacggaaggaaacgggggaagggcgccggggtcgggggaggcgagcggggaccggcgcggagccccgcagcccgacgtcggcggaggtgaggggagaggggcgcagggggcagcccggagccccgaggcccccgagctcctgcgatggtggccggggctgcccgggcccgacccgccgcccgactgcgcagggcaggacctcggggaccacgcgcccaccttcgcccgcagccgcggccgtgcgctgcgggagcctggactcgcacaagttgccgcccgcggcccggaccccgccggcccccgccctcccgccgcggtcattgttcaccgcgcgcctcctacctccacagcgccggcggctgcggcggctccctctcccggctcgggctccgggatcggcggctcccaagcccccggcggccgagggcgcggcggcgccggctattaatacccgcgggcggcggcggcgcgggcgcgcgagcagggctggcggtggccggctgaggtccgagccatcaaaggtggcgcggggcggaggggagggcggagcaggcggggtgggtggggagcgggctccgggtcgccatggccgcctcgacgccggggccagcgctactcgcgcagggaggagcggcgcaaagcgggcagcggccgcgtccccgccccgcgccccagccgagcgcccgcaccgctgcgcccgcgccggacccgccgcctctgaggccggcgagcgggaagtgcagtggccaccgcccctccccgggtctgggccggcccctcggcggggggaggcgggcgccgcgcagcccgagcagcggggacgcgggagagccacagccccctccagcgtccgggcccgcgccctgcgcccgccccgccccgctccgctccgcccgggcaggtgcgcccaggggcctcccgagcccagcgcgccgccggggatctgcgcctctcttgggcttccggccagggccgggctccgcgcggcgctacctaatgcagcgcggggagcgccactggcgagacgcgaatccagcagctgtggcgaaaaacgaaccggggagagcgggagacgtgtgcacggcgaagccgggagcggcaggcgggcggtcaggggctcggactctgcaggtcgctttttgaggtcctgcctggggctgcttcgcctgcgacgtcgcgcggggaggacagtcttcagggacccaccgagccctcccctcccccggagccacaggcacgggcttccggcaccaccccgggctgcgcgggacttaagcttgggggagcggcggccaccccgcgcccgcccacgtcctggcccagcgccctccgcccgagcgaatcccatgacagttcccgcccgcccagcctcgggggacagtgcccttggggaatggcgtgggggaggttaggagtggcttgcggtgcttgagagccttcggggtttcgggaactctacggagcggggagcaagattcaggacccaggaggcagcgatctaggggcacagtcaccgtccccacccagcagctgccgcgttaccttctcttcccccttctgagcctccagtccctctctctaagcgtggcgggaagaggcctagggcgcagcaagtgacgttctgccagacccggggctagcggattccggccttcggaggccactggctcagaaccgtgggccttttgcgtcttacaggagttccctgacctcagaccgagagggcagatttcacgggagaggcctcaagtgaactcacagctggacaggagctgggcagaagtggagtgtagggaccctgatagaagggcgggttgagacaagaacaggggtcttggaagtagggggtgcttgtgggcagctcctggggaggagcagagatgtaatacttgcagatttggtggtctgtggttgaagagaagaaatggtgggtttgaggctttgctctgtcagcccaaccagctgtgtgtcacagatcagatttttttctgctcgtgattctctaagtgtggttctcagaccacgaccaccaccagcagcccctggaaacgtcaagaaatgaacattcttgggccgcatccccgacctacctaatgaaaccttagcaagcatctgaatcgcctgcagggataaaggactgtcaggctccatccccagagctgccgattcagtaggtttggggtggggcctgagagtttgcatttctaacaaattcccagatagtgatgttgctctggtcctgggatcacacttggaggatcacagtgttaggacagtgggtctcaaactcatggaatcatctgcgattaaaaaacaacaccctggttgcaccccagccaaatatataaagattctaacccaggcatcagtaaagttccgcaggtgattccagtgtgtagccaggtttgagaacagttgctgtaggcggctttttaaactctagtgtatacctgaatcaccagggaatcttgttggaatgcagattctgattcagtaagtctgagactgtttctaacaagctctcaggtgttacttgctggtccaaggactacacgtagtagcaaagtgctatgtcatacctcccaactaaaaggaaaaaattaggccgggcgcggtggctcactcctgtaatcccaatactttgggaggctgaggcaggtggatcacctgaggtcaggaacttgtaaaccagcctggccagcatggggaaacctcgtctctactgaaaatacaaaaattagctgggcgtggtggtgcgcgcctgcaatcccagctactcgggaggctgaggcatgagaattgcttgaacccgggaggcagaggttgcagtgagccgagatcgtgccattgcactccagcctgggcaacaaagtgagactccatctcaaaaaaaaaatcataaaaataataaaagcaaaaaatcatagaaagcgcagaaaattagaaaagtgacattttcccagtcactctctttgcaagaccgacattttctacatgttacagcatttctttcatagtctttgtatgtctagaattagatttagttgtgatcttaaaactatttatgatcataacacataatatattgatcatattaatcaatatgataatacataatatcccatgttgccttatctcaacattatcaacatttgtgaaggtgacttttaaaggagccgttctgaggtttgcaggctgagggcaggagcccatggggagagagttaatgggggaaaagagaggggagaaggggcagttctgggaatctagtta

SEQ ID NO: 917225 - DNA, 4001 bp, Homo sapiens
gtcaatgagacattctagactctagaaatctagagcaccaaaactaggcctcttcagggctctggcagtttaatttcctgcaaagcttctaggccccaaataatgcaacttaggccaccacagcttttggtgagggactgatatgactacaaactgctaaatagcaaactactgaggaaagaccacagactagctgagcagcacaaggagttagtgaactaactctatgttccataaactttccaggtgggcgcggtgggccacgcctgtaatcccagcactttgggaggacaaggcgggcggatcgcttgagctcagtagtttgagaccagcctgggcaacacgatgaaacctgtctctacaaaaattagctgggcatggtggcccatgcctgtagtctcagctactagggagcctggggtgggaggatcgctagagccgagatcgcgccactgcactccagcctgggtgacaaagtgagtccttgtctcaaaaaaaaaaaaaaaaaaaaaaaaactttgaaagaagcaacttcattaggtgaagaccggaagtgaacagctagccgtgtgcatcgttgtattaggcacttttacactgggcatgcaataattttaaatgctcatttgtagttaactctaaaaagcctattttggcatcacagttcctttctgttctgcttttactaatatcaaactaatatgcattctttggctgaactacaagaataaaacactataaagaggttaactcacaactaaatgcttagagagcgcacagtggcgaaaatctgtctacaggtcatatagatagatagataactgatagttgatggtatttttataaatatttcagagataacagaaactaagttacttttttttcaagttagaaaaggaggattctaattaaaaaatctgggtcactcaactggatatcattagcaacgacaaaataaaaatgatctctctcacctctcagcttggagatacagaccatttactgggctgcttcctgacccctgtctgcaaccccacctaaaggactgcccacgccaaaggcagacgcgaatccgctcaacacaagttgaccaagtttttcgcctggctaagcggcaggggcgtcccctcctccctgcgccacctccccaccgactggcttcccctgacatttctcatgcgccccaccctgggcagtttgctttgacatttcagtgcctcattgctcaagctaccagcacgggcgtagccgacgccgggagagcccacagagtgcgagctccatggtgcctgtcaccagcccccgccaagggtcataaagcctggcaggagccgcggcgaacccgggagcggcggcgtcgcgggcaggctgcaggcggccgccgcacacgcaccacgccttgttgacatgtttggaagcaggcacggcggggaaacgcccccaagcaagctccaaggtctgggtgccgcgccccgcgccccgcccggcactcctgaggagcggcccgcgcgcgccccggcccccgcgcccccccccaccccaccccaccccggcccgcccacagacggtccgcggtccctccccggctccgccgtcgcagcggggctcggccctgcccctccgccgttacctgctgccgggggcggcttcccccacacaccaccccgtgctccggggacggcggcggctgcaggtcccgcggctctcacatgaggcgcccctggccccccgcttcgcgctcccgcagccgcggccccccgcgctccgcccgcatccgaggcgctggtcccgcggagggcgccaacgcggctccacctttgcggctctggctgcccagaaagaagctttccttctcagtcccgcgctgtctgtgttcagggatccccggcgccgcgagagactacctcagcgagcggctgccaccgcgtaagcttcctgcacctgggccacaaacagcgagtctaaaatggcgcccagggctcgcggccgcgcgcttccctggcgcgtccccgcccaagggggcgggaagggggcggggggggggcggagcccggcgggagtagggccgcgcccaagcgggagcgcgcgctgcggccgccccagtctccttgctgtgggacgagcctctgccttcctgccagagatgtgactcccgcttgaaggggattttttttgttgttttgagatggaatgtgggagggctgaagctagctatatgtggaagagactatctgtggctgaaactggaaggtttagggaggtggagcagaaaaaagaaaggaaggagtctcgccggagcctgctggggaccgcggcccgcgggtggccgccccggatgcctgaaaccgaggagttaaatacagtctccgaagacccgcgcatcgatgtgcataagtggtgcttaaaagatgccaaggaaatgtaccagaatagtgagagtattaacgctgggattgcacatggtttttgtttttcaaatatttgtatttcccaatatttctaaagtggcttttatcattagagttattacattttaaaaacgacatttgctttatgaaatagagtcctgaaatttgtaaatagcttttgaaacgcaatggggaaagtaaaggattacaaagctgctgaaaagaaaacctctggtgaatccttttgtaaatcaaggcatctttgtaactgctacctagttgacttgttttaaagtttggattttttgatactgcgttttcttacagttagaaacattcttaggtgcaatatcattaagttgaatcatgcgccattcctctctacacctccaaaaaaaaagagagaaagtagttttccattcaaagatgtcttagaacactcagacccatgtataagacactgaaaagcagtggtgcccagggagctctccgttcttcccgttttctcaagaaattgagctaggaagccatgtataaagttacgtcgaagttcagtgtgaggccaggagtggtacaggcttatgtctgtaatcccaacattttgggaagccaaggcagaagggttgcttgtggtcaagaattggagaccagcctgcgcaatatgtccagactcttgtctctacaaaaaaatagaagagtaataattttaaaaaatcagacgagcttggtgtaatcccggctactactcaggaggctgaatcgagaggatggctggagcccaggagtaggaggttacagtgacctatgatgtcaccactgcacttcagtctgggtgagagagtgagactgtttctataataaaatgaattcaatgtggggaaatgccagtgttgtttgttcggtgttttttaagggcctgtcagctgtcagatcactgaatcaaactgtacaaagcctctagtagcataagagtgtggatttgcctgagctgcaacatttgtttaggtccctcagtgactggatgatgaggaacaataggaagttctaagaaggacaatgataattattaaggaaaaacaaataagtcaaatacaggcccatttatttaaagttgggtgaacagtataaatgatcagcaaaatacattaaaccaattcagtaaacatgatgagcataggttgcattacgttaatattgtatcacattacggttatatcacattccaatcatagttcttttttttcttttttcgccattatgatctattctcctcctaaacaagacaaggaccttggcacacttgacctattgaataccccttttcttccctgttattggcaaatattttatttcacctcattttttttgaaaaaaaacgtttattttttaatcagtcagtacttatttacatttatcaattgtatcatcaagatcagtggcatggtaggtgggagaaaggatgagtgtggagcacattgatccaactgggaaaaataatttattactgaccctgtttggaattgccaatgcatgtggtaataaaaagcagatgaacaattagtctctttattattgttttaaattatccacaga

SEQ ID NO: 917226 - DNA, 4001 bp, Homo sapiens
taaagcaaatcctccttcgccacccaatatggcacaaaacatttattgttcatatttataaaataatctactggctatattcttaagaaatacacacaagttttaatcattgtttatattaaaataagcttatttagtagatagtatgttaatttactttatgtagacagccaatttggagctgtatgtggtgaaaactgtattctaaaagatagtctgtttgatgacataagaggataagcacaatttaagtcataatagattgatcctccgtctatcaacggtgattaaggcagtcgagttggtctcattacacaaaggtgggctgaataaggctctaggctaatgtggaaaattaaaatccatttttttcttaatggctcctacactggtctgaaaatatgattgatcccaaattctccaacaagaagttcttattttacttatataattttatttctctaacagaacttccactctgattttcttcctatctttgcctttgaagcttgatagtaagagcaagtaatctccaatttcttaaatgtgacaacaagaaattgtccttttaaaatattcagcattagcctttaaaaaaaaagcatcaaaacttttggtcatcaatttgcaaatgtaaggacacgcactcactctttgagaaacacatgtatagcttatgcttctatcccccgtctttggaacaacagggcatttaaaacaaatacagctgggagccgacaatgtaatgtgctgggcaaacatatactcccattaacgtaaatagattcttcaatgtttcctaccaaccccacttggttatgaaaagccagcaatgcccatttcccccacagaacacaccacatgctcgcaaaacaaccagccttagcaactggatgcagagacaggcagagagagagacaaaagcgcctggctcctgaataggatgccttctcagaccctggcatttcaaaggcagtgaaaggtcatcctaggtactagtttctcaaagaaatacctgtagtaaggtaactattctagtcacctttatatagtaacggcttgtatctcaggcaattcgccagtttttcaattaaaactgacacatattagggatttttacttctgccccccgctccccgcaattcggattctttctttagactccctgagcctctgtccccatcccaggatttgactgaagggctgcagagcccagggctgcgcgctaagcagccttctgctgaacctcagcggactgggccatagttcacacaccctccactccttctacagcagctcccgctgggggcaccgccaggatatccacatttgtccaaggtctgggaacccgggaggtttctaggagaccccagagaccaagtgaggccaggcccaccccatggaaacccccaccagctcagatcagactgcgagcggtggctcgaccccgggtgtggcaggaaggggtgccccgcgttccagagccagtgccagtccctatcctcccgggaagccgagactcagggggaacaggtttcccagagcccagcctgcagggacgcggagggcaggagccgccggcgaggagcagccaacttgccatctctggcggctgcacttctcggcggctacaggttgcccgacagcggactccagggtccccgcgacggcacccagagtgctcagaagggaggccggggccggggtgggccgggaaaaccgagggagggaaggagcctggagaagctccgtttaggcggggagggggcgacccggggcgcatctcccgaccatgacccccacagaccttggcgccgcaacctgcgcttcttgaggccgaagatgcgcactttggagaagatatccaccaggttgccgttgcagagcccgcggttcttgctggggctgctccgcctcctgctggcagacggccggtcccagtgctgctcccgcgcctgccgcttctggcggatcaagccgctagcgatggccgcggccatggtggccccgggaacgggtccggggagggagggcgcgggaggacggcgagccgggggcaccggaggggaaggcggcggcgcagaccgtggctcgccctcggggcagaggagggggtgccaggcgggactggggagaggggaaggggggctcagtcctgaccgggacccatcgccctctccgcggggcgcggggccaggcgcgcagatgcgcccagggcgcagccggacgatcccgggaagccggacgtcgtggccgccgccgcttggccacgtccgagtggagagcgggaccgcggctgcgggcgctgctggtcaccgctcgtcgcaggaaccccggcgggggtcgccaccgccactcgcgctgccttctcgccctgcccggctcccgggcgggaggtagagccggccggcggctccccgggcgccggctggagggcgggtcccggcagggtctctgcgcgtccgtcggtccgggtcgcgctgggcaggactcagcgccgggctccagctgcccgcgggccggtgccgccgccggcgccgcccgctctcggcttctgccggtgattgtcaagtgctttggaaatcagcatctggagagaccaatcttctcccctgagatctctaatcaaacgctccgttcccaccccactacaccccctccacctatgtggtccccctcctgatgtacctcttcagaaagaaacaaaacgtataggtaataatgatttaaaaataataagaaagaaagctaagatggattgcagggatggggtgctaagaggccgagccaaagcaggtggaattgaaggaacatcggggcgctttttcttagatgcaactcgctggttcccgagccttccgcggcttggttggggcttctcggtcttaacgtggttaccggtgcactgaaactctcagcagcggttggagggcgaggtggtttccgccctccctgctaatccctccagcaccaacgcccccccgtcgccacccccaaccccgggttggagggaggagcctccactcctcacctagtccacccaaacttgcaggaccctcccttctgctgcaggaagggtaggtttgtcattttgaaaggctacacggagcaaaaaggagggaatggaaagagagaaggtgtgattaagcgagatagaaagaccccactcccaaatatgctccccagccctgggaggaggagatgacagccgcagtagctgctacagaacagcagctgggtaggataaacgcccaggagaatgttgaagaagtcagggcagaaatataaggggcagaggagggtgtcacactattccagggacagtgaaaagcagccagacaggacactccaatttgagctgtcatcttctggtgtccctgggcaaagaagctctgtcagggagcaaagccatctgaactgtgtctgaaattcaaatacaacagccggcgtctcctcccccttgattttctgtctgtgtcccgacagcggttccctcctggatacctgaaaatgtgaaggtccaagagaaagggcggcagtggagggcacccgaaaaaaacaaaaagccggggggaggttgggagagaaacacttcatgcttggatgaacacagttccgtggtttctaggatacaccagagtggcagaaccaagtgcagctctggctccgggcttcttacttttctcctcttccctttacactgctttgcctatcagctcaggcagctaaagagaaagaaatgctcgaactagacttctggaaattcagtgtgaagcaagggggagagatggctcacttggtaatcaagagacttgcaacaaccttcttctccagtgactgctttagagctggaaagagggcaagcacactacgcaggcagccctgggagcagttctcaaccaaaacacactttctctttgtctcaggaataggcagtagagtactcgccaccaggcaactggggggaagtgcagcagattacagggaggctgggcaccttc

SEQ ID NO: 917227 - DNA, 4001 bp, Homo sapiens
cagatggggtgaatagaaacggtgtaagaactagaacacagggaggaggactcagggcagagcccagagcccactgcagcaccgagtccacggagcagccagaggctactaccagagcctcaattgccaccccaaagtaccagctgggggcaatcttctccgccccagcataggagcctctgcccttttagactgtctaacaactcgcagtttctcctttgctgcaggaatggtggccgcaaacggtctcagcctccgcacccaccgcctccgtccccgcccacccgcacctcctcctcctctgcctcgcgctgcacccgcaggcggcagacccctcggagcgcgccaccccagctacgttgcattggcaaggttcggaggctggagggcagcagccacttgctgccccagtcgctggggctctgggtgccagtgcggcccccggcagagcccagggcgtcagggaggccgtggagagccatgatctactgcaccgcagtgccagcgtcaggagcttccagagcccgggctgccactgcgggacggccgatctgcccgctccctccttcagacacaaccccagacaaaaacagccggccccgggtccctctccaccctgaacggagctaggggacgccacacactcccggctgccagcgtgagcggttccgggaaaggctgcgcccagcctcctcgccagcgccgccgccaccaccatgcagccctccagcctgcctcccctgggttgctcgcccacagctccgcggccgcccccaatcgcctcggactgagacgcggggacgggaacccctgggatccgactccccaaatcagatgcatttgcatttcttatgtaatgtactgcaagttcccttgttggagccctttggaatcggggcgcatgatcaccagtaggcttaaaagcaggaactcacggcctggctcatccccacccctggccctgtgggaccccgacgcagggctttgacaccgctttctaaagggggggacttcaattacaaatattagaggggctgggcttgtcctctcagtctggggttccctcccggcgcaagccttgctcaagtattcccggtggcaggatgtgtcagaggcagacagggggaatgagttaatgctcgggcacccggagctggacgggggagggacgcgggggctgacggaggagcggggccgcgagggagggggcctcttttactttggtaaaggtgatcgtggtggcgaatattgtgcaagctaatcagaaagtctagagcaggttctcggaacccagctacgtccctcgaacctgctgcagaagtaaggggagctcgcggttctttttcctggcaactaccgaagcttcagctgcctggggcacaaccttaagccatagcccttcactattccaccaaacataggcaaccaaatacattaaaaaaaaaaaaaaagtttcctcctccctcctagtgatggattgtgtcacagccaagggatgccaataatggttttggggttcgtagacgccgatccagctgttacttgtttattcatgcaacacctctatatgcaacactgtcctggttcctggtatgtttcccctgccttcctgcatagcagaactgcagatctagctcgatgagcaacagacaggttattatgaggaaaaacataacatgatgcatgtttcgcttaccagttgggttcttgtttttcttaagactcttgccacaaagacactgcagcatatgcgttcctttgctgaaaatgttccaaagaaaccacattgatttgggcgaaaagcaatccagcagcttagacaccctgagaaagaagagatccttgtggttgcataataataatttgaaatcagttctcctgaagaggggcaccggttttaccataggaaaaacgataatattccggatcttctcccagttttttcccctcacgtggtatatttctttgagacttctcagtgattgtttgttttcggccagggtgaatgatttatcccccctcgatcaccaccggattattaccaaagggttggagaaaaaatcctttttcagcatgaagccaaacagaaaagcaaagagatcccaactgagatcaaaactaatcagggagaacagtaatgcacaaaagatccccaaagagaaaaccatagcctttttacttgatcgctatgaggatgggtggatctgcagaaggcaaagcaggattcatcttactgagagaagactgccattgtgtagcccctaggagagaaggaaaaaaaaaaaaagaggaaagaaagaaagaaaaaagaaaaaaaaagaaaaaaaaacaccaccacacacactcacacaccaataccacctccgagattgagtctgacagccgaagacagagcctcccttctcccagtgtcgatttttttttataatcaatcgccagtgctcagtgggatcggtttgaacctgcagttctcaatcaccacgaagaaaagatgcaaatttaggtgccccctccccttgtcagtcttgtagtaggtagagagcgccacaaatccccttcctccttcctctcactcttccagtttccaacaaccgtgagcatgaggaaaatctcccctccggattcctcgcccagcctcggatgtgagttacaggcattagagggaggaggaggaggagttgaagtttgcattgaaaagactggctttccatgacgtagccacgtgctttcagacccgtcaccagtgagatgcttcaaccagcccagggagggcagtgtcactgcagtctctctgctagggcccctcctgaagtctccccacccgccagctccagccccagccccaaacccagacccaacgcgcgaccctctccctcctccgccaagcgccagtcagcctgctgtttgctcttggagccaatctgacagccttctattaaaagtgaattttgaaaagtaaaaattaaaaattataatgagtaaaccttagaaaatgcatgttgggaggttggaggtgggggggaaataaagagaaaaatgggtttaatgcttctccacccagccaaaatcagttccaccttcacattttcaaaagcagcatataatgcacctaaaacattaaggaaaactcaagttcctttaattcttattattggactcctacttgaggggctgtttgaaaaatgtaaactagatatataacagatattaccagaaaccgcctcttaaaaggacaaccactaaaatctaggtggcaaactgtacttttgtggggagggtcatgtatacatgagaaaatgtatgccttttatagacaacacgttacctttaaataattgtgcagaaagtccctgcttaaatcacgccctaattctttgcatgtttctgcactcattaattgagctaacattaaattcaccctcatttacttctcatctgcacatctcacctacactaatccaacctaacaaaacaggcaagttttctattttcaccaacatataacccagcttcctacttgcccagaaaaatcaaaggatttcagaccaagctgttattttattttattctacttggaggaaaatacaatgtgcaaagtgatacaaacaattacaaaaaataatataacaaactccagagtacccgctactcaaaagtaacttagcatttcatcatatttttgagataaggattttaaagaagtaaaactgaccactcccattctctgtaggtaaatgaattaaacttatgccagcttatttctatttttataggtaaactgacataaaaattttaactctaatttaaatatatatatttagaagtttcttcataatttcaaaaaaattaaaactactgcctctactgcatggtatataaacttagatgtcgatttatatagttgaggattgatggaaaagactgatttgattttaaaagttgatttaaagaaaatcgactaactccttgattatcagttgtcaaaaaacaaaaaatggaat

SEQ ID NO: 917228 - DNA, 4001 bp, Homo sapiens
cggcaagcacgtgtgtgcaagcataaagtgggcagagccaccagccctcgagtctgcagccctcagtgctgagtcacaaataccctccgctgaaaaatgaaatcctcggaatgccctttaaaattcgctcgcagcgtttgcacgcgcgcacacactcacaccagagagccacgcaggagacctacacagggctgcacactatggaaatttaaaagcagaggttatcacttgatagctggaaggacaaaaacccctgagcgccctgcctcttcccaagtcattttcccccaagcctctgcccctgcttttcacggagcctaaaatatgactttagtcctcccaacaggacaatccgtcagcaaccttcgcctatggggctttcagaccctcacaggggagaataaacaatgcacttaatatacaattcaagtagtatacttactagaggaaagggggaaaggaaaaaaaccttaatttgggcacaagatacccactgccttcaagaaactgcattaagttcttagtagttaatgattaaagctttaaactcgtgcaatcagtccattcaaaagaaacttcctaaacccgtgtatctgatgcaaaagaactggaaacttgtattatatttataaattatgcccccctttaaattaaaagtagggggcctttcagtgtatacttgcatcagtgccagcagcagatctgcaattccggaggcatttttttttcggagctggcaagacagagagagagagagacagagatacagagaaagaggggaggaggggagaacccttcccacgtcccccacccggccaccaccttcttggtagttataatttcaacatgtcatctcatggacactaaagggttaatggtatacctaccaaatcggctgtggtctttcctggttccctggatagtaccattggggaagatttctaagtgaaatccagtcctgcagtatagctgcctccgcctgagaatcccctttaaatgatccaagtccgtgactgcgggtcccctggggagcccccctgcttcggactgacccaggtggtcacttaacaaaaccgggctgtccaccggcaacacgggcacattcccaaacggtaccgcatcctgcacaccgaaatagttcccaacttcacctaagggagccatcagaggactcggcttttggagcacaagaataaacaataatgatggtgtcaacccaggagatattaggcgaggtatatccaactcccctcccttactgcagttgcagagagagagagaaaaaaaaggttcttttcttcaatccattaaatgcataaataaaagtaatctgctgtttcactggcacaggttcaaggtcaaaccactgatagtctaagaaaccaccactttatactcacacactgacatattgataaacatatctatgtatctctatagatagatccccagctcttagcaggcaggaaggtcttcatcccatccgaccgtaataaggaaaaaaaatccgtagtttctccatttggtttgagatcagaatgaccatagcaacttaaatgcctaggcgttattatagggatttttaagatgcacgggctacgtcagaatttacggatcctgactccaggaaggcatgcgctgtttttactctctaaccgactctgcagacatcagcatgaatccttcaaggggaaaaaaaaatctcacgttggtggcggcgacaaatctcccctcccggtcccccctccaaaaaatgataataataataaaacaaaaagaagaagaaactttaggcgtccaaagctagtatccaggattctccagaggctcggcagatgtccattggcttagaacgggtggcgagcggcgagcgaggagagccgcgtccgggagctcgcgtgccgcccaggctgccgcgaacaggtgttgccgcgccggctcgcggagcgttgtagccgggcggagcgctcctcctgcgcagcccccgccggcgcgcagagtggcgcaggcagcggcattgggctgggtttaaggtagcgccgccgcagcccgggctccccgcggtcctagcgcccggcttactgcccgcgccgctctgcggcaggcgaggtgcggcgcgccagagcgcaggacttcctgggaggcagtcgaggagccctggctttacaaagaaaagcaaatgaaagatgcactgcgagaggcgggaggaagaaaccctgagtctcccgagactcaaagttctcctgcagaatagaagccggtaacctacaatctagctggctggctacattgatggagggtcagagtgaaactgggaaactagttttcactggggctctgtaaccttgcgttgtattatagaatatgactgagttgagagagtcggagggaaggggagttgatttaatggactcggatggccatggcagtttctcttccattcttcggccacacacacagaagcgcaaactatgtttcaggtaagatcaactcctctcccccgtcacacacacacacacacacacacacgcagatgcggccaccgtttctgttttgtttggagcgttctgctgggcatctttgggttggggctatgtttaggtcccgccccgctgctcgggtcccggcggccgcaaagcagtcggcaggggggcgccagagaaccttctctgtccccgacttcgactcgggcgcgcgtcttcgggagtctgggtggaggggagcgctccagtaggcgtcttctcgccctcaaaccacgctgcttaggacgagcggcgccatcccaagccgtgcatcggctcggggaagcgaaaggcgagttctggtgtctcactccaccgtccgaagcccgccgcggagctgggagggccgggcactggatgcttgcggggcgccccggggctgcagccgctccttcctgctctgccctgcggggccgcacgtggaagcctgagctccgttgcgcgggctcgggtttctgttagccgccggcggccttcgcgcccagcgggagtcagggacaaagaaacccgcctccgggggccgccaggggccctgccgggccgggcccgccagagagactggaggcggcgcgctctgcgcccgggacagcctgcctgcgcccggatccccagtggcggcgggcgcggagcgcggcgccccccaacacacacacacacacacacacacacacacacacacacacactcgcccacagccctcccgcggggccccccttccctccccctgctcctctttgttcacattgtcttagaaacggcccgactctcgggtcaagatggtgaaagttgccgagacttgagcgcagctccacactgcggggcgtgcaactgagaagcaaagtcgaaagcagagactgaacccctgcggtggggaagcgaatcaaaacctggttatgggggagaagtcggatccgccttagtagtcagctaaaggctggagatgcataactggggctggccctactccggacgggagggcttcgcctgaagacgaaagggagcgatgaatttgcagatttcgggggcgctggaggtgccagcgacctggagcgaccttcccctgccctccggggaggaaggcgtgctccggcccgggcgaggaggaaggagagaagagcgagtggtcctcccctcttcctttcccaccccccctttgccgcagtccagggtcattgggtgtccggggctggctcggtgcgtcttgcttacgtgtttctgaagcatgagagccctgccccgtggtatttacagcagtcacatccgcggtggtacagagcgggctttaacgttaactgctcggcggcagatacaagaagctgggtattaagtgtcacttctcataaaccacccgagtcgctcgcattaatctccgaggcagccagcagtgatgggtacagcaggggcgttcctcgaccagttgggtacagtgcgccgggatggttacttagtggggaaaaaagcgatggaagaaacagagac

SEQ ID NO: 917229 - DNA, 4001 bp, Homo sapiens
aattatgtgaagcagaaaatctaataaatcacgtacttttccctccgtaattttagattcatgtaatttagctagatttatctttacataatagtcgagtgaggtatttaaattctctaagcaattatattttaatacaagtgacttttcaaaacaaaaaatgtatttgtgaaatagaaaatacaacattttatttaatatagttatgttagcacctttcccaacctacagtgagttctcagaagttaccacttcgccctgtctccgggtttagtagtttctccaatctaattggaactattacttgttacttggaaactgacggtctagttagtcttcccactgagaaagaatatttaattattactgctttttgggtttaacaagctttttgttgttgttgttgttgtactacgctccatcctattgacttttcttcccgggaatcattgcaatgacttattttatattactatattttatttcatattttaccttttctccacgatgcttaaaagaaaggcgctccgaaatctggctctctgcgcccaggggaacgaggcacaaatctccgccactcagccccactgagcagagactgcgagtccgaaccctcaagttcctcggggctttgacccctcaatggcggcggtctaactgctggtaaaacccccggcccctgactgttccaccgcccgtctcccaaacgcccagcgaaggctgacttaggtggcgggcggacctcatcgattcctcaaaccacatcgtttggtcaaaatcgcccgccctctcttcgctcggattttaaaggctaggcttgtaagtcagtaagttaacggtatttgggccctgggctgcccttgtgggtcagggtcactgatgtccgcgacacggactggaccgcgcaccacgcctgctcccggcagaggccccacccgggtggctgagcgcagcgcactggggccccgcggtccgagagcggcggggaggagcgggcgctcgccgagcgttccccgggacagtccggcttggggactcaagcgggtcatgggatgccggcgctggccctctcctgagatcctcctgctcccccgcaggcacgagtcccctccaaatcggctcccctcctacactctcgtgacgcgaggtcgcggccagtgcccaatatcaccaaagtcccggcctcagcccagccccgggcagcctggcaggctttcaggagcctctgctcccggctccgggggaccctgcgtacctgccccaggtcctctgggaatgggctctgggtgccaggcaggtcccggtgcgtgctgctcctagtgcccagggcctcggcagtgagaccccaacccgacagctggataagggatcagcgatcctgtcgcaaacggacagccccagcgcggacccggtctgagcgctgatgctcgcgggtccaggccagccactcctcgaggcgctccctcggagaaagggcgcagcggccccaagcgtgcccgctgcaactagtgtcccaggttctcgccgtagccagcttctccgggctacagcctcgtctccccgcgtgcaccccgccctggcctcggaggctctgccctccggccgccccatcgcagcccgcctcaggccccggcccccagccgcgcctcacctgtgagaagcagacagctgagcagcgcgcacagcaggaccccggtgtcccagtagctgaccatggtgagcgcgacgcggcctgctcgcccggtgcccgcgctccccgcggccaacgacccggccgccagagtccgtcctctcgttcgccgccgccggccccgcgccctgagcgcccgtctcgcggctccagccaggagacaaccacttccccgggtaatcctcgccgccaggcgcccgctggccgctgcacccgagccccggagcccgctccgagccgccgccgctgccggggaggagccgagaggagtgtccgcctggcgcgctccgagcctcccgcggacctcgatgaagagcagccgagggcgggggcgatttataacctttccccagcccacttcctaccccggcacctccttctggtgacgtcaaggggtcccccacccctcatccgcctccccacctaccctcttcttcctcccaggctcgcttccctgcggctacggagaggggcgggggccgacgagggcgggtggcccggggccgagcgcgcgtggggaggtgctggcgacgcgggcccgggagcgcggccccggcaggttcagggtctttgctccgcgccctcttgcccttgcccctcctcctgcccatcgcgctcaggaaatccttgcagactccctccacccggcttactcagctctgggggccgcccgaaactggggaagggacaaggctgaagctccgccgcctggccctaggggcggaaagtccgatccaagggaagctggccgcgcctccgcgacggtgttcttggcacggaggactgaggcgcagtccggctgtctccccttgcctgctcttcccgcgctgtcccgccgctcctgaccccttcagactgtcccgagaagtctaggaaggcaccggagaccctcggcacaaggcactgaacctggagcgcctgaggggaactgacgcttgcttggcacctttgggaagactgcgaaccagctcaggtcccaggggagcgtgtccgtgtctttttcggccgcattgatgcacccgcccaagtcatttcctcagtcttctgcttcctagaagcaaaacaaggaataacattatgatacctttaaaaagctgaggcgtgaaactgctcctgcaacttggaagcgcagggcacttgaactttattccctaaatgctcgaaaaagaaatctttctggtggcagcttgctactcaagatgagtgactctgaccacaaccggctgaaattaacttgaggccctagatcatttgctatgacactaattccacgttgttcctcaattatgtctccattacctcaaaggctgaagtcgtcctggctgcacggagcagcccagtcttgtctctgtaaataccgcagatttgaaaaatagtcctattggaacccgtcagagggatgtaatacaagggactgtgatggctcttgaacggagccagagactcttcctgaaggactggactacctccccgcctaggaaggttgggtaacccaaagttgccacatttctgggctgcacaccaaggagaggccccggccactccacacaggaaatgcacgtctgggcacctggagccgcaggacctgagccactaactgtccctggatcccttctgcttcagaggcaaggaagactgccggagtcattgcttgcctgctggcttcaccagcgctttctgtttttccagttctcctcaccactcttcctggcgcctttctctgcctcccgcacccctgcctcctctaaaacccacagcatcatccctcagaacagctggaagcggacagctgatccttctccttgctggtcccccagcccagaacacagcctgggacatacgtgcggagccacagtgtctgttggtctcacctgagagctgcttgtcactcccacaccctctttcaaggagaagctgtcagcattgtccttctgcagcattcaacaggggccaggcattgggttagggctgaaaacactgatggagagccatcatctttgccttctaaagggcttggactgtgataagaaggtggacacttgaagtggctgcaggaccggcattccagtgctggaggggtgtttagtcctccatcagctcagagaagtaaaggcacatttattggcagggaaaacccaaggagggcttctcaggagagacacacatttgactctgggggaaagtggtccatagtaccatgtacaaaggtttaatttgctaatacattttttcaaatgccattttgatatttttaactcataaagagacaacactttccaaacctgctgccagcaatgaatctacattgtgt

SEQ ID NO: 917230 - DNA, 4001 bp, Homo sapiens
tatgatccaggaattctacttgtgggcataatcctttatactggtgtttatgtccaccatatataaaacaatgttcacagcagtgctatgcataattacacaaaattggaacaacttccatgtgcttcgtgaacataatggataaaataaattataagatctattcataccacggaatggtaccagcaattaaaaaaaaaaacactgctacagagaacaaggttgaatcttattattataatgttgagtaaaagaaggtggacataaaagagcacacgatgatggtttggtttacatgaagttcaaacataggcaaaagcaatccatggcatcagaagtcagaatagtggctacctggggagggggtactgacagagagggtggagctagaattgctctatatctcagtctgatcgtggttatttgggcacgtacatatgtgaaaactaatgaaattgtactcttaagatgtgtgcatatttactgtgtgccaattatacttcatttagaaatatctggagagagagacatagaaatttctgaattctttcctaaatagaaaagaattccatgcagcttaaatatcgttgcaagtattgatgcttatacctttagaaagcccattatgcttctgaaaaatgcacttactacttaatatcatacataatagaaagctaacattttgtattaacggaatctggaaaacatattgtactacacatttgaaattacagatttactaactagtaaagataactatttaagaactaaaatgtctttgtttttcaactcttttcccccgatttccattttttactttttatatttcagaattatttgtaacaaaagctattggatataattcctgcacttctatattgcaagcattttctctatttaccacagagacttcaagtcctagcatttcagagctgaaggggactcggacggactccctcactgcacagatgaggacgcggaggccgggggaggtgagtgtcagtcccaaggttgcagacctaggacagggaccggagctgccgggcacccagaactctgtcgccttcaacccaaattcgattcagtcctctcatctttccaaatagaaagctgacgcgaaccgatgggaagattttttttttcaataacaactatgctacccagcagattctttggggacagtcctcggagtccttgaaaacccctttggggtttatgccaggataagaagagactagaagaaagggacagctagtattttaatatgtaaatctgtttgcataatatttcctaggtaaactattcgttgatccaaccaaaattcggcggggctggggggtatcgttattgaggatgactcgctctaggggagaacgcggacgcattttcccatcagagttccctccataaatcaaaacctcaaaagaagagttaaagacgacacccaggtgtctacagtatccaagggccgggccaggagaggtccttggccacctggcgccgagttcgcggccgcagactcccacggacggcccagcacccgagcgcgcgggccgagctgccccagacccggcgcagcgcctcggcgaggccgtctgcgaagtccgggccgccactcgggaccgcggcccgagccagaggagagacttcggagaagagggaagaggacgcggggtgggaaacgccggggccgcaggcaagtagtgggcgagtccggagggcgcgaaagaggggaggggcgcgggaggcaatggaaggagcgagcgcggggaggagcgaggcggctgggccggaggaggcgcgcgcccgggtccacactgcggggtgggggctgagggaccgcgaggggctgcgagcgagcgagcggggccttaccgagcagcggcagctggccgccgtcgcgcgccaacgccggcatggcctccggagcccggggtccccaggccgcgccggcccagccctgcgatgccgcctggagcggcgcgcctcgcgctgcaggtggctctcttaaggatgcgcgtcaccgaccgcaaattccctcggactggtgcaaagtggaaggggggaggaaccctctccccagaggcagggaccgaggcgggagcggagaggttgggcagagccgagcagccggtgcctggcgcagcgctgcagccgagcccacgtgcccgccgcggtccgcagcctgtgctcggcggcccccggggctccccgactgcggcggggaagattgggcgcggtcccgccggagaagttgcactggctccgcggctctgccgccttgctgcccctgtgagtccccgaactctgtcgtttggatccggggcgtggggactgcagggagccacaaaccaccctcctagtgcgctgggatctttgaggccctgagaaaggcgctgaatccgctcggcacgctggcaactcccgccagcgcacaggcgagcattccattaagaaccattccattcttaattgtggactgatttcctttgtctctgcctccatctcctaggatgctcaggacccagtcagcggcgggatcaagaaaaacaggcagggtttcaatgtcaaccaaggcaattagggaggttaacaaacagccttcaaaacaaaacacacagaaaatacatcccagaggatgttgcgaatcatccgctcaatagttcttgttcttcatcgcataatttttcgagttgaaaattattattattttctttgcaataagttgaggattggaaagctctggatgccagttctggttcttcccttacttaactagccgtttgacctccacaaacctctgtttactcatcgtaaaggaaagggatggaccaaatggttcataatgtctctcccaattctaggaattccacgctcttaattattttaattattttctaataaagcatgaaaattgactgtttactcttggccatacagttcttttccttagatgttgtctacagtacaataattctttcccctagggtatggcagaaactttagaagtgtctaccatggtgcagccactatggaaaacactatagaggtttctcaaaaaattaaaaaaaatacggtccaacaattccatttctggccatgtagccaaaagaattgaaagcagggtcttgaagagatgtctgtacacccgtgttgaaagcagcattattcacagtagtcaaaaggcagaagtaacccatgtccacaacagatgaatgataaacaaaaatgcagtatatacatacgactgagtatttttcagctttaaagaggagggaaattctgatacagctaaaatatggatgaatcttgacattatgctaagtgaaataagctagtcccaaaaaatacaatactgtatcccattacaaattcataaagacagaaagttaaatggtggttaccatgggctgggggcagggggaaatggggagccagtgtttaatggatacagagtttcagttttgcaagatgagcagagttctggagactggttgcacaacaatgtgaatgtacttaacgctactaaactgtacacttaaaaatggctaaggctgggtgcggtggctcatgcctgtaatcctagcactttgggaggccgaggtgggcagatcacctgaggtcagcagttcgagaccagcctagccaacatggtgaaaccccatctctacaaaaatgcaacaattagccaggcgtagtggcgcatgcctgtaatcccagctacctgggaggttgaggcaggagaatcactggaacccgggaggcagaggctgcagtgagctgagatcacaccactgcactccagcctgggtgacagagtgagactctgtctcaaaaacaaaaacaaaaacaaaaagttaagatggtaaattttatgtatgtgtattttacctcaattttaaattttttaagtttttgtgtagctgctgggggtttaaaaatttttttaaagagtgttgtgtctaccttaggtcagaaacagaagtgaaggaagatggcct

SEQ ID NO: 917231 - DNA, 4001 bp, Homo sapiens
ccagcctgggataaaaaattttccagttaacctacacatagaaaactaacagatgatctatgaaatgaaacaagacaatatagtaaaatttaatgtagtagtgctaaaaaatttaaatataagatttaatattaaaattttaacaagatgtttctcctgtcatcatcccttcttcccactaactggtgtgattagaaagcaagattagtaggctacaaagctaaaagcaacatttcaggttatatttcataaaagatgtggtaaaaatccttcatcactgttttctgttgggccaccatctgtctcagtgagtacttcatctcattacttaagaaaaattaattcaaccaagaaaatatccaaaagacaggggattcaactcacttgaacatttgtgggtgacacaagatgacaagagttagtaaatacgcaaaaactaaatatttatccaaacataagatcagaaccacaaaactcaattcgtttctgcctaacatatggctcaaactcctgagtggcgtatgtttagtactggagctggtaacagcatggtgataaaatattatagtaagagttcaactgttatttcattcctacaatacagaagcatacacactttggtttcaagaactaaaaaacacagaccacagtaagaagcaaaataattacgttgttcggttttaaaaacccatagtgaacacataatgattataccgcaaaaagaaaaaaaaaatctcatcagcctgcgactcttatttaatagatggtcagacacaaaggtgtccaaaggaacttacgtaaaatctcacaaaagaaaatctcgaattcacaatctctagcacccccagcaaatcatcgcattccaccctctaaaatatcccaaggcttgtaacgctaacagttgaataaaagaacaattaacgaccacatccattaaaacagtccctcttctgctcgcaatctgacagcgaaattatctgttcattttcctttacctaacacatgacgtcgtttccaaagccgtgtcaaaagttcgaagatccaggttgttaaaaccgggcgaggactgcagcctcgagtccacctcccgactgaacaggtggttaactcgcccggggagaggaactgccaggtactggaagcagccacgcaggatcaaacagagggcgggttttcgaggttttaaccccaagatgagcggggaaaactctcttcagaaaagcgttcaagttcggcggctgccgggcggccaaagccgaaggcgccgcgggtgctgggcgatcctctcaggaggattccgccccagcccccgcccccgcccccgcccccgagccctccggagctacgcggctcgccgcggggaggaggcgggggacagagagaagggccgcccgcgcaccagcgccacctccctcgggctagatgccgcctcctcttgggctggatggcgcccccggccgcgcccccgcaagcgtgtcctggctaggctcggccccggcaggtgcccgactagtagaccggtcctgtccccggccccactgcccctctgcacctctgcccacagcgcgcccacagaagggggtggtccgcgcccctcgacggggccgagccctggagagtgccccggccctcagtcccagcctaacggtttccgcggcgcctcctccggggcgggacggggttgggacggctcggtgtcccccgcctttcgcggagggagtgcccgcgctctcacctccgagtcacgccgttctgaggcagaaggcggctcctctggcgcctcttcttagggttcctgatcgttgtctctctacctcagctgcagagtcagctctcagggccgccgcggccgccggcgcgctgactgttggggttgtttcctggcagtgacgccgccgcctcagccccgctcttcgctccctctccgcgtagctcccgctttctgtttcacccgagggaccacgaacgccgccgccgccatgcttactacggagccgggaggaggagcccgaagtcggcgcgccgagtgcggctgcgcgggccccgccgacggagcccgcggccgggaccccgaacccccgcctcgagcccgccgcgccggggctctctcaccggaacgcgagtccccgcggggccaccggcgcgtggcggctgagcggccgcgtttggctcccggagcgcccacaccctctcgggcttccggctttctcccgaggcccggctgcgcctggcttgtggtagcatccgctgtggccaggctcggagctacactcaggaaaagtggagttaatggaggttcctagagacactcacacaattctcaatccacatttcaaaaggctcccctgagacgcaccctgtcggcccctttccgaaagcacgcgaacttaaggctggcaggtgctttaaaagacactcctcccaaggactaggaagcctctgaaatgggcttggaagtttctaatcccaaagacttcgaacccaggatctggatagcaagcaaaaatatttagatatttactcagttgaaaacgtggggggtggcttcgtggtctcttcgccagccaaatcgcgtggaaaaccacgacctcaatttttacaacagcacgaagacttacaagtgagcgtagcagcgacttcctggaacctcaaacaatgtgggacgctgcaataatgcctgagggcttttgacttacagttgccgccggagacctggggagggggtagtacttgggccggtgagtccagcctcaggaactgtcctttcaaaaatggtgatggatgtaacaagttgcatgtctgggctttatttcagtgtattaattgtgcgatcttttaaaatagctgtatttttaaaactgttttacagaaatctctttaaaatgtgattattctctatattcttaaagaatacaatggctaattaaatcctttgttgataactgactctcaaaccgatatcttggccatacgtttaagtcccagaggattgctgcggtgtatagaatccctactttggtgctctctttttttccctctttggaatgttctcatcacctcttctaaaatccttcactgcttttcatctcctcatctgcctctatccactctgatccttcctcttattctttctgctttactgtttatttttcattcttctctcctttctcggctggttttctctgcggctccaggtgaagattgatgggatgtttatgtccacagccagctaatgagaggtttcttttcttctggttgtaaatagggcagtggtatcttgagatattttcattgctcttcactatcagaagttctttccctgtgagagatgtttccttttcttaacttttggatttggccctcttcgagacagctggcaagttgatcttggaataattgaagtataactgtatattgtttcaaagtatgaggattttatcagagtgtgggcgaatggggtggcttccccatcttactgcccaactatgcttggtctgagactaagatagtggtttccaaacttaccgctaagctaatactttcctactctgcttcctactcaggagctttttgaaaatacagaatcctgcaatctaccccctcaagattctgattcctttgtccagggagaggccaagacatggcacttttaaaaactatatttaaaaaaatatgtttgggacatgcctacatgtaaaggcagagtaaagaagatcagctgtttttgaaggagattaacacataatttaagaatgttattgaagacctagagattgtagtcaataatatgcaatgcagtaaggtgaagtaaagtgaagaccaaggaatttatggcctttggagagaagaaaacccacacataaatgaccctagcatgtgcaccagtatgagttctctgggaacagagagagggtcaagaaattatgttggctttgaacaagttctcttctcaatgcttcactttttttttatcaataaaatgggagccattttcaatcctc

SEQ ID NO: 917232 - DNA, 4001 bp, Homo sapiens
attggaaatcatgtgcatatccctacaccattctcaaagacacgatctagattcattttcattcaaaaatgcaccaacaatgtttcaaaaaaaaaacgtttttggttacttcatcaaattgtattttaaaaatactggcagattataaaatacacaagccttggatgtcatgaacatcttaaaaaatgcaaatgttttaaaacagcgcaaatattactaaaaattgataaagtataaattaaatgctctttgcctaaaactacaaaagacaatgagaatatgaatcatgcattccctctttttttcggggggttaaggatgtctcagcccttagctatgtctggctggtcagggaagagggagaaatttttaaattagtaataaaatatgcttactattatattgtagaaatgtgactagtaaagagtaatcattacatgtgtgttaaaataaatcaggtctcaattactcacacagatagaggaagtgaagacacagacgtcaccaaaagaagataatcctagaatgttttttttaatgcttattattaatttgggataaattaattacccttataactatgcttgacagtgttaaccaggattttatttttccggagcattcaatgatttggaggattcagacaaaagggaaaaagagggagttaattcagaagcatacaggtggctaacggtagccagcctgggataaaaaattttccagttaacctacacatagaaaactaacagatgatctatgaaatgaaacaagacaatatagtaaaatttaatgtagtagtgctaaaaaatttaaatataagatttaatattaaaattttaacaagatgtttctcctgtcatcatcccttcttcccactaactggtgtgattagaaagcaagattagtaggctacaaagctaaaagcaacatttcaggttatatttcataaaagatgtggtaaaaatccttcatcactgttttctgttgggccaccatctgtctcagtgagtacttcatctcattacttaagaaaaattaattcaaccaagaaaatatccaaaagacaggggattcaactcacttgaacatttgtgggtgacacaagatgacaagagttagtaaatacgcaaaaactaaatatttatccaaacataagatcagaaccacaaaactcaattcgtttctgcctaacatatggctcaaactcctgagtggcgtatgtttagtactggagctggtaacagcatggtgataaaatattatagtaagagttcaactgttatttcattcctacaatacagaagcatacacactttggtttcaagaactaaaaaacacagaccacagtaagaagcaaaataattacgttgttcggttttaaaaacccatagtgaacacataatgattataccgcaaaaagaaaaaaaaaatctcatcagcctgcgactcttatttaatagatggtcagacacaaaggtgtccaaaggaacttacgtaaaatctcacaaaagaaaatctcgaattcacaatctctagcacccccagcaaatcatcgcattccaccctctaaaatatcccaaggcttgtaacgctaacagttgaataaaagaacaattaacgaccacatccattaaaacagtccctcttctgctcgcaatctgacagcgaaattatctgttcattttcctttacctaacacatgacgtcgtttccaaagccgtgtcaaaagttcgaagatccaggttgttaaaaccgggcgaggactgcagcctcgagtccacctcccgactgaacaggtggttaactcgcccggggagaggaactgccaggtactggaagcagccacgcaggatcaaacagagggcgggttttcgaggttttaaccccaagatgagcggggaaaactctcttcagaaaagcgttcaagttcggcggctgccgggcggccaaagccgaaggcgccgcgggtgctgggcgatcctctcaggaggattccgccccagcccccgcccccgcccccgcccccgagccctccggagctacgcggctcgccgcggggaggaggcgggggacagagagaagggccgcccgcgcaccagcgccacctccctcgggctagatgccgcctcctcttgggctggatggcgcccccggccgcgcccccgcaagcgtgtcctggctaggctcggccccggcaggtgcccgactagtagaccggtcctgtccccggccccactgcccctctgcacctctgcccacagcgcgcccacagaagggggtggtccgcgcccctcgacggggccgagccctggagagtgccccggccctcagtcccagcctaacggtttccgcggcgcctcctccggggcgggacggggttgggacggctcggtgtcccccgcctttcgcggagggagtgcccgcgctctcacctccgagtcacgccgttctgaggcagaaggcggctcctctggcgcctcttcttagggttcctgatcgttgtctctctacctcagctgcagagtcagctctcagggccgccgcggccgccggcgcgctgactgttggggttgtttcctggcagtgacgccgccgcctcagccccgctcttcgctccctctccgcgtagctcccgctttctgtttcacccgagggaccacgaacgccgccgccgccatgcttactacggagccgggaggaggagcccgaagtcggcgcgccgagtgcggctgcgcgggccccgccgacggagcccgcggccgggaccccgaacccccgcctcgagcccgccgcgccggggctctctcaccggaacgcgagtccccgcggggccaccggcgcgtggcggctgagcggccgcgtttggctcccggagcgcccacaccctctcgggcttccggctttctcccgaggcccggctgcgcctggcttgtggtagcatccgctgtggccaggctcggagctacactcaggaaaagtggagttaatggaggttcctagagacactcacacaattctcaatccacatttcaaaaggctcccctgagacgcaccctgtcggcccctttccgaaagcacgcgaacttaaggctggcaggtgctttaaaagacactcctcccaaggactaggaagcctctgaaatgggcttggaagtttctaatcccaaagacttcgaacccaggatctggatagcaagcaaaaatatttagatatttactcagttgaaaacgtggggggtggcttcgtggtctcttcgccagccaaatcgcgtggaaaaccacgacctcaatttttacaacagcacgaagacttacaagtgagcgtagcagcgacttcctggaacctcaaacaatgtgggacgctgcaataatgcctgagggcttttgacttacagttgccgccggagacctggggagggggtagtacttgggccggtgagtccagcctcaggaactgtcctttcaaaaatggtgatggatgtaacaagttgcatgtctgggctttatttcagtgtattaattgtgcgatcttttaaaatagctgtatttttaaaactgttttacagaaatctctttaaaatgtgattattctctatattcttaaagaatacaatggctaattaaatcctttgttgataactgactctcaaaccgatatcttggccatacgtttaagtcccagaggattgctgcggtgtatagaatccctactttggtgctctctttttttccctctttggaatgttctcatcacctcttctaaaatccttcactgcttttcatctcctcatctgcctctatccactctgatccttcctcttattctttctgctttactgtttatttttcattcttctctcctttctcggctggttttctctgcggctccaggtgaagattgatgggatgtttatgtccacagccagctaatgagaggtttcttttcttctggttgtaaatagggcagtggtatcttgagatattttcattgctcttcacta

SEQ ID NO: 917233 - DNA, 4001 bp, Homo sapiens
ttcctgaatccttacaggtggcttaggtattacttacaatatgtgaaattcagctgagaacttgacagagaattcactgaaaatcatattttataatgttaataaaggccattagcattgcacttttactgtgggtccttttatatgctgtcaaatttaatccttacatcaagtcatcagaataggtttttcttttgccatcagaataataagttattgctaattacatttaaaatagtaaaatcacacaattgcttcaagtggccctccttttaccagaaatacgaatatatatgtagttacaattcaaaccattttatactttgatagccgctaaaatagtttataatttggtaatacaagattctactttgttttttaattatatctaagtgtgatgctgaaaagagaaatgtaagctaaaataaaccagtagtaaatatattactagatgtagtccaggaaaaagactgattaacttacttctttacgaagtaatcctttcactctagcaaaaaaattttttttttatcctgaggcagaaattgtacatggttagattttttttttttttttttgagacggagttttactctgttgcccaggctggagtgcagtggcgctatctcagctcaatgcaacctcttcctcctgggttcaagtgattcttctgcttcagcctcccgagtagctgggattacatgcatgtgccaccacgcccggctaatttttgtatttttagtagagacggggtttcaccatgttggccaggctggtcttgaactcctaacctcaggtgatccacctgcctcgggctcccaaagtgctaggattacaggtgtgagccaccatgcccggccagattttcttttaaaaagacaatttatcggtatcatatttaatgcctaaaatattgctgtgaagtaacattcaacactgaatgcaaacccctattgtataaacataataaatacaagtatcgatgtttagaactacaacgtttacagcatctcatgtctgttgttactcctgtgtctatagtagcgaaaccttaaagccttgcatatttaatgatgtaaatgtttgattagctccttagttccaacaatactttttaatttagaaagtaacagaaaattaactacaaactgacttaaatttgtatgcaatgagggagattttgtcccaaggaagaaactcagatcctattgacaaatgtatgcctggcacaagagtagcaatacctgacaacaactgtgcatacacttagcagctcctttataatctatgtgatttgagcatgatttaccccaatcatggagctattaaggatacatttcctatttcaaaaacctgcagaagagtaaacaattctaaccaattgtcttaagaaatttgagaagctccccacccctgcttcttaaaaagtgccatcactgacttaaagaagatatttcaactagtataacttaaattcttctttatctttccttgttaatatacattcatatttaagaggttttttttaaataaaattacaaatttgtccaggagttttaattcttaaaatgcaacgtgctgccgctgtgctacacattctctataagccagcgttcacaatggcttccaaataatctgatgccaattttcagattttagctctagaagaaaaacctagtaaaataaagatcctagaatggaatattccgtggaatacaaaattacaaaataactctacatagtctaacctttttgtatttacatggcaacaatttaaaatattttatggcgatgatatttagcatctatttttaaaaacacacggcatgactttagattaatacaatgctttctgtcttaaaataaaagcagaatgttcgaaaacagcaaatcttaccactcatttcgtttttacagtagcagcagagaacaagaaaatccaacaaggaaacagcgtagtacacgttaacagctttaattggagaacggctttttttttttttgcaaggctgtaagaggaaaagatcctttgaccgagtcacgtgacagtcatcacgtgacctgcagtgacccaggaaagggcaagggggaaaaaaaagcaaacgttcccgcttgcagcatttctgatataggggaaaaaaaagattaaatgatttctactgctgctgccctgaatttgaccatctttcagacttccttatgaaccaattcaaaagctcatcaaagtatacttttcagaaatatatatttgatgtacaatgattctctttgtgttcaataacaccacaggtgctatcttctaattttttactcatgcagcctgccgctaattttcatttagaacatttgagataatattaatttaaaagattcagtctgaaatgtcattgtataacgtaattctccatactcaatccttaaggaatatccacaatacacaaataattgtgtatagaatataggtttgatagacatgtgtctcaaaggtgggatttatgtttcaggctgttatttgcctcttaagagaataaagactaccactttcattattggttttattttctttctgatttttttaaatttaagatttaaattaaagtgcaggtgctcagtagatggcattcttactcatatccacgaatctgaaaagacagcctcaggtgcaggttcagagttctctatccaagaacaagtagagaccagaaaggagaccaaagatgtccagttacaacaggaaagaataagaacttttggagatctttcattactttatggtgctatgtaacttcagaggaaatttattaacagctaacaaaaatatacaggtaatgataatgacagtggtttgtaacaagttgtacagtggaaagaaagtgaattttggtattaaaagatatattttaataacagcttcagtatttattagcaaggcaatttactgctcttctctgaagtcttagcttatttcagtgacaaggttaatcaacatcatagcattgttgtgagaatgaaattaaataaatttaaagtatcaagtatattggttgatgatactcagtaaatagttataatatgtaaaagtatgatcaccatgttttcaaaaataaccacatagtgcagagtacatactaggcatcatttggagtgttttacttgcgttaactcacttaatcctaacaagtgaagtgagcatcatttccaggtaagaaaactgaagcagagtaacatgccaagggcacaaagcgaggcaaaggcaggattatctaataataaggctatacttttcaaaaagtgtaaactatgttcaaaggccccatctcacacaaaggtggaaaacaactggcaaaggataacctagagaaataggtctcaataaatatatgtaagacaccccagaggagataagacagtaagggcctattcttacaagtggggaaaggtaattgttaacttcaaaattcctatgaaaaggcagggttgccctgaaaaacgagaccaaagggcaaggagtctcctggtctcaacagaatgtactcatatacgttagacccagcccccctgtaaatccgaccatgtctctgatcttcagcccctaaacaaaaagcaagcctctgcagcccaccttcttattttggctcacatttgcacacagcctgtatttctatttcttgactatttaacttatcatctcctttcaatcctttccattatgctcactagaaagtttttttccattataaataaattctcctatatcctcaacctttttacagaacacttgttcctgtgttgccttgaaatgaagcatggatgtcctgtagaaaactttccccagcatgccccaggagcagagacttcctatcctctcctgaagcagtgttggtagtctgcagatactccaaggctgcttcccttcaccactgttgttcctgtttcatgctaaagttccttcttccttgagatcacggcatatgtgcatacaaccctctaccccttctcaa

SEQ ID NO: 917234 - DNA, 4001 bp, Homo sapiens
agaatagggtggcaaggcaggaaaagactcacacatcccagcccccggcccctcagggcagcctctgtgtttctaactaaaagcctcctaccaggggcaagaccaagttcgggcgcttccccgcatggagaaacgctggccccacggcgcccggccccgacgcgctggccctttaaaggcgcgggcttcctgcgcccggggcccctcccacgccaccgccaccgccaccgccaccgcccgcgcccgcccccgccgagggtcacacttgaactttagctcgccccgcgcggccaggcgccggcgctccgcaggcggtggccgccccttcgcacgtgtcggaggcaccacctcgggctcgggacgccgggcccccggcactcgaggccactccggagaaaaccaaaacaaagcaaaatgcgcaccgcctccagaaactgcccggcaggccctgcaccgtccccggccggtcgcgccctgcctgtcccctccacctgcagcccggtcccggggcagcgaggctccggggcccctcgccgcgccctcccccgccgcgcccggcggaaacagctccgcggcgcggccggagagaacccgccctccccccgcggaggtccgggagggaaggggcagccgaagcagtcggcgcgggccgggggttgccgctcccagcgaacccctttctcctttcactggcaaacttttcggcctcgctctgacgtccacttcttggcgcactttctttacttagttccccaacgagccccttaccgcgtcccacgcgaactcctgactggcgcgcacgcacacctactgccgtccccgaccggacccgggcgaggccaccgcgaccaccgcttctcgcccgccctcctgggaacgcgctgccctcctgctccgcaccttcaggccgagcaaacctgcacagctgcgccctcgcctgacccaccgcgcccccaaggtccggccgcgcgccgagtccactcaccttccagcccgccgagctgttgctgtcacccttatccttgaagtagggcacgctcttgaccatccactcgtagatctgcgacagcgtgagccgcttctccgccgagctctcgatggccttggtgatgaggtcggcgtaggacaggttgccccacgcgttgcggcgggacgagctgctcttgcgcggctgccccgcgagcggcccagcggcggcggggggcaccggcgggtgctgcgacagcggcccgggcggcgggggctgcggtggcgctgggtgcaggcagcccgcctccgggccctggaagtccccgcacagccccccggtggcggccgcggcggccgccgccgccaccgccgccgccacggagccgggcgcctgcgggaagtcctcgctctcctccagcaagctcaggttgctcatgaagtcggcgctgacagcggcagccgaggccgagggcaggcccgccgcggcgtcggggttggcagccgcgctgcccgacggcgccgggctggaggtggccgagttggactggctaaactccggcctgggcagcggccaggtgcacgagcgcggccggggcagcggctcgaagtccgggtcgatctccaccacctgaggcgcctcggccatggtgacccccgcccctcccccagccgcaggagagccaagagggggagaacgcagcactgggggcggacggggagggggcgcgaagggacggtccgagatttgggggaacgaagccggtgcggcgagcggacggaaactgggaggaaggcgcggcggagtggaagcgcgagcccagaacttaacttcgcggggccatccacatcgaggctcctcggggtccgccgcacggactggacggccggccagagccgccgggccggggcagagcctgcgccgcgctccagctgacagggccgcggacggaaggacggacggacgccgcgggccgcttgctctccccagcggcgcgcccgctgcgctgctgcctgttgaatgtggcggctgcggcagcggctgctgcgactaccaggccgcccgacttacgggatctgccgccgccccccgcccgcggcggcgcgcgcgccggcccgcccctgaccgacagcccgcgcggccaatgggcatgcggcaccgccgcccgggcagccagtgggcgccgggctgggtggggcccggttttccacggggaggcggcggtgggctggtggggggtagtggggtgtttttctctttcacacactcacctcctttttttttttttggatctctattattttctggtaattctcgagtgtttctgtgattctctcgccttctcagtgttttgattgctaggaagcaaaccagcgtggaggcgccggcgacactttgtttactacggagcagcagagccgagtactcgggaagcccgggtgggaggaggcgctcgctgctccctgacctccgctgcgggccgagcccggcgggctggcagggcagggggccgagggccgggggcgcggggtgggcgggcggaggcggccgcgaggaattctactcaatcgctccctcctggctccacccacgatgtctttgctgaacgacgtggggaatcggtgggttttgttttggtttaatgttttctttcgctgcgatctgtcaagtcctccggccccctcgcgagcggcacacgccccccacccccggcgccgcggctcctgcagtcgagtccgcgccgagggacccttctccgtgcccaccggtccgcacccccgggctcagcctgtgccattcggtctagccagaggcgcgtcacccagccggcagcccccagccggattcactgtattcttgaccttttttaaaatgctagaaatgaggaacaggggctccggcgcggggaggagattatctggcctccctgaacacacgaatccaaaggcacccgcgaccgcatgccctccgtgggaacctcttcccctgggcgggaatctcccgctccgtccactaagtccagggccggcagcgaagggctcaggagcgcagttagagagaaccaggtcattttattacttatccctaattaaatttagctgtttgttacttcttttttatttgcaacggaagtgatcgggtgttaagtaaaaacgcaaggggggcgggagataggaccaaagccttggggcgcagcctgccccacccccaaattccttgaggctacttgctgtgtgtgtcagtcaaccccccacccacaccccacctttcctcatctgggctgcaggtccaggacatcctgtcaaggatcagtggggccaaaggtgggaagataatggcccttgtgtctcaagcagaagaaacagttttccagttttgttttgttatgcttttgcttttttaggaagaatatggaaggcatttccttttagaaagatgggaccacttaggatggaagatggacagtagggttttaaatatcttgtccaaaaggacagcttccaactcttgttttttaatccctttctttcttacaagtaattctgcaatggaaaaagtggcatctagagaaaattagtcagttggacaagaggttgttgaaaaaataaaagagaaaagaggggaaaaaaggaaaaattaggcctcttacaaaagttaaaaagattgagagagattatctttcttcttttatattctcactatcgtctctctagtccgggctcctgtttcttcataatctatttatcacaacagcttcttgctgatactaggcatgggtggggtggggagcgtgagccggatggattggggacgggcggggactggttcccaccctggtcttgtggtctcttcacgtttactatcaaatttggacagtctgggcctcctctgacagccgctaggggacctcagtaactcagatgatgagctcaaaggcaggcccccaaagtacagctgttgcttccccccacctttccaattacactctgcagaagcagcccccgatccagacagccgcaccctaaaaataggc

SEQ ID NO: 917235 - DNA, 4001 bp, Homo sapiens
attgagaacaggtggctggtcatccacaggcactaaggtgatggggaacagaaactgtacctggtgcctgcctcctccatccaccatgcgaagcaccaggttgtcgctcagcgagccgtctctgtcatcatgctggtagaccacctggccggctgccagctcagccactgtaaagctcttgggagcagagctgccactggaagcacccagaatgacaaggtgaccatgccggagcccagccaccacctctagccgcactgcttctaggtcatcctcatcgctgatgaccaagttttgcggaccactgcctgcagggcctgtgaggggccgagactgaccctcatagagaataagaccggtattccgggtgaccaccggagccattgtgttcatgggcttcaccactaccatgaaggcaaaagggtctgaagctgctccttctagatccactacctccaattccagttcaaagaggcgctcctggtcagagtcttcagaagggggctggtaggcaatcttcaggagccgcagatccctctgagtgaaggaggaaaggggcaggctgcgatcatcggtgctcaccaagtagccctggccaggctggaatggagaagtaaggttgaagatcaacaggtcagagggagactcagcatcctcggctgccagcatgtctggggtcagggccgtcagtacaaactggtccacctccatcatcatcatggccacgaaactgggcttgggtgcagtgttctcggcccctcctcggatcctcaccagaacctggaagtgctcgcgtttcaaagcagggctgcccacaggagcccctcgtgaacgcagctccaccaccatgggtatccagtccctgtttggtgagcgactggcggctgtgtggcgatagcgcacgcctagttcctggaaagctttgcagtccatcaggagagtctccggggcgcctccctctctggctcctccagggacctgcgggtagtggaggagttctccatagcgaggcagcgcgcccaagccggacaggatgcccacgcggcactcctctgtctcgggctggaaggcgaactccaggctccgcgcgtccagggcattgctggtccccagcagctcttccacgaccagaggcaagttccgagtcacaacctccagctgggtgaagaccacctccacctccagtaccagtggtagcactactgcccctccgggcgcgtcatagcgcagctgcagccggacgcggtcccgagacgggctgcgcgcgcccaggtgagagtagcgcacctcgccagggccaaagtcgcacgggaagcgcttgggactcaggcggcccggtcgctgggccagtgcgtcgttgtctagtaccgaaaccgcgcagcggtccccgggctgcacctgcaacaccaggtcatgcaggggatccagccagacttcacggccgaaaggcacccggagtccgcggttcgccagcactatggcctcctcagcagggacccctgcagcccccgcgagaccaggggacagcaacgccctgccgaaggcagcgggctgtgccgggacgcggcttaccagtgacaggagaagcagcagcagcagcagcagccggggcggcggtggcggtcctggttgaaagctggtggagttgcctgtccggcgcgaggataacccgggagtcccggctgagtgcatggtcccggtgttcgggcttggacaggtcagcctgagagcatgcgaagtcggtccccgggcagacaacaagagacaccgccgggaagtgccaggaactccgcgcgttgcccgcggggtcctcctgtagccggggctgggccagaaggatggcaaagttgcgcggcgccgtccgggctggagccgcagccgaggagccgaagccttcccaggccgtccagctccgccgctagcgcctcaatcgcgcggagaattgaatccctccacttctactttccaggtccccggaccctgggctttgagggaaatccctccgctcgcaccccttactccagtcctcccaggtggccaatcgttggtcgggggaggaggtgcggagctgagggttgggtagtaatttctgccaatcagctcttagaggccaaggcggggaaactgcggggaggggaggagatagaggcgcaacaggttgtcctggaagtgagggaagaagtggccaggagttgcccacccctgcttgcgctactctctgggctgctattaatagatctggtactcctgcagaggagccggaacacactgctgtgctgggttcacttcatctgccggcgaccgagggttacccattttagccacccccacccctccgccctagtcaatgaaatcccgcgcagggcatggccatttcccaaggaaacttgcaaacccaggggaaagttagacgcaatgctttttgagtttgaagcgaaacccagagcgtttgagaagaaattctggggcatatttgcaaaaggacagctggaattaaaagccatagctagagcaggttgcactccagcccagcccccttcggcgcgcccagacgctgccttctcctcgtgaattacaatgggcacagtcctccgattggtgagtttttaacaagcccctcctttgcaaccgaggttcacagagtaaaagggaaaaagggcatttggaatgcgtgagaaatgcagtctgatcagaattgctagtcttgcaccaaagaataaattctagggaatgtggccccaggcgctcccaaatccgactctgttagggtagctgtcattagagacgttcctgttctcttcgcagtaattagaccaagcacaaactaaatctacttgtcagcatcacatttctttgcatgccacgaaaattgataaatatccggagggcacactaaaatagtttagctctcatttcagccaacaggttttgaagtcagagcttgagctcttcctgcccccttgtgtttgtttggttttagtagtgtgtagattccctttctaaaaggtttttttatcaactctcctccccccctcaaaaaagatcccttgtaatttaaacttaatcattttcggattggctcctaagcaatcatagtcagaatgttttatttaggataatattttttttctccagtaatgcaaatctgattgctaacaggagcatagaattggagtaatagtcataattagccataattgcccttttcctgctccaagggattttgaatttggaaaagagggaaatataagaaattgttaatgtctttttacatttcagtctaaattgaagctagaaggtgcctatgggagtaatttcagtaagaagtgcctatccttttaagcctttgtgttttcagcttgagctcctccagaccaggattttgatccttgcttgacacagttacagctattttccaggctgcagcacaaactctgtacataagtatggctgggagatgccagattcctttccatgaaacctactgagtggtgtccgtttccaggaatcatagacaggaagttctaaaatctttcaaaaagaagcaagagatcaatttaaaggagtcactcatccaagcaagtgtgcaagcacgcaaacaagtaacatttagttaattaaatattaattaagattattctgtgtgctgtgcattgtttgaggagcttttaactacaacttagaaactgatggatacatttcacaatttattacaaaatgggcatccaggagcatagaagggatgtggcccttactttaaatacattagaaaatcccccatctaactctttaccaatttcctatttgctttgtcattattattttataatttatatgattatttattatcgcatacagaattcaaaatgcggaacatggggggaaattctgctatttcctgttccaaattaaaacaaataagatgccaagtaaactagaaaaccaatttcagaatatggctctttttatagtaaatttcaaattctggttgtgtgtttgta

SEQ ID NO: 917236 - DNA, 4001 bp, Homo sapiens
taaagaacactgtatgtcaaattcttttcattaatcaaagagcagatagacaaaggaagattcatccttgagtgtaaagtattataaaaataatgagtccaagttaaatgatttatagctatgacaagtaaagaatgctgtttgggcaacagtattactcccaaatggcttcccacttgtagaaaaacagcttcagacaagccccatagtgtatacagtggtgcaaaatgacctggaaaaaatggtttctatggatatcatttagagatgcacatccctgaataccttaaggctgaaggtactttagctcttttcctcaaagcaattgcagcacaggttctcctgcccaggttttgtttatataagaacaatcttggccacaggtcatttgtgtaggagacaattaatcactagctctttgagcacaggtaggttaatcagtatgcacataatacaatattaaaattttcacggggaaaaaatttttttatttaaaacaataaagcatcagtaatacctgctgatcttttatccaaagcaagtacaaaggctgttagtgaaatagagaagactttctttttaaacagttcggaaaatacaaggcatcattgatcacctgaaggcctcattttaatttgattccagatccacggcagcttagaggttgtctttttgaaatagcgtattgctaaaatccttatgtaggtcagaaatggaacttcaggagccatcatattctgctatcctaataaataattagggtcagaacctcacttgtttatgtttcaaaaaagcacaatatttggactatagcaaacatcaggatttttaaaaattcaaatattaaatggcattcagaacatcatccacatggaagagggagagatgaaataaatctgcagatgcctctatatacaaaaaggatgtcctaggttttggactattaaatacttttctttcttcagacaataccctaaaaaaacaattacaaagtactctgaaaccctgccacacccctttgattaaatcacacttcacaaaatatttagagaaagcctgaacaaatcaaataaacatcaaggcaggaaatgcagccaggaatgcctgatcctgagctcccccagagtctgaagggctgcctcacttgaaaatttaatcaaacacaatctactgtaattccattgcagcctttgcacttaaggaaagctagttcagtctctgacattttgattttcacagcagatgggagcaaaaaaagaaagaaagaaagaaagaaaaagaaagaaagaaagaaagaaagagaaaagaaaagaaaagaaaaaaagaaaaacttccgcggctcacaaacatatgtgtccagttgagattttctgtctccagccttatgcaacatccagcaaacaaacaaacaaaaaggttattttctattactcactattactccaggatttcagtaaatatttgatactgatctcaaagaagcccgaatcctgctggctggccatgtctgcggcatacaaagaggctgggaggacgggcagcggccgggagcaggtaccgggcgtgatgcgcctgtcacaggttgtgatgtcagcgcggggtcaggcgcccagaggcagctctgcggatccacctccggctccggccgggagtgctcatctaaaggacacggcggagcagagagagatgctcggccgctcctcctcctccgggtccaggacttgcttcttatttgctggacgctgatctccctgcagccctcggaggcggcggccgcgctgctttcatttcggggctgtcatcaccagaaacgccggctgccggccgcccaccagctcggctccagccaggtacgcaaccgaggaagaccccacctgaactgggatcggctttcttctgggagggagggtttctaggccggcctccctgacgcggtgcaggcagcctccggcccacacggccgccgcggggctaagggatgggccgggagcgccgccccctgcccctgcccactgtctcaacctgagccgcggctcagtctccgcctaggctgcgggaggaatttcccagcttctgcggatcctctctcttcagcaaggcttcccgtgagcggcccgggtgtgctctggctgctgcttccccttgtgtctgtccctgaaataaacacaactgcagcacgctgcggtaagcaaagctgcagccttgcatctggttgcagcgacgttttgaaaaaccccatccgtcagcctcgttgcagtaaagagactcaacaagaggacgcttgtctgggctttttcttccctgccttccacacgcatggtggtatctgcatttttacttttccctcccagaaatgcagtcttttcaaggggcatcggagcccgaacgtgtgcactctaaggggacagtacacactgcttagttggcttgtttttgtaatgtcacacactccacaatggatcttattctcaaacctctcatttctaagactcactaagcccagtgaagcttattttatttgtatgaaaaggataagaagcaaaagcattagattccttgctctacaatggctcttgatttcatgaattcttgatatcaggtgtcctgattttggttagctttgtttcacattatcatttagcttgaccaggggattaaataagagtattatattttaataatgacaggttatgttggaagaggtgggatttggccaactatctcataaaccacaggatccttcccaagtcccagtacattcatgattaatgttgtctaaaaaacagaaaaaagtaataaaccatgttaataagtatttaacatagcaaatgttgggctaactccccaaatcaacacacaaacaggacttcctagattaacagttcattttaaaaatggaagggaaagactacaatgtacttttattgttaggacaaagaatttttaaaattcaacactaaataaaacttctagaactatgttctgaaaggccctaagatacttcatcaatacaattagtttttcaaactcattacacttacccaaatggcaagcactcaatcactcagatttccaactccacttatacactttattctgatgaaatctctcaccagattgacttctttttaattcatgtgcatactagagttgctgaactgattttatcacttgtactttgaatgtatggattctaggtaaaataagacccaaaggttttaccttgaaacaattattatatctgaaaataaatttcatacctacgcccatctgatgcttgccaagactcagatggcagtgaatgaacaggtaggctgcacagtgccctgcgattaacgatggcatgggctctcaaggcagggccccatgttcgctcctggcaccagcccttactagctttgagccccaaagtaagctattaactttgctaagccttcgtttcctcatctgtaaaatggggttgtaccttcttcctatagttgttggaaacaataaataacactatgtatgaaaggggctcagcatagtatcttgcccatagttaacacttcattaaattttagctacattgattttttttttttttttttttttgagacaatctcactctgtcgcctgggctggaatgcagtggtgcaatcttggctcactgcaacctctgcctcccgggttcaagcgattctcctgcctcagccttctgagtagctggggtgacaggcatgcgccaccatgcccggctaatttttgtatttttagtagaaatagggtttcacagtgttggctggggtgatcttgaactcctgacctcaggtgatccacctgccttggtctcccaaagtacagacatgagccactgcgcctggcccattcattcttattatgaatccttagtgactctagaatagaacttttttttaaaaagctaaatacttttttttctttactctttatgtggtttaaaagatatattacttttgaacaccagtggtaactatttgggg

SEQ ID NO: 917237 - DNA, 4001 bp, Homo sapiens
attaaaattggaaaaccaggtaggggactgacttgggaagaacagcacagtacatccaggcagcgtccagtctgattgacatgggccctgcaggtcctggaggacagcgaggaggggctgcggccaggccttgcagggctgcgcggagcgggtactgtggggtgggggtgaccctgctgccctcaactcccatcaccagcacgccccatgccacagtccctgtgcacgcagaatgttccgggtgaggacgctgttggaggacactgcaccagccacacgaccaaccccacagctgggcggcgactccgagcgaccagggcacacaggcccacctgcctcagccagcagcacaggccaggattcatcattaaagaaacaggaaaacagagaggccggggagagcgaccaagctaggctgagctgaaggagggcacgggcctgtggggctgtgggcagcccccgggcaacagccccaggtgcgtcatctctgcagggatgagctatgtccacaagtgcacagtggccatctgacagcctcagagctttcagaaaggcagatctaagaggggtcaagtcaaccactagaaatgtaagcggaaacaggcctccatggttcatccagaaccactctttcatcccgggtgacatttattccaccccaggagaattctttaaaaggaacattccagcagaacggaaaacttcgctatgaaatcaccctgacttcagggcgggagggacgtcaacgggaatccacaccttctcggactttccaaagtcacccgctcccgagcccgcaggatagagtggccaggccgtcctcacacggcggctcctgcgggaggcggccccgggcgccccgccttctccaaggacattcctaaccgaggtgccggggccagcaccgtcgggctcctgaaagcacccgctgcctccaggagagcacctggcagaacggggccgcggagccgccctcccctcccgcatgcggccccgctcgattcctggaatcttatttttggacctgctgccgcaagcagttcccgccctcggccctttcaattcctctttcgggaggggactgctctccacccctctcaggaggacgaggcgcggcccgggggttcctcacctccagcccagcagagggagggccgcggggaagcggtttgggttttaaccattgtgtttctctcgcactttggaaacggactcccggcttccccgcggggaggcgtctgacagcgagcgtttcccggacagccccgcagcgtctcaccggcctgcgcggggatcccggggtcgccgggggatgggcgtgggggacgcggggcgggccggggctcctgggaccctgaggccaggcctcgccgcgcggagctggggggcggcagcagcgctgcctctcgggagcggttggaggcgcgcgggcgccaggggttcccccgcatcccgcccgccggctgctcaccgtctcggggtcgttctcgaacacctcccgcgcctcctcgcggctgcacagctcctccacgcactccctctccaggtggccctgcttggcctcctcgaagacctgaaaggcgcggcgctgcctgggccgcaggaactgcgtggcctcgcgcgccggcaacagcgcggctgcccggagggagagagggggacgcgtcaagccgcgcccggagcctcctcccgccgcccggggacggggtctcgggcccgcgggactcaccaagcgcgcactccgcggccagcagcagcagcagcagctgcggcgcgcggcgcagggcggcgggcccgggcgagagcgaaggggccatggcgggccggggacgcgcggtcagagcgcccgggaggccgaggcgagccgcgggcgccgcggggcggaggctccggtcatcccgtcctggcggccctgaaggtcacatcgcggcggcggcggcggcggcggctgcggcacctcaagcgctcggtctgggcgtgttcgggcggctgcgcgcggggaggcggcgggggcgggaccagcgcgcgggcggggcgcgggttcccgggaggatccgggcgcggggaaagcggagcgtccgggacgcggcgggactcgagtgtttcggaaaaggagcgtctccccaggcggtggttgtcttcactagcgatggggtaaaaggaggacgcaatacctggttcaacttgagcaggtacattttgaccatattccaggtgtcatgtgaagatttaagcctctttccaacccccactccccccgaatctactgcatcctttttggagtcttcattcttaggcacattttgtcaagacttaaaacctaccaaagaaaagatacactgaggtcagatccaatcccactgggggccagcgagtgaaatgcgacggtttccttttataatctctgtttttcataatgatgacattaaaaatcttgaggtttcccagtagatatttaagctgaaagcaacattgtgcttgtcttcagagaccaagactttctggctcttgtcttggaatatttcgcaaagtcataggcaaaacacacacaaacaaacagaaccaaaacacagcagaccactcacgggggaccgaaccaggcagttagcccagcatccccctgctgcgggaggagggagcttggatactcctctctggagaatcctgctctggaaatccccacaccccaaaatgcaatgtagaggggcagtgagtcagcacctcaccccaaatgaatggccgttctgctcagcaggctcaacgcttagatccccagatccagtttctctttgctttctgtaattggaagaatggaataggattgctgctagaaatctttgaggtcactggtttgaaagtgggattatgagcatgaatttttgttgttgttgtttgtttgttttcagacggagtctcgctatgttgcccaggctggggtgcagtggcgtgatctctgctcactgcaagctccgcctcccgggttcacgccattctcctgcctcagcctcccgagtagctgggaccacaggcgcccgccaccacgcccggctgattttttttatttttagtagagacggggtttcaccgtgttagccaggatgatctcaatctcctgacctcgtgatccgcccgcctgggcctcccaaagtgctgggattacaggtgtgagccaccgcgcctggccgagcatgttaatttaagcaaatgaatgtccctgggaatgatcttcaaggagaattaaagtgggatagagaagtcatctatctgcacctgtgtctgaaccagaatgacgaggcacttccatgtcagctagttactggagcaggcggagtaaggagtacccctgggcttctgccccgaaaccaccacggctacttcaaaacaatattacattaattttcctgcttgttcttgagaagcactggtttgaaaaattggatggggtgatacatgttttaatcagtatttacaaggctccttaatcacttcatcagacaattcattgagcacctactatgtgccaggcagtgtaattcattgagcacctgctgtgtgccaggcagtgtctgaggcacttctagctattatttcctaagggttccagcagcccatggataaacttcaaagagtgtaagctcctaaaaattgttcgtattttctgcacatttttgtagttttggagaagagagttaatggagttcttgccattctcagaattatttgatccctttaggaatgagcatctctagcctctgcctgttcatctgggacaatctgcacctgggcgtggacctgctgcttcagatcagtaggtatcagaatgaactcagttggatggggcagttcaggacccctggcctccttttagtctggaccccactctcattcctcatattctcaattcactctttctactgagttactatcctagtaatgacaatgcctcctatcatctagagacttggtttgatacaatgcattcacatacaactgctcgtttt

SEQ ID NO: 917238 - DNA, 4001 bp, Homo sapiens
gctaagtcttttctgtaaatccatttaagggggtatcacgatgccttttacggagcaagctccgcagtccaggggcaggtcctcacggcctaaacacggctgccttatcctgagtagttttactgacaatagagcttcaactgaagaatgaattcctgttcagcaggacactgggcagtcatgtttaattgagaactcttaaaattcctaatagagtttgcctagatggaggatgttctaaagagggctgcgaatatttcgtgtttctgtcctcttactgtcacctttccttgggtcctgtcccctcttcaagcatggctgcactacacttccacaccagcctgctggtgtcctaatcactggtaagggccctggctcgaggtggatacaaagcctcccaatgacttcacttcaagaatggacacagattggaaatcttactagtaaagagagaaatgaacagatcattttaaaatccctcttctattctgcttactgctacctactatccagatcaccacaaacaaccaccctctcctaactagtagtagttagggcctggttagtaaaatcaactagcccaaagtatttccgtacaaaaatccaccaattagaaattaatttaactttgcaaactcagcttttacaatacgaatctctgctagaacacagtggtctgcttattcagggaagtctggcttcttctgggaatagtttcaggaaaacaaggcattttgggaaaatacgggcaaactgcaggtgctcttcatctgagcatttcaataaattgaatgaggccagggaaaagtcttcacttacaggtaaatgtacataaggacacctacgtgtgtgtaagacctacactttaaataggtcacctttagtttttcattaatcatttctcctgggacatttagcaaaacgaataacttgcttttaaaaaaggccacaaatcccgggtgcagtggctcatgcctgtaatcccaacattttgggaggccaaggcgggcggatcacggggtcaggagttcgagaccagcctggccaacatggtgaaaccctgtctctactaaaaacacaaaaataagctgggcgtgatagcaggcgcctgtaatcccagctacccgggagactgaggcaggagaatcgcttgaacccggaaggcagaggttgcagtgagccgagatcgcgccactgcactccagcctgggcaacagggcaagacttcatcccaaacaataaaaagggccagaaatcgactgcattttcttatcacttaaatattaaatcaactaagcgtggagttaagaagctgtgttcaaaaaacacttaagtctgcttttgagcttgtggcgttgtccttggcccacagagtaaaacagcaatgataaccataattaataatcaaggcagtaaatttcttcaaaatttcagaagtttcactaatggctccaaagaaaccttagatcagaaattcacaagtgccaggagacgtttttagatttcttttgcagcttctagtctccttacaaacaggaaatctttaaaatgaaaaacaatttctgagaagtgttagcccggttcagctgaggtcctctgaaagccagcgtgtgggctgtcacgcttcctttacagggaagcagcgcccgtgcgtgaggcggttcctggcttttaccgccctctgcccgttctggcaatcgcgcccgtggcccccgcgcggggcaatggaggacgcgtttcggggtccaccgtcccctccctccggctggcctcgccggccggcggcgccccaggcctcctccctcacccgcggggacgccgagtgctgcggcctcgacccggacgccgcgcagggagcgacgccccaggttcccgcgggcgccaggacaccccgcctggggggcggagcaggcgcagccccgacccccgcccgggctcagcgcctcacctgccggcagccggggctgtcggggagggcagggccagggcggaaatgcagggccgggcccgcgcctctgctcccaggccgcccccggcggcgccccctgcaggcggaacgcgaggcccgccagcccctgcggcgccctcgcacacacgtggccgctcgcacaactggccgcctaacagccagacccacccacgccgatgcccgccggagacgccccgccgcagacacagcgcaaccagcttcacacacctggggacgccccacagaagtcacatccaccctaacacacctgggcactcaggctcaagccccgactgcatggtggaccctgacacacctgggccacaccccacaaaacagactcacagacgactccacaagcttggggacacgccacatcaaatggacacacatgcacacacaaatgaacccaagcgcagacacacttggggatgccaaccatgtgtgtatctatcacatcacacaccaccaaggccccccagctgggcatgcacacagccctgataccgagtccagaccgccatctagtcacactgcccacttacttaccaatactcttaaaatgaaactgtggccgaaggagacaatggaaggatgacatcacctcttccctagctccaggactaatttaagccccagaaattataggactgagaaccaaaatcgaaagagaacattttccctagagacaatgggttaaagcaatgccacttgggggccaggtggtaggaatggtacagctatggagagagtgacacttctgtctctccgaaagacacaaatctgtgtttatcagattagcaataatcccccttaatcatttcctgccctttctactttctcatggatgtggactgattgaaacctttatataaactggtttttatccaaacgtttccaacaatgcagatgtaattgtattttgaacagatgtacaattccaaaagaaatctaaaccatcaggtacataagtcgttggttttcacagttttttcttgtcttggacacttcataattaaattgaaatgtattaaaaaaccttgtctagctcatattaatattttttttttttttttttttttttttgagacggagtctcgctctgtcgcctaggctggagtgcagtggcgggatctggttcactgcaagctccgcctcccgggttcacgccattctcctgcctcagcctcccaagtagctgggactacaggcgcccgccactacgcccggctaattttttgtatgtttagtagagacggggtttcaccattttagccaggatggtctcgatctcctgacctcgtgatccgcctgcctcggcctcccaaagtgctgggattacaggcgtgagccaccgcgcccggcctcatattaatatttttaaagacagcagtaattcttaactttttgaagcgaaagaatgattccactttcatctcttttttgaggggggaaaatcatgtcagcaaaggaaagtgagacaaatagataaataattcttctgataaaggaaaattaaagatgacgcagactagacgaattttttgtttgttttgagatgggttctcactctgtcacctaggttggagtacagtagcatgttattggctcattgcaacccctgtttcccaggctcgagtgatcctcccacctcagccttctgagtagctgggacctcaggcacccaccatcacgcccggctagtttcttgtattttttggtagagacaggatttcaccatgttgcccagggtggtcttgaactcctgagctcaggcgatccacccgccttggcctcccaaagcgatgggattacaggtatgagccacagtgcctagccaagacaagtgttaagttgcatcccagataaggctggggaagcccaatctaacatagaataggctctgtgggatgaagccttcagtttaacttcttggaaaacaactcacagtttgaagagcagtttttgaaatgtggtcccagtccagcagcactggcagcacctgggtatttagaaatgcacaatctccagc

SEQ ID NO: 917239 - DNA, 4001 bp, Homo sapiens
tttattattatcttgagctcaaagcagagccaacagcagaaacaacacgaggaggaagaagaattaggcataacacgagttctctaaatgtcatttaggggagttaaaatcctaaatttttcttaccaggtagaaagatgggagggaagcaccttgctattcgtatctcaacattatttgtaaaatcagctgccactgaaagattggttcctttccggcagattcattggaaagggccctgttcggcttccgccttcacccagcatgggctgggcgcatcttggagccccagggctctcaaacctaggcccaccctgcccgtcccccttatctgttctcccgggggttgtagcgcagcccgtgcggcccctcggagtcgtagctgtcatggtgcgggagctgggcccactccggcgggaaggtggccctgctgtacacgaagcactgcaccgcggtgggcgctggcggctcctctgcgcccggggcccggtcctccagcagctgtacccgcagcaccgtgcgctggtacagggccgggcaactctcgaagtcatccagaaagcgcagcatccgctcgtctaccgcgtagacctcgccctccacgaggcgccccgagccgggcaggtgcagcagccacgggatgttgtgctcccccgcgatcaccaacgggtagggctccagcgtgcggccgcgcgcccgaaaggctgcggagccgtgggcgccgtcccgcaggaccctgtggttgggctgaccccgcttcagggtgccgtacacgaagactagggccatccgggcagagctgcagggagaggggaagtcacaggtcagcccgcagtgggagctctgtgtctgcacctgggacgtggctcccggcccacagagcctccactggggccgcaccacctgaatgcgcctggctgtgctcagataaggcgttacttaccgacgcagatgagaatgacctacagttttcacacatcatgagatattttgactttcggccatttaaacatgtgaaagccattcctagcttgtgggctgttcacaaacgggcaccaggtcggctctaacctgtgggcatggtgtttttgggtttgccagtccctaggctagagaaaggggcacacattggtgacttccttgatgtgtctgtagcagacaggacacctgcgttctgggcaggaggaccgtgccctcagcctccccacaccacctggatggactaatgttcctcagccctgcaggggcagccctgcctcgcctgcacaggccacccttctctgaggaacacagtcctgacctgctgactgcgcagcctccccgactccctgagggcaccagccttccacccttcccaactcctacccccatcgtagcagctcaaggccagaagacgccctgtccaggccctagtatggccctcccagacacaccctgtccaggtgagcaactacccctgctcctgagcccagcacagcccataccttactgttctcagcccttgtgtggtgggcgcggaggttgcggaggttccaggcaaggccgccaccctctagagctgctgatctgggaaaaggcgctccttgtattaggacagtctgtcaaacctgtcccaacagcctgccctgctacctgagccctgcagaactgccattttcttgagcagttttcagtgtttcttaaaggactttgaaaattgccaataactattaaagaaaaattagaaataaccctaaaaatacatataattttgtaaccacctgctatccagctgcagtgagaacccaggtttcagcactgagttccactcaggtcctggcagtctgacgcagcggagctcagcacccacaccttctggtgtttccccttccaaggtcttagagggcagtggtgcttcacgggactccccgcagcgatcttggctccagcgtgaaggtaaatatttaccacttgcctgggtctgggccacagactgttacataaagacagaagtgatttgtgtgaaagtgactcaaacaaaaatggaaatgaacattaaaggggtgggggccgctctccccggcccctcgctccgctgccctgtgtgcccccgccatgaggtgacagcctgtggggcgactcgttgagatgggctttgcagacgggactgcaggtgcaggaaaacaaatgcggctatccaggaaacagcagcggctcgtgacccgccagaaatggccccggacaccacacttgccaccaatcatgtggacaagtggaccctgaagaaactgaagaagtcacactgaactcatgggacttctgttttcttctcagcaaacaagagctgctctggggggttctaggcctcattttgctcaagaggcacgtctgctgcctcttggttctatcaccagcctgtgcaacaacagtattccccagatttcaggcacattgcactaggaaaggtgtggccgtgggaaaaacacaaggctagccagatacgtgcgccctgtgggcctggccatgtgatagccctgggacacccttcccagtgtggggacacagattagacctggggggcatgctgggataggaaagttgagatgtgaattaaggagaacctggggtaggacggtactgaggaagagaagaggcaagtgctcaggcctaaaattgccaggactcggctgctggggtgtacgtgaaaatgacaaaaggcaccagctgagagcagcgctggtgtctggagagggcactggatggaagcagctgtctacaacagcgggcaaggagctatcccaaaagacgagcacctggggggcgatgatggtttggatcctgctgtgcagctgccttggggactcagcatttggaaggattcatgtccctccccacacctgcatcccagcccccagcgagacccatcagcacttcccctgccacgtctcccaacctgctctcctcctccaatgcctgcctgcatccctgttgtctttgttcccctggatcctgcccccagtgcaccacccagagggtccttgtcaatctcctgctgcagacttaactctcccacctcatctcctgcaccctctctcccctcatccaggtggctcctgccccgaccagcgcctgacctggagggtgcaggagtagtaggcagggcctactcagtctgtcacatcactctgtctggttgtcgttatagcacacgtgctctctaaatcactggtcttgtttgttgctggaacatgaagggccagaagagaacttggaaactgtttggtccagcacctgcaggtgaggaagccgagtcccaggctggtggcgatctaggaccagccagccgggcagggccgtagtcacactgcagaccagctctccactgccaggtgcctgcctggctttccctgatgcagttttttaaaatggcatgtgtccaaaatgtcaatagattgctttgtaagaaaaatgaagtttcctacccctttccactccctggaggcaacacttttaaggcttttaactgttgtgttcagcatttatctccatattgttacttacgctgctacttcttgatgtcttaaatcatatcttgcccttctactcaaaaagtgggtgagcatagtggttctaaagcacagactttaactgtgtgactttaggcagatcatataacctctctgtgcctcagcttcctcaactgtaaactgaagtcacagtagcagcctgcctcagagaccgcggtgggtaccaacacacgtggtcctgtgtgatctgctgacatgtagcgtgtgccgctgctgtcatcactgtagaagcctgacccttggctctcctaccacatcccgccatcctcccaacagactcatcatagttttgggtcagacccagatctatttcggcattagaaccatgcaaacacggctcttggctaagacacagagcatactatgattacatttcctttcttggacaactttatgttttccttgaaattaaaaattgcttcaagtttgtttttt

SEQ ID NO: 917240 - DNA, 4001 bp, Homo sapiens
tgcctttaagcattatacagaaattgcagaaacatactgttttttagagacatatatgctgttgtcacatatattggattttttccctcctcaattcagtaaacatttattattattataaaacattattacctattgtgtgtggcactgtgccacacactgaggacagcaaaacaattaagatccagtcctcactctcaggagattcatttgcaatctatgagagaggcagagtggcaaaaaacagatcaaaatgtaagtactacatagtactgggaatagctaccatccagcggagggaggaagaaggcatggtggtagacgcctgtagtcccagctactcgggaggttgcagtgagccgagatcgcaccactgcactccagcctgggtgacagagcgagactccatctcaaaaaaaaaaaaaaaaaaaaaaaaaaaaaaggctgcgataaacgtaatttttcgtttcaaatgtagtgtgtacacgttattttagctaagagaaatgaatataataagttaaaatgtgagtaacattcaagaaaactgggtcaaaaatattttccttattggcaaaaaattttgttacccgccattcttttaagacagctttcagccagttaacggttcctggttaagaaacagtactgtctgatttgttagagtagtaccgtttcgtgaattactttccactacagcaacacatgcattgcccttatgagatgcttatctcgatatgaaccaaactgctgagcaggtggaatctgtgccaaactagctgatgtttactttgaacacactgatattcggaaaataaatccctcttttttcctctttaatcttttaatgtttgtcttgcacatggatggaccgccagtgaagtgatgcgcacatcataaatcaccatggtttttaattcctgggtgatgagacccataattcgcttgtcagctgtttgtatagaatcatttttaaatggcatgttttggagacatcttgataaaataaaaactggagttctaaagttgcagtcacatattcacgaaccgagaactctacatggtaggatgaattttgctcactagtgtggagtcggcaacaaagcaaatgcagccgcgtcactgccgtttgttttctcaagtctcctacgggaaggggctcggacagtgcttttccactcctctgcaaattccttatagttgaacacatcataacaaacatacaggtcgagaaatctggtcgtggcattaatagctacagtgtttcttaaaaataaaaagttttaaaaagtttctgaaaaaaatgtaggcgagccaaccttgtttctaaacaatcccaacaggacttttaggagcacggcgatgctgaatgcccgtggacggctgggtgcgcgccgttagctggcgcggtgacatctgcttagagttttcaagcatttcagcatcgctaggagccctacagcctgacggtccgggacagcccggcttcctccacccgagggggaaaacaaccccaggaaaacaacttaaactcggccttggactgtccatcaagggaagccaaacgaggcgctgctctccagacctccaggagcaaaggaggaagatcaattattccaaaagtttctcacaaatttcccgagctccccacaactttttgaagaatcctgaaagaatcctagggggctgggagccgcacacgtgccggggctcggcttcccagctcggcagtctcagcccgctgggctcgcccggcagctccgctgcgccgccgacccgcccgtccccgccccgcgctgccctcggcccctgtgcctggcctccggggcgcccggcccgccttaccccgctctgccgcggcggcgacccgggtgcgttcctccggagcagggctcccggccgctctgaaaagaattcctttcacacgtgcggtgctgcttcacgcgtgcgccccgcgccagggcccgacctccccgccctgatcgccatccctgcagccccagtgtgcgctgcgcccgacgcccccaagctgcagctcaggacgccgcgccacgcccccgccgcctccgaacagccccgccccgcgcgcttcccagcacgcacacctaccgcccccgcatccctaccctgtacgcgcagccacagcactcgcccgcgtccgcattccacaccctaccccgcgcgcacgtccatgcctagcgcctgcatccccatcccgcacctgcgcgggccctggggatgtggacgcgggggctcttccctgccgcctacgcactccggggcatgcccgcgcgggacgtgagaggagagccgagggctgttggggcgggcccgacccgcttgcggggcgcccaccgcacgcagatgcgccagcccgcgccccgctcgcgcctgtcctgggcttcgcaggcccggcgaggtagctgctctccgggcgctcccacggtcggaggcgcgtgggcgtcgggcacctaggtctcgcccgcctgcagccgcctggggacgcgggttccggacggctggcgcggggcggggcggggaccaccgagcaggaagtccccgcggaagcgccgccgggcacagcgtgggtgctgtcgaggagtggcgcccgggcggggcgggaggttataaatagcggccgccatcctgcttctcttcagacacacttaatttagccggcaggcacacggatgcttatttttaaaaaaagaacttgttttattgcgctcgaggtgaccgggaaggtgtccccgcgggtcactcgctccatctggtcctggagacgagatgccagggcgaggcctaacctgcctgctggcgcccaacgaagattttaacgttttctgttcccttcggggtggttttaccacgcttgagagggacgcctaccgcggaaggccgcggaccgagggcggcatcgcgtccttgtctgctgtctgggcacagcctagagaggccgcgggtcccctccccgtcccccaaggtctggagtggggtttgaccagcctgggatattaacaaatatcggtggactgcatttcggtgatcattccacaagctgaaatggcttcaaaatcacctttatgagtaataagtttattccaggaatgtggcaaaatgcaagtctgatagttttcgtgtcttcatggagcagcttccgtcggctgccttcgttagcgtttagatctactcggattagcagttggcttgccctgaaaaatgcgtttgttctgctgagatctgaatttaaagttatcccaaggaggaaaaactaagctcctaaaggcgcatctaaaatatcttctccctttgggaactttgcggtgtatgtatggagtaggtagtagttacggagacttagtttttaatttttaattgaaaaatgctacctttgaaggtcttaaaatacttgaatatttttctcatttaaaacattttctctgagaagcacaggaatagtttttttttttttgttgatcacaaaagcactaggaattgttaatatttgtagtctgtttgccaaatgctattattggtattctgaggataaaaatggaaatataatattgtaataattttaaaatttttattaaaatatagattttaaattatattatgtaattcgaacaaatattttacatatatgttcatacaagcattatttactatagccaaaaggtgtccatcaatggatgaatggataaacaaaatgtattgcatacctacagtggaatattattcagccttaaaaagggagagccccatcacatgctacaacgtggacgaaccttgagtacattatgctaaatgaaataagccagtcacaaaagtcacaaatactgtatgattccatttacatgaggtacctacagcagtcaaaatcatagagacggaaagtagaagtgtggttaccagcagctggggcagtgggaaacgggaagatagagtttcataggtacggagttttagtttgggaagatagaaatagttttggaagcaga

SEQ ID NO: 917241 - DNA, 4001 bp, Homo sapiens
taacaggagagaggtggccacgaaagttacatcagattgacataggcctgtgaaacatttagcttcactgagcttgggaaagacaacatcattggaaaaaacaatattttagcccaggttcagcactgacccattgataatccagactgggaggcccttaggtgagctggttgtcctgctacagcacccacagctcaggccagtcccgtcccaacagcagaaccaccgaggacagcaacattccgattttaacaaaagcatcttatggaattagacattcttcattggccctcactgagtggaaaacaggatactccccgaagtaaactctctcctggtttacaacaatacacctggccaagaatatggggctgcaggaggaggggtttatcctttgccctcttccacctgccaaacccaggtcatacacccttctacagacctgtccagttaccatcagctgagaaaaatacagttccgagaaaccctatattgttattttataaagcttgagttgaagctacctgttttaaagatcctttttcaggaagaggagtaaattaagatttactccccaatgggctagggggtcatgggttaagaggggctcagaagcaggacgaagttgttttcaatattcaagtcagaggaggagctgccctcctggcctcccgaccctgggcggttacatgcagcttcctaccgggcccacgccatcctgcaccgcctggagggctgccagaggccagcggaggagttggttcagttccttagggaagacactaggtgaatcaccaggatccagaaaaggcaaaagggactcttcaccccttaaatttctccacccttaggtgatgggtggtcgaccttgcctggctgtccccagagggttcctccacccttctcaccagtgtctgaaattgtgaccgactgtgcacagcagtttcgaaagggactctaaggtcacatggggacacggccgtaccacgcttctcaaggcagtcccaggtgcatggccacggaacccagctctcagcagctgttagttaggtgagcgctgttcgggctgccttcctcctccagtggggcaggatcgaggcactgatggaaccgtcctgaggacgcgggtctcagccgcacaccacctcttcgcgaacaagggtcctaaaaattttccttctaggcggggagcacagcccggaaacagaccctcgtgaagtgtttaggaaaaagggaagccactgaaatcttggccccggggtaggccgggatcggctggctccgcgttagttctaggcaaactccgcccaaatctctgcccggggatttttctgcagaagccgctccaagaggtaaaggtcagttcctgcagcgaaggcttcctgcttcaccggcgaaacggagctttgcttcgaagctaagctttcggtgaatttaaaacgtttggtggcagtgggtcaagtagccaggcggctgcgctagagtaccccgaagggacatcggcgacaccacaaacctcgcgctggcggctcgcccgcgcctttttcccctcccgcgcgcgcccggccccactcgcaccccgggcggtgccatcgcgtccacttccccggccgccccattccagctccggagctcggccgcagaaacgcccgctccagaaggcggcccccgccccccggcccaaggacgtgtgttggtccagccccccggttccccgagacccacgcggccgggcaaccgctctgggtctcgcggtccctccccgcgccaggttcctggccgggcagtccggggccggcgggctcacctgcgtcgggaggaagcgcggcggggccggggcgggggtctcggcgttggggtctctgcgctggggctcctgcgctcctaggcgggtcctgggccgggcgccgccgaggggctccgagtcggggagaggagcgcgcgggcgctgcggggccgcaacacctgtctcccgccgtggcgccttttaaccgcaccccacaccccgcctcttccctcggagactgggaaagttacggagggggcggcgccgcgggcggagcgcgcccggcctctgggtcctcagagcttcccgggtccgcgaacccccgaccgcccccgaaagccccgaaccccccaagtccccttcgaggtcccgatctcctagttcctttgagcccccatgagttccccaagtgcccccagcgccctgagtctcccccggttaccccgagcgccgcctcccccagccccttggcggcccgggtgaagcgggggcggctgagagtcgggaccccccaggaagcggcgccccagaccccggctccggcgctgtgccgtgggcggggttcagggatggctgtggtcgttgtcctctgtactccgcatagtgcgagaggacttggcatttatgagcgcttctttaattttttattgttagagaaacaggcattcctccaaggactgaagatctgttcgagtcgcggaggctgcgcgggcccgcgaggctctcgcagggggacctaggctgggtggcggggcagtgccctctggaatgggggttaacggtggccgaggagggggcgccgctggtgccggcgaagtccccgcttctttctcccctcaaaatctcaccaatccgaacgaacgccttctcgaatttccgattttattcaattactttcaacaatgtgccaaggactaaggttgggggcggtgggagagacaagcctcgtttttgccatggccggcaggggggtcccgccatctgcggagggtgccccccgcggcccccggcccagccaacttcctcctcttttcgcaactggggaactgcaaggaggtgactcctttcggggtgaggaggcccagacttttcagaaaggaaagagggcaggtaaaacctgccaagccccttcctgctcgatgcacacagcacgaaagggggaaactgataggattctgcggaagaccgctggggggctggctctgcactgcacacctgctgggggctttctggataccgtgaaactttgtctcagattatgaggtctcagtatttgcatttggttggggattttgatgtcttgcgatacaaatgacagaagacagatttgcacagcgcaagcggatgagggactaagatgtgcagagcaggctgggtggggactcccggggaggtctcccccaacccccgccccacctcgggcacccacttcgcgatttttgcagaggggagccaggtcagaggtgcagcctggtcccctcgcgctcacgtttttacccaggtcagttcgaagttaagtggaaatgatgattaatcctgacaagtcagatctggcctcagaatggatttcccgtgattgccaccattattagcattgacttttccttgaaaaattggcgccccgtggccatgggccgacctaggcagtttctgcagggacgagcgtgagttttgtaccgcggttaccacctactttccagctccaggtcttagtctaagagggagtgtctgctcatgaagaggcaaagccccaggagctgcgaaaagccttgcatggcccatctgagagatgtgctgagtcggcttgttaaaaatgacaggcaaagcctgtggggtggggcagctttcttggcctgagcgcatcttggttgagccagaggtgacttggggtggggagtggggcgccggttggtgggttctccctttaatttctcaaaggctgtggtgtttatgagtctgttggaatcctggttgggttggaatgaaggaaggttctagaaccattgtgggaagctcgctagtaaagatggtttggagatcggaagttgactgactttcccccattgaaaaatgtcacctgagattttagtgcctgtatcacgattataggctcaactttcttttccttgttttctttgatttagttctccttatgtgcaaaattactgtgtgatgttggctagtcgtattatcacagccactccgtgttttcagg

SEQ ID NO: 917242 - DNA, 4001 bp, Homo sapiens
actttccttctctgggtcttgttagcaatatatgtttgttcattcaagcaaacctgtgtcctttccaaacatttaagctcaactagatttaaatgaccctgggaataaaaatggagcaggccctctggggttccaggtctatgctcatgcactaagcaactaaaacagaaatcataacctatggcaggtggccattagaaggttatgccctcacagaccaagaagcttgggtcagaaatcactttcccacaattttatcccatttaacatttaaactaatatatgcaaactgctcacagcacctggaatattcaaattgaattaaagatgcatgaagagggcgtacaagttagaatttttctttcgccatacagaaattgtttagccagatcttctgtacttcttttccttcctaacactcagaattcagaagagaagacataagaaaaaaagcataaagtcatcattacctgtatcagaatttgtttaaaaaacaaccagtggggcaggtgaactgaccagcgtcttcccagctttagtcactgcagtggcaatgaggcgctctccacacccccagttatgtgacaggctagagccctggtgttctctcttcagaacccccctctcctccttggcaagcttcaagcaacacccccaaagacgctgctggatccaaacaacagacaaagctctccacaggagcagttctgagcagcaccctgcaattctaaggagactgcatgggggcaggacattttcttctagaacactggttagattctgctagaactggggcaagaaaatagctgtatggcataaagtctacttgagggaaaagaacaacccggcacggttacgttcaatcagacactaaacagagtgcacgcccacccaggggacactgaggtcgctgggccagtgtccccgcctggttgcaggtccctaacccctccgggagtgcagagctgcgggcaggccacactcaccctgacccttcctgctccccaggaagggaggtcagccccgtttgcaaaacacaggatgcccgtgacaccggagacaggtcttcttcaccgacaggaagtgccttctggtgcctgcacgttttaactaagatgtgtcgccaattacttttaattactgtcgtccacgctattgtcatcagcatttcacaagtttctcggaagcccatcacgcagcccataccctgcggttctccggggacttatgcatcggcccaagttgagggtttgtctgaactgaaacccgcatcctagacctggctttcttctccccaaatccaaggggacaccccggtgacccacaaaagcttagaaaatccaacacgcagcaaatgaaacgggggaaaggggcaccggccctcactctggcctcttagacacacgatatgaaaccttcataaaacctgttgtacaagtcaaaggggaccacgctggggtaaaagtcaaaccagtccatcctcgttcctctgcgtacagagagagggtccagcgcgggcggcgcccactgccatcgggccggggccggggcgcgtggacaggagggtgcggatagaggcagatcgggggcccggtcgccccacgtgcggccagacacccatcccggccgcgctctgccggctctgatccggtgccagacaggagcgacaggggcgaggtggggaccagccgccgacctcacctgttttgttttcttggaggaaattcctccgctggggggccgaggtggcaccgcccgctcgccccccgcaagacccagccggtccgcgcccgcttacctgctctgcggccggcggccctggcgcgggctctgcgcggggcggcgcccttcgctccggctgggcaggcaggtcgggctcgggcgccgccggctgtcgggctctcgtcgggtttcgggtgaaggccccggctcccacctgctgcgccttttaaccgcgccccaccccgcctctgccctgacgcggctcgggcgggctgcgggaggcgagcgctgtcactcgacgagccccccgcccccacctacccggggcgcactagccgctgggcgcggaccgtccccctgaggagcaaggagtgcaggaccggggctgtccctccggggccggatgcgcagagcggggacctttttcccgtggcgggggcgcagggtgggggacccctaagaagtgcacagtgcgcggggccctctttccggcccttggagggaacggggtaccggggatgcagggggtagggctctccctcgggagcgcagagggcgggcccagccccctctgcacgggtgcaggtgtggggcgcctgctcaggccctcgagggaactcttcctccctagtgcacccgtggggagcagtgtgaggggcaggctgtgtttttgccaggacacatcctcagtctttctgggtgatccagccttctcatagcccgcggggtgcacagacctctcctataggagcctggaggttctttattaattaatgaccacttagaggaggtacaggggttgtttttattaattacctccatcctttgaagactcctccggggaagcggagcaggccttcctcgggacagtgcaccaggagagaccacattgcctccccgcttttcagtcaagactagaaagctcagggccagtacagggagtggtgcaagggctggtggggtggaaacgttggaagctatttaggcacctggctttacaggttcaaacctgtcacgcatcggacaaaagatgtgtgacttgcttattctacaaaactgttcggtaattaaacgtccccacctaaaccatatgccacttgttgggtcatattctcccacgaaacaattaagatgtctgttaaaggtcatggaatttgagccaagacttcataaaaatccgctttccaaaatattttatttgaggagaacaaggttcttaaagaatttgcccaagtcaagttttaaaaactttggggaggcccctgaaatggccttgaacttggagagtggagagacacagaaatctctaggctttttaaatttatttatttatttatttatttatttatttatttatttattttgactaagtctggctctgttgcccaggctggagtgtggtggtgtgatctcagctcattgcaacctctgcctcccgggttcaagtgattctcctgcctcagcttcccgagtcgctgggattacaggcccgcaccaccatgcctggctaggttttgtatttttagtagagctgggtttcaccatgttggccaggctggtctggagctcctgacctcaggtgatccacctgcctcagcctcccaaagtgctgggattacaggcgtgagccaccgcgccgagcatctctaggcttttttgttagacatcctcacactgcccagatgtgccctatgcggtaaatcttgggtgctctgtcctgccccacacaatctaactgtggacttcccagtcttctctccattcctctcccaaacagatgcttcagccaggctcagctgtttgcatagtaaaataatttttctaagcagattgtaaacttctttggggattataaacagtttaagcttttcttcctcttcttcttcttttgcatttctacaatactaagtactttgctcatagtatgtgctgctccatgagtatttgaatattgcttggcaaagctgaaccagcatagcagatagtcctggaaatagcttttgctttttctaaagcatgccctgttctcaatcctgcacctgattccatgcagtactgtgtctgagcattgacatcctggaccagtggaaattgttctaggactggtgcaggatagaactttcaaaccaaagttgtcacagagaatgtgttgcatttgctcatgtgtgcaaaaatgaaaccatctcatcactgtgtaaaatatctctttttctgttcaggttatctatattagtctgcatggccttaacattgaacactgtccttcagtttttgctact

SEQ ID NO: 917243 - DNA, 4001 bp, Homo sapiens
tgcctccccggttctagtgattcttgtgcttcagcctcctgaatagctgggactacaggcatatgccaccatacctggttaatttttttttttttttttttttttttttttttagtagtgacagggttttgccaccttggtcaggctggtcttgaactcctgacctcagcctcggcctcccaaagtgttgggattacaggcatgagccatcgcgcctggccatctagggagtagttgatagatctgagaacaggaacatgtgcctcccaatttcgaagttagctttggatagtcggggagtctgcatagataaaaggaaaacaatatcaaagcaaaacaagcaaacctgagtcctgtttccaacgactgccagtgtttcagacccaaagaatgagggcaagatccctctgcgagggtttcagacctccttctcctaccccactggagtgcctagaagccaatggtgcacagtgatgatacgaatgtcaatctttgctcggtcagtgaggatgtcgcctgttgagggaaaaatagtagctgttgccatattcctttaactccccccccccccgccccccgcaatatgtcccctgaataaactttgtgggtagtttttcttcattcccagaactgttatgaggtaagttcagaaattgccagcttcctgatgctctatgctttgaacacacaaaataatcaaaggtgctctttagtaggatcctttccctatcaaaataacagtaacacccaatctgaggcctcaagcccactccttgagcaaaacaaaaagggacaggggagagtttgagacactggctacaccctgatccccaaatcagtggtttaaaaaaaatctcagactctttcttcaatcaggaagaatagatttcttttgtctctagaaatctcaggtcatccaagggacaacctgatagttgatttttaaatttagtgacaaaaaacttcagcaactgtcctgatagagtaacagctagtgataacaatgggtcagggattcatatatttcaaaattaactcaataaaaatgaaacgtttctgtctgtggagtctagatgtaaaaatggaaaactcatgcaattacgtatgtttcttacatcatttaagaattcaaagagttaaaaattaatttccattaagttaaactttccttctctgggtcttgttagcaatatatgtttgttcattcaagcaaacctgtgtcctttccaaacatttaagctcaactagatttaaatgaccctgggaataaaaatggagcaggccctctggggttccaggtctatgctcatgcactaagcaactaaaacagaaatcataacctatggcaggtggccattagaaggttatgccctcacagaccaagaagcttgggtcagaaatcactttcccacaattttatcccatttaacatttaaactaatatatgcaaactgctcacagcacctggaatattcaaattgaattaaagatgcatgaagagggcgtacaagttagaatttttctttcgccatacagaaattgtttagccagatcttctgtacttcttttccttcctaacactcagaattcagaagagaagacataagaaaaaaagcataaagtcatcattacctgtatcagaatttgtttaaaaaacaaccagtggggcaggtgaactgaccagcgtcttcccagctttagtcactgcagtggcaatgaggcgctctccacacccccagttatgtgacaggctagagccctggtgttctctcttcagaacccccctctcctccttggcaagcttcaagcaacacccccaaagacgctgctggatccaaacaacagacaaagctctccacaggagcagttctgagcagcaccctgcaattctaaggagactgcatgggggcaggacattttcttctagaacactggttagattctgctagaactggggcaagaaaatagctgtatggcataaagtctacttgagggaaaagaacaacccggcacggttacgttcaatcagacactaaacagagtgcacgcccacccaggggacactgaggtcgctgggccagtgtccccgcctggttgcaggtccctaacccctccgggagtgcagagctgcgggcaggccacactcaccctgacccttcctgctccccaggaagggaggtcagccccgtttgcaaaacacaggatgcccgtgacaccggagacaggtcttcttcaccgacaggaagtgccttctggtgcctgcacgttttaactaagatgtgtcgccaattacttttaattactgtcgtccacgctattgtcatcagcatttcacaagtttctcggaagcccatcacgcagcccataccctgcggttctccggggacttatgcatcggcccaagttgagggtttgtctgaactgaaacccgcatcctagacctggctttcttctccccaaatccaaggggacaccccggtgacccacaaaagcttagaaaatccaacacgcagcaaatgaaacgggggaaaggggcaccggccctcactctggcctcttagacacacgatatgaaaccttcataaaacctgttgtacaagtcaaaggggaccacgctggggtaaaagtcaaaccagtccatcctcgttcctctgcgtacagagagagggtccagcgcgggcggcgcccactgccatcgggccggggccggggcgcgtggacaggagggtgcggatagaggcagatcgggggcccggtcgccccacgtgcggccagacacccatcccggccgcgctctgccggctctgatccggtgccagacaggagcgacaggggcgaggtggggaccagccgccgacctcacctgttttgttttcttggaggaaattcctccgctggggggccgaggtggcaccgcccgctcgccccccgcaagacccagccggtccgcgcccgcttacctgctctgcggccggcggccctggcgcgggctctgcgcggggcggcgcccttcgctccggctgggcaggcaggtcgggctcgggcgccgccggctgtcgggctctcgtcgggtttcgggtgaaggccccggctcccacctgctgcgccttttaaccgcgccccaccccgcctctgccctgacgcggctcgggcgggctgcgggaggcgagcgctgtcactcgacgagccccccgcccccacctacccggggcgcactagccgctgggcgcggaccgtccccctgaggagcaaggagtgcaggaccggggctgtccctccggggccggatgcgcagagcggggacctttttcccgtggcgggggcgcagggtgggggacccctaagaagtgcacagtgcgcggggccctctttccggcccttggagggaacggggtaccggggatgcagggggtagggctctccctcgggagcgcagagggcgggcccagccccctctgcacgggtgcaggtgtggggcgcctgctcaggccctcgagggaactcttcctccctagtgcacccgtggggagcagtgtgaggggcaggctgtgtttttgccaggacacatcctcagtctttctgggtgatccagccttctcatagcccgcggggtgcacagacctctcctataggagcctggaggttctttattaattaatgaccacttagaggaggtacaggggttgtttttattaattacctccatcctttgaagactcctccggggaagcggagcaggccttcctcgggacagtgcaccaggagagaccacattgcctccccgcttttcagtcaagactagaaagctcagggccagtacagggagtggtgcaagggctggtggggtggaaacgttggaagctatttaggcacctggctttacaggttcaaacctgtcacgcatcggacaaaagatgtgtgacttgcttattctacaaaactgttcggtaattaaacgtccccacctaaaccatatgccacttgttgggtcatattctccc

SEQ ID NO: 917244 - DNA, 4001 bp, Homo sapiens
ggggagattatgtgtttaaaatgacacactacgtgtaagatattgtgcttgacgaagagaagtcattcaacaaatatatacgaagaatctttttcttttttttttttgagacagagtctcactctgtcgccaggctggagtgcagtggcgcgatctcggctcaccgcaacctccgcctcccaggttcaagcaattctcctgcctcagcctcccaagtagctgggactacaggtacgtgccaccatgcctggctaatttttgtatttttagtagagacagggtttcaccatgttggccagaatggtctcgatctctcgacctcgtgatccgcccgcctcggcctcccaaagcgctgggttcacaggcgtgagccaccgcacctggccttattttatttttttaaagctatctcctacaggaaggaaagcataatttttcacatttacttttatttatttatttattgagacaaactctcgttccgtcgcccaggctggagcgcagtggcactctcggctcactgcaacctccgcctcctgggttcaagcgattctcctgcctcagcctccagagcagctgggattacaggcgcccgccaccacgcccggctaatttttgtatttttagtagagatggggtttcaacatgttggccaggctggtcttgaactcctgagttcaagtgatccgccccgtctcagcctctcaaagtgctgagattacaggcttgtgccacctcgctcagctggaaggcataatttttaaagtggttatgacagaaattatattggaaaggggcctgtagtagaaacatagcctccgggtagaccaggaagaaaaattagattcagaaatggcagggttactctttcagctttactcttctccaactgggtgtcggtgctagtctacaaatgtgaataaacattaaagcagataggtatgcatgccggaatccgagaagcattcgtttcgtatataccaagtgcctgttgcgtgttcaggtagaagaccatagtgcaatggtggagacagattatgtcgacaaattattcaaatacagtgtactaaatatgcaatgtaattaggaaaaaacccgagggcaaaaagaaaggcatgacaatgcttcggggaatctggaaaggttttattggtgtgacatttaagttgggccttgaaggatggggagaagtttgtcagttatgtttaggaatgcaaccagaggaagcccagaagcctagagcgttaaggaattgcgcagcaactcagactggattgagtattgggctgtgtttgtcagatgcaataacagaatgagaggctaggaaggcaggtcgggggctggagagaacaggatctgcaaggttcttgtaatcagaaggcaatatggcacagaggttaagagaaccgcttccttctaagtcgcgctccatcacttgctagcagtatgatctagacactggcatgggcttgggcgtacccatttgcaacatgggaaaatagtttttttcttatacggcttaaatgactgagtgggtatcagtcagttagggcagcgtgcagctcatattaaggctaaatgagaatgtattatcatcacgaagccaaaccacgccaaagctcgtttctaggagggtcccccagcctcctcccccctgctactgtttgggaagagaaaagttctctcgggtcaggccgcgcccactccccactcctccgccctcctaggcctccgactttcttcagcgagcagggcccggccagggagtgggtagatgggcctggtgggcagcggagacgccgccgcttaccagggctcgggtcccgctcttcgtcctccgctgttccgcgggccttgaagccgggcggcagggccggtccgatcaggtctcttgccatccgcggtggcggacactggtcacagatatgagtctatccacgaacgtcaaccctatccaaaaagaatcccgcgatcagcagcgaagaatggcaggtttcccggcgccgagaaatgacgtaaagcctgtggttggctgagccttgtagttcacggtaaaggaagtgacgcctaatgcttgctccacagtcgcgtgctagactccggacccgccagtggtatggctgagccgactagtgatttcgagactcctatcgggtggcatgcgtctcccgagctgactcccacgttagggcccctgagcgacactgccccgccgcgggacagctggatgttctgggcaatgctgccgccaccgccaccaccacttacgtcctcgcttcccgcagccgggtcaaagccttcctctgagtcgcagccccccatggaggcccagtctctccccggggctccgccccccttcgacgcccagattcttcccggggcgcaaccccccttcgacgcccagtctccccttgattctcagcctcaacccagcggccagccttggaatttccatgcttccacatcgtggtattggagacagtcttctgataggtttcctcggcatcagaagtccttcaaccctgcaggtaggctatttttccacgtgagtcgacccctttacctttttcccccgttctttcctctcccctttctctgcttcctctctctactctgccttgcctctgcactcttggagtctggtcattagcatctcaaagcaaagtgagacccccgtctctacaaaaaaaataaaattagccaggcatggtggcatgcctgtggtcgcagatgcatgggaggctgaggcaggaggattccttgaacccaggaagtcgaggctgctttatcaactaagtttatataatattgtaaatcctttgttctcaaaatatgtctgactagaatgttttcctgttgactgttaattccatttagcagttatttattgaattccgactatgtaccagaatctgggtatatagcagtgagcagaacatacaaaaaatattatggagcttaatattatctctcttgtgtaggaagacagacaataagcaaaataaaatattgtgcattagaaggttgagtggcatggagagagataaaacaaagaagaatggtaagtagtgcaggattttctttttttctttttttttggagacagagtgtcgctctgtcgcccaggctggagtgaagagtagcgcgatctacttcactccagcctatgcagtctctgcagagaggctcactgcaacctctgcctcccgagttcaagcaattctcatgcctcaaactcctgagtagctgggactacaggcccacgccaccacacccggctaattttttatatttttagtagaaagggggttgccccgtgttggacaggcctgtctctaactcctgagctcaggcatccgcccgcctcagcctcccaaagtgttgggattacaggcatgagccaccacgccgggccaggtagtgcagttttaaatgtcattgttagtcataaggaaggtgacatatgagcgaagactttagggaggtgagagatcacagccatgcatacaactgggagaataggggtacgggcagaaggaactgcaagtgcaaaggtcttgaggcttagaagctatacatcagaatgggaaccagtgtggctacagaggactgagtctggagtataattgtagaagatgggggaggagggtaagacctggtatgtctttgtagatcgtgggactttgacttttactgttgtgaggtgggtagtacagcggattgacatgacctgatttacgttttaagaggattaatgtgtctgttggtgagaactgactgaaagggaaaccggttaggaagctattgtagttacttttctaaacaagagatattggagacttggaccagggtgaagcccaagggatggtgagaagtagttggattctagatctggggataccttggagctcttgtgggttcagttacagaccactgcagtaaagcaagtcacacaattattttttttttggttttccgttgcatgtaaaagtatgttttcc

SEQ ID NO: 917245 - DNA, 4001 bp, Homo sapiens
atcataacaccctcaccacccacacgcacaaactcactttagttttatcagcagccaataaagtgagatttatttcctaatgaaaagaatgcactaagaaaaatacagatctataaggcgatattttatttggggatagaagaatcgccctaaactgagaatgtcaactttgtttcaagtaatacagaaaaagcacctagtaccaaacaggtatacaaagaaatagctgggtttaagactggtcatgtaaactcaaatggagtcagtgttcccgaatgcctagattttctttctgggatgacttaaaattgagcaaagcaatcaagaaaagcggctacagctcacacttcctcattgctacaagcaagtcccccaaccctggaaactcgggactttagacttaagcgtcctccacaagttctttgttcaaccagtaacctcacagattcgtctgtgttggcttcatagtcacagctaaaggggtgcatggctctagtgagatcttacttagctctagacacctgctattgcgtttgacagctatgacctattcttccagacagaacctacactggaactcccaccagcagaaggaaattggtgcggtggaaacggggagcagggttcgaaagcacaggcaaaaggcgctcacaggaagcaagatccacgctggccacacaaactgtatctttccctttggaacgctggtacatctcatccatgtcaagtgactccccagtacgttcggtttgatcgcctgttgccctaacacttttcaggctaaaaactaccttggtgctgggagacacactgggtggttgggtttcctccaagcagggcttgatacgagggcacagaagggcagctaagggtcacgtctctgggtgcacagggtccaagtcctaattacagaggagaccggctgcccttgtctgtgccccattctccagcaaaggggtatatcgcaggtttgtgatttttagtaccaaacttggggcgatcaattcaattccctccaccttatgagaaagcagtaaaccgaaatccccggtggggcactggggaaattcctactcggaagagaaacggagttagactgcgtgtcccccacgccctgatgtctgctttcctggttccttccaactcatcctccaagacgaagggagccgggcgggaagcagatgcccagaacggggattcgtcgcaggcttggttaggggtccccagagctgcgctgcgctgcactcaggctacccgcaccaagcatccccggaagcctccccgggattcaccctgcgcggctgcagggcccgaaaggtcatcttcccacgagtgccaccaagggagcctgggggagcgaaggccgggctcggacgccgccagtccagagaccccctcattgccccttacctgcccgcggcgaatccggcagccccctgacagctcccagcagccgccactggaaaagtttccgaacttcttcgcaggtctgcacgccctcgctgcgggcggacccaaccagggccagaaggaggaggcagcgaaagcccacgggccaggtctgtgcgtccatcctcgccgtcctggtcccctttacccgccagtggaccccactcgccctgcgcgccctggctgagctgcagacgtggaagacacagcggccgaggctctcgagcggtgcgagccggctgcggggtgtacggaccgcccgcgggcaccggcttcacctgggagcagttagctcttcccggaggaggccctaagctgagacaccagagttttccagctgagcaccctctggtcttcttccctagccgagaagagtgggcggctgggcggggcgaagaaaactagtggagccgcagggagcccgcaagcatccgctctggccaccactgctgcaactgctgccgctgccgccactgccgccactgccgccactgccgccgccgccgccgcctccgccgcccggctcggctcgcagcagctaacctgggatgtgcccgctcgctgcgctccgcggaagccccgccccgcactccccgccccgcggacaggccacgcccctgccacgcccccggcgcgctgtcccgctccgcacccactaagatgctgtcatacgcggcccagtgctgaagactcggagcgacatcgatgcaaataaatagaaggaaacccggacctcgctctcccagtccgttctggggaagaatcatctgataaaaacagagaatgtataaatagggtcagagaagacaagagatgagaaacaccaactggaactaagaaatatctcatctatgtaatcaaggtcctcagtacataggaatttgtattctaattgcattaaataggatctggacataatacaaaaggcaaaaactatttacggttaaagatctcaattgagagacttcataacacttaggttgttaaagagtgcacatgagaagttattttttaaaatggctttgttttactgcttaggaacatttttctataacatgattttctgaaaggaggtataagaattacaatcaaactttatcacattcttatcacaatgaaatctagttttaagtctcttatcaccatttagcatcatattttacttcagcactttgtatttgtggggctcctctgagctttaccacttctggaatttctttaaaatatttttcagagagcaattaagttaagagtgctcaggggagttccttacaaggaatatagaaaaataaatactttaagcaattttaaaatggcaaaggaattttgtcaatttacagtttatgagaggaatgcattacgcaccataaaccaaagggcaggtgcattttttaaatgtggttgactcaacaactaagcctgtaagagtgtctcaatctacagccacttgaagagagtactccttctgtaaaataaactagttaaaagcatcaggcagaggggacaatgaatgctttaaccactttaaggaatttcatctcaaatttgaacccttaccaagagatagtagtgaaaaactttatgtcttagtgaagatttttaatgaacatttaatatcaaaggcagcactttcagcagtatatcacttgctttaaaaccattccagggcaatggctgaaacactgcttcagagtgaaatcatgctacttggtgtttggcatcagttttctgaatatgagattttgtttcaaagggcagtgctcttcatgaatctcttctgctctaaccaccaagtatggaaagattgtctggaagccacctatatctatgaaaagaaacaagaaaaaccatgagaatgtatatagtgcttatgggccagataatattctaagtattttatggaaatgaattcactcatgtaatctttataacaaccttataaagtagttactactattatcattgttttacagatgaggaaacaggaacacagaggtgaagtgacttactgaatgcctaaggtaagtgacaaagccagaaatcaaactgaggcttccaaatccagaccgcatgctcttctccagaggctctccttgactattctgtggtacagaaaaacccatcaggtttcaccaaaggcctttgggcagcaacaccaagggctgtttattcatttagcagattttttactagtaaatatgcataatttctatctatataactgtattctactggaattatgtgtatctctatataaggctaataaattcccaagtttttctaaaacatctttattgttaccaagatctctccttgatagatttgatcatcttagactcttagcatcaaaaagatccttaaattaccatctatcccattaactggaatctctaaaacggtgtgtcttgcaaggataaaaatcataaacacaactgagtattgatggttcagtaaaagctaattgactaatacatattggttgaaaacatacaatttttttaaccgctattctaggcttaacaggagtttaaagagacacacaagcaagtttt

SEQ ID NO: 917246 - DNA, 4001 bp, Homo sapiens
aaaatgcttttcatccatccaccagttatttggcaaaaagcagacagaggctggtggaaattcagcgttttgacttgacgatctgaggtcactaaggacttcagctgcccggtttgagcagcccgcgccctcgcagcatctcctggcctccctcggcctctctcagttctgttctttagcagccaaaggattatctctccccgacacgtttcattcacagagccccagagaagctcggattcggttggagctaagagccggaaaacaagcacccagactgccgcgcaagttgtcggagaccaagtgctacacacactggcgccgagagaaagggtgggcgctctcaagctcttggtggagcaatgccagtggccgggcatgcgggggacacggggcccccgaacccggacccgaatccccagctgagccacccgctaaagttggctgttcgctggcagacgaggccggctccagaccgggtggcagggtgtccccgggccctgagtggccaacagcaactggggaagcactgaggaaccctaacgggaaagcccgccccacatctgaaacaggcagcccgtgaagtccccaaaccagccttgaaacgccggcgtccagaggccaggtccccggcgagggtccctcccagccttgcccgcccccggcccgagcgccgggcgctctgtcgcccgaaggacggataggggagagaggggctgggggagccctccgcgtctctccaccgcccctgccggcgcaagggcgggagtggagaaggcgccactcagactgtggcgctgggcaaactgcggtcgcagttcttccaagtttgcccgaaccagaacgcggagtgagcgcccggctcggctctccgtctgcgccttgcagccgccccggagtgacccgggctccctggccagccgggcctgagccatcaactaaggggtagaagggcgcgagagcagcgggaggcgggagccagggtgctcccgcgtgtgcacacaatgaggcggcggagacgcacaccttcccccgccgaagaagccgcaggagcatccgccgcccaacacggagacgcggagtcccatagcggtggcagaaagtgagcaccaactcagcaacagggggaaggaaggggacgccgggcggccagtgggacgtgcggcagccgagggctgcagcctgcccctgcagcgcgcccgcgcttacctgcgatctcctggtaggggatgtccgccaggctgaatcccttggcaccgtacgcctggcggacctctccgcagctccgagccttcacatccgccccggcggggagggagagcagcagccccaagaggggaagaatcacagccccgatccaagaaggcatggtgcaacatacaaatccagctcggtaaaccccacggccggtgcgctcttcaccttgcccctcaagccgaaagcccgccagaggcagcggcgcgctcctcgccgctgcccagcgtcacccccttctgccagccgaggggacgagcagcgcagccctctggactgcgctcagcaaacttttataagccagatggacgatggcaagccaacaagggctggctgggaaggctgctgccttgctcctctagcccccagatggaaacggtgcaatcaaaacgaggaagagaaggaaaagaagtgtttaaaaaaccaccatgggggttcagagctgcaatccgagttccgagccgcagaatcctggagcgctgcgggctcggctcgccggagtgtgcggcaaaggtgggagcgcgcgccggctcccccgggagggagatggacaagcgagagcgagtgtgtatgcgcgcgtgtgtctgttggtgtgagctcgaggttcttggggatgtgtgtgcgtggaggtatgtgttggggatatacgagatctaggggaaacctcagcttaacacaggctgtgggagcctgtgagagtcctcctgaaataggaagagagaaatcctggagacagtcactggaggcaagagggaaggagaaaggaggggggagaaagaaacgtgctacacattgcacagccgaaattcacaggccgagtcaaaggcaaaacctggactggatctcttcctagtcggtagaaaggggaaaaaaagaaaaagaaacgtacctattttcttattcacttcacatcctttataccgatctgaaatgacatcaataaacaatctagaaagacaaggtaattttaagtcattaacatgttattaagctgtatttttatggaggtaaaggataacgcagttccaattgttgctcttaatatgtgtccctgacctactgaaacacaaagccagagtggaaatagtcatagacgggagttcatgggtggcagagcacaatcacggctctaactagttgcctaatttctgtttgactttgtttttttctaaaggcacacattacagactggtagttcttaatttttaaaggtttggttctagactcaacaatttcccctttttttatttcaaatatctcatagccttcgatcagaaatcattatgcttaggtttctaatgtgtggaggatcgggaaagctaacaaccagaccacagaagcaacaagaaaaggagagcacaagggtcagaggtgcataaagggacataatgggggaagggaggtgattccttccctctcactagatgccctcacatagtagacttaacattttcttccaagttaacataattctcaagtggagaatcaatccaatttcttcttcctgtctccatttacactgatgttctgtgaacgggataaaagtgaaaattcaggtttgcctaattgactttgttatgctaatggacgcactaaagtcagctggcagaagtgtgtgttgaaacccagagctcctgaaactactaagatagtttaatgaaaaccaagacaaaataataataataatagtgtttattcacttacgtggctatgtgtcataggtcagcacattattcacaaactactacaaggtaatgcacagttttgtggagctcacctatgaagctacacatgaagatgttttcctgatgatgatatgaatgaccagaatgactcatgaagtttaaatctttgagtttgtcattatcatcacaacatattaggtacattgtcttcctctctttaataaattccccctctcctaaccaccaaaaagactctcaagattcaacctcatttaacctttccaaacgctttaaaaatgaagtcgacttatttacagagccactttgtcttcttcaaactcataggtcaagacaaaacaaaaccaaaaaaaaaaaaaacaaaacaaaacaaaaaaaaaaactccatagctaaatctttctgaaaacgcaacacacttaactttttttctcttaaaattttagcacagttttttgctttcacaatatttatgctaactggcagatcttaaatcactgaacttattttccctcaagtcggaaatcaagataaaatatattctggttatgtttgtggacaaacggtgaggttgataggctcaggaattgcagtcaagttattacttctgtcatatttgacaacgtgacttccttcaaacttctctttgtatcatagtaaagcattatgcactccagaggaagagggtaaaaacacacacttcctgtcctaccaccttatcctgggactcattgtaatttaccctgactcagtatagcagataattcattattttaaatggaggtaaaggaagaatgggtaaaagcatagtatatgtggttttaaattatttgaagatcagctaattgttaagtattgaatgagcactcaatacaactttatagcactagactattgcacaccgtccctatacttataaaatgatcttaggatttgtggcaaagatattacatgagacgaatgactaaatagattagtttaattccatcaggagagtcaaatagtttagggtaggtttgtgaactcaagtcagaccaaagaattag

SEQ ID NO: 917247 - DNA, 4001 bp, Homo sapiens
gcttggtaaatgcagagtcctcctgggtgcaagggtgctacacatcactgggcgagcgcgctctctgggcgagactggacgggatgcagccgcagcaaatgagacagagcgctttctggatctcttggtttctgaaagcatatatgacagggttgatgatggaattgtaggtggcgggcaggagggtggcgtaggtatagatggaggggtaggtgtaatccgctatcaaggaatagagggtgaaaggcatccagcaagcagcaaacgtccccaggatgatagccagggtggagacccctttccgggtggtcacatagtgcgacgtggccaggaagtggtgctgcagggctatctgatgggcgtgcctcatcacaatcttacagatctggatgtagagctgaagcatgagcgcaaacatgaagaggaaggacaccgagaggatggccgcgttgttcttggtgagcggtctgaccacgctgcaggtggactcgtctcggaggcagttccagcccatgacgggcagcagccccaggcagatggaggtcccccagagcatgacgagcatgacataggtaaacgtgaccgtcctctccgaatggtacgtcagagcgtagtacagtgagaggtagcggtcaacagtgatagccagcaagctgcagacagaggcagagaaagaggcgacaatgaggccgatcgtgaccagcttggtggcttctgactgaagcaggtaggcaaaaacaaaattggtgatgagtccaatgccggccagcaggtctgcaagagccaggctgcctattagcaggaacatgggtgctcgcaggctggggttgtggaagatgataaggaccacaatggcattttcacaggagatgagggttcccgaggtacacaagacaatgtcccaggggttgactacgagctcaggctctggctctacggcaggaacccgggaggagacagcagccgagatgttctccgcagcagcggcatctaaataatcccgaggcagcccgcttaaattgaccttcaggtcttcattcattttaacccctgtcctcttcaacgaaaagacaggctttttaatgtttaaatacagcagggtgacaatccaagatcatgcaaaaaacacacagacaaacagaaagccagcccctgctcagataccagtaccaaatgccacaagcttcgggaatgaggaactgttgggaaatgaaacaaaagccaaagtctctgtggtttaaaccccacaacaaaaatgccgtttggcattggggaaaacacagggtaggacttcaaaacaccagcgtgagcgaggcaggcacacacggactcgcggcggtctgtttgcaacagcgctgggaatgcacattggaaaatcacatcttgcatgctgaaaacgaacaactgtttgacatctgggctgctgccgagaaaaccacgcggcagcggcaggtctcgagccaggggccgccatcctcgatggaatatttaaatcgcctatttccatcgaactcccaccctccaaacgcatcccccgcgcgcgtgcacatcctcaaacgcacccccgaccggaacaaagaggggctccagactccccccgtgcgcacggggcagtcgggagggccacgagagggaggtgtgtgcaatggaagtaccgagacagacagacagacagatgcccatgcactgctgccgattccctggcggcggggacgggagtcggacgcgagggggacagacagggtgcggggacaggcggcccgcgggggcgggggggtcatcgagggggtcaccttggctcgcccaggccgagggggctcctccggtgcttccgaagcgcgtgggctactcgtgtcgcatgtcggcgcagttgcccgctgtggcaaggggggggcggccgggctccggagcgggccgggagggcgcggggcgcgcactccgcggcaggtgagcggcgcggctgcaggtgagcagcagcctcggctcgcgcgcccagctttccccgccgcgcccgcccggcccacacgctccccgcgcgcgcgccgcccccgccccgcgcgcgcccggccgcccgcccgcccgcgggatccccgcgaggccgcgcgcccccacgggtcagggctgctctagggtgcgggcaggcgagggcggcccaggggcgcggggcgaggggcgaaggagccaggaggctgagaactgcatggtagccctgcctgcctgccgcgctgcgcgccccaccccagccggcggccccgggcttgcaccgggcggggcaggggagcgctgcctggagccctgtgacctatttcgttcctgtggtttccctggggagctccaagtctctacagtcctggcttttccacgcctttacctaaaccactacattcagggccaaaagaattgcttaggatgatattcacgatcagcagcagggatgcggggtggacaggttagggaagcagatctttaaaacaacaaaatgccccgcacgctcttttagaattgcccatggtcctggacctggttcattatcactgttccccaggaacatttgcttgactggatagatgctgctgctctgtggatcatcattatcatcaccaaattgcacttattaagcgctctttgagctgtgttttcaaatggaaatcatttactgagttcttgtagaagcttcctgcagacattggccaaaccccaattcatttagatactgaagtggcactattaatttattttttcattttgccacatcaatggattctaagatgaagaacctgatagctgtctgcttttatgatcccatgcctcctctggatataaaaaccagagcacctcatagatcttaagttccaagatgatcctccagtttaaagatgggataaggaaaaagtgtgatagtcttgtcttgccctgtcagaggtgaaggttttcccactgcttttcttccacttgcccaggggctcttgtatgaatggagatggtctgcaggcaagggaccctacaggggcatcatcagctgaccagcctgccttcccctggtgctcacgtcttctctaccccagcccaacagattcggagcctcaatcacccttgactttcttcccgcttctccttcccttcttccatcaatcagtttctggctctgcaaggtcactccagctctccctgcatgccacttctcatcatcctcagctccctggttgaggccctcatcccctctcacctgcatttctggtacccacctgcctctccctttcccaacctcctcgatttggcacatctattccatgatgtccaagacctcctgctacctccagaatagtctgaactttttaccttgacagattctgctcagtagttcttggggtgggcctaccttctgcatttgcaagcctcttccccagtgatgctgctgctgctgctggttgacagatcacactttgagaagcaaggttctatggagttttcagagtggcttgttcatggtggggaggcatcagactcgtgtgtgtcccaagaaccgggctaagggctgggcatagaaattcagtaagacacggtctccagtctggtagtgacacacacacaaatcaacaataatgccaggcagcaaatgctgtcatgaagggatgtaatcttcttctcaattctacatgatgcatcaaagaattttagaatgaagcgatgaaaaatgaacagtcacttaacaaacatgtagtagttttggcataatatagctcaacctacatggcaaaattttgggcacctcacattggcattgcagtttagggaaagcgaatgcatagggctagccagacactattctagccaataacactgacatggtttatggccctgacttcacggagcttaaaggggtgggactttttaattcagtcgttaatgtgtttgagaattttttttaaaaaagagctgagtgttggaggagagaaaaaagtattgaggtgaatggcagaggtatacagatttttgtaaaa

SEQ ID NO: 917248 - DNA, 4001 bp, Homo sapiens
ttctagtgcacaattgggagtacgtaaagccaagtcttccaggttttgtgatttcagctgctctacttcagtggttcacagaaagcagcaccttgaaaaaagctagtgccgttagtaactttcatatcctcattccatctagattcagaagcttcaatattatttaaattttaacaattttcaaagtaaatccaaaaaaggagtatctaagacaagtagatattaataagaagtcattcagtaacttgatgtgtatgtagaaacttataaatttccatcaccaaaaaaaaaaaaaccgtccattttaaatggaaaggaggttatttggggttgcaaatatcattgactcctcagtgtgaaacttcattcccccatgatgcaacaccaacaacagacttcaaaaatagactttgctgcaatgagatggaatctgtggcatccccttgtaatatggaggtggatgaaaagtttccttcaaaaatgtcactttgcagagtgggctgtcttgaaatcagcccagaatttctctttaaggaaaactatgggggagatttgctgtctgtggtcagtggcatcacgggctattgataattaagaattaacttgagcaattgctgtggttaaacacaagaaacgtgcctgtctgccttccttcctttcccttcccttcccttccctttcttcccttcttctccttctttccttctcaaatatttaggttaaatatgatttaggagcataattctatatatttaaaaacatattaaattttccaaatattggtgtgactagaatattaatttctatcaaatgaggaaagtgctacagagaaaaattatatctctagtgtcattcaaaggagagtaatcttggaggcttaaatcttatttttaactggaatgcattcttattaaatagtagcaattataatataaatgaaattttgtatttgtttttctttttttagtattgcatcaggactcccttcacctatcctcatccttcaattttgtgacataagtcctgtacttacaaaccatcttgagtcttttttcccacgttatgctcaagctgtttttatgtagcttgtcaccaatacttatattcatttgctgacgtttgaaaaaaaatgagtgatgcatgtgttttaaaggcattatagtattgattgtgctctgcaaacacagaaatttttggataaatattgaaaagtgattgactttaaagtcagctttttaaaagctatagataccatgattatctgtagcttttcttttcttaaaaaccattaagttatttcatgaaacaatgtaattgaaaacatgtgatgaacattcctaaatatacatatgatttaccataaacattttctttccttaagttgaaaaaaattacatttagtattaatgtaaagcaatattgaaaataaatgtaaaatcatattaatgtggaaagatgattatatagcctatttcaaggtctttcaccaacatagtttgttatgtttatttttttaattaaatatatttttttaatagagacggggtctcactatggtgctcctgggcacaactgatcctcctgccttggcctcccaaagtgttggagttacaggcgtgggccattgcgcccagcctgtattattaaaatgaaatgatttttgaaatgcagtacataaagcattacttttgacaataatcatgaagttaattaaatgctgcttacctcctgtccatcaaaagtctgtgtgagagatgagcatttttcagcacttccacttctgtcgaagggatatctttgagttgcttctgttaaaatagctctttctggaaacagtgtatttaagaaatgttgtattttgttttagactcttttgttgctttaaaaagtagtttccagtgtaacgcttggcgtcggagttggtgctgggctgactttaattgctgctttgtctctttcaggaagtgctctctgaaataggctttttcaccttatgactttaccctggatgtggtttttctctttcacaaatgatttgtttatgaagtcacacttagcataagctccccttgaaatgatggcatatatttaagataattatatacaaaggataaagtttcttcagtttgtgtactttgatgcttgaagtctgcatcatctatggaaagagaagatttgatattgagtaaaagggggtttaaagtctagcttctttgctttataagctatgtgactttgtctagttacctacccactctgactaaccctttgttcctacttcatttctgtacagttgaaatagagataatactatatccagtaggattgtaggggccctaaaccagaaagatcccaagtgcttaatagtacctggcacttagtaggtactcctaaatggagtctcactttttactaccaagttattaaaaatcatagaatatccacatttccactttttactatttaaacatttctaaatgcttaaaagtaggatccttgattaattgcttctgctttgccacatacatttatccactttagtttgctgtattttgtaagtctgcttttctagtgcgtggaagtctagaaataatttcttttgcataaaaatttctgcaaatcttagcagaaaggactctgaagtctttagtggactgatttacatattaagagtgttttcacctaagaagggaaatgaaaccagcagaaagggaagtgagcaacgaatcgctgcctgccttgttaggttaattttgttttactttctcatttcttaaaaaaaattatctctcatttgcttatcctaaaattttaattatctttatgtttggttatgcatggtttgtcaactttttaaagggttcatgaacttaaatgtatttgtttttttgaattttagacagtttggggtccatccttttttttttttttctcagacaaaaccatagtaaatctgtggcttagaaaagttacttaaatccttgcctttggtgataaaatacttttgattgttacaacctgccagaatgatgggttttagaagtgttggagacaaccatagcaactatttcttgtgtggatgaagaaattgaaggccagttacttgcttaagaactcaaggtaaagccaggtccagtttctcccgctgtaataacttcttatgaggtaattatattgatctgtccactagataggacttcttatggctgaatcacattcatcagttttttatatgtgatgttatatttcattcatcacacaggagtttgatgtttcagctggacagaaatctgcctgcatgcagacctaatctgtcctttgccttattcacatagcttaggacttttctaaaattaagtattgattagcttccccattgctgctaaaatcaacagatacattgatggcatgtgtctagaagagtcctttcatcaagacttgaattcttcacggtgcacaggggcattcttgtttctgaattgccagactcttagaggaggcatccaggagcacctgagggctctccataggcctggcttcaggttggggtgagctctcactttttcctcatcttgctctccattccagccctctggactggctacatttgctcttcctgcctctcacatgctgttccacccactgtggcattcctcaccactgtctcccacctgatggcatggcctgctgctctttgttcttgtagctacctttttcaggaagctttctctgccatccgaagctgggctggtttctctgccctccgaagctgggctggttgttcatccctgcaggtttccttagcacttggtacctatccctgtagtggcacatgtttgcattgttactgcatatttacttgctttttctcctccactaaattgcattccttgagagttggcatgtgttgcatatgtgtgtagagaagaggcatttaatattggttgaatttctgactgaacaagtaggtgaagaaatggagaggttgggggaggaatgga

SEQ ID NO: 917249 - DNA, 4001 bp, Homo sapiens
atggcagtaagttattgcctctagggaaagggattctgggtgaaagagctaagacaggagactgtttttcattttaagatcttctattctcctggaaattttttttctatgcttttattactataattaccactttgattaaacattttaaatatatttaaatatacagtatatatatcaaagaatgtgcaagtctcttacataaattgattacatattttgaagtcttacaagtgactctgaggcccaattgacactgtaaattgcattccgagttacagttcattgtttcagtatagtttttgtattattattttactgaattgggattcatgaaaattggtaataactatatgtgattttacacatatgaaacagaatgaacgcacttgaaacaccttatccccaatctgtcttgagaaatctgaatttagtacatgtttctcctccacgtttaccagatgatcatcaggaactatgaggtcgtccaagtctctctgctggtcctaagtaataacccacgtcttctatacatcccacattttccaacactgtccacattgtgccatttaagacagtggctgtcaatactcaaagtatggttacagtccgttgaatgagaaactcaaaatgttacaaaaaataataaaattgtttctagtgtttcttcttcattcacccaaaatatattccacattggattttgaaaaactgggttactgaaactccttttcttagctatcttaaaaacttcaaaaaaaaaaaaaatcaggatcccttccctttattctgtcaattctgtaatttcccaatactttaaattccttttctcaccaaagtagttccgtttctattatcttctcctaacaatattttctaggccaatattctgatgttcatcgttgcatcttttaatgctaaagactgtacaaatcaaagttcctaatgtcatcaaggcaaataattatttgaaatacagcactagtcaaattaagagtaccaagaaaaacacttaaattgtgagagtgcaaatgagaccaaaattagaatgaattgcaaatgcatttattgaaggaataattactgatttttgaggaagaccaaaaggtctgaaatcaaacgcaactctgatttcagaagagccacacagaacacaaattagggagcttccaagatgctacttaaatgcattttcatcagcttaattctaggccttactgcccatagtaaatctactgccctagtagccaagtaaccaaactgctcaatataacaactacattatcaagtgttttacttggtttccaaaaccactctgttgcaagtaggtctcaggaaattggtctttaaaaaaaaaaaaaaaaaaaaggaaatttaagtttctagggttaaattctcccgtcacagtgtggccgagacaggaaggagcaaatatgcttctttgcgggaaggatctggaaagatgcggccgaccagtcttttgcacattggcttccaaggggagggttggggaaatggaaaccagctttcaggtgcggaacacgatcactagtggcgagaggccgctgcctggggctggaaagccgcaccagcggggttggcaaggaacgcatcccaccattcgcggcagctgctgcaacgctggaggtccaggtgaggctggggaagtcgccggcctcgcccaacgtggcagggaggggccgggaggagcggccggcggactcagccggcgggatgggccagcgcgccttcatccccctccccgcccccagacctaccatggaactcgaagtggccgatgcgctggccctgggcgtcctgggccgcggtgctgctgaagctgccccgcagggtcttaccctggctgccctgcggccaccagcagcacgtgagggccacagccagcagccgcagcccccccatgcccgtctccaggtctgcaccgacgcctcggctcccagccgccggcggctgcccgccccacgtcggcagctgggggaggcggggtgggcgccggagacctgctgctctggagcctgagagccaatgaggcgggctcctctgccataagccgaagacattcaccagtcagaggccgaaatgggcgggacgcgcagatcctagcgtcccatcagtccccggcttttgactagttcccgcctttttctttaatgaggaatcaggaggatgttgcttcaggttacggaaaactcatctccctcctcattgcctagcacgtcttgctactgagcatgcgcgggcgcgctggcacgagtccgcggggccttcgaagggcttgtgggattcggaaaaaacttaagaaatgcaggacaggactgtttctggccgagagagttaaactcccgcaaagaaaaaactgtgttcttatgcagattttcttccttggcgcctgtataacctacaggacgtgtccgatttaatgtctcaaagacacttagctccgcatgaccacaatttaacgcatgccttctcttggcatctccagccgatttttccctcctaggttctctggcttctcgaattacattacccccacccccacccccgcccgcagaccagaccgctgggaattgtaggcccccccccccccgcaattcaatcaattcaataacaagtgtggattagcccttcttctggtgagggtgggaagcagcggccacagtcctactcagttcatcactttgttggcctatggcaaagaccgtctctacagtcttcattctaattggctacaatccatctctaccctacagccacagaaagctgtaggaaacaatttgctgcacttgccttgaaaggttctcaattgcctttagcacacaacccaaactctagaatatggctcttcaactctcaaatgtctgttttttctcatctccatccttaccgccgttggtttcctgaacactcccaagttctcccttctaggcctatatcactccctgatccctctggctagaatacttctgcttattccaacactggacctcctcaccttccttttcctcctttactcctccttcccaaggcactttaagaagcctttctcaaacccctaagtctgtagtagatgcccctggaaccagaatcccttacttccctaccagagcactcacgcactgtactgtaagtatccattcatgtgtctgaaatctccgcctctattgtcagctccagctggtcagtgactacactttttttttttttgagacggagtttcactcttgttgctcagactggagtgcaatggcgcgatctcggctcacctcaacctctgcctcccggattcaagcgattatcccacctcagcctcccgagaagctgggactgcaggcatgcgccaccatgcccgactaattttttatttttagtagagatgggatttctccatgttgatcagactggtcccaaactcccgacctcaggtgatctgcccgccttggcctcccaaagtgctgggattacaggcgtaagccaccttgctggctatacctgtcttaatgaaagtgaggcaggagaatagggcctggggtgagggaacctaaggcgtttttacaccgactttctagaactattaaaggaaaaccctaactttccaccctaagtaacaaaaggaccagaggctatgccctttgcaaatccccaccttttctgtgaggcagataagaaattggctgtccctacccagtcagactgattgccagctgagtcttcgtttgcatagaagtgcaactttgtaactctgtaacattgctttttgcaaccaatcagatgtttgcacaggagtgtgacctttgtaactccacttcagcctctgattcattgctttccccaagaatcagacctattgggggccaccacttcatttatatgaggtgagctccaagtggccaatgggaaacttctagggagtatttggacccaagatgattatgtgtccaggcccttctgcgctgtgtagttgcattttctttttttga

SEQ ID NO: 917250 - DNA, 4001 bp, Homo sapiens
gatgatgacttgatctcatccaacattttatcctatagaatgctacagaaccaacctacaatagatatctagtaaatatctatagaataaataaatgaattaaagtcatatagaaacctgagttaatatttattccattaactgactggtcatggtactaattagctctaggaagccagatgaaagtaatttatgcaagggatcattaccattgtcactaacgcgatacataaacatgtgagtgaacattttgtggagtagcatattctttgtggttttatgtccaaaaagtgcagtgaacccgcagagagaaaacatgctaaaatataagaagtgtgcagtcctaccagtaagcacagttagatgtgtgatcatccatagactcagggccatttatttatttatttatttatctatcgagacagagtctcgcatggtcgcccaggctagagtgcagtggcgcaatctcggctcactgcaacctccgcctcccaggttcaagggattctcctgcctcaccctcttgagtagctgggattataggtgagtgccaccgtgcctggctaacttttatatttttagtagagatggggtttcaccatgttggccaggctggtctcgaactcctgatctcaggtgatccgcctgcctcggcctcccaaagtgctgggattacaggagtgagccaccacacccagcctgattcagggtctttatgtaaaatatccataacatatctgttggattcaccctctggtacgtcagtggccagagagatgggagaagaatgatgggagacagttttttagcacttataatgagaggcaatgttgtaaggacttggcagtagtaatactccccattttacaggtaaagcagctgaagccagatattaggtaacttgtgtgtgggggggccacacagcttgtaaatttcatttgatcctgatttcagagcccttgctcttattacactatattgtactcagagtgacaccaaaaaaacaaaataccacgcccccctcccccaacacacacacaaacacacatatataaaaccctcactgccctttaaaggaagtctcttcacagcttctattttgccaagtttctgttaccaccattcccaacctggacataaatgttgccaaagcactgcatagaattcattgtgattttttcccctcaggcacatagaaaagatacgtttagtctaagtaaacacaagtataaaccacacaacagacttttttttcacttatctaattagtagtatttagcatttaaaaagcaaagattggtactctttgctggcgggagggtaaattggtaaaatgtttttgtagaccaaaaagtaccgttttatatctaaagctttagaaaatataccctttgccctaggaattctacccctgagattctatcctgagaaataatcttatatttctaataattcctatagcataggaatattctatattaaaataactttgttccttttccttcatactaagttatcctgaaatattggcattatttgcatagttttgcttgatactgtcttttgtcattgtgagtttatacagtagtacatgaagtgagccctattttttgacaaagatatttctggtggacccatcgctttcagtcaactttataagaactaactagacctaccagtcagcagagagagtaaacttacattattaatataatttttgttagaagtgatggtagcttgttcttaaatagattgttttcctttttaccttttaccttaaaacttaggcttttaaagtttttctttaaaaagtttgttgaaaaagcaaaagatcttgtacttacatatcagtgactcgttcgggtctctgtgtagtagctgtgagtagttgtccaaactgaagtaagttttaactgtggcatgttgttttaagagaggctgtgcagacctccttttatggtggtgactttttttttctctgtcaccctgtgactgagcatgtaatgagcagttagcctcgtgtacgtgtgtgcactttgtgtttttttttgttttaaatgggaagtgaaattttttatagtgattaaaaaaaactatccaaaagccccttggaatttatgaattgttgatatctgtggaactttataaatttttctgtaaaggtttaagtatcaaaaaattctttgaaagagactgaagcaataaaccttaaccaaaaaaaagaccaagttactgatgattttatattgattttgcatgtaaaagtatgggtttttaaatgttttaaggaaaatagtgtcaactttgacagtgctttttacctggaaacttggtatcagggagtagtttacacattccaccttatccacagcttatgagaaagaaacaggtttctgtggcgtgggggtgagtgacagtccaggatgtggagtggactggattagtcgccgttttcagtcgagaggctgcctgagtcagaggctgtgtgagtacttgaataacagggaaacagttgaagggaggcccattatagataaaatccagcctcttcagcacagggtgaaagagactcatgccattcacctcatagttgtagttgactcagtttaaaccaactaacgtgtctgtcagaatgcagtttatttgtaggctaaattaccagatatgtagcactcagatcaggagaggtgatgtttacacttagtcaggactgatctggccattcccagccacttctgggtgctgctttttacgaagacatagataacacctgtggcagtgaggggcctggatagcaggtcttaggagaactgattaaataagctggggatgtgtatgctttgtaggcatagggtcattatccttatgcttgtggaaactctcatagaaaagtgtttacattgcttgtgtcagtcttcctaactccagagactagcgggagggtcagtaagaagttactggacatagcttttggatcaaaagatgagagtcattcccaaaagttgtgattattttgaaaaatggaatatgctgtttcttatttagatgcttgagtaaacttgatgattttgagggatgatgtaaacagaattgaatcatttggtaggaatttgtaactctgtgatctcagaagcctttctgctccaggattctgtaaaaatagtcgagtagcttttgcctcccacagatgtcattaggttcttctaacgtctaaagtgctgtgagtatggaggaacattgtcagacacaagaaagagcatcaagcaagtcagctgaattctttgggccgccacctcactgtgtataaaataaaggtattgaactaaatgatctccaaggtaattcctagtacaaaaattctatgagggggtaatacagagattttatgacttggtggataaacatgacatcatattctagaactagttcatttaaaacttaggctgcagagtacttgaagaagacactgttgataaatttttcagtttgttgaaagaccattctggtggggttttgcctgttaattttgaaatagttatattaagtaaaacatttttatatagtgaaggactcagctagttcaagtaattcctctgacaaactggatctgtcctcccaaccttcttttttttttttgagacagagtctcgctctcaccaggctggagtgcaggggtgtgctgtcggctcactgcaacctccacctcccggcttcaagcaattctcctgcctcagcctcccgagtagctgggactacaggcatatgccaccatgcccagctaatttttgtatttttagtagagacaaggtttcaccatgttggccaggatggtctcaatctcttgacctcatgatctgcctgcattggcctcccaaagtgctgggattacaggtgtgagccaccgtgcccagccccttttttttgatatcagagtagtcaggcagatgaagaagaggtgatggggtcattatcctgtaagaggccgctgaagctgtatatta

SEQ ID NO: 917251 - DNA, 4001 bp, Homo sapiens
tgcttcattttgtctttattttgaaacctcacaatgctccattgaacgagtttgtaagtgtctggataaggatagcacatccctctttgaagagggaattcctgatgtcggaggcccctttctgcacttacatggggaggtgttcagttgatgtcagtatggagttcagtttggtgacggaagtcaggaaaagaggctgaatgttgggttaaatttacagttagatgtgaatggcacggtgggggaattagatgtcaagaaagctaatttttaaaaattactgctacaaccacacagcatagttactcgccccgagttccacggcgagaacacgcagatgttccagggcctccgcccagcgctgtgagcacctggtatttcaccttcactgagggttgaggttccgcagagccagggtgcacagtggctgctgcttaaccctaagagcttcctgtgcactcaacacagctgcgtggtgggagaggggccaggagccacgtggagtcaaagtgcagggggctggctcaggagatcacgtccacacccggcacagccgctgcccctcacccttaagacctgtaagcagcttctgctgatcctgccccagatgcacagtctgacgccagtgggcagagcggatgaaacttagagcggcctgcgtgcccgtcgctcactcccacccccgaggacagcacactcaggggaacagttcctgcccccggcgtcacgccaggctctgcctcacagaaactgtcatcagagcgaggctgcctccgtcctgcctcagttcctcctgcattcgctgcgatcagaggagccagggccctggaaagtcttccacagtcatggcaaagaatccggagaccctgcccctcttcagcctcccctgagaggtcctctttcccccacacttgaggctagtctgtggttggtgaaaaaccgacgagtgaacgtggcacgtccccacccaaaaatgtggaggtcactctccgaggagggacttctgcacatggactggaactgctcgtaaccgcacggccgcggggcgcccacgtggcgaggctggcatgcatgctcccttaggcaccagctgttaagggccccggagccgacagtgacctgggggccctctgcaccctgccgccccatccctgcaccctgccaccccatccctgctggccgggtcgcgctgctcacctggtagcccttcctcttcttcagccgcttcttgttcagcttcttgcaggcatacagcttgccggtcgccttcatctggcaggccgacacctccccgaagccccctttccctaggaccctgaagtccaggaaccagtcctcccccatgggctgggcttccagccacttccactgcaggaacctcaggaagtacaggctgcccaggtactcctggaagggggcttggcccaggtgtgccagggtggcctgcagcaggggctggaagagcccgtcctggatctccacaggcccctccttaaacttcgccactatcccctcatccaggaagctgcagaagagtttggcctgggggtccaggtactgggccaggatggtctgggccttctgtggctggaggtcattgtctgccgtgtcatagtcctcgatgtctttccagagctccagggccggcaggtgcttctctgccgattgtaggaactgctgaaagagcttcttgccgatgggctgctccaagcacacactctcaaactccaggctgaggctgtcgcggagggactcacacttggacagcgggggcagcttgagcttggccaggtacttcttgtcccgggagggttgggagctgctgccgtcaaagctgcctcgggcggcgatgaaggcagagttggccaccacggtctccaaagacccgaaatccatcccggagcttcctgcccgcttcaggcgtgagggcccatcagccgaggccaagccgggagcgttcacagacagagcaggcctgactgctgcccttggcctgtggcccgtccctgcccttgctggacgagagagacgccctggccctgtcgagggttcctggggaccactgggaagcccctgggagcccggggctgacacagcaccaggctaaatcccagccggggtcacggaggacgcttaggagtggcaagaaggtgctagaaaaagacaatcccctgagctgcttggaatccgattagatcattctgcccggccccttcctccaaggggccgcctcacttttcccctgagaaggacaaacaaccaccaggcttctggggcccctggctggagaggcactcaaagctctgttctgagctgctccatccagcccctggcttcagcagccaggctcaagcctgctgtttccttgggatgtgggcctgacggagaggatggagccggaagaaaccgtaatttacaaaggctgtttttccctatttttatttttaagaaaatagcaaatgagaaagaaaaccacctgataataggaatttagagaggaaaagaagcccacagtgaccagcttcctgggggtctgtaggtgagaccaccagcgcttactgaggggtcagttcccagtcatttgtcttcttctcacctggggtttgcaggcaaggcaggattgtcaagaggcagttgctggtgacaccaggaccagggagcagaagatccccggagctacatcaaaccaaggccccactcagagggacgcatatggaatacagctggggctcacctgggacacacctggaatccacctgagaaacacctggggtacacctggggcacatctgggacacacctgggacagctgggacacacctggggaacacctgggacacacctgggacagctgggacagctggggaacacctgcaacatacctggggcacacctgagacctgggacagctgggacagctggtgaacacctggaacacacctggggcacacctgagacctgggacagctgggacagctggggaacacctggaacacacctggggcacacctgagacacacttgggacagctgggacacacctggggtacatcttggacacacctgggacagcgggggcacacctggggcacacctgagacacttgaaatgcagctggggaacacttgggacccacctgagacacaccgggggcacatctggggcacacctgagacacacctgagatacagctggtgcacatgtaggacacacctgggagagctgaggcacacctgggatatgcctggggcacacctgagacacctgagacagctggggcacacctgggacacacctgggatgcacctggggcacacctgggacacacctgggatgcactggggggcacacctgagacacctgaaatgcagctggggcacttgagacccacctgagacacacctggggcacatcttggacacacctgggacagcttgggcacacctgagacacctgaaatgcagttggggaacacttgggacccatctgagacacacctggggcacacctgggatacagctggtgcacacgtaggacacacctgggacagctggggcacacctgggatatgcctggggcacacctgagacagctgaggcacacctaggacacacacctggggcacagctgggacacactggagacagctggggcacacctgggacagctggggcacacctgggacagctggggcacatctgagacacacctgggatgcacctgagacacacctaagacagctgaggcacacctgggatacagctggggcacacctgagacacacctgggacagctggtacacacttggagcacacatggaatgcaactggggcacacctgcaatgcagctgtgacacacctgggacagctggggcacatctgagacagctggggcacacctgggacagctggggcatacctcggacacacctgcaacacacctgggacacacctggggatggtcacaccaataggattgtcagcttcatgagggcatggccc

SEQ ID NO: 917252 - DNA, 4001 bp, Homo sapiens
aaaataaaaaaaataagaaaataaaaaataaattagccaggtgtagtggtgtgcacctgtaatcccagctactcaggaggctgaggcaggagaatcacttgaacccaggaggtggaggttgcagtcagctgagatcgcaccactgcactccagcctgggcgacagagtgagactctgtctcaaaaataaataaatcaaaaagaataaatgaaaaggaaaaataaagacacacgttccactggaaacatgtgaacatgcagaggccacagggatgggacatgatgcattcgtgggaagcatataggatattaacttccatctctataaaaaatttaaaaattagccaggagtggtggccacaccagtggtcccagctatgcgggaggctgagaggggaggatggctggagcccaggaggtcaaggctacagtgagtggtgattgtgccactgcactcagagggataccctgtctcaaataaataaataaaagcaaaagttgatcttgtcaccccctgcctggaaaacctttaacagttggcttctctgtgcctggccgtggtcaccacacacctccgaccctccgcccaggtgcagggcccctggtttcatctctgtccttccccaccaggtccctactgctcggtccctggaagcccagctgccattcacatcccccttctcaggaagcccccaggactcccctttgaccccacttctctgagttcctagctccagggcacactcccaccaagccctcaccccaggcagacacttcattcattcactgaacacacagggaagtcgcctggcactgccccaggttctgaggactgagcagtgaatgaaaaatccgttgcagggaggaagggtttttgactccagcaggggctgtgctgggaaaggcagaaatgaggaggtgccctccgcacagggaagcctggggcgccccggaggagggggccctgcagctaaccccgaggcgggcgggcggtcaggccggtgctcaccgcagcagtaggaggcctggggtcgcggaggagcggcaggtcgagcagggccctgtgggtcccgtcacaaggacggagtctcgctctgtcgcccaggctggagtgcaatggcgcaatctcggctcactgcaacctccgcctactgggttcaagcgattctcctgcctcagcctccagagtagctgggactacaggcaggagccaccacgcccggctaattttgtatttttagtagagacggggtttcaccatgttggtcaggctggtctcaaactcctgacctcgtgatccgcccgcctcggcctcccaaagcgctgggattacaggcgtgagccaccgcgcccggcatggatcgagttttgatccatcccgatatggctccctgctgggagggacgggtctccttcgcgtccgacccgccggcccatctcaaagcgggaaaaccggtccctgcggctgccctagctcggagcccgcagcttcgtcccgacctgcccggaaaggttcctccccctccctccgctccgggagcccggactttgcccggcccgtcccagcccaacccacctgcgccctcgggacccacctgcgcccccgggacccacctgtccggctcctggggacgcccccgccctgcagcagccgggaccatttgatcgccctgcgggtgagcgtgaccaggtagctggagaaaaacttctcgtaggcggcgtcgtcgaagtcctcaggccgctcgaatccgtacgggtcgatcctgcaaaaccgagagaaggaggccggcgtccccgaagtttcctctggggggtcgcgggcccgcgcggggaccgcagccgccggggacgcccgcaccccgcgccacacacctggggacccgcgagcgctcggcgggctgcatgcggggagggaggcgcgcaccgagcgaggccagcgggtcccaagttcgcctcccggctccggggcgcttaagtccttccggcgggaccgcgggcgcgtgggggcggggcggggagcggagaggggcggggctggaggcgggggcgggggggggcagggcggggggaggggcggctgggggcggggaggacttggggagagaggaggggcaggagcgggggaggggcaggggagcacccagggcgggggaggggcggggctgggggcgggaggacctggggagagaggaggggcaggagcgggtgaggggcgggggagggccgggggaggggcaggggagcacccagggcgggggaggggcggggctgggggggcgggaggacttggggagagaggagggtgggggcggggcggggcctgctcccggggcttccgaggccgcggcgtcccgcgggcagaatcgggggcgcctcccgcagaacccccgcggcctggacccgggtgagaggagcttcttctgcgattccttcaaacctcagtgcctggccgacccgactctgacacctgactcctatttttattttattttttattttctccgctgcatttcaaggccgagaccaacacacaaatgagaagcccccaggggcgcccgcccgttcctgcccccccaaaccagggaccggggtccccccaccggcgagccaggcctgggagaatccggggcagctctggttccgaacggcttcttctcggtccgcatccaatgacattgtcctgagatttcagctgcttttcgtgtccgggaggccccggaaatttgccagaactgcagattttgaattttgctctggcgacgtggcaaaggggagcccccagacgtgaggcgctggggcgacctcgccctgggtcccccaggggtctggagcgggggctcctccgacaggcctctccccgcctgtaatttaggcccagggcgacctggacaggccccaggaggaggccgtccccggactccagacgcactttcctgtgagaagcagcccggcctcgtctgggtgaggcgaggatcacaggctcagcgtcccctgcgcgtccgtcagggcctttcggaaccaacttgggaccttcccatgggtgtttccggaatgttccatgcgagcgccacccaggagcctggtcagcagcgtgtggaacggaccggtccctaagtgcggactcccgcctctgcctttcacccttctccagcccttgcaagaccggggggcggggtgggggtcagtgcccagcggagcagagcccccgacacggttcctcccgttcctagtctgctggttctgggaactccccaagctttcagcccagctcctcagcactggcctttggtaacacgcggcgtccctcatttgaaagatcacacagcccccactctacggtctgacctccttgggatgtttagacccaagccaggagacagggccatagcctcctgcccctcggcctacgggtgccccacagtccaggactgacaggtgggcgtccgtccccagggtcttcgaaccccgtctgggctcctctctgcctaagtcagtgactccctgaacccctctcgggctctaactgacgcccgaatttcctatatcgcatccctcgcgctttctggagcaacagacacagtcctgctccccacttcccagcacccggggtcctgcgcccaaatcgccccacaccgcgcagcttctgttccaaccccaggcctggaagcctcacggctccccttttccctaattcctgccttctggccatggagatggggttctaacctccctttcccaccactgccgtggaaagcagcgtggcaggcagcacggaccaggggccgccagctcccgagcctgagtgtgatggcgggactgccaccaagtgtatttttgggccagatgtagggagactgtgggggagcaggtcagataagagcggtgccctccaggaagagtggagaggagagatacagagaggccagagccccaggctctgtgcagggtgggcagccagaccgaggcagctagaaaggtctcccgctccagcccaggcctggc

SEQ ID NO: 917253 - DNA, 4001 bp, Homo sapiens
gttggaaacagagcaaatctgtttccccaatatggatactacgggcgaaatttatcatctgtgagaggagccgtggggactgaggacagcaaggccagatcaagggacaaatggactgactgaaggaggaggctccctgaggaggggaagggaaaaggagaaggaaaaaaaaagtgggggttcataaatgtgtgtgttggcgggcgggggccgagtgaataaatgatcacaggaaagaggtggggagggacaaaaagacattttaaaaagagaagcgaacgagcatccaaggccgccgaccttgaccgagagcggaggagagtagagtaagcgaggaagcccaagccagcccagagagggcgggctaggaggcgccggctgccagcaaggcgctgcgccaagcaggcttgcgggcgggggccgcggtgctgcactgcccaggaggactcgagcgcttacagtgttcacagcttggagttggctttggacacgagcgagccctggggcggggacgccatggtccagtctctgccaagctctcagccctgcccaggcccgggacctctgcaaagcagtgccaaatccatgccaggcagtggtttggctgcgggtgcctgggaatcagcgctgagtcccaggactagtctccgaggcgcagggaggtcttggggtgggcgacctagggagacacgcgcctagggagtgaccgtaagatcccggtcgtccttccctgaggaggacggagacatgggcaattcgtcgtcatcctcggagcacttggctgaggagagcgatgcgcacttgcagccttgcggtgcgctcccgccaccaccggcacccccgccgccgccgccacgatggttgctgcccttgccctccttcttgtgcttcactcggcggttctgaaaccagatcttcacctgcttctcggacagattcaggtaggtcgcgatctcgatgcgacgtaggcgggacaggtacatattagaagcgaactcgcgctccagctctagcagctgcgtgctggtgaaagccgtgcgcatcctcttgctgctgggcagctggttagagctgctgtctggaggtggcagagcagagaaggaagcgatcagacctctgtgctgtggacccaatcccttggtaggcggtcgccagaatcctacgactttgacctcttacccatctcttcgccccaacacaatccacagcagagctacagtgagcgctccttgtccagctccgagatcctgattctcccggagtcatgcagccctggaaccccttccccttcatggagagccttggatcccagccctcacttaccccggcccacactccaggacctggacgtctgccctcatccgcctcctggcgttgtgtcccggccctctatcctcactccaccccaagcgccccccttagtccccgacatgaccctcaccgcccccagaaagcccagggtccctcttcctccatctctggctctccatcctgcttcggatcacctctgcccggtccctctgcgcggcggccccgcttacccacagagatgcagtggaactgcctggggtcaggcagcgggtaggaggtctggtagagcgcggcggcagcagcagcggcggccgggccgtgagcgaccccgggcgacacagcagagtgctggcggcccaggggcgcgtggcagtactgcgagccgaagggtgggaaggaagccttgagtagaggcagcgcgggcggcccggggggcccatgcagctgcgaggcggtgacgcagagcgggcacacgcacagcagcccagccttgcgcgcgtggcaggcgccaggcgagagaccgtgcagcgcgtgcggcgggggcacagcgtaggggaagagcggcggcgggctgccctcgggcgccttcttctcgcccgcctcgcgcagcactagcgagtccaccaggaaggagcgcggcatggccccggcgcgcggtcgccccgcagccagcccgccctctgcgcccaccgcacctttcggctctccacgcgctttccctggccgcggtatcccgcagctgcctctgcccaggaggctgaacgcgcggctgagacctaggctgaaacagtagcctctgctgccgtgggcaccgcccaaagagcgcggggtgctggccagcgctagtggtgctgaaaggcgccggcggcgcggcttaaataggactattgccatgtgatggactacgccaggagcggccggggcctctcaatagggtttttgtgccttttctcttggcattcactctgcacgcttcctcattatttcacttgttaactaaatgaactgcataatgtactctattcttgtcaaccccacccacgccgtaacaggcgccctcgccccctcctctcccttttgcgggtttattttctcattctcccgcgatttaatattctttcctttctctttatttcttactcccctttggctttgcattggccatcagcccgttcaccttactgattttgcacccccgcggcctctcttctacagatccccatgggcgcacaccctcatatcctctgtccacttggtcctggtccccttctttctattatcgcccttacaccccaaaagtatgctgtctccagtcagccctgtcagctcagtgccgtgcacccccgaacctccctccagccggtctcagattttccacctgtggaatcgcttctctctctgcgtcggaagaaggaggaccgggttcccgcgtgaaggaggcgtctgtggggagggaggagaagggctcattattccttatccagccctagacccatcgctgtccctcggttttctctaagtttctcaaatagtcttaattttggtgctgcctacgacgcccagtctttgttcggtagatgctggccaaccagccctttccttcaaatgacagggccgtggatgtaaaagaggaaaaacagtctctgagcgttacgaacagagacagggaatggggaatgaaagccgagatggcgcagatctagatctcgcaccccagcacatgtggcgagtgcggactgtctgcccgcgcatcttgcccacaccctgtctactggagcacacttccagcagtgcgctgggaaaccgctgccatctcttagtttggaacggcgcgaagggcggttgtattcctggcatcggctgcctttgcccaccctgacccgcctccgctctccccaagacccggcttcttcttcctgccgcgtcactcttctttctggtcacacaatggttaaacaacttcaaacgctcagagctgtgtacacagctccagctttttaaatcgttctcgggctcaaagctgtttcgcccaggagctttttccatacaatgggaaatcagcataaacatttctaatttacagcccgggacttttcacaggagacgtttactttcgattttattggaaccaaatcgctgcagtcacctgctctgagccctgaatggaattgtgagaaatggagggggaagcttaggggtctggggaagcagtgcgcaggaataagattgcccaaacccgaagcatctgcatgggcttttatccttggcaacatctttgcaataacaacagcaacagattataactgattaaaaagcaaagataatttgttttgcgagataataactgcttctgtaaaagggaataggacaatgggagaagtaacctgcatggagggcatggcatctagcaggagtaagggttcaatgttttcttggttgcttggcatggagtggggggcaaggctgccctctgagacagagtctcagcgccaaggctcccccactctagggtggtgcctgcaaaccagccggaacgcatcaatgcagcctaattcccgttctaattgctctctgggaaatttgagctgggctgggtcgctgagaggaagcgaagagcgagacccgggcggggagaggggctttccgctgggcagaggcaggctggaggggcgcaagggcgggcggggccc

SEQ ID NO: 917254 - DNA, 4001 bp, Homo sapiens
atgactggctgatttttgtatttttagtagagatggggtttcaccatattggccaggctggtctcgaactcttgacctcatgatccacccacctcggcctcccaaagtgctgagattacaggcgtgagccaccatgcccagcccgatcctgtgataattttctaattgtgactctggttaccctcccctctaattcgtactgcacactgccaaacatttttttttttcctgaataaatatctggcatctctacctcactcaaatcctccaaaaagttcgttacttccttgtaaactaaagttagaatatctccgtttcatgatatgacaatctgagtatatggtccccatcttcatctacacagatcttctgctctaggttctctctgttttccacaacacgccatgctgattatatattttgagtcttgcatttctgttccattccccatggtatacactgtgtccacccatccaaatcctgtaagacaaacattgagcatttaccatgctcctaggacaatggcaccatctcaagtcacaccattttttcaagctttttccttcagtccgtaagggcaatctcctccttagtgactctccccccaagtaacatgctgctggagagagaaatgcctatttaatccatccttttaagtcacactgagtttggaaataagtcaaatgagtgccacagactaaggcgagggctgaagaatgagaggtcatgcatttattcatcatctatttgttgagtaattaccatgcgccaaacactattctgggtatgacaggcaaagatcctgttctcatggaatgtgattctgtgtgttggaaagacagaggtaaccaactttgaacatatgaacacaaaatcactctacactgtgaaaagtgctttgaagaatgtaatacacatctgtcgtgttagcaaatgatcacaagggggctgttttaggaaggccgacaagaaagacctcttagatttaattgacgagaactcagccatgtgataaaacagttaaagcattaagaaaccaaaagtccttacattttaagtttcaacgactttcaggatcacattttgaatatgcttaagtattatgaaactcccctaggagaaaacactccccaatatgaaacaataaagcacaaatagtgcttactgtgagctaaccaaaattgctgtcttcacataaaacgtttattgacggccagtttcacgagacccaaatgtgctctaaaagaatactccagtccaatgacctctccttctgtgagtttggggctctctcgcctcttttgagagcttcattaaggaccatcaacctaagagaacacttttaagagtaggcagggaccagtcctactttctggccgagaaaactgtacagaaagtagacattcaactacctcacgcaggctcatggctaaaaccagtttcaccaagggaagatacaaggaattcttcagtctgggataaaatgcaccgtccaaatctggggacaccaagacaagattccaggaaagccgtgagaaagagatctagtccaggcagattcagagtagtaactggctgaaagacactttgcgtccctaaactaattcctcgtctgcaaacagatacaacaatgactcctgcctctcaaaatgtgtgaagctctaacgagatagccgtaaaagaactttaagaggcgcacggagcgggataggctcaagttacttaaactatacttgtgttaggaggagcgcaagtgggagactcgcgaacattaccttgactagccacactcctgtgttctgtttggcgccggtcaagtcgagttccccgcgctcggccatgggtctgcagccggtggaggcgtgcgggatgcagcagcgaccccaggagccgcagggctgaggagcgggcgtccggaacaaaggacaagccgcgctgagaggcgaagagccggcgttccttacctgccagaacactgggaaccgaggaaaagaggaacacgccgccaggagccgggactgcgcctgcgcactgctacgtcagtacggcgcgctgttgcagacaaactttctgtttcggaaatttcttgagtgggcgtggctgtccgcgatgtctgcatctgagggattaaaacgtagggtgggatgagctaaaacgttagcaatgtatttaaagacatggtcagcataactgaagaaaaagattatcagaacggaaaaatggggttcaaagagacgaaaggtgtcagaacatgtccaaccctagccaaggagagagagacaatatttgaaggacagggtcagggtagtaaattggcgtccctggccaacgtcattagcacaaatgggcactgggatcaaacttagtagccttgggtatattgaaaacatgccgtttctagacctggaaaaaaaaaagccgtgtttcagctcagaggctacccgagctgttctgatgaagcaagcggagcacctcagtttccaaaacccggaagtctgtaacgaaacgaacaagtaagagacaaacctgatcgtttcctcccctgcttaaacagttttctctttctcttattgcctctagaataaagttcaatcctcctgcttcaactgggccctctcaatttcatctctttgcacctcccaccatcactccgccatgcaccaaaccacatcaaacccagcagacttccctaaacacgtcagaatcttcgtcggtcatttcagagcctctgcacactggattcccttcccttggaagccctattttacccctgccctcactctcacccctgtgctctggttggcaaactcctacttatggttcaagaccaatgaaaatgtcacttcctatgagatcttttatcaacttccccagaagaaattagtttttcttcacatcacagtgtgatacttagcactctgaactataatatatatgtttacatatctgcctttgctttccagacaatgaactcctcctaggcggaaagagctttattgaggtataattgacaaataaaaaatagtgctttattcattttatatccacaatgtctagcacagtgtttaacacattgtcaggtttcagtaggctttgggtgaaagaacattcgctgaagagaaacaaacagtaaggtattgttaagaatggcaagtaatttattgaatcacacatcagagccttgcacaaaattgaggaaattttatgtgtgttcagcatagggccaggaaaagctgtcagaactctgcttttagctaggaaaactaataggaaagatgggagagaccaggagtgtgttgaagatgaaagtttcaggctaggctcagtggctcaaccctgtaaccctaactttgggagactgaggtgggaggattgtgtctgcccaggagttcaaggctacagtaagtcatgatcgtgccatgcactccagcctgggtgacagagcaaggtcctgtctctaaaaaataaatactaaaaacaaaatttttttggccaggcgcagtggctcacacctgtaatcccaacactttgggagaccgagatgggaagatcacttgaggctaggagttcgagaccagcctggtcaacataggaagaaccctatctctaaaaaaaaaagaaaaacaaaaaaaaatttttttaagcagaaaatgaaggtttcttcttgtgcaacaacttggaaaagggcctttttaaaacatataaagagtaagcagattaagggaactgctctaaactttaatcaaggagaaggaataaattgaaatatgagaccatgggagaagagaagcaaagtctagagcaccccaggaatggactttaaagattggaaccctggctttggtctctgggtcatgggaggccttaaaatgtgtacgtggtgtgggtatgtgtgtatgtgtgtgtacacagagattgagagagaaaaaaaatggctgatgaaagggctagcgaagaacggaaaagtggagattttaaaatgatacatagaagaaagaaaa

SEQ ID NO: 917255 - DNA, 4001 bp, Homo sapiens
tttgtaacccaggagttgggagggggtgactcattttgaacctatagtaaaagccaaacacacaccccaaataaccaaataaccagtttggtgcatcaaactatgaaaagcatactaccaaggcgtccaggagggaggcaccgaggcctccatgagagtactaggagcaaaacaagcaaacaggaacacagtgagctacataccaccaggggcggagccacagaaccttgcacagcggcaggcgtggagtaggctcaataaacatttgtcaaattaatctgcatgagagatctgggacaacaaagatgactccaagtttttcaacctgtattaaggaaactggtagcgccagtatccaaaatacagcacaccggtctaaaaggaaaggcaagctcttacgtggatctactggtaatacagagcccagaatttagaggctagaacgggcaagaggaagggcagaggggcaaagcataaaggatgttatgagtcatgccggtggctatgtaagaccgcaagagggagctgggcggggtggaacatgcagagggcagaagaggatccaacgaaaagggcagacgaggaagaggaaaagaaccagagaaggtctcaaggaagaagcggtcggccttccagtgctggagaggttaaggaatgaggccccggaggacacctggagaaggtggcccataaattagaggaggtgcaaggggcaaaggtatggactgcagcccagtggtttaagaaattaagggctttaagctgaggcagtgtgaagcctagctctgccaaaaactgggaagctgggcagattccttgacctccatgaccctcgttttcctcacttgtgtgtgacatgggctgccacgtcatatcatggtatctgacattctcctgccctcaaaataaaatccaaactcctaatgggcctacttctcagacctcatatggtgatctccgcacccaaacacacccacctgcctcccaccccaagggtcacaggctccctttgtgttctctctacctagcacaaatgtctgcatggctagatccttccttcttacacggctcacacagagaggcctttcctgaccacaacactgcatgtcattcccacctatcctgtggtcggctcgacccaggaacaaaggtccatggcagcagaaaccttgggtttgcctgttttgctcactgctctctccagtgtggagttacgaagaaatgagcacatgctgctttcacgacccctggtacatgtaacccatcttctgtaccagctccaggggccagtgtttggcaggtgtctagtagcggtgggccccctcaaacctcacacttatttgcagattacgggaggcacttggctggccgagactcacgatcaatgactgcttagtaaatcccgagcccctgccatggatatcaaggtcgcagaacgaaggtcctacaacttcctgtctacttcctcagctccttccccaagtcctggatgtcaaagctgaacgcgctgcacagcggggcctgcggccctggccacgactgcagtggctaccccggggccacgcgccatccctaggcccagggttggcagcctcgcccccctcacctcccccgtgtgcttgcacaggtgcgcgtcaagcttccaggctttgctgtaattggcgctgcagtcagggaaggagcagatgaacctcctgggaagcgcggggcgcggcggggtcggagctgagctctcgccggctgcaatgaacgcgtcggcgatggtcaaggacgacaccgactcggcgaccacggccggcggatccagggcgccggcgcctccaagcccagggccaggcgcgctgccacgtgccgagacacgtgccgggaaccggcgcgcccggcccacggctccctgctgaaccttcgcgcgacgccggcacacttccgggagcgcgcgcggtcaccaggcaccgccccgcgtcggcgccgctgctgcgcatgctccgggagatcgcgcatgcgccaggaggccccgccgcggctcgcggcccgtgccctgtcagccctggatgagaggcgggggtttctgcgtcctcggcagaaggctgctgcgtttcacaggcaactcaaatcccgaggcactgcttaaatggggcttgtttcccgtcctccagtacactctggaaagcactagccttacataatttaagttagcctgttgccacattactagtgtgacctgtgtggtttcgtttctttgcgtgctttacgtgcttctgctgcaagccccagttcagaggttcctaagctcagattcacgtggagagctttacaaaatcccgaagcctagaggatacttggaccacttaaatcacaatttctgggggtaggaaacaggcatcagtatttttggaaacttcctaggtgatttcaatgcgcagaaaagtttgggaaccactatcctggcacagtagtgcgcacctgtagtcccaggtacgcgggcgaatcgcttgagcccagagtgagaccccgagctctaaaagaataaatacagatgtctccccatcctacccttccccaccccggcaaactgaccaggtggttggaaaaaaaaaaaaaaaaaaaggaaaagtttgggaacactgccctagagccttgatgacctacttgaaacaaatctccaggtgattcagtgcatatcaaaacctgagaagcacttttgagaggcctgaatgaatatgagtatcttagtttatgaggaccacatgcctaaaaaatgtccttggatacagataactggcaggatgacttgggggatgttcgccagatccatatttttcacatcctgcattattccgaatcattaagcccttgtcggaatgtgatgaacaggtccctgcacagcagtgcagttctggaaacaagccagggcttaacatcagtgcttatgaactgagtattccagttcataaacactcctttgcctcagtctgctcatcttgaaagtgggaaagttgataacgcctgtgtcatcctccgtctcaagataacggggctgtgagagtgtctatgccttgggtccacctgttgctttcttcatttgccactctagcccctgtccatggatgggagaattctacactcatccctcccacaactccggaattctaaaatggtttctcttgcgccagttctggttttctcctccccatgcctcatgcccagggccagggtgcacggtaaatctctgagatcctcctttcttttggcctttcttggccactgaccccatgcagcatagccatactcatggcttccccctgccttcctgacttgtcctgtctccttggacaatcgttcttccacctttttaggttggtgcttagccctgtgcgctgatgtattatagcaggcgagcgctggctttcagcctcaatcccctgacgttgaattccaactctaaatttactaactaggattttggataagggctctttgagtttcttatctttaaactgagactgttaatacccaccagtaagggtcatttttaaaattaaatgaaattctattaaccaatagttgtatttattatgtgccatcccctatgctagacacatttaccaccaatctacagctcttccaacaactctccacgtaaagcagctaataggatccaggtcactctgtatactcaaaaacttttggtcttttttctttgttctttctcaccctgtgatccacagctccacctcctttctctctgcagtttacttcccaatgtgtttttctttctttctttctttcttttttttttgacaaagtcttgctctgttgtccaggttggagtgcagtggtgcaatcttggcaatctcggttcactgcaacctccacttcccgggctcaaatgattctcctgcctcggcctcctgagtagctggaagtacaggtgcgcaccaccacacgtggctaatttttgtatttttagtagagatggggttttaccatgttggccaagc

SEQ ID NO: 917256 - DNA, 4001 bp, Homo sapiens
tacagtattccctatctatccgcccgagtctgctctgaatgagtatctaactggtcacttaaacgattttaaaatctagaacaccattttaaaccaaccaaaccaaaggtcagaaaacatgctgccaattcgtggctttgcactagatagggaataaacaagggcctaagcgagtcgactcttcctaattatgggaccttaaaaaaaaaaaatcaccgtgcaccgaaagtttcaaaaaacaccctctttgcataaaactttgctccaaagagggagcagcagccagctccggtgctcggaacccggttggggggtggcggtgccaccgcgaggcagcctcgtttcctatcggtttggccctgagatgtatttctgttctgactaaacacgtccggtctgaagtttctccgagtaaacaaggatgagggacaaaagccactcctgctcgtggctcggtggccccctcccccaactcgggaagtattttttggagccgtgaaagttggggtgactcctgcgcggggcgagccccccgcccctagaacttcgccggtggccgcgcggccgaggagagaggacgcggcccggctcccaggcccgaggccgccacgtgcgcccggcaggccctgcaggcccgcgccgccgccgcccccattttgtcaggctcggcgcagggagaagccccgctcgaaatgggggctggctccgcccgcggccgccggggccggcgcgcacggaatggccgctgcgcgtcttctccgcctgcgccgccgccgccgcgagggcgagcgcgagcgagaatatggctccttccctttgtgtgtgtgtgtgtgtgtgtgtgtgtatgagagagtgtgtgagtgcgagggtgcgggcgcggcggcggcggcgggcggggtgcgagccgcgctctggcgcacacactcggccattacggccgggggaggggcggggggcgcgcggccgggccctcccctccgcgccgctcccctccccccgccgcggtgggggccgcccgagggcccacccgcccgccactccccgtctccctccgcgcgggccgcgcgccccgccgcccccgcacggagaacgcggggctgtgaaaagagagaggaaaaaaaaagttgcctcggaactgctgcgcccagctcccccgcccgcccgccttgttttctctccagccagcagcgccgggcccgagtcagccatgttccagcgagcgcagcggcgccgctccccccgccgcccggccgccgccgccgccgcgaccgggccgaggccggccgggcccgcactgccgcccccaggcccccgcgccgccctcgcccgccgcggcgccccgcccgccccgccgcccgcccggctggccgcgctccccgccagcgcccggctcgctgcggcggcggccaatgcagcccggggaagcgccgccgctgccctcccgccgccgccgccgagccgcgccggccccgccgccccggccgcgctccgcgcacgccgcccgcccgaacgcccggcccgagggcccaaaacacgttcaaaatttttttaattaaaaaaaaaatttttttttttgcgccagtcagcgcggacgccgccgggggtggaaactcgcggggcgcggggctcccggcgcctcaggctgcctgagggccggggcaccggcgcggggcagcgttcccggcgcccgggcagaggctcgctccgtgcgcagttccccccacggtcccccctcatttgcctttgtgtggatcctgacccgccggctcccggccgcggggatccggccgccgcgcgggctggggagctgccggaggcgctctccccgccgcggcgctgccccagactcaccctcagcgaggcacagagtcgcccagtgcccgtccggctctcacttgccccggtgctgtctctatggagctcaatgtactgcaatggctgtgagagcgggagccagacgcagcctcctcactctctccgctctgtaacattactctccagccagcgcggctcctattggctaccgccaactcacggggctcgctcattggcccgatacctcccattgtcctgaccagagcccgtttgctattggctgtctccggggacacgtcatcaaggattgaaacagcgcgcaaatctgaatgtgtgtgtatgccgggcaaagaggctgaggcgggagaggcagaggcagaggcagcagctgctacgggaaagcagagctctatggtgtatgtgtgcatgtgtctaacccaagccagccccacaccggagcggccgccggagcgaaaagggcctgacttttccacaagtgtctccaactcctcaggcaaaagagacacccacaggtctcccccccccttcttgccccacattcacgcccaaagccgttgagataagaggccccaggcttttaatggcccttcaaaagtgagggcgacactatgggatcatgtcccctgaaaactggggtctctgctggtgctgaggggcggaagccgccgagcctcgagcccctcaaaggtctctgattgcgttacactttaggtctctggaaaggcagggcttctataagaaagtgacatgatccagccagccgggtttaaaataccccttttctgggctcataagccgtcacgtcaggctcgctgagcagctgaaatcttgagtcagtgagcaggcattcagtttcaccctttttcttggtttgatcgagtttcacagcatgtctagaactttttatttaaatacaaagcactgtcttaacttcctggaaatcaaataattattccatgtaattaaagaacagccacttggtttgatatggggtactctagcaggaaatgtttgtgaggccctggtagaattagcaaattcattagagaccacattctaaactgtttggctattttatttgacttggtgtggattactgttacaatcaaacgaatccttgtgatgctatctttccctcccatcacaccacttagtgcatccatgtaactgctctaggattacaggagttgtaggtatatggttacccgaaggattagatgcaggcagagagtgcatgtgcccaaatccacaggctgtggtttctctaactcaccaagctggctggtattaatagacatacttacgtctgtagagaaaatgtgctggctgtagtggccagttctgaagactctacagttatatcagtcctttatgaaactactatctattccttttagcctgagcagaccacgcccctattcagttataacagacttcccttttttttcactctctaatggtattttgtacacttctaaatccaacaaccaattcctccaaatgtaacagatcaaatttggaataaatcacctacatcgtgttaatttgattttttatatcgcttataagcatccataacctaatttatttcctcaaatgtattaaactacttgagagtaagcttagataatctttcctgttttaatgttgatttctttttaaaagaaaatacactatcggactcagggattatagtcttggtgaatggacaatatatcacacatgcacatgaaaaagactataatattaaagaggatataaattggtatactgcacatgcagtgtttaaagataatatatctaaagttaacttttatgttattattttcacacatatttactatcctctgcttccctctactaatcattcaaattttatattttttaaatctagatatttatttcaatactgtcttatcttctcaatgtctcatattacaaaatattcatgagaatgattaagatactttcagtggcatcgatgatattaaaatttgacgattagttgaatatggcactatcaatattttccaggagcagtgttggctttgtactggcacggccatacactttactggttgtctataccagcttgctcctgccagggtgcatttatggccacaggacatcttgagagcaatgggcccacacaaggtttctatttt

SEQ ID NO: 917257 - DNA, 4001 bp, Homo sapiens
cgtggtaacgtacgcttgtagtcccagctattcaggaggctgaggcacaagaatcgcttgaaccagggaggcagaggttgcagcgagccaagatcctgccactgtactccagcctgggccacagagtgagactccatctcaaaaataattagtaataataataacaataaataaagttggccgggcgtggtggctcatgcctgtaatcccagcactttgagaggccaatgcgggccgatcacctgaggtcgggagttggagcctggccaacatggagaaaccccatctctactaaaaatacaaaattagctggggcatgcctgtaatcccagctactcaggaggctgaggcaggagaatcgcttgaacccgggaggcggagattgtggtgacccgagatcgtgccattgcactccagcctgggcaacaagagcaaaactccgtctcaaaaaaagaaaataaagttaatattaaaggtactttaacagaaaggtggtaatcaggggaatgaatctcacatataatctttactacaatgtttcctttcaagactgctttcataccacagaaagcaatctacattacaggaaaattatgtataagtaactccataacactaacataaaattctaaacctaacctcccacctgagtttgtttccactgacagtatctcatcagtacttcaaatgcaacaccttcaaaacgacatttaagacgtcccctttcagactgattttccatttttcacacttctatattaaaatgccccctgacataaacagattttttctgttttccaaaaattataacatacgtaaaaatctttctcaaccccggatctgcattcttctgctaacgttaaggataccataatcctccaaagcagccagttgaaatctttgctatctctgaccaccctaccattatcccatgatgtcacatccccttaattctacctgggcaatttttctcctccattcagctggtccttcccatcttcactgctactaacctgcttcagcactgtacttaactggcttctgagtgttatgcatggaagttacacagtggaattaggctttcataacaataaagtactcggaggataaacagcaaaaccaagtatgctgcaacacgttttctttcctggctaacttcaaccagtggtccttcagatttcatcagacttttcttccagaaaggatatcctgagtcgcccctgcaatggttaggtgtccctatttgctcctccagcaattacttgttggatgaatggtgtactctgtgcttccatacactatctcagcaattacttcactacacagcacttaaattgtctacttgctggaactacacgctccgtgatgacaagactgtcttacttggggtttatgaccagtactggcacgctgtaaagttttccaataatgaactaaagaataaatgaaggaaacagaaatgagactatcacataaatcttgggaagcaaaagctaaaacaacttcgcttttggagcttggataaactgacaggagttgatgacaagacgaatgaggcacagcgacccggcttgtaattggagctctgtcttccacgcacgctatgtttccttgggcaagtcatcttatctttctgggatttttcttttctcagatttaaagcaatagcttctaaaacccagcaggtaataacatcgacaccaggaagttggaggataactgaatgtacagcacggggcacagggatgcccgaggacctgcggagccaaaagtgctgaactgcggtacctgacagttccacgccgagcagcgagtagcaaaattgcagccgctgatgtctccgggcttccaggggacaaagggtggcaggaaagggtgcgaagaggtagaaacgccgagactctaggaaacaccgcggagacataaagccatccaggagagcaactgaacagtgcgccccacgccaaacacatcccccgcgctctcttccgtttctggtctggcgggttcctctccctttgctttccggtgggcaactgaggtgggtaactgtattccggactcgcccgcgggccgggcggagccagctacctccagacgaccccacctaccccgcgattctattcctagaggcggagtcctcgccagtgttcagtaaggttcgctggcctaggaggattccagaccgccgagaccgccgaacaagatagtggagggcgtgatcagttgtgcaaaaactacagatgatcagtctgtttttatgttgttgtttttctgagactgactctccctctgtcgcccaggctggagcgcagtggcgcgatcttagctcactgcaacctccgcctcccgtgttcaaccagttctcctgcctcagtctcctgagtagctaggattacaggcgtgcgccaccacgcccggctattttttttttcttttttgtacttttagtagagacggggtttcagcatgttggccaggctggtctcaaactcctgacctcgtgatccgcccgcctcggcctcccaaagtgctggtattagaggcgtgagccaccgcgtctggtggtttcttcacccacacatctgatgcctcagctggagtaactggaagaaacaggggctagctgaatctctctccacacctttgccccgtgcttttttttttttttttttttttttttttttgagatgaagtctcactctgttgcccaggctgaagcacagtgtcgtgatcttgactcactacaacctctgcctcccaggttcaagctatcctcctgcctcagcctccagattagctggagattagcagcctccagattagcatacgacaccacacctggctactttttgtatttttttagtagagacgggagtttcaccatgttgtccaggctggtctcaaactcctgacctcaggtgatccacctgcctcagcctcccaaagtgtgggattacaggcgtgagacactgcgccagcttgccccatgacttttgtacctggctgggttgcacttcctcacagcatggcatctcagcatatttggacttctttttattattattattattttttttttttagtctctctctctctccaggctggagtacagtggcgcaatctcagcttactccaacctccacctcctgagttcaagcaattctcctgcctcagcttcccgagtagctagaactacaggcatgcaccaccacgcccagctaatttttgtatttttagtagagatggggtttcaccacattggccaggatgatcttgatctcttgacctcgtgatcggcctgcctcggcctcccaaagtgctgggattacagacgtgagccactgggcctggcctatatttggacttcttacagagcagctggcttgccttagagtgaacattcacaccagactaaagctgcacagcattgaaagtcacatgacatcactttcatttcattctattggtgcaaaatgggtcacagggccagtccagattcaaagtgaaggaaccacacttccctgaaagtaccagcagcagtggccactgggggacgattttcagagagttgctaccacatcctagaaaactttgaattagttaattccattcatttcatcagtattttctttaaaaaactgttttaaattatttttaaattttttgtgggtacatagtaggtgtatatagttatggaatacatgagatgttttgatataggcatgcaatgcgtattaatcacatcatggagaatggagtactcaagcatttatcctttgaattacaaacaattcaattacattctttaagttatttaaaaatatacaattgttattgactacagtcaccctattgcgcaattaaaataggtcttattctttctatattttttgtacccactaaccatccccacctcccctccaactccccactacccttctcagcctctggtaactatccttctactctctatgaccaggagttcaatagttttgatt

SEQ ID NO: 917258 - DNA, 4001 bp, Homo sapiens
agggaggaaggaaagtatctgaagaattgccagagtaaaaaatctcataatgaaattttgctcattcttggagaaatgaagtagaattagatgcttcagtggtggtgaattccagaatctgggtagcttccagtaaatgaagcttttctataacgtcaaatgcaaaagctatctgggatatcaacataatcagcttgagcttttaaattcctatttcctcataccaaattgtttgaaacctttaagataaaaacttcaatgaactagtgttccaagcttttaatattttcgtcctttagcaagcatgtcagattaatcttcaaattgcaatgggcagaaaggaccttcaaccaaattattaagcccatgtctctctcaaagcatgttaataatgtaagcagtttcattggctattaagatttttaactttcttaattctccactgtattactgttttttaaggctgggaggcaggggatcaagaatgtcattccatcctgaaaacaagggatgttatgttatctttatactcacttaacacctagcacactgtcaggcaccctgtaggcatttaacatacttttggaataagttgatgtaatggcctaggaagagcatggaaatctttctgaggacaggtgagtccaaatcctggcactgctgggcaacaaagaccatctccagaattagagttatctatcgcggtagaacaggaatttgcacgtgtgtcttcaaagtggcatcaagaggattgactgtttcctgagctgccatccaaaagccacttagggagggattatactcgtctccagcttcaccacgcctggaaaactcgtgccttgcctctctactcccccttccttttcctgggtttgggtttacactcccaaaacttaagttcacaattctacaaggctggtctaacccagaccgcgatccgctccccatttcagggcgtttttccagcgtccactgggagggaggccaggccgtgctaggcaacaggcaggatccacacggtggctccgcacatcttagagggtgaaggcagaggggtggcgggaagcggtgggggctgggggaagaacgagttcaggacctaggcactatccggaggtttctcatccctccccaaagccacggcgccaaccgctgaagacgccaggaaaccatcggcaggggcagggagcgcggggtcgctctgggtcaggactgaggaagagggatggggggtgggggggaagaacagagacccagcgggcgacagtacctggtgtggctgtggttgcggggacagtccttcttctccatgatggccggcacgcagttggtgagctccgtccagtcggcgtgcagcccgcagctccagccggtggagaagcgggagaagagccacgtctccttcttgccaggccggtggcaggtgcacttcttctgacccgctttgcagctacaaggctgctccagccggatgttcttcaccaggtgccggccgaaagtggtgccccccgtcttctggatgtggaggaacacgatcacgtcgcgccctttgatgttgaaatccacgaagcgggtcaggtccttcaggctgaagttgaagcgcggcacgaatcggggcagggagccgttttccggggcctcggggtccggctcgtcttcctcctcctcttcctccccctcccgggggtctccgggctcctcgtcctcctcctccggcgccgcggccccccgaggtccctcggggggcccccggggcggcgggggcaactggggccgccgctcccactcctccggcggcgcctgagcccggcgggcgggacccgggacggcgggcgggccggcctcccccgcgcggggctgctccccgaagttggtgcaggagctggtgcaggagggggacacgtactggtacatgatgaccacgaagaggagagtgagcaccggcgtcagcagccacttgttgaacctttcatccatggtcccgctctcaggccggcaggcgaagcggcggcggcggcggcggcagggcggacgggcgcccgctcggaagtttcgcggactccggggcgcggctcggagcccgccgttcctccatgcccctgacgccgaggcgtgtggctggctggcggccccgcggccctcggggcttgaggagccggggcctgcgagccgggcgggggaggcgggcgccggcgcgctcggctgcggctgcggcgtggggcgccctgcgctcccgggtgcgcccgggccggcccgctccctgctcccgccccggcgcggctctctcaggcgacgcgcggcatcccgccggcggcttgcaggcgctcaggcgctggggagcggggttcgggtcctggacctgccgcgcgcagccgggcagccgggtagctgcggccgcgagcgccggggctgcatgaggctcgccagggcgccggccaagggcgaaggcgcggcccgctcccgccgccccggccggccgcgggcaccgcgcccggcacgcgcgcccggcgcctttgccggcaggtcgcggggctgtggagccgcgagggctgacggcgctcgccgcaagtttgcagagcggcccccgcagcgcagcggcagcgggcgaggcgcctctgcggagacgcctctcccggcgagtcgcactgccgctccgggctgtccgcccaggcgcaggcacgcagacacactcgcacacacaggctggcaccgccacaacccgccagccggtgtgacaggagccctgctacccgcagcaaaaacctgccctaggtacggagcatgcgccaaagcctcccccagccccggaggagtttccaggggaggagtccgctgctccgcggggctcggaggaggcagctgggggtgggaatcccttcggccgggagcaaggagagatttggcagaaaggcaaaggtggggcgagaggaggccccgaggtaagcgtcgctggcgttgatctgacaccttaaaatgggcagcttctctgtctggtagtggccggccttattttcaggaataacacctgcacactcccgggaacactcactagaccagactttacacgggttggcagttcccttctcagcaggggaacgtggctccagactgctgtgaatttctacccaagacattctaactggtgttcgagttttatggtggtcctcccttaataacaaacttggtgcgtccaactatacaactgtattcaaccagcatcaattaaccattaagcgcctaactgtgtatcaggctctatgttcaatacacactttctttcagcactagacagtccagccctcaaccatgcagtacttagaacataaaaaggagtttagggatcacctcctaaaaaaatcattctactaatagacgttgaactcctaaatgttcaagatttattccttcccaacaatggtggaagataacacttaagcttgcctatatttcataagccctaatttgtatgcagatgttttttggaaactttatttttcaaacatctagatgttgcatttagtattaccccagaactaaatctttgctcaataacaacttctgtttttcagatagtgaaaagatatacgatcaaattgttgtaactgccctaccacagtccctagacctgctcgacctattttccgagtggagagtggcaatgtgttaaaggcaatgtgtgaggacaatgcagtgtgattccctggcccagaccaatgtgtccctcccagctacactaccgtattccacaggtgtgctataatatttcatagcagcccaccgtcccatctggcctttttatgaatccatgcacttgtttcttcctgagacactctgtcgatgtcatctatttatcagggtgtcccctctgcagccatcagtgaagatccagggctctttcagggatgctaaagtttgcccataggatactattttccttgtttagacaggtggaattcttctcaataaaacttccctcctctatttcctttcccgttttcaac

SEQ ID NO: 917259 - DNA, 4001 bp, Homo sapiens
tatagtttaacaaacatattaaggggaactccaatactgccctcagttcacatttttcagggccatacctgttgtctttgatttcacacagtagtccctgtataacacaattttttttcccactctcttctctgaaaagcttttctttgttttattggatcaaccagaacaaagtataaactgtatctaggcatgaaagcctgaaatactgttttctttcttactaaactccaattaaaaaaaccttaaccaaaacacaaacttagatctgcaggggtagacgtacaggttgctcagaacagtcttcctaacgttactaacattgccaaatattttgcctcagattttccactcaactttcataaacgttctcagcacccaaataattgtattaccccagtcattcattctacctttaggttcaatgttttcattttgcacttttcatcctgagcttgggacatttgaaaaaaattaataggtacagtattttccttgagatgaaatcatttgttttcatcaatgcacatgcagatatgtttgtatatattctcgtccgaaaatatcccttcacgaaacttgctttttaaaatgttgccctttgcccaccctatgctcctatagaatatttagttcagtgacgacatccatcctcttttggcgtcctagcacaaaagtatgcaatttttattctcttttaaataaactgtgcaaaattaattttaaaaatacggtttacaattcctcatgaatggcaaagagcaaaaaaaaagacgtttacatctttcgacaatgatcccgggcattaaggccaacaatgttagcaacgaagagactgggtaaaaagaggtgggctaatctttcataggactgcttccgtggtcgctaacaacaatccgcctgctcactggacaagcagcgacacaagctctggaagcttccagttcatttcgagattcacaatgcggaagaaaaaggccggcagccccgctccgcggtgcgcaaagatatgcgcgaagggaggaggacaagctggaggcggctcagccagctcagagaggccgggtggggatacgggggcggccgcggaaggcgcaggctgcagcctgccaagaaaagggagcgaagttgcgggctttgccgcagcccgacccccagtaggttttgaaaacccccaataggaagcccgcacaaggtgacgacccttagagtctcgactctgggactcctctcacccccgtgaatccctgagacaatcccttctccaatttgtgatggcaagccccccatccctcctctggccgggtcgctggtccctagttccacggaggggtgcgccgctgcccaaacgcctccgtttgccgcggtgatccgtacagccagcccgcgatcttgggtccccacactaagggcccagaacctcctcccatccaccctcgcagactcccacttacggggtgcaccggtcgctgaactcattggcgatggtctcgatgcccccggcccgggctaccgcgatgtagcagctctgcgagcccacgtccaaccccaccaccgacatggccggctcgcggtccgcctccgcctcgggtctcggtctgcgtcctccggccccctgcctgcttctcctgccgccgctttctgccctggccgcgttctgctccggcccgcggggtctggccgttcctctgacactcagaaggacacacagacagccgcggcctgtcaggagcctcctactcccccggggacagcggcggctggctgataagaaaccctgggagaaagcggggctcagcctccgcaggtcgctccgcacctcgggttgcctgcctcactctgccgcggctcgcacaccggcgccggcgctgaactaccgacccaaaaggggaggtcccacttcctcagccttatgtatcgcactgatcagaactttccagaatctgcggcatttactcaccggcgcctccaccggcccctccacgtgccacttccgcttccttcttctcgagccttctggaaagattctacccaatgggcagccggtccccggagaacggccgccgttgccatggcagcgacagggccgctcccgtgccattggctcaaacctgcctccgcccactcccgccctagccacaggcgttttgctgccctaataaaacaggcaacgaagaatgactccaaaactcggaatagtcacaatttactaccgggaggtggtgtccgatccttaacgctaaagggaggctgggcgggcggagacagaccccatttttgcagagaccccagacaccgggatggtggggaggccggccagctgtccggagagcatgttgggaatcgtagtcccgctgggagaagtgtgcgccttgcatgctgggatgtgtagtcctggccgcagtgcttgctgggacccggctttgtcttctgggactcgcgagagaggctgggtagggttttgtctggcgcttttgcgcgggttccctggcaataagcgtcattttgttcgtttgttttgtattcacttctattattgtctggattaccccgacaactggtgcgttacgacttaggagaaggaacaccagttcaaaccgcttataataaaagcaaaggggttgtgttaagtgttcttgtattcatcaggcagcaggatgatctcttgtggagtaaaatgtcaggtgtttttttttttaagaaatcgatttttagttgtgacgtcatttggcaggctgtccacggtatcactttctgcttatttttaaaaggtctgatttaagccgacgctgttctaccctgccactcctagccataaattggtactgtgtgtaagttttgctttttgtttgatctgaagcagcttttgtttctttccctcagaagcgatgtccccgttaacttttgttcagtaaagagacagtgtaagaaaaggtggaactgtgttgctgataacttatcaggtcttttatacccttttgtgtctttttaagtttgcttctgatccctgagtttaccttatgtcaggcatgtggaagtataagcacagttcaaatatgttattggataagcgtgtaattgaataaggagttgtaacctaaagttagaaaaatctaactcataaagagtatgggaattcctccttgtctatcaaaacaagttggttaagtcagaggcaagacgaaaggcccaggtttacattacatgtaaattgtatgtgcttttgctagttttcctgccacttaggtggcttacttaacatgcttcagttaactcacctttaaaatgggagcaataatagttatcacggggttgttgtgttcttacatttggacatatagttagctgtaactataagttatttttgttatgcatcccaaaaacttggtttctgtccccaccccccgcccaccaactttttcttacatatcaaaaccttataataaaatccatggagacatagcaattttgaacagaaagaacctttgagattatttggtctgcttcccacattttaactgccgtacgaagaggagacatgaacagttctcagtctttggagccagacagatttgggtcaggttcaaatccttggcactctactaagatgttttatataaagtacagcttgtaagggcaccaggcctcctggagtcagacatcatgggcttgaatcctagctattcttatttgtgagctgtgtgatgttgcgataattactaagcctttctgtattccatctcatggtgtttatgtaatgatggaaactatatgtaaagcactaaacatatataaacataaacatataaagtctgtcatctttgtcaaattcctctttgccctctgtttcctcgactgtaaaatggaagtaatacctatttttgctaggattttggaaggattagatataaataaaacatggtatggtggtatttgataaattgtagtaatagaagtaatatcattcagtgaaagtcagtacaaactttaatcttgtactg

SEQ ID NO: 917260 - DNA, 4001 bp, Homo sapiens
gttctcagcacccaaataattgtattaccccagtcattcattctacctttaggttcaatgttttcattttgcacttttcatcctgagcttgggacatttgaaaaaaattaataggtacagtattttccttgagatgaaatcatttgttttcatcaatgcacatgcagatatgtttgtatatattctcgtccgaaaatatcccttcacgaaacttgctttttaaaatgttgccctttgcccaccctatgctcctatagaatatttagttcagtgacgacatccatcctcttttggcgtcctagcacaaaagtatgcaatttttattctcttttaaataaactgtgcaaaattaattttaaaaatacggtttacaattcctcatgaatggcaaagagcaaaaaaaaagacgtttacatctttcgacaatgatcccgggcattaaggccaacaatgttagcaacgaagagactgggtaaaaagaggtgggctaatctttcataggactgcttccgtggtcgctaacaacaatccgcctgctcactggacaagcagcgacacaagctctggaagcttccagttcatttcgagattcacaatgcggaagaaaaaggccggcagccccgctccgcggtgcgcaaagatatgcgcgaagggaggaggacaagctggaggcggctcagccagctcagagaggccgggtggggatacgggggcggccgcggaaggcgcaggctgcagcctgccaagaaaagggagcgaagttgcgggctttgccgcagcccgacccccagtaggttttgaaaacccccaataggaagcccgcacaaggtgacgacccttagagtctcgactctgggactcctctcacccccgtgaatccctgagacaatcccttctccaatttgtgatggcaagccccccatccctcctctggccgggtcgctggtccctagttccacggaggggtgcgccgctgcccaaacgcctccgtttgccgcggtgatccgtacagccagcccgcgatcttgggtccccacactaagggcccagaacctcctcccatccaccctcgcagactcccacttacggggtgcaccggtcgctgaactcattggcgatggtctcgatgcccccggcccgggctaccgcgatgtagcagctctgcgagcccacgtccaaccccaccaccgacatggccggctcgcggtccgcctccgcctcgggtctcggtctgcgtcctccggccccctgcctgcttctcctgccgccgctttctgccctggccgcgttctgctccggcccgcggggtctggccgttcctctgacactcagaaggacacacagacagccgcggcctgtcaggagcctcctactcccccggggacagcggcggctggctgataagaaaccctgggagaaagcggggctcagcctccgcaggtcgctccgcacctcgggttgcctgcctcactctgccgcggctcgcacaccggcgccggcgctgaactaccgacccaaaaggggaggtcccacttcctcagccttatgtatcgcactgatcagaactttccagaatctgcggcatttactcaccggcgcctccaccggcccctccacgtgccacttccgcttccttcttctcgagccttctggaaagattctacccaatgggcagccggtccccggagaacggccgccgttgccatggcagcgacagggccgctcccgtgccattggctcaaacctgcctccgcccactcccgccctagccacaggcgttttgctgccctaataaaacaggcaacgaagaatgactccaaaactcggaatagtcacaatttactaccgggaggtggtgtccgatccttaacgctaaagggaggctgggcgggcggagacagaccccatttttgcagagaccccagacaccgggatggtggggaggccggccagctgtccggagagcatgttgggaatcgtagtcccgctgggagaagtgtgcgccttgcatgctgggatgtgtagtcctggccgcagtgcttgctgggacccggctttgtcttctgggactcgcgagagaggctgggtagggttttgtctggcgcttttgcgcgggttccctggcaataagcgtcattttgttcgtttgttttgtattcacttctattattgtctggattaccccgacaactggtgcgttacgacttaggagaaggaacaccagttcaaaccgcttataataaaagcaaaggggttgtgttaagtgttcttgtattcatcaggcagcaggatgatctcttgtggagtaaaatgtcaggtgtttttttttttaagaaatcgatttttagttgtgacgtcatttggcaggctgtccacggtatcactttctgcttatttttaaaaggtctgatttaagccgacgctgttctaccctgccactcctagccataaattggtactgtgtgtaagttttgctttttgtttgatctgaagcagcttttgtttctttccctcagaagcgatgtccccgttaacttttgttcagtaaagagacagtgtaagaaaaggtggaactgtgttgctgataacttatcaggtcttttatacccttttgtgtctttttaagtttgcttctgatccctgagtttaccttatgtcaggcatgtggaagtataagcacagttcaaatatgttattggataagcgtgtaattgaataaggagttgtaacctaaagttagaaaaatctaactcataaagagtatgggaattcctccttgtctatcaaaacaagttggttaagtcagaggcaagacgaaaggcccaggtttacattacatgtaaattgtatgtgcttttgctagttttcctgccacttaggtggcttacttaacatgcttcagttaactcacctttaaaatgggagcaataatagttatcacggggttgttgtgttcttacatttggacatatagttagctgtaactataagttatttttgttatgcatcccaaaaacttggtttctgtccccaccccccgcccaccaactttttcttacatatcaaaaccttataataaaatccatggagacatagcaattttgaacagaaagaacctttgagattatttggtctgcttcccacattttaactgccgtacgaagaggagacatgaacagttctcagtctttggagccagacagatttgggtcaggttcaaatccttggcactctactaagatgttttatataaagtacagcttgtaagggcaccaggcctcctggagtcagacatcatgggcttgaatcctagctattcttatttgtgagctgtgtgatgttgcgataattactaagcctttctgtattccatctcatggtgtttatgtaatgatggaaactatatgtaaagcactaaacatatataaacataaacatataaagtctgtcatctttgtcaaattcctctttgccctctgtttcctcgactgtaaaatggaagtaatacctatttttgctaggattttggaaggattagatataaataaaacatggtatggtggtatttgataaattgtagtaatagaagtaatatcattcagtgaaagtcagtacaaactttaatcttgtactgctgtggatgtgttgtgtagtcatggtgtagcccccttttatttaatcgatttgccttaattattcagcacaacaggtaagtgataagaggttgtaaaatctaccatatttattatctaattgaaattcttagctgggccaggcatggcggctcacatctgtaatcccagcactttgggaggccaaggcaggaggatcacctgagcccaggagtttgaggctgcagtgaactatgatcactccactgcactgcagcctgggcaacagaacaagagtctgtctctaaaaataaaaaaataattcctagctaggtgcagtggctcatgcctctagtaccagctacatgggaggctgaggcatgtgggttg

SEQ ID NO: 917261 - DNA, 4001 bp, Homo sapiens
taaaactgttctgtcctgaaggctggaatattggttgggaatataaagaagcaaaaatcaagtagattcagaatgatgggtaagttattggtttatgactgtatggggtaatttataaaaatttctacattaaatgtacatgttttgaagcacaaaactctccaatgatcatttttacacaggatgtacgcgttttgaagcacaaaactctccagtgatcacaggtcatagactgtctgatttttatgtgaaatcccattttaagagtaaaatataagtaacatagtaggctctagtctataaacaaagacttctatttatagtttgtttgccccctgagccccatctcatctgctggtggcatgcacatgctctttattaccagtgcgaatatagctgggaaactaatgccactcaccatacaggatggttaacatggacacgggcatgacaaggaaacccagcagcatatcagctatggcaagtgacatcaggaaatagttggtggcattctgcagctttttctctagggacactgccatgatgacgagtatgtttccagcaatagttagaataatcactacggctgtcagtaaagcagaccagtttttttcctggagatgaagtaaggagagacacgacggtgagaggcacccttcacaggaaaggttggttcgattttcagagtcgactgtccagttaaatgcatcagaagtgttagcttctccggagttaaagtcattactgtagagcctggtgtcatcatttaattgcattagggagttcgtagttgagctcaaagaagtattttcttcacaaagaatatccatgtctaagccagaacttgtagcagatgaggtgtagaaggactaacaggttatagtttctgctcaccattcaccttgatgtacccacactctgtaacactgaggctggtgtacatgctgttctcccggggctggatttttgtcttccattattacaatgatagttaaagaactgaactgtggtggctgtaagttttcttcattcacaattttaggagagtccactgtttggttttattattttctcaccaaaccgaggacaaaaaagcagaatgaacttttagcatagaggttgcagggttttttttgagcgctcgggaagataaatgtcctggacaaagaagaaaagttttataactactgggactcttgtttaactatatctcattttgttggttatgccgatggtactagtttagcaacagtattattaaaatagcatgcaatcagaaacagtggggatgtacacattctacattaagaaagtcaattaaaaatacatccagtgttaatcccatagtaattggatgtactttgggttacagttctcagccattcttaagctgaattgccacagctgctgtcaggaatttcagctcctataatgttgcttagctaataaaaggaaaacaaaaaagtcttaagtaaagattagcagacaactttcctccctggaaattctcattgaaatgattacatgttggccaagcatgatttcaaaccggaaagaaaattacacagcaataaaatatagcggcatgagaacttacatttgtcttcagggtccacacatgagatacatttgttattctgtgactcgctgcatctctcacagtaattaaactggtgtagagtcccctcttcttgatcttccaccagcataatatgatagtaatttggtttctgttttgctgacttcaaaaactgcatgcaagagctgagccagctcccgcactgctaggatcctgttggcttcctctggcacggctcggctgggttcctccctccctgtgcggctcgcctcagcaggcacacatttagaaatcattcacgagcccctcaaagtcgcacaaaagaactgcatgggaaagtaggaagagctgtctgcaccaagggactcctggtttccacgggaatggagtagctctctgactgtctcgttcatttcatcagacctccctctatgtgtatgtcataagctgcaaggtagcaacagccaggagggcggaccaaacaggctttttcttctccctctttttgctacatattaatattgggaagttttcctttgcttttgagagaaactggagaaatggccttttgtgcagattcccattaaggtaggtaagtggcactgtggtaattttttaggctgaagggtgaagagagaacataaataaggctagaaaacagtatgtcctcggagtgctgtgagtgtccggcacttccatccaaagccaacagtgtttgtgtccagagtggaattactgacattggccacataggctcagggtggctaggcacgtctgtggtgataactctgataaactattagcactatttttatttaatagatacaccattgaactggcttattttcttcagcagaaatatgccacccagatattattcaaaacctcacatgtggtaggaaataagttggtttcgcagtaccaatttttttcccccaccagtaatgacaacttgccttacttgtaaagaaagccctttcccaagtaggtttctaaaggaggcagttcgatctctctctttttgcaggcatgaaaatattttcctcaatagttgggttttgctacagttctatcaccttctgttcttcacattctccctggacaaattcaaccactctcatgccttcaatatgtttgtggccaagtctgtaccttcatagctgattatttctctcagttccagacctaaatctctagctgcccattggctccttccatggtagcctgggagaccttgacctcagcatcttccctcactccgcatccccctgcccggctctcagtgcttgttcctacccattggcttgcatgatggaatcaccacctcttcagacagctgctgttatccgcgactcttccttcattctcgctgccagatcccacttcgtctccggtgctacctctgtatgcgtgtttctcacatgtcctctcctgcagcctgcagctggcaccctgtggtcgagatctagccacctatttcctgggtgggtgccttagtgcccccctcactgccatgcctgccaccctcctacccctccacgttaaatatgcacgctggcgagcaggcagcggagaacacagaccttagagttccttggttttggatcctagctctatcactcataaacagtagaacctcgcctcatctagttgctccctttaaagctcagtcttctcacttgtaaaatgggataataccttcctcataagattgtagtgaagctaaactgagataatgtgtgtaagtatttggcccatgtctggcttataggaggttctcaagtaatgtcagccactttcattcctattgatattcttactgatattaatgacacaattggcatcactcccatgcctacactcctgcagtcccttccttgtggggcacataacacttttcttcatctacctgtaccctgcttgccccactttgcaggcctggactctggttactctcccagtcagcctgtatgcagactgaacttacatgtttctgaccatttttatgtctctgtacttgtacttccctgtgcccggagtgctcttaccattccttttttgtgtgtgtccatctggcaaattcgtgcttagttccagagcagctctggatcccaggcctaccactcaccacatctgtaagcgtgattaagctacctaatctctgtgttttagtctcctcatccgcaagtagggaacattaataataaaaagacctcaggattgacgtgaaagccaaataaatttacatatttgcctggcacattttaagcactcaataaaggttagttgctattattcttactaagtttactgttcctaagctttctgtagccctccttcccagtggaggcaaagactatagcaccttctgcagccttctatttttaacacatcatgtctcatgtaagcctcataaaggcag

SEQ ID NO: 917262 - DNA, 4001 bp, Homo sapiens
cacccacatagaaatggcattccaaaatagcttcaaaaggttattaaaagggccaggcgtcgtggctcacgcttgtaatcccaacactctgggaggccgaggcgggcggatcacgaggtcaggagatcgagaccatcctggctaacacggtgaaaccccgtctctactaaaaatacaaaaaattagctgggcatggtggcgggcgcctgtagtcccagctactcgggaggctgaggcaggagaatggcatgaacccgggaggcggagcttgcagtaaaccgagattgccgccactgcactccagcctgggcaacagagcgtgcgactccgtctcaaaaagaaaaaaaaaggtattaaaagtcactggtaaaagatatataaaatatttttaattaaaagctttagctcagataatactaaaccagtggttcttaaacccaagtgatgctgaggctactggtctggggaccactttgagaaccactattctgaaccataatttctgattatgaaccctatttaagtcagcttagttgacacataagttatagaaggaagcaacttttagaatgagaaatcctttctgctaggttgtaaccagatttttaaaaggtttgacttgagactttagttgaatagacatcttgtggaacatacaaatattaaaagatgtggaaagtgaggccaggaaagttgaagggaatcaagcatggctaatagctatgggtggcagaacaactgttgttatacaacccagggtttctggattctccaggcaatttccaaagcagcttatacatgtaacaaacttttccatgttgaaataatctggggatgatgccacctatgtttaatataaatcaaatgctggcaaaaccttttttttttttaagtgaaaggtatgttttttaatactcttctactgactatggacagtctacttcaagcttttccaaccccggcccgcacgtggcacaggacggctttgaatgtggcccaacacaaattcgtaaactttctggaagcattatgagattcttttttgcgattttttttaaagctcatcggctaccttagtgtttgtgaatttcatgtgtggcccaagacaattcttcttccgatgtggcccagggaagccaaagattggacacccttggtctacttccaagaagcctactgcagtttctcgaaaaaaaaaaaacaaacaaaaaaaactcacaaccagaaaatcggactagtaaaagtgtaattttaggcttagaaagaatcttgggacaacagtacttcacgtttttggaatgtttccatctttgtgaggctaagtaccgctttctgcattgttgtgtacttttatcttcattcctgattcaactttcatcaggcaatttgaagtgcttcacctaacaagaaaattaaagagcgatgtgcaccatctctgctgtgcgattccagagctggcgcagtaatctaactgggttttaagtttccccgtcaggcgtgactgggacttgggacatcgccaagcggtcagcgacgcccgtcccagttcagaggagcaagaaaagcctgtgagctggggacaccgatgtgagaaacaacgcccgcgtttctgagtagacaactcgggagcctgaggaagaaaagcaggggcaggccgagtccatctggggccccgcctcagaccgccccggggccgacaggggcgggcaggagacgggcgaagaggccctcggcgggatgcgccacacaggacgccgcaggggcacggctgccaggggccctgaggcactaggccccagcgcccttctcctacctcacgctgagggaagcgggcgacagttattcgggcccagggacgacgcagcggttggccaaagcgcgacgccgagccgttgccaagcgcggaatccaaggaagccgctcccacagtcctccgcgcgggggcgggcggggccggaagcgcgggggcgggagagagcgcggcgggaagggggtggtgcgggaggcctggggaagtgggtgggggcggagaacggcgggtcagagagaaggcagcccggtccccctcagtggaagggagtggcggtgggcggagggtgttgaggggacggtgccagcggcttgcgggaagccgggcgatgcgggtagaacggtggaggagagggcagggaggccggggcctcccgtggaacggaaccggggggttgggaggctgggggcggcctgtgtgaagggggcggggagggaaaggctcgcggccagtagatgcaggagggaggagggcctagaggggctccgggctggcggcctctgtgaggaaggggaaggatatggaaccaagatcctttaaatcctgatgaactcatccgtaaagcagatgcccaaaggatgatagtaagcttactgtgacataactcccggagccgcagcacgagccttgtgaaccttggaagcccgttttccgcgcagtcactaactcgcttagtcaccctgtgtaaaagttattctgggatgacacctgcctgggaagtctcacctttccccccacctcctcctgtctgcgtattgttctgtagcaccccgtgcgcaccttgattgtagcgcttaaggtgtccgttttatttactagacagggattgaaccattgtgtcccaaccacctagaacctgggtcatagtgtaaagcttaatcaatgtaatataaatgggggaattaaattcataattgtttaatgtttaagttttgtcttaaattttaaaagtaaatgttggggatggaggggagggacagagggagtctaaagacaccagtaattaatgagtttttataaaataagtagtgttggccgggcgcagtggctcatgcctataatcccagcactttgggaggctgaggctggcggatcacctgaggtgaggagttggagaccagcctggccaacgtggtgaaaccctgtctctactaaaaatacaaaaattagcccggcgaggtggcaggcgcctgtaataaatcccagctactcaggaggctaaggcaggagaatctcttgaacccaggaggtagaggttgcagtgagccaagatggtggtattgcactccagcctgggtgacaagagcgaaactccatccaaaaaaagaaaaaacatagtgttgggggacaattctccatgggtcacctgcactttcccgtgttttgtgagcagagacactgactgcctttgttctggagtactatgatagctggtattttttaagatgtgattaacagttaaattagacttgagtaaagcagttggtcctccacaaggtgggttggcctcatcccgtcaagggaaggtcataagagaaaagactaaggtcctctgaggaagaaggaatcctgcccccagactgccttcagctctttcctgggtctctaacttgacctacaaattttaggcttgccagcattataaataaagttttggtgccgcaaaagaaatagcactcaactataaaattttcttttttccttctcagcaaggcaatttacttctatagaagggtgcgccctcacagatggagcaatggtgagcacacacctggacaagggaggcgaaggggtttttattcctgacgcttgtggcacctgctgctgtgtccttcccctgttggctaaggttagacggcacaggctaaactaattctgattgactaatttaaagagagtgaccgggtaagtggtttggtgggaaaaatagttatggcagagcaggaaatcggaatgagtcagggtggagaatgagtcagggcagagcaggtaatcagaatgagtcagggtggagcaggtagttgaaaaagattgctttacgaggaagttaagctttttttgttttgttttgttttttttaattgagacagagtctcgctctatagcctagactggagtgcagtggcggcatctcggctcactgcaagctctgcctcctgggtttgctccattctcctgcctaagcctcccg

SEQ ID NO: 917263 - DNA, 4001 bp, Homo sapiens
acctcgcctacgcccccccacccccaccgcccccgctcgccttgtggctctccccattttccaagcgctttgttcccgcttgctatcagctgtcccttccctcagcactgcctttgtaggcgacttgctctcctccatcaagactcagctctttcacgaagcctttcttgacctctgtggccctgggaggccttgccccctagggcagctcctcctgctccagctagagggaagacggtcacaggtgcctgctgaggacactgcggcaccctgcctacacgcccccaacttctccagccttccccttctgcaggctgtccctttcttctgaaatgacctctgttccaagaccaaaatactctcgaaactgttcatgtcacttcatgcactgcctgatggtgtggtttctttcccaattatccccactccttccttaggctattaaactagaggggctcagagggcgcttcccagggctccactccagcagcctctggaccacaggggcactcaggaaatatgtggatagtaccgcgcaccccccagcagcacctccccgggccccctgtgcagagtacggtccacatcactgtgtccacatcacggaagggtccccagctagtgccttgcggacccatccaacctggaggagatgaggtgttcaagagatacgtgttgcataggaaatactggagggtaaagagaggaagcaggactccttcaagggaggtggtgggggtgggccttcgcagtttaggaattgccccccagtgctccaactgccccgccccaccccgcctcatcgcagcgcccctcgcaccccaccccaccctaccgtaccctaccctgtctcgccccgcaccaccccacccctacctgctccgcctcgccccgcgtgccacgccccctccgcgtcgccccgccccaaccacctccccttccccgccccaccctccccgcctgcccggcctcggcccggccccacccactctccccgcccagccctgccctccccacctgccgggccccgccaggacgcgcccgcggctcacctgtaggcccagggcgacacgctgcgcaggttggtgggcggccggaagcggcggtcggcgggcctgccccctgccgggcagctcgcgttgcgcgcctgctcacgcggccccagctgcagcgtgtggtggaaggcactgagcacgccggccgccaggcgcccgtacagctgctccagtagctcctccggccggtccgcgcagccccgcggccgcgcggggcgcctgcccgccctcggggcgcccgcggcccagctcggcggcagcgccagcaggaagccggctaccagcatccagacctgagggacaggccacgctcagcgtccgcacgcgccggaggagcccgcctgcgccccgcgcccgtgtcccgcccgcggcgcccggagccggcgggcgcctcccctcgccccgcggagccagaggccggcccggaggatgggagccgcgcgggcgggccccagagcgccctccccgcctgcccgccgcccgcggggtccccggggcccagcccggcgccggcccgcgcgcccccggcccccgccgccgccgccgccccgagccgggggccgcacggggggcgggtgcggggcgcgcgtgcacgtgtgcgtgtgcctgccgggttgctgcgccgcgggctgcgagtgcttgtgacccgccgcaccctcacccccgggcgcgccatccctgctccgccgccagcgagggagccccggagcctaagacgcccggacccgccgcctcgcagacccacccttgcccctgcgcctcgtcatccgcccgccccagccagcccgcgcagggtccgcggcccgcttttccgcgagaagccccctgtggtctttcctcgtacccggggactcggaccgagaagccgactgagcgaggtcgccgcccggcctcacggacacagagcgactctgcacctttcgcctccaggagctgaaaacattttgtcacttgtgcagtgtactcaccagtgcccccaacatcttctcccccgaaagcgctttcagattcgcgccgagatggggcgacgcggcggctcttgagcggaataacccgaagggccacgcaaactggggcttccagccgcgagcatgcggcggggcgcccagggcctggggtcgcgcgctcagggcctgtgctgcgccacgcaggaggaggagagggctggccctgccgggcgcgggtgcgggcccgactggctgaaggaggagtggggactggcttggaagtctccgaagcagaaaagtggggccgacaggatggaattgggggaggccgattttggctcagagagatttctctattaaggaaagcagtccaagaataggccccctggaagaggaatgcgctcaaacccagagggattctccttagagctacctcttgagattctgtacttcgaggaaattagaggtttttttaaatctctatttttaataaggtgggaggaggctgttgctcctttctcctcaacaacatgaaatgatcctgtgcctctatccaacaactctacaacaaagcactgaatacttccctgactggcactttcatggctgttcatgggcatctcttggtctatgacgacgatgttggagagttcctactccgtgataactcagttctaagtgcaagcagtcacgtgaaatgagcctgatagtctgcgaatgaagaaactaaaacgaactatattatatacttcataacacaagacaacgtgctcgtttgttcattctgcaagtaaatgcttaatgcttcctaggtggcaggctaaagaatatgatcattttaaagcagtcatgctttgaaaataaacaacccatcccagctgtaagctttttgaaagtgtacaaaatatgtaattgatgactccctaaatggtttgcagctttggtatttgactgaattgtaaaccattagttaaactacatttcagttatgctttgtaggaaaaacactttcctatgcattgaatgttctataactaaggagcttagtaatctactgctaaaaatctcactgaaatctccagtttaagcgatttaagcaatttacagctcttggcaaatatttgttttgggttataaaacactttttttctgactagtaaattgttcatgttctttgtttccagtaaaatgggaataaaggtttcagtactcaaatactgcttattttttattggaaaaaaggaagcgtgggaggcttttaagagagtatcattatgagggtttcatagaaatactcagtctgtctcatttcagcatccattcctatatgaggtgacatggtaccagacttagttctgtatgttattcaacaaagtattttccactgtctggtaacatggcagcttctctcttcctcaccacccccccggattaccttggaagtgggaaggaaaatatttactttccagcagttttcattttgtgaaagatcacaaatgactgaaaatgctcacctatttggcagaacaaatttgatatttgtgagactaatcagttgagagtcataaataggtgcaaatgtttatgagttcccctcaaatttcaacatatttgtgaagatgcaaaataagcatgttagtaagttcaaacctaagacatacaagtgaaaaaaagggaacaacatactcaaaagcaggctcatcgtgttcccttaaaaccaacatatctgtaatgtggccacgcaagcttcatttgaagcctctccagtccctcatcccctggtttactcagcacacccaataccagcacagctgcaagactgcttagcatggggcaagctgttggggaaaatcttttaaatcatccttaggcaccgtaactccaaaagccggtgtgtggttggctccttccatactaataatcttgggttactgatgttcgtatctacccaaacctctttctcttccttaaagagctgtccttgaggccgggcatggtg

SEQ ID NO: 917264 - DNA, 4001 bp, Homo sapiens
acctaacactagagtaaacataagaactcaggccaacgctgaagcttctctaaatggtaatattttccagagtatattctcaaactaaagacagctttgaagactcctagaggaacaatgcaggctgcctgccaccaggaggaaagccctagtctcatatagtaattaattataaaaataaatagctgtgttcaacgtatccaagtaataccaatttattcaacttatttatcataatgttaaaatatgtgtaccatttatttttaaatggatttagggttacaaaatggtatcacttcttttcatcagtaatcaaagttctaaagacaatattgtcatttcacagaaaactgtatcatataaatttaaaatttaataacacagaagttattttacatcacaagcaagcttccatccaggtgaagcctaatttgtgggcaagagaaacagatatcccatcgcaaaattaccaagaagtatttctgttacctaatatttctttgatactccaagcaaagtattttatcaacaaagccactaagtacaaatatttataaacaggaacaacaccactgctaaataggaagccatccttccagacactctgctttttcaatgccagcaactcagcttcagacactactgccttttttccaaacatattccacaccaacattaccatggaaagcagcagcacatgcaatttacagattaaatggggttgtagcaacatttaaattggtttgtccaattattttaaatgtattttaattttacatacgggttgcactgaagttctttatgaagcgaacttcccagggggtgggtgggtatttttatgataatgtttgaaaaataattcaagcaacctcaaacaccattttaaatcgacaaactaattataatccaagtttatgaattaacatacaactgatgcctactaagcaaaagacgtttgacttcctacagagtaggtctgtggaagtctttcagaactacgcggcagagctcagcatttacaccgaagtccaaggagctgtgacccttgcgacagattcgctcgcttctcggcgctcccagctgcgccgctccagtactcccgggggggcaggactgtgatctttcctgaagccaaaaagttcatcaccctaggtgaacatgaagcaagcagcaagccaggctctccccagcaacgacaggaggacaaagtggctccatgaactttgctgtctggacagctggaaccctgcaccccgccccgcgctacttttttctatcgtcgaacgatcaaagtggtctcagcccctgccttccttccgtccggagccccagggtcaccccacggggcccgtccggcccgaggacagcaccttccagaaaagtttctgcgccgagggtccccctcgtggacgcagccccagtcactcacgtttccacggccacgcgcggccccaccctcgggtcagcagagatgcggcctgaaactgtctccgagccggccccgcgggtcgcgggaggcggtccgaactgcagccccggccccgagcccacaggcccgggatcactgctactgctataaatccgcgcccgaaagtggccgggctgagcggggagaggggccggggcgacacccgccaggcctccagccaatggggaggaggccagcgggagactcgccccgcaccccgagagccgccgcctatgggaatcgccgatttggagggcggaggccaggaggagaaccaaccacaccgcagggcggaagagcacggcccgccccagcagcgagaagaaccaatccaaggctggaggccgagcgacccgaagacgttcaaatcaactcgtccaccctccaccccgctcctccccgaaaaagaaaaaagaagacagcggaaacacagacccataccagttattgcgctaggcccgccttcatccgcctcagcgaccaatcgttccgcaggggaatgataaggacattccacgaaggacatcacagccaactactggggggctgaggcgggacgttccataatatgctaatgaagttcctataaaattcgctgcgaagctacgtctcggatagaacgcgcaggggcgccttcccggcagaggcgtctagtactttcggggatagcggtcaatttttttttttgcccccacccaactcttccgtttccctactgcgcagccttgtaaacattagtaaactccgagtggtgatccacattcaaaacagagcccccaaagccttgactgacctcgcaggaaagtttccccaacagccaacaattcccggcggacacgaactcgccacctctctctgacacccggggcggccaggtctgcagagaacgacgcacaggtcctctcacctgccacagtcctctccaagccagcgatctgcccgcgcccccccgagcgcagcgcagatgggcgccttccccgcctccgctcctccccttcccttcccttccctacggcacacagagaaaagccctcgtcctccgcaaactacaaccggcggcgtcgcccctcgcagtcggcccctactcggtgtccagctccaagtgagggccggagggggctgggcgggggcggccgacctaccccgagcggagtactacccggtactttatgtaacactcagattcgggactgagtggggggcgacgaagaagggccagaggaacggcgttgcccgggaccgaggcaccgggtccgcgggaaccccggcccacagccgccctcctcctgcagccccgtctcggcgccctatagccccaggcgccggcacatccctccatctcgcgccgtaatctgcaccccctcctagaggacgcggcttggacccgccgccccctcccccgcagcacccgcctcatcacttcactacaaagagcgctttggtcgcgcagccttgcagcgagacctctcgcgcctccttcctcctccgtgtcccgggctttgcacacaaggaccttggcgaatcaaaggcgctccagaccttttgttcctgcccctgccgagggccgccgctgcggagccggccgcttcctccggtccacggcaggaccggcccggctccgcggcgcgcccggacccgccgggaaggaggcggccgcccccgcccatccatcacccggccgtaccttggtatttcgcgtcgatctcccgcatcagcgagacatttctctgcaagtcgaaaggcagggactcgatggagtccaggtagtcctccacatagttcaccaggtggagctgctccccgttggcaggactcaacatggttcaccccggaggtccccggcgactcggcgcggctttccgcttcctccaccccccgcccccctcaaaaaatagcactgcaaaatgcaaagccctcgctctcccggcgcccccccgccggctcctgcttcggcccggcggctacatctgccgagcccgtccgccgcctccgggtccgcggggaccccagcgcctgagggcgcgggccgcggtggcggtggctcccgggcgcacgccccggccggcggcgcaggccccctctcaggcggcggggctggcgccgggggccgcgcgtacgagcgcgcacacaccggcgggagagggcccagcgccgcggccgccgctgcccactcgcccactgggctgggtagaagagaggagcggagcgggcagcgggaaggggcgcgctccgctggccgccgagccgcacttgtccaacgtggaaaacccaaataccagtttcaaacacttgggaaacattcagccccgctgcgcagcgcgcatgcgccccggccccctcccccggcaacggccccgccccccgccgcattcacgcccctcaccgtcccaggccctgggggctgcgggctccaggccggccctcgcgggggcgtggccttgcctgtcactttttccagaggcgagggtcgcggaggggacagcgtcagggccgctggggtgtggacggcgggcgaggcgcaaactttactagg

SEQ ID NO: 917265 - DNA, 4001 bp, Homo sapiens
cctaatttgtgggcaagagaaacagatatcccatcgcaaaattaccaagaagtatttctgttacctaatatttctttgatactccaagcaaagtattttatcaacaaagccactaagtacaaatatttataaacaggaacaacaccactgctaaataggaagccatccttccagacactctgctttttcaatgccagcaactcagcttcagacactactgccttttttccaaacatattccacaccaacattaccatggaaagcagcagcacatgcaatttacagattaaatggggttgtagcaacatttaaattggtttgtccaattattttaaatgtattttaattttacatacgggttgcactgaagttctttatgaagcgaacttcccagggggtgggtgggtatttttatgataatgtttgaaaaataattcaagcaacctcaaacaccattttaaatcgacaaactaattataatccaagtttatgaattaacatacaactgatgcctactaagcaaaagacgtttgacttcctacagagtaggtctgtggaagtctttcagaactacgcggcagagctcagcatttacaccgaagtccaaggagctgtgacccttgcgacagattcgctcgcttctcggcgctcccagctgcgccgctccagtactcccgggggggcaggactgtgatctttcctgaagccaaaaagttcatcaccctaggtgaacatgaagcaagcagcaagccaggctctccccagcaacgacaggaggacaaagtggctccatgaactttgctgtctggacagctggaaccctgcaccccgccccgcgctacttttttctatcgtcgaacgatcaaagtggtctcagcccctgccttccttccgtccggagccccagggtcaccccacggggcccgtccggcccgaggacagcaccttccagaaaagtttctgcgccgagggtccccctcgtggacgcagccccagtcactcacgtttccacggccacgcgcggccccaccctcgggtcagcagagatgcggcctgaaactgtctccgagccggccccgcgggtcgcgggaggcggtccgaactgcagccccggccccgagcccacaggcccgggatcactgctactgctataaatccgcgcccgaaagtggccgggctgagcggggagaggggccggggcgacacccgccaggcctccagccaatggggaggaggccagcgggagactcgccccgcaccccgagagccgccgcctatgggaatcgccgatttggagggcggaggccaggaggagaaccaaccacaccgcagggcggaagagcacggcccgccccagcagcgagaagaaccaatccaaggctggaggccgagcgacccgaagacgttcaaatcaactcgtccaccctccaccccgctcctccccgaaaaagaaaaaagaagacagcggaaacacagacccataccagttattgcgctaggcccgccttcatccgcctcagcgaccaatcgttccgcaggggaatgataaggacattccacgaaggacatcacagccaactactggggggctgaggcgggacgttccataatatgctaatgaagttcctataaaattcgctgcgaagctacgtctcggatagaacgcgcaggggcgccttcccggcagaggcgtctagtactttcggggatagcggtcaatttttttttttgcccccacccaactcttccgtttccctactgcgcagccttgtaaacattagtaaactccgagtggtgatccacattcaaaacagagcccccaaagccttgactgacctcgcaggaaagtttccccaacagccaacaattcccggcggacacgaactcgccacctctctctgacacccggggcggccaggtctgcagagaacgacgcacaggtcctctcacctgccacagtcctctccaagccagcgatctgcccgcgcccccccgagcgcagcgcagatgggcgccttccccgcctccgctcctccccttcccttcccttccctacggcacacagagaaaagccctcgtcctccgcaaactacaaccggcggcgtcgcccctcgcagtcggcccctactcggtgtccagctccaagtgagggccggagggggctgggcgggggcggccgacctaccccgagcggagtactacccggtactttatgtaacactcagattcgggactgagtggggggcgacgaagaagggccagaggaacggcgttgcccgggaccgaggcaccgggtccgcgggaaccccggcccacagccgccctcctcctgcagccccgtctcggcgccctatagccccaggcgccggcacatccctccatctcgcgccgtaatctgcaccccctcctagaggacgcggcttggacccgccgccccctcccccgcagcacccgcctcatcacttcactacaaagagcgctttggtcgcgcagccttgcagcgagacctctcgcgcctccttcctcctccgtgtcccgggctttgcacacaaggaccttggcgaatcaaaggcgctccagaccttttgttcctgcccctgccgagggccgccgctgcggagccggccgcttcctccggtccacggcaggaccggcccggctccgcggcgcgcccggacccgccgggaaggaggcggccgcccccgcccatccatcacccggccgtaccttggtatttcgcgtcgatctcccgcatcagcgagacatttctctgcaagtcgaaaggcagggactcgatggagtccaggtagtcctccacatagttcaccaggtggagctgctccccgttggcaggactcaacatggttcaccccggaggtccccggcgactcggcgcggctttccgcttcctccaccccccgcccccctcaaaaaatagcactgcaaaatgcaaagccctcgctctcccggcgcccccccgccggctcctgcttcggcccggcggctacatctgccgagcccgtccgccgcctccgggtccgcggggaccccagcgcctgagggcgcgggccgcggtggcggtggctcccgggcgcacgccccggccggcggcgcaggccccctctcaggcggcggggctggcgccgggggccgcgcgtacgagcgcgcacacaccggcgggagagggcccagcgccgcggccgccgctgcccactcgcccactgggctgggtagaagagaggagcggagcgggcagcgggaaggggcgcgctccgctggccgccgagccgcacttgtccaacgtggaaaacccaaataccagtttcaaacacttgggaaacattcagccccgctgcgcagcgcgcatgcgccccggccccctcccccggcaacggccccgccccccgccgcattcacgcccctcaccgtcccaggccctgggggctgcgggctccaggccggccctcgcgggggcgtggccttgcctgtcactttttccagaggcgagggtcgcggaggggacagcgtcagggccgctggggtgtggacggcgggcgaggcgcaaactttactaggagtttttggcacttggaggcagagcctgttgggcggcacagcacgcccgctgggaaacgcaggggagcggcctgcttcgctgaaaacccgaccaggacctaacgggccgcgggacagaaacctccgagaccatggtacacagcaactaccgcaactcgctcctcagcccctgactcttcgtccccgccccacagagcagtataagtagggcccgaaacagaactggcaaccgcagtagccaatctacttgccaacatcactttgacagcccaatcacgatgaagaggaggcggggagaccgtgagtaatgccccccggactcttactactagaaacccaagtcctccgggaggcggaaggaaggggagggccgggcacgggcggaagtggcggcgcatgcgcactggcaccctctcggtgtcctt

SEQ ID NO: 917266 - DNA, 4001 bp, Homo sapiens
cgtaatctgcaccccctcctagaggacgcggcttggacccgccgccccctcccccgcagcacccgcctcatcacttcactacaaagagcgctttggtcgcgcagccttgcagcgagacctctcgcgcctccttcctcctccgtgtcccgggctttgcacacaaggaccttggcgaatcaaaggcgctccagaccttttgttcctgcccctgccgagggccgccgctgcggagccggccgcttcctccggtccacggcaggaccggcccggctccgcggcgcgcccggacccgccgggaaggaggcggccgcccccgcccatccatcacccggccgtaccttggtatttcgcgtcgatctcccgcatcagcgagacatttctctgcaagtcgaaaggcagggactcgatggagtccaggtagtcctccacatagttcaccaggtggagctgctccccgttggcaggactcaacatggttcaccccggaggtccccggcgactcggcgcggctttccgcttcctccaccccccgcccccctcaaaaaatagcactgcaaaatgcaaagccctcgctctcccggcgcccccccgccggctcctgcttcggcccggcggctacatctgccgagcccgtccgccgcctccgggtccgcggggaccccagcgcctgagggcgcgggccgcggtggcggtggctcccgggcgcacgccccggccggcggcgcaggccccctctcaggcggcggggctggcgccgggggccgcgcgtacgagcgcgcacacaccggcgggagagggcccagcgccgcggccgccgctgcccactcgcccactgggctgggtagaagagaggagcggagcgggcagcgggaaggggcgcgctccgctggccgccgagccgcacttgtccaacgtggaaaacccaaataccagtttcaaacacttgggaaacattcagccccgctgcgcagcgcgcatgcgccccggccccctcccccggcaacggccccgccccccgccgcattcacgcccctcaccgtcccaggccctgggggctgcgggctccaggccggccctcgcgggggcgtggccttgcctgtcactttttccagaggcgagggtcgcggaggggacagcgtcagggccgctggggtgtggacggcgggcgaggcgcaaactttactaggagtttttggcacttggaggcagagcctgttgggcggcacagcacgcccgctgggaaacgcaggggagcggcctgcttcgctgaaaacccgaccaggacctaacgggccgcgggacagaaacctccgagaccatggtacacagcaactaccgcaactcgctcctcagcccctgactcttcgtccccgccccacagagcagtataagtagggcccgaaacagaactggcaaccgcagtagccaatctacttgccaacatcactttgacagcccaatcacgatgaagaggaggcggggagaccgtgagtaatgccccccggactcttactactagaaacccaagtcctccgggaggcggaaggaaggggagggccgggcacgggcggaagtggcggcgcatgcgcactggcaccctctcggtgtcctttgagctgcggccgcagagtgcgcgggagacctacccattccgcggccggaccaccactcccagcagcctaggcggctcccgcgcctgcgccatccgtcaccgccctccctttgtgtcgtctcccggtactcagtttggaacggcttggagacaaaggggcctgagagggaagctgcttcctagtgccgagccccagaagaggtggataggcccgaggggcgccttccctaggccttatctcttcccgccctgtgtcatggacaccgttctcggaggccgctccccacacttggaaaggccgcccacagtatgcagacacccggtcggccggcgtcctgaggccattcagctccccggaccgccctcccccgcgtcgcccctctaccctcccaaagctcccggattttgggctttctgagaagcctggacgccacgcgagcccgttgcctaggcgaccggccccgcgcgccggcccccccccttccggccaaagggcccgcccctcctgggcgtggcctcgtgcctttgtgcacttcccgcctggctctctggttccggggcggcctcggcttcggcctccgccccgctgcggccgccgcgggtcccctccggggtggccccgagagctgtgttcgccacgcttggctgcctgcttttctctgattttcttccgccttggaccctgctctatttgcattgtctttttttcagcaagtcggagaacggtgccttgtcagttttcacctttctcactggactttctcttttccggagagccgggttggtggtgctgcctgtgtattccacgaactaagccctgtccccagcccttgcagtgtttctgtatcaactccacgccagcgcggttctccatttttcttagcctcttaattaggacagggtcggatttcagcttttatccaccgggtttatcctgttgcaaagcagagtacacagttttagacacaaaataattgcagttgaaatggatacacattctggtggtaagatttggaaacgtggtatttgatggaaccctgttgtaacatctaaaactctttggattttttaaaaacgtattctgtgtaatccagtaaaaatttggattcgtccagtatttatagagtagattattaaccgcagtggtgctcattccagggccctgccgggtattttgtgctatggatgtgagtacggcaaagagactgaattaagctgttttgtatttggaatcggattgttcacgttgcaacgttgctgcaatgataaatggatggatactctttacactttgaagtggatttaatcttcacttttaagccccttcatctcacctacacagcaggagagctttggctttgatatttggggaaatggctgttattttacttacagatcacgctattctagtcttggcctagttaaaagcaaatgagtactttagtttctacaagatttattggccactacttggtctgcacaaaagactataacacttggccggacgcggtggctcacgcctgtaatcctaccactttgggaggccgaggcgggcgaattgcctgagatcaggagttcgggaccagcttgggcaacatggtgaaaccctgtctctactaaaaatacaaaaaattagcagggcatggtggcgcgtgcctgtagtcccagctattggggaggctgagacagaatcacttgaacctaggaggggaggttgcagtgagccgagattgtgccactgcactccagcctgggcgacagagcaagactatctccggaaaaaaagagaaaaaaagactacgacaagataacattatgtggaaacaaacattatgtcgaatacagagtatagagggagtacaaagttgaataaggaaaattacgcctttccctcaaaaagcatataagtaatttaaaagtacaatagtaagaaatagaccggttcttctattcctagcattcattggctctagaatgaatagtgtttatctgaactcaagaataaaattggaagtaatttaccctttacaaagataagatggagtttaacctaggttttctttttaaaaaaaaaaatcacaacacagtacaatctgagtaatgattttgttcctctagttatgtactctcttcacatacacataaaccaaaaaggcatcttaagcattcaacaaggaatattgacgagtgtctaccatgtgccaactactggtccgtgcgctggggatacagtagtgaaaagttttttggagctttacattccataaaacttttagcccaccccttgggataaaaagtcaaaaaagattttatcttttttggaacaaacttagaagatcaagcaataaaacataattacctttgataacgaattttaaatgtcattgaa

SEQ ID NO: 917267 - DNA, 4001 bp, Homo sapiens
gtttccctactgcgcagccttgtaaacattagtaaactccgagtggtgatccacattcaaaacagagcccccaaagccttgactgacctcgcaggaaagtttccccaacagccaacaattcccggcggacacgaactcgccacctctctctgacacccggggcggccaggtctgcagagaacgacgcacaggtcctctcacctgccacagtcctctccaagccagcgatctgcccgcgcccccccgagcgcagcgcagatgggcgccttccccgcctccgctcctccccttcccttcccttccctacggcacacagagaaaagccctcgtcctccgcaaactacaaccggcggcgtcgcccctcgcagtcggcccctactcggtgtccagctccaagtgagggccggagggggctgggcgggggcggccgacctaccccgagcggagtactacccggtactttatgtaacactcagattcgggactgagtggggggcgacgaagaagggccagaggaacggcgttgcccgggaccgaggcaccgggtccgcgggaaccccggcccacagccgccctcctcctgcagccccgtctcggcgccctatagccccaggcgccggcacatccctccatctcgcgccgtaatctgcaccccctcctagaggacgcggcttggacccgccgccccctcccccgcagcacccgcctcatcacttcactacaaagagcgctttggtcgcgcagccttgcagcgagacctctcgcgcctccttcctcctccgtgtcccgggctttgcacacaaggaccttggcgaatcaaaggcgctccagaccttttgttcctgcccctgccgagggccgccgctgcggagccggccgcttcctccggtccacggcaggaccggcccggctccgcggcgcgcccggacccgccgggaaggaggcggccgcccccgcccatccatcacccggccgtaccttggtatttcgcgtcgatctcccgcatcagcgagacatttctctgcaagtcgaaaggcagggactcgatggagtccaggtagtcctccacatagttcaccaggtggagctgctccccgttggcaggactcaacatggttcaccccggaggtccccggcgactcggcgcggctttccgcttcctccaccccccgcccccctcaaaaaatagcactgcaaaatgcaaagccctcgctctcccggcgcccccccgccggctcctgcttcggcccggcggctacatctgccgagcccgtccgccgcctccgggtccgcggggaccccagcgcctgagggcgcgggccgcggtggcggtggctcccgggcgcacgccccggccggcggcgcaggccccctctcaggcggcggggctggcgccgggggccgcgcgtacgagcgcgcacacaccggcgggagagggcccagcgccgcggccgccgctgcccactcgcccactgggctgggtagaagagaggagcggagcgggcagcgggaaggggcgcgctccgctggccgccgagccgcacttgtccaacgtggaaaacccaaataccagtttcaaacacttgggaaacattcagccccgctgcgcagcgcgcatgcgccccggccccctcccccggcaacggccccgccccccgccgcattcacgcccctcaccgtcccaggccctgggggctgcgggctccaggccggccctcgcgggggcgtggccttgcctgtcactttttccagaggcgagggtcgcggaggggacagcgtcagggccgctggggtgtggacggcgggcgaggcgcaaactttactaggagtttttggcacttggaggcagagcctgttgggcggcacagcacgcccgctgggaaacgcaggggagcggcctgcttcgctgaaaacccgaccaggacctaacgggccgcgggacagaaacctccgagaccatggtacacagcaactaccgcaactcgctcctcagcccctgactcttcgtccccgccccacagagcagtataagtagggcccgaaacagaactggcaaccgcagtagccaatctacttgccaacatcactttgacagcccaatcacgatgaagaggaggcggggagaccgtgagtaatgccccccggactcttactactagaaacccaagtcctccgggaggcggaaggaaggggagggccgggcacgggcggaagtggcggcgcatgcgcactggcaccctctcggtgtcctttgagctgcggccgcagagtgcgcgggagacctacccattccgcggccggaccaccactcccagcagcctaggcggctcccgcgcctgcgccatccgtcaccgccctccctttgtgtcgtctcccggtactcagtttggaacggcttggagacaaaggggcctgagagggaagctgcttcctagtgccgagccccagaagaggtggataggcccgaggggcgccttccctaggccttatctcttcccgccctgtgtcatggacaccgttctcggaggccgctccccacacttggaaaggccgcccacagtatgcagacacccggtcggccggcgtcctgaggccattcagctccccggaccgccctcccccgcgtcgcccctctaccctcccaaagctcccggattttgggctttctgagaagcctggacgccacgcgagcccgttgcctaggcgaccggccccgcgcgccggcccccccccttccggccaaagggcccgcccctcctgggcgtggcctcgtgcctttgtgcacttcccgcctggctctctggttccggggcggcctcggcttcggcctccgccccgctgcggccgccgcgggtcccctccggggtggccccgagagctgtgttcgccacgcttggctgcctgcttttctctgattttcttccgccttggaccctgctctatttgcattgtctttttttcagcaagtcggagaacggtgccttgtcagttttcacctttctcactggactttctcttttccggagagccgggttggtggtgctgcctgtgtattccacgaactaagccctgtccccagcccttgcagtgtttctgtatcaactccacgccagcgcggttctccatttttcttagcctcttaattaggacagggtcggatttcagcttttatccaccgggtttatcctgttgcaaagcagagtacacagttttagacacaaaataattgcagttgaaatggatacacattctggtggtaagatttggaaacgtggtatttgatggaaccctgttgtaacatctaaaactctttggattttttaaaaacgtattctgtgtaatccagtaaaaatttggattcgtccagtatttatagagtagattattaaccgcagtggtgctcattccagggccctgccgggtattttgtgctatggatgtgagtacggcaaagagactgaattaagctgttttgtatttggaatcggattgttcacgttgcaacgttgctgcaatgataaatggatggatactctttacactttgaagtggatttaatcttcacttttaagccccttcatctcacctacacagcaggagagctttggctttgatatttggggaaatggctgttattttacttacagatcacgctattctagtcttggcctagttaaaagcaaatgagtactttagtttctacaagatttattggccactacttggtctgcacaaaagactataacacttggccggacgcggtggctcacgcctgtaatcctaccactttgggaggccgaggcgggcgaattgcctgagatcaggagttcgggaccagcttgggcaacatggtgaaaccctgtctctactaaaaatacaaaaaattagcagggcatggtggcgcgtgcctgtagtcccagctattggggaggctgagacagaatcacttgaacctaggaggggaggttgcagtgagccgagattgtgccactgcactccag

SEQ ID NO: 917268 - DNA, 4001 bp, Homo sapiens
ttcataaacgttgcatggttttctttccatccagcctgaaaagaaaaatgtaagatttttttttttcattttttaaagccatgtacacagagccgttataatctgacgttcaccaagtagcagcttcacttttggttggtttggcttggttaacgtgttaatactgtaccgctgctgaggaaactctcttccaaaggtggcccaggaataacccagcttcctctctaggttttggtagttaactgccttaatactttataacttcactgacaaatttactacctaatctaatacccaaaatttgggtatgtgaaggtactagtggaagcagatgggagccggacttaggaagttaacctgcagctgtcccaccggccctcttaggacgaatctgacaagaccaatcctggcagccccgcatctggcttccgggccggccgggccgattcccctttaatgcaaaccggggctgtgcgcggccgggcccggctgtcactccggctaacttgaataaatatcccccacagttcattgctgccgctcacgccgcggaggggaaatgtcggccatgttgatagcagcgccgccgccgccgccgccgccgccgctgccgggccgggccgggaggggacggcggtggccccgcgactccgcgccgcgctaggacgctgccgagcgggggagggggtgggagcccgcagggaagagacctcagcggctgggagcgcagcgggtgggggaggggagcataatgaagggtgaatgggggggcggggagggcgagcgaggaaggaacagggaagggaagggaggaaagggggagggcgagggctgttaccttgatagcatagggcggctcttcgaaagtgaccagcatatacctgtctcctctgctggcagggtcccgggcacggagctgcgggacgggaggaggaacagggcgggcgacagggaagcacagaggcgaggttacgaggcggagaaggggcgcccagcggccccgccgcccccacagtaccgcacacgcagcggccacccctccacgccgtcccccacacacagatcgctccccacacaccgcccggggccggagcccgggccccggccgaacccggctcgcagcgcccgcccgcccgcgcggtgggggagggggtccccgagcccggcagctcccgcagtcaggtccccgacacccccgccccggccgccctcccccaccctgccgcccgcgggccgccgggccggggtcgccgcccgggctcggtcagtcggtaccttcatgaaggtctctaccgcgcctttggccgtgtccaggtaggtggtgcccagatggctgcgctggttcatagaggcagacgtgtctatcaggaacagtaagatgggcatagtgctggccggggacaccggggcccgaggtggtggagaaagaggagatggtagaggtggaggcgccggtggcggcgaccgccgctacgcggggcgggggagcacggcccccgggaggaaaacactgtctgggtctttcctccggctgcggggagtttctcccccgatagttgagaggaaactccccagacccagtgctccccgtcgtacccccgcctccgcctcctcctgcctgcctgcccgctggggcgggcgcccagccgtctgtctgtcggttcgtcccccccgcctcgggggtcccgtccccgctcccggcccctgtgtgtgtcccagcgggagacgggcctggctccccaccccacccccggtacaggagtggggacctgggagctggcgaagaggggagtgggctgagggaagattggccctggggctgttgggagaagtttcagggactccctccgcaccccggcggtgtcaccactttctcagcccctctcgctactgaagcgcttttctctctcacactccggttttaactcgggcaggggctgcggaggctccgcccctgacacgtccccgagccacgtgatacaccgcctcgccgttctactggtcaggccctatcctttcattagcatatttaaacagctcaggggcgggggaagcttgtaggccggctccggggacagttattgagcacgcgcagaggcggggcgtcgggtgcgcgcgagcgggcgggcgggccgacccggaggcgggcttcgggaaggggcggggccggactgcggaaggaccgcgaggtgggggcgggggccgcgtccgcgcgcgcggggcggccgcggcggtgagcctgcgcgtcagggccgccggcctctccttggctgttggaggtgataggggtcgaggggagggaaaaaggggctggcgtcagccgcccctgtgaggtggccgtagcgtggacgagtaagaagggttgagtaaagtggacaaacacctggttaggagaagagggcaggcccgcagccgccctccggaggaggactcggggcctcgcgggcgccggaggaggttcctgggcctcggagggccgccccggcgcgccgccccggcgcgagcgggcgcgggcgggggaggggaagtgagaggttgtttatgaccggggactaatctcctccgcgagtcccagcgctccctctggggagtgcggttgaggggctgtcctcgcacggagcctcgctcggcctcgggggagccacgagaggtgggagttggacccgcagcgggccaggagccctgtcattggaggacccgccaaaaaggaagcaaaccctctttttctttatccaaccccaaatagctagggcctagggggaagactcacatatcgataaatggtttgttgcccgttttattctctgggaaatacaactgatcttaccaaagaaataacctgtctcttgccgtgtttacttagagccatagaatacctgtttcagagctgaaggggacctgagcccatgataatccattacctcgtgagaaagcggaaaaactgacttcagcttgcccagatggcgcagagaatgggtttcccgtaaccccgcctgtgtctttccttcagcctcgtcccaaatgccgtgggagggaaggcactctctgtcaagctgctgtcaccttacctgaagtaaggagtccacgcctgcatgtccgaggaaaacagttttctcaaacacattagttgaaaaactgaagacgctgcctaaaatacaagctgagttagagacagcccttgtaagactaggtaggtatttacagggcctctcccactagctttgtttttccagagtttgttctttatccggaaattcttaatttgcctactgatcatttaaagaaagggttctattaacattgacacagaagagacactttgtggcactttttaaaaatctgagtctcgtgacttggtataacttctgaaacttactgttaatttatagcagagctatttgagtaatatgctcttctatgagtatgaacaatagaagaagtgtgatttttaaagtgatttggactacaaaataagagcatggaatataggctttacagccagtacttgctgaggatgtactgtgtattaggtgtggtgcatataaaaaataaataaaatgtggtccctgtcttcaaagagcttatgttttctaggaaaatgctacatattactagctactccaaggcagaaagttgttagacaccaaatcagaaaaaataaaaatgtattaccttggggtgatgcaggaacattttccaaggtttcagctttgccttagtgtttcttaaacggatcatagatctgaagataagaatcagagttctatggcaaaatacgagttattttaccagttataaagatgaaatttgtctttcaacttgatcatttgcataattttatacaattgctctttagttctttatatttgtgcttttcaaactggtctgtggaccccagcctactgaaaacattctctaggatcataagaatttattttaggagtctgttcattattcagttttaagaaacactgtcttaaaggactggtaggatttggata

SEQ ID NO: 917269 - DNA, 4001 bp, Homo sapiens
agttgggcagcaccctaggggatcctcccagctccggcgtctgaggaccatcaagtcggttatgtcactgggttgtggtagagtggtggatacacaggccacttaggcttgcttgccctgaggtgaaattgttctggaactctgggatttcaactcttatatttctgcctgtgttttggaagtgttttccccgctcattttctccatcagacagtgtcatttattgtagctgccaacataaaatgacaactgtctccacttgtcagctgctctcatcatctggtttgctgtgtgctttggaaggcagatgaccaagcatgtatgaactaggcacaagagtatatgaactcagcacagagaagacagctgaggatatttcctgtagagtagcatgcatgaactttataaggtatttggccacttaggtatttttcttttttttttttcgtgatagggtcccactctgtcacccaggctggagtgcagtggcacagtcatggctcactgcagtcttgacctccccagctcaaggaatcctctcacctcagcctcctgagtccctggaattacagatgcattctgccataactggctacttttttctatattttgtagagacagggtctcactatgttgcctaggctgaccttaaactcctaggcccaagtgatcctcccacctcagcctcccaaagtgctgggattataggtgtgagccactgtgcccggccggtatttttcatttggaggtttataattgcattccagagttttaactctactggaaagctaacacaatgttccaacacaaatctgtctcgcatactagttagtgtctttgaggttccatcacagacaaatgacggaagaaagcaaaactgtttaggaaggtctaaattaaacattctataataaaggcattagcatttgacaagtccctggtatctaatactttataagatgacaatgagccttttttacccctagttaggggattaagttctaggagaagaagttaaccaggtggttccttaagtaagtaatcttttgactacttagggattgattttgttttcccataatgaaaatgaattctgttttccttcatttacttgactttagtgatctctgaaaactaagataaaatatactcggcctctgagggaatacaaccataatgtacagaagacaaaatagatactctaaagattttaaatggaacatcttgggatttgagaaattaaaggcagtgaaaatcatactgcttctaagcactttttattctccctataggaaagcagggtagataatcctgatgggttggatttcaattaattggtgaatagaaggtaaaatgatcaagaaacagatatcataattataggagaaaatagcaggagctttttgttttaaaggaaataaagaatagaattcacagtgaagagagacagaacaaaatctgataattctagactcacttgagtgccgcaagtatcctgatcagggaaaacagttgtgcctacacatgggtcctggaaaggcttctccccggaaccacctaagtgaaataaaaactgatttctgactgtttcaggatggcaacacagacctttaggataataacccacattcttttgggcaactctaatcaagtgatgcctccttaaggatacagagttagtccccagctcacgtaaggcacaataccaaagaacaatgagccatcatgaaatcgtcattgtttcatacttggtttttgtgtagaatgttctccaaatcattgtctctgacgtttccttcctcttgggtatgactgtggtgacgtcaggagacgagctaaagggacctcctggatctcacagggaaactctttccctccagtatcacgctaaattgttcctcagtgcagatgaaattcttaaatggtttcatctgaatgtgaggttttgggatgacttactgtggtcagagctgttcccggctgctccagttgtgggaggtcatcaatcccacagttctgacctcctggctcagagacgtcaccgtggagacacctggctgctattgtgacacgcaggaggtcagctggctcctgctagtgggcatttacactgcccaccctgccagcttcacaggcccacactgcacaggcatttagacgttacagggtagcccaagctcccaaagctgtggaaaggaaagggagctatctattggcctttgagaactcaaaacccatgttgctgggggccactcagattgggtacaaatgtgtcatcaaattcagttttgaaactgtctgagtagcttctttacccacagattttgattctattcactactcaatactgaaaagagaaattgatctctcaaatagacaaagataaatttgtatggaaacaacaggaaattccatattacatacgtttatgtcaactgggtttgtgattaaattactttttcttttattttagttgacatgtaataattataaatattggctgggcggggtggctcatgcctgtaattccagcactttgggaggccgaggtgggaggatcatttgagctcaggagttcaagaccagtcttggcaacatggcaaaaccccatctctatgaaaaatgcaaatattagatgcgtgtggcagtgcacacctgtagtcccagctgctcaggaagctgaagtgggaggatcatctgagccgggggaggttgaagctgcagtgagctgtgattgcaccactgcactccagcctgggcaacagagtgagaccttgtctcaaaaaataaacaataaaaaattgcagatatttatgggatgtaattaaatttttatatgacagattaacatcaattttgccctgtattctcatggatctcaatgccctagctttgtacatttagcttttcttttttttttgagacagattctcactctgttgcccaggctggagtgcagtggcgtgatctcggctcactgcaacctccacctcccgggttcaagaaattctcctgcctcagcctcccaagtagctgggattacaggtgcccaccaccatgcccgaataatttttgtattttagtacagatggggtttcaccacgttggccaggctggtcttgaactcctgacctcaagtgatccatctgcctcggcctctcaaagtgctgggattacaggcatgatcccctgcgctggcctagcattttgttgtttttattaattcagatcattaattaaagccaaactccatttttgtaattatttatttcttttttttttgatacagagtctctctctgttgcccaggctggtgtgatctcagctcactgcaacctctgcctctctggttcaagcgattcttctgcctcagcctcccaagtagctgggattacaggcacgcgccaccatgctcggctaatttttatatttttagtagagacggggtttcaccatgttagccaggatggtctcgatctcctgacttcgtaatctgcccaccttggcctcccaaagtgctgggattacaggcatgagccaacgcacccggcctatttttgatttttaaattgtttcataggacatgggcagactcctttgtataggtcacatttttttcttggtaacgtgtgatgtctaagcactttctagtgtcaccccgcatatcctgaaagttcttcagcactattccttgcttcttcgtcctcatcctatgtcactggttctttttttgtttttgagacaggggtctcattatgttacccaggctggtctcgaactatgggctcaagagatcctcctgcctcagcctcccaagtggttgggactgcaggagctcgctactgcacctgacttctaacattttggcttgtgggcaggtgtcttcatggcattttgctcaagcatcttaccaagggtctgataccagaatttacatagattcagaatcagcgattgaatggttacaaggttactgcaaaatgtatgaagaacattttatt

SEQ ID NO: 917270 - DNA, 4001 bp, Homo sapiens
tcagctatatattttaaaaatcattattttctgctttaagatcttattcctctttctcctagccattttctttttctttatattaaaacagtaatatccagaagttcatttaaaaatagatttttatatctatttgctgtcactggtgcatttcccactgctttcaggacattgctttggaatgcaccgttggctttaactttcaatctcctgagctattgtacccataaatcataaaaatatctcggaaatcccaacatgtctgtttccaagttacatcttgtagaatatttcccgtgacacacagaaaaagcataaaaatcatctgtcagatgagaagtacagatttttggttcagaaaatacagacactataaggccattgttcctttctcaataactatctgttgaatggatgaatgagtgaatgaataaagaacacattacttgagagaaactggccccacaacaggaaaaacagaagatattaggtctggatatgggttttatatttttttgctatttatattcaaggttttgaattgggataccttagggtgtttttatctaaatccttccatcttctttcctctgctacacaatctgtttgaaaagcatcaatttactgtaaaaacatgaaaactgaattactacataggagagagggtaagccactttatctgtctgactttcagttctttcatctgtaaaatatagaatttgggcaatttctgagatatttcctgactctaaaattattatgattatctaatagttgaaaagacgtgaaaacctccttacagccacaccgttcacaaaagcagcatatgtgggcgggagcctgatgtctggctgaccccaaacagtgctggatatgttggaactgtagatctggaacaaaagcaaatcaaccagtgatagtgtgaatacagtataccaagtcaccatttcaagagttattcttcatctttggaggcattattcatagttcttacttgaacctttgccacagatagaagccctagtcattgaatacctctcatccttgtagaatacacagctctcccctgtgaaagggggaggagatgtcgttgcttgatcctagatcatgatccggaagtgctccaaggaagcacatctgaagttactcttatttactccttggggtaaataccagggaagatggactaactgtttatctctaatacaccctagggagagcaggagctctcacatacatccccactctgctcagagtacttgaccaggcttttctccagagaataataataataaactgtgagatattattagcatattttttttctgtttatttgtttgtttgtttttaagacaaggtcatgctctgttgccttggctggagtgcagtggcatgatcttgacttactacaaccccaacctctcaggctcaagtgatcctcccacctctcagcctcccgagtagctgggactataggcgtgtgctatcacacctggctaatttttatgttttttgtttttgtagaaatgggtctttgccatgttgccaaggctggtctcaaattcctaggctcaaaccgtctgcccaccttggcctctggtagtgctgggattacagatatgagccactgtgcctcactgtgtatggttttaagacagtgacttagtaaagaatatggatgactattaaaactcagataatggaacataggaaattataaaaatgatatagaacagtgctatgtacatcaagtgctgtctataaaacgaagtatagagtaaatgtaacacatatgtatgcactgggttttatctctaatgtagaccttgagcttcttaccttgctatattggctggctatgtgaaacacttccgtagtggttcccaggaacccagcacccagagtgtctagaatcatcctcttgctcctctgaataacacgatctgtcaggtgtcccactttcaagccatggattgctgtggcaaagctttctgtgatagactttaaagggaagagtgttaggacagggatacaccccactttacttacacacttctgttctataagacaccttgaggcacttttgcataaagagttttgctccactacaagaaacccagttgctcagatttagtttaatttctaaaaaaaaaaagatgtgtactaagcacctactatgtgtgaggcagagtaatgtgggagcacacagcagccagtttatcttctcagttgagttgaggggcagcatagcaagcacaggacacagcattgcgtgatgggtggtggtggagggaagcacagagagttgtgggaggaggatgcaagggacacctcgtctgtgtgatagagatttctgcgggtgcagtgcacagctgctattatgagacacctgccaggcactgtgctgaatgtctcaaatatattacccttttaatacccacaagtctctaggtagttatttttgcaggtgaggagactgagacctagagaactgaagttactaattttcacagcttttaggtggtggaatctgaacataaacccctataggtgtaactcgacaatcagtgcatctagctatcaagtcccaaatggtcagacgaacatgtacctcagaactgcctggggttcttgctgaaaaggaacatttctggtccccactccagaccaccaaaattagactctccccagaaatggaacctctggaagcatagcacaggattctgttttcattaggatctctaggaggctctcaagtgctctggtgctcttacgtacaatatggcagctactccctaatgtggctactgagcacttgaaatgcagcaaattgagatgtgtcataagagtaaaataaagactgatttttgaaagcttagtaggaaaaaaaggatataaagcatctcaataatttaaaaatattgattgcatgctgaatcaatgttctattcattgaccaggtgtggtggctcatgcccgtaatcccagcactttgggagaccaaggcagatggatcacttgaggtcagcagttcaagaacagcctggccaaggtggcaaaaccccatctctactaaaaatacaaaaattagccgggtgtggtggtgggtacctgtaatcccagctactcaggaagctgaggtgggagaattgcttgaacctgggaggcggaggttgcagtgagctgagatcatgccaccgcactcccgcctgggcaacagagtgagactcctctcatcttaataaaaaaaattcaatatattgatatcaacataataatatatgggatatggtgtaaataaaacatgttattaattgatcagtttcttctaaacattttctaaaatttaaaatactagaaaattttaaattacatatgtgacttgagaaccactgcctgctcttccctgttggtggagacatcgatacttgatctggttatgaaaacttaagagtagtcatcagataatagtgtagggtgatgagaatggagggtaaaggtagaagtggaagcaagggccaaggctgggaggtgtgagagagtggagggagtttggctcctttcagctgtggagttgcatgcaggagacagaggtgagaaggagaatggatttgcagcttatgaccgaatgatgaacattacatcactctaaagactgtgatgtcaatggggagccaaagtgctgtcttaagaaaagtagagttatggtcagaactaatgttttggaaagattcctgtaggcagttgtgtagagaatggattggagaggggtagacaggggcagtgaaaagactgctgcagtatcccaggttctggatggggaaatggcagtgccattggccaagagagagaacacaggaagaggagcagccttccaagcaatgatgatgggctcagtgtgaacttgttgaatatgaagtgtctgtgttcatcccactggagaagctcattctgcttctacccataagctagataagaaaaacatgtaagattacttgaat

SEQ ID NO: 917271 - DNA, 4001 bp, Homo sapiens
cggggtcgctgggggagcccgaggcggaggcgctgccgctggagggccgctggccggggccgtggtgcagcggatgcggcagaggcgggtgcgggccgggcggcggcgggtaggagcccgagccgtggccgctgctggacgacagggagccggggctggtggcggcgggcggcgagtgcgccacgggcatggacatggagcggctgtgttgcagcgcgccccctgccggcagcagcgccaccttgctcccgcggccgccgcagccgccgctcagggtgtgcgagcggctcaggggcgcgcgcaccggcccggggctcagggggctcccagccaccgacaccggcctggcgcccgcggccgccgctcccgccgccgcgccgccgtcgccctcgctggcggtgcgcacccggcacgagctgcacttggccgccggcggggtggcggccaggctgtcggtgcgcgagcggcgcaccaggcccgtctggctggggggcaggttgaccaggtggtggtggcggcgcgcgccggggacgctgatggggtgcgtggccgacgaccccgacgattggctcttactgcgcggccggaactcgaagagctccttgagcgccttcatggcctccaggatggtctcgtggatgttctgcgccaccaccgagtcgtccgcctgcatccacagctcgccggggcctgtgacggccgagcggcccacctcgatgaagaagaagctgtccgagtggccgcagcggcggatgttcatgagctgcagcgtcaccgacggctgctcgcagttgagcttcacgaagccgatggtgcgcgcagacaggcacagacggtacacccccgtcaggttcttgctctggcccagacccttgggcttcaggttcacctgccacacctcacggtaggcggccgtggcgggagccaccagcccgtagctgtcctcggccccggcggcgccggcagagccgcccagggcgccgggcagggaggcgctgcaggacgcggcgggcgcggcggcggggggcgcgtctccggcggccgcgcggccctcgctgaccaggtcggtgagcgcgcggtaccagccctcctgctcctgctcgttctcggcggccacggcgaagtactcgtccttggtgtagagggcgatcaggtacttgtgcttggcgtcggcgcgcttgttgatgttcaggcagcagtcgagagcgatcacccgtttcggcgcgcctgccttgctccgccactttttctcgctctcgtagtactcgagccgcggcggttgcggcgccgaccccccgcccgccgtcgcctcgtcgccgcccgcgccgggtccgcgcagcacgaagaagcgcttgtggccatgcttctgcttgcgcaggtagccgcacttgcgcacgctgtggttgttgttgttgttgttgttgttgaggttggggccgtctccgctcgccggcccgggcggcccgtgccgcggcgggctcgccatcgcgggcgcttcaggccgcgcggcccgggcccggcgcccaggggttggggcgaggggcggagggggcgcgggcgggggcggctccctcccacccttgcgcccggccgcccgcccgatcacgcgtccctcgggcccaggcggtggggaaggtccggggaggcccgcgggggccagcaccgctcggcggcgccgcgccctccgcgctctggggctcctgaggatgcccggcgcgggcggtggccgcccccctccccggctgcctgcggccgctgcctcctcgggctctcgggcggcgccgggggacgcgctcgctgggccgggagtcggggtccccgagccgcggggccgagcctaaggcgcgcgcggccgcaccggggctgctgccgccgcgtcgcgctccgggaagccggggtgcgcccgggcgctcggggtccgcgccgccgccggggctgctgctgctgctggtgttgctgctgctgctgccaacggcgacccgggctcgtcgcggtccccgccgcacagtgagtaacacatcgcgcaccgagtgactgaactaagaagagcaaaacaacatgtgactcggcgttacgcaggcacacacagcgcggccgccccgccccgctgcctcgcattggcgccgcgccccccgacggacggcgcgctcggccaatcggcgcggcgctcgcgggggcgggccgcgcgcccccgccccgcccccctttctccccgggccgcgtttcccgccgtcccctccccctcccgcgaaggccccggcccggccgggcggggtggggcggccccggcctcattaatcagcggcttgttgtggatgccggcggaggagatgccacccagggcgggaaaaggggcgcggaagaggggcggggcgggccacggcgcgcagggcccttccctcccgcctcggactcaattaattgggcttgagcttccgccggggagggggcgccgggcggggccgcggctgggcggggcgggggatcgggatcggcggcgggggctgcggccttgcagtggaagcatgggcggcgagccgggccgtgctctcggggcgcggggtccccattttgggcgagggcggccgctcccgcgctcggggtgggcgcgccccatccccgtcccccgtttcccgtccccgtctcccggccgcatctccgtccccccgcagccgcgaaacgcggggaggttccagggcccgcggccgcgggttcgcgagcaccgcgctccagatcgagagcggcgcgcgcccttccgtggaggacagaggggcgcggagggggcgcctgtgtcccacccgctcgcgggcgctttacggggcgtcctctgcgccattcacttgtcagcttgtcgggaagttgaaatcgcgtttgggaggtaataggagaaagagatcggggacggcaggcggagaaagtgcggtttccatagcgccggggagagggcggacccgcgagccagcggtccctgagccgggagaccgcgcgggcgtctctccagcccccgcaggagcgccgccttccttccgcaggggcgtcctctccccccaccgctgcaggagcacccccttccttcctcggaagcgtcctctcaccacaccgcttcaagagcccccccttccttccacaggggcgtcctttccccctccgaggcaggagcgccccttttccccccacaggagcgccctccccaccccaggagcgccctgcgcccagcagacgggcaggtgggcgggcgtccactacctgtgtgcgcggtgcgggcggtgactgccaagttggagatgcccttggagaactgcttcgaattcatgtatctactgggcttttgtgactttcaaagcctatagcaaataagcacccctgcaattacgtctcctcaatgaccaagtcagggtgaggtgagggcttcctgagttcagatcccagcaagctcccgatcctgcgcaacgaagaaaactcaacaaaacaggctttggctgtttattttattttttttttaattgtgccttcatgaaataatttacagcaataatttatcttataatattggttattgtttttaagtcccggatgtttacttttggatgtcctctataattcatagaagtatcttaaaagtaataaaatcttaatctaagagaaaataagtgtaatttttgaaagagtgatatatattttaatatgtttttgtaacatgtgacttgaagattgtgttggctaattttatgtgccaagagagccctgactagtacaaagattatagcgtttttatttttagcatgtatacagttaggattattgatcagtagcctgaatttgggaagaataatcattgtggcaaatatcacccagtgtgcctcaaaaaggtgtgtttaaagttgatcttccatttttaaatcataccttaaaaaaaaatacctcaagaaatgccattttaagtctgtgcacctatgtgtgcatgtgtgcgtgtttgtttatataatagattgtgtgattgt

SEQ ID NO: 917272 - DNA, 4001 bp, Homo sapiens
gaacccagtaaaataactccatttgtgaggacattggggaatttagtctataatgaggaactttagaggcaagtgagattttagaattaagcaaatgacggccaggtgcagtggctcacgcctgtaatcccaacactttgggaagctcaggagggaggatagcttgattccaggagttggggggggggggggggaccagccagggcaacatagcaagatcccaactttaaaaaatcataattacaataaaatatataattaagtgaatgaatttttaaaactttacttccattcaagttcagagcctgggggataaaagtgttgtgataaatgatgccagaattaactagccaaagtgtgacaatcgcagtaacttaattggtgcttatgtgaagggaggcgtgtccccacccttcactcttctagggagtggcagaaatcccagaagaggagtttcgacctcccgagggaggagacagcgccgccctcttacctgcacaggtgctcccgtcgtaggtctcgcacacccactcatggcactcacacaggggcccgaagaacatgcccggctcagtcacgtggcagatgcagacgccgcagtcgcagcggccccggccgtggcacagcgcggcccccgggggctgcccaggtgcgcggcagcgtcgctccgactcggcccgggacagcctgcaggcggcgcccggccagctcctgcgcgggcgacaagcaaccggcaggccgggtcagacgcggacgccgccccctgctccgaacccacgtttcctccccagtgtcccctccaggtgcagacgtacaaccccaagaacaggacgcctgaggcccacatctctctggggtccaagcgctgcctggaagggctgtattttcccaagcaaacaggtatcacccaccagagaaatgaccagggcccaaaatgtgtaatgggtgacctgcccccggacacaggtccttcctccaggtggacagaggtgaactgccctgctctttggtagtttatcactaaatcttatatgcacatttagattaaatacaaagtaatccaaggtacggcactcagctgacttttcagttctcctttaaaaaacgtcccactgctatctgatggccaatgggcacttatattacagaagagaaaacgtgaatctatagaaagagttagacatgctatgatagcatcgggcataatttgcattaagcagtctttaggaactctacttttaaaaagtttagtttcactattgcagtgtgcctcactcagtctctttcaggatgatacaaaatgtaacacagacctcctgttgctgcccttgggaaacagatcattctgctttacatgttgtgagaagatactggtacacatagcattttaactcacagcaggaattcctcctgatatgtatttgcagaaaagaaaattatatttttattcaatgattgcatttttccaaaggaaaagcaaaaggacagacatgaggcaatacacgctgtagatataaggagaggaaaaggaacaggttgaaaacagtttatcccttgtccaatttaataacagctcttggcttagggcagccatcctgcaagcttgagccctgccacataagcagggcaggtctgtactgaagaataacaaaccaaacttacctcagagatggcgagaagctttgaggaacagctgacaacccagcaaagagaagggaggacgccagcagcaagaagttcctgaagcctgggggacgcatgctgagctcctgggctgctccgggcgagctgcacttctgcaaggtggggttcaccgagggaggcggcaggagggagaggtgccaccagcagatggctgggcagacggacccacggacacccaggcttgcaggtccggggctccagccggagttgcaattgcgttgatgagctgcctgcgaggatttgggcagcggcactgctctgggcggggtgctggtgccaaacccctcagtggagagtctaggcagggaagtaattagaaacagttgtacaagcagatggtttattttgacattaaaaaaaaaaaaagtgtcctgttcacagatttcaagtacgggccacagaaatatttgacaagagaatatttggactggccgatattaaagaaacctttaaaataatccctgagttgtggagaagggtgaggccagtgacagtagtgggaacacttgggtagggaattactttcaccacacgcttttaaagtagatgcactctttggagtttgggttggggccggggcaaggaaatctgacaaacacaactttttcttgcatttattatcctttgatttaaactggatatttcatttctttagtctttaaaaagcgtgtcatgcttccagctgtttaggccagtagcttatcacaccacaatttgttggtgacttggacagtttaaattgtagttgtctcaaattcaccccattctccccatatatcaaatgtgagaaaagaaaattaaatgtttatttatagcacaaattgcactgaaaaacaattggtgtcatttactaagcacctactatgtgccagtcatttagtatgttttctctaattatgacaataatcacacatttatttatgcattagcaaatggggatttagcatctatcaggtgccaggttttgtgcaagacagaatgaatataacagagaactaaggagacatgatccctgctctctcagagtccaatgagctagaaagacattaatcaacacaaaaccacaaaaaaaaagaacaaagggttgcaagtgcagtgagaagttacttccagatgagatacaggcacttgatctaatcaaagatggtagcatctgaacaaaaaactgaaaaaagtattgaattaaattgggtagaaataagaaggagatggaagagaacagggagacattcttactcccattttaaagataaagaaactgagggcaaagaggtcaactgacttgctcaaattcacagaggaagttagtcgtatttcagctgaaatccaaagtgcatacactatcccctacatttatggtcatctgggaaaatgtgtagagggttatatggaagggggaaaacatttttcattcaccctaagaagagcactgtacatgcaatccttcctcatgaaatagaaccatccaagaatcatctgtggtcccagatccttaaaatcagggatgagccataataggatgggatttctccctgtcctttatatataagtaggtataagggtaagaccaccacaacactagcctgctggagcaagaagacgatgaaggtcctctaatcatagtacatttctgtttctaccccaatctccaccctgtaataggggaggttttgcatgaggcccatctgtgtgtccccccaccccccaacccctacccacacaatttaacctttttcaaatagctgattttctggccacacttagatacaggtgtgtacacactggtggagtcttctattgcaaggacagactggggacaggtatgcacagttttgggaggctgtctggacaggtaattctggggtcttggataaccaaagtgcggcttaggaaaaaaggacacaggttctgagttggcaggttccctaagtcacatgaactgcagcctgtgggggaagggcctgtctaaaagagacagaatgggaattactaagtcagttgttcttaaagcgtggtccatggacctgcagcaacatcagcatcatttgggaacttatggaaatgcaacttctcaggccccaaccccagctctaaggaatcacagagtgcatttgaataatatcccaagatatctatttttacataataatagcttgagaagtttgcaaagcacagggctcagggctgacgcctgagggtgcctggatctaagagtggaatttccacccacctttagtacaaattctagagttacattttatcctgcccacgtgtgatagtacaaggacataggaaca

SEQ ID NO: 917273 - DNA, 4001 bp, Homo sapiens
ctttgcagggacatggatgaaggtggaaaccaccattctcagcaaactaacccaggaacagaaatccaaacaccaacactgcatgttctcactcataagtgggagttgaacaatgagaacatatgaacccagggaggggaacatcacacaccggggccctgtcagggggtggagggctaaggggaggatagcattaggagaaatacctaacgcagatgacgagttaatgggtgcagcaaaccaccatggcatgtgtatacctatgtaacaaacctgcacattctgctcatgtatcccagcacttaaagtataatttaaaaaaaaataaagaaaaagaaagcaatgctcatccaggtgattcagaatttttcatcttacaaatccacttaaaaatcatcagaagaatgtgtggcataagaaaatgacaatgtgtgatggaggaaaagttgttacaatttgggaggccacagggctctctaccgtaatgtgacaaattataaaatcccttcaaatgtaacaatctgaataaaacttcactacttatatctgctagatgaagttgctcataatgataaaaaatgttcaaagtaggttaatttggaagctatctgctttatagggtaagttttgcagtgatggtaacggggagaaggagggtctgaggatggagtcttaagacagtgctagaactgggccctgacaaaccctatctcctgaccttgcagaggagaatgtaggacaaaaaagaccgatgcattttattcataatctttaatcacagacagagaagcagacagagtttcattaaggacaaaattattcacagtaatttacatagttacaggttggagatatataagcacttacaaattatattgcagaaaagtcatcagaaccttaaaaaactatttttataaacttttaagtggtccaccaaaaaccaagacagacattacacacacaatgtgtgtcacaccacttattaacaatgagaccagtctgaagatgttttagaggttctttactaaatgtcagtaagtatctgtggcccttgggcaaccctagggattcccagctaatcaagggaaaaacctgttattcagccatgatttctcaaatgaaccagaaactctgccccttctctctataaatctgtcagactaaaatctgagcaggaagataaacagagccagaactactgcatgtggctttgcctacatgtgttaggtttggcatattttgtcaaaacacttatttgtagtttagcctcttctctgtgcccatttccaatttcctgtcttcagaagctgtaccatctcaaggctacaaatccctcttactcttcaagactcagctcaaacagcaccacccacaagataatcccaggcagaattaatggctacttactgtgtgtgaacaacacattactcacagccctgttagtagtattattttaattagtcttgtcttcactggcttcagggttagactgttctttattccttaagaggactctgtgcatagtagctacttatcaagtgtgtcttagtcagctagcactactacaacaaaaataccataaaaaggtggcttaaacaattgacatttatttctcacagatctggaaactgggaagcccaagaacaaagtgcgggaagattcagttcttggtgagggctctcttcctggcttgcagatggcagccttcttgctgtaccctcacatggtggagaaagaaagctcttggtgttccttccttctcttataaaggtactgatcccattatggggccccaccctcatgtactcaactaaacctaattatctccaaaaggccccacctccaaataccatcacactgggggttagaatttcaacacagaattttgggggtaaacaaatattcagtccataacaaaatgctaataaaatttaatgaaaaatactacttacctttattaaatgctcccatcactgcaactaagttcatgagacaaagtttaaagtaaaaatattttgttttctgcttgttctaaaagctagcaaccgtcacactaacctttagtccacctctcactggtttctatttttcaccaatgagtcagacaaactgaatgctattttatcagtttgatcagtatcgcagcatcctctgatatcaatgacctcatcccaagcaggacatttggttgctttgttttgcttttttcctgtactgtgaaaaataaaataaaataaaagttccctaactctcttctttcagaatggatcttaccaaatgttattcaaaagcatacttccctggcattatttacattcactcttttcagaaaactaatttttctgctacagatgctatgcgatatttttctaaccatatatctgatatatattcaactatgtcagctgctctctccaaatcacataccaaagcatttaaggggaactaaattatattgagcccctcctatatgccatgtattaatagacgaggaagggttccataaaaatttaatgggtgtgctgaggtgaaaactgtcatttcaaagctataaacagtttatatctcaaaagaagtagaatttgatccctactttggaaagatttttgtttgatttttaacaccacctgaatcagacctccatctaccatgtgtttatccatctatcaatcctttatttcacattcttagaagagactggaatgccagggctatatgaagtaaacttctatctgtgtacaatttcggtaacctttcttttaattgttggatccgtagattgacatgatgaaagctgtcttgtaacacattttaaaacagagtagtaatctagccactcattacagtttctatacttaaaaatatactttagagataaatcaaatgtcttcatttggaggcattagcattaagaaatttatcttacagaaaaggcaaaataaccacacctcctagcttctttagtgtggtgttttggctcctactggtaaacagccattaacatctgcagctgggccacttcagcggctgcaggcaaaatggcttcctgaaaacaccaaaagatgaaaaggaacagtcacaaatgaaagaaaaggaatataactcccttttttttgagaactgggaacctaatattggcatggctttaatcttctttaatctttaatgagtctaatctcattatcactcacacataaacaaaaaattccatgaggaagacgcaaaattattgctgttgtcagaacataacacatatctccaaaggttgtagtggggggttcacgaataagacatagggtacttagtacaatgcctgagcacacagtacatgctcagtaaactgcactttctattaacatgttctgttcttccgcttagacaaggaaactgaggtggttaacagctctctcaagttaaagttgacagtcagcttaggtctttccgggttcaaagcctgtgaccaggaaactcttccagtgtcaattcctgaaatcactccagttttactcccctcaaagcagtgaacgtgggaaagctaagcaggcatatgccttaatccacttaaaggtaaagaaatgaacttggaagtgccatgcagtcttctctgccattatagagagtcagttaaatgtatacatcaagctaaaaactagactccctttaaagtgataacagaggatgaacagattgctctgaaaaggctgtgcctttaatgtaaaaagcaattgctcctttatcttcaacctcatttggaattgtatactccctcaaatgtcaatgctaaggctggctccttggttagaaaagcatgggctgtgaaatccaaacatccttcaagaaaaaccagtatctgtttactgtaagtcccaatccctgccatcctccatcccttctctcccttctcatcatgagggaggcccatttgatctcctcctccgaagcccagcattcttaccatcaccacctcctcagcctcaacctccctgcatggctgtttgcag

SEQ ID NO: 917274 - DNA, 4001 bp, Homo sapiens
cagcggaacagagaaaagctgtctgaagtgacatcatccaatgctcgctcactctctcctttctaaatgggagcagttatatttgttaataggatttttaaatgtatgtgtgtatatatatatatgtgatagcattaagactacatatatttgagactgttgtgactggatacttgactctcaatctattttaggtacaacgaatgttagataaacaaagagctaacataataatttgctactgcaattttcatctgtgcattccaaacattttctttaaagaccaagattgtttgcaatggcttcaggaaaacaataccaatacgaaaaccaaaacctttaatccttttagggaatcagttcactgttcctatttcaaggcaaggcaagtcatttagaaatcaacctctgacgtgtctgtttttatcagaacatttccagaaagtaagattaccattatattctgaagatagattatattcagaatataataaattataatatgatgtctagattaccattatattgtgaattttttacagtatattagtggcctgtttttcagcaataattttcattcgtccatataaaaactcccattattcatacgtggcacaccaatttttttaagttaaaactaaatttaccctactgataataggtcttgaaaaatgctaacaacaacaaaaaataagataagcaacataactttacagttaatttctaatttttgcagcctaaaaagggtctgggtaagaggctgtgggcttttttaacttatgagacaattacactcatatttaagtaaatatgatcgtaacctactaaaagtcaacacagtaacagccccacttcatgaattttcctaggattaaagggagattttgtaaaataaaggagaattttattagggacccgggggcaaatttctcatgtttagtttcacgcagcaggagtcctcacaaagacgctgatacaatttaaatgccaacaattggtttttcactaacatccacatagtcattactggcctttactagtaatggtaagagacagcccaaacctacttcgggcggactgtcccttcgtcccctctccaggtgaagttcacctgccactaccgaagggccgtggaaaaaggaggtaaagaaacgcttttaaaattaagacgcttacagttgctggacttagtccaagtgctgttcaagcctagaaacgaaagtgggaaacaacagaggtttaggcttgtaatgatgtcagccattttaggtacattatttatactgggaaggaagtgccaaactcggttgttgttgttgtgcctgtcgctgccggtccccagatcgaacaagccaagtcctggctgcacgcacgctccccggactgcacaaacgaccgggaattcggcacaattagccaatcgttccctctccaggcctcccaagcccccgaccccgcgtcaggcaccgcttccagcacacgcacttccttacaaaggagctgcggacccacaggaaacgggagcgccgggctctctcggggacttgtccccgcggcgcgagccccgcgcccgccacctcggggcgcactgccgctgcagtccgcgcagccctccccggccgggcccagcacccgcttcctcgacctccccgggctcggaccttgcagtccaccgcgacggcgtcgggggggatgatgagcgcctcctcgccgctcttgggctcgtccttcttggcctccttctgggccagagcggagttgaacgtcaccttcaccatggcgcggcctggggcgccctcgaagggcggcggcgggctcggggcgcgggctgcgggctcccggctgcgattgcagcctctacggccgggctccgggagcggctccgggcggctgaagaggttcgggaagctccgcggcggcagaggcggctactgcggtagggatctcgcagcctcccagctcccgcgcgagggcggagactgctcgcacatcccctgggaggcggggcgggggcgggggcggggccagcggccgggggtggggtgctgcgcgggaccctgccctcgccccgcagctgggcgccggatcccggcgcgcctcggagagggatgggtgtccctctgggccgcctggaatttccagttctgaattcgctcccaaccaggttacctccaggccgagtgctgcaggtttgtagcgaaatcgagtgaactttcctgagttcgccgggtacaagggactaacctttggcagcaccagaccgccgcttccctgtaccctgtccccaccgcgagcctaaaggccatggaatttttgtgcatccacatcttcattttctcacttattaggtaaccgactcagtggagcacaaacatgtttaaagctctctgtccttgagatctgactttatctttcacggacctcacccaagggcgtttacctggctcagacctgcctggtcttccttccctctctcaggaggtcagggcctgttctgcctagtcccagaccaatgtggaggaagctcttggcagatttgtatttcaaacatctcacactcgtaaaacgaaatgttccactcttgtgcgtacttggaaaaaaaccacatgcacacttggctgatttgtgactcaaagtactcgatgacgagtccctttatttttctgcaaaatgaaaaaataattaaggataacgcaaaattctcatgttttgaagacgtttcatttacaactaatgcgaggtagaatactggctcccgtcgttactgcgttcattactgtgtcaacagacggcccccttggacaaatgtgttatcttgtatccttccaccccattctgtcctggttcatccagagttgtgggtgtgctctagaatgttacagctgtgtcagctctgccttgggccaaccctgaaaaaagtgggttcagtctgagatctttggggatttggccctgctcaaggagggagttgggtatttccatagaatgtcagatcataagtcccagggaaacagcccaagatctccaaatccttctgttcatgtatttcagaagcatcctgggctgagatagaaacccaggccagactttgagtttgctttgggtattcagaaattcctgtcaaaatgaaatctgctcaaccaagaggaggatgagttaggttccagttctggtgagttttaacagtagctaaccatacttgcagcaacttatttaaactcctgggtcgcccttgtgcaggcatcggctctgtgaggttgactctatggactggactttcatagtatctaatgttatctaattcctcaaagtcaacgactgcttccagctccctagtttaataggttccctgagacattacagttgaagactaagtatttctggaagcaagatctggaggattataaataattatatgtacatccttcctacttcgttctgtgttaaaataagatggtagaaaaatactcaaggcattttgcagtagatgatagagaagaatctggctgtcattatactccggggggaaaaaaggaattacagaagaaaataaaacaaaattcttcgtgaacaacactactgaacagactaggaagctgaggcaaaggatgaacaaatgaggttgacaaaactagaaatcctccccgccccaggatttctattttgaaagactcatgaataaaagaccattcattattttgtgtacttgcagtgagcaacagtttaaaatcagttggcaaccggtctgggaataatctcctggttttttttctccattttatctcatgtgtctacagaactgtgtagtgcacaacagcagggataataaagacgctggagcaagaccaaacatagcaaatccagtcttgtgatttagaaaaggttgcccgttgaccctgaaaacttaggagccagggaggaggagagtccatgactcaacaaaagaaagttaaaaacatagttataagttactattaactaccaaatgtaaagggagtctt

SEQ ID NO: 917275 - DNA, 4001 bp, Homo sapiens
ggcttttctactacctgtaatgtttcccctcccaggtccattctctacactggggctggagttatctttctaaaatacaaatctgacgccaccaccactctagctaaaattcttcaatgactgccctatatcaagaaaaattctaaactctgaatatggtgccaagtactttaagatctggcctcacccactaattgcaagtattctgggatccagtcattcagaactacctagcgtttcccaaatacaaaatactgattcttcaatctatcctttgcttattttgtgccatccatttgtcctagaatgactttcctcatcatcactccagtgaaagcttattcaactattttaacacaagttaaaagtcaaatcacactgaaggcctcccctgacttccttagacagagtcaggatctttctactaaatgacagagaatggtcagtgcttgagatcaggaccagacccacctgggctgaaatcccaggttcacacgttaccagctatgattttgagcaaggcctctaaagcctgtttcctcatctctaaaaatcagtaactacttcaccaactgttttgaggattaagtaaggagttgcatgcaaaatactcctcacagcacctgacatattcaataaatgttactgttatgtgattatttcctctgggctcctagagcaacttgcacttatctctaccacactactgtgatgacaagactgcccatgcaggatacagactatcttttttcatctctttattctcaccacctggcataatgcctggcacataggttcctaacacattttgaatgaataaataaaatacttcaaaccttatgttgtatcacataaggcctcaattttgttttctacctgtcttactaaacctactttccatctcctccttgtacaaaattgcaacctcaagtaaaatttacacaggtcaacttcattttaattaagagaaagttttataggatttgtggtctttttgtttttaaacacacacacacacaaactcacaataatatcaacaattctccaacttactccataaagcagcaaatttctaggatggttatctacctattaaaaaattttaaagggtcgtcaaggaaggtttcgtaaatctgtgtcagcttcctttaccagcaagtctttgagtcaactctaaggactcaagtgtactcctgaacataaaaaatatataaagaattaactaaataattaaaacatggtatttttccttccgaaaacatgctgagaaattctgaataacactggaataatcaaagaattattgctgcctactgctaaaaaagtctgtttttaaaagttactagtaatttaaagctgaactaatcaaaatatgtgtaggcagtgttcaggctggcaaggggggggtggggtggagcactcatttcacaaccttgaacctcaagaaataaaattcaaaaatgcaaaaagttaaaaatgccagataccaccatataatcgcaatgacatctttttatctatttccacacttaacctttaaacattactgccctttgagtaattaccaattgatgggtttaatatgcaaacacctctgagctactttaaaacaaacatgactaacccagaaataaacgtatccaggaaaggagaaaaacctgttaaaacacggtttctcaggtctcacatccaatgtgtgacatacatacggttctgcaccgaaaggcagcaacctgcgagggtcagaggcgccgaagacccgaggccctgcagcttgggcggctgctcatccctgagactgtgcagggcggtggcccagccggggtggggctgagcgctgcaactggggcgggcccagctacagggcgggaagcccgaggctcacctccacttccctttcccaacgcacagagcccaggtccgcgaccactcaacagccccctcaagacaaagagagatttttttttctgtcccggtccgctcaaagtttatcggtctttcccggcggtcggggccgccgggctttgtagttcgccagtccgagctaccccaccaagaccgcgagcccgaggagtcgctgaactacaattcccatgatgcaccgcgagcctggcgctcccgcgcccctccccgtccccgcacgggagccagcgcccgaggaaccccgcagcccactgccctggcgtctccggcagtgggaggccgagaggggctgttggctagagccctccaccacctgctgtctcgccctcgcccctttctctcggattcattacccagaaggcgcaggtccgggcacattcagcgatgcggtccagatggggtgcgggtggggcgcaggccgccgccgccgccgccgccgagtccgttagctcgcgacgtgcgtgaaaaggcggcggcggcgtagtgttgccatggcagccgcggccgcgcggtgggcgcagcgcgggagggagcgcgggggctgtgagtccgctctggggcggagcttgggactcccgcccaggttgccggggggagggaggtgcagcggcgcggggtgggagagcagggagacagtgacattgaggaggacgtgtggccgactgagctctggtcgtgcttgatgagcctgcctccactgcgtccagcccccgtggcagggcaccttcgtgcctgctgctttcggaggtgatgccagtggcgtcgaaggagggggcacccggggcgtcgcagcgcctttcccgccgcctgtccaggcgtccgccgctgggtctgcccccaagggatgtgtggatcctacgccacctctgtgtttttctccagtcaaaccgaattgaagtctttcgcaccccctttctccattctctggggagggggatagaagggaatccttcgataagatggaatgcatatggcctttaggattattcaggaggttttagaatttgcaaatggcattgctttcgactgaatttggatttatgctgtttcttggcaatcgtttgtggactctaggataaacaggttaagagcgtgggcttctaaaacgaattcttagttcacgtcctgcccctgtgcttggtagctgatgaccagaggcgcctttctcacctcttaacgttttgatctgcaaaaatggagatatccatcttgcaactcttgtaagaaatacacgcattaatactgatgaagctctataaaacaaagcttagcatttaacaatagctattaaatattaattatttaatcaatagtgataaaagtcagaatagtggttggctgtcggggaggagtttgagagaattttttgtagtgatgaaaaaattctatagctaagagtttcggttacagaagtatatgcacttgtcaaaactcttggaatgggacatttaagatttgtacatttcactgcatgtaaatttacctcaaaagagaacataaaaatgtgttgttattattattagagctatagactctaatggaaactacagagatattctaggcccaatctctagattttatagatgggaaaactgaggcccagaaatttaatagaaaaaaagaggaaggggagtgaattcgtgaccttgtcattttctagtaatgaatatctcctgaaaaattatggttgaaaataacaaaaatggctcctgtaatccagctgagtcatcctaccacagagattttcttgaacttgactgagtcccttatccaccttgtggtgttccccacggccaatgtcctctcaaggattgcaccgtcacttctggctctcagttcttgcttttcctgaacacttagacctctccacatatcacctcttacaactctcctctctctactcctgctgacacataatttcgaaatcagccccttttctttggttgtttctatagccaactctttagaaggtttggagcagataagtggttttaaattaaggatgcaaaaaacctaaaattagaaatccctgctcttaaaagtccttcagttcctcccatgatatttttatccaccta

SEQ ID NO: 917276 - DNA, 4001 bp, Homo sapiens
agagaatggtcagtgcttgagatcaggaccagacccacctgggctgaaatcccaggttcacacgttaccagctatgattttgagcaaggcctctaaagcctgtttcctcatctctaaaaatcagtaactacttcaccaactgttttgaggattaagtaaggagttgcatgcaaaatactcctcacagcacctgacatattcaataaatgttactgttatgtgattatttcctctgggctcctagagcaacttgcacttatctctaccacactactgtgatgacaagactgcccatgcaggatacagactatcttttttcatctctttattctcaccacctggcataatgcctggcacataggttcctaacacattttgaatgaataaataaaatacttcaaaccttatgttgtatcacataaggcctcaattttgttttctacctgtcttactaaacctactttccatctcctccttgtacaaaattgcaacctcaagtaaaatttacacaggtcaacttcattttaattaagagaaagttttataggatttgtggtctttttgtttttaaacacacacacacacaaactcacaataatatcaacaattctccaacttactccataaagcagcaaatttctaggatggttatctacctattaaaaaattttaaagggtcgtcaaggaaggtttcgtaaatctgtgtcagcttcctttaccagcaagtctttgagtcaactctaaggactcaagtgtactcctgaacataaaaaatatataaagaattaactaaataattaaaacatggtatttttccttccgaaaacatgctgagaaattctgaataacactggaataatcaaagaattattgctgcctactgctaaaaaagtctgtttttaaaagttactagtaatttaaagctgaactaatcaaaatatgtgtaggcagtgttcaggctggcaaggggggggtggggtggagcactcatttcacaaccttgaacctcaagaaataaaattcaaaaatgcaaaaagttaaaaatgccagataccaccatataatcgcaatgacatctttttatctatttccacacttaacctttaaacattactgccctttgagtaattaccaattgatgggtttaatatgcaaacacctctgagctactttaaaacaaacatgactaacccagaaataaacgtatccaggaaaggagaaaaacctgttaaaacacggtttctcaggtctcacatccaatgtgtgacatacatacggttctgcaccgaaaggcagcaacctgcgagggtcagaggcgccgaagacccgaggccctgcagcttgggcggctgctcatccctgagactgtgcagggcggtggcccagccggggtggggctgagcgctgcaactggggcgggcccagctacagggcgggaagcccgaggctcacctccacttccctttcccaacgcacagagcccaggtccgcgaccactcaacagccccctcaagacaaagagagatttttttttctgtcccggtccgctcaaagtttatcggtctttcccggcggtcggggccgccgggctttgtagttcgccagtccgagctaccccaccaagaccgcgagcccgaggagtcgctgaactacaattcccatgatgcaccgcgagcctggcgctcccgcgcccctccccgtccccgcacgggagccagcgcccgaggaaccccgcagcccactgccctggcgtctccggcagtgggaggccgagaggggctgttggctagagccctccaccacctgctgtctcgccctcgcccctttctctcggattcattacccagaaggcgcaggtccgggcacattcagcgatgcggtccagatggggtgcgggtggggcgcaggccgccgccgccgccgccgccgagtccgttagctcgcgacgtgcgtgaaaaggcggcggcggcgtagtgttgccatggcagccgcggccgcgcggtgggcgcagcgcgggagggagcgcgggggctgtgagtccgctctggggcggagcttgggactcccgcccaggttgccggggggagggaggtgcagcggcgcggggtgggagagcagggagacagtgacattgaggaggacgtgtggccgactgagctctggtcgtgcttgatgagcctgcctccactgcgtccagcccccgtggcagggcaccttcgtgcctgctgctttcggaggtgatgccagtggcgtcgaaggagggggcacccggggcgtcgcagcgcctttcccgccgcctgtccaggcgtccgccgctgggtctgcccccaagggatgtgtggatcctacgccacctctgtgtttttctccagtcaaaccgaattgaagtctttcgcaccccctttctccattctctggggagggggatagaagggaatccttcgataagatggaatgcatatggcctttaggattattcaggaggttttagaatttgcaaatggcattgctttcgactgaatttggatttatgctgtttcttggcaatcgtttgtggactctaggataaacaggttaagagcgtgggcttctaaaacgaattcttagttcacgtcctgcccctgtgcttggtagctgatgaccagaggcgcctttctcacctcttaacgttttgatctgcaaaaatggagatatccatcttgcaactcttgtaagaaatacacgcattaatactgatgaagctctataaaacaaagcttagcatttaacaatagctattaaatattaattatttaatcaatagtgataaaagtcagaatagtggttggctgtcggggaggagtttgagagaattttttgtagtgatgaaaaaattctatagctaagagtttcggttacagaagtatatgcacttgtcaaaactcttggaatgggacatttaagatttgtacatttcactgcatgtaaatttacctcaaaagagaacataaaaatgtgttgttattattattagagctatagactctaatggaaactacagagatattctaggcccaatctctagattttatagatgggaaaactgaggcccagaaatttaatagaaaaaaagaggaaggggagtgaattcgtgaccttgtcattttctagtaatgaatatctcctgaaaaattatggttgaaaataacaaaaatggctcctgtaatccagctgagtcatcctaccacagagattttcttgaacttgactgagtcccttatccaccttgtggtgttccccacggccaatgtcctctcaaggattgcaccgtcacttctggctctcagttcttgcttttcctgaacacttagacctctccacatatcacctcttacaactctcctctctctactcctgctgacacataatttcgaaatcagccccttttctttggttgtttctatagccaactctttagaaggtttggagcagataagtggttttaaattaaggatgcaaaaaacctaaaattagaaatccctgctcttaaaagtccttcagttcctcccatgatatttttatccacctaccacctacccccattttttcatcataacctgtaacctcccactattgtaccatctttctggtcccatctctcccctcctctcctctctttatacaatacttttatttccatctcctaatctgtgccttcatagctacctgccattcctaaactgtttaccaaagttttttcctacacaaagtaacttcccaagaggaactctggagccagctattaaaataatattttttcacatatgtatcctcatattctatttgattcagtccacagtgtagctgctcaataaatattaagcagcttacgtacatgacctgttgatatagtttggctgtgtccccacccacctctcactttattgtaataattcccacctgtcaagggcagggccaggtggggataattgaatcatgggcgcggtttcacccgtactgtt

SEQ ID NO: 917277 - DNA, 4001 bp, Homo sapiens
tgagcaacaatttttggccatgcttgataattctgtagttgttggtctctgagaccaagggaatattattcatttgcctccattctgccctaactgggttgtagaccttcatgactgggatatcacagatacaatagatctcctcattgaagacgcaggcttcctgaaagtcattgcgcttcagagaaacgcacttcagccacatattgtggctaggatcataacagaacatgcgcttactgttgagagcatagagatagtctcgaattaccattaggtcaaaggataaaaaagaatggggcagtggagccaccaatgcccactggtttctcttaacattgtagcattccacttccttcaacttaactccagtaatagggtctcgcccccccaaaatgtagatatagccattgagatatgccacatccatgccctcacgacacagcaagcgatctgcaagttgctgccaactattctgagctggtttatacacccagaggtctgtcctgggctgagcagctagatagatgtcatggtcaggagagatacagacagctaaagtggtgacagtcctagtgtgagccagacaggtcaaaggtgacggcactttgtaaaggtcccccgagtatggatcacagcagagaaagggatctctggggtgtccaaagaagatcaccatctccttggcacacatacccagtctctggggtggattttctgctgcagatacaagagagttgctgctgctactgctgctgctgctgtttggcactggcaccagagacttgtacaacaggtcaccatagcgcatctgcagggccccttcaataacgtccaggcagtacttcttcacgatgggcttggtcagcagcccttctaagtagtcctgatcttcttcagtgaagtgcatccagcgcacgcacttgaagacttctgcagcactgggaccccgctctttgggagcagcctccagccactgcactgccacatggcacactgtctgctcactctccacgtccagactatccaagcgcaggacagccagcagctgggccagggtcagatctgctagagtctcctcccgaattgaacccatgtggctgagttgcttgaagttctgagctatataggactgggcctgggatcgcagcttgcgatggccaaaggcatctgcaaacttgaggatggcggtgcagttggtcaggtcaagacgtcgggctaagaaggaggcacaggcttcccgcacatattccagctgtagcatgtcggaggccgcgtacaggcgctccacgttggcctcactgagagacacacgacccgtgtagcagtagtcgaccaacacctcgaaggactcggcgtccacatcgtgcatggtcacgctggcctgctggctctcgtacatgccacctgtgaacatgctcttgaagtagggacatgccgcggccagcacattgcggttgcaggggaacaggcgacccgtgccaggcccgctgccaggcgtcaccacctcgatggtcacatcacacagcagccgcgcatcgtagaaggacttgagctgtgccagcagggctgcagaatgggccgtgtcctttaattcctctggacccgtgaaaaaggccgaaactgtgggtttgtgaatcttcttgggccgcttcccaccacggggactggctaggcggcgagagcgcggggcgtcttcccgggactgcatggtggagatggcgacgggcgctgatggcgagaaacgctgcaggacccggctctggctcctcctcaaccttccctcgctgacgctaagatagcagcgtctccgaagagacagcagcacgagcccatttactgaattcaaccctaccccgcagaaccgcctcccgttatcgtttagacagtggctgactcaccctctctcactcccgcgtcctttctccgcgtctgctcgccttcacaggacccgctggcttggagccgcagaagccgctactgcagcgtgggcgacaatgctaggcgcccaggagaactaccgctcccaggttgcctttcgcgccccgagggctgctgggactctcggactcccgggccgagaccgagggaaagaatccgctttgcatgtcgggagtagtagtttgtgtaatatcgcgatccttctctggtgttccttgttttagctgacgacactcgagagcgccaattttcctagattcgattttgtggtttggaactgtggttttggaatccagagtagtcgcctcgttctagtatgtattgtttgacttgtctctttgaactgtttcttcttttgtaagacgtgaacagtagtatttcataggattgtgtgaagattacatgagttggttataggacgctgttaataaatatttgttggtttgtagaataattactcagttcttagaattataaaggttcgataagttttcttccagcctttattaaaaaaaaaaaaaggaagcaccactaatttgaaattatgagcctgtaggaaaacaaaaaaccccccaaaacagaaaaccttgcaagttccagcagagatccctttttaggggcgtgtgtgtgtgtgtgtgtaaattagattttatttttaggtttacggaaaaattgagcagcagggacagggaacttccatatatctctccccacttcacagttcccttattattaacatcttgtattagtgtatgtatccattagaagtgattttttttttttttttttttttactcactatgcctctccctggtaccaaaagataactcagggtttgtaggattggttggctatcgctggaattagatccctggctttttcacaattgcctgtccttatttgccatgactaaaaggagaccacctccagtcacctgactttgagactttccttccatatctgcatttcaaaacctgaagtcctctgtagccacttctcccacttggtctctccaatattcagtacccctttcccttttttacacaaaagaagagacatgctttagggggtcctcaccccaaaacacaatggaagccagaggcctggttggtaatttagcatccttttagacccagtggctcaagcatttctccccttgcttgtatgaagttgcctctccatcagagctgactttatttctagtcattcactcaacctttacttaccccgtgcagttcagacattagaagtcactgagaacacctaacacgtttccgcttcggactcacctcctgtgaaaccctgccactgtcttcctctctcatcactgtccaccgtagtcaaaacaatcaagccactcttcttcccattccctctgaaggacaaccttgtgactgaatcaccgtcacacagtcattcacatttcctcactctgacatcaccagaactcctctcagagaccttgatatcacctttgtagatggttcttacctcaggagtacaaatggggaattttaagcaggatacactattgcagattttcaacagcctattaagttgaaatctccacttaagttaacatggcccaaatcattgaattcttaagcactcacccaaacttgcatgttagcacaagataagggaactaacatttatagagacagccagtttacttttggaattgcacgttattttggtatgctatggaaagaaagaggtttatgacaactgaggagtaccactcagaacccaactcactaacttatttaagtcttttttttttttttttgagatggagtctcgctcttgtcacccaggctggagttgcagtggcgcggtcttggctcactgcaacctccgcctcccgggttcaagcgattctcctgcctcagcctcctgagtagctaggattacagacacccaccaccatgaccggctaatttttttttttttttttttacttttagttgagatggggtttcgccacgttggccaggctggtctcaaaatcctgacctcaggtaatccacccgcctcggcctcccaaagtgctgggatta

SEQ ID NO: 917278 - DNA, 4001 bp, Homo sapiens
tgattgacaatctggtagttgtgggtctctgaatccaaaggaatattactaatccgcctccattctcccctagctgggttgtagaccttcatgactgggatgtcacagatacaatagatttcatcattgaagacacatgcttcctgaaagtcactacgtttaagagaagcacagttcagccacatattgtggctaggatcatagcaaagcatgcgcttactgttgacagcataaagatagttctgaaccactatgagttcaaaggaatagaaggaatgagggacaggagccaccaatgcccactggtttctctgaacactgtagcattccacttccttcaacttaactccagtaatagggtctcgtccccccaaaatgtagatgtagccattgagatatgccacatccatgccctcacgacacagcaagcgatctgcaagttgctgccaactattctgagctggtttatacacccagaggtctttcctgggctgagcagctagatagatgtcatggtctggggacacacagacagctgaggaggtgacagtcttagtgtgagcaaagctggtcaaaggggatggcattgtgtaaatgtcccccgagtaagggtcatagcagagaaagggatctctaggatgtccaaagaagatcaccatctccttggcacacatacccagtctctggggtggattttctgctgcagatacaagagagttgctgctgctactgctgctgctgctgtttggcactggcaccagagacttgtacaacaggtcaccatagcgcatctgcagggccccttcaataacgtccaggcagtacttcttcacgatgggcttggtcagcagcccttctaagtagtcctgatcttcttcagtgaagtgcatccagcgcacgcacttgaagacttctgcagcactgggaccccgctctttggcagcagcctccagccactgcacagctacatggcatacagtccgctcactctctatgtccagactatccaggcgtaggacagccagcagctgggccagggttagatctgctagagtctcctcccgaattgaacccattcggctgagctgcttgaagttgtgagctatgtaggactgggcctgagatcgaagcttgtgatggtcgaaggcgtctgcaaacttgaggatggcggtgcagttggtcaggtcaagacgtcgggctaagaaggaggcacaggcttcccgcacatattccagctgtagcatgtcggaggccgcgtacaggcgctgcacattggcctcactgagagacacacgacccgtgtagcagtagtcgaccaacacctcgaaggactcggcgtccacatcgtgcatggtcacgctggcctgctggctctcgtacatgccacctgtgaacatgctcttgaagtagggacacgcagctgctagcacgttgcgattgcaggaaaagaggcgacccgtgccaggcccgctgccaggcgtcaccacctcgatggtcacatcacacagcagccgcgcgtcgtagaaggacttgagctgtgccagcagggctgcagaatgggccgtgtcctttaactcctctggacccgtgaaaaaggccgaaaccgagggcttggaaatcctcttgggccgcctcccaccacggggactggcgaggcggcgagagcgcgggacgtcttcccgggactgcatggtggagatggcgacgggcgctgacggcgagaaaggctgcaggaccaggctctggctcctcctcaaccttccctcgctgacgctaagacaagccgcgtcctggaacagactgcggcacgggccgcacttctgaattcagccctatcccgcggtgaggcctccctttattgcatagacagtggctgactcaccctctctcactcccgcgccctttctccgcctccgctcgccctcacaggacccgctggcttgcagccgcggaagcccccactgccgcgctggcgatcccgctaggcgcccgggagaactactgctcccaggttgcctttcgcgccccgaggcctgctggggctctcggacggccgggcggggacagagggaaagaaaccgctttgcatgttgggagtagtagtttgtgtaatatcgcgagctgtcctttagttgactgctctaacagtagaaattaattctcctggatttgatggtgaagagactgttgcccaggctggtcttgaactcctgagggctcaaattatcctcctgcctcggcctctcaatgtgctgggattacaggcgtgagccaccgccccctgccagtatttcatagggttttgtgtggttcaatgataccttacatgggatacttagatacatgtatgtttttggttagaagaatagtaaagcgttaccccgtgcctagaatgtagccaataactgttagattctcttttataatttatgataaatgaggcacccactaatttgaaaccgagtattattttaaaccgcaaaattttacaaagaatttctagtttttaatgtttattccttcgaaagattttgaagggcattaacaatattttcaatattaaatgatatctattggtctcgtttaataaggatgtcttagacgactaggttgaggtcctaaagaacagtattaatagatggtctcaaatacgcaaatccagcatataaaaataaattatttgctgctctcactaacatttcatctctggagagcaggagtattttcgttaagctccaaatatgagtgttttcaagtcgtctaatacagcctctttcactgccgttccacaaatcaattaacagattatgtaattccctttattaaggagttttagggagtattttaactcaaaatatttcaacaaacagactttgttctgtacaaaagcacatgattctcagaattcaacatcagtacatgccctgacattccttgaattaatatatagtatagtctatgctttacaaagtcttttatatttgcattgggatcaacagttaaatcatcaaaatcaagtattagagatttgaggcaggaaaatagggtctggaggcagggaacataaggctgattcacactttagctataacaggaaagatcctctccatagggtgtatgctgagtaaatgagtttgtaactttacttcattctcttcatttacatagggtgtacaccaagtaaccagtggaatcctctagagggtatttaaaccttcagaaattctgtaacagggcccttgagcccctatgctcaggcccgctccccactgtggagtgtactttcattttcagtaaatctctgcttttgttgtttcattgtttccttgctttgtttatgtgttttgtccaattttttgtccaaaacgccaagaacctggacaccctccaccagtaacagactttttcagataacttttattacaaaaccatgactgctcctgctgctagtttgttatgttaccataacctaataaagaaaatcatcagtgttacatgcatgtatggataacacattacaagagaataactttcaaattgtttttctcttatcagctgaagataacttcaacttatcagctgaagtccactggaaatactctagggtagacacattaaattaagtcagcctctgggctctaataactcctctgtaaataaaaagagatgttagatatccctcagatacaccagagagaatcaagtcagtcattatcagtaacaatgattgtttcctgacttgcagtgaataccagctggggaaaaaagccttttttttttcttttttttttttttttttgagatggggtcttgccctgtcacccaggttggagtgcagtggcaccataatagctcactgctgcctcaaactccagtgctcaagcaatactttgccctcagcctcccaagtaactagagctatagatgcataccaccacacccagttaattaaaaaaaaattatagacagggtctcactgtgttgccagcctggtctggaaa

SEQ ID NO: 917279 - DNA, 4001 bp, Homo sapiens
tgatccccaaagaggtcataatcactcatattttaaaaaccaaaaaaaatttcatttttgttaaagtatcccatcaatgaaaataaagttgtacagaggtttgagataaagataaggtattagattttcttcacaatcagcctactagcttgactggctctcttttcccaaaatgacatttcaaactcttttgaaggacaggaagttataaaatgtaaacaattaagaattgtcatactcggttattctacctagtgtcctccagttggtaagcaagaccaaggagtgtgtcgctaagagagagagacactggtatccttcctgttggctactgctcaagttaagaaaatatcttaaaatacgcctacctttaccaaaaaaaaaaaaaaaagtatattttaaatgataccaataaagaacacatgcaggcttttcttttcctcctaaaaattaaagccagctttcacagttggtaaaataatggtaggacagcattaagacattttacggggggaaaaatgtttgtgacagcagagtggaaatcagcgttaggatccagccaagaacaacagagggagtaagtgaagaattgactcaggagcaactatccttaacatactgacagcctatcccaatattttgagttgtttaagagccaaggctgtaacaggataccaaatttgccatgagatatatctgtctttaagggtgtttaaaaataaagtcagctgaaggaaaaacagtagttgaatcataaaactgaaagaacaacttatatagtgtgtaaggaactcaagagaaaccagtgagcgagcctttatgtgaaccactgaaacaatctcttaaaaataaggcaattcttttctaagtcaaattcattagcaatggaacataatctacaaaattattttctcccatgatttgaatgtccatagtctcagttttttctgggcagtcttcatttattccttttgtcccacctaataatagcccctttcactctaaaaagtatcccagtttggaaaataattatttggtcattctacccaactccactggttaccccaaaacattattttgaataatcatcttttccagaagttacaggcctgaggaacttcaagtttttagagaaaacatcacaaactggtatacaagagaaatactgcaaagtacaaaatacctgactccagtttggttatcagtagtgctgtcagaaccacactggaaaaccaggtcatggtaagaaggtctttgtggaggcagtggaagtaaggtcatctgaggagggaaaaagttaccattccaggtcggcgctgaaggttgttctgtaaacactgtaatcctccctgttagcatctcaattgttttgctgcaagagccaaacaccctgaaaaaagcttgagtgttccggcttaggaaatgtacctccacaagagcaggtcttggctgtagcaggtatgggtttaagagatcaactagagaacgaagttcatagaaaagagcctctctctgaagcctaagatagtctgaaaattcagtgggtaataaaagctggtgagttctcaaaaaatctaagatgaaactaaacaaatcaccatctctgtctacaaaaatctggccaccaaccatcttgaattcttggtctctgccatctaacatgcgtgccaaacgagaagcaggaaactgctttatcgtagaaaaccttgtcgtgaatatcttccctcccacattcaaagtgaccagttcctgactactcattcttccctcacttcaaactagaggctaccatcagccacacttaggaaatcaacctataaccataaatgttgctagttatacatgattatgcagtggaggggagggaagaataacaaaaaccagacttagattcccaggaaactactgtaaggtaaatagtgtatccatggctgtgtttgcaaattcgagttgcctgggaacttgcagtatacaaaatgaaaaagcaacagatgaggaactaaatagcttaaggaaaactgccaatatatctgaagatagacatcaaatagatccctttcctgtcttacatttaaaaacttatccatgaaaacctagtaaaactatatatatatatatatatatatatatatatatatatatatatatatatatatatattttttttttttttttttttattactgggaggggaaaagcattctccctccccatacctgtctaccacgcagaggctagacttaaacgtttttcttaatttcttatgatctccttagaaatttagtggctaaatcatgaattacatgttaggaatgagacagcctggcaagctcaatttgactattctcatagctagaaggaaatcatttcttctgtgctttaaatttagttgccaccttttatcctgtccccattttcattacctcctctcaaccaaattagaggaggactgaggtaaagaactcttattttcagaaagtctattccacttaatgggctttcaaggaatatcttactctatgacacaaataaggcagactagagagcagttataaggttacttctttgttatatgaattctaagcaaggtgtttattccatgagagggtatctttatctcttgtgagcagacagaacagcattagtgttcagctgattactttgtaatagctgacagactgttttatctgttgtcaaattagtcttaactacactaaacattctttctgtaagcaagtggattggtttggttgtacacttgccatctttcgaacaaaacaacacatagctgccagaaaaaaggtagtcttcccatttcctgctcttgccatgtgttctatatatacatatatatgtatatatatgtatgtgtacatatgtgtgtgtgtgtgtgtatatatatatatatattttttttttttttttttttttttttttttttggtagagactgggtcttgctatgtttacgaagctggtttcgaactggaactcctagcctcaaataatcctcccacatcactgtcctagaatgctgagattatagacatgagccaccctgcccagccagctgatccttttttttaacctatctatgcttttgcttgcatagccacttaacatttctagttgatcatctttggtgaaaactacaaaaacaaaggagaaaagggcagattgaaagctccactctcctaaaaatgtaaacttatcacaagaaaatgccaggttttgtatgtaccattcacattttggtgataattaactctctgtagaaaattttggaaatctaattaattagtaccttcaatacctttagttgtctcccacacacgcgtgtgtgtgtgaaatcttctacaatatcttcccttttttagaccatgttcactgtcaaaaaggtgctttaagagcagtctttggctgggcacggtggctcacacctgtaatcccagcactttgggaggccgaggcaggcggatcacgaggtcaggagatcaagaccatcttggctaacaggatggtcttaagggacagtgaaaccctgtctcaactaaaaatacaaaaaattagctgggcgtggtggcacgcgcctgtaatcccagctactcaggaggctaaggcaggataatcacttgaacctgggaggtagaggctgcagtgagccaagattgcatcactgcactccagcctgggcgacagagcaagactccatctcaaaaaaaaaaaaaaaaaaaaaagtgatctttactgcatgcttgaagaacaatcactactatactacctatacttccatcaatacaatattagatcatatgatctctcacctatttttatcacagcataaatacaaccaacatttggggtggatgcttatttcaaaagcactcttttaaacaaaaaaaggttcaggcctatactactaaatttcacttttatctttatgctacctaatttgaacatgtatagattatttttggaaggaatacttttggaggaaaatat

SEQ ID NO: 917280 - DNA, 4001 bp, Homo sapiens
ggcgagcagcagctgaaaagggcgcctctgcaggcaggcggatcactttctataagtttaagctacaggctgagaccttttattctgtacgagaaaggatcctttactgtcccacgcactagattcttctactttacgtgtaacttttcaaaactttattagtttagttactgaactgcctccatggggtcctaattccaggctcagaatcttccatccagccttctaaaactctaccttcaaaagaggtcaaaaagactgtgtaatgaccttgtaaaacactaaccccagacagtggaaccaatcctgatctcttaaacccccagtgagtcataagagcttgagaagatttcaaggaaatcttccgcacattggacacggtccaatcaggttctgaacaattcaatcatcccccggtctgtggccacactcccccaatagatccaaactgaagtaccatctgggggaggggtggtttgaggcagggagtagagaaagcatggagtggtaggtgggggtggggtgggggttcctctgggttctctcggttcaggaggtccaaagaagacgaagcagcccagaggatttgcggctgcaggttctgtagtggagggaaggtgggcggacaggtctcacccagctactactggagggggagaatgggagggcagcagccaggggacaaaggtgggacaagaggctctgtaatcatctctcgggcaggagaaggactgggcgctggagtggcgagggggtctggggagctcactccctgcagaagacgtactcggtgtagctggtccagatcttgtcctcgctctggtcggtgctgctggcaaaggcgcaggtgcccgtggagctgcacgccaccatgtggaagcccgactcggacagcttgtcgaaggcctgctccaggaagttgaacttgaggtaatagcgcgaggtgtagcgctccgggggacggtcggggtcccggctttcgttcagggtgtccccaaacacctccttggccagcgacgtctttccgcaaacggtgatgcgcgccactcgccggaacttggcgtccgcctgcgcgtcccgcccgatggtgtaggagccgcggtagccgatggtgatgtagcccgagcgccggctgccgtccagcgactgggacggcgtgagcagcgggcccgccgcgcccccggacggactgcggctagccagctccagcgtgggcgacggcgccccggcagaggcgccctcctgctgttcgggctccgagtagccaagcggcagcagctcgtcacccagcgagccctccttgtgcaccccgcgccgcgagggcggcggccccgggccgggctgctggggcgccccgaggcggcgcacgagctctggcagctcgaagtactcggcctcgcgctgcagccggctgcgctcggggaagtagtcgggcagcacgagctgcaagtcccgcaggtaatccaggatgtagcggaagaggaagccgtcccggtccagaaagaagcggcctttgctgtcccgggccagctcctgcggctgctgctgcgtgaacatgcgccagagcagcgagtcgggcaccgacaccaccgtgcagcgccgggtcacgtacacctggccccccacgttcagctccacgatgtcggggaagagcggtggctccgcggaggacgacgaggagccactgccgcccccgccgccgcccccgttgggtaatccacgtgtgctgtccgccagagccatgacagagaggtggccgggccgggacagtggcaggaagccgcgctgcactcaggagctgcaaccgccttccccggagccccggaacccggacgctcgctcagccctgcgccccgccgccgccgccgccgccaccgccgccaccgccaccgccgccacctcctagagccgcgcggagccgagcggtgcgagcgcgccgctgtgcgcccccttgagttccagtgcgctccgcccgccttgcccgcgcgctccaggcgagtgccgggtcgcggcccgcgcgctgcttaagtagagccgcctgctctggtgccgtggcgcgcaggaggcgtgggcggcggcggagcctcgcttaccgggcgaggggaggtggggagcggggactcgatttgcatcttaaacgcggacgccacgcggggctgctggctccaccccggctcgcgagcgctgggggcgcccggactcccacccgctccccacccaccagccccgccccgtggtcccgcccaactttctccctcttccgaagaggacccgcccgagacttggcggcttcggaagacagctccttggagggacagtcaccgcgccccctcccctctcgccccagcccgcacccaaggactctggaaggaggacgtgaactttcggaagcctgtcgccccgggagtggaaatgcgtggccgcctccggccctcccgcctgcggaactgggcgcttccagcagtgcagctgcggcctgccatcgttggttgtcgtgtcactgaaagtagagagacgcgaaaaacctggagagacgaaagagccgccccagtccgagcgcagccagattttgttcaagttgccttgcagccagcctggaaaataaataaataaacctagaaacaaaaagcaaacctcagtgtcccgcagtaggatgctttacgatagtttattttctggctgcagagacaaaatgagatgaagcttcaaatctgctcttaattgcaattccctcttcccgcagggccttcgaggcacttcacttcgaagtgaaggggtaagactccggaacgttcggtctccgggtcccattcagccttcgttgaatcgcgcccttagactcacaacagttgcagatctaacgtaatttttaaagccacctttggcgcctgcatgtttatccttccaaaagtccaggcgccccttctctcccgcatgcctcggtcactcttcggccctgtccaagttcccgtcagtctcagaaagggatatttatatatctgaaggcccttgtctggatcccatctctcaactcctgctgcctacacgtttgcttttccccctcggactgcagcccacagaaccgccccctccccctggaagctttccctggcttcccaggtgggtggggcctctggatggctccctacacactgtctgcgctgctcccagcacgttctgaaatgtcatatttatgagtgattatctgatcactgatttgggtatgaaaataagtaagagctcctgaatgctgcaaaaagagaagagtgcagaggagggtgtcaagaaatgattgggtcactgaatgtttcttgtgtacctgctattatttgcagggcaccagggagtgaggaatgcaaaggcgaataatctccaaagcgctttcagtgtagcccaataagcaaagggtcaggggtctgcgcagttatcacatcagtttgaagtatagaccacacatcaggataaatcaggcaagatctttgttcttgataaaatttatccttctgtgtaactacccagtgagcttcacagtctcctcacagataaatgtcatttttattttgaaatgtttatatctgctcaacaattaccgcgctcatgtcagtgtgctgaaatgagatcaacccccaaaccagttatcttaattgcaagtacagattttgatactgaatgtatttcaacattctttttttgttgttgttctgttctttgggataaataatagataacacaaaacttccaagtcccagtgcaggatttcgaggtggttgtgctactaggcgttatattagtgtcagagacctgacaaaaccagcctcttttctacaaatccaagaaaagccttctttgtatcagttctgcacatatttttgtataattaccattgctcattgcatcagcaaatcctgccagctctgtgttaaaaatctttctagactattaacgtatttcaccatctccctatcatcaccctggaccaagccaccatcatctcttgcctg

SEQ ID NO: 917281 - DNA, 4001 bp, Homo sapiens
agtactatggcagccactttatgtaactgattgaccacagcatctcacaaactgtgccaagtacttgaaccttcctaggactaataggacgtaacctctggccacaaggtcgtgtgaacatgtcattgcagtccaaagaatacagctgtaaatattttgcagtgttgaactgcgtcttcaaggaagcccaggaaaattgcctacattggtaaatgttttagcttcatttgaggagtatagaaaaacataaggcactatgtgtcaaaaggagcacaaataaagacaacagactagctcagaagttcaggtgaaattccattccacatttctttgattttcactacagaggcaatcttgacaatttataagtcatattaattcatgttttacatgtactttggaaaatgagtatttcagggaaacctgtgttttataattttgtaagcagaagtcataccttaagttttttaaaaatgaagtttttttttgaaatataacctgtgcgttattatttactggaaaattctattgtaaccagatgagcatagcacttatgtaagccatcaaatgaacattaaaattataatattgtacagaactcatttttatagtgctatttggcaaaatgcaattttactttctctttgggaagaagatattttaagctaataaccattatctacaatctcaaaatgaagggcataactttgaaaactcttgtaaaggtagtacagttaggaagtaaatgactaaagagggtctctgttaccgtatactagcgcctgccactgttccttctgattttctcatcacttaacatctgcttgtgtcttcagtgatgaggtggtgtggagaagagagaagaggatctgaacaggagaacaggatgtgatggctcaagggagcaaatgtggtttcttacagagtagggaggagttataaactagggatggagaactctatcatatcacacatttttttcatatttaccatttctataactgaggtacatcttaatatcgttagcttgtcaaagtttagcagcagtattttgtcttggtggcacgtaaaataatggttgctattacaaatgatagcatcttatagttgatgaaatatttgagcagctctgtgagctattccctccgtatcacaagaaagtaaaattaacagacagggaggagggaaagaattttgcagggagatgagagagagagggagagacaaaacaatgtggctgcttgatgttaaaattaggcaaattattttataacttttataaaattaaattttattttttgatacagggtcttgctctgtcacccaggctggagtgtattgcaacctcaacctcctgggctcaggtgatcttcctgccttaggaaactcccgtatagttggggccacaggcataccccaccatacctggctaacttttttatctttttgtggagactgggtctcactttgttgcccaggctgggctcaagctatgctgctgcctcagcctcccaaagtgttgggattacagatgtgagccaccatgcgtggcaaaattcctgaagatcaaatagagatcagaatattacttcacaagtaaagagcagctttttaataatacagggatagaaagtttgcctaactggtttgttaagatgctagtaccttttattagtagacctcaactcagaaccacaggcaaaaaaacttctaggaacatattttaaatgagaagaaaggagactactaggaatattaaaaatggtttgccttttaaatgtacctgcttcttgaaaagattatttcttcagtcttttcccagagagtgtcgacacaggtgtgatgtaattaagagtcaggagagtaaggagagtaacttcgaggtctggaggatcagcctgaaatgttggtcagtagtcctctggtctgggtttttacaggagctggaagttctcttaaaggcctccacattcagctggatccagaaggtcttgtggaaatgaatgagtgtaacttcctgatgcctaagacttcctaacatacttgatttcattacttacatgccaatgctaataagcagtgttgctgcttgcttattcctttaacttcttcaaactagggatgcccttaactttttaaaaaaagtgccagtatcatttctcctcagttctttgacatagagtgtatgtcaagttcagatatagggcaggataatccagcatagagcacaaatttaaatattttcaagccttgggcagcttcttaacattttgttattctctttctattcaaagaaaatttaattatatctaggtcttttggaaagtactagagcaaacaaaataacactaatgaaataataaaacatccccagttggagaggaaggctagcatttttatttagtgaaagagacctagaagagatctcagacattctagtaatatcattattatggatgctgaggcccagagatgtaaaataacttctccaaagtaacactgctgtttagtgacagaatcttaactagaagccttcagttctttttataggatgtgctttatatacataacctttaaaattttctctcgagttttttctgattttaggtggtgggatatacataaattaccatcatcaaagatgtgtgttcatactcaataagattcttttggttgcaagtagcagaaaccagtcaacaaaccaatctagccaaaaaaggagtgcgggggagaatttagaaagaatcccatactatttcccagaatccaaagaagagcaaatggccaaggaaaagatatgaattgagccattccaaagcctttggtaggatgagtttgtgtggcttctctgcagagtgctggcaagaccatgtccttctagtaattggtggtgtgagccccttagttgaacatttcaagcacaagagcgagcaagcacagacacacagaggccattcctaccaccttcagtactcttccttcttacccccacccaccccagtctaaatcctacccatttttcaaggtccagcacaatcattgcttattcttcaaaactcttcttggcctggcgtggtggctcacacctgtaatcctagcactttgggaggctgaggtgggcggatcaccagaggtcaggagttcaagaccagcctggccaacatggcaaaaccccatctccactaaaaatacaaaaattagcctggcgcagtggcacatacctgtaatcccagctacccaggaggcagaggcaggagaatcgcttgaacccaggaggcggaggttgcggtgagccaagatcgcgccactgcactccagtctaggcaacagagcgagactccatctcaaaacaaaacaaaacaaaaaactcttcttgatctctagctagacatctgagtgggtgtgtgtgtgtgtgcaagtacatgtgtgtttaatcccagtactcttgtatgtttctattttatgacctttaacatattcaacttgacagaagaatcctacagcacatatggaataaccagtaattggtcagttacattaaaagatgggaaatcataaaaatgatatcaatatgcagttcctatctgccttaaacattttatcttaaaacttataaatgtacgtttagttggctgggcacggtggctcacgcctgtaatcccagcactttgggaggccgaggtgggcagatcacgtgaggtcaggggttcaagacctgcctggttaccatggtgaaaccctggctgtactaaaaatacaaaaattagctgggcatggtggcgcacgcctgtaatcccagcacctcaggtggctgaggcatgagaattgcttgaacctgggaggcggaggtttcagtgagttgagattgcaccactgtactccagctactccagcctgggtgacagagtgagacatcatctcagaaataaaataaaataaaataaatgtacatttagttgctgatgtatatgtaagacaaggcctttgctttgaatatagga

SEQ ID NO: 917282 - DNA, 4001 bp, Homo sapiens
aaacacacaaaggttatgctcttcagtctggaaacttgattattctcctccacattcttcctctaacatatgattgcttcttcttctcttatgcttttagtaccagaatgaatatgatggatcagagatttaaaaaaatgaggatgacaatggccaagataacatgaaacagtttcattaaacagtcacaatggagtatgttaagactattaatctatataagcacagaacatactcatgcattccatatggaaaaatattcttactaacttatttcatgctatcacatctggatatttgtgatcaaatgatgctcccaaagataatgatcttattttgaaaaatctctgccaatgaatctttacaatatcagtattataaatcacgctcaggcctggcactgtggcccatgcctactatctcaacatcttgggaggccaaggagggaagactgcttgaggccaggagttcgagatcagcctgggcaacaaggtgagatcctgtctctacaaataataataataataataaaaaacaaatagccaggcgaggtggcacacgcctgtagtcccaactactagggaggctgaggtgggaggatagcttcagcctgggaggttgagggtacagtgagctgtgattgcaccactgcactccagactaggctaggaagtgaaaccctgtcttaaaaaaaaaaaactcacgctcagccatgggcaaaagcaaagtagtaggtagtgtatcatcttttgccaaataacaaaatttacaacctgccttttacttgacaaccttttattccagtatttttttctgtatgaaatacacacagtcagcatccaccaataatagagacaatcatttcagaagtataggaattataaaaataagttttaagtatgatgttaaagtattaaattcattggaacaaaatatttgttacaatcatataggagattaatacttcgatactttccttccgaactctgaagtttcaaatagtacttcatttttctttttcagtttcaaaacatgcttacctgcagatgtctccttgaaaattgagggccgcaccagagaaagatgaagcccatcaagtctctaacaactaggtttaaatcccttataatagcttatgcgaaaagtagttagaaacagtatttccagcaaagtggagggactttgtcttgccctgataatgtgggaatctgaatcaaaattgctaggagattattttatatgttatatacaatacattatattgcatatattataattcggaacaatttctacagctacagagaaaaatgggtaaccaaatatcctggaatataaactgctgtggagaaacgagttcttggaaagaaaaatcttaaagggagaaacagatttaaccgccatccaaaataggtaaggagccgtttctcgacttacttattccctgatgtatccactgcctgaatatagaaatagcgggcgggaaggacgacgtctgcttttagcccgggtccccatatttcgctcttctccgggctcagctgcctttctccgccggtctcggcgagtgctggaactgtcgccagaaagaagcaataaagtagcaaagtgccaaacatttacaagacggactctcgaaatgatccaccgataaatgaagaagtgtaagaggtggacagaagcagccgagccttcggcagggacccgccggccgatcgcagcagccaacgcgactgcaaaggttgccgcccggcgtgcagggcaggcgcgcgggtctccgcgaccccaggacaatcaaagcccgtgccccggcgcgcccaggtgagggtcccctggcgttctgctgtcccggccgagaaccgcgctgctcctctctctcaggacaatgatgaacttgagttgctcctgccactggagcatcatttgggagcgaatccgtctcaggttccagccaaggtgtagggcgaggggattggcccgtgcgtcgggccaggctcagtaacgccttctccaagtggatggcggggtggacacgcgtcccggcgccccgggctccctgggatatgtagttcgcgacaggacgagcggaaatactgccaggattttaccacctctcgcccatttatttacttctcggtcaccgctttcgggggacagataaacaccacagatgcccatcaaaggggcgcacgggtctggaggcgcagctcaggtttttgcgttggtcaccctgccctccgcacgtggagagggcaggcataaagcaccttgaaaggaaggtgctgtcaatgctatccgacgacctgtcgccgggcaccgcagcatcctcgctcgctccgatgggacgagggacgccggccccagggtaacaggaggcgcctcgccggccgcgcgctggatgctgtgatccaggtccggagccgggttccgccgcggccgcagcgacccgaccccacccgacaggccagaggtaccccggggcggggggcaggggccgaggtggcggccggctgtgcgctctgagcgcctggccctccgctgggcacctgggcgccgccagcccggcctgctgccgctctacgcgcagccacctgggcattcaaaatttttacttaattcgataccggcctgggctgccaggggtcatcgcctctccgagccccgtggcgtccagatggaggccactgcatgggtgcgcgctctcccgggaaggagtagggggaagagctgtgtcgcggggggaagagaagcgccagggaaagaagggcctagccctctggtgaacaaagctcgattaggaggtgtccatgtggataccggtgacccctgtgcggccgtcggtctccacgccacgctgggcagggtccgggaaccagcgcgcagcggccgtcgccttcccctgcacgccagcacccgggtctgggccgccgccaggagtcacgggctcaccgccctggtcagcttggcagtcggacccggagccgcctcctctgcctgcctccctcttgccagctgccccgaaaacccagaagagccggtggctccgagccaaggcgggcctggttcggcgccaggaaagggggtttctttcctattttcttttgtgcaattgtcattattaatgataccgactcgtttactcaaacagtcgaatcggagccccagctcttagcccggatgcagcaattgcccgtgggccccctttaacaccaacagcgtccccggggcccggggcaagcatgttcgaggcggtcacccccgggcctcggcgcgctccccctggcggagagcctcgtcttccggccggtgagggaaggtagaggagggagtaggggcgaggaggcctcggcggcccttgggctctgcgggctggggactcggggtgcccgcgacacgcgcggaggcgcgggctgggttggccacgggcagggagcgcagccgcgctccttcctctctgcccgcgtcgcctccgcgcgcactggttctgcgcggcggggcttggcctgcgcgactgtctactccgtcccggcggcctcggagcccggccgagcggcgagcttgtcagaggacggtggtggaaacgctcccggcctccccaggggcgcgggctggaggctggcgccaggcgcggaggactcccggtatcttttgacaggctggcgcctcggctctggggacccgcaggtctgaaggggaggaaggggcctggagggcgcgggaggacaccgggtgggaagggtggcattagctcggccgggggctatgcgcctctggtttcgccctcccgcgcatattcgacccttacgaggtcaccggaatgcccctgctcctcagttgccttctatacaggatatcgatcagggtattttgttatacgaaaaggctttactgaagaggtttttagagatgtttggttctctcataaacttgatacttgagaatacagacaaaatataacctgaaaagactacaacctaggcgatgaagattggctttacaaatgg

SEQ ID NO: 917283 - DNA, 4001 bp, Homo sapiens
ctctactaaaaatataaaaattagccgagcgtggtggcgggtgcctgttatgccggctactagggaggctgaagcaggagcaacccgggaggcggaggttgcagtaagccgagatcgcgccattgcactccagcctgggcgacagagcaagactgtcaaaaaaaaaaaaaaaaaaaaacagaaaggagaagaagggaaggagggagggagggaggaaggcaggcaggcaggcaggaaggaacccaagggagggagggagggaagaaggaaggaaggaaggaaggaacctaagccaaggaaggaaggaaggaaggaaagcaaagaaaggaaggaaggaagggcgaaggaaggaaggaatctaagccaaggaaggaaggaacctaagcccaggaaggaaggaaagaaggaaggaaggaaggtagaaggaaggaaggaaccaaagccaaggaaggaaggaaggaaagaaaagtagaaaggaaggaaggaaggaaggaacctaagtcccagaaggaagggagggagggatggaggaaggaaggaagctaagctctctctcgcggtgccctgacttctcccggggaaggacctctgagctgcctgcactggtaatgacacgtaggtgaaccggtcctggctttcttagaagattccctgctgcataaaaccaaatcccgttgcactttcctgggttccttggctttgtcctttgtcatttccaggatggagcagaggcactggtaatttggcttttacttgcctggtacctctggcatggagtggctaaacggtggcaccatgtactagttgctgccatcttcagataaaatattgaatcaatatgacaaaagtcagatgaatactagctgccaattaccctgcttcccttgggggcagcctgtttggagcatagaccagctttgacctgcaagaactctggatatttggaatatttaaaattccaaatacagtatcccaggaattcaggtcagctgaaggccgattgggaagggcttaccttaaatgaatcagaaagaaaaaggtgtgggtgtgtgctaacattttttgagtatcggctatgtgccaggtactttttcttattattttaagcaagtctgtgaacatccctgagaataacaaatcatttgttcccatttcgcaagggggaaatctatgacttaggttcaaataacttgcccaaggtcacagagctaataggtagcacagttaggctttgaaggcaggtgtatctgacaccaaaccctatgtccaatttccaccatactaccagcaagatggaagaataatgaaataaagggaccaggcaagagccagtttcaggaatacttaaagggaaagaggagtcaggaggaacttagagaaagaatcttgaaacaagaggaaatgtcatgccaggtaaatcagtgagtcaaaaaccagaaacagctgtactagttggcagactggacatagtccaaggcaagaaaatcgtttttgtagggagattaggatattttggaccaagattgtgggctttagtcatcccctctgaagccactctgaaatcacctttctcaaaactgccataaggcaggcctaggcactatcacgtggacatcctactaactctgagtatagaccttctacatctcgtcacagacgcaggaggttcacattctgaaagagcatctctaggactaaggagaaacattcaaggacaggtttttcaagttaggaatgctcactggaaatctgctctgtcccctctgggatctggaagtagaatttcccaagcactaaatgctgaggcgtggactttccaagaatttcctgattggttaattctgagaatgtcactgatcattacagacggatcaccatgcaggaaaaggagaggctggtttgggttttttcatggggaaggtgaacttccagatcacagtgccctccaagacacagggcttgaaagtcatgagtgtcagggacaactcactgtgtcagctagcccagccgggctcatgcccagcacccattgatcacacacaaagctccattgtggccaggatagcctcataaaagaccgaaagcctagcagctgcctgccaaaacccagccaggcttcacaagaagtgatttgtgctgtgagcagagctttgaccccagttttgaactcagctgacagtcagcaaaggggaaaccagtctctgtacaaaacaggaaggaaatgagatgaaatgaactgcattataagctaccagagggtgcctaatggcatcttcaccacatagaagtcccaggaagaaagactgatgattttgcatgggagagaagcccagacaagcaccagggaaggaaagaaccgaggaaagctgcatttggcttggctgtttctcttcctccttgcctgacttaacagccactgtctgcaaaaggacacatctgtgtgaacccacttgcatgaggagcctagaagagacaaattcatagagacagaaagtagaacagaagttggcagggcctggcaggatggggaatacagagttattgcttgatggacacagattttctgtctggttgatgaaaaagttctggagagagattgtagtgatagttgcacaatgctgtaaatgtacttaatgccactgaattgtacactgaaaaatggttatgataatacattttgttatattttaccacaaatatttatgtgtatggtgtatgtatatatgtatatattatttatatattttatatatacatatatatgtaaaaaatataaatgtattatcatgatgtaatacttctttggagtaaaagcccaggtgaaagcaatcagctgacagggcccctacatctggaaattcttcacttgaatttttgttcatttctctttttaatttttatttatttatttttgagatggagtctcactctgtcacccaggctggagtgcagtggcatgatctcggctcagtgcaacctctacctcccaggttcaagcaattcctgtgcctcagcctcccaactagctaggattacaggcatgcaccaccacacccagctaatttttgtatttgtagtagagatggggtttcaccatgttggccaggctggtctcgaactcctgaccacaggtgatctgcctgccttggtctcccaaagtgctgggattacaggtgtgagccaccacacccagcctttttgcttttaattttttttttttgagacaggttcttgctctgttgcccagcctgagtgcagtggcatgatcatgactcactgcagcctcaacctcccaggctcaggtgatcctcccacctcagcctccctaataattgggactacaggcaaacagcaccacacccagctaaattttttaagttatttgtagagatgagggtttccctatgtttctcaggctggtcttgaactcctgggctcaaacaatcctcccaccttggcctcccagagtgctgggattacaggcatgaaccactacgcctggctctatgaatgttaataaatctttgccaggcatggtggctcacacctgtaatccaagcactttgggaggtggaggtgggtggatctcttgaggtcaggagttccagaccagcctggccaacatggtgaaactccacctctactaaaatacaaaaattagctgggcatggtggcagatgcctgtaatcccagctacttggtaggctgaggcaggagaatcgcttgaacccgggaggcagaggttgcagtgagccaggatagtgccactacactccagcctgagcaacagagcaagactctgtctcaaaataatcaaataaataaataaatcttaatttatttttctttccatttaggggtgcccagggcccagcttttgggttgttgcagctccttattcagaaggaagagtagttctgccattttactctctgatccagctggtgttaagtagctgggggtttgtggtggcatagtcagagatgtggccctaaaaggga

SEQ ID NO: 917284 - DNA, 4001 bp, Homo sapiens
aataatcgttccatattagaaataagaacgtagatttggtaacaagggaaactattcaaatttgccagtgctattatttgtgtgccttcagatgggtggggaaaaaatgtgtcagcaagcaatgcagcctttctttagttttttacttatcctctaaagatcatgcaaaaaaaaaaaaaaaccaacaaacgtttactcttggatgtttaaccttggctccgacagaatgttccttgtatcaaaaaacaagaactcagccaacaatgtttttgttgttaaacggttgcatgaagactatgtccagtcaaatctaacccctcaccccgctccaaggctatgaccctcaattttcatcaaagttcctaccatctcccactttgtaaaggccctaaagaagttaatgaagaaggcaaagttcctgtcctctgctgtcactcagtaatgagcagtttcatgtggcagtgcagaaactggggtttgagaaacagaggtgtcctgacactctggaccggtaatcacgaaaaccccagcactgccataaagatgctgtcttaactcggctccaaacaaagttctgtcggcggccggcagtgtttcagtgggcagcaatgtggtgataccttcacaggatactttataggcttcaaaacacttccctccctccaggccattaaccttctaaaccacacagtggggtatggctggagtattctccccctgaggcaagggaactgaagttcaagaaggtttcttgacttgccaagatctccccgctactttggctttaagaaactgggtctaagaaactcaagcttacggattctctgttctctgcgcgctcccaccacatcttcaattcaaagatccttccaaattccacagaaataacccagtaagggcagctcttgagtataccttttcctttgagtcttaattttcactcaaggcgaaataacccctcctctgaaagttctccacgttttccaagcggacagcatcaagttcgcaggggatctgtatcagtctcagcaggtggacttcacaaggggcgggttgggggaacgcccgcctgaccgtgtccggcgtggcggggggttgggggcgagaagagtgggggttgctatgtagggcgcccggaccaaataacacgccgcgatttcacactccagcctagctcagttatgtagccaaatgtttttctgtcaccacatatccacgactttggctgtgttgaggacgaaaacagagaaaagacactgatcccagaacactgcgcctgggaggacgcagggcgcaggctttgtagtctctgagaatcgccctgcgtaaaagtgtcctgaggtcccgcttctgcgcccttcccggcccaagccgaacacagggtcaacctcactctacaaagtcaaccggatagaaatccgccaccccgcgaggagccccttcctactgtctccaaggggtccccgacactgctctgagcgaccctaagatacctgggtgtctctgctgggcacaaacctctctggcgccacttccaccatccaacctctcccgcggccctcccttccctttctccaaccaccctctccaccccgcgccgctcccatctcgcccccggccccgccagcctcacccagccaaacccgagcggtggaacgctgcgctgggtaaacgccgcgcgtcgggtcctccctcgcgcggctccgggcagcgttccgtggccaccgcgctcccggtaacagcagaaaggggagggaggagagctaccgaggaggggacagcgacgccccgacgccgccacgccccccgcctcccacacgggggccaccgtagctctctagaagctcctcagggaagcaaagcgccgttcccgccgcaggcaccgagacgtcgcccagatggaagaaactctggagatgcgcgctcctacaccggtgccgcggcgcccgggcccagcaccacgcacctatgcgcgcctctgccggtcctcctagaaatcccgccctgcctacccgcggcgcgagacgcaacgacgctttcaggggtcaaagacctggcagaaatgacttcccaaccccagatgcccccagcagcagtatttagcagtcatacaattgcctgaaatgaagaatgagtaatctggatgagtcggccctgaaatcgacctgcaacttacccggaacgtgagctgtctctctctgacctctgctggctgcttcacctggagtctgagtccgactcatgtagcacttcactgtccgcgttagtttagccttcactgtcagcaactcgtcaccttgtcctcttgcagcgaaggtttggaatcccatcacgggtgtgcagtggttagtcctgagatcatggtggtgctaggagaacctgccaaccaatacagaaagttgtcacgaatagaaacctaagctctggccgggtgcggtggttcaagcctgtgatcccagcacctactttgggaggccaagtcggatggatcacttgaggttaggagttcgagaccagcctggccaacatggtgaaagcctgtctctactaaaaatataaaaattagccgagcgtggtggcgggtgcctgttatgccggctactagggaggctgaagcaggagcaacccgggaggcggaggttgcagtaagccgagatcgcgccattgcactccagcctgggcgacagagcaagactgtcaaaaaaaaaaaaaaaaaaaaacagaaaggagaagaagggaaggagggagggagggaggaaggcaggcaggcaggcaggaaggaacccaagggagggagggagggaagaaggaaggaaggaaggaaggaacctaagccaaggaaggaaggaaggaaggaaagcaaagaaaggaaggaaggaagggcgaaggaaggaaggaatctaagccaaggaaggaaggaacctaagcccaggaaggaaggaaagaaggaaggaaggaaggtagaaggaaggaaggaaccaaagccaaggaaggaaggaaggaaagaaaagtagaaaggaaggaaggaaggaaggaacctaagtcccagaaggaagggagggagggatggaggaaggaaggaagctaagctctctctcgcggtgccctgacttctcccggggaaggacctctgagctgcctgcactggtaatgacacgtaggtgaaccggtcctggctttcttagaagattccctgctgcataaaaccaaatcccgttgcactttcctgggttccttggctttgtcctttgtcatttccaggatggagcagaggcactggtaatttggcttttacttgcctggtacctctggcatggagtggctaaacggtggcaccatgtactagttgctgccatcttcagataaaatattgaatcaatatgacaaaagtcagatgaatactagctgccaattaccctgcttcccttgggggcagcctgtttggagcatagaccagctttgacctgcaagaactctggatatttggaatatttaaaattccaaatacagtatcccaggaattcaggtcagctgaaggccgattgggaagggcttaccttaaatgaatcagaaagaaaaaggtgtgggtgtgtgctaacattttttgagtatcggctatgtgccaggtactttttcttattattttaagcaagtctgtgaacatccctgagaataacaaatcatttgttcccatttcgcaagggggaaatctatgacttaggttcaaataacttgcccaaggtcacagagctaataggtagcacagttaggctttgaaggcaggtgtatctgacaccaaaccctatgtccaatttccaccatactaccagcaagatggaagaataatgaaataaagggaccaggcaagagccagtttcaggaatacttaaagggaaagaggagtcaggaggaacttagagaaagaatcttgaaacaagaggaaatgtcatgccaggtaaatcagtgagtcaaaaaccagaaacagctgtactagttggcag

SEQ ID NO: 917285 - DNA, 4001 bp, Homo sapiens
cagctcagagcactaagtcacctcaataacccagtactgctctgcccatattatctatggctttaattaaaagtgtttagaaatggttttagtactgactttgttcagaatatgtggctgaattctaaatttaaaaataagtcttccagtaggcccacaagtgatcagaattgggtaccaaaagttgtacatttaaacacttttattaaaatgtttatacatgtacataaaatattttattgtgatacaaaactctgtacaaagtgtactaacaactgacatgattataaatgaatccccaaaacaatggtgcctaaatttgaacactaaggagaaaaaaggaggaagaaatacttgagacaactttaccatggcatagcaatatttcctgctgtcaaaattaataaaatattttgcacaagggtgttacaattaattttatcaggctaacaatgtcataagtgaggaaccctttcaactgtagagagcactgtggaaatatagatgtggtagaacaatctatatcaccctgcagttgtttctgtgtttctatgactagctttgtttgagattgtataaagcggtcttcacaccccggtgaataagattggtggatgcagttccctgccctgccgcagaagggacctccaaacacagtttaaatctgactctccgggagttgtgttttgacactttcacaacagtgtgaacttgtgccacaagcaagacagatcttattggattaacactgaactcgtgacagctccagagagtaatgctatctgtgcggcttaagaacaaacgtgtttctttcatccaccctgctcattctcttcctgcagttactcctagcaaatcctccccgccctcacctctaggaattcctctacacccagagaaaggagtttctttcctcactgcggaaacctatcaccgcttcctttccacagatggactccaaggggcactcactcgtgtgcccactaagggatttctctcctaattccacgccttccaagggaagtcagaactgctcagtttcccccggtgaccacatacacgtgtccaagtgaagcctcgtctgggggagactcagttcccacacttccccctggcccctgtggaggccctctgtctcccctgcgtggccctccgcctggcccctcgcactcaccaggaggaggttgtgcgccaccaggtacccgagccgcgggctgccccggatgccgggggccaggcgcccggtggcgtagccgtgccaggccaccacgtaggggttgtcgatggtgatccagtacttgacctgaccgccgaagtggcggaagcagagctccgcgtaatccctgaagtggtcggccagggcgcggttggcccagccgccgtaggcgtcctgcaggcgctggggcaggtcccagtggtacagggtgaccacgggctgcacgcccagctcccgcagccgctccagcaggcgccggtagtagcgcagcccctcgcggttggggacgcccgcgctgccattggggagcactcgcgcccacgagatggagaagcggtagtgagtgaccccgagctcgcgcagcgcctccgtgtcgcggaagacgttgttgtagctgtcgctggctacgtccccggtggcgggctgcagcggcgacggggcgcccaacggcagactggcgttccgggagtctcccgggggtgccagggggtggtgggtgaacgtatcccagatggacgcacccttgccgtgctgctgccagccgccctcggtctggtaggcggcgctgcccacggcccagaggaagccgtcggggaaggtgccctggaagaggcccgcggcctcgggggcaggaggccgcgagaaacgggcccaggtctgcgcgccgtcgcccggctccgcacgcaggcggcggccgcccaggcccagcagcaccagcagcagcgacagcgacggcggcggcggccgcgggcggcgcggcggggcgctggcgggcatgctgcgcgggagccaggctccggggccccgcgccgcgcccctttatgcccgcgccccgccgcgcccgcccgcccaccgccggcgcgcccacccccgctccccggcgggctccgctggcaataattacctgcgagccgggactgcctccgccctggcactgggggcgggggcaggggcgccgagggcgaggggtgcccgggaggggcgcggcagcgggcaaggtgcggcaggcgtcgcccgcggacgtcggagaaaggcacctgtttctcccagctcccgggagccgtgcaggacgtttcgtggacgctcaggttcattctctttgcctgccgcgcgtcctctgagagcagccctggagcggcttcgtcggggagaaaaggcgccgaccaactttccccgacttgggggcgggatcctgccgggccctagcggagcgcgccgctggggaagcacctgctctcacttttctcccactcggaggcccaaagaagctccggctggacattgctggagccaattagggactggccgaaatcctagagggactgccaggtgggacagccgagggggaacttcgccgtgcgctgaaagggattcccccttaggtgagatgctcgcggggagacgcgcccacccgcgcccctctttcgaggaagacaaagtagatttatgggttgcgttgggactggggttttgctctcccttttactgttaccttttaataatttcaaaccagcactctatctttgattagatctctcagaataccctggtgaacttcaaatcacagtcgttgattgttctcctgaaaaaccaaacaccaagtttccaattttgagtaaatctcattcacctttattatcctttggcatctgtgttacctttcggctctgacttagcaggtaatctgtgcaaagttgtgcgcacaggtctgctggagcgggaggtccctgggtcgcacatttgccatctgagctgtggagggaaaggggagggagaatttagccggaacacccattcccatcctctacaatacaatggagccatgacgtttttcctgttgccaaagagcccttttgacagaagttgcagagccacagtgtccatttggatgtgggtagataggattgtggctaaccgaaatacagttggtggagactgagaaggtctaggctccacctttgtgatttggggcaggaaacctctgtaagcctaagtttcctcctctataaaataaggatgtcctgtctgccctgccgcctcagaggcttgtgaagtccagtgaaaaactgcgcaaaggtgactcaaagacagaaagcccagacaagtgaaggatcttgctaatatccctacctccctacccagtaagtcgtgccttagtttcctcacccgtacacgtgtgttgaatgaccaagatcctcacagaggtgcatccattctcccccagtgatctatcttccctgcattatttaatacaaatttaaaggcaataacattttaaatgttgcagatgaaggtgcttttattaattcccctgaaatataagcacaaatttattccagtattttatgaaatattcccaactccagccagcatatattaccatgattagtaagattaagtcttcagattgaaacagagttactgccattctgttaaatatagcatttacattttttcaataaatacgaaatagcaaaccatgacacttcagcaattttaaaaaattacagcacacaacttcactgtcacgctgtcttccagctaaatttaaaaagctacgtctacatggagtatcacatttcccttctagaagtgaagattggagtgtctgttgggttgtagcttgttaagtttcaattagaaatgcttcatgggtctcatggaaaatcgcttaagctaagtattcatttattgatgtatggtctgtttgctcagggcagattttatctattgctatttttacttgaccagcagcattttttaaattttaaagcagtgattaaaa

SEQ ID NO: 917286 - DNA, 4001 bp, Homo sapiens
ctgcaacaataaagatataacttacccaactgaaacgtctgtccttcaacatcctatttccactatgcttctacagtttgaaattttctaacctaaaagtatactcctttatcggaaccaatttctatgtggtcttaaaaaatgcacacaacatgtgaatgaggtctgagaatagcacaagcaagcttttttccttgagggagggggggtccactgttttaaataaatgtcagttctaaaagcgtttcttagaagacggtatacacccactcctcaaagtgaccactcctattcccatcacaagctgcttcttgctaaaagccaccaaatttatttcaaagcatttacttatctaaacaactctatcgtccagtaagaaaagggcatggaggcgtctaggtggttttgcagaatgacgtgtatttgattggcagatgtctaccgaagtcactagatgcacacgcactaaatgtaaatagagttgctcgtctctccgatgttacagggaaacagagaatcttaacgctggtgtaaaataaaatatcagagtgctcgccgagaattccattagccagtggaattatctaaaacaatccatacagaacgacactttagccatctatacagttaaattagagtgctgacaatactaactacgcaaactgtttatccagattacacattccgttgtattaatactctttaactcaacacagtcagcttttatcagctgaaataagactattactattaaagtatgcaaaactcgaagcgcagggtgaagggggttgggaagctgcagggcatataacaaaggaattggtactttttccaagcatttgcctcaaatgcactgcgaaacaaaactgttgagtgcaccccacccttttccccaaagataaaagttttcaaagttcttgcagacagctcgctacccaacaaaagcaggactgattctccccgtaggggagcatctaacgtgaacaccaactaatgtcgcggaggtcaagtctgaaccctcagagtgagcttctgaggcaagaagtggctcccaggccggctctgcgggttcccggcccgggtggacgtacaaagttgccccttgtcaactccggccaggtcccccgtaattgaaaataacagccaccggccagcccctggctacttgcatggaccaggcactgtagcaagtgacagttacacatcattacgaccagagacaataatgaatgtagcaccaggagcactattcatgccagcagtgtcatctccgccttaaccccttcccctccactctctccagcgcgcacacacagcccacacggtcccggtgcggagctattcatccaccccgctcgaggccggggggccaactacttccacgagccccccctcccccccaagttcagccctggggttttatttcacatccttggcaactgtcaggcaaacactgcaaccaacaattccactaggggtagaaaaacacttgcttaattcacgttacttgataacttcttctggaaaaaaaaaattaggggaggtggggaagaaacctccttctttcttctccacgaatccgaccgacgctacttgctttgcaacagcatcgcccttccccggccccctcccgcttcccagcactttccccctttaagaacacagaccaaccaaaatgatttaacttgagcagatgacagaaggaaaataaaacacgttaagagaatacggtctgatttgggatggcaaaaaaaaaaaaaaaagaggagggggttgtttattttgataagaaacggaatcggcacagacctgaacagaagctgcagagcaggagaaattgttttctttccctcacacagagtccccctctctctctccctttctctctctcacacgcgcgcgcgcacacacacacacacactcgcacacacacggcgtcacccgcgcacacgcacacgcagagcctctcagcggctctctgcagttctcaggaaatgaatggggggcaacccggggaactgttgtacttgcaaatgacttacccggatcacatgatgcgctaaatgtagggtgggccggtgggtggaggctgccgagttgcgagccccggtctagtgtggggagcctcgccaggcccgcatcgaattaccccggggcccagccgagggggttgcaggacgccgcttctcctccctcgcagcccgcagctcaggaaaccggagaggcgcttggggtggggtggggtggggtgctgtgagggggggggccgaaaacaagaaacccccaaacaaaagagctccgggtcctcctccccagaaacaaagccccgccgctgccggcgagccccggggtggggccgagggcgggggcggcggcggggaggggctcgctcagcaggcgctaagtcgctttattgccataaaatggggcccccgagccgctccgcccgaggattaggaggcgggctctgagtgtgatggttgaaatcccctgtgggaaactaacccctccccgctcgcagaggtagaaggcaacacccactgcccggccctcgcctccccgcccggaccgccgggctgggtccgcggcgcctccaccccgccccaccccgccccacccctgcccccgccctccggccccgggcctcggcagcgcttccctttcacctgcaccactttgctgcggcaccccaaataacccacacatggccctgggagctcggggagtcgtcggccgagggggcccgcgggggcttgcggcgggagggacccctggagagcaactcgctgggcaaggactcgcgccgagccgcgagaaagtctcctcttttgtgtcagagcgcgccagacaggcttaggagaattcggggacccaaaaagcgtgcagcccgcttgggcccccacccctcgccgcacccgcccgggtgggggcgcgcagtggagggagggggctgtcgcccgggtcgtccccgcggctcgcccgccagcgaacttggaaaggtgtgggcggagccggccgggactgtggggcagctcgcggggaccgcccctgggcgccgggcatcgcccgcgccgggcaacaatggggtcaggcaggggcagccccgcgggcggtgccccccgcgcgccggtggggcgggcggagggccgggcgcggcaggcaggggagtcattgtttgggttccggagcgacgcacgttgcgggcgaagcgggggcgccccttttccctgcgcttcaccttggcgggatgaatgggggcgaggcggagatgcgcgcctggcctcgccaccccagcgaaggggcccctgcctgcgccagttctgtgggaaagcacgcaaacttggaggactggggcagaggaagcgggatctgcagacccccgcggggcccgggggcggcggggaagggagtccagctccactgccccacgcccagagcggagccccaagaagcggacggcccggagccgagtccttgacgctctccccggcagcccctccctccccgcctccgcgccccggggagcggatccgcgggattgtggggcgggagagggaggaggcggccgggcggccctgcagttcccgcggcggctcggagggcgcggggtcagcgccgagccggagggtcggcgggggcggggagcagacggggcggaagcggccgggcgggcggggcgcgcggcggacggaggcgggaggctgtgggcccgcctcctcaccatcctaggtgagcgcggcgctccgggcacgacagtattcccctgccccgcgcccccggcccggcccgccccgcgtgggaaatcgccagggctgtgggaaggccgggaaggggaagtttgtgtgcagagagaaagctttgctgtactgtggcgtggagtggggtgggaagagaaacaagggagaggccgagaaacaggaaatgagaacgaaggcacgaatgtgagccagggccagctgggctccccatcggtgtggcggtttccagccacttcaggcgcg

SEQ ID NO: 917287 - DNA, 4001 bp, Homo sapiens
catgctttcatttacaaaagctttttcattgcaaaaaaaaaaccatacaactaagtttttaatatttttagtcttgttaatttttcatatttccacttttcataatatagatatgaagctagcgttggggttcttatagtaactgaatatattcctttttgctccaatacagtagcaggttttaaaattccattttgggcataaagattcatgaaatagggctgccacttttaagtaatagtttctctgaaatgccctgctctgcagtctcacagaaaataactagcttagcactgtacaatagtacggaaattggaaagtaatccttttcggagacatttgccatgtgattctgaacatataaagaacatgttcgaccaagtttccttgctgttgcttttaacataaatgctacagctgcaaacctgtttcaccgacttagtaaaaagggttaaaacttgataaatatttttcaaatgttccaggttctacattggcttgaagccagacagtgtgaatggacagatcctcaattactttgaactttctagttctttgcattccttcccgcttagtagtgctgtaccattagggaagataggagaaaacaaaaaacaaatgtcaggtttcagaaatcaattagtggcctggcagtggtgtgttaactgaactgtgccaaaacaggggattctgagggaatgaaataaaaatgttgagtagtcaagttaggtaggagggtaagcatagaagcagtgtgcatgcttaagtccttagtcactgggcaacacagatttagtcttagaataaaccataagtgtcactatctttacgggaataaatacggatgaatatgcgggggctgaacaggcattcaatgttgggggagggggtttgaaggaggcagtggaaaaaaatagataaatagcttctgaatgatgagatgagggaaatatgaagctatcactagggcaatgttcacacaacgacacggcaaaaggaatatctaaattcagttgtttggcaaatctaaattcagttgtttggcaaaaacgtcacagcttgaaattaagaggtatagagtatcacagccaacaaaactgtattcactttgagtagaaaaatattcatagaatatttatttctgccaaatcagtatcaaattgccaagtgatcttgggccacagaaaaaagaacaagaataaaaatgaaaaataaagctttatacgggagcacactcttctctagggtaagattatttaattaaagtgactttttggtagtcattgattgcacacccctgttagaatctgtatcagtgaaaacttaaaactattgtaattattgtcctctccaacatttcacatctgtagtctttgtattttttcattaatggcaaccacctaaagccacacatcagaaaaaaagtcattaaggaaatagcctgataaatagaagcttcaactgagattagttggaatttaaagcattttgactcaaaagattacgagacaagagagaagatgctctgttcattgcttttgtgatgaaaaaatatgcagtttaaataagactaaatacttctatttatattaattaaaattatgtcttaagacaacaatttaatattttatttttgtaatgtctcttgcctccagttcttaagaaattacattttatatttcagtttggatttttaaatgtgttcttcttaaaatatttcataaaactccctttatgcacttattcctaagggtactataatttatctagcctaattttaaaactctaataatatccaaaaaaacaggagagttttaccttttggagagactgggattgctttttccaccttgttagtataataagtagacaaaagtgacataaatataaatgcctggaaccaagttataggccaagcgtattgtagcttaaactgcacagtatttaaattctgactcgaaacatgataggcaaggttaaaagaaaggtctgagctaaagtggttacaccaaacaatcttttagaacattagggaggtctcatcatcagcatcacaatgggcagtgttttgagccgattgctgttcatgttatgacaaaagctgtaatgtaccaggctgtggggaacaccctgtgaatgctcaaatgaaccgtgcatgggtcacacggaaatactcttttagatgttgatttatagatgaagtgtgtaaaagtagtgctaaaagcaatgtgagttcttcatgccttaacttccatacactgttgatggttgtgtaaactttaaaactttggggaaggacaatttgacaataagtatgaaaaaggctaaaatgtaaataactttgaaaatgatagataattcctcttctaggaaaggtgtatgtgtatatatatacacacacacacatatatatacacatatatatatatatatacacacacacatatatctttatatataaaattgggccaggcatggtggctcacacctataatcccagccctttgggagactaagatgggaggattgcttgaggccaggagctggagaccagcttgagcaacatagtgagaccctatctctacaaaaatgtttaatattaaccaggcatggtgatgtatgccggtagtcccagctacttggaaggctgaggcaggaggattacttgagcccaggagttcaaggttactgtgagctatgatcacaccactgcactccagcctgggtgacagagcaagaccctgtctcaaataataataattaatttaaattaaaataaaattggaaataacctaggttaggtgtccaacattaggggagtagttaagcaatacatccataccatggctactgttatgccaccaaaaagttgagtagttggaaaaaaaggggaaaaattcttattattaaggaacatttagtgacatgggaaaacattcatgctatgtatagtcaaagaaaggggttttataaatatgtacccacaaagatgaaaagaaaataccaaacatggatgtattttggtggccctcgttagatggttatattataggttactgctgggcgcggtggctcacgcctgtaatcccaacactttgggaggccaacacgggtagatcacctgaggtcaagagttcgagaccagcctggccaacatggggaaaccctgtccctactaaaagtaaaaaaattagccgggcatggtgacgtgcgcctgtaatcccagctactcaggcgcctgagacaggagaatcacttgagcccgggaggcagaggttgcggtgagctgagattgcaccactgcattccatcctgggtgacagagcaagactccatctcaaaaaaaaaaaaaaaaaaattatgggtcattattcacttctggatacttttcagtattttctagattttctacaattgctatgtattccatttgtaatcagaataaatagtttaaatgaaaacataaataaatattacctttctacagctaagggttagttggaactgaagtagttgatgatcaaatgattttccatttgaagccagtaaagtgtacctacaacttgccaatactctgtactgggaaaacatgtaaactttcttaaccaagctgctagattttcaggaatttcactgcagaatgaagaagctgaagagagattacaaaggggagtttgaagttcaaaagggataatatagggaatgtctgaaatataaatatgctttaattcatttcctaagtgatcagcaagacttcctctacacttatttttactctgttattttgggtatctcattttactttgttgctctgttttctcatattaaataaaataggctgcttacactgatttgacaaaatgcatagactcttaaaaccaggtaaagtttatatgcatctttaaagaggtgtttgtgtttgggtttttaaattctaaaatactcacatagaagatttggcatgaaatagtttcaaatgggatgttatctttctttctctc

SEQ ID NO: 917288 - DNA, 4001 bp, Homo sapiens
aaggaaatttcgaaagataagaaaaccaactagatggaatggcgcatatattagctgtggcaccttaacaggtaaataagacagtcattttctgctactacttcatttcaaatgcgtttcatctcggaccttggtgtggatgcggacggggtttcccggatagacatgatttaaaaataaaaattaacgctctcatcatgtgagtcacatctctgacaaacgccactgccctctcacagcaagaccctggcagaccccacggagtaggcgctgggtagcaaatatacgacacgccaaagagctactaaatgaagtgtcttgaaataaactgaactaaaccctttcgtgcactgcgctcccgcggcggttagtggtttctgattttagctcttccagctgtttgcatgtgggtatgtttccaatttttttttccttgggacaggctaaaagtcccgggaagttttttctgggctatatgactccctgcgtgggcgaaagaaacaggcggttgctctaattcggctgctgggcaagtgtaaaagccaactgccagctttcaacgcggctccgggaggaaatttacgtgcacacgaagaaaacaacacccccggtcttttttttttttttttttttttaaggaaaaataagcgctccgacacaaccttagctttcctaactctcattttccaaacgcggcccgcaatcgcttctaaagcaggttgagccaccgggtatgaaaccttggggaacctctccccagcaccccaatttgcgtttctacttaacccgagacgatggggatgggggggagggctccaatgccttggcattggagagcggtacaggcgaaggcgtaatttaagtaaaactgagcgtaaggtacaaggtttcgtccctcaagtgtaagaaaaacaactaaggtgcgcgtgagcacccagttccctccctcttacctctcccaggccgacccgccggggcagattcccctccatccttcccacccccggcccccccccccatttactctcagcgaaacgcggggccccggccaggcgtgcagggcggggctgcccacccagcaccggctccggtgcgccccgacgcacgccccagcctggagcggcccctgtcgcccgcgagtcgcagcaacgggacacgcccgagcccgggagtgctgcggtgggaggggagcggctcttcctacctggaccaggtcctctggaggcagccgcgggccggtggcgggcggctgggccggctgcggggcctgcgcgggcgcgggctgcgcctgcgggcggtggtgcgcgtgcttcagctcctcgccggggaagagcgccgcgtcgcgggccggattcgcggcgcccagcaccggcttgagctgcgcgaacaccggctcgtcctgcggcgccggcggctggggcacgggtcccaggcgggcgctcatgctcagcacccttgtagccatgggcactcgggggcgcagctccaggcgcgggtcgggcgcacttcccacctcgcccacgctggcttgggtcggcgagctcagcgcggggctgccggcggaggaggggaggtttcgggtggactcctcagacagcggcaggcagttttcgaaggcgcgcacgaaaagcaaaactcttccgctcttccacacgtaaacgccaacgtcctccgggcggccactttctcccgccccgccccaccgtgctctcaggctctccggagcccgctcccgccaccgccgacctccgcgagagaaccgcgagcgcacgtacctgccccgcgactactgacacttgacgcccgcctctatttcacccaactccgggggggcggggcccgatcgcctgattggcagcgccgccgcgaatcccgaggccccgaggccggccaggcctgagcggccagcctatgagcagggagagaggcagccagggccccgcctccgtcggcccgaccgcacccctctcgggccacgagcttcgcgcgcagggcggccgcgcagtttgtacacaacttctctgacagattgggctggcggagccgggggcggagggaagtagcggagcgggtggaatctgggaagagggggaattagggtggagacgcggagggagatctcttcgcactgttctctgccaggattaggaagaaaaagagtattgcacgtcttaggtgttgtgcaaggacctgaaactcaaaagctgaaacccagaaggcagctaggtaggggcgctgaggcttttagagatttgtctaatgagtgtgtacttttaaatatccaaaatgtacttctctttagcagaaaactaggggcggtgtgataaacaaatttaaaacagctcttgtccctgtgtatctttagcagtgagtgtatccgtttaacaaggcaaattcagaatgcctgaataaaagatttgatggcaagcgttttttcagatccttgcataaaagcctgggtttttcccactccttcaggattttaattgctagacgttttcccacacatttctacttcccatccgtgtgtggggaggagggcttgggccatatgaattttgaagtttctaatatttaagccgtgttgattctagccgaagcatggaatctaatttaagcacgactagctcaaacgtgtatttaaatagacattacatctttgacttatttttgctagcactgtatgttcaaaaaatggactttaatatttacaaagcagaaacctagcacatttacctcacattgtggcaccttttcctacgaagagacaatcaaaaagccgcaaacatagacacagagcagctctgaaaactgggaatccaaatttgttggaaagtaatagccaaatatattaccatccatttactatgttgttataatgggagggtgaatttttgccagcaatcacctaaggaaaccacttcccttaatccttaatgttcttgtacatgattttatctggcttattgggaggacggaacaataaactgcaataaaaatgcctgtgatattactacaaatgtacatatgttgacacacaatataccattagacagttttacatataccacagcctattcatcacttcagagtaaaacagctttaaaaaaaagtcttggataaaaacgttcacttcaaagagtgtatctatcaaaggtatggatctcattttcaatgggtagaaaattaatatgcacataaagaaatgtatttattattagaaaatataaaattatgctgtaaactgggtttttctccttttccttctcttcctgttgacacatgattcatttttatagctgtgatcactgccttcagagaatggctgatgactactttcatgttatcaaagtattatttaataagtgcttttgcaagtttttctctaaccaagcagccccatgctgtccatcttcatctttaaaaagctgtcctgcttttctctaatgtaaaacctatcatgtaattaattagcttagaaacagattatagaattaggatgggatttaatgtaactcttttaaaaaattgagctttgaaagatttttagttacttaattctgataacatcaaacctaaatgtgatgtagataattcttaatagaacttttgtgctcttgtaactttaagctaaatctaacttagatttaatacattcggtagctgtatcttaatgtgcttttaaacctatctagacctttccttttgtctttttacgagagcttcagtggcccggtctttcaacctaagttttcactgcaataaaatccatgtattttactggaaatgcttctataatttcacaccactttttaacatgctttcatttacaaaagctttttcattgcaaaaaaaaaaccatacaactaagtttttaatatttttagtcttgttaatttttcatatttccacttttcataatatagatatgaagctagcgttggggttcttatagtaactgaatatattcctttttgctccaatacagtagcaggttttaa

SEQ ID NO: 917289 - DNA, 4001 bp, Homo sapiens
gaaataaatattgagctgtttaccaaggagacaaaatttcaatactgagccaacaaatcacaacagctaaatgcaaagggactccacgacagtttaactcaaagacttactctgaacaaggcaagagtgaacacaaagtaaaaggaccagaagagaagttgggacagagaataagacgactgcatttcaggagcaaaaagagaggtaaaataatgttgctgtccagtggcctcattttgtccacctcattactcctggaatagattcaaaccacagggaccttagataatatgctaagtcagttactaggccaatatatgagatgcattctgatgatgtgtaaagcaaaatttcatcttcagataatggaacgactgatataatttaatgacggtagatgacagaagaacaccataatctcaggaatatgagaactattccacttgaaggcttacaaaaatgcatgtaagttcaattggtggctacaactttgaaaacttccaaaaagaaaagtgaggtgtctgaaccaatagaaattaatgagcaaacttgtaatgaaattagaacttgagtaatcaaaaccagggtggcatctcttaacccacattttcaacctgaaacattttagacttagtagccacatgagcacacgcggtgaaatgagtggaaattgagagatgcttggaagccccgtggggacttactgtacctgtgtccacatccttcacctgttgcctggctagagttgtctggctccactttgagctcttgcagaaccagccctttttcgtgtggtccaggaaagtccatgcctggcaccacctcctcctctagtgactccacgtagaagagagtcctggctggctgctgagtgccctgcccaggagccccttgctgcagcctcgtggcaactggaagcagggtgccattcagcggattgaaggaagaggaggaagaggacggggaggacgatgaagaggaagaggaggaaggcttcttccagaaagtgctcacaccgcttctctcttggcttttgagcaggcgactctggctgggtccccagtgctcaaagctgccactgccgtcctgttgcaggcagcctccccccgccgggccgccggtggaaggagacgggtggctgaagagtttccagcggagtcgcagaatgtgcttcacatcgaagtcttttcgcccagagcctgacatgctttacgcacagaaggcaaaaggctggcagctcacgcaggagtaggctggtcagcaggtgggggaggacagcggggcccgggggcggaggaagaggcgggatgcgccctctgcacccctagagccagaagacgctaggtgggctgcgcgctctgccaggcgaaggctggagcgcagacggcaaagccgcgcgtttcagccgtggtcgggtccgcaggacctgggcgtggggacaccaccaggcaggagcagaggcaggactgggacgccaaaagctgagaatcctcgatgcccgcgcgagagccccgtgttatggcgaggtgggacaacccttaggctggagatgcgcgagggagggaggtctgagcgctccgaagctccggaggcggctgcagctggatacacctcactgggatgcgcttgtggcagagccttagtagggaaggtggtggcgttcttgtccttgcagctcagagttcagtgtctggagagcgcagagagaaagagccccaagtctcgaggaagcgtacccctcgccagatctcttggtgcacctgcgcccctgtccctggccttttcgaggatgccccgatagcctgccgggtggctctgagaaagtcaattgctttctgcaatgccagaagaggtggttttatatagtcagtttgtaaaagagaaaaatagatattctagcgcatatagggaggcaaaagaaaaagcccgcctgtgaagctgtcaaggtcctcacagtacaattttctctctgcctcagcgcctcctcctcccctgtaagtgacgcagatgtgcactggggcctatacggagagatggagggagggagggagggagggaaggcttcaatcttctttatgcaagtgagactgctgctcttattgtccccttgcgtgggtcttgtcaccttttttcaccctccttcctcgctacattactgtgtagcaatacaaggaaagaaaacaggcattatgcttttgcatcagtaaacaccacacatgaatcatggcagtgtaaacttaataggctgccatcagtttgcaggttgcaggttaatggcttgaattatttaatgaaccgcgtcttttaacctttagccttagtttctctgtagtgagacacagaagaaacggatgctggcgtcaaaatgtgacgatgccaccatcctgacacttacattgtgattctgctattaaggcacccaggcactgcttcactcctggggccagaggcgtacggtagaaatttgaagatgggcatctgaacacgggggacgggttttgcgaaatcagtgcatttggtgtgtagcctcggaatgaaagctgttatcagtgtaaatcaagaatggaataaaatgataaaagagaatttcaaggtataaccttctagtacataaatcattgtatactatgcatggaagagtttaggcaataaatgagaatagccgaaggctacttactatcttgcaaataggcgtttggagaagatgtgttttccccttatatctatacttagaatggtgaggattgcgatcactttcagtacatgactacttggaatgttttaacctttcctttaatgagccattaagatagaacccagtagtctttgttgaaggcaaagggaccagaaatgcaatgtgttccctaacttaaccaagaatatggttgttgtccattcatgaaattcacagtttcagtaacccccaacagagcataggaatcaaccactgaagtgcagttaggctactgctcagttacccccaaggttgagctgtaaacgtaaccagaaaccaaagctaaatttggagtccttaggcaaagttggacgctttaataaaataagaaattaagtgcacaaaagacctatttttaggggaataaaaatcactatagtgcttttaaaatattgatttatgccacaacagctggactgcaatcccttgtgccttgatttttctctcagtattcagtgattttttgtttgttttttgtttattaagcaaaaaaccctttaaagccaacaatggtgacagatcatttttatccaacaatggaatcaagtaagcatttcccttagggaagaaaatagtttatgaaattacacatcacaaacaggacagaggaaactttccatcagaaataatgttgaaagttgaagtgcatgtaattaatttatatagaaattagtgcttcatggattatctcacttgatttatttaaaataatataaaataacataagtcaagtctctgtatctatatttttcattcaccattcacaaactgtaatataaaatttatttgttattctaaaatttaattttgcagttcctttttctctgcaatactaataagaatattccacagttaaaagttatatgtttaaaggacaatattttatatgacccaaaggagatataacattaatttgtggtataaaggaacatgaattaaaaatattgtcacatttagcagatggtgaataaagcctatttgttagtcttgtagtaacatttagtatgtttaaagcactgccagagccaattatgtaaatataggtacctttctatatttgtcaatcttaatacaatatataagtttgaaaaaatcactcttcttgggaatatatttaaataaaattcaactttattatcaaatgaaaatatttcgaatttaagaattaaattacgcatgaagttatgttaaactgaaatgactgacaaagatgattatattattttcacttgattgttaccatactacagtgttgtagaaaaggaag

SEQ ID NO: 917290 - DNA, 4001 bp, Homo sapiens
gggaaaagttcaaaattaacacttgtcatcaagtggaccaataacaggaggcagttccaaaatttcttgttcctattcccaagttttactttcgcttagatgtatttcttacaaagggtatttaaccatgaccaggaaagaatatatgatctttatttgactcatttaaatgggaattccacggatatctccctaggttctttcctactagtatttaattttgtagctctgaaaaacggcctgagtttgtctgtttctctacaaaatagaacactgaatggtatatttaccccacaaccttccttaagacaggataaaacacacctcttaatcacactagcttatcaaaaattacaaaactgcaaatcatgtcgcctagtattagcaaagaaggctgcggccttaaaaccattttccccctaacaaatccaaaggtcacggtcccagtgaagtttgtgcattatacttactgttttcagtagctgcagagagacctctagcgctgcctcaataagccgagtttgcaaatagtacctgctaatgtcaccttaatgagacaatggcaacatgctgagtagcaactaactgagtgaccgcgatgaatgtttagttttgcaaccacttggaaattctactagcttggagcaagaggtatgtaagagaattatgaacctgtgtatccaatttattttagtaaaacgtgtcaaagaaattatcaccctatgcacaccccactccaagaaaggctaagaaaacaagtcctatgagcggaggtcggagcaacctcttttccgaagcctgaacacaatagatggcaaactattgtccaccttcagctcgctccaaatgccagcagttgcaggagtatgagctgcaacagctcggcacgactagtccaaagacgagcactggaatataagaaaatggtcctggcgcatcctaccctcccccatcgatcaccctcaaacaagtcagttacccggctggtccccacccccctctgcgggccgccaccgcccgcctgggcccggctcgcagaaggtaggagcccggaccggcagagccgaggctccatgtgagccgcgcgggaggcgcagagggggctgcaccggacggaaggttgcaccggtggcgggcgcaagcagcggccgccccctcggctgtgcggtcggagggcccgggcggcagcatccccgttcatccgggcggccctggcccgcggaccccgcctcagctccacatcccctcctcgccgacaccaggccgcgcccgcgtgacggggccgaaaacgccggcatttcccggtcgccgcgccggcagctccggggggtgactgcagcccggccggcgtctcgccgcccgctccgcccagcccggggccgcggtgacgggaggcggcggccaactccggccgaccacaagccgacgagaaccagcccggcgccggccccccgcccctccccgcgtcgccgggccggcgcggccaggcgggcccagaccgcggaagcacactcacttccacatcgcggcccttgttcttgaagctcttgatgcggtggttctccaagctggggttctcggccatggctgcgcgcggctccggcggcggctactcctgcggctgcggcggcggcggcggcgaatcttggagcgggagggggaggagggggagagcgggaggggggaggggagagaagagcacgttctgtgacgcctccgagcgcgaggtggcagtagcgccgggggaggcgcgggccgactgccgggccgggtggggcgggaacggtgctgagagcggcgcgcggccgcggaggctggcgacacgtgaccgggggcggtgaccggcttgggcgttcgccgggctatacgtgcccgttggttctcgggatgaccctgccctcttcccctgcaagggctctccacaacccctcggtgctgcaagttttgtgccagaaatggagccggacctggcgacttttactgcccctcaggcgcggggcggcggtcgtcaactacagttcccatcatgccacgatccgcctggagtaattctccacgcctagtgagaacgaggagaatgccgggacccttccgcgcgcggctctttgcgcgccgcgctcatgttgctgggcacaaagctccgcccccacaaggccgcctctgggcggggaagagcgggggagcgtccctggcaccttgcgccctatcaggaggaagagggcgggccttcctgggagcgcacctcgctgcctgtagctagaagatcagaaaaggaacaaccgcgagtgctttgcagtctcgcttttttgggggtcttctcaaatagccaccttcattcgctcttcccatgctctgcttcagttttataaatagcatttctacctgacatgtacatgtgtatgtatgtgatacgagtgtttatatgcgttacctaggtgcccgcgcggaaattcagctcaatgagagcaggtactttggttgaattactgctgaatctctagtgtcaaaacaatgcctaccacgtcgtagatacgcaatacttgttgaactggcgctttagtgtcgcccagtttcttcatcatccttccaagcccggttctgcaaccttcactctggcagtccctgtatttacatgccccccaacacttcttgttctaccaccacacagaatcttagccttcaggcagcagcccagccctggtccgcagactctcctgtgtagcactcccactccctctgggggcatcgaaagaatgaaagagggaaatttggatggattacactgataaagagctgctttcggccgggtgtggtggctcacgcctgtaatcccagcactttgggaggccgaggagggcagatcacaaggtcaagagaccgagaccagtctggccaaccatggcccgcatggtgaaaccccttctttactaaatatacaaaaattagctgggcgtggtggcgcatgcctggaggctgaggcaggagaatcgcttgaacccggtaggcggaggttgcagcgagccgagatggcgccactgcactccagcctggcgacagagggagactctgtctcaaacaaaacaacaaaaacaacaacaacaaaaacaaaaagctactttctggagcaggtgggcttcatttgcttgtatgttaattttcagaatctatggtagacatgagcaggtatgtaatgttgtagtacttataattgaactgaggtcaaaagttggtaggactataccatgaagagatcaaaaaggacaatctttaaagcgaaagggccttggctgggcgcggtggctcatgcctgtaatcccagcactttgggaggtcgaggtgggtggatcacaaggtcaggaggtcgagaccagcctggccaacatggtgaaaccccacctctactaaaaaaaatacaaaaattagacgggcatatggcgcatacctgtaatctcagctacttgggagcctgaggcaggagaattgcttgaacctgggaggcggaggttgcagtgagctgagatcgtgtcactgcactccagcctaggcgacagagtgagactccatccccaaaaaataaaaataaaaaattcaaacaacccaacaaaaacatgcaaaggacactgatcacagaaaaagaataaatatatgaggagatacagaaaaaaaaaaaaaaaaaaaagcgaaagggccttaaagaacctgaggcccagaagtcaggaattcagaagcctttggtggccaagctatgtccaggggcattcgtcttgtgagtggtggggtgtggcctattgataaacacaggcttcagatcctctggtcatactggactgtggcccagtgttgccagaagattccacttttcaaggaaaaccaaaaaggtagattctttttctctttatttttaaatgttaattcacattttgttaatggacttaagcatttcagtcacttcagaatatcaggtcctcagtttgcaacacctgatcttagtctaaccactc

SEQ ID NO: 917291 - DNA, 4001 bp, Homo sapiens
agatttttttcatcaattttctgtttaatggtatacaaagtggcagccatgctgggacagctaacaatctcaaattcttccaagagagctgataatccattgcttgtttctatttcacaattatcttgttctccatccctttcatagctgatgttactgcaacacattatacagagaaacttggccttggcagcatggtggtattggacagcattcaaagtcttcagtaatgtctgatggcagtttttttgagagttcaatttcaaaccaaaaagatcaatcaaaacagcttctgccatccttgaaagaatacttttatgccaaataaatcacctgcaaataaaaattagtgtaagaatataagattatataaatcttatagttacaacagaaatttgtggtagattaaaaacgaagtaattacactgattttaaaatgtaactaaaatagtaaatctaggcccctcccagaaaagccagtctactctgtcacaacagaaccatgacagtgaaagcaaagccatcttttaattcgttttgtgaaaatgctggtacatctttccagcagcacgacagttcctctgttttgtttacacagaacttttgagtaaggaattacttgtggagtttagacaaagtcctgtttttaaattgcagagtgtcaacctgtgtgatatatcattagtcctgacatgattgtcatattaggtctcatcctttcatatgcgggggcttaagtttacgaagctaaatggagctgcacgcgaaattcgcgttttaagatgataaaagctgagatggctaatagagttcccttcaggatttgcgcagtactccacacttagcaatgaccacaaaagctatagtgatttggatgagacaggcttcctctcaactttcttaattcattctccccgtgcagctttgctcacctccagcccagccctcccaccccaacctgcggggctccggtgaccccctttggtgacgccctttgccccaagaaggttttctcctgccgcttcccctaacctttgctccccatctctcggggctccctctgaggttcatttagccagttttgagtgggtgaccgtccccccttccctgttcattgtgaatttccgcccaacgtgtgtcgccgccaggtccctgttcctcctacccgcctcggctcacggggcgcaggctgtggctctgcacctgcccgggcacctccaccggcggctcacagcccattcgggacttcctgtcggacaacgcacaccagaggcgattcggtcctcgccttcccgctcttcaccttcggttgcacaccggtctacggcgacctctgtgacaatttgccgccccgtccctcgtcctgagcctcaacgaaattgggcagccgcgagcgggtcagctggagtcgtaagctcggcccagcgcgacgacacccgccccgcctcacctcgcccacctcgcccacctcgccccgcctcgcctcgccccgcctcgccccgcctcacctcgcccccctcgcccacctcgccccgcctcacctcacctacctcgccgcggccgcacagattccccgcctgataccgtcccaggatcccaggggaaacctgacggccaggttccctcgtgccagctgccgggaggcgggagggaggtaggccagggccgcctggcgtgcttggtgcgaacgcggcgggcccagcgcgagagctggggaatcccgggatgagccaagcgccgcgagcccgctgctgcctcagcagttccgggtctgggcggtccgcggagtcggcatcccgcagccccggcggcgttagaggaacaggaaccagagccgcgcgagggctctcgcccgggagccaggcgggttagcgggcaggagtgggcaggccgagtccggaaagggtcgcgaggaggcagctaggggccccttgaggagggatagggcggcggaacgacgggccctgggagcgggcgcagggcggcaggagctgcaggtctccagagggcacggggcggggaactaggggcccggttagaaagccgggcggcgggaacggcgggcaccgtgagggggcggcgggaatggtgggtcgcgtgaggccgggctgctggagcgacctcgggactaaaccgcagtctcccttctgctaatggaagccgtttcccaagcgagctgaagtccgcgtttccggtctctgagggacgcctcgctgacccagcagtgtggtcaggacgctgggtttcctcaccgcagcccagggccagtcccttgtcatgctagctcttggcagcttttcccatgcagggctcaagtcaggggccccctcgagatgttttagtgtttttttgttgttcatttgtttccagaaacaagctgttgtctctcctccaatgtctttgtgctgattcttgctgaccaacactcttccgagcgccttcacttgtgttgacaacacggatgtcctctatggccttttaaaatatgtgccactagcaggacttaagtaaaaggcgctcatccctaaaatcatgataaaggtgcagtttagcatccctgatctgtcctccaagaatataacgttcatttatttgaaaatagcagttaggacatggaaggccagtgtatggtaaagggaaaaaatatccgaccttccaagagtaagagaaatggtgcttcctggggaactggttatgatggaaggagaggtcccttttatcttcattgttgctcatttggtaggcgctaaagaacctttgtctcataatctcagatagctgggaatttggaagagccctctggggtaggcatgttcttgtgcttgactagagactgggagcactaacccagaatggaaacccacccttcaataaccctagcaccagttatgtcaaaattcatgttttctttggtcatttgttaaagagccccgagcggtagatggtacacccaatcagaaggtgcactctgccctgagtttgtttatgttaaatatcattagattggtgcaaaggtaattgcggtttttgccattgacaaagaccacaattacttttgcaccagcttaatacctcaagcaaaacagaggtcttttagttacaaaggttttaaacatttatctctgtttttacaatggtgggattcgtattctttcatgcaaaagtagtggcagtaaaaaaaaaatgaaaaagaaaatatttcaaaagaatgaagttgtcagggaagagagtttgttatattgtatttgcataccatttcctttcaccatctggtcctagtgtcatgtcctaacacttcctcatcccattttcactctatcctactccagtggttctcagtcttggctgcaaatcagaactgcaagtgcaactgaaaaaaaaaataattaatgtagagactctatcccaaatatacattgaatcagaatctctaggagttaggcctgagcatgttttgctttgcttttttgttttgttttaacctctatgtatgagttagatgcataattaagtttgaaaaaataaaaacaccctattcccaagccactcaaataaaagctgttctttggaggccacatgatttcattctttacatttgcagttcctctacttagcaaaataccctcctttttatatgcctaactgctactttttgttcaaggctcttcaagctcaaacataatcttccctgaatccccatccctcatcaagcaaaattaatagcttctttacattttgttcatatgaagaagccctctcatagatgtagtctgggcccctagccaagaaataagtggaaaaaatggttaaatattgaattgtacactttataaggatgtactttgtggtatgtaaattatatctaaaaaaggctttttttataagaaaaaaggtcagttaaaccacagaatcatgaaaaaatataacaaataccttaaactgtattctaacctaaaacaactgtgtgttcatttgcccatctattgagaagatccaagacc

SEQ ID NO: 917292 - DNA, 4001 bp, Homo sapiens
ttcagtgtcataaatctcattgcaaaggagggctagattatttgtctcatcatcaaatttttgtaaagcaaatttatttatttggggtggctttgaaggctttatcccttgacacccctgatactacagggccaaacatgacacctctgtgttgccactgatgctaatgagtaatcagcccacaacagtcaacaaaagaaaggaggaaaaaaagaggtgaactacctctgaagaaagactagttttccatgtacaaagtaaaaacaacagttagtggttaatatacctgggatcaaagaagaagtgataatagttaattttcctctcagtgctggcagacttctcaaaaatgtttctatttcattctgaattcctcttagttcttgagctgtgattacgtttatttcaatggactgtttaaaaagccctcccctaaaagtcacttgcaaatcttcaaattcaaaattgtaaacatcagtgaagagttgatcaataaaagctttcattaatgtcttcctgtgcctgggtacaattaccttaatgctgctcagatttttttcatcaattttctgtttaatggtatacaaagtggcagccatgctgggacagctaacaatctcaaattcttccaagagagctgataatccattgcttgtttctatttcacaattatcttgttctccatccctttcatagctgatgttactgcaacacattatacagagaaacttggccttggcagcatggtggtattggacagcattcaaagtcttcagtaatgtctgatggcagtttttttgagagttcaatttcaaaccaaaaagatcaatcaaaacagcttctgccatccttgaaagaatacttttatgccaaataaatcacctgcaaataaaaattagtgtaagaatataagattatataaatcttatagttacaacagaaatttgtggtagattaaaaacgaagtaattacactgattttaaaatgtaactaaaatagtaaatctaggcccctcccagaaaagccagtctactctgtcacaacagaaccatgacagtgaaagcaaagccatcttttaattcgttttgtgaaaatgctggtacatctttccagcagcacgacagttcctctgttttgtttacacagaacttttgagtaaggaattacttgtggagtttagacaaagtcctgtttttaaattgcagagtgtcaacctgtgtgatatatcattagtcctgacatgattgtcatattaggtctcatcctttcatatgcgggggcttaagtttacgaagctaaatggagctgcacgcgaaattcgcgttttaagatgataaaagctgagatggctaatagagttcccttcaggatttgcgcagtactccacacttagcaatgaccacaaaagctatagtgatttggatgagacaggcttcctctcaactttcttaattcattctccccgtgcagctttgctcacctccagcccagccctcccaccccaacctgcggggctccggtgaccccctttggtgacgccctttgccccaagaaggttttctcctgccgcttcccctaacctttgctccccatctctcggggctccctctgaggttcatttagccagttttgagtgggtgaccgtccccccttccctgttcattgtgaatttccgcccaacgtgtgtcgccgccaggtccctgttcctcctacccgcctcggctcacggggcgcaggctgtggctctgcacctgcccgggcacctccaccggcggctcacagcccattcgggacttcctgtcggacaacgcacaccagaggcgattcggtcctcgccttcccgctcttcaccttcggttgcacaccggtctacggcgacctctgtgacaatttgccgccccgtccctcgtcctgagcctcaacgaaattgggcagccgcgagcgggtcagctggagtcgtaagctcggcccagcgcgacgacacccgccccgcctcacctcgcccacctcgcccacctcgccccgcctcgcctcgccccgcctcgccccgcctcacctcgcccccctcgcccacctcgccccgcctcacctcacctacctcgccgcggccgcacagattccccgcctgataccgtcccaggatcccaggggaaacctgacggccaggttccctcgtgccagctgccgggaggcgggagggaggtaggccagggccgcctggcgtgcttggtgcgaacgcggcgggcccagcgcgagagctggggaatcccgggatgagccaagcgccgcgagcccgctgctgcctcagcagttccgggtctgggcggtccgcggagtcggcatcccgcagccccggcggcgttagaggaacaggaaccagagccgcgcgagggctctcgcccgggagccaggcgggttagcgggcaggagtgggcaggccgagtccggaaagggtcgcgaggaggcagctaggggccccttgaggagggatagggcggcggaacgacgggccctgggagcgggcgcagggcggcaggagctgcaggtctccagagggcacggggcggggaactaggggcccggttagaaagccgggcggcgggaacggcgggcaccgtgagggggcggcgggaatggtgggtcgcgtgaggccgggctgctggagcgacctcgggactaaaccgcagtctcccttctgctaatggaagccgtttcccaagcgagctgaagtccgcgtttccggtctctgagggacgcctcgctgacccagcagtgtggtcaggacgctgggtttcctcaccgcagcccagggccagtcccttgtcatgctagctcttggcagcttttcccatgcagggctcaagtcaggggccccctcgagatgttttagtgtttttttgttgttcatttgtttccagaaacaagctgttgtctctcctccaatgtctttgtgctgattcttgctgaccaacactcttccgagcgccttcacttgtgttgacaacacggatgtcctctatggccttttaaaatatgtgccactagcaggacttaagtaaaaggcgctcatccctaaaatcatgataaaggtgcagtttagcatccctgatctgtcctccaagaatataacgttcatttatttgaaaatagcagttaggacatggaaggccagtgtatggtaaagggaaaaaatatccgaccttccaagagtaagagaaatggtgcttcctggggaactggttatgatggaaggagaggtcccttttatcttcattgttgctcatttggtaggcgctaaagaacctttgtctcataatctcagatagctgggaatttggaagagccctctggggtaggcatgttcttgtgcttgactagagactgggagcactaacccagaatggaaacccacccttcaataaccctagcaccagttatgtcaaaattcatgttttctttggtcatttgttaaagagccccgagcggtagatggtacacccaatcagaaggtgcactctgccctgagtttgtttatgttaaatatcattagattggtgcaaaggtaattgcggtttttgccattgacaaagaccacaattacttttgcaccagcttaatacctcaagcaaaacagaggtcttttagttacaaaggttttaaacatttatctctgtttttacaatggtgggattcgtattctttcatgcaaaagtagtggcagtaaaaaaaaaatgaaaaagaaaatatttcaaaagaatgaagttgtcagggaagagagtttgttatattgtatttgcataccatttcctttcaccatctggtcctagtgtcatgtcctaacacttcctcatcccattttcactctatcctactccagtggttctcagtcttggctgcaaatcagaactgcaagtgcaactgaaaaaaaaaataattaatgtagagactctatcccaaatatacattgaatcagaatctctaggagttaggcctgagcatg

SEQ ID NO: 917293 - DNA, 4001 bp, Homo sapiens
ttttttttttgttttgagacggagtctccctcagttgcccaggctggagtgcagtggcttgatctcagctcactgcaacctctgcttcccgggttcaagcaattcttctgcctcagcctaccaagtagctgggattacaggcgtgcgccaccatgcccagctaatttttgtatttttgtagagaccgggtttcgccatattggccaggctggtctcgaactcctgacgccatgatccatctgcctcggccacccaaagtgttgggattaaaggcgtgagccactgctcccggcctgaagtgagtttttaaaacatgaaacaaaacatcaaagttatgaggcttgtgagcatctgtaacaaagaacaatgcagttgctgtgacatgacaaaacttgtttctgcaactcctttcattaactacacctgaccctgtcgcaggagctgagcaaggcttcaggcttactattggaataagttcatctctgtggctattcaggcagttcaaagaattcattttacacaacaggcaaaacaaaaaagggaagccaagatccattcactcacagtaacagagttttacagctggatgggactgagggatttaaagaagtcaaggcagatgtgtacaggagtgtatttctatatctacttaactcacacacactcccccagcttgattctacatcacctttcagatcctggcatttaagataatcttctcatattacgggggagggcggcggggggaggaggtgaaagaatagtgttggcggggggcaatccggactgtcttaaagagacagcacacatcctcttattaagacaataaatgagaacgaaattcactagtcaatacaatattgagcacctactgcccatctgagctctataaactgacagaagagaagggtgcttccccacgtgttccctggtcccgcatttcggcctacaggaacggcgctctttaaactacttactagacatgaacattgccaccgtgagtctgaggccagctttccctcatcttgtctactacggaatcttgtgaaatcccaaagataactttaaaaattattttaacatacatgtgaattcacaataacataaatacactcgcatctcctccacaccgctgaaagaggagaaaggttcaagtacaaaggtggggaatgctcgcaccggcttctccctgtcctgggtgaaatccatgttgggaagagcttgatctaggtcacccacccgggagctgagaccacagacgtccctgccaccttcggcggcgcagcctcgtctagatctcaccgcctcaacttgccaggaaacttaacgacctgaaagcaccagaccgccgagcaagccatcggaagttccctttcgcactcaccaccacagaaaaactgagttcagtgagacagaccttagaggagccaggtcctgggatgagacctcctggtcccccaagcacctgccattgagctccgctccgaccctacgaccccgagagaaacacccgcccgcgggcagagccggccgggaccaggagcagtgggtgcggggcgacccgcgggacaacgacccggcagtcccccgccctcaagacccagggacctcggctccgcccggtcccgccgctcccaggccccgcctcgaccccctcaccgagcagcagcaacagcagtagcagcagcaggggtcgccgggcgctgccgggggccgccatggcgcgaggcggccgggtacggtgcggggagcgggggcgcgggcggcggttgggccgcggactgccgggcgctgcggtggcggggcgcgggcgccaagggctggcgttagagacagcggcgttaccagacgcaagaggcccggccactgcgacgccggcacgaagaagacaccgcggccggcagcgcttgtcacgtgagctgcgccgcgcccgggcgtcacgtgatcccgcgggtctcgcgagagcgcgcgcgtcgagcgccggcggctcggctccccgcaggtgcggcagcttccagcaccgcgcgccccctcacgcgtgatgcaggccgacacgtgacccgcagcggcacgtgacccgcagcggcacgtgaccctggacccacgtgacccggcctggtccgggggactggggccgagccgaggtcctgaaacgggaagtgggctgggttcgcggaaaaggaagaggaagagtagtggcgggagaaagtgaggaaagaggaagcccgcgaggggagaaagggcagacggatcgcggacgcccaggcctcccttcagcctgcgaggcgtcccaaacgcgggctctttatggacaggagggtggtgtgggtggcagcgcgggtgaccggccgggtgcgcggccagggatgggcgaagggtttgtcttttggtgagtgggaagcaagttcctcacacagggaggccactgtgcccaaactcttgagtggttttaggaaggaaataagggatctgaaatgggtcagtgcggccttccgctcgttaatcgcgggctgagggaagacggcaccaggctgcccaaggtgaaggtgaaggtgcgatggcgatactctttggcttacagaaagttcctgtcgagcactttgtttttttttttgagacggagtctcgctctgtcgcccaggctggagtgcagtggcgcgatctcggctcgctgtaacctccgcctcccgggttcaagcgattctcttgcctcagcctcccaagtagctgggattacaggcgtgcgccaccacgcccggctgattttgtatgttgagtagagacggggtttcaccagttggccaggctggtctcgaactcctgacctcaagcaatccacccgcctcggcctcccaaagtgctgagattacagccctgagccacggcgcctggctcctgcattttagaagtctgaagatgctctgttttttggcttgtcatcatataggatttatggccttttgttaaaatactatttaattaaggcccctacgctactgctttgtataaagcacccgtcgcataagtacctacatcttagaaaaagatttaatcttacatttcaaaaggcatcatagcaacggggactggatgtgcacctagttaatagagacagcactcagccagataaagacaggaccaggcactcactatcagtcctcaccagaggactgtgaccttaaaaagggcgggatttgaccaattcaacactggcattttgatagaccccaccttgctgtcacttgtgcttagcaccctgcatctgctgcctaaggatctgctcacatcaaggacttccttggaagacaatgacttctgtctggatcaggctggaatacactccttgttcccgtcattgctttccttggattgatccattaaccccttttcctatcctctttctcttgatgtccaatgttactttgtttgatggggaatgtttaaaccatagcgtttgtattttaagtacactatgatgtatagtttgcagtattgactgacacgtggactggcttgagcctttgcccatggctctaccaagttaacaagtagtactgaagggaattgtctcgaggcaactcctcgtagctcgtggcttttataattgaaatagcatcaatatattcccaccctgtggaaagacataaacgtgtgtggacctggttatgtctgaccttgtgctgttcacaacatgccttgagagagaaatacttctgaactgaggcctctcacacgatgggtacagcaagtgctaataaacttctgcttgtttctcctgttgctctgaattttgttttcaggagaatgtctcaactaataaagagagaaagaagagaaattatattttctcccctgcagtggaatgagacaattacgcgaaactctggaggtttaaattcggggactcctctgatccactgcttcttaaggaggctagaagtagggtttagaaagtaggagaggtgtttgaacaagcatactgaatattacagttttatggt

SEQ ID NO: 917294 - DNA, 4001 bp, Homo sapiens
gacaacgtctcaaaaaacaacaacaacaacaacaaaaaacactcatatccatcctagagaagcgtgaaaatgtaaaagttcttgttcaaaattcttgtcaggtggggcgcggtggctcacgcctgtaatcccagcactctgggagacggaggcaggtggatcacctgaggtcaggagttcgagagccagcctggccaacacggcgaaacccgtctctactaaaaaatacaaaattagctgggctggtggcgcgggcctgtaatcccagctacgtgggaggctaaggcaggagaatcgctcgaacctgggagacggaggttgcagtgagccgagatcgcgccactcccctccagcctgggagacagagcgagatcttgtcttaaaataacaacatttttgtcaaaaaaatctgcaagttaagttctttcatggtgatcctcgcaaaatagcatttctcatccaaaggcctcagaacagccgccagccgccgagctaactcgggaccctgttaccggctgcttggcgccctggtcgggtgggttttaccttcttcagggtccattcctcgcctcgccccccgttcccaaccctcgggacactggagacttgcatttcacaaacgggtttgctccaggccgcactccatccccgagggaaagctccccagaagttctggagttgggctgaaggatgtgatggcaagatgtgaatgatgtcagaatccccatctccagagtccggctggggagctaagcgcaggtgagcttacatcagaagagaaagccaaaccccccacacgtcgctaaactagggcacgggaatggcgtgttatgcaacggccgccgttcgcgtggccacgaaagcgctcctgcgcctcgggccgcgtcccgccaagaccgtgagcaaactcgcagagttggcgcggcagccggccgggagacgccgagcagggcctggccgcccgcagcccgggaggaacggcgcccccagggtccggtggcctctgaggggctgactggcccgtgagccggcggcgcggccgcggggaacggggtgggaaccgcgcggcagtgggtgaggcggcgcagccaccgggggctgaggggcggcgcggcctcgactgcggcaccgccgtgggtccgtcggctcgcgggacgacggggcggccggcgggggccaacagggcgggctctgaaggactgattggcccgtgggacgatggcgcggccgggaggatggccccggatccgtgggaccgctgcgccgccggaccgggggtcccgaggctgtcaggggcgcccggccgggcgtctagtgaaaagccgatcccccggagacagcggaagcagaggcgcgcccggcgctacggcctttcgggtctaggacaccgcccccggcccgcgccgcccctgccccgccgggatcccggccgccccggtcgccgcacaacaaagcggcgcagccccgctgcccccgcccgacgccggcctccaacttccccggctcctctggaaccggctccgcgggctccgtacggcctggactacgagccgccgggcgggggcggctccgggcgggcgcggaccgtgggggcagggcgcagggctccgtccggacaaacttcctcggccgccccgccgggcgcccttcccggagcctcggcaccacagtaggtgcgcggagccgcagggctcgaccgcttcgcggaaactctcgccaccctccgagctgccgccccgaccccagctcccagccccctcacctccaggggcgcggtctacaccctcgggggcgtcctggccggcggctcccgggcctctcgcgccgggagaccgggcactggtggctggagctgctgctggccccgcagggacgggggagccccgggcggcggcggtggcgtggacggcgactgctccatcttcccggggcgctcacgccgcggttccaaagcgcagacccaagtgggacattcgctacattgttggcattccacgggcgtcacgtgaccccgcctcccgcgtcactctcggccgcataccagtccgggcggggcgcctgcggcccctgctcctccgcggccgctccgcccagccccgcccggccgtgcttcctgcctccggcctcgaccgccacctgcccacggcctccctgctggcctgcggtagctcgccagggcctctcggacctatttgactggctgctatctgcccccaaacttgagtatttgccctctcgactgcatttgtattaaaagttggtaactgtcgttaaagccactattcttaagtatctcataccagtcttggtgaaagaaaaaaaaaagttagcaggcctgaaggagccaccaagttaccaactagtggctggacactaaaaataggggcagaaaaggacagacggctattgggacagtggaatcaaacaattaagaaggacgtttgccagaagcggtggctcacgcctgtaatcccagcactttgagaggtctaggcgggtggatcacctgaggtcgggagttcgagaccagcctgaccaacttggagaaacccccgtctctattaaaaatacaaaattagccaggcgtggtggctcatgcctgtaatcccagctcttcgggaggctgaggcaagagaatcactggaacccgggaggcggaggttgcggtgacctgagatcgcatcattgcactccagcctaggcaagaagagcaaaactccgtctcaaaaaaaaaaaaaaaagaacgtctgatgcacacccaaatttaacctgatttaatttaatcaacctcccctccccatgtatattttctttctgagaagtattttatggtgtagggaatagtatagtaccgtatataccagcaagtgaggtcgtgggttttgaacagcttcactatccatttgaggactgtggatctggtacagggacagaagcagggatggtgcaaagattcacagtagaaataatagactggaagccaaatcctcagtctacttctggctctcctaacatcatacttcctaccacctatatctgtggcaagtgatgctgagggtcaatatagtgtttaaagtcaactcgatttcctctttaattgacaaactcttgtgaaatttttaaattttactctcatgggaaacagtagtaaaggtcattatctgtgcactattttgacagtctcacccagccttcagtccctggttcatcctcctcccctccctctctttcaatctcttaaggcctcagctcttccagggaatcttctcagatctctgttttctctcttctttgggctctgataatcaaaccgtaatcccttcctgccagcagaagtgtgcaaaaaaaaaaaaaagaaaccatcatcgtgcagcttagaattcaatttaatttttcgatagtatcctgtatgctacccagatatcttgcacagtactgggagcaaaataagtctccagccaatattctgcaattgagccctactggcattacctatgtacttttccacattttttcctttttttcttagagacagagtctcactccattgcccacgctggagtgcagtggcacaatcataacttactgcagcccacatcagccttgaactcctgagctcaagccatcctcctgcctcagcctctagggtagctgggaacacaggcgcacaccaccatgcttggccttcttttcactcttaagctgactatactttctccaccccaaccccaagccacatggctgctaatctttttttgttgtgtgtttaaagatcctgctcctgctctgccttcaaagatgtaaaaataatttttaaaacacttgtggaatgaaaaatattataaaatagatttaatggaccttaaaatttgtgcataaaatacctaataaaaatgttgcagttacaatgatcatttcagcattgtttgcagtagtgaaaaattgagaaaaaccccaaatgtccagtcaaggggtaggaaaatgaaaggtagatatccaaa

SEQ ID NO: 917295 - DNA, 4001 bp, Homo sapiens
cctgtcctctccaagttaaatggtactttaacaacaagtaaatgagactttacttgttggtcttcccttccccaaagggttcagagatagaattataaatgaagttaaagcactgaaattgtttcccaaattaccaattgtttcaaggcataatttacaaaagagacaaaaatttaaatgctacaaagaaaagggtctctgggattgctaaggaaatgtcctcctaggcacaactccatcccaccacagcagtgcttgttcaaagggcaagacctagaagatttttcccctgatgttcctgggggtgagctagaatgaagaggaatatctttgtaacatatggggttgatgctttagcaatgtaaacttaactttaaacaggggacctttatattttgaattaactttcgcatagttcttttttattccttcgtaaatataagaaaaatactgacattccttcacattcgaatttattttattctcattaatagttttacttaaaataagacacaacatatttttagtctgttcttttacggggttcaagtccctcttatctcagtttcacatttttgcttgtttgaaactattcaggtgagatgtgcaaagtaacattggtggtcacattttgcagtttccagaaattcacatttataggtaaatgattaattctattcaaatttgtctacacagacattctttaaacaattatacttaatagaaaccaaacttatgacaaatgtatgtaaattcaaaatcaagatgtgtgtggataagccacctttatttgcttactgatagttctgacagagtaattttagaaaacaagttgctgtgtaaaagaaaagttcggttttgataaacatcctgattaatgttcgcatttccagtctgaatggcttttatagttatcatttgtcaatggttcttagtgttatgtgatagtggtaattaagtaaaagcttatactacaaaatccaaagtgtctatgtttgggcagtttctgaaataaatatcccatatcaactgtgtaaaaatttctattgtagataaaagcctttctcccagaatttgagtgaatattcattgatatggtcataagcataacaaataattcagacaatcctacaaaaacactacaattaagcattatacaaattgcttttatttttagagaacaaatggaaaagagaaaacctctaattccatgtggttataaagcacacccattaaaaacccttggcgccaaaaatcactcaaataaccagtatcacattcagtaacatatgactctagataatttatccactaaagtactgtaaagaagttttttagaaaaacagaaccgcaggaactaaaattaaactacccccattgggccaataagccatacaatctaaattatcaatacgcgcttttcctgaaaacattttaaagaagataaaatcacagtaaatagcctccgtgaaatagagcaatagaaataaaccagaacatggtttggttttaaaaggaaaaagaaaccttaattttgggcaggggtgataactgcagataagttgagaagaacccagcccagagagccgaggtgctccatcttggatggccacgcgaggtggcggcagatgtcctggccagttagacagtggcaggaatcacagaggtctcaggtgacatgctcagatctctggtcccctgaaggcaaaacccacaatccacagaaacagtgccgaagtgcatcacaagcgcttaaaaccaacaaaaacacatgaagaacatttaccttgcaggaaaaaagctgtccttggtagtactggtgtatgaccaggaaccccttctttctgatctgcagaacagctttgtcaagcctgggtgtgtggtcacaaggcaggaagtgactagaatgacaaatcatcagccaggaaagaaaaagattttgtctttataaggacattttaacttttttttcatgtccccgccccaccaaaaatcacctgacagaacaggtcacagtgaaattcagacacctcctaccacttcctcttttttttttttttttttgagacaaggtcccgctcttttgcccacctctttataagcatttttctctctccctttctcctccagctgtctttgagtagtccctgggctacttaaacctttctgattctagatagcaaggcaagatcagcctgataacttgacttctttgactctagttgcaaaagcaaagcccagatgcctacctacttacagcaaagatcaacaaatttttcatttttagtgaaagagccagggaaaaaggtggcagtacacctgaaacaaatgaaaagggacttccttgggaaagccccaccccacctgaaatcaaacctctctggagtcctctaacagtgatcttattggtgcaaacaaaacagaacgatctctttaagtgaaggacatgaaaaggaaggttactagattatttactcattcttttatttatagaacatctatgtgctagggatctctttaacccaattaagtatctcaattatttaagcgtttcctataaagagcagcagtagattgcacaggcagctgttatatttaaatgggtagcttaattccttcttacaggcaggatttttttttgaatgcacattttataaaattagcaggtggtggcaggggaagctctgttctgtacccaaaccccagatgcttgagggcaaattcctatcttcaaatggagcatcctcaagtgctcacaacagttgtgaagactgtggcaccctgagttatgttgactaaatattagacatgtctccacattgcccggagactgtgtgtgactccagtagtcaatctgccgtttaggaatgagggtatgtggctgtactcccaggtcagatgctgcgctgaagatatctgctccagagttgacatgcgtccgtgtccgctgggccacgggcctctcaggtggtcacggtattctgactggttggagggctgcccttatacttcttttgcttttttgatttctcctctagaaagttcctgtttctgaccttaaatgttaaaccaaactgttctggtttatctacttcattagccagtggtgtggtgacttcatcagaagcccacaggggctatcttgaggaactgggtgggcggaagaacaggacgagacggtggggattctagaaacggttcacctcacagagagctatcagccctcttgtgatttcccagggaagactgagggggtgatgggactctgttttctccatcgcataatcactcccaattaataagttgcagagagctttcaagaagcacctacattctttcaggacaccagaggaacatccatgcatcactgttacagcactgctcacgctacaaagcagcaaaatgctgtcttcattcggggccctgcagcaggactctgtagataatgtcctgctggtgttacagatacaaggggttgtaactgtggacctccctgatctggttccacatcctggtggcttcaggatggcataaaggcccaacagtaacacttcatgaaggggaacagatatttattcctttaccttggagaaggaaagcacagtgttctgtatctagtggtgcctggtcatctgaggccggaggaatctatgaagaagagcaaaatatatttgtgcattggttcagcaagtgtttgcatgcctgtctgaattggtgattcagaaataaataagacacaatcgctgttctcaaggagtatagtctagtggggaaaaaacatgtaagtaaataaatgccatctataatagaggggtgaaaaaggcagtgtgatatcaaagcagttgcagatttgagcagaggtgatgtttgttaagtgaagaaaaagatttaggattccaggcaacgtcgaggttgtagaagatgaaaggcattgacctgggtactgcttacagccacccagttaatagagtcgtcttctaccctagcatccacggcaggca

SEQ ID NO: 917296 - DNA, 4001 bp, Homo sapiens
ggcccagcttctatatttaaaatacaaatacattaaggcacttttcaaatacccacaaaatacagtgcaattctgatcttacaaatcgatgcttgtaaatttgatatagtctctaaaacagactcggtgctaaatggcatgcttatctacattagacatttgagttaaaaatacaaattatgcagtgactgcagaagacgtgatgtgtaaaatggttgaattgctttcagcaccattttctgtaagtactggaattcgttcatgctttgcatttcatggtaggagagaggaaaaaacagcaatcaccaatcctctgaggatagtgattatgaaagagccctttgtgtgtgccctggagatggaattcttttccattagttgaaataagcttataccagacctggcagtggtcatcaagataaaatgcccccttttacataggtgaacactttcagagtatttagagaacacactggagctctgcccagtcaacttagaaacagtctttatactcctcgagagccgtggagctttaaaataaatagttgcatacaaagaaagtaggacagcagttagtaaaacacctactattaaaccacatgtgatgactaggccagaattaattgttaaagagattttccacctttaaggaagttagacgttttgtttgtttgtttgttttttgtttttgttttccagagagagaagggaatgttcatggctaggtcacaaaaaaaccttctgaaaggcaaaaattccttcccaatgggtctgaatatgggtctgaatattcctccactatctttgtcctggattttaaacccacagcctttcttagcagggacaggccttagagatcgtccagttccattttttcccttcaggacgagtacactgaggccaaaaggtgacgtgccttccccacggtcgcgccactgcttagtgggagatgagccgagaacggcctttctcggaccgtccactacattctcccctactctacgcttcaatcttctcccgtgaaaccttcacttgcttttctacaacgttgacctaaggcggaaagccgcgtgccagagtgggatgggagaggggagctcacgctgggcccgaggggcccgccggcagccgcgcgcccctcgccggcccgcgctcgggctccccctaggggcaccatgggcgacacgggggtccccgcgcgccgccctctggacttacgtgactgtcgctccccttccagaagtagaaggccccgatggccccaaagagcagcagcacagctcccgaaatgaggaccacggctcccaccttgagcagccgcgcggggctggagggcttcaccgtcagcgtagcgtacgcctgcgggccggggcgggagagggaccgtcgcgtttgtgccgccagcacctgcggcccccagcgcacccgggccccacgcggtagcccccagggagtggggagtcgggcgggaaacagctcgcccgggctcctacgggtgcccctttcgccgcgctccctcccgagggtcctttgcagtcgggcgtggaagtgggatgagcaaaccccgcagcacagggccttcgccccaggacctgcaccctctaccggccacgggacgtccctccgcacccgcctgtggatgccgtgacccctgcacactcatacgcgtggggcgacatcccacccacacatttgggacccaaatttatccccccgccaacacacccattcggtggcacgcacccctgagtccgaactgtggaacctgatactcacacaacccaggccctgcgtgtggaatccctggcggtactcaccggggggctgcagaattccacgtcatcaggtcccaccagggcaatgggaactttgtcggagttctctgtcatgtttgcggcgggaggagtgaggcacttggagactccctgggcaccctgggatctgtcccgctgccccgacgtgcagggcatttcaacgccgcgcgcacacacggtgcacggtcccgcctgggccagcccagcggtccccaccccttccagcgcctcacctctctcctcccttctctctcccgccgcgggaagctcgtcctgcactcccggatgccccctttcctcctcactctatcctgtctactggccccccaaacagcatcccggtgactctgaatgtgtgggggtggttgcatccctcagagcgggatgctgaatcctgggacccaaagaaatactcaagtgccagagcaattagccatgcaccggaggatgtcttagaatgtcagcgggctctgctgtgacaactggctggaggccatttcctgcagggtctttgtaggtgtgtgttggggtgggggtggggggaagatggctcatggaaggtgaaggagaagacaacagagtggtgcaggtggacaggggacactggcctaagagtgtaagggttaggccaccttctcactggcctggcattgctggatggcccctgggactggaaaacagagcagggtcttagggatggctccttgccaccagtttttctagggtctgggtacaactgcagcaaaagtgagagctaagcagagcagggctggagggaaggagttggggagaccagaataaaagtgcatgctggttggttgaataaattaaataagtgcaaacaaaagcaacaatggcaaagcacacacacacacacacacacacacacagagtactgatgtatccaaaggaataacacaaatgtgtgtgtgtgtgtgtgtgtgtgtgtgtatgtatgtatgtatataaaattttcacttttggaaatgccatcttccagttccaggatacatggtacttcatttggatccaggcttccttaaattgcgttcgattctagctttgtgcagagctctctggtgaggtgtaagtgaggagcactagtgcatgagagggattgaggcttccccaaagggcagcgggagattgcatgtgcaggactgcagaaggagaaagtgttgaagaatcatccaagacatgtgatgaagaatgaggtgacaagcatgatgacctggggctgggaaggaggggagaagtggaggagaccactttcacagaagaatcgataggacttggcaattcctgggctgtgggaactgagttttcagacctaggaggattgggagagtgataggaaccctagggaagtgaaaaaattggaagaaacagttttagacatgttgagcttgatgtggggatgaaaagtaaaagagccaaggaaatgtcctgagcctgcattggaatcagctatggaaacagctgtctgcacatcacactagacttaaggtgcttggaaaaaactccagcaagatctccagccagggctcatccctggggcactgctgaggcagagttcaaagacctcttttcacaagggcattcttcacaggaattttggtgaaggaataagagaagtaactgtcagagaggtgggagatggtacaatataaagtagtacatgtaattttaaaggcacattcaagaagggtgggtcagcagtgtcaaatgctgaaaaaaaatgagcacagagaaaggccttggaagggcacaaccaagaggccatgggaaccagcgagagagtagttccatttgcttccctgggcacagaagacacattgcaaagggttacagagtgattaaaaatatttgcaacttataccacagacaaggaactagttttcttatatagtgttttcctaggaaaaccaaaagaccaaaaatgtagtagaaaaaatggcaaagaatggaaacagagagttggtgaagcaagaagtagaaatttctcttaaatgtaagaagaatgaacaacagcattattttgcctttttttttttttttttttttttttttttgagacagagtcttgctctatcgcccaggctggagtgcagtggtgcgattttggctcactgcaacctccacctcccaggttcaagtggttctcctgcctcagcctcccaagtggct

SEQ ID NO: 917297 - DNA, 4001 bp, Homo sapiens
tcaccagatagggcaatgaggaccccaagtaagtgttcagggactgcaggagtgaatgaaggtgtgaaatcaccagggacccacagataatccacagttccgtaatgcagaatggatcttcagtcttactgggcatcaactttccatcctctgcactaaagatgatggtccctggtaaaacaacaggaaacattaaaaattaaaggcattaaaagaagtgataacactgtttcagctagtctacaattttcaattaataaacattgagacttgcctcaacactttaaaagtgggaagaactaattctctctatgagcttcataactcgatttttgtcaaaccagctcaaagctttttcatgtctttatcttccgtaaatatttccaaattaactctgacagctatttacttaaagaaacgcccgatttttatttgacaggccaatgaattcattctatatattatatactcacattaaaagtaatgtagcactttcactgggcaataaacaattaaaataaaatgaaccatgccatgatttccattttttggcttgcaagttcatgctcatagtttgttgcaacttttctatgtccctttaagggtgcattaactctctgcatgagccaaacaaactaattaggataatttttcacaattgcagagtaccataaatttaacaagcattatggtctgcggaggcacccacagtacagaactattaccagacactctttgtactcattcagcagcatttcagaatttctttagtcttaacatcttctagtgtaaaagaatgcctgtgtatgacttattttgagtctgcagttttgattcattgattccaacagttctattgcaatcatttctcccactgaatgattgtctaatttgaacagcaatccatacttcccagtatgctacatcaaaccccagtcatccaaatggttccaggggcatctacttccaccccagcctttcaaaaagagttccttaaccatttctcacactttccataaagaaatgaatacagaagcacagagcccatccaccctagaattccacccccaggacccctaactccagctttcagggtccatagcaaatttccccctttcttcacctcgcccctacccgtttttttctctaaccaccgcccattttcagttctggatgtcactcaaacgggaggtcggctactacttttttttctaatcttgtcaactgcagtcagggctgaagttgatctatctgggccacgaggctggggaagaccagcagggggtggcctgcgggcagggggcccccatctccaactgcggtgaggcgccctcgccaagacaagcccatatttagccccctgccattgcctcaccgagccactccacccatggagacacacaatgatccctccattctaaaagggggcaagaggcattttccagccggctctggacgaagggaggggataaggatgggaaggcagcaccccccggaggcagacgccaagagcggacgcggctggcaggcagagccgacggatccgccgagctcaggaagtccggagcccgggagcagcccaactccggctccggggcagagagggagcccgggagaaagcagcggagcccacgcccacggggcagccgagtgatttacttacatggctggcgggcggcggccaccttccctcccgcgtcccgggcgcacacacaacttgctgtctttctcgggcgggaacatccacgggaaaccggaccgtcctgcccttctttgcctctgtccctaacagccgcagaaccccggggcccgacctggaagagcaggggttggcaggaggcggagggtctccagaagcgggctggcaccagcggagacccccactcccggcgagtccgcggcggcagctctggcggagcgctgtgggcgcgcgcgggcgccggggatcgcacgcagaggagcggatctccctttggcaggcgaggcacgcaccgcctcctcccctccgctgcccggccctcctctttctccagtcccctcccctcgcgccccggggaactccgcgcagacagacccaggacgcaccggggacgttcctggagcgccgggaagggagtgggggggtgccccgctgtccgcgcgggtccaggcccacccccgggggcagctttcgcggctcctcccctagccccgagccccctcgcgccccctctccctgcgtctcattcaaagctgagtggggaaggcagacagaccgagaagtatgggagaaagttgcttgtcttcctgggtgaccccgaggagccacggaagatgacacactttgcctgttggggcttttctgggtttactgttcgggtttatgctcctgttttcctgccgccgttaaaagaagccgtagacgggaaagagggccttaaagagtgggtaaagtggcccctttgagatttgaggaggcttttgagaagtggtcactttggaaggcggtgaatgaggcggttgtggacgtgggaattaaagcacagcagacagcccaaggctcatgtatggcatgggggcagctgcctttccagacgagccagggagaaggcaggggcggacctctagcgagcctctcccaagagatacactctttcaaaggtctctctctctctctcttgctgtttctctgtctctctctccctccctccctccctttcccttcacttcctccctcccttctcctccatcctgcctcctgatcaattttgcaatttattccatcgtttgatttcttttctgagaaacaactgatttttagttcccctctggacttgaggactttttccacttgtcattagcactaacccctttagaagtttagagctagattcagtagatgactgtgggagtctctgctgaacacagtattttaagaagtatgccatctgggaacagcagtttttgaagtagacagtttcccagatatagtttttgtgaggtgtctttttagaggagttgaaagtaataaattggtaggtatatatttcatagcagattttcagactgcaccattttaattagccgtgatggtgtacatttttcccacaacgacagctggagatatgtgttcttttattattattttgaaagaccttaagtgattgattccaagccttttgaggtcacaggtcttttaaaaaatacgatgaaactgataagccttccagaaaaaaaaatgcgcggacatataaagctttaccacagcgattctgaagaaggaaagggatatttggcaaggtctgaagataattttgattatcataacccatgaatggggagtattactggcatctagttggtaaagacccgagattctgctaaatacagtgcacaggacagtccccaaaattacctgggccaaaatgtcaatcatttgaatgaaatatcaggtggtttcccattcccttaaagcccatccatgaatcccatattcagaatccccaatttaagtgtttttgtttttggtgttgttgttgagtttaagttgttttaactcttctcttacaaatcaccggttactggtttcagtgacagcataagaatgattggtctgacttccagttaggtaccacacccttagttattacacagagccttcatacctatataatatgatggtggaagatatgatcataaaagacaaaagaataatagtgagaatcggagtcacctccgtacaacctgcaggggaaattgctctcaaacactttcttaagtgtgagaaagcttaagcgcaagtgctggctggagacatattaatgataatcatggttactacagattgactccttgctgtgtgttagtacattaaggtcccttaatagattacttatccagtcctcaaaaaagaaaagaaaaattatgaagaaggaataattattattttaccgcaaggataagaagtaatttgcccaaaaatttacagctaaaaaatgacttttaaaaaaatctcattattt

SEQ ID NO: 917298 - DNA, 4001 bp, Homo sapiens
tttacaataaaataaattttgctgcagtgggccctgataaaacatattagagctgttaagtgcccttagaggttgtgtaatgtataaaaacctcctttttcaaaactgacacatttcattcagtgctagtttgtagcggaggttccgtctagcccaagaacattcagttatttacttcgtatgtctaattgacctaatatgcctgaatatctaaaatcatctgtgatgttgtaaagtctcatgatattgttttgtgagtatctgctcttcaatttagttatcaatttattttggaggaaaaatgaatagtgttaaggtagaggagcctccacttgcccatcttaggagagggtacctatccgtgtacatttgtagcttgttcaacctctactgagctcctacaatgtcagaagctggactttgtattagttacatgagaagaaccatgaattatgaaaccaggcaaactccaaattgattcaaagcccagtctccatttcatcatgttattttagttgattggttcaaagacaatcaagggtttttttcactaagtatcttctagagttgccatgattattaatttatttatgtaaatggtctactttatatatgcttggcacttattccgtgatcaagattaggaagctatgattcaagaacccagctttgacctggagctctccatctggtagcaagacacatatgttcaataacaacaacaccacaggccgggccagtggctaatgcctgtaatcccagcactttaagaggctgaggtgagcggatcacttgaggtcaggagtttgacaccagcctggccaacatggtgaacccccgtctctactaaaaaatacaaaaattaggccgggcctggtggctcacgcctgtaatcccagcactttgggaggccgaggtgggtggatcaccagaggtggggagtttgagagcagcctggccaacatggtgaaatcccgtctctactgaagaaaaatacaaaattagctgggcgtggtggcgcatgcctgtaatcccagctactccggaggctgaggcaggagaatcgcttgaacccgggaggcgggaggttgcggtgagccgagatcttgccattgcactccagcctgggaaacaagagcgaaactccgtctcaaaacagcaacaaaacaaaaacaaaaagtagcggggcgtggtggcgggcacctgtaatcccagctaggtcagaggctgaggcgagagaatcgcttgaaccagggaggcggaggttgcagtgagccgagatcacgccattgcactccagcctgggcgacaagagcgaggctccatctcaaaaggaaaaaaaaaaaaacccacagatttatgaaatatcctctgtatatataaaataggggacatagaataaggaaagcccaagggaggggaggcacacatctgtaaacaagtgtgtacacttcagtgcacaggggggttgacagcgaagctaatgaagcccaagttttaagggcccatttttgcgaacacttccaaggccttgagaggggccctaacgaggtgttcccatggtcgtgtacctcggtaaaatttgcaaaaataagacaattttacattatttttctttaaaagggctctccaaatggcacaaggttcaggcctcacaaaacctgcattcgcccttgacagtccactctcgtagaggtaaaaggagaaaaatagttatggaagcgctttaaatcgtggacctcattgcgacacccttaacaaccctatcaggcagaacaaattgctccgcaaacctgcggcttgcagagcgatggtggactcccgagctcatcgggtccggcacctcttcaccacggaggcctcgggtacggaactggagggagtcctggtgctcggaggagggtggaaggccaagatccctaggtcctggagcagggagccgggcccacgccgccgaggtatcttttccgtccgggccaccgtcgcgggggctcactggcagcggcttctgcgcatgctcggaagagcgggcagggttcccactccgggagcggagacggagaacaggttatgtgggagccggcgggggcatttgccggcgacacccgagcgggggccggaagtggggccacagctcgcagcaggagctccgggctagaccgtggcgccggcagcggcccctgggctggaggaggatgatgaggagcgacggaagcgacgcgggggtacgctgctgcgcggcgcccggtttcgtgcccgcggccgactgcgcagcctgtccgcgagtctgagtaagtgcggctcggggaccccgagcccgcggggcccgagcgccggtccgctccttctaggagggtcgcggggagccgccggctcctccaggcgggcgcgaaaccctcccgggaggctgtggggggagccccggggctagtgcggcttcccctgggggtcgtgcgggggccgagcgccgggggttgtggaggaccagcccggggtgcagccctgccggccgccccgactccgctcaccactcaccaggggaagcaaactgaagccaaatacctgttttggaaactaaggtgcgcgcattgccagaggctcgccgggtgtcgttttgtaattggaacctaaaacgtatcttagtgttctatgtcaattgtatttccagtaatgtgtacaaacctaagatccctaaaatccaaccctccgctcccccaccctcccacacagacatgaaaagtaaaatagaataattccagctactaggttggagagagggagagccccgatctaatcacgacagtaacaggtttagacctgtgaatatcatgacaggaagttctggggttattcaggaaacatcaaaaaagcaccccatacaatcgaagtcaattttgctgtagattttagtcaacatttaagtaaaatgaattactagtattactacccaaggtatcgaaaccaaaaaaaagtccgtccccatttaacaactcttatttatgtttactatgtgatagtaactggatagaaagagatgagtatattggctttgtgtgttgatattggatttttcactgatctcttttgacgggagggggttcgtggatcaatacttatttgtatgcatgcttagggaaatcactcgtctttgactaaaatatcaaattttattttactgtgtaagatttcttgattgccgatttagtgttaatgtcatgatatcctacctaagacatcagctgctcaattaaataatcgttaatagaggcccactatgcatcaggcactgctgcgtacagaaaatgtagagttgaataggacgaggtctctgtcatcgaggaactcacagcctgtgtaagcaggttaattacgctgtaatagtaacttctgccacgtaagtttgcacaaactacagaatgtggaatgggtggcaggagggaataggggtccaaggaaagctttctagaggatctactacctgagtttggttttaacagagaaagagtgcattgctctgattacttcctgtgttcagatacggtacctctagggaatcatatccattatttgatctaggactaatagggcttctagttgtccttactttcacatactctgctatagtacataattaagtaatttaaattttgtctcatagaagtagctgcacttaacacactattacattttatctcaacagtagttcaatttaatctttcatcctccttttacatacgaggaaatatatatttagagaggctaagtgagttggcaaaagctacctatctcttaacagaccatgactcaaaacactgtctcctttccattgcaccacactgcctcccactgacagttaacttggaatgattaaagcaagccaggtacctacaggtagcccttggcacactgccctcttcttgggcacatcaaagacctcttggcatgtggataagagggtttactaaccaaattgccctgggctaacaatataacttagtgat

SEQ ID NO: 917299 - DNA, 4001 bp, Homo sapiens
tagaggccaggaattgtgctgtaatttgtgctctagtggcagacatgtaggaggtttgctgaatgaattactgaacacctagagttgactcctggataagcacactagggaaagctatggtctggttacataccacacactcacacacgcacgcagacacacagtgggtgagattcagtttggttaaaaatattcagtagctctgactgccctggcaatggtttacaacagccatttggtggcctatagagaaaaaaggtgcacttctcagtctaatttctgacaaaggaaacccagcttctactgagtgggttagatcgagggataaacgcatgacagaccactttcctgaaacttttatctttgaatatactgttgtttcctctctctgaatctggtttgcataactgactgtaacacctggttatgtatgttcactgccctatctcccaaaatttgctccctcaagggagtaaacagggtacacaatgctatatctacaatttctatataaactatgtaaaataaagtaggttaactaatatttctttaatattcaaatattggtatatagtttctacagatatatctatagattctacatggtctcaaagttaaagtttcgctcaacaaatcccaggcaaggacttaaattactttataatgacaaaatgtaggtaatggtgtggatacacatgtatcctaaaatggctacgcctataacaaggattccaaaattgccataaactagtcgtaagtatttttgctcattacaacggcataaaaagtcaaagattaggacttccattcatttttacatgctaattttattttttggattctgaggattttagctgattcattccatttgcagtaagacaaatgaggaggttcctggttagggctcaggttttagactctaataaatctgagttcaaatgtggatggtaacatttaacagctgtgtgatactgggcaattacttaatttctctaagcttcagtttcctaaagtataaaatggggttaaaaactatgtagaaattagaatgaagataaaaatcagataatctacaaaatgtgctttaaaaagtagtaagtcttgataattttaatactataatgcttgctgatccaagcaacatttaaaatataaatattgcaaaatattaacgagataaaaaggtgggaagaagcttcactctttaacaataagcaaagctttcaggagaatgaatgcaagcaattagtacacaataacgattcatcattcattcagttctgactaaattgtcctgaagtgacacatgaaaataaaccggcaggttttattcagtgactatggaaggtgattaagtgctatgctattgcacttaaaaaagagagaggaaaaaaaggagtaagtgacgaatgcaactgaagtatccttcatgcaacccttgacaagctgtgtttccctaggaaacaaagggtttacagctgcctatcttccacagcacttagtgacaatttgggacaatctcagcaaaaagaaatgagcagacaaagacgctagaagggctttgggatcccaaaagttaatgaaagaccaagtgtaagaagagaaataaagtaattccctccaagcctaaagtctctcccgctccaatgccccctgtaccctctcggaaaatggaaaatccctaaggagtctacatcattcctctgcccgttccccctactctcccccaacccttcacggattcccagtgaatacctggcctcgggcaagctccgttacctctgtgaaccagagaatcccagctgtaaaatgagatcttgatggtttcctgcggggttgccatgagaaagaatcaacatgtacgcaggtaaagcaggcaatacagttccagggagtcaaaaacgggagaaatcgtcccacgacctggggcttgggtctagatgaagagcacagcatcaggaggccaggcttctaatgcggcgcagtctacagcgctgtggactcggcaactcccatcacctgccgctgcacaaacaccctgcttgctgcccccatagaccgacccccgcctgacgcctcccagacccccccacctgacgcccctcaggccccccgcctgacgtcccagacacccccacgaccggatcccccagacccccaatctgacgccccacttcccctacttgactccccacacatcccccgcctgacgaccccccgacccccgcctgacgtcccagacaccacccatctgatcccccagacccccaatctgacgccccacaccccccacttgactctccacacaccccacacctgccaccccacgtaaaccccgcctgacacctcacagaccctaacctgacgccccacagacctcccccgcctcctgccgccacacacaccccaaaccccgccccgaacaccccccacctgccgccccacagattcccccctctgacgccccacagacccccaacgtgacgccctacagaccccaacctgacgtcccacagataccccgcctgacgccccacagaccttcccccggtctgttgccccacagacttctcgccgcctgctggaccacaccttccacttgactccccccacaccgtcaatctgccaccccccaccccccccaccccaaccccccccaacctcccaaccgcccccacctgccaccccacacccttcccacctgacgtcaagcctgaagctcagccgctaagccggaagctggcgccagaagatgccggttccgccagctgctcgccgcgcaggcgcaggggagacccggggccttgcagtcaccgggctcaagcacgccggcgcagccaggctcgcgatgggaggtgggggggccggcagccccgtggggctgcggaggcgggacctgcaggatcctggttagggtcttgagtacacacggctcctattggcctcggcagcagatgctctctgcaagcagttgatccacacgccagtggattttgtctcgagggagacctaagatcactttgtgctctggctagtgatagcctctaattcttgttctctgtacgtaaaacagtggtaactatactgatttcgctggttgtgaaaactcccaagagagaacaggacatcctcccaactcaaaacgttggttgtttcatttaaacttttaaaaaataggcttttgcaaactatatagagctgtttttttttttaaatgatgtttgctactgtggtctcagttctcttaatacagaaataatacataacaatacataacttacaatatagaaataaaccgttgcatgaccagaaatcaactatggactcttctagtatctgtttaaggtttaaaaataaagttatttaacaaacctttattgagcacctattattatatagtaatggtgctagatattcagggtggagagattataaacaaccccagtttttgtgttccaggagctgttggtttccaccgaatttttgctgtggtcagtcctctttcgccatggagaagtgagaagttattcataaagaggggtggaaacaacttttagaactattttattttagcataaaatattgctttacaataaaataaattttgctgcagtgggccctgataaaacatattagagctgttaagtgcccttagaggttgtgtaatgtataaaaacctcctttttcaaaactgacacatttcattcagtgctagtttgtagcggaggttccgtctagcccaagaacattcagttatttacttcgtatgtctaattgacctaatatgcctgaatatctaaaatcatctgtgatgttgtaaagtctcatgatattgttttgtgagtatctgctcttcaatttagttatcaatttattttggaggaaaaatgaatagtgttaaggtagaggagcctccacttgcccatcttaggagagggtacctatccgtgtacatttgtagcttgttcaacctctactgagctcctacaatgtcagaagct

SEQ ID NO: 917300 - DNA, 4001 bp, Homo sapiens
cgtaagtatttttgctcattacaacggcataaaaagtcaaagattaggacttccattcatttttacatgctaattttattttttggattctgaggattttagctgattcattccatttgcagtaagacaaatgaggaggttcctggttagggctcaggttttagactctaataaatctgagttcaaatgtggatggtaacatttaacagctgtgtgatactgggcaattacttaatttctctaagcttcagtttcctaaagtataaaatggggttaaaaactatgtagaaattagaatgaagataaaaatcagataatctacaaaatgtgctttaaaaagtagtaagtcttgataattttaatactataatgcttgctgatccaagcaacatttaaaatataaatattgcaaaatattaacgagataaaaaggtgggaagaagcttcactctttaacaataagcaaagctttcaggagaatgaatgcaagcaattagtacacaataacgattcatcattcattcagttctgactaaattgtcctgaagtgacacatgaaaataaaccggcaggttttattcagtgactatggaaggtgattaagtgctatgctattgcacttaaaaaagagagaggaaaaaaaggagtaagtgacgaatgcaactgaagtatccttcatgcaacccttgacaagctgtgtttccctaggaaacaaagggtttacagctgcctatcttccacagcacttagtgacaatttgggacaatctcagcaaaaagaaatgagcagacaaagacgctagaagggctttgggatcccaaaagttaatgaaagaccaagtgtaagaagagaaataaagtaattccctccaagcctaaagtctctcccgctccaatgccccctgtaccctctcggaaaatggaaaatccctaaggagtctacatcattcctctgcccgttccccctactctcccccaacccttcacggattcccagtgaatacctggcctcgggcaagctccgttacctctgtgaaccagagaatcccagctgtaaaatgagatcttgatggtttcctgcggggttgccatgagaaagaatcaacatgtacgcaggtaaagcaggcaatacagttccagggagtcaaaaacgggagaaatcgtcccacgacctggggcttgggtctagatgaagagcacagcatcaggaggccaggcttctaatgcggcgcagtctacagcgctgtggactcggcaactcccatcacctgccgctgcacaaacaccctgcttgctgcccccatagaccgacccccgcctgacgcctcccagacccccccacctgacgcccctcaggccccccgcctgacgtcccagacacccccacgaccggatcccccagacccccaatctgacgccccacttcccctacttgactccccacacatcccccgcctgacgaccccccgacccccgcctgacgtcccagacaccacccatctgatcccccagacccccaatctgacgccccacaccccccacttgactctccacacaccccacacctgccaccccacgtaaaccccgcctgacacctcacagaccctaacctgacgccccacagacctcccccgcctcctgccgccacacacaccccaaaccccgccccgaacaccccccacctgccgccccacagattcccccctctgacgccccacagacccccaacgtgacgccctacagaccccaacctgacgtcccacagataccccgcctgacgccccacagaccttcccccggtctgttgccccacagacttctcgccgcctgctggaccacaccttccacttgactccccccacaccgtcaatctgccaccccccaccccccccaccccaaccccccccaacctcccaaccgcccccacctgccaccccacacccttcccacctgacgtcaagcctgaagctcagccgctaagccggaagctggcgccagaagatgccggttccgccagctgctcgccgcgcaggcgcaggggagacccggggccttgcagtcaccgggctcaagcacgccggcgcagccaggctcgcgatgggaggtgggggggccggcagccccgtggggctgcggaggcgggacctgcaggatcctggttagggtcttgagtacacacggctcctattggcctcggcagcagatgctctctgcaagcagttgatccacacgccagtggattttgtctcgagggagacctaagatcactttgtgctctggctagtgatagcctctaattcttgttctctgtacgtaaaacagtggtaactatactgatttcgctggttgtgaaaactcccaagagagaacaggacatcctcccaactcaaaacgttggttgtttcatttaaacttttaaaaaataggcttttgcaaactatatagagctgtttttttttttaaatgatgtttgctactgtggtctcagttctcttaatacagaaataatacataacaatacataacttacaatatagaaataaaccgttgcatgaccagaaatcaactatggactcttctagtatctgtttaaggtttaaaaataaagttatttaacaaacctttattgagcacctattattatatagtaatggtgctagatattcagggtggagagattataaacaaccccagtttttgtgttccaggagctgttggtttccaccgaatttttgctgtggtcagtcctctttcgccatggagaagtgagaagttattcataaagaggggtggaaacaacttttagaactattttattttagcataaaatattgctttacaataaaataaattttgctgcagtgggccctgataaaacatattagagctgttaagtgcccttagaggttgtgtaatgtataaaaacctcctttttcaaaactgacacatttcattcagtgctagtttgtagcggaggttccgtctagcccaagaacattcagttatttacttcgtatgtctaattgacctaatatgcctgaatatctaaaatcatctgtgatgttgtaaagtctcatgatattgttttgtgagtatctgctcttcaatttagttatcaatttattttggaggaaaaatgaatagtgttaaggtagaggagcctccacttgcccatcttaggagagggtacctatccgtgtacatttgtagcttgttcaacctctactgagctcctacaatgtcagaagctggactttgtattagttacatgagaagaaccatgaattatgaaaccaggcaaactccaaattgattcaaagcccagtctccatttcatcatgttattttagttgattggttcaaagacaatcaagggtttttttcactaagtatcttctagagttgccatgattattaatttatttatgtaaatggtctactttatatatgcttggcacttattccgtgatcaagattaggaagctatgattcaagaacccagctttgacctggagctctccatctggtagcaagacacatatgttcaataacaacaacaccacaggccgggccagtggctaatgcctgtaatcccagcactttaagaggctgaggtgagcggatcacttgaggtcaggagtttgacaccagcctggccaacatggtgaacccccgtctctactaaaaaatacaaaaattaggccgggcctggtggctcacgcctgtaatcccagcactttgggaggccgaggtgggtggatcaccagaggtggggagtttgagagcagcctggccaacatggtgaaatcccgtctctactgaagaaaaatacaaaattagctgggcgtggtggcgcatgcctgtaatcccagctactccggaggctgaggcaggagaatcgcttgaacccgggaggcgggaggttgcggtgagccgagatcttgccattgcactccagcctgggaaacaagagcgaaactccgtctcaaaacagcaacaaaa

SEQ ID NO: 917301 - DNA, 4001 bp, Homo sapiens
atatatgattctgaaattaacaatagaaccttattagtgcaaaatgaagcccagtttgctgtaggctgagatgttttgaaccatctaagggagttgagttattttagcagcacaaagacattctccaaaaacatgttctcctggaaggcagcactagacaaagagactaatgatatcttgtgctgttgggtaatctcaggtgggcccttaacttttccaaatcacggtctctcaggaggctgcagatgagtgggttcccacggcctcttttgagctctggcactagacaaggtggtttataatgggaaggggcaaaaagtgagctgtggagtctatagacttagtttgaattctggtgtttcaagtttccaggggtgtgacctcaaagagcatgtttaacttattctcagataccctatctgtgaagagggtatggcaacttaagggttaatacagaggattcaaaataaaatatttaaatgataaatttttcaataaatgatattaggacaattagttatccattttgctaaaacaaaattcctcctctctactctttatcgcatgtattaaaacacacttcagaggatcaaagatttaaatgtaggctgggcacaatggcccatacctgtaatcccagaactttgggagactgaggcaggaggattgcttgaggccaggagtttgagaccagcttgggcaacctggtgagtctctacaaaaaaaagaaataaaaaattgggggctgtagagaaaaaaaattaaaaaattaaaaatttcactgggcatggtggtgcatgcctgtagtccaagctactcaggaggctgaagtgagaagattacttgagcccaagaatttgagccaggggtgagctatgattgtaccactgcactccagcttgagtgacacagcaagacctggtcacacacacacacacacatacacaaattaaaattaaatttaataagttttttttaaaaaagatttaaatgtgaaagaagaaagagggcactccctctgtggtcgccactggctctcagaagtagtgcgtgagcaggaggctccactctgatccaggagcactggcatctatgaagagggaaaccaagaaaaaattctttctgctatctttcctttcagtaatgcttatcttaagaacactcaactggaaaaccactccacctaaaagtaggaaagatggcaattctaaatagcaactattatcccagggagacccctcagatatgtgaggaatcaagccataaatgtgcatttgctggacattatataccacgtcatctctatgactacagattttaaggataatttttactcacttaacaatttcactgtaacagtgactgataatgtgaaaatgtgctttatacagtgctgctgatgggtacacagacaagttcttgctgcaattatttctaaatctagccagatcccagagtcatgaagatataagctctgtgagaccagggaccatctctctttcttgcatcataggcacacttgataaatactcatggctggaaaaaaaaaaaaagagggaaagatagagaaaaggagggcaggacaaagaaaaggaaaagaaagacagaaagtaatagaaagcaaaggtgcatatttttataatcttagaatgaagaagaccactcaggaaaatcttaacacctctctggataaaaaattcagaaggcactgcaaaaaacaaagctaataaaatatgtttacacttttaaactctttgtgggaaaaaaacatggtaaataaaagaaaaactgggggctgggagttttcaattcacttacaaagagttgatttccataactacaaagcatgcttaccaattaaaaagtagagaacaggacccaacttttggtaatggcagaatagcccccactgaaccaacctttccacaggtaacagctataaactttaggtaaaatatggggggaaaacctgcttaaaagcactggagtgtgatagaagcaggcaaacactggagttcttgtggtgatggaaatgtcctgtgcttcaactgcactaatgtttgtgtcctgattgtgatgttgctctgtagctttgtgagttgacattgggggaggctgggtgaagaggacacaggatttctgtgttacttctgtgtgtgaatctacatatacttcaaagtaaagtgtaatttttaaaaagtcaatttatggctaggcatggtggctcacgcctgtaatcccagcactttgggaggctgaggctggtggatcacaaggtcaggagatcaagaccatcctggctaacatggcgaaaccccgtctctactaaaaatacaaaaaattagccaggtgtggtgacaggcacctgtagtcccagctgcttgggaggctgaggcaggagaatggcgtgaacccgggaggcggagcttgcagtgagctgagatcactctactgcactccagcctgggcaacagagccagactccatctcaaaaaaaaaaaaaaaaaaaaaaaagtcaatttatgtaatttatatgattagaaaataaaggattaattctaatcatcaacagatgtataacaaacatttgaaaatcaacaaccattaatgattaaagaaaaaacccaggaagcttgaaatagaaggaaattatctcatactgataaagaacattcttaaaaacctagagtgaacataaatatcagtttcctcttaagataggaaacaaggcaagattgaccattctaaccatttctttccaccattgtcctagagggcatggttggtgcaatatgacaagaaagaaagccagataaacaaaaacctcacagcaaaggctgaaggtctgtttacctcagcttcttcggtctaacacatcatgtccagatttccagaaaaaattacaaggcgtgccaaaaggcaaaaaatactgtcagaagacacaaaatgagcatcagaaccagctcagatatggtagaaatttaggaattatcagatcgggaatttaaaatacctatgattaatgtgctaagggctttaataatagaaaaagtgaacaatattaaaaaatgaataggtaaaattgaaatgcaaagaaagtgtaaaaaggaaatgcaagaaattataaacactgtaacagaagtgaagagtgtgtttaatgggttcatcagtgagctgataagaaaagaatcagcccgatatgtgggtcaaagaaacctcaagagaaattaaaaagtattttgaactaaatgaaaatgaaaatgcaacctatcaaaatttgtgagaatcagtgaaaacagagcttagagggaaatttacagcattggatgaatatattggaaaagaataaacatctaaagtaaataacttaaaattccatcttaagaaactagaaaaagaagagcaaatcaaatgtaaagtaagcagaaaaaaataataaaaatcagagcagaaatcaatgaaattgaaaacagaaaaacaataaagaaaatcaatgaaatcaaaatttggttctttaaaaacattaataaaattgataaacctttagtcagactagtcaagaaaaaaaaaagagaagacacaaacctctaacatcagaaatgatagagggacatcactatagatcccgtggacattaaaaggataatacatgaatataatgaacaactctatgcccagaaatttgatacctagatgaaactgactagttacttgaaagacacaatctaccaaaactcacaacaaggagaaatagattatcttaatagacatatttcttatagaaattggatcgataactgataatcttcccaaagacaaaacaccaagaccagaaaggcttactggtgaattctaccaaacatttaaggaagaaattataccagttttctactatctgctccagaaaacagaaacagagagaatacttcctaattcattttataaggccagcattattctaatatcaaaatcaaagacagtacaagaaagggaaactaagg

SEQ ID NO: 917302 - DNA, 4001 bp, Homo sapiens
acagaaacctaaagtggctttgagtacctcagttgatgtttctgcatgcacttaccaccttgtatgtcttatgctgttataatatttactacaacatgtcttatactgttttaatattttctcctaccaaggcatattctaccagtgcaagagatcaacaatgattacaaaattggtaagaaggagttaaaaatttccagtcttgtggttactgacaacaaaagttcaggttgaaaatgcctgggagggggatgaataccccattttccatgatgtgattactatgtattccgtgcctgtatcatagtatctcatgtaccccatacatatatgcacctacaaagtacccacaaaaattttaaaagaaaaaagagaaaaaacaagaaaatgcccggggatagtctacaaagttgacttaattttatctcagttgcagtatttacttcttgccttcctactgacctcttttccacctacatgtgttcctaaagaaaagccaaatggagatgctctgccttagttctttcaaagtaataatataaaagtattcaaggaactattattaccttttttgctgcagactctgtccctgagatacagccaacccacacagatgcagacatgagcacatatcagttgcctccaaatttccagagctccgagctctgttctctggaagagaacatcataggacatccaactgtaaaacgtgaaaatatggcatatcctaattttcttcatagcagttgtaataaaaaaattaaaatagctttagaccgtacccatatattgaacttatttgcacttgccctatcactgtagcaccatattgaaattcatcaaaattcaaatagctataaatgaaacatgaatggtaataataactttagatgttgaaataattgctcagggtgatttagattctataaacatagttatcaaaaagaaaaacagcattctttgcccccaagagtaaaagattcacataaaaatgttttcctcatgagcagtgtgcttgggtatagtattattacaggaaagataaaaattccaatcatccttggtaaattgcatgtctgctaacttcagctattttgggatttttaaaagttaaaccatttccgagtcacagaagaaatatgcacagttcccctgtgcatggaaacaaaatgcaatctattcattccatctccttatttaaattctttagaaaattaggtgaatctgatgatttatgaaacaatctttgagactactttcactatagctgattgcagtcttaggacgatggtaataatagataacatttgtgactgctggactttatgtacttcatttataattctcatgtaaaatgtacatgagaatatttttgcttaaggtattaatttgcctaagacaactcagagtaagtgccaagaataaaaccaggtctcacaccaaagtttgagctctacccatgaagcaatgacttttacataattgttagagatcctaataatgtatttttttttgtacagccactatattttatgccataatctcaatatcatattctcaatcaagcactgtgagaacacagaaattctatattaccaagaccagaagtttcaaagtgaagcaattttcataacgcagccacttagtgggaaagccacttagtgggaaagcttatcaattggatatttggaaaattatttttctttcttaaaaagttatatcagatgagatctccaaactcaatgcaagaggtgtgtatttctcctgcccaagattcacttccccaactgggttctagaaaatcactataagtgtgaccctggggccaacagccttaagattatctgagtgcttgttagaaatgcacaatctcagacctcacctaccagctgaatcagaatttgcattttaacaagacctggaatctcatatgctcattaatgtttgaaatgtcctgctaccctaccccaccctaggttcctaattattccacttctttcctgttttcttaatttctatttgtttttatttttttcctcatatgaaaacattatttttaaaagtcctctgctgattctgcaccctcattcccctcatttctcttcttttctcaaccaagtgtcatgaaggaggtttctatacttcctgaatccatatcttctgttcacttctcaacacactgcagtatagtttagtcacctaccaaatatctggccgtttctatgtgccaagaactgtattagactctgaggataaaatggtatacaaaagacatggtccttgtcctcaaattactatcctcaaaatcattttgatatagatcaccactgatgtcttgaattgtcaattctgggaagcactctttattcattatcaataagagagcacagctgtcctccttaagccagatattgaagagattttgcaaaaatataacagtgccacttttctcactaactttattaagaaaatatttttggggccgggcgcggtggctcatgcctgtaatcccagcactttgggaggctgaggcgggcggatcacgaggtcgggagatcgagaccatcctggctaacacggtgaaaccctgtctctgctaaaaatacaaaaaattagccaggcgtggtggagggcgcctgtagtcccagctactcaggaggttaggcaggagaatggcgtgaacccgggaggcggagcttgcagtgagccgatatcacaccactgcactccagcccgggcaacagagcgaaactccgtctcaaaaaaaaaaaaagaaaatatttttataaaaatgttatttatgtcaacatatgataagcttgtttttcattttaaatgaacaaatattcctaaaagttattttaatttctaatagatagagatccacaactctctaagctgctcaataatttttagagtataaggggctcctgatgttaaaaagtttgagaacaactatgtttcatattaaaaccaggttggttgctcaatgatatagtttggatatttgtctctgcccaaatctcatgttaaaatgtaattcccaatgttggaggtggggcctggtgggaaatgtttggatcatggggacagatccctcgtaaatggcatagcaccatcctcttggtgctgtccttgcaccaaaagtgtgagctgttgcaagatctggttgtttaaaattgtgtggtaccaccccctcaccctctctcttgctcctgctttcaccatgtgatgtgcctgctccctcttcaccttttgccatgattgtaagcttcctgaggcctccctagaagcctctaagcattgctatagagcctgcagaagctgtagaatctgcagaaccattagccagttaaacctctttcccttacaaatcacccagtctcaggtgtttctttatagcaatgcaagaatggcctaatacactcaataaatccccagtatctacataggcatcaactctaaaatgtataatacatatgaataagttgctctaaacattttctctctgatgtttgattaatttagctaaagaagtcactttcaagagatctggagaagtaagatggccaaataaaagcctctaccaatcatcctccccacaggaacaccaaatttaagaactatctacacaaaaaagcaccttcataagaaccaaaaatcaggtgagcaattacagtatattgttttaacttaaaatcactgcaagaggcactgaagagggtagaaaaaacagtcttgaattgctgacaccatccttcccctattccccagcagcagtgaatctgtatgcttgggggagggagagtagagtgattatgggactttgcattgaaactcagtgctgccctgtcacagtggaaagcaacacttgacagaactcagccaatgcccacagagggagcatttagaccagccctagccagagtgaattcatccatctcagtggctggaacttgagttctggcaagctttgccagtgcaggctcaactgctctgga

SEQ ID NO: 917303 - DNA, 4001 bp, Homo sapiens
tttcagtttgtcagtaatttcactgaaggcagagcccagatactaatttgtctgaaacattttaggcccaacatctcatgaaacaggctccaggcaagaactcttggacttgggagccaacaaacatgtttcacctagtctttagcctactcaaatataggctacagactttcaaaacagagtatattattttagggggaagcacgttaacgcttaacaagcatcaacaacttaaggaaaagactttcaaagtctaaagtttctttgcccatcagataggccttatgaagaaatatgttgataaggaaaaataaaacaaatacacccaaatatttaatttttatggaaagtaaacatgacccctacatactacagaagcaaacatttcactttggtgatgaaatttagaatctctaaactatctttcgattagtcagaaatgcaggcagatttatccctcccacgtacatttaattaccatggagtttagaaaagcttattcaacagaactagaagcaggttcaaaacagtgttcatttaaaaacatatattgttagactttggaagactaagtctacctggatttggggctgttctgtgtactgctggaagacaatgtgtactatcaaagatacttacatagctggttatttttcttcagaaaaaataattggtcatccaattttaaaaataactattaaaggttttacacagggatattaaccacataagttaaatctttgaactggtagaaacagatttttccattttcattatttctatagatagaataaggtgtttattttctcccttgcaaaaatgttaattaggtttaagaggcaggatgacaaagagatagttattataaaattaaataattttcctgtcacctttatctagtaacatgattattgattgcctggaagcaaattagatttataggaaatataaataaatatcataagagcttaaaaccagatttcctgaaactgtatactcccacacaaacaccatttttcaccaaaaatctaacagatactggcatacgtgttctcacccccactttcactttctcatccacactattaaaatcgtgaaaaacagctcatttttaaaagtcagccacaactgacaaggtccttggcattacatgttggtcccaggcgctgctgccttcacaatattaagagattcttttttactactgtcctatctaatttttatgctaataattatgtcttaattccaaatatataaaaaaatttaaagattgttgttactctgcaagctataatataacccctaaattcactttatgagtatcctcaacattagcaaccaaacactaccatgttggacacacattaaaatattaacactaccatttttgtcggtatagagatttatagtaagactatgctatgttatgagttacaaacagcttcaccttcacagtccctaagccatttttaaaacagtctcttttagaatgagaacagaggaaaacagagagaacagaagaatttttctgtaatcatgaactctcagcaattcttttcacttaagctacaagccctaagtttaaatatatatatatatatctaacaaactgttgaaacttacttgacagtgactcgatttgataaatcctgtagatctccaggatggaaaagctgggcttctttcaatccaatctgttcacaagctttcaagaaaacgtttatattatcctgtgaaaagaagtggaaagtgattgcttagctgagctctctctcagacaaaggttacaaatttttatgatataacttcgaagcttcaaagtccaattacagtcagcaaaagaggcagcagcaagacccatgcatatgtatatttgaaaaaaaatacatagggcttgtacagcctttcagtcctccagagcatacacagtcgtgctatcttatgcccgggcatacactgtttctgtgatctttgtgactggcacgttaaacattacctgttacaggacaagtgcctagccactgagcagtaatctacactttgatgtcagctctgctctgcaaacaaacgccctctttccagctttgcacggcaagcctcacctctcctctttaaaaataactccagctactgacattcacccacccagaaactgttggcagggaagaaataagaggaggaacattctgtttctatgattacaaattacagaacgactgtggaataccacacctggaatctgggtttggttgttgagctggctcttgacaggcagggaaaccatactataggactgaggagaaacctagtgttcattggctaaattgcatagtttgtgtggcacattactcactccctgcacctgcctcaagagctgcctccaaaaatatgaaagcctatcccctccctccaaggttgccctcatatctaatttcaaaacccaaatcctccattcacaaaccagtgctcttcgttaatgtaaactgctgtgcaaacacagattacagtatatgctattttaaagccagccacatttcagagacatacatttggttaccagaattaacttaggcttcatctctactactctaaaaaaaaaaaagaagaagaaaagaaaacactttatggggttgaacttgtgacaatcccaggcgggttctccatattaactgttacagttcgctggtaaaggggtggcctcccagcatgccaacacacatctgtccactgaggcagctggtaatgctgcctctatggcgtgagcctccttgaaacctcacctccctccctaagaggcgactttcacagaccagaagatagtctgccacttggagaaaggcaattactcttttcctaagataaagtggctaaattctacagcttgggttcttggagagtaaggggattccgggaaagcacaaggaaaggtgtggcaagagaaaagcgccactgattactaaggaaagagacattctaaaaagtcactatttgtacaggcaggatcctggtcattccaatctactgtgagtaaaaggcagtgcgaactacctagctgaaagatgaaatccacgaatcgttttaaataagatgaagtcaaagagtaaagaaacttgcaagtcaaaagttgaacagctcaatgaaaggtgtttattttgtttttcatttgacttattatggaaaaaggagacacaatttattggcaaaattccaagaggagcaaaatgtgataattttgttaggcccatagtttctaaaaagtatactatctgtaattatcaaatgatacaaattaatggttttaaaattggccctctgagaagcaggcaagaaaagatggttggatgtaccaataccccaagttccataatgatatggtttggctgtgtgtccccacccaattctcatctgaaattgtaatcctcacttgtcaatgaaggacctgtaatccctgcatgccaagggagagaggcgattggatcatgggggcagtttcccccatgctgttctcgtgatagtgagtgagttctcaagagatctggtggttttataaggagctcttcccccttcgctctctctcacctgtcaccatgtaagacatgtctgcctccccttcccccatgactgtaagctctctgaggccttcccagccatgcagatctgtgagtcatttaaatctctttgctttgtaaattacccagtctcaggcagttctttacagcagtgtgaaaatgaactaatacacacaggatgcaagtctcatatcaataaaggaaaaacaaaccattagaagtcttcacaccaattcaaccaatttgatttggttctgaatgtttaaagtattacaaaaatattaaaataaggttaaactaaaagtaaacttactcaaatgagagccaaaatgattcttcacatatttcatacaaacataatagcattcatctagttgacaaataggtacagattgataaggatagataaataaagccaaactctcctcaaaa

SEQ ID NO: 917304 - DNA, 4001 bp, Homo sapiens
atggcagccagctttaggagtgttcagcagcaggaaaaaacaaggtttgaaatgaacaaaatcagaagctaatctataaaaattcttccaaatattacagctcatatgcaaagaaaatttctaagatggttttcccaatgttgagaatcttagaaatgtacatggcataaccaaatagaagggtaaagctgaaagaaatgcgtaaactgtcaatatctggctcaactatgctaagagaaagactaaattacctattatccatcagaaacctatgaagaagcagagtgtgtagacaaaactgtaggaaaaagtgacacagatgcgtcaggcagttaatgaataaaaatgccttactggactatgcatacacagtttatcaacttttttaattttgtaatttcatgggattttcttattctaaatactcacatttgcccctaagtttgtattctctcttaaagagggtgacaaatttgcataagtttcagattccatcaatctgcctgcccccgagcattacccaccaatgtcctcagagcacctatgtgctcttccttctggctggaatattcttcccctagaaaggtgcacatctcactccttcgcttcattcaggtttctgctaagacatcagcatactcaatttcccaagcaaattcctatctaaaatagaatcccctaggaccctcgtatgctgttggagggaatgtaaattagcatagccactatggagaacggtatgcaggttactcaaaaaactaaaaacagaactaccatatgatccagcaatctcactgctgggtatatacccaaaagaaaggaaatcagtgtatcgaagagagatgtgcactcccatgcttactgcagcactattcgcaatagccaagacggggaatcagcctagtgtttattaatggatgactggataaagaaaacgtggcacatatacacagtggaatatttttcacccatacaagagaatgaaatattgtcatttgcaacagtttggatggaactagatgacaatatgttaagtgaaataagccaggcagagaaagacaaattttgcatatcctcactcatatttgggagctaaaaattaaaacaattgaactcatggagatagagaggagaataatggttaccagaggctgggaagggctgtggggaagataaaatggggatggttaatgggtacaaaatacagttagatagaaatacacaacagggtgagtatagttaacaatagcttgttgcccatttaaaaataactaagagagtagaattggaattttcctaacacaaagaaataataaatgcttgaggtggtagataccccaattgccctgatttgacattacacattgtatgctcgtatcaaaacatcccatgtaccccataaacatgtacaactattatgtatccatactaaataaaaacaaaataaatagaatcccctgtattcctcaccactctctatccttttatatcactttacttcacagtatttaccacctgatgtgtccccccactataatataatataagctccgtaagaggagcaacgtcatctgttttgttcactgcttcatctgtgttgttgagatcagtaactggcacacagcaggcactcaaatatttatgggttgaataaacaaaaatgtgtgtgtgtgtatatgcacatgtgtgcatgcagatttatggaggcatgatagattgatagatcgatagatataaatatatagagagagagaaagagagagagagagagagaaagagagagagagagagatacccaaatcgatggaatggaagggttgatctggtctctacagccaggaaaatccgattcagagaaggagcaggagttctcgtcttcctgagtccatacgcctttgtccagccaggtcatcctctttcattttaacccatggtaattccagcaatctactcctacttttctcagaggagccccgggataatcatctaaaaagaataaaacttttagtttaaaaactgcccgtttttaaagtcaagaccccagtgacctggcaaatacttgcctcgcccacagagtcacaaagaaatgacttcagcaaaatcccacccgccaaaggccgttggcttattgtctgggggaccattgagattcctaaaacgtgacagcctctatcaaacctgccagctctctccaggaaaatcaaggactcttcaggcctctgcatagtgagctaaagcgttcctaagtcagcttttgtgcagaaaaacagccttgtgcaagcccctgatagagaaattaggacgtagtttcctcgcatcgcaccggaccacatttgctcctacgaggcaacgatcattgaaatgtcctgttaatccgtcagccagtgtcctgtaggactcggcactggggtgtccccagactactaatatggactgatcggtggttcaaaagctgactaaaaagttataaaactggaaagggaaatggggggaatggggaaacccgcagtgttttttttccccgtctgtgctaacactgccacctagtgttatgaatacgaagaacctgcaaaatcaaaattctcacaaagaaatgcagatttaggaacatagtctcattaagtgccatttattgttgatttttctaaaatggtgtcaatcctgtttcatctggaaagctgaaataaagttttgtagaaaacagcacaggcattacttcttgcaaaaagctaagagttaacatctattgtttctattcaccagccacctttccaagagcttcacgtgaatttactcagttcttggtcacaagaagctcatgagaggtgctactagtgattcctgtttcacttttgttttacacgtgaaaaaattgaggcacggggaggaaaagtaaggtcatcaaggttacatgcgcaggaagccactaagcctcagatagtgtcagtcttaaactgctgtcttcacattttataccatcctgtccctctttctaagtgctaattgccagaaagacaatgcacaataattagaaaacttgaattgaaccctcaaggagttgcgagacaaacagctttttgtggcaaaaaaaattaagaggagacagtgttttatctgatcaccaacagcttttcaaatggagattcgtgtataagggtttaagattctcctacaggtataacaaaacaagtaaaagagtgcatcctacggctaacactccaattctccaaagatgcaaatgtgttttaatgcaatctccttcacatggagtcataaagatacattacaaggttgtaagatgggaagacccgacagggaattaaaaggcatcttcatcagtttacttcattctcttggctttccattgccagggctttaaaccttttaatctcatctttttaagtaaggcacttcggtttaaaacaaatacagatgcatatagcccccaatatgcatatttatgtataaatctcatacataaatctcatacataaagcactacattttgtgtatatcattaaactatgctaaaaaggtaaaaaagagataaaagcagtattttcactatttataagctttataaaaaaacaaacatgcctccttcaaaattttttttttcaaatgtagtatgattaaatagtctctatttttacaaagtatcttggttgaccaagattggagacttggttgtgagctagtgtgtgggcatccttggtctgcatggttatcacaaacggatgcagatacaaaaattaggtgaaagcagttggtctatggctggtttactaaatcatggagctcattactcaatggtatgtaccagttaagtggaggctttgttaaaaatgagctagtaaatttccattccactgcagtcactgactcttccttttgtgtatattcgcataaatttgttcaaaccctgataaaatatatcatctgaaaatagttttaaacatattaatttctgatgagaatttttatgcatgaaatatttagtt

SEQ ID NO: 917305 - DNA, 4001 bp, Homo sapiens
actggataaagtccaaatttcttaatctggtataaaaaatccttcatttttctgttcaagtcaattcagtaaatattttagtgcccaatgtaagcaagaaaaggtgccaagtgttctgaaatgaataatacatgtccctgactactacctccacctcggacactgggtccttcggccagacaagcccatatgcaaagctcgtaatacaacagcccaaagacacatacatttatttttaagtggcctgcgtgctacgtgcctacaatgtacgaaatcccaaaccaatctgaagactaagtgcctacgtaacacctattcttacaggtctccaggcagaaatgctccctaagttcaaattacttcagggtaactagtgggataaaggcatggatcagtttccaaatgagaaaactgggcaagaagcaacccccgccatcaatggctggcatgcagtaggtactttatcagtggctaaatgaataaataatgaaaaaatttcaaagttgatgagagaaacaagatatatggagaatgtaacacacaagtgggccgaattaaaagtgatgttattctactttggttctcatttggcctacttttaccccatgggaaaactcacatgtgggactcggacaagctaaaaagccaaaactttgttattcatggctcaacaaagctttgacaagccaaaaaggataccagattcccgcttccttctttacctgccaaagtccattttctaaagaggtgtgggggtgggaatcaaatctagcaaagtaaataaaattgatctactgagatccaacttcattagtgctgcatcgaagtacatgcaaaagaaatatcaaaacctgtcctgggaagaaggccaatttacaagtaagtactattgccgcaagaatgtgaaattcttaaaggcagttccaataagctggagctcacaagtgttcctcctcctgcaccgccaccgcttttcactcaactttgtttctgatttctgtgattttaaaaagcataatatacacagcaaagcccatgcataagtgtactttagctcctggtacaaacgaacgtctggattcataaacttaacgtaaactgaaatactaaaagaaacactacatgagtcaaaagtccttgtttaaaacgtggcatacagctttgaaaagcgagtgatgtatttcctgaatgatgctttgtgtgcaactgcttccaaatcaagattcatatttttaaattaccccctggaagatgtcaaatctctctcccaccctctccagcctaaagagaaaggtgagaattcacaggcaacaggctggggcggagggaatgatctctccccatccctttccagagaacaaaacccgataaaggcagctagtgccactctcattgccgacaccacacacacacagaggaaatttaaacactcaccccacctctcccttcccttaagaagcaaacgacgccaagctctgcaccacggtggccggaaccagcaaacgctaacagccggaggccgcccgcctcccgggcgcctgcaggcggcgggcaccgggcgccgactctccctcctggaccagacccacacccgagtccacgccagccccgcagcccgggcgagcgaagacagccgcgaaggaccaaggctccggggcgagctgtggcgccgctccggccgcctcccggggcgcggcgctgacccacacccagctgacgcccgcacctgaggcggctgcccgcagccagcgagagggcgcgcagcgaggcgggcagggcaaagttactcactgggaaagcgcggctgcccgggccgcgcacgggctcctggcgccgctgctcggcaccagctcccgctctccgcggcccgctgagggagcggagagcctgcccggctccgctccgccaggaatcgccgccgccgccgccgccgccgcggatttcctggcaaaaagcaaactccggccaagacttcacttctcaaccgcccctgctgccttcccgggggcagcgccaaggccgagcggcccaacccgcacccgggccaatcggaggtagcacagggcgggaggtgggcggaccagagggcggctccacctatccgagagctcgggaggcgggccagaagggacccgtcactcccgggttagagtgagaccactccgccctcgccgcccgcctcccccactcgccccgggctgtccccgccgcccgcctgattcccctgcggaagccccgctggctaggtgtctgcgcgcacccccggccgccgccaagagtggcacagctggggaaggagtgaacatccagaggaatcgcggggcggggtggggggaggccaggagaacaggtggcgcagggaagcagaaacgtagttgcgctggacagctggagtcgggcagggtcggggccagcggcgaggggacaagaagggccgattcgagaggaagcgcacctgagggagcacagcgaaggccgggacgcagggagctggatggagagcgagcctgggcggcgaaaggttgccgaggcgggggctgggcgcctgggaacaaaggtgagggcgggttccgcaggtgaggaggtttgaggagccactggggagaaagggaaaaggaagtctacagccggagaggacgcgctctgggggtagaaggaatcctaggacggaaaggataaggtgggaaacagttttctcccaaactctcactcccccaaaagagacatttctttcttgccctattttgacccagttgaaaatgcaactgcaagctccccggtgaaacaaataccgccttcaaccttcgtattctgtggtgactcatctcgcacgtgacccccctccctcttcaaggtgtgttgaccgactacagtttaagcctgtcgtcccacaaaaggcccgggagggccggggtcccaggaagggccatcctgggtcaacaccgccccagttgggaagtcgggccgctttcggacttgccactgggaagggaagtgatttgggggcggcaggtaaggccgcgccccttcgccatcacctggggaaaggtaccagagttgagccggggcgcccgcaggcctgtctgggcctcggggtaaggcggcgctggccccgccccctgcccctcccgccgcgagtggcctcgcgtggtcgcccaggtgagccgcggggccgcgagccaccgctcaccccgcgtcggggcgggggctgggggtggagcctcatgccccgccccgcggctgggccctgccgcgccgctgcggctcctcctccctccttccgtcctccgcgccttccgtcggtcggtccttgcttcctgcttcgcctccgcgcctcgcgctatgggacagagcccccgatccgccagcaccacctgaggatccagaaaccgccccagcgatggaagaggatcaggagctggagaggtaacggccgaggaggaggcgggcggagcgggccgcgcccaaggggagcgggtggccgaggggcacgctgcctggcctggcagccggggcctgactcggggcgcagagaagaagcatggagagagaagtggggaggagacatgaatgtgtttcagttgagaggctgagaggtacactagctatcaaggagggaagacaagttgggagaccagagttaagtatccgaactgcccacccccgttacaacagcagtgtgtaaaaatcacgccccgggcctctgctcctgaggacggtactcgtgcctctgtccctgtaactacggctcaccttctttctatgtgcagactgctcctaaagccactctgtgcgctgagctctttttctccctgctgcttgactcctgaaccttccattctcctagtttccttctcttgcaaaatggaagccgtagttgggcctgcacattgatcatctgtatcctctatttttatactagagcaatcgggatttctatgcctttcaaccctctcttcatcctctagcaggaccagtcctattctaatcctatcccttgc

SEQ ID NO: 917306 - DNA, 4001 bp, Homo sapiens
tccaggtgtggtggctcacacctgtaatcccagctactcagaaggctaaggcaggagaatcacttgaacctgggaagcagaggttgcagtgacggagatcatgccactgcactccagcctgggtgacagagcaagactctgtctcaaaaaaaaagaaaaataaaagaatacaaaacaaagaaataattgcaatacaagatataacaacagctattagtaacacatagacatgagaatctacgaatttagtaaagagcttcttgaggagatgatgtgtaatgaaggctagcctttacagttgaatacaaattttaaatttcaggtcttgaaggctagagccattcctggtaataatgtcccattaatatagtcatgctgcctttctcatccaaaaacacagaaaactatttgagtgactattttctccattctctcaaggatgctatgtaacctagtcctactctgaattcctggaagatgttaattcttcacatacaatatatgccttgtggcataaaggctgaatttggtcataaaaccttagttgggtaaggctaggtgggttgtagctttcaaaaatttttcacctagtttagacgctgcaaagtgtaatgaaaggaccaatttcactaggtgttaagtgacttggattctaatccaagttactaaaaattaatgtgcgtctcctgagccccacctactcaggaggcagaggtaggaggatctcttgagcccaggaattccagtttagcctgggcaatatagagagtcctcaactcttaaaggaaaaaaaaaatgacatgaccttgagcaaataatttagcttctctattgtatatttgtaaaaggagagtattaaattagacctatagaattcttttcagctcttagctttctatctaattcagtctccccactaattttcaatgacaagaaagaacatatattattgtttcaattttacagaccaagaaactaaaattcagagaagttgtgacttgcttaggattacaaagtgattattggtggagaatgacgaagtcaaaactaaaaactgggtcctcacaagaagtacccaacccagttccttatacatgtttgtataatgaaagaatacaacttagtgagtgcatgcataaaggataatagaaagcactgtgacctagagatccagaatccttgatttctaaattttgaccttaccttgggcaaactctgccctgaactttaagatggatatgacatgcccttttgaccttatgaagagttttcagaataaaatgaaatgaaaacatattctgaatgtaaacctctaaaaagatactattatagatgacatcacctataatatcttaactttatagaaataaaggttatgttgtgggaaatcatggaacaataagatttgttttgttttcttgaccagataggatgcctgtgctctgtcagataaagaagtgatcatgtgatgcatttggtatgccttttttagcactgctaatgtacagccaatttaaatcaaatagacataggctttgcttataaaaaccacatatatttctaagttagtttgcttggtggttaacacattgcatattgcattagtcttaatatcctctaatgttggagctagcactggatcctagaaattcagaataaaagtccaccttacccctgttacaactagccattcatcttctttggtatatagtttagctctccttccagtcactcaagtacaacttaggaaactaaaaccatagctgattattgctggagcaggaactcgaatcctagtttcttgacttctagtcaaatgttctcgtagtaacaggtagctttcaccctttttttcttactgatgttgtgctagttcgttcttgcattgctgtaaagaaatacctgagactgggtaatttgtaaagaaaagagtagggtttagttggctcacggttcttcaggctgtacaggaagcatggcatcagcttctcctcagcttctggtgagtcctgaggaagtttatattaatggcagaagtcggaggggaaacaggcatgtcacgtggtgacaataggagcaagaggaaggaggaggtcccatgccctttttaaacaagcagatctcttgtgaactaactgagcgagagctcggttatcaccaagggggtggtgctaaaccattcatgagggatccacccccctgatgtagtcatcttctaccaaacctcacctccagcattggggagcacacttcaacacgagtcatctaccaaacctcacctccagcattggggagcacacttcaacacgagtcatcttctaccaaacctcacctccagcattggggagcacacttcaacacgagtcatcttctaccaaacctcacctccagcattggggagcacacttcaacacgagtcatcttctaccaaacctcacctccagcattggggagcacacttcaacacgagtcatcttctaccaaacctcacctccagcattggggagcacacttcaacacgagtcatcttctaccaaacctcacctccagcattggggagcacacttcaacacgagtcatcttctaccaaacctcacctccagcattggggagcacacttcaacacgagtcatcttctaccaaacctcacctccagcattggggagcacacttcaacacgagtcatcttctaccaaacctctcctccagcactggggagcacacttcaacacgagtcatcttctaccaaacctcacctccagcattggggagcacacttcaacacgagtcatcttctaccaaacctcacctccagcattggggagcacacttcaacacgagtcatcttctaccaaacctcacctccagcactggggagcacacttcaacacgagtcatcttctaccaaacctcacctccagcactggggagcacacttcaacacgagtcatcttctaccaaacctcacctccagcactggggagcacacttcaacacgagtcatcttctaccaaacctcacctccagcactggggagcacacttcaacacgagtcatcttctaccaaacctcacctccagcactggggagcacatttcaacacgagtcatcttctaccaaacctcacctccagcattggggagcacatttcaacacgagtcatcttctaccaaacctcacctccagcattggggagcacatttcaacacgagtcatcttctaccaaacctcacctccagcattggggagcacatttcaacacgagtcatcttctaccaaacctcacctccagcattggggagcacatttcaacacgagtcatcttctaccaaacctcacctccagcattggggagcacatttcaacacgagtcatcttctaccaaacctcacctccagcattggggagcacatttcaacacgagtcatcttctaccaaacctcacctccagcattggggagcacatttcaacacgagtcatcttctaccaaacctcacctccagcattggggagcacatttcaacacgagtcatcttctaccaaacctcacctccagcattggggatcacatttcaacacgagatttggaagggacaaacattgaaaccatatcagacataaaataggaaacttggtccatagcttaggtaaatattaagcaaagaactttgtctttaaatgagtaagctctgcagactttttaaaacactaaattctaacattatgatagaaatttaagattaagagattttagacattttcatccttctgtagattaaaatcgtatgatgaccatccttcatttttagcttcatctttatttatttaaaaagtttgcatttgtacatagtaatgtgccaagttttatacaaaagcaggaaatatctctgctgctttcaaataattagaacaagggttttctgtgaatagtaaatttaacaccttccagcatagattattatcagaaatccaagtactcttcagttaaagtaaacactta

SEQ ID NO: 917307 - DNA, 4001 bp, Homo sapiens
tattgaattctgaattgtgtccgatgtaaagtagtaaactatagggtcaaaacaacagttggaaacagcaatacagagagtgattgggtacattgtccttactgctgccactactgagcaattaacaaatgtttgtgttctcacaagagaatataaaataagattgatattgtaaggaacaaaacagaaacagaatatgatcaaatgtacaaaaatcatttttaaaaccttagttttgtttattttgcttctacttaatgtaacaggtttggttaaagtttttagcaccatactagaacaagttacatttaaaattagaggaataaaaaatcccactatttcgatgaaaattacaatccttgagagatatgttttccatgtggcttctggaaaattttcaaagcaggcttctgaggcattgttaccctgagagtgggtagactgaacaaaaacggcgggtgcacttcctccgatcacagttaaccacacgccagtgcaaacaatctttgcatttcttttggttcttagagtctttgacttaaatgggtagacaattgccagaaatcgatctacactaatacaggttaagaacagaatgcttccgtacatgttggtataaaacagcatcacagaaatcttacaaagtaaatctccaaatggccaattccgtgttgtgaagtaaaaaatcctgaagggtaaagtaaaaacaaaaagcaagtctgacattgccaagttaatcatgtaagttgtagtttcatttcggactttgaggacgcagatgaaaatgtatatggcaacacaattggatattaacccaagcacaaacaccatgctgaacatgcacccatacaaagtgtacttaaaggagtcattatagaagcagtgggagctgttaacgcttaccatcgtaaaggcacgtccaattttcagtttggaagcactttcatcagctgcagtctcctttgggattcagattataacctctataacctccaatttatttgcaaattatctggatctttggatggttttataaatatttcctttttctcagaaatacccaaaagaaacatgaaatttgttgctgtaaaatttccgctgggttcttcaacaggaaaatattttcatttgttagtctttagaaaatccatgaattccaaggctcagttaactgacgagcaacctttaaaaaatacagtcaacgagtccaacccataggattataaatttaaagaaaagctgtgatctgtgaccagaatgaaaccacttgtcttctaaacttgtatttcagtagtcaagatgaatactccaaagttaatgtttctttatgcctcagaatgttaagcttaagttatcaatcttattttcttttcagtgcagagtttcagagacttaaacattcccaatttgtcccattttacttcttgcttcttttaaatgaagttttccttttttgttttcctgcagtggatcccagattgtgggtaagcagaagagtcttttaaagattccgaaataaactcccaagcttgttagctcttgttgaattgaggccttttcctcagttgccagttgtatcttgaggtcgctttctctgaagtgaaaaagaaaggcttcctagatttgtaatatgacatcacaggaagaagaggctgggtttggacaaagaaactttcagcccagtttgtttgcacttcctttaatctgataatgtgtctgctgggaatatacctaggaggcttgcaaatggtcactggctgttgaactgcgtggtctgctcattaactctttttatgtggaaatgccttctgcggtgctggcaacctctcagagttgttttgatttgtttcagtagtaataattgaaagaaaaaaatcactattcagcctgttctcttattcgattgttttcgtgtttgggatatgacaatttagaaaagaaaatgtgtatgggtgtgtatttataaattgaaattgttagtgatatcttaacatagcatttcaaagaactgtttaatgactatgaaacaggggcctttaacctttaaggtataacaagcatttgactcttggtttctgaaaaatactcaatatttaattgttatcattatgagtagctcttatcctgggtctcattagtttttgataagcaattttctaacattctttcctctttcctatgcagttgtattaatattttagagctgtttaaatttttaaattactcatttctccaaaagaacaaactcaagaatgtttatctttggtgtggtgttaattttactttctaagcacaaaatgaaattgcatctttttaagcaaaatttttttaaccttaaattgattgaaataaggtttagagaataaaaatcctactacttggcaaaattttaggttcatagtcttatcttccttcttcctcccagctcttcccttaaccccttaatatgacattaactatatattgaaatatatttcagattttgtctccatctaaaagtttctatgaatggtttatatgtttatatttaaagtatactcatattttgggccaggtgcagtggctcacgcctataatcccagcactttggaaggccgaggcaggtggatcacctgagatcaggagtttgagagcagcctggccaaaatggcgaaaccccatctctaccaaaaatacaaaactagcctagggcaatagtgcgtgcctgtagtcccagctacccaggagactgaggcaggagaatcgcttgaacctgggaggcagatgttgcagtgaaccaagatcaagccactgcactccagcctgggcgacagcgagactatctcaaaaaaaaaaaaaaaaagtatacttatattttaaagactccaaaatcagaagaagaaagtgtgtgtaaggtgagggtacttaaatgtaggtgttatttcctcaaagattgaggatatcacaacctctatggcacatgtttttcttgttttaaatatcattttcttcagaaaaggctagatctagttatgccttactgttattatttttttaatttggtctagtttaagctgaaactcttcctcttgggtattaagtaatttaagaacaatttatttttttctcataaattacttagctagcttaaaaataacttattacagtaaaatgttttgtgttgttttgcaccattctttcacactcagcaatttttgtcatttgttgatgaactataatctatttctactgtctggactagaaaattcatctattatcaaatgacaaaaaaagatgagtattacttataaccaatacttaaaattttgaagggttgaatatcttttatatcacatttggtatagaaaagatgtatgtgtgtgttcttattagaaggctggtagaagctgagtgagcattaatgaaaaaaggagtggttaataagcttgtattctcattggaaaaaattttctgttagtagttatgtcttactgttattttttttttatttggttcagtatgttttaaaaaaacaaaatcttagtaatcttctttcaaattgatagtctcctctttagtcatctttaattaatgaaatatatgcagttgtatatgctgatctcatcctacttttactttcattttgaatatggcggcattttctcattcaaataattaaaatttattaattctacttggaatatttttctacatattgtcattactcacttgacttgttattcacttaagtcattcatctatagttttttcttttcttttctttttctttttctttctttcttttttttttctcactctgccgcccaggctggagtgcagtggtgcgatcttgtcttactgcaacctctgcctcccaggttccagcaattttcccacctcagcctcccgagtagctgggattatgggcacccgccaccacacccagctaatttttgtatttttagtagagatagggttttaccatgtggccaggctggtcttgaactcctgacctcaagtca

SEQ ID NO: 917308 - DNA, 4001 bp, Homo sapiens
ccttggagctgcctcccagagctggtatatcagacatcctcaagtaaacctggacccaattttagaaatcttggctaattttgagttaggaagtcctttctttaaacaatattttaaaattaacagaacaatcacaaaatatattttacatattgcacttttcaaaatactttaaatatttaaaaaaatacccaacaccacaaagtaacttagtttaaaataaaataaaaatttttgaaatcagacctaatcaaattgatatatctctcattttctttgaaaattttgaccaagatatcaattaataaatccactttgaaagacattttaagacatttaattaataaatccatttgaaacacattttaaaatgtgtttgttcatgtgtataaaattatgtcattgatataacattactattcctttaaacattgttatgttcttaaaaatatctcctcttagtctataatttagcgaaaggattactgttttgaaagacttaaaaaaaatgcttagctattttttagctaagaaaaaagattcctttttcagtaaatggataaagctgaaaaataagaaattaataaaatgttttaaagaaagagtcataaatatcttaatatttaattctaggaagcttctctattcatttgcttttttatttttaaaaagaagtttaaaagagttttagttttaatatctataaacttcaaatgttattccacactcaaaaaatatttctaatgtattaagtcacagtttactaaaatagctaagttttctgattcataaaatgaataataacacttaattttaagacttattttgaagattaaatgaggtaatacattcaaataaaaccttttaaactgaaagtactttcattcttgtgtaaggaaaccatgaaagtaaaagacacatcattctattttgccagtgtatcttaaattaactagcttttattgtcagtttagtgttcagggcaccaagggtacatttcatactaagattgtgcaagtgagagtaaatgcctccttaaattttccatcttaggcacctccgttgcttttagacctggctatgttttatattgcttatatacatttttttttcttttggaaaaaagataagctgaaaaacatttttgttgatgacatgctattgctgaaataaaaacccagaacatagtgatgtgtaggaaaaaactctctcaaaccatgtttttcttctgctctcataccaccacaacagttgtcaacacaaaagacttctgtgacaaaatgtgtgggtttttttccccacacactaagcagcagataccagctgggcatcctccaactcagttctgatactgtctacttggagatagtgtcagatcccactggttggggtctcagtgcccatacctcatacccccagacaccatcctaggcctccagaacttctgacctactggcttcaaattggggttctcacaccacactcttcaggttcaattaatttgctggagctgctcacaaaactcaaggatactgggcacggtggctcaagcctgtaatcccagcactttgggaggtcgaggtgggcagatcacttgaggccaggagttcaagaacagcctggccaacatggcaaaaccccgtctctactaaaaatacaaaaattatctgggtgtggtggcatgcccctgtagtcccagctactccagaggctgaggcacgagaatcacctaaacccaggaggcagaggttgcagtgaactgagattgtgccactgcactcctgcctgggccgcagagcaagactgtctgaaaaaacaaaaagaaaaaatcaaaggaaacacacttaccggtttattacaaaggatattgcaaaggatacagatgaggagatgcgtagggtgaggtatgggagcaggggtgcagagcttccatgccctctgggggccacaccctccagaaacctccatgtgttcagctatccagaagctctcctaatccagtttttatgatgtcagcattgggatttttatgatgtcagcattcctcccctacactatagggcaaaaaccatctctggggagggtcttaaagacacacaatttacaatgatgggggaaaaattagagtcctgccttggaacaggttaaaggagggcaagagaaggtccgaggcctgcccctgaggcctaccacaccaaacgttataacaacacaacagtttttatatattttcagttttgcataatatgaagttaaagacttaagtaaattgagtaaatagtagtttttttttttttaatttcacagatcaatagagttaactcctgagttatatgcatacaaccccaaagttgtttgctgtctggagctgtgcctacacccgcctggcatattcttgagacattggagctaggaagttggaaattgatagaaaattttgtcacttgtaacagagctaaagcaatatggattatggtggaccctatcacttggaatactttcctgaaagcaacacaggtcatcattgccaaatatttttaggaccccaattctgtactaagtgctagtgatgtgataggaagccagacacaattgaactagctatctctatattagtgacttatcctaaaacagagtttctgttgtaattggtttactgtttctcttagaatatttaaacgttttaccatggtctttcagattctgcgtgatcatacagcaacctcttctttagcaacctctccactatcccacccgggtactttagttctggtggcctctttcattttctgaaagaacatcagtttcttagcatatgatctttcatcttttggaagatctctgccccttctcctttcaaagcacagcctccttctcacatttcaagactcagcgtccatgttaccttcccagatcagccttccttgaacccaccccatccacctggatctccctgtttattcttcatgagagaaccctgttctttcataggatttttctgaatttgtcatcacatacttatttccttgtttgtgtgcctcttctcaccagaccctgagcaccgtgtaagtaggaacaaagtattatttcaaagacccaagtctgaaacggtttatctgtttatacttaatggctaaggtatacatgtacacgtattctatttgactaacatttgaggtaaaaaacatgggggaaaggagcagataacacatatttttagaggatttagagtatatataactaagaaggttccctttatttgttattttttgggagggaatcctgctctgtcacccagactagagtacagtggcacgatctcagctcactgcaacctctgccctctgggttcaagcgattctcctgcctcagcctcctgagtagctgggattataggtgcgtgccaccatgcccggctaatttttatatttttagtggagatggggtttcaccatgttggccaggctggtcttgaactcctgatctcaggtgatccacctgcctcagccttccaaggtgctgggattacaggcctgagccaccatgcctggccccattttaaatcttattctcactttgaggtggagttaatctcagaaaactttgagattaagttatcttaatatcaaccttctcactttattcatttattcaacaaatgtttattgagcccttactgtgtgccaggtagttttaaacattggggatactattgaataagatagacaaagcccaagccttcctgcatcttgcttgctagtagcgagataataaataagaaaataaatgaatttataacataacctcaagtggtgatcaatactatgaaggaaatagagcagaggtaggagtagcaaataaatgggaattatggctgtcttaggcaagatgtttagacaaggctttgcttaggaggtgctatttgaggagatatgtgaataatggagtggggtgagtcataggaagcatggtcaaagagtattttgggcagaggaaacagc

SEQ ID NO: 917309 - DNA, 4001 bp, Homo sapiens
ctgttgacagctcaactttggaaattccctcttttttgccgattcctgactatccctaaatccaaattacaaagtttaatgaccctggagagccatctttgcctccagtgaactcagaactgtatctaaatattcattaaggctctagataaatgtttattgaattaaaagggggaaaagacactggaaacctagcctccaaaaacccactgcctgctcccttgcccactacaagattaaactgggtgctcctgtgatgagagtcaacccatccaagacccagggggtctgaccctgggccatgaggcgatgacagccaagaggtctgggcagcggctccaaaacggagcacccactgccctgggaaatgttgggcgcttgctatgacacaaaccctcccccagggagcggaaccggatggccggaaaccaagtcagttctgtatagaccctaaggccccaatcctattccaccaccctccttcctgtttatagatcccgctcctggaactccaactaccaaagagaaagcagacgttttagaagtatgtaacacatgacgtaacttgaaaaagttatgctgcttattggcgcgagttacaacttgccgggctcacacaggaaaacaggctcacgttaattactttgcctttaatatgccacgccgtcctttcctggggcccccgcaacggttgggtaactgagaaccaggtagcctcggtggtaggacccaaactgtgtgggcggtgagcaaaaggcacggaaggaagagggccgatcgcttccgaagcggcagccgactgggattcactacaagcccggcggctcttttcccgcacaagcgcagggagaggaaacttgggcacctcacaggcggcaccgagttgcccgatcgctcggcgatgtcgccgagggggctcgcggcactgcgccgatgcccctggctcggccgagggcgtgccacctttgtctgggtttccccaccaggatgggctacgcctcgatgcaaagacggcttgaactggttggaggcgccgacgccgctgtccgcgctggagttcccagccctgcgcggggcccaggaagccgacacagccgcctgaaacctcccacttacactgcgcgcacgcggcgcgcctgcaagtcccagccccgcggttacttccctggcgcggcagccacagggtggagagccggagacccctcgctctcaggcgcagaggcccggcgcacccctgccctcctggcactgcatcgccggaccaggcagggcccccgtgccctctccagggcccgcttcttccgcgcccacgcgagtcccttcttcgggagacaacgggccgatggaccctccctcccccagcaagacaagatctccgactgtccaccgcgttagggaacgcacgacagacacccagacagcacccacacccctgcccgcccctcggccctcactcacctgcctgcaccgtgtccgagaggtcgtgcccgggggctgcggtacggggaaattccttcaatttcctggcgctcaggttcagccccccggagttggccgcctcctcaagcgcgcgctccagaccccggttcaagggcaggttgaagcccccgctgccaccgccgccaccacccgccccgccgggggcgccggttcctccgtggtgctgatggtggtggtggtggtggtggggatgatgaagtgggtgcagagtagctaccgaaagggccgggacgaaaggttggggttcgcttcccggcgtcgccatcttctcccgggcccccccaccccgccccgccgctcctgcgggggggtcacagcgttccccgcgaggggaaaacggcagctcgggctgagtgccgcagtgctccaccgaaaggcgctggaaggaggggaggagggtgtgggcaggcgcgtagaatggggggcgggcggggaggcggccgtggcagctcggtcttgaaggtttcctgtccccgggaagctaaggactgcggcggcggcggcggcggcggcagcgcgcatgtgtctcctcccgcccctgcgccctccccccggctgctctgccctcctccgccgtctgctctctcctcctccttcccccacgcagtctgccccgcctgagccttcctccgcgcctattctgccggccgccgccgccttgccgcgatccgccccgcaatcgggtacacggcggggctggacgtctgctccggggcaactgaggcgccgaacctctctctgggcgtccttttgccgcccaggaggctttaggggactggaggttgcggggataggggggtggtctgagaacacggataaaacggcgggaggcaatgaatgggatttacagtacagtgaggtttggggcaggagagggttctctcaattctgcgatttattctggccgtttaacccagagatccccaagaggcagttttcattcactatggggtcatccctgcagatgccccctggcatttgggcgcttacaatgaaccagacgcttgtttagggagtctacgtaagttacctcattaatccagggaccccaggagtgccaaagttgttcccctgagtctacagaggaagttaataaatgtatctaaggtcacccctgcagttagaggggcgctagattcgagctagggccctcagaatctagggttgccctccttcacagtgtacccctgggccagacgccagcgccaagggacgaatacgagtgggacagagtgtttgctgagcggcagaagaaagctacagacataggaaagaaaaactcaaaatgagggcagtgtttatgggggacagaagacattgtcgtaggagaaagatgagctggctgctccccgaaattgggtggtgccaggagaggctagaaagccagtgaccccaaacagcaaatcagtcacagctcgagtctgagctgaaagaaccatcgaagtctccttgtgcccttcttcttcccgctttggggcatggaaacgaacatgtccgcttgcaagtgaattcacattctgccatcagccacccagtggcacccaggccaatgctggcacaccaggggcgacagagaacatctgacaccctaagggcagaccagctggacgattaatagaataccattcctttcctgaagttaaagcttcatgtccaactttccagggcctttatttttgctctattcttaaggcttgattgtcccctatgagcgacttggcttggggaaaatgagtcggggggtgggtgcggggttgtcggggtgtcaagcacgaaagtaatgcaacccttggagtaggggagctggttttttaagtggtaatacataagtttgatggcctagacaacaggctggaactggtgacttcatggactcggcacttaagtatggcatgatctgtgtcacttgaattgactgcacagatagttgcccttaattcctgcgggattcttggccctgagcaaagcattctaatctgcccggaggagacacgcgccacctgctggtatcctcccgcaaacctcccctctcacatgccattcgccgcagccttccaggcttttaaaagtccggcttcaaaattcataataataacgacaataataataaatgaaagtatacttccatcacaaaaaagtaaccaaatttccactttcctccagggagaggaacagagaaaaacaaaatccagtgaaaaacagaaacacagaaaaaaatccaattaaaagaatcttcagctgaaaccaggtggtagtctgtgtgatcagcagtcaggacatgatttgggacatcttctggctgactgcaaatttagttcagactaagagtcgttgtgatgcatcataggaagcatacatatttttttaaaagaccactaattcttctttaaagaaaataatggattgcatatgagcccacgatttgctttttaacaaatgatcagtccctctgttagattgacctactcattgtggtttgtttacccatctacagattacta

SEQ ID NO: 917310 - DNA, 4001 bp, Homo sapiens
taatgaagggaacaggtaaggtctgtttttgctcactaaatatattcggtccttgttatttgcagtagttctgttctacaaacaatgaattactcattactgaaccatttctcctggaagaaatatggggctaggttcctgcaaacctctggtttcaacattttcatcaactgatcaacactaattttgttttatatttgtttctatttaaagacactttaataaatataaacagttgatttgttaacattgaacttagggccaacaacactactcacacctgaaggaaacttatctaacacatatcttgttctctgtaaggcccatcacagccttcttgtgctcaggaacactagacagtacttcaacactatgcttggggcccacagtgaaatcactaactaaaagcacaaacattcaagaaacatagagctaaacagacagggaaaacagtacccgtttacaatatgagagctgaaacaagaaggtagaggtagccttgttccacctcagctggaggcatgtgtgttgggtgactcattttcagtgctctgcacatatccacgcatgactgagaaagccctttgagtaccaattctggggttacaagtaaattttatcgatgagataaacttgaatctactaagtccaccaataagtatcagtaaatgcatctgtggaattgaattggatgttatcacctgacaacaaacatttgtaagttattagtgagtgtatttattgtgattctgagctgtgcaagtcaaggaatttctatgaaagatacataaatgttaatacacatatctgattaatacacatacctgtatgggtttttttctcatgtaaagacagcttagtgaattttggaggtaagggtcttcgaagaagcagtgggggcttttgcattttaatgaataataagtgctgtttttcataatccttggtttaaatgagaattgaaaaggttttgaatatgtttgaattgttgaaaaataataagaatttagattacatcttaaagaaaatcattctgtaccaatactctactgaatccaggcagaattcctttatgaaaaaaaaagagggtaagaaaataattctttaaaacttctattaatagaaagaatccagttaaaatgtagggttataagtaaacatagaattttaaaaatatgtgtattattactacccaggatcattctacaattttccatgttagtacaaagttcaatttgccaatgctatttcaactagtaaatactgatttttcagaatagtcgaaatgacattttttttctctctctccaaaatgttatcgctataaatgtagaaagagaatttggtcagaaatgtgtagaagatgccttcattagataagcctctgaagacccaccatatctaaccattcacaaacaaattgttttctttctataatggcttgtttttcaaccactatgcttgggccaaaacaattcaatcctaaaataagatgggtttcactataatgagatttcccagggctgctggatcccaactcatactgtttagaaataatgcgagaagatgcacccccaaaatgtgcttttagtttgcagggcaacatcaaaagtgcctggcacggcattattccattgatagcctagaagggaacaccctgaaactgcacaaatgggccgtttaccgccaaaagataactgcacacaagcgctcaaggtgtactccctggtcatatgttccacacgatgctggaaatctcccttccgtagtacccaaagaggggcatggaagtgctggactcccacactaccctttaggataatcggccgctttccaaaccaactggcttttcgtctcctatctccttttcctcggaatctaggcagcgaggtaaaggtccagcgagggtcttcctgcaggaggctgttcccgaagaagcaccacggatccccaccctctaggaggccaaggagacacaccctagcaaccggggtccgctaagccagcccagccacttgacgcgcaggcgcgggggcgggacaggcgaggcgggcgcgggacaggcgaggcgaggcgggcgccgggaggggcaggcccagcccacggtgcagcgcgcgcggagccctcgccttcctccgacgcactgtggggctgcaggggaagctgcgggccgtgggggccggaggagaagccggctccacgcgcagctgctgtacggaacgccgtggtgacaattgttattactatttttatgcttaatggcaatgaccactattatttattattttctctcgattacaggatgctttacttgggtgtctagaatatgggctggcattctttaaggctgcacttttgtgcagccgggtcccggggctaattttgcagtgctctcgaaaagcgggcattcggttttctttctcttcctttcatgcaacctgttttctctttctgatcctttaaagttcctggctgaggctggattgtgtagaaataagggcattagggatccaagcgggccataaaagaaacccatttctcactgtcatcgtcctctgttctggttatcatattgtgacgtgtcgcctctgtcatggtgttgatgaacctgtgtgtgcagtcatagatacatcgtgtgtgtttgcaaaaatgtgcgtgtttctctggagatttgagggggaaagagcactagaaagagctcatctgatagatgcggaaatccgaactcagaaagtaaactaggtagagcttccttccaggtttggttttttctaagtactagcgcaggaactttataacagaagttggaaaatgagagacttctgtataaatctttctagctttggggatctttcaagattcacaccataaccatgtcttcctttttctccttagtagcaaacatgttttaaaacaatcaatgaaaaaagtagaaaagttttaacaaaaaagtaatcagactctggaaaatattatgcaacttgttttcctttacagtagtagtgtactgtttcttttccttgtaagtttactgtgtcccaattatactgctgccccagactatgaatttatttccacttttgctgttatctacaccatagattcattagtttctcagaaatacaaagctgaaaataaaaggcagctctgtggctaagattagtctcaagtaatatatatcgtgcatattttgtaaatgtgaaaaaaggtttatatttttaagcataaaaaatgacagtgtaaattgagtcaggtacctatgctcttcaagatcgttggaaccatgagaactacaggaattcagttttactgactgacgtttggcctttaaaatttatgcttagctttgtgtagtcgaaagcaaggcttctgaatgctttttcaaaaaatgctttgtcacacttggaatccgcaggcatccaggtatcattccttgcagatttcttctagcaagtatgagactaaaacctagggcggtttaatatgtaatctcaggtgtgaacattttgtcttctatttctaccacttagtaccaaacatttaggcaaatgagatagttattatgaaaattaaatccatggcttggtatattttatatgtatatatgttattctaacacatctgactcgctttgtctatggaaatgatatatcagtataggatgagtttagacaggacaaacaaaattcaatttagattattttatagttcttatatttttgaaaatattatcccctcaattttctttcttcttttgtaaaataacgtgtttttgaaataatgaataactcccttttggattttaagggtctgctttttctgatgtatgtacggtcagcctatttatttgttccgtcccctttgcagtttggcagaaccttatgaagaagcttcccaaactgaaccacagtgctttcactctattagcaaattgtactaaagatgccagcgtaatgatgagtgccaaggttatagacatcctgcattttttaaatgttgct

SEQ ID NO: 917311 - DNA, 4001 bp, Homo sapiens
atgcacctaaatcaccaggattgctataatcctttgatagttaggcagagtgttcgtctcggtctggcgttacagctgggctgtttacggagtgttacggtgtacttttcaagggagataggaaatcgtgtggaaagaagtcttctaatactagtggctttgggtttttctccatccgcttcccctactttttctccccttgtgggggtgggtgagatgatgtttaaatattgtattattattcctttttaaaggaagagattgtttgcactgcggagtggaatattaggaattgaacagaagtttacacttaataaggactttgagaagggtaataatttcggctcttgattaaatcatcctctaaagtttttccaaacttttcgggttggtcaggatctctcttgccagtcgccacgtttgtttggcagcgttttccagagctgagtgaggtttgccttgaaacagatctaagttcggtagaaagtagtggggacaccgccggcactgcaggcaggagataagttgcagcaaaatcccgttcagccgatcacccaggcaagactcgtcccagtccgactctcggggatgcttttcacactcgtaggaaaccagagtcttcatatggtaattgttcaagggctggcccggcagttcaaggtgacgatcccttaaggttttgaggatggagaggcacttctttctgcagccccccatctgcagtctgttctctgcctccgcgaactgcagcacccaggcgtcgctctccgccgagctctgcttgccggccaaggagtggcactccttggacaagagattgaaaccttccgccttgacctccgccacccggttgggtcccggccaggggatgtggggaagtggccagtgggcagcactcctcggccagatcccggtgcatttaaaggccggcgtgatctgcaccacgtacctatctcggattctcagtttcacttcgctggtgtctgccaccatctttaccacatcccggtagctacatttgtctaccgcttgagccaccagcgtctgaaacctggaccggattttgcgcgccgagaggtagccggaggcggtaatgaattccacccagagggacatgctcctcttgcgcccgtcgctcaacttcagcaccgcgcagccgggcagtgagccatcgtccacgaagttgaacacccccatttggttgagataaagcaccacttcaaattcggtgggggagatgacctcgaggccctcgtagcgattgtccatctcgttgagagagctgatgaaccgcggctcctgcacttccacttccttcagtacgtcggaaactactttgcagacttcccggatagttttggcaatggcagctttcctggcttggcatttttcgttgtagtatttattcagatggtagaccagcttggcctgggccgcaatcatgttggggcagagatccggattgtacaccggagtctcgcagtaagctgtgggatccaatgcggctgctagagctggagccaacttcggtggagaaacgggccgcaacactcagaaatggatcaaaaatgcctttcggaagtgctgcagcgttggtttccctgctgctgctgctgctgctgctgctgctgctgctgctgctgctgctgctgctgctgcttttcccttccttttatctttgagcccagccgttcttaaagtgaaagactgtcctcccccctctgcttgtctctcttcctcttttaaagaatccttgtgtgagagaaccgcatggagagatcaccttctcaggaataaaaaacaaaagttgcgctgagacccagcaaagctcttccagtagtcaaaataagcacccctttccgtatttatttgcgctttcccgtaatcattgtgtgtgcagcactgttaatcaaatggaggaaaagtgtgctgagtgtgtgtccggggtgagtgtgcgtgtgtatatgtcagaagaagctgctgttggtttgtctaagagcccagatgcactcgtgtggaaattataaaggcagggccaggcaggcgggcggccaatcgccactgggctcgtcacgacagcctccttcagctccaacccggctaattaatccccactcatggatataggcacacaaactaaaggtaggaggctgctgccggcggaaaaccactcaggccacctagacagtttggaaatcaagaggaatctctcagctttggtattacttgaagcatattgacgttttgaaaagacttggcaaagcggctctcttctgtgccgaaaacctgcttgtcttttaccgctgaaatgcaaatacaggtgtattaatgggcatccatcaattagtgatcttgacggggttttctaaaacaaaatcactaacttgcatttagagtaagataattaacgtctgttaatccttggggtcttcttaaatgcaggttgaaagtttgttctttcatgcagactactggcatatggaagttggctttagatggaggagtacctgtgtaattttctcattctggatgttcctatatgttaaaatgattttttgaaacgttatggaggtagtatgctctttttttacttatgtttttttcttttctccatttgttgaatctgaaaattattgctgagtgtgtgagatgttctacccctgtttaagttaggatatttaaaaaatatttcgtacatccctctgccccagcagatgcagtctttgcactttggtggacttgcccagcattacaagcaggacacaacgctatatatgcacttatagaaacatttgaaaaataaattgtctgtgggatggacagagtactttagcgttatttcatagtgacctgtattttagtacataaaattcaggtgagatcatagagatcaagcttcctcacagataactatcccgaaaaattgaaggtttggggtatctggcttgtttacagatgtataattaaggatatatctcctgtcttaagtgtccttaagtggtgacctggcagtagacttctaattttatactatttcgtgtgatttaattaagggaaaatggttaacatttgcaaagaaaattaacttgcagttatctggggggttttttggatttaaacatcattttgaaaacaaaaatgaaataaatcatttcatttctgaattttggaacctggaaacaggaggaggaatttttttttctagttggtggtccagttgtgtcctcaaagtacaggaaactaaagaaatactacttagtggttacgttgtggtttttaaaactaggtggatttttttaattgtctacctttaatttagatgccacgtctttccaattaagaatatttcccgtcaaatcctataactcccggtaacatgtttgtagacactttcagagtcacttttaacaagatattcttcagggctcccacttgctacttaagcttttgatttttgtttgtgtgttttgttttgcacaggcacagcatcacaaaaccacctattatttaatttctccttatccaacagtgatagattccaatttagctgaaaatagtatacattggggtgcgtggcacccagctactctatttcccaagaaccttccatccccttaagagcagggtctgggaacacccaaaaaacccctccccactttgccgtcatcgcgggtgaatgcaccactaccttttggcagttggaggggagacccatcagagccggagaacctgcagccacgacggcgaggatgtgcagtggtctctggggaaacgccgccttctgccctcacccggcgcgtgtggccctgtgccgtccgctcgccgcctctctctcgctgctccgcattcccgtgccctcttactttcctctctgggctcaagatcgctacgctttatttctgcgtgagcttatttgaaaaccttacttggtgtcccggcttactctccacgtctgctccagaccacggtctgcccacgcacccctcagcctgcaccgccca

SEQ ID NO: 917312 - DNA, 4001 bp, Homo sapiens
cagctgttctcaccatcacaaccagccttgaacttggtggcacaacctggatcctaaatagtggctctggagcaactgggaatagggccccggggaccatccacccaggtggcagcgctgggctgcaccaagggggagtcaggccagaaaaaaagctttgccctgctccctgctgctttttgccagcccagccagaagccctgcagaaaacctgtgctgaccggcccgacatgtggcaggtacaagaagatgccctatttatgaggggacaggtttacaatttacaaaagacaggcgaaaatataaagacataacttaagtcctgccagtggggagttagaatgttcctggccaggacataaagaaatattcctctccacaagctcgaataaaggaacacacagcagaaatagttgggggatgacgtcagaagttctgggctagtgtcctgcacttctccttgaaagtaaaaacagtgggtctagaagaatctacgtggcattgcccttatttaaatgagtagttctactgctccttgcaaaacaagtaggatagctgaagaaacttcctcttatttaaagattataagaatgttccccctgccttttttaaaaaccttattgtccccaaaacacacacattacccaattaacaaatagctttccacttaacctttgtcttttaaagggacagtaatgtttcttgtagaacattcaaggtggtggtggttaggcaagtcagatttttttcttcgcttcagtgcttgctaactattctaaaaatgttacacatttattgtaaacacatgcttccgaggcctaacaaaaaagcacagtttcctcatgcctggcagaaatttaaaacggaaaagggcagaaagaattctttagcaaatatatcctttccttctcctgggccaagtgtgttaaaaataaatcttctccatcatttctcactgctgcttctcagcgagaaagttgatatggttcggcatagtgaaaacacagctttaaaagctagcctgccctcattaaattattctgctggctgtgtgttctcattaaaaatgcataaagatcagataattgcagtaagcattattaacccagctttacttttgaatataatggttccacttttaagctggaaacaaaggctcagacatgccaggaaaagaaatgtaaacattgaactacagtatcgaaaacttgccagaaagctacctcttgctaggttgtttaaaatgtgcttttgaaactcaattaaagctgtagcattgtagagctaggtaggtccctaatttttaataaatagacacatacgtttggccaaacattcaaccgatgattatttaccatgaatttttttttaatccttaattgcaagtctgttttcaaataataggatccatgtaaactttatctatttgggaactagctatggcaatataacaatttttcacagcaagaaaataagattgctccaaagaattcaaatggtttttaaaaaataatataataaatgaatcgattctttgcataaaaactcgatttcttgcctcaccccaaacaggcggcatagattcaagctttgccatttctttttctcaaatcaaaatgttacgtaaaactccagggtcccccgcaagtattacaattgaattagtggaatccagtttccctggctcccgtaagcagcacacatggaatgcagcatactgcagcaaactctttaaacattcaaaaaaggggggcgattctcctaccttgtttagctctgcctgtccttcccatttacagtaaccccaggaacatctggcagaaccaagtggccgaggcttctccaccgcatcatgagaaagaaacttccatgtaaatagttctcattccctgtttattgtactctgaaagccgtctgccgtatctggaaaattttaccttcagatgatgaagcaaagacagtctaaactctgttgctgtaagctgcagcccttccttccgacaaatccctcccagccggggccagccaatccccagccagctcgtcagccctactcgtctgaaactggccctaataggatgactgacacagtaacacagcacttgcagtgtgtaaaaacagtgcatccatactgatgaaagaggaatttccctctcagaagaaagcaatcatagcaccaagacaaagtggcacataattggcagagcagagagaggggtagctcaagaaaacacccttgaagacagccagctcgaagccaggagcttcaccgtgaacacttgggaaaatgtgaaactccgcagattccaaagaaatccaggttgtacatgaaactgaagtccttggactatctgacaaagcatatgtatatgttttttaaaggaaaaataattcaacgtctgccatggcagttaataccttacaaaacatttacatatttccattattgaggaagaatgtgctagcccaagtgcgtattcaaaatcaaaacatgcttatagctctggcacacacaggtttcctgtataacatctgttattgcagtggttaattactgcggcccatttatctttcgtctaagttttcagaccacttgggacttcgattagggaatgctggacaataaaattgatatctatacactacccttttctactcttggcaggcacccacgagaggattaggtgtgctttaaccatcttagatgccatttgataaatactgtgcattggctcacattatcgttaatgaagcaatgattataggaagatgtttactgttgaatacaaggggtacatgatccaagggcccccatgaggtgccattccacaaaagatgttctaggaggtgctggagtttcctgagataaagcagaagaagagaaagtttaggaagggttatttatttatttatttatttatttatttcccagtctacagcatttctgtatgccttgaaaacaaaaactcaaaaacatatggcattgagcaaacacaacaagcatacattttcctcccctaaataccacattttgagaaaaaaaaagtatgatgattacatgatgagaccaagacagaacaaagcctttattcatctgaaaggttgaacccaatgcacgatttttataagcaactgttcagcgcatctgtaatgaagcaacagaatgcaatggaatgctttctttttattttgccattgcatcttaaaaacataatatttcatataatttctaggctactttcttcaataactaccatgctttattcccctcagtttttatacttacattctttgtcttccccatgtaattctatcacatatcctaacttgcaggctttcatctactgtaatacttctggaaatttaaattagttctgtggtcaaacagatacaaactacttttaattattaatatacttaaacagatttgtgattctcctcttcctcatctccctctgctgtctttgaaactatcattccatgaatcccattcctgaaacttcagttatctttgacacattcccccattctcaaccaatgaaactaagccttgttgattttccctcccaggtaggccagaactctgacctattacctggaaaacacaaatgctaacaaggcagtctctggaactcaggcctcctcatcttcaagctcccttgttgccagacgggttttttaaaatcatgtaaagtcatgttcctttcacattcaaacctttctctctataaaatctgaattatagactttcaagggccttcataatctgggctctccctttcaactcaactttttctccactgttttcccaagtgaacttcctgatggagtcatgcttatttctgccttactcaatctttagacctcagcttacctttccctttattctgtcttgtcttctgtggccacattaccctctctgatgttctcctgtgaaagcattctgtattgtttattgtaccagacgctttgaaacccttaacaatgtagtcttctgtagt

SEQ ID NO: 917313 - DNA, 4001 bp, Homo sapiens
aatgtgcaccacatacccgtacactctgtggtagcatcatgtcaatactgcatcataaaccccctcatgatggttttacagccttcaacctaataacttgcctccgctgagcagtacctcacacagcgtgagcagaaaatgggtttgtgctgaaggaagaggccagtgttaatgggtggtaagtggagtatgatgcagggtcacctcccctaactaaacgctacagggtgctcataaccgaggatatctggtaagctggacttgaaagtcctggtgaagcatgcaattatcggtaatgcagatgtgtgggaggacgcacatctcactgcctgttccagatgagacgatggcccacaccgagcgcccggctcgcacgacattcagtgagcagacagtgtcactgctgctcttctgagatagcctttttccaattaaaaatgcgcacatgtctcttggagctcatgaagaaaccccaatccctaaaaacctggggaatgacatcagcctctggagcggttcccactctgtgactctgacaccgaacggcacgcagaggcatgcagagcaaggggggctttctcctccacccccacagccgatcggaagcctccctgtgaacctggcatccacgcagcccttcaccatactcaaaccctgcaaaccctgcacggaaaagctccactcaagcttcagaaaaagagctgattctctaagaatcagggagcagacggcatgaaaatggttttgttttctttcgacccacatacaataaacccagcagctttgatcataaaagcccccattaaaaacatcttgattagaccatcccatacgatggtgcttatgctgatttaatcactggttcactctcagaatccatcggggtgggcagagaaagagaaccacacccaaaccaagcaactgacattttaatctcccaggcaagtactagttagacaactagtaatggcatatatgacataacatatggcaacatcaggcaaaacacttggcaacttacttttaatgatatatcattatttcctcttcatttcaaggaaaacgagttaaggatgcctctcccttctgcataacacagcctgagaactcagatgcgaccgcctgaaagccacggccagatgcaagctgtcagcccagtctctgcttacacctaaaagaatcgatctgaactactcttcaaagcttatttgaagtaatatttcgattaatactgaaaatgaacgtccagtccactctttacccataccgtctcaaacatctgtcttaggtttaaattgcatttaatgaagaaaagaaccacctgattagtccaggttttttcatcctcaaaacgagcttccaggtagcttcaccatccctacccctggctctgaaaccccaagctctgaaagcccttggctcagatcattctccattcgcaatgcattctccattgcgagggctgcggacaggcaggttgatgggcagacttcagacacacaaatggctccgcatgcagacccagcaaccctgagagagccagtgtcaccaacgtgcagtcattttgactatcccgggcagcatacgatcgccgacagcctctgaaaacacaccagctgccaaccagtgccccccatgtcacagctaccacggctagaaaggaacacgagggcggcttacaaaaatcagacgcatttccccacatttcagcccatgatgtcaagcttaagcacagatcactgacggccagcagctcctcctacccgtgtgcttggaaaccgcatttaatctctgcaccatttcttccaaggccatctcttcagtcctcagccaaaacctcatcctccgacacaacaaaaatgatcctggcagatccgcttcctccgcacggggggcgcctgcgggtggggccgtgcgagtgcggagggggcgcggcggaggcggggagggggccacggcagcgctttcagcctccagccgccgcctccctgcccaggattggttccgcgccaccgggaggggggcgcgcgctgcgccgcggggggcggggggcggctcggcggaagcggaagcggcgcgcgcccgccccggtgtgtcaccaccgcgggtcacctgggagtcctgtgagtgcaccgccggggtcacctgggagccccgcgtgtcaccgccgcggtcgtcggggagccccggggctcaccaacgaggtcacctgggagccccgcgggtcaccgccgcggtcacctggaagtgtcacctgtgtcactaggtcacctagtgtatcacacaggtcacctagaaattcgtgtcaccgccaaggtcacctagaaattcgtgtcaccgccgaggtcccctgggagccccgcgggtgccgcacaagtgcccccgcccttccccccggttccgggtctccacgccctcctggtttgcgggcagccgcgaagccgcgagtggaccgagcgagtgcagctgcctccgcggggccgcgcctggccgccgcctccctttacctccggccgccccgtggcaggtgtagaagctgcagaggccgcagcagcccagcgcgccccttccgtgtggccgcatgccacccgcgccgcgcccaggtaagcaggtccgtgggtcgctgggtccatgcgtgggtccgtggctggccggggatggaccagcccctccccgcaggggcatcgcctgcccaaggacgcaggacccagtgagggaagcgcgcgctgcaggcacggggctctccaccctcgccatggttggcaccaagccacactgtgcactcgacacacgcagcgtcctggctgccacctgcagattccagctcgtgtctatgcagggccatggccgccatcacagggccatatgcaagaaactctctgagctctcctcgcccaaaaccgcagctatccttttgtggtttggtattataggtaacatgcccttccttaaagaaacagtatttcaggcctgtagtcccagctactccggaggccgaggcagaagctgaggcagaagcaggaggatcatttgagcccagaagtttgagcctgggcaatgtagcaagacccccccccccacctcactccccaatcagttaaaagagagagagagagagagagaattccagcaggaagaagtacacatttccacgaatggtttgggaattcaagcatcatatggctgaggtttgaactacagctcatgccaataacatgtgcacatgcgccagcattccagcgtccaacagagcatgcgtgcaccattccagcatccggcaacaatgcaccagcattccagcgtccaacagagcatccgtgtaccattccggcatttggcaacaatgcaccagcattccagagtccaacagggcatgcgtgcaccattccagcatccggcaacaatgcaccagcattccagcgtccaacagagcgtgcgtgcaccattccagcatccggcaacaatgcaccagcattccagcgtccaaaagagcatccggcaacatcccggtgtccagtggcacatgtgcacctggacgttccagtgtggtgagctttcaggcacggagcaaggccaaagggataaaaagatgaaggtgacgcagtactcccccttatagtgcctacaggccttataggccagacagatctggaaataaataattcataataaaaaataattacagaataagaggcataataaccagatagaaagtattgaataaatctgtaagaaatggctgctttgtttttgtttttgtttaacatgagaaacgtattgagtatcagcagtttcacttggttctacagaatctctttggagaccagtgaaaggagaactctggaaaggcctcagagtggatgggagcctctccctctgtggacaagcgttccctgggctgcccagggtgcctacggcggcacaattgctacctcctgtctacacatggtctgcaaaaagtgccctcaaatgggtctgctcctctcattccctgtcagttc

SEQ ID NO: 917314 - DNA, 4001 bp, Homo sapiens
acgtgagacactaaaacagagcctggagcaggtcccgggtctgatcacggaaccgtcagggctcagaaggacaattcctcctcttgtccagggtggtcctggctttgcctggtccttcaggagggaactgcaggatggggtggccagggcttcaggggtgcaaaaccagggggcacccaggggacacaacctctcttaaagcagccacctacccctgctcacaccggagccttccacggtgccccacagccaaccccaaaacccagggggccacctgcccctactcaacccagagccttccacggtgctccacagccaaccccataacccagggggtcacctgcccctactcaccccaaagccttccacggtactccacagccaaccccataacccagggggccacctgcccctactcaccccgaagccttccatggtgccccaaagccaaccccaaaacccacgggggccacctacccctgcttaccctggagccttccccagtgctccacagccaaccccataacctggggtggccacctgcacctgctcacgccctcacccaggctagagtacagttgtgcaatcataccttattgtagccttgacctcctgggctcaaatgattctcccctctcagccccccaggtggctgggactacaggcacacgccaccacacccagcctattaattttttttttttttttttaacagatgaggtcttggtatgttgcccaggctgatctcaaactcctgggctcaagcgatcctctagccttggcctcccaaagtgctgggattacaggcgtgaactgctgtacccagccagttctttactttaaaattggaaactttagatgttcattcattgccgttgatagttaaggtctgattcactaaaattcacaaagatgcttattttatgaattattcatcaatacttggcataagtacccgctggaaaatataattaggacaaatctcttgaaaacgagtactccattcttagaaaagcatcaacaaaacccaggctgtttcctccccacgtgaccccttctccagggaccttgccccaaagctccaattgtcaggatggggccagtgtggaccagcagcccctgagccctgaccagaccaaacacacccaaacctgagaccacagaggccgcccagccgggtccacaggcttggccaggggcctcccaagtcctgcttacctagagagggcagcttgtcacgccttgcaccacgggtggccccattgtggggacagcagtggccaggcgtcccctccaaggaggagccgcagcccctccaccagccagacgtgggcgctgccctcatttgtccacatagcctgtctatgaaaaacctcgaacaaaggagccagtggaaaggtgatcccagccttctgggaccagcacagacagtccctcacaggccaagggcagaggcggccccactgctcaccagggaccccagggccatggccctaaaccatccatcgggcaaggcccgtgcacaccttccctgccaaggaacagggctcctctggtctcggaggcacccaccccaacatccatccccggcatcccccagccccgggcttctgccccagcagcctctgaggacagggctgggcccagaacgtccacccccgcccggcgtccccgcactgtcgccccacaacaccttccggggaggcgaggacccgcccgcgccccacgcacctgcgccggccttcagcagcagccacagcgcccagaggtcccggcacagcagtgacagccggcgcaccgtcatgctgcccagtgcgagtcaggagcccccgacccggctcccggaacgcccttcccgggcacacaaaggatggcgcagcaccagcaccatcttggccgcgaagcggggacgccacaccttcctgggtttgctgggcagacctggcctctgcagggcagccagccggctgctcctcccagggcctccgattcgatgtccctgattaaggagcagcatcggctcacttatcctgctgcaggcagcttaactgttgcgatcctggcgacagctgagccccggccagggaggcttcaggttcctggtgttgcttgtctagaccctccctgcaggggccccacactccgccaaagtcccatccactgagtggcagggacctgagctggcaggggccatgcttagcagagatccgtcccccgagccagccccacagctgtggggacctaggccgaggtccgcatcccctgtgctagccccagggctgcagggacctgggctggcagggatgagctgtccggagagtatgctgacccaggggccaagccttctgcccctggcaacacacgcctgtggggagttgagcctttgagtgcctgggaggcagctgcgtccgctgttctcatccgtctgtggtcactgagttccttttaaacccgtgtgagcaggggccgttctcagaatacccctgcaccgagaacacagaaggcaggctcccggctgcctctctacttttccaggaccgggagggggatacttaaatacgtcacttgaaaactggcagtccaggagggggctcctaaccgctgccctgggtgggagtcccacagagagctcgttcaaactcaggttctgtccctgacgagctcccaagttacctgagaccatttgtccaggcccagagtttgagccgaaaatcccaaggagctaaggggaccaacgcacatctcctgagaatatcacacccagtgctggagtcaacgcacatctcctgagaatatcacacccactgctggagtcagccccagccgagaaggcctgggaggggtgctgggtttgggtgggaccccggcctgctatgtccctgctggccccggcctcttccggcgcctttctccgcagagccttacatgtgcactgactcctgccctgcgtgtgcccagcacagcacagccagccctccaggcttcagcttctcccgctgggaacaccggcttctgggggtggctgaccccaaatgccagacacctggctcctgcctctggaaacctcggctccctcaggtccaaacgcttgctggagaggaaagcgtggcctcgccaggccctgcctctgggaacatcagccatggaggcttttcttgcagccatgattgcgctgacaagcaccaaagctaagtctggaagctcactcttcctcctgggccaagactctcatctccacgctgcacacacttaggggagggatgcctaagaggggccactgcttcctccacgcctgggtcctctgagaggcagcctcatccctggggcaggaatgtcgcttctgcaagcccctctgcacccactcacgaccaccgaggggctgtgatgtccatccataattatttgtcctccccagcccagccatccttccctgtaagtttggacctagggctggctggtacccacggtgtgagctgccccctgagccacagcaggtttgggctgtgcacattgacccagacctcctgtgtctgggatctctgtgttcctatcttctaccgtcagaacgcatcccagatgagctatccctggaacacgagccccgggggaggccacggcatcatggcccctcacgccgtcaccacggcaccagccgatgcacctgccacctgcacctcagccctgcctccactctggggcctgccggcgtcttcattcccggcccactcgccacctgtgcctcagccctgcctccactctggggccctccggtgtcttcattcccagcccactcgccgcccgcacttcagccctgcctgtgctctggggcctgcaggcatcttcattcccagccgactctaatgtccgaagcatgttttgcaggcacaactcctacattatcaggcggcaggggcacaggagcagatcacggtgccacacggtgggtcccctcacagctgagcacagtccaacgtgtcctcacctccagcttccaaccccca

SEQ ID NO: 917315 - DNA, 4001 bp, Homo sapiens
gagcctacattattagcagtaatacacttttcaggtaaacagaattaacaggctggtgtggaaaactcaagattcctatcaacatggttctgtggaacaatgagttttgagttacaaatgggttaaaaaaaacgtttagcctacaacctgtgtttcaactttttaagactatctccttgcattacattttataaactaataaatatcccgaaaggctatataatcaggttaatagaaaaaaaaagatcctaagttataaatccactatttttaaagaggctaaatctaaaaatatgtaaggtatattcgtgatttttcttctcattttcataaatgcaagccagacacaaattacattcagagactgacaaacttcacagatcacagaatcagtacacataactacctctgagtgaacacatgagacctttctggaagccagtcacaccaccagagcagcttcattctgtgaagaagttccaatgatccgcccgccttggcctcccaaagtgctcggattataggcgtgagccaccacacccggccctaatacagtttattttaaacagtggatcaaacacataagccatttaatttctgctgtctaggtgttttcgggttttcttccatcattaaatattgtgctgacctggtaacttggtagcaatacgatggcaaggactaaatttacaccaaaaataaagtgctgattatatcacgtatattttaaaatacaacaggtaagatttattctaaagctgtcaaagaatgttggctatagaaaaagtgacatttgagctggattctgaaggatatatgaatcattcaccaaatcgggagtagactgggaatggcactgaagatgtggaagtctgactaaagaatttgaactttacctcactggacaacgcaaacctaccaatgaggtagcttttatataatttttctgcagaaaagtgatataagatgccttttaaaactggtatcggccaatataaaaggataaagtgcagaagcatgaggcaattaaaactgtttgggaggctacatttaagaaggagttatgaacagcggggttggaacgagagggcaaattggagcgacactttaggaggtagaaccaagataatttaccatccaagtcaatgggagggagtcaaggaaggcttcaacttgaaagacttatcatgaaaggtgacagaatatgaagaacgacatctaatttcatctcctatctctgacacacaaccatcctaaacaacttgcaactccaccaagccaggctttttgcacttgctgttccatctatctgtgctgcctagtgagtttggcgagctcatgcttcccaagcagcactttcttcagagggcctgccctgactacaaccaaaaaaggtgcctagtccctgtgctccagtaccccgcagcgcagccctctaataaaaacaggccccaagccagtttacacatctgtctctctctcgacagctggcatccagtctacccttcactaccgtctccccaatgctgagcccccaaggagcgttccataaatgttaagtggctggccgcggacgaagaggctcagaccgcgcgagttcttatcattactaaaattccctctaacgggaaaaaccgccgcccagagtgccagagggctgcggaccccacgtccatgaccctcatgcacccgaaactcccgagctggccctccccgccgaaccccgagaacgagcacaaacgcagggccggccggctccggggtcagtcccccggcccagctccagcccggctctcaggctcgccgcattacctagacaggacctccaagtcctcaagcgcagacagcagccgctctcgtgtgctgttaccacccgccactcccaaaccgcctcccagccgctccttctccttctcaccactcgaagacgcagccattttccccagagtcccgccaccggcgcacgcgcagagcgagctgacgcaggtgcgtggcgagaaggcgggctcggaaggcggaagagtcacccaggagaggaaaaagaggcctggcgagagcgccccctttgggcctggaggcgcactgcggacaccggcgccatctgttgggccggcgagggctttctggtccaaaccctgggagcgacagctgaactgagaacagtgggggcaacgcagtctgattctcctgggcctaatggttttttttctttctttctttctttttttttttttgagacgagtctcgctctgttgcccagactggagtgcatcgccgcggatgtcttggctcactgcaagttccgcctcctgggttcacgccatttttcctgcctcagcctcccgagtagctgggactacaggcgaccgccaccacgcccggctaattttttgtatttttagtagagacggggtttcaccttgttagccaggatggtctcaatctcctgacctcgtgatccgcctgcctcagcctcccaaagtggtggaattacaggcgtgagccaccgcacccggcccaccttaaccatttttaagtggatagttcagtggcattaaatacattcatactgttgagcaactatccatctccaaaaccttttatcttgtaaaacaaactctgtactcactaaatgctaactccttatccctcccttctccaggccctggcaaccaccattctactttccattgctgtaagtttggctactctaggtacctcatataagcagaatcatacagtatttgtctttttgtgtctggcttatgtcactcagcattatgtcctccaggttcatccatgatgtagcatgtgctggaatatctttcctttttaagactaatattccattgtatgcatatggcaccttttgttcatccattcatctgacgatggacagttaggttacttccacattgctataatccatctttatagccatacatcttccaacaaaatgttttgctcattactcaggttaattattgaactgaaggaaccaatacagtacataagtagtagttaattaacatagtttaagtcattgatgtaccacacattccaaaccagaactggttgtcaaaggcaaaaatacgtcttagcctacttttcctagggataacaatgtagtagggatcactctctaccagaaaaaagcaaagttacaagcctattgggaatgaggattccatattgctattataaaagatggtctgggactgcctcactcccatgaggtagtagtacctgtagtcctttcatttcagggtctcatcctctactctgtctttttggaggtgctaaacctgactcctgggcacccagagttgacaagtcttttagaaattcatgttaaataaattcactcatagcaactgctgcgtaatctagaatgctgatttactcacttacgatgaaaagtaatagtgccaaacatatctttttcccatagacaaaactatatgagaagccatattatcacaggatgttgcttgttaaacttggatcagaacaaacaaggatagattaaaaattaatgacacaatcatgaggctttgtgtctccacagtgtagggatatttgtgttcaagagattggattatttgtgttcataggtcagggtaccttttcctctagacagtgcaagagatccttgtcaccttttgttttctgaccgttccctgcatctgctgttggctaacccttttttgttaatgcagtcaattctcaggcaatgggctaaagtagattgaagctttgttcattacacttgcattctaaacatgcctctcagtactctagtcaatcatttcttatgttaagtttccagggtgccaaacttctgcggtatgtgttggttttgtttactcaactctcacgggtcatattgagccatgactctggtaggaggagagagaacattatattagtgtaaacataaaaattctagaaggattctaattagttaaaaatgaccaattatagtcctactttgcagacac

SEQ ID NO: 917316 - DNA, 4001 bp, Homo sapiens
gacagacttcaaaatcatttcagattctgcagcactgtttgctacaattaggagaactggttctgtcaaaaccctaacttacggcttcgttcattctggacatttttatttttcataccctgctctcaaatacaatgggtatcttctttttaaatctgcacacatctgactcagttcctcccacagtcctccgcttatggtttggaattggaattttcatttcactaagaaagggagaaattcttgctggggaatggttcttcaggcattcagagccctcactatctttggaaaagcaaggttttttctccaagagttttgaagactgcacgttcaatatctcattttgtttgcttccctctcttggctccctcctacccacagggtgccacagcacgctgtctttcccagtagcaaaggcgctgtgtctcaaaagctggctatcttattcatttctgagtcaaactctagaccatgcttgcctcttcaggcacttggctctctcagcacaaatataacaggtctttgcactccaggcccttgccaagagtgaactctggaggcctgaggccatgtggaatcaggcctgaagtgccctcctttaccctgtggcaccaaagcctgcttcagatggctgggccacatcctgccggtctgccaagaagagcttgggggcactctggccacaacagtcaagcatcctgggggcctccttcccattaaggccctcaggtttcgcacttatttccccagaacttatctgtgccttccacagcccacatggccccgggctggacttccaggggctttgttcccttctcagctgcggtttatttgtttacttttgaaacacgaagtgaggccagagatgggaaactttgagcttttgcatgcttctccactcggtctcctcactggagagggctggcagtgctcagaatggtgcatgccccctgctcctcaccgccacccatgctccaaagccaggatgtgagtcttgcagagctgcagacagcccctaaagggtgtgctcccaatttgagctcatctgacccagttaaggagccagaatgggagaagcatctgccactcatgagctctggctggggggcccctgccctccccctcgcccccagtcctgatgcccttctgggcggcttcaagcagcagctgcaaaatgtcagtgcaagaggcagaagaaccagggcgagcgtgcaggctccgggtgatagaagcagaaggaaagtctagaagcgcacggagcaaggggccacgcggtgtcgcaggcagcgaggacagcccaggctcccagagaccgcagccgggtggaggcgtctgcgggtaccaggcgacgggccagggcgcacggcgaggccacccacctcttgatgtagctgctgaggcggtagagctgcccgtcgaggcgcacgaggccgtcaccgaagacgttgaagcccccccgcgccgccgccggctccccgggcctggccaccacgagctggtcgccgctcagctggaaggcaccgggctgcaggcgcagcagctgagccagcggcagcagggccagctcgcagtcgcaggtccacaggctgcgaagctccccagacgagatggaggtcaggctcggcctggccaccggctcgcaggccgcccccgccatgcccgcgtcgtcggtcctcacaccgcctgcttccgtccggtgcctacagcccccagccggcacctgatggtccccaggaggggccgggcgccctgcctgcgtcagccgcgcgcgaggtgaggagggggtcggtctgcccgcctggccgggacgcggtggccgctcaggtgccagtctgaccgcccgggcggcccctcccaagctgccactcgctgggagccctgcaggcaccgcgcggagaaagcggccccggcgcagcgcggccccttttatccgccctctggacgcccgcctcgcccctgccggcccacggccacgaccccagaggctcggggcagagttatcatcgtctcataacttggcatgctcgagtctgctcgcaggcaaggcttagtcatccccctggggtccactactcaacaccagcgctggcccccgccctgcctggcggacactgccggaggctggaggtggggagagtcctccccgggttcccaggccctgcctatggtgggcggcagggcgcacagcacccatccttgcctaagacaccacacccctggtgttgattggagaagaaggcaagggctctggccctacccattccacctgggacccagaggctgtcaaaggccagtgctggaactccgatccccacctcagtaccagacctctcactcagcctcagttttctgccattttaactccatccagatcgtaccctgcatttccctcctttcagcctttccttcagctggttgctggccctggatcccttccccctagaaatcccactgatcatcacatcgcttttccataaagccttcacgaatcccacgagggtttcatcgctttgcttctcctttctactgcacggtgaaccctagactgcaatgtgccgtgtagtggggatagcagggtcctagcatcctcccttctcccctgcctccccagtaggtggtgatctccttgagccccagaatatgttcatttcttcagtctataaatatgtgagtgctagctatgggctcattgatctcctgaggtatgaaaggagaactatattattccatttaattaaacacctatttctgctgcggagaagcctggatgggatgggaggagaatctagcctagtttcgaggctttctgtagtactgtgttttaggattctaagctacatcccaaaagttgagtagaacgtagagaatatccttagttagtctttgtgtgcccccacatgaactcttgtgtaggtttaatcagatgggatgaagagtcctcccgccacatctcatttaaatctcagaatataaatgagccccactctcttctcttcttctaggtgcacacctatcctttctccagacatggatcttttacccatgggatcattaccccatctctgggcctctctgaacaaatctaattcactgagcatgaattgatcactacccactcaaccttttgtggcgcaggaaggatgctctacctgtgaaaaaagcatccagaagatcttcttgcaaagggaggtttgaggatccctgcaaagagaatgggtctggggtgggctgagactgtagacaggactcagaggctggggctgttttcacaggggagggatttggtgccagcagttaaatccattgtgccctatttagaacttcactcttgtcccaaacattgacagagtcatcactatgcaccagggaccatcttaagctctgaggtcacacacacacacacacaaggatccaataagtgctaccatagatgtatggactaagcactatgagaaataagtggttctgccccaagaagggtgctcaaaggaggtgacacatggctagacttccaatacacaggggaggctcccaggggaaggagcagcagcaataaggagatgggagagaagattctgtaccattctatgcaaagagagatgctatggttccatctgggggaggggggaaatttttaaacagctagggcagaccatcctatttgggataagaggggtcagttttatatgagatgagaccagaaagggctgttggagccagattgtgacagaccctctgagttgtcaggaatttggattcttaagacaatgaggagccttgggatgttttaaagaaaggaagtgatataattatgcctcagttcagatagacacctttggttatgaccaaagaagatgttttgaaacaggaagatcagaggcagagaaaccagttaggagattgatgtaataatccagataacatatgatgggggtctgaacagaagcagctgtgggaatggagatgaggtttcaacatttttgagtcagagtcagcag

SEQ ID NO: 917317 - DNA, 4001 bp, Homo sapiens
gaaattcatttttgttgtatattacaaaagtatcagtgtgcagcacactaaaaaaaaaatgtgaatgaagtgactcatttgtaaattagcatcatgggtgccttcagttcttcagagtgttgttttagcctgtgactttgatttagtatgttctaccactttgaaggagaattctctgccctgacaaaaaaggtgagcttccagaaacctgggacctcagtgaacttgcaagacgcctctaataaaggtaaccaattcagtcctgagaccttgtcctttgcggtcacctgccctggtaggaggctgtagggagattgtagggaaaggagggagccctgtagctttccccacctcttttgggaagccactgacatctagcagaaccccagctcccaacacagggctgagaggctggctctgaattctggtttagaggcaggaggaaggccgaaaaatagggtgattaatgtttaataactagttcagcaagaggggaagaagcggtgattgacagcgtttgacgattgctctggagtaaatactcccaccgtgccgttttcagagaagcagcatgacttcgctggggaaagacgtgcagtacctcgccactgtgtagtgttcctaccgtacagacaccacagacacgattaacctcgagagcatagatattaggaagaggtaatagaataattgatgatgagttttgagtgtttatcaactttgcttttaatatacctttgtctttaatataatctatttaatcataagattctaacttaaatttaaatgatggttatatataacaatcagctacaaaaaatgctgaaattcaggtgccagtacaagccgtcgccagcacaccactgggtggtggctcagagcatcagggacctgtaccagcccctgccggcttccctgccctgccccactctcatccaggccatgcctgtccctccttccaaatgtcaccatctggggacttatttttctctagagactaggaagagtaagtaggctgattttgaatggctcatcatttcacaggtaaataaactgacaaatattaagcttgacagctgcacttttccaatcaacattgtaaggaaacatagacatacacgtattctctcataagaccctgtgaggttctacaacgataaagaaacatatgtttttgtgcctgaaatattttcatttattctctgtgctattctgatagttttagagagatcagattttcagataaggtagagttgcatttttacgtaaacaatgcagtaaaaatagacaacattctcatttattggagttgggatacattttttaccacctttaattatgaacactgtaaatgctgcatcttggcttttattagatcatttgttatgtctattatttatttacaactgaatccatgcccagaaatgtaaccctaaactgttacattgtcctaacggggaaatacagtttgatttataaagattcactgtatgacaaagctaccaagaatgtattttggtgaaaagcagaaatgaacctagattttttgttcttcttttaagttcttgttacaaaaatacagcaagcttagatctatacatagaaaaaaaacaaatgtgcaaactttgataagtaatgaaaaaccaggaattacttttaataagtaaataatgaaaaaacaggaattatgtttatacttgcaaaacatttttctgctaagcttcattatagcaaaaaatctaatgttaaaaggaaatggaaattcttgtcactgaaatttacttgaagatgtcatcgccaggaaaacaactgaggaaaactgttgaagtgatgaagaaggaggttaccttctaggactcccccggtgctgtctttctgcggagcccccttcttctcagcctctaaccagccacccggggagctgagtccttccccccggcgcccaggctgctgcgcggagctcagacacacgtccatagccggctgtcccaaagacagctgtgcattgaaaagcaatctacaaaagaacgactataatctactgactgactgttactagttcagcacatctatgatctacatcgcatgttcgtaattaatacagaattggaaatgactccttgttagtatgcccaaaataattttgaattgttacacgtatctttaccttatgcagcagaagagatgtgaggcttctgtgcactctttaatccccagtgttttatataggtctacacctgaaaggattagcatttgatgaacaaaatccagccagtggaagcccaagttatttagggtagcattatctaccagtcctcatagacacattactttgctagaattctctctctttctctctctctctctctctctctctctcacacacacacacacacacacacacacacgcacagtcctagcaacattcaatggaattcccttcaaaagtttcaggaatatcactggaacagaacagaggctgcccctgtggcatccagttgctgcgatgtggttcgaaacgttagacttccagttcacttttcaaagaagtgggtgttggacagttgcacagacttgcaaattttgtgctcatttgccaaactccagtagccacagggaggacatgcccacccagcctctgcctaggacccgtatccaggcagccagaaagaacacaaggatctaccaagaggaagggaatgctttggggaggaagaaaggagagcatctatccatgagaagggacgggagtcaaaggcttaacgttgaatctgggggatttagagcagagggaagaggaaatcagaaaaactcttccaagaaaaagtaagccattgtgatttatttaactgaaataagggatagtcaaaagggaaggagaaaaatcatgtgctcatttgtgaagctcagaaacccttaaaatagaatataggtcacacaaagtaaagcctcagacaaatgggaattaaagaatcacttgtgataggctacattcaaccagggagttggatgaatggtgttttaacctgagtagatataaaagcccatttttgtttttgtacccaccctcggtactcgtttctctggtgtcactattttgtgttctttatgtcagtttcttttcactcaggatgttcatctagatgtgctgtggtcccatgtaaatcacctttcccactttcttaaatgactggggataagccggcatttgttccagctctatcgttctaatgctttcttattccccaaatgcatctagttctatgattgcattctgcatctctgcaacttatttcttccaggtgtcatcagtccctatgagaaatagcaaaaagatagtcatcagtacaattctacaaaaaccttttaaaaactgattgcaatgtacgtgaatatatgtgtgtatatttatatgcatgtagacacacacatagacaaacatatgcgttcattctacaagctttaaaatgaagcaaaggacgaaggaaaaaatgttgatctcctttaattctactatctagagaaagaaacctcaccaacttttttttttgtatcaacttctaggcttattttttttgtataaacttttttaaagctattttactgaaaatgtgacttgatagaaacatgtacctctttaacctagcatcctattaagagttcctttttaggatgagttcatgtcctttgcagggacatggatgaagctggaaaccatcattctcagcaaactaacacaggaacagaaaaccaaacaccacatgttctcactcataagtgggagtcgaacaatgagaacacatggacacagggaggggaacatcacacacctgggcctgtcagggggtgggggacttaggggacggagagcattaggagaaatacctaatgtagatgatgggttgatgggtgcaacaaaccaccatggcacgtgtatacctatgtaacaaacctgcacattctgcatgtgtaccccagaaattaaagtataataaaaataa

SEQ ID NO: 917318 - DNA, 4001 bp, Homo sapiens
agggtcttaaaaacaggatgaatcggccgggcgcagtggctcacgcctgtaattccagcacttagggaggccaaggcgggcggatcacgaggtcaggagatcgagaccatcctggctaatacggtgaaaccccgtctctactaaaaacacaaaaaattagccgggcgcgatggcgggcgcctgtagtcccagctactcgggaggctgaggcaggagaatggcgtgaacccgggaggcggagcttgcagtaagccgagatagcgccactgcagtccggcctgggcgacagagcgagactcctctcaaaaaaaacaaaaacaaaaacaaaaaacaaacaaaaaaaccaggatgaatctaggggagagaaactaatgatgaatacactgaactccttggcacaagattcacaaaaatgctataaaaacactagataatagatctttccattatatatgtttacaatataattataatgtatgttaatacaaataaggaatatcagttgccaatacttaattttaactcacaaggccttctttcctctcttttttgttgtatctgaatgttccttgagtttttcgctagaaaggcataatgtaaatctaaaaaagaaaataataaactactactttcaattttcaaaaaagctcatatgtaaaaacttactaagtctacaaaaattttaaagcactactcattcaaattttcaaatgcgttacaacatcatttatcctgaaatagggaacttgaatcttttttttttttttttgagacggagtttcgctcttgtagctcaggctggagtgcaatggctcgatcttggctcactgcaacctccgcctcccggattcaagcggttctcctacttcagcctcccgccaccacacccagctaattgtttatattttttagtagagaccgggggggcggggctggggtggggagcggcttcaccatgttggccaggctggtctcgaactcctgacctcaggagatccacccgcctcggcctcccaaagccctgggattaaaggcgtgtgccaccgcgcccggcggactcttgtctttaatagatggaggttttaggagcaatttttgcttagaacttatggtccactaagatattaaggtttataatcatgcaataatgttccttaaagttgataataaaatctggaaatcaactggttaatttttgtggctgacacattcgtgacttaaaaaagcaatcgacagaacttcatcatgctatacaaagaaaagatcgtaaaacttagttgcaaagcttaacaaaggtatatcccacaggggtaactggacgcaaaccacctgcggatgtgaatgccacttcactgaccagagaggtagcaagaggcgaggcgcagtgagattctgaattaggagcctcgaattaagacacgcccacactcatcaccactaaattagtgcggccagttttgtgggccgtggtgttcagcgtccgcggggttctcccaagggaggcagaatctccggtcaccagcctcgaaggccctcggggactcaggccgggggccggtccaggaaggagcgagtcccaccagtcgcagggcgctccgatccgcagcggcacctccacccacggctccgggagagccgcccagagccaaaccactccccgcctaagggcgtcaggggagggaggagcttgactggggctagcagaaggagttagtcctgtacctgtgcggagactgtaaaactgccatcccgcgccgcaacactgacgcggctgtggtgccaggccgctcctgctcctgccagggccgcgccggccactgccgctgccaaggggccgggactccgcacagcctgtcggctgacagcgagcccccgtcgcagttttccgccccaggccgccacccgcgcgcagctacccgcagccgccgccatctttgcggaagcgcagctaggcggcgcttctctcccggcgccgccgcctaccgcttgggaactctcgcgacatccgacaggcttccgccccgcctaccgggcctgcgccgtgggtgcggttgctgaggcgacgctcgcagccgcaagaggtggccttcggttccggggctgccttctaaggctgtggggatgggatgacaggaagagtatcaagacagtataatatgacttcctagtccaaaacaagatagtgccctcggttgtgtgggcaggtttctccttttcattttttcaccttgtaaaactgtgaaacgttttttgaaatagtctcttctgcatctgtgttgttcatgtcttcctatgcttatagtcttgactgttctttcatttctgctaaaacaactctcagacaaggcattctgtttatttcagtccctcactatttgcttataatgaatttaaattcagtttcaacaaaaggtttgatagtagctcttatcctacctagaactaaaagtcagagacagcagcacaccagccccatgtctctatcatcagggacccagaggttttccccagtgcagatttagaacgatacctccagtcctggctgttgcattggtgataagtgatgtagctgaggcagactacttggttttatttaacagcctccaatcctccattctttggtcttcacttttcctgagtaactctttttaataaactctttgttcagcctctgaaatgtccccagctattagaagctttagttgggcatgcagtaacggagccaacatcaaaggggccaagactcctaatcacataatcactgctgtcttgaagttttgcacaaaacaaaacttcaagaaacaaaaacaaaaacctgtcacacgaaatctaatttgatcattcagtggaagttccgtggatccctttgttattatctgcccttaatccttgctccctttctcttagcccgcttgtctaaattaatctgcagtcagaggttcctcacttttccgtcagcttctggacttacttttcagtgtgccttcccaggtaggaagtagagagatgagcctcacttcaccgacttgtgagccagacctcaaggtttgaatcttagctctaccaggatgatcactgtggtttggggcaaattatttaatctctctgagtctccattttctcatttgtaaataactcacgatttggtagatgatcactgctatttggggtaaggtatttaatctctttgagtctcaattttttcatctgtgaacaaccctcttacagtttggggtggggaagctaaatgagatattttatataaagtgactagccaaatgcctggcacatggtaggctcatgacagatgtgcgtttactgtggtcaaggtttggtttacttctgccctgtgaacacaaatgagcttgactgaatgtccatgattccagatcactagcccatcttaacctgagattttcctgcttttttgtatctagcctgactttgtcaacctctggactgtttttcacctctgctaactctggtagctttggcacatgtcctgcttttctggactattgacatctagcttgtttcctggtgataataggacttccaggatattttggacaccctggatgtcttaccttgtagtttattcttgatttccagaaaccacagtctttacgtgtatacttctaactgcctcacacagttcctctaggtatttaatgaaacctggcatctattactcagtattgccttaagcccaagataagtttagattcccattaaaacatgtagcatatttaagaacattgtctttctcccacaatttgacatccttgtgggtgagatgtcttccttttccctgtttctctagcacctagcacaatgcccagcacgtaatagacattcaatgagtgagtaaataagtgaataaataaatggcacaaatgaaactcaggggttcatatttctatgctttggccatccaaaatacagaagtatattattcctttggggtactttattttcaaaacaaaagcttctttttattt

SEQ ID NO: 917319 - DNA, 4001 bp, Homo sapiens
gtttgaggtcacaaattaatattgggaaagacagaactcgaacccgctctgtacatctgtaaagcccacacttttccatacttctctattacaatttatctgtttgaaagtcttctctcctgaaaaggtgagcttccagacccaagagccctgcccttcatttctttaaccagctatccaatagaatgtctaacacatgggggaactcaatgaaagaaacaagtgaccggagcagatgctaggctttgttaattcactttgtaggtgcttaacgcatagattttcagaaatacgaacaggtaaaccttcaggcctgacaagccctactgtttctacaagaagggatggatgaagttaagctagtaatctctcttcaaaatatattacaagataaaaaataaaataaaagaaagtcagtgggagacaaaggaaaatcaggaccaaaaacaaatgtcatctttatactgatttaatttgattcaagcacagactacttccacttcccagtacaacctgcccatattgctctcgggaattctaactatcggattaccagtgaccataatgctaaaaaactgaataaggctttttttttttcaaggcaaaaatcaattctaaaatttgaaaatctgctatcagtgccgaatatcatgatacaaaaagggaaaaataaaagctaaaattagttatatctcatccacccaaaatcaggcttcccctcacgtctttctgctcagcgcctacaagtaggtctcttcacaccaactatgttaataccaacactacatacccttaaggaaggtggtgtagcaaatttcacacaaaataatttttaaatagacaaaactgataatggagataaaacaagaatcacacactttagctcagtgcaacaataccctagacttgtctttataaggcaatacagtataacgaaattttaaaaggcaaaaataaaagtaatccttaacctaaaacggacaaaatgtacaaactccaagtagaacaggcatcaggtaagtcctttccaaccttgccttcctctcacctttcactagacaacgcaggctagtgacttcctggggtaagaaatcaaagtgaccaattccatggcactatgggaagtgagactcgtctcaacagagttttgtgttttaaaacaagaaagcccaaagctttgaaataaattaattaatagatgatggaatttcaggtattaatgaaattaccattactcgactgcaggcagccgtgtccttgcaaaaagaccatgtgatgccgcctgtgaacgcacagggataggcctcttaaggcaggactgtagcgctggagctaaagggctttagcaggggtgcgcctgagtgtatgcagagggcgggtcctggcaggacgaattcaccgccactgccagaacgaactattcagattcacgtggagcaaggggctcatgcagaagcagttcccggacccgacactctgggtaggagaccactaaacccggcccctcaaagcagaggtgaccttgccctcatcgagagcgcacacaagacgccactgtaaaaggtgggttcgctgctcgcctcctcccaggcccaaacaatctcgccctgattgttgctggccgcgcggagcaggggtcggcttagctcggggactgaggggagctcctcctgcgccgctcacccggcgctcgccgaacaggtccaagcggctgccctggggcttgacattgaaggcggcgcccacgggagaccagctggtgctgacccttcgggcccggatcccggcttcgaggcttccccggcccgcccggcggggcggcagagctgctgctctggctcccaagccgcccagccttccgacgcacagcattctagcaccagagcagtcccttcctccaacgcagatccctgccctgctgctttcgctgggagcgcgcgctccgcgtttccaaggcagcagcccacgccgccccacgtgacggccccgcttccgggtctgggcgcggcctcaggacgtgggcacgttgtcgtccagagagcaagagcgtcgctccccctcgccttctcggccgccctcccggtttaccgccccctgtgtccagagtaagaaaaggctagggttgcgcttccctcccaagttgactaggggtgggcgcgagtaaaatcatgacatattcgaattccagtggacattagatattctttgagagacggcaggtacttgagtaaacaagaaatgcccaccataggcctgaaggagaagtttcccttttaacctactctcttggtaaatttatcctgcacttctctgtttggtgtctctgtccggtaactttttactcttgcatagctcagttaaaaattttagatgggaaatagtgaaagaagtctaatgggattttccctccagggtttcagaattgcctgggacccgtgaacccttttttccttcccctttctctcttttggaatggattgtctaccctatgcctgtctccccctccaacccccggtcttttagaagtggattaactcgtctcgcttcacaggatcacagatggagagacattttgccacacgatgaatcacacagtaagtctcctctgtagcttatttaaatgatgtagatggtgagaggagttgatgcggaaagtgttaagacttttggtaatgttgacatggtgcgaaaatgtattttgcacatgagaaggaaatcaattttgggaaccagagggcagattgggttgaactgtgtctcccaaaatagatgctgaagtcctaaccctcggtgcctgtacatgtgaccttatttgaaaatatggagtttgcaattatgattaagatgggtcatactagattagggaagctgttcttgtaagaagaggaaaatttggctgatacaggaggaggacagccacctgaagatggaggcggggactggagtgatgctgccaccagctgccagaagctggaagcagcaaggctgcatcctcctgtatcccctttggagggaggatggccctgctgctacggtgatctcaaacttccagcctacagaactgtgagaaagtccgtttctgttgtttaaagactcccagtttgtgtactttattagggcgatcctagaaaacaagtagagattcatgtctggcaaataatgatcaaacaatgatttgttggatagaatggtgattaaaacctaggttagaaaatgagcaaaatgggagggaaagcaccaggacaaatagctaatgcatgcagggcttaatacctgcataggtgatgggttgacagatgcagcaaaccaccacagcacatttttatgtaacaaacctgcacgttctgcatatgtattccagaacttaaaaatacattttttaaaaaaagacaaaatgagcagtgtctacagctttctggagtgtgacagcatcaccagcttaaagctgttactagtactaaatggaataaacatttccctctaatttccccttaatgtcctcagaaacacagatgagggatacatcttcatatgactcctcagagcactaaaatgatatcaaaacactcttcccacaagaaatgcacagacaaaggattcttcagataataggaataagaaatgtgaaataaattagaataaaccatgcagctattttaaatatttactcctggaaaaatagtaagttacatagaatcagttttgggaataacttttccgttttcacctttttatgattattgtaataattggaggaattaataaagtaaaaccatctgaataagttcatcccaagctgattctgatggatggtctggcagatttataaactctcctctgtcactggctgctgaacagaaggaaccctgtgaaagttgtgtcatcgtcctcatcagcaaacaagccattgaacctctctcctcctgtcacctgcagccacatctcatccccgagcttcagctgcaggacaatgctgccagaggcctggtcctcagagctca

SEQ ID NO: 917320 - DNA, 4001 bp, Homo sapiens
gcccaccgtgtctcctccagtgtcccctgcaacttcccccgcagtgtccctgcttctgtggaagcctctcggcctggacttccttgcgagcagcagtttaaaggccgccgctctgtacttctttgaaatgaggttgtagaggattgggttgatagatgcgctcagatagaaaagttgcagagcgacgatgttaaagtactgagagaagtacatcatccgcgaatcttccgtgtttatgtaaatgattctgccaacgtggaagggcaaccagcaaattataaatgccagaaccaccaccactgcaacataagacacagcaccgggattaacaaaagcattgggaagcaaataaaccccccaccccgacaaggaaccatctgcaataacaagtaacagcaaaataaattagagaaaacttctacctaggcagatcctcaccccagaaaaaatgaccaggctgcaggctgcatggatacttgctttaaaactgcatagtaggctcccatatgtgttatcaaggctggacataaaccagaaggagcaatttctctgaacaagccgccttggcaggcttccttccacaaacccacttcggagacaagttttctgttctctgttgaaaagaattctacaacaggtctgcacaatctttactttttgatacgagcaaggtttactttagccttcagcatcacttaacattaaataaaaaattttagcttaatgaaatctccctcgtcttctcaagagcactgtgaggactcctcatctgtggcatctaacaggtggttggattaagaattaccaactctcctttctggtctcagaggctctggaaaagcactgctggttactgaatcggatccggggatcccaccctcaaagcgccctggggtcccccagagctcctgggggacaggacatggttttctcgggggatgggaagtaccggcgggtggaggctggaatcgaaataggaaagggagctggaagcggcgcccagagctgggcgagcaggggaaggggacccagcgtttgcgcggtccccggcggggcggactgcaggcaggcgtctttggaaccacggcggctccacttacgcaggacgcggacggtctgccggtggcctctctcccgccccgaggcggccgggcctcgcagcggccgccggctgctccacagctcccgcccgatgagcccgtagaggatgctgaggcacagaaagggcaggaagaagtaggcggtggtgacccacagcatgacacgcagcgcgcccagctgcgcggggctcggccggcattcgcggctgaacagcgccgcggcctccgcggtctcgggccccgacggcggggacggcggtggcgcccgcgagagccagagaggcggcgacgaggcgagaggcgaggaggcgatccgcgcggtgccattgaggcccgggactacggagatgccggggtcctgctcgacgcccaccaggaacaagaagggaccggcagagagcagcgccacggcccagagcacagcgatgagcgcgcggacgcggcgccgggtgaccaagacgcgggcgcggagcgggcggcagatggccaggtagcgctcgacgctgagcgcggtcatgtgcagcagcgtggcgtaggtgcagccctcgcccacgtagagggacaggcggcagagcagcggcccgaacacccagggccgcgagcgccagaggcggtacaggtcgaacggcagcccgagcaggatgagtaggtcggacacggccatgctgcccaggtacaagttggtggtggtccgcatgtcccggtagcgcccgatcagcatcacggtcaccacgttgccgctcaccccgacgacgaacaggcacaggcacacagcggtcaccggcaccagcgcccccaggggaaagggcgagcagcggcgctcgtcgcaaggcggcagcgcgggccacggcggctcccgcgccccctcggggccgtcgctgccgttccaggggctgcccatgggtgctccgcgcggccgccgcgtcccgggtcgggctgggagcctggcgcgtggtccctctcggtgagcgcctcctttcccagcccgcacgctgcgggcgcggcaggtcagacggcggagcgctgcgctgcgctgcggggcgcgagaagcggctctgcggggtgggctccgaggcgctcccgagctagctgcgcgcagtctccgcccacggccgcggcccgccccggcccggccctgctccgctcccgcgccctctcccgggcccatgcagttccagggcgcttccctctccactaactggaatacccggcgcccttagcgcacgagccctacccggtccggtgagcgatgtctgcaccctagacagctttggttacaggactgagcactgtacgggcgcttttgtcagtctggtactccgggcaccttcgaagggatctggtctggtggctggtagctgccgcttgacggtggaggagggctcatggtaatcctcaggaagccataatgctaaataataggaggggagtctagaccagaatctagagcctctcctgtctaatcctggctctacaaccgagtaacttgtgtaatcttgggctagtcctggtctcgcccagcccagttctcctcttctgtaaattcgcgagtggtggagggagctgaccatataattgaccaaataatttcttttttttctttttttctttctttctttctttttttcttcttgagacagggtctcactgtcgtccaggctggagtttaagtggcgcgatcacagctcactgcagcctcgacctcccaggctcaagcagtcctcccacctcagcctcctgagtagctgggagcacaggagcgcccaagccccggctaaattttgtgttttttgtgtagtcagggtttcgccatgttggccagcctggtctcgaactcctgaccccaggtggtccacccgcctcgacctcccaaagtgctgggattacaggcgtgagccaccgcgcccggcagtgaccagataatttcaaggatccgtgagcatgtttacttattataaagaacaagacaaatatttacgtggacactagagtactttcacatgtgatatgtcattcttatgtacaacatgttttataaacttaaaaaactagaggatttgtcaacaccggaaagaacgaaaattggggaaaggggctaaaacggatgttcagtctgttcggtgtggtcttaataacaatagctaacacttactgagaatttagatggatctggccctgtgctctccatttaatcctcatggcccggggcgctcctttcgcccatgaacaaagcggtcttgcttgagatcaagcaggcagtaagaggcgggactgggatatgggctctggtcggcctaatcccagagcttgcaagcctgacgtcctactcactgcccagctccaccccctcagtggcttaaatcctcaacctcttctctggagtctcgattctggacctgacacctggctttgcctagggcaagcttctcctgcagttctctctcacatgcagactgtgagcttggaggagggacacctgtcgcctccctcatcgctgctgtttccagcggtcctaaaaccgccctccctagcgctttcctccgtggtcacccgtagtccctgagggacaggtgcctgcgctctctttgaagcactgcatctgcggccgttcacacccatgccgagtcttggaatgccttggcctctagtttgttgacctcctttccacctatgaccttgctctccacccgatctcagccgcgcctgtcgacggaacttacacctcacggttgcctgccagccttcctccacctccacttcagtcagccctctttctgacctccgcccgctctctttttagctctcttcccctagcacctcagttccggtaatccttcaacccactgcgacctccatcgctggctcctccttccttttcccggtcccttgcctgccccaggt

SEQ ID NO: 917321 - DNA, 4001 bp, Homo sapiens
aggctttaggtatacagtgcttacaattctttgaggctggcaaaattaaacactgtatgaatgagaatcatcttaattctaaagattttatccttctagccaaattattattattttttttgagacggagtctccctctgtcgcccaggctggagggcagtggcgcaatcttgttttactgcaacctccgcctcccgggttcaagcaattctcctgcctcagcctcccgagtagctgggattactggcgcccgctacctcgcccagctaatttttgtatttttttgtgttttagtagagacggggtttcaccatgttggccaggctggtctcgaacccctgacctcgtgatccgtccgccttggcctcccaaagtgctagattacaggtataagccactgcgcccggccctagccgaatatttttcaaatacctcctgtgtgccaggtattgtgttaaatgcaagtgatacaaaatagtctaacagtggctcatcctttcacctcaaagtgcttacaatatatttggagaaattatacataaaaacatttccatctttattgcaaataacaatattaatgacatcagctcttaattacttaactcctcataggaaaagtttccactattagcaactgtgtatgcttcaattaaaatctctatattgtccggacctaacacagcacctggcatacagtagttgataaaaaatgctgaatgaatgcgcaaaaaattgacacaaggcagcatatgaccaatgggaaataacagacaatgaaaacacaacatacagaatgaccactgtgggacctttgtttacctcacatccatctactgaaacagattgttttcttattgtccatgcttccccttggattaaaggagaccacatatagcaggagagacaaacaaagaacgataatggcttaaatgccttcatagaggtcaatacaaaaagtaaaaagagcagagatgagaagctcctcactctgcagaggttagggtcaaaaaaagctttcccagagagctacaccccgaggccttggaagcatttgagtaagatttcaccagaagaagagggcagagaactgtccaggccaggagaacaggaaacaccaaggcatggtgtgatgaattccaagtatttctgtgtggctgcgagctatacaacgcataggggagagagggatgatgctgatcaggttatgaaggcctttaaatgccaccctctgggtaagattgagattttactccaagggcaaatgaaaattccggaagattttaaaccagggagttggttacggttttggaaaacactgtaacgatggcgtggacagtggactacgacgagaagcattacttcactatcatatcacgccaaagcgcagcagctcccttcaccagctgcctgcagccttgtgatcaccacacaccacatcccaaactgcttcgtctcttcggccaaaacaatcctccaaaatttgctgaagcttccctcacacactcagccctaagagtgcagttggaaatgtcacttcgcttttcccacgatttcgcgtgcttgcattgaactctcacattcctcccccgctcctgttttgggtctgcccgtgctgtttccagctcgcgtcctccccgccaggcccggagctccccgcccagccccgcgccggggcccctccacataccccctcggtcttcatgtccaggatcttctccacctcgaacacatcctctccgtcctcctcactgtcgccaaaggcctccgctcctctcgcggctgcgtcattatcttcgcccactactccaactccttcttcgacttcggccaactcctcagtgctgtcggcagctgacacagggactgcggtcacccttgctccctccgcaacctgctccatcctagcagctccgcaaaccgccgaggaaaacccgctgcgacaaacaccccagcagcccctcgcgttccgcgctcggccctactccacatcagcggcgtaacggaagccgaccaatggcgggcttggatcctagagtgacaggaacaaaaaccaatcatattaaggcgggcgcggcgtaacaccgctgagcccgcgggacgcaggtgggcggggcagggagggcaccctaggcggaagagcgcttgggcgttctgtagctgtggcggaaaaggtcaagggtgggaggggagccggcgaggccgccgagtggcgcgacgctggggaggaggagggtcgttggggcggagggcgtcccagggctgagggcggccccgaggagctgacagtgcctgatcccccagcagggaagcctcaggtgcggacgtcggtagggccagagctggggactttctaggaaagggaaccctgctgctgccgaaaccccagccaagcagaacggcttcccagaagtcatatatgattttgataggtttagcacgtgtggatgatccaatcaaacataactcacagtgctcttatattttaatgagtgttgtttaaagacaaggaaatttagcggcctaaaaagcatccgttttccaagttctagcgccctttgccttttcattgaaaatatcggagaaggacgtgattaaaagtatttgttcaggttgtgaagagttgacaaaaattacaccacccaaagttagcgaaatactgctaggaaaatacatttaaggataatatatttttctcactttgaatttcggatgtgcaactgaagtctttatggcatcaagctttctatttttgtttctttgaacagtggacttaatttgtaagatgagcctcatcgtcaaatctctgagctttaactgaagaacaatctatggtccggcaaatccttttggaaaggatcaccagatctttgagttggctcaatgattttttttttttcactcaactgtaatcagatagtaaatgatataccgttgagcttattaaatacatcctatgtaccatcactatagtaggcattagtaacaggaatacaaagatcagtagagtgtagtatgccttcctaggacccacaggaaggagtcccaggaagacacacaccaatactaacaattatgtattttaaaaactgtaaaaatattacccatataattagttgatgggagaaagctcatttttacagaattccagatgataaatatagaagaaaagttagaaaaatcacaataatgtgtgcaaaagatctaaggaacaaagcattatatgaaacggtgatgatgaggaactggatattcacaaggcactatagatccacagatcatttgttggttgtaggggaaatctggcttcacatttgaaagcccactgatcaatgttagcattactacaagtggaacaaccagactgtatgctttctgttaacaaaaatgttgatccttaatatactcaggcctttaagtggaatttccagttataggaaagaataaaggggaaagaggaaaaggaaacaatcagacaaatccacaatgtgggatatcctattggacaactgactgtttcttccagttaaaggaaaaagagggaggagaagattgttgtagatttgtaacgatttgagatgaaaaacatggcaacatttaaaatattttaaatcttaacaggtttattatactattctctgcttttatgtgtttttaaataaaatttaaggacacatattcatgatgaaagttttcaattaaaaaatacataaggccgggcacggtggctcacaccagtaatcccagaactttgggaggctgaggtgggaggatcgtctgcgctcaggagtacgtgaccaggctgggcaacatggcaaaactctgtctcttccaaaaatacaaaaaattggctgggcgtggtggctcatgccagtggccccagctactagggaggctgaggtgggaggatcccttgagcctgggaggcaaaggttgcagtgacctgagattgtgcctctgcactccaacctgggtgacagagtgtgacctcgtctcaaaaaaaa

SEQ ID NO: 917322 - DNA, 4001 bp, Homo sapiens
aactcctggcctcaagtgatctgcccgcctcagcctcccaaagtgctgggattacaggcgtgagccatcccgcctggccatatattattgttattttagatagggtctcgctatgttgcccaagctggactcaagcaatattcctgaatagctgggactacatgcaagcaccacagcaccctgccaaaatagctaaaaaatacaccttcctgtaacagctctgataaatatcttttacttcgtttatttttcttttttgagatgcagtctcccaggctggagtgcagcggcatgctctcggctcactgcaacctccgcttcattgcaacctctgcctctgaggttcaggcgatcctcccacctcagcgtcccaagtagctgggattgcaagcctgcaccaacatacccagctaattttttttgtattagtagagacgggttttatcaccttggccaagctggtcttgaactcctgacctcaagtgatccgcccgccttggactcctaaagtgttgggattacaggcgtgagccaccgcacccggcctcttttacttcgcttaaatgtccaattttagtagtaaaatcccggaaaatgtttttaggagtatgtttaactgaaaagctcatattttctttcatttttgggcaattcttaaggtaagcaaactaatgttgcatgataaagcccccatcaagtatctcatacttaagcaaagacctcaaatcattgtggctttattgcagctttccttcaaaatatcatctgtgactgaggaaatccctatcttcctatcagactaatgaaaccacaggacagcaattagacttttaagtattgggggtttagagctctagatattcgatatgcagactactcatgtttgtttgttttaataaagactggtccaaaggctcattttcacacaagctacagtttttcagttccaggaccaggtaaagatggtcagctccgtgatccataaaatccaagggtgacgactcaggattaggaccatttcttggtgacattgagatggtcgagctggtccgcaatgaatctatgcggggggaacttggaagtggcggccgcctttatggcctcgaaggcctccctcctgcgcaccgcggcgtggccgcgctcctgctcccgggtcatgtagggcatgctcagccagtaatggttctccgcctcgatctccaggcggcggatcatgttctgcttggcgcgcaacgacacgaaccgcggccgccggtgcttcccgatccactgacggccgggaatgcggccgcgccagaggagcgcagtcaggaacatggtgcctgcggaagagagggacgggctttgcggaggcgaactggcgcggccggacctggagagagcagcgggcgcgcgctccagctcacgcctacgggagttcccgcaccgcctcccctccagagaagcggggagcccaggtaaggccagcaggcgaagaaggagctccctagagaaccgaattcgcacagctactcacctgccgcgctgctcaagactctgcgtctccgcggccgccagcagacgccgtggcgtaagcgcacccgtctcgcggggtctcctggggcctcggcgagagacttcggctctcgcgagagaggactgcgcctgcgcagagccgaggacgcgtccggcgccgagattcaaactagtggcgggaggctgtgagctgagcggtggggtctgcgtacgcctggagtccttccccgctgtgctcagcatggaccctatccggagcttctgcgggaagctgcggtctctggccagcacgctggactgcgagacggcccggctgcagcgagcgctggacggagaggaaagcggtgcgtgaggcgggcggccagggcacggtgcgtggggtgcgccgcgggcggaggggcgtggcgagtggacggtatgtcccacgggaaccgccaggcactgacggcgtggacggctgccaccgaggcgcagggcgggtgctgcgcgtctcactgctcggcgtttggcgttagcgtagctcccgggcctgtttatggtttattcctaggaacccttgtcgcgtgtccgttttagacccatgtacaaccccacggctctcttgagataatgaaagtagcactattacgttataaacagagacagcagcacttaagaataagaacctaaattaacagattgagctcataatacatatactaatttatacgtgatatgctttcgtcacatacaatatgtgtgcttgtcagtaaaataccatgtaaacctaaacagtttctcttagaatcaagctatttaacgttctttacacaatactttacacatatagtgacttttttctcactcacgtggtccacagttgcagtaaacctctgtgtttttcccgctaaaccatgttgccaacacaaacactagtactcaacagtgctggggtttaaaaaaatatgtgtatataaataaagcaaaattcaccattcccctttttattagagattttttaaattgttgaaaaagtagttcagattttggaattatttcataaatgtcataattgtaatgtgctttaaaatattacaccctgcagactacttttactttaattatataatgaatgatctccagtcacttgaaaatgtctatttctgcccggcgcggtggctcacgcctgtaatcctagcactttgggaggctgaggcgggcggatcacaaggtcaggagatcgagaccattctggctaacacggtgaaaccccgtctctactaaaaatacaaaaaattagccgggcgtggtggcgggcgccggtagtcccagctactcgggaggctgaggtaggagaatggcgtgaacccgggaggcggaacttgcagtgagccgagatccgccactgcactccagcctcggcgacagagcaagagtccgtctcaaaaagaaaaaaagatttggccgtgcacggtggcacacgcctgtaatcccagcattttgggaggccgaggtgggtggatcgcccgaggtcaggagttcaagaccagcctggccaacgtggtgaaacctcgtctctactaaaaatacaaaacaattagctgggcatagtagtgggcgcctgtaatcccagctactcggaggctgaggtgggagaatcgcttgaaccctggaagcggaggttgcagtgacccgagatcgcgccactgcactccagcctgagcgatcttagactccatctaagaaagaaaaaactatcttcagatggtcatcaggaatgtgaaaagacatcaatttcattagtcatcaaggaaatgcaaatttcattagtcatcaaggaaatgcaaattaaatctcaatgtagtacagttgcatacccagcaggatagctaaaacgaaaaagagaaaattaccaagtgtttggaaagatgtggaacaaatgcgctttttgttgttgttgttgttgttgttggagcagtacgcactttttttttctttttttaaaattattatacttttaagttctagggtacatgtgcacaacgtgcaggtttcttacatatgtatacatgcaccatgttggtgtgctgtacccattatctcgtcatttacattaggtatatctcctaatgctatccctccccccttccctcaccccatgacaggcccaagtgtgtgatgttccccttcctgtgtccaagtgttctcattgttcaattcccacctatgagtgagaacatgcggtgtttggttttttgtccttgcaatagtttgctgagaatgatggtttccagattcatccatgtccctacataggacatgaacttatccttttttatggctgcacatggtgtatatgtgtcacattttcttaatccagtctatcattgatggacatttgggttggttccaagtctttgctattgtgaatagtgcggcaataaacataagtgtgcatgtgtctttatagcagcatgatttataatcctttgggtatatacccagtg

SEQ ID NO: 917323 - DNA, 4001 bp, Homo sapiens
ctaaaaatacaaaaattagccaggtgtggtggtgggtgcctgtagtcccagctacttgggaggctgaggcagaagaatcgcttgaacccagggagcagaggttgcagtgagccgagatcacacactgcactccagcctaagcgacagagcaagactctgtccatatatatatatatatatatatatatatatatatatatatatatatattatcaagttctcaaagccagaaaatggcagccgcaggttaaggatacttacatgaaagagaaaatggcaatttcaaaaaatgctgaaactatttgatctgcttatgaaaacgtcagaggctatcaaatcaggcacttaaaaattagaataaaaaaccaactgcataactagtatcctcataatcagtacacaggactctcattataatattcaatatatggtacaatctatttaagaaaatggtcattattttacatttaaagttactattcaaggtattttaatagaaaagtggtaatcaggggaatgaatctcacatgtaatctttactacaatgttttctttcaagactgctatcataccacagaaaacaatctacattataggaaaatcacgtctaagtaactccctagcactaaaaataataaacctctcgacctaacctcccacctgagtttgtttccactgacagcagctcatcagtacttcaaatgcaacaccttcaacaccacattcaagactcctctttcagactgactttccatttttcacactttctatattaaaaggccccctaacataaacaggtatttgttgttttctaaaaattataatatatggaaaaatctttctcaagcctggctccgcattcttctgttaacattaaggataccctaatactccaacgcagccagttgaaatttttgctatctctgactaccctaccattatcccatgacgtcacatccctttaattctacctgtgcaatttttctcctccattcagctggtccttcccatcttcactgctactaacctgcttcagcactgtacttaaccaaactgccttctgagtgttacgcatggaatttatgcagcggaattaggttttcataataaagttctcggaggataaataccaaaaccaagtatgccacaattcccttttttcctggctaacttcaaccagtggtcctccttcagatttcgtcagacttttccagaaacgatatcctgagtctcccctataatggttaggtgtccctatttgctatcccagcaagtactcattcatgttggctgaatagtgtactctgtttacctacactatctcagctattacttcactacatagcacttgaattgtctactttctggaactacacgctccgtgatggcaggactgtctcacttggggtttacaaccagtactggcacgctgtttttcgagtttttcagtaatgaactaaagaataaatgaaggaaaacaaatgagactatcaaataaatcttgggaggcaaaagataaaaacctgggtaaactgacaggagatgatgacaagaggaatgaggcgcggcgtgtagtagagcacagcgaccaggtttgtaatcgtagctctgttttcacgcacactatgaccttgggcaagtcatcttttctttctgggatttctctttcctcagatttaaagcaatagcttctaagacccagcaggtggtaacatcgaccccaggaagtcggaggatgtacaggacggggcacggggttgcctgaggacctaccgggccaacagcgctgaactgcggtacctgactgttccgtgccgaacagtgagtagcataatcgcagccgctgatgtctccgggcttccagaggacaaagggtggcgggaaagggggcgaagaggtaggaacgtcgagactctaggaaacatcgccgagacacgaaatgaaccaagaacacaactgaaatggtgcgtcccgctgccaaacacgtccccgccctctcttccgcttccggcctggcgccttcctccccctttgcgctccggtgggctacaggggcgggtaactgtgttccggactcgcccgcggccgggcggagccagttgcctccaagcgacccgacccaccccgcgattgtagtcctagaggcggagtcctcgccagagttcagcaaaggttcgctggccgaggcgggtcccagaccggcgaacccgacagtggagggcgtgaccagttgtgcaaaaactacagatggtgccagtgagatcagtctcttctttaacagacaatattttgcgatgtttggaggggaagggtctacagcgttcaccacgttctcaaaatgcgccatggccaccaaagaggtttaaaaaaaattactaaaagacctgctgccctatgaattagcgtttcctttcagtctttatttttgatgtagagtcaaaatgagacataggtttcatttttcaaaaatagctttatggccgggcacggtggctcacgcctgtaatcccagcactttgggaggccgaggcgggtgggtcacttgaggtcacgggtgcgagaccagcctggccaacatggtgaaaccccatctctactaaaaaaaaaaaaaaaaaaaaaaaatacaaacacacacacacacacacacacacaattagccggccgtggtggcgggcgcctgtaatcccagctactggggaggctgaggcaggagaagcgcttgaactcgggaggtgggggctgcagtgagccgagatcgcgccattgcactccagcttgggctacagggcgagattctttgtctcaaaaaaacaaaaaagaaaagaaaaaaagatttacgccgggggcacagtggctcatacctgtaatcccagtacttacggaagccgaggcgggcagatcacttgaggccaggggtgaagaccagcctggtcaacatagtgaaaccctgactctactaaaaatgcaaaaattaacctggcgtggtggcgagtgcctataatcccagctactcgggaggctgaggcaggagaatagcttgaacccgggaggcggaagctgcagtgagccaagattgtgccactgcactccagcctgggcaacagagtgagaccccgtctcaaaaaaaaaaaaggatgaaaagatgcaagagagagacttggcttttacctgtccctcatgaaacagggaactgtgaccccagaagagatgtggggttcccaaacttggaaggggatgagaataaatctggtgggaaatgttggctaataggacacatgggaaccactagcctaaaattccataaaggcattccaaagtttacatcaacattttccctgtcctctcaaaaaataatcaaggtggggaggtgagtttttgtgatactaaaacacagcttacattgagcagatcttcctgagatccactaacactaacagaacctttgtgactgaatgctctacacagtacacttggggatgcttactttgtctgatttgtaaaaaaacaaacaaaaattaaagcataactttgtcaaaaaacaaaattatggcaaatttagcataattggtttttatttgtgattctagaatagtgttccagtgagttgagcagaggggtttggctttacaagcacaaaagagttgaagaaaatagaaacagggaacaaaaatcagattggtcatttcaaagttaccttccttatagggttaaaacagagggattccttgtcatgctggctcaggtaaactagggcccctctgattggtgctgtgaatctcctgcttttggaaaactggccctgatttcaaagttcagtttgattacttggcacttagcacaagtgactattctggtttgctctggtgtgctgggggctagtacaggaagcttgtccaaaactacggcctcctataaactttagcaacttcaatacagaaaagtgtatgaattataaatatgttgatgaaaatgtatctttgttattgttgagatggagtctt

SEQ ID NO: 917324 - DNA, 4001 bp, Homo sapiens
tgtggactgaagagacgaaaataacttctattatttgttcactcactgcttttctcatacagctgatattcacaagctcatactgttatctgttctttcctgggagattggatcaaagttgcatagattctagcggactaaatatttgtgaaattaattttgccaattctcatgactctaagaactcttttacaccttccaaagaagtttcataaagtccttgcttctgcctgcaaactgtcccagttgccccattctggcctgagcagtgcagccttaatcccagagggcctgcgctaccgttactgggccttcatgctcccctcccttggctctggttttgctcttccatagggagcacaaagtgtactctccataatgaggctgagctgtttacgtgctagaactcccatttagaacactggaaaaagccaacattatatctttggccaactatttaaccttatttctttagctattaaattgaaataataaccatatgttttaaaaagcttttaaacccagagctaaagactctgtattaaaaactggacttacggccgggcacggtggctcacgcctgtaatcccagcactttggggaggctgaggaaggcagatcacttgaggtcagaagttcaagaccagcctggccgacatggtgaaaccccatctctactaaaaatacaaaaaaactagccgggcctggtggcgtgagcctgtattcccagctacttgggaggctgaggcaggagaatcacttgaacccgggaagcagaggttgcaatgagctgagatcgtgcaccgcactccagcctaagcatccagcctaggcaacagggtgagactctcaaaaaaaatttttttttaacttattctcctatgttaatcctatgttagtcttcttccagaactctagtgatgggatcactacccatccacaacctccagtcacctccaagacacctttgacgcctccactttcccagtcaacccaacaccaagcctcatcgacttcatttcctaaaccccactcgaatccatccagtcctctccgtatccactgtcaccaccgtcagtttaaaacatcgaccacctcgtttggattcctgccagtctcctaactcggcttgagccctggcaaccagttcccactgcactgcggtcactacacccaggaccttcctcaccttaaataaaactgccccgagattaaagatctacaccttcgccaggccaaaaggcccttcccacctctccagtttcttctttatgcctaggccacactggccattcggtttttgaaatacagtactctcgtccttggtttaggaaacgccagatccttagcgcattcttctgattaccttccaaactaagccagttctcccatccctcccccaatttactgagcttaacactgaatgcttctacagtccagttgacctttcctttaaaacattcattacaattacagttttgtgatgatcttagcactgctgttctccatcactagaccgtaaactctacgaagcaggaacaaaatggacttattcgttactgtgttgtgcctgacagaatgaatagtagtcgattttcagattcttctctccatcctctacttttctaagacttaggcctttcacaacacgtacttgaaactgagacttctcagtaagagaacttcgtttacttggttcaagtcttaagccacggagcccactaaatgacaaatgagaaaaaaaatcccagtcacttcgcgaccttcccccataaggcctcctcccgcaacagcaggcagcaagaacaacgcatttgtccagcatgtcctgcgcaggcgcccttcgcctggctcgctctgccccacctgtgccaggcagtaagccgcaagagcacttccgggagcccccgacccggttgttggtaagtcggcggcgacgcccacctgcagaacgggaccggcggagcgccagggctagagacgggacgtagcgacgtactgcgtgcgtgcgtgcgcacaaacgagggcgcgcatgtcgggacggaactagaaaagctcagtggggctggcggcaactctaggtctaacatccctcggaagttcgtgcagcggcctcgctgaaaatggctttacagcccggcagaaccctccgactccgcagcaggacctgcggagcctctccgccctcggtaccggcgggacggggtagccctgaccttccgggtgcctcctccacaggggcgccccctaaggccacgccctcccgatgccggtccgcgcaccgctccgcacgcctcatatttagcattacctgtgctggggcaagcgattgacatactgtagcggacgcaagtacagcggatctgcggcgagtccccttcgctctccgtagtgggcggggcttcaccccgcgtcctttaaaggaaaggtgatgggcggagccacgtttttctactgttgggattcagttccgccgacagaaaatgcggagaacgcggaggaagtccctgaggggaaattgctgctcacctggctcccgctgctccgcaggtgcggtgaaggctaatgtcgaatttctgcagcaatcggagcagcccttactccagttacattaacaccaatctcggtctcccactagggctttataaattgctttcataaacgtctttttaatgtaacactgaataaaatgttttataagcgtcttttataaggatcgtaagtgaaagggcgctgtctccgatttgcaggtgagcagacagcttcggagtgagaacggctccccgcgggtccccggtggcgcgcggctcccggaggcaaaacaaagctggggccggggcgtcggagcctccgcgttgtagttgggagaggttcgaacggggccccagctggcgaaagggaaaacggacccggacccggacccgtggagcctgctcgaaagccgggtgctgggggtctgggccccgtgtcccccctctttttcttcttcaataagaaattcctcaagggcagactgcgagtccacagtcgtgaagccacctaatctggcttcatacctggaatgtttggattcctggtacgaagaaaaactaacatttattggctacttgtccactggaaggcgttgtcttatttctcattaactccttgagtcagcattacgtcttttattacagatgacacaactactaaagctttaaatagttctttgggagcaaagacgaaatctccatttcctttttagctgctggtagctcgacgctcactgttaaaatagggaggtaatgaaacaactcttgtgtgagaccgaaagtccaggtgtgcatcttggccatttccaagttaatcaagaagaattaaggattcattttattctatcaaaattatttctcaatgccaagatattttgtgtgacgtagattcggggacagactgagtagcacaatacctgggaaaagttaggtgctcagcaattataattgcccacatttgtgattgcttttgcctatgtgccagacactgttctacgcactgaacatatctcaagttattcaatcttcaggacaaccttatgagccaattattattattacccattttacagatgagggaactgaaacaaatttgcccaaggtcgcacaactagtagcagaatcaagaataaaaaagccaaaaaaccccaaacccaggcaaactttaaatgttccttgcattgctagactgaagtagtgagagaaacagtaaacagtacgagtccatgaaaacattaaaaggatgtgaagtatgtacaagtaactgaaacatttaatgcccaaactaaagacttaaaatttgctaaggtaatagcacaggtagattcacaccaagtaatcactggtaactgaagctaccggccagcatccatttgcagtccgtctttgaaggcagctgtgtccagagcaggtggtttaggaagctttctagacttccattgtcagatgtctccacgcctagaagatggt

SEQ ID NO: 917325 - DNA, 4001 bp, Homo sapiens
tgaaatcatgtggactgaagagacgaaaataacttctattatttgttcactcactgcttttctcatacagctgatattcacaagctcatactgttatctgttctttcctgggagattggatcaaagttgcatagattctagcggactaaatatttgtgaaattaattttgccaattctcatgactctaagaactcttttacaccttccaaagaagtttcataaagtccttgcttctgcctgcaaactgtcccagttgccccattctggcctgagcagtgcagccttaatcccagagggcctgcgctaccgttactgggccttcatgctcccctcccttggctctggttttgctcttccatagggagcacaaagtgtactctccataatgaggctgagctgtttacgtgctagaactcccatttagaacactggaaaaagccaacattatatctttggccaactatttaaccttatttctttagctattaaattgaaataataaccatatgttttaaaaagcttttaaacccagagctaaagactctgtattaaaaactggacttacggccgggcacggtggctcacgcctgtaatcccagcactttggggaggctgaggaaggcagatcacttgaggtcagaagttcaagaccagcctggccgacatggtgaaaccccatctctactaaaaatacaaaaaaactagccgggcctggtggcgtgagcctgtattcccagctacttgggaggctgaggcaggagaatcacttgaacccgggaagcagaggttgcaatgagctgagatcgtgcaccgcactccagcctaagcatccagcctaggcaacagggtgagactctcaaaaaaaatttttttttaacttattctcctatgttaatcctatgttagtcttcttccagaactctagtgatgggatcactacccatccacaacctccagtcacctccaagacacctttgacgcctccactttcccagtcaacccaacaccaagcctcatcgacttcatttcctaaaccccactcgaatccatccagtcctctccgtatccactgtcaccaccgtcagtttaaaacatcgaccacctcgtttggattcctgccagtctcctaactcggcttgagccctggcaaccagttcccactgcactgcggtcactacacccaggaccttcctcaccttaaataaaactgccccgagattaaagatctacaccttcgccaggccaaaaggcccttcccacctctccagtttcttctttatgcctaggccacactggccattcggtttttgaaatacagtactctcgtccttggtttaggaaacgccagatccttagcgcattcttctgattaccttccaaactaagccagttctcccatccctcccccaatttactgagcttaacactgaatgcttctacagtccagttgacctttcctttaaaacattcattacaattacagttttgtgatgatcttagcactgctgttctccatcactagaccgtaaactctacgaagcaggaacaaaatggacttattcgttactgtgttgtgcctgacagaatgaatagtagtcgattttcagattcttctctccatcctctacttttctaagacttaggcctttcacaacacgtacttgaaactgagacttctcagtaagagaacttcgtttacttggttcaagtcttaagccacggagcccactaaatgacaaatgagaaaaaaaatcccagtcacttcgcgaccttcccccataaggcctcctcccgcaacagcaggcagcaagaacaacgcatttgtccagcatgtcctgcgcaggcgcccttcgcctggctcgctctgccccacctgtgccaggcagtaagccgcaagagcacttccgggagcccccgacccggttgttggtaagtcggcggcgacgcccacctgcagaacgggaccggcggagcgccagggctagagacgggacgtagcgacgtactgcgtgcgtgcgtgcgcacaaacgagggcgcgcatgtcgggacggaactagaaaagctcagtggggctggcggcaactctaggtctaacatccctcggaagttcgtgcagcggcctcgctgaaaatggctttacagcccggcagaaccctccgactccgcagcaggacctgcggagcctctccgccctcggtaccggcgggacggggtagccctgaccttccgggtgcctcctccacaggggcgccccctaaggccacgccctcccgatgccggtccgcgcaccgctccgcacgcctcatatttagcattacctgtgctggggcaagcgattgacatactgtagcggacgcaagtacagcggatctgcggcgagtccccttcgctctccgtagtgggcggggcttcaccccgcgtcctttaaaggaaaggtgatgggcggagccacgtttttctactgttgggattcagttccgccgacagaaaatgcggagaacgcggaggaagtccctgaggggaaattgctgctcacctggctcccgctgctccgcaggtgcggtgaaggctaatgtcgaatttctgcagcaatcggagcagcccttactccagttacattaacaccaatctcggtctcccactagggctttataaattgctttcataaacgtctttttaatgtaacactgaataaaatgttttataagcgtcttttataaggatcgtaagtgaaagggcgctgtctccgatttgcaggtgagcagacagcttcggagtgagaacggctccccgcgggtccccggtggcgcgcggctcccggaggcaaaacaaagctggggccggggcgtcggagcctccgcgttgtagttgggagaggttcgaacggggccccagctggcgaaagggaaaacggacccggacccggacccgtggagcctgctcgaaagccgggtgctgggggtctgggccccgtgtcccccctctttttcttcttcaataagaaattcctcaagggcagactgcgagtccacagtcgtgaagccacctaatctggcttcatacctggaatgtttggattcctggtacgaagaaaaactaacatttattggctacttgtccactggaaggcgttgtcttatttctcattaactccttgagtcagcattacgtcttttattacagatgacacaactactaaagctttaaatagttctttgggagcaaagacgaaatctccatttcctttttagctgctggtagctcgacgctcactgttaaaatagggaggtaatgaaacaactcttgtgtgagaccgaaagtccaggtgtgcatcttggccatttccaagttaatcaagaagaattaaggattcattttattctatcaaaattatttctcaatgccaagatattttgtgtgacgtagattcggggacagactgagtagcacaatacctgggaaaagttaggtgctcagcaattataattgcccacatttgtgattgcttttgcctatgtgccagacactgttctacgcactgaacatatctcaagttattcaatcttcaggacaaccttatgagccaattattattattacccattttacagatgagggaactgaaacaaatttgcccaaggtcgcacaactagtagcagaatcaagaataaaaaagccaaaaaaccccaaacccaggcaaactttaaatgttccttgcattgctagactgaagtagtgagagaaacagtaaacagtacgagtccatgaaaacattaaaaggatgtgaagtatgtacaagtaactgaaacatttaatgcccaaactaaagacttaaaatttgctaaggtaatagcacaggtagattcacaccaagtaatcactggtaactgaagctaccggccagcatccatttgcagtccgtctttgaaggcagctgtgtccagagcaggtggtttaggaagctttctagacttccattgtcagatgtctccacgcctag

SEQ ID NO: 917326 - DNA, 4001 bp, Homo sapiens
actcccatttagaacactggaaaaagccaacattatatctttggccaactatttaaccttatttctttagctattaaattgaaataataaccatatgttttaaaaagcttttaaacccagagctaaagactctgtattaaaaactggacttacggccgggcacggtggctcacgcctgtaatcccagcactttggggaggctgaggaaggcagatcacttgaggtcagaagttcaagaccagcctggccgacatggtgaaaccccatctctactaaaaatacaaaaaaactagccgggcctggtggcgtgagcctgtattcccagctacttgggaggctgaggcaggagaatcacttgaacccgggaagcagaggttgcaatgagctgagatcgtgcaccgcactccagcctaagcatccagcctaggcaacagggtgagactctcaaaaaaaatttttttttaacttattctcctatgttaatcctatgttagtcttcttccagaactctagtgatgggatcactacccatccacaacctccagtcacctccaagacacctttgacgcctccactttcccagtcaacccaacaccaagcctcatcgacttcatttcctaaaccccactcgaatccatccagtcctctccgtatccactgtcaccaccgtcagtttaaaacatcgaccacctcgtttggattcctgccagtctcctaactcggcttgagccctggcaaccagttcccactgcactgcggtcactacacccaggaccttcctcaccttaaataaaactgccccgagattaaagatctacaccttcgccaggccaaaaggcccttcccacctctccagtttcttctttatgcctaggccacactggccattcggtttttgaaatacagtactctcgtccttggtttaggaaacgccagatccttagcgcattcttctgattaccttccaaactaagccagttctcccatccctcccccaatttactgagcttaacactgaatgcttctacagtccagttgacctttcctttaaaacattcattacaattacagttttgtgatgatcttagcactgctgttctccatcactagaccgtaaactctacgaagcaggaacaaaatggacttattcgttactgtgttgtgcctgacagaatgaatagtagtcgattttcagattcttctctccatcctctacttttctaagacttaggcctttcacaacacgtacttgaaactgagacttctcagtaagagaacttcgtttacttggttcaagtcttaagccacggagcccactaaatgacaaatgagaaaaaaaatcccagtcacttcgcgaccttcccccataaggcctcctcccgcaacagcaggcagcaagaacaacgcatttgtccagcatgtcctgcgcaggcgcccttcgcctggctcgctctgccccacctgtgccaggcagtaagccgcaagagcacttccgggagcccccgacccggttgttggtaagtcggcggcgacgcccacctgcagaacgggaccggcggagcgccagggctagagacgggacgtagcgacgtactgcgtgcgtgcgtgcgcacaaacgagggcgcgcatgtcgggacggaactagaaaagctcagtggggctggcggcaactctaggtctaacatccctcggaagttcgtgcagcggcctcgctgaaaatggctttacagcccggcagaaccctccgactccgcagcaggacctgcggagcctctccgccctcggtaccggcgggacggggtagccctgaccttccgggtgcctcctccacaggggcgccccctaaggccacgccctcccgatgccggtccgcgcaccgctccgcacgcctcatatttagcattacctgtgctggggcaagcgattgacatactgtagcggacgcaagtacagcggatctgcggcgagtccccttcgctctccgtagtgggcggggcttcaccccgcgtcctttaaaggaaaggtgatgggcggagccacgtttttctactgttgggattcagttccgccgacagaaaatgcggagaacgcggaggaagtccctgaggggaaattgctgctcacctggctcccgctgctccgcaggtgcggtgaaggctaatgtcgaatttctgcagcaatcggagcagcccttactccagttacattaacaccaatctcggtctcccactagggctttataaattgctttcataaacgtctttttaatgtaacactgaataaaatgttttataagcgtcttttataaggatcgtaagtgaaagggcgctgtctccgatttgcaggtgagcagacagcttcggagtgagaacggctccccgcgggtccccggtggcgcgcggctcccggaggcaaaacaaagctggggccggggcgtcggagcctccgcgttgtagttgggagaggttcgaacggggccccagctggcgaaagggaaaacggacccggacccggacccgtggagcctgctcgaaagccgggtgctgggggtctgggccccgtgtcccccctctttttcttcttcaataagaaattcctcaagggcagactgcgagtccacagtcgtgaagccacctaatctggcttcatacctggaatgtttggattcctggtacgaagaaaaactaacatttattggctacttgtccactggaaggcgttgtcttatttctcattaactccttgagtcagcattacgtcttttattacagatgacacaactactaaagctttaaatagttctttgggagcaaagacgaaatctccatttcctttttagctgctggtagctcgacgctcactgttaaaatagggaggtaatgaaacaactcttgtgtgagaccgaaagtccaggtgtgcatcttggccatttccaagttaatcaagaagaattaaggattcattttattctatcaaaattatttctcaatgccaagatattttgtgtgacgtagattcggggacagactgagtagcacaatacctgggaaaagttaggtgctcagcaattataattgcccacatttgtgattgcttttgcctatgtgccagacactgttctacgcactgaacatatctcaagttattcaatcttcaggacaaccttatgagccaattattattattacccattttacagatgagggaactgaaacaaatttgcccaaggtcgcacaactagtagcagaatcaagaataaaaaagccaaaaaaccccaaacccaggcaaactttaaatgttccttgcattgctagactgaagtagtgagagaaacagtaaacagtacgagtccatgaaaacattaaaaggatgtgaagtatgtacaagtaactgaaacatttaatgcccaaactaaagacttaaaatttgctaaggtaatagcacaggtagattcacaccaagtaatcactggtaactgaagctaccggccagcatccatttgcagtccgtctttgaaggcagctgtgtccagagcaggtggtttaggaagctttctagacttccattgtcagatgtctccacgcctagaagatggtgctttagtgttcctgggaggagacatgcagagatggggtggcaattacagacatgcccacagatggagagaagccatttttttcatcttttcccttgaactcttctttgacctccagccgaaatggagcttggcagcttttgtggggttttttgtttttttgttttgttttgttttgttttgtttttggagatggagtctctctgtgtcgcccaggctggagtgcagtggcgcgatctcggctcactgcaacctccacctcgcgggttcaagcgattctcctgcctcagcctcccgagtagctgggattataggcgcgtgccactgggtcgggctaatttttgtatttttagtagagacggggtttcaccatattggccagtctgatctcgaactcctgacctca

SEQ ID NO: 917327 - DNA, 4001 bp, Homo sapiens
ctctattgcccaggctggagtgcactggtgccatcttggctcactgcaatctccacttccccggttgaagcaattctcctgcctcagcctctgagtagctgggattacaggcgcctgccaccatgcccggctaatttttgtatttttagtagatatggggttttgccaggttgtccaggctggtctcgaactccttacctcaagtgatccgcccacctcggcctcccacagtgctgggattacaggcgtgagccaccgtgcccagccttttaccggttttcgattgtgtgctatgcaccgtagaaagcatatgaaaaatagaggagcttcgaactgatgcagaaggaagtcacgtgcacttagctactacataatacatatctggaaccaatacaagaacctgatccaatgtccactctagtcctcttttcctctgtgcaccttctacgagtttggttatagacttaagcacccttccattttcaaaatttaagtacccacaacttgaattctcaagttattttatctttcttctcttaaaaaaaaatgttaaggggttagttttcagaatcttcaattttactagatacggtatgcacaatgttaaagacaagctccaataaaaatttatgtatacctttaaaaggtttgtgaaacatttaaaaaatttttaaaaacacaaattcttcttggaacaatgaagataacgaacatctgtggttccctaaatgagccgtaattttaagatgggcagcaactaaagggcttcagctttgccaaaacgtcaagaggctgccttgcagtgggctcgcagtgattttaaaatgttattcttctcgtctcgatttatgtttttctccctctcaaagttaaacttaaatgtcgttggaaacgtaatttggtaacattctgatgtcatttccttccgtttttaaatttgtaacgaaataaaaatatttgttcgttctcaaaatgaaggtcttccacacacaaaaattaagcatggagtgcaataaggtcaatcgaataaagctgcatccgaccttttaaaatatggaataacatttttcccttctccagaactcttgactactgacacaggacaatgcctgaagtatgaagcacagacacggaaacaccggatgcgaaagactggagaccgagacagcaaagggaggtggagcggagtgctgatctcggttcctccaaaactcgtactgtgaatctgtgacacgggacaatgaaatgtgagcaaggacaagcttacacagcatcataatgttaatttgaagacggttttccggttgatgaggcaacgaaaggctgaaagactccaaagttaaaggagccccaattttgcccgagaaaacgtagagctaggagggcggtgaccagttttcccagacttatctctacgcactccaagatgctgaaagtgggacccctgctcctgtaggtacaggaggcctctgcaccccgcttggcccaagctaaccctgccctcccagaccaggcctggccagaccctcccgccccgggccgggtctccgccgggccggctcccagccccagtcaggccagcagagccttcgtctcctcctgcctcagccgggtcagagcagggcccctgaagactggcgatcccgcgcccgactaccttggtcgtccggatatgctccatcgcaaggagacgtcagccggcagccggtctcacaggcgtaccatacggctacagaaacagggcggtgacagcgacagagagcaagcgggaactccctccaccagccagcgccgcgggtctgtctgccggccccggtggcgtcaacggcgcaggtgcagccggtgagcgccgtctcctagaaacacttccccaaaccccgcggcctcccgggggactcggggcaggcagacagagcgtgtgtggaccgagagcggcttgctggttcgtcccggacagcggcggatcccacagcgccccctgctggaggaggccggtactgctcaccaccccacccgaggcggtctttgtcatcccgccgagcggacgcgcggggcggtcggggaggaagactgcgtgagaatggatcccgagtaaagggttcttgtggggtgagggcaagagtggaggatgttctgaagtccatcgccataccactggacagcaccaaatttagtttgagctgcagttctactcataagaatgtattctaaggaaataatcagatttggagttattattctaaggaaataaccaaataaggaaaccagccttatttgaaacaatcaactctccaatcctacggattccttatgtaaagtatgatgattagctagtcctcaatctggtctggtgtcagagtcccgcctcctacctcaatttcatacgatgttagcaccagcatccattaaaactcatcctgtagagggatatcacataacgaaaatgttaatgctgcattactgagtgaagaaaaaactgactatggaacaataagttcaatgtagccgtgctctgtaatttttatttatgtaaacaaaaagtttacatttctaggtgagggttacaggtaatttttgttagaacacgtctaatgtggtacttctcagcctggagtgagttttctccccgggggacatttggtaacatctggagatatttttggttgtctcaaatggtggtggtgggggggtggcggcggggggcaactggtgggtggaggccaagtcacaagtcggctgctgaacaccctactaggcaccagaccaaccccccaactacagggaattatccggcagatgacaacagtgcagaggttgagaaaccctgctctatgccaggcgcggtggttcacgcctgtaatcccagaactttgggaggctgaggcgggcggatcacttgaggtcaggagttagagtccgagaaactctgctctacgttttgtaagtattctgtactaagccggttaaggtttgtaatcttcatctttcatactgtgattggtgttagaaaagcctaacatctaaattttcttttataattaaaaattttgtttcacttatttgtttcattttgttcaagttgtcttggtttgttttgttttgagtgcctacgatgtttcagacagattgccaaagcaatggagatggttattaaacacaacagcctttgcggtggagttgctgactcctctaagctaaatatgtaataagagttacattaaaccacctagaaaccaaccttagtacagtatcacatccaccccctccccccgaaaaaaaaccccacaaatcctgctcagaaaaaaaaaaaaatatatatatatatatatatacacatatatatatatatatatatacatatatatatatatacacatatatatatatatagagagagagaaaagtaatgtaggtctttactgaggattgctttttgagaaaacagaaagaggtgaattgtatagcatacagcaagactttcttaacaaaactttttatatcattttcctcccaatttacaacttcctccttccccattcccctacagattatcctccctcttctcatctcctcacttcctgtgtcctctctttaccaattctcacagagaggcaatcataatgatgtcaggtgaccaaatgtactgagtgctttacgggtattctgaggaaaatgctattgctttctttattttagagatgagacaagcgagacacaatgaagtgaagtaacttgcccaatatcacatagcagataaagccaagatccatgttataaagccagacaggctgacttcagagtctgtattcttaacaactgttttacattgatttgcttctcaaaatccatattaaagttctatttatgttaatatgataggctagaaaattacctagctttacagaaagaaagtaaaataacagataaaatattaaatgacgtttctttgactcttgagttgaatactcttgcactagatagaatattccttatggttaaat

SEQ ID NO: 917328 - DNA, 4001 bp, Homo sapiens
catacaaacttaaggcggttcataaagtcattttctaaagtttgaagaaaatattattatcttgtataattctttaactttaaggatctagatatccaaggaagtcaagtaacttaatcacgactattcagtcggctggatggagacagagctggtattagaatgtaagttgcctgttcaggactcagtaattttcactctcaattgtgcaatcacttttcaaaaatgcttcccgtttagctgagatcctaaaggaagaaaagttcaagtattaatagaccaagaaagtagggctggtgaaaagctctacagttatattaaatggtgacaattatattaagcaagaaaggcaaggaacaaaatagaatctcaattacatttaaaaaatattctacaatataaggtatacatgtaaaaaaaaaaaagcacatagagtattttttaaaaagaaagttaaataagaaacataccaaaatgtgccgagcacagtggctcacgcctgtaatcctaccactttgggaggccgaggcgggcagatcatctgaggtcaggagttcgagaccagcctggccaacatgggaaaaccccatctctactaaaaataccaaaaaaattagctgagcgtgatggcacacacctgtagtcctagctgctcgggaagctgaggcaggataatcgcttgaacctgggaggcgaaggttgcagtgaactgagatcgcaccactgcaaccagcgtgggcgacaaagcaacacgctgtctcaaaaaaaaaaaaaaaaaaagaaacataccaaaatgttaataaaatgatctctagttgtgagattatgaataccttttgcttgctattttttctacttttcagtgttttccaagtttcttgcacatgtagcatggaatactttcctaatcataaaaaaagattagtttaaaaaattacaggttaggtgaaattggctgtgtacaataattttctgttctcctcccctccaacagagataatcaagagctaacaaaagtacacaatggtcttactgagtaagaaagggagaatataaagtgttctaagaaaactctaaggttcaaagttgaaataagggtcaagccacgcacagtagcatgcacctattgtcccagctacccaggagactgaggcaggaggatcacttgagccaaggagttcaaggccagcctgggcaacacagtgagactcaactcaaaaaaagaaggatcaacatttatcaaaatcaaactttactgtctccagtgatcctactatgctaggaggtgcattgatatattagctcatttgttcactataagtctgttaacttagcattatcacctaggaaataaaatagtcagaatggtctttaaaatattcagtttccagagttctactgatagattttaggatactgcatcacattattaaaagaactgttgaagaaagcaccaatggccagctgtcacaaacgttacactccaccacccccgtatttcaagcacgttagagaaagtgtatccatttgctaacagacagaataaaaggatgacaaatatatgtttgtacgaatacttattgctaaaatttccattttaggaacagtagtagaatgcataattttcaaggtcatgaatctcaacattaaggaaaacaaaacaaaacaagatgtttactctccaaggttaactacacctgagaacagcacgacttctccattacccatcacagtaacagtattactctgatgctttggggaaagttctgagtgtaggcaggtcagaagcgacagcccgcggggcagcagcacgggcaaaccatgctgtgtaactcagtatatggagtgattccataaagaggcaatacaggaggcggcggggaagatcaggaaagaactgtgagtacctaagaaaaagaagaatacacgttagctctctttactgaggtcggaaccttccgagacccgccacatttcagcccgacaaacccgagatcacgttcacttcctggttcacttcttccgggttaacgcacgctcccggcccctcctccgccactaccgctctccggaggagttgtcctcgagcatgcctaacaatggactaaaatgacaaaaatgagctaaatgagaaaaatgacaaaacgagaatgaaattgtcatcagacaaccgcccccgcgccgtccttatccagagcgtgagcccagagcggggatggagatggtgggagggagggagggagggaggggccaaggtgggactaaactacaactcccagagcgcccaccaaagaatcctgggagttgtagtttaccttgcggcagcctccaaccccctccactcactatccagccaaatgtggagtttttggttttcaccgttaactgcaaacctagaagagagattctttacgattctgattaagagatcaagatttagaacacattgcatgtgaaattacaataatttccttatgtattagaagcccgtaaagcactgttttccaatatttaaaaaaaataaagactccttttacatcatccacaaatgtagaagattctgcgtgtaatttctatactttcagcttccattgcttcagaaaatacctaatgactaaaggataatacaaataaatttatattttaaaagtagtaacagccccaaaagttaggagaccgtgtatttccacatgttagtgattttataatgttctttgcacatgggaatgtaggggctcaacctagattcatagcttatgaaccactgattaagtgaagaatgaaaactccagttaataaacaattgcaggaaaatgcaagcatattgtcctactttgactaatccagtgggatccagcccttggctatcgcaatttacagtctttctatctccatgcctcaatttttcttcctgaaagaaaaggcaaaaaatgtaccatattactgactttacagagtattttcttagattataatcacatacatagataggagaattagctatatatgcaaaataatatctaacgtttatagccaacttcaaggtacctacttctatgtactatgtactaaatactgttctaaatggttttaccctattaattcatttaatttttacaaccttaaaatacttattttgcagaggagaaaattaaggcacacagagctaaagtaactactccaaggtaaaaaacagtaagtgatagagccaagactcaattaaggcaatggctttaatgatctgtggctcctaagctctgatatagggccaccctgctccaaaaaagaaaaaaccttcaatcatgtattcaataaatagtgaacaccagttatgtgctattcactattctagtcatgaggatttagcaatgaacagaaaagacaaaaacctttgcccacatggagcttatgttccagtaggggaaaagtttcaaagggtctacataaagtcattctcctaagttatccaaaaagttctttaattatttattctgatttgtgctttcagctatataacttgagtattatatataaagctttattctccttaaaaaattagtcttagtcgggcgtggtggttcacgcctgtaatcctagcactttgggaggccgagccaggtggatcacctgaggtcaggagttcgaaaccagcctgaccaacatggagaaaccccatctctactaaaaatacaaaattagctgggcgtggtggctcatgcttgtaatcctagctactcggaggctgaggcaggagaatcgcttgaacccaggagacagaggtggcagtgagccaagattgcaccattgcactccagcctgggcaacaagagtgaaactccgtctcaaaaaaaaaaaaaagtagtcttactgctatggactgaattgtttatattcataatcatgtgcatattactaatatttatttttaaaattcatatattgaagccctaacccctccaatacatgtgtctgtattggagatagggcctttaaggtgatta

SEQ ID NO: 917329 - DNA, 4001 bp, Homo sapiens
ttgggcttgggcataatgatgggcttagtttctgtcctctcctctgttttttcaacctgatagttctccattccctcctgcgaggaaggtgtgtccttggaatgtgtgaagacaggcttggggatcccactggggcaagtgttcttgtcaggcactttgggggacgtgttcaacaagcgtgcactatcagtagggggtggaactaccaagggggaccccgcatccataccgaacacgctaacatcctgaaaactgctactgggtgttgtaggctggtaggtcatgttcacagttgtctctgggtggaggggtgctggaatattgagaactgaatctgctcttgctgaggtgctttcaatcttatctgcattctctagaaggttcctgttttcagcaacagatgtggtgacctctttgctttcccgtgcttctgagcggccactttgagggtccaggggctcaggcacctccgtcttgttctctccaacagaaggattgaacaccaaaaccataacactgtccttattcccactgcccaaccgcctttcctcctcaatgacatccaagggcttgctgtcagtcagattattaggaataaaagccacatgactgtcacctggtgaaaagctgctggatgtcctttcacccaacttctcacctgcacatggtgaaattttgccagtgggctgattatcagcccctcctaaggaagcagagccctgtttgggggtggtgtggagagaatcctgctcccctgggttgactcctctcttctcttcacagttgcctcttcccaccccaaggtggtggaggtcactgttcagcagatggccaagtgcatcggtggcttccgggtgtgcttccccacatggatcccttccctccaaggctgacagattctcttccttgtggcatcccagatacccttcctgggctgcctttccctcctgttcaactctcctgggaggaacatatttcagatccagcttggcctctccctttccctgacctaattgtgcttccagtttacttgggatttccttcgatgccaaagtcaaattcagagcaggctctggatgggcggaatgtgatgtgtgctcactgcacacctgcagtacatgtgcccccactgtttgggtctctgagggagtgctctgcttgctttctgaggtagatggtttaggatgacgcacactctttccctctgaggtactgtcagttgcagggaaagctgccgggacagcgtggtctggcaatgtcttctgtggcccctccccacccccaggtatctgaccccgtgcttcccgggagtcgagggatagaggctgtggatgctgcggagtcaggctcccgactgcagctacagagctgcttgctctttccaaagaatgcctcctcagttcctcattgtcaagggtctttgccagtttatccttgggaacatgccggggaatttcagcatcccttttagccaaaacgtctagactggcctcactcatcacattcctccaactcgacagacttggtccctgaatactccgcgtggtctgcaggctatctgtgcctctctccactgtgtgctcttcattgagttccctctgaatggttgaagaaagtctaaaatctttcaggctggcagagccagcctgagagcctttcccaaagccctgaagttggtgaaattccttatggaaatgggtacggttttctggctcacttgaatttgtatttccaatttcatctcccaggtcacatgtcttggactcgtcatgagaggagctgacctccaacatgatttgattggcattcgtatctcccagacttaagatgctttcattattatttcttgctgcatttctgttgtcccgcaactgagtgtaacatgatttcttaggagccactgggacgctcattgtcaaccctttggtggggctgcttgccatgcagtcctacttaatggaaatgggctgccttcaagctgcaatcagattaagaggaaattctcaagctgcttgttctcccctgacaatgtcaccttgcgacactgctttaatcattctcagaacagcttgaaaaccaagcattgtcttgatatacagcaggaagacttatctgttaggttcctgctgaatgagagccaatcagtccatgagacctagagagaaataaaaatatattcacattagattgacaaatagaacttctcaggagaaaaaagtggtaaacacagatttatttgtcatttctatattattatttcattcaatcaatagttttctcaaaaaacctttctgatcagggctcctcctggccaaatacaaaaattaaacatcaaaatgtttaatgttagaaatggattataaatgcatgtgagatcttaaatctaaattttaaacatccacaagtctatactgatactgatttaaaaggatggaggagaagtaagggctcttctttacagaagaatatcaacgaatgtagaaaaaaattatagaatttgaaaaatcactattttgcaatcgctacattcataattatcttacacaagggatgccaaaggtacaaacattgggtaaaagattgttggggaacaagatattcatagatgcttaaagtatcttcccccaggctacttcatttcttacaaaacgaaaattttatctttacaatggagagatctggtagacaccacattaaccacgtgatcaaatttaacatcactagtaatgaaactgacattacggactcctgatattagttagttctcagggccacacatcacctatgcagtagttaatgttcaaccagaatttaaccatgagacaataatctggcaaatttaaattgaggtatgtattgcaaaataactggcctaactggtcccaaaaaatgtcagcggagcctggattttcaaaacatgttagcaaaggatattattaggacaattagagatttaaatatggactgtatataaggtacaggtattttataattaattttcttgggtgtgtaatcgtgctataattatgccagagattaatttggttcttgaaatatacatgctttagaattcagaggtagtatgtcatgatttttctaacttattctcaaatgattcgaccaagaaaaacgtgtatgtatgtgtgtgtgcatatgagaaggagaaagagtaaaagagagaaactggcaaaagtcaaccatttgaaaatctaggtaataattctattacatctgcaacttttctataggtttgaaattttccaaaataaaaacttgggggaaatgctttactctggccttcgaggcctgcatgatcaggccctgaacacctttctggcctcaaccccacctcaccctctgctctgcaggctgcagccacattggcctcattcctcacagtaccatgttcattactctctgcctcagggcctttgcgcatactcttccatctgcatggaatgtggaatcctcccccaacctcatcttacaagtcctttgcatccttcaatatgcaacataactaccacttcctccaggaagcgttcctcactaggtcatcctataatgatggatttgtagtatcctgtattttcactttgaagaattaaaaaaagactttcagatttgctagacactgaaaataaatattgtctaatacctggcatacatattaggcacgtattatgtatttgcagcacaaatgaatgaataaatgtccaaatgaatgatgaggaagatcagcgttatttctgcccccaaagagtttaaaatctacacaggatatgcttttctgttaaagtagactcacagatcaccactaaaccattctattcaaggttgacattgtttcatccactattatgagtgcattttattaggcactggggataggggattttaacagcaacaaggttctgccccgtcaccaattcccccaatggagacttgaagccttccacactttcctcctcattcatcaagaatgtgcaagcacacgtgca

SEQ ID NO: 917330 - DNA, 4001 bp, Homo sapiens
tgtgaaaatatatgtataaaacttcaaatgggaatactattctgaaatatagcaaagaaaagacaagaaatgtaggtgtgaacataatgaaaaagctggtaaaagcagtgtaagttttaaagttttcatcagtaaaaaataatttgtatagaactggaagtttcaaagctaaaacactggaaagttacttaaacatcatactgctaaagagatgaagtaacattaaattatcttccaaaatctctgaattcaagaatgacatagggataatcattttcaagaacttgatttaaaacaaaatagggaaacaatgtaaaacaaaatagggaaacagactcctttcgaaacatactttctcaaaccaaaagtcctccatattacagcctctatttctaaaacttttgcattaggatttagaaatatgaaatttataatactgttttacatgtagcaaatctttcccttttattgtaattattgttgtaagtcttcaatactcttttgtgaccacttcgcaaaaggcttaatcacttcagtgttagatgtgcagacaattgagcgcaaatgctttatatttctttttgttaaaagcacataaatgtgtatataaatattttagttcatactcatggtagcaaagccaaatccactgaagtagttatttctattagagcaaaactagtaagtgacttttaaggtatcagtttaattttcctaggtggtaagtaaccctactttaggtcaaagttcataagcagactggtaactaagatgctcccaagtgaccgctttttgatgagcatgtatattaagccatatattttccttctcctggtcacatacctcaagctatctagatagctgatgtccacatgagtaggaagaaggcaatttcaacaattcaattgtgaaatcccatttcatgcatcttgtagaaatccaaatatgcatgacaataaagtatctcacagagacaagagttcttgccaacagatttctagtaatgaaattaaaagcatatcctaatccctctgctagctcacaagagtaggcaaatgtcaaaagcaaagaaaggctttgtgttggaattgctatataattctcatgcatactctattttcagttccctggctgtgaatttttctcctgtgaagacttgaacacaccctcagactctctctggctttttaagttttcacttctatgtttattcatctctctgtgatgcaaagaagtacagagagaacaactatactgtgtgctttcttctctgatgtgaagaatgtaaattacaagaatgagtgctgttttgaaaaaagagtggtaaactttcaaagttagcacttggcgaagaaaaacatgcctaactaatctaaattccccagtggaacgtcttaggtttcacaggtacattaaaatgcattaagaatattgcaaagatctcttggcagttctgatttcaagatgttggagcagaatcctactatttcaggaaaatgcaacagttacatttgagactgcaggaatacagaattatgtaaggcactgcagagtatgtgagaccaaatgtttctgtgaacaccactcacaattcagcacattggaacgagtaaagggagcctcctgttcaccaacaaagcgcacacgcatgctagggggacaggcaccgaggtggctggctcacggctttctctctgcccttgcaaaggaggagggggaagaagagagagggaaggcaaagtaccgtcttgtccaggcactgaaggcagttataaggcttgcagcagcaatggcccatcccggcaggctggctggcaaggggacctccttcattcaaggtgtcagcgggcaactcctaagccgaggtaccggcacacacgaaaggggcgcgccgctgggagctgtcacaacttccatgtggttcccttggctaccttatttctcctaaacttcaggaatccaggaggcagaggaatgagaggaggaggagagcagggcagcagcgatcagatcttgctgctgcgggagggagggcgggcgggagccaggaagggaggggacaggcaggagggagggtcactttgccactggagtcctcagggtgaggcaaatcaatagtcgcataaccacagagcatttaccaatgccggctccctaaaaggacagcctgctctcctctgggtgcgcggccgctcccagccctcccctggcggggatgcgcctccgcaccgcgcagacacgcctggagcggacgcaggaagcacaaaaggcgagcctgggcttcagggcactgcctggggacgcccgaaagggctgccagggcttggctctgctgcaatcctagctcctatttttctgggaagtaaaaatatttataaacgtgatgtatatggcctctcctcccatgaaactcttctcagaatatttgttgctaatgggaaccgccaatttctcattttctaatttgcatgccatgaacaattttttttgccttctttgatgaaatcttcatatttaaaatataactgtgaagtcgcttgcctaggctgacatacacacaccattcaactggcttgagtaattaaaattggggcttggggcaggtatctctcctaggcaaactggcataaaagccttgaaggacttgatctttctagtttttcacacagttaaaaatcagaaaaggaaagaatcagggagcaaatgtttgtttttgttttctcaaaaaagacttggtatttaaaaatatatttgtgtaatcctgaaagtaaaagaagcaaatatttacatgattgattttatatgccctgatacccctcagaggagaaatcttgaaatttctcatgtttagaaatacacaattacagttttgcccactaaattgcctaaggctgtaaacagacaatagttgttagaactagatgattttactaacttaactgagattttccaagcagattttaattaagtagtataggctcagagaaaggcaagtatttagtgatcacataggaacagactggaatgtttgccttaaacttgaaagaataaacggaaacctttctttaaagctaacaggtaaattagcataatccttcaggaaggcgacttggctgtacctatcaaaatattgaatgtacgcacaccttgacccaacatttgcacgtctatgctataataatattcacataaatacacaagcttgtatgcataaggatcttcaattcagcatcgttggtaacagcataaaaatgtggaatattttagattttcaatgcctttctattatatggaaagatgatatacattgttgactgagaaagcaaagttttataaaaaaacaaagcaaacatacacatttgcatatgtttggaataaagctttggaaagattcacacattcatggaatagcagccgacccttaaggaatggaaaacaggagggagtgaatgtccactttttaccctctcgtgagcatgttttatttttactgttttaaaacaaagtgtgccagggaaaaggcagggacccccatctgggctctgtgatgttgtgaggtccagagctccttcctgctcacttgggctaatgctccttggcagtgagcttgggcagacctcagagggaaagaagctcacagtaccttgagctcaaacctgggctgaaagctgttcctagggcttttgaaatctgtgagaaaaactttatgttgcaaaaagtggtggcttagtatacccccacgctcatagcagcattattcacaatagccaaaacgtggaagcaaccagaacatccaccaacagaagaatggataaacaaaatgtggtgtatgcatgcagtggaacattagtcagccttaaaaaggaaggaaattctgacaggtgctacaaaacatgcctaactaatctgacacgtgctacaaaacaagccaaactcatctaaattcgtcttaggatgaatgaaacttgaggatatcatgttaagtgaaataagccagtcac

SEQ ID NO: 917331 - DNA, 4001 bp, Homo sapiens
acacacgtttacatccatatggtaaaactactgctgtgcccaatcctgtaaacaatcacagacatgagaaaactggttaacctagaaaaagtgtgaacaaagctccagctttacaactgtctccaacagataagccatgatacctagtgataagctacaaatacctgacttacagcctcgtccctttcataatgggagaaaaagacacctaacaattgcctaataaattgcacattcaataaataacagtaaactctttaactcattttgacagtttcctactatgttttccccatgtactgcaagaagctgtgggaaaaaaaagatgaagccaactcccaattaccactgtcaaagctggtgaaacaagtcagtcaccaaccttcagggtatgcggcatgtaagggcatggaaaagaaaacaataggagagccctcagcaaaaaaaagcacccacattttaagaaaaagaaaatgaaaccaactgaacatctacatcaaggaagctgaaggtgtagccaacccaagtaaaagagacaaatctacgcgctattcagattttctagctagtggcagttgaacgctgtaccagctgtcatattctgaagttctgcagttttccccttttccctacaaaaccctctctactctaaagcctgtaagtaacagaggaaatcgaacagaggatgaagagaaatggccgatgggacatcagatcacaagagtaactgcaacctcatttctagaagaccaaaaggcccggttatcaaagtacagctctaaaaatctctatcagacacctttcgcatccacacagatctccatctgcgtcccttattcataaatctttttaaagcaaacctcacgcctatccctcgggcctgcttatccaaaactcaaccaatctataccatgactcctcttggtgaaaggcagattgaagggaggtggaaagggctggaaggaatgtcatgggagaggcggcacgtgcaaataacattgcggcagagacactgaaaacgccacttcccttgccactgttgcaattctcttcgtgtatcatcctcttaccctctctacccatgccacctcctacctcaacgatacacacacgtgtcacagccgaccagcaccatcgccttttccagcatcacaggttcccctaccacccctcactatccccccacataggcaggcagacacacacacacacacacacacacacacacacacacacacacacgagaaactgcagccaccgcaccctcctatctcgataagtgctcctgccaacagacatccagagcggactgaaagctcaataaatgcgcaggtacacacacgcaagcacacacacacgcgggtgcacgcgcggcatggggcgcaaggaagggcggcatggggcgcaaggaagggcaccctggggacgcacctggaggctgggtgtccagcgctgccgcccccctggtccctgtcattgagcgcagcggtataaatcctccggtagcggtcggccagggcccggcctgacagcagcagctggtagtgaccccgggagtccgcggcgggtagccccagccccagccccgcagcagccacggagccgtcgggaaccggcatgaacagcgcccccggcgccggggaggaagagaaggtggcggctgggtagaatccgtccccgccgagccccgaggaggcggcggcgggggaggcagtcgctgcgcacatcatcatcctcgccgccgccgccgccgccgccgcctcgtccccgcgggccgggcgggcagacacgcgcgcgcacacacagcccttttccaacgacgacggctccggcggcggcctctggctcccgcagcagggagactacaaagacagcgacctccttctcctcctccttcttctcctcctcccccccgcgccgccctcgccgctactggggccgctcatctaaccccgccaccccgggaatgtgaggaggaggcggtgccgccactgccgccgccaccaccgctaccaccgccaccaccgccggggctacccgcaatgggaagctgccggcctcacagagcatgcgccactcctcgcacatgctcagtaactgccgccccttttcctccccaccccctctccgccaccactccctccgcctcggggctttgggtttggggctgttgggttgtgcggaatctgaagtagtccacttctccgggttttactggcagcttgaagaagagtaaggaaagtgctggggaggctgtcagctactgacgttcgacttcaggttccctccaggtggaagaacgaggaccagaaagcaagggggaacgtgcccatcgccagaggaggagtggcacgctcttctgctacctcttctccaaggctctgctgccaacaggaagatttactgtgaattgtgctggttaattcagagtttaaggcagagaaaaccatcccaattagaagtgcctttagcgatcttattttatatggtttttgtcattaggatttacgcttgtttaacacagcttttacttacaaagacaggtagtaatctagcacattcttttttgtgtgtgaaagtattttgtgtgtgaaagtataacagataggctagtattcacaagccagagtcattcccaaattcttgttctcaacggagcaataatattttttaaattactcttttttattgactcctcactcacctaagagtgcacttttatctcttggcagtggtcatttaatggtttatttttttctgcccaaacttacatttttaaagataattcttgaatgcgatctgaaacaataattgtgacggagactgtatagcgtctgaaaatgtcagatccatcacatatcttgttgttgtctataaaaaagtaacatttgctcagtcctttgttccaagctaacctacgaaccccatctaagtatatgctctagaaatatacgtgccaatgcactttgattcctactacgttttatcctttgactctcaatttgaagagtttcctaatttacagtcctgacaaaataatttataagttctgtcatcccagtactgtatctttcatctatgtactagttcttatatctgtgcctcttcttcggatggccttctcttaaaaaaaaataaaataaatgttaaaaaatcctccttagtgtttgagaagtgcaaacaacaaggaataggaaagtaaattaattctagttttagggtggaaggttgctgaaagcaatgcatttttttctgaagctttaaataatggatggatttcatttagtttttttaaagataattagcagtgggataaacataggaacaaaggacaagacatgtggaatcatagtattttagtactgtaattagccctgttaagtttttgtatttgtcttgtttccttacctaagttccttcagagcttgctgcttttgtgtctccttcagccacttcaggactttgcatgtagtaggtatccagtaagtatttattagactaaatttctatcctaatgcttcagcacagttaaagacctcagtgttgaccaggcagcccctaaccctggagtgagaaccaagacaatggtgtagaggcagctaaattctaagaattctaaggcctgacaggtaagcaatgagagggcccattactattgcaagacctagcagggtagctaaaaggctctgaaatcagacagccctggaattggatcctgactctgctacttaatacttgtctggctttgggcaaattatctcctctgaataatgctcaaaagaatacccactacatgagattgagggaggacttaaaggatctaggatgtccaacttggcacatgaattttcacaaatggtagcacatactaaacaaaacactaggttttccgtagggtagcaatggtgtctgttcaaccatcacaggctcctagcacagggtctagccctgaacaggagggaaatagatgttggctgaatgaatgaatgttgcttgcacag

SEQ ID NO: 917332 - DNA, 4001 bp, Homo sapiens
cagagtttttcctctgcagaggcacagcaaggaaaataatgacattctgctagtgcagtaaaacacgagaggcaatacaaaaaccagtcagagtattgccctgtgtctatttctccaagaaaataaccccaagagttaacagattaaagcagaagactattctcaaaattcttaaatacgctgcatgcctctaattcttattagttaaagagctaatctgcaaacttacgagatgaccagtgaatccttttgggaattgaaattgttctgcaacatgaaagcatgacattcttggcaatgcttaagagtaaggcatttttatttccattaatcatagttttaattcctgtatacattctctaccaaaaataagagaaaggtaaatattttcaccttctcaatcatcattatttttttagtctcctttagtgcaaagctcaagattcattcaacacatgtgttcccttaatatgctgcttcaatttaacattgtgatgtcctttggcagcaaaaccttaagcttaaaagaaaaccattttctgcaaatgtcatctgtcactttaagatcatgatatatatgtacagaagttttcagaagtgctgcaggggacaaaaatgtatatccagcaagccatttttggataaatatgtcttcctcttcattattaccatccagaattggtttagatggaagtattctctagctcagaaaattctgccaaaatttcagacgctaaagaaacccttgataagcccaaaagagaacctggtgacaaactaaatttcaccatatgaacatcagtggagagcatttggtacagagtccctggagtccctaagcaccgcaaggtgaatgatacaaggacaaaagtttacagtcaaggataaccctaaagatcacacttacaaaaagcattgaatagaggcttaagcagtaaaacttgagactaaaatactagctaaatgacctcagccatatattaataaacttagtttttatgtactttattaacatgtgccaatgagcaaaaatatgcttttgtaatttctttccatgtgtttctggtgtttttttttttttctggttgctgtgtctatgaatcattttttttaaaaagctgaagttttaaagatctctgtgctattagcatttggatcacactggaattatttcacaatctaaaattaaaaggaaatatatccagcctgtaaaatattcttctaagtcaccagtctatgtcactcatctgaatgtggtataccaggagaactgccttaattttggcatctgcacaaaataatacttcaacaagacaaataaccacatgagcaagatatcaagcttacttacagcacttgataaaatgatagtgagacatctttccatctcagacaggaatcttgctacgggttccagcattctcttctgtcacaactgtcgttcccaggaaatgcattacttaaagcccttactcaggtaacagtttacctcaggatgcactattgcatggaggctctgttccatgatcctgcaaaaagcttcaaactcattctcattcggcagctggagttaagataagcctctccccggtgggtcttgaggcaccactggtgcacgtgctattgtagcacccttgattgacacagccccgagtaccacaatcccgggaatagtcagctctaattggtgttcacatgcagccacattctgctgcacggaggtgtgctgcagtgcggctctcccggtcctgcctgttaatggcttttcaatagctttcaaatggcagcaaactaagctgatgagtgggctggagagaagccacggatagaaggatcctaaatcttcttcgtgcacactgtccatcagccacatatgaccagattcttagctggtagtaaagcggattatttttagttgccaccagttgctgtgtgtgaataggaaattgatagcaggagcttaaaatagccacctcttagaatcagagatctttgatctgtccttagtaatgaaaaacttgcattatatttcaaaacacatctttctgcttttctgagcagaatgtaaaacttaaattatccacaaaaagcttttggtttgcatagctttaaaatttaggattctcctacctctgcagactgcaatgaatttaactgtacaacccaactggatgaagtaaatctgactgaattggaatcagaaagaaatatatggtctgctagggtttattgttataaaagtgaatatcatactcataatgaaatagccatggtagcaaaccaaaaggttatattttaagttgtttacaaattcaaagtgatacattttttttgcaaattgatacatttttatgatgatcttctccaaagacaagttgacatagtctagaatttatgtttcaggtttgaggttataggaaaggtaaacatgaacaatatgttaagtgcacccatccttctgtggcagtaacataattttgtattccttactgaacaaaactcaaagagcagtgcttttattaaactagaagattatgaaattcaaatctatacaacaaggggtcatgactattacattttcactgaataatattctaacacattttagtagcgtgatgtaaaataataagttgaagatttcgcacagaacagcctgatgtcaaatccagcttctaccacttaccagagtatcaatgtaaacacattatttaacctgctaaagcctcagtttcctcatctatgcatgtgaaatataattcctaatctttattctgaaggttagaaataatgcacataaaatttctggtttctgttgttggtgttcattgaaaagttgtcattaacattaacaaggaaaaaaacttatgtatgtaccaaatgatgattatggacgctttaacttggcttttccaaaaattagaatgaggatttgcagccttcatcaggaatgctgattcctcatttattcgttgattccacaattaattattgagagtcactgtcacaaaagtcaccattttgggtgcttttcaggaataaaatatgtctaaaacagagcctttatataccaggaatctataatgtatttttaaagggtttcttggatgttttgtaatgtttcaataaaactgtaagacacaactatatctgtttccaacacgggaagtaaagctctctcctctttaaatcaatacaaatctttacatgtgcataaaataactgtgaatttatgtgaatgttatctaatgtatcttcgggtaaggttgtatccatgtagatgtccctacccccttctcttaatacaatgccggataaatagtatgttgcctatataccttccttaaatgtctgaatgtcttaattttctgcaaattgcatgcctctgcatgtatacaaactcagcaaacatcttaagacaattgagtttaatgataccattcactctttaaactgaaaaaaagcataacactcagaggggcatgttgtgcacttgacaaagaaaatatgttattaaaaatataattgatttgagccctacttttttcaataacttaaggcatttcttataagaactttaaccaaggtaccccgtgagaattaacatctcatctccaggggctcattatcaaatgtgtttatttttcatcgactcatgtattccataaacatttggcaactctttgtgctataagagaaacttgactccctgacctcaaagtgcttatcgtcagatgaaatagagacaatcaagatagcacagtgttgtgtgctagaaactgtaagactacaaatgtagacctctaaaacaacaagagccaacatctaatccactttgaggagttgaaggaggatacactgagaaatgtattcacagatttcttaaactacttagaatgtgctttctatgtataaactgtatctacatataatttccccagattaagaagcccttttatctttttgtctttgaaaccacatactcatgctctaaacattggtag

SEQ ID NO: 917333 - DNA, 4001 bp, Homo sapiens
aataaacaaatgaaagtaacgctgatattgatctctgccccctttcccacatgtctcactaaagcggctatctccaaggtgctggtgattcaccttttcagtactaatggtattttcagcagtggagcagccgtggatagggaatggtggactactcaaaagcagaattattctaaggcaacttctcacttgcaataagggctggtaaagtaggaaaagttatctttttctattatgtatccctgtttctaaacatacatatagagttacaagattataaataatatgaattggttttccatcttgaaaccatcccacagatatagaagaccttacaatggttatgaaacacaacctaatgttctttaccttgaccatgaccgcatgaaaccaccggtaatcacacacaggcaattttgtatgtttcaagctgatcaaaagcaaaccatggctgactgaaattagaaagtggaggggaacggcagggcaggagagggcaggagaactaccaattgcattttataaaatgagttgagaaatactgtctatagttgatagaacaacaaatataggcttaagggtttttgaagttaccaaggtgactgacaggagaaaaactaaaagttacatgtatatattaaacacaatggggtgataggagatggagagtggtgtaggatgagctgaatccctatccataatagcaggatatcaataagacaacatctaaaaaaaatttcagacttgacatattatttaggaatctggagataaatcctcccaaagctaacataaatagttaaatgttttgctctggggtgcaaaactaggtaagaatagctacagggagattgtaggttttccttatgaaccttcagtatcatttggtttattttcaccatgtgtatttatcactttgctataaatatatatcttaagagagtaacaaaaatgtctaactcatgagtttgttgtaagcatgtagtgaaataacgcatatgaagaactaacatctgagtaaaggaagcattcataaatgatggctgttattttttaacttaaacaatttgtattgatgcataatagatgtatatagtttcagggtacatgtgataatttagtacattcatctaacttttacaaaccaaatcagcgtacttaggatccatcactttaagaatttgtcttttctgtatgctagaaacatttaattatgctcttctgttttgaaatgtacagattgttgtaaccttagtcaccctgctgatctagctaacactaggttttatttcttctatcaaatggtagtgattgtttcgtagaaataaagtgtcaaggctgaaaaattcagacaacctagatacactgtttttaccaaaagtacattatgttttgtgaaaatatgacatatgcaaaacacatcacatattgtaaaaaaaaggtgtcagttttaattgtatgacacataccatacaggcatttaaaatgaatgtgtatgtgctcttgaataagaaaaaatactattttctattatgagcttcaatcttaaattgtacacaagactttgctaaagcatttatacctgaaaaaaatcactttttttgtctgtctttcaaaacttttcaatatttcctcttcactcacgaagactttcagaatttggacttttttttttagctttaattagagttaaaattttaaagagaatgattgaattaggctgagctgaatctagctatcagaaagcagaaacaaaaaccaaagcaaagaaaaatgttttgatactgacatatgcacattttaaagttaaaacaagggaactgaaattcacttgtggaaaatgcagagttaatcctgcatggatttctcctgttcttctaaaaggaagagtgaaccagagctgacccacttaccacaatgtggatgagaggctccaaccagaaggaaaatacaacctttggaaatctctcctctgctttcactgaaagtctccgagcgcagttctggtccacgctcagagtctgacacatccctcccccgtccccacctctcaacacacacagctgatgaggccgattcctgtagatcgacttcaaaaaagaaaaagtcattccagaaaacacatcagctcaggctgactcaaaggcagccccaaattcagcccacagcggttggctgctgtccttttatgactggagagctggagtgcagctctttaattaaaagggaagccttagcctgctcaaggtaaaaaaaaaaaaaaaaaaaaaaggacttaatttctgaatttgcattgaactctgacacgtgcactcctttttttctgtaaaaccactcaaagtagccaccacaatgaacattaaaatccatacaataaaaaaagttaaaggtttacacagaaggactggagttgaagctgggcagacagaagaggaggcgtgaagatcagcagcgttatttattggaaggatcagaggctgcttagggccaagtccttgctttctgtcaaaacactcccagcaggtggagagggggctgactgtctagtgattagagagccaagagggacttgagcatctgcaggggagcgactgcctggggtattagagacctgattaaccttccactaaaagaacggaactaccttcactgcgctagttaatcaatcacttagggatgtaaccttatataatatgcaaaattgtttttgaactttttttttaactcaagagcaagctgtaagtcaggctctttataaaacatatcagagtcagacccttccagccatgtggggtggggagatttgacctgattccattaatccattcaattttgtggaatgaattaaacaagcctactagtactaagacaactggagcaaaactaataaagccaatatgaactgtgaatttccaatctggatattccaggcttctgtgactggtccctgaaagaaatccatatgtatctataaaacaattagagctaatttaagaagagagatgccatgtactcaccacagaagtcaagattttgacattttcactttagagttcagagagtcaaaatacccatgcagtatgtagactgaatgtatttaagaatttaaagtcaggaaaggaataaattcgcttttgatctgtgtgagccagaattcactgtgtcttaacccttcagcaaaagttatccataactgatgataaagaggcaaaaaattattcctctccctcagcctctgtgaatcatatcatcagagaaacttctgtttagaagagtgctgctgaagactggttcacactcatttcccaatgcagagatccaacaaatgtatgactgaatatttctaagaatgtcacatatcaagcaggcaatggtacaagacctgtcattcgctcagcaacactgggctggtgggggctacaagaacagactcagctccaggaattgcaacaaaggatgcaaagaagtgtccctgcatagtgcttccaggatgtctgaaattatccagcaccgaagtgccgcatcaggggaattgaggaattccagtgcaggtcagttgaggccaatcctccagtatatggtttccaaaatatttgttaaaagatggccatgtaataatcacctggctagggaggagagcagctggcaagagctagaataaccagctgggattcaagaaagacttattagggaaagaatgagggaagcaggcattgtgaaggagggaaagagtgccagtgctctccaccacgacctgcgacctgcagggacacctgaggctaaaccaattagggttaccatggctgcaatgagggagaatgcaggcagtgaggcatcgtggggcatctcagcaagagggacttacaggatgtagacttgtgttaggtaattttagagggtgttcaaggaagtgggatattctgtgggttggatgctgtcaggacatggattagttctatgattggcctcatggtaaatcttatctctaaggagtgaggaca

SEQ ID NO: 917334 - DNA, 4001 bp, Homo sapiens
cctaagtacagctaacctaagaaaataggctagaagtgaggtcttatactctacctttttccaaggaaatatacaagacagtaaatttatatttatatacacacacatatatatattcatacataaatccacttacaaaataaaactattaagtgttgatacatcgaaaaggatagaaaaataagctgaatattaagagtaacattctcagaaaaacagcaaggtagatactgaacaagtgaaaaattagatgcaaaggctctaaaagtgtaattctttgaaaagaaaaccaggaccagtgcagaaaaagccagcagcccctctgcaagtgctacataagaaaatgaggccgggcatggtggctcacgcctgtaatcctagcattttgggaggccgaggcatgtggatcacctgaagtcaggagttcgagaccaacctggccaacatggggaaactccgtctctactaaaaatacaaaaaattagccgggtgttctggcgggcacctgtaatcccagctactccagaggctgaggcaggagaatcgcctgaacccgggaggcggaggttgcagtgagccgaggttgcgccattgcactccaccctgggcaactacagcaagactgtgtctcaaaaaagaaaaaaagagcctacggtgaaggagagagagatacagcagtgagaatttcatagggttatcttttaacagagacggaagctgacgtgagtagaccctggaaaacgtctaggcccactgcaaataacaacatcgatcaaacactcataatacaggtggatgtgagtaaaaaggagacaaagaaagaagactacaagagagaggccatctgaaataatataaaaataattgatcatctttgatatgtttttacatggttgtcttatttaaatattcacaactcctggaggtagggttttattttacagaaaaaaaaaaaaaaaaaactaaacaggctcaatgatgtttaagtatctagtccaagctcaccacaggggcataaagtggcagaaccgacattagagggtagacagagggtaaccgcaagacacaaatttcgtgttctgcaacacttgtgtaggcttcacacacacgtgcctccggggccgaaaacaggcgacaccatagcacttgggcactggtgtcacccgcttcaagaggaaactaggataattatgaccaaaggggaacttgttcattcgccggatattaaaggtgcctacttaagtgcgaagaacaggaggcatagcggtgaccaaacacctggcccctgtccccgccgggatcccaaccttggggacccccgaagcgccccgggcgggaatcgggtgggacgcggcacgcaggagggaacgggtgtactgggtggggtgggcgtgacgctgtcaccgcaggagatcgggcgggtagggcggacctgggatgcgggatagagggggcgcggcattcgcgcgagagggacgcggtgcgcaaccggctgactaggggccgcaacgcctagcgcgcgcgacaaactacgcagcggcggagacaactctcaagggatagggccatcagccctgcggccctggcaggtccctaccaaagatcttggaagatgccgtttggggcactaaggggacctgaagtcctccccaggctcattcccgcctgggggccttggctctgggaaggcacgcaaggtaaagggagcgcaacggaaactcaccgtccatggtctcccgcaccgcattcagattcgccgccgcggccgccgccgccgccccagcaccgctgctactcgccatggctaaggccgagggaggcgggagaagggcctgacccggaactggagcgccttcctctctccgaggcaatcacacagcgcgtctcggcccacgccgggcaggctccgcccctcgcgctcgccgccggcgtgaggctgcgttgatttgaatttggagccacgttcctctgcgcggaacgtggagcgaggagttgccattcgaatttcctacgcggcctccgtgcgattggctggttcgcggatggcgggacgacacgattggctagtcgctcacaagccccgtgccctggttggcccaagacagcgcggaagcggggagttaaagagtctatgcctgtcgtggaagctggcctggcccccggagctccctggagtcggtactgggggcttcgttttgtacgcaccggtaggtacgctctttgtggtccctggcctttcctcctgtctgaatggagaggtttcttttcccagctcctgacttgcctgcccgctcgcccctggtgaatgggagcagtcagggagtaggtgtggaagagaggggcaccagaaagagtggccacgtagggttgggggcgacgcctccttcgcactccatccagggaagccggctgcatctcaaccttccagaagtagactcttttccaccccaccccgccaaggtgtagcctctgtagcctcctttgattgcaagtaatgcagtctccctttctatcccgggaggggtggaggggaggtcttggcgaaaggaggatttttggaggaaaggggaccccaggcagttaatttcctagcccctgtcaatcatacttctctggctaggactcatgtgcaagaaaggcacaagcttcctcatctcttacctgcttgctacaaagaattgtttaatagcaactgtagttggatagggtatccgaagaatgttcatagtgttgagacatgagatgatgaatttaaaaaaaattgtagctataagtcctttagttgagaagagatctgggcctgttgtaacctttagtttcctcagaggcagatctgaattcattcatatttgattgctgcgtataagccacttcacttctctgagcttaatactttcgcaaaataatatcactagtaagttactgctatagctttcaaggttgtttcgaggatcagttgagaacatttatatgtgatactttttttgtaagctgtatcatagccccaagagtgtgaggttttgagttgttttttgtgacacatttgtcgagtacattttaatagttaaaattaatatctatgggactttgtaattttaacatgcatactcttgatttctttttagttttctctctgtgctatgggagatgtcaaggaatcaaagatgcaaataacaccagaaactccaggaaggatccctgttttaaatccttttgaaagtcctagtgattattctaatctccatgaacaaactctcgccagtccttctgtttttaaatcaacaaaattaccagtaagttattcctgactagtgtttacaactaattttaaatgtaagtaattacaaataattttaaatgtaaacatctgtctttacaaggtaaggaggaaatacattatggagcatatatagctgcaatatacttttttaaattgtagtgttcattataatctagtggttaggttaataagttagctagaagatttttttttttttaagttcaagaacatacgttagcttcctgcagttgtgggtgtagctacattctgtggttgacgatatagctactaatacattagagaagaagctgcatcatctaatattctgttctcacttatttggcaaacattatttgagtgttgctatgtgtcagatacagtgctaagcagggattacactgtgaacaagttaggatcattaggcacaaatccttaaggaggttatactccgatgtatgggtcacaaactttctgttaggggccagacagtaaatatttaagctttacaggtcatttggtctctgtcacaactactcacttctgtcttgtatcacaaaagcagccataggcaatgtgtaaagagataaatgttactctgttccaatacagctttatttatggacacatttgaatttcatataattttcacatgtcacaagatatttttttgtttgttttcccaaccatttgaaactgtcaaaataattcttagcttgcaatc

SEQ ID NO: 917335 - DNA, 4001 bp, Homo sapiens
cccaacagagtcagaaattaaatctggccaaagacgtttacttccttctttgacactcagtgtctctttgacactcagtatgaggcaggccacagatcagcaaagcgaaagtgaaattaaacaggatttgacattcagaagatacttggttggtaacagatttacccaccatgactgtatcacaaaataaccaactgctgagttccaaggaggctccccgactctgcctctgtcctccacctcccctccccagcgagccagagagggtctattgaaatgtgtccctggtttaggaaagggtgcccacggtcctccagaagtcacatgtccctgcaatttgtgaaaatgtagcaatattctggccaaaagcttctactccgcgagtcaaccaggagcacctccccaggctgtccctcctcctaaggtcactatctcggcaccatcgaaatccgcacgtgactgtccatcaccttgattcttcggcagttccttggtaccatggctagccttatctctccagtgagacgggaagccctttgagggaaagggaccacttcctctactgaacagctactacgtgccagacaatgtgcttggcagggtaagacatggctcctaccttcaagaaacttacagaaggataagaaaaaccatgtgcaaaaaagtaagcacagtcacgtaggtataaacaggaagccaaggagcccagaagaggggcatatactggcggggtgggatagctgcccggtcttaaaaggcaaaagaaggcgggagggcaagccaggcaggaaggccagcgtcaaggagagaagcggcttggtttacaggagataaaaacagttcgaagttgctggaacatcaagcgcaaggcagggagcggtgggagttcaggctggagcggtggggcctagcaaggtggccacaggcacaagcccgcgtaattcccagaggttgggtaccggagggccgcttacgcaattcgcaagtgaacgaatttgggcgcccatggcgaggctctgtcagtgacggtcggtggtggcgccgccagccagccccccgcccccgtgcacctgtgcgccttcgcagctgccaaagcaaacgcaggctccccgacttcgccagattttcaaagcgggctgccagccccgggccactgccacggccgccccgggcccccacccccggacccctcgtttatgcgctcggattacagcgcctgttgacgcactgtagcggccgcctgcgcgccagcggggcccggcggttttctctgcagtcgccaccgggttttcccgaagaagagtccctcccgacctggggctggggaggctgggggcggtgaaggctgcttcggcccggctggccccaggcggggcacggcggcggggaaggggccggggccgctggggcttgcgcgaggcgcagtacgggaatccgtcccccccgggacagcgcggcgggaaacaaacaggacgagctccctcctctccgtgcccgcgccctcaggcgccaggggtggcaacggcctcaggggtcgagggaggcggctcgggctccccgcgctgccaggctcaggcttgggctggggctggggccggggccgcggcaggcacccgcggcgggggcgcaagcggcgcccgggagcggcttggggcaggggtgcgctcggccggggcgtttggtggccccgggcccgtgcaccggcgcccagaccgctgtcattacctggccagtgtagttttcccggagcccgggaggcctcgcaggaggtagaggtgtttcctaaagctgtggcggcgaggaggtgtcccccgcgggggcggccggggcggccgctgccgctgctgctgctgctggggctggaggctcagcctcccaaaagattgaaggaaactgtcctccatgggcaggagggctggctgcgagagccccgggttccctttactgaagtcacggtcttggccaaagctgttgtttttgtgactctccggccatgtgatggatagaggggcgggcgctgggagcccagcccctcctttccacccgccggaaccgtgctgcgtgggagggggcgtccctacctggaaagctggggacgctgggagactcacagcccggaaaacaagggtgacgcacccactcccacctcgacccccgctccgcctcctggtgccctttgccctgagcagtggaggggaggggccccgtctagtaggtctctgggacacttccccggcctggaagccaggcctcctgccacagccctccccaaccccagccccgacctgcctagaccctgaaagtgaaatcattttagctgatgattaatgagctgcccggcattgtaaatggcaacagtaaaggccattgtctcccccgatttgtgagcaccaacatctggctggcgtcccaagggctaccaccactctcccagggcttgtatcttttcttatttcatctttctttagcagcctgccaaaaatattattagaaagctttgttgccgctacataactttaaatctctccttcctcagaaaaagcacccataaaactcagattgatttatgaacagtagcataagggctaccgcccaggtacctgccctgttgccgcctgagaagtgggggcttcttggagaactctttcagatccccggggaaagtggcagagtctaccgaaaccatttatagagaagtatccagactgaagttctcagttccaggaactagggagtacccattggttgatcaccacagtgactctccaacagttcaccctcaagagcgtgacagagtgatcctgttttctgaaccaaaattcaccatgcctgcctgaaagaaacaacattcaaaactgacaccatcctgggaaatgcagaatatatggtggctttggctataataattattgtaaagtaataaattctatttctggcagctaaggtactaaaattgtgaaaagcaactatgaaaaaagtgatttccttctaaaacaaaatccagagatttcacagttagcttttaggaagggactatccaagtggggaggggctctgtgctgagaacttccccttccccttgggatttccctctagggatgggatagggcggagtgggagatgagctgctctcccttgaaaatccattcccagcgtggaggaagaatactttcctcattcttctcagcactgctaagaaacaatggaatttcaaagacctctaaatattaggagggaacccataaggaacagaaaatatacataaatcgtaaaaatagtgacacaatctctgtatcctatcataatttgcccagcttcacatgctacctttttcattttaacctgcactggctaatatgggggccactggtcacatgtggctagtgagcacttggaatgtggctactgcaaacacgctgtgcccgggcccggtgcagtggctcacgcctgtagtcccagcactttgggaggccaaggcaggaggatcacttgaggctaggagtttgagaccagcctgggcaacatagtgagaccctgtatctaccaaaaattcaaaaattagccaggttgtggtggtgtgtgcctgtagtcctagctccttggggggctgaagtgggaggatcacttgagccagcaagttcaagactgcagtgagctatgatggtaccactgtactcgagcctggacaacagagcaagaccctgtctcctaaaaaacataaagtaaaattttaaaaatacacagtgaattttgaagattcagtatgaaaaaagatattaaaaatttttttatattggttatatgttgaaatggtgtgctgggtatattgggttaatatattattagaattaatttcatttatttttatcttccattgtggctcctagagagtttaagttacatacgtagctggcattatattcctactggacagggctgcataagcatccgtccacttccatttccctctgttaagaggtcccaggcagcagctgcaggaa

SEQ ID NO: 917336 - DNA, 4001 bp, Homo sapiens
cttggattctgtgaaaatcagcattactatgattgtgaaaaacatacgactctgtggttgacttcaattttttacagcgtggctcactcgttacttcttctctaggtcccaagaatttaccttcaatttcaccataagacatctgagaaataaataaatcatacaattactagctaatatattaaaaatctaaataaaattttcttcaaaaacaagaaattagacaaagacatttaaatttgtgatatatttaatggtaacaatttcccaaaataccagtcactttcataaccacttattatttaagtacagtcacaacatggtggtttatgggagggatctcgttgaatatcctttttgaaaaatatatatatatgtatatatacatatatatctctctcaactttaaacgatccatttctgaatttagaagacctaaaagatttaagtatgtctgtaaagttgaatcagtaatatatatttttatgatatagatacacaattgtgtatttaaaaggagagtgaaaccgccaacaccaaattaacacatactcaaaatggctgtgatacactgcatcctaagctttccttacttaaaaccactgtgtttttgagagtaaatagctccaattctctcccaaacctcagacaaccaatctccttagcatccaaatgttagattaactgaagtgccagtctttggagacccttaactgtgagtagttagcataaaagaggttcctaaatgggtatagtgtgttcatttaaaaggggggaagagataacttaagttgtaatgatgataacggaaatttgtataataaagaaatctggcaactcccaaagttcaaagcgttcatcttttccgaataatctatcacgaagataaaatttgcttccctttaggcctggcagagtggttcaagcctgtaatcccagcacttgggaggctgaggcgggcggattgctgcttaggagttcgagaccagcctggcaacatggcctaactccgtctcttaacaaaaatacaataaattagccgggcatgggggcgcgcacttgtggtcccagctactcgggaggctgcggtgggaggatcgcttgaacccggggggggcggaggttgtggtgagccgagatggcgccactgcactccgcctgggcgacagagggagaccccgtcttggggggggggggcggttacttcccctgaaatgccttagggacctcaaagtacagcccagaggcctattccacccaattcttcgttgtgccactctctggtgttcctaacacgagagaaagagaaatggacaaaaaggcgaactacagaatgatgcaagcaggccacagagctggaggaagacaactgcggagaacgccaaaaggcctcctctcggtttctcctttcctcattcgaaatgtgtcagaaaagtcccgaagaaaagcaaccgggttgcgttaataaaccgcgtgatctatacactatccgagccccatgcctccagacttccagagtgagcgacccgggcaaaagtgcgtcacccagcttttttgtcccagtgcagacacgctcaggtcctgtccaggaattctggaggtctctgaggcgcaaaagttcacacagagcttacgtctacgtttacagctaatctaaacagtccagtcaagaagtgaaagcgaaaaacaccaccaccgccccaccctcacctaaaacggggtgtctactcaccttactctacccctacgcattgacctttacctcccaataaaaccttcttttaggaagacacgaacctctgtgaaggtgaaagaaaagcggagacagcactaaagccgaggtctggagggactaaaagcccacctctcagaatcgcggtaacaaacctcacctccgtacgcaagatggcggtcacctctcggttacccaggccaaaactaggcgtttgcgccaggcattgtgggaattgaagtccgacgttcacaccggctccgtaaacctcacggcacggagactaggtctcccagaatccatggcgtgacaaacgcagtaatttggcaacaaaagtagaccggaattagttcctagatctggagcagggaagttatctaaaaacaccaactttcgttaaaagaaagcagcgacctcctctggcgttcacccccgaaggaaaaaggaatttgagaaactggcgccccccaatagatgtataatcggctctcagtgcatgcttcttagagctttctagaagacaaccagctgacttttccaacggaactccacagttggtaccacaaatttgcattccggtcgtttctacgaaagaccacctgacgtaattttaggctcatgcttttctgtggaaggacagaattactggggcgcaggtccccaataacagataaaaatacttatgaacaaaatcgtttagtgtcaggtcgctgttttgttttgtttttggaaatacagaccaatcactgagctttcccattaaaagagtcaatacgtgcaaagcaagtagaacagcgagctcctggtaagaataagcgctatgtaagtgtttgttgcattaaaaataaatacaaaccaaacaactggcagtcctcaactgagggctccttttctcttcccaccacctctccaacccctcctccctccattggttccccatcccccataatttcaggtccttgcaaggaaaacttaccatctcttcatatttaaataattctttctatggatatgtacccttttccatccccaacgtgataacaatttcatttgttgttaaagttacagtctggaatatatacatttgattatttaactaacagccttgtgatcaagagtgttcaccaaagcaacccatcttctcagaaagaaatctatctcaaatacagatttctactacgacctttgtctcctcataattaaactcatgcatcctactttgaaacaaccacatttacgtgaggttgtggcgttctcagtgtgttacatccgcaggcacactatactaattataagataatattaatctttgtcaccccatcaaggtattgtcctgtttctccatggcatattttcccccttaaaactaataagcagccgggcgcgatggctcacacctgtaatctcagcactttgggaggctgaggtgggcggatcacctgagggcaggagtttgagactagcctggcaaacatgatgaaaccccatctctactaaaaatacaaaaattagccgagcatggtggcgggcacctgtaatcccagctacttgggaggctgaggcacgagaatcgcttgaactcgggaggcggaggttgcagtgagtcgagatcaggccattgcactccagcctgggtgacaagagccagactccatctcaaaaaaaaccaaaaaccaaaaaacaacaacaacaaaaaactaataagcaatctgtgaggttaaactttgagacgaagcaaatatcctgcacctaatcaaactttaccttatggttcagattccataaatgtcgggattttttttccccacctccttcaagccttccacatttgtcaatccagatgctgctatagagcagaaccctacttatttatttattcactatcagtatgaatttatggattccttttcttcagggggttatactccattgctctccttacttatttactattaatagactatttttaggatggttttaaatgcacataaaaatcgagcaaatggtagagttcccatgtacccacccccccacacacacagtttcccttattactaacctcttacattgttacaactaatgacctaacattgatactttaacattaatttgttataacttattataacatataatatgtaacattaagttacatatcagttatatattagttatataacttattcattattcaactttccttcatttttacctaaatgccctctctgttcaagggttctatccaggataccaccttacatttagttat

SEQ ID NO: 917337 - DNA, 4001 bp, Homo sapiens
aatctgtagttttgattttgttctcctgcaaataactatgtcctctgacatcaatgatggtcacagggacccaatcatttccagttttctcttggattctgtgaaaatcagcattactatgattgtgaaaaacatacgactctgtggttgacttcaattttttacagcgtggctcactcgttacttcttctctaggtcccaagaatttaccttcaatttcaccataagacatctgagaaataaataaatcatacaattactagctaatatattaaaaatctaaataaaattttcttcaaaaacaagaaattagacaaagacatttaaatttgtgatatatttaatggtaacaatttcccaaaataccagtcactttcataaccacttattatttaagtacagtcacaacatggtggtttatgggagggatctcgttgaatatcctttttgaaaaatatatatatatgtatatatacatatatatctctctcaactttaaacgatccatttctgaatttagaagacctaaaagatttaagtatgtctgtaaagttgaatcagtaatatatatttttatgatatagatacacaattgtgtatttaaaaggagagtgaaaccgccaacaccaaattaacacatactcaaaatggctgtgatacactgcatcctaagctttccttacttaaaaccactgtgtttttgagagtaaatagctccaattctctcccaaacctcagacaaccaatctccttagcatccaaatgttagattaactgaagtgccagtctttggagacccttaactgtgagtagttagcataaaagaggttcctaaatgggtatagtgtgttcatttaaaaggggggaagagataacttaagttgtaatgatgataacggaaatttgtataataaagaaatctggcaactcccaaagttcaaagcgttcatcttttccgaataatctatcacgaagataaaatttgcttccctttaggcctggcagagtggttcaagcctgtaatcccagcacttgggaggctgaggcgggcggattgctgcttaggagttcgagaccagcctggcaacatggcctaactccgtctcttaacaaaaatacaataaattagccgggcatgggggcgcgcacttgtggtcccagctactcgggaggctgcggtgggaggatcgcttgaacccggggggggcggaggttgtggtgagccgagatggcgccactgcactccgcctgggcgacagagggagaccccgtcttggggggggggggcggttacttcccctgaaatgccttagggacctcaaagtacagcccagaggcctattccacccaattcttcgttgtgccactctctggtgttcctaacacgagagaaagagaaatggacaaaaaggcgaactacagaatgatgcaagcaggccacagagctggaggaagacaactgcggagaacgccaaaaggcctcctctcggtttctcctttcctcattcgaaatgtgtcagaaaagtcccgaagaaaagcaaccgggttgcgttaataaaccgcgtgatctatacactatccgagccccatgcctccagacttccagagtgagcgacccgggcaaaagtgcgtcacccagcttttttgtcccagtgcagacacgctcaggtcctgtccaggaattctggaggtctctgaggcgcaaaagttcacacagagcttacgtctacgtttacagctaatctaaacagtccagtcaagaagtgaaagcgaaaaacaccaccaccgccccaccctcacctaaaacggggtgtctactcaccttactctacccctacgcattgacctttacctcccaataaaaccttcttttaggaagacacgaacctctgtgaaggtgaaagaaaagcggagacagcactaaagccgaggtctggagggactaaaagcccacctctcagaatcgcggtaacaaacctcacctccgtacgcaagatggcggtcacctctcggttacccaggccaaaactaggcgtttgcgccaggcattgtgggaattgaagtccgacgttcacaccggctccgtaaacctcacggcacggagactaggtctcccagaatccatggcgtgacaaacgcagtaatttggcaacaaaagtagaccggaattagttcctagatctggagcagggaagttatctaaaaacaccaactttcgttaaaagaaagcagcgacctcctctggcgttcacccccgaaggaaaaaggaatttgagaaactggcgccccccaatagatgtataatcggctctcagtgcatgcttcttagagctttctagaagacaaccagctgacttttccaacggaactccacagttggtaccacaaatttgcattccggtcgtttctacgaaagaccacctgacgtaattttaggctcatgcttttctgtggaaggacagaattactggggcgcaggtccccaataacagataaaaatacttatgaacaaaatcgtttagtgtcaggtcgctgttttgttttgtttttggaaatacagaccaatcactgagctttcccattaaaagagtcaatacgtgcaaagcaagtagaacagcgagctcctggtaagaataagcgctatgtaagtgtttgttgcattaaaaataaatacaaaccaaacaactggcagtcctcaactgagggctccttttctcttcccaccacctctccaacccctcctccctccattggttccccatcccccataatttcaggtccttgcaaggaaaacttaccatctcttcatatttaaataattctttctatggatatgtacccttttccatccccaacgtgataacaatttcatttgttgttaaagttacagtctggaatatatacatttgattatttaactaacagccttgtgatcaagagtgttcaccaaagcaacccatcttctcagaaagaaatctatctcaaatacagatttctactacgacctttgtctcctcataattaaactcatgcatcctactttgaaacaaccacatttacgtgaggttgtggcgttctcagtgtgttacatccgcaggcacactatactaattataagataatattaatctttgtcaccccatcaaggtattgtcctgtttctccatggcatattttcccccttaaaactaataagcagccgggcgcgatggctcacacctgtaatctcagcactttgggaggctgaggtgggcggatcacctgagggcaggagtttgagactagcctggcaaacatgatgaaaccccatctctactaaaaatacaaaaattagccgagcatggtggcgggcacctgtaatcccagctacttgggaggctgaggcacgagaatcgcttgaactcgggaggcggaggttgcagtgagtcgagatcaggccattgcactccagcctgggtgacaagagccagactccatctcaaaaaaaaccaaaaaccaaaaaacaacaacaacaaaaaactaataagcaatctgtgaggttaaactttgagacgaagcaaatatcctgcacctaatcaaactttaccttatggttcagattccataaatgtcgggattttttttccccacctccttcaagccttccacatttgtcaatccagatgctgctatagagcagaaccctacttatttatttattcactatcagtatgaatttatggattccttttcttcagggggttatactccattgctctccttacttatttactattaatagactatttttaggatggttttaaatgcacataaaaatcgagcaaatggtagagttcccatgtacccacccccccacacacacagtttcccttattactaacctcttacattgttacaactaatgacctaacattgatactttaacattaatttgttataacttattataacatataatatgtaacattaagttacatatcagttatatattagttatataa

SEQ ID NO: 917338 - DNA, 4001 bp, Homo sapiens
gagaatcgcttgaacccaggagatggaggttgcagtcagctgagatctcgccattgcactccagcctgaatgacaggagtgagactacatttcaaaaaaaaaaaattaaattaaatgaacctatttttaactattttttaaatcactattttatcatatctttattgtttttaaaatttctaagggggtttatgagatttttcaaatccaaaagagctgggaagtactgtgttatattattattatttttaaattttttctggctactctgggcacactgtctatggctggccctgccccacaagtggcagtaaaaaaaatttttttctttagattttaaaacttgtacctatggattatattgaaattatattattattaagctgaccttggaccttatgtggctcagactctaaatcagcagttctcacagaatgaggagcccttttgtcgctaaggggaacatctggcaatgcctagagacatttttggttgccgtaaatgggaaggagggtgctactggcatcaggtgggtagaggctgctgaacttaaaattcacaggacagccctccacattaaagaagtatcccgccctacaagctgcagttgagaaattctaggttaggcagacacatggcgaacaccaacggtaaggtggaggccctctatagagaagcaccattcacgccatgggatcagagtggagggcctgagtggggagaggagtgaaagagcaggtggagcttcaactcggcctcaggaaaaggtaaggatgaagagtgaagacttcagaaagatggaacagcatgagcaaaggggcggacacgttagcttgcagcataagcagggattagctggcttctcaggggctgtggttagtctctttttggataaaattactcaatttccatgttatcaaatttacttagggcaaaaccaccatactgtaatttcaacattcattcttgtgtgaaattaggttaagatagtgtgattcagagcaaagagcattaacctaggagccatcccagactccagtaaaccgcaggagagcaaggctccctctatgaatgggtaaggcctagatattctccaaatactttttataaattgctggatgattctccccttaatccaatttacgtccagaaaagggccaaaggttttcattctgttttcatctttgagtccccctgcctcaaacagttccttccttcttgctttccagaattctatttatcctgtttttaaattaactttaaaaaggaggtaatgcttacaatgaaatgcaggtcgtacgtgtgcagtgcgacgttgtgatgtacgccccatgtaaccacaacccctataaggaaggccttcctgtctgacatgtggctccctcccggtagggacccgctatcgtcccagcacttcttctgcacctccgaagctactgcccgtttcgcagtaaagccgcccgcgtcctagtctactccacctcgcagcacccgcatcctgcaagggacctgcctcagaagccccagcgacaggcgccgcgggtgcccgccctccaggagcggacagtcaggcctgggcatttcgcaaactccatcagcgaacttctgagggcaaagatgaaaaggacagcaggccgagtcctgtttctactcggagggaagggaggcctccacgcgctgccgtagcctgggggttaatttccccgtcagcaccaaggctgcctaaggcccgggcgccaacgtgcgcggcacaggacgcggcgccttccggcgaccgggacgcgaggcccaacagcgcctaacacagcaaccaggatccactctcaggccggcgccagctccttccctcaggaatccgccagccactgctaattaaactcttccaccactaccaccctggaaaaaaggtgagaaacaaacacacaaaaggcacctaacccagtccaaaacgcctcggcggcgcgcagccaaccctacagctgcgcccgaacccgccactcaccagccgcgcgtgcgcagtcgcccagactcgccgtgtgcagtgggagtggctagccagtctcgctagcgcaggcgcaggccctcccgcccaggcccttgcgcaaggcaggccatctccccgcagcgtctcaatcccgcgtttacaacactgagggccgtctccagcctggagtcgttccttcgcttgtctcatcagccgcccccaagaatggtagcaaaaaaacaacaacaacaaaaaaaatgaaggccctggcagggcgcggtggctcacgcctgtaatcccaacactttgggaggccgaggcgggcggatcacctgaggtcaggagttcgagaccagccttaccaacatggtgaaacctcgtctctactaaaaaatacaaaaattagctggccgtggtcgcgtgcgcctgtaatcccagctacccaggaggctgaggcaggagactcgctggaacccgggaggcagaggctacaatgagccgagatcgcaccacagctactccagcctgggcgacagagcaaggcaacatctaaaaaaaaaaaaattaagatcctaattaaagttaaacccactattttgcactgagtcacgtagattttcaaagtcaaggcttcattggtcgattgtctgctcagtctttttaaatcaaatcgttgactttaaatgttgacatcaaattgaggctttggtaaaattgacaggattggcggtagcgggggggaacctttaaaacttgttagtctttcagagtcttcagttttgaatgagttggtcaatatatgtatttagacatcaagcgccgtaagtatgtatgatttttgtcaacaacaccttaattatcttgcacatacaggcactgattattgaaaggttcccttacgttttagcagctaccaaattataagtgatacaaagtatttgtttccaattccccaagaaatcaatctgtattatgcttctaccctctctttcctccattttctttaccaatttcatgatcttgctaaattttatatattctgctgagcaatgtgaaaatcctttctggtataaggtaaggatataaactgttcagctggcaaatgatgctattcagtaagtagttaatgaaacaggtttataacattgggtgtactataatttctattttaagaactgtttccagtttataataacccatgctacattttgactttgttttgaattgatgacaagtctattaaccaaatatttcaagatcaggtgtattctggaaaaggaacaggaagaaaatatatttaaaaaactaaaagaaatttaacacaaactgagaaacaataaccaacttttatgagtgcattttttatggaggtggtgttcagtaaataagactgccctagcttataactactttaacagaagtttacattcagtcaaattgagtctgaaacagtagatcattttctttcaaagctgacattgctttaatagcatgtaagacatgttatcttcatgtattttactatatactatttttactatgaaagtgaccacagatgtcagagttttttgtaccttcactagacctgattgctcagacagcatgagagtaatacagtaagattcatattttcctggtgaaacctatgcactgtaatttaatggtttttgcaaatcataaacatgtaaaatatcaaaggagtacttattctcattaaaggggaaattacttgtccagttaaattggatatgaaggatgtcttcaattcaggaattattccttttgtgtattcaccagtgatttttgttcgtcttgcttctcttcagaaatggtgtaaaaaagaaagtaaaccagacttgggaccaggtgcagggctcacgccagtactttgggaggccaaggtgggcagatcacctgaggtcaggagtttgagaccagcctggtcaacatggcggaactccatctctactaaaaatacaaaaattagcccggtgtggtggcacacgcctgtattccc

SEQ ID NO: 917339 - DNA, 4001 bp, Homo sapiens
aatttatttggggataaaccctaccttttttgtaatttaagaataataatgtaactttttccttatgacactgatccatgatttgaactacaaaaaactcgtataaagagaaaagaagtgctgtcatctttaaagtatgatgccaaatgtcctgaaatccaactagcgatttataaatgatattatcattaatgtttcagattcccagggcaaaaaaaaattaaaaataaaaataaataaattacttctccaattccatgctgtgtaaaataaaagggcatgagaagtaaaataaaaaaatacaaagcccaatgaagcaacctgccacgtgctttaattattcgtatttttaatgttctcacatttgtatcttattattggttcaaaactaagcaccacataatatttaaaatttttatcccatctactatgtatcctaatctgaagactaagtgtgaagtttctatcgtcttgaaacagaacagctactatgaattatctgccgctgttcatacttaaaattactctaaaattagtattttatttatagtaaagttaagcaacaactaacagccatatagccaacccagctttcaataaattcacctttaaacctaaatgcatgtttagcaaataaaagctttttttcaggtgaaaagataaactagaaaagacagttacctactaacaatattagtttaaaacctagggtagccagaggatactgaggaaagcaaaggaatgctgcctcttctccttggaagaacagaacctggaaagctaccagggacgctggcacacagcccacagaaaactgcccacccggctccgcagcggtcatcactacggggccattattcaggcttctgctccgcgataaagtaaaaatgctcccctcaaatgcaaaaccagccagtccacgcggctttaattactcaagcaaggcctgtgcgactaaaaagcaaacagctgttttgaagttggtgacaactcagaaacgcacttcaagtcaaatattcacttccaaagaggtaaataaggtacattacaaacaggcaaactttttcccaaagggaggtggtgccaggcctggcttcctaaagttgccggttttatttcctcgtaaccaggaaaaattccaccatcgcatcgatcccgctttaataggtatgcgggtgtgctgtgcaatctaactaaacgcaaagcagagaatgcagaacgcaaaacacctagccgaggagagactggcaaaataaaccaccgggggaggatccctgaggggctgctgcgagcccggcgcggcagagagcacggcagccactaccggccgaggcggctgtgcccgggcactgcggagagcggcgtgaagtttctggaaagagcgcggcgggggtgaggcgagccgcagaagaccgcggaaaggaagcgcacggaggagcggctcggcagcccccgtgggccggccggagcgggaaagtggggtcccgcgacctccgaggtaaacaaagagcggtgggcagcggaggccaagcctggcccgcgccggccgccgccagaccgcttgcccttaaggcccgaggacccggggaccggggggcggcagcgcggcctacggccactcaccaagatgcgtttgaagaggttgctctccttgggcggcagcagcacgttcggcatcgtggccggcagggaggctaggtggccggcagggaggctaggtgcccgggcgctccgcttcgcgggggtgggcaccgggacgaaccgctgctgagagtcgggctgcgggcgatggattagttcattggtctacagttgcaattgggcagcctggctgttcggcacgggtggcaatggagaaggaaggcggtctgagcaggacacgcttcccctgggctccgctttttggccagcggcggcggcggcggttcccgcgcactgcaagatggcagccagggtccgcctcccgagccggatcctgtgcgcatgcgcggagcgccctttggcgaggggctgcgggtgactacgggggcgtagcggggaccaaccgcgtggatttgccttgtgctgcggctctcctcgccgcaatctcggcaccccctggggctcaggcgagctgtcaccaaaaccttggagtcccatggggtggtgagtcaccaccctcattcaccattgctcctatgcatcagaacgcctcataagactcctacttattgtctgcttctccttgcaataaagtaataaataaaaacgagaattttcttttaagtagaaaagagaagacactgacttgtattgcactcttgataagcttgtggcgcaagataatgttagttatgactctgaagagtcagagttttttgcatttctccccatttaggaatttaagtgtccgatgcaaagtagacttttgatgaaagatgaacttgttttctttccttttcctccttgattcagactctaagtagaagccttctctttccagggcaaaccaaacaaacatttacaatctttgtttttgtttggttggttggttttgagatggagtatcgctcttgtcgcccaggctgcagtgcagtggcgctatctgggctcactgcaacctccgcctcctgagttcaaaggattctcctgcctcagcctcccgagtggctgggattacaggcatgcgccaccacacccggctaattttgtatttttagtagagacaggctttcaccatgttggccaggatggtcttgatctcttgacctcgtgatccgcccccgcgtcaacctccgaaagtgctgggattacaggcgtgagccaccacacctggccggaattacggttttataaggccactggtcttctgagtctacctaccctttctcttcagatggttccccttcctgaaagccatataataatgggagaaacaggcttcaaattcaggatcttccaactctgggatactctctacaacaaataaaaggcagcatattgatggtaatgtgtgagtctagaaagatacaacagtggcaagaataaaccatacattcagtgtagggttagtagtaaggtgtgtgtaaacattaggtacataagtttatttatacatgtgctgaatcttaatgggtgcatatttctgagactataaagtaattgatgagtaactgcatttagtcggctgtaatcagaactgggctgcccttttttattttcctttttttgagacgatgttttgttcttgttgccgaggctggaatgcaatggcgctatctcagctccctgtaacctccgcctcccaggttcaagcgattctcctgcctcagcctcccaagtagcagggatgacaggcatgcaccaccacacctggctaatttagtatttttagtagagacggggtttctccatgttggtcaggctggtctcaaactcccgacctcaggtgatctgcccacctcggccttccaaagtgctgggattacaggtgtgagccacagtgcctgcctatttgattttccttctttctagcctaagttggttggacatgaaagaatcataggagtctttttttttctttcaatctcctacgtttcacacatgattttaaagcatcataggagtcctttaaaatagggaaagtactgtcattaaaattgggggtccacagcaatcccattgctgggtatatacccaaaagaatataaattgttctaccgtaaagacacatgcacagccaggtgcagtgactcacgcctgtaatcccagcactttgggcggctgaggcaggcggatcaccctgagctcaggagttggagaccagccggggcaacatggcaaacacacacacacacacacacacacacacacacacacacacactagctgggcatagtggcgagtgcctgtagtcccagctacttgggatgctgaggtgcgaggatcaattgagcctgggagacaggttgcagtgagccaagatcatgccactgcactccagcctgggcaacaaactgcct

SEQ ID NO: 917340 - DNA, 4001 bp, Homo sapiens
tctgaaattatctgaacatcatcgataaatgataaaacaaatgtgtacatttgtgtatacacatacatgcacacacaaagcatgccggaatgataaaatcacctggaaaccatttcaaagaaatgccatacccaagaagaagaaaatgctactcaaatcttcagttcactaaattgcaactaaatgacactattttgagtagactttttttaagtacattttttaagtacatttctcctttgaatatcttgcaagtcctatccaaagttataagtgtacaaccactattttataagacatgctttctcctagagttctgtagagattttagcatagtccttatcagtgacggcacatttattctgcaaacagattatgtcttctatgaacacagaagaggatccaactgaaccttttcactttttaagtttttctccaaagctggattttgtcttcacactgtctggttttagcagtggctaggtcaaagtatactacagaagaacgaaaaatcgactctagaaaagcacgcagaatgacagccaaccagttagggagtaaatgtttctcgttgcagatgtttgggaagccatgatttttatttagaactgtggaaaccttatctttgaatttaaaaagccagtcctgagatgcatctgcctcaggggtaactaccatagtgaaaccgctcctctcccaggccatatcaaatcacagttgtagttatgaacatacaaatcacacacatatatatatatatatacatacatatatatttcaaaatcgccacctgttaatttttgatcccctattagaggtgttatccaccaactactaacacgaaggtcactggtcctcaacccacatttcaccaccagggcagtcgggcctagctgatgaccacacgaacaccagattaagagtaaaaccttctgaggcctgaaagtgagcgtgtattcacacatccttaataatacagtgtctgaaaaattgtacctgaaactgaaagatttattctaaggtatttcaagcactaagggtctgagttcagcattctcacaccatcctgaaagaggaacattaagtcagcaaaatgactgcgatctgggcccccagagggatcccagccaggccatccttgctggtgtcttaaagattcagtgacaaaatggtgttgcttggcaggacactgttttgcgttcggtgtagccaccctaatgacggctgcttaacaaggccaatgaatatcataagggacatttagcaaggagcaatccacaggagcatgggggtggggcaaggccgcggagcccccgcggagacctgctggagccaggctgcccacccccacctccccacccgcgcgttggcccagaggtttacccaggcagcggccctggtgccgagggggcaggtgcagcgctgtagtgatgcccagtggcctcgtcctcagccacctgccccccaacacctgctagatgcccaggcggggcaggcccgaggtgtcgccggccctgggcttcccaagccagcccaggggcatcccgcggcaggcgcccccgacacccacgcgcaggaatagggagggcgcatcgcggctcccgcgccccggccaggccggcaaggaccccaccgccccgctctcgggtggaggcgcccctccccacccctcccccgcgcggggcccccgcccgcagcccctctagcagcccctctcgcagccccagcgcccctgagccgtcctggcccggaccggccaaggaactaacgagcgcgcatcgcgggcctcgggcgcagggcacggagccggccgcgccgcagcctcccgggcaccggcggcggtgaccaacctgtaaccccagcgctcagagctgtcatggtgcccgcgggcggcggcggcggcgacagtgggcgaccggcaggatcagtgccaggcgcggcgcccagggcgggcggggacgcgggcccctcacctacggcggctcagctcaggcagcgcgctcggcccggctggggccgcggctcacgctcgccgtgtcactcactgagcgccgccgccgccgggcaggctgggggaggggtgggagccggagttttcgggcctttaaaaaattattattttatttaaatttttaaagttagctttgctacagggactgcagtgatgccgaagggcgggcaccgcagaggaggctgcgccgcagttggtggggagcgccagggtcggtactggcagttccttcttgccggctgccacccgcagtcagtctcacagcaacagctaggctctcatctgcgagctcctctcgggggtctttcgtactcaacagcacggcggcggtgtgcacgggagtccgccgggcacacgcggggtacacttaagtgcactgccaggaggccgggagcccagcgtgcgagcgtgaggtcagactgtgcacggtaccgaggactagttccattcctgagtatgaaagggtgaaaccgttcacctcaagtttcaccccggagttattaaataatgaatgcatcagtcacacttatagttttctaaataggttgacgttcgcctttaaaattaaaatatgttgtcgtgtggatgagacaaagtctattcagaaattgacagtcccccaccccataccctgtgagtatacctggacagcagactgcatctgaggcttcctagggctcccagcagagcaggtttagggaaatctggcctcctaagcaccatgcccagggcgacatcctcccactcattcccactctctgaaaggtttactttgggtctggaatcttgccatgtagtcagatacgaaaatccccagggaactcctgaccagtgatttagacatcatgcacacaggcatataaataaagggaaagaaacaactgaatgaagctttctctacaagagaaattctaaacaaagagcatttgtctatcacaaaatgttatgtggcaaggtatagaagtaaaactacacaaacctacattttaaaaatgtattttctggttacagatatttaattaatctactttcttaaaaagtccattcacaatttgttcacattcataatccatattagtacgttttattgtttacagggaaatgttaaaatattggtatttcatgaaatacagagtcatgcgagataatttttcaaatttctaaagacttcagaaaaactgtgtcaaaagccaggttttaaacaaatgatgaaatcactcctcataagaaaaaattgacagtaatttaaacaatgctaaatctacaaccagtttgcttagaaaaagtatttaccaacttgtttcatcatctttatttgcggctttcaattgcttgttctaaatactagtttatttcacaaactgaaatatatagctatatatatatggtagctgaatgatagtgtgttattccttgacattcgttcgaattatctgttagtaaattatattaaggaaatatttaaacatttatttataatgttttgaagtggtcaaggcagtgattttttactaatctcagtgccactcctcacccaacaggcatttcagacctttctctgtccttggttgaactacctctgttaagtctctataattcatgctcatgagccaaacaatcccaatgatgatggagacagtctcagagaattcatgggcttcaaggaagtcatggaatccagcacactcatcctataatgcatagggattcactgtgtattggagtagacaatcattttaaaaaacaggtacatccaaaatatcatagtaccccttctacctgctcagtatctctcttcttttgttttctttgttatttttagagacaaggcctatctccgttgcctagcctggagtgcattgatgtgattatagctcactgcatcctcaaagcaaaagtagaaaggatgaacaaatatcttttccaggttgaattggccctgtaactacattcattgctggaatccagtaaaagtcaattgctggcctgt

SEQ ID NO: 917341 - DNA, 4001 bp, Homo sapiens
gggcgcaggggcccgcggctggggcttggctgcgaccacacctgggccggacgtgggcggtgcaggctgaggggtgcgtgggcagaccgtggtctggagcagacgtggagagtaagccgggacaccaagtaaggttttcaaataagctcacgcagaaataaagcgtagcgatcttgagcccagagaggaaagtaagagggcacgggaatgcggagcagcgagagagaggcggcgagcggacggcacagggccacacgcgccgggtgagggcagaaggcggcgtttccccagagaccactgcacatcctcgccgtcgtggctgcaggttctccggctctgatgggtctcccctccaactgccaaaaggtagtggtgcattcacccgcgatgacggcaaagtggggaggggttttttgggtgttcccagaccctgctcttaaggggatggaaggttcttgggaaatagagtagctgggtgccacgcaccccaatgtatactattttcagctaaattggaatctatcactgttggataaggagaaattaaataataggtggttttgtgatgctgtgcctgtgcaaaacaaaacacacaaacaaaaatcaaaagcttaagtagcaagtgggagccctgaagaatatcttgttaaaagtgactctgaaagtgtctacaaacatgttaccgggagttataggatttgacgggaaatattcttaattggaaagacgtggcatctaaattaaaggtagacaattaaaaaaatccacctagttttaaaaaccacaacgtaaccactaagtagtatttctttagtttcctgtactttgaggacacaactggaccaccaactagaaaaaaaaattcctcctcctgtttccaggttccaaaattcagaaatgaaatgatttatttcatttttgttttcaaaatgatgtttaaatccaaaaaaccccccagataactgcaagttaattttctttgcaaatgttaaccattttcccttaattaaatcacacgaaatagtataaaattagaagtctactgccaggtcaccacttaaggacacttaagacaggagatatatccttaattatacatctgtaaacaagccagataccccaaaccttcaatttttcgggatagttatctgtgaggaagcttgatctctatgatctcacctgaattttatgtactaaaatacaggtcactatgaaataacgctaaagtactctgtccatcccacagacaatttatttttcaaatgtttctataagtgcatatatagcgttgtgtcctgcttgtaatgctgggcaagtccaccaaagtgcaaagactgcatctgctggggcagagggatgtacgaaatattttttaaatatcctaacttaaacaggggtagaacatctcacacactcagcaataattttcagattcaacaaatggagaaaagaaaaaaacataagtaaaaaaagagcatactacctccataacgtttcaaaaaatcattttaacatataggaacatccagaatgagaaaattacacaggtactcctccatctaaagccaacttccatatgccagtagtctgcatgaaagaacaaactttcaacctgcatttaagaagaccccaaggattaacagacgttaattatcttactctaaatgcaagttagtgattttgttttagaaaaccccgtcaagatcactaattgatggatgcccattaatacacctgtatttgcatttcagcggtaaaagacaagcaggttttcggcacagaagagagccgctttgccaagtcttttcaaaacgtcaatatgcttcaagtaataccaaagctgagagattcctcttgatttccaaactgtctaggtggcctgagtggttttccgccggcagcagcctcctacctttagtttgtgtgcctatatccatgagtggggattaattagccgggttggagctgaaggaggctgtcgtgacgagcccagtggcgattggccgcccgcctgcctggccctgcctttataatttccacacgagtgcatctgggctcttagacaaaccaacagcagcttcttctgacatatacacacgcacactcaccccggacacacactcagcacacttttcctccatttgattaacagtgctgcacacacaatgattacgggaaagcgcaaataaatacggaaaggggtgcttattttgactactggaagagctttgctgggtctcagcgcaacttttgttttttattcctgagaaggtgatctctccatgcggttctctcacacaaggattctttaaaagaggaagagagacaagcagaggggggaggacagtctttcactttaagaacggctgggctcaaagataaaaggaagggaaaagcagcagcagcagcagcagcagcagcagcagcagcagcagcagcagcagcagcagcagggaaaccaacgctgcagcacttccgaaaggcatttttgatccatttctgagtgttgcggcccgtttctccaccgaagttggctccagctctagcagccgcattggatcccacagcttactgcgagactccggtgtacaatccggatctctgccccaacatgattgcggcccaggccaagctggtctaccatctgaataaatactacaacgaaaaatgccaagccaggaaagctgccattgccaaaactatccgggaagtctgcaaagtagtttccgacgtactgaaggaagtggaagtgcaggagccgcggttcatcagctctctcaacgagatggacaatcgctacgagggcctcgaggtcatctcccccaccgaatttgaagtggtgctttatctcaaccaaatgggggtgttcaacttcgtggacgatggctcactgcccggctgcgcggtgctgaagttgagcgacgggcgcaagaggagcatgtccctctgggtggaattcattaccgcctccggctacctctcggcgcgcaaaatccggtccaggtttcagacgctggtggctcaagcggtagacaaatgtagctaccgggatgtggtaaagatggtggcagacaccagcgaagtgaaactgagaatccgagataggtacgtggtgcagatcacgccggcctttaaatgcaccgggatctggccgaggagtgctgcccactggccacttccccacatcccctggccgggacccaaccgggtggcggaggtcaaggcggaaggtttcaatctcttgtccaaggagtgccactccttggccggcaagcagagctcggcggagagcgacgcctgggtgctgcagttcgcggaggcagagaacagactgcagatggggggctgcagaaagaagtgcctctccatcctcaaaaccttaagggatcgtcaccttgaactgccgggccagcccttgaacaattaccatatgaagactctggtttcctacgagtgtgaaaagcatccccgagagtcggactgggacgagtcttgcctgggtgatcggctgaacgggattttgctgcaacttatctcctgcctgcagtgccggcggtgtccccactactttctaccgaacttagatctgtttcaaggcaaacctcactcagctctggaaaacgctgccaaacaaacgtggcgactggcaagagagatcctgaccaacccgaaaagtttggaaaaactttagaggatgatttaatcaagagccgaaattattacccttctcaaagtccttattaagtgtaaacttctgttcaattcctaatattccactccgcagtgcaaacaatctcttcctttaaaaaggaataataatacaatatttaaacatcatctcacccacccccacaaggggagaaaaagtaggggaagcggatggagaaaaacccaaagccactagtattagaagacttctttccacacgatttcctatctcccttgaaaagtacaccgtaacactccgtaaacagcccagctgtaacgccagaccgagacga

SEQ ID NO: 917342 - DNA, 4001 bp, Homo sapiens
ttgcttagctgaaaaatgactgcatgggtgttacaaagtacccctgtaagcatattgttatattcctgtgaccccacaccaaatacaatactcaactgattgctctcgatttatgtcttgcctcccaaagcccaaccttacagtatgtcaaagactagatctattgcagagaaaactgtttaaaaagcttggctgcatttaaaaacaaaacaaaacaaaacaaaacctccatttacaaagcactaaatatgaactactgttaattatcctcaatgtatgattctcctctccttctttccatttctttccctgacatcttaaacgcttctgagcctctctgtagatagcgcaaaacattaagtcatacacacttctgcagtaactctttcttaccatgaaaggaaccaaaacctagggctgcgtttaaaacctttcctttagtctttacccacatgccacactactgaaagtaaccacagaaatcaacctgtgtgatttggtgtcctcacacaccttgtgtgcacaaaaaatgactaagagatcagtatattcagggcaatattacaaagaagggacggctgcttctgagatggagggggatggatacagacacaacactctccatcatggccttggaatatttaaagacagatgcaaaactgcatcattttctgtctccttcgaaaacatcacaccccagctgctcaagttggaagctaatgcgcttctcacatttcagcagcacgggggaatttaggctccaggggcaaggctgtcatcctcggagagcgacaccaaggacaattaagtgtgagaaaaagaaccccagagaacaggaggcctcctcacctcctaactaaactctaaagtcgacccaaaaccttcaccgcgggtactgggttactcgcggtcctaaaaagtgagaagaagcggtgttaagttgggcactgcgctcaggtggcaggagaggaccagaaagaggagaggagggaggtggcgtggctctagcagcgcgcaggcaggtcacccgctgggcaataccggctgaacgctctgcgctcccagggacgcgcggcgcgtgtgaccctgggggtgaagggtgggagggaaaggcgctggggacggtgtatgtggggactggggaagcagattgagagcacgccttttccttaccaggttgagcaccgtctccacgatgtccctgttgctgacctctccgacctgtatgagtccaatcaacactgcgaatttcatccggatgttgcggatcggcaccgaagggttaatcatccccgcggggagcatcaccgagccggagccggacgccccccttagctcccccatcccgctgcccccggtgccgccaccaccgctgcccccgccgcctccgccagcggccccgacggcaatgagccccacgggctgaggctcgagccccgggcccgggcccggcttctcgctagccattggcccccctcctgaggagaagggaagagcagcggcgctgccgccgccggtaccgttatacctgcctcggcccccgccccccggccgtcgcctcggagccccagcatccaccagcgccgcggcgccgggcccgctccccgcctgcgcctcagcccggcccgctccggcgctctcccccgcggaggcggcgggggatccgcaggcttattctcggcggtggcggtaccgctaaccgctgccgggcaagcggctgtgcccgcccagcaggtgtgccgctgccgctgccgctgccgccgccgctgcctctgctctctccctctcccggtctgtccggcccggcccgccccccgcggagatgctgcagccgctccgagaagcccgaggacgcgagcagctggccacgacgctggccggtgctgaagctcaggctgtggccgatgctattgacgctgctgccgccgctgctacggccaccactgttgttgtgaagccccgacgccgccgctcactccgccatgttgccgccccctgcctgcggtagcagccactgcgcctgcgcacagcctccgggggggcggagccctcggtgcaccccctcttttgccctgccctccttctcttcccacccacccaccccgacacccctcgtccctcccccaaccaccccgaacggatagacaggtgagcaggtgcatggggactgctgccagacactggggcaagctggcagaggcggggcgggtagtggcttccttgtggtttttcccttgagggcggattctccctttggggaaggacacagtgtgcatgtcttgccttcgctgccacctcctccttctctcaatatcctcttgctgggaggaggttcctcatctcagttgttgcatccagctgctgctactgccagtgccacgtgccttgtaaggtaggggagtggcagacgacctctttctgcccctcctcgcccttcctcgcagtcctgtccgcctgccctccctagaatttcccaaagaaaaagtggctggcaaagcagaaacaaacgcgcgggggggcgggggggcgatcctgcattgtcgggggaagaatacagacggagtgtaatggtgctttttctacagccatgaaagaggctgacacctgcacactcaggcacgacttaaaatagaacttgtcaaacagtgatcctctctggatcaagctcggaacaacaaacagctcttgaactcgcctcccagcctaaaaagactgcagtgtgtgacactgtggggtagtttggtgggaacgacaaatcccacactttcaaaatcctgacaatcctcaggtatgatgccaattattaatgtttccttttttcacaggcacgtacaattcagaggactttcgaaattatctaaaaacatgggtgattctcactgccagccttgtctgtgagaaaagtacatatctatgtctgcacagatacgagacaaaaaataaacctttaatttttaaaaattaaaatgtacacagtaatcttgctgttagtattgaattaaaactaaataggcatgactgttccttgaaaggaatgatataattttctttaatatttcatgaggtcttcccttttcaataaagattattgcaagtcaccagaaatattaggtatcttgaggtatattcagatcgttttaattgtcctctcaaatgaaaaaggtcaatatacaaatccaccataatcagttttgttattattcatatttaattggacctgccagtcaagttaactcccaggatatgggaacacggtaaaattctaagtaccacaggttataaaaaagttcctcaaaaccagtacttaggatgaattcttggttgcatgtctgtttgtttaaacttgcaccaaagtgattgaattgttaaagtagttaagcaaacacttctgaaagcagtggtaactagcatgtccatttaaattaaatggcaattgaattataaaatgctagaatgcttgaaactgtacgggaaatttacaaaacatacaagtcataatagtatgacttgagatatactatataattgaaaaatcctgtaacgtttatatccttctactacatttttgtctgtcccaagtgagtatcatctgcttttaagagtactgtttcatttgcaaatttaaaatgatatctttgtaaaatacataaatctagactgaaaggttgtcacactaagtttttttacccactgtgcatatatctatatggcagcaggttctaccttttgctatttttagacttcttgcatgagtactttgagagacagtgacaacctgaactttctatttcctttctgaatgaatagcttaacatcatttttaacatttccattttgatttttcttgtattttttcttaagtagtatgtatatgcagttggttgtatttttctgctcatttttcttagtgaagatagtgagtgggtaaagataatatcaccatttctaagtaggaaaactccacttcttttgcctacttaattcaatttcagagatattta

SEQ ID NO: 917343 - DNA, 4001 bp, Homo sapiens
gaaaaaaacgaggggagggggcagcaataaaatatgcccatttattttgaaaggagttgttgggaaaacaaatatcttaaaactgagagctacataaattaacagtgttttgggtagtgacgtctgtaggaaaaatgaaacaagtttcactgctgatattattcaatatttatatcattttatttttgctaacatttacaaacctagaaatgcctttcaaaccatcaaaagggtgtacactgacaacttgaaaaacgctttccatactgggagaaacagtatttcccaagttgttgagaaaagctgataaattttcaaagaattcggaatatggaccttttgtaggttttaaggaatgcaaaccaattgaaaatggaagcctcatgagcttttatcttagaaaaatgcaaaattacatactttaggatctcatcttacagttccttcatatttgccaaaatgtacttattaatagaaagtcttggcttataacctgtcttacatgtgcaaatagatttgaaagttgaaacctgggactaacatacctaaatttgtaaaattttataaaccataaactgcatcaccagtgctatgtattgtttttctcctctccctcagtaaatgggctgaaagtttgtagaatgacatgctacctagctgcaacagcacaacagcagagtcaactattgctcagtccatctttaactaaggtttacaacaggaatctccaacgtcaccaccagaatacacaaagaaaaatatatttaaaaattgacactgaaaatatagaggaacacatttcacttttttcaacatagttaccaaagtttacacagttaagctggaaaaccttgtatttaacgaaaaataatttttcaaacaagattagaatttgttctactaaaactacctctgtttcccctctaaccaaaaaaaaaaaaaaaaaaaaaaaaaagaaagaaagaaagaaagaaaaagtggggattaccaaaaaatacagtcatttttaatactaacataatggaaaaggacaaaatgacaaggttaacgagcagagagacaagatcagcattatggctagtctttctctacagttccacaattcctaacccacatttttgccaaatccacatcccaccccacgcagtacttacacctccacccacctactcacccaccccatttatgacggcgatcaccttccgggcaggtatgtgaagtcagccccatttccagtagacaatcgactagaatgtctcaggagtgactgagtcagagaataagaaaatgataaagtgagaaattaaaacggatacaagttgtaaggtgtgtggagggagggcgtctcacagcggggctaagggtgcgggtgaggagctaagcagacttggggcgagagagaagggtttcgaaggagtcctaggcaggagtgcgcaggtgaggcgagtgaagcagctccagccagaagatccaaaaaaacaaaacaaaacacaacaaaaaaaagccacagcttttcctccgggaataacctgaggaaagggactctcgggacgccgcggcgggaggcagtcccgggaggcacaggaggccgggaactcaccacctggtagcgcccagtccccggctggtggtgatccatcctgcccggctcgggatccggcttccgagagagggagtcttctccgtgctcagctcccacggccacccccgtcgacgacgtcgtcgccgcagggccccttccgcctccgttcctgcagccgcggtctcccggcggaagctcttcacttcctgtggctcccgcagcggccgccgagacctccgcgttggtcgcggttccgcggagaagctccggggcgccgcgcgcgctattgagcatgctcggaccgctcgcgcagactcgctggctccgccggcgtgccatccgcgccgccagtgggagggtatagctgggtgggaggagatggaaaagtaaggcaagtccgggggagctgtctaggttgtcaacctgtcgagtgggcggtcgcaaaaggcgcgcggggggcgggaatgacccgtccttgattggtcttttctgtgtgcgcgagtttcgcgcaggcacgagccagtgcgccttctcaccacacagagacagaggctgacaagggatggggccgcgttcctagaacacctgaggacaggtcgcccgggtacccgacacttcctcacccagcgtaggacatggggaggagattcatctctagaacattcccaaaacgcttattcaaaatcattcgtaagataagcgattttttaaagactaatatagagtagttagagtttacagaaaaattgagaagttacagagatatcccatatacacttggctcctacgcatgcataaccccccaccattatcaacatcccccctcagagtggtacatgtgttacgactgatgaacctgcattgacacctcatcatcactcaaagtccatagttacctcagggttcactcaggttgttgtatactcctcgagttagaacaaatgtgtaatggcaggtatccatcattatagtatcctacagagtatttccactgccctgaaattcttctgtggggtaatttttgtttttgtttgttgtttttttagagatggggtctcactatattgcccagactggagtgcagtggctgttagcaggcgcagtcatggctcactgtagcctcgaactcctcggcccaagctatccacctgcctcagcctctggagtagctgagactacaggcactagctctttggttactttttaaactcttttttccactttttggtaataagagatttaaaaatccaacggactctccagacaactctcaaagaaagaggtctctagagttctaggttactggaaggacgttagaagaaagtaatgaaatcagataggattattttgtggtaatactcaataattccaattgatttaacagcaaggaatcacttgggagcactgttagtagtatctcactgtctggttaaccacacatgacacggcataaagcatatttctctagcaagtagaagagtatgacagagcagcgaaaagtaccttttaacctgaagaccaacgttctataccctaaaaactatgatgctgcttgatgtggcccagctatgtttttaacataacaccacattttccctaaatgatcttacagtggagcgccctgaagggaaggaaagggatctggagccccatttatttccttcatgaatgtccagaggagatccttgaaatgaagactgccactgggtgagcctaatcaactggttaaaatagcaagatagaataaaaacagaaactctttgagagattgacaactaaaaaatgtaagccttcctcatagttctttttaaagcattcatcaactcttcctatttgtgccgttttgacatgtctaatagcataaagcattactgtgctaacaataagaggcagtgatatctcatacttaaatattgttaaacttgccttgttttgatcttaatgtattttagtttctaagccaataaacatatgccattttattggtattactggtacaaacgctcactctcacaatttcactccaaatggtattgcctctcgatgaccaaaacaacagccagtatcagcaaactgaaattagatccttatatcacttacgatctataagatttatttagaacttaattttatatgcatatgtgttttcattaatcattcatgtgttcatctgtttctcaaatagatggctgctcagggcagagaccatttcttacacccaatgcagcactgagaacataaaagtaaaaatcaaagatctgaccaaaagcagacatcttgaatcctgatagagtaacagattctttctattttaccctcctcccagattctctgaacattttgctaatctagtggagtaacaaattcagcaggaaagcgtatttgtaatgaggaagagaaagaggggaaggagaagtag

SEQ ID NO: 917344 - DNA, 4001 bp, Homo sapiens
ttcaaaaagcttacagtgtttgttttttattttgagacggagtctcgctcctgttgcccaggctggagtgcaatggtgcgatctcggctcaccgcaacctccacctcccaggttcaagtgattctcctgcctcagcctcccgagtagctgggattacaggcatgcgccaccacgcccggctaattttgtatttttagtagagacgcggtttctccatgttggtcaggctgggctcgaactcccgacctcagatgatccgcccgcctcggcctcccaaagtgctgggattacaggcgtgagccaccccgtccggccctagtgttcgttttttaattacaccacaaagaattataaggcagagagagcatgacaggcaaagcaaaaatcaaactaaaacctctactatagtgacctgtaaaaattccagtttgtattactgtttatcacagaattaccaggaaatcctagaaataatttcttcatataaccaaatcagtcatacacattgtcttcgaaacaatgtttttccaagatcgatgaggtcttttgagtgtatatagatgtgaaagaaacaagtcctttactactattctaacacctggtattacacggtttaacatggaagccaagtttccccatgatcttattcttcgtttcttcggggctttattctatgcaatggagagtaactgaaaattaagagcaaccagacttcttagctgaaaaccacatttgatattttctgcccacatttgcctgttactcaatattacacccatatgatcattacaagacctgaatacactctggacatggcaaaagtatatcggccccttcgcatgcctgcaacaatacttttaaaaacctaataaagtgatttgcaaatacccagaagtgggatcaccagtgagatacgggctaagttcagaaaggtccctgaaaccacctttacagatgtataagtaatgcgagaaatctaacatgactgactccatcttgcttctaacctcacgggctaagttttcaccgtgttgtcgttttcttattctagcacagaggctaggataactgggagagggatttcgtgtaaacttcaagacaagggaaactgaccccaccccttcctgggaaccaacgaagccgccccgagtttcagaagctcttgtgatttcatccccagccggtcaactgtttcagttccccagccccccgaagccaaaatgccctttaaaaccctcgcccccgaattctcggggagacaggtctgagaccctgttctggtttggccagccctgcgcttattaacttctttttttgctgcaacagcggttctcactggttctttccgggcagcgagcgagaagaatccgttgagccggggccggcgcccgcggggcaactgcaccgcgggggagcccagtcgccccgctcacccgtgagggccctttctcctggaaaagccgctccgccctgctgacccccacggcaccgcgcgcccagaccccaaggcggcgagggacttgcgggtttgcggcgagtggtccagaccgcggggcggaagtgaggggcgcggccgcgcgtccggggcgcgtctacccctcgctcccactcggctccgcgccgcgaccacgcgccgccctcctcgttctagaggcagcccgccagggcggggaccactcacccgcttccccggcgaccctagtccactccttggcctggcaaccggcggcttccgcggggcgggcccggcgggtcgtctctcgggttgcgggtgaaggaagccgcctgggtctggcgggaggcactgttcttggagtagccgggcctacgaagagcacgttttaaagctgttgttccacgttgcggtggaacagtgctgttaacattgagggaaattgtccccgactaactgagttctgtctgcaggttaagtgaaagcctatgtagataaatttcacgggcacagcactcagtgctagctagaacttactagctatgtgaccttgggcaattgtggaaggcgggataatgcttccgcctcaggatgtccacatcctactccctggaacctgtgcgtttgttctcttgcttggcagagggggttaagattgcagatggaattaaggttgcttatcagcggactttaaaataaggtgacgatcttggagtgtgtgcttgggtaattacaaagtaattacaagggttctctaaagtggaaggggcccaaaaagaaggtcagtatgagaaagctatttgaaggtggaggaaggggcaacagccaaggaatgcagctggcctcaagaagctggaagaggagcaggcacagtgtctcatgtttgcaatcccagtgctttggaaggcagaggcaggagaggaacactttagcccaggagttcgagatcagcctgggcaacatagtgagacactcgtctctacgaaaaattaactagacatagcgacgggcactgtggtcccagctgctcgggggattggggcaggaggatcactagagctggagagggctcatgatcccaccactgcagtccagctttggtgacagagcaagaacctgtctccaaaaaaaaaaaaaaatatatatatatatatatatatatatataaaggaggaggtgggaggtggaaaaggaggagaagctagaaaaggagggaaaaacaaaaaacaaaaaccaaattgttccccagagcttccagaagtaacagtccagctgaccccttgatttttttgttttttgaaacagggtcttgctatgttgccaagactggttttgagctcccgggctcaagcgatccgcccacctcagcctcctgagtggctgggactacaggaaaaccaccatgcacactgacgccttgattttaacccagtgagctgtatttctgaacttcagaactgtaaggtaataaattcgtgtcgttttagccacttaggttgtcacagtttgttacagaagccttaggaaactaatacagcagagtaactaaatccctctgtataaaagtatagaacctacctcataggattactgtgaacaacatctggttaccctttacttgtaagcgctgaacgtgttcattataacgtgtcaaccagagtcagagagaccgaaatccaagtaaagaagtttattggcagtctgagaattgcagttcaaggaacacagattccagaagcatttgaattgtgtcctgaccagctatttttgggtagggtttttaaaggaagtaagaagtcagttctcactagttcatccataaccttcgtaacccactattttgattgaagataaagcgttatcatgacagttcattggtttctaggcaaaagtccttgattcaggggtttgagaaaagttcagtcctcagcatgaagtccttttcataatggcagcaattttgtctgcaacatcagcaagtacattctgcagtcaggcagttgtaaaatggcattcaggaacaaaatggctttgctctggccagctccaattgccttccttccacaatgtcaaagttaatgtacaactattctgtagtgtggtgataagagaagggaaatgctacaaatcaacatttacaacatctgcactgctttctttgtactctatacaaagactagtttcaattaaaaacaaagaaggccaggcacgatggctcaggcctgtaatcccagcactttgggaggccgaggtaggcagatcacctgaggtcaggagttcgtgaccagcctggcctacatggtgaaaccctgtctctactaaaaatacaaaaattagctgggcatggtgggtggcgcctgtaaccccaactactcgggaggctgaggcataagaatcatttgaacctgggaggcggaggttgcagtgaaccaagatcgtgccactgcactccagcctgggtgatagagcgaaactctgtctaaaaaaaaaaaaaaaaaaatactgcccatgcctgtactcagaatgctgctcttgagaactgagcaaa

SEQ ID NO: 917345 - DNA, 4001 bp, Homo sapiens
ttgcaggggttgggcaaaacatattgatagaagacagacatgtgtttcattttggacatgccaaactggaggttcctgggagtcaagagagatgttaaacacacagttggagtccttgacttcagtctcccatctatatttccaggatgaagcagctagcgggactgcttagcacataagagaaaatggataaaacgttcctaacactttgcctggtacatacaaggtcctgaataactggcagctattatgattattaaaaccttagggaagtgatgcattctttttcattgcaggaaaaacactgtaatgaatttacttgatttttcaaaaagcttacagtgtttgttttttattttgagacggagtctcgctcctgttgcccaggctggagtgcaatggtgcgatctcggctcaccgcaacctccacctcccaggttcaagtgattctcctgcctcagcctcccgagtagctgggattacaggcatgcgccaccacgcccggctaattttgtatttttagtagagacgcggtttctccatgttggtcaggctgggctcgaactcccgacctcagatgatccgcccgcctcggcctcccaaagtgctgggattacaggcgtgagccaccccgtccggccctagtgttcgttttttaattacaccacaaagaattataaggcagagagagcatgacaggcaaagcaaaaatcaaactaaaacctctactatagtgacctgtaaaaattccagtttgtattactgtttatcacagaattaccaggaaatcctagaaataatttcttcatataaccaaatcagtcatacacattgtcttcgaaacaatgtttttccaagatcgatgaggtcttttgagtgtatatagatgtgaaagaaacaagtcctttactactattctaacacctggtattacacggtttaacatggaagccaagtttccccatgatcttattcttcgtttcttcggggctttattctatgcaatggagagtaactgaaaattaagagcaaccagacttcttagctgaaaaccacatttgatattttctgcccacatttgcctgttactcaatattacacccatatgatcattacaagacctgaatacactctggacatggcaaaagtatatcggccccttcgcatgcctgcaacaatacttttaaaaacctaataaagtgatttgcaaatacccagaagtgggatcaccagtgagatacgggctaagttcagaaaggtccctgaaaccacctttacagatgtataagtaatgcgagaaatctaacatgactgactccatcttgcttctaacctcacgggctaagttttcaccgtgttgtcgttttcttattctagcacagaggctaggataactgggagagggatttcgtgtaaacttcaagacaagggaaactgaccccaccccttcctgggaaccaacgaagccgccccgagtttcagaagctcttgtgatttcatccccagccggtcaactgtttcagttccccagccccccgaagccaaaatgccctttaaaaccctcgcccccgaattctcggggagacaggtctgagaccctgttctggtttggccagccctgcgcttattaacttctttttttgctgcaacagcggttctcactggttctttccgggcagcgagcgagaagaatccgttgagccggggccggcgcccgcggggcaactgcaccgcgggggagcccagtcgccccgctcacccgtgagggccctttctcctggaaaagccgctccgccctgctgacccccacggcaccgcgcgcccagaccccaaggcggcgagggacttgcgggtttgcggcgagtggtccagaccgcggggcggaagtgaggggcgcggccgcgcgtccggggcgcgtctacccctcgctcccactcggctccgcgccgcgaccacgcgccgccctcctcgttctagaggcagcccgccagggcggggaccactcacccgcttccccggcgaccctagtccactccttggcctggcaaccggcggcttccgcggggcgggcccggcgggtcgtctctcgggttgcgggtgaaggaagccgcctgggtctggcgggaggcactgttcttggagtagccgggcctacgaagagcacgttttaaagctgttgttccacgttgcggtggaacagtgctgttaacattgagggaaattgtccccgactaactgagttctgtctgcaggttaagtgaaagcctatgtagataaatttcacgggcacagcactcagtgctagctagaacttactagctatgtgaccttgggcaattgtggaaggcgggataatgcttccgcctcaggatgtccacatcctactccctggaacctgtgcgtttgttctcttgcttggcagagggggttaagattgcagatggaattaaggttgcttatcagcggactttaaaataaggtgacgatcttggagtgtgtgcttgggtaattacaaagtaattacaagggttctctaaagtggaaggggcccaaaaagaaggtcagtatgagaaagctatttgaaggtggaggaaggggcaacagccaaggaatgcagctggcctcaagaagctggaagaggagcaggcacagtgtctcatgtttgcaatcccagtgctttggaaggcagaggcaggagaggaacactttagcccaggagttcgagatcagcctgggcaacatagtgagacactcgtctctacgaaaaattaactagacatagcgacgggcactgtggtcccagctgctcgggggattggggcaggaggatcactagagctggagagggctcatgatcccaccactgcagtccagctttggtgacagagcaagaacctgtctccaaaaaaaaaaaaaaatatatatatatatatatatatatatataaaggaggaggtgggaggtggaaaaggaggagaagctagaaaaggagggaaaaacaaaaaacaaaaaccaaattgttccccagagcttccagaagtaacagtccagctgaccccttgatttttttgttttttgaaacagggtcttgctatgttgccaagactggttttgagctcccgggctcaagcgatccgcccacctcagcctcctgagtggctgggactacaggaaaaccaccatgcacactgacgccttgattttaacccagtgagctgtatttctgaacttcagaactgtaaggtaataaattcgtgtcgttttagccacttaggttgtcacagtttgttacagaagccttaggaaactaatacagcagagtaactaaatccctctgtataaaagtatagaacctacctcataggattactgtgaacaacatctggttaccctttacttgtaagcgctgaacgtgttcattataacgtgtcaaccagagtcagagagaccgaaatccaagtaaagaagtttattggcagtctgagaattgcagttcaaggaacacagattccagaagcatttgaattgtgtcctgaccagctatttttgggtagggtttttaaaggaagtaagaagtcagttctcactagttcatccataaccttcgtaacccactattttgattgaagataaagcgttatcatgacagttcattggtttctaggcaaaagtccttgattcaggggtttgagaaaagttcagtcctcagcatgaagtccttttcataatggcagcaattttgtctgcaacatcagcaagtacattctgcagtcaggcagttgtaaaatggcattcaggaacaaaatggctttgctctggccagctccaattgccttccttccacaatgtcaaagttaatgtacaactattctgtagtgtggtgataagagaagggaaatgctacaaatcaacatttacaacatctgcactgctttctttgtactctatacaaagactagtttcaattaaaaacaaagaaggccaggcacgatggctcaggc

SEQ ID NO: 917346 - DNA, 4001 bp, Homo sapiens
cttgctatgttgcccaggctatctcgaactcctggcttcacacaatcctcccaccttggccatccaaagtgctgggattacaggggtgagccagtgcgtccagcctctttttaaaaatgagatcattggttgctgtttggacaatggacttaggaggttgaattaacaaaaatcaattatggcttaaaattcgaaattataaaaaataaaaatttcctttttatattggattaaaagccagctgaatatcccactgaaaattaacagaaatttgaacttaactttaccttttcaaaattgatctcttttatgacacagtgcttgctatctgatttccctttagctaagtatgctttcccgaaggcaccttgcccgatggccttaatcacatcgtacttatccatggtctccaatgggctgagtttcctggaattagagtaatgtaaatttatcacacacgtctcataaagactaacaaagtcagaaaactgatgactaaagtgtaaaagaactcacttagctaaaactttcctcccagccttgccaagacagagacaaataactttctttgtggccacagataactgaaatgagacagagtttcttggtcagacacgggtcatagctcagctttgatacacttttgccctgtattctcgggtaagtcacttaacctggcaaaacctcactttcctaatttctaaaatggaataacaatacctgttttgcaagtttgttctgagaatgaaagatactatatccggtgtttcgcacctttataaagcaggaatgtccttaggcttgtgcacttttatagttcagcctttcttagtggggacgtactgccccctagggggaattctggaaatatatgggggtggggaagctgtttccccaagattcagaggcatgaggtttacaggtggttggggcctgagatggtaggattctgcgattcgagagacagtcccgcacaataaaggattaccccgcggccctacaatcttggagagtcttcctatacattcctgtgcgtggaaaaatccgtttgtggctagaaccaaactctattttacatcgaaatgctaagtatttttgcagttttaatgaacacttcttttttttttcgaggaatgcaactacatgtaaatcaaggcttgattgcacttcggtttggaggtttaccaagaattgttcaccatttgggaaaaccacgcgcttcactggccacgctgctcctggtcccggagacccaacaatctgcatttgctgccgtcacgttcaggcgactccccaggcgcggctactggctacttctctacattttccaagggtagtagtgccaagcattttcagattgaaatatgtactttcttacttattgctttccttctatttcctctttatgctacagttagggcataatacagttttgttgttgttgttaatggggtgagcagggggcttgttttcgaataattttacgtcagggtgggaagtcggtactgggttgcagggggctgggaaccagctccgcagccaggagaggctgcagacaccggaggatcgggttctgagagagacgcatacggacttggggccgggggtgactcgccgggaactgagggcccgcgaccctcccgcccaagtggcaccaaagggtggaagcccccaaattaggaaaattccttctcccctagggccgcccctggaagcggccgcgggtgagtggcaagacgcttacccgtacccgacctccgcgtgtggagcgttgccatagagaccgacgcgccctggacgctacacccacacagcccaggacgctaggccttttctgggccgcccccgccgccccaggccgaaactccatccctttcccccaccctgccgagctcccgaagccctgtggcggctccgggcaagaactaagggcggcccctgcaagcgtacctgctccgccggctccgcggggccaacgaagcgtcccggaaggatccgggttcccggggccgctgcgcctccctgcggccggggcggagccgcgcaaggaaacgcgggcggggcgcgggtctggaatggcctggggaccagtccacctcgaggcagggtcaggcgccagggagtttggagacccggcagagtcaccccgcaaccgtcccgttgccttgggtcgggattcctttgctttgcagtctacagtagcgctccccgctcttgcttaaggtgcaccagacgcttcgcaaacgttctctcttttctttacaacccgtcaaggcagtagtctcccagttttacaaatgagctaaactgatacaggaagagtgtttcttgtacaaggtctcaaatattgccaaaaggtggacgtgagactggaacggcttcctactctttgggccacagcggcggcctgccaagggactttctaacgaaaccggcgctgcccaagcgtctgcactcacgcccagtgctcatcccaccctgccccattctggatttgcacatcaagctgctgtctaaaatgtttaagtagttgaaaaaaatgtaattttcagcaattgtaaatagtgacgcaagttaaatatatccaactgaatcgaaacactacagtaatatggtaccctccatcgtccacctcacacacacacacaaaaaaaacccacaaaaaactcttaaaaatcctaagtttacatcattactcttccttcttaaaatcatctctccgccgccccctccccgtccctgccacaaaaaatttcttcttcttgtaagcactctagtcaagttggattagggctgaactaaaggcctcattttgatctaattgcatctttaaagtctctgtctccgaatatagtctcattattagttattggtgttagatttcagtgtgtgaattgggggtggccgcggcgggggtgaatgcagcccgtagcaggagtccaaaagttgtttagcagttggaatatccaatgttagtttctttggcagtgaaattccctcaaaatattagtaggtatatgatctacttgtttttgtttaattacacgtgtcagtgaccacacccaaatttcttccctagaattcttagacatgcttcattaaatcatatcttcattctactttcctgatagaattttacccgttatctttttcatacttgaaagtcttattgatcatcctatcatactgctgaaagaagtacagaaatggaaatttatatttcctgctcatagaattttagtttttctggattaaattgttaaaattactagtactacacaattgatcacaataaaatgtatcacaatactgataattattaaatataaaaaataaaattgtattgaaaattcatctctttaagacctggatgggcttcccatgcaccgttagttcctgtatccatagatgaatgctaacttcttgctacaatgaagtttaacactgattctcttccattttcttaaggctgtaagtgctgagaaataagtacataggaatgaaaagttttgttaaaagtgtccctcaatttttgtctagttgtatctcaagaatcatatagtaatctgtcaccaaaactggtttataatcatgaactgataattccattagtcttctgaaattttattaaaagcaaaaccccataagccattctgattttgaaaaggatttattatccaatacttatccagtctctcagtaactgtacataatttcaagttttttttgtttgatggttttgaaatgtttatgcccttgggcaatgccaagattgaagatgactaagaggtatggaatacagtatatatggaagctgagtacctggaaatgtccttaaaactatccatgcctgctttaacttgaaaaatcttcaagagagtagtaagctaatttcaaagagctaacccaagtaattttgggaaatggtatttgactggaaactatgagacaataggaaagatacataaactctgtaccttagttggtaaatttgtttctcc

SEQ ID NO: 917347 - DNA, 4001 bp, Homo sapiens
ttagagttatttaatctgagaagagcaactgatgctttaaagaggaaaagaccctagacaagttcaaggaaagatcatattaacaggctccttgtcaaatttctttctttttttttttttttttgagacagagtgtcgctgtgtcacccaggctggagtgcagtggcgcgatctcggctcactgcaagctccgcctcccgggttcacgccattctcctgcctcagcctccccagtagctgcgactaaaggcgcccgccaccacgcctggctgattttttttttttttttttgtatttttagtggagacgggggtttcaccgtgttggccaggatcgtctcgatctcctgacctcgtgatccgcccgcctcggcctcccaaagtgctgggattacaggcgtgagccacggcgtccagcccttgttaaatttcttaattccacagaagtacaaaataaagtttgttaaaaacatgtgatttcatgaatcgttaaagaaattacaattagattcagcaactctgattttaaacaatacaaacaaggacatgtgcaaagatgtgatttccagtaagataatttaatagatattactatacataccacttcctacatccgtgatccagacggattgttcatatagagtactggctgcaaatataccatgaggtgtgtcaactgtataattccaggctcgtaggaaatatccatcctctgtgaacactaatatctttgggatgttatcccctctctgaaggtatacaaaaaataacttcttaggatcagcttaaaggaaaggtaatctgtatcttggcgaagaaaaaaaataactgagaattttactacaaaaaccactttcaaaatctaacatatctttcacattcgaaaccaaaatacttgagaccaactcaaaaataaattgcacaattagcatgatataaacgcatatggtcagttactacagcaagacaggaaggctgttacttcctttgtgttcataatttttttaaatctctatttacttacttgacctatgtaaaccaatccattgagggagtcaactgcaacacaaaatgttgttccggtaaaatattctgggtgcttaggccaacccacatccagccggtaaagaattttctcagttctccaggaaactgcaaaagtaaagttcctcaaaaccttaaacaaaatcagacaattcagatttagtttaccgtctaggtaagaacaaaaaaagggcgggggggccgggtaacagggcttatttttaagcatgccttgacaactagaagtttgctggactgaaataattccaaagaaatgagcttagatgcctaaagaccaacacgaccacaatacaagtctgcaaattatttgaggatgtagtaagagttgggaaagaggaaaatggcgatgtaacatacacaaatttttaaactcaaagggtcaaggcagtttggacccaggtgcaggctttgagacaagctactgagggaaccagggcctgccacctccatgccacgaccgtggcgacgcctcccaacagggctacccgcacacccgacagtcatttcctcactacccaactcactggagagccacaaaaacgcgaatgcaaaaccaaaaatgcaagaaagaagccagcaccggctacgcagacccagaatctcgccatgaccagacgggaagccaggagagggagggtccgcaggtgtctgggggaggacctgacagcctcaggctgcaacggtttgcagcggcacagagggtctgcccggggcccgaagaccctatctccggtttcccctccctggatgcacgagctttgagtacgaaagggaacagagaccagggcgaatgaaaatcacagaagaccagttccggacttcgtgtgcatttcggggtccccgccctcatgtcaggtgcttcgggctgacccagtgaccaccctttcccgccctcagggcagtccgcgccgctgactttcagtggccaccaaagtatgggcgcccgtagatatgccttaatcgctcgccatttattctttttaatccagagggcaaaatcaaaacatcgcacactcagacacgaggtatggtggggatgacattcaaaataatgaccgctaggcttcgggaaggatttttgccacatcctattcctaccatccaggcatccgctatggatgcctatattcccacaccaggaccccacctctggctttcaggaaagaggggcccaagctggcggcgcagtgttgagtttacttgggcgcgactggctttattgtaggtccccatgagctggtgggggctgtaggggtaaccaggcagggcgtctggcgctgttggggctgcgtttttccggagtccccctatgcgaggccgtgcccctcttcgcccggctcctggtgctccccagccgccggcccgctcccggaagctgcagcagctggtaacaaagagcctgccgggccgcctgctgccggggccgaggtatccaggagtcgggcggagcggctggggatgagcgcgagccggaccatgcgtccgggttcgcggcggtgagggtcgcggccggcggccgaggcgcaggtgcgggtcgagagaccggcgcctccctccccgccgcccgtggactctgagcgcaggtgtttctactctgccggccgctccacctgggaaagcgccttcaagagctacctctggcggcacctggccctcagctgcagggaaaccgcactcaaacctgccgccgagcccgggtttttctgcaaaactcagaggacctggctcttgcccgaggtgccctgaaccattgtgtgaataagctggggaagcctgactggagtgttttttctttttaataaaaagagtttttctgaatctcaatttttagaaattttttttgcgaagtttgcaatactctctacctcttcgcatcctctcttgctcgtggagtctttttcctcctcagctataaatattttttactatcggcggagcagaccagggatgaacgtcttttaattgcaagtataactgttaaaaccacgtcgggatagtagtcaagatggataaaaagtcctttgaaatggtgctggatgaaattagaaaggtaattagaccgattccatgaattattttatgagatgaattctcgtgttttagactctctttgaggtactgtatggagattgtgcagaataagggtcctaggattgccaaattggtttgaattttcacgtgtaatggaggagtttatatcttgatacgtttccagtacaaatagaaattaagttacgttaacgccaaatttgagactcagcacggtgtcgtgggaattacatttgtaaagccctcggttccaaagccggctttacaaatccgtaatagctctgtactttttgggtaaggggtttaatatttttgagtttattgcctcatctttcagtaacacaagagtgactgaaaacgagaggtaatacgcagaaagtttcttttatggtagttattatgatggggttttcaaatctaagcataaggtagagtatatttgttgcgttggccatgcaaaattcgtgtcctgatggtaagtgtggcattaagtttaaagtcacgttcttaggaattggccgtcaataacttgagcttcaaaacttttttctcctgctttccaagtttttgctgctttttgaggctgttgtgtggatcgcatttcccagagtgaaccagacagcaacaattctggaaggtagtcttgagcctaacaatatctcaagcacaaaaataccgagaagttacttattttaaaatgtaaggacttgatgtaccattgttacatcaacacacggtgctttccttcggccttccgggcaattattctttcgtcagctgcatacctttacgacccttgactgaaacggaagaaattgttgccatgtgctctggtgcttatttcagtttacaaagctattattaaaattgtctctggtcttgctgttt

SEQ ID NO: 917348 - DNA, 4001 bp, Homo sapiens
ttccagactacaaggggccaactctgcccccccaagacaggtgaggaacattccaagagaatcagtcacaagattgggagtgactcaagaaggagatactcagtgtgtcactcccctgctaaagacatcctgagctgcagaaactcacaggcctaccccagtgcatcagaaaaggtgtgctacaagggtgaaagctcttgggtaaatctgaaatgtgtccctcggagtttccagatgcagatgaatacagaggtagagcaaggaaaaagggcagcagtggaaatatcattcccattgtgtgtttcctttgggccaagcagatgccacaagagactgctgggtaatcaaataggagatcccagtagaaagaaaatgtggggtgatgtgctaaaagcaagagctaggaggtgggccagcatcacagaaagcccgtcacctatgtcaggaaaatctctgtgggacttcccaacaactgacaaacataccctgagaaagcacacatgtggatatcatgcccagaggacaccaatggatggatcagagcagcatcagtcacctgaatggcttgctctctctcctcctccaacacactggagaaagaaggaaactcagagacagccaggtgagaagaggaggaggatacagaaaagcagaacaatggctcacacctcctttatgcactgcaggggagggattagaaactggaagtgacactgaaggtttaaattggattggacttttaaatgcttggaagtgaatcatactgacccaaatgtgatttatttttataaccaagtgacaagaaaactatagaatttgcaggaaacgtcactgaagagggaaagaaaaaatcatgtttgaaggcagtggaaggagaaaataaaaccatttcctgtttgttctcccatcaaatttagcccactgagtatgccagttatgtaaagatcaaatgaaagtatacatgcaaagagcttggcatattatccagcctttaacaaaaagcccattagagctcaatgttggctatggtcattgacctcacgggtggatcacctgaggtcaggagttcgagaccagcctggccaacatggcgaaaccccgtctctactaaaaatacaaaaattagcacggcgtggtagcgggcgcctgtaatcccagctaccaggaggctgagacacaaaaatcgcttgaacccaggaggcggaggttgcagtgactggagatagcaccactgcactctggcctgggctacagagcgagacacagtctcaaatcaatcaatcgatcaatcaatcaatcacatggaaacggtgcaatgtcttagctgacaatatcgggctgctggaggtttacacacacctgctttcctccttttgtgtgtaagctgtgagaaacacacctcacagacgaactcccaaccaccacccagcaggggcgcagccggaaagacccagctagcaaagacctcgcctgacccagcacagcgccccctcctgggcgcgatcctacgtcgcccagaagtcgaggggaggaaccgagggaacgcgcaagaaaggacgcagcgtcagcgcggacgttctcacgcacggcacacggaagcaagcacggcgtgagttcgtccctctgcgcacgccccggtttcctcgcgtccgcggctgctcacccgaactccagatgacctccagggagttggaaactgccagctccaaccgagcctttcctcttccccaggaggacgcaacgcggatgcttgcagctggtcaccacgactccgactccgactcctggccgccgcccgcgcggctgtgcgctggccgtcatagcgcgcgggaggacgcgcctggcagcggcaggaagtgacgcgctcactaccccgtcccgcggccgcagccaatctctccccgcgagggcggaggcgccgaaatcaaagcgagagcgcctcggcctctccagctgtccgcggtgcgtaatgcgtcgcggagggctatcaggttggggaatgccgtgtttccttccgaagggcagcgtgccttagagtttcgctgtaactaaagtcgcttacagttgtgctttgaatattcatcacccgtcagcctatccactcccagattcctgcaaaccatgcatttacatgtacaagccgcctgctcttaccaacctcggcaccactgcacattcttttttccgtgaatgacctcgcccaccatggtgcacccatttgccctgtagctcaaatcagcgtggtaccaggataaggataggtcgtttagaaacatcccattataaacaactatgcttaaggtatattcataagtcatgggaggaaataaaggctaattgataaatcatgctgggaagagttagttacaaacagtggaaaacagacattttcagatgtttgcacaccatgcaccatgcaaaatacaaaccagctgaatcataaaaacaaatgactagttactgggagggttttctctctttctcattatttttacttctaccaaagtaatgtgcacatactggtaattttattttattttaattttcaccaagctagctaattttctttcttttttttttttttgtggaggtgggctgtcggtcttttgtcgaggctgatctccaactcctgtcctcaagcagtccttccacttgggcctaccagagtgctgggataacaggcgtgaaccactgcgcctgacctatagctataattttaagaagtaaaatggtgcaaaaaccgcaacaagagcaacctgaccctcctactttcagaaacaatcacttttaactctttgaactgtatttctgatatttgcctacttatttctaagtaatatgcttactctccatgttatactaaatgggtattaagcttttcacagcatctctcctcactatcaacattcacattcattacaaaggtacttacaatatcttctcaaaaaatggtagtatataaaaaggataatatattgaacaatgagattaatcccagaaatactaggttggcttaatatttgaaaagccaatgtaattcagcatattaacagagggagaaaggaaatacatataatcatctcaatagatgcagaaaaaaattaataaaatccgatactcagttgtgattaaaaaaactccacaaaatctctgagcaaactagaaataaaatgaaactttaacatgatatatggcatctacaaagacctacagctaacatcatatttaatgactgttttgagctgaattgtgtcccctcaaaattcctatgtcgaagtcctatcccccagtacctcagcatttggagacaggatcaagttaaaatgaagccactagggtaggccctattctaatgttatgactggtgtcctcgcaagaagtagagattagaacccagactgtgttctattggaagactgtatgatgacacagggagaaggcagccgtctacaagccaaggagagcagcctcagaagaaaccaagtctgctgacaccttgatcttagaattctagcctccagtattgtgagaaaattaatttatgttatttaagccacacaatctttgatactttgttatggcttgatactttgttatggcagccatagcactagcctagccttatcttggtgaaagacaagatttgggaggagctagggtatccactctgagcacgtttagtcatcatgttgctggagattctagttagcacaactcataaaatttaaaaatcaataaaacgtagttaaattggaaaggaataagtaaccgtcttttttttttaaaacaatcctgaggaattaattaaaaagccattagaagaaataagtttagcaaggtcgtaggattcaaggttaatatacacaattgattatatttctatatattagcaatgaacaattgaaaagtaaatttttaaaacaataccatttataataccataaaaaacataaaatacttagaaatatatttagcaaaagatatggaacacttgtatacag

SEQ ID NO: 917349 - DNA, 4001 bp, Homo sapiens
acataatggtattgcacacttactagactatggtataatgtaaaaataacttttttgccccataggatctgcaggaaaacatacttttacatgcaacggaaaaccaaaaaaaaaataattgtgtgacttgctttactgcagtggtctgtaactgaacccacaagagctccaaggtatccccagatctagaatccaactacttctcaccatcccttgggcttcaccctggtccaagtctccaatatctcttgtttagaaaagtaactacaatagcttcctaaccggtttccctttcagtcagttctcaccaacagacacattaatcctcttaaaacgtaaatcaggtcatgtcaatccgctgtactacccacctcacaacagtaaaagtcaaagtcccacgatctacaaagacataccaggtcttaccctcctcccccatcttctacaattatactccagactcagtcctctgtagccacactggttcccattctgatgtatagcttctaagcctcaagacctttgcacttgcagttccttctgcccgtacccctattctcccagttgtatgcatggctgtgatctctcacctccctaaagtcttcgctcatatgtcaccttccttatgactaacaatgacatttaaaactgcactacctggcccggcgtggtggctcatgcctgtaatcccaacactttgggaggctgaggcgggcggatgcctgagctcaggagttagagacaggcctgtccaacacggggcaaccccctttctactaaaaatataaaaaattagccgggtgtggtggcgtgggcctgtagtcccagctactcaggagtttgaggcatgagaattgcttgaactcgggaggcagaggttgcagtgagcctctctgcagagactgcataggctggagtgaagtagatcgcgctactcttcactccagcctgggcgacagagcgacactctgtctccaaaaaaaaagaaaaaaagaaaatcctgcactacttaccattcttctttgttttatctctctccatgccactcaaccttctaatgcacaatattttattttgcttattgtctgtcttcctacacaagagagataatattaagctccataatattttttgtatgttctgctcactgctatatacccagattctggtacatagtcggaattcaataaataactgctaaatggaattaacagtcaacaggaaaacattctagtcagacatattttgagaacaaaggatttacaatattatataaacttagttgataaagcagcctcgacttcctgggttcaaggaatcctcctgcctcagcctcccatgcatctgcgaccacaggcatgccaccatgcctggctaattttattttttttgtagagacgggggtctcactttgctttgagatgctaatgaccagactccaagagtgcagaggcaaggcagagtagagagaggaagcagagaaaggggagaggaaagaacgggggaaaaaggtaaaggggtcgactcacgtggaaaaatagcctacctgcagggttgaaggacttctgatgccgaggaaacctatcagaagactgtctccaataccacgatgtggaagcatggaaattccaaggctggccgctgggttgaggctgagaatcaaggggagactgggcgtcgaaggggggttgcgccccgggaagaatctgggcgtcgaaggggggcggagccccggggagagactgggcctccatggggggctgcgactcagaggaaggctttgacccggctgcgggaagcgaggacgtaagtggtggtggcggtggcggcagcattgcccagaacatccagctgtcccgcggcggggcagtgtcgctcaggggccctaacgtgggagtcagctcgggagacgcatgccacccgataggagtctcgaaatcactagtcggctcagccataccactggcgggtccggagtctagcacgcgactgtggagcaagcattaggcgtcacttcctttaccgtgaactacaaggctcagccaaccacaggctttacgtcatttctcggcgccgggaaacctgccattcttcgctgctgatcgcgggattctttttggatagggttgacgttcgtggatagactcatatctgtgaccagtgtccgccaccgcggatggcaagagacctgatcggaccggccctgccgcccggcttcaaggcccgcggaacagcggaggacgaagagcgggacccgagccctggtaagcggcggcgtctccgctgcccaccaggcccatctacccactccctggccgggccctgctcgctgaagaaagtcggaggcctaggagggcggaggagtggggagtgggcgcggcctgacccgagagaacttttctcttcccaaacagtagcaggggggaggaggctgggggaccctcctagaaacgagctttggcgtggtttggcttcgtgatgataatacattctcatttagccttaatatgagctgcacgctgccctaactgactgatacccactcagtcatttaagccgtataagaaaaaaactattttcccatgttgcaaatgggtacgcccaagcccatgccagtgtctagatcatactgctagcaagtgatggagcgcgacttagaaggaagcggttctcttaacctctgtgccatattgccttctgattacaagaaccttgcagatcctgttctctccagcccccgacctgccttcctagcctctcattctgttattgcatctgacaaacacagcccaatactcaatccagtctgagttgctgcgcaattccttaacgctctaggcttctgggcttcctctggttgcattcctaaacataactgacaaacttctccccatccttcaaggcccaacttaaatgtcacaccaataaaacctttccagattccccgaagcattgtcatgcctttctttttgccctcgggttttttcctaattacattgcatatttagtacactgtatttgaataatttgtcgacataatctgtctccaccattgcactatggtcttctacctgaacacgcaacaggcacttggtatatacgaaacgaatgcttctcggattccggcatgcatacctatctgctttaatgtttattcacatttgtagactagcaccgacacccagttggagaagagtaaagctgaaagagtaaccctgccatttctgaatctaatttttcttcctggtctacccggaggctatgtttctactacaggcccctttccaatataatttctgtcataaccactttaaaaattatgccttccagctgagcgaggtggcacaagcctgtaatctcagcactttgagaggctgagacggggcggatcacttgaactcaggagttcaagaccagcctggccaacatgttgaaaccccatctctactaaaaatacaaaaattagccgggcgtggtggcgggcgcctgtaatcccagctgctctggaggctgaggcaggagaatcgcttgaacccaggaggcggaggttgcagtgagccgagagtgccactgcgctccagcctgggcgacggaacgagagtttgtctcaataaataaataaataaaagtaaatgtgaaaaattatgctttccttcctgtaggagatagctttaaaaaaataaaataaggccaggtgcggtggctcacgcctgtgaacccagcgctttgggaggccgaggcgggcggatcacgaggtcgagagatcgagaccattctggccaacatggtgaaaccctgtctctactaaaaatacaaaaattagccaggcatggtggcacgtacctgtagtcccagctacttgggaggctgaggcaggagaattgcttgaacctgggaggcggaggttgcggtgagccgagatcgcgccactgcactccagcctggcgacagagtgagactctgtctcaaaaaaaaaaaagaaaaagattcttcgtatatat

SEQ ID NO: 917350 - DNA, 4001 bp, Homo sapiens
ctaggacaggctttctaagatcaggaccatgagagaaatataaaaattaattcatcaagtcataagcaacattaaaaaaaaaaagaaatagaaaatatcaaagtgcatcccatgaagtaagggtatctttctctgaaacttcatttcagttatttagggtggtagttgtgtgtttgtttttaacagtgggtctgcatagctaaaataaaaagatgggctcaagatgagtcccgctcaagatgagtccccagaggttccagcagaagtggaccttgcagactatggtaagtttttttttcttttttaaacttcattctaacgatggcgggtaatgattaaagagagagcaatgggaattttgtttttcaattactctggctaaaatgtggcagaacagattgaagaagttgattggagtagttttcatctaaaacaagaaagacagctggttaaaaatctgacaagaatcaaaattattttcataagaatgtaaggatcaagagagcaagactcttaatacctaaaacagagccttgcacatgggaatctgtccaataaatatttgttccacgaatgacaatagcctaagcagggttgtggaactggaaataaagacaaacagaaatggcagaagtaacattatcagaacctgttgttgagcgagtagagtaagaataacggaggtatggatgaaaattcaaatttctgaattgactgtgtagtccgtggttcctcctccctccctttttaaactgcaggtcatgcttaagtatttgccttttaaatctacagccacatcttttaagcttcaggaagtatcttgttgacagtgtgcacactccttaactttatgaacccctccacctttatcttaaaaaaaattgagttctaaagcttaaatctctcattaaaatgtctcaccactttgtttctttctggatagttatgtttttgtcgccacctgaactaatgggttgcacaaaaacaaggaacatgctacctacgttttgtaatttaagtaaaagacaaattgagttattacaacacaacattctcgcatcagatatactaatctgcacatactgcagaaaattaccactaataaacactgtaaaaaagtgtttttgttttttttaacaaaaacagataaggtcccatgtggcacaaaagcttgaaaagctggttaaaaaccacaaagttattaaaacaccgtcatatccaaaaccgcaaatgctgcaatgaaatcggaattatctatcataaaactccacagtatgctataatttcattcattcattcaatgttcattctatgcctaagactgacacatcgctaaagctccggggtagaccccaaggcccttccacgcagtcaagaccccactaggtccaaataatgcctgaactatacgtggattctggaaacctcacagcacagaacccatcccgccctccacttcaccaggccgcgctgggcccgggtaccgcggcgagaggcctacgacgccgggcggctagattaagtgcttctctccagccccactgggaaggaagccagagggaagagacaggatggggacaccaagggagctttgcgggggtgggggtgggggtgaatccggcccaggaaggcgagaaagtgcggttacctagacgctcccgttccgaaggagaaaacgccgcctgtgctggtcccgccggcggccacggtggtggagcccagagtcccggacccgaaggagaaccctgtggacatgtctggccagggctcgacgccgtcagcaaggcgaaatgggtctgggacacttctctcgcctcaaagccgaggcgggccgggcagcatctctctcgcccggcacggacctggcgggaacttccagccccaacggcggcgaaggcaaggctgagggggtggagcaaccacgcaaaagtacgcccggcgctcgccgcgcgcacgtagcccgccggaagtgtaaccgtcacgcaatgagccctggtacgtgagtgggggacggcgagccgcgcaaggtacgctgggaccaggcgagaataggcgtactgcctaatctcttaaaggagtaggctcccagagtttaaaaacagtaaaaccatttctgtcattttttagttcttctatcgtagcatctgtactgacataatccgcactttagggtgatgaatgtcaattgctacttctatctagcctcctgccaaaattgatgctcagaatcgcagaatcggggaggtccctcctgagcatctctaagctccccactcagaaaaggaggcggcttcgggctttcgttggctgccgccccatccctaagaaggaaggggagcgtgtctgcttcctgaaggttcggaaatcaatcgaaaataatccatgcaaccgtcccacgacgtgagccccacccctgcgccccaggcctcgcggagccagttggtcgcagttgttgcgagcccgacgcccagccccgaagggggcccagaagagcgtcccaggcgtccgtggggtggccggctgtggtcctggcgcccagaagtggccaggcccgctggatttcctgggatgcggtcaagtccacaaatactgtccgtgcatcctgatgctggagggcgggaccttgggccgagcgagtgtggctccgccagaagggccctcggacacaaccggtgctggaggaactacaaagtggaaggattaggaaacgcacaggaacatgtacgaaagaaggcgaaatgtgaggtgtaacttacatttctaggataactcaagaaaaattcgcgtttaaagagaacctctctggcgaagcatcaggaaaggcttcctggtggtggtgcattcgagggttgtcatcatagtgttagtttttatttttccctcagggattgttacattactcccccaaatggttttcctactcgtgatctctaacaaaatccatcccataagcaacccccggatttatgatctaaaaagcccagtggctctttagtttggcacttgatgacctccgtatgattagtctttctaacctcatctcacagttctccctaattcagtactttaatcttccgttgagcttgggcattgccaccagctgtggactgaactatttccctcctcccccaatccatatgttaaagccctaccccaccccaatatgttggtatttggagatggagcctttgggaggtaattcaatttagatgaggtcaccttggtgggtcgcccatggcgagattagtgcccttatgagaaaaaacaacgaagagcttgttctcctctgtgtgccatgtgaggacagagcaagaaggggctttcacctggaacccaaactgccccatctttatctgggacttagcctccagaattgagagaagtaaatgtctgttgttatagccacctcagtctatggtattttgttgtatcagccaagcagactaatacaccacctctgtgtttgtataattaaaaagaaacgtacattttattttgttttttaaatttaatttatattttactttattttgagacagagtctcgctctgttgcccaggctggaatacagtggtgccatctcggctcactgcaacctccgtctcctgagttcaagcgattctcctgcctcagcctcccaagtaactgggatcacaggcgcacgccaccacgcccggttaatttctgtatttttcagtagagatgggttttcaccatgttggccaggctggtcttgaactcctggcctcaagcgatctgcccacctcggcctcccaaagtgctgggattacaggcgtaagccactgtgcccggccataacattttaaacgtcatagaagtcataatgggaatgataaaaaagaaaaaagggatatatttggattaagatataaataaaaacttcatagttatcgaacaggaggcaaaaataaaagattgttgtgagttttaaagcttcggtgatatagagaaagctattttcagtgatggctatagggtgg

SEQ ID NO: 917351 - DNA, 4001 bp, Homo sapiens
gacagactaattttgagctatataacttgctagcttagtgacttaaaactaatgacttcaccttgataagccttagttttcacatctctaaaatgggaccattaattgtacctacctcttagggttaaataagataatacaggccaggtgcggtggctcatgcctgtaatcccagcactttgggaggctgaggcaggcagatcatgaggtcaggagttcgagaccagcctgaccaacatggtgaaactccatctctactaaaaatacaaaaattagccaggcgtggtggcgggtgcctgtaatcccagctactcaggaggctgaggtgggacaatcgcttgaacctggtaggcggaggttgcagtgagccgagatcgtgccactgcactccagcctgggtgacagaatgagactctgtctcaaaaaacaaacaaacaacaacaacaacaaaaagatatatattatgtacttaacctagtcctggcatttattagacacacagtaaatgttattgctgctgtttctatctaggccctatccaaatcatttgttaattatcacatttttattatctgtaatttctgatggtcaaaataaaacaaataaaagtcttttcctcccccttctcccatttgcccttccattcaagcatgataatgtaagcagctacctgacctgtgaggaaagatcctagaggcttagagagagaagctttggcccagataagactcccccaccccaagttataccttagcaaaaatagcctaggaggtttgcagagtggggttcccgcagaaaggcccagagtgaaatgaataactgcttcttacctcctaacctctcatgccctccagcccattctcctttctttaaaggagatccaaagaggactcatcccccacggaactggcttactatgccttcaatgcacttagcctagctgtaccagcctcgttgtaatgcatgacttttggttttgtttgtttgttgctactgttgtttggagctggaaatggtcctgaagattccctgtaaagaagactgcaaagagtgaacactcccctaggcgaatgtccactggtaataacactttgctaaagaccagtaactccccccttatttctgacacccacctcctttataaaccaggccaagagaaatggtcagggcttcaactagggcactgcggctctcactccctcgagggctactgttcaccattccgggatcctgccaggcagcaaaacaactggacaaacttcccagagctgcaactcacagagtctttccctaacagttcccatcttggactatatattagaatcacctggggagaggttttttaaaatatttgatttgtatacatctatgtaggatttttttaagtacagaacccaggcatctgtacttttagagtccccccggccacccattctaatgtgcagccagatttgagaattcctctaaagcatagatattcccaaaagtcccagctggagaactgcgatatcgtctctcttgctaacaatttaattattttactgaggctttaattcatttccggggcacctatagttaacaaaatgagtcgtaaatcttttagagtgcccaggtctagccatccatgaaattgtattcaggtacccaaaagcaaatggaagggaatgaatgcagctcattcagattctggggcctcctcacctgggacacagaacctccgctgcctaagctgcggctggagctggagcccgacctggagctggagctgaagctggagctggagtcaacacctgggaaagagctgaagccggggctgggaattggaggtcccacatcccccaaatcccctgcagcttggccaaggaagaacagaagggctaggagaaatgagaggccgggcctcatcttgtcctcttagctggagccgctggctctgcagagagcccaggggcttcttatagtgcccagtggtgatttccccatggccagcatgtaggaaaagagggagtggccagggaacgtgtgaactgccccaggaggttcaggacacccaggaatctgagtcatggcccacaccttgtcagtgaggcccactctgtgagctgcccttggatccagatatcccctgccaaacattaactcaaatgtgctttgtaaagcccaatatttggtttcccacttggtacttccttgaaagagatgagaccaaagtagtctttgtggatgacacagagtttggaggctccatggaggaaaagcaaccctcagtcctttgcctcacagcacttctagtgctctcccccattttactgaatactacttttcacagacagttagggaacttgccttagggactgtggctctcctccaggagcgactgagcttccctcttcagttcctattgcccaagttgtcgttgacctgttccttacagtgactgtttctagacaaagttgtctaacaaccccactctgaaggaaagaccagcaacgttttgttccctggccaaccaggtaggactctgccctatcaagtactcaccactgtatgcttcatatagggaagagaaaacacccaaataaacaaagggatcccgatgacccagtgcccgctctcccaggccagggcactgcctcaaacccagtcaaggaggaccccaggagcagtttctctctccagaaaactttgacctctattgcccctgagcttcttgtgagccagccaggcattcaagatctcaagcttattcttcataaaactgagaaataagatgcattttctcttgctcagcagctctgaccctgggctccaggatccatttgccctgctcaacatttcacacacctttgtgacctctgccttcttccctggagaaagaaaaaggtgttagtctcggtattaagacccagctctgggccggggatgctggctcgcacctgtaatcccagcactttgggaggccaaggtgggaggatggcttgagctcaagagttggagaccatcctgggcaatgtggtgagaccctgtctctacaaaaaatgaaaaaaatagccaagtgtggcggtatgcacctgtggtcccagctacttgggaagctgaggtgggaggatcacctgagcctgggaggttgcggctgtagtgagccatgttcacaccactgcactgcagcatgggtgacagagtaaggctgtctcaaaagaacaaaaacaaacaaaaaagctgtgtcacaatgagtcggtggccttgagcatgtcacttagcccctctagggttgtaacaattcctaaattgtttgaattaaatgaaatattgtatgggaagttgcttatgacttttgacgtgccataaaaatgtcagctttttcattgtttgtttaatttcctaaagactagatcaatatgtaagattgctgggttcaaaacaaggagagaaggttcatgccccactccaccccaccccagaagctccacacaaactctcagaataagcacagtgctaatgtgagaaacagggtcttaaacccctggtacactattcagaaactggggtggtggggagggggaaggggagacaggaaaaccacaaatggatggatagagagtgaagaagaacagatagggagaaatgtgggctgtaaagttcattgttctctgtgggaagcagttcagccttggcctctttggtcaaatgttctaaccacttagatccccagtccaaggcagggaatgcatacagaatgtgtgagaatgaaaactgggagactgaatccattattctaagattgaatgcaatgaatatggacataaggagaagaatgtgtctctacctcccagcacaattcccctcttcctcccgattcccaccaaaacaaatggcaaatctgttctcatttgctagtagcctctgcatgtggctgtaatgagccttccttgtaccttttttcaaggagcatgttggtgccctgtcagaaagaaaatctcattaacagtggtatagcctgt

SEQ ID NO: 917352 - DNA, 4001 bp, Homo sapiens
ccataattatatatacctgctatgtatccacaaaaattaagaaataaaaaaattgttaagaaaaagcttacaattttagcctttttttctctgaaattggaaagtagctgtgattgtttgaggctagctgcaggatgtcaatatttgggtaacacaccgttcgtggaccgctgtcctgatgccagcacacccaggaacctcacggattgggattccaagattctgtgggtaaagaaggcaggatcagaaatgctatccagttaagtggcagcagatactacttcacctccacagagtactcttgcctatttgggaacaaagaaagtgggattaatgatgaaatgtgattttcctaaggtgcctgttggttttgcagatcagctttgttggataagttaagctcattatccaacaatgcctgtacctctccctgctctcctccctctcccccagactccctgggtttttctggttctgctcccatgctgaggtcacagttggttctttcctccttttcccaagatgccaatggacgagggaggtgcacagttggaacacttaatctgttaccttctctccagagtccttggaagctccaaagctggggtcactttgggttgtcaaaaagaaacttaagtagacctttcattcacaaagacttacttcgatttcccagtctacatatttgaaaactaattgtacttcatactggtggaaaagagaccaattcttaaaacaggtaaatttgtgactgggtaagtgctgtcctccctggtccctgaaggaatctttctccccaacccttctgggagcctcaaggctcttccctcaatccccactttattgttttttgtttgtttgtgttattattgttgttgttgttttggagacgaaatcttgctctgtcgcccagactggagtgcagtggccatgatcttggcgcacttcaacctccacctcctgggttcaagggatcctcctgcctcagcctcggagtggctgggattacaggcccgttccaccacgtctggctaattttttgtatttgtatagagacagggtttcaccagcctgttggccaggctggtctcgaactactgacctcaggtgatccacctgcctcagcctcccaaagtgctgggattacagacgtgagccacacacccggccaatccccaattcgttaaataagaatctgcaactcagtttccctgaagactattaagaggtcatgttgatgcagcccaaagatatggttttgcctatttattcttcgggagaaacaaatacaacttctgagagctcgcttcagaaaaatgcatgcatggacacgcaaatattatacatacaagttagaggtttagagaccattacaagctagttcacgaatccatagcaacgaaacaaaaaacaagacagagaagaaagacatttcaggggaaacattttcctcgcttgttgggggtgggggtggggcagagtctttggtcgtttccaacaccacacagtccaccacgatgcagggtgagctttgagaacattcagcagggcggtgatcaatggggtgagggattaactctgtttgtctcctaagcactctccctgcccacctcccagacccctcacttgggtgtgaaaaaaagtgtgagatgaaatcagagatccctaactcccccagttctctccaagtcaaatgtcttctcgccctgggctttttgttccctaaaatgaaacttcgcctcccgccacaggatctggggtgctcctgctgcctccagagaagaagggggcgctgctccgtccgaccctgcctgctgcagggacgtgcgggggtgctctttcccctgctcctcgggcacctcccgtctccctccgggtcagggcagggtcccctatacccgctccctccggccggtgggccccgctccccgatcacgcgcggctcacctggcagccccggcgaggcggacatgcgcccagcgtgcctgtgcagcctagttggtcccggaccgcagacctgtcccggggaggctgcgcaccgccccgcccctcccacccctccgaggcccagcgagcaagtgcgtgttctcgggtcctcgccccgagcagcctggccagcagcatcccgcctcgcccacttcccagtagacacagggacagcggcttccactcccgggacctctggacatcctccatcccggtttggcgggaaactgacccaggagaaagtgtttgcagaggttccaaaaaaccagcccggcgggagggttgttgccccaggagggttgtggccgccttgtcttggtccagaaatttcaccactctcctacagcccagtgcctcttttttttttttttcttttgagaaggagtctcgctctgtcgcccaggcgtccagtgcctcttatttagcgtgggatggaggcgacttactgaagcgttgtcatttccctgtatccaattacaaccctgccctccagcgcttagcaaggtggcttaaaaatagtttctatccctgcaaagagcgtttgtctgtatctccagatctagggagtaggttgccttcttgctacataacttaggattcgccttttctcttctctgaacctcagccacatcgtccagtatactagcgcctcccgaaccgttgaacttcaagatctcttccagcatcaaagagttcactgtattagcgaatgggggtgcttggagaatgcccctcttcgctcttccatggacgggcattgaatgtctcttctgcacttccatgttgatgggcatcaaacaccatgtatagcccatcctctgggaatgccagccagcaggagcaagaatgttaggttaggtgtcccaccagggcccaggtggaaagattccgccctggctgatggttgggatagccctagttaggcatttttattatcatgcttatcattttgattatttgaattccagcctctccaggaaaatattttgcattaggagaaaaaatgttctctaattttactatgtttaatcattttttcaattcttcatctggaaatagttgaccctgttttgttcccacctatgcattgatcagacatttgctgtttgattattctgtgtcaagcaccgtggagatattgaagaataatacataatctttgcttccaggagctgatgtcttataggaaaacaagaaataaattaaaaacatgattagggcttgccacttgtaaataaggggctgggaggggactaaacccaaatgaaggctttctgaagtaaaagacatcccagtgtttttccatggtgagcaggatttccagctaacgaggaaatgacttaaagaggttatttgaaaaacaagtactgggtcctagaactctagacatggaaaggacatttaaaaatatccagtcctgtaaagttaaaattgtgcaggtgctatggaaaaaaaaaagtataatggttcctctaaaaattaaaaatagaattatgacacaagccagcaattctgcttctgggaatataccccaaagaattgaaagctgagactcaaacggatacttgcacacccatgttcatagcagcattattcacaatagccaaaatgtggatgcagcccaagtgcctatcaatggatgaagaaaatgtgatgtatacattccatggaacattattcagttttaaaaatgaaggaaattctgacacatactgcaacatggaggaaccctgaggacattatgctaaacaaaagaagccagccacaaaagcacaaatactgtacgattctgcttatatgaggtgcctgagttgtcaaagttatggagacagaaattagaataatggttgccaggaattgtggggagagggaatgaggagctattgtttaatgagtatgaaattcaattttggtagatgaaaagagttctgtggatgggtggtggggtggttgcataacaatattgttgcacaataataatgccactgaaccacacttcagtatggttaagatag

SEQ ID NO: 917353 - DNA, 4001 bp, Homo sapiens
tcttcggtgaagcacaaatttcttttcgtggtctctgatcaattttaaacagttggaacaccggtagcactgttaactgctttctgggtagcctctttagcttggtgggcttgtagtacagctacagcttcatcaaccttagaacggagtgactctggagactcgagcatataaagaagttctgaattatcaatctccaacaacatgccagtgattttcccagcaagagtagggtgcatggcttgaataagaggaaagagccgttcacctaacatttgcttttgcttttgaggaggggcagatgccaacctggaggcagtcaaagtttcctgaccttgtacatgaacagcaagctgttgcattgtaacttgtggctgtgcattacgatgttgctgaggattgcgaactcccgcagcatatttataccgtggaaccgtgcgcacagcaggggtagctgcagcagcagcagcagctgcaggacgtggacccactgtctgtgttgatgtgttagcaacacgctgcgttgacatgactcgtggaacctgtgaagaagctggtctcatagtactaaatggtactctaggagcacctgggcggatagcactgggcttattttggaatggatgaggtctggcaccctgagcagtccagcgaggacttggtcttagtcgagcaatttggctaggaggatagtatgcagcatggttctgagtctgtgggacagctgtcatgaagtaacctgaaggaggtgctcgctggttgggcacagctcgtacacttgccattctctgcatatactcgttagtgaggtaagcctggcgctcttctttgcgctgagctaaagctacatacaatggctttgtggccacaattctaccgttcatttctgtaactgctttagtggcttcttctggggaggagaaacatacaaaaccaaaccctttgctgcgaccaccttccatcataacctttgcactagtgattgtaccaaatggagaaaacgctttccggagacgttcatcatcaataccatcatcaagatttttcacataaagattaacaacctggtatctggtgatcctatcttgcttcatctgttcaaatgtgcgcttaagttccgtctgccgttccacttttttctgagctcgaccaacgtaaatttgttttccattgagctcctttccattcatctcatctacagctttctgtgcatcttcatgcctttcaaagcttacaaatccaaatcctttggattttccactttcatcggtcattactttcacacttaaggcgggcccgaacttgccaaagagatccttaaggcgctcatcatccatgtcttctccaaaattcttgatgtaaacattggggaactcttttgccctagctccaagttcagcttctcgttctttacgagacttaaattgtccaacaaatactttgcgaccatttaggagcattccgttcatttttttaatagctctttcagctgcttcgtgtgtctcaaagtgtacaaatccataacccttggaaccattttcatcacaaaccacgttacacgaaaggatgttaccaaaagcagaaactgtatcatacagtgctttattattaatggacttatccagatttttaacgaatatgttgcccactccactttttcgaagtgatggatcacgctgagaccacatgatgcgtactggcttgccctttataacatcaaaattcatggtgtccagagcatgctccgcgtccttcgtatgctggaagttcacatacgcgtagttggaggagccgctggtgatcaagtccctgcagatccggatggagaggatgggccctgccgggctgaacttctcgtagagcatcgcctcagtcacgtcggggtggaggtcccccacgtagagcgaggccgttgggtagctgggggtgctggggttcattctcggcacggctgcccgcaggcacacaagccgcgacctttccgttacaggagtagagcgcgtgccggggccgggggcgtagccggagggaggggagcgggggcaagcgcagagggacaaaaatcagccgaaatcgaaaactactcaacggccgcagaacggggtcgatccgctgccgctggctgccggctgccggcggggagccagggtagcggtgtcgggtccgggcagcaggaaggccttggtctcttagttccttcttggagctgctgcggggccgctggcgggcggctcgggctcagctgcttcaccgggttattttgtaaaagagcattaatgatttttctaaaatgatttttataatccaaatttaaaatgcctgggaaaaaaataaatgaaagaatttttttctcctttctcctttagtatgtttttatatatgttctactttacacaaatatatttttataaaatattttctactttttacctcgtctctactaaaattacaaaaaattagctgggcttgatgtgctcacctgtaatcccagctactcgggaggcctaggcacgagaatcgcttgaacccgggaggtggaggttgcagtgagcagagatcgcgccactgccctctagtctgggtgacagagcgagactatctcaaacaaacaaacaaacaaacaaaaaaccccgaaaaaccgactttttatattatataacaatataaaacataataaatatgtaattttatttttcatttatttatttttattttacttatttatttttgagacggagttttgctctgtcacccaggctggagtgcagtggtgcgatctcggctcactgcaacctccacctcccaggttcaagcgattctcctgcctcagcttctaaagtagctgggattacaggcacccaccaccaagcctggctaattttttgtatttttagtagagacggggtttcaccatcttggccaggctgatcttgaactcctgacctcgtgatccacccacctcggcctcccaaagtgctgggattacaggcgtaagccaccgtgcccgaccaataaatatgtaatgttaatatagtattatatgatatagtcttttgaggtcaggttgggattcattattaagtatacgttttatgattataagtacacaatcttgtgacctaatatagctacacatctaagtaagtgatgatctgaaataattctatttaagaaaatcctttaagaaaggtccagtcccacaaaaaatatcagtttgggggaggatctgttcattctgttcatgttacaaataatttattttagggttttttgtttgtttgtttgtttagatagagtctcgttctgtcacccaggctgtagtgcagtggtgcgatcttggttcaccgcaacctccacctcccgggttcaagggattctagcgcctcagcctcccgaatagctgggattacaggcaggcactaccacgcctggctaatttttgtattgtttttagtagaaacggggtttcgccttgttggctaggctggtctagaattcctgacctcaggtgatccgcccacctacgcctgccaaagctctgggattacaggcgtgagccgccgcgcctagcctagagtagagggtttctttaaatagtggttgccactaatataaaattcaattaaaagtttaaaaatgaagttgatacacagctttttaggagcacgtccatcatttcaacaatgtggtcttgtaaaaaccaagtgctaggaagggtgtggttactcaacaatatgagatcgattttctgcctcattaacaaaagcaaaatgctcttccagagaaaggcatcttcgcagaaccatttcggtgtgttcatgggcaggaaagcagattccccacagatacagcccacggaatatacacttgggtggaagaaaaccgggatgaatgtatcaaaattccaggcttcttggagacctatgatttaatttgtaacttcattttcagatttcccagaagttttgaggattgcaatcccaagcccagtgatggtagag

SEQ ID NO: 917354 - DNA, 4001 bp, Homo sapiens
attaaatgctaaaacttcctatcaggttcattaacagtgtttaagaaaaagacaaaatgttctcatgtacaaattgaactgcctatcagattattttaagatctagttctccagaattcccaagaaagtaggactcctatttggtttagaaacgctcaatatactaagaaacaaaacagggacatctggcaccggctctattcgtaaaggcaacattctctaacagattacgctcacattcaattgtaaactccactaacaactaacaagcttcaggtcaatagataacaacacactgagaggctgaggaggacagatcacttgaggccagcagtttgagaccagcctggccaacacaacgagactactatctcaactaaaactacaaaaaattatctggccgtggtggcgcgcgcctgtagtcccagctactccgtaggcagaggcaacagaatcgcttgaactcgggaggcggaggttgcagtgagctgagatcgcgcaactgcactccagcctgagcgacagggcgagactctctccaaaacaacaacaacaacaacaacaacaacacatgaaaaagaaatataaacagccttaagatgtccccacccaagtgctcagtcgcacataaacgcaggctgcacatgacatgcattcaagacacaatgctgagtttgcttgatacaaagctatagaagacaggatcccagctgacaccagcaaacttattctagctttcagggaaactcagatgaaatgcgtctttgtgaaatccctactctaaactctcgattaaacctgagcacactttgaacgcgacagtccgctccctcctaatccttagaaagcatttcctgcctgcaaaacctttctcccgcaagccttctacaaactttttccgttctttcaacctactccacgaagccttaagcccgcccctcacctcccgccccctacacacacacacacacacacacacacacacacacacaaacacacccctccccactagggaacctcaacactctgcagacgccactccacaaggacacgcaaaacacatgtgcctgcaaacccagcccctttccacaccccccggaaacgacaccccctttctcacactccgcacgccacagcccatcccccttcctccccgcccccccttcacatcaccccagtcctcccacccacgttcccgggaacccaacctccccgcgctctccgacttgccgaaggcagtggggaggggaagcaggaagaaggaaggagggctcaggcccggcctaggcctctcagaccgccttgggaggtgagggggggagcccgcgggccgtgctcagctcccgtcggcagcagggcctcatccggcccaggcctgccctccgccgccgcggcccgccccgcccgaaaaacactcacttgccagccgcggtccatcgagtcccccgctactgcctcctccgccggctgcggctccggtccccgggtcccccaggtccggcttcttgggcccggggggcggcccagctcccccgcccgcgacggctcccggcggaaagccggccacgggtgcaccagccagagccagggggacgctgttgctatggaggccgaggcccggggcagccccggcggcagggtcctcatgcaggaactgacactcctccccgtagaagcaagtcttatccttagcgtagtagcggcagtacttcagcttcactcctaccgccgccccgccggggacacccccgacccccggcggggccaccaccgccaccgccgccgccagcgaggaggaggaaggggaggcggcggccgaggggggcgggaggccgccgccactgttcatggcaacgccgcagcctcgtcttccgccgccgcccgaggagccgccgccgccaccaccatagacgggggaggaaaggaagacgctgccggtgccggataaaagcctgggcgggtgggtctgtcccgctgcgggagccggagccgcccggggagaagggggaggggagaggggagggaggagggggtagaaggagggagggtagggggagagttgggattctctcactcactctctcgttctcttttcttaaaggggccgcgcgggacgacggggtgagcgcgcgggcccagacggggacttcgagggcgcgggcaggggaagagggagcggcagcggcaagcgggtggggaaggcggaggggccggtttatttttaaattctgcctccactcgctctctcgcgctctggttcctccgagttgtttattccattttcctcttcctgagacggccgtcgccgctgcgcgtgcgcgctgagacgcgagggcttatgggtagcgggagcgctaggggaagcctggccggcgtcgggcccccgggggcatccgcgagctatcggcggttggaccggcggctctcggtggggttccggacgcggatctggcgccgaattctcacgagacctgataccttccttatttgtatattctcttacttaaaaagccagatgtcttttttttttttttcattgaaaagagaaaattgacaaggtaaacggtcgtttggaggggccacctggggacgcggcccgagccctggctctacctgaagaatatcttctatttgccacacttcctctccccgtttcctttcttcgcccctctcctctttccccttcccctcgaaggtaatgagaactactggaccgattacgctaacctcttggccctttgtcaaaaaatggagccaaaaaggttgatttagacagaccccctgctcagtgcagcacctgttattctctgtatttatattaccaagggccttcggtaaattatgaaaaataggatgccacctgggacaacactgcttagacagcactggaagacctttataaatatactaggttgcttttctccaatcagcctagccttgatttgaaattcatttttattttttttgagacggtgaaattcatttttaaaagatagttttaacctcagcgatctctgatgtttgcgctaatacccttttaaaggctttcagaaattttaaagaattgctatgaaaggaaaagtaacattctagtttttctctgtaaaagaggttcacaaacggcagatcgctgttatgaaaaggaggggtggaagtatttaaggaattgtggcaaacaaagtcacagaagaatggatataagcaaaagtagcacactgaaaaaaatggggaaaagtggagtctagatcacaaactggtaagcttggtgatgttctctagccaaattcgaaggtaataacattgtattatggctttctgtttaaaagcagtttcgcttatttgattattcaacaaatctttattaacacgcattacgtgtaccagaaactgtggtacacttaactgtggagctggggaagcaaaagtgaacatgccgccttaagtgagttcagatggcttatcttccggttggggaggcatcaagtacacaggtccgttgtaaaccagtgtcttaagtgctaaccttatcacatttgctattagaggatattaaacatgtcagacttcttggagaaagttgatattttcatgttccaagtttgggaacatcattgaattcagacagatctggattgaaacagattaaagtgcctacactttaatagctgtgttcctctcagttaattgcttcatttctctgtgccttgtctgtacacctggattaagaatagtacctacttcataaagtataactaataatgtatataaactgtcccatgcctaataagaattcggtaggttgtaactattattaatagtattggccaggcgcagtggctcacgcctgtaatcccagcactttgggaggccaaggcgggtggatcacctgagatcaggagttcgagaccagtctggccaacctggtaaaacaccgtctctacaaaaatacaaaaaaattactgggcgtggtggcgagcgcctgtgatcccagctactgggga

SEQ ID NO: 917355 - DNA, 4001 bp, Homo sapiens
tgagacagggtctggctctgtctcccaagctggagtgcagtggtgtggtcactgtcacagctcactgcaacctcgacctccctcccagcaatcctttcacccggcctacttagtagctgggaccacaggcctgcaccaccatgcccagctaattttggtagagacagggttcttactatgttgccaaggctggtcacaaactcctgggctcaagccatcctcctgcctcagcctcccagagtgctggggttacaggtgtgagctgccacgcccggcccagagtaaaaacattttaaacataaatctgcggtctgttcttagcacctgcggctgcgtgggaggtatggaaaggcgcactttgggtttcgtgaaatctcaagtcaggtcttgacttctctctttccacagattcatctctagtctctgtaaaatgccagccctcttctgggttaacagcgcctaaccgacatgcgccactagttcttccttgtttcaaagtgttctctaaacacagagttagttcatgttttcatcagcgctgattacgtacatatgagatgtggcggacactgggctaggggctggttattctctaaggcaaatctgcacagtcactccagcctgtcccccttcccagcttcttccccaaataacattcacagagtgtcttccacccaaagacagcagggaacagccccgattcctaagaaaccctcagcgcgcctcctcacaaactcttggctgctccataaaccattggtgtaggtggaatcaagtggcttcctgcttcacaggtcttcgtctttaccactggcatttcctcctctcggaaaaccctgaggagtccctttctgggcagtcttgattctacagcctccgccttccgaagtgtgtgagtcagcacacgctaagatcacttttgatatacagtgggcattcaataaaagcttgcttactaaaaactctcacgtatccattaaagcccaggattacagaaaagccttctgacactatttgcattttggactcaaatggcatcagtaatgcacctccctaatgggtttattaaacccttaaacaacaaaggtactacttttatttcactcctacatgatatacagtagctctacgcacacaaacaagacctaatgtttacttaataaatgataaagtcagatgtaatgagtctgcaacacgcacatctcagagcgaacttcccctttatcatagcactatgcttggatattgtcatataattgttgtcatccagcagtccagaattgaaagtgcttgggcttgaatatttagcagcgccttagttttctagaacctgtgatctaccaactcgatccctgggtgaaccattcggccctcctagcaggaattacttaactgagttagaggttttcaactttggacctcaacaaacacattgtttctatcacggtgttcccaatgactcacgaggtcagatagtacttcctgattactcaccaaaccaccttactttttgcacaattcgaaacctaactttaggaaagaaggccgtttggcatactggaaacaagaaacaacgcgtgctactgcgaaccgcaccgcacggggtgcggagacttggtgtgactgtcggctccggtgggcgccccccaccgcacccggtttctcgtcaccagggctgcgccgcggggcagagcggaacgaccgcaatatccctccccgagggcgctggctgcactagctagtccactcccgagcctagcagcgccgtcaggcccacagcgccaacgccgcgcagggcaagggtgcagccactggcgggaaagtagtacgcgggccacttcctggctaggactacagggacctttgcagccccccaccccgcagcgcccacgcacctgcctagaggatccagctagctccggacgctccccgattccgcgctccttgctcgcggtacttccgtaatctaggctctccctgcccccggggctgggcgggcgccactgcgccggaaccccgccccgcaccaggcgggcgcagcgtcccaagcagggacgatagccggaacgcgcccggaatcgggtccgccaggtggggagcgggtccccggcctctggcggggtttctcttccaagatcagccggagggttcagggctttcagtttcatatttcaggagggattttgtcaatgaggattaatacaaagctcggctttgagagaggtgggtggatggtgctgtcctttaactgagaaatggaagggattcacaaggccgggaaagaagaaaatttcgggaaagttcgtggaaacaggagagtgagataataaatttactttaagccttcctgcgtttgaaattcgtgacagtgtaactagttggaaatatatttatctgccattcaagagaggcagggggctggagatacagatctgagattcactgaaatgggaataaagcaatggggaagattcagatttttaggatactgaataaaatgagaatagaaaggatagagtagagaatacagtggaaagggtatggggttgaatcctgactccacaatttattaccaagggggctggggacaaggtaatttaccaagtttcatcattacaacctactctatagggttgtctaagaaacaacaagagattctgggggaggagagagactgattcctagagttaccacatcgtaatgctcaaaatgtccaatcttcaacaaaaaattatgaggcatgcaaaaaaaaaggcgaaaaaatggccaattcaaaggaaaaaagaaatgaacagaaattgtccctgagctgaggaagcacagacataggaattattagacaaatacttcaaataaactgtcttaaacatggacaaaaagtgaaaggaaacatagaaaaataactgaaagaaacaaccaggagaacaaagtctcaataaatagagaatatgcaatagaagatgtgcaaatggtcaacaagcatgaaaaaaagcccagcataactaattatcagaaaagtgcaaattaaaactgcaatgagataccatcttacaccagtcagaatggttattattaaaaagtcaaggaacaacagatgctggcaaggctttattgaaaaggaaatgcttatacactgtcagtgggaatgtaaattagttgaaccactgtggaaaccagtttgaagatttctcaaagtgctgaaaacagaactgctattcaacccagctatcccattactgggtacatattcaaaacaagagaactcattctaccaaaaagacacatgcactagtatgttcgtcacagcacgcttcacaataggaaagacatggaatgaacttaggtgctcatcgacaatggactggataaagaaaatgtggtacatttgcaccatggaatactacgaagccataaaaagaatgaatggaatcatgtccttcacagcaacgtgactgcaactggaggccattgtcgtaagtgaattaatgaaggaacagaaaaccaaataccacatgttctaatttgtaagtgggagctaaacactgggtactcatggatataaagatggcaacaatagacactggggacaactagacagggagggagggggaggggcaagggttgaaaaactattgggtactatgctcagtccccgggtgaggggctcagtcataccccaaacctcagcaccacgaattatatgtaggtaacaagcctgcacatgtaccctctgaatctaaaataaaagttgaaattatttaaaaaacaaataaggaatattaataaagagatagaaattataaaaggaaccaaacacattttggaactgaaaagaaccaaaaagaaattgtgtagttaaaaagtacaataggaccaggcatggtggttcatgcctgtaatcctagtgtcttgggaggccaaggcgggaggatcgcttgagaccaagagtttgccttggcaacatagggagatcccctctctacaaaaaaattacaaaatta

SEQ ID NO: 917356 - DNA, 4001 bp, Homo sapiens
ctctcacctataacattcatctctgtttgttagaaaaggtcacttcatccttcaaaacttgtctcaattttcagttccaaaggaaaacactcccttaccgtagatagcatagtatgattaagagcacaggttctggagttctaaatcctgtttgccacttattggcactatagcttcgagcaagtcacattaacactcagtgcctcactttcatcttctgtaaatgggggacatacgactgttgtgagattgaataaattagttcaagcaaagcaacagaacagtatctagaacacagaattcaaaatcttggcttggtcaaatccctctattttattttcttatagcacccgggcatctcccctaataccattttacacttgttacagtctccctactagagtaaaatttctaagaaagcagaaaccatattcattccccagaagtggaagacaggagatattcagtaaatatttgttgaaaaaaatagctacaaggacgaagctgacgcccaaggaagagacctgtccaatatacaaagcctcatgcgcctgaccccaaagcccacactttacaccatactaacttgcctcctatgtaaatgcataagtcttacagctgcaattgaagtggccaacacagatgaacagaatgataaagattaaagaacactaaactgtatgggaacacagaaaacagtgaaagtccgcacgctgaattggacacaaaacaaacataggtgccactcacttccatgtcgataagctccagctctcatactgcccacctggggctcggttccctcctctttaaagagtaggatggggcaggtcgtctctaaagtgtcttcaacgtctaaaattaaatgactataaatcaagttatgtggcaatgttttaataattattttttaaaaggaagtttaacaagcacactgaaccagctgacagatggttttcaggggaccttcattttaaagaatgtgttcaagtgcctcaacaaaccttataaagtaggttaggtggtctgtgccccagaattaacgacagactcgacattgactggagacagagctcagaagcacacacaagcactccaacctgtttgtcaatctgccatcatgacagcctaggtatacagaacagtcatgaaatgtgtttagaacagtgccaaaatcaggctcaccactataccgaaaaggaaagtaagttcacgggatgcatttggtacacagtagactggggtgtcatacaattaaaacaggctttcaaatgaaacgtaaaatctattggcagtcctgacatggtataatactttaaaagataagacaaactcacaaccctaacactacttaagcaacagttcacagtgtcccttcaaaaatgctggaaagaggcaacagaacacggaaactataaggacacctaaaaagacaccctggaaagcttaagacaaagccaatgccgcggggccctggaagcagacctcgagcaatatgcctgcccaaagccatcagccgcctcggagggcgtgcgggcacccaactgcctctgccctaggcctctctgctccgcaggatccccgcgaggaacagctgcaacgagggatgcctcctgagcccgctgccacgcgaactccgggagggaggaaagcaagcggtgtagctgatgcggaaccggggcgcgggggcagccggacccagccagcgctctcccggcgccagccgcccagaggcggcacggctagaagcccagtgaagcccggacccgcgaggccccgttgctcctcaccttcagggtccgcagcgccgcgctcagcatcagctgctgcggcggccaccgcccacgccgtccggcagcgaccagcggtgctgtcccgacccagaaccccgccattgttgtccccgcagaccgcccctctgctgacctctcacacagccggagggggtggagaaggggagcgcaggagctccggcaaatcacgagccagaaacccgatgccccgccccctaacttgcggaaaggggagggtgagtggtcggccagatccgccggatccgggatccgggagtcgcgctaggacctggagggctagtcggcgggctgcgcgtccggccgctagctgagctggaggccaccggccagagccgaccccaggagtgagagagacaggggcgtgcgtgagttccggcggcctgcaccgggcaaaccccgtaccttcccagcatcggctcagcaacccacgtgcatccaggccggtcaatgtcattgagtcacctccgcgccttggccaccctggagtcccgagaatccgaagttccagacaaatgcccaaactacattcctgcatgttcgaaagcgtaaattgcaaagcacaaatccaggtaaggtttttaacgactgtaataacacataaaaagttctaggtctggaaatcagagatccgagctcaagtcctacctctggcacttaatatgtgtgtgtgaaagaaattagccacaactagagtcagtctttgttgctcgcaagcagaaacccttgttagtacaactactggccaggcgcagtggctcacgcctgtaatcccagcactctgggaggccgaggcgggaggataacctgaggtcaggagttggagaccagcctggacaacatgccgaaaccccgtctctactaaaaaatacaaaaattagctgggcgtggtggcgcactcctgtaatcccagttactcgggaggaggctgaggcaggagaattgcttgaaccctggaggtggaggttgcagtgagccggatcatgccactacactccagcctgggtgacagagcaaactccgtttcgaaaaataaaataaaaattagtacaactattaagggccgggccgtgtgctagagcctcagattccctcttacttgagagtttacaagaaccttaatggagtatatattatttccatttggagaaactgaagctgtagcagggtaaagtcactcagcgagtaaaaggtcaaactagggtttgaacccaaatctggctgccttgagggactgggctcatgttttgctatattatggaaattttaaaatatatacaaaagagataaaattgtactatgatcacccagatacccattacaccgcgtcaatgaatcaacattttgtcaatcttgtttcatctattcccctttttattttgtgcaggaatattttaaagcaaatctaagacatcagaccacctcacctataaacacatcagtattgggggttctcctcttaactactttgcatctcctgcagagtcaccttgagagagttacaaagctaggaatggcctagagtacactacagcatggtaaatgcccaaagagagagaaataaaatggggatatcagaaaggtgacatttaatggaattttagaatgtaagtagggacttttgtgacaaaatgaaaaggattatcaattttacaggacttctcacttatgtacctcagtcttcattcattttctacctgggaaacttgcttttcttttttcttttgttttttgtcttttccccatgttttaccctttggattagttttccttaggccctgtttgtttttcttataggagttctttttatgaaaggcacttgtagcagaaactgcttctcatgctatccattctccatgcattactttagtaagagtgcccctgagatctagctgggtacatggccacccagcgaaaggctgcaatagctagcctcccttacaacgaggtgtagcgccatgactaaggtctggaatgtaaggactgtgccctccatgccctcttctttcttacctaaacaaagatctacatttcccaactcccactgcagcaagggtgcttaccaagatttggttactaagttttggccaatgggacataagcacaagtgacatagacaacttttgggttatacctttaaagggaaaggcttgctttccacttgcccttctcctctttccagtttgccag

SEQ ID NO: 917357 - DNA, 4001 bp, Homo sapiens
acggtgccgggaggggcggcctcgctcagcgccccctggcgcacggagacgaaaccgatggacggcgcattgtcgttgcggtcgatgagcttgaccgtgactttgcagtgggctgggatagggttaggccccaggtctcgggcctgcacgtcaatctccagcatcccgttttcctcatagtccagattgcccttcacacggattaggccggtcttggggtcgatggagaagagctcccgcacgcggtcaggcacgtagctgctgaaagagtagagcacttcaccattgggaccttcatcggcgtcggtggcgttcagatcgatgaccactgtacccagcggagcgttctcgggcagttccaccaagtaggatggcgcctcgaagaccgggctgttgtcgttggagtcaatcaccttcacgttgatctgtacggtggcggaacgtggaggctcgccaccgtccagggcagtcagcacgagcgtatggtgattctgttgctcgcggtccagagccttctggatgaccagttctgggaacttggtgccgtcgccgcgggacttaacgtccagtccaaagaggccgtgatcgtcgcgcgtgagcaggtaggtgcggagcccattctcgccggcgtcggggtcatgtgcgctggtgagggggaagcgggtgcccggagcagcgttctccgagatgtccatttcgatctggtccgaggagaaggagggcgcgttgtcgttgatgtcctggatctctaccttgatcatgcagatctccttgtcgttggcgaacacctcgagggacagctggcacttggcattgtggcggcacagggactcgcggtcgatgcgctgcttggtgtagaggagcccgctgtctgcgtccacgtccagcaggtgcggtgcggagttctccagcacccggtagctacccgacttgctgcgccctccgccgccgcgctctgcaggcggaagcccaggctgcagtcgagcatccctgccgatgttcccgatcaccgtgccggccccttgctcctccggcacggagtagttgaggttcttgagagtgagggcaggggcccatagaagaaagcagcaacagatggaaaggtacatcccagacctgtaaggtgggggcaggagcaatcggactggaggagccagagagggagtgcgcgccagcctggggccctggcgcagcgtgcgcgcgcgacgcgagccacaagtctatgggtccttttttccctctgcacccgagctgcggcacccggtggtctctccttattctgctcaagttccctgaacctgttgatctacagcatccgcactgggtgagaagctgcggtgcagcagagctgcaggggcttggagcaaggcggtggcttcctgcggctgggggtgagccaggggtttcgtctctcccgcccggacttcgggaggctcaaacttgagcgatgaggcaggcgataagaaggaaatctcgtctgggagagatgataatgagctaaagaatcagtaggttttcctcgctcccgctagggtgctgcaaatctactcccgcccggagactccggaatactcttcacatcgagtgggggagggagcagggaggtgtgtctctaggcagatccgaaagtgaaattcttacttgctgctcgcctcccgtgatgaaattgatggggatgaagagcaacgaagacagagtcacagatatattttgaagcttccccagcgcaccgtgaaatgtctgcttgctgcgcgggccggtctgttttcaggcagtgttttgctgcatttagagatctaatcttgcattgctggctgaggcagcggcggcggcggactgcatctaccagccaagcgtattttttttttcctctctctcctttccgagcagccaaagggaggggaggaaatgcagcgtaaagaactagtgtcccgatttgtagtttcctctccccaccaggctcctccctctcttcctcggaaaaggctctcccccgaaatcaagaaagccacagcctgatcagcatttgctgtgtgagtctattgggaggggggaagtagagagataaatcttcgcctctgttcgtagaacacactctctgatttctctacgccaagccagtagcctccgctaccatcccatcctctccccgcgagcaaggacttctctccaagcagtttaattccagtttgcttttcttcccaggcgaagggaaatcaacaggcaactcatggttggacgtgcacatttaaaggaggaggggggaggccgaataaaaaggaagggggagcctccctcccagtccttgcacacacactctccctgtctctcgctagaagggaaacagtctctgcattcacagggctgggctgtcaagtgcctcttttctttctattcagcatctccttccaatagccctgcctcccagtcctcttcatctagaaaagaaaaccttggcgaggaataaaagtgatgaatatttgaagcaaataaagtacgtgtttttttttttccttcaattttctcttatagtaggaggagtgggctggatgaaagcaacacatcaaggtttggcgtgatgcattctgcagtctctctttcagtttttctgggcgactcagggagggcagggggtgcagagctgcggccgcggcggtccagccaggggctcctaccccggggagctccctccgaggggatgttagacacaggtctgtctacacattatttcgggttctggaggcgcctcgacatacgggaatgacacatccagaaatgcaggtgttccgatctgccggatgagtcagaagcagcggaacgaatcgtattcactctcgcctcatggtcctcccttcacagacattagttgcggcttcttcctaacgctttctctgactcagtctatagaaagaaaaaccagattcatgtttttggggaaaaagaaaatgcaagagaaaaggatggagggaagaaggtgaagctgaatctagcagcacttttactctacctctttctgccggagtccgaggttctggaaaacaaggcgtctgctttgctaggtgtattggtttatttattttgtttattttttttaaacctttcctcttggttaggcgagaggtaccccgaaatttttcagagtcttggaaaaggaaaaacaaaatcaggtttccagtaattgttcccagcttagcctcgcatcatagttcaagattttcctctcaattttttctattcacaaagtccaacatcgatgtgtacagttaattgtgcagtctgttgtggaggttttttttttttttaattcctccttttctgtcacgggtggtctctttcagtctggtgtctgccgggatcaccccacagtctgagaaagatatgcggatttcaaagcaaataaatccatctccgcaagcaaagcagcggatgaaaggaaaggtgaaaattcaattcaacagttggagtagcgtctccccagccgccttccgccgctgccgcatccgccgggctcgcgatccctgctctctccccagcgtctcttgctgactgactctattcacctcacgccgccgcttaaacattgatactgattccctgtcagccaatccgagcgaggagcaaggccctgccttctcggcccgcgtccaatgggaggcggagaagaggatggcgggggcggggccaggagccccggctcttcggagtcattgattagatcagttagatggggaaccagtccggctagcggagcccagcgctccgccaaagcggacgcgccccaggattcgccaccaggtctcccgggcctttaaccaccgggagtagctcttccagcgccttccttcggaaaagagaatttacaaaaaaaagtttaacagcgatttaatttttttgtggtcctacatacacggaatcgggaatcgcagtatgcttgcagaataacgtagctgcggtctgcctaaagggtttctctacacacactctcacacacgcacgcacac

SEQ ID NO: 917358 - DNA, 4001 bp, Homo sapiens
aaacctgaagtattcctgaggcaggacaagcacatccagcagcaaaagacaagagtcagaaggagaggaggagatggaaacgctgccgctccacgcagtccctccacccccttcaacacacagggcctccctgtcgatctcctgagctgaagtgtgcagctccccagagcggttgtctagggtcacgtactggccactcagtccccgggaggccaggctgaaggagagaggggggttccactcagcaccggtgcgctctggcagctgcgactgcgggtccggcctccctgcagacctgggcagcagccgcaggtcctcggccaggctgccgatgagcacccccgcgggtagtccctcgtttaggctgtacagaagctcggtggcccggctgtaactcccgaggcagctgaagggtcccacgaagaggaaaaacagaaacagatgctggagttgggggagggaagaaagctcattacacacacggggaaataggggtccgagagagaaactagcgcccctgtgatccttgctgtccccatccccgttcccagaagcaaaacctctaattagaacgggggcggagaagaaccctgctgcgaaggagagatctgtggggcaatatcgtctccaaaacttaattttgctgttcactttctatcccctccgcccccgccttcccccctcgtttccccatcaccaccctcatccagctaacattcagaatcccaaaccgtaaaacatccctggaaacacacaccggagtggagaggattccgactcagagactgcgcaaagcgacacggaaacccagggtaggtgatggggagggagggggctggtagtagagagcactgaaaggtgggcaatttatttctccttgaagtgattctgccattagagtgctggaacacgcagtgtgttacatcccttactaagagaaccataaaaacaaccacaatcgcaataataataataatatagaaaaaataccaacacttcctcctccacctccaacactttaggtcttaggtcggaaagagtgatttttattttagcacacatctgaaatcaaaccgaaaggatctggatttccaccccttaccaagcagtcactaatccccctcccttagggggaagcaaagtaaacgcggaaaatggctatgcaaaaacaatttgtcaattgcagtaggcattcatagccagacgccagcagcaggaaacgatcccgaacccctgtagctaaagcggattgagcgcacccccgatgccctcgaccttatctggatacatttcttgcttcagaaacttcctctcatgacccacggacttccctattccttgttaaaaggaagacacattatcccaaactccctttccctcccggcgccatccttcccgtgaagtttagataaaggtagaaggtttgaaaaaccatccgagtgggaattgcttcacaatactgcaacttgtcggggtcgcggggttccttgaccctaacccttaccggcaggttcctgtagctggtgctgctcctgggacgatgtagacgccccatatccaggcgcgggtgccaggtcgccgggcaccagctcactcccagggcctgtgagctgcgcgcattccctcggccgcgcattccctgggaggctgcagtcagagcgctcttgaagggagggcggcagaagacactccctctcggttcatgcaaatcgctgggggaacttcagccaatagtcactggctcttcaattaaggacgggaactcaaagagtggcagaaaggcaagagggcagaagggcacattcatggtttcctgccccggacgcaggtaactccatactctgccagaggagctggaatgggggacttgctcctgaagactgcgaagaggcagctcggggttgggcacagtagcgcttacctaccagcctccttccttgccgcaccagtcagatgccaagtccacaggttgctagcaagagagggagaattaaaataaataaataagcttgcatttgtatatggatgtaacagagagaggaagtcggcgccacagagcaatcacaggcgcggtcccaaaacgcctgctttgccaacagttcctcctggagcctcggatccagcagtgttggcacagagaaagaaaatgcacttttctcagcggagggaaggaatctcaacttctgtgtaacgtagggtgaaccggaaaagtaaatatatgaattcagtgaaggtttcgacataccccaattttgaatctttgctgtgggcagtggtagagcttctgctagtttcctagttggaggctcaaatgtctctgggtgtttgccttgtggtcttattttagaggcagtagtggcttctggatgcggggaagagccaaggggaaagtagaaacaattgtgctgtaacacaagtagttctgcctgcaagtaatcttaaacatatttatctaagcggtaaattggtgtggggagggggaggtattcactgaagcctaggtaaaacattggttatttttcaaattagtccttccttccttgtttccttccttccttctctccccccctcccctctttccccttcccccttcccttctttcctcttccctgcttccttctttccttcccccttctttccctccccctttcctccttccttcctttccttccttccccttcccctcttccccttccccccttcctttcttccttccttcctccctccctcccttactccctagctccctcgctccctcactctctccctctttccctgcctctctccctttctctctctctttctttctcctggattgcctactggaaaactggtccttcataaaggaattgtggaagagtgtggtgccaaatgattgcctatcttctatggctttgacactgaatagctatgtaacctggagtcacctaactcctggccttctgtttcctcatttataaaatcaaggctagtgggatactccagtgcattaagcctctgaaacactttttgatctgcaggttgccatgtaagtaatggaaaagcccatgattcggcctttccttgagaagacatttctcttcatcgctaggcttccagatatcctctgcagggtcctgaacataaaacctcacatgctgaatgaccagtgactgagcctagagtgaaaaaaggtctttgatacctgatttccatatgctttctgtaggaactacttcaattttccccttccaccaaatgctaactagaatataaattgcttggctgagctaactgttttgcttcctatccttcctattttctcctcatttctaataatcctaaacacagagtcctaaatatggacaacacactacatcaaaacacctggagggtaacagcttgttattgtgcaaatggggctgtacatggagttcacaagtctctctataatacaaatttggcatacaatttgaacctggctggtaaaatcagttccttcaaaccctttacagtgaaaatggagcactgatgaagtggtaaacctcagcccccaatcaccatcaccccacccctcacccccctacccctctcccactccacctcctccccaccccacacacacactcaaaggaacatgcacatctgagttgaaggttggtaaacaagctgcagccagggaagcatgatctccctccttgtgctttttagctgctggttctgccctacagctgaacttttgccatattagtaaatatttactttgaggtctgtagttgaaacatacttgactccccaaatcagtaccaagctgcttctgaaacgtgtttaacttacatctttatacaatacccacagcttcccgaagttggaggcccacggccagagttaggcaatctgtcagcagtcagagaacctgcagtctgcaacaattctcccccagagacagagcagcagagtgggctgtttatccgctcacagctcatgccctctgcaacaagttaagatcatccacctttttg

SEQ ID NO: 917359 - DNA, 4001 bp, Homo sapiens
acgcgcacttgcactagggcgctgctggaaagctgaggggagccgccgtcgctagcttggatgcgaacgtcgagttggcgcagcgtctcatagtcgaagctgcgcagcgcgtagatggctccggtagctgggtccaccgagacataagtggacacggcgcccccggcgcggcccacctcggcctccagcagccggtaggtgacctggccgttgcggcccaggtcccggtcgcgggcggccaccgtggccaggtaggcgcctggcgggttgttctcgcgcaccgacacctcatagaccggccgcgtgaagagcggcgcgttgtcgttctcgtcgcccacacgcaccgtgtagggccgcactgtgcgcagcgggggcgcgccgcgatcctcggccaccagcgtcaagttgtactcggcgatgcgttcgcggtccagcgacgccgcggtcaccaccaggtagctgcccgcgtaggccggctgcagccggaagtgctcgtgcccatagagggcgcagcgcacttgcccgttggcgcccgagtccctgtccgaggtgctgaccagggccaccaggctctcgcgcgccgccccctccggcaccagcgaagtggcaccagcctccggcgtcccggctcccgccggcgagctagcgtccgctcccccgagtgcagcggcggcggcggcagcggcgaagggtgaggttgccggcgcgcctggggcggccagcggggtgatggcgatgtcgggtgcgttgtcattgacgtctcggatgcgcacgatgaccttgcaggtggcagcgcggggcccgggtccgcggtcctgcgcccgcacgtccagctcgtaggtgtcctgacgctcgtagtccacgggcccggccagggtgaggcggcctgatcgcgggtcaagccgaaagaggcggcgcgcctccggcggggtgcgggcgccaaatgcgaacaccacgtcgccgttaggtccctcgtcggggtcggctgcgtccaggtcgagaagcagggagcccacgggcgcgtcttccgccagctccacttcggccacggcgccctgcgggaaggccgggctgtggtcattcgcatccaggacgcgcacgctgagggcagccgtggcggagcgcggcgggcggccgccgtcctgggccaccagctccaggctgtaggcggcctggctctcgcggtccagctcctgcagcagcaccaggtctgcgcactgagcgccgtccgctcgcgtctgcagctccacgcgaaaggggctgtgcggctcggccaggcgcacggtctgcagcccgttggcgcccacgtcctcgtccaccggcacctccaaggggatgcgcgtgcccactgccgcaccctcggacacctctaccgggatctgggccctggggaagcgcggcgcgtggtcgttgacgtccctcacctctacctccacgtgcaccagccggaactgctcctgcgagaagctgaccacatcgaaggccagcacgcactgcggggcctggccacacagccgctcgcggtccaggccggcgtccccgacggtcagctgcccgtcgccttcgcgcacccggagcagagagctgttgaattgcttcatcaggcggaagcttgtgtcacccgatactttcatatgcaggtcctcggccagggtcccgatgaccgtgccgggggcatcctcctcgaaggtgctgtatcggactgttttgctctgggccactgagagcacccagcagaggctgaagagctgcaaggggaaaaggcaggggctgccccaacgcctcacaggactcatgcctccagcctcaagtgcgatccgaaaggctaaggaagtcttctctggtttccaggtcgggcgtcagtctcaggctctcggaatcacgctctttgcgagccctgtgcgggagaagtctgcgggtagcagctccgagcctccagcgggctctgaggacgcgcggacccgccctcactctgcgcctctccgtctcttacagaagctgcgccgcctcgcgccgcctttgcctttatagccgccgatatgctaatcacccgagccgggtagccaatggccgcctccccctcgcgtcgcccctccgcctgcctctgacaatccctttaatgtggaaaggcttagaggggaaaacaagaaaggaaaattagggaatctttcttttgtttaactccttttgctttttcccccttttcttgtcagcaccctgcatgtagaggagttggcacagggctccaggagtaaaaggagcggatggttttgttaattgtcgcctgcctccctccgtgccgcggctagaactaagtgcgaacacgctggggtttcaccccagtggctcctgattccgccttcccccagcccctgccaacacacacactctgcattttgcacctctgacgcttccaaacccttgcagccccctacccacagacttgctctgctgaatgaggctctgctttccttctctcctagctacggtgcctggaatagcctctcgattaagaagcctgaaggataagggaaaattgattttattcaaatttgtgtactcaattgtgttttgctcgtgtgagccccagtgatcagagctgccacttccctttcagaaaagagccccgcgatatgttagtatgcacgtcactgtccaagtggccttcttaagccctgggagctagcaggcaaggaaaaaaaagttccaaataggatttagcataagcttgaggagatttggaaaggtttcaaagatcagactgtatcaaaggcttatgaagccctcgttagcagtggaaatagaatggtgtggcaggcgatcccattggaggccccaatgtctgtattatttcactgtgacaagctaaggggagagaaagttgaacagtttccacagcggagttggactaacttgaatataatgagcaaacgccacatgtatccattatgttcctctattcatccccaatcactgccataactctccggctaaacggtgatgggcgctgaattccacacaatacccggctcgtattaaagtgcatttagagaactttttcctcctgatgccttgttccgcctatttagaggattttctttctgttctaatagggccactctgggaagcaacactcgtccggttccagaagaacaaaatcacagcgtgacgttgaaacctggcaggaacgtggggggaacttaaccatctgcttaggaaagtgtggagcttcggcactgccaaaatctgggctgggcggatcctggggctggccgggcgctgcgctgccccacagatagccccctcccatccctgacggccagggagatggagctcggatctgcaacaagacggattcttaatgattcttactgaagggctttattgagcaggctatgcaaatacacacgaaggaggaaaggtaaaaaacaaaagccactcactggaagaaatttttctttttaggcgataggtttggtaagtagattgaattcagtaaacattcttcagaatcccgattttggtcctgctgtcagcgtcctatccatgttttcctttccctcaaactcgagggagtgtgttttgggttttttttcagaagagggtcaggagtttccttggagtagggagaccaagcagggagctgggtggcagggatgagaggtgcttggaattgtcagagagcggaacatgcagctccagccatccataaatacaagctcttataagactggggagggggatgatgagtggctggagacttcctcagaggggtgtgtctctgggttcccttctccacctcttccaccttgtagtcttgggaatgctaaaagcaataaggccaggcatctgcagccgcgtggggacgtggaaggaggagcgccccctacaggagcccaaatcgcagccctttcttccgctgtcttccatctcccaagtgcgatttagtatgtagccctcccaccgtccccgcccaagagatattccttggggggtacacg

SEQ ID NO: 917360 - DNA, 4001 bp, Homo sapiens
ggcaattcctctctaatagtgtaaataagttcttgagctattgcggaatccagccttaaacaggcaatcagagcagccaacaggtaaaaatccctcaggtccatgataatgtatttattttcttttcctggattttagggtttaaaggtttccactgaggaatgatgcacaaattgcaagaggaagcgtgcatggactggaggatgcattatatctcatcacttatttggagacagccgctgtcaacacaattgtatagacaatattattcttcagtaaataaaaacacaccgtcacaaaatatcaccacacattttcccctgaacattagtaaacatggcagtttgctctgccactgtttgcaagtttactctgtggagaaaaacactaaatatctcctgctggttgcatttgccgggagaaaataaaattttctacttttgaattaaggacagctgctatttttacctatattcacgcacgttgtttttcagaatactgtttaattcaaaacatgcattcttgttctcctcttcccctccccctgtctcaccctcctcctagcctctaacctacctccctcagtcttttcaggtgcaagtgaaaaacactaagtatttagctacggttcctgctaattgctttgtcacatgtcaaatgtgttttcttctctgccccactgagtcacctatcttttctaaaaaggctatctttttctttcctcccagttcttcaactgccttctaatacaatcttactgggaaacgagcatccggacatgccgctgcagcggcatcagaagcaatagtcaccggcctctacacatcctcattgcctaaaagcacaacaacaagacttcagatttcttgcccacagcttgctctcctttctccatattgacaaattatcctcattaggattcataaacacattaaaacttttaaaaatgtataataatataggattcattttcctagaggtggaagagagtgccgagatataagtgaaacgcagctaacattcccatgtaacatcacaatattttctactgaacataaaagagaaaaaaaatgcaatttcttaatcctgatctctggttagaatattagtaacatttgccacacataaatactgcaacccaatcatgcaggtaaaaaggcttctgcttagataactgcagtttaaatgggtgcaaggctccaggcagctacctacttgagtaggactggtcagttctcaggctctaatcttatctgcattaggctgcacagtagctgatgcccgcgattagttccggcagagtgatgcaggtagggatgcagatacagccgagtaggtgagctctgccccaaccgtctacccaattacaagcatctttcgcctacactgaggacacatctaaacacagaatttacaattgtgcatgcgaaactttacacttacgttagttgcctcaacctttcccctttcccagtatgctgcagttaggaatgatttgttccaacacatagaaagccatgcatctggtagcaccagtttggggagaaatcagaagcagcaaaatgtttcctccttgtaaaatgtgttgcttcgggctggcaaattagcaactccagagaacaaattcacggatttgtcgttagtcattctctccacatttcgtctctcttacccactgggtctgggttcttctgggcatttagcacacacaacacatagttgcacttcttcagctcagggatattttccacagcagcatgcataccatttccatccgatgccaatactgcttaagtctctaacttcttgtaggaaacgtcagagttgcggtgatgatgattctctgacagctatccgggtgacagttgcccgaaaaattcctaatcggttatctcttgcgtgcttcagagactctgaggcgctcctttccgtctcgcgtgctctccctctctcccttcccctctgcccctctctccttctccctctcctctctctgaactgaatttcttgatataactctcaataagcccagagggagggcgtgactgcccaggccccgcccccgggctctgattggcctgcatcttgcggcgcgggcggccgcagcccggcgcgagggagggagcgcggaacaaggcgctgactgtctcccagcctcccctcctccgcgccccctcggcagcagcgaaaacccggaaatctgatcctggccccaggagagccgggttccatgaggtgcactgagcatgctctgcagggtccggcgtgggagggacgcgctggcgctccccaggcccgggcggaagcggcgctcgcaggcgctgaaagcgagcgaccctctgagcccgggtggtccggcgggcaagggcggcgcgggagacccgcagggcgcgggcgcggatccggggaaccagggccaccgctgcgggcggatgggggtcaccgaggcggctcgtctccaggcgcacacttcgcacatctctttgctaagtgaaggggccaaaatgcacagatgggggagtctacccaggaacagaggcgcgagacgtatagccacccctgggttgggagcacgagccagcagatccccggagcgcgttaaacggacaacatgcccggtgctgcaaatagaggcttttgctggcagggacattggaaagaagggcggagagggagtacagcgaaaggtggggaccgcagaatttggaatctctgcggagaccggaaagaaaattaatcggagcacttcctacatgcagagccacggaaactgccttggaaagagaaagtggcagcgtctgggtcccctcggtcagcccgggccagtcggctgcgcgtgcgaagtctcctctagcggagcgggaccggccgcggcggtggatcgtggcggtccctgcacttctgctccagccgcgcctggaaacctgagcccggactcgcggctgctgcaaaacccgcttccagcccacctcactgcgaactttgcttccgaggggctggaaggagtcccaggcagctgtttcccaagctgtggaacacttcctttcccctaggcactttctgctgattccaactttctttcctgtgattttcgtcttttcccgtgcatttcatttctccgactccagctctgtactaaatcctcacaagtttctcgttttcatacgggaactggatggaatgactccccaaaaaatacagctttatttctcaaatactgacccccaaagcactatctagtaatatatttgattgatctttcaaagtcagtaaaccacaaaggtttgtgtaatggcttgtacttaacgcctgatacctgagtaaagtttgaagcattaacataggaacagttcacttggaacaaaaatttattttctgaatgacctataaaggttgtcagagaaggtcttagtacatgattgaataacttggtctaacttacaggaagaataaagggcatttattttaaacctgtgtgttccccattctataatgggctgcctaggcattaaaggctcttgacatacttaagctcttgactgagggcgtgttggagattaccccttgtttttgagtacaatagttttgtttgctttttttcttttttaagtaacatttgtttttagacgtttaaatgaaaagtaaaaaaaaaaaaaaacaccaatcaagcttactaagccatatattgaataaataatgacatgatttaaccaactaatttgacatcacaattttccaacatgaaattgtaagctctttttaattcaaacttttctgagttaatattcacagttcaactgcagtgtctaaaagcccactgtaaaatccattaatcccttatatgtaaaatataaaatactttccttgcagataatagactgatattttttaaatagcaaagcaacttttattatagtaatattttgtatgattagaatatataaaattcaagaatagaaaggacttacaagtatcccaaagtgaaaagaaaaatattgcct

SEQ ID NO: 917361 - DNA, 4001 bp, Homo sapiens
gccagttcaaccagaaatatttttatccatcagaattaggaggaagcggactttttgctgtctcaccccagtggctacactgccctttgcggagatgtaggcatgcacatctccatagaagtccatcctgggcccagcccctgtctactctctctacttgttccctgggtcaccccttcccttctcagtctttcccatcatgtgactacgaaggagtctcaggtttgtatctttaacccaaatctgtctgtttaaacttcagtttacacacatagagtagaagctcgcttatcagtctcactttaactgacttgaattggaaaaatgactctctccaatccctccctgaaatacacgagctgatgcccaaggtatgatgacgactttcagcaagtaggcttcactctaatacatcgcaagcttttgccagctaagttgtatgtgttctcatatccagatgtgtttgttctcaaatctatttttgctacccgaacctgttatggtagttatgtacttttaagctcatcaatgaaatatgaatgcaaaaggaaacagttgtttctctataagctaagttgtatgtttttaaaaggctcacttgagtttgttaaaaaaataattaggtatgggggaaaaattgtaaaagattaagaaaattctaaagataatcgtatcaaattggttcttaaatgcctatatccttgtttaactttaaataaactgatattggaaaatgttaagtctgctaagattaggccaaaacagacacagcctaaagaaaaggccctgggcttacatcaaaagattggcaagtatagaacttgaggtaagtggtgtaaaaaaaaaattggcaagtgaatgtatactttcatgttttaagttaaaaacatacatccatttcttcgtgattcctgttttaaccagttttctcaattaaccaagcaactgctgggcccaatcatgtcagacttttcagctatcaagtacgtatctttacccagttgtcaacagacacctcaaactcaacatgcccaaaactttatttctccctccaaatccactctattcatctttttcccagattacaagcctgggaatcattcttaactcctccgtgtccctcagcccacccattcttattcaccacgtcttggtaatgtttccttcaaatattttaaaaatccattccctatatttcctatccctgttaccacagtgctggttctgaagacaggcatagtttagtggaaagaatatgcgttgaatctttacaagtgtccatcttttaactgtgcttctgctacttacaagctgttgaacaacatctgtcagacgcatgtaccgagcgatatgaagtgtgcattgtgctcggagagtgaagggcgttaaacgacagcgaggacgaggggcacgagcccggcctgcagcacggccacagcctcgcgcttactcctccatcgcctcctggagtccccgaattcatcccgcatcctgctgggaaacagcgtccatccgacacagcaccgcccacagcgggccctcggcgtggcccgcaggcccttcggaccgcctgggagcgcggccacacgtgccagcaagtgagggcagcgacctgggaccgccgcgtctacttacaccgcgacgactccgcgatccacggacaccgcccggcccccacggcggccctgcaggggagaactcgggccgccttcccgagtcccggccgccgctgttcggctcgcgcggctgcccgccggggacccgaacggaagaagggtggcgaggcgggaaaggaaaaggcctgagggtccaaggcaggaggggacacacggaacacgccgagggccaaccacgccgccgcgcgctccccggctaggacccacctgctgcaggtactggttaatggtaatgtgcgccatgggagcgccgccgaacggagagcgccaccccctacgcctcaagcgggccagctggcgtcacttccggccctcggtccgtctgggtcctggcgcccccggccccgccgcgggtgcgcaggttggttccggagggagaacctggggaccggctcggcgacgcgctcgggctgagggggcccggggtctttctgccggggccccgtcctctcagccgggacgccagcggctctgattgtgtgttcgggcccgcccgggctgaggggtttggggtccagtggcgaggacagccccacggctaaactgcctttcactgcgctgacccttcgtctgccccttgtgaaaaccaggccgcggaggaccctccgcgcctggctgggccagggcctcggggcgcgcgcgcccgaggagggggagggggagggacatggcgcgcgctcccgagctctcataaggtgcctccgccgcgcgctcccgagcctgcaggagttagggcacgtcccggcgcgcacccctgagccctcgaggtggtctcacgcccggggtgggggtgccgagccctcaggaggcgcgcgccccggggccctcaggagggtgtcccggctcccgatcccctcaggaggggtgcccgcggcacgcatccccgagccaggagggggtgcccggagccctgggggcagggtctcggtgcgccccccggagccgggggtgagggtcccgatccctcaggacgggagtcccggcgcgcgccctcgagccaggagggggtgtccgaatctcttagggggagtccgatccctcaggagggattcccggcgcgcgttcctaagccctcaggagtagccgggcgcggcggcggttgggctcgggcacgcgggcggggcggggcggggcgcgcgaggaggacggggcggaggccgcgcggaccggggcgggcggagcggagctcggcgggcggcggcgctcggggcggggcgcggcggttccggcccagccatggcggacgaggccccgcggaagggcagcttctcggcgctcgtgggccgcaccaacggcctcaccaagcccgcggccctggccgccgcgcccgccaagccggggggcgcgggcggctccaagaagctggtcatcaagaacttccgaggtgggtgcggcggccgggtcgagggccaggcgccccgggcggggaccccacgagaccccgcccgacttggggggaaggccccgagatccgtgcgggccccgggagcgggggcgccggggcgccggccgggtcgggggtggctacgcggggcgcttcgcggcgcgccctgagccgcccgctctccctccgccctgcagacagacctcggctgcccgacaactacacgcaggacacgtggcggaagctgcacgaggcggtgcgggccgtgcagagcagcacctccatcaggtacaacctcgaggagctctaccaggtgaggcggcggccggggctggggacgccgctcctgccccgcgtgacgcagacgcggccgggcggccgctccgggtgcctcgcaggctctcgccggggagcggaaaggcagggcgtttgcctccactgcagggccgggagccccagaggcaacaagtggttttgtttattgccgtggtggaatttttgttttcaggcttaagctgcttagaaccatatttaaagttatcccattacggaagagaaggaggtgtgtttctaggagccacgtgactcatattttgcaagtatacggcaaattattttctcgttatatgtaaaactcatgactgtgtcacttgccacagtaataagagggtcttttctctgttgtgttttgtgattaatggttgcctttaagatattcaaacagattttgaaaaaattcaaaattcagaaaaagtggttttgttctctgttgtgttttgtgattagtggttgcctttaaggtattcaaacagatttggtagcatttaattcaaagtgatggtgttccgtttctgaagtaacaaaaaagtacattttaccatacttggatattttatttataagcgactttttttctggtgtcttctttttgtaaagtaaca

SEQ ID NO: 917362 - DNA, 4001 bp, Homo sapiens
tatcgaagaggcacctattttcttaaaatattcaagaatctgttaatacataaaacttaggtaacatgccagttcaaccagaaatatttttatccatcagaattaggaggaagcggactttttgctgtctcaccccagtggctacactgccctttgcggagatgtaggcatgcacatctccatagaagtccatcctgggcccagcccctgtctactctctctacttgttccctgggtcaccccttcccttctcagtctttcccatcatgtgactacgaaggagtctcaggtttgtatctttaacccaaatctgtctgtttaaacttcagtttacacacatagagtagaagctcgcttatcagtctcactttaactgacttgaattggaaaaatgactctctccaatccctccctgaaatacacgagctgatgcccaaggtatgatgacgactttcagcaagtaggcttcactctaatacatcgcaagcttttgccagctaagttgtatgtgttctcatatccagatgtgtttgttctcaaatctatttttgctacccgaacctgttatggtagttatgtacttttaagctcatcaatgaaatatgaatgcaaaaggaaacagttgtttctctataagctaagttgtatgtttttaaaaggctcacttgagtttgttaaaaaaataattaggtatgggggaaaaattgtaaaagattaagaaaattctaaagataatcgtatcaaattggttcttaaatgcctatatccttgtttaactttaaataaactgatattggaaaatgttaagtctgctaagattaggccaaaacagacacagcctaaagaaaaggccctgggcttacatcaaaagattggcaagtatagaacttgaggtaagtggtgtaaaaaaaaaattggcaagtgaatgtatactttcatgttttaagttaaaaacatacatccatttcttcgtgattcctgttttaaccagttttctcaattaaccaagcaactgctgggcccaatcatgtcagacttttcagctatcaagtacgtatctttacccagttgtcaacagacacctcaaactcaacatgcccaaaactttatttctccctccaaatccactctattcatctttttcccagattacaagcctgggaatcattcttaactcctccgtgtccctcagcccacccattcttattcaccacgtcttggtaatgtttccttcaaatattttaaaaatccattccctatatttcctatccctgttaccacagtgctggttctgaagacaggcatagtttagtggaaagaatatgcgttgaatctttacaagtgtccatcttttaactgtgcttctgctacttacaagctgttgaacaacatctgtcagacgcatgtaccgagcgatatgaagtgtgcattgtgctcggagagtgaagggcgttaaacgacagcgaggacgaggggcacgagcccggcctgcagcacggccacagcctcgcgcttactcctccatcgcctcctggagtccccgaattcatcccgcatcctgctgggaaacagcgtccatccgacacagcaccgcccacagcgggccctcggcgtggcccgcaggcccttcggaccgcctgggagcgcggccacacgtgccagcaagtgagggcagcgacctgggaccgccgcgtctacttacaccgcgacgactccgcgatccacggacaccgcccggcccccacggcggccctgcaggggagaactcgggccgccttcccgagtcccggccgccgctgttcggctcgcgcggctgcccgccggggacccgaacggaagaagggtggcgaggcgggaaaggaaaaggcctgagggtccaaggcaggaggggacacacggaacacgccgagggccaaccacgccgccgcgcgctccccggctaggacccacctgctgcaggtactggttaatggtaatgtgcgccatgggagcgccgccgaacggagagcgccaccccctacgcctcaagcgggccagctggcgtcacttccggccctcggtccgtctgggtcctggcgcccccggccccgccgcgggtgcgcaggttggttccggagggagaacctggggaccggctcggcgacgcgctcgggctgagggggcccggggtctttctgccggggccccgtcctctcagccgggacgccagcggctctgattgtgtgttcgggcccgcccgggctgaggggtttggggtccagtggcgaggacagccccacggctaaactgcctttcactgcgctgacccttcgtctgccccttgtgaaaaccaggccgcggaggaccctccgcgcctggctgggccagggcctcggggcgcgcgcgcccgaggagggggagggggagggacatggcgcgcgctcccgagctctcataaggtgcctccgccgcgcgctcccgagcctgcaggagttagggcacgtcccggcgcgcacccctgagccctcgaggtggtctcacgcccggggtgggggtgccgagccctcaggaggcgcgcgccccggggccctcaggagggtgtcccggctcccgatcccctcaggaggggtgcccgcggcacgcatccccgagccaggagggggtgcccggagccctgggggcagggtctcggtgcgccccccggagccgggggtgagggtcccgatccctcaggacgggagtcccggcgcgcgccctcgagccaggagggggtgtccgaatctcttagggggagtccgatccctcaggagggattcccggcgcgcgttcctaagccctcaggagtagccgggcgcggcggcggttgggctcgggcacgcgggcggggcggggcggggcgcgcgaggaggacggggcggaggccgcgcggaccggggcgggcggagcggagctcggcgggcggcggcgctcggggcggggcgcggcggttccggcccagccatggcggacgaggccccgcggaagggcagcttctcggcgctcgtgggccgcaccaacggcctcaccaagcccgcggccctggccgccgcgcccgccaagccggggggcgcgggcggctccaagaagctggtcatcaagaacttccgaggtgggtgcggcggccgggtcgagggccaggcgccccgggcggggaccccacgagaccccgcccgacttggggggaaggccccgagatccgtgcgggccccgggagcgggggcgccggggcgccggccgggtcgggggtggctacgcggggcgcttcgcggcgcgccctgagccgcccgctctccctccgccctgcagacagacctcggctgcccgacaactacacgcaggacacgtggcggaagctgcacgaggcggtgcgggccgtgcagagcagcacctccatcaggtacaacctcgaggagctctaccaggtgaggcggcggccggggctggggacgccgctcctgccccgcgtgacgcagacgcggccgggcggccgctccgggtgcctcgcaggctctcgccggggagcggaaaggcagggcgtttgcctccactgcagggccgggagccccagaggcaacaagtggttttgtttattgccgtggtggaatttttgttttcaggcttaagctgcttagaaccatatttaaagttatcccattacggaagagaaggaggtgtgtttctaggagccacgtgactcatattttgcaagtatacggcaaattattttctcgttatatgtaaaactcatgactgtgtcacttgccacagtaataagagggtcttttctctgttgtgttttgtgattaatggttgcctttaagatattcaaacagattttgaaaaaattcaaaattcagaaaaagtggttttgttctctgttgtgttttgtgattagtggttgcctttaaggtattcaaacagatttggtagcatttaattcaaagtgatggtgttccgtttctgaagtaacaaaaaagtacatt

SEQ ID NO: 917363 - DNA, 4001 bp, Homo sapiens
tataaagtctaaagtgcatcttgttagacatatttgtaaatgtatattaagtacaaattttatttataaggaataatgttcttaagatgtgtttttacagttaagtttctgagactaaatctatcttcacataaaagttcccatgtaattttcacctacatattcagcactacaaattttaattaggttttctgctatcaccatgagatacaagattaattgttgcacgaactgacctgcatacaccattgaatactcattttattgtccctaaagatgcgaacatctcagacatgtgtactgcatgaagagctgtctttcaagtccatatttgtggcttttaattactttacctgaccactacatgagttaatataaaaaacgttctgtctgggaactcgggatgtgttaactgagaacaatgactatactgccgttcaagcattgggtaattacgatttatttacagctcgcctcctgtatgtaaacacaacttgagtttttgaagttcattaggaagatagtataggattacccaactctctccacaccgcagaccaaccctctaaattaaggctatacccaaagttttcgaaactatttcatcaacagggtaggatcagtctgggcaccactgcccatccatcacctcttattaaaagtacgagaagcactttcttcgacataaaaaagggttaaccctcgctgggggagagaggctgttgaagacgcgcgtggagtgggtgggtagctgctctaccaacccttcccggagctcgccccgtccgcggcaaggaacgcagcagcctgcagctccgaaggcgaggggcggcgtttctggtttcagtcattcgtccaaaataactgtcgagctacttaagagttagctttcacgtctctaccaaaaaccaacagcagtagcagcaacaacaacaaacaaggtttttctccggaccgaaaacttttaaagtaacattaaaataacagtgtaaaaacaataacgagtcacaattgcacaccattttccccgccgttccttctgaaaggaaagctagaacccagttgtggcctgggaggagtccctccacgccagtgctgggctcttcctcaactggctgctcggggaccactcggggtggcgcggtgagcgcgatttccctccggcgagcggcgagggacagtgcaaaaatgtcacgctcagcccgtcccctggcccgaagcggaggccaggcggcgcgcggggacccggcggcgggggcgagagcgcccgcggccccgacccgcggtccccgcccgcccctcgcccggaagggggagaagcccgcccgcgggaggattcaacaggagcaccgcgccgcccgcctgccgcccgggaaacagccgccggccggccggggcgcggggggaggggcgcggcggcggcgacggcggcggcgggagggcgcgggcggccgggcggccccgagacccccgcccgcgcgcaaggtcaccgcccgccgccgccgccgccccggccgggatcagagcggcaagtttaattttccagaggctgcggcagaacccgcggcgtggaggcgcgcgccggccgcggggccctccccacccccaccgcgcagccggcccgcgccccgcgacccccgccccgggccaccgccaggcagccacccgctgcagcccccgatgccgggaggcgagtcgcgcctggcacccaggcgggcggcgcttcagccctgccacacacacgcacacagcggcagtggcggccgctgaaaaatggagcgccgcagccagagaagagagacattttctttccgttaactgaattgtttcctacctccgggttgccgactcgctactccgctcactccggggctctccgggatccgccgccgccgccgcatccaatcgccttctccccccccctccccttccgcagccagccctgccgttcctcctcctctccgcttcaaaatggcgccaagcgctcttcggcggctgctccaatcgaaccgccgcggacagcacccgggggcaggcagagcgcggcatgggtgcgcagcgccccctgccgaccagacggccccgagcgcgtccgccctccgagctccaccccgccccgtccgcgcgcgcgcacgtccctcctcagccccgccccgtccgcgcgcacgcaaccacacgggcacgccgccgcggggcccgcgagaagggcagctgtcaaggcgtccactactcttgcggcttcctagacctctaccgacaaaaaccacaccgattgttacgtagccctatctttttagataaaggttgggagatttttttaaaccctgacattcagcacaggtgttgtgatgggtaaacagaattggtattattaactactttgctccttacttgttaactctgacctagtcgtctcggaatgccatacaaatagttttcctacactttacgtgttatgtctttattaaatctccccgctttcctaatttgaggaattgtttataggtggtaggctggcggagacagagtaattgagcctgtgacgaagcattccattcctttggcagaattgtccttattagaggaagaaatcatctggagaccacagggacacattccaggaggtgggtctcctcccctcttcacctctaagggatgccagtccctcctgcagctgtagagtgggtttagcctggtcaccacagcagatcacctaccttgcgggaaggtttcctccccagccgggtccctgccagagctgaagaagggacttcctcctctttttactttaataccatccctgctgtaaggaagtttcccctgatatgatgtatttggttactagaattttgttccagggagaatttgtttcaacaatgaacaagcaaagtgtgaatgaatggattacagtaggatacttatcaactgaaacaaaagagaggtaatgctgatatataaactaatgctactgtgttagaaaaggtatgtacatcggtattccatcggacccgggcacctagagatactgagacctcttcatttccatttttgtgggattcgctggacaattccgcctcagtctcctccagtgcttgctagaccaatatgttgtgttactgtattcctgtgtccaagattttgccactgaatactccaggttctacccattttatacattcctcgatgaagtctactatgagttttttctgccctctttttaaaattatctcaggaattttcttattttacatcgttgttccatcaacataaatcttgtatgggagagtaggatgtctagatctagaaaaacctttcctctttggttgtttttattatgttttttactttattttcttcaattcccaaacctccaaagccaggaagccagaaagtttcagaagaaagccaggatgaaagcaagaatttttttttcttttttctttcttttttttttttttttttttgagatggagtcttgatctgtcgccaagctggagtgcagtggcgcgatcttggctcgctgcaacctccctcttgagttcacgcaattcccctgcctcagcctcccaagcagctgggactacaggcacacaccaccactctcagctaattttttgtaattcttagtagagacagagtttcaccatgttggccaggatggtctcgatctcctgacctcgtgatctgcctgcctcagcctcccaaagtgctaggattacaggcgtgagccaccatgcccggctaagagtttttgtataaattattcagtgctcttatccccattatttgacacctggaagcctcagtaaatattttgttggatgtatgaattgtttaagaatgtcactctacatcttgtatatggcagtgagtcctgaaagggctgaaggtgtcacgtcaactttgtgagcagttttgccagtttcaccattaaccctctctcttataaaatgatgccttgaatttcaatgaggcccggaatacatattgcccacgttagg

SEQ ID NO: 917364 - DNA, 4001 bp, Homo sapiens
agagaggtctggaggggaggcagccctggaagaaaactgggtgaggacgaggagccccccacctttgttcgagggactgtcctcccgcctcctaagaaccccgcatttccggagacttcaaggcctttggcccgggctgcgcgagctggataaatttgcagaggcgccgcggcagcttctggcgcccctgtcaactgggtttcgctggaggtggggacgattgcagcgcagttcagccctcgtcctgcctcaggaccttcgccttagcaagaaagtgaactaggaagaagagagtcccgtggaccccaggcaagctggggtccccctccctctcccgcacaaagcccctcctggctgcgcctggggtcagtgtcaggcagggctggccagaccccgcagatgggcgctgaggattttcggggtgggccgggggacgccggctcgagctgcttccccctactcccggctgccagttgaaaggaaaaggcaactatttgcggtgcaggtgtgaccagaagtggctgaggcacggcagcgatgacagtgagtagcggcgacgacacaggccgcgccggaacttgccgctcgcgcggggccgcaaaggacccgggggctaccccgtgcctccggctcccggctccgggaaagaccttctgttctctgccggcgcggagggccgcaggaaccaggcctctcgcctccccaccagctaggcagggagcgcccatctcctgaaaaattacttcctgggaagcggtgcggggagacagcttcaattgctttcggttggtgaaaaacgaattcgcttctcagattgctctcctagctgccaggctctgacgttgagaggccggctttcagcctcgcggtgagcccccgccttgccccagccccttcctctttactcctatcctgtttccacaaccagggcagccggacactgctgggttgggtgcagtttcctttccctccctgcctttctgcacctacctggcgcccctagatgcctgcccttccttaacgaagcgcgggaagtgaggggctccggggctccgaaggcgatctggggcctgggtccgaggcacccatgtccctactcggcttcctcgatgtgcactaccaaggagtcctgggttcccggatcccctgctggaggaggatctgtagtgtccgaagccctgagcaggactcagcctcggctctctaaggatggcgctgggagcgcgggctcctggggcgaagatgggctcagcgaacagggaaggaaggagtgtacactcccaggagagctgggtgggaaagatgcttcaaactggactagagaagcactgctgtgagggatgggctcggtagctccctgatgtagtttagtccgacccgggataatccaaggcgccgggaacagagagaaggctcctgggagcgcttggaggtaaggcggccgggtgagaaccggaaaggagaaaggggtggggagccaggcttacctgcccactggcctttccacgcgtgagctttggtagacttcatccatgggaaaggcagctggacgcggttgggctcctccaggacgcccggctcggctccctccgggaagggcccggcgggcgggtgggggagcgcgagctgagccgggaggtggtggtgaaggtgcgccaccgcggggtcgtcggcgagggggggcacctcgtacggggagatgtccggggggctgccctgctccagcgcgcccagggcgccagggaacgggtgcggcggcggcggcgggggctggcggcccatgtacaggcacgcaggggggctggcgctgaactccggcgccgggcctcgctggaacgcgcatgggtccttgtaaagctgcgtggccgcgtagtactgctcctcgccgttcatggctgcggcccgggattgggcaccgggagccgggagccgggagccgggagtcgggagctggagccggggatttggcactgtgtggcgttcccactcccggcgccacccctgctcgctttgacagctccgcactgatctcagagggaacccacagccagcgcggaccggcgggccggccgccgcaccataggctccgcggggccccacgtggttcagccgggggccgtgattggcctggctggccgcactaagaggctaggcccaggtacccgcgagcacctgcttttgttccaattttctctctcagctgagtttgctgcacactcctgaacgggcagctggcggtgctccccaaaatgggcgctcacgaaaacattagaaccactcatttatagaaacattttcaccgtggcttaaaagtttctattttcctatatttttctattttctattttcctatattttttctattatatttgataatggacatagtgtgtttgttaattgatgtagtttacaaggagacatgttgagtttttaattttttatttaactgttgcggaatacgataaaaaaaaagtttgcagacccagctctctaggtcagaagcatttgattctattttatttatgaagtttgttcacagccacaaagatgtcggttaaaaaacacacgaaactctggcattcgttgtgtgtttttacttgtggatgtgctgcaagtacttctggggtgtaaacggtaacttctgaagcattcacagagacttttttaaattcttttttttaaaaaattgaagggtattacaaatttgggttttggaaaattggggcccatttggccagcccggaacgtagcttcccaatacagcgagggggaaagacgcggccttcctcttggggctgcgaagcaggggcaggtgttggcacgggggttccagacccttgacgactctctacgggccgggaccctggcggagtttgccggcagagaacactcactctcttctgcttgcaattgaaataaggcaagcaggagagggggaagtggaggaagagttacatatttagaaaaagaaataaaaacgctgcattttccatgataacatctgtgcttggcttcaaaccattcagtaacttctgggcattctggggtcctgacttaaacagggccactttttctgcacccactgacgcggatggatgacctccgggtggcggtgacgtccaaccccctgcctgggcatgatccgctaggcctggcggcctgaccagcctctgactggatactcccgaaatgaggacgtttctcgaaacgccaccgtgggttttagaaaaactagacagctttgcagaaacgtctcagcaagagagagcttgaaccacaaagaaccaagccagagaaaaatcactgctccgcctttcctaaacaacgcaccaacatccagacctttgagagtcaatcttaatgtatttctttcttcctactggaaatatttgtgttttaagtgcggattgagtgctctattctgaggactctttatttttattaaaagacaaaaaagccagtcgggaatgtggacttctctgcagattccttctcttgcgggaggccggtatagtctcagcatttgcttcgatgtgtgagaactcatgtgtgtggcttcctggcctgtggcctcatgtgtgtggctctgatgtgtggctccctggcttgtagatgcccttgctgtcaccgaagacaggccaagggaagcacggcggcgggcggggagagtttcggtgatttcttcagggaaaagtgccacctgcagttttggtgggggcagagagtgaaaggccgtggggcccgggcacctaatctctgtgcgcccgcgtcaatgagtccattgtctgcggccgcggagaactctaccctatcaccctggccgcgagtgaccacatcgatcaggagggcaggctggagggggttgcctggccgcggcgtgttgacccttggagataatctgccgagtcgccgagggttgacttggcgacgcggttatgagcggacggcaagctccgctcaggacaaagatcggccacttttcccctccccctccttttcct

SEQ ID NO: 917365 - DNA, 4001 bp, Homo sapiens
tgctttttgtttttcaaaaagcattttggccgctctgcaggcctgcctgtattaaaggctagaatagaagccaggaaagcaatagtccagacagaagatcatgatggcgtaggcttgggtggcagtaatggaagtggtgagaagcagtcaggctccagatacagtcaggctgaacacagaactggctggcccgactgatgcattagaaggggtgtccggaggaaagagaggccctgaggagccactaaggtttttgcaaggagcacctgggcgaatggaatgggctggtggttgagcaggtttggagtacctgaatacagtggaggaaacaagaattctctttgggacatactcagtttgagatcatttcagaaatggaagaagttggttataccagtctggagtttgaggaagaggtcaggatggaagcgcatctcccgtgacttaccttacagtccatatgtataccaatgaatgaaatatccaactgattggcttgtggttgccacgtatgatgtttacgtgtgacgttttgtggtttggtgcctttgtgtcatcctctctgctgggaacaccccttcaacttttccacctttggctgagtcttgccctttaaaggtaagcccatgaaacatggagaaaccctctctactaaaaatacaaaattagctgggcgtggtggcacatgcctgtaatcccatccactcgggaggctgaggcaggagaatcgcttgaacccgggaggcagaggttgcagtgggccgagatagcgcctttgcactccagcctgggcaacaagagtgaaactcctctcaaaaaaaaaaaaaaaaaaaaagggtaagcccagccatcctctcctcaaaaagctttccctgaagactgggagtcaggagtctctcatctgtacctctgtggttctgacctcctcattaaagttgcctagtagagtctctagggcagggtctgcctaactcatctttgtatgctcaggaccttgccctgagcctggcacaccgtttggagctatacacacacgcaagggcaggaacccatcagaagacccacccactcaagtagagggccggggaggactggaacgactggagaaggggagacgggttccagtcacgtcctccgtgaacgtgagacccagctcttccctcagggccgccccctgcctcaccgcatcagggcgcccctccactgtcctggtttaccggtgagcggaggggcgctaggagagttgacatcggttgtggtggaagcactgggctgtcacccgcgggggaggtaaaccgaagcgtgcccaccactcgcgcgaaaccatgggcagtcagagccacctgtggaactggcctgggccgcgccctgtcctctggccccctcccccaccaacaggcacgcgagtggtgagccaagttcgtccagcgccgccccggcgtctagggccccggcccggagtaggggcaggtcgggcccccatgcggccacgaccggaaggcaggccccttgaccgggcccgtcgctgcccagccccgcccgcccgcccgcccgcccccgcggtacacaccggtgggaaggaggagcgcctcctgcgcgggccgggcctccgggctgctggcgccgagcaccctctcgggccggggcggcgacgcctgggccatgactgtgctgcagctgcgggtggcggccggatagcgagatcccggaagtgccccagctgcactaggtttcgttttcttaaatctgggctgtcgctttgagtcactagccggcccggggaaagttgggtgtgcagagaggggttgtcacacacactgctccagattccagtctagtcttaatttgaatagcttaaaaaacccaaacgccgggagcagtggctcacgcctgtaatcccagcactttgggaggccgaggagggcggatcacgaggtcaggagttcaacaccagcctaaccaacatggtgaaaccccgtctctactaaaaatacaaaaattagctgggcatggtggcgggtgcctgtaatcccagctactccagacactgaggcatgagaatcgcttgaatcgggaggcggggcttgcagtgagccgagatcgcgccactacactccagcctgggctacagagcgggactccgtctcaaaacaaacaaacaaacaaacacacacaaaaaacaaacaaacaaaaaaaccccaaacgccaggcttccctactccaccccccacaacacagcgggagaaacaatcactctcctgagggttcctcctaaaaactatcatactggccgggtgggcgcggtggctcacgcctgtagttccaggactttgggaggccgaggtgggcgaatcacgaggtcaggagttcgagaccagcctggtcaacatggtgaaaccccgtctctactaaaaatacaaaaattagccgggcttggtggcgggcgcctgtaatcccagctactcgggagtctgaggcaggagaatcgcttgaacccgggaggcgggggttgcagtgagccaagatcgcgccactgcactcctgcctaggcgacagagccagactccctctcaaaaaaaaaaaaaaaaaaaaaaaaattatcataccgagtttggcttaaataagcatatcttaaaaggacgcagaattagccgatcctaaatccagttgccagtagcaagcctttatttagcacccatagggtacagagcaccatacaagatgaggttttcagtgaatctaacataaatgcatataattatagttaaaaaataagttgttctggaaaaaagacatataatagttggtggtttgctgaggaattaaaggaaaactggaggtcttccactttcagcaggttgtaaagaggaagactgccaactagggatagcagaagagagaacattaaaaaggacaatttgtatagtcttgacaactatgaaatgaattgcagaagagtgtggggtctgcaaaacagggaagtgagcagacagaccctagcagccaatttttaaatttttttttgccctccatgcaggaggatgaaagagtatttcttgccaggccaaaatgaaaggccctttataaagagactgacattagggtgttccccagcaagatagctcaggtaggtcatagtaaaacaaagagccctttaccacactctcagcttatagtaagctttttggtgttccacacttaaatatgagtagactaccaagaccattaactctgaggaaagcctataatgtgaacgaccaaaacaaacatacaggggaaacaaagaaacaaaccctggaggacacagattatgccgaaagaatacagagatgcatgcctgtatgtgtatgtatacgtgtgtgcatatacatacataaacacacaaacatcttcaaggagataaaatactgcaaccatgagccaaaataggatgctattaaaaaaaaagaatattcggagaaggggagctcttagaaattaaaaatatgagacaatatgagactagaaaaataaaatgcaacagatgaactggaagattaaattgagaaatgctcctaggaaaaggtcctagcaagaagacagagctgaaagttaagagaaaagataggaaaattagagatcaaattctggaggtctaacatctggaaaacaggaattccagaaacagtgaagagatgggaaatcattagtttcagacggaatgatcccaccaggcacctagtacaaaggatgaaaatggactcttaacagggacagaacattgagacaaagataaacctataagcttcaagagagataaaaatggattatatatgcaaaagagaaggaacagaatggcattcaatttccagtagtcaccctggaagccagaagacagattttcagactccacagcaacagcactgaaagctagcagatgtcttcaaaactgggcatggagaccactaaagaatcctataccttgccaaccaaaacagcaatcaggtataagggtaaaataa

SEQ ID NO: 917366 - DNA, 4001 bp, Homo sapiens
aatgatttaccagaaatgtgctaggttactgtcagaatgatctaccggaaatgtactatgttactgtcagaatgatctacctgaaatggacatctgctcatatttccccatcacctacagaagtcaagctccgtagtgttatatacaagtacattcattccttcaacaaatatttaatgaggacttactattatttaatatttaatgagtacctactatgtcctactactactactaggccaaccagtctaggcactaaggatagaagagagtaagacgaatttacatgccagtggccagtggtagagacaggcattaaacaagttttgttttgttttccaggtagtgataagtactatagagaaagaatagagcagaaggaggtagagagtgacaggagcaggggcaaggggtgctcttttagacaggatgggcaggcaaggttgagggaagatgtatatgagcagacacctgaatatgatggggaactgaaaatgggataatgtggcaatgagttttccttgcagagaatagcaaatggaaagatcctgaggcagggacagctttggtggcttagaggacctacaaggtagcagggtagcagagtcattaagatgggcaggagtcaaatcagataaggacatggggtaaactgcaggccaggctcatagattgttctgagagtcatgggagactattggtgggttttgagtaggagaatcacatttgctttttgtttttcaaaaagcattttggccgctctgcaggcctgcctgtattaaaggctagaatagaagccaggaaagcaatagtccagacagaagatcatgatggcgtaggcttgggtggcagtaatggaagtggtgagaagcagtcaggctccagatacagtcaggctgaacacagaactggctggcccgactgatgcattagaaggggtgtccggaggaaagagaggccctgaggagccactaaggtttttgcaaggagcacctgggcgaatggaatgggctggtggttgagcaggtttggagtacctgaatacagtggaggaaacaagaattctctttgggacatactcagtttgagatcatttcagaaatggaagaagttggttataccagtctggagtttgaggaagaggtcaggatggaagcgcatctcccgtgacttaccttacagtccatatgtataccaatgaatgaaatatccaactgattggcttgtggttgccacgtatgatgtttacgtgtgacgttttgtggtttggtgcctttgtgtcatcctctctgctgggaacaccccttcaacttttccacctttggctgagtcttgccctttaaaggtaagcccatgaaacatggagaaaccctctctactaaaaatacaaaattagctgggcgtggtggcacatgcctgtaatcccatccactcgggaggctgaggcaggagaatcgcttgaacccgggaggcagaggttgcagtgggccgagatagcgcctttgcactccagcctgggcaacaagagtgaaactcctctcaaaaaaaaaaaaaaaaaaaaagggtaagcccagccatcctctcctcaaaaagctttccctgaagactgggagtcaggagtctctcatctgtacctctgtggttctgacctcctcattaaagttgcctagtagagtctctagggcagggtctgcctaactcatctttgtatgctcaggaccttgccctgagcctggcacaccgtttggagctatacacacacgcaagggcaggaacccatcagaagacccacccactcaagtagagggccggggaggactggaacgactggagaaggggagacgggttccagtcacgtcctccgtgaacgtgagacccagctcttccctcagggccgccccctgcctcaccgcatcagggcgcccctccactgtcctggtttaccggtgagcggaggggcgctaggagagttgacatcggttgtggtggaagcactgggctgtcacccgcgggggaggtaaaccgaagcgtgcccaccactcgcgcgaaaccatgggcagtcagagccacctgtggaactggcctgggccgcgccctgtcctctggccccctcccccaccaacaggcacgcgagtggtgagccaagttcgtccagcgccgccccggcgtctagggccccggcccggagtaggggcaggtcgggcccccatgcggccacgaccggaaggcaggccccttgaccgggcccgtcgctgcccagccccgcccgcccgcccgcccgcccccgcggtacacaccggtgggaaggaggagcgcctcctgcgcgggccgggcctccgggctgctggcgccgagcaccctctcgggccggggcggcgacgcctgggccatgactgtgctgcagctgcgggtggcggccggatagcgagatcccggaagtgccccagctgcactaggtttcgttttcttaaatctgggctgtcgctttgagtcactagccggcccggggaaagttgggtgtgcagagaggggttgtcacacacactgctccagattccagtctagtcttaatttgaatagcttaaaaaacccaaacgccgggagcagtggctcacgcctgtaatcccagcactttgggaggccgaggagggcggatcacgaggtcaggagttcaacaccagcctaaccaacatggtgaaaccccgtctctactaaaaatacaaaaattagctgggcatggtggcgggtgcctgtaatcccagctactccagacactgaggcatgagaatcgcttgaatcgggaggcggggcttgcagtgagccgagatcgcgccactacactccagcctgggctacagagcgggactccgtctcaaaacaaacaaacaaacaaacacacacaaaaaacaaacaaacaaaaaaaccccaaacgccaggcttccctactccaccccccacaacacagcgggagaaacaatcactctcctgagggttcctcctaaaaactatcatactggccgggtgggcgcggtggctcacgcctgtagttccaggactttgggaggccgaggtgggcgaatcacgaggtcaggagttcgagaccagcctggtcaacatggtgaaaccccgtctctactaaaaatacaaaaattagccgggcttggtggcgggcgcctgtaatcccagctactcgggagtctgaggcaggagaatcgcttgaacccgggaggcgggggttgcagtgagccaagatcgcgccactgcactcctgcctaggcgacagagccagactccctctcaaaaaaaaaaaaaaaaaaaaaaaaattatcataccgagtttggcttaaataagcatatcttaaaaggacgcagaattagccgatcctaaatccagttgccagtagcaagcctttatttagcacccatagggtacagagcaccatacaagatgaggttttcagtgaatctaacataaatgcatataattatagttaaaaaataagttgttctggaaaaaagacatataatagttggtggtttgctgaggaattaaaggaaaactggaggtcttccactttcagcaggttgtaaagaggaagactgccaactagggatagcagaagagagaacattaaaaaggacaatttgtatagtcttgacaactatgaaatgaattgcagaagagtgtggggtctgcaaaacagggaagtgagcagacagaccctagcagccaatttttaaatttttttttgccctccatgcaggaggatgaaagagtatttcttgccaggccaaaatgaaaggccctttataaagagactgacattagggtgttccccagcaagatagctcaggtaggtcatagtaaaacaaagagccctttaccacactctcagcttatagtaagctttttggtgttccacacttaaatatgagtagactaccaagaccattaactctgaggaaagcctataatgtgaacgaccaaaacaaacatacag

SEQ ID NO: 917367 - DNA, 4001 bp, Homo sapiens
ttagtaatgagaacacttaacatctgctgtgtttttcaaaaacacaatgttttccaagattacaatgtcattaactatagccaccatgctgtccaatagatctcttgaatgtattcctcctattcaactgtaattatgtatcctttgaccaacatctccccaaccctccttcacccctaaccatgccagcccttggtaaccaccattctattctctacttctatgaacaccaaaattatttaaaggctgtacttgtcaagaaatataaatgtatcatttcaagttcagataatgtgtgtatttaattcttatttacctgccgtttgaagacaataaagcatatagaacacaaaatttaaacctgatcttacctttgtaagataatccactttcaaattgtcgatcatcatagttttctgggatagctcaatttttagtaactgaatattatgaagtagttcttttcgttcaattagctgcctggtgattctgactttgccctctcgctcttctgatgaggaaatatcatccgtaggaactgttgtttctaaactaatatcttcagattccagagaactagagatgttcactttttttgactcctttgaaatttttcgagacatttttattattatggatcagttttcttctctaatttgattttaatattctgtaggttaaaaaacattaattcaaatgtactataaaattaactacagaaatcatggactgtattaaagagagactaaggattccttaaataaatattaggcaatttagtgcatcccaaatctagaacagattattgcagttaagttaatgctcaaatcaaacacattaattcctaatatgaagtcagccttcgagaaacttaaaaaaacagttcctgcggggaggaatcttacttggaggaaacaaagaaatgtacaagatgaagaaaaaagcccattataatcaagaatggcaccactaaaaccaacacatgctcaaagataacagaaatcacgtctgagttggtcagggaaacgttacacagaggtagcacttagaatctttaaagatttggacaggcatggtaaaaaggagaaatcatgcagttattaatgatacgtaagtggaagtaaaaaaacaaagccaagtcttggaatagttactcctttcaccgcccccccaacacaaacacaaacacacacacacacacacacacacacacacacgcccttaacgatcaagactggaaggccttaaatgtcaaaatagggttggattttattctacaggcaatgaggcatcattgaagatgttttaaatagggaaaacggggacaaaaacattttttatagatagcagaatgaaaacaacaggatataagaaaaattcaagaaattctaaatagaacttacttctaactctctcataagaatgttagcaactaccttgttttaatacctcatgatataacaaattatgctattaaatatttcagtttttctaaactgaatgataaggaaaggtgtgtggaggggaaacagcgagaactatactaagatcggcctccctccttctttttgaagggaaataggtaagaaaaagtgaattcaaagacaaattctctcctcgattacaaagggcccgagacggggactgcctatacactcggcgtgaaaattaagccccaaacttggcagctcgggggattccttgccccacgcgggaaagaaagcgatgatagtcgcaagttacctcgaaagtgtcaattactccacactgaagccttgaccagcagccagtgcagacaccgagggaccaaaggcgtctccggtcggaagcacaaggttgcaggccctcaacaagggatttcaaggcaggggaccgttaggacccgtaaccaagacaaccatctccgcacccgcaaggaggacagaaccagcactcccacaagccgccggaagtcaactctcccggatgttccgaggagcggaaagcaacacacgttgtgaggtggcgtccagaaggaagccccgcctaggccacgggcggaaatggctcctcgccttgctttgccgcccctccccactctcgcccaatccccgcggccgtcagagagccaaccaatgtttatctcggcattttcccgcgagaagtgttactaatatccgggaatggaaagggaagaacctccggggttaggcgtattctagattgacgccttttgctggaagagcgctgctggggttaggattctgcgcggcgaggcaagatgctcaagtccaagacgttcttaaaaaagacccgggcgggcggcgtgatgaagatcgtgcgcgagcactacctgcgagacgacatcggctgcggtgcgcccgggtgcgcagcgtgtggaggggcgcacgaggggccggccctggagccgcagccccaggacccggcgagcagcgtctgcccgcaaccgcactacttgctgcccgacactaatgtgttactgcaccaggtgcgtgggcgggcgaaccgcggacagcgcggccccacggggacaagggggtatgacagggaaactgaggcccagggaggcgggtctttggcagtgtcacatacctagcgaaagggaaaccccctcgggaccgaagcttcctgttccccaggccgaggttcttttccttgtgctttaaaaaatttagttcttggagtcgtagttcagacacgttatttttctaactcctggtgtctcttctgccttagattgtaagtgcctggaggccggggacctgggcttctgtggcctccagcctgcgactcccaggcagcttgtaagtgcctaggaacaaaaaactatgtgggccaacgtattcctttattaatacccttaattctacgaagtcttgtgattggtctgtttaagtgtgctttttttaatagatctgaagggtttagtgactattgtctcgttttctatagccaaatagcttcttggcttaacttattcagtgtttttaaaacataaagtatttatgcccaacataaaacaggattttatgtttgacagagctatttacaaatgaatataggaaaaattaactttatctttctttaagattgatgttcttgaggaccctgccatcaggaatgtaattgtgctacaaacagttcttcaagaagtgagaaatcgcagtgcccccgtatataaacgcatccgagatgtgactaataaccaagagaagcatttctatactttcactaatgagcaccataggtaggaggaatattacgttaaatatcagaaaaccacaggattagcaaaattcgggagagggttcctgtgagtaatttatgacattgtcagaagataagtgatagatttcataccttatttaattcttacatggctgtgcagaagataatgctaagtggatctctctaaggtcacacaggcattgatgggctcaagcctaaaaccaaggtctgctgactcctagactacaataggtactttaatttccaaaatgttttcattttgaattggttttagcatgagttggaccatagaatcttggaagatgagatttgcttaagttcctggaataccatattatgtgaacaactaacagagggtaataaaatatatgagtttgtgaagtttctattttgtttaaaaatagaaagtagatttattcttaatggtctttttaaaagtttaatactttgcagctgattacattgagcaagattaggttaaggaatagaattctttttttttttttttttttttttttgagatggagtctcactctgtcacccaggctggagtgcagtggtgtgatctctgctcactgcaacctccacctcccaagttcaagcgattcttctgcctcagcctcctgagtagctgggattacagtcacgcaccactatgccaggctaatttttgtatttttagtagagacagggtttcaccatgttggtcaggctggtctcgaattcctgacctcgtgatccacctgcctcag

SEQ ID NO: 917368 - DNA, 4001 bp, Homo sapiens
tcattttcctgcctccacaaactctatcaataaatatttaatttattgcctccagtttttccctgctccatttgaccatccacactggccacaaggggagttttcttagaaaaacacaaacttaagtgtttgcaaaaatattttttggtagagtcacaagcaagggataggattagaataggactggtcctgctagaggatgaagagagggttgaaaggcatagaaatcccgattgctctagtataaaaatagaggatacagatgatcaatgtgcaggcccaactacggcttccattttgcaagagaaggaaactaggagaatggaaggttcaggagtcaagcagcagggagaaaaagagctcagcgcacagagtggctttaggagcagtctgcacatagaaagaaggtgagccgtagttacagggacagaggcacgagtaccgtcctcaggagcagaggcccggggcgtgatttttacacactgctgttgtaacgggggtgggcagttcggatacttaactctggtctcccaacttgtcttccctccttgatagctagtgtacctctcagcctctcaactgaaacacattcatgtctcctccccacttctctctccatgcttcttctctgcgccccgagtcaggccccggctgccaggccaggcagcgtgcccctcggccacccgctccccttgggcgcggcccgctccgcccgcctcctcctcggccgttacctctccagctcctgatcctcttccatcgctggggcggtttctggatcctcaggtggtgctggcggatcgggggctctgtcccatagcgcgaggcgcggaggcgaagcaggaagcaaggaccgaccgacggaaggcgcggaggacggaaggagggaggaggagccgcagcggcgcggcagggcccagccgcggggcggggcatgaggctccacccccagcccccgccccgacgcggggtgagcggtggctcgcggccccgcggctcacctgggcgaccacgcgaggccactcgcggcgggaggggcagggggcggggccagcgccgccttaccccgaggcccagacaggcctgcgggcgccccggctcaactctggtacctttccccaggtgatggcgaaggggcgcggccttacctgccgcccccaaatcacttcccttcccagtggcaagtccgaaagcggcccgacttcccaactggggcggtgttgacccaggatggcccttcctgggaccccggccctcccgggccttttgtgggacgacaggcttaaactgtagtcggtcaacacaccttgaagagggaggggggtcacgtgcgagatgagtcaccacagaatacgaaggttgaaggcggtatttgtttcaccggggagcttgcagttgcattttcaactgggtcaaaatagggcaagaaagaaatgtctcttttgggggagtgagagtttgggagaaaactgtttcccaccttatcctttccgtcctaggattccttctacccccagagcgcgtcctctccggctgtagacttccttttccctttctccccagtggctcctcaaacctcctcacctgcggaacccgccctcacctttgttcccaggcgcccagcccccgcctcggcaacctttcgccgcccaggctcgctctccatccagctccctgcgtcccggccttcgctgtgctccctcaggtgcgcttcctctcgaatcggcccttcttgtcccctcgccgctggccccgaccctgcccgactccagctgtccagcgcaactacgtttctgcttccctgcgccacctgttctcctggcctccccccaccccgccccgcgattcctctggatgttcactccttccccagctgtgccactcttggcggcggccgggggtgcgcgcagacacctagccagcggggcttccgcaggggaatcaggcgggcggcggggacagcccggggcgagtgggggaggcgggcggcgagggcggagtggtctcactctaacccgggagtgacgggtcccttctggcccgcctcccgagctctcggataggtggagccgccctctggtccgcccacctcccgccctgtgctacctccgattggcccgggtgcgggttgggccgctcggccttggcgctgcccccgggaaggcagcaggggcggttgagaagtgaagtcttggccggagtttgctttttgccaggaaatccgcggcggcggcggcggcggcggcgattcctggcggagcggagccgggcaggctctccgctccctcagcgggccgcggagagcgggagctggtgccgagcagcggcgccaggagcccgtgcgcggcccgggcagccgcgctttcccagtgagtaactttgccctgcccgcctcgctgcgcgccctctcgctggctgcgggcagccgcctcaggtgcgggcgtcagctgggtgtgggtcagcgccgcgccccgggaggcggccggagcggcgccacagctcgccccggagccttggtccttcgcggctgtcttcgctcgcccgggctgcggggctggcgtggactcgggtgtgggtctggtccaggagggagagtcggcgcccggtgcccgccgcctgcaggcgcccgggaggcgggcggcctccggctgttagcgtttgctggttccggccaccgtggtgcagagcttggcgtcgtttgcttcttaagggaagggagaggtggggtgagtgtttaaatttcctctgtgtgtgtgtggtgtcggcaatgagagtggcactagctgcctttatcgggttttgttctctggaaagggatggggagagatcattccctccgccccagcctgttgcctgtgaattctcacctttctctttaggctggagagggtgggagagagatttgacatcttccagggggtaatttaaaaatatgaatcttgatttggaagcagttgcacacaaagcatcattcaggaaatacatcactcgcttttcaaagctgtatgccacgttttaaacaaggacttttgactcatgtagtgtttcttttagtatttcagtttacgttaagtttatgaatccagacgttcgtttgtaccaggagctaaagtacacttatgcatgggctttgctgtgtatattatgctttttaaaatcacagaaatcagaaacaaagttgagtgaaaagcggtggcggtgcaggaggaggaacacttgtgagctccagcttattggaactgcctttaagaatttcacattcttgcggcaatagtacttacttgtaaattggccttcttcccaggacaggttttgatatttcttttgcatgtacttcgatgcagcactaatgaagttggatctcagtagatcaattttatttactttgctagatttgattcccacccccacacctctttagaaaatggactttggcaggtaaagaaggaagcgggaatctggtatcctttttggcttgtcaaagctttgttgagccatgaataacaaagttttggctttttagcttgtccgagtcccacatgtgagttttcccatggggtaaaagtaggccaaatgagaaccaaagtagaataacatcacttttaattcggcccacttgtgtgttacattctccatatatcttgtttctctcatcaactttgaaattttttcattatttattcatttagccactgataaagtacctactgcatgccagccattgatggcgggggttgcttcttgcccagttttctcatttggaaactgatccatgcctttatcccactagttaccctgaagtaatttgaacttagggagcatttctgcctggagacctgtaagaataggtgttacgtaggcacttagtcttcagattggtttgggatttcgtacattgtaggcacgtagcacgcaggccacttaaaaataaatgtatgtgtctttgggctgttgtattacgagctttgcatatgggcttgtctggccgaaggacccagtgt

SEQ ID NO: 917369 - DNA, 4001 bp, Homo sapiens
ttcccacccttgccaagtctaccaatcacagcaaatgatgcaattctttaaaagccaaaaagtttagcaagaagccaagtccccaccccaatcttctttccttctgtttttaaacaacaatctaactggggtcatggtttttgtctcttcccttacccccaccactccaactacagacatggatatatacttcttttaattcccatgatcacagttcttgtctaggcctctgatattctcagtttcctcattttcaatgctggcttaattagaaaaaaagtcatcctcaaggaccatttggttgcatggaacagaaaccagtcaaactagtttaaataaaagagggaatttattagaagaatacagaggttcttgcagagattccaacagctgcaaggggtcaacagctagaatcacgcctttctgaaggacagagtatgctgtaaccacaaacttctaattctgggttctgcaccatcaggaagagaatatcctacaggacagttctccttgtatactgcataaaggactagaatgtggattcatttctgcttgctttttgatccttatagtcctttatgctggcctcaaacttgtcaagcacatgttggcagacattcatgagctcattcaggcctctctgaaatggctcaacagctggaagggtacctcgagtctgaatgcgtaaattaattttgctctctgaaggatgggtcgtagtgtaaccacaaaattccacttccgggttcttcatgatcatgtaacgtagagaatttcctagggtatggtcttcctcgtgcaatacaaatgtcacacagtgtctatctgttccagctgcctggaccatttccagggctgtcttcctctcgccttcagccattgaggtcttcaatccagatatttttctacacacatattttttataaaaatgagatcatactgaatattgttttgtaactagctttttctcatttactatatcacattgcaacacattattattaatctactccagctacacagaattattcgcctctcattttcctgcctccacaaactctatcaataaatatttaatttattgcctccagtttttccctgctccatttgaccatccacactggccacaaggggagttttcttagaaaaacacaaacttaagtgtttgcaaaaatattttttggtagagtcacaagcaagggataggattagaataggactggtcctgctagaggatgaagagagggttgaaaggcatagaaatcccgattgctctagtataaaaatagaggatacagatgatcaatgtgcaggcccaactacggcttccattttgcaagagaaggaaactaggagaatggaaggttcaggagtcaagcagcagggagaaaaagagctcagcgcacagagtggctttaggagcagtctgcacatagaaagaaggtgagccgtagttacagggacagaggcacgagtaccgtcctcaggagcagaggcccggggcgtgatttttacacactgctgttgtaacgggggtgggcagttcggatacttaactctggtctcccaacttgtcttccctccttgatagctagtgtacctctcagcctctcaactgaaacacattcatgtctcctccccacttctctctccatgcttcttctctgcgccccgagtcaggccccggctgccaggccaggcagcgtgcccctcggccacccgctccccttgggcgcggcccgctccgcccgcctcctcctcggccgttacctctccagctcctgatcctcttccatcgctggggcggtttctggatcctcaggtggtgctggcggatcgggggctctgtcccatagcgcgaggcgcggaggcgaagcaggaagcaaggaccgaccgacggaaggcgcggaggacggaaggagggaggaggagccgcagcggcgcggcagggcccagccgcggggcggggcatgaggctccacccccagcccccgccccgacgcggggtgagcggtggctcgcggccccgcggctcacctgggcgaccacgcgaggccactcgcggcgggaggggcagggggcggggccagcgccgccttaccccgaggcccagacaggcctgcgggcgccccggctcaactctggtacctttccccaggtgatggcgaaggggcgcggccttacctgccgcccccaaatcacttcccttcccagtggcaagtccgaaagcggcccgacttcccaactggggcggtgttgacccaggatggcccttcctgggaccccggccctcccgggccttttgtgggacgacaggcttaaactgtagtcggtcaacacaccttgaagagggaggggggtcacgtgcgagatgagtcaccacagaatacgaaggttgaaggcggtatttgtttcaccggggagcttgcagttgcattttcaactgggtcaaaatagggcaagaaagaaatgtctcttttgggggagtgagagtttgggagaaaactgtttcccaccttatcctttccgtcctaggattccttctacccccagagcgcgtcctctccggctgtagacttccttttccctttctccccagtggctcctcaaacctcctcacctgcggaacccgccctcacctttgttcccaggcgcccagcccccgcctcggcaacctttcgccgcccaggctcgctctccatccagctccctgcgtcccggccttcgctgtgctccctcaggtgcgcttcctctcgaatcggcccttcttgtcccctcgccgctggccccgaccctgcccgactccagctgtccagcgcaactacgtttctgcttccctgcgccacctgttctcctggcctccccccaccccgccccgcgattcctctggatgttcactccttccccagctgtgccactcttggcggcggccgggggtgcgcgcagacacctagccagcggggcttccgcaggggaatcaggcgggcggcggggacagcccggggcgagtgggggaggcgggcggcgagggcggagtggtctcactctaacccgggagtgacgggtcccttctggcccgcctcccgagctctcggataggtggagccgccctctggtccgcccacctcccgccctgtgctacctccgattggcccgggtgcgggttgggccgctcggccttggcgctgcccccgggaaggcagcaggggcggttgagaagtgaagtcttggccggagtttgctttttgccaggaaatccgcggcggcggcggcggcggcggcgattcctggcggagcggagccgggcaggctctccgctccctcagcgggccgcggagagcgggagctggtgccgagcagcggcgccaggagcccgtgcgcggcccgggcagccgcgctttcccagtgagtaactttgccctgcccgcctcgctgcgcgccctctcgctggctgcgggcagccgcctcaggtgcgggcgtcagctgggtgtgggtcagcgccgcgccccgggaggcggccggagcggcgccacagctcgccccggagccttggtccttcgcggctgtcttcgctcgcccgggctgcggggctggcgtggactcgggtgtgggtctggtccaggagggagagtcggcgcccggtgcccgccgcctgcaggcgcccgggaggcgggcggcctccggctgttagcgtttgctggttccggccaccgtggtgcagagcttggcgtcgtttgcttcttaagggaagggagaggtggggtgagtgtttaaatttcctctgtgtgtgtgtggtgtcggcaatgagagtggcactagctgcctttatcgggttttgttctctggaaagggatggggagagatcattccctccgccccagcctgttgcctgtgaattctcacctttctctttaggctggagagggtgggagagagatttgacatcttccagggggtaatttaaaaatatgaatcttgatttggaagcagttgcacacaaa

SEQ ID NO: 917370 - DNA, 4001 bp, Homo sapiens
gtcaggtattttatcctttgcagggtttcttcactataccactccagcccagcctatcacacatggataacttcaacagcattctactgggtcttgctgcctttagactcacccattttccagttctgtatatcaaggttttcctcaagcatgaaacctcctccaacaaaactgctataaaatctttgttggttcatcgatgtctgaagcacaaagttcagactccttagcctggacctaaagaacctgcataataggttccaactcccctacatacaagaagtcatggtggacgaggaaaagaatctggactctagtgtggactgtcactaacctactttgtgactgccagcaaagcaccaacctctctggccttgtttactcatctgcaccaaggagctgaactcctaccaggactacaaatgctccttgacttatgatggggttacttcctaataaatccatcttaaattgaaaatgtcaaaagtcaaaaacacatttaacacacctaacctactaaacatcaggccttagcctagcctaccttaaatgtgctcagaacacttacactagcctacagtcggccaaaatcatctaatacaaagcctactttattaaaaagtactgggtatctcatgtaatttattgaatactgtactgaaagtgaaaaacagaatggctgtattggtactcaaatatggcctctactgactgtgtatggatttcacaccatcataaagtcagaagattgttgaaccaccagaagttggggaccttcagcagagatgtgtgattgttgctttccaaatgtatcttctattacttccctatatgaacattctcctccttctggactgctttattgtaaagtaacaaggtttcaacgcacaaagaaaaggtgaattctgacttctggattctgttattgtcatttttcccaatttccttctgtaaaatatcaagattagtacttgctgtttctaataaaggaaggagccgagaaaggcaaatctacgaaaacctaactactagttacatttgagagtgcctaaaaaactttttagataacgattagcagtatttaccaatagaaactttctagatttggatggatggcctaccagcagtaccgatatcagagtctgtggcaatggtgactcagtgttcttctcaaataccacaacttctaagttaaaaagaaagagaaagtggtggggaggagaaggagggaggagatatactaacaatactggcaaacagggaatagcaactgtctgattttttcccctctaacatctagcacactacaagctctcaaaaaagtttgtagagcaaagctgcgttacacaaatgcgacctatagttgtgggctgtttactaggcagttacaagggcgggggctgggggagatgaggagtctgagagctctgggctcccagaggttacccgtcaaggaaagggtcgccagcgccaccccacagaacgttgcactttcacggctgccttttccacttctgcgccaagtaaggggaggaggtctgggcctgctggggtctaagggatggaagggcgcaaaccgagctaagaggagcaggatgaagccgaagcactgctagtgggactagtgccgggccccggcgacagtcacgacccacccaaaccccgtgactcgacagattatggcgcctgaggccggcctcagccccacgctgccgccgccgccgccaccggggacgggttgggaggcgactgcctgtttctgccgagccacggtcccgagcccgcgtggaactccagccgcccgggtacccactcaccatcttccgcagctctgcgaacagcctctctgccccgttaccgtcagtcgaccccgccgctcacttccgtttccgagggctggcccccacatccgccggaagtgcgtccgtcctggcgaggaaggaaggagggcgcgggacgccggagggagctgcgcggggccgaggctcccacgcttgcaatcccaagggacccagggccaagggcgcagtaagggtgtgggctgggaggagggaggggtcgggacgagacgtgcctgaggggagggaagacacggactccggtttattaataaacatctacggtttgtacggcattttaagatgtgcagtgtgcttttgtaggtacatcgccttatttaacacaaaacctctctgaggtagctattacatttcacagaagggtaaacgaggcgtaggtggtttgagtgatttgcttgagatcgttcggctaataaagcaaaattgggacacaaggcttttgtcatttttaaaaaacataatattgaaggcctggtatgttccgaaccctgtgctgaggctaggaatacaaaaaaggaccaggccggtgtggcctctgggctagaggagcaggggtactccggaggctagaggggagagaggggacgatagtgactacaaattaagtaaatgtgatcatgaccgacatatgttgggccctttgaattgcgttatcaacacagttctaagtgcttacatcctttatctcttttaatcttttcaataaccttacaagtacaatttacaggtgaagaaaccgagacatgaagggcttaaataaatatgcctaaggacatatttatgagtctagaatccatgctcattacactattctgtattgttcaaatataatgtaataaaacggccttatagtctgctgccacaggatggagacatcttagggaatctttggactgacagctaaaagataagagcgaactagtttggggtagtaggatatttaaaacaacattacgtgcagatctgcttgtgcaaaaacggaactggaaagaaggcctaagtctggctaaagttcagaaagtaaagtggagagtactgtgagatgaggttgtaagtagatggaggcaagtggtttttgttgttgtttttgtttgtttgttctaaataatgatagggtttagctatgttgcccaggtctgcgttgaactcctgggctcaagcgattctcctgctgcagccggctgagtaatgggaactacaggcgtgcatcatgggacctagctacaggttttttatgcagcctttgtaggcaagattaaggatgaggctttgtctttaaaaagccatcgaaggatttgagagaggaaaatgataaggccatatatgttatgtatatccactgccatggtcatacaactttgaagttccagatgttatgtgttctgccatgctgtcctttaggtgtcttctggtccttcacaatagccatgtttaatcctgagatttgagttggagtgtttcgtttgcatctttttttctttccgtcaattccacctgagaaattgtaaaactgcgaatcttttcttaaaaatcattttaacatttgctgattgctcacagttcaatgaatatgtattgaacatttgcttggtactagattctggagctataaagaagaaaagagcaattccctgtacctgagatgcttatatattttcctggggaaatagacatgcaaacagatatttaaaatgcagcatgggctgggtgcagtggctcacacctgtaatcctagcactttgggagctggaagcaggcagatcacttgaggtcagtagttcgacaccagcctggccaacatggcaaaagcccatctctactaaagatacaaaaaaaaaaattagccagacatcatggtgcatgcttgtagtcccagctattcaggagactgaggcacgagagtcgcttgaacctgagaggtagaggttgcagtgagcagagatcacgccactgcactccagcctaggtgacacagcaagactccatctcaaataataataataaaataataaaatgcagtgtgataaatgcttgatagagaaaggggctaaaccagaaagttgttgggagcaggagaaaacagcattcacggaagaggaacatgtaaaggcaagagatctgtgaaaagtcgtgttgttatct

SEQ ID NO: 917371 - DNA, 4001 bp, Homo sapiens
ggttaagtgacttgcctaagataaaagagggccaaaccaggagtagaaacaacatcatttactcacacggattctatacccaatcctgagccatgtgatctgcttccttctggcctccatgtcacatggattcaggaagaaatctgagttctaatagtaatattggagatgcagggagaacttctttattcacgtatgtattcctttcttttctttaaataactctcacaattttggtcagtattttcaagaagaatggtgtgtacacccaggggaaggcatatacatcatgatgttgtttttggaactgacatattatgaaaaaaaaaagagacttacgttttctgtccacagatggactttttataccagttcttacaagtgctgaagtatttctttttggtgcccaaaatctgttgaagggcacagacatttgggctggaggatagagggaaaggaaaaaagttaatgtcctaataatgactagtttttcgtatctaaagattggttgatagaagaaaatgttgagatgtggatttgatatccaaagacatgattctagccttgcacaaatctaattattgacacaatcctactgaattgttgaaaaaccgaaagtctacaggaggtggcagggagagagagaaaaattatacatttctgagagtaaaatacaagcttttcaaaaagttaaccaactaggactattcaaacagtatgaacgtaattttatttctatgtgccttattacttttaatggtagataatctactgaccctttttaaaccaagcatgtgctcatttggaggatggccataacttcagggctctctggaacaatgagaggtcagagagcaaaagagacaaggtttattatgtacacagacactatactctgtaattttctaggtaagtaatcacagaagtaaatgtgctaaaattaactttgaaacaatatggttgcacaaaggagaatttatctttttgaatggaagtaacagatcagaacatcctctgtcacaattttaaggttccccttcccctcttaaagggacagaagtcttttttcactgtaagtcaaagaagcttgtgaacattatgaaaattcctgtgaggcataggaagaagtgccaagatccgcttaaaaaattataaatggttggataagttacaaaattatgtgtaattttaaaaatgcttagttgtagttgcattagttctataaaatataaattacctttgcaaattttacagaattcagagtttaaaagtaacttaaatgcttcaaagaattcagagaactagttacattacccagtatttaaccttcatatgtaatttaaataaaattttctctaacatcatgtgagatatttcaatgctgtttgcatacatatgatagttcctaacaatagattttttaattttgaaaactcaatttcagatttttggaagaaaataaaaacataaataaatggaattataaaagaatgcccagctaaattgtgttaattagattagaattatataacatttcataagaaagcaattatattcaaggtatttagagagcaattaagtcttaaagcttaaaagtgcatagataaatcacagaatactcacattttcctttttttcctattactttataataattaggaaaaaaaaccctgaggcatatatgagaaactttatgcatacttgaacatctaacaagctgaggaaaaagaaaaatggtttataaaaccaaaccactcacttacccttggtcccgacccctgatacgactatgagccaagatcttgtcataatgattgttggcgtttatagggttaacaataagcagcaatagtagagaaaacatgggtaaaaagggaatcatcttgagtctctccgttgcagttagtccccgaagagaactggcagtgggctttggagagctcagaatttatatacatgtcagagttgtgggagggaacactgcatcaacctgagagtctgaactctttccaggaagcatcggcaacttcaaattgccagctaagatttgttttggttagttatatttaaggaacacattgagctacttttccttttcattataaagaaggtacttatttttaatcatatgaacaattgactcactgcatgtttaagtctcagttttattcctttgtatcttagagggtttttaagaaaaattcttttgttgagttttaagagatattctgcaatcctttccagagtagaatgtataatgtctgtgtgctcaagattattgttaggtgttattgcagttcacatcagaactgaaagattattattattattatttttaccagaaaacaaaggtagatgcgagtctgacaatcacaagggggtaaaggctgttgattaaaaacaaactctggatagatttaaaacttgtgtaagatatgaaataagaattctaacttgctgaagaaccatgtaggagagtccatattttccttgctatcgtacaaaaaggagagctacctctcatttcctttctttttcaaatatcaaggaacatatagagttaacataaatctactctgacaaatttctctaaggtttgaaatgaagcagaaaggaaaaacatttgtgctttattgtttttcatgacacactttatgtgatgttgaacatgtctatgcagcacatctactgataaccactggtgaaaagcagccaatattggaagcaagtgttacgaatctagagataactagaacaattaaatacatattaggaaacatggacattgccaaaatgattcttctgattttatcaagaataactaaagcctttcaatgttacactatgcaatccctagccaaaggaatgtgcgttcttactactccatgcatatgtcaaatgttcagaaaactttggataaaagaaatctgaatatcagagggaaacaatgagctgaaatggtaaccacaatcagcttccttgaataaacaagctgcacaccatcctaaagtgtaattccaatccattttgctacaagatgctccctctgtaatgtcatatccatgttcttttcccactggtgaggtagagagattttgtcagaattctccttgttgttctattgggaaggctttaggggaactggactgaactagagaggattctgagtatcctgagttatgcttaaactcactatgggatattaaaatattctacaacttgctgcttagtttattaagaaagcacacagtgaaaccacaaatgctgaaatatgatcgagaggccatttcaatatgaaaatcttgggattaagttatagaaaatgaaggggcaattcaaaagaagagctggagaggagatagcataaaagttaaattatattctgaccctggtcctttgtggaaggaagagtttagtctatcatttacatttctctgaatggaatcattctgactttatgaagtcatcttttgctttatattatagctttctattactcttatgttgtgcaaatggcaggtggtcagtaactgcttattgattaggacggataaactatcaatattattaaattagctgttaggacattcctggttaaatggatatataaaagtcttcaactctagaccagttagacattataatatagattacactgctactaatgccacacttttcatctttagactgatgtaactacttacagacctttttgtaatgaagctgatatctgctcaaatccaatagggtttgactggaggtgaaggatgaggtactcagagaaagagatatagacttgtgtaataagtatcaagggtaaaaaaatatatatttttaaatacagtccggaatgataactgatagacctgattgtgaatacaaggagtgaaggaagaatcaaaatttcctgccatgttgcctgctttcttaatattgcctggaacgaattaaaattttattgattattttcaagaacaattttaacctagtcgttctttgca

SEQ ID NO: 917372 - DNA, 4001 bp, Homo sapiens
cctcgagggagcgcttctcgggcgcggcgatggaagtccgcttgcgcttcttctcgccgccgttgaagagctcaggcttgttcattttctcgcgctgggcgccctcggcctcctcgagccacgcctgcaggatgggcttgagcgcgatcatgttgttgtgcgagagcgtgagcgactcgaacctgcagatggtgctctggctgagtgagcccacgcccgggatcttgaggttggccagcgccgagcccacgtcggcctgcgtcacgcccagcttgatgcgccgctgcttgaagcgctccgcgaacgcctcgagctcgcgcgggtccgtgtccgagtcgcagatggacgccaggcccgctgcgcccaccacggccgccgccgccgatgccgctgccacctgcccggccgccgccgccgccgctgccgctgccgcgccgtggtgcgccgccgccgccaccagcccggggtgcggcagcccggacggcatgttcatggcggccgccgccgcggggtgcgacaggtggcccaggctgtgcatatgcgggtgagggtgcgcggagccgcccaggagcccgccgcccgggccgccgccgccgccccccgggccgccaccgccgcctcccccggggccgccgcccgggccgccgccgccgcccgggccgccaccgccccccgggccgtcgtgggcgccgccgccgccggccgccgcgcccgcgccgcccgcgccggccatgagcgcgagcgacggcgaggagatgtggtccagcagatcgccgggttcgagcgcctggtggtggtggtggtggtggtggtggtgcgccagaggcaccgtggaagtggacgtgcacggcacgctgttcatcgtgtggtacgtggcgtccggcttgaaaggatggctcttgccctgggacacggcgatgtccacggccgccagcgcctcggcccgcgccagcagcgtctcgtccaggctggcgaagaggttgctctgcagctgcaggcgacacaaaccaaaccaaaaaaaccacaaaaccaaaagagcaaaacaaaacaacagaagaaacacacacacaggccggaaagcacagcatgcgaagggcaaacacaaagcaaccaaaataacaacgggtttgggggcagtggagagcgggaaagacggagagggggcacattgacgaccagggagggggcagacgagaagggatgggagcgtggagagggggacagaagtagggagaaagggggacacaagaacacattccggaaacgggcgtgggagacgaaaaagagggaaaagaagaaatggaaatgtaactcgcagctggggacccgtgtcacacacccgagcacgcacagagactgcctttctgaggcgtgaaattaacagagaaagtagagggaagtcgagagtcctggccccagcgctccctactccgatcgcaggcgcctgacgcggaggcagaggcagacaggaacacgacattaagggccgccggacaaaacgtgcctcgctgcgggactgctctacaccccctgcccgcagttccccgcaccgggacctgcacacaccagcccccgacatgcagcgtttcggagacggggaggggcgggcgcgcgggccggggccgcgggcgtggggcgcttaccggcggcgtgggcaggcaggcccgccggatggcctcggagctggagtgcagcgacgggtacttgtgctcagggagggtgggatgcatggcaaagtgaggctgcttgctgttcatggacatcatcgtggcggcttggcatgtatatccacaaacactccgaaagtccgcgggaaagtgcgtacgccggctcacccggcctcccttcggaggctgcagccgcggcggtcgcggcggctggcggcggccccgccgcgggctgctgctgctgctcctgctgctgccaggcgctccctctgaccgcgcagagcgccgcgcgccggcctcgcggtcccgcttctccgacagctctagccccgcgcgccgacgggatgcactcctctaacacctgagccccacttctcgcggccgtcccggggagctctcgcgagagctcgcggccccaccgcgctgacaggcatcagctgtctccgtctgtctgacgcgcgctctccttctcggcggccccgtgcgtctgcgcgcgcgcgcgctcgtccggccgcgaccagcgcgtgggagccgctcttatagtgaccaccagcaaggacagcgcaggtgatgcacctgtagctacccgggcatgcgcactgcccgcctcacctttcccaccgtggtctggaaagatcagaaggtccagctattgtctaagggtgggcaccttttagaataaaaaagacgagatgcgcgcacgcccctctatgtgtgtgtgtgtgtgtgtgtgtgcgtgcgtgtgtgtgtatgtgtgtatgtttcttctccctgatagcaagccttgaatatatgagcattacttaggcattcctcctcttcgggatgcctaacaagctgttgtataatgtatacagctggacatttctacgttaaattatgcccgcgcattcctctgtatacagtataaataacaacacagaaatgcagaaggtgctgtcttttgctgcaagaacctgtttctttaaaggtttataaataggttcctggagaataatcgcggtgacagacatttgtttgaagcagtcagacgctattgatttccatataatttaatttcctccgcatacttttttgttgttgttgtgaatataactgtgtcaggcaccgccagtgacagccacttaggagccacaaggagcgtgtgctttctactcgggaaaagctgttgaaatgaaattgtgcatttctcttattgtttgtctccttcaaccgtgtacaaacccacgtttcaaacgagctccgggtgatctaaggcttctagtaatcaaaaggaaaaaacagttaacagggtgtagttgggatccttcctcccctcagcgtacacacacacacacacacacacacacacacacacacactttatgctgggaactccaggaaaactgcttcagagaaaagggaataagatgttgaaaagagaactttcttttcccttccatctttttggctttttgcctcatatctctgcctgcttatatatatttttttcaataggagacagatcaaactaacttacaggaaagcttgattcaaaaatattaaatcaagccaatttgaaagaacggggacaagctctggtccagtttttaaatttttaaaaaattattgtgaaattaagacctaaaaagaataaatcaattagccaacctgttatatggcccttatgtggtagcagatcaagagcctcccaggggagccacagttcaggtgccaaagtccccagggaaggagcacttgctcgcggtgataataacctaacagcccagatgttatcacatctgcggtaagagagctggagagcagcaaggggctgcttatggaaagcagaaatcagataatctttctgttctctcccacaccaaggaagtctgtatttccaccaaagagcagatctcatttctataaacctaaatttgcgttcccgtggattttatctttcctctgcacaaatgcatgtgtgtttagcatacccactcacctactcagattccaagaagagcccacaggcgtcaccatggctttttctttctttcttttcatgttcccccccaccccctcccttccttctagctccagagggaagtgagaaggatgttcacttgctggtgagagaaggagctggttccatccattacgcagtcccctgggagcgctaaatgcaactttatctcaacggggagtggacgatgagcaggacgtcgctagagggaaagagtgagtcctacggtagtcatcacaccgggagtccgggcttaacctagtccttcctgacacccctggtggccgttccctgcgctctctcttgacgggaaagaaaaggcccccacagag

SEQ ID NO: 917373 - DNA, 4001 bp, Homo sapiens
cttggactcaccaattattttctcatgaaaagtaattaaaaatcagcccaagaacaaattgtgacaaatttctaggcatataattagcaaaccaatattttatttcaaaaattaattggacacttaggtttgcaaaagcagaacttgttcaaaaaagaatgttcagtattatcaaatatgaaaacttaaacacgtcaatttgaaaaaagaaaaaagctgtataaaaacaaagcaaaacagcaagaccagagacaattttaataatagctttgtaaactgaaataagcaccagagcacatggcaacaatttcttccgtttcagtcaagggtcgtaaaggtatgcagctgacgaaagaataattgcccggaaggccgaaggaaagcaccgtgtgttgatgtaacaatggtacatcaagtccttacattttaaaataagtaacttctcggtatttttgtgcttgagatattgttaggctcaagactaccttccagaattgttgctgtctggttcactctgggaaatgcgatccacacaacagcctcaaaaagcagcaaaaacttggaaagcaggagaaaaaagttttgaagctcaagttattgacggccaattcctaagaacgtgactttaaacttaatgccacacttaccatcaggacacgaattttgcatggccaacgcaacaaatatactctaccttatgcttagatttgaaaaccccatcataataactaccataaaagaaactttctgcgtattacctctcgttttcagtcactcttgtgttactgaaagatgaggcaataaactcaaaaatattaaaccccttacccaaaaagtacagagctattacggatttgtaaagccggctttggaaccgagggctttacaaatgtaattcccacgacaccgtgctgagtctcaaatttggcgttaacgtaacttaatttctatttgtactggaaacgtatcaagatataaactcctccattacacgtgaaaattcaaaccaatttggcaatcctaggacccttattctgcacaatctccatacagtacctcaaagagagtctaaaacacgagaattcatctcataaaataattcatggaatcggtctaattacctttctaatttcatccagcaccatttcaaaggactttttatccatcttgactactatcccgacgtggttttaacagttatacttgcaattaaaagacgttcatccctggtctgctccgccgatagtaaaaaatatttatagctgaggaggaaaaagactccacgagcaagagaggatgcgaagaggtagagagtattgcaaacttcgcaaaaaaaatttctaaaaattgagattcagaaaaactctttttattaaaaagaaaaaacactccagtcaggcttccccagcttattcacacaatggttcagggcacctcgggcaagagccaggtcctctgagttttgcagaaaaacccgggctcggcggcaggtttgagtgcggtttccctgcagctgagggccaggtgccgccagaggtagctcttgaaggcgctttcccaggtggagcggccggcagagtagaaacacctgcgctcagagtccacgggcggcggggagggaggcgccggtctctcgacccgcacctgcgcctcggccgccggccgcgaccctcaccgccgcgaacccggacgcatggtccggctcgcgctcatccccagccgctccgcccgactcctggatacctcggccccggcagcaggcggcccggcaggctctttgttaccagctgctgcagcttccgggagcgggccggcggctggggagcaccaggagccgggcgaagaggggcacggcctcgcatagggggactccggaaaaacgcagccccaacagcgccagacgccctgcctggttacccctacagcccccaccagctcatggggacctacaataaagccagtcgcgcccaagtaaactcaacactgcgccgccagcttgggcccctctttcctgaaagccagaggtggggtcctggtgtgggaatataggcatccatagcggatgcctggatggtaggaataggatgtggcaaaaatccttcccgaagcctagcggtcattattttgaatgtcatccccaccatacctcgtgtctgagtgtgcgatgttttgattttgccctctggattaaaaagaataaatggcgagcgattaaggcatatctacgggcgcccatactttggtggccactgaaagtcagcggcgcggactgccctgagggcgggaaagggtggtcactgggtcagcccgaagcacctgacatgagggcggggaccccgaaatgcacacgaagtccggaactggtcttctgtgattttcattcgccctggtctctgttccctttcgtactcaaagctcgtgcatccagggaggggaaaccggagatagggtcttcgggccccgggcagaccctctgtgccgctgcaaaccgttgcagcctgaggctgtcaggtcctcccccagacacctgcggaccctccctctcctggcttcccgtctggtcatggcgagattctgggtctgcgtagccggtgctggcttctttcttgcatttttggttttgcattcgcgtttttgtggctctccagtgagttgggtagtgaggaaatgactgtcgggtgtgcgggtagccctgttgggaggcgtcgccacggtcgtggcatggaggtggcaggccctggttccctcagtagcttgtctcaaagcctgcacctgggtccaaactgccttgaccctttgagtttaaaaatttgtgtatgttacatcgccattttcctctttcccaactcttactacatcctcaaataatttgcagacttgtattgtggtcgtgttggtctttaggcatctaagctcatttctttggaattatttcagtccagcaaacttctagttgtcaaggcatgcttaaaaataagccctgttacccggcccccccgccctttttttgttcttacctagacggtaaactaaatctgaattgtctgattttgtttaaggttttgaggaactttacttttgcagtttcctggagaactgagaaaattctttaccggctggatgtgggttggcctaagcacccagaatattttaccggaacaacattttgtgttgcagttgactccctcaatggattggtttacataggtcaagtaagtaaatagagatttaaaaaaattatgaacacaaaggaagtaacagccttcctgtcttgctgtagtaactgaccatatgcgtttatatcatgctaattgtgcaatttatttttgagttggtctcaagtattttggtttcgaatgtgaaagatatgttagattttgaaagtggtttttgtagtaaaattctcagttattttttttcttcgccaagatacagattacctttcctttaagctgatcctaagaagttattttttgtataccttcagagaggggataacatcccaaagatattagtgttcacagaggatggatatttcctacgagcctggaattatacagttgacacacctcatggtatatttgcagccagtactctatatgaacaatccgtctggatcacggatgtaggaagtggtatgtatagtaatatctattaaattatcttactggaaatcacatctttgcacatgtccttgtttgtattgtttaaaatcagagttgctgaatctaattgtaatttctttaacgattcatgaaatcacatgtttttaacaaactttattttgtacttctgtggaattaagaaatttaacaagggctggacgccgtggctcacgcctgtaatcccagcactttgggaggccgaggcgggcggatcacgaggtcaggagatcgagacgatcctggccaacacggtgaaacccccgtctccactaaaaatacaaaaaaaaaaaaaaaaaatcagccaggcgtggtggcgggcgcctttagtcgcagcta

SEQ ID NO: 917374 - DNA, 4001 bp, Homo sapiens
ccttcccttctagggccaatctccacgccaccctccacaaaagcacatgatatagaagtcacatcaccttttcgctttttataaaccgagttgaattttaaagatatatacctctgtagggagtggggacacttagtttggggtaggagtatctaaaattaggagaattattcagacttgaagcctagaaagaaaatgtatgctgggtgtctgatcagtgtgtgggccttgcctgacctgaagaaatgagtccagtgggctctgagctgacttccagccccactcactgctgtagggaaaggtggattaagtcgattctctaaattgtttcctcatctgtaaaactgggattgtgtcaacctcatcggtaagtaaataggctaattaattaagcttaatctctgagaaatgatgctccctgggccagcagaagtctaaataatgaggaggcctgtggtttgtggtgggggtacatacagtgactacttcattttcaaacacttctcttgcttcttcatagacacagatttcttcataacattctttttccaagtttccctcgaagagttcttccagaagataggagcccgcacgcttccacctcaccagaacgtcgtttgctttggaggccgggagaaatactacagacgagacaagaaggcaggtgactgggagcaccgagggccctgctttccagagctgcctggcttcctccccggccggccgccagccccagccccgtccgtctccacaggctctcagcctgcgagggcctcagggccaccccgctactccctcccccgaggtaggcaagcacttcatcctctgggcgaatggatcagccccaggatcagtgcggatacactaaggttctgcagagaggccacgggcctcagtcaggaaagtggaggagggagggctccaactgggttttgggtctgagtgcgaaggaaggctgagctggggtcaaaggtccccgtactgagaactggggaccaagagccatcagctcctgtgctgcctctgtgcgcagcatttaacatcttgataaaacacataaagaagaaacttatacattgcagcaggctctgcgatttccaggaggagaaggcaaatgagttgacccgcggcagtggtctctggagcctcttcccacctgagggtcccaaagcatgttctctccctctccgggagggtcaaagcccaggcccttcccatcctccctccttttctctcggtgctgagggttacagcagggggggctcagctaagtccggctacggtaagtgctgggcagggcagggcggggggatcaccctctcagggtgggagaccatggggccagcgggagaccatggggccagcggggatgctgggtgttttgacttgcagctttcctggacgcctgtgcaggcagagtcagaatggagtccatgtcgttccttcagtgaagtggctggtggtagaagggtggcaggcaggcagggtggctgctccctggctatgtctcctgactcaagactgggcattcctggctggcctggccaaggctctctctgcccacattgcagtctgggctcagcctgccccaccccctcccctcgtccaatgcccaacccaggcctccccccactcctccccctttccccctcccctctccccggcctttcccggctgaatcccctgcacacaggcttctttccatttgggcatctcttgggaggaccccaagtgacactatcatgtcccaaatacttgtcaccaaatgataaagatccaaacagctttttcaggggaattaagactagtctgggcactcagggctcctctggctcctggaaaaagcctcatctacaaatccaccatggaccgagtcaagaaagacacagcacaggcacaacagacaggtaagccagatgcctacctgagggctccacacgatggagggcgaggaccaggaccaggccctggagcagtgggacgcagcctgccattcccacccggagcgctgggacagggctacaaacacagccaaagtccaggctgggggaggtgccggcagcaggagcctcggggcacgacctgtgcagctgtgtgcttccctcctgacgttttctgtttgaggccaggcagagaaatgaacggtgaaggctcagaggaccctgggagatatttagggagacagagaacagaaggtaaaggcagcaggtgcaaggtggaaggtggcacccatgcccgtgtgtggtcaatggaggtgagataggccctggggacacagcactgggcgggacagacaaagtcacatgcagcttacgttctaggtgtgtgtggaatacacagaaaagaacgagggaaagagacaggagggagtgagggagggaaagcaggaggatggaaagaaggaaggggagaaaaggaagggagggagggaggagggagaaagcggggaagggccaaatagtgtctgtcactacagctcagcaccattgtagcagaggcagcatagacaatcatgaatgaacacttggctgtgtgccaataaagctttatttataagagctattaaggggccagatttggccccagggttgtcgtttgctgctttcagatgtaggccctgtgtattagtcccttcttacactgttatgaagaaatagccaagactgggtaatttaagaaaagaggtttagttgactcccagttccacatggctggggaggcctcaggaaacttataattatggcagaaggcacctcttcacagggtggcagcagagagaatgactgaagcaggggaaatgccagatccttataaaaccatcaaatctcttgagactcactcactatcccaagaatagcatggtggaaaccacccccatgattcaattacctcccaccgggtccctcccaggacacgtggggactatggggattacaattcaagataagatttcggtggggacacagccaaaccatatcagcccttgaagcctgaggtaagaacctggtgtttcattttcactgtgttgggaagatattggagggaacaggaattgacatggaaagatttgtgctctgaagggatcactgggctgctgtgtggagaacagaacattccagagaagtcaaaagggaggctgccggctagtccaggagggggtgagggtgcagccatgcagcaggaagcacgtttgcagtctggatgcttcaggaagggaaagctgatgggattcatgatgaattgtgtcgggcagcacggctccaaggtttgggctgagcgattgggaggatggcagtgcgtgtgctgagacggccaagctccaggagggcagagggaagcgaggtttggcaaatttgaggtgtctgtgggatgtccaggtggagacaggagtgggcatccgagaagctgggactcacagtggagattcaggtggtaacagatgaaatgacagcattgtcagcatatagatattgttcgattgaatgacactcaaaggtggcaaaactcaatgaaaggattctaaatacaattttgttaaagtgggaacagaagaaaactaagaagctgacacccttgattaagagggcatgcccgcaaatacactgaagttgtgaagtttgctttaaaaagctgggaaaagaaaataaagtttatctttagtgagtgagttaaaataatttgaaagccagaagttgattgtataggatagctcttgggtgaattgcaccagcctggcaatctacgtggccttcacttaagaaaaggtgcctttttttgtgtgaaaatgtattcccacatggaaatttacattaaaaatacttctgctggatagtttaaaaaccatcaatagctgcctaaaaatggaaaggcagacagggacatacacattcgatcaataagtgttaattaagcacatcctatatgcctgacatgggtatctgagctacaacctcttccctcatggaccattttagtctgttggggctgctgtaacaaaacac

SEQ ID NO: 917375 - DNA, 4001 bp, Homo sapiens
aaaaccgctgagtcacccagagccctaaacccgatgcagggatagagggtcaagacgggttgccagtcaacagcctgaggcccaggagcagcgggcggctcctgaaaccccagctcaggttgcgccacgtcggggccagggccttcctgcacagttccaggcggaggacctgtttcagaaagggagaaggctgcggtctccgtgatttccggttccccctggtggcctggctctccatggtggtccagttggatgtgcacgtccggtgccatcaagccttctgccccctgtctctggccagcgtccccgcggggcccagcccttctgccacggcctcgccctggccgccggcttcctccccggcgccggcctctctctgcaggagggggtgactctgggcgagctgggggctgccgtctgaagggtttcacgtaagcgatgggttttgcgggttgggctggctgtgcgggcccatctgcttccacggagccttcagggtccgcaacacagcagcctggctctggaggaggcccacctgaggctaaaagagaagcggagcgtgagcagagagagacagaaggaacttcacccgtcaagcagttataggatacttttacaaataaatactcagagaaaagagggatttctgaagttaaaattgtgagagaagaaacaaaactctccacggaagttggagaatgaagttgagaaggtctcccacagaacaaagcaaaaacctaaaatgatggaaagaaggatgaaatataagagaattagaggtatgctgtggctgagacatttcaccagaaaatttcagagtgctgaggaaaaagagaagattctaacagattctagagagcgggagacagagaaaggaaaagtcacatggaaagggctaggattccacatgtctcaaaagtcagacatctcaaaagcagcagttcagtctagaacataacagaaaatgtcttcgaaatttcaagggaaatgaatttcccacctaaaatttcctgtccaaccgaagtttcgctgaagaatctgggaggggagaatgaagatgtttcagacaagcaagatgttaaagaatttcctttcagtggatgctttattgttatgcatctgtcaaactagacaagattaaaagatttaggacactcagcgtatgaagggaaaagttttggagaacaacgtggcaacagccggaaaattccaactcctccgggaaagaacaaggtggaagtaccggtttatcatagatcaagacgtagcgtgaggactcgctctgctacggagaaacagtaatacaaaactaaacagaaggaaacagcgacaacaacagcaaatctcagatttgggaaatgggattacggttcggaagagggaaaggaatttcccagatgatgtggaacccgggagctgacttccaacaagcagcccaggttgaggcaggctaggagaaggtgaaacagagaatgcttgattgagtttgagtgtcaaccattggggaagaattggggaacagacgaaattaaaaagagaggagtggcaggcgtttgatgtaccttgattaggggccatggagcgaagtcgcttcgaaggccttggttcctccatgagcaatcggcgggaggggctggggagaaaaacaagagagcaagaacggatttaggaagacagaggtgacaaggcagggggatggccgtggcctttctaggggaatgaggattctgtccccaactgcacccacccgagatccgtccacgcctccgggacccccagacacacacctgatcttcccacagctggctccggagatctgaaaattaggagactcttcgacgaagagaggcccgaggagtcggaggtgtccacaggttcaccgctgtagctctgaggtagtccacccgcagccagggagtctggagggagcacgcagcaggttctggctccgagcccagcagaaagccgactgctggaggccgagcgccgtccctcttatatggcagcaaggcagtcgcgtaagggacaggcgtcgtcagaggggggccggctggggcgggcctggctgggcttgcgaggcgcattgggccagtcccctgccagtcaaatgggggcccttctgagatgccgccatttctagacgtccgtggttgattgattaatctaatcatcgaggaaaaaaaattgcataatgacctctgagtgtcagcacaatgaggtgtggtgccctgaaagcggctgacaggaagatgcgattagcttagatctgagcatggtcaaggaaagcatccaaagcggggatatctgggctgaaatctggaacataacgtttgaaattagtcatcctgaaccgggttgggagaggcagggagggaggaaggggagtgaagagagtgtgctgaggcccggactggaagggagcccggcacattctgggaatggacgggaggccaagtccaggcccggaggtggtgcgtgtgagacggggctggagatgcgtgtgagacccacaccgctggcttttattgctgtgggtgcactcacgggtggaggaagacagcgggaaacacagcaggacgctggaggggatcccacagtgggttatttggttggtttgcatccttgtgttttttacagagactggttctcgctctgtagcccaggctggagtgcagcggtgccatctcggctcgctgcggctacttgggggggttgggggggggtggctgagataggagaatcagttcaagtgattctcctgtctcggcctccggagtagctggactacaggtgagcgccaccacatcgggataattttcggatttttttggagagacgagttttcgctatgtgcccaggcttgtttggaaggcctgagctcaagccgtccgtcccgctcaacctcccgagtcgctgggaccccaggcgcaagccaccatgccgggccaattacttttttgggttgtatttcctgttgaagtgaggttttgctatgctttcacctcacataccttttctgtcccaagaccccatccagggtaccaccttacaactcgtcacggttccccttggctgcgacggtttctcacacttgccttgtttttgatgactctgacactttgaatactgatcagatatattgtgggatgtcctctcctgaagttcgtgtgatgtattccttgtgatctgactggaattatatgtttttgtcaggaagattgcagcgggaaagcgccattcccatcccatcctgtctagagtacacaccatcaagccggcttatcactgctgctattagtcctggtcaccgggctggggcagtgttgattaggtttctccaccataaagtgattttcccacctctttctctactgtgctttctggaagtcgctacctgtagcctatacgtaaagaaaagggaagttttgctttatctccttgcaggggaatagctacctaagttctgtggagttctcctgtgtggaggattttcccattctcccccacatgtttgtttatttaatcacttatttatatccgtatggacttatggacacctattgtatgctttggtttacactccagtacttcaggggatgaattatttaataattgaactaattattttgtcaagtattttacttaactatttaattattaattatttaggtaattactttgttactcaatgtttccagctttggccaccgggagctcctttagttggcttccgtgtccctttgtcaacctcccatctcagcaaactaacacaggaaaagaaaaccaaatatcacatgtgctcactcataagtgggcgtcgaacaatgtgaatacatagacacagggaggggaatatcacacactggggtctgtgagggactgggaatctaggggagggagactattaggagaaatacctaatgtagatgatgggttaatgggtgcagcaaaacatcatggcacctttatacctatgtaacaaagctgcacgttctgcacat

SEQ ID NO: 917376 - DNA, 4001 bp, Homo sapiens
aaaaccgctgagtcacccagagccctaaacccgatgcagggatagagggtcaagacgggttgccagtcaacagcctgaggcccaggagcagcgggcggctcctgaaaccccagctcaggttgcgccacgtcggggccagggccttcctgcacagttccaggcggaggacctgtttcagaaagggagaaggctgcggtctccgtgatttccggttccccctggtggcctggctctccatggtggtccagttggatgtgcacgtccggtgccatcaagccttctgccccctgtctctggccagcgtccccgcggggcccagcccttctgccacggcctcgccctggccgccggcttcctccccggcgccggcctctctctgcaggagggggtgactctgggcgagctgggggctgccgtctgaagggtttcacgtaagcgatgggttttgcgggttgggctggctgtgcgggcccatctgcttccacggagccttcagggtccgcaacacagcagcctggctctggaggaggcccacctgaggctaaaagagaagcggagcgtgagcagagagagacagaaggaacttcacccgtcaagcagttataggatacttttacaaataaatactcagagaaaagagggatttctgaagttaaaattgtgagagaagaaacaaaactctccacggaagttggagaatgaagttgagaaggtctcccacagaacaaagcaaaaacctaaaatgatggaaagaaggatgaaatataagagaattagaggtatgctgtggctgagacatttcaccagaaaatttcagagtgctgaggaaaaagagaagattctaacagattctagagagcgggagacagagaaaggaaaagtcacatggaaagggctaggattccacatgtctcaaaagtcagacatctcaaaagcagcagttcagtctagaacataacagaaaatgtcttcgaaatttcaagggaaatgaatttcccacctaaaatttcctgtccaaccgaagtttcgctgaagaatctgggaggggagaatgaagatgtttcagacaagcaagatgttaaagaatttcctttcagtggatgctttattgttatgcatctgtcaaactagacaagattaaaagatttaggacactcagcgtatgaagggaaatgttttggagaacaacgtggcaacagccggaaaattccaactcctccgggaaagaacaaggtggaagtaccggtttatcatagatcaagacgtagcgtgaggactcgctctgctacggagaaacagtaatacaaaactaaacagaaggaaacagcgacaacaacagcaaatctcagatttgggaaatgggattacggttcggaagagggaaaggaatttcccagatgatgtggaacccgggagctgacttccaacaagcagcccaggttgaggcaggctaggagaaggtgaaacagagaatgcttgattgagtttgagtgtcaaccattggggaagaattggggaacagacgaaattaaaaagagaggagtggcaggcgtttgatgtaccttgattaggggccatggagcgaagtcgcttcgaaggccttggttcctccatgagcaatcggcgggaggggctggggagaaaaacaagagagcaagaacggatttaggaagacagaggtgacaaggcagggggatggccgtggcctttctaggggaatgaggattctgtccccaactgcacccacccgagatccgtccacgcctccgggacccccagacacacacctgatcttcccacagctggctccggagatctgaaaattaggagactcttcgacgaagagaggcccgaggagtcggaggtgtccacaggttcaccgctgtagctctgaggtagtccacccgcagccagggagtctggagggagcacgcagcaggttctggctccgagcccagcagaaagccgactgctggaggccgagcgccgtccctcttatatggcagcaaggcagtcgcgtaagggacaggcgtcgtcagaggggggccggctggggcgggcctggctgggcttgcgaggcgcattgggccagtcccctgccagtcaaatgggggcccttctgagatgccgccatttctagacgtccgtggttgattgattaatctaatcatcgaggaaaaaaaattgcataatgacctctgagtgtcagcacaatgaggtgtggtgccctgaaagcggctgacaggaagatgcgattagcttagatctgagcatggtcaaggaaagcatccaaagcggggatatctgggctgaaatctggaacataacgtttgaaattagtcatcctgaaccgggttgggagaggcagggagggaggaaggggagtgaagagagtgtgctgaggcccggactggaagggagcccggcacattctgggaatggacgggaggccaagtccaggcccggaggtggtgcgaggtggaggcagggtccgcgcaggagctggtcttgttccaaggcagcggaaaaccgtggaacggtgtccggcagcgggttaacatttcagaaacgaccagcctggctgtgaaggagcgccaacccagggtccgcagaataagtcaggagaggcaagaaggctattgcagccctcggggttgggcgcagggtgctgttagactgagactcagggaggtagaggaggagaaagttccctggtgggagagaaatttccaagagaaagcgagacccagtgtggacagcccttgaggaagagactgcggccttggtagcccgccggttcattcaggcagaggtggaccgagaacctgctctgaacgggaagttgcggagcttggcttgcgcacatctggttgaaggggcttttgaactgccaagtgaggatgtcaagtggccttttgtaaaaagagtcgagctcagcgcgatggcgacggggctggagatgcgtgtgagacccacaccgctggcttttattgctgtgggtgcactcacgggtggaggaagacagcgggaaacacagcaggacgctggaggggatcccacagtgggttatttggttggtttgcatccttgtgtcttttacagagacgggttctcgctctgtagcccaggctggagtgcagcggtgccatctcggctcgctgcggctacttggggtggggcggggggggggggggggctgagataggagaatcagttcaagtgattctcctgtctcggcctccggagtagctggactacaggtgagcgccaccacatcgggataattttcggatttttttggagagacgaggtttcgctatgtgcccaggcttgtttggaaggcctgagctcaagccgtccgtcccgctcaacctcccgagtcgctgggaccccaggcgcaagccaccatgcccggccaattatttttttgggttgtatttcctgttgaagtgaggttttgctatgctttcacctcacataccttttctgtcccaagaccccatccagggtaccaccttacaactcgtcacggttccccttggctgcgacggtttctcacacttgccttgtttttgatgaccctgacactttgaatactgatcagatatattgtgggatgtcctctcctgaagttcgtgtgatgtattccttgtgatctgactggaattatatgtttttgtcaggaagattgcagcgggaaagcgccattcccatcccatcctgtctagagtacacaccatcaagccggcttatcactgctgctattagtcctggtcaccgggctggggcagtgttgattaggtttctccaccataaagtgattttcccacctctttctctactgtgctttctggaagtcgctacctgtagcctatacgtaaagaaaagggaagttttgctttatctccttgcaggggaatagctacctaagttctgtggagttctcctgtgtggaggattttcccattctcccccacatgtttgtttatttaatcacttat

SEQ ID NO: 917377 - DNA, 4001 bp, Homo sapiens
aaaaccgctgagtcacccagagccctaaacccgatgcagggatagagggtcaagacgggttgccagtcaacagcctgaggcccaggagcagcgggcggctcctgaaaccccagctcaggttgcgccacgtcggggccagggccttcctgcacagttccaggcggaggacctgtttcagaaagggagaaggctgcggtctccgtgatttccggttccccctggtggcctggctctccatggtggtccagttggatgtgcacgtccggtgccatcaagccttctgccccctgtctctggccagcgtccccgcggggcccagcccttctgccacggcctcgccctggccgccggcttcctccccggcgccggcctctctctgcaggagggggtgactctgggcgagctgggggctgccgtctgaagggtttcacgtaagcgatgggttttgcgggttgggctggctgtgcgggcccatctgcttccacggagccttcagggtccgcaacacagcagcctggctctggaggaggcccacctgaggctaaaagagaagcggagcgtgagcagagagagacagaaggaacttcacccgtcaagcagttataggatacttttacaaataaatactcagagaaaagagggatttctgaagttaaaattgtgagagaagaaacaaaactctccacggaagttggagaatgaagttgagaaggtctcccacagaacaaagcaaaaacctaaaatgatggaaagaaggatgaaatataagagaattagaggtatgctgtggctgagacatttcaccagaaaatttcagagtgctgaggaaaaagagaagattctaacagattctagagagcgggagacagagaaaggaaaagtcacatggaaagggctaggattccacatgtctcaaaagtcagacatctcaaaagcagcagttcagtctagaacataacagaaaatgtcttcgaaatttcaagggaaatgaatttcccacctaaaatttcctgtccaaccgaagtttcgctgaagaatctgggaggggagaatgaagatgtttcagacaagcaagatgttaaagaatttcctttcagtggatgctttattgttatgcatctgtcaaactagacaagattaaaagatttaggacactcagcgtatgaagggaaaagttttggagaacaacgtggcaacagccggaaaattccaactcctccgggaaagaacaaggtggaagtaccggtttatcatagatcaagacgtagcgtgaggactcgctctgctacggagaaacagtaatacaaaactaaacagaaggaaacagcgacaacaacagcaaatctcagatttgggaaatgggattacggttcggaagagggaaaggaatttcccagatgatgtggaacccgggagctgacttccaacaagcagcccaggttgaggcaggctaggagaaggtgaaacagagaatgcttgattgagtttgagtgtcaaccattggggaagaattggggaacagacgaaattaaaaagagaggagtggcaggcgtttgatgtaccttgattaggggccatggagcgaagtcgcttcgaaggccttggttcctccatgagcaatcggcgggaggggctggggagaaaaacaagagagcaagaacggatttaggaagacagaggtgacaaggcagggggatggccgtggcctttctaggggaatgaggattctgtccccaactgcacccacccgagatccgtccacgcctccgggacccccagacacacacctgatcttcccacagctggctccggagatctgaaaattaggagactcttcgacgaagagaggcccgaggagtcggaggtgtccacaggttcaccgctgtagctctgaggtagtccacccgcagccagggagtctggagggagcacgcagcaggttctggctccgagcccagcagaaagccgactgctggaggccgagcgccgtccctcttatatggcagcaaggcagtcgcgtaagggacaggcgtcgtcagaggggggccggctggggcgggcctggctgggcttgcgaggcgcattgggccagtcccctgccagtcaaatgggggcccttctgagatgccgccatttctagacgtccgtggttgattgattaatctaatcatcgaggaaaaaaaattgcataatgacctctgagtgtcagcacaatgaggtgtggtgccctgaaagcggctgacaggaagatgcgattagcttagatctgagcatggtcaaggaaagcatccaaagcggggatatctgggctgaaatctggaacataacgtttgaaattagtcatcctgaaccgggttgggagaggcagggagggaggaaggggagtgaagagagtgtgctgaggcccggactggaagggagcccggcacattctgggaatggacgggaggccaagtccaggcccggaggtggtgcgaggtggaggcagggtccgcgcaggagctggtcttgttccaaggcagcggaaaaccgtggaacggtgtccggcagcgggttaacatttcagaaacgaccagcctggctgtgaaggagcgccaacccagggtccgcagaataagtcaggagaggcaagaaggctattgcagccctcggggttgggcgcagggtgctgttagactgagactcagggaggtagaggaggagaaagttccctggtgggagagaaatttccaagagaaagcgagacccagtgtggacagcccttgaggaagagactgcggccttggtagcccgccggttcattcaggcagaggtggaccgagaacctgctctgaacgggaagttgcggagcttggcttgcgcacatctggttgaaggggcttttgaactgccaagtgaggatgtcaagtggccttttgtaaaaagagtcgagctcagcgcgatggcgacggggctggagatgcgtgtgagacccacaccgctggcttttattgctgtgggtgcactcacgggtggaggaagacagcgggaaacacagcaggacgctggaggggatcccacagtgggttatttggttggtttgcatccttgtgtcttttacagagacgggttctcgctctgtagcccaggctggagtgcagcggtgccatctcggctcgctgcggctacttggggggggggggggggggggcggggcgggctgagataggagaatcagttcaagtgattctcctgtctcggcctccggagtagctggactacaggtgagcgccaccacatcgggataattttcggatttttttggagagacgaggtttcgctatgtgcccaggcttgtttggaaggcctgagctcaagccgtccgtcccgctcaacctcccgagtcgctgggaccccaggcgcaagccaccatgccgggccaattatttttttgggttgtatttcctgttgaagtgaggttttgctatgctttcacctcacataccttttctgtcccaagaccccatccagggtaccaccttacaactcgtcacggttccccttggctgcgacggtttctcacacttgccttgtttttgatgaccctgacactttgaatactgatcagatatattgtgggatgtcctctcctgaagttcgtgtgatgtattccttgtgatctgactggaattatatgtttttgtcaggaagattgcagcgggaaagcgccattcccatcccatcctgtctagagtacacaccatcaagccggcttatcactgctgctattagtcctggtcaccgggctggggcagtgttgattaggtttctccaccataaagtgattttcccacctctttctctactgtgctttctggaagtcgctacctgtagcctatacgtaaagaaaagggaagttttgctttatctccttgcaggggaatagctacctaagttctgtggagttctcctgtgtggaggattttcccattctcccccacatgtttgtttatttaatcact

SEQ ID NO: 917378 - DNA, 4001 bp, Homo sapiens
aaaaccgctgagtcacccagagccctaaacccgatgcagggatagagggtcaagacgggttgccagtcaacagcctgaggcccaggagcagcgggcggctcctgaaaccccagctcaggttgcgccacgtcggggccagggccttcctgcacagttccaggcggaggacctgtttcagaaagggagaaggctgcggtctccgtgatttccggttccccctggtggcctggctctccatggtggtccagttggatgtgcacgtccggtgccatcaagccttctgccccctgtctctggccagcgtccccgcggggcccagcccttctgccacggcctcgccctggccgccggcttcctccccggcgccggcctctctctgcaggagggggtgactctgggcgagctgggggctgccgtctgaagggtttcacgtaagcgatgggttttgcgggttgggctggctgtgcgggcccatctgcttccacggagccttcagggtccgcaacacagcagcctggctctggaggaggcccacctgaggctaaaagagaagcggagcgtgagcagagagagacagaaggaacttcacccgtcaagcagttataggatacttttacaaataaatactcagagaaaagagggatttctgaagttaaaattgtgagagaagaaacaaaactctccacggaagttggagaaagaagttgagaaggtctcccacagaacaaagcaaaaacctaaaatgatggaaagaaggatgaaatataagagaattagaggtatgctgtggctgagacatttcaccagaaaatttcagagtgctgaggaaaaagagaagattctaacagattctagagagcgggagacagagaaaggaaaagtcacatggaaagggctaggattccacatgtctcaaaagtcagacatctcaaaagcagcagttcagtctagaacataacagaaaatgtcttcgaaatttcaagggaaatgaatttcccacctaaaatttcctgtccaaccgaagtttcgctgaagaatctgggaggggagaatgaagatgtttcagacaagcaagatgttaaagaatttcctttcagtggatgctttattgttatgcatctgtcaaactagacaagattaaaagatttaggacactcagcgtatgaagggaaaagttttggagaacaacgtggcaacagccggaaaattccaactcctccgggaaagaacaaggtggaagtaccggtttatcatagatcaagacgtagcgtgaggactcgctctgctacggagaaacagtaatacaaaactaaacagaaggaaacagcgacaacaacagcaaatctcagatttgggaaatgggattacggttcggaagagggaaaggaatttcccagatgatgtggaacccgggagctgacttccaacaagcagcccaggttgaggcaggctaggagaaggtgaaacagagaatgcttgattgagtttgagtgtcaaccattggggaagaattggggaacagacgaaattaaaaagagaggagtggcaggcgtttgatgtaccttgattaggggccatggagcgaagtcgcttcgaaggccttggttcctccatgagcaatcggcgggaggggctggggagaaaaacaagagagcaagaacggatttaggaagacagaggtgacaaggcagggggatggccgtggcctttctaggggaatgaggattctgtccccaactgcacccacccgagatccgtccacgcctccgggacccccagacacacacctgatcttcccacagctggctccggagatctgaaaattaggagactcttcgacgaagagaggcccgaggagtcggaggtgtccacaggttcaccgctgtagctctgaggtagtccacccgcagccagggagtctggagggagcacgcagcaggttctggctccgagcccagcagaaagccgactgctggaggccgagcgccgtccctcttatatggcagcaaggcagtcgcgtaagggacaggcgtcgtcagaggggggccggctggggcgggcctggctgggcttgcgaggcgcattgggccagtcccctgccagtcaaatgggggcccttctgagatgccgccatttctagacgtccgtggttgattgattaatctaatcatcgaggaaaaaaaattgcataatgacctctgagtgtcagcacaatgaggtgtggtgccctgaaagcggctgacaggaagatgcgattagcttagatctgagcatggtcaaggaaagcatccaaagcggggatatctgggctgaaatctggaacataacgtttgaaattagtcatcctgaaccgggttgggagaggcagggagggaggaaggggagtgaagagagtgtgctgaggcccggactggaagggagcccggcacattctgggaatggacgggaggccaagtccaggcccggaggtggtgcgaggtggaggcagggtccgcgcaggagctggtcttgttccaaggcagcggaaaaccgtggaacggtgtccggcagcgggttaacatttcagaaacgaccagcctggctgtgaaggagcgccaacccagggtccgcagaataagtcaggagaggcaagaaggctattgcagccctcggggttgggcgcagggtgctgttagactgagactcagggaggtagaggaggagaaagttccctggtgggagagaaatttccaagagaaagcgagacccagtgtggacagcccttgaggaagagactgcggccttggtagcccgccggttcattcaggcagaggtggaccgagaacctgctctgaacgggaagttgcggagcttggcttgcgcacatctggttgaaggggcttttgaactgccaagtgaggatgtcaagtggccttttgtaaaaagagtcgagctcagcgcgatggcgacggggctggagatgcgtgtgagacccacaccgctggcttttattgctgtgggtgcactcacgggtggaggaagacagcgggaaacacagcaggacgctggaggggatcccacagtgggttatttggttggtttgcatccttgtgtcttttacagagacgggttctcgctctgtagcccaggctggagtgcagcggtgccatctcggctcgctgcggctacttgggggggggggggggggggggctgagataggagaatcagttcaagtgattctcctgtctcggcctccggagtagctggactacaggtgagcgccaccacatcgggataattttcggatttttttggagagacgaggtttcgctatgtgcccaggcttgtttggaaggcctgagctcaagccgtccgtcccgctcaacctcccgagtcgctgggaccccaggcgcaagccaccatgccgggccaattatttttttgggttgtatttcctgttgaagtgaggttttgctatgctttcacctcacataccttttctgtcccaagaccccatccagggtaccaccttacaactcgtcacggttccccttggctgcgacggtttctcacacttgccttgtttttgatgaccctgacactttgaatactgatcagatatattgtgggatgtcctctcctgaagttcgtgtgatgtattccttgtgatctgactggaattatatgtttttgtcaggaagattgcagcgggaaagcgccattcccatcccatcctgtctagagtacacaccatcaagccggcttatcactgctgctattagtcctggtcaccgggctggggcagtgttgattaggtttctccaccataaagtgattttcccacctctttctctactgtgctttctggaagtcgctacctgtagcctatacgtaaagaaaagggaagttttgctttatctccttgcaggggaatagctacctaagttctgtggagttctcctgtgtggaggattttcccattctcccccacatgtttgtttatttaatcacttatttata

SEQ ID NO: 917379 - DNA, 4001 bp, Homo sapiens
aaaaccgctgagtcacccagagccctaaacccgatgcagggatagagggtcaagacgggttgccagtcaacagcctgaggcccaggagcagcgggcggctcctgaaaccccagctcaggttgcgccacgtcggggccagggccttcctgcacagttccaggcggaggacctgtttcagaaagggagaaggctgcggtctccgtgatttccggttccccctggtggcctggctctccatggtggtccagttggatgtgcacgtccggtgccatcaagccttctgccccctgtctctggccagcgtccccgcggggcccagcccttctgccacggcctcgccctggccgccggcttcctccccggcgccggcctctctctgcaggagggggtgactctgggcgagctgggggctgccgtctgaagggtttcacgtaagcgatgggttttgcgggttgggctggctgtgcgggcccatctgcttccacggagccttcagggtccgcaacacagcagcctggctctggaggaggcccacctgaggctaaaagagaagcggagcgtgagcagagagagacagaaggaacttcacccgtcaagcagttataggatacttttacaaataaatactcagagaaaagagggatttctgaagttaaaattgtgagagaagaaacaaaactctccacggaagttggagaaagaagttgagaaggtctcccacagaacaaagcaaaaacctaaaatgatggaaagaaggatgaaatataagagaattagaggtatgctgtggctgagacatttcaccagaaaatttcagagtgctgaggaaaaagagaagattctaacagattctagagagcgggagacagagaaaggaaaagtcacatggaaagggctaggattccacatgtctcaaaagtcagacatctcaaaagcagcagttcagtctagaacataacagaaaatgtcttcgaaatttcaagggaaatgaatttcccacctaaaatttcctgtccaaccgaagtttcgctgaagaatctgggaggggagaatgaagatgtttcagacaagcaagatgttaaagaatttcctttcagtggatgctttattgttatgcatctgtcaaactagacaagattaaaagatttaggacactcagcgtatgaagggaaaagttttggagaacaacgtggcaacagccggaaaattccaactcctccgggaaagaacaaggtggaagtaccggtttatcatagatcaagacgtagcgtgaggactcgctctgctacggagaaacagtaatacaaaactaaacagaaggaaacagcgacaacaacagcaaatctcagatttgggaaatgggattacggttcggaagagggaaaggaatttcccagatgatgtggaacccgggagctgacttccaacaagcagcccaggttgaggcaggctaggagaaggtgaaacagagaatgcttgattgagtttgagtgtcaaccattggggaagaattggggaacagacgaaattaaaaagagaggagtggcaggcgtttgatgtaccttgattaggggccatggagcgaagtcgcttcgaaggccttggttcctccatgagcaatcggcgggaggggctggggagaaaaacaagagagcaagaacggatttaggaagacagaggtgacaaggcagggggatggccgtggcctttctaggggaatgaggattctgtccccaactgcacccacccgagatccgtccacgcctccgggacccccagacacacacctgatcttcccacagctggctccggagatctgaaaattaggagactcttcgacgaagagaggcccgaggagtcggaggtgtccacaggttcaccgctgtagctctgaggtagtccacccgcagccagggagtctggagggagcacgcagcaggttctggctccgagcccagcagaaagccgactgctggaggccgagcgccgtccctcttatatggcagcaaggcagtcgcgtaagggacaggcgtcgtcagaggggggccggctggggcgggcctggctgggcttgcgaggcgcattgggccagtcccctgccagtcaaatgggggcccttctgagatgccgccatttctagacgtccgtggttgattgattaatctaatcatcgaggaaaaaaaattgcataatgacctctgagtgtcagcacaatgaggtgtggtgccctgaaagcggctgacaggaagatgcgattagcttagatctgagcatggtcaaggaaagcatccaaagcggggatatctgggctgaaatctggaacataacgtttgaaattagtcatcctgaaccgggttgggagaggcagggagggaggaaggggagtgaagagagtgtgctgaggcccggactggaagggagcccggcacattctgggaatggacgggaggccaagtccaggcccggaggtggtgcgaggtggaggcagggtccgcgcaggagctggtcttgttccaaggcagcggaaaaccgtggaacggtgtccggcagcgggttaacatttcagaaacgaccagcctggctgtgaaggagcgccaacccagggtccgcagaataagtcaggagaggcaagaaggctattgcagccctcggggttgggcgcagggtgctgttagactgagactcagggaggtagaggaggagaaagttccctggtgggagagaaatttccaagagaaagcgagacccagtgtggacagcccttgaggaagagactgcggccttggtagcccgccggttcattcaggcagaggtggaccgagaacctgctctgaacgggaagttgcggagcttggcttgcgcacatctggttgaaggggcttttgaactgccaagtgaggatgtcaagtggccttttgtaaaaagagtcgagctcagcgcgatggcgacggggctggagatgcgtgtgagacccacaccgctggcttttattgctgtgggtgcactcacgggtggaggaagacagcgggaaacacagcaggacgctggaggggatcccacagtgggttatttggttggtttgcatccttgtgtcttttacagagacgggttctcgctctgtagcccaggctggagtgcagcggtgccatctcggctcgctgcggctacttgggggggggggggggggggggggggggctgagataggagaatcagttcaagtgattctcctgtctcggcctccggagtagctggactacaggtgagcgccaccacatcgggataattttcggatttttttggagagacgaggtttcgctatgtgcccaggcttgtttggaaggcctgagctcaagccgtccgtcccgctcaacctcccgagtcgctgggaccccaggcgcaagccaccatgccgggccaattatttttttgggttgtatttcctgttgaagtgaggttttgctatgctttcacctcacataccttttctgtcccaagaccccatccagggtaccaccttacaactcgtcacggttccccttggctgcgacggtttctcacacttgccttgtttttgatgaccctgacactttgaatactgatcagatatattgtgggatgtcctctcctgaagttcgtgtgatgtattccttgtgatctgactggaattatatgtttttgtcaggaagattgcagcgggaaagcgccattcccatcccatcctgtctagagtacacaccatcaagccggcttatcactgctgctattagtcctggtcaccgggctggggcagtgttgattaggtttctccaccataaagtgattttcccacctctttctctactgtgctttctggaagtcgctacctgtagcctatacgtaaagaaaagggaagttttgctttatctccttgcaggggaatagctacctaagttctgtggagttctcctgtgtggaggattttcccattctcccccacatgtttgtttatttaatcactta

SEQ ID NO: 917380 - DNA, 4001 bp, Homo sapiens; identical to SEQ ID NO: 917375

SEQ ID NO: 917381 - DNA, 4001 bp, Homo sapiens; identical to SEQ ID NO: 917376

SEQ ID NO: 917382 - DNA, 4001 bp, Homo sapiens; identical to SEQ ID NO: 917379

SEQ ID NO: 917383 - DNA, 4001 bp, Homo sapiens; identical to SEQ ID NO: 917377

SEQ ID NO: 917384 - DNA, 4001 bp, Homo sapiens; identical to SEQ ID NO: 917378

SEQ ID NO: 917385 - DNA, 4001 bp, Homo sapiens; identical to SEQ ID NO: 917375

SEQ ID NO: 917386 - DNA, 4001 bp, Homo sapiens; identical to SEQ ID NO: 917378

SEQ ID NO: 917387 - DNA, 4001 bp, Homo sapiens; identical to SEQ ID NO: 917376

SEQ ID NO: 917388 - DNA, 4001 bp, Homo sapiens; identical to SEQ ID NO: 917377

SEQ ID NO: 917389 - DNA, 4001 bp, Homo sapiens; identical to SEQ ID NO: 917379

SEQ ID NO: 917390 - DNA, 4001 bp, Homo sapiens; identical to SEQ ID NO: 917375

SEQ ID NO: 917391 - DNA, 4001 bp, Homo sapiens; identical to SEQ ID NO: 917376

SEQ ID NO: 917392 - DNA, 4001 bp, Homo sapiens; identical to SEQ ID NO: 917377

SEQ ID NO: 917393 - DNA, 4001 bp, Homo sapiens; identical to SEQ ID NO: 917379

SEQ ID NO: 917394 - DNA, 4001 bp, Homo sapiens; identical to SEQ ID NO: 917378

SEQ ID NO: 917395 - DNA, 4001 bp, Homo sapiens; identical to SEQ ID NO: 917375

SEQ ID NO: 917396 - DNA, 4001 bp, Homo sapiens; identical to SEQ ID NO: 917376

SEQ ID NO: 917397 - DNA, 4001 bp, Homo sapiens; identical to SEQ ID NO: 917379

SEQ ID NO: 917398 - DNA, 4001 bp, Homo sapiens; identical to SEQ ID NO: 917378

SEQ ID NO: 917399 - DNA, 4001 bp, Homo sapiens; identical to SEQ ID NO: 917377

SEQ ID NO: 917400 - DNA, 4001 bp, Homo sapiens
gggggtgcgtgactgtagtccccgtcccagctactcgggaggctgaggtgggagaacttcttgagcccaggaactgagatcgcgccactgcactctagcctgggtgatagagcgagacccagtctcaaaaaaaaaaaaaaaaaaggcgtaaaccttagcaatttttgttttgttttgagacgggatctcgctctgtcgcccaggctggagtgcagtgacgtgatctcagctcactgcagcctctgcctcagcctcccaagtaactgggactacaggcgcgcaccaccacgcccagctaatttttgtatttttagtagagatggagtttcgccatgttggccaggcttgttcaaattttttttaaatataaaggaatcataatttttgcataaattattggaaaacttttcaaagtttagattaaaagagagtaagctatattactctgatactgggatatgtatcagtaatttatgaagtagtactgtgtatcaactattctcccccctataaaaacgtgaaactctccaggatgtttggtagaaaaacactatattagatacatacaattaaacactgtctcattactgcagattaaacggtgttacttgagtacagagtttgggcacctaagcagtttgaggtaaatagcaggctgcactgaggtgagaaataaagtggcaggccaaggcaggaggatcgctcgtgctcaggagttcgagaccagcctgggcaacatagcgagaccccatttctattaaaataaataaatttaatttaaaaagaaataaagtggtctacccttaaacgcatataggtgtggttgaagccaaggatgggatgttaataattgtttaagaagcaagtctcctggacagaccctcacgaccagtgatacgtctggtccgacttaagcttcctttccaaatgtacatccaattcgttttttatggcacgatttttgccttgaagaattctcaccccaaaacgctgcccgcccctgtccccggaccctttcggtacccggggcaacggggaacccgggagcgctcgctacctggacagggtgcaccatgcccgatccagcgcagggcagcaggcctgcagccaccgcaaagcacgatcggcgcacggcagaaaacggcggccactgtgagcgcaggaaatcccgggaccgtgaactcgaaaccaaaggcgccgagctggggaagcggccaaccccgcacagaggaatcgatgaggccgagcggcgccacggttgccacaggttgagacagcgtcctaggacgaggctggcctcagccccacgaccccgcggccaccccgacagtccttttgttccctcgcgcgggcgcctgacactcaccaagcggatgaagccgaagccacggtcccggttgatgaagacttcgctgggctcgccatagcgttcgaagagcctcttgaagtcctcctccgtgatgtcggtgggcagatttcccacgaagaggcggcagcgctgcgtgtacgtcttctcgcccggcttgaggaaactcttgatgtcgatagtgaaccccatctcctcgtccgggtggtcctctggaggcgcgggcgcgggcggtgccggctccccggcaagagcgagcgccatggctgccgcggccgccggctcgctctcgcccaccgcggactccagggcgcgaaggcgggccgggtttttctcaatgcgcacttgcttcaggtttcctcttaacatcatcttactgagttcgcctcggacaccggatacaggcctagatttatagacagtgtgtctatatatatgtatacgtctctacataaacctatgccaacaaaatatcgacaatcaagagaccgctaggtaggcgagtcggcaacccgtcctcccccaactcacgcccgctgcagctgcacattcaaaatggcgctgccacaaactgcagttagaagaagagacgccggtgcaagtcccacccctccgccaaagccggcgccggaacgacgcgcctgcgcactcgcggcaccaacggaccgttgactgaccgcgcatgcgcataacgctgcgcgtgcaatcgacaaatctcctaggagggtgaagacgtcctttcccatcctgctaaaatatcaaaactgttgttggctgtactcttgggacaaattatgtgatgtgtgcagcagtgtgtgaaaatacaatgacttgagtaaacatccttacccttttagatatcaagctcaattttgttttgttttgttttgttttgttttgttttgttttgttttttgagacggagtctccctctgtcgcccagactggagtgcaatggcgcgatctcggctcactgcaacctccgccttctgggttcaagcaattctcctgcctcagcctcctgagtagctgagattacaggtgcgcaccaccacgcctggctaatttttttgtatttttagtagagacgggttcaccatgttggtaaggctggtctcaaactcctgaccttgtgatccacccgcctcggactcccaaagtgttgggattacaggcgtgagccgccgcgcccggccatatcaagctcaattttcaatgattgtggaaaaataaaaacttgcatattttggatgtagcattcaataacaagatacctcccagtaatttttaaaaatctttatttctgtttcaagagcaaggtttttatatttcctagttaaacaatacaattctataaaataactgtgctgttgattattggcctcagaggactccgtgaaattgcttataaaattagtataatcaggccatgagctcttatgggccatagtcttatgacaagggtcaacaaactttttctgtaaagggccagatagccagtatttcagatttggaggccacattctctaacaactactcaactctatgctcctggcacatggtgactccttaatgaatgttgaaaagaaatgaactcagtcactatgcaaaacagttcagcagtatctcatgaagcttgacatttgcttactttacaatagcaatcccatttctaagtatttacccaagtgaaatgaaaacttgtgttcccacaaaaatctgtatgcaaatgtttacaggggctttatttgtcctcaaaacaaaaacaaaagaaacaattcaaatgtccttccactggtgaatggataaacagtggtacgtccacataacaggatactactcagcaataaaaaggaataaactactgatacaagcaacaccatgaactgatacaagcaatgccctgactcaaaaggttacaaactgtgtatataacattctggaaaaggcaaaactattgctgcagaacacagattggtggttgccagggactgggatgtggagggcagttaaccacatggtaacactcggaagcttttggaatgatggaactaaatcttgattgtggtgatgactacacaattgtatgcgtttgtcaaaactaagtctaactgtgcactaaaagggtgaatgttggccgggctcagtgactcacacctgtaatcccaccactttggaggccaaggcaggcggaccaactgaggtcaggagttggagaccagcctggctaacatggtgaaaccccgtttctcctaaaattacaaaaaattaaccaggcatgttggtgcaagcctgtagtcccagctattcaggaggcagaggcaggagaatcgcttgaactcggaaggcggaggttgcagtgagctgaatggtgccatttcactccagcttgggcaacaagagacaaaaaaaaagggtgaatgttactgtacttaagttatactttgaacaaacatttttttaactacccaaaagaataaaaataaaacacaatcaacactaatctctatttaccatagtcctcagtcaccacccaaatcctttttttttttttttttgagacggagtttcattcttgcccaggctggagtgtagtggcacaatctcggctcactgcaacctctgcctcccgggt

SEQ ID NO: 917401 - DNA, 4001 bp, Homo sapiens
acaactgcaaaatctctggtgatcaggattccggctgcatcacgtccttggtgctgaagaagcaagaggccagtggaaacgaaactgctgcttcattccctccgatgcaggggccgttccagcactgcagggcagctcttgttccagaaacacaccgtgtgttaagagtctgcctccaacggtggccactacaggggtttcggttagggtcccccaataacactcctgcattaaccttgctacttgtaaaccaagggcagcagtaaatcccagccaaccagcaaaagcagcagaggggcaaagctttgtacaaaaccaaattgggttcaatttgactttgtacagaagcaaattgggttcgtgaattgggttcgatttgacttctagagcgtgtgttccatcgttaccaaatgctcagtgtgagggagtcagctcagtaaacctcatcctgcagcctgaggcagaagacagagttggagcaaagatcagggaaatgcacctctttacctgggggacattgttttcacaagatgattgccaataaattagtcacgatgttaactgggataataataaaaaagcatcaaagaaggcaaaagggagggggagaactggaagtacctctgtgagcttcgttaattcagttttaaagagagaattcattatcatcttgtttattcagcatactgatacacccaagatggcaatttaagaattctggacggggcctttgggtatatgactttttaagatgctaacataaaagaagtcagaactttcagagtttcaggcttctaaaaactcacactcattgaaaatgtgtcacactatttccagtttcttcattcacttacaatatcttattcttttgtaaggagaaggaaatatattccattgcaatgctacaatcaccagtgttattttccaaagttaaacagaaagcctgaattgagatcctctaagttgtacttttgaaaagtcacaaatactacacaataaaaataactcattacctatcttaaaaatgcttccaccggaagtcactccaacccaaacccatatgacgtatctgagccaagatcaagcagaagattaactgtaaaaggcagatatgctccgggctaagaggtccggaggctccagttttatttcctctctcctgactaaacccaacaggggggaacactctgtgcctcattttactttttcttagaaaggggctaataacaccagctctgctcacccctcaagtgaatctcaaaggatatcatgttcctacgggtacgtgaaaactgaaaatacctaacaaagcagccacagaggagcgtctctggttcccagggcggcagagcaggaacgcggggctcgggagcaaaggcagcttaggtacacaaatgaccagcgggttctctgcaacttgggttgtccctgaggtcactgagtggctgagaggcagcgctcagcccaaccagcaagggaggacgagtgggaaaccccgagaaggaggcatttgctgtccgaggccgggaccctgtgcgcggccgggtgccctgctggaagccccgcgccccccgtccccggcggagccccagggcggtgtggctcatgcggcgccggcctcacctgcggtgtcccagatggagatgttgtaggagcgccactgcttcaggtagaaggcgccgcccaccgtgctgaccgtgtccgggaagcgccgctccatataccgctgcagcagcgacgtcttccccacgttcatgtcccccaggagcacgatcttgctgtcgggcttcctcatcttcccgtaagaacccccagcgcccccgcgccctctccccgaggctggccggctcgtgcgccctgggcgcagctggaggagcggaccccggactcgccgggacccggattctcgtgaacgctccgggaccttcgcctccggacgcccgggagctcaagagaggaagcgcgtgtgcgcgcccgggaaggagctgggtgcagagcacggagcccacgtcgggggcccggaccgcggcggcctcgcctcgccccgcccccgcccccgcccccgggccctttcaccgccgcggccccgccctatcctcctccgcccaccgcccccgtcccgcccctgctggacctcgccgtttcgcaagcatccgagttctccagccgaggctcgggactgctgcagggtggaaaatgaaagttctgagagcaccttccgcccctccgcttctgcacagccggggctgcggtgcgaggagcttggccgcggggcccgaacgaggcgaaggggccggggcccttggggaacccccttctctcttccactctcccttaggtaaaacccgtgttcctctcacgctcgacccagcgcctttccagctgcggtcgatttgcttctccgcgtgtaagtacagccaccctcaaggtcattgaaaaagtttgctttaaatgagcgtctgcggaactcgtcctgaggctctcactgttacagattagagatgggggcgctttctagtggaggattttgcttttgctcttctacttttgcaagaagctttttgtcctgaaaagtggacagtcatctccatttatagcttggaatgaaaatttgactatggaagttgcagtcgctacttgagaaatatttcctccttctttttttttttttttttttatttttgacacggagttttgctgttgttgcccaagctggagagcagtgcgcgatctcggctcactgcaacctccgccttccggtttcaagcgattctcctgcctcagcctcccgagtaggcgggattacaggtatgtgccaccatgcccggctaatttttgtatttttagtagacacggggtttcaccatgttggccaggctggtctcgaactcctgacctcgtgatccacccgcttcggcctcccaggtcctccttccgttttaaaggataaaccttgaaatgcttttaaaatatgcagcgtgtagaatttggttagttggttggttggggttttttagagaaaatgagaggtagaatggactctaagttaaaccctgggggacagtgtcactctggccgctggcctggctgggaaaggcgatgagaccctgagcaggttaaaacccgtgtcctgaaggtgtcctgtaaagggaaataggcccgttgcctccttcgtaggtgccctgagactccgacaaggcaggaatgccaaggtatttcgtacctgctcagccctggcatgtcaggttgctgagaccgagcagtgtggggctgaggtggaagcggaccttctggggcgtggaaagcgcaccaggagaccccggctccttctcagccagcactgcctcatcctcagaacaaatttaagtcaattcagcatttattcaatgcctgttgcatgcaagtgacaacctaaataacagagaggatctctaaaagaaacagatatttattttgcaatagagctttgcagtagaaatatgcatgccatggtaaacttgtgcatattcagagaggcaaggaaagcaaaggctttaaaaaaaatgaggcggattgcacaattgtttgaaaataattatctgtggctacaaagatccataacgaaggcgatgccagttcaaagtaggacagccagtggctgggccatgtccttgcaggactagttttttgtgggagattgcagtggcctttgtgcaaggttgcggtttttccagagagtcctttttgttatcaggcatgcacgcgcaagaaccctctcttcatggccttccccggctctgtttgtcagggttttcttaacattagcggctccatttcgattctgacaattttcacacaagctacagtgcctggcctgggacgacacaaacatgagtcaggtttggtgcctgttggccaggcgcagtggcacacacctgtaatcccaccactctgagaggccgaggcagatggatcctttgagcccaggagttcaagattagcctggcaacatagggagaccc

SEQ ID NO: 917402 - DNA, 4001 bp, Homo sapiens
aaatgatactggagaagtacaaagctatcaaatttacaaatcttagcagcagagaccacgaaaatatctgctttattctagtttggaatttaacacaaggatgaataacatgcacgattttagttcagcgattaaagtgcatactcagttaagggggggtggagcaatagagagagagccttctctttgatctcataggttgcattaaaaactcactactcgtaatgaatttttgatcatcccctgggtacacataacttggtccttgctctttcaaaatgagtggactcaaactgacttacaatgtgactgtgtctacggtgcacttacaaccatctttcagtaaaggtcttcagatttaggctctaggtagaataaggcaggaaaaaaaggacaccaaaattatcagcaggcattaactaacaagaactagatgaaacagtaatgtgtaattaaatgataattagaaaaatttgccaaaactttgaactaagatattatcacatttctaatgcttaaaattacacggaaaaatatattcagtgaatttaagagaaaacaaacattttaaatcatttatcagccatatttccaaaatgtatactttagaaaagaatttatatatatatataaaggcttattaacattaactttaaattagctaatacttgtgtcacacttttgaagaagcttctgttttgtttccaggaactggtggtggtggtgtggtggtgttttttttttttttttttttttggaaggggttaaggcggctatattaaaaacaaaaaaacaaaaacaaacagttaagctgcattcttttcctgtgaatggcttatttgtactcctctgttaatattctcgaaaccccatttagcttatgatgtcttcaaataatttaataatctgtctttaaagttttgcactaaattagagacttaatttttgtaaaacgccttggaaccataaacctttaacgagatgagaaaggtctccttcctctggacttgactttactgtataggtgtgtgagcgatttttactgtcaaacattgccaaggcagattgttgttgttcagtctgcaaatgtctcgactatacctgcacagttcctctcttcccaagacaaatctatccacccctttcccccctgcaagttttaaactttgtttccttgggggctctgtaacaagcaatgctaacaacgtccaagagacaaagagctgttctgtgggctaacacgatgccaaattttagttgtgaaacaaagcactcaaatttgagattgaggaggaggagcagaatgacaatagtaaagcctccagcttggagccaccccccagaaagccccttccccggagccccgcgcggggagttccagccccgggacggtgactccggggtgcagccgccaagcccccgtgtgccctcgctcaccgcttcacgcggatgatctggtcccgcatgggcttgatgtcctggaagctctgctggttgacgaggctgtagacgaggatgaagccctggccgttcttgatgtacaggtcccgcatggacgcgaactgctcggtgcccgccgtgtccaggatctccagcaccgacggcgacgaatccacctcgatctccttgcggtagaagtcctcgatggtggggtcgtatttctcgatgaaggtgccggtcacgaactgcacggtcagggcggatttgcctaccccgcccgagcccagcaccaccactttgtactcgcgcatcgtccctccgcggccgccgccgccgccgccgcccgcgacatagacctacgccggccgcgctgcgcccccagccccggccccggcggcccgccccgccgcctcccgctgccgcccccacctcacagccgcggcggccccctgggcgccggcggcggcggcggcaactgagggagcagcggccctgggcatgggccgggccgagccgggcggcgatgcggccccgtaggcaccgggtgggactgagggcgagcagagagagagaccgggagccgctggtgccgcccgagccgcgggcccgcagtgccgcccgccccgcccctcgcgcctccacgcccagatccccgcccgccgccgccgccgccgccgccgctacccccagcgctcgagcgcgcgcccgagccccagccgcagcgcggccaggggcggggtccggcggccggggcggagcccgcggcgcagccccgcccccgccccctaggcgacgggccgcgagcgctcccgagaggctttgcggggctcggaagcttctgcccgcgcggagataaacaagcaccgcgaccgccgagcagcgccgaacccagcgcgcccagtcagaccccagggcctgtgtaccgagcatgcgcagttcccgcccaagccaggagcagcgtcaacctgagactcccgagacattaagaattcggaagggatgagatggtagaggggctagagctacctccaagctttatcctgaggcggggagtgaaggagagatgcccaaggcccaagaggggccgcgagggcctttgtccgatgccacccagtctgtcagcactcctagagctttggttttatcttgtattagcatgtgaagctttaaggggggggcacctacaggcttctgactgaagttgtgtaaacgcaacaaaatgaagctttggagcgttaggacattgatgggagggtgacgcccccctctagcagcgcgccagaggggcgagtcagaggcggccacacaccacggaagtcgggtccaagcccgctgacgtcgccggggtcccgcccaccaaccctctggacccgcccacatttcttctagacccgcccctttcggtgccgaactgaagtcgagctcttcccacgccctgtcagccacgggtgagttgaaaacctggagagcggaatcccgaacggcagccggaaggccctggactcctcatagcaacagccagctaggggcatctagtgggaagctgggattcattctagccaaccacatcacgtctctgtaccacaaggtaccattcacgaccaataagagagcgcccccataccacgtgcctttactccttcaaccaatcgagaaaaacgctagtcgtaggatccgcaagcccacctcccagtgccttgccaggcggggctcttcgcgcacgctctgccaaccaatcgtaggtgagctggcgagtgacggaagcttcggccaagccaaccagagctcgcgagccccttgccaccgaggccggcgggatggagacagggaccggctgctggggtttgggaggggcagagattgaggagccagttgctgtgccctgttctggcaaaagaacaagatgcgttgcaagccagaatgatgaattccacttttcacgtcgcctccgtggcattctgcctaaatgatgggcatggaaatggtgctgagggatgtgggctgaatcgagaacacagggacttttgtcttcagggtgagaaatgttccggtccttaaggaaacatcgtgcagcagttgcatgggtcttccaggcgttcctcccaaaacattattttttttctttcactattgagttttaaaacttagcgttctgtcgctagcattgcatcttagttacacatcctctcccacccataacgtcaaatttaggagacgatacatccccaagctttcctgcattattttttgcagtaactggttattcagtttactttctttaaactatgtccttctcaaactagtctcacctgttcgttactgtcgcacatttcctgcgaataacacgtttctgtagttctgttgttagagcctggcatacctctccccgttcctctttcccacaaggtcatcatgcagaggggattttggtctgagttaaaagccaggtattctttcaccatcttttctgtcgatagtcaaactactacaaagactactcaaatttagtagtttcttatttccctatagcttcgttatattagaatggataacttatattt

SEQ ID NO: 917403 - DNA, 4001 bp, Homo sapiens
gagactctggtcttccctcgccctcctgttctacttcccatgccttctgtaaagtcctgccgtggcctgaagtgtagcccttcctggagtacacagcgagcatgctgtgccggctgtgggccccccacccccgagccgcaaagccccaggccgcctctgcctgctgcctggagacctggcactgccccacaggggcacccacctccagccctcctgcccccgtgactgaggaagcccagtgcttctcacactcctcagactcgctggctgagccaagcagccttggctgaaggaaagagcagcaaactgacccccacgggccgcgacctttccccacccaggcaaggcgacctcaggcacttcagggagcgccagctctggctttcttgtatgaaagtgacagcggatttaaaccacattaacaaaagaaatccctcctctctggactactcaaagcggaagtgctgccacatcctagctgcagcgcttctgggccaaatatcaagacagtgtctcagcgatgatccgcaaaccaaaataaagccgacaggaaacagcccgctggtttaggggagctggaatgcctccggcagcatcaaatgtcatcaacaactgacactcagcccgttcccggaggcctcttcacacgggaagaggccggctgcgaagtgcggctcagtgggggagaaggaccgtggggaccgcgacactgcaggccctggaagcctctccagcctgaaccgcgctgtggtccagcacactcatggcatgaatatggaacagtcactccaggaaacggtcttgctctgggggagggggaggacttccacatcactctcccaagataaaacaaccagggaaaagcagatccctccagataaaccagaagtccagacacagcctcctctccggaaacgcctccgggagcccacttcagaagctgctgaagcccagagaaaaaccgcagcctcgcaggccctggtcgccaccagctcgcccgccacttctcagtggaaagggacgtggtgccgatgggtccggggtctccccgccccgcgggagccctcagccagaacgccccaccagcacacacgcacacatgcacacacacaaacgcgcgcacacacacgcgcccacacacaaatacacacgcgcgcacacatgcatccacacacaaatacgcacccacacatgcacccacaaacgcacgcgcacacacaccgcccacacatggacacacaaacacaagcacacacaaacacgcgcgcacgcaggcacagacgcgcgcgcacagcagcagcagcgcgccggggcctcacgcccctggggagaagcgtgaaggagcctccacattccccggaaaggaagtttctgggcgcagcggagaaagggagatgccgagaccccgacgtcagtggatttgacacctgaagtgcaggcgcccagacagcctcaggcgcgcgcactcctgcaaacacgcggggcacacgctcgggcgcacacgcggacagacgtccctcggcgcagggaccccacctcctccgccgctaccagggaccggggccgctccgggcgcagaggaggcgcagggagccgcgttaccccggagccgactcgacccagcccgaggcccggggaggcggggaggtggggaggggccgcggagccggaccagccgttctccggggagcgcgccgcgcctggagggcgtctccgccggggtccccagcaaggatctgcggaggggaggcgggcgcgggagaggacagggtcgggccggggggtcggacgcgtggctgccggcggacactcaccgatcttgatcttcacgctctggaagacccggagcccctcgtcctccaccgccatgctgcgcgtccgcgcccgccgagcctcgccccaagcgcgcgccgagcccgggcagctcaggccgagcaggaggagcggcggcgccggagccccgagcgcggccgagggtccgcccgcctgcaagaccgccagttggccgagggcgagggcggggaccgggaggctccgcccgcggcccggcccctgctcccaactggcccgggccctgcaggggcggggttggcagggacggcgctggcgggtggcggagacccggggggcgcagggatcggcttcccccgaggcctcggcccccgcccccgccccgcggattggccgctgagcggaagggaccccagcgggctgcctggcggaagagacgaaggaaggtcgccggcgcggcccgggcccgctgagcgaggctgagcgattgactcgcggacgaactttgccaagagaagttcacgtacaacgatctggcaggggaggaatcccgcgcccagccccagctcctgagatgcgatccgaaggcacctgctgcagacgcacgaggggggcggggacacatacacgcacacacagccccccaccccagacctccggcatgggcaggtcccccccccaagtccccctgcagaccccagcatgggcaggtctccccccccccagtccccctgcagaccccggcatgggcaggtctcccccccccagtccccctgcagaccccggcatgggcaggtctccccccccagtccccctgcagaccccggcatgggcaggtcccccccagtccccctgcagaccccggcatgggcaggtccccccccagtccccctgcagaccccggcacgggcaggtccccccccagtccccctgcagaccccggcaccggcaggtctcccccacccagtccccctgcagaccccagcatgagcaggtccccccccagtccccctgcagaccccagcatgagcaggtcccccccccaagtccccctgcagaccccagcatgggcaggtccccccccagtcccctgcagaccccggcatgggcaggtccccccccagtccccctgcagaccccggcatgggcaggtcccccccccaagtccccctgcagaccccggcatgggcaggtccccccccagttcccctgcagaccccggcatgggcaggtccccccccagtccccctgcagaccccggcatgagcaggtccccccccagtccccctgcagaccccggcatgagcaggtcccccccccaagtccccctgcagaccccggcatgggcaggtccccccccaagtccccttgcagaccccagcatgggcaggtccccccccaagtccccctgcagaccccggcatgggcaggtccccccccagtccccctgcagaccccagcatgggcaggtaccacccttacctccctttcttctgtctcgaggtctcctcctccctgacctcctctctgaggagtatgtttgtgtgtgtgtatgaactgtaggtgtgtatatgaactgagactacactccctcctctatgttgcaaaacttcattgcacccagtgccacacacacaccctacacatatatacacacatacatataccacacatacactacatatacatatacatacacatagacaccacacacagacaccacacacatactacacacgtgtacacacatacatatacacacatatacacacaccctacatacacacaccacatatacacatgaacacatatgttcatatacacacaacacagacagcacacacatatactacccatacacatgcacagacatacacactaaacatacatacacacacctacgtgaacatacacaaacacacacacactgcatggagaggaacaggagcttcatgaagatagaggcctatttttttccactgcttaccttcacttcctaaaaagcagttccatgcgttgaaagaatgaatggcctttcttcccctgactgctgggagcctgcagccacaggggcctctctcatcctcagcccttgcaagcctggtgctcactggggcagaacaggaggttaaggcggcacccctggttccaacccagagcctctgcgtctagcgctggccctgggtggcgtctgcagtgggtgctgtgga

SEQ ID NO: 917404 - DNA, 4001 bp, Homo sapiens
aaccccatctctactaataaataaataaatagataaatagctgggagttccggcgggtgcctgtagtcccagctactcgggagactgaagcaggagaatcgaggagaatcgctggaacctaggaggcggaagttgcagtgagctgagatccagccactgcactccagcctgggcaagagtgaaactccgtctcaaaaaaagcagagcttgccaggggagaagagtctctcccatcagaatcctacctctttttttgttttgttttgttttgttttaaacgtttttttctttgttaatggttccatggctacctccggaagaaatggtgagacctgcttaagtagtgatggcccaccagggttgcaaagtgaagttaagtcaggtgcttaacaagaggaggctgcttctaaccatgcctcccccttagagagtttctaacaccccaaccactggccccacctgtggacagcccattcctccctctaaacgcacaggtcggtttagatgccttgctcagacccctgcgcccagcatgggcgccctacgtgctgtgcccactggggtggtctcacgggtgggggtgagctgtttgcccctggcggttcttacctggacgcccccgggagtatcctggatctgcagggagagctggtccccctcgacatagaccagccgtgaatacagcttgcctggagaatgaagtagagtttgctttttaattctcaaactcccatccgtaaaaagaaacacgcaagcataaaagcagggagcgtgaaagtattctcacctgtattcggttcatagtctccaatgaatctcttggtcaggaagcgcacgatcattgctgaaaaggaaataggaaaatcaaccgaaggagtagaacaagcctgtcaaacccaggcacctcggacaaactggggggagtgaagggtgcagaaccgtgggcactgctcgcttccagaggctccgcaaagccgtggtgccgcgggcttggccgcgagtacgactggcgggacacctctcccgcaccccatccccgaacaggcgccaatcccgccgagatcccaggagtagatgcaccaggaaacgccagggaagcaggccgggacggaccgggacccacccagcgcgaaagcagcccgattctacctgcacccgcgccctctgcttcggccgaggcgccctctctccgcagcgcccccagtggtcgcggccggagccggggagcgaagccgcccgggggtccccgccgcactcaccgctcttgcccacgcggccggcgcccagcaccgccagtttgatgtccttgggcagtaggtagtccgaggaggactcggggatgggtgcgagcagaaagtgcccggacatgctgagcggccgcatggagcgcgtcccggggtccggcgcgcaatccgagagggctgggcctcgccgcacccggagccggctcgccagctgggagtgcgggactagaggtccgggaccgcggcggctgcctgcagaactgtcaaggcccgcggcttttaaagggcttggtgcgcccgggagcgcggcggccgtcccagctcctcctcgtctccgccccttcccggagcggccgggaggggcgggagcagaggccgcggagctgactatcgccgaggctgtgcgcttcgccgggctgctagctgctcgcggctccaggcgctctgcggcaggactgcggctccggggctcagaccctggagatacggccaccgtccagagcgcgcgagtggcctctagtcaggcattctgcgagtctcctcgccccgcagcagccagccggagtcactagacctgtgggtgaacttgagataggagttacgagttgacgagagaagaagaaaaagtgcaatcagttggatgtttctgcaacaatgggacagattgctgtaaaacgctgccctttttatttttaaaaggtgctaaggggctgggcgcggtggcttacgcctgtaatcccagcactttgggaggcccaggtgggcaagatcatctgcggtcaggagttcaagaccagcctggccaacatggcgaaacgctgtctctactaaaaatacaaaaattagcggggcgtggtggtgggcgcctgtaatcccaactactcgggaggctgaggcagcagaatcgcttgaactagggaggcggaggttgcagtgagccgagatggcaccactgcactccagcctggaccacaagagcgaaactccgtctcaaaaaaaaaaaaaaaagaaagaaaagaaaagatgctaaggggtaacattaatatgggaaaagggcggggggcggggggcaagagctctgaattagtatcagtggaggcaactgcagtcactgtgaccttgctagggatagatgaagtccccttaggggcagtgatggttagcatctcagtatccatgcccagcccctcctctgcaggcaggggttgcactggctcattcctgaacactcatgagcactccactggctgggggccctggccctgcactaagtgtccatcattaatactatcctatgtgcttgagtcatgcatttgcttcagtatccaaatatttacttctaggtgcatggtggggtctagggtggggtggggggcagtgtgaggaacaggacacagagctatagactggttcttggatttctggagcccaccagaaatagcacagcagaagcctcaggactttaaccttgaacagttagaagaccttcatgcctctgacctcctgtgttccagcctcacttgcctaatcgcctattagacagccccaccctaattcatacctttctctaccctggttgtaccagtttttgctgcatgacaagccacaccaaactagatggcttagaacaacaatcacttacagttgttgagccctttgatgcatctgcagggagcttccaggttctggaagtgggggctggctgcccttggatagccttactcatgtctggcagctgttggctgtgatgagggagggtagtgactgagttacatgtctcttctcattcagcacgttggccagggcctgccttcatggtagctgagcagagttccaagagagtgggtggaaatggataaggcctcttgagacctaggccttgagaaggaacccatcccttctgctgcattctgttggccaaagcaagtcatggggccagcccatattcaaggagtagggaaatacactccgcccctttgtggaaacagcagaaaagtcacgtgtgaaagggcaaggaagcagagagtgatggagaatggggtccatttttgtaattgaccatgctaatgaatgtgtctccatccacccagtggcccaagcctgggagacatccttgactctacccactctctcacttccacattgattaatcgccaagttccatcatttctcctcctatatttcttggtgtctccctctgtatccctactgctctcatttctttttttttttttttttttgagacggagtctcgctctgtcgcccaggctggagtgcagtggcgcaatctcggctcactgcaagctccgcctcccgggttcacgccattctcctgcctcagcctcccaagtagctgggactacaggcgcccgccactacgcccggctaattttttgtatttttagtagagacggggtttcaccgttttagccgggatggtctcgatctcctgacctcgtgatccgcccgcctcggcctcccaaagtgctgggattacaggcgtgagccaccgcgcccggcctcatttcttatctgcagaattctgaataatcctgaagtaaactaatctagactagatggtgacttcagtttacatgttcctcccttggagaagccgtctctgatcactgccactgtccccacccctatcttgcagttactcactctcagggcactgatctcaactatcattactttctggtggaatatttgtttcatgtctgtctccaggaggacagggactctagcttgtgactc

SEQ ID NO: 917405 - DNA, 4001 bp, Homo sapiens
tttatagagttcaactgtctatgttaatgaaaccctttgtgggtatggataatcaagaacagactgtatcttgtatggttttgacttataagagaattttttatagttccattacttaaaatatataaaatgagttaaaaaatgaaagaaacagtcctcttttttccaagcagtggccacaacgtcaatattcctggttaccctacattagagtatgcttccaaagctgtgtgcataacatggaattctttagagtagccattactgcattttcccaagggaaatttgcaagaattggatacatcagaatttaatcagaaactaaagccatgtcttttcccagaacatgccccagacgtggtttttaattttttgttgttgttattttggttttttaacgaatatggtttttaactgacctataagacagtccatttaaatatataaatttttaatagccttccaggggccatttcctaaatcccacttcaatcttttctgccgtgaattgttagtgtataccgagtggaaagaaatgggtgagggtgaaaggatttggtgatagacaagaatgggagagaaaatagtgaaaaacagaaacaagtcccattccctctgcaatgaacttgtctcaaagtagaaccagtgctgacaataatgacaattacactctttcaatcatagctatttaaccataaagtagaaaaatcaagaaaagtaagatgttgtaatacaataaatacttcccttcaagatctagtgcattcgtatggacttgcttaaatttagattccacttaataagggaaaacgaaaatttccatttgcgcacagaaccactaattttgtgccaaaaacaaaggcaaaaagaggggacaccaagatccttgctggttcaaagtcaaaaggcaaaatggaagaaataatgagacaagccgaagccgactaacacgcaagaagagttcatcaaacaggaaaaaaaaaagtttagaaactttcaagcacttctggtaaatgtctcatgaaagttttgcccatgtttcagttcctctaaagagttacgctccatcaatcactacagatggctttgagtccccaaggcctcgatgcattattgttctaaggaaacgccgcaaagctcctgagccgagtatcctgtgggcaatggacactcaggaccctgcgcttcttgtccaaggctttctggtcggcctctcccacaaatggacttcagatgcagtgcacgcccggaagaaaatacttcccaactgttgcatcgcgtgaaccaaaacagaaagtcagacgaccaccggagtactccaattctccggtgaaaaactctcccacagacaccatttttgtatttttatttttcattttttgcgtctgatggacgctcgcaacgaccctctgcctccgagcctcacaagagggaactgcacctgtcacttcgctcaggaccctagccccacccgcccgacacctgtcaagttgaagccgagacccctcgcccaagaacccagaatcctgtcaccattctgcagacgctccgccgtggcggggggcagggagggcgcctcctcccgccgggacccggcccctggcgaggacggatccccgccgagccgccttggcgcccgccctacgcacacccggggcgcccttcccgcgtgaggcgacggcggctctgctcgctcacctgacgagaggcaggtcctccgggccgctgtcctgctctgggtcctcctcaggagggggcggcggcggcggtgccgggggttccgcggcggcagcggcggcggtggcggccgtttttcggggggttttgggcggcatgacgcctttccgcggcgggagccagcgagctgtggaggagcgccggggaggacgacgcgcgcgcacgtcggggcacgccccgtcctctcccgactcccgttacaaaaataatttcaacgtcccctgagaaaaaccggacgcgccctcccccgcccggcaactgagcgccgcgtccaaccgcgggaaaacgtcacttccgcccgcggcgtcacgtccgcgaggctcccgggcccgccggcgtctgtggggaactggggcgctggtcggtgcgcgggctgggacgctaagtcatgaggaattaaactgggaaacctggcgtgggtccaggcgccttccaggaggcatccggcgcggcccggacgtgcttctacccagaaccaccccctccaggccggggtgcacttaacggggctatacaaagagtctggtgggtgactgtgggcctcatccctatcccggggtctgatagggaagactctcgggccccgcagggaatatctggctagtgcaccctcggcgggagcgccactctccctccttgggcggcgccccccacctctcatcccgcccaatccgttttgcaaagtcggccaaaacaaaaacaaacttggagcgctgataggtgcggaactttaccagtcacttagaagatagaaaatgttagacacttgctggccttttgggatcactggttagggaaaggaagggagggagctgtggggaatgaacggatagtagtgtaataaaggattgtagtggtgtaagaacgggaagcaccgtggaaacgtctgaggaagattttcaggggagcagtagctgctgaatagaagtctgtcaggcaggcctgacatttactatgtaccaggaactgtgctggccaccttacataattgtcttatttaatccccagaaacagccttttttttctttttctttctttcttttctttttttttttttttttttactttaagttccgggatacaagtgcagaacgtgtaggtttgttacataggcatacgtatgccatggaggtttgctgcacctatcaacccgtcatctaggttttaagccttgcatgcattagctaagaaacaacgctttccaatgggtagtattagctagtctacgttgcagatgaggaaacaggctcagaggagttaatttgtccaataccagggccgatgggtagcagagaatttgaactcaattctatttgattccacttgtccattatattatgtttgatgaagaaaacagtgacagagaaggagcatgtgcaaaggcacaaagacatcagaaaagagcttgctgggactaccaccatcaaacattggcttaaagctgttatcacttctgtgtctcggtatttgtaccaatagattatctagtttgaatacatttttttttctctttggcagacactgttattgcccatctgaactcgtcaactgagaaggaaagagatggtttatgctgtgaataaaatacagttgtgctgtgatgtaaatcccctcatcctggagcagctgagcaaggtctaaggcaggaagaaccttcaagcaggtcatggctgtaagcctcctgagtttatcccagcaagttgtataagggattatctttttatctgcatattatgacatatgtgaggatgtgtaaaggtttggcaagcactggcctactcaacagccagtcctacctaacttcagaaatctttcttgtgggcaaatgtcaggagatagggcccaggcccaggtccagctacaaagaatgaatacaattaaagtgctacttccattcacctcaccccagattagtttaggcaagagctcaggatgcagttttgacatttgaaagataaggagtagtctgctgggagcctgataaattgaaacagggatggcacagttctaaatattattaaataatagtaataatattaagtattactgaggatgtgacacttctgattgctgcagccattgtaacgtgaggcaagccaacctacagagaaggtagaaatgctgatattggtgcaggaggaatttcaaaagaatctggatcctcagtgttataaatgagcctctgatttggccagccctggagctgacctaagctgagctgaggttttcacttgtttgcaacagaaagcatcatgactgataat

SEQ ID NO: 917406 - DNA, 4001 bp, Homo sapiens
tctctaatatcacccattctgttgcttgggttatctaaggcaccacccttgatttccctttccctcatctcccgcatttaatccattaattttacttatgaaatgtatttggatctgcctgtctccaccatcactctaatgcaaactagccacatctctgcctacaacacacttctgaataatcttcttacttccattcttgccctttcagtctctacaaaataggcagagttaaaacaaaattaaatcagtccttgtctgctttaaatcatctcacgtcttcccatacatgatgtggcccctacctacttgtccaacttgttgcctttatatcctctccctcatcacaaggctctttccagccacagtggcctttctcttcctgaaacacaccacaatcacttctgctacagggcctttcatttgctcttccttttgcaaggaatgttcttttccaagactttgacacacatggtcccttctctttagatgttactccaatgtcaccttctctgagagtccttccttgaccaatgtgaaatagcccccctcataatcacttttacatgattctctattattacaatagtcacaactctattaatatctggatttatttatgtcttgtcgattttagaatttaaaagctctatccccaaagcctcccgtagtatacagtaggtacctaataactttattaaatacgtgaattttccccattgcattattgtaaatcaaccaattctgattaagcactttggtccatgtcatattttgtattaacaagtcgtcaaaacactccttaaattttccaatctaagactatttcagcactctaaccgcagcccccaacacaaaatctatctatagcatcccacttaaaactgctaaatattccatatggatgaagattcaattttcttcctcctctccaagctaacgaacgcgtaggcgggaaaggggaattttactggccacctcagcacctgttacatcttcaatcagtgaagagaggtgcagatgagccagacagcacatgggagacgtggccttgctttcaggaattatatttaggtgaaacgtgagtgatttaagctagaactgcccgaatccccaataaaggccgtctacttcatttagaaaaacaaggtaaaataatctgtaggaagtaaaatacagtcggtttcactaaaataaaccgattttgaggcccccggaaaatattgcgggtgggggttggagacggtctatatataacgggaaaacgagagcagctcagcaataaaataaagctcgactcaggctctcgggggtatcctgaatctggaagcgaggtggacgaggaggagaagccacagaaccctgggacctccgttcaccgcttcggcctccaccgcaggcacttggggaaactgcacagatctctgggtccgcctatctcccactgccatccctgcaaagagatatcccccggatactcacatgggctcgagagtcttgctgagccaggacttgagtgcctcgaagttttcaatgatcattttagaaaccatccacagcggccctaaggcccgtcacactcctccgcccgcccaggtcgcggccgctacagccgccgctgcccccgccccctcctccgcgcgccgcccgcgtgggccgcggtgggaggcgccggtggcaggttcccgcgggccccggtcggcgaacagctctgcaaggaccgccgcaggccacaagtgcacggggtgccaggagctccccgtccccggcccccagcccgggctgaaacagcaacggtttgcccgggccctcccccttccctcttccccagcaaatctacccagaccggaagcgcgacacgcgcttagacccgagccttctctcagcctcgggaccaggtgcttgttggctacgtcgaaaaggcaaaagtaaagaaagcgaaggcgaagggcagctcaatgggaacgattcagggggtcttcccggctcccagcacccccaagaagatggctgccggtaaatctcgcgagaattgatgaagtctcgcggtggctcccggagcctgctgggagagacgtaaggtcggcggagaatgcgcgggtcgagtgctgtagttcgatttttgcgtgtgtgcgttgcttgcggcctttgtgcctttttattctttgcttacctttatgatataaagaccttatttcttacaaggaggaaaagaccgctgacttcagaaacagcgggaaccccagctcgtccccggtaagacggccgtggcctgtcagctggaacggtcctgccggatggatcgctctttgagagcgtacactcccgcgtgcgcgacaccaggcggcccgtaggttccaggtgccgagcacactacctcctcagtttacctaagtgccctaccagtatcatattctgtgtatgctgtgatgtgaacgaggtttgtaaacacaggctggtctaatggagcccaatgagaccgccagaggattagtgtcttgtccaacagtacttgacttgctggtagagccctaatgactgagggctgcccacaagggaaaggtgagagaaccttcacgtctctcaggtagtttccagcctgcactttcccccagctaaagataagttttgttatttttaaaattctctttatttagagcaaattcagccctatctcagatcgggaaattatatagtatcaaaagagagagtcttcatattagcaacccaaataaataaactattttcctgggtgatcaaataagtttgattcctgcttgagttctatttagatactaggtggaattttacaaagggtctacgttccatgaactgtaatggaatgaaaatattcacaatctaaagacattttcagtaagtagatcaataaaagctctttatgagagacaccgataggctaaattgttcttaggaactcttgagtttataatttgctagagtgaagtgtctttaaggattaggtggaaagattatgaactacaaagcaagacatttgttttaaaatacagcatatagagtagaatacaaattagaatccagctactgaataaccagggtgttgattaaagtgatttagctgagtgaaataaaccagacatgaaaggacaaatattatgattccacttacattaagtacctagagtagtcaaaactcctagagacagaaggtggaatggtagcaagagcaggggtggagagggtgcccaggagaaggggaaatgaggagttatatttcagtggataatagagtttcagtttaggatgatttagattctggagatgagtggtgttgtgtgggttgcacaatatgaatgtacttaatgcagtggaccatatacttaatgaaaacggtaggttttatatgtattttacaataaaaattgtttataaatttaatactgccgaaagttaaaattatatttgtttagtctgtttgttgtagccttgccacaggctgacgccaccaatattttcaaccttatcaccagctactccattactctggctctccacttcagccttccaaagcttctatcaaatactgtataccccagataaactgatttgctcaccctccctttctccaaacatttgttcactttattttccacagagaacgcttctacttctttccctgactgctcaaactttgcccatccatctctcataccactgtcactgtcttatttaaagtcttttattcttcctaaataatagcaaaagccttttaatatctttgccttttatgctgacctccatctcagttcatcttcagttgccctcatcatcattgcctttaatagcagtaattctaaaattttgatctaatcatgtcactttcttgcttaaaatcttcaacttccacattatctttagaataaaacacattatttaacatcctataaagggactttcataaatcagacaccttcctttttgcctagaaactcctttcagtctttgctccagccatcctaaac

SEQ ID NO: 917407 - DNA, 4001 bp, Homo sapiens
tcgcccaggctggagtgcagtggcacaatctcggctcactgcaacctctgcctccccaggtcaggtaattctcgtacctcagcctcctgagtagctgggactacaggcgcacaccaccacgcccagctaattttttgtatttttagtagagacggggtttcaccatgttggccaagctggtcttgaactcctggcctcgtgtaatctgtcgcctcaatctcccaaaatgctgggattacagatgtaagccactgcgcctggccaatatgtaacatttttaactttttgtaaaaccagagaatattttgaaatgtgtccgaatgccctgcctagattctagactctgtgaggccccagcctcctttcctatgcatgacttactgtttaatgtagtacacacagaagggatatcatcatcataataaaggtcctcactttccttcacagtttcatctaccccacaatgactcccaggaaaaggagggtactgtttcagacttcccagctcccgtatattaggtggagccaagttcttgctgcagcatacgggcacgctttaaaattttcaaatcattttttaaaagctacaagcttgacagctttgggtttttatggctacttgttttctgaagttcacagaactttatcatttggatcacacacttaaaaaaatcacttgcaaaaatctctttaaagatgaatatgcttcctcttcaagagaaacagactagcgggtagaagaaaaaggacccgtctagagtattaataaatagactgatattcacacaatggattaaatggattaaagtccatcccacagatgaactgttatattaatagaatccaaatatacagttacatcctcgaccctgaaagcagtttaaacgggtgaaattcacccagtgctcacttgaaatgagtactctaaagtttaaagcacctataaactgccctcaggattcaatcatttttccattccttccggcattatatactttgatgttttaatgttattagcccacaatacacaccagtttcagaaactcagtttttgtcctctaagggcttttagtcctcccaaaaaaagaatagggcaaaagcaaggaagatcatgaatctggttttctaaaagcattattacaagactgctttataaaattgtaatccccagctgcagagttccgcagatggcttgaaagtgtcttacatgcaaataaataaaaacaaaaggccacttatgcgagcagaacacagcgtgctcgatagtcatcttaaaccgagcaggtaggtactttatcagaggcagacaagggaaacgtcacttatttagagttcaccgcacgcctggataaaagtcctcactaacaaaatccctgcctttgtggattctgtgtcggaaagggaaacgataaagaatacggtttgtgacagcactactctcaggagacgaaggagagatgctaagatcttggaaaggagagagaataggaagagtcggaggggagatctcctctcagtaaaacggcacccacagcagtcagacttcagctacgagcaaaatcgagtccgtgcacctcaaaaaagagagggaggcagggaaaactttccctcgcctctccccatccttccctcctcctcgcaggagagcacattagctgaggtgctggcggggccgggccggggaccccatccctcgccccggacgcagcgcccgcagggactgcccgggagcccgagcgagggaggcgggaggtacaggagtaacggggcactcccggcccggcctgcggggaagggaagcaggggcagggccgagggggaagaggcctccgcgagctcgaccccgcgcccacacgctacctgcgaggtcagctgctgccgcgccgtcccgcgggaccgcagggatctccgaagctccaatgggcgcagaagtgcgagcgagcggcggtgcccaccggcagcgaagaggaggagcgccagggcgccgggcccgccgggtcacgtggccccggccgcctcacgtgacccggtgcagcgcgcgcccgggacgctacccagccgagcatcccgcaccgccccggccccggccccggccgaaaccctgctcttcgggccctacaacccgacttctttagaagccgattggccgtctcaggcccgccccgaggccctgccactggagtgtccccatgaaatccggtggctgctgccgggacttagaggcttttgtgtctgaggaaccaggaacgcgcgaggcacgggctcctgctctgctccccgagatggcttggctgtggggagggtcggcctaccaccccagagacctaggacggaaaagcgaccgagaaacttggctccctgcccactctagagcgcgtctggccccggggcaccacccaggtggtgctgcctgggaggaaaggcggcggagctgggactagtttgtttttactggagacgcgcctccctccctccccgcccctcacttcctgattgaaagtacctgaggcaggccagggactagggaaggtggcagctggacaaaggtatgaaggaaggacgagatgaggcacaggtcctggtattggaaagaggcagaggtacctcggaagcatgccatagaggttagacgggacctaagagggcatctggtccaaccggattcgtgttaccagcgagtaaactgaggccaggagagggactgctacgagctgctccagcctatcacctataaagactacagtccctttgtaaaataccatacagctctcggagaactcccagttggcgctgcaggataaaatccaaacttgttggcatagcattccagccacttgttcacttacctttcccatttgagctcctaggaataaacagaaaaacatttcattttctaaatatcaccagataacttcacttttggtaacttgaattattaaaaaagtcctaccgtccctcatctcttgccacttccccaacattactggaggctctggctacaaataatttgttttccttgactactcaactttctttggattatttactttttctctaagtttctttactcctttttgctttgttcattcttttgtctgtatctgaaatgtcctgaatcaccacctcccccacttaaagaaaaccagggccaatgattaaaaaaaaaaaaaaaggtattaagaaactaatgcaataagagaattgagcttagttctgtatctattctgaggtctcgctcctgttgcactagttcctgaataaaatgtttttaccacttcaactactgtttggctctggttttcttcaacagcctccaaagtacacatcagtttcctactcatctttcaaaatccaggtcaaatgccgcctactcttgtcttcccagcatcctcttccctgattttttagcaattgaagttcatccagacagtgtcagctgcaacttcttccctgatttccagaatactatatatattctgatacacctcacactgcccagaaatagactgcgcatttcctgtaaaaggtgaattgtctattgctgtcttctcccttagattataaactctttgaaacaggattcttctgggtttagaacagcgcctggcatgtgatagacccttaatactcactgaatgaagtggcttgcccaaagtagtggcagttgagtgaatttactagaagaggcctgttttgctcaaagaaactaaaatcagtttcttttggttgcaacccgatcaaaagaacttgtgtaaacatgtctgagagaaaaacgagggcatggggtgtgagcaatcaaatatgtcctgagccctcactgcttatgtgtcagatgccatacttggagcatcttggaggattaaaagctgaatgagacatggttgctgataaggaatgtgtagtctggttcattattccagtacagggtgaaaagtattatgatacaaggtgctaagtgaacacaaaccagggaccacaaatcagggagtcagggagaaact

SEQ ID NO: 917408 - DNA, 4001 bp, Homo sapiens
aggttgagttcagtaaaaaaatatctctggagtaagttagtttccaattttatttctacaattaacaaataccttctgagcttcaattatggtggagatagattgatcatacccttacaaatatataatatcagatggtgattaagtgctacaaagccgaaccagcagtacaagagtttggagagccagacattttaggtgaggtagtcacctctctgaaatgatggcaattgtttcaagacttaaataaagttctgtgccatgcagatttgcgaagagtgggaaagtgagcattgagcatactggaaataccaaacgcagacgccctgggatgagggtccgcttggcgagcccagcaagagcaataaggcctgagtggtggaagtggggtatgcaagaacgtatcattcttgttgcttttacctgctgcttaataacacgcatgtactgtctagcaggaaataaagagattacgtttcacctagaatactcattctctgagcctaagtggctcttctattccagcccccaaatatctgtatcagcacatcatataagattacaaagcacagagtaatgacattgttagaaactcttcacagtagccccaggagtcacgaaactgacttaactaagacccactgtctagtaaggtgtaaaacccagcaggaacgcaatactaggaaggtgcaaagccaggaggctcaataaacgttaaacagtgtctgggggaaagagcaacgatccagagcactgtttgtgaactcaaccacttttattcagctctgacaaggtaagtcgccaagcgcggtacaaagtagctccatgaaatgcgttttgttatagtcctggtctcgaactgttgcaacattttatgtaatttttgcaaagaacaaaagcaaaaagttcattctaaattagccttccaactcagttctttctccgccaagacggagcacttggaaagttttcaatgtctgaaaacctctatttccagggctgagcagagcactatgttgcggcttaagacgctcggcgatttcttcccatccctccgcagttccaaaacggcttcgcctaacaaagtcaaacttttcgcgctattcctggacatcaggaccaaatgtcgaaagcatatactgccactgagttagtgagccgggccggtgcccgggacctggggtactagatttatgggacgggagcctaggggtcgaggccacagaaatgaaaacatcggcaacatatgcagtgcagcgagtgggttaggagggagaaacttcaggcaggacgctccctcgggacctgtgacgcccccccagccacaccagacgtgggagcttaggatgagagcggcctccgagcagatgatcaccctggaacgacgccaaacgcgacccctaccagaggactcgcgcatgcgcagcgcagcctgggccggcggcctgggcaggatgtagtcgcgagcagcgcaccgggcccacgccagcggaattgcgcatgcgcagggccgcctctgcctgcggcctgggctgggtgtagccccggaacctagctcttaactcccgccagcagttttacgcatgcgcgacgacgcctaggcctgtggcacggtcgcggctctagtcccctgggcccctcagctgtctctggcggggaggtcgggccgcaggggcggggaggggtggcctgccccagtggtacctgacagcatcccacgtcacggccgcgatccccctcggcctcccacaccactcctccaccctcttacctcctcgcaggccggagccttgtccgctccgcctcctgggtagcggttactgcacggtcaggggcccggcgccgcgatgagttggcgcctccccctgaaacggcccggcctcggcgggatgcgctcgggtgcccggccgagacggaaacgaagggagcgcagacaagaggagggggctggcgacggcgtctcgcccctcctctcctccctaggctgcccaccgccgcccctcccctttctcgcagacgccccctcccctcggagttgacccccgggagtctcccattggggccgcctccgcttttccagggagttcctccgtgggtcacccccaccttctccagggttatgttctcgcaaattttgggaatttgtggatacccgacctagaaggataaggcgtgtatgatgctgagagcaaccttttccacagcccctctcctccagcctgccccagcttttcttctattgctggcccctctatctgggggctccgatcacttcacgttttcaccccattgctgtggggcggaagtcttgtagccccctgtagtacaaatgctgaaataatgaggatgtgtgctggggggttcagggggatgacctcagttaccttggggccaagggcttcgaaaacagccaccttctccccttatgattatattttgcagtaatttattatattacactgcacttctgttggcctttgtagatttaagtaaaatgcaccacaactttgcagtgtgcaataatttcttccactgcactacacttaaattgacctgagtgggttttggttaaatgctcaacaattaaatgttattagctattcctgtgaagtaagctacttgcttttatactggctgtttcatgaggacactggttcctctacagtgtagagccaaaagtagtaaagccaaagagaaaaactaacattccaaaccacagtgaccgtgtcagtctgtttcgtctggcttttgtcatttcttcggaaaaacatcattctaaaatgtataactgcctttctgctacatagggcagacatttatctctattctctgagcatagcccactgagcctcagaaggaggcacgcaaaatggtacacaggtatttcttgtagagctctaaatggaagaaaaagtaagtatacattaacaggaagttgcagcgatagtgcagagaggcatcgtgtgcctgccccaagtttctccactggttacatcttatcaatgaaagaaatttatgagttaaacaggtttgctctcagaaaaagctcacttcagtgatgatagctggcattttttttttaagcacctattgtgtgccaagaggtttatcttatttggagctcacaataatcctgtaaggcaaggattatccttactttacagataaggcaactcaggccccaagagattaagtttctttcatcagcaaccatggcaagatctgtttgccttgcgcacttggtcttttacgcattatggacagctgaagttcatgcaggccttacggtgtgcttcagctgaagcctgacaattagctaacaataaaaacatgtcttagtgttttgaaaactgtgatattatctcagaagttaaaactttaaaatatacctataaaagaatgtgtttcactaaagattttaattttatatgggtccaacagtttttcccagggcggtcaaaattaaaagtaagaagtaaaaatgtctccatcacatataagtttccttcaacacttttggataatttggtctactaaacttcactgtattgctgaattcagtagactaaaaatttagactctgagagagtataggttagtatttcaggagttaaagttcccatcaccacatctcccaagtttacctacatctgtacctgtgcactctattccttcccattactgggaatgagctgtgcatgctcttatttaagttcaactcttccacctttgtattagatcctgtcttccttacagtctcaaggttttcactcaggtagttgtcacctctcaatcctacattattaatttttgtatcattaatttttggatcattcccataagcatattaacattgcgcaacatttgcctatcttttaaaaagttccttgattatatgtcccctatcagctaccaatgtgttctctggtctcttccaaaatgtcttaaaagagtcacttatactaactgtatcctcatcccctcctcctattcatcctctt

SEQ ID NO: 917409 - DNA, 4001 bp, Homo sapiens
accattattgaaaaaatggaatacgtatcttaagagaagcgcttattgcaatgaattttaatactttgtaaactcatccatctctgtcactaaaaagtcccaaggaaaagaactattcaatctaatatactgcctggaaaatggcaagtgtcccacagacacttactgccttgttttttcaacttcaatctaatcaaaaataagggttatgctttaaatgtttcatagtttgattaagctgcaaataaaagagtaaacaggtgaacatttcttaaaagcaaatttaacacataagaccattatattaaattcatgtccaaaatatacattccaaattctgtacaacaaaatgtggccacagaaaataaaatgtattctatcactaggaaaactgaagacaaagctattgacggaaaatgtaatttgtctataaatgatggatactgcagtaatcaatttattttaaattagtatacatgcagtatcaataaagagaccaaaaaaaaaccttcaatgtcacaacactatcaactagtctaatgatttttacgtgtacaatcttttcttattatttcttatttttaagacgcacttaattaaatagtatctgtaaatctaagaaaggtcggaagggaaaaccagggtattgggcaaaaacgtttccatcagcatcatatattaatttgagttccttaaaaggagtggataaatgtcttccacagacactttattctcctaaagatccttctttactctctactccctggaagattcagttcgttctcacaaaatattgccattgggcacttttatcaactacaacagacaaagaggcatcaggatagaggggagaggatctttcacaaagctctaatctcagccacgcacggtggcccacgcctgtaatcccagcactttgggaggccgaggcaggcggatcacctgaggtcaggagttcgagaccagcctggccaacgtggtgaaaccccgtctctactgaaaaatacaaaaattagctgtgcgtggtggcgggcgcctgtaatcccagctactcgggaggctgaggcaggagaatcgcttgaacccgtgaggcggaggttgcagtgagccgagaccgcgccattgcattccagcctgggcgacaacagctaaactccgtctcaaaaaaaaaaaaaaaaaaaaaaaaaactaatctcaggaacgtcctaatacaatttatttgagaattagaaacgatctttggagtaaatacatatttacaacactttacttgtaaatgacaatgacatcgagaaatcttaagccagctagaaagtaaatcacatggtgtcatctccgctcaaaatgctccaacggcttctcgtcttattctgagactgactgggtctgcactccaactccatcccaacacatacacccatctccgattacccttcccgctggttcaccactatcggctacgccggcctcctgaggttcttagaacatgccgtgcacatccctgcccgggaattttgcacttgctgtcccctcttacctgttccactctttgctcggatttctgtatttatgacttttcaatttccttcaagtctcggctcagatgccacttctcagtggagcttttcttgtttaaaaatacaagccagcctcccacacctcttcccccttccctgtgttatttttctccatagcacttatcaccttccaatgcgggcgggagaagcactgctcctcaggggggcgcgaaaccccgagccggggggcctcccctctcccacgctcccggcccccgcagactcaccaggttccgcagctgggccgcctgctccttgtgatagtccagccgtcccaaggagcagggccgatacttgtccacccagaggctcatggcagctcgagttcccgggggcctacgcttgaaaatcccgcgcgagcgcgcgtcctccccacaacgcagagacaagttttcccgcgagctccaaatctcgtgacgtcactaccggtcgcggccgcgtaaatgattttggacggaaaggctacgggggccgtgtgcagacaaaatcagctgccgcgtcgatgccctctagttctgaagttcactgctttatttattttctctttgttcgcaccgtctattatattctagaaattatcaagcggaattgaaaatgtggttctgacccttttggcgtcacatccagatacctcagagaagaccgttcctttcatttattcattctttcattcacttaattcattcaacaaaaatttactaaatatctgctaggtgtggaactctgtcctcggcactagaatatatacatctcagggtttcactcacttggcaggtacccagtaaagcttcattggatgaatcgcttgaaaatgtctgatcttcactatcctttgttacctctattcctcaatattcttattggattagaaacaaaagaatcaagagcatggaaaaactacccaaatgtggtctgtaggggagaagacacgaggttaatatgcattctaagtctagaatatttgaaagccctccaattaaaatgtgtagaagcatctgaacccctcagaaaaatattctgcatatgaagttgatatgcaacttttgaagttctcttcaaatagtgcctctcaaaatgcactttactcattgtacataatattaattccttatttaatttatgcttttattttatgtattattaagaaccctaagtcctgccatttgattgcaaggtcttacaggcaggaaatgatttccaaatatacttaataacctttcaccaaggtgcctcttactcatttattaatcaataatttatcatgttcttctatgaatcgtcatattacatgaattactcctgcaggtaaggtattatccacaccaccaagtataagatttaatccctgttctcgagaaactttctataataagcctggaaggcttctgcctcagggcctttgcaattactgtttcctcttcctggactatgtttctccagtcagcagagttgggtccctcatttccttcaggatgttggctcaagtattatctcctcactgaggcttccctgaccaccctatttaatattgcaaaaaagcttcatcttctttatgcttctctcctttggaattgaaatggaggaagtgtttgaaatgagaaggtaaaggaaatcagaagcagggatactgaattgtggtctatgtgtatatcataatcataatgaatgataatggaaataagtactgagaggaataaagagaagaaccaagtgctagaatgatcaataatttggcaagagtgaccacaggcatgacagacaacttcaataaggagcagtggttgatggtctctaccgtgaagacatgtctctaccattgaagcacatgaagacatgtgcttcaatattgttgggggttctgaggaaggagaaatagtgtggtgacccaggaagtccagttaaatttgaatttcagaagctttttcatatgtctatggcaaaatttattacaaatgattttttttctcatataagtatgtccctggcaatatttgaaattgtaataaatattgccagggacatacttatatgagaaaaaaaatcagcctttatctgaaattcaaatgtaaccagggccctgtatttatctagcaattttactccagactcttgaatatataggatatgagaaattgctacagaggaagtaaagtcctcggggttggtaaactacagctgcaatcactttaatgtttaatgactctggccctcaggtatcttagctctttttttttttcttgagatggagtcccagtctgtctcccaggctggagtgcagtgatgcgatctcggctcactgcaacctccacctcctgggttcaagcgatcctcccacctcagcctcccatgtagctagggttacagttgtgcaccaccacgcccagctaattttttgtatttttagtagagacagggttttaccat

SEQ ID NO: 917410 - DNA, 4001 bp, Homo sapiens
tcttgctatgtcatccaggctggaatgcagtgatgcaaacaaggctcacggcagcctcgaacccctggtctcaagcaatcttcccacttcaccctcccaagtacagctgggtatacaggcacttgccaccatacctggcttggatcacttgtaacaaaattaaatttttctctacactaagggattatatagctctcacaagaagaaatatctgcttatttgtgacagcctcaaagtataccactaacaatgacaataataatgggtaaggtttgcaaactttagccagttgctggacactgtgtgaaccctcaatatggaatggctcacatattcacagcaacactatgaatgacacacgattttaatgcccattttacagagtttaataacctattcaagccacaaggccagtaaatgatgcaacagggatttgcacccagaagtcgaactccagaacactggttttacctttgactcagttcaaatcaaacaatccaaaagttttttgagacttataccccattatcatcctttttttcccccctcaggggtactaagaaaaggggtagtgagaacagggtactaacaacaaggatactgagaacaaagtatattaagtattggggtagtgagaacatgagaacaagggactaaacataggggtactgggaacagagttgtaagaaaagagtactacgtacaggggtactacagacaggcaactgagtatagcagtactaaaaatacggtactaggaagagggttaacagaacaggacactaaaaacaaagtactaaatacaggagtattacaaatagaggtactgagaactgggtactgagaactggatactgagaatagagtagtgaaaacagaaagagatgactttctcagaagtaccaacttcatctaggttcctaagtctcctttagcgatgaaccagaccgatcatttactctatgtccttccagccatatcccagatctatgacagctctgccgatgtcacattatttttactgaaatttctgcacctatcatgagttcaacagaactgttattgctttgcacatgttggtataaactttaatttagggcaaacactctaattctcaaccactaacccagtcactgcaaaccggcccatttggaagtggggaggcaggccctgcagatgcggtttgcgttaagatcgggtttcttcttccacctcccatccccaggcctcagctaagtctgatacctcgagtttgacgtttcccgcgctgccagtcgaggcagtcccaccgcagttcagggcctggtcgctcttcttctttttatacttgtccttgtacatcttgttgcggtgtttcttgcacatccacggtttgcgctgcttggccacctggctcgtggtctcgctgcagccttcgtaggtgcaggtcttgctcatgctgcccccaccgctgccccgcctccgggcgcccccgctgctgccctcgccccccgagtgagtctcctcgtcctctagatcctccaaactagccgcgctctcgcctccccccggagggtccgaagtgtctaacaggtccgcctcgtcctccccagcctcctcttcgccatccccggccccttcgcacaggtacctaacgggcttgcccgccccaacgctgcccccgggggccgcagcctcgtcctgcccagcacagggttgcatcactagcagggtgaattgagaggccgcggccgccaccgaggctggcgccaaggtgggagccgcagccggggctagggccgcggggtggggcacgccgctggcggcgcccggccccgcgccctccgctacaccctgcgcctccatgctgctaagacctggccggggtccacgaccccgggcttttagcacctgcttggcctaacggcacttcgcgaaccaaagactcaggacacgctggggtaaaaggcgcctataccgggaaggcgccccgactgcgcctgcgcgaccgcagcctgcgcgtcagcgtgtgtacgcccgcgggctgtcagggagcgcggcgcctctgggggcggggctgagcgcacaaccaacgggactgactgcgcatgtgcggccgcggccccttcggccagctgggggattcgtagacagggtctgggggctgtgtcaggtgaaaacctgcagtggctggcaaggcagcgccgttttacctgatcctattgtatctaaagcggttcaaagtatcttctacaggagttccagtatgcaaattaggattgttcctgagcggtctcacgacttgtagtgttaggatgctaattttattatttcccccacaaactgcctgcaaggggagatttgaagctgggatgcagtggtgtcacagcctagagtcactagctcgcagtccatgaaggcagaggtggcttatttgaaaatagtggagcggagagggatgggccacacctttggccgagttgtatttgcattgagggataactttgttttttttctcctggaaactcacttgattgttagtacttgctctttgctgtggctgctgagataagtcttaacgttttcgtttaacacagtgaaaatgtgtgaaaaggaatactgaatggcaaacgtttaaaaaaacaatgaatgttctaccagttctatcagttgctgggcaattgctggttgttaaatcttggcttgcccaaatcccaggagagaaaatatcctgccgtatcctgaactgttaagtagatgttctttttcccttcatcctattctttcgcctagtcagatttcccatcccacctaccggaaagcaatgactttattcaacaaactataaatccattcacactaagatgtttgggtgctgacatataggtagatcagttatgttttaaagagaggcatatggaagggagaaggtttggaattagagcaacctaggtagtacttcctgtgtgactacagcaagttcgtgacagcctctccgagcctcagtttcctcatcagtaaagcctgcagtcggtggtgtgctagcgccaactgatggtaactggttgctaaaatttcaggaatataattagcagaaaaattaaacactgctattattaaaagtcttactacataaacttacaataagattatattaaaaacaaagggtacaaatctcaaaactcttcattttctaattattttattatgttttatcattatctgtgcttttaaggttatttatgtctattgtatctgtatgcggaaatattatttagtggtgtgttactgcacattttcccaactctgccttcagtatgtcatgttgattgcttgaaatcagccacttttggagtatttacaccagggaaatgatcaaatgctacgaagcaggtttacacttattgctgattgtctctgcacttaagaaagtgacagtgaaaatgttaatgaagattaaatttaaggccaggctcagtggctcccacctgtaatcccagcgctttgggaggctcaggcaggtggatcacgaggtcacgagttcgagaccagcctgaccaacatgatgaaaccccgtctctactaaaaatacaaaaatcagccaggtgtggtggtccacacctataatcccagctactcaggaggctgaggcatgagaatcgctcgaacccaggaggaagagattgcagtaagccaagactgtgccactgcactccagcctgggcaacagagtgagactccatcaaaaaagaaaaaaagaaaaagaaaaagattaaactgaaaatgtattctatctgcagctctcacattgtgaatatccaacccccccaactgagaaaatattctttcagtatttgaaaactatcatgcaattcagcaaagaaactgcttacatcacatcattgaacaagtgaagaccttatatacatcttcattgtttcacttttgttttttctcaatataaacaaaaatgtctatcaacattcatgtcaaaactttatgtccttgccatcatcaaaaaa

SEQ ID NO: 917411 - DNA, 4001 bp, Homo sapiens
aaaggagtgacattcatgcctgtaacccatctaaggattaaaggctgaagaataacacagaagagtttaaaattgactttgccctttgaaaaacaataagcaattctggatttgaaaccaacaatcatgtaatattaaaaaggcacctaatttgctgtttgaggtacctgtaatcctcccaggacatgtgagttcctggaaaaagctgtctcttttgttgtttttgttgttgttgctgttgttgacaaagttgttcaggacaaagagaccctggggtagtctccattgtgagaaagatcaccaggaaccaccttcatgcccatgtgctctctggctccccctccagcctggtggaggacctggctgaaaaatacttgaactcagcagtgccaaagattttcataactgcatgcaatggagcaacaagtctgagagctaagggccagaagacaatgcaagcagttatttcataaatcccaagaacagcagtttgggcttatgaaacctttcctggtttcatgaatatttccgttctgcgccctcccatgtccccactgtgccccctcattccactggcacttgttccacatctgcaaagttacagctgagaggggagaggcacggaaaggagaagaggagggaaactgcggaaaggcctggtgcaggtccagggagtcctgtctggctgagtcgggacaagctgcttaaactcgcctgcctggtgacacacccgtgggcggcaagtgaaccaacctgccctccagcgacctttcccgtgattatcgtcaggggccccgccaccactcggcctactgcgttgagcttcaggaaaccattcctcagtttactgataagaaaactgaggccgcagccttcgcggggcaggtcctgggagctgggagatcccggcgccatcctagcgggggccgcacttactctccgagtcgctgaagccgctgctgtcgctgacactggcgctgctgcgccgcttcatgcgctccaggtgctcctcgtagtggaagtggcgctcgtggaagggcgacgcgaagtcggccagcaccgcgtcaaactcgcacagcgcgtccgacaggtcctccgcggccgccgagtccagggccggggctgcgggcagggccaggggctcagtgcacggaagtcaggggggcagcgggaccacctcccagggccaggaggggccgccacggttcccgaagataactgacacttggcgcctctgccaagtgacagccacgcagtcgctgttaccttgtaatcttctccaccacccccgaagtgcgttctattaccaagtccgttttacagacaagaaaactgagccttcgccaggcccagggtcacccagcgacttggcgcggccagattcctccccaggcgctgccggttacctgtccccgccgctccccccaaccccgggcgcgcgcggagctggtggtggagggaaggtgggacatgggggccagcccgggccggaaaggaggctgcagccgcccgcgcgggaagaccggggacaggttcccgccggggaggatggaagggtggggggtgtgaagggacgacacggggcccctcctttctcacccgccatctgcagagccgagactttaaggggaccccggaccccgcactcacctgcggccgcggcggccgcggggctgccctgcgccgcgggcggcttcatgaggcggctcagctgggcccggcgcgcgtggccttgggtcctgcgaggtggcagccggggctattcgggggcttgctgtcccgcacacttcagccctgccagtcccttcggcgctgcgctccagccgcgccgctcccagcacggtccgcgcccgccctaccaccggctcgggttcctagatcttatagccttcggcggccggagcggaggcggggccggggcggggctgcggagccggggcgacgggtctgtccccgccgccctccgaggaggcccctgcccccaggcaccgccctcgccacgcgcccgccctggaaccgcggtgacgaggagtcgccgaagccccggttacagccccaaatatttacccgcctctcgcccccgcgccctgacaacccggcccacgcggtgtcctcggcgtcaccagagctgactgctgggcgcgagctctgctgcttcccgccgcgtgccaggcacctccgcgagccgcagcttcctcggctgtgaagtggacgtgggcatgcagagcctccctggctggcggtgagggacgaaggagcccgcggccgtgtcccagtcgggtgtcggggacgcggaggtcccctacgcattgtcccaaggggacttccgagatggtgggcgggcggagtggagagggtcggggcgagaggggcaggagttgggggagtcctgaactgttcccaccgcggagcgcgggggcctgaactacggtccagggcgctcccgccagcctgactttatctagaaggggtttattatgggaagaaactactgcgtcgacgcagcgcgaacagggcgccttgcagtgtccacggagtaacgagccaccctgccccgcggcctgcgggggcgaacgccctggactgtgcgctgagctaggcgctagcctctcgcctctcaccacagacggctaattaaatgtagagcaattaacatgtaacggagtgaaacattcagcctccactcccagctagtttttgtatttttagcagagacggggtttgtccatgttggccaggctggtctcgaactcccgacctcaggtgatctgcccacctcagcctcccaaagtgctgggattacaggcgtgagccaccgcacccagccaggatttgttttcagaatatagaaagacccatctacaaagtaatcacaaatagacaacctggtaaaaattaaaaatgagcaaaacattgaaacatacacctcacaaaggagtatatgttaatgaccactaatcatatgaatagtcctcctctcttgtctactctgggtggcctagggatatgcttgtcttgtggaggcacaagcactgtgggctcaagagtggggagcctctttccctgttaaggggaggacaccactgggatctctggtgccatctcctgcaatggatcctctgatgtggggtcgaacagaacttcaggagttgatttccctgggtgagtggagcgggatccttccttagctatctgtccctttgctactagtattgctgctgcatgccctcagccactgtgggggttctagcaccagctgtcaccaagtgtctatgtatgggaactggtctaggtatctttaccagttaccttgtgccacgccttagaaacaagggacctgtccaggcttccttctgatggccaacccacttctaatggtgcgcaatctatttcccacaaggttctaagttcccctggtggtctagtgcttaggattcggtgctctcaccgctgctgcctgcgttcgattcccggtcagggaacaaagaaatggagcatggatgagcagcggacaaaacccctcagacagcggattaaagaaggaagagttttttttattccgctgggagcttcggcagactcgcgtcttaagagccgagctcccggaaggaagacagagttcctggcccgtttaagggcttacagctttaaggggttccacgtgaaagggtcttgatggattgagagcacatgtacttagagtcacgggggttgattgtttcacctcaggccggctcctcattgccaccggctggtcttgacactgacttcattcctgttgttttccaacttttacttcctcctcctcttcagagacaggagacagtagcgaaatggcttctctcctcagggcgacaggatgatattactcccaatatcacagggggtgtacacacccctatgaaactcttcctactatccagagggagagaggatgatattactcccaatagcgcagggggtgtacacagccctgtaatactcttcctaaaatccacagg

SEQ ID NO: 917412 - DNA, 4001 bp, Homo sapiens
cattagctgttttaccacccaaacgtttttaccgaggatgtgcagcaatgggaactctcatacactgcttgtgggaatataaatcagtataaccactttggaaaaccatttaacattgtcaactacagctctacacacaagtactagaaccagccattccactccagggtatacaccctagagatatgagtgcccatgtctaccaaaagccgcctaaaggaatgctctgagaagtgtaacttgtaatagttgcaaactggaaacaacccaaatgtccatccacagtagagatacatagtatggatactcatacaattaaacagaagcagcaatgaaaaaactaaccaaccaaccaaacaactgctacaacatgaatgaatttcacaacaaggatgaatctttcagagtgaaagaagccagacacaaagggtacactcttattcaaacaggcaaaactaatctctggtgacagaggtcagcatagaggttcctggggctatctaggaacaggcatgaggcgttattggaaacagtctacatcttgaactgggggatggttactagggtggtgtatacgtatgaaaagttcagtgagttgcatacttaaaatccgtacactttatgtatgttttatttttagaggcaaaaaatattattgacagcctgtcatgtaaacattttcaataaccatcataaaactctaaattcctgggaaagaatattgttatcagagtatatttactgccacaaacactgcatttgctgagctaaagtcaaaacttaatacagggaacaggagatgttccttttttccaatgttacatatataaaaagaccaaacctttctggcttgcactccctaggccaaattcctttaactgtgtcatttaatcggtccttccttgtgtggcactggctgtccactgtcccaagccctcgcatgtcctggatggccggtcatcatccacacgggggctgaaaggcccggctccagcactcctgtggtcatcatcctgctgaatcgctttgaactacccttggcctaaccgcgactcccatcccgcttccctcctgcctcgccactgcaggcctgtccctttgctttcttaaaactgcgcaccgtctgaggccacttcgagcctactggatccctggttccaacccagtaggatcacagaagcagggccagctgccaggtaggggacaccaagggcagaaacctccggggcccgcagcgcaccggtgaccgcgaacccgcgtggctcccctcaggctgagtcggcttccaccctcccacccgagccaccggggatcagggcccgggaaacacgctcggtccttttcggcgcttccgggtttgaaaaccgcggcttgctatgacgtgtgaccaaaatgcggggccagctgtcccagagagaatcccatcccgcgccgggccgggtagtgggagccaccggggtggggggcggcgcgcccggggtcgcgggccgctccgccagttcttgggccgaccccgccgcccgggcgcgcgtgtttacctgaaaccaggaacacgtgctgccgggcgccaaccccgtccccgcagtccacgccagcggccatgccgcccgcctcttccggggcgccgcaggctcagcgccgcgggcctcagtctcccagccccgccgaaaatggcgggagaagggtctgttccgggtggcgcggcgcgctgagggaccggcagcgcccgggaggaggcccagggaccgaatttcgtttcgtttccgagaccagcctgctgctcgtgttacgtttttaaatttagcgccaggcgaggggctctgaatgccggccggtggccgcaggcaacgggaaggggccgcggcctctccctcgcggctccgctagtggtaggtgctcatcgcgcgccgcagggcgccgagtgacgcggagcggggcggggtcgccggggccccgcgctctgtggctgcacccagcggccctccatggtctagccagcgggctaggattgggtctgcggggtgtgtgcccggacaacgggtgacgcccgccacacccccggggccgggggactcacctggagctagtccgtgttaaggacaatagcagtcacatcggaatccgaatgcaactcttagccatggtcctcaattatttgtgaatatatattggtcatcagttgcattctgtgttgctattgatgtgagaatatgtgtgcattgtgagctacaagggatgtcctcaatttggactccgtcctcatcactaaaagaggtgcacagttttgggctcagaatatgaatttgttgttttggagaacgctgtatactgagttaaaaacttagacatttatttaaaaagtgatgtttaaaaagttagagccatgaaatttggggatttaaacttttaaaaataacattttaattgaaaagtgttgtttggtacatggtttttaagaagaaagtacatattcctttcatactttagagaaaagcacgggccaggcgcagtggctcaggcctgtaatcccagcactttgggaggccgaggcgggcggatcgcctgaggtcaggagctggagaccagcctgaccaacaaggtgaaactccgtctctactgaaaatacaaaaattagctgggtgtggtggtgcacatctgtaatcccagctactacggaggctgaggcacaagaatcacttgaacccaggagatggaggttgcagtgaaccgagatcccaccactgcactctggcctgggctacagagctggactctgtcaaaaaaaacaaaaacaaaaaaatccacaaaaacctattttttttttttttaaagaaaagcatgatgtatctcttttatcccagatcccaggggtaactgttaacatttcttctctattcttgcagaatttttccatgcaaaaacaagttaatgtcttatttttgcacaattgaaagaataatatacataactcatgcactttgcttttcatgtttaatcttgaagatagttaaatttagcagcactaaatttatctcggccctctgaaaaggtttttaacttcaaacctgtttcccatggggtgagaccaatacagctgcagttgattgcaggacacagctggtggagaagaggcctttctggctgaggaaaggcgcctcttgccagttttggggcaaggagcagcagattggtactgctctgatcttccctctcccccaaaacgactgtagaagatgctgtggtgtatagcacaaatccccaggcacaccatcgtcttactaacagctacaggagcaccccattattcctgtaggatgggatccaaaacccccagtgaaggcctaaaaccgcaaatagtaccaaaccctaatatactgttttttcctttgcatgtatatctgtgataaagtttaatttgaaaattaggcccagtaagagatgaacaacaataataataaaatagaacaattctcacagtatgccagcatcactactcttgcagctactaagtgactcataaggaggggaccttctgcagtgtggatccgctggacaaaggtagaattcaggtcctttgcaggacgaagctggatggtgcaagatttcttcacaccactcagaacactgtacaatttaaaacttacgaattgtttctggaatttttcgtgtaatatttttggaccaagttcgactgggggtaactgacaccttggaaagcgaaacttcgaatagggggagctactgtacatgagaaatgttacccatgattcccttgctcagacatacatacctgtttcatttttctctgatcctttctagcccttggctgtattaatgtatatttttgtggttgttgtcacaatttagactgttttgtctgcttttctcacttaacattgtcataagcatgtgccccttcatatcgagaagtatcattgttaatgaaggcatgatatttaacacagctggtgtactagggttagttatccattccctagtgt

SEQ ID NO: 917413 - DNA, 4001 bp, Homo sapiens
agcgtggatctgttggtgtttgtcttgggagaggaatacattgccattttaagggagaggatgttaacatcagccaaacaaaatcaaatccaaacttcagcgtggatattcttctgtcaactcctcccctccttggttcttaactgatatcctttatttgctgttttggtaactcttgaaccccatcctctccactccctcccggtcttggttccatcatttcttccttttctgatatctctttttagcttttttgaaaaaaaaaattaattatagtacaaaacataaaatgtacccttaaccatttttaagtgttcactcatattaggtatatatatattgatgtgtaacagagctttataactttttcatttagcaaaactcaagctctgtacccattaaacaacagctccccactcccgctcttcctaacccctgacaaccaccattcgactttttatgtaattttgacaactctagataccttatattagtgaaaaatcatacagcgtattggtcattttgtgactagtttatttcacttagcagtgtcgtcttcaaggttcattctagttgtagcatgtgatccttaaaaggatcagtttaaatctttaaaaggatttccttcccgttaaggcttaatagcattccattgtgtgtgtgtatcgcattttgtttgtccattcatccatccatggacacttgggttgtttacacctcttggcttttgcaaataattctgcagtgaacatgggagtgcacatacctctttgagatccggatttcaattcttttggttacatactcaggcatgggattgcaggaagactgtcatctctctcatcttactcaacaggctgcttctccccagtgtacatacagacttgagtctttcttatctcttttttcctaaaagaacaaaaaaatttatttaaatgtgagaattatgggaaacctaagccatgggaattggacactcatgggggtcttctgtgaaatgggacttgcccccaccttctgcagcctgaagcttttgcagtttcgccatcagttctttggcggggttaaagatgccgccggttggctggtcacagatgtagcagcgcggggtggcccggaagtgctccagcgcgcagctctcgcagaaataatgcctgcacttggtgacgactgggttttggaaggcctggcgacatatgaaacacctgaatggtatttcctcttcctcgcttcccacttcatggttttcgtcctcgcagatacagtagcgaccctcttcaagctcccgttcaatctcccacccgagcttgtaatcggaacggtcgtggaggaatttgcagctgtccccgaagccacagaagccagtctccttgtagtccttgcagatgtcaggctggtaatcccagcgcacagtggcgcgcagatgccctggcgcacgtatggggcccttcctcgccatccccgaggaggagttgcccatggacgtgtccttgggcttcaggtacctcaggtagctgtggattccccggtagatgtggtcgtgctcccgaccccgcagtgcctcctggacccgctggctgcacttgaggatggtcggcgtatggtgctccttctcggtgtcctgctcgaagtcagcggtggcccccatgtcctctggccccacaggcttcgccgagcgggtggacctgtacaccacgtcgaggctctcaggcgccgcctcctcgcccctcctgtcgccgtgagccgccttctgccagctgtggaggccccggggcctcggtgccacccgcgggggctgagccactgtgtcgccctcgtccccgctgctgctgctctctccgtgctcggggtcgcaggccgggcgctttctgaggcctgcagcccctttccgtccaggctttttgaagaggaaggtgcatacctggtctgcttggtcggccgtccttcctggagaaggtggcgctgccatgtttgagtctcaggctcccaacggccgtggcgtgcgtcacccttgcgtcgcccttgcgtcgctgcacgtggggcgtgggccctcccagttctaaaaagcaaaagcaagtgaaagaaaagcttctgctaggccaggcgcggtgactcactcttgtaatcccgggacactgggaggccgaggtgggagaatcacccgaggtcagcagtttaagaccagcctggccaacatagcgaaactccatccttactaaaaatacaaaaattacctgggtgtggtggcgtgcgcctgaagtcccagctactagggaggctgaggcagaagaatcgcttgaacccaggaggcagaggttgtagtgagccgagatcacgccactgtactctagcctgggtgacagagcgagaccctgtctcaaattaaaaaaaaaaaaaccaaaaaaaaaggcttctcccgcccttccctcccttgacctgcctcctggccctcagatggattccttgagagagtcatcttcacttgctcctcagctccctcagtgcacactcatttttcaacagattcctaaaaggccacgggtggaatcattccaggccatagcgaaccggtggtgctcatcctaaaacacaggcgcttgaaatgcgtatttaaaagcaacacacgcgcagtgcagaaaacaaaaacagatacaagcaaaaagtaagacgcctataatccctcccctcaaagataaccactgtcaacacttttgtgtctattcttttaatatagcctttattaaaagactgtcatatcacactgcacctgtgggtgtgtagctggctttcattttgaaataaaagtaacacatgtaaacatttaaaaaaatattatcaagcacttattgtaatggaaattggctgtcccctgcctggcccctccacacgccaattcctggtacctaagataatcatttttaattttttttttttttttttttttttgagaaagagtctcgctctgtcgcccaggctggagtgcagttacatgatcccggctcactgcaacctctgcctcccgggttcaagcaattctcctgcctcagcctcctgagtagctgggattacaggtgtgtgccaccacacccagctaacttctgtgtttttagtagcgacagggtttcaccatgttggccaggctggtgtggaactcctgacctcaggtgatccacccaccttggcctcctaaaatgttggtattacaggcgtgagccactgcaccccgccttcaaatatttttaacccttttttttcttgagtttatcttcaagttgtgaaataattcatttatataatgtaaatggattctagttcttatttagccagtgcatgtcataaagtgttacatgcaatttctttttctaatttaggttctatctctttacttactagaatggaagatgagattcagctcacttgtagtgcccccaaaacactggctgctgtgggatgagggagaagttgtgtgggtctctcttcctagacaccaaggcatcctcagctgttggaaatgtgatgaataagcttacagtgtaaagaacaattcatcatttgtcagttttctcttaggatagtaattctagatttttcttcaactgttatcatcccatctttcatgttggaagcttttctaaaatacttggttatctccagctgtttatacttcagagtgaggtgcctaaaagctggctggaatccatcggtattgttgggcttgtacactggactgtcctttgtgtgattcagttggaacccatcttttttcttggagacccccagatgttggtgtccatattagtccgttttcacgctgctgataaagacacacctgagactgggtaatttacaaaagaaaaaggcttaatggacttacatttccatgtggctagggaggtctcacaatccatggtagaaggtgaaaggcatgtctcgcatggcagcagacgagaacagaatgagaaccaagtgaaaggggtttgcccttataaaaccatcagatc

SEQ ID NO: 917414 - DNA, 4001 bp, Homo sapiens
ctgcctcctgagttcatgctattctcctgcctcggcctccggagtagctgagattacaggtgtgcgtcagcacgcctagctaatttttttgtatttttagtagagatgggatttcaccatgttgcctaggctggtcttgatctcccgacctcaagtgatccgcccacctcggcctcccaaagtgctgggactataggcgtgagccactgtgcccggccttgcattaattgtattttttaaaaactttacaagtttcctatccaactgaaatacctgaaacttgcttacaaccatgctaaattttaaaaccctatttaacttccagggataatattgccaaagaaataaaaacacttaactattataaaatttctgatactgaataactcaaaataacttgtggtgaattacagcttaaaaagcactttcaggattctatatacataaccactacttctccagtttagtttttctaagcattataatactaatgtatggaagaagtactcattttaaaaggttgtgttctagaactttattccgtaattttaatttcattcaaaaatggaaattttctacgtaacggtagcagtgatctaaaccccaagtaggagaaacttggttctccactgaaatcacaactttttctgcagaggctcacatctcacagagtccatcttgccaagactgagaaaactgatcgaatgaccttaactttgaaagtataaacattaaacagttacgccaggtaatacgaattttcagtagctccaggaattgagattcaacaactcagctgtattaagagcacactaaggtattttaagttacattaaaataacttgaaccggccgggcgcggtggctcacgcctgtaatcccagcactttgggaggccaagacgggcggatcacgaggtcaggagatcgagaccatcctggctaacacggtgaaaccctgtctctactaaatatacaaaaaattagccgggcgtggtggcgggcgcctgtagtcccagctactccagaggctgagacaggagaatggcgtgaacctgggaggcggagcttgcagtgagccgagatcgcgccactgcactccagcctgggctacagagcgagactccaactcaaagaaaaaaataataataaataacttgaacctgtgatcacttgagtagattgtaggtgaacagaccaataatagtgcagtgtatttttcccctcacgtataaagaccaacacacacacacacacacacacacacacacacacaccccacaaggtgcacaaaagaaactatcattttccaaacagtgttttaggccagtgtgagccataatgtaaaaaacaaacaaaaaaacccccacagaaacaacaaaatgctaacaacaacaacaaaatccaaaaccatttcacaatggtctacttgttactcctacaacaaaaactacaggagaaaatcaagtttcgttccttcttgatgacaaaacaatgggctacattttatgtctacttttgcatgcacccgctaacctgccttgtgaggagtagattaaagccacccgggcccccatcctcccggctggagggtcggtgaggcctggatgggtaattggagaaagccgtgacaggcgcaggtgctgcccttaaccaacccaagcactgccctcttagaggtcgggtgcagctcgcgggaggcctgtgacgcagtttctggtgacaccaggattggatgcagctgaccaagcctcacgcgcccaccagctcacctggcccccagcgctccctccaggctgcctccccgctaggtgggcccttgggctcctcaccggatgatctggataccctccttccacacctggtgcactggatttcagcggcaccccagggctgactcttcctccccattcgctggtaggaagacctagaaggcccagtcttcgaagcctctgccgccatcgctgtctctttcttctggaacaaccgccgagtgcgagtcccggcggccctcgcggcagcgaccaatcattggaggccagcccctgcagatagccaaacagtgggccgggagattaaagcccgcccccaagctcgctcctgatggggctggggctgttttccgttatcctgggaggtaccactcctagaaggggcgccttgtggccgttgaggaccgttcgtttttacgttctacccaaagagtcaccactttagtgcttttagtcatcacaaattaaaatttcgcatattattacttacattgtgagtgactttatagataatcatttggattgaaacaatcccctttccctattacgtgtcagggccagaagccctaaacctgtgtgcttcgggcatccagggcttggccaatagcagctggagtggagaagctaatgagaagctatcgttggggtagattcagtgaacgctttcgaattaaggagtgttcatcattactaactgctgttgagcctaataatatacaaggcagcgtgccaagagtggttggggatgctaagaatttatgaactagcaggtttctgcttgagagatacataactccttaaaaaaacccagtaacttccgccaaaataagtgttatgtaccggacctgtgttagagacagtaagaattagccttctgggcccggcgcggtggctcacgcctgtaatgccagcactttgggaggccagggcgggcagatcacgaggtcaggagatcgagaccatcctggctaacatggtgaaaccctgtctctactaaaaatacaaaaaaaaaaaaaaaaaaaaattagccggacgtggcggtgggcgcctgtagttccagctacttgggaggctgaggcaggagaatggcgtgaacctgggaggcggagcttgcagtgagccgagatcataccactgcactccagtctgggcgacagagcgagactgcgtctcaaaaaaaaaaaaaaaagagttgaagcaacttgtccaagcatagttcacaaaaagcaatgaagaaatgaagtcaatatggtctacggtggtatgaaaactcttcgtagaggatatagggtttgcactagaccttacaacctaggtagtacttacaggagtaaacaagaactaagggattccaagaataaagaacacatcagcgagggaaggtagatgtgagggaaggtagatggaagacacagtgacttcttgagaatttaaagaccatttagccagagtatgagtttccttaaagtaagcttctttggagaggtgtgtcagggaagaatttcggagaatctcgagtgtaaggctgaggagtttggactttactctttaagcagtagagtgcatgagacgttttgtgagcaaggaatgaagtaatctagtagaaaggtggcaggtgtatttcaaacaaaacacctggaggtggcacggttgccttttgctgctaagaataaagcctgcccatattcctcattttcttttctctctacactgtgtgtgggtaactagaaactgtgaagtaagtattctcttgaaaggctcacttcggctcaaaaatctttgtaatttgttgtcttcgagagaaaagtactgcttccctaaattaccctcattctactactcatccaatagtttccactactaatccatgatggaactgagtactaatcaagccaatattctcatgtaacatgttgactcttctacagttttgtgagtattattccctattcccctcatctggaatacctactgttcactcttcatcaattcatattctcttttttttttttttttttttttttagaaatggagtcttgctctgtcgcccaggctggagtgcaatggcgagatctcagctcactgcaaccttggtctccgggttcaagcaattctcctgtctcagcctccccagtaactgggactacaggcgcatgccaccacgcccagctgattttttgtattttagtattgactgggtttcactgtgttgcacaggctgctctcaaact

SEQ ID NO: 917415 - DNA, 4001 bp, Homo sapiens
catgtgcaaagtttagcataaagtctggcacataagattaagacaaaagtcttaatctttttatttttattatctgatttttatttcagaataaagttaaccaatacaggaaaaaaaaaacactaaaaatgcctgatgtcatggatgaacttaggtgagggttttacgaagtaatctgaagacaaatggtaataatgatagaggttcaactatgaagactcaaagtcttagtattctgaagacacaaatgatagtatagaggttcaaccacagactctaagctttaatattcttattttaaaaatggaaaaaccagccctatcttaaagcattggtgtgaagagtaaacaaaataatatatgcatacaaaagcactctgtagtctgcaaatcactatattctatgaggtatcactctcgttaaatacaaaaagtataggtttggtaaatcaaacagaacactgtcaatacaattgcaaaagacagcctataactaatggaaactatatataatgtgtacaaaatacttcccaagaatatttttatcagcctttaaagccagtgttggaggaaattaactcagaatttaacacatatttccaggaactttatgtcaggagccaaatgtagactgtggcaaatagaaacatcgcttcttccctccccctagccgtgcaggcagtaagtaatagctcaatgccagctcaaacaccatcctcgatgaggccatccttgatctctccaaattgatcaagccatccccaatccatgatctcccagcacatttgctatttcattggcatttcattctgactgctatccagaattatcagttgcttccaatgctgactttcttctactttttgaatccagtaaattcacacagaacttcaaacaccccaggcagatcgtattggccggcactcaaatgcttgctctagaagtttgtatttctcaaatctgagtctacggctcagtctgcgctggggggtaaacacacaccctgacacaccacagacgtaaaaataattcagggtggaaaaaagttggtggtttatctttccccttctttatctattcggtaaagaaatgctctttaaaacaccgaaagtgaggcacaaatggaaatgaaagaggagaggaatgcattagaatattcaaagctccgtttctaattcagaaccactttccctaccttgtttcacaaacacactaggcacctcttgcatcacaaagagagagtattctatctcctgactgacccattcttggagttaaaagccacacctcttattctaataccctccaggagcacttactatttacttttcaaattaggaattcagagcaaaggtcatcctcaaggccaggataaaggcaaaaggtcttggaaatggaaaagactcaatacacagcaccgtaggccccagaggatgaacactagttacagaggactaagaagcccgaggtgaggctcccaggaaatgtgttttaatgggcttcactacacgccacgcgaggctgcagagggaagttaaatatccctgcgatgcgtttctgatggggcctccttcgaggccggtgtcttgccagtgtgaggccgcgggcggtggcagggccgtctcgccgccctcccggcagaccacgggccgctgtcaccctcctccgaaaggcgcccagatgaatccattaatcacggtgcgctacccccatctcccaggacgcggcctcccatcaagaacgcgggttagcgttttctcccatctccgcgcctcacgccccttccccgcccccgcacgagacggccctcggccccggcgagcgacttatccaaccccgttttgtagctgtgcccacaatcacccattaccttccccaagcaaatgtggcacgtgatgggcagagtgagcgacaatgtaacattctgcacggtctgagccatggcagcgttcagaatcccgccaacacggaagtcccgccgacctaccgctactcttcgccaagactgggcacgcgcgggccggctacggcgccccggtagggccataacccgcccaggagagaaaacgaaaacgcgctttcgaaacgcgcgatctccaaggcgttttcctttcattaaaaaaaaaaaaaaaaaaaagaaagaaagaaagaaagaaagaaaattcactgattagggagctgcaagattcctgcgaatgtgtaggaaggtagtttactacaagtatcgaggatcttggaaaatctaaaggaaagcggaatagtggagacagaagaggaagatacggaaaggcgattttttaaatccccaaattgttttcggggattggatggggtgaaggatggagagtttttcgcctaattattaaaccccacacatccgccaacacagcgtaatcaaaacatagagaaaagacattatctacacgtttcaatttttttcaaaacagctttccacctctgtcagttctctttccactcaatataatgtgcttccagagggcacaataattcacttaagaaaacagtgattgtctccttatctgtgtccgagacgatcctgatacatttaatcgcagctttccctgaaaatacatttttactgtgggcttctctgggttttccaccaaaaggagattaacgttttcacgtcttcatttcaggtgcatggttgcatatgaaatgtaccgctgtgttgttgaaccccaagggagaatttgtgaggttataagttgcgtttcctaccaacaaaaaagaaaaaaacctaaaagttcctaaatttatcttaaatgcagtataacaaatttggaatttatctgcaacttacttgaagcgaggaagagctgatgtgataaattacgctaacaagtaaaatctgtgagttgagagatttaaagacaagaccatcgggacaacttttactaatctttgtgaaaaagacgcagtatgacttcaagaagcagcctcatggttaagagaaaggggttctggacctgggctgcttcagcggaaatccctgcccccaacaacttcctacctaaacggtagctccatggcttctggcaacttttgttttgttttttgagatagggtctagctctgtcaccactaggtgccaacacagcgacctcccaggctcaagcgatcccatccgcctgcctcagccagcctcccgagtagctgggattacagtcatgcgccaccatgcttggctaatttttgtatttttagtaaagacggagtttcaccctgttggtcaggctggtctccaactcctgacctcaagtgatccgcctgcctcgagggtcggggagtggtttccccatgttgcccaggctggtcttgagctcctgggctcaatggatcccccctccttgacctaccgacagtgctgggattacagccgtgagcactattctgcactctacttctgtgagatcaactttattagattgtacatgtgagatcatgtggtaattgtctttctgtgtctggcttgtttcactcaacacagcgtcctccaggttcaaccatgccgttgcaaatgacaggattttattattttttatggctcaatagtattctattgtaaagacatttcttttcaaaacatttcccattacttaatggggcaagttcatttccttgtaaatcatcttgttgatgggtgtcaatatgtagtcacaaagataattttaaaaatcatatcctgcattttaagtaaagtattaaaatttagactatctctaacatctctttccacatttcataccattgtcacagcttctcagtgtttcagtgcacagtccatacagccatttctgtgctgatgacattgtattatagttggtgatgtgtttgtccccacaacaggctatgtttcttgaggtcagggattgcatccaatttatctaatgtctgtaataggttactgttccacaaatagtaatattctcatttgctacagcctacctttataataaactcaggctgttttattttaaa

SEQ ID NO: 917416 - DNA, 4001 bp, Homo sapiens
caggagtttcagaatgccagtgaaacttcctgactttgcctaagaaaccactatttttggattatatttaagtgtcactcctgagaagctcacttttaaattacatggaaatcaagagagaaagatgtttgtttcacaaatattttagaatttcttaaatacatctattcagtaagtcacactaaagcaatggttctcaaactcacttaagggtatttttaaaaatctagatgcccaaatctcatccccaatccttgattagagttttccagggtaggaccaggtctgctgttaagagctaatttgggtgttctgcagatgaaataaactattcctcgacaatttctggcatgtcactaaagggtatgagtaatacagcacctgactcagtagaggctggaggctcaaatggctaggctaccagtgaagcaactgtgcaactctgcctctcgaaatacactaggtatttaataagcaagctgctttaaatataaggtgaaattagcctacaagtctaaaatactgttggagtaagcaactattcaatttcacctgtaacactaaattacaaattcaaggatttttttcactgtggttattttattatgtcattttgaacaaatgacctagtaacattatccactcaaatatgaattaacactactaaaaactcaagatctctatcttcagattaagaccataattagcaaagagcatatttcgtaggtacagcaataataggatttttgtaataaataattttacaagttgaagcctatcataaaatcaagttaccctaatattatttaaaacttgagcttctccttaaaggtaattttcttatacagttaatcacaatgaaaacaaagcgaataccttattttcctttcaacacgcttttaacatatgccatggtatccatccttcaattgtttgtgccttttttgagagctgcccatctgaagcaataaaagagagttgaataattcaataaactgtttctttaaaggccaggaacgggtggtagtctccccactctgctgcaaagccaaagcaaattctccagtggattttgttagacacatctagaaaattagatccccatacaattaggtcacgaaaacctcccgcaaggcccctaccttccgcaacaaacttaggcctttcgtcctacactgtcactgttcctgggtttacgcctcctctctcaaaggccttccttcctatcccgttcccattcggatgttaccagggttaggcgtctccggcttacttctaaaccttgactttcttgccacccccgccctccgtcccgctactggtttctttcccggccgttgcgacggaagctcgcgccgggggacgatccccactacgataaataaagtgggctcaagaggcccaaccaacctcttcccaaccgagcctcaagtaacgcttcccttagagacctagattctcacaaggaagcaggtgatagacggtgcatcccaaccaatcaccagccagcggagcgcaataagaaggcagttaaccaatcggagaagagatgggtggctcgaaggatggcctgctttccccggcgtctccaggaagtagtggtgggacccagatctttccctcgagcccacctctccaggtcttgggccttcgccctcctgtccggagaacgtgtgctgtgggcggccgttctctcgggtgctggaggctgtggttgggaggcgggataggcttgccgccgcgcctccggagcccgctgtgccctcgaattggccactgaggagagaagccggaagcccgtgctgcagcgtggggtcgtccagctggaggggatactcgggaggaagaacggcaggccccagcccttctttcccgacagccacgccgcccacttggcggcggggagtcgctccgcagccggcccggagctcgcccgtgcaactgaaaactgcgtccgtcgggagctagggtgcctggcgtcccgcgttccgccctcttgcgccgcccttacagtgcctcctcctcgaggccaaatgcccggccgctcagcgctcgtggcagccgcgtagttgcagagacacggtctgctttccaggcttgggaagtcccagcacttaactctgcgcgtcggtgtcgctcgtttgccagccagactataaagtgcacccaacggtgtatgcgtctctttacttccgggtgtaacgtactacccagccaggccctttcccttgctgtgctttggaacctggaaattacaaaccctaataaattctgaagtctgtctgtctgtctatctctatttgagacaaggtctcatcctgtcgcccaggctagagcgatcgtagctcactgcagcctccagcgatcctccctcctcatcccagtagctggaactacaggcgcttgccattaatttcacattttttcttttgtagagacgggggtctcgctatgttgcccaggctggtttcgtactcggcctcaagcaatcctctcacctcagcaaaatgggattacaggcatgaggcaccgcaccccactatattttgtgttttttcaccttcccgctaggaaagcagtttgaaactcccaacattcctccctctgattttatttctgagatgtgaggcttactaaacttacctcaccgttagttaagatgctgagtaggtctctgtctaacctggtatagtcccctttcctgacatccctaccatctgatgacttcatcactggagagtgctcacaatgccgttacttgttattcttccgtttgttctttcatttctgcattaacttttgaggaactaccatatccccattattatgctgggcacctggataacaagctacatgcagtccttagcatcaatgagctaccagtgtagtaaggatctatggacaagtgtttaaaataagcatatggatatggatactaaaatggaaatatataaaacagcctagaaagcccttccagatctttcttctgcttacatttacaggctgttgtcttggcactccgaaactgcttgaagttccgccacaagatatgggaactcctaagcaacccccaactccacttttacctaatttcctctgtctcccaaaactcagctcagttctcatctttaaggaatttttcctgatacctctgaaataacacccttacctcaccctccagcccgatatttacacataaaactaagcaaatgtcccttttgggggctcccatactccctctatatataaaaccctattttagcatgtattcatgtatttaacaaatagtgagtgtgactatgtattaggtgctggtgatgacagccgtgaatcagacagtcatgtcctcatagaatgaagtccttgccctcttttcccatggaaaaagagccattgagcaaatacttaagatgattttctgtttttaggtctttactacctagagtctgaactgcttaagtgtgatcaaatggtctaattcatttttgtaatcccagaacttagcacagcacttggcagaacattctcctcagcctactgcatagatgagcagagaaaaatgcaatcttttggcaaacgggattaatgcacacagtacaacgacttcagatattgtgaacacacatcatagaaaataacaagtagaaatcatttttaatatctgtgaattttggagagtgcaatcaaatgcaataatccaagtgcaaatactttttacatgttgagtggaaaagacatatgtgtctcttcctatttttcctatttcctattatataccctaagaataaaaaaaaaactattataaaaatgtctaaataaaaatccaatcaagtgatttaccaggtaggaagttgcaggtttttgtgagtagagaatcaggtaatgtatgtaacttgaatccaacaccttgcttcagtttttgtagtccaagacaaaatgactacaaagaggggcttagatacaacagctggaacagacagatgaatcattctggatatcta

SEQ ID NO: 917417 - DNA, 4001 bp, Homo sapiens
ctggatttgggtttaccacacaatgctcatgcctgaataccatagtgattatctcatttttgaccatgttgacgatctggaaaagttgatccagaagtcctcatttatgtttcaggatctgggtacttcacattaattacaaattttaggcttgaattatgcacattcttcacttaatgagcaaagggatactgggatgatataatttacatttgttttcagcaaggtattctttccaaaataaggctcatgaatgtaatattatcccccactgcactttgatgaggtgaaaatcatttagcctaattaatatctactgaacaaactggaaggtggtctcttattaaagcttaccaggaagactttgaaacccaacaggaaacaagacatcatgtatggctcaaggattgtgaaagtgcatcagagcactttgtatcaccccatatcaagcctcatccttaagcctggaatggttagtcccaggagtttcagaatgccagtgaaacttcctgactttgcctaagaaaccactatttttggattatatttaagtgtcactcctgagaagctcacttttaaattacatggaaatcaagagagaaagatgtttgtttcacaaatattttagaatttcttaaatacatctattcagtaagtcacactaaagcaatggttctcaaactcacttaagggtatttttaaaaatctagatgcccaaatctcatccccaatccttgattagagttttccagggtaggaccaggtctgctgttaagagctaatttgggtgttctgcagatgaaataaactattcctcgacaatttctggcatgtcactaaagggtatgagtaatacagcacctgactcagtagaggctggaggctcaaatggctaggctaccagtgaagcaactgtgcaactctgcctctcgaaatacactaggtatttaataagcaagctgctttaaatataaggtgaaattagcctacaagtctaaaatactgttggagtaagcaactattcaatttcacctgtaacactaaattacaaattcaaggatttttttcactgtggttattttattatgtcattttgaacaaatgacctagtaacattatccactcaaatatgaattaacactactaaaaactcaagatctctatcttcagattaagaccataattagcaaagagcatatttcgtaggtacagcaataataggatttttgtaataaataattttacaagttgaagcctatcataaaatcaagttaccctaatattatttaaaacttgagcttctccttaaaggtaattttcttatacagttaatcacaatgaaaacaaagcgaataccttattttcctttcaacacgcttttaacatatgccatggtatccatccttcaattgtttgtgccttttttgagagctgcccatctgaagcaataaaagagagttgaataattcaataaactgtttctttaaaggccaggaacgggtggtagtctccccactctgctgcaaagccaaagcaaattctccagtggattttgttagacacatctagaaaattagatccccatacaattaggtcacgaaaacctcccgcaaggcccctaccttccgcaacaaacttaggcctttcgtcctacactgtcactgttcctgggtttacgcctcctctctcaaaggccttccttcctatcccgttcccattcggatgttaccagggttaggcgtctccggcttacttctaaaccttgactttcttgccacccccgccctccgtcccgctactggtttctttcccggccgttgcgacggaagctcgcgccgggggacgatccccactacgataaataaagtgggctcaagaggcccaaccaacctcttcccaaccgagcctcaagtaacgcttcccttagagacctagattctcacaaggaagcaggtgatagacggtgcatcccaaccaatcaccagccagcggagcgcaataagaaggcagttaaccaatcggagaagagatgggtggctcgaaggatggcctgctttccccggcgtctccaggaagtagtggtgggacccagatctttccctcgagcccacctctccaggtcttgggccttcgccctcctgtccggagaacgtgtgctgtgggcggccgttctctcgggtgctggaggctgtggttgggaggcgggataggcttgccgccgcgcctccggagcccgctgtgccctcgaattggccactgaggagagaagccggaagcccgtgctgcagcgtggggtcgtccagctggaggggatactcgggaggaagaacggcaggccccagcccttctttcccgacagccacgccgcccacttggcggcggggagtcgctccgcagccggcccggagctcgcccgtgcaactgaaaactgcgtccgtcgggagctagggtgcctggcgtcccgcgttccgccctcttgcgccgcccttacagtgcctcctcctcgaggccaaatgcccggccgctcagcgctcgtggcagccgcgtagttgcagagacacggtctgctttccaggcttgggaagtcccagcacttaactctgcgcgtcggtgtcgctcgtttgccagccagactataaagtgcacccaacggtgtatgcgtctctttacttccgggtgtaacgtactacccagccaggccctttcccttgctgtgctttggaacctggaaattacaaaccctaataaattctgaagtctgtctgtctgtctatctctatttgagacaaggtctcatcctgtcgcccaggctagagcgatcgtagctcactgcagcctccagcgatcctccctcctcatcccagtagctggaactacaggcgcttgccattaatttcacattttttcttttgtagagacgggggtctcgctatgttgcccaggctggtttcgtactcggcctcaagcaatcctctcacctcagcaaaatgggattacaggcatgaggcaccgcaccccactatattttgtgttttttcaccttcccgctaggaaagcagtttgaaactcccaacattcctccctctgattttatttctgagatgtgaggcttactaaacttacctcaccgttagttaagatgctgagtaggtctctgtctaacctggtatagtcccctttcctgacatccctaccatctgatgacttcatcactggagagtgctcacaatgccgttacttgttattcttccgtttgttctttcatttctgcattaacttttgaggaactaccatatccccattattatgctgggcacctggataacaagctacatgcagtccttagcatcaatgagctaccagtgtagtaaggatctatggacaagtgtttaaaataagcatatggatatggatactaaaatggaaatatataaaacagcctagaaagcccttccagatctttcttctgcttacatttacaggctgttgtcttggcactccgaaactgcttgaagttccgccacaagatatgggaactcctaagcaacccccaactccacttttacctaatttcctctgtctcccaaaactcagctcagttctcatctttaaggaatttttcctgatacctctgaaataacacccttacctcaccctccagcccgatatttacacataaaactaagcaaatgtcccttttgggggctcccatactccctctatatataaaaccctattttagcatgtattcatgtatttaacaaatagtgagtgtgactatgtattaggtgctggtgatgacagccgtgaatcagacagtcatgtcctcatagaatgaagtccttgccctcttttcccatggaaaaagagccattgagcaaatacttaagatgattttctgtttttaggtctttactacctagagtctgaactgcttaagtgtgatcaaatggtctaattcatttttgtaatcccagaacttagcacagcacttggcagaa

SEQ ID NO: 917418 - DNA, 4001 bp, Homo sapiens
aaatgttgtcccctacccaaatactgtatttgccaaatcttgcagtgagaagcttacatataaaatgaaaaacagcttctaggaaatacaacacaattggcacttacttctttgcctaaagccattaagtcagactggatttgggtttaccacacaatgctcatgcctgaataccatagtgattatctcatttttgaccatgttgacgatctggaaaagttgatccagaagtcctcatttatgtttcaggatctgggtacttcacattaattacaaattttaggcttgaattatgcacattcttcacttaatgagcaaagggatactgggatgatataatttacatttgttttcagcaaggtattctttccaaaataaggctcatgaatgtaatattatcccccactgcactttgatgaggtgaaaatcatttagcctaattaatatctactgaacaaactggaaggtggtctcttattaaagcttaccaggaagactttgaaacccaacaggaaacaagacatcatgtatggctcaaggattgtgaaagtgcatcagagcactttgtatcaccccatatcaagcctcatccttaagcctggaatggttagtcccaggagtttcagaatgccagtgaaacttcctgactttgcctaagaaaccactatttttggattatatttaagtgtcactcctgagaagctcacttttaaattacatggaaatcaagagagaaagatgtttgtttcacaaatattttagaatttcttaaatacatctattcagtaagtcacactaaagcaatggttctcaaactcacttaagggtatttttaaaaatctagatgcccaaatctcatccccaatccttgattagagttttccagggtaggaccaggtctgctgttaagagctaatttgggtgttctgcagatgaaataaactattcctcgacaatttctggcatgtcactaaagggtatgagtaatacagcacctgactcagtagaggctggaggctcaaatggctaggctaccagtgaagcaactgtgcaactctgcctctcgaaatacactaggtatttaataagcaagctgctttaaatataaggtgaaattagcctacaagtctaaaatactgttggagtaagcaactattcaatttcacctgtaacactaaattacaaattcaaggatttttttcactgtggttattttattatgtcattttgaacaaatgacctagtaacattatccactcaaatatgaattaacactactaaaaactcaagatctctatcttcagattaagaccataattagcaaagagcatatttcgtaggtacagcaataataggatttttgtaataaataattttacaagttgaagcctatcataaaatcaagttaccctaatattatttaaaacttgagcttctccttaaaggtaattttcttatacagttaatcacaatgaaaacaaagcgaataccttattttcctttcaacacgcttttaacatatgccatggtatccatccttcaattgtttgtgccttttttgagagctgcccatctgaagcaataaaagagagttgaataattcaataaactgtttctttaaaggccaggaacgggtggtagtctccccactctgctgcaaagccaaagcaaattctccagtggattttgttagacacatctagaaaattagatccccatacaattaggtcacgaaaacctcccgcaaggcccctaccttccgcaacaaacttaggcctttcgtcctacactgtcactgttcctgggtttacgcctcctctctcaaaggccttccttcctatcccgttcccattcggatgttaccagggttaggcgtctccggcttacttctaaaccttgactttcttgccacccccgccctccgtcccgctactggtttctttcccggccgttgcgacggaagctcgcgccgggggacgatccccactacgataaataaagtgggctcaagaggcccaaccaacctcttcccaaccgagcctcaagtaacgcttcccttagagacctagattctcacaaggaagcaggtgatagacggtgcatcccaaccaatcaccagccagcggagcgcaataagaaggcagttaaccaatcggagaagagatgggtggctcgaaggatggcctgctttccccggcgtctccaggaagtagtggtgggacccagatctttccctcgagcccacctctccaggtcttgggccttcgccctcctgtccggagaacgtgtgctgtgggcggccgttctctcgggtgctggaggctgtggttgggaggcgggataggcttgccgccgcgcctccggagcccgctgtgccctcgaattggccactgaggagagaagccggaagcccgtgctgcagcgtggggtcgtccagctggaggggatactcgggaggaagaacggcaggccccagcccttctttcccgacagccacgccgcccacttggcggcggggagtcgctccgcagccggcccggagctcgcccgtgcaactgaaaactgcgtccgtcgggagctagggtgcctggcgtcccgcgttccgccctcttgcgccgcccttacagtgcctcctcctcgaggccaaatgcccggccgctcagcgctcgtggcagccgcgtagttgcagagacacggtctgctttccaggcttgggaagtcccagcacttaactctgcgcgtcggtgtcgctcgtttgccagccagactataaagtgcacccaacggtgtatgcgtctctttacttccgggtgtaacgtactacccagccaggccctttcccttgctgtgctttggaacctggaaattacaaaccctaataaattctgaagtctgtctgtctgtctatctctatttgagacaaggtctcatcctgtcgcccaggctagagcgatcgtagctcactgcagcctccagcgatcctccctcctcatcccagtagctggaactacaggcgcttgccattaatttcacattttttcttttgtagagacgggggtctcgctatgttgcccaggctggtttcgtactcggcctcaagcaatcctctcacctcagcaaaatgggattacaggcatgaggcaccgcaccccactatattttgtgttttttcaccttcccgctaggaaagcagtttgaaactcccaacattcctccctctgattttatttctgagatgtgaggcttactaaacttacctcaccgttagttaagatgctgagtaggtctctgtctaacctggtatagtcccctttcctgacatccctaccatctgatgacttcatcactggagagtgctcacaatgccgttacttgttattcttccgtttgttctttcatttctgcattaacttttgaggaactaccatatccccattattatgctgggcacctggataacaagctacatgcagtccttagcatcaatgagctaccagtgtagtaaggatctatggacaagtgtttaaaataagcatatggatatggatactaaaatggaaatatataaaacagcctagaaagcccttccagatctttcttctgcttacatttacaggctgttgtcttggcactccgaaactgcttgaagttccgccacaagatatgggaactcctaagcaacccccaactccacttttacctaatttcctctgtctcccaaaactcagctcagttctcatctttaaggaatttttcctgatacctctgaaataacacccttacctcaccctccagcccgatatttacacataaaactaagcaaatgtcccttttgggggctcccatactccctctatatataaaaccctattttagcatgtattcatgtatttaacaaatagtgagtgtgactatgtattaggtgctggtgatgacagccgtgaatcagacagtcatgtcctcatagaatgaagtccttgccctcttttcccatggaaaaa

SEQ ID NO: 917419 - DNA, 4001 bp, Homo sapiens
caaaactcttaaggagcagaacttgatacgagaatccaaactagtaccctttctctatgagaatataaaaacacaacaggacttctaccacactctatctgtagaacccaatttagaatgccaagggcatgtaattactaactagaagataatttagtggagaacacaataaaacagccttacatttttatgtgaattaaacctttcttgtcaaccaaattttccgtgatggtgtatctcaaacatcatctatttaactatcagaaatctcaagccacttcacatttctgattatttactacgaacgtatatagggtagaagagaggggaacccaggctttataatcattgacctaaatttgacataggctctgccacttactagctgggacacccacatttcatctctcatcttcatttgtaaaataggggtgaacactttcgtagctgaggtaatgtctacaaagaactcagcaatgcttggcccgtgtaaagtgctcagtagtaaccggcagctaatttatcattatctaagaattcacctacaggcatttagaaattaacctttcctttgtttcccaaaaaggccaaaacaatagttttgatagctctttagtcattatagggcagaaatgccattcctggccattactcctaccataaggtaaaatacagcagtcaggcttgacgtgttgacaatattctaacacaatttggtttctaagtttaccaacaatcctttaagaatggctcccaaagtaccatttttataaaaattgtatagcaagaagacatgtttcacctaactcaccaaagtcaaaccattgttacaatggatgaaccctttaaatgccaggtactctgttccaatccccaaagcctttagatgtgtataaagttccaaaaacttgtgctaagttagtacacaaagggtgatactgtgtagattcaagtcactttgtggaatcaccaagtggcataatcagttaactcattcctgattccagagcccataatcctccactagatccatctttctgagtttggaatccattttaagcatggaccccatacacttaaaactgaaggcacttttcaaaacgatgctttacagtttgtaagagtattaaaatcatggcaactaggatccaccataaagagcaacctgcagtttgctcgactctgttgacgtccacaaactagacaaaatgatgaactatggctaaatgtttcccttcactcaaagcatgctgccctagaattcgcaaaacagtatctcctcttggtgcaaatattggtgttgcaacctcaaaacactttcccttcgtccgatcaccatgtggggtcaaaattttaaaaacagtcggaaatcgtcttatgcattaactaagggcagtgagggttcatcacccaggacgactccgggacccactctccgaccgagagcccgggttttcacacctgtaggcttcacagaagattaaagccgacgcctgactttaaacccattcctactaccccttaagtcctcacccaacatcatcgcaagatttggaataaaaaagccacactgaaaggagttagaaaggcatcaggccacgcggcccccacacagcctatgtgagaggggccacccacagtaccggagatgcagccacgggaacataaaacgaagtcttttaaagattaactcgagtcgcctcaccccaagcgactcagtctcgtctttctcgcaaatgtccccccgcagggccgcaacatcgcagtccggttctcagcccacggcccagacccgacccggcgcacgctgctccccgtctggcagaacatggtttaacccgcccatgccaatggacctcaaacaggttagagagtctccccacggtcccaatgaacgacctctgaggccacaaggtcgcggttcaagtctgtcgaacacctagcgcccgggagccacgcgtaggccctacctggaagatggcggttccggccgaaaggaaagaggcggggccgcggcgcgcgccttacaagggcctgtgggctgcccacggcgctgcctgagggaaacgccaaccgtaagcgacttctttctagggaagaagatcgtctctgagaacacagaaagtctgtgaggatattttcccctcttgcgaaagaaaggcaaccggccaacacaagctgacacttgcatcgtgtcagacagcccggaaaggggccttcaagggcgatcaagaggacgccgtcgtcccgagcgtgcttacgccatcctttgcgtcaccgccttcgccggaagctgccttgtatccgcgtctccgcagggaaaactgcggctggcggtgcgggaagtgctattagtagttgtttatttgtttgtttgcagaaataattgcttgggtacgaaggtcaaacgagaatgaagcaagtatattatctagtttgtatgtctttaaatagtttctcctccacacgtctaaacatacgcacctgctagtaggtgcgcaaatgttaaaacctctttgggaaagcaatgtggcaaaatctagtaaaagttttcaattactaaaccccagcactctgctcctacctatatgtcttgtagaaactttggtaagtgaacaaggatgtacgtaacagcgctgtgggtagaagcaaaaaattagaaacgtccatcaataacagaataaataccttatgggatgttaggatgtagtattatacgccaataaaagaagactgaactcagaaatgtgatgaggcaaaaagagaaagatgtagaaaaataaatagtatgacaattcatatacattcaactctaaaacttgtaaaacaatgctatatattgcttagttatgcatacatatgtagttaaagaagtcaagaaatacaagagaatgaaaatcaagttgagaaaagcagtcatatctggtaaggaggggacaataaagggaggctttaactgtattgaccattattaaaccgggtgttaaatatatgggtggccattgttttattcactacacctttaaaaatagatattattttcttaatgtagtttatttaaattgagataatgccatatacccagcatccagtttcccctattattaacatctcatgctaatatggtacatttgttgcaattaatgaaccaatattttacactgttattaactaaggttcacattttattcagatttccttcggttttacctaataccctttttctgttccaggattccatccagaataccacattacatttagttatgatgtctccttatatgcctcttgtggctgtggcagtttctcaaactttccttacttttggtgaccttgagagttttgaggagtactggtcatgtattttgtaggatgtcctaatcatggaatttgtctcatgtttttctcatgattgtatgtatttttaggatgcatttttaaaaagtcagctaagttaacaaaatcccttatcagactgaatataaataatatcgtccagtcgcttttgaaatttgcatgtcttcgactcactctcctgatgcacctgaaagttgtaatttctaagaactgcgtcagcaccattttttaaatgtgtacattctgtgaccatcgtcatcagcacttaacatcatttgctgaagaacttgaggaggaataggatttggtattgattccttcaatacgttgactcctccagactttcactgtaaccattagcccttggcttctagattgtctttaacttaattttctgtagttcattattacagtcactctgttagcactcacttcctcaggtcacttttcctttcccattactttctttctttctttgagagggaattttgttcttgttgcccaggctggagtgcagtggcgcgacatcgactcaccacaacctctgcctcccgggttcaagcgattctcttgcctcaggctcacgaggagtagctgggattacaggcgcccgccaccacacctggctgatttttttgttttta

SEQ ID NO: 917420 - DNA, 4001 bp, Homo sapiens
acctttactcttaggcaactctaaatgagctttctttggttactatgaaaagccttaccgttttaattgtccacaattttgttgtgaaaaagaaaagagttttactaattatagagcaaattctattatttttataagtaggaataaaatgtcaaagcattgattaatgtgtcttgctttgaaaagaaatcattttaaacataaaggtttaaattagtagtcaaaagtaatataaaattagaaaataaaaatttccaggattataatcaataaatatttgttaggttggtactaggagtttgaaatatggcttttacttagaaataaaatcaaacaaaaattattaattgaacttttttttagtttaaagggtgactttacattatggtaaatcacaaaatgttattttagtaatagatgtttttcatctcataaacggtttaagcaaaatcaattaaatgcattatgtataaaagcaaaagtatagtaaaattggttaaactgtggttatagtcccgtacattaaagaactttttaagggcacagatgagctctatgacatgtcttaagaacctgctttgtagctgtatattcttaaaattgtataaaattgaatattcaaatgtggatagaacatgaacttctgaagtaggaccttaaatatagaaatagactgcttgttgcaactgtactgcatgcaaggtgagttcatatattgtttcttcttagttaatccttagcttttcatgtaagagatattaaaatataaaataaaagtcatgctaggtgcatggagatatagattttaaatatttgtagtaaagttttagtattattttaaattcaaaataaaatttagatattttaagccttttaaaaatcttttgtttgttagaagttttaaaataattcctcataagtattgcattttatttcaagatttaaaatattcacttggaattcacctaataaaactgaatatttaaaaaacctaaaacgaatttctcagaaaataaaaataatttcaaattttaacctttattctcagaggtttatcaaaattctttaagaaaaaatacaaattaaaatagaaacatttttgaataataataaaccccagcaaatcttgggtgtggttaataggttgtttatgaatgtataggctgacaacgtatctttttatttaaaaacaagtgaagatttaggttttattttttggtgagctttacaatgaaaatggtactgacttgaaacttaagagtttgactgaaataaaaatttccacaaattaaaaacaaaagaaaattatctaagtaaatgcacttgtatagacttttaataactttattttagagaggtttactcttagagacagatactgttttttagatctgcctgtggctttggagttcccagtttaattatgttcacgcaagatagttactaataattacttgaattttatgggcatatttcaacaggttgaaattccacaaaacacaattttagtttattaatttgtcacacttttcagaacaaatgccaaaaatgttttctatgttttaattgatatagtcaacattgttttttgacatattttatctacagctttaataacatacaaaggcttgtttccatgaaaaatttgttgcatctaaaaattactaggctgtgtgggactacaagcaatgaaagataatgacaaataccaggcaaatttgatgtctgttttttttttaaacaccccaatatatttattacaactgccatagaactacatagaaatgtattttttgggaattgcactcatttaaaacgagaaagtagcaaccttacctttgacattgatcagaacgatgaaatgaagtagaaagaacattgtaatcaatctgaggctgaagagatgtttaaaaaccagaaaaacaatcataggtttacagcaattgagttattagacgtatcctcttatacctcagcaggagttctgatgtagtaagttcagtgcctcccatgttctgagcatgctcacagctagaacctcactggcatgaagggagatggattcttgtcactatgcagcctgtcttttttgttctttcttttttgtttcttttagtttaaatctacagttgtgttcttgatcactaattcattatggtgtgtaaaagaaggtataataggactttggtattatctgataagaaatattttttaatcacttaaaaatttttttcctccaaagcatgtacaatttgctctgtttaaatccaaacatcgaagttctcaaatatgaaggatataggcttacactgaataggctatgaaaccctttacaattatattttcatgcaataaacaaatgtaaaaaactacttattgacagatacacaaagaacacccacttctattcaaatgtacctaaatgttttcaaatgacatatgaaaagataatttaaatatatggcattgtgttaaataattactgtaaaacattcatacaatattttcacttcacatacttcccgcataatcatattcctttttcttgaagtgaataattttattcttgcttccagctctgtattgcacacctattagaaaacactaattataatttagttcttacatcctgaaagcagctttctcaacagcatagttagtacaagttaaaagtataaaaattgacttttggttgtaggattctgttgatcctagtgtaatcattaagacttctccaaaaagatgtagaatttccatgtctgagtttatattttactaacagggaaatatctatctagaatacagtttgtagttctgatttgaagagaagattttgtgactgaacgatgcagattctcttatatgttgtcgttaactgtgtcctaacaacactgaaaaaaactaccttgtggtgactattatcgtcacaaatcataaaacacggggttttccttgttctttctttcattctagcctttgagagaacaaggattcaaacagaatgtacaataaaaaatactttatttatcacataatgtatttagttcttttctctttttaagaagtgagttaagttctctaagacacctcccagacatatttatatgtggtctcatctgatctttcaaatcaaaagaaaaagcaacagagagaataaagatgaaaagaaatacttcaggatcttttcttacatttcaagcatctttttttccctcactaacctcaaggtctttttaggtaaaaattgccttatttcacttaaaggaatgattagtttttcttacgttttgtgttttgctgtcgagatgatggatgctagtttctggtactgaaattttgagcatgagtttttaagtgcaattaaataccatcataagtctatttgaagtataaatatattttctatgaaaatgtaatttttggagaaataagaaatgtcaagatgtcaaagaaattagttaagatttattcatgatatcgagccctagcaatagatttacattgccaaaaagttgaatcgttattcctttctgttaggcttttcaatgttaatctttgaaatgtattaacacaaactttcagaaatcaataattataaataataggaacatctttggctcactggtttttaaaggtagagcatgcaagctttgaaataccatttcatttaatatgttttaactttgacttatctggtgtgaatatccagccttttgcaccgaaactgaaatgattgacatgtacacagggatataatgtatgtgtttaaataagagtgaatgaatgtagtctattcttaaagccacagttggtaaggaggttccaaggagtgcttcatgcagagctgagatgaaagacttgtgcaaactgattctcactcgatagtaacttcgaatctgcgcaagtgttttttattgatccttgcctgaatcagctcatcccttcattccagtcacctgttggtaggacccatacttttagcagtaatactataaaacctc

SEQ ID NO: 917421 - DNA, 4001 bp, Homo sapiens
gaggcaggcggatcatgaggtcgagagactgagaccatcctggccaacatggtgaacaccgtccccccgccccgcgccgcctcccatctctactaaaaatacaaaaattagctgggcgtggtggcacacgcctgtagtcccagctactcgggaggctgaggcaggagaatcgcttgaaccagggaagcggaggttgcagtgagccgagtgttgcaggcactccagcctggcgacagagcgagactccgtctcacaaaaaaaaaaaaaaaaaaggaaaaaaagcagtcgggggatatgctgaacctttttggcctggcttgtttgcagaggccctggccaatgtcaacatcaggagcctcctctgcaatgtaggggctggaggacctgctccagcggctaggggttcatccacaggccagtcatgcccctccactgccgctgctccagctgagcacaaggaagtggacgcaaagaatctgacgactctggtgatgacatggctttggactttttgacccgacctgttttacagcatgttcagtaaaaagctgaactctttaaaaaagtaaaaataaataataaagacttcaatcaagtcaatgtctgcatgccaacgaacaccttggggaactgatcagaaggactgatgaatcccccgaggagcatgaaaacaggtaataaatgtgtgtcaaggagggcaaaggactagaaaactgactcaagtacacagaaggtcaggattacactgaagcaggaaaaatcacagataccaactacttcaccaataatatttgtatcgagtagtaaggaaattcaacacctgaaatgtcatcctatacgctcaagtattccttgtattatctgttcaactctttgtgactcttttaaatgctggaaatgatgttatcacatgaagatgtttattagaaaaaaagaaatgttttaaaagagttaactgtcagtaaaatgtcttcaactgaactctccctttaagaaagctatagaattttaaccaatcttaaagaatacataacaatattcttgttttccaaaattttctgacctatcaagtcaacctatcacttgaactttaaaagttttagtatgtttactccccaagataacaggttctatattaaattatgtctaaagattctttcagtgccaaatttctgtatcaaaaatggagaaaaaacttccaatatatcaaaggtgaagatatttaccaacattctacttaaacttattacataaatagaaataaatgagtaatgattaaatcacttcattgatgatgtctaaaaaaaaaacttctgactccaatgtccaccaaaaaaaatctctgaatttcagaaagtgaagattcagatgaaatgatgggtggggttcggggtgggggatgcaaacggaaaaggcaagtgatgaaaagccacaactcaggacaagcacaggcggccacgctgccggagtcattcgcgccgcccgcggaaacctgcgtcgcccaccccgggccctcgacgcccgccgttcctccgcgtggcggagcccagcccagcgcccccggccaccgcctacctcgcggccgccgcgccacagccgctgctccgacaccgggaagccagtctccgcgaagatacgttccttcacatcgcgcacggtccaggacgccagcgccgcgacggtcctgcagcccacgcagccggggagcacggtcaccgggacccacctgtggaaagcagagggacgctcagtcgggctgcggctgccacccgcccgcccagcgcccgcgcggcctccacccgcgttacctctcccacatcgcggcgcggcaggcgcccctagcgcccgcccctgacgccggcgcccgatcacggccggccctaccgcgtccacaggccccgcgcgggccgggagggcgggatccgcatggcgcagtcccgtacgcagcagcccgcgccgaggaggaaacgctagaggaagccgcggcggccgaggagcaggcgggggcggggactgcgcgctcccggcccactcccggccctgcaggcgccgcccgcggggacacgcccacccgccgggaccgttagctggggatccgccccgcccctcccgccaggccccgcccccagggaacgcccatccaggccccgcccagtcaagttctgtcttgcccaatccggacagttagcgaaggagccgccccgccccactcgcccaccaggctccgcctgccaggccccgccccgcctgcagaggcgcctctgccagaaggcaaacccaataagggtatacagagcgtacagctagaggacaggtgcgttgtcccttttagagctcaacagtgcattgaaatgcagaactaggcatttctagggcctgtgtctccttgaactctaatgactttcattccatggaagcatctccagtaagatctatagtggcctccgagaagggaacgtgctggttacagaacacaagtgtcttccacggtttcgttctgtgctcggtttttgaggcacagaagtaggatcagtggctcagtttgctggaggaaagagagccagcagcaaagtaagatcagaatgcacataaatgtatcctatgacacgttaaaaatatttgtaacttattttggcaatattatattgttggtagcctgaatgtcttcccatcacaaccgcaagctccttgaaagcaggaacatgagtcttaagagttgatgaaatcgccccacgataagtaaagttgccatgtaatttgaaagtgtgtggggcttagaggcttgggggaacctcaggctgttcctttggcttatttctcttaggtatatatgatacacattgcaaaaaaaaaaagtgacatctattaaggcaattcaaaggctacatcatgaacaagtaaacttgtgtgctccttattttaaataccttgaatggaacagaattaaattttagagttgccccaaaaaatagataataaattgccatttctcccttccccccaaaaaaaattattactcagaactcatcatcagtagtaaatacagagaatgttctacagctgttccatctctcttaccacagttaaaaagggaatgatagaagtcatgcatgcctcttcctacttgggagaggtaagtaagtatgctccatcaattggaggagaatatggtgattcagtataaagacaaggccagaaagccctaagggccaaatatgtacttcttggctgggtgcagtgactcacatctgtaatcccagcgctttgggaggccaagacgggtggattacttgaggtcaggagttcgagaccagcctggccaacatggtgaaaccctgtctctactaaaaatacaaaaataagctgggtgtggtggcacacacctggttttcttgttggaaaaactataaactcatcatagaatttgatggagtagtgaatcatcctacaatatgggtgacccttgcagacattctgctaagtgaaagaagccagtcactgaagaccacatgttgtatgattccatttatatgacacgtccagaattggcaaacccatagacagaaagtagattagtggggctgtggggggagggaacgaggaggcagtgctaatgggtgtggggtttctttggggatggtggaaatgttctggaattagtagtgcaatgtgcacaattttttgaacatccttaaaaccaggtgaattgtacactttaaaatggcaaattttatggtatgtgagttatacctgaaaaaaattcacaatgtagctgatgtgaatgcaaaggcttttcctggaccacctctgggaacaaaaccatttgaatgaaaacatggaatgaaaaacctcggtttttccgtggagcctggtggttggtttgttcattttactctcttcctacaatgtactcagtccactaccagagtggtcagaacagacatctttgctcccaaatagatacatcagcaggataaaataaaatcttcttatcctgtcca

SEQ ID NO: 917422 - DNA, 4001 bp, Homo sapiens
aacatcagcgttccttttatagacaagagggcttagaacagtgtttcgtgcatagcaagaactgaatatgtattttgtactgatcaggactcattcagatgcactcagccaaaagttcatttcaaaatttattccttttgggaaatggtgcatgaaccactttagcatgcttcaccatggtggttaggtagatggtggactgagtgagaaaacgacaaaactcttactaaatagtgacactgtgtgaagaaccctgctaggcgccttcatacaaatcacctggtttcaaccctgtgaccattaagtgaataattgtgtcatctctgacacaggagggaactgaggctcacagaagttatgtggattgtcaggggctgcagagtaaggatgtggtagacctgagattggaacccggggcttctgggggcaagtcctgcgtaaagcaatggttttgagatgcttcagatgtaagcaaaccttggtcttcaagttctataattggacttttcttcctattatgtgaagaatagaaaacacttaatcgtggaaaagttcttataaaccaagtaagattaaaggaaaatagggtatgtagaaaatctggcttgctttgtttgaaagggagactgaaggagtctttaagatccaaggagaaaagaaagaaaaaattgcccaaacagcccaggaaggagaagaaaggatgaaagggacggctaaggaggatagaggaaaggaaactggggatcgttgtcacagcccaaagtgaggcttcagggcaagattagggaaggcagtctggatggtcataagtaaaactactgggacatcatgaccctgcattaacgtagaatgagtctggttatcaatgggcagcttaagaaaaacagaatggcaaatctacttgtcatgtgacaaataaaatgggattgtcaattatttattattattattattattttcatccatgacctgtgaatcaattacttttatctgcactgatggagaaatgaagagttccccttcaaaataacttcagagcagcttgcgcttgggaagcacgtggattcaacctggcttctgccttttacttaagcggaatgggctttatccatcttcaggggcagagagaattaagattaaagccaaaacaattgatatgttttaatagaaacaaatccagtcctcttctctgaggtattgacctcgttttaaggaagaaaaaaagacagcgagagagaggttttgttgctaaagctggaatactctttcaaagaatctaatgatcgcttattagaataaaattaaatatgtgaaatattttttaactaaaagcaggattttcaaatattatataagataaccataacatatggcattgtttgaaggcatgctgtttaaagtgagagcaattctgcaaattaaccgtaagctactttgagaatcccatcttattgttcaataagactctggaccccacgctgtgttactgcaacagctccattgtggcggtgcctggcaacccgggtggaaattaaaatgacaaagcggctagtccagcatcttgaccgcggcagatctctctagtcaccctgcagccgctcctcacccacaaattcacaagcagccaacccaaactgtacattttcagaagagctcattactcacagctgtacagcacgctgaaggccctctcgtctctgtcctctccgaaggcgggtatgttaaaggaaagtggccccttacctcccccaagcagctgcagtggccgagccctggtttcccaaggctcaggggacggatggccaacaacaccatggagcctgcccgtccccaggccgctcctgcagctgccctcgctggccacccagctggaaccttggacttactgggggctgtgggcatcagggtctctcggcctttgttttcctccagtgccatcagcagttcccagcgtgactgtcccgcagccgcactgggtccaggcggctcctgccgcagtcagtcgctccccctacccagcagcctttttttttcttcttaaagagacaggactgtcatcaaccttaggtgtcaataatgctgcaagtgcagcattgtcgttcattgtgggggtgacaaccaaccacacgtttttgttctcttcacttgcaaaggctaatttttagcagtaggtatggctaacagaagactggctctattaaacaccagttgtgtgaccttagacaagtcactcatgggtctcgagtacctcatgggaaatgaagacctgtgacctggtaatgttgtagctcacaatctgctttttgtatgttatttggagttgtttatgaggttccaatggttaaaaaaaaaagcattcactcaaaatgtgtggtaaactgtgaaatgctatacaattgatcctgttctaagttgaaattgctagtctcaatttaataatacaaaatattgtaactctattttcttgcttcctctgatggggtatgtgaaataccaccagcatttatttcatttcggcgcacagctatcctgccactggcctgggtacatcatattcctcatgatagtctcctagtagaactgcctgctttatccatataaatctagaattttggcttatctggaaatactggatctcggaagcttcttattgcttcgttcctgcggaaaattcctcttaagtcagttcaaacaactccagacctgaaaaggctcaaatgatctctcctgggagaagaccaaagcaagccccaaatgtcagcagcaactggggaaggagagcccctgcttcttgtacctggccctgcactggtctgacccagaagatgccacatctaatggtgtctccttcacatcctagactcacagatttgtgtacatattatttcctgggagataggtgggagacctgttctaacaaaaggactgaataatcacaaacaaagcacatttctattggggagaaatggtgtcttgcagggccttttcattgagctctcactgtagcaccgtgtggaccaacaggccctcggtggcatgcgcctgtggagtgaggctgcctctctgaggctaccaccattcttacatggttcagttgtaatcagtttaattcagcacacaaatattgagcccttgcttgttcctggcatcagctagacaccgtagactaaacggtgaatacccagtatgttgctcccccagcaggctcttctactcacagctgtaaaccattacacccccaaagggaaaagttataaataactacatatatataaactatatatataatatatatgtatagttttcagagaggttagacgattttgcctacctactcacactacataaaagtatccagtgaaatattgattattcagaaatagtgttgcttagccaggtgtggtggtacatgcctgtagtcctagcaactcaggaggctgaggaaggaggattgcttgaggccgggagtttgagaccagcctgagcaacatagcaagacctcaggttgggcgcaatggctcacgcctgtaatcccaacactttgggaggccgaggtgggtggatcacttgaggccaggagttcaagaccagcctggccaacatgatgaaaccccatctctactaaaaatacaaaaattagctgggtgcagtggtgtgcacctgtaatctcagatacttggaggctaaggcaggagaattgcttgcacctgggaggcagaggttgcagtgagctgagattgtgccactgcactccaacctaaacaacagagtgagaccctgtcccaaaaaaacaaaaacaaacatagcaagacttcatctctacaaaaattaaaaaattaagcaggcattggtcgtgcatgcctgcagtcctagctactcgggagactgaggtgggaggatcacttgagcccaggagtttaaggttacagtgagctatgattgcaccactgcacaccagcctgggcgacagagtagacctcatctctaaaattaaaaaaaaa

SEQ ID NO: 917423 - DNA, 4001 bp, Homo sapiens
tctctactaaaaatacaaaaattagccaggcgtggtggcgggcgcctgtaatcccagctactgaggaggctgaggcgtgagaatcgcttgaacctgggaggcagaggttgcagtgagctgagatcacgccactgcactccagcctgggtgacagagtgagattcaaaaaataaaaataaatggttaacacggcaaattttgttatataggcacacacatatatattttgagacagagtctcgctctgtcgcccaggctggagtacagtggcacaatctcagctcactgcaacttccacttcccaggttcaagcgatcctcctgcctcagtctcccaattagctgggattacaattctgcgccaccacacctggctaatttttgcatttttagtagagacagggtttcatcacgctggccagactggtctcgaactcctgacctcaagtgatccgccagcctcagcctcccaaagtgctgggattacaggcataagccaccgtgcctggcttgttatatatcttttcatcacaataaaaaatttattttaggctgggcgcagtagctcacaccttaatcccagcactttgggaggctgaggcaggcagatcacttgaggtcaagagttcgagaccagcctggtcaatacggtgaaaccccatctctactaaaaatacaaaaattagccaggcgtggtggtggacacctgtaatcccagctacttgggaggctgagtcagaagaatcaattgaatccaggaggtggaggttgcagtgagccgagatggcaccactgcactccagcctgggcaacagagcaagactctgtctcaaaaatatatagagagagtatatacacatatttttcaattacacaccttttacttatactaaaaagccattatggtgtcaatccaaggagttatgtgcagcgctaaagacaagcccacagtagtttgtagggaggtacacccaagagataaacattcaggaaccatcttcactaaacacatatcaaaagcttttccaataacccttagagaagaaataactcgggttttggtagtttatttttcacttttggtgctttggtacctaaggcttaatattatgtggaaatgctctttgagaataacaaataccactcgacagcatcactctcccttaccatgttgtcctagtgcaatttatttgactatgagtccctttagggcagatactacaacatatttatctacctatcacttttgtacctagcagccataacagtgacagcaatcttgggtctgtccattcttaaccgcccaaaagttgcaacattaatcacaaaagcgttacaatacgggcaaatctcctttcacctaacaacaaaaacttctaacttcctgaaagctgagtccgaaggccccaagtggagaaatgaaattgaaatcagggagaataactctacactggcaaaggcaattaactgttgttccaggttcccggcccgggtccctgaggccaccccgccctcctcaccaagtgtagatctgcaactcgctggacggtacatttccccgggagaactcgtccattcggtggtggcggccgttattggtggtgaagacccgtagcaacagtgggcatgtctgagggagagagaaaacggaagggcagaagttaaaaacaccagctgcgaacccggagctcatctctcttcccgaggcgttgcggcctccgagcctccccgagaccaaaaacaccatctcctccagcacacaggccgcgcctctgcaccctgcgggactcatccccaacctcttcccggaccccaaagcggagggggccttcaccttctcgcggtcgatcggtttctctggctccttcttaatttcctcctgggtaacgcgcgactccaccgccatcttcctcctacggcctgcgagacgctcgccctgacctccgacccctgcagcgagcatgagcactaagtctctcgcgaggagaagctcgacactttatagtcggccaggggctgggcggggcgtctcctggcgcaggcgcacttccgtgcgtggtgagcgagccggagcgcgcctgcgtgttgcgacttcgggaaaaggcgggtgctgacgtccgcggggaggaggtgcttagcgtccgtcgcctagcagttggttgccgggatgtttttttcccttaaatattcacaggcgacataagcttaaggtggcgttttcatgcgtaatgacgaaaaccttattggacacaaagcgttcctttattagcaaaatatagatctttctgatgaaagaacaggcccgcgataccagcccctgaggtaagccggaagaggggccgccagcgtacgtggtcatggagcgatccttccagccacacacagttcgggtggcttagagacctgaacgcgtacagcaaatccagaacttgtaggaaataacgttctagaatatcttcaggacttatgggtgggaatatatgatacaaaaacaactaacttgaagcaattgatttgactgggttacgacaaaaataatctgaccttcaaaatacataactccatgatgaacccaaaatgccaagtatatgactgaacttacaagtgataccatcttacgactgaagagtgggaaataaaatacatcataagagagaagccacacagtagaaatttgttacacatatgattgacaaaggcaattatccagaatatataggatctaaacagacaacccaatcgaaaaatggataaaattactgaacaggtgctttggcaatgacaaaatccagatagtcaacaaacatgtaaggtgcgcaagcgcattacgaatcggggaaatgcattaaaaccacgattagtttcaattgattggtttttaaaccacactcactagattggcaaaaattaagaactctggccgggcgtggtggtggctcacgcctgtaatcccagcattttgggaagccgaggcaggcagattatttgacctcctgactcccgacttgaggtcaggagtttgagacaagcctggccaacacaatgagaccccgtctccactaaaaataaaaaaaaaaaaaattagccaagagtggtggcaggcgcctgtgatcccagctactgggaaggcagaggcaggagaattgcttgaatccgggaggcggaggttacaggttacagtgagtggagatcgtgccactgcagtccagcaacctagatgacagagtgagactccgtctcaaaaaaaaaaaaaaaaaaaaatacggctggtcatggtggcccaccccagtaatcccagcactttgggaggtcaagacgggtggatcacttgagtcaagagttcgagaccagcctaaccaacatggtgaagccccgtctctactaaaaatacaaaattagccactcgtggtgtcacaagcctgtaatcccagctacttgggaggctgaggcaggagaatcacttgaacccgaaggcagagcctgcagtgagccaagatcacgccactgtactccagtctgggcaacaagggcaaaactccaaaactccgtcttaaaacaaacaaaaaatctaggaactctgacagtagcaggtgtttgtaggctactgcgaattctcatatactgctggtaagaatgtaaactggaacacctgctttagaaagtagtacttaccctagagaaaatcttgctcaagtgtatccagagacattacaagaatgttcttagctatattgttcatgagaacaaaaagctggaaacagcccaagtgtctatcaacagtaggacagttcagtgaattgtggtgtactagacagcaataaaactaccaatcaacaatgggatactataaagcaacacaaatttacaaactacagtcatatgaaacaatgtgaatctcacaaacatgatggtgaatataagaaaccaaagacaaaaatgtatttactgtatgaattcattttcaaaacattcaaaagcaggtaatactaaaagatattgttc

SEQ ID NO: 917424 - DNA, 4001 bp, Homo sapiens
cattcgaggcaagggtgttctgattgtacagaccacagctaacacacatacatcagatcccctccctgctgaggggctactggctcctgagatgaaaatctcataaatataataaacggcaacactgattccataagccacaagttggaaaacgtattctattatgtcttagtcataccatacacactataatatttccacatgtgctgggtaaccacagtctgtgatggagtgtggctcatttattgctactacatattttatgataaaaagcatttgaaaaaatattgagaaaattcagtaagacaaaagacaagcaatctggcatcgtgctctggttctgctactctgatcttcacaagttgcttaacatttatgctttgattttctcaactagaaaattcaggcattagactagatgggcctatgctccgtttcagttgaaatattctgtcaattagatctaagatttatacgacgctaacattccaataaaaattctggcctgttgttggcattctatgcatatcccgacatttaggatcatctgaatgttttactaaaatttttactgttgtcatttctcagttttctcaaattgatgtttccaatactttaaacactggagcaccacatatattaggaaggctttatctacgttataaactatggaagtgaaagacagttttaaatgtaatcacattttatgaaaaataaaattatccacacttgctacactttagttttctggttactataaacacttgaaagccaagttgtaaaattcttctgtaaacctttgggaaatgagcactggtgtgtctaaccccctctcagactgcaggtgaccttgtcagcaataggaagccatgagaactcaagtactacagatagagccaggtatgctgtgggggcacctctctggaggacacagagctgcaatttgcaagctgtgagtggcccctgcatttgaatcccacagctctgtatcataaatagaaatgatgagaaaaaacacaagtcagcttagctattaattataaaagaaagctctgttaaaagaactcttctagccttatcaaaagtctcccaaaactggtttttcaggactaggctatgaataaagtttgaaaattgcccccatatacattaatcactccttaggttagaatgcagaatataccatagagaagttggccagatgcccacagatccctgtgaggaaccatgtacccttattctgctcccacaccctgcctttactccttggtactttcaagtgagaaatggtgattttcttatttggggaagatagggtggagacaaaaacctcataaatataaacctctctctctctcatagctcagcaacttgcaatatttttagcagtagagaaaaaaataaatatgacttattaactataaagcaatatttgagttcactatttcactaaaagcatcatttatgaaaacagaaagatcctttaaaaaatgtttgtatagtcgcttgagaaaataaaccagcaggtgctggtcccttcacttaaagaatttattatcctttgtgtggcaggattcaccagctgacagctcccacccagaaaatcaaataggtgctcgtttctgtgatgcccataacgtgtaaaattgccaagaagttcaatgcaatgtgacctaaaagtacagcaaggaagagcagagctaacagccagctggaggctgtcaaaatttacaggaagaaaagacaaagataatacagtaagttctaattttaatcatttgtaaggaacacagagaaagctgtgcacatacagcagatgtatttctgtttgcaagtataattcaacttacctctattgagcagaaaatcaggactttttggctaaccagcctgtagtgattccctgggaggatctggctgaaagaaatgggaacctagagtttattcagtggagtctcaacctctacctgactgtattagtgaacagttcagaggtttcttgctcagcggctgagtcactcagggaggaggtgtgtggtatgcaacagggtgtcaccttgtacaaataccagttcaattaaagcattctcactcatatacctactgtctttgtttgaattctttgtttaacttatggccttatgcaaaaaaaaaaaaaacatatatatatatatgctcctgtgatcacccttttaactgatatcaacagtatgcacaaccatatcactgacaaggtggcataggacccaacctattttgtattctctttcaaaaaataaaattgaaaactcaagatagaaggaacccccatacacccatagtacctggaaggcaggggcacagacaagcatgcaaggagtatatggcttaaaggaatcttcaagacaaacaaattctcagaaacccaggaaccctaggattagaaaacacaaaagaagtctgttccacacattctacacctagactattttgtaaaactatcagagggaaaatacacctagcatgtaagaattctaatctctatcttatttatccatgtataaaaaaatgtgaaaaggggccaggcgtggtggctcacatctgtaatcccaggactttgggcggtggaagcaggcggatcacctgaggtcagcagttcaagatcagcctggccaacatggtaaaacctgatctctactaaaaatataaaaattagctgggcgtgatggcacacacctgtaaccccagctatattaaataactataacacaccatgataaagtcatatacagaaattttcaatgccaggcatcgcatagtggagagaaggaagaacctggaaggtgatgttgatgcagagttttaaagtctgagtggacaatgattagatggtcaagaagaagaagaaccattcatccactctggcaggaggaggcaggagaatcacttgaaccagggaagtggaggttacagtgagccaagatcacaccactgcactctagcctaggcaacagagtgagactgtctcagaaaaaaaaaaaaaatgtgaaaaggatggttgaaacttctttcaatgctgagggcagcagtagacccaacatcaaaggctgcttctggccagttgcagtggctttcacttgcactttgggaggccaaggtgggaggatcacttgagccaagaagttcgagacaaactgggcaacacagtaagagaagatctcatctctactaaaaataaaaaaatcagctgggtgtggtagtgcatgtctttggtcccagttactcaggaggctgaggcaaagagagtctcttgagcatgggaggaccaagccacagtgagctgtgatcacaccaccgcattccagtatgggtgacagagtgagaccctatctcaaaaaacaaaacaaacagacaaaaaaaacaaaaaaaacccaacaaaaaacaaaggctgcttccgctgggaggaaggagtaacactgaagagccattctaggcggggactcctgttacaggttttgaaacacaccttccctaagagccaaagaggctttaaagaagcttagcaaacattgttgagagaagccacgtcatcagaacttcctgggtgatcgtcattcatatgtcacaccagcaatgaaccaaatcccccctgaacaactgctcctgaaaactacaatgcagctgagtgacgcccactgaaatgactgtaacaagaagcagaaacccagactgaagagcaaggcaattgcagtatgtggtcattgtgactgggagaccacttcctgtatgttccctgatgttcccttattctgggctgaggaatttgaaaatctaaaatggaaaatgttctttcaaagtaaaacatatatacgtgtctactcagcttttttatggaattttatacatgcaaaatatttttaaaatatgctttaagtttctgtgatgcccaaaaatcttggtttgaatattaatattacaaatgataaagctgaaaaacaaagacgtgacttaactcaaaagat

SEQ ID NO: 917425 - DNA, 4001 bp, Homo sapiens
cattttctagttttcttgaagaacttgaggtggcagacactgagtctacagaacctaatagatacaacagccttagaaattagttcttgttttcttcttacttttgtaatcagataagctgtcaactgagatctgacaactgaactccggttttttagttcatgaaaaagagccacatgactagttatttttcactgtgtcagttagcaggtctgatcccttgagaaggaagaattgatctcttagggatataaaaccctgcatgccttaacatcaattataagttgcttctcaatgtcaacccgggcagccatttttttttcctcagtaaaaatagggaaaacataaatcaatgtgacaaaatggttccaatttgatggcatcttggcattttgctgcctaatcacaactgagtgatataattcctaaatgagagaattttaaggattacttaggtcttgtgtataaagctctgagtagagttgagttatgcttagacttgtgtataaagctctgagtagagttgagtttggtcctagagtttctctgccgtaatactgcttggttttgcaagaattctggtgtgatgattacagatctagctttttgcttagttaatcaaaccaatatagtttctttggctaaaaggaattgattcatcaaatctgcaagctttcccagccaaactccaggcttcagctggatttccacttaactgtacggggtaacagatcccaggcgcctttgctcatatacttggagaccaacttcgccaaactacccatgcgactcatgcctctgaatgtccaaagtcacaggcctcgcattttctgttgatgataatctgctttgctaaaagaaactcctgagtgtaaggcacaggttttacttaaaagtccagttgcaaagcttgaatttacagttctagggacaccgaatgcctgacaataaactggtctctaaagttataccatgagaatgagtctgaattcaccaagtggaaagaataggaatgctgcccttagactttagcctaggggctgagggaggtctcgctggaagagaggtaaaagagaaaaaagaggctggagggaatgtgggtccaaatctcactccccattttgagctctttccacacctccagtgaaaccgtcacaaaggggctggaaagaaaacttgatcctggtgcaagtctgttggggagggaagacaggtggagtccgggaggagatgacaagtggcctccatttagccattgattcattcattcattcaacaaacgttctagaacatactaggttccaggctctgtgtcatgcaacgttctagaacatactaggttccaggctctgtgtcatgcagttgacttaactggcccctaaggatgaggctttccgtctttctccgggacaaggcccagctgtctcccgggcagggggacagggggtgcgggtcggggaggagggctcctctgcgcctccctggtagcccaggtagccactcccagaggggccacgaccaaccagggccctctccgcccacgaggacgccaagcagaccgcgccgccctgaacccagctctcagcccccactctgcaggaccccgcagaaggggcgggccgggagccgggaggccggaccctgcgccgctacccgcccggccccgcccccaccttccgccccaccccgccgggctgcagggctctgcctggccggcgccgaccccgccttaccagggttttggctacgttccccctctgggtgatgtttttgctgtgcttctcgttagccatccggatccgctgtttggccaccatggcttgtgcgctctgaaatgctcccacctgcaaggattccccctgcgttagctcctgcgacagggccgagcgcgtcccgccgaggcccccgcggcccacccgggcgctgcaggtggcaaggcgtggccccgagccctgcgcaccccgctccccgagccccggctagccgactccagagagaggccgcagcccggacggaagtaatctctcatctcaggaaaccctttccgacttcctcgccatccttccggtccccgcagccacctaccccgcgcggccaccgaggcaggcgcgaccgcacgtcctcccgcgccgagcggccggagcgcagcgcgcagagccggggccctgcagtgtcgcggtcctgtagccgaatgctgcggggccgaaggttcgggcgaccacggcgtttgtgagcgcgtcggggacggggacgcggcccctcctgtgtttgtcggccggtgacccaccccagccccggggaagggatgagggcggccgcgcttcaggccgggccgcgcggtctcccctgcaccgccgccccctggacgagggctggacccaaggcggtggtcagggacctcagaacacaagtagaaccagtccaggcccgggcccgcgctgcccgggtatggtccaccaaacgagccttctctttaagggtctcgagaagggccccacgctgggggaccccactgcagaacttttcgtgagggctgcaaggagggccgcgttgtaaaataaagaggagacacgaagcggcatcccctgagggttggggatcgggccgtgaggatggagttgggacaggcctttttgctttggtagttgtaggggttgcattggaagatgggccagcggcagagcggagcatgcaggaaagaggaagaggccttggacctgcagcccaggtcggatttggtggttactgtctaaatctgaagctttggcctgccttgactccccacccacccagggcagcttggacctctctctagccacccttgtcccgaggggtctgagtgtctcccagactaaactgggcattttctgcagtggaaggataaaaatggaagcgtttacgcgcctcccagacactggtattagggctcaagagctctacagattgcctggggaggtaggggtggaaggggttcagttcctcacttggagttagctcttagaagctcagaagagtggaggcgaagaggggacattcagcctgggagatctggggcagcgggaagtggggataccgggtcggggtgaaggcaagcagcagcacccccagcatggggaagaaggcctgaggctgtctctggccactgcatctctaggccttctcttggagcgggaggtggctgggtttccagggaattttgtgtgagtaaaattttcccatgtcattggagagttaggaagagctcctcttttggggcctttttccaagcgggtccccctcaccccgctacaggcttcttgtcactcaggcttcaataaaggccattctgggggctgcttgctgtaacctagaagacagaattgcctaggatcattagtagagtcattttttttttttcctactctacaggccaattaatttgaaacaagcttctatggtcttttaactgttagcatcaccactgttgtaacaggaccataaacccagtctgccccactctagtcccatgtttttaataactgttggctcttttttaggggtttgggtggggggattcctacctcagtgatccctgctgagcctggctgttgtctgtggtccagaaggttcctttacctgactcactcctctcagatcatgtccaaataccaggagactgacccaggtcctcaccaggtgagtagaggtctggctctgagcgacattaaggaaaagacacagacagagactgttttctctttgggtcttcacattcagtgagtacagttcagaagtgttcttaactgagagaagccccttttggggaaaatttttctttactgttgactcctttttcctgctatgcttcacttttccggcattttaaattagtttgttttaattatgagtagactacatctacacagtaaatagtcaaacagaaataggatagaaaatgaaaagtaaaggtctctctttccttgccaccctccccaaaaagttcccacggttcctgggttgcc

SEQ ID NO: 917426 - DNA, 4001 bp, Homo sapiens
gggtccccagccaaacgaggctgcagaggacaatagtaggcagacatcacttgtccacaatatgttcactaccgaagctgctcctgagaatccacaattgcaaaagactgactcagaatcttgatctcatgaatcagcctaacttaagtgcttgcatttgagtgtagtaagaaaaaaatggataaaaacatacttataatcagattttactctatcgaggaaggtcacatgtatttctgagatcacattcctaggaatgttgactgtctgcagagaagaattgaaacacttcccttgtccatagtgtggtgtgacctgaggaatggtcacagaactctcctctccatctttccaccctctctgggccaggggacccacattcttttagtcagaaacattaaaatagtagagtaagttggcttgaagtgaatttttgtgtgaaatcttttctctgccctagcctagtttgtccatgcacatttgcacacaggaagaacatttttagacctgccagaatatgcaatgacagggtaaaaaatgccggaggttgactgtgttcatagacattgtgctaaacactcaacactcctgatcacactgaatgcttttgacagtcctgtgaattgagggctattattatccccattttatatatgagcgagcagaggcccagacagattaacaaaggtgctcagtgtcacccaggtataggtggtggggctttactgccctgctcacccacagggtgaagaatgggtaggccgggatgaccctgcctaggacagcttcattccactttgaatgaacgtgaggccgcagagctcatagcctcttttttttttttttttttttttgttctgtctttgctgaattcctagatcctagtctaggaagaaaaatgttaatgtgtgtgagtatctgttttagctggagttggtagattggttctgaggccaggcattgagctgaggcactgagcgtaagcagaggggaagctgacctggcattcgaaagactcatgctgctgccggcaaagccgctctaaaatacataatccatagaaataagctggcagatctggcactggctagaagtcacagatttataaaagcaggttggtcaaaagcatgggctcttaaaccaggcagcctgggcttgagtcccaactctgtcacttattggctctgtgaacttgagcaagttgcttcaactctccatgcctatttgctcatctctgaaattgggatgataataaaattatcatcctcaacagagctgttgtgacaattaattcaattaatgtttgtaagtgcctccagcactgcctggcacctaggaaggcactatgctagggtgtgtcaaatgaaactgaaacattgccatgaaacctattaggttagaagggaaccttaaaattcaagggtcaccaccatcccaaagtctgaatgccttctgtcacagacctgtccagtgatcactcttccccatgtgcacaccatagggagctgagctccctatctcccaggtagcctgagcagcagggtgagctggagagagtgagtgtgagtatgagcagcagggtaagctggagagagtgagtgtgagtgtgagcaggagggtgagctggagagagtgtgagtgtgaacaggagggtaagtgagtgtgcacgtgggcaggcctcttaccatggacagtgtaccccagggcatctgccagctgctgaccagtgctcccttctgctccaaactgcaggatctccagggggagggacacaccagcaggagagatgacaaagttcgtctcatttctacacgcggccacactctggtagaggtgaagtgcaaactcagtcttcagcaatgtcattccttcacggaggtggccatttgctcggaggcagcaagagtgaaagaggaagagggtgatcaggaaaggcggcatggaggctgggagggttcctgcaattcagagggaagagatgcagggtaggctggaagctggtgatgaaagagggccatgtcccacagaggactgggacccccagctctgtttttaggggctagggacggctgagggagagatgcattgagctgtcttggttacctaccctgaggcccagccgtctgggctgcagagctgcaccctcttgtttcagcattagaaatactcactgtggtcctttggcagccaaactgtgggtctgaagatctgcttcggccacttactggatgtgtgactttagcaaagccctggtcagatcagaagcaaagcattatgttgggaaaagaaatgtaagaggtaatcctactcattgttcttggtatatagtcagcttatagctgtgctgtgtctatcaggaataataataaataattatctactatgttaaaaaggactttgtacatttgcagttaatcatcccaacaatctcactagtatctgttattatatttcatctataaagaggatgattgaacctttgaggcccagtgactcatttgtatggggaaagaaacagtgctgtgactcaaatcctggtcttctatgagtggtatataaaattttgagaatacctatgtgaattaaaatattgatacatgaactaattgtacctcgaatatcagaattcttgtgatgcaaattagtctctaaaaaagaatattttcacaaagatagttcctaccccagaaatgtactcttccaaggaagagagatcattaactagaaaataatgcaagaagagaaaggcaaagtaaaaaaatgttttcaacgaccatgccacacatccagccagcagcagtttttgttaagttgtctgactgtggtatcataccaaactgatgtaagaagaggtccagagtcacttcctggactcaccagtgagcagctcaccctgctactcacgctcacactcactctctccaactcaccctcctgtagaagtttacaagcaaggccactgagcacgatggtgcctattttaggtaaaggtccaagatagaaaacatcttctcttttttccaacccttcctccctacagccaagtacaaatgcagtgcttggatgaccttggtacatagggctctctctctctctctttctttctatgtgtgtgtgtgtgtgtcccagcccagggtcatttgcaaaactcttaagccccagggttctcacagctcttataacctcccatctcccacaagaacactctcagcaatcagaccttgatgcccctgggctccccatgaacaaatccctgtcatggctcacctcgaatgagccacgtactcacagacttttgtatcactgttgcacgtttccttgctcgactctgttcttgtgggtctccagcattcatgtgctccccttttaaaaaagtggagcagaatctgctttgaatcacaagacagcacagagaggaagctggcgattgccgtctctgccggcgatgtctctaccactcggtccaaattcctggagcctggaggtcctgcagagagccaggagaagcagcccagcccagggcagcaaagcccagatcgggaacagagcagggccgtggggggagagccagccacacccgtcaagccttcttaggcttgtgacctggttgtaccagcaaggaacccctcatccagccctttgtcacattgaggaattccactgataactttgcttgttgggcttttgctgggtaccaggtacctaatgcttcccccctcctcctgtgaagaaaacaataaatcagtcattgggcatgacttaaaactttcagcaaatgaaaagaaattctgcaaaagagaaaacaacgcaagatatggcacgatcagttcggagcagggtgacttgcctcatttattatttatcaaagtgaatgcactaatttatatatgtaacttgagttattaataatctggttcttctcagatacaacagttcgtaagtccaatgactaatttgagaaagagaccatgttgtcaacgagtagacacatatttttgaaa

SEQ ID NO: 917427 - DNA, 4001 bp, Homo sapiens
caaaaataataagcccctcaaagccaaaacacaaaaatggaatatcccacccacgtgctggatctcaatatttccagattacttctgaggttggcagaggcttcggcggccctacgatgtccagcatttaaaggtgactagggcatgggctgagggaggctctgagaccaggcagcctcactcacaagccctccaaaaggcaatttgctttacagatcaactaaaaacggtgttctgagtgtggtggtggcgggggaaaagacactactctacttagtaaaatgaagagaatttagttacaaaaaagatatttaagaacctctatgggcatgatcacaaataagctgagacacccagactagttgtataattcagcaaattaaatattgtttttttcagagggtgcatggggctccgcaagactgcattaagagacaaaccctttaagaaaagactgtcacttgtgcctcttttcctgttgacaggctgttgtctgaacaatgaatcctggaagcacctaggagaaggcacctaggagaaacgtcttagggagtagtcccgcgggtccgccccaggacagtaacgctgtcagtttccccgccctttgcacctgtagtgcagacggtaccaaatgcgatggctttgagacgtcctctagacatcggagcccatcatttaccacaaagaacactgaagtacttactttagcagaacattttccgaagaaaaattaacagggagaggaaatgaaggacactaacaaacagaccccatctctagagtctgagatcaaacccaagtccgatggagcccgggcatctggtggaggaaagcgggcaggcatagccccaatcctggtcctcaacaagatatttctgtgaatgaatccctctgctccctggaggagggcacattacatatccctttcctaaatcagaactgaagcaatttgcccatcattcgcacacctcgacagggaaaggcaggattccagtgtctcatcagacccgggaagaggggaagggtcgctggcgcagttacctactgggtttccgggagctagggaaaacgcccctgggaaacgcaagtgttcagcgccacataaaacttccccggatttagggccaccctaagacgggcgaaaagactctccagcgccttagcaggtgcaaagccagctgtcagtgtgcgcatggcgagtccccgttcccgagaagggacgcaaatgaccctagaaaatcagacaggagcaaaacaaacccaagaatgaccctccacacaccacaaaggcaaaagcaaacagaaggcacctagacacactctgcaaagtgtagaactgtctacacttgcatggaggaatccaccttgcagagcgagggtagaccttcccggttcccagtgtctgggaccgaggcaggtcaacacggggccaaggacattgcactcagggcccctcgcggctcctcctgcagcccgtggagtcaccccaagactcggagagccgggctgcgattgcttctcgggacagtaaggacacctcaaaagggatagatttgggggtgtttctcagaaaggagccacatctccgggagcccagatctcgggggagagtctgggaggcggctcgcctccaggacccgaggccgccccaggcaaggagtggggcgctctccgcgtagggcaagttcacccccagagctcgggaccctgcaagtttccctcactgacctgcaggtcaggacacgcgacttccccggcaggtctcctgcgctagcggtggggcggtgctccggtctggacgatacgcgcccgcgaagccgtcctcgggaatgttgggcgcagcggcgcggcgcgcagtctgggcgcacggcggacagcaggcgcagcgggagtggatccgggctgccggccccgcacagcccgcgcgtcgtccctccgcccctcctggccgcacaaccaatggccgcgagcgggtcccactcctcaccgccccctagtctcggctctagcgggcgcttggctctaggacggcgcccagctcgggcgagggaggagcttgcgccaccattggaaaatctcggaggacgaggaggcgttgcgcagggagcccatctggggaaggcaggtgtagtgggtgaacttttttgtgtgtcggggggaggaggggggagtggggaggagggcagtttttttagggctcaggggcctttctctgcagatgaaagcatccacttcttgccaactttctcctcctcttacatcttttatgagttcctcgcagcccccacccaaaacaactactctgggtgcatcatcgcaagcccagctctgactgagttgcgtggggcatggcctcatcctgtgatgagcttaaccacagacagcccttgctcagccttcgccgcgtgcgcctctgaatcctataccaaatcattaaatgagtcgaataggattggagtttctgtcattgccagggagacagtcagtcatgagtccctactagggaactggcgtagagagtcatatatcgtaacagaactccggaaaaggaggctttaactgatccgaccaacttcagttaccagtcagtgctgctaccttgaccagaagactctctctctgtattcctgtttttcagctggaaaatgagagacttcgatcacttggtggctgcggtctgtttcactctgacattcaacaatattgttgctctgtggcctgtaaagggctgaactcctgggaagtgttggtgtggctacctgttccttgagcccctactccatctggttctgctgtcttcaccgtgagacctattagtggccagaaaagcaaatcatgcacaatacagaatcaggccacccaagtctcagtgaccaccaacacatgcacgtatactgccacccaccagggcccggctcctaggagcctgctacttccacccatgttcaattgttctccacgtagagataggcaggggcacctggcttaactctgaagctccgtggtacataagtaaaggctctctgtctctccccttccttctctagggcaattgtgggtgggtgtgaatctctcttatgtggatccttctgtgcctgatgtaaaatgcaggaggatggaatgagctgtgttgtcaagagggcagattcagagaaccacttccctccgggcacacttggattggcttcctgaatttcacctgttcatgtgccattctcatgagttaccttacatccatctacagtctgctccattatgcacttagtaaattttaccttagatttttacttggcttcatcgtaagcaataatatctatgaaattattggtttgtgagataccagttgtatttaatattttaatgcacaatgaaatgaaggcataagtcttccatgctaaaatcattctgaatatcactggttgttctcacaactcactttttgaaacactaaggtgtatgggggggcagttagaactgttgaccttcaaaacagtggtcctcaaaatttctttgtgcataagattcctaggccccaaccctattgtctggttcattcatactctacatgtttgtttgtttgttttgtctctccccttccttctccagggcaattgtgggtgggtgtgaatcttttctatgtggatccttctgtgcctgatgtgatccttctgtgaggagtcttgctctgtcgcccaggctggagtgcagtggtatgatctcggctcactgtaatctccacctccctggttcaagcaattatcctgcttcagcctcccaagtagttgggattacaggtgcccaccatcacgcccagctaatttttgtatttttagtagaaacggggtttctcaatattggccaggctggtcttgaactcctgacctaaggtgattggcatgccttggcctcccaaaatgctgggattataggcatgagccaccgtgcccggctcatactctacatgattctaatacagtttgtctattgagaaaccctgccaa

SEQ ID NO: 917428 - DNA, 4001 bp, Homo sapiens
gctaaggcgggtggatcacttgaggtcaggagttcgagaccagcctggccaatatggtgaaacccccatctctactaaaaatacaaaaattagctgggcgtggcggcacacacctgtaatcctagctactcaggaggctgaggcaagagaattgcttgaacccaggaggcagaggttgcagtgagccaagattgcgctgctgcacatgaacctgggcaacagagtgagacgccatcttaaaaaaaaaaagaaaaaaaagagccaactgaaagagctcccaatagccaaacccgggacaatttgaaaaacaaaataaataaagtagtactggcttgtaactcaaaaagtataaaataaatagccatgagtccatgctgatataaatgattaactgaataaataaacagggaagaagagagagagataaatctcccctgcagaaatattccaaatataattaacgtagatattccacatttaaggagggggagcataaatccccactccttaactgtgggctacctatagtgatttatttccgaagagtatagcagggaatgggagaaaaagagtaactttacagtggagaaatttgataccaccacctacattagccagctcaagctctgttgatcaagttcaatatcaactctgagaaatcatgctgacagcatgtacccttgatatgatgtgatgaaaatgacattttacctctgagatcacactccccaaaacccatcgctccagtcaaattatggaaaaacatcagacaataattccaacagaggggcatcttacaaaatatttggatacaaaatcccaaaaaaataaaaaacaagaaaagtctcagaaactatcacagctaggaggagcctaagcagacatgacaagtaaatggaatgtggtgtcctggatgggatcttggaatggaaaaagacatcaggtaaaaactaacgtgaatatactatggacttcagttaataataatgtgccaatattggttcattaattgtaacaaatgtagcatccaaatgtaaaatgttaatcatagataaagctaagtaccaggtttactggaactctgcaatcctctcaatttttctgtaacactaaaagtattttggccaggtgcagtggctcacctattttggccaggtgcaagtgctgtaatcctagcactttgggaggccaaggtggacagatcatgaggtcaggagtttgagaccagcctgaccaacatggtgaaaccccatctctactaaaaatacaaaaaattagctgggcatggtggcacatgcctgtaatcccagctactcaggaggctgtggcaggagaatcgcttgatcccaggaggcagaggttgcagtgagccaagattgtgctactgcactacagcctgggcgacagagactccatcaccaaaaaaaaagaaaaaaaaaaaagtttacaaaaaagtcaattttttcacaactaatgataaagacagtcaaaattggtggctatacaagaataaacccttaattccctctaattcagaaaagttcctcgcaatgcaaaaccttgacaattccacatcagcttacattgtctatatacttttatacttttagatataaagtgtaacagtgtgttcttcaacctaccatttttttctcccatcttttgatgtcgcttataaatataaaatgcttcaaaattaggtttatcaaatcactttgattgcagaatatcactggaatccaactgtggtctctataaaatttgcagtcctcagacaaaatacatcattataccattctaaacctggtatcctttgatacttgaattttcaaatagaaattgtggctgaagaaactttcagaaatgagtgacagtccaaccaaaagacaagtccatgaatcttctcacgtaaatatttgtagtggtatcagatcattaacattatctttttaaaaataaaaaccaactccatcttttggtccacaaatggatgaaacattctgtaaggaaaacaataaagaatagtgcatatttgtaaaggaccacatatatatatatatatatatatatatatgtatatataaggaaataagatattgttataacagcttgatcttttaaaacagcatgaaccattacaaaaaaacattatgttatctggaaaaaatatgtaaagtatcaaaattagaaataatagagaaggcccacccaatcctatcacccatatttaatatatttgtatttatattactatctccattttataagtcttttataaaccttttaaaaaggggataatactaactatctcacaggttgttctgaggacaagacttaattacatataatgtgcctgacatacgaaagattcaaggaatactaccaattattgttattctttcagaatgtagttttaaaacaaaaatttggattgtagtatatttaattttttataatctttcattaaaaacatttcctgcattttcctccatcactaatatttttgtataatacaactggctgtataacatactttggtcaataacgcatacattatagtacattaaatattttaataattaaattttaataaaaatattaattaataatataaacctctatattcgatatttagattgttttcctttatagattaatttttagtataataaataatgctaaaataaatatactttatacatatctctggcaatttccctaggataacatatctggaggtagaataataggtcaaaaatagatcaacaattttaattctcaagatgttagtcaagatactgtaaattcttctgccacttccacaccaaaccatggaaatgttaggagatttaaaatatatatatatagccatgctgaaaacaaaaagggaactctctaagggccaagtcagtaaggcccttctggggaaaggaaacagatgggaagctatagagatgatggcaaccacaatcacaacagcaaaacgatgggcaggaatcctctcagaggagattaatgcacaactgagagtcctcaaatatctgaagaaggctacactatgaaagagactgagctaaagaaggaaatctcatccatgaaataacacacaattttgaaaaaaagccagttagctatcttggatataaaaacagttgttgaaataaactcaatagatgactgaatgacagaacagactaacatgaagagccagttagtaagctggaagactgagttgagtaattcaccaagaacacagagcaaggaaacaagaggaggcaaaaaattgagaaaatggagaggaggcaataatgagcaagaatttctcagaactggaaaacacataagcaaactgaatccactgagtaccaaccaggataaaattcttaacacacatcgctagacaaaccgtgactaacttcagaatatcaaaaacacaaagtcttagatgtttccagaaaaatgtagattatctaaaaggaaggtgtattagactagtaatgagatttctcatcagaaatgtcagatgcaaaatgttaaagcaaagtcagtatgaacccagaactctatatccagccaagctatctttccatactaaagatgaaaaaaagacatttgcagacattcaaagagtcactcagagactgtgaaagaaataagtatctgatgatgaaaaatgaacctataagaaagcactgaggtatacgtagcaatagtgagcaaataaatgagtaaaacacattaatgttaaatgtaaactgaatttaataacaaatgaaagaaaaattcttaaagatatcatgagagattatgttcttttctggaggagagatggaagggattgtttcaagatgagagaaagcaaagtagaagcatgctaacttcttctttacaggggccttatcaaaactgactaaatgtacactttgttaagaaaacataaatttaagaactgtgaaatgtaaagttaatcaacttaaaaaaaaatgaacaaagaaaacttg

SEQ ID NO: 917429 - DNA, 4001 bp, Homo sapiens
acgcaagaaaaaactcaaggtcaaaatctggattgtgctctttatctacaaggtaccaattctgtaaaagaatgtaaaagtgtacttaatttttaaaaattaagtatatataaatgttcaaaaaggaattcattttaaagctttttatagcatattgtcaaactctcttccagaaaggttctaccaatttatacttccacctaagcacactcagtaatagttttatttttttttagacatgaggtctatgttgcccaggttggtcttgaactctgggctcaagtgatctgccaaagtgctgggattatagatgtgagccacccaccgcgcacggccatagattttttttttttttttgagacggagtctcgctctgtcaccagtgcagtgagaagggtgcagtggcgtgatctcggctcactgcagcctctgcctcccgggttcaagcgattctcctgcctcagcctcccgagaagctgggattacaggggcccgccaccacacgcccggctaatttttgtgtttttagtggagacggggtttcaccacgttggccaggctggtcttgaactcctgacctcaggtgatccgcccgcctcagcctcccaaagtgtggggattacaggtgtgagccaccgcgcccggcccatagctttgtttttaagcagctctcaccagcgttcacacctgaaaatttgaaaactgaacgtgcacaagtaaaacatgtttcctggagaaaatctgcaaaatacaataaagcataaaggagaaaatttaaacaccatcccatcatccagagacaactggtgttaatatttcagagagtaaatgggcttaaaaaacttttttccccttctcactttttcattttggtagaaaaataattaagccagtctgctttgcttcaatgtatggttccttttcgtttctaaaacaggctttaaaaacacgtttaccatttcctctcggctccttacgttttaattgtaacgacagaaccacgggttaagtcacgcttaagaaccacgggttagtcacgcttctaactacttcacgtgttcttatttaatccccctaacagtcatgtgggttaaattagcagctcgtttgctgatgaggaagctaaggaatgccataccgtaagtggcagacacgaaataaggaaccaggcagcatggtttcagagcctatgctttggttactccatttgacctcttcaaatttactcctctccttggcctcatgtgttagtatttacagagctcactgcaggtttccacatgccaaagagcacagttaattacatatctttccttacttaattacttattgggctgtggctgatagcgagtcagaagtgttactatctaatctgaactccatgatcttggatgaatgactgaacttgctgtatttaagggctcgtgtaatcttacctgtgaaatgggctagtggtttaaccttcaagttctgcttctgggttttatactgctgtccatttcctgccgcccctttgacaacctcaggttcccagcagcttaggaatcacctctcattaaggctgcaccctgagacagacaggctgaaatggaggttggaaactcagtgcgcccgcggccccttctgcagccaggactgcacttgggtgccaggagaagggaggctgcaagggctggggtccagcccctgctcgggcggccgagggctccgcggcgttttcagctcctccaacctcccggctagaggaactgtcgggggccagccacggcggtgccttggtttcacctggctccgctgcgttttctacgccgcccgcctgacctgaggagtgagctccgccagctccgttggcaaggctgggttcctccgcgggtggggctctcctccgacgccaagccgcccaaacctcccgagcgcaggtgccctctggccgggaagtacttcaccatttactagccttcatctcaaccacaacagtcccgccctgcctctaccggggatgagggaaggcgtaacctccgccggggaccaggccgacctacctaaaccgatcactacatgggaggagtcggacgccggccgtcccaccacccagccaggagcccattgattggtcgcactccccactggttcacgcctcagagactcggcgcacttaccgctggcaccgcagtggcgcccgagcgcgccgcctcccgattgactgctagcgctctcggcttgtctcgcgcactgtagctgagccaatggagttactcgtagtcgagaggccggcatcactggagtggtggcgcagctgtttcctccggtaggtgtgaggctgccatcttgtgtgtggctgggactgggcttcttgggggttgaaaacatacatagcgcctggccgtagtggaggggtccggagagaacaatggggtaaaggagaggcctaagggaggagacccagcgccttcctacttgcggaaaggatgggtttcctgggcctgagtctcatccctggctagagagagcgaggaatggtggtggtggtggtggtgatggttgtggtggtggtaatagtagggatcccaggttttggtttgttgatcattgtgggggctgggcggggcctttgatgccttaacattggttcctgggagctcttttagtaatttttgtctcgcaaagattctgaccatcaaccccctttgacaaaggaggctagctgatgaactgcctgattgagaaaggagcaaagctagtagtggaaggggagtgcctctctactatcctcaggttcagaagagacctcctcttccgtccttttcgagggagcggctgctaaacagtttgctcttcgcgggggttactttactaaggccatcctttggtaatagtgggcgtcaagttctgcgtttgggcaaaattgtacattagcgggcagccaagcattcctgcagctgtcttttttttttctttattttaagctagaaagtggtggtcttgcagaaacggggcgtgaaggaagaattttgtcaaatcttgatttccccgataacgatatgttgaagattataaatctctgggtctgccatgacatgcttggtcacttcatggagcaggaggaggctttgttagggaaagcaccttaatttctgagctctttttggggtaggaggaagaagacaggacttaaccttgtttccctcctccttttttttttttttttttagcattgttgtggatggcattgcattgtctttcatttgaggggaaaatgtattggatctgaagaccaagctgatgaaaggctaatattttgtggtagattttagcagtttgacttgcatgaaaagaaagccgatgtattattgccttcagcttagatttcagttattcaagattaactgatgaacaacctaatcaacaatacatgataaagacatctcgcatcaggaataccaaaaaacaaaacaaacagcaaaataattgatgttttttttttttttttttttttttttttttttgagatggagtctcttgtcgcctatgctggagtgcaatggtgcaatctcggctcactgcaactctgcctccgtggttcaagcgattctcctgcctcagcctcctgagtagctgggactacagacaccggccatcacgcccagctaatttttgtatttttagtagagatggggtttcaccatgttggccaggctggtcttgaactcctgactttagatgatctgcccgcctccacctcccaaagtgctgggattacaggtgtgagccacggcacctggcctgagaatcatttttcttaattacttgattccatgcttgtatcttccacttgacttgtatcttccagttggcttgtcaaaatgcatggagaaacaaaagttcatataccttttgaccttttctaagaaacttgtaaggaaatagagatagaatcaaagctttataatcacagtgtaattttgttcttgtgaaaaattggaaataacaaatatctaatg

SEQ ID NO: 917430 - DNA, 4001 bp, Homo sapiens
tccattctccatgtcaactgcagtgatccttccaaagcacccatgtgactgggctgctctccttttctagaggttcaaaggtctcactggtgcttaggatgaagcacaaacgcctttgggcacagcaagccctcctgtccccattcctcagtggtcctacccaccagtcatactgaagtcgagcaggcagtgagattttcacaggttctgagaaaagtcttgagacctttaccattcacaaattactaaatactcctgtaccagtgttcccataaaactatctacagcataacatataaaattaaaaatgaagctggaatccaaaatggccaaagtagcaagtgatggatcctgcaatcctcatgagaacgtcgtagaactatctggccctgcagtaggtctggagaagaataaagccagacaggtgctatagaggctgagagaaggggagggagggagggagagacaggaaggtgtcatgaaggtcaaggtgggttctgaaggagcaggagagtagcagagtcatcctcaggacgctgtagtttctcccctcccactgggaaaccacagccctggtgcctcaagctgagaagacacaagcgctgtgatgagccacagattagggagtggagggagatcctcaggccctataagttatgcaaaactgaacacattgggaacccactataatttacaactatcatttaatttttaatgcaatttaataacaacttagtttaatgactagcaagtacattttttaaaggacaatatggaacaatttcattttccgcattttaactgcaagcttagctgatatcttttggacacctgaatttgttagtctttggaatgctatatctaactacattgaaatgctacttttcatttgtctttgaaagacaatctgaaatgaatcctagaacctataaaacgaaccccaacttgtagcattactttttaaattccacaaaggtgcctttttgtacctacaaaatgtttgcaagaaaataagcaaaaaacaaacggtgtattccgtagttcgtttttgtactggtctgctggcaaatctttcagtcagctgagttatatttttccgtattatttttttctaatccttcctttaaaaaaattgtgtttgctagttgtcatgtattaatttagaaaacgcaaagaaagaactcataacttcagtaagctgaagcattagcacatgtgtacttttaccccacttatgtttattttttcatacatattttgagcagtattttatattttccagatttagggaaagaaacattcttcccttttcactccaaaaatagtgaaggagtcaggttgctattttgctcttgttttgtttatttccaacttataaaaccactggacttttgttgtcattcattttagtttatttcttagtgtctataacaaaactatcaagaaaatctaaagcaaatgtaattctaccactaaagtttaagagcagaattagaagtaggtgatcttaaagataatactttgtttaaattaactacaggatccaattcaatgcccaataatacagaaatgctacctttggcattctacaaattaaaaatgttagaaatataggattatgctaaaaatatgtagcatatttgtagtcagaataacttagttgaaatgagaatttcattgatacttgatatgtcattatgttgtgatacaccaatttattcaacattattttaaatttattattatgccaccaaagaagaaagaatattaagaaacctcttaagcgtttggtttttaggtagtactttgtactgatataaaatctaagttaaaactgagcacttaccttagatattaagaaaagcacactggcgaatgaactacagctggcccgagctctaccacagacagaatgtttcaaacttttctatgacttacagaatgagagcaaaggatgaagcttcagcaactgtccctggagaaagggctctcacgagtttcgccctgtctcatgtttcatcccctcacattagcaacagacgtgtctaattttactcagtgacataaacagttcataccacacttaaaattttttgggcaccaattccaggacacagctcttcgcatgccaaaaacaaaccaaaacaaacaaacaaacaagaaaccaaactcttcttcttacaaaaccaactttccaacatttaaaccctaaagcatgatagtttaatgtaattataactttcttaaaaaaactttacctcaaacaaacagcagaaaacttctaagactggtttccattagaaactaatgttgataaaattttacgaaaaatctcttcaaattaacatgcaagttagaacttgtgactattacctatatactagtctcatccaaatgaacggcatattaccatgtaacagtgactctttaaaaatcactttccctaagcctctttaagtgaaaaacttttaacatctgaggagaaaatcttaaacaaagatcaccataatagaaggtaaacaaactctgcatgttaaaattatgacagttcttttctagtaaactaacatttctattgtgtttaacaaattatgtgaatgtaacaaatgtgaccttaaattgtctttatgtttatttaagagtaattaggtcattccattttataaggtgtaaagacaacagaataaatatcgaacttctgaataattttaatattttattttgcattatttttatgtgacctggtttgcagcaggattaaaacttactaaattatatacttcatatttgcattttagtactaaaccttgaatataagaagcagtgccttagtatacatgcacacagagatgggaacaatcagatactggggcctgcttgaggaaggagggagggagaaaggtggggttcggaaaactgtctatcgggtactgggcttactacctgggcgatgaaattatttgtacatcaaatcctggtgatatgcaatttatctgtgtaacaaacctgcacatgtacccctcgaacctgaaataaaaaatgaagaaaaaaaggagcaatgcaataacaatgcatatgcttcattctcattttattttcttctcaggagacttttctcttcattctgcttatttatactctaccataatttcttttgaaatttgatacttctatcataccagcagctgcaggccttaaattacaagctgatacagcttcaaataatcttacatttgtaagacattttaaaacctttcatgaattctctgcacattagtacttctactttgggaattcagctagacataaaattataggacaactatcaattttaaacaaaaataatatattaaacaataatgatatgaaatgtatttttgtatgagtgtatgtctgaaaagtcaaagtctgaaactgctaactcaatattctgattgaaatgtcatgcatgtaaaggttacaattgagatacctcttcatcaatcgtaaattggttttgttgcaatgaacttttcagtgttttgggaactgctttgtaaaaatgttagtcaggtgatgtgtttgatccccactcatatttacagattcatttaatactatccacacctatgtttagtagggcagaagaatcacataaagaagcctttgattttatcagttagttgaaattattaaagcaagaccttcagtttgtaatgtaggcagcttaagtttgtaactcacacacacacattttgaaatgttctcaaaggaatcataatactttaaagctccaagagaccttaaagaaatctagtctaacagtcatttaggtgtaaaataatttgttccagattacaaagctagtaagcctatgggtagaagtgactttgaaagtccttaggcctaatttggtgcttgggtgctccactgtaaacgtgctccaaccatggtcctacgaacctatggggacctttctggcttccccctcattctccctctgcttccatttttgactactg

SEQ ID NO: 917431 - DNA, 4001 bp, Homo sapiens
atgttatcaaaaaataaattaatagtagtaaagcaggaaaaaaaatgtaccccaatcatagcagaaactagctgaaaccagcctcagtccacataatgagttttggggagaaataagtgttctctttccaggatttttaattggaaatgtaaataactacacagggataaggaatgtaacgctactataagccccccggcaggcttaattaggcatgttgcccttcactgcagaagaaaagtgaaagaaatacaatttttaggaaaaaaacgtttaaaagtagcatgaagaaggcatccatgcacaacacagggcgtcatgagaagtctcgtcctgagaagtcccgactaatccaaagccatcccaactttttggagaccattaatgagcccaatctagcagacatctcactgtagcagttcggggtctggctcccttctctgggctttcttccatggccacacagtctgcgagactgagcttgcgttttaagactgcgctggttctggaattacgctctcttcagattcaagacagcagaacaataggagtagcatgctaataaaatgcttgactgcgaaagggaacggcactgaaaagagctgtctctcacgaggtcctgggaggcagctctataaacacaaactacgctgtgccaaagctcaagcagcccgaacccaggctcaggatgctagcgaaaagcctcccaggtaaacacaacgggcccacaaagaggaggagccgccccctcggggacacgtttgccattttacctctacacctcccctcccccgaaataaataacacacacacacacacacacacacacacacacacacacggagtgactggtgtagacaccccagggaggcattccggaaggtttctgaagagtgaagtgcaacctaccaaattctttcacgggtttactttccaactctggctttggcaatttgaaagaaaaaaaaaatcaaagccacaaagagcaaggctgggcactgctccgatgttacacctactaagtctgacgtggtaaggaaaacagtccagaagccccacaggcgggccgctgcaggggagaggggccgccgcgtggagaagatgggaatccgcggcgtctggcacggggcagcagccccgggaaagccctgaggagctgccttcctttcggggagccttcaggggagcaccgctgccaggccctcacgggtgggggcgcaccctcgccgtctccttgggtacccctaagacatgaagccctatggagacaggagacgccagaggggcccggaggaccctggtcagaaggaatatgggggctgtctgtggcccacactgccttaggagtgtgattttgttcggaaaattaactctaagccaccctttggctgacagatggagaaactgaggcccgtgagggtgaattagggacccacaccgaccaaataataagccagaaggcagactccgcctcctggtcctaggccctttcctgaatttccccccttcaaactcccaggtccctgacgtccaggcaacgccaaccgtcctccctttcgcgctgggcgcaggccgccctacctgccgagccgtcggggccgtctttgtccgcccggccaggctcgccagcgccctgctggcggtcattgtcgcagccgccctggtccaggcgcgcctcggcgctggagcagcagtagcgcaacgcgcagctgccgcagcagatggtggcgtcgccgccgtcgaagcgctcgggacactggaagccgatgcgccagacgccctgcgcgtccagccagccgtggcagtactcgccgctggccctcgcccccgccgccagcagcgcagccagcagcagctgcaggagcgaagcggcgttccaggatgaggagacggacgagcggcgagcgccccacatggcaccaccctgggcgcggacagcgcgtctccagagagcgcaggacggtctccgagaagtcgtggccccggcgacccccgggcctcgtcactgactgtcccgcggcgctttccgcgcgggccactcccctctgccgcgacgcccaggaggcgacgacgccgggccctaggtccaggagctcctaagccatccccgtcctcagccggtggcccggtccccttagggactgccttatgagttgcactcgctgatggaaatctcgggatgcagtcagaaggcccccggggctgtcgtccggaagcctctggaggtttcactggcaaccggaccctccctgagcatccccgaagggatgctcactcgagccgaatgaccgctgggcgcgccgccgcggacctggagccagggctctgcgcagggtttaagcctcagggtcccgcgcgcgaatcagggcccgtctcccctcctttattccctcctcgggcgggtagaaggggcgaaggcgggcagtgcacgcaaggctctgggcagcaagtgacgcagccggccgcgctcagcctcctctgccccgaacttggtccgcatggctccggccgggccgcccgggcagcccacgggggtgcagccccgacgctccactcggcggggccgacggccaatcttcccagcacgtcgccgagggagcgctcctgaccccgggaacgtccaggacgcaggcgagggtcctgcgcgcccccagccgcagtcccgggagcctgcccagctggcggcggccgcggctgctgctgggcgcggatccaggcgggcggctcgccccggttccccttctccgcctccccggctgcagcgcggtcccacaggagcccggcagcctccggccggctctccctctcccggtcgctgcctcgccctcgggaggtgtgcgcaccgatggaagcctcccacggaagtttctttcctccgggctacgggagaagccgagcgcagcagccgcccacagcctcgcctcgccccgcccggcgccagaccagctccgactccgctcgctgccgcgctgagccgcgctcttatagaggccggcggctccccggcgcgcatgcgcgctgcgcggctcccccccacccccgacctcagggacgcccgcgggcgccgggcagcccctcactttcctaccccgggcaaggagaaaggtgtggccaagggcggggtctgcctgctggaataggcgcgggaggaaacccaacctaagcaatccaggcctcgctaacacaaataacaataataacggaagaaactcaacttgctttgtgaagatctttggcattcaacattcggttcgattctgcaaacttctcaagggattatgattactttccactctgcagatcataaaatcgccactcagatgaactctctcggcttccagcagctgatgtcctggccacggttggtcccaggccctgtgcaggaagagcaccgatgtttgtggcagggttcacacgcctagggctgtgtttggtggactggaggcctccaccacaaggtggaacggagagagttcagcaaagatgtcacacattcggccacggtgtggatgatctgtgtccctttttctttctatatttgggtgtggtgatttatcggattccagcaggaaagtgcctccgtccaacatgtggccttagtggtttagacagctgcagtcaggaagaaaacaaggttcagacagaccagaaattcagctttgatgaaggagaaattaatagcttctctcttgcagaagctggaacaacaggtgctgatgttattaaagcagcagtgcttatttttaaaggaacgaatgccccttcccacaccgtctgggagtcagcagacctgaattctagacccagccctactagcagggaatcactgcgtttttctggtctcagtttcttcatctataaagtggagcataggatgtgacgatcactaaggtccctttcaagtccatgacttcagaacacaggcagttttattcacagcaaagacactcaggttcaagcagccattggatgcttgtgtatgcctggttaatgtgaagatt

SEQ ID NO: 917432 - DNA, 4001 bp, Homo sapiens
aagtggtttcccctcactccacacagagaccttaacacctctctattctccatcatcagctgcagtcaatgaaccatataaatgcaaacttcagaaatgctaaagtctcataagcaatttttaaaggtattaaaatacaaaacagaagtaaacaaaatttcttgccccagggaactaactaatccaaagtggaaaaaataatggaagtttgaatgcagtctcaaaagtggccataaaatggaattcagaattttattttaatgtgcatactacatacttgctttgccaaggatgactggtagtaaattctcatttataaaactaagctataaaagaaaaaaagaaatagtggaatgagaggcaagagcgcgcaagcaagagcaggtgtgaacggttgcatgcgatggcattcgtcacagctgggatatcagagagagtcagatcctaggtcagatgcaccataggggtcccaggatagtccatcgcccctcccccaggactggccttggcatgtaaccccagcagctccaggcagctgtctttcggcggaacttctaggagtgggggcacccatcagcgctgacctgcggggctccagctgaggacagtccggccgtgggagtttataaagtaatggacaacaggcaatgctcttcctgcccaacagcagtggtcagagggacagatctatcctcacagagactgtcaggcactgtcgctacagacacggcccctcccccggcactcagtcctgcctgccttacacaggagtacaggaaaggaacttccaatgagtccatcttttatgttaggagagaggcaaggtgctgagtttcccatccggggagttcagctgcaccctctccccagcccccacctccctgacttcccctcctccctactacccctaaccagtggcccatcattcctttcccagtcagtcttggctgtgatgttaagcggctctgccggaccccatattttgtctggtctctaaaagggcactgacctgagggtacaaatgcagaggccccggggcagctaggcagccgcgagcaacccagcacccagctgcctagggtgctccaggcagcggcggcagcagctagaagctggtgtcattattacacaagccaggcaaatcctgctccagtacacagagcgcatctaaccagcaggaaggaaataagccaaaatcctcccgacaccacacacacacacacacacacacacacacacacacacacacacacgagtctgaggacaaggacaaacactttgcagaaagaaccctccccccaccccaccgacgtccaagtccctgtttcaggattcctcaccccccagtagcttctaaaatcctcgtgtttgaccacctctcccaacacatgggacagagagaatttggctaacttcaaatcctgtctcctgagcacttgcccacaaatagtagggggagtgatggggacgcccccctgttccctccaccaccctcacttctgccccccacgccactctcaggttgacagcgtcggggaaagacatcagaccatcaatccagcttttcctgccagctggggaaacaacactcggtcactaacagcacccaatcacctagagagcgagagtgagccgaggcaaacacgccgggttccagacaccgtcccagcccccgagacccgggtttgcaaagggctgcacacgttcgccggagggtcgctgccgcctccgagaaaggacttgaacctgagcccggtgaaggtaaaatgacacagagactcacctttaggttgtgtgtggggttgacgacacagacaagttgcccggcagcggagaaaacccgtttagccttgtagtgctgaaaccggagatgaatgagatctaatacagccccaaagcactgggtaaagaaaagcatcacaacttttggggggttgttggtccgggaaggcagcggaggaagctgtgagtccttgggccctggaaggagcgcagcctctgagacactccgctccagcccggcttagcgcgccttcatattcatcatcaaaataagacggttagaatcttgcagcagtgaggcggccaatcaaaaggacagaaatgttatccttgaggtgcagagacagccaataacaaatgccttccctaccgaaactccctgatgaattgagcctggcggagaatgtattattgaacattaccatagatcagcacattgcatttatcttgtgattacagccaaccatacctaatgctggggagataggctgacaaaattgattgcttaatgtgtctccatttattaattgacttaatttaacatgagagcctttcttaatgccctggcaagaacgtaaagcgtttaagccgccaaatagtacaacaccccgctccaaagtaggcagatggataacgcagatcatggctcgactcaccagagctgcttgggagaaaataaaatattactagactctgaatccagataaggacttggcagcagcaaaaatgtgtatctttcaatcttgcgttctgactttctgcaatttggattacagccccttgataaatcttactctccactctttatcaaagaaaagaatccctgacaaattcatttggagttgaggggtggagggaagcacatacatatatattactatacatatatatatattttctttttttcaaaatactgtgattactgaagtctgaaagtattaaaggataaaaatgcacagagtatgcttcaaaaaataatgaaatccctgatgcatgaatgcacacacacagaaaaacctacactgagaggaaagaggcttgtaaatcagcaaaataattacagatgcagagaacctttgcttgtcattcatttgcatattggtgggcagcaaattgctaattaaccactagattgctggagacattaaaatagagattaaggatgcacataccacatcatttacttgtttctgcaaatgctagcagcacatttctgtgctggcacaggcagagggcattccagtcctcagactgcaaacctgtccttgctccccagaacagggctggtgggtgggcgggaggccgctggttcttgaagaaagattcctaagcagtacttgaagggttttgggtttttcgggactagctctgatggtttagtctttgcagctaaagcaggggagttcagtgtattgtgttttccctcttccctggttgtttctctcttgagaagtcaggccagatccagtgctgcctggagcaggatcagcccccactgtgaattgtaccctgtgagtgtgagccccctccctcatggctcttgttctgctctggctacaatgcttgggttgtaatgtatgcaaaacatatgcacacgtggaacacctaggtctgtgacctggtcaggcagttaaactaacaacagaataacatacgggataaaaataatgcacaagtttattgatgccaggacagagcccaggctgttcattttaacttgcatttaaaaccaaaccaatgttttaagagacaagctgaacaccaattaaacatggaaactttgcacttttaaaataacgacactggcaccaaactagaagatgacaacatttgaactgattagaacctcatcaatgtgatatttttataggacctgagtccctggagccacttgttacatggcatataataaaggttgctggcccacaaaaccagaatctgctttctaaagtttgaattgtccagaaaataagctttcagcagttcattgggaaaacatttaatgtcctttcattggcttacttgttttaaaaactaaaagtgtgcagatactctcatagattccttaaagatatattcataatttagaaaggttcaaattatttttacatctttggctctagtggaacgattgtgttgattttttgttctgttttgtttcatttttctttactttttaaagatgtattgtttccgtcatcctgctagaagtaagttcc

SEQ ID NO: 917433 - DNA, 4001 bp, Homo sapiens
gatagcattaggagatatacctaatgtaaatgacgagataatgggtacagcacaccaacatggtgcatgtatacatatgtaagaaacctgcacgttgtgcacatgtaccctagaacttaaaagtataataattttaaaaaaagaaaaaaaaagtgcgtactgctccaacaacaacaacaacaacaacaaaaagcgcatttgttccacatctttccaaacacttggtaattttctctttttcgttttagctatcctgctgggtatgcaactgtactacattgagatttaatttgcatttccttgatgactaatgaaatttgcatttccttgatgactaatgaaattgatgtcttttcacattcctgatgaccatctgaagatagttttttctttcttagatggagtctaagatcgctcaggctggagtgcagtggcgcgatctcgggtcactgcaacctccgcttccagggttcaagcgattctcccacctcagcctccgagtagctgggattacaggcgcccactactatgcccagctaattgttttgtatttttagtagagacgaggtttcaccacgttggccaggctggtcttgaactcctgacctcgggcgatccacccacctcggcctcccaaaatgctgggattacaggcgtgtgccaccgtgcacggccaaatctttttttctttttgagacggactcttgctctgtcgccgaggctggagtgcagtggcggatctcggctcactgcaagttccgcctcccgggttcacgccattctcctacctcagcctcccgagtagctgggactaccggcgcccgccaccacgcccggctaattttttgtatttttagtagagacggggtttcaccgtgttagccagaatggtctcgatctcctgaccttgtgatccgcccgcctcagcctcccaaagtgctaggattacaggcgtgagccaccgcgccgggcagaaatagacattttcaagtgactggagatcattcattatataattaaagtaaaagtagtctgcagggtgtaatattttaaagcacattacaattatgacatttatgaaataattccaaaatctgaactactttttcaacaatttaaaaaatctctaataaaaaggggaatggtgaattttgctttatttatatacacatatttttttaaaccccagcactgttgagtactagtgtttgtgttggcaacatggtttagcgggaaaaacacagaggtttactgcaactgtggaccacgtgagtgagaaaaaagtcactatatgtgtaaagtattgtgtaaagaacgttaaatagcttgattctaagagaaactgtttaggtttacatggtattttactgacaagcacacatattgtatgtgacgaaagcatatcacgtataaattagtatatgtattatgagctcaatctgttaatttaggttcttattcttaagtgctgctgtctctgtttataacgtaatagtgctactttcattatctcaagagagccgtggggttgtacatgggtctaaaacggacacgcgacaagggttcctaggaataaaccataaacaggcccgggagctacgctaacgccaaacgccgagcagtgagacgcgcagcacccgccctgcgcctcggtggcagccgtccacgccgtcagtgcctggcggttcccgtgggacataccgtccactcgccacgcccctccgcccgcggcgcaccccacgcaccgtgccctggccgcccgcctcacgcaccgctttcctctccgtccagcgctcgctgcagccgggccgtctcgcagtccagcgtgctggccagagaccgcagcttcccgcagaagctccggatagggtccatgctgagcacagcggggaaggactccaggcgtacgcagaccccaccgctcagctcacagcctcccgccactagtttgaatctcggcgccggacgcgtcctcggctctgcgcaggcgcagtcctctctcgcgagagccgaagtctctcgccgaggccccaggagaccccgcgagacgggtgcgcttacgccacggcgtctgctggcggccgcggagacgcagagtcttgagcagcgcggcaggtgagtagctgtgcgaattcggttctctagggagctccttcttcgcctgctggccttacctgggctccccgcttctctggaggggaggcggtgcgggaactcccgtaggcgtgagctggagcgcgcgcccgctgctctctccaggtccggccgcgccagttcgcctccgcaaagcccgtccctctcttccgcaggcaccatgttcctgactgcgctcctctggcgcggccgcattcccggccgtcagtggatcgggaagcaccggcggccgcggttcgtgtcgttgcgcgccaagcagaacatgatccgccgcctggagatcgaggcggagaaccattactggctgagcatgccctacatgacccgggagcaggagcgcggccacgccgcggtgcgcaggagggaggccttcgaggccataaaggcggccgccacttccaagttccccccgcatagattcattgcggaccagctcgaccatctcaatgtcaccaagaaatggtcctaatcctgagtcgtcacccttggattttatggatcacggagctgaccatctttacctggtcctggaactgaaaaactgtagcttgtgtgaaaatgagcctttggaccagtctttattaaaacaaacaaacatgagtagtctgcatatcgaatatctagagctctaaacccccaatacttaaaagtctaattgctgtcctgtggtttcattagtctgataggaagatagggatttcctcagtcacagatgatattttgaaggaaagctgcaataaagccacaatgatttgaggtctttgcttaagtatgagatacttgatgggggctttatcatgcaacattagtttgcttaccttaagaattgcccaaaaatgaaagaaaatatgagcttttcagttaaacatactcctaaaaacattttccgggattttactactaaaattggacatttaagcgaagtaaaagaggccgggtgcggtggctcacgcctgtaatcccaacactttaggagtccaaggcgggcggatcacttgaggtcaggagttcaagaccagcttggccaaggtgataaaacccgtctctactaatacaaaaaaaattagctgggtatgttggtgcaggcttgcaatcccagctacttgggacgctgaggtgggaggatcgcctgaacctcagaggcagaggttgcaatgaagcggaggttgcagtgagccgagagcatgccgctgcactccagcctgggagactgcatctcaaaaaagaaaaataaacgaagtaaaagatatttatcagagctgttacaggaaggtgtattttttagctattttggcagggtgctgtggtgcttgcatgtagtcccagctattcaggaatattgcttgagtccagcttgggcaacatagcgagaccctatctaaaataacaataatatatggccaggcgggatggctcacgcctgtaatcccagcactttgggaggctgaggcgggcagatcacttgaggccaggagttcaagaccagcccaaccaacatggtgaaaccctgtctccactgaaaatacataaaattagccgggtgcagtggtgaggcctgtaatcccagctactcaggaggctgaggcaggagaatcgcttgcacccaggaggtggaggctgcagtaagtcgagattgtgtcactgcactctagcctgggcgacagaaaaagaaaatttaggtggggaaaaaaatcagaattgcgtctgtgggaacaggaataaaggagaaaccactattgactgggaagacacacaaagaactttgtcaaagttgtatggctgaggcccacacggtggctcacttctgtaatcccatcactttgggaggcttaggcagaaggatcacc

SEQ ID NO: 917434 - DNA, 4001 bp, Homo sapiens
ttatacctacatctatgttttagtttttttacaatgagcatgtaaaacttgtagttttaaatatttttaaaataaggtactatatacccactccagttgtttcttaataaacacaggaaataaaaataagttgccatcctgcaaacatatcagggaaccaaatgaacagcactcttatttctgagaccacactactgggacactatagtctgcagtgataaaggaacagagtgctttgcaagcattaacaagtgggttaaactttaaaaattaaaccctgttgatattttcttcatcaaaaagatttgcaatgcaaacaaaatcttgatgcataaaatgtaataataaaattatgtaaatcaggtaactttaaaatttttaagaccatcccactaagattaatgaaccctccttgtttttccacctggaattctaatctcaggcttgttttcaggaagattctctgccatttgtctctagaaacatttgtaaagcatcaaggctttgatttattcacctgtgtacttgttgaatgaaatagaacctgcttcaactttgatttgcttcaaaccatctgaagagctaatatactaataccactaagtgggtgatttctgttaaagttgattatttcaatgctatttggacaaaattaaactataaaaagaaagcctaggtaccaaaatgctagtaataggatgctaactaaatatgacagaaatccattcaaaagaaggaaagttattaatagattactaatctcatatttacaaacaatatcacaataaattttaaaatgcaaatattttaagcataaaactgatcccatatatctccccatcaaaaatgtaaacaagtttccttccactgtttacatacataccatcagaaaaggctaagtagggactaaatcaacctaaaataatttgaaagtggcataagggctgagagttattagtgaaatctaaggaccatcatgagagcattttctagtaccacattcagactgaaactgagattactttacagaaataagggtgcagctttgaaaaaatggcttaaagttcccaaaagtgatgagttgtttgatttttttacaccttgagctacctgcacagctgccaaaaagtattaaggtggatgatgaatacacctctgaaaggcttactgtaactccatatattttgattcttgaatgaaaccaattaactaatgtactttacagttagagctctcacatgacagagtgtaagggaaaaggaacactgcagttcccaataggaaaccagtaaggatctccatttcccaatcccttccatgcaatcatgcaacagagacacaaagaaagtaatgaaaacacagcttggaaaaacagaaagggtcctacataaaaaggacctaaagtaaagaaggactacagcaagcctccccctaaagttactcattcatggaaagtagacagtgctaaccagatgtcaactgaataaatgctgtcagcctcaagttttctgataaccaagctaaaaagtttccaagaaataagaaaataaggcttctctaatctcacttttcttctacagtttaatttaaaaaattaaagacagttcgttggttcctaggtaaaaaaataaataaataaataaaaaagtccctcccacctgttcattccactccaagaaaagtcctctttattggcactatttatgggaaagccagtgaggtcaccccattttaaaaagcaagtcagtctctgaaaataagatttcaatgaaaatgcaacgcaaaagggcacacgactgcaaaattcaaacagcaagaacgaacctctctataaagagagatccatcactgcgcggcttccgatgccacccgaggaggaagagcacgcaaatcctgtccagcgttcgtttaaaacgaaagaacagtaacagtcgcagacagaggccaacccctaccatcccccgtcatccctccgaaaacactggggaaaagagcagcactgagcaaaaagacaagatgacatggattttgcacttaatgctaacgaggagcttgggacccaacaatcagcaaatagcagaacccatggcagatggggggaagggggggccggttcatccgcagtcggagcgattagaaaacaggtttctgccttcatgagaagcctcatcgtgggaagtgtcaccgcctggctcaacacctgctgggtcggcccctccgggagccgcggggagtcaccccggctgccgcgaggggacccccgtccgccccccgcccccgctccccggtgcccgaagcccccgaggccagggtctcggggaaggagcggagccaggcagtaccaggtgtagtcgtcctcgtcccgccaggcggctacgctctccagatccagcaattccacctcgtccagcagcgtggggggcggcgagggcggcgctgcagctgcccctggcggcgtccccgcgccccccggctccggcccgccaccgcccgcgccgaagaagcctgctgccggcttgaagtagacgaagggcgcctcgggtggctgcgccaggctgcaaagcagggagggcgcggggctaggcaggcagaaggtgcccgggaacgcggggctggagccaccgccgctgccactaccgctgccgccaccgccccccgcgcccagcgccagcccgagccccaggccccctgaggccgcggcggtggccgtggcggccggggggctccgaggacccaaaggctgcaggccagcggggggcggcgcggcgggcggcggcggcggcagcagcagcaggtgcggggcggcggccgcgctggccgctcgactccgcagctgctcgttctgcttctccagcttgcgcaccagctcctgcagcttcttcacctccagctccgcgttcaccaccggcccggagcccgctccagagctgacccctgccgaggcgcatttcacctgctccgccatcatcgtgggccccgagggcgccgcggccgccggggagtgcgcgccgccgcgccggctcctcgggccacggggaggctacggctccttccctgtcgccccggcctggggggccgaccacgcgcgggctgaggccgagccggcggttcgcatcagcaccgggccctcgcctccggccgcggcagccaccaccgagctgatctgcacatgctcagtgcgtccctccagtcccctgggcgtcgcggcggctccgggttttagccgcggccccggagcggggcggggcaagagcgccgagggggcgggtgggggggggggggcggagaaccgtggggaagcccacccagggggcggggccggcagcccgggttggggccggggagccgcacccaccctcgctacctaatcccaggggcctgattggacctggcctgaactttcccgccacaagcacctcctcctgccgcttggtgggacagtgaactgcgcgggtctctgaggcggttgcggggaccagggggttcccaaagaagcagctgcaggtgctggccctcgagtagtgcaccaccggcccgctggtttgctcccttcccagctctctgttaggctccgtgacagcacttaatagccactggctaacgaatcctatagaaaacttaaaggctggggatcgttattctaaaaaccgaaaagtggagatagggggaacagaaaggctttgggaccatgccactcatgttctcattggtaatagagaagcaaaatggtgggagacaggagaccgagaagaaagagaagaaagccctctctctaagaggtagagtggccagctgctaaggagacaagtgtttacttatttattctaaaatagtcaaatttgaactgttaccatcattgtttgtcacaataaaagaagaactgctttttttttcatactatgtatattcatgcattccccaaacaaaagatctttgagcacctactctgtgccaggaaccattctaagagctcgtgatgcgggcaatgagtacaataggca

SEQ ID NO: 917435 - DNA, 4001 bp, Homo sapiens
agaaataagggtgcagctttgaaaaaatggcttaaagttcccaaaagtgatgagttgtttgatttttttacaccttgagctacctgcacagctgccaaaaagtattaaggtggatgatgaatacacctctgaaaggcttactgtaactccatatattttgattcttgaatgaaaccaattaactaatgtactttacagttagagctctcacatgacagagtgtaagggaaaaggaacactgcagttcccaataggaaaccagtaaggatctccatttcccaatcccttccatgcaatcatgcaacagagacacaaagaaagtaatgaaaacacagcttggaaaaacagaaagggtcctacataaaaaggacctaaagtaaagaaggactacagcaagcctccccctaaagttactcattcatggaaagtagacagtgctaaccagatgtcaactgaataaatgctgtcagcctcaagttttctgataaccaagctaaaaagtttccaagaaataagaaaataaggcttctctaatctcacttttcttctacagtttaatttaaaaaattaaagacagttcgttggttcctaggtaaaaaaataaataaataaataaaaaagtccctcccacctgttcattccactccaagaaaagtcctctttattggcactatttatgggaaagccagtgaggtcaccccattttaaaaagcaagtcagtctctgaaaataagatttcaatgaaaatgcaacgcaaaagggcacacgactgcaaaattcaaacagcaagaacgaacctctctataaagagagatccatcactgcgcggcttccgatgccacccgaggaggaagagcacgcaaatcctgtccagcgttcgtttaaaacgaaagaacagtaacagtcgcagacagaggccaacccctaccatcccccgtcatccctccgaaaacactggggaaaagagcagcactgagcaaaaagacaagatgacatggattttgcacttaatgctaacgaggagcttgggacccaacaatcagcaaatagcagaacccatggcagatggggggaagggggggccggttcatccgcagtcggagcgattagaaaacaggtttctgccttcatgagaagcctcatcgtgggaagtgtcaccgcctggctcaacacctgctgggtcggcccctccgggagccgcggggagtcaccccggctgccgcgaggggacccccgtccgccccccgcccccgctccccggtgcccgaagcccccgaggccagggtctcggggaaggagcggagccaggcagtaccaggtgtagtcgtcctcgtcccgccaggcggctacgctctccagatccagcaattccacctcgtccagcagcgtggggggcggcgagggcggcgctgcagctgcccctggcggcgtccccgcgccccccggctccggcccgccaccgcccgcgccgaagaagcctgctgccggcttgaagtagacgaagggcgcctcgggtggctgcgccaggctgcaaagcagggagggcgcggggctaggcaggcagaaggtgcccgggaacgcggggctggagccaccgccgctgccactaccgctgccgccaccgccccccgcgcccagcgccagcccgagccccaggccccctgaggccgcggcggtggccgtggcggccggggggctccgaggacccaaaggctgcaggccagcggggggcggcgcggcgggcggcggcggcggcagcagcagcaggtgcggggcggcggccgcgctggccgctcgactccgcagctgctcgttctgcttctccagcttgcgcaccagctcctgcagcttcttcacctccagctccgcgttcaccaccggcccggagcccgctccagagctgacccctgccgaggcgcatttcacctgctccgccatcatcgtgggccccgagggcgccgcggccgccggggagtgcgcgccgccgcgccggctcctcgggccacggggaggctacggctccttccctgtcgccccggcctggggggccgaccacgcgcgggctgaggccgagccggcggttcgcatcagcaccgggccctcgcctccggccgcggcagccaccaccgagctgatctgcacatgctcagtgcgtccctccagtcccctgggcgtcgcggcggctccgggttttagccgcggccccggagcggggcggggcaagagcgccgagggggcgggtgggggggggggggcggagaaccgtggggaagcccacccagggggcggggccggcagcccgggttggggccggggagccgcacccaccctcgctacctaatcccaggggcctgattggacctggcctgaactttcccgccacaagcacctcctcctgccgcttggtgggacagtgaactgcgcgggtctctgaggcggttgcggggaccagggggttcccaaagaagcagctgcaggtgctggccctcgagtagtgcaccaccggcccgctggtttgctcccttcccagctctctgttaggctccgtgacagcacttaatagccactggctaacgaatcctatagaaaacttaaaggctggggatcgttattctaaaaaccgaaaagtggagatagggggaacagaaaggctttgggaccatgccactcatgttctcattggtaatagagaagcaaaatggtgggagacaggagaccgagaagaaagagaagaaagccctctctctaagaggtagagtggccagctgctaaggagacaagtgtttacttatttattctaaaatagtcaaatttgaactgttaccatcattgtttgtcacaataaaagaagaactgctttttttttcatactatgtatattcatgcattccccaaacaaaagatctttgagcacctactctgtgccaggaaccattctaagagctcgtgatgcgggcaatgagtacaataggcaaaaatggttatggggagaaatatgagtaaaattgtttagtgctccttctattaaataatgtgtaagttattaaagtcagacttgctggtgggaaagcagaaaacagaaaacctcagaattctacccaatacactttaatctcacctgcaaacctgctatttcttaccacttggaaaacgagcaaatctgctttttttaaaagaggcttttaagcagaagaatttaatcgagttgtgttcaatgaatactgactgacttagcattttgagtgtttaacacaatcagaggaaaacctgagattatattatgagaaaaatctacaccactggttctcatcctcagatgatatactatctagtgaaagtccttgctagggactttacataccaatctttgtgacaatgtacctcatttctctggagctgctaacacatcgtatctattggtttcagatatggttttgtgtcttcctgctcagaaacacttgtatcttctcagttgttaatctacatctctagcttctgtgtgcagggtggatgttctgcatttaacatgcttggtgagcgcttccataaattagctaaatgcgtgtgatgactcccttaaccttccctgtgtcccagcttgctagcccaccacctaaccacctgtatcacccatcacctttccaagtttcggtatatctttaggattttttttggttattaccaaaacctggagaaatggagtaatactactgaaagtcctaagtaaagaatctattgaaggatttttcccgcatgctcagtggcagatgcgggtagcagtatctccctgcaacacaaagaaagggagacgacagacacaatgagaacaaagagctgctgggtcccagactagagaaagaaattgggaataggcacataatagtgaagacaacaagaattaagatgtaaagaaaagccgtcattttactgcacaatttatatacactctaaagaaggagagaaacagacagccctttcctccttcatttacccaatatggt

SEQ ID NO: 917436 - DNA, 4001 bp, Homo sapiens
ttttcaggtgttagtattgctttatttgaggttttagagaagctgggagtattaatgccattgctataagggctgagtcttgcaacaggactataaggaaaagccagtgaggcagttgaagagaagagactccgccatcggctagctgtcacagaagcagaaaatagcagcagttagctatatggaagcatatgttgacttgtcagaaggagaaagggaagagaataaaaaaaaaaaaaaagacaaagcaacttttcataggactatcttaactgacttccacttatctaaataaaaaatatatacaaaataaacaatttgtgaattagggtcctatttatacatccatttttaaaaagtaaatcaatcttactttgattaaagccaacatgcctgtataataatgaaaatttattttgagtttctacgttagaaatgttttcaattttctatttccacataaggatttagtgttttgcaatataaaaaaggattagtgtcaaaagaaaaactcaagtttataatcttcctaatctttaggaattaagggaaatgttcttaatattaactatatgtaattctatattttttctactcagttaatatcagaaaatgttgataaaaaacattttatgtaaattcagtattggattatgggaggacttagaatgactattgtgtttccaaatggccttgagaccaaaacaaggtttaaaggaaaaacagtgtacagagtaacagaggggtgtctataccagagcttaacaatgactatccggtacagagactattggtgatcactcggattttttctttaaaaaaaacttccaaattatctgcattaaacatacatattatttatataactagcttttcaaggtaggaatatacatgttattactttaatattattttttaaattaatataatgaacaaaaaggaattacaccagccatgggcagatgatctcattcttacattacctcacttgtctaattaatgtacttctcccctccaaaattaccaccccttgtatctccatgttcttggggtcacacacacacacacacacaaatcccaaatcataaaagcttaagtcacaccaaacatgatttactctcctctcatgagatacaaatcaatgcgctaagcaaaattcacttttctgaaaagtaatcatttagacatgtactaagcagaaggaataatataaaaaatataaacaaggctaaacttcaagaaataacttggtttgtattcactgggaatttgacaaaacttgaaaaaccaagtattaaaaggactgctttgaaatgcatgcccccagaccacttttaatgagcaatgctaatgagcaatcagacagctgaaaagtgctttaaaatgggcagtgggatggagagaaaaaaaaaaaactgtgggatgtggacagtcaagaaaataatcagctccaaactgggattcttcagatccttgcaaaacaccaagtttacttaaaaaaaaaaaaaaaaaaattccttttacttcagaatcattacgtaccaacacattctaacaattacattaaaaatatcttttccttaagtatgtggaagaactaggcaaggaaaccacattcgcaatgacaacactttcagaatccacacatttcatgaaactgtgaagcctggttgccaattgacaccagtcgtatatgtcacttatccaacccgtaacttacagtggttaagcagcttttcccaatcggagccagaacacagacatgcacttccagttccttctcttctatgtaggtcaacttgactccagaatacactacaaactaggggttaataatgcaacacacactaggtagctgttctcacatgttcaatctctattattcaaagtttctcattaaaaattctatattttaaaagaccaatagttctttgtgactgctatcttgcctaacagatgatgttattttataccagtctgatcacttgccaggcaaattacagtaactgcgtgttctcacccacagatgcgggcggcagcacatcacaagtaagcagcattcatcactctgcacaataaccactgtgacccagcctccctgcacaattgacacagttattgtggctatgacagcaagatcccaactaggaacacaattagcgtctattgcaagaaagaatgctctacattgttgtttagcattgaagcttttcagaaaggggaggaaaattattgtaaaggcaggctaacaaaacaataatgctccactagtgcccaaggttacagtggaggaggaggaggacaggagtggaagctatcacatcctagttgttcttcagtacatagctaaagaattgtaacaggaagcacttttataaagaataaaacaaacaaaaagaacttgtaaaaaagagcaattttatctttttcaaccaattatctcagtggatttttggtatataaaatgatgtgaaatgattcaagaggctcagtgatgaccgaaatagctctaaagaaaggagtgaggcaattttgccaaaagagaaaaaatgggtgatccatttttgaacaacagttaaatttccctatactcctactccagagttctatttataaaaaaagggggggggggcggttcgcaaacttggaagtggcatagactatgcattttttcattttattccaatccctagaatagcatcgaactggccccaaacaggactacacactgaatcaatgtacgatacttggcacagttttctttcccaaatgccttaagctaaactgcctcccaggacacttctttctgcataatctctgtagttctaccgcaacttccttaaccactcaccacctctcaccagattactgcaacctgctcttcaacaaacttccagccaccaacactgccctgagcaaacctgttctgaatgtcatgtattttaactgtgttactctcatcaattaaagtaccgcaggggcttttcatcaaatgcaagaccttaaaggtacttcagctcatttcactaccacccttacagactgtcatttatctcatgcccacctctacagtgtctctgaagctaccctaaggatgcacccttattggttaaactttatacttcacctcccttgtctgacaatcatcttctactgaatgaatgtgataaagtactaaattgtagactgatacctcattttttttcaaaaatataagttgagggtgactaacggtctcttattttttgtacattttcaaagttgcttgactgaaaagataagttataacacatctgtgtagttatttttgtataccattaagcaaagtatgaccaaaaaaactagattcgataaatgctcccgtgataaaatcaagaaaatcataaaaaggcagacgacagaatgggtttaaggaacaacctaagtttctttaatttgtcacactgaaaattattctgtgaccaacaaaaagttcccagaaacaatgacattcctaccattgcttgatcatctttgcttagactcaaagtattcaaattgttgttaaatagacatgtctctacacataatcaaaatcaaatttaagaaagcaattacttaattcacataaaagaaaaaactgatttaatatcttagaagactcaaaaggtcggtagtgcattaaactaaagagttcaaaaataaagcaacactataacatattctggcaacaatccttttcattcttctcactacagtcatttcagtacctaatataagacttggaacacagtatgcactcaataaatgctaaatgtggtcaaaattttggcaagttgactaatatttccttatctcaaaccattctaccactcctatcctgacatataaattactttgcccaattttttaaacttaagtataattctgttaactctgaagacacataatagtctaattagatgtttcaaaccagctaaaatctcggtgaaaaatatacctggagaagcacttcattaata

SEQ ID NO: 917437 - DNA, 4001 bp, Homo sapiens
ctggagaaaccagcaccagttgaaatgagacagcaggttcctaattgatcactgggtactctatcaatccagtgtttacaattctacactttgtgcttctctcctctgccaatagtagctggggatgaacagagctaattgcctactgtacagtatttaataagcacacgttgcattagcacctggatggtttgcagaaggaaatgcatacctttcaagggaaatgaggaattgtgagctaaggaaaaagacatttgtctattcaacttttagcattaaatttctcaatctagtcacattaatgcttcatcttatttctattagtttttttttccagtgctagttcagactggcacgggatgaaatgggcaaacattgcaatttagattactctgtaggaagtggagaaaacgttttctgtttattttgtagtaaggtaagcataattttaaaaaagctgctataggctttttcccccacttttaatgccagtagaggtgaagcaaatttacaaattcttccttaggttttataccaggaaaatgtttgcccaaagaactggctatatttgatggagttgaccactgtctcactacaggttctaatgtttgacaaacagttttattttatgattgcacccagagctcctcatcattacaaagaaagtgtattttgctttttttttcctgctaccaacaggataaacctcctcagctgcagcttgtggtttggaaaagattacttttttaaaaaagctttgaatcttttcctagagatcaacagcaattatgcaactccctgttaactgagttagatttaaaaacacaaacacaaaatataaatcccccaattccaatagctaagcagctgtgctagaaggcacgggaatgcatttattctctcctgtttgattccttagtcatactttagatgcgtggcaaatcagttggacattcagaatgccataggcttctggaaggattactccaaggtgattgcagtagttagaggtatagataatcttacctcaggtccatgtcgccatcgacccaataggccaagatattggaggcagttcctccagggcagcatcctataatgagcaccactacggcctggagcgggaggatgtcaaaggccaccgacaggatgaatcctgtgaggggcatgattccaaactgacagaggaagccaacacaaatgccccacggccgctttatgtgccctagaaatttcttgatttccacgttgcatcccatggagaacatcaccaaggccaacaggatggtcagcaccgtacttaggaccacacttaggatgttattgaaattgctctcaggtaccacacaggatgcaccagagcaaactgttgcattgtccacacagctgttcggatcattcattgctgggtctgctgctggaaaggccaagtccacagaagcgctggtccctgggccctggctctgctgctggttgagttaagcaacgtttacttctaccccatcaaacttttaaacccctcctaaaaatatgtcacttggtgtctcttttgaaagccaccttagggaagtaataaaaaacaataaagctaggatgtcagtttcaagaggtagcattacaacacagagcacgttgtgaatcacaaaagtccagcaaaattattggtcaagacagagagttacgattaatcatttattggcatgataatgaaccatgccatataaaaagagccacgttaatgtttaatgtcctcgagggtttgttggataatttcagttaagtgacttttaaaatcaactctgaatagtacagaatcttatagggattgagccataggaaccatgccatataaaaagagctgtgttaatgtttcatgccatgaaggtttgttggataatttcagttaagtgacacttaaaatcaactctgaatagtacagaatcttatagggactgagccataggaacacatattgttctcccatttccctttcaatagaagggtttagggccctgaatagttgagtgccctgtgcctaattatgttgcaaatcaggtgtcagactctgaactgggacccagatctccatccaatttccactcccagtagttttgctactgtatcagtgtttcctggaattgctttgtagtgtccataaagtatatggaaatttaagaaacttctagggtcttggtgcaaatctgagagagtaacatttgggaagatagaatgttttctgtgtttcctggtggaaaggagtctgacttgcacagccaccctcaactacttacacatgcaattatgtgtgcgttgtcatagtaacagagtactttatagatggagacaatacaattatttagagggatgaacctcagagaattaggtcaaagtgacaggatctctttgtgcttggagtcataaattgaaattcgatttttttttttttggcagggggattccaagagagatttttgtaaatgtcaaatagtcgacctcatgctgggcagaacgctgtatttcagtatacagggaagataaagaaagaggtagagaagagattgtcctgttttcaggagtttataacccagttattgagttaggacacagagtaataataaaattgaatattccgatcatgattcacaatttgtaggacaaattctaatttattattcaacttaatcatcttaaattaagtaggattagcactcccattttacagatgacgacttaagggttgaggaaattgagtgctttagataaggttaaagggaaatgagagaacaacgtgttttcctatggctggtatctggaaatactggaaccgagcgttctgattatgtgaagaaagtggtcggtttggcttgctggggattggagtaatatcttagaacagagcttctcaaaactcagtgtgaacaggattcccctgggggccttgttaaaatgcaaattctgattctggaagtctagggagagttttctttctagcaagcttgtagttgatggcgatgacactgatctggggtcacacttttagtatcatggcttcagaatagcagagtgacaacagttgtacccatattggtgacaacggaacttaccggtcacaactgaaagcagcttttgcagagaaactcaatatgggaaaattaacctttttcataactggagtaaatgtgagctgtggctagcagaatgggccactgagcagaagagctaatagagtgaaatgcccaaaccacaggtgggggtgcctaggcattgagctactgggaaaaacctgagccatttccttccagggcaaccgtgatttgtacttgttgatgtggctatctgagtggtcacgtcctgcctgcctttctagcacaagtgggggctgccattgtccctgacctggctgcctgccaattcctgggagagccttctgtctttcccacctccttccccaccccaacagctaaatgataaaccaggtaatatccaaagaggcctcccctcccactcctaggtgtatcatgacttggccctaccctgctggctgctccaagcatttcctgggactgacctctggcctacttctgtcgggagctggccctccccagggcagatgagccaagtgcactccctgctgccacacctgagcatctgcacctagccgctcacacctgggcacctgcacctgagcacctgtggctggctcttcccccaactcccaaaggtgggtgaggcagatgcccatgcagtggtgatcagtttacggtctctcttttctgatttctcttaacctcaaacattaggtgaaaggcagaaagctagcctaggattgaacggcaaatagcctcttcaccaggtctgatctgcaaaggaaaatttgagccctgcaggcgggaaggatttggattctgaaatttctcttaaagttggaaggctgcagtgcaaggcccaatgcacagggctcaagacaagcatatttagacaccctcctttgaactcaaatg

SEQ ID NO: 917438 - DNA, 4001 bp, Homo sapiens
ccaactgcttcaagtgtcccctcagtcactgagggatctgaagcaattctggcatgacctaagtaccaaagatctgttctttttttttttttttgagacggagtcttactctgtcgcggaggctggagtgcggtggcaccacgttggctcactgcaaccttcgtctcctgggttcaagcaattctcctgcctcagccttccgagtagctgggattacaggcacccgccactatgcccagctagtttttatatatttttagtagagacgggggtcttaccatgttggccaggttggtctcgaactcctgacctcaggtgatccacctgccctggcctcccaaagtgctgggattacaagcgtgagccactgcgcccggccaagatctgttcttaagagaagttactactactttttttccccataacaaccattaaacaatttttttttcatttactaactaacccttgatattgaaaagttaggacttcagtaaaaatcaaatcggtttttgcatatcaacttttttgttgctattcacatgctatgtcaatctcagttgcaaacagagaggaccagttgcagactagaacgcatcaattcatttggaaaggaggcttcaaatctaactctgtattccttcaccaataaccaggcagctgcctctaacagctctcgggattggatctgctggaaatgctaaacacgggtcataaattccaactcaacaaggatgctgctcaggtatttggtatttgatgatcaacagaaatagttcagagcacctcccagcaaagttgcatagagtgacaggtgggacttgtttgagggcgggacccagaactgcagcccaggaatctgcctgcagagctgagctcggccacagtctccgccagagagggaagttgcaggtctttctggaacaggcacaactggctacaattagaagtccaaagtgtgaaccactcactgcttctccttaggaaccaccacatgctgtgtccggcaggcattctgagagccagaggacggctgcaccctggggctgggcactgacacacatcactccaccaggaccactgaggcagccaccgaccgacattcctgtctacaggctcagatccccctcaacaacgtggccacatcttctgcaaaatgctggccgggggcatccatggcacaactttgggaagctgactgggcttcctcatctttaagaaagcagcgggctgggctgctcccagcagctctggctctgcttccgttcattctctctgggtctgccttagttccagggtgattaattcggaagcggggcaggagtcaagttgcctcctagctgttttgctgacgctccagccccatcaagagccagctcctcaccttctgtaaggcacagaaggtgcctcaaattaagccaggggacagtgcagagggttaagagggggccacaaagagaggccccatctcctcttgggccagggttccctgcggaactccagggtcacctcgccagccagaggcaagacaagtgcaaaggcagccacaaggcttccgccagttagacggtgtttctgccgcccctgccgtcacccgctgggtcccgtcccgctccaagcgcactcccggcccgcagggtgggaatacgaggattacagtgccccacgggcgggcgggccaggatcgcaacctcggcggagtcggcgcctctgggcacctctggcttccgcgccccggccgcacggtgaccacccgggaggggatcccgggcgccccgcaacctcccggcccccgtgggccttcgggtcgccccgcttcccgccgccgcgtacccttcgcgcctcccggccctcggtgccggcccccgccccgcgtagctccgagtctttagcccggccggccccccacccgccgagcgtacccatggcggcggctcccagggctcctgcgacctgccggcgggacgtgctcctggcaggtgctactcctccgacctgacgtccaggcccggccccgttgccccaggtacagccccagctctgcgaggcggggccgccggctccacccggggggcggtgctgcggggagcagaggtccgtgctcccgagccgtcgcgcgtggacaccagccccggcccaggtgcgggtgggccccgacgggagcgcgtggcaggccgggggagagccagtctaaacgcggattcccaggccccaccccccggccagctgactcaggaggtcggggctggggccccagaatgtgcatttctaagaagtctaaggggaggttgatgctgctggatccagaacgacactttggaaaccactgtgggaggaacgcacgcttctgggtggggaggcaaaacacggtgggacagtggtcagctgtgtgtgtgtgtgtgtgtgtgagagagaatgtgtgtgtgggtgtgagtgaggattgtgtgtgagtgtgtgtgtgtgaatgaggattgagtgtgagcatgtgtgagaatatgtatatagtttgcatgtgagaatgtatgtgtgatgtgtgtgtgagagtgtgtgtgagagtgtgtgtgtggctttattttgagattcaacctttgaaagcatttctgggggattctacatttcctttctttaagaatcatcctttctttaagaggacacaaccaaatggaagaatattctatgctcatggataggaggaatcaatatcgtgaaaatagtcatactgctcaaggtaatttatagattcaatgctatgcccatcaagctaccaatgcctttcttcgcagaattggaaaaaactactttaaagttcatacggaaccaaaaaagagcccccatagccaagacaatcctaagcaaaaagaacaaagctggaggcatcatgctacctgacttcaaactatactacaaggctacagtaagcaaaacagcatggcactggtaccaaaacagatatatagaccaatggaacagaacagaggcctcagaaataacaccacacatctacaactatctgatctttgacaaacctgacaaaaacaagccatgggaaatggattccctatttaataaatggtgctgggaaaactggctagccatatgtagaaagctgaaactgaatcccttccttacaccttatacaaaaattaattcaagatggattaaagacttaaatgtaagacctaaaatcataaaaaccctagaagaaaacctaggcaataccattcaggacataggcatgggcaaggacttcatgtctaaaacaccaagagcaatggcaacaaaagccaaaatagacaaatgggacctaattaaactaaaaagcttctgcacagcaaaagaaactaccatcagagtgaacaggcaacctacagaatgggagaaaatgtttgcaatctacccatctgacaaaggactaatatctagaatctacaaagaacttaaacaaatttacaagaaaaaaatcaaacaaccccatcaaaaagtgggcaaaggatatgaacagacccttctcaaaagaagacatttatgcagccaacagacacacgaaaaaatgctcatcatcactggtcatcagagaaatgcaaatcaaaaccacaatcagataccatctcatgccagttagaatggcgatcattaaaaagtcaggaaacaacaaatgctggagaggatatggaggaataggaacacttttacactgttggtgggagtggaaattagttcaaccattgtggaagacagtgtggcaattcctcaaggatctagaactagaaataccatttgactcagcgatcccattactgggtatacacccaaaggattataaatcatgctactataaagacacgtgcacacatatgtttactgaggcactattcacaatagcaatgtcttggaaaccagctcaaatgtccatcagtgatagatcggattaagaaattgtggcacatatacaccatggaatactatgcagccataaaaaaggatgagttcacgtgctttgcagg

SEQ ID NO: 917439 - DNA, 4001 bp, Homo sapiens
gactccagcctgggcaacaaagtgagactctgtctcaaaaaaaaaaataataataataatagaaaataaaaaataaaataaataaataaataaataaataaataaataaaaagtttatcagggtcctaatcctttcccagaaggcaaactaaagcctggagcaagacaaggtcttctccaaggccacacaactgtcagtgacagaggattcagttcaaagtcctgtcttttcaggcctgtgcctacaaaccaaccgttaatctgagtatttcaacctggccaaaggcaacacaaaacacccaaccctatatttttgggaaagaaaaaaacgggggcaactgagcagacagacagaggcaagtacaatgtggcctcctagataaacctcaatgcgcttatttcttttggcacagacacttccttcttaattttgaaggaaagtcacatcacattacattctatctgtccctaagaattaaaccctgttaggtgagccaaacttaaacacattaaattctacaaataggccaggcacagtggctcacgcctgtaatcccagcactttgggaggccaaggcgggcggatcacctgaggtcgggagttcgagaccagcctgaccaacatgagaaacccccgtctctattaaaaatacaaaattagcctggcgtggtgggccatgcttgtaatcccagctactcgggaggctgagggaggagaatagcttgaacccaggaggcggaggttgcggtgagccgagatcgccccattgcactccagcctgggcaacaagagcgaaactccgtctcaaaaaaataaacaaacaaataaattctacaaatagccattagaattattaggatagaaaacgatgatgggtactaacagattcactcagaaggagtgggcagctaattcacattatgtgtagctctggcttggagaagacacagggcttggaggaggcaagactgttcagcatgaattaaaattgatttatgagcttgctgtagcacttggaatagaaaaaagaatcttttcagcgcctttgacccctctctcaaattacaccagggtgcaactgaggaacaacagtgccgaccacccacttttctcgacccttggggaaaataacttttttttggaagggagagtcagtagatgaggctgcattttccaccagggaacacgaactgctgcgggaagatcccagcttctggctaaaggagccgcaggccagctcgccatccagtccccagagcccgggctttaggtaaagcgtggagatgcaaatcagtttcgccgccaaggaccggccaggcgcgtctcctcccgggcctcgcaaggaacaggtcagggagacgacttccaactttcttggccggaccctaaacgttcaccgcccctgcccagccgcccactcctgggcagccagcaagtctccattcacaagcggctccatgctgcccagcactggcgcccctgaggcgcggagccccgcagccaaatgacaggacttgggggcaaacaaggacaaaagttcccaccaggtgggcactgcaggaaggaggccgacaaccccgagattctccgagtcccgcggcacgtgcgctgcgacgctggccgcttcccccgccgctcgggaaggtcacgccgcccgcacaccgaggcccgccccgcgccccgctccccgctccctctgcctggcgcgctccccgcagctgcaggcgccagaccgggctgcgctcaccgccgcgccggcgtggccgcgtccagctcaggctccgccgcccgctctcggctccgggtcgccggctggggcggccacttaacacccacgtcggcaacggccggcccttcgcccctcccttcgcgcaggcatcccggactgcggccccgcgaagctcaggagcgcccctgcggctggcgggcggcctgcccagggccgtgcccgagccgagaccgggagccgccaccgcccaccggccctgccaccgcccccagcacgggaagcggaagtgggcgtggggccgcggcgcgcacagccagcccgcgacccggcgtggtgctgccgccgaccctggtgaaggtggagagcggggcctgcgcctccggagactttcccacctctgggatccccgagaccctctctgaggccggacccttgttagcccgctgggctgggactgggggctgggggctggtaatgtcagtggttgggaggacttactttttagctactttgaccttgttgggaggctaaggccttatttataaattatatttgagtacaaaattatactcgggatccaaggccctaataggaaatacaactaagtatgaaaatacaggaattagccgggcatggtggctcacgcctgtaatcccagcactgtgggaggccgaggtaggcggatcacctgaggtcaggagtccaagaccagcctggccaacatggtgaaaccccgtgtactaaaattacaaaaatttatccagcgtggtggtgcgtgtctgtaaccccagctactagggaggctgaggcaggagaatcgcttgaatctgggaggtgaaggttgcagtgagccaagattgcatcactacactccagcctgggctacacagcgagactccgtttcataaaaacaaacaaacaacgacaaaaaaaaaaaggtgtggtgacacatgcctctattcttagctatttgggaggccaaggcgggaggatcgcttgaggccaggaattggaggccgcagtgagctatgatggcactgttgcactccagcctggatgacagagacctcatctctctctctctctctctctcacccacacacacacacacacacacacacacacaccctccacacagtgtaattttattttacaactttaagccttgtttagatgtgctgttggattattatttttttctttttttttctttttttttttgagacagagtctcactctgtcacccgagctggagtgcaatggtgcaatctcagctcactgcaacctccccctcctgggttcaagcgattctcctgccttagcttcccaagtagctgggattacaggcatgcgccaccacacccagctaattttgtattttttagtagagacagggtttcaccaccttggccgggctggtctcgaactcctgacctcaggtgatctgcctgcctcggcctctcaaagtgctgggattacacgtgtgagccaccacgtctggatgtgctattggataattacctacgttatttaagtgatttaattggtgttagtgcttaacatgaatgcacacttgagtagacctcccaggctgtagtagatgctatgatgggatcagagtgcctggtacatggacactcatcagaatcagcactttagaacttgggcttctggactgtaatcgagttacaaaaacaagccagggagttgggatgacttgtccaaagtgatggggaacataactaactgaaagcagatccagcagctgaaactacagttacagcagcttaaaggggttggcaatgtcacctggtccaatagcttttgcagcttcagaaaatgagacccaaaggaaccctgattaaggacagacttggctgggtgtggtggctcatgcctgtaatcccaacatgttgggaggctgaggcaggaggattgcttgagcccaggagttcgagttgaacctgggcaacacagtgatgtaactgcccaatgggttcttctcgcccgctgcctcaactgagccaatttatcaagatgggggaattgcaatagagaaacagtttaattcacgcagaaccagctgtgcaggagaccagagttttattattactcaaatcaatctccccaagaattcggggtttggagtttttagggataatttggtgggtagggggccagtgagtgggagtactgattggtcatgttggagatgaaatcatagggagtctaaactgtcctcttacgctgagtcggttcctgggtgggggc

SEQ ID NO: 917440 - DNA, 4001 bp, Homo sapiens
acaaagtaaaaaaacaacaacaaaaatgttagctgggctagtcacacatacctgtaatcccagctacttgggaggctgaggctggagaatagcttgaggccaggggttcaagaccagcctgggcaacagaatgagacgaccacctatactaaaaaaatccaaaacattatctaggtatggtggtacgcgactctagtcccagctactccgcaggctgaggtggaaggggcacataagcccaggacttcaaggctgcagtgagctaagaccatgacactgcactctagcagcctgggtgacagagcaagaccctgtcccaaataataaataaaggttaaaaacaagttttctgaatgaaattgtctatacaaattaagaatttcaaaggattctccctacacttaggatatatgctaagttacacatcctgtctacattttctcttacatggttgcttagtatttattttcacccacctgacctcatgtgtacagctgtaaagggaggtaattaaatataatactagctgttcgtacttttgaacgctttccaagtttctcttatttatttatttagaggcggagttttgttcttattgcccaggctggagtacaatagcatgatctcggctcactgcaacctccgtctcctggattcaagcgattctcctgtctcaacctcccgagtagctagaattagacatccgtcaccacgcccggctaattttgtatttttagtagagacggagtttctccatgttggccaggctggtctcgaactcctgacctcaggtgatccgcccgcctcggcctcccaaagtgctgggattacaggcctgagccaccgctcccagccgtttctcttatttaattcttggtaagttctttcagttttacttcctgttccctttttagtcttaagtcttaaaactgtaattgcacagcctttaatgtgctctcatacatttattgttccttgctggaccgactgccctttcaataatgccctttcatgaacttttcctatttcctattctttttaaaggtgcagaaggaaaactaagctcatcacagacttacaaaaagccgggtttaaaagaaatcttcgaaattatcatctcgtttcacgttaattaactgagcccgcggtcacaaagcttcgcaacggcaaagccaaaagcaagattcatgcctttcaactttctcactacccaagtagcaccgcaagccgaatccgcagggcagtgccaacattgtttgctactcttgcgcagaacaaaaatgctaatcactgcaactgctttacatgaaagtgcacctagaaagacttcaaaacccagaggtacattaactttccaggcaagttcctcccagcctgtgtgccacgagcgattccgaatgtggtgtgccctctcccacagtgcgaagctcgcgggcgctcaggctgccgtttgaatgaacgcacgagtgggagggacgcacaagcagggttgcaagcccggggctcgttagcagacgcggagatgccaggacgggcttcgcactcggatctgaatgaccctggaacaggaatcaccccacgccaacagcgatgggggccccgcggcaccggcccgacccaaggaggcagcagcccgagaagcagagccctgtccccagtccccggaacctcgcgccccgccgagcccggcccggcctgcgaagtggagagcacaggcagccccgagcacgcccggttgcaaaggaggctcctcggaaatcgcagcccaaccttaccccaggcccgggttccaggagccgcagagaaagcggggccggcaggaggaggcacgggccaggacttacctggcggcagcggccccacacctcctccaacccggactcagttgtaacaagaacctgaggccgctggagaaaaggaaaaaatgccgtcgcgggcggggcagacccacgagcctgcacgcagccccgcgccgccccgccccgtccgcgcaaacacgcgacctcctcagctcccattggtttctgccagcactagccacacccctgacagccccagatggggacacggaggggcggggcccgtcccaagtgcccctcaggatcttcccctgccgctgcctgagggagctgcccgggactcggtgacacctgatgtggcctccgatatcgactgggaggtggaagagaaatttggggaacgcatcgagaaccgtggaaaagcaaccttcgcagggggcaaccttctcacggtgcccccgtgaaccttcacagttggatggaagtaaacttgcccttatttttttataccccagcttttagcttgaaaatatacagattagccgggcatagcggcgggcgctataatcccagctacttgggtggctgaggcagaagaatcgcttgaacctgggaggcggagattgcagtgagcagagagcgtaccactgcactccagcctgggcaacaaagcgagacttcgtctcaaaaaaaaaaaaaaaaaaaaaaaaaaaaaaaaaaaaaaaaaaaagccagacctggtggcgggtgcctgtaatcccagccactcgggaggctgaaacaggagaatcgcttgaacccgggaggcggaggttgcagtgagccaagatcgcgccactgcactccagcctgggcgacaaagtgatactccctcttaaaaaaaaaaaaaaaaaaaaagaaagaaaatgtccaaacagaacaaaaaattaaaagaaccgtactatgagtagaaatctttacatatatatctaatatacatatatgtaaatatttatttatatattaatatataacatttttaacggtatggcagtgtttgtgttcaagcatacccaggtatatttttgttttgttttgtttttagacagagcctcactcttgttgcccaggctggagtgcaatggcaccatctcagctcactgcaacctccgcctcccaggttcaagtgattctgctgcctcagcctcccgagtagctgggattacaggtgcccatcaccacgtccggctaattgttgtatttttagtagagatggggtttctccatattggtgaggctggtctcgaactcccgacctcaggtgatccgcctgcctcggcctcccaaagtgctgccattacaggtgtgagccacggcacccggctgtgaactcatgatttaaacatataactggggccgggctcagtggcttatgcctgtaatcccagcattttgggaggccgagacgggcagatcacctgaggtcgggagttcgagaccagcctgaccaatatggagaaaacccatctctactaaaagtacaaaaattagccggacgtggtgatggacacctgtaatcccagctactcgggaggctgaggcaggaaaatcagttgaagctgggaggtggaggttgaggtgagccgagatcacgccgctgcactctagctgctgcactctagctgctgcactctagcctgggtgacagcgcgagagaaagaaaaggaaaggaaagggaggggaggcgaagggaaggggaaggggaagaaaggaaaggggaaaggagaaagagggaggaaggaagggaggaaggaaaatgcatatgtataaaacttgcatctgttgatgcaaagtgctactccaggaatctttacatcccttggttcattcaagacaaagaaatgttatttccattttacagatgacagaacagaggtttcatgagataactgccctgttacagaaccagggcccagggccatctctctctcatttccttctcttgtgtctccagctcaggccccaggttgagcttaaacaatctcttttctgtgctccaacttggactctaggtgagtacctggatttttggccacacaatgttttgaaatcaataaaatttggacccctttgaagtatcccctgaattctggccataaaaacaaatacaatccccagcctgtgggggaaagtcattggaatgcttgcctttctagggcaggg

SEQ ID NO: 917441 - DNA, 4001 bp, Homo sapiens
ctggatactatctctttgcattttgaaatggtagacttttgtcaaaaactgcccaagggaccaggagaatggtgaagtgcctgcctcctgttttacacacaaaaaaactggggagattgctggagagggaggaagaaagcctccttaatatctggctaaacatctttggtgtcaacggtgggtactccccactccagatgtccccacacagctgctcctcaacacgtgagagccaaggctgatttgataccaccaccaaataataaatgctcctccaccccaccctgtgacagacactggctcacaatcttcagtgatgggccactttctagagtccctgaaagctgggacatgcagaaacagtaaaaggattggggaagaatagagcaagtgagagacagaaacaccatgtttcagccacccctgtccaccaagtagctcattccagcctgccctgccccaattttcagactttttttttttttttttttttttttaggacaaagcaaggagacagccacagaagagatgacactgtggtgaaattttccgagagaaaggagaagagctagtgtcacagagcaggagggtgttttaagaagaagaggcagatttgaaaggtgtcaggaaacttcaaatgaggtgagttcccagtaaaggccattaggtttgggatttaggactttgatggccgccctagagagaccaatggatgatgagttcacggtcctctttaactcaaagcccggtatacattcccattttattaaatactatggatattgtaatttcttacctcctggaatgcaaaaattgggctgcttttgtttttttcacactcagaaatattgctatcagatgaaaaagtgtagttgccagtttcttcccatattctccgataaacatattgcgttgtcagtggaccggtcaaagtcatagcaaatgcactaaggaaaatggcaggttctacaaataaaatcttcatattgcctgggtaggtagctgtattctataaaaagtgaaaacggagaaagatcatctgtctcatcccagaggctagatattcaaagatgggtaagtttgagcaattttgtggagtaaatgtttaaacaagcaaactagagaacagaaaaggcagtaagcactttctcagagaataacttttactttggagtagagtactctgtaacaacctgaggctgccatgctttccatttttatgagtaggacattgtaggactcaagccgcctttgagtctttgaaatcataaactgtcacccatcttggttagccaatgatcacagtacagttcccacactgtatattgccaactgatttttcgtaagttcaacaatgaggttccttttgggaagcgacagttgcacaattgttattgttattttgctgcgtattaaaaacggacagggagggggcgttttaaaaagcagctcccaatcgaaagggccttatttttaactcaccccacgattacagtcttcctgccaggctgggtacaggtcgggccgtgccaggggctgtcgcctcggatgccctgcgctcgtgcgcgcccgggttcaagggcagcctctggactggggcaacagaggacgcgccggggacagtaacctcggactacgcggccggcgctggggtggggagagtactttcccgtcgaactcgaccaaattacgcttgtcggggagtctcaagcgtattgtaaagcaaacctcggcaagcgcacttccgcgtcccgagtgacacctgcagggttctccggcagccctcggcttccccgcggccctgcggacctcggcctcagcgcggcgcggcggggcgcggagcagctgctccttctgcgcagtggacaatcggccaatcggcgcctccgtcggtcggtcagcggccctgccagcgctaggcgatgactcggccgcagccagctgagcatcgctgtccgccgaggaggcggggtcggctgccgcggcgctgtcactgttctacccggctctcctgcgattgggcccagcggtcggtgccccagcggcgattggtccacccggacgtcactctcccctggagagtggctagtggatcgtgcacccaccctcggaggcccggagtggatcccgcgcgaccgagcagccactcagcaccgctgttgagtggtgggccgcgccgcaggctcaacagctctggagttgcaaagcatttctgaatccgaatatcctttctcatagaaacacataaaacaacagttggaaaagtaacatgtttgggctgtagcccccagcaggatcccggtcggcccgcagaagaggggaatgggcgcaggtggagggcataggaaagagagtgctcaatgcagagttagcggagggttggaatgtggtcgctggcttttcctggggaggggaggggggacttgggcaaatcgttaaattttcatgaacctccatgtctttatctgccacgtggggatgataagtcttacagggttgtctaattaaacactcagcatgtatacacaacacagcccctggacataggaggagttgtcagtgctctccaacacacccaccaggaacaacttgtagtaaaagaattgagctactacttcttgaagccaggagaaatgcatgcatgaggaaccgtgggggcatctcagtaagaaggtgttagaatttactatgggcttgcgttatgtgattttgggaagagttcaagaaagcaaggccttactctggattggttgctgtcaggaaatggcagtaattctatgattgggtatcttaataagtcttatttaggagtcaagactagacagaggctaaagccatgaatgataaagaagcaacagtcacacatatttgtcatttttgtggtttagacagtgcctaaattttgtccgtgttcagacaaaattatgacgtggtcttgtttttgtcttgatcatggttacagaatgctcttgtctgactttggtgttccgtgaaattgttttcattcgacagaacaccatggtccagaaaagttcttagcaacaccaaggcccagctgatagttccagcacctggatgtcagagctgctttctcttcctcagcactccttaaatgacagttgtgtcactgaatgcagagttaaacgtcttaggtttgagtcctaactgatacttagtagctggtaaccttggacttgccacttaatcttacttcccagcttcttcaaatcagcatttatgaagcacttgttatgagtttcaaacaatggagcatggatattggaaagaagataaacaaacatgagtaagatacagtttgcaaggaagacataatattttaagttgcagtactttgtactaagtactatattattctaaacggcacttagaagatgtcctttttttttttttttttttttgaggtggagtctcgctctgtcacccaggccggagtgcagttgcaggatcttggctcactgcaacctccgcctcccggattcaagcaatgatcctgcctcagcctcctgagtagctggggttacaagtgtgcgccaccatggccggctaatttttgtatttttagtagagacagggtttcaccatgttgaccaggatgatcttgaactcctgacctcaggggacctgcccacctcagcctcccaaagtgctgggattacaggcatgcgccaccgtgccctgctgaaaatgtcctttcttatggggcaaaaataattaatgtccaatatacttccacgctttgcattcctactcttccacacgaagaagaaagccaggtcttcttaatgagttctgctgctgatcgctatggtgacaacagtcattttttttttgtattttttcaaagagaattttaatgtgaaaaattagcagagtttctgccttcacaattagagtttaacatgagtcttccagtgttttaaaaagaactgtaatatacgtaaagcaaaatattttggcatcatctagtgaaaacagacaat

SEQ ID NO: 917442 - DNA, 4001 bp, Homo sapiens
tcaaagaatgagttcttctaccaaatagaaaattgtaactccctgaagtcaacagtcttgtctttcaagcctttctttttttttttcacctaaagcaagtaatcatatgtacaggagcacgtggctctaggatccagacccagacaagggagtacatttctgatctacttactaagccctttcctctttactcaaaactcctttgacatcctttgaattttacctttataataattaaacatgatcgtaatatgctaaacctatttttaaaaccattttaatctattgttgacctttcccctaagtttctattctgttcgtgtgacttaaataagaccttttgttttaataacaggagggtgtgttcatataaaaatcatggtaatttccactgagatcaactaaaaataccagaggaataaatgtatcatggtttcctattatctgaaccaaacataaagggcaagaaatgttaggaaaaatcccagataaattataattcgaattaaatacaattagggcattcggccagaggccgacatacacaattctactagtcgaatgtaagtaagataaaaggcacattctttagggagatacacctgggattgaaatctcaaccatctggtaactatgtctggactaaaacccaacacatgagggcatggcggtgatgacgtgagtattgggaaatgtaggttatttatttatttttttcctgaaggcacatgtctgactatcctagtcacacaagtcaaacacaactgctgtctggttcccccatcccctggaaagggtcaggagctgaaccagcaggctgttgtagtactacagtgcagctgccgctctgtgtacgcgcaggttttagaatgactctgacctgcccatgcctgggaagttttctactacgcagaaaggaacaccctgagaatacggtgtcttgctaaaggcggaagaacttcctctcattccaaaccatgtggagggcttgaggaacccggcctttccaggccacactgggtcacaaggaagcccacctaggggagacttcctcaaagcaatcttggggacccagacgagaggtgcaggcggcgcgtcccgggttctagggacaagcggagagccaggcgccctaggtcagggcggccaccgggcggggatggcagcagagtccctgggccggccacctgccgcgggaccaccctccgggcggccgggcagagtccccacccacggctgatgacacatccccggacctcgtggcggggcggggtgctctgcaccgcgccatgtaagggaaggtctcctcgccgccggcgggctccgtgtgcctcccagtctggcccccgtgcccgccgcccgcctacgcaccccgaccaccccgtgcgtagcggcgcgcgggtccccggacaggcgcgcggagcgggcatcgccagatcgcccacgcttactcactcggtgttgcatcatgcaccacgccgcggtttcagggagccaaaatggactccgtggaggcgacagtcgcatgggcaccagccccgctcgcccactccggggcccgcccggccctggtcctggcccttcccagaggatggcagcgttcccggcgcgggggccctcgccactcccgcgccgccctgccgcggccccacgcggcgccagggccccctccgtgatgacccgggcccaaggagctgccccctgcgttggcggggccgggcactcaccaagccggcggcggcggggctccggcaggatcgcgaacagacagactgtcggacgcgctcaaggaccaacggacgctcggccggcgagaccgggcggggcggggcggggcgggggcgcggcgcgcggggagaggagtggaggctgcggttagcgggagcccgcggccgcgtgcgcgcctgccaggtagttgacccgctgctcacacctgcctgcgcggactgaatgggcgccgagggctggcgggttccggcgccaggtttcatcagcagtgcgcccggcccccgcccctcgcgctccgcgccccgcgccccacgcccgcccccggaccaggcagccccggcccgctcggccgcgtcaccgccgggcaccaatgggagcgcggcgcggcggcggctgccagcccagaggctgcggccggggaccgacgcgcccttggtgggcggggcggctgagtcttcgcgcgcccagcgccccaacctggggttcccgcggcgggcgggcgggctgcgcctccgctcgccttctcagtagctccgtaggcgtgtggccgtttctccgccaatctgagcgcaccgcgccacagcatcctgtggtcccctgcagatcccacagcgccctggccagaactagtgctgcaggtccggccgtgccaaccccctcccggcgggccccagggagctcacacggaactcgagaccagttttccttctccaaaataaaagatttggtatgcacttaaaaggtttaaactgttttcttttcattttagagacagggtgttactctattgcccaggctggagcgcagttcaccttaacctcgaaatcctggcctcaagcgatcctcccgcctgggcctcccaaagcgccctaggattacagtcctgaaacactgcaccggcctaaaaattattataaatcttcatgtctttgttattggattattttattactattcctttgcccttgctaataccttatccttgccagttgtcagaagagccccaaagcttgaatctacctgtgcccccttggcagtggcaaatgcacaaacggctagtcagaacggctcacttttgcagttaccccccaggaagtggcagaagcttcagtcctgaatcacaccgtgctcaccttttaagctccctccttgtctccttttgtaccaaaagccaagcgagaatcataatctttaaagatccagtgatctgggacttgggataggtaaacagggcataaattaataatgccatccttcttctatcttataggaaaacagaaaaacagtggacggtgtccgtggtctttgaatcctttctacaggtccttctcaaatatcagctgctgaactattcccttggaattagactagcaatttataaagtacataactgcatggtgctagcttcagaaaaagtgttctgttgttgttgctgttgtcatttgtttgttttttagagacaggggtctcactctgtcacccaggctggaatgcagcggtacaatcatagctcactggaacttcaaattcccaggctcaagccatcctcctgcctcagcctcccaagcagatggaactacaggcttgtgtcatcacgcctagttaatattttttctacatatagacacgggtttttgatatgttgcataggctggcctcaaataccagctgtctagcgatcattttgcctcaacctcccctagcatcgggactacagggatgagccagaaaaagtccccagaaaaagttttaatgaacacatgcagatggcttagcagttgtaaaatgtgtttttgtctttgttttagagagtgggtctcactctgtcaccaagttggagtgcagtggcaacatcatagctcactgcagccttgaactcctaggctcaagcgatcgcctcactttagcttccccagtagctggaaatataggcgagcaccatcctgcccagctttgtaatgtgctttgaacagtgcttgacatcatagtaagccaccatatatgctttgttttaaagcaacaaatctggcctgtcacggtggctcacgcctgtaatccagcactttgggagggcaaggcaggcagatcatgaggtcagcagattgacaccatcctggccaacatggtgaaaccccgtctctactgaaaatacaaaaatgatctgggcgtggtagcgcacgcctgtagtcccaactactcgggaggctgaggcaggagaatcacttgaacccaggaggcggcggttgcagtgagccaagatcgcaccactgcgc

SEQ ID NO: 917443 - DNA, 4001 bp, Homo sapiens
gcttcaaatcagccaagctgctcacgttcctgttgttgcagttcatctttaaacccgaccctgggatgtggtcgcagctgcagcccccagggcagggtaaactgttagctaagggtttgttcctggagctacccgtcgctatcgctgctgtgggtctgattttgatctgccagttgcctgggatctttgtacctccgtttggagcagaccctggtgtggcatgatcctcttgcccatttgtcttgaaaggagttggcaggggtccaggagcaaaggtctcttcttgggcagggggcgccgggagactagaatccactcggtttttcaaaggacacaagtcctgttcggtggtttcattgaggtctttaccctgcagtctggtgggggcttcgcagaccactcggccgatcagggcattcttgggaatgttttccagccattctttcagggagagcagatcacaggtgcagtcccaagggttatcctctagcaggatctccgcaataccagggatttgctccaagacctcctcatagggcagcgttttcagcctgttaccccggaggtcgaggtgggtgatgggcacatactggaacacgttggcaggtagggtgctgatgagattgtcatttaaaatgagcacctccagcttgttcaagtcctggaaggcccccgggtctatatctcgtaataaattaaaatcagcctggagatattccagatcgtccagccccagaaaagtctgctttcgaaaagacttgatcttgttgttgttgatgtgcagccttttcaccagctgcagccccagaaaagcccccggaacgatttcatgcaagccattgttttccatgtgcaaactaaccgcattataaaagttagcgaactcattagggaaaagtcgagtgagggaattgccatgcagaaataaatggtaaaactgggaagtcggggcagtgaaacgctgcagacttgtgaagccctttttttcacagtctacgtgtaggtccccttctatctcattgcaggaacagatcttctctttgcaaacgtcccctgtaacgtttccagcggcaaaacaaagagacgtctccagcaacagaatccaaagcagcatttttaaagcgagcaattcatccccgatctcatcacaaagtaacagcgaccatcctgctcgccacagacacaattcaagttcatttagtgctccaatgtccgaagccaggaaaggagaagaaaagggtttgggggggtgggggtggattccttcctccctaacccccccgcactgcaatagcccagacgccagtcaataattatatccacaaactatccaggcacgtagtgcaaggcaagcaaagaaaaaaaaaaaaaaaaaaaagtaggaaaaaaaccccactcccccacaacactttaaaaataacagaaaaagaagttaaatatatacatataaattaaaagtacacccttacagaatctcatctactgatcttcactgatcagaaatgaaacaatgctagtaattagaagcaagtgcatgttagagaaacaagcagagggtttgcagcgtagtacaggcgcactgcctgtgcatggctgtgcgtcggactgaccttgcctctctgatacaaagcagggttttccgcggcttctgttgttgaggctgctggtggagttcttgctgtggttgcgggttgcccagaagtccccccgaggtgctgtccagttcccccggtgctgaaatcacgcccgaccgaaggactcacgctgcccagccaatggcgctggaaaatttccgcaatcgctgcgttttgtggttgtccatccttttcctttcctccccttcggtcctcttaaggcttttttttttcttttctgtgctctcgctctcgcttactagctcttcttttcctgttctccttctctttcttctgctctttcggaattacgtggaggggggcggagggcggggggcgagttgtctgagggaggaagagagcgcgagaatgaggggaggggggcggagaagagagttgctaagaagctctgctcgttccagcctggtgcactctgaaagatctgacaccctctgctgatctgcagtagcaaaaatccatctggctagggaatgctgaaagaaaaaaaaatcaatccacgtacagggcaagcgttaaaaatgtgggcataaaaggctgacgatctacatagatgcttattttaaatggattatttgattatttttgcgtgctggaaactttaccctttcctttccttaacgagttcacagcccccaccagctccaccattcggaaaggagtgcttttaaaacatttatttcccaatggcttgaataaaattagtgtcagggtgtcaagcgaacagcaatttgaggtaattatactgcacgccattttcatcggttctttaaatgcatttcttccttctctgcggcacagtgttttacgctatttgatgtctttgaaacatttcttttggtatgttcaaagtggctttcggaacatatatgttacataatatcataattgagtatgaatttttttgcaaggtatataaattaggcatatactttttaaaacttgcagaaatttagtcaatttggtcattgagagttaggttctttgatatttcttgaatgttatttaactctggagggtgaaacacaatgcatgctgaagtccttgattccagtcccgaaagctttaactgagaaccggaaaagaagggagagggggcagggaaaaatcccaagatgatttgtgagtgctgttaaaaacccactggcaggcaggcgcgcgcacactacacgcacgcacacacacacacacaccccactgacaaagttttcacatcagtttgaactaatttaaatgtttacaagtaaataaccagttgcattttgagaggaggagatagaaatctctggactctaaagctcagcgagaacgctctctgcaggtagccggcagctcctcttcgcgcagatgcttgttgggtcactgatgctggggaaacacgaagctcaggctttttccagttaaggaaacaacagattccaaactctgagcttataaaaatccagtaatatcaccttctgggatggaagaaaacgtgaacatgctgcttccgtgaagcctcttttgctgacttttcctttcagagtcgacaccttttcacatcaatacgtcctaaaatatttatagatcattttaggatttgaaatttttaggtcttttaaatagagttactgtttggccctttcttcactctatgcagagaggatatgtttacaccacttgcctttttaattaggtcttttgcaagttggacagctgcaacgagcttgctaatattttgtgcaaaagagcaaatgttcaaggaagtgtgtattttgagaaagatggggagtaaaaatttgggggaaaggactggggttgggaaaattcccaaggctagggaaggtcttaaagatgtttacaagatttttttttctgggtcagaatctaatttctaggtgggtggagaaaatttcatatctatatacaatgttttcatatgacaaaatatttttgttgtattcctctggtgaaattcagtgaagggaggtggggatgaagacatttcagtgtgtgtgtgtatgtgcatgcatgtgtgtgtttgtgtgtgtgcacgtgtgtacactagagagatcttttttagacatcctgatacacttctgaaataactctgttctcatttaatttgacccattaccacatgtagagagtgaaaaaaaaagaccttaatcaatttgaaaccattatgctaaagaaatgctatgcagttgagaactgcagatgtggaggagttcaactgaaggaaatcatttttctgtttcttcttaaataggactcaggtctaaaatatcttggcccaagaaaccactctgagaaaggaaatcagccttatggtgtctgtgattaatagggttaggcaagactcaagga

SEQ ID NO: 917444 - DNA, 4001 bp, Homo sapiens
ccctgcgaccacttctcattgatcatgtcagcgacgctaccaaaccgcatctttaagccactgaaatagttctgcacgatggattacaaagaactcagcgaaggtatccgcaatctccgaatacctcccgatgcctagagtttaaaaaggacgttcctaccgcttaccgggaatcagtacaccaaggatcagcacgaaagcctcccttaccttgggctccgcgtctatttgcaacggtaatagcaaggtttgcacggaactaccacctcgacagcatccccatctttggagttgcttattacatttaattgttaacgctcccctctctcttttttttaatctcagggaaaggacgcctgggctgattaagaggcaaaatagaaaggtgggaggaagaactgtaagcgacttaggtcagttgtttaatatccgaatttcatctcccacaggaatcaatatgaccccctcccccttttttttcttgctctctttttgtccccttgaaggcttccttccacttcctacttctgatcaacagcagcactcttaaaggaaggacataaatggaatgagcgtgtgtgtgtgtgtgtgtgtgtgtgtgtgtgtgtttgtgtgtgcgcgcgcgcgcatgctgcgttggttaatggggtggaggacatttgatagaaatgctggactctaggaacctatgccttttctctggtcaaccttgcctttgcctcactaccgaagtctaatatcgaattgcaactccaaactaaagccaagatgtttccgagacagcgggttcaagcctggagaccttgctcctgatccccaagtcgactccagcccgcgttattaaacgcccctgcattcaaacgcacatgtatcagtgtgcctgcgaatcattcacgtgtggccacccagacgtgtcgagatgaattggaaccacagtgcataaacctcgcaagtatccccgacctcccaacgcaacggtaaacgtctcccggcttaaaagcggcaaaaacatccccaccccagtgaaagcaaaacgtttaccttgaaatttcagttctccgctggatcaaatccgcacatccattcagcgaggttgggtcccctccccctccctccctgtgcttccccgcccccattcacctcccaccccatctgaaagcccattgcaaattcagtccagccagtattaaactccagcgtttacaactttaattcagttctagttagcaagggtcgaagagcttcctctcaacccactcccttccccctcctccttgctagcaaaggagaccaaaaatttgagaaaataaagttgaatgagcctggggaggctgacattctgacggggaaacgcacctccgatgcaaattcgcgggtgcgctgaacattctcagattctcagatttttttttttcctggagggcgggggcgggggaactattcattttctcccaaagaatttagatactggatcaccgccctgtacgtccctgcagtaagcagcatggagcctctcggactggagcccagcacccaggccgcaccggaggctccgggcacagctgctcaagcagcagcccaggcagaagcacccggagttccaggacgcgaggctccccctcccccaccccgccccaaagagaaggaagggaaaacggaggaagaaggggagggaggagagggaaggaaaaccaccccgccacatagacacacacacacacacacacacacacacacacacacacacacacacacacacacctcttttgcaaagtaaacgatagacttacccagtctcacatctccaaggcccagtcatcatagccaccctttaaaaacacacacatacacaaaaaccctctttggggtatgcactaggtttctcaagcccaggcagggcgaggagactgcgagcagcgcagtcccagaggctggaggaaagaggcgcccggacgcctccagcctggggccgccgccgcggtggcgaccgcgggttccggggctccccaaaaggctctccccggtgctctccgcggtagtcggagcgggcagcagggttggggggtggagagcggggggcgttctgcagcggcgggatagggaggcggcgggagggggcggcggaggtccggctggagaggcgcctcgcggtaggggccgggagccggagccgggcggggcggggagggggagctgctgggaggggaggcacggagcgggaggagggggacgcggagaagactgcctggccccgccggccccgccaacgtgacggtcagccccgccgagcgctcgcacccgctcacactcatgatcactcgcacactcgctccaatacgtgttaaggcgcgatcgcggggtccctggcagccttcgctgcaccctcccccccacaggggtactcacagttgccatctgcatagggggcaactttctccgacccagctgtggccgccgccccctccagcctcctctggctcctcgcaccctccggcctgggttcgcgccggccggccctcccctcccccctcggctctcctcctcgccgtcttcaccacattcccccctggtcagtggcgcacgccgggggacgagccagagggagcgggtcgcgggggtgtgcatgcatctcccgccttcttcttgcagcgcacactgtacatggtagtgagggggcgagcaaaggtggcaccggcccctcggctgctccagcgaaggcggcggctgcagctcctgcgctgtcctccgccccccagcgcagcggcgaccaccgcgctgggatcccgccgacgctgtctccgcgccgagcccgccgccgccgcggcccctaattagtatttgagaggctcttgcatccctttggcagtttcatcctcacggtgtttgcagggtttttttctgtatcccttccccagatgcggcgcacaatcgtcattagttggaactctctatcaccgacatcctttggggtttctgggggaaggggggggcgggcagcaaccgcgtcgttctatgcctgtggcttgtcctggcagcccggtggctctaaaaaaaactccgagaaagttgcgtcttcctcccgggcgccgaggaggtggcaacgcggtaagcaacaccgggtctctgagacagctgctccggagcgggtgcagggcccagtccagtgcacttgtttattgtcgcgcctctggtgcgagccaagctgcagcagacatgatgggcccggggcgaagcgggcgctcggtggccgatagatggcagccgagggcgaaggcgtccctgggctagggcggcgcaaccggggcccccttggatgtcacattcgtaggaagagagagaagtcttggaccatgtgtgtaattcgagcgtgggactgtgcaattctcggattgggaaagggaggagtggaaataaccccggcagtgccaggcttgctggtggtcaggaacagatgattccagccctgtgctgatcgcctgccttcctcctgccattcagaatgctgctgtctcgtgtacttactgttaaggatcctggaaaagggagtggttcctcctagctgcaaacaagggcgctacttttcttttctctttaatagaattacgttttataggtgtgtctaggcaacacaagggaatgtgaaagactttcagagggaatgtttgtgaatacatctggtgtgtactaaaaagctggaaaacccctaagtaaatgcaatatcgatagaaagcgagtttcttgaagagtcatctgctaaactccactagagtcatctctacagtaagtattcttgggtctttccatgaaaccagacacttccatccccaaaaaggggtctttactttcataagacatgttttcaatatttgtaatattagacctgccgttcatcccgggtataagagaaaagttgataatagtaagtgacccagtgcaggctgagtgcacatgtgcctgttcctttgataactatgtagttagtttctccatgtaaatatatt

SEQ ID NO: 917445 - DNA, 4001 bp, Homo sapiens
aatattgaatttctagaagcagtatattgcttactgcttcttaattacgttatagatgaggtggaaatgataaaaactaaagaagcaagattaatctttaacacacatttcaggctgttgtaaaagaataaacaatgcttcatataaacttctagcaaatgacttcctaatgaggtcttgaaacagtctttagggcacggaatgtcatcacataattaagcagctttaagcctttattaaaaggcttaaagtcgcaaacaatgaaatctgaaacaaactgtaccatattaaactttttgatgatatttcaaattcagtaaaagaaaaaaaggatggttcagaataacatcacgtattctaatcctgaaacacataacaaatgcatctgaaacagcaattcttaaaaaggttttgccctttaaatgacagttatgcaaggtaaacatttatagctctaatgagatctaattttatttccttcctttaaatattatactttaaacttatataaactaaattgaaatataaacacatcttatgactattcaacttttcaaaatagtaatcagttttcatttttgttgtttgaaatatgaacagtaactgaatcaaattaaaattcacaatcaggtaaaacataccagaacccaatcaacaatcctgaaagtaaacttgcattccctgaaaacatagtgttttattgaaaacacatatagtacaaagttcctgaaaggcaaaaggcaactgaagaaacaaaacaacatactgcctctgtgtaaagggaaagttagaagattttatttttctgtaggtaaataatttgattttaaacagctttgtgtgctgagtttataaacaagcagcttgtagttggagtcttcaacttgtggattagcttccacaatcactaaaagtacttattcataaattaccaagaaagaataagatttatttcaccaggtatagcatcagagaaaatagtaaataatttttcagtgataaactcttgttattttgtaaatcctgtatgaattttatgctcttcaaaacgtgctaggaaacagtttctaatcttttcagaaacacacacagatgtgaaaagtggttctctactgacaatatctgatacagtggtaaagaggtcaaaagatactcattgacatgttttctgagaatacgtattttcaaatcagaaaataagtagcatacaaaatgcaaagaattattcaatattctgcttatatttgcaattcaacattcgcatttggaagtgatccttccttcagaaagcacacatatttagtttctaacaacaaactgcatgttgcaaaagaaatagtggaatattatatttgttcttctctgtagccagctgttagactaaatgtctgcttctcagagaatacaggcatctgctccagtgttagttgtgccagtaagcaagaatgaaattgagtatcctttaatgcaaagttgtttatttaaaggaagcgaacatacaaattcaatcactttactataatgcaaaaataagtataagaaaagcctggaaacattcatcttacctgtaaagcagagactcttcctgacgttatctgtaatgcacagctggaagaggtgttcaaagtaattcaattcctttattaaaaaaaagaaaacaccaaccactgcgtactttcttctcaaatatcactttttgtcaagtcccatagcttcataaagttaaaacctctggtcaaagatagaatactgagcatttcattgaaaatatttcaagcagagtgcatactagagcatcctgaagcaattgtccctttttccctcaattaaaattcacggcatacttcacagctatgctgacttttttgcatatagttaaccatttgcaagctgctgaatgcagtaagtaaacaagatgtttaacagagctgagattgatcactcttgctttcttaggttgtagatccaagctacagcaatgttctccttcctccttttctagtatttcttgttagctcagtttgttattagtcagattgccaagggctgggaggtaggcgtaaataaagagacttcttggcttttgactcagcctttaagcccttccccatcagagcgttttaatctgccagtgtcatataacacaagagacagctccaccttgggactgctcaactcctcctctttctgcaaatggtctttccactcctttcaataccaaatatagtgcaagtgaattttgatggaaataataacacgtcattttaaatgcttaatagtacattgtgttatagcaagctaaataatacgttatgttaaattctcaactaacactgttctgtagtgtttgcacacatgtgtgcaggaaacacaagaatgctgcctatagagtagttgcctcttttttttctttttttttttaaatctggtatttatagttgaaattgtgcactaactagattgtaaaatgttaacacgaactgcttccctgcaatatttgtatttttgtattcaccatttaacttttttaaagccttatgttagggactctaagtttttacttcattatttctttccctagagctaatattcaataattaaacttagaaatgaagatctttcagttattttaatatatttatttagaagaaaagcataattattttaaaatatatttaaaaatctttaaacacaaaataattatcattgataaagttctgtttatcactttcaaaaatataacattatatctttacagataaaatgaaacaagtgaaatatgtagatattacaataacctgatttgtatagtgctagctcagagagaatttattcttaataggttatatcttaaaagttgcgtgtttcttcagctcttaaaagtttctgaatcatcaccattattactcttgtcagattccttatttctcaaaaagcctgtggtttaaaaagttattcttcttacctaccttcctgaactttttcacatccaaagtgcatatactagatgctgtcttttatttgtttattctgtttagaataaatacagattctagaggccttctatgtaatagtaggtgtcatttcagaaagtgctgtttttaaaaaggagagttgatatagtttaaatcatcaaaatagaagaatatcacattattatttaatgacatacactcagattgatatagttttatcgtctcagggtggtatattggctctaaacacataagggctctgtgggaattttcagtattctcactttactttatatttcccagtaattaagtttctcgtttattttaatgacattttgtgctttaacatggaaaagagatgatgatacagaggagggggttcgaaaatacaataaaaataaaaaaatgagagaatgaagagtataagtgaagttaaatataaataattagtgtttggcacaatttcctgctagctgctagccaaattaattaaatcaaggtaattatttagatagatagttagaaattagaattttaatcaataaaaaaagaaggggcaagaataatttccctcccaaccctgtagtcctaatttttcacatgcattcctttaggttttgcagtcaagtgcataggagaaatattctagtagcatagtatgtggagcaaaatttttcaagcctacatatggacaaatgaaagtaatttctttgtagattgacacatgtttctctcatgtccttcaatttgatcatgtatctattttatcagtcatatacacatagcagaaatttgaagatttttatcatgaattcctttcctacataatgaatcttgtctttttagtgcataaattactgggcaattgcagtaattactggtcaattccccatgatggtaagggagagaaatattgactaaacacacttttttaaaaaaaaattattcagttgttctataagctttcattgggaataaaaaactaaaaaaaaattatttgaggagcaatctataacttttaattta

SEQ ID NO: 917446 - DNA, 4001 bp, Homo sapiens
tctttgatttttagtaaacactgcactgataaacatgagtttgttcagatcaagagtatgttggcattctcttaagcatagtttgaaaccagagagctcaagcataaaacagctctgacaaagataaccagtcaagcataaaaatgggagttggttgtgtcagaatacattaagaggccgaaggctgtctggcagacagctgtcttgccatcactgaaggtgactattaccactaaaagttgtttttcggatacagtacttgaaattgctgtcatcttgtatttaaaatgctccttatttataaagcgtcacatccttttcttatctgaagcctccttcttggataaccacaaacctaaaagcagtctaaaattgtgctgatgctttcctacaagcacagggaaactcttatattgaatctttgtctatttggagttgagaatgtctttggcttttattttaaatgccttcttaaatatagatcactatttttaaaatgtaaacatccaaaggcattccctcacacttggaggaatgctaaggcaggagacatgcttgtagtagtcacatttcactttcccagacgggtgccacaaacgttccgctcagttactgcttaggaggcagcattattaaatgcctcacgacttaacggtcagcctccatgcttcttgctaacctacatttccaaaagatcatccgagaaatctggcaagccaccgaaatggtactagtaaactggatccatccaaagcactccacagtgccctgtgggtgtgtttctcactgtaaactactgggtaaagaatttacatacaattttatctccaaactcgatttgtatcctttgtaggttagttctcaggagtacccactccagcccagaaataagtcaacgtagtatttccaaactatcacttcaaatgtccacggtcaagggcaggaggaggaaggaatagtaacgggaaaacttgtcagcgattagccatccataaaaatgttctcccagcgctcctccttccgatcacaaagctggcgtcaggcagtctcctgtatctgcttcccacctcgccccctcccctctgcggagagctggcaccgaggggcgggccaaggaaaagacaaacaccccggctccgacacagtccaagcgcgagcccggagacacttcaacaacattcctaactttttttctcagttcgcatgcctcaaaggtaaacaaagcaaaaagcctacgaaacagaaggcaagtgaggccaattcggcgctggcgagtttaaaagtggcccccaaagagtcacaatgacgacccccgccgccccctctgtccgctgtcccctatctccagctacagcaagcgacccctcaggcgcctatcctggtccctgcccacgccccgggccccagccccgacccgaccgccgcccccgccgcgggtcgaacatcccctgacaggtcccggggcccgcggcgcgggcggatgcaggcgcgaggaaggcgagctgcgccgcggccaactccccagagcagtcccctccggccccgcgcccaccccaccccaccccactccaccccagacaggctccaccaaaaaacccgggaacaacgaccgccaaaagccaagcctcacgccgaggagcctcccaggctgccccgaggacgaacaacttcgccctccactcaatgcgctcacacgcacgcacacaagcagcgcgcggccgaggagggcacgtcttacctgtccccgccgtgccactcatccctcccccacccaggtccggcgcccccaaccccgcccccgccgtggtcccccggccgcccgctccgagcgccgcgcactcactgcctggctgcgcgcgcccagcgcctgcagggcccggcggcggcggcggggaccgagacagcggctgcagcagcggcggcggcggcggcggcggcggcggccccagccggcgtcagtcagactggagccgcgaagcctcatcgcccgtattagtgcgccgacctggaaagcggccagggagccctgcttgcggcccgcccccgcccgccgccgcgcgctctggccgctccgggagccgcagaggagggggctgcgcgggcccggcggggggcgggagcgagaccggccccacggccacgtgcgcggaaactcgcggcgcgggggtggcggggtagtactcctcgcagcggcctgcggctcggttcccgcctcttccccacccccagccccgcgctgccctctcggtccccctgcgcgaccccaggctcggcccctgcccggcctgccggggtggcccgggggtggggtgggagccctttgtctgcgtgggtcgcctcgcgtctctctctcccaccccacctctgagatttcttgccagcacctggagcccgaaaccagaagagttgtcagcccaacaagaatataggatcaccggcccatcagtctggagacccttctgagctgctgttcctcacatgtttctgggccctgatagtgactctcacttgccctgtttgttcctgatttgcttttcggagtaaggggatcctgtccccatggacagtgacagagcaactgggccgcaatggcataggcagaagaaaatctaatcactctgggggtgagtggtggttaaaacgactcatgtaattatgtggattgtaatttccttacacatatttatttgcttaacaacccagcatgtgagatatattatctaatctaataaaagatacaaacttatgggcacacagcaatgttactgtacaactttctcgtctcacggcctggctgtcccccaggtagcctgcctcttaaagtcactgtggactcctggaacccactcagaaacgccacttaggaagaaccacctctgattccccatcagcccgtagttcctcacagaaaaggcatttgctgcaggggtgaacgtggaataaagccacagggcagttttcagcttgctcctgtgtgcaggaaagtcatacctccagttggccccgatggcggctccgaaatgtaaagcaaggccttaaatttaactgctttttctagttctcaaagcactgcactttcttcatggcagatgctatttttgcattattataccgttgtagttgaacggtgatttgtttaaaacaacatttgcagcagaaccttaaataccatgccttaacctcaaagtcttctttctacactggcccagatacctctgcacccggctatgtgttgggtttgagattgtcctgggtgagaaacaccaggaaacagcgggaccggtaagggctacagattatatattaaggattaggctggatgtggactttattgccagtaaactaattaggtcctcagaattgataccttgtggctcaagtttttaaaaattaaattaagaaaagaaatggcccaatcactatctcagtttccttctcgtatatgagcataatgcagaggacaagatgcagagaaagaaattataacctctgcagcgctggctcatgcttctggcatggagtctttctcagttcgcagaattctcttgactcttggcaggcctttgatttagagtatgtctagtctgctcttttctgtacgttctcatttacataccaggatatttctgcacgatgatgactttttcctgcctaaacattagtctgtcactgatataattcctatcatgtattcctcaaggctagtatagaaagttaatccattacgctcaagaacaataagatctggtgagttccaagaaggagaaaatgcttggcctaagacagaaggcgcagtgttgacactccattttacagaagctgactgtcctggttaatggaaagctagacttcgctttatctttcccagtgatttcttgattggctgtggttttactgcttaatagaacttccaccaaaacattctgttatgggaatcatatgaaaggagagactcagaggttgtgatttggtagaaccgccagtgaaattttggttcagga

SEQ ID NO: 917447 - DNA, 4001 bp, Homo sapiens
acgcggaggctgcaggacagggttctggaagctggggcctccttgccctaatcctggaaggatattccacatctaaatcaccgaagcttcatcctgtgatgcagaagctctccccttgtgaacaaccaacacaggaagtagtgaaacctggtagagagaatattatctttctccaccttcaattataccagaactgcctccagggactttggcaggtttgacaaatggcagaagaatttagaagattttctttgctggcaaagggagccaatggttgggcacaaatgtgctgctgcggttgtttgtacaatgaaactctagattgtaggcagaaatgtcaggttcctttcaactctcttcagagctaatctagttcccatgtgcaaactcaatctatagcatttgggtaaagaatactcagtcctctgctgtgacaagaacaaattcatcacccacaccatacattgtagctaagggcatcatcgtgcccacatgaatcaccaggcagagacggctgccaactctgaaattctttactcatggaagactcacgtatactaatgccgactatttacgcaagcacatttctccaggtggcctggagcagtttacaagatgctggctcattcctcatcatgccacttggaaggagagcaaaaggtggggaaagaggaagggccaacatcatcatctgcattttatgtggggaaactgaggctcacataagccgtaaagtgaaatgtatagacatttatgagtcagaaatcgaccatggaagaggcaaaatgagcttatctgaatcatgagtggactatttcttgcccaacaatttcatgcagctcttccaacacaactgttttgatacagcagcctcaaaacaagccaaaattcagactcgctgtatttggtttataaccagtttcccatctttcattccttctctgacttctacctgacttctgaatttggttgaccctgtttttttgtttgtttgtttgttttgttttactttaaaagaccctcaaccctcctggagtcctgacctgctatttctttcattttgaacctctaccagtcctttccttcatctgttaccaatccatacacccttgatgcctggaggtaagattgacaatggagggggggaggtgaagatcaaggttgaggtgaagctcacagatggcctgcaagatgcctattttactcatcatttattttttaaaaagctgaacatttatcggctgaatctttgagccataccaaaatatcctcatgtcaaaatagctgcagtaaagtggttctattaaaatagctgcctccaaagaactgagagtggagatgtcacctgcttctggcacctgactttggtcctcttctgcgtggcattgccttctgctctgctggattctggcgtatggctcatcagaggaggcactaacatcagggctgccttttatcttgctgatccaagcgaggactatgtaggtgtcacagatgaaactcgtccagaagccgaacaggatgctaatggcatggccacgtgtttccagcaccctgtgaggcagctggctggcatcaatcctctccccagcttccatcccacccccatccacccataagctcttcttgggtcagaaatgcaattctttgatggtgccagacagccagatgatgctggaaagaagaaagaaaaagaaaaagcaggtttctaaattaagcacaaggctcgtttataaaaataaatagccacagcctagcaacgtgctcacagctcagctttcctccgtaataaaacctctgtggctgaagcctgggatgacacagccttcagagggccccacgccctggccctcctcatgccctggcctctcccaggataatactcacctggagagtgctgacagtggtacttttggggccccactcttcattcaaggccaaccaaaggccaggctccaaaaagcagaaggaaggcagagcttaatgaggcccatgaacacttacagactcttggcagtaactaatacacctgtagcaaaagtggttgaagttccttgggctactctgttgaaataggaacttctagttaagaccatgtcttctttgttcaccattgaacagtactcagctaagcacagggcacgtattgagtactcaaccagtatgtgaggaaagactggttagaggtataaatgaatgaatgaatgttgccatcccattattgatgctctccaaactcttcactacaaatggagtcagttccagaatccaaagccagcattcttctcctgattatgacatgcaccaaagaggcatcccctgagctggatgtttaaatcagagcccacagctgaagtgagcaccaagatgtactgagcaagtgtggactcttactgatccaagtggtgaggctcttacaatgggcaagggcagagggcatgcgatatgtaggtaactattgttagcattcctgaatcttctcctgttctttaggcagcagcagcttcaagggtgaactgttgctcagcagagaaatggcaggaaaaaataggacattcgcttctggccttagtcctgttggaacacaaaaagtggagtctgcaatgctgttggaggctcaacaggtcaaatacatcagtaatgggcatggtatggctggggtcatacggagacagtccttagagcactgaaaatgtgatcatcctgaatcccataaggatccttatgaggttagaagggacaatgtggctccactttgatgactgacagcagttgctttggtgagtttctacgtattcccttgtgatcagagagtggtacaggacagcatgtcaaaatcgtaaaccaccatctcagagcaaggccccttagttacaatattaaaaagatcagagaaattggcacatagcatcatttagaaatctgtcttcaggcatctttgtctggcctggctggaaatagtaaaaccatatttatgtcattgagaaaaaggttcttaattaaattcaaatgtataagaatatatcgtaggtctatttttggaacaataatctgggaacaaaaaaaaatctaaacagcaacaaaacttgtacaatagcatttagcttcagacagcagcatacaatagagaagaaggagtcctcatagactctggactcttagattgattcaatcccacaagctagagcaccaaagtcatggcactgggacatttaggaagaggaactctagcagtgacctgattaggagacagctccagcagagagtcagcacatagactggccaagctgcccccagatctttggtgatatctctttggtggagataaaggaagccctttccaaagcagaccaattatggcatccacaaccatagtccctgctccagcctagtgaggacacagtatgttccataagtccctaaggctctatgcccagggctcccacttctgacacggctgctcaaggataagaccccactgaccccattctctatggagggtacagaaatccataagaacagagcccaatactcagctctgtgaccttaactacttggaaactgattttctttgttcataaaatagagagagtaaaaataatgctttctatctcccaagagtgtacgaggatcaaatgaaacactattatgttcaagtgcttcccagtctgcaagctattgttccatgtgaccatgttttataaaatgtaaaggtatacagtgagaagtttgcttctgatgtgaggattgagacttcctttgtcacaaacttttagggtgctgtctggttccatcttattcataatactatttttttttcagagacccctagccatttccttggcttcaaataccaaagacctagcatttcaaaattgtgtttctgtaactgcttctttcctcttacaatccctcagaaagtgctgcaattctagaatgcatgaggaaccttggggctcacaaagtccaccacttcactttgcagatgtacacacagaggc

SEQ ID NO: 917448 - DNA, 4001 bp, Homo sapiens
cttcgtttgatgaaatatctttttctgtttgaattgcttactacacctttgtaaacgaaagtaacatgtattcactgggaaacactaaaaaattcaaaaaagaaaataaagtgtaattccaccactcagggtaagccctattaacaccttggtacataccctttaagtgtgggtggttttaataacacgacatcattgtcaccaagacacttcatccactgtttcatttctgtgatcacagtaacatgcagggcactctagtctctacaatttttaaaacactggatttccatttgcaatctgtggcaggctaaacccttaattagtaacagcaggtgctgaagtgcttaaagcaaatcactcctacattttagtgagttgttatttatgtcactcttatcaccaggagcagagcagcccacaatcagcagcagctgcagggctgaggctctcatggggcaattgcgggccttcagtttcctcaggagtcaagggatttaaacagctctatctggagaaactgagcaagcggcttttctcacaaaggcacacaaaggggtcagttggggcttcacactctcttaaggggaggaaaccacaattatttatgttctactagataatcagatatttcattcagaattcattttgtgcagctttgcctaatcctgcaccataaaatactatttttccttagagtttaaataggttcctctatcttgaaaaattaagaaaacctgttaaacgggtccacttcaaagtgatcctaattccatttcagaaagcttgctcttaagaagagatgaaattaagtttgcagagcattctaagaggtaataagactacactcagcacaaaagattgctctctcctatttatcaagatgcggaaaatactaagatgaaagcccccctccccagctggccttgctttctggcgtggggaggtttcgcctacgctttcctcctagtggggtaatcatcacctttcacttttatcgaaaacagttacaaaagtgattttgtgctttgctaaaggggctgaaaaataaggtgctttcaagagaggccagcgggctttttgatttccatggaggtggcaaatgcgtgcagagcaggtcccgttcccaccacggctttggttccacacaaagttgcctgtttggggggaagctccacgaaggacactttgggatgccacgccagtgcccaaactgaaaataagcatgcccagctgtgcagagacgggaatgcaggaaaataacgcgcctaaataaactttcttatattaaaaataaaaatcatcgttcacatttttgtccagccaccagccccagagtgcctactaaattgtgtttctaggtagctaacttcacaagtggccttctgctcgaaaaataagttggggaaacgtcaagggctaagattttttttttttttttttagttggagaattcacatttattgagtaattgatgtgatgcaatctgcaatttttggattcaagataattttcactgaacatttcatcagttaatgggttttctttataacacgattcagttctctttcttccttggcctcctctcccgagataaatcagccccgtcccccaacctcaggccccaagggcctggtggcacccgggggcaccctcagaagccgggtcggcgcttccccagctcggggcgccgggggagagtggactcgcgtcctggaaggggcccttcctgctattcgctccccacagttccccgacaatgagagctccccaggccgggctttgagggccgaggggaccaccgacctagggcccgcccgcgaggttataaacgcagctgcctccccttccacagcctcttacctggcccgagatctggcagtgctcctggcagataattgaggaagccatggccgctgcgcacgtgctgggtcctggggcagcctcccagcaggaggagctccacagccgctgcgtcccgggcccgccccctgcactaatggctcctggccgcagctgagggcgagcacgccccaggcgcccttaaagtggccctgtcgccagttctggcgcgtgggggagcagcaggccgctctgaggggtcaacgcggaacccgggtcgggggcctgcccgcgggggctactcaagctgtcctgggggcccttaggagaccgcgtcactagctgactgcgcactccaagtccccttcccagggcagctctcacgacactaagccccgcgtactcactcccactgcgccgcctggggaggcgggaggcaaggcgtcatctcaagatggtctaaaaattttaagaagtcttttcttacgggcagtctttccagtttaaatgttaggaattagcaaacacttgggtttgttttgctcttttctaaacaaacataaacagaggataggaaaggcgagtacttctatggtgatttctttccaaaccactaagaaatttaaaatgttaggccgggcgcggtggctcacgcctgttaatcctagcactttgggaggccaaggcgggtggatcacttgagctcaggagttcgagaccagccaagccaacatggtgaaaacccgtctctactaaaaatacaaaaattagccaggcatggtgatgggagcctgtaatcccagctatctgggaggctgaggcacaagaatcgcttgaacccggaaggcggaggttgcagtgagccaagatcgcccactgcactccagcctgggcgacggggcgtgatttcgtctcaaaaaaaaaaattaaaaatattagaaacacttcatttttgtgccgtgatttaacaaatactgtccctattttctcaacggaaacaatgaggcgataaaattttctcgtgactgctgctatgtaaactcctctactcaaccttcactgaacattttactgagacctattgggcgtcagacccgcggaggatccttcctcggatgtgtcttgactactgtgccatgatttttcactgctgtaagtgtggtggttattgtggatgactgcagactctggatctcactagagcatataacacagaggagctctccggggaaccatctctgcaggcggtccctgggcaagtctcctggttcctgagcagctggtgctgtgtcctgggggtccgatttagatcccgggggcatgcaaaaatacagctgtgatactctacagttctgatgggaagaaaaggagcagatgaacttctgatgggatcattctgcattacttttggaagtgtacacgtcttaatagagtgtaataaatttcacttctattgcttttccaattaatcaggaactgacagtatccacatcaatatctgtgcgggaagtggtttgctcaccaatgtaagacagaggtgaagtccttcccaggcattggtgtagggtgtgaattgaggcagctttgagcatttcgtcctgaatgcgcaagcaccagatttccattgctccagaggtctagactagcaagtctaactctaatagacaaagacaatgttgaaagagaaacggactcatttgcttttaagtaaaaaaaaaagcccctaagattatgtgagaggaagtcatcactactgtgttgaaggaagaaaaaaaagataataaacttctcctgtatctagaatatgagtccaagcttcctaagaactaacttagatatttttgtttccaatctcctttaaaaaaaaaaaaaaaaaaaaaaaaaaggtcaggtgtagtggtggctcgtgtccataattccagcactttgggaggccgaggtgagatcacttgaggtcactagttcctgagagccaggacacccctgtctctacaaaaactaaaaaaaattagcctggcgtggtggcacacacttgtggtcccagctactccagaggctgtggtgcgaggattgcctgagcttgggagtttgaggctgcaatgatctgtgattacaccactgctctccaggctggggaacagagggagaccctgtctcgc

SEQ ID NO: 917449 - DNA, 4001 bp, Homo sapiens
cattttgggtggggggtcttttttcgtttttagaagaaaggctttttagaaaactatgtacataatctgacttctcctccccgcattgcaacgccgaaaataaaatttttcacaatgcatttacaagaaataatacaaaacccaaaaaaaaaaatggaaatgctcagatacataaagttttacaaaacccagaatataactccgccgtctgaaggagggggtggtggtggtaatctctttgtataaattaacaaaccaacccaaaagagcggtaacaactacaaaaaacttgtaagtgcttggacctgccttactacatttataacaaatgcgacgagctccgcgtcacttgggctccggcggtcggcgccgtccggaagcaacgcggaggaaagtgagcgcgccggccggtatacaaaagtgggcttcgcctctcgcctcgttttgacttttttgtcccctcgagcaaagaaaacgctttccgcttcctccgtaggtgataaatactgtacaaaaagtctcaagaaaacaccgaagttcagtctaaaacccaagtctggtgtcagcgcccggcggtcgccagggtctccggggaaggtgagtgggggacacgcgtcacccggcgttcgtctccagtattttccttttgacaagaatgtgggaacgtctgtacaaaagccacgccgcgccggggcggggcgggagccgggcgcgggccgcgagctcgtgggtcgccgccgcagagtccccggcgtcccgaaggcgctagatgtgcgtcaggggcaccgtgccgttcacgcccgcgcccgcgccctggtagtgctgcggcagcgagtgcagccggctctgcgccgcggccgctgctgccgccgccgggtcgcccccctcgccggcgggcaagtacatgctgatcatctcgcgcaggtccccggggcacggcgcccgcgagtgcgctggggcgggcgggctgccgctgggctccgacttcaccagagagcccagcgcgcccagggcgcccgacgacgcggccgccgccgccgccgccgccgccacggccgagttctggtgcgcgccgcccgcagcggcggcggcggcggccgcggcgccgtaggggaggccgccgtagcccgagggcgacgcgctcatgtagccctgcgagttggagatggggctgtactgcagcgcgcccatgtcgtagcggtgcatgggctgcgggttgtgcgggtgcgcgtgcgggtggtgcgggtgcgggtgcgcggggtgcgcgtgcgggtgcgcgccgcccgcgcccgggtgctgcccgtaggccagctgcgcctcctgcatcatggccgcggccgccgccgccgccgccaccgagccggggtaggcgccgttggcccagccgttgacgtgcgcgtagccgccgcccgccgcgccgcctgggctctccaggcgctggcccacggccgccgcgcccacgcccacgcccacgcccatggccacagccgcgccgccgccacccgcgccggccgccaggagcccgccggccagcgagtacttgtccttcttgagcagcgtcttggtcttgcggcgcggccggtacttgtaatccgggtgctccttcatgtgcagcgcgcgcagccgcttggcctcgtcgatgaacggccgcttctcggcctcggacatgaccttccactcggcccccaggcgcttgctgatctccgagttgtgcatcttggggttctcctgggccatcttgcgccgctgcccgcgggaccacaccatgaaggcgttcatgggccgtttgacccggtcctggttggccttggcgcccccgccgccgccgccgcccccgcctccgcccccgccgccgcccgccccggcggggcccgagaggttcgtgggggcctgggcgccgccgggcgagtgcaggtcggtctccatcatcatgctgtacatcggggcggctggcgggttcaccggcaccgcgaggagagggcctggagcatagacggccggggtgggagggagacggagaggaattcagacggagtgagacgggggcgggggggtcctagcggagagaagaatggggaggggtggaggcaacgacaacaaaaaaaggcagaaacacacgcactcggcgccggttcggctcgcaggtggaaagtttctcctgatgcacaaaccacttgccaaagaggccgacggtcggggtcgccgtcttcgccgccaccgcagcccaggcgccctcggcggagcggtgcaaacaggtgcagtcgtggccaagttgcagctccgcttttggggccgggagcggtgcgctgggcccggcccggggtgtgctgtctcctcgccggccgccgctgcgcgctgtctccttcctcctgcgctcggtcctcagcggcctccaactcggaggctgcaacttctagcagggcggcgcgccgcgtgcgctgggcatgtgctggtcccaggtgcccgggggaagccaggcgccagtggcggggggggggaggcgcaggggggcctgcagggggcgattacggtgcagccagggaggggcccggggacagcgggaggagcgcgggctcgcggagagggccggagagccggggccgccgagcccgggatgggctgcccgctgcctgcccggggccgtgcgctcggagcggaggcgcacgcggggccggcggcgcgcggggcccagcagccatacgccgggcccgggctgccattaaatgagcgcgccgcggccaatgggagccggcggcggcggtgatttgcatggcgcgctggcgagtgacgtggggagggagtagatacactgggcgcgggcggcggagcggggaggaggggaggaaggagggggagcaaagcaggaaggaggggggaggaggcccgggagggggtgacagccacaccgcttcctgagcgcgcgcgcgcggcggcggcggcggcggcgaaccccgagctcgccctcctcgccgctccccgcccgcgcgttccgaatgattaacgattgggttgaaaagcgaagactaagaaaggatcgtcgtggggtggggggaggaaacgcagcccctggccaggtttaaacgggcgcagtggagacccagctcctcctctgcccccgccggccaactctgtgcctgcagggaaggggaaagttgagtgcggggctggcacgtcgccctcagttcccccgagtgctgaaaaggaggggcgctcccttggacgcaggggataccctccgagggcccctgcaggttctctgcaaggatcaggcggctcagccatcccccgccctgcatccgttctcggccgcggcgtgcactgaagttcgccagtgcccgctcttgcagcgaaggccttcacagtccaggccccacaattcgggtaaagggggagtatttgtgtgggcatggctccatagcttcgtttagtatcagccctaaacttttgtggggaggagtctttcaatgagcccggggccatagtcacgcactcttcccaacccggatcttcttcctctggaaaaggaatttctaggaaggccgaacacaacaagatctatctggaatctagttcctgaacaacagttgaaaaagtttgttgaatcgcaaaataatgatatggcgcacgcttttctggagtgaatttcccacgagctggttgcctaagaacggagaaaactgcgtgaactgcgcggggccacataaaccgaatgaaaggcggggcctcaggacgggtctcagccgccggtctgcgtcatgcaaaggaaaggcctggctcgtggaaagagtaaggcattcacctgtggttatcattcttaaacctcaaagtggctttgatttgggaacgtgaaagagattttcaaacgcagtctcaagtagcatagcgctcacactaccgtttccaccagactgatctgaaagtggtccaaagacgacttttgagcccaagtattcctcctctgccctccccgaggcaccctgagatgagagtgcttgtggaga

SEQ ID NO: 917450 - DNA, 4001 bp, Homo sapiens
cttcgataaaattgcgattctgaaatagtttcgcaatttttaaaagttaactttgatattcgctcaaaatgtttttgagtctaaagtcgactcaaacttagggcaacgaaaataacacattttccaagcctcaatgttttcactgacatatacacatttacaatcttaaggtgaactcagccataagggaaaataggagcagtgcctttttccttttttgtaaactgtgtcagaaatccaagcgagtggactcagggagacttctagtagtttgttgttgttgtttgtttaggaagaaaatccaattgacaactttcatctcacaaatatttcttgtttgcgtttcttgcccttgagaaagagctcttgctctgatttgcaaatggcgtgataaacaaaagaaaccgtgatcatctcacacaaaaggccagattcgagccggtcactggtcaagaatggatctggttgggagttctgcttgagagaacagagatctgcaaagttcaaatagtacaaacagggaggcgaggctgctcagagccatcccactcccagaaacgaatgacacaagcagcttttcccgtgtgccagccatttcagacctcacatttgaacagcgtgcatgcaacacggaccgggagggggttgggggttggggggctgaggggcgaggaagaagaatgagaaacaaaaacaaaaccgaccatgaaacttccaacaaaactggaaaggccaacatgtcaaaaagttactcctccacctccgtgggtcaaaacgcaacaggttccgaagtgcaaagcaaacgccaactgctgccgcacacaaccgcctgctttcgagttggctgccgaagtgcgggtctgaaatgatcctgcgaattcacaggcctgctcgcccgcgcccttgcgcgcttggccactcctgccccgcctggcctctctgcctctacctggcacctatacattctatgtacatacaaaccgggcccccggtcgcgggagggcgcacggggaggccgcagcgctcgtacctatacatatgtacacgtgtgcacaccggtcctcgcgaggcggccccgcggggtcatagcgcggcagcgtaggccgcggggtaggggtccagctggggcttgcccatgcccggcagcaggatgtaggcgagcggcggctgcagcccggggctgggccacgcgctgcagttgcacgggatcatgtagcccgggttgcccgggctggggtgcgagtgcgtgtgccccccggcggcggcggccgccgctgcagccgccgccgccgcgccgtggaaggcgcccgcgcccgcggtcgggtagcccagcgacgacgcgtacgggaggccggacgaggacgacgagatctctgccattttggagcccaggtcgagcagcgagtaggggctgcccgcggcggcggcggcggcggcagcggcggcggcagcggccgactgcgggaagaagacgcgtgcggcggcagcggcggcggccgcggccgccttctcgggattggcgagcagcgactcaggcaccaggccgccgcccgcccccgcgtgcagcccggcgcccgccttgagcgcagggtgctcggcgtccgccacgccgcccaggccgtagggcaccgggaaggcgaacttgtccttcttgagcagcgtcttgggcttgcgccgcggccggtacttgtagtcggggtgctccttcatgtgcatggcgcgtagacgcttggcctcgtcgatgaacggccgcttctccgactctgtgagcagtttccactcggcgcccaagcgcttgctgatctccgagttgtgcatcttggggttctcctgggccatcttgcgccgctgagcccgcgaccacaccatgaaggcgttcatgggccgcttgacgtggtccaccggcttggacatgctctcgccctgccgcggctgcagcccgccgcctcccgggccctcgccctcggcccggaggaaatcaatgttggctgcccgcggagacccgctcggccggccggggctcgtcgcgccccggcgtcgctcccgccccggaggagggggctgggggaccagcccagggccacgccgcgccccgggccgccttagtgtctccggccgagcgctcgagcaggttgtctctgggacactctaacttctcggcggtgccccctccccgcggcggcagtttgccctttacgttctttgggtccttcgtctgcagtggcgtttgctggtgagctccccgcaggtagcggcggccgggcagagcgctcctcctcctcggtcgttctctcttaaatgcaaagcgtccccaaaagttgcgtcgcggagactcctcgaagttgagccgaggagcccgccgccgcgtgctgccaagtgccaaagggggctctcagcggctggagtgtttgggttctcctcggtgactttctcatttgacagaagcagatgggggtggggaaggcggggaggtggccctggaggaggaagaggagggggaggcggaggagtgtccaggcgtgccacgagaacgcagagcgcagcaatggatataaatacaaatacagcagcaccagcctgtcttcttggctccgggcagggtgcgccgatgggaaacccccaatcggctgggtgattttttttttttggaggggggagctgtcccccgcagcacctgcctctcgagtcttcctctcccgctgctggactgacgggtggggcgaggaaggagggtggatgaggcttgagcaagcgttggtcgcccggcctcagaggaagttctcccggctcgccgaggagccgcgtccggccgtcccctgggccatgccggctctgttcgctccgagccccttcaggcgcgcctgccgacttagggctcccggagctcgccggccgcggagggcagcgcagcctccacgcggcgccgcaggcctggcaccggccgcgtccccgcctcgctcttctcggcagccgcctggcacttgcaactaacttcgcccaagtttcctgcgccgcggcgcccctctcggcgcgctcctgggagcgtgcgcccgcgagtccgccgcgcccggggcccctctgtcctcgctgctgtggccagagccgagccggcgcaggggcggaggtgctgcaggagagttaaggaaaacgggccatcacctcagttcgcaggtccgcgctgtggcacctcccgctctccccactcccgcggcgcagggggccccttcccagcccaggccgccctctgcaccggctcaggtgagtgtggctacctgcatgtgtgcgcgcccggagccggcactgggtgtgcatgtccagccgcggctgtgtgtgtatatctgggggcctgcggaggaggtggagcccaggactcggggagggaggagggatcagcggagccgcctcccgctcccacacccccaggacctcgaattaacagatcccctccgccccccgccccctcccaatcctcctcctcccactccttttcacttgagagcaggtttaggcgagtggagagtccggagcgcgccggggagtctgcgccctgtttggcgttggcaaaccctggtgtcatcccggctacccaggccggcctggcgtgcagctgccctggttgtggccctggaatcctcgccgggaggaagaaggcggcgggcacgagtaggagagcctctccagctacggaggaagagggttaaacctggagaaggggagactcacccttgaaaatgtttgagactgttcctagcaagaaagtgctcattttccttggaggtccaggtgttgcttgcaacagaaacagaggcttctcgcattttcttgcactggcgatgcacctagtcagaggtagtggagtgaaaaataactctggagggaataaggacattcttggcaacctttccaaaaaagagctagcccagactgagagtatgcatccttgactgactattcagctctttaaaaattctgtgttgtttgtcttttgttgtaatcttggt

SEQ ID NO: 917451 - DNA, 4001 bp, Homo sapiens
aatggtagcacacccttgtgagttataaccctgtgtattctacttttttttatcttttgataaactccaccttactttctactttgttatctacctgtaaactggactggatcctgaagccttttagagtccttcaatgttcccaggctaacatttccagtctttcttctgccctcctgactgggtgttagtgagaactaaagcctgacaactcaggccttccgtgggaccatctggaaaggctgaagctggacacatccacgctctgcccccagcataaccatgactgtggctctgatggtcatgatgtcaccaaggacacaccccctgcaaactaggaaatccatccttgccccatcggctgaagataccttgagcccaaaatccagaaatcttctcaacagactgccctctggattcggaaactgtgtttccaactataaatctttgtttttcttctctttttcgtagacattcccctcattaaattcccgactacttgtaccatccagcacacatcctccaccagatgaaacatggacttatcttgttcaaagagaaaaggaatgtctcttctttcttgaacaagaggagggaatgagaaagcctcgctccttgacttacctcatgccaggctcctctgagtcttctctttgactaggccttgaccctagcttctgcttttgtctgcttttccccatgtttagtaggaatcctgtgaagtcttttagtggaaatcccctagtcttggcctggtcacccttgatatctgatcaaattcctcaccctccatctttgattattttattgccttggcttcctttcaggtctggcctcctgtttggccgaacacaatatacacaataattgaactagagggtgaatacatggaggttcatgatattcttccaagttagaaattttccataataaaaagttaaaataagtaacatatgcaactctctcatggatgtctagattttaaaaggtcttcaaagatagcagacctttgtgtcctgttgcaaggataatcaatttttattaaacttatgcaaacaattgtatggtcctgaaaatcataatatccaaattctagagtaatcaggtgggacaaaaaatataaatgcttcatttttgtttataaaagccctcttggcctttgctgaatcagtttagcaaagaattctcctaccttttagcaatgttcatccactgacccaccctgatccttggctgcaaatctccactttccctgtatttggagttgagcccactctccactattatgagacaccatggtagtagccccctttgaataaaggctgcctgcccatctttagcaagcatcacaaatattttttaacggtatgagctgagataaaggcttttggtaattatgttagtctgattatgacattgtagataatgcttttatctcttcgcaagaaaatgttttacatgaggtggtaaggcatctgggatggtgctaaaatactccccaaacaagaaaagtgtgtgtatgtggtgtggagtgtgtatgtgtgtgtgtgtagaaaaaaacaaaatatgcacaataattgaacctgagggtgaatacacgaaggttcatgatattcttcccagttagaaattttccataataaaaagttaaaataagtaacatttgcaactttcctatggacatctagattttaaaaagtcttcaaagatagaaagacttttcagctacattcattccccaaggaataaatggtaaattcatgtaggttgggaataagaggaacccatgggagaagaggccgccgctccccacctggttcagttctctttctgctgagacatccctgtggggccctacctggaatcacggttctcggccggagctcagtttcttgccaacagcacagcaggaggacaaagcagagggtcccgtctccttggctcactgccatgctccctccagctgagggagaaggacgttctgaaggttgacagtttcccatccttggtctccaggacactgtggaatgtcaggacctgtgacatcacaaccaggaagggagctggggtcctgccctggtggggaggtcatgtccagggacctgtgacatcaggaccaggaagggagctggcatcttgccaggggcggggggcagggtttctgtccagagtctgtgactgggaagcagggaggaggctcactggggtcttaaggtaacagagatcctctccactctttcttattgcctgttctggtgacttcctctgtcctgagcaccctgaggactcaaggggtagatactaatcaggacttaagggccagtggccaaaagccaacaaaatctgctcccatggaaagaggcgtatttgaaggatgctggagaggtggttgaattacagagcaagtgccagaaccgacagatccagagggtctaatcacctcttaaaggtcccttgaagaacagagccttgaagaacagaggcccgtggccccatgtcccctcccaccctcccccaccctcaaagttccaggatcatgaagaacaggagacagatgacccaggtttcagcctcctttcccccacaccttctttctcagcatcagccccaatctttccctggcagtgagactttaatcacgagaggagaacatggctgcatttccatgttatcatcctcccagctctatctcctagactttctagagctttctccatccgtgcagtgacaaaaccccaaaggagtcactctggttggctcccctggatcctatctcacccctggactgactcctacatccagggctcagagtggggcagctggtctagactcggccggtggtggggtcccaggtgaacagccctcagatcccagctccatggtggagagggctggtgtgtttgtctgttcccacactgctatatagaacttccctgagactgggtaatttataaagaaaagagatttaattgactcacagttctgcatggctggggaggcctcaggaaacttacaatcatgacggaaggggaagcaggcaccttcttcacaaggcggcaggagagagagtacatgaaggaggagctgttaaacacttataaaaccatcagctctagtgagaactcacttatcatgagaacagcatgcaggaatccactcccatgatcagatcgcctcccaccaagtccctccctcaacacgtgggattatgaggattataattcaagatgatgcttgggtgaggacacagagccaaaccatatcactggggccctggacgcacaagactaacaatgcccccgaggtctggtcaggaccccaaggatggctgacccaccatgggtctctggctctttaatttttattgcttgtatgggaacccacagcacatttttgctcaggttttccttttgatagatgcagtggtagccaatctacctcaaggtgtggggagtatatttcagattttcagcgtgtccataaaggcacactaagcatggttgacatttacagaaacccagtgggttccaagtcccactctgagttaatgaatggtccaagtgagatgcttgcttctataacccaggctcttgctactcagaatgtcattttggggccagcagcatgggcctaagaggctgaatgtacaaacggacagcagccagagctcccatgacagcagaaccctgcactgctgcctgtcgaacgacacccactgcaccaaggagggatgtctggctaaggcaggccagggacttccacctcaaggcggaggatgaggaatttgatcagggctgggggcgaggcctcgttgagaagaggggtcagaggagcctcgctgatttggtcgaggaaggagtcattctcaaggctgcccgaagctcggtgacttgatacagcccatgtgtgattgcttacaactttgtgggttggctctgggggctgctggcctagtgtggcctcatggacatgtctgaggccttagctaggatgctggggct

SEQ ID NO: 917452 - DNA, 4001 bp, Homo sapiens
agggatgtgtggaggattttaaatgagtactgatgcacgttaagccctcagaacagtgcttggcacacacccagagtttggtagatgctacctaacatcaatattgacattaattctagaactatgtagaggatacgacttcaataagaaaacaatcagtcagaagcagtggcagaagggagggtcctgaaatccagagtcctcctgcagagatgcagctgccactcctcgcctctgacacttgcagacattcggagagaaagccgtctgcaaggtgacagagggcggactggaagaacacaaggaacccagggatgctgatggagcatggaaaaccgcagcagaaggcactgaggcaaggtgtgccctccaggcggggcaggctgtggctgggcagagcgcctgccagggagaagtagggcaaagggaagaaagcacctgtgggagaaacatggggaaacaaggaagaaacctgcatatgcacgggagcacaaataaggaaggagatgggagaactgggtggaggcagatggcaaacgtgggggccaagggaggtagatgagaattaggatatgggataataagacaaagccacatgaaactctaaagtgcgggaggagggcagagaacagggagggtgcatgacaggcaccccgagaataatgcagtgaggaagtttgcaagacgggggagggggacattaggaaaaaaggagaatttgttgggaaaggtggaaaaagaaaaggagtgagatttctccgcctgttagcaaggggaataaaggagagcaaatcgctgggtgaccaggaaaggttcacagagaagaaaacacgaggcagcaaaaaccgaaggtggggacagagaaaatgctggcagggggaggtgcataatataaggctatgggaagccatgggaacaagagctgaataaattcacagtattattctatttatccacatccctatgcaatgctgggaagcaaatgacccacagggttttgtttgcttgctttggtttggttttcctgcacttggagggaggggaaatttgctcaagctctgtaaccttgcagtcagatgggtggcccagcccaagtcacccgagctccccctgacgctggcagcagcgcgggcttctacctgcctggggctggagtaccaattcccccacctcctgcacagaatgggaccaaaccaactccgccaatgcattccctgcagtccacagacgatgggcaccgggtcccaaaatctttcccctgggacgagactccgctggtaccaagagaaacttgctttctaaactaagctctccaaccgcatcgctccgggtccccggaggcaccagccacgccacccgatggagcagagcgttacagggctccgccgcgccaggctccccagactctgccacccccacggccgcccctgtaggccaggccccgcgagctgggagcgcgggtgaagttacaaggcgacctccctgcaggcttccggctggaaacggccttttgcgagaacaccacgtgcatgtcctcccaaaagcgatggtgccgggtggcccagagggcgcagagccaccgccgggcagggagcgggcgcacggacctaacaggtgagcacccggtagcctccaccggcgggggaagcagaggccaagcagctgggagctggacatcccgaagccccgaggcagtccactgggactcaaatcctcccgatattctacctaacagcccatgcccgcgcccgcccggcagagccgcgcgcccgaagccgtcttacctcctgcggcgcctcttggcggagcctacaaagtcagcgtgtccaacacgtccctgccctcagagccacctccggtgccggcggagccccgaggtcgccgcactctcggaggagcctgggatccagtgcgcgccctcggagctagcgaccggcagggcgatcgcgggagaaagcgcaacgcacactctcctcccgcgccgcggcagcacactcagccaagccacgccccagccccgctccccaccaggccacgcccccagcccggctcttccccccgccccatatcaggccacgcccccggttagctcactccctcaggccacaccctcggccacgcccccacactaccaaccacagccggggaccccacccatcaaaaacagttccccggccaggcgcagtggctcttgcctgtaatcctagcacttttggaggccgaggtgggcggatcacctgaggtcaggaatttgagagcagcttggccaacatggtgaaaccccgtctctaataaaaataaaaattaaccgggcgtggtgacaggcgcctgtgatcccagctactcaggaggctaaggcaggagaatcacttgaacccgagaggcggaggttgcagtgtgccgagatcgcgccactgcactccaacctggaggacacagccagactccgttttttaaaaaaagaaacaaacaaaaatagttccctcagccaccagccagcccccaccccccagggcgggaagaggagtctcatctccggggcaaccgtgccccactgcccactgcctgggccagaagttcactccctgtgaaaggaaaacgcagggtagggatttttaaacctacatgtttcccagggcctggggcaagtcttgagtagactgttgcagtaaaccgactcaaaggcctatcacctttcttgtgaggctcaaggcctaatcattaattgacatgaaaaccacagaagagaagcaaacccttctgtgctgggatctgtgccccagtgctccatgttccctgataggcagctaatggaattcataaaataaatgcatgctttctaccagtgtagttttttagatgattcatttagtggccagcactattatttataaatgtctattgtcttttataatcaaagaacaatacccacaatctgtaaaataaaaaacaaaaattatattacccaatgaaaagtgaaaattaattttatgtatgttttttaaaatattgaaaaaactctgtatgacattataatggtggcttcatgtcattatgcatttctcaaaactcacagaatgaacagcatgcggcgtgagcctcctgtaagtaatggacttagttcatcttaatgtaacaacatgggcccatcaatcataacacatgtgccactcgaatgtaagatgtcagtacaagcagctgtgtgtggagggaggggcgtgagggagtacatcagaactccgtgtactttccattcctgttttctaaacctaaaactgctctaaaaatagtctattaattaaagcacactccaagattaatgataattatctgtgggtggtggaaatatgggcaaattttatttaattctttgaattgttattgaaattaccccaagttttaacaatgaccatgtatttttaaagctgaaaaaatataaaaaccaaaccttggaaaattttagaaacatagtatgtgaggctaatatcattgactgttccattttatttctactctataaaaaatctgcacaaagcactcacaaatgctaaaatgaaatctatgttagtattatttaaaaaaaaatatcacggtctaaattgagggtttttttattatctctttagaattagcacaaatctgaggagcagattttgatttttcttttaaaaaaattgtgtttcaaaaggttatttctgcctacttggaaaccactattaacatttacatgcaatactttttatagtgaagaaagcactatatttgaaactatgtccttgggaaacaggcctggccctcagatgaatggatttctgtggagtgataccaactagacctgaagacccccgcatccttgaggccctgtacaagccctgggcgagtgctggaccttgctgaatctcagcttcctcgtcagtgagccggtgacagtgggacctcactctgcattgggtggagaattaaaactttagcccatgtaagactcttactatctatcaact

SEQ ID NO: 917453 - DNA, 4001 bp, Homo sapiens
tgaagttccaagctcagctgtggtctgtgtacctgaggccctggccagtagcaggggctgtcctggtggcatctcacaatgagaatgtaccacagtggtttacaactgcttcctagcatttccggctcccgaaactgtgaatttttctaattcagttttgtatgttcttctcaccacttatctctctgctctcaagtctagcactgtacacagcacatagtagagcctcagtaaatgtttgatgaatgagtatctgagtaaacaaataacataatttgtaaaatagaagtactattgtagctacaaaaaaactgctctaaaaaagatcattcgaaccccttgacattttttttttcctatggtatatggctaaaacaagtaatctttgacatagtaagacaaaatcacctagcacatctccatgtatgaaaatacccatagaaataaaatgaggctgatgctctctagtcctttgtgaaagtcgccatctttccaacagtagaactgtctgcatttttagtgctgggcctaatatttagtactgctaccggctttatatatttttcttttgcaaatgtttttggttagtatgtttgaaaagctgaggaacaattcgtttcgtggatccaaatctggttctgtactttactttttaaatgataattaaggaactcccatcagtagatgctaccttaaaaacgaggaaatacaacgtattttttaaaaaactttgttggccaggcgcagtggctcaagcttctaatcccagcacttagggaggccgaggcgggcggatcacctgaggtcaggagtttgagaccagcctggccattatggtgaaaccctttctctattaaaaatacaaaaattagccttgtgtagcgacggccgcctgtaatcccagctactcgggagggtgaggcaggagaatcgcttgaacccgggaggcagaggtttcagtgagctaagatccgccactgccctccaacctgggcgacaaagtaagactgtctcaaaacgaacaaaacaaaacaaaacttcgttaagtaggagtactattcttgttcatgtcttccataacaccacaatccaaatattttcaaaagcagagcattaaggtattaagtaggtgatagtttattccctaaccaagtgacagaggctgccagcggactgtggattgacaccgacagacacacacaccaacgaagcatcagagtgggggctcacgcagtgacgctgagcaccgggagatttcggcctcccccgcggctcctccgtcgcccggcaacacagccacgctgcggctcggcccctcccccgctgccatggcaacgcgaccgccaggctggctttgtgcaactactgccccggcgcccctatgcgctcaccccttgagcctgctggggccgcggcaacttttcttttcttcttttttttttgagacggagtctcgctctgtcgccgaggatggagtggcgcgatctcggctcactgcaagctcggccatgacaacttctctaacctcaccgcacctatagctctatcccttctcctacccggagccgctgatcatcaactttcaccccccacttcaggaaaaaaatgttccacgggcacaggatttcggccaaatgctgcttggctctaccttctccaaaagtgcgggcgaggtgacaatatgtagagaaatcccacttgcctgtctcagcatccctcctacgtcctcagagggtccttggagggatcccagcatcccgctccgagctggaagggggaggaaggtcacggagaagccgactggaaactgtcccgggtgcgcgccgcccccatgccctgcgccctcttcatttcctcggccagggcgggacctcccagccgctgggcccaggaccgcagcgaatcagtctctggctccccgcccagcagaactcagacaggctctggacggctgtccgaatgccgcgtttccctggcgatgagcagttccgcatcaccctctgcggctagctcggcttccagggccggggctgtgctattgtttgctgttcttcgtgggtaggacggtggggggcccgggctgagcccggagcaggaggacctggggtgaatttcttgcaggccttttctctcccttctcccaaccccttactgttgcatattcataagaaggcggggtcgtttcccatctcctttaaaatttcccaggcttgaggatcagcggaaaagaattggggtataattcttttcccctgacacagacaagcaaatacaggattcctgttcacaatttcttcctccaccctcaggcagcaaggacacacacacacacacacacacactcacacacacacttcttaatttcaaagagatcctgactgaagtgggaatcaagtttccaacacgtgaactttagcagatacattcaaaccatagcaggtggtaaaattatcatgactggaagatgatataattatatcccaagataatcaattgttaaactattagatacaaaggaaattagaaagtaacaatatataaaagatcactatgtgggctcagtagcagaatgtaggtgacagaattcattggtgaacttgaagatagaccaatagaaagtattcaattgaaaaacagagggctggcatggtgcctcatgcctataatcccagcattttgggaggccaaggtgaggccaggagttcaagagcagctgggagacatagcaagaccgccatctctaccaaaaaaaaaaatttttttaattagttgggtgtggtgctgcatgcttgtactccagctgctccagtggttgaggagggaagatcgcttgagcccaggaggttgaggttgcagcgagctgtgactgtaccactgcactccacaaaatgagaccctgtctcaaaaacaaacaaaaaaagacaaatagagaatgttaggagacctgtgaacagcactccagcctgggcaacagagaaactccatccctgaaaaaaaagtaaatataaatagatgaaacagtcgaaccaaaagacagagattagcaggtggaatatattaataaaaacaagaacgtatgtgctgtctacaaaagatgctatttaaatgcaaaagtacaaatgagtcgaaagtaaaagaatgaaaaaacgcataccatggaaacataagaaagcatcagaaagctgaagtagctgcattaccacaaagagattttaagaaaaaagtggtgctagagataaacaagatcatctcataatgatataaacccaaagtaagtagaaggaaagaaataataaaggtaacagtggaaatcaatgaaacagaaaacggacacactcaaaagtcaatggaatcaaaagcttgctctctgaaaattgataaacttttagccaacctggtcaattaaaaatcaatggccacaggccaggtgcccagtagctcacgcttgtaatcccagcactttgggaggccgagacaggtggatcacttgaagttaggagtttgagaccagcctgaccaacatggtaaaccccatctctactaaaaatacaaaaattagccgggtgtggtgatgcgtgcctgtaatcccagctactccagagtcggaggcaggaggattgcttgaacccaggaggtgaagggatgcagtcagcagatactgcaccactgcactccagcctgggtgacagagctagaacctgtctcaaaaaaataaataaataaataaaaaagaaaagaaaaagaaaaaattatcaatatcagaaatgggagagaattattggtacagttcttacagttatcaaaagaaaaataagaaaaaaaattgtgagcaacactatgccaaaaagttcaataatttagataaaaaagattctctgaaagacagaaattacaaaaacagactcacaaaaacccagaagacccagattgccctacaacaaattactattacgattcctatgaaacagtgtctcacttttttgcccaggctggacttcagt

SEQ ID NO: 917454 - DNA, 4001 bp, Homo sapiens
ggctcggcttcaactcacactgacaggagaacaggacaggacagcataagatggcagacaacccataaacccgccctccctgacatggcgtcctcctgggagccactaggcagtccctcagggtctttcagagccccacaacccctcccctgccccctgccctctcagagctctcaaaggaaagaaaacccaccataggcaagctttattatttgttttaaatatggtgcttgttgtcattttattacatgtattcactcagtatagcgcatataggagtggcaacagtttccgcagtgcactgacccaggcccctctcagagaggcaggtgagggactgctgtagagggtcaaggccgcagagggcagattctggcatgctgtttctccagcagcaccgagggagcaccgctcagagctggaggctgggtcgggcttccctcggcctcccctgtgtggaaggcggtggaggaatgctggaggagagccaggggccacctgccccccacccctgcccgttcgtgctggctgcactcccggtgggaatgaacacgcccctgctcaaggccatgggtgcaggaaccctgggagggagcacccgcacgtccgcttcctccacccaggtcttgccagtgccgtctcgctagcattaccgagccctctcactcatgtggtctgtgttctcaatatagaaatcgccaggcaactttttttttcctttttctaaattttggctcgtaaaatggagtacacaccagtcttgttttgataatccaccagacacagaagccgtaaccacatccctgctttctgtctgtcagcagcacagaaaccaatcaaaacaaggaagaaagcacagactacaaactgtactgctctgacagggccccaggctgcctcgagctgccatctacggttcccattcatttcaggcgaggcgctggcatctatttagggcaaaaacagagacaagatctgtttctaaagcatcctattgtatccatgtagtgcagccagggaaaagcctgtctgtgaagtcttgttttttcttacttccttttcagaatgtgaggattagagtttatggcttcctagtgtgagagtacaaagtttctttcacatttaaatagtccaaatagtccaatactcacagaatagacaaatagacaatactcacagaaatactaaaaagaaagcgggagataaggcacaaagcagtaagcaaatactgggtaatgtcactttagaaacaggaaactatttttcaaagatcagctcacagccttaaacctcacacatcctcaattagcaagaaacattcttatacacaccaccaataatctattgaataaaggaatttcatgtaatagaagcaaaaaccagtaacaatatcagcagcaaaactagtaacaatatcagcagcaaaacccagaccccttcctcaggaaggatggttcaggcttgattcttatgattttctactccaaacaagcaactgtgccataaacaaaaccaatttcttcaactgactatgtccacaactaaaactatcctcagcaccctttactagaagagtgagcttttccccacaggctcacacctgacaagcagcagagaaagagagagagtgagagagagagagagagtgagagagagagagagagagtgagagagagtggagagagagagagagaggggaagaactgcaacttgggaaggaaagagctgaatcggcaacatgtcacagtacaacaatccattctttgcacacatacccaagtgaaggctttccagactccagaatcttgctatctcccctctagctaccatccttctgtttggaaaacggcaaccttcagagcaggactggggtgtgaccgaggagccggtccccaagcatcacagaggactgcacaggctggcagctacgggaactgcagaaatcgcttattcactgctttgacgttgtatgcgttcccggccagagcctgcccagaaactgacagctggctccacactccgtgtgaccaagggttagtggctacagtgacattgcgggggacttcaggagagaattctaaactaaggcaaaacctatatacaccaaagacaaacacactcacaagccatcaggtgctgccgagagccttcagtgaaggtaggagaaatggtgtgtgctgcttttaactacaaaaccaaaacctgagttaaactttcagagagcttttcaaaaggtatttatttcacaagagaaaagcacaggggtcacttagttcaaaaatacagttaggatttcacactgtggtatgacaaaaatttgagttatgagattacattaagttagctataaatttatgaaatcactttaaaagagtgattttgttcaaaaggtatacatgtaaaggcatacatgtaaaggtatacatgtaagttctctccaggtaatatattctgggttgtttttatttcctctatactcttctatactttccaaattatctacaatgagcaagtctttcatattgtaaaatgactgttaacaaagagtgagcttccttccatttccccataagcagaagacacggcctttttaactttatgaacaatgaggtaatatatacgcaaagtagtgacctcacagtcatctcttagtaaatgtgggtttaagctgggcccgctggctcatgcctgtaatcccaactactcaggaggatgacgcaggaggattgcttaaaaccaggaattcatgaccagtctgggcaacatagcaagaccctatctctaaaaaaaaaaaattaggtctgggcaaggtagctcacacctgtaatcccaacactttgggaggccaaggtgggaggatcaattgagcccaggagtttgagacaagcctgggcaacatagcaaggtcctgtctctactaaaaaaaaaaaaaaaaaaaaaaaaaaatttatattagccatgcatagtggcatgtgcctgtggtcccagctactcaggaggctgaggtgggaggattgcttgagcccagaaggtggaggctgcagtaagctatgatcgtaccactgtactccagcctcggtgacagaataagatcctgtctctaaaaataaaaataaaaaattagctgggcagagtggcacatgcctgtcatcctagttactcaggagtctgagatgggaggatcacttgagcccaggagttcgaggttgcagtaaactataatcacaccactgcactccagtgttgtgagttacagagctagatcctgtctctaaaatagatacatacatacatacacacatacatacatacacacatacatacatacatgttaaacaagtgatagtgccaattagtaaaatgcatgctttatagtgatgagctttggagtcagactgcctgtgttcaaaagctgctttcccataacaaaattagggaaagtttccaagtctctaggcagctctctttccacatctgcggagtggggataactgcagcaccaatcaataatcctcacagaattactcgagaacatattgcagtgtttagagaagcactggctcttcattgggggttaataaatgttagccgtcacgctgctgctgtcgctccaaaaaacctgaggtcccttaataacatgctagttcccagagaaatcacagcatgaactcagaatggaaagctgtatgattagtaataacacacatgttgactatatactatatcgtaggcttctcttatcttcaaatatctgtggctatttctattgatctggagcatcccaccctcaaatccaggtaaggacagttttctgggaaactcatagccttagtaacccgcactacaagtgaaaaacacacacgatcacacaaactcttatgaccagttcagctgaaaatctttctcttacagaaattttatttcattttgagatggagtcttgctctgtcactcaggctggagtgcagtggcacgatcttggctcactgcaacctccacct

SEQ ID NO: 917455 - DNA, 4001 bp, Homo sapiens
gaagcaggcagccccaagacaagcttgagctgtcttaaaccaccttctcttctccttgatcgttgggctgtttctgggagctggggagggaaagttgcggtgggtgttgatggaaacatcattccaatttctctatcacatgaccactactctttcaaatcctaccccctccttcacacccacccctaggttggcatcctctgcctgaccaagtttcttaaacaccaactttgctaacattaccgagggttactatcagagaacattcagccatctgaggtactttcaaagcatgtaaagttgaggggccccaggattctggaagaaaagattggtttatatgggctatgaggaatcacagcagtaacacccactcttgggggagtagtggctaacacaactccctgcgtatttcaggtggaaagaatcaggcccaaaaagattcctacagcttgttatcttgttgaatgatcagggggaagttatcttatattctggctaagattcatgggctaaaagtaacagaaaagtgactgttcattacaaagttataaagataatgtgaaaataaacatccaggatgttttcttcttccatatttttgcctcccgctgaacatacttgcctagattgttacaattatatatatggaatgcccaccagtggtcaatcctcctcctacacatccctggacagagctctcagatagttacctctgcattggattcctccatcctacatttcaacccctctggttgcatggccctggtcttccaatgaggacttaggtgactctggagaaagcaaagccacccctttgtgacatagcagcagtagaaacaattcaatcaagaggactccactaaggaaacagctgattgcaggcaggaggagacctgagactctatagcctgtgaggacttcaccaattcattgactgaaaaagcatctatgcccatggcccctacatctgtctttgatgcatagcagggcttaattctcttgacagctccaaataactctgtacccctttgtccacggatgaggttttcttctcatggattcattcttatgcatttgatttcaagtcccagttctaattctcccccagaaatccagagtgattgcacaacactaagcaccaaaagatctcgttttgagaaggctgggttacttcagtgtatcatagaaacttggaatgttaggactggaagttcttaccagatcatctgacccagccacctcattcatgggaaaaagaacccaaggcccagaggggctatgtggccttccccagcacaccgcctgctggcacccaacccaaactataatctgaagccctgactatctctgcttattctacaacatcttgctagagttttgaaggaggagatggggggttattctggctaacactgataggttacatccttctgtgattatccctacctgaggtagaaccacactgattggaatttctaggctttcagatctggtatctctttttcttgtataatttggccttgagtgctgtggaaacgagaaaagaagaagattactgcttcccagctcatcctctgggcctcaattgctcgcctaaaaaacacagaactttctactcatttatttctctcttgtcaattatgtacaattatgaaagtctgagtctgaaagaacgtgtagatgatatctggcatgatggtttatcaatctctgaacagatattaagctagatattatagttgatgtaaaaggcttttgaaagtttttgaagtggagatagctgtacctgcttccctgtctaagatgattatttctatctcaagtaaaaagccataccaatgtgagttgccaggtataggtcctatgcagaagttggtcaccaaaacactcagaacattccagaggtgacatcacaaaacaatatggtgtttttcagggctcatggtttctctctgagcatcacaggtgggaatgaggcatctgacaggcaggaagagcttgtgggtgctgtgactacttggctggtcagggtcagtgtgacacacacaatagcccaaacattagccccctgttgggtcattccagctgccattcgtattctcactgccaggctaagttgagatccctattctctctccagaagtggcatcttcttggagttgggtcactcaagaagaaagaaacacaaactgaactcttcccataccaagggagaaagtgtagtctgaggtgttttctgacactactcaattccttaattctctgacaccaactgtgtgccctacaattcaatttcatcctgatgctatctaccagagttagtgttacagagctgaagcggctcactacccaatgcaatagaagccaatactaaaacactaagttctttaaaaaagaaaaacttgtatattgaaagtcaactcccaaggagacaagagtcaagctcaaatctgtctctctgtgctgacattaaggtagtatttttattagaaaagattcagggggtggattctgagattagtaggtgattggtggatggaaatgggaggtctggaaagtcccaaagagtaagaaaccagttacttaatttttgagtttcaagatagcagataagaaaagaaacttaagccgctgaaactccctccacttgtgagatcaagaaaaacctggctgaaactggttggaaccaagatggctaactggagcttgcacagaataagcttgctgatgtcatagcctgaatttccaccacgtttcatactaactctccctgaatttgccatgcaactcaggagttaacatgaagaaataactatgcatgcccaaggactttccagacctcccttttccttgcacaaatcacctactaatctcagaatccaccccctgaaccttttctaataaaagtactgccttaatgccagcagaaagagacaaatttgagcttgactcctgtctccttcagaggtgacttttaatataaagcttttctttttttcaaaaatttggtgtcagtgttggcttctagcacattgggcagtgagccccttttgcttgttaacaaactagaaccccaggtgagacgaacagcctgtccaaggtactgttgcccctagtggtgtgcaggccccctgcactgatcctgagtggccacctagaccagggtgtccagaggctcgactatagggttccttcttctccaccatggcacttcaggctcccttggcacttctcttttgggaaaataaattgcttctggattagacatctttctggtgagtaccttgttaatatgcccctgtacttttaattgtctttgaactcatcataacgactgtgggttcaagtcccaccctgtggtttaggattatggatgagagtcccaaccttgtctaggattgtggatttgagtcctacccaagggggattctggtcagttcagagtcccaaatctggtgtatgtttaagtcccaaagaattaaggcaatactaaaaagctacagccactaagataatctagtctggttctgatttttgttggtctgtctgtatttttggtctgtgtagcaatatttggcttaacagaggtcaaagactgtgatggctacagcagaagccttatgagatctccagactcctgcacactcaattagaacaaagcaactccataaactagaaaacctgaagaaaaatggcacatgtaaaacattttcagtcaatccctctttcttcttctgtccttaaagagttaccatgtagtcttctaagttctttgcctatttttccttcctgactactctgaatctgctgacttttctgctggtgttgaaataaaacttactgttcatggtattactagtttcaggttactggctaaagaaaaaaaaggaaagaggtcttttaaaatcaaagtgccctggaaactgctttgctcatcagggcaaataaaatttagccatgtgaacagattccagttttatcaggaaaataagtttgat

SEQ ID NO: 917456 - DNA, 4001 bp, Homo sapiens
aggtgtccaaaacctggtgcatggcttgtgccctcttggcaggtgtacgcacgaagctgcatctgcccttgtgaggtacacgtgcccagacaggagatatcctctcattcttcacccactctgccccacaagaccccagcagcagcaccaggtcctccagcacaggaagcaggcagccccaagacaagcttgagctgtcttaaaccaccttctcttctccttgatcgttgggctgtttctgggagctggggagggaaagttgcggtgggtgttgatggaaacatcattccaatttctctatcacatgaccactactctttcaaatcctaccccctccttcacacccacccctaggttggcatcctctgcctgaccaagtttcttaaacaccaactttgctaacattaccgagggttactatcagagaacattcagccatctgaggtactttcaaagcatgtaaagttgaggggccccaggattctggaagaaaagattggtttatatgggctatgaggaatcacagcagtaacacccactcttgggggagtagtggctaacacaactccctgcgtatttcaggtggaaagaatcaggcccaaaaagattcctacagcttgttatcttgttgaatgatcagggggaagttatcttatattctggctaagattcatgggctaaaagtaacagaaaagtgactgttcattacaaagttataaagataatgtgaaaataaacatccaggatgttttcttcttccatatttttgcctcccgctgaacatacttgcctagattgttacaattatatatatggaatgcccaccagtggtcaatcctcctcctacacatccctggacagagctctcagatagttacctctgcattggattcctccatcctacatttcaacccctctggttgcatggccctggtcttccaatgaggacttaggtgactctggagaaagcaaagccacccctttgtgacatagcagcagtagaaacaattcaatcaagaggactccactaaggaaacagctgattgcaggcaggaggagacctgagactctatagcctgtgaggacttcaccaattcattgactgaaaaagcatctatgcccatggcccctacatctgtctttgatgcatagcagggcttaattctcttgacagctccaaataactctgtacccctttgtccacggatgaggttttcttctcatggattcattcttatgcatttgatttcaagtcccagttctaattctcccccagaaatccagagtgattgcacaacactaagcaccaaaagatctcgttttgagaaggctgggttacttcagtgtatcatagaaacttggaatgttaggactggaagttcttaccagatcatctgacccagccacctcattcatgggaaaaagaacccaaggcccagaggggctatgtggccttccccagcacaccgcctgctggcacccaacccaaactataatctgaagccctgactatctctgcttattctacaacatcttgctagagttttgaaggaggagatggggggttattctggctaacactgataggttacatccttctgtgattatccctacctgaggtagaaccacactgattggaatttctaggctttcagatctggtatctctttttcttgtataatttggccttgagtgctgtggaaacgagaaaagaagaagattactgcttcccagctcatcctctgggcctcaattgctcgcctaaaaaacacagaactttctactcatttatttctctcttgtcaattatgtacaattatgaaagtctgagtctgaaagaacgtgtagatgatatctggcatgatggtttatcaatctctgaacagatattaagctagatattatagttgatgtaaaaggcttttgaaagtttttgaagtggagatagctgtacctgcttccctgtctaagatgattatttctatctcaagtaaaaagccataccaatgtgagttgccaggtataggtcctatgcagaagttggtcaccaaaacactcagaacattccagaggtgacatcacaaaacaatatggtgtttttcagggctcatggtttctctctgagcatcacaggtgggaatgaggcatctgacaggcaggaagagcttgtgggtgctgtgactacttggctggtcagggtcagtgtgacacacacaatagcccaaacattagccccctgttgggtcattccagctgccattcgtattctcactgccaggctaagttgagatccctattctctctccagaagtggcatcttcttggagttgggtcactcaagaagaaagaaacacaaactgaactcttcccataccaagggagaaagtgtagtctgaggtgttttctgacactactcaattccttaattctctgacaccaactgtgtgccctacaattcaatttcatcctgatgctatctaccagagttagtgttacagagctgaagcggctcactacccaatgcaatagaagccaatactaaaacactaagttctttaaaaaagaaaaacttgtatattgaaagtcaactcccaaggagacaagagtcaagctcaaatctgtctctctgtgctgacattaaggtagtatttttattagaaaagattcagggggtggattctgagattagtaggtgattggtggatggaaatgggaggtctggaaagtcccaaagagtaagaaaccagttacttaatttttgagtttcaagatagcagataagaaaagaaacttaagccgctgaaactccctccacttgtgagatcaagaaaaacctggctgaaactggttggaaccaagatggctaactggagcttgcacagaataagcttgctgatgtcatagcctgaatttccaccacgtttcatactaactctccctgaatttgccatgcaactcaggagttaacatgaagaaataactatgcatgcccaaggactttccagacctcccttttccttgcacaaatcacctactaatctcagaatccaccccctgaaccttttctaataaaagtactgccttaatgccagcagaaagagacaaatttgagcttgactcctgtctccttcagaggtgacttttaatataaagcttttctttttttcaaaaatttggtgtcagtgttggcttctagcacattgggcagtgagccccttttgcttgttaacaaactagaaccccaggtgagacgaacagcctgtccaaggtactgttgcccctagtggtgtgcaggccccctgcactgatcctgagtggccacctagaccagggtgtccagaggctcgactatagggttccttcttctccaccatggcacttcaggctcccttggcacttctcttttgggaaaataaattgcttctggattagacatctttctggtgagtaccttgttaatatgcccctgtacttttaattgtctttgaactcatcataacgactgtgggttcaagtcccaccctgtggtttaggattatggatgagagtcccaaccttgtctaggattgtggatttgagtcctacccaagggggattctggtcagttcagagtcccaaatctggtgtatgtttaagtcccaaagaattaaggcaatactaaaaagctacagccactaagataatctagtctggttctgatttttgttggtctgtctgtatttttggtctgtgtagcaatatttggcttaacagaggtcaaagactgtgatggctacagcagaagccttatgagatctccagactcctgcacactcaattagaacaaagcaactccataaactagaaaacctgaagaaaaatggcacatgtaaaacattttcagtcaatccctctttcttcttctgtccttaaagagttaccatgtagtcttctaagttctttgcctatttttccttcctgactactctgaatctgctgacttttctgctggtgttgaaata

SEQ ID NO: 917457 - DNA, 4001 bp, Homo sapiens
tcctttctcccttccagcatgttaagcactatatgagctgctgaggatacaggaataaacaacaacacaggtgtgtcctctgcccaaaccaggcataaatgagcttccaaatgaacacaaacaaatctggaaggcttttgaggaagaaggaccattaaaaaaggtacagaaagaatgtattgagatcatgtttatccatcactgaaataaaatacgctccaaaatttcaatgattctccagccaatatattattacccctccttattaaaaaaaaaatgaaaaaaacctgccaatagaaagctgcctttcctagtagattgcatgcaagtcatactgttagctagaacttaagataccttgttgatttaatcagtaggttactatatgtaataattcaatattaagagaagtgaggctatcaatattataggtatattttacatttttccaatcagtcattactaaagctaacattaaaaatcttaatatattacactctacgtttttggagcacaaatataacaatttaaaaaataaattggctgggcgcagtggctcacgcctgtaatcccagcactttgggaggctgaggtgggctgttcatgatctggagatcgagaccatctggccaacatggtgaaaccccgtctctactaaaaatacaaaaattagctgggtgtggtagcgcttgcctgtaatcccagctactcgggaggctgaggcatgagaatcgcttgaatccaggaggcggaggtttcagtgagctgagatcgtgccactgcactccagcctggtgacagagcaaatttctgtctcaaaaaataaaaaataaaaataaatttaaaaattgcagaacattttctttaaataatgctatttttctcaaaaattaaatcagctattgattttcttccaaggtcatttgcctcccatctttcttccaagtgtcatcatcttatgtatttcactttttataaaactttaaacagcaagaggccatacaaaatgaaaaaacataacttgtattaattcatttagtcctttaaaagctgtatcagaagctgttgttgaaaaaatggtagagttattaggagtgttgcaatgtactcctagatgtcctataactgatatgttagtcttacactcttcataatcgtatatagcgatcttagtactagcagacatctaaggtctatgatggcatttaacacaattttgtctccaaattctgctgtggtttcatcaatgcctttttgttagctctgagtttaaattttaatctggaaccataactgatttatcccagctgctgacgactgcctggaatctggtttggagcatctccaaagccaacgtactttcccccaagaaaatacaggaagatctctctgcccaggcttggaaatacataaggatcaggtttgccatcctctactttagggtgactttaacataatttaatgcccactgactgcttttctcctacaggtaaagtaacaaacaaaggagtcaactctcaggagctctctctttcatctgctttatgttgccattttccctcattgccctctcacattcactcagtaattcaccaaatatttatagagacttcatggtgtgcaaggcagtgaactccacactgtaggaagagtaaagccatggagatcgcaggcctggctcttcatacctttggctttctgttgaattgaactttctgttaagtttaaaatacacaatagaactttgacgatgttgtggcctggtcagggatgggacagataaccagcccttaaaaataaagctcctccggccccgcccaataccttctgaaagaaggagggttattatagagcataaataaaacagtagtgattaataatgataataaagtttatctctttactcactcaacagcaatccttttggggcaaatcacttatgatttccttccaggactgaagaaaacatgcacagacggaaggtgggggctggtactggtgctgagcctggcatggggagagaggaaacaagagtgaaaagactctttcattctcctggcaaaggcagccttgcagctggggccagggtctgtggtgctgatccatctgctgggccgtcacctcccgagagagcgtgtgttcctccaaccacgcgtgtcttagcaccagtctctggcaggagccaggagatggggaagacaatttaaatgattcacataacttcaaaaaatgtggataagcactttatttttctcacaaaccaagaatatctactcaatttaaacttttacctgcgatctctcttcctcagacccagggtcacgaacttgccgtctaacctggcaggtcagtaaaaccttaccccatcaggtcttcatctgtaagatgagaaggtggcagcagaggttccgaaggctccttccagatgaaaacaaatacgatttttacatcagtagaaattcaaggggctcacacttgactatatgaaagagaaaataaaaaattatttgtttatttttctgttggccttttcctatcattttagcttacttatttcttctttttgaccccatttttgtgtttcttatttcttctattaacaccactggattaaagcaagcaaaaatttaaagattaatatcctttttaaaaatttcagacatataacacacacacacacacacacacatacacacacaccctgcatgtagataaagcagctagaaatgaaagcctaactgaaacataattccagtggttctcaaactttagcaggcattagaatcacctgaaagatttgttaaaatgcatgttgctggacatcaacccagaatttttaatttgctaggtaaggtggagtcccaaaattaacatttcttacaggttccaagtaatacggatgttgttggtctgggaccacactttgaaaaccactgctttatagcacagcttccaaggagactccagtgtgtgttctgtgtgtaccttctctatgtatgtatgttctgtatatatatatgtacagtacacatatctccaatgtatgttctcgtctaatcccttaaagtcatgatgtgcctcaggccatcatttcttccctttactgtttgtcagctgtcaccaagttgaggtggcagtggtggttttctttatgtcaaagcactttccatctattcctaattgattgcctactgatttcttggtttccttgactatttcgttgaaaggatctcaagccgctgtaaaacttgcattttaacatctagcgtgacattctccctctgtttagtgtcatttttgtggcagattaagatctcccaccagcacactttcccatttaatcctccagccattgtagttcaaaactctttgccagaaatcctgcatgcccagaacacacacacatacacacacacacacacacacacacacacacacaaacacacacacacacacacacacaatgaaaggccactcaagtcagggtaacaaggtggagcctttgcagtgcatttagctaatgccaatagagatgcagtataaatagttgtaccaagtttccatctttcccttaagcaggatgtaagcatgagattgtagaagaaaggattctgtaaacagatttatttcgtgatatttgggtagacagttcttgttaacatagaacaactttatactaactatagaaaatgcttttcaataaatcctccttgacaatcagtgtattctcaggttcttgtcttctgggagagatctacagaataaattattctgggaagtgtatggtatggcacataaagaggaaggagtggttatttgtatgaaataaaaatggtaactgatttttaaaagatacttacatgacttaatctctgttagagtaccaacattaaaactaactaacaattatgagggcttattagcagtcttctccaaggtgaggaaacaagatctgtacttcaacactgccttctgctacctgcctgctccttcctacctcc

SEQ ID NO: 917458 - DNA, 4001 bp, Homo sapiens
ttgaaatgacaatctgatgtattaaacagtacctacaccagtgtacagtcttcaacaacaaaccaaaatctgttccgataccagtagttcacctaaattctaattttttaacgttctaataaaacacatttatttcaacataactacatgtatgtctgtgtatgtcttaaaaaatacccgagaaaaggtaaaattctgcattaaaatacctagcaatttagttcgattccataaacactgaaagaagtaacactctcacttaacagtcaacattacaagcagtctttaataataccgcatttaactccttagagctagcacaagttgatctaatgcctatttggccctttaccaaaaaagcggagggggctttgtctaacacctgtatacacctccctccgtagcatcccgctcattctagcttcttagggaaaccatagacaacgacgtttcagagagtgccagaggtgaagccgacccgaaaccacattacagaaaggcttcctgtttcaaacaggtccaataaagccaccaaattaagtctacgattataaagaactgcgaatcagaaaataattccatataggtgcagtcttctattacttttttccccactttcggaaatttcaaagaaaaattgctacattcttaaatatgaggccattatttcaaaggctgtaacaacctggaacgcaaattcgttaaattatgatacaataaggccaacctcgaggatcctcggtggactactagcgcacttccttacaattagaaagtgaaaaactgggtcagccctagagtcacgcaataatgctgcgtcacgaaactgcgcattccaagagaaacttttctcaggcccagaattaagtcggagggatccgccgcgcagctcaatccctaggaagcatgaaagaatgtattgtaaagagtaaaatcacgcgcaatccatcccaatataaccgcagttgttcgtgggccttcttgcagagaaaggctgcccaaccttgacggggccatgggcgctgcgggagggcaaaagaccacagagatctgcgaagccaaagtaaacaacggggttggggcggcgagaatgatcaatagcgatgctccgaaaggactccgcgataggaatcgagcgggaaggattccctccatcctaacagtccatgggttaagaggccgaagcttccctaaataccacactcccgcgagagaagggactgagaacaacttctcaaactattctctctcgaaatcgctcccttcctcgaaaattccatctctgagactcggatgaggtccccaccccctccacccttgtcccgtgaccgtcgcccgctcagcctcccagccgagtccgcggggcctggggcgcccaccccgcccacccaagggaccgcgcaggggtgaactcccccgcgccccacctgcgccttccagacctcgggcgccccggcgttgcctcgagagctccctgcgcggccgccgcggcacggaccagctcccactcccttacactgggcgccgctgcgctcgccgggggccggtcccgaggttcccaaggcctcgcgcgcgcgcttgccgtggcaaccaagacgttccacgacgcgcgctctcgaacgcttcgcgtcacgcggccgcgcggccccgcccgtcggcctcgctcccgccacagagcccgcagcacgccgccgccgcagcctaggtcacgtgagtacccacgcgcgcgtcttgccagcggattcatcaccggcctgctcagactaggttctgcccactctgaccttctaaatggtacgtgggaggacgtccgtccccttcggacccaagagtcaccgtaacactctagaaggggagaaaaggagcgagggcggcaggcgacagagaacctcgcgagtcagcggccccgcgcagacccccccaggcacggtcccctgcggccacgtcggctgctcggcgcctgcgcaatctctttctctccagcgaaaccgaggcctccggagagcctagtagagagtgtgggcagtgagcgcttgtagccgctagagggagcgctgggcacagtgcacgagagacaataaaggctgattatcccctcaatgtctctgcagcctgagctttgtgacttctgtatccagagcacagttaatttccaaaagcccgcctgcaccacgtgttttaagtcttggtgtgtgtgtaaagtctatatcactatcataaaactgttagttcctgattccgggatacaaagagtaaaatcaagatgaacatactttacccttcttgacaagtgtttttaaattagtaaaatattgtagatgacagactcttcaatagggctgccttagggaaaaaaaaacagaaaaaagaaaaagcagtatgtacttgcccggagcatttagaaccagttttgttgttgttgtgtttttgttttgttttgagacagagtcttactatgttgcccaggctggagtgcagtggcatgatctcggctcactgcaacctctgcttcccaggttcaagcgactctcatgcctcagcctccagagaagctggaattacagctgtgcaccaccactcccgtctaatttttgtatttttagtagagacggggtttcaccatattggccaagctggtcttgaaagcttgacctcaagttagccaggctggtctcgaattcctgacctcaagcgatccacctgcctcagtttcccaaagtgctgggattacaggcgtgagtcaccgcgcctggccttaggaccagttaagtgactccctcaaatctcagaaaggtagcagtcagtcatcccaaaaagcaaaacctattaggaatatattaatacagtggtttcaaaatgattttgctcttatacccccaaaggagtccccaaagactatgactgtattctcacttccacgtttttggattgaccatcacaatttctcatctgacttaaatagttacaaaagaagcaacttctgttttattataaattaacattttaaaataaaagttatataacttttaaatgtagccagtggaatctaaataccaatttaatatctaaaatcatcaatttttaaaactacatgaacaagcttttaacagaaggaaattttacatcatttcttttcttcttgaactcatatttccgttccatattgtgaaattgtatgtcaatatttctttagtcttgcaaatattggccaggcttggtggcttatgcctgtagtcccagctactccagaggccgaggcaagagaatcgcttgagcccaggagttcgagaccagcctgggcaacatgacgaaacccgtccctacaaaaaaacacaaaaattagctgggcatggtggtacacatctgtagtcccagttactccagaggctgaggcaggaagatcacctgagctggggaggcagaggcagcagtgactgagattgtgccactgcaccccagcctgggcaatagagccagaccctgtaccccctggcccccaccaaaaaaagaaaggaaatcttttattggtcatctactctacttctttacatttaaaaagtacatacatttaaatagaattttttaaatttccaacagccataaagatgaatgtgtttaaaacatgtagaatttctatacacaaaattgttatatatagaaaaccctaaagaatttactacaacactgttagaactaataaatgagtacatcaaggattcaggacaacaggtcaacatacagaaatcaatagtatttctatacactagcaatgaacatttcaaaaatgaaattaattccattcataatattatcaagaagaataaaatacttagaaataaatgtaataagtgcaagacttgtatgctgaagaccatacaacattgctgaaagaacttaaagacctaaataaatggaaagacatcccatgttaaagggttgaaagacttcatattgggaagatggcagtacttctcaaatggacctccagacgcaacacaatc

SEQ ID NO: 917459 - DNA, 4001 bp, Homo sapiens
ataagtctaatggtcaatttcagtctaatctctggggaatctcaacacagaaagaaaaaggtttatattaaaatatcacatttttattttgtgactgggatttgctatatcctcagcggtctcagaaaatacattttacagaaataaggattggaggatggtgacttaaaaaaaagcctattctattcctaagcacaattaagtgtcaatcaagtgtcctgaaaagataaaaaccattatcacattatttcacattatttaattttcaaagttaagaagacaaagtctttgaaatgacaatctgatgtattaaacagtacctacaccagtgtacagtcttcaacaacaaaccaaaatctgttccgataccagtagttcacctaaattctaattttttaacgttctaataaaacacatttatttcaacataactacatgtatgtctgtgtatgtcttaaaaaatacccgagaaaaggtaaaattctgcattaaaatacctagcaatttagttcgattccataaacactgaaagaagtaacactctcacttaacagtcaacattacaagcagtctttaataataccgcatttaactccttagagctagcacaagttgatctaatgcctatttggccctttaccaaaaaagcggagggggctttgtctaacacctgtatacacctccctccgtagcatcccgctcattctagcttcttagggaaaccatagacaacgacgtttcagagagtgccagaggtgaagccgacccgaaaccacattacagaaaggcttcctgtttcaaacaggtccaataaagccaccaaattaagtctacgattataaagaactgcgaatcagaaaataattccatataggtgcagtcttctattacttttttccccactttcggaaatttcaaagaaaaattgctacattcttaaatatgaggccattatttcaaaggctgtaacaacctggaacgcaaattcgttaaattatgatacaataaggccaacctcgaggatcctcggtggactactagcgcacttccttacaattagaaagtgaaaaactgggtcagccctagagtcacgcaataatgctgcgtcacgaaactgcgcattccaagagaaacttttctcaggcccagaattaagtcggagggatccgccgcgcagctcaatccctaggaagcatgaaagaatgtattgtaaagagtaaaatcacgcgcaatccatcccaatataaccgcagttgttcgtgggccttcttgcagagaaaggctgcccaaccttgacggggccatgggcgctgcgggagggcaaaagaccacagagatctgcgaagccaaagtaaacaacggggttggggcggcgagaatgatcaatagcgatgctccgaaaggactccgcgataggaatcgagcgggaaggattccctccatcctaacagtccatgggttaagaggccgaagcttccctaaataccacactcccgcgagagaagggactgagaacaacttctcaaactattctctctcgaaatcgctcccttcctcgaaaattccatctctgagactcggatgaggtccccaccccctccacccttgtcccgtgaccgtcgcccgctcagcctcccagccgagtccgcggggcctggggcgcccaccccgcccacccaagggaccgcgcaggggtgaactcccccgcgccccacctgcgccttccagacctcgggcgccccggcgttgcctcgagagctccctgcgcggccgccgcggcacggaccagctcccactcccttacactgggcgccgctgcgctcgccgggggccggtcccgaggttcccaaggcctcgcgcgcgcgcttgccgtggcaaccaagacgttccacgacgcgcgctctcgaacgcttcgcgtcacgcggccgcgcggccccgcccgtcggcctcgctcccgccacagagcccgcagcacgccgccgccgcagcctaggtcacgtgagtacccacgcgcgcgtcttgccagcggattcatcaccggcctgctcagactaggttctgcccactctgaccttctaaatggtacgtgggaggacgtccgtccccttcggacccaagagtcaccgtaacactctagaaggggagaaaaggagcgagggcggcaggcgacagagaacctcgcgagtcagcggccccgcgcagacccccccaggcacggtcccctgcggccacgtcggctgctcggcgcctgcgcaatctctttctctccagcgaaaccgaggcctccggagagcctagtagagagtgtgggcagtgagcgcttgtagccgctagagggagcgctgggcacagtgcacgagagacaataaaggctgattatcccctcaatgtctctgcagcctgagctttgtgacttctgtatccagagcacagttaatttccaaaagcccgcctgcaccacgtgttttaagtcttggtgtgtgtgtaaagtctatatcactatcataaaactgttagttcctgattccgggatacaaagagtaaaatcaagatgaacatactttacccttcttgacaagtgtttttaaattagtaaaatattgtagatgacagactcttcaatagggctgccttagggaaaaaaaaacagaaaaaagaaaaagcagtatgtacttgcccggagcatttagaaccagttttgttgttgttgtgtttttgttttgttttgagacagagtcttactatgttgcccaggctggagtgcagtggcatgatctcggctcactgcaacctctgcttcccaggttcaagcgactctcatgcctcagcctccagagaagctggaattacagctgtgcaccaccactcccgtctaatttttgtatttttagtagagacggggtttcaccatattggccaagctggtcttgaaagcttgacctcaagttagccaggctggtctcgaattcctgacctcaagcgatccacctgcctcagtttcccaaagtgctgggattacaggcgtgagtcaccgcgcctggccttaggaccagttaagtgactccctcaaatctcagaaaggtagcagtcagtcatcccaaaaagcaaaacctattaggaatatattaatacagtggtttcaaaatgattttgctcttatacccccaaaggagtccccaaagactatgactgtattctcacttccacgtttttggattgaccatcacaatttctcatctgacttaaatagttacaaaagaagcaacttctgttttattataaattaacattttaaaataaaagttatataacttttaaatgtagccagtggaatctaaataccaatttaatatctaaaatcatcaatttttaaaactacatgaacaagcttttaacagaaggaaattttacatcatttcttttcttcttgaactcatatttccgttccatattgtgaaattgtatgtcaatatttctttagtcttgcaaatattggccaggcttggtggcttatgcctgtagtcccagctactccagaggccgaggcaagagaatcgcttgagcccaggagttcgagaccagcctgggcaacatgacgaaacccgtccctacaaaaaaacacaaaaattagctgggcatggtggtacacatctgtagtcccagttactccagaggctgaggcaggaagatcacctgagctggggaggcagaggcagcagtgactgagattgtgccactgcaccccagcctgggcaatagagccagaccctgtaccccctggcccccaccaaaaaaagaaaggaaatcttttattggtcatctactctacttctttacatttaaaaagtacatacatttaaatagaattttttaaatttccaacagccataaagatgaatgtgtttaaaacatgtagaatttctatacacaaaattgttatatatagaaaaccctaaagaatttactacaacactgttagaactaataaatgagtacatcaa

SEQ ID NO: 917460 - DNA, 4001 bp, Homo sapiens
ttctccaggcggactgacgctgtccatgggccaggctgcccccctgcttacgatccccagactcagacaggcgggggccgcgggcgcctccgaagggtacgtgtcacgaaatgcaggagcacacttcccccgcctccctctccccagctaagatctcccccaactcaagagaactgccttccagccccaaggagccactccgcccccaggcagaggtcacgccgcccactgccaggctttctgcaaagcccctcggacatccggcacaggtttcccaccccgacactgcgagcacgaaagccctgcctgagacacgcagccaggacgcacaagtccaacccacgcacacacggcgactccacgctgcactgaccgaagggggcattgcctgtaatctgcacacgcctatctccttttgggtcgagagaaaaaaaaaagatatcatatttcttaaagtgaaagaaaaatggctttttaaaaaaagggcattttccagggtcccactgctcactccgggcgcgcaggacccagctcccggagctgtaaactttcggtgcagatttgcttgcagtcaaagtagcatctttgaaataaaagggggcttttttgtttttattttttaagtgatttctgccgatccgatccctggcctccttcttcaaagctggactccctacctccgcccctcttctctttcccagtcccccctcccctttgaaagtgctttgaaacccccattaagaacagtgtgtgatcagactgaggattaggggaaaagaacttcagctctagggtggggcaaacggacacagaaactgctttgtaaaaaacacacaagaatccaaattaaaacacagcaacaacaacaacaaaaggaaataaaaaattgcctattttgccacctactttcaggtaatggaaaatgatcgcgaccgcttgatgactttcttcctgcgctgggtcagcccgagcttccaaaaataaaataagtgtgacccaggctgaccacgaagaacggaagagagagagctgcacttccgaaccgcagagacccggcgccaggcagggcgacgctcccacccgctccgggctagactgtccacacggagcagaggcgggcactccctccacccggcaccctgcctttttctcaccctggaagtctcctgcccccgaggcgggcaacctgtgtcccccagccccaccagcgccccgcctagggacagcctctccctggactttgccttccaccaagaggaagaacaggttagaaatgcgggcgcctgcaaaggcaacctggaaaatacaaagtgtttttctctccctctcccgctctcagcgccgaattcgcggccagtgcacggctgggagcagacttcaggctagctgtcctccgtcccaaccccctagagcgcgggcgcgcggggtcgcctgtcggggacactgcacggggtgcatacagaagtccccgcagaggcaggccgagcccaagccccgggcgaggcaggtccgcggggagcgccccggatcctcgcgaagaccctgcgggatttgagaaagggaggctcggggagagacggacccaactcctggtccggctgcacctactccatgttgcccacaacgcgccggccgcggcgccaggaggggaagagccaaacgtgcctcaccgtgatcgcggctttgcaccaacccctctcccttggattctcttctttctgcgatgtgcaaataaatccagtctcgatgcaaacttttttcctttctttccaacctctgctttagaccaacttccgagcaatcggcgggagaaaaaaagagaattcggagccagattccccgctgatgaacactccggggttcggagctggagacgactccccttctacaagcgcacgcggagtatttcctcttttttctcaatgaacaagaggccgaagcgccaacggcaagtcccttttcctggcagatgagcgaatgggaaaagaaaacggccttacggagaacctaaagccagatcgccaagtggtgcggccggggccgcgtcgtagcggaggcggcgcgggggcgcgggccgggccgggccgggcgggcgcgggggcctgggcgctgcgcgctccgccggcccctctcctccgctagcgctgcggcgcgcagctctcggcggtgcagactgggcgttgtggaggcgaggcagcgaggccgaggcgggggcggtgggtgcggaggaggaggaagaggaggaggaggaggaggaggagggtctggggcccgcccggggggggctcgccgttggcctgcgccctcgcctttccggaggaggcagggagctctgcggcggccgcggcagcagtaaatggcgtcatgtggatccgaggcggaacagagcagttgttgtcccagaggatatatcgcatccggtcccagctcattggctccgcggggctacattcactcacactccagcgcccgccagcgctccgagccgcaggaggcattcaaaagggcaaccgcgccgccccgcgcgtccccaggccggtcctgccgcccgagcgccgtcacgcggggcgcccgcggggccgggctgggcactgcagggtcagtttatctagtttcaaggaaacactgaccttaaggtttgcccagaggcaatgaggacgagccagaggctcgagctgacttagggaactttctccttgccaccaggaaaggggaatgaacatttaagactaatctgggccacgcagtgttagcatgaaaaacaagttgcaggttttaagactttatccagaatccatttcaagtctacctctccccttttctgttcccctttgcggagcgggtgacgggggctggggcggggggagaagaagggggaggggaaggggagcgggaagtgaggtgggagggctattggtttattctttgtctactggattaacccgattatacaccaggcaccagcacaaaccgcctcccccacctccgagccttgtacgggaggaacggaatgcagattcgagtttcaagtaccttctgctcttgctgggatttgcttttgattgtgtcgacttgtagtttttccgtttattagaatttcatttttaaggggggttatctatgaatggaggctttttgaagagcttccttactattttgcttcatgcagtagctaaagtctacagtctaagccttttaacttaattcattaatagacaggaacaagattactcagggcgacagcatgggcttccgaaatgggggggcgggggggagggaagggttggctcactgcagatttccttcttcccttaactaaaagtcatccttcatttcccacttttcttgccacctagaacatttctcaagattctgttgtccatgttgaaggtgcactattctttcccatttacaaaaaaaaaataaagatagaaaatgcatacatatgcactgtcctagctgccgttcatttactaagaaatgtgccttcacgtgggagcaccagtggaaaattaaaacttgcgcatacacacgcctaatattgcattctgtcgagcgacttacagaatgcttttactttacagggaagtacctgcttgtacggtcaaaattcccgaatagcacctgcgatcttgccccatgcggggtgttcttgaaagcagtgttaggaaaacatggtgcttcactcgtccagctttaacccaatccatttgcagctaccctggaactagctgccttcttctgagctcctgctctagaatgtccccagcgcgctctctgcctcgctgcggtctcaccctgacttctccatgtttctctagggctctcctctttctctagggatttggaaccagagatggcaagggaagtggcatgcgttatttccgggcgctggcctacgtcccccgacccctaaggtgagggtggacgaggctacaacggcctgctcccgagcgtcccgggactgcgggcgcaaaacagctgggcctctctggccacag

SEQ ID NO: 917461 - DNA, 4001 bp, Homo sapiens
ggttgcagtgagtggagattgtgccacagcactccagcctgggcaacaatagtgaaactccgtctcaaaaaaaaaaaaaaaaaaaaaagaaaagaagaagaaaaaacttccatgcagttagaaaatttggagatgacattactctatttcatccagttagtagctgacagttgctggacagctttggagaaataaaacacagtggaatgagtatatctgaccagctcttcctagaggaaacagatgacagagaaaaggaatgctccaaagaggagactgcagtaattcaagagtctaacagtaaagataggaagaagtgctgcagttgatcatgagttccaggaattatgtatggttgtccttcactatattctcagcacttataacaatgcctgccacctgataattgcttaataaatatcacttcagtaaatgagtaactgaaatggaaatattttctgaggaaaactatagaatttgaactccatcgtctataaataatgatggataaaaaataatttaaagattacttatgtattaaggttctgtactacatttgggagatctgagaattaaaagtaaatacacacatacaaggtgattatatagttatcacatttagtatgtgttatacaaaaatacagtgggcagagtgtttccagaattataaggaaactgggcgagagagttttatcataaatattaagaagtgcctttttatttcaatgcactgtcctttaaacaatcagaaacgtgtaaaaaatcaaaagtgcagaagtacagttagaataaaataatccacaaaaagacagtactctaactgaaataattatattgggaaatctctccttctagaaccacattccagaagcatgaaactacctgggaaaagtctaagaaataataaggtggtgaaagaggctatgatgggagaggaagaatgttagataaattatatggatttggaattaaaaggataaagcaagatgcaaaggagcaaagtgctattttatttttcaacagttagacctgttgggaagaggccagtcagatgaaattacagtacctctcacaatgactaaggagtcgggcaatgggaggttttagttgaaatggcaagttctgacctgaggtgcgacttcagacttctgcagtctgccttgtttcgactttaggaggtgagaggaaaattacttccaataatataggattcaacctataaatgatggggctcaagagacaggaccgacagtcagggcaggaggaggagcaagaccggacctagaagcattctgaaaatgtgtaggttttcactggggcgcgccagaagggcactctccgccccctcgcccgaggacgtgtgacatctccggaggaagcctccgagattcctgtgaaaatgggaggtccacacgcccattcgcgatgacagacacagagagggctgcgcagccttgaacacagaaccgggcccaggtggagtccgccggcttctggagagatctgcgagacgaaatggtgtcggcgcagcgtcgccggcgcggcggggcagcgtggggaccctctgaccctgaaggtccccctgcccgccgcgcccggcccccgtgagccgttgggtctggggaagggagggcccttacccatgtgctgcgtgtccagctgcacggccggcatctccttcagagggatgtggccagtccccccgtctctgcagcaccgcaggcagcacaacaccgaggtggccatcgcgcagggaccaccgactccgccgccgtccctagaccgaggcgacactgccccccgccgctcagctccgtctcctgcccccgcccgaggtccggacttgtctatgtggagctcggaggccggtacagcgacaccctaggccgggagggcgcaatgcaggctgagcttaggctggcctgcgaggaagacgcggagaatcaaggggccggggagagaccggacagggcgagcggccgggctgggccggggagacgggtggggctagtggcgcgcggaggcgtggcagggggcgtggcgttgcgggcctgcggatgtgggacggcgtgcgcctgcgcaccagctggttttttctccttgggcggtttcgcgcacgcccccagggctgacaggtgagtggggctgtctgtccctcagtacttccaggggttttcctatgcagaatttttaaaacgcagcaccccttggtcccggcctcgacattatttctagggatggattgacagaagcgaatcagtttgggggaaggggagctaatggaaatgacttccgagttttccctccgcgggcccaggttgagcaggctttgccaccacggagagccccagtctccctgccgtggctggtttccctcacatgctaaatagactcacgtgggccccaggagtaatgcctgttagtgactgcactgtggatgttcaccggggctcacgcgggccctaatgcattttcggtgcagagacgcgccctacctggcccatcgggctgcgtggtccggggcgcgtgggaggccgccctgggagcagaacgctggggcggggtcgggggcgattcttgacctgcctcttccaagctccccctgtctggtgcactgagggttccgaggaatgtgacgggaacccaggaggctgcgggaagtctgctgggtcccgagggaagccttcggctcctaccgtccgctactttctgcttccacacgggaggctgtcacctgtcatctccttccccacttagatcatccttccgtggtagattttacatcttcaggccgggtgcagtggctcacgcctgtaatcccagcactttgggaggctgaggtgggcggatcacctgaggtcaggagttcaagaccaggatggccaacatggtgaaaccccgtctctactaaaaatacaaaaattagctgggtgcggtggtgcacgcctgtaatcccagccactcaggaggttgtggcacgagaatcgcttaaacccgggaggcggaggttacagtgagcctagatcgcgccactgccctccagcctgggcaacagagactctgtctccaaaaaaaaaaaaaaaaaaaaaaagataccgcttggcatctggaaatgtctgggacgacctctagaattaacctagctcaaacctctgttcccagatcagtttcatcctgaaggcttccctagggatggatcatcaagtcctgggaaactggacataaaatgcccactacttaaataatgatttcccatacgtaacttttagtgacccgagttataaatgttttttaaggaggatttctatctatgcaatgaggggaatttttcaggttcctggttctctttctataaatggtgttttcattacaatactaagggaaagttttgtacgttgaaattaagttaccatagaatttaataaccaaggtgattattaaactgattgagggttggtcttttcccccattgcgtatgcagtactttcttggtaatcatttcacacaagaaattttcttttatgacaaaccttcatcgttatgctgggaattaagtgctttgatttttttttttttttttttttttaaccccagggaagtgctgggggcggggcagggggtgagaattttaacagaatattggagagacaaaatttttctaccgttcatatatatatatctagttgaattatttcaagatttcaaggtcagtattgtccccattttataggtgaagaaataggcctagaggtactaaactttacaacttcaggtgagcaggagataaacaggtaggattcaaggcttaccagtctgattcctgttagaagaaaaacttcagctgaactaaatttaaaggagttaaactgagcagtgaatgactgggcagcccccagaatcacagcagattcagagagactccagggatgcctcgtggtcagaacaaatttttagacaaaaagagggaagtgacgtacagaaatcagcagtgagatacagaa

SEQ ID NO: 917462 - DNA, 4001 bp, Homo sapiens
ctactttaaacttctccttcctgaaggtgtagcttgttggacacctcctccaacaaacctttcctgaacccttctgataattatagccacctccactctatgatctctggccatcttgaattcttacttgtcctgttagatgtaactgtgacttctgtctcttttagagttacagtgtgagctcagtgaatttgaaaacagtagggacaggtctgtggtggttggggttgccatggctgttgttaagaatgaagatacaaacaagcttgtatatgggcacggctgctgctgctgctgctgatggttgatggccgttgttgattttcagagaaagaaaagtggattctgaaatggatgtctctagtggataaagtaaaggtgggaacagataaggggaaagagacagtaagttggaattttaaaaaaatctttcagagaggaaggtggccatggggagctggctgagtgtgggtttactctatgggtccctgagcaagtctcattacatctcaaagcctcagtttcctcactgcaaaatgtgcacaacattatatatactcttctgagtcattgtaaggatgtgagaaactccagaacaaggaagagcatttagtttactgctgcaatcctggtctctgtcacagggatttgaacttgacgttatgttcacatttgttaaaatgaattatgtaatttgacacagagcaggcacttaaaaattggagctattattattaaccgaaatgaatacttttcacaatttccactgatgtacccaaatgggagaagaaaataaacagatacttccaatggatttatttatttcctcctatgtgtagttggaatataacatgcccatacttcttttaatgcaacaaagctttccttcaaatttgaggaaaatctatgctccaagaaaatgcactgtcctgtagcttctaaacactcttggccatgctgccttgctgaagaggctcaggtgtaaatttaaaagataaatctcattttcagagagatgatctatttattttcaacagcagcctccatgtatgccagaaaatgtggggttcaggtaaattctgactgcactctagacatttatgatggacccaggtatctgcccttaaagaactgagacacacgcacacaggccatcagtggctgatgttggctaagcttaagatcacgggatgaaggaagaatctctgctcagcaacacgaagtgctggaaaataaagactttcttgtatatgtttccataaaatagcaggacatcttatgttttgaaggcaatttatgcatttttttaggagtgctaccaacatcatgcaaagataacttcagagacaaaacccaagtctgatcactgtctccttcgcttagaattctccatggttctcaaatctctccaaagaaaaatccaaatttccgaggacactatgaaattcttaagctcagcctgggtccctgatattcttctgtgtctcaactgcccacatccctgatagttggcaatggtgctaaacaactcaaagtttcctaaaatcgaccctccaactcccatcctctgttccctataggcaattttcccactgtctagaatgacattcttcttctgctttatgtgactagtcaattcttttcctctttgcctctctgattcccagctctagttttatctttccgccatgtccttccagaccacctgaccactgccactgaggccatgcaaggctaagtaacaagttcacaaaggtctatcctttgtacccacatgcccttctgatccagcacttaccccggcgctggaatgtgtggttcactctgcttttctgtttcccaccacagacagtgtctttgcattctctgcaccagcgcagcaccaagcaccacaaaggggcctggttaacgtttgcatggagaactgaggagggttccagcatggaggttcaaagaaattcagagcaaggagcagatgatagtcctctctcatgtttccggttgctaacagtggagaggaacctcactgctccccagtgacctgcgaagcctcagctgagattccaagcctccacacttcctttcctcattgttttcattcccattaaaaaggaacaccaaagatttgcatcacagccttaaaataaagtcccagagaaaaggattctgtttggaatagaaagaaccacacactttctaatgaatcaaacccctaaagaggactaaaatgtaaggtggggtatgttccactcattcacattctcaacagagtcttttagtagcgaacagaactctcctctcgtaaagaaacagtgcgatttctatcataattccagtggttaatcttttgcttgaaatttccaaatattttcttacatgccctttaagaccataaatacagttttaaaacattccacagttgactaaaagcagcaaagatgatgattctaagagacttccttccttttcctcggtacgaaaactatcctcattgtataatgcaggtactaaggttcgtgatctcttttaagctttatggtacttcttttttctgtggagtgtggcttttatttacatcctaaagagtatgtcattaattatccacttcattatctcacttatgtcctaacacaataatgaaatcagcaaattgagagtatttgagattaacaatctcaaaatagcaaaacaaaatgaaacaaaaaaaacccttgtttactaaattctaggttttaaaaattatctttggtataatggcttctattagcacaatccagacaccaccaaactacctgttaaatctgccagaaagccccgcgttcctaggcttgcaaagaaaatgggtgggaagtagttcacagcaacgctcttaagtgcttgtgtaggagagtggaggagtaccactaatgctgatgtcattgtcgtttctgaaattcctgccctgatcactctcccatctgggctacttttctaatctggaattttctctcccttctttctctcactacccagacacctgacccccaaggaatcattgagtcacttcctgtcctctaaccttgtggcttaacttccgtttctgtttaagagcattgacctgggggatgtgaagagaatgacagagggagagggttgccgggaaggcagggaaagagggggaagggtcccgctctatcggggtcagacaaggagttgctgagaactgcccacttttgatttttttgagataatcattgctgtcacagtcatgatctgaattgtgcattagttaatacttgatttacctccagaatctgctcatggactttctactgcttatctgcaacttcagaaagggtggagagtgaaagaaataaaaagcaaattcatcagtcttacatttatgaaaagtctgattgggcaaacctgagacctgttcagaagaaagggcttggaagggcatgcattttactgagacttctatctttatttgtcactaaccattcattcattaaatgtagtgcatgagtcttagctttccagatcagtttttaataaaaggatatttttactatggtaaaaaaaaaattaaatgaagcatcttttttttaaaagaaaaaaatttatttatttattttgtttgtgagatggtcttgatctgtcacccaggctggactgcagtggcatgatctcagctcactgtaacctccgcctcccaggttcaaatgattctcgtgcctcagcctctcaagtagctgggattacagacctgtgccaccacacccagctaatttttgtattttttagtagagacagggttttgctatgttggctagcctggtctcaaactcctgacctcaagtgatctgcccacctcggccctcccaaagtgctgggattatagacatgagccactgcgcccaacctaaacgaagcatctttaaataatgttgtggcaaaacccggctgactatgggatagacctttgagtggactctgattctagccttcctggttgctgg

SEQ ID NO: 917463 - DNA, 4001 bp, Homo sapiens
tgaaatccaaggcttctgactgttacctcggtccttgaaatcaattaaaatcgtctccataaggtctgacgtgggtactgtcagaagctggcaaaattcttttacacattagaaaaacaggtgcggatgctaccttgtcacatgtcagcatgtgtcagcacatgtgagtttagctcatgcagaacatactggttggcatagatgattccttcacatgcagatatgaatctacacaacaacagtatgttccagtatttcacaaagagtatcagacgcacatctctcaatgactacataggttgcacagagtgtacaaagaactctgtctactgatatttccttcctctcatttttcacatttagactgtaggaaacaggctaagctaatgaaaagacagtacgacaaaatcttcaactttcagtttctgatttccccaataagaaaagacataaatgtgtcatttcttatgagacgcgtggaaagaaccccgtagaaaccatatggttgtcagtaacggcataatctcattcaaaggtgctaagaacactaatgagaccaggatgtcaggaaaagcagaaatagatcaatatttctctcccatttatagttgtcctcaccatcagtctctgcaccagctctatgtaaatgaaatcaatcagcaaggatttctgcaaaacgcataaaacagttctcctctcagctctaccggaagataaatgattccagacgttggcctgtggccattttcccacacatgctccagagctctgacatccatattgggccataacactgagtggtttctactttggcgagtttacagccagcgcttccacttctggtttggactagacagcctgctaatgcagatgcaaaataagtccctttccgcctgtgtaaattgtaaaagaattgactttttccaataaaggacctcctgtgagccccctgaaaactttctgctatcgctcatagaatcttatcattctcaatcactgctttagatccccttggaattagacgaatcctggcctaataaaacatgcgacatatgacatcgaacgcaaaccacttagatgtaacatacaattaccaacagcccaagtccaactttgaaaacgaagccgttgaaaaatgtattaaacataaatagcaggattgtttcatatggtagcttatgttctgaaagagggtaacagactttctgagaaagataaactacagaagatccagaagcagcttcctttaaaaatgatgtcaacaccaataacattatttggaaggctcgtaggaagtccaggtcatattcatagctatttaagtaacgtagcccatggaattaagcatgctaatacaaagcatttactgccaacctcgtcaatctgaaaggtgggtcgctttcttaataaactgcctttgaggaaagatacaaataattttgcccattgttataaatagagagagaaggaaggaaggaaggaaggccttatctatatctgtagtctgagataaaacaattctctctgagattaaataaaagtaaaataaatctaactgtaacttgcaaatgtttctagagtgagtagccaaaatgacagtcactgctttttaattttaaatcaagttcttgttaagagaatgttgtaaatatcaagtccactacaaagaaaactttttatatcaatgacaaaactcacaatctacataggaagtaactgttgtctttcccaccaccacgacctctttttctatggaacacaaacttactttgtttaaaattgtccttaggctgtgctgtacctttcaaacaaaacccctctcttcttcaattcattttcagctttcttgaaaactgctcctcagaaactgacagatggtgcatctgtcaccgagtgttttctcttcgttatctctgccagctaatatttcctctgtgcttggctgttgtctgtgagactggtccacatcattctagcctgatcaatggtgtgcctggtttgaggttggttttggccccgcctccagctctaagagaaaaaaacgaaaactcacagctggatttcctataaatcctctttttaaaactggctctgccgctctggcacataccagaggaaacgctgccagtctatcacaaaccaaggggggtgctccttctcctaggcacccccaccgctagtgtcaggtgccttccttatataacacatcccattttaagttagcctaaaacttcacaggaagggaagaagtgttttaaaccaagcttaggtttttccatgcctaataagactcgaaagaagatgcccatgactgaaacacacacacacacacacacacacacacacccataaataatttttaatctgttaatactgtgcaaaccaattccaaggagaaaacagaaaaggagaaaatgccaaaataggatataacaaaatcagtgcacatttaattgtgtatccttaaaaaactcaggtcatccttcacattctgatgacattacaccctcagttggcaacaggatttgcttgtatttacactgccaatgaacttggtgaatcaggagaatgcatgggatgcatttcaggttccagatgagaggcagttgcttctctgggttaaccactaccaagtggggttgaacaggtgactgtggaacaatcagtctgctctgtaagtgagcatgacaaacaatgcattgtagactttcgtatactgcatgctcgatggtaatctcaccttatcagtgagtggaggccacacgtttaccatgaatagaaaaagtgagtgttcctaaactaaggctatatgttggaatactgtactaggattcacagtcacaggatctggattcgagtctcagttttatttctcggcagtgtcctcgaacatgaaaggcacagagtatgctctggagacctcacagatgacagcagatcaaatgaagatgataaagaactttgttgttattatgcaacattcgtattgttattttcaacaacagagagaatattaaataaatatacatgtttaatctggcagaggatgataccaaactaccactgcctgtgataaggagagctaaagatgaaaggattccgggagtaaggtgcagagtatacagtgcatgctgaggataacagccactcagattttaaatgtttgaactccacagtgagggagaatacgaagtaagcatagggcagagtggggctgaatagcaaaagtttgataccttagttctccttccactctcactcaatagaaccctagaactggcatctgccattagtcagtgagctccttaaaggcaagaaaaacacaactggagtctgtcaaataagagaatgaatgagactttgaactagataagaggtactcactctaagagagggagtatagagtattgtgagaagcctgagtttgaagttgtaaaatcagatacttcaaggttgagagtgcctgtgtgtctcaaccttgtagggatttgtagagagagaggctttctgagtaactgaaaagtaacacgagagattttgttcagggtcccctgatttcgtccagctttctacactcacccctcaactccacccctttcccacttcctccatgagaacgtcattctgtgacaatgaacttgagtcaagaaccaggatgtctgtaaacatccctttaatgaaagcacatggattgttgggtcaattcttcccatatggtgttgcaagtctttgcttgctgtagctggccagaagtcagctttttaatccagcaggccctgctcgatgcaggctgtgtgacaggcatctgtgaccctgccccgcccacaaaaggcagattataggggctgctcctgctcctaccctgcctggcacctcactgccaatgagcttctgtgctcttgactaaatatattgggaaattccctacttccataatagtttcatgtgtgtgatctcttctccccaagctaaaggattatgccaattttgggtaagagaat

SEQ ID NO: 917464 - DNA, 4001 bp, Homo sapiens
tgccgagaatggctctgatgtcgtgtctggttaatgaaactaacacattacttaaatatttatcctcacatacatagtatttggatgcagatgtggagaaatgttgtcaagttaaaaataactctttcagtaaggcaatggcacactggaatgctaatccaagcccactgctattcttcacacctacatcctgggtgtcctggctgcatgaagtaaacagcccagcttcccttccttaggaaccttcacctttcggctagagccatttttaaaatgtgtgccaagattagcaagaaacagagtgacaggagaaagagaaaaatcctcagagagccactctcagttccagagacccccacaatgtttatggcatgcctgttggggaaattttcttccctccaggacaaaggtagcttcaacattctaatccttagagtgaatgagcacctaccctaatctgtgcgcagctaatcagtcatgtggttcaaagcataaagccatgagaatacctaaagtcaggtgaagcagcttagttctggaaaggaaaatgtctggaggagagagttttcaggccaagactccactactgctgcaccctcagattttaggtaggatgtcctttggggttcacctactcaatatgtaggtaggagagaacctgtgtcatgggaatatgccctggggacttacatggaaatataagcccctatcaaggatgagaaaggatatggagcaagaatatggtttgctttttgtggagggagatatggatgcagattggtgctctctgtgaaaagggtacagtgagggtttggagatctcaggggaagtaacaattaacttagtccctgtatatctgataaaggcaaaggaggagagtaggaacatgtggacaaagatttaagaaaatagatgcagtttgattatcatctacgtcttctcttttaagttctctagggcacaaaaagaagactcaacatcttattttccccagtgagagagaaatattatacagtgatgccctcttaggaacagatcaatgagctagctaaaagcatcgagtattctacctctggaggcagatcagacttgaacaaaaatattaaaagttcctgtacatttctacaggaagatcggattttgttaacaacattagacaaataattgccttctatattgttgaacttgttctacctccttttatgtctgataaatccttggctcctagtctgtactataattactttcaactttccaatttaatttgccgcaatcacaggaaactggactgtacacactaacacctgatcccaacagatttttcacatcttacagagcagtgccaatgaagttgtagcggcggagtttaatcccctcccatgcctaagcaagcaggaagcgacattcaggataaagtcctgcggatcgggactgccatttggttacagttgcactggtgttttctctctatgggattggacctgcacccagaccccctttcaactggcaaggataatttgatcccatttttaagcatactgatttacagagagcagagagaaaacccagtctattctggacacttccacacatgtgtaaaagtacaacaaatctacatgaccgtttcattatggaagacattttattttttaaacagtggtgagttttttccttttaagtcagagctgtgcgtgcacgtttgacagtgagctgttattcctaaaggcaggaggttaggcagcatgttagagtttcatattaaacaacaaagagttttaaggagcgtcctcaaattacactcacagtttcaaagttcaagaattgtggctgagcactccttaccttacaatttcgggtccaaagaggtctttaagtttaaagcagtacatcaaatgtgcaggatttattttcttgcatgaaagtctcatctgtcatagcactccactccccgagaagagcccagcctcctcttcctgaacaccaatgaggaaaccagaagagcacatgggggacgtggcttccctgaaagcctgtcagagtctgcacatgctctttgtgacagaggtgccaaattaaccttggcatgaggctcacaatgcacctcattgtgaggtcctgggcacctcttaggggaagaaaaaggttataaaatgttcgagccaattgaaagttttcacacttttgctgagatgtgcctcttattcattaaaaataaaagagacaatttttttttcctgttaattagcttcctgaggtacaagtaagacggcaccaacatgttaagataagagagaaggctatcttttggaattctactactgtttcaggctagtgagagggagtaatttataaagcttcatctcaccacctagaaaagtgcctattctgtaagagctgacaggaagttttattggaatgaagttcatgattatcagtgtacaatgtaaaataatgtttgctaaccatgttccaccaggaccaagggtaaaatgaaaatctactgcatctgggttataaaatcaatctgtgatattgacataatatttcaagtggactctccccatcaaggtaactagaagtcattgtgaggaggaagtccacaccttcttacaggacacagacatacaatgaccaggaaaacatctgcctgttgctttctcacctgtgtatttatctaccgattacaatgtgacacagaaaagggatattgggtagaaaaaatatatagccaagtcaaaataattaaacttcttaaaatcaaaatgttaagacttaagtcctgattactgtttgcatagagcttgatgctgttcattctatcctccttgctgggacaggagcctgaagcagttcaccatggtgagcagttggtcatagatgtgaagaagagagaaagatagcacctggaagtagaaagtgctgcagagacccgtgtttgttcgagatctggttttggttgtacaaataataaactctcagcccagggaactcttagggtatttctgggtctcagtcagtttctttccttttcttttctttttttttttttttttttttttgagaccgagtctgtcgcccaggctggagtgcagtggcgcaatcgagactcactgcaacctctgccacctgggttcaaggaattctcctgcctcggcctcccgagtagctgggattacaggcgcaggccgccatgcccggctaatttttttgtgttttagtagagacggggtttcaccgtgttgcccaggctggtcttgaactcctgagctcaggcaatcagccctccgtgacctcccaaagtgctaggattataggcgtgagccactgctcccagccctgggtctcagttgctttttctgtcgagtgagggaattgaactagtttagggatggaaaattgattacctgcaagggctcggagtgcagagtgcacttccctgggtgggcgctaaggggagatggagaccgtgtgctcatgtatccaagcatggctgtcactcggtgatagctgattcgcagttggaatgggggctgcattatgtcccattgtctgctgttttagaagaagctagactttcagatttttatgtgaaatctcctagatttcatacgtgggtaacttactcaaaatatttgaaaacattgtgaatgccaaatgaaatctatctgcctgtcaaatttgtcctgctgcccatcattttttgacttttggactacattattttgagtttcatcctggtggaaaataatcctaggagattagtctctaaaagaaactgtctcaagcttgtagtcccagcactttgggaggttgaggtaggcagatcacttgaggccaggagtttgagagcagcctggccaacatggtgaaaccccatctctactaaaaataaaaaaaaattaggtgggtatggtggtgtacgcctgtaatcccagctactcaggagactgaggcatgagaatcgcttgagccggagaggcagaggttgcagtgagctgaga

SEQ ID NO: 917465 - DNA, 4001 bp, Homo sapiens
cccatatgtctgtgtgacagggcacgttcagtgatagtgcatgtgttcacaacttcaaatcttgaatggaaaaataaccctcattccaaaaagaacataaataatatttaaataaaataaattattgtaaatacatctaaggaggtctgcaaagcaatttcagctagttctctgcaatatttctcatatgatatgcatgctgaggaacatttatatcttgtagatgatagcgcatcattaagcctcggtgttcataaagatgatggcatttggaaaggcaccattgtcagaaatttctaaaaccaaagtggagctggtttttattctaagcctaaagtatttttaaatctagccacagggaaataattacttttgtttctattcaatcaagacctggacacagagtttatgcaatgacataatatccttcctgaaatcagaccagcatgtaggaaggaccagcatccttcacacataactagttcctgaacctttacaaacaaatcctaatttccaaggaaacaatctcatcaaatgctgcccgctagaatacatattgttctttctggaaacattacaataagattttcatgattacaaaccccaacttcctctttaatattcaatataatcttaaactcatttatttaagtggaaactgtatttttataatggctctaaaaattcctggttaacttatttagcaccaatataataatttctttttttgttgtgtaggaggagggtgatcattaactgactgtcaacgtgtgttaggggcttcttaggaacggctctaaaaattcctggttaacttatttagcaccaatataataatttcttttttgtagtctaggaggagggtgatcattaactgactgtaaacgtgtgtgttaggggcttcttaggaatgttcgtctttctgctttctactgatataccctataaggagcatgttttaaattttttttttttttgagactggtaaattttagtaatgtccagacttccaggctggtattttgaggggctgggaataaaaagaatatcaagcagcttataatcaatattctcttctctttgcattaggaagctggagttttgtgtgcaggttacgggatttgttttgagatgaacgaacaccttaattctctaccaggaaaacaatattaacacatctgtggcaactgctgacataaacatacaaacaggaagagaatgcgattctagtgcttagcctggtggcctttagaacagaattcttgctttcctcctcttcactaaggatattcgaaatactctgggcagggtggacattagtccctcgcctcctccctaatgaaataaacaagtgtccacattttaaatgtgacggagtgtgaggaaactgcagaaaagctcctaagatacacactgagtaacagttctcatctgttctgtagacacacgtcagtttgggaatttatgattcactgtcccaccgtgaagttttttgtgcactttatgttgagctatgtggcagctaaggactgtcctgtttgctgaaaactgcagcctaaagttatttttcaaagttacgggtagtgtggcatagaaatccatatgttataaagtggaaacaaacaaacaaaaaaaactgggttagcatgaaatagagccaacagaaatcagaatgagcaacagccttccactgccggccactcaccttgttgaattttagtcactagctgatggcgtgctagaatccggctcatcctgtaaggagagcgtcttgtagtctgatcaaatcgcaagtacatctcctggccctcaggtgtcatggaatttaggtagtagcagcctgaggctggggtcctgggcacctgactgaacatctcggcagatttcctattgccacctcagtctgcctgtggctgttgccgtctgtctccagtctcagtcaaagagcaaggcacccagcccaggacagctcaacagacccagcgatttttaaaaagaaagaggagtgccaaagccacaactcagaattccaacccccggggccctcacgtgacctcgggaaccaatgagaggaagagaggaaaatgggaacgtttgcagtcagccctaagccccgaccagaggcagttccagccgccagggtccctcacacaacgctgaaagcaaaatacacgtatttgacgtgcctcagagctgacgaagcacccaaaagcagccctcactaaaggagtcgaaagaaaaagagagagggaagggcaaaacaagtagaagacaaacaagtccagggctcaggaaacttttcagcctgtcaaagttagagaaagctccttcgctttctacagggcagcagcagccaggtaaaagatggacctgataaatctcttaaatttaaaaaacacaacacaacaaaaaaaaactacttcaaacaagcatcaacagctgagcgtaagccaccaccttcattatcaagaaacaactcaaataaaaacttttccagtgaaaaataaacttcaagggctttaacaccaggagtgaatacaccacagatcctgaccctcacgtgatgggaattggagggctcttacagataagactcagagaggcaaagtacacacgcgttacgtattaagcatcctttcctctttgatttctctacttccccaatttttaatcacctagaggtaaaatacttagaaggtgcctatcacatttaagacactgaatcatttaagacaagaatcactgcagaagttgcaaaggtacttcaaagatactgtcatcaacctgctaaggacccattgagaagttatacaaaagcttctaacatgaggccatatatatgtctcaaaaaggacgcaaacacaatgctaggtgagcaatattatttttgactggggtgatgattgcaagccagatagagaaagagacatttggataggctttttaaaatggggggaattctgataggcagaggctggggagggctttgcaagagactgtaggtacccatgtgtgcagatccagaaccagagtatatggtttaagcaaactgctagtaattcagtttggccatatctgagtgtgtgtgtatatatatacgtgtatatatatatgtgtgtatatatatgtgtatatatgtgtgtatatatatacatacacacactgagtgacatatatgtatatgtcattataattttccctgtttttcttctttaacattgtttgatgtgaagagaaaaagtccacagaaaacatgttatcaaattctgagcctggggctgaaagaataaagttctttgatacaaaaagtatatgaccaagttgcttctacatttggctgacggaaacatagcctggctgggaatttatagtctaataatgagaaattatttctacattatttccaaattaaaagtttaacaggatttaaattaggactttgattcttcttactctggctctccgaggcccataagccttaacaactttccctgagggaattgttgctagcctgattctgagaagcagctcgtcttgtataactgtcccgctatgagaataaacaagttaagcacgatctctgcagcccagcatgtgacaattgcctactacctcacgtagttggtaattgtcagcctcttcgggtggttacacaagagtcatcatgtctttgttttcaggttggcttcatggcaggaagggaaagaaagatctatggggccatactgtgcactttccattcttatttaggatttgagcagcagtttttctgttccatagcatcgtctgtggaaggtgaaagggatctgagacctaaggaactgctcggcagaagctcgaatggagaaaggtcgagcaccatattgcaaagttggctgcctggaaggttcatgagcccagctcagtccgcaccggtggccgtccaattaaggtgcttgcatcagctgctttgtgcacgtgctttcggcttgatggtccaacactgggagcatctgtgtcat

SEQ ID NO: 917466 - DNA, 4001 bp, Homo sapiens
acacctctaaattcataccaaagcggctttagaaaataccaagaaaccacatctgattgttacccagcagtcagcagaagtttaggttttgaatgcatgctaaattcaacgctccttaaatgagagtcgacaaaagaatattcttcaagcatcttcccagtcactcttaagataataacttaactgttgctgcttaaatgtatatttatttactgcttaaacatatatacacacatatatatactgcttatatatacacacacacacacacacacacatatacacacacacacacttggactaaaattctagctgccattaaagtggtaactttgagttcctatttttccagaattcaaacctgaacagtgaaatccagttttctttttacggtttcaaaaaaagaagggagagggatgatctcactggaagaggcgagcagaccccagaggcagtcccaggtctgggctctgtgcttctcagccctcaagacacagggaaggagcctgttggtacctgtaaatcaaccagtaatctacttggatgcttttggttttcttcaaacacttaacgttcactcagctaaactggcagagcaaactttcatgacatatcctaactgcatcctaagatttccatcctaagcattttgccaccatttctgcgcctacaaagtttacaagagttagccaaggacggtagctttgtttttcaaagggctaaaagcaacgacaacgaaaacaacaacaacaaaaaacctttaacttatacatgtaaatttgaaattcaactcctctcccactccccaaaaagtcactggtaggccaaggtgtcaccaagtaccgaaagagaggtttactgggcgaagaattcctgtaaatgcaaccaagtctcaaagtgaaagtccagggtcccggggccgggcccgggaccctggtgcgcggctgtccgagggattcctccttccagaaggtttgcaactcgcactttcccccggtccgcaggtgcacgggggctccgggcaaagccactgcaagtggaactcgcggttaccttcctccactccaccctgcctactccgctcgggcccggacgagtccaggcgcgctccccgtccccgccctgcccaggtctcccgcccgcctgcccgggggtgggggacgagcctgggggacgcgtcctggggccctccgccaacccggccaccacgcagggccccgggacccggcgggggcctccaagggcatcactccacctcacttctcccggggacagggccacccagggcctgcagctccggaagagtgttggggcgaggggagcgcggaggactaggcgcccgcacccccacatccggacccaggccgcggttcctacggctcctgcacgcacacgccggagacctcggccgccggagccggcagggacgcccagggactcggactcggacccccggccgagccgggcgcgcggggagccaggctccggcgcgaccccggccggctgagcgtagggggacgccgtgtggataccgccaagttgctgcttccgccccggtcgcgcatcccggccccgcggcccgcgcccgcctacctgcatgccgggcaggcccgactgcaccggggagtgagccatggcgctcaggacggccacttcctgggacgggacggccgggccgcgacgatccgcgcggggcggcgaggcccgcgggccgcgcgcagccctcgggcggcggggccggccggagcccgaggccaccccagccctggcgggtcccggccgggcggcgggggctcagcggcgggtggcgggccgcgtctccatgcacggcgccagggaggagctgctgggggcgcagggcctcgcgcgcactgccgccgccgccgctgctgccgctactgctgggctggagccgggcggcctgggcccgcgcgcgctggccgctggagccggagtgggcgcgcacagcccgccgagcccgcgagcgccgagcgcgtcccgccccggcccggcccccgcgcccgcccccacggcccggccggggaccccgccccgcgcttccgggagggggaggggagaggccggtggccgcgcgggagccctaggccgcagccgccgcctgtcggcccggcccgggtcccagctgctcctgcggcgctcccacgcccccgcgggcgggcggcggggccgggagggggcctcggctggggcgggcgccgggagggaccgagtcggggccggaggctggccgcgtgcccaccgggccggcgccggggcgagcctgggccgcggccccctcttcccgccagccagcccaccccgccccggcggcctctgggaaaacgcgtcccgggcgagcccctgagggcaggatcggagtcgggggcacctggggaaggagagcgccccgtggggcctcggccggtggcctgtgccaaaaggccgggcagagctgcttcggtgtctgggtgaagtttccagccaacccaagaaggaaaccgaaagggaagaggccgagagagaggttaattcctagtgctttggttaccgaaaacagcccggctgggactgctgggctgggaacttagctaagcagtgcggaggctgaaccccaccatctctgggatccgcagcaaatcagaagcccccacccacgataaggggaaaatggggcgcagagggcagggaggaagggaagagaatggaaggaaagcgcgtctggactttgaactgcagccctctccctctttcccttgcctcggaagctccaggcccactcagcaccagttctgtctcctcttttcagccgccttctctctagctactgaggggaaaagtcaggatgaagcgggtccctcggcctccagaaggtgttttattacagtcgcaaacaggtagagcggcagccaccccagtgatgactccctgctccttagattgtagggacgctggcacctcactcatgctcctaagtggccattttgcgccctggctgggcgagttaggcagacaaaatgagcccccaaaagtttaaaggcctccaccaaaggagtatttcttttctgaggtgtcattgtattccatccacgaacttcagttcccccgggtgctctggatctgacatggagtaggatgctaacatctaatcccttctttccctttggaaagatgcatgttttttctcggagtcctagggaataccttagaatactttcatggttgtcattggtacacccatcccttgaggagccctgccacccgtaagtaggactgcaaggaaatacaaaattaagagaagtatgaaccctgatacccaggaacttaaaatcaggtgtataaattttgtacacctaaaaaatatggtacctaaagaggcgaacagcaaaacaagcaagaatgtgaatctttaaaatgtttctattcttcagcgcagcccaggaattctacctaaagtaacatatcctaaggcaacaaccaagaagtgtggaagaatgcatgtaagaagacacagtgatgtttagaatcctggggaaacggaacagccaaaaagtctcacagaggttaagtaaataatagcattttcatacgagtactatgtagtcatttaaaattatgtctttcagtacctagtaatggggaaaatgtattcattatatattattaaagaaaatacagggtacaaaacactgtatatagactgatctcaaatgactatatatatattaatatatatggcctacagacacacagtcatgtattgcttaacaatgggtatacattctgagaaatgtgttcttagttgattttgtcacgtgagcatcatagagtgtacttccagaaacctagatggcatagcctactacacacctaggctatatggtatgacgtattgcacctggaccacaaacctgaacagcatgtgactgaactcaatactggaggcaactataacacaatggtaaatatttgtggatctaaacatgtctaagcatagaaaaggg

SEQ ID NO: 917467 - DNA, 4001 bp, Homo sapiens
aaggctagctgtcagagctcaagctctcatcctaacagctacacagtacagagtcgtgtgaacagctgagttctcaaagggggcagtaacctgtcatccacagggcctgtttgtcaggaaactgagaagcaatcccgatgtttagcaaggcaagacagggacgctgcatatctccccacaaataactgcccagctcaaaatgccaatggcaccccggtgacaagcactagcctggaaccccacagagcaaggaaggactctaagagacaccactgctgcagacacatcttccctcagaaatggtccatagaaggaacagaacgccaggccaaccctccaaatctatgagtcctttgaagaagctgaactactaggaaaaggaacaagcacagggaggagagggaggcctgaaaaggaggtaaagaaagagaatgaggagaagaaagatgacacagaagagggtatccagagtggtgcatgtgaggtgggtcacacacacaacactgcagcaacggcggtgcctcatgagtgacgtgagcctcagggcccatcaggggccacccagccacagctctccaaggtgagacacactgagttccgagcagctgctctccaagagaactgttgaaagccagtcagcccatttctggtttgcaggccttacagtgctacagcgtgtccaccatggcaacaacgcacatatcgccacaatgacacacgagcagatagccacagtgacctcctgcacacaggggcgcagagcccctgccccatgtttgtttgaggctgcacatcaaacaatgcaaaagctcacaaaacccaccaaccatcttagtacaaaatgaaccaaggcttgcgtggtggacatatacccaacgggaaatgcgtcctggggttaccaagagagcaggacaggccagaggccagacactgagtgctcagcccacaccggaaggtcatggccagcgtaatccgaggtctaacgagcggccagggattacaaggactacagttttagccatgatcccccttggctcctaaaacgctacacaaacatccactgtgttaaaaatcaacctatctatccaacttccacttaaagtactgcactaaacatatcaattgggtgattaatcgagaggcatttaatttttttcctgaacaattgctcaattgttttcagtcacggcactacatttcaaatgtcttatgacggtcatacttaggaggaagcctggctgtgtgtttacaggttttaaaaaacacagtccaagactcctgggtttaccaagatagtcaatgacccacaatcaaagcccaggataattttttcaagtgaagactgtttttggagctcgtgagcagccctacaacatcctcctcttcctattttcaagcttatcaataccccaggctgagtatcaccagtcacttttgggaatgccacagaatgcccgggtgggtacctcccacctgactccccctacacgcggccttgaacctgcacctccacctcctctaacacaagctgctaggatgagcagctttcggggatgcgggggaagcagcgcatccttttttagctataatgaaacataccccgttttcagcagctactatcctcgctgctttcatgccctctcccttaccgtgctccctccaggatgaggtagagtggccctccttttattcaaggccagtccccaaagctgggctctggagtccatccttctctcctccaggataaggcttcgtcagtaacccccttctcgctccttcttccattcacccctctctgctggctctctgcccttggcaacatgctccagtttctcccatttaaaacaaacgaaagcactctccctaacccaaagccctcctcctccactctctccttcctctggagtcccttcaaagtcatctggacctgcccggtcctccccaccactgcagcctggctccgctctggatccggtcaccagtgctgcaatgtcgtgtctgagccttgtcaaccacgccctccccctcctctgggtaactttccagtcctttagcatccacagccccactcccgctggcttcttccagtccctctagttccagaaggatcttcacgcagactccaccttggctggcccttactctaggtcccagcctgggcctctactccttctccccaggggtgcccggtagtttcagggtctggggcccttgtttcccaaacctgcccgaacagaaccacctaggacatctgacattcttgcagaaatatatgggagttcagaagaggaggtgaataatccatgtttttaaaacaccccaatggattctgatcaattgccaccttgaaggaaaggctgtgttaaagactcacgtacatgacagctttcaaagcgctagctcaggccttccttctgaacaggaaccccccagaccagctgcttcccaagcattctctctttctacccagacatctctagctcaacatgtgtgcacggaatttgccacttcccctgctggactgtcctcccacagtagccctctgctctgcgctgtctcctttgctcagctgcaagctgaagagtcaggggctgtgtctcacgcacctctacacccctgtgcccaggtatgataagtggcatgggactgtggtcagtaaacatcccctgagcaataagaaaaccccagactcaccctggctcgaacaggacccaggtcagacacctcaaagcctatcctacacacagacagggggtcctggagggaaggggaaagcccttcctgctgacaagggcgagaggggtgctaacagcctgccttcctgaggtcaggagagccggttagcactgtcattcccgggagcagtgattctcagacctgggtgagcctcacactcccctggaaggcttgttaggccacagagccccatcctacgaagaatttctgattcagtcaaccgggggtgggcccaagaattggaatcccggggtgagggagatgctgctggtccagggaccacacctggagaaccaccactcggcacaggctgggacaggaggccaagcagccccaacatgccactaaaacaccatcatgttaggtcaactcatcaccccctccagtaaactgtcccgctcccatactaagagtggcctttcctttctgagacttaattttaaaaacaggcgacaagaatttatccaaacccttaccacattgttgaggaccctgtgggagactgttacaaaaataaccacccataaatcccacctctctgggtccacacccctatgaatgtgacttgggcactcctcccagcaagagacagtggctgccgccctggcccttgaacctgggctagtcttgctctgtgttctgatgaacataatctaagcaaggccccaagaggacttgcagagctccctccagagggacgtgaccatgaggcagtggagagctggcaatcgaaaatggtgtggtcagaaagacaatgacatccgcccacttcctcgacgccagctgagctcccaggatgtgcctcaagtcatcctgggccacctggcctcaaccatgccattagctgactgcagagagcccagaaaaggccagcaaaactgctcaatccacagaatcacgagaaatcgtgagcctgctgttttggccactcggttttggttggcttgctactcaacaataggcaactaatacagaaactgatgctagaagctgggcactgccccagcggaggccccgacggcccatgcttgactctaggtcagaactgctgcagcccatctgttgtgagatgcctccatccctgccctctttgaagaggagtctctgtggccgccccactcttcctgtcccacaattcttgttgagctgaggctctctgaatcaagagctggcagcccgtccacacccagccccaaagcaggcagggcacgcagacccttgagtcagacgctgtgccaggagggaagtgaggagatgctggatgg

SEQ ID NO: 917468 - DNA, 4001 bp, Homo sapiens
gctgtattatataatatatattattacatattatatactatactatagaatacataatatatatactatattatacaatatattatatatactatattacacaatatattatatatactatattacataatatatatcatacattatatactatattatataagatatatgttatatatgttatattgtattatatatattttttatatatatctgagttgcaagggcaaacttagtccacagatctcagagaatggtccacactgtatctctcctaaaaaactacaaaagcacaggaaatcagacattgcaaatatatcagccccattttgttcattctgtgatagtgccagtttttcatattcaaatatcgaaaccaagaaaactcatgagtactttcaagaatctcactgatgatacagcttcagtcatgccatctacccagttgatgtcttcacctgttaaaatggaaactaaatgtctcatgaaggataaataaggggactcttgagatctcccgcttgcatttccagatgatatttactgccttcaagcttttcatgcctacttcaaaagaaaagtttcttttccaattcaggtaaatgtctctaaatgtatactttttcttttttctttctttattccatttttttttctttgttaggcagggtctcactctgtcacccaggctggagtacagtggtgcaatctcagctcactgaagcctaaacctcctgggctcaagcaatcctcccacctcaacctcccacttagccacaggcatgtgccaccacacctggctaaattttgtattttttgtagagatgagtttttgccattttgcccaggctggtctcgaactcctgagctcaagtgatctgcctgccttggccttccaaagtgctgcgattacagggcatgcaccagtgcatgcagcctagttttttcttttatgtattagtaatgccaaacgtgttctctatttctaacatgtactatggcttttttggcaacataaggtacagagcacaggttaggtcatacacacacgcacactcacaccatcatcacacacacacacacgcacaccatcatcataatcactttctgaacaactttttaaactttccaatgctcagttttctcatttgtaaaatgagattctaagaggatctacctcagaattattgtaaaattgaaagagataatgcaagcaaaatgctttgtaacacataatagtcattagtattaatgatagtagttggtacttataagctaagttttttttctcaacttctctccatttatcaaacaggatacagctcaaaccaacttttctttttaatctcagcatcatcagaaaatgtttgaagttggagaaaagtcagcctcttcaacatatctttgttatttaatacaaaaagaagaaatacaaagataaacaccaattctatctaaaattgaatgaaaaataaagcaagttatagactgctgttcaagaagcaaatgaaatcagcataagcaatgaattcaaaatcctgagaaggatttcatacagaaagaagaaattcaaagataaacaccaactttatctaaaattgaaggaaaaataaagcaagttatagactgccgttcaagaagcaaatgaaatcagcataagcaatgaattcaaaatcctgggctataaatgaaattgaggccgatttctgcaaatatatctcatacttactctatacctgtctataatgctacaactcctgctttgccatatatgtaaaaaacaagcctaagacaggaaaaaggaacttacccacgaaattctctttatcttgcttctcaggtgaagacaccctagaatccatctcattcttgagaagcttttatacttggcaatttttcatgggtttggagctaagtgtgaagaacaggcagcaactcagatgtgcttgggagaggggagaggagaaagtatgagagagtgaaagacattccttctctttagtgaactccctaaggggtagttaccctggtgagggaagcctgataacataaacaaaaagatttcttttatgagttcagactgcctttgttcacagaaaaaacttgaaagaatatgaccatctggtggtattgcttcctgtaaaatattgctgtgtaattttctatagcatttatatttcataaaacacttctatgcaccttgtataaatcttgtgtgatcactgattacacaatgacctgttcaatacacagggcaagtgtatccatccttatgtttcagatgagaaaatttaacccaactcattctaacactgcagtgagtgagcttttgaaactcaaatctgatcatgtcttcatcctgcttaaaataatcaaaaaattgccaactgtcaatattgtaaagaccaaactcctaagtgtcctacaagaccctgctggcctgccccttcctccctttccagcctcactcatgtgtctctccgtgaagcagctccattggtctcctatcagtgcctccaaagcttgatatgtcttctcgccaccggatctttgcacgtgttatcatatgcataattttttggcttgtgtctgtttcttcttctagaccaagaattgacaaactttagcttgccagctaaatttaatttaccacttgtttttaaaacataaagtgttattggaacacagtatgtccttttgttgctttcttttttttttttttttttttgagataggatttcactctgttgcccaggctggagtgcagtggcacaatcacagctcactgcaatctcgacctgccaggctcaagcaatcttcctacctcagcctcttcaacagctgggactccaggtgcacaccaccatacctggctaatttttaattttttttttttttagagatggggcctcactatattgcccaggctggtctcaaactctgggctcaaatgatccttcagccttggtctcccaaactgctgggattgtagatatgagccaccatgcccagctctttcatttttgtattgtctgtgctcacttttgcactgcacccgtggatttgagtagttgtgacacagaccatacaagctgtaaggcctaaaatatttactgtttgtcccttcacaaaaaaagtttgctgacccctgccttgcactatacatttccatgaggagagtgacttggtctaacatttccattgcatctgcaacaattagaacaacgtgggcacatgattgatgttcaacaatacttgctgaatgaatgaatatataaatcacaaatgaaaacagctctcaaatggcaaagctctttctcaaatccagatccttaggatcctgtactaggattccttctttcatcagaccacatagaaccacagacaattttgtggttattccaatactaagaacaccaattttctaattttctgatgttcatttctctcatatcaatatcccaaatatatcttgtttttcttttgtataccattatatttattgtatggcatttattatattatattgtattattttgtgaaaacagtagaaaaaatctctaatctctccctggccttcttgtcttttctggtttttcttctgccaaccacctagttatttccttctttgcaacttcatcttaaaacttttctcagattccagcctgggcaacatggtaaaaccccatctctactaaaaatacaaaaattaaccaggcatggtggcatgcacctatagtcctagctacactggaggttgaagtgggaagattgattgagcttgggaagcagaggttacagtgagtcaagatggctccactgcactccagcctgggtgacacagcgagaccccaactcaaaaaagaaaaaaacaaaagtaaaaaattttccaggttatgggttatttataccaactacttgataatcttgattgccttttccacaaactcaaattgtggaaataactactatggctgtcatccacagtttgtaattacaat

SEQ ID NO: 917469 - DNA, 4001 bp, Homo sapiens
gacatatgctgaaatatctattttcaacgaaggtacactaggctaaagataccaagaaattggaggagggtcagagaacttaaacaaatgtttaaaacaggccgggtgcggtggctcaagcttgtaatcccagcactttaggaggccgaggcgggaggatcacgaggtcaggagatcgagaccgtcctggctaacacggtgaaaccccgtctttactaaaaatacaaaaaattagccggacgtggtggcaggcgcctgcagtcccagctactagggaggctgaggcaggagaatggcatgaacccgggaggcggagcttgcagtgagccaagatcgcgccactgcactccagcctgggcgacagagcaagactccgtctcaaggaaaaaaaaaaaaaaatgtggaaaacaaattgctaaattaaatgtgtgaccttgaacgagtttcttaagactccgtacttctatgtcctcatctacaaaagcaaagggttggactaaggtccttccaaactctagagctgcatttcttaataccagggtagaagacagcaactgttataaagaaaataatattggaaatttccataaggagaaatgaaggcttttaaatgaacttccaaaaagataaagattttgactagaatgaaaacgtatttgtcactaaattccccattttctaaaaactaaatagcactcttctaagattcataagaaggaagttcaaggtcaaaaagtcacttctatcgggaagcaaactcacagaactcactacccctaggctgaaagtatgaacaacttcaataaaaatgaaaaaaaaaaaaaaaggtaggggcgggagggccctaaatcaattcatactatgacatgtatgaagagttacttcagaaaaaaacccaaaactctggaattgacttaggacaccaataatgcccttccacagttttttgttgtcaaagttggaaggaagatgtttgttttcgaagttgtggagccaactcaagtacacggctttagaaccagacacctctgggattaaatctcagctttgatcttacctcctatatgacctagtccaaattacttgttctcttaaccataatatgttcaacaatgatgcaggtgttgaatgacttcctcacagttgctgaaaaacctgagaaactacacgtaaagcgcttagcacattacctggcacacatcaaatattcaaaacaaggccagtaactattatgctatagcctatccagaaataaggctatacaaaagattattttcttacctctccaactggttaggtagaaaacataatcttattactgctattaacaagtagaacagtatacaactacttggaggagaggggaaacttccctaccttgccccacaaaaggcaagtcagtaagcaccgctggtcctctgacattcccacctatgacagctcccaagaaacacaaaagtacttttgaagggcattcccccctgcccaaaaaggggcggcgcaagtctcagcccaccgtgccagacgccggaatggcagcagaaaatgtcctgaccccctcacctccactcagagcccacctgctcccgcccatctcttagaaactgcaggagcagccacggccgggccgccggggatcctcgcggactaagggctgggtcagagccgcgcaaacatgggctcgctcgtagtcctggcgagcagcactcccaggcaagtcgcccgagggccttgcagggcacccagaaaatgtcactgccggcgaagtgaccccgagccgggccacgggacccctcacacctcaccctttctcctgccgaccctcgagacgacagcggactggaaggcattacctgagcagcagcccgctgggccgtccgaggccggtggttccgaagggtggccacggccactagcctgccgtagaacatggaggccgccatttctgagtcggaccccgtcccctcggcgccgcgcgcaggcgcacaggcgacaggcggcccaaggcgcagcctctctgcagcgctcacctacgccccgcctcgcgccacccgttgggggcggggcctcgggttaacactgcagccgctagaccagctccctggcgggcgcggagcaagctttgacctttggaactgggcaccgcagccccaatatctgccctgcggtcagagcaacctgaacacttcctagtgaattgcaatgtaaaggtgaccagcgccgccacttgggtgatcttaacttctctcagcctcagttgcctcatctgtaaaatgtgtttcattcaagaaatgattacccagtgtctacttcgtgctaaacagccttgagcccttggcctacagcaatgaataaaaccatttgtgatgctcaaagagaagatggtcggtgtaacgcgcttgtgatgctcaaagagaagatggtcggtgtcatgcgcttctgatgctcaaagagatcggtgtcacgcgcatccgtgtgaagacaccgccaaacagggtgtgagcaataaggctgtttattttaactgggtgcaggcgggctgagtccgaaaagagagtcagcaaagggagataggggtggggctgttttataggatttggatgggtagcggaaaattacaaagggggtttttctcttacgggcaggggcgggggtcacaaggtgctcagtgggggaggttctgagccaggagaaggaatttcacaaggttaatcactcagttaaggtggggcaggaacaaatcacaatggtggaatgtcatcagttaaggcaggaaccggccaatttcccttcttttgtgattcttcacttgcttcaggccatctggatgtacacgtgcaggcttgggctcagaggcctgacagtcggccactagttaccaaagctggtggcaggctggagtctccagggaagctattgattgattgattgactgattgacagggtcttggtctgtcacccaggctggagtgcagtgacgcgatcacagctcactgcagcctcaacctcccatgctcaagggatcctcccacctcagcctctggagtagtttgggaccacagatgtgtgtcaccaggcttggttgatttttttattttatttttttagggacagaatctctctatgttgcccaggctggtctccaactcgtgggttcaagcgatcctcctgcctcagtctcccaaagtgctgggatgacaggtgtgggcaaccacacccagccaaggatctggtttttgaaaagataaataaatttaacaaacctccagcaagactgcaaagaaaaaagaaaaagagaagacacaaattaccaatgtgaggaacataccagggaatataattacagaaccttcagacaccaaaaaggaatgccataaataacaccacataacataaatttgacaactttgacaagatgagcgaattcttcagaaggcacaaattactacaaataacctaatatgaaaaggtaatttaaatagtcctctaactagagaaaattgtaattgtaatttttaaactaaaaaaaaaaaaaacctgagatctccaggcccaaaagctttcactgatgaattctataaaatgtttacacaagaattaacaccaattccatacagcctcttccagaagatagaagaggaaggaacagttgccaatgtactgtatgaagttagaatcaccccactaccaaagccagcaaaagaccgtacaaaaagaaaaaaataccaacacttctcatgaatattgatggaaaaatccatagcaaaatattagcaaatataattcagaaatatataaaaagaattgtacaatatgaccaagtgggatatattccagagatgtaagtttgttttaatatttgaaaatatgtgtaatgcactatattaagttagaaaaatcacatgataatttcgatcaaaacaaaaaaagtagctgggcacaatggttcatgcctgtaatccaaacactttgggaggccgaggtgggaggattgcttgaac

SEQ ID NO: 917470 - DNA, 4001 bp, Homo sapiens
aaagcacctactgtatgattctgtttatgagtcaagaacaaacaaaactaactgatggtgatggaggtcaaagcaggagtcagcaggacagtaagaagaattactggctgagaaggcgcattaaggagcattatgaatggagatactctgtatcttaatctggtggtgtaaacatgtgaaaactcatcaaactatagacttaaaatctgtgttatttacataaatcatatatgcctccataaaaatttttaaagtaaaagaagatggaaagtgacaataaaattcattatgttaatactgtttaaaagcaacttttatataaactggattcccaaaggaagcactaggtctaacacgacaataacaaatgtaaattaaaagtcatagctgtctagctaatacaagaaattatggagaaaaattctcagtgcttcctgtaacattatccccaaactcatcccagaagccttactcccagtatctaaaggtctatatatttaggtgtaaaaaacacacctggaccctaaaaggccttataggacctggctcctagtttcctgtccaacctctcttaatcaaatgggccctctaataaaaagggcctttttgttgcttcacatacaggccaacttcattcctacctcaagatctgcactggctcttggtcctgcctggaatattctttccccagagcttccaagttaattcccttgttccttcaaatctccactcaaagatctcctcaacggaggctctagtaccatgtggcacatttcttataaaagtcatagctagaaaagacgctgtcttgcctcaaattgttaaacgtaacagcaaaacaggtttcctcttttctgtgatttaacgcaaaaacaaacaaaaactcctggctaaattctgtgacccgcagcatcatttatctttaggttctcctttaattcttattatttaactcttgatcttttacattcctttacagctttatggtttgccttcattgcacacctacaaaaagtgatttctaggttagctgagtatataaccaagactttaacccacagcaatcagcgcctttgcacacagccactccaaaaaaaaattttgatgaatatacaaatgagtgaataatgaattgtgataagacatctggaaagtttcagggacgtgagggaaaagggttttgctccagtagactgacttcataccgacacttttacgtaagaatggcaagaattattgtcaaacgaaaaaattaacttcatcgagcccagagtccacttctctaatcataaatgtcattaaaaaaaaaatcctttcagccaaactacaaatgccaaccatgctcccaagaaatagaggaggtttttctcaggagctgtagggagtggaaagggcaagacaggagtctggggtaacgcggctaccgtgtaacagagaaaagagacggagaatctcaataccggagctgagacgcagcatcaacaagagcctgggtccctgtccggcggtgcggggagaaggcgggtcagcggggacccgaagtggcccagctcccctaagaagagtggaggaagcagaaatgggctctctcacctctaacgccgcctgggggtcctcgtcgattagggcatccgagaagctctggaaaaacctgtcaggaaaacaacgacttcagcagggctcactagccaaggaaagggggataaaataaataccaaagggaaagaaaaacatgcacctctgggatgttgcagttcctgctgcagccgccgccatccctcgtagtcgctgttgctgccgccggagctgctactatcacggttaccacctccaccaccgcccaagggggaaacttctggagaaacaccaaccgagcttccgtcctaaatagccagcgagcagccacgcagcgtgctgctagggggacgggaggcgacacgccggcgcggggccggctgggacagtggaggaccgattcctcccagccgcaccccggcccaggacccgcgctcccagtccccgcccctcgcagccatggttacggaggcctggggcgtacacgttcttcctcccttccaccgcgcccacgccagcgggcactcccacggagctttcagtagtactttagaagcacttttgtaacgtactgtcatccctaaggaacgtgtggcggttaggggcgtttgtatgtctgttaataacggaagctacttcgagctcccattttccctagtttttatcatggctgccacagctagccaagccctttcgcctccattacgtctttagcggctgcgtggtctcttccgggagcagaggcccggatgacgcgtggatccccgcgatctttgggctggggattctaaacgactgggacttgccggaagtcattctgcactaatagcggcaaaaagccttctggttcctggggcgacgcgcccggcggccgtactattcacttccccagaacgccacagcccaggctttcttcttagtgggcttcccagaccaagaagggaaacctttcatccgaaggtactgaggggaggaaggtggcctgaagttatctcagtgccgctttgtttcccaccccagtcggtcagcccttcctcagcgccctttaacccttgcagatcggatggagaaagctgccagcacgttctagggatgggggcagattgaggagcgggagggagtagtctttgtctaactttataccagtaccaaactatgttaatttaatgtagttttataataaatctttaagtcctgtaacttattctcccaagattgttttggcttattctacggcctttgtatttctaggtgaattttggaattagcttgttaaaaaggggggggattttttattgggctcgcattgaatctatagatctgtttgggaaaactagtatcttaacaacaagtccttcaatccatgaatatcattcttcccccaccatttatttaagcggtctttaatttctcctggcaatattttgtagattgcacatatatctatattttaatgcagctgtgcttggatagattgcagtatagagatcatatatatctttcattagatttattcttgagtatttagtgttttgtatacaatgttaaatggcattttgacttttttatattctactcgtaagaataaacaatattgattttaacatactgaccttatatgcaagcatcttgctaagttcccttgttatttgtaatactctgtagattctttcggaatttctgtgatcaaaatcttgcaatccacgaataaagatggtttaacttctctgtaacctttataccttttatttttatttatttttgccttttgttgctggctagtgtttccactattgaataaaaacagtgataatggacttccttgtcttggtcataacatcaggaggaaagcattgaatatcaactgctttttctgcctttattgaaatgttcatttgtattttttaatgttactgtgaattaccttggttagttttcaaatgttatctaaatggccaattgtccttctggaccccactgactccagttgggatggcactgtaagaagagaggcagagtcagtgaaggagacaaggtttattcaggatttacatacaagggtggtccggtggtggagggctgacctggagaactgctaccatttgtaaaaagcacgtagtctatatagcattttcacttagcactctccttctagcaacctccatttaaccccaaagggccttgatctgtacagcgtaagatacgggccagggatgtggatgtccttcatagataaggagtgaatctctgggttggctgctcctggattccttagcccaggactccaaacgtaagttcttcttagaccatagggttagtctcaggtatgctccggttatggctcagccatacactaatgtgtgtacaccagcctctgccatgcaccaatacacatatatgtatggcctctgaaagggtgaattcca

SEQ ID NO: 917471 - DNA, 4001 bp, Homo sapiens
ctataatcccagcactttgggaggccaaggcaggtggattgcttcagccctggagttcgagaccagcctggacaacatggcgaaaccccgtctctactaaaaacacaaaaatcagccgggtgtggtggcgtacacctgaaatcccagctactcaggaggctgaggcaagagaatcacttgaacctgggaggtggaggctgcagtgagcgaagatcgcgccactgcactgcagcctggacgacatagagagactccgtctcaaaaaaaaaaaaaaaaaaaagttggctggggcggtggctcaggcctgtaagaggcagaagcgggtgggtcacttgaggtcaggaattcgagaccagcctgaccaacaatggtgaaacccagtctctactaaaaaaattaaaaattagccgggtgtgttggcacacacctgtaatcccagctactccggaggctgaggcaggagaatggcttgaactgggaggcagaggttgcagtgagccaggatcgccccattgcactccagcctggacaacaagagtgaaactccgtctgaaactttaaaaaatggactaacctcctaatacaacacaaacacaagcaccatacaactgtaaatgatttacgatcatttacaatgagtaagatattactcctacccttgaaaagctcgtaggaggtttaagttgaatttaggtgaacgtgaaaattttctgaccactgaatttgaagatgaagatacactatgtacttttcggacaaaatgtgatgactttaagatttcttgtcactaaattggggatgggggcttactaactttaaattatttaagtacttcagacaaaaactaataacttcatatctctcacaaagcaaacattctgtctatacacagaatttactagaacctgtgaggaaactgtaatcattatcatttccgttttacagaataaggcaatcagaacaactgactttcctaacatcacagacctagatcagaattcagaactctgtgtccaatcttaggtcccttccaatattacaacctgcaaactaatcaaaccggcatctgtttttacatttctttaaaaaaagcaaagcaattaaaaaaaggacccaattctgctcagagacgaatatgtatttcttaatttggatctaactttataacatggtgatcaacccaagtacactgtactcgactccgaaaatcctgctcgtcactttatattttgagtcctactagagactttgatgaattgcactcaagaagacgcggcccccactacgcagtggctacgggagatggcttccagggcaactgttctccaagttcatttctgagcgccgggtaaccatggccagtaattaatccaattctaagcgttgctatcaattctacgcgttgctatcaattctactgatttccctgatcgaccagagtcttcccattgcaggagcttttgtcacaacttaggctttacctgtacaaccgtcatctccacagaggagcgacaagcctttatgcaatatggacaccaagaaaaccgccttcgaagacacgcaaggcaaaattcttgccagtgtccggaaatacccgtctctggaacccaaaagtcaaactaaaattaaaagttcggcttagcaacaccgcgaaaggcgatgtaggcgtccacctggagtttagctgcctcaacctccgccccggcctgccgggtctctggggaccccgtcttcctccagcgggctctgggatgcggcccgctcacctctgaccctggccggatctcgcgcgtctaagccaccgcgttgccagtcgctggccacccacctaccgccaccgcccacctgtgcgggtcgcctcgccgctaggccccaagacggcgccgcctgctcggcagcaaagcccacccgccccgtcggcggctcagtgctgcacccccaccaacagccagttccggcggccgcacttccgattggcaggctgggccgaggggcggggaaggcgggcggaaggggaggagccgggagggcggggccgctgccaggagcctggagcgctgcgttccgcgcaggacgccggtgaggcccgcagagacttgcgtccgggcgggaggcggggcccaggatctctgctcaatcctggagtccgagtccgcaaagtgggagggagggtgtagatgtgaatttggggaaaaacgaccctgttgaatttctagagtggaagaaacatagaactagcttttctctttgcttagcacatacaaatggaaaaacagcgacaccgttacctacatttactagtccaatgcgtacaaccttctgtagtatatcaactgccaatgagtttatgtttttaaaaaaaccaccccagagaagggttctaaaaattcagaaaccgcattactagcacacattgtaaggtctgttttgttttgtttgttcgtttgtttttcagacagagtctcgctctgtcgcccaggctggagtggagtggagaaatctcagctaactgcaacctttgcctcctgggttcaagcgattctccctgcctcagtctccggagtagctgggattataggcgtgcaccaccacacccggctaatttttgtatttttagtagagactgtttcactatgttgggcaggctgctcttgaactcctcatctcaagtgatccacccgccttggcctcccaaagtgctgggattacaggcgtgagccatcatgcacggcctggggtgaatctttttaatgagcatttattatttgccgttcacaatgccaagggtcataatgaatgaaagtgtcttggaattagagttagtggttgcacacattataagtgtattaaagtacactccaaaataaaatccgaacacattaagtggttactcccattcctccctctctcagcccctggcaaatgccaatcagctttcaaactgtggtacctattacggatatttcatataaatggaatgtgtgaccttttggtctgtcttcgtagcataatcttttgcaggttcaccttgtacaccttgttgcatgtatcggtacttcatgtctctttatggctactattccactgtacctagatgccacagttttacctgtccatccactgatggacatttgggttgtttccactttcgggctattgtgaatagcaatgatatgaacatttgtatacaagtatttgttcgagtccctgttttcaattcttttgggtataaacatagtggaacttctgggtcttatagtaattctacgtgaaaatatttgaggaacccataaacaaatgtttctacagcagctgaaccattcattttacataccaagagcattgtcgggggattccaatttctccacatcctcactaacaccataattttctattcctttgatagtaaccatcccaaagggtataaagtggtattttattgtgggtttgatttgcattccctaatggctagttatcttgagcatcttttcatgcccttgttagccatttgtatatcttctttggagaactctctattcaggtatttccccatttttaaattgagttgtttgtgtttttgttgttagttatgtgtagtcatatattctggatattagacccttatgagatatatcattggtggatactttctcccattctgtaggttgtcttttcactttctttgtaatatccttcagtgtacaaacctttttaattttgatgaaatctaatttatctattttgttacttgtgcttttggtgtcatcaccaagaatccattgtgcaagcacactagctttcatgtctcttcttatgagtaactaattctattggataagggccccacctttatgatcttcttaaaccttaattacctccttatagatcttatctccaatacagtgacattggggtttggggttacatatatgaattttgtggagatataatttggtcaacagacttctgtacccctgcaattcatgtccttattgaataca

SEQ ID NO: 917472 - DNA, 4001 bp, Homo sapiens
tggtgaaccccaaagctttgttttttgccaagccattaaaaaaaaaaaaaaaaaaaaaaggaaagggccaggtggggtgtggctcacgccagtaatcccagcactttgggaggcagaggctgccagatggcctgagcccaggagcagtagttccagacctgcctgagcaacatggggaaagtgtctctacaaaaaaatacagaaggccgggtgcagtggctcacacctataatcccagcactttgggaggccaaggcaggtggattgcttcagccctggagttcgagaccagcctggacaacatggcgaaaccccgtctctactaaaaacacaaaaatcagccgggtgtggtggcgtacacctgaaatcccagctactcaggaggctgaggcaagagaatcacttgaacctgggaggtggaggctgcagtgagcgaagatcgcgccactgcactgcagcctggacgacatagagagactccgtctcaaaaaaaaaaaaaaaaaaaagttggctggggcggtggctcaggcctgtaagaggcagaagcgggtgggtcacttgaggtcaggaattcgagaccagcctgaccaacaatggtgaaacccagtctctactaaaaaaattaaaaattagccgggtgtgttggcacacacctgtaatcccagctactccggaggctgaggcaggagaatggcttgaactgggaggcagaggttgcagtgagccaggatcgccccattgcactccagcctggacaacaagagtgaaactccgtctgaaactttaaaaaatggactaacctcctaatacaacacaaacacaagcaccatacaactgtaaatgatttacgatcatttacaatgagtaagatattactcctacccttgaaaagctcgtaggaggtttaagttgaatttaggtgaacgtgaaaattttctgaccactgaatttgaagatgaagatacactatgtacttttcggacaaaatgtgatgactttaagatttcttgtcactaaattggggatgggggcttactaactttaaattatttaagtacttcagacaaaaactaataacttcatatctctcacaaagcaaacattctgtctatacacagaatttactagaacctgtgaggaaactgtaatcattatcatttccgttttacagaataaggcaatcagaacaactgactttcctaacatcacagacctagatcagaattcagaactctgtgtccaatcttaggtcccttccaatattacaacctgcaaactaatcaaaccggcatctgtttttacatttctttaaaaaaagcaaagcaattaaaaaaaggacccaattctgctcagagacgaatatgtatttcttaatttggatctaactttataacatggtgatcaacccaagtacactgtactcgactccgaaaatcctgctcgtcactttatattttgagtcctactagagactttgatgaattgcactcaagaagacgcggcccccactacgcagtggctacgggagatggcttccagggcaactgttctccaagttcatttctgagcgccgggtaaccatggccagtaattaatccaattctaagcgttgctatcaattctacgcgttgctatcaattctactgatttccctgatcgaccagagtcttcccattgcaggagcttttgtcacaacttaggctttacctgtacaaccgtcatctccacagaggagcgacaagcctttatgcaatatggacaccaagaaaaccgccttcgaagacacgcaaggcaaaattcttgccagtgtccggaaatacccgtctctggaacccaaaagtcaaactaaaattaaaagttcggcttagcaacaccgcgaaaggcgatgtaggcgtccacctggagtttagctgcctcaacctccgccccggcctgccgggtctctggggaccccgtcttcctccagcgggctctgggatgcggcccgctcacctctgaccctggccggatctcgcgcgtctaagccaccgcgttgccagtcgctggccacccacctaccgccaccgcccacctgtgcgggtcgcctcgccgctaggccccaagacggcgccgcctgctcggcagcaaagcccacccgccccgtcggcggctcagtgctgcacccccaccaacagccagttccggcggccgcacttccgattggcaggctgggccgaggggcggggaaggcgggcggaaggggaggagccgggagggcggggccgctgccaggagcctggagcgctgcgttccgcgcaggacgccggtgaggcccgcagagacttgcgtccgggcgggaggcggggcccaggatctctgctcaatcctggagtccgagtccgcaaagtgggagggagggtgtagatgtgaatttggggaaaaacgaccctgttgaatttctagagtggaagaaacatagaactagcttttctctttgcttagcacatacaaatggaaaaacagcgacaccgttacctacatttactagtccaatgcgtacaaccttctgtagtatatcaactgccaatgagtttatgtttttaaaaaaaccaccccagagaagggttctaaaaattcagaaaccgcattactagcacacattgtaaggtctgttttgttttgtttgttcgtttgtttttcagacagagtctcgctctgtcgcccaggctggagtggagtggagaaatctcagctaactgcaacctttgcctcctgggttcaagcgattctccctgcctcagtctccggagtagctgggattataggcgtgcaccaccacacccggctaatttttgtatttttagtagagactgtttcactatgttgggcaggctgctcttgaactcctcatctcaagtgatccacccgccttggcctcccaaagtgctgggattacaggcgtgagccatcatgcacggcctggggtgaatctttttaatgagcatttattatttgccgttcacaatgccaagggtcataatgaatgaaagtgtcttggaattagagttagtggttgcacacattataagtgtattaaagtacactccaaaataaaatccgaacacattaagtggttactcccattcctccctctctcagcccctggcaaatgccaatcagctttcaaactgtggtacctattacggatatttcatataaatggaatgtgtgaccttttggtctgtcttcgtagcataatcttttgcaggttcaccttgtacaccttgttgcatgtatcggtacttcatgtctctttatggctactattccactgtacctagatgccacagttttacctgtccatccactgatggacatttgggttgtttccactttcgggctattgtgaatagcaatgatatgaacatttgtatacaagtatttgttcgagtccctgttttcaattcttttgggtataaacatagtggaacttctgggtcttatagtaattctacgtgaaaatatttgaggaacccataaacaaatgtttctacagcagctgaaccattcattttacataccaagagcattgtcgggggattccaatttctccacatcctcactaacaccataattttctattcctttgatagtaaccatcccaaagggtataaagtggtattttattgtgggtttgatttgcattccctaatggctagttatcttgagcatcttttcatgcccttgttagccatttgtatatcttctttggagaactctctattcaggtatttccccatttttaaattgagttgtttgtgtttttgttgttagttatgtgtagtcatatattctggatattagacccttatgagatatatcattggtggatactttctcccattctgtaggttgtcttttcactttctttgtaatatccttcagtgtacaaacctttttaattttgatgaaatctaatttatctattttgttacttgtgcttttggtgtcatcaccaagaa

SEQ ID NO: 917473 - DNA, 4001 bp, Homo sapiens
tttgtgaaaactgttgaactaagtctttcaattacagacagaagaattgtgaaataaaaaaaattaaagccatatttataggatgtttttctcatctgactacgattaatttcccagttaccaaaagaaagccacatggtgcaacctgagactttatttatatttagacaacactatttttccaaagaacctaaagtactgtgcaaacagtaaataaccatttttaaaacagcattttggaagcttttgatatggcggggagaaaactcattacaaattaaagggggaaaactctgttttcaaagacacaatcactgcatagtcaagttctcctctccctgttccataaggaccatatctgtttttaaggaagtaaagtttactgtttggtaattagatttagaagactctggaaaaaaaatattaaaaacaaaagtgaaaaaaacatttaaaaaatgatattagaaacctgttctactacactgcctccaataagtgtgtttaaaaaccgcaaaaaaagggcttctttccattcaatatccaaatgtagaatccttctttgcagacaatctgacgatgtctagtaacttttccctaagccccgctcggaaattgcctcccagaccggagacctgcaggtgctgctgcgaagatgacgcgaccagccaaaccggttaaggatttgactgcgattgagaactagtgaggacctctaggaacccaaccttctgcgttcatacacgcgctcgcgcgcacacgcacgcacacacacacacacacacacacacacacggcaagcaagccatctccggtcacaccccagacaccgccgtcctcccgggacgggcgctcctccacgcgtgctccttggacgcgccagctccccctccatcccgggaccgttgtccttttccctccgggtccctgctgtagccggccggccgctcccgccgctcgcccagcccccgaacgccttctctcccactcccaaggtccagggaaggggccagccggcgcttgagcgcgccacgtggagcgcgcgcgcctgcagccaaacctcagtcggtccttaaagtggggtccccgcccctcccgccctgctccccgatcccccaaggccgagcccgcccccgcgcctccgagcccctgtcttgcctggctggggtctgtggcgcggaaaacgtggcaggccatctgcgactcggggtcgtcgggctgcgccttgatcaggtaggcaaagtaggtgaggtcgtggctgttgtggatgaagcgcgagatatgctgcgccttgtgctcgaagatgaataccgccgggttgggctgcgtggccgacggactagtgccccccgaggccccagcgcccggcgcggggacgcaacgcaggaagggcgcgctgagcaccaggatcacctctcgggccgccggcgccccgcagccgcccgcctcgggcttctggctgcgcctgcggatctcggccatgagccagggcagcataggcagcgtggtcctgtggtccaggcacgaccccccaacgtaccacagccggaaccgcttatcgcttggcttcccggggccgggctgagctgagacgcccggctcgggctccagggggtgcgggaacggctcatcctgaatgcagctgggcggctccataactctcgcctcaccagggcaccgcggaggccggccgggcgcaccgcgccccccactcccgcgcagaaggcgccgccgaaactgtgccaactgccgcaccgggctcccgcgcctgcctgggagcggcgcgaccccgaactccgcgcttcagcagccctgccccatgcagcacttccacgggcgcggctcggaggctccggcggcgggcaccgaggcaagcgcccggcaggcgagggcgggttaaatgggcatcctcctccttgggctggcgcctcgggcaggacctccccttcctccgtcgcgggtttgcagggtcagaggaccacgccgagggtccccgcggccgccggctccagcgctgcagccccgctgcggccgccgcgctcgcctggggcagacactgggtggctgggcggggaatggggctgtgggcgggagggggtgacttggggcggagctgactcctaccagggtgaccggctgtcacctggaaggtcggggctgcagggctgcggcgcggtcagtcctcaggaaaggctccggcaactactccagtggaaaataacaaaaacaaaacgtggcctcgcgggggccgctcctcctcccgccgcagctgcagcccagctcgctgctcctcctcctgccgttcccgtccctccctcgctccttccttccttccttccaggctgcttctttaatcgggctgctactccgcctcccgtccggcgggcggagagcgtcgcctgcaaaagcttatccgtgaagccgcctctccgcctcttcgcctcttccttcgacccccgcccttggggctgcagctcagagcctggcgcgggcactgcccggacccacttggcctctcttgagtcgccgcgatctccgtctcctcccgggcgtctctgctgccccctagagagggggccactcgcagtggagaactgggatttttttttaacagtatttgcttggtttcagttccttctaaagcctacacattaatttctgaattatctttcctaataatctcaaaaaacgctcgtgttttcaatcacaatattataaattccagttccaaatttcactttaaaacataatatcgacagcttgaatcttcctagttattaaagcagccaacttcttaaaatatggaaaagttatgttttatttatgttatatccccagttgagagctaatgtagagatttcttgttcttttatatatatgtggtaatacatatttccaaagaactaaaaaaaagtttggaataatttgatcattgtaattttaagacaggtagacaagtattctccctttttactcataccgaatgataattaagaattgggtaagaagtaaagacaaaataaataagaaagacacagaagttcctgactttctcctaagtgcttacaagaagaatgaaaactcgggtttcttggtttttagtttaatgagttctcactttttataaagccctgggaccactttttcccttctatttatttaagatcaatataaccaactgccattgttcttatgctgaatttctggttgcactctgatggctctcttattaataggtatctaagttccaagatggagacattactaattgattaggttaagtcatttggttgaaccacttaaaaaacctttgttcaaaaagacccatgtcttcaaagaagcaatgaaaagttcttggaaggtagactgagaccttctagaaccttcccagaaactctgttacacagatcccatttccttaggctacatatctgagacataaaagaaaggaacaaagatatggagaaagcatggaagtcttgtagactctacgaaatcaaccagcttgggagctaggattgaattaatagctccagcaggccagttactactggcataataaagtgaagtaacaaagaacaccctttcactgattgacagaaaaacagaattgtcttttattacatgacatgctaagtatgattgctttctgcttgagaatgcccctcattctttctattgttattttttttgtttttgtttttgtttttgtttttgttttctgagacggagtctcgttctgtcgcccaggctggagtgcagtggtgcgatctcggttcactgaaacctccacctccgtggttcaagcaattcccctgcctcagcctcccaagtagctgggattacaggtgcacaccaccatgcttggcaaatttttttgtatttttagtagagacggggtgatctcaggcagtccgcccagctcagcctcccaaaatgctgggattacaggcatgagccactgcacccagccctgttaggtttatcttactgaatgctactga

SEQ ID NO: 917474 - DNA, 4001 bp, Homo sapiens
attgctgaagatttataacaatataacgaagcagggtgggactctacctaagcttctgcagaggccctgcccagagaattctgactggcaggggcattccaaggtcaactgtattagactttacagagaacctacaatctggtgcatttcttgacaatccagataaggagaaaaataagactcacttccctgccctggaaaagcataagaggccagagaaaacaaagtcaacacgtgttcgggacctaaaaaatgagactaatctttccaaaggagggggggtcatgttggaaagcagtaaaatactgagtttgtaaatgaaaatattactagtgtgaaggatcaacgctcaacctaatgagaaatggggagaaaggcaaatgaaagagggatccaagattattcaggacacccttgtgggtaaaaaaactgaaagaagagattcctattgaacagaaacaaaactgaagacagtgtttttaactctacaatcttttacgcccatgctgttctgcgaaaaaactgtaacaacaataacgcataagcgttaaaggaaccaggcccagagccaggccctctgtgctcaacattcaactccaccactttctagctatgtcattttgggaaagttacttaacagctctttgcctcagtctcctcacctgtaaaatggggtgtataataacacaagtgcctttaaaatcaggaggggcttcttcaaagcacagttgtgattatatccctctactgatcaaaaactttattcacaaaatcaaatccacatctttcacgaaccatatagatcttgtgtaggttctgcaaaacaataagcgcttccctgtgtcatctccagcagctctgtgctagaaagccttttccttaccatctttccaagtccactttaggaaagtaactctccctcccattccacagtgcactcatctgttcctctgtacgtacggtttatcactattccccctggttttgtttggtcttttaatgcctcactctttctcctaaagcagtaattgcagagagccgttgcaaatctttttcatccccgttcctacccttcatcccagaatgtgcctgtgcaagcctgggaaaagcgttactgaattaaacgggatgattacaaccgtaatggccgcaattccagaaactgcctaatttcgcataattttgtattgttttcaaatcctgaaaatcttgacacgaaaggcctcttaaaatcagaacaccatcctttcaagaaaagttctaccgagcacccccacgagttgacattgcggtcattcttagctccagaagttgtgtgtgtgccgcggaaggcagattcacactggtccacactgtactttgaaataaggggtaagaagaggcggctccggccgcagcgcgggctgtgctctgctctgccctcaacttcctatgggcccgcgggctccggccgcgttcgtccctctccgccgcacttcgttcccagccctcgcctcccgatcccgctgcagaaacaccccctccccggagaagccgcgcggacggcgctgcaggtcctccccggcgctccggtcggccggggtctgggccgccacccgcccggctcgcggcccccggcctctccccaggcccgccgcccgccgcccggggcccaggcccgccgcccggggcccaggccgccgccgccgccgcctccaggggacctaggggaactcgcagggctccgcgtggcgccgggggcggagccggcccgaagggcccggggagaggccgggggcggacgacagcctccgcctaccccgacacgcaccccgccgcccccaacccaacctccctggggccccggcccgcacccgcggcccggcagccggcgggactcgccacttaccaacccgcctgggacaacgccgcgccggccacctgggccatggtagctgcttaggccgggggtggtggggggctggggtgggggtgatggggaggcctcctacttgagacccccccccttaaaaaaaaaaaaagaaaagaaaagaaaaaactcctctggtcggctctgcaactgggcatgctcagtgcggccggcgcttccgcgtgcgggttccgctcgccgcgttttctgagcggccgtaggggccggcctggtgtggggctcccaggctgcggagctccgggacctgatccaccaaacaccggctggtggctggagtcaggacggttcagggactttgcctcttccccgaaggcttttacttgttttggggggcgcttttctgagttgcacaccttggaaagtcgcgaggaggttcttcgtagagcaaaagtgtggcgtttgcagcgcccacaggcggccacctcagagagggcaggataaggcctgaggagactgacgggttggctgcgagggaacgcgtccaggaccgcgctaaaaaggtcacgttgcgggcagcaaaactcagaggtgtccccagcccattctgcacaaaagtttactttcttataaacactcgttcccttcacctcgccttttggtccgcccggacgcaaagaaaaaatgcagctcaagcttttttgagtccccgcgggcagatcgagttgccccagtcggacaccacagtgaaaatgccctggtcagcccaagaaaacctgcttttaggggacatggggaaatggggcagttgtgtcagtgcttgtttttcctgttgccctccccctgggaccatccgtgtcctagcgcggccctgccaccttggctctgtactgccagatctggcaaccacagccgcttccccgccgatgcccttcgcccgcgctgtagagggctggggcgcagggtgggtccctgagtgggcatgcgcgccgccgtcgcccagcggcacggcggacgctaccgcgcgattgggcgtccgtgactcacgctggccaatcagagaggaacaggcggaagggtacgcgggcccaagaggcgctccctaaaagtttgctccaccttcttggtctttcacctctgcggcgtcccgtattgcggggaaaaaggcttctaaggggcagcgtccccatctgccaggtcaggggaagaagactgttaggaacttaatccctatctccgccgcttgccgctgcccctgcttctaagggcatcatcaaaaacagacttggagcagagactgcggaactgggcagaggcgctcttgggattggggaggaaattggcagttacggaaggaaggggataattgccctgggtggagctaaaattccttaatacagatttttctcatttcagctggggtattccgtttggtcttcccaaaagtcatagttataaaatcgcgatgctttcgttagatggaatgctattgagatttgctcccaagtatattgtttagataattttagatcacaagtagctccatcctgttcgctgcaatgtgcagtagtatgcagtgtttaagtcatacgtatgctacaggtatatttcaatttatagtcatcggccatcatatacaggagccaggaatagatatgccattttaaaggtaaatagatgactcaaaaataaattgccaataatttttattggcggttagaattttctgttaccaattatttacatttttcagttagtgtaacctgttaactatgaaaatatgttgtaccaatcatcagaatttctcactggttataaagtcatttgttctcacatgtcgtgtgattcagtaaggatttaccactgcatggtccttacaataataaagtactccacaaaacactaaattctcttaaagaatgggttttttactggagaaatgtgggacaacatgagcatccaaaaaatggtgacaataattgatgaaacacattgaatttcttcggagtgccaccaaaaatgaaggaggacaaaatcttttctttcagagcaatacaagatagtaaatgtagaacaaatgatagaattagaaaaatcacagttttccaagtcaaccacaattgatagaggaaaa

SEQ ID NO: 917475 - DNA, 4001 bp, Homo sapiens
ccctgtgtcatctccagcagctctgtgctagaaagccttttccttaccatctttccaagtccactttaggaaagtaactctccctcccattccacagtgcactcatctgttcctctgtacgtacggtttatcactattccccctggttttgtttggtcttttaatgcctcactctttctcctaaagcagtaattgcagagagccgttgcaaatctttttcatccccgttcctacccttcatcccagaatgtgcctgtgcaagcctgggaaaagcgttactgaattaaacgggatgattacaaccgtaatggccgcaattccagaaactgcctaatttcgcataattttgtattgttttcaaatcctgaaaatcttgacacgaaaggcctcttaaaatcagaacaccatcctttcaagaaaagttctaccgagcacccccacgagttgacattgcggtcattcttagctccagaagttgtgtgtgtgccgcggaaggcagattcacactggtccacactgtactttgaaataaggggtaagaagaggcggctccggccgcagcgcgggctgtgctctgctctgccctcaacttcctatgggcccgcgggctccggccgcgttcgtccctctccgccgcacttcgttcccagccctcgcctcccgatcccgctgcagaaacaccccctccccggagaagccgcgcggacggcgctgcaggtcctccccggcgctccggtcggccggggtctgggccgccacccgcccggctcgcggcccccggcctctccccaggcccgccgcccgccgcccggggcccaggcccgccgcccggggcccaggccgccgccgccgccgcctccaggggacctaggggaactcgcagggctccgcgtggcgccgggggcggagccggcccgaagggcccggggagaggccgggggcggacgacagcctccgcctaccccgacacgcaccccgccgcccccaacccaacctccctggggccccggcccgcacccgcggcccggcagccggcgggactcgccacttaccaacccgcctgggacaacgccgcgccggccacctgggccatggtagctgcttaggccgggggtggtggggggctggggtgggggtgatggggaggcctcctacttgagacccccccccttaaaaaaaaaaaaagaaaagaaaagaaaaaactcctctggtcggctctgcaactgggcatgctcagtgcggccggcgcttccgcgtgcgggttccgctcgccgcgttttctgagcggccgtaggggccggcctggtgtggggctcccaggctgcggagctccgggacctgatccaccaaacaccggctggtggctggagtcaggacggttcagggactttgcctcttccccgaaggcttttacttgttttggggggcgcttttctgagttgcacaccttggaaagtcgcgaggaggttcttcgtagagcaaaagtgtggcgtttgcagcgcccacaggcggccacctcagagagggcaggataaggcctgaggagactgacgggttggctgcgagggaacgcgtccaggaccgcgctaaaaaggtcacgttgcgggcagcaaaactcagaggtgtccccagcccattctgcacaaaagtttactttcttataaacactcgttcccttcacctcgccttttggtccgcccggacgcaaagaaaaaatgcagctcaagcttttttgagtccccgcgggcagatcgagttgccccagtcggacaccacagtgaaaatgccctggtcagcccaagaaaacctgcttttaggggacatggggaaatggggcagttgtgtcagtgcttgtttttcctgttgccctccccctgggaccatccgtgtcctagcgcggccctgccaccttggctctgtactgccagatctggcaaccacagccgcttccccgccgatgcccttcgcccgcgctgtagagggctggggcgcagggtgggtccctgagtgggcatgcgcgccgccgtcgcccagcggcacggcggacgctaccgcgcgattgggcgtccgtgactcacgctggccaatcagagaggaacaggcggaagggtacgcgggcccaagaggcgctccctaaaagtttgctccaccttcttggtctttcacctctgcggcgtcccgtattgcggggaaaaaggcttctaaggggcagcgtccccatctgccaggtcaggggaagaagactgttaggaacttaatccctatctccgccgcttgccgctgcccctgcttctaagggcatcatcaaaaacagacttggagcagagactgcggaactgggcagaggcgctcttgggattggggaggaaattggcagttacggaaggaaggggataattgccctgggtggagctaaaattccttaatacagatttttctcatttcagctggggtattccgtttggtcttcccaaaagtcatagttataaaatcgcgatgctttcgttagatggaatgctattgagatttgctcccaagtatattgtttagataattttagatcacaagtagctccatcctgttcgctgcaatgtgcagtagtatgcagtgtttaagtcatacgtatgctacaggtatatttcaatttatagtcatcggccatcatatacaggagccaggaatagatatgccattttaaaggtaaatagatgactcaaaaataaattgccaataatttttattggcggttagaattttctgttaccaattatttacatttttcagttagtgtaacctgttaactatgaaaatatgttgtaccaatcatcagaatttctcactggttataaagtcatttgttctcacatgtcgtgtgattcagtaaggatttaccactgcatggtccttacaataataaagtactccacaaaacactaaattctcttaaagaatgggttttttactggagaaatgtgggacaacatgagcatccaaaaaatggtgacaataattgatgaaacacattgaatttcttcggagtgccaccaaaaatgaaggaggacaaaatcttttctttcagagcaatacaagatagtaaatgtagaacaaatgatagaattagaaaaatcacagttttccaagtcaaccacaattgatagaggaaaatttatcagacgatactaaaagccacagggtaaaagactaggagtacaggatcttcacatggtctcaaagtttcaagccataacttacttattacagaagggaaaatgtagctttaccttttaaaaaaaaaaatcactgccttaagagatcaaagctagaatcactaataatgggacaatctaatgtattctgcttactgatgtaatgcaactagacatacacatcacttaagaagtattcttgccaaaatggtttaacctgagtttaaccaagcttgtggacagtggatcctaaaccaacccccacacccccaaatccatttagcaatgtctaggttgtcacaatctgaggaggtaggagtgttgttatgcatctcatgggatgcagcaggaatgctgctaaatatcctacaaagcacaggacatcgctgaactccaaagaatgatgtggcccagaatgtcagtaatgctaaggtctagatgtaagaagaaatgtaaaggacgtataggtgatatttgagcaagttaaacatgaagacgcaggcacataaatccacaatgaggcatattctcctctggcctagactgttaaaatgtaatttaagacttttttttttttgagacgggagtctcgctctgccgcccaggctggagtgcagtggcacgatctcggctcactgcaacctcggcctcccggttcaagcgattctcctgcctcagcttcccgagtagctgggactacaggagcctgctaccgcgcctggctaattttttgtatttttagtaaagaccgggtttcaccgtgtttgccaggatggtctggatcttgtgacctcg

SEQ ID NO: 917476 - DNA, 4001 bp, Homo sapiens
gctccatggagtgttgcagccccagctgtgcttccctgctgcagccagcatgatggcagcagccactgccatcactagcagtgccgatggctacctgaagctggaagacgtaaggaccacttctcccctagggcctgtagagggagtgcagacttgtccagaccttgatttcaggctctcgaccttcagagctgtgagcaaatacatttttgttgtttgaatccaccagtctgtgggaacacatagcagccacaggaaactaatacaacacctgagagccccatctgtagtaattattcaataacagttagtcatcagtcaccatcaacctcatcctatttcggaccaaacctgggcagtggggacacatcaagcctaccatttggagggtgactctcccagcagtggggaatgaagtggcacagagtagccattagaggcccaagcctggaggtaaaggggcgaattcacctgggggaaaaagagctttggaggcagaatcaaagagacctggtgatcaaactgcagtctcaaggaagctgccttcccttctaaattgagcagctaggaccctcttaactgaactctcaaagtctggaaggtttgaggaggacaaggagtgtgattttgcacatgtcaagttggaggccctgctgtgacacccacatggaactgtctggtagacagttagatattctggtctgaaaaagtaggaagaaagtccaagtcagagataaaggttagagagttgttggcacctttatgcagcacttgaagccctgtgcaggatatggtcacaaagagaaggtaagcctagaaggatcaatcctgggggactccaacagttcccagacaagaaggggatgaaatggggagacagtgggaaaacagggtggttagaaagggaagagaagcatccaaaggggtgctgtcgggatgctaggaggggatcctccctcctctgtctctcctgtttgccttcccatcatatagaaactgagtgtattagatattttctgcactaattaagtattttcattttccattcttaatttacaacggaatgaattggaatgaaaatatgcatttcattcactcttttgggagcacaattctagggaatttgtacttgaacaatccttcactgctccatagccactgtggaatcacagttacccaactatacagcagcaatggccaattattgccacaagagactatgatggagctgactacacggtaatcatgccactagcgtcacagctagagtggttctccctccacagacccaaaaggctgaactggtgaacctgctgcatctgtgggcagaattaggatgaaaagcactacctctgtgaaatacaaaatctctgtggaagaaaaatcaattcaggttagaggcggcagctgaaggccatggctcccagcctggtgcgacagcccagggagggcgtctgcctctgcagacacagctgggactccattcagcagccaacccttcccccactttccttgctgtttccaagatcctatatggggatcgggactcaggcaggacctgttctcttcagagcttccaggacttctctttcttctttgcctttggccctgttttccttggaaaatcaccagttcttccttttttcctgtcccctcttagccaggcacttcctcgagtgtttaaaaaccctgcgcgttttagggagcggggatttggcaaaggttatgcgaaggactgaaaaggggcagcgtcatgaaggccctgtcattctccctgactccccgtcttttcctcagttgagcatactcctaagagcgatgccacacccttaaatactaaggcccctttttctcaacaggaccctttccccgggaaagaccccagccccgccccgcagaccggcagagtctgctgtcttacttggctggaggttgtggtggcagagagagggatccggagccctgggcccaggctgttccattctgccccaggaggcggccgcggggccctggctccagctatctcagcgcttgcgggagccgcgggctgctttgtgacgcgtcgccatggagacaaggatcgggttccagggagttctgcccctgccaaggggtgctggccacgcaggaggcttaacctggccggcgcgggaatggggtgcagagagcaaagaaatgtggctttgatcttatggatgccttacttttacattatttgtacagttcttgcagtgagctttccggaccactgtcttgtatgtttcctaagaaaagcaaaaagggaagagattgaagagaaagtagattttcaactacaaactttcatccatttgctttcagcttaagcaaatgtgcgcaaagttgtcatggatttttgcagtcaataaaaaccaagcaagaagactgaatcccaagtcatctggtataaatggaagcagtttctgtgatagttccacgcggtcagaagggtcatcctggcttaggagaggggcagaagaggaaatgcacgcgtggaaacaggagtgggcagggaggatgtgacactgtcctcctcaccaggccacgttcctggcaccaaccatagtgtttgtgagggtcaatttaattgttcttgtgctctcatagaggaagctgtgtctttcatccccttgtaagagttttcactgatgaagggggtcttttatcttcatatcttgggaactactgaaactgtttcaaagagtcaaagacaccaataactaacagaaattcttgttttcaggggcagataagaaaagaaacaatttgctgaaactccctctgcttataacaaaactgactgaaatcagccggaatcaatatggccaaatgcagtttgcgcacagcaagcttgctgatgtcacagcctgaatttctactgcatgtttcataccaactccctccaaatttgcacatgggacccaccaggaagcatgaagagagagccatgcatgcctgaagacttcccagatgttccctttgcttccaccaatcacctgctaaccccaggatccaaccctaaaccttttgtaataaaattactgccctaaagccagtacaagacagatttgaactggacttttgtttcctcagaagttaacttgcaatgtgaagctttccttttctcaaaaacttggtgtcatagtgttggcttctagtgcagtgagccccttttgctggataaccttacctggtaatttgacatactaggtggttagtaactactgactgtctccaggttacaacacagttattacccacttgggtgaaaagagaagacaggaaatacattttggagttggctggcaacctgtttacaaagcaatttacaacagttccttattcttaaggggctattctaatacaagacctcagagaaacagtgcagtgtgacaaaggaggaatttatcaaaggagacagaaaaagcatcaaggtaaggatcccaaatatatgtgcaaggaatgtctttaaaatgaagagctaaactagaatttcctgaaggtagagttctatccatataatggaatgaatataacacattataaactctcatgttttgaagcaatggagggtggaacacattagaaggcatagatgttattaaaaggaatgagtctaaattaggatttagtagtggcatctaaatttaaaaagtagcacccaataacagattactgtctggaaatggtagagctaattagcatagcataatttaagagaaatatatgtttaaaatagagcagcaagtatatagaattttgaaagtgaattcttattaatatcttacaatttgtctcattttaggcaagctgtgaaatggtgcggtaggaaccaaatagagagccaaaggatctttctgtcactgcaggcccttaggggtaagcaaatccttccctgatccctggtctccttatctgtaaatgagaataccagcacccacctcactgtgctgtaaacatgatgagttctaacaataatttat

SEQ ID NO: 917477 - DNA, 4001 bp, Homo sapiens
caccaggagctgggtcctgggcatggccatggcaaggtgagatgactccagcccagggtcagcttgggcagtgccttgggtgacctggcacacctgagatgacccccaccagtcccatgcaccctgagaagtggcaccagcctccagcagcccctgacagcccctcacagacggggtggccaggcccagcagcagcagcttgtacacacaacagctgcactgcttacagccctgaagcagaaaccaggagggtggcccccaagggcctggaagagggagcgctttctcccccgtgcttgccctggctacaggccatcttgccagaatatgagaggggccaccccagccgtccacaagagcggcccgttccctcggggccccaggcgcaggcctcccactccaccctgggtgcatctggatagggaactgcaaagacccctcttgtggacacccctcttcctgtccaaagagatagctgcccccctggtgtgacaaagtctggtggcctggtggccttggaaggcctcgcagtctggcagatgccacacattcctggcacctgggccgccctgtcccgctgcgagagctgcagggccaggtgctgctgtgggcaggtgctcagtggctgccagcatcttggccagcctgagaggtgctccctagcctaccttcccaacaaaggtaacaacccaaaacaatctaatttgttttctttttcttccattttcttggtttgtttgtttttgaggcggagtctcgctttgtcgcccaggctggagtggagtggcacaatctcagctcactgcaatctctgcctcccgggttcaagtgattctcctgcctcagccttccaagtagctgggattacaggcaacccgccaccacgctcggctaatttttgtatttttagtagagatggggtttcgccatgttggccaggctggtctggaactcctgacctcaggtggcccacctgccttggcttctcaaagtgctgggattacaggccaccacgcccatccgattttcttgggtttttttttgtttttgttgttgttgttttataaaagcattgcatgaacacaagatccattgagaaaaaaacattcaagtagcaggtaaacctgagccatggaaggtggcatctcctgcctcccgggggaggtgcaaacttccagaatcttccttttcctgaccataagtcactgtcatcccccatctatgcacattaacggcacctgtgggagaagccacatcccacaccggtggttccttccagtcccagtggtgagtgtctgcctccgggtcagttgcccgggtggggaaagggaaggtggaacttcttcattgctgataaatatttttccttaattaaaaaagtcactcctgcaataaaagttatgaagtagttgaagtggatcttcagcgcctcatggacaaaatgcctttgacctgttaaagccctggaaatagttaaatgtatttcttcatctagaaaacctcaggttcgggtgtattttgtaataaaattttcaaaaatgaagtcttcacagcgttttcccaggttatttcctgaacacacattttgctgccttgccctcctagccaggtctgggaccaggaccccctgtccgcgccaggggctcaaacagctcctccctgtgcccccccccaactgctcccccaccccacccgcccccctggcgccttccctccatacctgtgaattgcttcaggaggtgccgcggagagttcttcacttccagcacgtattccattgctgcagctgacagatgaaggggccgagcacacctggaaaacaggagaggtcagcacgggcggggccctggggacgtcgtttggggagcgggcggctcacaccaggagggggcgttcatcgactcacctgcgcctcacatcccaggcgggtcccctcagccacctgtgcctctcagtcccactccacgtggaaaacaccttttaggtaaaacaacaaactggccacccctctgtctgccgctcactatggactgtgggaccaggctgggcacacaccaccccgcccgctgtgacatcacacagcctcatgaggtcacgtgggcgtcacacaggacttcggagccgtgtgcgtgtccaccttgacactggctgcattgaggacgaaggccactcagatgaacagatgtagggagggagttccaggggcaagacgctgctggggacaccatgggctgagtcccaccttccctgcaggatacccccgccccttgcccaccaagcctgtgggcacaggtgcttgagtcctgtccctcccttcctttgtgtcccggtccttcctgggacacccctctctgccagccagcactgggtgcagcagagaacaaaaccaaatcccttccctcctggggagaggacagagtgacgtagctgcctcggaccaggcccgggccgtggggagaaggcaaactcagggcgtgggccaggctggatcagggcaggggttgccccttgccacagggtgggcaggcggcctccagggaggaaggtgtgtctggggctgacgagggagcatgcagaggtcctggggggaggctggtgtggcgacttgagagacacaaggagccgagatgccgcaggagggcagggcatgaaaccacatgggtcatggtgaggatggtggcctttattctgagcaaagtagggagttactagcagattttgtgcgagaaatggaatcattttcacagcatcactctgctgtgctggaaacggctgtcgggaggtttgtgagcaggaaggacgggatactcatgaggaagaaggcaggcaactgccggagggggctgctacttttcatggtttgagttgaaggagtgggccttgcataatggtgcgcacctgtaatcccagaatcttggtagggcaaggcgggaggatcgcttgagactgggaggtcaaggttgcggtgagctgtgattgcaccactgcaccccagccagggcaacagagggagacactgtgtcaatcaactaatcaattaataagagtggcggacggcttggatgtggagagcaagagaagaaaaagtcaatggtgagccgaggacgctgctggggggctggaggctggtgctgtgggcatcaggtggacagaggaggcatctaggggacacgcccaggaagcatacacatacacgcaatttgggttgatgtgtctgaatttttcatgttgcagaaggttcacctgctatgtagcacgtgtcagagcttcattccttctcacgactgaataatatcccactgcagggacatgccacatttcgcttagtcattcgtctgtggatgggcactgggttgggccaacattttggcttttatgaataatgctgttgggaacactcaatgtaagtttctgtgtggacgtagattttcacttatccttggtatatccctaggagtggaattgccgggtcacacgctgggaagaacccaatgtttgtgtcctcccaaaatgcacaagtcaaaatcccaaccctcaagatgatgggattaggaggcgaggccttggaaggtgaggaggtcgtgagggtgaagcctcacgaatgggaatcgtgcccccattaaagaggcctcagagagctccctcgcctcttcttccacatgaggacccagtgagaaggcgccggatatgagccaggaaggggacttcggaggacagcaaatctgccacacctccatctagaacttccagcccccagaagtgtgagcaaaaagtgtccgctgtttataagccacccaggctgtggcatttttgttacagtccagatgggctatgacatacaggaattctgtttcaccctctgaggacctgccaggctattttacaaagtggctgcaccatttcacgttcccaccagcattgcgtgcaggctcccaggcagagacactgcttctctctcctgggaactgtcacctacagcaggcaccaacctgggcagcagt

SEQ ID NO: 917478 - DNA, 4001 bp, Homo sapiens
tcagatttcacctaaatcatctttctttaagctccttacacccaccttctgcaccacaccaccttcattcccagtaccaccgctgtccagtgctgccagtttccgtgcagtttgaagattctgtggttaatacagggtttgctaagccatacatgttttggagcccgctatttgattgccagcgtttcctttcctattctcccattgctggaggttcatgtttgtttttaaatagccttaatgtaagtttagtgaaacttcatgaaggagtaaatttagatgcatgtaaacaaccactatcttaatttagaatgcttccctattttttttttttttgagacaggttctcgctccggcggacaggccggaaaattgagtggcgcaatcataagctcactgaatcctcgaactcctgagctcaagcgatcctctcgcctcagcctcttgagtaggtgggactacagacgctcaccaccacgcccgcttattatttttaaatgtttttgtagagacgagggtctccctatgtttcgcaggctggtcttgaactcccgggctcaagcgataccccctgccttggcctcccaaaccgttgggatcccaaggcgtttgccacctctcccggtctgctttacttcttttcagacttcacgatgcacagtgtgttcttcacggcagctgcacacatgctggttttcttcagaaacacggaaaatgccccataatgcaatccccaagcaacctgctctaggtcatctgggtttgtttttttgagacagagtcttgctctgtcccccaggcaggagtgcagcggcgcgatctcggctcactgcagcctctgcctcccgggttcaagagattctccagcctcagcctcccgagtagctgagattacaggcgtccgccaccgcgcccagctaattttagtagagacggggtttcaccatgttggccaggctggttttgaactcctgacctcaggtgatccacccgcctcggcctcccatggtgctggggtcaggcgtgagccaccgtgccaggccactgtcgtctgggttttcatctctggcttcaggttcagagagggcagggtttgaagcctggcccggcctcagtgccctcaatggcgatggtgaagatgaccggctagaggtgctgcgcccacgaaacgccagctctagtggcgtccggagcgccggctccaccggctaggcggtcggcggagttctaggacgacaactactcacaagggctgggcgatcacctcccacgccacgggacggagacgccacagccccttcaactttcagttacaaacgttcgtgccctgttacgtccacagcattaagctggctgtcgtggggcaaacaaaaacgttgagtccgagtcttacggggggtcgggtcaacaaccccagcaaacatggagagaaaattcaaagcgggtctcacgggcgtgcggggctcggcggcgctcggggcacgggatccgttctctccgcaaatgcgcgctgccggggctgcgccgcgggctgccccggtcgacccctctcaactccgaggctacttcgagccagtcacccgggactggctgacgtggtccaggttggccccgtccggctctccccgcccgtaccaaccccacattccgccctcctacccggcaaagcggacgaagcccccaccggctggtgcccgcgggcaccgaacttagcggaacgcctcccggctcggaccagacgcccctgaggagtgacgcccgcgagcctcaaacgtctcaggcgggcctgccgggtgctctccccgtctcccaggaagccgcccgtcagccggcggcgccaaccgccaccgccgcacttacccgggaaggcaaaagtggccgcgggcacccaaccgccgtcactcccttcagggagctgactagcgcgctcgaagcgaccgcctcgcctgccccgccacagcgttcggctacgacgcacgcgcgcgcaggccacgccccccgggtgcgcgggccgggccgcagagcacgccgggagcgtgggtctcccagcccgccacatcccagggctgtacgcgcggactagcggagctaggggaaggtgccagggtggccgccgcctcagtagcacgcggacggctggaaagtcagcccccgtttccgcctcacccaggattgctccactcggggcctttccgcatcccagccaccactccattccgaggcgcgatcagctctgaccagtcttcctcacacccatagtcgattcgttactcccgttaaggtcaaacgctgacagaaaccagccgcttcgcacacttctacatggggtcaagccccctgttatctttgcggggatgattgtaacaatcacttaaatggtcgcttcgtaccatcttgcccccgcctgggccttgtcggcgacgccgcagccacgtggatgctgtggaagcctgtcccctggatcttccaaaggctccgcgctcattgccacagccagcggccggcagtggcctaggctgttgcacgcgatcggtcccccacatctcccctctccatctggctcctttccctggaagcccagggcagcccacacttcgctgtcctcacccccactcaccaggcgggaccccacgacgaccggcttttgtcctggctgctccctcccagcgtgggccgcgtctcctcggggtcgacagggcgcgtggttttcacagcgaggcctcccctgatcacctccccgctcttcctgtccttccccggtcacctcacgagctatggatgtatctgtgtctcctcactgcgctataagctcccaggtgaagaaagggttgctttttgtaaatttttgttttaaccgtgaacctcttgtgtatgaataatgctcagaaaaaaaaaaatttcttaaatgaatgaatcttccccaagcccagtgcagttggcacctgccctcttttctgtcacggtacatacaaggaaatacattccacaaaaccacatagtcgctgtcatttatcacaagtgtttccccaaattacaaagtcttaatacttctttgtctcctaattttttagctgtgtttttaaaaaacatttctttacatgccataaaattcactcatttgaagtgtaccattcaatcattttcagtaattttaaaaccatttgcaaccatcactataatttaagaacatttccattatccccctgaaaagtatttgcacagttatagttgaggtaggagatcagcaggactttccaagcactgatcaccacctgctgagcaaaacaggatctggtcagaacaggatgccctaaaaaaacggccaaaactgccctaaagaaacaggcccaagccagctaaaaccaggatggtgaccaaagtgacctctagtgccctcactgctcattatacactaattataatacatgaacatgctacaacacttccaccagcactctgacagtttacgaatgccatggcaatgcccagaccttaccttatatggtttaaaaacggaagaattctcagttccggggaactccccaccccttttctagaaaattcgtgaataacccaccccttatttagcgtacgatgaaggagtaggtataaatatagctagccagtggccgggtgccctggcgcatgcctgtaatcccagcactttgggagaccaaggcgggtggatcacctgaggtcaggagttggagaccagcctggccaacacggtgaaacccggcatctaccaaaaacacaaaaattactcaggcgtagtggcaggcacctgtagtcccagctactcgggagctgaggcaggagaattgcttgaaccctggaggcagaggttgcaaagccgagaagagcgcaccactgcactccaggctgggcaacagagcgagactccgtctctctctctctctctctctatatatatatatatatacatacacacacacacatatacatatgtgtatatatacacacatataatatatatccgt

SEQ ID NO: 917479 - DNA, 4001 bp, Homo sapiens
acaccccaaaaggcctcgcagggaccactgaaacctctgcgccaacggagagggctccacactctggacgcattttcgctacagatgtatctcaggcagaggcagcatgtgcggactctttccaactctgtgcggtaagtaggtaaacacatcaacagcacctttcactcagttacaaaacgatgcacggtgggaaacactaaagaatccagctggtgtttcagtgactgacataaccaagcacggtaaagaaccgcacaccaataaaatagactaaatttctggctttaaaaaattttcaaaatattctatagtttcatgacaactgcaaagcaggctaagtagcattttttaccagatttcataaatcaggaaatctcatccttctgagaaaaaaagtggccaaaacaagtccttagctcttggtccacccaagtggaattaacttcctctgtaggaagacaggtgccagcaggtggctacagcctgagccctgagcctggcccccgtccagcgtctcatgtggaagccccccaagaaatgcaggattcgctgcggtgctgcaacaccctccacctcaatttaattaaggcgtttatttaaaattatcaattaacacagtcggtaaagataaggaaaaagtcagaaggcaccaccccatcaccacccaactgcagtgtggtatccaaggccacaacttgtgggtggtgaccgcagcttcagagatcagatccttccatctttcaccttcatcccgcttcagacgctttaaaagtctgaaaataaacactactgtagcttatgtgttgtcattctgaaataaaggcagagaactacaaagaatttagtgcgaggcaaacattcgtgtgcagcatgaagcaaacatacttacatcttttgccatgttaccagatccgggaaatcaatgctacaaatgttcaccttcccagagaagaaaaatgatttttctggtaaaaaaaaaaaaaaaagtaaggaaaaacaagaaataagtaagaatgaaaaacgaagtttaaaaaataacacatctcaaaggaaacgcggaccttccttcccaaaggcaccctccatcctgagagcggagctggccaaaccgactcccacactcaggattttcagtcgcctcgccagacggaaatgccccctgcggaaaagtggcccgcgggcccgcagggtcaccaccactacccccaggtccccgacggcccgcccagcggccgagggtggggccgagccccaggagccagggcgcagcgcctccctcccgccgctgcaggggggtgccccaccacccacctgggcacagccccggggtcccggcgcaacgtgcaggctcgcggcgtccaccccagaccccggcggcgcccgcccggctgaccggtaactctgacaggtgggcttccggggtccgcgccgcgcgcctgtcactaggcctcgggccgcctccgcacgaggcgcctcccgcgcgcgccggaaccgggtccccgcgggccgccgtggggcggcctcccctcccccgccctgcgcgctccggccgaccctggccccagccccggccccggccccggccccacctccagcgtggggcgcggacgctgctgtcggccgggagggccgggcccgggacccccgccccgcggtcacctggggagcccctaccagcgccgagcgcgcggggtccccgaggcacaggagcgcgcagggcgcgggagggcgcgggtcggggccgcgcggcgcctacacgcggccggggcaagggatggggtggccgggggtcccgcccgcacccccggctcccgcccgcggctcccgcggcatcccctgcccacccgcacctggctgcccggtccggccgcgcgggcggggacgcggagagggcgcggtgcggagcgcggggcggcgcggagaggcgcgggctggggccgggccgggcggtcccggccgtggcggggtccctgccctgggccgagtggcgccgggacgcggggctcaccctggccgagcgtcgggccggcgtgacgtgcgcgcggcgcggtgacgtgggcggcggcgggcccgctccgcgcagcgcgcctgcgcgccttttcgcgccttcggcgccctcctcctcctcttctgctgctcctcggtctcccgctcctcccgccagtgctgcgcgccctgggagagcggggaggggctgtgcgcgcgtgtccgtgtgtgcgcgtgcgcgtgcggagatgtagctggggcctgcgccgggacgggcagtgcgcgcgcgcggcgtgcgctcggcggccaagggactgtgtttgtgcgcgcctctgactgtgtgtgtccggagagagaggtggccggctgtgtgcaagagtgtgtgtgcacatgggggagcggggccggctatgtgcacgagtgtgtgtgcatgtgggggagcgggagctggtgtgtgcacgtgggggagcggggccggctgtgtgcaagagtgtgtgtgcacgtgggggagcagggactagtgtgtgcactagtgcatgtgcacgtgagggagcggggactggtgtgtgcactagtgtgtgtgcatgtgagggagcggggactggtgtgtgcactcgtgtgtgtgcatgtgagggagcggggactggtgtgtgcactcgtgtgtgtgcatgtgagggagcggggactggtgtgtgcactcgtgtgtgtgcatgtgagggagcggggactggtgtgtgcactcgtgtgtgtgcatgtgagggagcggggactggtgtgtgcactcgtgtgtgtgcatgtgagggagcggggactggtgtgtgcactagtgtgtgcatgtgagggagcggggactggtgtgtgcactagtgtgtgcatgtgagggagcggggactggtgtgtgcactagtgtgtgcatgtgagggagcggggactggtgtgtgcactcgtgtgtgtgcatgtgagggagcggggactggtgtgtgcactagtgtgtgtgcatgtgagggagcggggactggtgtgtgcactagtgtgtgtgcatgtgagggagcggggactggtgtgtgcactagtgtgtgtgcacatggggcagcaggtagggggccgggtatgtcaggatgtgtgtttgtgtgcagggagcagagagtgccggctgtgtgcgcgagtgtgggggggggagcagggactagtgtgtgcaggagtgtgtgtgcacttggaagagcggggccgggtgtgtgcttgagtgtgtgtgctcaaagaggagagccagctgtgtgtgcgcctgtatgcacggaggagagggggccgcttgtgtgcacgagtgtgtgtgcacataaagggccgactgtgtgtggggctgtgcatgtatggagagcaggtgtgtgcatagacgtgtgtatgtggacacacggaggagagcaggtgtgtgtgcgtgcgtggcacagaggcctctgcctctgctggacccggtggcctccaagcccacgacgggcctccgcccagattcccaacaattctgggcgtcctcggtgcccaccggacgcagcctggcccgggactcgggagggaaagcagggacaggaaaactccagaaacagtttcattgcatggtgagcctggtggtcccggagtcttggagacttaatccaccctggagggccccgccgctagggccaggcccgagcaccccagccaagggcgggctaggccagagaagagtccgaagttcagggccacagcaggcggcagaggctggtgcgcgccgagggtaaggaacatctacagaggacttgaggagctgaccaaaggcctctctgcctgtgcggtgtattattacatgacagcccactttgcacgttttatgctgattttggccactcctgcccctcaggcaacgccgcaccccctaaagctctggtcacttggcttaaactgcttacaagttagcacccgtttcttctttgaagactaccagaaacgctcactttctgcgagctggttcacacaaatag

SEQ ID NO: 917480 - DNA, 4001 bp, Homo sapiens
catgcctatagcatgccttttcaggaactgcagatataagtatgtaaaaatgaaattactatgagtatagtcagttgtctatatttaatagtaacttctgcaattgctatttcttggtataagattttggtaatgttaaaccagaatcctcaggaggcttctagactaaacccaggattcccaggctaataacagctgaaaccattctgagttggatatccacagtgggtcctgggcttcagaggaccctaaaggggaatcacaggcatatctcagtgaaatgatctaccagatttaccatgtatacttaaaatgttgggctcccaggagaggggagcccttgaccaaattatgaacttgaagtttgtattcggcattcctttcacagcactttctaagtcgcacccttcctggacccgcactctcacacaagtatcaccctttcatgtccatagtcctctttctcattaagtgaaacttgccagcctgatgctctcccccaaatgacttgtcggattagaaggggtgatttaatgtgcaaatggccataaacaggaatcctcacattcccacttcttccactagccactgagttccttgaggggaggataggagagtttcctgtttattactcttgcattcatccattccacaattactaaagacttatatagaatgggccaggcattcttccaggtgctgaatgaacagtagtctctgtccttaccgagtttgcattttagagtggggatacaagcaataaacaagcagacacaaatccgcaatataatttcaggtagaggttaagtgtgctagttgggagaggggctattttagatatggtggtcaggtaagaactctctgaggtgctatctgaataaaaaccagaattgagtggtgcaaacagcctaaggaaaggggaagcaagtgcaaaggcctcaagacagaagtgtgtatcttggtgtgttccaagaactaagaggggaagcatggcaggtacagaaaagcagatcaggttgcaaaagtagggcttgggcacttgagttttctagatatggtagagtttgggctttattcttaagtgtggcaggaaccactgaagtaaaatcctgcttctaccatgatctgattgacttaagaaacactgacttgtatgtgagcaacaggctttaaaggaacatgagtggacgcagttatggccaaccaagaggctacagcagcagtcgaggcaaaagatgacagtaaacatgggctagggtggaaacgggaaactggtgagaagtggtcgccgtaaggatatactttggaagtagagaggacttgctgctcgaatgtgggtctgaggaagaaaagggtgtcaacagtggatttgtaaaagtttgctgattacatagatgtcctattatagtccttaaatcgttttgggggtgcctatatgtacagggcccatcgtggggtgtgggtgctctaggctggaggtgggaagcagtcggtgagcagcttagggtaacttgcacgcactcaaggagtgacatggtgagcacctccggccacagaagggcggagagtaacgcagctttggaagaggcgttttaaagaagtcagtttcaaaggaaccacttctttgcaggccagagagagaaaagctggtccaggtcgtgcattaggaccctccccatatcagaataaggacccctcaaagctggacccaaattacctagggcaagcagagctgcgggaaaaggtaggggtttctggggagccactgcttggctagcggcgccattacctacatgaaaccagcaccgccggtcaccaggacccgcttcgcaaagccgccgggaagaccccacggttcctcccaacacgccgccgacatctcccagctcagcagtgcctagtaccgtaaagagtatggtctgaaaagcgcagggaagttccgccgcgaccttttgcgacgcgcctcgctcgcgggacacgttaacagagcagccagaggcagcttccggagactgctctgtggccagtttctgcccgcccactagcgggctgggcggggccgcgctcaccacgcgcaggcgctgctcctttccgcccttgcctggtccgccaggtgcaattggggtcgcccggatggtaggggtatggaacgtttttcccggaaatgccaccactatggatcagatttatgaatgagtaccttttttcattcttgtactacagccatctctagaggttacctatcagttgagctgagaacggggagttgttgcagatggagatgggaggttgcaatttaaaaatgatttttttttttagtggggcggggacagggtctccctctgttacccaggctggagtgcagtggtgcgatcacggctcactgcagcgtcgaccaatggggctcaagcaatcctcccacctcagcctcctgagtagctaggaatacagtcgtgcgccaccacgcccgcctaatttttggtagagatgggtttcgccctgttgtccaggctggtctcgaactcctgggatctagccaacctcccgcctcagcctcccaaggtcctgggattacaggcgtgagcaccgtgcctggcctgcaaaatgatcttttgctgttgttaatattatttcaggccgggcgccgtggcttacgcctgtaatcccaggactttgggaggccgaggtgggcggatcacctgaggtcaggattcgagaccagcttggccaacatggtgaaaccctgtctctactaaaaatacaaaaattagccgggcgtggtggcgggcgcctgtaatcccagctacttgggaggccgaggcaggagaattgcttgaacccggaaggcagaggttgcagtgagccgagaccgcaccatcgcactccagcctgggcaacaacagcaaaactccgtctcaaaaaataataatattattattacagacagcgcagaaggcttgcaatcatgataaagatattccctaggtcctacgctgatgtcttattctattctctcctttgctcactccgccccagcctccccaccctccttgctcttcattcaatgtgccaggcatgctacttccccgggaccttgattgtctttccccagatgtctgcctagtttttacccttacttccgttttcagcttgaatggcatcctattgaccaccacaattaaaatagcgagctctgcccaaccctgccgaatcatcttatccttctttatttttcttcctagcactcaacatttacattgatgtcactgccctctgtttagtgttccatgaggtcaggggctttgttttgttttctgctgtaatcgcatgtccttagagacttggcacagaataaatgaccattaaatattgtcgaatagataaatatctttttttccccaccataatgtttggcaaagctgaaaacgaatggaaacatccagtacaggtgtatatgtggaagaatcataccacaacctttttacaaggcaaagtggtaaaacatatgaaaatttcaaatgttcatattctatgaccccctcaaattccatgatgtataatatagataattgttcattgctgtattgcttgcaataatgaaacactggaaataatctaaatgtgtataatgtcttctaacttttaaaatgcagtaaactgctatatagcctttaaaaagaatataccaacatggaatgaagaccaaaatatattgcagtcgatacgtacagtttttttctgaccagactcctccccccactgtcctttatgatctccccaagttgacccaggcaggccacagaatgaaatctggctgactctaggccaactgaagcctcttcttgggatttagaattcgactaaggtgctagtatagtctggttactctacttgaactctgaggtcctacaaagctggaactttttggtggccatgttctttcaaagtgaggagccagaaagcctgtcttcacagtgagaaaaacaaagttgattgagaag

SEQ ID NO: 917481 - DNA, 4001 bp, Homo sapiens
cccgccacccccacccaaaaaaaagaaaagaaaggaaagaagaagaaaattgttttgggtggaattagccacagacttgacccaattctttcctcgaacatggactgggaaacctgggcaaagtcagccagtaagatccttgcagaacacatcacatcacttgggcaagtgtgagcacttaagacaattacaatgcttcttttaagtcactgagacctggtaaccaaactaagaagaagcaagctcccaaaagttgaactggcttctctcagatttgtttgcttccacgacaataacatttttatttttgaagccccaaatcattactgatttagtgattataacacattttctttcttatgaaaatgatcggtaaaacatagaatggtgagacaatctatatttagagctgaatggaaaaagacttataaaacagaccagcctacttgtcaatcataatatggaatatgatcataacattagtcataatatgtctctttaatttctttctaccttgcttattttctttcaacatgttgttctcaatacctcgactgacttcttacaatgtttgcattgagaattgttctaagaaattaagaacttagatatattttatacacatttgaaaatacttctacctagcattcttgtatgtaaactttagagacaaattctaaatgcatcagctgagaaggtggggaaaagttgtgaatattctcaatggctaacagcatcacccaacctgagaccccatgtttttgctgaaaccagctaggacaaacgcttctaaatctcccttcatagctgcagaaaaagtaaatgaattacactaatgtccatgggaccaatgattcgtgaaagaataaaatggaaaacgaagcagttattttgtcccttctgaccaacatgcacatgcttgtgtgtatatataccaatagtatttattgggaggaaatctctagttctaaagcagctcgtgtaaacaggcttcatttatctgttcattcgagtttgctctgccctggtcccacaggttgggtgcagcgttcctgggacgccctggctcgccccatctactcagcttcccaaatgcccgcaagcccagttcacgcctggaagtctacccctcgcgtcgtcagcttaaagccctccttaatgaggaccgtctttaatttaatttaatccttgtatttcatactttttgtatatcagaaaggatttctttttggaaagaaacagtagctcaagacgcgatttttcaaggttctgtggccagtctcagtcactcggcaacatctgagccaaggcagagccaggttcacttaaattcgggactccgaagtgtggagaccaataccccttaaaagcgtcccctggggccgaggcgggtgtggggaggggccgccaccgtccacctgcgccttcaggctgcggtgaggtggcagagtccggaggcatttcccgaccccagaggagcctccaagagtctcgcggcacgggcgcgaacaccaggatgcggagggcgcttcttacctttcgagactgacgggcagcaaccccaggccgtccgggcgcgtggcgaggcggacgggaaggctcaggggcggcgaggtagagcgccaagcatcccgcgtcccagactgcacgccctgaccccgcggcgttcggctcccacagccccgcggggcccgcccccgacggcgtggggagggcgggcgccgggagggcggggggcacacgggaccgggcgtggtcggttcccgccccttctgggcagcgcatcctttcctgccggtccccagctcgccagctgctggacaggaaacaggcaggaaacgcgcggccagccaaggtcctgcgggagggggtgcggccccggcagacgcaggtcccctcaacacacacccgcatccacagcacacagccggaccaggggtttaacgaaggacgagcgagcaatctcctgacacttcacattcaatcacttctactctagtgtcattttcttcagggagaccacaaaaataagtccttgaagcggcacagcatgtgggctgtaaacttgctttcccaaatgtcactgaagagtttcaaaagaacatagttcaggtaaagtgcatctccattttctttccctggggtcagaattggtattaaaaataactaaacattttaaaaactctactctgcaagtgttaaagttctttttataggaatgtgaattagttcagccactgtggaaagcagtttggagatttctcaactaaaaacagaaagatcattcgacccagcaatcccattactgggtgtatgcccaaaggaaaataaatcattctgccaaaaagacacccgcactatgtttatcacagtactatttacaatagcaaagacatggaatcaacctaggtgcccatcaacagtagactgggtaaagaaaatgtggtacatacacaccacgaaatactaaacagccataaaaaaagaacaaaatcacgtcctctgtagcaacatggatgcagttggaggacattatcctaagtgaattaacataggaacagaaaaccaaacaccgaatgttctcacttataagtgggagcttaaacaacgggtactcatggacataaagatggcaacaacaaacactggagactccaagtcaagggagggagagaaaggggcaagggctgaaaaacatcctattgggtactgtgtccggaattggtgggttcttggtctttctgacttcaagaataaagctgcggaccctcgcggtgagtgttacagttcttaaaggcggcctgtccggagtttgttccttctgatgttcggatgtgttcagagtttcttccttctggtgggttcgtggtctcgctggttcaggagtgaagctgcggaccttcgccatgagtgttacagcttttaaggcggcgcgtctggagttgttcgttcctcccagtgtgtccgtagtctcgctggcttcagaagtgaagctgcagaccttcgcagtgagtgttacagctcataaaggcagtgtggacccaaagagtgagcagcagcaagatttattgcaaagagccaaggaacaaagctcccacgctttgcaagggaaccccagcgggttgccactgccggcgcgtgcagcctgcttttattctcttatctggccccacccacatcctgctgattggttcattttacagagagcggagtggtctgttttgacagggcgctgattggtgcatttacaatccctgagctagacacaaaggttctccacgtccccactacattagctagatacagagtgtccacacaaaggttctccaagtccccacaagagtagctagatacagtgtccattggtgcattcacaaaccctgagctagacacagggtgctgattggtgtgtttacaaaccttgagccagatagagtgccgactggtgtatttacaatcccttagctagccataaaggttctccaagtgcccaccagtgaggagcctagctggcttcacccagtggatcccgcaccggggctgcaagtggagctgcctgccagtcccgcgccctgtgcccgcactcctcagcccttgggtggtcgatgggactgggcgctgtggagcagggggtggtgctcgtcagggagctcgggcctcacaggagcccatggaaggtgggggaggctcaggcatggcgggctgcaggtcccgagccctgccctgctcagggaggcagctaaggccctgcgagaaattgagcgcagcgccggtgggccggcactgctgggggacccagcacaccttctgcagctgctggcccaggtgctaagcccctcattgcccggggccggcagggcccaccggccgctccgagtgcgggcccgccgagcccacacccacccggaactcgtgctggcccgcaagcaccgtgcgcagccccggttcccgccagcgcctctccctccacacctccccgcaagctgagggagccagctcca

SEQ ID NO: 917482 - DNA, 4001 bp, Homo sapiens
cctcattttgttttagcacactttggacatcatcctgtgtaacagatcagatttcaataatctgttcataagcttatgtcccttactttgaggttcccagagggcaggaaatatatttttcatctttgaggcactaggaatagaatatacaactgctgttaaagtaagaccaaacactaggccttaaaggttggttactaaaatatttaatggaaaaaccagtgtacttgcaagtctagatcttccacttggaagcacaacaacagtctttcagtcagaatcctcaaaaaggagtgaaagcttcttgcactgcagagtatgaacttaagtactgaaacactaactgcagacttgagtaaaccttaaatatccttagatattttttcagatacaaggttttgcacagatgtataaacatgtcattcaagatagctgacaacctaaaaagaaactgcaaaatgttatgaaaaatttaaagcttatctaatgccctaaaataacctcaaaattcacagctatagtaaagctaactgtaataaacaccagcttaaaaaaatcaaacttaataaataagcctatttatagattgtaaacgtttgttgaacgattatttgaattgttgaaatcattaaaggtttcaaagagatcctcatcccccaaatgttaagttttaaataaacttaacgaaataattgtgtatgtatactgtaaagccctacaccatataacctaaaagcaggttactttatttacgcctcttttactagcaattaaactgaaaaccttgagtgtgaatgttgtaagagatcaaagttttcaagacttgccctaggaaaacaccagtttctcccaccatttgccccttttaagtgtttaaaaccatctcagagaaaatagtgagacctcgtatctttttttgtgtattaaaatcttttacacttaaaactcagaaatcaagtgcctcaaccattacagcaactctttattaatgcactttgtgtggctctgggtgttatactccacaaataaggaaccaacttctaattgtgaagcgagatatcaaagtcctagaaagaacaagctctcctaaccaactagaaggttccaggaaaatgcaattaaacaggaagcaatgaagttaaaagctaatggaaactgttaactaggctgagtgttgctcacatgtagggagtcggtcacccgcttcctcagcgtacatgttacagggctgtgagcgaacactcacgcgtggacctgcatacatccaactccaaagctctgaggcgtgaagcccaactccaagggcgctccacacggtccctgttccaggaaaactgaatacagctgctcgtgccacttggcccgcaagacgggaggcgagtctgaggcccactgcgtcctccagaaactacccttgcaagggctgtttcagagccccccacccacagcccagcagaccccaaaagcttctggggaaactcaaccccacccgctgctacgcccccttccctcgctcccacccgaggatcagctcccccggatagggacgacttccccttccaacagtgcatcagagggctcgtcaggcctcacccaccttgcactcgtcgctctttttttcttcgtcgcagaagttgacgggcgccaggccgggcaggtagaaagcgccgctccggcgcgggccaggaaccgcccccagcaggagcagcgacagcagcaacagccgcggccaccgaggtggagacaacaccggcagcctcgcgctcatgatagttgtttcggggaaagggcaatcaaacctagggggtcaagagggaaggaggggtggggagtctcggagacgactacaaggccgccagagataaaggaagccggcccccagaaggctagttccggttgcgctaggagacaccccgggtcccgcaacagaaaccgaagcggaccgcaacagagcatgcgcaccgccgtctgcacatgctcagtgagaacggtcgcaggcaccaggaggagtttccgggagggagcgggggcgaaatccactttccgggttttccgcgcgccagctgaggtggttgctgggagaggtggttgctgggagagctgttccggcgctcacgttccaattccaaattacaaattccgatctagagctcccacgcttgggggctgtggagcgctcgccagccgctccccgtttgctgctgggtcttacgaagttctcatatccatcatacagtttctttgtcacactgtccgcggcacgccagtccctatgacagaaagcacctgcggtctgtctggaggcggagttggtggcggagagaaaaagttctggagacacctggttgggagcaggctaaggaaacaaatggggaggaattagccacaaatcctcaaatagacagctactcaaaggcatcttcacggacaatttccaagcattggatgcagtggtgcattcttgcattgggcagtgattgtgtgcacacatctctttaagggagagtggaaatggggtgaggaggaaaatgggagtaggatagagtgtagcgttgacatttattttctttaaaggaagacccgagcatacctgagagctcagtgaagaaagtagttctggcgaatcggattaatatggtatgatcagcctttagcaagattctatcacttttcccactgatgatgtgagacggtgtccgcgtgtgtaagtgcacacacgtgtgtgtgtgtgtgtgttgcatcttctgagtatttttcaaggagaagctttttagtgatctgaaaaagtcaattcagttagccactagagttcaatcaaaaacttcggaagagtgcatcatcttaaagtacataagagagaatcatgacctccagctcagaattcaagaataggcaggtttgtgaaatagtaagctcagaaagttgagggccagtgaactcctatttcaagttcttgcgggtgtttgtacttttttcccaggtaaggtttataactttcatcagattttcaaagggacctaggaccctgcaaattgatccatatagtggggtagccaagttaatcaagagaactgggaagtagaaaagaacgttcatcttaaggttgttgtgaagattaaatcaaaaatggagggaaagtgctgagcacatagcttggcccaaggaatggcacttttttttttttttttgataacaaaaactaatctggtagggcctgagcagaaaattgtgcctaggtggcttccctttcatgtcctctccctcaaataaatcaacatattcgctgaactttgggatagggaaaaattgtaaaatattctgtatttggaagtcatggagatttccaatataacaaaaggaagcagacgttttctccaaatattaagaggaggaaacaaaaattaacatttttgctcactatcttcttttcctagcaccactgaaacttgaccttcggccggcgcggtggctcacgcctgtaatcccagcactttgggaggccgagatgggcggatcacgaggtcagaagatcgagaccatcctggctaacacggtgaaaccccgtctctactaaaaatacaaaaaaattagccgagcgtggtggcgggctcctgtagtcccagctacttgggaggctgaggcaggagaatggcgtgaacccgggaggcggagcttgcggtaagccgagatcgcgccactgcactccagcctgggcgactgagcacgactccgtctcaaaaaaaaaaaaaaaaaaacaaaaaaaaaacttgaccttcattatatctcactgccctcatcccaaacatttcctctcccagttttccaggaaacggcatcgctgcccatctcttttcaggccccaaccctggagaagaacctaaatttctcatttcctcactacctacctccagtccttcagcaggtcccgttggttgggctgctaaactatgggctaaatcctttcagtactttccatgcccacagctaccactctggtccaa

SEQ ID NO: 917483 - DNA, 4001 bp, Homo sapiens
ttttgagcaaattagtaaacatctttagctgttctagttattaaaaagacactttggattcctgtaatgtgttttttttgttgttgttgctgtttgagacggagttttgctcttgtcacccaggctggagtgcagtgttgtgatctcagctcactgcaacctttgcctcccgggttcaagcaattctcctgcctcagcctcccaagtagctggaattacaggcgctcgccaccacacccagctaatttttgtatttttagtagagacggtgttttgccatgttggccaggctggtctcaaactcctgacctcaggtgatccacccacctcagcctcccaaagtgctgggattactttttaaataatgaattcttagaatttctgcatcttgagcaattgatacacataacaatgcggatgtatctcaaggctgagtgaaaaaaaatctcaattttattgagaagacacacaggtgtagattcacactcactagtgcatgtatagttggtgcaatctcaacaggtcaggggatttgatcaaagaaaattccccacatatactatggttttgcaaggtgctaccattggagaaaacagggcaaaggcactctgtaggatttctctgtattactccttacaacttcatgtgatctacaaccatctcaaaataaaaaggttttcaaattctacctaagaccaggtgcggtggttaatgccactgctgtattacgacacaattatctgtattcccagcgctctgggaggctgaggtgggcgaactgcttgaggtcaggagttggagatcatcctgggcaacacagcaagaccctgtctctattaaaaatgaaataattagccgggcgtgatgctccctgtggccccagctcctggggaggctgaggcgggagaatcgcttgagccttgaccagccactgcactccagcctgggcgacagcaaaactctgtctcaacaaccacaaaaaagctttagaatatttaagtcaagcctgtaggagaaaaaaactacaaatatttcacaagtaatccaatcattaagacactccttttgaaaaagccggtaaataagataaatttggaagacagaataatcagaaaaacaggcagtgaatagggacccgatacgcagcggtcttgcttcccccgcgcaggcgtccacaccctgggtcatggacaccgtgaggagccgttaggagtcacaggaggggggccagggacagggctgcatctctgcggccggccctggaggccccgagtccacccgggcggccagggtgggaacgcaggttccattccaggttagaacgtgggcctcagcgaagagcgcctaggcaaggcctggaggagcgggaccccaggccacacagaccacccgaccccgggagacaatacctgcaagaaaaggggagccccgaggagagagagaggggaggtgagccccagggagggagagagaggaggggagccccagggagggagggaaggaaggaaggggacccctgggaagggaagaagggaatgggagccccggggagggagagaggggagccccagggagggagggaaggaaggaaggggacccttgggaagggaagaagggaaggtgagccccggggagggagagaggggaggggagccccagggagggagggaaggaaggggaccccgggaaagagccccggatggacgggcctggtgctcaccgggacgcagggatccgcgcccgcccgtccggcccgagcatcaccgttccgcggcctgggccgggctctgaggcgccaggacccgaggggcggagggggacgctgtctcccgcctcggagcgcagcgccggagggcttccttgcatcccttcccaggcgggaccagggaggccgggaggccgggagtccgggagggagcggccgccgccctgcccagcaccgcccccgctcagccaagccgacccggactcccgcccagccgcagtcactgccccctttaagaggcggggcgtgggcgggtcccgtcggccgcgggcggcgagcacttcctggccggcgtggggcctggcagccgcaggctggcgttggaccccgcaggggcgagccaaggccctcgcagagggctggacgcgcaggggctgtggggcgcgagctcccgtgggcccccgggcggcgctgagcatgccgggagtgggagtccccgcggccggctcccggcactgccccggagccgagggccgcggccgtccgaggacgagggcggagccgccgccgcgcctgcgcagaaggccggggccggccagaagcgggcggcgcgggggagatggtaggtggcccggcgtcgcctctgcccgtcggggtcggggtcggggtcgggccccaaggtcggcgcaggcggcgcgctggatgtgggaggccgagcccagcgagctgcgcggggcgttccgcgtggatccgagggaggaacgcgccgcgggcccgcgagccggagcggtggcgtcggaggcgcgggaccgcggggagcgcgggtttgacccggagccgcgagggacgaccgggagtgagcggagggcgggggccgggaggaactgtaggggccttggggcaggggccggggccgagcgggaacccaggccgggggcttcccagggcggcttcgaaacgggcagtcgaggcgggcgagggctcggctgctcctgcgggcgtctgtgcagatgctgaggctgttgaccaaaacagcgcaaggaaggaatccgcgagaagctcagattcgcgggggaggccctgctgccgggaggggagggagaggcacagcggggccctagcgcgggctctagccgggagctgtagcgtggctgtaggtgtgcatctgtggagctggtagagttccgcagcgcaggagggaggctgctggaggtgcacatcagttactttgaaatgtggtggaaatggtgatggatgggatttattcagtccacatcggttcagaggccagcaaggtgctgctgggtgtgactggtgctgggccaggcatgatcttggcgttgagggagttgatgccccagcaggggagacaggcaccagatgcacaattgtttgaccacagttgggacaaaggctaaggcacgggttccaggaacttgtaggatgcggctgtgggagtggtgtcagatgctgagggtgtgagttgaactgtggagaatttctctggaaattagccagagaaaaagtgaggttccggggcagccagccgtgtgcggctccaggcagaagaaacagaatgcacagacccttagtggtaggcgatgatgacgtataggagctgaaagattgtcctggctaaggcacagagagccaccggagaagggacacggtaacgtgtagaggggagtggagggtgaggacaagcttcaggatgggagaagagccacaaaggagactgagagggggctggtaggagaaaccaggacactagaatgtgtcgaaaccaagaggatggagtttaaaggaggagggagccatcagcagtgctgaacaaaagagcagctgaaaagatcccactgaccgcagcagccgagcttttgtgacctttaggggtcactgcggaggccgggctggagccaggtagcctgagttaggatgcacacctgggcaggtagagatagcttgctccagcttttaggaggacaggggcagagtggacaggaacttagtttggggaaaacttgaacatgttcaggatgctggagaggagcgttccactgctgccgaggttggagatccaagagcagggatgaatttaactccccctccctctagcgtgctgtataccgaaacagagtgaaagtgatccataaacttacgtagtttattcgatcaacatgattggcccgccagccccgggtaagttgaccctaaggacattttaagagtaatttctttccattttacatatgggtatccttggtgccagattatatgagtcgtatttcacaaggtc

SEQ ID NO: 917484 - DNA, 4001 bp, Homo sapiens
gcactgcttggaagggttctaagatccggccttcctgccagccggacctggaacgcccaaaaagaagagtgagttccatttaatcatgtggggacaccagtcatggtgtccaagtaacaatcccaggtaaaactgtaatcactcagccgtcaattcctctttcgtcctgattttacacatgcccagggtagtgaacaaagaagggcaaagcagaaaaacccataatcctacccccaggtaccccaaagcagaaagactatggtccacccccagataccccaaagcagaaaaacccacaatctacctccagacacaccaaagcagaaagaccataacccacccccagacacaccaaagcagaaagaccataatccacccccaggcacaccaaagcagaaagaccataatccacccccagataccccaaagcagaaagaccataacccacccccgataccccaaagcagaaagaccataatccacccccagacacaccaaagcagaaagaccataatccacccccagataccccaaagcagaaagaccataatccacccccagataccccaaagcagaaagaccataacccacccccagataccccaaagcagaaagaccataatccaccccgacacaccaaagcagaaagaccataatccaaccccagacacaccaatgctttatacattttagtaaaagaccagctccaaacaaaaagacccataatcctacccagatacaccaatgtttcatatactaaaaagaccagctccaagtattgttttaaggtttaaagttctttgtcagaagaaaatctaagtcagatgctatttttaaacattaaggcattctaataatgataaaactagttaataaataataataatagttatcattattaaacaccaatagactaatccacattaatacatttgaccatagagcattttgctttagattggaaggcatatagtggtttcttttagaaagaagccaaattatttgattattttaagtaacagtaattcgtccggttccgaacgatgccgcagtaaaagggttgtgaggttaatccccagaagtttgtgttggattatttctgagggagcggcagagccccctagacaccactccatccctccctccagccgtcagggcttcactttctagggaactctgtttctcttttgttctgaaatctgcccagccctctccccctcaggaagacacccggcatccttccagtcctggccacttcccggcagagcccccgagcccggcttgcgaactggtgaacacgcaacaggtttcctgttttcccagcctttgcctggctccgaggctgcagcgggcttggtctgggaagtggaagaattggagattccgtgaacacaccggggagaaacacgagagaggggcgagccgaaaccaagcaacactgtccagttctgtgagcgcctctgcacgttcaaacaggaaaaggctacctcgctcttccaaacgaagttttcccggaaaatggtgtaggttggaataaacggaagagatggggaaggagcgcactttggggcgcctgttcctcataataaaacgtaacagggagagagaggccaagaggaacggacacagagtcagagaaaggcaaagactgaggaggcagagacagaaagagcgagagagacagagacagagacagagagagagacagggagagagaatgaatgaacgaaccggtaggacgaacgcccgaccccagtgcgaaatgcaaagtgttccaaagacagagctcgaaggaggcggagggaccagaccccgtgccgcgtctccgcgcaggttccgcccgggccggccggggacctgtagtcccagccccggggtccccacgctcccccgcaggagccgagacgagcccccagccccgcgctcacctgcggggtccagcaggcccaggggcccgggcaccggcggctgcatcccgaggccccacccggctctcccggggccacagccacagtcccgccgccaggagccgccctcgcggcgccgccccttccccgccccctgcacctccccgcgctccgcccgcctcgcgtccttcctcgctctactctcccttctccggcgtttcttctcctccctcccccgctgcgcccgctcccccttctcccctccagcggccgcctggtttctggaaatcaggacgccgcggccgggagtggaagccagaccccagatggaaggtgcctggagaggaccctgcggactcggggtcggagccccggcctgggacggtgaccccgggccttccgccgctggcgccacgctcagcccttggcggtgccgctgagtgggtcaccacgggttcgcctccccattggccggtgacggagctccttggggctacagggccagccagcccttgatctctgggttcagagggtggtacatggtgttacaacccagtctgcgaggaacgagtaaatgaggaacaaacgcaaatgagtaaatgaggaacaaacgcatctggcacctcactcagcagccccgaggcagggctgacccgcctctccaaggcctgcgtctttgtgtccacagcactgaagttgttctgagtaaaatctgctgctggaaagaagggcaaggaaacacggggccagaaagggtgcctcgtacagcagcaggaaaaaataaagatccttctaaacgtatttttaacatctttgagtcaaggacatcagcggtcccgtcacaaaagaagatgcttgaacgatcaataaactcagcccccggaattaggggaacgctgtgggaacaagaggatgcgtttcaccctcatcctatcagaaaaccccaagggtcaaacaacttaaagaatgttaatgaaaacgtgggaatctgcattcaccgctgggatcacgcatggtgccaccactttgaaagcaacctttaggaaaattgaagcaagtagatgacaagccagaaagaaagcatatctctttctagatatgcccaagaacacaaacatagatctgctccttcgagccaggagccgtggttctcaaccccggctgtcgttaaagtcatccaggaatgtctttaaaagaaaaaacatttctgcagcactgaacccagaccagatcaattgaaccagaacttctgggaacaaactaatagctaagaattccctagtcattctaataggccatccactgtgagagagaaactaccacaagaagtatgcatgtgctagaagatgcgtacagaatattcctcacaacactgtgtgtccaaagcaccggacacaccctgaatatccaacacggggagaagcgataaagaaatgggcatatacagcgaaataccacatggcagttaaaataaatgagagctacatggatcaatgtggataaatgccaaaaacagaacgcggagcaaaaatgcaagtgcacagtacggcagcgagtacgacagcaagtacggcagcgagtatggtaccatttatataaagttttaaaccatgaaaattaacactgttcactcagtgagcctctcaagacttactaaacatccgcgatataccagacactgttccaggtacttgggatgtatcaatgagcaacgtaaacaaggatcctggtggggaagtgaggccatgaataataatacaataaacaagaaaaatgcacagcatgtcagagggcaacatgctatggaatacacacacacatatacacatacacacatgcagacatacacacatgcatgcacatacacacatacacacacatgcatatatacacatgcatacatacacacatgcatgcatgtgtgcatacatacatgcacgcatacatacatgcacatacacacatgcatacatgtgtgcatacatacacgcacacatacatacacatacatacacacatgcatacatacacacttatacgtgcatacatgcacatatgcacatatacatacacacatgcatgcatacacacatg

SEQ ID NO: 917485 - DNA, 4001 bp, Homo sapiens
ttagttcaccttatgaagcaacaaaaagagagacccactgtggcctctgctacaggccaagcagagggcacaacccaggaggaatgaagtcagtgttctgctcgctacctgactcctgcgacagaatcaactggcccctcaacaggggctgaatctggaacaaagcagacgtccctttatcctacaatttctcaaacttctcatatcgagcctctgttttcaggaggttaaaacaaattaatcatcagtgagaaggccaaaaagaccccacacagggaccccagaaaaacaaatgtcatccagctgtgaaccatgagggcccaatgacagctgacacggcagcctggactgcggtaaacagaatggcgagaccaaacctaaatgtttccccttggaaaaattagcagcagccacctacagaagaatattcccctccatgcatccaggggcctgctgacctctgcccagcctttctacctcatctgtaacattcaatcacatagccagccatcctatgcacgctgagaggtgacagcgcctctgggaatcagattagagaacacaatcgtttgtgaccctgcatccctgggcctggcagtttcctgactgatcagaccctgggcccctcaaggcaggggcgcgagccaccaccaccgccctcctccgtgcagtgctgaatacatgctactgaaggctaaggtatcgtcctgctgtgacggccttcccattttataattcagtagcgcacgagggccatggctgcctatagcaagaatgtgtgtggtttgatattcacagttccactgtcccagaaagtttccagtttgctagcttgtagccatttcccctatctaggtgcactggccgtgattttaccccactccatctggggcgcgcccggcgcagacaggactgcagagaaaagggacagggaggggacctagtcagtccctactataactgtttctcaagacattctccccatgcatttatttgctctcccggggaaagagcgaagtgtgggatgactcatagtggctagatcgttcctctaactcctcccttcttttgtgtgtggtttaaaaaaaagaaaaacacacacgcagcccatagccacaacatcaacaagaccagaagccccgcagagttcgcaggaggtgggcagtggctgcgccacctgctcggcttccccaaactccgagcccacgccgggaagcggcggctcggtggccccgggcgcccgggccggtggccccgcgctcgcgccgctccgctccgcagccgagcgtggagtagcaggcgctcgcggcgcggcgggggagccgccgcggaacccagggcaggcggccaagcggcccggctgtgtccagccatcgcctgcgccgcggccagctggcggccaggcgcggggccccgcggccagatggccgctccggggacgcgccgcaggcgccgggtgcgcccgggccgagggagcgccggcgcggctgtgcaggcaggggctgggggcggcgacctctgcccgggcggagaagctcaggggcccgagcgcggcgggcggggcgcgcagcctccacgccgcgccctttgtcccatgtgcggctcacacaggggcccgcgtcccccgtgaccccggcccgggccgcagctcaggtcccggaaccaactcctccagcagcgccgctctggcccgggccgccgtgcggggctcgggacacggcggcagcggggaacccgcgcccgctccgcgtccaactccgctcgccccgcggcgcgctcggccctgcaggggccgccccgcgcgttacctgcaaggagcctgagccccggccgcatctccctcccgggtgcggaaactctggcggctccaggcacccgcccggacctggcagggggaggggccgcccgccgcgcacccgaccccccccgcgccgcgcctcccgcagctccccacgcgcgcgggcgccccccagcaccagtctcggcccgccccctccgcccgaccattggctgctgctcccgtcactttcaggccacagccaagtccctcctcagctcattggcggacgcgccggtgacgtcaggccagggggcgctagtcggcggcgaaggaggcgcagggacagacggacccggcgggagaggaggaagccgggttgtgggcgcggagctgaggcggaggcggggccggggcgggaaggggcggccccagctgggtcgggcgaggctggctgcgggaaaccgagtgagccctcgcttttcctccggggtccgcgcgcgggaccctatttctggcctgtctcgcgcttcgcctgcgcggtggtctccacgctgggactgcggcgtcctcgcagaacagccagaactccacttcttcctgtccgggaggagttgtttaaaacatgcgtatctccaccttctgcttcttagaacagaactgactgaagccgtgttcttcccgccgagaccatgccgccccatcgaccctgctgcggccagagccacccagggcgggcccactcaccgcaggctcgggccacttggttccaaacctccactcccatccaggggcccggcacacccaccacactcccactctcagaggtctttgccgcctgcttcaggagaaaagagaaacttccactttccaccggcaaaactgcacacctgctccctccatcaccgagcccccccccccaccttctgtttttccagtatcgcagaatccgatccgttgctccctctggactggaatccgtatcctcggcatttcatcattccaagattctctactccacgtacccttgctgccaccctcttctactttccatcgctgaagttggtgaaagaggcgcctgcccccagttttgtggtctctcaactccacgtgttcgttttcacactcggtgaaattgcctttttaattgtcgcaagtagcatccacatcactaaagtcaaaggacactctcctttctcgtgttaactgatctgagcaaaattccttctttctccttaaaacacgtcttcctgtggcgggggtgctccactttcctgtctgtccccagtcttggcgtgcttgtctactctgggtgaccaccaaataacagagttttcaaggtctcagacctttcctcttactccacaatttttccctgaatgatttaacctgctgtcaacatttaaatcaatatatcccaaatttgcaactctaatctttgctcctctgagctccaaatccgtttatctagcttcctattcagctactcctggtaacaagcacctcaaatggaacccatccaaaactgaatgcgtcctttccctgcttgctttcaactccctgtctccctgtgatagtgaagacaccactatccagtgtttcccaaactctgccttcacctcggcatctaacaaatcgccaagattctacttcctaaataactctgaagtctgtccacttcctaccatttccagtattacgtatcataatgtgcttactgcacgtgcgttttcccggcccacactcagtgatgtctcgttggtagactgtaatgggccatggtcgaagtatttacaccatggaaattagccaacattatgaatcatgaatcagggatcgatttgttttgctgattgtctctagacttcagaaagtgatggggaagatgttaataatgtagattaaacttaaaaatgtgtttagtgctgaaacaagattgcagtttaatgagtttatacaagggtaagaagtagtttaacagatcacatatcagatttaaggacaataaatttgttggcaaaaagtggatcggtatgtaatttcactagtcacatcatggttgagttacaagcattggatggattcagatacaagcctttggcaaaaaagaagcaaagctttctgtgagaatcagtcaagtagatagaactgacaataaagagtgtctgccttttacttgtgtattgtttattacacatcctttatatcagaaacatttataaca

SEQ ID NO: 917486 - DNA, 4001 bp, Homo sapiens
tcctggctaacacggtgaaaccctgtctctactaaaaatacaaaaaaattagccgggtgtggtggcgggcgcctgtagtcccagctactcgggaggctgaggcaggagaatggcgtgaacccgggaagtggagcttgcagtgcgcagagcgggagcttgcagtgcgcagagcgccactgcactccagcctgggtgacagagcgagactccgtttcaaaaaaaaaaaaagaaaagaaaaaaagaaaaggcacatcgacattgcaatttccagtgcataatgctcttcatgtgtccataactgcatattcaagatccagcctggactcagagttgcaagacacactccggccaaagaaacaaataacttttatgattgctctgaaaatactaacaccacctctcagagttagcacttactatggaaaaaagtttcctaaagtcagtaaagccatgtggctttggtaataaagtagatatggtaagacattttcatagattaaaaagtaaagaacagagctcatgataatgcttcatgcattgatgccaaggctatattgtgcaaatgaaaatgcatttctatgttttgttttactttcagaacaatttgataagtgttatgcaaagaagctttctttttaagtactcacatctctgtgaatgtcaaaaattgtcttccacactaggactcaattctcacccctccagttctatacctttcaattagataataagcactgcctggaatttttaagactacatgaaagcagtgttggcaaaaacgcctaaggtgaaactgcaccacagaaaaggtactgagtaaatcctgaagtaacgcaatgtaatcctcccttttgcatctaatatctgatcatgaaatgacaacactaagaaatatcgtttgcatgaggtatgtttaacaataactgtttcctgtttacataaagaaattgtttggttttgtagtcaaagaaactgtcatggggtaaaaactacgtcttcatacatatcttgggttaaactgtttcagttaaaagaaacactgaacaatggtgatgattttgtatgcatattgagtcctttattaacatgcaaacaaatgacatgggtttcttacaatagtgaacggagactggatgactagtgcactaccatcaaaacagatcacagaattttgatccgccaaacttgatctccaggagtatattagccaaatttctgtcccatgagatggcattacacgcattgtaagagctggctttctcactctctaaatctatcacaggctctactcatcaatatactaataattcctgctgaactctaaggaactctttcccacagaaggaatataccctgggccgctcacagacaacgctctcccgccgctggcgctggtccgggatgcggccccgagacccctgcagccgcgcgctggctcaggggacctccgcaggacgcgggcgggcgccggggccgggtcgggcttgggcagagtgacaggctcccagtcgtgagcctcacaagcagatctatttacaatatcccggataggagtccaggtcgcgtcgctcgcgtcgcccgcggggacccggcgtgaattcacacgctcccctcccaccgcctcgccgcctgtcacggccccgagacccggtcagccccttcgggggttcccttcgccgcgcagtactccgcccgtgagcagcccccgcctgcgctcctccctccctagggcggccgcctccactcccggctcccacccagcggggatccaccagggcgagggctgaagacctcgcgggacgccgcgcgccggggacagcgacgcacctaccttcccagccacctgggaggctgcaggtccgggccggagcccgaggctcaggggcgcgcggagcagtcctggttaaggcgcagggcgcggggttgcatgggggtccagtccagcgtgcacaccgtgcacctcccagcgcagggctccgcgctctcccgtagcccggcaacggccgccaccccagagccccgcccactaggagccccgctcagggcaccgcccacccgggccccgccctcaccgcggctctcgccgtggctccgcccccgtccagagccccgcccccagcgcacactgcgtcagccggacttgctctgcagctgggttctttggaggcccccactccgcggctactgaagcggatgagtgtgaggctgactgggggcttggggatgggggaccggagaccaccaagaacatggctgtgttgggaaactttccttcagagcagagagggagggttcctttccgccggggtgttccccacctttcagcctttcccgcgtgggcccgcatcccagccagaggggatacggcggccaggtctgcgctgctgcgcctgagctcaggtcggcagaggtcgcagacctcggctcctcagccggcagggactcgcaggtgcgcgttcccacggacgcctcccggggaagcccgagttcgcctcctgcaggccgggaagcactcgccccgagacggccgcaccctcgcagcggaagggcgtctgcaccacagctgtagcaccagcgcgtgcgaggcggggccagggccggggactcactgggcagttttgctgaaagggttaagagaatcgcgtctgtaaaatacttttccaccagtagaatgctgtaaaagtgcaagcagtattgttctattcgttcacccaagatacggtgcatgactttggtaccaaggcatccaccgtttctcacgtgttggttttgacttcccactcaactgcactgtgtggatggacccaagtccctgtttcttgtctataccccaaggcccactggagcccctccatcagtatttgttgaatgaatgagtgaataggttgttgtatttaattgcccaaaagcacagcttgtgatcccaggcttccaacggcgtagcactatactaggtacttgtgaacaatgttaaaaatattattcccgatgtcacaccttgatagaggttgtatatttcaaatctaacacatccagaatatagatcccaataacgacttattggtaaacgatttccaaatgatgtacgttatctaatttgaacctcaaggcaagtgtgtgcttccctgtcccatctcccagcggctacccgatcagactccagccctcagtgcacatcactaccatattcattcccacatcccgctgaacttctttatctgtttccttccccagctacacctggatctcccgagggcatctcctaattccttgatatcccggggcctagcacacgatggatactcagcacttctaagctgagttactgcatcttcctttgcaaggtctcacgcagtcccccatcgtcctctctttgtcttggtgcccaccacctccttcaccaccatgcagaccctccccacccctcaccacagcactgcctcggtcatcaaccccgcttcccgcctttcatcactgctactgtcaggctgaagagtcacaggaggttcctcactgtaaagaatggattctgcgctccttagattagcattccgagatgtccaggtgcagccctacacctatttccagccttgcctcgcctctggagcaggctttataaactgcgccgcgtggcccttcctttgctctctacttcctcttcgtgctctcccatcttacctctgagctttacctacttgtcttactccagtttcagcacctcgctcaaaagccacggctctcacgagttttccctcaattctgagcctatgtatttccttgctccaaggtttgtggcaatttagcacttgcccattgtgtcctgtatcataagattctgtgtactaactttcttcttcaaggagttaaaaacactttcagagaaggggcatattttgttccgatttgtatctctgacagtatcaatcattcaaataaatgttcaaccaaagctttctgagtggaattgaatctgccagctcaggaactaccttctctgactt

SEQ ID NO: 917487 - DNA, 4001 bp, Homo sapiens
ttaaaaggaagattttaagcaaacaaattaaaaaaaaatcaaactaaaccgatattgcaggatattgtgaacatgatttgttgtactcttagaaaaaaaaagcaaatgcctctcctggcatgactaaaaacagcagttaaatctttaagattaagttattaatgacacactttaaaaatataatcagtttagcatggctttaaataacctccacttaacaactagcaaagttttaaaattaaataaacaatgctaattacccttctagtatcaagaggaaagtgtagaaagtaatttaattaattggctgtgaaaaattaattacttatgaaatgagactcattagacctttcctgtttcatcagaatttcagactaaaggataactggtcttatcacttatggtttctttatggttcagctagcatcaaatagacttgtgataataattaaatattttgcccagataaatttaggactagaacattaaaaaaaaaaacatcgcgaacaaagtaacagtgttacttttccattgtatttagtttttatatttcactgtaaagattttactgtgtgtgtgtgtgagcgtgagtgtgtgtgtatcatgaactgacaaaaaaataacagttaactttcaaattcggtacagcaatataatttggttttgtcatgttgggcattagctaaagtgaaaatgtgactaagatactttatgtaacataataactgttgattactcagatagttttcataaacagttggcaaattttgacttaaaacagctgtcactataaatgtaaagtaaatgttaatttaggaatattaaccttgtgaatgtttctgtaaataaggcttatgctatttccaaaggttatagaaaatcactggagtatttttagccaaacttagtgcaactttatcctcactgtttttaaattcttcagttttacacataaaagtctttaatcatacttgatggtttttcagtgattcccttgagtgtacaaactgcataaggaagtgtatttgatagatttacatcttggaagtgagagaataaataaactaaagaaacagtattgccagagatacattttactcttttatataagaaaacaaagaaagcattttcaacaagcaaagttgcactgactgtttactaaataaggtaacctgtaaatacttagagcaattatagctcacagatctcaggggttgaagtaccagttgcatgctaaagtgagcgctgttctgttttgtcctgtttgtacaactcatttccaagtaaaatttgtatgacagactgcaaaccctcttgtacaaactactaaaaattacatcaagttccatagttactctgatacacacattcagcatcatgtagtattcagctgtataaatgctttctaaaaaattaattaaaaccattcttttctcagaacacatgcgaaaaatgcagtgaaagctataacaaagcttaaaacagagtacctgcaacatgctgagctctttgcagtacttacccgttcagcaacttagtttctcctggcagcacttctgtgccaaatgcttctaccttcccaaaaatgtatgtcagcacaagcccagacgaaacttcaaatccaggaaaataaaattaaccatgcagatcaaaggcagacgagcagggagatgaaatgcctgtaatctgatcagtgaatcagttgctgaacatcaaaggcagggctgagtttatatatatgcatggatatcaaagaaagttcactttcagcaggtagttaccctcccacctcctagtccacagactcttttgttaaacatggatcacgttgttttcctcctcttttttgcaatgaggcaatgctggtagttctcccatgcttgggctgagtggctggatctgtagcttttttggttcccaagctgtgttgtggactgtgtgttggaagcttttcctagtgccagcgggttctgctttatccctttcatctcgctgaactgcagatcccatgacatcattcagcgccgtgggactggtaggagagctataattcagcctgtgggggagtatagctcaagagaagccagagtttggctgatttctaatcatgttagactattgtgcctcacacaggacagtttctgttatctgtctgccagctggaaaggacagcaactgctgctggatgcttcttgggtgataagatccctgatggatggacgtgccaaatgacagcatttaattgcctcttcgctgataaaaatcacaatttcctacagagactgggtgtcaaatattcagcatagttaaatagcactatgagaccactctaaaaaacacccaaggacactgccagatggaccgataacattttcacattttgattccagttttcaaagtgacaagtctttaaggattttaaggaaactgccctttctttgaaacatacattattaggatctgattaccaatcaaaccgggttgtgttaagtagttaagcagcagataaccaacaattcatgaataaactgccatcttccactggctcacttaagactttgggcggagacttaatctcaatctttgccttagttcgggactctggaaattagattttaaagcaatatctacttcttagacatatttcattaatacttgttgagcattttaaaattcacaaaagaagaattatgtagaacaaagcatttgccctgtgattattccaaagccatgttatttgccttttagggctgtttcttccgaactcatagtttggactttcaactcactaaaaaattaccaccttagcctaattcttcgtattttaaaattaaatatattgctcattatttaaaaattttaagctattttccttaacaatgtcagattcaatacaatatgattattttattttgagtatttagtaaaatagaagataagaagaagtttcatcttccttgaaatccaggatatggtgcttttctgattttcagacagttctttcatggaatgaagacaatttttctattttataatggaaactcactaacttttagaaagtaagttaaaaatatttttgcaaaacttaggggatagtagaactcagtctttttcaatgtaacttccctccttaactggttttgtctaatttttcctgacgcgatatttgaaaacgttatttatgaagtgtttatttccagatttctatgattcttgaataattttaatagcaaaatatttagtttgaactgttcataagttctgtataacatttaaatagtcctgttgatttttccatgtttcttgtataatttttctacttatacatcatttctcaaaaatgcacagggctcaaatagtatttgaactggcaggtgtgatgcttaaggacttccttaaagcagaccaggaaaattcctgtgacatctgggcttcacatacgtttcctgggcatcttgaacccatgaatacaaagaaaatatttacaaagacaaaatatttacaagaaggcatgtgcccatttcttttctgaggtagtccaaacctaccaccagcatggaatccatatgccaacagcctgcactcaggattaaagtttcccgatacactgatatattaaatcagagcaactagacactctgtaaggctcattggctaagcaagtagattttatgtctttatagatttcaacaccagtagaaataggtgaaggactgaattcgggttcttgtgttccactgaaaaacatacaggaggcacttgaaagcagggacttgaatgaaaaccaatcaaatgatcttcaatttatacaaatctccccaagcaagctttgtagttcaagatacatccaacaatgcaataccatctccagtggaagagtttattcaccaagtcactggatattattttgaattggtcctcttgtggccaagaactccccatatgtgagatgaaaggggactgaggctagggccccatctgtcgcctggaccagagtgtgg

SEQ ID NO: 917488 - DNA, 4001 bp, Homo sapiens
aggtgttagaaaagataaacagtggagaactactgcatctttgatcccttttctgattgttgctcttttgtttgactaagaattttaatggttttattaggccactctgctatctggctccatgcccatagtaagtggacactgtctgttgaataaatgattcttaactcattccatcgcaggtgacggtgccacgcacaacgctggcactccatgcacaagcactaaatgggggttattaacaaaatgctggatgagaaaatgggtaagccattcttattgcaacacactccaatgaaagaaagacgtttagtcactttcatatagatttgttatctgtgttgcaagcaaaccactcaaaagttgtctttttagaaacaacaaaactctcaatgagtagattatatttaatgcagattttctgaagtgtggctcattgcatttctactttaagtaggtaatcacactagttctagaaaatgcaaactagcggataatgaatacttaacaaaaagcctatgattaaaagtaatggagttcgagacattggcacatgtcaaaaaaccatacaatccaagcaatgccatgttttgatgcatcccgtttggtttagtaatcacctttgaatctgaaaacgaatgtagtccaaacccaactttcttttcccataaaaaaaaatgcacagtcagccccccacttcctctgagaaagagttcacagcaccagacaagaatatttgaatgaatccaaccaactgcactgcaatttccaagaaaacacaagagcataaaccaccagaaagcataatattacaaatttaccccttccttcctactatctctctgcagttcctagccgtcgtgcaaaaaacctcttcatctttccgaaggttggttatttgctagactgtagtaacactgtgccatcacactcacctcgcttccttcctccgcccacatccctagcaggcacgtggggctgtccctcttccttcacccccacaggacagcgccacagccgcagagcccccatcccgagcccgcgcctctctggtcgcgccgtgtcattctgcccacccattgggcgacctgggcacgagcaccgcgacctcccgctccgcgcagccctccagcaccgtggccccagcacacctgcagagcagccaggcgcaggaaccgaaacccgccgggtggtgggcgggaagggaaaggtagatgcccaagtgaaggcgctcatcttttttcctacgtgaacagaagttgattcttaacttcaagtgagaaatgacagggagaaaaagtatgcaatcactaccagaaaaggtgagaggccagtgttgtttcccagcgaagggacggggtgagattcaaacccatcgtccggccaggggagtccgcccccagagcaccgagaagctggggtgcgtgggcggagagagagcagggtgcgcccgacagccctgcgccaggttgtccccaaactcaacacttcctctctcccttctggagtcactttcccttccggaatatgcaagctctgggtggcccagccctgccgccagactcagtttccaagtgcgggggaaggagatgggcgctctcagccgcgatcccctgggaaggtggccactcacctgcgctctgaaatagaagaacagggcgacgctgcagacaacctggcccagccccagccccaggagggccacgaacatggagcgggaggcggcagggggctggtgcggcgcaggcggcggcggggcgtgcagggggccctcgtgcggggctccggggccgccgcccatctcctccgagccacgcaggtacttggtgtagtctctgctggcgcggcgcatggcgctcggccctctcgcttcggagctctcctccctctcccgctccctccccttcttgtctgcggccaactccggaggctgcggcggagcctcgacgtggggcgccgacttggagcccggctttgggtcctggggcgcgcgggcgagcgggcagggcgcccggcagccccaactcttataaaccgcttggagagccctggcctcgggagccaatcagccccaggcgaggctgcctcttccactcccacctctggctccccttccttcctttcgccctccctctctctcaatctctgtcactgaagggcctccttcatgggggccctccaaggaggaggctgggggctactccagtggttccagactccccttgccatcctcagctgtctttctggaggtccaagagatgggttaaagaagacgcagaggacacctttgctaaaggataaggattgcacctcagacattcctcctgcatccattctagtttggtagagaagggacttcacatcctggagtctcggtttcctccttaggatttagaaagttaaatttgatgatctctgaagacccttcctgtccaacctctccccccaaagtgcttccaaatatagtttctcaaagtattttggaagacttcgaaaatttcacaatccccttcccaaatccctatttctgcatcttgaaggtgacattgagcgaggcaggtcttgaatgtggcagtagagagcctatagacaccaactctgactttataaagatgaaaacagtgcagagaaaagggtaaaggggcgtgtagccagaagcaagcatccgaggagggctcacccaacagtcaggaaagagatgtaacacgaagctgatgatacagttaaatgttagtttcattgctaaagaaaccttgctagggctttttaaaaacctctattcagaactgtggctcttagtgagaaaacaaaaatattaacattgctcacaaattctgatacttcttcagaaggaagttgctgaccaatttaaacacccatgaaacttaggatgtttccacttttttattaatacagttagcccacagtatccatgggttccacatctgtggatgcaatgaaccacagatcaaaaatatttgaaaaaaaaaaaaaggatggctgtgtctggactaacatctgtagactttttttcttgtgatcatttcctaaatgatacacaactagttacatagcatttacattctattaagtattataaataatctaaagataatttcaagtgtacaagaggatgtgtgtaggttaaatgcaaatactatgccatgatatgttaagaaacttgaacatccatggattttggtatttgcggggaggggtttggtggtgtcctggaaccagtcttccatggatatcaggggactactgtgcctttttattttgcatcctctttctgcctaattcgctaatgagtatttctctaggcaagatttgtgacaaatgacaggtctctgagttattaaagcatgtgttctaaattgaacacttagacctcagtaaatgttgaggaagagtgaccaggttgaattttttttaaaggcagccatacaaagaaaatgatctgttcaaattcaaaaatgcctttagcatttatatgtgtatcaatatataggttggtggagaagggacaaaaaattttcagactcaaacatagaaacaattgacgttaattctactccttgtagtctttgacctcttcccactttttgtttgttaactttgggaagtaggtttattgtctcctcctccccctcctcctcctcctcttcttcctcattctctccctgctccttgactcaggaaataattccatatttcttctttcttataaatattgattgggatcaaagatttttaaaatgtgttataacaactaaacccacaatgattttactatagtgtcttccattctttttaatgggtttttatacaacaatgttttatacatgtttttaattccttgacatcttgatcctcaggttacaagaaagtccctcaaatccctgaattatgttcaggtatacttgacccaggagcttcatatatgggaccgtatgttacattcctacagagttcttcatatgacatttctactagtactc

SEQ ID NO: 917489 - DNA, 4001 bp, Homo sapiens
ttagttcttttatatacaatgcttggtatacaattttcaaaatcacatgacatgacaagaagctgaaatgcatggttcataatgaagagggaaaaaatatccaattaaaaacagaccaacagatgacccaaatattggaaatagtagacaagaatttttttttttttttgaaatggagtttcattcttgttgcccaggctgaagtgcaatggtgcgatctcggctcaccgcaaccttcaccttctggattcaagcaattctcctgcctcagcctaccaagtaggtgggattgcagtcatgtgccaccacgcccggctaattttgtgtttttagtagagacgaggtttctccgtattggtcaggctggtctcgaactcctgacctcaggtggtccacctgccttggcctcccaaagtgctgggattacaggtgtgagccaccgtgcccagcctacaataatttttaaataattcttttacatatagtaaagaaaacagaggcaaaggtaaacaaaatggatgaagagatagagaactgcaacaaagaagtggaatgtttttaaaaataagcatgtggatattctagaacaaaaaaataaaatatctaaaattaataattaactagattaacttaataacagactggataataaaaaaaatagtgaattcaaagccaattcaatagaaaatgtctaaaatagaggaacaatatttagaaaattaaacagaagagaacatgagaaatacatgggacattatcaaaaggtctaatatatgtgtaattggagttccagaaggacagggaaaaaatgcaacagaaggaacatagaagtatattatggtgagaactttccaaactgattaaagacattaactcattgactcaaaatgtcagaaaatcacaaagtgggtatgtacaaagaaatctacacctagccaaaccataatcaaactgctgaaacccaaagacaaagaaaaaaaccttaaaaccaacaagtagtccatatattttccctcaggctggaaatctcaggtaggtttcaaaatttctttcttccttttttttttttttttgagacggagtttttgctctgttgcccaggctggagtgcaatggtgcaatctcagctcactgcaacctccgcctcctgggttcaagtgattcttcttcttcagtcccccgagtagctgggatgacaagtgtccgccaccacacccagctaatttttgtaattttggtagagacaaggttttaccatgttggcaaggctggtcttgaactcttgacctcaagtaatccacccgccttggcctcctaaagcgctgggattacaggtgtgagccaccccgtccagcctaacttctttgttcttacttaaatgataaaaagtcctctggtcacttttagtcctgagaacacactcatttcaaaaattaaaagaggaggcccaagttaataacaaaagctttgattcaatttcaagttaaatcttcttccctccttcaattcagaactttcagtctgaaaactttaccatgggaaggggagcctgctgtgggtgggatggaactggaggggacttatttgactagtaaagttataacctgggttggtgctctctgagcttggtaaaatgttcagagtgaactctttcattcatggtactcttttgtattttcttaaagattttcccactggaaacatctgactgaaactccctctccctagctgactgtttacagttctcccctcaatttctgcaactaatagtacctctcattcttttcttctggctacagcttgcctctggctggaaaccttcttggatggagtccctttaataatgatcctcagactgtcctcttcctggttccccacgtcacatccctggtacacattctgccttgttgtcagtgaaaacaaactgtgttttcactgcgtgcagcttggtcttagctatgccaccagagaggcagcttcggccacaccatttgctttcagtcttcttagatgtgagacaaatcccaggctctttgttacctgaaacgtcacaacaaatatcaacctcgcccactgcttatctcaaagctcctctcacagattctctaaacaaactatggcttgattacttcaacctcaattatgtatatccttaacttggtttccagattccttctctacaagtatctttctttgaaatatgggagtttttgcaacctaggatttagtttccactttaacatgctgatacacaagcaaatgcagtcaccataaaatgtaattagtaaaatgtgtcctgggagcacatgagagttcttaacctagacttgggagtccagaaaagactttttggaggaagccatatttaagatgaggcttgtgggatgagtcagttatccaagcaaagtgggaagacacacatataacagccaagaagcaaaacaggatgtattcaaggaactgaaagaagtttagtgtagcttgatcagaggggaaggaagaatagtgaaaaatgagactagaaaacgagcagggattgagtcacaaagcttttgtcactcacaataaaaatttgaattttattcggaagcaatggagagtcattgaaagtttttttctcagcaaaatgacaggtctgttgtgtaatttagaatgtgctttgactgcaatgtggagaataggtttcagggagggtggtagaaagaggtgggcagagcaagtctggactcaagagagccagtcactagaccacgggccacatccaggccaggactgagcatggtggtggcagaaggggtggagagaagcaatgggtctcagaggcacttaggagtggagtctgttgggtttggtgactaaccagccatgacatggtgaagaagaggaaggagtcaaagatgccacacaggtttctctctttggcaactgaattggtgccacttgctgatatgaaacactctggaggaagagcaggttggccaagctcacttcacattcataggtctgagatgctggggaagcctttcctgcttctgtttgtttcattgacaaccttcttcaaccttcaaacctcagcccagaggatatcgccttcttgctgttcccaaattcccagaattttctaagagcccttcctctcttgctcctcactcacctttattttttatttgttttatttcacttttttgaggcattacccaggctggaatgcagtggtgcaatcttggctcacttcaacatccacctcccaggctcaagcaattcttgtgcctcagcctcccgagtagctgagactacaggtgtgtgtgaccatgcccggctaatttttgtatttttagtagagatagagtttcagcatgttggccacgctggtcttgaactcctggtctcaagcaatctgcccaacttcgcctcccaaattgctggaattatagatgtgagccaccgcgtccagcctgtcattcactttatcctatcactttcctcattacagtgactttaactatatgagtgtcttctctagtagattataaaagtcttgaaaatacagaatgttttattcatcatttgtactctcatcacctagcaaaattcctgcacatagtaggctctttattagtgttgttgaatacagtggatcctcctgaatctgaaaacatcgaagcagtaatacagatgcaaacatgtatacagtatgatctttctgaacaaacacctatcagacatacccactggggaagatatcatcactacaacaatacacatgtaccacctgcaaacaaagtactgccagccttccaggaaaggtagaataaaaagagtaaaaactgagatatccagatggagctttcttaaggattgaatgcctgaaccaatgtcatattgtgtccagaattggtgggttcttggtctcactgacttcaagaatgaagctgcggaccctcacaagaagtgttacagctcttaacgcggcacgtctggagttgttcattcctcccggt

SEQ ID NO: 917490 - DNA, 4001 bp, Homo sapiens
taagcccagttattcctgataactagtataaagatacaataaccagataccaaaaattatggttttataaaataagaaacaattttttatgaataaagcatatagtcaaaaaataagtttatagtcagggtacctcatgcgtgtgtgtgtgtgtgtgtgtgtgtgtgtgtgtgtgtgtgtgtgtgatagaagggtccctggtctatctctcactacatttcttatgcaattctcttcagaagtgaaaatatacataaattattgcatgtattctgtggacttcatagcgtcactgtgaaggttaaacgaaatagtatgtttgaaaatgcctattctggtctatagctgtacgatacgttccaggtgctcaaaaaatattctttcaatatatttaataaaaggacaataatattaagaatttgttatattataactttaataaatgtatacaaagattctttttttcaccttcaaatgaaagaactagaatcgatcattttggtaggccccaccaactctgtaaagttccgtggaatgagcagaacatgaagaaagtcagaaatcagtaaaggacgattataagaagacgataaatgcatggatcccctggaaaagcgtaccttaaagagaagctttaaaatctgtgtgtgtgtctgtgcgtgtgtgtgtgtgtgtgtgtaaaataacctttttaacaaataaacaaaattaaagtacaacatacagggcctttcattacaaccttcacctggtttcacaacatgtaatgtacattcagaaaacagatgtctttaactttctatgacccaggtagtaagcaaagtctaattctaacatgtaatgcttttttttatttttctggagtgatgaataatgcttctcacatgggagggcattatctacctgaggaaacacatatggcccttttatctcctctatgcttaatgcacagataaatacttacacacgcacagagaaatgcttccagtcacacgatctgctcattggaggaaaaagcacacccatgcagcctgttacatttgccagcgctggggctttgctctaaagcaatgtctgctttggatggcaaatttcatagtctctatttaataggttcatagaggggatactcacctccagctcccccagactggatgttattctctaatccctgactcctaaaagtgtctgtgcccaaaacatacctgtttcttctggaccctgaacggcacgcttatttctgctgttctgactggagttgccttctcctggagctggtggttcaaagatctatgaacagaaaaacttcaagttattagaaagacagctgaggcgagggagaggcagcagtgtaggcaggatcttgcctgcgtcttgcagctgctgcaaactcactttcagtcccgcggtgacagctggagcttcctccaggccggccttgggggctcctgctcctgctggcagcttctccgcgtggtggccctgcagctctgcccggaggctggccaggtccccttgcagggcggccacctggtagaaagacaccaccgtgaggcagcaagacagcagtgccagcagcaaggttgcagccagcagctttccgtctttggaggatcggacagaggggctttccttccgtgggaggatggaaacacactccttcagtttcatttcttctcttttcttaaggcaagaagtaaggcgtgactgctccctttctgtggagtcatccatatcactacttgaactttgaaggttggggcctttagaataagtgaccacagggaatggatcatttcctgttatctgtgtttgttgatgtcctgcgtgcactacatggcagggcttggctcacccctcaggagagttatcctgaattttctcctttctgcctttctgcatctctacccctactgtacagtaggtttgctggcatttaccctccgattggattgctcaatctgtcttcctcatttcactttcagtttttgtaagaatttcaaagtcttctcataacactcatgctcaagtagatttaaaaccccttaaatctgctgaggaaacttggagtttggattggcacagtcaagggaaagcttttaagatatgctcaggtctgagaagcccacccttaagtgtagcaagggaactctgtctgcttgggaccacatggcttcataaggaagggggaaaagcagctgaaagttcctgctgctgtcataaaaataattaatgtgaaggtcagataagctaagtgttttagcattgaattgttcttagctagagagtgatttattaacagtcttcaattatgaaataaaatggagaatccttgaaggaagtgtggaagtaagtccactgggaattattcatattattatactaataatgtcataaaaagaatgagagtaaatgttacagacgtatttaggttagatatctgaaggattctctaaatataagtgaatatatttttaaggaaaacatgcataaactttttccttctgggactcatcactgaaactcaatcatgcatatgaacagcctgtcccaaggagcctggtctcagcttttctgctcagacttctgaggctttaagtccccgctcaatatgatactagttgaggagaatcagccttgcctccagctccaaatgcctgactgctaccattaaccactctcaagtagcttgtctacaactcccatgttgactgtgccacagcctaacaggtcggtgtacaagaggtccttgatcacacaagagccaccttagctttggatttttctgttgttgacttggtggacctgtgaggactgttgcattcattctagtcctgccttatcctgatggctggttcctggacattccccagtttttcactgctttgccccagcattgaaatattgattcatctttcaacaaacgttactgagcacttaccaagccctgggtagtcactactcccctgtggactaagaatagtgagctttagttctgtctcactctacatttccacacagtcttaagtaagaagtttacagaaatgatatagtgcaaagtggagaactccagacccaggcttctagactgcaaatcctgcctcaccctcgctctccttatgcaaagtacataatctctctgtgattccatttcctcacctgtgaattcgtatgacgatattaactgtccctgggatacataatgaggcttacaagaatgtggaaacaaattacattttggatgcttccatttaaaaaaaaattatttccacaggtttttggggaataggtggtatttgattacatggttaagttatttagtggtgatttgtgagattttggtgcacccatcacccgagcagtgtacacattgaacccattttttagtcttttattcctcacccccctcccaccctttcccctgagtccctaaagtccattagatcattcctatgtctttgcatctttgtaatttagctcccactgtgagttagaacatacaatgtttggttttccattcctgagttacttcacttagaataattgtctccaatcccatccaggctgatgcgaacatcattaattcattcctttttatgggtgagtagtattccatcatatatatgtatcatagtttctttatccactcattgattgacgggcatttgggctggttctatatttttgcagttgtgaattgtgctgccataaacatgtgtgtgcaagtatgtttttcgtataacaacttcttttcctctgggtagatacccagtagtgggattgctggatcaaatggtagttctacttttagttctttaaggaatctccacactgttttccatggtggttgtactaaatgatcagggaaatgtaaatcaaaagcacggtgcaatgcttccattttttcattcacttttattctttacattcaaagtatgaatgaaacatttttcagttacaaacagtgctctaatagatattttctacaactgtgcttgtaa

SEQ ID NO: 917491 - DNA, 4001 bp, Homo sapiens
agaataaatatcattgccaaaatagtttaatatttttcttgagcatttaaaaaagtcacatgtaattagccagtcctcttataatcaattttcacaacaaggctgtggggtgaaaattattgttactttagagagagtaacagaataatgtgagaaacagatctggaaattctaccaacaaattctaccaagcagcacttctccaaacttttctgaccctcttattatcctgacaaaagaaccggtgaaccacttatcccagctgttttcctcccactcatcctataaaaagtaaacacactccacagctgaatgaaaagcattattactttgtaataaagccccaaatgagttgatagctgtcattgttctaagtctttaagttattaatacaacgacaactatataactccagttaccgggagggaattcagtacctgatcctcttctgattcacaaaagatgtgctgtactccagagtggtgctgaagaacacacaccaggaatcaagattcccaggggtttctaagcagattcggccagactccccctcgttacttccaaaatgctacctcaataatcagaaagcacgataaaggatccagaagggaagggacattgtggggaggaggatgagtgtttagtgtagaaaggaggataagatagccaggggctgatcaacgagagatcagcatacagtaggattagtcagggatgctgggagatggatcttgaataacggtgaaattttattactggatttcagtaaagggttaaaagtacaaaagttaaactttaaagactttaaacagaatgcttttaacgagagacaacatactttcaaaaaaactaccttctggtatgataccttgaatctacagattttaaagttgcctaaggcaaaaaactaagtaatttttaaaaaccgtcgtatgttttcaggtttaaaaaaaaaaaagtcgcatattttcataaggtctgagaagctcgccaaaaccaaacctaactgaattctccttatgtaaacgaagactaagccacaagattcaatgaccctaagcaaacacgctgcagaagaccgtttaaaaatagaatacacaaaactaccacaggaaacaattccggaagaggactgggttatcttctggaaacccagctttcgtgcttaaagacaaactattcttccccaaaccaaatctcccgatccctaaacattaagttctcacatgtcagttgcctatctggtgtctccaccccaccccaatgataaaagctgtaaaattctctttaaaaacgtcaggctgggaccggtgtccgaggcacgaggggtaggcagaggaaggcggcgtggagggaaggagcctggggggtccggcctggcagcgccgaagcgagaaggaaggggagtccctggggccaaagggggacccaggcttccccaggcagccgcgccgggcacgctgcttttgttgagctggggggaccacggcccaacctggggtccgggccctcgcccgcccagcgaccctggcactgtgcgccgttgagtccccttggcgggcgcccgtccctcccgcgcctggctctgacctctgcccaccccggtgctgcccaccccggcccggactcggccgcagagcggggctttggcctgccgggctccgagactgtgtccccacccgcgtccccggccgcccgcgcccccgcgcccgggccctcgggggccgcctcacctgcatgcccggagcccccgggtcgacccccgtgtccaggactgcgatgagcaccccccgcccatcatactccgggtagcggcagaggaaggaggcggctccggtctccttcttcggcaggagaccgtgaaaagggaagggctcctcagtcgcagcggtggccatggacgcaggatggaggacgaggaagcggcaaactgccaggctgcgcgcggactagcagcgcgaggacacccgtgcggcctcgggccggaggcgggggcgaggggcggggtcggcccgtcttccaccaatcccggcctgccagggagcggtggccaatcacgtgctgctacgtaagccaacggcgccgctctcaggagctaggcccgagtattgcccgggctgcagtgaagggggaggagtctgaggacattactggagggttcggatctcgaacctggggccttgaagaggcccgcgcttggggtttttaggcaacagcaggcctccaagcagagtcctggtgtcccggaccgaatcactccccgagagacgggcaaggagatggaccgccagccaggaataatgggaacccttcgcttggcaaacgatagtttccaaacttaaggttgtggatgaaactttttggtgcggctgctgcaggagccccagccccggggtgctgctgacccgaggcaagggagccggcgcactcacgcttagccgctaaggagtctgcggtgtcggcgaaagctccggacatgattttggaaggtcgtaggttaaggggtgtagactttgggttcccctgtgttgttatgcccctttgatgggggtgaggtggtgagggggagcaatagggtggagacaggcaatagtttcagtcaacaggaagtgggttgttggtcattccgtcgcctttgtagccagtaacaaagcacgagactgaaatgggcccctcctatcctctgctgatccttagcttccgggatttctgaaaaacatctttttttttcctcttacactgaagtttctgattgctccttacggctgtccactcaattatagagccataattttcagttttccagattcacagtgcctgccgtcagttgctgcaagctgcatagtggtcctctaatgatctttatgtctatgctcatgccagggtaatcttagccttttattgtgccgaagacccctttggcaatctggtgaggcctatttctcaagcagtgttttaaaatgcatacaatgaaatagataggattacccaggaaataaattatgtttaaatgcagttatcaaaaatactaaaggcaattttgttatatagcaggagctttacgtgtgtgtgtatagttacaggtgtacttcttttgcattaaataacaggagctagggccaaggctaataaactaccataacttcaaaatagtgaagaatataattatttggagatagcggtgaaaactgcactacgatgaactgatttttattggtgacataacagcataactaccctggtttttgcctacattcatacttgatgtgaaaaaaattaagaggtttgtatcttttttctacggaagtttttgaaccccttggattctgtctatggacaccaagttaagaatacctggtataaaggaaagccttatgcatgcggtttccaacccacagaatttcagagatcctccattaagtctcaaaaattattcttatggctgtgcaatggtttcagctgattccttgatcatttattcagtccataagtcttacacaagcatgttctctttagtgcagaggaaaaagaaaagttgaatgtttttcttcttattcccaactgtttacattacctctagaaaagaatttcaaattaacacagacgaaaacagaataacaaactcgcagaagacattcagtatagagcttatagtgatagaacagaatggctcccagtttcaagtgaaccatagtccaatcacttcattttatagatgaagaaacaaagttaactgactgtcatggattacaaaacaggttgatgaaaacacgggatttgtcttctcacaatctctccccagtatgttctaccacaccatgtgcatgactttgccagagtatcacccaatgaataaatggggaatgaacagtttattatgaaacctaggtggcagactttttattagactgccgtaacaatgttctttagatttttcttttcctttccttttctttttcttttttgacacagagtctcactctgtggcccaggctggagtg

SEQ ID NO: 917492 - DNA, 4001 bp, Homo sapiens
gtggttaagcaattcacaaaaagaaaaactgagaaatgtcatctgggaagcaaattttcaatcagaagacaagatttggaaacacctgcgagctgggaaagccactttctacacctggaatactagtatagaattgaagattaatcaacttaatttttgctcttgcagttaaaattgtacaatcctttgatccagatacttaaggtatttacctggtagtttttgaaattagcaaggatgtgcttgatttgttctgcagcccctgtcataaaaggttttactctttctggtctctgttcttcaagtttccctttgattctaaaacaacatttcattaacaggttgaagtattgaattttcagtaaaatcaatttttaaagtaaaaaatatccaagcttaaaaaaagaaaacactgaaaaaggcaaccagctgttaagaaattactagttcacagaaggtatctttcaagaatgtttacatttcttgttgactattttcaaaatactattctaattctaaacggaaacagactgcaggcttcagtatgctcatattatagaaaagcaaccactcttttccgtgaactcattaataaaaaagcaaggactttcacaaaagtatacccactgcgaaagaacctcaaaagttagccaatctttaaatcctgtaagattctagacatcagctaggtactgccagtatcacttacgatttcatgtaatctttgatgtacttcttgtaggcttcttttgtgaaacttgtttcctgcaggtgatggttcatgacaatatcgacaccagtgattactgtgctttcggtaccttcgccctcggggccttcagcggaggcatttccaccaatgagcgagtcatcaatgttaccttctgtcctactgaccatctgcattaagaaaaagcagtataattgcaaaagacacaaacgcatccaaagcaccttccacgccaatagttcacggataagaagtattcttagttcttgctgaaaataaaaaaagcaccattttgggaataaagttgtgacccgtggatttctcaaaacgacctaacttaaaagagttgtctgttggccggaacaaaaaatggggtcattaaaaagttgtttccagttgcgggcatgtgatgcctccggttggtaagtggggacaggacaaacacgaaaggactccaggctcctaagccggaagcatcatgtcccggacaaccccgggaggaggatgggcgccgaggcggcgggcctatttccaggatcagctccgcctccagttttctagaaaaacccaagcccggaaagagcgtctcctccgccaggaggcggcggggaggattgcacaacctcaggcgggggagcggaggaaacccgagcccgctcggcccggactcccccacgcgcaggcccgaccgactcaccttcccctccacctccaggcacaacccgtccgcgatctcccggatcttgtagatgtcggagaacatctcatcgtctgccggatacacagagccgcccatcaccgtgcgcctggcgccgccatttcccgcatttcccgcgccggcggccgcacgcgggatctgcccctccgtagcacaccagagctgggcgcgagccccgggcaccgacccctccgcgctcggctaagaccgccggcgtcccctaggcccgcgacggctgcgccttccccgcccccacccgcaccccagacccccgtgtgcggcagtaaggatagtgcagtgaggactcacggctgatgaggtcccggtagataatcatgatggcgactgaagggagacgacgacggcgctagcttagcacgagcctgaaactcggagcgagcgcggtgcagccggagcggcgctcggggggaggggggagcgggcggaaaaggccgactcagccgctccccaacctcatatagagggcacgtccctctacgtcatcgcccgctgcgcctccggaagcgacgcaggcggtgacgtggcacgaagagccgcgcgggggcggggccacagcgggggcgagtcggggaggtgagcatccggggacttgaggcggagacacaaggctccgttccactgggcacgccagcgggtaggggtgggggcggggaggtgcgcgcgcagcgtgggaggaggccaactctcggggcgctccctagccctgggtgggtggagcgggggaagcggagtacgttggacccggctccgccctaccccacggggccgcctggagaggtgctgggagctgggtggagcttagaggaattaaactttggccctgcgcctcgtccagcctaggttccacccttttctgggaacgtgagtatcaaccaaggtaggagaacgtcgcatttagggagggtcaggccctctggcctggggtagatctcgggactgcccgagggcctctgacaacttttcagcatctgccccagggctgccccagctggagtttttgggacgcttttgtgggggcaccgctgagtccggatagtgggacccaagtcgtcctgctcggcccctggggaataatcgtgtggggcgcaaggtctgtgggaagggacttggagaggagggaagatgtcacgggagtctgcacagggtttccatgtgttccaattttgtcccataattgaaagcttgtggcattctgtggcggacggctacggagctagctcttccctttactatttcgcacttggtcttggaaaagtatgttgtcgctttaagatgaagttgaaattttatccctggtgctagagggtcacacaaagggagtttcccacctgccccacctgttttttgaaggactttacacccaattactaagtattaaaacaaaacaggtcctgcatggtagctcatgcctgtaatcccagaactttgggaggcaactactgaaaccctgtctctacacacacacacacacacacaaattaaaaattaattgggtgcggtggtgcctgcctgtaatcccagctattagggaggctgagctgggaggatcgcttgagcccgggagttggaggttacactgagctatgattgcaccactgcgctccagcctgaatgacagagcaagaccttggctcaatagcaaaacaaaacttccgtatttagtcacatcgtcacatctttggcataaggcaaagatacatgccagtatgaagtctgaaagcttgttctatttcgcaaatattttgtgctttgtatcccttagaactaggatttgcaccaagattccaattgtgaacaagttcgatccagtcctacttatagaagtgttcattctggtaaatcaaagtatcagacaattataatacattaacaattgttcataaatccaataatatagcattcagcagagtaagaatgcaacccttgggaaagagcaggacacaggatggcaattggaatgatggaaaagtcaaaatgcaagagccaagaaattaacccctttaagaagatggggggactgggcgtggtggctcacacgtgtgatcccgacacgcgcctgtaatcccggctactcgggaggctgaggcaggaggatcgcttgaacccgggaagcggaggttgcagtgagccgagatcgcgccattgcactccagcctgagcaacaagagtgaaaccccgtcctcccccacccccaaaaaaagaagctggagttcttggatggaaaactccagaggacattgggcaactgggaggaagctaaaaaggggggaaagggaaaaaaaaagatgggggtcttggatggaaaactccagaggacattgggcaactgggaggaagttaaaaatggggtgaaagggatcccaaaataaatggatatgacacatggtcagtgaaggctctcaaacctcatttctggaatgtatgagatgattatcacacattaatactgtgtgaacattttttttccagattattacagtataattattttctaccccgccccgcccagatggggtcttgctctgttgccca

SEQ ID NO: 917493 - DNA, 4001 bp, Homo sapiens
tttgcatgccatgtataaatgcatgaattttaaaagcacctttaggattaagagttttgttgtctatatttacataatttaaagctgactacttaagcaagttttggagcaattttaagagtagtaacgaggcaagaatcttaagataatatactcttgctgggcacggtggctcatgcctgcaatctcagaacttcgggaggccgagacgggtgttatcacttgaggtcaggagttcgagaccagcctggccaacatcgtgaagccccatctctaccaaaaatacagaaattagccaggcgtggtggcgggcacatgcagtcccagctactcaggaggctgaggcaggagaatcactggaacccaggaggcggaggttgcagtgagctgagatcacaaactgcactctagcctgggtgacagagtgagattccttctcaaaaaaacaaacaaacaaaaaaatatatatatatatatattctttagatccaagaatctaaggataacaccttctttagaaccaaatgtataaatagtcaaacgaaggatgtttttaacaacatggtcccaactgtggaggtatcatcatcttccaaagctatctacaaaaagggacaatgtcatcactggctagtgaaaattagaaaaatttaaggaattctcagcaaatgtcttattttttaaaacaccaatggtcatcccctaagagggtaaatgcacctgccttttctaaaaacaaagcaaaaccaaaacaaaactctatagaaagatattataaaatcaaggattaaatttagattgattaataagtgactgaggttctaagtaatactatctccaggattttcttatttatttatttatttatttatttatttatttattttgagacggagtctcactctgtcaccaggctggagtgcaatggtgtgacctcagctcactgcaacttccacctaccaggttcaagtgattctcctgcctcagcctcccaagtagctgggactacatacaggtgcctgccatcatgcccagctattttttgtatttttagtagagatgaggtttcactatgttggccaggttggtctcgaactcctggcctcaagtgatctgcctgccttggcctcccaaagtgctgggattacaggtgtgagccaccatgcccagcctacctccaggatttttaatttcttggcagggataatatgacatcaaaaacaagcttctgttttattaataaggagaagatttattcacaactaatttctgcttcaaatcacttccaagcatataacgaatgccaaccttaaaagagggattccctatttgattgtctcagtttattagaatatggatggtcttttcattctagataacatgctctttgtttgcttgtttttgtgtaggaattatcttggaatctgataattctgagactctactaatgacgaggcactgcatgtctacattatgtgctcatttccactcattccttaaaatattatgaaacactgttacatacaaaatatgtataatataatgtataatatgcataacatatactataattataatatagtcatcatataatgagtataacatgaaagcatgaggaaatgaccacctgtgaacctgccatccaacttgaggaacagagacagtactgtcgaagcccctgtgtgtccctcctcaatcaccgtgttatgttgatcattcctgtgcttttctttatagttttatcacatttatagctaagaaagtatattcaaaatttggcttttgaattttataaaatactattatattgcatgtattctgctgcaacttactttttcactcagcgttgtttctgaaatttgtctgtgatgatgtgtatagctctatttcaatcattttcacttccatatagtgttccattgcaaggataaaccacaatttattatcagttctccaggtcttgggcacgttctcccctgatttgtactgcttcgatcatttctgtacttgcttcccagtccttatctgcaagaggtttttttgggggggtatgttctccaggaacaggattgattttcataaattatgtaattacatatataaatatatacaatacatatacacaattatttatatattcatgaatatacttgtttaatatgaatatgaaataaatgttatataattatatagaacatatattataaatataattatgtaattccaaaaaggggttgccaatttacagtgccaccaacagtgtgaaagtaataccagctaacttttgattttttggccttctaagggttatgcatctaaggggtacaaatgctacctcaatatggttttaatttgcatttccctgagcattattttatatctttattagccacttatattttttcttctatgaaatgtatgaaatgctatggcatttgcccactattttggggggttgtcttctacttgatttttttttttttttttgagatggagttttgctcttgtcacccaggctggagtgcagtggcgcgatcttggctcactgcaacctccacttgccaggttcaagctattctcctgcctcagcctcccaagtagctgggattacaggcacctgccaccatgcccagctaaatttttatttttagtagagacagggtttcaccttgttagccaggctggtctcaaacttctgacctcaggtgatctgcccacttcagcctcccaaagtgctgggattacaggcgtgagccactgtgcccaggccaccttctatttgatttttagaagtttgtttgtttgtttgtttgtttgtttgggacagaagtgtttttttgttttttgttttttttttgagccagagtctcactctgtcgccaaggctggagtgcagtggtactgtgttggctcactgcaacctctgtctcctgggttcaagcaattctcctgcctcagcctcctgagtagctgggattacaggtgcccacgaccatgcccagctaggtttttaatatttttagtagagatggggtttcaccatgttggccaggctggtctcaaactcctgacctcaggtgatccacctatctcagcctcccaaagtgctgggattacaggtgtgagccaccatacccggccggacagaagctttttaatgcactatttttcctctgggcaaaagaagttcagaaaacatccatcaataagtagattcataaatggtacttttggctacagaagttctttatattttctgaatactaaccatttagtgattatatgtgaatatttctccaagtttgatgcttatcttttcactcttggttttgcctttttgcttaaaagaagttctaaattttaacatagtcaaatttattcagagattatgcttttgatatcttaaatccttgcctacaccagagccataaagatattctcctgtattttgcttcaaacttttttttttctttttgagacggagtctcactctgtcacccaggctggagtgcagtggcgccagctcggctcactgcaagctccgcctcccgggttcacgccattctcctgcctcagcctcctgagtagctgggactacaggcgcccgccaccacccccggctaatttgttgtatttttagtagagacagggtttcaccgtgttagccaggatggtctcagtctcctgacctcgtgatgtgcctgcctgcgcctcccaaagtgctgagattacaggtatgagccaccacgcccagcctttttttttcttttttctttattttttgagatggagtctccctctgttgcccaggatggagtgcagtggcgcgatcttggctcactgcaacctccacctcccaggttcaagtgattctcctgcctcagcctcccgaataactgggattaccacacctggcaaattttttgtatttttagtggagacagggtttcaccatgttggctaagctggtcttgaactcctgacctcaagtgatccgccca

SEQ ID NO: 917494 - DNA, 4001 bp, Homo sapiens
gatctaagctcactgcaacctctgcctcctgggttcaagtgattctactgcctcagccttctgagtagctgggactacaggtgtgtaccaccatgcccagctaattttttgtatttttagtagagataggggtttcaccatgttggccaggctgctctcaaactcctgacctcaagagatccacctgcctcagcctcccaaagtgctgggattacaggcatgagccacccatgcccggccacagtgatctttgggcagaggctaccaaaaataacaaaattaggacttctctcattcaaggattcatacattcataaaattttagagctggaaacaccatagaaagcatctggtccaacccttctttccatattacaaatgacaacactgagaccaaaagaaaaccaagcaacctgccaaggagatgctgcagccagttagaagaagcacaggcctggaatacaggtccctggatctcagtctagggctctggatcaatggctgtcaatgactttcaaaccttttgttttttaagctgcaatccacattaataaacctaggagacacacacacacacacacacacacacatacaccaatatttaaaccttttgatattttctattctgctctattccattttattttcaaaagatgtcagttacaacccagtaactttattttaaaactcactgataaatcatgatccacagcttgaaaaacaccatcctagaacacccattttcaaaatctgtgtatctcaaattagagaaaccaaaggtggtggaattggagtctgggcattgtgcacaaccaccacctcttccctagactgcaggccaaacaactcgagcagagctgctggaaatggtagcatctcagcaagaaaatggcagaaagaaaaatgactgagaactctgctttaagtggaaacagcccaccttgtctaatcagaaatttctagaggtcacagactccacatgtattgactaagcaaagatatttacattcaggagaggctttgttttcagttgtgaaatgttgctttttatctacctaagagttgtgaggatgggcaaggctctttggagaatttatctaattaagcttgatactattctcacgaggaaggaagaagtcatggtactggcaggaataagagcagggccaggtgaagtgagggaagcatgttgattactgaatgtttttttctgtgtaacatgactttactcccctcaccttaatcctgccccatcaggtcttgtctttatttaaaatgttgatattgcatacatcatagattttttgcattaatttttattaaaatattgcattaaaattatttattttaattattataatttttagcattcccttaaattttgcacctcattgacctcactctagtcctggcccaaagagattctgcagtcagctactaactagtgcacgttaaacaagaaagtatcaaaaatagactttctaaaaactgcttctctaattacaattttactaagcaccatgactcaaataatcatcttaacgtcctaccagcgatctttcagaactagcaaactcaatcatcataagagaaagtttgtagaacatctttcatacctcggcagttaaaaatatttcggaggcaataaggagggcacaaaccatagtcccggttcttcctagaaaagaaaagaagttagttcaagaacatacatggtataaaaatacactcagaaatattcaaggagtgcattttaacttgattttctttcttttttttgagacagggtcttgctgtgtcacgcaggctggagtgcagtggcacaatcttggctcattgcaacctccgcctcacaggtgaaaaatacgcaaattacatttacagtaaaaatatctctcaccatctctccacaaaaggacacgatgaggtttttactaaatctataagaaagcaacaattcatgtcttttataatttttttggataatagtaaaaaagaaaaattcccacctcatttagtacattaatataactgattccaaaattgcacaaatacagtagaagaaaagacatttttacaccagtctcacatataaatgtagatttaaaaatatacatatattttcaaagtgaattcagcaatgtagaaacaccatgtatcaacaccaagtgccatttctcttaaggatgcaaggatgttttttccaagatggcagattacaggcttttagcatgcctcagtcatttggaaatagcaagcaagtacataaagaccaactctgtgagctttaattcaagaaagaaaatggcaattcctcggaattatgaaggacatcccagatcctggggaggacaatgcaggcaagcagccctcaggacagcattcgactgataaaagtgagtgaagcctcagggtgtgagagaggcagacagcatccctctgtctcacctttccactggagatccacgcaacccgggcagaggaagagattgtttctcccaagccttggagctcatttgaggagagacttggagactttgtgggggaaagacacagggaaacgctgccggcattttcccaaacctggactggcagcaggacaacactgggggaatcttccctatctggctccacccatcttgtgcccccaatccccctacccctagggctgagggagctcagattaatgtgtactcaggaaatcagccctttgcctggggcagcagagagctcctcccaataaacaaggatcaagtacacagccagcggcactggcaacagccagctcttacccatggcgccatctactggctcataggtcaaaccacacacccaatataaaacctgctggcagaagtgcatagggctgcagaagcaaagccaaaagaccctacccagcatgctctacagtcacaccctctagggagaagggaaagggaaagaagaaaaaaataacaataatattataggaaaggaaagaaaaagaaaaatcctacccaaacaaaaataattacacaaattagaagtgctagcatctccagataagaaggacccatgcaagaattctggcaccatgagaaatctgaatgtagtgacactaccaaaggatcacactagctctctggcaatgcttcctaccaaaatgaaaactcagagatgacaataaacaattcaaagcttgggttgcaaggaagctcaatgagattcaaggttgaaatcaacaaaaagaaacttctacatcaatccaggaaatgaaggaagagataaacatcttaataagaaatcaatcagaacttctggaactaaaaaaattcacttaaggaatttcaaaatacaactgaaaactttatcaatagactggacaaagtagaaaacataatttcagagcttgaagactggtcttttgaactaatccagtcagacaaaaataaagaaaaaagattttttaaaagtgaagaaagtcagaaatatgagattatgtaaagtgaccaaacctacgaattactggcatgccctagagagaaagagaaaaagaaaacagcctggaaaacatatttgatggaataattcgagaaaatttcttgaatcttgctagatagacatctaagtacagtaaagccagacagcacctgtgagatactataaaaaatgagcattaccaaggcatatactcaccagactgtccaaggtcactgtcaaagaaaaagccctaaaggcactgcagaaaaaggccagatcacacacaaaggtagccccatcaggataacagccaaatccaacagcacatcaaaaagttcaccatcaagtaagcttcattccaaggatacaaggttcagcatatgcaaaccaataaatgtgattcaccacacaaacagaattaaacagaaaccacatgatcatctcaatagatgcagaaaaaaaagcttttgataaaattcaacatctttcttgataaaaaaaaaacactcaagaaactaggaatcaaaggaacatacttcaaa

SEQ ID NO: 917495 - DNA, 4001 bp, Homo sapiens
ctgcatatttttgcttgcagcttgacttttcaggctttctgttagaaaataaatggtttgggggctttttttttttttttggtagagtctcgctctgttgcccagtctggagtgcagtggcgcgatcttggctcactgcaacctctgcgtcccggttcaagtggttcttctgcctcagcctcccgagtagctgggattacaggtgcacgcacccccacgcccagctaatttttgtattgttagtaaagatgggatttcaccatattggtcaggctggtcttgaactcctgacctcaagtgatccacccacctcagcctcccaaagtcaccggccaggagctgctttttattaaaggaaaattccaccgagaactcttttaccctttctagctgcctaaaagtaatttctcaactcctgtgtgatgtgtgagaattccataaactacgaaactatacaaacataaataaggtttaattacatatggcaaactctacacatttaaggtgttattttggagcatcagtgtatcaagcaagaaaaggttctaaacttgaactgtgatttcaaggcaaggcaaaacaaatattacataaggtatcaggtacaaagcagtgtcatgaaaatgagcatatctgaacaaaagctgtgacagaattaaggccagataacctatcataaatgtatagaatgaacagaacagcccggttttaggaaaggacttcccagggaggtttagtaagccagctgggagaaaggaaaaaaaacgtatttttagggagggatagggacgctcccattgtgcaagaaggaagtatagccggttaacagctccatcaagttctactagaaggagtgcctatgtaaatgaaattctgcttttaaagtgcctattatataaaggtctctagaaaactcaagccctgttctacaagccctagcagcctgacaattcactaagcataggagaagggaaaaaaaagtaggaaaaaagtgtggaagcccctttcttcctttgtaatatgaatgtttggctatatttaagataaataccacataaataattgctaaacgtgaattctgtttttctaagttttaacaaaatatgcaaagaacaaagaccaccaatgaaagtggatgggaacatacgtattctacacacagttccattttggaaggttctagggcctattgaaattgggtgtttaaaaaaaaaagataacacaggaaaattattgtagtttacctctgtctcctacaagctgatgtatttggcagggttactatttcccagggcaaagcaggtcttttttttcacgttttgactaacgaactagaggctactgcaaagaaagaagaaaaagaacagtattaacgcatttatttgcacagcaccccaatcttgaccctcaattttttcaatcgcccccacaaataaagcccggctgtttagacctggtgaaccgccaggagcctggagctctttgtattaagcagcttctcggttagggcgccctcccccggcgccatgcaaccaaacgctggcggcgcgctgtaacctaaggcccacacccgtcttttcttttctaggggatgtggagacgctggtagcggggccaggaaggctccggacggagcaggttttctggaccacagacacactgccccggcgccctccgcaggccgctcctccccaggcccatgacagtgccccgctggtttctgccgcgctgccggactggagctcagacggccttcgccagcccccccaacccacgcagatccctgctgacctgggcaactccccaccctcgctgaaggttcgaggaccaccccgctttcccgagaggagccgggcggcgggtacttatctccgacctccggctagtgggaaaggccgcgcgaccgcccgtcctccaactacagggaccgcacggtacgcgccaagcacagccccaaaatggactcgcggctccggctagctccgcccccttccctctcccgcttccccttcccctcccgtcccttccccctcccctcccgtcccttccccctcccctcccgtcccttcccccctccccctccctttcccctccccctccccctccctttcccctccccctccccctcccttccccgtcgcccgcctccgcctgcacctccggccccgcctccccgtcccgcttcgcctgtgtcccgcctccccggccgcgcctcgccttggcggagggagccgggtggtgagaccgcgttccttccggcgtctccaaccgccgcctgctcccgccgtccacccgcgcgggccgcctgggacggggagggccgggctgcgggcttttctcccttccagagtcctgcgcccgcccaaagcccccccgcagaggctgggcagcggctccgggaagtggacgccgtttgcccagacggtgggctcgactgaagcggcgcggtcccgggtggggccgcccgggaagaaagtctcccagttaagctgccgtgcaattaagatggttgggtttggattgttgtacttttttttttgttcgttgcatttttaggaacaaaaaaaaaagcccaacccttcacaccacttcatccgcatctcaagaccagaagccgaccccagcggcttggggaaatggagccccgcaccccacaagggggagggtgggacgggcacctccgcactgcgcggcctgcggagtcaccgattcgcgttgggagcgcgccaggagcgccagggctctagccgggggctccgggcaaggcgcaaccagaaaagggttcagtatcccccatcacccccacccccaaccgtaccctctttctttgcgggctttaggcaggacaccagagacccaattctatttaaaattctcttttaagaaaaggaacgcctgtttttgcctttgggggaaaggatgaactttcaaattggctttaaattatccaccactaacagttactcagtcgataacctgactattctgacgtccacctcccgtttgaggaccttgcccaatagcaaacgtactaagcacttaaccagtgaacggtgtgaaggatgcaaacatggatgatgaaggaatggctcctccagaatttacgatcttgggagaagtgaggcgagtatagaatctcagaacacgctgtaggattgagttcgatcccagttgaggaagtttgggtttggggaggaaataggttattttggagaaacggtattcaaaacctaccataaatagcagtacagcccgttgactaataatgcttagcccaacccccgtaaaaagcccctggccacatccgtctcctgagattcccacttctctgtgtgcatctcccttcctgctataagaaacctaactttgccttcgtagaacacttcttttaatttctgtcattcagtctcataacactgtgtaaaagaaattatgatcttcatcctatatagatgagaaaacaggtgaagtgacttttccaaggtacaaaagcaagaggcagagctgaggctaaaggcagcttccagatatgggctctttctacagcaccataactgtcagtgacaaaactgcaccccagtaccttactaaatttagtgtttttaggccaggcacggtggctcacgcctgtaatcccagcactttgggaggtcgaggcgggcagatcacctgaggtcaggagttccagaccggactgaccaacatggtgaaacctggtctctactaaaaatacaaaaattagccggtcatggtgccgtatgcctgtagtcccagctacttgagaggctgaggcaggagaatagcttgaacccgggagatggaggttgcagtgagccgagatcctaccactgcactccagcctgggcaacagagcaagactccgtctcaataactaaattaattaattaatttagtgtttctaaaaaaacaaagtgatctgtagaaacatctcatttatttgttgtcattgtgtgttgattgattttgagacagggtctatc

SEQ ID NO: 917496 - DNA, 4001 bp, Homo sapiens
taaacataagttgttgttttttaatatttatttagctttggattcctaaatgaggatgttgaaacaggtaacttttcagtcctatagatggctgtagttctccatggagcataagttagaaagttagtttgaaatgtgtgtatagaataagacattaaaatttcctctaatgagaaagaatataaagattgcttctgttatttcctattaatacacagtatgaatcgattaaggttattttatatgaaaagttatttggtctcttactggtctaataattaaaatagctataaaattcaaagagaactttaactctgtcatagactttttaatgcagttttatcttgaccttttggaaataagtgcaacagaaaaataaataatataaccattacaaaattttaaaggttataagtaatgaaaatctattccaactcatatatctttcagaatgaccagtgagcaagtaaattgaaattgatcttattgttttttttccccccttaaacatttaaggaggatgttttctggacaatagtgtccaggtgaataagaaagtaggcgctacaaatgtaactttaaatagcaaacccaacacaatgatgaagatttcaacattttaacatctccacccactcttactctcaatgtctaatttagagttttaccaaaaacaccccaaaccaaaaaaccctccagtaaaccttttgcttaaagaatttgtaatattctttgtgctgtgattatgtactgtgaaaggaaaggcagaaattatatgagctctgagaggcggtgttttattaaaactgaaaaagttttacaagtctgtctatttttttttttaataaaacaactaaagcttccttctgtctcttcctactcctttggcttggtgcttactccttaagcaacttgctgcattttatagctatggaatttcactgggaagggcctctctaagaagccatgtgaacagggatacaccatagtggatacaccatagtgaatgcaggcagacaagataagagatccctttcctcagctctcctaaaccctcgatgcctttccagtattctcttgtctctagtcgcaaaagacagctgacttcacagctggaacaacaagttgtgcagtgaatcccagtgatttaaccaagtagcaaaccgggtcattggcttcattggcttcattggaatctcggttgccaggcgaactaggaatcactagcctgggtcgggcaacacggataaaagtgtttctgtttcttgacagagaatgaaaacgacgcagaatgtaatcgatcggtagaacattgatcactctccttccttcgttaccctactttaagtgccggagagctaaggcctcacttatatgcacccagatgcccccgagatctccattttccccaaatgcataaaaggctaaaaacggccacattccccagcaccacggcgtggctgcagctcctttgtttaccatataagtcacaccgggggttcactcctcgccctctcccctgctttaaagccgagtgcggcggaagactgaggagcacccccaaactcctgctcagcccgagtcaagcaccgaaagcttcacaggtttttttcctgagccttgaagagaaaccacatagccagaaccttttgaactcctaaccccgcagggatgtccgcctcccagaagagagccggcttcccaggcagcttaggaaacttaaccgagatcccagaaagaaggcgaggtgtagctccggtcgaacggagccccgaggcgacatcctctttacctgcaaagttgcaatcttcgggctgaagtgatgggatccgaggactgacggcgcgggtgccgtgcggggtgagagcacgcccggcaaattccaatggaattcccttagtcgctgctgagttttggagcattccaaggaaaacgatcgaagctggagcccacgcagctggcaccgaactgggcggagtgaggatgctctgaaagcgaagccatgggaggcgggggaggggcggcccgggagggggaggtaaccgccaggggaggagaacctctcccacccccgcctgcacagatccctctggataaagttaagagttcccacggctgacagcggatgagcccagagaaaggcaccccgccctccgtccctggtggctgccgggctcggggtccgcacagaccgcgctggaaagggatagtccgggaagatgcgcgtcccacgcaccacactgcttggaggtggaggagacccgcgcgctggcaggagctgacgctgcgtccccagcttgtccccctcgaatagcctccacctaccggggccaactgcttgaggtcagccagtgggcaggggagctcaccaccagccagccgtcatccagccaagtcggtggcgagaatccaccctgtggttctggatgcaagccagacacacctccaggcttagggcggtctctgcaggcgtgttggacttcagtgcgctccgacacccagcttttgaatgccctgctcccagcccggtaaacaagcacccatgaggcccgccgcccgaccggaaaaaagtagtcccctgcaactctcaaagcttctcccactcccgcttctctgggcgactggcaccccctctcctgtcctcaaggtgtcagacttcccttgcaagagctggaggatgcggcttgccactagtgtcaacaatcaaaacagtcgcaatgaataaatgatgagccacagcgttccaaccaccctcatccagcttggtctttccaaaaggcataggaaatcagcaagtttccaccaaatataccaaaaccctaagacgcgagccagcccaagggtgcaaggttctgcggctgcaggtgatgtgcgtgtgtgcgagtgtgtgtgtgtgcgatactggtaccatcttactgagagtgagatttcaagataaacgttatctcttgtccaatctctttagtgttcacatatgaaaataagattaaagtacagagaggaatacacacacacacaaaccacacacacactattggcaaagttggcaataacacttgctgtaactgcaacacggtgattcccagcttgtcactcggaaagtcttaattggttgtgaccccatgacccagagaaagatagagttcacgtgtaagatagagagtggagcccttgaggaatcctagctggcaattaccctcctcgagactctgtttctacctgattgccgttattttctgaaagccctgaggttagctgctggtctctgattgtatcccagcagacgcctgattcagcttccagtctgcgcaaaagcttaggagcaaccgttttctcctatcccaaccaagttgttacacctgggaagctgtgctgtgccgactgcaaggcggaccagtttcttcccatggaatattcccaaggaatataaactgacaaactggcatccatattcagactctaaagcacaaaattaaagaatttccttttttatctttcctacccacttcagagttcacatgagttgaggtttttgtaaatagttttcacatgagtaaagaggatattaccagagatcacgctggggtaactgtgcatgctgctttttttttttaagtcacttttcttatttgttaatttatctttctccctgcctaactgctcctctatgggtttgttcccagctcagctagacccctattctaaatttctgagatactaagtccttcccaaaatactaagatacattgagataaacctggtttctacaatgctactgcagtaaacaaaggagagaacgacaaaaggcttttctccttccttgaatctctttttactctttactacaagaagaatatattgacatgtttaaacagttctttacttttcttaacattaaatgaaggcttttaaaaatatgcaaaatgtatctatcagtagacaaggtaataactttataataaattcaagtccactttctaacaagggaggggagactgtaa

SEQ ID NO: 917497 - DNA, 4001 bp, Homo sapiens
gagccgcctccttcagcaccggctgcagccagttcctaccgaacatgttgccgcattttcttccctccaccccgcccccctcttttcgtgattaagctgacatcacagaaacctgggcagacgtcgcagccaatgggagcccgagttatttatagctccgaattaaaggttcagagtttgcctagcaacagtgggcagagaatcccgtgagaagagccacaggcgctgctccaataacaaagaacggccaaggcggaaataaaaaataggagaaatccaggcgcaggctaagaaaacaaaactttttctctgattcttcttcattgtgaaggagcccgcgccaccggggacccgtttgtgcaccgtctagaagacccttatccaggatcccgacttctggggccctccccacctcccggctccctagtaaaatattaggattcctagtaaagccacatcgctaaaggtgtgctcacgaccagccgaaggagatagttggccagcgcttccctaataaatccccagcaaaaagggtcaccgtgagaaaatcccgtcgtgtgaaaccagtccggggaagaagaccatttaatacccgcagggcccctttctccctccacggctgccgtggtaggtggctccacgctggccgaatggagacagcgccggcatttctacgcgcatcaagagcaatcatcatcatctgaacttagggatgcactggttccacaaaacatcttatttttgtgctgtgcccacatttagtataaatgatttttcatcagtacataccatagcttgctcgattttgttgtcaatagctaccacacttgcaccagaggagctgaaaaagaggagggaaaaaggtcatcgataaatggaatttatcttaagcttccaagataaaaaggatctcccaattttgtgatattgctagcatcatattttgaatgttatttaacactatgtaatgtatcaccctccagaaaatgccagcccctctcttactaacgaatatccaggcatctccctattttagtaagccacaaaggactaaattacataatgtggggaaagcctgttctctggccagacttgcaaaaataaggttttttaacatttcgaaaaacaacatccatgtcaccataatctctcagcaatggacaaaggaattcgcctggctatctttcacctgtattattataagtatcccacgaataaatttaaagaaactatcttagccgacatttacctattatcaagtctcacagaagcgttttcagtccccagcaaggatgacaagaaagaaattgaaaaatgtctcagttggtaaactcctagatccatcgccactggtctacaccattgggatttcatgcaattgcagccaaaaacaccctcgtggaaaaaaagagggaacaccagcagccttgtataagctagataaaatcttctggctttccgcagcccagggagaaacagaaaacggcagccctaatttaaagaaacccagcttctagggcttgatgatcccaggcagatgcggatcccagtgccgtgaagaggcgcttcccagatccgcagccgggctccactcagctctagaccaggactcccagtcttagtgcaaaatatatgcaggaaagagctgcgccgattggccggcacgccactgggaccgccccctactcccttccaggtcctcccgcttccctgcttccccgcctccccccacccccacctccgcccccattctccagatcccgctcgtggggtgggctggcctggcgcgggccgtgctcagagggagtggggtgctgggttcggaggtttccacggcggcctcaaaacactgggccattgcttcggcagaaaatgtgaagggtccctgaaaaatactatgggggcccccacacgtgcttacgtttaagggagtcagaccccggtccccggagctgtgtcccgcggctgcttaacggcgaaagcttcctatttgtaacccgaaccgtctgagctactgggcatgcccagtcccaccactgtaagacttcgagtgtcttgatttcaattatctagttcttaccggcagcggtactgggaggattttatagacggttttatttttaaagataataatcaccctgcaatcatgtatttttttaattttagaggaaaaaaaatcacatttgctctttgagagatactaccttttgttttatagaaacaaaacaaaaaacattatatattctttgctaggcatgagggaaagactccagataaaatccaggatcttcccaaaaagcccgtagagccacaaaccttaaaatcacatctccctattagcatcttctccctagtaactaaatatgccttcttctatttagacccaaaaaagtcaatccacaggttgaattccacataaatctatttttagttaagtccctaaggcacgtttttgcaagctgagtgacaattcctctaagactcaatccctcaatcctatgagccttcttacatcagagggattgaaatattataaagtatgtattcaaagcatacaaatccttgaagttagtctctgcccatttgcagtgtccagaaccagaaaagggaggatataatggtggttaaaaatagttaagcagccaatagatgctgtaggctcacctctgtttcaccctcttggccacactgaccaaataattcccttctccaaaccaaaatcgagagatgtgggtataaaatagcttaaccctttcaaaatttcctatattaatttaaaatacttgcagggatgcatcaattaaggctacaatttaatatactagaaatctaagccctgaagtttgctaaattataatacaacataaacagtttccaagtcaatacatgcgagaaagaaaacttaacctctacaatactgccctctaatggcataatataaaaaccaaaaaatctacaaagtacttggggagacctctctaatctgtagataaaattgtgtcatcacaaataattccaacataaaatctgaccgtagaacatatatatgtaatacacgcacatgcacaaacacacacagtcttctctccaaaataagcatctttcctcaagcagcatccttttctaaaattgccatcagatccatttagacagtttttaagttgactcaatgctggtagtgggggtaggtagatttggttttcagaaactgtccaaagttattaggaaccagaccagatcggtaagcacagtaaatgatgaagaccacaattctcttttgggttaaaaaccaaagtgtgaccaactataaagtgatgagattccctttttactgaaaggttcatattctccaaattttaaggcttggcttttgaataacaataattgttaacatatttataatttataaaaattacatatattaactcatatgatgctttaaaaaaaaagatacccatttccaacaaaaggagactaagtagaagcttagaaatcgtaattatttgggaagctggcatgtggtccctatgtctatgaatgctaaccagaatattatttactacatgatagtctctatattttgaaagttaaagttatacctaaaactatttgtatgctaaattccatttacatgttttaactgaatgccaacttcatgaaaaaagggtattaaagcaccatttaagctataaaaagagctttaaaaaacaaaactctaaggtcatataaaaaaatttttaaattccaagctgcagttttaaaaaattactaaattaactgaatttattcatgccgttcttcaacataaacagaaagctgtttttatttcaatcattttaactgatcatccattgtatcaagcaagagaagcaaatataagcaaccatagtctatttaacccattttcctattgaaggacattacagttattgttaatacttggatattttaaataaaattgcaaggaacatccttctacatacatccttgaacatgtatgt

SEQ ID NO: 917498 - DNA, 4001 bp, Homo sapiens
atcctttgaattcttctatttaacaaatactggtcatctcttttgtctcacaacttgagaactgttccttttttttcatatgagacagcatgttttactttgcacactggtatcaatccttcagacactctcaaccattgacatatctgatttctgtctcccctctcacccactcactcactcaacaaacatatgaggacctgctatgtgtaccaggtccctaaaacggaaacatgaaaaagcatagtcctcgcctgtaaccccaatattgtgggaggctgaggtgggcagatcacttgagtccgggaatttgagaccaccctggacaaaatggtgaaaccctggctatacaattaaccggttgtggtggcatgtgcctgtagacccagctaccctggaggctgaggtgggaggactgcctttgcctgagcctgggaggttgagactgcagtgagccatgacctaatcttcaaggaaaggcaattttctttgttttgaggtatatatttttgaacattccttctatccctcaaattcttctcaaaataagctccacatctaattgtacaactgcagtagtccattttcatgctgtggataaagacctgagattgggcaatttaaaaaagaaagagatttacttggacttgcagttccacgtggccagggaagcccaattatgacggaaggcaaggaagagcaagtcacgtcttacatagatggcagtaggcaaagagagagagcttgtgcaggggaattcctctttttaaaacggaattgcagacccaatgtacatcttttattcaaactgattaatgcatttttagatttaaaatattaaatttattaaataatattaaatctaccaatcactcaagtattttacattcatttaaaactatacaactggaggccaggcacaacggcacaggcctgtaatcccagcacgttgggaggccaacgcaggtggatcacttgaggtcaggagtttgagaccagcctgagcaacatggtgaaaacccatctctacaaaaaatacaaaaattagctgggcatggtggcacacacctgtagtcccagctacttggaaggctgaggcaggaggatctcttgagcccaggaggtcgaggttgcagtgaaccaagatcatgccactggactccagcctgggcgacagagcaagacccctgactctaaaaataaaaaataaataaataaataaaaataaaactgtacaattggatgagtacttttgtcagcatgcaaatcagtttaagttatacaaacagtagaagcagtatatatgtgtgtgtgtgtgtgtgtgtatatatttagcatagatgtatatatttttaaattaagctagtcaggccagctttattaagcattcacaaaaatccacatttcaaaagaaccatgcaactgatggtttacatataatttgaggacctctattcctaagacaaactaaagtacagctaacatcatctttaattatagactaattaagctaatgttttctgatagaaaggctcaatataatactcaatcttttacaattttaagccaatttgtaatggcttcaactgaggagtccaacaaattaaaaagctgttatgcaactaaatgtttaaagatcttaagctaaaaaaggactatacaattcatctcagttaaccagtaaaaaatttctatcatgatctccaaataatcctccaagtgatttttaaaatagctttaaaatttttccagctgggaaaaacaaagcaaagaactaaaatggctgaactgaaccttatttcaccctccaagctgagtatttagaaaccaactgcttttcaaggtactaggcaggacttaggacaactgagagacaattccttccacaattatttgaattacagtgaggtactcacagcaggattatcactagactataggaaaagcttcacgctacagactatggtggctttcttgggcctctcttcccacccaggcccaactgacactcctggtggacaaacaagtgcttcaggaagtagtcccaaaattccatctgtcccctaaggcagtttctacttaaaggggcagtggtccaatttatttatgatgactcattacttcaaagagaacaaaaatactatgaatatagtgatttgttatgtttcaagcattttaaaaggcatgggtgattttctttaggttttcttagagtgcaacaagttaataacataagacctctacagatcatttcgtcttgatcccaaaatcaggaaaatctagtgagggttttccccacttttgacacacttatgtcagaggtgaaaaaacaataaggatgcaagaatggaaggaaggagaagaggaagagaaaggatgaaggaagggttaaaaataagaatggagggaagaaggagggagaggagatgaagaaagggaggtaggggaaggaggacgggaggagagtaaaaggagggagggagaggaaagggaagaaaaactaaccagacaagtaaaccaaaacccaggcaagcaggtatcaagaagcctcagaaatgtagaaacgagatatctgacaactttttcattcccagtacaataaggcctcattgtacttcctgcaatttatatcttagatattctactctagccctagaaatatactatcttattggagcagaggtggggaaggggcgggaaacaaaaagaaatctacaattctttgtttttctattatttaaacagtctgcaatgttgttccagaaggtagacaagagactgataaaaccaaccaaaaaaacaagtgaaaggaataaaagcagaatggtattaattatgagacggaaaatgtatgtaattagtaagtaaatatacaagttggatctccttaaaaaaataaacttgagaaaattaaaaaaattttgtagtagaaaaaagataatccaaagggtccaacatcacaaaagtagttttaaattataagaatgaaatgaacaatgacaaatgtagcatatattaaaactgcaggatgcatctaaagtagcacttaggggaaatgtatagtcttgaacattagaataaagcctaaagattattgggataaggatttcaaggaaactggcagggtgggagggtcaggagagggaggtaaaacaaacaaaagcaaaaaaaaaaaaaaattcaagaaaggagataaagacaacagcaaaaactgttaaaatagaaaacaagcatatattagaagatcaacaaaaccaaaaattggctgtatgaaaaagaccataaaccagcaagccgccagtataatttaatcaagaaaaaaagagaaggcagaaataagcagtatcaggaacgaaaaaaatatgtaaccataatttaagagatatagattaaatggtcaaatagaaaaaatataacttactgaaacaaagagatataaagtctgaatagtcctatattgccatcatataaaattaaatcaatataatagtgaaaaatatttcctcaaataaaactcccagactagatagctccaccaaaaagtcctacaaagcactaagtgacccagctcagccagtccctgcaatggccaaaggaaagatcaacaacaaagcccaacaaaagtggcagtctccagtgaaaatgacaaaaccttagtacatggccagaagaaaaaaattaaaattaatgccatgtggttgacacccagagctctgcatgaaccatataatatactctggggactccaaaaaatatttggaagaggcactggtatcccacattaggtgggggctacatggattataattaataaaaactaatattctaatgaaaactgtttacatcttaagggatatggagttttcaaatattagctgagatgtgattattgacatatacataaattaagtattactcccagtctatccaactttctactttaatagttatataagctatatacaaactgtagggaaacttgtgttgtgtccaggaattta

SEQ ID NO: 917499 - DNA, 4001 bp, Homo sapiens
ttgttgctgctgctgctgctgcaccaccacagtaggggctcccatctctccacttcccacactctctgtatagtgactcagtgtgctgacactactgctcactgaactcccactagtgctctccctttcagaagtcacttctatcggattttgctttacagtctccaccactttatttatcagcacaccttctgtagcaggtacagcattttctttttcatagaactcagtgcaagtccatctaccttttttaaagggctcagaactagaatctaacttcacaactctgaacctcgaagtgttaactgttggttgttgctgctgacttgaaaccgatcccccagtcatccctgcagctgcattaggaacactgctaacagcagcagaggaagaaatagtaccattgcccatgccactcaagatattcacattaacaccactggtaactccaggcccaacactcacaccagcagcactaggaatattgcttgtacttatattaacattaccaagcatgctgcttgtcacattaggattaaaactacccacagcagtaatgttaacattatttactgtactagtgccagtaacagaatttatacctattccacctgtagtacttggagcacgcatattagtcattacagatgcaggtgaaccactggatgatacagcagaagttggtgcaactggtgtgatactgtcagagcttccagttgtagagagttttctagatactgggcttgagggtggcccaccagtaatggatgcactggccacagcaacatgagatggatggtggtgaccatgttggaggtggtgcccatgatgaatctgatggtggtgatggaggtggtgtggatgagcattcccattgatcacaacattctgttgtggaaggtgaggcaaatgaggctgaggaaggtggggctggttgggagagactgccccaggtgtctcggcttcctggaagttatttagggtctcttctgaggagctgcgttcgggctcccctaagtcagtagccctggaaagtgacacatcaaggatctccgaagaagagagatcttccgtgtgagattcatccagatcatcatagctctcagtgtcctctgctatactgttgttagagctgatactagcggagatctgagcaggagtaacgctagttatctggaagccacttttctttttcatttgagttccgcctggcgcaagaggctgtgcctgcagctgagcctgcgaaaggaggttcaggctttgtggaggcggaggctgtggtcccgacgtagaagatgctgcagggggcggcggctgaagcagcgacggaggcggaaaatcctcggaagatgtggcattactaccgacgccggtacctgctgcattgagagcagaggcgctgccactaccgctgccccttcgagggaacattgccgggtgcgccatcttcctagcgctaatgtctgcagcggcggcggccgcggcggtggactcaggcggctggtgcattgtgttgggtaccgggggcgcggaggagacgagtgcaatttccttctgcaccgtaatctttgtattggagacgccggagaggaaaacgggacctgacgctccgcctggcgcgattcctccttctcctcctcctcagccaaaggcgccggtcgctcctgccttcgagagcgagcttcggaaaggaggatgaacgagggtgaacagggcggccggggacccgaaggggggatcccttcagtccttcgccattcactttcccctctagcctcacacccccctttatattctgcttcacgtggggtgcggggcaggagggagggggagagcgcaggaaggggaggaaaagcgagaaatgcccaccttctccggccaactccgaagccgcctcagccccctcctcccgccgcgtcggcggccgctgcaaagccctcccggccgctctgcacggaggcagcgccaagcaaatgtcgccttcccctcgccacccccggggccgccgccgccgccagcgagccccgagctcagtgtcgctcaaacctcccctcccggccccgctcggccctccccccgcgccccgcagaccctttcaaaccccctgggctcgcggcggctgctcggtgaggaaacgctggccgcggctggggccggggcgacgcggctgcgagcggggcggcggcgaggcgcccggtacggtgagcccagcaacgaggcgcgggcgggcgcgcagagacgccgggtcctcgcggagcacggccggggcgcggcggcggcggtggcagcgggagcccagggaccgctccatcactggcagccatggagcccgagcattttcctccctcagggcaggcgcctcgactcggcacacgtcctcggggaggaaggggccggcacccgagcctctccggagggcggcgggacgtgcgctagggcggagggtgcgaccctctcttatcctcttcctccgcagccggctcttcctcaccccgctgctcccgcgaccgggcgggagagggccgcaggcggcggcggctcctttctccgcggcgttggtggccagacgggctggtgcagcgactgcagccgacgccgttcaaaggaacgaggtggggttggtcggtgtcggcaaacggggcgggggagtgagtgggtgccgagggagggtgtcgggcggggagggggctgtggtggttgttactagtgctcttcttcggctcccccggctccaccgtatcccccagtctctcgcggcatcgggaggggagggaccagcgcggagcgcaggaggaggaggggcgaccgccggcgagaggaggcggtggtggctggggggagggggcaggcggaggaggaggagggaagatggcgtctgcgcatgcgcctcggcgccgcagacataaagccgggtctggcggggcaggaggcggcgggtcttcgggcctaggcgagcgccaggtctcccgacggaaattaccgaaggctggcagaggcgccgaagccgggagtggtggagccggaggggatagtgggggtggggaattccggccgaaggagcgaatccgggtcggactgcgtgattcggcccggtgggggcgggcagggtgcgcgcctgccgcgcgcccaggttaggtgtgtccgctcttttcacactcgcggccggcgcgcgcgggcacgcggcagaggagggggcgcggcgcggaagggccggcggaggcggcgggagcgccggcgcttggtgtgcgcgccttgggtggtgtcccccgcctgcggaatgggtaatgaggcttttctccgcagcaacagcatcacgagtttcagttcccaggagcccgccgccgcggctgctgccgctgccacgacatgagtcaggctttcttccctggcgcgtggcggaaacctcctccccctcgccgcacctgggctcgcccccggcccttgcctcctcgggggatgccctagggccgggagctgtggggtctatggaaggccggtggctcccggtgataggtgttgtcttttgtgcagtgcagttgctgccatgcggtcccctcgcccttccacgggcaggggcgaggcggccgggcagatgttgcagctgtttccagttaactgcctgagctcctctgggctaggctcttctctaacgaggagtggttgcaatccatccttaactggaggacagaagcaggccggccctgtaatcgactgacctcaacaggtgtctccaagcagcgacgcctttttcgttcatcgtcctggctatatcccccattggtttgactcaggaggcaaggtggtccggacatgtgagcaacacaaatgataagaatgccttttagggctagaaaagaaaaagccatccgaaattccagttttaaaatacacacacacacacacgttacatttcatgggtccaaatgtagttctacagaagcaatgttaggtttgattgggggcaatttactggcggttactttcttggtatttcatgtcaa

SEQ ID NO: 917500 - DNA, 4001 bp, Homo sapiens
tttctggactcttttgagtttccaagacattattttacatggatctccctaactatttacatattccacctttaaagttggttcaatgacacttggggaaatctgaatacaaacatgactgtacaatacttgagtttaacgtataaatgatcaagctttgtaaaagtctgtgcttctctgcagacgttggccagaaacgcccaagtaaggcttcctgagactgggccagagccgggcgctgggtccccgactgagaccagcagcggggacgtccaagccacagcgcgcccaccgcgtccccgcccccaggccccgccccgcgctcgcccggagccgcctccttcagcaccggctgcagccagttcctaccgaacatgttgccgcattttcttccctccaccccgcccccctcttttcgtgattaagctgacatcacagaaacctgggcagacgtcgcagccaatgggagcccgagttatttatagctccgaattaaaggttcagagtttgcctagcaacagtgggcagagaatcccgtgagaagagccacaggcgctgctccaataacaaagaacggccaaggcggaaataaaaaataggagaaatccaggcgcaggctaagaaaacaaaactttttctctgattcttcttcattgtgaaggagcccgcgccaccggggacccgtttgtgcaccgtctagaagacccttatccaggatcccgacttctggggccctccccacctcccggctccctagtaaaatattaggattcctagtaaagccacatcgctaaaggtgtgctcacgaccagccgaaggagatagttggccagcgcttccctaataaatccccagcaaaaagggtcaccgtgagaaaatcccgtcgtgtgaaaccagtccggggaagaagaccatttaatacccgcagggcccctttctccctccacggctgccgtggtaggtggctccacgctggccgaatggagacagcgccggcatttctacgcgcatcaagagcaatcatcatcatctgaacttagggatgcactggttccacaaaacatcttatttttgtgctgtgcccacatttagtataaatgatttttcatcagtacataccatagcttgctcgattttgttgtcaatagctaccacacttgcaccagaggagctgaaaaagaggagggaaaaaggtcatcgataaatggaatttatcttaagcttccaagataaaaaggatctcccaattttgtgatattgctagcatcatattttgaatgttatttaacactatgtaatgtatcaccctccagaaaatgccagcccctctcttactaacgaatatccaggcatctccctattttagtaagccacaaaggactaaattacataatgtggggaaagcctgttctctggccagacttgcaaaaataaggttttttaacatttcgaaaaacaacatccatgtcaccataatctctcagcaatggacaaaggaattcgcctggctatctttcacctgtattattataagtatcccacgaataaatttaaagaaactatcttagccgacatttacctattatcaagtctcacagaagcgttttcagtccccagcaaggatgacaagaaagaaattgaaaaatgtctcagttggtaaactcctagatccatcgccactggtctacaccattgggatttcatgcaattgcagccaaaaacaccctcgtggaaaaaaagagggaacaccagcagccttgtataagctagataaaatcttctggctttccgcagcccagggagaaacagaaaacggcagccctaatttaaagaaacccagcttctagggcttgatgatcccaggcagatgcggatcccagtgccgtgaagaggcgcttcccagatccgcagccgggctccactcagctctagaccaggactcccagtcttagtgcaaaatatatgcaggaaagagctgcgccgattggccggcacgccactgggaccgccccctactcccttccaggtcctcccgcttccctgcttccccgcctccccccacccccacctccgcccccattctccagatcccgctcgtggggtgggctggcctggcgcgggccgtgctcagagggagtggggtgctgggttcggaggtttccacggcggcctcaaaacactgggccattgcttcggcagaaaatgtgaagggtccctgaaaaatactatgggggcccccacacgtgcttacgtttaagggagtcagaccccggtccccggagctgtgtcccgcggctgcttaacggcgaaagcttcctatttgtaacccgaaccgtctgagctactgggcatgcccagtcccaccactgtaagacttcgagtgtcttgatttcaattatctagttcttaccggcagcggtactgggaggattttatagacggttttatttttaaagataataatcaccctgcaatcatgtatttttttaattttagaggaaaaaaaatcacatttgctctttgagagatactaccttttgttttatagaaacaaaacaaaaaacattatatattctttgctaggcatgagggaaagactccagataaaatccaggatcttcccaaaaagcccgtagagccacaaaccttaaaatcacatctccctattagcatcttctccctagtaactaaatatgccttcttctatttagacccaaaaaagtcaatccacaggttgaattccacataaatctatttttagttaagtccctaaggcacgtttttgcaagctgagtgacaattcctctaagactcaatccctcaatcctatgagccttcttacatcagagggattgaaatattataaagtatgtattcaaagcatacaaatccttgaagttagtctctgcccatttgcagtgtccagaaccagaaaagggaggatataatggtggttaaaaatagttaagcagccaatagatgctgtaggctcacctctgtttcaccctcttggccacactgaccaaataattcccttctccaaaccaaaatcgagagatgtgggtataaaatagcttaaccctttcaaaatttcctatattaatttaaaatacttgcagggatgcatcaattaaggctacaatttaatatactagaaatctaagccctgaagtttgctaaattataatacaacataaacagtttccaagtcaatacatgcgagaaagaaaacttaacctctacaatactgccctctaatggcataatataaaaaccaaaaaatctacaaagtacttggggagacctctctaatctgtagataaaattgtgtcatcacaaataattccaacataaaatctgaccgtagaacatatatatgtaatacacgcacatgcacaaacacacacagtcttctctccaaaataagcatctttcctcaagcagcatccttttctaaaattgccatcagatccatttagacagtttttaagttgactcaatgctggtagtgggggtaggtagatttggttttcagaaactgtccaaagttattaggaaccagaccagatcggtaagcacagtaaatgatgaagaccacaattctcttttgggttaaaaaccaaagtgtgaccaactataaagtgatgagattccctttttactgaaaggttcatattctccaaattttaaggcttggcttttgaataacaataattgttaacatatttataatttataaaaattacatatattaactcatatgatgctttaaaaaaaaagatacccatttccaacaaaaggagactaagtagaagcttagaaatcgtaattatttgggaagctggcatgtggtccctatgtctatgaatgctaaccagaatattatttactacatgatagtctctatattttgaaagttaaagttatacctaaaactatttgtatgctaaattccatttacatgttttaactgaatgccaacttcatgaaaaaagggtatt

SEQ ID NO: 917501 - DNA, 4001 bp, Homo sapiens
aaacccacattatagccagtcacagtaattctctgaagaatacatagcagtttttgattatgtcctaccaaaggataaggtaatggggttgggtaaggaaatagagagtaggtcccaggtcactgtggtccaagcccaggtgttcagtatgtgtcctctctctgcacccccagatctaccctccatcattcaccacccgccctgtgctctccgaggctgacccatgaggacagcatcagaggccttccttgctctctggcttcgtgctggtttgttcaatgacaggcagccgcaggagaccaggaggctggaggagagtggcgtcagggtactctccccttggccccttcctgctcacctttcatgggcgatacaaatccctccatcaaggccacacttttggcaggtggccctcttcataaagttaccctctcaatttttcgtaagcactccctcccctctaccccttgaagcctaggagtgtaatggctcccagatgtcatcagtgctgggacactgcactgtccttggtggtttctttaagccctgacaagccggatgtggtggctcatgcctgtaattccagcactttgggaggctgagctgagatcgcttgggaccagtttgagaccagcctgggcaactatgaaaaaaaattttttttttttaaacagagtcttgctctgtcacccaggctggaatgcagtggcacaatctcagctcactgcagcctctgcctcccgggttcaagcaattctcctgcctcagtctcccacgtagctgggactacaggccactatgcccaactaattttttgtatttttagtagagatggggtttcaccgtgttagccaggatggtctcgatctcctgaccttttgatatgcccgccttggcctcccaaagtgctgggattacaggcgtgagccacagcgcccggccgaaaaatttaaacattagccagctgtggcagcacacacctgtagtcccagctactcaggaggctgaggcaggaggattgctggagcccaggggttcaaggctgcagggagccgtgatcgtgcaactgtgctccagcctgggcaacagagctgttgttgagccgtttcaaaaaaaaaaaaaaaaagatacttgacaaaccacggccactgctattcagacttgggacttagaaatctattctttatgtgaatgcgttggttgcttttttttttttttgaggcagggtctctctctgtcgcacaagctggagtgcagtggcaccatcatgactcactgcggcctcgaagtcctgggctcagctgaccctcccacctcagcctcccgagtagctggaaccacagatccacgcctccaccccgggaatttttctatttttagtagagaagggatttcgccatattggccaggctagtgaggagcccctgacctcaggggattccccgcctccaactcccgtctgagctttaattcctgatctgaccaatgtccacagcccttgcctccatcaacaaggctcctggggctcctcagtggtttccaataggacagagacatttggagaccggaaagcgggagcagcgcccttctgtcttcaggaggcggcaccactgtttgctctctgggggacaggacacggtcaatgctccccgtccactgactcaaggccggcagcttcgtctaaaacaaaagctgccatccctgccctggagcccgcagacccagcagacgatgccgtgtcctcgtgtcccgccctgggccccgcatccttctctgacctcctttctgcaccctggcccgcaacagcatccctccatccagccacctcaggaggccaacttcgtccaccctccagcctgggcgtctgcggggtgggagtgacctggccttaccatgttgagctcctccgctgccgcagcccaacgctactacttgacctcaaccgccgctgcagctgcgcacgcccaacgacagcctcccgccgtgcgctgtctgggattggcctgctggtgccaggccaccattggtccggacgtcctgggaggcgggccaaggctcggatcctagttttgattggccgttgtgcaaaccacgtagtggggacgccctctgattggatgcaggattggcgggaaggcagcaggctcagagagggccctctgactggatgcaggactggcgggaaggcagtggggtcagagggcagtgcgtgggctgagacgtttccgggggtcctctgaccggggatggagcagctactgcgtctttataggtggaggaacattgctttgtaagtaagctcccagccttgcagtggcttgaccacgaacttgtgccgctgcctcctccccagttgccccagaccggttcctctggaggtgccttattcagatctttgcaaacatggccgcctttgagaggccttcacggcatctacccaagtcacagcagcacagcaatcaccccaccttcccacccagcacccgggaagtggcgggattcgatcacttttgtgatctgaaaggaaaaagtgagtgggtttctgtggctcacgtctgtaatcccatcacttcggaggcagaggcgggcagatcacctgaagtcaggagttggagaccaacctggccaacatggtgaaatcccgtctctactaaaaatacaaaaactatccgggtatggtgggcgtgcctgtaatcccagctactcgggaggctgaggctggggaattgcttgaacccgggaggcagaggttgcagttagccgagatcgcactgcagcctgggcgagactccgtcttaaaaaaaaaaagaaaagaaaagaaaagaagaagcagaggtaaaattaatataggtggagaggttgggctgggcgcagtgcctcaggcctgtaattccagtgctttgggaggcctccgccggaggattgcttgaggtcaggagtttgcaaccagcctgggcaacgtggtgagacccgtcctgcccccgtttctacaaaaaataaaaaatgaataaaattagccggacatggtgatgggtgcctgtaatcccagctactcgggaggctgaggcacaagaatcgcttgaatccgggaggtggaggttgcagtgagccgagattgtgccactgcactccagcctgggtgacagagggagattccgtctcacaaaaaataaaaaactaaaaaaaaatacagtttatttgggccaagtttgcgaactgcaaccttggagatgcaagttgccttaatatacactctaattagcagcagttacaaatgggtttttaaaggaaaagaaggggcagtttctaaattgtttaccaagaattttacaaatagagacagagtcttgctgtgttgcccagcctggtcttgaactcctggccggaagggagcctcccaccttggctggcctggccagaggaatgtatattaaaataacataagctatttattggctctatattgtcttttgtatcacaaattctagtaacaggaagataaagctagtcaggaacaaaatgcctttacacagctgctggggcatgggtatgaggtgtgtgactgaagtcccatattcctgtctctctgggcctgatacattctgcacacctcgcataactcaaagtgctttgaacactttttcttttctctctcctttagtgagagggactgggtttatggccaccaggaaaggggaaggcacagccctgtcctgggaagagcagagtagggacacaatgcccattttggaggagtctggaacagtcacctgattcttatttatttattgcttatttatttattttttggacactggttctcaccatgttgaccaggctggactcaaaacccctgggctcaagtgatccttatgcctcaggcttccttgtaggctgggactacaggcgtgtaattcttcccagtttgattcttccatttctaaagatcatcttaacagtgtatattcagttctgagaaaaggcctggaggagacgtgctg

SEQ ID NO: 917502 - DNA, 4001 bp, Homo sapiens
gccgagatcacaccactgcactccagcctgggcgaccagagtgagactctgtctcaaaaaaaaaaaaaagttcttaggttgagaaatatcattctagctcatgatgaatgaatttcaaaatccaattataacaatgggaatgtatgaatgtgtggtttatccctagaaaaaaaaactctggaaccactggtataaggaaaacactgacattaaggtgggtaagtcctaacaatcttagttttatctgattccccctatgacgaggaacatgaaacatgtgaaaggaaactcagtctgctaatgacaaaaacaaacgatggcaggccatgctcatacctcaagacctttccactggttctctctactcagaaccttccccagatgttcaaatggccctcccttactccattcaggtctctttaaatatctcagaggctttccctcacctgcctcttccctctctattcctttaccctactttttcgccacagtacttattgctaattaacatggctggtttatcatctgtctcttccagtagagtgtctgtcagatctgtgggaggaatgacttgtgcatctgcatcaccagcacttagcacagttcccggggggaactttgaggacggggttgtcctcaaagatttcttagataaataaagtgatagaatcaaactttacaagatgcagcaagaactgtgtgaagtcactcatttaatagcgacacaaaattattcatgattgccccaagattatcatagaacatccaatgaattatgtacagtaattgtcatgaagcatgaaaggtcaaaatgcattctcagtactttaaatgtaactttgaagtcttccttcaaaaattgagtaacttcttttccacattttggtgcttaagatgtaactcagttgcttccattactcagaaaattccctcatggtgcatcctcactctctgccccaccaacctggccaaaacaaggagcaagaaatggcatcctgtaccatttctttcaaagtacctcgactacaaaatggttttacctaccgtataggattagttttgcttattagtaacaatattcgccatgtgaactttcccagaatagttttatatcaaatccaaccttcaaccctttaaacagtaggaaaacacggcagttacagtcgttaacaccctcttcccataatactcaagcctgttaaactttcctaacgaaaagggacgatgatgtgacactccagcaccccgcatccacctccgcggcgcagccgctctctccaccccacaggatgaacccaaaggcgcgcagaggcgccctcccacggcgcgtgacaccagagaagggggataaattggcgagctggcattcctcccgtcctcactgacggacccgcgagcggagtgagcggtgactcagcccgctccggctcggctccgccctcccgcctcccgccccggcgttctcgccccggccttggcctctccactccctccgccccggtcctggcccccagccctccgctgtcctccccggctccctgaccctcgaaccccagccctccgctccctcgtccgggccccacgtcctcggcccgtcccccagccctctgcccggccctgcatcctcgttcctccagccccggaacgtattagggctgcacgcgcagggagcagcccccgggacgggtctgcgggcttcgcgtcgcccggccactctaccttcgctcctgcccaggatcctgcagcacaggttctgcagcagaacgttcggcgacttctggtccggggtcgccatcctcgcccggagccgtgcacggtggtccgggcagagccgccactgccgccgcacgcgcagggaccgcggcccgcgcccttcctgcgccccgcaagctccctgctcctgacaggctaaggcgcgggcgccgccggccaccagggcgccattttaacggaacccgccgaaagcgcgggcgcttcccacaatgccccgcttcttccctgcgccgcggccgcgcgtgcggctgcctaagcgttcccggccctgtctggtgcattccccctgctgctgcccggtcggccgagaaagttccgggcgacaggtggcccgaggccctcgagctgcgcggacagagcggccccggagtcgcgagcgtgacgggcttgcttggagggcacttggtggccggtagcaccataaaggccataatttggtgtgtgggtgtgggggtgtgtgtgttaacggcattggtttgattcacacttctgatgaaagaagcctgtttaaaaaagaaaagaaaaaagaagcctgtttaaagggtgcagggtgttacgattgttaacgtgcagtgggcagttcacctgctacgctatccaacaggcgccctgctcaggcccgacctcgcactgccgcgcgggccggtcccccccggcccgggtaactgggacgtcctgggaaaataaattaatcacgtacggagtgagagaacaggaaacctgccgagaaaaagatcgataagcagacaattacaccaagccaacttcagtgcaatcgttaaagcttacacatgggtgcacgcttgggagccgtgagctaccatgttaaaaggccaacttcctaaggaaaaatgatggaaagagatcccgagatcctatgaaatggaagagggaggacaacccagctatcccaacatcccagctgaggccagccacacacgtgactgtctgcaaagcccgtcgggcctgggtccagctcaggttgcagaattgttggcaagtaaaacgtttgttgtcgttctgactcaaaaacatggagacaaagcagacttgtagggtattacagtcaacaactagaccctacagctaaaggactgtctccttgcatgatgcaacaaccatcacagctctgcaagagcaaccaaaccaccaaggatgcgatcacccctcactgccttcgatacgcattctgtggaaacgcttctaaacttgcatcacactcaacacgatcagttagtaactggcttctcatgaagttattctctcagccgcatactacaatgtccagatgtcatctaaatcctgccaccctctcccccaccttcagctgaaacgctgcatgactgcatcatcttacctgaccagctctctcctaggacagacatgcaagaacccccctcactaacgctgatgttatttggtttacagatggctcttacttaaagatgcagctggaaggtattacactggttatgccatagcgtctttgcccaaagaaatagaaagtgcttgtcttccaggagcaatcatctcaacaagcaaagttaatagcattaattagagcctgtcagttggcaaaaggaataactgctaatctttataccaatagcaggtatgcttatagagtagctcataactttggaatgctatggagacaaaggatttttaaccttttctagtcagcccacaaaaaaatgggtgccttgtttcagaattatggcaagccatactattgccaaaatcattagccattatcaagattccaggccattcaaagacactcaaaaaagcaagataagccagttagcaggtagtatagcaaacagggtggccataaacatatctgaacaaaaagatcaaaccattttggcctttaaggaagttagatttttatgtaaaattagctcaatctaaatctccaaaaacaggacgagaaaattgggaaacaaaagtggcacatgcgcttctgagactgatgtacggtttgaccaaatgttctactcatacttccaactaagttacaaccatctttctttttttttttttctttttcagatggagtctcgctctgttgcccaggctggagtgcaatggcgtgaactccacctcctgggttcacgcaattctcctgcctcagcctcttgactagctgggactacaggcacccgccaccatgccgggctaattttttgtatttttagtagagacggggttacactctgttagcc

SEQ ID NO: 917503 - DNA, 4001 bp, Homo sapiens
ttcctggctcactgtgtgatcccaggaaaaccacattgccttcttgaactgtcagcttcagctacagtcctaatgctctttatctaaagggtagtttggggaagattacttagtagttgtaacatactccgggaccaatccatgaaagatgccataaatcaaattaattatgaaacaaaggaaatcataaatattgaaaccacttcaaaacctgagaagttgagaagtgaggaagatttaaaattatgcctgtggcgctgatactaactcactgtcagactataagacgagacacacattctcagaagattcatgacattcccaacagatcttttttttttttttttttttttgagatggagtctcgctttgtcgcccaggccaaagtgcagtggcgcaatctcggctcgctgcaagctccgcctcccgggttcacgccattctcctgcctcagcctcccgagtagctgggaatacaggcacccgccaccacgcccagctaattttttgtgtttttagtagagagacggggtttcaccgtgttagccaggatggtctcgatctcctgacctcgtgatccgcccacctcggcctcccaaagtgctgggattacaggcgtgagccaccgcgcccggccaacagatctttaatatttggaaatgtcagatgtttctgtcctccagcagcattaacttcacatggagtatgaacagtgacaagcaattgcaaaattagagctgttctccgttgctgtacccgtgcctaactgttaacacgcagtctaccttaccgaaagtcaattccacacactcagtgagaaaagccgtttaactggctgtaaaaatactccgccccctacctgctgaccaccgctaacacgccaggaaaacagcaacatccagcagcacagctgcgctccctcgccacgacttcctaacttccctccacttgaaagcactctcatcagtgtgtgtttgtctaaaaactcttcttggagactgaagaagaaacacatccaagtgaaactgagaggtcagcttctaaagcggaggctgaactttgcaagtgggggcggggggagttagttcggtcccccaagcctaaaagaatggggcatggtaagggggacggccccttccttcagcgcggcacacgctccgcaaagggcctggggccggcccacgagaacaccagggcacctgcccacttgcagcggccccaagagactcctgggcagagcacctggggataccaggtggggtcggggcgggcggcggggctttgtccccattcgcccctccaggccgaaatgggggcggtttccgctgacccccaagaccgggaactagcagggttcggacgcgggtctggagggtcggccccaccacctccggcaaacccgagggtccccgctgccccagcctcctcaaagaggtgcctagggtggcgtgtagggggcagccaggatggcggaggccggtactcacagagcccactggagccggtgctggtgaacatggtcccgccgggctcggagccccagagggcgccgggggaggggaagctgaagtgcgagccccagcgaccgcgcaggcgcactcttggcggagcgacgaatccggcgccgcgaggccactcgccgctgacgaacggcgcacccggcgcatgcgcagtcaggggcgtgcgcccgctgggtcagcgccctccttcctgccggggaagggaagtgcgtcggtaggggagggctcacctctccaggttgaaacgatggcggtcagaaccgcctgaggtaaaaacgggtggcactggggaagcggaggcgtagctcccgagagcctcacacttgtgctcagtgccgcctcacccctggtggatccgcgatggccgcggattcccctggattgccggcgctgggcaggagcgccacttctaatctctcccgagactggacgcccggcgccttccacgcgcgttgtgtctttccgggcggtccctcgaagctggctaccccgcgggctgttgactgcagtgggatctggtcactcagatgcggatagaggggtacgggagccggagaggtggaacaggtccttccgggtgcggagagctgggccgtccagccgcctctttgttcccgcgtgggtcccgcgcggaatccccaccaccggggccgactgtcgtggtccctggagtcagcaccctgccctccccgccgtggtggcgggtggctggggggtccccggcccggcgagcccggcggagcgaccctgcgcttctgccctggcgagcttccggactcaggccatttaaatttttttccccagcagaatgaagttactctttgccaaagtcacggtttttaaatgtgtgagcctgaaaacatatcatgcagtcgttttaaaaagtttttttttaagttgatctcgtgaaagtagggagtaaaagagtggttattcttgtacagaggagagttagtggggaggaagatggggagaggttggtcaacagacacaaagttatagttagaaggaataagttttggtattctcttgcacgtttggatgactatactcaacgataatgttaacttcaaaatagctagaagagaggattttgaatattctcaccacaaagaaatgacaagtgttttggtgatggatgtgctaattaccctgattagatggttgcacaatgtgtatatgtatggaaccatcacactgtaccccagaaatacatgcaattatgtgagaacgcatgttatggggaaaattgaccacactacccagctaaatgaaagggataggctatggagtactaaaaaaaaaaaagcattttcagtgctcataagtgccagccagtgtgctaaatctgtgattcgtagatcaacacagtccctaccctcaaagagaggttccagtgggccaaaatgttaacactgattatagaaggcaaaagtatgacttttatttgcttctttaggctttattcgtaaagttcattttcacagtcttgttttgttcgtttgttttgagacggagtctcgctctccccagctggagtgcagtggcgcgatctcggctcactgatacctctgcctccccggttcaagcgattctcctgcctcagcctcccaagtagctgggactacaggcacctgacaccaccctggctattttttgtatttttagtagagatgaggtttcaccatgttggtcaggctggtctcgaactcctgacctcgtgatccgcccgccttggcctcccaaagtgttgggattacaggcgtgagcctctgggcccagcccattttcacagtcttgaagtacattttacatttacctttaggttcgttcgagttatttttcaggaaaacgacagtcaaaaggtcctttatgtttgcagaagctgttgatggactacaccctgacccattaaggggatgcaaagtccaaaactattttcataataatgctaagacattagttttattttctactctctcaagtatatagtggagttttccattgtacaattggacaactgtacagagctacgtaactggattttccactgtacagagctacataactggattttccagttgaccgatgcataatgttatgaaatcttatgtgggtaaaagattaatttgaaccataaaatacaccagtaaactttagtgtaacagtccaaaatgttcattcatatggtttcagattcctcactgcaattaacctttaagaaactaccacttgctaagttatcgtatagtatcaaaaaataatgtatcacctgaaaggctattaaaatgcttccttttccaaccgtgggggtgtatctaggtgaagccaggttttcctcatatgcttcaaccaaagcaatgtatcccaacaaactgaaagcagaagcatatatgaggacccagctgttttctattgaaccagacattaaagacatttgcccgccagacacagtggcttaggcctgtaattccagcacttt

SEQ ID NO: 917504 - DNA, 4001 bp, Homo sapiens
gtcagcactgtaagcactgagaccaggacctgttcgttgctgcattcccagcacctagcccagttcatcgcccagaggagatgcccaaaatgtttgtaaaatgagcatgtaagacacagccttctgaggaacggccatcccaacaactcttacactgcagaagcacttaattttagaaacaggccaagacagctgcagaggggctccagacctacgcctctccctgggcaacagtttggttcctagaattcaacactcaccaccatgtgccatagataacaaaatattatcttccccacagttgccctgtatcaaatttgaatacacttggccaatataatctcatggctaatacagtacagcaaccaataagatttctcttgccctttatttttttatatgtactttggccagcaaggatagatcaaaatgctaaagaacaattgaaattgaagaattccaccattaatttcataaccagtagttcctggctcactgtgtgatcccaggaaaaccacattgccttcttgaactgtcagcttcagctacagtcctaatgctctttatctaaagggtagtttggggaagattacttagtagttgtaacatactccgggaccaatccatgaaagatgccataaatcaaattaattatgaaacaaaggaaatcataaatattgaaaccacttcaaaacctgagaagttgagaagtgaggaagatttaaaattatgcctgtggcgctgatactaactcactgtcagactataagacgagacacacattctcagaagattcatgacattcccaacagatcttttttttttttttttttttttgagatggagtctcgctttgtcgcccaggccaaagtgcagtggcgcaatctcggctcgctgcaagctccgcctcccgggttcacgccattctcctgcctcagcctcccgagtagctgggaatacaggcacccgccaccacgcccagctaattttttgtgtttttagtagagagacggggtttcaccgtgttagccaggatggtctcgatctcctgacctcgtgatccgcccacctcggcctcccaaagtgctgggattacaggcgtgagccaccgcgcccggccaacagatctttaatatttggaaatgtcagatgtttctgtcctccagcagcattaacttcacatggagtatgaacagtgacaagcaattgcaaaattagagctgttctccgttgctgtacccgtgcctaactgttaacacgcagtctaccttaccgaaagtcaattccacacactcagtgagaaaagccgtttaactggctgtaaaaatactccgccccctacctgctgaccaccgctaacacgccaggaaaacagcaacatccagcagcacagctgcgctccctcgccacgacttcctaacttccctccacttgaaagcactctcatcagtgtgtgtttgtctaaaaactcttcttggagactgaagaagaaacacatccaagtgaaactgagaggtcagcttctaaagcggaggctgaactttgcaagtgggggcggggggagttagttcggtcccccaagcctaaaagaatggggcatggtaagggggacggccccttccttcagcgcggcacacgctccgcaaagggcctggggccggcccacgagaacaccagggcacctgcccacttgcagcggccccaagagactcctgggcagagcacctggggataccaggtggggtcggggcgggcggcggggctttgtccccattcgcccctccaggccgaaatgggggcggtttccgctgacccccaagaccgggaactagcagggttcggacgcgggtctggagggtcggccccaccacctccggcaaacccgagggtccccgctgccccagcctcctcaaagaggtgcctagggtggcgtgtagggggcagccaggatggcggaggccggtactcacagagcccactggagccggtgctggtgaacatggtcccgccgggctcggagccccagagggcgccgggggaggggaagctgaagtgcgagccccagcgaccgcgcaggcgcactcttggcggagcgacgaatccggcgccgcgaggccactcgccgctgacgaacggcgcacccggcgcatgcgcagtcaggggcgtgcgcccgctgggtcagcgccctccttcctgccggggaagggaagtgcgtcggtaggggagggctcacctctccaggttgaaacgatggcggtcagaaccgcctgaggtaaaaacgggtggcactggggaagcggaggcgtagctcccgagagcctcacacttgtgctcagtgccgcctcacccctggtggatccgcgatggccgcggattcccctggattgccggcgctgggcaggagcgccacttctaatctctcccgagactggacgcccggcgccttccacgcgcgttgtgtctttccgggcggtccctcgaagctggctaccccgcgggctgttgactgcagtgggatctggtcactcagatgcggatagaggggtacgggagccggagaggtggaacaggtccttccgggtgcggagagctgggccgtccagccgcctctttgttcccgcgtgggtcccgcgcggaatccccaccaccggggccgactgtcgtggtccctggagtcagcaccctgccctccccgccgtggtggcgggtggctggggggtccccggcccggcgagcccggcggagcgaccctgcgcttctgccctggcgagcttccggactcaggccatttaaatttttttccccagcagaatgaagttactctttgccaaagtcacggtttttaaatgtgtgagcctgaaaacatatcatgcagtcgttttaaaaagtttttttttaagttgatctcgtgaaagtagggagtaaaagagtggttattcttgtacagaggagagttagtggggaggaagatggggagaggttggtcaacagacacaaagttatagttagaaggaataagttttggtattctcttgcacgtttggatgactatactcaacgataatgttaacttcaaaatagctagaagagaggattttgaatattctcaccacaaagaaatgacaagtgttttggtgatggatgtgctaattaccctgattagatggttgcacaatgtgtatatgtatggaaccatcacactgtaccccagaaatacatgcaattatgtgagaacgcatgttatggggaaaattgaccacactacccagctaaatgaaagggataggctatggagtactaaaaaaaaaaaagcattttcagtgctcataagtgccagccagtgtgctaaatctgtgattcgtagatcaacacagtccctaccctcaaagagaggttccagtgggccaaaatgttaacactgattatagaaggcaaaagtatgacttttatttgcttctttaggctttattcgtaaagttcattttcacagtcttgttttgttcgtttgttttgagacggagtctcgctctccccagctggagtgcagtggcgcgatctcggctcactgatacctctgcctccccggttcaagcgattctcctgcctcagcctcccaagtagctgggactacaggcacctgacaccaccctggctattttttgtatttttagtagagatgaggtttcaccatgttggtcaggctggtctcgaactcctgacctcgtgatccgcccgccttggcctcccaaagtgttgggattacaggcgtgagcctctgggcccagcccattttcacagtcttgaagtacattttacatttacctttaggttcgttcgagttatttttcaggaaaacgacagtcaaaaggtcctttatgtttgcagaagctgttgatggactacaccctgacccattaaggggatgcaaagtccaaaactattttcataataatgctaagacattagttttattttctactctctcaagtatatagtggagt

SEQ ID NO: 917505 - DNA, 4001 bp, Homo sapiens
cacacaagcccagccccagcactgtaaggttacacggttactgttagtcaaccgactcacaaccttaccctttataaacaaaacaaagaaaggcgtcaataaacaacagtactttttgtttcaagttctcaacactcagtgatcgaggctcaatactatgtttccttagctttatgtctaatatggaatctactattaataaatatctggcattaaaaagccctggaatattcattgtaagtaccaatacagggtcagcctacgtttctgaaaatcccaaaatatctttatatttctgttgccatccgtattcagacatttcaaaaacctcacagcaaattctaacatactttttcttgaagagatgtgcatccctgttcttgaaaaatatcaagttcgtccctactgcaatgacgatctcgtctgtgtcataaagcaagattcccgtttccctacctattctctcgtagggacacccgtcctcagctctgcccactgtccctgacgttttcagaaacgttaaaatactagtgttcggaggcttctagcgaagagggagatgttttgtcccctcaagctaccatgatacatttccctacttctccactatcttcaatgctttagaaaacacgaccaaatgagagaacccatattaaaagcagtacttcctaaaagggggaaaccagaagctccaacttctccaaatcgctcagcacagtggcttttcgacagtccccagcaaatcttcgccccacgcctgccgtctttccgattaaataagattggaaaccacaattaaatcagtgtcataacttatccgtcacttaccatatccgccgggacattactggacatcttgccgtttgatatacacccagatgtttacgaaaaaaacaaacaaagaaaaaagagcagaagtcttcacgttacagaaataaaccacgattttgactggttcgtgatgtgctttctcccccaaaaataaagttattttggagccaaagtgccggtcaggccgaggttctggttcgaagaggaacaatccccaggagctgtgtggccggagcaggaggaaactcccgggacagcagaggcagcccccgtcgtcgtcgtcgtcgtcaacagcagcagcagccccaggaccggccgcgccaggtggaccgagccgagtgacacacggacatggagaggggtgggagggggttaaatgcgccttcctcctttcccagccccggcaatgattcacacttgctcccgagtcaagtcctcattaagcaggagaaaaatgccccagcgtggatgtacacagataactatgtagctacacatcgacgcgtgagccttgagtggcggccgagcggtggccggacgctggccgcggaccctgcagagccgctgtcggagcgcccgcgcggacagcgcggggaaacggctcaactcgcgccgcgggggcgaagagccgggccgcggaaacccgcgctcaagggcatttaactagttggaagccaaagcgaaagaccggagcgggggaccgacagcgcgggggtgctcggggccggccgggacactccacagcccctctgggctcaggccgcgggcgcctccggacagcagctggggtcggggcgcatcgtctccggctcctcgccactcctcttctgcctccgccttccccgccgccgcctccccggtctccgccttcccttcccctcccctccccggcctcgcgagctccgggcgacgccgacttcggctggtccccggaagaggccgggtcctccttctcctcagcccgggaatggtttcctctcagagctttgtttctcctcctcctccttcacttttcagtcccacacgccgcggccgcctcctgtcatcgcctctcaaaccaacatggcggcagcggcggcggcggcggctgcctgagtgcgactaagggaaacggggagagcacgggccccccctcgcagcagccgccgcccccgtcctcgtcctccctccgcggacaccaagtgcgtcaccacggagaccattccctcgagcatcacgggaagtgtagtctacgagggtgggggggggagggagccgccgaacgcctcctcacccagctccgaagccacgccccccatagcaacagttgcgaggaaaggaaagctccctttcccttgctttggacaagctgctgcccaggagttaagtgatacctgctaccaggagtgctgtgatcatgagaattgttgggagaaaataattctgcatagagaaattcccttatgcacgatatgcacacagagctaaaatatgctgtacctccaagcagaatcattcattttaattacagcacattctccacatcctgcaatctcaatgcattttgtagagtgatttcatctaggtctcctcaacattacattttgaagaacaaaagcaatcattgatttccaataaggtcacataagttcaacaggaacaaggatctcattaagcagtgagaatatttgaacatgtgtttccttgaagacccagggcaataaagctacaatctacttaactgaaattaccaaaactgtattacatacaacagtgttattatatcaaatctgtatcaggaaatagctactacaaacttcatggggattcaccagtttacccatctggaccctaaattctattctatgtaactcataatgtaattgaaaacctatatgccttgcagtgattagcaaataggagaaaataatgccattgttgagacaccattcagatggacatttgtgatttctgcattttgttcctaaatctgaggtcaacatctgaatccctattcatatctcttagtcctttgacagagtactttagaaagggcagtctcaatatgatgcctatatataaatgccaatgaatttagagtctgaaagccacctctccaacctacagctgtgtgacctcatctgtaaaatggtcttgcctaccttccggggtaaagtaggggtagttatgaggatgagttcatgcatgggaaataaatcactttgtaaataataatgcatcatttgatatgaaatgtcactactcattctctcattcagcaaacaaatgtgccaggcactctgctaggcactaggagtttaaaaatgagtcactgtagcgaacagcagcatcatgtggcagaaatgccaaggtcttgggttggcaatgggggttattacatccttgtctatagggctgttgaaaagaggcagaatccagtcactgtcctcagggagctcattgtctagaagcctacgtgattccccacagcaatctctccagttgggtttctcatcagttggaaacccacaggacatttagagtacctgcctcttgagtagcctgggtggagaaattccaaacactcctaagggcctatatcaccctgaggaagatagatcaaattctccgaaaaaccaaaggccagaagagaagagaggcccaaatctcactgtgattaggcttcaggactttgtctagatatttccaagtccatagttacgtgattttccatggcctttgttacttggttgctcatttgcaatgtttagcaaccacagagtccccctacccctacaccagccccccaggaaataagggcaggtgaaaatacttcaattgaccaatgagctcagaaggaatattggagcacattttgaaagctctaactcacagagttagtccctccaccatacccttgactccaacttttatccaatgacctccctggccatggcactgcctggccatggcactgccgggcctaagtgccactgtaagtagaaaggcaagagttgctgtttgctgcaggttaccactgccacctttacaaaaggcaatgtctttcaaaagtcgctgtgtttccaattactcttctaagaggggctgagacattattctcaataaaactcattataactcatccctaacattgttaaggcatgaggtaacattattggacacagttgcag

SEQ ID NO: 917506 - DNA, 4001 bp, Homo sapiens
gataatgctagcataaaatgagttaggaagtgtcttttttttttttttttgagacagagtcttgctctgtcatccaggctggagtgcagtggcacaatctcggctcaatgcaacctccgcctcccgggttcaagcgattctcctgcctcagcctcccaagtacccgggattacaggagtgtatcaccacgcccgtctaatttttgtatttttagcagagacggggtttcaccagccagactggtctcgaactcctgacctcaggtgatccgcccacctcagcctcccagagcgccagtgctaggattacaggcgtgagccaccgcgcctggccgtctcccctcttttatgtttatgtagaattggtattatttcttccttaaatgatcatctcaagagatgcagaaaaatcatttgcgaaaagtcaacatagattcataagaaaaactctcagcaaactagggggaaaagaggaacttccttagcctgatttaaaaaacatttaccaaaaacctaaagctaacatatttaatggtgaaagatcaaatgtttcctccctaagatagagagcaagacagaggatgtctctttgtccagggaatttgctacaagctttgaaaaccaaaaaccaatatttttaagaacacggtgaattgttccttggtgatgagaaggaagatagtggaggtaaagggagtatgataaactaggagagcagtaaaaaagaaatgagctgttgagaatgaaaaaaaaaaaaaaaacagggtaaaataaggcacacctgagcagatcaaaagtttatacctggtagcacttactcttctgagtggctgggagatgttccctcctccctccccaacccccaacctccaacacccagaaggaacttaaattgctatagattgcaaagaatggcgtgggaactattaaactgagctttctttgatacaacagcaactaaatgtccagctttaaaagactggaagataaagggggcgtggcggggaagaaaagtgacttcatggggcaagagatgattggaagatgatttcatagtgcaggcggtggatgaaattacaaggactgggtgggcgagtttacaaagcttggagtcaggaagtgtgggcaaattagtcatccaaaaggtacaccggtaggaaaattatggaatcggcactaacaggaggcaaaacgaagaaggaaggggaataggaatacagggtaaaagtccctccaaacctcagacccggagtccccaagatacgtggtgactgcagaatgggaccagaggagtggtgggagaatcttcaggagccaggtggcagcgagatggccctttctgaaaggggcggacccgcgtaaagccgaacaagaggggccctcaagaaattaaatcccagaatccctggaagcgtggaggtggagtccagcagggaagcggaccgagcagacagaaaagactccgaggtcccgagcgacagacacctcactcacctggttggtgacctgaaaacgaaacagagaacacgctttagagacaaaccaccgtggactcgcggcagcaagccggctccctctgcacctgcccacggcccagggctgccccgaagcgcgcccacctcgggattggcctccagcggcagccagcgttgaccctccatggccgcggtgcccggccctccagctctgacagccgccgccttcgccgccgccgccgcttccgcccacgcgcgccttgacctgggccctcccaacacaccgcccggaggaggagcgcctaaacaccaaaaagagtttgacgggcctctcaccctcttaaccgctccgtgcagggccgtaggtcaagtgtcatattttaaattaagatgctgccgaggagaaaaaaataagccaatttcctatttcgggagaaaaacagtatctgaatccacagccctctcccctcacgcttggactcttccgagccgagccttgccgagcgctcgcgttctacgcatgcgccttgcgccggtctgggaccgcgtggtcacccgcaccttcccattcttgcagtgtcaaccgactgcgctaggaggcgtgccgcggagtcctattctgagacagacgccaggtggctacccattgccaggcagcaaggccggaggacgccgtgcagcacggtgctgttgttcgtttgtcggggtgcaggagtgatgggttggccttgtctgctcttgcgggaggcagcgggtgtttctatatatccgattccatttgacaaaaaatgtcgagtactagaaatcactgtactaagtattgacacaaagttgagttcactgtagagtagaggcagtggacaagacaacggagaatcaggataaaaagcgtggtacctatatgatagtgatggcatgaagtgtgctggaattacggaggaagggggaagagagtgtccagaagtcttcctgaaaaagtggattcctggactgaacccttaaaagatggtagactttacctaggcagagaggaaggtgctgtgaagaagggaaaacgcactgtggctgcagagtaaagggtgctgattagaggtgatgctgtagaggtaaacagaggcaacccggtcaagacatctgggcttcctgaaaacagcaaggaaccactgaaggatcttaagcaggatttgtcatgtatctttttcaccaaactgcaaattccaggagcccagtagcagtgtctcttttttcttcttcacattatttatccagggcctaacccagtgcatgatacatagaaaatgctcggtaaacatctgaagaataaatgggatgatcagatatgcagaaacatcacttgtcaataatgtgaaaaacgtgtgagaaataaatgctgaaaaaattaaaacagtagccacggagaaaggcacagattaaagagattctgttttaagggatgatgcctttgatgagcagaagttatcaatgataactccataaatttgacctggggaagagtgcatattactattctgcacctaatagaggaaattcaggtagagagcagttagggagtcagaaaaagataatattatgctgagcttatatttcttgggaaacttccaactctcccacccacgttcttctggccactgttctttgacttcagaggtatttcattaccttaactcctcttcatcgttatctaatggattgctgctatactcacctaacactttggcttggtaaaactggcagtgtccagctcgtgatgggcttagttgcattatcactagagttacattgccagactcttagtctctgctggactcagtgcatgccaggggctgcttttcaaattacttactgtcaaaggaattgccttgttccagatccctgaggttctgcactgtgattcacctgttagggttgcttaagacttcacacagcatctttatcttccagggacactagcagcattggatctgctgagacacaaggccggacagcaagacagtttgcatcccagcagggacttgctgcagagcactgtcttgctagggatacactcaaattggtagctttccataccacccaataaatgtgttgaagctgtattcccaagtgtatattctatctccaaaagccaaagaggcccagtaggttctctgccattttgctgtgaataggaattgcaagatgcaataacttgtctttcaccttacagaggttgtcctagcacaccccagacctttagacccataaaacccttacaaatgtaggactctaatttgtagagttaaactgtacattttaacttccaccgtctggtttatatggtttatacagtttaacctacaccgtctggtatggatgtacctatcatggtattgagggcagcatgtctcagaggtgcataaaaacacctggggaatatgaaatgcagattttgattcaataagtctgagacagagcccaagattgggcatcactggttctaattttttaatcttccctttacccacatcct

SEQ ID NO: 917507 - DNA, 4001 bp, Homo sapiens
ctacttacacaaacttagtttgttaaaacaatcaacatcatctaaaaagttttgttttttagtctattgatatggttaattacattgatttttgaatggtgaaccagctttgcaacaccaggataaactgctcttggtcatatgttactttttatatatttattgctgcattctatttgctaatattttgtagaggatttcttacatccatgttcataagggatactgatttgcagttttcttaatatgaattgtctagtttggcgtcaggataatgctagcataaaatgagttaggaagtgtcttttttttttttttttgagacagagtcttgctctgtcatccaggctggagtgcagtggcacaatctcggctcaatgcaacctccgcctcccgggttcaagcgattctcctgcctcagcctcccaagtacccgggattacaggagtgtatcaccacgcccgtctaatttttgtatttttagcagagacggggtttcaccagccagactggtctcgaactcctgacctcaggtgatccgcccacctcagcctcccagagcgccagtgctaggattacaggcgtgagccaccgcgcctggccgtctcccctcttttatgtttatgtagaattggtattatttcttccttaaatgatcatctcaagagatgcagaaaaatcatttgcgaaaagtcaacatagattcataagaaaaactctcagcaaactagggggaaaagaggaacttccttagcctgatttaaaaaacatttaccaaaaacctaaagctaacatatttaatggtgaaagatcaaatgtttcctccctaagatagagagcaagacagaggatgtctctttgtccagggaatttgctacaagctttgaaaaccaaaaaccaatatttttaagaacacggtgaattgttccttggtgatgagaaggaagatagtggaggtaaagggagtatgataaactaggagagcagtaaaaaagaaatgagctgttgagaatgaaaaaaaaaaaaaaaacagggtaaaataaggcacacctgagcagatcaaaagtttatacctggtagcacttactcttctgagtggctgggagatgttccctcctccctccccaacccccaacctccaacacccagaaggaacttaaattgctatagattgcaaagaatggcgtgggaactattaaactgagctttctttgatacaacagcaactaaatgtccagctttaaaagactggaagataaagggggcgtggcggggaagaaaagtgacttcatggggcaagagatgattggaagatgatttcatagtgcaggcggtggatgaaattacaaggactgggtgggcgagtttacaaagcttggagtcaggaagtgtgggcaaattagtcatccaaaaggtacaccggtaggaaaattatggaatcggcactaacaggaggcaaaacgaagaaggaaggggaataggaatacagggtaaaagtccctccaaacctcagacccggagtccccaagatacgtggtgactgcagaatgggaccagaggagtggtgggagaatcttcaggagccaggtggcagcgagatggccctttctgaaaggggcggacccgcgtaaagccgaacaagaggggccctcaagaaattaaatcccagaatccctggaagcgtggaggtggagtccagcagggaagcggaccgagcagacagaaaagactccgaggtcccgagcgacagacacctcactcacctggttggtgacctgaaaacgaaacagagaacacgctttagagacaaaccaccgtggactcgcggcagcaagccggctccctctgcacctgcccacggcccagggctgccccgaagcgcgcccacctcgggattggcctccagcggcagccagcgttgaccctccatggccgcggtgcccggccctccagctctgacagccgccgccttcgccgccgccgccgcttccgcccacgcgcgccttgacctgggccctcccaacacaccgcccggaggaggagcgcctaaacaccaaaaagagtttgacgggcctctcaccctcttaaccgctccgtgcagggccgtaggtcaagtgtcatattttaaattaagatgctgccgaggagaaaaaaataagccaatttcctatttcgggagaaaaacagtatctgaatccacagccctctcccctcacgcttggactcttccgagccgagccttgccgagcgctcgcgttctacgcatgcgccttgcgccggtctgggaccgcgtggtcacccgcaccttcccattcttgcagtgtcaaccgactgcgctaggaggcgtgccgcggagtcctattctgagacagacgccaggtggctacccattgccaggcagcaaggccggaggacgccgtgcagcacggtgctgttgttcgtttgtcggggtgcaggagtgatgggttggccttgtctgctcttgcgggaggcagcgggtgtttctatatatccgattccatttgacaaaaaatgtcgagtactagaaatcactgtactaagtattgacacaaagttgagttcactgtagagtagaggcagtggacaagacaacggagaatcaggataaaaagcgtggtacctatatgatagtgatggcatgaagtgtgctggaattacggaggaagggggaagagagtgtccagaagtcttcctgaaaaagtggattcctggactgaacccttaaaagatggtagactttacctaggcagagaggaaggtgctgtgaagaagggaaaacgcactgtggctgcagagtaaagggtgctgattagaggtgatgctgtagaggtaaacagaggcaacccggtcaagacatctgggcttcctgaaaacagcaaggaaccactgaaggatcttaagcaggatttgtcatgtatctttttcaccaaactgcaaattccaggagcccagtagcagtgtctcttttttcttcttcacattatttatccagggcctaacccagtgcatgatacatagaaaatgctcggtaaacatctgaagaataaatgggatgatcagatatgcagaaacatcacttgtcaataatgtgaaaaacgtgtgagaaataaatgctgaaaaaattaaaacagtagccacggagaaaggcacagattaaagagattctgttttaagggatgatgcctttgatgagcagaagttatcaatgataactccataaatttgacctggggaagagtgcatattactattctgcacctaatagaggaaattcaggtagagagcagttagggagtcagaaaaagataatattatgctgagcttatatttcttgggaaacttccaactctcccacccacgttcttctggccactgttctttgacttcagaggtatttcattaccttaactcctcttcatcgttatctaatggattgctgctatactcacctaacactttggcttggtaaaactggcagtgtccagctcgtgatgggcttagttgcattatcactagagttacattgccagactcttagtctctgctggactcagtgcatgccaggggctgcttttcaaattacttactgtcaaaggaattgccttgttccagatccctgaggttctgcactgtgattcacctgttagggttgcttaagacttcacacagcatctttatcttccagggacactagcagcattggatctgctgagacacaaggccggacagcaagacagtttgcatcccagcagggacttgctgcagagcactgtcttgctagggatacactcaaattggtagctttccataccacccaataaatgtgttgaagctgtattcccaagtgtatattctatctccaaaagccaaagaggcccagtaggttctctgccattttgctgtgaataggaattgcaagatgcaataacttgtctttcaccttacagaggttgtcctagcacaccccagacctttagacc

SEQ ID NO: 917508 - DNA, 4001 bp, Homo sapiens
gaactggtacaatgttccaggctcttaatgttattgtcctactctatcattttcttccttccttctcacgctctctttcgagtacatttgcatattgatgagaataatccagtagaaagggaaaaaccaatcatgaggagagagggggcactggactccatctactttaaccttgacaagactgaaatagatgggaactatagctcaagtggtttttcataggagtgaagtcattttttccattctaacaggatgggaaattaacggatttatccatgtagtggtaggtttacattggtgtaaagatgatagaatttccctctgatggcttgatagcaagggagacagcagctgtggaaagtttgaaatttttaaacaatcttttctgagaataaggaggaaaatgagcaaacttgaagaatgtattaagtactaggtactattaattgtagtcatgaatttaatgtaaaccctccagtctgttattttctccaggggcagtcagctatgtacagataatacaaacagctggtttcagagttggtgtttcactaaccaaaatatgctgagaggagagacagggccaccagagttgagggtgtttgcatgagaatgatttaaaggtggaccaatggactcttaactatataaggagtaaggtaaggaatagaagtggggatagctacagataaaaaatcactgtgattaatggattaaatgaaacgttgtagatgagaaattatagtaaatcatgtaggagagaatgtatttatccataagagtgcctgtaaacgacatctcagagatggagcaattattggaatcttaaggttctaggctgcaaccatgaacacctgagataaagtgtaacagggatattttggagatgaaaagatcaagggaggaaaaggctgagaggttgtacggatcatggattggtaaatcattgaaatttatcagtcagctaggtaggccaaggtactaattaattatgcaaaaaattctattgtaatcctgttctttgctacatttcatgctacttccaactgcaataacctcaagagtgtttacttaaaatctatcactcaactgcgaaggataagtaaaggccccacatggataaactatcccctatctgcatttcccattcctaccaaatactctattaaatcccagcataggaagggtgtgatctgagtctcattactttgtgatgcccgactgctgagttactcatacacaacgaaactcagaagccgcggaataacaaatgttcaagtaatttcaaagtcttgactatcaagatggaatgtcttccttaacttcctcaaccagctggccaaagcggtgaaacgcttttctaatatccagcagatggggactgtttaagaatcccaacaaattaccagaacctggtccacctgtcctcccgcgccacctgcccaccaaatgaattccgaggggaggtcactaatcagaaacacacccacaccctcgtgacggggccaagctgccaagctgacacttagcgagcaagtacggacctctcctcgcaggctccggtgggaaaggctcctggaagggcgcgagccaggaaagtagatgaagtgaagagatgaagactgcgtggggtagttgttggaaaagctcggatcatccccaacccagccccgtcttgtccggccccaaaaggcccatctcggccgagctactcacactttgtacggcagccgtgggtccgacgtcagcgtgatcttaaaggaaaccttcgacctgaggaaaagagcgggagagagtcagggtcgggcagctggaccaggaattatggcagtcggtaagcaaacacttacatggtggtgccggaatgaatccagaacacacgacaactccgcgggggtagcacgacttcctctagtgtgctggggaccgccccgctccactcacgtccacgtctccctctgcaatctggggacctccgaagttgttgctatccaacgcactgcctgaaaattggccctaagagctcatgctagatggcgcttttaaattacaaatatcttgtgcttttgcgtttatatatctaagaaaaaagtatggattatatttataagatatctttctaactttggtaatttgctaccatatttttagtcaggcagaataagcgtgggcatagagcgtaggaccctaggttccagttggcaggttggggcggaagtaagggtatggggtagtcggatgaagagcgagatggacttggggcgaagctcggggcgaggccgggggcggggctggggcggacgcgctctaaagtttctaaggcaacctgagcgcggaaaagcttaattggtgctccagaagcaggaattgtaacactgctttatcattagttttcttccgtctttccagcaaaccaatcctgttatatcctttacatttctcatagtttctccttcacgctttactttccgatactgatttataactattgaatttcggttaagtaagagagctatcaagtacgaattatctatgccaagactcccgctggggtgggtgagaaaaaatgaggtttctacgtttggggaacgtggcgtctagttgggaagacacatctatgaacaggagatttcagtaatttgttatatggtctaattaaaccagtgcgctgagttgctaatcactgaccacatttattcaatttaacaaccaactttgaaccctttctatttgcccggcgctaagctaaactctggggaatccaagatgagtaaggcaggtaggcgtcaactctctaggatctaacatcctgtgtagtgatgacggaagaaaattgtcctctaaactttattacagatctaaacctctgtgtttggaaaatatgcgtctgtctcacaatgactgaaatgcccttttaaaacattagcatgaatagacaaaggaggaagcaggtaggcattaaaataatggggcaatctagttgatctttagaatatgcatcagattcttaaggagagatacttaagagaggaaccaggaaggaactgtagtagggataatggagatcaaattcatctttacaataattttgcagccaactgatcttctatggtgacatttcccagtggagagagttctggttctgagtaggcaagtaagactccaacattctcatgacagccatcctcactttttaaaataatggtcttaccatatatgtagatgaagccaaatattgattgacagatacagggatcaacagttacagccttaatagctgaaactattcaattagtgggtgtgactaaaacttgtgagaatagtaataaggataaaactgtgattgtgtctacctattgtcagctagccaaataataatgaaagagatgagtgtacatatttacagtctataagactacatataatatattttgaaacaaaatttgcatcctgctatttatagtttggtttctgctcatgaatcaaaacgtggcaaaatcctaaagagaaaaatggatattaatcagagagcttttattgtatgtataaaaagtggtgaaaacagaattcagtcccacagtgtgactttagtactcagattctgctgcttcagaaaatacatttgtataatatatcaaaataacatctcttgagatattaaaaagcagctgtttctaaatatttagaattctttttcacctcagtccccaactctgcttctcatgtttgtctcctcagagtcacagcatgatttctgcagcctcctgagttttattttgcttaggacaagaaagaaattataaatggatttatttataatcaatttttttaactttgtgaagggatttgcaattggaaaattttatagcaaaacaaggaccttctcttttactgaaaagttaaaatgttgaagtacgtttaatggctgtaatcagaagcaaactctggagcaaatttttggagataattggcaatggaacattttaagacaacaaatagca

SEQ ID NO: 917509 - DNA, 4001 bp, Homo sapiens
aatagctgggacttaattaaactaaacagcttttgcacggcaaaaggaatagtcagcagagtaaacagacaacccacaaaacgggagaaaatcttcacaatctatacatctgaaaaaggattaatatccagaatctacaaggaactcaaatcagcaggaaaaaaaaaacagtcccatcaaaaagtgggctaaggacatgaatagacaattctcaaaagatatataaatggctaacatgaaaaaatgctcaacatactaatgatcagggaaacacaaatcaaaaccacaatgcgataccaccttactcctgcaagaatggccataataaaaaaataaaaataaataatagatgttggcgtggatgcagcgaacagggaacacttctacactgctggtgggaatgtaaactagtataaccactatggaaaacagtgtggggagtcctcaaagtactaagagtagatctaccatttgatccagcaatcccactactaggtatctacccagaggaaaagaagtcatgaaaaagatagttgcacaagtatgtttatagcagcacaattcacaagtgcaaaaatgtggaaccaatccaaatacccatcaatcaacgagtggataaactgtggcatatatatgatggaacactactcagccataaaaaggaatcaattaatggcattcacagcaacctggatgagattagagactattattctaagtgaagtaagtcagaaatggaaaaccaaatatagtatgttctcactgatatgtgggaactaagctatgaggatgcaaaggcataagattgacacaatggacttcggggactcgggggaaaggttgagaagggagtgagggataaaagactacaaattgggtgcagtgtatatactgatggggtgatgggtgtaccaaaatctcagaaatcaccactaaagaacttactcatgtaaccaaacaccacctgttccccaataaactatagaaatgaaaaaaaaaaagaacttttagcatcaaatacatgaacttatgtggagtcatggagtctctttttagggacacacactgttgctgtggtgaacagccattaagtcattggtgtaaaacttcatttttgctaagagaaagaactttctaattttactcaactagaatactaaagggcaaaatgcaatagctacaagttttgttctgcagagtaaatgacaggtcatgaactaattccgttggaagagatacaggaaaaatattaccttgcaggaagctgccctccccatagtaagcctaggagctgatggtatgatgtcatcattacgaaactaggtactttaagcactgtctgaacagaactgcctaccccagtagaagctcttgcgttaagtgccacgcgtaaatgctaatacatcccaacgtattaaagcagggcagggaagctttaaaaatcgtaggtaaagtaagactgagggggaaaggaactgcaagtgagtgctgcacgggaaccgagaagccgccccgggtcgggaaggaaggaggtggtgatgctcagggccagagcgggggcgtctggagaacccgggtgggagccagacacccgctgcgagcacgaagaaagcgcggctgagggtggcagcgcgcccacacccgcccggacgagggcccggcccgcacccaccttgcctccagcagcagcggggtctcgggccacttcgcggccaagtgggcagtcaccgacttggacgcggcgaccgtcccggagccgagctgcgaaagccacagcgctgtggagcctagtagcagccgcaccacgttcgtggctttcgctggcgccatggcacggagagaaaagcgcgagtccctcggacccggtacccacagtctgtggccgccacgcttcggccggctcttcccgctgcgcggctgcccacttccggtgggaggagctcgagtccgttactgggtgccgggtccagaccggcgcatgcgtgtcccgctccggcgcggtttagtgggtgcggcctggagagcccacgccagccggacactgggccacgtcggagccgccggggcggcgccgggttgctgagcggcgtcacagatgctcccgcgggtccgctcccgcgggtccattcccaggactttgggttctcggacagaggccttaggacacggggcgggaagctggctctccagaccgaactagggctctggagttgccaaaatctggaagcaaagtcaggaccacttgcatattgtccaccttttacataggaggaaaataagtccagttaaagttgaagtccccacctcacgcagttctcaagtgttactacaggttggaatcacctgggagagcttttataaggccgccgccaaggccacgccccgtacctgagaatctcgggagggggggtgagatgcggcatcagtagtattagttaaaatccgcaggccgggcgcggtggctcacgcctgtaatcccagcactttgggaggccgaggcgggcggatcacgaggtcaggagatcgagaccatcctggctaaaacggtgaaaccccgtctctactaaaaatacaaaaaattagccgggcgtagtggcgggcgcctgtagtcccagctacttgggaggctgaggcaggagaatggcgtgaacccaggaggcggagcttgcagtgagccgagatcccgccactgcactccagcctgggcaacagagcgagactccgtctcaaaaaaaaaaaaaaaaaaaaaatccgcaggtgattccagtgtccaatcatgttaggaaacccgtgacttacgggtggctctcaaactttaaccacttgcttgttaaaacactgcagagtggtgggcctccccacagtgtttcggattcagtagagcccttgcgggggccgagaacttgcattttatttctcccaagttcgcagataatactagtggctagaaatcacactggagccttttccattggaaggtgtggtccagggtaggcttcagctgtgagctcaatggaaatgcagaagctcaggccccgccccagacctaatgaatcaagatctccaatttaacgggaaccacaggtgattcctatgcacaggaaaggtggagaagagtgatttagaggattacatttaaaagtgcacagaaaagtgccaataagcctgagcatggtggctcacgcctgtagtcccagcactttggaaggtcgaggcgggaaggtagcttaagccgaggaggtagaggctgcagaaaacggtgattgcgccactgccctccaacctgggcgaaagagggagaccgtgtctcaaaaaaacaaacaaacaaaaggccaatacgtgatagttgttttgtcagagtaaaatatatggtaaaagagtttagcggatgcacggattcattgctttttttctctcctgttactcctttgccctgcagggaagctggatctcttgaagttgcggaaacatagtcattcccttttttcgtttcatttgcttagtcagtacccttccttagaaaaccctattccgctaagcagttccacgaatttccagaataatttctcacttccaaagtttagccttcatttcctgatttatcctacttggtatgatctatccttactttaaatttcctctttattgtaactgccatatagcacttaagttctcactttaatacttgagtacgctacttacttatttctcctgtgagagatagtatattcccccagaactcatgccttgttcatctttggcatcccgtgcagtacctagcacaatacttcacattcacatgttatttggggactccatgaagattgaagaacccttgctttatggaaagaatgtagaaagctaaggcaaatgcacttcatttctatccatagtgtatacgagaaaaatacattacgaatctttcacaattatttgctttaattaactccccatttccactcatatttagaccgaaatttttattgagattgtgggattaa

SEQ ID NO: 917510 - DNA, 4001 bp, Homo sapiens
ttcctatcaggtaaaatagtttagctttagaacctaaaaagatcaagttctctcatgcaacaaactcactcatgaaaaccttcattctctgatgataatacataaataggctgtcactattacacagaatttctggaatttttttggattaaataataaaattaaataatttcaatttttaatatctgcacataattacagtaacataatcaaaatttataaacttattttagtctgagaactttttaattaaaatgcacaaatagaccggatgctgtggctcacgcctgtaatcccagcactttgggaggctgaggtgggaggatcacttgaagccaggagttcaagaccagcctgggcaacacagtgagacccccgtctctacacaattttttttttaaatcagccgatcatggtggcacacgcctgtggtccctgctacctaggaggctggaggattgcttgagccgcagtgtgaggctgcagtgagccgtgattgcggctgctgcactccagcctgggcaacagagcaagaccctgtctcaaaaaataataataatttaaaaagcacgaatattctagcaatacttcattagtatacctacagattataatagatttttaaaaaccaataatccaacctttgctgtcaaggaagatatatccatcaaaacgatctctaaaaagaaggatgtcatcaggattcctaaaattaatgtatgctcttgagtagagatgaggataaagactgaaataagagataacagtgaaaatggtcagtgaaaaatacaatagtccattaatttagcctctttttccttttctgggcacaacaaactactttagataaaacttttgtgccaaatcatctcagttaattgtaacaacttggatattctttagcaaaaacaaacgcaaaacgttaactttacaaggcagaactcaggtcccttctccactgcccagaaccggtcctccgaggctgaaaccctaaggcaaggccagggcgcactcccagaggaacccgtggcgccgagagactctcctgacttggggaccttctccggtatttaaaaccgcactggctgcggcaccagcgtggaggccacaggaagagccggcgccccccggccccgcagcgccccgtccgcggacgagcagggaagcccgggaggcgccgggcgggcaacgctggtcctttcaaaggcacccgctttcctaagcgttagccgtctgaaaatcatccgcatttttcatgtaaaccacatctgtgtttctttgttggtggtatttttctttgacggaacggacacgttttactgaaatgtatttattcaaaaagctcacacgactcccatataggagaaatcagggtaaggaacgtaaggcaacgagacggccaccgccgccgagctctgggttccgccctctcttcctcccctcggggcgggcctcacctcaggtcggcggcgaagaactcgaagtagtcgtgtgctggcagcgggcgcagctgctcctccagctgctccttggtgaggcccggaggcaggcggcggatgaccacctgcggggagcgcgcggccgttcccaccggggcggagcgtggacaaggagctcaaaaggcaccgcgtaccgcgctgggaggcccggcccccgcccctccctcccctccctcccctccctccactcagggccgtcctctcctcgcgaggtttgcgcgccccgcccccgtccccaccttgctcagggccgtcctcttctcctcgcgaggtttgcccgcaccgcccccgcaaccggaggacgaagttggcggcgtctcagcctcctgctgctgcgagtcgcggtggaactgcacttctagggccgacagcttctccctcccgctcgggccccgcgcggcaacggccgcccgaaggcctccggccccctccttttccgagcgcatgccgcactctccgccgagccgcagccgccagcccccgacgaaacctcgcgagagctcggccgccccagccccgcccctcctcgagccgcggcggtcggggccgcccacgaaggggtcaggcgctgcgggactagtcggggtcggggtggtgacctccggccacacagcctggctttccgccgggtcaggcggcccctcagggagcggcggccgcggtttagggcggccccggaagcggggcgccggcggctttggtccgggcgtggtgggaggagttcgcggacaagccgccctcccatcccagcaccgtttttatcccactcccccaggctctccgtggccggggcgccatgaaagccgggttcacatttgaattcttaatttttttggagacagtctcgctctgtcgcccagaccggagtgcagtggcgcgatctcggctcactgcagcctctgcctcagcctcctgagtggctgggacctacaggcacgcgccaccacccctggctaatttttttgtttttttaaagtagagacggggtttcaccttgttggccaggatggtctcggtaactcctgacctcaagtgatccgcccacctcggcctcccaaagtgctgggattacaggcatgagccaccgctccgggcccttgcacatatttttttatgaacacacaggcagcagcactttgattacagtaacttacatggaagttattttaaaatggctttccccttctctttttcatgtaggctgcatttttcatctgcagcacgctttctctcaagaatctcaagcacacacaagaaaccagagagtaaaatcactgaggcgtgaacacatccagagaccaagggcgtcactggcagaaaagcttttaggcggatccacggcccgagagccaccctgcccagagacgcggtttcctaggagcagttcacacgcggctctgcagcacccacaagcggggccaggggctggttttcatagttcacagtctgcagggatcttaacaaaaacatggccgtggtaaaagtgcctagaccaggctttcgtcacaactcagtgagtaggaagactagttaggctgatgaaaagctctgatgatgtgtgattaaaagtaggaaaacgtggttgccaaataaaatattttactatatagtcagggggagagatggggataaaaaaatgtggaaaccatttattttaaaattttgactgttcctgcagtgtttaaaatataggagatatattctgattatctttagaaagaaactgctctcaatctatttgtatgtcttccctctggttttaaaatattaaacaatcatctaactcaatatttaattttacctctagtcatgttactaggttaggataataaaaaggactgtgaacttcacatctgccatctataatagattcttattgtagcaatcttgcaccaaggggatttctttattaactctgccaaattttccaaaattaccaaatggagaaaagagctggtcccatctgtcaccaggcacaaccaggtcagtaacttagggtatttcttgtgttcatgttttgccctcaccactgcaaagccctgttctcggcctggtgcctctgcacacctctgaagccaggttggcctcagccaatgtgagggacccttcatttgaccttccccagaaccttgagtatttccacttctcccttcactgcactgtaccctaaagggactcacatgtttgctggatgtgtatatttcgtaaacctagccagcaaaatgtccaaatgtttttccccccaagtcaattttttaacacccttctgattctttacttcctgttattgcaaagttctgaaaaatgattttgaaaaaaaggtaggattttagaattcagctgtttgatgaaattatctttaaataaaaccatatgaattttaagatacagtgaatgaaatacacttgtaaaatagcttatgattttacatgacaaattatatcacaaagaaaagctagcttcctacacattagccagcctgttgaaatgctctgtttgata

SEQ ID NO: 917511 - DNA, 4001 bp, Homo sapiens
ctctctcaacacgctccctcctcagcctcaccactcctttgggtattaagacaatcaaaggatatgcctctctttttttttcctgtaaagaaattactttccagtgaggctgtcattttgcctcctctattctattttcctgtcagacattgagagggtgggctccggggcctcctgctccttccggcctgccctgcaggagttcagctgagaggctgtggtcccttcactcatcaggctgggactgggctgtccctgtgagtcaagggtcagaaagctccagtgatgacccccaagcccagtggaggagctgaagtcctcagctatggagaggcccccagaagtgggtgagtgtccacatggccccaacattcctgtccatttgattttatgacatcctctgctcttcctagataagcctcaaatgaatgaaaaggagctccttattttggagacgtctgtatgacggtcagaagccatctggctgtcaaaggccatcctgataggcggcatcgtctgttggctcctttttggtgaagagagcaggggctctccttccccacccagatgtccacagaggcctctctgcccctcgccaccccttcagtacatttcaggtttctccacagagcatccaggacagcccctgaggcagcctggtctctgtgaagctgtgtgtgtcattcggagtcaccccctcttctcctcaccccacaccaagaagtgcctcattttctctctctctccacagaagaaatcagtaacttctttcccttcctccagagggatgccttcagattctcctccttcccctccatccctcagggagttgctgatctgaatgaattcactctcctcggccatccagtccaaactggccctttgtggtacaaaagtcagccgattgccctttcccctgggctctggagatagtctggtatccagctgtcctctctgtcacatacaggacattcccaagccagatggggtggctaagacagggtgggccctcagcctagcctttagcctccgaatcactctgatgtcttttgctaggttcctccttgtgacctcaaagctctaatatttaacagccactttccttagccaccgcattcttccagtccatgtctgacctaaaccacacaagtgcttgactcttacggactagacctgaggaaacttactgaaccttccaaaggaaagaactcaataaacacatcaagtataaggaattagactaaaatagatagatgatagatagatagatagatagatagatagatagatagatagatttttaaaaacaactttttttgttgttttttgttttgttttttgagacatagtcttgctctgccaccaggctggagtgcagtggtgaaattttggctcactgcaatctccgcttcccaggctcaagcgattctcctgcctcagcctcccgaatagctggaactacaggcacgtgccaccacgcctggctaattttttgtattttagtagagatggggtttcaccatgttggccaggatggtctcgatctcctgaccttgtgatccacccacctcggcctcccaaagtgctgggattacaggcgtgagccaccaacacgcccggcctaaaagcaatttttgtagcaacagatctcatcatgttgcctagactggtctcaaattcctgggctcaagtgatcctcccatctcagcctcccaaagtgctgggattacaggtgtgagccaccattcctggccagtatctaaaaatattttaacaagcatatttgaaatccctttgcagagaatgtctgatacggaagccttacctgactgtgcaagggcatcaataaaggcaaaaaagtgcttctctaaatcttccaaatcagagaatggccgctgggaccaaacagcagctgcaatcagaggacatctctcagtggcattcccaaacacatccacgaattctccaaggtccatggagttgaccttctcaatgtccattccttgtattccactggagacagcgggacgtccagctcccctctcggtgagtgagtgacgctgtctcggctcactcggttatatctgctgaacacaagagcttgctgtttacgcaacaccaccttcgcgtgttttaaatgcctttgggagaagcagatccagaatacttgtgtaatgaacaagcacaggcttaaggttctaatccagggagcagagatctctgcatggtcaatgtttccaaccaaaccattcccataatcaaaggcagcaggggccatatttcactctaagcattagagccagatttgtttttcatgttgttaggcttttttttttttttttttttttttggtgtctagctctgtcacccaggctggagcacagtggtgcaatctcagctcactacaacctccaccccctgggttccagcgatttgcctatctcagcctcctgagtagctgggattacaggcatttgccaccacatccagctaagtttatgtttttggttttgtttgtttgtttgtttgtttgttttagtagaaacagggtttcaccatgttggccaggctggtctcgaactcctgacctcaagtaatccacctgcctcggcctcgcaaagtgctggaattacaggtaattattatattgttattatttgagataggttctgcctaggttgtccaagctggagtgcagtggctattcataggcacaatcccactactgatcagcagtggagttttgacctgttctctttccaacctgggccagttcaccgctccctgggcaatctggtggctccggtcttcctggaggacatcagattgatgccgaacttggtgcagtcacctgatcggcagagcgcactacagcccggaactcctggactccagtgatccacctgccttagcctcccgagtagctgggactacagccgcgtctggctgttattaacactttaatgtcatcatcaccgcaggacattttccctgataatttagccaggtccacgggtcaacccacttggaacttgatttcctaactattgttattgctgctgttaaggacaggtactatgtttttctcagtctgtgtatgccagatgcttaacacaacaagtacttaataaatgctcattaagcaggacaaaatgtctaaggaataattctgccccattctcaatagtctctcaaaccccattaggagttattttcttcttgaaaatatctgtgtctatgttgcttcttgtatgtatttacttgtatgtcggttctcagccgggacatattccagaagcctggagaccagtgtgtcttgttgcctctgtatcctggctgacaagagctgtgcctacggtaggcatgaaagaagcactatgggatgaattggttggccagttagctaaccacatagattagatttcacgtactaatgtcttccaggtatacacaaaacaaaataatgtgccaggtaaagtcaaagaaaagaaggggtcagaattgacaaataaacacattactgctatctccctttagaactacaaatgcaaacatttcccaaagccataccagttacacatttgctttcatttgaataaaaaatcaatgaaccaggtaaggtggcatgtgcctgtagccccagctactcaggaggccgaggcaggagaattgcttgagcccagaaggtccaggccagcctgggcagcataatgagaccttctctcaaaaaacaaaaattcaatgagagaacaaccatattaggattcataaaccagtctcatgtgctcctatggtctgtgaaaggcaaacaacaaccgtacccatgtgatctaccagcagccattattttcgtcctaagtctacagactcttccccagctggcacctctccttgactacctggcccatcgggtcaggactaaccaaccgagccctcatctcttaaaaagtagctgctaaaacttgcttttcaaaggggataaatctggtgccagaagttcc

SEQ ID NO: 917512 - DNA, 4001 bp, Homo sapiens
gagtgaatgaacagtcggtaaagagtatcacaccactcctgaaatctagtctttgacaatgaactatgacccatacaatgtgtgtagctcagccatgtggcaaaattgtcactgtaaaagacctaattatcgcattccttttgaaattgactaagataataattggcgtatctaaaaataattagcccaaacaattctccaaaatcattttaatatagtccatttaatacaaatgctttcctaaaatgtaaactgtgagaaagaacaatcatccagttgggaaatggagtcttcaatgattcatccttcaatatgatttctttaatactgtcgattttatgtccacctgatttcagtcattttttgtactgttcctcagcgtgtagtagagaatctgctttttaaggcatctttcagatctgattcaccactccttaaagaaaaatatatacaatgtaccacccttagatggaaaatttcttggggatctcctatatgaaatcagttgcataaatagggccagtgaggcatgaaacacaagatttcagaagtctctaataacaaccactaggcccacgttgcaaagaacaacttttttcggtgatgactcataaattatgatccctacatataagctcatgaggaactaatgaaacgaatttgtctcatcatgtggaaaactgtggtccttctggccacgcacaaaacaccaagttttaaacgcgcccacgttttgcttaattcgggacttccagcgggcattagcacttttcccttacagtctatttaaacgccctaggaaaacaaataccatcgccttggcaggcggtccccgcacagacagacctagctccagccacatacagatgtgtctggtgggctgaagtaaacaaatgacaggaaagctaatgctgcttttcaagattaacgtgcattcccagagacaagactgccacctggacacacggctggaaacgggagagctcgtgcctctcagaggagaaaatggagagaatttcaacagtacttatttaaagtttccaccttcacacacgcccctttcccccagcgcggggtcggggactcggcccagccagcggcgcgaggaaatctgcacttgacttccgtcctctcccaggcgggaatgagcgctgcccgccccggccgagacccttccttcctgcccgccgacccccacccctcccggggacccctcccgctcggcgcgcgaccagaaggaaatggagcccgcgcggctccgcgccccctccccgacgaccccggcccggggccgcgctctggctcgcgcgcgcccacccctcaccccggcacaggccgggcgcgcctcggccctcgtccccgcgtcccgagcggaccccagcagttcagccggggactcccggaggccggtgcccgcccgacgccgcgtctggcacggtcgcccactcaccgctaccctcgcgccgccctggcccaccaggcggcgccccctccccagccgcctgggccgctcacccccgcgctccccgcctgcgcgccgtccaaccgcccccgcccgggccgcccgggccgcccagcccgcccgcccgccccggcgctaggccccgcgagcggccactgggagaggcgggtccagcgccgcccgcccgcccgagaggtcccggcagccccggccgcccgctcgccgccacctaccatggtacagatggaggcgaatttggagactgtcattaggatttccatccggccagcgccatcttccacccaatcacagcggcggcggcgggcgggggaggaggggagccgggccgcccgctcgcaccgcagcccgcgggcggaccccgagccgccgcggacccaaccaccgagcccgctgggccgccgctgccgtcgtcgccgccggcgctcaggcactcccggcctcgggccccagcccccgcctgccggccgccggcccgcccccggctccgccccggcgcagggcgcagccgctgcctccgggcccgcgcctgcacgcgaagccgccctccgcccaccccgcccagcgcacaggggagcgggctccgccgaggccctaatgcccggcctgccaggcagcggcgcggccaggcggcgcagccccgcccacccctcggcaacccctccgcggcccttgtgcgcgagccggggaactccggtccgtccccaccccgcgcgcggcagagggcaggaccgaaggcgggcgccacctcctgcccgcgtccctgcggtcctagagccggggacccagagacccccgcgtaggaaggggtgcggcggggaggcgcgggggtggcggcggcgatctgggagaaccctggaggggaccagctgcgacacccaccgcgggcgaggggacggcgagcccccgctgcctaaacagaaaacggaggcgatgatctgggtaactacgggcggagtgggaggaaacctgctctgcacagttaagataacccgggtatgcgtcccaagcacttggtttgtttctttttacgtatattggatgaatcaccggagtcaaacacaacttagaaaaagacaaaataattaaacaaaaatgaagaggcaaagaacaaattacacatgtttaactctttgaattaagaagaaagataagtaatgggggaaggagaggagcgaaacctgttggcctgttggcgataaatttataataggcttctaaatatctgcacattgagctgcaaaatagggaggatctcaagccagcagtgatgatgatattaccagagacaggaagcccgcaagcaagaaaaatgccctgtgagaaatccttaggcagtgctggctactggcatgggtagttcctctttctccttttataaaattcatatttgcaccctgttcttcatgcctggcagctcagctttattttttcctatttgagaaagtagttcaagtgagtagaataacttcataaattattatgttagaaagcttgtgatattttctgattgaactcgtgatggggtacttttctgggttcccctaattcagtggggttgaggatctgaattcaggcagagctgtaaaatcagaaatgcctcacctcaagggttcaaagcactcaaaaacaaaaagcattcaaacaaaatttaagtgaaaaatagacttctggtacatgaatactgtttccatagtgattccattataagcttgcttggggggggaatgcagattgaatatagccaagccccatggtagccggactggatctccaagcgcctgcctccatggaagccaagagccctgataccccagccaggggctttcctctctatacttgcaagcatcacccacctgaattctttcttgctcttttctaccccctgtttggacaagggtttctacatcttagacctctagggcctacctgggccttgtccgagtgtcaccatgcccatctgtgtgcccgtcctgataaatagctgtggtcatcctgtccttcccacttgctgttctattccagcaaacaggtctgatgtgccagaattttagacctgcctccatcccgctaaccacccatatgcctccttgtccattaatccgaacatgtcacaggaacaaaagccactggctttacatataagtttatataagaacaaggcctttctaaaatgaatttctaggctgagtatggtggctcacacctgtaattccagcactttgggaggccgaggcaggtggatcacttgaggtcaggagttggagaccagcctggccaacgtggtgaaatcccgtctctactaaaatacaaaaattagccaggcgtagcagtgtacgcctgtaatcccagctactcaggaggctgaggcataagaatagattggatcctggaggtggagattgcagtgaactgggattgtgccattgcaccccagcctgggtgacagagtgagactctctcaaaaataaataaataaataaatttctaggctgggcacagtggatcaggcctgtaatcc

SEQ ID NO: 917513 - DNA, 4001 bp, Homo sapiens
taaaattagtttcttctaagaattaaatgagataaagcatgtaaaaagtttagcacctgacaaattaaagttactatttggtgctaattttatacttcattctgcgtagagaagcagtacacgtcgtatcattctgcggtactctcaaatgggaaactagtaggctatgtaccttgaataaactgtttttgatgaaaatttccatctacctgagggaacctagaaaactttttcaaatcaaacggttttctctttgtctctctcaattataaaatataaagagtctccaaatctgctctcctgattccatcacccaacatttcagcgggaaaaaccagataggttggtggttgaaatcccgaatatatagaatcccccaaaagaaaattcatttaataccagaggtttatttgtccatatgagggacataaaaaaaataccagaggtgggctccccagttcttcttccaaatacaattcactttgacttacatacaaaatcccgggggggattttacaacttaatttgaccctaagtaactgctcttcctcccttcaaaaacaatctgctcctccttcccatatctcacttaaatgtgggcgtctccatccttccaaacacacagactagaaagtcttgagttgttccctattctttatttccctcttcgcacagtaagtcaccaaattctgtggacagttctttggaaaggtctcaaatctctacctctttcccttccatatcactgtcaaaatgatgcctctacaagtctgagcctgtcaatgcttagtttaaaattctctatttactctagcctgattacagcaaactccgtccaaacagcccaatataacctaaaggtagtattatgacctaaagctcattgtactgtgaaaccaacctagctttccagttctgtcttcctcaactctacttcacccccagcatctttcttctaacatccccttttcatacttctgtgaaccacttatactccagaagccttaatgtgaattattagcccagcatgaacccagttagatagcacaatgaacgtgtcaaggtggccctgggaatcgcaaaaagtattcaattaaacttaattcacactcctgtgtgcaaaatggagaaacccagggaaacagctgttcgaagagggggccttaaacccacccatttgagctcgccctccgagagcgagtaggctcggcacgtgaactgtcaaaagcgaggccacaaccgacctggaagccgaggaacagggtcagctttctgcacccagccctgtcaggtaccaaacccaactgtcttgaatcagagacgaacaggaccaaaggaggtgagtttcaacacccaaactaagaagccgaaggaggcgcagggtccgttaaccctgcccatctccacgctccttggaaaacgaaaacaaactctggtttctcttcagcgttcacctctctgcgcccaaacggatctgtaagtccaactctataccttaatcatcaacctttcccacttgaaccccgtcccagcccagcccatcctttcagcgcgccgactaccccataggtcatcccagctctgtctcttttcccaatttcgagagcggaaagaaacccctccctcttctcccttacctgccgcgggcactccccttcttggtaccgggtcgatcggaactcctgttccagcttgatctccaccctagttgcaacgttcaacccacgttcccctcggactgctcctcccccactcgcgtctccactaggaaggcggcttccggcttgagtccgcggcaaaagagtcctccttcctgctgcacgctgggcctgaaaggacggtggcgtggcggggaaggtgaagacgtgagcacttccggtcgccctccgcagaggcgtggctgtccgccctgtggccgcagacgcagttgcgactgcggcgacgaggaggggcggggccggtggctgctgagcccgccatgtgtgagtggctgggtttggggaggcgacgtttctggaagctgctggaaagcgcccgagtggcggaggtggcgccagcggccagggggtggggcgtgattaaaactagtgcgcggctttctgcggagggattacgctgacgaaagagacctgcttgcgcgtcgctgttccgtggtccgcgcgagcgtggtcgggagccgctggttcctggggtgacccgcggaggtgggagagggaagggcttccgaagccggcgggggtgccatggaccctctccgccggcgcggccttcacagctgggccgcgccgggcatccgtagtccgctctcccaaagcctcggtggagctgaagctgccacagagtgcatgttcacaaagggtcatcacacacggagctgcccctccctgtctccctagagcccatcttcgaggccaggggcttttctaccaggattctggggtgtttctcctcctttcctccctcccagatcttctcacggtaaggggagcagcgaaagcgcagggactttgcattccacgacccgttctgactagtcaacagccgatctgtccctgctgctctaattccagctgccctgccttgttttaacttcagagaaagggggagttctcatttgataagtttaagcctttgctttcgtaggaaggtcatgtggcttaagggacatcgtgaccgcgtatgctatttctgcctgtgcattctaaatcttgggggcagcatattccagaagtccttttggtcgattggttctgtgtcctaggataacaatttgtagtttctgaccatttctttacagaaaaaccacaattggtattttggactgcggggttttttagtggtctcaaactaaatgattatattctggaataatgctgacaatttggatagggtggtgtggaggaaacaagtctcgtgtagaagaaattatttagtaaaaaggattttagtttttggtacttctgaatgcaaatggccaaggaatccagcagtttgttggggtttctccagacaaaaataggctggttagtttgtttacctttttctgttgctttactagattgttaatgtatttgtatatttaagatctagctagttaggtttttcttttttatgaattgtgattaaaattggagaaagtagtacttcctcctgaaatagacaaaactcagagggttgttttcttgttcaccactgctacttccatttttagaatggaatacactatttgtaaaaaacaaacttgctgagtattaactcataaattgaacaaaacaattggttcagttaaaatgtagctaaaattgtaagactgcaaaacaacatcaccaaactgaattgtattttttaaaacgttgtctgcaaagttgaattttagtctttcagtgtaaatttggtattttttcagaagaaaaattagtaacagaaacaaaatggaggcggggcttgagttgtaaagagaaaggaagggattttagtgtgttctgtgttttcgctctagagctttttcctcttgtaaaaggtagtacaagacttataaagggaagaactttggtacaggagatcagcagagattgactagaaaacccctttcgtttatattatagagtaacggtcccaagttgagaatactgtatacatttctggttattcctatatatttgaaatgcttttttctacatatcctggtcccagagagagtgcagtaccttccagtgggattaaagctaattgcgtccatcgcttgtcagcagtgtgggacagaaattttattgacctatttccagttataaactcacatgatttaaagggaggaagcttttattaaattaataactaacgaacagctgcagtagttcagtgcttctgtatgattaggattttctctttttttctctcattttagccactcacgatgtcagctcgtgcaccttctactaagttagattccttaaccacaatacaagtctttggcccaaacctgggatataaaagctacttgc

SEQ ID NO: 917514 - DNA, 4001 bp, Homo sapiens
cccctctgggagaaagccaacaccattctcacagctgccctgctcccaaaaccctaggtagtcttctcttcctccctcatttaacacatccagttaatcaccaagtcctggtcaatactactgcagaatgtttctcaagcatgttcacctacgaagttcagctcatgagcacctccatctgggctgctacagtaggccggctcatcttactgcccttccagtcttgctctccctgctcttcactgatccactccccatgtggccagaatggactggagaaatcagaaagcttttacgtgcaatacttaaaatcctgctatttttttccactggcttaacctggcctatatcacctctctgttgtcttcctgctgaatgttcctattgatgcatctgttgtcactcctgtcacagtgctgttccctctgctggagactctcccctctctcctggctaacctctattgttcgggtcctgctcaagtgtcacatcatttccttgggcaactgttccctgcccgcacaagtctgtgttaggtttctctttggcgctttcacatcaccctgcacttccttagcatagcacctggcacacggcacagcacggcacggcacttgcctgtgtagcctgttggtaccaccagagggtgggaagcctctgacaggccaagcagctcctgtctccaccacatccctagcatccacccaagcgctcagcagagtgaatgcttagtaagtttctatggaaggaagcacaggaggtcagatcccatgcaacaggttgggtcaacaagttcttgcttaatgtctgggcctagcactacactactaactaggagtaaaaagagtataagagaaattgaagtcttagtttaggaaatgtcacttttatgttatcctcatttcccctaacaactaacagtgtgaggcacaaagcgcttgagaaatatatgtggacccaaattaaacacaaagcagtacttgattttatagcaaaatgtgtgcttaacaggtcagaatagagatagcagtttgtgccagaataaacaagaaaggctaaagtgcaaggagatttaagttgaagacttatgatgcaatctggcacaaagaggagagccattccaatggtgagggtagaatcaataaaagactaaaagagttactgtgagaagcccctatgcaaacagtggttctcaacttttgatgcataacagaatcacttaagcagcattatcaaaatacatctacctgggccttgtccagagattctcatttggccattctgtaggattagggtagggcccaggaatctgtaccagtaagtatgtagtggggttagatggagagagaaaatgttgctgttaagagcaggggctatctgggttagaatccgggctctaccacttactgtgtaactgaactcgagcaatttctaaaccttcctgtgcctgagtttctttatttataaaatgggaataacaataacacctatcaaacgggtttagaaaggcttaaattagataatacatgtaaaaatctcaacacagtggcccacacacaggaattggtcaataaatactagctgctattattaactactatcttacaaggtctcaagtgaggaaagcacatttggtggatgagggcaagagaattagggcatgatgcagatttccagagtattatcattttatcaaaagaacttaaaatgtgtatctcatggcaccaaacaagttgtttaaaggccaaactcaccaatcccaaaatgctcgttccacatggtatgcagaccaattgttgcttcagacaaataattctttaattcatcaaatggaatgtttattttaaattccacatattcttgaactcctaaatcctcagacagccttctcagttggtttaccctaagttcatcatctttgttacgacaacctccaatgaggacaagtttaagcgaaggaggtgactcaaccatcttcttattcagcaatttagcaaaggctctgatctgcaatggatgattcttttccggcctaaactggccaacagaaaccagcaaatgtcctggggtcatctttttctcatgtaagggaatgtccagaaatgtctgcacatcacaaggtggataaacaatgttagtgcaattcccaactttccatagtgagagaatatggtttagtgtccaagaagaattgaccatgactacatcactgcaagaaccaacaagtccataaataaaagcaaataaatagtagtagatgagctttactttgctgagaaaaggattcctggtaatgaaggctgcattattaaatccaatattttgattcttcactacagagagcatgtcggtgctgatagtaggataatgaacatagcttccaacttggcaaccccctatatacttaaacagaggaagcgtaaaagcgtatcccattgaatcaatgtaaacatcaggaacacactgcattagagcttcccagccaagaaaaatggatcctagactttggcccagcagtgtgaagtgaggatacagtgaatcttccacaagatagcgtttccttaaaaaaacaaactgcactgggtgaattaatctgatgttaaatcttctgaaagcaccttctagtatctgttgaccgttgacattaacatcgccggtataaacaacataaactgcttcaggatacctaaaatagaatgtaatggttaagaatatattaagttacaaaaattagccagacacggtggcacgcacctgtaatcccagctactcaggaggctgaggcaggagaatcgcttgaacccaggaggcggaggttgcagtgagccgtgatcatgccaccgaactccagcctgggtgacagagtgagactccatctcaaaaaaaaaaaaaaaaaaaagcctgctacctaccctgagagactgagagccgagactgcatcactgcactcctgcctgggcaacaagtgtgaaactccgtctcaaaaaaacaaaaacaaaaacaaaaaaaagaatatattaggttaaaatcaagcaaaaagttgtagataactattttcttacagttataaagaagatttgattttttttttttttttggagacagtttcactcttgttgcccaggctggagtgcaatggcgccatcttggctgacaatctctgcctcccgggttcaagtgcttctcccgcctcagcctcccgagtagctggaattacagacatgcaccaccacgcccggctaattttgtatttttagtagagtcagggtttctccatgttggtcatactaaaaatgatgttttctacattttttattgaattagaagtacagtccttcaaatgagaccatgacttctagttctttgctatttcctccactgagggtttcacacagaacaggcatcaacagtaagtgttgatttatgaatgagatggtctaaagaaatactaaaaagttttgacagtgttcttagtaaaaaaaatggtaataaaatactataaacaagaattaagattcaacaaacctgtcttcagataggatcacaatactaaagcaatactcagggtttttatctgaaaaatgcaagtctttaaaagctagatcttgtgcctatatcacaattagatataattagtatgaaaatatctaaaagtatattctttaatgacttgtaatactttggtctccctctgtttataattattctttgagtcataaaacatttattggctgggtgcagtggctcacgcctgtaatcccagcactttgggaggccgaggcgggtggatcacctgaggtcaggagttcaagaccagcctgaccaatatgtgtggtgtggtggcacatgcctgtaatcccagctacttgggaggctgaggcaggagaattgcttgaacccagtaggcggaggttgtggtgagccaagatcgcaccactgcactccagcctgggcaacaacaatgaaactccatctgaaaaaaaaaaaaaaaaacaaattta

SEQ ID NO: 917515 - DNA, 4001 bp, Homo sapiens
aaactactaatggttgttattttacactgttttaaatctatcacagctatactgcctgccagcaaaggtgttcctagtcttcaaattggagttccatagaacagtatcatgccatgctctgcaaaagcatgacttcctagtgctccctcagggagtggcactggaggagtctctgaggacagatctaacactgtcaacattcggttcctctcaaaggggaggcaaaatcaaaacaccgaggaaggggaggtggattaaccttcccattttaaatagtcacaaagatgtaaattggtaagaaaggagaaaaaaatagcttgtcactccaatccggggatggaagactcatcttgagatcaagatagttaaagtgccaaggcaggctgggcacagtggctcaagagcctgtaatcccagctgtttgggaggcccaggcgggcggatcatttgaggtcaggagttagagaccagcctggccaatgtggtgaaaccccgtctctactaaatatgcaaaaattagccgggcatggttgcaggcgcctgtaatcccagttactcaggaggctgaggcaggatcttgaatctgggaggcggaggttgcagtgagcccagatcgcgccactgcactccagcctggcgatagagcgagactctgtctcaaaataaataaattaattaattaaattaagaagtgctaaggcagtaagtgaagttaggtccaagcaaattatttaaggaaaagacctttactcactaatacaggcaacacagcccatagaaaatgccctaagagagtcagaggacctgggtccaatgtcacctgtgcctctaaatagctgtaagcacttaccaggaaaagctgagttgaggaacttatatcaaagtacagcggaaagtgtcgttaataaaacggcaagggaagagaggtagcaaattaaaacttctggaaaccaaaaatgcttgtgggtaaatgagttttaaaatttttctaattccagtttatccatttcaatccaggacaagatatttcatagtttcagtaaagtatctacaaaatatttacttacacttcctatttctcctctcgatttgcaaacgcaccttctaagatttatgcttgcactacaaggcacggtctactattaatataacactttacaaaacacgctcagaacgcctttctaaagcaattagaaaacaaaacaaaaacccaatagcctttggcaagggcattccaatgaagcactgatacctctttaggaaatcctttcgaagcaatccctcacccctctgcccagatatgctaatccctccgactgcataaggtccaagctaaagcttccgctggggcacggactgtacggccaccgcgccctcctcacagaaaggcgaaacggggctgtccggtgccgacgccgaggttggtgtcgtcagggggtctggaaccacgccaaggaagtcgactgccggatcgccgcccggcgcccgcagacggcgagcgctccttctcccgggcactgcagctgtgcgctcccggaagcattccgggcggagggaagcggccgcgatccgcgcctgctgggaaccgtgccaaagttgggacccgcgctggggaggcagccgagcgccccacgccacgtgctaccgaccggcggggagcgcaagagcgctgcaccccgcacagaggcctgccgggccgccgagggccgtgagctaagccggggaccgggccgcgccgacccgggccgcgctgagccgggccgcgcgcccaccgggggtcccttccgccagcccgttgggaaggttggcagacgccctaccttctcctcgccatcgtagattcgcaccccgcgctgctggatcaccagggtctcgttgatctccaggaggccgctggtccaaacgaagcggtccatggccgctgccacccagccccggccctccgaggccgcgagcagcgcgccaggcagcctgcggcgccccctagcgtcggacgggacggaagcgagtcggggcgggtgagggacggagggagcggcctggcagcgagcgggcgcggctgcgaggtgcgcccggggacgtggagacgtgcgtggagcgccccctggcggtccattagccgccggcctttcagaacccttgatcagcaggcggtccaccccattctaaattcagagcttacagggacgcgagggagccccgaccacagcttggacttgcttattgtgcattatgcctgcatgtttgtggcagttttcttgtcagtgcccagaatgttgctacattcgctaatgattgtaaataatcataacccctctctttcaaatgaatatttatggcacgcattgtttctgtacagctgcagtcagtactacctgtgctgctctttttttccctttaagattatattgtaacacaaaggataaatgcttgaggtaacggatacctcatttaccctgatgtgattattatacagtgtatgcctgtatcaaaatatcccatataccccagaaatatatacacctatgtacccacacaaattaatttttttttaactgggggaaacagattttatttaaccgggcttgatgcgcgcgcctgtattcccagctgcttccgaagctgaggcgggaggattgcttgaacccaggagtttgacaccagtgggcgacatagaaagaccctttccccctccaccccaactcccccacgccactccactcccccacccccaggctcagaaaaaaaagattatttttatttaggcattttcaatattaatacagacctcatgcgtgaatttacatttcaatatgtagttcctctataatttagctgtttgttggtctgcgcaaagccatccatggccgctgctctcacccaccaggcggcctcgtgcccctagccatttcatttttgtattttgctttataaatggaacacctggccgggcgcggtggctcacgtttgtaatcccagcactttgggaggacaaggcgggcggatcacaagtcaggagttcgagaccagcctggctaacatagagaaaccctgtctctactaaaaatacaaaaaattagcccggcgtggtggcgggtgcctgtaatcccagctactcgggaagctgaggcaagagaatcgcttgaaccctggaggtagaggttgcagtgagccgagatcgcaccattgcactccagtctgagcgacagaacgagactctgcttcaaaaataataataataaataataaataaataaataaatggagcagcttatagatgtccttctacaattgatacatatttttctctttaggattattttcttacagtgtcttcctaaaatagaatgactgctttaaaggttgtgaacacattttagagagcctaccacttattggggtcttaactaaggctgcgtgcccacgtgggcagaggggcacaggggcagagggacagagggcaggcttgctctctgcccccagggctccacatttcccccagtcgtggagtcagtggtctgtggctaggcattaaaagaaaggaaaggctctttccaatgagtataagccatctctcccccgaaatgaattgctacttttaccgtgttccaaaatcctgtgtgtattttggtctatttctaaacagtgtcttctgtatttcatatctttcaatttccatcatgaccatatacccaataaccaaaagttctttgaaaacatttgatttgctgtaatatgctatcaatatatatcacaatttaccatcattgcctgatttttgagcatttgattgtttaccaactttttagtcttttttaattgaaagtaatgtgacctaagcatcctaatcagatgtggaactgtgcagttatgcctgggctttgcaattatcaacatgttaggcagtgaggacatttgcaaggtatgttttctgcccttgagggatgtacagtctgtaggacacaaatagaagcctggcatatgatagctgctgggataga

SEQ ID NO: 917516 - DNA, 4001 bp, Homo sapiens
agtgaggcatcctaaaagggagactaatttcaccagatttgggggctaatgtgtgtaaccttgtaaagtctctagcaccacaggaggtctggaaaccttccaaaagatgaaggaagccaggataccgcaccttcccccaggagtcagcctgtgccccattcagcctagggaccgcatagctgcaaggcagctcagcaagtcactaagtccagctttggggcacagtggtaaggagactcctcttagagctccactccaatttcaagcttttagaagagttaattctggactagatcacagggtctaaagcaatgttttccccatgatttgtttcttaaacctctgacatctatatacttgtctgctaatacaagcagcaaaaattttaaagtaaaaattaaaacttgctgcttcaacaatgtatctttcatataaaactactaatggttgttattttacactgttttaaatctatcacagctatactgcctgccagcaaaggtgttcctagtcttcaaattggagttccatagaacagtatcatgccatgctctgcaaaagcatgacttcctagtgctccctcagggagtggcactggaggagtctctgaggacagatctaacactgtcaacattcggttcctctcaaaggggaggcaaaatcaaaacaccgaggaaggggaggtggattaaccttcccattttaaatagtcacaaagatgtaaattggtaagaaaggagaaaaaaatagcttgtcactccaatccggggatggaagactcatcttgagatcaagatagttaaagtgccaaggcaggctgggcacagtggctcaagagcctgtaatcccagctgtttgggaggcccaggcgggcggatcatttgaggtcaggagttagagaccagcctggccaatgtggtgaaaccccgtctctactaaatatgcaaaaattagccgggcatggttgcaggcgcctgtaatcccagttactcaggaggctgaggcaggatcttgaatctgggaggcggaggttgcagtgagcccagatcgcgccactgcactccagcctggcgatagagcgagactctgtctcaaaataaataaattaattaattaaattaagaagtgctaaggcagtaagtgaagttaggtccaagcaaattatttaaggaaaagacctttactcactaatacaggcaacacagcccatagaaaatgccctaagagagtcagaggacctgggtccaatgtcacctgtgcctctaaatagctgtaagcacttaccaggaaaagctgagttgaggaacttatatcaaagtacagcggaaagtgtcgttaataaaacggcaagggaagagaggtagcaaattaaaacttctggaaaccaaaaatgcttgtgggtaaatgagttttaaaatttttctaattccagtttatccatttcaatccaggacaagatatttcatagtttcagtaaagtatctacaaaatatttacttacacttcctatttctcctctcgatttgcaaacgcaccttctaagatttatgcttgcactacaaggcacggtctactattaatataacactttacaaaacacgctcagaacgcctttctaaagcaattagaaaacaaaacaaaaacccaatagcctttggcaagggcattccaatgaagcactgatacctctttaggaaatcctttcgaagcaatccctcacccctctgcccagatatgctaatccctccgactgcataaggtccaagctaaagcttccgctggggcacggactgtacggccaccgcgccctcctcacagaaaggcgaaacggggctgtccggtgccgacgccgaggttggtgtcgtcagggggtctggaaccacgccaaggaagtcgactgccggatcgccgcccggcgcccgcagacggcgagcgctccttctcccgggcactgcagctgtgcgctcccggaagcattccgggcggagggaagcggccgcgatccgcgcctgctgggaaccgtgccaaagttgggacccgcgctggggaggcagccgagcgccccacgccacgtgctaccgaccggcggggagcgcaagagcgctgcaccccgcacagaggcctgccgggccgccgagggccgtgagctaagccggggaccgggccgcgccgacccgggccgcgctgagccgggccgcgcgcccaccgggggtcccttccgccagcccgttgggaaggttggcagacgccctaccttctcctcgccatcgtagattcgcaccccgcgctgctggatcaccagggtctcgttgatctccaggaggccgctggtccaaacgaagcggtccatggccgctgccacccagccccggccctccgaggccgcgagcagcgcgccaggcagcctgcggcgccccctagcgtcggacgggacggaagcgagtcggggcgggtgagggacggagggagcggcctggcagcgagcgggcgcggctgcgaggtgcgcccggggacgtggagacgtgcgtggagcgccccctggcggtccattagccgccggcctttcagaacccttgatcagcaggcggtccaccccattctaaattcagagcttacagggacgcgagggagccccgaccacagcttggacttgcttattgtgcattatgcctgcatgtttgtggcagttttcttgtcagtgcccagaatgttgctacattcgctaatgattgtaaataatcataacccctctctttcaaatgaatatttatggcacgcattgtttctgtacagctgcagtcagtactacctgtgctgctctttttttccctttaagattatattgtaacacaaaggataaatgcttgaggtaacggatacctcatttaccctgatgtgattattatacagtgtatgcctgtatcaaaatatcccatataccccagaaatatatacacctatgtacccacacaaattaatttttttttaactgggggaaacagattttatttaaccgggcttgatgcgcgcgcctgtattcccagctgcttccgaagctgaggcgggaggattgcttgaacccaggagtttgacaccagtgggcgacatagaaagaccctttccccctccaccccaactcccccacgccactccactcccccacccccaggctcagaaaaaaaagattatttttatttaggcattttcaatattaatacagacctcatgcgtgaatttacatttcaatatgtagttcctctataatttagctgtttgttggtctgcgcaaagccatccatggccgctgctctcacccaccaggcggcctcgtgcccctagccatttcatttttgtattttgctttataaatggaacacctggccgggcgcggtggctcacgtttgtaatcccagcactttgggaggacaaggcgggcggatcacaagtcaggagttcgagaccagcctggctaacatagagaaaccctgtctctactaaaaatacaaaaaattagcccggcgtggtggcgggtgcctgtaatcccagctactcgggaagctgaggcaagagaatcgcttgaaccctggaggtagaggttgcagtgagccgagatcgcaccattgcactccagtctgagcgacagaacgagactctgcttcaaaaataataataataaataataaataaataaataaatggagcagcttatagatgtccttctacaattgatacatatttttctctttaggattattttcttacagtgtcttcctaaaatagaatgactgctttaaaggttgtgaacacattttagagagcctaccacttattggggtcttaactaaggctgcgtgcccacgtgggcagaggggcacaggggcagagggacagagggcaggcttgctctctgcccccagggctccacatttcccccagtcgtggagtcagtggtctgtggctaggcattaaaagaaaggaaaggctctttccaatgagtataa

SEQ ID NO: 917517 - DNA, 4001 bp, Homo sapiens
tgtcttctaaaggcaaggaaacagaataattctcaaatagctaaaactgtacatactaagaataaaaaagctaacttttattgagcattaatatgtgccacagattatattaattaataaatcctcacaacaaccataatagatatattcttcttatccttttacagttaagaaaactaggacacaaagttaagtaacctaccctcaacgacccatggttagatagtggataagtggattccaacccaaattgtttaactccaaaacccaacctatagtttatgctatacttccacctttgacctctgccttctagggcaaaggagcaaaaaacaaataaagaacacacaaaaaatgtaaaaaacaaatgaataaacagcccagaagtgagagtaattgagaaaaagcaaaaaaaaaaaaaaaaacaaaaagtaaaatttgaaattgcaacactatggtgggggacgggggtggtgtatgtcttcaatgaataaaacgaaatacgtgggacctaaatatgctttttttttttttttttttgagatggagtcttgctctgtcgcccaggccggagtgcagtggctccggtcactccaagctccgcctcccgggttcacgccattcttctgcctcagcctccggagtagctgggattactggcgcccgccaccacgcccggctaatttttctgtattttctttttagtagacacgggggtttcaccgtgttagccaggatggtctcgatctcctgaccccgtgatccgcccgcctcagcctcccaaagtgctgggattacaggcgtgagccaccgcgcccggcccatatgctcatttcttagcaaggaaaactgggggttgcggggaaaatgcaagaggacaacgaaacctacaatttcatagtgaaaacctgttattccaagcagcactgacattgacaaaatcttgtctggaatcacttcaccattcaagggtagcaacaacagatatcctttccttaaccatcacagtaactctaactccaccaacacacaagaaaaagaattcctaaaaccagctcaagtagagccaaaaaatactgagcttagaaatcaaagcatgtgattctagcatagtaattagttgtgtgttctccagcgaatcacttttcccttctgggtttcaattacctcatttgtagaggcaagtgttttaactaaattaaggtgtaactgtcagctctaagaattacgtgaaactttaaggaaaactcctgtaaaacttggaaaggctcggggatgcatttaaaacaccgtgaactatgggttctttggcaagaatgttcccttctaagccgccacaagccctggctagaacatgacacagaccggcttccaggcccttgaggctcagagagcaaggtcaaatccagctttcaataattccatagggctgaggcattaacctctacgagtattataacctaagtcagaattctgggggtaaaggcagcggcaggggaaggagaaatcactcttctaggtcatcagaaaccttagtccagacccctcgggttgcagaatcaggcacagagagggcgagcgccttgcccccacgttacacagcagttagcgccgaggtcgggactagaacctcaatctttcagctccccgctcggcaaacggtccttccaagcgcagcgaagcaacagagaggaggggcgggggcgcgcggggacccggcacggagcgcaggggcaccagggaggacaggggcgcaccccgagttacctgtgtcggcccccgagccggcgtgcaacagtctgacctccggccgctgcctgtcgccacccggcctgcgctgcaccacctgccgcaggagcagccgcatgcgccgcgaggccgggccgccgtggcctccgggtgccccgaggagtagaagccgggattgcatggcgccgggggggctgtcggggacggcgagggggctcggggatcgagcggcgtcccgtgcaggcaccgtgaggcagcgcggagaaggggacaggaagcggcacctagccgagtccgccggaaactccttcccccgcggcgcggccggctcagtagactcagcccggccctacccggccctgcatggcccagacgggcggaaagagcctgcggagctccagcccaaagagccggcaccgtcccgggactgcccgcaccgcgggggtgctccgagctgcggcgctgggctctggcaagcgcctcgcagtccgtgagactgtctgttcacctggatgcaccaggccttcacccgccgtttccctgcgatcccacagaatctcaggagttcagtaaatgccaagggttttaggagcatttgtcggtgtgactcttcagatgcttgccccaagtcttcgtttcttagttaaaggcccagtaagtatagggagctttccctgtattcggcttcagatttcggaaatggagaaaacatgcacaagatgatgggaactttcacaactgtcttgattcattgtaaccacactagtgtttccaaaccgtacgtgaaagctttaccctttgtccttttggtggtggttgtttgtttctgtgttttattaccgcttcctaaattctaaggaaaaaattcacatcttagtgatagatggaaattgcttaaatatcagaaaggatccagatcaagcacttttctagtcatgctgtaatacaaaagttatataaagatgatttatgtctttagtaaaggaaaaagtaggacactggctaaggctgcctccctcttgtacattccaacatcggaaatggtcctaccacaaagcaaactaagcctaatgtaattagactgcatccccaaaatgtcacagtgaattgactaaggcaaaatatttgagacaagttatacaagcaaacatcaaaaagaaggcagaagacctcactttcagctaaagaccttgctaattctagagctgccactgtctaaatacatagcacctaccctgcgcctgaccctgtgatgagtgctgagaagagagtgttagagtggagactgtaaaagtcaaacaaggctaggtaaggaaggctttgggcatccagcggaagaacttgaggaatgaaggctgaaccaggcttctaacctagatgaggagacagtgaaaataaaggtaataagtagttacacaatatattatgacttcgtttcatgtgtatcttctcatttaatcctcatagcaaccctaagacataaatttaggatgtaagcttataaaatgcttttcctactttgagcacattgtatgtatcaagattttaatgaattatcccatttcacataaaaatgctttgaggtactattattatcctccgttttacagatgaagaaactgaggctagaagaattgaataccttggtcaagatatctccatttaatctcgctggaactcagtagacacctgaaagaatgggagaacaacctaaggcaattttgcaaagtggttgatataagcactaagagctcttggagttaagacaatggagagatcaacacaagttagagcattcaacaacattttttgcctagttttattttttttagagacaaagtctcactctgttgcccaggctggggtgcagcggcagtattatagctcattgcaacctcgaactcctgggctcgagtgatcctcctgcttcagcctccctagtagctgagactacaggcgtgcaccactgtgcctggctaatttttgtgtttttgttttcgtagcagtggagtcttgttatgttgcccaggctggtctcaagctcctggcctcaagtgatcctcctgcctcagcctcccaacgacaacatttattgagtaactgctgtataaacagtaccctgctagatactgtgaatcaatgggctcacattaggtattgatgataaatatgcaaataaagaattgcaatacagtgagacacgtgtcaagagatttaggttcaacatactgtggagtggattgctgcacctg

SEQ ID NO: 917518 - DNA, 4001 bp, Homo sapiens
ccttggaattccaaagacgatcactagtactagcccgtgagtagggacaattcatttaatacttgcattataacgcaattgttttaatcaaaacatcccaataaccaaaaggttacctgccatacataggtttctatgggaaccgtaacgtgtgactacaaagacacactgacaagagataggaggttacaatgttggcatgaccacttagcaaagtgtgttccacctttgttttcgtaattgttgaagatagtgaagcacatcattgactattaggttgtaaattttaaagcaaacagattttttaaaaacaaatgctattaagcaacttcatgtcagccaactggaaatgcaagaacaatttctatatgtacatagttctagaataagcacaggttggaaggtaaatataatagttgaccaaactttccaatatttaaacatgtgaaaagacacagcttttgtgaataccaactaagaaaatctttcaagatgaagaaaaatgagtactacactgaagtcattagaaccctgggagaagggagctggagaggacacaatgagaatgcctttgggaaaggtcaaacccagctttcgtttgtttaacctctcaagcagataaaagaactagctttaaagaaccactgcattgtttaactgctagaaaaggagagttgggtaaagcacatataaaaagaagcaatagaatttgccctagagacaatagaaagattagtcaattacaatactttgaacttagttttgatagagtcgcattttaagctttagataaacctaatttttaagatgcaaaatatttcaaatagctatcctctcccccttataaaaagtagactctgaatcttaaaataccatgttctgctatgcatttaatttgaagaactgcgaaaagtagtctttttaattttcagtttttgaaaactcgagactgttgctggaagtaaaccgctaatttaaaaattaaccttaaaatgagaaagaattcctatgatgctcccattgatccctaagcccatcacatagtttctgaataattaagaactctcgtctccaccagggaactctcccttgcagaggggccaaatcaagaagcaatcgccattgcacgtcagcaccacaaactgagaggaagcttctgccctcgctaaagcccaggcgcgcgggtaaagacccccggggatgataccccgcgcgccgcggctccgtgcgcgcggtcccccgcactcgcgggccgccccacctcctcccctgcactccaagagtccggcctggtctccgaggccgggagccacgcggcaccgcagcctcgagggagaggacgcccgcaaccaacacgcacgcgggcaccaagagggcacaggccagggcggcgagggccgaatggggccggggggcacgcggagctggaccagaaccagcgagggcgcgcagacactgaacggatgcgaaggtcccggacgcggagcggcccggggcgtcgtgcgtggggcgcgagcggaggcccgggcgccacttacggcggggagggcgggtggctgtcccgagtccagggagcgcgcaccggacggcaaagggccggaggcccggaggcgcgggagagaagggccgcctggccgcgccgtgacggcgagaagcccctgccagcgcgggagccggccgggagaatgcggccgggctgcagggataggcgcgaggcggcgccgcagcccgcagtgggccccgccgcccggccggagcgcgcggcgatgcagcaacttcagttcgccgtggggccgcccctcccccgacagccgcccggcccggagccgagagggccacagcagcctacagcggagagccggggcgaccgcagccctcactcaccggtccgcggtcccgccgccggcgccggggctgcgctctgagctccatggtcccgccgcgccgcggccgcccggcgcacccgcctcgcaccacaccgcacgcagcggcgcgagcgacgccgcctccggcccgtccacggccgcggccacgccccctcccggcgggggggctcggccggagcaggaggggggctcagtgccggctccaccaaccagggccaactcacggggccgcttcaccaggattggcgagtgcctcggccaatagggagccggcgagcgcgctgagcgacggtgccgaggggcgggggattgcggaggcggtggctctcacccttggtcctccgcccccagctcgggatgaggcttaggcagcgtcctttccagcgaggagaggtggggatacttcgggccaagagacccttgtatcacctctgattgctaggtgcccattacagtacctttgagtttgcgcttatatcctaatcctccctgggtgttgagggctcctgcacagaggtcctctacctgtaaggtgtcagacgtcctccagggctgaggcttcaggcaaccctgagaggactgtagccctgttcatgggttggttttatgccctgctcaaattcgttagcattcttaaaatcttcccatctccttcaacacagattcttctgtttttatcaccctataaccaatctctctccaccctagatgtgaggaaatccacaatacttattaaaactaagatatccctgaaactgccagctaagccctgccacagtggaacatagccacgtgcgaccagatgactgaggcataaacaaacttaagaaaaagaaaggaggaaaggaaaggaagagaagaaaagatagaaaagccaagatagaaaagctaggtcacaaaggaaaggggtttaaaaacatctaatagaaatgttacctttattttaatttgcatgcctttattctttttatttaccaataggatcactaaattgaaaaacttttaggaaaaaattttaaattctaatgaatagttcaagaaacactaattcaagttggtttgctcttttctttacagatgtgtaataatgatcaacatctagctagagacaactaaaagttggaaaaaatgaatagcagttaataatttcaccaaagtttgcaacaccagaaatgcagtagaaaaatcatgcagccctcttcataaaatgtctaatctattaacctgcattacttccaaaggagggattttaaaagctctttttaaagatgacgtatattcagtttccataaagtgccatcattttaaaaaattgctggtaattaacaaggtaaacaggattttggtgaataattacagtgacccagtattttaaatattgatactagagtgacaaatgtctgctgaattgaaagctaaattggcattcaaattaaaatgactttccttcatttcatcttcacttacccaggggaatggcttccatgtctatgtttaggtcattaatttagaactcaaaaatatgaaagtatagatacccagagtgttttcaaggttgctaatcatatttccctggctgcttccctcttcggtgaccccagccttataaaccgctgctacacttagtttgcactcactgttagcccttaaacacatcatcccaaagtgttcaggtttgtttcatataggtcagtcttacctctctaattagatcatcagttccatgaggataaggcccttattttacagtcctctttcctccttttataatgcctagtacagtgctgagcatgtggtaaatatgattctattcctagtgttgtggttcatggtacaaataaattatttcaaatatggtcttgtgtgaaccagtcctttaaataaaaactgcttagagcagtcttgttagaggattagagcccaccgctaataagtgcctcatccttaataaaatgttgctgcatcagggagtgaattggtgacctgtaacagaatcttgactaaaagtgcctactaaataggagtgcttcttatcacaaaaccagaaacctggagacagccacagggcttctgtaatatctcttctatggtgtcgttgtgtctcaggctctttct

SEQ ID NO: 917519 - DNA, 4001 bp, Homo sapiens
tcatggtatttatttataaggatagcctaggtaaaatagtgaagaactttagcaactatccaaaaagaccaaaacatcaaaaaaaaatccaaatcctaaacaccttgcaggtaacaggaaataaatgtctacagaagaaatccacagcattgttaaaatatgagactactattctttgtgcatccaactttgccaagtaaaaacggtatcaacataaaatatatttaacagataccctagtgtttatgtggtatgtacatagtattttgacatgcaagaggggagaaaaatcagcggtgtgctttttgctttacatcttcaaaactggatctcaactatgagacagactaacaacatacctaacagagttgttactttgtttcatgagaaaggaaataatggtgttctttcaaatttaagcatctaaagatacacagctctgcattaaatacacttgattatttctagaccacaaaatatacaagaaaaactaaacatgttgcttttattttttaagggctttccacaattctttgggtatgacagtattatgaacaccaccattataatataggtgcttcataacatgaatgatatgaccaactcattgcccatttcccaaaaggccacagagaaataatttaatatataatcaaagtcaggttgatgaaaaggaagaaggctcacagctttcataggggactgagaagacagaaatcttctgatgttttgaaaatgcaagagcaatgtacataaaagtgctttgtaaactgagtttacatcaaaaaggagcacttcattcaacacaattattattagaatctctaacagcggaattatcatacaggcctattgtctgctatccagcacttgcagtaatcacagaatttctttggctgtgacttccagtagtccgccctgaaaaagagagacaacaaggctaagctcatgtaaaacttaaaaaaggttaaattctgcatgctttacagtttttaaagtttgaaatatatgcccctgctactgaatcttgtcttgttatgtatagtcgttttattatttatctggttggagcacagtcaattgaaattctgttgccagcggagtagaaaaagtctgtatctgattcattacaaaactcccttcaataaaatggctttcaaaaattcctcacttgttatcgtcatcgttatgaaaaactaaggaacatcttagaagaacatttatcctttctggctttgggggaggttgctgtaatggaaacctgaagaaactcataaagtttgccttaaatcaagttattcccaccaagagaacaacgtacaagactactctggggaaaactgtagttcctcccagactctcagttaaaacaaactgttcttgagcctcaaggcaagagagaactggaaaagccatgggacttcgtagacggccgacaaaaaaaaaaaaaaaaaaaaaaaaaaaaccattacgctatccagggctggccgcttccagtgggcgggggaggccgcagcccagccctagtttcacaataccctagggttcaggggcttcggaaacccaaggggtgcatgcgacccccgacagcgtcgtagagagagcactgcgtcgcttcacccgcggccgtccaaccagccccctgaaccggccgccggcctccccctagagcccgtgccccataccccagggcgttcagcggggtaacatttctaccccgccctgagaaccggccctgcaggtctggggccggtcccgagcgagttaagaacgcgtctgtcacgcccccggccgaagggcgggaggagaggaggggaagacccgggcgagaaagggcggcccagagaaacaacacctcgttgttcagggcctgagacccaactcacatgactgcgccagccgctctgcaagtcgtccagggttccactcagactcgcgctttcccagcgggacgagtcgagctcttccagccgcccgatgcccacccgaacctccctccgatccagacaccttactcagtccccgggaccagcgttccgctgttcccaactacgggtgcccagacgatccaatccgcgttcgaaatcgcctcctctcccctccccctacaggggcggtactcccggctccaaagaggtggggtcggtataaaggggttgaggtcaccgggaaggggtaaaagcgcgacgggacctgagctgaaggacgggatctcaagcctcaagtccctgcgccatcccgccgtctctgtgtcctcccctggggcccaaaacctccatcctccttctaggctcgctggctcaaggccaaggagctcagcgcgccgcctccgcccggaacgcaaacagctgttcccagagacgtctccgctctcaactttgccaactactccgcacgcactttgaccagcggagcaaccgggacctgtgggtcggggtcctctggcggagttaaaaaaaaaagaggtgaaactgcgggaccggcgctgcgagtcgctaggcttcgcctcaaactttgctgttgcagcggagcggccccgcccctcctctcccctacgacgcccacgcgctcggatggggcttgttccctagctcgggagcgtgtgggcagcagcagcggcggcggcggcggcggcggcggcggcggcagcagcagcttcagtagcgcagaggcggcggtggcgagaggtgcggcgaaggaggcagaggcacttatgcttgtcaggtgggtcacggcagtttctcatagcacttcccatatggtctagcggttaggattcctggttttcacccaggtggcccgggttcgactcccggtatgggaacgcttccttatttttctttttttttgcaactatcggtttggagggctgactttttaaatcttgtgttctggctcctttcttgtccccgtctgggtgagtttgtagaaaataagcattactgtagttagtggcgccaggagctgggctgcggcttttggagcctcgagtgccacgccgtgcctgctggagaagcgaatgcgcttccgatccttctccctcccgcctccggctcacggggctggtgggccctgagggagtttcactttcccctgggctgctcccccgcccctccggcccgtagttttccagacgcccgggaggtgatgattaactccggccttgcgttatctcctcccagcgcccccgtccggcccacaccctcttcagccgctcttgcgactcttcctatgcaggacgggctgacccccctgccctgggcgccccagagcccgcgcccggaccagtagctctagtggttctctggccgcagggtatttacgaggccccacggaacacagtgtgccttccgcgccctcccggggggacgcgctttcccggccgcgcagccgcccggcgcccctttccgccgcgtgtgcgctcgcgtctccacccgcggcgcctgagcaagcgcgaggccggcctgcgaggtcttcccaacttgacttaaggggcgctggtcgcagtcacggaaagtaccctcgaaaaaaggcctttgggaacgagaatcttttttctttccctttaaaaatacacaccacgagctatggaggagaaaaataccactctgatgagatggctttaaataagtatatcgactttccaaagggtctaacattttgagcgcggttgatttaaagaaaaaaattgattaaaacaacggcaaaacatcctggggtggaggtggggcttgggaaagagaaaattggctggagactggggaggggacgttaaaacaaagtttcactgtatttttaaatatagaagccctgtgtttattacaaagaagggacagctgtgtcagcagcatgtgagctgtaaatgaaacaaaagcgttatcttaaatgcaagctgaaattagaaaatagggtcggctataatgtttattgggcctctgggaacaaacgaagaaggaaaaagtgactcttgtagatgggtttctggtcagtgccattactga

SEQ ID NO: 917520 - DNA, 4001 bp, Homo sapiens
gaattttccacagcagttagaaattgatcagttccatctccagtagttacagactgggaaagtgacatctaccaatatattccttcaatatattttatggaatatatcccataaaaacaatactgtgccaaagaatttctaggtccagaagcagtctttttaataaaattttgcctttatggaaaaaatcaaactttctcataaggcttctctgtgaatttcaaaagggtcctacatccatgtactccatttcagccatgaatttcttctgttcattgcagaatgcttgccactggtgtatgtttacaatgttttccattggatctgcacaggaaattaatcaggcgccatttgtattgagcatgatgtagacaagaacatgtcattaatatactcatcctagttatactgaagaacctaagacatgaacaaacctatcgagctcaattgttgaggccacacactatgctaagtgcggaaatgactataaagacagcaatgagcactttgttgctcagcctctcaattttgagtcaccaagaaaggatactttacctctgcatgatttgaacttatattaagaaaacctacttactgtaaaatccccgtgttatgtacctctacagtgttcttttgtaagaatgcttatatagattttaccaaagaaacaatttcagataaattatcataatactatcttcaagcaacattactctagaaattagcttcatcagctttattcctgcatattcaaggaaattcagttaaagcgaaaacgcaaaacagagagagtatttgaaggcagaacaactagttccacttctgcatattaagcaaaattaagcaaaaataaaggaaacaggcaaagggaaggaactcaagagctatttgcagcagtgatccgttacaagttctacgcgcttctcctcgagctccaagagataaggaggggaaaggaaagaaggcaccacgcagaagcctaaacttactcttggtacaacttagaatattcactgaattcagcctaagatgtctgggttatctggattcagtaggaatgtctgggaagaaggagtggcatttgctttctccgtttgaaaccctgggagctgtacgagagtaccccaaaccccttggttatcttgcagaggcggctcagggcatcgttccccaagcacacacctgcaaagccgggcggctcctcccctctttccctcctgtcctcagggatggaccaaagtccctccagcgcaccgttagcccgagggccacccggctcccgcaggcactacccagcccggggtgaagccggagcgctcgccgccgtcccggctccgcttcccggagccacacagcggaggcggcgcgcagctgaacaccggcaccaccaggatgcgcattacaataaaacttgggggagcaagtctacactcgcgccgacgtgaaggcacagcccctgacgcgggctcgagggccgtcggcccgtcccgcccctcctcgcggccgaatggcagtagtccatacctgtcctcggagacgctgatgacgccctcctctttgggcacgatcacggccatattcaccacctcctgggacccctccatccgctgcagcaggatcggcttgcgggtcagaggcttgggctggatctccgccgccatcggaggagggggcgcgcctggggcgccgccgccaaccgcgccgcggggccgggctgaggagactgctggagcacggacacaggttgagacagagactctggctggccggagcggaacgccggaaaccggcgagcatagcctggccgcctctctcgggaacgactccgcgctccctgcttcaggcaccaaaaccgccacgacctgggatgcaagccggcgccactacaagaggagggggcggagcgccggggggcggagcctgtgtgggcggggcctgccgcagggggtagccgctggtgggcgcgagggcggctccacttccgggagggtggtgaaggaggaggggaaacctggagcaggaggcggggatctggtatcccaatgcgcgtgcgtcagtcccgcaagcccattttcacccctcccctccgcgactccccgggcgctgcagcaccactaggacgcatgcgctttccgttcctcgcggtcttctctctgccttacacacccaagggttaggctcctccctctttaacctcccgtgaacgcgcgtatacacacccctggggacgcgcttgccagacgccacgccccttcgaaattccctgaaaagagggcggaggtggggcggggaaaggagcgcctcagcaagaccggaaagagaagaggcctgcaggaaggaaagccgcccaactcgttgggacgtgacttggcatgcgcgcgggctacctggcctagcggtcttaacaatgaagcgcggcgggaggccgcttactgctcccaacatgcaccaggcccaggctgccggagggaacccagtggcctcctgggagtcgtagtttcttggagcctccgcccccttgtcctggaatgacctatcgcccactttctgcgctatgggcctgaggagctcagcggcctccagggccattggccaagtcaggacccagacttgcctctatgggaactgaggggcagcccccagctgagtaggacgtcaccactcctagggtcagactgatgctcggaatagtggcacggaagggacatgaaaaggagagaatctttcatacagacatcttcaagggagctcagagaacatatggggtgtctatcccctcgttttcttagatggctaaattacacagccaaggttactttagtgcaaagttagggctaaacaacccctccttccctccagacttgaacccaggcccctagtgctggcttctttccatttccccagcaatccagcctttttagcttgctccagacacaacggacagagttactgtagttactgactgaatgttaggtgcctaccagaaggcctggcatgtggggttgatcgtgaagactaagctctgcttttttatcttgcccaaattcctatctaaggggtctggggagtcatggcctacaaaaaccataaattctcatcagatgggttttgaccatgtaggtcatgacttactttccagtctgactctggcgtaacaaggaagaaaatcaaaatgttttaccccaaattatatttccttgccatgccttaaaattgccctgcaaagtctcttgtgggaaaaatccacattctatatcccctttcccctttgttttccttccttccttcctacacccaggagataaccaactaagagccaggcaccgttttaggtctggtaaggaacattttacaacctgctgtctctaaaggctgctatctaaaagattcctctgcacaataaaacctggtctccacaatcctttaccttaacctgaacattcctttccgttgatcccaggtcttcagataaactcaaccaattgtcaaccaaaaaacgtttaaatttacctatagccttgaagcccccgctttaagtggtcccacttttctgaaccaaaccaatgtatttcttaaatgtatttgattgatgtctcatgccttcttaagatatataaaactcagctgtaccccgaccaccttgggcacatgttctcaggacctcctaagggctatgtcacgggccacggtcactcatatttggctcagaataaatctcttaaaatattttacaaagtttaattcttttcatcaatagtcgttatgtgataacctccactgaacaatcccagaattaagttagccgaagagtagtaatggtctaggtggtgtgattgagttgcagggctctgaaagtgagagaaataatgccaaagctgggaaaagaaagggacaggccttgtggaaatgtatttctaaggtaggtgtttggtagccaaggatctcacagatcactagagacataagagaacaggtgcaaagaacttgtctcaaagcacgca

SEQ ID NO: 917521 - DNA, 4001 bp, Homo sapiens
ctaatttttatatttttagtagagatggggcttcaccgtgttggccagcctggtcttgggctcctaatctttagtgatccgcccacctcggcctcccaaagtgctgggattacaggaatgagccaccgcacccggctgtaatttcctgtttttaataacatgacacttttttcaatactactctcctctgaaaagataaaaagcatttagacaaattatttatacaacatatgacagatggggtagagtggaaagacacacagctttagagccagacagaactgagttcaagacctaattcagccatttagtaatcgtgtaacccgggccacttacagtttctcaaccttgtaaagcaaagctgttgcaagaattaataaaatatgtaaagtatgtaaagcatcaagcccaatatctagcactcaataaacggtacttactactattcttctcacctactccttataggggataaaagcagctttgccagggaagagggaagatattggaaaacacaaatactagtttatattaagccagtgacgaaggacactgattttacctgatcagtgtaagaactacagccgtgttttgggtggcatactccttccagaatccaatgaaaacggagcccctagctcctaggaaaatttcaggaattttacaaaacgctctatgtcagggatttttaagaatcttttattaaggggaatactagctagttacttctgcttaatttgcaaaagtgtgaaaaccttcactagtctgttttgtgacaaaacgtacattaagttaatattcataatgaagcaagtaaatcctgcttttattagacttctcgatttctaaagaaacaaaaatatctggtgtaaaatattagaactacaaactacgctagaattagttcgaatattctcaaatgtgatgctcaaacaccctaacaccaaaccaaaaggaaaaaagtccaaaaaggtaacaaagctggctgtatccaattcttagaaagtctgaatcaatccaggtatcaaatgaacctctaacttcccaaaacatctacaaacaccgaagtcataatttgcaaaaacaaagctgagccagcaaatagaaacactgtttactaactgaacgtagtttatccttacttctcctccttgcatgtaatacttttatcctttgactcggccttctcaaattcccttagtaaacaatctcatcaaactgcttattgtagtgtaagcatgaagtcaaagagtagcatagactcagttctccaaatcgcgggagctttaaggagcttagcactagaccaagttttgccccaatgaccttggtctcaacgattcccctccctccctccagccggcccggcccttccacgtgctgccggctgcaattactccagaggtggctgcatgtcagggaagcgctagaggatgcgaatgcacaggaaacaagggttgctaacagcacccaggctgtgccatccaatccctcccgacaccaactccccaagagcgctcacacagccctacaaatttcccctaccgaagccctgcggggataaccccaactccttcccggcgccttgctctgcgacccagtctgtggggcagggtgtaaggtgaagaaattctctttgctacaccactatattcccacgcccgactggggtgctgggcagccaggggaaggggacagctcctggaaggaggggacgacggcaggaggaaagtaggctgaagaatcctgcgccacgccaccgccacctcctcctccacttccaggctccctgcaggcccttgccagtcgccagcccagcgagcagcaaggcctggagtggcagggccgaccgggggcccgcgaatcccggggtctgaggggcgcggcgtcctcaccatcagaactttagccgcgttctccagctgagcgatcacttctgggggccccagcgccgccgccatcatggtctctcttcaatgacgcgccatgcgctgcattctgggagcgggcgccgcggccggccaatcgccgccgcgaccccggagcctcacgcgctcccagggccgtcgcagccgctgtcgacaccggcgtcgcggcctcggcgggtctggccgggctgccgggttccgggtggctgggaggggactagtgtgagcccggccgccgcgctggggcgggggcggccgcagccggcaccgggcgaggccgaggcggtctgcccagactgctgcagccgcgcgccccgctaagctcccagccccgcgcatgcgtggtgtccggcgccccggcctcgcggtgcccccggccctctccccactaccctagtacagcccgcccggggacccgcagatccacgacgccagttcgctccctccgttctcagccctgcacaccgcctcccctggctcctccttgcccttccacgctccagcgccgtgcaggatttcctaaacttggaatcgctcttcccgctttcccctcctcagagcgcacctcctttcaaagtatctctgtctcctgcttctctgttccttcttgccatgggagaacattccaggatagaacgcttcgttttctttctttctttttttttttttttggagacagggtctcactctatcgcccaggatggagtgcaatggccctatttcggctcactgcaacctccgtctcccgggttcaagcgattcccctgcctcagcctcctgagtatctgggattacaggcgcccgccaccacgcccggctaatttttgtacttttagtagagacgaagtttcaccatgttggccaggctggtctcgaactcctgacctcaggtgatccgcccgcctcggtctcccaaagttctgggattacaggcgtgagccaccgcccccggccgaacgcttcgttttcataatggagggctttggccttctgcaggacaatcatccaaatgtatctgggcagcgggtcgctaggagaccctaggaggaaaacccgtctttggctcttgccgttttcactctttaagggctggctcacataggagagggagaaagcagggacaggaaagcctgaccttgactacctggcttctcaaatgcagtaagatgagctttgtcggccaggcgctgtggctcatgcctgtaatcccagcactttgggaggccaaggcaggcctcattttagctcaggagttcgagaccagcctgggcaacatcgtgagaccctgtctctaccaaaaaaaaaaaaaaaaaaagcccggtgtggtgtcttgcgcctgtggtccgagcttctcgggaggctgaagcggaaggattgcccaggaggtcgagagtgcagtggggcgagatcacaccacggcactccagcctgggtgagaggctgatcctgtctcaggaaaaaaaaaaaaaaggacaaaaatcagcattgtcgtgtttgtggaatccgtgttgaaaggcatattagagtatcaagtaattaaccttccctccggtgctccagttgcctctaggacattccacgcaagtggtcctgacagctgtttcagtattcaaaccagtgctgttaggttgttcggatcaggggtttgtttcgttttgagctgacatctacggtctacattcctataacttctttttggtgcttattcagccttctgaaacaacacagacagtcaaattcgtttcagtatttttaagtttattttttgttgaaatcttcctgtttcttattcctagttataagaaagccatactgttgaggttttatgtcactgcaacagaatgtctgtgtgtgtgtgtgtgtgtgtgtgtgtgtgtgtgtgtgtgtgtgtgtgtgttatggagtctctctctgtcacccaggctggagtgccatggtgccatctcagctcactgcaacctctgcctcctgggttcaaacgattctcgtgcttcagcctccagagtagctgggattacaggtgtgcaccactacacctggctaatttttgtatttttagcagagacggggttt

SEQ ID NO: 917522 - DNA, 4001 bp, Homo sapiens
ctaaacatgcgacagcacagggcgttcacactcaaatgcttatggaggttaataacatcgggccacgtagactgttgcaaaacgaggtgcacagggcaaggaaaagaagaggaagccttaggggcagcctgctgttctcattctcaaacgagggtctctaatgaccagagcctacaggattcacgaaaatgcagaaatgcagaatttaatgtgaagccttttccagtcctaatatgttggcaattaaattaggaagggggcaaaagaaactttaggcgtagcctaagtctcttacaggcaaatctttacagtaagttttttcacttattgccccaccttgtggacaaacagtggaaatttcctagcgctaaggcccagacctgttccaagcataccaactaaaaaacggttagaaaaacttccaatgtagacaagaacaaaagttcatctaagtaacctgacatcttgtcatatataacgccagagtatggttcggaaacccaggtggacagtccgattcagttccattcattcactgagcacttcctgtacacctggcacgggggatgccaccaagatcaagacaggactatgacagccatgctccctcaggaatcagattcttccccgcttaccatccgtgcccaccccatcctcctctcacctcctactctttttatttaccttgttcgttccagaaatgcaccacacgtaagcactctcccacctggtcttacaatctttacagtggaaatagccatattttggttccaaaaactgaaaataaagaagaaaagtactttaccatcatgcaaggggaaaaaagccagatccttctttatgactttgtataaggaaaaaaaaatgacttctttaacctcacttgtatctattctcaagactacggcattgattcagtttctcatctctcttaaagattactctgggattcttcttgctgctgtcgtttgtacttttccaatccattttccacaatgctaccggcacaatcttcccaaaacgaaagtctgatttcatgtattacagactcgaagcccttcttcgtctccaaattctccaatagcagtggttgccagactgttggttttcacaggcttagtttgggttggcacctattttacccaaaacttaccaaacatacaggccacgtgatatacatattttcagagctccctctccttcaccaagtacatggaagaagagagagaagattttgctcttattgcccccatagatggaaaaggagggaggggatgaggctggtcgaggactaagaagagggaagagaggatctacctggaagttgggcctccggagcggctcggaggcggcgtctccaggcacctgcttgctcttcgtctcctgagggcacggggcgtctttctcccccgattcctccagctgcccgggctcctcctgcctgtcagctcctgacctccgtgatggtggctgcggctggctggcctccgcagggcccgggagcgccttgctctccgcttcgtccccatctctccgcaggcggatcaagcccctgcggccggtggcgggcgaagtgaccccacaggctggcaggggctcctgggggtctctgccgtcccagggggagcagctgctgagggtgcgaggccccagagagcactgcacagccttgtccacccgcgggctcacctgcacgcccacctccttggtgttgggcttgcacagccgcgggctcaggctggggttcatctgggagagaatggccttaagctgcgccctcttgtaagggtcaatgcagtagtcaggggcgttcgcgggcaccagcagccctggcctggccagaaaagtgggaggacccatattttgcctccagtcgggctgtttgtgccctgagagtccaggctggcccaaaggcactgtgctcccataaccctggtacaagccatagggaacacggacaaagcgctccatccgctctcaggtgctcaggcgcagtctaatatcctagccagtttgtttgggtccttattttgccttcctccttcatccgccccttctttctcttcatcaggttggttcagattcattcctggcttctccatttatttcagattctaatgggagctgctgcttattaccctgattgagggagagaagctctatctacagatgtctaattgccacctgattcctacctaattgcttttccctacctcttcactgttcgggaatctttttttcaaagctgtttttcatttccagcttattcacacatatgctttaattagtgattaattcatatattcctgtagtgaccattctaaagatcctttgtaaggtaatgtggtaatgttagataatgttttaaggtacagccattatggacaacagtatgaaggttccttaaaaaagttaatagaagtaccagataatccagtaatcccaccactgcgtatttacccaaaggaaatgaaatcaatatcctgaagagataccttcacttccttgttcgttgtagcattatgcacaatagccaagttatggaaacaatctaagtgtctgttaacagaaaaatggatagagaaattgtggcatgtatttatacaatggaatattattcagccttaaaacaggagatcctggccaggcgcggtggctcacacctgtaatcccagcagtttgggaggccgaggcaggcagatgacctaaggtcaggagttcgagaccaacctggccaacatgatgaaaccctgcctctaataaaaatacaaaaatcagccgggtatggtggcacgctcctgtaatcccagctactcgggaggctgaggctggagaatcacctgaacccgggaggcaaaggttgcagtgagctgagatcacactactgcactccagtctgggcaacagagagagaaagactccgtctcaaacaaacaaacaaacaaaaaacaggagatcctgccatttgcaacaacatgggtgaaactggggaacattatgctaagtgaaataagccagatagaaaaatactgcataaactcactgatatgtggaatctgaaaaagtcaaatacatagaagcagaaagtagaatggtggttaccagggacaggaagttggggggaatggagagagactggtcagagcctaaaatgttacagttaggtagaatgaatgagtctagagatctaatttacagcataacgactacagttaacaatactgtattttatactgaaaagtttcaaagagaaatttcaggtgctctcaccgcacacaaaagaaaggtaattatgtgaacagatggatatgttaattgcttgactatagtaatcatctcactgtgtacatatacatgttgtgcacattaaatatatacaacttttaggaaataatggttttttgggtttttgtttgtttgcttgtttgaaatggagtttccttgctctgtctcccaggcaggagtgcagtggcatgatttcggctcactgcaacttccgcctctggggttcaagtgattctcccacctcagcctcccaagtagctgggattacaggcacatgccaccacacccagttaatttttgtatttttagtagagacagggttttgccatgttggccaggctggtctcgaactcctgacctcaggtgatctgcccaccttggcctcccaaagtgctgtgattacaggcgtgagccaccatgcccagctggaaataatgtttttaagaaaaattaaagcatattgtaaattgaatacaaatagtaaattgagcagctgcactagaagagaataggtgagaaagtctattatggtggagctaataagttgcaagtccctggtacaaagagaacaagaaacataaaggtatggggggctgtataaaatgacagaaaatgttatttctgagacttgtgtgacatgccacgggttctcattagtccactcctagtgagacacccctcccccacaaaaaggggacaaagcatattgttctgat

SEQ ID NO: 917523 - DNA, 4001 bp, Homo sapiens
tgactacataggaattagcaaagcaacactgcagtactatgcagaaaaaacaatttgttaaaaagactgtgcacagaaaacatcccatgctggtagctactctaaagtgaagtaaaaagaactgcatcatacaaaaatacaaaaaaaaaagaataaaagactctttctatatcaacagcagttaatgcttcaactactactaacagctggagaaatagctccacctctatatgagatggagttgggagagatgaggaggtgaggaagactatcatccactgaaaaccaactctctaagtaaatttaagttaaacaatgtgtttcctctatgtaaatgccaatgcatattataaatactgatgatattacaattttaataatttgtaaagatgttaagataccatccacttgctggatttttagtatgttaaattcatattacaaatatgaaaatcacataagcttgcaaatctcaaaatatgcaatgttcatttagaatgaccagtaatcaggaagccagtaagaggcatacatttgataaaactgaatcctaccagatgcacagagtgaaagccttagtttcagagtgcaactatttttaaagccgcaattgttacaagcttgcatcaactttgctagtctctagttgaaactgtcatctgttataatctaaatagttcattaagaaaataaaaattatttgaaaatctatagattgtattcacaaaacgctccaatatattgtactaaagccagtaatttcaaatgttacagaactagaccccgctaactggcaccatatacccatagactgaactgcataagtatttattctccaacggtatcgcggacttcgaaaacttgaggtgtaaagatgttttccaaatttttaaaactactttaaaaatccaaaaatcttaagagacttcatactcccataattttcaaagtagttcgaattacctgaaagccccatagtataaccaaataccttaagactacccttcacaaacaacatcttaccaacataattcaagtattatcaactctaaataattttcaaaccacataaattgcgttagcctattacagagagataatgccgccaaacagactctcttctttctattccactttcccccgtttctgacagttgccaaaactacctacctaaggcttgtgaagataaagtagcactcaattcccaggacctaaatcgttatcactgctgagggaaaaaaaaaaaaacaagaccaatcacaagtaagatgtttttctctaacagatctggaatgagtatagaggaagattctaaatttaagcccaaattgctgcacccttccatcgcacacaaatacgaacaccatacaagggttcccgtgcttacatcaaatggtaacgaggggtacagcctattgtctgagtctacttatcgcccttagacaaatgccagaatcataatcagagtgagaaattacgcctgagcacagggggctattgcagagttaagggtgggatgctcaaggaaagctcaaaatcccagtgactcaagcaaagacgggggggggtaacccgggcctccgcattacgggtccgctcaatgccttccccagatacccacaccaattcacagaacgcttacttcctccccaagctcccttcgcaagtgcagtccggaggcaccaccgccgccgccgctccgaggagcgggggaggcgactctgtccccgcgcctggacccaggaggacgacgacgaggagaaagcgatgcgcgcgcggctcccgggaaccggctcttggctagcgaggagcccccgggatggctgagaagcagaaccaacccgcccgccgcctctccagggtcaagcgaaactgggtcgcaggaagaaaaataacgaagagattgtagattaagaaaaggcaacaaaaacactaccaggccgctaggaggaccgcctcaaaatgccgccggaagtcagaggtttgccctgttcctctgtagacccaggcagcttccggccgtcagattagtcgtcagtgcgcagacaccacccttcgtggacacgccctctaggcgtaaggttccatgcgagcggtaagagtgcggcgggacttggaaatcgaatctgtgctctgtgagagatcctaggaaaggaaactgggagcccgggagaactaaaattcccaattaaaagtgaatttaagtgagttttctctttttattacataattccttaccataaacagctgttgtaaatgcgcaaaatgcggcatttgttgacagtacctagagccactcattcattcgttcaacagtgtttattgagcagctgagctggaatgagaggctatgtttgtcgtttttgacacccctcccctttctgggccatcgcctaattaccgtggagcaaacggaatgcatggttgtatttctaaaggcacaagcagaaatttattgaaaatttggagcagaaatctttaatgtacttctgaccacccttccttttgttgagtaggatccaatgatcagcgtgagatgatcattgattaaacttgcttgagatggctagtcaaacgtcgaaacttgcttgagatggctagtcaaacgtcgaaaatcaaagaaaaagtaggtaactagacttttacaattttttttaaagggtaaaaagacatgaaccctagtctgccttaatggcaaagtagcacttattaggttctctgacagaaccaaggaataggaaaatcttttatcaaaactacggataaaacttaaaaataatttgatacaatgatttggtcttgctggaatcagtaaattaaaatacggaagcagaatgataaaatcaggggcattaaacattcctaatgacatgccaagctattttagagacagcggcaaaagcttctctacaggtgggtttgatgtaacgctccggcagcaagaatccgtatgtgcccgtatctcgaagttcaattgtaaacgaatatttgatgcccaaatcatagatccaatcgtccccacctccaggagctaggtctaaaagaagaagaaagaaattgttgaaatacagacgtttcaaattaatttacaaactgggaattgtttgatttaaatgtttatttgtttgtatacctttagatttttttcagtttttaactaatataaacaactttacaatgagtacccttgtttatacataattgcttctttgtctctttagaatattcttccctagaatagatttgctagtctaaggctctgtactttttgcaattacggcatgttcccaaatggacgtcaaaagaactgaattcatttatacttccacaagcagggtatgaatttgcccatttccccttcccataccatcaataggaattatgaattctgataattttatgggcgaaaaataatatccaactgtcttaatttatgttttttgattatcagtgagttgcacatttgtttggcatatttattggctatctttatatttcctatcaattgtccttcctcatttgtctacttggttcattttatcaattgcttataaaaacgacattagtgttattagctttgtttggcatgtagacctttttttctcctttcattcatttctcctttcacaagaattttttctccttactgagatttcaacttggtttatgcagggttttcatatgaaaatatatgctgtacctggaatttactttggtgaaagacatgttaataatccaattaatttttttctaggtaacttgttaggttttccaaccgcattaattgaataatctgactttttttgggggggtgctaaattgagtccaggtttatggcaaagtctgacccaaaattttaatttataattttagcatctatctaatacagtttgggaagcatctcatgaaagctacaattgccagaagacttgttacagtttaatgcatgttaactaaaatgtgtacatattttagtgttcatgataaatacagtttcgacc

SEQ ID NO: 917524 - DNA, 4001 bp, Homo sapiens
acttcagagtaaataagaagataaaggaggtatcatcataagttgatgagaatcctatgatcactaccactttctggaagtagctcccagaaatattaaaatctagtaattttaattgactcaaacatcatttttagtaaacattctggtatccaaaagcatgagactaaacaatgatattgaaaagattaatattatttggaaatgtattccacaactaatttattctgggcctacctgcagggatagtcgtcccaaaattaaacgttctataggtacaaagtaattttaaaactggatgttttaatttcaaaacttataaattttctgagccaaagcattctcttccatgtatagaactagggttttaaccaaatacttggttgaaagctgtacaaatccaaacataattgaagtcttgattctgccactttcaagagtgggtggtacagattcttctcattcataacattagtttctagctgatgtggttcgttattcaaagaacacttaacagtccttcataaaatggtagattcagtctaaggactaagagtagaacattctggaataacaataacgtttacaaacaccacttaccatttggtcctaggttttcataaaaaattgatataggcagcagatgtatacagaacaccctagttgaggccagtttaagtgtaaaatacccacatactcaaagcctaagaacaatttacttaagacaaaacaatgttggagaaattgcccaatatcacaaatgtagcagtcacccctaaacagtgtttttgattaatgacaaccaatttccttcaatcttaaaggcaaccaattcaagccagtaggttaaatccttgaagtatactgcaatgctactccttttttccagggaatcagatgagaattttgtgctaagaacttatcaggaaaatggaagtaacgaaaattaacacgccaaaatatgagtataagaaatataagcctccttaataatcagccaagaaaaaaataatcaggttatgtctcctcccacccattctttctgtcttaaccttctgcaaaagccggctggattcagagtagaaataaacgaattttacaatgagtcgagtaccaccaaaaatcaaaagtgggagcttactcgtcctccaggtctgacccgcctccagcccgaggccaccaaaagacacacctcccttcccccaacccgccacagccggctctacaggtaacaggcgtttcttctcgcgcagtttgaacaaaaacaatccagaaggaacagatttggttttttaaaaaaaatgaacaaaagccaaaaaagccacaaacacaacctaaaccttctaagaagctcgactactcccgttctgcacgttccttcccagaaggatgcagacccccggtgtcggcgggaaccaggaagctcttggggcctccctgggccagacctgcacccgggaagccgccgcaaggcttcaggagccccaggtcgccccaaggccgcgccgcaggattgaacaaagcggcgggtgcagcaacctcggcgcttccgagcgcgttcggggccggacgcccggcgtccggcgctggctccagaaaggcggcgggtgtggggcgcagaggcctatctcgcgccctagccgcggcccgcgccccgccgcagtccccggggacggtactcacacacgcagagctccaccacgtacgcgtagtaggaccagacgaccacgaaggtgatgaagagcaccggcacccagcccacgacgcgctggcagcagcgccacagcgtccagggcgccatgttccgctggcggctgccgagccccgcgtcccaccgttctggggagcgcgggagccccggcgacggtgactcggacgctccaggcggctgctggtccagctcccccgcctccgaggcaggacttgtgggagcaaaagtccgaggcgccgccgggactcctcccgtcccggcgcccagccaggccccgcccccaccccacatcccgtcgcccccctccccccgcgtccgtccccgccagcccgcccgccgcgggccgcgggccgcccccggtctccgcgtcgttggggcggggtttccgcggccggggaggcggtgagggggcggggccgcagctcgggaccgcccatggggcgtggcggggctggatgcggacaggctgggcggacgcgggaggccggggaaggagaggcgaaaaacacgcccttgatggatgagagggacaggggatagcttttgtggatcgagactcaataggggagggagactatggaaatgattccttagctgatttgtggatcttggccctctctgtgtacagaactcgctccactggggttcctgggacattgagtagttggggcactgtttcaaacatgacaaggccattccccactcagtgtgcgaagaatgcacattgttagaaggctcctcctgtgatttttatgttcgtccatcttggcggaacccctccctttcttgaagatggaacggtagatacctgtaatttcgggtagaagccatgtagggtccatcagtttgattcgtaacccaaatttaagattgagtagcgagaaggaaagggcatgtaaatgaccctctccttgccccgcaaacgactaaggaaatttaaagaatttatttacaactagaggttgctaagcaatgacgataatcatatagaacccagaagcatcactgtgaagacttcacaatgcaaggtcagacgcattagaagggattccagaccgcaatcttcataccagttcctgctactagcattcagttttggttagaatgaatttttgtgtttgttttttgaaacagggtcttctcgctctgtcgcccaagctggagtgcagtggcacgacctgggctcatttaagcctcgacctccctgctaaagcactcctcctgcttcagcctgcagagtagcagggactacaggcccgccaccatgcccagctgatgtttgtattttctgtaaaaactaggtttcgccctgttgccatgctggccctgaactccaaggctcaaggaatcccaacccctctccgcctccacctcccaaagaagtgctgagattacaggtgtgagccaccacgaccggcctacactgagctttaaattagctactgctcactaaagtctccatgaagaagacgtcaccctttgctgtgtcagagaaatgtagtaaaagcgagtaagtatttaatcactgcacactgctgcttgagtaataaagcatgtataaaagattctgttctccctgattttgtgccttaaaagtcatattagttagtggcctagttgacagtaggtttaggttcaagttcaactagttttccagagaggctgcttaggagggttagacctcaacatagaattcggatggacatggaagaacataaagccgtttctcctctatgtcatctctacgtaccaaaaccatgctgctagagctcagcacaaagccatgtcctttacaagctccagggctgctagaaatgatctttcacgacattttgtttataacctaactataaaactgtcacattcgtttcctagggtgactataacaaagtaccacaaaactggggaataatagaaattggttgtctcacagtttaggagggtaggtgtcccaaatcaaagtgttggcaaggatattggatatggtttggatgtttgtcccctccaaatcccatgttgaaatgtgatcccagtgttggaggtgggacctggtgggaggtattggatcattagggtggatccctcatgaatggtttagtgccatccccttggatgaggggttctttctctagtagttcacatgagatctggttatttaaaagagcctgatccttcccccactctctctcttgccccctctcttgccatgtgacatgctggctcccctttgccttctgccgagaaggcagaagtctatctctgtggtcctgtgtcttcagagataaggatg

SEQ ID NO: 917525 - DNA, 4001 bp, Homo sapiens
cacttcagagtaaataagaagataaaggaggtatcatcataagttgatgagaatcctatgatcactaccactttctggaagtagctcccagaaatattaaaatctagtaattttaattgactcaaacatcatttttagtaaacattctggtatccaaaagcatgagactaaacaatgatattgaaaagattaatattatttggaaatgtattccacaactaatttattctgggcctacctgcagggatagtcgtcccaaaattaaacgttctataggtacaaagtaattttaaaactggatgttttaatttcaaaacttataaattttctgagccaaagcattctcttccatgtatagaactagggttttaaccaaatacttggttgaaagctgtacaaatccaaacataattgaagtcttgattctgccactttcaagagtgggtggtacagattcttctcattcataacattagtttctagctgatgtggttcgttattcaaagaacacttaacagtccttcataaaatggtagattcagtctaaggactaagagtagaacattctggaataacaataacgtttacaaacaccacttaccatttggtcctaggttttcataaaaaattgatataggcagcagatgtatacagaacaccctagttgaggccagtttaagtgtaaaatacccacatactcaaagcctaagaacaatttacttaagacaaaacaatgttggagaaattgcccaatatcacaaatgtagcagtcacccctaaacagtgtttttgattaatgacaaccaatttccttcaatcttaaaggcaaccaattcaagccagtaggttaaatccttgaagtatactgcaatgctactccttttttccagggaatcagatgagaattttgtgctaagaacttatcaggaaaatggaagtaacgaaaattaacacgccaaaatatgagtataagaaatataagcctccttaataatcagccaagaaaaaaataatcaggttatgtctcctcccacccattctttctgtcttaaccttctgcaaaagccggctggattcagagtagaaataaacgaattttacaatgagtcgagtaccaccaaaaatcaaaagtgggagcttactcgtcctccaggtctgacccgcctccagcccgaggccaccaaaagacacacctcccttcccccaacccgccacagccggctctacaggtaacaggcgtttcttctcgcgcagtttgaacaaaaacaatccagaaggaacagatttggttttttaaaaaaaatgaacaaaagccaaaaaagccacaaacacaacctaaaccttctaagaagctcgactactcccgttctgcacgttccttcccagaaggatgcagacccccggtgtcggcgggaaccaggaagctcttggggcctccctgggccagacctgcacccgggaagccgccgcaaggcttcaggagccccaggtcgccccaaggccgcgccgcaggattgaacaaagcggcgggtgcagcaacctcggcgcttccgagcgcgttcggggccggacgcccggcgtccggcgctggctccagaaaggcggcgggtgtggggcgcagaggcctatctcgcgccctagccgcggcccgcgccccgccgcagtccccggggacggtactcacacacgcagagctccaccacgtacgcgtagtaggaccagacgaccacgaaggtgatgaagagcaccggcacccagcccacgacgcgctggcagcagcgccacagcgtccagggcgccatgttccgctggcggctgccgagccccgcgtcccaccgttctggggagcgcgggagccccggcgacggtgactcggacgctccaggcggctgctggtccagctcccccgcctccgaggcaggacttgtgggagcaaaagtccgaggcgccgccgggactcctcccgtcccggcgcccagccaggccccgcccccaccccacatcccgtcgcccccctccccccgcgtccgtccccgccagcccgcccgccgcgggccgcgggccgcccccggtctccgcgtcgttggggcggggtttccgcggccggggaggcggtgagggggcggggccgcagctcgggaccgcccatggggcgtggcggggctggatgcggacaggctgggcggacgcgggaggccggggaaggagaggcgaaaaacacgcccttgatggatgagagggacaggggatagcttttgtggatcgagactcaataggggagggagactatggaaatgattccttagctgatttgtggatcttggccctctctgtgtacagaactcgctccactggggttcctgggacattgagtagttggggcactgtttcaaacatgacaaggccattccccactcagtgtgcgaagaatgcacattgttagaaggctcctcctgtgatttttatgttcgtccatcttggcggaacccctccctttcttgaagatggaacggtagatacctgtaatttcgggtagaagccatgtagggtccatcagtttgattcgtaacccaaatttaagattgagtagcgagaaggaaagggcatgtaaatgaccctctccttgccccgcaaacgactaaggaaatttaaagaatttatttacaactagaggttgctaagcaatgacgataatcatatagaacccagaagcatcactgtgaagacttcacaatgcaaggtcagacgcattagaagggattccagaccgcaatcttcataccagttcctgctactagcattcagttttggttagaatgaatttttgtgtttgttttttgaaacagggtcttctcgctctgtcgcccaagctggagtgcagtggcacgacctgggctcatttaagcctcgacctccctgctaaagcactcctcctgcttcagcctgcagagtagcagggactacaggcccgccaccatgcccagctgatgtttgtattttctgtaaaaactaggtttcgccctgttgccatgctggccctgaactccaaggctcaaggaatcccaacccctctccgcctccacctcccaaagaagtgctgagattacaggtgtgagccaccacgaccggcctacactgagctttaaattagctactgctcactaaagtctccatgaagaagacgtcaccctttgctgtgtcagagaaatgtagtaaaagcgagtaagtatttaatcactgcacactgctgcttgagtaataaagcatgtataaaagattctgttctccctgattttgtgccttaaaagtcatattagttagtggcctagttgacagtaggtttaggttcaagttcaactagttttccagagaggctgcttaggagggttagacctcaacatagaattcggatggacatggaagaacataaagccgtttctcctctatgtcatctctacgtaccaaaaccatgctgctagagctcagcacaaagccatgtcctttacaagctccagggctgctagaaatgatctttcacgacattttgtttataacctaactataaaactgtcacattcgtttcctagggtgactataacaaagtaccacaaaactggggaataatagaaattggttgtctcacagtttaggagggtaggtgtcccaaatcaaagtgttggcaaggatattggatatggtttggatgtttgtcccctccaaatcccatgttgaaatgtgatcccagtgttggaggtgggacctggtgggaggtattggatcattagggtggatccctcatgaatggtttagtgccatccccttggatgaggggttctttctctagtagttcacatgagatctggttatttaaaagagcctgatccttcccccactctctctcttgccccctctcttgccatgtgacatgctggctcccctttgccttctgccgagaaggcagaagtctatctctgtggtcctgtgtcttcagagataaggat

SEQ ID NO: 917526 - DNA, 4001 bp, Homo sapiens
gttgggaatcgcaaactctgtggtgcccattagagaatttcacaaactgctgcgaaaccacagtaaagcccccgcgacccaccccgagacgggctttaaaaacactttaaaaatgagaaacgcattacagcttcggctcacaccagactcatttcatgggaaacagtcccgggaagggcgtttggaccccgagtaaaagaagtgggaaaacacacaaaccactcagacagacatacactccgagcagaaaagcacattcagacaagctggcaaaatcctctctaggctcgcttcccgggcaccgaattagcgagcagttttattttgtgctttctacttaaaacggaaattattaaccggggctgagcaaacgaagcaattgcatgacccaagcatacatttgatgtgaggctaatcattcaaaactcgatttccgcacatggaaaaacctagcccaataatattgtcatcgtccaacagaaacaagctgctggctctttcgtacacgcaaaaacacctcccatcccaggtccccggctggcggtctgcgcccagcgtcggcacccacagcctgagtctcagcctgtgcgtgtctcccctccgcgcctggtccctgtcccagcccgcggttacctgtgtgggtccttttgtggatcttgaggttctcggagcgcgcgaagactttgccacagcccgggaaggggcaggggaagggtttctcgcctgtgtgcacgcggatgtggttgaccagtttgtatttggccttgaagggcttgccctcgcgcggacactcctcccagaagcagacgtggttgctctgctccgggccgccgacgtgctccaccgagacgtgtgtcaccagctcgtgcatggtgctgaaagttttgttgcagctcttcttgggattgctcagttgctcggggtcgatccacttgcagattagctcctgcttgatgcactgctgccgcatatagcggaaaaaggcaccggggtggtggtggtggtggtggtggtggtgggccgcggctgctgccatgttcatacccatgttcatattcatggggccgtactggttgtggagttgcgccgccgagtaggggtcggtccgcgggctggccacctggcggtattgctccgagcgcccgaacacctcgccgggcagcccgaggcgcatctgcccgttgagcacattctgcgagccgtgcggcccgtgctgctctggcaggcccgggaagaggaggtggccctgcgcgtccgagtgcgcgtggtgcaggccgcccgcgcccggcccgaacagcccgtgctgcccgccgcccggcgccgagtccccgaagccgcggctgcggaacaggaagtcccgggtggagttgaagggcggcccagagtaggagccaacgtgcgcggcgtggggcccgagcgctgcggccgcagcggcagccgcagcggagccggggtaggcgccggggccctgcgacgtgaacgccgagctctggcccggggacagctcgtgcgcgcccgggttgagcttgaaggctcccatgtgcgcggcggcggagtcaacgaagccgttctgcgccgccgccaggctcagttcacggtcctgcatctcggcggcagccgccgccgccgccgcggcggagtggtgatggtggcgcgcgaagctgcccaccccgatggccgggaactgcggacccgcgtccaggagcatggccagcgcgcccgcccgcccctgcgagccctgcgcctccgcgccgcctcgactcccgctcccgatccgcgcggtgcgtccggcggccaccgggctccaggcgcaggcggcggtggtggcggccacttcagccctgggagccgctctcctgcgcccgccgcctccgccgccgcctggatctgcctcgggcggccgggcgcgtagcgaaggcgcggagaggaagaggaggaggaggcggcggcgcgggaggaggaggaggaggtggaggaggagaagagtccaaagccaggcggagaaccaaagtgtattaaaggagctgcggcgggggcgggcgggcagggcaggggagggcgggcgggaggagggagccggagggaggtgtggggagccgagaggagaggggggctaccggggggcgagcgccgcgccgcagcccccacccctgcgcgcacccgcgcgcgcacgcacacactcactcgcacgcccagcggacccggagcccggccgcaccgagcagcgccggtagaatgcagtcacaaccgcggcggccgtgcgcacgccaggcagacgggcgaggagaggaccgaggcgagctccgcgctcggcacccggggccagcgcaccagcggctccacctgaccgcggcgggggcgccggggcggcaggcggagtccaggcgtcctctccgcggcgctctgcggcgacagctccctcccccgcggccctactcgcgccgccccgcgcgcggcggttattgttcggagccgcggccgcagtgtttagccctcctcggcctcggcgcttggcattggctgcgcctcgcgtagtaaacttgcagtggccacgaatttccccagatgaaggcagcagccgcgccgctccccctttctttaagttgtgccggaggaggaggcgggggagtaggggggagggggatgtgggaggggagaaagcgagcagggggaggggaggagggggaggctgggctgaaaaacaataacaacaataaaaaagtgatctctcgctcgcctcctccctcccgccggtcgggcctgggcgctgggcccggaactagtgaccgcgccgcgtggacccagcgcagtccgcgacccgagggagtgtgaggcccaggcgggctcccaggtctcggctgcggtgggctgcgttcgccaccgcctccgttgatttcgatgggcgccgccaacgctgcagcggcagccttttattttttattttttgtctcctccttttcctctcccctccccccgcaccccctagtctcccgccccggcctccctccctccctccagctcgaggccgggcccccccggtcaaaccgcccctttaacggcggctcccgccccgcccgccctcccggcgccgcgattggccgccgcggcctagtcagtcccgcgcccccgccccgctgccgggcccgcccctcagtcctcgcgctccctgagctgctgccggctcaggcagccgccgaacgtgcccgtgggcccggcctgccatcctgccgcgcttctcccgagacctcggcgccgcggcttctagtcctggccgaccgcggcgctcccgggagccgggcgtccagcgtggctcggacgcgggcccgggccgcggggtcagggcgccctcagccgggtcaggaatgggaggcaacccagcgctccagtctttctgcgtaggccaccgacttccccgggatctgagcagctcccagcggacaccgaaaaccccggggacgcctggcccgagcactccaggccgctcgagaggtggctaacagctgggtcgcctggcaggaggctctgcgcgcggggacatttcaggcccggggcctcgccgggagcgcgccacaaggagcggcggggggctggtctgctgcccgcttggcacgctccctactttcaccccgcctttgtaaacttgctctgtggcattgaaaccacaggtgcaggaccgtgggcacagagaaagccaggcatgccccttcttcccaccctccggacgcccacccagacaccgccttccccgccccccgcggcgtccccgtccgcccctcggcgcgctgagctccccacccgccgcttgcgtcctgctccgtttacagcagtaaacactgggcagcggcccctgcgtggaagggggttgttcggaagtcgtttaaagacagtgtcaccctcagggtaaatgcccagaagccgggccgcgcatccttgggctgagaagtgtgggaacgcccgagaccaagcgagactcaggccggagtttggctgcgggtcaggct

SEQ ID NO: 917527 - DNA, 4001 bp, Homo sapiens
aattacttattcatagaaaaaaaaaagggggggagagaaaaaaaaagaagtcacatgtccgggttatacgtatgcgaagagaagcagcagaaggagaaaaaaattaaggcgagcaggaggaggaggagaagcagcggcggaagcggcggcggcgcaggagctggtggcggcggcggcggcgcggccggggacagacacccacctgtatgagtacgcttgtggatcttgaggttctcggagcgcgcgaagaccttgccgcagccggggaaagggcagggaaagggcttctcgccggtgtgcacgcggatgtggttgatgagcttgtatttggccttgaagggcttgccctcgcgcggacagtcctcccagaagcagacgtggctgctctgctcggggcctcccacgtgctccaccgtgacgtgattcaccagctcgtgcatggtgccgaaagttttggagcagggcttggcgccgccggccgggggcggtggcggcggcggcggcggcggcggcggcggcggcggcagcccggccagctcgtcggggtcgatccacttgcagatgagctcctgcttgattggctgccgcatgtagcgcaggaaggccccagccgcccctgggaggtgggggtggtgctggtgcgggtgctgcgcgggcgccggcggcggcggcggcgccgggggcggcgcgtggtgctgcaggtggggcccgggcccggccgctgctgcggccgccgcagccgccaggttcaggtttaagttcacggctccgtagccgtgcagggcggccgccgctgcggccgcaaccgccccgtagtgcgcgtccccagagcgcggcgcgaagggcggttcggcgcggccgtacagctcagccgccgcggctgccgctgccgccgccagccccaggcgcatctggccgttgagcgggtgcgggtggccgcctggggcccccggcgtgtcgtgcagcgcggggaagagcgccgggccgccgctgccgtccgggcccgcgtaggtgccgctggcggagatgaacatgccggccgagtggggaggcggggccgggtgctggggggagccggtgccggaccgctgctcccctccgagcggggccccgtgcatggccgccgcgggggccgtggcggaaaggtccctccggaggacgaagtccctgctgtggcctttgccgctgctgccgccgccgccactgttggtggtggtgtagcccgagagggcaggaggaggaggaggcgggggagggggagggggtgaaggggtgggaggaagaggaggggctgggggcgggggcgcggagggctgcgcgccactgctgcccccgccgcaggggtagctgcccgcgccggggtgcgcgaccaaggctgcagcacgggcggcggctgccggagcctccgggtgtgccgggaacgcctgggagggagggctgaggcccagcgtgctcgcctgggccatgtgctcgggtccgagcggagtggtggccacgccggggtcagcgcccaggtcccgcaggcggaggtgcgcgacggcggcccggagttgggagtgggcgggcgggccggccagcgccgggaagcctgtcatattctgaagcggctggacctgagccgttgccaaatccgctaatctcagcgctggcgggttcctcttgctcaaagggggctccatcagaactacacaatcaggcccatagaccctcactggggggactttattccctctgcccgccttcaaaaacatgtatgtattgggcgctctttaacttcttttgtcctggcctcttaactctgcttattcctgttcccactctatcctccagcgattggcagagtgaacaccacatttgagctgcacagtgggaccgagattttggaaatggcacgggtgggattggagggagccgcgtgattggcagtagcctcggctgctcgattggctcccgttcaggccctcgacccagcggggattcgcccccgtgcttgcggccgcctgcgctttcgcttcgcgccccctcctccgctggagccacacgtccccgcctccccggggatgcccaagttgcacttgcagaaagtttgagcctggcctgcgcgcgcagcgccccgctcttccttgacgcacctcgcggagcgcgcgccggcacgcgggcagagggcgcggggtggtgaggggctgaggacccccgaggggcagtcccagtttcaaaaaccttggcctcacttctctgtgtgccttctggcacccaagtactttctgcctctacctccacctctcttgtggggtggaagagccctgggctgctgtttgggagagaagggtgaatagcccgtcctacctgtagtggtgatgctagaaacttcttgtttggacacccaacctgcctagcgctcacctagggcgcatagacagtagacggagtgaagaagataaagtctattggttgcaagacaacttgagtgatttggctccgcgaaacaccaggtgaagtcaaaataagtctttcccccaaaggaaccgttttacctcgactttttatctcatggagagtccttttcaacatggttcaaaggagttggatggaagtgtaatctcactactcatcggttctagatctgccacttccaattagatctacagtaggggcgggggagaggagatcgggcagcgattctaacttttgcctttcggagatacagtggcggggcaggccaaacggcatctctgcagagagaagccgctaaataagcaccgtcctttaagtagaatttctccttccggtccagatcccagtccacagtccacatgtatgcctcagtttctttgactgatccacaattagaactgatccaataaaatattattttgaaatcaagaaatatctttgctttttatttactgatagaataatctttcacctttttatcgttttctcataaaccagtctacctctaagatgtcttatttgaaaaccataaaaactggcttttaaaaaagcgaatcccatccctttccagaggtttggtatcaaatcgattttttaaaaatagaaattccctgcatcactttttggtgggcggagaaatgtgggaccctccccccaaattaaggattttactgccccaaaagtgtccttttcagattttaaaagaaagcatttttgaaatttgtgatgttacaaaatgctcaaatattaaagccaggattttaaaatttgtattttgctgtcatccgtaacattacttgtaaaaaaaaaaaaagtgataatgattagaatgtgatctttttctttggggatacaataaaatatgtttccaacttaattcatttgcagtccaagtaaaagtagactgcacaaagccgttattggggagatggccgtgggaagtaatcagaaatattctgaaaagagttgattcgatagtgccattcacattggtgtgaacgatgtttaacagggggcttcggtatgagacttaggaatgtcatttcttttataaaactgacaagcaaacaaagacaatgctaccatcaaatttcaaatggactttttctttaagttgcaatgaagttcaaatatggggaattaaaggcatgtgtggaaacacaacgaaaaaattttaataaacagcagtaacaaaatcttcatctcactttggaaacgacgagtcctttcacaatttttatgtcaaagacttaaaacatttcaagccaaccaggcaaaggttgatcgagagctgtgccatctctatggatagtttatggagaaagcatcatatttggaattatcactgtcatcgtttcctctctgaacatttccaatgagtttcctttatttgaatttcttggcaataagcattaattcttgcagtaatggcagctttgggttcaatcctgcaggttataagtaaaaacaaaacaaaacaaaatgaataaagaaagaagaaaataaacacaagctagcctttaatatggactgttgagcatttttat

SEQ ID NO: 917528 - DNA, 4001 bp, Homo sapiens
aaattaaataattctctggtaacacattcaaaaatgatcgttaagttaaagatgatcaacatggaagatggggaacgaagaaattaactagatcagtacactggactgatcagcatactacttggtgaacaagatagtactagaggagttgactccctttcctaagcaaatacatgaaaaagatctagcaactcatgagccataagtgtcaaaatatgtgtttccagcagacataaacaaaaatataaatgattatttctatgtttccaattccttcaatcaattagccattgtttaaggaagaaaaaatgttcaggttgcatgcacagcattcaacaagaaataactttaattcccattttggaactctagagggcaccagaaatatgccctccttcgcaccacccctcctcccgggtaacgtgagcagctgcagaagcccgtcgtctggttgctgaggttggtattgcagcagcaggagcgatgtctgcagcggtggaaacagcagcgcccactcccagctgcctcaccagccattacccaggcttcgccctgggggcagctgccacccaagggaaagctcctccccctcaaaacaacggggagggccaggtcccatagcttaacccctacaacctgacaatgtcctctattagcaacaaattaggggcaaaggactcacaatgggggtgttttcctcctcactttctgccaaggatgcaccagacagggctgaaggcgattcttggtcctgggataggaggaaaaaagaaaaatgtatcaaaaacacacaacctggtgggagaacccaaccctttctgccagaaggaggcagagaagggaataagaggtcaaggaggttcggtccttctattattacccccaccatgcgcacaacagccccctcctgcgtaagtggggcaaaacagcgcaaaatacatatttggggccaaaacccatgtgaaaggcaaaatctggaagggagggggcctaaggacaccgagcctgctcccgggaagggaggggggaagggaaaacgttgcctcgacgccagcaagggatttgtattccctcctaaatttgcccacccagcgtcatccccgtcactccaagtaccaattcagaggtaaggggcggctcacgtcactgctgggccgatatcgcccacatttgccccaagcagttgccctgggcctgaggtttgcccccccctgcagtcggcgaccggcagcgctgcctccccgtccgccattagagacccagccaaacaatacgtgcggagcaagagccgcgcagcgcagcgccgaggaaaagaagagcgaaggaggggacccggcggagcagaggcagcagccctcaccccgaaaaacttggggacctcggctccggtggacagggtgggagcgctgccccgagagcggagacccagccggggcgcccctcccccgccccccgccggagagaaaggaaaatgccccgcgacctccccgggcggccggcacccccgccccgccgtcccgccgtcccgccgccccgccggccccgcgacccccgccgctggcggccgcctcacccagccctcccggcctcgcccgcactctcccagcccctcgggccgcacgcaaaggcgcctgtgacatgagcgcagccccgagctgcccccgaggccccgacgcggcagcggcgacggcggccgcgccgcggggtattaatcccgggtcggtgggaggctccggaggctgccctcacccatctccgcctccctagtcgcctccgcctccgcctcctcctccggaggctgcgctgctcccagccacccccactctcggcggccctggactggaaagacagcggggataagcctcacccggttctggctggggctccgcggaacgaacctcccctcccccggcccaccccccttcggcgacacgcacaactccgctcggtccagtcccggctttagcgctggtgaggaggaggaggcggaggaggcggcggcgcggccgagcccggggaggccccgccctccgcgcgctcattggctgacggggaaggctggccggagcgcttcgggcacgcccattggctccgacggccgtccttcagggccccccctcggtagggtggtccgaagggctgtccgtcaggtgcgggccactcccccggccctgccgttccactcccgcctccgccggccctcgactcctggccgggtcccctccccgccggtcccccgcccccacccaccgggtctgccagggtcaggagcccgagattcgctgcccgccgtaccgaacccgcttcggctcctcggggcccggggctctccgggacctacacagcccgggagactccggcggggccgcctgccctcgcccgagcccgggcgcccaggccgcggcagcggctcccaacgcctctgcccgaggagagccgcggcctcgatgccccaacgccctccctgtccagttgcttgaaggcccctgcgaggggcgaggccggggaggcgctggagcgggtccgagtgggctttcgggaccgcgggtgaactggaatcccgaccgcgctgggggcagtggaggcccttccaccctcgccgcgccccgtggggaatagtcccccacctcccgccatggctgcagcaggaggagacgacgtcctccattttgtcggaacgactgtgggaacttgggaccccctaaaaaccaaaccccgtggggccgggaaacttgtcctcgggaagccccaactggactctgccattcggccaagggaacaaccccggctgctggcgtctgcgtccgcggggccacaggggacgggcacgacggtggagagacccagacgcagctccccgcctccatcaaccaagatggagggagctgcgggctcccctggagctgggctcccaccggttggaggggctgaggcctgccctggggcgtccttgggcgccgccgtcctgtgctccgcagcccggggcgctggccctgcccaggcctctctaccgcctgccaccgtctcctggtcctcaatggttgatggagactccatggaggctccctccacagcccgctgcatcgcggggcgcactcgctgcggccgccggggggagcggagtcagggacagacgacgacaggcgcccgaggagggcgggccccacaggccacctccacgaggggtcttctcttttgttcctcgtctacacctacgtcttcggcggacgtcatggtgctgaaccatttccaagactcacgtaaagatggaagcgatgtcgctttcgtctcgccctggcggttcttagtgggattacaactgaggatgttggttattttcccacccaaatggatgggcgacttctcaatttcacgattatctgacaccattgcctattaataaacatatatgataatacagtttcaagttcaacacaatattgatgaacatgaagtttttagtgaggttaatcacccgtgaaagactgatgtgtaaactaatagacgcaacttacagaggataatctagtagaagttgaattcattcactcattaaaaaaaataaatcaagtaggctttccaccttgtactaaataccttgaatacactgttctcttttattgaaaaaaattaataaaatgtacttgaaccagcttttcaaaaagtatcactaatttttaggaaactttgtaactaaaattttttagttttaaatacactaaaatagcctcttaagatttcatattacacagtactggtttagactgaaaaactatcatcacaacagaaacatcacaacaaaaacagccactatcatcaaaacaaacatcctctactaccaaattgtaataatttggtgaaaacttacatcattccttttctgctgccaggtcctattgaagtagcttcagctcattgaatttacatttagaagactaaagtagactaatacttccaaataagctctgtgataaatgatagattgggttgccacgtactgt

SEQ ID NO: 917529 - DNA, 4001 bp, Homo sapiens
tccagagacataatgtgtccagagtgctgacttcagatacttttagtttcaattgcctgaaggaaaatatgactggctatcttcatcttcctctctagcacattacatagttgccttaaaaccaacaaattaaataattctctggtaacacattcaaaaatgatcgttaagttaaagatgatcaacatggaagatggggaacgaagaaattaactagatcagtacactggactgatcagcatactacttggtgaacaagatagtactagaggagttgactccctttcctaagcaaatacatgaaaaagatctagcaactcatgagccataagtgtcaaaatatgtgtttccagcagacataaacaaaaatataaatgattatttctatgtttccaattccttcaatcaattagccattgtttaaggaagaaaaaatgttcaggttgcatgcacagcattcaacaagaaataactttaattcccattttggaactctagagggcaccagaaatatgccctccttcgcaccacccctcctcccgggtaacgtgagcagctgcagaagcccgtcgtctggttgctgaggttggtattgcagcagcaggagcgatgtctgcagcggtggaaacagcagcgcccactcccagctgcctcaccagccattacccaggcttcgccctgggggcagctgccacccaagggaaagctcctccccctcaaaacaacggggagggccaggtcccatagcttaacccctacaacctgacaatgtcctctattagcaacaaattaggggcaaaggactcacaatgggggtgttttcctcctcactttctgccaaggatgcaccagacagggctgaaggcgattcttggtcctgggataggaggaaaaaagaaaaatgtatcaaaaacacacaacctggtgggagaacccaaccctttctgccagaaggaggcagagaagggaataagaggtcaaggaggttcggtccttctattattacccccaccatgcgcacaacagccccctcctgcgtaagtggggcaaaacagcgcaaaatacatatttggggccaaaacccatgtgaaaggcaaaatctggaagggagggggcctaaggacaccgagcctgctcccgggaagggaggggggaagggaaaacgttgcctcgacgccagcaagggatttgtattccctcctaaatttgcccacccagcgtcatccccgtcactccaagtaccaattcagaggtaaggggcggctcacgtcactgctgggccgatatcgcccacatttgccccaagcagttgccctgggcctgaggtttgcccccccctgcagtcggcgaccggcagcgctgcctccccgtccgccattagagacccagccaaacaatacgtgcggagcaagagccgcgcagcgcagcgccgaggaaaagaagagcgaaggaggggacccggcggagcagaggcagcagccctcaccccgaaaaacttggggacctcggctccggtggacagggtgggagcgctgccccgagagcggagacccagccggggcgcccctcccccgccccccgccggagagaaaggaaaatgccccgcgacctccccgggcggccggcacccccgccccgccgtcccgccgtcccgccgccccgccggccccgcgacccccgccgctggcggccgcctcacccagccctcccggcctcgcccgcactctcccagcccctcgggccgcacgcaaaggcgcctgtgacatgagcgcagccccgagctgcccccgaggccccgacgcggcagcggcgacggcggccgcgccgcggggtattaatcccgggtcggtgggaggctccggaggctgccctcacccatctccgcctccctagtcgcctccgcctccgcctcctcctccggaggctgcgctgctcccagccacccccactctcggcggccctggactggaaagacagcggggataagcctcacccggttctggctggggctccgcggaacgaacctcccctcccccggcccaccccccttcggcgacacgcacaactccgctcggtccagtcccggctttagcgctggtgaggaggaggaggcggaggaggcggcggcgcggccgagcccggggaggccccgccctccgcgcgctcattggctgacggggaaggctggccggagcgcttcgggcacgcccattggctccgacggccgtccttcagggccccccctcggtagggtggtccgaagggctgtccgtcaggtgcgggccactcccccggccctgccgttccactcccgcctccgccggccctcgactcctggccgggtcccctccccgccggtcccccgcccccacccaccgggtctgccagggtcaggagcccgagattcgctgcccgccgtaccgaacccgcttcggctcctcggggcccggggctctccgggacctacacagcccgggagactccggcggggccgcctgccctcgcccgagcccgggcgcccaggccgcggcagcggctcccaacgcctctgcccgaggagagccgcggcctcgatgccccaacgccctccctgtccagttgcttgaaggcccctgcgaggggcgaggccggggaggcgctggagcgggtccgagtgggctttcgggaccgcgggtgaactggaatcccgaccgcgctgggggcagtggaggcccttccaccctcgccgcgccccgtggggaatagtcccccacctcccgccatggctgcagcaggaggagacgacgtcctccattttgtcggaacgactgtgggaacttgggaccccctaaaaaccaaaccccgtggggccgggaaacttgtcctcgggaagccccaactggactctgccattcggccaagggaacaaccccggctgctggcgtctgcgtccgcggggccacaggggacgggcacgacggtggagagacccagacgcagctccccgcctccatcaaccaagatggagggagctgcgggctcccctggagctgggctcccaccggttggaggggctgaggcctgccctggggcgtccttgggcgccgccgtcctgtgctccgcagcccggggcgctggccctgcccaggcctctctaccgcctgccaccgtctcctggtcctcaatggttgatggagactccatggaggctccctccacagcccgctgcatcgcggggcgcactcgctgcggccgccggggggagcggagtcagggacagacgacgacaggcgcccgaggagggcgggccccacaggccacctccacgaggggtcttctcttttgttcctcgtctacacctacgtcttcggcggacgtcatggtgctgaaccatttccaagactcacgtaaagatggaagcgatgtcgctttcgtctcgccctggcggttcttagtgggattacaactgaggatgttggttattttcccacccaaatggatgggcgacttctcaatttcacgattatctgacaccattgcctattaataaacatatatgataatacagtttcaagttcaacacaatattgatgaacatgaagtttttagtgaggttaatcacccgtgaaagactgatgtgtaaactaatagacgcaacttacagaggataatctagtagaagttgaattcattcactcattaaaaaaaataaatcaagtaggctttccaccttgtactaaataccttgaatacactgttctcttttattgaaaaaaattaataaaatgtacttgaaccagcttttcaaaaagtatcactaatttttaggaaactttgtaactaaaattttttagttttaaatacactaaaatagcctcttaagatttcatattacacagtactggtttagactgaaaaactatcatcacaacagaaacatcacaacaaaaacagccactatcatcaaaacaaacatcctctactaccaaattgtaataatttggtgaaaacttacatcattc

SEQ ID NO: 917530 - DNA, 4001 bp, Homo sapiens
cgttaagttaaagatgatcaacatggaagatggggaacgaagaaattaactagatcagtacactggactgatcagcatactacttggtgaacaagatagtactagaggagttgactccctttcctaagcaaatacatgaaaaagatctagcaactcatgagccataagtgtcaaaatatgtgtttccagcagacataaacaaaaatataaatgattatttctatgtttccaattccttcaatcaattagccattgtttaaggaagaaaaaatgttcaggttgcatgcacagcattcaacaagaaataactttaattcccattttggaactctagagggcaccagaaatatgccctccttcgcaccacccctcctcccgggtaacgtgagcagctgcagaagcccgtcgtctggttgctgaggttggtattgcagcagcaggagcgatgtctgcagcggtggaaacagcagcgcccactcccagctgcctcaccagccattacccaggcttcgccctgggggcagctgccacccaagggaaagctcctccccctcaaaacaacggggagggccaggtcccatagcttaacccctacaacctgacaatgtcctctattagcaacaaattaggggcaaaggactcacaatgggggtgttttcctcctcactttctgccaaggatgcaccagacagggctgaaggcgattcttggtcctgggataggaggaaaaaagaaaaatgtatcaaaaacacacaacctggtgggagaacccaaccctttctgccagaaggaggcagagaagggaataagaggtcaaggaggttcggtccttctattattacccccaccatgcgcacaacagccccctcctgcgtaagtggggcaaaacagcgcaaaatacatatttggggccaaaacccatgtgaaaggcaaaatctggaagggagggggcctaaggacaccgagcctgctcccgggaagggaggggggaagggaaaacgttgcctcgacgccagcaagggatttgtattccctcctaaatttgcccacccagcgtcatccccgtcactccaagtaccaattcagaggtaaggggcggctcacgtcactgctgggccgatatcgcccacatttgccccaagcagttgccctgggcctgaggtttgcccccccctgcagtcggcgaccggcagcgctgcctccccgtccgccattagagacccagccaaacaatacgtgcggagcaagagccgcgcagcgcagcgccgaggaaaagaagagcgaaggaggggacccggcggagcagaggcagcagccctcaccccgaaaaacttggggacctcggctccggtggacagggtgggagcgctgccccgagagcggagacccagccggggcgcccctcccccgccccccgccggagagaaaggaaaatgccccgcgacctccccgggcggccggcacccccgccccgccgtcccgccgtcccgccgccccgccggccccgcgacccccgccgctggcggccgcctcacccagccctcccggcctcgcccgcactctcccagcccctcgggccgcacgcaaaggcgcctgtgacatgagcgcagccccgagctgcccccgaggccccgacgcggcagcggcgacggcggccgcgccgcggggtattaatcccgggtcggtgggaggctccggaggctgccctcacccatctccgcctccctagtcgcctccgcctccgcctcctcctccggaggctgcgctgctcccagccacccccactctcggcggccctggactggaaagacagcggggataagcctcacccggttctggctggggctccgcggaacgaacctcccctcccccggcccaccccccttcggcgacacgcacaactccgctcggtccagtcccggctttagcgctggtgaggaggaggaggcggaggaggcggcggcgcggccgagcccggggaggccccgccctccgcgcgctcattggctgacggggaaggctggccggagcgcttcgggcacgcccattggctccgacggccgtccttcagggccccccctcggtagggtggtccgaagggctgtccgtcaggtgcgggccactcccccggccctgccgttccactcccgcctccgccggccctcgactcctggccgggtcccctccccgccggtcccccgcccccacccaccgggtctgccagggtcaggagcccgagattcgctgcccgccgtaccgaacccgcttcggctcctcggggcccggggctctccgggacctacacagcccgggagactccggcggggccgcctgccctcgcccgagcccgggcgcccaggccgcggcagcggctcccaacgcctctgcccgaggagagccgcggcctcgatgccccaacgccctccctgtccagttgcttgaaggcccctgcgaggggcgaggccggggaggcgctggagcgggtccgagtgggctttcgggaccgcgggtgaactggaatcccgaccgcgctgggggcagtggaggcccttccaccctcgccgcgccccgtggggaatagtcccccacctcccgccatggctgcagcaggaggagacgacgtcctccattttgtcggaacgactgtgggaacttgggaccccctaaaaaccaaaccccgtggggccgggaaacttgtcctcgggaagccccaactggactctgccattcggccaagggaacaaccccggctgctggcgtctgcgtccgcggggccacaggggacgggcacgacggtggagagacccagacgcagctccccgcctccatcaaccaagatggagggagctgcgggctcccctggagctgggctcccaccggttggaggggctgaggcctgccctggggcgtccttgggcgccgccgtcctgtgctccgcagcccggggcgctggccctgcccaggcctctctaccgcctgccaccgtctcctggtcctcaatggttgatggagactccatggaggctccctccacagcccgctgcatcgcggggcgcactcgctgcggccgccggggggagcggagtcagggacagacgacgacaggcgcccgaggagggcgggccccacaggccacctccacgaggggtcttctcttttgttcctcgtctacacctacgtcttcggcggacgtcatggtgctgaaccatttccaagactcacgtaaagatggaagcgatgtcgctttcgtctcgccctggcggttcttagtgggattacaactgaggatgttggttattttcccacccaaatggatgggcgacttctcaatttcacgattatctgacaccattgcctattaataaacatatatgataatacagtttcaagttcaacacaatattgatgaacatgaagtttttagtgaggttaatcacccgtgaaagactgatgtgtaaactaatagacgcaacttacagaggataatctagtagaagttgaattcattcactcattaaaaaaaataaatcaagtaggctttccaccttgtactaaataccttgaatacactgttctcttttattgaaaaaaattaataaaatgtacttgaaccagcttttcaaaaagtatcactaatttttaggaaactttgtaactaaaattttttagttttaaatacactaaaatagcctcttaagatttcatattacacagtactggtttagactgaaaaactatcatcacaacagaaacatcacaacaaaaacagccactatcatcaaaacaaacatcctctactaccaaattgtaataatttggtgaaaacttacatcattccttttctgctgccaggtcctattgaagtagcttcagctcattgaatttacatttagaagactaaagtagactaatacttccaaataagctctgtgataaatgatagattgggttgccacgtactgttcagttggagctctatactgctactaattccctagtgt

SEQ ID NO: 917531 - DNA, 4001 bp, Homo sapiens
gtttgatcagggttgaaaggacaaaattggcaagaactgaatcccagataataaaaatagaagtaaagcttgttaaagaaaaaaaaatcattttgtcactcctaatgaaattattcacacaaggattggtgttaaaagcattaagtgaatagctgacagagaaagggcatttgtactgtaccaaaatgaacacatagatcactgtctagtagcaaaaaaaaaaaacccgaaaaaacaaaaacaaacattaacttcctaacagagagagatcaggccactcagattcggtggtcaatcttagaattaggaatagtttgacaactagtttatgttatctcctcgtgtgatgctagctggaggactgtcagggtacataaataacagtcttcctcaaatacaaggcaaatatcaacgtcaaaacaacagattattcagtagtgtttctttttaatccaacagtaaaaaagtttttccaatctactggaaaagaaaaaattgttaaattcaaggcacttaaaagagagctaactttaaatcttgttctggaacttgagagagttccagtggtataaatgtcagcactccccgtgccttcccagggactaccatggcttggctctggggacaggggcacccaagcaattagcttgaaggccaaggccttcaagataacacaaaggcaaatccctcaggaagaacaccctactactgcactaattatattagacagcaaagcggggtaaaaaaaaaaaaacaactcacaatggagatatttccttcttaatttctgccaaagcctcacgacataggcttgaaggtgattcctggtcctagaatgagaattgaaaaccaatttcggtacaaccaatctggatgcacaaccaactcaacaccgtgaggtggcaaaggggtaagaggccaaggagttcctgggctctgctaccctcccccaccctaatgttaccgagaaactaagttgaaaaaaaagaactataggaaccgcaacgacgagacaaagctaaaagtgcttcgtccaactgcagtactggggatgcagtgggctcggggatccgaggcctgctcccaggacgggagagggaagggtaaacgtcgtctcgacgccagcaagggatttgtattccctcctaaatttgcccacccagcgtcatctctgtcactccaagcaccatttcagaggtaacgggcggcgcgcatcacctctgggcccacagttgcctcaagaagttgccctggggccccagcagtcgacgacagggccccagatccgccattaaactcgcccagatcagcagcaaagagtaaaagccgcgcagcgcctgggaaaagatgagcgaaggaggggacccagcggggcagaggcagaagccctcgcccgaaaaacctggggacctcggctccggcggcagggtggcagcgcggtcctgacagcgaagacccggccggggcgcccctccctcgcccaacccgccccccgccactatgcggcaggagagaaagaaaaatgccccgcgacctccccgggcggccggcaacccgccccgccaccccgcctccccgccggccccgcgacctccgccgctggcgaccgcctcacccaaccctcccggcctcgctcgcactctcccagcccctcaggccggacgcaaaagcgccggtgacaggagggcagccccgagctgccctcgaggccccgaagcggcaacggcgacggcggccgcgccgcggggtattaatcccgggtcggtgggagcctccggaggctgctctcacccatctccgcctccccactcacctcggcctccgcctcctcctccggaggctgcgctgctcccagccacccccactctcagcggccctggactggaaagacagcggggataagcgtcacccggttctggctgcggctgcgcggaacgaacaagcccaccccgcttcggcgacaagcacaactccgcgaggtccagtcccggcttttcgcgctggtgaggaggcggagaagcaggggacggcgcagcagagcccgaggaggccccaccctccgtgcgctcgttggctggcgagggagacgagcctgggcgccttgggcacgcccattggctccgacggccgtccttcagggcgccccctcggtggggtggccgaagagctgtccgtcaggtgcgggccacacccgcggccctgcagttccactcccgcctgccagccctcaactcccggtcgggttgtctccccgccggtctcccgcccccagctaccgggtccgccagggtcaggagcccgagattcgccgcccgtcgtagcggcccgcttcggcccctcggggcccggggctctccgggacctacacagcccgggagactccggcggggctgcctgccctcgcccgagcccgggggcccaagctgcggcagcggctcccaacgcctctgctcgaggagagcggcggcctggatgccccagcgccctccctgtccagttccttgaaggcccccaagaggggcgaggccggggaggtgctggagcggggccaagtgagctttcggggccgcggttgaactggagtcttgagtgcgctgcggtcagtggaggcccttccaccctcgccgcgccccgtggggaatagtcccccacctcccgccatggctgcagcaggaggagacgacgtcctccattttgtcgggacaactgtgggaacttgggacccctcaaaaccaaaccccgtggggccaggacttgtcccggaagccccgactgggctctgccattcggacaagggaacagccccagctgccggcgtctgcgtccgcggggcagtactggtcgggcgcgacggtggagacacccagacgcagctccccgcctccatcaaccaagatggagggagctgcaggctcccttggagctgggctctcgcgggttggaggggctgaggcctgccctggggcgtccctgggcgccgccgtcctgtgctagcagcccggggcgctggccctgcctaggcctttttactgcctgccaccgtctcctggtccggaatggttgatggagactccatggaggctccctccacagcccgctctatcgcggggcgcacccgctgcggcccctgcggggagcagaatcagggacagatggcgcccggtgagggcgggccccacaggccacctccacgaggggtcttctcttttgttcctcgtctacacctacgtcttcggcggatgtcatggtgctgaaccatttcccggactccacgtaaagatggaagcgattccgctttcgtctcgccctggcggttcttagtgggattacaattgaggatgttagtttggatgaaagttggtgaaatacttaccttatgtctggaaatacagataatgtgatttttaaaaaacacattgagccccgttttacttctgtggtatggtaaaggcacaggtttattcaatgaaaatcagacgttaaccatctaatgcaggggtggccaatcttttggcttcccggggccacattggaagaattggcttgggccacacataaaatacgctaacagtaacaatagctgatgagctaaaacaaacgaaaaaaccaaaacgccaaaaaaatctcataacgttttaagaaaatttacaaatatgtgttgggctgcattcaaagccgtcctgggccgcatgcaacccccaagggctgcaggttggacaagcttgatctaagacaaaagcatgttcacggattgatgagagttctgtgtaagcctttgcatattgcatagtgctgtatgtcatggatatgcctaatatcacctacattttttaggtcctcagttactctttggaaataagtgaattacatgtaatgtcatcattttaatgactgctgtaaattacaagcactgactaccctgagttcgtggagaagggctccatagagaaaatttgaaggtctgacagaaactttaaatggtaagctcagtagccacttgt

SEQ ID NO: 917532 - RNA, 19 nt, Artificial Sequence
  Description of Artificial Sequence: Synthetic oligonucleotide
  Sense strand starting at position 3367 of SEQ ID NO: 913310
ugcccaguccaauaaagaa

SEQ ID NO: 917533 - RNA, 19 nt, Artificial Sequence
  Description of Artificial Sequence: Synthetic oligonucleotide
  Antisense strand to SEQ ID NO: 917532
uucuuuauuggacugggca

SEQ ID NO: 917534 - RNA, 19 nt, Artificial Sequence
  Description of Artificial Sequence: Synthetic oligonucleotide
  Sense strand starting at position 254 of SEQ ID NO: 913310
aguaucacaccauagaguu

SEQ ID NO: 917535 - RNA, 19 nt, Artificial Sequence
  Description of Artificial Sequence: Synthetic oligonucleotide
  Antisense strand to SEQ ID NO: 917534
aacucuauggugugauacu

SEQ ID NO: 917536 - RNA, 19 nt, Artificial Sequence
  Description of Artificial Sequence: Synthetic oligonucleotide
  Sense strand starting at position 72 of SEQ ID NO: 913310
acaauauuugcauguguca

SEQ ID NO: 917537 - RNA, 19 nt, Artificial Sequence
  Description of Artificial Sequence: Synthetic oligonucleotide
  Antisense strand to SEQ ID NO: 917536
ugacacaugcaaauauugu

SEQ ID NO: 917538 - RNA, 19 nt, Artificial Sequence
  Description of Artificial Sequence: Synthetic oligonucleotide
  Sense strand starting at position 1789 of SEQ ID NO: 913310
ugaauuaggcucgauaaca

SEQ ID NO: 917539 - RNA, 19 nt, Artificial Sequence
  Description of Artificial Sequence: Synthetic oligonucleotide
  Antisense strand to SEQ ID NO: 917538
uguuaucgagccuaauuca

SEQ ID NO: 917540 - RNA, 19 nt, Artificial Sequence
  Description of Artificial Sequence: Synthetic oligonucleotide
  Sense strand starting at position 3495 of SEQ ID NO: 913310
uaggcaucugauggaaaca

SEQ ID NO: 917541 - RNA, 19 nt, Artificial Sequence
  Description of Artificial Sequence: Synthetic oligonucleotide
  Antisense strand to SEQ ID NO: 917540
uguuuccaucagaugccua

SEQ ID NO: 917542 - RNA, 19 nt, Artificial Sequence
  Description of Artificial Sequence: Synthetic oligonucleotide
  Sense strand starting at position 3453 of SEQ ID NO: 913310
gauggugauaaguggagau

SEQ ID NO: 917543 - RNA, 19 nt, Artificial Sequence
  Description of Artificial Sequence: Synthetic oligonucleotide
  Antisense strand to SEQ ID NO: 917542
aucuccacuuaucaccauc

SEQ ID NO: 917544 - RNA, 19 nt, Artificial Sequence
  Description of Artificial Sequence: Synthetic oligonucleotide
  Sense strand starting at position 196 of SEQ ID NO: 913310
ugagccuguuagguaauuu

SEQ ID NO: 917545 - RNA, 19 nt, Artificial Sequence
  Description of Artificial Sequence: Synthetic oligonucleotide
  Antisense strand to SEQ ID NO: 917544
aaauuaccuaacaggcuca

SEQ ID NO: 917546 - RNA, 19 nt, Artificial Sequence
  Description of Artificial Sequence: Synthetic oligonucleotide
  Sense strand starting at position 2553 of SEQ ID NO: 913310
gugugagaagcacaauaau

SEQ ID NO: 917547 - RNA, 19 nt, Artificial Sequence
  Description of Artificial Sequence: Synthetic oligonucleotide
  Antisense strand to SEQ ID NO: 917546
auuauugugcuucucacac

SEQ ID NO: 917548 - RNA, 19 nt, Artificial Sequence
  Description of Artificial Sequence: Synthetic oligonucleotide
  Sense strand starting at position 1434 of SEQ ID NO: 913310
aguagcucuggagauaauu

SEQ ID NO: 917549 - RNA, 19 nt, Artificial Sequence
  Description of Artificial Sequence: Synthetic oligonucleotide
  Antisense strand to SEQ ID NO: 917548
aauuaucuccagagcuacu

SEQ ID NO: 917550 - RNA, 19 nt, Artificial Sequence
  Description of Artificial Sequence: Synthetic oligonucleotide
  Sense strand starting at position 1366 of SEQ ID NO: 913310
uuugguuagcaagauaaug

SEQ ID NO: 917551 - RNA, 19 nt, Artificial Sequence
  Description of Artificial Sequence: Synthetic oligonucleotide
  Antisense strand to SEQ ID NO: 917550
cauuaucuugcuaaccaaa

SEQ ID NO: 917552 - RNA, 19 nt, Artificial Sequence
  Description of Artificial Sequence: Synthetic oligonucleotide
  Sense strand starting at position 1663 of SEQ ID NO: 913310
gugguaagucuacagaaau

SEQ ID NO: 917553 - RNA, 19 nt, Artificial Sequence
  Description of Artificial Sequence: Synthetic oligonucleotide
  Antisense strand to SEQ ID NO: 917552
auuucuguagacuuaccac

SEQ ID NO: 917554 - RNA, 19 nt, Artificial Sequence
  Description of Artificial Sequence: Synthetic oligonucleotide
  Sense strand starting at position 1137 of SEQ ID NO: 913310
uugguaaauguccagauug

SEQ ID NO: 917555 - RNA, 19 nt, Artificial Sequence
  Description of Artificial Sequence: Synthetic oligonucleotide
  Antisense strand to SEQ ID NO: 917554
caaucuggacauuuaccaa

SEQ ID NO: 917556 - RNA, 19 nt, Artificial Sequence
  Description of Artificial Sequence: Synthetic oligonucleotide
  Sense strand starting at position 3535 of SEQ ID NO: 913310
gaacgauauuaacuagagu

SEQ ID NO: 917557 - RNA, 19 nt, Artificial Sequence
  Description of Artificial Sequence: Synthetic oligonucleotide
  Antisense strand to SEQ ID NO: 917556
acucuaguuaauaucguuc

SEQ ID NO: 917558 - RNA, 19 nt, Artificial Sequence
  Description of Artificial Sequence: Synthetic oligonucleotide
  Sense strand starting at position 3062 of SEQ ID NO: 913310
guucucaaacauggaauua

SEQ ID NO: 917559 - RNA, 19 nt, Artificial Sequence
  Description of Artificial Sequence: Synthetic oligonucleotide
  Antisense strand to SEQ ID NO: 917558
uaauuccauguuugagaac

SEQ ID NO: 917560 - RNA, 19 nt, Artificial Sequence
  Description of Artificial Sequence: Synthetic oligonucleotide
  Sense strand starting at position 1388 of SEQ ID NO: 913310
ggcggaaucgcaagaguug

SEQ ID NO: 917561 - RNA, 19 nt, Artificial Sequence
  Description of Artificial Sequence: Synthetic oligonucleotide
  Antisense strand to SEQ ID NO: 917560
caacucuugcgauuccgcc

SEQ ID NO: 917562 - RNA, 19 nt, Artificial Sequence
  Description of Artificial Sequence: Synthetic oligonucleotide
  Sense strand starting at position 1894 of SEQ ID NO: 913310
cauggaucauaccugagua

SEQ ID NO: 917563 - RNA, 19 nt, Artificial Sequence
  Description of Artificial Sequence: Synthetic oligonucleotide
  Antisense strand to SEQ ID NO: 917562
uacucagguaugauccaug

SEQ ID NO: 917564 - RNA, 19 nt, Artificial Sequence
  Description of Artificial Sequence: Synthetic oligonucleotide
  Sense strand starting at position 2084 of SEQ ID NO: 913310
gcccuuugaccagauaauu

SEQ ID NO: 917565 - RNA, 19 nt, Artificial Sequence
  Description of Artificial Sequence: Synthetic oligonucleotide
  Antisense strand to SEQ ID NO: 917564
aauuaucuggucaaagggc

SEQ ID NO: 917566 - RNA, 19 nt, Artificial Sequence
  Description of Artificial Sequence: Synthetic oligonucleotide
  Sense strand starting at position 2707 of SEQ ID NO: 913310
agagcuguagucuacagaa

SEQ ID NO: 917567 - RNA, 19 nt, Artificial Sequence
  Description of Artificial Sequence: Synthetic oligonucleotide
  Antisense strand to SEQ ID NO: 917566
uucuguagacuacagcucu

SEQ ID NO: 917568 - RNA, 19 nt, Artificial Sequence
  Description of Artificial Sequence: Synthetic oligonucleotide
  Sense strand starting at position 2709 of SEQ ID NO: 913310
agcuguagucuacagaaga

SEQ ID NO: 917569 - RNA, 19 nt, Artificial Sequence
  Description of Artificial Sequence: Synthetic oligonucleotide
  Antisense strand to SEQ ID NO: 917568
ucuucuguagacuacagcu

SEQ ID NO: 917570 - RNA, 19 nt, Artificial Sequence
  Description of Artificial Sequence: Synthetic oligonucleotide
  Sense strand starting at position 2551 of SEQ ID NO: 913310
cugugugagaagcacaaua

SEQ ID NO: 917571 - RNA, 19 nt, Artificial Sequence
  Description of Artificial Sequence: Synthetic oligonucleotide
  Antisense strand to SEQ ID NO: 917570
uauugugcuucucacacag

SEQ ID NO: 917572 - RNA, 19 nt, Artificial Sequence
  Description of Artificial Sequence: Synthetic oligonucleotide
  Sense strand starting at position 99 of SEQ ID NO: 913310
cagugcucgagcguaugau

SEQ ID NO: 917573 - RNA, 19 nt, Artificial Sequence
  Description of Artificial Sequence: Synthetic oligonucleotide
  Antisense strand to SEQ ID NO: 917572
aucauacgcucgagcacug

SEQ ID NO: 917574 - RNA, 19 nt, Artificial Sequence
  Description of Artificial Sequence: Synthetic oligonucleotide
  Sense strand starting at position 2402 of SEQ ID NO: 913310
aggucaaguacguagauaa

SEQ ID NO: 917575 - RNA, 19 nt, Artificial Sequence
  Description of Artificial Sequence: Synthetic oligonucleotide
  Antisense strand to SEQ ID NO: 917574
uuaucuacguacuugaccu

SEQ ID NO: 917576 - RNA, 19 nt, Artificial Sequence
  Description of Artificial Sequence: Synthetic oligonucleotide
  Sense strand starting at position 487 of SEQ ID NO: 913310
aggaaauguugauauuuga

SEQ ID NO: 917577 - RNA, 19 nt, Artificial Sequence
  Description of Artificial Sequence: Synthetic oligonucleotide
  Antisense strand to SEQ ID NO: 917576
ucaaauaucaacauuuccu

SEQ ID NO: 917578 - RNA, 19 nt, Artificial Sequence
  Description of Artificial Sequence: Synthetic oligonucleotide
  Sense strand starting at position 1432 of SEQ ID NO: 913310
guaguagcucuggagauaa

SEQ ID NO: 917579 - RNA, 19 nt, Artificial Sequence
  Description of Artificial Sequence: Synthetic oligonucleotide
  Antisense strand to SEQ ID NO: 917578
uuaucuccagagcuacuac

SEQ ID NO: 917580 - RNA, 19 nt, Artificial Sequence
  Description of Artificial Sequence: Synthetic oligonucleotide
  Sense strand starting at position 2105 of SEQ ID NO: 913310
gucacuacagcccagauau

SEQ ID NO: 917581 - RNA, 19 nt, Artificial Sequence
  Description of Artificial Sequence: Synthetic oligonucleotide
  Antisense strand to SEQ ID NO: 917580
auaucugggcuguagugac

SEQ ID NO: 917582 - RNA, 19 nt, Artificial Sequence
  Description of Artificial Sequence: Synthetic oligonucleotide
  Sense strand starting at position 3393 of SEQ ID NO: 913310
uguuguaagauggacaguu

SEQ ID NO: 917583 - RNA, 19 nt, Artificial Sequence
  Description of Artificial Sequence: Synthetic oligonucleotide
  Antisense strand to SEQ ID NO: 917582
aacuguccaucuuacaaca

SEQ ID NO: 917584 - RNA, 19 nt, Artificial Sequence
  Description of Artificial Sequence: Synthetic oligonucleotide
  Sense strand starting at position 1051 of SEQ ID NO: 913310
ggaauccuuucuucuugga

SEQ ID NO: 917585 - RNA, 19 nt, Artificial Sequence
  Description of Artificial Sequence: Synthetic oligonucleotide
  Antisense strand to SEQ ID NO: 917584
uccaagaagaaaggauucc

SEQ ID NO: 917586 - RNA, 19 nt, Artificial Sequence
  Description of Artificial Sequence: Synthetic oligonucleotide
  Sense strand starting at position 3114 of SEQ ID NO: 913310
uucccauagcaauggauga

SEQ ID NO: 917587 - RNA, 19 nt, Artificial Sequence
  Description of Artificial Sequence: Synthetic oligonucleotide
  Antisense strand to SEQ ID NO: 917586
ucauccauugcuaugggaa

SEQ ID NO: 917588 - RNA, 19 nt, Artificial Sequence
  Description of Artificial Sequence: Synthetic oligonucleotide
  Sense strand starting at position 3447 of SEQ ID NO: 913310
ggcuuagauggugauaagu

SEQ ID NO: 917589 - RNA, 19 nt, Artificial Sequence
  Description of Artificial Sequence: Synthetic oligonucleotide
  Antisense strand to SEQ ID NO: 917588
acuuaucaccaucuaagcc

SEQ ID NO: 917590 - RNA, 19 nt, Artificial Sequence
  Description of Artificial Sequence: Synthetic oligonucleotide
  Sense strand starting at position 2031 of SEQ ID NO: 913310
uuacaauuccugggaguua

SEQ ID NO: 917591 - RNA, 19 nt, Artificial Sequence
  Description of Artificial Sequence: Synthetic oligonucleotide
  Antisense strand to SEQ ID NO: 917590
uaacucccaggaauuguaa

SEQ ID NO: 917592 - RNA, 19 nt, Artificial Sequence
  Description of Artificial Sequence: Synthetic oligonucleotide
  Sense strand starting at position 422 of SEQ ID NO: 913310
cuuacuugacaauggaguu

SEQ ID NO: 917593 - RNA, 19 nt, Artificial Sequence
  Description of Artificial Sequence: Synthetic oligonucleotide
  Antisense strand to SEQ ID NO: 917592
aacuccauugucaaguaag

SEQ ID NO: 917594 - RNA, 19 nt, Artificial Sequence
  Description of Artificial Sequence: Synthetic oligonucleotide
  Sense strand starting at position 1775 of SEQ ID NO: 913310
gcuagauaauucuuugaau

SEQ ID NO: 917595 - RNA, 19 nt, Artificial Sequence
  Description of Artificial Sequence: Synthetic oligonucleotide
  Antisense strand to SEQ ID NO: 917594
auucaaagaauuaucuagc

SEQ ID NO: 917596 - RNA, 19 nt, Artificial Sequence
  Description of Artificial Sequence: Synthetic oligonucleotide
  Sense strand starting at position 2020 of SEQ ID NO: 913310
uuagguuugguuuacaauu

SEQ ID NO: 917597 - RNA, 19 nt, Artificial Sequence
  Description of Artificial Sequence: Synthetic oligonucleotide
  Antisense strand to SEQ ID NO: 917596
aauuguaaaccaaaccuaa

SEQ ID NO: 917598 - RNA, 19 nt, Artificial Sequence
  Description of Artificial Sequence: Synthetic oligonucleotide
  Sense strand starting at position 684 of SEQ ID NO: 913310
uuaagaguugucugaaaug

SEQ ID NO: 917599 - RNA, 19 nt, Artificial Sequence
  Description of Artificial Sequence: Synthetic oligonucleotide
  Antisense strand to SEQ ID NO: 917598
cauuucagacaacucuuaa

SEQ ID NO: 917600 - RNA, 19 nt, Artificial Sequence
  Description of Artificial Sequence: Synthetic oligonucleotide
  Sense strand starting at position 708 of SEQ ID NO: 913310
agucaauguuauuccagaa

SEQ ID NO: 917601 - RNA, 19 nt, Artificial Sequence
  Description of Artificial Sequence: Synthetic oligonucleotide
  Antisense strand to SEQ ID NO: 917600
uucuggaauaacauugacu

SEQ ID NO: 917602 - RNA, 19 nt, Artificial Sequence
  Description of Artificial Sequence: Synthetic oligonucleotide
  Sense strand starting at position 2803 of SEQ ID NO: 913310
gguuuaagagcuuggaaac

SEQ ID NO: 917603 - RNA, 19 nt, Artificial Sequence
  Description of Artificial Sequence: Synthetic oligonucleotide
  Antisense strand to SEQ ID NO: 917602
guuuccaagcucuuaaacc

SEQ ID NO: 917604 - RNA, 19 nt, Artificial Sequence
  Description of Artificial Sequence: Synthetic oligonucleotide
  Sense strand starting at position 3255 of SEQ ID NO: 913310
ucuacuuccuucuugggaa

SEQ ID NO: 917605 - RNA, 19 nt, Artificial Sequence
  Description of Artificial Sequence: Synthetic oligonucleotide
  Antisense strand to SEQ ID NO: 917604
uucccaagaaggaaguaga

SEQ ID NO: 917606 - RNA, 19 nt, Artificial Sequence
  Description of Artificial Sequence: Synthetic oligonucleotide
  Sense strand starting at position 3456 of SEQ ID NO: 913310
ggugauaaguggagaugaa

SEQ ID NO: 917607 - RNA, 19 nt, Artificial Sequence
  Description of Artificial Sequence: Synthetic oligonucleotide
  Antisense strand to SEQ ID NO: 917606
uucaucuccacuuaucacc

SEQ ID NO: 917608 - RNA, 19 nt, Artificial Sequence
  Description of Artificial Sequence: Synthetic oligonucleotide
  Sense strand starting at position 2633 of SEQ ID NO: 913310
guaacugaguuucuugaaa

SEQ ID NO: 917609 - RNA, 19 nt, Artificial Sequence
  Description of Artificial Sequence: Synthetic oligonucleotide
  Antisense strand to SEQ ID NO: 917608
uuucaagaaacucaguuac

SEQ ID NO: 917610 - RNA, 19 nt, Artificial Sequence
  Description of Artificial Sequence: Synthetic oligonucleotide
  Sense strand starting at position 707 of SEQ ID NO: 913310
gagucaauguuauuccaga

SEQ ID NO: 917611 - RNA, 19 nt, Artificial Sequence
  Description of Artificial Sequence: Synthetic oligonucleotide
  Antisense strand to SEQ ID NO: 917610
ucuggaauaacauugacuc

SEQ ID NO: 917612 - RNA, 19 nt, Artificial Sequence
  Description of Artificial Sequence: Synthetic oligonucleotide
  Sense strand starting at position 434 of SEQ ID NO: 913311
uguaacauuugcucucuga

SEQ ID NO: 917613 - RNA, 19 nt, Artificial Sequence
  Description of Artificial Sequence: Synthetic oligonucleotide
  Antisense strand to SEQ ID NO: 917612
ucagagagcaaauguuaca

SEQ ID NO: 917614 - RNA, 19 nt, Artificial Sequence
  Description of Artificial Sequence: Synthetic oligonucleotide
  Sense strand starting at position 549 of SEQ ID NO: 913311
cagucuuugcauucugcga

SEQ ID NO: 917615 - RNA, 19 nt, Artificial Sequence
  Description of Artificial Sequence: Synthetic oligonucleotide
  Antisense strand to SEQ ID NO: 917614
ucgcagaaugcaaagacug

SEQ ID NO: 917616 - RNA, 19 nt, Artificial Sequence
  Description of Artificial Sequence: Synthetic oligonucleotide
  Sense strand starting at position 550 of SEQ ID NO: 913311
agucuuugcauucugcgau

SEQ ID NO: 917617 - RNA, 19 nt, Artificial Sequence
  Description of Artificial Sequence: Synthetic oligonucleotide
  Antisense strand to SEQ ID NO: 917616
aucgcagaaugcaaagacu

SEQ ID NO: 917618 - RNA, 19 nt, Artificial Sequence
  Description of Artificial Sequence: Synthetic oligonucleotide
  Sense strand starting at position 3066 of SEQ ID NO: 913311
gauucuauagugcaaauga

SEQ ID NO: 917619 - RNA, 19 nt, Artificial Sequence
  Description of Artificial Sequence: Synthetic oligonucleotide
  Antisense strand to SEQ ID NO: 917618
ucauuugcacuauagaauc

SEQ ID NO: 917620 - RNA, 19 nt, Artificial Sequence
  Description of Artificial Sequence: Synthetic oligonucleotide
  Sense strand starting at position 322 of SEQ ID NO: 913311
acagaauaguucccuggga

SEQ ID NO: 917621 - RNA, 19 nt, Artificial Sequence
  Description of Artificial Sequence: Synthetic oligonucleotide
  Antisense strand to SEQ ID NO: 917620
ucccagggaacuauucugu

SEQ ID NO: 917622 - RNA, 19 nt, Artificial Sequence
  Description of Artificial Sequence: Synthetic oligonucleotide
  Sense strand starting at position 324 of SEQ ID NO: 913311
agaauaguucccugggaua

SEQ ID NO: 917623 - RNA, 19 nt, Artificial Sequence
  Description of Artificial Sequence: Synthetic oligonucleotide
  Antisense strand to SEQ ID NO: 917622
uaucccagggaacuauucu

SEQ ID NO: 917624 - RNA, 19 nt, Artificial Sequence
  Description of Artificial Sequence: Synthetic oligonucleotide
  Sense strand starting at position 2164 of SEQ ID NO: 913311
uucgcuucugcugcaagau

SEQ ID NO: 917625 - RNA, 19 nt, Artificial Sequence
  Description of Artificial Sequence: Synthetic oligonucleotide
  Antisense strand to SEQ ID NO: 917624
aucuugcagcagaagcgaa

SEQ ID NO: 917626 - RNA, 19 nt, Artificial Sequence
  Description of Artificial Sequence: Synthetic oligonucleotide
  Sense strand starting at position 2269 of SEQ ID NO: 913311
guaaacuuucuuugaagaa

SEQ ID NO: 917627 - RNA, 19 nt, Artificial Sequence
  Description of Artificial Sequence: Synthetic oligonucleotide
  Antisense strand to SEQ ID NO: 917626
uucuucaaagaaaguuuac

SEQ ID NO: 917628 - RNA, 19 nt, Artificial Sequence
  Description of Artificial Sequence: Synthetic oligonucleotide
  Sense strand starting at position 1550 of SEQ ID NO: 913311
gaucuuauauccucuggag

SEQ ID NO: 917629 - RNA, 19 nt, Artificial Sequence
  Description of Artificial Sequence: Synthetic oligonucleotide
  Antisense strand to SEQ ID NO: 917628
cuccagaggauauaagauc

SEQ ID NO: 917630 - RNA, 19 nt, Artificial Sequence
  Description of Artificial Sequence: Synthetic oligonucleotide
  Sense strand starting at position 1490 of SEQ ID NO: 913311
aguacaagagucugauaua

SEQ ID NO: 917631 - RNA, 19 nt, Artificial Sequence
  Description of Artificial Sequence: Synthetic oligonucleotide
  Antisense strand to SEQ ID NO: 917630
uauaucagacucuuguacu

SEQ ID NO: 917632 - RNA, 19 nt, Artificial Sequence
  Description of Artificial Sequence: Synthetic oligonucleotide
  Sense strand starting at position 1452 of SEQ ID NO: 913311
ccuguuucucuuuagagaa

SEQ ID NO: 917633 - RNA, 19 nt, Artificial Sequence
  Description of Artificial Sequence: Synthetic oligonucleotide
  Antisense strand to SEQ ID NO: 917632
uucucuaaagagaaacagg

SEQ ID NO: 917634 - RNA, 19 nt, Artificial Sequence
  Description of Artificial Sequence: Synthetic oligonucleotide
  Sense strand starting at position 326 of SEQ ID NO: 913311
aauaguucccugggauaua

SEQ ID NO: 917635 - RNA, 19 nt, Artificial Sequence
  Description of Artificial Sequence: Synthetic oligonucleotide
  Antisense strand to SEQ ID NO: 917634
uauaucccagggaacuauu

SEQ ID NO: 917636 - RNA, 19 nt, Artificial Sequence
  Description of Artificial Sequence: Synthetic oligonucleotide
  Sense strand starting at position 726 of SEQ ID NO: 913311
ugcccugaccaagaaaguu

SEQ ID NO: 917637 - RNA, 19 nt, Artificial Sequence
  Description of Artificial Sequence: Synthetic oligonucleotide
  Antisense strand to SEQ ID NO: 917636
aacuuucuuggucagggca

SEQ ID NO: 917638 - RNA, 19 nt, Artificial Sequence
  Description of Artificial Sequence: Synthetic oligonucleotide
  Sense strand starting at position 323 of SEQ ID NO: 913311
cagaauaguucccugggau

SEQ ID NO: 917639 - RNA, 19 nt, Artificial Sequence
  Description of Artificial Sequence: Synthetic oligonucleotide
  Antisense strand to SEQ ID NO: 917638
aucccagggaacuauucug

SEQ ID NO: 917640 - RNA, 19 nt, Artificial Sequence
  Description of Artificial Sequence: Synthetic oligonucleotide
  Sense strand starting at position 1641 of SEQ ID NO: 913311
uggugaccacccuaaguua

SEQ ID NO: 917641 - RNA, 19 nt, Artificial Sequence
  Description of Artificial Sequence: Synthetic oligonucleotide
  Antisense strand to SEQ ID NO: 917640
uaacuuaggguggucacca

SEQ ID NO: 917642 - RNA, 19 nt, Artificial Sequence
  Description of Artificial Sequence: Synthetic oligonucleotide
  Sense strand starting at position 1018 of SEQ ID NO: 913311
gaguuugcagaugauacuu

SEQ ID NO: 917643 - RNA, 19 nt, Artificial Sequence
  Description of Artificial Sequence: Synthetic oligonucleotide
  Antisense strand to SEQ ID NO: 917642
aaguaucaucugcaaacuc

SEQ ID NO: 917644 - RNA, 19 nt, Artificial Sequence
  Description of Artificial Sequence: Synthetic oligonucleotide
  Sense strand starting at position 2268 of SEQ ID NO: 913311
uguaaacuuucuuugaaga

SEQ ID NO: 917645 - RNA, 19 nt, Artificial Sequence
  Description of Artificial Sequence: Synthetic oligonucleotide
  Antisense strand to SEQ ID NO: 917644
ucuucaaagaaaguuuaca

SEQ ID NO: 917646 - RNA, 19 nt, Artificial Sequence
  Description of Artificial Sequence: Synthetic oligonucleotide
  Sense strand starting at position 2267 of SEQ ID NO: 913311
auguaaacuuucuuugaag

SEQ ID NO: 917647 - RNA, 19 nt, Artificial Sequence
  Description of Artificial Sequence: Synthetic oligonucleotide
  Antisense strand to SEQ ID NO: 917646
cuucaaagaaaguuuacau

SEQ ID NO: 917648 - RNA, 19 nt, Artificial Sequence
  Description of Artificial Sequence: Synthetic oligonucleotide
  Sense strand starting at position 424 of SEQ ID NO: 913311
uuagucauacuguaacauu

SEQ ID NO: 917649 - RNA, 19 nt, Artificial Sequence
  Description of Artificial Sequence: Synthetic oligonucleotide
  Antisense strand to SEQ ID NO: 917648
aauguuacaguaugacuaa

SEQ ID NO: 917650 - RNA, 19 nt, Artificial Sequence
  Description of Artificial Sequence: Synthetic oligonucleotide
  Sense strand starting at position 247 of SEQ ID NO: 913311
agcuauucugaguaaaccu

SEQ ID NO: 917651 - RNA, 19 nt, Artificial Sequence
  Description of Artificial Sequence: Synthetic oligonucleotide
  Antisense strand to SEQ ID NO: 917650
agguuuacucagaauagcu

SEQ ID NO: 917652 - RNA, 19 nt, Artificial Sequence
  Description of Artificial Sequence: Synthetic oligonucleotide
  Sense strand starting at position 1552 of SEQ ID NO: 913311
ucuuauauccucuggagau

SEQ ID NO: 917653 - RNA, 19 nt, Artificial Sequence
  Description of Artificial Sequence: Synthetic oligonucleotide
  Antisense strand to SEQ ID NO: 917652
aucuccagaggauauaaga

SEQ ID NO: 917654 - RNA, 19 nt, Artificial Sequence
  Description of Artificial Sequence: Synthetic oligonucleotide
  Sense strand starting at position 1459 of SEQ ID NO: 913311
cucuuuagagaaggcaauu

SEQ ID NO: 917655 - RNA, 19 nt, Artificial Sequence
  Description of Artificial Sequence: Synthetic oligonucleotide
  Antisense strand to SEQ ID NO: 917654
aauugccuucucuaaagag

SEQ ID NO: 917656 - RNA, 19 nt, Artificial Sequence
  Description of Artificial Sequence: Synthetic oligonucleotide
  Sense strand starting at position 778 of SEQ ID NO: 913311
auggccugucuagauacua

SEQ ID NO: 917657 - RNA, 19 nt, Artificial Sequence
  Description of Artificial Sequence: Synthetic oligonucleotide
  Antisense strand to SEQ ID NO: 917656
uaguaucuagacaggccau

SEQ ID NO: 917658 - RNA, 19 nt, Artificial Sequence
  Description of Artificial Sequence: Synthetic oligonucleotide
  Sense strand starting at position 412 of SEQ ID NO: 913311
cagggagaaugcuuaguca

SEQ ID NO: 917659 - RNA, 19 nt, Artificial Sequence
  Description of Artificial Sequence: Synthetic oligonucleotide
  Antisense strand to SEQ ID NO: 917658
ugacuaagcauucucccug

SEQ ID NO: 917660 - RNA, 19 nt, Artificial Sequence
  Description of Artificial Sequence: Synthetic oligonucleotide
  Sense strand starting at position 3155 of SEQ ID NO: 913311
agaggcauaucagccaaau

SEQ ID NO: 917661 - RNA, 19 nt, Artificial Sequence
  Description of Artificial Sequence: Synthetic oligonucleotide
  Antisense strand to SEQ ID NO: 917660
auuuggcugauaugccucu

SEQ ID NO: 917662 - RNA, 19 nt, Artificial Sequence
  Description of Artificial Sequence: Synthetic oligonucleotide
  Sense strand starting at position 1358 of SEQ ID NO: 913311
gcaagacucagucacggau

SEQ ID NO: 917663 - RNA, 19 nt, Artificial Sequence
  Description of Artificial Sequence: Synthetic oligonucleotide
  Antisense strand to SEQ ID NO: 917662
auccgugacugagucuugc

SEQ ID NO: 917664 - RNA, 19 nt, Artificial Sequence
  Description of Artificial Sequence: Synthetic oligonucleotide
  Sense strand starting at position 2001 of SEQ ID NO: 913311
acaagaggccucuguagga

SEQ ID NO: 917665 - RNA, 19 nt, Artificial Sequence
  Description of Artificial Sequence: Synthetic oligonucleotide
  Antisense strand to SEQ ID NO: 917664
uccuacagaggccucuugu

SEQ ID NO: 917666 - RNA, 19 nt, Artificial Sequence
  Description of Artificial Sequence: Synthetic oligonucleotide
  Sense strand starting at position 3026 of SEQ ID NO: 913311
acuccauuggaaugcaauu

SEQ ID NO: 917667 - RNA, 19 nt, Artificial Sequence
  Description of Artificial Sequence: Synthetic oligonucleotide
  Antisense strand to SEQ ID NO: 917666
aauugcauuccaauggagu

SEQ ID NO: 917668 - RNA, 19 nt, Artificial Sequence
  Description of Artificial Sequence: Synthetic oligonucleotide
  Sense strand starting at position 1309 of SEQ ID NO: 913311
uugccaguucuagaacuua

SEQ ID NO: 917669 - RNA, 19 nt, Artificial Sequence
  Description of Artificial Sequence: Synthetic oligonucleotide
  Antisense strand to SEQ ID NO: 917668
uaaguucuagaacuggcaa

SEQ ID NO: 917670 - RNA, 19 nt, Artificial Sequence
  Description of Artificial Sequence: Synthetic oligonucleotide
  Sense strand starting at position 1270 of SEQ ID NO: 913311
guugcaucccuagacucaa

SEQ ID NO: 917671 - RNA, 19 nt, Artificial Sequence
  Description of Artificial Sequence: Synthetic oligonucleotide
  Antisense strand to SEQ ID NO: 917670
uugagucuagggaugcaac

SEQ ID NO: 917672 - RNA, 19 nt, Artificial Sequence
  Description of Artificial Sequence: Synthetic oligonucleotide
  Sense strand starting at position 852 of SEQ ID NO: 913311
ggacccagguccuuucuaa

SEQ ID NO: 917673 - RNA, 19 nt, Artificial Sequence
  Description of Artificial Sequence: Synthetic oligonucleotide
  Antisense strand to SEQ ID NO: 917672
uuagaaaggaccugggucc

SEQ ID NO: 917674 - RNA, 19 nt, Artificial Sequence
  Description of Artificial Sequence: Synthetic oligonucleotide
  Sense strand starting at position 415 of SEQ ID NO: 913311
ggagaaugcuuagucauac

SEQ ID NO: 917675 - RNA, 19 nt, Artificial Sequence
  Description of Artificial Sequence: Synthetic oligonucleotide
  Antisense strand to SEQ ID NO: 917674
guaugacuaagcauucucc

SEQ ID NO: 917676 - RNA, 19 nt, Artificial Sequence
  Description of Artificial Sequence: Synthetic oligonucleotide
  Sense strand starting at position 735 of SEQ ID NO: 913311
caagaaaguuugucaggua

SEQ ID NO: 917677 - RNA, 19 nt, Artificial Sequence
  Description of Artificial Sequence: Synthetic oligonucleotide
  Antisense strand to SEQ ID NO: 917676
uaccugacaaacuuucuug

SEQ ID NO: 917678 - RNA, 19 nt, Artificial Sequence
  Description of Artificial Sequence: Synthetic oligonucleotide
  Sense strand starting at position 1023 of SEQ ID NO: 913311
ugcagaugauacuuucuca

SEQ ID NO: 917679 - RNA, 19 nt, Artificial Sequence
  Description of Artificial Sequence: Synthetic oligonucleotide
  Antisense strand to SEQ ID NO: 917678
ugagaaaguaucaucugca

SEQ ID NO: 917680 - RNA, 19 nt, Artificial Sequence
  Description of Artificial Sequence: Synthetic oligonucleotide
  Sense strand starting at position 3172 of SEQ ID NO: 913311
augugaauuguauggaccu

SEQ ID NO: 917681 - RNA, 19 nt, Artificial Sequence
  Description of Artificial Sequence: Synthetic oligonucleotide
  Antisense strand to SEQ ID NO: 917680
agguccauacaauucacau

SEQ ID NO: 917682 - RNA, 19 nt, Artificial Sequence
  Description of Artificial Sequence: Synthetic oligonucleotide
  Sense strand starting at position 170 of SEQ ID NO: 913311
ugacaaauguagucacuuu

SEQ ID NO: 917683 - RNA, 19 nt, Artificial Sequence
  Description of Artificial Sequence: Synthetic oligonucleotide
  Antisense strand to SEQ ID NO: 917682
aaagugacuacauuuguca

SEQ ID NO: 917684 - RNA, 19 nt, Artificial Sequence
  Description of Artificial Sequence: Synthetic oligonucleotide
  Sense strand starting at position 1017 of SEQ ID NO: 913311
ggaguuugcagaugauacu

SEQ ID NO: 917685 - RNA, 19 nt, Artificial Sequence
  Description of Artificial Sequence: Synthetic oligonucleotide
  Antisense strand to SEQ ID NO: 917684
aguaucaucugcaaacucc

SEQ ID NO: 917686 - RNA, 19 nt, Artificial Sequence
  Description of Artificial Sequence: Synthetic oligonucleotide
  Sense strand starting at position 1451 of SEQ ID NO: 913311
accuguuucucuuuagaga

SEQ ID NO: 917687 - RNA, 19 nt, Artificial Sequence
  Description of Artificial Sequence: Synthetic oligonucleotide
  Antisense strand to SEQ ID NO: 917686
ucucuaaagagaaacaggu

SEQ ID NO: 917688 - RNA, 19 nt, Artificial Sequence
  Description of Artificial Sequence: Synthetic oligonucleotide
  Sense strand starting at position 416 of SEQ ID NO: 913311
gagaaugcuuagucauacu

SEQ ID NO: 917689 - RNA, 19 nt, Artificial Sequence
  Description of Artificial Sequence: Synthetic oligonucleotide
  Antisense strand to SEQ ID NO: 917688
aguaugacuaagcauucuc

SEQ ID NO: 917690 - RNA, 19 nt, Artificial Sequence
  Description of Artificial Sequence: Synthetic oligonucleotide
  Sense strand starting at position 1672 of SEQ ID NO: 913311
uuguucugagucugagaag

SEQ ID NO: 917691 - RNA, 19 nt, Artificial Sequence
  Description of Artificial Sequence: Synthetic oligonucleotide
  Antisense strand to SEQ ID NO: 917690
cuucucagacucagaacaa

SEQ ID NO: 917692 - RNA, 19 nt, Artificial Sequence
  Description of Artificial Sequence: Synthetic oligonucleotide
  Sense strand starting at position 130 of SEQ ID NO: 913312
ucaggagaauuccuaaagu

SEQ ID NO: 917693 - RNA, 19 nt, Artificial Sequence
  Description of Artificial Sequence: Synthetic oligonucleotide
  Antisense strand to SEQ ID NO: 917692
acuuuaggaauucuccuga

SEQ ID NO: 917694 - RNA, 19 nt, Artificial Sequence
  Description of Artificial Sequence: Synthetic oligonucleotide
  Sense strand starting at position 637 of SEQ ID NO: 913312
accucuguucguuucugua

SEQ ID NO: 917695 - RNA, 19 nt, Artificial Sequence
  Description of Artificial Sequence: Synthetic oligonucleotide
  Antisense strand to SEQ ID NO: 917694
uacagaaacgaacagaggu

SEQ ID NO: 917696 - RNA, 19 nt, Artificial Sequence
  Description of Artificial Sequence: Synthetic oligonucleotide
  Sense strand starting at position 3591 of SEQ ID NO: 913312
ugauuagggaggugauacu

SEQ ID NO: 917697 - RNA, 19 nt, Artificial Sequence
  Description of Artificial Sequence: Synthetic oligonucleotide
  Antisense strand to SEQ ID NO: 917696
aguaucaccucccuaauca

SEQ ID NO: 917698 - RNA, 19 nt, Artificial Sequence
  Description of Artificial Sequence: Synthetic oligonucleotide
  Sense strand starting at position 3589 of SEQ ID NO: 913312
agugauuagggaggugaua

SEQ ID NO: 917699 - RNA, 19 nt, Artificial Sequence
  Description of Artificial Sequence: Synthetic oligonucleotide
  Antisense strand to SEQ ID NO: 917698
uaucaccucccuaaucacu

SEQ ID NO: 917700 - RNA, 19 nt, Artificial Sequence
  Description of Artificial Sequence: Synthetic oligonucleotide
  Sense strand starting at position 2287 of SEQ ID NO: 913312
aggaaaugucagugaauca

SEQ ID NO: 917701 - RNA, 19 nt, Artificial Sequence
  Description of Artificial Sequence: Synthetic oligonucleotide
  Antisense strand to SEQ ID NO: 917700
ugauucacugacauuuccu

SEQ ID NO: 917702 - RNA, 19 nt, Artificial Sequence
  Description of Artificial Sequence: Synthetic oligonucleotide
  Sense strand starting at position 330 of SEQ ID NO: 913312
gggagacauuucuauaaac

SEQ ID NO: 917703 - RNA, 19 nt, Artificial Sequence
  Description of Artificial Sequence: Synthetic oligonucleotide
  Antisense strand to SEQ ID NO: 917702
guuuauagaaaugucuccc

SEQ ID NO: 917704 - RNA, 19 nt, Artificial Sequence
  Description of Artificial Sequence: Synthetic oligonucleotide
  Sense strand starting at position 2270 of SEQ ID NO: 913312
gcagaacuugguuaauuag

SEQ ID NO: 917705 - RNA, 19 nt, Artificial Sequence
  Description of Artificial Sequence: Synthetic oligonucleotide
  Antisense strand to SEQ ID NO: 917704
cuaauuaaccaaguucugc

SEQ ID NO: 917706 - RNA, 19 nt, Artificial Sequence
  Description of Artificial Sequence: Synthetic oligonucleotide
  Sense strand starting at position 3415 of SEQ ID NO: 913312
cuggaauagguguaauagu

SEQ ID NO: 917707 - RNA, 19 nt, Artificial Sequence
  Description of Artificial Sequence: Synthetic oligonucleotide
  Antisense strand to SEQ ID NO: 917706
acuauuacaccuauuccag

SEQ ID NO: 917708 - RNA, 19 nt, Artificial Sequence
  Description of Artificial Sequence: Synthetic oligonucleotide
  Sense strand starting at position 2286 of SEQ ID NO: 913312
uaggaaaugucagugaauc

SEQ ID NO: 917709 - RNA, 19 nt, Artificial Sequence
  Description of Artificial Sequence: Synthetic oligonucleotide
  Antisense strand to SEQ ID NO: 917708
gauucacugacauuuccua

SEQ ID NO: 917710 - RNA, 19 nt, Artificial Sequence
  Description of Artificial Sequence: Synthetic oligonucleotide
  Sense strand starting at position 3104 of SEQ ID NO: 913312
guccaaagacuuuggacau

SEQ ID NO: 917711 - RNA, 19 nt, Artificial Sequence
  Description of Artificial Sequence: Synthetic oligonucleotide
  Antisense strand to SEQ ID NO: 917710
auguccaaagucuuuggac

SEQ ID NO: 917712 - RNA, 19 nt, Artificial Sequence
  Description of Artificial Sequence: Synthetic oligonucleotide
  Sense strand starting at position 185 of SEQ ID NO: 913312
aguagugcuacugaagaua

SEQ ID NO: 917713 - RNA, 19 nt, Artificial Sequence
  Description of Artificial Sequence: Synthetic oligonucleotide
  Antisense strand to SEQ ID NO: 917712
uaucuucaguagcacuacu

SEQ ID NO: 917714 - RNA, 19 nt, Artificial Sequence
  Description of Artificial Sequence: Synthetic oligonucleotide
  Sense strand starting at position 3502 of SEQ ID NO: 913312
gaucuuggucucuacuuga

SEQ ID NO: 917715 - RNA, 19 nt, Artificial Sequence
  Description of Artificial Sequence: Synthetic oligonucleotide
  Antisense strand to SEQ ID NO: 917714
ucaaguagagaccaagauc

SEQ ID NO: 917716 - RNA, 19 nt, Artificial Sequence
  Description of Artificial Sequence: Synthetic oligonucleotide
  Sense strand starting at position 3830 of SEQ ID NO: 913312
uagguuacugauugauaug

SEQ ID NO: 917717 - RNA, 19 nt, Artificial Sequence
  Description of Artificial Sequence: Synthetic oligonucleotide
  Antisense strand to SEQ ID NO: 917716
cauaucaaucaguaaccua

SEQ ID NO: 917718 - RNA, 19 nt, Artificial Sequence
  Description of Artificial Sequence: Synthetic oligonucleotide
  Sense strand starting at position 3974 of SEQ ID NO: 913312
uuggaacucuccuuaugau

SEQ ID NO: 917719 - RNA, 19 nt, Artificial Sequence
  Description of Artificial Sequence: Synthetic oligonucleotide
  Antisense strand to SEQ ID NO: 917718
aucauaaggagaguuccaa

SEQ ID NO: 917720 - RNA, 19 nt, Artificial Sequence
  Description of Artificial Sequence: Synthetic oligonucleotide
  Sense strand starting at position 3784 of SEQ ID NO: 913312
gguuaaggaguuuagcuaa

SEQ ID NO: 917721 - RNA, 19 nt, Artificial Sequence
  Description of Artificial Sequence: Synthetic oligonucleotide
  Antisense strand to SEQ ID NO: 917720
uuagcuaaacuccuuaacc

SEQ ID NO: 917722 - RNA, 19 nt, Artificial Sequence
  Description of Artificial Sequence: Synthetic oligonucleotide
  Sense strand starting at position 2672 of SEQ ID NO: 913312
gcuuguuugagacaggauc

SEQ ID NO: 917723 - RNA, 19 nt, Artificial Sequence
  Description of Artificial Sequence: Synthetic oligonucleotide
  Antisense strand to SEQ ID NO: 917722
gauccugucucaaacaagc

SEQ ID NO: 917724 - RNA, 19 nt, Artificial Sequence
  Description of Artificial Sequence: Synthetic oligonucleotide
  Sense strand starting at position 1795 of SEQ ID NO: 913312
gcuuccucucgcguuaaag

SEQ ID NO: 917725 - RNA, 19 nt, Artificial Sequence
  Description of Artificial Sequence: Synthetic oligonucleotide
  Antisense strand to SEQ ID NO: 917724
cuuuaacgcgagaggaagc

SEQ ID NO: 917726 - RNA, 19 nt, Artificial Sequence
  Description of Artificial Sequence: Synthetic oligonucleotide
  Sense strand starting at position 3829 of SEQ ID NO: 913312
cuagguuacugauugauau

SEQ ID NO: 917727 - RNA, 19 nt, Artificial Sequence
  Description of Artificial Sequence: Synthetic oligonucleotide
  Antisense strand to SEQ ID NO: 917726
auaucaaucaguaaccuag

SEQ ID NO: 917728 - RNA, 19 nt, Artificial Sequence
  Description of Artificial Sequence: Synthetic oligonucleotide
  Sense strand starting at position 2258 of SEQ ID NO: 913312
augugaaacuuggcagaac

SEQ ID NO: 917729 - RNA, 19 nt, Artificial Sequence
  Description of Artificial Sequence: Synthetic oligonucleotide
  Antisense strand to SEQ ID NO: 917728
guucugccaaguuucacau

SEQ ID NO: 917730 - RNA, 19 nt, Artificial Sequence
  Description of Artificial Sequence: Synthetic oligonucleotide
  Sense strand starting at position 3635 of SEQ ID NO: 913312
caugcaguugagcaaugaa

SEQ ID NO: 917731 - RNA, 19 nt, Artificial Sequence
  Description of Artificial Sequence: Synthetic oligonucleotide
  Antisense strand to SEQ ID NO: 917730
uucauugcucaacugcaug

SEQ ID NO: 917732 - RNA, 19 nt, Artificial Sequence
  Description of Artificial Sequence: Synthetic oligonucleotide
  Sense strand starting at position 645 of SEQ ID NO: 913312
ucguuucuguauuuggauu

SEQ ID NO: 917733 - RNA, 19 nt, Artificial Sequence
  Description of Artificial Sequence: Synthetic oligonucleotide
  Antisense strand to SEQ ID NO: 917732
aauccaaauacagaaacga

SEQ ID NO: 917734 - RNA, 19 nt, Artificial Sequence
  Description of Artificial Sequence: Synthetic oligonucleotide
  Sense strand starting at position 3532 of SEQ ID NO: 913312
agaaaucacucaguuugua

SEQ ID NO: 917735 - RNA, 19 nt, Artificial Sequence
  Description of Artificial Sequence: Synthetic oligonucleotide
  Antisense strand to SEQ ID NO: 917734
uacaaacugagugauuucu

SEQ ID NO: 917736 - RNA, 19 nt, Artificial Sequence
  Description of Artificial Sequence: Synthetic oligonucleotide
  Sense strand starting at position 295 of SEQ ID NO: 913312
acagaaacaucgguucuua

SEQ ID NO: 917737 - RNA, 19 nt, Artificial Sequence
  Description of Artificial Sequence: Synthetic oligonucleotide
  Antisense strand to SEQ ID NO: 917736
uaagaaccgauguuucugu

SEQ ID NO: 917738 - RNA, 19 nt, Artificial Sequence
  Description of Artificial Sequence: Synthetic oligonucleotide
  Sense strand starting at position 2499 of SEQ ID NO: 913312
guacaaguugaguacgaau

SEQ ID NO: 917739 - RNA, 19 nt, Artificial Sequence
  Description of Artificial Sequence: Synthetic oligonucleotide
  Antisense strand to SEQ ID NO: 917738
auucguacucaacuuguac

SEQ ID NO: 917740 - RNA, 19 nt, Artificial Sequence
  Description of Artificial Sequence: Synthetic oligonucleotide
  Sense strand starting at position 3077 of SEQ ID NO: 913312
cggauauaaucagcuauga

SEQ ID NO: 917741 - RNA, 19 nt, Artificial Sequence
  Description of Artificial Sequence: Synthetic oligonucleotide
  Antisense strand to SEQ ID NO: 917740
ucauagcugauuauauccg

SEQ ID NO: 917742 - RNA, 19 nt, Artificial Sequence
  Description of Artificial Sequence: Synthetic oligonucleotide
  Sense strand starting at position 2269 of SEQ ID NO: 913312
ggcagaacuugguuaauua

SEQ ID NO: 917743 - RNA, 19 nt, Artificial Sequence
  Description of Artificial Sequence: Synthetic oligonucleotide
  Antisense strand to SEQ ID NO: 917742
uaauuaaccaaguucugcc

SEQ ID NO: 917744 - RNA, 19 nt, Artificial Sequence
  Description of Artificial Sequence: Synthetic oligonucleotide
  Sense strand starting at position 2256 of SEQ ID NO: 913312
ucaugugaaacuuggcaga

SEQ ID NO: 917745 - RNA, 19 nt, Artificial Sequence
  Description of Artificial Sequence: Synthetic oligonucleotide
  Antisense strand to SEQ ID NO: 917744
ucugccaaguuucacauga

SEQ ID NO: 917746 - RNA, 19 nt, Artificial Sequence
  Description of Artificial Sequence: Synthetic oligonucleotide
  Sense strand starting at position 3422 of SEQ ID NO: 913312
agguguaauaguuaucuuu

SEQ ID NO: 917747 - RNA, 19 nt, Artificial Sequence
  Description of Artificial Sequence: Synthetic oligonucleotide
  Antisense strand to SEQ ID NO: 917746
aaagauaacuauuacaccu

SEQ ID NO: 917748 - RNA, 19 nt, Artificial Sequence
  Description of Artificial Sequence: Synthetic oligonucleotide
  Sense strand starting at position 2038 of SEQ ID NO: 913312
cacugucuucugggaauug

SEQ ID NO: 917749 - RNA, 19 nt, Artificial Sequence
  Description of Artificial Sequence: Synthetic oligonucleotide
  Antisense strand to SEQ ID NO: 917748
caauucccagaagacagug

SEQ ID NO: 917750 - RNA, 19 nt, Artificial Sequence
  Description of Artificial Sequence: Synthetic oligonucleotide
  Sense strand starting at position 1739 of SEQ ID NO: 913312
gggaucuccuccucuagua

SEQ ID NO: 917751 - RNA, 19 nt, Artificial Sequence
  Description of Artificial Sequence: Synthetic oligonucleotide
  Antisense strand to SEQ ID NO: 917750
uacuagaggaggagauccc

SEQ ID NO: 917752 - RNA, 19 nt, Artificial Sequence
  Description of Artificial Sequence: Synthetic oligonucleotide
  Sense strand starting at position 1056 of SEQ ID NO: 913312
ugugacucaugacaaauuu

SEQ ID NO: 917753 - RNA, 19 nt, Artificial Sequence
  Description of Artificial Sequence: Synthetic oligonucleotide
  Antisense strand to SEQ ID NO: 917752
aaauuugucaugagucaca

SEQ ID NO: 917754 - RNA, 19 nt, Artificial Sequence
  Description of Artificial Sequence: Synthetic oligonucleotide
  Sense strand starting at position 3536 of SEQ ID NO: 913312
aucacucaguuuguauaua

SEQ ID NO: 917755 - RNA, 19 nt, Artificial Sequence
  Description of Artificial Sequence: Synthetic oligonucleotide
  Antisense strand to SEQ ID NO: 917754
uauauacaaacugagugau

SEQ ID NO: 917756 - RNA, 19 nt, Artificial Sequence
  Description of Artificial Sequence: Synthetic oligonucleotide
  Sense strand starting at position 2267 of SEQ ID NO: 913312
uuggcagaacuugguuaau

SEQ ID NO: 917757 - RNA, 19 nt, Artificial Sequence
  Description of Artificial Sequence: Synthetic oligonucleotide
  Antisense strand to SEQ ID NO: 917756
auuaaccaaguucugccaa

SEQ ID NO: 917758 - RNA, 19 nt, Artificial Sequence
  Description of Artificial Sequence: Synthetic oligonucleotide
  Sense strand starting at position 2266 of SEQ ID NO: 913312
cuuggcagaacuugguuaa

SEQ ID NO: 917759 - RNA, 19 nt, Artificial Sequence
  Description of Artificial Sequence: Synthetic oligonucleotide
  Antisense strand to SEQ ID NO: 917758
uuaaccaaguucugccaag

SEQ ID NO: 917760 - RNA, 19 nt, Artificial Sequence
  Description of Artificial Sequence: Synthetic oligonucleotide
  Sense strand starting at position 2598 of SEQ ID NO: 913312
ugacucuccuuaucaugua

SEQ ID NO: 917761 - RNA, 19 nt, Artificial Sequence
  Description of Artificial Sequence: Synthetic oligonucleotide
  Antisense strand to SEQ ID NO: 917760
uacaugauaaggagaguca

SEQ ID NO: 917762 - RNA, 19 nt, Artificial Sequence
  Description of Artificial Sequence: Synthetic oligonucleotide
  Sense strand starting at position 3638 of SEQ ID NO: 913312
gcaguugagcaaugaauga

SEQ ID NO: 917763 - RNA, 19 nt, Artificial Sequence
  Description of Artificial Sequence: Synthetic oligonucleotide
  Antisense strand to SEQ ID NO: 917762
ucauucauugcucaacugc

SEQ ID NO: 917764 - RNA, 19 nt, Artificial Sequence
  Description of Artificial Sequence: Synthetic oligonucleotide
  Sense strand starting at position 2498 of SEQ ID NO: 913312
gguacaaguugaguacgaa

SEQ ID NO: 917765 - RNA, 19 nt, Artificial Sequence
  Description of Artificial Sequence: Synthetic oligonucleotide
  Antisense strand to SEQ ID NO: 917764
uucguacucaacuuguacc

SEQ ID NO: 917766 - RNA, 19 nt, Artificial Sequence
  Description of Artificial Sequence: Synthetic oligonucleotide
  Sense strand starting at position 1049 of SEQ ID NO: 913312
gguguaaugugacucauga

SEQ ID NO: 917767 - RNA, 19 nt, Artificial Sequence
  Description of Artificial Sequence: Synthetic oligonucleotide
  Antisense strand to SEQ ID NO: 917766
ucaugagucacauuacacc

SEQ ID NO: 917768 - RNA, 19 nt, Artificial Sequence
  Description of Artificial Sequence: Synthetic oligonucleotide
  Sense strand starting at position 3000 of SEQ ID NO: 913312
uuuaucaccugcuuuggaa

SEQ ID NO: 917769 - RNA, 19 nt, Artificial Sequence
  Description of Artificial Sequence: Synthetic oligonucleotide
  Antisense strand to SEQ ID NO: 917768
uuccaaagcaggugauaaa

SEQ ID NO: 917770 - RNA, 19 nt, Artificial Sequence
  Description of Artificial Sequence: Synthetic oligonucleotide
  Sense strand starting at position 817 of SEQ ID NO: 913312
aacaauucguguuugauaa

SEQ ID NO: 917771 - RNA, 19 nt, Artificial Sequence
  Description of Artificial Sequence: Synthetic oligonucleotide
  Antisense strand to SEQ ID NO: 917770
uuaucaaacacgaauuguu

SEQ ID NO: 917772 - RNA, 19 nt, Artificial Sequence
  Description of Artificial Sequence: Synthetic oligonucleotide
  Sense strand starting at position 2731 of SEQ ID NO: 913313
auguaaggccuauaaucaa

SEQ ID NO: 917773 - RNA, 19 nt, Artificial Sequence
  Description of Artificial Sequence: Synthetic oligonucleotide
  Antisense strand to SEQ ID NO: 917772
uugauuauaggccuuacau

SEQ ID NO: 917774 - RNA, 19 nt, Artificial Sequence
  Description of Artificial Sequence: Synthetic oligonucleotide
  Sense strand starting at position 2319 of SEQ ID NO: 913313
ggaaacaguucccugacaa

SEQ ID NO: 917775 - RNA, 19 nt, Artificial Sequence
  Description of Artificial Sequence: Synthetic oligonucleotide
  Antisense strand to SEQ ID NO: 917774
uugucagggaacuguuucc

SEQ ID NO: 917776 - RNA, 19 nt, Artificial Sequence
  Description of Artificial Sequence: Synthetic oligonucleotide
  Sense strand starting at position 203 of SEQ ID NO: 913313
cguguaagauuucuuccaa

SEQ ID NO: 917777 - RNA, 19 nt, Artificial Sequence
  Description of Artificial Sequence: Synthetic oligonucleotide
  Antisense strand to SEQ ID NO: 917776
uuggaagaaaucuuacacg

SEQ ID NO: 917778 - RNA, 19 nt, Artificial Sequence
  Description of Artificial Sequence: Synthetic oligonucleotide
  Sense strand starting at position 3219 of SEQ ID NO: 913313
cuuguuagccugcauuuaa

SEQ ID NO: 917779 - RNA, 19 nt, Artificial Sequence
  Description of Artificial Sequence: Synthetic oligonucleotide
  Antisense strand to SEQ ID NO: 917778
uuaaaugcaggcuaacaag

SEQ ID NO: 917780 - RNA, 19 nt, Artificial Sequence
  Description of Artificial Sequence: Synthetic oligonucleotide
  Sense strand starting at position 194 of SEQ ID NO: 913313
gucucucugcguguaagau

SEQ ID NO: 917781 - RNA, 19 nt, Artificial Sequence
  Description of Artificial Sequence: Synthetic oligonucleotide
  Antisense strand to SEQ ID NO: 917780
aucuuacacgcagagagac

SEQ ID NO: 917782 - RNA, 19 nt, Artificial Sequence
  Description of Artificial Sequence: Synthetic oligonucleotide
  Sense strand starting at position 967 of SEQ ID NO: 913313
ggaauuacccacgagucua

SEQ ID NO: 917783 - RNA, 19 nt, Artificial Sequence
  Description of Artificial Sequence: Synthetic oligonucleotide
  Antisense strand to SEQ ID NO: 917782
uagacucguggguaauucc

SEQ ID NO: 917784 - RNA, 19 nt, Artificial Sequence
  Description of Artificial Sequence: Synthetic oligonucleotide
  Sense strand starting at position 517 of SEQ ID NO: 913313
gacguuauccuuuagaaag

SEQ ID NO: 917785 - RNA, 19 nt, Artificial Sequence
  Description of Artificial Sequence: Synthetic oligonucleotide
  Antisense strand to SEQ ID NO: 917784
cuuucuaaaggauaacguc

SEQ ID NO: 917786 - RNA, 19 nt, Artificial Sequence
  Description of Artificial Sequence: Synthetic oligonucleotide
  Sense strand starting at position 3537 of SEQ ID NO: 913313
caauuugguugaugauuua

SEQ ID NO: 917787 - RNA, 19 nt, Artificial Sequence
  Description of Artificial Sequence: Synthetic oligonucleotide
  Antisense strand to SEQ ID NO: 917786
uaaaucaucaaccaaauug

SEQ ID NO: 917788 - RNA, 19 nt, Artificial Sequence
  Description of Artificial Sequence: Synthetic oligonucleotide
  Sense strand starting at position 2051 of SEQ ID NO: 913313
ccaagaauguuccuaggau

SEQ ID NO: 917789 - RNA, 19 nt, Artificial Sequence
  Description of Artificial Sequence: Synthetic oligonucleotide
  Antisense strand to SEQ ID NO: 917788
auccuaggaacauucuugg

SEQ ID NO: 917790 - RNA, 19 nt, Artificial Sequence
  Description of Artificial Sequence: Synthetic oligonucleotide
  Sense strand starting at position 2318 of SEQ ID NO: 913313
uggaaacaguucccugaca

SEQ ID NO: 917791 - RNA, 19 nt, Artificial Sequence
  Description of Artificial Sequence: Synthetic oligonucleotide
  Antisense strand to SEQ ID NO: 917790
ugucagggaacuguuucca

SEQ ID NO: 917792 - RNA, 19 nt, Artificial Sequence
  Description of Artificial Sequence: Synthetic oligonucleotide
  Sense strand starting at position 261 of SEQ ID NO: 913313
cucuuuguacaguacaaga

SEQ ID NO: 917793 - RNA, 19 nt, Artificial Sequence
  Description of Artificial Sequence: Synthetic oligonucleotide
  Antisense strand to SEQ ID NO: 917792
ucuuguacuguacaaagag

SEQ ID NO: 917794 - RNA, 19 nt, Artificial Sequence
  Description of Artificial Sequence: Synthetic oligonucleotide
  Sense strand starting at position 2332 of SEQ ID NO: 913313
ugacaaacuccugguauga

SEQ ID NO: 917795 - RNA, 19 nt, Artificial Sequence
  Description of Artificial Sequence: Synthetic oligonucleotide
  Antisense strand to SEQ ID NO: 917794
ucauaccaggaguuuguca

SEQ ID NO: 917796 - RNA, 19 nt, Artificial Sequence
  Description of Artificial Sequence: Synthetic oligonucleotide
  Sense strand starting at position 964 of SEQ ID NO: 913313
ucuggaauuacccacgagu

SEQ ID NO: 917797 - RNA, 19 nt, Artificial Sequence
  Description of Artificial Sequence: Synthetic oligonucleotide
  Antisense strand to SEQ ID NO: 917796
acucguggguaauuccaga

SEQ ID NO: 917798 - RNA, 19 nt, Artificial Sequence
  Description of Artificial Sequence: Synthetic oligonucleotide
  Sense strand starting at position 3119 of SEQ ID NO: 913313
ucaugauagugauuccaua

SEQ ID NO: 917799 - RNA, 19 nt, Artificial Sequence
  Description of Artificial Sequence: Synthetic oligonucleotide
  Antisense strand to SEQ ID NO: 917798
uauggaaucacuaucauga

SEQ ID NO: 917800 - RNA, 19 nt, Artificial Sequence
  Description of Artificial Sequence: Synthetic oligonucleotide
  Sense strand starting at position 2588 of SEQ ID NO: 913313
ggacaaauauccuuggcau

SEQ ID NO: 917801 - RNA, 19 nt, Artificial Sequence
  Description of Artificial Sequence: Synthetic oligonucleotide
  Antisense strand to SEQ ID NO: 917800
augccaaggauauuugucc

SEQ ID NO: 917802 - RNA, 19 nt, Artificial Sequence
  Description of Artificial Sequence: Synthetic oligonucleotide
  Sense strand starting at position 2860 of SEQ ID NO: 913313
uugaaaugacucggguaga

SEQ ID NO: 917803 - RNA, 19 nt, Artificial Sequence
  Description of Artificial Sequence: Synthetic oligonucleotide
  Antisense strand to SEQ ID NO: 917802
ucuacccgagucauuucaa

SEQ ID NO: 917804 - RNA, 19 nt, Artificial Sequence
  Description of Artificial Sequence: Synthetic oligonucleotide
  Sense strand starting at position 3266 of SEQ ID NO: 913313
ccuuuaaaucucgaaguau

SEQ ID NO: 917805 - RNA, 19 nt, Artificial Sequence
  Description of Artificial Sequence: Synthetic oligonucleotide
  Antisense strand to SEQ ID NO: 917804
auacuucgagauuuaaagg

SEQ ID NO: 917806 - RNA, 19 nt, Artificial Sequence
  Description of Artificial Sequence: Synthetic oligonucleotide
  Sense strand starting at position 500 of SEQ ID NO: 913313
uuguguaaaccugagguga

SEQ ID NO: 917807 - RNA, 19 nt, Artificial Sequence
  Description of Artificial Sequence: Synthetic oligonucleotide
  Antisense strand to SEQ ID NO: 917806
ucaccucagguuuacacaa

SEQ ID NO: 917808 - RNA, 19 nt, Artificial Sequence
  Description of Artificial Sequence: Synthetic oligonucleotide
  Sense strand starting at position 818 of SEQ ID NO: 913313
acaugugaaguguagcaga

SEQ ID NO: 917809 - RNA, 19 nt, Artificial Sequence
  Description of Artificial Sequence: Synthetic oligonucleotide
  Antisense strand to SEQ ID NO: 917808
ucugcuacacuucacaugu

SEQ ID NO: 917810 - RNA, 19 nt, Artificial Sequence
  Description of Artificial Sequence: Synthetic oligonucleotide
  Sense strand starting at position 2306 of SEQ ID NO: 913313
ucauuauggcuuuggaaac

SEQ ID NO: 917811 - RNA, 19 nt, Artificial Sequence
  Description of Artificial Sequence: Synthetic oligonucleotide
  Antisense strand to SEQ ID NO: 917810
guuuccaaagccauaauga

SEQ ID NO: 917812 - RNA, 19 nt, Artificial Sequence
  Description of Artificial Sequence: Synthetic oligonucleotide
  Sense strand starting at position 3296 of SEQ ID NO: 913313
gauauuaaaugagagaaga

SEQ ID NO: 917813 - RNA, 19 nt, Artificial Sequence
  Description of Artificial Sequence: Synthetic oligonucleotide
  Antisense strand to SEQ ID NO: 917812
ucuucucucauuuaauauc

SEQ ID NO: 917814 - RNA, 19 nt, Artificial Sequence
  Description of Artificial Sequence: Synthetic oligonucleotide
  Sense strand starting at position 3111 of SEQ ID NO: 913313
uugcauucucaugauagug

SEQ ID NO: 917815 - RNA, 19 nt, Artificial Sequence
  Description of Artificial Sequence: Synthetic oligonucleotide
  Antisense strand to SEQ ID NO: 917814
cacuaucaugagaaugcaa

SEQ ID NO: 917816 - RNA, 19 nt, Artificial Sequence
  Description of Artificial Sequence: Synthetic oligonucleotide
  Sense strand starting at position 3664 of SEQ ID NO: 913313
gaaaguauugcaggaccuu

SEQ ID NO: 917817 - RNA, 19 nt, Artificial Sequence
  Description of Artificial Sequence: Synthetic oligonucleotide
  Antisense strand to SEQ ID NO: 917816
aagguccugcaauacuuuc

SEQ ID NO: 917818 - RNA, 19 nt, Artificial Sequence
  Description of Artificial Sequence: Synthetic oligonucleotide
  Sense strand starting at position 805 of SEQ ID NO: 913313
guaacaaguguauacaugu

SEQ ID NO: 917819 - RNA, 19 nt, Artificial Sequence
  Description of Artificial Sequence: Synthetic oligonucleotide
  Antisense strand to SEQ ID NO: 917818
acauguauacacuuguuac

SEQ ID NO: 917820 - RNA, 19 nt, Artificial Sequence
  Description of Artificial Sequence: Synthetic oligonucleotide
  Sense strand starting at position 2709 of SEQ ID NO: 913313
cccguugugagauauuaau

SEQ ID NO: 917821 - RNA, 19 nt, Artificial Sequence
  Description of Artificial Sequence: Synthetic oligonucleotide
  Antisense strand to SEQ ID NO: 917820
auuaauaucucacaacggg

SEQ ID NO: 917822 - RNA, 19 nt, Artificial Sequence
  Description of Artificial Sequence: Synthetic oligonucleotide
  Sense strand starting at position 2790 of SEQ ID NO: 913313
ugcaaaguuugauuaauug

SEQ ID NO: 917823 - RNA, 19 nt, Artificial Sequence
  Description of Artificial Sequence: Synthetic oligonucleotide
  Antisense strand to SEQ ID NO: 917822
caauuaaucaaacuuugca

SEQ ID NO: 917824 - RNA, 19 nt, Artificial Sequence
  Description of Artificial Sequence: Synthetic oligonucleotide
  Sense strand starting at position 978 of SEQ ID NO: 913313
cgagucuacucuccaggaa

SEQ ID NO: 917825 - RNA, 19 nt, Artificial Sequence
  Description of Artificial Sequence: Synthetic oligonucleotide
  Antisense strand to SEQ ID NO: 917824
uuccuggagaguagacucg

SEQ ID NO: 917826 - RNA, 19 nt, Artificial Sequence
  Description of Artificial Sequence: Synthetic oligonucleotide
  Sense strand starting at position 915 of SEQ ID NO: 913313
uggcgagauuggaagugaa

SEQ ID NO: 917827 - RNA, 19 nt, Artificial Sequence
  Description of Artificial Sequence: Synthetic oligonucleotide
  Antisense strand to SEQ ID NO: 917826
uucacuuccaaucucgcca

SEQ ID NO: 917828 - RNA, 19 nt, Artificial Sequence
  Description of Artificial Sequence: Synthetic oligonucleotide
  Sense strand starting at position 1306 of SEQ ID NO: 913313
gcccacagucacugaagau

SEQ ID NO: 917829 - RNA, 19 nt, Artificial Sequence
  Description of Artificial Sequence: Synthetic oligonucleotide
  Antisense strand to SEQ ID NO: 917828
aucuucagugacugugggc

SEQ ID NO: 917830 - RNA, 19 nt, Artificial Sequence
  Description of Artificial Sequence: Synthetic oligonucleotide
  Sense strand starting at position 803 of SEQ ID NO: 913313
ucguaacaaguguauacau

SEQ ID NO: 917831 - RNA, 19 nt, Artificial Sequence
  Description of Artificial Sequence: Synthetic oligonucleotide
  Antisense strand to SEQ ID NO: 917830
auguauacacuuguuacga

SEQ ID NO: 917832 - RNA, 19 nt, Artificial Sequence
  Description of Artificial Sequence: Synthetic oligonucleotide
  Sense strand starting at position 852 of SEQ ID NO: 913313
cuaccaguccuggguacaa

SEQ ID NO: 917833 - RNA, 19 nt, Artificial Sequence
  Description of Artificial Sequence: Synthetic oligonucleotide
  Antisense strand to SEQ ID NO: 917832
uuguacccaggacugguag

SEQ ID NO: 917834 - RNA, 19 nt, Artificial Sequence
  Description of Artificial Sequence: Synthetic oligonucleotide
  Sense strand starting at position 966 of SEQ ID NO: 913313
uggaauuacccacgagucu

SEQ ID NO: 917835 - RNA, 19 nt, Artificial Sequence
  Description of Artificial Sequence: Synthetic oligonucleotide
  Antisense strand to SEQ ID NO: 917834
agacucguggguaauucca

SEQ ID NO: 917836 - RNA, 19 nt, Artificial Sequence
  Description of Artificial Sequence: Synthetic oligonucleotide
  Sense strand starting at position 783 of SEQ ID NO: 913313
accucagauuccuuuguac

SEQ ID NO: 917837 - RNA, 19 nt, Artificial Sequence
  Description of Artificial Sequence: Synthetic oligonucleotide
  Antisense strand to SEQ ID NO: 917836
guacaaaggaaucugaggu

SEQ ID NO: 917838 - RNA, 19 nt, Artificial Sequence
  Description of Artificial Sequence: Synthetic oligonucleotide
  Sense strand starting at position 3476 of SEQ ID NO: 913313
gcaauaaagugauucuuuc

SEQ ID NO: 917839 - RNA, 19 nt, Artificial Sequence
  Description of Artificial Sequence: Synthetic oligonucleotide
  Antisense strand to SEQ ID NO: 917838
gaaagaaucacuuuauugc

SEQ ID NO: 917840 - RNA, 19 nt, Artificial Sequence
  Description of Artificial Sequence: Synthetic oligonucleotide
  Sense strand starting at position 119 of SEQ ID NO: 913313
gagaaagaacguuguucuu

SEQ ID NO: 917841 - RNA, 19 nt, Artificial Sequence
  Description of Artificial Sequence: Synthetic oligonucleotide
  Antisense strand to SEQ ID NO: 917840
aagaacaacguucuuucuc

SEQ ID NO: 917842 - RNA, 19 nt, Artificial Sequence
  Description of Artificial Sequence: Synthetic oligonucleotide
  Sense strand starting at position 226 of SEQ ID NO: 913313
ugcccuaucuuucuggaaa

SEQ ID NO: 917843 - RNA, 19 nt, Artificial Sequence
  Description of Artificial Sequence: Synthetic oligonucleotide
  Antisense strand to SEQ ID NO: 917842
uuuccagaaagauagggca

SEQ ID NO: 917844 - RNA, 19 nt, Artificial Sequence
  Description of Artificial Sequence: Synthetic oligonucleotide
  Sense strand starting at position 12 of SEQ ID NO: 913313
gagauacgguuucuguaga

SEQ ID NO: 917845 - RNA, 19 nt, Artificial Sequence
  Description of Artificial Sequence: Synthetic oligonucleotide
  Antisense strand to SEQ ID NO: 917844
ucuacagaaaccguaucuc

SEQ ID NO: 917846 - RNA, 19 nt, Artificial Sequence
  Description of Artificial Sequence: Synthetic oligonucleotide
  Sense strand starting at position 2456 of SEQ ID NO: 913313
caguaaugcccugauguug

SEQ ID NO: 917847 - RNA, 19 nt, Artificial Sequence
  Description of Artificial Sequence: Synthetic oligonucleotide
  Antisense strand to SEQ ID NO: 917846
caacaucagggcauuacug

SEQ ID NO: 917848 - RNA, 19 nt, Artificial Sequence
  Description of Artificial Sequence: Synthetic oligonucleotide
  Sense strand starting at position 1880 of SEQ ID NO: 913313
ggaguuuccugagugacuc

SEQ ID NO: 917849 - RNA, 19 nt, Artificial Sequence
  Description of Artificial Sequence: Synthetic oligonucleotide
  Antisense strand to SEQ ID NO: 917848
gagucacucaggaaacucc

SEQ ID NO: 917850 - RNA, 19 nt, Artificial Sequence
  Description of Artificial Sequence: Synthetic oligonucleotide
  Sense strand starting at position 2644 of SEQ ID NO: 913313
gcauaauugcuuuaaaugu

SEQ ID NO: 917851 - RNA, 19 nt, Artificial Sequence
  Description of Artificial Sequence: Synthetic oligonucleotide
  Antisense strand to SEQ ID NO: 917850
acauuuaaagcaauuaugc

SEQ ID NO: 917852 - RNA, 19 nt, Artificial Sequence
  Description of Artificial Sequence: Synthetic oligonucleotide
  Sense strand starting at position 1897 of SEQ ID NO: 913314
ggcaucuuggcauggauuu

SEQ ID NO: 917853 - RNA, 19 nt, Artificial Sequence
  Description of Artificial Sequence: Synthetic oligonucleotide
  Antisense strand to SEQ ID NO: 917852
aaauccaugccaagaugcc

SEQ ID NO: 917854 - RNA, 19 nt, Artificial Sequence
  Description of Artificial Sequence: Synthetic oligonucleotide
  Sense strand starting at position 396 of SEQ ID NO: 913314
gcagaaacaaauuguggaa

SEQ ID NO: 917855 - RNA, 19 nt, Artificial Sequence
  Description of Artificial Sequence: Synthetic oligonucleotide
  Antisense strand to SEQ ID NO: 917854
uuccacaauuuguuucugc

SEQ ID NO: 917856 - RNA, 19 nt, Artificial Sequence
  Description of Artificial Sequence: Synthetic oligonucleotide
  Sense strand starting at position 3275 of SEQ ID NO: 913314
cguaaaggucaggaacuua

SEQ ID NO: 917857 - RNA, 19 nt, Artificial Sequence
  Description of Artificial Sequence: Synthetic oligonucleotide
  Antisense strand to SEQ ID NO: 917856
uaaguuccugaccuuuacg

SEQ ID NO: 917858 - RNA, 19 nt, Artificial Sequence
  Description of Artificial Sequence: Synthetic oligonucleotide
  Sense strand starting at position 323 of SEQ ID NO: 913314
uggauaugcauagaggcau

SEQ ID NO: 917859 - RNA, 19 nt, Artificial Sequence
  Description of Artificial Sequence: Synthetic oligonucleotide
  Antisense strand to SEQ ID NO: 917858
augccucuaugcauaucca

SEQ ID NO: 917860 - RNA, 19 nt, Artificial Sequence
  Description of Artificial Sequence: Synthetic oligonucleotide
  Sense strand starting at position 2045 of SEQ ID NO: 913314
agugauuacccucaagagc

SEQ ID NO: 917861 - RNA, 19 nt, Artificial Sequence
  Description of Artificial Sequence: Synthetic oligonucleotide
  Antisense strand to SEQ ID NO: 917860
gcucuugaggguaaucacu

SEQ ID NO: 917862 - RNA, 19 nt, Artificial Sequence
  Description of Artificial Sequence: Synthetic oligonucleotide
  Sense strand starting at position 3496 of SEQ ID NO: 913314
agaugugacuuucucagga

SEQ ID NO: 917863 - RNA, 19 nt, Artificial Sequence
  Description of Artificial Sequence: Synthetic oligonucleotide
  Antisense strand to SEQ ID NO: 917862
uccugagaaagucacaucu

SEQ ID NO: 917864 - RNA, 19 nt, Artificial Sequence
  Description of Artificial Sequence: Synthetic oligonucleotide
  Sense strand starting at position 2083 of SEQ ID NO: 913314
gucagaugacuagguauaa

SEQ ID NO: 917865 - RNA, 19 nt, Artificial Sequence
  Description of Artificial Sequence: Synthetic oligonucleotide
  Antisense strand to SEQ ID NO: 917864
uuauaccuagucaucugac

SEQ ID NO: 917866 - RNA, 19 nt, Artificial Sequence
  Description of Artificial Sequence: Synthetic oligonucleotide
  Sense strand starting at position 411 of SEQ ID NO: 913314
ggaauaucuauacggugaa

SEQ ID NO: 917867 - RNA, 19 nt, Artificial Sequence
  Description of Artificial Sequence: Synthetic oligonucleotide
  Antisense strand to SEQ ID NO: 917866
uucaccguauagauauucc

SEQ ID NO: 917868 - RNA, 19 nt, Artificial Sequence
  Description of Artificial Sequence: Synthetic oligonucleotide
  Sense strand starting at position 2042 of SEQ ID NO: 913314
uuaagugauuacccucaag

SEQ ID NO: 917869 - RNA, 19 nt, Artificial Sequence
  Description of Artificial Sequence: Synthetic oligonucleotide
  Antisense strand to SEQ ID NO: 917868
cuugaggguaaucacuuaa

SEQ ID NO: 917870 - RNA, 19 nt, Artificial Sequence
  Description of Artificial Sequence: Synthetic oligonucleotide
  Sense strand starting at position 2136 of SEQ ID NO: 913314
cucagacaugaaugcauau

SEQ ID NO: 917871 - RNA, 19 nt, Artificial Sequence
  Description of Artificial Sequence: Synthetic oligonucleotide
  Antisense strand to SEQ ID NO: 917870
auaugcauucaugucugag

SEQ ID NO: 917872 - RNA, 19 nt, Artificial Sequence
  Description of Artificial Sequence: Synthetic oligonucleotide
  Sense strand starting at position 159 of SEQ ID NO: 913314
acccaagagcccugaacau

SEQ ID NO: 917873 - RNA, 19 nt, Artificial Sequence
  Description of Artificial Sequence: Synthetic oligonucleotide
  Antisense strand to SEQ ID NO: 917872
auguucagggcucuugggu

SEQ ID NO: 917874 - RNA, 19 nt, Artificial Sequence
  Description of Artificial Sequence: Synthetic oligonucleotide
  Sense strand starting at position 414 of SEQ ID NO: 913314
auaucuauacggugaaaua

SEQ ID NO: 917875 - RNA, 19 nt, Artificial Sequence
  Description of Artificial Sequence: Synthetic oligonucleotide
  Antisense strand to SEQ ID NO: 917874
uauuucaccguauagauau

SEQ ID NO: 917876 - RNA, 19 nt, Artificial Sequence
  Description of Artificial Sequence: Synthetic oligonucleotide
  Sense strand starting at position 318 of SEQ ID NO: 913314
guauauggauaugcauaga

SEQ ID NO: 917877 - RNA, 19 nt, Artificial Sequence
  Description of Artificial Sequence: Synthetic oligonucleotide
  Antisense strand to SEQ ID NO: 917876
ucuaugcauauccauauac

SEQ ID NO: 917878 - RNA, 19 nt, Artificial Sequence
  Description of Artificial Sequence: Synthetic oligonucleotide
  Sense strand starting at position 409 of SEQ ID NO: 913314
guggaauaucuauacggug

SEQ ID NO: 917879 - RNA, 19 nt, Artificial Sequence
  Description of Artificial Sequence: Synthetic oligonucleotide
  Antisense strand to SEQ ID NO: 917878
caccguauagauauuccac

SEQ ID NO: 917880 - RNA, 19 nt, Artificial Sequence
  Description of Artificial Sequence: Synthetic oligonucleotide
  Sense strand starting at position 3681 of SEQ ID NO: 913314
accugagaauuccaauuug

SEQ ID NO: 917881 - RNA, 19 nt, Artificial Sequence
  Description of Artificial Sequence: Synthetic oligonucleotide
  Antisense strand to SEQ ID NO: 917880
caaauuggaauucucaggu

SEQ ID NO: 917882 - RNA, 19 nt, Artificial Sequence
  Description of Artificial Sequence: Synthetic oligonucleotide
  Sense strand starting at position 315 of SEQ ID NO: 913314
cuuguauauggauaugcau

SEQ ID NO: 917883 - RNA, 19 nt, Artificial Sequence
  Description of Artificial Sequence: Synthetic oligonucleotide
  Antisense strand to SEQ ID NO: 917882
augcauauccauauacaag

SEQ ID NO: 917884 - RNA, 19 nt, Artificial Sequence
  Description of Artificial Sequence: Synthetic oligonucleotide
  Sense strand starting at position 2071 of SEQ ID NO: 913314
accauauucucagucagau

SEQ ID NO: 917885 - RNA, 19 nt, Artificial Sequence
  Description of Artificial Sequence: Synthetic oligonucleotide
  Antisense strand to SEQ ID NO: 917884
aucugacugagaauauggu

SEQ ID NO: 917886 - RNA, 19 nt, Artificial Sequence
  Description of Artificial Sequence: Synthetic oligonucleotide
  Sense strand starting at position 976 of SEQ ID NO: 913314
ugacuuugacaagguguga

SEQ ID NO: 917887 - RNA, 19 nt, Artificial Sequence
  Description of Artificial Sequence: Synthetic oligonucleotide
  Antisense strand to SEQ ID NO: 917886
ucacaccuugucaaaguca

SEQ ID NO: 917888 - RNA, 19 nt, Artificial Sequence
  Description of Artificial Sequence: Synthetic oligonucleotide
  Sense strand starting at position 2904 of SEQ ID NO: 913314
aauauugcugugcauaaga

SEQ ID NO: 917889 - RNA, 19 nt, Artificial Sequence
  Description of Artificial Sequence: Synthetic oligonucleotide
  Antisense strand to SEQ ID NO: 917888
ucuuaugcacagcaauauu

SEQ ID NO: 917890 - RNA, 19 nt, Artificial Sequence
  Description of Artificial Sequence: Synthetic oligonucleotide
  Sense strand starting at position 1420 of SEQ ID NO: 913314
agauacauuuguuacugaa

SEQ ID NO: 917891 - RNA, 19 nt, Artificial Sequence
  Description of Artificial Sequence: Synthetic oligonucleotide
  Antisense strand to SEQ ID NO: 917890
uucaguaacaaauguaucu

SEQ ID NO: 917892 - RNA, 19 nt, Artificial Sequence
  Description of Artificial Sequence: Synthetic oligonucleotide
  Sense strand starting at position 1718 of SEQ ID NO: 913314
acagcaaaugagugauagu

SEQ ID NO: 917893 - RNA, 19 nt, Artificial Sequence
  Description of Artificial Sequence: Synthetic oligonucleotide
  Antisense strand to SEQ ID NO: 917892
acuaucacucauuugcugu

SEQ ID NO: 917894 - RNA, 19 nt, Artificial Sequence
  Description of Artificial Sequence: Synthetic oligonucleotide
  Sense strand starting at position 1470 of SEQ ID NO: 913314
ggauuuagcuccguagcua

SEQ ID NO: 917895 - RNA, 19 nt, Artificial Sequence
  Description of Artificial Sequence: Synthetic oligonucleotide
  Antisense strand to SEQ ID NO: 917894
uagcuacggagcuaaaucc

SEQ ID NO: 917896 - RNA, 19 nt, Artificial Sequence
  Description of Artificial Sequence: Synthetic oligonucleotide
  Sense strand starting at position 3697 of SEQ ID NO: 913314
uugcuagaauuauucuaug

SEQ ID NO: 917897 - RNA, 19 nt, Artificial Sequence
  Description of Artificial Sequence: Synthetic oligonucleotide
  Antisense strand to SEQ ID NO: 917896
cauagaauaauucuagcaa

SEQ ID NO: 917898 - RNA, 19 nt, Artificial Sequence
  Description of Artificial Sequence: Synthetic oligonucleotide
  Sense strand starting at position 2795 of SEQ ID NO: 913314
cugucauugggcuauuaug

SEQ ID NO: 917899 - RNA, 19 nt, Artificial Sequence
  Description of Artificial Sequence: Synthetic oligonucleotide
  Antisense strand to SEQ ID NO: 917898
cauaauagcccaaugacag

SEQ ID NO: 917900 - RNA, 19 nt, Artificial Sequence
  Description of Artificial Sequence: Synthetic oligonucleotide
  Sense strand starting at position 1585 of SEQ ID NO: 913314
ucuggauaguacucucuua

SEQ ID NO: 917901 - RNA, 19 nt, Artificial Sequence
  Description of Artificial Sequence: Synthetic oligonucleotide
  Antisense strand to SEQ ID NO: 917900
uaagagaguacuauccaga

SEQ ID NO: 917902 - RNA, 19 nt, Artificial Sequence
  Description of Artificial Sequence: Synthetic oligonucleotide
  Sense strand starting at position 2427 of SEQ ID NO: 913314
agcucucagccauaguaaa

SEQ ID NO: 917903 - RNA, 19 nt, Artificial Sequence
  Description of Artificial Sequence: Synthetic oligonucleotide
  Antisense strand to SEQ ID NO: 917902
uuuacuauggcugagagcu

SEQ ID NO: 917904 - RNA, 19 nt, Artificial Sequence
  Description of Artificial Sequence: Synthetic oligonucleotide
  Sense strand starting at position 1849 of SEQ ID NO: 913314
uucucagagcugcacaauu

SEQ ID NO: 917905 - RNA, 19 nt, Artificial Sequence
  Description of Artificial Sequence: Synthetic oligonucleotide
  Antisense strand to SEQ ID NO: 917904
aauugugcagcucugagaa

SEQ ID NO: 917906 - RNA, 19 nt, Artificial Sequence
  Description of Artificial Sequence: Synthetic oligonucleotide
  Sense strand starting at position 788 of SEQ ID NO: 913314
uugaaagcugauugcaaca

SEQ ID NO: 917907 - RNA, 19 nt, Artificial Sequence
  Description of Artificial Sequence: Synthetic oligonucleotide
  Antisense strand to SEQ ID NO: 917906
uguugcaaucagcuuucaa

SEQ ID NO: 917908 - RNA, 19 nt, Artificial Sequence
  Description of Artificial Sequence: Synthetic oligonucleotide
  Sense strand starting at position 2878 of SEQ ID NO: 913314
aagguaaucuaguccagua

SEQ ID NO: 917909 - RNA, 19 nt, Artificial Sequence
  Description of Artificial Sequence: Synthetic oligonucleotide
  Antisense strand to SEQ ID NO: 917908
uacuggacuagauuaccuu

SEQ ID NO: 917910 - RNA, 19 nt, Artificial Sequence
  Description of Artificial Sequence: Synthetic oligonucleotide
  Sense strand starting at position 1469 of SEQ ID NO: 913314
gggauuuagcuccguagcu

SEQ ID NO: 917911 - RNA, 19 nt, Artificial Sequence
  Description of Artificial Sequence: Synthetic oligonucleotide
  Antisense strand to SEQ ID NO: 917910
agcuacggagcuaaauccc

SEQ ID NO: 917912 - RNA, 19 nt, Artificial Sequence
  Description of Artificial Sequence: Synthetic oligonucleotide
  Sense strand starting at position 3708 of SEQ ID NO: 913314
auucuaugccaaugugaag

SEQ ID NO: 917913 - RNA, 19 nt, Artificial Sequence
  Description of Artificial Sequence: Synthetic oligonucleotide
  Antisense strand to SEQ ID NO: 917912
cuucacauuggcauagaau

SEQ ID NO: 917914 - RNA, 19 nt, Artificial Sequence
  Description of Artificial Sequence: Synthetic oligonucleotide
  Sense strand starting at position 1821 of SEQ ID NO: 913314
gguucucucagaugaggug

SEQ ID NO: 917915 - RNA, 19 nt, Artificial Sequence
  Description of Artificial Sequence: Synthetic oligonucleotide
  Antisense strand to SEQ ID NO: 917914
caccucaucugagagaacc

SEQ ID NO: 917916 - RNA, 19 nt, Artificial Sequence
  Description of Artificial Sequence: Synthetic oligonucleotide
  Sense strand starting at position 1548 of SEQ ID NO: 913314
uaguguuuccuuugaagaa

SEQ ID NO: 917917 - RNA, 19 nt, Artificial Sequence
  Description of Artificial Sequence: Synthetic oligonucleotide
  Antisense strand to SEQ ID NO: 917916
uucuucaaaggaaacacua

SEQ ID NO: 917918 - RNA, 19 nt, Artificial Sequence
  Description of Artificial Sequence: Synthetic oligonucleotide
  Sense strand starting at position 960 of SEQ ID NO: 913314
guaccaauucuaggucuga

SEQ ID NO: 917919 - RNA, 19 nt, Artificial Sequence
  Description of Artificial Sequence: Synthetic oligonucleotide
  Antisense strand to SEQ ID NO: 917918
ucagaccuagaauugguac

SEQ ID NO: 917920 - RNA, 19 nt, Artificial Sequence
  Description of Artificial Sequence: Synthetic oligonucleotide
  Sense strand starting at position 1546 of SEQ ID NO: 913314
gauaguguuuccuuugaag

SEQ ID NO: 917921 - RNA, 19 nt, Artificial Sequence
  Description of Artificial Sequence: Synthetic oligonucleotide
  Antisense strand to SEQ ID NO: 917920
cuucaaaggaaacacuauc

SEQ ID NO: 917922 - RNA, 19 nt, Artificial Sequence
  Description of Artificial Sequence: Synthetic oligonucleotide
  Sense strand starting at position 1544 of SEQ ID NO: 913314
aggauaguguuuccuuuga

SEQ ID NO: 917923 - RNA, 19 nt, Artificial Sequence
  Description of Artificial Sequence: Synthetic oligonucleotide
  Antisense strand to SEQ ID NO: 917922
ucaaaggaaacacuauccu

SEQ ID NO: 917924 - RNA, 19 nt, Artificial Sequence
  Description of Artificial Sequence: Synthetic oligonucleotide
  Sense strand starting at position 2391 of SEQ ID NO: 913314
cgauaaagauccucagcuu

SEQ ID NO: 917925 - RNA, 19 nt, Artificial Sequence
  Description of Artificial Sequence: Synthetic oligonucleotide
  Antisense strand to SEQ ID NO: 917924
aagcugaggaucuuuaucg

SEQ ID NO: 917926 - RNA, 19 nt, Artificial Sequence
  Description of Artificial Sequence: Synthetic oligonucleotide
  Sense strand starting at position 992 of SEQ ID NO: 913314
ugagcaguuggguagguau

SEQ ID NO: 917927 - RNA, 19 nt, Artificial Sequence
  Description of Artificial Sequence: Synthetic oligonucleotide
  Antisense strand to SEQ ID NO: 917926
auaccuacccaacugcuca

SEQ ID NO: 917928 - RNA, 19 nt, Artificial Sequence
  Description of Artificial Sequence: Synthetic oligonucleotide
  Sense strand starting at position 3623 of SEQ ID NO: 913314
aggaaauucuugcuucuuu

SEQ ID NO: 917929 - RNA, 19 nt, Artificial Sequence
  Description of Artificial Sequence: Synthetic oligonucleotide
  Antisense strand to SEQ ID NO: 917928
aaagaagcaagaauuuccu

SEQ ID NO: 917930 - RNA, 19 nt, Artificial Sequence
  Description of Artificial Sequence: Synthetic oligonucleotide
  Sense strand starting at position 2880 of SEQ ID NO: 913314
gguaaucuaguccaguagu

SEQ ID NO: 917931 - RNA, 19 nt, Artificial Sequence
  Description of Artificial Sequence: Synthetic oligonucleotide
  Antisense strand to SEQ ID NO: 917930
acuacuggacuagauuacc

SEQ ID NO: 917932 - RNA, 19 nt, Artificial Sequence
  Description of Artificial Sequence: Synthetic oligonucleotide
  Sense strand starting at position 3542 of SEQ ID NO: 913315
agacuauuggcuuauacau

SEQ ID NO: 917933 - RNA, 19 nt, Artificial Sequence
  Description of Artificial Sequence: Synthetic oligonucleotide
  Antisense strand to SEQ ID NO: 917932
auguauaagccaauagucu

SEQ ID NO: 917934 - RNA, 19 nt, Artificial Sequence
  Description of Artificial Sequence: Synthetic oligonucleotide
  Sense strand starting at position 1036 of SEQ ID NO: 913315
guaugauucgauuaauaac

SEQ ID NO: 917935 - RNA, 19 nt, Artificial Sequence
  Description of Artificial Sequence: Synthetic oligonucleotide
  Antisense strand to SEQ ID NO: 917934
guuauuaaucgaaucauac

SEQ ID NO: 917936 - RNA, 19 nt, Artificial Sequence
  Description of Artificial Sequence: Synthetic oligonucleotide
  Sense strand starting at position 1507 of SEQ ID NO: 913315
uucuguaucgaugaacaaa

SEQ ID NO: 917937 - RNA, 19 nt, Artificial Sequence
  Description of Artificial Sequence: Synthetic oligonucleotide
  Antisense strand to SEQ ID NO: 917936
uuuguucaucgauacagaa

SEQ ID NO: 917938 - RNA, 19 nt, Artificial Sequence
  Description of Artificial Sequence: Synthetic oligonucleotide
  Sense strand starting at position 204 of SEQ ID NO: 913315
guguguagagaucaaggau

SEQ ID NO: 917939 - RNA, 19 nt, Artificial Sequence
  Description of Artificial Sequence: Synthetic oligonucleotide
  Antisense strand to SEQ ID NO: 917938
auccuugaucucuacacac

SEQ ID NO: 917940 - RNA, 19 nt, Artificial Sequence
  Description of Artificial Sequence: Synthetic oligonucleotide
  Sense strand starting at position 1785 of SEQ ID NO: 913315
agagaacuccuccaggcuu

SEQ ID NO: 917941 - RNA, 19 nt, Artificial Sequence
  Description of Artificial Sequence: Synthetic oligonucleotide
  Antisense strand to SEQ ID NO: 917940
aagccuggaggaguucucu

SEQ ID NO: 917942 - RNA, 19 nt, Artificial Sequence
  Description of Artificial Sequence: Synthetic oligonucleotide
  Sense strand starting at position 3681 of SEQ ID NO: 913315
uggacuucccuguaccaga

SEQ ID NO: 917943 - RNA, 19 nt, Artificial Sequence
  Description of Artificial Sequence: Synthetic oligonucleotide
  Antisense strand to SEQ ID NO: 917942
ucugguacagggaagucca

SEQ ID NO: 917944 - RNA, 19 nt, Artificial Sequence
  Description of Artificial Sequence: Synthetic oligonucleotide
  Sense strand starting at position 1114 of SEQ ID NO: 913315
gcauaucaaagguggaaag

SEQ ID NO: 917945 - RNA, 19 nt, Artificial Sequence
  Description of Artificial Sequence: Synthetic oligonucleotide
  Antisense strand to SEQ ID NO: 917944
cuuuccaccuuugauaugc

SEQ ID NO: 917946 - RNA, 19 nt, Artificial Sequence
  Description of Artificial Sequence: Synthetic oligonucleotide
  Sense strand starting at position 2691 of SEQ ID NO: 913315
ucuuucuuaggaugaugga

SEQ ID NO: 917947 - RNA, 19 nt, Artificial Sequence
  Description of Artificial Sequence: Synthetic oligonucleotide
  Antisense strand to SEQ ID NO: 917946
uccaucauccuaagaaaga

SEQ ID NO: 917948 - RNA, 19 nt, Artificial Sequence
  Description of Artificial Sequence: Synthetic oligonucleotide
  Sense strand starting at position 2111 of SEQ ID NO: 913315
aguaccauuucuuugcauu

SEQ ID NO: 917949 - RNA, 19 nt, Artificial Sequence
  Description of Artificial Sequence: Synthetic oligonucleotide
  Antisense strand to SEQ ID NO: 917948
aaugcaaagaaaugguacu

SEQ ID NO: 917950 - RNA, 19 nt, Artificial Sequence
  Description of Artificial Sequence: Synthetic oligonucleotide
  Sense strand starting at position 351 of SEQ ID NO: 913315
guuacaagaacugaguagu

SEQ ID NO: 917951 - RNA, 19 nt, Artificial Sequence
  Description of Artificial Sequence: Synthetic oligonucleotide
  Antisense strand to SEQ ID NO: 917950
acuacucaguucuuguaac

SEQ ID NO: 917952 - RNA, 19 nt, Artificial Sequence
  Description of Artificial Sequence: Synthetic oligonucleotide
  Sense strand starting at position 2147 of SEQ ID NO: 913315
augugaaaccgacagugau

SEQ ID NO: 917953 - RNA, 19 nt, Artificial Sequence
  Description of Artificial Sequence: Synthetic oligonucleotide
  Antisense strand to SEQ ID NO: 917952
aucacugucgguuucacau

SEQ ID NO: 917954 - RNA, 19 nt, Artificial Sequence
  Description of Artificial Sequence: Synthetic oligonucleotide
  Sense strand starting at position 3539 of SEQ ID NO: 913315
aggagacuauuggcuuaua

SEQ ID NO: 917955 - RNA, 19 nt, Artificial Sequence
  Description of Artificial Sequence: Synthetic oligonucleotide
  Antisense strand to SEQ ID NO: 917954
uauaagccaauagucuccu

SEQ ID NO: 917956 - RNA, 19 nt, Artificial Sequence
  Description of Artificial Sequence: Synthetic oligonucleotide
  Sense strand starting at position 1597 of SEQ ID NO: 913315
gugacuucugucgccagca

SEQ ID NO: 917957 - RNA, 19 nt, Artificial Sequence
  Description of Artificial Sequence: Synthetic oligonucleotide
  Antisense strand to SEQ ID NO: 917956
ugcuggcgacagaagucac

SEQ ID NO: 917958 - RNA, 19 nt, Artificial Sequence
  Description of Artificial Sequence: Synthetic oligonucleotide
  Sense strand starting at position 454 of SEQ ID NO: 913315
gagcuuacuggauaagcca

SEQ ID NO: 917959 - RNA, 19 nt, Artificial Sequence
  Description of Artificial Sequence: Synthetic oligonucleotide
  Antisense strand to SEQ ID NO: 917958
uggcuuauccaguaagcuc

SEQ ID NO: 917960 - RNA, 19 nt, Artificial Sequence
  Description of Artificial Sequence: Synthetic oligonucleotide
  Sense strand starting at position 427 of SEQ ID NO: 913315
uucuguugucaggauauaa

SEQ ID NO: 917961 - RNA, 19 nt, Artificial Sequence
  Description of Artificial Sequence: Synthetic oligonucleotide
  Antisense strand to SEQ ID NO: 917960
uuauauccugacaacagaa

SEQ ID NO: 917962 - RNA, 19 nt, Artificial Sequence
  Description of Artificial Sequence: Synthetic oligonucleotide
  Sense strand starting at position 1086 of SEQ ID NO: 913315
aggccagaaucucuagauu

SEQ ID NO: 917963 - RNA, 19 nt, Artificial Sequence
  Description of Artificial Sequence: Synthetic oligonucleotide
  Antisense strand to SEQ ID NO: 917962
aaucuagagauucuggccu

SEQ ID NO: 917964 - RNA, 19 nt, Artificial Sequence
  Description of Artificial Sequence: Synthetic oligonucleotide
  Sense strand starting at position 2112 of SEQ ID NO: 913315
guaccauuucuuugcauuc

SEQ ID NO: 917965 - RNA, 19 nt, Artificial Sequence
  Description of Artificial Sequence: Synthetic oligonucleotide
  Antisense strand to SEQ ID NO: 917964
gaaugcaaagaaaugguac

SEQ ID NO: 917966 - RNA, 19 nt, Artificial Sequence
  Description of Artificial Sequence: Synthetic oligonucleotide
  Sense strand starting at position 3540 of SEQ ID NO: 913315
ggagacuauuggcuuauac

SEQ ID NO: 917967 - RNA, 19 nt, Artificial Sequence
  Description of Artificial Sequence: Synthetic oligonucleotide
  Antisense strand to SEQ ID NO: 917966
guauaagccaauagucucc

SEQ ID NO: 917968 - RNA, 19 nt, Artificial Sequence
  Description of Artificial Sequence: Synthetic oligonucleotide
  Sense strand starting at position 608 of SEQ ID NO: 913315
aguaauuuauaccaaugag

SEQ ID NO: 917969 - RNA, 19 nt, Artificial Sequence
  Description of Artificial Sequence: Synthetic oligonucleotide
  Antisense strand to SEQ ID NO: 917968
cucauugguauaaauuacu

SEQ ID NO: 917970 - RNA, 19 nt, Artificial Sequence
  Description of Artificial Sequence: Synthetic oligonucleotide
  Sense strand starting at position 1112 of SEQ ID NO: 913315
cugcauaucaaagguggaa

SEQ ID NO: 917971 - RNA, 19 nt, Artificial Sequence
  Description of Artificial Sequence: Synthetic oligonucleotide
  Antisense strand to SEQ ID NO: 917970
uuccaccuuugauaugcag

SEQ ID NO: 917972 - RNA, 19 nt, Artificial Sequence
  Description of Artificial Sequence: Synthetic oligonucleotide
  Sense strand starting at position 2579 of SEQ ID NO: 913315
agaaaucucaggugagcca

SEQ ID NO: 917973 - RNA, 19 nt, Artificial Sequence
  Description of Artificial Sequence: Synthetic oligonucleotide
  Antisense strand to SEQ ID NO: 917972
uggcucaccugagauuucu

SEQ ID NO: 917974 - RNA, 19 nt, Artificial Sequence
  Description of Artificial Sequence: Synthetic oligonucleotide
  Sense strand starting at position 3930 of SEQ ID NO: 913315
acaagauaugcaggugauu

SEQ ID NO: 917975 - RNA, 19 nt, Artificial Sequence
  Description of Artificial Sequence: Synthetic oligonucleotide
  Antisense strand to SEQ ID NO: 917974
aaucaccugcauaucuugu

SEQ ID NO: 917976 - RNA, 19 nt, Artificial Sequence
  Description of Artificial Sequence: Synthetic oligonucleotide
  Sense strand starting at position 3447 of SEQ ID NO: 913315
guggaaucucucuaagcug

SEQ ID NO: 917977 - RNA, 19 nt, Artificial Sequence
  Description of Artificial Sequence: Synthetic oligonucleotide
  Antisense strand to SEQ ID NO: 917976
cagcuuagagagauuccac

SEQ ID NO: 917978 - RNA, 19 nt, Artificial Sequence
  Description of Artificial Sequence: Synthetic oligonucleotide
  Sense strand starting at position 550 of SEQ ID NO: 913315
aguguuauaagggaugcuu

SEQ ID NO: 917979 - RNA, 19 nt, Artificial Sequence
  Description of Artificial Sequence: Synthetic oligonucleotide
  Antisense strand to SEQ ID NO: 917978
aagcaucccuuauaacacu

SEQ ID NO: 917980 - RNA, 19 nt, Artificial Sequence
  Description of Artificial Sequence: Synthetic oligonucleotide
  Sense strand starting at position 141 of SEQ ID NO: 913315
uuuaacagugucugaagau

SEQ ID NO: 917981 - RNA, 19 nt, Artificial Sequence
  Description of Artificial Sequence: Synthetic oligonucleotide
  Antisense strand to SEQ ID NO: 917980
aucuucagacacuguuaaa

SEQ ID NO: 917982 - RNA, 19 nt, Artificial Sequence
  Description of Artificial Sequence: Synthetic oligonucleotide
  Sense strand starting at position 2183 of SEQ ID NO: 913315
cuuguacugaaacgagauu

SEQ ID NO: 917983 - RNA, 19 nt, Artificial Sequence
  Description of Artificial Sequence: Synthetic oligonucleotide
  Antisense strand to SEQ ID NO: 917982
aaucucguuucaguacaag

SEQ ID NO: 917984 - RNA, 19 nt, Artificial Sequence
  Description of Artificial Sequence: Synthetic oligonucleotide
  Sense strand starting at position 153 of SEQ ID NO: 913315
ugaagauaucucugguucu

SEQ ID NO: 917985 - RNA, 19 nt, Artificial Sequence
  Description of Artificial Sequence: Synthetic oligonucleotide
  Antisense strand to SEQ ID NO: 917984
agaaccagagauaucuuca

SEQ ID NO: 917986 - RNA, 19 nt, Artificial Sequence
  Description of Artificial Sequence: Synthetic oligonucleotide
  Sense strand starting at position 1820 of SEQ ID NO: 913315
ccaagaggcuuuguagaug

SEQ ID NO: 917987 - RNA, 19 nt, Artificial Sequence
  Description of Artificial Sequence: Synthetic oligonucleotide
  Antisense strand to SEQ ID NO: 917986
caucuacaaagccucuugg

SEQ ID NO: 917988 - RNA, 19 nt, Artificial Sequence
  Description of Artificial Sequence: Synthetic oligonucleotide
  Sense strand starting at position 1218 of SEQ ID NO: 913315
uuggguauuucuuaaagaa

SEQ ID NO: 917989 - RNA, 19 nt, Artificial Sequence
  Description of Artificial Sequence: Synthetic oligonucleotide
  Antisense strand to SEQ ID NO: 917988
uucuuuaagaaauacccaa

SEQ ID NO: 917990 - RNA, 19 nt, Artificial Sequence
  Description of Artificial Sequence: Synthetic oligonucleotide
  Sense strand starting at position 2685 of SEQ ID NO: 913315
auguacucuuucuuaggau

SEQ ID NO: 917991 - RNA, 19 nt, Artificial Sequence
  Description of Artificial Sequence: Synthetic oligonucleotide
  Antisense strand to SEQ ID NO: 917990
auccuaagaaagaguacau

SEQ ID NO: 917992 - RNA, 19 nt, Artificial Sequence
  Description of Artificial Sequence: Synthetic oligonucleotide
  Sense strand starting at position 2564 of SEQ ID NO: 913315
cgaaaccaucccugcagaa

SEQ ID NO: 917993 - RNA, 19 nt, Artificial Sequence
  Description of Artificial Sequence: Synthetic oligonucleotide
  Antisense strand to SEQ ID NO: 917992
uucugcagggaugguuucg

SEQ ID NO: 917994 - RNA, 19 nt, Artificial Sequence
  Description of Artificial Sequence: Synthetic oligonucleotide
  Sense strand starting at position 1043 of SEQ ID NO: 913315
ucgauuaauaacuggguuu

SEQ ID NO: 917995 - RNA, 19 nt, Artificial Sequence
  Description of Artificial Sequence: Synthetic oligonucleotide
  Antisense strand to SEQ ID NO: 917994
aaacccaguuauuaaucga

SEQ ID NO: 917996 - RNA, 19 nt, Artificial Sequence
  Description of Artificial Sequence: Synthetic oligonucleotide
  Sense strand starting at position 2650 of SEQ ID NO: 913315
cuggaaguuucuccaguga

SEQ ID NO: 917997 - RNA, 19 nt, Artificial Sequence
  Description of Artificial Sequence: Synthetic oligonucleotide
  Antisense strand to SEQ ID NO: 917996
ucacuggagaaacuuccag

SEQ ID NO: 917998 - RNA, 19 nt, Artificial Sequence
  Description of Artificial Sequence: Synthetic oligonucleotide
  Sense strand starting at position 1575 of SEQ ID NO: 913315
aauguaugucagggcaaua

SEQ ID NO: 917999 - RNA, 19 nt, Artificial Sequence
  Description of Artificial Sequence: Synthetic oligonucleotide
  Antisense strand to SEQ ID NO: 917998
uauugcccugacauacauu

SEQ ID NO: 918000 - RNA, 19 nt, Artificial Sequence
  Description of Artificial Sequence: Synthetic oligonucleotide
  Sense strand starting at position 390 of SEQ ID NO: 913315
ugagcuauuguuuaguuga

SEQ ID NO: 918001 - RNA, 19 nt, Artificial Sequence
  Description of Artificial Sequence: Synthetic oligonucleotide
  Antisense strand to SEQ ID NO: 918000
ucaacuaaacaauagcuca

SEQ ID NO: 918002 - RNA, 19 nt, Artificial Sequence
  Description of Artificial Sequence: Synthetic oligonucleotide
  Sense strand starting at position 3932 of SEQ ID NO: 913315
aagauaugcaggugauugu

SEQ ID NO: 918003 - RNA, 19 nt, Artificial Sequence
  Description of Artificial Sequence: Synthetic oligonucleotide
  Antisense strand to SEQ ID NO: 918002
acaaucaccugcauaucuu

SEQ ID NO: 918004 - RNA, 19 nt, Artificial Sequence
  Description of Artificial Sequence: Synthetic oligonucleotide
  Sense strand starting at position 1030 of SEQ ID NO: 913315
uuuacaguaugauucgauu

SEQ ID NO: 918005 - RNA, 19 nt, Artificial Sequence
  Description of Artificial Sequence: Synthetic oligonucleotide
  Antisense strand to SEQ ID NO: 918004
aaucgaaucauacuguaaa

SEQ ID NO: 918006 - RNA, 19 nt, Artificial Sequence
  Description of Artificial Sequence: Synthetic oligonucleotide
  Sense strand starting at position 2522 of SEQ ID NO: 913315
ggcuauguugcaggcauuu

SEQ ID NO: 918007 - RNA, 19 nt, Artificial Sequence
  Description of Artificial Sequence: Synthetic oligonucleotide
  Antisense strand to SEQ ID NO: 918006
aaaugccugcaacauagcc

SEQ ID NO: 918008 - RNA, 19 nt, Artificial Sequence
  Description of Artificial Sequence: Synthetic oligonucleotide
  Sense strand starting at position 2161 of SEQ ID NO: 913315
gugauugucccugaggcau

SEQ ID NO: 918009 - RNA, 19 nt, Artificial Sequence
  Description of Artificial Sequence: Synthetic oligonucleotide
  Antisense strand to SEQ ID NO: 918008
augccucagggacaaucac

SEQ ID NO: 918010 - RNA, 19 nt, Artificial Sequence
  Description of Artificial Sequence: Synthetic oligonucleotide
  Sense strand starting at position 3455 of SEQ ID NO: 913315
ucucuaagcugguuuggaa

SEQ ID NO: 918011 - RNA, 19 nt, Artificial Sequence
  Description of Artificial Sequence: Synthetic oligonucleotide
  Antisense strand to SEQ ID NO: 918010
uuccaaaccagcuuagaga

SEQ ID NO: 918012 - RNA, 19 nt, Artificial Sequence
  Description of Artificial Sequence: Synthetic oligonucleotide
  Sense strand starting at position 2463 of SEQ ID NO: 913316
cugucauugccuucgagca

SEQ ID NO: 918013 - RNA, 19 nt, Artificial Sequence
  Description of Artificial Sequence: Synthetic oligonucleotide
  Antisense strand to SEQ ID NO: 918012
ugcucgaaggcaaugacag

SEQ ID NO: 918014 - RNA, 19 nt, Artificial Sequence
  Description of Artificial Sequence: Synthetic oligonucleotide
  Sense strand starting at position 104 of SEQ ID NO: 913316
acuucuuggagguagagua

SEQ ID NO: 918015 - RNA, 19 nt, Artificial Sequence
  Description of Artificial Sequence: Synthetic oligonucleotide
  Antisense strand to SEQ ID NO: 918014
uacucuaccuccaagaagu

SEQ ID NO: 918016 - RNA, 19 nt, Artificial Sequence
  Description of Artificial Sequence: Synthetic oligonucleotide
  Sense strand starting at position 3018 of SEQ ID NO: 913316
gugugaucugaggaaauuc

SEQ ID NO: 918017 - RNA, 19 nt, Artificial Sequence
  Description of Artificial Sequence: Synthetic oligonucleotide
  Antisense strand to SEQ ID NO: 918016
gaauuuccucagaucacac

SEQ ID NO: 918018 - RNA, 19 nt, Artificial Sequence
  Description of Artificial Sequence: Synthetic oligonucleotide
  Sense strand starting at position 1269 of SEQ ID NO: 913316
aggcuccagacaugagaua

SEQ ID NO: 918019 - RNA, 19 nt, Artificial Sequence
  Description of Artificial Sequence: Synthetic oligonucleotide
  Antisense strand to SEQ ID NO: 918018
uaucucaugucuggagccu

SEQ ID NO: 918020 - RNA, 19 nt, Artificial Sequence
  Description of Artificial Sequence: Synthetic oligonucleotide
  Sense strand starting at position 1395 of SEQ ID NO: 913316
gaaugagacugggccuaua

SEQ ID NO: 918021 - RNA, 19 nt, Artificial Sequence
  Description of Artificial Sequence: Synthetic oligonucleotide
  Antisense strand to SEQ ID NO: 918020
uauaggcccagucucauuc

SEQ ID NO: 918022 - RNA, 19 nt, Artificial Sequence
  Description of Artificial Sequence: Synthetic oligonucleotide
  Sense strand starting at position 99 of SEQ ID NO: 913316
gauaaacuucuuggaggua

SEQ ID NO: 918023 - RNA, 19 nt, Artificial Sequence
  Description of Artificial Sequence: Synthetic oligonucleotide
  Antisense strand to SEQ ID NO: 918022
uaccuccaagaaguuuauc

SEQ ID NO: 918024 - RNA, 19 nt, Artificial Sequence
  Description of Artificial Sequence: Synthetic oligonucleotide
  Sense strand starting at position 2699 of SEQ ID NO: 913316
cguuuaaagccuucguauu

SEQ ID NO: 918025 - RNA, 19 nt, Artificial Sequence
  Description of Artificial Sequence: Synthetic oligonucleotide
  Antisense strand to SEQ ID NO: 918024
aauacgaaggcuuuaaacg

SEQ ID NO: 918026 - RNA, 19 nt, Artificial Sequence
  Description of Artificial Sequence: Synthetic oligonucleotide
  Sense strand starting at position 223 of SEQ ID NO: 913316
agugccuuacaugaacaua

SEQ ID NO: 918027 - RNA, 19 nt, Artificial Sequence
  Description of Artificial Sequence: Synthetic oligonucleotide
  Antisense strand to SEQ ID NO: 918026
uauguucauguaaggcacu

SEQ ID NO: 918028 - RNA, 19 nt, Artificial Sequence
  Description of Artificial Sequence: Synthetic oligonucleotide
  Sense strand starting at position 3140 of SEQ ID NO: 913316
acagcuaaagguuauuauu

SEQ ID NO: 918029 - RNA, 19 nt, Artificial Sequence
  Description of Artificial Sequence: Synthetic oligonucleotide
  Antisense strand to SEQ ID NO: 918028
aauaauaaccuuuagcugu

SEQ ID NO: 918030 - RNA, 19 nt, Artificial Sequence
  Description of Artificial Sequence: Synthetic oligonucleotide
  Sense strand starting at position 269 of SEQ ID NO: 913316
uuggaauacgcacaauuau

SEQ ID NO: 918031 - RNA, 19 nt, Artificial Sequence
  Description of Artificial Sequence: Synthetic oligonucleotide
  Antisense strand to SEQ ID NO: 918030
auaauugugcguauuccaa

SEQ ID NO: 918032 - RNA, 19 nt, Artificial Sequence
  Description of Artificial Sequence: Synthetic oligonucleotide
  Sense strand starting at position 3217 of SEQ ID NO: 913316
ccaggauguuucccagaaa

SEQ ID NO: 918033 - RNA, 19 nt, Artificial Sequence
  Description of Artificial Sequence: Synthetic oligonucleotide
  Antisense strand to SEQ ID NO: 918032
uuucugggaaacauccugg

SEQ ID NO: 918034 - RNA, 19 nt, Artificial Sequence
  Description of Artificial Sequence: Synthetic oligonucleotide
  Sense strand starting at position 1439 of SEQ ID NO: 913316
gggugugaaauguaaucac

SEQ ID NO: 918035 - RNA, 19 nt, Artificial Sequence
  Description of Artificial Sequence: Synthetic oligonucleotide
  Antisense strand to SEQ ID NO: 918034
gugauuacauuucacaccc

SEQ ID NO: 918036 - RNA, 19 nt, Artificial Sequence
  Description of Artificial Sequence: Synthetic oligonucleotide
  Sense strand starting at position 1450 of SEQ ID NO: 913316
guaaucacucgggaaaggu

SEQ ID NO: 918037 - RNA, 19 nt, Artificial Sequence
  Description of Artificial Sequence: Synthetic oligonucleotide
  Antisense strand to SEQ ID NO: 918036
accuuucccgagugauuac

SEQ ID NO: 918038 - RNA, 19 nt, Artificial Sequence
  Description of Artificial Sequence: Synthetic oligonucleotide
  Sense strand starting at position 2771 of SEQ ID NO: 913316
aggaacaugugagauuuga

SEQ ID NO: 918039 - RNA, 19 nt, Artificial Sequence
  Description of Artificial Sequence: Synthetic oligonucleotide
  Antisense strand to SEQ ID NO: 918038
ucaaaucucacauguuccu

SEQ ID NO: 918040 - RNA, 19 nt, Artificial Sequence
  Description of Artificial Sequence: Synthetic oligonucleotide
  Sense strand starting at position 1380 of SEQ ID NO: 913316
ggagacaccugcucagaau

SEQ ID NO: 918041 - RNA, 19 nt, Artificial Sequence
  Description of Artificial Sequence: Synthetic oligonucleotide
  Antisense strand to SEQ ID NO: 918040
auucugagcaggugucucc

SEQ ID NO: 918042 - RNA, 19 nt, Artificial Sequence
  Description of Artificial Sequence: Synthetic oligonucleotide
  Sense strand starting at position 557 of SEQ ID NO: 913316
uaugaagguuaaguuuaga

SEQ ID NO: 918043 - RNA, 19 nt, Artificial Sequence
  Description of Artificial Sequence: Synthetic oligonucleotide
  Antisense strand to SEQ ID NO: 918042
ucuaaacuuaaccuucaua

SEQ ID NO: 918044 - RNA, 19 nt, Artificial Sequence
  Description of Artificial Sequence: Synthetic oligonucleotide
  Sense strand starting at position 2787 of SEQ ID NO: 913316
ugagaaagacauuguagca

SEQ ID NO: 918045 - RNA, 19 nt, Artificial Sequence
  Description of Artificial Sequence: Synthetic oligonucleotide
  Antisense strand to SEQ ID NO: 918044
ugcuacaaugucuuucuca

SEQ ID NO: 918046 - RNA, 19 nt, Artificial Sequence
  Description of Artificial Sequence: Synthetic oligonucleotide
  Sense strand starting at position 677 of SEQ ID NO: 913316
gguugugagaauugagaug

SEQ ID NO: 918047 - RNA, 19 nt, Artificial Sequence
  Description of Artificial Sequence: Synthetic oligonucleotide
  Antisense strand to SEQ ID NO: 918046
caucucaauucucacaacc

SEQ ID NO: 918048 - RNA, 19 nt, Artificial Sequence
  Description of Artificial Sequence: Synthetic oligonucleotide
  Sense strand starting at position 953 of SEQ ID NO: 913316
uggaaagccuaacucauua

SEQ ID NO: 918049 - RNA, 19 nt, Artificial Sequence
  Description of Artificial Sequence: Synthetic oligonucleotide
  Antisense strand to SEQ ID NO: 918048
uaaugaguuaggcuuucca

SEQ ID NO: 918050 - RNA, 19 nt, Artificial Sequence
  Description of Artificial Sequence: Synthetic oligonucleotide
  Sense strand starting at position 3173 of SEQ ID NO: 913316
guuacagugaauugaaaug

SEQ ID NO: 918051 - RNA, 19 nt, Artificial Sequence
  Description of Artificial Sequence: Synthetic oligonucleotide
  Antisense strand to SEQ ID NO: 918050
cauuucaauucacuguaac

SEQ ID NO: 918052 - RNA, 19 nt, Artificial Sequence
  Description of Artificial Sequence: Synthetic oligonucleotide
  Sense strand starting at position 1448 of SEQ ID NO: 913316
auguaaucacucgggaaag

SEQ ID NO: 918053 - RNA, 19 nt, Artificial Sequence
  Description of Artificial Sequence: Synthetic oligonucleotide
  Antisense strand to SEQ ID NO: 918052
cuuucccgagugauuacau

SEQ ID NO: 918054 - RNA, 19 nt, Artificial Sequence
  Description of Artificial Sequence: Synthetic oligonucleotide
  Sense strand starting at position 2829 of SEQ ID NO: 913316
gguuuagaucuuuggauaa

SEQ ID NO: 918055 - RNA, 19 nt, Artificial Sequence
  Description of Artificial Sequence: Synthetic oligonucleotide
  Antisense strand to SEQ ID NO: 918054
uuauccaaagaucuaaacc

SEQ ID NO: 918056 - RNA, 19 nt, Artificial Sequence
  Description of Artificial Sequence: Synthetic oligonucleotide
  Sense strand starting at position 1043 of SEQ ID NO: 913316
auacaaguguauccaaaug

SEQ ID NO: 918057 - RNA, 19 nt, Artificial Sequence
  Description of Artificial Sequence: Synthetic oligonucleotide
  Antisense strand to SEQ ID NO: 918056
cauuuggauacacuuguau

SEQ ID NO: 918058 - RNA, 19 nt, Artificial Sequence
  Description of Artificial Sequence: Synthetic oligonucleotide
  Sense strand starting at position 2828 of SEQ ID NO: 913316
ggguuuagaucuuuggaua

SEQ ID NO: 918059 - RNA, 19 nt, Artificial Sequence
  Description of Artificial Sequence: Synthetic oligonucleotide
  Antisense strand to SEQ ID NO: 918058
uauccaaagaucuaaaccc

SEQ ID NO: 918060 - RNA, 19 nt, Artificial Sequence
  Description of Artificial Sequence: Synthetic oligonucleotide
  Sense strand starting at position 554 of SEQ ID NO: 913316
guauaugaagguuaaguuu

SEQ ID NO: 918061 - RNA, 19 nt, Artificial Sequence
  Description of Artificial Sequence: Synthetic oligonucleotide
  Antisense strand to SEQ ID NO: 918060
aaacuuaaccuucauauac

SEQ ID NO: 918062 - RNA, 19 nt, Artificial Sequence
  Description of Artificial Sequence: Synthetic oligonucleotide
  Sense strand starting at position 3249 of SEQ ID NO: 913316
uguguuaugauaggauaag

SEQ ID NO: 918063 - RNA, 19 nt, Artificial Sequence
  Description of Artificial Sequence: Synthetic oligonucleotide
  Antisense strand to SEQ ID NO: 918062
cuuauccuaucauaacaca

SEQ ID NO: 918064 - RNA, 19 nt, Artificial Sequence
  Description of Artificial Sequence: Synthetic oligonucleotide
  Sense strand starting at position 2881 of SEQ ID NO: 913316
gcucgaugacuggaucuga

SEQ ID NO: 918065 - RNA, 19 nt, Artificial Sequence
  Description of Artificial Sequence: Synthetic oligonucleotide
  Antisense strand to SEQ ID NO: 918064
ucagauccagucaucgagc

SEQ ID NO: 918066 - RNA, 19 nt, Artificial Sequence
  Description of Artificial Sequence: Synthetic oligonucleotide
  Sense strand starting at position 3537 of SEQ ID NO: 913316
uuauucuuuggugauccua

SEQ ID NO: 918067 - RNA, 19 nt, Artificial Sequence
  Description of Artificial Sequence: Synthetic oligonucleotide
  Antisense strand to SEQ ID NO: 918066
uaggaucaccaaagaauaa

SEQ ID NO: 918068 - RNA, 19 nt, Artificial Sequence
  Description of Artificial Sequence: Synthetic oligonucleotide
  Sense strand starting at position 726 of SEQ ID NO: 913316
agaguaugcggucaauaaa

SEQ ID NO: 918069 - RNA, 19 nt, Artificial Sequence
  Description of Artificial Sequence: Synthetic oligonucleotide
  Antisense strand to SEQ ID NO: 918068
uuuauugaccgcauacucu

SEQ ID NO: 918070 - RNA, 19 nt, Artificial Sequence
  Description of Artificial Sequence: Synthetic oligonucleotide
  Sense strand starting at position 1245 of SEQ ID NO: 913316
ugagucuauccacggaaga

SEQ ID NO: 918071 - RNA, 19 nt, Artificial Sequence
  Description of Artificial Sequence: Synthetic oligonucleotide
  Antisense strand to SEQ ID NO: 918070
ucuuccguggauagacuca

SEQ ID NO: 918072 - RNA, 19 nt, Artificial Sequence
  Description of Artificial Sequence: Synthetic oligonucleotide
  Sense strand starting at position 1246 of SEQ ID NO: 913316
gagucuauccacggaagau

SEQ ID NO: 918073 - RNA, 19 nt, Artificial Sequence
  Description of Artificial Sequence: Synthetic oligonucleotide
  Antisense strand to SEQ ID NO: 918072
aucuuccguggauagacuc

SEQ ID NO: 918074 - RNA, 19 nt, Artificial Sequence
  Description of Artificial Sequence: Synthetic oligonucleotide
  Sense strand starting at position 3012 of SEQ ID NO: 913316
uaaauugugugaucugagg

SEQ ID NO: 918075 - RNA, 19 nt, Artificial Sequence
  Description of Artificial Sequence: Synthetic oligonucleotide
  Antisense strand to SEQ ID NO: 918074
ccucagaucacacaauuua

SEQ ID NO: 918076 - RNA, 19 nt, Artificial Sequence
  Description of Artificial Sequence: Synthetic oligonucleotide
  Sense strand starting at position 551 of SEQ ID NO: 913316
guaguauaugaagguuaag

SEQ ID NO: 918077 - RNA, 19 nt, Artificial Sequence
  Description of Artificial Sequence: Synthetic oligonucleotide
  Antisense strand to SEQ ID NO: 918076
cuuaaccuucauauacuac

SEQ ID NO: 918078 - RNA, 19 nt, Artificial Sequence
  Description of Artificial Sequence: Synthetic oligonucleotide
  Sense strand starting at position 547 of SEQ ID NO: 913316
gacaguaguauaugaaggu

SEQ ID NO: 918079 - RNA, 19 nt, Artificial Sequence
  Description of Artificial Sequence: Synthetic oligonucleotide
  Antisense strand to SEQ ID NO: 918078
accuucauauacuacuguc

SEQ ID NO: 918080 - RNA, 19 nt, Artificial Sequence
  Description of Artificial Sequence: Synthetic oligonucleotide
  Sense strand starting at position 2769 of SEQ ID NO: 913316
uuaggaacaugugagauuu

SEQ ID NO: 918081 - RNA, 19 nt, Artificial Sequence
  Description of Artificial Sequence: Synthetic oligonucleotide
  Antisense strand to SEQ ID NO: 918080
aaaucucacauguuccuaa

SEQ ID NO: 918082 - RNA, 19 nt, Artificial Sequence
  Description of Artificial Sequence: Synthetic oligonucleotide
  Sense strand starting at position 218 of SEQ ID NO: 913316
uucuaagugccuuacauga

SEQ ID NO: 918083 - RNA, 19 nt, Artificial Sequence
  Description of Artificial Sequence: Synthetic oligonucleotide
  Antisense strand to SEQ ID NO: 918082
ucauguaaggcacuuagaa

SEQ ID NO: 918084 - RNA, 19 nt, Artificial Sequence
  Description of Artificial Sequence: Synthetic oligonucleotide
  Sense strand starting at position 201 of SEQ ID NO: 913316
cuacauuccgagcacuauu

SEQ ID NO: 918085 - RNA, 19 nt, Artificial Sequence
  Description of Artificial Sequence: Synthetic oligonucleotide
  Antisense strand to SEQ ID NO: 918084
aauagugcucggaauguag

SEQ ID NO: 918086 - RNA, 19 nt, Artificial Sequence
  Description of Artificial Sequence: Synthetic oligonucleotide
  Sense strand starting at position 1057 of SEQ ID NO: 913316
aaauguguauguucugaaa

SEQ ID NO: 918087 - RNA, 19 nt, Artificial Sequence
  Description of Artificial Sequence: Synthetic oligonucleotide
  Antisense strand to SEQ ID NO: 918086
uuucagaacauacacauuu

SEQ ID NO: 918088 - RNA, 19 nt, Artificial Sequence
  Description of Artificial Sequence: Synthetic oligonucleotide
  Sense strand starting at position 3163 of SEQ ID NO: 913316
augagaguucguuacagug

SEQ ID NO: 918089 - RNA, 19 nt, Artificial Sequence
  Description of Artificial Sequence: Synthetic oligonucleotide
  Antisense strand to SEQ ID NO: 918088
cacuguaacgaacucucau

SEQ ID NO: 918090 - RNA, 19 nt, Artificial Sequence
  Description of Artificial Sequence: Synthetic oligonucleotide
  Sense strand starting at position 668 of SEQ ID NO: 913316
uguuaagaugguugugaga

SEQ ID NO: 918091 - RNA, 19 nt, Artificial Sequence
  Description of Artificial Sequence: Synthetic oligonucleotide
  Antisense strand to SEQ ID NO: 918090
ucucacaaccaucuuaaca

SEQ ID NO: 918092 - RNA, 19 nt, Artificial Sequence
  Description of Artificial Sequence: Synthetic oligonucleotide
  Sense strand starting at position 2552 of SEQ ID NO: 913317
caaugugaccuauagaugu

SEQ ID NO: 918093 - RNA, 19 nt, Artificial Sequence
  Description of Artificial Sequence: Synthetic oligonucleotide
  Antisense strand to SEQ ID NO: 918092
acaucuauaggucacauug

SEQ ID NO: 918094 - RNA, 19 nt, Artificial Sequence
  Description of Artificial Sequence: Synthetic oligonucleotide
  Sense strand starting at position 2736 of SEQ ID NO: 913317
ccaauaaaguaugugaaau

SEQ ID NO: 918095 - RNA, 19 nt, Artificial Sequence
  Description of Artificial Sequence: Synthetic oligonucleotide
  Antisense strand to SEQ ID NO: 918094
auuucacauacuuuauugg

SEQ ID NO: 918096 - RNA, 19 nt, Artificial Sequence
  Description of Artificial Sequence: Synthetic oligonucleotide
  Sense strand starting at position 3292 of SEQ ID NO: 913317
auggcugauuugcugguaa

SEQ ID NO: 918097 - RNA, 19 nt, Artificial Sequence
  Description of Artificial Sequence: Synthetic oligonucleotide
  Antisense strand to SEQ ID NO: 918096
uuaccagcaaaucagccau

SEQ ID NO: 918098 - RNA, 19 nt, Artificial Sequence
  Description of Artificial Sequence: Synthetic oligonucleotide
  Sense strand starting at position 2807 of SEQ ID NO: 913317
uuagcugagcaauaaauau

SEQ ID NO: 918099 - RNA, 19 nt, Artificial Sequence
  Description of Artificial Sequence: Synthetic oligonucleotide
  Antisense strand to SEQ ID NO: 918098
auauuuauugcucagcuaa

SEQ ID NO: 918100 - RNA, 19 nt, Artificial Sequence
  Description of Artificial Sequence: Synthetic oligonucleotide
  Sense strand starting at position 1047 of SEQ ID NO: 913317
uaaguuaagguuugaggaa

SEQ ID NO: 918101 - RNA, 19 nt, Artificial Sequence
  Description of Artificial Sequence: Synthetic oligonucleotide
  Antisense strand to SEQ ID NO: 918100
uuccucaaaccuuaacuua

SEQ ID NO: 918102 - RNA, 19 nt, Artificial Sequence
  Description of Artificial Sequence: Synthetic oligonucleotide
  Sense strand starting at position 2735 of SEQ ID NO: 913317
uccaauaaaguaugugaaa

SEQ ID NO: 918103 - RNA, 19 nt, Artificial Sequence
  Description of Artificial Sequence: Synthetic oligonucleotide
  Antisense strand to SEQ ID NO: 918102
uuucacauacuuuauugga

SEQ ID NO: 918104 - RNA, 19 nt, Artificial Sequence
  Description of Artificial Sequence: Synthetic oligonucleotide
  Sense strand starting at position 3294 of SEQ ID NO: 913317
ggcugauuugcugguaaau

SEQ ID NO: 918105 - RNA, 19 nt, Artificial Sequence
  Description of Artificial Sequence: Synthetic oligonucleotide
  Antisense strand to SEQ ID NO: 918104
auuuaccagcaaaucagcc

SEQ ID NO: 918106 - RNA, 19 nt, Artificial Sequence
  Description of Artificial Sequence: Synthetic oligonucleotide
  Sense strand starting at position 3732 of SEQ ID NO: 913317
agccaauuccaagaguuua

SEQ ID NO: 918107 - RNA, 19 nt, Artificial Sequence
  Description of Artificial Sequence: Synthetic oligonucleotide
  Antisense strand to SEQ ID NO: 918106
uaaacucuuggaauuggcu

SEQ ID NO: 918108 - RNA, 19 nt, Artificial Sequence
  Description of Artificial Sequence: Synthetic oligonucleotide
  Sense strand starting at position 2054 of SEQ ID NO: 913317
cugcuagcucuuccgguua

SEQ ID NO: 918109 - RNA, 19 nt, Artificial Sequence
  Description of Artificial Sequence: Synthetic oligonucleotide
  Antisense strand to SEQ ID NO: 918108
uaaccggaagagcuagcag

SEQ ID NO: 918110 - RNA, 19 nt, Artificial Sequence
  Description of Artificial Sequence: Synthetic oligonucleotide
  Sense strand starting at position 1099 of SEQ ID NO: 913317
gggacagguucugugagaa

SEQ ID NO: 918111 - RNA, 19 nt, Artificial Sequence
  Description of Artificial Sequence: Synthetic oligonucleotide
  Antisense strand to SEQ ID NO: 918110
uucucacagaaccuguccc

SEQ ID NO: 918112 - RNA, 19 nt, Artificial Sequence
  Description of Artificial Sequence: Synthetic oligonucleotide
  Sense strand starting at position 3379 of SEQ ID NO: 913317
gaaaccugucucgaugauc

SEQ ID NO: 918113 - RNA, 19 nt, Artificial Sequence
  Description of Artificial Sequence: Synthetic oligonucleotide
  Antisense strand to SEQ ID NO: 918112
gaucaucgagacagguuuc

SEQ ID NO: 918114 - RNA, 19 nt, Artificial Sequence
  Description of Artificial Sequence: Synthetic oligonucleotide
  Sense strand starting at position 1644 of SEQ ID NO: 913317
ggucgucaacccuagaaag

SEQ ID NO: 918115 - RNA, 19 nt, Artificial Sequence
  Description of Artificial Sequence: Synthetic oligonucleotide
  Antisense strand to SEQ ID NO: 918114
cuuucuaggguugacgacc

SEQ ID NO: 918116 - RNA, 19 nt, Artificial Sequence
  Description of Artificial Sequence: Synthetic oligonucleotide
  Sense strand starting at position 1797 of SEQ ID NO: 913317
aagucucccggauggaaga

SEQ ID NO: 918117 - RNA, 19 nt, Artificial Sequence
  Description of Artificial Sequence: Synthetic oligonucleotide
  Antisense strand to SEQ ID NO: 918116
ucuuccauccgggagacuu

SEQ ID NO: 918118 - RNA, 19 nt, Artificial Sequence
  Description of Artificial Sequence: Synthetic oligonucleotide
  Sense strand starting at position 2671 of SEQ ID NO: 913317
uggauuugccgcuaguuca

SEQ ID NO: 918119 - RNA, 19 nt, Artificial Sequence
  Description of Artificial Sequence: Synthetic oligonucleotide
  Antisense strand to SEQ ID NO: 918118
ugaacuagcggcaaaucca

SEQ ID NO: 918120 - RNA, 19 nt, Artificial Sequence
  Description of Artificial Sequence: Synthetic oligonucleotide
  Sense strand starting at position 3067 of SEQ ID NO: 913317
ucaggaugaucugucuuaa

SEQ ID NO: 918121 - RNA, 19 nt, Artificial Sequence
  Description of Artificial Sequence: Synthetic oligonucleotide
  Antisense strand to SEQ ID NO: 918120
uuaagacagaucauccuga

SEQ ID NO: 918122 - RNA, 19 nt, Artificial Sequence
  Description of Artificial Sequence: Synthetic oligonucleotide
  Sense strand starting at position 2801 of SEQ ID NO: 913317
ugauacuuagcugagcaau

SEQ ID NO: 918123 - RNA, 19 nt, Artificial Sequence
  Description of Artificial Sequence: Synthetic oligonucleotide
  Antisense strand to SEQ ID NO: 918122
auugcucagcuaaguauca

SEQ ID NO: 918124 - RNA, 19 nt, Artificial Sequence
  Description of Artificial Sequence: Synthetic oligonucleotide
  Sense strand starting at position 1479 of SEQ ID NO: 913317
gauacuuugagaggucgag

SEQ ID NO: 918125 - RNA, 19 nt, Artificial Sequence
  Description of Artificial Sequence: Synthetic oligonucleotide
  Antisense strand to SEQ ID NO: 918124
cucgaccucucaaaguauc

SEQ ID NO: 918126 - RNA, 19 nt, Artificial Sequence
  Description of Artificial Sequence: Synthetic oligonucleotide
  Sense strand starting at position 546 of SEQ ID NO: 913317
gcaugucuagcagaagaca

SEQ ID NO: 918127 - RNA, 19 nt, Artificial Sequence
  Description of Artificial Sequence: Synthetic oligonucleotide
  Antisense strand to SEQ ID NO: 918126
ugucuucugcuagacaugc

SEQ ID NO: 918128 - RNA, 19 nt, Artificial Sequence
  Description of Artificial Sequence: Synthetic oligonucleotide
  Sense strand starting at position 1910 of SEQ ID NO: 913317
cggcauuuaccuugguauu

SEQ ID NO: 918129 - RNA, 19 nt, Artificial Sequence
  Description of Artificial Sequence: Synthetic oligonucleotide
  Antisense strand to SEQ ID NO: 918128
aauaccaagguaaaugccg

SEQ ID NO: 918130 - RNA, 19 nt, Artificial Sequence
  Description of Artificial Sequence: Synthetic oligonucleotide
  Sense strand starting at position 3092 of SEQ ID NO: 913317
ugcucuguggaaugagaaa

SEQ ID NO: 918131 - RNA, 19 nt, Artificial Sequence
  Description of Artificial Sequence: Synthetic oligonucleotide
  Antisense strand to SEQ ID NO: 918130
uuucucauuccacagagca

SEQ ID NO: 918132 - RNA, 19 nt, Artificial Sequence
  Description of Artificial Sequence: Synthetic oligonucleotide
  Sense strand starting at position 2657 of SEQ ID NO: 913317
cccaaagucuaucuuggau

SEQ ID NO: 918133 - RNA, 19 nt, Artificial Sequence
  Description of Artificial Sequence: Synthetic oligonucleotide
  Antisense strand to SEQ ID NO: 918132
auccaagauagacuuuggg

SEQ ID NO: 918134 - RNA, 19 nt, Artificial Sequence
  Description of Artificial Sequence: Synthetic oligonucleotide
  Sense strand starting at position 3755 of SEQ ID NO: 913317
gacaucagugucuagguca

SEQ ID NO: 918135 - RNA, 19 nt, Artificial Sequence
  Description of Artificial Sequence: Synthetic oligonucleotide
  Antisense strand to SEQ ID NO: 918134
ugaccuagacacugauguc

SEQ ID NO: 918136 - RNA, 19 nt, Artificial Sequence
  Description of Artificial Sequence: Synthetic oligonucleotide
  Sense strand starting at position 3226 of SEQ ID NO: 913317
aaacaugucggcuaucuaa

SEQ ID NO: 918137 - RNA, 19 nt, Artificial Sequence
  Description of Artificial Sequence: Synthetic oligonucleotide
  Antisense strand to SEQ ID NO: 918136
uuagauagccgacauguuu

SEQ ID NO: 918138 - RNA, 19 nt, Artificial Sequence
  Description of Artificial Sequence: Synthetic oligonucleotide
  Sense strand starting at position 2366 of SEQ ID NO: 913317
aaccaacuuuggguuguaa

SEQ ID NO: 918139 - RNA, 19 nt, Artificial Sequence
  Description of Artificial Sequence: Synthetic oligonucleotide
  Antisense strand to SEQ ID NO: 918138
uuacaacccaaaguugguu

SEQ ID NO: 918140 - RNA, 19 nt, Artificial Sequence
  Description of Artificial Sequence: Synthetic oligonucleotide
  Sense strand starting at position 2272 of SEQ ID NO: 913317
ucauuugaucguggacguu

SEQ ID NO: 918141 - RNA, 19 nt, Artificial Sequence
  Description of Artificial Sequence: Synthetic oligonucleotide
  Antisense strand to SEQ ID NO: 918140
aacguccacgaucaaauga

SEQ ID NO: 918142 - RNA, 19 nt, Artificial Sequence
  Description of Artificial Sequence: Synthetic oligonucleotide
  Sense strand starting at position 2746 of SEQ ID NO: 913317
augugaaauuaccuagcau

SEQ ID NO: 918143 - RNA, 19 nt, Artificial Sequence
  Description of Artificial Sequence: Synthetic oligonucleotide
  Antisense strand to SEQ ID NO: 918142
augcuagguaauuucacau

SEQ ID NO: 918144 - RNA, 19 nt, Artificial Sequence
  Description of Artificial Sequence: Synthetic oligonucleotide
  Sense strand starting at position 3760 of SEQ ID NO: 913317
cagugucuaggucaucuaa

SEQ ID NO: 918145 - RNA, 19 nt, Artificial Sequence
  Description of Artificial Sequence: Synthetic oligonucleotide
  Antisense strand to SEQ ID NO: 918144
uuagaugaccuagacacug

SEQ ID NO: 918146 - RNA, 19 nt, Artificial Sequence
  Description of Artificial Sequence: Synthetic oligonucleotide
  Sense strand starting at position 904 of SEQ ID NO: 913317
cgauguguccgcucuggca

SEQ ID NO: 918147 - RNA, 19 nt, Artificial Sequence
  Description of Artificial Sequence: Synthetic oligonucleotide
  Antisense strand to SEQ ID NO: 918146
ugccagagcggacacaucg

SEQ ID NO: 918148 - RNA, 19 nt, Artificial Sequence
  Description of Artificial Sequence: Synthetic oligonucleotide
  Sense strand starting at position 1557 of SEQ ID NO: 913317
ggcucuauuuaagaaacca

SEQ ID NO: 918149 - RNA, 19 nt, Artificial Sequence
  Description of Artificial Sequence: Synthetic oligonucleotide
  Antisense strand to SEQ ID NO: 918148
ugguuucuuaaauagagcc

SEQ ID NO: 918150 - RNA, 19 nt, Artificial Sequence
  Description of Artificial Sequence: Synthetic oligonucleotide
  Sense strand starting at position 2644 of SEQ ID NO: 913317
aggguuaucuuggcccaaa

SEQ ID NO: 918151 - RNA, 19 nt, Artificial Sequence
  Description of Artificial Sequence: Synthetic oligonucleotide
  Antisense strand to SEQ ID NO: 918150
uuugggccaagauaacccu

SEQ ID NO: 918152 - RNA, 19 nt, Artificial Sequence
  Description of Artificial Sequence: Synthetic oligonucleotide
  Sense strand starting at position 3144 of SEQ ID NO: 913317
cugggaggcucuccuacau

SEQ ID NO: 918153 - RNA, 19 nt, Artificial Sequence
  Description of Artificial Sequence: Synthetic oligonucleotide
  Antisense strand to SEQ ID NO: 918152
auguaggagagccucccag

SEQ ID NO: 918154 - RNA, 19 nt, Artificial Sequence
  Description of Artificial Sequence: Synthetic oligonucleotide
  Sense strand starting at position 2368 of SEQ ID NO: 913317
ccaacuuuggguuguaaau

SEQ ID NO: 918155 - RNA, 19 nt, Artificial Sequence
  Description of Artificial Sequence: Synthetic oligonucleotide
  Antisense strand to SEQ ID NO: 918154
auuuacaacccaaaguugg

SEQ ID NO: 918156 - RNA, 19 nt, Artificial Sequence
  Description of Artificial Sequence: Synthetic oligonucleotide
  Sense strand starting at position 2645 of SEQ ID NO: 913317
ggguuaucuuggcccaaag

SEQ ID NO: 918157 - RNA, 19 nt, Artificial Sequence
  Description of Artificial Sequence: Synthetic oligonucleotide
  Antisense strand to SEQ ID NO: 918156
cuuugggccaagauaaccc

SEQ ID NO: 918158 - RNA, 19 nt, Artificial Sequence
  Description of Artificial Sequence: Synthetic oligonucleotide
  Sense strand starting at position 3742 of SEQ ID NO: 913317
aagaguuuagugugacauc

SEQ ID NO: 918159 - RNA, 19 nt, Artificial Sequence
  Description of Artificial Sequence: Synthetic oligonucleotide
  Antisense strand to SEQ ID NO: 918158
gaugucacacuaaacucuu

SEQ ID NO: 918160 - RNA, 19 nt, Artificial Sequence
  Description of Artificial Sequence: Synthetic oligonucleotide
  Sense strand starting at position 3039 of SEQ ID NO: 913317
acagauugcccucagcuuu

SEQ ID NO: 918161 - RNA, 19 nt, Artificial Sequence
  Description of Artificial Sequence: Synthetic oligonucleotide
  Antisense strand to SEQ ID NO: 918160
aaagcugagggcaaucugu

SEQ ID NO: 918162 - RNA, 19 nt, Artificial Sequence
  Description of Artificial Sequence: Synthetic oligonucleotide
  Sense strand starting at position 2994 of SEQ ID NO: 913317
gaaugaaguuucuuucugu

SEQ ID NO: 918163 - RNA, 19 nt, Artificial Sequence
  Description of Artificial Sequence: Synthetic oligonucleotide
  Antisense strand to SEQ ID NO: 918162
acagaaagaaacuucauuc

SEQ ID NO: 918164 - RNA, 19 nt, Artificial Sequence
  Description of Artificial Sequence: Synthetic oligonucleotide
  Sense strand starting at position 3307 of SEQ ID NO: 913317
guaaaugacaggugugagu

SEQ ID NO: 918165 - RNA, 19 nt, Artificial Sequence
  Description of Artificial Sequence: Synthetic oligonucleotide
  Antisense strand to SEQ ID NO: 918164
acucacaccugucauuuac

SEQ ID NO: 918166 - RNA, 19 nt, Artificial Sequence
  Description of Artificial Sequence: Synthetic oligonucleotide
  Sense strand starting at position 2266 of SEQ ID NO: 913317
gggaaaucauuugaucgug

SEQ ID NO: 918167 - RNA, 19 nt, Artificial Sequence
  Description of Artificial Sequence: Synthetic oligonucleotide
  Antisense strand to SEQ ID NO: 918166
cacgaucaaaugauuuccc

SEQ ID NO: 918168 - RNA, 19 nt, Artificial Sequence
  Description of Artificial Sequence: Synthetic oligonucleotide
  Sense strand starting at position 1089 of SEQ ID NO: 913317
gcuuuaagucgggacaggu

SEQ ID NO: 918169 - RNA, 19 nt, Artificial Sequence
  Description of Artificial Sequence: Synthetic oligonucleotide
  Antisense strand to SEQ ID NO: 918168
accugucccgacuuaaagc

SEQ ID NO: 918170 - RNA, 19 nt, Artificial Sequence
  Description of Artificial Sequence: Synthetic oligonucleotide
  Sense strand starting at position 2643 of SEQ ID NO: 913317
uaggguuaucuuggcccaa

SEQ ID NO: 918171 - RNA, 19 nt, Artificial Sequence
  Description of Artificial Sequence: Synthetic oligonucleotide
  Antisense strand to SEQ ID NO: 918170
uugggccaagauaacccua

SEQ ID NO: 918172 - RNA, 19 nt, Artificial Sequence
  Description of Artificial Sequence: Synthetic oligonucleotide
  Sense strand starting at position 3812 of SEQ ID NO: 913318
caaugugaccuauagaugu

SEQ ID NO: 918173 - RNA, 19 nt, Artificial Sequence
  Description of Artificial Sequence: Synthetic oligonucleotide
  Antisense strand to SEQ ID NO: 918172
acaucuauaggucacauug

SEQ ID NO: 918174 - RNA, 19 nt, Artificial Sequence
  Description of Artificial Sequence: Synthetic oligonucleotide
  Sense strand starting at position 2307 of SEQ ID NO: 913318
uaaguuaagguuugaggaa

SEQ ID NO: 918175 - RNA, 19 nt, Artificial Sequence
  Description of Artificial Sequence: Synthetic oligonucleotide
  Antisense strand to SEQ ID NO: 918174
uuccucaaaccuuaacuua

SEQ ID NO: 918176 - RNA, 19 nt, Artificial Sequence
  Description of Artificial Sequence: Synthetic oligonucleotide
  Sense strand starting at position 655 of SEQ ID NO: 913318
gguccaauaugaguauaaa

SEQ ID NO: 918177 - RNA, 19 nt, Artificial Sequence
  Description of Artificial Sequence: Synthetic oligonucleotide
  Antisense strand to SEQ ID NO: 918176
uuuauacucauauuggacc

SEQ ID NO: 918178 - RNA, 19 nt, Artificial Sequence
  Description of Artificial Sequence: Synthetic oligonucleotide
  Sense strand starting at position 495 of SEQ ID NO: 913318
cgugaacaggguuaauaug

SEQ ID NO: 918179 - RNA, 19 nt, Artificial Sequence
  Description of Artificial Sequence: Synthetic oligonucleotide
  Antisense strand to SEQ ID NO: 918178
cauauuaacccuguucacg

SEQ ID NO: 918180 - RNA, 19 nt, Artificial Sequence
  Description of Artificial Sequence: Synthetic oligonucleotide
  Sense strand starting at position 3314 of SEQ ID NO: 913318
cugcuagcucuuccgguua

SEQ ID NO: 918181 - RNA, 19 nt, Artificial Sequence
  Description of Artificial Sequence: Synthetic oligonucleotide
  Antisense strand to SEQ ID NO: 918180
uaaccggaagagcuagcag

SEQ ID NO: 918182 - RNA, 19 nt, Artificial Sequence
  Description of Artificial Sequence: Synthetic oligonucleotide
  Sense strand starting at position 2359 of SEQ ID NO: 913318
gggacagguucugugagaa

SEQ ID NO: 918183 - RNA, 19 nt, Artificial Sequence
  Description of Artificial Sequence: Synthetic oligonucleotide
  Antisense strand to SEQ ID NO: 918182
uucucacagaaccuguccc

SEQ ID NO: 918184 - RNA, 19 nt, Artificial Sequence
  Description of Artificial Sequence: Synthetic oligonucleotide
  Sense strand starting at position 2904 of SEQ ID NO: 913318
ggucgucaacccuagaaag

SEQ ID NO: 918185 - RNA, 19 nt, Artificial Sequence
  Description of Artificial Sequence: Synthetic oligonucleotide
  Antisense strand to SEQ ID NO: 918184
cuuucuaggguugacgacc

SEQ ID NO: 918186 - RNA, 19 nt, Artificial Sequence
  Description of Artificial Sequence: Synthetic oligonucleotide
  Sense strand starting at position 3057 of SEQ ID NO: 913318
aagucucccggauggaaga

SEQ ID NO: 918187 - RNA, 19 nt, Artificial Sequence
  Description of Artificial Sequence: Synthetic oligonucleotide
  Antisense strand to SEQ ID NO: 918186
ucuuccauccgggagacuu

SEQ ID NO: 918188 - RNA, 19 nt, Artificial Sequence
  Description of Artificial Sequence: Synthetic oligonucleotide
  Sense strand starting at position 3931 of SEQ ID NO: 913318
uggauuugccgcuaguuca

SEQ ID NO: 918189 - RNA, 19 nt, Artificial Sequence
  Description of Artificial Sequence: Synthetic oligonucleotide
  Antisense strand to SEQ ID NO: 918188
ugaacuagcggcaaaucca

SEQ ID NO: 918190 - RNA, 19 nt, Artificial Sequence
  Description of Artificial Sequence: Synthetic oligonucleotide
  Sense strand starting at position 2739 of SEQ ID NO: 913318
gauacuuugagaggucgag

SEQ ID NO: 918191 - RNA, 19 nt, Artificial Sequence
  Description of Artificial Sequence: Synthetic oligonucleotide
  Antisense strand to SEQ ID NO: 918190
cucgaccucucaaaguauc

SEQ ID NO: 918192 - RNA, 19 nt, Artificial Sequence
  Description of Artificial Sequence: Synthetic oligonucleotide
  Sense strand starting at position 1806 of SEQ ID NO: 913318
gcaugucuagcagaagaca

SEQ ID NO: 918193 - RNA, 19 nt, Artificial Sequence
  Description of Artificial Sequence: Synthetic oligonucleotide
  Antisense strand to SEQ ID NO: 918192
ugucuucugcuagacaugc

SEQ ID NO: 918194 - RNA, 19 nt, Artificial Sequence
  Description of Artificial Sequence: Synthetic oligonucleotide
  Sense strand starting at position 3170 of SEQ ID NO: 913318
cggcauuuaccuugguauu

SEQ ID NO: 918195 - RNA, 19 nt, Artificial Sequence
  Description of Artificial Sequence: Synthetic oligonucleotide
  Antisense strand to SEQ ID NO: 918194
aauaccaagguaaaugccg

SEQ ID NO: 918196 - RNA, 19 nt, Artificial Sequence
  Description of Artificial Sequence: Synthetic oligonucleotide
  Sense strand starting at position 3917 of SEQ ID NO: 913318
cccaaagucuaucuuggau

SEQ ID NO: 918197 - RNA, 19 nt, Artificial Sequence
  Description of Artificial Sequence: Synthetic oligonucleotide
  Antisense strand to SEQ ID NO: 918196
auccaagauagacuuuggg

SEQ ID NO: 918198 - RNA, 19 nt, Artificial Sequence
  Description of Artificial Sequence: Synthetic oligonucleotide
  Sense strand starting at position 3626 of SEQ ID NO: 913318
aaccaacuuuggguuguaa

SEQ ID NO: 918199 - RNA, 19 nt, Artificial Sequence
  Description of Artificial Sequence: Synthetic oligonucleotide
  Antisense strand to SEQ ID NO: 918198
uuacaacccaaaguugguu

SEQ ID NO: 918200 - RNA, 19 nt, Artificial Sequence
  Description of Artificial Sequence: Synthetic oligonucleotide
  Sense strand starting at position 3532 of SEQ ID NO: 913318
ucauuugaucguggacguu

SEQ ID NO: 918201 - RNA, 19 nt, Artificial Sequence
  Description of Artificial Sequence: Synthetic oligonucleotide
  Antisense strand to SEQ ID NO: 918200
aacguccacgaucaaauga

SEQ ID NO: 918202 - RNA, 19 nt, Artificial Sequence
  Description of Artificial Sequence: Synthetic oligonucleotide
  Sense strand starting at position 492 of SEQ ID NO: 913318
aaucgugaacaggguuaau

SEQ ID NO: 918203 - RNA, 19 nt, Artificial Sequence
  Description of Artificial Sequence: Synthetic oligonucleotide
  Antisense strand to SEQ ID NO: 918202
auuaacccuguucacgauu

SEQ ID NO: 918204 - RNA, 19 nt, Artificial Sequence
  Description of Artificial Sequence: Synthetic oligonucleotide
  Sense strand starting at position 2164 of SEQ ID NO: 913318
cgauguguccgcucuggca

SEQ ID NO: 918205 - RNA, 19 nt, Artificial Sequence
  Description of Artificial Sequence: Synthetic oligonucleotide
  Antisense strand to SEQ ID NO: 918204
ugccagagcggacacaucg

SEQ ID NO: 918206 - RNA, 19 nt, Artificial Sequence
  Description of Artificial Sequence: Synthetic oligonucleotide
  Sense strand starting at position 810 of SEQ ID NO: 913318
gcugguagacccuaugagu

SEQ ID NO: 918207 - RNA, 19 nt, Artificial Sequence
  Description of Artificial Sequence: Synthetic oligonucleotide
  Antisense strand to SEQ ID NO: 918206
acucauagggucuaccagc

SEQ ID NO: 918208 - RNA, 19 nt, Artificial Sequence
  Description of Artificial Sequence: Synthetic oligonucleotide
  Sense strand starting at position 2817 of SEQ ID NO: 913318
ggcucuauuuaagaaacca

SEQ ID NO: 918209 - RNA, 19 nt, Artificial Sequence
  Description of Artificial Sequence: Synthetic oligonucleotide
  Antisense strand to SEQ ID NO: 918208
ugguuucuuaaauagagcc

SEQ ID NO: 918210 - RNA, 19 nt, Artificial Sequence
  Description of Artificial Sequence: Synthetic oligonucleotide
  Sense strand starting at position 3904 of SEQ ID NO: 913318
aggguuaucuuggcccaaa

SEQ ID NO: 918211 - RNA, 19 nt, Artificial Sequence
  Description of Artificial Sequence: Synthetic oligonucleotide
  Antisense strand to SEQ ID NO: 918210
uuugggccaagauaacccu

SEQ ID NO: 918212 - RNA, 19 nt, Artificial Sequence
  Description of Artificial Sequence: Synthetic oligonucleotide
  Sense strand starting at position 3628 of SEQ ID NO: 913318
ccaacuuuggguuguaaau

SEQ ID NO: 918213 - RNA, 19 nt, Artificial Sequence
  Description of Artificial Sequence: Synthetic oligonucleotide
  Antisense strand to SEQ ID NO: 918212
auuuacaacccaaaguugg

SEQ ID NO: 918214 - RNA, 19 nt, Artificial Sequence
  Description of Artificial Sequence: Synthetic oligonucleotide
  Sense strand starting at position 1198 of SEQ ID NO: 913318
gcagucauuaagugacaag

SEQ ID NO: 918215 - RNA, 19 nt, Artificial Sequence
  Description of Artificial Sequence: Synthetic oligonucleotide
  Antisense strand to SEQ ID NO: 918214
cuugucacuuaaugacugc

SEQ ID NO: 918216 - RNA, 19 nt, Artificial Sequence
  Description of Artificial Sequence: Synthetic oligonucleotide
  Sense strand starting at position 3905 of SEQ ID NO: 913318
ggguuaucuuggcccaaag

SEQ ID NO: 918217 - RNA, 19 nt, Artificial Sequence
  Description of Artificial Sequence: Synthetic oligonucleotide
  Antisense strand to SEQ ID NO: 918216
cuuugggccaagauaaccc

SEQ ID NO: 918218 - RNA, 19 nt, Artificial Sequence
  Description of Artificial Sequence: Synthetic oligonucleotide
  Sense strand starting at position 3526 of SEQ ID NO: 913318
gggaaaucauuugaucgug

SEQ ID NO: 918219 - RNA, 19 nt, Artificial Sequence
  Description of Artificial Sequence: Synthetic oligonucleotide
  Antisense strand to SEQ ID NO: 918218
cacgaucaaaugauuuccc

SEQ ID NO: 918220 - RNA, 19 nt, Artificial Sequence
  Description of Artificial Sequence: Synthetic oligonucleotide
  Sense strand starting at position 2349 of SEQ ID NO: 913318
gcuuuaagucgggacaggu

SEQ ID NO: 918221 - RNA, 19 nt, Artificial Sequence
  Description of Artificial Sequence: Synthetic oligonucleotide
  Antisense strand to SEQ ID NO: 918220
accugucccgacuuaaagc

SEQ ID NO: 918222 - RNA, 19 nt, Artificial Sequence
  Description of Artificial Sequence: Synthetic oligonucleotide
  Sense strand starting at position 1194 of SEQ ID NO: 913318
auccgcagucauuaaguga

SEQ ID NO: 918223 - RNA, 19 nt, Artificial Sequence
  Description of Artificial Sequence: Synthetic oligonucleotide
  Antisense strand to SEQ ID NO: 918222
ucacuuaaugacugcggau

SEQ ID NO: 918224 - RNA, 19 nt, Artificial Sequence
  Description of Artificial Sequence: Synthetic oligonucleotide
  Sense strand starting at position 3903 of SEQ ID NO: 913318
uaggguuaucuuggcccaa

SEQ ID NO: 918225 - RNA, 19 nt, Artificial Sequence
  Description of Artificial Sequence: Synthetic oligonucleotide
  Antisense strand to SEQ ID NO: 918224
uugggccaagauaacccua

SEQ ID NO: 918226 - RNA, 19 nt, Artificial Sequence
  Description of Artificial Sequence: Synthetic oligonucleotide
  Sense strand starting at position 3429 of SEQ ID NO: 913318
cagcuuaagugucuugaga

SEQ ID NO: 918227 - RNA, 19 nt, Artificial Sequence
  Description of Artificial Sequence: Synthetic oligonucleotide
  Antisense strand to SEQ ID NO: 918226
ucucaagacacuuaagcug

SEQ ID NO: 918228 - RNA, 19 nt, Artificial Sequence
  Description of Artificial Sequence: Synthetic oligonucleotide
  Sense strand starting at position 3952 of SEQ ID NO: 913318
gugugacugcgucaggaaa

SEQ ID NO: 918229 - RNA, 19 nt, Artificial Sequence
  Description of Artificial Sequence: Synthetic oligonucleotide
  Antisense strand to SEQ ID NO: 918228
uuuccugacgcagucacac

SEQ ID NO: 918230 - RNA, 19 nt, Artificial Sequence
  Description of Artificial Sequence: Synthetic oligonucleotide
  Sense strand starting at position 362 of SEQ ID NO: 913318
guagaaagauaugaauuga

SEQ ID NO: 918231 - RNA, 19 nt, Artificial Sequence
  Description of Artificial Sequence: Synthetic oligonucleotide
  Antisense strand to SEQ ID NO: 918230
ucaauucauaucuuucuac

SEQ ID NO: 918232 - RNA, 19 nt, Artificial Sequence
  Description of Artificial Sequence: Synthetic oligonucleotide
  Sense strand starting at position 3180 of SEQ ID NO: 913318
cuugguauugccggacaag

SEQ ID NO: 918233 - RNA, 19 nt, Artificial Sequence
  Description of Artificial Sequence: Synthetic oligonucleotide
  Antisense strand to SEQ ID NO: 918232
cuuguccggcaauaccaag

SEQ ID NO: 918234 - RNA, 19 nt, Artificial Sequence
  Description of Artificial Sequence: Synthetic oligonucleotide
  Sense strand starting at position 1197 of SEQ ID NO: 913318
cgcagucauuaagugacaa

SEQ ID NO: 918235 - RNA, 19 nt, Artificial Sequence
  Description of Artificial Sequence: Synthetic oligonucleotide
  Antisense strand to SEQ ID NO: 918234
uugucacuuaaugacugcg

SEQ ID NO: 918236 - RNA, 19 nt, Artificial Sequence
  Description of Artificial Sequence: Synthetic oligonucleotide
  Sense strand starting at position 3706 of SEQ ID NO: 913318
gcguuauuacuuuauucca

SEQ ID NO: 918237 - RNA, 19 nt, Artificial Sequence
  Description of Artificial Sequence: Synthetic oligonucleotide
  Antisense strand to SEQ ID NO: 918236
uggaauaaaguaauaacgc

SEQ ID NO: 918238 - RNA, 19 nt, Artificial Sequence
  Description of Artificial Sequence: Synthetic oligonucleotide
  Sense strand starting at position 3698 of SEQ ID NO: 913318
uaucuaacgcguuauuacu

SEQ ID NO: 918239 - RNA, 19 nt, Artificial Sequence
  Description of Artificial Sequence: Synthetic oligonucleotide
  Antisense strand to SEQ ID NO: 918238
aguaauaacgcguuagaua

SEQ ID NO: 918240 - RNA, 19 nt, Artificial Sequence
  Description of Artificial Sequence: Synthetic oligonucleotide
  Sense strand starting at position 3864 of SEQ ID NO: 913318
agggugauuucugguggga

SEQ ID NO: 918241 - RNA, 19 nt, Artificial Sequence
  Description of Artificial Sequence: Synthetic oligonucleotide
  Antisense strand to SEQ ID NO: 918240
ucccaccagaaaucacccu

SEQ ID NO: 918242 - RNA, 19 nt, Artificial Sequence
  Description of Artificial Sequence: Synthetic oligonucleotide
  Sense strand starting at position 3034 of SEQ ID NO: 913318
aguccuguagcccggaaau

SEQ ID NO: 918243 - RNA, 19 nt, Artificial Sequence
  Description of Artificial Sequence: Synthetic oligonucleotide
  Antisense strand to SEQ ID NO: 918242
auuuccgggcuacaggacu

SEQ ID NO: 918244 - RNA, 19 nt, Artificial Sequence
  Description of Artificial Sequence: Synthetic oligonucleotide
  Sense strand starting at position 2430 of SEQ ID NO: 913318
uccaguggcaaucgugaca

SEQ ID NO: 918245 - RNA, 19 nt, Artificial Sequence
  Description of Artificial Sequence: Synthetic oligonucleotide
  Antisense strand to SEQ ID NO: 918244
ugucacgauugccacugga

SEQ ID NO: 918246 - RNA, 19 nt, Artificial Sequence
  Description of Artificial Sequence: Synthetic oligonucleotide
  Sense strand starting at position 2423 of SEQ ID NO: 913318
uagccuuuccaguggcaau

SEQ ID NO: 918247 - RNA, 19 nt, Artificial Sequence
  Description of Artificial Sequence: Synthetic oligonucleotide
  Antisense strand to SEQ ID NO: 918246
auugccacuggaaaggcua

SEQ ID NO: 918248 - RNA, 19 nt, Artificial Sequence
  Description of Artificial Sequence: Synthetic oligonucleotide
  Sense strand starting at position 3637 of SEQ ID NO: 913318
gguuguaaauacuaaagaa

SEQ ID NO: 918249 - RNA, 19 nt, Artificial Sequence
  Description of Artificial Sequence: Synthetic oligonucleotide
  Antisense strand to SEQ ID NO: 918248
uucuuuaguauuuacaacc

SEQ ID NO: 918250 - RNA, 19 nt, Artificial Sequence
  Description of Artificial Sequence: Synthetic oligonucleotide
  Sense strand starting at position 2805 of SEQ ID NO: 913318
uggcgauacccuggcucua

SEQ ID NO: 918251 - RNA, 19 nt, Artificial Sequence
  Description of Artificial Sequence: Synthetic oligonucleotide
  Antisense strand to SEQ ID NO: 918250
uagagccaggguaucgcca

SEQ ID NO: 918252 - RNA, 19 nt, Artificial Sequence
  Description of Artificial Sequence: Synthetic oligonucleotide
  Sense strand starting at position 3363 of SEQ ID NO: 913319
ggauuacauuuccaaagga

SEQ ID NO: 918253 - RNA, 19 nt, Artificial Sequence
  Description of Artificial Sequence: Synthetic oligonucleotide
  Antisense strand to SEQ ID NO: 918252
uccuuuggaaauguaaucc

SEQ ID NO: 918254 - RNA, 19 nt, Artificial Sequence
  Description of Artificial Sequence: Synthetic oligonucleotide
  Sense strand starting at position 3157 of SEQ ID NO: 913319
gcuguuuaucaugagagaa

SEQ ID NO: 918255 - RNA, 19 nt, Artificial Sequence
  Description of Artificial Sequence: Synthetic oligonucleotide
  Antisense strand to SEQ ID NO: 918254
uucucucaugauaaacagc

SEQ ID NO: 918256 - RNA, 19 nt, Artificial Sequence
  Description of Artificial Sequence: Synthetic oligonucleotide
  Sense strand starting at position 1421 of SEQ ID NO: 913319
gauuaucaccugggugaag

SEQ ID NO: 918257 - RNA, 19 nt, Artificial Sequence
  Description of Artificial Sequence: Synthetic oligonucleotide
  Antisense strand to SEQ ID NO: 918256
cuucacccaggugauaauc

SEQ ID NO: 918258 - RNA, 19 nt, Artificial Sequence
  Description of Artificial Sequence: Synthetic oligonucleotide
  Sense strand starting at position 1420 of SEQ ID NO: 913319
ugauuaucaccugggugaa

SEQ ID NO: 918259 - RNA, 19 nt, Artificial Sequence
  Description of Artificial Sequence: Synthetic oligonucleotide
  Antisense strand to SEQ ID NO: 918258
uucacccaggugauaauca

SEQ ID NO: 918260 - RNA, 19 nt, Artificial Sequence
  Description of Artificial Sequence: Synthetic oligonucleotide
  Sense strand starting at position 597 of SEQ ID NO: 913319
ccagauggcccugaaguau

SEQ ID NO: 918261 - RNA, 19 nt, Artificial Sequence
  Description of Artificial Sequence: Synthetic oligonucleotide
  Antisense strand to SEQ ID NO: 918260
auacuucagggccaucugg

SEQ ID NO: 918262 - RNA, 19 nt, Artificial Sequence
  Description of Artificial Sequence: Synthetic oligonucleotide
  Sense strand starting at position 3101 of SEQ ID NO: 913319
ccauuauuccuagaaacgu

SEQ ID NO: 918263 - RNA, 19 nt, Artificial Sequence
  Description of Artificial Sequence: Synthetic oligonucleotide
  Antisense strand to SEQ ID NO: 918262
acguuucuaggaauaaugg

SEQ ID NO: 918264 - RNA, 19 nt, Artificial Sequence
  Description of Artificial Sequence: Synthetic oligonucleotide
  Sense strand starting at position 1118 of SEQ ID NO: 913319
augagaaucgcuuacaccu

SEQ ID NO: 918265 - RNA, 19 nt, Artificial Sequence
  Description of Artificial Sequence: Synthetic oligonucleotide
  Antisense strand to SEQ ID NO: 918264
agguguaagcgauucucau

SEQ ID NO: 918266 - RNA, 19 nt, Artificial Sequence
  Description of Artificial Sequence: Synthetic oligonucleotide
  Sense strand starting at position 547 of SEQ ID NO: 913319
agagguuaacuaugucaca

SEQ ID NO: 918267 - RNA, 19 nt, Artificial Sequence
  Description of Artificial Sequence: Synthetic oligonucleotide
  Antisense strand to SEQ ID NO: 918266
ugugacauaguuaaccucu

SEQ ID NO: 918268 - RNA, 19 nt, Artificial Sequence
  Description of Artificial Sequence: Synthetic oligonucleotide
  Sense strand starting at position 3421 of SEQ ID NO: 913319
cgacacuucgcauaaauag

SEQ ID NO: 918269 - RNA, 19 nt, Artificial Sequence
  Description of Artificial Sequence: Synthetic oligonucleotide
  Antisense strand to SEQ ID NO: 918268
cuauuuaugcgaagugucg

SEQ ID NO: 918270 - RNA, 19 nt, Artificial Sequence
  Description of Artificial Sequence: Synthetic oligonucleotide
  Sense strand starting at position 646 of SEQ ID NO: 913319
gccugacugaaaugguuaa

SEQ ID NO: 918271 - RNA, 19 nt, Artificial Sequence
  Description of Artificial Sequence: Synthetic oligonucleotide
  Antisense strand to SEQ ID NO: 918270
uuaaccauuucagucaggc

SEQ ID NO: 918272 - RNA, 19 nt, Artificial Sequence
  Description of Artificial Sequence: Synthetic oligonucleotide
  Sense strand starting at position 2280 of SEQ ID NO: 913319
cuggaaugccuucgaaaga

SEQ ID NO: 918273 - RNA, 19 nt, Artificial Sequence
  Description of Artificial Sequence: Synthetic oligonucleotide
  Antisense strand to SEQ ID NO: 918272
ucuuucgaaggcauuccag

SEQ ID NO: 918274 - RNA, 19 nt, Artificial Sequence
  Description of Artificial Sequence: Synthetic oligonucleotide
  Sense strand starting at position 1116 of SEQ ID NO: 913319
acaugagaaucgcuuacac

SEQ ID NO: 918275 - RNA, 19 nt, Artificial Sequence
  Description of Artificial Sequence: Synthetic oligonucleotide
  Antisense strand to SEQ ID NO: 918274
guguaagcgauucucaugu

SEQ ID NO: 918276 - RNA, 19 nt, Artificial Sequence
  Description of Artificial Sequence: Synthetic oligonucleotide
  Sense strand starting at position 3878 of SEQ ID NO: 913319
uggaauuaucgucacugua

SEQ ID NO: 918277 - RNA, 19 nt, Artificial Sequence
  Description of Artificial Sequence: Synthetic oligonucleotide
  Antisense strand to SEQ ID NO: 918276
uacagugacgauaauucca

SEQ ID NO: 918278 - RNA, 19 nt, Artificial Sequence
  Description of Artificial Sequence: Synthetic oligonucleotide
  Sense strand starting at position 1419 of SEQ ID NO: 913319
gugauuaucaccuggguga

SEQ ID NO: 918279 - RNA, 19 nt, Artificial Sequence
  Description of Artificial Sequence: Synthetic oligonucleotide
  Antisense strand to SEQ ID NO: 918278
ucacccaggugauaaucac

SEQ ID NO: 918280 - RNA, 19 nt, Artificial Sequence
  Description of Artificial Sequence: Synthetic oligonucleotide
  Sense strand starting at position 1331 of SEQ ID NO: 913319
uagguauguguguagauau

SEQ ID NO: 918281 - RNA, 19 nt, Artificial Sequence
  Description of Artificial Sequence: Synthetic oligonucleotide
  Antisense strand to SEQ ID NO: 918280
auaucuacacacauaccua

SEQ ID NO: 918282 - RNA, 19 nt, Artificial Sequence
  Description of Artificial Sequence: Synthetic oligonucleotide
  Sense strand starting at position 1568 of SEQ ID NO: 913319
ucuucugcucaguaugaca

SEQ ID NO: 918283 - RNA, 19 nt, Artificial Sequence
  Description of Artificial Sequence: Synthetic oligonucleotide
  Antisense strand to SEQ ID NO: 918282
ugucauacugagcagaaga

SEQ ID NO: 918284 - RNA, 19 nt, Artificial Sequence
  Description of Artificial Sequence: Synthetic oligonucleotide
  Sense strand starting at position 3826 of SEQ ID NO: 913319
gaaauacugcacugaguuc

SEQ ID NO: 918285 - RNA, 19 nt, Artificial Sequence
  Description of Artificial Sequence: Synthetic oligonucleotide
  Antisense strand to SEQ ID NO: 918284
gaacucagugcaguauuuc

SEQ ID NO: 918286 - RNA, 19 nt, Artificial Sequence
  Description of Artificial Sequence: Synthetic oligonucleotide
  Sense strand starting at position 638 of SEQ ID NO: 913319
aacgucuugccugacugaa

SEQ ID NO: 918287 - RNA, 19 nt, Artificial Sequence
  Description of Artificial Sequence: Synthetic oligonucleotide
  Antisense strand to SEQ ID NO: 918286
uucagucaggcaagacguu

SEQ ID NO: 918288 - RNA, 19 nt, Artificial Sequence
  Description of Artificial Sequence: Synthetic oligonucleotide
  Sense strand starting at position 2825 of SEQ ID NO: 913319
gggucuuccuagguauaua

SEQ ID NO: 918289 - RNA, 19 nt, Artificial Sequence
  Description of Artificial Sequence: Synthetic oligonucleotide
  Antisense strand to SEQ ID NO: 918288
uauauaccuaggaagaccc

SEQ ID NO: 918290 - RNA, 19 nt, Artificial Sequence
  Description of Artificial Sequence: Synthetic oligonucleotide
  Sense strand starting at position 1417 of SEQ ID NO: 913319
cagugauuaucaccugggu

SEQ ID NO: 918291 - RNA, 19 nt, Artificial Sequence
  Description of Artificial Sequence: Synthetic oligonucleotide
  Antisense strand to SEQ ID NO: 918290
acccaggugauaaucacug

SEQ ID NO: 918292 - RNA, 19 nt, Artificial Sequence
  Description of Artificial Sequence: Synthetic oligonucleotide
  Sense strand starting at position 596 of SEQ ID NO: 913319
cccagauggcccugaagua

SEQ ID NO: 918293 - RNA, 19 nt, Artificial Sequence
  Description of Artificial Sequence: Synthetic oligonucleotide
  Antisense strand to SEQ ID NO: 918292
uacuucagggccaucuggg

SEQ ID NO: 918294 - RNA, 19 nt, Artificial Sequence
  Description of Artificial Sequence: Synthetic oligonucleotide
  Sense strand starting at position 433 of SEQ ID NO: 913319
agcuuauccuuauuggacu

SEQ ID NO: 918295 - RNA, 19 nt, Artificial Sequence
  Description of Artificial Sequence: Synthetic oligonucleotide
  Antisense strand to SEQ ID NO: 918294
aguccaauaaggauaagcu

SEQ ID NO: 918296 - RNA, 19 nt, Artificial Sequence
  Description of Artificial Sequence: Synthetic oligonucleotide
  Sense strand starting at position 3813 of SEQ ID NO: 913319
gguguuucagcaggaaaua

SEQ ID NO: 918297 - RNA, 19 nt, Artificial Sequence
  Description of Artificial Sequence: Synthetic oligonucleotide
  Antisense strand to SEQ ID NO: 918296
uauuuccugcugaaacacc

SEQ ID NO: 918298 - RNA, 19 nt, Artificial Sequence
  Description of Artificial Sequence: Synthetic oligonucleotide
  Sense strand starting at position 3387 of SEQ ID NO: 913319
accgaauuggguggucaca

SEQ ID NO: 918299 - RNA, 19 nt, Artificial Sequence
  Description of Artificial Sequence: Synthetic oligonucleotide
  Antisense strand to SEQ ID NO: 918298
ugugaccacccaauucggu

SEQ ID NO: 918300 - RNA, 19 nt, Artificial Sequence
  Description of Artificial Sequence: Synthetic oligonucleotide
  Sense strand starting at position 3881 of SEQ ID NO: 913319
aauuaucgucacuguaaga

SEQ ID NO: 918301 - RNA, 19 nt, Artificial Sequence
  Description of Artificial Sequence: Synthetic oligonucleotide
  Antisense strand to SEQ ID NO: 918300
ucuuacagugacgauaauu

SEQ ID NO: 918302 - RNA, 19 nt, Artificial Sequence
  Description of Artificial Sequence: Synthetic oligonucleotide
  Sense strand starting at position 3880 of SEQ ID NO: 913319
gaauuaucgucacuguaag

SEQ ID NO: 918303 - RNA, 19 nt, Artificial Sequence
  Description of Artificial Sequence: Synthetic oligonucleotide
  Antisense strand to SEQ ID NO: 918302
cuuacagugacgauaauuc

SEQ ID NO: 918304 - RNA, 19 nt, Artificial Sequence
  Description of Artificial Sequence: Synthetic oligonucleotide
  Sense strand starting at position 1330 of SEQ ID NO: 913319
auagguauguguguagaua

SEQ ID NO: 918305 - RNA, 19 nt, Artificial Sequence
  Description of Artificial Sequence: Synthetic oligonucleotide
  Antisense strand to SEQ ID NO: 918304
uaucuacacacauaccuau

SEQ ID NO: 918306 - RNA, 19 nt, Artificial Sequence
  Description of Artificial Sequence: Synthetic oligonucleotide
  Sense strand starting at position 3494 of SEQ ID NO: 913319
gugacugagcuucaacgua

SEQ ID NO: 918307 - RNA, 19 nt, Artificial Sequence
  Description of Artificial Sequence: Synthetic oligonucleotide
  Antisense strand to SEQ ID NO: 918306
uacguugaagcucagucac

SEQ ID NO: 918308 - RNA, 19 nt, Artificial Sequence
  Description of Artificial Sequence: Synthetic oligonucleotide
  Sense strand starting at position 603 of SEQ ID NO: 913319
ggcccugaaguauguauua

SEQ ID NO: 918309 - RNA, 19 nt, Artificial Sequence
  Description of Artificial Sequence: Synthetic oligonucleotide
  Antisense strand to SEQ ID NO: 918308
uaauacauacuucagggcc

SEQ ID NO: 918310 - RNA, 19 nt, Artificial Sequence
  Description of Artificial Sequence: Synthetic oligonucleotide
  Sense strand starting at position 1409 of SEQ ID NO: 913319
gcauguagcagugauuauc

SEQ ID NO: 918311 - RNA, 19 nt, Artificial Sequence
  Description of Artificial Sequence: Synthetic oligonucleotide
  Antisense strand to SEQ ID NO: 918310
gauaaucacugcuacaugc

SEQ ID NO: 918312 - RNA, 19 nt, Artificial Sequence
  Description of Artificial Sequence: Synthetic oligonucleotide
  Sense strand starting at position 672 of SEQ ID NO: 913319
agccacguucuaugaaauu

SEQ ID NO: 918313 - RNA, 19 nt, Artificial Sequence
  Description of Artificial Sequence: Synthetic oligonucleotide
  Antisense strand to SEQ ID NO: 918312
aauuucauagaacguggcu

SEQ ID NO: 918314 - RNA, 19 nt, Artificial Sequence
  Description of Artificial Sequence: Synthetic oligonucleotide
  Sense strand starting at position 3877 of SEQ ID NO: 913319
cuggaauuaucgucacugu

SEQ ID NO: 918315 - RNA, 19 nt, Artificial Sequence
  Description of Artificial Sequence: Synthetic oligonucleotide
  Antisense strand to SEQ ID NO: 918314
acagugacgauaauuccag

SEQ ID NO: 918316 - RNA, 19 nt, Artificial Sequence
  Description of Artificial Sequence: Synthetic oligonucleotide
  Sense strand starting at position 3418 of SEQ ID NO: 913319
uuccgacacuucgcauaaa

SEQ ID NO: 918317 - RNA, 19 nt, Artificial Sequence
  Description of Artificial Sequence: Synthetic oligonucleotide
  Antisense strand to SEQ ID NO: 918316
uuuaugcgaagugucggaa

SEQ ID NO: 918318 - RNA, 19 nt, Artificial Sequence
  Description of Artificial Sequence: Synthetic oligonucleotide
  Sense strand starting at position 1326 of SEQ ID NO: 913319
caucauagguaugugugua

SEQ ID NO: 918319 - RNA, 19 nt, Artificial Sequence
  Description of Artificial Sequence: Synthetic oligonucleotide
  Antisense strand to SEQ ID NO: 918318
uacacacauaccuaugaug

SEQ ID NO: 918320 - RNA, 19 nt, Artificial Sequence
  Description of Artificial Sequence: Synthetic oligonucleotide
  Sense strand starting at position 3171 of SEQ ID NO: 913319
gagaaaguggccugugguu

SEQ ID NO: 918321 - RNA, 19 nt, Artificial Sequence
  Description of Artificial Sequence: Synthetic oligonucleotide
  Antisense strand to SEQ ID NO: 918320
aaccacaggccacuuucuc

SEQ ID NO: 918322 - RNA, 19 nt, Artificial Sequence
  Description of Artificial Sequence: Synthetic oligonucleotide
  Sense strand starting at position 665 of SEQ ID NO: 913319
agaagugagccacguucua

SEQ ID NO: 918323 - RNA, 19 nt, Artificial Sequence
  Description of Artificial Sequence: Synthetic oligonucleotide
  Antisense strand to SEQ ID NO: 918322
uagaacguggcucacuucu

SEQ ID NO: 918324 - RNA, 19 nt, Artificial Sequence
  Description of Artificial Sequence: Synthetic oligonucleotide
  Sense strand starting at position 1325 of SEQ ID NO: 913319
acaucauagguaugugugu

SEQ ID NO: 918325 - RNA, 19 nt, Artificial Sequence
  Description of Artificial Sequence: Synthetic oligonucleotide
  Antisense strand to SEQ ID NO: 918324
acacacauaccuaugaugu

SEQ ID NO: 918326 - RNA, 19 nt, Artificial Sequence
  Description of Artificial Sequence: Synthetic oligonucleotide
  Sense strand starting at position 3810 of SEQ ID NO: 913319
ugugguguuucagcaggaa

SEQ ID NO: 918327 - RNA, 19 nt, Artificial Sequence
  Description of Artificial Sequence: Synthetic oligonucleotide
  Antisense strand to SEQ ID NO: 918326
uuccugcugaaacaccaca

SEQ ID NO: 918328 - RNA, 19 nt, Artificial Sequence
  Description of Artificial Sequence: Synthetic oligonucleotide
  Sense strand starting at position 640 of SEQ ID NO: 913319
cgucuugccugacugaaau

SEQ ID NO: 918329 - RNA, 19 nt, Artificial Sequence
  Description of Artificial Sequence: Synthetic oligonucleotide
  Antisense strand to SEQ ID NO: 918328
auuucagucaggcaagacg

SEQ ID NO: 918330 - RNA, 19 nt, Artificial Sequence
  Description of Artificial Sequence: Synthetic oligonucleotide
  Sense strand starting at position 637 of SEQ ID NO: 913319
uaacgucuugccugacuga

SEQ ID NO: 918331 - RNA, 19 nt, Artificial Sequence
  Description of Artificial Sequence: Synthetic oligonucleotide
  Antisense strand to SEQ ID NO: 918330
ucagucaggcaagacguua

SEQ ID NO: 918332 - RNA, 19 nt, Artificial Sequence
  Description of Artificial Sequence: Synthetic oligonucleotide
  Sense strand starting at position 3603 of SEQ ID NO: 913320
acagaaauuucuuaaugga

SEQ ID NO: 918333 - RNA, 19 nt, Artificial Sequence
  Description of Artificial Sequence: Synthetic oligonucleotide
  Antisense strand to SEQ ID NO: 918332
uccauuaagaaauuucugu

SEQ ID NO: 918334 - RNA, 19 nt, Artificial Sequence
  Description of Artificial Sequence: Synthetic oligonucleotide
  Sense strand starting at position 180 of SEQ ID NO: 913320
uacaauauagccugggaga

SEQ ID NO: 918335 - RNA, 19 nt, Artificial Sequence
  Description of Artificial Sequence: Synthetic oligonucleotide
  Antisense strand to SEQ ID NO: 918334
ucucccaggcuauauugua

SEQ ID NO: 918336 - RNA, 19 nt, Artificial Sequence
  Description of Artificial Sequence: Synthetic oligonucleotide
  Sense strand starting at position 2249 of SEQ ID NO: 913320
cgcuguucccugcuggauu

SEQ ID NO: 918337 - RNA, 19 nt, Artificial Sequence
  Description of Artificial Sequence: Synthetic oligonucleotide
  Antisense strand to SEQ ID NO: 918336
aauccagcagggaacagcg

SEQ ID NO: 918338 - RNA, 19 nt, Artificial Sequence
  Description of Artificial Sequence: Synthetic oligonucleotide
  Sense strand starting at position 3442 of SEQ ID NO: 913320
ugcuuuauaggaugagaua

SEQ ID NO: 918339 - RNA, 19 nt, Artificial Sequence
  Description of Artificial Sequence: Synthetic oligonucleotide
  Antisense strand to SEQ ID NO: 918338
uaucucauccuauaaagca

SEQ ID NO: 918340 - RNA, 19 nt, Artificial Sequence
  Description of Artificial Sequence: Synthetic oligonucleotide
  Sense strand starting at position 211 of SEQ ID NO: 913320
ucaggcuaggcugaaauau

SEQ ID NO: 918341 - RNA, 19 nt, Artificial Sequence
  Description of Artificial Sequence: Synthetic oligonucleotide
  Antisense strand to SEQ ID NO: 918340
auauuucagccuagccuga

SEQ ID NO: 918342 - RNA, 19 nt, Artificial Sequence
  Description of Artificial Sequence: Synthetic oligonucleotide
  Sense strand starting at position 231 of SEQ ID NO: 913320
cuguuuggucuggauuaaa

SEQ ID NO: 918343 - RNA, 19 nt, Artificial Sequence
  Description of Artificial Sequence: Synthetic oligonucleotide
  Antisense strand to SEQ ID NO: 918342
uuuaauccagaccaaacag

SEQ ID NO: 918344 - RNA, 19 nt, Artificial Sequence
  Description of Artificial Sequence: Synthetic oligonucleotide
  Sense strand starting at position 3182 of SEQ ID NO: 913320
aagguugagucauucuaaa

SEQ ID NO: 918345 - RNA, 19 nt, Artificial Sequence
  Description of Artificial Sequence: Synthetic oligonucleotide
  Antisense strand to SEQ ID NO: 918344
uuuagaaugacucaaccuu

SEQ ID NO: 918346 - RNA, 19 nt, Artificial Sequence
  Description of Artificial Sequence: Synthetic oligonucleotide
  Sense strand starting at position 3773 of SEQ ID NO: 913320
gucagcugagauuacuauu

SEQ ID NO: 918347 - RNA, 19 nt, Artificial Sequence
  Description of Artificial Sequence: Synthetic oligonucleotide
  Antisense strand to SEQ ID NO: 918346
aauaguaaucucagcugac

SEQ ID NO: 918348 - RNA, 19 nt, Artificial Sequence
  Description of Artificial Sequence: Synthetic oligonucleotide
  Sense strand starting at position 1228 of SEQ ID NO: 913320
cccugagggucuuugagau

SEQ ID NO: 918349 - RNA, 19 nt, Artificial Sequence
  Description of Artificial Sequence: Synthetic oligonucleotide
  Antisense strand to SEQ ID NO: 918348
aucucaaagacccucaggg

SEQ ID NO: 918350 - RNA, 19 nt, Artificial Sequence
  Description of Artificial Sequence: Synthetic oligonucleotide
  Sense strand starting at position 3169 of SEQ ID NO: 913320
gcucaaguucaggaagguu

SEQ ID NO: 918351 - RNA, 19 nt, Artificial Sequence
  Description of Artificial Sequence: Synthetic oligonucleotide
  Antisense strand to SEQ ID NO: 918350
aaccuuccugaacuugagc

SEQ ID NO: 918352 - RNA, 19 nt, Artificial Sequence
  Description of Artificial Sequence: Synthetic oligonucleotide
  Sense strand starting at position 2956 of SEQ ID NO: 913320
acuugucauuugcuuaguu

SEQ ID NO: 918353 - RNA, 19 nt, Artificial Sequence
  Description of Artificial Sequence: Synthetic oligonucleotide
  Antisense strand to SEQ ID NO: 918352
aacuaagcaaaugacaagu

SEQ ID NO: 918354 - RNA, 19 nt, Artificial Sequence
  Description of Artificial Sequence: Synthetic oligonucleotide
  Sense strand starting at position 1645 of SEQ ID NO: 913320
uucuaagucgcuuaaagaa

SEQ ID NO: 918355 - RNA, 19 nt, Artificial Sequence
  Description of Artificial Sequence: Synthetic oligonucleotide
  Antisense strand to SEQ ID NO: 918354
uucuuuaagcgacuuagaa

SEQ ID NO: 918356 - RNA, 19 nt, Artificial Sequence
  Description of Artificial Sequence: Synthetic oligonucleotide
  Sense strand starting at position 298 of SEQ ID NO: 913320
guaugccugcucugaauuu

SEQ ID NO: 918357 - RNA, 19 nt, Artificial Sequence
  Description of Artificial Sequence: Synthetic oligonucleotide
  Antisense strand to SEQ ID NO: 918356
aaauucagagcaggcauac

SEQ ID NO: 918358 - RNA, 19 nt, Artificial Sequence
  Description of Artificial Sequence: Synthetic oligonucleotide
  Sense strand starting at position 3209 of SEQ ID NO: 913320
agaguuguauuccuaucaa

SEQ ID NO: 918359 - RNA, 19 nt, Artificial Sequence
  Description of Artificial Sequence: Synthetic oligonucleotide
  Antisense strand to SEQ ID NO: 918358
uugauaggaauacaacucu

SEQ ID NO: 918360 - RNA, 19 nt, Artificial Sequence
  Description of Artificial Sequence: Synthetic oligonucleotide
  Sense strand starting at position 3820 of SEQ ID NO: 913320
gagccuuagguugagcaua

SEQ ID NO: 918361 - RNA, 19 nt, Artificial Sequence
  Description of Artificial Sequence: Synthetic oligonucleotide
  Antisense strand to SEQ ID NO: 918360
uaugcucaaccuaaggcuc

SEQ ID NO: 918362 - RNA, 19 nt, Artificial Sequence
  Description of Artificial Sequence: Synthetic oligonucleotide
  Sense strand starting at position 958 of SEQ ID NO: 913320
agacucugccucugauaua

SEQ ID NO: 918363 - RNA, 19 nt, Artificial Sequence
  Description of Artificial Sequence: Synthetic oligonucleotide
  Antisense strand to SEQ ID NO: 918362
uauaucagaggcagagucu

SEQ ID NO: 918364 - RNA, 19 nt, Artificial Sequence
  Description of Artificial Sequence: Synthetic oligonucleotide
  Sense strand starting at position 2957 of SEQ ID NO: 913320
cuugucauuugcuuaguuu

SEQ ID NO: 918365 - RNA, 19 nt, Artificial Sequence
  Description of Artificial Sequence: Synthetic oligonucleotide
  Antisense strand to SEQ ID NO: 918364
aaacuaagcaaaugacaag

SEQ ID NO: 918366 - RNA, 19 nt, Artificial Sequence
  Description of Artificial Sequence: Synthetic oligonucleotide
  Sense strand starting at position 3921 of SEQ ID NO: 913320
gcagcuuaccuuggaagaa

SEQ ID NO: 918367 - RNA, 19 nt, Artificial Sequence
  Description of Artificial Sequence: Synthetic oligonucleotide
  Antisense strand to SEQ ID NO: 918366
uucuuccaagguaagcugc

SEQ ID NO: 918368 - RNA, 19 nt, Artificial Sequence
  Description of Artificial Sequence: Synthetic oligonucleotide
  Sense strand starting at position 121 of SEQ ID NO: 913320
augguuagguaugcaauga

SEQ ID NO: 918369 - RNA, 19 nt, Artificial Sequence
  Description of Artificial Sequence: Synthetic oligonucleotide
  Antisense strand to SEQ ID NO: 918368
ucauugcauaccuaaccau

SEQ ID NO: 918370 - RNA, 19 nt, Artificial Sequence
  Description of Artificial Sequence: Synthetic oligonucleotide
  Sense strand starting at position 1189 of SEQ ID NO: 913320
gagggucuccagugguaga

SEQ ID NO: 918371 - RNA, 19 nt, Artificial Sequence
  Description of Artificial Sequence: Synthetic oligonucleotide
  Antisense strand to SEQ ID NO: 918370
ucuaccacuggagacccuc

SEQ ID NO: 918372 - RNA, 19 nt, Artificial Sequence
  Description of Artificial Sequence: Synthetic oligonucleotide
  Sense strand starting at position 955 of SEQ ID NO: 913320
uuaagacucugccucugau

SEQ ID NO: 918373 - RNA, 19 nt, Artificial Sequence
  Description of Artificial Sequence: Synthetic oligonucleotide
  Antisense strand to SEQ ID NO: 918372
aucagaggcagagucuuaa

SEQ ID NO: 918374 - RNA, 19 nt, Artificial Sequence
  Description of Artificial Sequence: Synthetic oligonucleotide
  Sense strand starting at position 120 of SEQ ID NO: 913320
gaugguuagguaugcaaug

SEQ ID NO: 918375 - RNA, 19 nt, Artificial Sequence
  Description of Artificial Sequence: Synthetic oligonucleotide
  Antisense strand to SEQ ID NO: 918374
cauugcauaccuaaccauc

SEQ ID NO: 918376 - RNA, 19 nt, Artificial Sequence
  Description of Artificial Sequence: Synthetic oligonucleotide
  Sense strand starting at position 221 of SEQ ID NO: 913320
cugaaauauucuguuuggu

SEQ ID NO: 918377 - RNA, 19 nt, Artificial Sequence
  Description of Artificial Sequence: Synthetic oligonucleotide
  Antisense strand to SEQ ID NO: 918376
accaaacagaauauuucag

SEQ ID NO: 918378 - RNA, 19 nt, Artificial Sequence
  Description of Artificial Sequence: Synthetic oligonucleotide
  Sense strand starting at position 223 of SEQ ID NO: 913320
gaaauauucuguuuggucu

SEQ ID NO: 918379 - RNA, 19 nt, Artificial Sequence
  Description of Artificial Sequence: Synthetic oligonucleotide
  Antisense strand to SEQ ID NO: 918378
agaccaaacagaauauuuc

SEQ ID NO: 918380 - RNA, 19 nt, Artificial Sequence
  Description of Artificial Sequence: Synthetic oligonucleotide
  Sense strand starting at position 3920 of SEQ ID NO: 913320
ugcagcuuaccuuggaaga

SEQ ID NO: 918381 - RNA, 19 nt, Artificial Sequence
  Description of Artificial Sequence: Synthetic oligonucleotide
  Antisense strand to SEQ ID NO: 918380
ucuuccaagguaagcugca

SEQ ID NO: 918382 - RNA, 19 nt, Artificial Sequence
  Description of Artificial Sequence: Synthetic oligonucleotide
  Sense strand starting at position 2361 of SEQ ID NO: 913320
ugccuuggucucugaagaa

SEQ ID NO: 918383 - RNA, 19 nt, Artificial Sequence
  Description of Artificial Sequence: Synthetic oligonucleotide
  Antisense strand to SEQ ID NO: 918382
uucuucagagaccaaggca

SEQ ID NO: 918384 - RNA, 19 nt, Artificial Sequence
  Description of Artificial Sequence: Synthetic oligonucleotide
  Sense strand starting at position 3361 of SEQ ID NO: 913320
cuuggagcuauguagcuua

SEQ ID NO: 918385 - RNA, 19 nt, Artificial Sequence
  Description of Artificial Sequence: Synthetic oligonucleotide
  Antisense strand to SEQ ID NO: 918384
uaagcuacauagcuccaag

SEQ ID NO: 918386 - RNA, 19 nt, Artificial Sequence
  Description of Artificial Sequence: Synthetic oligonucleotide
  Sense strand starting at position 501 of SEQ ID NO: 913320
uucuguguuuaaccuugaa

SEQ ID NO: 918387 - RNA, 19 nt, Artificial Sequence
  Description of Artificial Sequence: Synthetic oligonucleotide
  Antisense strand to SEQ ID NO: 918386
uucaagguuaaacacagaa

SEQ ID NO: 918388 - RNA, 19 nt, Artificial Sequence
  Description of Artificial Sequence: Synthetic oligonucleotide
  Sense strand starting at position 2649 of SEQ ID NO: 913320
acagauaccucagaaugaa

SEQ ID NO: 918389 - RNA, 19 nt, Artificial Sequence
  Description of Artificial Sequence: Synthetic oligonucleotide
  Antisense strand to SEQ ID NO: 918388
uucauucugagguaucugu

SEQ ID NO: 918390 - RNA, 19 nt, Artificial Sequence
  Description of Artificial Sequence: Synthetic oligonucleotide
  Sense strand starting at position 1643 of SEQ ID NO: 913320
gauucuaagucgcuuaaag

SEQ ID NO: 918391 - RNA, 19 nt, Artificial Sequence
  Description of Artificial Sequence: Synthetic oligonucleotide
  Antisense strand to SEQ ID NO: 918390
cuuuaagcgacuuagaauc

SEQ ID NO: 918392 - RNA, 19 nt, Artificial Sequence
  Description of Artificial Sequence: Synthetic oligonucleotide
  Sense strand starting at position 493 of SEQ ID NO: 913320
aagacauguucuguguuua

SEQ ID NO: 918393 - RNA, 19 nt, Artificial Sequence
  Description of Artificial Sequence: Synthetic oligonucleotide
  Antisense strand to SEQ ID NO: 918392
uaaacacagaacaugucuu

SEQ ID NO: 918394 - RNA, 19 nt, Artificial Sequence
  Description of Artificial Sequence: Synthetic oligonucleotide
  Sense strand starting at position 1311 of SEQ ID NO: 913320
agacuuaaccuguggccuu

SEQ ID NO: 918395 - RNA, 19 nt, Artificial Sequence
  Description of Artificial Sequence: Synthetic oligonucleotide
  Antisense strand to SEQ ID NO: 918394
aaggccacagguuaagucu

SEQ ID NO: 918396 - RNA, 19 nt, Artificial Sequence
  Description of Artificial Sequence: Synthetic oligonucleotide
  Sense strand starting at position 2360 of SEQ ID NO: 913320
cugccuuggucucugaaga

SEQ ID NO: 918397 - RNA, 19 nt, Artificial Sequence
  Description of Artificial Sequence: Synthetic oligonucleotide
  Antisense strand to SEQ ID NO: 918396
ucuucagagaccaaggcag

SEQ ID NO: 918398 - RNA, 19 nt, Artificial Sequence
  Description of Artificial Sequence: Synthetic oligonucleotide
  Sense strand starting at position 494 of SEQ ID NO: 913320
agacauguucuguguuuaa

SEQ ID NO: 918399 - RNA, 19 nt, Artificial Sequence
  Description of Artificial Sequence: Synthetic oligonucleotide
  Antisense strand to SEQ ID NO: 918398
uuaaacacagaacaugucu

SEQ ID NO: 918400 - RNA, 19 nt, Artificial Sequence
  Description of Artificial Sequence: Synthetic oligonucleotide
  Sense strand starting at position 3897 of SEQ ID NO: 913320
caauauagugcagguagua

SEQ ID NO: 918401 - RNA, 19 nt, Artificial Sequence
  Description of Artificial Sequence: Synthetic oligonucleotide
  Antisense strand to SEQ ID NO: 918400
uacuaccugcacuauauug

SEQ ID NO: 918402 - RNA, 19 nt, Artificial Sequence
  Description of Artificial Sequence: Synthetic oligonucleotide
  Sense strand starting at position 227 of SEQ ID NO: 913320
uauucuguuuggucuggau

SEQ ID NO: 918403 - RNA, 19 nt, Artificial Sequence
  Description of Artificial Sequence: Synthetic oligonucleotide
  Antisense strand to SEQ ID NO: 918402
auccagaccaaacagaaua

SEQ ID NO: 918404 - RNA, 19 nt, Artificial Sequence
  Description of Artificial Sequence: Synthetic oligonucleotide
  Sense strand starting at position 229 of SEQ ID NO: 913320
uucuguuuggucuggauua

SEQ ID NO: 918405 - RNA, 19 nt, Artificial Sequence
  Description of Artificial Sequence: Synthetic oligonucleotide
  Antisense strand to SEQ ID NO: 918404
uaauccagaccaaacagaa

SEQ ID NO: 918406 - RNA, 19 nt, Artificial Sequence
  Description of Artificial Sequence: Synthetic oligonucleotide
  Sense strand starting at position 2119 of SEQ ID NO: 913320
gccagcuugccucaacaca

SEQ ID NO: 918407 - RNA, 19 nt, Artificial Sequence
  Description of Artificial Sequence: Synthetic oligonucleotide
  Antisense strand to SEQ ID NO: 918406
uguguugaggcaagcuggc

SEQ ID NO: 918408 - RNA, 19 nt, Artificial Sequence
  Description of Artificial Sequence: Synthetic oligonucleotide
  Sense strand starting at position 1146 of SEQ ID NO: 913320
gagggucuccggugguaga

SEQ ID NO: 918409 - RNA, 19 nt, Artificial Sequence
  Description of Artificial Sequence: Synthetic oligonucleotide
  Antisense strand to SEQ ID NO: 918408
ucuaccaccggagacccuc

SEQ ID NO: 918410 - RNA, 19 nt, Artificial Sequence
  Description of Artificial Sequence: Synthetic oligonucleotide
  Sense strand starting at position 378 of SEQ ID NO: 913320
uugccuguccuauaagcau

SEQ ID NO: 918411 - RNA, 19 nt, Artificial Sequence
  Description of Artificial Sequence: Synthetic oligonucleotide
  Antisense strand to SEQ ID NO: 918410
augcuuauaggacaggcaa

SEQ ID NO: 918412 - RNA, 19 nt, Artificial Sequence
  Description of Artificial Sequence: Synthetic oligonucleotide
  Sense strand starting at position 2250 of SEQ ID NO: 913321
agaaaccuucgauaaagcu

SEQ ID NO: 918413 - RNA, 19 nt, Artificial Sequence
  Description of Artificial Sequence: Synthetic oligonucleotide
  Antisense strand to SEQ ID NO: 918412
agcuuuaucgaagguuucu

SEQ ID NO: 918414 - RNA, 19 nt, Artificial Sequence
  Description of Artificial Sequence: Synthetic oligonucleotide
  Sense strand starting at position 2517 of SEQ ID NO: 913321
uuagaacgucuccaagaca

SEQ ID NO: 918415 - RNA, 19 nt, Artificial Sequence
  Description of Artificial Sequence: Synthetic oligonucleotide
  Antisense strand to SEQ ID NO: 918414
ugucuuggagacguucuaa

SEQ ID NO: 918416 - RNA, 19 nt, Artificial Sequence
  Description of Artificial Sequence: Synthetic oligonucleotide
  Sense strand starting at position 1563 of SEQ ID NO: 913321
acagaaauuucuuaaugga

SEQ ID NO: 918417 - RNA, 19 nt, Artificial Sequence
  Description of Artificial Sequence: Synthetic oligonucleotide
  Antisense strand to SEQ ID NO: 918416
uccauuaagaaauuucugu

SEQ ID NO: 918418 - RNA, 19 nt, Artificial Sequence
  Description of Artificial Sequence: Synthetic oligonucleotide
  Sense strand starting at position 2325 of SEQ ID NO: 913321
aauccuugagacugugaua

SEQ ID NO: 918419 - RNA, 19 nt, Artificial Sequence
  Description of Artificial Sequence: Synthetic oligonucleotide
  Antisense strand to SEQ ID NO: 918418
uaucacagucucaaggauu

SEQ ID NO: 918420 - RNA, 19 nt, Artificial Sequence
  Description of Artificial Sequence: Synthetic oligonucleotide
  Sense strand starting at position 209 of SEQ ID NO: 913321
cgcuguucccugcuggauu

SEQ ID NO: 918421 - RNA, 19 nt, Artificial Sequence
  Description of Artificial Sequence: Synthetic oligonucleotide
  Antisense strand to SEQ ID NO: 918420
aauccagcagggaacagcg

SEQ ID NO: 918422 - RNA, 19 nt, Artificial Sequence
  Description of Artificial Sequence: Synthetic oligonucleotide
  Sense strand starting at position 1402 of SEQ ID NO: 913321
ugcuuuauaggaugagaua

SEQ ID NO: 918423 - RNA, 19 nt, Artificial Sequence
  Description of Artificial Sequence: Synthetic oligonucleotide
  Antisense strand to SEQ ID NO: 918422
uaucucauccuauaaagca

SEQ ID NO: 918424 - RNA, 19 nt, Artificial Sequence
  Description of Artificial Sequence: Synthetic oligonucleotide
  Sense strand starting at position 2454 of SEQ ID NO: 913321
uaagcagaggugugcauuu

SEQ ID NO: 918425 - RNA, 19 nt, Artificial Sequence
  Description of Artificial Sequence: Synthetic oligonucleotide
  Antisense strand to SEQ ID NO: 918424
aaaugcacaccucugcuua

SEQ ID NO: 918426 - RNA, 19 nt, Artificial Sequence
  Description of Artificial Sequence: Synthetic oligonucleotide
  Sense strand starting at position 1142 of SEQ ID NO: 913321
aagguugagucauucuaaa

SEQ ID NO: 918427 - RNA, 19 nt, Artificial Sequence
  Description of Artificial Sequence: Synthetic oligonucleotide
  Antisense strand to SEQ ID NO: 918426
uuuagaaugacucaaccuu

SEQ ID NO: 918428 - RNA, 19 nt, Artificial Sequence
  Description of Artificial Sequence: Synthetic oligonucleotide
  Sense strand starting at position 2557 of SEQ ID NO: 913321
uagagucuaggcugagaga

SEQ ID NO: 918429 - RNA, 19 nt, Artificial Sequence
  Description of Artificial Sequence: Synthetic oligonucleotide
  Antisense strand to SEQ ID NO: 918428
ucucucagccuagacucua

SEQ ID NO: 918430 - RNA, 19 nt, Artificial Sequence
  Description of Artificial Sequence: Synthetic oligonucleotide
  Sense strand starting at position 1733 of SEQ ID NO: 913321
gucagcugagauuacuauu

SEQ ID NO: 918431 - RNA, 19 nt, Artificial Sequence
  Description of Artificial Sequence: Synthetic oligonucleotide
  Antisense strand to SEQ ID NO: 918430
aauaguaaucucagcugac

SEQ ID NO: 918432 - RNA, 19 nt, Artificial Sequence
  Description of Artificial Sequence: Synthetic oligonucleotide
  Sense strand starting at position 3311 of SEQ ID NO: 913321
uggagaugaugugcaaacu

SEQ ID NO: 918433 - RNA, 19 nt, Artificial Sequence
  Description of Artificial Sequence: Synthetic oligonucleotide
  Antisense strand to SEQ ID NO: 918432
aguuugcacaucaucucca

SEQ ID NO: 918434 - RNA, 19 nt, Artificial Sequence
  Description of Artificial Sequence: Synthetic oligonucleotide
  Sense strand starting at position 2319 of SEQ ID NO: 913321
gggcacaauccuugagacu

SEQ ID NO: 918435 - RNA, 19 nt, Artificial Sequence
  Description of Artificial Sequence: Synthetic oligonucleotide
  Antisense strand to SEQ ID NO: 918434
agucucaaggauugugccc

SEQ ID NO: 918436 - RNA, 19 nt, Artificial Sequence
  Description of Artificial Sequence: Synthetic oligonucleotide
  Sense strand starting at position 2258 of SEQ ID NO: 913321
ucgauaaagcucuaccuca

SEQ ID NO: 918437 - RNA, 19 nt, Artificial Sequence
  Description of Artificial Sequence: Synthetic oligonucleotide
  Antisense strand to SEQ ID NO: 918436
ugagguagagcuuuaucga

SEQ ID NO: 918438 - RNA, 19 nt, Artificial Sequence
  Description of Artificial Sequence: Synthetic oligonucleotide
  Sense strand starting at position 1129 of SEQ ID NO: 913321
gcucaaguucaggaagguu

SEQ ID NO: 918439 - RNA, 19 nt, Artificial Sequence
  Description of Artificial Sequence: Synthetic oligonucleotide
  Antisense strand to SEQ ID NO: 918438
aaccuuccugaacuugagc

SEQ ID NO: 918440 - RNA, 19 nt, Artificial Sequence
  Description of Artificial Sequence: Synthetic oligonucleotide
  Sense strand starting at position 916 of SEQ ID NO: 913321
acuugucauuugcuuaguu

SEQ ID NO: 918441 - RNA, 19 nt, Artificial Sequence
  Description of Artificial Sequence: Synthetic oligonucleotide
  Antisense strand to SEQ ID NO: 918440
aacuaagcaaaugacaagu

SEQ ID NO: 918442 - RNA, 19 nt, Artificial Sequence
  Description of Artificial Sequence: Synthetic oligonucleotide
  Sense strand starting at position 3214 of SEQ ID NO: 913321
uuugaaguucucuagucac

SEQ ID NO: 918443 - RNA, 19 nt, Artificial Sequence
  Description of Artificial Sequence: Synthetic oligonucleotide
  Antisense strand to SEQ ID NO: 918442
gugacuagagaacuucaaa

SEQ ID NO: 918444 - RNA, 19 nt, Artificial Sequence
  Description of Artificial Sequence: Synthetic oligonucleotide
  Sense strand starting at position 2545 of SEQ ID NO: 913321
gccaaaucagucuagaguc

SEQ ID NO: 918445 - RNA, 19 nt, Artificial Sequence
  Description of Artificial Sequence: Synthetic oligonucleotide
  Antisense strand to SEQ ID NO: 918444
gacucuagacugauuuggc

SEQ ID NO: 918446 - RNA, 19 nt, Artificial Sequence
  Description of Artificial Sequence: Synthetic oligonucleotide
  Sense strand starting at position 3323 of SEQ ID NO: 913321
gcaaacuuacuguauaggu

SEQ ID NO: 918447 - RNA, 19 nt, Artificial Sequence
  Description of Artificial Sequence: Synthetic oligonucleotide
  Antisense strand to SEQ ID NO: 918446
accuauacaguaaguuugc

SEQ ID NO: 918448 - RNA, 19 nt, Artificial Sequence
  Description of Artificial Sequence: Synthetic oligonucleotide
  Sense strand starting at position 2555 of SEQ ID NO: 913321
ucuagagucuaggcugaga

SEQ ID NO: 918449 - RNA, 19 nt, Artificial Sequence
  Description of Artificial Sequence: Synthetic oligonucleotide
  Antisense strand to SEQ ID NO: 918448
ucucagccuagacucuaga

SEQ ID NO: 918450 - RNA, 19 nt, Artificial Sequence
  Description of Artificial Sequence: Synthetic oligonucleotide
  Sense strand starting at position 1169 of SEQ ID NO: 913321
agaguuguauuccuaucaa

SEQ ID NO: 918451 - RNA, 19 nt, Artificial Sequence
  Description of Artificial Sequence: Synthetic oligonucleotide
  Antisense strand to SEQ ID NO: 918450
uugauaggaauacaacucu

SEQ ID NO: 918452 - RNA, 19 nt, Artificial Sequence
  Description of Artificial Sequence: Synthetic oligonucleotide
  Sense strand starting at position 1780 of SEQ ID NO: 913321
gagccuuagguugagcaua

SEQ ID NO: 918453 - RNA, 19 nt, Artificial Sequence
  Description of Artificial Sequence: Synthetic oligonucleotide
  Antisense strand to SEQ ID NO: 918452
uaugcucaaccuaaggcuc

SEQ ID NO: 918454 - RNA, 19 nt, Artificial Sequence
  Description of Artificial Sequence: Synthetic oligonucleotide
  Sense strand starting at position 2417 of SEQ ID NO: 913321
cuuuaauuggcucaagcua

SEQ ID NO: 918455 - RNA, 19 nt, Artificial Sequence
  Description of Artificial Sequence: Synthetic oligonucleotide
  Antisense strand to SEQ ID NO: 918454
uagcuugagccaauuaaag

SEQ ID NO: 918456 - RNA, 19 nt, Artificial Sequence
  Description of Artificial Sequence: Synthetic oligonucleotide
  Sense strand starting at position 2424 of SEQ ID NO: 913321
uggcucaagcuauaacuuu

SEQ ID NO: 918457 - RNA, 19 nt, Artificial Sequence
  Description of Artificial Sequence: Synthetic oligonucleotide
  Antisense strand to SEQ ID NO: 918456
aaaguuauagcuugagcca

SEQ ID NO: 918458 - RNA, 19 nt, Artificial Sequence
  Description of Artificial Sequence: Synthetic oligonucleotide
  Sense strand starting at position 917 of SEQ ID NO: 913321
cuugucauuugcuuaguuu

SEQ ID NO: 918459 - RNA, 19 nt, Artificial Sequence
  Description of Artificial Sequence: Synthetic oligonucleotide
  Antisense strand to SEQ ID NO: 918458
aaacuaagcaaaugacaag

SEQ ID NO: 918460 - RNA, 19 nt, Artificial Sequence
  Description of Artificial Sequence: Synthetic oligonucleotide
  Sense strand starting at position 1881 of SEQ ID NO: 913321
gcagcuuaccuuggaagaa

SEQ ID NO: 918461 - RNA, 19 nt, Artificial Sequence
  Description of Artificial Sequence: Synthetic oligonucleotide
  Antisense strand to SEQ ID NO: 918460
uucuuccaagguaagcugc

SEQ ID NO: 918462 - RNA, 19 nt, Artificial Sequence
  Description of Artificial Sequence: Synthetic oligonucleotide
  Sense strand starting at position 2638 of SEQ ID NO: 913321
uuagcaaggcgcuagaaua

SEQ ID NO: 918463 - RNA, 19 nt, Artificial Sequence
  Description of Artificial Sequence: Synthetic oligonucleotide
  Antisense strand to SEQ ID NO: 918462
uauucuagcgccuugcuaa

SEQ ID NO: 918464 - RNA, 19 nt, Artificial Sequence
  Description of Artificial Sequence: Synthetic oligonucleotide
  Sense strand starting at position 1880 of SEQ ID NO: 913321
ugcagcuuaccuuggaaga

SEQ ID NO: 918465 - RNA, 19 nt, Artificial Sequence
  Description of Artificial Sequence: Synthetic oligonucleotide
  Antisense strand to SEQ ID NO: 918464
ucuuccaagguaagcugca

SEQ ID NO: 918466 - RNA, 19 nt, Artificial Sequence
  Description of Artificial Sequence: Synthetic oligonucleotide
  Sense strand starting at position 2026 of SEQ ID NO: 913321
guguacuguccugagagug

SEQ ID NO: 918467 - RNA, 19 nt, Artificial Sequence
  Description of Artificial Sequence: Synthetic oligonucleotide
  Antisense strand to SEQ ID NO: 918466
cacucucaggacaguacac

SEQ ID NO: 918468 - RNA, 19 nt, Artificial Sequence
  Description of Artificial Sequence: Synthetic oligonucleotide
  Sense strand starting at position 321 of SEQ ID NO: 913321
ugccuuggucucugaagaa

SEQ ID NO: 918469 - RNA, 19 nt, Artificial Sequence
  Description of Artificial Sequence: Synthetic oligonucleotide
  Antisense strand to SEQ ID NO: 918468
uucuucagagaccaaggca

SEQ ID NO: 918470 - RNA, 19 nt, Artificial Sequence
  Description of Artificial Sequence: Synthetic oligonucleotide
  Sense strand starting at position 1321 of SEQ ID NO: 913321
cuuggagcuauguagcuua

SEQ ID NO: 918471 - RNA, 19 nt, Artificial Sequence
  Description of Artificial Sequence: Synthetic oligonucleotide
  Antisense strand to SEQ ID NO: 918470
uaagcuacauagcuccaag

SEQ ID NO: 918472 - RNA, 19 nt, Artificial Sequence
  Description of Artificial Sequence: Synthetic oligonucleotide
  Sense strand starting at position 3463 of SEQ ID NO: 913321
cauugaucuguguauguuu

SEQ ID NO: 918473 - RNA, 19 nt, Artificial Sequence
  Description of Artificial Sequence: Synthetic oligonucleotide
  Antisense strand to SEQ ID NO: 918472
aaacauacacagaucaaug

SEQ ID NO: 918474 - RNA, 19 nt, Artificial Sequence
  Description of Artificial Sequence: Synthetic oligonucleotide
  Sense strand starting at position 3213 of SEQ ID NO: 913321
cuuugaaguucucuaguca

SEQ ID NO: 918475 - RNA, 19 nt, Artificial Sequence
  Description of Artificial Sequence: Synthetic oligonucleotide
  Antisense strand to SEQ ID NO: 918474
ugacuagagaacuucaaag

SEQ ID NO: 918476 - RNA, 19 nt, Artificial Sequence
  Description of Artificial Sequence: Synthetic oligonucleotide
  Sense strand starting at position 609 of SEQ ID NO: 913321
acagauaccucagaaugaa

SEQ ID NO: 918477 - RNA, 19 nt, Artificial Sequence
  Description of Artificial Sequence: Synthetic oligonucleotide
  Antisense strand to SEQ ID NO: 918476
uucauucugagguaucugu

SEQ ID NO: 918478 - RNA, 19 nt, Artificial Sequence
  Description of Artificial Sequence: Synthetic oligonucleotide
  Sense strand starting at position 320 of SEQ ID NO: 913321
cugccuuggucucugaaga

SEQ ID NO: 918479 - RNA, 19 nt, Artificial Sequence
  Description of Artificial Sequence: Synthetic oligonucleotide
  Antisense strand to SEQ ID NO: 918478
ucuucagagaccaaggcag

SEQ ID NO: 918480 - RNA, 19 nt, Artificial Sequence
  Description of Artificial Sequence: Synthetic oligonucleotide
  Sense strand starting at position 2120 of SEQ ID NO: 913321
uguaguaaccucugacagu

SEQ ID NO: 918481 - RNA, 19 nt, Artificial Sequence
  Description of Artificial Sequence: Synthetic oligonucleotide
  Antisense strand to SEQ ID NO: 918480
acugucagagguuacuaca

SEQ ID NO: 918482 - RNA, 19 nt, Artificial Sequence
  Description of Artificial Sequence: Synthetic oligonucleotide
  Sense strand starting at position 1857 of SEQ ID NO: 913321
caauauagugcagguagua

SEQ ID NO: 918483 - RNA, 19 nt, Artificial Sequence
  Description of Artificial Sequence: Synthetic oligonucleotide
  Antisense strand to SEQ ID NO: 918482
uacuaccugcacuauauug

SEQ ID NO: 918484 - RNA, 19 nt, Artificial Sequence
  Description of Artificial Sequence: Synthetic oligonucleotide
  Sense strand starting at position 3320 of SEQ ID NO: 913321
ugugcaaacuuacuguaua

SEQ ID NO: 918485 - RNA, 19 nt, Artificial Sequence
  Description of Artificial Sequence: Synthetic oligonucleotide
  Antisense strand to SEQ ID NO: 918484
uauacaguaaguuugcaca

SEQ ID NO: 918486 - RNA, 19 nt, Artificial Sequence
  Description of Artificial Sequence: Synthetic oligonucleotide
  Sense strand starting at position 79 of SEQ ID NO: 913321
gccagcuugccucaacaca

SEQ ID NO: 918487 - RNA, 19 nt, Artificial Sequence
  Description of Artificial Sequence: Synthetic oligonucleotide
  Antisense strand to SEQ ID NO: 918486
uguguugaggcaagcuggc

SEQ ID NO: 918488 - RNA, 19 nt, Artificial Sequence
  Description of Artificial Sequence: Synthetic oligonucleotide
  Sense strand starting at position 2248 of SEQ ID NO: 913321
agagaaaccuucgauaaag

SEQ ID NO: 918489 - RNA, 19 nt, Artificial Sequence
  Description of Artificial Sequence: Synthetic oligonucleotide
  Antisense strand to SEQ ID NO: 918488
cuuuaucgaagguuucucu

SEQ ID NO: 918490 - RNA, 19 nt, Artificial Sequence
  Description of Artificial Sequence: Synthetic oligonucleotide
  Sense strand starting at position 1606 of SEQ ID NO: 913321
cuuggugugcuuuaguaca

SEQ ID NO: 918491 - RNA, 19 nt, Artificial Sequence
  Description of Artificial Sequence: Synthetic oligonucleotide
  Antisense strand to SEQ ID NO: 918490
uguacuaaagcacaccaag

SEQ ID NO: 918492 - RNA, 19 nt, Artificial Sequence
  Description of Artificial Sequence: Synthetic oligonucleotide
  Sense strand starting at position 3357 of SEQ ID NO: 913322
agaaaccuucgauaaagcu

SEQ ID NO: 918493 - RNA, 19 nt, Artificial Sequence
  Description of Artificial Sequence: Synthetic oligonucleotide
  Antisense strand to SEQ ID NO: 918492
agcuuuaucgaagguuucu

SEQ ID NO: 918494 - RNA, 19 nt, Artificial Sequence
  Description of Artificial Sequence: Synthetic oligonucleotide
  Sense strand starting at position 3624 of SEQ ID NO: 913322
uuagaacgucuccaagaca

SEQ ID NO: 918495 - RNA, 19 nt, Artificial Sequence
  Description of Artificial Sequence: Synthetic oligonucleotide
  Antisense strand to SEQ ID NO: 918494
ugucuuggagacguucuaa

SEQ ID NO: 918496 - RNA, 19 nt, Artificial Sequence
  Description of Artificial Sequence: Synthetic oligonucleotide
  Sense strand starting at position 2670 of SEQ ID NO: 913322
acagaaauuucuuaaugga

SEQ ID NO: 918497 - RNA, 19 nt, Artificial Sequence
  Description of Artificial Sequence: Synthetic oligonucleotide
  Antisense strand to SEQ ID NO: 918496
uccauuaagaaauuucugu

SEQ ID NO: 918498 - RNA, 19 nt, Artificial Sequence
  Description of Artificial Sequence: Synthetic oligonucleotide
  Sense strand starting at position 3432 of SEQ ID NO: 913322
aauccuugagacugugaua

SEQ ID NO: 918499 - RNA, 19 nt, Artificial Sequence
  Description of Artificial Sequence: Synthetic oligonucleotide
  Antisense strand to SEQ ID NO: 918498
uaucacagucucaaggauu

SEQ ID NO: 918500 - RNA, 19 nt, Artificial Sequence
  Description of Artificial Sequence: Synthetic oligonucleotide
  Sense strand starting at position 1316 of SEQ ID NO: 913322
cgcuguucccugcuggauu

SEQ ID NO: 918501 - RNA, 19 nt, Artificial Sequence
  Description of Artificial Sequence: Synthetic oligonucleotide
  Antisense strand to SEQ ID NO: 918500
aauccagcagggaacagcg

SEQ ID NO: 918502 - RNA, 19 nt, Artificial Sequence
  Description of Artificial Sequence: Synthetic oligonucleotide
  Sense strand starting at position 2509 of SEQ ID NO: 913322
ugcuuuauaggaugagaua

SEQ ID NO: 918503 - RNA, 19 nt, Artificial Sequence
  Description of Artificial Sequence: Synthetic oligonucleotide
  Antisense strand to SEQ ID NO: 918502
uaucucauccuauaaagca

SEQ ID NO: 918504 - RNA, 19 nt, Artificial Sequence
  Description of Artificial Sequence: Synthetic oligonucleotide
  Sense strand starting at position 3561 of SEQ ID NO: 913322
uaagcagaggugugcauuu

SEQ ID NO: 918505 - RNA, 19 nt, Artificial Sequence
  Description of Artificial Sequence: Synthetic oligonucleotide
  Antisense strand to SEQ ID NO: 918504
aaaugcacaccucugcuua

SEQ ID NO: 918506 - RNA, 19 nt, Artificial Sequence
  Description of Artificial Sequence: Synthetic oligonucleotide
  Sense strand starting at position 2249 of SEQ ID NO: 913322
aagguugagucauucuaaa

SEQ ID NO: 918507 - RNA, 19 nt, Artificial Sequence
  Description of Artificial Sequence: Synthetic oligonucleotide
  Antisense strand to SEQ ID NO: 918506
uuuagaaugacucaaccuu

SEQ ID NO: 918508 - RNA, 19 nt, Artificial Sequence
  Description of Artificial Sequence: Synthetic oligonucleotide
  Sense strand starting at position 3664 of SEQ ID NO: 913322
uagagucuaggcugagaga

SEQ ID NO: 918509 - RNA, 19 nt, Artificial Sequence
  Description of Artificial Sequence: Synthetic oligonucleotide
  Antisense strand to SEQ ID NO: 918508
ucucucagccuagacucua

SEQ ID NO: 918510 - RNA, 19 nt, Artificial Sequence
  Description of Artificial Sequence: Synthetic oligonucleotide
  Sense strand starting at position 2840 of SEQ ID NO: 913322
gucagcugagauuacuauu

SEQ ID NO: 918511 - RNA, 19 nt, Artificial Sequence
  Description of Artificial Sequence: Synthetic oligonucleotide
  Antisense strand to SEQ ID NO: 918510
aauaguaaucucagcugac

SEQ ID NO: 918512 - RNA, 19 nt, Artificial Sequence
  Description of Artificial Sequence: Synthetic oligonucleotide
  Sense strand starting at position 3426 of SEQ ID NO: 913322
gggcacaauccuugagacu

SEQ ID NO: 918513 - RNA, 19 nt, Artificial Sequence
  Description of Artificial Sequence: Synthetic oligonucleotide
  Antisense strand to SEQ ID NO: 918512
agucucaaggauugugccc

SEQ ID NO: 918514 - RNA, 19 nt, Artificial Sequence
  Description of Artificial Sequence: Synthetic oligonucleotide
  Sense strand starting at position 295 of SEQ ID NO: 913322
cccugagggucuuugagau

SEQ ID NO: 918515 - RNA, 19 nt, Artificial Sequence
  Description of Artificial Sequence: Synthetic oligonucleotide
  Antisense strand to SEQ ID NO: 918514
aucucaaagacccucaggg

SEQ ID NO: 918516 - RNA, 19 nt, Artificial Sequence
  Description of Artificial Sequence: Synthetic oligonucleotide
  Sense strand starting at position 3365 of SEQ ID NO: 913322
ucgauaaagcucuaccuca

SEQ ID NO: 918517 - RNA, 19 nt, Artificial Sequence
  Description of Artificial Sequence: Synthetic oligonucleotide
  Antisense strand to SEQ ID NO: 918516
ugagguagagcuuuaucga

SEQ ID NO: 918518 - RNA, 19 nt, Artificial Sequence
  Description of Artificial Sequence: Synthetic oligonucleotide
  Sense strand starting at position 2236 of SEQ ID NO: 913322
gcucaaguucaggaagguu

SEQ ID NO: 918519 - RNA, 19 nt, Artificial Sequence
  Description of Artificial Sequence: Synthetic oligonucleotide
  Antisense strand to SEQ ID NO: 918518
aaccuuccugaacuugagc

SEQ ID NO: 918520 - RNA, 19 nt, Artificial Sequence
  Description of Artificial Sequence: Synthetic oligonucleotide
  Sense strand starting at position 2023 of SEQ ID NO: 913322
acuugucauuugcuuaguu

SEQ ID NO: 918521 - RNA, 19 nt, Artificial Sequence
  Description of Artificial Sequence: Synthetic oligonucleotide
  Antisense strand to SEQ ID NO: 918520
aacuaagcaaaugacaagu

SEQ ID NO: 918522 - RNA, 19 nt, Artificial Sequence
  Description of Artificial Sequence: Synthetic oligonucleotide
  Sense strand starting at position 712 of SEQ ID NO: 913322
uucuaagucgcuuaaagaa

SEQ ID NO: 918523 - RNA, 19 nt, Artificial Sequence
  Description of Artificial Sequence: Synthetic oligonucleotide
  Antisense strand to SEQ ID NO: 918522
uucuuuaagcgacuuagaa

SEQ ID NO: 918524 - RNA, 19 nt, Artificial Sequence
  Description of Artificial Sequence: Synthetic oligonucleotide
  Sense strand starting at position 3652 of SEQ ID NO: 913322
gccaaaucagucuagaguc

SEQ ID NO: 918525 - RNA, 19 nt, Artificial Sequence
  Description of Artificial Sequence: Synthetic oligonucleotide
  Antisense strand to SEQ ID NO: 918524
gacucuagacugauuuggc

SEQ ID NO: 918526 - RNA, 19 nt, Artificial Sequence
  Description of Artificial Sequence: Synthetic oligonucleotide
  Sense strand starting at position 3662 of SEQ ID NO: 913322
ucuagagucuaggcugaga

SEQ ID NO: 918527 - RNA, 19 nt, Artificial Sequence
  Description of Artificial Sequence: Synthetic oligonucleotide
  Antisense strand to SEQ ID NO: 918526
ucucagccuagacucuaga

SEQ ID NO: 918528 - RNA, 19 nt, Artificial Sequence
  Description of Artificial Sequence: Synthetic oligonucleotide
  Sense strand starting at position 2276 of SEQ ID NO: 913322
agaguuguauuccuaucaa

SEQ ID NO: 918529 - RNA, 19 nt, Artificial Sequence
  Description of Artificial Sequence: Synthetic oligonucleotide
  Antisense strand to SEQ ID NO: 918528
uugauaggaauacaacucu

SEQ ID NO: 918530 - RNA, 19 nt, Artificial Sequence
  Description of Artificial Sequence: Synthetic oligonucleotide
  Sense strand starting at position 2887 of SEQ ID NO: 913322
gagccuuagguugagcaua

SEQ ID NO: 918531 - RNA, 19 nt, Artificial Sequence
  Description of Artificial Sequence: Synthetic oligonucleotide
  Antisense strand to SEQ ID NO: 918530
uaugcucaaccuaaggcuc

SEQ ID NO: 918532 - RNA, 19 nt, Artificial Sequence
  Description of Artificial Sequence: Synthetic oligonucleotide
  Sense strand starting at position 25 of SEQ ID NO: 913322
agacucugccucugauaua

SEQ ID NO: 918533 - RNA, 19 nt, Artificial Sequence
  Description of Artificial Sequence: Synthetic oligonucleotide
  Antisense strand to SEQ ID NO: 918532
uauaucagaggcagagucu

SEQ ID NO: 918534 - RNA, 19 nt, Artificial Sequence
  Description of Artificial Sequence: Synthetic oligonucleotide
  Sense strand starting at position 3524 of SEQ ID NO: 913322
cuuuaauuggcucaagcua

SEQ ID NO: 918535 - RNA, 19 nt, Artificial Sequence
  Description of Artificial Sequence: Synthetic oligonucleotide
  Antisense strand to SEQ ID NO: 918534
uagcuugagccaauuaaag

SEQ ID NO: 918536 - RNA, 19 nt, Artificial Sequence
  Description of Artificial Sequence: Synthetic oligonucleotide
  Sense strand starting at position 3531 of SEQ ID NO: 913322
uggcucaagcuauaacuuu

SEQ ID NO: 918537 - RNA, 19 nt, Artificial Sequence
  Description of Artificial Sequence: Synthetic oligonucleotide
  Antisense strand to SEQ ID NO: 918536
aaaguuauagcuugagcca

SEQ ID NO: 918538 - RNA, 19 nt, Artificial Sequence
  Description of Artificial Sequence: Synthetic oligonucleotide
  Sense strand starting at position 2024 of SEQ ID NO: 913322
cuugucauuugcuuaguuu

SEQ ID NO: 918539 - RNA, 19 nt, Artificial Sequence
  Description of Artificial Sequence: Synthetic oligonucleotide
  Antisense strand to SEQ ID NO: 918538
aaacuaagcaaaugacaag

SEQ ID NO: 918540 - RNA, 19 nt, Artificial Sequence
  Description of Artificial Sequence: Synthetic oligonucleotide
  Sense strand starting at position 2988 of SEQ ID NO: 913322
gcagcuuaccuuggaagaa

SEQ ID NO: 918541 - RNA, 19 nt, Artificial Sequence
  Description of Artificial Sequence: Synthetic oligonucleotide
  Antisense strand to SEQ ID NO: 918540
uucuuccaagguaagcugc

SEQ ID NO: 918542 - RNA, 19 nt, Artificial Sequence
  Description of Artificial Sequence: Synthetic oligonucleotide
  Sense strand starting at position 256 of SEQ ID NO: 913322
gagggucuccagugguaga

SEQ ID NO: 918543 - RNA, 19 nt, Artificial Sequence
  Description of Artificial Sequence: Synthetic oligonucleotide
  Antisense strand to SEQ ID NO: 918542
ucuaccacuggagacccuc

SEQ ID NO: 918544 - RNA, 19 nt, Artificial Sequence
  Description of Artificial Sequence: Synthetic oligonucleotide
  Sense strand starting at position 22 of SEQ ID NO: 913322
uuaagacucugccucugau

SEQ ID NO: 918545 - RNA, 19 nt, Artificial Sequence
  Description of Artificial Sequence: Synthetic oligonucleotide
  Antisense strand to SEQ ID NO: 918544
aucagaggcagagucuuaa

SEQ ID NO: 918546 - RNA, 19 nt, Artificial Sequence
  Description of Artificial Sequence: Synthetic oligonucleotide
  Sense strand starting at position 3745 of SEQ ID NO: 913322
uuagcaaggcgcuagaaua

SEQ ID NO: 918547 - RNA, 19 nt, Artificial Sequence
  Description of Artificial Sequence: Synthetic oligonucleotide
  Antisense strand to SEQ ID NO: 918546
uauucuagcgccuugcuaa

SEQ ID NO: 918548 - RNA, 19 nt, Artificial Sequence
  Description of Artificial Sequence: Synthetic oligonucleotide
  Sense strand starting at position 2987 of SEQ ID NO: 913322
ugcagcuuaccuuggaaga

SEQ ID NO: 918549 - RNA, 19 nt, Artificial Sequence
  Description of Artificial Sequence: Synthetic oligonucleotide
  Antisense strand to SEQ ID NO: 918548
ucuuccaagguaagcugca

SEQ ID NO: 918550 - RNA, 19 nt, Artificial Sequence
  Description of Artificial Sequence: Synthetic oligonucleotide
  Sense strand starting at position 3133 of SEQ ID NO: 913322
guguacuguccugagagug

SEQ ID NO: 918551 - RNA, 19 nt, Artificial Sequence
  Description of Artificial Sequence: Synthetic oligonucleotide
  Antisense strand to SEQ ID NO: 918550
cacucucaggacaguacac

SEQ ID NO: 918552 - RNA, 19 nt, Artificial Sequence
  Description of Artificial Sequence: Synthetic oligonucleotide
  Sense strand starting at position 1428 of SEQ ID NO: 913322
ugccuuggucucugaagaa

SEQ ID NO: 918553 - RNA, 19 nt, Artificial Sequence
  Description of Artificial Sequence: Synthetic oligonucleotide
  Antisense strand to SEQ ID NO: 918552
uucuucagagaccaaggca

SEQ ID NO: 918554 - RNA, 19 nt, Artificial Sequence
  Description of Artificial Sequence: Synthetic oligonucleotide
  Sense strand starting at position 2428 of SEQ ID NO: 913322
cuuggagcuauguagcuua

SEQ ID NO: 918555 - RNA, 19 nt, Artificial Sequence
  Description of Artificial Sequence: Synthetic oligonucleotide
  Antisense strand to SEQ ID NO: 918554
uaagcuacauagcuccaag

SEQ ID NO: 918556 - RNA, 19 nt, Artificial Sequence
  Description of Artificial Sequence: Synthetic oligonucleotide
  Sense strand starting at position 1716 of SEQ ID NO: 913322
acagauaccucagaaugaa

SEQ ID NO: 918557 - RNA, 19 nt, Artificial Sequence
  Description of Artificial Sequence: Synthetic oligonucleotide
  Antisense strand to SEQ ID NO: 918556
uucauucugagguaucugu

SEQ ID NO: 918558 - RNA, 19 nt, Artificial Sequence
  Description of Artificial Sequence: Synthetic oligonucleotide
  Sense strand starting at position 710 of SEQ ID NO: 913322
gauucuaagucgcuuaaag

SEQ ID NO: 918559 - RNA, 19 nt, Artificial Sequence
  Description of Artificial Sequence: Synthetic oligonucleotide
  Antisense strand to SEQ ID NO: 918558
cuuuaagcgacuuagaauc

SEQ ID NO: 918560 - RNA, 19 nt, Artificial Sequence
  Description of Artificial Sequence: Synthetic oligonucleotide
  Sense strand starting at position 378 of SEQ ID NO: 913322
agacuuaaccuguggccuu

SEQ ID NO: 918561 - RNA, 19 nt, Artificial Sequence
  Description of Artificial Sequence: Synthetic oligonucleotide
  Antisense strand to SEQ ID NO: 918560
aaggccacagguuaagucu

SEQ ID NO: 918562 - RNA, 19 nt, Artificial Sequence
  Description of Artificial Sequence: Synthetic oligonucleotide
  Sense strand starting at position 1427 of SEQ ID NO: 913322
cugccuuggucucugaaga

SEQ ID NO: 918563 - RNA, 19 nt, Artificial Sequence
  Description of Artificial Sequence: Synthetic oligonucleotide
  Antisense strand to SEQ ID NO: 918562
ucuucagagaccaaggcag

SEQ ID NO: 918564 - RNA, 19 nt, Artificial Sequence
  Description of Artificial Sequence: Synthetic oligonucleotide
  Sense strand starting at position 3227 of SEQ ID NO: 913322
uguaguaaccucugacagu

SEQ ID NO: 918565 - RNA, 19 nt, Artificial Sequence
  Description of Artificial Sequence: Synthetic oligonucleotide
  Antisense strand to SEQ ID NO: 918564
acugucagagguuacuaca

SEQ ID NO: 918566 - RNA, 19 nt, Artificial Sequence
  Description of Artificial Sequence: Synthetic oligonucleotide
  Sense strand starting at position 2964 of SEQ ID NO: 913322
caauauagugcagguagua

SEQ ID NO: 918567 - RNA, 19 nt, Artificial Sequence
  Description of Artificial Sequence: Synthetic oligonucleotide
  Antisense strand to SEQ ID NO: 918566
uacuaccugcacuauauug

SEQ ID NO: 918568 - RNA, 19 nt, Artificial Sequence
  Description of Artificial Sequence: Synthetic oligonucleotide
  Sense strand starting at position 1186 of SEQ ID NO: 913322
gccagcuugccucaacaca

SEQ ID NO: 918569 - RNA, 19 nt, Artificial Sequence
  Description of Artificial Sequence: Synthetic oligonucleotide
  Antisense strand to SEQ ID NO: 918568
uguguugaggcaagcuggc

SEQ ID NO: 918570 - RNA, 19 nt, Artificial Sequence
  Description of Artificial Sequence: Synthetic oligonucleotide
  Sense strand starting at position 213 of SEQ ID NO: 913322
gagggucuccggugguaga

SEQ ID NO: 918571 - RNA, 19 nt, Artificial Sequence
  Description of Artificial Sequence: Synthetic oligonucleotide
  Antisense strand to SEQ ID NO: 918570
ucuaccaccggagacccuc

SEQ ID NO: 918572 - RNA, 19 nt, Artificial Sequence
  Description of Artificial Sequence: Synthetic oligonucleotide
  Sense strand starting at position 1729 of SEQ ID NO: 913323
ggaaccaccuagguaaauu

SEQ ID NO: 918573 - RNA, 19 nt, Artificial Sequence
  Description of Artificial Sequence: Synthetic oligonucleotide
  Antisense strand to SEQ ID NO: 918572
aauuuaccuaggugguucc

SEQ ID NO: 918574 - RNA, 19 nt, Artificial Sequence
  Description of Artificial Sequence: Synthetic oligonucleotide
  Sense strand starting at position 259 of SEQ ID NO: 913323
ggauacaugccucaaaccu

SEQ ID NO: 918575 - RNA, 19 nt, Artificial Sequence
  Description of Artificial Sequence: Synthetic oligonucleotide
  Antisense strand to SEQ ID NO: 918574
agguuugaggcauguaucc

SEQ ID NO: 918576 - RNA, 19 nt, Artificial Sequence
  Description of Artificial Sequence: Synthetic oligonucleotide
  Sense strand starting at position 1309 of SEQ ID NO: 913323
aaguuugcaugguuauuua

SEQ ID NO: 918577 - RNA, 19 nt, Artificial Sequence
  Description of Artificial Sequence: Synthetic oligonucleotide
  Antisense strand to SEQ ID NO: 918576
uaaauaaccaugcaaacuu

SEQ ID NO: 918578 - RNA, 19 nt, Artificial Sequence
  Description of Artificial Sequence: Synthetic oligonucleotide
  Sense strand starting at position 2792 of SEQ ID NO: 913323
ccagaaaucugagauuuaa

SEQ ID NO: 918579 - RNA, 19 nt, Artificial Sequence
  Description of Artificial Sequence: Synthetic oligonucleotide
  Antisense strand to SEQ ID NO: 918578
uuaaaucucagauuucugg

SEQ ID NO: 918580 - RNA, 19 nt, Artificial Sequence
  Description of Artificial Sequence: Synthetic oligonucleotide
  Sense strand starting at position 1772 of SEQ ID NO: 913323
gcagcucagagggauaauc

SEQ ID NO: 918581 - RNA, 19 nt, Artificial Sequence
  Description of Artificial Sequence: Synthetic oligonucleotide
  Antisense strand to SEQ ID NO: 918580
gauuaucccucugagcugc

SEQ ID NO: 918582 - RNA, 19 nt, Artificial Sequence
  Description of Artificial Sequence: Synthetic oligonucleotide
  Sense strand starting at position 1835 of SEQ ID NO: 913323
uccuuaugaguacaagcaa

SEQ ID NO: 918583 - RNA, 19 nt, Artificial Sequence
  Description of Artificial Sequence: Synthetic oligonucleotide
  Antisense strand to SEQ ID NO: 918582
uugcuuguacucauaagga

SEQ ID NO: 918584 - RNA, 19 nt, Artificial Sequence
  Description of Artificial Sequence: Synthetic oligonucleotide
  Sense strand starting at position 2325 of SEQ ID NO: 913323
ucuuuaacccacugagaug

SEQ ID NO: 918585 - RNA, 19 nt, Artificial Sequence
  Description of Artificial Sequence: Synthetic oligonucleotide
  Antisense strand to SEQ ID NO: 918584
caucucaguggguuaaaga

SEQ ID NO: 918586 - RNA, 19 nt, Artificial Sequence
  Description of Artificial Sequence: Synthetic oligonucleotide
  Sense strand starting at position 936 of SEQ ID NO: 913323
uuccauuauccagaggcau

SEQ ID NO: 918587 - RNA, 19 nt, Artificial Sequence
  Description of Artificial Sequence: Synthetic oligonucleotide
  Antisense strand to SEQ ID NO: 918586
augccucuggauaauggaa

SEQ ID NO: 918588 - RNA, 19 nt, Artificial Sequence
  Description of Artificial Sequence: Synthetic oligonucleotide
  Sense strand starting at position 3909 of SEQ ID NO: 913323
auuccauaugcaugagaga

SEQ ID NO: 918589 - RNA, 19 nt, Artificial Sequence
  Description of Artificial Sequence: Synthetic oligonucleotide
  Antisense strand to SEQ ID NO: 918588
ucucucaugcauauggaau

SEQ ID NO: 918590 - RNA, 19 nt, Artificial Sequence
  Description of Artificial Sequence: Synthetic oligonucleotide
  Sense strand starting at position 3318 of SEQ ID NO: 913323
ggagaauaaggguguucca

SEQ ID NO: 918591 - RNA, 19 nt, Artificial Sequence
  Description of Artificial Sequence: Synthetic oligonucleotide
  Antisense strand to SEQ ID NO: 918590
uggaacacccuuauucucc

SEQ ID NO: 918592 - RNA, 19 nt, Artificial Sequence
  Description of Artificial Sequence: Synthetic oligonucleotide
  Sense strand starting at position 1490 of SEQ ID NO: 913323
caaaguuuccaagguagaa

SEQ ID NO: 918593 - RNA, 19 nt, Artificial Sequence
  Description of Artificial Sequence: Synthetic oligonucleotide
  Antisense strand to SEQ ID NO: 918592
uucuaccuuggaaacuuug

SEQ ID NO: 918594 - RNA, 19 nt, Artificial Sequence
  Description of Artificial Sequence: Synthetic oligonucleotide
  Sense strand starting at position 3905 of SEQ ID NO: 913323
ggagauuccauaugcauga

SEQ ID NO: 918595 - RNA, 19 nt, Artificial Sequence
  Description of Artificial Sequence: Synthetic oligonucleotide
  Antisense strand to SEQ ID NO: 918594
ucaugcauauggaaucucc

SEQ ID NO: 918596 - RNA, 19 nt, Artificial Sequence
  Description of Artificial Sequence: Synthetic oligonucleotide
  Sense strand starting at position 3564 of SEQ ID NO: 913323
auaucuagguaucucugaa

SEQ ID NO: 918597 - RNA, 19 nt, Artificial Sequence
  Description of Artificial Sequence: Synthetic oligonucleotide
  Antisense strand to SEQ ID NO: 918596
uucagagauaccuagauau

SEQ ID NO: 918598 - RNA, 19 nt, Artificial Sequence
  Description of Artificial Sequence: Synthetic oligonucleotide
  Sense strand starting at position 3556 of SEQ ID NO: 913323
uuuaccagauaucuaggua

SEQ ID NO: 918599 - RNA, 19 nt, Artificial Sequence
  Description of Artificial Sequence: Synthetic oligonucleotide
  Antisense strand to SEQ ID NO: 918598
uaccuagauaucugguaaa

SEQ ID NO: 918600 - RNA, 19 nt, Artificial Sequence
  Description of Artificial Sequence: Synthetic oligonucleotide
  Sense strand starting at position 3559 of SEQ ID NO: 913323
accagauaucuagguaucu

SEQ ID NO: 918601 - RNA, 19 nt, Artificial Sequence
  Description of Artificial Sequence: Synthetic oligonucleotide
  Antisense strand to SEQ ID NO: 918600
agauaccuagauaucuggu

SEQ ID NO: 918602 - RNA, 19 nt, Artificial Sequence
  Description of Artificial Sequence: Synthetic oligonucleotide
  Sense strand starting at position 660 of SEQ ID NO: 913323
agaguuaccuagccagaga

SEQ ID NO: 918603 - RNA, 19 nt, Artificial Sequence
  Description of Artificial Sequence: Synthetic oligonucleotide
  Antisense strand to SEQ ID NO: 918602
ucucuggcuagguaacucu

SEQ ID NO: 918604 - RNA, 19 nt, Artificial Sequence
  Description of Artificial Sequence: Synthetic oligonucleotide
  Sense strand starting at position 1796 of SEQ ID NO: 913323
gauuguagugcugagaaug

SEQ ID NO: 918605 - RNA, 19 nt, Artificial Sequence
  Description of Artificial Sequence: Synthetic oligonucleotide
  Antisense strand to SEQ ID NO: 918604
cauucucagcacuacaauc

SEQ ID NO: 918606 - RNA, 19 nt, Artificial Sequence
  Description of Artificial Sequence: Synthetic oligonucleotide
  Sense strand starting at position 647 of SEQ ID NO: 913323
aaugacuugcuccagaguu

SEQ ID NO: 918607 - RNA, 19 nt, Artificial Sequence
  Description of Artificial Sequence: Synthetic oligonucleotide
  Antisense strand to SEQ ID NO: 918606
aacucuggagcaagucauu

SEQ ID NO: 918608 - RNA, 19 nt, Artificial Sequence
  Description of Artificial Sequence: Synthetic oligonucleotide
  Sense strand starting at position 3856 of SEQ ID NO: 913323
ugggaacugugaucuuuau

SEQ ID NO: 918609 - RNA, 19 nt, Artificial Sequence
  Description of Artificial Sequence: Synthetic oligonucleotide
  Antisense strand to SEQ ID NO: 918608
auaaagaucacaguuccca

SEQ ID NO: 918610 - RNA, 19 nt, Artificial Sequence
  Description of Artificial Sequence: Synthetic oligonucleotide
  Sense strand starting at position 1771 of SEQ ID NO: 913323
agcagcucagagggauaau

SEQ ID NO: 918611 - RNA, 19 nt, Artificial Sequence
  Description of Artificial Sequence: Synthetic oligonucleotide
  Antisense strand to SEQ ID NO: 918610
auuaucccucugagcugcu

SEQ ID NO: 918612 - RNA, 19 nt, Artificial Sequence
  Description of Artificial Sequence: Synthetic oligonucleotide
  Sense strand starting at position 663 of SEQ ID NO: 913323
guuaccuagccagagagua

SEQ ID NO: 918613 - RNA, 19 nt, Artificial Sequence
  Description of Artificial Sequence: Synthetic oligonucleotide
  Antisense strand to SEQ ID NO: 918612
uacucucuggcuagguaac

SEQ ID NO: 918614 - RNA, 19 nt, Artificial Sequence
  Description of Artificial Sequence: Synthetic oligonucleotide
  Sense strand starting at position 1761 of SEQ ID NO: 913323
ggaguaauugagcagcuca

SEQ ID NO: 918615 - RNA, 19 nt, Artificial Sequence
  Description of Artificial Sequence: Synthetic oligonucleotide
  Antisense strand to SEQ ID NO: 918614
ugagcugcucaauuacucc

SEQ ID NO: 918616 - RNA, 19 nt, Artificial Sequence
  Description of Artificial Sequence: Synthetic oligonucleotide
  Sense strand starting at position 2783 of SEQ ID NO: 913323
auucgcauuccagaaaucu

SEQ ID NO: 918617 - RNA, 19 nt, Artificial Sequence
  Description of Artificial Sequence: Synthetic oligonucleotide
  Antisense strand to SEQ ID NO: 918616
agauuucuggaaugcgaau

SEQ ID NO: 918618 - RNA, 19 nt, Artificial Sequence
  Description of Artificial Sequence: Synthetic oligonucleotide
  Sense strand starting at position 3560 of SEQ ID NO: 913323
ccagauaucuagguaucuc

SEQ ID NO: 918619 - RNA, 19 nt, Artificial Sequence
  Description of Artificial Sequence: Synthetic oligonucleotide
  Antisense strand to SEQ ID NO: 918618
gagauaccuagauaucugg

SEQ ID NO: 918620 - RNA, 19 nt, Artificial Sequence
  Description of Artificial Sequence: Synthetic oligonucleotide
  Sense strand starting at position 1064 of SEQ ID NO: 913323
uuguaugugcuagaagaug

SEQ ID NO: 918621 - RNA, 19 nt, Artificial Sequence
  Description of Artificial Sequence: Synthetic oligonucleotide
  Antisense strand to SEQ ID NO: 918620
caucuucuagcacauacaa

SEQ ID NO: 918622 - RNA, 19 nt, Artificial Sequence
  Description of Artificial Sequence: Synthetic oligonucleotide
  Sense strand starting at position 1222 of SEQ ID NO: 913323
ucucgacaacacugugaaa

SEQ ID NO: 918623 - RNA, 19 nt, Artificial Sequence
  Description of Artificial Sequence: Synthetic oligonucleotide
  Antisense strand to SEQ ID NO: 918622
uuucacaguguugucgaga

SEQ ID NO: 918624 - RNA, 19 nt, Artificial Sequence
  Description of Artificial Sequence: Synthetic oligonucleotide
  Sense strand starting at position 218 of SEQ ID NO: 913323
ggcacagcucagcaaagau

SEQ ID NO: 918625 - RNA, 19 nt, Artificial Sequence
  Description of Artificial Sequence: Synthetic oligonucleotide
  Antisense strand to SEQ ID NO: 918624
aucuuugcugagcugugcc

SEQ ID NO: 918626 - RNA, 19 nt, Artificial Sequence
  Description of Artificial Sequence: Synthetic oligonucleotide
  Sense strand starting at position 649 of SEQ ID NO: 913323
ugacuugcuccagaguuac

SEQ ID NO: 918627 - RNA, 19 nt, Artificial Sequence
  Description of Artificial Sequence: Synthetic oligonucleotide
  Antisense strand to SEQ ID NO: 918626
guaacucuggagcaaguca

SEQ ID NO: 918628 - RNA, 19 nt, Artificial Sequence
  Description of Artificial Sequence: Synthetic oligonucleotide
  Sense strand starting at position 2753 of SEQ ID NO: 913323
uaauguaagcuuuggauga

SEQ ID NO: 918629 - RNA, 19 nt, Artificial Sequence
  Description of Artificial Sequence: Synthetic oligonucleotide
  Antisense strand to SEQ ID NO: 918628
ucauccaaagcuuacauua

SEQ ID NO: 918630 - RNA, 19 nt, Artificial Sequence
  Description of Artificial Sequence: Synthetic oligonucleotide
  Sense strand starting at position 1429 of SEQ ID NO: 913323
gccagccauagaugggaua

SEQ ID NO: 918631 - RNA, 19 nt, Artificial Sequence
  Description of Artificial Sequence: Synthetic oligonucleotide
  Antisense strand to SEQ ID NO: 918630
uaucccaucuauggcuggc

SEQ ID NO: 918632 - RNA, 19 nt, Artificial Sequence
  Description of Artificial Sequence: Synthetic oligonucleotide
  Sense strand starting at position 1352 of SEQ ID NO: 913323
agaaccaucuggcugucaa

SEQ ID NO: 918633 - RNA, 19 nt, Artificial Sequence
  Description of Artificial Sequence: Synthetic oligonucleotide
  Antisense strand to SEQ ID NO: 918632
uugacagccagaugguucu

SEQ ID NO: 918634 - RNA, 19 nt, Artificial Sequence
  Description of Artificial Sequence: Synthetic oligonucleotide
  Sense strand starting at position 2941 of SEQ ID NO: 913323
uggugcauugguuagauau

SEQ ID NO: 918635 - RNA, 19 nt, Artificial Sequence
  Description of Artificial Sequence: Synthetic oligonucleotide
  Antisense strand to SEQ ID NO: 918634
auaucuaaccaaugcacca

SEQ ID NO: 918636 - RNA, 19 nt, Artificial Sequence
  Description of Artificial Sequence: Synthetic oligonucleotide
  Sense strand starting at position 2447 of SEQ ID NO: 913323
caagguaguguaggugaaa

SEQ ID NO: 918637 - RNA, 19 nt, Artificial Sequence
  Description of Artificial Sequence: Synthetic oligonucleotide
  Antisense strand to SEQ ID NO: 918636
uuucaccuacacuaccuug

SEQ ID NO: 918638 - RNA, 19 nt, Artificial Sequence
  Description of Artificial Sequence: Synthetic oligonucleotide
  Sense strand starting at position 3862 of SEQ ID NO: 913323
cugugaucuuuauucugag

SEQ ID NO: 918639 - RNA, 19 nt, Artificial Sequence
  Description of Artificial Sequence: Synthetic oligonucleotide
  Antisense strand to SEQ ID NO: 918638
cucagaauaaagaucacag

SEQ ID NO: 918640 - RNA, 19 nt, Artificial Sequence
  Description of Artificial Sequence: Synthetic oligonucleotide
  Sense strand starting at position 1353 of SEQ ID NO: 913323
gaaccaucuggcugucaag

SEQ ID NO: 918641 - RNA, 19 nt, Artificial Sequence
  Description of Artificial Sequence: Synthetic oligonucleotide
  Antisense strand to SEQ ID NO: 918640
cuugacagccagaugguuc

SEQ ID NO: 918642 - RNA, 19 nt, Artificial Sequence
  Description of Artificial Sequence: Synthetic oligonucleotide
  Sense strand starting at position 781 of SEQ ID NO: 913323
gccaaacuguuccugaaua

SEQ ID NO: 918643 - RNA, 19 nt, Artificial Sequence
  Description of Artificial Sequence: Synthetic oligonucleotide
  Antisense strand to SEQ ID NO: 918642
uauucaggaacaguuuggc

SEQ ID NO: 918644 - RNA, 19 nt, Artificial Sequence
  Description of Artificial Sequence: Synthetic oligonucleotide
  Sense strand starting at position 3321 of SEQ ID NO: 913323
gaauaaggguguuccaguu

SEQ ID NO: 918645 - RNA, 19 nt, Artificial Sequence
  Description of Artificial Sequence: Synthetic oligonucleotide
  Antisense strand to SEQ ID NO: 918644
aacuggaacacccuuauuc

SEQ ID NO: 918646 - RNA, 19 nt, Artificial Sequence
  Description of Artificial Sequence: Synthetic oligonucleotide
  Sense strand starting at position 3610 of SEQ ID NO: 913323
ccaucacacugguuuagua

SEQ ID NO: 918647 - RNA, 19 nt, Artificial Sequence
  Description of Artificial Sequence: Synthetic oligonucleotide
  Antisense strand to SEQ ID NO: 918646
uacuaaaccagugugaugg

SEQ ID NO: 918648 - RNA, 19 nt, Artificial Sequence
  Description of Artificial Sequence: Synthetic oligonucleotide
  Sense strand starting at position 3166 of SEQ ID NO: 913323
ugagaaguccuauggugua

SEQ ID NO: 918649 - RNA, 19 nt, Artificial Sequence
  Description of Artificial Sequence: Synthetic oligonucleotide
  Antisense strand to SEQ ID NO: 918648
uacaccauaggacuucuca

SEQ ID NO: 918650 - RNA, 19 nt, Artificial Sequence
  Description of Artificial Sequence: Synthetic oligonucleotide
  Sense strand starting at position 3814 of SEQ ID NO: 913323
uccauuggcgcagacuuaa

SEQ ID NO: 918651 - RNA, 19 nt, Artificial Sequence
  Description of Artificial Sequence: Synthetic oligonucleotide
  Antisense strand to SEQ ID NO: 918650
uuaagucugcgccaaugga

SEQ ID NO: 918652 - RNA, 19 nt, Artificial Sequence
  Description of Artificial Sequence: Synthetic oligonucleotide
  Sense strand starting at position 239 of SEQ ID NO: 913324
aggguaaccuaaccuagau

SEQ ID NO: 918653 - RNA, 19 nt, Artificial Sequence
  Description of Artificial Sequence: Synthetic oligonucleotide
  Antisense strand to SEQ ID NO: 918652
aucuagguuagguuacccu

SEQ ID NO: 918654 - RNA, 19 nt, Artificial Sequence
  Description of Artificial Sequence: Synthetic oligonucleotide
  Sense strand starting at position 3445 of SEQ ID NO: 913324
ggccuuuauccuuaaagaa

SEQ ID NO: 918655 - RNA, 19 nt, Artificial Sequence
  Description of Artificial Sequence: Synthetic oligonucleotide
  Antisense strand to SEQ ID NO: 918654
uucuuuaaggauaaaggcc

SEQ ID NO: 918656 - RNA, 19 nt, Artificial Sequence
  Description of Artificial Sequence: Synthetic oligonucleotide
  Sense strand starting at position 3838 of SEQ ID NO: 913324
uugacaaauuucuaaagga

SEQ ID NO: 918657 - RNA, 19 nt, Artificial Sequence
  Description of Artificial Sequence: Synthetic oligonucleotide
  Antisense strand to SEQ ID NO: 918656
uccuuuagaaauuugucaa

SEQ ID NO: 918658 - RNA, 19 nt, Artificial Sequence
  Description of Artificial Sequence: Synthetic oligonucleotide
  Sense strand starting at position 2056 of SEQ ID NO: 913324
gaaauaagucagcaccgaa

SEQ ID NO: 918659 - RNA, 19 nt, Artificial Sequence
  Description of Artificial Sequence: Synthetic oligonucleotide
  Antisense strand to SEQ ID NO: 918658
uucggugcugacuuauuuc

SEQ ID NO: 918660 - RNA, 19 nt, Artificial Sequence
  Description of Artificial Sequence: Synthetic oligonucleotide
  Sense strand starting at position 3279 of SEQ ID NO: 913324
uuuauaaaugcagaugagu

SEQ ID NO: 918661 - RNA, 19 nt, Artificial Sequence
  Description of Artificial Sequence: Synthetic oligonucleotide
  Antisense strand to SEQ ID NO: 918660
acucaucugcauuuauaaa

SEQ ID NO: 918662 - RNA, 19 nt, Artificial Sequence
  Description of Artificial Sequence: Synthetic oligonucleotide
  Sense strand starting at position 652 of SEQ ID NO: 913324
acaggaaguaauugugaau

SEQ ID NO: 918663 - RNA, 19 nt, Artificial Sequence
  Description of Artificial Sequence: Synthetic oligonucleotide
  Antisense strand to SEQ ID NO: 918662
auucacaauuacuuccugu

SEQ ID NO: 918664 - RNA, 19 nt, Artificial Sequence
  Description of Artificial Sequence: Synthetic oligonucleotide
  Sense strand starting at position 1087 of SEQ ID NO: 913324
ugcccauuugugcaacgaa

SEQ ID NO: 918665 - RNA, 19 nt, Artificial Sequence
  Description of Artificial Sequence: Synthetic oligonucleotide
  Antisense strand to SEQ ID NO: 918664
uucguugcacaaaugggca

SEQ ID NO: 918666 - RNA, 19 nt, Artificial Sequence
  Description of Artificial Sequence: Synthetic oligonucleotide
  Sense strand starting at position 3672 of SEQ ID NO: 913324
ucugacucuggugauaacu

SEQ ID NO: 918667 - RNA, 19 nt, Artificial Sequence
  Description of Artificial Sequence: Synthetic oligonucleotide
  Antisense strand to SEQ ID NO: 918666
aguuaucaccagagucaga

SEQ ID NO: 918668 - RNA, 19 nt, Artificial Sequence
  Description of Artificial Sequence: Synthetic oligonucleotide
  Sense strand starting at position 889 of SEQ ID NO: 913324
gagugacuccagcaauuag

SEQ ID NO: 918669 - RNA, 19 nt, Artificial Sequence
  Description of Artificial Sequence: Synthetic oligonucleotide
  Antisense strand to SEQ ID NO: 918668
cuaauugcuggagucacuc

SEQ ID NO: 918670 - RNA, 19 nt, Artificial Sequence
  Description of Artificial Sequence: Synthetic oligonucleotide
  Sense strand starting at position 3284 of SEQ ID NO: 913324
aaaugcagaugagucaaau

SEQ ID NO: 918671 - RNA, 19 nt, Artificial Sequence
  Description of Artificial Sequence: Synthetic oligonucleotide
  Antisense strand to SEQ ID NO: 918670
auuugacucaucugcauuu

SEQ ID NO: 918672 - RNA, 19 nt, Artificial Sequence
  Description of Artificial Sequence: Synthetic oligonucleotide
  Sense strand starting at position 2041 of SEQ ID NO: 913324
aguucucagacguaggaaa

SEQ ID NO: 918673 - RNA, 19 nt, Artificial Sequence
  Description of Artificial Sequence: Synthetic oligonucleotide
  Antisense strand to SEQ ID NO: 918672
uuuccuacgucugagaacu

SEQ ID NO: 918674 - RNA, 19 nt, Artificial Sequence
  Description of Artificial Sequence: Synthetic oligonucleotide
  Sense strand starting at position 2217 of SEQ ID NO: 913324
ggaauucucucuuuaagac

SEQ ID NO: 918675 - RNA, 19 nt, Artificial Sequence
  Description of Artificial Sequence: Synthetic oligonucleotide
  Antisense strand to SEQ ID NO: 918674
gucuuaaagagagaauucc

SEQ ID NO: 918676 - RNA, 19 nt, Artificial Sequence
  Description of Artificial Sequence: Synthetic oligonucleotide
  Sense strand starting at position 128 of SEQ ID NO: 913324
gcacuaacagucuacugaa

SEQ ID NO: 918677 - RNA, 19 nt, Artificial Sequence
  Description of Artificial Sequence: Synthetic oligonucleotide
  Antisense strand to SEQ ID NO: 918676
uucaguagacuguuagugc

SEQ ID NO: 918678 - RNA, 19 nt, Artificial Sequence
  Description of Artificial Sequence: Synthetic oligonucleotide
  Sense strand starting at position 3238 of SEQ ID NO: 913324
uaugauauauggccuagga

SEQ ID NO: 918679 - RNA, 19 nt, Artificial Sequence
  Description of Artificial Sequence: Synthetic oligonucleotide
  Antisense strand to SEQ ID NO: 918678
uccuaggccauauaucaua

SEQ ID NO: 918680 - RNA, 19 nt, Artificial Sequence
  Description of Artificial Sequence: Synthetic oligonucleotide
  Sense strand starting at position 2855 of SEQ ID NO: 913324
gugugcacuauuugggauu

SEQ ID NO: 918681 - RNA, 19 nt, Artificial Sequence
  Description of Artificial Sequence: Synthetic oligonucleotide
  Antisense strand to SEQ ID NO: 918680
aaucccaaauagugcacac

SEQ ID NO: 918682 - RNA, 19 nt, Artificial Sequence
  Description of Artificial Sequence: Synthetic oligonucleotide
  Sense strand starting at position 691 of SEQ ID NO: 913324
ugcgauuuggcuuaaguug

SEQ ID NO: 918683 - RNA, 19 nt, Artificial Sequence
  Description of Artificial Sequence: Synthetic oligonucleotide
  Antisense strand to SEQ ID NO: 918682
caacuuaagccaaaucgca

SEQ ID NO: 918684 - RNA, 19 nt, Artificial Sequence
  Description of Artificial Sequence: Synthetic oligonucleotide
  Sense strand starting at position 3483 of SEQ ID NO: 913324
accucaugugucuacagaa

SEQ ID NO: 918685 - RNA, 19 nt, Artificial Sequence
  Description of Artificial Sequence: Synthetic oligonucleotide
  Antisense strand to SEQ ID NO: 918684
uucuguagacacaugaggu

SEQ ID NO: 918686 - RNA, 19 nt, Artificial Sequence
  Description of Artificial Sequence: Synthetic oligonucleotide
  Sense strand starting at position 3109 of SEQ ID NO: 913324
uguuuaaagcccgaagaaa

SEQ ID NO: 918687 - RNA, 19 nt, Artificial Sequence
  Description of Artificial Sequence: Synthetic oligonucleotide
  Antisense strand to SEQ ID NO: 918686
uuucuucgggcuuuaaaca

SEQ ID NO: 918688 - RNA, 19 nt, Artificial Sequence
  Description of Artificial Sequence: Synthetic oligonucleotide
  Sense strand starting at position 3940 of SEQ ID NO: 913324
ccuguuauuggccaagaaa

SEQ ID NO: 918689 - RNA, 19 nt, Artificial Sequence
  Description of Artificial Sequence: Synthetic oligonucleotide
  Antisense strand to SEQ ID NO: 918688
uuucuuggccaauaacagg

SEQ ID NO: 918690 - RNA, 19 nt, Artificial Sequence
  Description of Artificial Sequence: Synthetic oligonucleotide
  Sense strand starting at position 3943 of SEQ ID NO: 913324
guuauuggccaagaaacuu

SEQ ID NO: 918691 - RNA, 19 nt, Artificial Sequence
  Description of Artificial Sequence: Synthetic oligonucleotide
  Antisense strand to SEQ ID NO: 918690
aaguuucuuggccaauaac

SEQ ID NO: 918692 - RNA, 19 nt, Artificial Sequence
  Description of Artificial Sequence: Synthetic oligonucleotide
  Sense strand starting at position 3607 of SEQ ID NO: 913324
uauuaaugggcuggacaua

SEQ ID NO: 918693 - RNA, 19 nt, Artificial Sequence
  Description of Artificial Sequence: Synthetic oligonucleotide
  Antisense strand to SEQ ID NO: 918692
uauguccagcccauuaaua

SEQ ID NO: 918694 - RNA, 19 nt, Artificial Sequence
  Description of Artificial Sequence: Synthetic oligonucleotide
  Sense strand starting at position 2597 of SEQ ID NO: 913324
ggauucucacgagagccau

SEQ ID NO: 918695 - RNA, 19 nt, Artificial Sequence
  Description of Artificial Sequence: Synthetic oligonucleotide
  Antisense strand to SEQ ID NO: 918694
auggcucucgugagaaucc

SEQ ID NO: 918696 - RNA, 19 nt, Artificial Sequence
  Description of Artificial Sequence: Synthetic oligonucleotide
  Sense strand starting at position 3352 of SEQ ID NO: 913324
ugcaguuuaucuuccauuu

SEQ ID NO: 918697 - RNA, 19 nt, Artificial Sequence
  Description of Artificial Sequence: Synthetic oligonucleotide
  Antisense strand to SEQ ID NO: 918696
aaauggaagauaaacugca

SEQ ID NO: 918698 - RNA, 19 nt, Artificial Sequence
  Description of Artificial Sequence: Synthetic oligonucleotide
  Sense strand starting at position 2455 of SEQ ID NO: 913324
gcagauggcuaaucaaaga

SEQ ID NO: 918699 - RNA, 19 nt, Artificial Sequence
  Description of Artificial Sequence: Synthetic oligonucleotide
  Antisense strand to SEQ ID NO: 918698
ucuuugauuagccaucugc

SEQ ID NO: 918700 - RNA, 19 nt, Artificial Sequence
  Description of Artificial Sequence: Synthetic oligonucleotide
  Sense strand starting at position 2452 of SEQ ID NO: 913324
cuugcagauggcuaaucaa

SEQ ID NO: 918701 - RNA, 19 nt, Artificial Sequence
  Description of Artificial Sequence: Synthetic oligonucleotide
  Antisense strand to SEQ ID NO: 918700
uugauuagccaucugcaag

SEQ ID NO: 918702 - RNA, 19 nt, Artificial Sequence
  Description of Artificial Sequence: Synthetic oligonucleotide
  Sense strand starting at position 2043 of SEQ ID NO: 913324
uucucagacguaggaaaua

SEQ ID NO: 918703 - RNA, 19 nt, Artificial Sequence
  Description of Artificial Sequence: Synthetic oligonucleotide
  Antisense strand to SEQ ID NO: 918702
uauuuccuacgucugagaa

SEQ ID NO: 918704 - RNA, 19 nt, Artificial Sequence
  Description of Artificial Sequence: Synthetic oligonucleotide
  Sense strand starting at position 2848 of SEQ ID NO: 913324
agaaauagugugcacuauu

SEQ ID NO: 918705 - RNA, 19 nt, Artificial Sequence
  Description of Artificial Sequence: Synthetic oligonucleotide
  Antisense strand to SEQ ID NO: 918704
aauagugcacacuauuucu

SEQ ID NO: 918706 - RNA, 19 nt, Artificial Sequence
  Description of Artificial Sequence: Synthetic oligonucleotide
  Sense strand starting at position 348 of SEQ ID NO: 913324
uuauuaauggguugaaucu

SEQ ID NO: 918707 - RNA, 19 nt, Artificial Sequence
  Description of Artificial Sequence: Synthetic oligonucleotide
  Antisense strand to SEQ ID NO: 918706
agauucaacccauuaauaa

SEQ ID NO: 918708 - RNA, 19 nt, Artificial Sequence
  Description of Artificial Sequence: Synthetic oligonucleotide
  Sense strand starting at position 3606 of SEQ ID NO: 913324
cuauuaaugggcuggacau

SEQ ID NO: 918709 - RNA, 19 nt, Artificial Sequence
  Description of Artificial Sequence: Synthetic oligonucleotide
  Antisense strand to SEQ ID NO: 918708
auguccagcccauuaauag

SEQ ID NO: 918710 - RNA, 19 nt, Artificial Sequence
  Description of Artificial Sequence: Synthetic oligonucleotide
  Sense strand starting at position 3444 of SEQ ID NO: 913324
aggccuuuauccuuaaaga

SEQ ID NO: 918711 - RNA, 19 nt, Artificial Sequence
  Description of Artificial Sequence: Synthetic oligonucleotide
  Antisense strand to SEQ ID NO: 918710
ucuuuaaggauaaaggccu

SEQ ID NO: 918712 - RNA, 19 nt, Artificial Sequence
  Description of Artificial Sequence: Synthetic oligonucleotide
  Sense strand starting at position 3208 of SEQ ID NO: 913324
ccuauaaguuagguauaac

SEQ ID NO: 918713 - RNA, 19 nt, Artificial Sequence
  Description of Artificial Sequence: Synthetic oligonucleotide
  Antisense strand to SEQ ID NO: 918712
guuauaccuaacuuauagg

SEQ ID NO: 918714 - RNA, 19 nt, Artificial Sequence
  Description of Artificial Sequence: Synthetic oligonucleotide
  Sense strand starting at position 3570 of SEQ ID NO: 913324
ugcuaauuacuuggaauac

SEQ ID NO: 918715 - RNA, 19 nt, Artificial Sequence
  Description of Artificial Sequence: Synthetic oligonucleotide
  Antisense strand to SEQ ID NO: 918714
guauuccaaguaauuagca

SEQ ID NO: 918716 - RNA, 19 nt, Artificial Sequence
  Description of Artificial Sequence: Synthetic oligonucleotide
  Sense strand starting at position 2324 of SEQ ID NO: 913324
ggugauuucugcuuggucu

SEQ ID NO: 918717 - RNA, 19 nt, Artificial Sequence
  Description of Artificial Sequence: Synthetic oligonucleotide
  Antisense strand to SEQ ID NO: 918716
agaccaagcagaaaucacc

SEQ ID NO: 918718 - RNA, 19 nt, Artificial Sequence
  Description of Artificial Sequence: Synthetic oligonucleotide
  Sense strand starting at position 2557 of SEQ ID NO: 913324
caggcauagcgagagaagu

SEQ ID NO: 918719 - RNA, 19 nt, Artificial Sequence
  Description of Artificial Sequence: Synthetic oligonucleotide
  Antisense strand to SEQ ID NO: 918718
acuucucucgcuaugccug

SEQ ID NO: 918720 - RNA, 19 nt, Artificial Sequence
  Description of Artificial Sequence: Synthetic oligonucleotide
  Sense strand starting at position 2055 of SEQ ID NO: 913324
ggaaauaagucagcaccga

SEQ ID NO: 918721 - RNA, 19 nt, Artificial Sequence
  Description of Artificial Sequence: Synthetic oligonucleotide
  Antisense strand to SEQ ID NO: 918720
ucggugcugacuuauuucc

SEQ ID NO: 918722 - RNA, 19 nt, Artificial Sequence
  Description of Artificial Sequence: Synthetic oligonucleotide
  Sense strand starting at position 2215 of SEQ ID NO: 913324
cgggaauucucucuuuaag

SEQ ID NO: 918723 - RNA, 19 nt, Artificial Sequence
  Description of Artificial Sequence: Synthetic oligonucleotide
  Antisense strand to SEQ ID NO: 918722
cuuaaagagagaauucccg

SEQ ID NO: 918724 - RNA, 19 nt, Artificial Sequence
  Description of Artificial Sequence: Synthetic oligonucleotide
  Sense strand starting at position 796 of SEQ ID NO: 913324
ugguuaacuguccauucca

SEQ ID NO: 918725 - RNA, 19 nt, Artificial Sequence
  Description of Artificial Sequence: Synthetic oligonucleotide
  Antisense strand to SEQ ID NO: 918724
uggaauggacaguuaacca

SEQ ID NO: 918726 - RNA, 19 nt, Artificial Sequence
  Description of Artificial Sequence: Synthetic oligonucleotide
  Sense strand starting at position 346 of SEQ ID NO: 913324
uguuauuaauggguugaau

SEQ ID NO: 918727 - RNA, 19 nt, Artificial Sequence
  Description of Artificial Sequence: Synthetic oligonucleotide
  Antisense strand to SEQ ID NO: 918726
auucaacccauuaauaaca

SEQ ID NO: 918728 - RNA, 19 nt, Artificial Sequence
  Description of Artificial Sequence: Synthetic oligonucleotide
  Sense strand starting at position 2766 of SEQ ID NO: 913324
ugcaucugauauccagauu

SEQ ID NO: 918729 - RNA, 19 nt, Artificial Sequence
  Description of Artificial Sequence: Synthetic oligonucleotide
  Antisense strand to SEQ ID NO: 918728
aaucuggauaucagaugca

SEQ ID NO: 918730 - RNA, 19 nt, Artificial Sequence
  Description of Artificial Sequence: Synthetic oligonucleotide
  Sense strand starting at position 3568 of SEQ ID NO: 913324
agugcuaauuacuuggaau

SEQ ID NO: 918731 - RNA, 19 nt, Artificial Sequence
  Description of Artificial Sequence: Synthetic oligonucleotide
  Antisense strand to SEQ ID NO: 918730
auuccaaguaauuagcacu

SEQ ID NO: 918732 - RNA, 19 nt, Artificial Sequence
  Description of Artificial Sequence: Synthetic oligonucleotide
  Sense strand starting at position 602 of SEQ ID NO: 913325
gguugacuauacucagaaa

SEQ ID NO: 918733 - RNA, 19 nt, Artificial Sequence
  Description of Artificial Sequence: Synthetic oligonucleotide
  Antisense strand to SEQ ID NO: 918732
uuucugaguauagucaacc

SEQ ID NO: 918734 - RNA, 19 nt, Artificial Sequence
  Description of Artificial Sequence: Synthetic oligonucleotide
  Sense strand starting at position 3512 of SEQ ID NO: 913325
ucgggauuugucuagcuuu

SEQ ID NO: 918735 - RNA, 19 nt, Artificial Sequence
  Description of Artificial Sequence: Synthetic oligonucleotide
  Antisense strand to SEQ ID NO: 918734
aaagcuagacaaaucccga

SEQ ID NO: 918736 - RNA, 19 nt, Artificial Sequence
  Description of Artificial Sequence: Synthetic oligonucleotide
  Sense strand starting at position 1840 of SEQ ID NO: 913325
uauuauaccggguaauuaa

SEQ ID NO: 918737 - RNA, 19 nt, Artificial Sequence
  Description of Artificial Sequence: Synthetic oligonucleotide
  Antisense strand to SEQ ID NO: 918736
uuaauuacccgguauaaua

SEQ ID NO: 918738 - RNA, 19 nt, Artificial Sequence
  Description of Artificial Sequence: Synthetic oligonucleotide
  Sense strand starting at position 2623 of SEQ ID NO: 913325
cuaauuugucaccgagcaa

SEQ ID NO: 918739 - RNA, 19 nt, Artificial Sequence
  Description of Artificial Sequence: Synthetic oligonucleotide
  Antisense strand to SEQ ID NO: 918738
uugcucggugacaaauuag

SEQ ID NO: 918740 - RNA, 19 nt, Artificial Sequence
  Description of Artificial Sequence: Synthetic oligonucleotide
  Sense strand starting at position 974 of SEQ ID NO: 913325
cucauuggucuugaaacac

SEQ ID NO: 918741 - RNA, 19 nt, Artificial Sequence
  Description of Artificial Sequence: Synthetic oligonucleotide
  Antisense strand to SEQ ID NO: 918740
guguuucaagaccaaugag

SEQ ID NO: 918742 - RNA, 19 nt, Artificial Sequence
  Description of Artificial Sequence: Synthetic oligonucleotide
  Sense strand starting at position 503 of SEQ ID NO: 913325
aaauuaggauggucucuga

SEQ ID NO: 918743 - RNA, 19 nt, Artificial Sequence
  Description of Artificial Sequence: Synthetic oligonucleotide
  Antisense strand to SEQ ID NO: 918742
ucagagaccauccuaauuu

SEQ ID NO: 918744 - RNA, 19 nt, Artificial Sequence
  Description of Artificial Sequence: Synthetic oligonucleotide
  Sense strand starting at position 3502 of SEQ ID NO: 913325
ucuauacugcucgggauuu

SEQ ID NO: 918745 - RNA, 19 nt, Artificial Sequence
  Description of Artificial Sequence: Synthetic oligonucleotide
  Antisense strand to SEQ ID NO: 918744
aaaucccgagcaguauaga

SEQ ID NO: 918746 - RNA, 19 nt, Artificial Sequence
  Description of Artificial Sequence: Synthetic oligonucleotide
  Sense strand starting at position 36 of SEQ ID NO: 913325
uuuauaguggcagagauac

SEQ ID NO: 918747 - RNA, 19 nt, Artificial Sequence
  Description of Artificial Sequence: Synthetic oligonucleotide
  Antisense strand to SEQ ID NO: 918746
guaucucugccacuauaaa

SEQ ID NO: 918748 - RNA, 19 nt, Artificial Sequence
  Description of Artificial Sequence: Synthetic oligonucleotide
  Sense strand starting at position 1868 of SEQ ID NO: 913325
uggaaucuauaagucacau

SEQ ID NO: 918749 - RNA, 19 nt, Artificial Sequence
  Description of Artificial Sequence: Synthetic oligonucleotide
  Antisense strand to SEQ ID NO: 918748
augugacuuauagauucca

SEQ ID NO: 918750 - RNA, 19 nt, Artificial Sequence
  Description of Artificial Sequence: Synthetic oligonucleotide
  Sense strand starting at position 3827 of SEQ ID NO: 913325
accauuaguguacauccaa

SEQ ID NO: 918751 - RNA, 19 nt, Artificial Sequence
  Description of Artificial Sequence: Synthetic oligonucleotide
  Antisense strand to SEQ ID NO: 918750
uuggauguacacuaauggu

SEQ ID NO: 918752 - RNA, 19 nt, Artificial Sequence
  Description of Artificial Sequence: Synthetic oligonucleotide
  Sense strand starting at position 291 of SEQ ID NO: 913325
uuggcauuccugugauuug

SEQ ID NO: 918753 - RNA, 19 nt, Artificial Sequence
  Description of Artificial Sequence: Synthetic oligonucleotide
  Antisense strand to SEQ ID NO: 918752
caaaucacaggaaugccaa

SEQ ID NO: 918754 - RNA, 19 nt, Artificial Sequence
  Description of Artificial Sequence: Synthetic oligonucleotide
  Sense strand starting at position 2465 of SEQ ID NO: 913325
aggcacacuguuuauaaau

SEQ ID NO: 918755 - RNA, 19 nt, Artificial Sequence
  Description of Artificial Sequence: Synthetic oligonucleotide
  Antisense strand to SEQ ID NO: 918754
auuuauaaacagugugccu

SEQ ID NO: 918756 - RNA, 19 nt, Artificial Sequence
  Description of Artificial Sequence: Synthetic oligonucleotide
  Sense strand starting at position 1490 of SEQ ID NO: 913325
aauacagcccagugaaaga

SEQ ID NO: 918757 - RNA, 19 nt, Artificial Sequence
  Description of Artificial Sequence: Synthetic oligonucleotide
  Antisense strand to SEQ ID NO: 918756
ucuuucacugggcuguauu

SEQ ID NO: 918758 - RNA, 19 nt, Artificial Sequence
  Description of Artificial Sequence: Synthetic oligonucleotide
  Sense strand starting at position 271 of SEQ ID NO: 913325
uuuccagaugcugaauuau

SEQ ID NO: 918759 - RNA, 19 nt, Artificial Sequence
  Description of Artificial Sequence: Synthetic oligonucleotide
  Antisense strand to SEQ ID NO: 918758
auaauucagcaucuggaaa

SEQ ID NO: 918760 - RNA, 19 nt, Artificial Sequence
  Description of Artificial Sequence: Synthetic oligonucleotide
  Sense strand starting at position 1276 of SEQ ID NO: 913325
gcugcaaaugaccaaugau

SEQ ID NO: 918761 - RNA, 19 nt, Artificial Sequence
  Description of Artificial Sequence: Synthetic oligonucleotide
  Antisense strand to SEQ ID NO: 918760
aucauuggucauuugcagc

SEQ ID NO: 918762 - RNA, 19 nt, Artificial Sequence
  Description of Artificial Sequence: Synthetic oligonucleotide
  Sense strand starting at position 529 of SEQ ID NO: 913325
aagguaugguuaccaugaa

SEQ ID NO: 918763 - RNA, 19 nt, Artificial Sequence
  Description of Artificial Sequence: Synthetic oligonucleotide
  Antisense strand to SEQ ID NO: 918762
uucaugguaaccauaccuu

SEQ ID NO: 918764 - RNA, 19 nt, Artificial Sequence
  Description of Artificial Sequence: Synthetic oligonucleotide
  Sense strand starting at position 2568 of SEQ ID NO: 913325
ggauguuagcauuacuaua

SEQ ID NO: 918765 - RNA, 19 nt, Artificial Sequence
  Description of Artificial Sequence: Synthetic oligonucleotide
  Antisense strand to SEQ ID NO: 918764
uauaguaaugcuaacaucc

SEQ ID NO: 918766 - RNA, 19 nt, Artificial Sequence
  Description of Artificial Sequence: Synthetic oligonucleotide
  Sense strand starting at position 3629 of SEQ ID NO: 913325
acaggaaucaugugaagca

SEQ ID NO: 918767 - RNA, 19 nt, Artificial Sequence
  Description of Artificial Sequence: Synthetic oligonucleotide
  Antisense strand to SEQ ID NO: 918766
ugcuucacaugauuccugu

SEQ ID NO: 918768 - RNA, 19 nt, Artificial Sequence
  Description of Artificial Sequence: Synthetic oligonucleotide
  Sense strand starting at position 3445 of SEQ ID NO: 913325
uugcacuauugauuagaaa

SEQ ID NO: 918769 - RNA, 19 nt, Artificial Sequence
  Description of Artificial Sequence: Synthetic oligonucleotide
  Antisense strand to SEQ ID NO: 918768
uuucuaaucaauagugcaa

SEQ ID NO: 918770 - RNA, 19 nt, Artificial Sequence
  Description of Artificial Sequence: Synthetic oligonucleotide
  Sense strand starting at position 3732 of SEQ ID NO: 913325
uguguaguccuugcgaucu

SEQ ID NO: 918771 - RNA, 19 nt, Artificial Sequence
  Description of Artificial Sequence: Synthetic oligonucleotide
  Antisense strand to SEQ ID NO: 918770
agaucgcaaggacuacaca

SEQ ID NO: 918772 - RNA, 19 nt, Artificial Sequence
  Description of Artificial Sequence: Synthetic oligonucleotide
  Sense strand starting at position 1279 of SEQ ID NO: 913325
gcaaaugaccaaugaugua

SEQ ID NO: 918773 - RNA, 19 nt, Artificial Sequence
  Description of Artificial Sequence: Synthetic oligonucleotide
  Antisense strand to SEQ ID NO: 918772
uacaucauuggucauuugc

SEQ ID NO: 918774 - RNA, 19 nt, Artificial Sequence
  Description of Artificial Sequence: Synthetic oligonucleotide
  Sense strand starting at position 1792 of SEQ ID NO: 913325
cagaaauaucagugcauga

SEQ ID NO: 918775 - RNA, 19 nt, Artificial Sequence
  Description of Artificial Sequence: Synthetic oligonucleotide
  Antisense strand to SEQ ID NO: 918774
ucaugcacugauauuucug

SEQ ID NO: 918776 - RNA, 19 nt, Artificial Sequence
  Description of Artificial Sequence: Synthetic oligonucleotide
  Sense strand starting at position 1938 of SEQ ID NO: 913325
cugggugguguucagggaa

SEQ ID NO: 918777 - RNA, 19 nt, Artificial Sequence
  Description of Artificial Sequence: Synthetic oligonucleotide
  Antisense strand to SEQ ID NO: 918776
uucccugaacaccacccag

SEQ ID NO: 918778 - RNA, 19 nt, Artificial Sequence
  Description of Artificial Sequence: Synthetic oligonucleotide
  Sense strand starting at position 1816 of SEQ ID NO: 913325
gccaaaucccugcagauga

SEQ ID NO: 918779 - RNA, 19 nt, Artificial Sequence
  Description of Artificial Sequence: Synthetic oligonucleotide
  Antisense strand to SEQ ID NO: 918778
ucaucugcagggauuuggc

SEQ ID NO: 918780 - RNA, 19 nt, Artificial Sequence
  Description of Artificial Sequence: Synthetic oligonucleotide
  Sense strand starting at position 733 of SEQ ID NO: 913325
gagcacugucauugaagaa

SEQ ID NO: 918781 - RNA, 19 nt, Artificial Sequence
  Description of Artificial Sequence: Synthetic oligonucleotide
  Antisense strand to SEQ ID NO: 918780
uucuucaaugacagugcuc

SEQ ID NO: 918782 - RNA, 19 nt, Artificial Sequence
  Description of Artificial Sequence: Synthetic oligonucleotide
  Sense strand starting at position 732 of SEQ ID NO: 913325
ggagcacugucauugaaga

SEQ ID NO: 918783 - RNA, 19 nt, Artificial Sequence
  Description of Artificial Sequence: Synthetic oligonucleotide
  Antisense strand to SEQ ID NO: 918782
ucuucaaugacagugcucc

SEQ ID NO: 918784 - RNA, 19 nt, Artificial Sequence
  Description of Artificial Sequence: Synthetic oligonucleotide
  Sense strand starting at position 541 of SEQ ID NO: 913325
ccaugaaugcugggauauu

SEQ ID NO: 918785 - RNA, 19 nt, Artificial Sequence
  Description of Artificial Sequence: Synthetic oligonucleotide
  Antisense strand to SEQ ID NO: 918784
aauaucccagcauucaugg

SEQ ID NO: 918786 - RNA, 19 nt, Artificial Sequence
  Description of Artificial Sequence: Synthetic oligonucleotide
  Sense strand starting at position 581 of SEQ ID NO: 913325
cagugauggcuugggagga

SEQ ID NO: 918787 - RNA, 19 nt, Artificial Sequence
  Description of Artificial Sequence: Synthetic oligonucleotide
  Antisense strand to SEQ ID NO: 918786
uccucccaagccaucacug

SEQ ID NO: 918788 - RNA, 19 nt, Artificial Sequence
  Description of Artificial Sequence: Synthetic oligonucleotide
  Sense strand starting at position 2223 of SEQ ID NO: 913325
gacacugagcuaggguaau

SEQ ID NO: 918789 - RNA, 19 nt, Artificial Sequence
  Description of Artificial Sequence: Synthetic oligonucleotide
  Antisense strand to SEQ ID NO: 918788
auuacccuagcucaguguc

SEQ ID NO: 918790 - RNA, 19 nt, Artificial Sequence
  Description of Artificial Sequence: Synthetic oligonucleotide
  Sense strand starting at position 1791 of SEQ ID NO: 913325
ucagaaauaucagugcaug

SEQ ID NO: 918791 - RNA, 19 nt, Artificial Sequence
  Description of Artificial Sequence: Synthetic oligonucleotide
  Antisense strand to SEQ ID NO: 918790
caugcacugauauuucuga

SEQ ID NO: 918792 - RNA, 19 nt, Artificial Sequence
  Description of Artificial Sequence: Synthetic oligonucleotide
  Sense strand starting at position 442 of SEQ ID NO: 913325
ggaugugcuaagugcauuu

SEQ ID NO: 918793 - RNA, 19 nt, Artificial Sequence
  Description of Artificial Sequence: Synthetic oligonucleotide
  Antisense strand to SEQ ID NO: 918792
aaaugcacuuagcacaucc

SEQ ID NO: 918794 - RNA, 19 nt, Artificial Sequence
  Description of Artificial Sequence: Synthetic oligonucleotide
  Sense strand starting at position 1147 of SEQ ID NO: 913325
ggagcuuuaagcugaggga

SEQ ID NO: 918795 - RNA, 19 nt, Artificial Sequence
  Description of Artificial Sequence: Synthetic oligonucleotide
  Antisense strand to SEQ ID NO: 918794
ucccucagcuuaaagcucc

SEQ ID NO: 918796 - RNA, 19 nt, Artificial Sequence
  Description of Artificial Sequence: Synthetic oligonucleotide
  Sense strand starting at position 164 of SEQ ID NO: 913325
cugcuccaggcuuagaaua

SEQ ID NO: 918797 - RNA, 19 nt, Artificial Sequence
  Description of Artificial Sequence: Synthetic oligonucleotide
  Antisense strand to SEQ ID NO: 918796
uauucuaagccuggagcag

SEQ ID NO: 918798 - RNA, 19 nt, Artificial Sequence
  Description of Artificial Sequence: Synthetic oligonucleotide
  Sense strand starting at position 3740 of SEQ ID NO: 913325
ccuugcgaucuuuaugaag

SEQ ID NO: 918799 - RNA, 19 nt, Artificial Sequence
  Description of Artificial Sequence: Synthetic oligonucleotide
  Antisense strand to SEQ ID NO: 918798
cuucauaaagaucgcaagg

SEQ ID NO: 918800 - RNA, 19 nt, Artificial Sequence
  Description of Artificial Sequence: Synthetic oligonucleotide
  Sense strand starting at position 1633 of SEQ ID NO: 913325
guuuguuuaggaugaacau

SEQ ID NO: 918801 - RNA, 19 nt, Artificial Sequence
  Description of Artificial Sequence: Synthetic oligonucleotide
  Antisense strand to SEQ ID NO: 918800
auguucauccuaaacaaac

SEQ ID NO: 918802 - RNA, 19 nt, Artificial Sequence
  Description of Artificial Sequence: Synthetic oligonucleotide
  Sense strand starting at position 3399 of SEQ ID NO: 913325
gauuaauggugcccacaca

SEQ ID NO: 918803 - RNA, 19 nt, Artificial Sequence
  Description of Artificial Sequence: Synthetic oligonucleotide
  Antisense strand to SEQ ID NO: 918802
ugugugggcaccauuaauc

SEQ ID NO: 918804 - RNA, 19 nt, Artificial Sequence
  Description of Artificial Sequence: Synthetic oligonucleotide
  Sense strand starting at position 1729 of SEQ ID NO: 913325
ugucuuuaacguuagauca

SEQ ID NO: 918805 - RNA, 19 nt, Artificial Sequence
  Description of Artificial Sequence: Synthetic oligonucleotide
  Antisense strand to SEQ ID NO: 918804
ugaucuaacguuaaagaca

SEQ ID NO: 918806 - RNA, 19 nt, Artificial Sequence
  Description of Artificial Sequence: Synthetic oligonucleotide
  Sense strand starting at position 3386 of SEQ ID NO: 913325
gucagaucuguuugauuaa

SEQ ID NO: 918807 - RNA, 19 nt, Artificial Sequence
  Description of Artificial Sequence: Synthetic oligonucleotide
  Antisense strand to SEQ ID NO: 918806
uuaaucaaacagaucugac

SEQ ID NO: 918808 - RNA, 19 nt, Artificial Sequence
  Description of Artificial Sequence: Synthetic oligonucleotide
  Sense strand starting at position 197 of SEQ ID NO: 913325
guggauuccacuugcaaga

SEQ ID NO: 918809 - RNA, 19 nt, Artificial Sequence
  Description of Artificial Sequence: Synthetic oligonucleotide
  Antisense strand to SEQ ID NO: 918808
ucuugcaaguggaauccac

SEQ ID NO: 918810 - RNA, 19 nt, Artificial Sequence
  Description of Artificial Sequence: Synthetic oligonucleotide
  Sense strand starting at position 1736 of SEQ ID NO: 913325
aacguuagaucauuaaagc

SEQ ID NO: 918811 - RNA, 19 nt, Artificial Sequence
  Description of Artificial Sequence: Synthetic oligonucleotide
  Antisense strand to SEQ ID NO: 918810
gcuuuaaugaucuaacguu

SEQ ID NO: 918812 - RNA, 19 nt, Artificial Sequence
  Description of Artificial Sequence: Synthetic oligonucleotide
  Sense strand starting at position 827 of SEQ ID NO: 913326
ucuauuggucaauauugau

SEQ ID NO: 918813 - RNA, 19 nt, Artificial Sequence
  Description of Artificial Sequence: Synthetic oligonucleotide
  Antisense strand to SEQ ID NO: 918812
aucaauauugaccaauaga

SEQ ID NO: 918814 - RNA, 19 nt, Artificial Sequence
  Description of Artificial Sequence: Synthetic oligonucleotide
  Sense strand starting at position 620 of SEQ ID NO: 913326
gucccaagagcugaaucaa

SEQ ID NO: 918815 - RNA, 19 nt, Artificial Sequence
  Description of Artificial Sequence: Synthetic oligonucleotide
  Antisense strand to SEQ ID NO: 918814
uugauucagcucuugggac

SEQ ID NO: 918816 - RNA, 19 nt, Artificial Sequence
  Description of Artificial Sequence: Synthetic oligonucleotide
  Sense strand starting at position 2744 of SEQ ID NO: 913326
aaaugagcccagugcauuu

SEQ ID NO: 918817 - RNA, 19 nt, Artificial Sequence
  Description of Artificial Sequence: Synthetic oligonucleotide
  Antisense strand to SEQ ID NO: 918816
aaaugcacugggcucauuu

SEQ ID NO: 918818 - RNA, 19 nt, Artificial Sequence
  Description of Artificial Sequence: Synthetic oligonucleotide
  Sense strand starting at position 2683 of SEQ ID NO: 913326
uagaauugacacugauggu

SEQ ID NO: 918819 - RNA, 19 nt, Artificial Sequence
  Description of Artificial Sequence: Synthetic oligonucleotide
  Antisense strand to SEQ ID NO: 918818
accaucagugucaauucua

SEQ ID NO: 918820 - RNA, 19 nt, Artificial Sequence
  Description of Artificial Sequence: Synthetic oligonucleotide
  Sense strand starting at position 3122 of SEQ ID NO: 913326
gugacuggcacagacauua

SEQ ID NO: 918821 - RNA, 19 nt, Artificial Sequence
  Description of Artificial Sequence: Synthetic oligonucleotide
  Antisense strand to SEQ ID NO: 918820
uaaugucugugccagucac

SEQ ID NO: 918822 - RNA, 19 nt, Artificial Sequence
  Description of Artificial Sequence: Synthetic oligonucleotide
  Sense strand starting at position 1486 of SEQ ID NO: 913326
gguaucauuggcuaagaug

SEQ ID NO: 918823 - RNA, 19 nt, Artificial Sequence
  Description of Artificial Sequence: Synthetic oligonucleotide
  Antisense strand to SEQ ID NO: 918822
caucuuagccaaugauacc

SEQ ID NO: 918824 - RNA, 19 nt, Artificial Sequence
  Description of Artificial Sequence: Synthetic oligonucleotide
  Sense strand starting at position 1896 of SEQ ID NO: 913326
agaggaaucucuccuucug

SEQ ID NO: 918825 - RNA, 19 nt, Artificial Sequence
  Description of Artificial Sequence: Synthetic oligonucleotide
  Antisense strand to SEQ ID NO: 918824
cagaaggagagauuccucu

SEQ ID NO: 918826 - RNA, 19 nt, Artificial Sequence
  Description of Artificial Sequence: Synthetic oligonucleotide
  Sense strand starting at position 723 of SEQ ID NO: 913326
gggaucaaucucuguggga

SEQ ID NO: 918827 - RNA, 19 nt, Artificial Sequence
  Description of Artificial Sequence: Synthetic oligonucleotide
  Antisense strand to SEQ ID NO: 918826
ucccacagagauugauccc

SEQ ID NO: 918828 - RNA, 19 nt, Artificial Sequence
  Description of Artificial Sequence: Synthetic oligonucleotide
  Sense strand starting at position 2133 of SEQ ID NO: 913326
guggucucccuagauuaaa

SEQ ID NO: 918829 - RNA, 19 nt, Artificial Sequence
  Description of Artificial Sequence: Synthetic oligonucleotide
  Antisense strand to SEQ ID NO: 918828
uuuaaucuagggagaccac

SEQ ID NO: 918830 - RNA, 19 nt, Artificial Sequence
  Description of Artificial Sequence: Synthetic oligonucleotide
  Sense strand starting at position 724 of SEQ ID NO: 913326
ggaucaaucucugugggac

SEQ ID NO: 918831 - RNA, 19 nt, Artificial Sequence
  Description of Artificial Sequence: Synthetic oligonucleotide
  Antisense strand to SEQ ID NO: 918830
gucccacagagauugaucc

SEQ ID NO: 918832 - RNA, 19 nt, Artificial Sequence
  Description of Artificial Sequence: Synthetic oligonucleotide
  Sense strand starting at position 1639 of SEQ ID NO: 913326
uccagaguucuccauccca

SEQ ID NO: 918833 - RNA, 19 nt, Artificial Sequence
  Description of Artificial Sequence: Synthetic oligonucleotide
  Antisense strand to SEQ ID NO: 918832
ugggauggagaacucugga

SEQ ID NO: 918834 - RNA, 19 nt, Artificial Sequence
  Description of Artificial Sequence: Synthetic oligonucleotide
  Sense strand starting at position 1629 of SEQ ID NO: 913326
cuuuauccacuccagaguu

SEQ ID NO: 918835 - RNA, 19 nt, Artificial Sequence
  Description of Artificial Sequence: Synthetic oligonucleotide
  Antisense strand to SEQ ID NO: 918834
aacucuggaguggauaaag

SEQ ID NO: 918836 - RNA, 19 nt, Artificial Sequence
  Description of Artificial Sequence: Synthetic oligonucleotide
  Sense strand starting at position 3722 of SEQ ID NO: 913326
ggaguuaaggcucaaguug

SEQ ID NO: 918837 - RNA, 19 nt, Artificial Sequence
  Description of Artificial Sequence: Synthetic oligonucleotide
  Antisense strand to SEQ ID NO: 918836
caacuugagccuuaacucc

SEQ ID NO: 918838 - RNA, 19 nt, Artificial Sequence
  Description of Artificial Sequence: Synthetic oligonucleotide
  Sense strand starting at position 470 of SEQ ID NO: 913326
acuggaucuuagucugaug

SEQ ID NO: 918839 - RNA, 19 nt, Artificial Sequence
  Description of Artificial Sequence: Synthetic oligonucleotide
  Antisense strand to SEQ ID NO: 918838
caucagacuaagauccagu

SEQ ID NO: 918840 - RNA, 19 nt, Artificial Sequence
  Description of Artificial Sequence: Synthetic oligonucleotide
  Sense strand starting at position 748 of SEQ ID NO: 913326
cuuugaaucgaaggcagaa

SEQ ID NO: 918841 - RNA, 19 nt, Artificial Sequence
  Description of Artificial Sequence: Synthetic oligonucleotide
  Antisense strand to SEQ ID NO: 918840
uucugccuucgauucaaag

SEQ ID NO: 918842 - RNA, 19 nt, Artificial Sequence
  Description of Artificial Sequence: Synthetic oligonucleotide
  Sense strand starting at position 1521 of SEQ ID NO: 913326
aauagagcgaucggaaaug

SEQ ID NO: 918843 - RNA, 19 nt, Artificial Sequence
  Description of Artificial Sequence: Synthetic oligonucleotide
  Antisense strand to SEQ ID NO: 918842
cauuuccgaucgcucuauu

SEQ ID NO: 918844 - RNA, 19 nt, Artificial Sequence
  Description of Artificial Sequence: Synthetic oligonucleotide
  Sense strand starting at position 2154 of SEQ ID NO: 913326
gccagagacacagguugau

SEQ ID NO: 918845 - RNA, 19 nt, Artificial Sequence
  Description of Artificial Sequence: Synthetic oligonucleotide
  Antisense strand to SEQ ID NO: 918844
aucaaccugugucucuggc

SEQ ID NO: 918846 - RNA, 19 nt, Artificial Sequence
  Description of Artificial Sequence: Synthetic oligonucleotide
  Sense strand starting at position 2677 of SEQ ID NO: 913326
acgagcuagaauugacacu

SEQ ID NO: 918847 - RNA, 19 nt, Artificial Sequence
  Description of Artificial Sequence: Synthetic oligonucleotide
  Antisense strand to SEQ ID NO: 918846
agugucaauucuagcucgu

SEQ ID NO: 918848 - RNA, 19 nt, Artificial Sequence
  Description of Artificial Sequence: Synthetic oligonucleotide
  Sense strand starting at position 2561 of SEQ ID NO: 913326
ggcuaacauugauccgaag

SEQ ID NO: 918849 - RNA, 19 nt, Artificial Sequence
  Description of Artificial Sequence: Synthetic oligonucleotide
  Antisense strand to SEQ ID NO: 918848
cuucggaucaauguuagcc

SEQ ID NO: 918850 - RNA, 19 nt, Artificial Sequence
  Description of Artificial Sequence: Synthetic oligonucleotide
  Sense strand starting at position 3633 of SEQ ID NO: 913326
cgccgagggcgaaguaauu

SEQ ID NO: 918851 - RNA, 19 nt, Artificial Sequence
  Description of Artificial Sequence: Synthetic oligonucleotide
  Antisense strand to SEQ ID NO: 918850
aauuacuucgcccucggcg

SEQ ID NO: 918852 - RNA, 19 nt, Artificial Sequence
  Description of Artificial Sequence: Synthetic oligonucleotide
  Sense strand starting at position 604 of SEQ ID NO: 913326
uuguaauaugccuaagguc

SEQ ID NO: 918853 - RNA, 19 nt, Artificial Sequence
  Description of Artificial Sequence: Synthetic oligonucleotide
  Antisense strand to SEQ ID NO: 918852
gaccuuaggcauauuacaa

SEQ ID NO: 918854 - RNA, 19 nt, Artificial Sequence
  Description of Artificial Sequence: Synthetic oligonucleotide
  Sense strand starting at position 3862 of SEQ ID NO: 913326
aacuguaaacguggugaaa

SEQ ID NO: 918855 - RNA, 19 nt, Artificial Sequence
  Description of Artificial Sequence: Synthetic oligonucleotide
  Antisense strand to SEQ ID NO: 918854
uuucaccacguuuacaguu

SEQ ID NO: 918856 - RNA, 19 nt, Artificial Sequence
  Description of Artificial Sequence: Synthetic oligonucleotide
  Sense strand starting at position 2907 of SEQ ID NO: 913326
uuuaaauccuaguuagcag

SEQ ID NO: 918857 - RNA, 19 nt, Artificial Sequence
  Description of Artificial Sequence: Synthetic oligonucleotide
  Antisense strand to SEQ ID NO: 918856
cugcuaacuaggauuuaaa

SEQ ID NO: 918858 - RNA, 19 nt, Artificial Sequence
  Description of Artificial Sequence: Synthetic oligonucleotide
  Sense strand starting at position 2163 of SEQ ID NO: 913326
acagguugauggucauguu

SEQ ID NO: 918859 - RNA, 19 nt, Artificial Sequence
  Description of Artificial Sequence: Synthetic oligonucleotide
  Antisense strand to SEQ ID NO: 918858
aacaugaccaucaaccugu

SEQ ID NO: 918860 - RNA, 19 nt, Artificial Sequence
  Description of Artificial Sequence: Synthetic oligonucleotide
  Sense strand starting at position 603 of SEQ ID NO: 913326
auuguaauaugccuaaggu

SEQ ID NO: 918861 - RNA, 19 nt, Artificial Sequence
  Description of Artificial Sequence: Synthetic oligonucleotide
  Antisense strand to SEQ ID NO: 918860
accuuaggcauauuacaau

SEQ ID NO: 918862 - RNA, 19 nt, Artificial Sequence
  Description of Artificial Sequence: Synthetic oligonucleotide
  Sense strand starting at position 1485 of SEQ ID NO: 913326
cgguaucauuggcuaagau

SEQ ID NO: 918863 - RNA, 19 nt, Artificial Sequence
  Description of Artificial Sequence: Synthetic oligonucleotide
  Antisense strand to SEQ ID NO: 918862
aucuuagccaaugauaccg

SEQ ID NO: 918864 - RNA, 19 nt, Artificial Sequence
  Description of Artificial Sequence: Synthetic oligonucleotide
  Sense strand starting at position 344 of SEQ ID NO: 913326
cugucucauugagcucaau

SEQ ID NO: 918865 - RNA, 19 nt, Artificial Sequence
  Description of Artificial Sequence: Synthetic oligonucleotide
  Antisense strand to SEQ ID NO: 918864
auugagcucaaugagacag

SEQ ID NO: 918866 - RNA, 19 nt, Artificial Sequence
  Description of Artificial Sequence: Synthetic oligonucleotide
  Sense strand starting at position 3141 of SEQ ID NO: 913326
gccaaugggugcuuggaua

SEQ ID NO: 918867 - RNA, 19 nt, Artificial Sequence
  Description of Artificial Sequence: Synthetic oligonucleotide
  Antisense strand to SEQ ID NO: 918866
uauccaagcacccauuggc

SEQ ID NO: 918868 - RNA, 19 nt, Artificial Sequence
  Description of Artificial Sequence: Synthetic oligonucleotide
  Sense strand starting at position 2225 of SEQ ID NO: 913326
ugcugagguauguagucuu

SEQ ID NO: 918869 - RNA, 19 nt, Artificial Sequence
  Description of Artificial Sequence: Synthetic oligonucleotide
  Antisense strand to SEQ ID NO: 918868
aagacuacauaccucagca

SEQ ID NO: 918870 - RNA, 19 nt, Artificial Sequence
  Description of Artificial Sequence: Synthetic oligonucleotide
  Sense strand starting at position 2051 of SEQ ID NO: 913326
ggguuagcgaucuagcuug

SEQ ID NO: 918871 - RNA, 19 nt, Artificial Sequence
  Description of Artificial Sequence: Synthetic oligonucleotide
  Antisense strand to SEQ ID NO: 918870
caagcuagaucgcuaaccc

SEQ ID NO: 918872 - RNA, 19 nt, Artificial Sequence
  Description of Artificial Sequence: Synthetic oligonucleotide
  Sense strand starting at position 2005 of SEQ ID NO: 913326
cgaccucgccucugaagaa

SEQ ID NO: 918873 - RNA, 19 nt, Artificial Sequence
  Description of Artificial Sequence: Synthetic oligonucleotide
  Antisense strand to SEQ ID NO: 918872
uucuucagaggcgaggucg

SEQ ID NO: 918874 - RNA, 19 nt, Artificial Sequence
  Description of Artificial Sequence: Synthetic oligonucleotide
  Sense strand starting at position 1092 of SEQ ID NO: 913326
guaagaacuaggcguucca

SEQ ID NO: 918875 - RNA, 19 nt, Artificial Sequence
  Description of Artificial Sequence: Synthetic oligonucleotide
  Antisense strand to SEQ ID NO: 918874
uggaacgccuaguucuuac

SEQ ID NO: 918876 - RNA, 19 nt, Artificial Sequence
  Description of Artificial Sequence: Synthetic oligonucleotide
  Sense strand starting at position 2235 of SEQ ID NO: 913326
uguagucuucucgaguacu

SEQ ID NO: 918877 - RNA, 19 nt, Artificial Sequence
  Description of Artificial Sequence: Synthetic oligonucleotide
  Antisense strand to SEQ ID NO: 918876
aguacucgagaagacuaca

SEQ ID NO: 918878 - RNA, 19 nt, Artificial Sequence
  Description of Artificial Sequence: Synthetic oligonucleotide
  Sense strand starting at position 2238 of SEQ ID NO: 913326
agucuucucgaguacuugu

SEQ ID NO: 918879 - RNA, 19 nt, Artificial Sequence
  Description of Artificial Sequence: Synthetic oligonucleotide
  Antisense strand to SEQ ID NO: 918878
acaaguacucgagaagacu

SEQ ID NO: 918880 - RNA, 19 nt, Artificial Sequence
  Description of Artificial Sequence: Synthetic oligonucleotide
  Sense strand starting at position 879 of SEQ ID NO: 913326
cggauaaaguacuggauuu

SEQ ID NO: 918881 - RNA, 19 nt, Artificial Sequence
  Description of Artificial Sequence: Synthetic oligonucleotide
  Antisense strand to SEQ ID NO: 918880
aaauccaguacuuuauccg

SEQ ID NO: 918882 - RNA, 19 nt, Artificial Sequence
  Description of Artificial Sequence: Synthetic oligonucleotide
  Sense strand starting at position 1868 of SEQ ID NO: 913326
uggcgaucacaucguagga

SEQ ID NO: 918883 - RNA, 19 nt, Artificial Sequence
  Description of Artificial Sequence: Synthetic oligonucleotide
  Antisense strand to SEQ ID NO: 918882
uccuacgaugugaucgcca

SEQ ID NO: 918884 - RNA, 19 nt, Artificial Sequence
  Description of Artificial Sequence: Synthetic oligonucleotide
  Sense strand starting at position 2077 of SEQ ID NO: 913326
gcccgccuaguuuaagauu

SEQ ID NO: 918885 - RNA, 19 nt, Artificial Sequence
  Description of Artificial Sequence: Synthetic oligonucleotide
  Antisense strand to SEQ ID NO: 918884
aaucuuaaacuaggcgggc

SEQ ID NO: 918886 - RNA, 19 nt, Artificial Sequence
  Description of Artificial Sequence: Synthetic oligonucleotide
  Sense strand starting at position 1484 of SEQ ID NO: 913326
gcgguaucauuggcuaaga

SEQ ID NO: 918887 - RNA, 19 nt, Artificial Sequence
  Description of Artificial Sequence: Synthetic oligonucleotide
  Antisense strand to SEQ ID NO: 918886
ucuuagccaaugauaccgc

SEQ ID NO: 918888 - RNA, 19 nt, Artificial Sequence
  Description of Artificial Sequence: Synthetic oligonucleotide
  Sense strand starting at position 3643 of SEQ ID NO: 913326
gaaguaauuugugggaggu

SEQ ID NO: 918889 - RNA, 19 nt, Artificial Sequence
  Description of Artificial Sequence: Synthetic oligonucleotide
  Antisense strand to SEQ ID NO: 918888
accucccacaaauuacuuc

SEQ ID NO: 918890 - RNA, 19 nt, Artificial Sequence
  Description of Artificial Sequence: Synthetic oligonucleotide
  Sense strand starting at position 2651 of SEQ ID NO: 913326
gcucgaguaucucuuuaau

SEQ ID NO: 918891 - RNA, 19 nt, Artificial Sequence
  Description of Artificial Sequence: Synthetic oligonucleotide
  Antisense strand to SEQ ID NO: 918890
auuaaagagauacucgagc

SEQ ID NO: 918892 - RNA, 19 nt, Artificial Sequence
  Description of Artificial Sequence: Synthetic oligonucleotide
  Sense strand starting at position 946 of SEQ ID NO: 913327
agguaagagagucaguuua

SEQ ID NO: 918893 - RNA, 19 nt, Artificial Sequence
  Description of Artificial Sequence: Synthetic oligonucleotide
  Antisense strand to SEQ ID NO: 918892
uaaacugacucucuuaccu

SEQ ID NO: 918894 - RNA, 19 nt, Artificial Sequence
  Description of Artificial Sequence: Synthetic oligonucleotide
  Sense strand starting at position 1199 of SEQ ID NO: 913327
cagagacaucugcaaaugu

SEQ ID NO: 918895 - RNA, 19 nt, Artificial Sequence
  Description of Artificial Sequence: Synthetic oligonucleotide
  Antisense strand to SEQ ID NO: 918894
acauuugcagaugucucug

SEQ ID NO: 918896 - RNA, 19 nt, Artificial Sequence
  Description of Artificial Sequence: Synthetic oligonucleotide
  Sense strand starting at position 3857 of SEQ ID NO: 913327
cggaguauugugcuaacgu

SEQ ID NO: 918897 - RNA, 19 nt, Artificial Sequence
  Description of Artificial Sequence: Synthetic oligonucleotide
  Antisense strand to SEQ ID NO: 918896
acguuagcacaauacuccg

SEQ ID NO: 918898 - RNA, 19 nt, Artificial Sequence
  Description of Artificial Sequence: Synthetic oligonucleotide
  Sense strand starting at position 2742 of SEQ ID NO: 913327
cagaaauggcuggagcuau

SEQ ID NO: 918899 - RNA, 19 nt, Artificial Sequence
  Description of Artificial Sequence: Synthetic oligonucleotide
  Antisense strand to SEQ ID NO: 918898
auagcuccagccauuucug

SEQ ID NO: 918900 - RNA, 19 nt, Artificial Sequence
  Description of Artificial Sequence: Synthetic oligonucleotide
  Sense strand starting at position 3014 of SEQ ID NO: 913327
gcgguuauccagcauuuga

SEQ ID NO: 918901 - RNA, 19 nt, Artificial Sequence
  Description of Artificial Sequence: Synthetic oligonucleotide
  Antisense strand to SEQ ID NO: 918900
ucaaaugcuggauaaccgc

SEQ ID NO: 918902 - RNA, 19 nt, Artificial Sequence
  Description of Artificial Sequence: Synthetic oligonucleotide
  Sense strand starting at position 346 of SEQ ID NO: 913327
ugcuuugugcaaucuuugu

SEQ ID NO: 918903 - RNA, 19 nt, Artificial Sequence
  Description of Artificial Sequence: Synthetic oligonucleotide
  Antisense strand to SEQ ID NO: 918902
acaaagauugcacaaagca

SEQ ID NO: 918904 - RNA, 19 nt, Artificial Sequence
  Description of Artificial Sequence: Synthetic oligonucleotide
  Sense strand starting at position 1885 of SEQ ID NO: 913327
aagagcguuagugagagaa

SEQ ID NO: 918905 - RNA, 19 nt, Artificial Sequence
  Description of Artificial Sequence: Synthetic oligonucleotide
  Antisense strand to SEQ ID NO: 918904
uucucucacuaacgcucuu

SEQ ID NO: 918906 - RNA, 19 nt, Artificial Sequence
  Description of Artificial Sequence: Synthetic oligonucleotide
  Sense strand starting at position 351 of SEQ ID NO: 913327
ugugcaaucuuuguauuua

SEQ ID NO: 918907 - RNA, 19 nt, Artificial Sequence
  Description of Artificial Sequence: Synthetic oligonucleotide
  Antisense strand to SEQ ID NO: 918906
uaaauacaaagauugcaca

SEQ ID NO: 918908 - RNA, 19 nt, Artificial Sequence
  Description of Artificial Sequence: Synthetic oligonucleotide
  Sense strand starting at position 3212 of SEQ ID NO: 913327
gccauaucucaguaccaga

SEQ ID NO: 918909 - RNA, 19 nt, Artificial Sequence
  Description of Artificial Sequence: Synthetic oligonucleotide
  Antisense strand to SEQ ID NO: 918908
ucugguacugagauauggc

SEQ ID NO: 918910 - RNA, 19 nt, Artificial Sequence
  Description of Artificial Sequence: Synthetic oligonucleotide
  Sense strand starting at position 2786 of SEQ ID NO: 913327
ggguuaccaugauucccaa

SEQ ID NO: 918911 - RNA, 19 nt, Artificial Sequence
  Description of Artificial Sequence: Synthetic oligonucleotide
  Antisense strand to SEQ ID NO: 918910
uugggaaucaugguaaccc

SEQ ID NO: 918912 - RNA, 19 nt, Artificial Sequence
  Description of Artificial Sequence: Synthetic oligonucleotide
  Sense strand starting at position 2568 of SEQ ID NO: 913327
gaaugagacucuccaggcu

SEQ ID NO: 918913 - RNA, 19 nt, Artificial Sequence
  Description of Artificial Sequence: Synthetic oligonucleotide
  Antisense strand to SEQ ID NO: 918912
agccuggagagucucauuc

SEQ ID NO: 918914 - RNA, 19 nt, Artificial Sequence
  Description of Artificial Sequence: Synthetic oligonucleotide
  Sense strand starting at position 148 of SEQ ID NO: 913327
ucucuuuauguguacaaag

SEQ ID NO: 918915 - RNA, 19 nt, Artificial Sequence
  Description of Artificial Sequence: Synthetic oligonucleotide
  Antisense strand to SEQ ID NO: 918914
cuuuguacacauaaagaga

SEQ ID NO: 918916 - RNA, 19 nt, Artificial Sequence
  Description of Artificial Sequence: Synthetic oligonucleotide
  Sense strand starting at position 509 of SEQ ID NO: 913327
cgugauuuaggccaguugu

SEQ ID NO: 918917 - RNA, 19 nt, Artificial Sequence
  Description of Artificial Sequence: Synthetic oligonucleotide
  Antisense strand to SEQ ID NO: 918916
acaacuggccuaaaucacg

SEQ ID NO: 918918 - RNA, 19 nt, Artificial Sequence
  Description of Artificial Sequence: Synthetic oligonucleotide
  Sense strand starting at position 2741 of SEQ ID NO: 913327
acagaaauggcuggagcua

SEQ ID NO: 918919 - RNA, 19 nt, Artificial Sequence
  Description of Artificial Sequence: Synthetic oligonucleotide
  Antisense strand to SEQ ID NO: 918918
uagcuccagccauuucugu

SEQ ID NO: 918920 - RNA, 19 nt, Artificial Sequence
  Description of Artificial Sequence: Synthetic oligonucleotide
  Sense strand starting at position 858 of SEQ ID NO: 913327
ggagaauuccgcuaaaguu

SEQ ID NO: 918921 - RNA, 19 nt, Artificial Sequence
  Description of Artificial Sequence: Synthetic oligonucleotide
  Antisense strand to SEQ ID NO: 918920
aacuuuagcggaauucucc

SEQ ID NO: 918922 - RNA, 19 nt, Artificial Sequence
  Description of Artificial Sequence: Synthetic oligonucleotide
  Sense strand starting at position 3333 of SEQ ID NO: 913327
gagcaacccuauguuagaa

SEQ ID NO: 918923 - RNA, 19 nt, Artificial Sequence
  Description of Artificial Sequence: Synthetic oligonucleotide
  Antisense strand to SEQ ID NO: 918922
uucuaacauaggguugcuc

SEQ ID NO: 918924 - RNA, 19 nt, Artificial Sequence
  Description of Artificial Sequence: Synthetic oligonucleotide
  Sense strand starting at position 1945 of SEQ ID NO: 913327
cuuauuaccgcggaacaaa

SEQ ID NO: 918925 - RNA, 19 nt, Artificial Sequence
  Description of Artificial Sequence: Synthetic oligonucleotide
  Antisense strand to SEQ ID NO: 918924
uuuguuccgcgguaauaag

SEQ ID NO: 918926 - RNA, 19 nt, Artificial Sequence
  Description of Artificial Sequence: Synthetic oligonucleotide
  Sense strand starting at position 350 of SEQ ID NO: 913327
uugugcaaucuuuguauuu

SEQ ID NO: 918927 - RNA, 19 nt, Artificial Sequence
  Description of Artificial Sequence: Synthetic oligonucleotide
  Antisense strand to SEQ ID NO: 918926
aaauacaaagauugcacaa

SEQ ID NO: 918928 - RNA, 19 nt, Artificial Sequence
  Description of Artificial Sequence: Synthetic oligonucleotide
  Sense strand starting at position 3932 of SEQ ID NO: 913327
agcauagagauguagcuuu

SEQ ID NO: 918929 - RNA, 19 nt, Artificial Sequence
  Description of Artificial Sequence: Synthetic oligonucleotide
  Antisense strand to SEQ ID NO: 918928
aaagcuacaucucuaugcu

SEQ ID NO: 918930 - RNA, 19 nt, Artificial Sequence
  Description of Artificial Sequence: Synthetic oligonucleotide
  Sense strand starting at position 1208 of SEQ ID NO: 913327
cugcaaaugucacccaaga

SEQ ID NO: 918931 - RNA, 19 nt, Artificial Sequence
  Description of Artificial Sequence: Synthetic oligonucleotide
  Antisense strand to SEQ ID NO: 918930
ucuugggugacauuugcag

SEQ ID NO: 918932 - RNA, 19 nt, Artificial Sequence
  Description of Artificial Sequence: Synthetic oligonucleotide
  Sense strand starting at position 948 of SEQ ID NO: 913327
guaagagagucaguuuaug

SEQ ID NO: 918933 - RNA, 19 nt, Artificial Sequence
  Description of Artificial Sequence: Synthetic oligonucleotide
  Antisense strand to SEQ ID NO: 918932
cauaaacugacucucuuac

SEQ ID NO: 918934 - RNA, 19 nt, Artificial Sequence
  Description of Artificial Sequence: Synthetic oligonucleotide
  Sense strand starting at position 1121 of SEQ ID NO: 913327
ggauauucacugcgggaua

SEQ ID NO: 918935 - RNA, 19 nt, Artificial Sequence
  Description of Artificial Sequence: Synthetic oligonucleotide
  Antisense strand to SEQ ID NO: 918934
uaucccgcagugaauaucc

SEQ ID NO: 918936 - RNA, 19 nt, Artificial Sequence
  Description of Artificial Sequence: Synthetic oligonucleotide
  Sense strand starting at position 150 of SEQ ID NO: 913327
ucuuuauguguacaaagca

SEQ ID NO: 918937 - RNA, 19 nt, Artificial Sequence
  Description of Artificial Sequence: Synthetic oligonucleotide
  Antisense strand to SEQ ID NO: 918936
ugcuuuguacacauaaaga

SEQ ID NO: 918938 - RNA, 19 nt, Artificial Sequence
  Description of Artificial Sequence: Synthetic oligonucleotide
  Sense strand starting at position 498 of SEQ ID NO: 913327
ugguaacgguucgugauuu

SEQ ID NO: 918939 - RNA, 19 nt, Artificial Sequence
  Description of Artificial Sequence: Synthetic oligonucleotide
  Antisense strand to SEQ ID NO: 918938
aaaucacgaaccguuacca

SEQ ID NO: 918940 - RNA, 19 nt, Artificial Sequence
  Description of Artificial Sequence: Synthetic oligonucleotide
  Sense strand starting at position 3850 of SEQ ID NO: 913327
guauaaucggaguauugug

SEQ ID NO: 918941 - RNA, 19 nt, Artificial Sequence
  Description of Artificial Sequence: Synthetic oligonucleotide
  Antisense strand to SEQ ID NO: 918940
cacaauacuccgauuauac

SEQ ID NO: 918942 - RNA, 19 nt, Artificial Sequence
  Description of Artificial Sequence: Synthetic oligonucleotide
  Sense strand starting at position 3332 of SEQ ID NO: 913327
ugagcaacccuauguuaga

SEQ ID NO: 918943 - RNA, 19 nt, Artificial Sequence
  Description of Artificial Sequence: Synthetic oligonucleotide
  Antisense strand to SEQ ID NO: 918942
ucuaacauaggguugcuca

SEQ ID NO: 918944 - RNA, 19 nt, Artificial Sequence
  Description of Artificial Sequence: Synthetic oligonucleotide
  Sense strand starting at position 138 of SEQ ID NO: 913327
ucaguagacuucucuuuau

SEQ ID NO: 918945 - RNA, 19 nt, Artificial Sequence
  Description of Artificial Sequence: Synthetic oligonucleotide
  Antisense strand to SEQ ID NO: 918944
auaaagagaagucuacuga

SEQ ID NO: 918946 - RNA, 19 nt, Artificial Sequence
  Description of Artificial Sequence: Synthetic oligonucleotide
  Sense strand starting at position 3733 of SEQ ID NO: 913327
guggaaauguagguccauu

SEQ ID NO: 918947 - RNA, 19 nt, Artificial Sequence
  Description of Artificial Sequence: Synthetic oligonucleotide
  Antisense strand to SEQ ID NO: 918946
aauggaccuacauuuccac

SEQ ID NO: 918948 - RNA, 19 nt, Artificial Sequence
  Description of Artificial Sequence: Synthetic oligonucleotide
  Sense strand starting at position 80 of SEQ ID NO: 913327
ucccauuauuagcuggauu

SEQ ID NO: 918949 - RNA, 19 nt, Artificial Sequence
  Description of Artificial Sequence: Synthetic oligonucleotide
  Antisense strand to SEQ ID NO: 918948
aauccagcuaauaauggga

SEQ ID NO: 918950 - RNA, 19 nt, Artificial Sequence
  Description of Artificial Sequence: Synthetic oligonucleotide
  Sense strand starting at position 2429 of SEQ ID NO: 913327
gauagauuggcucacguuu

SEQ ID NO: 918951 - RNA, 19 nt, Artificial Sequence
  Description of Artificial Sequence: Synthetic oligonucleotide
  Antisense strand to SEQ ID NO: 918950
aaacgugagccaaucuauc

SEQ ID NO: 918952 - RNA, 19 nt, Artificial Sequence
  Description of Artificial Sequence: Synthetic oligonucleotide
  Sense strand starting at position 1902 of SEQ ID NO: 913327
aaggcaggccugugaaaug

SEQ ID NO: 918953 - RNA, 19 nt, Artificial Sequence
  Description of Artificial Sequence: Synthetic oligonucleotide
  Antisense strand to SEQ ID NO: 918952
cauuucacaggccugccuu

SEQ ID NO: 918954 - RNA, 19 nt, Artificial Sequence
  Description of Artificial Sequence: Synthetic oligonucleotide
  Sense strand starting at position 3732 of SEQ ID NO: 913327
uguggaaauguagguccau

SEQ ID NO: 918955 - RNA, 19 nt, Artificial Sequence
  Description of Artificial Sequence: Synthetic oligonucleotide
  Antisense strand to SEQ ID NO: 918954
auggaccuacauuuccaca

SEQ ID NO: 918956 - RNA, 19 nt, Artificial Sequence
  Description of Artificial Sequence: Synthetic oligonucleotide
  Sense strand starting at position 1173 of SEQ ID NO: 913327
gagugacacguguaaaugu

SEQ ID NO: 918957 - RNA, 19 nt, Artificial Sequence
  Description of Artificial Sequence: Synthetic oligonucleotide
  Antisense strand to SEQ ID NO: 918956
acauuuacacgugucacuc

SEQ ID NO: 918958 - RNA, 19 nt, Artificial Sequence
  Description of Artificial Sequence: Synthetic oligonucleotide
  Sense strand starting at position 3462 of SEQ ID NO: 913327
aaugauuaggcuuguuuac

SEQ ID NO: 918959 - RNA, 19 nt, Artificial Sequence
  Description of Artificial Sequence: Synthetic oligonucleotide
  Antisense strand to SEQ ID NO: 918958
guaaacaagccuaaucauu

SEQ ID NO: 918960 - RNA, 19 nt, Artificial Sequence
  Description of Artificial Sequence: Synthetic oligonucleotide
  Sense strand starting at position 1162 of SEQ ID NO: 913327
cgcaucgucccgagugaca

SEQ ID NO: 918961 - RNA, 19 nt, Artificial Sequence
  Description of Artificial Sequence: Synthetic oligonucleotide
  Antisense strand to SEQ ID NO: 918960
ugucacucgggacgaugcg

SEQ ID NO: 918962 - RNA, 19 nt, Artificial Sequence
  Description of Artificial Sequence: Synthetic oligonucleotide
  Sense strand starting at position 147 of SEQ ID NO: 913327
uucucuuuauguguacaaa

SEQ ID NO: 918963 - RNA, 19 nt, Artificial Sequence
  Description of Artificial Sequence: Synthetic oligonucleotide
  Antisense strand to SEQ ID NO: 918962
uuuguacacauaaagagaa

SEQ ID NO: 918964 - RNA, 19 nt, Artificial Sequence
  Description of Artificial Sequence: Synthetic oligonucleotide
  Sense strand starting at position 775 of SEQ ID NO: 913327
acguuaaacuaaguaaguu

SEQ ID NO: 918965 - RNA, 19 nt, Artificial Sequence
  Description of Artificial Sequence: Synthetic oligonucleotide
  Antisense strand to SEQ ID NO: 918964
aacuuacuuaguuuaacgu

SEQ ID NO: 918966 - RNA, 19 nt, Artificial Sequence
  Description of Artificial Sequence: Synthetic oligonucleotide
  Sense strand starting at position 3433 of SEQ ID NO: 913327
gugugagcuaguuacuuaa

SEQ ID NO: 918967 - RNA, 19 nt, Artificial Sequence
  Description of Artificial Sequence: Synthetic oligonucleotide
  Antisense strand to SEQ ID NO: 918966
uuaaguaacuagcucacac

SEQ ID NO: 918968 - RNA, 19 nt, Artificial Sequence
  Description of Artificial Sequence: Synthetic oligonucleotide
  Sense strand starting at position 3468 of SEQ ID NO: 913327
uaggcuuguuuacugauau

SEQ ID NO: 918969 - RNA, 19 nt, Artificial Sequence
  Description of Artificial Sequence: Synthetic oligonucleotide
  Antisense strand to SEQ ID NO: 918968
auaucaguaaacaagccua

SEQ ID NO: 918970 - RNA, 19 nt, Artificial Sequence
  Description of Artificial Sequence: Synthetic oligonucleotide
  Sense strand starting at position 3030 of SEQ ID NO: 913327
ugaggaagcugccuuccau

SEQ ID NO: 918971 - RNA, 19 nt, Artificial Sequence
  Description of Artificial Sequence: Synthetic oligonucleotide
  Antisense strand to SEQ ID NO: 918970
auggaaggcagcuuccuca

SEQ ID NO: 918972 - RNA, 19 nt, Artificial Sequence
  Description of Artificial Sequence: Synthetic oligonucleotide
  Sense strand starting at position 803 of SEQ ID NO: 913328
cagauagcucugggacaaa

SEQ ID NO: 918973 - RNA, 19 nt, Artificial Sequence
  Description of Artificial Sequence: Synthetic oligonucleotide
  Antisense strand to SEQ ID NO: 918972
uuugucccagagcuaucug

SEQ ID NO: 918974 - RNA, 19 nt, Artificial Sequence
  Description of Artificial Sequence: Synthetic oligonucleotide
  Sense strand starting at position 801 of SEQ ID NO: 913328
accagauagcucugggaca

SEQ ID NO: 918975 - RNA, 19 nt, Artificial Sequence
  Description of Artificial Sequence: Synthetic oligonucleotide
  Antisense strand to SEQ ID NO: 918974
ugucccagagcuaucuggu

SEQ ID NO: 918976 - RNA, 19 nt, Artificial Sequence
  Description of Artificial Sequence: Synthetic oligonucleotide
  Sense strand starting at position 1139 of SEQ ID NO: 913328
acuggaaacucccugguau

SEQ ID NO: 918977 - RNA, 19 nt, Artificial Sequence
  Description of Artificial Sequence: Synthetic oligonucleotide
  Antisense strand to SEQ ID NO: 918976
auaccagggaguuuccagu

SEQ ID NO: 918978 - RNA, 19 nt, Artificial Sequence
  Description of Artificial Sequence: Synthetic oligonucleotide
  Sense strand starting at position 2996 of SEQ ID NO: 913328
ggacguuauccugggagga

SEQ ID NO: 918979 - RNA, 19 nt, Artificial Sequence
  Description of Artificial Sequence: Synthetic oligonucleotide
  Antisense strand to SEQ ID NO: 918978
uccucccaggauaacgucc

SEQ ID NO: 918980 - RNA, 19 nt, Artificial Sequence
  Description of Artificial Sequence: Synthetic oligonucleotide
  Sense strand starting at position 1150 of SEQ ID NO: 913328
ccugguauccgagagcaga

SEQ ID NO: 918981 - RNA, 19 nt, Artificial Sequence
  Description of Artificial Sequence: Synthetic oligonucleotide
  Antisense strand to SEQ ID NO: 918980
ucugcucucggauaccagg

SEQ ID NO: 918982 - RNA, 19 nt, Artificial Sequence
  Description of Artificial Sequence: Synthetic oligonucleotide
  Sense strand starting at position 2997 of SEQ ID NO: 913328
gacguuauccugggaggac

SEQ ID NO: 918983 - RNA, 19 nt, Artificial Sequence
  Description of Artificial Sequence: Synthetic oligonucleotide
  Antisense strand to SEQ ID NO: 918982
guccucccaggauaacguc

SEQ ID NO: 918984 - RNA, 19 nt, Artificial Sequence
  Description of Artificial Sequence: Synthetic oligonucleotide
  Sense strand starting at position 1140 of SEQ ID NO: 913328
cuggaaacucccugguauc

SEQ ID NO: 918985 - RNA, 19 nt, Artificial Sequence
  Description of Artificial Sequence: Synthetic oligonucleotide
  Antisense strand to SEQ ID NO: 918984
gauaccagggaguuuccag

SEQ ID NO: 918986 - RNA, 19 nt, Artificial Sequence
  Description of Artificial Sequence: Synthetic oligonucleotide
  Sense strand starting at position 2885 of SEQ ID NO: 913328
ggaguccugccuggagaga

SEQ ID NO: 918987 - RNA, 19 nt, Artificial Sequence
  Description of Artificial Sequence: Synthetic oligonucleotide
  Antisense strand to SEQ ID NO: 918986
ucucuccaggcaggacucc

SEQ ID NO: 918988 - RNA, 19 nt, Artificial Sequence
  Description of Artificial Sequence: Synthetic oligonucleotide
  Sense strand starting at position 3312 of SEQ ID NO: 913328
gaccucauggugcaaguua

SEQ ID NO: 918989 - RNA, 19 nt, Artificial Sequence
  Description of Artificial Sequence: Synthetic oligonucleotide
  Antisense strand to SEQ ID NO: 918988
uaacuugcaccaugagguc

SEQ ID NO: 918990 - RNA, 19 nt, Artificial Sequence
  Description of Artificial Sequence: Synthetic oligonucleotide
  Sense strand starting at position 3736 of SEQ ID NO: 913328
ugauaaauguguuuacuca

SEQ ID NO: 918991 - RNA, 19 nt, Artificial Sequence
  Description of Artificial Sequence: Synthetic oligonucleotide
  Antisense strand to SEQ ID NO: 918990
ugaguaaacacauuuauca

SEQ ID NO: 918992 - RNA, 19 nt, Artificial Sequence
  Description of Artificial Sequence: Synthetic oligonucleotide
  Sense strand starting at position 1309 of SEQ ID NO: 913328
ccuaucugcccaggaaacu

SEQ ID NO: 918993 - RNA, 19 nt, Artificial Sequence
  Description of Artificial Sequence: Synthetic oligonucleotide
  Antisense strand to SEQ ID NO: 918992
aguuuccugggcagauagg

SEQ ID NO: 918994 - RNA, 19 nt, Artificial Sequence
  Description of Artificial Sequence: Synthetic oligonucleotide
  Sense strand starting at position 3258 of SEQ ID NO: 913328
gugacccuguuauuauaga

SEQ ID NO: 918995 - RNA, 19 nt, Artificial Sequence
  Description of Artificial Sequence: Synthetic oligonucleotide
  Antisense strand to SEQ ID NO: 918994
ucuauaauaacagggucac

SEQ ID NO: 918996 - RNA, 19 nt, Artificial Sequence
  Description of Artificial Sequence: Synthetic oligonucleotide
  Sense strand starting at position 197 of SEQ ID NO: 913328
aguuucuagcccugggaaa

SEQ ID NO: 918997 - RNA, 19 nt, Artificial Sequence
  Description of Artificial Sequence: Synthetic oligonucleotide
  Antisense strand to SEQ ID NO: 918996
uuucccagggcuagaaacu

SEQ ID NO: 918998 - RNA, 19 nt, Artificial Sequence
  Description of Artificial Sequence: Synthetic oligonucleotide
  Sense strand starting at position 2614 of SEQ ID NO: 913328
gcgugcuugcccuugguga

SEQ ID NO: 918999 - RNA, 19 nt, Artificial Sequence
  Description of Artificial Sequence: Synthetic oligonucleotide
  Antisense strand to SEQ ID NO: 918998
ucaccaagggcaagcacgc

SEQ ID NO: 919000 - RNA, 19 nt, Artificial Sequence
  Description of Artificial Sequence: Synthetic oligonucleotide
  Sense strand starting at position 198 of SEQ ID NO: 913328
guuucuagcccugggaaac

SEQ ID NO: 919001 - RNA, 19 nt, Artificial Sequence
  Description of Artificial Sequence: Synthetic oligonucleotide
  Antisense strand to SEQ ID NO: 919000
guuucccagggcuagaaac

SEQ ID NO: 919002 - RNA, 19 nt, Artificial Sequence
  Description of Artificial Sequence: Synthetic oligonucleotide
  Sense strand starting at position 3793 of SEQ ID NO: 913328
gguuuguggcuggagaguu

SEQ ID NO: 919003 - RNA, 19 nt, Artificial Sequence
  Description of Artificial Sequence: Synthetic oligonucleotide
  Antisense strand to SEQ ID NO: 919002
aacucuccagccacaaacc

SEQ ID NO: 919004 - RNA, 19 nt, Artificial Sequence
  Description of Artificial Sequence: Synthetic oligonucleotide
  Sense strand starting at position 270 of SEQ ID NO: 913328
cagcgucacuucucaaaga

SEQ ID NO: 919005 - RNA, 19 nt, Artificial Sequence
  Description of Artificial Sequence: Synthetic oligonucleotide
  Antisense strand to SEQ ID NO: 919004
ucuuugagaagugacgcug

SEQ ID NO: 919006 - RNA, 19 nt, Artificial Sequence
  Description of Artificial Sequence: Synthetic oligonucleotide
  Sense strand starting at position 3734 of SEQ ID NO: 913328
gcugauaaauguguuuacu

SEQ ID NO: 919007 - RNA, 19 nt, Artificial Sequence
  Description of Artificial Sequence: Synthetic oligonucleotide
  Antisense strand to SEQ ID NO: 919006
aguaaacacauuuaucagc

SEQ ID NO: 919008 - RNA, 19 nt, Artificial Sequence
  Description of Artificial Sequence: Synthetic oligonucleotide
  Sense strand starting at position 3723 of SEQ ID NO: 913328
cagcuuggguugcugauaa

SEQ ID NO: 919009 - RNA, 19 nt, Artificial Sequence
  Description of Artificial Sequence: Synthetic oligonucleotide
  Antisense strand to SEQ ID NO: 919008
uuaucagcaacccaagcug

SEQ ID NO: 919010 - RNA, 19 nt, Artificial Sequence
  Description of Artificial Sequence: Synthetic oligonucleotide
  Sense strand starting at position 3889 of SEQ ID NO: 913328
gcaggauccuguucuagcu

SEQ ID NO: 919011 - RNA, 19 nt, Artificial Sequence
  Description of Artificial Sequence: Synthetic oligonucleotide
  Antisense strand to SEQ ID NO: 919010
agcuagaacaggauccugc

SEQ ID NO: 919012 - RNA, 19 nt, Artificial Sequence
  Description of Artificial Sequence: Synthetic oligonucleotide
  Sense strand starting at position 3731 of SEQ ID NO: 913328
guugcugauaaauguguuu

SEQ ID NO: 919013 - RNA, 19 nt, Artificial Sequence
  Description of Artificial Sequence: Synthetic oligonucleotide
  Antisense strand to SEQ ID NO: 919012
aaacacauuuaucagcaac

SEQ ID NO: 919014 - RNA, 19 nt, Artificial Sequence
  Description of Artificial Sequence: Synthetic oligonucleotide
  Sense strand starting at position 3044 of SEQ ID NO: 913328
gagugaugcugucacauuu

SEQ ID NO: 919015 - RNA, 19 nt, Artificial Sequence
  Description of Artificial Sequence: Synthetic oligonucleotide
  Antisense strand to SEQ ID NO: 919014
aaaugugacagcaucacuc

SEQ ID NO: 919016 - RNA, 19 nt, Artificial Sequence
  Description of Artificial Sequence: Synthetic oligonucleotide
  Sense strand starting at position 3790 of SEQ ID NO: 913328
agcgguuuguggcuggaga

SEQ ID NO: 919017 - RNA, 19 nt, Artificial Sequence
  Description of Artificial Sequence: Synthetic oligonucleotide
  Antisense strand to SEQ ID NO: 919016
ucuccagccacaaaccgcu

SEQ ID NO: 919018 - RNA, 19 nt, Artificial Sequence
  Description of Artificial Sequence: Synthetic oligonucleotide
  Sense strand starting at position 3972 of SEQ ID NO: 913328
agcugaaggugacaacaau

SEQ ID NO: 919019 - RNA, 19 nt, Artificial Sequence
  Description of Artificial Sequence: Synthetic oligonucleotide
  Antisense strand to SEQ ID NO: 919018
auuguugucaccuucagcu

SEQ ID NO: 919020 - RNA, 19 nt, Artificial Sequence
  Description of Artificial Sequence: Synthetic oligonucleotide
  Sense strand starting at position 3792 of SEQ ID NO: 913328
cgguuuguggcuggagagu

SEQ ID NO: 919021 - RNA, 19 nt, Artificial Sequence
  Description of Artificial Sequence: Synthetic oligonucleotide
  Antisense strand to SEQ ID NO: 919020
acucuccagccacaaaccg

SEQ ID NO: 919022 - RNA, 19 nt, Artificial Sequence
  Description of Artificial Sequence: Synthetic oligonucleotide
  Sense strand starting at position 3259 of SEQ ID NO: 913328
ugacccuguuauuauagaa

SEQ ID NO: 919023 - RNA, 19 nt, Artificial Sequence
  Description of Artificial Sequence: Synthetic oligonucleotide
  Antisense strand to SEQ ID NO: 919022
uucuauaauaacaggguca

SEQ ID NO: 919024 - RNA, 19 nt, Artificial Sequence
  Description of Artificial Sequence: Synthetic oligonucleotide
  Sense strand starting at position 2998 of SEQ ID NO: 913328
acguuauccugggaggaca

SEQ ID NO: 919025 - RNA, 19 nt, Artificial Sequence
  Description of Artificial Sequence: Synthetic oligonucleotide
  Antisense strand to SEQ ID NO: 919024
uguccucccaggauaacgu

SEQ ID NO: 919026 - RNA, 19 nt, Artificial Sequence
  Description of Artificial Sequence: Synthetic oligonucleotide
  Sense strand starting at position 3834 of SEQ ID NO: 913328
cggugcucucagugaggca

SEQ ID NO: 919027 - RNA, 19 nt, Artificial Sequence
  Description of Artificial Sequence: Synthetic oligonucleotide
  Antisense strand to SEQ ID NO: 919026
ugccucacugagagcaccg

SEQ ID NO: 919028 - RNA, 19 nt, Artificial Sequence
  Description of Artificial Sequence: Synthetic oligonucleotide
  Sense strand starting at position 106 of SEQ ID NO: 913328
augcauaugccgugcacau

SEQ ID NO: 919029 - RNA, 19 nt, Artificial Sequence
  Description of Artificial Sequence: Synthetic oligonucleotide
  Antisense strand to SEQ ID NO: 919028
augugcacggcauaugcau

SEQ ID NO: 919030 - RNA, 19 nt, Artificial Sequence
  Description of Artificial Sequence: Synthetic oligonucleotide
  Sense strand starting at position 802 of SEQ ID NO: 913328
ccagauagcucugggacaa

SEQ ID NO: 919031 - RNA, 19 nt, Artificial Sequence
  Description of Artificial Sequence: Synthetic oligonucleotide
  Antisense strand to SEQ ID NO: 919030
uugucccagagcuaucugg

SEQ ID NO: 919032 - RNA, 19 nt, Artificial Sequence
  Description of Artificial Sequence: Synthetic oligonucleotide
  Sense strand starting at position 3256 of SEQ ID NO: 913328
aggugacccuguuauuaua

SEQ ID NO: 919033 - RNA, 19 nt, Artificial Sequence
  Description of Artificial Sequence: Synthetic oligonucleotide
  Antisense strand to SEQ ID NO: 919032
uauaauaacagggucaccu

SEQ ID NO: 919034 - RNA, 19 nt, Artificial Sequence
  Description of Artificial Sequence: Synthetic oligonucleotide
  Sense strand starting at position 1630 of SEQ ID NO: 913328
ggacuucccucucacaguu

SEQ ID NO: 919035 - RNA, 19 nt, Artificial Sequence
  Description of Artificial Sequence: Synthetic oligonucleotide
  Antisense strand to SEQ ID NO: 919034
aacugugagagggaagucc

SEQ ID NO: 919036 - RNA, 19 nt, Artificial Sequence
  Description of Artificial Sequence: Synthetic oligonucleotide
  Sense strand starting at position 1075 of SEQ ID NO: 913328
aucaucugaucgcaucuaa

SEQ ID NO: 919037 - RNA, 19 nt, Artificial Sequence
  Description of Artificial Sequence: Synthetic oligonucleotide
  Antisense strand to SEQ ID NO: 919036
uuagaugcgaucagaugau

SEQ ID NO: 919038 - RNA, 19 nt, Artificial Sequence
  Description of Artificial Sequence: Synthetic oligonucleotide
  Sense strand starting at position 3727 of SEQ ID NO: 913328
uuggguugcugauaaaugu

SEQ ID NO: 919039 - RNA, 19 nt, Artificial Sequence
  Description of Artificial Sequence: Synthetic oligonucleotide
  Antisense strand to SEQ ID NO: 919038
acauuuaucagcaacccaa

SEQ ID NO: 919040 - RNA, 19 nt, Artificial Sequence
  Description of Artificial Sequence: Synthetic oligonucleotide
  Sense strand starting at position 3743 of SEQ ID NO: 913328
uguguuuacucacaggcca

SEQ ID NO: 919041 - RNA, 19 nt, Artificial Sequence
  Description of Artificial Sequence: Synthetic oligonucleotide
  Antisense strand to SEQ ID NO: 919040
uggccugugaguaaacaca

SEQ ID NO: 919042 - RNA, 19 nt, Artificial Sequence
  Description of Artificial Sequence: Synthetic oligonucleotide
  Sense strand starting at position 3029 of SEQ ID NO: 913328
gaucuaagcuggcgugagu

SEQ ID NO: 919043 - RNA, 19 nt, Artificial Sequence
  Description of Artificial Sequence: Synthetic oligonucleotide
  Antisense strand to SEQ ID NO: 919042
acucacgccagcuuagauc

SEQ ID NO: 919044 - RNA, 19 nt, Artificial Sequence
  Description of Artificial Sequence: Synthetic oligonucleotide
  Sense strand starting at position 416 of SEQ ID NO: 913329
auuccuacacuuggaugaa

SEQ ID NO: 919045 - RNA, 19 nt, Artificial Sequence
  Description of Artificial Sequence: Synthetic oligonucleotide
  Antisense strand to SEQ ID NO: 919044
uucauccaaguguaggaau

SEQ ID NO: 919046 - RNA, 19 nt, Artificial Sequence
  Description of Artificial Sequence: Synthetic oligonucleotide
  Sense strand starting at position 1117 of SEQ ID NO: 913329
cacgucacugaugaaacau

SEQ ID NO: 919047 - RNA, 19 nt, Artificial Sequence
  Description of Artificial Sequence: Synthetic oligonucleotide
  Antisense strand to SEQ ID NO: 919046
auguuucaucagugacgug

SEQ ID NO: 919048 - RNA, 19 nt, Artificial Sequence
  Description of Artificial Sequence: Synthetic oligonucleotide
  Sense strand starting at position 913 of SEQ ID NO: 913329
cccacuugggcugaauuaa

SEQ ID NO: 919049 - RNA, 19 nt, Artificial Sequence
  Description of Artificial Sequence: Synthetic oligonucleotide
  Antisense strand to SEQ ID NO: 919048
uuaauucagcccaaguggg

SEQ ID NO: 919050 - RNA, 19 nt, Artificial Sequence
  Description of Artificial Sequence: Synthetic oligonucleotide
  Sense strand starting at position 2545 of SEQ ID NO: 913329
gcccaaagccgcuuucuau

SEQ ID NO: 919051 - RNA, 19 nt, Artificial Sequence
  Description of Artificial Sequence: Synthetic oligonucleotide
  Antisense strand to SEQ ID NO: 919050
auagaaagcggcuuugggc

SEQ ID NO: 919052 - RNA, 19 nt, Artificial Sequence
  Description of Artificial Sequence: Synthetic oligonucleotide
  Sense strand starting at position 3018 of SEQ ID NO: 913329
agaugagcacuugaugcua

SEQ ID NO: 919053 - RNA, 19 nt, Artificial Sequence
  Description of Artificial Sequence: Synthetic oligonucleotide
  Antisense strand to SEQ ID NO: 919052
uagcaucaagugcucaucu

SEQ ID NO: 919054 - RNA, 19 nt, Artificial Sequence
  Description of Artificial Sequence: Synthetic oligonucleotide
  Sense strand starting at position 400 of SEQ ID NO: 913329
cuuccugagcuccaggauu

SEQ ID NO: 919055 - RNA, 19 nt, Artificial Sequence
  Description of Artificial Sequence: Synthetic oligonucleotide
  Antisense strand to SEQ ID NO: 919054
aauccuggagcucaggaag

SEQ ID NO: 919056 - RNA, 19 nt, Artificial Sequence
  Description of Artificial Sequence: Synthetic oligonucleotide
  Sense strand starting at position 2902 of SEQ ID NO: 913329
ggguguuaacuacagcaca

SEQ ID NO: 919057 - RNA, 19 nt, Artificial Sequence
  Description of Artificial Sequence: Synthetic oligonucleotide
  Antisense strand to SEQ ID NO: 919056
ugugcuguaguuaacaccc

SEQ ID NO: 919058 - RNA, 19 nt, Artificial Sequence
  Description of Artificial Sequence: Synthetic oligonucleotide
  Sense strand starting at position 3622 of SEQ ID NO: 913329
gugugugagggaugacaga

SEQ ID NO: 919059 - RNA, 19 nt, Artificial Sequence
  Description of Artificial Sequence: Synthetic oligonucleotide
  Antisense strand to SEQ ID NO: 919058
ucugucaucccucacacac

SEQ ID NO: 919060 - RNA, 19 nt, Artificial Sequence
  Description of Artificial Sequence: Synthetic oligonucleotide
  Sense strand starting at position 3086 of SEQ ID NO: 913329
acagaagauccaugcucuu

SEQ ID NO: 919061 - RNA, 19 nt, Artificial Sequence
  Description of Artificial Sequence: Synthetic oligonucleotide
  Antisense strand to SEQ ID NO: 919060
aagagcauggaucuucugu

SEQ ID NO: 919062 - RNA, 19 nt, Artificial Sequence
  Description of Artificial Sequence: Synthetic oligonucleotide
  Sense strand starting at position 3934 of SEQ ID NO: 913329
aaagucauggcguaaggau

SEQ ID NO: 919063 - RNA, 19 nt, Artificial Sequence
  Description of Artificial Sequence: Synthetic oligonucleotide
  Antisense strand to SEQ ID NO: 919062
auccuuacgccaugacuuu

SEQ ID NO: 919064 - RNA, 19 nt, Artificial Sequence
  Description of Artificial Sequence: Synthetic oligonucleotide
  Sense strand starting at position 1357 of SEQ ID NO: 913329
cuggucuguaugcaagaga

SEQ ID NO: 919065 - RNA, 19 nt, Artificial Sequence
  Description of Artificial Sequence: Synthetic oligonucleotide
  Antisense strand to SEQ ID NO: 919064
ucucuugcauacagaccag

SEQ ID NO: 919066 - RNA, 19 nt, Artificial Sequence
  Description of Artificial Sequence: Synthetic oligonucleotide
  Sense strand starting at position 612 of SEQ ID NO: 913329
ggcagaucugcccaaacuc

SEQ ID NO: 919067 - RNA, 19 nt, Artificial Sequence
  Description of Artificial Sequence: Synthetic oligonucleotide
  Antisense strand to SEQ ID NO: 919066
gaguuugggcagaucugcc

SEQ ID NO: 919068 - RNA, 19 nt, Artificial Sequence
  Description of Artificial Sequence: Synthetic oligonucleotide
  Sense strand starting at position 3111 of SEQ ID NO: 913329
cucuguaaauauguaacua

SEQ ID NO: 919069 - RNA, 19 nt, Artificial Sequence
  Description of Artificial Sequence: Synthetic oligonucleotide
  Antisense strand to SEQ ID NO: 919068
uaguuacauauuuacagag

SEQ ID NO: 919070 - RNA, 19 nt, Artificial Sequence
  Description of Artificial Sequence: Synthetic oligonucleotide
  Sense strand starting at position 923 of SEQ ID NO: 913329
cugaauuaacugugagguc

SEQ ID NO: 919071 - RNA, 19 nt, Artificial Sequence
  Description of Artificial Sequence: Synthetic oligonucleotide
  Antisense strand to SEQ ID NO: 919070
gaccucacaguuaauucag

SEQ ID NO: 919072 - RNA, 19 nt, Artificial Sequence
  Description of Artificial Sequence: Synthetic oligonucleotide
  Sense strand starting at position 1680 of SEQ ID NO: 913329
gagacucgaugcucccaaa

SEQ ID NO: 919073 - RNA, 19 nt, Artificial Sequence
  Description of Artificial Sequence: Synthetic oligonucleotide
  Antisense strand to SEQ ID NO: 919072
uuugggagcaucgagucuc

SEQ ID NO: 919074 - RNA, 19 nt, Artificial Sequence
  Description of Artificial Sequence: Synthetic oligonucleotide
  Sense strand starting at position 2844 of SEQ ID NO: 913329
gucagacagcccugauuga

SEQ ID NO: 919075 - RNA, 19 nt, Artificial Sequence
  Description of Artificial Sequence: Synthetic oligonucleotide
  Antisense strand to SEQ ID NO: 919074
ucaaucagggcugucugac

SEQ ID NO: 919076 - RNA, 19 nt, Artificial Sequence
  Description of Artificial Sequence: Synthetic oligonucleotide
  Sense strand starting at position 1490 of SEQ ID NO: 913329
ccuuaugcuggguauguaa

SEQ ID NO: 919077 - RNA, 19 nt, Artificial Sequence
  Description of Artificial Sequence: Synthetic oligonucleotide
  Antisense strand to SEQ ID NO: 919076
uuacauacccagcauaagg

SEQ ID NO: 919078 - RNA, 19 nt, Artificial Sequence
  Description of Artificial Sequence: Synthetic oligonucleotide
  Sense strand starting at position 2891 of SEQ ID NO: 913329
aucugugaaauggguguua

SEQ ID NO: 919079 - RNA, 19 nt, Artificial Sequence
  Description of Artificial Sequence: Synthetic oligonucleotide
  Antisense strand to SEQ ID NO: 919078
uaacacccauuucacagau

SEQ ID NO: 919080 - RNA, 19 nt, Artificial Sequence
  Description of Artificial Sequence: Synthetic oligonucleotide
  Sense strand starting at position 2893 of SEQ ID NO: 913329
cugugaaauggguguuaac

SEQ ID NO: 919081 - RNA, 19 nt, Artificial Sequence
  Description of Artificial Sequence: Synthetic oligonucleotide
  Antisense strand to SEQ ID NO: 919080
guuaacacccauuucacag

SEQ ID NO: 919082 - RNA, 19 nt, Artificial Sequence
  Description of Artificial Sequence: Synthetic oligonucleotide
  Sense strand starting at position 429 of SEQ ID NO: 913329
gaugaaggguguucgggua

SEQ ID NO: 919083 - RNA, 19 nt, Artificial Sequence
  Description of Artificial Sequence: Synthetic oligonucleotide
  Antisense strand to SEQ ID NO: 919082
uacccgaacacccuucauc

SEQ ID NO: 919084 - RNA, 19 nt, Artificial Sequence
  Description of Artificial Sequence: Synthetic oligonucleotide
  Sense strand starting at position 1665 of SEQ ID NO: 913329
cgcugcucccgagaagaga

SEQ ID NO: 919085 - RNA, 19 nt, Artificial Sequence
  Description of Artificial Sequence: Synthetic oligonucleotide
  Antisense strand to SEQ ID NO: 919084
ucucuucucgggagcagcg

SEQ ID NO: 919086 - RNA, 19 nt, Artificial Sequence
  Description of Artificial Sequence: Synthetic oligonucleotide
  Sense strand starting at position 912 of SEQ ID NO: 913329
gcccacuugggcugaauua

SEQ ID NO: 919087 - RNA, 19 nt, Artificial Sequence
  Description of Artificial Sequence: Synthetic oligonucleotide
  Antisense strand to SEQ ID NO: 919086
uaauucagcccaagugggc

SEQ ID NO: 919088 - RNA, 19 nt, Artificial Sequence
  Description of Artificial Sequence: Synthetic oligonucleotide
  Sense strand starting at position 1368 of SEQ ID NO: 913329
gcaagagaccuguguccac

SEQ ID NO: 919089 - RNA, 19 nt, Artificial Sequence
  Description of Artificial Sequence: Synthetic oligonucleotide
  Antisense strand to SEQ ID NO: 919088
guggacacaggucucuugc

SEQ ID NO: 919090 - RNA, 19 nt, Artificial Sequence
  Description of Artificial Sequence: Synthetic oligonucleotide
  Sense strand starting at position 1414 of SEQ ID NO: 913329
aguggaaggauguguguuu

SEQ ID NO: 919091 - RNA, 19 nt, Artificial Sequence
  Description of Artificial Sequence: Synthetic oligonucleotide
  Antisense strand to SEQ ID NO: 919090
aaacacacauccuuccacu

SEQ ID NO: 919092 - RNA, 19 nt, Artificial Sequence
  Description of Artificial Sequence: Synthetic oligonucleotide
  Sense strand starting at position 1353 of SEQ ID NO: 913329
guaucuggucuguaugcaa

SEQ ID NO: 919093 - RNA, 19 nt, Artificial Sequence
  Description of Artificial Sequence: Synthetic oligonucleotide
  Antisense strand to SEQ ID NO: 919092
uugcauacagaccagauac

SEQ ID NO: 919094 - RNA, 19 nt, Artificial Sequence
  Description of Artificial Sequence: Synthetic oligonucleotide
  Sense strand starting at position 2779 of SEQ ID NO: 913329
acgacugaccuguguccua

SEQ ID NO: 919095 - RNA, 19 nt, Artificial Sequence
  Description of Artificial Sequence: Synthetic oligonucleotide
  Antisense strand to SEQ ID NO: 919094
uaggacacaggucagucgu

SEQ ID NO: 919096 - RNA, 19 nt, Artificial Sequence
  Description of Artificial Sequence: Synthetic oligonucleotide
  Sense strand starting at position 3003 of SEQ ID NO: 913329
aaccaagagucugagagau

SEQ ID NO: 919097 - RNA, 19 nt, Artificial Sequence
  Description of Artificial Sequence: Synthetic oligonucleotide
  Antisense strand to SEQ ID NO: 919096
aucucucagacucuugguu

SEQ ID NO: 919098 - RNA, 19 nt, Artificial Sequence
  Description of Artificial Sequence: Synthetic oligonucleotide
  Sense strand starting at position 1048 of SEQ ID NO: 913329
gugauucaugaaugcgagu

SEQ ID NO: 919099 - RNA, 19 nt, Artificial Sequence
  Description of Artificial Sequence: Synthetic oligonucleotide
  Antisense strand to SEQ ID NO: 919098
acucgcauucaugaaucac

SEQ ID NO: 919100 - RNA, 19 nt, Artificial Sequence
  Description of Artificial Sequence: Synthetic oligonucleotide
  Sense strand starting at position 3005 of SEQ ID NO: 913329
ccaagagucugagagauga

SEQ ID NO: 919101 - RNA, 19 nt, Artificial Sequence
  Description of Artificial Sequence: Synthetic oligonucleotide
  Antisense strand to SEQ ID NO: 919100
ucaucucucagacucuugg

SEQ ID NO: 919102 - RNA, 19 nt, Artificial Sequence
  Description of Artificial Sequence: Synthetic oligonucleotide
  Sense strand starting at position 788 of SEQ ID NO: 913329
uuuccaagguuagaaagaa

SEQ ID NO: 919103 - RNA, 19 nt, Artificial Sequence
  Description of Artificial Sequence: Synthetic oligonucleotide
  Antisense strand to SEQ ID NO: 919102
uucuuucuaaccuuggaaa

SEQ ID NO: 919104 - RNA, 19 nt, Artificial Sequence
  Description of Artificial Sequence: Synthetic oligonucleotide
  Sense strand starting at position 1349 of SEQ ID NO: 913329
gaguguaucuggucuguau

SEQ ID NO: 919105 - RNA, 19 nt, Artificial Sequence
  Description of Artificial Sequence: Synthetic oligonucleotide
  Antisense strand to SEQ ID NO: 919104
auacagaccagauacacuc

SEQ ID NO: 919106 - RNA, 19 nt, Artificial Sequence
  Description of Artificial Sequence: Synthetic oligonucleotide
  Sense strand starting at position 3026 of SEQ ID NO: 913329
acuugaugcuagucuugca

SEQ ID NO: 919107 - RNA, 19 nt, Artificial Sequence
  Description of Artificial Sequence: Synthetic oligonucleotide
  Antisense strand to SEQ ID NO: 919106
ugcaagacuagcaucaagu

SEQ ID NO: 919108 - RNA, 19 nt, Artificial Sequence
  Description of Artificial Sequence: Synthetic oligonucleotide
  Sense strand starting at position 737 of SEQ ID NO: 913329
gggcacgugucaaggagaa

SEQ ID NO: 919109 - RNA, 19 nt, Artificial Sequence
  Description of Artificial Sequence: Synthetic oligonucleotide
  Antisense strand to SEQ ID NO: 919108
uucuccuugacacgugccc

SEQ ID NO: 919110 - RNA, 19 nt, Artificial Sequence
  Description of Artificial Sequence: Synthetic oligonucleotide
  Sense strand starting at position 1663 of SEQ ID NO: 913329
ugcgcugcucccgagaaga

SEQ ID NO: 919111 - RNA, 19 nt, Artificial Sequence
  Description of Artificial Sequence: Synthetic oligonucleotide
  Antisense strand to SEQ ID NO: 919110
ucuucucgggagcagcgca

SEQ ID NO: 919112 - RNA, 19 nt, Artificial Sequence
  Description of Artificial Sequence: Synthetic oligonucleotide
  Sense strand starting at position 1489 of SEQ ID NO: 913329
gccuuaugcuggguaugua

SEQ ID NO: 919113 - RNA, 19 nt, Artificial Sequence
  Description of Artificial Sequence: Synthetic oligonucleotide
  Antisense strand to SEQ ID NO: 919112
uacauacccagcauaaggc

SEQ ID NO: 919114 - RNA, 19 nt, Artificial Sequence
  Description of Artificial Sequence: Synthetic oligonucleotide
  Sense strand starting at position 3034 of SEQ ID NO: 913329
cuagucuugcaaugguguu

SEQ ID NO: 919115 - RNA, 19 nt, Artificial Sequence
  Description of Artificial Sequence: Synthetic oligonucleotide
  Antisense strand to SEQ ID NO: 919114
aacaccauugcaagacuag

SEQ ID NO: 919116 - RNA, 19 nt, Artificial Sequence
  Description of Artificial Sequence: Synthetic oligonucleotide
  Sense strand starting at position 1425 of SEQ ID NO: 913329
guguguuucugugcaggag

SEQ ID NO: 919117 - RNA, 19 nt, Artificial Sequence
  Description of Artificial Sequence: Synthetic oligonucleotide
  Antisense strand to SEQ ID NO: 919116
cuccugcacagaaacacac

SEQ ID NO: 919118 - RNA, 19 nt, Artificial Sequence
  Description of Artificial Sequence: Synthetic oligonucleotide
  Sense strand starting at position 924 of SEQ ID NO: 913329
ugaauuaacugugagguca

SEQ ID NO: 919119 - RNA, 19 nt, Artificial Sequence
  Description of Artificial Sequence: Synthetic oligonucleotide
  Antisense strand to SEQ ID NO: 919118
ugaccucacaguuaauuca

SEQ ID NO: 919120 - RNA, 19 nt, Artificial Sequence
  Description of Artificial Sequence: Synthetic oligonucleotide
  Sense strand starting at position 3221 of SEQ ID NO: 913329
uggaaaugaugccaagguu

SEQ ID NO: 919121 - RNA, 19 nt, Artificial Sequence
  Description of Artificial Sequence: Synthetic oligonucleotide
  Antisense strand to SEQ ID NO: 919120
aaccuuggcaucauuucca

SEQ ID NO: 919122 - RNA, 19 nt, Artificial Sequence
  Description of Artificial Sequence: Synthetic oligonucleotide
  Sense strand starting at position 1421 of SEQ ID NO: 913329
ggauguguguuucugugca

SEQ ID NO: 919123 - RNA, 19 nt, Artificial Sequence
  Description of Artificial Sequence: Synthetic oligonucleotide
  Antisense strand to SEQ ID NO: 919122
ugcacagaaacacacaucc

SEQ ID NO: 919124 - RNA, 19 nt, Artificial Sequence
  Description of Artificial Sequence: Synthetic oligonucleotide
  Sense strand starting at position 3774 of SEQ ID NO: 913330
cuauuucuguaucugcaga

SEQ ID NO: 919125 - RNA, 19 nt, Artificial Sequence
  Description of Artificial Sequence: Synthetic oligonucleotide
  Antisense strand to SEQ ID NO: 919124
ucugcagauacagaaauag

SEQ ID NO: 919126 - RNA, 19 nt, Artificial Sequence
  Description of Artificial Sequence: Synthetic oligonucleotide
  Sense strand starting at position 354 of SEQ ID NO: 913330
ugacauuuaugccugcuga

SEQ ID NO: 919127 - RNA, 19 nt, Artificial Sequence
  Description of Artificial Sequence: Synthetic oligonucleotide
  Antisense strand to SEQ ID NO: 919126
ucagcaggcauaaauguca

SEQ ID NO: 919128 - RNA, 19 nt, Artificial Sequence
  Description of Artificial Sequence: Synthetic oligonucleotide
  Sense strand starting at position 2524 of SEQ ID NO: 913330
ggcauuuauuccucagagc

SEQ ID NO: 919129 - RNA, 19 nt, Artificial Sequence
  Description of Artificial Sequence: Synthetic oligonucleotide
  Antisense strand to SEQ ID NO: 919128
gcucugaggaauaaaugcc

SEQ ID NO: 919130 - RNA, 19 nt, Artificial Sequence
  Description of Artificial Sequence: Synthetic oligonucleotide
  Sense strand starting at position 450 of SEQ ID NO: 913330
gguagaaacuuaucuuagg

SEQ ID NO: 919131 - RNA, 19 nt, Artificial Sequence
  Description of Artificial Sequence: Synthetic oligonucleotide
  Antisense strand to SEQ ID NO: 919130
ccuaagauaaguuucuacc

SEQ ID NO: 919132 - RNA, 19 nt, Artificial Sequence
  Description of Artificial Sequence: Synthetic oligonucleotide
  Sense strand starting at position 355 of SEQ ID NO: 913330
gacauuuaugccugcugac

SEQ ID NO: 919133 - RNA, 19 nt, Artificial Sequence
  Description of Artificial Sequence: Synthetic oligonucleotide
  Antisense strand to SEQ ID NO: 919132
gucagcaggcauaaauguc

SEQ ID NO: 919134 - RNA, 19 nt, Artificial Sequence
  Description of Artificial Sequence: Synthetic oligonucleotide
  Sense strand starting at position 3422 of SEQ ID NO: 913330
gcaaauaauuuggaaggaa

SEQ ID NO: 919135 - RNA, 19 nt, Artificial Sequence
  Description of Artificial Sequence: Synthetic oligonucleotide
  Antisense strand to SEQ ID NO: 919134
uuccuuccaaauuauuugc

SEQ ID NO: 919136 - RNA, 19 nt, Artificial Sequence
  Description of Artificial Sequence: Synthetic oligonucleotide
  Sense strand starting at position 2897 of SEQ ID NO: 913330
agaaucugguaaucaucau

SEQ ID NO: 919137 - RNA, 19 nt, Artificial Sequence
  Description of Artificial Sequence: Synthetic oligonucleotide
  Antisense strand to SEQ ID NO: 919136
augaugauuaccagauucu

SEQ ID NO: 919138 - RNA, 19 nt, Artificial Sequence
  Description of Artificial Sequence: Synthetic oligonucleotide
  Sense strand starting at position 1050 of SEQ ID NO: 913330
cgacccaauguuuacaaau

SEQ ID NO: 919139 - RNA, 19 nt, Artificial Sequence
  Description of Artificial Sequence: Synthetic oligonucleotide
  Antisense strand to SEQ ID NO: 919138
auuuguaaacauugggucg

SEQ ID NO: 919140 - RNA, 19 nt, Artificial Sequence
  Description of Artificial Sequence: Synthetic oligonucleotide
  Sense strand starting at position 687 of SEQ ID NO: 913330
cagguuccucuaggagaga

SEQ ID NO: 919141 - RNA, 19 nt, Artificial Sequence
  Description of Artificial Sequence: Synthetic oligonucleotide
  Antisense strand to SEQ ID NO: 919140
ucucuccuagaggaaccug

SEQ ID NO: 919142 - RNA, 19 nt, Artificial Sequence
  Description of Artificial Sequence: Synthetic oligonucleotide
  Sense strand starting at position 216 of SEQ ID NO: 913330
gcagcugagagguaaauga

SEQ ID NO: 919143 - RNA, 19 nt, Artificial Sequence
  Description of Artificial Sequence: Synthetic oligonucleotide
  Antisense strand to SEQ ID NO: 919142
ucauuuaccucucagcugc

SEQ ID NO: 919144 - RNA, 19 nt, Artificial Sequence
  Description of Artificial Sequence: Synthetic oligonucleotide
  Sense strand starting at position 2553 of SEQ ID NO: 913330
gucuguuugccucuucuuu

SEQ ID NO: 919145 - RNA, 19 nt, Artificial Sequence
  Description of Artificial Sequence: Synthetic oligonucleotide
  Antisense strand to SEQ ID NO: 919144
aaagaagaggcaaacagac

SEQ ID NO: 919146 - RNA, 19 nt, Artificial Sequence
  Description of Artificial Sequence: Synthetic oligonucleotide
  Sense strand starting at position 2786 of SEQ ID NO: 913330
uggauugcacacugaaaua

SEQ ID NO: 919147 - RNA, 19 nt, Artificial Sequence
  Description of Artificial Sequence: Synthetic oligonucleotide
  Antisense strand to SEQ ID NO: 919146
uauuucagugugcaaucca

SEQ ID NO: 919148 - RNA, 19 nt, Artificial Sequence
  Description of Artificial Sequence: Synthetic oligonucleotide
  Sense strand starting at position 546 of SEQ ID NO: 913330
acuggcaaagcugaucaau

SEQ ID NO: 919149 - RNA, 19 nt, Artificial Sequence
  Description of Artificial Sequence: Synthetic oligonucleotide
  Antisense strand to SEQ ID NO: 919148
auugaucagcuuugccagu

SEQ ID NO: 919150 - RNA, 19 nt, Artificial Sequence
  Description of Artificial Sequence: Synthetic oligonucleotide
  Sense strand starting at position 1148 of SEQ ID NO: 913330
gacaguuuggaugggagua

SEQ ID NO: 919151 - RNA, 19 nt, Artificial Sequence
  Description of Artificial Sequence: Synthetic oligonucleotide
  Antisense strand to SEQ ID NO: 919150
uacucccauccaaacuguc

SEQ ID NO: 919152 - RNA, 19 nt, Artificial Sequence
  Description of Artificial Sequence: Synthetic oligonucleotide
  Sense strand starting at position 3378 of SEQ ID NO: 913330
ggaacauguuaauuacucu

SEQ ID NO: 919153 - RNA, 19 nt, Artificial Sequence
  Description of Artificial Sequence: Synthetic oligonucleotide
  Antisense strand to SEQ ID NO: 919152
agaguaauuaacauguucc

SEQ ID NO: 919154 - RNA, 19 nt, Artificial Sequence
  Description of Artificial Sequence: Synthetic oligonucleotide
  Sense strand starting at position 442 of SEQ ID NO: 913330
aacggucugguagaaacuu

SEQ ID NO: 919155 - RNA, 19 nt, Artificial Sequence
  Description of Artificial Sequence: Synthetic oligonucleotide
  Antisense strand to SEQ ID NO: 919154
aaguuucuaccagaccguu

SEQ ID NO: 919156 - RNA, 19 nt, Artificial Sequence
  Description of Artificial Sequence: Synthetic oligonucleotide
  Sense strand starting at position 1147 of SEQ ID NO: 913330
ggacaguuuggaugggagu

SEQ ID NO: 919157 - RNA, 19 nt, Artificial Sequence
  Description of Artificial Sequence: Synthetic oligonucleotide
  Antisense strand to SEQ ID NO: 919156
acucccauccaaacugucc

SEQ ID NO: 919158 - RNA, 19 nt, Artificial Sequence
  Description of Artificial Sequence: Synthetic oligonucleotide
  Sense strand starting at position 2745 of SEQ ID NO: 913330
auguaauauuuggauggaa

SEQ ID NO: 919159 - RNA, 19 nt, Artificial Sequence
  Description of Artificial Sequence: Synthetic oligonucleotide
  Antisense strand to SEQ ID NO: 919158
uuccauccaaauauuacau

SEQ ID NO: 919160 - RNA, 19 nt, Artificial Sequence
  Description of Artificial Sequence: Synthetic oligonucleotide
  Sense strand starting at position 3659 of SEQ ID NO: 913330
ucugcaauacccgagauau

SEQ ID NO: 919161 - RNA, 19 nt, Artificial Sequence
  Description of Artificial Sequence: Synthetic oligonucleotide
  Antisense strand to SEQ ID NO: 919160
auaucucggguauugcaga

SEQ ID NO: 919162 - RNA, 19 nt, Artificial Sequence
  Description of Artificial Sequence: Synthetic oligonucleotide
  Sense strand starting at position 328 of SEQ ID NO: 913330
ggucauaaugaaugacugu

SEQ ID NO: 919163 - RNA, 19 nt, Artificial Sequence
  Description of Artificial Sequence: Synthetic oligonucleotide
  Antisense strand to SEQ ID NO: 919162
acagucauucauuaugacc

SEQ ID NO: 919164 - RNA, 19 nt, Artificial Sequence
  Description of Artificial Sequence: Synthetic oligonucleotide
  Sense strand starting at position 133 of SEQ ID NO: 913330
uggcauuaucuuuggagga

SEQ ID NO: 919165 - RNA, 19 nt, Artificial Sequence
  Description of Artificial Sequence: Synthetic oligonucleotide
  Antisense strand to SEQ ID NO: 919164
uccuccaaagauaaugcca

SEQ ID NO: 919166 - RNA, 19 nt, Artificial Sequence
  Description of Artificial Sequence: Synthetic oligonucleotide
  Sense strand starting at position 3252 of SEQ ID NO: 913330
uaugaccucggguaaguua

SEQ ID NO: 919167 - RNA, 19 nt, Artificial Sequence
  Description of Artificial Sequence: Synthetic oligonucleotide
  Antisense strand to SEQ ID NO: 919166
uaacuuacccgaggucaua

SEQ ID NO: 919168 - RNA, 19 nt, Artificial Sequence
  Description of Artificial Sequence: Synthetic oligonucleotide
  Sense strand starting at position 2901 of SEQ ID NO: 913330
ucugguaaucaucauugca

SEQ ID NO: 919169 - RNA, 19 nt, Artificial Sequence
  Description of Artificial Sequence: Synthetic oligonucleotide
  Antisense strand to SEQ ID NO: 919168
ugcaaugaugauuaccaga

SEQ ID NO: 919170 - RNA, 19 nt, Artificial Sequence
  Description of Artificial Sequence: Synthetic oligonucleotide
  Sense strand starting at position 437 of SEQ ID NO: 913330
caggaaacggucugguaga

SEQ ID NO: 919171 - RNA, 19 nt, Artificial Sequence
  Description of Artificial Sequence: Synthetic oligonucleotide
  Antisense strand to SEQ ID NO: 919170
ucuaccagaccguuuccug

SEQ ID NO: 919172 - RNA, 19 nt, Artificial Sequence
  Description of Artificial Sequence: Synthetic oligonucleotide
  Sense strand starting at position 1841 of SEQ ID NO: 913330
cgaauuguucucuaugacu

SEQ ID NO: 919173 - RNA, 19 nt, Artificial Sequence
  Description of Artificial Sequence: Synthetic oligonucleotide
  Antisense strand to SEQ ID NO: 919172
agucauagagaacaauucg

SEQ ID NO: 919174 - RNA, 19 nt, Artificial Sequence
  Description of Artificial Sequence: Synthetic oligonucleotide
  Sense strand starting at position 3169 of SEQ ID NO: 913330
augugcugagcugauagau

SEQ ID NO: 919175 - RNA, 19 nt, Artificial Sequence
  Description of Artificial Sequence: Synthetic oligonucleotide
  Antisense strand to SEQ ID NO: 919174
aucuaucagcucagcacau

SEQ ID NO: 919176 - RNA, 19 nt, Artificial Sequence
  Description of Artificial Sequence: Synthetic oligonucleotide
  Sense strand starting at position 1203 of SEQ ID NO: 913330
uuccuuuggcacugggaga

SEQ ID NO: 919177 - RNA, 19 nt, Artificial Sequence
  Description of Artificial Sequence: Synthetic oligonucleotide
  Antisense strand to SEQ ID NO: 919176
ucucccagugccaaaggaa

SEQ ID NO: 919178 - RNA, 19 nt, Artificial Sequence
  Description of Artificial Sequence: Synthetic oligonucleotide
  Sense strand starting at position 2080 of SEQ ID NO: 913330
gcugcagcagcgucuaauu

SEQ ID NO: 919179 - RNA, 19 nt, Artificial Sequence
  Description of Artificial Sequence: Synthetic oligonucleotide
  Antisense strand to SEQ ID NO: 919178
aauuagacgcugcugcagc

SEQ ID NO: 919180 - RNA, 19 nt, Artificial Sequence
  Description of Artificial Sequence: Synthetic oligonucleotide
  Sense strand starting at position 3712 of SEQ ID NO: 913330
uaggacucugccugugaaa

SEQ ID NO: 919181 - RNA, 19 nt, Artificial Sequence
  Description of Artificial Sequence: Synthetic oligonucleotide
  Antisense strand to SEQ ID NO: 919180
uuucacaggcagaguccua

SEQ ID NO: 919182 - RNA, 19 nt, Artificial Sequence
  Description of Artificial Sequence: Synthetic oligonucleotide
  Sense strand starting at position 2744 of SEQ ID NO: 913330
aauguaauauuuggaugga

SEQ ID NO: 919183 - RNA, 19 nt, Artificial Sequence
  Description of Artificial Sequence: Synthetic oligonucleotide
  Antisense strand to SEQ ID NO: 919182
uccauccaaauauuacauu

SEQ ID NO: 919184 - RNA, 19 nt, Artificial Sequence
  Description of Artificial Sequence: Synthetic oligonucleotide
  Sense strand starting at position 548 of SEQ ID NO: 913330
uggcaaagcugaucaauuc

SEQ ID NO: 919185 - RNA, 19 nt, Artificial Sequence
  Description of Artificial Sequence: Synthetic oligonucleotide
  Antisense strand to SEQ ID NO: 919184
gaauugaucagcuuugcca

SEQ ID NO: 919186 - RNA, 19 nt, Artificial Sequence
  Description of Artificial Sequence: Synthetic oligonucleotide
  Sense strand starting at position 335 of SEQ ID NO: 913330
augaaugacuguuugcuau

SEQ ID NO: 919187 - RNA, 19 nt, Artificial Sequence
  Description of Artificial Sequence: Synthetic oligonucleotide
  Antisense strand to SEQ ID NO: 919186
auagcaaacagucauucau

SEQ ID NO: 919188 - RNA, 19 nt, Artificial Sequence
  Description of Artificial Sequence: Synthetic oligonucleotide
  Sense strand starting at position 338 of SEQ ID NO: 913330
aaugacuguuugcuauuga

SEQ ID NO: 919189 - RNA, 19 nt, Artificial Sequence
  Description of Artificial Sequence: Synthetic oligonucleotide
  Antisense strand to SEQ ID NO: 919188
ucaauagcaaacagucauu

SEQ ID NO: 919190 - RNA, 19 nt, Artificial Sequence
  Description of Artificial Sequence: Synthetic oligonucleotide
  Sense strand starting at position 3598 of SEQ ID NO: 913330
cucagcucugcugauaauu

SEQ ID NO: 919191 - RNA, 19 nt, Artificial Sequence
  Description of Artificial Sequence: Synthetic oligonucleotide
  Antisense strand to SEQ ID NO: 919190
aauuaucagcagagcugag

SEQ ID NO: 919192 - RNA, 19 nt, Artificial Sequence
  Description of Artificial Sequence: Synthetic oligonucleotide
  Sense strand starting at position 3072 of SEQ ID NO: 913330
ugcuuaugugccuagaaau

SEQ ID NO: 919193 - RNA, 19 nt, Artificial Sequence
  Description of Artificial Sequence: Synthetic oligonucleotide
  Antisense strand to SEQ ID NO: 919192
auuucuaggcacauaagca

SEQ ID NO: 919194 - RNA, 19 nt, Artificial Sequence
  Description of Artificial Sequence: Synthetic oligonucleotide
  Sense strand starting at position 3711 of SEQ ID NO: 913330
cuaggacucugccugugaa

SEQ ID NO: 919195 - RNA, 19 nt, Artificial Sequence
  Description of Artificial Sequence: Synthetic oligonucleotide
  Antisense strand to SEQ ID NO: 919194
uucacaggcagaguccuag

SEQ ID NO: 919196 - RNA, 19 nt, Artificial Sequence
  Description of Artificial Sequence: Synthetic oligonucleotide
  Sense strand starting at position 337 of SEQ ID NO: 913330
gaaugacuguuugcuauug

SEQ ID NO: 919197 - RNA, 19 nt, Artificial Sequence
  Description of Artificial Sequence: Synthetic oligonucleotide
  Antisense strand to SEQ ID NO: 919196
caauagcaaacagucauuc

SEQ ID NO: 919198 - RNA, 19 nt, Artificial Sequence
  Description of Artificial Sequence: Synthetic oligonucleotide
  Sense strand starting at position 3140 of SEQ ID NO: 913330
ggaaauaauuaggaugauc

SEQ ID NO: 919199 - RNA, 19 nt, Artificial Sequence
  Description of Artificial Sequence: Synthetic oligonucleotide
  Antisense strand to SEQ ID NO: 919198
gaucauccuaauuauuucc

SEQ ID NO: 919200 - RNA, 19 nt, Artificial Sequence
  Description of Artificial Sequence: Synthetic oligonucleotide
  Sense strand starting at position 3714 of SEQ ID NO: 913330
ggacucugccugugaaacu

SEQ ID NO: 919201 - RNA, 19 nt, Artificial Sequence
  Description of Artificial Sequence: Synthetic oligonucleotide
  Antisense strand to SEQ ID NO: 919200
aguuucacaggcagagucc

SEQ ID NO: 919202 - RNA, 19 nt, Artificial Sequence
  Description of Artificial Sequence: Synthetic oligonucleotide
  Sense strand starting at position 3973 of SEQ ID NO: 913330
guaugguggccggaaagua

SEQ ID NO: 919203 - RNA, 19 nt, Artificial Sequence
  Description of Artificial Sequence: Synthetic oligonucleotide
  Antisense strand to SEQ ID NO: 919202
uacuuuccggccaccauac

SEQ ID NO: 919204 - RNA, 19 nt, Artificial Sequence
  Description of Artificial Sequence: Synthetic oligonucleotide
  Sense strand starting at position 2733 of SEQ ID NO: 913331
gccucugaaccuuaugaga

SEQ ID NO: 919205 - RNA, 19 nt, Artificial Sequence
  Description of Artificial Sequence: Synthetic oligonucleotide
  Antisense strand to SEQ ID NO: 919204
ucucauaagguucagaggc

SEQ ID NO: 919206 - RNA, 19 nt, Artificial Sequence
  Description of Artificial Sequence: Synthetic oligonucleotide
  Sense strand starting at position 8 of SEQ ID NO: 913331
gugucauaugaucaacuau

SEQ ID NO: 919207 - RNA, 19 nt, Artificial Sequence
  Description of Artificial Sequence: Synthetic oligonucleotide
  Antisense strand to SEQ ID NO: 919206
auaguugaucauaugacac

SEQ ID NO: 919208 - RNA, 19 nt, Artificial Sequence
  Description of Artificial Sequence: Synthetic oligonucleotide
  Sense strand starting at position 3246 of SEQ ID NO: 913331
ccacauaugaaguguggaa

SEQ ID NO: 919209 - RNA, 19 nt, Artificial Sequence
  Description of Artificial Sequence: Synthetic oligonucleotide
  Antisense strand to SEQ ID NO: 919208
uuccacacuucauaugugg

SEQ ID NO: 919210 - RNA, 19 nt, Artificial Sequence
  Description of Artificial Sequence: Synthetic oligonucleotide
  Sense strand starting at position 3288 of SEQ ID NO: 913331
cugugaugcauuuaucguu

SEQ ID NO: 919211 - RNA, 19 nt, Artificial Sequence
  Description of Artificial Sequence: Synthetic oligonucleotide
  Antisense strand to SEQ ID NO: 919210
aacgauaaaugcaucacag

SEQ ID NO: 919212 - RNA, 19 nt, Artificial Sequence
  Description of Artificial Sequence: Synthetic oligonucleotide
  Sense strand starting at position 7 of SEQ ID NO: 913331
agugucauaugaucaacua

SEQ ID NO: 919213 - RNA, 19 nt, Artificial Sequence
  Description of Artificial Sequence: Synthetic oligonucleotide
  Antisense strand to SEQ ID NO: 919212
uaguugaucauaugacacu

SEQ ID NO: 919214 - RNA, 19 nt, Artificial Sequence
  Description of Artificial Sequence: Synthetic oligonucleotide
  Sense strand starting at position 785 of SEQ ID NO: 913331
gguuaauugcaacagcaca

SEQ ID NO: 919215 - RNA, 19 nt, Artificial Sequence
  Description of Artificial Sequence: Synthetic oligonucleotide
  Antisense strand to SEQ ID NO: 919214
ugugcuguugcaauuaacc

SEQ ID NO: 919216 - RNA, 19 nt, Artificial Sequence
  Description of Artificial Sequence: Synthetic oligonucleotide
  Sense strand starting at position 199 of SEQ ID NO: 913331
ccuuaaguguuaucacaga

SEQ ID NO: 919217 - RNA, 19 nt, Artificial Sequence
  Description of Artificial Sequence: Synthetic oligonucleotide
  Antisense strand to SEQ ID NO: 919216
ucugugauaacacuuaagg

SEQ ID NO: 919218 - RNA, 19 nt, Artificial Sequence
  Description of Artificial Sequence: Synthetic oligonucleotide
  Sense strand starting at position 272 of SEQ ID NO: 913331
guccuccuuccauaaaguu

SEQ ID NO: 919219 - RNA, 19 nt, Artificial Sequence
  Description of Artificial Sequence: Synthetic oligonucleotide
  Antisense strand to SEQ ID NO: 919218
aacuuuauggaaggaggac

SEQ ID NO: 919220 - RNA, 19 nt, Artificial Sequence
  Description of Artificial Sequence: Synthetic oligonucleotide
  Sense strand starting at position 236 of SEQ ID NO: 913331
ugaagaguuaaauguagcu

SEQ ID NO: 919221 - RNA, 19 nt, Artificial Sequence
  Description of Artificial Sequence: Synthetic oligonucleotide
  Antisense strand to SEQ ID NO: 919220
agcuacauuuaacucuuca

SEQ ID NO: 919222 - RNA, 19 nt, Artificial Sequence
  Description of Artificial Sequence: Synthetic oligonucleotide
  Sense strand starting at position 3517 of SEQ ID NO: 913331
uugggaguggcuggauauu

SEQ ID NO: 919223 - RNA, 19 nt, Artificial Sequence
  Description of Artificial Sequence: Synthetic oligonucleotide
  Antisense strand to SEQ ID NO: 919222
aauauccagccacucccaa

SEQ ID NO: 919224 - RNA, 19 nt, Artificial Sequence
  Description of Artificial Sequence: Synthetic oligonucleotide
  Sense strand starting at position 71 of SEQ ID NO: 913331
guagcaauacauugaaugu

SEQ ID NO: 919225 - RNA, 19 nt, Artificial Sequence
  Description of Artificial Sequence: Synthetic oligonucleotide
  Antisense strand to SEQ ID NO: 919224
acauucaauguauugcuac

SEQ ID NO: 919226 - RNA, 19 nt, Artificial Sequence
  Description of Artificial Sequence: Synthetic oligonucleotide
  Sense strand starting at position 580 of SEQ ID NO: 913331
ugcacuauguagucagaag

SEQ ID NO: 919227 - RNA, 19 nt, Artificial Sequence
  Description of Artificial Sequence: Synthetic oligonucleotide
  Antisense strand to SEQ ID NO: 919226
cuucugacuacauagugca

SEQ ID NO: 919228 - RNA, 19 nt, Artificial Sequence
  Description of Artificial Sequence: Synthetic oligonucleotide
  Sense strand starting at position 746 of SEQ ID NO: 913331
aagccucuuggcuaaguua

SEQ ID NO: 919229 - RNA, 19 nt, Artificial Sequence
  Description of Artificial Sequence: Synthetic oligonucleotide
  Antisense strand to SEQ ID NO: 919228
uaacuuagccaagaggcuu

SEQ ID NO: 919230 - RNA, 19 nt, Artificial Sequence
  Description of Artificial Sequence: Synthetic oligonucleotide
  Sense strand starting at position 749 of SEQ ID NO: 913331
ccucuuggcuaaguuaaau

SEQ ID NO: 919231 - RNA, 19 nt, Artificial Sequence
  Description of Artificial Sequence: Synthetic oligonucleotide
  Antisense strand to SEQ ID NO: 919230
auuuaacuuagccaagagg

SEQ ID NO: 919232 - RNA, 19 nt, Artificial Sequence
  Description of Artificial Sequence: Synthetic oligonucleotide
  Sense strand starting at position 3983 of SEQ ID NO: 913331
ucucaaugcugaguaguaa

SEQ ID NO: 919233 - RNA, 19 nt, Artificial Sequence
  Description of Artificial Sequence: Synthetic oligonucleotide
  Antisense strand to SEQ ID NO: 919232
uuacuacucagcauugaga

SEQ ID NO: 919234 - RNA, 19 nt, Artificial Sequence
  Description of Artificial Sequence: Synthetic oligonucleotide
  Sense strand starting at position 3423 of SEQ ID NO: 913331
ggcugccuaguuugaggaa

SEQ ID NO: 919235 - RNA, 19 nt, Artificial Sequence
  Description of Artificial Sequence: Synthetic oligonucleotide
  Antisense strand to SEQ ID NO: 919234
uuccucaaacuaggcagcc

SEQ ID NO: 919236 - RNA, 19 nt, Artificial Sequence
  Description of Artificial Sequence: Synthetic oligonucleotide
  Sense strand starting at position 499 of SEQ ID NO: 913331
auugcacuguacucuuauu

SEQ ID NO: 919237 - RNA, 19 nt, Artificial Sequence
  Description of Artificial Sequence: Synthetic oligonucleotide
  Antisense strand to SEQ ID NO: 919236
aauaagaguacagugcaau

SEQ ID NO: 919238 - RNA, 19 nt, Artificial Sequence
  Description of Artificial Sequence: Synthetic oligonucleotide
  Sense strand starting at position 3232 of SEQ ID NO: 913331
guaguuuccucuucccaca

SEQ ID NO: 919239 - RNA, 19 nt, Artificial Sequence
  Description of Artificial Sequence: Synthetic oligonucleotide
  Antisense strand to SEQ ID NO: 919238
ugugggaagaggaaacuac

SEQ ID NO: 919240 - RNA, 19 nt, Artificial Sequence
  Description of Artificial Sequence: Synthetic oligonucleotide
  Sense strand starting at position 392 of SEQ ID NO: 913331
uccaguuauuuauaggguu

SEQ ID NO: 919241 - RNA, 19 nt, Artificial Sequence
  Description of Artificial Sequence: Synthetic oligonucleotide
  Antisense strand to SEQ ID NO: 919240
aacccuauaaauaacugga

SEQ ID NO: 919242 - RNA, 19 nt, Artificial Sequence
  Description of Artificial Sequence: Synthetic oligonucleotide
  Sense strand starting at position 395 of SEQ ID NO: 913331
aguuauuuauaggguuaag

SEQ ID NO: 919243 - RNA, 19 nt, Artificial Sequence
  Description of Artificial Sequence: Synthetic oligonucleotide
  Antisense strand to SEQ ID NO: 919242
cuuaacccuauaaauaacu

SEQ ID NO: 919244 - RNA, 19 nt, Artificial Sequence
  Description of Artificial Sequence: Synthetic oligonucleotide
  Sense strand starting at position 945 of SEQ ID NO: 913331
ggucuugccuaagcuauaa

SEQ ID NO: 919245 - RNA, 19 nt, Artificial Sequence
  Description of Artificial Sequence: Synthetic oligonucleotide
  Antisense strand to SEQ ID NO: 919244
uuauagcuuaggcaagacc

SEQ ID NO: 919246 - RNA, 19 nt, Artificial Sequence
  Description of Artificial Sequence: Synthetic oligonucleotide
  Sense strand starting at position 342 of SEQ ID NO: 913331
aauggagacuucgauauaa

SEQ ID NO: 919247 - RNA, 19 nt, Artificial Sequence
  Description of Artificial Sequence: Synthetic oligonucleotide
  Antisense strand to SEQ ID NO: 919246
uuauaucgaagucuccauu

SEQ ID NO: 919248 - RNA, 19 nt, Artificial Sequence
  Description of Artificial Sequence: Synthetic oligonucleotide
  Sense strand starting at position 942 of SEQ ID NO: 913331
uguggucuugccuaagcua

SEQ ID NO: 919249 - RNA, 19 nt, Artificial Sequence
  Description of Artificial Sequence: Synthetic oligonucleotide
  Antisense strand to SEQ ID NO: 919248
uagcuuaggcaagaccaca

SEQ ID NO: 919250 - RNA, 19 nt, Artificial Sequence
  Description of Artificial Sequence: Synthetic oligonucleotide
  Sense strand starting at position 676 of SEQ ID NO: 913331
guauguagcuagucccaua

SEQ ID NO: 919251 - RNA, 19 nt, Artificial Sequence
  Description of Artificial Sequence: Synthetic oligonucleotide
  Antisense strand to SEQ ID NO: 919250
uaugggacuagcuacauac

SEQ ID NO: 919252 - RNA, 19 nt, Artificial Sequence
  Description of Artificial Sequence: Synthetic oligonucleotide
  Sense strand starting at position 3621 of SEQ ID NO: 913331
gggcaccuaucagaauaua

SEQ ID NO: 919253 - RNA, 19 nt, Artificial Sequence
  Description of Artificial Sequence: Synthetic oligonucleotide
  Antisense strand to SEQ ID NO: 919252
uauauucugauaggugccc

SEQ ID NO: 919254 - RNA, 19 nt, Artificial Sequence
  Description of Artificial Sequence: Synthetic oligonucleotide
  Sense strand starting at position 3280 of SEQ ID NO: 913331
gacacaaacugugaugcau

SEQ ID NO: 919255 - RNA, 19 nt, Artificial Sequence
  Description of Artificial Sequence: Synthetic oligonucleotide
  Antisense strand to SEQ ID NO: 919254
augcaucacaguuuguguc

SEQ ID NO: 919256 - RNA, 19 nt, Artificial Sequence
  Description of Artificial Sequence: Synthetic oligonucleotide
  Sense strand starting at position 2893 of SEQ ID NO: 913331
agacauguuucucauccca

SEQ ID NO: 919257 - RNA, 19 nt, Artificial Sequence
  Description of Artificial Sequence: Synthetic oligonucleotide
  Antisense strand to SEQ ID NO: 919256
ugggaugagaaacaugucu

SEQ ID NO: 919258 - RNA, 19 nt, Artificial Sequence
  Description of Artificial Sequence: Synthetic oligonucleotide
  Sense strand starting at position 3718 of SEQ ID NO: 913331
uuaagcaugucugaugaac

SEQ ID NO: 919259 - RNA, 19 nt, Artificial Sequence
  Description of Artificial Sequence: Synthetic oligonucleotide
  Antisense strand to SEQ ID NO: 919258
guucaucagacaugcuuaa

SEQ ID NO: 919260 - RNA, 19 nt, Artificial Sequence
  Description of Artificial Sequence: Synthetic oligonucleotide
  Sense strand starting at position 430 of SEQ ID NO: 913331
auggguuggucccauaacu

SEQ ID NO: 919261 - RNA, 19 nt, Artificial Sequence
  Description of Artificial Sequence: Synthetic oligonucleotide
  Antisense strand to SEQ ID NO: 919260
aguuaugggaccaacccau

SEQ ID NO: 919262 - RNA, 19 nt, Artificial Sequence
  Description of Artificial Sequence: Synthetic oligonucleotide
  Sense strand starting at position 3762 of SEQ ID NO: 913331
cucacaguuucuggacaaa

SEQ ID NO: 919263 - RNA, 19 nt, Artificial Sequence
  Description of Artificial Sequence: Synthetic oligonucleotide
  Antisense strand to SEQ ID NO: 919262
uuuguccagaaacugugag

SEQ ID NO: 919264 - RNA, 19 nt, Artificial Sequence
  Description of Artificial Sequence: Synthetic oligonucleotide
  Sense strand starting at position 2 of SEQ ID NO: 913331
ucccaagugucauaugauc

SEQ ID NO: 919265 - RNA, 19 nt, Artificial Sequence
  Description of Artificial Sequence: Synthetic oligonucleotide
  Antisense strand to SEQ ID NO: 919264
gaucauaugacacuuggga

SEQ ID NO: 919266 - RNA, 19 nt, Artificial Sequence
  Description of Artificial Sequence: Synthetic oligonucleotide
  Sense strand starting at position 3720 of SEQ ID NO: 913331
aagcaugucugaugaacag

SEQ ID NO: 919267 - RNA, 19 nt, Artificial Sequence
  Description of Artificial Sequence: Synthetic oligonucleotide
  Antisense strand to SEQ ID NO: 919266
cuguucaucagacaugcuu

SEQ ID NO: 919268 - RNA, 19 nt, Artificial Sequence
  Description of Artificial Sequence: Synthetic oligonucleotide
  Sense strand starting at position 3426 of SEQ ID NO: 913331
ugccuaguuugaggaagaa

SEQ ID NO: 919269 - RNA, 19 nt, Artificial Sequence
  Description of Artificial Sequence: Synthetic oligonucleotide
  Antisense strand to SEQ ID NO: 919268
uucuuccucaaacuaggca

SEQ ID NO: 919270 - RNA, 19 nt, Artificial Sequence
  Description of Artificial Sequence: Synthetic oligonucleotide
  Sense strand starting at position 850 of SEQ ID NO: 913331
ggcaccuacuugcaauuaa

SEQ ID NO: 919271 - RNA, 19 nt, Artificial Sequence
  Description of Artificial Sequence: Synthetic oligonucleotide
  Antisense strand to SEQ ID NO: 919270
uuaauugcaaguaggugcc

SEQ ID NO: 919272 - RNA, 19 nt, Artificial Sequence
  Description of Artificial Sequence: Synthetic oligonucleotide
  Sense strand starting at position 3267 of SEQ ID NO: 913331
ugaaucuugucuugacaca

SEQ ID NO: 919273 - RNA, 19 nt, Artificial Sequence
  Description of Artificial Sequence: Synthetic oligonucleotide
  Antisense strand to SEQ ID NO: 919272
ugugucaagacaagauuca

SEQ ID NO: 919274 - RNA, 19 nt, Artificial Sequence
  Description of Artificial Sequence: Synthetic oligonucleotide
  Sense strand starting at position 2590 of SEQ ID NO: 913331
ggacuuugcucucagcaca

SEQ ID NO: 919275 - RNA, 19 nt, Artificial Sequence
  Description of Artificial Sequence: Synthetic oligonucleotide
  Antisense strand to SEQ ID NO: 919274
ugugcugagagcaaagucc

SEQ ID NO: 919276 - RNA, 19 nt, Artificial Sequence
  Description of Artificial Sequence: Synthetic oligonucleotide
  Sense strand starting at position 2754 of SEQ ID NO: 913331
ucacuucuuugaggcgaaa

SEQ ID NO: 919277 - RNA, 19 nt, Artificial Sequence
  Description of Artificial Sequence: Synthetic oligonucleotide
  Antisense strand to SEQ ID NO: 919276
uuucgccucaaagaaguga

SEQ ID NO: 919278 - RNA, 19 nt, Artificial Sequence
  Description of Artificial Sequence: Synthetic oligonucleotide
  Sense strand starting at position 742 of SEQ ID NO: 913331
cucaaagccucuuggcuaa

SEQ ID NO: 919279 - RNA, 19 nt, Artificial Sequence
  Description of Artificial Sequence: Synthetic oligonucleotide
  Antisense strand to SEQ ID NO: 919278
uuagccaagaggcuuugag

SEQ ID NO: 919280 - RNA, 19 nt, Artificial Sequence
  Description of Artificial Sequence: Synthetic oligonucleotide
  Sense strand starting at position 2437 of SEQ ID NO: 913331
ggaaaugucucccgcccua

SEQ ID NO: 919281 - RNA, 19 nt, Artificial Sequence
  Description of Artificial Sequence: Synthetic oligonucleotide
  Antisense strand to SEQ ID NO: 919280
uagggcgggagacauuucc

SEQ ID NO: 919282 - RNA, 19 nt, Artificial Sequence
  Description of Artificial Sequence: Synthetic oligonucleotide
  Sense strand starting at position 748 of SEQ ID NO: 913332
gccucugaaccuuaugaga

SEQ ID NO: 919283 - RNA, 19 nt, Artificial Sequence
  Description of Artificial Sequence: Synthetic oligonucleotide
  Antisense strand to SEQ ID NO: 919282
ucucauaagguucagaggc

SEQ ID NO: 919284 - RNA, 19 nt, Artificial Sequence
  Description of Artificial Sequence: Synthetic oligonucleotide
  Sense strand starting at position 2329 of SEQ ID NO: 913332
ccuugaaacugauuaguaa

SEQ ID NO: 919285 - RNA, 19 nt, Artificial Sequence
  Description of Artificial Sequence: Synthetic oligonucleotide
  Antisense strand to SEQ ID NO: 919284
uuacuaaucaguuucaagg

SEQ ID NO: 919286 - RNA, 19 nt, Artificial Sequence
  Description of Artificial Sequence: Synthetic oligonucleotide
  Sense strand starting at position 3035 of SEQ ID NO: 913332
acucuaagugcauaugaau

SEQ ID NO: 919287 - RNA, 19 nt, Artificial Sequence
  Description of Artificial Sequence: Synthetic oligonucleotide
  Antisense strand to SEQ ID NO: 919286
auucauaugcacuuagagu

SEQ ID NO: 919288 - RNA, 19 nt, Artificial Sequence
  Description of Artificial Sequence: Synthetic oligonucleotide
  Sense strand starting at position 3909 of SEQ ID NO: 913332
ccgcaaauugaaugcauuu

SEQ ID NO: 919289 - RNA, 19 nt, Artificial Sequence
  Description of Artificial Sequence: Synthetic oligonucleotide
  Antisense strand to SEQ ID NO: 919288
aaaugcauucaauuugcgg

SEQ ID NO: 919290 - RNA, 19 nt, Artificial Sequence
  Description of Artificial Sequence: Synthetic oligonucleotide
  Sense strand starting at position 3303 of SEQ ID NO: 913332
gguucuuaguucccuauuu

SEQ ID NO: 919291 - RNA, 19 nt, Artificial Sequence
  Description of Artificial Sequence: Synthetic oligonucleotide
  Antisense strand to SEQ ID NO: 919290
aaauagggaacuaagaacc

SEQ ID NO: 919292 - RNA, 19 nt, Artificial Sequence
  Description of Artificial Sequence: Synthetic oligonucleotide
  Sense strand starting at position 1261 of SEQ ID NO: 913332
ccacauaugaaguguggaa

SEQ ID NO: 919293 - RNA, 19 nt, Artificial Sequence
  Description of Artificial Sequence: Synthetic oligonucleotide
  Antisense strand to SEQ ID NO: 919292
uuccacacuucauaugugg

SEQ ID NO: 919294 - RNA, 19 nt, Artificial Sequence
  Description of Artificial Sequence: Synthetic oligonucleotide
  Sense strand starting at position 1303 of SEQ ID NO: 913332
cugugaugcauuuaucguu

SEQ ID NO: 919295 - RNA, 19 nt, Artificial Sequence
  Description of Artificial Sequence: Synthetic oligonucleotide
  Antisense strand to SEQ ID NO: 919294
aacgauaaaugcaucacag

SEQ ID NO: 919296 - RNA, 19 nt, Artificial Sequence
  Description of Artificial Sequence: Synthetic oligonucleotide
  Sense strand starting at position 2201 of SEQ ID NO: 913332
aaauuaacugggugguuga

SEQ ID NO: 919297 - RNA, 19 nt, Artificial Sequence
  Description of Artificial Sequence: Synthetic oligonucleotide
  Antisense strand to SEQ ID NO: 919296
ucaaccacccaguuaauuu

SEQ ID NO: 919298 - RNA, 19 nt, Artificial Sequence
  Description of Artificial Sequence: Synthetic oligonucleotide
  Sense strand starting at position 3972 of SEQ ID NO: 913332
gcacuuaacggauacuuua

SEQ ID NO: 919299 - RNA, 19 nt, Artificial Sequence
  Description of Artificial Sequence: Synthetic oligonucleotide
  Antisense strand to SEQ ID NO: 919298
uaaaguauccguuaagugc

SEQ ID NO: 919300 - RNA, 19 nt, Artificial Sequence
  Description of Artificial Sequence: Synthetic oligonucleotide
  Sense strand starting at position 2184 of SEQ ID NO: 913332
gugggaggucaagguuaaa

SEQ ID NO: 919301 - RNA, 19 nt, Artificial Sequence
  Description of Artificial Sequence: Synthetic oligonucleotide
  Antisense strand to SEQ ID NO: 919300
uuuaaccuugaccucccac

SEQ ID NO: 919302 - RNA, 19 nt, Artificial Sequence
  Description of Artificial Sequence: Synthetic oligonucleotide
  Sense strand starting at position 2240 of SEQ ID NO: 913332
aguguaagucaaugaaaug

SEQ ID NO: 919303 - RNA, 19 nt, Artificial Sequence
  Description of Artificial Sequence: Synthetic oligonucleotide
  Antisense strand to SEQ ID NO: 919302
cauuucauugacuuacacu

SEQ ID NO: 919304 - RNA, 19 nt, Artificial Sequence
  Description of Artificial Sequence: Synthetic oligonucleotide
  Sense strand starting at position 2333 of SEQ ID NO: 913332
gaaacugauuaguaauuug

SEQ ID NO: 919305 - RNA, 19 nt, Artificial Sequence
  Description of Artificial Sequence: Synthetic oligonucleotide
  Antisense strand to SEQ ID NO: 919304
caaauuacuaaucaguuuc

SEQ ID NO: 919306 - RNA, 19 nt, Artificial Sequence
  Description of Artificial Sequence: Synthetic oligonucleotide
  Sense strand starting at position 3030 of SEQ ID NO: 913332
gacugacucuaagugcaua

SEQ ID NO: 919307 - RNA, 19 nt, Artificial Sequence
  Description of Artificial Sequence: Synthetic oligonucleotide
  Antisense strand to SEQ ID NO: 919306
uaugcacuuagagucaguc

SEQ ID NO: 919308 - RNA, 19 nt, Artificial Sequence
  Description of Artificial Sequence: Synthetic oligonucleotide
  Sense strand starting at position 2072 of SEQ ID NO: 913332
gcggaaucuuucuuaaagg

SEQ ID NO: 919309 - RNA, 19 nt, Artificial Sequence
  Description of Artificial Sequence: Synthetic oligonucleotide
  Antisense strand to SEQ ID NO: 919308
ccuuuaagaaagauuccgc

SEQ ID NO: 919310 - RNA, 19 nt, Artificial Sequence
  Description of Artificial Sequence: Synthetic oligonucleotide
  Sense strand starting at position 2071 of SEQ ID NO: 913332
ggcggaaucuuucuuaaag

SEQ ID NO: 919311 - RNA, 19 nt, Artificial Sequence
  Description of Artificial Sequence: Synthetic oligonucleotide
  Antisense strand to SEQ ID NO: 919310
cuuuaagaaagauuccgcc

SEQ ID NO: 919312 - RNA, 19 nt, Artificial Sequence
  Description of Artificial Sequence: Synthetic oligonucleotide
  Sense strand starting at position 1532 of SEQ ID NO: 913332
uugggaguggcuggauauu

SEQ ID NO: 919313 - RNA, 19 nt, Artificial Sequence
  Description of Artificial Sequence: Synthetic oligonucleotide
  Antisense strand to SEQ ID NO: 919312
aauauccagccacucccaa

SEQ ID NO: 919314 - RNA, 19 nt, Artificial Sequence
  Description of Artificial Sequence: Synthetic oligonucleotide
  Sense strand starting at position 3079 of SEQ ID NO: 913332
ucguguccaccugagaauc

SEQ ID NO: 919315 - RNA, 19 nt, Artificial Sequence
  Description of Artificial Sequence: Synthetic oligonucleotide
  Antisense strand to SEQ ID NO: 919314
gauucucagguggacacga

SEQ ID NO: 919316 - RNA, 19 nt, Artificial Sequence
  Description of Artificial Sequence: Synthetic oligonucleotide
  Sense strand starting at position 3341 of SEQ ID NO: 913332
auugaaauuucccaggguc

SEQ ID NO: 919317 - RNA, 19 nt, Artificial Sequence
  Description of Artificial Sequence: Synthetic oligonucleotide
  Antisense strand to SEQ ID NO: 919316
gacccugggaaauuucaau

SEQ ID NO: 919318 - RNA, 19 nt, Artificial Sequence
  Description of Artificial Sequence: Synthetic oligonucleotide
  Sense strand starting at position 2318 of SEQ ID NO: 913332
aaaguuguaugccuugaaa

SEQ ID NO: 919319 - RNA, 19 nt, Artificial Sequence
  Description of Artificial Sequence: Synthetic oligonucleotide
  Antisense strand to SEQ ID NO: 919318
uuucaaggcauacaacuuu

SEQ ID NO: 919320 - RNA, 19 nt, Artificial Sequence
  Description of Artificial Sequence: Synthetic oligonucleotide
  Sense strand starting at position 2474 of SEQ ID NO: 913332
ucguuuaugugacuagaag

SEQ ID NO: 919321 - RNA, 19 nt, Artificial Sequence
  Description of Artificial Sequence: Synthetic oligonucleotide
  Antisense strand to SEQ ID NO: 919320
cuucuagucacauaaacga

SEQ ID NO: 919322 - RNA, 19 nt, Artificial Sequence
  Description of Artificial Sequence: Synthetic oligonucleotide
  Sense strand starting at position 2475 of SEQ ID NO: 913332
cguuuaugugacuagaagc

SEQ ID NO: 919323 - RNA, 19 nt, Artificial Sequence
  Description of Artificial Sequence: Synthetic oligonucleotide
  Antisense strand to SEQ ID NO: 919322
gcuucuagucacauaaacg

SEQ ID NO: 919324 - RNA, 19 nt, Artificial Sequence
  Description of Artificial Sequence: Synthetic oligonucleotide
  Sense strand starting at position 2273 of SEQ ID NO: 913332
uuuaaagagcccugcuaau

SEQ ID NO: 919325 - RNA, 19 nt, Artificial Sequence
  Description of Artificial Sequence: Synthetic oligonucleotide
  Antisense strand to SEQ ID NO: 919324
auuagcagggcucuuuaaa

SEQ ID NO: 919326 - RNA, 19 nt, Artificial Sequence
  Description of Artificial Sequence: Synthetic oligonucleotide
  Sense strand starting at position 2470 of SEQ ID NO: 913332
aaacucguuuaugugacua

SEQ ID NO: 919327 - RNA, 19 nt, Artificial Sequence
  Description of Artificial Sequence: Synthetic oligonucleotide
  Antisense strand to SEQ ID NO: 919326
uagucacauaaacgaguuu

SEQ ID NO: 919328 - RNA, 19 nt, Artificial Sequence
  Description of Artificial Sequence: Synthetic oligonucleotide
  Sense strand starting at position 3759 of SEQ ID NO: 913332
agaaauuaguugcccaguu

SEQ ID NO: 919329 - RNA, 19 nt, Artificial Sequence
  Description of Artificial Sequence: Synthetic oligonucleotide
  Antisense strand to SEQ ID NO: 919328
aacugggcaacuaauuucu

SEQ ID NO: 919330 - RNA, 19 nt, Artificial Sequence
  Description of Artificial Sequence: Synthetic oligonucleotide
  Sense strand starting at position 1998 of SEQ ID NO: 913332
ucucaaugcugaguaguaa

SEQ ID NO: 919331 - RNA, 19 nt, Artificial Sequence
  Description of Artificial Sequence: Synthetic oligonucleotide
  Antisense strand to SEQ ID NO: 919330
uuacuacucagcauugaga

SEQ ID NO: 919332 - RNA, 19 nt, Artificial Sequence
  Description of Artificial Sequence: Synthetic oligonucleotide
  Sense strand starting at position 2017 of SEQ ID NO: 913332
guguuugacuuaguaaacu

SEQ ID NO: 919333 - RNA, 19 nt, Artificial Sequence
  Description of Artificial Sequence: Synthetic oligonucleotide
  Antisense strand to SEQ ID NO: 919332
aguuuacuaagucaaacac

SEQ ID NO: 919334 - RNA, 19 nt, Artificial Sequence
  Description of Artificial Sequence: Synthetic oligonucleotide
  Sense strand starting at position 3949 of SEQ ID NO: 913332
ucagcacagucucuuauau

SEQ ID NO: 919335 - RNA, 19 nt, Artificial Sequence
  Description of Artificial Sequence: Synthetic oligonucleotide
  Antisense strand to SEQ ID NO: 919334
auauaagagacugugcuga

SEQ ID NO: 919336 - RNA, 19 nt, Artificial Sequence
  Description of Artificial Sequence: Synthetic oligonucleotide
  Sense strand starting at position 3265 of SEQ ID NO: 913332
guaccugugugaucuugaa

SEQ ID NO: 919337 - RNA, 19 nt, Artificial Sequence
  Description of Artificial Sequence: Synthetic oligonucleotide
  Antisense strand to SEQ ID NO: 919336
uucaagaucacacagguac

SEQ ID NO: 919338 - RNA, 19 nt, Artificial Sequence
  Description of Artificial Sequence: Synthetic oligonucleotide
  Sense strand starting at position 3760 of SEQ ID NO: 913332
gaaauuaguugcccaguuu

SEQ ID NO: 919339 - RNA, 19 nt, Artificial Sequence
  Description of Artificial Sequence: Synthetic oligonucleotide
  Antisense strand to SEQ ID NO: 919338
aaacugggcaacuaauuuc

SEQ ID NO: 919340 - RNA, 19 nt, Artificial Sequence
  Description of Artificial Sequence: Synthetic oligonucleotide
  Sense strand starting at position 2006 of SEQ ID NO: 913332
cugaguaguaaguguuuga

SEQ ID NO: 919341 - RNA, 19 nt, Artificial Sequence
  Description of Artificial Sequence: Synthetic oligonucleotide
  Antisense strand to SEQ ID NO: 919340
ucaaacacuuacuacucag

SEQ ID NO: 919342 - RNA, 19 nt, Artificial Sequence
  Description of Artificial Sequence: Synthetic oligonucleotide
  Sense strand starting at position 1438 of SEQ ID NO: 913332
ggcugccuaguuugaggaa

SEQ ID NO: 919343 - RNA, 19 nt, Artificial Sequence
  Description of Artificial Sequence: Synthetic oligonucleotide
  Antisense strand to SEQ ID NO: 919342
uuccucaaacuaggcagcc

SEQ ID NO: 919344 - RNA, 19 nt, Artificial Sequence
  Description of Artificial Sequence: Synthetic oligonucleotide
  Sense strand starting at position 2009 of SEQ ID NO: 913332
aguaguaaguguuugacuu

SEQ ID NO: 919345 - RNA, 19 nt, Artificial Sequence
  Description of Artificial Sequence: Synthetic oligonucleotide
  Antisense strand to SEQ ID NO: 919344
aagucaaacacuuacuacu

SEQ ID NO: 919346 - RNA, 19 nt, Artificial Sequence
  Description of Artificial Sequence: Synthetic oligonucleotide
  Sense strand starting at position 2013 of SEQ ID NO: 913332
guaaguguuugacuuagua

SEQ ID NO: 919347 - RNA, 19 nt, Artificial Sequence
  Description of Artificial Sequence: Synthetic oligonucleotide
  Antisense strand to SEQ ID NO: 919346
uacuaagucaaacacuuac

SEQ ID NO: 919348 - RNA, 19 nt, Artificial Sequence
  Description of Artificial Sequence: Synthetic oligonucleotide
  Sense strand starting at position 3261 of SEQ ID NO: 913332
ugauguaccugugugaucu

SEQ ID NO: 919349 - RNA, 19 nt, Artificial Sequence
  Description of Artificial Sequence: Synthetic oligonucleotide
  Antisense strand to SEQ ID NO: 919348
agaucacacagguacauca

SEQ ID NO: 919350 - RNA, 19 nt, Artificial Sequence
  Description of Artificial Sequence: Synthetic oligonucleotide
  Sense strand starting at position 1247 of SEQ ID NO: 913332
guaguuuccucuucccaca

SEQ ID NO: 919351 - RNA, 19 nt, Artificial Sequence
  Description of Artificial Sequence: Synthetic oligonucleotide
  Antisense strand to SEQ ID NO: 919350
ugugggaagaggaaacuac

SEQ ID NO: 919352 - RNA, 19 nt, Artificial Sequence
  Description of Artificial Sequence: Synthetic oligonucleotide
  Sense strand starting at position 2010 of SEQ ID NO: 913332
guaguaaguguuugacuua

SEQ ID NO: 919353 - RNA, 19 nt, Artificial Sequence
  Description of Artificial Sequence: Synthetic oligonucleotide
  Antisense strand to SEQ ID NO: 919352
uaagucaaacacuuacuac

SEQ ID NO: 919354 - RNA, 19 nt, Artificial Sequence
  Description of Artificial Sequence: Synthetic oligonucleotide
  Sense strand starting at position 3262 of SEQ ID NO: 913332
gauguaccugugugaucuu

SEQ ID NO: 919355 - RNA, 19 nt, Artificial Sequence
  Description of Artificial Sequence: Synthetic oligonucleotide
  Antisense strand to SEQ ID NO: 919354
aagaucacacagguacauc

SEQ ID NO: 919356 - RNA, 19 nt, Artificial Sequence
  Description of Artificial Sequence: Synthetic oligonucleotide
  Sense strand starting at position 1636 of SEQ ID NO: 913332
gggcaccuaucagaauaua

SEQ ID NO: 919357 - RNA, 19 nt, Artificial Sequence
  Description of Artificial Sequence: Synthetic oligonucleotide
  Antisense strand to SEQ ID NO: 919356
uauauucugauaggugccc

SEQ ID NO: 919358 - RNA, 19 nt, Artificial Sequence
  Description of Artificial Sequence: Synthetic oligonucleotide
  Sense strand starting at position 2073 of SEQ ID NO: 913332
cggaaucuuucuuaaagga

SEQ ID NO: 919359 - RNA, 19 nt, Artificial Sequence
  Description of Artificial Sequence: Synthetic oligonucleotide
  Antisense strand to SEQ ID NO: 919358
uccuuuaagaaagauuccg

SEQ ID NO: 919360 - RNA, 19 nt, Artificial Sequence
  Description of Artificial Sequence: Synthetic oligonucleotide
  Sense strand starting at position 1295 of SEQ ID NO: 913332
gacacaaacugugaugcau

SEQ ID NO: 919361 - RNA, 19 nt, Artificial Sequence
  Description of Artificial Sequence: Synthetic oligonucleotide
  Antisense strand to SEQ ID NO: 919360
augcaucacaguuuguguc

SEQ ID NO: 919362 - RNA, 19 nt, Artificial Sequence
  Description of Artificial Sequence: Synthetic oligonucleotide
  Sense strand starting at position 346 of SEQ ID NO: 913333
gauggaugccauggagaua

SEQ ID NO: 919363 - RNA, 19 nt, Artificial Sequence
  Description of Artificial Sequence: Synthetic oligonucleotide
  Antisense strand to SEQ ID NO: 919362
uaucuccauggcauccauc

SEQ ID NO: 919364 - RNA, 19 nt, Artificial Sequence
  Description of Artificial Sequence: Synthetic oligonucleotide
  Sense strand starting at position 3567 of SEQ ID NO: 913333
ggccuucgaguguuccagu

SEQ ID NO: 919365 - RNA, 19 nt, Artificial Sequence
  Description of Artificial Sequence: Synthetic oligonucleotide
  Antisense strand to SEQ ID NO: 919364
acuggaacacucgaaggcc

SEQ ID NO: 919366 - RNA, 19 nt, Artificial Sequence
  Description of Artificial Sequence: Synthetic oligonucleotide
  Sense strand starting at position 3835 of SEQ ID NO: 913333
gugugugaagauuaaauug

SEQ ID NO: 919367 - RNA, 19 nt, Artificial Sequence
  Description of Artificial Sequence: Synthetic oligonucleotide
  Antisense strand to SEQ ID NO: 919366
caauuuaaucuucacacac

SEQ ID NO: 919368 - RNA, 19 nt, Artificial Sequence
  Description of Artificial Sequence: Synthetic oligonucleotide
  Sense strand starting at position 2417 of SEQ ID NO: 913333
auagcaucaguguauagga

SEQ ID NO: 919369 - RNA, 19 nt, Artificial Sequence
  Description of Artificial Sequence: Synthetic oligonucleotide
  Antisense strand to SEQ ID NO: 919368
uccuauacacugaugcuau

SEQ ID NO: 919370 - RNA, 19 nt, Artificial Sequence
  Description of Artificial Sequence: Synthetic oligonucleotide
  Sense strand starting at position 2291 of SEQ ID NO: 913333
ugguguugaccuuaaugac

SEQ ID NO: 919371 - RNA, 19 nt, Artificial Sequence
  Description of Artificial Sequence: Synthetic oligonucleotide
  Antisense strand to SEQ ID NO: 919370
gucauuaaggucaacacca

SEQ ID NO: 919372 - RNA, 19 nt, Artificial Sequence
  Description of Artificial Sequence: Synthetic oligonucleotide
  Sense strand starting at position 2482 of SEQ ID NO: 913333
ggacuuggauccucgaauc

SEQ ID NO: 919373 - RNA, 19 nt, Artificial Sequence
  Description of Artificial Sequence: Synthetic oligonucleotide
  Antisense strand to SEQ ID NO: 919372
gauucgaggauccaagucc

SEQ ID NO: 919374 - RNA, 19 nt, Artificial Sequence
  Description of Artificial Sequence: Synthetic oligonucleotide
  Sense strand starting at position 2814 of SEQ ID NO: 913333
caggucaccuuuccugaga

SEQ ID NO: 919375 - RNA, 19 nt, Artificial Sequence
  Description of Artificial Sequence: Synthetic oligonucleotide
  Antisense strand to SEQ ID NO: 919374
ucucaggaaaggugaccug

SEQ ID NO: 919376 - RNA, 19 nt, Artificial Sequence
  Description of Artificial Sequence: Synthetic oligonucleotide
  Sense strand starting at position 2815 of SEQ ID NO: 913333
aggucaccuuuccugagau

SEQ ID NO: 919377 - RNA, 19 nt, Artificial Sequence
  Description of Artificial Sequence: Synthetic oligonucleotide
  Antisense strand to SEQ ID NO: 919376
aucucaggaaaggugaccu

SEQ ID NO: 919378 - RNA, 19 nt, Artificial Sequence
  Description of Artificial Sequence: Synthetic oligonucleotide
  Sense strand starting at position 1191 of SEQ ID NO: 913333
ugucuccugacugggauau

SEQ ID NO: 919379 - RNA, 19 nt, Artificial Sequence
  Description of Artificial Sequence: Synthetic oligonucleotide
  Antisense strand to SEQ ID NO: 919378
auaucccagucaggagaca

SEQ ID NO: 919380 - RNA, 19 nt, Artificial Sequence
  Description of Artificial Sequence: Synthetic oligonucleotide
  Sense strand starting at position 1190 of SEQ ID NO: 913333
uugucuccugacugggaua

SEQ ID NO: 919381 - RNA, 19 nt, Artificial Sequence
  Description of Artificial Sequence: Synthetic oligonucleotide
  Antisense strand to SEQ ID NO: 919380
uaucccagucaggagacaa

SEQ ID NO: 919382 - RNA, 19 nt, Artificial Sequence
  Description of Artificial Sequence: Synthetic oligonucleotide
  Sense strand starting at position 3205 of SEQ ID NO: 913333
gagggaguuguuuggaagu

SEQ ID NO: 919383 - RNA, 19 nt, Artificial Sequence
  Description of Artificial Sequence: Synthetic oligonucleotide
  Antisense strand to SEQ ID NO: 919382
acuuccaaacaacucccuc

SEQ ID NO: 919384 - RNA, 19 nt, Artificial Sequence
  Description of Artificial Sequence: Synthetic oligonucleotide
  Sense strand starting at position 3575 of SEQ ID NO: 913333
aguguuccaguuuaucaca

SEQ ID NO: 919385 - RNA, 19 nt, Artificial Sequence
  Description of Artificial Sequence: Synthetic oligonucleotide
  Antisense strand to SEQ ID NO: 919384
ugugauaaacuggaacacu

SEQ ID NO: 919386 - RNA, 19 nt, Artificial Sequence
  Description of Artificial Sequence: Synthetic oligonucleotide
  Sense strand starting at position 1007 of SEQ ID NO: 913333
gaaccucgucucgauuaac

SEQ ID NO: 919387 - RNA, 19 nt, Artificial Sequence
  Description of Artificial Sequence: Synthetic oligonucleotide
  Antisense strand to SEQ ID NO: 919386
guuaaucgagacgagguuc

SEQ ID NO: 919388 - RNA, 19 nt, Artificial Sequence
  Description of Artificial Sequence: Synthetic oligonucleotide
  Sense strand starting at position 2619 of SEQ ID NO: 913333
cggagagggccugguaaau

SEQ ID NO: 919389 - RNA, 19 nt, Artificial Sequence
  Description of Artificial Sequence: Synthetic oligonucleotide
  Antisense strand to SEQ ID NO: 919388
auuuaccaggcccucuccg

SEQ ID NO: 919390 - RNA, 19 nt, Artificial Sequence
  Description of Artificial Sequence: Synthetic oligonucleotide
  Sense strand starting at position 2091 of SEQ ID NO: 913333
agcacauccuggccuaaga

SEQ ID NO: 919391 - RNA, 19 nt, Artificial Sequence
  Description of Artificial Sequence: Synthetic oligonucleotide
  Antisense strand to SEQ ID NO: 919390
ucuuaggccaggaugugcu

SEQ ID NO: 919392 - RNA, 19 nt, Artificial Sequence
  Description of Artificial Sequence: Synthetic oligonucleotide
  Sense strand starting at position 3875 of SEQ ID NO: 913333
agcaguggaccuugugaga

SEQ ID NO: 919393 - RNA, 19 nt, Artificial Sequence
  Description of Artificial Sequence: Synthetic oligonucleotide
  Antisense strand to SEQ ID NO: 919392
ucucacaagguccacugcu

SEQ ID NO: 919394 - RNA, 19 nt, Artificial Sequence
  Description of Artificial Sequence: Synthetic oligonucleotide
  Sense strand starting at position 769 of SEQ ID NO: 913333
uuaagacauuaggagacaa

SEQ ID NO: 919395 - RNA, 19 nt, Artificial Sequence
  Description of Artificial Sequence: Synthetic oligonucleotide
  Antisense strand to SEQ ID NO: 919394
uugucuccuaaugucuuaa

SEQ ID NO: 919396 - RNA, 19 nt, Artificial Sequence
  Description of Artificial Sequence: Synthetic oligonucleotide
  Sense strand starting at position 2894 of SEQ ID NO: 913333
gggccugaguggagaagau

SEQ ID NO: 919397 - RNA, 19 nt, Artificial Sequence
  Description of Artificial Sequence: Synthetic oligonucleotide
  Antisense strand to SEQ ID NO: 919396
aucuucuccacucaggccc

SEQ ID NO: 919398 - RNA, 19 nt, Artificial Sequence
  Description of Artificial Sequence: Synthetic oligonucleotide
  Sense strand starting at position 306 of SEQ ID NO: 913333
cucuguguccuccagagua

SEQ ID NO: 919399 - RNA, 19 nt, Artificial Sequence
  Description of Artificial Sequence: Synthetic oligonucleotide
  Antisense strand to SEQ ID NO: 919398
uacucuggaggacacagag

SEQ ID NO: 919400 - RNA, 19 nt, Artificial Sequence
  Description of Artificial Sequence: Synthetic oligonucleotide
  Sense strand starting at position 308 of SEQ ID NO: 913333
cuguguccuccagaguauu

SEQ ID NO: 919401 - RNA, 19 nt, Artificial Sequence
  Description of Artificial Sequence: Synthetic oligonucleotide
  Antisense strand to SEQ ID NO: 919400
aauacucuggaggacacag

SEQ ID NO: 919402 - RNA, 19 nt, Artificial Sequence
  Description of Artificial Sequence: Synthetic oligonucleotide
  Sense strand starting at position 2412 of SEQ ID NO: 913333
uguugauagcaucagugua

SEQ ID NO: 919403 - RNA, 19 nt, Artificial Sequence
  Description of Artificial Sequence: Synthetic oligonucleotide
  Antisense strand to SEQ ID NO: 919402
uacacugaugcuaucaaca

SEQ ID NO: 919404 - RNA, 19 nt, Artificial Sequence
  Description of Artificial Sequence: Synthetic oligonucleotide
  Sense strand starting at position 2414 of SEQ ID NO: 913333
uugauagcaucaguguaua

SEQ ID NO: 919405 - RNA, 19 nt, Artificial Sequence
  Description of Artificial Sequence: Synthetic oligonucleotide
  Antisense strand to SEQ ID NO: 919404
uauacacugaugcuaucaa

SEQ ID NO: 919406 - RNA, 19 nt, Artificial Sequence
  Description of Artificial Sequence: Synthetic oligonucleotide
  Sense strand starting at position 2852 of SEQ ID NO: 913333
gagaguaugacuuguggcu

SEQ ID NO: 919407 - RNA, 19 nt, Artificial Sequence
  Description of Artificial Sequence: Synthetic oligonucleotide
  Antisense strand to SEQ ID NO: 919406
agccacaagucauacucuc

SEQ ID NO: 919408 - RNA, 19 nt, Artificial Sequence
  Description of Artificial Sequence: Synthetic oligonucleotide
  Sense strand starting at position 319 of SEQ ID NO: 913333
agaguauucggugguacag

SEQ ID NO: 919409 - RNA, 19 nt, Artificial Sequence
  Description of Artificial Sequence: Synthetic oligonucleotide
  Antisense strand to SEQ ID NO: 919408
cuguaccaccgaauacucu

SEQ ID NO: 919410 - RNA, 19 nt, Artificial Sequence
  Description of Artificial Sequence: Synthetic oligonucleotide
  Sense strand starting at position 3532 of SEQ ID NO: 913333
cugaaaucccaccgguagu

SEQ ID NO: 919411 - RNA, 19 nt, Artificial Sequence
  Description of Artificial Sequence: Synthetic oligonucleotide
  Antisense strand to SEQ ID NO: 919410
acuaccggugggauuucag

SEQ ID NO: 919412 - RNA, 19 nt, Artificial Sequence
  Description of Artificial Sequence: Synthetic oligonucleotide
  Sense strand starting at position 629 of SEQ ID NO: 913333
ggcccagaugccugaauuc

SEQ ID NO: 919413 - RNA, 19 nt, Artificial Sequence
  Description of Artificial Sequence: Synthetic oligonucleotide
  Antisense strand to SEQ ID NO: 919412
gaauucaggcaucugggcc

SEQ ID NO: 919414 - RNA, 19 nt, Artificial Sequence
  Description of Artificial Sequence: Synthetic oligonucleotide
  Sense strand starting at position 972 of SEQ ID NO: 913333
ggguuagucaggcaagugu

SEQ ID NO: 919415 - RNA, 19 nt, Artificial Sequence
  Description of Artificial Sequence: Synthetic oligonucleotide
  Antisense strand to SEQ ID NO: 919414
acacuugccugacuaaccc

SEQ ID NO: 919416 - RNA, 19 nt, Artificial Sequence
  Description of Artificial Sequence: Synthetic oligonucleotide
  Sense strand starting at position 318 of SEQ ID NO: 913333
cagaguauucggugguaca

SEQ ID NO: 919417 - RNA, 19 nt, Artificial Sequence
  Description of Artificial Sequence: Synthetic oligonucleotide
  Antisense strand to SEQ ID NO: 919416
uguaccaccgaauacucug

SEQ ID NO: 919418 - RNA, 19 nt, Artificial Sequence
  Description of Artificial Sequence: Synthetic oligonucleotide
  Sense strand starting at position 1003 of SEQ ID NO: 913333
cugggaaccucgucucgau

SEQ ID NO: 919419 - RNA, 19 nt, Artificial Sequence
  Description of Artificial Sequence: Synthetic oligonucleotide
  Antisense strand to SEQ ID NO: 919418
aucgagacgagguucccag

SEQ ID NO: 919420 - RNA, 19 nt, Artificial Sequence
  Description of Artificial Sequence: Synthetic oligonucleotide
  Sense strand starting at position 1102 of SEQ ID NO: 913333
ggaggcuuccuugguagca

SEQ ID NO: 919421 - RNA, 19 nt, Artificial Sequence
  Description of Artificial Sequence: Synthetic oligonucleotide
  Antisense strand to SEQ ID NO: 919420
ugcuaccaaggaagccucc

SEQ ID NO: 919422 - RNA, 19 nt, Artificial Sequence
  Description of Artificial Sequence: Synthetic oligonucleotide
  Sense strand starting at position 3208 of SEQ ID NO: 913333
ggaguuguuuggaagugca

SEQ ID NO: 919423 - RNA, 19 nt, Artificial Sequence
  Description of Artificial Sequence: Synthetic oligonucleotide
  Antisense strand to SEQ ID NO: 919422
ugcacuuccaaacaacucc

SEQ ID NO: 919424 - RNA, 19 nt, Artificial Sequence
  Description of Artificial Sequence: Synthetic oligonucleotide
  Sense strand starting at position 1103 of SEQ ID NO: 913333
gaggcuuccuugguagcau

SEQ ID NO: 919425 - RNA, 19 nt, Artificial Sequence
  Description of Artificial Sequence: Synthetic oligonucleotide
  Antisense strand to SEQ ID NO: 919424
augcuaccaaggaagccuc

SEQ ID NO: 919426 - RNA, 19 nt, Artificial Sequence
  Description of Artificial Sequence: Synthetic oligonucleotide
  Sense strand starting at position 2422 of SEQ ID NO: 913333
aucaguguauaggaggaaa

SEQ ID NO: 919427 - RNA, 19 nt, Artificial Sequence
  Description of Artificial Sequence: Synthetic oligonucleotide
  Antisense strand to SEQ ID NO: 919426
uuuccuccuauacacugau

SEQ ID NO: 919428 - RNA, 19 nt, Artificial Sequence
  Description of Artificial Sequence: Synthetic oligonucleotide
  Sense strand starting at position 3324 of SEQ ID NO: 913333
agaggcaggugaugagauu

SEQ ID NO: 919429 - RNA, 19 nt, Artificial Sequence
  Description of Artificial Sequence: Synthetic oligonucleotide
  Antisense strand to SEQ ID NO: 919428
aaucucaucaccugccucu

SEQ ID NO: 919430 - RNA, 19 nt, Artificial Sequence
  Description of Artificial Sequence: Synthetic oligonucleotide
  Sense strand starting at position 3568 of SEQ ID NO: 913333
gccuucgaguguuccaguu

SEQ ID NO: 919431 - RNA, 19 nt, Artificial Sequence
  Description of Artificial Sequence: Synthetic oligonucleotide
  Antisense strand to SEQ ID NO: 919430
aacuggaacacucgaaggc

SEQ ID NO: 919432 - RNA, 19 nt, Artificial Sequence
  Description of Artificial Sequence: Synthetic oligonucleotide
  Sense strand starting at position 2816 of SEQ ID NO: 913333
ggucaccuuuccugagaug

SEQ ID NO: 919433 - RNA, 19 nt, Artificial Sequence
  Description of Artificial Sequence: Synthetic oligonucleotide
  Antisense strand to SEQ ID NO: 919432
caucucaggaaaggugacc

SEQ ID NO: 919434 - RNA, 19 nt, Artificial Sequence
  Description of Artificial Sequence: Synthetic oligonucleotide
  Sense strand starting at position 411 of SEQ ID NO: 913333
ccaugccucugggauguuu

SEQ ID NO: 919435 - RNA, 19 nt, Artificial Sequence
  Description of Artificial Sequence: Synthetic oligonucleotide
  Antisense strand to SEQ ID NO: 919434
aaacaucccagaggcaugg

SEQ ID NO: 919436 - RNA, 19 nt, Artificial Sequence
  Description of Artificial Sequence: Synthetic oligonucleotide
  Sense strand starting at position 970 of SEQ ID NO: 913333
aaggguuagucaggcaagu

SEQ ID NO: 919437 - RNA, 19 nt, Artificial Sequence
  Description of Artificial Sequence: Synthetic oligonucleotide
  Antisense strand to SEQ ID NO: 919436
acuugccugacuaacccuu

SEQ ID NO: 919438 - RNA, 19 nt, Artificial Sequence
  Description of Artificial Sequence: Synthetic oligonucleotide
  Sense strand starting at position 2363 of SEQ ID NO: 913333
ugcagucucuuguauaauc

SEQ ID NO: 919439 - RNA, 19 nt, Artificial Sequence
  Description of Artificial Sequence: Synthetic oligonucleotide
  Antisense strand to SEQ ID NO: 919438
gauuauacaagagacugca

SEQ ID NO: 919440 - RNA, 19 nt, Artificial Sequence
  Description of Artificial Sequence: Synthetic oligonucleotide
  Sense strand starting at position 1006 of SEQ ID NO: 913333
ggaaccucgucucgauuaa

SEQ ID NO: 919441 - RNA, 19 nt, Artificial Sequence
  Description of Artificial Sequence: Synthetic oligonucleotide
  Antisense strand to SEQ ID NO: 919440
uuaaucgagacgagguucc

SEQ ID NO: 919442 - RNA, 19 nt, Artificial Sequence
  Description of Artificial Sequence: Synthetic oligonucleotide
  Sense strand starting at position 823 of SEQ ID NO: 913334
ucagaacacuggguauaua

SEQ ID NO: 919443 - RNA, 19 nt, Artificial Sequence
  Description of Artificial Sequence: Synthetic oligonucleotide
  Antisense strand to SEQ ID NO: 919442
uauauacccaguguucuga

SEQ ID NO: 919444 - RNA, 19 nt, Artificial Sequence
  Description of Artificial Sequence: Synthetic oligonucleotide
  Sense strand starting at position 3782 of SEQ ID NO: 913334
auuguuccucuggauuaaa

SEQ ID NO: 919445 - RNA, 19 nt, Artificial Sequence
  Description of Artificial Sequence: Synthetic oligonucleotide
  Antisense strand to SEQ ID NO: 919444
uuuaauccagaggaacaau

SEQ ID NO: 919446 - RNA, 19 nt, Artificial Sequence
  Description of Artificial Sequence: Synthetic oligonucleotide
  Sense strand starting at position 3847 of SEQ ID NO: 913334
ggagacacuggcuagaguu

SEQ ID NO: 919447 - RNA, 19 nt, Artificial Sequence
  Description of Artificial Sequence: Synthetic oligonucleotide
  Antisense strand to SEQ ID NO: 919446
aacucuagccagugucucc

SEQ ID NO: 919448 - RNA, 19 nt, Artificial Sequence
  Description of Artificial Sequence: Synthetic oligonucleotide
  Sense strand starting at position 3635 of SEQ ID NO: 913334
cucuuuaaccugggaaaug

SEQ ID NO: 919449 - RNA, 19 nt, Artificial Sequence
  Description of Artificial Sequence: Synthetic oligonucleotide
  Antisense strand to SEQ ID NO: 919448
cauuucccagguuaaagag

SEQ ID NO: 919450 - RNA, 19 nt, Artificial Sequence
  Description of Artificial Sequence: Synthetic oligonucleotide
  Sense strand starting at position 1346 of SEQ ID NO: 913334
gcuugcaacccuggaauuu

SEQ ID NO: 919451 - RNA, 19 nt, Artificial Sequence
  Description of Artificial Sequence: Synthetic oligonucleotide
  Antisense strand to SEQ ID NO: 919450
aaauuccaggguugcaagc

SEQ ID NO: 919452 - RNA, 19 nt, Artificial Sequence
  Description of Artificial Sequence: Synthetic oligonucleotide
  Sense strand starting at position 2174 of SEQ ID NO: 913334
gaagccucagccuaggaaa

SEQ ID NO: 919453 - RNA, 19 nt, Artificial Sequence
  Description of Artificial Sequence: Synthetic oligonucleotide
  Antisense strand to SEQ ID NO: 919452
uuuccuaggcugaggcuuc

SEQ ID NO: 919454 - RNA, 19 nt, Artificial Sequence
  Description of Artificial Sequence: Synthetic oligonucleotide
  Sense strand starting at position 2572 of SEQ ID NO: 913334
aaugcaguugaagaguuaa

SEQ ID NO: 919455 - RNA, 19 nt, Artificial Sequence
  Description of Artificial Sequence: Synthetic oligonucleotide
  Antisense strand to SEQ ID NO: 919454
uuaacucuucaacugcauu

SEQ ID NO: 919456 - RNA, 19 nt, Artificial Sequence
  Description of Artificial Sequence: Synthetic oligonucleotide
  Sense strand starting at position 3727 of SEQ ID NO: 913334
gcuauacuuggcgugguua

SEQ ID NO: 919457 - RNA, 19 nt, Artificial Sequence
  Description of Artificial Sequence: Synthetic oligonucleotide
  Antisense strand to SEQ ID NO: 919456
uaaccacgccaaguauagc

SEQ ID NO: 919458 - RNA, 19 nt, Artificial Sequence
  Description of Artificial Sequence: Synthetic oligonucleotide
  Sense strand starting at position 3889 of SEQ ID NO: 913334
guugauagauaauccacau

SEQ ID NO: 919459 - RNA, 19 nt, Artificial Sequence
  Description of Artificial Sequence: Synthetic oligonucleotide
  Antisense strand to SEQ ID NO: 919458
auguggauuaucuaucaac

SEQ ID NO: 919460 - RNA, 19 nt, Artificial Sequence
  Description of Artificial Sequence: Synthetic oligonucleotide
  Sense strand starting at position 3647 of SEQ ID NO: 913334
ggaaaugccuauccagaau

SEQ ID NO: 919461 - RNA, 19 nt, Artificial Sequence
  Description of Artificial Sequence: Synthetic oligonucleotide
  Antisense strand to SEQ ID NO: 919460
auucuggauaggcauuucc

SEQ ID NO: 919462 - RNA, 19 nt, Artificial Sequence
  Description of Artificial Sequence: Synthetic oligonucleotide
  Sense strand starting at position 52 of SEQ ID NO: 913334
gggaauuaacucuggguau

SEQ ID NO: 919463 - RNA, 19 nt, Artificial Sequence
  Description of Artificial Sequence: Synthetic oligonucleotide
  Antisense strand to SEQ ID NO: 919462
auacccagaguuaauuccc

SEQ ID NO: 919464 - RNA, 19 nt, Artificial Sequence
  Description of Artificial Sequence: Synthetic oligonucleotide
  Sense strand starting at position 1106 of SEQ ID NO: 913334
uccagucaugagcaaacau

SEQ ID NO: 919465 - RNA, 19 nt, Artificial Sequence
  Description of Artificial Sequence: Synthetic oligonucleotide
  Antisense strand to SEQ ID NO: 919464
auguuugcucaugacugga

SEQ ID NO: 919466 - RNA, 19 nt, Artificial Sequence
  Description of Artificial Sequence: Synthetic oligonucleotide
  Sense strand starting at position 3634 of SEQ ID NO: 913334
ucucuuuaaccugggaaau

SEQ ID NO: 919467 - RNA, 19 nt, Artificial Sequence
  Description of Artificial Sequence: Synthetic oligonucleotide
  Antisense strand to SEQ ID NO: 919466
auuucccagguuaaagaga

SEQ ID NO: 919468 - RNA, 19 nt, Artificial Sequence
  Description of Artificial Sequence: Synthetic oligonucleotide
  Sense strand starting at position 2261 of SEQ ID NO: 913334
uggaucugauggucccaaa

SEQ ID NO: 919469 - RNA, 19 nt, Artificial Sequence
  Description of Artificial Sequence: Synthetic oligonucleotide
  Antisense strand to SEQ ID NO: 919468
uuugggaccaucagaucca

SEQ ID NO: 919470 - RNA, 19 nt, Artificial Sequence
  Description of Artificial Sequence: Synthetic oligonucleotide
  Sense strand starting at position 2251 of SEQ ID NO: 913334
agucaauugcuggaucuga

SEQ ID NO: 919471 - RNA, 19 nt, Artificial Sequence
  Description of Artificial Sequence: Synthetic oligonucleotide
  Antisense strand to SEQ ID NO: 919470
ucagauccagcaauugacu

SEQ ID NO: 919472 - RNA, 19 nt, Artificial Sequence
  Description of Artificial Sequence: Synthetic oligonucleotide
  Sense strand starting at position 1155 of SEQ ID NO: 913334
gcaauauaccugcaucaga

SEQ ID NO: 919473 - RNA, 19 nt, Artificial Sequence
  Description of Artificial Sequence: Synthetic oligonucleotide
  Antisense strand to SEQ ID NO: 919472
ucugaugcagguauauugc

SEQ ID NO: 919474 - RNA, 19 nt, Artificial Sequence
  Description of Artificial Sequence: Synthetic oligonucleotide
  Sense strand starting at position 66 of SEQ ID NO: 913334
gguauaauagccuaauucu

SEQ ID NO: 919475 - RNA, 19 nt, Artificial Sequence
  Description of Artificial Sequence: Synthetic oligonucleotide
  Antisense strand to SEQ ID NO: 919474
agaauuaggcuauuauacc

SEQ ID NO: 919476 - RNA, 19 nt, Artificial Sequence
  Description of Artificial Sequence: Synthetic oligonucleotide
  Sense strand starting at position 2816 of SEQ ID NO: 913334
ggaauauaggugugaacga

SEQ ID NO: 919477 - RNA, 19 nt, Artificial Sequence
  Description of Artificial Sequence: Synthetic oligonucleotide
  Antisense strand to SEQ ID NO: 919476
ucguucacaccuauauucc

SEQ ID NO: 919478 - RNA, 19 nt, Artificial Sequence
  Description of Artificial Sequence: Synthetic oligonucleotide
  Sense strand starting at position 1208 of SEQ ID NO: 913334
caaugaaguucugucagag

SEQ ID NO: 919479 - RNA, 19 nt, Artificial Sequence
  Description of Artificial Sequence: Synthetic oligonucleotide
  Antisense strand to SEQ ID NO: 919478
cucugacagaacuucauug

SEQ ID NO: 919480 - RNA, 19 nt, Artificial Sequence
  Description of Artificial Sequence: Synthetic oligonucleotide
  Sense strand starting at position 2880 of SEQ ID NO: 913334
ggcauuaacuuacugacca

SEQ ID NO: 919481 - RNA, 19 nt, Artificial Sequence
  Description of Artificial Sequence: Synthetic oligonucleotide
  Antisense strand to SEQ ID NO: 919480
uggucaguaaguuaaugcc

SEQ ID NO: 919482 - RNA, 19 nt, Artificial Sequence
  Description of Artificial Sequence: Synthetic oligonucleotide
  Sense strand starting at position 822 of SEQ ID NO: 913334
gucagaacacuggguauau

SEQ ID NO: 919483 - RNA, 19 nt, Artificial Sequence
  Description of Artificial Sequence: Synthetic oligonucleotide
  Antisense strand to SEQ ID NO: 919482
auauacccaguguucugac

SEQ ID NO: 919484 - RNA, 19 nt, Artificial Sequence
  Description of Artificial Sequence: Synthetic oligonucleotide
  Sense strand starting at position 820 of SEQ ID NO: 913334
cagucagaacacuggguau

SEQ ID NO: 919485 - RNA, 19 nt, Artificial Sequence
  Description of Artificial Sequence: Synthetic oligonucleotide
  Antisense strand to SEQ ID NO: 919484
auacccaguguucugacug

SEQ ID NO: 919486 - RNA, 19 nt, Artificial Sequence
  Description of Artificial Sequence: Synthetic oligonucleotide
  Sense strand starting at position 645 of SEQ ID NO: 913334
ucuuaaacacaauguagua

SEQ ID NO: 919487 - RNA, 19 nt, Artificial Sequence
  Description of Artificial Sequence: Synthetic oligonucleotide
  Antisense strand to SEQ ID NO: 919486
uacuacauuguguuuaaga

SEQ ID NO: 919488 - RNA, 19 nt, Artificial Sequence
  Description of Artificial Sequence: Synthetic oligonucleotide
  Sense strand starting at position 2322 of SEQ ID NO: 913334
uggaaagugucacuuuaug

SEQ ID NO: 919489 - RNA, 19 nt, Artificial Sequence
  Description of Artificial Sequence: Synthetic oligonucleotide
  Antisense strand to SEQ ID NO: 919488
cauaaagugacacuuucca

SEQ ID NO: 919490 - RNA, 19 nt, Artificial Sequence
  Description of Artificial Sequence: Synthetic oligonucleotide
  Sense strand starting at position 3662 of SEQ ID NO: 913334
gaaugaagccauggucuau

SEQ ID NO: 919491 - RNA, 19 nt, Artificial Sequence
  Description of Artificial Sequence: Synthetic oligonucleotide
  Antisense strand to SEQ ID NO: 919490
auagaccauggcuucauuc

SEQ ID NO: 919492 - RNA, 19 nt, Artificial Sequence
  Description of Artificial Sequence: Synthetic oligonucleotide
  Sense strand starting at position 2643 of SEQ ID NO: 913334
aucaguaaaugcuuuauga

SEQ ID NO: 919493 - RNA, 19 nt, Artificial Sequence
  Description of Artificial Sequence: Synthetic oligonucleotide
  Antisense strand to SEQ ID NO: 919492
ucauaaagcauuuacugau

SEQ ID NO: 919494 - RNA, 19 nt, Artificial Sequence
  Description of Artificial Sequence: Synthetic oligonucleotide
  Sense strand starting at position 3740 of SEQ ID NO: 913334
ugguuaagacuuugaccga

SEQ ID NO: 919495 - RNA, 19 nt, Artificial Sequence
  Description of Artificial Sequence: Synthetic oligonucleotide
  Antisense strand to SEQ ID NO: 919494
ucggucaaagucuuaacca

SEQ ID NO: 919496 - RNA, 19 nt, Artificial Sequence
  Description of Artificial Sequence: Synthetic oligonucleotide
  Sense strand starting at position 2246 of SEQ ID NO: 913334
uugagagucaauugcugga

SEQ ID NO: 919497 - RNA, 19 nt, Artificial Sequence
  Description of Artificial Sequence: Synthetic oligonucleotide
  Antisense strand to SEQ ID NO: 919496
uccagcaauugacucucaa

SEQ ID NO: 919498 - RNA, 19 nt, Artificial Sequence
  Description of Artificial Sequence: Synthetic oligonucleotide
  Sense strand starting at position 64 of SEQ ID NO: 913334
uggguauaauagccuaauu

SEQ ID NO: 919499 - RNA, 19 nt, Artificial Sequence
  Description of Artificial Sequence: Synthetic oligonucleotide
  Antisense strand to SEQ ID NO: 919498
aauuaggcuauuauaccca

SEQ ID NO: 919500 - RNA, 19 nt, Artificial Sequence
  Description of Artificial Sequence: Synthetic oligonucleotide
  Sense strand starting at position 206 of SEQ ID NO: 913334
agauaaguacuuugucuau

SEQ ID NO: 919501 - RNA, 19 nt, Artificial Sequence
  Description of Artificial Sequence: Synthetic oligonucleotide
  Antisense strand to SEQ ID NO: 919500
auagacaaaguacuuaucu

SEQ ID NO: 919502 - RNA, 19 nt, Artificial Sequence
  Description of Artificial Sequence: Synthetic oligonucleotide
  Sense strand starting at position 204 of SEQ ID NO: 913334
ugagauaaguacuuugucu

SEQ ID NO: 919503 - RNA, 19 nt, Artificial Sequence
  Description of Artificial Sequence: Synthetic oligonucleotide
  Antisense strand to SEQ ID NO: 919502
agacaaaguacuuaucuca

SEQ ID NO: 919504 - RNA, 19 nt, Artificial Sequence
  Description of Artificial Sequence: Synthetic oligonucleotide
  Sense strand starting at position 868 of SEQ ID NO: 913334
guugaacuagcguaaauua

SEQ ID NO: 919505 - RNA, 19 nt, Artificial Sequence
  Description of Artificial Sequence: Synthetic oligonucleotide
  Antisense strand to SEQ ID NO: 919504
uaauuuacgcuaguucaac

SEQ ID NO: 919506 - RNA, 19 nt, Artificial Sequence
  Description of Artificial Sequence: Synthetic oligonucleotide
  Sense strand starting at position 2568 of SEQ ID NO: 913334
guuuaaugcaguugaagag

SEQ ID NO: 919507 - RNA, 19 nt, Artificial Sequence
  Description of Artificial Sequence: Synthetic oligonucleotide
  Antisense strand to SEQ ID NO: 919506
cucuucaacugcauuaaac

SEQ ID NO: 919508 - RNA, 19 nt, Artificial Sequence
  Description of Artificial Sequence: Synthetic oligonucleotide
  Sense strand starting at position 3944 of SEQ ID NO: 913334
uacaaaucucguggaucuu

SEQ ID NO: 919509 - RNA, 19 nt, Artificial Sequence
  Description of Artificial Sequence: Synthetic oligonucleotide
  Antisense strand to SEQ ID NO: 919508
aagauccacgagauuugua

SEQ ID NO: 919510 - RNA, 19 nt, Artificial Sequence
  Description of Artificial Sequence: Synthetic oligonucleotide
  Sense strand starting at position 3777 of SEQ ID NO: 913334
agucaauuguuccucugga

SEQ ID NO: 919511 - RNA, 19 nt, Artificial Sequence
  Description of Artificial Sequence: Synthetic oligonucleotide
  Antisense strand to SEQ ID NO: 919510
uccagaggaacaauugacu

SEQ ID NO: 919512 - RNA, 19 nt, Artificial Sequence
  Description of Artificial Sequence: Synthetic oligonucleotide
  Sense strand starting at position 583 of SEQ ID NO: 913334
gacagacuauguccgaguu

SEQ ID NO: 919513 - RNA, 19 nt, Artificial Sequence
  Description of Artificial Sequence: Synthetic oligonucleotide
  Antisense strand to SEQ ID NO: 919512
aacucggacauagucuguc

SEQ ID NO: 919514 - RNA, 19 nt, Artificial Sequence
  Description of Artificial Sequence: Synthetic oligonucleotide
  Sense strand starting at position 3688 of SEQ ID NO: 913334
auguguucaguccaugagu

SEQ ID NO: 919515 - RNA, 19 nt, Artificial Sequence
  Description of Artificial Sequence: Synthetic oligonucleotide
  Antisense strand to SEQ ID NO: 919514
acucauggacugaacacau

SEQ ID NO: 919516 - RNA, 19 nt, Artificial Sequence
  Description of Artificial Sequence: Synthetic oligonucleotide
  Sense strand starting at position 2100 of SEQ ID NO: 913334
ggucuucgggagugggauu

SEQ ID NO: 919517 - RNA, 19 nt, Artificial Sequence
  Description of Artificial Sequence: Synthetic oligonucleotide
  Antisense strand to SEQ ID NO: 919516
aaucccacucccgaagacc

SEQ ID NO: 919518 - RNA, 19 nt, Artificial Sequence
  Description of Artificial Sequence: Synthetic oligonucleotide
  Sense strand starting at position 217 of SEQ ID NO: 913334
uugucuauguuaguacaga

SEQ ID NO: 919519 - RNA, 19 nt, Artificial Sequence
  Description of Artificial Sequence: Synthetic oligonucleotide
  Antisense strand to SEQ ID NO: 919518
ucuguacuaacauagacaa

SEQ ID NO: 919520 - RNA, 19 nt, Artificial Sequence
  Description of Artificial Sequence: Synthetic oligonucleotide
  Sense strand starting at position 3778 of SEQ ID NO: 913334
gucaauuguuccucuggau

SEQ ID NO: 919521 - RNA, 19 nt, Artificial Sequence
  Description of Artificial Sequence: Synthetic oligonucleotide
  Antisense strand to SEQ ID NO: 919520
auccagaggaacaauugac

SEQ ID NO: 919522 - RNA, 19 nt, Artificial Sequence
  Description of Artificial Sequence: Synthetic oligonucleotide
  Sense strand starting at position 3273 of SEQ ID NO: 913335
cuuuaauaguaacugagga

SEQ ID NO: 919523 - RNA, 19 nt, Artificial Sequence
  Description of Artificial Sequence: Synthetic oligonucleotide
  Antisense strand to SEQ ID NO: 919522
uccucaguuacuauuaaag

SEQ ID NO: 919524 - RNA, 19 nt, Artificial Sequence
  Description of Artificial Sequence: Synthetic oligonucleotide
  Sense strand starting at position 3036 of SEQ ID NO: 913335
gguuuacauggagauugua

SEQ ID NO: 919525 - RNA, 19 nt, Artificial Sequence
  Description of Artificial Sequence: Synthetic oligonucleotide
  Antisense strand to SEQ ID NO: 919524
uacaaucuccauguaaacc

SEQ ID NO: 919526 - RNA, 19 nt, Artificial Sequence
  Description of Artificial Sequence: Synthetic oligonucleotide
  Sense strand starting at position 979 of SEQ ID NO: 913335
ggugaagaagagugauacu

SEQ ID NO: 919527 - RNA, 19 nt, Artificial Sequence
  Description of Artificial Sequence: Synthetic oligonucleotide
  Antisense strand to SEQ ID NO: 919526
aguaucacucuucuucacc

SEQ ID NO: 919528 - RNA, 19 nt, Artificial Sequence
  Description of Artificial Sequence: Synthetic oligonucleotide
  Sense strand starting at position 2931 of SEQ ID NO: 913335
uuguuugaaccugaaacuu

SEQ ID NO: 919529 - RNA, 19 nt, Artificial Sequence
  Description of Artificial Sequence: Synthetic oligonucleotide
  Antisense strand to SEQ ID NO: 919528
aaguuucagguucaaacaa

SEQ ID NO: 919530 - RNA, 19 nt, Artificial Sequence
  Description of Artificial Sequence: Synthetic oligonucleotide
  Sense strand starting at position 2808 of SEQ ID NO: 913335
ugaggaaugcagugagaag

SEQ ID NO: 919531 - RNA, 19 nt, Artificial Sequence
  Description of Artificial Sequence: Synthetic oligonucleotide
  Antisense strand to SEQ ID NO: 919530
cuucucacugcauuccuca

SEQ ID NO: 919532 - RNA, 19 nt, Artificial Sequence
  Description of Artificial Sequence: Synthetic oligonucleotide
  Sense strand starting at position 3077 of SEQ ID NO: 913335
gagaauuaagcccgaaaga

SEQ ID NO: 919533 - RNA, 19 nt, Artificial Sequence
  Description of Artificial Sequence: Synthetic oligonucleotide
  Antisense strand to SEQ ID NO: 919532
ucuuucgggcuuaauucuc

SEQ ID NO: 919534 - RNA, 19 nt, Artificial Sequence
  Description of Artificial Sequence: Synthetic oligonucleotide
  Sense strand starting at position 3034 of SEQ ID NO: 913335
gugguuuacauggagauug

SEQ ID NO: 919535 - RNA, 19 nt, Artificial Sequence
  Description of Artificial Sequence: Synthetic oligonucleotide
  Antisense strand to SEQ ID NO: 919534
caaucuccauguaaaccac

SEQ ID NO: 919536 - RNA, 19 nt, Artificial Sequence
  Description of Artificial Sequence: Synthetic oligonucleotide
  Sense strand starting at position 2255 of SEQ ID NO: 913335
acggucuuccugcauauuu

SEQ ID NO: 919537 - RNA, 19 nt, Artificial Sequence
  Description of Artificial Sequence: Synthetic oligonucleotide
  Antisense strand to SEQ ID NO: 919536
aaauaugcaggaagaccgu

SEQ ID NO: 919538 - RNA, 19 nt, Artificial Sequence
  Description of Artificial Sequence: Synthetic oligonucleotide
  Sense strand starting at position 3499 of SEQ ID NO: 913335
aggauuaauuugggaaaga

SEQ ID NO: 919539 - RNA, 19 nt, Artificial Sequence
  Description of Artificial Sequence: Synthetic oligonucleotide
  Antisense strand to SEQ ID NO: 919538
ucuuucccaaauuaauccu

SEQ ID NO: 919540 - RNA, 19 nt, Artificial Sequence
  Description of Artificial Sequence: Synthetic oligonucleotide
  Sense strand starting at position 3498 of SEQ ID NO: 913335
aaggauuaauuugggaaag

SEQ ID NO: 919541 - RNA, 19 nt, Artificial Sequence
  Description of Artificial Sequence: Synthetic oligonucleotide
  Antisense strand to SEQ ID NO: 919540
cuuucccaaauuaauccuu

SEQ ID NO: 919542 - RNA, 19 nt, Artificial Sequence
  Description of Artificial Sequence: Synthetic oligonucleotide
  Sense strand starting at position 969 of SEQ ID NO: 913335
uuccuuuggaggugaagaa

SEQ ID NO: 919543 - RNA, 19 nt, Artificial Sequence
  Description of Artificial Sequence: Synthetic oligonucleotide
  Antisense strand to SEQ ID NO: 919542
uucuucaccuccaaaggaa

SEQ ID NO: 919544 - RNA, 19 nt, Artificial Sequence
  Description of Artificial Sequence: Synthetic oligonucleotide
  Sense strand starting at position 2148 of SEQ ID NO: 913335
agaugaccgccugaaucua

SEQ ID NO: 919545 - RNA, 19 nt, Artificial Sequence
  Description of Artificial Sequence: Synthetic oligonucleotide
  Antisense strand to SEQ ID NO: 919544
uagauucaggcggucaucu

SEQ ID NO: 919546 - RNA, 19 nt, Artificial Sequence
  Description of Artificial Sequence: Synthetic oligonucleotide
  Sense strand starting at position 2207 of SEQ ID NO: 913335
guagaagauuuagauacua

SEQ ID NO: 919547 - RNA, 19 nt, Artificial Sequence
  Description of Artificial Sequence: Synthetic oligonucleotide
  Antisense strand to SEQ ID NO: 919546
uaguaucuaaaucuucuac

SEQ ID NO: 919548 - RNA, 19 nt, Artificial Sequence
  Description of Artificial Sequence: Synthetic oligonucleotide
  Sense strand starting at position 44 of SEQ ID NO: 913335
acugaugcugcacauuaaa

SEQ ID NO: 919549 - RNA, 19 nt, Artificial Sequence
  Description of Artificial Sequence: Synthetic oligonucleotide
  Antisense strand to SEQ ID NO: 919548
uuuaaugugcagcaucagu

SEQ ID NO: 919550 - RNA, 19 nt, Artificial Sequence
  Description of Artificial Sequence: Synthetic oligonucleotide
  Sense strand starting at position 404 of SEQ ID NO: 913335
uccuauuucuguuccugua

SEQ ID NO: 919551 - RNA, 19 nt, Artificial Sequence
  Description of Artificial Sequence: Synthetic oligonucleotide
  Antisense strand to SEQ ID NO: 919550
uacaggaacagaaauagga

SEQ ID NO: 919552 - RNA, 19 nt, Artificial Sequence
  Description of Artificial Sequence: Synthetic oligonucleotide
  Sense strand starting at position 3340 of SEQ ID NO: 913335
gauuauugagaguggcaag

SEQ ID NO: 919553 - RNA, 19 nt, Artificial Sequence
  Description of Artificial Sequence: Synthetic oligonucleotide
  Antisense strand to SEQ ID NO: 919552
cuugccacucucaauaauc

SEQ ID NO: 919554 - RNA, 19 nt, Artificial Sequence
  Description of Artificial Sequence: Synthetic oligonucleotide
  Sense strand starting at position 3550 of SEQ ID NO: 913335
aagugaagugaaugagguu

SEQ ID NO: 919555 - RNA, 19 nt, Artificial Sequence
  Description of Artificial Sequence: Synthetic oligonucleotide
  Antisense strand to SEQ ID NO: 919554
aaccucauucacuucacuu

SEQ ID NO: 919556 - RNA, 19 nt, Artificial Sequence
  Description of Artificial Sequence: Synthetic oligonucleotide
  Sense strand starting at position 2902 of SEQ ID NO: 913335
ggcgauguggcuguuugua

SEQ ID NO: 919557 - RNA, 19 nt, Artificial Sequence
  Description of Artificial Sequence: Synthetic oligonucleotide
  Antisense strand to SEQ ID NO: 919556
uacaaacagccacaucgcc

SEQ ID NO: 919558 - RNA, 19 nt, Artificial Sequence
  Description of Artificial Sequence: Synthetic oligonucleotide
  Sense strand starting at position 837 of SEQ ID NO: 913335
acacuaacccuuugagggu

SEQ ID NO: 919559 - RNA, 19 nt, Artificial Sequence
  Description of Artificial Sequence: Synthetic oligonucleotide
  Antisense strand to SEQ ID NO: 919558
acccucaaaggguuagugu

SEQ ID NO: 919560 - RNA, 19 nt, Artificial Sequence
  Description of Artificial Sequence: Synthetic oligonucleotide
  Sense strand starting at position 2730 of SEQ ID NO: 913335
uucugcuuuggaggacaaa

SEQ ID NO: 919561 - RNA, 19 nt, Artificial Sequence
  Description of Artificial Sequence: Synthetic oligonucleotide
  Antisense strand to SEQ ID NO: 919560
uuuguccuccaaagcagaa

SEQ ID NO: 919562 - RNA, 19 nt, Artificial Sequence
  Description of Artificial Sequence: Synthetic oligonucleotide
  Sense strand starting at position 3240 of SEQ ID NO: 913335
auuagaaagucauugagcu

SEQ ID NO: 919563 - RNA, 19 nt, Artificial Sequence
  Description of Artificial Sequence: Synthetic oligonucleotide
  Antisense strand to SEQ ID NO: 919562
agcucaaugacuuucuaau

SEQ ID NO: 919564 - RNA, 19 nt, Artificial Sequence
  Description of Artificial Sequence: Synthetic oligonucleotide
  Sense strand starting at position 815 of SEQ ID NO: 913335
auguucuugguauaaggua

SEQ ID NO: 919565 - RNA, 19 nt, Artificial Sequence
  Description of Artificial Sequence: Synthetic oligonucleotide
  Antisense strand to SEQ ID NO: 919564
uaccuuauaccaagaacau

SEQ ID NO: 919566 - RNA, 19 nt, Artificial Sequence
  Description of Artificial Sequence: Synthetic oligonucleotide
  Sense strand starting at position 3033 of SEQ ID NO: 913335
agugguuuacauggagauu

SEQ ID NO: 919567 - RNA, 19 nt, Artificial Sequence
  Description of Artificial Sequence: Synthetic oligonucleotide
  Antisense strand to SEQ ID NO: 919566
aaucuccauguaaaccacu

SEQ ID NO: 919568 - RNA, 19 nt, Artificial Sequence
  Description of Artificial Sequence: Synthetic oligonucleotide
  Sense strand starting at position 201 of SEQ ID NO: 913335
guaauaauagccgauccua

SEQ ID NO: 919569 - RNA, 19 nt, Artificial Sequence
  Description of Artificial Sequence: Synthetic oligonucleotide
  Antisense strand to SEQ ID NO: 919568
uaggaucggcuauuauuac

SEQ ID NO: 919570 - RNA, 19 nt, Artificial Sequence
  Description of Artificial Sequence: Synthetic oligonucleotide
  Sense strand starting at position 3026 of SEQ ID NO: 913335
uugaaacagugguuuacau

SEQ ID NO: 919571 - RNA, 19 nt, Artificial Sequence
  Description of Artificial Sequence: Synthetic oligonucleotide
  Antisense strand to SEQ ID NO: 919570
auguaaaccacuguuucaa

SEQ ID NO: 919572 - RNA, 19 nt, Artificial Sequence
  Description of Artificial Sequence: Synthetic oligonucleotide
  Sense strand starting at position 2954 of SEQ ID NO: 913335
ccuuaugugugauuaagaa

SEQ ID NO: 919573 - RNA, 19 nt, Artificial Sequence
  Description of Artificial Sequence: Synthetic oligonucleotide
  Antisense strand to SEQ ID NO: 919572
uucuuaaucacacauaagg

SEQ ID NO: 919574 - RNA, 19 nt, Artificial Sequence
  Description of Artificial Sequence: Synthetic oligonucleotide
  Sense strand starting at position 2911 of SEQ ID NO: 913335
gcuguuuguauuugguaga

SEQ ID NO: 919575 - RNA, 19 nt, Artificial Sequence
  Description of Artificial Sequence: Synthetic oligonucleotide
  Antisense strand to SEQ ID NO: 919574
ucuaccaaauacaaacagc

SEQ ID NO: 919576 - RNA, 19 nt, Artificial Sequence
  Description of Artificial Sequence: Synthetic oligonucleotide
  Sense strand starting at position 2914 of SEQ ID NO: 913335
guuuguauuugguagauuu

SEQ ID NO: 919577 - RNA, 19 nt, Artificial Sequence
  Description of Artificial Sequence: Synthetic oligonucleotide
  Antisense strand to SEQ ID NO: 919576
aaaucuaccaaauacaaac

SEQ ID NO: 919578 - RNA, 19 nt, Artificial Sequence
  Description of Artificial Sequence: Synthetic oligonucleotide
  Sense strand starting at position 3250 of SEQ ID NO: 913335
cauugagcuguuugagaga

SEQ ID NO: 919579 - RNA, 19 nt, Artificial Sequence
  Description of Artificial Sequence: Synthetic oligonucleotide
  Antisense strand to SEQ ID NO: 919578
ucucucaaacagcucaaug

SEQ ID NO: 919580 - RNA, 19 nt, Artificial Sequence
  Description of Artificial Sequence: Synthetic oligonucleotide
  Sense strand starting at position 1017 of SEQ ID NO: 913335
cuguuuaaucaggaguguc

SEQ ID NO: 919581 - RNA, 19 nt, Artificial Sequence
  Description of Artificial Sequence: Synthetic oligonucleotide
  Antisense strand to SEQ ID NO: 919580
gacacuccugauuaaacag

SEQ ID NO: 919582 - RNA, 19 nt, Artificial Sequence
  Description of Artificial Sequence: Synthetic oligonucleotide
  Sense strand starting at position 3214 of SEQ ID NO: 913335
aucagaauaggucguugga

SEQ ID NO: 919583 - RNA, 19 nt, Artificial Sequence
  Description of Artificial Sequence: Synthetic oligonucleotide
  Antisense strand to SEQ ID NO: 919582
uccaacgaccuauucugau

SEQ ID NO: 919584 - RNA, 19 nt, Artificial Sequence
  Description of Artificial Sequence: Synthetic oligonucleotide
  Sense strand starting at position 2830 of SEQ ID NO: 913335
guugcaguucuucaggaga

SEQ ID NO: 919585 - RNA, 19 nt, Artificial Sequence
  Description of Artificial Sequence: Synthetic oligonucleotide
  Antisense strand to SEQ ID NO: 919584
ucuccugaagaacugcaac

SEQ ID NO: 919586 - RNA, 19 nt, Artificial Sequence
  Description of Artificial Sequence: Synthetic oligonucleotide
  Sense strand starting at position 398 of SEQ ID NO: 913335
gcuaguuccuauuucuguu

SEQ ID NO: 919587 - RNA, 19 nt, Artificial Sequence
  Description of Artificial Sequence: Synthetic oligonucleotide
  Antisense strand to SEQ ID NO: 919586
aacagaaauaggaacuagc

SEQ ID NO: 919588 - RNA, 19 nt, Artificial Sequence
  Description of Artificial Sequence: Synthetic oligonucleotide
  Sense strand starting at position 751 of SEQ ID NO: 913335
cugcauauaguuggaauau

SEQ ID NO: 919589 - RNA, 19 nt, Artificial Sequence
  Description of Artificial Sequence: Synthetic oligonucleotide
  Antisense strand to SEQ ID NO: 919588
auauuccaacuauaugcag

SEQ ID NO: 919590 - RNA, 19 nt, Artificial Sequence
  Description of Artificial Sequence: Synthetic oligonucleotide
  Sense strand starting at position 1020 of SEQ ID NO: 913335
uuuaaucaggaguguccua

SEQ ID NO: 919591 - RNA, 19 nt, Artificial Sequence
  Description of Artificial Sequence: Synthetic oligonucleotide
  Antisense strand to SEQ ID NO: 919590
uaggacacuccugauuaaa

SEQ ID NO: 919592 - RNA, 19 nt, Artificial Sequence
  Description of Artificial Sequence: Synthetic oligonucleotide
  Sense strand starting at position 591 of SEQ ID NO: 913335
aggguuauauguucaguag

SEQ ID NO: 919593 - RNA, 19 nt, Artificial Sequence
  Description of Artificial Sequence: Synthetic oligonucleotide
  Antisense strand to SEQ ID NO: 919592
cuacugaacauauaacccu

SEQ ID NO: 919594 - RNA, 19 nt, Artificial Sequence
  Description of Artificial Sequence: Synthetic oligonucleotide
  Sense strand starting at position 478 of SEQ ID NO: 913335
gccuuccuuugaucacaga

SEQ ID NO: 919595 - RNA, 19 nt, Artificial Sequence
  Description of Artificial Sequence: Synthetic oligonucleotide
  Antisense strand to SEQ ID NO: 919594
ucugugaucaaaggaaggc

SEQ ID NO: 919596 - RNA, 19 nt, Artificial Sequence
  Description of Artificial Sequence: Synthetic oligonucleotide
  Sense strand starting at position 3216 of SEQ ID NO: 913335
cagaauaggucguuggauu

SEQ ID NO: 919597 - RNA, 19 nt, Artificial Sequence
  Description of Artificial Sequence: Synthetic oligonucleotide
  Antisense strand to SEQ ID NO: 919596
aauccaacgaccuauucug

SEQ ID NO: 919598 - RNA, 19 nt, Artificial Sequence
  Description of Artificial Sequence: Synthetic oligonucleotide
  Sense strand starting at position 3919 of SEQ ID NO: 913335
ccuuacguaucuuuaggaa

SEQ ID NO: 919599 - RNA, 19 nt, Artificial Sequence
  Description of Artificial Sequence: Synthetic oligonucleotide
  Antisense strand to SEQ ID NO: 919598
uuccuaaagauacguaagg

SEQ ID NO: 919600 - RNA, 19 nt, Artificial Sequence
  Description of Artificial Sequence: Synthetic oligonucleotide
  Sense strand starting at position 2879 of SEQ ID NO: 913335
gcagugaguguggaagagu

SEQ ID NO: 919601 - RNA, 19 nt, Artificial Sequence
  Description of Artificial Sequence: Synthetic oligonucleotide
  Antisense strand to SEQ ID NO: 919600
acucuuccacacucacugc

SEQ ID NO: 919602 - RNA, 19 nt, Artificial Sequence
  Description of Artificial Sequence: Synthetic oligonucleotide
  Sense strand starting at position 3221 of SEQ ID NO: 913336
uaaguuguaggauagugaa

SEQ ID NO: 919603 - RNA, 19 nt, Artificial Sequence
  Description of Artificial Sequence: Synthetic oligonucleotide
  Antisense strand to SEQ ID NO: 919602
uucacuauccuacaacuua

SEQ ID NO: 919604 - RNA, 19 nt, Artificial Sequence
  Description of Artificial Sequence: Synthetic oligonucleotide
  Sense strand starting at position 3021 of SEQ ID NO: 913336
auuggagugguucagugaa

SEQ ID NO: 919605 - RNA, 19 nt, Artificial Sequence
  Description of Artificial Sequence: Synthetic oligonucleotide
  Antisense strand to SEQ ID NO: 919604
uucacugaaccacuccaau

SEQ ID NO: 919606 - RNA, 19 nt, Artificial Sequence
  Description of Artificial Sequence: Synthetic oligonucleotide
  Sense strand starting at position 3035 of SEQ ID NO: 913336
gugaauccucuccaguuaa

SEQ ID NO: 919607 - RNA, 19 nt, Artificial Sequence
  Description of Artificial Sequence: Synthetic oligonucleotide
  Antisense strand to SEQ ID NO: 919606
uuaacuggagaggauucac

SEQ ID NO: 919608 - RNA, 19 nt, Artificial Sequence
  Description of Artificial Sequence: Synthetic oligonucleotide
  Sense strand starting at position 2712 of SEQ ID NO: 913336
cuugguuugccugagaagg

SEQ ID NO: 919609 - RNA, 19 nt, Artificial Sequence
  Description of Artificial Sequence: Synthetic oligonucleotide
  Antisense strand to SEQ ID NO: 919608
ccuucucaggcaaaccaag

SEQ ID NO: 919610 - RNA, 19 nt, Artificial Sequence
  Description of Artificial Sequence: Synthetic oligonucleotide
  Sense strand starting at position 2534 of SEQ ID NO: 913336
cucugugaucaucaagguu

SEQ ID NO: 919611 - RNA, 19 nt, Artificial Sequence
  Description of Artificial Sequence: Synthetic oligonucleotide
  Antisense strand to SEQ ID NO: 919610
aaccuugaugaucacagag

SEQ ID NO: 919612 - RNA, 19 nt, Artificial Sequence
  Description of Artificial Sequence: Synthetic oligonucleotide
  Sense strand starting at position 2620 of SEQ ID NO: 913336
cugguuacagagcaguaua

SEQ ID NO: 919613 - RNA, 19 nt, Artificial Sequence
  Description of Artificial Sequence: Synthetic oligonucleotide
  Antisense strand to SEQ ID NO: 919612
uauacugcucuguaaccag

SEQ ID NO: 919614 - RNA, 19 nt, Artificial Sequence
  Description of Artificial Sequence: Synthetic oligonucleotide
  Sense strand starting at position 2691 of SEQ ID NO: 913336
acauacuagugguuaucaa

SEQ ID NO: 919615 - RNA, 19 nt, Artificial Sequence
  Description of Artificial Sequence: Synthetic oligonucleotide
  Antisense strand to SEQ ID NO: 919614
uugauaaccacuaguaugu

SEQ ID NO: 919616 - RNA, 19 nt, Artificial Sequence
  Description of Artificial Sequence: Synthetic oligonucleotide
  Sense strand starting at position 2789 of SEQ ID NO: 913336
augguucugaggcauccua

SEQ ID NO: 919617 - RNA, 19 nt, Artificial Sequence
  Description of Artificial Sequence: Synthetic oligonucleotide
  Antisense strand to SEQ ID NO: 919616
uaggaugccucagaaccau

SEQ ID NO: 919618 - RNA, 19 nt, Artificial Sequence
  Description of Artificial Sequence: Synthetic oligonucleotide
  Sense strand starting at position 2132 of SEQ ID NO: 913336
uacacauguugggcauaaa

SEQ ID NO: 919619 - RNA, 19 nt, Artificial Sequence
  Description of Artificial Sequence: Synthetic oligonucleotide
  Antisense strand to SEQ ID NO: 919618
uuuaugcccaacaugugua

SEQ ID NO: 919620 - RNA, 19 nt, Artificial Sequence
  Description of Artificial Sequence: Synthetic oligonucleotide
  Sense strand starting at position 3218 of SEQ ID NO: 913336
gaauaaguuguaggauagu

SEQ ID NO: 919621 - RNA, 19 nt, Artificial Sequence
  Description of Artificial Sequence: Synthetic oligonucleotide
  Antisense strand to SEQ ID NO: 919620
acuauccuacaacuuauuc

SEQ ID NO: 919622 - RNA, 19 nt, Artificial Sequence
  Description of Artificial Sequence: Synthetic oligonucleotide
  Sense strand starting at position 2100 of SEQ ID NO: 913336
ucaguuuguugauuggaaa

SEQ ID NO: 919623 - RNA, 19 nt, Artificial Sequence
  Description of Artificial Sequence: Synthetic oligonucleotide
  Antisense strand to SEQ ID NO: 919622
uuuccaaucaacaaacuga

SEQ ID NO: 919624 - RNA, 19 nt, Artificial Sequence
  Description of Artificial Sequence: Synthetic oligonucleotide
  Sense strand starting at position 3090 of SEQ ID NO: 913336
gcuaaugaguacucacaau

SEQ ID NO: 919625 - RNA, 19 nt, Artificial Sequence
  Description of Artificial Sequence: Synthetic oligonucleotide
  Antisense strand to SEQ ID NO: 919624
auugugaguacucauuagc

SEQ ID NO: 919626 - RNA, 19 nt, Artificial Sequence
  Description of Artificial Sequence: Synthetic oligonucleotide
  Sense strand starting at position 2778 of SEQ ID NO: 913336
ggaguuacuagaugguucu

SEQ ID NO: 919627 - RNA, 19 nt, Artificial Sequence
  Description of Artificial Sequence: Synthetic oligonucleotide
  Antisense strand to SEQ ID NO: 919626
agaaccaucuaguaacucc

SEQ ID NO: 919628 - RNA, 19 nt, Artificial Sequence
  Description of Artificial Sequence: Synthetic oligonucleotide
  Sense strand starting at position 3612 of SEQ ID NO: 913336
uaacaagguuuaucgugaa

SEQ ID NO: 919629 - RNA, 19 nt, Artificial Sequence
  Description of Artificial Sequence: Synthetic oligonucleotide
  Antisense strand to SEQ ID NO: 919628
uucacgauaaaccuuguua

SEQ ID NO: 919630 - RNA, 19 nt, Artificial Sequence
  Description of Artificial Sequence: Synthetic oligonucleotide
  Sense strand starting at position 2537 of SEQ ID NO: 913336
ugugaucaucaagguuacu

SEQ ID NO: 919631 - RNA, 19 nt, Artificial Sequence
  Description of Artificial Sequence: Synthetic oligonucleotide
  Antisense strand to SEQ ID NO: 919630
aguaaccuugaugaucaca

SEQ ID NO: 919632 - RNA, 19 nt, Artificial Sequence
  Description of Artificial Sequence: Synthetic oligonucleotide
  Sense strand starting at position 2759 of SEQ ID NO: 913336
ccugucgucacccagagau

SEQ ID NO: 919633 - RNA, 19 nt, Artificial Sequence
  Description of Artificial Sequence: Synthetic oligonucleotide
  Antisense strand to SEQ ID NO: 919632
aucucugggugacgacagg

SEQ ID NO: 919634 - RNA, 19 nt, Artificial Sequence
  Description of Artificial Sequence: Synthetic oligonucleotide
  Sense strand starting at position 3378 of SEQ ID NO: 913336
cugugugucguuaggcaaa

SEQ ID NO: 919635 - RNA, 19 nt, Artificial Sequence
  Description of Artificial Sequence: Synthetic oligonucleotide
  Antisense strand to SEQ ID NO: 919634
uuugccuaacgacacacag

SEQ ID NO: 919636 - RNA, 19 nt, Artificial Sequence
  Description of Artificial Sequence: Synthetic oligonucleotide
  Sense strand starting at position 3514 of SEQ ID NO: 913336
ggucacaccucagagauuu

SEQ ID NO: 919637 - RNA, 19 nt, Artificial Sequence
  Description of Artificial Sequence: Synthetic oligonucleotide
  Antisense strand to SEQ ID NO: 919636
aaaucucugaggugugacc

SEQ ID NO: 919638 - RNA, 19 nt, Artificial Sequence
  Description of Artificial Sequence: Synthetic oligonucleotide
  Sense strand starting at position 3034 of SEQ ID NO: 913336
agugaauccucuccaguua

SEQ ID NO: 919639 - RNA, 19 nt, Artificial Sequence
  Description of Artificial Sequence: Synthetic oligonucleotide
  Antisense strand to SEQ ID NO: 919638
uaacuggagaggauucacu

SEQ ID NO: 919640 - RNA, 19 nt, Artificial Sequence
  Description of Artificial Sequence: Synthetic oligonucleotide
  Sense strand starting at position 3023 of SEQ ID NO: 913336
uggagugguucagugaauc

SEQ ID NO: 919641 - RNA, 19 nt, Artificial Sequence
  Description of Artificial Sequence: Synthetic oligonucleotide
  Antisense strand to SEQ ID NO: 919640
gauucacugaaccacucca

SEQ ID NO: 919642 - RNA, 19 nt, Artificial Sequence
  Description of Artificial Sequence: Synthetic oligonucleotide
  Sense strand starting at position 3303 of SEQ ID NO: 913336
cagcuugaauugguguaaa

SEQ ID NO: 919643 - RNA, 19 nt, Artificial Sequence
  Description of Artificial Sequence: Synthetic oligonucleotide
  Antisense strand to SEQ ID NO: 919642
uuuacaccaauucaagcug

SEQ ID NO: 919644 - RNA, 19 nt, Artificial Sequence
  Description of Artificial Sequence: Synthetic oligonucleotide
  Sense strand starting at position 2709 of SEQ ID NO: 913336
aaucuugguuugccugaga

SEQ ID NO: 919645 - RNA, 19 nt, Artificial Sequence
  Description of Artificial Sequence: Synthetic oligonucleotide
  Antisense strand to SEQ ID NO: 919644
ucucaggcaaaccaagauu

SEQ ID NO: 919646 - RNA, 19 nt, Artificial Sequence
  Description of Artificial Sequence: Synthetic oligonucleotide
  Sense strand starting at position 2456 of SEQ ID NO: 913336
cacugucucccacgggaau

SEQ ID NO: 919647 - RNA, 19 nt, Artificial Sequence
  Description of Artificial Sequence: Synthetic oligonucleotide
  Antisense strand to SEQ ID NO: 919646
auucccgugggagacagug

SEQ ID NO: 919648 - RNA, 19 nt, Artificial Sequence
  Description of Artificial Sequence: Synthetic oligonucleotide
  Sense strand starting at position 2457 of SEQ ID NO: 913336
acugucucccacgggaauu

SEQ ID NO: 919649 - RNA, 19 nt, Artificial Sequence
  Description of Artificial Sequence: Synthetic oligonucleotide
  Antisense strand to SEQ ID NO: 919648
aauucccgugggagacagu

SEQ ID NO: 919650 - RNA, 19 nt, Artificial Sequence
  Description of Artificial Sequence: Synthetic oligonucleotide
  Sense strand starting at position 2880 of SEQ ID NO: 913336
ucuccuuggcgugaacuaa

SEQ ID NO: 919651 - RNA, 19 nt, Artificial Sequence
  Description of Artificial Sequence: Synthetic oligonucleotide
  Antisense strand to SEQ ID NO: 919650
uuaguucacgccaaggaga

SEQ ID NO: 919652 - RNA, 19 nt, Artificial Sequence
  Description of Artificial Sequence: Synthetic oligonucleotide
  Sense strand starting at position 2811 of SEQ ID NO: 913336
gaaauaguggugugcaaca

SEQ ID NO: 919653 - RNA, 19 nt, Artificial Sequence
  Description of Artificial Sequence: Synthetic oligonucleotide
  Antisense strand to SEQ ID NO: 919652
uguugcacaccacuauuuc

SEQ ID NO: 919654 - RNA, 19 nt, Artificial Sequence
  Description of Artificial Sequence: Synthetic oligonucleotide
  Sense strand starting at position 3016 of SEQ ID NO: 913336
uuguaauuggagugguuca

SEQ ID NO: 919655 - RNA, 19 nt, Artificial Sequence
  Description of Artificial Sequence: Synthetic oligonucleotide
  Antisense strand to SEQ ID NO: 919654
ugaaccacuccaauuacaa

SEQ ID NO: 919656 - RNA, 19 nt, Artificial Sequence
  Description of Artificial Sequence: Synthetic oligonucleotide
  Sense strand starting at position 3437 of SEQ ID NO: 913336
gccgguguuaagggaacaa

SEQ ID NO: 919657 - RNA, 19 nt, Artificial Sequence
  Description of Artificial Sequence: Synthetic oligonucleotide
  Antisense strand to SEQ ID NO: 919656
uuguucccuuaacaccggc

SEQ ID NO: 919658 - RNA, 19 nt, Artificial Sequence
  Description of Artificial Sequence: Synthetic oligonucleotide
  Sense strand starting at position 2161 of SEQ ID NO: 913336
ucaggaugcagagguguuu

SEQ ID NO: 919659 - RNA, 19 nt, Artificial Sequence
  Description of Artificial Sequence: Synthetic oligonucleotide
  Antisense strand to SEQ ID NO: 919658
aaacaccucugcauccuga

SEQ ID NO: 919660 - RNA, 19 nt, Artificial Sequence
  Description of Artificial Sequence: Synthetic oligonucleotide
  Sense strand starting at position 3119 of SEQ ID NO: 913336
cuguguuaagugcauuaua

SEQ ID NO: 919661 - RNA, 19 nt, Artificial Sequence
  Description of Artificial Sequence: Synthetic oligonucleotide
  Antisense strand to SEQ ID NO: 919660
uauaaugcacuuaacacag

SEQ ID NO: 919662 - RNA, 19 nt, Artificial Sequence
  Description of Artificial Sequence: Synthetic oligonucleotide
  Sense strand starting at position 2612 of SEQ ID NO: 913336
cugcucuucugguuacaga

SEQ ID NO: 919663 - RNA, 19 nt, Artificial Sequence
  Description of Artificial Sequence: Synthetic oligonucleotide
  Antisense strand to SEQ ID NO: 919662
ucuguaaccagaagagcag

SEQ ID NO: 919664 - RNA, 19 nt, Artificial Sequence
  Description of Artificial Sequence: Synthetic oligonucleotide
  Sense strand starting at position 2530 of SEQ ID NO: 913336
cguccucugugaucaucaa

SEQ ID NO: 919665 - RNA, 19 nt, Artificial Sequence
  Description of Artificial Sequence: Synthetic oligonucleotide
  Antisense strand to SEQ ID NO: 919664
uugaugaucacagaggacg

SEQ ID NO: 919666 - RNA, 19 nt, Artificial Sequence
  Description of Artificial Sequence: Synthetic oligonucleotide
  Sense strand starting at position 2079 of SEQ ID NO: 913336
ccgcuugagcucugagaua

SEQ ID NO: 919667 - RNA, 19 nt, Artificial Sequence
  Description of Artificial Sequence: Synthetic oligonucleotide
  Antisense strand to SEQ ID NO: 919666
uaucucagagcucaagcgg

SEQ ID NO: 919668 - RNA, 19 nt, Artificial Sequence
  Description of Artificial Sequence: Synthetic oligonucleotide
  Sense strand starting at position 3302 of SEQ ID NO: 913336
gcagcuugaauugguguaa

SEQ ID NO: 919669 - RNA, 19 nt, Artificial Sequence
  Description of Artificial Sequence: Synthetic oligonucleotide
  Antisense strand to SEQ ID NO: 919668
uuacaccaauucaagcugc

SEQ ID NO: 919670 - RNA, 19 nt, Artificial Sequence
  Description of Artificial Sequence: Synthetic oligonucleotide
  Sense strand starting at position 2797 of SEQ ID NO: 913336
gaggcauccuaggagaaau

SEQ ID NO: 919671 - RNA, 19 nt, Artificial Sequence
  Description of Artificial Sequence: Synthetic oligonucleotide
  Antisense strand to SEQ ID NO: 919670
auuucuccuaggaugccuc

SEQ ID NO: 919672 - RNA, 19 nt, Artificial Sequence
  Description of Artificial Sequence: Synthetic oligonucleotide
  Sense strand starting at position 2998 of SEQ ID NO: 913336
auggguuucuuguacauuu

SEQ ID NO: 919673 - RNA, 19 nt, Artificial Sequence
  Description of Artificial Sequence: Synthetic oligonucleotide
  Antisense strand to SEQ ID NO: 919672
aaauguacaagaaacccau

SEQ ID NO: 919674 - RNA, 19 nt, Artificial Sequence
  Description of Artificial Sequence: Synthetic oligonucleotide
  Sense strand starting at position 3430 of SEQ ID NO: 913336
guagaaugccgguguuaag

SEQ ID NO: 919675 - RNA, 19 nt, Artificial Sequence
  Description of Artificial Sequence: Synthetic oligonucleotide
  Antisense strand to SEQ ID NO: 919674
cuuaacaccggcauucuac

SEQ ID NO: 919676 - RNA, 19 nt, Artificial Sequence
  Description of Artificial Sequence: Synthetic oligonucleotide
  Sense strand starting at position 3216 of SEQ ID NO: 913336
gggaauaaguuguaggaua

SEQ ID NO: 919677 - RNA, 19 nt, Artificial Sequence
  Description of Artificial Sequence: Synthetic oligonucleotide
  Antisense strand to SEQ ID NO: 919676
uauccuacaacuuauuccc

SEQ ID NO: 919678 - RNA, 19 nt, Artificial Sequence
  Description of Artificial Sequence: Synthetic oligonucleotide
  Sense strand starting at position 2879 of SEQ ID NO: 913336
uucuccuuggcgugaacua

SEQ ID NO: 919679 - RNA, 19 nt, Artificial Sequence
  Description of Artificial Sequence: Synthetic oligonucleotide
  Antisense strand to SEQ ID NO: 919678
uaguucacgccaaggagaa

SEQ ID NO: 919680 - RNA, 19 nt, Artificial Sequence
  Description of Artificial Sequence: Synthetic oligonucleotide
  Sense strand starting at position 3355 of SEQ ID NO: 913336
agccuacuguguguacuua

SEQ ID NO: 919681 - RNA, 19 nt, Artificial Sequence
  Description of Artificial Sequence: Synthetic oligonucleotide
  Antisense strand to SEQ ID NO: 919680
uaaguacacacaguaggcu

SEQ ID NO: 919682 - RNA, 19 nt, Artificial Sequence
  Description of Artificial Sequence: Synthetic oligonucleotide
  Sense strand starting at position 3488 of SEQ ID NO: 913337
ugccuugugcagucaccua

SEQ ID NO: 919683 - RNA, 19 nt, Artificial Sequence
  Description of Artificial Sequence: Synthetic oligonucleotide
  Antisense strand to SEQ ID NO: 919682
uaggugacugcacaaggca

SEQ ID NO: 919684 - RNA, 19 nt, Artificial Sequence
  Description of Artificial Sequence: Synthetic oligonucleotide
  Sense strand starting at position 3856 of SEQ ID NO: 913337
ucuguugagucacucauuu

SEQ ID NO: 919685 - RNA, 19 nt, Artificial Sequence
  Description of Artificial Sequence: Synthetic oligonucleotide
  Antisense strand to SEQ ID NO: 919684
aaaugagugacucaacaga

SEQ ID NO: 919686 - RNA, 19 nt, Artificial Sequence
  Description of Artificial Sequence: Synthetic oligonucleotide
  Sense strand starting at position 3947 of SEQ ID NO: 913337
gaaacauggcuacagucau

SEQ ID NO: 919687 - RNA, 19 nt, Artificial Sequence
  Description of Artificial Sequence: Synthetic oligonucleotide
  Antisense strand to SEQ ID NO: 919686
augacuguagccauguuuc

SEQ ID NO: 919688 - RNA, 19 nt, Artificial Sequence
  Description of Artificial Sequence: Synthetic oligonucleotide
  Sense strand starting at position 2202 of SEQ ID NO: 913337
uaccuugagcuagagacuu

SEQ ID NO: 919689 - RNA, 19 nt, Artificial Sequence
  Description of Artificial Sequence: Synthetic oligonucleotide
  Antisense strand to SEQ ID NO: 919688
aagucucuagcucaaggua

SEQ ID NO: 919690 - RNA, 19 nt, Artificial Sequence
  Description of Artificial Sequence: Synthetic oligonucleotide
  Sense strand starting at position 3588 of SEQ ID NO: 913337
aauuaagggcccugagaau

SEQ ID NO: 919691 - RNA, 19 nt, Artificial Sequence
  Description of Artificial Sequence: Synthetic oligonucleotide
  Antisense strand to SEQ ID NO: 919690
auucucagggcccuuaauu

SEQ ID NO: 919692 - RNA, 19 nt, Artificial Sequence
  Description of Artificial Sequence: Synthetic oligonucleotide
  Sense strand starting at position 2850 of SEQ ID NO: 913337
gguuucuaagcucaggaaa

SEQ ID NO: 919693 - RNA, 19 nt, Artificial Sequence
  Description of Artificial Sequence: Synthetic oligonucleotide
  Antisense strand to SEQ ID NO: 919692
uuuccugagcuuagaaacc

SEQ ID NO: 919694 - RNA, 19 nt, Artificial Sequence
  Description of Artificial Sequence: Synthetic oligonucleotide
  Sense strand starting at position 3407 of SEQ ID NO: 913337
ccaagaggguaggaaauuu

SEQ ID NO: 919695 - RNA, 19 nt, Artificial Sequence
  Description of Artificial Sequence: Synthetic oligonucleotide
  Antisense strand to SEQ ID NO: 919694
aaauuuccuacccucuugg

SEQ ID NO: 919696 - RNA, 19 nt, Artificial Sequence
  Description of Artificial Sequence: Synthetic oligonucleotide
  Sense strand starting at position 3754 of SEQ ID NO: 913337
gcccuaaugguauaaacuc

SEQ ID NO: 919697 - RNA, 19 nt, Artificial Sequence
  Description of Artificial Sequence: Synthetic oligonucleotide
  Antisense strand to SEQ ID NO: 919696
gaguuuauaccauuagggc

SEQ ID NO: 919698 - RNA, 19 nt, Artificial Sequence
  Description of Artificial Sequence: Synthetic oligonucleotide
  Sense strand starting at position 2840 of SEQ ID NO: 913337
cgaacaaauugguuucuaa

SEQ ID NO: 919699 - RNA, 19 nt, Artificial Sequence
  Description of Artificial Sequence: Synthetic oligonucleotide
  Antisense strand to SEQ ID NO: 919698
uuagaaaccaauuuguucg

SEQ ID NO: 919700 - RNA, 19 nt, Artificial Sequence
  Description of Artificial Sequence: Synthetic oligonucleotide
  Sense strand starting at position 2384 of SEQ ID NO: 913337
gcccaaaucgagggaagua

SEQ ID NO: 919701 - RNA, 19 nt, Artificial Sequence
  Description of Artificial Sequence: Synthetic oligonucleotide
  Antisense strand to SEQ ID NO: 919700
uacuucccucgauuugggc

SEQ ID NO: 919702 - RNA, 19 nt, Artificial Sequence
  Description of Artificial Sequence: Synthetic oligonucleotide
  Sense strand starting at position 3791 of SEQ ID NO: 913337
ugaggagccuuucuaaucu

SEQ ID NO: 919703 - RNA, 19 nt, Artificial Sequence
  Description of Artificial Sequence: Synthetic oligonucleotide
  Antisense strand to SEQ ID NO: 919702
agauuagaaaggcuccuca

SEQ ID NO: 919704 - RNA, 19 nt, Artificial Sequence
  Description of Artificial Sequence: Synthetic oligonucleotide
  Sense strand starting at position 3229 of SEQ ID NO: 913337
ccauguucucucugauaag

SEQ ID NO: 919705 - RNA, 19 nt, Artificial Sequence
  Description of Artificial Sequence: Synthetic oligonucleotide
  Antisense strand to SEQ ID NO: 919704
cuuaucagagagaacaugg

SEQ ID NO: 919706 - RNA, 19 nt, Artificial Sequence
  Description of Artificial Sequence: Synthetic oligonucleotide
  Sense strand starting at position 2905 of SEQ ID NO: 913337
gcagaaaucuuccuaaagc

SEQ ID NO: 919707 - RNA, 19 nt, Artificial Sequence
  Description of Artificial Sequence: Synthetic oligonucleotide
  Antisense strand to SEQ ID NO: 919706
gcuuuaggaagauuucugc

SEQ ID NO: 919708 - RNA, 19 nt, Artificial Sequence
  Description of Artificial Sequence: Synthetic oligonucleotide
  Sense strand starting at position 3308 of SEQ ID NO: 913337
cuagcuguccuaggauaga

SEQ ID NO: 919709 - RNA, 19 nt, Artificial Sequence
  Description of Artificial Sequence: Synthetic oligonucleotide
  Antisense strand to SEQ ID NO: 919708
ucuauccuaggacagcuag

SEQ ID NO: 919710 - RNA, 19 nt, Artificial Sequence
  Description of Artificial Sequence: Synthetic oligonucleotide
  Sense strand starting at position 2843 of SEQ ID NO: 913337
acaaauugguuucuaagcu

SEQ ID NO: 919711 - RNA, 19 nt, Artificial Sequence
  Description of Artificial Sequence: Synthetic oligonucleotide
  Antisense strand to SEQ ID NO: 919710
agcuuagaaaccaauuugu

SEQ ID NO: 919712 - RNA, 19 nt, Artificial Sequence
  Description of Artificial Sequence: Synthetic oligonucleotide
  Sense strand starting at position 3448 of SEQ ID NO: 913337
aaaggaaugucgucuuauu

SEQ ID NO: 919713 - RNA, 19 nt, Artificial Sequence
  Description of Artificial Sequence: Synthetic oligonucleotide
  Antisense strand to SEQ ID NO: 919712
aauaagacgacauuccuuu

SEQ ID NO: 919714 - RNA, 19 nt, Artificial Sequence
  Description of Artificial Sequence: Synthetic oligonucleotide
  Sense strand starting at position 3783 of SEQ ID NO: 913337
guuaguucugaggagccuu

SEQ ID NO: 919715 - RNA, 19 nt, Artificial Sequence
  Description of Artificial Sequence: Synthetic oligonucleotide
  Antisense strand to SEQ ID NO: 919714
aaggcuccucagaacuaac

SEQ ID NO: 919716 - RNA, 19 nt, Artificial Sequence
  Description of Artificial Sequence: Synthetic oligonucleotide
  Sense strand starting at position 3496 of SEQ ID NO: 913337
gcagucaccuaaguuggaa

SEQ ID NO: 919717 - RNA, 19 nt, Artificial Sequence
  Description of Artificial Sequence: Synthetic oligonucleotide
  Antisense strand to SEQ ID NO: 919716
uuccaacuuaggugacugc

SEQ ID NO: 919718 - RNA, 19 nt, Artificial Sequence
  Description of Artificial Sequence: Synthetic oligonucleotide
  Sense strand starting at position 3931 of SEQ ID NO: 913337
ccaguaggcucaguuggaa

SEQ ID NO: 919719 - RNA, 19 nt, Artificial Sequence
  Description of Artificial Sequence: Synthetic oligonucleotide
  Antisense strand to SEQ ID NO: 919718
uuccaacugagccuacugg

SEQ ID NO: 919720 - RNA, 19 nt, Artificial Sequence
  Description of Artificial Sequence: Synthetic oligonucleotide
  Sense strand starting at position 3885 of SEQ ID NO: 913337
acuaaagucucugcucuga

SEQ ID NO: 919721 - RNA, 19 nt, Artificial Sequence
  Description of Artificial Sequence: Synthetic oligonucleotide
  Antisense strand to SEQ ID NO: 919720
ucagagcagagacuuuagu

SEQ ID NO: 919722 - RNA, 19 nt, Artificial Sequence
  Description of Artificial Sequence: Synthetic oligonucleotide
  Sense strand starting at position 3226 of SEQ ID NO: 913337
uuuccauguucucucugau

SEQ ID NO: 919723 - RNA, 19 nt, Artificial Sequence
  Description of Artificial Sequence: Synthetic oligonucleotide
  Antisense strand to SEQ ID NO: 919722
aucagagagaacauggaaa

SEQ ID NO: 919724 - RNA, 19 nt, Artificial Sequence
  Description of Artificial Sequence: Synthetic oligonucleotide
  Sense strand starting at position 3732 of SEQ ID NO: 913337
guaccuuugucucccaauc

SEQ ID NO: 919725 - RNA, 19 nt, Artificial Sequence
  Description of Artificial Sequence: Synthetic oligonucleotide
  Antisense strand to SEQ ID NO: 919724
gauugggagacaaagguac

SEQ ID NO: 919726 - RNA, 19 nt, Artificial Sequence
  Description of Artificial Sequence: Synthetic oligonucleotide
  Sense strand starting at position 2401 of SEQ ID NO: 913337
uaaccuccggugugaguua

SEQ ID NO: 919727 - RNA, 19 nt, Artificial Sequence
  Description of Artificial Sequence: Synthetic oligonucleotide
  Antisense strand to SEQ ID NO: 919726
uaacucacaccggagguua

SEQ ID NO: 919728 - RNA, 19 nt, Artificial Sequence
  Description of Artificial Sequence: Synthetic oligonucleotide
  Sense strand starting at position 3458 of SEQ ID NO: 913337
cgucuuauuuaaggaacca

SEQ ID NO: 919729 - RNA, 19 nt, Artificial Sequence
  Description of Artificial Sequence: Synthetic oligonucleotide
  Antisense strand to SEQ ID NO: 919728
ugguuccuuaaauaagacg

SEQ ID NO: 919730 - RNA, 19 nt, Artificial Sequence
  Description of Artificial Sequence: Synthetic oligonucleotide
  Sense strand starting at position 2923 of SEQ ID NO: 913337
cagauacucgugugucuac

SEQ ID NO: 919731 - RNA, 19 nt, Artificial Sequence
  Description of Artificial Sequence: Synthetic oligonucleotide
  Antisense strand to SEQ ID NO: 919730
guagacacacgaguaucug

SEQ ID NO: 919732 - RNA, 19 nt, Artificial Sequence
  Description of Artificial Sequence: Synthetic oligonucleotide
  Sense strand starting at position 2896 of SEQ ID NO: 913337
ugccguguugcagaaaucu

SEQ ID NO: 919733 - RNA, 19 nt, Artificial Sequence
  Description of Artificial Sequence: Synthetic oligonucleotide
  Antisense strand to SEQ ID NO: 919732
agauuucugcaacacggca

SEQ ID NO: 919734 - RNA, 19 nt, Artificial Sequence
  Description of Artificial Sequence: Synthetic oligonucleotide
  Sense strand starting at position 2412 of SEQ ID NO: 913337
gugaguuacgucuggagca

SEQ ID NO: 919735 - RNA, 19 nt, Artificial Sequence
  Description of Artificial Sequence: Synthetic oligonucleotide
  Antisense strand to SEQ ID NO: 919734
ugcuccagacguaacucac

SEQ ID NO: 919736 - RNA, 19 nt, Artificial Sequence
  Description of Artificial Sequence: Synthetic oligonucleotide
  Sense strand starting at position 2627 of SEQ ID NO: 913337
cgaugcugucugcgggaaa

SEQ ID NO: 919737 - RNA, 19 nt, Artificial Sequence
  Description of Artificial Sequence: Synthetic oligonucleotide
  Antisense strand to SEQ ID NO: 919736
uuucccgcagacagcaucg

SEQ ID NO: 919738 - RNA, 19 nt, Artificial Sequence
  Description of Artificial Sequence: Synthetic oligonucleotide
  Sense strand starting at position 3232 of SEQ ID NO: 913337
uguucucucugauaagaau

SEQ ID NO: 919739 - RNA, 19 nt, Artificial Sequence
  Description of Artificial Sequence: Synthetic oligonucleotide
  Antisense strand to SEQ ID NO: 919738
auucuuaucagagagaaca

SEQ ID NO: 919740 - RNA, 19 nt, Artificial Sequence
  Description of Artificial Sequence: Synthetic oligonucleotide
  Sense strand starting at position 2334 of SEQ ID NO: 913337
gaagcuggaucuugggaga

SEQ ID NO: 919741 - RNA, 19 nt, Artificial Sequence
  Description of Artificial Sequence: Synthetic oligonucleotide
  Antisense strand to SEQ ID NO: 919740
ucucccaagauccagcuuc

SEQ ID NO: 919742 - RNA, 19 nt, Artificial Sequence
  Description of Artificial Sequence: Synthetic oligonucleotide
  Sense strand starting at position 3304 of SEQ ID NO: 913337
cgugcuagcuguccuagga

SEQ ID NO: 919743 - RNA, 19 nt, Artificial Sequence
  Description of Artificial Sequence: Synthetic oligonucleotide
  Antisense strand to SEQ ID NO: 919742
uccuaggacagcuagcacg

SEQ ID NO: 919744 - RNA, 19 nt, Artificial Sequence
  Description of Artificial Sequence: Synthetic oligonucleotide
  Sense strand starting at position 2197 of SEQ ID NO: 913337
gcggguaccuugagcuaga

SEQ ID NO: 919745 - RNA, 19 nt, Artificial Sequence
  Description of Artificial Sequence: Synthetic oligonucleotide
  Antisense strand to SEQ ID NO: 919744
ucuagcucaagguacccgc

SEQ ID NO: 919746 - RNA, 19 nt, Artificial Sequence
  Description of Artificial Sequence: Synthetic oligonucleotide
  Sense strand starting at position 3687 of SEQ ID NO: 913337
aucuguacuuuccaaagua

SEQ ID NO: 919747 - RNA, 19 nt, Artificial Sequence
  Description of Artificial Sequence: Synthetic oligonucleotide
  Antisense strand to SEQ ID NO: 919746
uacuuuggaaaguacagau

SEQ ID NO: 919748 - RNA, 19 nt, Artificial Sequence
  Description of Artificial Sequence: Synthetic oligonucleotide
  Sense strand starting at position 2806 of SEQ ID NO: 913337
uaggucuucugccaacaga

SEQ ID NO: 919749 - RNA, 19 nt, Artificial Sequence
  Description of Artificial Sequence: Synthetic oligonucleotide
  Antisense strand to SEQ ID NO: 919748
ucuguuggcagaagaccua

SEQ ID NO: 919750 - RNA, 19 nt, Artificial Sequence
  Description of Artificial Sequence: Synthetic oligonucleotide
  Sense strand starting at position 2957 of SEQ ID NO: 913337
ggguuugucuaauaaaguc

SEQ ID NO: 919751 - RNA, 19 nt, Artificial Sequence
  Description of Artificial Sequence: Synthetic oligonucleotide
  Antisense strand to SEQ ID NO: 919750
gacuuuauuagacaaaccc

SEQ ID NO: 919752 - RNA, 19 nt, Artificial Sequence
  Description of Artificial Sequence: Synthetic oligonucleotide
  Sense strand starting at position 3098 of SEQ ID NO: 913337
cuggcuugcugggaaucau

SEQ ID NO: 919753 - RNA, 19 nt, Artificial Sequence
  Description of Artificial Sequence: Synthetic oligonucleotide
  Antisense strand to SEQ ID NO: 919752
augauucccagcaagccag

SEQ ID NO: 919754 - RNA, 19 nt, Artificial Sequence
  Description of Artificial Sequence: Synthetic oligonucleotide
  Sense strand starting at position 3386 of SEQ ID NO: 913337
caagcaguuuaaugguaaa

SEQ ID NO: 919755 - RNA, 19 nt, Artificial Sequence
  Description of Artificial Sequence: Synthetic oligonucleotide
  Antisense strand to SEQ ID NO: 919754
uuuaccauuaaacugcuug

SEQ ID NO: 919756 - RNA, 19 nt, Artificial Sequence
  Description of Artificial Sequence: Synthetic oligonucleotide
  Sense strand starting at position 3779 of SEQ ID NO: 913337
caguguuaguucugaggag

SEQ ID NO: 919757 - RNA, 19 nt, Artificial Sequence
  Description of Artificial Sequence: Synthetic oligonucleotide
  Antisense strand to SEQ ID NO: 919756
cuccucagaacuaacacug

SEQ ID NO: 919758 - RNA, 19 nt, Artificial Sequence
  Description of Artificial Sequence: Synthetic oligonucleotide
  Sense strand starting at position 3301 of SEQ ID NO: 913337
gugcgugcuagcuguccua

SEQ ID NO: 919759 - RNA, 19 nt, Artificial Sequence
  Description of Artificial Sequence: Synthetic oligonucleotide
  Antisense strand to SEQ ID NO: 919758
uaggacagcuagcacgcac

SEQ ID NO: 919760 - RNA, 19 nt, Artificial Sequence
  Description of Artificial Sequence: Synthetic oligonucleotide
  Sense strand starting at position 2397 of SEQ ID NO: 913337
gaaguaaccuccgguguga

SEQ ID NO: 919761 - RNA, 19 nt, Artificial Sequence
  Description of Artificial Sequence: Synthetic oligonucleotide
  Antisense strand to SEQ ID NO: 919760
ucacaccggagguuacuuc

SEQ ID NO: 919762 - RNA, 19 nt, Artificial Sequence
  Description of Artificial Sequence: Synthetic oligonucleotide
  Sense strand starting at position 3741 of SEQ ID NO: 913338
aauugaguccuugaggagu

SEQ ID NO: 919763 - RNA, 19 nt, Artificial Sequence
  Description of Artificial Sequence: Synthetic oligonucleotide
  Antisense strand to SEQ ID NO: 919762
acuccucaaggacucaauu

SEQ ID NO: 919764 - RNA, 19 nt, Artificial Sequence
  Description of Artificial Sequence: Synthetic oligonucleotide
  Sense strand starting at position 2990 of SEQ ID NO: 913338
ggcgcuguucuugcaagga

SEQ ID NO: 919765 - RNA, 19 nt, Artificial Sequence
  Description of Artificial Sequence: Synthetic oligonucleotide
  Antisense strand to SEQ ID NO: 919764
uccuugcaagaacagcgcc

SEQ ID NO: 919766 - RNA, 19 nt, Artificial Sequence
  Description of Artificial Sequence: Synthetic oligonucleotide
  Sense strand starting at position 3867 of SEQ ID NO: 913338
guugauggucaucaauaug

SEQ ID NO: 919767 - RNA, 19 nt, Artificial Sequence
  Description of Artificial Sequence: Synthetic oligonucleotide
  Antisense strand to SEQ ID NO: 919766
cauauugaugaccaucaac

SEQ ID NO: 919768 - RNA, 19 nt, Artificial Sequence
  Description of Artificial Sequence: Synthetic oligonucleotide
  Sense strand starting at position 3778 of SEQ ID NO: 913338
uauguaagggugcaugaaa

SEQ ID NO: 919769 - RNA, 19 nt, Artificial Sequence
  Description of Artificial Sequence: Synthetic oligonucleotide
  Antisense strand to SEQ ID NO: 919768
uuucaugcacccuuacaua

SEQ ID NO: 919770 - RNA, 19 nt, Artificial Sequence
  Description of Artificial Sequence: Synthetic oligonucleotide
  Sense strand starting at position 3146 of SEQ ID NO: 913338
auguaugcucaugauauga

SEQ ID NO: 919771 - RNA, 19 nt, Artificial Sequence
  Description of Artificial Sequence: Synthetic oligonucleotide
  Antisense strand to SEQ ID NO: 919770
ucauaucaugagcauacau

SEQ ID NO: 919772 - RNA, 19 nt, Artificial Sequence
  Description of Artificial Sequence: Synthetic oligonucleotide
  Sense strand starting at position 3739 of SEQ ID NO: 913338
cuaauugaguccuugagga

SEQ ID NO: 919773 - RNA, 19 nt, Artificial Sequence
  Description of Artificial Sequence: Synthetic oligonucleotide
  Antisense strand to SEQ ID NO: 919772
uccucaaggacucaauuag

SEQ ID NO: 919774 - RNA, 19 nt, Artificial Sequence
  Description of Artificial Sequence: Synthetic oligonucleotide
  Sense strand starting at position 3800 of SEQ ID NO: 913338
uuauauaaugcucacaggu

SEQ ID NO: 919775 - RNA, 19 nt, Artificial Sequence
  Description of Artificial Sequence: Synthetic oligonucleotide
  Antisense strand to SEQ ID NO: 919774
accugugagcauuauauaa

SEQ ID NO: 919776 - RNA, 19 nt, Artificial Sequence
  Description of Artificial Sequence: Synthetic oligonucleotide
  Sense strand starting at position 3003 of SEQ ID NO: 913338
caaggauccucuguugaac

SEQ ID NO: 919777 - RNA, 19 nt, Artificial Sequence
  Description of Artificial Sequence: Synthetic oligonucleotide
  Antisense strand to SEQ ID NO: 919776
guucaacagaggauccuug

SEQ ID NO: 919778 - RNA, 19 nt, Artificial Sequence
  Description of Artificial Sequence: Synthetic oligonucleotide
  Sense strand starting at position 2912 of SEQ ID NO: 913338
gguguuagugguuagaaga

SEQ ID NO: 919779 - RNA, 19 nt, Artificial Sequence
  Description of Artificial Sequence: Synthetic oligonucleotide
  Antisense strand to SEQ ID NO: 919778
ucuucuaaccacuaacacc

SEQ ID NO: 919780 - RNA, 19 nt, Artificial Sequence
  Description of Artificial Sequence: Synthetic oligonucleotide
  Sense strand starting at position 3544 of SEQ ID NO: 913338
ugaguuggcaaaugaauug

SEQ ID NO: 919781 - RNA, 19 nt, Artificial Sequence
  Description of Artificial Sequence: Synthetic oligonucleotide
  Antisense strand to SEQ ID NO: 919780
caauucauuugccaacuca

SEQ ID NO: 919782 - RNA, 19 nt, Artificial Sequence
  Description of Artificial Sequence: Synthetic oligonucleotide
  Sense strand starting at position 3564 of SEQ ID NO: 913338
uuugaaauuagugaguugu

SEQ ID NO: 919783 - RNA, 19 nt, Artificial Sequence
  Description of Artificial Sequence: Synthetic oligonucleotide
  Antisense strand to SEQ ID NO: 919782
acaacucacuaauuucaaa

SEQ ID NO: 919784 - RNA, 19 nt, Artificial Sequence
  Description of Artificial Sequence: Synthetic oligonucleotide
  Sense strand starting at position 2730 of SEQ ID NO: 913338
ggaccuugguguucaggaa

SEQ ID NO: 919785 - RNA, 19 nt, Artificial Sequence
  Description of Artificial Sequence: Synthetic oligonucleotide
  Antisense strand to SEQ ID NO: 919784
uuccugaacaccaaggucc

SEQ ID NO: 919786 - RNA, 19 nt, Artificial Sequence
  Description of Artificial Sequence: Synthetic oligonucleotide
  Sense strand starting at position 2686 of SEQ ID NO: 913338
ggguucucugcggaacaga

SEQ ID NO: 919787 - RNA, 19 nt, Artificial Sequence
  Description of Artificial Sequence: Synthetic oligonucleotide
  Antisense strand to SEQ ID NO: 919786
ucuguuccgcagagaaccc

SEQ ID NO: 919788 - RNA, 19 nt, Artificial Sequence
  Description of Artificial Sequence: Synthetic oligonucleotide
  Sense strand starting at position 3626 of SEQ ID NO: 913338
agccaugaauaugcaauau

SEQ ID NO: 919789 - RNA, 19 nt, Artificial Sequence
  Description of Artificial Sequence: Synthetic oligonucleotide
  Antisense strand to SEQ ID NO: 919788
auauugcauauucauggcu

SEQ ID NO: 919790 - RNA, 19 nt, Artificial Sequence
  Description of Artificial Sequence: Synthetic oligonucleotide
  Sense strand starting at position 3551 of SEQ ID NO: 913338
gcaaaugaauugcuuugaa

SEQ ID NO: 919791 - RNA, 19 nt, Artificial Sequence
  Description of Artificial Sequence: Synthetic oligonucleotide
  Antisense strand to SEQ ID NO: 919790
uucaaagcaauucauuugc

SEQ ID NO: 919792 - RNA, 19 nt, Artificial Sequence
  Description of Artificial Sequence: Synthetic oligonucleotide
  Sense strand starting at position 3818 of SEQ ID NO: 913338
uccuucuagcauuggaaua

SEQ ID NO: 919793 - RNA, 19 nt, Artificial Sequence
  Description of Artificial Sequence: Synthetic oligonucleotide
  Antisense strand to SEQ ID NO: 919792
uauuccaaugcuagaagga

SEQ ID NO: 919794 - RNA, 19 nt, Artificial Sequence
  Description of Artificial Sequence: Synthetic oligonucleotide
  Sense strand starting at position 3566 of SEQ ID NO: 913338
ugaaauuagugaguuguua

SEQ ID NO: 919795 - RNA, 19 nt, Artificial Sequence
  Description of Artificial Sequence: Synthetic oligonucleotide
  Antisense strand to SEQ ID NO: 919794
uaacaacucacuaauuuca

SEQ ID NO: 919796 - RNA, 19 nt, Artificial Sequence
  Description of Artificial Sequence: Synthetic oligonucleotide
  Sense strand starting at position 2378 of SEQ ID NO: 913338
cgagcugaucgcguagcua

SEQ ID NO: 919797 - RNA, 19 nt, Artificial Sequence
  Description of Artificial Sequence: Synthetic oligonucleotide
  Antisense strand to SEQ ID NO: 919796
uagcuacgcgaucagcucg

SEQ ID NO: 919798 - RNA, 19 nt, Artificial Sequence
  Description of Artificial Sequence: Synthetic oligonucleotide
  Sense strand starting at position 3864 of SEQ ID NO: 913338
uucguugauggucaucaau

SEQ ID NO: 919799 - RNA, 19 nt, Artificial Sequence
  Description of Artificial Sequence: Synthetic oligonucleotide
  Antisense strand to SEQ ID NO: 919798
auugaugaccaucaacgaa

SEQ ID NO: 919800 - RNA, 19 nt, Artificial Sequence
  Description of Artificial Sequence: Synthetic oligonucleotide
  Sense strand starting at position 3690 of SEQ ID NO: 913338
ucagcucaggccugaaaua

SEQ ID NO: 919801 - RNA, 19 nt, Artificial Sequence
  Description of Artificial Sequence: Synthetic oligonucleotide
  Antisense strand to SEQ ID NO: 919800
uauuucaggccugagcuga

SEQ ID NO: 919802 - RNA, 19 nt, Artificial Sequence
  Description of Artificial Sequence: Synthetic oligonucleotide
  Sense strand starting at position 3025 of SEQ ID NO: 913338
gagugcaguagauguggaa

SEQ ID NO: 919803 - RNA, 19 nt, Artificial Sequence
  Description of Artificial Sequence: Synthetic oligonucleotide
  Antisense strand to SEQ ID NO: 919802
uuccacaucuacugcacuc

SEQ ID NO: 919804 - RNA, 19 nt, Artificial Sequence
  Description of Artificial Sequence: Synthetic oligonucleotide
  Sense strand starting at position 3334 of SEQ ID NO: 913338
aagguacugucaguuuaug

SEQ ID NO: 919805 - RNA, 19 nt, Artificial Sequence
  Description of Artificial Sequence: Synthetic oligonucleotide
  Antisense strand to SEQ ID NO: 919804
cauaaacugacaguaccuu

SEQ ID NO: 919806 - RNA, 19 nt, Artificial Sequence
  Description of Artificial Sequence: Synthetic oligonucleotide
  Sense strand starting at position 2911 of SEQ ID NO: 913338
ggguguuagugguuagaag

SEQ ID NO: 919807 - RNA, 19 nt, Artificial Sequence
  Description of Artificial Sequence: Synthetic oligonucleotide
  Antisense strand to SEQ ID NO: 919806
cuucuaaccacuaacaccc

SEQ ID NO: 919808 - RNA, 19 nt, Artificial Sequence
  Description of Artificial Sequence: Synthetic oligonucleotide
  Sense strand starting at position 2162 of SEQ ID NO: 913338
ccgggacuucagcauguuu

SEQ ID NO: 919809 - RNA, 19 nt, Artificial Sequence
  Description of Artificial Sequence: Synthetic oligonucleotide
  Antisense strand to SEQ ID NO: 919808
aaacaugcugaagucccgg

SEQ ID NO: 919810 - RNA, 19 nt, Artificial Sequence
  Description of Artificial Sequence: Synthetic oligonucleotide
  Sense strand starting at position 3570 of SEQ ID NO: 913338
auuagugaguuguuaaccu

SEQ ID NO: 919811 - RNA, 19 nt, Artificial Sequence
  Description of Artificial Sequence: Synthetic oligonucleotide
  Antisense strand to SEQ ID NO: 919810
agguuaacaacucacuaau

SEQ ID NO: 919812 - RNA, 19 nt, Artificial Sequence
  Description of Artificial Sequence: Synthetic oligonucleotide
  Sense strand starting at position 3866 of SEQ ID NO: 913338
cguugauggucaucaauau

SEQ ID NO: 919813 - RNA, 19 nt, Artificial Sequence
  Description of Artificial Sequence: Synthetic oligonucleotide
  Antisense strand to SEQ ID NO: 919812
auauugaugaccaucaacg

SEQ ID NO: 919814 - RNA, 19 nt, Artificial Sequence
  Description of Artificial Sequence: Synthetic oligonucleotide
  Sense strand starting at position 3854 of SEQ ID NO: 913338
gaacaucauguucguugau

SEQ ID NO: 919815 - RNA, 19 nt, Artificial Sequence
  Description of Artificial Sequence: Synthetic oligonucleotide
  Antisense strand to SEQ ID NO: 919814
aucaacgaacaugauguuc

SEQ ID NO: 919816 - RNA, 19 nt, Artificial Sequence
  Description of Artificial Sequence: Synthetic oligonucleotide
  Sense strand starting at position 3343 of SEQ ID NO: 913338
ucaguuuaugcugacguaa

SEQ ID NO: 919817 - RNA, 19 nt, Artificial Sequence
  Description of Artificial Sequence: Synthetic oligonucleotide
  Antisense strand to SEQ ID NO: 919816
uuacgucagcauaaacuga

SEQ ID NO: 919818 - RNA, 19 nt, Artificial Sequence
  Description of Artificial Sequence: Synthetic oligonucleotide
  Sense strand starting at position 3125 of SEQ ID NO: 913338
acgugugagcaugaugcaa

SEQ ID NO: 919819 - RNA, 19 nt, Artificial Sequence
  Description of Artificial Sequence: Synthetic oligonucleotide
  Antisense strand to SEQ ID NO: 919818
uugcaucaugcucacacgu

SEQ ID NO: 919820 - RNA, 19 nt, Artificial Sequence
  Description of Artificial Sequence: Synthetic oligonucleotide
  Sense strand starting at position 2966 of SEQ ID NO: 913338
cgcaucugucaagaaugcu

SEQ ID NO: 919821 - RNA, 19 nt, Artificial Sequence
  Description of Artificial Sequence: Synthetic oligonucleotide
  Antisense strand to SEQ ID NO: 919820
agcauucuugacagaugcg

SEQ ID NO: 919822 - RNA, 19 nt, Artificial Sequence
  Description of Artificial Sequence: Synthetic oligonucleotide
  Sense strand starting at position 3355 of SEQ ID NO: 913338
gacguaaugaacugcgauu

SEQ ID NO: 919823 - RNA, 19 nt, Artificial Sequence
  Description of Artificial Sequence: Synthetic oligonucleotide
  Antisense strand to SEQ ID NO: 919822
aaucgcaguucauuacguc

SEQ ID NO: 919824 - RNA, 19 nt, Artificial Sequence
  Description of Artificial Sequence: Synthetic oligonucleotide
  Sense strand starting at position 3231 of SEQ ID NO: 913338
aaacgcguuuaauuacauu

SEQ ID NO: 919825 - RNA, 19 nt, Artificial Sequence
  Description of Artificial Sequence: Synthetic oligonucleotide
  Antisense strand to SEQ ID NO: 919824
aauguaauuaaacgcguuu

SEQ ID NO: 919826 - RNA, 19 nt, Artificial Sequence
  Description of Artificial Sequence: Synthetic oligonucleotide
  Sense strand starting at position 2380 of SEQ ID NO: 913338
agcugaucgcguagcuagu

SEQ ID NO: 919827 - RNA, 19 nt, Artificial Sequence
  Description of Artificial Sequence: Synthetic oligonucleotide
  Antisense strand to SEQ ID NO: 919826
acuagcuacgcgaucagcu

SEQ ID NO: 919828 - RNA, 19 nt, Artificial Sequence
  Description of Artificial Sequence: Synthetic oligonucleotide
  Sense strand starting at position 3509 of SEQ ID NO: 913338
aaaguuguaucugugguuu

SEQ ID NO: 919829 - RNA, 19 nt, Artificial Sequence
  Description of Artificial Sequence: Synthetic oligonucleotide
  Antisense strand to SEQ ID NO: 919828
aaaccacagauacaacuuu

SEQ ID NO: 919830 - RNA, 19 nt, Artificial Sequence
  Description of Artificial Sequence: Synthetic oligonucleotide
  Sense strand starting at position 3863 of SEQ ID NO: 913338
guucguugauggucaucaa

SEQ ID NO: 919831 - RNA, 19 nt, Artificial Sequence
  Description of Artificial Sequence: Synthetic oligonucleotide
  Antisense strand to SEQ ID NO: 919830
uugaugaccaucaacgaac

SEQ ID NO: 919832 - RNA, 19 nt, Artificial Sequence
  Description of Artificial Sequence: Synthetic oligonucleotide
  Sense strand starting at position 3574 of SEQ ID NO: 913338
gugaguuguuaaccuggca

SEQ ID NO: 919833 - RNA, 19 nt, Artificial Sequence
  Description of Artificial Sequence: Synthetic oligonucleotide
  Antisense strand to SEQ ID NO: 919832
ugccagguuaacaacucac

SEQ ID NO: 919834 - RNA, 19 nt, Artificial Sequence
  Description of Artificial Sequence: Synthetic oligonucleotide
  Sense strand starting at position 3765 of SEQ ID NO: 913338
gcuucuaauuguuuaugua

SEQ ID NO: 919835 - RNA, 19 nt, Artificial Sequence
  Description of Artificial Sequence: Synthetic oligonucleotide
  Antisense strand to SEQ ID NO: 919834
uacauaaacaauuagaagc

SEQ ID NO: 919836 - RNA, 19 nt, Artificial Sequence
  Description of Artificial Sequence: Synthetic oligonucleotide
  Sense strand starting at position 3774 of SEQ ID NO: 913338
uguuuauguaagggugcau

SEQ ID NO: 919837 - RNA, 19 nt, Artificial Sequence
  Description of Artificial Sequence: Synthetic oligonucleotide
  Antisense strand to SEQ ID NO: 919836
augcacccuuacauaaaca

SEQ ID NO: 919838 - RNA, 19 nt, Artificial Sequence
  Description of Artificial Sequence: Synthetic oligonucleotide
  Sense strand starting at position 2909 of SEQ ID NO: 913338
guggguguuagugguuaga

SEQ ID NO: 919839 - RNA, 19 nt, Artificial Sequence
  Description of Artificial Sequence: Synthetic oligonucleotide
  Antisense strand to SEQ ID NO: 919838
ucuaaccacuaacacccac

SEQ ID NO: 919840 - RNA, 19 nt, Artificial Sequence
  Description of Artificial Sequence: Synthetic oligonucleotide
  Sense strand starting at position 2786 of SEQ ID NO: 913338
ggaggaguuugcccugcga

SEQ ID NO: 919841 - RNA, 19 nt, Artificial Sequence
  Description of Artificial Sequence: Synthetic oligonucleotide
  Antisense strand to SEQ ID NO: 919840
ucgcagggcaaacuccucc

SEQ ID NO: 919842 - RNA, 19 nt, Artificial Sequence
  Description of Artificial Sequence: Synthetic oligonucleotide
  Sense strand starting at position 3800 of SEQ ID NO: 913339
cuaaauggucaucaacagu

SEQ ID NO: 919843 - RNA, 19 nt, Artificial Sequence
  Description of Artificial Sequence: Synthetic oligonucleotide
  Antisense strand to SEQ ID NO: 919842
acuguugaugaccauuuag

SEQ ID NO: 919844 - RNA, 19 nt, Artificial Sequence
  Description of Artificial Sequence: Synthetic oligonucleotide
  Sense strand starting at position 3507 of SEQ ID NO: 913339
auaccauaccgucagaaug

SEQ ID NO: 919845 - RNA, 19 nt, Artificial Sequence
  Description of Artificial Sequence: Synthetic oligonucleotide
  Antisense strand to SEQ ID NO: 919844
cauucugacgguaugguau

SEQ ID NO: 919846 - RNA, 19 nt, Artificial Sequence
  Description of Artificial Sequence: Synthetic oligonucleotide
  Sense strand starting at position 2690 of SEQ ID NO: 913339
cccagcuuccuugaaggaa

SEQ ID NO: 919847 - RNA, 19 nt, Artificial Sequence
  Description of Artificial Sequence: Synthetic oligonucleotide
  Antisense strand to SEQ ID NO: 919846
uuccuucaaggaagcuggg

SEQ ID NO: 919848 - RNA, 19 nt, Artificial Sequence
  Description of Artificial Sequence: Synthetic oligonucleotide
  Sense strand starting at position 3799 of SEQ ID NO: 913339
ccuaaauggucaucaacag

SEQ ID NO: 919849 - RNA, 19 nt, Artificial Sequence
  Description of Artificial Sequence: Synthetic oligonucleotide
  Antisense strand to SEQ ID NO: 919848
cuguugaugaccauuuagg

SEQ ID NO: 919850 - RNA, 19 nt, Artificial Sequence
  Description of Artificial Sequence: Synthetic oligonucleotide
  Sense strand starting at position 318 of SEQ ID NO: 913339
ccaguagaauuugagaaga

SEQ ID NO: 919851 - RNA, 19 nt, Artificial Sequence
  Description of Artificial Sequence: Synthetic oligonucleotide
  Antisense strand to SEQ ID NO: 919850
ucuucucaaauucuacugg

SEQ ID NO: 919852 - RNA, 19 nt, Artificial Sequence
  Description of Artificial Sequence: Synthetic oligonucleotide
  Sense strand starting at position 13 of SEQ ID NO: 913339
agagauuaauaugcugauu

SEQ ID NO: 919853 - RNA, 19 nt, Artificial Sequence
  Description of Artificial Sequence: Synthetic oligonucleotide
  Antisense strand to SEQ ID NO: 919852
aaucagcauauuaaucucu

SEQ ID NO: 919854 - RNA, 19 nt, Artificial Sequence
  Description of Artificial Sequence: Synthetic oligonucleotide
  Sense strand starting at position 155 of SEQ ID NO: 913339
aggccugaauucccagaga

SEQ ID NO: 919855 - RNA, 19 nt, Artificial Sequence
  Description of Artificial Sequence: Synthetic oligonucleotide
  Antisense strand to SEQ ID NO: 919854
ucucugggaauucaggccu

SEQ ID NO: 919856 - RNA, 19 nt, Artificial Sequence
  Description of Artificial Sequence: Synthetic oligonucleotide
  Sense strand starting at position 628 of SEQ ID NO: 913339
gugagauuccugggaaucu

SEQ ID NO: 919857 - RNA, 19 nt, Artificial Sequence
  Description of Artificial Sequence: Synthetic oligonucleotide
  Antisense strand to SEQ ID NO: 919856
agauucccaggaaucucac

SEQ ID NO: 919858 - RNA, 19 nt, Artificial Sequence
  Description of Artificial Sequence: Synthetic oligonucleotide
  Sense strand starting at position 2770 of SEQ ID NO: 913339
cgcagauuuaguugugaug

SEQ ID NO: 919859 - RNA, 19 nt, Artificial Sequence
  Description of Artificial Sequence: Synthetic oligonucleotide
  Antisense strand to SEQ ID NO: 919858
caucacaacuaaaucugcg

SEQ ID NO: 919860 - RNA, 19 nt, Artificial Sequence
  Description of Artificial Sequence: Synthetic oligonucleotide
  Sense strand starting at position 348 of SEQ ID NO: 913339
ggguuagaaaugcgagaga

SEQ ID NO: 919861 - RNA, 19 nt, Artificial Sequence
  Description of Artificial Sequence: Synthetic oligonucleotide
  Antisense strand to SEQ ID NO: 919860
ucucucgcauuucuaaccc

SEQ ID NO: 919862 - RNA, 19 nt, Artificial Sequence
  Description of Artificial Sequence: Synthetic oligonucleotide
  Sense strand starting at position 310 of SEQ ID NO: 913339
acgugaucccaguagaauu

SEQ ID NO: 919863 - RNA, 19 nt, Artificial Sequence
  Description of Artificial Sequence: Synthetic oligonucleotide
  Antisense strand to SEQ ID NO: 919862
aauucuacugggaucacgu

SEQ ID NO: 919864 - RNA, 19 nt, Artificial Sequence
  Description of Artificial Sequence: Synthetic oligonucleotide
  Sense strand starting at position 3178 of SEQ ID NO: 913339
aucguuugaacuugggaga

SEQ ID NO: 919865 - RNA, 19 nt, Artificial Sequence
  Description of Artificial Sequence: Synthetic oligonucleotide
  Antisense strand to SEQ ID NO: 919864
ucucccaaguucaaacgau

SEQ ID NO: 919866 - RNA, 19 nt, Artificial Sequence
  Description of Artificial Sequence: Synthetic oligonucleotide
  Sense strand starting at position 2148 of SEQ ID NO: 913339
ggagguugagacuggcuua

SEQ ID NO: 919867 - RNA, 19 nt, Artificial Sequence
  Description of Artificial Sequence: Synthetic oligonucleotide
  Antisense strand to SEQ ID NO: 919866
uaagccagucucaaccucc

SEQ ID NO: 919868 - RNA, 19 nt, Artificial Sequence
  Description of Artificial Sequence: Synthetic oligonucleotide
  Sense strand starting at position 3179 of SEQ ID NO: 913339
ucguuugaacuugggagau

SEQ ID NO: 919869 - RNA, 19 nt, Artificial Sequence
  Description of Artificial Sequence: Synthetic oligonucleotide
  Antisense strand to SEQ ID NO: 919868
aucucccaaguucaaacga

SEQ ID NO: 919870 - RNA, 19 nt, Artificial Sequence
  Description of Artificial Sequence: Synthetic oligonucleotide
  Sense strand starting at position 254 of SEQ ID NO: 913339
uccucaagugucugagaca

SEQ ID NO: 919871 - RNA, 19 nt, Artificial Sequence
  Description of Artificial Sequence: Synthetic oligonucleotide
  Antisense strand to SEQ ID NO: 919870
ugucucagacacuugagga

SEQ ID NO: 919872 - RNA, 19 nt, Artificial Sequence
  Description of Artificial Sequence: Synthetic oligonucleotide
  Sense strand starting at position 3890 of SEQ ID NO: 913339
uguccuuugcagcaaggaa

SEQ ID NO: 919873 - RNA, 19 nt, Artificial Sequence
  Description of Artificial Sequence: Synthetic oligonucleotide
  Antisense strand to SEQ ID NO: 919872
uuccuugcugcaaaggaca

SEQ ID NO: 919874 - RNA, 19 nt, Artificial Sequence
  Description of Artificial Sequence: Synthetic oligonucleotide
  Sense strand starting at position 2931 of SEQ ID NO: 913339
aucccugugacauggguau

SEQ ID NO: 919875 - RNA, 19 nt, Artificial Sequence
  Description of Artificial Sequence: Synthetic oligonucleotide
  Antisense strand to SEQ ID NO: 919874
auacccaugucacagggau

SEQ ID NO: 919876 - RNA, 19 nt, Artificial Sequence
  Description of Artificial Sequence: Synthetic oligonucleotide
  Sense strand starting at position 2933 of SEQ ID NO: 913339
cccugugacauggguauua

SEQ ID NO: 919877 - RNA, 19 nt, Artificial Sequence
  Description of Artificial Sequence: Synthetic oligonucleotide
  Antisense strand to SEQ ID NO: 919876
uaauacccaugucacaggg

SEQ ID NO: 919878 - RNA, 19 nt, Artificial Sequence
  Description of Artificial Sequence: Synthetic oligonucleotide
  Sense strand starting at position 31 of SEQ ID NO: 913339
uugagaaaguagcuugcaa

SEQ ID NO: 919879 - RNA, 19 nt, Artificial Sequence
  Description of Artificial Sequence: Synthetic oligonucleotide
  Antisense strand to SEQ ID NO: 919878
uugcaagcuacuuucucaa

SEQ ID NO: 919880 - RNA, 19 nt, Artificial Sequence
  Description of Artificial Sequence: Synthetic oligonucleotide
  Sense strand starting at position 2598 of SEQ ID NO: 913339
agagaucuauguguucuuu

SEQ ID NO: 919881 - RNA, 19 nt, Artificial Sequence
  Description of Artificial Sequence: Synthetic oligonucleotide
  Antisense strand to SEQ ID NO: 919880
aaagaacacauagaucucu

SEQ ID NO: 919882 - RNA, 19 nt, Artificial Sequence
  Description of Artificial Sequence: Synthetic oligonucleotide
  Sense strand starting at position 2779 of SEQ ID NO: 913339
aguugugauguuuggagac

SEQ ID NO: 919883 - RNA, 19 nt, Artificial Sequence
  Description of Artificial Sequence: Synthetic oligonucleotide
  Antisense strand to SEQ ID NO: 919882
gucuccaaacaucacaacu

SEQ ID NO: 919884 - RNA, 19 nt, Artificial Sequence
  Description of Artificial Sequence: Synthetic oligonucleotide
  Sense strand starting at position 2595 of SEQ ID NO: 913339
cccagagaucuauguguuc

SEQ ID NO: 919885 - RNA, 19 nt, Artificial Sequence
  Description of Artificial Sequence: Synthetic oligonucleotide
  Antisense strand to SEQ ID NO: 919884
gaacacauagaucucuggg

SEQ ID NO: 919886 - RNA, 19 nt, Artificial Sequence
  Description of Artificial Sequence: Synthetic oligonucleotide
  Sense strand starting at position 2926 of SEQ ID NO: 913339
ccgauaucccugugacaug

SEQ ID NO: 919887 - RNA, 19 nt, Artificial Sequence
  Description of Artificial Sequence: Synthetic oligonucleotide
  Antisense strand to SEQ ID NO: 919886
caugucacagggauaucgg

SEQ ID NO: 919888 - RNA, 19 nt, Artificial Sequence
  Description of Artificial Sequence: Synthetic oligonucleotide
  Sense strand starting at position 856 of SEQ ID NO: 913339
gcaaucgagacuuguagac

SEQ ID NO: 919889 - RNA, 19 nt, Artificial Sequence
  Description of Artificial Sequence: Synthetic oligonucleotide
  Antisense strand to SEQ ID NO: 919888
gucuacaagucucgauugc

SEQ ID NO: 919890 - RNA, 19 nt, Artificial Sequence
  Description of Artificial Sequence: Synthetic oligonucleotide
  Sense strand starting at position 3339 of SEQ ID NO: 913339
ggaucugucugcuuccaaa

SEQ ID NO: 919891 - RNA, 19 nt, Artificial Sequence
  Description of Artificial Sequence: Synthetic oligonucleotide
  Antisense strand to SEQ ID NO: 919890
uuuggaagcagacagaucc

SEQ ID NO: 919892 - RNA, 19 nt, Artificial Sequence
  Description of Artificial Sequence: Synthetic oligonucleotide
  Sense strand starting at position 346 of SEQ ID NO: 913339
ccggguuagaaaugcgaga

SEQ ID NO: 919893 - RNA, 19 nt, Artificial Sequence
  Description of Artificial Sequence: Synthetic oligonucleotide
  Antisense strand to SEQ ID NO: 919892
ucucgcauuucuaacccgg

SEQ ID NO: 919894 - RNA, 19 nt, Artificial Sequence
  Description of Artificial Sequence: Synthetic oligonucleotide
  Sense strand starting at position 15 of SEQ ID NO: 913339
agauuaauaugcugauuug

SEQ ID NO: 919895 - RNA, 19 nt, Artificial Sequence
  Description of Artificial Sequence: Synthetic oligonucleotide
  Antisense strand to SEQ ID NO: 919894
caaaucagcauauuaaucu

SEQ ID NO: 919896 - RNA, 19 nt, Artificial Sequence
  Description of Artificial Sequence: Synthetic oligonucleotide
  Sense strand starting at position 637 of SEQ ID NO: 913339
cugggaaucugagcguucu

SEQ ID NO: 919897 - RNA, 19 nt, Artificial Sequence
  Description of Artificial Sequence: Synthetic oligonucleotide
  Antisense strand to SEQ ID NO: 919896
agaacgcucagauucccag

SEQ ID NO: 919898 - RNA, 19 nt, Artificial Sequence
  Description of Artificial Sequence: Synthetic oligonucleotide
  Sense strand starting at position 244 of SEQ ID NO: 913339
gacuguggcuuccucaagu

SEQ ID NO: 919899 - RNA, 19 nt, Artificial Sequence
  Description of Artificial Sequence: Synthetic oligonucleotide
  Antisense strand to SEQ ID NO: 919898
acuugaggaagccacaguc

SEQ ID NO: 919900 - RNA, 19 nt, Artificial Sequence
  Description of Artificial Sequence: Synthetic oligonucleotide
  Sense strand starting at position 2357 of SEQ ID NO: 913339
gcugcuuucuaccugaauu

SEQ ID NO: 919901 - RNA, 19 nt, Artificial Sequence
  Description of Artificial Sequence: Synthetic oligonucleotide
  Antisense strand to SEQ ID NO: 919900
aauucagguagaaagcagc

SEQ ID NO: 919902 - RNA, 19 nt, Artificial Sequence
  Description of Artificial Sequence: Synthetic oligonucleotide
  Sense strand starting at position 250 of SEQ ID NO: 913339
ggcuuccucaagugucuga

SEQ ID NO: 919903 - RNA, 19 nt, Artificial Sequence
  Description of Artificial Sequence: Synthetic oligonucleotide
  Antisense strand to SEQ ID NO: 919902
ucagacacuugaggaagcc

SEQ ID NO: 919904 - RNA, 19 nt, Artificial Sequence
  Description of Artificial Sequence: Synthetic oligonucleotide
  Sense strand starting at position 629 of SEQ ID NO: 913339
ugagauuccugggaaucug

SEQ ID NO: 919905 - RNA, 19 nt, Artificial Sequence
  Description of Artificial Sequence: Synthetic oligonucleotide
  Antisense strand to SEQ ID NO: 919904
cagauucccaggaaucuca

SEQ ID NO: 919906 - RNA, 19 nt, Artificial Sequence
  Description of Artificial Sequence: Synthetic oligonucleotide
  Sense strand starting at position 2773 of SEQ ID NO: 913339
agauuuaguugugauguuu

SEQ ID NO: 919907 - RNA, 19 nt, Artificial Sequence
  Description of Artificial Sequence: Synthetic oligonucleotide
  Antisense strand to SEQ ID NO: 919906
aaacaucacaacuaaaucu

SEQ ID NO: 919908 - RNA, 19 nt, Artificial Sequence
  Description of Artificial Sequence: Synthetic oligonucleotide
  Sense strand starting at position 2472 of SEQ ID NO: 913339
cggccauggcucugaaucu

SEQ ID NO: 919909 - RNA, 19 nt, Artificial Sequence
  Description of Artificial Sequence: Synthetic oligonucleotide
  Antisense strand to SEQ ID NO: 919908
agauucagagccauggccg

SEQ ID NO: 919910 - RNA, 19 nt, Artificial Sequence
  Description of Artificial Sequence: Synthetic oligonucleotide
  Sense strand starting at position 3398 of SEQ ID NO: 913339
guuuguugccuagguugga

SEQ ID NO: 919911 - RNA, 19 nt, Artificial Sequence
  Description of Artificial Sequence: Synthetic oligonucleotide
  Antisense strand to SEQ ID NO: 919910
uccaaccuaggcaacaaac

SEQ ID NO: 919912 - RNA, 19 nt, Artificial Sequence
  Description of Artificial Sequence: Synthetic oligonucleotide
  Sense strand starting at position 858 of SEQ ID NO: 913339
aaucgagacuuguagacca

SEQ ID NO: 919913 - RNA, 19 nt, Artificial Sequence
  Description of Artificial Sequence: Synthetic oligonucleotide
  Antisense strand to SEQ ID NO: 919912
uggucuacaagucucgauu

SEQ ID NO: 919914 - RNA, 19 nt, Artificial Sequence
  Description of Artificial Sequence: Synthetic oligonucleotide
  Sense strand starting at position 2772 of SEQ ID NO: 913339
cagauuuaguugugauguu

SEQ ID NO: 919915 - RNA, 19 nt, Artificial Sequence
  Description of Artificial Sequence: Synthetic oligonucleotide
  Antisense strand to SEQ ID NO: 919914
aacaucacaacuaaaucug

SEQ ID NO: 919916 - RNA, 19 nt, Artificial Sequence
  Description of Artificial Sequence: Synthetic oligonucleotide
  Sense strand starting at position 1549 of SEQ ID NO: 913339
ggcagugggcucugcuuau

SEQ ID NO: 919917 - RNA, 19 nt, Artificial Sequence
  Description of Artificial Sequence: Synthetic oligonucleotide
  Antisense strand to SEQ ID NO: 919916
auaagcagagcccacugcc

SEQ ID NO: 919918 - RNA, 19 nt, Artificial Sequence
  Description of Artificial Sequence: Synthetic oligonucleotide
  Sense strand starting at position 626 of SEQ ID NO: 913339
gagugagauuccugggaau

SEQ ID NO: 919919 - RNA, 19 nt, Artificial Sequence
  Description of Artificial Sequence: Synthetic oligonucleotide
  Antisense strand to SEQ ID NO: 919918
auucccaggaaucucacuc

SEQ ID NO: 919920 - RNA, 19 nt, Artificial Sequence
  Description of Artificial Sequence: Synthetic oligonucleotide
  Sense strand starting at position 2944 of SEQ ID NO: 913339
ggguauuauuaugaucucu

SEQ ID NO: 919921 - RNA, 19 nt, Artificial Sequence
  Description of Artificial Sequence: Synthetic oligonucleotide
  Antisense strand to SEQ ID NO: 919920
agagaucauaauaauaccc

SEQ ID NO: 919922 - RNA, 19 nt, Artificial Sequence
  Description of Artificial Sequence: Synthetic oligonucleotide
  Sense strand starting at position 2656 of SEQ ID NO: 913340
gauggaugccauggagaua

SEQ ID NO: 919923 - RNA, 19 nt, Artificial Sequence
  Description of Artificial Sequence: Synthetic oligonucleotide
  Antisense strand to SEQ ID NO: 919922
uaucuccauggcauccauc

SEQ ID NO: 919924 - RNA, 19 nt, Artificial Sequence
  Description of Artificial Sequence: Synthetic oligonucleotide
  Sense strand starting at position 701 of SEQ ID NO: 913340
acauguaaccgauagugga

SEQ ID NO: 919925 - RNA, 19 nt, Artificial Sequence
  Description of Artificial Sequence: Synthetic oligonucleotide
  Antisense strand to SEQ ID NO: 919924
uccacuaucgguuacaugu

SEQ ID NO: 919926 - RNA, 19 nt, Artificial Sequence
  Description of Artificial Sequence: Synthetic oligonucleotide
  Sense strand starting at position 690 of SEQ ID NO: 913340
gacagucagcaacauguaa

SEQ ID NO: 919927 - RNA, 19 nt, Artificial Sequence
  Description of Artificial Sequence: Synthetic oligonucleotide
  Antisense strand to SEQ ID NO: 919926
uuacauguugcugacuguc

SEQ ID NO: 919928 - RNA, 19 nt, Artificial Sequence
  Description of Artificial Sequence: Synthetic oligonucleotide
  Sense strand starting at position 116 of SEQ ID NO: 913340
agacuuguuccucagacuu

SEQ ID NO: 919929 - RNA, 19 nt, Artificial Sequence
  Description of Artificial Sequence: Synthetic oligonucleotide
  Antisense strand to SEQ ID NO: 919928
aagucugaggaacaagucu

SEQ ID NO: 919930 - RNA, 19 nt, Artificial Sequence
  Description of Artificial Sequence: Synthetic oligonucleotide
  Sense strand starting at position 901 of SEQ ID NO: 913340
acuaaaucgccucagaacu

SEQ ID NO: 919931 - RNA, 19 nt, Artificial Sequence
  Description of Artificial Sequence: Synthetic oligonucleotide
  Antisense strand to SEQ ID NO: 919930
aguucugaggcgauuuagu

SEQ ID NO: 919932 - RNA, 19 nt, Artificial Sequence
  Description of Artificial Sequence: Synthetic oligonucleotide
  Sense strand starting at position 1708 of SEQ ID NO: 913340
gagccuuccgaggaucuga

SEQ ID NO: 919933 - RNA, 19 nt, Artificial Sequence
  Description of Artificial Sequence: Synthetic oligonucleotide
  Antisense strand to SEQ ID NO: 919932
ucagauccucggaaggcuc

SEQ ID NO: 919934 - RNA, 19 nt, Artificial Sequence
  Description of Artificial Sequence: Synthetic oligonucleotide
  Sense strand starting at position 3501 of SEQ ID NO: 913340
ugucuccugacugggauau

SEQ ID NO: 919935 - RNA, 19 nt, Artificial Sequence
  Description of Artificial Sequence: Synthetic oligonucleotide
  Antisense strand to SEQ ID NO: 919934
auaucccagucaggagaca

SEQ ID NO: 919936 - RNA, 19 nt, Artificial Sequence
  Description of Artificial Sequence: Synthetic oligonucleotide
  Sense strand starting at position 3500 of SEQ ID NO: 913340
uugucuccugacugggaua

SEQ ID NO: 919937 - RNA, 19 nt, Artificial Sequence
  Description of Artificial Sequence: Synthetic oligonucleotide
  Antisense strand to SEQ ID NO: 919936
uaucccagucaggagacaa

SEQ ID NO: 919938 - RNA, 19 nt, Artificial Sequence
  Description of Artificial Sequence: Synthetic oligonucleotide
  Sense strand starting at position 732 of SEQ ID NO: 913340
cuggguuaagggugguaga

SEQ ID NO: 919939 - RNA, 19 nt, Artificial Sequence
  Description of Artificial Sequence: Synthetic oligonucleotide
  Antisense strand to SEQ ID NO: 919938
ucuaccacccuuaacccag

SEQ ID NO: 919940 - RNA, 19 nt, Artificial Sequence
  Description of Artificial Sequence: Synthetic oligonucleotide
  Sense strand starting at position 3317 of SEQ ID NO: 913340
gaaccucgucucgauuaac

SEQ ID NO: 919941 - RNA, 19 nt, Artificial Sequence
  Description of Artificial Sequence: Synthetic oligonucleotide
  Antisense strand to SEQ ID NO: 919940
guuaaucgagacgagguuc

SEQ ID NO: 919942 - RNA, 19 nt, Artificial Sequence
  Description of Artificial Sequence: Synthetic oligonucleotide
  Sense strand starting at position 898 of SEQ ID NO: 913340
cugacuaaaucgccucaga

SEQ ID NO: 919943 - RNA, 19 nt, Artificial Sequence
  Description of Artificial Sequence: Synthetic oligonucleotide
  Antisense strand to SEQ ID NO: 919942
ucugaggcgauuuagucag

SEQ ID NO: 919944 - RNA, 19 nt, Artificial Sequence
  Description of Artificial Sequence: Synthetic oligonucleotide
  Sense strand starting at position 3079 of SEQ ID NO: 913340
uuaagacauuaggagacaa

SEQ ID NO: 919945 - RNA, 19 nt, Artificial Sequence
  Description of Artificial Sequence: Synthetic oligonucleotide
  Antisense strand to SEQ ID NO: 919944
uugucuccuaaugucuuaa

SEQ ID NO: 919946 - RNA, 19 nt, Artificial Sequence
  Description of Artificial Sequence: Synthetic oligonucleotide
  Sense strand starting at position 1271 of SEQ ID NO: 913340
ccgguuugucccgaaagga

SEQ ID NO: 919947 - RNA, 19 nt, Artificial Sequence
  Description of Artificial Sequence: Synthetic oligonucleotide
  Antisense strand to SEQ ID NO: 919946
uccuuucgggacaaaccgg

SEQ ID NO: 919948 - RNA, 19 nt, Artificial Sequence
  Description of Artificial Sequence: Synthetic oligonucleotide
  Sense strand starting at position 111 of SEQ ID NO: 913340
uccuuagacuuguuccuca

SEQ ID NO: 919949 - RNA, 19 nt, Artificial Sequence
  Description of Artificial Sequence: Synthetic oligonucleotide
  Antisense strand to SEQ ID NO: 919948
ugaggaacaagucuaagga

SEQ ID NO: 919950 - RNA, 19 nt, Artificial Sequence
  Description of Artificial Sequence: Synthetic oligonucleotide
  Sense strand starting at position 2616 of SEQ ID NO: 913340
cucuguguccuccagagua

SEQ ID NO: 919951 - RNA, 19 nt, Artificial Sequence
  Description of Artificial Sequence: Synthetic oligonucleotide
  Antisense strand to SEQ ID NO: 919950
uacucuggaggacacagag

SEQ ID NO: 919952 - RNA, 19 nt, Artificial Sequence
  Description of Artificial Sequence: Synthetic oligonucleotide
  Sense strand starting at position 2618 of SEQ ID NO: 913340
cuguguccuccagaguauu

SEQ ID NO: 919953 - RNA, 19 nt, Artificial Sequence
  Description of Artificial Sequence: Synthetic oligonucleotide
  Antisense strand to SEQ ID NO: 919952
aauacucuggaggacacag

SEQ ID NO: 919954 - RNA, 19 nt, Artificial Sequence
  Description of Artificial Sequence: Synthetic oligonucleotide
  Sense strand starting at position 2629 of SEQ ID NO: 913340
agaguauucggugguacag

SEQ ID NO: 919955 - RNA, 19 nt, Artificial Sequence
  Description of Artificial Sequence: Synthetic oligonucleotide
  Antisense strand to SEQ ID NO: 919954
cuguaccaccgaauacucu

SEQ ID NO: 919956 - RNA, 19 nt, Artificial Sequence
  Description of Artificial Sequence: Synthetic oligonucleotide
  Sense strand starting at position 2939 of SEQ ID NO: 913340
ggcccagaugccugaauuc

SEQ ID NO: 919957 - RNA, 19 nt, Artificial Sequence
  Description of Artificial Sequence: Synthetic oligonucleotide
  Antisense strand to SEQ ID NO: 919956
gaauucaggcaucugggcc

SEQ ID NO: 919958 - RNA, 19 nt, Artificial Sequence
  Description of Artificial Sequence: Synthetic oligonucleotide
  Sense strand starting at position 3282 of SEQ ID NO: 913340
ggguuagucaggcaagugu

SEQ ID NO: 919959 - RNA, 19 nt, Artificial Sequence
  Description of Artificial Sequence: Synthetic oligonucleotide
  Antisense strand to SEQ ID NO: 919958
acacuugccugacuaaccc

SEQ ID NO: 919960 - RNA, 19 nt, Artificial Sequence
  Description of Artificial Sequence: Synthetic oligonucleotide
  Sense strand starting at position 639 of SEQ ID NO: 913340
ccgggugucucuucaagga

SEQ ID NO: 919961 - RNA, 19 nt, Artificial Sequence
  Description of Artificial Sequence: Synthetic oligonucleotide
  Antisense strand to SEQ ID NO: 919960
uccuugaagagacacccgg

SEQ ID NO: 919962 - RNA, 19 nt, Artificial Sequence
  Description of Artificial Sequence: Synthetic oligonucleotide
  Sense strand starting at position 2628 of SEQ ID NO: 913340
cagaguauucggugguaca

SEQ ID NO: 919963 - RNA, 19 nt, Artificial Sequence
  Description of Artificial Sequence: Synthetic oligonucleotide
  Antisense strand to SEQ ID NO: 919962
uguaccaccgaauacucug

SEQ ID NO: 919964 - RNA, 19 nt, Artificial Sequence
  Description of Artificial Sequence: Synthetic oligonucleotide
  Sense strand starting at position 698 of SEQ ID NO: 913340
gcaacauguaaccgauagu

SEQ ID NO: 919965 - RNA, 19 nt, Artificial Sequence
  Description of Artificial Sequence: Synthetic oligonucleotide
  Antisense strand to SEQ ID NO: 919964
acuaucgguuacauguugc

SEQ ID NO: 919966 - RNA, 19 nt, Artificial Sequence
  Description of Artificial Sequence: Synthetic oligonucleotide
  Sense strand starting at position 3313 of SEQ ID NO: 913340
cugggaaccucgucucgau

SEQ ID NO: 919967 - RNA, 19 nt, Artificial Sequence
  Description of Artificial Sequence: Synthetic oligonucleotide
  Antisense strand to SEQ ID NO: 919966
aucgagacgagguucccag

SEQ ID NO: 919968 - RNA, 19 nt, Artificial Sequence
  Description of Artificial Sequence: Synthetic oligonucleotide
  Sense strand starting at position 3412 of SEQ ID NO: 913340
ggaggcuuccuugguagca

SEQ ID NO: 919969 - RNA, 19 nt, Artificial Sequence
  Description of Artificial Sequence: Synthetic oligonucleotide
  Antisense strand to SEQ ID NO: 919968
ugcuaccaaggaagccucc

SEQ ID NO: 919970 - RNA, 19 nt, Artificial Sequence
  Description of Artificial Sequence: Synthetic oligonucleotide
  Sense strand starting at position 887 of SEQ ID NO: 913340
ccuugaguccgcugacuaa

SEQ ID NO: 919971 - RNA, 19 nt, Artificial Sequence
  Description of Artificial Sequence: Synthetic oligonucleotide
  Antisense strand to SEQ ID NO: 919970
uuagucagcggacucaagg

SEQ ID NO: 919972 - RNA, 19 nt, Artificial Sequence
  Description of Artificial Sequence: Synthetic oligonucleotide
  Sense strand starting at position 3413 of SEQ ID NO: 913340
gaggcuuccuugguagcau

SEQ ID NO: 919973 - RNA, 19 nt, Artificial Sequence
  Description of Artificial Sequence: Synthetic oligonucleotide
  Antisense strand to SEQ ID NO: 919972
augcuaccaaggaagccuc

SEQ ID NO: 919974 - RNA, 19 nt, Artificial Sequence
  Description of Artificial Sequence: Synthetic oligonucleotide
  Sense strand starting at position 118 of SEQ ID NO: 913340
acuuguuccucagacuugu

SEQ ID NO: 919975 - RNA, 19 nt, Artificial Sequence
  Description of Artificial Sequence: Synthetic oligonucleotide
  Antisense strand to SEQ ID NO: 919974
acaagucugaggaacaagu

SEQ ID NO: 919976 - RNA, 19 nt, Artificial Sequence
  Description of Artificial Sequence: Synthetic oligonucleotide
  Sense strand starting at position 2721 of SEQ ID NO: 913340
ccaugccucugggauguuu

SEQ ID NO: 919977 - RNA, 19 nt, Artificial Sequence
  Description of Artificial Sequence: Synthetic oligonucleotide
  Antisense strand to SEQ ID NO: 919976
aaacaucccagaggcaugg

SEQ ID NO: 919978 - RNA, 19 nt, Artificial Sequence
  Description of Artificial Sequence: Synthetic oligonucleotide
  Sense strand starting at position 3280 of SEQ ID NO: 913340
aaggguuagucaggcaagu

SEQ ID NO: 919979 - RNA, 19 nt, Artificial Sequence
  Description of Artificial Sequence: Synthetic oligonucleotide
  Antisense strand to SEQ ID NO: 919978
acuugccugacuaacccuu

SEQ ID NO: 919980 - RNA, 19 nt, Artificial Sequence
  Description of Artificial Sequence: Synthetic oligonucleotide
  Sense strand starting at position 3316 of SEQ ID NO: 913340
ggaaccucgucucgauuaa

SEQ ID NO: 919981 - RNA, 19 nt, Artificial Sequence
  Description of Artificial Sequence: Synthetic oligonucleotide
  Antisense strand to SEQ ID NO: 919980
uuaaucgagacgagguucc

SEQ ID NO: 919982 - RNA, 19 nt, Artificial Sequence
  Description of Artificial Sequence: Synthetic oligonucleotide
  Sense strand starting at position 1704 of SEQ ID NO: 913340
agcugagccuuccgaggau

SEQ ID NO: 919983 - RNA, 19 nt, Artificial Sequence
  Description of Artificial Sequence: Synthetic oligonucleotide
  Antisense strand to SEQ ID NO: 919982
auccucggaaggcucagcu

SEQ ID NO: 919984 - RNA, 19 nt, Artificial Sequence
  Description of Artificial Sequence: Synthetic oligonucleotide
  Sense strand starting at position 2626 of SEQ ID NO: 913340
uccagaguauucgguggua

SEQ ID NO: 919985 - RNA, 19 nt, Artificial Sequence
  Description of Artificial Sequence: Synthetic oligonucleotide
  Antisense strand to SEQ ID NO: 919984
uaccaccgaauacucugga

SEQ ID NO: 919986 - RNA, 19 nt, Artificial Sequence
  Description of Artificial Sequence: Synthetic oligonucleotide
  Sense strand starting at position 2684 of SEQ ID NO: 913341
gcaacuugaccacagcaau

SEQ ID NO: 919987 - RNA, 19 nt, Artificial Sequence
  Description of Artificial Sequence: Synthetic oligonucleotide
  Antisense strand to SEQ ID NO: 919986
auugcuguggucaaguugc

SEQ ID NO: 919988 - RNA, 19 nt, Artificial Sequence
  Description of Artificial Sequence: Synthetic oligonucleotide
  Sense strand starting at position 2547 of SEQ ID NO: 913341
ucaguagaguggguccaau

SEQ ID NO: 919989 - RNA, 19 nt, Artificial Sequence
  Description of Artificial Sequence: Synthetic oligonucleotide
  Antisense strand to SEQ ID NO: 919988
auuggacccacucuacuga

SEQ ID NO: 919990 - RNA, 19 nt, Artificial Sequence
  Description of Artificial Sequence: Synthetic oligonucleotide
  Sense strand starting at position 3166 of SEQ ID NO: 913341
gaucccagcuagucugaau

SEQ ID NO: 919991 - RNA, 19 nt, Artificial Sequence
  Description of Artificial Sequence: Synthetic oligonucleotide
  Antisense strand to SEQ ID NO: 919990
auucagacuagcugggauc

SEQ ID NO: 919992 - RNA, 19 nt, Artificial Sequence
  Description of Artificial Sequence: Synthetic oligonucleotide
  Sense strand starting at position 568 of SEQ ID NO: 913341
gaaagucuacauugacguu

SEQ ID NO: 919993 - RNA, 19 nt, Artificial Sequence
  Description of Artificial Sequence: Synthetic oligonucleotide
  Antisense strand to SEQ ID NO: 919992
aacgucaauguagacuuuc

SEQ ID NO: 919994 - RNA, 19 nt, Artificial Sequence
  Description of Artificial Sequence: Synthetic oligonucleotide
  Sense strand starting at position 3188 of SEQ ID NO: 913341
ccaguugcuuaagcaugau

SEQ ID NO: 919995 - RNA, 19 nt, Artificial Sequence
  Description of Artificial Sequence: Synthetic oligonucleotide
  Antisense strand to SEQ ID NO: 919994
aucaugcuuaagcaacugg

SEQ ID NO: 919996 - RNA, 19 nt, Artificial Sequence
  Description of Artificial Sequence: Synthetic oligonucleotide
  Sense strand starting at position 3191 of SEQ ID NO: 913341
guugcuuaagcaugauuau

SEQ ID NO: 919997 - RNA, 19 nt, Artificial Sequence
  Description of Artificial Sequence: Synthetic oligonucleotide
  Antisense strand to SEQ ID NO: 919996
auaaucaugcuuaagcaac

SEQ ID NO: 919998 - RNA, 19 nt, Artificial Sequence
  Description of Artificial Sequence: Synthetic oligonucleotide
  Sense strand starting at position 695 of SEQ ID NO: 913341
cuguuaaaguaagaacuuu

SEQ ID NO: 919999 - RNA, 19 nt, Artificial Sequence
  Description of Artificial Sequence: Synthetic oligonucleotide
  Antisense strand to SEQ ID NO: 919998
aaaguucuuacuuuaacag

SEQ ID NO: 920000 - RNA, 19 nt, Artificial Sequence
  Description of Artificial Sequence: Synthetic oligonucleotide
  Sense strand starting at position 989 of SEQ ID NO: 913341
uaggaacugucuugagauu

SEQ ID NO: 920001 - RNA, 19 nt, Artificial Sequence
  Description of Artificial Sequence: Synthetic oligonucleotide
  Antisense strand to SEQ ID NO: 920000
aaucucaagacaguuccua

SEQ ID NO: 920002 - RNA, 19 nt, Artificial Sequence
  Description of Artificial Sequence: Synthetic oligonucleotide
  Sense strand starting at position 3868 of SEQ ID NO: 913341
cucgacacaucaggauuau

SEQ ID NO: 920003 - RNA, 19 nt, Artificial Sequence
  Description of Artificial Sequence: Synthetic oligonucleotide
  Antisense strand to SEQ ID NO: 920002
auaauccugaugugucgag

SEQ ID NO: 920004 - RNA, 19 nt, Artificial Sequence
  Description of Artificial Sequence: Synthetic oligonucleotide
  Sense strand starting at position 3427 of SEQ ID NO: 913342
gcaugcagauuauuugagu

SEQ ID NO: 920005 - RNA, 19 nt, Artificial Sequence
  Description of Artificial Sequence: Synthetic oligonucleotide
  Antisense strand to SEQ ID NO: 920004
acucaaauaaucugcaugc

SEQ ID NO: 920006 - RNA, 19 nt, Artificial Sequence
  Description of Artificial Sequence: Synthetic oligonucleotide
  Sense strand starting at position 1491 of SEQ ID NO: 913342
uguuuagaccuuggagaga

SEQ ID NO: 920007 - RNA, 19 nt, Artificial Sequence
  Description of Artificial Sequence: Synthetic oligonucleotide
  Antisense strand to SEQ ID NO: 920006
ucucuccaaggucuaaaca

SEQ ID NO: 920008 - RNA, 19 nt, Artificial Sequence
  Description of Artificial Sequence: Synthetic oligonucleotide
  Sense strand starting at position 3251 of SEQ ID NO: 913342
cccauuagucaagagccaa

SEQ ID NO: 920009 - RNA, 19 nt, Artificial Sequence
  Description of Artificial Sequence: Synthetic oligonucleotide
  Antisense strand to SEQ ID NO: 920008
uuggcucuugacuaauggg

SEQ ID NO: 920010 - RNA, 19 nt, Artificial Sequence
  Description of Artificial Sequence: Synthetic oligonucleotide
  Sense strand starting at position 1420 of SEQ ID NO: 913342
uuuagaagcgaauaauagu

SEQ ID NO: 920011 - RNA, 19 nt, Artificial Sequence
  Description of Artificial Sequence: Synthetic oligonucleotide
  Antisense strand to SEQ ID NO: 920010
acuauuauucgcuucuaaa

SEQ ID NO: 920012 - RNA, 19 nt, Artificial Sequence
  Description of Artificial Sequence: Synthetic oligonucleotide
  Sense strand starting at position 1502 of SEQ ID NO: 913342
uggagagacacgcauuagu

SEQ ID NO: 920013 - RNA, 19 nt, Artificial Sequence
  Description of Artificial Sequence: Synthetic oligonucleotide
  Antisense strand to SEQ ID NO: 920012
acuaaugcgugucucucca

SEQ ID NO: 920014 - RNA, 19 nt, Artificial Sequence
  Description of Artificial Sequence: Synthetic oligonucleotide
  Sense strand starting at position 1490 of SEQ ID NO: 913342
uuguuuagaccuuggagag

SEQ ID NO: 920015 - RNA, 19 nt, Artificial Sequence
  Description of Artificial Sequence: Synthetic oligonucleotide
  Antisense strand to SEQ ID NO: 920014
cucuccaaggucuaaacaa

SEQ ID NO: 920016 - RNA, 19 nt, Artificial Sequence
  Description of Artificial Sequence: Synthetic oligonucleotide
  Sense strand starting at position 780 of SEQ ID NO: 913342
uuaaguaauguuugaggac

SEQ ID NO: 920017 - RNA, 19 nt, Artificial Sequence
  Description of Artificial Sequence: Synthetic oligonucleotide
  Antisense strand to SEQ ID NO: 920016
guccucaaacauuacuuaa

SEQ ID NO: 920018 - RNA, 19 nt, Artificial Sequence
  Description of Artificial Sequence: Synthetic oligonucleotide
  Sense strand starting at position 1809 of SEQ ID NO: 913342
uuuggauguuggucagaag

SEQ ID NO: 920019 - RNA, 19 nt, Artificial Sequence
  Description of Artificial Sequence: Synthetic oligonucleotide
  Antisense strand to SEQ ID NO: 920018
cuucugaccaacauccaaa

SEQ ID NO: 920020 - RNA, 19 nt, Artificial Sequence
  Description of Artificial Sequence: Synthetic oligonucleotide
  Sense strand starting at position 1527 of SEQ ID NO: 913342
uaagguaccuggguuauua

SEQ ID NO: 920021 - RNA, 19 nt, Artificial Sequence
  Description of Artificial Sequence: Synthetic oligonucleotide
  Antisense strand to SEQ ID NO: 920020
uaauaacccagguaccuua

SEQ ID NO: 920022 - RNA, 19 nt, Artificial Sequence
  Description of Artificial Sequence: Synthetic oligonucleotide
  Sense strand starting at position 3783 of SEQ ID NO: 913342
acuuaaguuuaaccaguca

SEQ ID NO: 920023 - RNA, 19 nt, Artificial Sequence
  Description of Artificial Sequence: Synthetic oligonucleotide
  Antisense strand to SEQ ID NO: 920022
ugacugguuaaacuuaagu

SEQ ID NO: 920024 - RNA, 19 nt, Artificial Sequence
  Description of Artificial Sequence: Synthetic oligonucleotide
  Sense strand starting at position 1382 of SEQ ID NO: 913342
augggaguuucuucaggug

SEQ ID NO: 920025 - RNA, 19 nt, Artificial Sequence
  Description of Artificial Sequence: Synthetic oligonucleotide
  Antisense strand to SEQ ID NO: 920024
caccugaagaaacucccau

SEQ ID NO: 920026 - RNA, 19 nt, Artificial Sequence
  Description of Artificial Sequence: Synthetic oligonucleotide
  Sense strand starting at position 3420 of SEQ ID NO: 913342
ggccaaugcaugcagauua

SEQ ID NO: 920027 - RNA, 19 nt, Artificial Sequence
  Description of Artificial Sequence: Synthetic oligonucleotide
  Antisense strand to SEQ ID NO: 920026
uaaucugcaugcauuggcc

SEQ ID NO: 920028 - RNA, 19 nt, Artificial Sequence
  Description of Artificial Sequence: Synthetic oligonucleotide
  Sense strand starting at position 1407 of SEQ ID NO: 913342
gaaguccugucccuuuaga

SEQ ID NO: 920029 - RNA, 19 nt, Artificial Sequence
  Description of Artificial Sequence: Synthetic oligonucleotide
  Antisense strand to SEQ ID NO: 920028
ucuaaagggacaggacuuc

SEQ ID NO: 920030 - RNA, 19 nt, Artificial Sequence
  Description of Artificial Sequence: Synthetic oligonucleotide
  Sense strand starting at position 1959 of SEQ ID NO: 913342
ggucuauucucauuaccuc

SEQ ID NO: 920031 - RNA, 19 nt, Artificial Sequence
  Description of Artificial Sequence: Synthetic oligonucleotide
  Antisense strand to SEQ ID NO: 920030
gagguaaugagaauagacc

SEQ ID NO: 920032 - RNA, 19 nt, Artificial Sequence
  Description of Artificial Sequence: Synthetic oligonucleotide
  Sense strand starting at position 1524 of SEQ ID NO: 913342
uguuaagguaccuggguua

SEQ ID NO: 920033 - RNA, 19 nt, Artificial Sequence
  Description of Artificial Sequence: Synthetic oligonucleotide
  Antisense strand to SEQ ID NO: 920032
uaacccagguaccuuaaca

SEQ ID NO: 920034 - RNA, 19 nt, Artificial Sequence
  Description of Artificial Sequence: Synthetic oligonucleotide
  Sense strand starting at position 3430 of SEQ ID NO: 913342
ugcagauuauuugagucua

SEQ ID NO: 920035 - RNA, 19 nt, Artificial Sequence
  Description of Artificial Sequence: Synthetic oligonucleotide
  Antisense strand to SEQ ID NO: 920034
uagacucaaauaaucugca

SEQ ID NO: 920036 - RNA, 19 nt, Artificial Sequence
  Description of Artificial Sequence: Synthetic oligonucleotide
  Sense strand starting at position 1511 of SEQ ID NO: 913342
acgcauuagugacuguuaa

SEQ ID NO: 920037 - RNA, 19 nt, Artificial Sequence
  Description of Artificial Sequence: Synthetic oligonucleotide
  Antisense strand to SEQ ID NO: 920036
uuaacagucacuaaugcgu

SEQ ID NO: 920038 - RNA, 19 nt, Artificial Sequence
  Description of Artificial Sequence: Synthetic oligonucleotide
  Sense strand starting at position 1512 of SEQ ID NO: 913342
cgcauuagugacuguuaag

SEQ ID NO: 920039 - RNA, 19 nt, Artificial Sequence
  Description of Artificial Sequence: Synthetic oligonucleotide
  Antisense strand to SEQ ID NO: 920038
cuuaacagucacuaaugcg

SEQ ID NO: 920040 - RNA, 19 nt, Artificial Sequence
  Description of Artificial Sequence: Synthetic oligonucleotide
  Sense strand starting at position 2037 of SEQ ID NO: 913342
guuguuaucacguaaguuc

SEQ ID NO: 920041 - RNA, 19 nt, Artificial Sequence
  Description of Artificial Sequence: Synthetic oligonucleotide
  Antisense strand to SEQ ID NO: 920040
gaacuuacgugauaacaac

SEQ ID NO: 920042 - RNA, 19 nt, Artificial Sequence
  Description of Artificial Sequence: Synthetic oligonucleotide
  Sense strand starting at position 781 of SEQ ID NO: 913342
uaaguaauguuugaggaca

SEQ ID NO: 920043 - RNA, 19 nt, Artificial Sequence
  Description of Artificial Sequence: Synthetic oligonucleotide
  Antisense strand to SEQ ID NO: 920042
uguccucaaacauuacuua

SEQ ID NO: 920044 - RNA, 19 nt, Artificial Sequence
  Description of Artificial Sequence: Synthetic oligonucleotide
  Sense strand starting at position 2033 of SEQ ID NO: 913342
aguaguuguuaucacguaa

SEQ ID NO: 920045 - RNA, 19 nt, Artificial Sequence
  Description of Artificial Sequence: Synthetic oligonucleotide
  Antisense strand to SEQ ID NO: 920044
uuacgugauaacaacuacu

SEQ ID NO: 920046 - RNA, 19 nt, Artificial Sequence
  Description of Artificial Sequence: Synthetic oligonucleotide
  Sense strand starting at position 745 of SEQ ID NO: 913343
cuguuaagucaccagcaua

SEQ ID NO: 920047 - RNA, 19 nt, Artificial Sequence
  Description of Artificial Sequence: Synthetic oligonucleotide
  Antisense strand to SEQ ID NO: 920046
uaugcuggugacuuaacag

SEQ ID NO: 920048 - RNA, 19 nt, Artificial Sequence
  Description of Artificial Sequence: Synthetic oligonucleotide
  Sense strand starting at position 1743 of SEQ ID NO: 913343
gcaucuccuggucacgaau

SEQ ID NO: 920049 - RNA, 19 nt, Artificial Sequence
  Description of Artificial Sequence: Synthetic oligonucleotide
  Antisense strand to SEQ ID NO: 920048
auucgugaccaggagaugc

SEQ ID NO: 920050 - RNA, 19 nt, Artificial Sequence
  Description of Artificial Sequence: Synthetic oligonucleotide
  Sense strand starting at position 2576 of SEQ ID NO: 913343
gguaguucauugcuugaag

SEQ ID NO: 920051 - RNA, 19 nt, Artificial Sequence
  Description of Artificial Sequence: Synthetic oligonucleotide
  Antisense strand to SEQ ID NO: 920050
cuucaagcaaugaacuacc

SEQ ID NO: 920052 - RNA, 19 nt, Artificial Sequence
  Description of Artificial Sequence: Synthetic oligonucleotide
  Sense strand starting at position 2574 of SEQ ID NO: 913343
aggguaguucauugcuuga

SEQ ID NO: 920053 - RNA, 19 nt, Artificial Sequence
  Description of Artificial Sequence: Synthetic oligonucleotide
  Antisense strand to SEQ ID NO: 920052
ucaagcaaugaacuacccu

SEQ ID NO: 920054 - RNA, 19 nt, Artificial Sequence
  Description of Artificial Sequence: Synthetic oligonucleotide
  Sense strand starting at position 1742 of SEQ ID NO: 913343
ggcaucuccuggucacgaa

SEQ ID NO: 920055 - RNA, 19 nt, Artificial Sequence
  Description of Artificial Sequence: Synthetic oligonucleotide
  Antisense strand to SEQ ID NO: 920054
uucgugaccaggagaugcc

SEQ ID NO: 920056 - RNA, 19 nt, Artificial Sequence
  Description of Artificial Sequence: Synthetic oligonucleotide
  Sense strand starting at position 744 of SEQ ID NO: 913343
ucuguuaagucaccagcau

SEQ ID NO: 920057 - RNA, 19 nt, Artificial Sequence
  Description of Artificial Sequence: Synthetic oligonucleotide
  Antisense strand to SEQ ID NO: 920056
augcuggugacuuaacaga

SEQ ID NO: 920058 - RNA, 19 nt, Artificial Sequence
  Description of Artificial Sequence: Synthetic oligonucleotide
  Sense strand starting at position 1439 of SEQ ID NO: 913343
ugcugcuuauuugacaaga

SEQ ID NO: 920059 - RNA, 19 nt, Artificial Sequence
  Description of Artificial Sequence: Synthetic oligonucleotide
  Antisense strand to SEQ ID NO: 920058
ucuugucaaauaagcagca

SEQ ID NO: 920060 - RNA, 19 nt, Artificial Sequence
  Description of Artificial Sequence: Synthetic oligonucleotide
  Sense strand starting at position 1895 of SEQ ID NO: 913343
cccuguugcuggucaaacu

SEQ ID NO: 920061 - RNA, 19 nt, Artificial Sequence
  Description of Artificial Sequence: Synthetic oligonucleotide
  Antisense strand to SEQ ID NO: 920060
aguuugaccagcaacaggg

SEQ ID NO: 920062 - RNA, 19 nt, Artificial Sequence
  Description of Artificial Sequence: Synthetic oligonucleotide
  Sense strand starting at position 3690 of SEQ ID NO: 913344
ugacauuguagaugaugau

SEQ ID NO: 920063 - RNA, 19 nt, Artificial Sequence
  Description of Artificial Sequence: Synthetic oligonucleotide
  Antisense strand to SEQ ID NO: 920062
aucaucaucuacaauguca

SEQ ID NO: 920064 - RNA, 19 nt, Artificial Sequence
  Description of Artificial Sequence: Synthetic oligonucleotide
  Sense strand starting at position 2883 of SEQ ID NO: 913344
gaucccagcuagucugaau

SEQ ID NO: 920065 - RNA, 19 nt, Artificial Sequence
  Description of Artificial Sequence: Synthetic oligonucleotide
  Antisense strand to SEQ ID NO: 920064
auucagacuagcugggauc

SEQ ID NO: 920066 - RNA, 19 nt, Artificial Sequence
  Description of Artificial Sequence: Synthetic oligonucleotide
  Sense strand starting at position 939 of SEQ ID NO: 913344
ucaccuucuguuugagagu

SEQ ID NO: 920067 - RNA, 19 nt, Artificial Sequence
  Description of Artificial Sequence: Synthetic oligonucleotide
  Antisense strand to SEQ ID NO: 920066
acucucaaacagaagguga

SEQ ID NO: 920068 - RNA, 19 nt, Artificial Sequence
  Description of Artificial Sequence: Synthetic oligonucleotide
  Sense strand starting at position 940 of SEQ ID NO: 913344
caccuucuguuugagaguu

SEQ ID NO: 920069 - RNA, 19 nt, Artificial Sequence
  Description of Artificial Sequence: Synthetic oligonucleotide
  Antisense strand to SEQ ID NO: 920068
aacucucaaacagaaggug

SEQ ID NO: 920070 - RNA, 19 nt, Artificial Sequence
  Description of Artificial Sequence: Synthetic oligonucleotide
  Sense strand starting at position 3208 of SEQ ID NO: 913345
uagcaauauggcguuguuu

SEQ ID NO: 920071 - RNA, 19 nt, Artificial Sequence
  Description of Artificial Sequence: Synthetic oligonucleotide
  Antisense strand to SEQ ID NO: 920070
aaacaacgccauauugcua

SEQ ID NO: 920072 - RNA, 19 nt, Artificial Sequence
  Description of Artificial Sequence: Synthetic oligonucleotide
  Sense strand starting at position 3741 of SEQ ID NO: 913345
ggaguaauuaggcaacuuc

SEQ ID NO: 920073 - RNA, 19 nt, Artificial Sequence
  Description of Artificial Sequence: Synthetic oligonucleotide
  Antisense strand to SEQ ID NO: 920072
gaaguugccuaauuacucc

SEQ ID NO: 920074 - RNA, 19 nt, Artificial Sequence
  Description of Artificial Sequence: Synthetic oligonucleotide
  Sense strand starting at position 3730 of SEQ ID NO: 913345
ugucacucucaggaguaau

SEQ ID NO: 920075 - RNA, 19 nt, Artificial Sequence
  Description of Artificial Sequence: Synthetic oligonucleotide
  Antisense strand to SEQ ID NO: 920074
auuacuccugagagugaca

SEQ ID NO: 920076 - RNA, 19 nt, Artificial Sequence
  Description of Artificial Sequence: Synthetic oligonucleotide
  Sense strand starting at position 3740 of SEQ ID NO: 913345
aggaguaauuaggcaacuu

SEQ ID NO: 920077 - RNA, 19 nt, Artificial Sequence
  Description of Artificial Sequence: Synthetic oligonucleotide
  Antisense strand to SEQ ID NO: 920076
aaguugccuaauuacuccu

SEQ ID NO: 920078 - RNA, 19 nt, Artificial Sequence
  Description of Artificial Sequence: Synthetic oligonucleotide
  Sense strand starting at position 3700 of SEQ ID NO: 913345
ggccuagaauuauuguuau

SEQ ID NO: 920079 - RNA, 19 nt, Artificial Sequence
  Description of Artificial Sequence: Synthetic oligonucleotide
  Antisense strand to SEQ ID NO: 920078
auaacaauaauucuaggcc

SEQ ID NO: 920080 - RNA, 19 nt, Artificial Sequence
  Description of Artificial Sequence: Synthetic oligonucleotide
  Sense strand starting at position 3606 of SEQ ID NO: 913345
aguguuagcgaggauggua

SEQ ID NO: 920081 - RNA, 19 nt, Artificial Sequence
  Description of Artificial Sequence: Synthetic oligonucleotide
  Antisense strand to SEQ ID NO: 920080
uaccauccucgcuaacacu

SEQ ID NO: 920082 - RNA, 19 nt, Artificial Sequence
  Description of Artificial Sequence: Synthetic oligonucleotide
  Sense strand starting at position 1276 of SEQ ID NO: 913345
cuccaaagcuauguguaua

SEQ ID NO: 920083 - RNA, 19 nt, Artificial Sequence
  Description of Artificial Sequence: Synthetic oligonucleotide
  Antisense strand to SEQ ID NO: 920082
uauacacauagcuuuggag

SEQ ID NO: 920084 - RNA, 19 nt, Artificial Sequence
  Description of Artificial Sequence: Synthetic oligonucleotide
  Sense strand starting at position 3937 of SEQ ID NO: 913345
gugagugucccuuaaaugc

SEQ ID NO: 920085 - RNA, 19 nt, Artificial Sequence
  Description of Artificial Sequence: Synthetic oligonucleotide
  Antisense strand to SEQ ID NO: 920084
gcauuuaagggacacucac

SEQ ID NO: 920086 - RNA, 19 nt, Artificial Sequence
  Description of Artificial Sequence: Synthetic oligonucleotide
  Sense strand starting at position 1275 of SEQ ID NO: 913345
acuccaaagcuauguguau

SEQ ID NO: 920087 - RNA, 19 nt, Artificial Sequence
  Description of Artificial Sequence: Synthetic oligonucleotide
  Antisense strand to SEQ ID NO: 920086
auacacauagcuuuggagu

SEQ ID NO: 920088 - RNA, 19 nt, Artificial Sequence
  Description of Artificial Sequence: Synthetic oligonucleotide
  Sense strand starting at position 3982 of SEQ ID NO: 913345
aaugucugugccuauuagu

SEQ ID NO: 920089 - RNA, 19 nt, Artificial Sequence
  Description of Artificial Sequence: Synthetic oligonucleotide
  Antisense strand to SEQ ID NO: 920088
acuaauaggcacagacauu

SEQ ID NO: 920090 - RNA, 19 nt, Artificial Sequence
  Description of Artificial Sequence: Synthetic oligonucleotide
  Sense strand starting at position 3933 of SEQ ID NO: 913345
aggugugagugucccuuaa

SEQ ID NO: 920091 - RNA, 19 nt, Artificial Sequence
  Description of Artificial Sequence: Synthetic oligonucleotide
  Antisense strand to SEQ ID NO: 920090
uuaagggacacucacaccu

SEQ ID NO: 920092 - RNA, 19 nt, Artificial Sequence
  Description of Artificial Sequence: Synthetic oligonucleotide
  Sense strand starting at position 3935 of SEQ ID NO: 913345
gugugagugucccuuaaau

SEQ ID NO: 920093 - RNA, 19 nt, Artificial Sequence
  Description of Artificial Sequence: Synthetic oligonucleotide
  Antisense strand to SEQ ID NO: 920092
auuuaagggacacucacac

SEQ ID NO: 920094 - RNA, 19 nt, Artificial Sequence
  Description of Artificial Sequence: Synthetic oligonucleotide
  Sense strand starting at position 3979 of SEQ ID NO: 913345
ugcaaugucugugccuauu

SEQ ID NO: 920095 - RNA, 19 nt, Artificial Sequence
  Description of Artificial Sequence: Synthetic oligonucleotide
  Antisense strand to SEQ ID NO: 920094
aauaggcacagacauugca

SEQ ID NO: 920096 - RNA, 19 nt, Artificial Sequence
  Description of Artificial Sequence: Synthetic oligonucleotide
  Sense strand starting at position 3977 of SEQ ID NO: 913345
ccugcaaugucugugccua

SEQ ID NO: 920097 - RNA, 19 nt, Artificial Sequence
  Description of Artificial Sequence: Synthetic oligonucleotide
  Antisense strand to SEQ ID NO: 920096
uaggcacagacauugcagg

SEQ ID NO: 920098 - RNA, 19 nt, Artificial Sequence
  Description of Artificial Sequence: Synthetic oligonucleotide
  Sense strand starting at position 1235 of SEQ ID NO: 913345
guaauauugugcuugcccu

SEQ ID NO: 920099 - RNA, 19 nt, Artificial Sequence
  Description of Artificial Sequence: Synthetic oligonucleotide
  Antisense strand to SEQ ID NO: 920098
agggcaagcacaauauuac

SEQ ID NO: 920100 - RNA, 19 nt, Artificial Sequence
  Description of Artificial Sequence: Synthetic oligonucleotide
  Sense strand starting at position 695 of SEQ ID NO: 913345
cuguuaaaguaagaacuuu

SEQ ID NO: 920101 - RNA, 19 nt, Artificial Sequence
  Description of Artificial Sequence: Synthetic oligonucleotide
  Antisense strand to SEQ ID NO: 920100
aaaguucuuacuuuaacag

SEQ ID NO: 920102 - RNA, 19 nt, Artificial Sequence
  Description of Artificial Sequence: Synthetic oligonucleotide
  Sense strand starting at position 3978 of SEQ ID NO: 913345
cugcaaugucugugccuau

SEQ ID NO: 920103 - RNA, 19 nt, Artificial Sequence
  Description of Artificial Sequence: Synthetic oligonucleotide
  Antisense strand to SEQ ID NO: 920102
auaggcacagacauugcag

SEQ ID NO: 920104 - RNA, 19 nt, Artificial Sequence
  Description of Artificial Sequence: Synthetic oligonucleotide
  Sense strand starting at position 989 of SEQ ID NO: 913345
uaggaacugucuugagauu

SEQ ID NO: 920105 - RNA, 19 nt, Artificial Sequence
  Description of Artificial Sequence: Synthetic oligonucleotide
  Antisense strand to SEQ ID NO: 920104
aaucucaagacaguuccua

SEQ ID NO: 920106 - RNA, 19 nt, Artificial Sequence
  Description of Artificial Sequence: Synthetic oligonucleotide
  Sense strand starting at position 3247 of SEQ ID NO: 913345
gcuguugcucccuguucua

SEQ ID NO: 920107 - RNA, 19 nt, Artificial Sequence
  Description of Artificial Sequence: Synthetic oligonucleotide
  Antisense strand to SEQ ID NO: 920106
uagaacagggagcaacagc

SEQ ID NO: 920108 - RNA, 19 nt, Artificial Sequence
  Description of Artificial Sequence: Synthetic oligonucleotide
  Sense strand starting at position 3727 of SEQ ID NO: 913345
ucaugucacucucaggagu

SEQ ID NO: 920109 - RNA, 19 nt, Artificial Sequence
  Description of Artificial Sequence: Synthetic oligonucleotide
  Antisense strand to SEQ ID NO: 920108
acuccugagagugacauga

SEQ ID NO: 920110 - RNA, 19 nt, Artificial Sequence
  Description of Artificial Sequence: Synthetic oligonucleotide
  Sense strand starting at position 3611 of SEQ ID NO: 913345
uagcgaggaugguaucuau

SEQ ID NO: 920111 - RNA, 19 nt, Artificial Sequence
  Description of Artificial Sequence: Synthetic oligonucleotide
  Antisense strand to SEQ ID NO: 920110
auagauaccauccucgcua

SEQ ID NO: 920112 - RNA, 19 nt, Artificial Sequence
  Description of Artificial Sequence: Synthetic oligonucleotide
  Sense strand starting at position 3729 of SEQ ID NO: 913345
augucacucucaggaguaa

SEQ ID NO: 920113 - RNA, 19 nt, Artificial Sequence
  Description of Artificial Sequence: Synthetic oligonucleotide
  Antisense strand to SEQ ID NO: 920112
uuacuccugagagugacau

SEQ ID NO: 920114 - RNA, 19 nt, Artificial Sequence
  Description of Artificial Sequence: Synthetic oligonucleotide
  Sense strand starting at position 3967 of SEQ ID NO: 913345
uuagcuuacuccugcaaug

SEQ ID NO: 920115 - RNA, 19 nt, Artificial Sequence
  Description of Artificial Sequence: Synthetic oligonucleotide
  Antisense strand to SEQ ID NO: 920114
cauugcaggaguaagcuaa

SEQ ID NO: 920116 - RNA, 19 nt, Artificial Sequence
  Description of Artificial Sequence: Synthetic oligonucleotide
  Sense strand starting at position 3950 of SEQ ID NO: 913345
aaaugcuucugcgaggcuu

SEQ ID NO: 920117 - RNA, 19 nt, Artificial Sequence
  Description of Artificial Sequence: Synthetic oligonucleotide
  Antisense strand to SEQ ID NO: 920116
aagccucgcagaagcauuu

SEQ ID NO: 920118 - RNA, 19 nt, Artificial Sequence
  Description of Artificial Sequence: Synthetic oligonucleotide
  Sense strand starting at position 2540 of SEQ ID NO: 913346
cuacgaguucuacacaaag

SEQ ID NO: 920119 - RNA, 19 nt, Artificial Sequence
  Description of Artificial Sequence: Synthetic oligonucleotide
  Antisense strand to SEQ ID NO: 920118
cuuuguguagaacucguag

SEQ ID NO: 920120 - RNA, 19 nt, Artificial Sequence
  Description of Artificial Sequence: Synthetic oligonucleotide
  Sense strand starting at position 3755 of SEQ ID NO: 913346
aggacuccaucccaagaaa

SEQ ID NO: 920121 - RNA, 19 nt, Artificial Sequence
  Description of Artificial Sequence: Synthetic oligonucleotide
  Antisense strand to SEQ ID NO: 920120
uuucuugggauggaguccu

SEQ ID NO: 920122 - RNA, 19 nt, Artificial Sequence
  Description of Artificial Sequence: Synthetic oligonucleotide
  Sense strand starting at position 2529 of SEQ ID NO: 913346
gccagcuuccucuacgagu

SEQ ID NO: 920123 - RNA, 19 nt, Artificial Sequence
  Description of Artificial Sequence: Synthetic oligonucleotide
  Antisense strand to SEQ ID NO: 920122
acucguagaggaagcuggc

SEQ ID NO: 920124 - RNA, 19 nt, Artificial Sequence
  Description of Artificial Sequence: Synthetic oligonucleotide
  Sense strand starting at position 2538 of SEQ ID NO: 913346
cucuacgaguucuacacaa

SEQ ID NO: 920125 - RNA, 19 nt, Artificial Sequence
  Description of Artificial Sequence: Synthetic oligonucleotide
  Antisense strand to SEQ ID NO: 920124
uuguguagaacucguagag

SEQ ID NO: 920126 - RNA, 19 nt, Artificial Sequence
  Description of Artificial Sequence: Synthetic oligonucleotide
  Sense strand starting at position 591 of SEQ ID NO: 913346
guugacguuucaugucuuu

SEQ ID NO: 920127 - RNA, 19 nt, Artificial Sequence
  Description of Artificial Sequence: Synthetic oligonucleotide
  Antisense strand to SEQ ID NO: 920126
aaagacaugaaacgucaac

SEQ ID NO: 920128 - RNA, 19 nt, Artificial Sequence
  Description of Artificial Sequence: Synthetic oligonucleotide
  Sense strand starting at position 3744 of SEQ ID NO: 913347
gcuccuagaggcuaaagaa

SEQ ID NO: 920129 - RNA, 19 nt, Artificial Sequence
  Description of Artificial Sequence: Synthetic oligonucleotide
  Antisense strand to SEQ ID NO: 920128
uucuuuagccucuaggagc

SEQ ID NO: 920130 - RNA, 19 nt, Artificial Sequence
  Description of Artificial Sequence: Synthetic oligonucleotide
  Sense strand starting at position 1093 of SEQ ID NO: 913347
cuuaaauuccagggucaaa

SEQ ID NO: 920131 - RNA, 19 nt, Artificial Sequence
  Description of Artificial Sequence: Synthetic oligonucleotide
  Antisense strand to SEQ ID NO: 920130
uuugacccuggaauuuaag

SEQ ID NO: 920132 - RNA, 19 nt, Artificial Sequence
  Description of Artificial Sequence: Synthetic oligonucleotide
  Sense strand starting at position 1507 of SEQ ID NO: 913347
gcccaucuuccuuaggaaa

SEQ ID NO: 920133 - RNA, 19 nt, Artificial Sequence
  Description of Artificial Sequence: Synthetic oligonucleotide
  Antisense strand to SEQ ID NO: 920132
uuuccuaaggaagaugggc

SEQ ID NO: 920134 - RNA, 19 nt, Artificial Sequence
  Description of Artificial Sequence: Synthetic oligonucleotide
  Sense strand starting at position 2412 of SEQ ID NO: 913347
aggcguuggagggauaacu

SEQ ID NO: 920135 - RNA, 19 nt, Artificial Sequence
  Description of Artificial Sequence: Synthetic oligonucleotide
  Antisense strand to SEQ ID NO: 920134
aguuaucccuccaacgccu

SEQ ID NO: 920136 - RNA, 19 nt, Artificial Sequence
  Description of Artificial Sequence: Synthetic oligonucleotide
  Sense strand starting at position 1092 of SEQ ID NO: 913347
ccuuaaauuccagggucaa

SEQ ID NO: 920137 - RNA, 19 nt, Artificial Sequence
  Description of Artificial Sequence: Synthetic oligonucleotide
  Antisense strand to SEQ ID NO: 920136
uugacccuggaauuuaagg

SEQ ID NO: 920138 - RNA, 19 nt, Artificial Sequence
  Description of Artificial Sequence: Synthetic oligonucleotide
  Sense strand starting at position 2030 of SEQ ID NO: 913347
ggccuugaacuuugaaaca

SEQ ID NO: 920139 - RNA, 19 nt, Artificial Sequence
  Description of Artificial Sequence: Synthetic oligonucleotide
  Antisense strand to SEQ ID NO: 920138
uguuucaaaguucaaggcc

SEQ ID NO: 920140 - RNA, 19 nt, Artificial Sequence
  Description of Artificial Sequence: Synthetic oligonucleotide
  Sense strand starting at position 158 of SEQ ID NO: 913347
gagguugugccucagaaga

SEQ ID NO: 920141 - RNA, 19 nt, Artificial Sequence
  Description of Artificial Sequence: Synthetic oligonucleotide
  Antisense strand to SEQ ID NO: 920140
ucuucugaggcacaaccuc

SEQ ID NO: 920142 - RNA, 19 nt, Artificial Sequence
  Description of Artificial Sequence: Synthetic oligonucleotide
  Sense strand starting at position 3643 of SEQ ID NO: 913347
uugaaugacuucucaaguu

SEQ ID NO: 920143 - RNA, 19 nt, Artificial Sequence
  Description of Artificial Sequence: Synthetic oligonucleotide
  Antisense strand to SEQ ID NO: 920142
aacuugagaagucauucaa

SEQ ID NO: 920144 - RNA, 19 nt, Artificial Sequence
  Description of Artificial Sequence: Synthetic oligonucleotide
  Sense strand starting at position 210 of SEQ ID NO: 913347
gcaagaaugucaucccaga

SEQ ID NO: 920145 - RNA, 19 nt, Artificial Sequence
  Description of Artificial Sequence: Synthetic oligonucleotide
  Antisense strand to SEQ ID NO: 920144
ucugggaugacauucuugc

SEQ ID NO: 920146 - RNA, 19 nt, Artificial Sequence
  Description of Artificial Sequence: Synthetic oligonucleotide
  Sense strand starting at position 2969 of SEQ ID NO: 913347
aaggaaguguggucuggau

SEQ ID NO: 920147 - RNA, 19 nt, Artificial Sequence
  Description of Artificial Sequence: Synthetic oligonucleotide
  Antisense strand to SEQ ID NO: 920146
auccagaccacacuuccuu

SEQ ID NO: 920148 - RNA, 19 nt, Artificial Sequence
  Description of Artificial Sequence: Synthetic oligonucleotide
  Sense strand starting at position 71 of SEQ ID NO: 913347
cccugaucucaaggguauu

SEQ ID NO: 920149 - RNA, 19 nt, Artificial Sequence
  Description of Artificial Sequence: Synthetic oligonucleotide
  Antisense strand to SEQ ID NO: 920148
aauacccuugagaucaggg

SEQ ID NO: 920150 - RNA, 19 nt, Artificial Sequence
  Description of Artificial Sequence: Synthetic oligonucleotide
  Sense strand starting at position 1506 of SEQ ID NO: 913347
agcccaucuuccuuaggaa

SEQ ID NO: 920151 - RNA, 19 nt, Artificial Sequence
  Description of Artificial Sequence: Synthetic oligonucleotide
  Antisense strand to SEQ ID NO: 920150
uuccuaaggaagaugggcu

SEQ ID NO: 920152 - RNA, 19 nt, Artificial Sequence
  Description of Artificial Sequence: Synthetic oligonucleotide
  Sense strand starting at position 3052 of SEQ ID NO: 913347
aagcuaacucagcgaaaga

SEQ ID NO: 920153 - RNA, 19 nt, Artificial Sequence
  Description of Artificial Sequence: Synthetic oligonucleotide
  Antisense strand to SEQ ID NO: 920152
ucuuucgcugaguuagcuu

SEQ ID NO: 920154 - RNA, 19 nt, Artificial Sequence
  Description of Artificial Sequence: Synthetic oligonucleotide
  Sense strand starting at position 2421 of SEQ ID NO: 913347
agggauaacuuggagagaa

SEQ ID NO: 920155 - RNA, 19 nt, Artificial Sequence
  Description of Artificial Sequence: Synthetic oligonucleotide
  Antisense strand to SEQ ID NO: 920154
uucucuccaaguuaucccu

SEQ ID NO: 920156 - RNA, 19 nt, Artificial Sequence
  Description of Artificial Sequence: Synthetic oligonucleotide
  Sense strand starting at position 893 of SEQ ID NO: 913347
gggcaggugugaucugaga

SEQ ID NO: 920157 - RNA, 19 nt, Artificial Sequence
  Description of Artificial Sequence: Synthetic oligonucleotide
  Antisense strand to SEQ ID NO: 920156
ucucagaucacaccugccc

SEQ ID NO: 920158 - RNA, 19 nt, Artificial Sequence
  Description of Artificial Sequence: Synthetic oligonucleotide
  Sense strand starting at position 1216 of SEQ ID NO: 913347
ccaucagaguuaguuuacu

SEQ ID NO: 920159 - RNA, 19 nt, Artificial Sequence
  Description of Artificial Sequence: Synthetic oligonucleotide
  Antisense strand to SEQ ID NO: 920158
aguaaacuaacucugaugg

SEQ ID NO: 920160 - RNA, 19 nt, Artificial Sequence
  Description of Artificial Sequence: Synthetic oligonucleotide
  Sense strand starting at position 1363 of SEQ ID NO: 913347
gacugagguuucucccuuu

SEQ ID NO: 920161 - RNA, 19 nt, Artificial Sequence
  Description of Artificial Sequence: Synthetic oligonucleotide
  Antisense strand to SEQ ID NO: 920160
aaagggagaaaccucaguc

SEQ ID NO: 920162 - RNA, 19 nt, Artificial Sequence
  Description of Artificial Sequence: Synthetic oligonucleotide
  Sense strand starting at position 2947 of SEQ ID NO: 913347
gagguagauuuagguaaag

SEQ ID NO: 920163 - RNA, 19 nt, Artificial Sequence
  Description of Artificial Sequence: Synthetic oligonucleotide
  Antisense strand to SEQ ID NO: 920162
cuuuaccuaaaucuaccuc

SEQ ID NO: 920164 - RNA, 19 nt, Artificial Sequence
  Description of Artificial Sequence: Synthetic oligonucleotide
  Sense strand starting at position 1130 of SEQ ID NO: 913347
aaagguaggguguguugau

SEQ ID NO: 920165 - RNA, 19 nt, Artificial Sequence
  Description of Artificial Sequence: Synthetic oligonucleotide
  Antisense strand to SEQ ID NO: 920164
aucaacacacccuaccuuu

SEQ ID NO: 920166 - RNA, 19 nt, Artificial Sequence
  Description of Artificial Sequence: Synthetic oligonucleotide
  Sense strand starting at position 3630 of SEQ ID NO: 913347
cgaacuaagugcuuugaau

SEQ ID NO: 920167 - RNA, 19 nt, Artificial Sequence
  Description of Artificial Sequence: Synthetic oligonucleotide
  Antisense strand to SEQ ID NO: 920166
auucaaagcacuuaguucg

SEQ ID NO: 920168 - RNA, 19 nt, Artificial Sequence
  Description of Artificial Sequence: Synthetic oligonucleotide
  Sense strand starting at position 895 of SEQ ID NO: 913347
gcaggugugaucugagauc

SEQ ID NO: 920169 - RNA, 19 nt, Artificial Sequence
  Description of Artificial Sequence: Synthetic oligonucleotide
  Antisense strand to SEQ ID NO: 920168
gaucucagaucacaccugc

SEQ ID NO: 920170 - RNA, 19 nt, Artificial Sequence
  Description of Artificial Sequence: Synthetic oligonucleotide
  Sense strand starting at position 282 of SEQ ID NO: 913347
gucgucauggcucacacaa

SEQ ID NO: 920171 - RNA, 19 nt, Artificial Sequence
  Description of Artificial Sequence: Synthetic oligonucleotide
  Antisense strand to SEQ ID NO: 920170
uugugugagccaugacgac

SEQ ID NO: 920172 - RNA, 19 nt, Artificial Sequence
  Description of Artificial Sequence: Synthetic oligonucleotide
  Sense strand starting at position 3583 of SEQ ID NO: 913347
uccuacucaucgucuuaga

SEQ ID NO: 920173 - RNA, 19 nt, Artificial Sequence
  Description of Artificial Sequence: Synthetic oligonucleotide
  Antisense strand to SEQ ID NO: 920172
ucuaagacgaugaguagga

SEQ ID NO: 920174 - RNA, 19 nt, Artificial Sequence
  Description of Artificial Sequence: Synthetic oligonucleotide
  Sense strand starting at position 3618 of SEQ ID NO: 913347
auuuauugaucacgaacua

SEQ ID NO: 920175 - RNA, 19 nt, Artificial Sequence
  Description of Artificial Sequence: Synthetic oligonucleotide
  Antisense strand to SEQ ID NO: 920174
uaguucgugaucaauaaau

SEQ ID NO: 920176 - RNA, 19 nt, Artificial Sequence
  Description of Artificial Sequence: Synthetic oligonucleotide
  Sense strand starting at position 345 of SEQ ID NO: 913347
guggccgucccggauaaga

SEQ ID NO: 920177 - RNA, 19 nt, Artificial Sequence
  Description of Artificial Sequence: Synthetic oligonucleotide
  Antisense strand to SEQ ID NO: 920176
ucuuauccgggacggccac

SEQ ID NO: 920178 - RNA, 19 nt, Artificial Sequence
  Description of Artificial Sequence: Synthetic oligonucleotide
  Sense strand starting at position 3504 of SEQ ID NO: 913347
gcagccauuuauuauagau

SEQ ID NO: 920179 - RNA, 19 nt, Artificial Sequence
  Description of Artificial Sequence: Synthetic oligonucleotide
  Antisense strand to SEQ ID NO: 920178
aucuauaauaaauggcugc

SEQ ID NO: 920180 - RNA, 19 nt, Artificial Sequence
  Description of Artificial Sequence: Synthetic oligonucleotide
  Sense strand starting at position 1443 of SEQ ID NO: 913347
ucgcaagauccggguuaca

SEQ ID NO: 920181 - RNA, 19 nt, Artificial Sequence
  Description of Artificial Sequence: Synthetic oligonucleotide
  Antisense strand to SEQ ID NO: 920180
uguaacccggaucuugcga

SEQ ID NO: 920182 - RNA, 19 nt, Artificial Sequence
  Description of Artificial Sequence: Synthetic oligonucleotide
  Sense strand starting at position 190 of SEQ ID NO: 913347
ccgugugggcucugaucaa

SEQ ID NO: 920183 - RNA, 19 nt, Artificial Sequence
  Description of Artificial Sequence: Synthetic oligonucleotide
  Antisense strand to SEQ ID NO: 920182
uugaucagagcccacacgg

SEQ ID NO: 920184 - RNA, 19 nt, Artificial Sequence
  Description of Artificial Sequence: Synthetic oligonucleotide
  Sense strand starting at position 82 of SEQ ID NO: 913347
aggguauuauuccacaaua

SEQ ID NO: 920185 - RNA, 19 nt, Artificial Sequence
  Description of Artificial Sequence: Synthetic oligonucleotide
  Antisense strand to SEQ ID NO: 920184
uauuguggaauaauacccu

SEQ ID NO: 920186 - RNA, 19 nt, Artificial Sequence
  Description of Artificial Sequence: Synthetic oligonucleotide
  Sense strand starting at position 1859 of SEQ ID NO: 913347
ggucgucuucccgaguuac

SEQ ID NO: 920187 - RNA, 19 nt, Artificial Sequence
  Description of Artificial Sequence: Synthetic oligonucleotide
  Antisense strand to SEQ ID NO: 920186
guaacucgggaagacgacc

SEQ ID NO: 920188 - RNA, 19 nt, Artificial Sequence
  Description of Artificial Sequence: Synthetic oligonucleotide
  Sense strand starting at position 1113 of SEQ ID NO: 913347
agacucuccuuguagggaa

SEQ ID NO: 920189 - RNA, 19 nt, Artificial Sequence
  Description of Artificial Sequence: Synthetic oligonucleotide
  Antisense strand to SEQ ID NO: 920188
uucccuacaaggagagucu

SEQ ID NO: 920190 - RNA, 19 nt, Artificial Sequence
  Description of Artificial Sequence: Synthetic oligonucleotide
  Sense strand starting at position 3433 of SEQ ID NO: 913347
aggccucaaugagaucauu

SEQ ID NO: 920191 - RNA, 19 nt, Artificial Sequence
  Description of Artificial Sequence: Synthetic oligonucleotide
  Antisense strand to SEQ ID NO: 920190
aaugaucucauugaggccu

SEQ ID NO: 920192 - RNA, 19 nt, Artificial Sequence
  Description of Artificial Sequence: Synthetic oligonucleotide
  Sense strand starting at position 1242 of SEQ ID NO: 913347
ggucuuugucccugcagca

SEQ ID NO: 920193 - RNA, 19 nt, Artificial Sequence
  Description of Artificial Sequence: Synthetic oligonucleotide
  Antisense strand to SEQ ID NO: 920192
ugcugcagggacaaagacc

SEQ ID NO: 920194 - RNA, 19 nt, Artificial Sequence
  Description of Artificial Sequence: Synthetic oligonucleotide
  Sense strand starting at position 3111 of SEQ ID NO: 913347
cuuuaagaguuguggauaa

SEQ ID NO: 920195 - RNA, 19 nt, Artificial Sequence
  Description of Artificial Sequence: Synthetic oligonucleotide
  Antisense strand to SEQ ID NO: 920194
uuauccacaacucuuaaag

SEQ ID NO: 920196 - RNA, 19 nt, Artificial Sequence
  Description of Artificial Sequence: Synthetic oligonucleotide
  Sense strand starting at position 160 of SEQ ID NO: 913347
gguugugccucagaagaca

SEQ ID NO: 920197 - RNA, 19 nt, Artificial Sequence
  Description of Artificial Sequence: Synthetic oligonucleotide
  Antisense strand to SEQ ID NO: 920196
ugucuucugaggcacaacc

SEQ ID NO: 920198 - RNA, 19 nt, Artificial Sequence
  Description of Artificial Sequence: Synthetic oligonucleotide
  Sense strand starting at position 853 of SEQ ID NO: 913347
cugugcuccuuggagaacu

SEQ ID NO: 920199 - RNA, 19 nt, Artificial Sequence
  Description of Artificial Sequence: Synthetic oligonucleotide
  Antisense strand to SEQ ID NO: 920198
aguucuccaaggagcacag

SEQ ID NO: 920200 - RNA, 19 nt, Artificial Sequence
  Description of Artificial Sequence: Synthetic oligonucleotide
  Sense strand starting at position 1263 of SEQ ID NO: 913348
agaaauucucuuuaggcca

SEQ ID NO: 920201 - RNA, 19 nt, Artificial Sequence
  Description of Artificial Sequence: Synthetic oligonucleotide
  Antisense strand to SEQ ID NO: 920200
uggccuaaagagaauuucu

SEQ ID NO: 920202 - RNA, 19 nt, Artificial Sequence
  Description of Artificial Sequence: Synthetic oligonucleotide
  Sense strand starting at position 157 of SEQ ID NO: 913348
agagaugcucucuacauac

SEQ ID NO: 920203 - RNA, 19 nt, Artificial Sequence
  Description of Artificial Sequence: Synthetic oligonucleotide
  Antisense strand to SEQ ID NO: 920202
guauguagagagcaucucu

SEQ ID NO: 920204 - RNA, 19 nt, Artificial Sequence
  Description of Artificial Sequence: Synthetic oligonucleotide
  Sense strand starting at position 106 of SEQ ID NO: 913348
ugacuuuacccggaaucau

SEQ ID NO: 920205 - RNA, 19 nt, Artificial Sequence
  Description of Artificial Sequence: Synthetic oligonucleotide
  Antisense strand to SEQ ID NO: 920204
augauuccggguaaaguca

SEQ ID NO: 920206 - RNA, 19 nt, Artificial Sequence
  Description of Artificial Sequence: Synthetic oligonucleotide
  Sense strand starting at position 2108 of SEQ ID NO: 913348
caaagagauuuguagaaca

SEQ ID NO: 920207 - RNA, 19 nt, Artificial Sequence
  Description of Artificial Sequence: Synthetic oligonucleotide
  Antisense strand to SEQ ID NO: 920206
uguucuacaaaucucuuug

SEQ ID NO: 920208 - RNA, 19 nt, Artificial Sequence
  Description of Artificial Sequence: Synthetic oligonucleotide
  Sense strand starting at position 141 of SEQ ID NO: 913348
ugaacuguugucuacaaga

SEQ ID NO: 920209 - RNA, 19 nt, Artificial Sequence
  Description of Artificial Sequence: Synthetic oligonucleotide
  Antisense strand to SEQ ID NO: 920208
ucuuguagacaacaguuca

SEQ ID NO: 920210 - RNA, 19 nt, Artificial Sequence
  Description of Artificial Sequence: Synthetic oligonucleotide
  Sense strand starting at position 1495 of SEQ ID NO: 913348
guguucuuucugcugaguu

SEQ ID NO: 920211 - RNA, 19 nt, Artificial Sequence
  Description of Artificial Sequence: Synthetic oligonucleotide
  Antisense strand to SEQ ID NO: 920210
aacucagcagaaagaacac

SEQ ID NO: 920212 - RNA, 19 nt, Artificial Sequence
  Description of Artificial Sequence: Synthetic oligonucleotide
  Sense strand starting at position 1045 of SEQ ID NO: 913348
agaaauagcuaagucuaga

SEQ ID NO: 920213 - RNA, 19 nt, Artificial Sequence
  Description of Artificial Sequence: Synthetic oligonucleotide
  Antisense strand to SEQ ID NO: 920212
ucuagacuuagcuauuucu

SEQ ID NO: 920214 - RNA, 19 nt, Artificial Sequence
  Description of Artificial Sequence: Synthetic oligonucleotide
  Sense strand starting at position 633 of SEQ ID NO: 913348
ggauacagauuugaaagua

SEQ ID NO: 920215 - RNA, 19 nt, Artificial Sequence
  Description of Artificial Sequence: Synthetic oligonucleotide
  Antisense strand to SEQ ID NO: 920214
uacuuucaaaucuguaucc

SEQ ID NO: 920216 - RNA, 19 nt, Artificial Sequence
  Description of Artificial Sequence: Synthetic oligonucleotide
  Sense strand starting at position 3768 of SEQ ID NO: 913348
guagaaaucuuuccugaag

SEQ ID NO: 920217 - RNA, 19 nt, Artificial Sequence
  Description of Artificial Sequence: Synthetic oligonucleotide
  Antisense strand to SEQ ID NO: 920216
cuucaggaaagauuucuac

SEQ ID NO: 920218 - RNA, 19 nt, Artificial Sequence
  Description of Artificial Sequence: Synthetic oligonucleotide
  Sense strand starting at position 1632 of SEQ ID NO: 913348
gggagucaugcagaguaac

SEQ ID NO: 920219 - RNA, 19 nt, Artificial Sequence
  Description of Artificial Sequence: Synthetic oligonucleotide
  Antisense strand to SEQ ID NO: 920218
guuacucugcaugacuccc

SEQ ID NO: 920220 - RNA, 19 nt, Artificial Sequence
  Description of Artificial Sequence: Synthetic oligonucleotide
  Sense strand starting at position 1635 of SEQ ID NO: 913348
agucaugcagaguaacaua

SEQ ID NO: 920221 - RNA, 19 nt, Artificial Sequence
  Description of Artificial Sequence: Synthetic oligonucleotide
  Antisense strand to SEQ ID NO: 920220
uauguuacucugcaugacu

SEQ ID NO: 920222 - RNA, 19 nt, Artificial Sequence
  Description of Artificial Sequence: Synthetic oligonucleotide
  Sense strand starting at position 1512 of SEQ ID NO: 913348
uuguauagacucugacaag

SEQ ID NO: 920223 - RNA, 19 nt, Artificial Sequence
  Description of Artificial Sequence: Synthetic oligonucleotide
  Antisense strand to SEQ ID NO: 920222
cuugucagagucuauacaa

SEQ ID NO: 920224 - RNA, 19 nt, Artificial Sequence
  Description of Artificial Sequence: Synthetic oligonucleotide
  Sense strand starting at position 3100 of SEQ ID NO: 913348
caucuaagccauugaggag

SEQ ID NO: 920225 - RNA, 19 nt, Artificial Sequence
  Description of Artificial Sequence: Synthetic oligonucleotide
  Antisense strand to SEQ ID NO: 920224
cuccucaauggcuuagaug

SEQ ID NO: 920226 - RNA, 19 nt, Artificial Sequence
  Description of Artificial Sequence: Synthetic oligonucleotide
  Sense strand starting at position 2023 of SEQ ID NO: 913348
uuauuauguggucaugaua

SEQ ID NO: 920227 - RNA, 19 nt, Artificial Sequence
  Description of Artificial Sequence: Synthetic oligonucleotide
  Antisense strand to SEQ ID NO: 920226
uaucaugaccacauaauaa

SEQ ID NO: 920228 - RNA, 19 nt, Artificial Sequence
  Description of Artificial Sequence: Synthetic oligonucleotide
  Sense strand starting at position 444 of SEQ ID NO: 913348
gucggcaugacagaacuaa

SEQ ID NO: 920229 - RNA, 19 nt, Artificial Sequence
  Description of Artificial Sequence: Synthetic oligonucleotide
  Antisense strand to SEQ ID NO: 920228
uuaguucugucaugccgac

SEQ ID NO: 920230 - RNA, 19 nt, Artificial Sequence
  Description of Artificial Sequence: Synthetic oligonucleotide
  Sense strand starting at position 392 of SEQ ID NO: 913348
uggauagcagucuauuaug

SEQ ID NO: 920231 - RNA, 19 nt, Artificial Sequence
  Description of Artificial Sequence: Synthetic oligonucleotide
  Antisense strand to SEQ ID NO: 920230
cauaauagacugcuaucca

SEQ ID NO: 920232 - RNA, 19 nt, Artificial Sequence
  Description of Artificial Sequence: Synthetic oligonucleotide
  Sense strand starting at position 3118 of SEQ ID NO: 913348
gaaacugggaugcgaaauu

SEQ ID NO: 920233 - RNA, 19 nt, Artificial Sequence
  Description of Artificial Sequence: Synthetic oligonucleotide
  Antisense strand to SEQ ID NO: 920232
aauuucgcaucccaguuuc

SEQ ID NO: 920234 - RNA, 19 nt, Artificial Sequence
  Description of Artificial Sequence: Synthetic oligonucleotide
  Sense strand starting at position 458 of SEQ ID NO: 913348
acuaaauaguagguguaaa

SEQ ID NO: 920235 - RNA, 19 nt, Artificial Sequence
  Description of Artificial Sequence: Synthetic oligonucleotide
  Antisense strand to SEQ ID NO: 920234
uuuacaccuacuauuuagu

SEQ ID NO: 920236 - RNA, 19 nt, Artificial Sequence
  Description of Artificial Sequence: Synthetic oligonucleotide
  Sense strand starting at position 2414 of SEQ ID NO: 913348
aggugcaguccugauaaag

SEQ ID NO: 920237 - RNA, 19 nt, Artificial Sequence
  Description of Artificial Sequence: Synthetic oligonucleotide
  Antisense strand to SEQ ID NO: 920236
cuuuaucaggacugcaccu

SEQ ID NO: 920238 - RNA, 19 nt, Artificial Sequence
  Description of Artificial Sequence: Synthetic oligonucleotide
  Sense strand starting at position 1392 of SEQ ID NO: 913348
aauuguaucuucuuggaag

SEQ ID NO: 920239 - RNA, 19 nt, Artificial Sequence
  Description of Artificial Sequence: Synthetic oligonucleotide
  Antisense strand to SEQ ID NO: 920238
cuuccaagaagauacaauu

SEQ ID NO: 920240 - RNA, 19 nt, Artificial Sequence
  Description of Artificial Sequence: Synthetic oligonucleotide
  Sense strand starting at position 580 of SEQ ID NO: 913348
ggaaacauaugauugcagu

SEQ ID NO: 920241 - RNA, 19 nt, Artificial Sequence
  Description of Artificial Sequence: Synthetic oligonucleotide
  Antisense strand to SEQ ID NO: 920240
acugcaaucauauguuucc

SEQ ID NO: 920242 - RNA, 19 nt, Artificial Sequence
  Description of Artificial Sequence: Synthetic oligonucleotide
  Sense strand starting at position 457 of SEQ ID NO: 913348
aacuaaauaguagguguaa

SEQ ID NO: 920243 - RNA, 19 nt, Artificial Sequence
  Description of Artificial Sequence: Synthetic oligonucleotide
  Antisense strand to SEQ ID NO: 920242
uuacaccuacuauuuaguu

SEQ ID NO: 920244 - RNA, 19 nt, Artificial Sequence
  Description of Artificial Sequence: Synthetic oligonucleotide
  Sense strand starting at position 1594 of SEQ ID NO: 913348
acaagauggcauugcagaa

SEQ ID NO: 920245 - RNA, 19 nt, Artificial Sequence
  Description of Artificial Sequence: Synthetic oligonucleotide
  Antisense strand to SEQ ID NO: 920244
uucugcaaugccaucuugu

SEQ ID NO: 920246 - RNA, 19 nt, Artificial Sequence
  Description of Artificial Sequence: Synthetic oligonucleotide
  Sense strand starting at position 1394 of SEQ ID NO: 913348
uuguaucuucuuggaagaa

SEQ ID NO: 920247 - RNA, 19 nt, Artificial Sequence
  Description of Artificial Sequence: Synthetic oligonucleotide
  Antisense strand to SEQ ID NO: 920246
uucuuccaagaagauacaa

SEQ ID NO: 920248 - RNA, 19 nt, Artificial Sequence
  Description of Artificial Sequence: Synthetic oligonucleotide
  Sense strand starting at position 522 of SEQ ID NO: 913348
aggaguaagugauuagcaa

SEQ ID NO: 920249 - RNA, 19 nt, Artificial Sequence
  Description of Artificial Sequence: Synthetic oligonucleotide
  Antisense strand to SEQ ID NO: 920248
uugcuaaucacuuacuccu

SEQ ID NO: 920250 - RNA, 19 nt, Artificial Sequence
  Description of Artificial Sequence: Synthetic oligonucleotide
  Sense strand starting at position 581 of SEQ ID NO: 913348
gaaacauaugauugcagug

SEQ ID NO: 920251 - RNA, 19 nt, Artificial Sequence
  Description of Artificial Sequence: Synthetic oligonucleotide
  Antisense strand to SEQ ID NO: 920250
cacugcaaucauauguuuc

SEQ ID NO: 920252 - RNA, 19 nt, Artificial Sequence
  Description of Artificial Sequence: Synthetic oligonucleotide
  Sense strand starting at position 2518 of SEQ ID NO: 913348
ggauauaauuuguaacaug

SEQ ID NO: 920253 - RNA, 19 nt, Artificial Sequence
  Description of Artificial Sequence: Synthetic oligonucleotide
  Antisense strand to SEQ ID NO: 920252
cauguuacaaauuauaucc

SEQ ID NO: 920254 - RNA, 19 nt, Artificial Sequence
  Description of Artificial Sequence: Synthetic oligonucleotide
  Sense strand starting at position 1578 of SEQ ID NO: 913348
aguagaugacccugugaca

SEQ ID NO: 920255 - RNA, 19 nt, Artificial Sequence
  Description of Artificial Sequence: Synthetic oligonucleotide
  Antisense strand to SEQ ID NO: 920254
ugucacagggucaucuacu

SEQ ID NO: 920256 - RNA, 19 nt, Artificial Sequence
  Description of Artificial Sequence: Synthetic oligonucleotide
  Sense strand starting at position 3288 of SEQ ID NO: 913348
auaaguuaaugacugucau

SEQ ID NO: 920257 - RNA, 19 nt, Artificial Sequence
  Description of Artificial Sequence: Synthetic oligonucleotide
  Antisense strand to SEQ ID NO: 920256
augacagucauuaacuuau

SEQ ID NO: 920258 - RNA, 19 nt, Artificial Sequence
  Description of Artificial Sequence: Synthetic oligonucleotide
  Sense strand starting at position 312 of SEQ ID NO: 913348
ccauucuuaucaguuagga

SEQ ID NO: 920259 - RNA, 19 nt, Artificial Sequence
  Description of Artificial Sequence: Synthetic oligonucleotide
  Antisense strand to SEQ ID NO: 920258
uccuaacugauaagaaugg

SEQ ID NO: 920260 - RNA, 19 nt, Artificial Sequence
  Description of Artificial Sequence: Synthetic oligonucleotide
  Sense strand starting at position 3003 of SEQ ID NO: 913348
cuuauuuauuucuggagug

SEQ ID NO: 920261 - RNA, 19 nt, Artificial Sequence
  Description of Artificial Sequence: Synthetic oligonucleotide
  Antisense strand to SEQ ID NO: 920260
cacuccagaaauaaauaag

SEQ ID NO: 920262 - RNA, 19 nt, Artificial Sequence
  Description of Artificial Sequence: Synthetic oligonucleotide
  Sense strand starting at position 2859 of SEQ ID NO: 913348
gguaaauuguuaucauuga

SEQ ID NO: 920263 - RNA, 19 nt, Artificial Sequence
  Description of Artificial Sequence: Synthetic oligonucleotide
  Antisense strand to SEQ ID NO: 920262
ucaaugauaacaauuuacc

SEQ ID NO: 920264 - RNA, 19 nt, Artificial Sequence
  Description of Artificial Sequence: Synthetic oligonucleotide
  Sense strand starting at position 105 of SEQ ID NO: 913348
cugacuuuacccggaauca

SEQ ID NO: 920265 - RNA, 19 nt, Artificial Sequence
  Description of Artificial Sequence: Synthetic oligonucleotide
  Antisense strand to SEQ ID NO: 920264
ugauuccggguaaagucag

SEQ ID NO: 920266 - RNA, 19 nt, Artificial Sequence
  Description of Artificial Sequence: Synthetic oligonucleotide
  Sense strand starting at position 1390 of SEQ ID NO: 913348
ugaauuguaucuucuugga

SEQ ID NO: 920267 - RNA, 19 nt, Artificial Sequence
  Description of Artificial Sequence: Synthetic oligonucleotide
  Antisense strand to SEQ ID NO: 920266
uccaagaagauacaauuca

SEQ ID NO: 920268 - RNA, 19 nt, Artificial Sequence
  Description of Artificial Sequence: Synthetic oligonucleotide
  Sense strand starting at position 1522 of SEQ ID NO: 913348
ucugacaagcugugaaaua

SEQ ID NO: 920269 - RNA, 19 nt, Artificial Sequence
  Description of Artificial Sequence: Synthetic oligonucleotide
  Antisense strand to SEQ ID NO: 920268
uauuucacagcuugucaga

SEQ ID NO: 920270 - RNA, 19 nt, Artificial Sequence
  Description of Artificial Sequence: Synthetic oligonucleotide
  Sense strand starting at position 586 of SEQ ID NO: 913348
auaugauugcagugaaauu

SEQ ID NO: 920271 - RNA, 19 nt, Artificial Sequence
  Description of Artificial Sequence: Synthetic oligonucleotide
  Antisense strand to SEQ ID NO: 920270
aauuucacugcaaucauau

SEQ ID NO: 920272 - RNA, 19 nt, Artificial Sequence
  Description of Artificial Sequence: Synthetic oligonucleotide
  Sense strand starting at position 2182 of SEQ ID NO: 913348
uugugucaugaugaugagu

SEQ ID NO: 920273 - RNA, 19 nt, Artificial Sequence
  Description of Artificial Sequence: Synthetic oligonucleotide
  Antisense strand to SEQ ID NO: 920272
acucaucaucaugacacaa

SEQ ID NO: 920274 - RNA, 19 nt, Artificial Sequence
  Description of Artificial Sequence: Synthetic oligonucleotide
  Sense strand starting at position 3013 of SEQ ID NO: 913348
ucuggaguggcucaguaga

SEQ ID NO: 920275 - RNA, 19 nt, Artificial Sequence
  Description of Artificial Sequence: Synthetic oligonucleotide
  Antisense strand to SEQ ID NO: 920274
ucuacugagccacuccaga

SEQ ID NO: 920276 - RNA, 19 nt, Artificial Sequence
  Description of Artificial Sequence: Synthetic oligonucleotide
  Sense strand starting at position 374 of SEQ ID NO: 913348
gggaaacaggccugucuau

SEQ ID NO: 920277 - RNA, 19 nt, Artificial Sequence
  Description of Artificial Sequence: Synthetic oligonucleotide
  Antisense strand to SEQ ID NO: 920276
auagacaggccuguuuccc

SEQ ID NO: 920278 - RNA, 19 nt, Artificial Sequence
  Description of Artificial Sequence: Synthetic oligonucleotide
  Sense strand starting at position 2022 of SEQ ID NO: 913348
auuauuauguggucaugau

SEQ ID NO: 920279 - RNA, 19 nt, Artificial Sequence
  Description of Artificial Sequence: Synthetic oligonucleotide
  Antisense strand to SEQ ID NO: 920278
aucaugaccacauaauaau

SEQ ID NO: 920280 - RNA, 19 nt, Artificial Sequence
  Description of Artificial Sequence: Synthetic oligonucleotide
  Sense strand starting at position 1266 of SEQ ID NO: 913349
ggaaauucucuuuaggcca

SEQ ID NO: 920281 - RNA, 19 nt, Artificial Sequence
  Description of Artificial Sequence: Synthetic oligonucleotide
  Antisense strand to SEQ ID NO: 920280
uggccuaaagagaauuucc

SEQ ID NO: 920282 - RNA, 19 nt, Artificial Sequence
  Description of Artificial Sequence: Synthetic oligonucleotide
  Sense strand starting at position 2107 of SEQ ID NO: 913349
caaagagauuuguagaaca

SEQ ID NO: 920283 - RNA, 19 nt, Artificial Sequence
  Description of Artificial Sequence: Synthetic oligonucleotide
  Antisense strand to SEQ ID NO: 920282
uguucuacaaaucucuuug

SEQ ID NO: 920284 - RNA, 19 nt, Artificial Sequence
  Description of Artificial Sequence: Synthetic oligonucleotide
  Sense strand starting at position 131 of SEQ ID NO: 913349
ugaacuguugucuacaaga

SEQ ID NO: 920285 - RNA, 19 nt, Artificial Sequence
  Description of Artificial Sequence: Synthetic oligonucleotide
  Antisense strand to SEQ ID NO: 920284
ucuuguagacaacaguuca

SEQ ID NO: 920286 - RNA, 19 nt, Artificial Sequence
  Description of Artificial Sequence: Synthetic oligonucleotide
  Sense strand starting at position 1498 of SEQ ID NO: 913349
guguucuuucugcugaguu

SEQ ID NO: 920287 - RNA, 19 nt, Artificial Sequence
  Description of Artificial Sequence: Synthetic oligonucleotide
  Antisense strand to SEQ ID NO: 920286
aacucagcagaaagaacac

SEQ ID NO: 920288 - RNA, 19 nt, Artificial Sequence
  Description of Artificial Sequence: Synthetic oligonucleotide
  Sense strand starting at position 3229 of SEQ ID NO: 913349
cuaagaaggacuugaguuu

SEQ ID NO: 920289 - RNA, 19 nt, Artificial Sequence
  Description of Artificial Sequence: Synthetic oligonucleotide
  Antisense strand to SEQ ID NO: 920288
aaacucaaguccuucuuag

SEQ ID NO: 920290 - RNA, 19 nt, Artificial Sequence
  Description of Artificial Sequence: Synthetic oligonucleotide
  Sense strand starting at position 1318 of SEQ ID NO: 913349
ccaucagaacagugauacu

SEQ ID NO: 920291 - RNA, 19 nt, Artificial Sequence
  Description of Artificial Sequence: Synthetic oligonucleotide
  Antisense strand to SEQ ID NO: 920290
aguaucacuguucugaugg

SEQ ID NO: 920292 - RNA, 19 nt, Artificial Sequence
  Description of Artificial Sequence: Synthetic oligonucleotide
  Sense strand starting at position 3765 of SEQ ID NO: 913349
gcauuagaauuaguagaga

SEQ ID NO: 920293 - RNA, 19 nt, Artificial Sequence
  Description of Artificial Sequence: Synthetic oligonucleotide
  Antisense strand to SEQ ID NO: 920292
ucucuacuaauucuaaugc

SEQ ID NO: 920294 - RNA, 19 nt, Artificial Sequence
  Description of Artificial Sequence: Synthetic oligonucleotide
  Sense strand starting at position 1635 of SEQ ID NO: 913349
gggagucaugcagaguaac

SEQ ID NO: 920295 - RNA, 19 nt, Artificial Sequence
  Description of Artificial Sequence: Synthetic oligonucleotide
  Antisense strand to SEQ ID NO: 920294
guuacucugcaugacuccc

SEQ ID NO: 920296 - RNA, 19 nt, Artificial Sequence
  Description of Artificial Sequence: Synthetic oligonucleotide
  Sense strand starting at position 1638 of SEQ ID NO: 913349
agucaugcagaguaacaua

SEQ ID NO: 920297 - RNA, 19 nt, Artificial Sequence
  Description of Artificial Sequence: Synthetic oligonucleotide
  Antisense strand to SEQ ID NO: 920296
uauguuacucugcaugacu

SEQ ID NO: 920298 - RNA, 19 nt, Artificial Sequence
  Description of Artificial Sequence: Synthetic oligonucleotide
  Sense strand starting at position 1773 of SEQ ID NO: 913349
gcaugaagugaccaucauu

SEQ ID NO: 920299 - RNA, 19 nt, Artificial Sequence
  Description of Artificial Sequence: Synthetic oligonucleotide
  Antisense strand to SEQ ID NO: 920298
aaugauggucacuucaugc

SEQ ID NO: 920300 - RNA, 19 nt, Artificial Sequence
  Description of Artificial Sequence: Synthetic oligonucleotide
  Sense strand starting at position 1601 of SEQ ID NO: 913349
gacggcauugcagaacaaa

SEQ ID NO: 920301 - RNA, 19 nt, Artificial Sequence
  Description of Artificial Sequence: Synthetic oligonucleotide
  Antisense strand to SEQ ID NO: 920300
uuuguucugcaaugccguc

SEQ ID NO: 920302 - RNA, 19 nt, Artificial Sequence
  Description of Artificial Sequence: Synthetic oligonucleotide
  Sense strand starting at position 369 of SEQ ID NO: 913349
ggcacaucuauggauagca

SEQ ID NO: 920303 - RNA, 19 nt, Artificial Sequence
  Description of Artificial Sequence: Synthetic oligonucleotide
  Antisense strand to SEQ ID NO: 920302
ugcuauccauagaugugcc

SEQ ID NO: 920304 - RNA, 19 nt, Artificial Sequence
  Description of Artificial Sequence: Synthetic oligonucleotide
  Sense strand starting at position 379 of SEQ ID NO: 913349
uggauagcagucuauuaug

SEQ ID NO: 920305 - RNA, 19 nt, Artificial Sequence
  Description of Artificial Sequence: Synthetic oligonucleotide
  Antisense strand to SEQ ID NO: 920304
cauaauagacugcuaucca

SEQ ID NO: 920306 - RNA, 19 nt, Artificial Sequence
  Description of Artificial Sequence: Synthetic oligonucleotide
  Sense strand starting at position 624 of SEQ ID NO: 913349
ggauacagauuugacagua

SEQ ID NO: 920307 - RNA, 19 nt, Artificial Sequence
  Description of Artificial Sequence: Synthetic oligonucleotide
  Antisense strand to SEQ ID NO: 920306
uacugucaaaucuguaucc

SEQ ID NO: 920308 - RNA, 19 nt, Artificial Sequence
  Description of Artificial Sequence: Synthetic oligonucleotide
  Sense strand starting at position 2414 of SEQ ID NO: 913349
aggugcaguccugauaaag

SEQ ID NO: 920309 - RNA, 19 nt, Artificial Sequence
  Description of Artificial Sequence: Synthetic oligonucleotide
  Antisense strand to SEQ ID NO: 920308
cuuuaucaggacugcaccu

SEQ ID NO: 920310 - RNA, 19 nt, Artificial Sequence
  Description of Artificial Sequence: Synthetic oligonucleotide
  Sense strand starting at position 1395 of SEQ ID NO: 913349
aauuguaucuucuuggaag

SEQ ID NO: 920311 - RNA, 19 nt, Artificial Sequence
  Description of Artificial Sequence: Synthetic oligonucleotide
  Antisense strand to SEQ ID NO: 920310
cuuccaagaagauacaauu

SEQ ID NO: 920312 - RNA, 19 nt, Artificial Sequence
  Description of Artificial Sequence: Synthetic oligonucleotide
  Sense strand starting at position 572 of SEQ ID NO: 913349
gaaacauaugauugcagua

SEQ ID NO: 920313 - RNA, 19 nt, Artificial Sequence
  Description of Artificial Sequence: Synthetic oligonucleotide
  Antisense strand to SEQ ID NO: 920312
uacugcaaucauauguuuc

SEQ ID NO: 920314 - RNA, 19 nt, Artificial Sequence
  Description of Artificial Sequence: Synthetic oligonucleotide
  Sense strand starting at position 571 of SEQ ID NO: 913349
ggaaacauaugauugcagu

SEQ ID NO: 920315 - RNA, 19 nt, Artificial Sequence
  Description of Artificial Sequence: Synthetic oligonucleotide
  Antisense strand to SEQ ID NO: 920314
acugcaaucauauguuucc

SEQ ID NO: 920316 - RNA, 19 nt, Artificial Sequence
  Description of Artificial Sequence: Synthetic oligonucleotide
  Sense strand starting at position 1019 of SEQ ID NO: 913349
uuucuuccaguguagaaau

SEQ ID NO: 920317 - RNA, 19 nt, Artificial Sequence
  Description of Artificial Sequence: Synthetic oligonucleotide
  Antisense strand to SEQ ID NO: 920316
auuucuacacuggaagaaa

SEQ ID NO: 920318 - RNA, 19 nt, Artificial Sequence
  Description of Artificial Sequence: Synthetic oligonucleotide
  Sense strand starting at position 1397 of SEQ ID NO: 913349
uuguaucuucuuggaagaa

SEQ ID NO: 920319 - RNA, 19 nt, Artificial Sequence
  Description of Artificial Sequence: Synthetic oligonucleotide
  Antisense strand to SEQ ID NO: 920318
uucuuccaagaagauacaa

SEQ ID NO: 920320 - RNA, 19 nt, Artificial Sequence
  Description of Artificial Sequence: Synthetic oligonucleotide
  Sense strand starting at position 1917 of SEQ ID NO: 913349
uaaccaauggcaugugaga

SEQ ID NO: 920321 - RNA, 19 nt, Artificial Sequence
  Description of Artificial Sequence: Synthetic oligonucleotide
  Antisense strand to SEQ ID NO: 920320
ucucacaugccauugguua

SEQ ID NO: 920322 - RNA, 19 nt, Artificial Sequence
  Description of Artificial Sequence: Synthetic oligonucleotide
  Sense strand starting at position 2518 of SEQ ID NO: 913349
ggauauaauuuguaacaug

SEQ ID NO: 920323 - RNA, 19 nt, Artificial Sequence
  Description of Artificial Sequence: Synthetic oligonucleotide
  Antisense strand to SEQ ID NO: 920322
cauguuacaaauuauaucc

SEQ ID NO: 920324 - RNA, 19 nt, Artificial Sequence
  Description of Artificial Sequence: Synthetic oligonucleotide
  Sense strand starting at position 1581 of SEQ ID NO: 913349
aguagaugacccugugaca

SEQ ID NO: 920325 - RNA, 19 nt, Artificial Sequence
  Description of Artificial Sequence: Synthetic oligonucleotide
  Antisense strand to SEQ ID NO: 920324
ugucacagggucaucuacu

SEQ ID NO: 920326 - RNA, 19 nt, Artificial Sequence
  Description of Artificial Sequence: Synthetic oligonucleotide
  Sense strand starting at position 3288 of SEQ ID NO: 913349
auaaguuaaugacugucau

SEQ ID NO: 920327 - RNA, 19 nt, Artificial Sequence
  Description of Artificial Sequence: Synthetic oligonucleotide
  Antisense strand to SEQ ID NO: 920326
augacagucauuaacuuau

SEQ ID NO: 920328 - RNA, 19 nt, Artificial Sequence
  Description of Artificial Sequence: Synthetic oligonucleotide
  Sense strand starting at position 513 of SEQ ID NO: 913349
gggaguaagugauuagcaa

SEQ ID NO: 920329 - RNA, 19 nt, Artificial Sequence
  Description of Artificial Sequence: Synthetic oligonucleotide
  Antisense strand to SEQ ID NO: 920328
uugcuaaucacuuacuccc

SEQ ID NO: 920330 - RNA, 19 nt, Artificial Sequence
  Description of Artificial Sequence: Synthetic oligonucleotide
  Sense strand starting at position 1954 of SEQ ID NO: 913349
uuacacaagcugugauaaa

SEQ ID NO: 920331 - RNA, 19 nt, Artificial Sequence
  Description of Artificial Sequence: Synthetic oligonucleotide
  Antisense strand to SEQ ID NO: 920330
uuuaucacagcuuguguaa

SEQ ID NO: 920332 - RNA, 19 nt, Artificial Sequence
  Description of Artificial Sequence: Synthetic oligonucleotide
  Sense strand starting at position 3004 of SEQ ID NO: 913349
cuuauuuauuucuggagug

SEQ ID NO: 920333 - RNA, 19 nt, Artificial Sequence
  Description of Artificial Sequence: Synthetic oligonucleotide
  Antisense strand to SEQ ID NO: 920332
cacuccagaaauaaauaag

SEQ ID NO: 920334 - RNA, 19 nt, Artificial Sequence
  Description of Artificial Sequence: Synthetic oligonucleotide
  Sense strand starting at position 2860 of SEQ ID NO: 913349
gguaaauuguuaucauuga

SEQ ID NO: 920335 - RNA, 19 nt, Artificial Sequence
  Description of Artificial Sequence: Synthetic oligonucleotide
  Antisense strand to SEQ ID NO: 920334
ucaaugauaacaauuuacc

SEQ ID NO: 920336 - RNA, 19 nt, Artificial Sequence
  Description of Artificial Sequence: Synthetic oligonucleotide
  Sense strand starting at position 1393 of SEQ ID NO: 913349
ugaauuguaucuucuugga

SEQ ID NO: 920337 - RNA, 19 nt, Artificial Sequence
  Description of Artificial Sequence: Synthetic oligonucleotide
  Antisense strand to SEQ ID NO: 920336
uccaagaagauacaauuca

SEQ ID NO: 920338 - RNA, 19 nt, Artificial Sequence
  Description of Artificial Sequence: Synthetic oligonucleotide
  Sense strand starting at position 2186 of SEQ ID NO: 913349
ccaugaugaugaguuccuu

SEQ ID NO: 920339 - RNA, 19 nt, Artificial Sequence
  Description of Artificial Sequence: Synthetic oligonucleotide
  Antisense strand to SEQ ID NO: 920338
aaggaacucaucaucaugg

SEQ ID NO: 920340 - RNA, 19 nt, Artificial Sequence
  Description of Artificial Sequence: Synthetic oligonucleotide
  Sense strand starting at position 1525 of SEQ ID NO: 913349
ucugacaagcugugaaaua

SEQ ID NO: 920341 - RNA, 19 nt, Artificial Sequence
  Description of Artificial Sequence: Synthetic oligonucleotide
  Antisense strand to SEQ ID NO: 920340
uauuucacagcuugucaga

SEQ ID NO: 920342 - RNA, 19 nt, Artificial Sequence
  Description of Artificial Sequence: Synthetic oligonucleotide
  Sense strand starting at position 1265 of SEQ ID NO: 913349
gggaaauucucuuuaggcc

SEQ ID NO: 920343 - RNA, 19 nt, Artificial Sequence
  Description of Artificial Sequence: Synthetic oligonucleotide
  Antisense strand to SEQ ID NO: 920342
ggccuaaagagaauuuccc

SEQ ID NO: 920344 - RNA, 19 nt, Artificial Sequence
  Description of Artificial Sequence: Synthetic oligonucleotide
  Sense strand starting at position 3014 of SEQ ID NO: 913349
ucuggaguggcucaguaga

SEQ ID NO: 920345 - RNA, 19 nt, Artificial Sequence
  Description of Artificial Sequence: Synthetic oligonucleotide
  Antisense strand to SEQ ID NO: 920344
ucuacugagccacuccaga

SEQ ID NO: 920346 - RNA, 19 nt, Artificial Sequence
  Description of Artificial Sequence: Synthetic oligonucleotide
  Sense strand starting at position 2021 of SEQ ID NO: 913349
auuauuauguggucaugau

SEQ ID NO: 920347 - RNA, 19 nt, Artificial Sequence
  Description of Artificial Sequence: Synthetic oligonucleotide
  Antisense strand to SEQ ID NO: 920346
aucaugaccacauaauaau

SEQ ID NO: 920348 - RNA, 19 nt, Artificial Sequence
  Description of Artificial Sequence: Synthetic oligonucleotide
  Sense strand starting at position 3016 of SEQ ID NO: 913349
uggaguggcucaguagaga

SEQ ID NO: 920349 - RNA, 19 nt, Artificial Sequence
  Description of Artificial Sequence: Synthetic oligonucleotide
  Antisense strand to SEQ ID NO: 920348
ucucuacugagccacucca

SEQ ID NO: 920350 - RNA, 19 nt, Artificial Sequence
  Description of Artificial Sequence: Synthetic oligonucleotide
  Sense strand starting at position 1989 of SEQ ID NO: 913349
accguuucuuaccuaagaa

SEQ ID NO: 920351 - RNA, 19 nt, Artificial Sequence
  Description of Artificial Sequence: Synthetic oligonucleotide
  Antisense strand to SEQ ID NO: 920350
uucuuagguaagaaacggu

SEQ ID NO: 920352 - RNA, 19 nt, Artificial Sequence
  Description of Artificial Sequence: Synthetic oligonucleotide
  Sense strand starting at position 1414 of SEQ ID NO: 913349
aaguaaauaucuguucgac

SEQ ID NO: 920353 - RNA, 19 nt, Artificial Sequence
  Description of Artificial Sequence: Synthetic oligonucleotide
  Antisense strand to SEQ ID NO: 920352
gucgaacagauauuuacuu

SEQ ID NO: 920354 - RNA, 19 nt, Artificial Sequence
  Description of Artificial Sequence: Synthetic oligonucleotide
  Sense strand starting at position 2437 of SEQ ID NO: 913349
aauccugauguggguguaa

SEQ ID NO: 920355 - RNA, 19 nt, Artificial Sequence
  Description of Artificial Sequence: Synthetic oligonucleotide
  Antisense strand to SEQ ID NO: 920354
uuacacccacaucaggauu

SEQ ID NO: 920356 - RNA, 19 nt, Artificial Sequence
  Description of Artificial Sequence: Synthetic oligonucleotide
  Sense strand starting at position 2017 of SEQ ID NO: 913349
guaaauuauuaugugguca

SEQ ID NO: 920357 - RNA, 19 nt, Artificial Sequence
  Description of Artificial Sequence: Synthetic oligonucleotide
  Antisense strand to SEQ ID NO: 920356
ugaccacauaauaauuuac

SEQ ID NO: 920358 - RNA, 19 nt, Artificial Sequence
  Description of Artificial Sequence: Synthetic oligonucleotide
  Sense strand starting at position 912 of SEQ ID NO: 913349
uuuguaacuccuuaugucu

SEQ ID NO: 920359 - RNA, 19 nt, Artificial Sequence
  Description of Artificial Sequence: Synthetic oligonucleotide
  Antisense strand to SEQ ID NO: 920358
agacauaaggaguuacaaa

SEQ ID NO: 920360 - RNA, 19 nt, Artificial Sequence
  Description of Artificial Sequence: Synthetic oligonucleotide
  Sense strand starting at position 2799 of SEQ ID NO: 913350
uuggucugagcugaagaga

SEQ ID NO: 920361 - RNA, 19 nt, Artificial Sequence
  Description of Artificial Sequence: Synthetic oligonucleotide
  Antisense strand to SEQ ID NO: 920360
ucucuucagcucagaccaa

SEQ ID NO: 920362 - RNA, 19 nt, Artificial Sequence
  Description of Artificial Sequence: Synthetic oligonucleotide
  Sense strand starting at position 3276 of SEQ ID NO: 913350
cuagaaugucugcagaaac

SEQ ID NO: 920363 - RNA, 19 nt, Artificial Sequence
  Description of Artificial Sequence: Synthetic oligonucleotide
  Antisense strand to SEQ ID NO: 920362
guuucugcagacauucuag

SEQ ID NO: 920364 - RNA, 19 nt, Artificial Sequence
  Description of Artificial Sequence: Synthetic oligonucleotide
  Sense strand starting at position 2787 of SEQ ID NO: 913350
guguguuccagguuggucu

SEQ ID NO: 920365 - RNA, 19 nt, Artificial Sequence
  Description of Artificial Sequence: Synthetic oligonucleotide
  Antisense strand to SEQ ID NO: 920364
agaccaaccuggaacacac

SEQ ID NO: 920366 - RNA, 19 nt, Artificial Sequence
  Description of Artificial Sequence: Synthetic oligonucleotide
  Sense strand starting at position 3610 of SEQ ID NO: 913350
gggucaugccaagacuaca

SEQ ID NO: 920367 - RNA, 19 nt, Artificial Sequence
  Description of Artificial Sequence: Synthetic oligonucleotide
  Antisense strand to SEQ ID NO: 920366
uguagucuuggcaugaccc

SEQ ID NO: 920368 - RNA, 19 nt, Artificial Sequence
  Description of Artificial Sequence: Synthetic oligonucleotide
  Sense strand starting at position 3549 of SEQ ID NO: 913350
ggcauccaggguuauacaa

SEQ ID NO: 920369 - RNA, 19 nt, Artificial Sequence
  Description of Artificial Sequence: Synthetic oligonucleotide
  Antisense strand to SEQ ID NO: 920368
uuguauaacccuggaugcc

SEQ ID NO: 920370 - RNA, 19 nt, Artificial Sequence
  Description of Artificial Sequence: Synthetic oligonucleotide
  Sense strand starting at position 3448 of SEQ ID NO: 913350
gacaaaggauuccuuguau

SEQ ID NO: 920371 - RNA, 19 nt, Artificial Sequence
  Description of Artificial Sequence: Synthetic oligonucleotide
  Antisense strand to SEQ ID NO: 920370
auacaaggaauccuuuguc

SEQ ID NO: 920372 - RNA, 19 nt, Artificial Sequence
  Description of Artificial Sequence: Synthetic oligonucleotide
  Sense strand starting at position 2422 of SEQ ID NO: 913350
cugagaaucucucuuggau

SEQ ID NO: 920373 - RNA, 19 nt, Artificial Sequence
  Description of Artificial Sequence: Synthetic oligonucleotide
  Antisense strand to SEQ ID NO: 920372
auccaagagagauucucag

SEQ ID NO: 920374 - RNA, 19 nt, Artificial Sequence
  Description of Artificial Sequence: Synthetic oligonucleotide
  Sense strand starting at position 1079 of SEQ ID NO: 913350
cuugaaggucucugaaaua

SEQ ID NO: 920375 - RNA, 19 nt, Artificial Sequence
  Description of Artificial Sequence: Synthetic oligonucleotide
  Antisense strand to SEQ ID NO: 920374
uauuucagagaccuucaag

SEQ ID NO: 920376 - RNA, 19 nt, Artificial Sequence
  Description of Artificial Sequence: Synthetic oligonucleotide
  Sense strand starting at position 428 of SEQ ID NO: 913350
ccgaaauaaucucuauuga

SEQ ID NO: 920377 - RNA, 19 nt, Artificial Sequence
  Description of Artificial Sequence: Synthetic oligonucleotide
  Antisense strand to SEQ ID NO: 920376
ucaauagagauuauuucgg

SEQ ID NO: 920378 - RNA, 19 nt, Artificial Sequence
  Description of Artificial Sequence: Synthetic oligonucleotide
  Sense strand starting at position 3275 of SEQ ID NO: 913350
acuagaaugucugcagaaa

SEQ ID NO: 920379 - RNA, 19 nt, Artificial Sequence
  Description of Artificial Sequence: Synthetic oligonucleotide
  Antisense strand to SEQ ID NO: 920378
uuucugcagacauucuagu

SEQ ID NO: 920380 - RNA, 19 nt, Artificial Sequence
  Description of Artificial Sequence: Synthetic oligonucleotide
  Sense strand starting at position 2237 of SEQ ID NO: 913350
cuuacuuggagucagaguu

SEQ ID NO: 920381 - RNA, 19 nt, Artificial Sequence
  Description of Artificial Sequence: Synthetic oligonucleotide
  Antisense strand to SEQ ID NO: 920380
aacucugacuccaaguaag

SEQ ID NO: 920382 - RNA, 19 nt, Artificial Sequence
  Description of Artificial Sequence: Synthetic oligonucleotide
  Sense strand starting at position 3273 of SEQ ID NO: 913350
gaacuagaaugucugcaga

SEQ ID NO: 920383 - RNA, 19 nt, Artificial Sequence
  Description of Artificial Sequence: Synthetic oligonucleotide
  Antisense strand to SEQ ID NO: 920382
ucugcagacauucuaguuc

SEQ ID NO: 920384 - RNA, 19 nt, Artificial Sequence
  Description of Artificial Sequence: Synthetic oligonucleotide
  Sense strand starting at position 3354 of SEQ ID NO: 913350
uaguuuagugaugagguua

SEQ ID NO: 920385 - RNA, 19 nt, Artificial Sequence
  Description of Artificial Sequence: Synthetic oligonucleotide
  Antisense strand to SEQ ID NO: 920384
uaaccucaucacuaaacua

SEQ ID NO: 920386 - RNA, 19 nt, Artificial Sequence
  Description of Artificial Sequence: Synthetic oligonucleotide
  Sense strand starting at position 3947 of SEQ ID NO: 913350
gaaguaggucaccggaaga

SEQ ID NO: 920387 - RNA, 19 nt, Artificial Sequence
  Description of Artificial Sequence: Synthetic oligonucleotide
  Antisense strand to SEQ ID NO: 920386
ucuuccggugaccuacuuc

SEQ ID NO: 920388 - RNA, 19 nt, Artificial Sequence
  Description of Artificial Sequence: Synthetic oligonucleotide
  Sense strand starting at position 3135 of SEQ ID NO: 913350
aaauaucuaguuugugaag

SEQ ID NO: 920389 - RNA, 19 nt, Artificial Sequence
  Description of Artificial Sequence: Synthetic oligonucleotide
  Antisense strand to SEQ ID NO: 920388
cuucacaaacuagauauuu

SEQ ID NO: 920390 - RNA, 19 nt, Artificial Sequence
  Description of Artificial Sequence: Synthetic oligonucleotide
  Sense strand starting at position 3177 of SEQ ID NO: 913350
acuagaaucucuuugaguu

SEQ ID NO: 920391 - RNA, 19 nt, Artificial Sequence
  Description of Artificial Sequence: Synthetic oligonucleotide
  Antisense strand to SEQ ID NO: 920390
aacucaaagagauucuagu

SEQ ID NO: 920392 - RNA, 19 nt, Artificial Sequence
  Description of Artificial Sequence: Synthetic oligonucleotide
  Sense strand starting at position 3286 of SEQ ID NO: 913350
ugcagaaaccucuagccau

SEQ ID NO: 920393 - RNA, 19 nt, Artificial Sequence
  Description of Artificial Sequence: Synthetic oligonucleotide
  Antisense strand to SEQ ID NO: 920392
auggcuagagguuucugca

SEQ ID NO: 920394 - RNA, 19 nt, Artificial Sequence
  Description of Artificial Sequence: Synthetic oligonucleotide
  Sense strand starting at position 2358 of SEQ ID NO: 913350
cugucuuuagugggaaaga

SEQ ID NO: 920395 - RNA, 19 nt, Artificial Sequence
  Description of Artificial Sequence: Synthetic oligonucleotide
  Antisense strand to SEQ ID NO: 920394
ucuuucccacuaaagacag

SEQ ID NO: 920396 - RNA, 19 nt, Artificial Sequence
  Description of Artificial Sequence: Synthetic oligonucleotide
  Sense strand starting at position 3133 of SEQ ID NO: 913350
ugaaauaucuaguuuguga

SEQ ID NO: 920397 - RNA, 19 nt, Artificial Sequence
  Description of Artificial Sequence: Synthetic oligonucleotide
  Antisense strand to SEQ ID NO: 920396
ucacaaacuagauauuuca

SEQ ID NO: 920398 - RNA, 19 nt, Artificial Sequence
  Description of Artificial Sequence: Synthetic oligonucleotide
  Sense strand starting at position 3877 of SEQ ID NO: 913350
cugaacaugcuccauaguu

SEQ ID NO: 920399 - RNA, 19 nt, Artificial Sequence
  Description of Artificial Sequence: Synthetic oligonucleotide
  Antisense strand to SEQ ID NO: 920398
aacuauggagcauguucag

SEQ ID NO: 920400 - RNA, 19 nt, Artificial Sequence
  Description of Artificial Sequence: Synthetic oligonucleotide
  Sense strand starting at position 1283 of SEQ ID NO: 913350
agauaaucucuuugggcau

SEQ ID NO: 920401 - RNA, 19 nt, Artificial Sequence
  Description of Artificial Sequence: Synthetic oligonucleotide
  Antisense strand to SEQ ID NO: 920400
augcccaaagagauuaucu

SEQ ID NO: 920402 - RNA, 19 nt, Artificial Sequence
  Description of Artificial Sequence: Synthetic oligonucleotide
  Sense strand starting at position 2367 of SEQ ID NO: 913350
gugggaaagacuugcaucu

SEQ ID NO: 920403 - RNA, 19 nt, Artificial Sequence
  Description of Artificial Sequence: Synthetic oligonucleotide
  Antisense strand to SEQ ID NO: 920402
agaugcaagucuuucccac

SEQ ID NO: 920404 - RNA, 19 nt, Artificial Sequence
  Description of Artificial Sequence: Synthetic oligonucleotide
  Sense strand starting at position 734 of SEQ ID NO: 913350
gaaguucuccaugaguguu

SEQ ID NO: 920405 - RNA, 19 nt, Artificial Sequence
  Description of Artificial Sequence: Synthetic oligonucleotide
  Antisense strand to SEQ ID NO: 920404
aacacucauggagaacuuc

SEQ ID NO: 920406 - RNA, 19 nt, Artificial Sequence
  Description of Artificial Sequence: Synthetic oligonucleotide
  Sense strand starting at position 1296 of SEQ ID NO: 913350
gggcaugcacgugagaaua

SEQ ID NO: 920407 - RNA, 19 nt, Artificial Sequence
  Description of Artificial Sequence: Synthetic oligonucleotide
  Antisense strand to SEQ ID NO: 920406
uauucucacgugcaugccc

SEQ ID NO: 920408 - RNA, 19 nt, Artificial Sequence
  Description of Artificial Sequence: Synthetic oligonucleotide
  Sense strand starting at position 1049 of SEQ ID NO: 913350
aaccuccaggucugugaua

SEQ ID NO: 920409 - RNA, 19 nt, Artificial Sequence
  Description of Artificial Sequence: Synthetic oligonucleotide
  Antisense strand to SEQ ID NO: 920408
uaucacagaccuggagguu

SEQ ID NO: 920410 - RNA, 19 nt, Artificial Sequence
  Description of Artificial Sequence: Synthetic oligonucleotide
  Sense strand starting at position 2208 of SEQ ID NO: 913350
gugcucuaugguuauaaau

SEQ ID NO: 920411 - RNA, 19 nt, Artificial Sequence
  Description of Artificial Sequence: Synthetic oligonucleotide
  Antisense strand to SEQ ID NO: 920410
auuuauaaccauagagcac

SEQ ID NO: 920412 - RNA, 19 nt, Artificial Sequence
  Description of Artificial Sequence: Synthetic oligonucleotide
  Sense strand starting at position 3968 of SEQ ID NO: 913350
acaggacucuuugugaguu

SEQ ID NO: 920413 - RNA, 19 nt, Artificial Sequence
  Description of Artificial Sequence: Synthetic oligonucleotide
  Antisense strand to SEQ ID NO: 920412
aacucacaaagaguccugu

SEQ ID NO: 920414 - RNA, 19 nt, Artificial Sequence
  Description of Artificial Sequence: Synthetic oligonucleotide
  Sense strand starting at position 2134 of SEQ ID NO: 913350
gaauuucugccuugcuguu

SEQ ID NO: 920415 - RNA, 19 nt, Artificial Sequence
  Description of Artificial Sequence: Synthetic oligonucleotide
  Antisense strand to SEQ ID NO: 920414
aacagcaaggcagaaauuc

SEQ ID NO: 920416 - RNA, 19 nt, Artificial Sequence
  Description of Artificial Sequence: Synthetic oligonucleotide
  Sense strand starting at position 2411 of SEQ ID NO: 913350
cugggcuuucucugagaau

SEQ ID NO: 920417 - RNA, 19 nt, Artificial Sequence
  Description of Artificial Sequence: Synthetic oligonucleotide
  Antisense strand to SEQ ID NO: 920416
auucucagagaaagcccag

SEQ ID NO: 920418 - RNA, 19 nt, Artificial Sequence
  Description of Artificial Sequence: Synthetic oligonucleotide
  Sense strand starting at position 282 of SEQ ID NO: 913350
auagguuaguuacuuucua

SEQ ID NO: 920419 - RNA, 19 nt, Artificial Sequence
  Description of Artificial Sequence: Synthetic oligonucleotide
  Antisense strand to SEQ ID NO: 920418
uagaaaguaacuaaccuau

SEQ ID NO: 920420 - RNA, 19 nt, Artificial Sequence
  Description of Artificial Sequence: Synthetic oligonucleotide
  Sense strand starting at position 453 of SEQ ID NO: 913350
gucucauaucaaggccaca

SEQ ID NO: 920421 - RNA, 19 nt, Artificial Sequence
  Description of Artificial Sequence: Synthetic oligonucleotide
  Antisense strand to SEQ ID NO: 920420
uguggccuugauaugagac

SEQ ID NO: 920422 - RNA, 19 nt, Artificial Sequence
  Description of Artificial Sequence: Synthetic oligonucleotide
  Sense strand starting at position 3136 of SEQ ID NO: 913350
aauaucuaguuugugaagu

SEQ ID NO: 920423 - RNA, 19 nt, Artificial Sequence
  Description of Artificial Sequence: Synthetic oligonucleotide
  Antisense strand to SEQ ID NO: 920422
acuucacaaacuagauauu

SEQ ID NO: 920424 - RNA, 19 nt, Artificial Sequence
  Description of Artificial Sequence: Synthetic oligonucleotide
  Sense strand starting at position 3511 of SEQ ID NO: 913350
cuguauugaugccuggaca

SEQ ID NO: 920425 - RNA, 19 nt, Artificial Sequence
  Description of Artificial Sequence: Synthetic oligonucleotide
  Antisense strand to SEQ ID NO: 920424
uguccaggcaucaauacag

SEQ ID NO: 920426 - RNA, 19 nt, Artificial Sequence
  Description of Artificial Sequence: Synthetic oligonucleotide
  Sense strand starting at position 2798 of SEQ ID NO: 913350
guuggucugagcugaagag

SEQ ID NO: 920427 - RNA, 19 nt, Artificial Sequence
  Description of Artificial Sequence: Synthetic oligonucleotide
  Antisense strand to SEQ ID NO: 920426
cucuucagcucagaccaac

SEQ ID NO: 920428 - RNA, 19 nt, Artificial Sequence
  Description of Artificial Sequence: Synthetic oligonucleotide
  Sense strand starting at position 3512 of SEQ ID NO: 913350
uguauugaugccuggacau

SEQ ID NO: 920429 - RNA, 19 nt, Artificial Sequence
  Description of Artificial Sequence: Synthetic oligonucleotide
  Antisense strand to SEQ ID NO: 920428
auguccaggcaucaauaca

SEQ ID NO: 920430 - RNA, 19 nt, Artificial Sequence
  Description of Artificial Sequence: Synthetic oligonucleotide
  Sense strand starting at position 3546 of SEQ ID NO: 913350
cuuggcauccaggguuaua

SEQ ID NO: 920431 - RNA, 19 nt, Artificial Sequence
  Description of Artificial Sequence: Synthetic oligonucleotide
  Antisense strand to SEQ ID NO: 920430
uauaacccuggaugccaag

SEQ ID NO: 920432 - RNA, 19 nt, Artificial Sequence
  Description of Artificial Sequence: Synthetic oligonucleotide
  Sense strand starting at position 3115 of SEQ ID NO: 913350
gcuacauugugaccuuaau

SEQ ID NO: 920433 - RNA, 19 nt, Artificial Sequence
  Description of Artificial Sequence: Synthetic oligonucleotide
  Antisense strand to SEQ ID NO: 920432
auuaaggucacaauguagc

SEQ ID NO: 920434 - RNA, 19 nt, Artificial Sequence
  Description of Artificial Sequence: Synthetic oligonucleotide
  Sense strand starting at position 733 of SEQ ID NO: 913350
agaaguucuccaugagugu

SEQ ID NO: 920435 - RNA, 19 nt, Artificial Sequence
  Description of Artificial Sequence: Synthetic oligonucleotide
  Antisense strand to SEQ ID NO: 920434
acacucauggagaacuucu

SEQ ID NO: 920436 - RNA, 19 nt, Artificial Sequence
  Description of Artificial Sequence: Synthetic oligonucleotide
  Sense strand starting at position 3764 of SEQ ID NO: 913350
cuuuguccuguuugggaaa

SEQ ID NO: 920437 - RNA, 19 nt, Artificial Sequence
  Description of Artificial Sequence: Synthetic oligonucleotide
  Antisense strand to SEQ ID NO: 920436
uuucccaaacaggacaaag

SEQ ID NO: 920438 - RNA, 19 nt, Artificial Sequence
  Description of Artificial Sequence: Synthetic oligonucleotide
  Sense strand starting at position 2110 of SEQ ID NO: 913350
caaaccauaucguuuggua

SEQ ID NO: 920439 - RNA, 19 nt, Artificial Sequence
  Description of Artificial Sequence: Synthetic oligonucleotide
  Antisense strand to SEQ ID NO: 920438
uaccaaacgauaugguuug

SEQ ID NO: 920440 - RNA, 19 nt, Artificial Sequence
  Description of Artificial Sequence: Synthetic oligonucleotide
  Sense strand starting at position 3086 of SEQ ID NO: 913351
uuauuuacccagugucuua

SEQ ID NO: 920441 - RNA, 19 nt, Artificial Sequence
  Description of Artificial Sequence: Synthetic oligonucleotide
  Antisense strand to SEQ ID NO: 920440
uaagacacuggguaaauaa

SEQ ID NO: 920442 - RNA, 19 nt, Artificial Sequence
  Description of Artificial Sequence: Synthetic oligonucleotide
  Sense strand starting at position 2650 of SEQ ID NO: 913351
cgucauuugcaauaugcaa

SEQ ID NO: 920443 - RNA, 19 nt, Artificial Sequence
  Description of Artificial Sequence: Synthetic oligonucleotide
  Antisense strand to SEQ ID NO: 920442
uugcauauugcaaaugacg

SEQ ID NO: 920444 - RNA, 19 nt, Artificial Sequence
  Description of Artificial Sequence: Synthetic oligonucleotide
  Sense strand starting at position 1352 of SEQ ID NO: 913351
ggaaauucucuuuagucca

SEQ ID NO: 920445 - RNA, 19 nt, Artificial Sequence
  Description of Artificial Sequence: Synthetic oligonucleotide
  Antisense strand to SEQ ID NO: 920444
uggacuaaagagaauuucc

SEQ ID NO: 920446 - RNA, 19 nt, Artificial Sequence
  Description of Artificial Sequence: Synthetic oligonucleotide
  Sense strand starting at position 2645 of SEQ ID NO: 913351
uuggacgucauuugcaaua

SEQ ID NO: 920447 - RNA, 19 nt, Artificial Sequence
  Description of Artificial Sequence: Synthetic oligonucleotide
  Antisense strand to SEQ ID NO: 920446
uauugcaaaugacguccaa

SEQ ID NO: 920448 - RNA, 19 nt, Artificial Sequence
  Description of Artificial Sequence: Synthetic oligonucleotide
  Sense strand starting at position 1610 of SEQ ID NO: 913351
ucugacaagcuaugaaaua

SEQ ID NO: 920449 - RNA, 19 nt, Artificial Sequence
  Description of Artificial Sequence: Synthetic oligonucleotide
  Antisense strand to SEQ ID NO: 920448
uauuucauagcuugucaga

SEQ ID NO: 920450 - RNA, 19 nt, Artificial Sequence
  Description of Artificial Sequence: Synthetic oligonucleotide
  Sense strand starting at position 3330 of SEQ ID NO: 913351
aggaauaaccgguaggcau

SEQ ID NO: 920451 - RNA, 19 nt, Artificial Sequence
  Description of Artificial Sequence: Synthetic oligonucleotide
  Antisense strand to SEQ ID NO: 920450
augccuaccgguuauuccu

SEQ ID NO: 920452 - RNA, 19 nt, Artificial Sequence
  Description of Artificial Sequence: Synthetic oligonucleotide
  Sense strand starting at position 445 of SEQ ID NO: 913351
uugagaucuccauauugca

SEQ ID NO: 920453 - RNA, 19 nt, Artificial Sequence
  Description of Artificial Sequence: Synthetic oligonucleotide
  Antisense strand to SEQ ID NO: 920452
ugcaauauggagaucucaa

SEQ ID NO: 920454 - RNA, 19 nt, Artificial Sequence
  Description of Artificial Sequence: Synthetic oligonucleotide
  Sense strand starting at position 1738 of SEQ ID NO: 913351
agcuuuaaccuagggaaac

SEQ ID NO: 920455 - RNA, 19 nt, Artificial Sequence
  Description of Artificial Sequence: Synthetic oligonucleotide
  Antisense strand to SEQ ID NO: 920454
guuucccuagguuaaagcu

SEQ ID NO: 920456 - RNA, 19 nt, Artificial Sequence
  Description of Artificial Sequence: Synthetic oligonucleotide
  Sense strand starting at position 1766 of SEQ ID NO: 913351
agucaugcagaguaauaca

SEQ ID NO: 920457 - RNA, 19 nt, Artificial Sequence
  Description of Artificial Sequence: Synthetic oligonucleotide
  Antisense strand to SEQ ID NO: 920456
uguauuacucugcaugacu

SEQ ID NO: 920458 - RNA, 19 nt, Artificial Sequence
  Description of Artificial Sequence: Synthetic oligonucleotide
  Sense strand starting at position 3573 of SEQ ID NO: 913351
cacagucauccagaggcau

SEQ ID NO: 920459 - RNA, 19 nt, Artificial Sequence
  Description of Artificial Sequence: Synthetic oligonucleotide
  Antisense strand to SEQ ID NO: 920458
augccucuggaugacugug

SEQ ID NO: 920460 - RNA, 19 nt, Artificial Sequence
  Description of Artificial Sequence: Synthetic oligonucleotide
  Sense strand starting at position 2696 of SEQ ID NO: 913351
uuuaauagaggcuauugua

SEQ ID NO: 920461 - RNA, 19 nt, Artificial Sequence
  Description of Artificial Sequence: Synthetic oligonucleotide
  Antisense strand to SEQ ID NO: 920460
uacaauagccucuauuaaa

SEQ ID NO: 920462 - RNA, 19 nt, Artificial Sequence
  Description of Artificial Sequence: Synthetic oligonucleotide
  Sense strand starting at position 1138 of SEQ ID NO: 913351
guagaaauaguuuagucua

SEQ ID NO: 920463 - RNA, 19 nt, Artificial Sequence
  Description of Artificial Sequence: Synthetic oligonucleotide
  Antisense strand to SEQ ID NO: 920462
uagacuaaacuauuucuac

SEQ ID NO: 920464 - RNA, 19 nt, Artificial Sequence
  Description of Artificial Sequence: Synthetic oligonucleotide
  Sense strand starting at position 1017 of SEQ ID NO: 913351
agugauguugcacagaaca

SEQ ID NO: 920465 - RNA, 19 nt, Artificial Sequence
  Description of Artificial Sequence: Synthetic oligonucleotide
  Antisense strand to SEQ ID NO: 920464
uguucugugcaacaucacu

SEQ ID NO: 920466 - RNA, 19 nt, Artificial Sequence
  Description of Artificial Sequence: Synthetic oligonucleotide
  Sense strand starting at position 2788 of SEQ ID NO: 913351
augagaaauuacuuguuuc

SEQ ID NO: 920467 - RNA, 19 nt, Artificial Sequence
  Description of Artificial Sequence: Synthetic oligonucleotide
  Antisense strand to SEQ ID NO: 920466
gaaacaaguaauuucucau

SEQ ID NO: 920468 - RNA, 19 nt, Artificial Sequence
  Description of Artificial Sequence: Synthetic oligonucleotide
  Sense strand starting at position 1763 of SEQ ID NO: 913351
uggagucaugcagaguaau

SEQ ID NO: 920469 - RNA, 19 nt, Artificial Sequence
  Description of Artificial Sequence: Synthetic oligonucleotide
  Antisense strand to SEQ ID NO: 920468
auuacucugcaugacucca

SEQ ID NO: 920470 - RNA, 19 nt, Artificial Sequence
  Description of Artificial Sequence: Synthetic oligonucleotide
  Sense strand starting at position 2040 of SEQ ID NO: 913351
cugccuaaugguuaaccaa

SEQ ID NO: 920471 - RNA, 19 nt, Artificial Sequence
  Description of Artificial Sequence: Synthetic oligonucleotide
  Antisense strand to SEQ ID NO: 920470
uugguuaaccauuaggcag

SEQ ID NO: 920472 - RNA, 19 nt, Artificial Sequence
  Description of Artificial Sequence: Synthetic oligonucleotide
  Sense strand starting at position 1349 of SEQ ID NO: 913351
augggaaauucucuuuagu

SEQ ID NO: 920473 - RNA, 19 nt, Artificial Sequence
  Description of Artificial Sequence: Synthetic oligonucleotide
  Antisense strand to SEQ ID NO: 920472
acuaaagagaauuucccau

SEQ ID NO: 920474 - RNA, 19 nt, Artificial Sequence
  Description of Artificial Sequence: Synthetic oligonucleotide
  Sense strand starting at position 3122 of SEQ ID NO: 913351
cuauaugugggcgaaggau

SEQ ID NO: 920475 - RNA, 19 nt, Artificial Sequence
  Description of Artificial Sequence: Synthetic oligonucleotide
  Antisense strand to SEQ ID NO: 920474
auccuucgcccacauauag

SEQ ID NO: 920476 - RNA, 19 nt, Artificial Sequence
  Description of Artificial Sequence: Synthetic oligonucleotide
  Sense strand starting at position 1401 of SEQ ID NO: 913351
cgcauaucagaacagugau

SEQ ID NO: 920477 - RNA, 19 nt, Artificial Sequence
  Description of Artificial Sequence: Synthetic oligonucleotide
  Antisense strand to SEQ ID NO: 920476
aucacuguucugauaugcg

SEQ ID NO: 920478 - RNA, 19 nt, Artificial Sequence
  Description of Artificial Sequence: Synthetic oligonucleotide
  Sense strand starting at position 2855 of SEQ ID NO: 913351
gaccaauaucuuugaguug

SEQ ID NO: 920479 - RNA, 19 nt, Artificial Sequence
  Description of Artificial Sequence: Synthetic oligonucleotide
  Antisense strand to SEQ ID NO: 920478
caacucaaagauauugguc

SEQ ID NO: 920480 - RNA, 19 nt, Artificial Sequence
  Description of Artificial Sequence: Synthetic oligonucleotide
  Sense strand starting at position 2808 of SEQ ID NO: 913351
gccuuuacagggcagauua

SEQ ID NO: 920481 - RNA, 19 nt, Artificial Sequence
  Description of Artificial Sequence: Synthetic oligonucleotide
  Antisense strand to SEQ ID NO: 920480
uaaucugcccuguaaaggc

SEQ ID NO: 920482 - RNA, 19 nt, Artificial Sequence
  Description of Artificial Sequence: Synthetic oligonucleotide
  Sense strand starting at position 368 of SEQ ID NO: 913351
ggcuauagauuauuccaac

SEQ ID NO: 920483 - RNA, 19 nt, Artificial Sequence
  Description of Artificial Sequence: Synthetic oligonucleotide
  Antisense strand to SEQ ID NO: 920482
guuggaauaaucuauagcc

SEQ ID NO: 920484 - RNA, 19 nt, Artificial Sequence
  Description of Artificial Sequence: Synthetic oligonucleotide
  Sense strand starting at position 305 of SEQ ID NO: 913351
ugaguuacugucuaugacu

SEQ ID NO: 920485 - RNA, 19 nt, Artificial Sequence
  Description of Artificial Sequence: Synthetic oligonucleotide
  Antisense strand to SEQ ID NO: 920484
agucauagacaguaacuca

SEQ ID NO: 920486 - RNA, 19 nt, Artificial Sequence
  Description of Artificial Sequence: Synthetic oligonucleotide
  Sense strand starting at position 2854 of SEQ ID NO: 913351
ugaccaauaucuuugaguu

SEQ ID NO: 920487 - RNA, 19 nt, Artificial Sequence
  Description of Artificial Sequence: Synthetic oligonucleotide
  Antisense strand to SEQ ID NO: 920486
aacucaaagauauugguca

SEQ ID NO: 920488 - RNA, 19 nt, Artificial Sequence
  Description of Artificial Sequence: Synthetic oligonucleotide
  Sense strand starting at position 2843 of SEQ ID NO: 913351
ugcaucaugcaugaccaau

SEQ ID NO: 920489 - RNA, 19 nt, Artificial Sequence
  Description of Artificial Sequence: Synthetic oligonucleotide
  Antisense strand to SEQ ID NO: 920488
auuggucaugcaugaugca

SEQ ID NO: 920490 - RNA, 19 nt, Artificial Sequence
  Description of Artificial Sequence: Synthetic oligonucleotide
  Sense strand starting at position 841 of SEQ ID NO: 913351
uggaaaguuccauggaguc

SEQ ID NO: 920491 - RNA, 19 nt, Artificial Sequence
  Description of Artificial Sequence: Synthetic oligonucleotide
  Antisense strand to SEQ ID NO: 920490
gacuccauggaacuuucca

SEQ ID NO: 920492 - RNA, 19 nt, Artificial Sequence
  Description of Artificial Sequence: Synthetic oligonucleotide
  Sense strand starting at position 1071 of SEQ ID NO: 913351
guaucuagucccuaaucac

SEQ ID NO: 920493 - RNA, 19 nt, Artificial Sequence
  Description of Artificial Sequence: Synthetic oligonucleotide
  Antisense strand to SEQ ID NO: 920492
gugauuagggacuagauac

SEQ ID NO: 920494 - RNA, 19 nt, Artificial Sequence
  Description of Artificial Sequence: Synthetic oligonucleotide
  Sense strand starting at position 2259 of SEQ ID NO: 913351
acaaauuaugacuguaugu

SEQ ID NO: 920495 - RNA, 19 nt, Artificial Sequence
  Description of Artificial Sequence: Synthetic oligonucleotide
  Antisense strand to SEQ ID NO: 920494
acauacagucauaauuugu

SEQ ID NO: 920496 - RNA, 19 nt, Artificial Sequence
  Description of Artificial Sequence: Synthetic oligonucleotide
  Sense strand starting at position 1351 of SEQ ID NO: 913351
gggaaauucucuuuagucc

SEQ ID NO: 920497 - RNA, 19 nt, Artificial Sequence
  Description of Artificial Sequence: Synthetic oligonucleotide
  Antisense strand to SEQ ID NO: 920496
ggacuaaagagaauuuccc

SEQ ID NO: 920498 - RNA, 19 nt, Artificial Sequence
  Description of Artificial Sequence: Synthetic oligonucleotide
  Sense strand starting at position 1863 of SEQ ID NO: 913351
uauuauuaccucuggaggu

SEQ ID NO: 920499 - RNA, 19 nt, Artificial Sequence
  Description of Artificial Sequence: Synthetic oligonucleotide
  Antisense strand to SEQ ID NO: 920498
accuccagagguaauaaua

SEQ ID NO: 920500 - RNA, 19 nt, Artificial Sequence
  Description of Artificial Sequence: Synthetic oligonucleotide
  Sense strand starting at position 2578 of SEQ ID NO: 913351
uccugaauagggugcaaau

SEQ ID NO: 920501 - RNA, 19 nt, Artificial Sequence
  Description of Artificial Sequence: Synthetic oligonucleotide
  Antisense strand to SEQ ID NO: 920500
auuugcacccuauucagga

SEQ ID NO: 920502 - RNA, 19 nt, Artificial Sequence
  Description of Artificial Sequence: Synthetic oligonucleotide
  Sense strand starting at position 530 of SEQ ID NO: 913351
uugggucaugugcaaacau

SEQ ID NO: 920503 - RNA, 19 nt, Artificial Sequence
  Description of Artificial Sequence: Synthetic oligonucleotide
  Antisense strand to SEQ ID NO: 920502
auguuugcacaugacccaa

SEQ ID NO: 920504 - RNA, 19 nt, Artificial Sequence
  Description of Artificial Sequence: Synthetic oligonucleotide
  Sense strand starting at position 3121 of SEQ ID NO: 913351
acuauaugugggcgaagga

SEQ ID NO: 920505 - RNA, 19 nt, Artificial Sequence
  Description of Artificial Sequence: Synthetic oligonucleotide
  Antisense strand to SEQ ID NO: 920504
uccuucgcccacauauagu

SEQ ID NO: 920506 - RNA, 19 nt, Artificial Sequence
  Description of Artificial Sequence: Synthetic oligonucleotide
  Sense strand starting at position 304 of SEQ ID NO: 913351
augaguuacugucuaugac

SEQ ID NO: 920507 - RNA, 19 nt, Artificial Sequence
  Description of Artificial Sequence: Synthetic oligonucleotide
  Antisense strand to SEQ ID NO: 920506
gucauagacaguaacucau

SEQ ID NO: 920508 - RNA, 19 nt, Artificial Sequence
  Description of Artificial Sequence: Synthetic oligonucleotide
  Sense strand starting at position 1549 of SEQ ID NO: 913351
gccaucaauuuccaagaga

SEQ ID NO: 920509 - RNA, 19 nt, Artificial Sequence
  Description of Artificial Sequence: Synthetic oligonucleotide
  Antisense strand to SEQ ID NO: 920508
ucucuuggaaauugauggc

SEQ ID NO: 920510 - RNA, 19 nt, Artificial Sequence
  Description of Artificial Sequence: Synthetic oligonucleotide
  Sense strand starting at position 1761 of SEQ ID NO: 913351
guuggagucaugcagagua

SEQ ID NO: 920511 - RNA, 19 nt, Artificial Sequence
  Description of Artificial Sequence: Synthetic oligonucleotide
  Antisense strand to SEQ ID NO: 920510
uacucugcaugacuccaac

SEQ ID NO: 920512 - RNA, 19 nt, Artificial Sequence
  Description of Artificial Sequence: Synthetic oligonucleotide
  Sense strand starting at position 3684 of SEQ ID NO: 913351
agaagauaaugguagaaga

SEQ ID NO: 920513 - RNA, 19 nt, Artificial Sequence
  Description of Artificial Sequence: Synthetic oligonucleotide
  Antisense strand to SEQ ID NO: 920512
ucuucuaccauuaucuucu

SEQ ID NO: 920514 - RNA, 19 nt, Artificial Sequence
  Description of Artificial Sequence: Synthetic oligonucleotide
  Sense strand starting at position 831 of SEQ ID NO: 913351
ucgacugcucuggaaaguu

SEQ ID NO: 920515 - RNA, 19 nt, Artificial Sequence
  Description of Artificial Sequence: Synthetic oligonucleotide
  Antisense strand to SEQ ID NO: 920514
aacuuuccagagcagucga

SEQ ID NO: 920516 - RNA, 19 nt, Artificial Sequence
  Description of Artificial Sequence: Synthetic oligonucleotide
  Sense strand starting at position 300 of SEQ ID NO: 913351
uuacaugaguuacugucua

SEQ ID NO: 920517 - RNA, 19 nt, Artificial Sequence
  Description of Artificial Sequence: Synthetic oligonucleotide
  Antisense strand to SEQ ID NO: 920516
uagacaguaacucauguaa

SEQ ID NO: 920518 - RNA, 19 nt, Artificial Sequence
  Description of Artificial Sequence: Synthetic oligonucleotide
  Sense strand starting at position 766 of SEQ ID NO: 913351
guguguccacuagacagua

SEQ ID NO: 920519 - RNA, 19 nt, Artificial Sequence
  Description of Artificial Sequence: Synthetic oligonucleotide
  Antisense strand to SEQ ID NO: 920518
uacugucuaguggacacac

SEQ ID NO: 920520 - RNA, 19 nt, Artificial Sequence
  Description of Artificial Sequence: Synthetic oligonucleotide
  Sense strand starting at position 3172 of SEQ ID NO: 913352
ugaguagaaauguaguaug

SEQ ID NO: 920521 - RNA, 19 nt, Artificial Sequence
  Description of Artificial Sequence: Synthetic oligonucleotide
  Antisense strand to SEQ ID NO: 920520
cauacuacauuucuacuca

SEQ ID NO: 920522 - RNA, 19 nt, Artificial Sequence
  Description of Artificial Sequence: Synthetic oligonucleotide
  Sense strand starting at position 2420 of SEQ ID NO: 913352
auaguugguccucaauaaa

SEQ ID NO: 920523 - RNA, 19 nt, Artificial Sequence
  Description of Artificial Sequence: Synthetic oligonucleotide
  Antisense strand to SEQ ID NO: 920522
uuuauugaggaccaacuau

SEQ ID NO: 920524 - RNA, 19 nt, Artificial Sequence
  Description of Artificial Sequence: Synthetic oligonucleotide
  Sense strand starting at position 2508 of SEQ ID NO: 913352
ucuuucuuugcguuguaag

SEQ ID NO: 920525 - RNA, 19 nt, Artificial Sequence
  Description of Artificial Sequence: Synthetic oligonucleotide
  Antisense strand to SEQ ID NO: 920524
cuuacaacgcaaagaaaga

SEQ ID NO: 920526 - RNA, 19 nt, Artificial Sequence
  Description of Artificial Sequence: Synthetic oligonucleotide
  Sense strand starting at position 575 of SEQ ID NO: 913352
agauguauacucugaggau

SEQ ID NO: 920527 - RNA, 19 nt, Artificial Sequence
  Description of Artificial Sequence: Synthetic oligonucleotide
  Antisense strand to SEQ ID NO: 920526
auccucagaguauacaucu

SEQ ID NO: 920528 - RNA, 19 nt, Artificial Sequence
  Description of Artificial Sequence: Synthetic oligonucleotide
  Sense strand starting at position 1742 of SEQ ID NO: 913352
agucauccagaguaaggua

SEQ ID NO: 920529 - RNA, 19 nt, Artificial Sequence
  Description of Artificial Sequence: Synthetic oligonucleotide
  Antisense strand to SEQ ID NO: 920528
uaccuuacucuggaugacu

SEQ ID NO: 920530 - RNA, 19 nt, Artificial Sequence
  Description of Artificial Sequence: Synthetic oligonucleotide
  Sense strand starting at position 2565 of SEQ ID NO: 913352
agcuguaauccugaugagg

SEQ ID NO: 920531 - RNA, 19 nt, Artificial Sequence
  Description of Artificial Sequence: Synthetic oligonucleotide
  Antisense strand to SEQ ID NO: 920530
ccucaucaggauuacagcu

SEQ ID NO: 920532 - RNA, 19 nt, Artificial Sequence
  Description of Artificial Sequence: Synthetic oligonucleotide
  Sense strand starting at position 3417 of SEQ ID NO: 913352
agcauauuaguugauaauc

SEQ ID NO: 920533 - RNA, 19 nt, Artificial Sequence
  Description of Artificial Sequence: Synthetic oligonucleotide
  Antisense strand to SEQ ID NO: 920532
gauuaucaacuaauaugcu

SEQ ID NO: 920534 - RNA, 19 nt, Artificial Sequence
  Description of Artificial Sequence: Synthetic oligonucleotide
  Sense strand starting at position 2825 of SEQ ID NO: 913352
gaugaauaauucucaugug

SEQ ID NO: 920535 - RNA, 19 nt, Artificial Sequence
  Description of Artificial Sequence: Synthetic oligonucleotide
  Antisense strand to SEQ ID NO: 920534
cacaugagaauuauucauc

SEQ ID NO: 920536 - RNA, 19 nt, Artificial Sequence
  Description of Artificial Sequence: Synthetic oligonucleotide
  Sense strand starting at position 3830 of SEQ ID NO: 913352
uaaucuacauguuuaggga

SEQ ID NO: 920537 - RNA, 19 nt, Artificial Sequence
  Description of Artificial Sequence: Synthetic oligonucleotide
  Antisense strand to SEQ ID NO: 920536
ucccuaaacauguagauua

SEQ ID NO: 920538 - RNA, 19 nt, Artificial Sequence
  Description of Artificial Sequence: Synthetic oligonucleotide
  Sense strand starting at position 1739 of SEQ ID NO: 913352
gugagucauccagaguaag

SEQ ID NO: 920539 - RNA, 19 nt, Artificial Sequence
  Description of Artificial Sequence: Synthetic oligonucleotide
  Antisense strand to SEQ ID NO: 920538
cuuacucuggaugacucac

SEQ ID NO: 920540 - RNA, 19 nt, Artificial Sequence
  Description of Artificial Sequence: Synthetic oligonucleotide
  Sense strand starting at position 2301 of SEQ ID NO: 913352
uucguuucugccgugauaa

SEQ ID NO: 920541 - RNA, 19 nt, Artificial Sequence
  Description of Artificial Sequence: Synthetic oligonucleotide
  Antisense strand to SEQ ID NO: 920540
uuaucacggcagaaacgaa

SEQ ID NO: 920542 - RNA, 19 nt, Artificial Sequence
  Description of Artificial Sequence: Synthetic oligonucleotide
  Sense strand starting at position 355 of SEQ ID NO: 913352
acagaaugcucacucagac

SEQ ID NO: 920543 - RNA, 19 nt, Artificial Sequence
  Description of Artificial Sequence: Synthetic oligonucleotide
  Antisense strand to SEQ ID NO: 920542
gucugagugagcauucugu

SEQ ID NO: 920544 - RNA, 19 nt, Artificial Sequence
  Description of Artificial Sequence: Synthetic oligonucleotide
  Sense strand starting at position 2884 of SEQ ID NO: 913352
gaacaugaugaauguaguu

SEQ ID NO: 920545 - RNA, 19 nt, Artificial Sequence
  Description of Artificial Sequence: Synthetic oligonucleotide
  Antisense strand to SEQ ID NO: 920544
aacuacauucaucauguuc

SEQ ID NO: 920546 - RNA, 19 nt, Artificial Sequence
  Description of Artificial Sequence: Synthetic oligonucleotide
  Sense strand starting at position 2621 of SEQ ID NO: 913352
gaguguuaauuauuaacag

SEQ ID NO: 920547 - RNA, 19 nt, Artificial Sequence
  Description of Artificial Sequence: Synthetic oligonucleotide
  Antisense strand to SEQ ID NO: 920546
cuguuaauaauuaacacuc

SEQ ID NO: 920548 - RNA, 19 nt, Artificial Sequence
  Description of Artificial Sequence: Synthetic oligonucleotide
  Sense strand starting at position 534 of SEQ ID NO: 913352
agucauucuggcuacacaa

SEQ ID NO: 920549 - RNA, 19 nt, Artificial Sequence
  Description of Artificial Sequence: Synthetic oligonucleotide
  Antisense strand to SEQ ID NO: 920548
uuguguagccagaaugacu

SEQ ID NO: 920550 - RNA, 19 nt, Artificial Sequence
  Description of Artificial Sequence: Synthetic oligonucleotide
  Sense strand starting at position 2558 of SEQ ID NO: 913352
cugauaaagcuguaauccu

SEQ ID NO: 920551 - RNA, 19 nt, Artificial Sequence
  Description of Artificial Sequence: Synthetic oligonucleotide
  Antisense strand to SEQ ID NO: 920550
aggauuacagcuuuaucag

SEQ ID NO: 920552 - RNA, 19 nt, Artificial Sequence
  Description of Artificial Sequence: Synthetic oligonucleotide
  Sense strand starting at position 2940 of SEQ ID NO: 913352
cuugcaaugcccugauuuc

SEQ ID NO: 920553 - RNA, 19 nt, Artificial Sequence
  Description of Artificial Sequence: Synthetic oligonucleotide
  Antisense strand to SEQ ID NO: 920552
gaaaucagggcauugcaag

SEQ ID NO: 920554 - RNA, 19 nt, Artificial Sequence
  Description of Artificial Sequence: Synthetic oligonucleotide
  Sense strand starting at position 3213 of SEQ ID NO: 913352
ggaagagacgugcaauagu

SEQ ID NO: 920555 - RNA, 19 nt, Artificial Sequence
  Description of Artificial Sequence: Synthetic oligonucleotide
  Antisense strand to SEQ ID NO: 920554
acuauugcacgucucuucc

SEQ ID NO: 920556 - RNA, 19 nt, Artificial Sequence
  Description of Artificial Sequence: Synthetic oligonucleotide
  Sense strand starting at position 3073 of SEQ ID NO: 913352
cagcaauaugguggaucaa

SEQ ID NO: 920557 - RNA, 19 nt, Artificial Sequence
  Description of Artificial Sequence: Synthetic oligonucleotide
  Antisense strand to SEQ ID NO: 920556
uugauccaccauauugcug

SEQ ID NO: 920558 - RNA, 19 nt, Artificial Sequence
  Description of Artificial Sequence: Synthetic oligonucleotide
  Sense strand starting at position 393 of SEQ ID NO: 913352
gggaaaugcugucuacaag

SEQ ID NO: 920559 - RNA, 19 nt, Artificial Sequence
  Description of Artificial Sequence: Synthetic oligonucleotide
  Antisense strand to SEQ ID NO: 920558
cuuguagacagcauuuccc

SEQ ID NO: 920560 - RNA, 19 nt, Artificial Sequence
  Description of Artificial Sequence: Synthetic oligonucleotide
  Sense strand starting at position 3426 of SEQ ID NO: 913352
guugauaaucgucaugaca

SEQ ID NO: 920561 - RNA, 19 nt, Artificial Sequence
  Description of Artificial Sequence: Synthetic oligonucleotide
  Antisense strand to SEQ ID NO: 920560
ugucaugacgauuaucaac

SEQ ID NO: 920562 - RNA, 19 nt, Artificial Sequence
  Description of Artificial Sequence: Synthetic oligonucleotide
  Sense strand starting at position 2079 of SEQ ID NO: 913352
uuauauggucuguggagaa

SEQ ID NO: 920563 - RNA, 19 nt, Artificial Sequence
  Description of Artificial Sequence: Synthetic oligonucleotide
  Antisense strand to SEQ ID NO: 920562
uucuccacagaccauauaa

SEQ ID NO: 920564 - RNA, 19 nt, Artificial Sequence
  Description of Artificial Sequence: Synthetic oligonucleotide
  Sense strand starting at position 723 of SEQ ID NO: 913352
uugaccaaauuuggauaaa

SEQ ID NO: 920565 - RNA, 19 nt, Artificial Sequence
  Description of Artificial Sequence: Synthetic oligonucleotide
  Antisense strand to SEQ ID NO: 920564
uuuauccaaauuuggucaa

SEQ ID NO: 920566 - RNA, 19 nt, Artificial Sequence
  Description of Artificial Sequence: Synthetic oligonucleotide
  Sense strand starting at position 858 of SEQ ID NO: 913352
ccgccaucuccugagaaca

SEQ ID NO: 920567 - RNA, 19 nt, Artificial Sequence
  Description of Artificial Sequence: Synthetic oligonucleotide
  Antisense strand to SEQ ID NO: 920566
uguucucaggagauggcgg

SEQ ID NO: 920568 - RNA, 19 nt, Artificial Sequence
  Description of Artificial Sequence: Synthetic oligonucleotide
  Sense strand starting at position 120 of SEQ ID NO: 913352
aguaauaaagguugagcau

SEQ ID NO: 920569 - RNA, 19 nt, Artificial Sequence
  Description of Artificial Sequence: Synthetic oligonucleotide
  Antisense strand to SEQ ID NO: 920568
augcucaaccuuuauuacu

SEQ ID NO: 920570 - RNA, 19 nt, Artificial Sequence
  Description of Artificial Sequence: Synthetic oligonucleotide
  Sense strand starting at position 3754 of SEQ ID NO: 913352
uuuggagcugaacgauaua

SEQ ID NO: 920571 - RNA, 19 nt, Artificial Sequence
  Description of Artificial Sequence: Synthetic oligonucleotide
  Antisense strand to SEQ ID NO: 920570
uauaucguucagcuccaaa

SEQ ID NO: 920572 - RNA, 19 nt, Artificial Sequence
  Description of Artificial Sequence: Synthetic oligonucleotide
  Sense strand starting at position 2951 of SEQ ID NO: 913352
cugauuucguucuauuuac

SEQ ID NO: 920573 - RNA, 19 nt, Artificial Sequence
  Description of Artificial Sequence: Synthetic oligonucleotide
  Antisense strand to SEQ ID NO: 920572
guaaauagaacgaaaucag

SEQ ID NO: 920574 - RNA, 19 nt, Artificial Sequence
  Description of Artificial Sequence: Synthetic oligonucleotide
  Sense strand starting at position 3414 of SEQ ID NO: 913352
ccaagcauauuaguugaua

SEQ ID NO: 920575 - RNA, 19 nt, Artificial Sequence
  Description of Artificial Sequence: Synthetic oligonucleotide
  Antisense strand to SEQ ID NO: 920574
uaucaacuaauaugcuugg

SEQ ID NO: 920576 - RNA, 19 nt, Artificial Sequence
  Description of Artificial Sequence: Synthetic oligonucleotide
  Sense strand starting at position 955 of SEQ ID NO: 913352
gcuucaguugugucguuau

SEQ ID NO: 920577 - RNA, 19 nt, Artificial Sequence
  Description of Artificial Sequence: Synthetic oligonucleotide
  Antisense strand to SEQ ID NO: 920576
auaacgacacaacugaagc

SEQ ID NO: 920578 - RNA, 19 nt, Artificial Sequence
  Description of Artificial Sequence: Synthetic oligonucleotide
  Sense strand starting at position 2516 of SEQ ID NO: 913352
ugcguuguaagagaaauau

SEQ ID NO: 920579 - RNA, 19 nt, Artificial Sequence
  Description of Artificial Sequence: Synthetic oligonucleotide
  Antisense strand to SEQ ID NO: 920578
auauuucucuuacaacgca

SEQ ID NO: 920580 - RNA, 19 nt, Artificial Sequence
  Description of Artificial Sequence: Synthetic oligonucleotide
  Sense strand starting at position 2920 of SEQ ID NO: 913352
acaucuuggaguugucaga

SEQ ID NO: 920581 - RNA, 19 nt, Artificial Sequence
  Description of Artificial Sequence: Synthetic oligonucleotide
  Antisense strand to SEQ ID NO: 920580
ucugacaacuccaagaugu

SEQ ID NO: 920582 - RNA, 19 nt, Artificial Sequence
  Description of Artificial Sequence: Synthetic oligonucleotide
  Sense strand starting at position 2832 of SEQ ID NO: 913352
aauucucaugugggauagu

SEQ ID NO: 920583 - RNA, 19 nt, Artificial Sequence
  Description of Artificial Sequence: Synthetic oligonucleotide
  Antisense strand to SEQ ID NO: 920582
acuaucccacaugagaauu

SEQ ID NO: 920584 - RNA, 19 nt, Artificial Sequence
  Description of Artificial Sequence: Synthetic oligonucleotide
  Sense strand starting at position 178 of SEQ ID NO: 913352
cacuguuauggagguacca

SEQ ID NO: 920585 - RNA, 19 nt, Artificial Sequence
  Description of Artificial Sequence: Synthetic oligonucleotide
  Antisense strand to SEQ ID NO: 920584
ugguaccuccauaacagug

SEQ ID NO: 920586 - RNA, 19 nt, Artificial Sequence
  Description of Artificial Sequence: Synthetic oligonucleotide
  Sense strand starting at position 2078 of SEQ ID NO: 913352
cuuauauggucuguggaga

SEQ ID NO: 920587 - RNA, 19 nt, Artificial Sequence
  Description of Artificial Sequence: Synthetic oligonucleotide
  Antisense strand to SEQ ID NO: 920586
ucuccacagaccauauaag

SEQ ID NO: 920588 - RNA, 19 nt, Artificial Sequence
  Description of Artificial Sequence: Synthetic oligonucleotide
  Sense strand starting at position 2416 of SEQ ID NO: 913352
ucaaauaguugguccucaa

SEQ ID NO: 920589 - RNA, 19 nt, Artificial Sequence
  Description of Artificial Sequence: Synthetic oligonucleotide
  Antisense strand to SEQ ID NO: 920588
uugaggaccaacuauuuga

SEQ ID NO: 920590 - RNA, 19 nt, Artificial Sequence
  Description of Artificial Sequence: Synthetic oligonucleotide
  Sense strand starting at position 2573 of SEQ ID NO: 913352
uccugaugagggugcaaau

SEQ ID NO: 920591 - RNA, 19 nt, Artificial Sequence
  Description of Artificial Sequence: Synthetic oligonucleotide
  Antisense strand to SEQ ID NO: 920590
auuugcacccucaucagga

SEQ ID NO: 920592 - RNA, 19 nt, Artificial Sequence
  Description of Artificial Sequence: Synthetic oligonucleotide
  Sense strand starting at position 3116 of SEQ ID NO: 913352
gcgucaagaagugaucuga

SEQ ID NO: 920593 - RNA, 19 nt, Artificial Sequence
  Description of Artificial Sequence: Synthetic oligonucleotide
  Antisense strand to SEQ ID NO: 920592
ucagaucacuucuugacgc

SEQ ID NO: 920594 - RNA, 19 nt, Artificial Sequence
  Description of Artificial Sequence: Synthetic oligonucleotide
  Sense strand starting at position 2947 of SEQ ID NO: 913352
ugcccugauuucguucuau

SEQ ID NO: 920595 - RNA, 19 nt, Artificial Sequence
  Description of Artificial Sequence: Synthetic oligonucleotide
  Antisense strand to SEQ ID NO: 920594
auagaacgaaaucagggca

SEQ ID NO: 920596 - RNA, 19 nt, Artificial Sequence
  Description of Artificial Sequence: Synthetic oligonucleotide
  Sense strand starting at position 3707 of SEQ ID NO: 913352
guguaucaacaaugaugua

SEQ ID NO: 920597 - RNA, 19 nt, Artificial Sequence
  Description of Artificial Sequence: Synthetic oligonucleotide
  Antisense strand to SEQ ID NO: 920596
uacaucauuguugauacac

SEQ ID NO: 920598 - RNA, 19 nt, Artificial Sequence
  Description of Artificial Sequence: Synthetic oligonucleotide
  Sense strand starting at position 1840 of SEQ ID NO: 913352
uauucuuaccucuggaggu

SEQ ID NO: 920599 - RNA, 19 nt, Artificial Sequence
  Description of Artificial Sequence: Synthetic oligonucleotide
  Antisense strand to SEQ ID NO: 920598
accuccagagguaagaaua

SEQ ID NO: 920600 - RNA, 19 nt, Artificial Sequence
  Description of Artificial Sequence: Synthetic oligonucleotide
  Sense strand starting at position 3234 of SEQ ID NO: 913353
ugauuaacaucugugaaga

SEQ ID NO: 920601 - RNA, 19 nt, Artificial Sequence
  Description of Artificial Sequence: Synthetic oligonucleotide
  Antisense strand to SEQ ID NO: 920600
ucuucacagauguuaauca

SEQ ID NO: 920602 - RNA, 19 nt, Artificial Sequence
  Description of Artificial Sequence: Synthetic oligonucleotide
  Sense strand starting at position 556 of SEQ ID NO: 913353
gccauuagccauucugugu

SEQ ID NO: 920603 - RNA, 19 nt, Artificial Sequence
  Description of Artificial Sequence: Synthetic oligonucleotide
  Antisense strand to SEQ ID NO: 920602
acacagaauggcuaauggc

SEQ ID NO: 920604 - RNA, 19 nt, Artificial Sequence
  Description of Artificial Sequence: Synthetic oligonucleotide
  Sense strand starting at position 2282 of SEQ ID NO: 913353
gguuuauagaaugauuggu

SEQ ID NO: 920605 - RNA, 19 nt, Artificial Sequence
  Description of Artificial Sequence: Synthetic oligonucleotide
  Antisense strand to SEQ ID NO: 920604
accaaucauucuauaaacc

SEQ ID NO: 920606 - RNA, 19 nt, Artificial Sequence
  Description of Artificial Sequence: Synthetic oligonucleotide
  Sense strand starting at position 751 of SEQ ID NO: 913353
cuaccaaauuuggauaaag

SEQ ID NO: 920607 - RNA, 19 nt, Artificial Sequence
  Description of Artificial Sequence: Synthetic oligonucleotide
  Antisense strand to SEQ ID NO: 920606
cuuuauccaaauuugguag

SEQ ID NO: 920608 - RNA, 19 nt, Artificial Sequence
  Description of Artificial Sequence: Synthetic oligonucleotide
  Sense strand starting at position 2284 of SEQ ID NO: 913353
uuuauagaaugauugguga

SEQ ID NO: 920609 - RNA, 19 nt, Artificial Sequence
  Description of Artificial Sequence: Synthetic oligonucleotide
  Antisense strand to SEQ ID NO: 920608
ucaccaaucauucuauaaa

SEQ ID NO: 920610 - RNA, 19 nt, Artificial Sequence
  Description of Artificial Sequence: Synthetic oligonucleotide
  Sense strand starting at position 2292 of SEQ ID NO: 913353
augauuggugaucauguua

SEQ ID NO: 920611 - RNA, 19 nt, Artificial Sequence
  Description of Artificial Sequence: Synthetic oligonucleotide
  Antisense strand to SEQ ID NO: 920610
uaacaugaucaccaaucau

SEQ ID NO: 920612 - RNA, 19 nt, Artificial Sequence
  Description of Artificial Sequence: Synthetic oligonucleotide
  Sense strand starting at position 3309 of SEQ ID NO: 913353
guaagaugauaucucuaug

SEQ ID NO: 920613 - RNA, 19 nt, Artificial Sequence
  Description of Artificial Sequence: Synthetic oligonucleotide
  Antisense strand to SEQ ID NO: 920612
cauagagauaucaucuuac

SEQ ID NO: 920614 - RNA, 19 nt, Artificial Sequence
  Description of Artificial Sequence: Synthetic oligonucleotide
  Sense strand starting at position 2854 of SEQ ID NO: 913353
ggugaauaauccucacaug

SEQ ID NO: 920615 - RNA, 19 nt, Artificial Sequence
  Description of Artificial Sequence: Synthetic oligonucleotide
  Antisense strand to SEQ ID NO: 920614
caugugaggauuauucacc

SEQ ID NO: 920616 - RNA, 19 nt, Artificial Sequence
  Description of Artificial Sequence: Synthetic oligonucleotide
  Sense strand starting at position 1066 of SEQ ID NO: 913353
caacguauaguugaucaaa

SEQ ID NO: 920617 - RNA, 19 nt, Artificial Sequence
  Description of Artificial Sequence: Synthetic oligonucleotide
  Antisense strand to SEQ ID NO: 920616
uuugaucaacuauacguug

SEQ ID NO: 920618 - RNA, 19 nt, Artificial Sequence
  Description of Artificial Sequence: Synthetic oligonucleotide
  Sense strand starting at position 2433 of SEQ ID NO: 913353
aagaaugaccagugagcau

SEQ ID NO: 920619 - RNA, 19 nt, Artificial Sequence
  Description of Artificial Sequence: Synthetic oligonucleotide
  Antisense strand to SEQ ID NO: 920618
augcucacuggucauucuu

SEQ ID NO: 920620 - RNA, 19 nt, Artificial Sequence
  Description of Artificial Sequence: Synthetic oligonucleotide
  Sense strand starting at position 277 of SEQ ID NO: 913353
gacuacaagggaugcuauu

SEQ ID NO: 920621 - RNA, 19 nt, Artificial Sequence
  Description of Artificial Sequence: Synthetic oligonucleotide
  Antisense strand to SEQ ID NO: 920620
aauagcaucccuuguaguc

SEQ ID NO: 920622 - RNA, 19 nt, Artificial Sequence
  Description of Artificial Sequence: Synthetic oligonucleotide
  Sense strand starting at position 1491 of SEQ ID NO: 913353
ucacgucuaguagaagaau

SEQ ID NO: 920623 - RNA, 19 nt, Artificial Sequence
  Description of Artificial Sequence: Synthetic oligonucleotide
  Antisense strand to SEQ ID NO: 920622
auucuucuacuagacguga

SEQ ID NO: 920624 - RNA, 19 nt, Artificial Sequence
  Description of Artificial Sequence: Synthetic oligonucleotide
  Sense strand starting at position 571 of SEQ ID NO: 913353
gugugcaugacagaacuaa

SEQ ID NO: 920625 - RNA, 19 nt, Artificial Sequence
  Description of Artificial Sequence: Synthetic oligonucleotide
  Antisense strand to SEQ ID NO: 920624
uuaguucugucaugcacac

SEQ ID NO: 920626 - RNA, 19 nt, Artificial Sequence
  Description of Artificial Sequence: Synthetic oligonucleotide
  Sense strand starting at position 1161 of SEQ ID NO: 913353
agaaauagcucagucuaga

SEQ ID NO: 920627 - RNA, 19 nt, Artificial Sequence
  Description of Artificial Sequence: Synthetic oligonucleotide
  Antisense strand to SEQ ID NO: 920626
ucuagacugagcuauuucu

SEQ ID NO: 920628 - RNA, 19 nt, Artificial Sequence
  Description of Artificial Sequence: Synthetic oligonucleotide
  Sense strand starting at position 1129 of SEQ ID NO: 913353
guagucuuggaauacaagu

SEQ ID NO: 920629 - RNA, 19 nt, Artificial Sequence
  Description of Artificial Sequence: Synthetic oligonucleotide
  Antisense strand to SEQ ID NO: 920628
acuuguauuccaagacuac

SEQ ID NO: 920630 - RNA, 19 nt, Artificial Sequence
  Description of Artificial Sequence: Synthetic oligonucleotide
  Sense strand starting at position 1744 of SEQ ID NO: 913353
auagaauagcucuagccca

SEQ ID NO: 920631 - RNA, 19 nt, Artificial Sequence
  Description of Artificial Sequence: Synthetic oligonucleotide
  Antisense strand to SEQ ID NO: 920630
ugggcuagagcuauucuau

SEQ ID NO: 920632 - RNA, 19 nt, Artificial Sequence
  Description of Artificial Sequence: Synthetic oligonucleotide
  Sense strand starting at position 3559 of SEQ ID NO: 913353
uauagaguggcucaguaga

SEQ ID NO: 920633 - RNA, 19 nt, Artificial Sequence
  Description of Artificial Sequence: Synthetic oligonucleotide
  Antisense strand to SEQ ID NO: 920632
ucuacugagccacucuaua

SEQ ID NO: 920634 - RNA, 19 nt, Artificial Sequence
  Description of Artificial Sequence: Synthetic oligonucleotide
  Sense strand starting at position 649 of SEQ ID NO: 913353
cgaccugugagagauuagu

SEQ ID NO: 920635 - RNA, 19 nt, Artificial Sequence
  Description of Artificial Sequence: Synthetic oligonucleotide
  Antisense strand to SEQ ID NO: 920634
acuaaucucucacaggucg

SEQ ID NO: 920636 - RNA, 19 nt, Artificial Sequence
  Description of Artificial Sequence: Synthetic oligonucleotide
  Sense strand starting at position 3462 of SEQ ID NO: 913353
gagugucaucagcaggaug

SEQ ID NO: 920637 - RNA, 19 nt, Artificial Sequence
  Description of Artificial Sequence: Synthetic oligonucleotide
  Antisense strand to SEQ ID NO: 920636
cauccugcugaugacacuc

SEQ ID NO: 920638 - RNA, 19 nt, Artificial Sequence
  Description of Artificial Sequence: Synthetic oligonucleotide
  Sense strand starting at position 3801 of SEQ ID NO: 913353
ggcugaugucgagacuaag

SEQ ID NO: 920639 - RNA, 19 nt, Artificial Sequence
  Description of Artificial Sequence: Synthetic oligonucleotide
  Antisense strand to SEQ ID NO: 920638
cuuagucucgacaucagcc

SEQ ID NO: 920640 - RNA, 19 nt, Artificial Sequence
  Description of Artificial Sequence: Synthetic oligonucleotide
  Sense strand starting at position 3799 of SEQ ID NO: 913353
agggcugaugucgagacua

SEQ ID NO: 920641 - RNA, 19 nt, Artificial Sequence
  Description of Artificial Sequence: Synthetic oligonucleotide
  Antisense strand to SEQ ID NO: 920640
uagucucgacaucagcccu

SEQ ID NO: 920642 - RNA, 19 nt, Artificial Sequence
  Description of Artificial Sequence: Synthetic oligonucleotide
  Sense strand starting at position 1159 of SEQ ID NO: 913353
guagaaauagcucagucua

SEQ ID NO: 920643 - RNA, 19 nt, Artificial Sequence
  Description of Artificial Sequence: Synthetic oligonucleotide
  Antisense strand to SEQ ID NO: 920642
uagacugagcuauuucuac

SEQ ID NO: 920644 - RNA, 19 nt, Artificial Sequence
  Description of Artificial Sequence: Synthetic oligonucleotide
  Sense strand starting at position 3312 of SEQ ID NO: 913353
agaugauaucucuaugugc

SEQ ID NO: 920645 - RNA, 19 nt, Artificial Sequence
  Description of Artificial Sequence: Synthetic oligonucleotide
  Antisense strand to SEQ ID NO: 920644
gcacauagagauaucaucu

SEQ ID NO: 920646 - RNA, 19 nt, Artificial Sequence
  Description of Artificial Sequence: Synthetic oligonucleotide
  Sense strand starting at position 943 of SEQ ID NO: 913353
aagguuuaccaaggcuaga

SEQ ID NO: 920647 - RNA, 19 nt, Artificial Sequence
  Description of Artificial Sequence: Synthetic oligonucleotide
  Antisense strand to SEQ ID NO: 920646
ucuagccuugguaaaccuu

SEQ ID NO: 920648 - RNA, 19 nt, Artificial Sequence
  Description of Artificial Sequence: Synthetic oligonucleotide
  Sense strand starting at position 2081 of SEQ ID NO: 913353
uaaucaauggcauguagga

SEQ ID NO: 920649 - RNA, 19 nt, Artificial Sequence
  Description of Artificial Sequence: Synthetic oligonucleotide
  Antisense strand to SEQ ID NO: 920648
uccuacaugccauugauua

SEQ ID NO: 920650 - RNA, 19 nt, Artificial Sequence
  Description of Artificial Sequence: Synthetic oligonucleotide
  Sense strand starting at position 1778 of SEQ ID NO: 913353
ugagucacucaggguaaca

SEQ ID NO: 920651 - RNA, 19 nt, Artificial Sequence
  Description of Artificial Sequence: Synthetic oligonucleotide
  Antisense strand to SEQ ID NO: 920650
uguuacccugagugacuca

SEQ ID NO: 920652 - RNA, 19 nt, Artificial Sequence
  Description of Artificial Sequence: Synthetic oligonucleotide
  Sense strand starting at position 1876 of SEQ ID NO: 913353
gauuauuaccucuggaggu

SEQ ID NO: 920653 - RNA, 19 nt, Artificial Sequence
  Description of Artificial Sequence: Synthetic oligonucleotide
  Antisense strand to SEQ ID NO: 920652
accuccagagguaauaauc

SEQ ID NO: 920654 - RNA, 19 nt, Artificial Sequence
  Description of Artificial Sequence: Synthetic oligonucleotide
  Sense strand starting at position 2679 of SEQ ID NO: 913353
auguuuggacuuuggacau

SEQ ID NO: 920655 - RNA, 19 nt, Artificial Sequence
  Description of Artificial Sequence: Synthetic oligonucleotide
  Antisense strand to SEQ ID NO: 920654
auguccaaaguccaaacau

SEQ ID NO: 920656 - RNA, 19 nt, Artificial Sequence
  Description of Artificial Sequence: Synthetic oligonucleotide
  Sense strand starting at position 436 of SEQ ID NO: 913353
cuacccuuaucaguuagga

SEQ ID NO: 920657 - RNA, 19 nt, Artificial Sequence
  Description of Artificial Sequence: Synthetic oligonucleotide
  Antisense strand to SEQ ID NO: 920656
uccuaacugauaaggguag

SEQ ID NO: 920658 - RNA, 19 nt, Artificial Sequence
  Description of Artificial Sequence: Synthetic oligonucleotide
  Sense strand starting at position 1248 of SEQ ID NO: 913353
gcauauuaacacggaccaa

SEQ ID NO: 920659 - RNA, 19 nt, Artificial Sequence
  Description of Artificial Sequence: Synthetic oligonucleotide
  Antisense strand to SEQ ID NO: 920658
uugguccguguuaauaugc

SEQ ID NO: 920660 - RNA, 19 nt, Artificial Sequence
  Description of Artificial Sequence: Synthetic oligonucleotide
  Sense strand starting at position 2581 of SEQ ID NO: 913353
aggugugguccugaugaug

SEQ ID NO: 920661 - RNA, 19 nt, Artificial Sequence
  Description of Artificial Sequence: Synthetic oligonucleotide
  Antisense strand to SEQ ID NO: 920660
caucaucaggaccacaccu

SEQ ID NO: 920662 - RNA, 19 nt, Artificial Sequence
  Description of Artificial Sequence: Synthetic oligonucleotide
  Sense strand starting at position 3829 of SEQ ID NO: 913353
agcauauuagcugaucauu

SEQ ID NO: 920663 - RNA, 19 nt, Artificial Sequence
  Description of Artificial Sequence: Synthetic oligonucleotide
  Antisense strand to SEQ ID NO: 920662
aaugaucagcuaauaugcu

SEQ ID NO: 920664 - RNA, 19 nt, Artificial Sequence
  Description of Artificial Sequence: Synthetic oligonucleotide
  Sense strand starting at position 1873 of SEQ ID NO: 913353
ugugauuauuaccucugga

SEQ ID NO: 920665 - RNA, 19 nt, Artificial Sequence
  Description of Artificial Sequence: Synthetic oligonucleotide
  Antisense strand to SEQ ID NO: 920664
uccagagguaauaaucaca

SEQ ID NO: 920666 - RNA, 19 nt, Artificial Sequence
  Description of Artificial Sequence: Synthetic oligonucleotide
  Sense strand starting at position 2980 of SEQ ID NO: 913353
guagguuuacuugagguca

SEQ ID NO: 920667 - RNA, 19 nt, Artificial Sequence
  Description of Artificial Sequence: Synthetic oligonucleotide
  Antisense strand to SEQ ID NO: 920666
ugaccucaaguaaaccuac

SEQ ID NO: 920668 - RNA, 19 nt, Artificial Sequence
  Description of Artificial Sequence: Synthetic oligonucleotide
  Sense strand starting at position 3103 of SEQ ID NO: 913353
gcaagacaauugcuuaaac

SEQ ID NO: 920669 - RNA, 19 nt, Artificial Sequence
  Description of Artificial Sequence: Synthetic oligonucleotide
  Antisense strand to SEQ ID NO: 920668
guuuaagcaauugucuugc

SEQ ID NO: 920670 - RNA, 19 nt, Artificial Sequence
  Description of Artificial Sequence: Synthetic oligonucleotide
  Sense strand starting at position 2646 of SEQ ID NO: 913353
acaugauguuuauuggagu

SEQ ID NO: 920671 - RNA, 19 nt, Artificial Sequence
  Description of Artificial Sequence: Synthetic oligonucleotide
  Antisense strand to SEQ ID NO: 920670
acuccaauaaacaucaugu

SEQ ID NO: 920672 - RNA, 19 nt, Artificial Sequence
  Description of Artificial Sequence: Synthetic oligonucleotide
  Sense strand starting at position 2291 of SEQ ID NO: 913353
aaugauuggugaucauguu

SEQ ID NO: 920673 - RNA, 19 nt, Artificial Sequence
  Description of Artificial Sequence: Synthetic oligonucleotide
  Antisense strand to SEQ ID NO: 920672
aacaugaucaccaaucauu

SEQ ID NO: 920674 - RNA, 19 nt, Artificial Sequence
  Description of Artificial Sequence: Synthetic oligonucleotide
  Sense strand starting at position 2710 of SEQ ID NO: 913353
gcaaacaguucuuuaauag

SEQ ID NO: 920675 - RNA, 19 nt, Artificial Sequence
  Description of Artificial Sequence: Synthetic oligonucleotide
  Antisense strand to SEQ ID NO: 920674
cuauuaaagaacuguuugc

SEQ ID NO: 920676 - RNA, 19 nt, Artificial Sequence
  Description of Artificial Sequence: Synthetic oligonucleotide
  Sense strand starting at position 1486 of SEQ ID NO: 913353
uuugaucacgucuaguaga

SEQ ID NO: 920677 - RNA, 19 nt, Artificial Sequence
  Description of Artificial Sequence: Synthetic oligonucleotide
  Antisense strand to SEQ ID NO: 920676
ucuacuagacgugaucaaa

SEQ ID NO: 920678 - RNA, 19 nt, Artificial Sequence
  Description of Artificial Sequence: Synthetic oligonucleotide
  Sense strand starting at position 371 of SEQ ID NO: 913353
cggucuuguaaagaaagca

SEQ ID NO: 920679 - RNA, 19 nt, Artificial Sequence
  Description of Artificial Sequence: Synthetic oligonucleotide
  Antisense strand to SEQ ID NO: 920678
ugcuuucuuuacaagaccg

SEQ ID NO: 920680 - RNA, 19 nt, Artificial Sequence
  Description of Artificial Sequence: Synthetic oligonucleotide
  Sense strand starting at position 788 of SEQ ID NO: 913354
cuaggaugccaacagucaa

SEQ ID NO: 920681 - RNA, 19 nt, Artificial Sequence
  Description of Artificial Sequence: Synthetic oligonucleotide
  Antisense strand to SEQ ID NO: 920680
uugacuguuggcauccuag

SEQ ID NO: 920682 - RNA, 19 nt, Artificial Sequence
  Description of Artificial Sequence: Synthetic oligonucleotide
  Sense strand starting at position 3643 of SEQ ID NO: 913354
aagaguccuuuauuagaug

SEQ ID NO: 920683 - RNA, 19 nt, Artificial Sequence
  Description of Artificial Sequence: Synthetic oligonucleotide
  Antisense strand to SEQ ID NO: 920682
caucuaauaaaggacucuu

SEQ ID NO: 920684 - RNA, 19 nt, Artificial Sequence
  Description of Artificial Sequence: Synthetic oligonucleotide
  Sense strand starting at position 161 of SEQ ID NO: 913354
gagugauuaugauuaaucc

SEQ ID NO: 920685 - RNA, 19 nt, Artificial Sequence
  Description of Artificial Sequence: Synthetic oligonucleotide
  Antisense strand to SEQ ID NO: 920684
ggauuaaucauaaucacuc

SEQ ID NO: 920686 - RNA, 19 nt, Artificial Sequence
  Description of Artificial Sequence: Synthetic oligonucleotide
  Sense strand starting at position 1397 of SEQ ID NO: 913354
cucucuuugcuggagagga

SEQ ID NO: 920687 - RNA, 19 nt, Artificial Sequence
  Description of Artificial Sequence: Synthetic oligonucleotide
  Antisense strand to SEQ ID NO: 920686
uccucuccagcaaagagag

SEQ ID NO: 920688 - RNA, 19 nt, Artificial Sequence
  Description of Artificial Sequence: Synthetic oligonucleotide
  Sense strand starting at position 277 of SEQ ID NO: 913354
ucuggacuccugcaccaaa

SEQ ID NO: 920689 - RNA, 19 nt, Artificial Sequence
  Description of Artificial Sequence: Synthetic oligonucleotide
  Antisense strand to SEQ ID NO: 920688
uuuggugcaggaguccaga

SEQ ID NO: 920690 - RNA, 19 nt, Artificial Sequence
  Description of Artificial Sequence: Synthetic oligonucleotide
  Sense strand starting at position 3210 of SEQ ID NO: 913354
ucaccaucuguaggaauga

SEQ ID NO: 920691 - RNA, 19 nt, Artificial Sequence
  Description of Artificial Sequence: Synthetic oligonucleotide
  Antisense strand to SEQ ID NO: 920690
ucauuccuacagaugguga

SEQ ID NO: 920692 - RNA, 19 nt, Artificial Sequence
  Description of Artificial Sequence: Synthetic oligonucleotide
  Sense strand starting at position 155 of SEQ ID NO: 913354
agugaugagugauuaugau

SEQ ID NO: 920693 - RNA, 19 nt, Artificial Sequence
  Description of Artificial Sequence: Synthetic oligonucleotide
  Antisense strand to SEQ ID NO: 920692
aucauaaucacucaucacu

SEQ ID NO: 920694 - RNA, 19 nt, Artificial Sequence
  Description of Artificial Sequence: Synthetic oligonucleotide
  Sense strand starting at position 3716 of SEQ ID NO: 913354
ugacauugucuuuagcaaa

SEQ ID NO: 920695 - RNA, 19 nt, Artificial Sequence
  Description of Artificial Sequence: Synthetic oligonucleotide
  Antisense strand to SEQ ID NO: 920694
uuugcuaaagacaauguca

SEQ ID NO: 920696 - RNA, 19 nt, Artificial Sequence
  Description of Artificial Sequence: Synthetic oligonucleotide
  Sense strand starting at position 2324 of SEQ ID NO: 913354
cuagguugaugggcagaga

SEQ ID NO: 920697 - RNA, 19 nt, Artificial Sequence
  Description of Artificial Sequence: Synthetic oligonucleotide
  Antisense strand to SEQ ID NO: 920696
ucucugcccaucaaccuag

SEQ ID NO: 920698 - RNA, 19 nt, Artificial Sequence
  Description of Artificial Sequence: Synthetic oligonucleotide
  Sense strand starting at position 3208 of SEQ ID NO: 913354
gcucaccaucuguaggaau

SEQ ID NO: 920699 - RNA, 19 nt, Artificial Sequence
  Description of Artificial Sequence: Synthetic oligonucleotide
  Antisense strand to SEQ ID NO: 920698
auuccuacagauggugagc

SEQ ID NO: 920700 - RNA, 19 nt, Artificial Sequence
  Description of Artificial Sequence: Synthetic oligonucleotide
  Sense strand starting at position 478 of SEQ ID NO: 913354
ugagcaggccuugaacauu

SEQ ID NO: 920701 - RNA, 19 nt, Artificial Sequence
  Description of Artificial Sequence: Synthetic oligonucleotide
  Antisense strand to SEQ ID NO: 920700
aauguucaaggccugcuca

SEQ ID NO: 920702 - RNA, 19 nt, Artificial Sequence
  Description of Artificial Sequence: Synthetic oligonucleotide
  Sense strand starting at position 152 of SEQ ID NO: 913354
accagugaugagugauuau

SEQ ID NO: 920703 - RNA, 19 nt, Artificial Sequence
  Description of Artificial Sequence: Synthetic oligonucleotide
  Antisense strand to SEQ ID NO: 920702
auaaucacucaucacuggu

SEQ ID NO: 920704 - RNA, 19 nt, Artificial Sequence
  Description of Artificial Sequence: Synthetic oligonucleotide
  Sense strand starting at position 3536 of SEQ ID NO: 913354
ucuguauaucuuugauaag

SEQ ID NO: 920705 - RNA, 19 nt, Artificial Sequence
  Description of Artificial Sequence: Synthetic oligonucleotide
  Antisense strand to SEQ ID NO: 920704
cuuaucaaagauauacaga

SEQ ID NO: 920706 - RNA, 19 nt, Artificial Sequence
  Description of Artificial Sequence: Synthetic oligonucleotide
  Sense strand starting at position 419 of SEQ ID NO: 913354
acuccuagccucuaagagu

SEQ ID NO: 920707 - RNA, 19 nt, Artificial Sequence
  Description of Artificial Sequence: Synthetic oligonucleotide
  Antisense strand to SEQ ID NO: 920706
acucuuagaggcuaggagu

SEQ ID NO: 920708 - RNA, 19 nt, Artificial Sequence
  Description of Artificial Sequence: Synthetic oligonucleotide
  Sense strand starting at position 188 of SEQ ID NO: 913354
gcaccugcaguccaagaaa

SEQ ID NO: 920709 - RNA, 19 nt, Artificial Sequence
  Description of Artificial Sequence: Synthetic oligonucleotide
  Antisense strand to SEQ ID NO: 920708
uuucuuggacugcaggugc

SEQ ID NO: 920710 - RNA, 19 nt, Artificial Sequence
  Description of Artificial Sequence: Synthetic oligonucleotide
  Sense strand starting at position 2802 of SEQ ID NO: 913354
uuaucucuccuggagcuua

SEQ ID NO: 920711 - RNA, 19 nt, Artificial Sequence
  Description of Artificial Sequence: Synthetic oligonucleotide
  Antisense strand to SEQ ID NO: 920710
uaagcuccaggagagauaa

SEQ ID NO: 920712 - RNA, 19 nt, Artificial Sequence
  Description of Artificial Sequence: Synthetic oligonucleotide
  Sense strand starting at position 1480 of SEQ ID NO: 913354
uccaguucugaguaacuuc

SEQ ID NO: 920713 - RNA, 19 nt, Artificial Sequence
  Description of Artificial Sequence: Synthetic oligonucleotide
  Antisense strand to SEQ ID NO: 920712
gaaguuacucagaacugga

SEQ ID NO: 920714 - RNA, 19 nt, Artificial Sequence
  Description of Artificial Sequence: Synthetic oligonucleotide
  Sense strand starting at position 86 of SEQ ID NO: 913354
aacggauaggucugugaug

SEQ ID NO: 920715 - RNA, 19 nt, Artificial Sequence
  Description of Artificial Sequence: Synthetic oligonucleotide
  Antisense strand to SEQ ID NO: 920714
caucacagaccuauccguu

SEQ ID NO: 920716 - RNA, 19 nt, Artificial Sequence
  Description of Artificial Sequence: Synthetic oligonucleotide
  Sense strand starting at position 477 of SEQ ID NO: 913354
augagcaggccuugaacau

SEQ ID NO: 920717 - RNA, 19 nt, Artificial Sequence
  Description of Artificial Sequence: Synthetic oligonucleotide
  Antisense strand to SEQ ID NO: 920716
auguucaaggccugcucau

SEQ ID NO: 920718 - RNA, 19 nt, Artificial Sequence
  Description of Artificial Sequence: Synthetic oligonucleotide
  Sense strand starting at position 428 of SEQ ID NO: 913354
cucuaagaguugguaagca

SEQ ID NO: 920719 - RNA, 19 nt, Artificial Sequence
  Description of Artificial Sequence: Synthetic oligonucleotide
  Antisense strand to SEQ ID NO: 920718
ugcuuaccaacucuuagag

SEQ ID NO: 920720 - RNA, 19 nt, Artificial Sequence
  Description of Artificial Sequence: Synthetic oligonucleotide
  Sense strand starting at position 3715 of SEQ ID NO: 913354
uugacauugucuuuagcaa

SEQ ID NO: 920721 - RNA, 19 nt, Artificial Sequence
  Description of Artificial Sequence: Synthetic oligonucleotide
  Antisense strand to SEQ ID NO: 920720
uugcuaaagacaaugucaa

SEQ ID NO: 920722 - RNA, 19 nt, Artificial Sequence
  Description of Artificial Sequence: Synthetic oligonucleotide
  Sense strand starting at position 426 of SEQ ID NO: 913354
gccucuaagaguugguaag

SEQ ID NO: 920723 - RNA, 19 nt, Artificial Sequence
  Description of Artificial Sequence: Synthetic oligonucleotide
  Antisense strand to SEQ ID NO: 920722
cuuaccaacucuuagaggc

SEQ ID NO: 920724 - RNA, 19 nt, Artificial Sequence
  Description of Artificial Sequence: Synthetic oligonucleotide
  Sense strand starting at position 2885 of SEQ ID NO: 913354
agaugagggcuuuguuucu

SEQ ID NO: 920725 - RNA, 19 nt, Artificial Sequence
  Description of Artificial Sequence: Synthetic oligonucleotide
  Antisense strand to SEQ ID NO: 920724
agaaacaaagcccucaucu

SEQ ID NO: 920726 - RNA, 19 nt, Artificial Sequence
  Description of Artificial Sequence: Synthetic oligonucleotide
  Sense strand starting at position 3655 of SEQ ID NO: 913354
uuagaugugucuuuguaaa

SEQ ID NO: 920727 - RNA, 19 nt, Artificial Sequence
  Description of Artificial Sequence: Synthetic oligonucleotide
  Antisense strand to SEQ ID NO: 920726
uuuacaaagacacaucuaa

SEQ ID NO: 920728 - RNA, 19 nt, Artificial Sequence
  Description of Artificial Sequence: Synthetic oligonucleotide
  Sense strand starting at position 974 of SEQ ID NO: 913354
gagcgauuauaugucucag

SEQ ID NO: 920729 - RNA, 19 nt, Artificial Sequence
  Description of Artificial Sequence: Synthetic oligonucleotide
  Antisense strand to SEQ ID NO: 920728
cugagacauauaaucgcuc

SEQ ID NO: 920730 - RNA, 19 nt, Artificial Sequence
  Description of Artificial Sequence: Synthetic oligonucleotide
  Sense strand starting at position 998 of SEQ ID NO: 913354
agggcagguugcuucuaaa

SEQ ID NO: 920731 - RNA, 19 nt, Artificial Sequence
  Description of Artificial Sequence: Synthetic oligonucleotide
  Antisense strand to SEQ ID NO: 920730
uuuagaagcaaccugcccu

SEQ ID NO: 920732 - RNA, 19 nt, Artificial Sequence
  Description of Artificial Sequence: Synthetic oligonucleotide
  Sense strand starting at position 3446 of SEQ ID NO: 913354
acugcaaucguguaucaug

SEQ ID NO: 920733 - RNA, 19 nt, Artificial Sequence
  Description of Artificial Sequence: Synthetic oligonucleotide
  Antisense strand to SEQ ID NO: 920732
caugauacacgauugcagu

SEQ ID NO: 920734 - RNA, 19 nt, Artificial Sequence
  Description of Artificial Sequence: Synthetic oligonucleotide
  Sense strand starting at position 257 of SEQ ID NO: 913354
uuauccugugugcacgaaa

SEQ ID NO: 920735 - RNA, 19 nt, Artificial Sequence
  Description of Artificial Sequence: Synthetic oligonucleotide
  Antisense strand to SEQ ID NO: 920734
uuucgugcacacaggauaa

SEQ ID NO: 920736 - RNA, 19 nt, Artificial Sequence
  Description of Artificial Sequence: Synthetic oligonucleotide
  Sense strand starting at position 52 of SEQ ID NO: 913354
uggccauugaugcagcauu

SEQ ID NO: 920737 - RNA, 19 nt, Artificial Sequence
  Description of Artificial Sequence: Synthetic oligonucleotide
  Antisense strand to SEQ ID NO: 920736
aaugcugcaucaauggcca

SEQ ID NO: 920738 - RNA, 19 nt, Artificial Sequence
  Description of Artificial Sequence: Synthetic oligonucleotide
  Sense strand starting at position 870 of SEQ ID NO: 913354
aauaauaacugagagaggu

SEQ ID NO: 920739 - RNA, 19 nt, Artificial Sequence
  Description of Artificial Sequence: Synthetic oligonucleotide
  Antisense strand to SEQ ID NO: 920738
accucucucaguuauuauu

SEQ ID NO: 920740 - RNA, 19 nt, Artificial Sequence
  Description of Artificial Sequence: Synthetic oligonucleotide
  Sense strand starting at position 2856 of SEQ ID NO: 913354
guccuacugccuugaggac

SEQ ID NO: 920741 - RNA, 19 nt, Artificial Sequence
  Description of Artificial Sequence: Synthetic oligonucleotide
  Antisense strand to SEQ ID NO: 920740
guccucaaggcaguaggac

SEQ ID NO: 920742 - RNA, 19 nt, Artificial Sequence
  Description of Artificial Sequence: Synthetic oligonucleotide
  Sense strand starting at position 87 of SEQ ID NO: 913354
acggauaggucugugaugu

SEQ ID NO: 920743 - RNA, 19 nt, Artificial Sequence
  Description of Artificial Sequence: Synthetic oligonucleotide
  Antisense strand to SEQ ID NO: 920742
acaucacagaccuauccgu

SEQ ID NO: 920744 - RNA, 19 nt, Artificial Sequence
  Description of Artificial Sequence: Synthetic oligonucleotide
  Sense strand starting at position 2801 of SEQ ID NO: 913354
cuuaucucuccuggagcuu

SEQ ID NO: 920745 - RNA, 19 nt, Artificial Sequence
  Description of Artificial Sequence: Synthetic oligonucleotide
  Antisense strand to SEQ ID NO: 920744
aagcuccaggagagauaag

SEQ ID NO: 920746 - RNA, 19 nt, Artificial Sequence
  Description of Artificial Sequence: Synthetic oligonucleotide
  Sense strand starting at position 3489 of SEQ ID NO: 913354
uccauaagucuaugacguu

SEQ ID NO: 920747 - RNA, 19 nt, Artificial Sequence
  Description of Artificial Sequence: Synthetic oligonucleotide
  Antisense strand to SEQ ID NO: 920746
aacgucauagacuuaugga

SEQ ID NO: 920748 - RNA, 19 nt, Artificial Sequence
  Description of Artificial Sequence: Synthetic oligonucleotide
  Sense strand starting at position 332 of SEQ ID NO: 913354
guuuaauccaucgagugcu

SEQ ID NO: 920749 - RNA, 19 nt, Artificial Sequence
  Description of Artificial Sequence: Synthetic oligonucleotide
  Antisense strand to SEQ ID NO: 920748
agcacucgauggauuaaac

SEQ ID NO: 920750 - RNA, 19 nt, Artificial Sequence
  Description of Artificial Sequence: Synthetic oligonucleotide
  Sense strand starting at position 3786 of SEQ ID NO: 913354
ggcucaucccuuugauguu

SEQ ID NO: 920751 - RNA, 19 nt, Artificial Sequence
  Description of Artificial Sequence: Synthetic oligonucleotide
  Antisense strand to SEQ ID NO: 920750
aacaucaaagggaugagcc

SEQ ID NO: 920752 - RNA, 19 nt, Artificial Sequence
  Description of Artificial Sequence: Synthetic oligonucleotide
  Sense strand starting at position 88 of SEQ ID NO: 913354
cggauaggucugugauguu

SEQ ID NO: 920753 - RNA, 19 nt, Artificial Sequence
  Description of Artificial Sequence: Synthetic oligonucleotide
  Antisense strand to SEQ ID NO: 920752
aacaucacagaccuauccg

SEQ ID NO: 920754 - RNA, 19 nt, Artificial Sequence
  Description of Artificial Sequence: Synthetic oligonucleotide
  Sense strand starting at position 3525 of SEQ ID NO: 913354
cuucuuugcuaucuguaua

SEQ ID NO: 920755 - RNA, 19 nt, Artificial Sequence
  Description of Artificial Sequence: Synthetic oligonucleotide
  Antisense strand to SEQ ID NO: 920754
uauacagauagcaaagaag

SEQ ID NO: 920756 - RNA, 19 nt, Artificial Sequence
  Description of Artificial Sequence: Synthetic oligonucleotide
  Sense strand starting at position 3495 of SEQ ID NO: 913354
agucuaugacguugagcau

SEQ ID NO: 920757 - RNA, 19 nt, Artificial Sequence
  Description of Artificial Sequence: Synthetic oligonucleotide
  Antisense strand to SEQ ID NO: 920756
augcucaacgucauagacu

SEQ ID NO: 920758 - RNA, 19 nt, Artificial Sequence
  Description of Artificial Sequence: Synthetic oligonucleotide
  Sense strand starting at position 2335 of SEQ ID NO: 913354
ggcagagagucuucaccgu

SEQ ID NO: 920759 - RNA, 19 nt, Artificial Sequence
  Description of Artificial Sequence: Synthetic oligonucleotide
  Antisense strand to SEQ ID NO: 920758
acggugaagacucucugcc

SEQ ID NO: 920760 - RNA, 19 nt, Artificial Sequence
  Description of Artificial Sequence: Synthetic oligonucleotide
  Sense strand starting at position 1414 of SEQ ID NO: 913355
cuccauacucuuggaaaga

SEQ ID NO: 920761 - RNA, 19 nt, Artificial Sequence
  Description of Artificial Sequence: Synthetic oligonucleotide
  Antisense strand to SEQ ID NO: 920760
ucuuuccaagaguauggag

SEQ ID NO: 920762 - RNA, 19 nt, Artificial Sequence
  Description of Artificial Sequence: Synthetic oligonucleotide
  Sense strand starting at position 523 of SEQ ID NO: 913355
acaaauggucaguaaaugu

SEQ ID NO: 920763 - RNA, 19 nt, Artificial Sequence
  Description of Artificial Sequence: Synthetic oligonucleotide
  Antisense strand to SEQ ID NO: 920762
acauuuacugaccauuugu

SEQ ID NO: 920764 - RNA, 19 nt, Artificial Sequence
  Description of Artificial Sequence: Synthetic oligonucleotide
  Sense strand starting at position 2270 of SEQ ID NO: 913355
cggaaauagguuggaucaa

SEQ ID NO: 920765 - RNA, 19 nt, Artificial Sequence
  Description of Artificial Sequence: Synthetic oligonucleotide
  Antisense strand to SEQ ID NO: 920764
uugauccaaccuauuuccg

SEQ ID NO: 920766 - RNA, 19 nt, Artificial Sequence
  Description of Artificial Sequence: Synthetic oligonucleotide
  Sense strand starting at position 747 of SEQ ID NO: 913355
gagauugaagacugacgua

SEQ ID NO: 920767 - RNA, 19 nt, Artificial Sequence
  Description of Artificial Sequence: Synthetic oligonucleotide
  Antisense strand to SEQ ID NO: 920766
uacgucagucuucaaucuc

SEQ ID NO: 920768 - RNA, 19 nt, Artificial Sequence
  Description of Artificial Sequence: Synthetic oligonucleotide
  Sense strand starting at position 3343 of SEQ ID NO: 913355
auuacaauaccaugugaug

SEQ ID NO: 920769 - RNA, 19 nt, Artificial Sequence
  Description of Artificial Sequence: Synthetic oligonucleotide
  Antisense strand to SEQ ID NO: 920768
caucacaugguauuguaau

SEQ ID NO: 920770 - RNA, 19 nt, Artificial Sequence
  Description of Artificial Sequence: Synthetic oligonucleotide
  Sense strand starting at position 2326 of SEQ ID NO: 913355
uagauuggaucaguuuaca

SEQ ID NO: 920771 - RNA, 19 nt, Artificial Sequence
  Description of Artificial Sequence: Synthetic oligonucleotide
  Antisense strand to SEQ ID NO: 920770
uguaaacugauccaaucua

SEQ ID NO: 920772 - RNA, 19 nt, Artificial Sequence
  Description of Artificial Sequence: Synthetic oligonucleotide
  Sense strand starting at position 3023 of SEQ ID NO: 913355
ugaauagagugacccucau

SEQ ID NO: 920773 - RNA, 19 nt, Artificial Sequence
  Description of Artificial Sequence: Synthetic oligonucleotide
  Antisense strand to SEQ ID NO: 920772
augagggucacucuauuca

SEQ ID NO: 920774 - RNA, 19 nt, Artificial Sequence
  Description of Artificial Sequence: Synthetic oligonucleotide
  Sense strand starting at position 913 of SEQ ID NO: 913355
ucuagauuugugugacugu

SEQ ID NO: 920775 - RNA, 19 nt, Artificial Sequence
  Description of Artificial Sequence: Synthetic oligonucleotide
  Antisense strand to SEQ ID NO: 920774
acagucacacaaaucuaga

SEQ ID NO: 920776 - RNA, 19 nt, Artificial Sequence
  Description of Artificial Sequence: Synthetic oligonucleotide
  Sense strand starting at position 1045 of SEQ ID NO: 913355
ucuaacugauuugaacaga

SEQ ID NO: 920777 - RNA, 19 nt, Artificial Sequence
  Description of Artificial Sequence: Synthetic oligonucleotide
  Antisense strand to SEQ ID NO: 920776
ucuguucaaaucaguuaga

SEQ ID NO: 920778 - RNA, 19 nt, Artificial Sequence
  Description of Artificial Sequence: Synthetic oligonucleotide
  Sense strand starting at position 2309 of SEQ ID NO: 913355
caggcacauccugggaaua

SEQ ID NO: 920779 - RNA, 19 nt, Artificial Sequence
  Description of Artificial Sequence: Synthetic oligonucleotide
  Antisense strand to SEQ ID NO: 920778
uauucccaggaugugccug

SEQ ID NO: 920780 - RNA, 19 nt, Artificial Sequence
  Description of Artificial Sequence: Synthetic oligonucleotide
  Sense strand starting at position 959 of SEQ ID NO: 913355
uccauaucaucaguugaag

SEQ ID NO: 920781 - RNA, 19 nt, Artificial Sequence
  Description of Artificial Sequence: Synthetic oligonucleotide
  Antisense strand to SEQ ID NO: 920780
cuucaacugaugauaugga

SEQ ID NO: 920782 - RNA, 19 nt, Artificial Sequence
  Description of Artificial Sequence: Synthetic oligonucleotide
  Sense strand starting at position 1910 of SEQ ID NO: 913355
gucaguggcguaagaguaa

SEQ ID NO: 920783 - RNA, 19 nt, Artificial Sequence
  Description of Artificial Sequence: Synthetic oligonucleotide
  Antisense strand to SEQ ID NO: 920782
uuacucuuacgccacugac

SEQ ID NO: 920784 - RNA, 19 nt, Artificial Sequence
  Description of Artificial Sequence: Synthetic oligonucleotide
  Sense strand starting at position 3757 of SEQ ID NO: 913355
agacuaauacaauggcuuu

SEQ ID NO: 920785 - RNA, 19 nt, Artificial Sequence
  Description of Artificial Sequence: Synthetic oligonucleotide
  Antisense strand to SEQ ID NO: 920784
aaagccauuguauuagucu

SEQ ID NO: 920786 - RNA, 19 nt, Artificial Sequence
  Description of Artificial Sequence: Synthetic oligonucleotide
  Sense strand starting at position 2269 of SEQ ID NO: 913355
ucggaaauagguuggauca

SEQ ID NO: 920787 - RNA, 19 nt, Artificial Sequence
  Description of Artificial Sequence: Synthetic oligonucleotide
  Antisense strand to SEQ ID NO: 920786
ugauccaaccuauuuccga

SEQ ID NO: 920788 - RNA, 19 nt, Artificial Sequence
  Description of Artificial Sequence: Synthetic oligonucleotide
  Sense strand starting at position 3880 of SEQ ID NO: 913355
augauauaugcagaggugu

SEQ ID NO: 920789 - RNA, 19 nt, Artificial Sequence
  Description of Artificial Sequence: Synthetic oligonucleotide
  Antisense strand to SEQ ID NO: 920788
acaccucugcauauaucau

SEQ ID NO: 920790 - RNA, 19 nt, Artificial Sequence
  Description of Artificial Sequence: Synthetic oligonucleotide
  Sense strand starting at position 668 of SEQ ID NO: 913355
acauauauugacugacugu

SEQ ID NO: 920791 - RNA, 19 nt, Artificial Sequence
  Description of Artificial Sequence: Synthetic oligonucleotide
  Antisense strand to SEQ ID NO: 920790
acagucagucaauauaugu

SEQ ID NO: 920792 - RNA, 19 nt, Artificial Sequence
  Description of Artificial Sequence: Synthetic oligonucleotide
  Sense strand starting at position 949 of SEQ ID NO: 913355
guguuuagacuccauauca

SEQ ID NO: 920793 - RNA, 19 nt, Artificial Sequence
  Description of Artificial Sequence: Synthetic oligonucleotide
  Antisense strand to SEQ ID NO: 920792
ugauauggagucuaaacac

SEQ ID NO: 920794 - RNA, 19 nt, Artificial Sequence
  Description of Artificial Sequence: Synthetic oligonucleotide
  Sense strand starting at position 848 of SEQ ID NO: 913355
aguugaucccaaggagcaa

SEQ ID NO: 920795 - RNA, 19 nt, Artificial Sequence
  Description of Artificial Sequence: Synthetic oligonucleotide
  Antisense strand to SEQ ID NO: 920794
uugcuccuugggaucaacu

SEQ ID NO: 920796 - RNA, 19 nt, Artificial Sequence
  Description of Artificial Sequence: Synthetic oligonucleotide
  Sense strand starting at position 894 of SEQ ID NO: 913355
guguguaucuagacucgug

SEQ ID NO: 920797 - RNA, 19 nt, Artificial Sequence
  Description of Artificial Sequence: Synthetic oligonucleotide
  Antisense strand to SEQ ID NO: 920796
cacgagucuagauacacac

SEQ ID NO: 920798 - RNA, 19 nt, Artificial Sequence
  Description of Artificial Sequence: Synthetic oligonucleotide
  Sense strand starting at position 394 of SEQ ID NO: 913355
auguaagaguuacccaauu

SEQ ID NO: 920799 - RNA, 19 nt, Artificial Sequence
  Description of Artificial Sequence: Synthetic oligonucleotide
  Antisense strand to SEQ ID NO: 920798
aauuggguaacucuuacau

SEQ ID NO: 920800 - RNA, 19 nt, Artificial Sequence
  Description of Artificial Sequence: Synthetic oligonucleotide
  Sense strand starting at position 2409 of SEQ ID NO: 913355
ccuagucaucuggagguuu

SEQ ID NO: 920801 - RNA, 19 nt, Artificial Sequence
  Description of Artificial Sequence: Synthetic oligonucleotide
  Antisense strand to SEQ ID NO: 920800
aaaccuccagaugacuagg

SEQ ID NO: 920802 - RNA, 19 nt, Artificial Sequence
  Description of Artificial Sequence: Synthetic oligonucleotide
  Sense strand starting at position 727 of SEQ ID NO: 913355
accuacggucacugaaaua

SEQ ID NO: 920803 - RNA, 19 nt, Artificial Sequence
  Description of Artificial Sequence: Synthetic oligonucleotide
  Antisense strand to SEQ ID NO: 920802
uauuucagugaccguaggu

SEQ ID NO: 920804 - RNA, 19 nt, Artificial Sequence
  Description of Artificial Sequence: Synthetic oligonucleotide
  Sense strand starting at position 3392 of SEQ ID NO: 913355
agggauggcugaaaugguu

SEQ ID NO: 920805 - RNA, 19 nt, Artificial Sequence
  Description of Artificial Sequence: Synthetic oligonucleotide
  Antisense strand to SEQ ID NO: 920804
aaccauuucagccaucccu

SEQ ID NO: 920806 - RNA, 19 nt, Artificial Sequence
  Description of Artificial Sequence: Synthetic oligonucleotide
  Sense strand starting at position 295 of SEQ ID NO: 913355
uguggagaguuacccaauu

SEQ ID NO: 920807 - RNA, 19 nt, Artificial Sequence
  Description of Artificial Sequence: Synthetic oligonucleotide
  Antisense strand to SEQ ID NO: 920806
aauuggguaacucuccaca

SEQ ID NO: 920808 - RNA, 19 nt, Artificial Sequence
  Description of Artificial Sequence: Synthetic oligonucleotide
  Sense strand starting at position 2457 of SEQ ID NO: 913355
aucaaaggcaguuguaaga

SEQ ID NO: 920809 - RNA, 19 nt, Artificial Sequence
  Description of Artificial Sequence: Synthetic oligonucleotide
  Antisense strand to SEQ ID NO: 920808
ucuuacaacugccuuugau

SEQ ID NO: 920810 - RNA, 19 nt, Artificial Sequence
  Description of Artificial Sequence: Synthetic oligonucleotide
  Sense strand starting at position 236 of SEQ ID NO: 913355
gaacaaggccuuugaaguu

SEQ ID NO: 920811 - RNA, 19 nt, Artificial Sequence
  Description of Artificial Sequence: Synthetic oligonucleotide
  Antisense strand to SEQ ID NO: 920810
aacuucaaaggccuuguuc

SEQ ID NO: 920812 - RNA, 19 nt, Artificial Sequence
  Description of Artificial Sequence: Synthetic oligonucleotide
  Sense strand starting at position 726 of SEQ ID NO: 913355
caccuacggucacugaaau

SEQ ID NO: 920813 - RNA, 19 nt, Artificial Sequence
  Description of Artificial Sequence: Synthetic oligonucleotide
  Antisense strand to SEQ ID NO: 920812
auuucagugaccguaggug

SEQ ID NO: 920814 - RNA, 19 nt, Artificial Sequence
  Description of Artificial Sequence: Synthetic oligonucleotide
  Sense strand starting at position 3882 of SEQ ID NO: 913355
gauauaugcagagguguga

SEQ ID NO: 920815 - RNA, 19 nt, Artificial Sequence
  Description of Artificial Sequence: Synthetic oligonucleotide
  Antisense strand to SEQ ID NO: 920814
ucacaccucugcauauauc

SEQ ID NO: 920816 - RNA, 19 nt, Artificial Sequence
  Description of Artificial Sequence: Synthetic oligonucleotide
  Sense strand starting at position 3009 of SEQ ID NO: 913355
gugcuccaccuuuaugaau

SEQ ID NO: 920817 - RNA, 19 nt, Artificial Sequence
  Description of Artificial Sequence: Synthetic oligonucleotide
  Antisense strand to SEQ ID NO: 920816
auucauaaagguggagcac

SEQ ID NO: 920818 - RNA, 19 nt, Artificial Sequence
  Description of Artificial Sequence: Synthetic oligonucleotide
  Sense strand starting at position 3003 of SEQ ID NO: 913355
ucaagagugcuccaccuuu

SEQ ID NO: 920819 - RNA, 19 nt, Artificial Sequence
  Description of Artificial Sequence: Synthetic oligonucleotide
  Antisense strand to SEQ ID NO: 920818
aaagguggagcacucuuga

SEQ ID NO: 920820 - RNA, 19 nt, Artificial Sequence
  Description of Artificial Sequence: Synthetic oligonucleotide
  Sense strand starting at position 383 of SEQ ID NO: 913355
guuaguuacauauguaaga

SEQ ID NO: 920821 - RNA, 19 nt, Artificial Sequence
  Description of Artificial Sequence: Synthetic oligonucleotide
  Antisense strand to SEQ ID NO: 920820
ucuuacauauguaacuaac

SEQ ID NO: 920822 - RNA, 19 nt, Artificial Sequence
  Description of Artificial Sequence: Synthetic oligonucleotide
  Sense strand starting at position 493 of SEQ ID NO: 913355
gagagaaugcguggaaagu

SEQ ID NO: 920823 - RNA, 19 nt, Artificial Sequence
  Description of Artificial Sequence: Synthetic oligonucleotide
  Antisense strand to SEQ ID NO: 920822
acuuuccacgcauucucuc

SEQ ID NO: 920824 - RNA, 19 nt, Artificial Sequence
  Description of Artificial Sequence: Synthetic oligonucleotide
  Sense strand starting at position 909 of SEQ ID NO: 913355
cgugucuagauuuguguga

SEQ ID NO: 920825 - RNA, 19 nt, Artificial Sequence
  Description of Artificial Sequence: Synthetic oligonucleotide
  Antisense strand to SEQ ID NO: 920824
ucacacaaaucuagacacg

SEQ ID NO: 920826 - RNA, 19 nt, Artificial Sequence
  Description of Artificial Sequence: Synthetic oligonucleotide
  Sense strand starting at position 245 of SEQ ID NO: 913355
cuuugaaguuggucagauu

SEQ ID NO: 920827 - RNA, 19 nt, Artificial Sequence
  Description of Artificial Sequence: Synthetic oligonucleotide
  Antisense strand to SEQ ID NO: 920826
aaucugaccaacuucaaag

SEQ ID NO: 920828 - RNA, 19 nt, Artificial Sequence
  Description of Artificial Sequence: Synthetic oligonucleotide
  Sense strand starting at position 3797 of SEQ ID NO: 913355
ugugcuuugaagcacuaga

SEQ ID NO: 920829 - RNA, 19 nt, Artificial Sequence
  Description of Artificial Sequence: Synthetic oligonucleotide
  Antisense strand to SEQ ID NO: 920828
ucuagugcuucaaagcaca

SEQ ID NO: 920830 - RNA, 19 nt, Artificial Sequence
  Description of Artificial Sequence: Synthetic oligonucleotide
  Sense strand starting at position 504 of SEQ ID NO: 913355
uggaaagugcuuggguaca

SEQ ID NO: 920831 - RNA, 19 nt, Artificial Sequence
  Description of Artificial Sequence: Synthetic oligonucleotide
  Antisense strand to SEQ ID NO: 920830
uguacccaagcacuuucca

SEQ ID NO: 920832 - RNA, 19 nt, Artificial Sequence
  Description of Artificial Sequence: Synthetic oligonucleotide
  Sense strand starting at position 2839 of SEQ ID NO: 913355
ucugucgucccugauaaca

SEQ ID NO: 920833 - RNA, 19 nt, Artificial Sequence
  Description of Artificial Sequence: Synthetic oligonucleotide
  Antisense strand to SEQ ID NO: 920832
uguuaucagggacgacaga

SEQ ID NO: 920834 - RNA, 19 nt, Artificial Sequence
  Description of Artificial Sequence: Synthetic oligonucleotide
  Sense strand starting at position 2259 of SEQ ID NO: 913355
cgggcacaccucggaaaua

SEQ ID NO: 920835 - RNA, 19 nt, Artificial Sequence
  Description of Artificial Sequence: Synthetic oligonucleotide
  Antisense strand to SEQ ID NO: 920834
uauuuccgaggugugcccg

SEQ ID NO: 920836 - RNA, 19 nt, Artificial Sequence
  Description of Artificial Sequence: Synthetic oligonucleotide
  Sense strand starting at position 3399 of SEQ ID NO: 913355
gcugaaaugguuugacuuu

SEQ ID NO: 920837 - RNA, 19 nt, Artificial Sequence
  Description of Artificial Sequence: Synthetic oligonucleotide
  Antisense strand to SEQ ID NO: 920836
aaagucaaaccauuucagc

SEQ ID NO: 920838 - RNA, 19 nt, Artificial Sequence
  Description of Artificial Sequence: Synthetic oligonucleotide
  Sense strand starting at position 1111 of SEQ ID NO: 913355
guauauggcucaccacuua

SEQ ID NO: 920839 - RNA, 19 nt, Artificial Sequence
  Description of Artificial Sequence: Synthetic oligonucleotide
  Antisense strand to SEQ ID NO: 920838
uaaguggugagccauauac

SEQ ID NO: 920840 - RNA, 19 nt, Artificial Sequence
  Description of Artificial Sequence: Synthetic oligonucleotide
  Sense strand starting at position 3147 of SEQ ID NO: 913356
uuuauauauccuggauaga

SEQ ID NO: 920841 - RNA, 19 nt, Artificial Sequence
  Description of Artificial Sequence: Synthetic oligonucleotide
  Antisense strand to SEQ ID NO: 920840
ucuauccaggauauauaaa

SEQ ID NO: 920842 - RNA, 19 nt, Artificial Sequence
  Description of Artificial Sequence: Synthetic oligonucleotide
  Sense strand starting at position 1210 of SEQ ID NO: 913356
uggucaugucuggacagaa

SEQ ID NO: 920843 - RNA, 19 nt, Artificial Sequence
  Description of Artificial Sequence: Synthetic oligonucleotide
  Antisense strand to SEQ ID NO: 920842
uucuguccagacaugacca

SEQ ID NO: 920844 - RNA, 19 nt, Artificial Sequence
  Description of Artificial Sequence: Synthetic oligonucleotide
  Sense strand starting at position 2853 of SEQ ID NO: 913356
cguguauugaucucggcua

SEQ ID NO: 920845 - RNA, 19 nt, Artificial Sequence
  Description of Artificial Sequence: Synthetic oligonucleotide
  Antisense strand to SEQ ID NO: 920844
uagccgagaucaauacacg

SEQ ID NO: 920846 - RNA, 19 nt, Artificial Sequence
  Description of Artificial Sequence: Synthetic oligonucleotide
  Sense strand starting at position 821 of SEQ ID NO: 913356
auuaaaggcucagugagaa

SEQ ID NO: 920847 - RNA, 19 nt, Artificial Sequence
  Description of Artificial Sequence: Synthetic oligonucleotide
  Antisense strand to SEQ ID NO: 920846
uucucacugagccuuuaau

SEQ ID NO: 920848 - RNA, 19 nt, Artificial Sequence
  Description of Artificial Sequence: Synthetic oligonucleotide
  Sense strand starting at position 3722 of SEQ ID NO: 913356
uauucuggauccuuugaga

SEQ ID NO: 920849 - RNA, 19 nt, Artificial Sequence
  Description of Artificial Sequence: Synthetic oligonucleotide
  Antisense strand to SEQ ID NO: 920848
ucucaaaggauccagaaua

SEQ ID NO: 920850 - RNA, 19 nt, Artificial Sequence
  Description of Artificial Sequence: Synthetic oligonucleotide
  Sense strand starting at position 670 of SEQ ID NO: 913356
cuugguaaagucuaaaucu

SEQ ID NO: 920851 - RNA, 19 nt, Artificial Sequence
  Description of Artificial Sequence: Synthetic oligonucleotide
  Antisense strand to SEQ ID NO: 920850
agauuuagacuuuaccaag

SEQ ID NO: 920852 - RNA, 19 nt, Artificial Sequence
  Description of Artificial Sequence: Synthetic oligonucleotide
  Sense strand starting at position 3643 of SEQ ID NO: 913356
cgcagugcuauaguaaguu

SEQ ID NO: 920853 - RNA, 19 nt, Artificial Sequence
  Description of Artificial Sequence: Synthetic oligonucleotide
  Antisense strand to SEQ ID NO: 920852
aacuuacuauagcacugcg

SEQ ID NO: 920854 - RNA, 19 nt, Artificial Sequence
  Description of Artificial Sequence: Synthetic oligonucleotide
  Sense strand starting at position 3583 of SEQ ID NO: 913356
uugauucuaguccacugau

SEQ ID NO: 920855 - RNA, 19 nt, Artificial Sequence
  Description of Artificial Sequence: Synthetic oligonucleotide
  Antisense strand to SEQ ID NO: 920854
aucaguggacuagaaucaa

SEQ ID NO: 920856 - RNA, 19 nt, Artificial Sequence
  Description of Artificial Sequence: Synthetic oligonucleotide
  Sense strand starting at position 599 of SEQ ID NO: 913356
gguuguauuuguccauuau

SEQ ID NO: 920857 - RNA, 19 nt, Artificial Sequence
  Description of Artificial Sequence: Synthetic oligonucleotide
  Antisense strand to SEQ ID NO: 920856
auaauggacaaauacaacc

SEQ ID NO: 920858 - RNA, 19 nt, Artificial Sequence
  Description of Artificial Sequence: Synthetic oligonucleotide
  Sense strand starting at position 3422 of SEQ ID NO: 913356
uaugcauggagcgauagaa

SEQ ID NO: 920859 - RNA, 19 nt, Artificial Sequence
  Description of Artificial Sequence: Synthetic oligonucleotide
  Antisense strand to SEQ ID NO: 920858
uucuaucgcuccaugcaua

SEQ ID NO: 920860 - RNA, 19 nt, Artificial Sequence
  Description of Artificial Sequence: Synthetic oligonucleotide
  Sense strand starting at position 3835 of SEQ ID NO: 913356
ggaauauugucacuuuaac

SEQ ID NO: 920861 - RNA, 19 nt, Artificial Sequence
  Description of Artificial Sequence: Synthetic oligonucleotide
  Antisense strand to SEQ ID NO: 920860
guuaaagugacaauauucc

SEQ ID NO: 920862 - RNA, 19 nt, Artificial Sequence
  Description of Artificial Sequence: Synthetic oligonucleotide
  Sense strand starting at position 3163 of SEQ ID NO: 913356
agaagucucuaaucggaua

SEQ ID NO: 920863 - RNA, 19 nt, Artificial Sequence
  Description of Artificial Sequence: Synthetic oligonucleotide
  Antisense strand to SEQ ID NO: 920862
uauccgauuagagacuucu

SEQ ID NO: 920864 - RNA, 19 nt, Artificial Sequence
  Description of Artificial Sequence: Synthetic oligonucleotide
  Sense strand starting at position 3593 of SEQ ID NO: 913356
uccacugaucuguaaugua

SEQ ID NO: 920865 - RNA, 19 nt, Artificial Sequence
  Description of Artificial Sequence: Synthetic oligonucleotide
  Antisense strand to SEQ ID NO: 920864
uacauuacagaucagugga

SEQ ID NO: 920866 - RNA, 19 nt, Artificial Sequence
  Description of Artificial Sequence: Synthetic oligonucleotide
  Sense strand starting at position 3359 of SEQ ID NO: 913356
ccucuaggauuauuauagu

SEQ ID NO: 920867 - RNA, 19 nt, Artificial Sequence
  Description of Artificial Sequence: Synthetic oligonucleotide
  Antisense strand to SEQ ID NO: 920866
acuauaauaauccuagagg

SEQ ID NO: 920868 - RNA, 19 nt, Artificial Sequence
  Description of Artificial Sequence: Synthetic oligonucleotide
  Sense strand starting at position 3090 of SEQ ID NO: 913356
augcuugacucuuuggaaa

SEQ ID NO: 920869 - RNA, 19 nt, Artificial Sequence
  Description of Artificial Sequence: Synthetic oligonucleotide
  Antisense strand to SEQ ID NO: 920868
uuuccaaagagucaagcau

SEQ ID NO: 920870 - RNA, 19 nt, Artificial Sequence
  Description of Artificial Sequence: Synthetic oligonucleotide
  Sense strand starting at position 3575 of SEQ ID NO: 913356
ucuggacauugauucuagu

SEQ ID NO: 920871 - RNA, 19 nt, Artificial Sequence
  Description of Artificial Sequence: Synthetic oligonucleotide
  Antisense strand to SEQ ID NO: 920870
acuagaaucaauguccaga

SEQ ID NO: 920872 - RNA, 19 nt, Artificial Sequence
  Description of Artificial Sequence: Synthetic oligonucleotide
  Sense strand starting at position 137 of SEQ ID NO: 913356
ccuuaugauguguggagga

SEQ ID NO: 920873 - RNA, 19 nt, Artificial Sequence
  Description of Artificial Sequence: Synthetic oligonucleotide
  Antisense strand to SEQ ID NO: 920872
uccuccacacaucauaagg

SEQ ID NO: 920874 - RNA, 19 nt, Artificial Sequence
  Description of Artificial Sequence: Synthetic oligonucleotide
  Sense strand starting at position 1303 of SEQ ID NO: 913356
uucugugagcaugacucau

SEQ ID NO: 920875 - RNA, 19 nt, Artificial Sequence
  Description of Artificial Sequence: Synthetic oligonucleotide
  Antisense strand to SEQ ID NO: 920874
augagucaugcucacagaa

SEQ ID NO: 920876 - RNA, 19 nt, Artificial Sequence
  Description of Artificial Sequence: Synthetic oligonucleotide
  Sense strand starting at position 2852 of SEQ ID NO: 913356
gcguguauugaucucggcu

SEQ ID NO: 920877 - RNA, 19 nt, Artificial Sequence
  Description of Artificial Sequence: Synthetic oligonucleotide
  Antisense strand to SEQ ID NO: 920876
agccgagaucaauacacgc

SEQ ID NO: 920878 - RNA, 19 nt, Artificial Sequence
  Description of Artificial Sequence: Synthetic oligonucleotide
  Sense strand starting at position 590 of SEQ ID NO: 913356
gaacuugccgguuguauuu

SEQ ID NO: 920879 - RNA, 19 nt, Artificial Sequence
  Description of Artificial Sequence: Synthetic oligonucleotide
  Antisense strand to SEQ ID NO: 920878
aaauacaaccggcaaguuc

SEQ ID NO: 920880 - RNA, 19 nt, Artificial Sequence
  Description of Artificial Sequence: Synthetic oligonucleotide
  Sense strand starting at position 1300 of SEQ ID NO: 913356
gaguucugugagcaugacu

SEQ ID NO: 920881 - RNA, 19 nt, Artificial Sequence
  Description of Artificial Sequence: Synthetic oligonucleotide
  Antisense strand to SEQ ID NO: 920880
agucaugcucacagaacuc

SEQ ID NO: 920882 - RNA, 19 nt, Artificial Sequence
  Description of Artificial Sequence: Synthetic oligonucleotide
  Sense strand starting at position 3600 of SEQ ID NO: 913356
aucuguaauguacaugcua

SEQ ID NO: 920883 - RNA, 19 nt, Artificial Sequence
  Description of Artificial Sequence: Synthetic oligonucleotide
  Antisense strand to SEQ ID NO: 920882
uagcauguacauuacagau

SEQ ID NO: 920884 - RNA, 19 nt, Artificial Sequence
  Description of Artificial Sequence: Synthetic oligonucleotide
  Sense strand starting at position 3018 of SEQ ID NO: 913356
ggcaaauggcuuugaacau

SEQ ID NO: 920885 - RNA, 19 nt, Artificial Sequence
  Description of Artificial Sequence: Synthetic oligonucleotide
  Antisense strand to SEQ ID NO: 920884
auguucaaagccauuugcc

SEQ ID NO: 920886 - RNA, 19 nt, Artificial Sequence
  Description of Artificial Sequence: Synthetic oligonucleotide
  Sense strand starting at position 2842 of SEQ ID NO: 913356
gcacacagucgcguguauu

SEQ ID NO: 920887 - RNA, 19 nt, Artificial Sequence
  Description of Artificial Sequence: Synthetic oligonucleotide
  Antisense strand to SEQ ID NO: 920886
aauacacgcgacugugugc

SEQ ID NO: 920888 - RNA, 19 nt, Artificial Sequence
  Description of Artificial Sequence: Synthetic oligonucleotide
  Sense strand starting at position 247 of SEQ ID NO: 913356
aaaugaaggugcgucagaa

SEQ ID NO: 920889 - RNA, 19 nt, Artificial Sequence
  Description of Artificial Sequence: Synthetic oligonucleotide
  Antisense strand to SEQ ID NO: 920888
uucugacgcaccuucauuu

SEQ ID NO: 920890 - RNA, 19 nt, Artificial Sequence
  Description of Artificial Sequence: Synthetic oligonucleotide
  Sense strand starting at position 597 of SEQ ID NO: 913356
ccgguuguauuuguccauu

SEQ ID NO: 920891 - RNA, 19 nt, Artificial Sequence
  Description of Artificial Sequence: Synthetic oligonucleotide
  Antisense strand to SEQ ID NO: 920890
aauggacaaauacaaccgg

SEQ ID NO: 920892 - RNA, 19 nt, Artificial Sequence
  Description of Artificial Sequence: Synthetic oligonucleotide
  Sense strand starting at position 3589 of SEQ ID NO: 913356
cuaguccacugaucuguaa

SEQ ID NO: 920893 - RNA, 19 nt, Artificial Sequence
  Description of Artificial Sequence: Synthetic oligonucleotide
  Antisense strand to SEQ ID NO: 920892
uuacagaucaguggacuag

SEQ ID NO: 920894 - RNA, 19 nt, Artificial Sequence
  Description of Artificial Sequence: Synthetic oligonucleotide
  Sense strand starting at position 3048 of SEQ ID NO: 913356
cuuguuggauaucuguaua

SEQ ID NO: 920895 - RNA, 19 nt, Artificial Sequence
  Description of Artificial Sequence: Synthetic oligonucleotide
  Antisense strand to SEQ ID NO: 920894
uauacagauauccaacaag

SEQ ID NO: 920896 - RNA, 19 nt, Artificial Sequence
  Description of Artificial Sequence: Synthetic oligonucleotide
  Sense strand starting at position 3146 of SEQ ID NO: 913356
auuuauauauccuggauag

SEQ ID NO: 920897 - RNA, 19 nt, Artificial Sequence
  Description of Artificial Sequence: Synthetic oligonucleotide
  Antisense strand to SEQ ID NO: 920896
cuauccaggauauauaaau

SEQ ID NO: 920898 - RNA, 19 nt, Artificial Sequence
  Description of Artificial Sequence: Synthetic oligonucleotide
  Sense strand starting at position 2858 of SEQ ID NO: 913356
auugaucucggcuaaguuu

SEQ ID NO: 920899 - RNA, 19 nt, Artificial Sequence
  Description of Artificial Sequence: Synthetic oligonucleotide
  Antisense strand to SEQ ID NO: 920898
aaacuuagccgagaucaau

SEQ ID NO: 920900 - RNA, 19 nt, Artificial Sequence
  Description of Artificial Sequence: Synthetic oligonucleotide
  Sense strand starting at position 1299 of SEQ ID NO: 913356
agaguucugugagcaugac

SEQ ID NO: 920901 - RNA, 19 nt, Artificial Sequence
  Description of Artificial Sequence: Synthetic oligonucleotide
  Antisense strand to SEQ ID NO: 920900
gucaugcucacagaacucu

SEQ ID NO: 920902 - RNA, 19 nt, Artificial Sequence
  Description of Artificial Sequence: Synthetic oligonucleotide
  Sense strand starting at position 3808 of SEQ ID NO: 913356
uugaguugaagcuguagau

SEQ ID NO: 920903 - RNA, 19 nt, Artificial Sequence
  Description of Artificial Sequence: Synthetic oligonucleotide
  Antisense strand to SEQ ID NO: 920902
aucuacagcuucaacucaa

SEQ ID NO: 920904 - RNA, 19 nt, Artificial Sequence
  Description of Artificial Sequence: Synthetic oligonucleotide
  Sense strand starting at position 2861 of SEQ ID NO: 913356
gaucucggcuaaguuuaaa

SEQ ID NO: 920905 - RNA, 19 nt, Artificial Sequence
  Description of Artificial Sequence: Synthetic oligonucleotide
  Antisense strand to SEQ ID NO: 920904
uuuaaacuuagccgagauc

SEQ ID NO: 920906 - RNA, 19 nt, Artificial Sequence
  Description of Artificial Sequence: Synthetic oligonucleotide
  Sense strand starting at position 662 of SEQ ID NO: 913356
gaaggcagcuugguaaagu

SEQ ID NO: 920907 - RNA, 19 nt, Artificial Sequence
  Description of Artificial Sequence: Synthetic oligonucleotide
  Antisense strand to SEQ ID NO: 920906
acuuuaccaagcugccuuc

SEQ ID NO: 920908 - RNA, 19 nt, Artificial Sequence
  Description of Artificial Sequence: Synthetic oligonucleotide
  Sense strand starting at position 748 of SEQ ID NO: 913356
gcaguaugucugggacuau

SEQ ID NO: 920909 - RNA, 19 nt, Artificial Sequence
  Description of Artificial Sequence: Synthetic oligonucleotide
  Antisense strand to SEQ ID NO: 920908
auagucccagacauacugc

SEQ ID NO: 920910 - RNA, 19 nt, Artificial Sequence
  Description of Artificial Sequence: Synthetic oligonucleotide
  Sense strand starting at position 3960 of SEQ ID NO: 913356
gguacaaucucggcacacu

SEQ ID NO: 920911 - RNA, 19 nt, Artificial Sequence
  Description of Artificial Sequence: Synthetic oligonucleotide
  Antisense strand to SEQ ID NO: 920910
agugugccgagauuguacc

SEQ ID NO: 920912 - RNA, 19 nt, Artificial Sequence
  Description of Artificial Sequence: Synthetic oligonucleotide
  Sense strand starting at position 596 of SEQ ID NO: 913356
gccgguuguauuuguccau

SEQ ID NO: 920913 - RNA, 19 nt, Artificial Sequence
  Description of Artificial Sequence: Synthetic oligonucleotide
  Antisense strand to SEQ ID NO: 920912
auggacaaauacaaccggc

SEQ ID NO: 920914 - RNA, 19 nt, Artificial Sequence
  Description of Artificial Sequence: Synthetic oligonucleotide
  Sense strand starting at position 3592 of SEQ ID NO: 913356
guccacugaucuguaaugu

SEQ ID NO: 920915 - RNA, 19 nt, Artificial Sequence
  Description of Artificial Sequence: Synthetic oligonucleotide
  Antisense strand to SEQ ID NO: 920914
acauuacagaucaguggac

SEQ ID NO: 920916 - RNA, 19 nt, Artificial Sequence
  Description of Artificial Sequence: Synthetic oligonucleotide
  Sense strand starting at position 360 of SEQ ID NO: 913356
acugaagguugcucuugua

SEQ ID NO: 920917 - RNA, 19 nt, Artificial Sequence
  Description of Artificial Sequence: Synthetic oligonucleotide
  Antisense strand to SEQ ID NO: 920916
uacaagagcaaccuucagu

SEQ ID NO: 920918 - RNA, 19 nt, Artificial Sequence
  Description of Artificial Sequence: Synthetic oligonucleotide
  Sense strand starting at position 2978 of SEQ ID NO: 913356
ccuguagcaucuccucaua

SEQ ID NO: 920919 - RNA, 19 nt, Artificial Sequence
  Description of Artificial Sequence: Synthetic oligonucleotide
  Antisense strand to SEQ ID NO: 920918
uaugaggagaugcuacagg

SEQ ID NO: 920920 - RNA, 19 nt, Artificial Sequence
  Description of Artificial Sequence: Synthetic oligonucleotide
  Sense strand starting at position 237 of SEQ ID NO: 913357
aggugugacaaagauuagu

SEQ ID NO: 920921 - RNA, 19 nt, Artificial Sequence
  Description of Artificial Sequence: Synthetic oligonucleotide
  Antisense strand to SEQ ID NO: 920920
acuaaucuuugucacaccu

SEQ ID NO: 920922 - RNA, 19 nt, Artificial Sequence
  Description of Artificial Sequence: Synthetic oligonucleotide
  Sense strand starting at position 1025 of SEQ ID NO: 913357
aguauuggaucauuaugga

SEQ ID NO: 920923 - RNA, 19 nt, Artificial Sequence
  Description of Artificial Sequence: Synthetic oligonucleotide
  Antisense strand to SEQ ID NO: 920922
uccauaaugauccaauacu

SEQ ID NO: 920924 - RNA, 19 nt, Artificial Sequence
  Description of Artificial Sequence: Synthetic oligonucleotide
  Sense strand starting at position 2975 of SEQ ID NO: 913357
uaggaauauugguugaauu

SEQ ID NO: 920925 - RNA, 19 nt, Artificial Sequence
  Description of Artificial Sequence: Synthetic oligonucleotide
  Antisense strand to SEQ ID NO: 920924
aauucaaccaauauuccua

SEQ ID NO: 920926 - RNA, 19 nt, Artificial Sequence
  Description of Artificial Sequence: Synthetic oligonucleotide
  Sense strand starting at position 988 of SEQ ID NO: 913357
aaaggucaugcaggagaua

SEQ ID NO: 920927 - RNA, 19 nt, Artificial Sequence
  Description of Artificial Sequence: Synthetic oligonucleotide
  Antisense strand to SEQ ID NO: 920926
uaucuccugcaugaccuuu

SEQ ID NO: 920928 - RNA, 19 nt, Artificial Sequence
  Description of Artificial Sequence: Synthetic oligonucleotide
  Sense strand starting at position 3264 of SEQ ID NO: 913357
gaugguuaaguguauuaaa

SEQ ID NO: 920929 - RNA, 19 nt, Artificial Sequence
  Description of Artificial Sequence: Synthetic oligonucleotide
  Antisense strand to SEQ ID NO: 920928
uuuaauacacuuaaccauc

SEQ ID NO: 920930 - RNA, 19 nt, Artificial Sequence
  Description of Artificial Sequence: Synthetic oligonucleotide
  Sense strand starting at position 1254 of SEQ ID NO: 913357
agcuaagaugcuuaaacau

SEQ ID NO: 920931 - RNA, 19 nt, Artificial Sequence
  Description of Artificial Sequence: Synthetic oligonucleotide
  Antisense strand to SEQ ID NO: 920930
auguuuaagcaucuuagcu

SEQ ID NO: 920932 - RNA, 19 nt, Artificial Sequence
  Description of Artificial Sequence: Synthetic oligonucleotide
  Sense strand starting at position 3144 of SEQ ID NO: 913357
gucugagaaccauauuggu

SEQ ID NO: 920933 - RNA, 19 nt, Artificial Sequence
  Description of Artificial Sequence: Synthetic oligonucleotide
  Antisense strand to SEQ ID NO: 920932
accaauaugguucucagac

SEQ ID NO: 920934 - RNA, 19 nt, Artificial Sequence
  Description of Artificial Sequence: Synthetic oligonucleotide
  Sense strand starting at position 2964 of SEQ ID NO: 913357
gcuguacgugguaggaaua

SEQ ID NO: 920935 - RNA, 19 nt, Artificial Sequence
  Description of Artificial Sequence: Synthetic oligonucleotide
  Antisense strand to SEQ ID NO: 920934
uauuccuaccacguacagc

SEQ ID NO: 920936 - RNA, 19 nt, Artificial Sequence
  Description of Artificial Sequence: Synthetic oligonucleotide
  Sense strand starting at position 3652 of SEQ ID NO: 913357
uuagauaaccacugaaguu

SEQ ID NO: 920937 - RNA, 19 nt, Artificial Sequence
  Description of Artificial Sequence: Synthetic oligonucleotide
  Antisense strand to SEQ ID NO: 920936
aacuucagugguuaucuaa

SEQ ID NO: 920938 - RNA, 19 nt, Artificial Sequence
  Description of Artificial Sequence: Synthetic oligonucleotide
  Sense strand starting at position 3632 of SEQ ID NO: 913357
aagagauauugugcaaaug

SEQ ID NO: 920939 - RNA, 19 nt, Artificial Sequence
  Description of Artificial Sequence: Synthetic oligonucleotide
  Antisense strand to SEQ ID NO: 920938
cauuugcacaauaucucuu

SEQ ID NO: 920940 - RNA, 19 nt, Artificial Sequence
  Description of Artificial Sequence: Synthetic oligonucleotide
  Sense strand starting at position 2526 of SEQ ID NO: 913357
uguuguuauuucucacgaa

SEQ ID NO: 920941 - RNA, 19 nt, Artificial Sequence
  Description of Artificial Sequence: Synthetic oligonucleotide
  Antisense strand to SEQ ID NO: 920940
uucgugagaaauaacaaca

SEQ ID NO: 920942 - RNA, 19 nt, Artificial Sequence
  Description of Artificial Sequence: Synthetic oligonucleotide
  Sense strand starting at position 3741 of SEQ ID NO: 913357
uguuuauauacgggcauuu

SEQ ID NO: 920943 - RNA, 19 nt, Artificial Sequence
  Description of Artificial Sequence: Synthetic oligonucleotide
  Antisense strand to SEQ ID NO: 920942
aaaugcccguauauaaaca

SEQ ID NO: 920944 - RNA, 19 nt, Artificial Sequence
  Description of Artificial Sequence: Synthetic oligonucleotide
  Sense strand starting at position 3641 of SEQ ID NO: 913357
ugugcaaaugguuagauaa

SEQ ID NO: 920945 - RNA, 19 nt, Artificial Sequence
  Description of Artificial Sequence: Synthetic oligonucleotide
  Antisense strand to SEQ ID NO: 920944
uuaucuaaccauuugcaca

SEQ ID NO: 920946 - RNA, 19 nt, Artificial Sequence
  Description of Artificial Sequence: Synthetic oligonucleotide
  Sense strand starting at position 2974 of SEQ ID NO: 913357
guaggaauauugguugaau

SEQ ID NO: 920947 - RNA, 19 nt, Artificial Sequence
  Description of Artificial Sequence: Synthetic oligonucleotide
  Antisense strand to SEQ ID NO: 920946
auucaaccaauauuccuac

SEQ ID NO: 920948 - RNA, 19 nt, Artificial Sequence
  Description of Artificial Sequence: Synthetic oligonucleotide
  Sense strand starting at position 1224 of SEQ ID NO: 913357
augcuuuguggacacagau

SEQ ID NO: 920949 - RNA, 19 nt, Artificial Sequence
  Description of Artificial Sequence: Synthetic oligonucleotide
  Antisense strand to SEQ ID NO: 920948
aucuguguccacaaagcau

SEQ ID NO: 920950 - RNA, 19 nt, Artificial Sequence
  Description of Artificial Sequence: Synthetic oligonucleotide
  Sense strand starting at position 324 of SEQ ID NO: 913357
gucauuaacggagaguuac

SEQ ID NO: 920951 - RNA, 19 nt, Artificial Sequence
  Description of Artificial Sequence: Synthetic oligonucleotide
  Antisense strand to SEQ ID NO: 920950
guaacucuccguuaaugac

SEQ ID NO: 920952 - RNA, 19 nt, Artificial Sequence
  Description of Artificial Sequence: Synthetic oligonucleotide
  Sense strand starting at position 2271 of SEQ ID NO: 913357
ccauguaggacagguagau

SEQ ID NO: 920953 - RNA, 19 nt, Artificial Sequence
  Description of Artificial Sequence: Synthetic oligonucleotide
  Antisense strand to SEQ ID NO: 920952
aucuaccuguccuacaugg

SEQ ID NO: 920954 - RNA, 19 nt, Artificial Sequence
  Description of Artificial Sequence: Synthetic oligonucleotide
  Sense strand starting at position 1152 of SEQ ID NO: 913357
ugaaguauccugggacuug

SEQ ID NO: 920955 - RNA, 19 nt, Artificial Sequence
  Description of Artificial Sequence: Synthetic oligonucleotide
  Antisense strand to SEQ ID NO: 920954
caagucccaggauacuuca

SEQ ID NO: 920956 - RNA, 19 nt, Artificial Sequence
  Description of Artificial Sequence: Synthetic oligonucleotide
  Sense strand starting at position 3149 of SEQ ID NO: 913357
agaaccauauugguuaagu

SEQ ID NO: 920957 - RNA, 19 nt, Artificial Sequence
  Description of Artificial Sequence: Synthetic oligonucleotide
  Antisense strand to SEQ ID NO: 920956
acuuaaccaauaugguucu

SEQ ID NO: 920958 - RNA, 19 nt, Artificial Sequence
  Description of Artificial Sequence: Synthetic oligonucleotide
  Sense strand starting at position 3175 of SEQ ID NO: 913357
uuaacugugcuuuaacaga

SEQ ID NO: 920959 - RNA, 19 nt, Artificial Sequence
  Description of Artificial Sequence: Synthetic oligonucleotide
  Antisense strand to SEQ ID NO: 920958
ucuguuaaagcacaguuaa

SEQ ID NO: 920960 - RNA, 19 nt, Artificial Sequence
  Description of Artificial Sequence: Synthetic oligonucleotide
  Sense strand starting at position 279 of SEQ ID NO: 913357
caguuacaggcuuaguaaa

SEQ ID NO: 920961 - RNA, 19 nt, Artificial Sequence
  Description of Artificial Sequence: Synthetic oligonucleotide
  Antisense strand to SEQ ID NO: 920960
uuuacuaagccuguaacug

SEQ ID NO: 920962 - RNA, 19 nt, Artificial Sequence
  Description of Artificial Sequence: Synthetic oligonucleotide
  Sense strand starting at position 3150 of SEQ ID NO: 913357
gaaccauauugguuaaguu

SEQ ID NO: 920963 - RNA, 19 nt, Artificial Sequence
  Description of Artificial Sequence: Synthetic oligonucleotide
  Antisense strand to SEQ ID NO: 920962
aacuuaaccaauaugguuc

SEQ ID NO: 920964 - RNA, 19 nt, Artificial Sequence
  Description of Artificial Sequence: Synthetic oligonucleotide
  Sense strand starting at position 1015 of SEQ ID NO: 913357
cugugucaugaguauugga

SEQ ID NO: 920965 - RNA, 19 nt, Artificial Sequence
  Description of Artificial Sequence: Synthetic oligonucleotide
  Antisense strand to SEQ ID NO: 920964
uccaauacucaugacacag

SEQ ID NO: 920966 - RNA, 19 nt, Artificial Sequence
  Description of Artificial Sequence: Synthetic oligonucleotide
  Sense strand starting at position 3202 of SEQ ID NO: 913357
acugauuguuugguaugaa

SEQ ID NO: 920967 - RNA, 19 nt, Artificial Sequence
  Description of Artificial Sequence: Synthetic oligonucleotide
  Antisense strand to SEQ ID NO: 920966
uucauaccaaacaaucagu

SEQ ID NO: 920968 - RNA, 19 nt, Artificial Sequence
  Description of Artificial Sequence: Synthetic oligonucleotide
  Sense strand starting at position 2999 of SEQ ID NO: 913357
ucagcuagccuguaaggaa

SEQ ID NO: 920969 - RNA, 19 nt, Artificial Sequence
  Description of Artificial Sequence: Synthetic oligonucleotide
  Antisense strand to SEQ ID NO: 920968
uuccuuacaggcuagcuga

SEQ ID NO: 920970 - RNA, 19 nt, Artificial Sequence
  Description of Artificial Sequence: Synthetic oligonucleotide
  Sense strand starting at position 2881 of SEQ ID NO: 913357
uggcuugaacauuagugua

SEQ ID NO: 920971 - RNA, 19 nt, Artificial Sequence
  Description of Artificial Sequence: Synthetic oligonucleotide
  Antisense strand to SEQ ID NO: 920970
uacacuaauguucaagcca

SEQ ID NO: 920972 - RNA, 19 nt, Artificial Sequence
  Description of Artificial Sequence: Synthetic oligonucleotide
  Sense strand starting at position 3199 of SEQ ID NO: 913357
ggaacugauuguuugguau

SEQ ID NO: 920973 - RNA, 19 nt, Artificial Sequence
  Description of Artificial Sequence: Synthetic oligonucleotide
  Antisense strand to SEQ ID NO: 920972
auaccaaacaaucaguucc

SEQ ID NO: 920974 - RNA, 19 nt, Artificial Sequence
  Description of Artificial Sequence: Synthetic oligonucleotide
  Sense strand starting at position 3198 of SEQ ID NO: 913357
uggaacugauuguuuggua

SEQ ID NO: 920975 - RNA, 19 nt, Artificial Sequence
  Description of Artificial Sequence: Synthetic oligonucleotide
  Antisense strand to SEQ ID NO: 920974
uaccaaacaaucaguucca

SEQ ID NO: 920976 - RNA, 19 nt, Artificial Sequence
  Description of Artificial Sequence: Synthetic oligonucleotide
  Sense strand starting at position 2062 of SEQ ID NO: 913357
agaggaauuccggguccuc

SEQ ID NO: 920977 - RNA, 19 nt, Artificial Sequence
  Description of Artificial Sequence: Synthetic oligonucleotide
  Antisense strand to SEQ ID NO: 920976
gaggacccggaauuccucu

SEQ ID NO: 920978 - RNA, 19 nt, Artificial Sequence
  Description of Artificial Sequence: Synthetic oligonucleotide
  Sense strand starting at position 1054 of SEQ ID NO: 913357
ucucauugugcagaucuau

SEQ ID NO: 920979 - RNA, 19 nt, Artificial Sequence
  Description of Artificial Sequence: Synthetic oligonucleotide
  Antisense strand to SEQ ID NO: 920978
auagaucugcacaaugaga

SEQ ID NO: 920980 - RNA, 19 nt, Artificial Sequence
  Description of Artificial Sequence: Synthetic oligonucleotide
  Sense strand starting at position 281 of SEQ ID NO: 913357
guuacaggcuuaguaaaca

SEQ ID NO: 920981 - RNA, 19 nt, Artificial Sequence
  Description of Artificial Sequence: Synthetic oligonucleotide
  Antisense strand to SEQ ID NO: 920980
uguuuacuaagccuguaac

SEQ ID NO: 920982 - RNA, 19 nt, Artificial Sequence
  Description of Artificial Sequence: Synthetic oligonucleotide
  Sense strand starting at position 2219 of SEQ ID NO: 913357
gguuaaguugguuauuccu

SEQ ID NO: 920983 - RNA, 19 nt, Artificial Sequence
  Description of Artificial Sequence: Synthetic oligonucleotide
  Antisense strand to SEQ ID NO: 920982
aggaauaaccaacuuaacc

SEQ ID NO: 920984 - RNA, 19 nt, Artificial Sequence
  Description of Artificial Sequence: Synthetic oligonucleotide
  Sense strand starting at position 3074 of SEQ ID NO: 913357
cagugagcgaugugcauuu

SEQ ID NO: 920985 - RNA, 19 nt, Artificial Sequence
  Description of Artificial Sequence: Synthetic oligonucleotide
  Antisense strand to SEQ ID NO: 920984
aaaugcacaucgcucacug

SEQ ID NO: 920986 - RNA, 19 nt, Artificial Sequence
  Description of Artificial Sequence: Synthetic oligonucleotide
  Sense strand starting at position 3640 of SEQ ID NO: 913357
uugugcaaaugguuagaua

SEQ ID NO: 920987 - RNA, 19 nt, Artificial Sequence
  Description of Artificial Sequence: Synthetic oligonucleotide
  Antisense strand to SEQ ID NO: 920986
uaucuaaccauuugcacaa

SEQ ID NO: 920988 - RNA, 19 nt, Artificial Sequence
  Description of Artificial Sequence: Synthetic oligonucleotide
  Sense strand starting at position 2875 of SEQ ID NO: 913357
ccacguuggcuugaacauu

SEQ ID NO: 920989 - RNA, 19 nt, Artificial Sequence
  Description of Artificial Sequence: Synthetic oligonucleotide
  Antisense strand to SEQ ID NO: 920988
aauguucaagccaacgugg

SEQ ID NO: 920990 - RNA, 19 nt, Artificial Sequence
  Description of Artificial Sequence: Synthetic oligonucleotide
  Sense strand starting at position 2539 of SEQ ID NO: 913357
cacgaaaccucuucuuggu

SEQ ID NO: 920991 - RNA, 19 nt, Artificial Sequence
  Description of Artificial Sequence: Synthetic oligonucleotide
  Antisense strand to SEQ ID NO: 920990
accaagaagagguuucgug

SEQ ID NO: 920992 - RNA, 19 nt, Artificial Sequence
  Description of Artificial Sequence: Synthetic oligonucleotide
  Sense strand starting at position 2469 of SEQ ID NO: 913357
caucgaguauugcuaauga

SEQ ID NO: 920993 - RNA, 19 nt, Artificial Sequence
  Description of Artificial Sequence: Synthetic oligonucleotide
  Antisense strand to SEQ ID NO: 920992
ucauuagcaauacucgaug

SEQ ID NO: 920994 - RNA, 19 nt, Artificial Sequence
  Description of Artificial Sequence: Synthetic oligonucleotide
  Sense strand starting at position 2461 of SEQ ID NO: 913357
ugugaugucaucgaguauu

SEQ ID NO: 920995 - RNA, 19 nt, Artificial Sequence
  Description of Artificial Sequence: Synthetic oligonucleotide
  Antisense strand to SEQ ID NO: 920994
aauacucgaugacaucaca

SEQ ID NO: 920996 - RNA, 19 nt, Artificial Sequence
  Description of Artificial Sequence: Synthetic oligonucleotide
  Sense strand starting at position 2216 of SEQ ID NO: 913357
caggguuaaguugguuauu

SEQ ID NO: 920997 - RNA, 19 nt, Artificial Sequence
  Description of Artificial Sequence: Synthetic oligonucleotide
  Antisense strand to SEQ ID NO: 920996
aauaaccaacuuaacccug

SEQ ID NO: 920998 - RNA, 19 nt, Artificial Sequence
  Description of Artificial Sequence: Synthetic oligonucleotide
  Sense strand starting at position 1245 of SEQ ID NO: 913357
cuguguccgagcuaagaug

SEQ ID NO: 920999 - RNA, 19 nt, Artificial Sequence
  Description of Artificial Sequence: Synthetic oligonucleotide
  Antisense strand to SEQ ID NO: 920998
caucuuagcucggacacag

SEQ ID NO: 921000 - RNA, 19 nt, Artificial Sequence
  Description of Artificial Sequence: Synthetic oligonucleotide
  Sense strand starting at position 3902 of SEQ ID NO: 913358
ccauuuaacugcucugagu

SEQ ID NO: 921001 - RNA, 19 nt, Artificial Sequence
  Description of Artificial Sequence: Synthetic oligonucleotide
  Antisense strand to SEQ ID NO: 921000
acucagagcaguuaaaugg

SEQ ID NO: 921002 - RNA, 19 nt, Artificial Sequence
  Description of Artificial Sequence: Synthetic oligonucleotide
  Sense strand starting at position 3010 of SEQ ID NO: 913358
uuaagucuguauuucgaau

SEQ ID NO: 921003 - RNA, 19 nt, Artificial Sequence
  Description of Artificial Sequence: Synthetic oligonucleotide
  Antisense strand to SEQ ID NO: 921002
auucgaaauacagacuuaa

SEQ ID NO: 921004 - RNA, 19 nt, Artificial Sequence
  Description of Artificial Sequence: Synthetic oligonucleotide
  Sense strand starting at position 32 of SEQ ID NO: 913358
ccaagauauuugucugugu

SEQ ID NO: 921005 - RNA, 19 nt, Artificial Sequence
  Description of Artificial Sequence: Synthetic oligonucleotide
  Antisense strand to SEQ ID NO: 921004
acacagacaaauaucuugg

SEQ ID NO: 921006 - RNA, 19 nt, Artificial Sequence
  Description of Artificial Sequence: Synthetic oligonucleotide
  Sense strand starting at position 33 of SEQ ID NO: 913358
caagauauuugucuguguc

SEQ ID NO: 921007 - RNA, 19 nt, Artificial Sequence
  Description of Artificial Sequence: Synthetic oligonucleotide
  Antisense strand to SEQ ID NO: 921006
gacacagacaaauaucuug

SEQ ID NO: 921008 - RNA, 19 nt, Artificial Sequence
  Description of Artificial Sequence: Synthetic oligonucleotide
  Sense strand starting at position 1768 of SEQ ID NO: 913358
uguagacuuucgguaauuu

SEQ ID NO: 921009 - RNA, 19 nt, Artificial Sequence
  Description of Artificial Sequence: Synthetic oligonucleotide
  Antisense strand to SEQ ID NO: 921008
aaauuaccgaaagucuaca

SEQ ID NO: 921010 - RNA, 19 nt, Artificial Sequence
  Description of Artificial Sequence: Synthetic oligonucleotide
  Sense strand starting at position 1359 of SEQ ID NO: 913358
aggcuuggaugaucaaaug

SEQ ID NO: 921011 - RNA, 19 nt, Artificial Sequence
  Description of Artificial Sequence: Synthetic oligonucleotide
  Antisense strand to SEQ ID NO: 921010
cauuugaucauccaagccu

SEQ ID NO: 921012 - RNA, 19 nt, Artificial Sequence
  Description of Artificial Sequence: Synthetic oligonucleotide
  Sense strand starting at position 2980 of SEQ ID NO: 913358
aagagaaaugucugaaugu

SEQ ID NO: 921013 - RNA, 19 nt, Artificial Sequence
  Description of Artificial Sequence: Synthetic oligonucleotide
  Antisense strand to SEQ ID NO: 921012
acauucagacauuucucuu

SEQ ID NO: 921014 - RNA, 19 nt, Artificial Sequence
  Description of Artificial Sequence: Synthetic oligonucleotide
  Sense strand starting at position 477 of SEQ ID NO: 913358
cuugaaauuauauguggga

SEQ ID NO: 921015 - RNA, 19 nt, Artificial Sequence
  Description of Artificial Sequence: Synthetic oligonucleotide
  Antisense strand to SEQ ID NO: 921014
ucccacauauaauuucaag

SEQ ID NO: 921016 - RNA, 19 nt, Artificial Sequence
  Description of Artificial Sequence: Synthetic oligonucleotide
  Sense strand starting at position 2688 of SEQ ID NO: 913358
uuggaauguuaccuaaaua

SEQ ID NO: 921017 - RNA, 19 nt, Artificial Sequence
  Description of Artificial Sequence: Synthetic oligonucleotide
  Antisense strand to SEQ ID NO: 921016
uauuuagguaacauuccaa

SEQ ID NO: 921018 - RNA, 19 nt, Artificial Sequence
  Description of Artificial Sequence: Synthetic oligonucleotide
  Sense strand starting at position 3680 of SEQ ID NO: 913358
gggaguugucaacacacuu

SEQ ID NO: 921019 - RNA, 19 nt, Artificial Sequence
  Description of Artificial Sequence: Synthetic oligonucleotide
  Antisense strand to SEQ ID NO: 921018
aaguguguugacaacuccc

SEQ ID NO: 921020 - RNA, 19 nt, Artificial Sequence
  Description of Artificial Sequence: Synthetic oligonucleotide
  Sense strand starting at position 2465 of SEQ ID NO: 913358
uauguuggcagugaaggaa

SEQ ID NO: 921021 - RNA, 19 nt, Artificial Sequence
  Description of Artificial Sequence: Synthetic oligonucleotide
  Antisense strand to SEQ ID NO: 921020
uuccuucacugccaacaua

SEQ ID NO: 921022 - RNA, 19 nt, Artificial Sequence
  Description of Artificial Sequence: Synthetic oligonucleotide
  Sense strand starting at position 1865 of SEQ ID NO: 913358
ggaggugauucuucucaaa

SEQ ID NO: 921023 - RNA, 19 nt, Artificial Sequence
  Description of Artificial Sequence: Synthetic oligonucleotide
  Antisense strand to SEQ ID NO: 921022
uuugagaagaaucaccucc

SEQ ID NO: 921024 - RNA, 19 nt, Artificial Sequence
  Description of Artificial Sequence: Synthetic oligonucleotide
  Sense strand starting at position 3883 of SEQ ID NO: 913358
cugggugaccuuugaaaua

SEQ ID NO: 921025 - RNA, 19 nt, Artificial Sequence
  Description of Artificial Sequence: Synthetic oligonucleotide
  Antisense strand to SEQ ID NO: 921024
uauuucaaaggucacccag

SEQ ID NO: 921026 - RNA, 19 nt, Artificial Sequence
  Description of Artificial Sequence: Synthetic oligonucleotide
  Sense strand starting at position 1858 of SEQ ID NO: 913358
uuaauuaggaggugauucu

SEQ ID NO: 921027 - RNA, 19 nt, Artificial Sequence
  Description of Artificial Sequence: Synthetic oligonucleotide
  Antisense strand to SEQ ID NO: 921026
agaaucaccuccuaauuaa

SEQ ID NO: 921028 - RNA, 19 nt, Artificial Sequence
  Description of Artificial Sequence: Synthetic oligonucleotide
  Sense strand starting at position 1867 of SEQ ID NO: 913358
aggugauucuucucaaaua

SEQ ID NO: 921029 - RNA, 19 nt, Artificial Sequence
  Description of Artificial Sequence: Synthetic oligonucleotide
  Antisense strand to SEQ ID NO: 921028
uauuugagaagaaucaccu

SEQ ID NO: 921030 - RNA, 19 nt, Artificial Sequence
  Description of Artificial Sequence: Synthetic oligonucleotide
  Sense strand starting at position 2687 of SEQ ID NO: 913358
cuuggaauguuaccuaaau

SEQ ID NO: 921031 - RNA, 19 nt, Artificial Sequence
  Description of Artificial Sequence: Synthetic oligonucleotide
  Antisense strand to SEQ ID NO: 921030
auuuagguaacauuccaag

SEQ ID NO: 921032 - RNA, 19 nt, Artificial Sequence
  Description of Artificial Sequence: Synthetic oligonucleotide
  Sense strand starting at position 1729 of SEQ ID NO: 913358
cccugaguuauuuguaugu

SEQ ID NO: 921033 - RNA, 19 nt, Artificial Sequence
  Description of Artificial Sequence: Synthetic oligonucleotide
  Antisense strand to SEQ ID NO: 921032
acauacaaauaacucaggg

SEQ ID NO: 921034 - RNA, 19 nt, Artificial Sequence
  Description of Artificial Sequence: Synthetic oligonucleotide
  Sense strand starting at position 3292 of SEQ ID NO: 913358
cuuugacucuuucuagaag

SEQ ID NO: 921035 - RNA, 19 nt, Artificial Sequence
  Description of Artificial Sequence: Synthetic oligonucleotide
  Antisense strand to SEQ ID NO: 921034
cuucuagaaagagucaaag

SEQ ID NO: 921036 - RNA, 19 nt, Artificial Sequence
  Description of Artificial Sequence: Synthetic oligonucleotide
  Sense strand starting at position 1854 of SEQ ID NO: 913358
acauuuaauuaggagguga

SEQ ID NO: 921037 - RNA, 19 nt, Artificial Sequence
  Description of Artificial Sequence: Synthetic oligonucleotide
  Antisense strand to SEQ ID NO: 921036
ucaccuccuaauuaaaugu

SEQ ID NO: 921038 - RNA, 19 nt, Artificial Sequence
  Description of Artificial Sequence: Synthetic oligonucleotide
  Sense strand starting at position 3239 of SEQ ID NO: 913358
guguauucucuugauggaa

SEQ ID NO: 921039 - RNA, 19 nt, Artificial Sequence
  Description of Artificial Sequence: Synthetic oligonucleotide
  Antisense strand to SEQ ID NO: 921038
uuccaucaagagaauacac

SEQ ID NO: 921040 - RNA, 19 nt, Artificial Sequence
  Description of Artificial Sequence: Synthetic oligonucleotide
  Sense strand starting at position 3559 of SEQ ID NO: 913358
auguuaaaugacugguaua

SEQ ID NO: 921041 - RNA, 19 nt, Artificial Sequence
  Description of Artificial Sequence: Synthetic oligonucleotide
  Antisense strand to SEQ ID NO: 921040
uauaccagucauuuaacau

SEQ ID NO: 921042 - RNA, 19 nt, Artificial Sequence
  Description of Artificial Sequence: Synthetic oligonucleotide
  Sense strand starting at position 2299 of SEQ ID NO: 913358
ucgagaggucccuggagga

SEQ ID NO: 921043 - RNA, 19 nt, Artificial Sequence
  Description of Artificial Sequence: Synthetic oligonucleotide
  Antisense strand to SEQ ID NO: 921042
uccuccagggaccucucga

SEQ ID NO: 921044 - RNA, 19 nt, Artificial Sequence
  Description of Artificial Sequence: Synthetic oligonucleotide
  Sense strand starting at position 3333 of SEQ ID NO: 913358
uuaggugucccucaucaga

SEQ ID NO: 921045 - RNA, 19 nt, Artificial Sequence
  Description of Artificial Sequence: Synthetic oligonucleotide
  Antisense strand to SEQ ID NO: 921044
ucugaugagggacaccuaa

SEQ ID NO: 921046 - RNA, 19 nt, Artificial Sequence
  Description of Artificial Sequence: Synthetic oligonucleotide
  Sense strand starting at position 2265 of SEQ ID NO: 913358
acuauuuaauauggaggga

SEQ ID NO: 921047 - RNA, 19 nt, Artificial Sequence
  Description of Artificial Sequence: Synthetic oligonucleotide
  Antisense strand to SEQ ID NO: 921046
ucccuccauauuaaauagu

SEQ ID NO: 921048 - RNA, 19 nt, Artificial Sequence
  Description of Artificial Sequence: Synthetic oligonucleotide
  Sense strand starting at position 713 of SEQ ID NO: 913358
agagauaauaugggugcuu

SEQ ID NO: 921049 - RNA, 19 nt, Artificial Sequence
  Description of Artificial Sequence: Synthetic oligonucleotide
  Antisense strand to SEQ ID NO: 921048
aagcacccauauuaucucu

SEQ ID NO: 921050 - RNA, 19 nt, Artificial Sequence
  Description of Artificial Sequence: Synthetic oligonucleotide
  Sense strand starting at position 2142 of SEQ ID NO: 913358
ggcacuuugcaauacacua

SEQ ID NO: 921051 - RNA, 19 nt, Artificial Sequence
  Description of Artificial Sequence: Synthetic oligonucleotide
  Antisense strand to SEQ ID NO: 921050
uaguguauugcaaagugcc

SEQ ID NO: 921052 - RNA, 19 nt, Artificial Sequence
  Description of Artificial Sequence: Synthetic oligonucleotide
  Sense strand starting at position 3352 of SEQ ID NO: 913358
auguauugccaguaaacac

SEQ ID NO: 921053 - RNA, 19 nt, Artificial Sequence
  Description of Artificial Sequence: Synthetic oligonucleotide
  Antisense strand to SEQ ID NO: 921052
guguuuacuggcaauacau

SEQ ID NO: 921054 - RNA, 19 nt, Artificial Sequence
  Description of Artificial Sequence: Synthetic oligonucleotide
  Sense strand starting at position 3558 of SEQ ID NO: 913358
uauguuaaaugacugguau

SEQ ID NO: 921055 - RNA, 19 nt, Artificial Sequence
  Description of Artificial Sequence: Synthetic oligonucleotide
  Antisense strand to SEQ ID NO: 921054
auaccagucauuuaacaua

SEQ ID NO: 921056 - RNA, 19 nt, Artificial Sequence
  Description of Artificial Sequence: Synthetic oligonucleotide
  Sense strand starting at position 599 of SEQ ID NO: 913358
guuggagagccuuggaaca

SEQ ID NO: 921057 - RNA, 19 nt, Artificial Sequence
  Description of Artificial Sequence: Synthetic oligonucleotide
  Antisense strand to SEQ ID NO: 921056
uguuccaaggcucuccaac

SEQ ID NO: 921058 - RNA, 19 nt, Artificial Sequence
  Description of Artificial Sequence: Synthetic oligonucleotide
  Sense strand starting at position 668 of SEQ ID NO: 913358
gucccaaugcuugaaaucu

SEQ ID NO: 921059 - RNA, 19 nt, Artificial Sequence
  Description of Artificial Sequence: Synthetic oligonucleotide
  Antisense strand to SEQ ID NO: 921058
agauuucaagcauugggac

SEQ ID NO: 921060 - RNA, 19 nt, Artificial Sequence
  Description of Artificial Sequence: Synthetic oligonucleotide
  Sense strand starting at position 1395 of SEQ ID NO: 913358
ggaauuccuuaagcaguga

SEQ ID NO: 921061 - RNA, 19 nt, Artificial Sequence
  Description of Artificial Sequence: Synthetic oligonucleotide
  Antisense strand to SEQ ID NO: 921060
ucacugcuuaaggaauucc

SEQ ID NO: 921062 - RNA, 19 nt, Artificial Sequence
  Description of Artificial Sequence: Synthetic oligonucleotide
  Sense strand starting at position 1543 of SEQ ID NO: 913358
ccacucagaguucgaagau

SEQ ID NO: 921063 - RNA, 19 nt, Artificial Sequence
  Description of Artificial Sequence: Synthetic oligonucleotide
  Antisense strand to SEQ ID NO: 921062
aucuucgaacucugagugg

SEQ ID NO: 921064 - RNA, 19 nt, Artificial Sequence
  Description of Artificial Sequence: Synthetic oligonucleotide
  Sense strand starting at position 2639 of SEQ ID NO: 913358
aacugucuugcugaaguaa

SEQ ID NO: 921065 - RNA, 19 nt, Artificial Sequence
  Description of Artificial Sequence: Synthetic oligonucleotide
  Antisense strand to SEQ ID NO: 921064
uuacuucagcaagacaguu

SEQ ID NO: 921066 - RNA, 19 nt, Artificial Sequence
  Description of Artificial Sequence: Synthetic oligonucleotide
  Sense strand starting at position 715 of SEQ ID NO: 913358
agauaauaugggugcuuua

SEQ ID NO: 921067 - RNA, 19 nt, Artificial Sequence
  Description of Artificial Sequence: Synthetic oligonucleotide
  Antisense strand to SEQ ID NO: 921066
uaaagcacccauauuaucu

SEQ ID NO: 921068 - RNA, 19 nt, Artificial Sequence
  Description of Artificial Sequence: Synthetic oligonucleotide
  Sense strand starting at position 714 of SEQ ID NO: 913358
gagauaauaugggugcuuu

SEQ ID NO: 921069 - RNA, 19 nt, Artificial Sequence
  Description of Artificial Sequence: Synthetic oligonucleotide
  Antisense strand to SEQ ID NO: 921068
aaagcacccauauuaucuc

SEQ ID NO: 921070 - RNA, 19 nt, Artificial Sequence
  Description of Artificial Sequence: Synthetic oligonucleotide
  Sense strand starting at position 3674 of SEQ ID NO: 913358
aggagugggaguugucaac

SEQ ID NO: 921071 - RNA, 19 nt, Artificial Sequence
  Description of Artificial Sequence: Synthetic oligonucleotide
  Antisense strand to SEQ ID NO: 921070
guugacaacucccacuccu

SEQ ID NO: 921072 - RNA, 19 nt, Artificial Sequence
  Description of Artificial Sequence: Synthetic oligonucleotide
  Sense strand starting at position 345 of SEQ ID NO: 913358
agccucagcugacuagaaa

SEQ ID NO: 921073 - RNA, 19 nt, Artificial Sequence
  Description of Artificial Sequence: Synthetic oligonucleotide
  Antisense strand to SEQ ID NO: 921072
uuucuagucagcugaggcu

SEQ ID NO: 921074 - RNA, 19 nt, Artificial Sequence
  Description of Artificial Sequence: Synthetic oligonucleotide
  Sense strand starting at position 3872 of SEQ ID NO: 913358
ccauguauugacuggguga

SEQ ID NO: 921075 - RNA, 19 nt, Artificial Sequence
  Description of Artificial Sequence: Synthetic oligonucleotide
  Antisense strand to SEQ ID NO: 921074
ucacccagucaauacaugg

SEQ ID NO: 921076 - RNA, 19 nt, Artificial Sequence
  Description of Artificial Sequence: Synthetic oligonucleotide
  Sense strand starting at position 3597 of SEQ ID NO: 913358
guaaguuuccauuauucuu

SEQ ID NO: 921077 - RNA, 19 nt, Artificial Sequence
  Description of Artificial Sequence: Synthetic oligonucleotide
  Antisense strand to SEQ ID NO: 921076
aagaauaauggaaacuuac

SEQ ID NO: 921078 - RNA, 19 nt, Artificial Sequence
  Description of Artificial Sequence: Synthetic oligonucleotide
  Sense strand starting at position 21 of SEQ ID NO: 913358
gguccuguggcccaagaua

SEQ ID NO: 921079 - RNA, 19 nt, Artificial Sequence
  Description of Artificial Sequence: Synthetic oligonucleotide
  Antisense strand to SEQ ID NO: 921078
uaucuugggccacaggacc

SEQ ID NO: 921080 - RNA, 19 nt, Artificial Sequence
  Description of Artificial Sequence: Synthetic oligonucleotide
  Sense strand starting at position 3338 of SEQ ID NO: 913359
uguggucucauuuagucuu

SEQ ID NO: 921081 - RNA, 19 nt, Artificial Sequence
  Description of Artificial Sequence: Synthetic oligonucleotide
  Antisense strand to SEQ ID NO: 921080
aagacuaaaugagaccaca

SEQ ID NO: 921082 - RNA, 19 nt, Artificial Sequence
  Description of Artificial Sequence: Synthetic oligonucleotide
  Sense strand starting at position 510 of SEQ ID NO: 913359
augggcaagauuuguguuu

SEQ ID NO: 921083 - RNA, 19 nt, Artificial Sequence
  Description of Artificial Sequence: Synthetic oligonucleotide
  Antisense strand to SEQ ID NO: 921082
aaacacaaaucuugcccau

SEQ ID NO: 921084 - RNA, 19 nt, Artificial Sequence
  Description of Artificial Sequence: Synthetic oligonucleotide
  Sense strand starting at position 2526 of SEQ ID NO: 913359
cugagcguccuuguuucua

SEQ ID NO: 921085 - RNA, 19 nt, Artificial Sequence
  Description of Artificial Sequence: Synthetic oligonucleotide
  Antisense strand to SEQ ID NO: 921084
uagaaacaaggacgcucag

SEQ ID NO: 921086 - RNA, 19 nt, Artificial Sequence
  Description of Artificial Sequence: Synthetic oligonucleotide
  Sense strand starting at position 2317 of SEQ ID NO: 913359
uguagcaugcgaucuaugu

SEQ ID NO: 921087 - RNA, 19 nt, Artificial Sequence
  Description of Artificial Sequence: Synthetic oligonucleotide
  Antisense strand to SEQ ID NO: 921086
acauagaucgcaugcuaca

SEQ ID NO: 921088 - RNA, 19 nt, Artificial Sequence
  Description of Artificial Sequence: Synthetic oligonucleotide
  Sense strand starting at position 446 of SEQ ID NO: 913359
uuugaagacuucucauuga

SEQ ID NO: 921089 - RNA, 19 nt, Artificial Sequence
  Description of Artificial Sequence: Synthetic oligonucleotide
  Antisense strand to SEQ ID NO: 921088
ucaaugagaagucuucaaa

SEQ ID NO: 921090 - RNA, 19 nt, Artificial Sequence
  Description of Artificial Sequence: Synthetic oligonucleotide
  Sense strand starting at position 2909 of SEQ ID NO: 913359
acugguaucuaacuggaau

SEQ ID NO: 921091 - RNA, 19 nt, Artificial Sequence
  Description of Artificial Sequence: Synthetic oligonucleotide
  Antisense strand to SEQ ID NO: 921090
auuccaguuagauaccagu

SEQ ID NO: 921092 - RNA, 19 nt, Artificial Sequence
  Description of Artificial Sequence: Synthetic oligonucleotide
  Sense strand starting at position 2831 of SEQ ID NO: 913359
aggagaaaguauucucucu

SEQ ID NO: 921093 - RNA, 19 nt, Artificial Sequence
  Description of Artificial Sequence: Synthetic oligonucleotide
  Antisense strand to SEQ ID NO: 921092
agagagaauacuuucuccu

SEQ ID NO: 921094 - RNA, 19 nt, Artificial Sequence
  Description of Artificial Sequence: Synthetic oligonucleotide
  Sense strand starting at position 413 of SEQ ID NO: 913359
ccaauugacuugguugaaa

SEQ ID NO: 921095 - RNA, 19 nt, Artificial Sequence
  Description of Artificial Sequence: Synthetic oligonucleotide
  Antisense strand to SEQ ID NO: 921094
uuucaaccaagucaauugg

SEQ ID NO: 921096 - RNA, 19 nt, Artificial Sequence
  Description of Artificial Sequence: Synthetic oligonucleotide
  Sense strand starting at position 457 of SEQ ID NO: 913359
cucauugauucccugagga

SEQ ID NO: 921097 - RNA, 19 nt, Artificial Sequence
  Description of Artificial Sequence: Synthetic oligonucleotide
  Antisense strand to SEQ ID NO: 921096
uccucagggaaucaaugag

SEQ ID NO: 921098 - RNA, 19 nt, Artificial Sequence
  Description of Artificial Sequence: Synthetic oligonucleotide
  Sense strand starting at position 757 of SEQ ID NO: 913359
acuguuucucaggaaccuu

SEQ ID NO: 921099 - RNA, 19 nt, Artificial Sequence
  Description of Artificial Sequence: Synthetic oligonucleotide
  Antisense strand to SEQ ID NO: 921098
aagguuccugagaaacagu

SEQ ID NO: 921100 - RNA, 19 nt, Artificial Sequence
  Description of Artificial Sequence: Synthetic oligonucleotide
  Sense strand starting at position 415 of SEQ ID NO: 913359
aauugacuugguugaaacu

SEQ ID NO: 921101 - RNA, 19 nt, Artificial Sequence
  Description of Artificial Sequence: Synthetic oligonucleotide
  Antisense strand to SEQ ID NO: 921100
aguuucaaccaagucaauu

SEQ ID NO: 921102 - RNA, 19 nt, Artificial Sequence
  Description of Artificial Sequence: Synthetic oligonucleotide
  Sense strand starting at position 412 of SEQ ID NO: 913359
accaauugacuugguugaa

SEQ ID NO: 921103 - RNA, 19 nt, Artificial Sequence
  Description of Artificial Sequence: Synthetic oligonucleotide
  Antisense strand to SEQ ID NO: 921102
uucaaccaagucaauuggu

SEQ ID NO: 921104 - RNA, 19 nt, Artificial Sequence
  Description of Artificial Sequence: Synthetic oligonucleotide
  Sense strand starting at position 1298 of SEQ ID NO: 913359
gcuucagucguguccuuag

SEQ ID NO: 921105 - RNA, 19 nt, Artificial Sequence
  Description of Artificial Sequence: Synthetic oligonucleotide
  Antisense strand to SEQ ID NO: 921104
cuaaggacacgacugaagc

SEQ ID NO: 921106 - RNA, 19 nt, Artificial Sequence
  Description of Artificial Sequence: Synthetic oligonucleotide
  Sense strand starting at position 2595 of SEQ ID NO: 913359
gcgggauagguggauauca

SEQ ID NO: 921107 - RNA, 19 nt, Artificial Sequence
  Description of Artificial Sequence: Synthetic oligonucleotide
  Antisense strand to SEQ ID NO: 921106
ugauauccaccuaucccgc

SEQ ID NO: 921108 - RNA, 19 nt, Artificial Sequence
  Description of Artificial Sequence: Synthetic oligonucleotide
  Sense strand starting at position 3756 of SEQ ID NO: 913359
ccaaauugaaugugugaag

SEQ ID NO: 921109 - RNA, 19 nt, Artificial Sequence
  Description of Artificial Sequence: Synthetic oligonucleotide
  Antisense strand to SEQ ID NO: 921108
cuucacacauucaauuugg

SEQ ID NO: 921110 - RNA, 19 nt, Artificial Sequence
  Description of Artificial Sequence: Synthetic oligonucleotide
  Sense strand starting at position 385 of SEQ ID NO: 913359
aucagaaucuagguagcaa

SEQ ID NO: 921111 - RNA, 19 nt, Artificial Sequence
  Description of Artificial Sequence: Synthetic oligonucleotide
  Antisense strand to SEQ ID NO: 921110
uugcuaccuagauucugau

SEQ ID NO: 921112 - RNA, 19 nt, Artificial Sequence
  Description of Artificial Sequence: Synthetic oligonucleotide
  Sense strand starting at position 3388 of SEQ ID NO: 913359
cuggaaacugagugucaga

SEQ ID NO: 921113 - RNA, 19 nt, Artificial Sequence
  Description of Artificial Sequence: Synthetic oligonucleotide
  Antisense strand to SEQ ID NO: 921112
ucugacacucaguuuccag

SEQ ID NO: 921114 - RNA, 19 nt, Artificial Sequence
  Description of Artificial Sequence: Synthetic oligonucleotide
  Sense strand starting at position 611 of SEQ ID NO: 913359
aguauuuauucuucugcga

SEQ ID NO: 921115 - RNA, 19 nt, Artificial Sequence
  Description of Artificial Sequence: Synthetic oligonucleotide
  Antisense strand to SEQ ID NO: 921114
ucgcagaagaauaaauacu

SEQ ID NO: 921116 - RNA, 19 nt, Artificial Sequence
  Description of Artificial Sequence: Synthetic oligonucleotide
  Sense strand starting at position 2307 of SEQ ID NO: 913359
auuauuaaucuguagcaug

SEQ ID NO: 921117 - RNA, 19 nt, Artificial Sequence
  Description of Artificial Sequence: Synthetic oligonucleotide
  Antisense strand to SEQ ID NO: 921116
caugcuacagauuaauaau

SEQ ID NO: 921118 - RNA, 19 nt, Artificial Sequence
  Description of Artificial Sequence: Synthetic oligonucleotide
  Sense strand starting at position 753 of SEQ ID NO: 913359
gacuacuguuucucaggaa

SEQ ID NO: 921119 - RNA, 19 nt, Artificial Sequence
  Description of Artificial Sequence: Synthetic oligonucleotide
  Antisense strand to SEQ ID NO: 921118
uuccugagaaacaguaguc

SEQ ID NO: 921120 - RNA, 19 nt, Artificial Sequence
  Description of Artificial Sequence: Synthetic oligonucleotide
  Sense strand starting at position 2756 of SEQ ID NO: 913359
ggcauuaaaugacugugaa

SEQ ID NO: 921121 - RNA, 19 nt, Artificial Sequence
  Description of Artificial Sequence: Synthetic oligonucleotide
  Antisense strand to SEQ ID NO: 921120
uucacagucauuuaaugcc

SEQ ID NO: 921122 - RNA, 19 nt, Artificial Sequence
  Description of Artificial Sequence: Synthetic oligonucleotide
  Sense strand starting at position 768 of SEQ ID NO: 913359
ggaaccuuucccuagccau

SEQ ID NO: 921123 - RNA, 19 nt, Artificial Sequence
  Description of Artificial Sequence: Synthetic oligonucleotide
  Antisense strand to SEQ ID NO: 921122
auggcuagggaaagguucc

SEQ ID NO: 921124 - RNA, 19 nt, Artificial Sequence
  Description of Artificial Sequence: Synthetic oligonucleotide
  Sense strand starting at position 1297 of SEQ ID NO: 913359
ugcuucagucguguccuua

SEQ ID NO: 921125 - RNA, 19 nt, Artificial Sequence
  Description of Artificial Sequence: Synthetic oligonucleotide
  Antisense strand to SEQ ID NO: 921124
uaaggacacgacugaagca

SEQ ID NO: 921126 - RNA, 19 nt, Artificial Sequence
  Description of Artificial Sequence: Synthetic oligonucleotide
  Sense strand starting at position 2699 of SEQ ID NO: 913359
gacaucucacuuggaguca

SEQ ID NO: 921127 - RNA, 19 nt, Artificial Sequence
  Description of Artificial Sequence: Synthetic oligonucleotide
  Antisense strand to SEQ ID NO: 921126
ugacuccaagugagauguc

SEQ ID NO: 921128 - RNA, 19 nt, Artificial Sequence
  Description of Artificial Sequence: Synthetic oligonucleotide
  Sense strand starting at position 2698 of SEQ ID NO: 913359
ggacaucucacuuggaguc

SEQ ID NO: 921129 - RNA, 19 nt, Artificial Sequence
  Description of Artificial Sequence: Synthetic oligonucleotide
  Antisense strand to SEQ ID NO: 921128
gacuccaagugagaugucc

SEQ ID NO: 921130 - RNA, 19 nt, Artificial Sequence
  Description of Artificial Sequence: Synthetic oligonucleotide
  Sense strand starting at position 2813 of SEQ ID NO: 913359
ucaguucuucuguauacaa

SEQ ID NO: 921131 - RNA, 19 nt, Artificial Sequence
  Description of Artificial Sequence: Synthetic oligonucleotide
  Antisense strand to SEQ ID NO: 921130
uuguauacagaagaacuga

SEQ ID NO: 921132 - RNA, 19 nt, Artificial Sequence
  Description of Artificial Sequence: Synthetic oligonucleotide
  Sense strand starting at position 2757 of SEQ ID NO: 913359
gcauuaaaugacugugaau

SEQ ID NO: 921133 - RNA, 19 nt, Artificial Sequence
  Description of Artificial Sequence: Synthetic oligonucleotide
  Antisense strand to SEQ ID NO: 921132
auucacagucauuuaaugc

SEQ ID NO: 921134 - RNA, 19 nt, Artificial Sequence
  Description of Artificial Sequence: Synthetic oligonucleotide
  Sense strand starting at position 3743 of SEQ ID NO: 913359
aggaauugguugcccaaau

SEQ ID NO: 921135 - RNA, 19 nt, Artificial Sequence
  Description of Artificial Sequence: Synthetic oligonucleotide
  Antisense strand to SEQ ID NO: 921134
auuugggcaaccaauuccu

SEQ ID NO: 921136 - RNA, 19 nt, Artificial Sequence
  Description of Artificial Sequence: Synthetic oligonucleotide
  Sense strand starting at position 23 of SEQ ID NO: 913359
guuggcccuccagauauua

SEQ ID NO: 921137 - RNA, 19 nt, Artificial Sequence
  Description of Artificial Sequence: Synthetic oligonucleotide
  Antisense strand to SEQ ID NO: 921136
uaauaucuggagggccaac

SEQ ID NO: 921138 - RNA, 19 nt, Artificial Sequence
  Description of Artificial Sequence: Synthetic oligonucleotide
  Sense strand starting at position 3741 of SEQ ID NO: 913359
auaggaauugguugcccaa

SEQ ID NO: 921139 - RNA, 19 nt, Artificial Sequence
  Description of Artificial Sequence: Synthetic oligonucleotide
  Antisense strand to SEQ ID NO: 921138
uugggcaaccaauuccuau

SEQ ID NO: 921140 - RNA, 19 nt, Artificial Sequence
  Description of Artificial Sequence: Synthetic oligonucleotide
  Sense strand starting at position 2888 of SEQ ID NO: 913359
ggcucaaagcccuagguaa

SEQ ID NO: 921141 - RNA, 19 nt, Artificial Sequence
  Description of Artificial Sequence: Synthetic oligonucleotide
  Antisense strand to SEQ ID NO: 921140
uuaccuagggcuuugagcc

SEQ ID NO: 921142 - RNA, 19 nt, Artificial Sequence
  Description of Artificial Sequence: Synthetic oligonucleotide
  Sense strand starting at position 3030 of SEQ ID NO: 913359
uccagaaguucuuuccuag

SEQ ID NO: 921143 - RNA, 19 nt, Artificial Sequence
  Description of Artificial Sequence: Synthetic oligonucleotide
  Antisense strand to SEQ ID NO: 921142
cuaggaaagaacuucugga

SEQ ID NO: 921144 - RNA, 19 nt, Artificial Sequence
  Description of Artificial Sequence: Synthetic oligonucleotide
  Sense strand starting at position 1102 of SEQ ID NO: 913359
aucuaugaaguauguucua

SEQ ID NO: 921145 - RNA, 19 nt, Artificial Sequence
  Description of Artificial Sequence: Synthetic oligonucleotide
  Antisense strand to SEQ ID NO: 921144
uagaacauacuucauagau

SEQ ID NO: 921146 - RNA, 19 nt, Artificial Sequence
  Description of Artificial Sequence: Synthetic oligonucleotide
  Sense strand starting at position 1095 of SEQ ID NO: 913359
ugucucaaucuaugaagua

SEQ ID NO: 921147 - RNA, 19 nt, Artificial Sequence
  Description of Artificial Sequence: Synthetic oligonucleotide
  Antisense strand to SEQ ID NO: 921146
uacuucauagauugagaca

SEQ ID NO: 921148 - RNA, 19 nt, Artificial Sequence
  Description of Artificial Sequence: Synthetic oligonucleotide
  Sense strand starting at position 2664 of SEQ ID NO: 913359
agaaauugcccucacguca

SEQ ID NO: 921149 - RNA, 19 nt, Artificial Sequence
  Description of Artificial Sequence: Synthetic oligonucleotide
  Antisense strand to SEQ ID NO: 921148
ugacgugagggcaauuucu

SEQ ID NO: 921150 - RNA, 19 nt, Artificial Sequence
  Description of Artificial Sequence: Synthetic oligonucleotide
  Sense strand starting at position 3744 of SEQ ID NO: 913359
ggaauugguugcccaaauu

SEQ ID NO: 921151 - RNA, 19 nt, Artificial Sequence
  Description of Artificial Sequence: Synthetic oligonucleotide
  Antisense strand to SEQ ID NO: 921150
aauuugggcaaccaauucc

SEQ ID NO: 921152 - RNA, 19 nt, Artificial Sequence
  Description of Artificial Sequence: Synthetic oligonucleotide
  Sense strand starting at position 3081 of SEQ ID NO: 913359
gguaauuguccagguggga

SEQ ID NO: 921153 - RNA, 19 nt, Artificial Sequence
  Description of Artificial Sequence: Synthetic oligonucleotide
  Antisense strand to SEQ ID NO: 921152
ucccaccuggacaauuacc

SEQ ID NO: 921154 - RNA, 19 nt, Artificial Sequence
  Description of Artificial Sequence: Synthetic oligonucleotide
  Sense strand starting at position 3033 of SEQ ID NO: 913359
agaaguucuuuccuagcaa

SEQ ID NO: 921155 - RNA, 19 nt, Artificial Sequence
  Description of Artificial Sequence: Synthetic oligonucleotide
  Antisense strand to SEQ ID NO: 921154
uugcuaggaaagaacuucu

SEQ ID NO: 921156 - RNA, 19 nt, Artificial Sequence
  Description of Artificial Sequence: Synthetic oligonucleotide
  Sense strand starting at position 1428 of SEQ ID NO: 913359
agacgaauguuuccaagca

SEQ ID NO: 921157 - RNA, 19 nt, Artificial Sequence
  Description of Artificial Sequence: Synthetic oligonucleotide
  Antisense strand to SEQ ID NO: 921156
ugcuuggaaacauucgucu

SEQ ID NO: 921158 - RNA, 19 nt, Artificial Sequence
  Description of Artificial Sequence: Synthetic oligonucleotide
  Sense strand starting at position 2341 of SEQ ID NO: 913359
caauguuucccaggcagau

SEQ ID NO: 921159 - RNA, 19 nt, Artificial Sequence
  Description of Artificial Sequence: Synthetic oligonucleotide
  Antisense strand to SEQ ID NO: 921158
aucugccugggaaacauug

SEQ ID NO: 921160 - RNA, 19 nt, Artificial Sequence
  Description of Artificial Sequence: Synthetic oligonucleotide
  Sense strand starting at position 3441 of SEQ ID NO: 913360
cugggauggccagaauucu

SEQ ID NO: 921161 - RNA, 19 nt, Artificial Sequence
  Description of Artificial Sequence: Synthetic oligonucleotide
  Antisense strand to SEQ ID NO: 921160
agaauucuggccaucccag

SEQ ID NO: 921162 - RNA, 19 nt, Artificial Sequence
  Description of Artificial Sequence: Synthetic oligonucleotide
  Sense strand starting at position 2738 of SEQ ID NO: 913360
agaagcaugccagauacau

SEQ ID NO: 921163 - RNA, 19 nt, Artificial Sequence
  Description of Artificial Sequence: Synthetic oligonucleotide
  Antisense strand to SEQ ID NO: 921162
auguaucuggcaugcuucu

SEQ ID NO: 921164 - RNA, 19 nt, Artificial Sequence
  Description of Artificial Sequence: Synthetic oligonucleotide
  Sense strand starting at position 1856 of SEQ ID NO: 913360
aaucguuacccugagauaa

SEQ ID NO: 921165 - RNA, 19 nt, Artificial Sequence
  Description of Artificial Sequence: Synthetic oligonucleotide
  Antisense strand to SEQ ID NO: 921164
uuaucucaggguaacgauu

SEQ ID NO: 921166 - RNA, 19 nt, Artificial Sequence
  Description of Artificial Sequence: Synthetic oligonucleotide
  Sense strand starting at position 3268 of SEQ ID NO: 913360
augaguuagagggaugcuu

SEQ ID NO: 921167 - RNA, 19 nt, Artificial Sequence
  Description of Artificial Sequence: Synthetic oligonucleotide
  Antisense strand to SEQ ID NO: 921166
aagcaucccucuaacucau

SEQ ID NO: 921168 - RNA, 19 nt, Artificial Sequence
  Description of Artificial Sequence: Synthetic oligonucleotide
  Sense strand starting at position 2818 of SEQ ID NO: 913360
gagcacuuugagcagauaa

SEQ ID NO: 921169 - RNA, 19 nt, Artificial Sequence
  Description of Artificial Sequence: Synthetic oligonucleotide
  Antisense strand to SEQ ID NO: 921168
uuaucugcucaaagugcuc

SEQ ID NO: 921170 - RNA, 19 nt, Artificial Sequence
  Description of Artificial Sequence: Synthetic oligonucleotide
  Sense strand starting at position 1578 of SEQ ID NO: 913360
uuuaaaucaggugaguuua

SEQ ID NO: 921171 - RNA, 19 nt, Artificial Sequence
  Description of Artificial Sequence: Synthetic oligonucleotide
  Antisense strand to SEQ ID NO: 921170
uaaacucaccugauuuaaa

SEQ ID NO: 921172 - RNA, 19 nt, Artificial Sequence
  Description of Artificial Sequence: Synthetic oligonucleotide
  Sense strand starting at position 231 of SEQ ID NO: 913360
ggcaauguacaagaaguca

SEQ ID NO: 921173 - RNA, 19 nt, Artificial Sequence
  Description of Artificial Sequence: Synthetic oligonucleotide
  Antisense strand to SEQ ID NO: 921172
ugacuucuuguacauugcc

SEQ ID NO: 921174 - RNA, 19 nt, Artificial Sequence
  Description of Artificial Sequence: Synthetic oligonucleotide
  Sense strand starting at position 3911 of SEQ ID NO: 913360
gauuccaagcaguaggauu

SEQ ID NO: 921175 - RNA, 19 nt, Artificial Sequence
  Description of Artificial Sequence: Synthetic oligonucleotide
  Antisense strand to SEQ ID NO: 921174
aauccuacugcuuggaauc

SEQ ID NO: 921176 - RNA, 19 nt, Artificial Sequence
  Description of Artificial Sequence: Synthetic oligonucleotide
  Sense strand starting at position 3731 of SEQ ID NO: 913360
uuuauuagucgugugucuu

SEQ ID NO: 921177 - RNA, 19 nt, Artificial Sequence
  Description of Artificial Sequence: Synthetic oligonucleotide
  Antisense strand to SEQ ID NO: 921176
aagacacacgacuaauaaa

SEQ ID NO: 921178 - RNA, 19 nt, Artificial Sequence
  Description of Artificial Sequence: Synthetic oligonucleotide
  Sense strand starting at position 1013 of SEQ ID NO: 913360
gccauaaagugaucaauaa

SEQ ID NO: 921179 - RNA, 19 nt, Artificial Sequence
  Description of Artificial Sequence: Synthetic oligonucleotide
  Antisense strand to SEQ ID NO: 921178
uuauugaucacuuuauggc

SEQ ID NO: 921180 - RNA, 19 nt, Artificial Sequence
  Description of Artificial Sequence: Synthetic oligonucleotide
  Sense strand starting at position 1784 of SEQ ID NO: 913360
ggguguucucuauaucaaa

SEQ ID NO: 921181 - RNA, 19 nt, Artificial Sequence
  Description of Artificial Sequence: Synthetic oligonucleotide
  Antisense strand to SEQ ID NO: 921180
uuugauauagagaacaccc

SEQ ID NO: 921182 - RNA, 19 nt, Artificial Sequence
  Description of Artificial Sequence: Synthetic oligonucleotide
  Sense strand starting at position 2054 of SEQ ID NO: 913360
ugggaagcugaauguaaau

SEQ ID NO: 921183 - RNA, 19 nt, Artificial Sequence
  Description of Artificial Sequence: Synthetic oligonucleotide
  Antisense strand to SEQ ID NO: 921182
auuuacauucagcuuccca

SEQ ID NO: 921184 - RNA, 19 nt, Artificial Sequence
  Description of Artificial Sequence: Synthetic oligonucleotide
  Sense strand starting at position 3373 of SEQ ID NO: 913360
gcagcuauuugagcuaauu

SEQ ID NO: 921185 - RNA, 19 nt, Artificial Sequence
  Description of Artificial Sequence: Synthetic oligonucleotide
  Antisense strand to SEQ ID NO: 921184
aauuagcucaaauagcugc

SEQ ID NO: 921186 - RNA, 19 nt, Artificial Sequence
  Description of Artificial Sequence: Synthetic oligonucleotide
  Sense strand starting at position 1614 of SEQ ID NO: 913360
ccgguauuccaacauccaa

SEQ ID NO: 921187 - RNA, 19 nt, Artificial Sequence
  Description of Artificial Sequence: Synthetic oligonucleotide
  Antisense strand to SEQ ID NO: 921186
uuggauguuggaauaccgg

SEQ ID NO: 921188 - RNA, 19 nt, Artificial Sequence
  Description of Artificial Sequence: Synthetic oligonucleotide
  Sense strand starting at position 1774 of SEQ ID NO: 913360
ggaagaaacuggguguucu

SEQ ID NO: 921189 - RNA, 19 nt, Artificial Sequence
  Description of Artificial Sequence: Synthetic oligonucleotide
  Antisense strand to SEQ ID NO: 921188
agaacacccaguuucuucc

SEQ ID NO: 921190 - RNA, 19 nt, Artificial Sequence
  Description of Artificial Sequence: Synthetic oligonucleotide
  Sense strand starting at position 1580 of SEQ ID NO: 913360
uaaaucaggugaguuuaua

SEQ ID NO: 921191 - RNA, 19 nt, Artificial Sequence
  Description of Artificial Sequence: Synthetic oligonucleotide
  Antisense strand to SEQ ID NO: 921190
uauaaacucaccugauuua

SEQ ID NO: 921192 - RNA, 19 nt, Artificial Sequence
  Description of Artificial Sequence: Synthetic oligonucleotide
  Sense strand starting at position 504 of SEQ ID NO: 913360
acugucugagcauacauua

SEQ ID NO: 921193 - RNA, 19 nt, Artificial Sequence
  Description of Artificial Sequence: Synthetic oligonucleotide
  Antisense strand to SEQ ID NO: 921192
uaauguaugcucagacagu

SEQ ID NO: 921194 - RNA, 19 nt, Artificial Sequence
  Description of Artificial Sequence: Synthetic oligonucleotide
  Sense strand starting at position 2820 of SEQ ID NO: 913360
gcacuuugagcagauaacu

SEQ ID NO: 921195 - RNA, 19 nt, Artificial Sequence
  Description of Artificial Sequence: Synthetic oligonucleotide
  Antisense strand to SEQ ID NO: 921194
aguuaucugcucaaagugc

SEQ ID NO: 921196 - RNA, 19 nt, Artificial Sequence
  Description of Artificial Sequence: Synthetic oligonucleotide
  Sense strand starting at position 3099 of SEQ ID NO: 913360
gggacuuaacagugguuga

SEQ ID NO: 921197 - RNA, 19 nt, Artificial Sequence
  Description of Artificial Sequence: Synthetic oligonucleotide
  Antisense strand to SEQ ID NO: 921196
ucaaccacuguuaaguccc

SEQ ID NO: 921198 - RNA, 19 nt, Artificial Sequence
  Description of Artificial Sequence: Synthetic oligonucleotide
  Sense strand starting at position 3100 of SEQ ID NO: 913360
ggacuuaacagugguugag

SEQ ID NO: 921199 - RNA, 19 nt, Artificial Sequence
  Description of Artificial Sequence: Synthetic oligonucleotide
  Antisense strand to SEQ ID NO: 921198
cucaaccacuguuaagucc

SEQ ID NO: 921200 - RNA, 19 nt, Artificial Sequence
  Description of Artificial Sequence: Synthetic oligonucleotide
  Sense strand starting at position 3270 of SEQ ID NO: 913360
gaguuagagggaugcuuag

SEQ ID NO: 921201 - RNA, 19 nt, Artificial Sequence
  Description of Artificial Sequence: Synthetic oligonucleotide
  Antisense strand to SEQ ID NO: 921200
cuaagcaucccucuaacuc

SEQ ID NO: 921202 - RNA, 19 nt, Artificial Sequence
  Description of Artificial Sequence: Synthetic oligonucleotide
  Sense strand starting at position 242 of SEQ ID NO: 913360
agaagucaaggcugacuua

SEQ ID NO: 921203 - RNA, 19 nt, Artificial Sequence
  Description of Artificial Sequence: Synthetic oligonucleotide
  Antisense strand to SEQ ID NO: 921202
uaagucagccuugacuucu

SEQ ID NO: 921204 - RNA, 19 nt, Artificial Sequence
  Description of Artificial Sequence: Synthetic oligonucleotide
  Sense strand starting at position 2099 of SEQ ID NO: 913360
acuaacacauguguugaau

SEQ ID NO: 921205 - RNA, 19 nt, Artificial Sequence
  Description of Artificial Sequence: Synthetic oligonucleotide
  Antisense strand to SEQ ID NO: 921204
auucaacacauguguuagu

SEQ ID NO: 921206 - RNA, 19 nt, Artificial Sequence
  Description of Artificial Sequence: Synthetic oligonucleotide
  Sense strand starting at position 3847 of SEQ ID NO: 913360
ugacauucuuuacuaggua

SEQ ID NO: 921207 - RNA, 19 nt, Artificial Sequence
  Description of Artificial Sequence: Synthetic oligonucleotide
  Antisense strand to SEQ ID NO: 921206
uaccuaguaaagaauguca

SEQ ID NO: 921208 - RNA, 19 nt, Artificial Sequence
  Description of Artificial Sequence: Synthetic oligonucleotide
  Sense strand starting at position 2718 of SEQ ID NO: 913360
gcugucauuuaagcaucuu

SEQ ID NO: 921209 - RNA, 19 nt, Artificial Sequence
  Description of Artificial Sequence: Synthetic oligonucleotide
  Antisense strand to SEQ ID NO: 921208
aagaugcuuaaaugacagc

SEQ ID NO: 921210 - RNA, 19 nt, Artificial Sequence
  Description of Artificial Sequence: Synthetic oligonucleotide
  Sense strand starting at position 2817 of SEQ ID NO: 913360
agagcacuuugagcagaua

SEQ ID NO: 921211 - RNA, 19 nt, Artificial Sequence
  Description of Artificial Sequence: Synthetic oligonucleotide
  Antisense strand to SEQ ID NO: 921210
uaucugcucaaagugcucu

SEQ ID NO: 921212 - RNA, 19 nt, Artificial Sequence
  Description of Artificial Sequence: Synthetic oligonucleotide
  Sense strand starting at position 3461 of SEQ ID NO: 913360
aaugguguugggcaucuaa

SEQ ID NO: 921213 - RNA, 19 nt, Artificial Sequence
  Description of Artificial Sequence: Synthetic oligonucleotide
  Antisense strand to SEQ ID NO: 921212
uuagaugcccaacaccauu

SEQ ID NO: 921214 - RNA, 19 nt, Artificial Sequence
  Description of Artificial Sequence: Synthetic oligonucleotide
  Sense strand starting at position 438 of SEQ ID NO: 913360
ugauauauuccacgaguag

SEQ ID NO: 921215 - RNA, 19 nt, Artificial Sequence
  Description of Artificial Sequence: Synthetic oligonucleotide
  Antisense strand to SEQ ID NO: 921214
cuacucguggaauauauca

SEQ ID NO: 921216 - RNA, 19 nt, Artificial Sequence
  Description of Artificial Sequence: Synthetic oligonucleotide
  Sense strand starting at position 1005 of SEQ ID NO: 913360
aucugucagccauaaagug

SEQ ID NO: 921217 - RNA, 19 nt, Artificial Sequence
  Description of Artificial Sequence: Synthetic oligonucleotide
  Antisense strand to SEQ ID NO: 921216
cacuuuauggcugacagau

SEQ ID NO: 921218 - RNA, 19 nt, Artificial Sequence
  Description of Artificial Sequence: Synthetic oligonucleotide
  Sense strand starting at position 439 of SEQ ID NO: 913360
gauauauuccacgaguagc

SEQ ID NO: 921219 - RNA, 19 nt, Artificial Sequence
  Description of Artificial Sequence: Synthetic oligonucleotide
  Antisense strand to SEQ ID NO: 921218
gcuacucguggaauauauc

SEQ ID NO: 921220 - RNA, 19 nt, Artificial Sequence
  Description of Artificial Sequence: Synthetic oligonucleotide
  Sense strand starting at position 447 of SEQ ID NO: 913360
ccacgaguagcugaaaucu

SEQ ID NO: 921221 - RNA, 19 nt, Artificial Sequence
  Description of Artificial Sequence: Synthetic oligonucleotide
  Antisense strand to SEQ ID NO: 921220
agauuucagcuacucgugg

SEQ ID NO: 921222 - RNA, 19 nt, Artificial Sequence
  Description of Artificial Sequence: Synthetic oligonucleotide
  Sense strand starting at position 1217 of SEQ ID NO: 913360
uuaggacguguuuacuuaa

SEQ ID NO: 921223 - RNA, 19 nt, Artificial Sequence
  Description of Artificial Sequence: Synthetic oligonucleotide
  Antisense strand to SEQ ID NO: 921222
uuaaguaaacacguccuaa

SEQ ID NO: 921224 - RNA, 19 nt, Artificial Sequence
  Description of Artificial Sequence: Synthetic oligonucleotide
  Sense strand starting at position 3468 of SEQ ID NO: 913360
uugggcaucuaaucaucau

SEQ ID NO: 921225 - RNA, 19 nt, Artificial Sequence
  Description of Artificial Sequence: Synthetic oligonucleotide
  Antisense strand to SEQ ID NO: 921224
augaugauuagaugcccaa

SEQ ID NO: 921226 - RNA, 19 nt, Artificial Sequence
  Description of Artificial Sequence: Synthetic oligonucleotide
  Sense strand starting at position 1782 of SEQ ID NO: 913360
cuggguguucucuauauca

SEQ ID NO: 921227 - RNA, 19 nt, Artificial Sequence
  Description of Artificial Sequence: Synthetic oligonucleotide
  Antisense strand to SEQ ID NO: 921226
ugauauagagaacacccag

SEQ ID NO: 921228 - RNA, 19 nt, Artificial Sequence
  Description of Artificial Sequence: Synthetic oligonucleotide
  Sense strand starting at position 3451 of SEQ ID NO: 913360
cagaauucugaaugguguu

SEQ ID NO: 921229 - RNA, 19 nt, Artificial Sequence
  Description of Artificial Sequence: Synthetic oligonucleotide
  Antisense strand to SEQ ID NO: 921228
aacaccauucagaauucug

SEQ ID NO: 921230 - RNA, 19 nt, Artificial Sequence
  Description of Artificial Sequence: Synthetic oligonucleotide
  Sense strand starting at position 2478 of SEQ ID NO: 913360
gucucuguggcagaaacau

SEQ ID NO: 921231 - RNA, 19 nt, Artificial Sequence
  Description of Artificial Sequence: Synthetic oligonucleotide
  Antisense strand to SEQ ID NO: 921230
auguuucugccacagagac

SEQ ID NO: 921232 - RNA, 19 nt, Artificial Sequence
  Description of Artificial Sequence: Synthetic oligonucleotide
  Sense strand starting at position 1853 of SEQ ID NO: 913360
acuaaucguuacccugaga

SEQ ID NO: 921233 - RNA, 19 nt, Artificial Sequence
  Description of Artificial Sequence: Synthetic oligonucleotide
  Antisense strand to SEQ ID NO: 921232
ucucaggguaacgauuagu

SEQ ID NO: 921234 - RNA, 19 nt, Artificial Sequence
  Description of Artificial Sequence: Synthetic oligonucleotide
  Sense strand starting at position 1001 of SEQ ID NO: 913360
ugagaucugucagccauaa

SEQ ID NO: 921235 - RNA, 19 nt, Artificial Sequence
  Description of Artificial Sequence: Synthetic oligonucleotide
  Antisense strand to SEQ ID NO: 921234
uuauggcugacagaucuca

SEQ ID NO: 921236 - RNA, 19 nt, Artificial Sequence
  Description of Artificial Sequence: Synthetic oligonucleotide
  Sense strand starting at position 963 of SEQ ID NO: 913360
gguauauggcuguaugacu

SEQ ID NO: 921237 - RNA, 19 nt, Artificial Sequence
  Description of Artificial Sequence: Synthetic oligonucleotide
  Antisense strand to SEQ ID NO: 921236
agucauacagccauauacc

SEQ ID NO: 921238 - RNA, 19 nt, Artificial Sequence
  Description of Artificial Sequence: Synthetic oligonucleotide
  Sense strand starting at position 2387 of SEQ ID NO: 913360
gguuuccuuccaugaauau

SEQ ID NO: 921239 - RNA, 19 nt, Artificial Sequence
  Description of Artificial Sequence: Synthetic oligonucleotide
  Antisense strand to SEQ ID NO: 921238
auauucauggaaggaaacc

SEQ ID NO: 921240 - RNA, 19 nt, Artificial Sequence
  Description of Artificial Sequence: Synthetic oligonucleotide
  Sense strand starting at position 737 of SEQ ID NO: 913361
acucacgggcuauaauaaa

SEQ ID NO: 921241 - RNA, 19 nt, Artificial Sequence
  Description of Artificial Sequence: Synthetic oligonucleotide
  Antisense strand to SEQ ID NO: 921240
uuuauuauagcccgugagu

SEQ ID NO: 921242 - RNA, 19 nt, Artificial Sequence
  Description of Artificial Sequence: Synthetic oligonucleotide
  Sense strand starting at position 2157 of SEQ ID NO: 913361
cuagaucuacacggagaau

SEQ ID NO: 921243 - RNA, 19 nt, Artificial Sequence
  Description of Artificial Sequence: Synthetic oligonucleotide
  Antisense strand to SEQ ID NO: 921242
auucuccguguagaucuag

SEQ ID NO: 921244 - RNA, 19 nt, Artificial Sequence
  Description of Artificial Sequence: Synthetic oligonucleotide
  Sense strand starting at position 1882 of SEQ ID NO: 913361
ugaaccuuuacaggagagu

SEQ ID NO: 921245 - RNA, 19 nt, Artificial Sequence
  Description of Artificial Sequence: Synthetic oligonucleotide
  Antisense strand to SEQ ID NO: 921244
acucuccuguaaagguuca

SEQ ID NO: 921246 - RNA, 19 nt, Artificial Sequence
  Description of Artificial Sequence: Synthetic oligonucleotide
  Sense strand starting at position 2743 of SEQ ID NO: 913361
ucgggagucauuugcacac

SEQ ID NO: 921247 - RNA, 19 nt, Artificial Sequence
  Description of Artificial Sequence: Synthetic oligonucleotide
  Antisense strand to SEQ ID NO: 921246
gugugcaaaugacucccga

SEQ ID NO: 921248 - RNA, 19 nt, Artificial Sequence
  Description of Artificial Sequence: Synthetic oligonucleotide
  Sense strand starting at position 498 of SEQ ID NO: 913361
guacaugugggagaugcaa

SEQ ID NO: 921249 - RNA, 19 nt, Artificial Sequence
  Description of Artificial Sequence: Synthetic oligonucleotide
  Antisense strand to SEQ ID NO: 921248
uugcaucucccacauguac

SEQ ID NO: 921250 - RNA, 19 nt, Artificial Sequence
  Description of Artificial Sequence: Synthetic oligonucleotide
  Sense strand starting at position 2959 of SEQ ID NO: 913361
gcaugugugcuuccgauac

SEQ ID NO: 921251 - RNA, 19 nt, Artificial Sequence
  Description of Artificial Sequence: Synthetic oligonucleotide
  Antisense strand to SEQ ID NO: 921250
guaucggaagcacacaugc

SEQ ID NO: 921252 - RNA, 19 nt, Artificial Sequence
  Description of Artificial Sequence: Synthetic oligonucleotide
  Sense strand starting at position 561 of SEQ ID NO: 913361
ggauaucuuuccuuuggga

SEQ ID NO: 921253 - RNA, 19 nt, Artificial Sequence
  Description of Artificial Sequence: Synthetic oligonucleotide
  Antisense strand to SEQ ID NO: 921252
ucccaaaggaaagauaucc

SEQ ID NO: 921254 - RNA, 19 nt, Artificial Sequence
  Description of Artificial Sequence: Synthetic oligonucleotide
  Sense strand starting at position 1085 of SEQ ID NO: 913361
cacagaucugccugggaaa

SEQ ID NO: 921255 - RNA, 19 nt, Artificial Sequence
  Description of Artificial Sequence: Synthetic oligonucleotide
  Antisense strand to SEQ ID NO: 921254
uuucccaggcagaucugug

SEQ ID NO: 921256 - RNA, 19 nt, Artificial Sequence
  Description of Artificial Sequence: Synthetic oligonucleotide
  Sense strand starting at position 1086 of SEQ ID NO: 913361
acagaucugccugggaaac

SEQ ID NO: 921257 - RNA, 19 nt, Artificial Sequence
  Description of Artificial Sequence: Synthetic oligonucleotide
  Antisense strand to SEQ ID NO: 921256
guuucccaggcagaucugu

SEQ ID NO: 921258 - RNA, 19 nt, Artificial Sequence
  Description of Artificial Sequence: Synthetic oligonucleotide
  Sense strand starting at position 1749 of SEQ ID NO: 913361
gcauuccaaucacuagaga

SEQ ID NO: 921259 - RNA, 19 nt, Artificial Sequence
  Description of Artificial Sequence: Synthetic oligonucleotide
  Antisense strand to SEQ ID NO: 921258
ucucuagugauuggaaugc

SEQ ID NO: 921260 - RNA, 19 nt, Artificial Sequence
  Description of Artificial Sequence: Synthetic oligonucleotide
  Sense strand starting at position 1710 of SEQ ID NO: 913361
aggugauauccucaggcac

SEQ ID NO: 921261 - RNA, 19 nt, Artificial Sequence
  Description of Artificial Sequence: Synthetic oligonucleotide
  Antisense strand to SEQ ID NO: 921260
gugccugaggauaucaccu

SEQ ID NO: 921262 - RNA, 19 nt, Artificial Sequence
  Description of Artificial Sequence: Synthetic oligonucleotide
  Sense strand starting at position 2735 of SEQ ID NO: 913361
cuaauaagucgggagucau

SEQ ID NO: 921263 - RNA, 19 nt, Artificial Sequence
  Description of Artificial Sequence: Synthetic oligonucleotide
  Antisense strand to SEQ ID NO: 921262
augacucccgacuuauuag

SEQ ID NO: 921264 - RNA, 19 nt, Artificial Sequence
  Description of Artificial Sequence: Synthetic oligonucleotide
  Sense strand starting at position 811 of SEQ ID NO: 913361
aggaaucaucaaugcccau

SEQ ID NO: 921265 - RNA, 19 nt, Artificial Sequence
  Description of Artificial Sequence: Synthetic oligonucleotide
  Antisense strand to SEQ ID NO: 921264
augggcauugaugauuccu

SEQ ID NO: 921266 - RNA, 19 nt, Artificial Sequence
  Description of Artificial Sequence: Synthetic oligonucleotide
  Sense strand starting at position 3796 of SEQ ID NO: 913361
agaagugugcuugaucaag

SEQ ID NO: 921267 - RNA, 19 nt, Artificial Sequence
  Description of Artificial Sequence: Synthetic oligonucleotide
  Antisense strand to SEQ ID NO: 921266
cuugaucaagcacacuucu

SEQ ID NO: 921268 - RNA, 19 nt, Artificial Sequence
  Description of Artificial Sequence: Synthetic oligonucleotide
  Sense strand starting at position 2451 of SEQ ID NO: 913361
agcauauugguguauggaa

SEQ ID NO: 921269 - RNA, 19 nt, Artificial Sequence
  Description of Artificial Sequence: Synthetic oligonucleotide
  Antisense strand to SEQ ID NO: 921268
uuccauacaccaauaugcu

SEQ ID NO: 921270 - RNA, 19 nt, Artificial Sequence
  Description of Artificial Sequence: Synthetic oligonucleotide
  Sense strand starting at position 1273 of SEQ ID NO: 913361
uuuccaugucauggaaaca

SEQ ID NO: 921271 - RNA, 19 nt, Artificial Sequence
  Description of Artificial Sequence: Synthetic oligonucleotide
  Antisense strand to SEQ ID NO: 921270
uguuuccaugacauggaaa

SEQ ID NO: 921272 - RNA, 19 nt, Artificial Sequence
  Description of Artificial Sequence: Synthetic oligonucleotide
  Sense strand starting at position 3761 of SEQ ID NO: 913361
cuuuauagacgcuaaugau

SEQ ID NO: 921273 - RNA, 19 nt, Artificial Sequence
  Description of Artificial Sequence: Synthetic oligonucleotide
  Antisense strand to SEQ ID NO: 921272
aucauuagcgucuauaaag

SEQ ID NO: 921274 - RNA, 19 nt, Artificial Sequence
  Description of Artificial Sequence: Synthetic oligonucleotide
  Sense strand starting at position 3214 of SEQ ID NO: 913361
cgcuuuauagucucugcga

SEQ ID NO: 921275 - RNA, 19 nt, Artificial Sequence
  Description of Artificial Sequence: Synthetic oligonucleotide
  Antisense strand to SEQ ID NO: 921274
ucgcagagacuauaaagcg

SEQ ID NO: 921276 - RNA, 19 nt, Artificial Sequence
  Description of Artificial Sequence: Synthetic oligonucleotide
  Sense strand starting at position 563 of SEQ ID NO: 913361
auaucuuuccuuugggaau

SEQ ID NO: 921277 - RNA, 19 nt, Artificial Sequence
  Description of Artificial Sequence: Synthetic oligonucleotide
  Antisense strand to SEQ ID NO: 921276
auucccaaaggaaagauau

SEQ ID NO: 921278 - RNA, 19 nt, Artificial Sequence
  Description of Artificial Sequence: Synthetic oligonucleotide
  Sense strand starting at position 1997 of SEQ ID NO: 913361
aagugauuccucggaaggg

SEQ ID NO: 921279 - RNA, 19 nt, Artificial Sequence
  Description of Artificial Sequence: Synthetic oligonucleotide
  Antisense strand to SEQ ID NO: 921278
cccuuccgaggaaucacuu

SEQ ID NO: 921280 - RNA, 19 nt, Artificial Sequence
  Description of Artificial Sequence: Synthetic oligonucleotide
  Sense strand starting at position 1908 of SEQ ID NO: 913361
ucguaaugcauuuaccgua

SEQ ID NO: 921281 - RNA, 19 nt, Artificial Sequence
  Description of Artificial Sequence: Synthetic oligonucleotide
  Antisense strand to SEQ ID NO: 921280
uacgguaaaugcauuacga

SEQ ID NO: 921282 - RNA, 19 nt, Artificial Sequence
  Description of Artificial Sequence: Synthetic oligonucleotide
  Sense strand starting at position 2280 of SEQ ID NO: 913361
ggagauccugacugcauua

SEQ ID NO: 921283 - RNA, 19 nt, Artificial Sequence
  Description of Artificial Sequence: Synthetic oligonucleotide
  Antisense strand to SEQ ID NO: 921282
uaaugcagucaggaucucc

SEQ ID NO: 921284 - RNA, 19 nt, Artificial Sequence
  Description of Artificial Sequence: Synthetic oligonucleotide
  Sense strand starting at position 2453 of SEQ ID NO: 913361
cauauugguguauggaaca

SEQ ID NO: 921285 - RNA, 19 nt, Artificial Sequence
  Description of Artificial Sequence: Synthetic oligonucleotide
  Antisense strand to SEQ ID NO: 921284
uguuccauacaccaauaug

SEQ ID NO: 921286 - RNA, 19 nt, Artificial Sequence
  Description of Artificial Sequence: Synthetic oligonucleotide
  Sense strand starting at position 2619 of SEQ ID NO: 913361
ccaccugaguucucaauga

SEQ ID NO: 921287 - RNA, 19 nt, Artificial Sequence
  Description of Artificial Sequence: Synthetic oligonucleotide
  Antisense strand to SEQ ID NO: 921286
ucauugagaacucaggugg

SEQ ID NO: 921288 - RNA, 19 nt, Artificial Sequence
  Description of Artificial Sequence: Synthetic oligonucleotide
  Sense strand starting at position 3962 of SEQ ID NO: 913361
agaaguugagaauguguca

SEQ ID NO: 921289 - RNA, 19 nt, Artificial Sequence
  Description of Artificial Sequence: Synthetic oligonucleotide
  Antisense strand to SEQ ID NO: 921288
ugacacauucucaacuucu

SEQ ID NO: 921290 - RNA, 19 nt, Artificial Sequence
  Description of Artificial Sequence: Synthetic oligonucleotide
  Sense strand starting at position 1226 of SEQ ID NO: 913361
uugacugggcugugaagaa

SEQ ID NO: 921291 - RNA, 19 nt, Artificial Sequence
  Description of Artificial Sequence: Synthetic oligonucleotide
  Antisense strand to SEQ ID NO: 921290
uucuucacagcccagucaa

SEQ ID NO: 921292 - RNA, 19 nt, Artificial Sequence
  Description of Artificial Sequence: Synthetic oligonucleotide
  Sense strand starting at position 3529 of SEQ ID NO: 913361
guauuugggucuuuguagu

SEQ ID NO: 921293 - RNA, 19 nt, Artificial Sequence
  Description of Artificial Sequence: Synthetic oligonucleotide
  Antisense strand to SEQ ID NO: 921292
acuacaaagacccaaauac

SEQ ID NO: 921294 - RNA, 19 nt, Artificial Sequence
  Description of Artificial Sequence: Synthetic oligonucleotide
  Sense strand starting at position 2279 of SEQ ID NO: 913361
uggagauccugacugcauu

SEQ ID NO: 921295 - RNA, 19 nt, Artificial Sequence
  Description of Artificial Sequence: Synthetic oligonucleotide
  Antisense strand to SEQ ID NO: 921294
aaugcagucaggaucucca

SEQ ID NO: 921296 - RNA, 19 nt, Artificial Sequence
  Description of Artificial Sequence: Synthetic oligonucleotide
  Sense strand starting at position 3056 of SEQ ID NO: 913361
aguccaaugcaucauguga

SEQ ID NO: 921297 - RNA, 19 nt, Artificial Sequence
  Description of Artificial Sequence: Synthetic oligonucleotide
  Antisense strand to SEQ ID NO: 921296
ucacaugaugcauuggacu

SEQ ID NO: 921298 - RNA, 19 nt, Artificial Sequence
  Description of Artificial Sequence: Synthetic oligonucleotide
  Sense strand starting at position 735 of SEQ ID NO: 913361
guacucacgggcuauaaua

SEQ ID NO: 921299 - RNA, 19 nt, Artificial Sequence
  Description of Artificial Sequence: Synthetic oligonucleotide
  Antisense strand to SEQ ID NO: 921298
uauuauagcccgugaguac

SEQ ID NO: 921300 - RNA, 19 nt, Artificial Sequence
  Description of Artificial Sequence: Synthetic oligonucleotide
  Sense strand starting at position 1995 of SEQ ID NO: 913361
cuaagugauuccucggaag

SEQ ID NO: 921301 - RNA, 19 nt, Artificial Sequence
  Description of Artificial Sequence: Synthetic oligonucleotide
  Antisense strand to SEQ ID NO: 921300
cuuccgaggaaucacuuag

SEQ ID NO: 921302 - RNA, 19 nt, Artificial Sequence
  Description of Artificial Sequence: Synthetic oligonucleotide
  Sense strand starting at position 3352 of SEQ ID NO: 913361
uagaguuaccaagggccua

SEQ ID NO: 921303 - RNA, 19 nt, Artificial Sequence
  Description of Artificial Sequence: Synthetic oligonucleotide
  Antisense strand to SEQ ID NO: 921302
uaggcccuugguaacucua

SEQ ID NO: 921304 - RNA, 19 nt, Artificial Sequence
  Description of Artificial Sequence: Synthetic oligonucleotide
  Sense strand starting at position 417 of SEQ ID NO: 913361
ggcagagagucuucuauag

SEQ ID NO: 921305 - RNA, 19 nt, Artificial Sequence
  Description of Artificial Sequence: Synthetic oligonucleotide
  Antisense strand to SEQ ID NO: 921304
cuauagaagacucucugcc

SEQ ID NO: 921306 - RNA, 19 nt, Artificial Sequence
  Description of Artificial Sequence: Synthetic oligonucleotide
  Sense strand starting at position 3000 of SEQ ID NO: 913361
cggugcauuugacuuugua

SEQ ID NO: 921307 - RNA, 19 nt, Artificial Sequence
  Description of Artificial Sequence: Synthetic oligonucleotide
  Antisense strand to SEQ ID NO: 921306
uacaaagucaaaugcaccg

SEQ ID NO: 921308 - RNA, 19 nt, Artificial Sequence
  Description of Artificial Sequence: Synthetic oligonucleotide
  Sense strand starting at position 3027 of SEQ ID NO: 913361
aguguagguguguaaagga

SEQ ID NO: 921309 - RNA, 19 nt, Artificial Sequence
  Description of Artificial Sequence: Synthetic oligonucleotide
  Antisense strand to SEQ ID NO: 921308
uccuuuacacaccuacacu

SEQ ID NO: 921310 - RNA, 19 nt, Artificial Sequence
  Description of Artificial Sequence: Synthetic oligonucleotide
  Sense strand starting at position 2530 of SEQ ID NO: 913361
gaaucugugcuguaaucag

SEQ ID NO: 921311 - RNA, 19 nt, Artificial Sequence
  Description of Artificial Sequence: Synthetic oligonucleotide
  Antisense strand to SEQ ID NO: 921310
cugauuacagcacagauuc

SEQ ID NO: 921312 - RNA, 19 nt, Artificial Sequence
  Description of Artificial Sequence: Synthetic oligonucleotide
  Sense strand starting at position 3432 of SEQ ID NO: 913361
ucuggaaaguuucuccauu

SEQ ID NO: 921313 - RNA, 19 nt, Artificial Sequence
  Description of Artificial Sequence: Synthetic oligonucleotide
  Antisense strand to SEQ ID NO: 921312
aauggagaaacuuuccaga

SEQ ID NO: 921314 - RNA, 19 nt, Artificial Sequence
  Description of Artificial Sequence: Synthetic oligonucleotide
  Sense strand starting at position 839 of SEQ ID NO: 913361
uaaagcaaucaguguugaa

SEQ ID NO: 921315 - RNA, 19 nt, Artificial Sequence
  Description of Artificial Sequence: Synthetic oligonucleotide
  Antisense strand to SEQ ID NO: 921314
uucaacacugauugcuuua

SEQ ID NO: 921316 - RNA, 19 nt, Artificial Sequence
  Description of Artificial Sequence: Synthetic oligonucleotide
  Sense strand starting at position 509 of SEQ ID NO: 913361
agaugcaaucugcauguca

SEQ ID NO: 921317 - RNA, 19 nt, Artificial Sequence
  Description of Artificial Sequence: Synthetic oligonucleotide
  Antisense strand to SEQ ID NO: 921316
ugacaugcagauugcaucu

SEQ ID NO: 921318 - RNA, 19 nt, Artificial Sequence
  Description of Artificial Sequence: Synthetic oligonucleotide
  Sense strand starting at position 1984 of SEQ ID NO: 913361
gcuggaagugucuaaguga

SEQ ID NO: 921319 - RNA, 19 nt, Artificial Sequence
  Description of Artificial Sequence: Synthetic oligonucleotide
  Antisense strand to SEQ ID NO: 921318
ucacuuagacacuuccagc

SEQ ID NO: 921320 - RNA, 19 nt, Artificial Sequence
  Description of Artificial Sequence: Synthetic oligonucleotide
  Sense strand starting at position 567 of SEQ ID NO: 913362
cagaccauguuauugagaa

SEQ ID NO: 921321 - RNA, 19 nt, Artificial Sequence
  Description of Artificial Sequence: Synthetic oligonucleotide
  Antisense strand to SEQ ID NO: 921320
uucucaauaacauggucug

SEQ ID NO: 921322 - RNA, 19 nt, Artificial Sequence
  Description of Artificial Sequence: Synthetic oligonucleotide
  Sense strand starting at position 2208 of SEQ ID NO: 913362
uucugauaagcagacuuau

SEQ ID NO: 921323 - RNA, 19 nt, Artificial Sequence
  Description of Artificial Sequence: Synthetic oligonucleotide
  Antisense strand to SEQ ID NO: 921322
auaagucugcuuaucagaa

SEQ ID NO: 921324 - RNA, 19 nt, Artificial Sequence
  Description of Artificial Sequence: Synthetic oligonucleotide
  Sense strand starting at position 3103 of SEQ ID NO: 913362
aauggagggaaguguuaau

SEQ ID NO: 921325 - RNA, 19 nt, Artificial Sequence
  Description of Artificial Sequence: Synthetic oligonucleotide
  Antisense strand to SEQ ID NO: 921324
auuaacacuucccuccauu

SEQ ID NO: 921326 - RNA, 19 nt, Artificial Sequence
  Description of Artificial Sequence: Synthetic oligonucleotide
  Sense strand starting at position 1789 of SEQ ID NO: 913362
gaaggaaucccuggaguug

SEQ ID NO: 921327 - RNA, 19 nt, Artificial Sequence
  Description of Artificial Sequence: Synthetic oligonucleotide
  Antisense strand to SEQ ID NO: 921326
caacuccagggauuccuuc

SEQ ID NO: 921328 - RNA, 19 nt, Artificial Sequence
  Description of Artificial Sequence: Synthetic oligonucleotide
  Sense strand starting at position 3381 of SEQ ID NO: 913362
uuucuuugagauggacaca

SEQ ID NO: 921329 - RNA, 19 nt, Artificial Sequence
  Description of Artificial Sequence: Synthetic oligonucleotide
  Antisense strand to SEQ ID NO: 921328
uguguccaucucaaagaaa

SEQ ID NO: 921330 - RNA, 19 nt, Artificial Sequence
  Description of Artificial Sequence: Synthetic oligonucleotide
  Sense strand starting at position 1287 of SEQ ID NO: 913362
uuggguuagguugacagau

SEQ ID NO: 921331 - RNA, 19 nt, Artificial Sequence
  Description of Artificial Sequence: Synthetic oligonucleotide
  Antisense strand to SEQ ID NO: 921330
aucugucaaccuaacccaa

SEQ ID NO: 921332 - RNA, 19 nt, Artificial Sequence
  Description of Artificial Sequence: Synthetic oligonucleotide
  Sense strand starting at position 2992 of SEQ ID NO: 913362
aucuuugagguguaaauua

SEQ ID NO: 921333 - RNA, 19 nt, Artificial Sequence
  Description of Artificial Sequence: Synthetic oligonucleotide
  Antisense strand to SEQ ID NO: 921332
uaauuuacaccucaaagau

SEQ ID NO: 921334 - RNA, 19 nt, Artificial Sequence
  Description of Artificial Sequence: Synthetic oligonucleotide
  Sense strand starting at position 2834 of SEQ ID NO: 913362
agggaauucugaguugauu

SEQ ID NO: 921335 - RNA, 19 nt, Artificial Sequence
  Description of Artificial Sequence: Synthetic oligonucleotide
  Antisense strand to SEQ ID NO: 921334
aaucaacucagaauucccu

SEQ ID NO: 921336 - RNA, 19 nt, Artificial Sequence
  Description of Artificial Sequence: Synthetic oligonucleotide
  Sense strand starting at position 481 of SEQ ID NO: 913362
uguguuaguaauuaaggaa

SEQ ID NO: 921337 - RNA, 19 nt, Artificial Sequence
  Description of Artificial Sequence: Synthetic oligonucleotide
  Antisense strand to SEQ ID NO: 921336
uuccuuaauuacuaacaca

SEQ ID NO: 921338 - RNA, 19 nt, Artificial Sequence
  Description of Artificial Sequence: Synthetic oligonucleotide
  Sense strand starting at position 2997 of SEQ ID NO: 913362
ugagguguaaauuauguaa

SEQ ID NO: 921339 - RNA, 19 nt, Artificial Sequence
  Description of Artificial Sequence: Synthetic oligonucleotide
  Antisense strand to SEQ ID NO: 921338
uuacauaauuuacaccuca

SEQ ID NO: 921340 - RNA, 19 nt, Artificial Sequence
  Description of Artificial Sequence: Synthetic oligonucleotide
  Sense strand starting at position 2516 of SEQ ID NO: 913362
aauggaucagaguggucaa

SEQ ID NO: 921341 - RNA, 19 nt, Artificial Sequence
  Description of Artificial Sequence: Synthetic oligonucleotide
  Antisense strand to SEQ ID NO: 921340
uugaccacucugauccauu

SEQ ID NO: 921342 - RNA, 19 nt, Artificial Sequence
  Description of Artificial Sequence: Synthetic oligonucleotide
  Sense strand starting at position 3719 of SEQ ID NO: 913362
gggucuuggauaugaaauc

SEQ ID NO: 921343 - RNA, 19 nt, Artificial Sequence
  Description of Artificial Sequence: Synthetic oligonucleotide
  Antisense strand to SEQ ID NO: 921342
gauuucauauccaagaccc

SEQ ID NO: 921344 - RNA, 19 nt, Artificial Sequence
  Description of Artificial Sequence: Synthetic oligonucleotide
  Sense strand starting at position 1065 of SEQ ID NO: 913362
uccagugaccuaugaggga

SEQ ID NO: 921345 - RNA, 19 nt, Artificial Sequence
  Description of Artificial Sequence: Synthetic oligonucleotide
  Antisense strand to SEQ ID NO: 921344
ucccucauaggucacugga

SEQ ID NO: 921346 - RNA, 19 nt, Artificial Sequence
  Description of Artificial Sequence: Synthetic oligonucleotide
  Sense strand starting at position 3597 of SEQ ID NO: 913362
gucagaaguagucauggac

SEQ ID NO: 921347 - RNA, 19 nt, Artificial Sequence
  Description of Artificial Sequence: Synthetic oligonucleotide
  Antisense strand to SEQ ID NO: 921346
guccaugacuacuucugac

SEQ ID NO: 921348 - RNA, 19 nt, Artificial Sequence
  Description of Artificial Sequence: Synthetic oligonucleotide
  Sense strand starting at position 3852 of SEQ ID NO: 913362
gaaugcuagguugaagagu

SEQ ID NO: 921349 - RNA, 19 nt, Artificial Sequence
  Description of Artificial Sequence: Synthetic oligonucleotide
  Antisense strand to SEQ ID NO: 921348
acucuucaaccuagcauuc

SEQ ID NO: 921350 - RNA, 19 nt, Artificial Sequence
  Description of Artificial Sequence: Synthetic oligonucleotide
  Sense strand starting at position 3729 of SEQ ID NO: 913362
uaugaaaucccagagcugu

SEQ ID NO: 921351 - RNA, 19 nt, Artificial Sequence
  Description of Artificial Sequence: Synthetic oligonucleotide
  Antisense strand to SEQ ID NO: 921350
acagcucugggauuucaua

SEQ ID NO: 921352 - RNA, 19 nt, Artificial Sequence
  Description of Artificial Sequence: Synthetic oligonucleotide
  Sense strand starting at position 3600 of SEQ ID NO: 913362
agaaguagucauggacacu

SEQ ID NO: 921353 - RNA, 19 nt, Artificial Sequence
  Description of Artificial Sequence: Synthetic oligonucleotide
  Antisense strand to SEQ ID NO: 921352
aguguccaugacuacuucu

SEQ ID NO: 921354 - RNA, 19 nt, Artificial Sequence
  Description of Artificial Sequence: Synthetic oligonucleotide
  Sense strand starting at position 1856 of SEQ ID NO: 913362
gugagauaaucuuccaacc

SEQ ID NO: 921355 - RNA, 19 nt, Artificial Sequence
  Description of Artificial Sequence: Synthetic oligonucleotide
  Antisense strand to SEQ ID NO: 921354
gguuggaagauuaucucac

SEQ ID NO: 921356 - RNA, 19 nt, Artificial Sequence
  Description of Artificial Sequence: Synthetic oligonucleotide
  Sense strand starting at position 225 of SEQ ID NO: 913362
agaaucagcccuugaccaa

SEQ ID NO: 921357 - RNA, 19 nt, Artificial Sequence
  Description of Artificial Sequence: Synthetic oligonucleotide
  Antisense strand to SEQ ID NO: 921356
uuggucaagggcugauucu

SEQ ID NO: 921358 - RNA, 19 nt, Artificial Sequence
  Description of Artificial Sequence: Synthetic oligonucleotide
  Sense strand starting at position 1632 of SEQ ID NO: 913362
ugcauuacaccugaaagca

SEQ ID NO: 921359 - RNA, 19 nt, Artificial Sequence
  Description of Artificial Sequence: Synthetic oligonucleotide
  Antisense strand to SEQ ID NO: 921358
ugcuuucagguguaaugca

SEQ ID NO: 921360 - RNA, 19 nt, Artificial Sequence
  Description of Artificial Sequence: Synthetic oligonucleotide
  Sense strand starting at position 258 of SEQ ID NO: 913362
uggucucuaagugaugacu

SEQ ID NO: 921361 - RNA, 19 nt, Artificial Sequence
  Description of Artificial Sequence: Synthetic oligonucleotide
  Antisense strand to SEQ ID NO: 921360
agucaucacuuagagacca

SEQ ID NO: 921362 - RNA, 19 nt, Artificial Sequence
  Description of Artificial Sequence: Synthetic oligonucleotide
  Sense strand starting at position 2172 of SEQ ID NO: 913362
guagaugcccuacauauca

SEQ ID NO: 921363 - RNA, 19 nt, Artificial Sequence
  Description of Artificial Sequence: Synthetic oligonucleotide
  Antisense strand to SEQ ID NO: 921362
ugauauguagggcaucuac

SEQ ID NO: 921364 - RNA, 19 nt, Artificial Sequence
  Description of Artificial Sequence: Synthetic oligonucleotide
  Sense strand starting at position 3700 of SEQ ID NO: 913362
aggacugugggauguuuaa

SEQ ID NO: 921365 - RNA, 19 nt, Artificial Sequence
  Description of Artificial Sequence: Synthetic oligonucleotide
  Antisense strand to SEQ ID NO: 921364
uuaaacaucccacaguccu

SEQ ID NO: 921366 - RNA, 19 nt, Artificial Sequence
  Description of Artificial Sequence: Synthetic oligonucleotide
  Sense strand starting at position 2436 of SEQ ID NO: 913362
gaugucacuggccauaauu

SEQ ID NO: 921367 - RNA, 19 nt, Artificial Sequence
  Description of Artificial Sequence: Synthetic oligonucleotide
  Antisense strand to SEQ ID NO: 921366
aauuauggccagugacauc

SEQ ID NO: 921368 - RNA, 19 nt, Artificial Sequence
  Description of Artificial Sequence: Synthetic oligonucleotide
  Sense strand starting at position 714 of SEQ ID NO: 913362
agucuugucaaagaguuau

SEQ ID NO: 921369 - RNA, 19 nt, Artificial Sequence
  Description of Artificial Sequence: Synthetic oligonucleotide
  Antisense strand to SEQ ID NO: 921368
auaacucuuugacaagacu

SEQ ID NO: 921370 - RNA, 19 nt, Artificial Sequence
  Description of Artificial Sequence: Synthetic oligonucleotide
  Sense strand starting at position 640 of SEQ ID NO: 913362
acuggacauguguaucuuu

SEQ ID NO: 921371 - RNA, 19 nt, Artificial Sequence
  Description of Artificial Sequence: Synthetic oligonucleotide
  Antisense strand to SEQ ID NO: 921370
aaagauacacauguccagu

SEQ ID NO: 921372 - RNA, 19 nt, Artificial Sequence
  Description of Artificial Sequence: Synthetic oligonucleotide
  Sense strand starting at position 761 of SEQ ID NO: 913362
cucuuuacggguuagaauc

SEQ ID NO: 921373 - RNA, 19 nt, Artificial Sequence
  Description of Artificial Sequence: Synthetic oligonucleotide
  Antisense strand to SEQ ID NO: 921372
gauucuaacccguaaagag

SEQ ID NO: 921374 - RNA, 19 nt, Artificial Sequence
  Description of Artificial Sequence: Synthetic oligonucleotide
  Sense strand starting at position 2263 of SEQ ID NO: 913362
ccuauucccuggguaaaca

SEQ ID NO: 921375 - RNA, 19 nt, Artificial Sequence
  Description of Artificial Sequence: Synthetic oligonucleotide
  Antisense strand to SEQ ID NO: 921374
uguuuacccagggaauagg

SEQ ID NO: 921376 - RNA, 19 nt, Artificial Sequence
  Description of Artificial Sequence: Synthetic oligonucleotide
  Sense strand starting at position 2329 of SEQ ID NO: 913362
uuuggaauucuuuggagug

SEQ ID NO: 921377 - RNA, 19 nt, Artificial Sequence
  Description of Artificial Sequence: Synthetic oligonucleotide
  Antisense strand to SEQ ID NO: 921376
cacuccaaagaauuccaaa

SEQ ID NO: 921378 - RNA, 19 nt, Artificial Sequence
  Description of Artificial Sequence: Synthetic oligonucleotide
  Sense strand starting at position 267 of SEQ ID NO: 913362
agugaugacuuuguaauua

SEQ ID NO: 921379 - RNA, 19 nt, Artificial Sequence
  Description of Artificial Sequence: Synthetic oligonucleotide
  Antisense strand to SEQ ID NO: 921378
uaauuacaaagucaucacu

SEQ ID NO: 921380 - RNA, 19 nt, Artificial Sequence
  Description of Artificial Sequence: Synthetic oligonucleotide
  Sense strand starting at position 2261 of SEQ ID NO: 913362
auccuauucccuggguaaa

SEQ ID NO: 921381 - RNA, 19 nt, Artificial Sequence
  Description of Artificial Sequence: Synthetic oligonucleotide
  Antisense strand to SEQ ID NO: 921380
uuuacccagggaauaggau

SEQ ID NO: 921382 - RNA, 19 nt, Artificial Sequence
  Description of Artificial Sequence: Synthetic oligonucleotide
  Sense strand starting at position 1276 of SEQ ID NO: 913362
uaaaucaaagcuuggguua

SEQ ID NO: 921383 - RNA, 19 nt, Artificial Sequence
  Description of Artificial Sequence: Synthetic oligonucleotide
  Antisense strand to SEQ ID NO: 921382
uaacccaagcuuugauuua

SEQ ID NO: 921384 - RNA, 19 nt, Artificial Sequence
  Description of Artificial Sequence: Synthetic oligonucleotide
  Sense strand starting at position 266 of SEQ ID NO: 913362
aagugaugacuuuguaauu

SEQ ID NO: 921385 - RNA, 19 nt, Artificial Sequence
  Description of Artificial Sequence: Synthetic oligonucleotide
  Antisense strand to SEQ ID NO: 921384
aauuacaaagucaucacuu

SEQ ID NO: 921386 - RNA, 19 nt, Artificial Sequence
  Description of Artificial Sequence: Synthetic oligonucleotide
  Sense strand starting at position 791 of SEQ ID NO: 913362
caucuuaaugauuggguuu

SEQ ID NO: 921387 - RNA, 19 nt, Artificial Sequence
  Description of Artificial Sequence: Synthetic oligonucleotide
  Antisense strand to SEQ ID NO: 921386
aaacccaaucauuaagaug

SEQ ID NO: 921388 - RNA, 19 nt, Artificial Sequence
  Description of Artificial Sequence: Synthetic oligonucleotide
  Sense strand starting at position 1508 of SEQ ID NO: 913362
aggagaagauauuaaauag

SEQ ID NO: 921389 - RNA, 19 nt, Artificial Sequence
  Description of Artificial Sequence: Synthetic oligonucleotide
  Antisense strand to SEQ ID NO: 921388
cuauuuaauaucuucuccu

SEQ ID NO: 921390 - RNA, 19 nt, Artificial Sequence
  Description of Artificial Sequence: Synthetic oligonucleotide
  Sense strand starting at position 66 of SEQ ID NO: 913362
aucugcaaggucugagaua

SEQ ID NO: 921391 - RNA, 19 nt, Artificial Sequence
  Description of Artificial Sequence: Synthetic oligonucleotide
  Antisense strand to SEQ ID NO: 921390
uaucucagaccuugcagau

SEQ ID NO: 921392 - RNA, 19 nt, Artificial Sequence
  Description of Artificial Sequence: Synthetic oligonucleotide
  Sense strand starting at position 3364 of SEQ ID NO: 913362
aggaaaucuccugggcuuu

SEQ ID NO: 921393 - RNA, 19 nt, Artificial Sequence
  Description of Artificial Sequence: Synthetic oligonucleotide
  Antisense strand to SEQ ID NO: 921392
aaagcccaggagauuuccu

SEQ ID NO: 921394 - RNA, 19 nt, Artificial Sequence
  Description of Artificial Sequence: Synthetic oligonucleotide
  Sense strand starting at position 3963 of SEQ ID NO: 913362
cugauuaaauggcuccuua

SEQ ID NO: 921395 - RNA, 19 nt, Artificial Sequence
  Description of Artificial Sequence: Synthetic oligonucleotide
  Antisense strand to SEQ ID NO: 921394
uaaggagccauuuaaucag

SEQ ID NO: 921396 - RNA, 19 nt, Artificial Sequence
  Description of Artificial Sequence: Synthetic oligonucleotide
  Sense strand starting at position 25 of SEQ ID NO: 913362
gugaguucuacugacaagc

SEQ ID NO: 921397 - RNA, 19 nt, Artificial Sequence
  Description of Artificial Sequence: Synthetic oligonucleotide
  Antisense strand to SEQ ID NO: 921396
gcuugucaguagaacucac

SEQ ID NO: 921398 - RNA, 19 nt, Artificial Sequence
  Description of Artificial Sequence: Synthetic oligonucleotide
  Sense strand starting at position 1747 of SEQ ID NO: 913362
caucauguuggcugaagga

SEQ ID NO: 921399 - RNA, 19 nt, Artificial Sequence
  Description of Artificial Sequence: Synthetic oligonucleotide
  Antisense strand to SEQ ID NO: 921398
uccuucagccaacaugaug

SEQ ID NO: 921400 - RNA, 19 nt, Artificial Sequence
  Description of Artificial Sequence: Synthetic oligonucleotide
  Sense strand starting at position 39 of SEQ ID NO: 913363
ucgccuucucgacuggcaa

SEQ ID NO: 921401 - RNA, 19 nt, Artificial Sequence
  Description of Artificial Sequence: Synthetic oligonucleotide
  Antisense strand to SEQ ID NO: 921400
uugccagucgagaaggcga

SEQ ID NO: 921402 - RNA, 19 nt, Artificial Sequence
  Description of Artificial Sequence: Synthetic oligonucleotide
  Sense strand starting at position 1120 of SEQ ID NO: 913363
ggugucuuuccgcuccaca

SEQ ID NO: 921403 - RNA, 19 nt, Artificial Sequence
  Description of Artificial Sequence: Synthetic oligonucleotide
  Antisense strand to SEQ ID NO: 921402
uguggagcggaaagacacc

SEQ ID NO: 921404 - RNA, 19 nt, Artificial Sequence
  Description of Artificial Sequence: Synthetic oligonucleotide
  Sense strand starting at position 3224 of SEQ ID NO: 913363
uaaagucuucuggaaggca

SEQ ID NO: 921405 - RNA, 19 nt, Artificial Sequence
  Description of Artificial Sequence: Synthetic oligonucleotide
  Antisense strand to SEQ ID NO: 921404
ugccuuccagaagacuuua

SEQ ID NO: 921406 - RNA, 19 nt, Artificial Sequence
  Description of Artificial Sequence: Synthetic oligonucleotide
  Sense strand starting at position 744 of SEQ ID NO: 913363
uggauauugauuggagcaa

SEQ ID NO: 921407 - RNA, 19 nt, Artificial Sequence
  Description of Artificial Sequence: Synthetic oligonucleotide
  Antisense strand to SEQ ID NO: 921406
uugcuccaaucaauaucca

SEQ ID NO: 921408 - RNA, 19 nt, Artificial Sequence
  Description of Artificial Sequence: Synthetic oligonucleotide
  Sense strand starting at position 3038 of SEQ ID NO: 913363
uuucgauuccuuuagggag

SEQ ID NO: 921409 - RNA, 19 nt, Artificial Sequence
  Description of Artificial Sequence: Synthetic oligonucleotide
  Antisense strand to SEQ ID NO: 921408
cucccuaaaggaaucgaaa

SEQ ID NO: 921410 - RNA, 19 nt, Artificial Sequence
  Description of Artificial Sequence: Synthetic oligonucleotide
  Sense strand starting at position 879 of SEQ ID NO: 913363
gguuauauucuacacuauu

SEQ ID NO: 921411 - RNA, 19 nt, Artificial Sequence
  Description of Artificial Sequence: Synthetic oligonucleotide
  Antisense strand to SEQ ID NO: 921410
aauaguguagaauauaacc

SEQ ID NO: 921412 - RNA, 19 nt, Artificial Sequence
  Description of Artificial Sequence: Synthetic oligonucleotide
  Sense strand starting at position 3072 of SEQ ID NO: 913363
uccuauuugccaggccuaa

SEQ ID NO: 921413 - RNA, 19 nt, Artificial Sequence
  Description of Artificial Sequence: Synthetic oligonucleotide
  Antisense strand to SEQ ID NO: 921412
uuaggccuggcaaauagga

SEQ ID NO: 921414 - RNA, 19 nt, Artificial Sequence
  Description of Artificial Sequence: Synthetic oligonucleotide
  Sense strand starting at position 789 of SEQ ID NO: 913363
agaaguaacuuagcuaaau

SEQ ID NO: 921415 - RNA, 19 nt, Artificial Sequence
  Description of Artificial Sequence: Synthetic oligonucleotide
  Antisense strand to SEQ ID NO: 921414
auuuagcuaaguuacuucu

SEQ ID NO: 921416 - RNA, 19 nt, Artificial Sequence
  Description of Artificial Sequence: Synthetic oligonucleotide
  Sense strand starting at position 436 of SEQ ID NO: 913363
acaggauagcagugaauug

SEQ ID NO: 921417 - RNA, 19 nt, Artificial Sequence
  Description of Artificial Sequence: Synthetic oligonucleotide
  Antisense strand to SEQ ID NO: 921416
caauucacugcuauccugu

SEQ ID NO: 921418 - RNA, 19 nt, Artificial Sequence
  Description of Artificial Sequence: Synthetic oligonucleotide
  Sense strand starting at position 743 of SEQ ID NO: 913363
cuggauauugauuggagca

SEQ ID NO: 921419 - RNA, 19 nt, Artificial Sequence
  Description of Artificial Sequence: Synthetic oligonucleotide
  Antisense strand to SEQ ID NO: 921418
ugcuccaaucaauauccag

SEQ ID NO: 921420 - RNA, 19 nt, Artificial Sequence
  Description of Artificial Sequence: Synthetic oligonucleotide
  Sense strand starting at position 3220 of SEQ ID NO: 913363
guaauaaagucuucuggaa

SEQ ID NO: 921421 - RNA, 19 nt, Artificial Sequence
  Description of Artificial Sequence: Synthetic oligonucleotide
  Antisense strand to SEQ ID NO: 921420
uuccagaagacuuuauuac

SEQ ID NO: 921422 - RNA, 19 nt, Artificial Sequence
  Description of Artificial Sequence: Synthetic oligonucleotide
  Sense strand starting at position 80 of SEQ ID NO: 913363
uuuguucuucaggagugga

SEQ ID NO: 921423 - RNA, 19 nt, Artificial Sequence
  Description of Artificial Sequence: Synthetic oligonucleotide
  Antisense strand to SEQ ID NO: 921422
uccacuccugaagaacaaa

SEQ ID NO: 921424 - RNA, 19 nt, Artificial Sequence
  Description of Artificial Sequence: Synthetic oligonucleotide
  Sense strand starting at position 3093 of SEQ ID NO: 913363
acgagugccguuuacauuu

SEQ ID NO: 921425 - RNA, 19 nt, Artificial Sequence
  Description of Artificial Sequence: Synthetic oligonucleotide
  Antisense strand to SEQ ID NO: 921424
aaauguaaacggcacucgu

SEQ ID NO: 921426 - RNA, 19 nt, Artificial Sequence
  Description of Artificial Sequence: Synthetic oligonucleotide
  Sense strand starting at position 574 of SEQ ID NO: 913363
cugaccuagugaguacuaa

SEQ ID NO: 921427 - RNA, 19 nt, Artificial Sequence
  Description of Artificial Sequence: Synthetic oligonucleotide
  Antisense strand to SEQ ID NO: 921426
uuaguacucacuaggucag

SEQ ID NO: 921428 - RNA, 19 nt, Artificial Sequence
  Description of Artificial Sequence: Synthetic oligonucleotide
  Sense strand starting at position 3378 of SEQ ID NO: 913363
guaacagugauguggauag

SEQ ID NO: 921429 - RNA, 19 nt, Artificial Sequence
  Description of Artificial Sequence: Synthetic oligonucleotide
  Antisense strand to SEQ ID NO: 921428
cuauccacaucacuguuac

SEQ ID NO: 921430 - RNA, 19 nt, Artificial Sequence
  Description of Artificial Sequence: Synthetic oligonucleotide
  Sense strand starting at position 828 of SEQ ID NO: 913363
ggaggcuaucuguauagug

SEQ ID NO: 921431 - RNA, 19 nt, Artificial Sequence
  Description of Artificial Sequence: Synthetic oligonucleotide
  Antisense strand to SEQ ID NO: 921430
cacuauacagauagccucc

SEQ ID NO: 921432 - RNA, 19 nt, Artificial Sequence
  Description of Artificial Sequence: Synthetic oligonucleotide
  Sense strand starting at position 1080 of SEQ ID NO: 913363
cagggaacucgcuacgacu

SEQ ID NO: 921433 - RNA, 19 nt, Artificial Sequence
  Description of Artificial Sequence: Synthetic oligonucleotide
  Antisense strand to SEQ ID NO: 921432
agucguagcgaguucccug

SEQ ID NO: 921434 - RNA, 19 nt, Artificial Sequence
  Description of Artificial Sequence: Synthetic oligonucleotide
  Sense strand starting at position 975 of SEQ ID NO: 913363
ugcguuauaagggaaaguu

SEQ ID NO: 921435 - RNA, 19 nt, Artificial Sequence
  Description of Artificial Sequence: Synthetic oligonucleotide
  Antisense strand to SEQ ID NO: 921434
aacuuucccuuauaacgca

SEQ ID NO: 921436 - RNA, 19 nt, Artificial Sequence
  Description of Artificial Sequence: Synthetic oligonucleotide
  Sense strand starting at position 894 of SEQ ID NO: 913363
uauuccgugcucuagaaag

SEQ ID NO: 921437 - RNA, 19 nt, Artificial Sequence
  Description of Artificial Sequence: Synthetic oligonucleotide
  Antisense strand to SEQ ID NO: 921436
cuuucuagagcacggaaua

SEQ ID NO: 921438 - RNA, 19 nt, Artificial Sequence
  Description of Artificial Sequence: Synthetic oligonucleotide
  Sense strand starting at position 3352 of SEQ ID NO: 913363
ucaugagcagauugaguuu

SEQ ID NO: 921439 - RNA, 19 nt, Artificial Sequence
  Description of Artificial Sequence: Synthetic oligonucleotide
  Antisense strand to SEQ ID NO: 921438
aaacucaaucugcucauga

SEQ ID NO: 921440 - RNA, 19 nt, Artificial Sequence
  Description of Artificial Sequence: Synthetic oligonucleotide
  Sense strand starting at position 868 of SEQ ID NO: 913363
acauucucuuugguuauau

SEQ ID NO: 921441 - RNA, 19 nt, Artificial Sequence
  Description of Artificial Sequence: Synthetic oligonucleotide
  Antisense strand to SEQ ID NO: 921440
auauaaccaaagagaaugu

SEQ ID NO: 921442 - RNA, 19 nt, Artificial Sequence
  Description of Artificial Sequence: Synthetic oligonucleotide
  Sense strand starting at position 723 of SEQ ID NO: 913363
gcguguauaacucaggaau

SEQ ID NO: 921443 - RNA, 19 nt, Artificial Sequence
  Description of Artificial Sequence: Synthetic oligonucleotide
  Antisense strand to SEQ ID NO: 921442
auuccugaguuauacacgc

SEQ ID NO: 921444 - RNA, 19 nt, Artificial Sequence
  Description of Artificial Sequence: Synthetic oligonucleotide
  Sense strand starting at position 776 of SEQ ID NO: 913363
aaugcauuggugcagaagu

SEQ ID NO: 921445 - RNA, 19 nt, Artificial Sequence
  Description of Artificial Sequence: Synthetic oligonucleotide
  Antisense strand to SEQ ID NO: 921444
acuucugcaccaaugcauu

SEQ ID NO: 921446 - RNA, 19 nt, Artificial Sequence
  Description of Artificial Sequence: Synthetic oligonucleotide
  Sense strand starting at position 778 of SEQ ID NO: 913363
ugcauuggugcagaaguaa

SEQ ID NO: 921447 - RNA, 19 nt, Artificial Sequence
  Description of Artificial Sequence: Synthetic oligonucleotide
  Antisense strand to SEQ ID NO: 921446
uuacuucugcaccaaugca

SEQ ID NO: 921448 - RNA, 19 nt, Artificial Sequence
  Description of Artificial Sequence: Synthetic oligonucleotide
  Sense strand starting at position 3361 of SEQ ID NO: 913363
gauugaguuugguuaaggu

SEQ ID NO: 921449 - RNA, 19 nt, Artificial Sequence
  Description of Artificial Sequence: Synthetic oligonucleotide
  Antisense strand to SEQ ID NO: 921448
accuuaaccaaacucaauc

SEQ ID NO: 921450 - RNA, 19 nt, Artificial Sequence
  Description of Artificial Sequence: Synthetic oligonucleotide
  Sense strand starting at position 657 of SEQ ID NO: 913363
gacuguggugguuaugcaa

SEQ ID NO: 921451 - RNA, 19 nt, Artificial Sequence
  Description of Artificial Sequence: Synthetic oligonucleotide
  Antisense strand to SEQ ID NO: 921450
uugcauaaccaccacaguc

SEQ ID NO: 921452 - RNA, 19 nt, Artificial Sequence
  Description of Artificial Sequence: Synthetic oligonucleotide
  Sense strand starting at position 3358 of SEQ ID NO: 913363
gcagauugaguuugguuaa

SEQ ID NO: 921453 - RNA, 19 nt, Artificial Sequence
  Description of Artificial Sequence: Synthetic oligonucleotide
  Antisense strand to SEQ ID NO: 921452
uuaaccaaacucaaucugc

SEQ ID NO: 921454 - RNA, 19 nt, Artificial Sequence
  Description of Artificial Sequence: Synthetic oligonucleotide
  Sense strand starting at position 526 of SEQ ID NO: 913363
agauguacuucccuauguu

SEQ ID NO: 921455 - RNA, 19 nt, Artificial Sequence
  Description of Artificial Sequence: Synthetic oligonucleotide
  Antisense strand to SEQ ID NO: 921454
aacauagggaaguacaucu

SEQ ID NO: 921456 - RNA, 19 nt, Artificial Sequence
  Description of Artificial Sequence: Synthetic oligonucleotide
  Sense strand starting at position 865 of SEQ ID NO: 913363
guaacauucucuuugguua

SEQ ID NO: 921457 - RNA, 19 nt, Artificial Sequence
  Description of Artificial Sequence: Synthetic oligonucleotide
  Antisense strand to SEQ ID NO: 921456
uaaccaaagagaauguuac

SEQ ID NO: 921458 - RNA, 19 nt, Artificial Sequence
  Description of Artificial Sequence: Synthetic oligonucleotide
  Sense strand starting at position 968 of SEQ ID NO: 913363
ggucaucugcguuauaagg

SEQ ID NO: 921459 - RNA, 19 nt, Artificial Sequence
  Description of Artificial Sequence: Synthetic oligonucleotide
  Antisense strand to SEQ ID NO: 921458
ccuuauaacgcagaugacc

SEQ ID NO: 921460 - RNA, 19 nt, Artificial Sequence
  Description of Artificial Sequence: Synthetic oligonucleotide
  Sense strand starting at position 337 of SEQ ID NO: 913363
ugaggacccugggagaaau

SEQ ID NO: 921461 - RNA, 19 nt, Artificial Sequence
  Description of Artificial Sequence: Synthetic oligonucleotide
  Antisense strand to SEQ ID NO: 921460
auuucucccaggguccuca

SEQ ID NO: 921462 - RNA, 19 nt, Artificial Sequence
  Description of Artificial Sequence: Synthetic oligonucleotide
  Sense strand starting at position 3423 of SEQ ID NO: 913363
accagcuuugcucagguua

SEQ ID NO: 921463 - RNA, 19 nt, Artificial Sequence
  Description of Artificial Sequence: Synthetic oligonucleotide
  Antisense strand to SEQ ID NO: 921462
uaaccugagcaaagcuggu

SEQ ID NO: 921464 - RNA, 19 nt, Artificial Sequence
  Description of Artificial Sequence: Synthetic oligonucleotide
  Sense strand starting at position 830 of SEQ ID NO: 913363
aggcuaucuguauagugca

SEQ ID NO: 921465 - RNA, 19 nt, Artificial Sequence
  Description of Artificial Sequence: Synthetic oligonucleotide
  Antisense strand to SEQ ID NO: 921464
ugcacuauacagauagccu

SEQ ID NO: 921466 - RNA, 19 nt, Artificial Sequence
  Description of Artificial Sequence: Synthetic oligonucleotide
  Sense strand starting at position 974 of SEQ ID NO: 913363
cugcguuauaagggaaagu

SEQ ID NO: 921467 - RNA, 19 nt, Artificial Sequence
  Description of Artificial Sequence: Synthetic oligonucleotide
  Antisense strand to SEQ ID NO: 921466
acuuucccuuauaacgcag

SEQ ID NO: 921468 - RNA, 19 nt, Artificial Sequence
  Description of Artificial Sequence: Synthetic oligonucleotide
  Sense strand starting at position 3647 of SEQ ID NO: 913363
gcauuaugucucuaguuuc

SEQ ID NO: 921469 - RNA, 19 nt, Artificial Sequence
  Description of Artificial Sequence: Synthetic oligonucleotide
  Antisense strand to SEQ ID NO: 921468
gaaacuagagacauaaugc

SEQ ID NO: 921470 - RNA, 19 nt, Artificial Sequence
  Description of Artificial Sequence: Synthetic oligonucleotide
  Sense strand starting at position 825 of SEQ ID NO: 913363
uccggaggcuaucuguaua

SEQ ID NO: 921471 - RNA, 19 nt, Artificial Sequence
  Description of Artificial Sequence: Synthetic oligonucleotide
  Antisense strand to SEQ ID NO: 921470
uauacagauagccuccgga

SEQ ID NO: 921472 - RNA, 19 nt, Artificial Sequence
  Description of Artificial Sequence: Synthetic oligonucleotide
  Sense strand starting at position 892 of SEQ ID NO: 913363
acuauuccgugcucuagaa

SEQ ID NO: 921473 - RNA, 19 nt, Artificial Sequence
  Description of Artificial Sequence: Synthetic oligonucleotide
  Antisense strand to SEQ ID NO: 921472
uucuagagcacggaauagu

SEQ ID NO: 921474 - RNA, 19 nt, Artificial Sequence
  Description of Artificial Sequence: Synthetic oligonucleotide
  Sense strand starting at position 2088 of SEQ ID NO: 913363
aaggaacucugggaaaguu

SEQ ID NO: 921475 - RNA, 19 nt, Artificial Sequence
  Description of Artificial Sequence: Synthetic oligonucleotide
  Antisense strand to SEQ ID NO: 921474
aacuuucccagaguuccuu

SEQ ID NO: 921476 - RNA, 19 nt, Artificial Sequence
  Description of Artificial Sequence: Synthetic oligonucleotide
  Sense strand starting at position 2183 of SEQ ID NO: 913363
cgcauuucgauuggcguua

SEQ ID NO: 921477 - RNA, 19 nt, Artificial Sequence
  Description of Artificial Sequence: Synthetic oligonucleotide
  Antisense strand to SEQ ID NO: 921476
uaacgccaaucgaaaugcg

SEQ ID NO: 921478 - RNA, 19 nt, Artificial Sequence
  Description of Artificial Sequence: Synthetic oligonucleotide
  Sense strand starting at position 966 of SEQ ID NO: 913363
caggucaucugcguuauaa

SEQ ID NO: 921479 - RNA, 19 nt, Artificial Sequence
  Description of Artificial Sequence: Synthetic oligonucleotide
  Antisense strand to SEQ ID NO: 921478
uuauaacgcagaugaccug

SEQ ID NO: 921480 - RNA, 19 nt, Artificial Sequence
  Description of Artificial Sequence: Synthetic oligonucleotide
  Sense strand starting at position 2645 of SEQ ID NO: 913364
cagcccugugcuucuguaa

SEQ ID NO: 921481 - RNA, 19 nt, Artificial Sequence
  Description of Artificial Sequence: Synthetic oligonucleotide
  Antisense strand to SEQ ID NO: 921480
uuacagaagcacagggcug

SEQ ID NO: 921482 - RNA, 19 nt, Artificial Sequence
  Description of Artificial Sequence: Synthetic oligonucleotide
  Sense strand starting at position 1412 of SEQ ID NO: 913364
caguaauacccugggacag

SEQ ID NO: 921483 - RNA, 19 nt, Artificial Sequence
  Description of Artificial Sequence: Synthetic oligonucleotide
  Antisense strand to SEQ ID NO: 921482
cugucccaggguauuacug

SEQ ID NO: 921484 - RNA, 19 nt, Artificial Sequence
  Description of Artificial Sequence: Synthetic oligonucleotide
  Sense strand starting at position 1267 of SEQ ID NO: 913364
cccagcugucugcuuugua

SEQ ID NO: 921485 - RNA, 19 nt, Artificial Sequence
  Description of Artificial Sequence: Synthetic oligonucleotide
  Antisense strand to SEQ ID NO: 921484
uacaaagcagacagcuggg

SEQ ID NO: 921486 - RNA, 19 nt, Artificial Sequence
  Description of Artificial Sequence: Synthetic oligonucleotide
  Sense strand starting at position 1411 of SEQ ID NO: 913364
ccaguaauacccugggaca

SEQ ID NO: 921487 - RNA, 19 nt, Artificial Sequence
  Description of Artificial Sequence: Synthetic oligonucleotide
  Antisense strand to SEQ ID NO: 921486
ugucccaggguauuacugg

SEQ ID NO: 921488 - RNA, 19 nt, Artificial Sequence
  Description of Artificial Sequence: Synthetic oligonucleotide
  Sense strand starting at position 2271 of SEQ ID NO: 913364
gcauuuggcugggugacuu

SEQ ID NO: 921489 - RNA, 19 nt, Artificial Sequence
  Description of Artificial Sequence: Synthetic oligonucleotide
  Antisense strand to SEQ ID NO: 921488
aagucacccagccaaaugc

SEQ ID NO: 921490 - RNA, 19 nt, Artificial Sequence
  Description of Artificial Sequence: Synthetic oligonucleotide
  Sense strand starting at position 2503 of SEQ ID NO: 913364
gcccaugcucacuaagaag

SEQ ID NO: 921491 - RNA, 19 nt, Artificial Sequence
  Description of Artificial Sequence: Synthetic oligonucleotide
  Antisense strand to SEQ ID NO: 921490
cuucuuagugagcaugggc

SEQ ID NO: 921492 - RNA, 19 nt, Artificial Sequence
  Description of Artificial Sequence: Synthetic oligonucleotide
  Sense strand starting at position 3009 of SEQ ID NO: 913364
auggcucugcuuuaaagaa

SEQ ID NO: 921493 - RNA, 19 nt, Artificial Sequence
  Description of Artificial Sequence: Synthetic oligonucleotide
  Antisense strand to SEQ ID NO: 921492
uucuuuaaagcagagccau

SEQ ID NO: 921494 - RNA, 19 nt, Artificial Sequence
  Description of Artificial Sequence: Synthetic oligonucleotide
  Sense strand starting at position 940 of SEQ ID NO: 913364
gugagucaagaucaugcau

SEQ ID NO: 921495 - RNA, 19 nt, Artificial Sequence
  Description of Artificial Sequence: Synthetic oligonucleotide
  Antisense strand to SEQ ID NO: 921494
augcaugaucuugacucac

SEQ ID NO: 921496 - RNA, 19 nt, Artificial Sequence
  Description of Artificial Sequence: Synthetic oligonucleotide
  Sense strand starting at position 588 of SEQ ID NO: 913364
aaugaauccuggguuggua

SEQ ID NO: 921497 - RNA, 19 nt, Artificial Sequence
  Description of Artificial Sequence: Synthetic oligonucleotide
  Antisense strand to SEQ ID NO: 921496
uaccaacccaggauucauu

SEQ ID NO: 921498 - RNA, 19 nt, Artificial Sequence
  Description of Artificial Sequence: Synthetic oligonucleotide
  Sense strand starting at position 552 of SEQ ID NO: 913364
uuucuuaguugacuaugaa

SEQ ID NO: 921499 - RNA, 19 nt, Artificial Sequence
  Description of Artificial Sequence: Synthetic oligonucleotide
  Antisense strand to SEQ ID NO: 921498
uucauagucaacuaagaaa

SEQ ID NO: 921500 - RNA, 19 nt, Artificial Sequence
  Description of Artificial Sequence: Synthetic oligonucleotide
  Sense strand starting at position 587 of SEQ ID NO: 913364
aaaugaauccuggguuggu

SEQ ID NO: 921501 - RNA, 19 nt, Artificial Sequence
  Description of Artificial Sequence: Synthetic oligonucleotide
  Antisense strand to SEQ ID NO: 921500
accaacccaggauucauuu

SEQ ID NO: 921502 - RNA, 19 nt, Artificial Sequence
  Description of Artificial Sequence: Synthetic oligonucleotide
  Sense strand starting at position 2818 of SEQ ID NO: 913364
cgaucuaaaucugucagag

SEQ ID NO: 921503 - RNA, 19 nt, Artificial Sequence
  Description of Artificial Sequence: Synthetic oligonucleotide
  Antisense strand to SEQ ID NO: 921502
cucugacagauuuagaucg

SEQ ID NO: 921504 - RNA, 19 nt, Artificial Sequence
  Description of Artificial Sequence: Synthetic oligonucleotide
  Sense strand starting at position 626 of SEQ ID NO: 913364
cccuuauugguccacccau

SEQ ID NO: 921505 - RNA, 19 nt, Artificial Sequence
  Description of Artificial Sequence: Synthetic oligonucleotide
  Antisense strand to SEQ ID NO: 921504
auggguggaccaauaaggg

SEQ ID NO: 921506 - RNA, 19 nt, Artificial Sequence
  Description of Artificial Sequence: Synthetic oligonucleotide
  Sense strand starting at position 618 of SEQ ID NO: 913364
gggucugacccuuauuggu

SEQ ID NO: 921507 - RNA, 19 nt, Artificial Sequence
  Description of Artificial Sequence: Synthetic oligonucleotide
  Antisense strand to SEQ ID NO: 921506
accaauaagggucagaccc

SEQ ID NO: 921508 - RNA, 19 nt, Artificial Sequence
  Description of Artificial Sequence: Synthetic oligonucleotide
  Sense strand starting at position 2602 of SEQ ID NO: 913364
gucacugugacccagguua

SEQ ID NO: 921509 - RNA, 19 nt, Artificial Sequence
  Description of Artificial Sequence: Synthetic oligonucleotide
  Antisense strand to SEQ ID NO: 921508
uaaccugggucacagugac

SEQ ID NO: 921510 - RNA, 19 nt, Artificial Sequence
  Description of Artificial Sequence: Synthetic oligonucleotide
  Sense strand starting at position 2924 of SEQ ID NO: 913364
ugcugucuucgccuugcaa

SEQ ID NO: 921511 - RNA, 19 nt, Artificial Sequence
  Description of Artificial Sequence: Synthetic oligonucleotide
  Antisense strand to SEQ ID NO: 921510
uugcaaggcgaagacagca

SEQ ID NO: 921512 - RNA, 19 nt, Artificial Sequence
  Description of Artificial Sequence: Synthetic oligonucleotide
  Sense strand starting at position 2822 of SEQ ID NO: 913364
cuaaaucugucagagauuu

SEQ ID NO: 921513 - RNA, 19 nt, Artificial Sequence
  Description of Artificial Sequence: Synthetic oligonucleotide
  Antisense strand to SEQ ID NO: 921512
aaaucucugacagauuuag

SEQ ID NO: 921514 - RNA, 19 nt, Artificial Sequence
  Description of Artificial Sequence: Synthetic oligonucleotide
  Sense strand starting at position 2604 of SEQ ID NO: 913364
cacugugacccagguuaau

SEQ ID NO: 921515 - RNA, 19 nt, Artificial Sequence
  Description of Artificial Sequence: Synthetic oligonucleotide
  Antisense strand to SEQ ID NO: 921514
auuaaccugggucacagug

SEQ ID NO: 921516 - RNA, 19 nt, Artificial Sequence
  Description of Artificial Sequence: Synthetic oligonucleotide
  Sense strand starting at position 1176 of SEQ ID NO: 913364
uggccaaauacuggaguuu

SEQ ID NO: 921517 - RNA, 19 nt, Artificial Sequence
  Description of Artificial Sequence: Synthetic oligonucleotide
  Antisense strand to SEQ ID NO: 921516
aaacuccaguauuuggcca

SEQ ID NO: 921518 - RNA, 19 nt, Artificial Sequence
  Description of Artificial Sequence: Synthetic oligonucleotide
  Sense strand starting at position 2617 of SEQ ID NO: 913364
guuaaucugcuagggaacu

SEQ ID NO: 921519 - RNA, 19 nt, Artificial Sequence
  Description of Artificial Sequence: Synthetic oligonucleotide
  Antisense strand to SEQ ID NO: 921518
aguucccuagcagauuaac

SEQ ID NO: 921520 - RNA, 19 nt, Artificial Sequence
  Description of Artificial Sequence: Synthetic oligonucleotide
  Sense strand starting at position 2502 of SEQ ID NO: 913364
ugcccaugcucacuaagaa

SEQ ID NO: 921521 - RNA, 19 nt, Artificial Sequence
  Description of Artificial Sequence: Synthetic oligonucleotide
  Antisense strand to SEQ ID NO: 921520
uucuuagugagcaugggca

SEQ ID NO: 921522 - RNA, 19 nt, Artificial Sequence
  Description of Artificial Sequence: Synthetic oligonucleotide
  Sense strand starting at position 118 of SEQ ID NO: 913364
guauccuccuguccacaga

SEQ ID NO: 921523 - RNA, 19 nt, Artificial Sequence
  Description of Artificial Sequence: Synthetic oligonucleotide
  Antisense strand to SEQ ID NO: 921522
ucuguggacaggaggauac

SEQ ID NO: 921524 - RNA, 19 nt, Artificial Sequence
  Description of Artificial Sequence: Synthetic oligonucleotide
  Sense strand starting at position 548 of SEQ ID NO: 913364
cuuguuucuuaguugacua

SEQ ID NO: 921525 - RNA, 19 nt, Artificial Sequence
  Description of Artificial Sequence: Synthetic oligonucleotide
  Antisense strand to SEQ ID NO: 921524
uagucaacuaagaaacaag

SEQ ID NO: 921526 - RNA, 19 nt, Artificial Sequence
  Description of Artificial Sequence: Synthetic oligonucleotide
  Sense strand starting at position 3156 of SEQ ID NO: 913364
gcauccaccuguucccaua

SEQ ID NO: 921527 - RNA, 19 nt, Artificial Sequence
  Description of Artificial Sequence: Synthetic oligonucleotide
  Antisense strand to SEQ ID NO: 921526
uaugggaacagguggaugc

SEQ ID NO: 921528 - RNA, 19 nt, Artificial Sequence
  Description of Artificial Sequence: Synthetic oligonucleotide
  Sense strand starting at position 3109 of SEQ ID NO: 913364
gcucacucugcuggagauu

SEQ ID NO: 921529 - RNA, 19 nt, Artificial Sequence
  Description of Artificial Sequence: Synthetic oligonucleotide
  Antisense strand to SEQ ID NO: 921528
aaucuccagcagagugagc

SEQ ID NO: 921530 - RNA, 19 nt, Artificial Sequence
  Description of Artificial Sequence: Synthetic oligonucleotide
  Sense strand starting at position 547 of SEQ ID NO: 913364
ccuuguuucuuaguugacu

SEQ ID NO: 921531 - RNA, 19 nt, Artificial Sequence
  Description of Artificial Sequence: Synthetic oligonucleotide
  Antisense strand to SEQ ID NO: 921530
agucaacuaagaaacaagg

SEQ ID NO: 921532 - RNA, 19 nt, Artificial Sequence
  Description of Artificial Sequence: Synthetic oligonucleotide
  Sense strand starting at position 2951 of SEQ ID NO: 913364
acaucugucuuccugcuua

SEQ ID NO: 921533 - RNA, 19 nt, Artificial Sequence
  Description of Artificial Sequence: Synthetic oligonucleotide
  Antisense strand to SEQ ID NO: 921532
uaagcaggaagacagaugu

SEQ ID NO: 921534 - RNA, 19 nt, Artificial Sequence
  Description of Artificial Sequence: Synthetic oligonucleotide
  Sense strand starting at position 2548 of SEQ ID NO: 913364
gcagaucuguacuugcuca

SEQ ID NO: 921535 - RNA, 19 nt, Artificial Sequence
  Description of Artificial Sequence: Synthetic oligonucleotide
  Antisense strand to SEQ ID NO: 921534
ugagcaaguacagaucugc

SEQ ID NO: 921536 - RNA, 19 nt, Artificial Sequence
  Description of Artificial Sequence: Synthetic oligonucleotide
  Sense strand starting at position 2318 of SEQ ID NO: 913364
gucuccucucuugguaagu

SEQ ID NO: 921537 - RNA, 19 nt, Artificial Sequence
  Description of Artificial Sequence: Synthetic oligonucleotide
  Antisense strand to SEQ ID NO: 921536
acuuaccaagagaggagac

SEQ ID NO: 921538 - RNA, 19 nt, Artificial Sequence
  Description of Artificial Sequence: Synthetic oligonucleotide
  Sense strand starting at position 556 of SEQ ID NO: 913364
uuaguugacuaugaaacca

SEQ ID NO: 921539 - RNA, 19 nt, Artificial Sequence
  Description of Artificial Sequence: Synthetic oligonucleotide
  Antisense strand to SEQ ID NO: 921538
ugguuucauagucaacuaa

SEQ ID NO: 921540 - RNA, 19 nt, Artificial Sequence
  Description of Artificial Sequence: Synthetic oligonucleotide
  Sense strand starting at position 2820 of SEQ ID NO: 913364
aucuaaaucugucagagau

SEQ ID NO: 921541 - RNA, 19 nt, Artificial Sequence
  Description of Artificial Sequence: Synthetic oligonucleotide
  Antisense strand to SEQ ID NO: 921540
aucucugacagauuuagau

SEQ ID NO: 921542 - RNA, 19 nt, Artificial Sequence
  Description of Artificial Sequence: Synthetic oligonucleotide
  Sense strand starting at position 2257 of SEQ ID NO: 913364
cguuaagcaucacugcauu

SEQ ID NO: 921543 - RNA, 19 nt, Artificial Sequence
  Description of Artificial Sequence: Synthetic oligonucleotide
  Antisense strand to SEQ ID NO: 921542
aaugcagugaugcuuaacg

SEQ ID NO: 921544 - RNA, 19 nt, Artificial Sequence
  Description of Artificial Sequence: Synthetic oligonucleotide
  Sense strand starting at position 540 of SEQ ID NO: 913364
cccuuugccuuguuucuua

SEQ ID NO: 921545 - RNA, 19 nt, Artificial Sequence
  Description of Artificial Sequence: Synthetic oligonucleotide
  Antisense strand to SEQ ID NO: 921544
uaagaaacaaggcaaaggg

SEQ ID NO: 921546 - RNA, 19 nt, Artificial Sequence
  Description of Artificial Sequence: Synthetic oligonucleotide
  Sense strand starting at position 2615 of SEQ ID NO: 913364
agguuaaucugcuagggaa

SEQ ID NO: 921547 - RNA, 19 nt, Artificial Sequence
  Description of Artificial Sequence: Synthetic oligonucleotide
  Antisense strand to SEQ ID NO: 921546
uucccuagcagauuaaccu

SEQ ID NO: 921548 - RNA, 19 nt, Artificial Sequence
  Description of Artificial Sequence: Synthetic oligonucleotide
  Sense strand starting at position 3004 of SEQ ID NO: 913364
gcagcauggcucugcuuua

SEQ ID NO: 921549 - RNA, 19 nt, Artificial Sequence
  Description of Artificial Sequence: Synthetic oligonucleotide
  Antisense strand to SEQ ID NO: 921548
uaaagcagagccaugcugc

SEQ ID NO: 921550 - RNA, 19 nt, Artificial Sequence
  Description of Artificial Sequence: Synthetic oligonucleotide
  Sense strand starting at position 942 of SEQ ID NO: 913364
gagucaagaucaugcauug

SEQ ID NO: 921551 - RNA, 19 nt, Artificial Sequence
  Description of Artificial Sequence: Synthetic oligonucleotide
  Antisense strand to SEQ ID NO: 921550
caaugcaugaucuugacuc

SEQ ID NO: 921552 - RNA, 19 nt, Artificial Sequence
  Description of Artificial Sequence: Synthetic oligonucleotide
  Sense strand starting at position 1237 of SEQ ID NO: 913364
gccacacauuccugaaagu

SEQ ID NO: 921553 - RNA, 19 nt, Artificial Sequence
  Description of Artificial Sequence: Synthetic oligonucleotide
  Antisense strand to SEQ ID NO: 921552
acuuucaggaauguguggc

SEQ ID NO: 921554 - RNA, 19 nt, Artificial Sequence
  Description of Artificial Sequence: Synthetic oligonucleotide
  Sense strand starting at position 3108 of SEQ ID NO: 913364
ggcucacucugcuggagau

SEQ ID NO: 921555 - RNA, 19 nt, Artificial Sequence
  Description of Artificial Sequence: Synthetic oligonucleotide
  Antisense strand to SEQ ID NO: 921554
aucuccagcagagugagcc

SEQ ID NO: 921556 - RNA, 19 nt, Artificial Sequence
  Description of Artificial Sequence: Synthetic oligonucleotide
  Sense strand starting at position 545 of SEQ ID NO: 913364
ugccuuguuucuuaguuga

SEQ ID NO: 921557 - RNA, 19 nt, Artificial Sequence
  Description of Artificial Sequence: Synthetic oligonucleotide
  Antisense strand to SEQ ID NO: 921556
ucaacuaagaaacaaggca

SEQ ID NO: 921558 - RNA, 19 nt, Artificial Sequence
  Description of Artificial Sequence: Synthetic oligonucleotide
  Sense strand starting at position 1384 of SEQ ID NO: 913364
gucuucugcugccagcaau

SEQ ID NO: 921559 - RNA, 19 nt, Artificial Sequence
  Description of Artificial Sequence: Synthetic oligonucleotide
  Antisense strand to SEQ ID NO: 921558
auugcuggcagcagaagac

SEQ ID NO: 921560 - RNA, 19 nt, Artificial Sequence
  Description of Artificial Sequence: Synthetic oligonucleotide
  Sense strand starting at position 912 of SEQ ID NO: 913365
aauugugucagaggagaga

SEQ ID NO: 921561 - RNA, 19 nt, Artificial Sequence
  Description of Artificial Sequence: Synthetic oligonucleotide
  Antisense strand to SEQ ID NO: 921560
ucucuccucugacacaauu

SEQ ID NO: 921562 - RNA, 19 nt, Artificial Sequence
  Description of Artificial Sequence: Synthetic oligonucleotide
  Sense strand starting at position 1039 of SEQ ID NO: 913365
aguuacuuccaauacaagu

SEQ ID NO: 921563 - RNA, 19 nt, Artificial Sequence
  Description of Artificial Sequence: Synthetic oligonucleotide
  Antisense strand to SEQ ID NO: 921562
acuuguauuggaaguaacu

SEQ ID NO: 921564 - RNA, 19 nt, Artificial Sequence
  Description of Artificial Sequence: Synthetic oligonucleotide
  Sense strand starting at position 3175 of SEQ ID NO: 913365
gguggauauacugagcuau

SEQ ID NO: 921565 - RNA, 19 nt, Artificial Sequence
  Description of Artificial Sequence: Synthetic oligonucleotide
  Antisense strand to SEQ ID NO: 921564
auagcucaguauauccacc

SEQ ID NO: 921566 - RNA, 19 nt, Artificial Sequence
  Description of Artificial Sequence: Synthetic oligonucleotide
  Sense strand starting at position 1136 of SEQ ID NO: 913365
agugauagucuuuacuaau

SEQ ID NO: 921567 - RNA, 19 nt, Artificial Sequence
  Description of Artificial Sequence: Synthetic oligonucleotide
  Antisense strand to SEQ ID NO: 921566
auuaguaaagacuaucacu

SEQ ID NO: 921568 - RNA, 19 nt, Artificial Sequence
  Description of Artificial Sequence: Synthetic oligonucleotide
  Sense strand starting at position 3918 of SEQ ID NO: 913365
aauuauguugcuuaaugga

SEQ ID NO: 921569 - RNA, 19 nt, Artificial Sequence
  Description of Artificial Sequence: Synthetic oligonucleotide
  Antisense strand to SEQ ID NO: 921568
uccauuaagcaacauaauu

SEQ ID NO: 921570 - RNA, 19 nt, Artificial Sequence
  Description of Artificial Sequence: Synthetic oligonucleotide
  Sense strand starting at position 3153 of SEQ ID NO: 913365
gggaaauucuucuuacucc

SEQ ID NO: 921571 - RNA, 19 nt, Artificial Sequence
  Description of Artificial Sequence: Synthetic oligonucleotide
  Antisense strand to SEQ ID NO: 921570
ggaguaagaagaauuuccc

SEQ ID NO: 921572 - RNA, 19 nt, Artificial Sequence
  Description of Artificial Sequence: Synthetic oligonucleotide
  Sense strand starting at position 1602 of SEQ ID NO: 913365
ggugauguaccucagagua

SEQ ID NO: 921573 - RNA, 19 nt, Artificial Sequence
  Description of Artificial Sequence: Synthetic oligonucleotide
  Antisense strand to SEQ ID NO: 921572
uacucugagguacaucacc

SEQ ID NO: 921574 - RNA, 19 nt, Artificial Sequence
  Description of Artificial Sequence: Synthetic oligonucleotide
  Sense strand starting at position 3578 of SEQ ID NO: 913365
cugacugagcucuaaaugu

SEQ ID NO: 921575 - RNA, 19 nt, Artificial Sequence
  Description of Artificial Sequence: Synthetic oligonucleotide
  Antisense strand to SEQ ID NO: 921574
acauuuagagcucagucag

SEQ ID NO: 921576 - RNA, 19 nt, Artificial Sequence
  Description of Artificial Sequence: Synthetic oligonucleotide
  Sense strand starting at position 161 of SEQ ID NO: 913365
aaaugaguaggcuauguuu

SEQ ID NO: 921577 - RNA, 19 nt, Artificial Sequence
  Description of Artificial Sequence: Synthetic oligonucleotide
  Antisense strand to SEQ ID NO: 921576
aaacauagccuacucauuu

SEQ ID NO: 921578 - RNA, 19 nt, Artificial Sequence
  Description of Artificial Sequence: Synthetic oligonucleotide
  Sense strand starting at position 657 of SEQ ID NO: 913365
gaguuaccagaguagcauu

SEQ ID NO: 921579 - RNA, 19 nt, Artificial Sequence
  Description of Artificial Sequence: Synthetic oligonucleotide
  Antisense strand to SEQ ID NO: 921578
aaugcuacucugguaacuc

SEQ ID NO: 921580 - RNA, 19 nt, Artificial Sequence
  Description of Artificial Sequence: Synthetic oligonucleotide
  Sense strand starting at position 1923 of SEQ ID NO: 913365
agucauauuugcucugcca

SEQ ID NO: 921581 - RNA, 19 nt, Artificial Sequence
  Description of Artificial Sequence: Synthetic oligonucleotide
  Antisense strand to SEQ ID NO: 921580
uggcagagcaaauaugacu

SEQ ID NO: 921582 - RNA, 19 nt, Artificial Sequence
  Description of Artificial Sequence: Synthetic oligonucleotide
  Sense strand starting at position 968 of SEQ ID NO: 913365
uguacucuugucuaaacau

SEQ ID NO: 921583 - RNA, 19 nt, Artificial Sequence
  Description of Artificial Sequence: Synthetic oligonucleotide
  Antisense strand to SEQ ID NO: 921582
auguuuagacaagaguaca

SEQ ID NO: 921584 - RNA, 19 nt, Artificial Sequence
  Description of Artificial Sequence: Synthetic oligonucleotide
  Sense strand starting at position 1682 of SEQ ID NO: 913365
ggagguauuucugaugaau

SEQ ID NO: 921585 - RNA, 19 nt, Artificial Sequence
  Description of Artificial Sequence: Synthetic oligonucleotide
  Antisense strand to SEQ ID NO: 921584
auucaucagaaauaccucc

SEQ ID NO: 921586 - RNA, 19 nt, Artificial Sequence
  Description of Artificial Sequence: Synthetic oligonucleotide
  Sense strand starting at position 879 of SEQ ID NO: 913365
gagcaucugcaaugaaaug

SEQ ID NO: 921587 - RNA, 19 nt, Artificial Sequence
  Description of Artificial Sequence: Synthetic oligonucleotide
  Antisense strand to SEQ ID NO: 921586
cauuucauugcagaugcuc

SEQ ID NO: 921588 - RNA, 19 nt, Artificial Sequence
  Description of Artificial Sequence: Synthetic oligonucleotide
  Sense strand starting at position 167 of SEQ ID NO: 913365
guaggcuauguuuaaauau

SEQ ID NO: 921589 - RNA, 19 nt, Artificial Sequence
  Description of Artificial Sequence: Synthetic oligonucleotide
  Antisense strand to SEQ ID NO: 921588
auauuuaaacauagccuac

SEQ ID NO: 921590 - RNA, 19 nt, Artificial Sequence
  Description of Artificial Sequence: Synthetic oligonucleotide
  Sense strand starting at position 103 of SEQ ID NO: 913365
cuuaaugaguagcucacaa

SEQ ID NO: 921591 - RNA, 19 nt, Artificial Sequence
  Description of Artificial Sequence: Synthetic oligonucleotide
  Antisense strand to SEQ ID NO: 921590
uugugagcuacucauuaag

SEQ ID NO: 921592 - RNA, 19 nt, Artificial Sequence
  Description of Artificial Sequence: Synthetic oligonucleotide
  Sense strand starting at position 1925 of SEQ ID NO: 913365
ucauauuugcucugccagu

SEQ ID NO: 921593 - RNA, 19 nt, Artificial Sequence
  Description of Artificial Sequence: Synthetic oligonucleotide
  Antisense strand to SEQ ID NO: 921592
acuggcagagcaaauauga

SEQ ID NO: 921594 - RNA, 19 nt, Artificial Sequence
  Description of Artificial Sequence: Synthetic oligonucleotide
  Sense strand starting at position 2542 of SEQ ID NO: 913365
ccguacuuuguugauaaca

SEQ ID NO: 921595 - RNA, 19 nt, Artificial Sequence
  Description of Artificial Sequence: Synthetic oligonucleotide
  Antisense strand to SEQ ID NO: 921594
uguuaucaacaaaguacgg

SEQ ID NO: 921596 - RNA, 19 nt, Artificial Sequence
  Description of Artificial Sequence: Synthetic oligonucleotide
  Sense strand starting at position 100 of SEQ ID NO: 913365
guccuuaaugaguagcuca

SEQ ID NO: 921597 - RNA, 19 nt, Artificial Sequence
  Description of Artificial Sequence: Synthetic oligonucleotide
  Antisense strand to SEQ ID NO: 921596
ugagcuacucauuaaggac

SEQ ID NO: 921598 - RNA, 19 nt, Artificial Sequence
  Description of Artificial Sequence: Synthetic oligonucleotide
  Sense strand starting at position 3697 of SEQ ID NO: 913365
gauguaggguuagcucaaa

SEQ ID NO: 921599 - RNA, 19 nt, Artificial Sequence
  Description of Artificial Sequence: Synthetic oligonucleotide
  Antisense strand to SEQ ID NO: 921598
uuugagcuaacccuacauc

SEQ ID NO: 921600 - RNA, 19 nt, Artificial Sequence
  Description of Artificial Sequence: Synthetic oligonucleotide
  Sense strand starting at position 642 of SEQ ID NO: 913365
cagucuaaaguuugagagu

SEQ ID NO: 921601 - RNA, 19 nt, Artificial Sequence
  Description of Artificial Sequence: Synthetic oligonucleotide
  Antisense strand to SEQ ID NO: 921600
acucucaaacuuuagacug

SEQ ID NO: 921602 - RNA, 19 nt, Artificial Sequence
  Description of Artificial Sequence: Synthetic oligonucleotide
  Sense strand starting at position 651 of SEQ ID NO: 913365
guuugagaguuaccagagu

SEQ ID NO: 921603 - RNA, 19 nt, Artificial Sequence
  Description of Artificial Sequence: Synthetic oligonucleotide
  Antisense strand to SEQ ID NO: 921602
acucugguaacucucaaac

SEQ ID NO: 921604 - RNA, 19 nt, Artificial Sequence
  Description of Artificial Sequence: Synthetic oligonucleotide
  Sense strand starting at position 3417 of SEQ ID NO: 913365
gguauauccauuggguacu

SEQ ID NO: 921605 - RNA, 19 nt, Artificial Sequence
  Description of Artificial Sequence: Synthetic oligonucleotide
  Antisense strand to SEQ ID NO: 921604
aguacccaauggauauacc

SEQ ID NO: 921606 - RNA, 19 nt, Artificial Sequence
  Description of Artificial Sequence: Synthetic oligonucleotide
  Sense strand starting at position 3416 of SEQ ID NO: 913365
ugguauauccauuggguac

SEQ ID NO: 921607 - RNA, 19 nt, Artificial Sequence
  Description of Artificial Sequence: Synthetic oligonucleotide
  Antisense strand to SEQ ID NO: 921606
guacccaauggauauacca

SEQ ID NO: 921608 - RNA, 19 nt, Artificial Sequence
  Description of Artificial Sequence: Synthetic oligonucleotide
  Sense strand starting at position 588 of SEQ ID NO: 913365
guuggagucccuugaaacu

SEQ ID NO: 921609 - RNA, 19 nt, Artificial Sequence
  Description of Artificial Sequence: Synthetic oligonucleotide
  Antisense strand to SEQ ID NO: 921608
aguuucaagggacuccaac

SEQ ID NO: 921610 - RNA, 19 nt, Artificial Sequence
  Description of Artificial Sequence: Synthetic oligonucleotide
  Sense strand starting at position 3274 of SEQ ID NO: 913365
uaauucuuccguuggagga

SEQ ID NO: 921611 - RNA, 19 nt, Artificial Sequence
  Description of Artificial Sequence: Synthetic oligonucleotide
  Antisense strand to SEQ ID NO: 921610
uccuccaacggaagaauua

SEQ ID NO: 921612 - RNA, 19 nt, Artificial Sequence
  Description of Artificial Sequence: Synthetic oligonucleotide
  Sense strand starting at position 467 of SEQ ID NO: 913365
agucuuucuuucucaggau

SEQ ID NO: 921613 - RNA, 19 nt, Artificial Sequence
  Description of Artificial Sequence: Synthetic oligonucleotide
  Antisense strand to SEQ ID NO: 921612
auccugagaaagaaagacu

SEQ ID NO: 921614 - RNA, 19 nt, Artificial Sequence
  Description of Artificial Sequence: Synthetic oligonucleotide
  Sense strand starting at position 2938 of SEQ ID NO: 913365
ccugucuugcaauaaaguu

SEQ ID NO: 921615 - RNA, 19 nt, Artificial Sequence
  Description of Artificial Sequence: Synthetic oligonucleotide
  Antisense strand to SEQ ID NO: 921614
aacuuuauugcaagacagg

SEQ ID NO: 921616 - RNA, 19 nt, Artificial Sequence
  Description of Artificial Sequence: Synthetic oligonucleotide
  Sense strand starting at position 164 of SEQ ID NO: 913365
ugaguaggcuauguuuaaa

SEQ ID NO: 921617 - RNA, 19 nt, Artificial Sequence
  Description of Artificial Sequence: Synthetic oligonucleotide
  Antisense strand to SEQ ID NO: 921616
uuuaaacauagccuacuca

SEQ ID NO: 921618 - RNA, 19 nt, Artificial Sequence
  Description of Artificial Sequence: Synthetic oligonucleotide
  Sense strand starting at position 1194 of SEQ ID NO: 913365
aaggcauuacucuggucau

SEQ ID NO: 921619 - RNA, 19 nt, Artificial Sequence
  Description of Artificial Sequence: Synthetic oligonucleotide
  Antisense strand to SEQ ID NO: 921618
augaccagaguaaugccuu

SEQ ID NO: 921620 - RNA, 19 nt, Artificial Sequence
  Description of Artificial Sequence: Synthetic oligonucleotide
  Sense strand starting at position 3129 of SEQ ID NO: 913365
uaggccugugcuuauaaau

SEQ ID NO: 921621 - RNA, 19 nt, Artificial Sequence
  Description of Artificial Sequence: Synthetic oligonucleotide
  Antisense strand to SEQ ID NO: 921620
auuuauaagcacaggccua

SEQ ID NO: 921622 - RNA, 19 nt, Artificial Sequence
  Description of Artificial Sequence: Synthetic oligonucleotide
  Sense strand starting at position 906 of SEQ ID NO: 913365
ccaguuaauugugucagag

SEQ ID NO: 921623 - RNA, 19 nt, Artificial Sequence
  Description of Artificial Sequence: Synthetic oligonucleotide
  Antisense strand to SEQ ID NO: 921622
cucugacacaauuaacugg

SEQ ID NO: 921624 - RNA, 19 nt, Artificial Sequence
  Description of Artificial Sequence: Synthetic oligonucleotide
  Sense strand starting at position 2766 of SEQ ID NO: 913365
gcugaaaucugccucaaca

SEQ ID NO: 921625 - RNA, 19 nt, Artificial Sequence
  Description of Artificial Sequence: Synthetic oligonucleotide
  Antisense strand to SEQ ID NO: 921624
uguugaggcagauuucagc

SEQ ID NO: 921626 - RNA, 19 nt, Artificial Sequence
  Description of Artificial Sequence: Synthetic oligonucleotide
  Sense strand starting at position 163 of SEQ ID NO: 913365
augaguaggcuauguuuaa

SEQ ID NO: 921627 - RNA, 19 nt, Artificial Sequence
  Description of Artificial Sequence: Synthetic oligonucleotide
  Antisense strand to SEQ ID NO: 921626
uuaaacauagccuacucau

SEQ ID NO: 921628 - RNA, 19 nt, Artificial Sequence
  Description of Artificial Sequence: Synthetic oligonucleotide
  Sense strand starting at position 967 of SEQ ID NO: 913365
uuguacucuugucuaaaca

SEQ ID NO: 921629 - RNA, 19 nt, Artificial Sequence
  Description of Artificial Sequence: Synthetic oligonucleotide
  Antisense strand to SEQ ID NO: 921628
uguuuagacaagaguacaa

SEQ ID NO: 921630 - RNA, 19 nt, Artificial Sequence
  Description of Artificial Sequence: Synthetic oligonucleotide
  Sense strand starting at position 1620 of SEQ ID NO: 913365
auaggauucccaugcuggu

SEQ ID NO: 921631 - RNA, 19 nt, Artificial Sequence
  Description of Artificial Sequence: Synthetic oligonucleotide
  Antisense strand to SEQ ID NO: 921630
accagcaugggaauccuau

SEQ ID NO: 921632 - RNA, 19 nt, Artificial Sequence
  Description of Artificial Sequence: Synthetic oligonucleotide
  Sense strand starting at position 1068 of SEQ ID NO: 913365
caguauuuaucagauguga

SEQ ID NO: 921633 - RNA, 19 nt, Artificial Sequence
  Description of Artificial Sequence: Synthetic oligonucleotide
  Antisense strand to SEQ ID NO: 921632
ucacaucugauaaauacug

SEQ ID NO: 921634 - RNA, 19 nt, Artificial Sequence
  Description of Artificial Sequence: Synthetic oligonucleotide
  Sense strand starting at position 3381 of SEQ ID NO: 913365
uuaagugucuucccauuga

SEQ ID NO: 921635 - RNA, 19 nt, Artificial Sequence
  Description of Artificial Sequence: Synthetic oligonucleotide
  Antisense strand to SEQ ID NO: 921634
ucaaugggaagacacuuaa

SEQ ID NO: 921636 - RNA, 19 nt, Artificial Sequence
  Description of Artificial Sequence: Synthetic oligonucleotide
  Sense strand starting at position 2040 of SEQ ID NO: 913365
ucagacauuucguaaucaa

SEQ ID NO: 921637 - RNA, 19 nt, Artificial Sequence
  Description of Artificial Sequence: Synthetic oligonucleotide
  Antisense strand to SEQ ID NO: 921636
uugauuacgaaaugucuga

SEQ ID NO: 921638 - RNA, 19 nt, Artificial Sequence
  Description of Artificial Sequence: Synthetic oligonucleotide
  Sense strand starting at position 660 of SEQ ID NO: 913365
uuaccagaguagcauuuaa

SEQ ID NO: 921639 - RNA, 19 nt, Artificial Sequence
  Description of Artificial Sequence: Synthetic oligonucleotide
  Antisense strand to SEQ ID NO: 921638
uuaaaugcuacucugguaa

SEQ ID NO: 921640 - RNA, 19 nt, Artificial Sequence
  Description of Artificial Sequence: Synthetic oligonucleotide
  Sense strand starting at position 1231 of SEQ ID NO: 913366
auggaaacugcuuaucuca

SEQ ID NO: 921641 - RNA, 19 nt, Artificial Sequence
  Description of Artificial Sequence: Synthetic oligonucleotide
  Antisense strand to SEQ ID NO: 921640
ugagauaagcaguuuccau

SEQ ID NO: 921642 - RNA, 19 nt, Artificial Sequence
  Description of Artificial Sequence: Synthetic oligonucleotide
  Sense strand starting at position 857 of SEQ ID NO: 913366
auggguucuccuuaauaca

SEQ ID NO: 921643 - RNA, 19 nt, Artificial Sequence
  Description of Artificial Sequence: Synthetic oligonucleotide
  Antisense strand to SEQ ID NO: 921642
uguauuaaggagaacccau

SEQ ID NO: 921644 - RNA, 19 nt, Artificial Sequence
  Description of Artificial Sequence: Synthetic oligonucleotide
  Sense strand starting at position 3608 of SEQ ID NO: 913366
ggccaaagacauuaccagu

SEQ ID NO: 921645 - RNA, 19 nt, Artificial Sequence
  Description of Artificial Sequence: Synthetic oligonucleotide
  Antisense strand to SEQ ID NO: 921644
acugguaaugucuuuggcc

SEQ ID NO: 921646 - RNA, 19 nt, Artificial Sequence
  Description of Artificial Sequence: Synthetic oligonucleotide
  Sense strand starting at position 3078 of SEQ ID NO: 913366
ccaagugagaaaugagcaa

SEQ ID NO: 921647 - RNA, 19 nt, Artificial Sequence
  Description of Artificial Sequence: Synthetic oligonucleotide
  Antisense strand to SEQ ID NO: 921646
uugcucauuucucacuugg

SEQ ID NO: 921648 - RNA, 19 nt, Artificial Sequence
  Description of Artificial Sequence: Synthetic oligonucleotide
  Sense strand starting at position 2472 of SEQ ID NO: 913366
gcaaacuuacgaggagaaa

SEQ ID NO: 921649 - RNA, 19 nt, Artificial Sequence
  Description of Artificial Sequence: Synthetic oligonucleotide
  Antisense strand to SEQ ID NO: 921648
uuucuccucguaaguuugc

SEQ ID NO: 921650 - RNA, 19 nt, Artificial Sequence
  Description of Artificial Sequence: Synthetic oligonucleotide
  Sense strand starting at position 1793 of SEQ ID NO: 913366
gggcgacucgcccuucuua

SEQ ID NO: 921651 - RNA, 19 nt, Artificial Sequence
  Description of Artificial Sequence: Synthetic oligonucleotide
  Antisense strand to SEQ ID NO: 921650
uaagaagggcgagucgccc

SEQ ID NO: 921652 - RNA, 19 nt, Artificial Sequence
  Description of Artificial Sequence: Synthetic oligonucleotide
  Sense strand starting at position 3537 of SEQ ID NO: 913366
aauacucaaguguggagaa

SEQ ID NO: 921653 - RNA, 19 nt, Artificial Sequence
  Description of Artificial Sequence: Synthetic oligonucleotide
  Antisense strand to SEQ ID NO: 921652
uucuccacacuugaguauu

SEQ ID NO: 921654 - RNA, 19 nt, Artificial Sequence
  Description of Artificial Sequence: Synthetic oligonucleotide
  Sense strand starting at position 2350 of SEQ ID NO: 913366
ucuggucuccaugagaacu

SEQ ID NO: 921655 - RNA, 19 nt, Artificial Sequence
  Description of Artificial Sequence: Synthetic oligonucleotide
  Antisense strand to SEQ ID NO: 921654
aguucucauggagaccaga

SEQ ID NO: 921656 - RNA, 19 nt, Artificial Sequence
  Description of Artificial Sequence: Synthetic oligonucleotide
  Sense strand starting at position 2347 of SEQ ID NO: 913366
ccaucuggucuccaugaga

SEQ ID NO: 921657 - RNA, 19 nt, Artificial Sequence
  Description of Artificial Sequence: Synthetic oligonucleotide
  Antisense strand to SEQ ID NO: 921656
ucucauggagaccagaugg

SEQ ID NO: 921658 - RNA, 19 nt, Artificial Sequence
  Description of Artificial Sequence: Synthetic oligonucleotide
  Sense strand starting at position 3621 of SEQ ID NO: 913366
accagucuggauggauaua

SEQ ID NO: 921659 - RNA, 19 nt, Artificial Sequence
  Description of Artificial Sequence: Synthetic oligonucleotide
  Antisense strand to SEQ ID NO: 921658
uauauccauccagacuggu

SEQ ID NO: 921660 - RNA, 19 nt, Artificial Sequence
  Description of Artificial Sequence: Synthetic oligonucleotide
  Sense strand starting at position 3887 of SEQ ID NO: 913366
ccuaucuaaggcuaaagua

SEQ ID NO: 921661 - RNA, 19 nt, Artificial Sequence
  Description of Artificial Sequence: Synthetic oligonucleotide
  Antisense strand to SEQ ID NO: 921660
uacuuuagccuuagauagg

SEQ ID NO: 921662 - RNA, 19 nt, Artificial Sequence
  Description of Artificial Sequence: Synthetic oligonucleotide
  Sense strand starting at position 1259 of SEQ ID NO: 913366
uuuccauaaguguaugaca

SEQ ID NO: 921663 - RNA, 19 nt, Artificial Sequence
  Description of Artificial Sequence: Synthetic oligonucleotide
  Antisense strand to SEQ ID NO: 921662
ugucauacacuuauggaaa

SEQ ID NO: 921664 - RNA, 19 nt, Artificial Sequence
  Description of Artificial Sequence: Synthetic oligonucleotide
  Sense strand starting at position 2744 of SEQ ID NO: 913366
gagugaguagcugagacua

SEQ ID NO: 921665 - RNA, 19 nt, Artificial Sequence
  Description of Artificial Sequence: Synthetic oligonucleotide
  Antisense strand to SEQ ID NO: 921664
uagucucagcuacucacuc

SEQ ID NO: 921666 - RNA, 19 nt, Artificial Sequence
  Description of Artificial Sequence: Synthetic oligonucleotide
  Sense strand starting at position 1567 of SEQ ID NO: 913366
gggcuugcgacgccuauua

SEQ ID NO: 921667 - RNA, 19 nt, Artificial Sequence
  Description of Artificial Sequence: Synthetic oligonucleotide
  Antisense strand to SEQ ID NO: 921666
uaauaggcgucgcaagccc

SEQ ID NO: 921668 - RNA, 19 nt, Artificial Sequence
  Description of Artificial Sequence: Synthetic oligonucleotide
  Sense strand starting at position 3952 of SEQ ID NO: 913366
augaaauuaauguguuagg

SEQ ID NO: 921669 - RNA, 19 nt, Artificial Sequence
  Description of Artificial Sequence: Synthetic oligonucleotide
  Antisense strand to SEQ ID NO: 921668
ccuaacacauuaauuucau

SEQ ID NO: 921670 - RNA, 19 nt, Artificial Sequence
  Description of Artificial Sequence: Synthetic oligonucleotide
  Sense strand starting at position 1354 of SEQ ID NO: 913366
uuaagugcucucuaaggga

SEQ ID NO: 921671 - RNA, 19 nt, Artificial Sequence
  Description of Artificial Sequence: Synthetic oligonucleotide
  Antisense strand to SEQ ID NO: 921670
ucccuuagagagcacuuaa

SEQ ID NO: 921672 - RNA, 19 nt, Artificial Sequence
  Description of Artificial Sequence: Synthetic oligonucleotide
  Sense strand starting at position 3124 of SEQ ID NO: 913366
ccagcuuagcuagaucaaa

SEQ ID NO: 921673 - RNA, 19 nt, Artificial Sequence
  Description of Artificial Sequence: Synthetic oligonucleotide
  Antisense strand to SEQ ID NO: 921672
uuugaucuagcuaagcugg

SEQ ID NO: 921674 - RNA, 19 nt, Artificial Sequence
  Description of Artificial Sequence: Synthetic oligonucleotide
  Sense strand starting at position 1384 of SEQ ID NO: 913366
ucggaaaccagcuagaguu

SEQ ID NO: 921675 - RNA, 19 nt, Artificial Sequence
  Description of Artificial Sequence: Synthetic oligonucleotide
  Antisense strand to SEQ ID NO: 921674
aacucuagcugguuuccga

SEQ ID NO: 921676 - RNA, 19 nt, Artificial Sequence
  Description of Artificial Sequence: Synthetic oligonucleotide
  Sense strand starting at position 400 of SEQ ID NO: 913366
cuguauguauaaucaaacu

SEQ ID NO: 921677 - RNA, 19 nt, Artificial Sequence
  Description of Artificial Sequence: Synthetic oligonucleotide
  Antisense strand to SEQ ID NO: 921676
aguuugauuauacauacag

SEQ ID NO: 921678 - RNA, 19 nt, Artificial Sequence
  Description of Artificial Sequence: Synthetic oligonucleotide
  Sense strand starting at position 2970 of SEQ ID NO: 913366
aguggagucucagcagaaa

SEQ ID NO: 921679 - RNA, 19 nt, Artificial Sequence
  Description of Artificial Sequence: Synthetic oligonucleotide
  Antisense strand to SEQ ID NO: 921678
uuucugcugagacuccacu

SEQ ID NO: 921680 - RNA, 19 nt, Artificial Sequence
  Description of Artificial Sequence: Synthetic oligonucleotide
  Sense strand starting at position 3168 of SEQ ID NO: 913366
ccacuaucgucaccaagaa

SEQ ID NO: 921681 - RNA, 19 nt, Artificial Sequence
  Description of Artificial Sequence: Synthetic oligonucleotide
  Antisense strand to SEQ ID NO: 921680
uucuuggugacgauagugg

SEQ ID NO: 921682 - RNA, 19 nt, Artificial Sequence
  Description of Artificial Sequence: Synthetic oligonucleotide
  Sense strand starting at position 3241 of SEQ ID NO: 913366
caaggugaucuaugaagcu

SEQ ID NO: 921683 - RNA, 19 nt, Artificial Sequence
  Description of Artificial Sequence: Synthetic oligonucleotide
  Antisense strand to SEQ ID NO: 921682
agcuucauagaucaccuug

SEQ ID NO: 921684 - RNA, 19 nt, Artificial Sequence
  Description of Artificial Sequence: Synthetic oligonucleotide
  Sense strand starting at position 391 of SEQ ID NO: 913366
gaccacagucuguauguau

SEQ ID NO: 921685 - RNA, 19 nt, Artificial Sequence
  Description of Artificial Sequence: Synthetic oligonucleotide
  Antisense strand to SEQ ID NO: 921684
auacauacagacugugguc

SEQ ID NO: 921686 - RNA, 19 nt, Artificial Sequence
  Description of Artificial Sequence: Synthetic oligonucleotide
  Sense strand starting at position 1233 of SEQ ID NO: 913366
ggaaacugcuuaucucauu

SEQ ID NO: 921687 - RNA, 19 nt, Artificial Sequence
  Description of Artificial Sequence: Synthetic oligonucleotide
  Antisense strand to SEQ ID NO: 921686
aaugagauaagcaguuucc

SEQ ID NO: 921688 - RNA, 19 nt, Artificial Sequence
  Description of Artificial Sequence: Synthetic oligonucleotide
  Sense strand starting at position 1613 of SEQ ID NO: 913366
gccauucuuccugagcaaa

SEQ ID NO: 921689 - RNA, 19 nt, Artificial Sequence
  Description of Artificial Sequence: Synthetic oligonucleotide
  Antisense strand to SEQ ID NO: 921688
uuugcucaggaagaauggc

SEQ ID NO: 921690 - RNA, 19 nt, Artificial Sequence
  Description of Artificial Sequence: Synthetic oligonucleotide
  Sense strand starting at position 3857 of SEQ ID NO: 913366
ucuagaaaguugucacuug

SEQ ID NO: 921691 - RNA, 19 nt, Artificial Sequence
  Description of Artificial Sequence: Synthetic oligonucleotide
  Antisense strand to SEQ ID NO: 921690
caagugacaacuuucuaga

SEQ ID NO: 921692 - RNA, 19 nt, Artificial Sequence
  Description of Artificial Sequence: Synthetic oligonucleotide
  Sense strand starting at position 1173 of SEQ ID NO: 913366
gcgccugacgaauaacaga

SEQ ID NO: 921693 - RNA, 19 nt, Artificial Sequence
  Description of Artificial Sequence: Synthetic oligonucleotide
  Antisense strand to SEQ ID NO: 921692
ucuguuauucgucaggcgc

SEQ ID NO: 921694 - RNA, 19 nt, Artificial Sequence
  Description of Artificial Sequence: Synthetic oligonucleotide
  Sense strand starting at position 2258 of SEQ ID NO: 913366
gaaagccucuucuccgaga

SEQ ID NO: 921695 - RNA, 19 nt, Artificial Sequence
  Description of Artificial Sequence: Synthetic oligonucleotide
  Antisense strand to SEQ ID NO: 921694
ucucggagaagaggcuuuc

SEQ ID NO: 921696 - RNA, 19 nt, Artificial Sequence
  Description of Artificial Sequence: Synthetic oligonucleotide
  Sense strand starting at position 1676 of SEQ ID NO: 913366
guggaucuugccgagaucu

SEQ ID NO: 921697 - RNA, 19 nt, Artificial Sequence
  Description of Artificial Sequence: Synthetic oligonucleotide
  Antisense strand to SEQ ID NO: 921696
agaucucggcaagauccac

SEQ ID NO: 921698 - RNA, 19 nt, Artificial Sequence
  Description of Artificial Sequence: Synthetic oligonucleotide
  Sense strand starting at position 2136 of SEQ ID NO: 913366
aacaaaugucggugggagu

SEQ ID NO: 921699 - RNA, 19 nt, Artificial Sequence
  Description of Artificial Sequence: Synthetic oligonucleotide
  Antisense strand to SEQ ID NO: 921698
acucccaccgacauuuguu

SEQ ID NO: 921700 - RNA, 19 nt, Artificial Sequence
  Description of Artificial Sequence: Synthetic oligonucleotide
  Sense strand starting at position 3587 of SEQ ID NO: 913366
ccuaaugcagccugaaauu

SEQ ID NO: 921701 - RNA, 19 nt, Artificial Sequence
  Description of Artificial Sequence: Synthetic oligonucleotide
  Antisense strand to SEQ ID NO: 921700
aauuucaggcugcauuagg

SEQ ID NO: 921702 - RNA, 19 nt, Artificial Sequence
  Description of Artificial Sequence: Synthetic oligonucleotide
  Sense strand starting at position 2149 of SEQ ID NO: 913366
gggagucuggcugaguguu

SEQ ID NO: 921703 - RNA, 19 nt, Artificial Sequence
  Description of Artificial Sequence: Synthetic oligonucleotide
  Antisense strand to SEQ ID NO: 921702
aacacucagccagacuccc

SEQ ID NO: 921704 - RNA, 19 nt, Artificial Sequence
  Description of Artificial Sequence: Synthetic oligonucleotide
  Sense strand starting at position 3209 of SEQ ID NO: 913366
cuagaaaguuauguugucu

SEQ ID NO: 921705 - RNA, 19 nt, Artificial Sequence
  Description of Artificial Sequence: Synthetic oligonucleotide
  Antisense strand to SEQ ID NO: 921704
agacaacauaacuuucuag

SEQ ID NO: 921706 - RNA, 19 nt, Artificial Sequence
  Description of Artificial Sequence: Synthetic oligonucleotide
  Sense strand starting at position 968 of SEQ ID NO: 913366
cucuguugucacugacaua

SEQ ID NO: 921707 - RNA, 19 nt, Artificial Sequence
  Description of Artificial Sequence: Synthetic oligonucleotide
  Antisense strand to SEQ ID NO: 921706
uaugucagugacaacagag

SEQ ID NO: 921708 - RNA, 19 nt, Artificial Sequence
  Description of Artificial Sequence: Synthetic oligonucleotide
  Sense strand starting at position 1253 of SEQ ID NO: 913366
ugcaccuuuccauaagugu

SEQ ID NO: 921709 - RNA, 19 nt, Artificial Sequence
  Description of Artificial Sequence: Synthetic oligonucleotide
  Antisense strand to SEQ ID NO: 921708
acacuuauggaaaggugca

SEQ ID NO: 921710 - RNA, 19 nt, Artificial Sequence
  Description of Artificial Sequence: Synthetic oligonucleotide
  Sense strand starting at position 2159 of SEQ ID NO: 913366
cugaguguucaggacguuu

SEQ ID NO: 921711 - RNA, 19 nt, Artificial Sequence
  Description of Artificial Sequence: Synthetic oligonucleotide
  Antisense strand to SEQ ID NO: 921710
aaacguccugaacacucag

SEQ ID NO: 921712 - RNA, 19 nt, Artificial Sequence
  Description of Artificial Sequence: Synthetic oligonucleotide
  Sense strand starting at position 3734 of SEQ ID NO: 913366
ccagcucugagguguugaa

SEQ ID NO: 921713 - RNA, 19 nt, Artificial Sequence
  Description of Artificial Sequence: Synthetic oligonucleotide
  Antisense strand to SEQ ID NO: 921712
uucaacaccucagagcugg

SEQ ID NO: 921714 - RNA, 19 nt, Artificial Sequence
  Description of Artificial Sequence: Synthetic oligonucleotide
  Sense strand starting at position 1640 of SEQ ID NO: 913366
cugcacuuucgccacauua

SEQ ID NO: 921715 - RNA, 19 nt, Artificial Sequence
  Description of Artificial Sequence: Synthetic oligonucleotide
  Antisense strand to SEQ ID NO: 921714
uaauguggcgaaagugcag

SEQ ID NO: 921716 - RNA, 19 nt, Artificial Sequence
  Description of Artificial Sequence: Synthetic oligonucleotide
  Sense strand starting at position 2443 of SEQ ID NO: 913366
uucggagaucguggcaaua

SEQ ID NO: 921717 - RNA, 19 nt, Artificial Sequence
  Description of Artificial Sequence: Synthetic oligonucleotide
  Antisense strand to SEQ ID NO: 921716
uauugccacgaucuccgaa

SEQ ID NO: 921718 - RNA, 19 nt, Artificial Sequence
  Description of Artificial Sequence: Synthetic oligonucleotide
  Sense strand starting at position 1591 of SEQ ID NO: 913366
ucaucuugucucuaucguu

SEQ ID NO: 921719 - RNA, 19 nt, Artificial Sequence
  Description of Artificial Sequence: Synthetic oligonucleotide
  Antisense strand to SEQ ID NO: 921718
aacgauagagacaagauga

SEQ ID NO: 921720 - RNA, 19 nt, Artificial Sequence
  Description of Artificial Sequence: Synthetic oligonucleotide
  Sense strand starting at position 2237 of SEQ ID NO: 913367
aguagaaucgcgcugagca

SEQ ID NO: 921721 - RNA, 19 nt, Artificial Sequence
  Description of Artificial Sequence: Synthetic oligonucleotide
  Antisense strand to SEQ ID NO: 921720
ugcucagcgcgauucuacu

SEQ ID NO: 921722 - RNA, 19 nt, Artificial Sequence
  Description of Artificial Sequence: Synthetic oligonucleotide
  Sense strand starting at position 692 of SEQ ID NO: 913367
cauauauuuggguguuugu

SEQ ID NO: 921723 - RNA, 19 nt, Artificial Sequence
  Description of Artificial Sequence: Synthetic oligonucleotide
  Antisense strand to SEQ ID NO: 921722
acaaacacccaaauauaug

SEQ ID NO: 921724 - RNA, 19 nt, Artificial Sequence
  Description of Artificial Sequence: Synthetic oligonucleotide
  Sense strand starting at position 2837 of SEQ ID NO: 913367
uccagaacugccugaccaa

SEQ ID NO: 921725 - RNA, 19 nt, Artificial Sequence
  Description of Artificial Sequence: Synthetic oligonucleotide
  Antisense strand to SEQ ID NO: 921724
uuggucaggcaguucugga

SEQ ID NO: 921726 - RNA, 19 nt, Artificial Sequence
  Description of Artificial Sequence: Synthetic oligonucleotide
  Sense strand starting at position 2921 of SEQ ID NO: 913367
ggcacaucccuguaauacc

SEQ ID NO: 921727 - RNA, 19 nt, Artificial Sequence
  Description of Artificial Sequence: Synthetic oligonucleotide
  Antisense strand to SEQ ID NO: 921726
gguauuacagggaugugcc

SEQ ID NO: 921728 - RNA, 19 nt, Artificial Sequence
  Description of Artificial Sequence: Synthetic oligonucleotide
  Sense strand starting at position 292 of SEQ ID NO: 913367
gugaauucucuauaaagcg

SEQ ID NO: 921729 - RNA, 19 nt, Artificial Sequence
  Description of Artificial Sequence: Synthetic oligonucleotide
  Antisense strand to SEQ ID NO: 921728
cgcuuuauagagaauucac

SEQ ID NO: 921730 - RNA, 19 nt, Artificial Sequence
  Description of Artificial Sequence: Synthetic oligonucleotide
  Sense strand starting at position 2227 of SEQ ID NO: 913367
ggccucucucaguagaauc

SEQ ID NO: 921731 - RNA, 19 nt, Artificial Sequence
  Description of Artificial Sequence: Synthetic oligonucleotide
  Antisense strand to SEQ ID NO: 921730
gauucuacugagagaggcc

SEQ ID NO: 921732 - RNA, 19 nt, Artificial Sequence
  Description of Artificial Sequence: Synthetic oligonucleotide
  Sense strand starting at position 3247 of SEQ ID NO: 913367
gccaguuuaucacuagaaa

SEQ ID NO: 921733 - RNA, 19 nt, Artificial Sequence
  Description of Artificial Sequence: Synthetic oligonucleotide
  Antisense strand to SEQ ID NO: 921732
uuucuagugauaaacuggc

SEQ ID NO: 921734 - RNA, 19 nt, Artificial Sequence
  Description of Artificial Sequence: Synthetic oligonucleotide
  Sense strand starting at position 182 of SEQ ID NO: 913367
aggucaguugcagaucuua

SEQ ID NO: 921735 - RNA, 19 nt, Artificial Sequence
  Description of Artificial Sequence: Synthetic oligonucleotide
  Antisense strand to SEQ ID NO: 921734
uaagaucugcaacugaccu

SEQ ID NO: 921736 - RNA, 19 nt, Artificial Sequence
  Description of Artificial Sequence: Synthetic oligonucleotide
  Sense strand starting at position 399 of SEQ ID NO: 913367
uaugcagggugacuuaauu

SEQ ID NO: 921737 - RNA, 19 nt, Artificial Sequence
  Description of Artificial Sequence: Synthetic oligonucleotide
  Antisense strand to SEQ ID NO: 921736
aauuaagucacccugcaua

SEQ ID NO: 921738 - RNA, 19 nt, Artificial Sequence
  Description of Artificial Sequence: Synthetic oligonucleotide
  Sense strand starting at position 1559 of SEQ ID NO: 913367
uacacaguccucugugaga

SEQ ID NO: 921739 - RNA, 19 nt, Artificial Sequence
  Description of Artificial Sequence: Synthetic oligonucleotide
  Antisense strand to SEQ ID NO: 921738
ucucacagaggacugugua

SEQ ID NO: 921740 - RNA, 19 nt, Artificial Sequence
  Description of Artificial Sequence: Synthetic oligonucleotide
  Sense strand starting at position 396 of SEQ ID NO: 913367
ucauaugcagggugacuua

SEQ ID NO: 921741 - RNA, 19 nt, Artificial Sequence
  Description of Artificial Sequence: Synthetic oligonucleotide
  Antisense strand to SEQ ID NO: 921740
uaagucacccugcauauga

SEQ ID NO: 921742 - RNA, 19 nt, Artificial Sequence
  Description of Artificial Sequence: Synthetic oligonucleotide
  Sense strand starting at position 2226 of SEQ ID NO: 913367
aggccucucucaguagaau

SEQ ID NO: 921743 - RNA, 19 nt, Artificial Sequence
  Description of Artificial Sequence: Synthetic oligonucleotide
  Antisense strand to SEQ ID NO: 921742
auucuacugagagaggccu

SEQ ID NO: 921744 - RNA, 19 nt, Artificial Sequence
  Description of Artificial Sequence: Synthetic oligonucleotide
  Sense strand starting at position 2773 of SEQ ID NO: 913367
ucgcaaaguccugauccca

SEQ ID NO: 921745 - RNA, 19 nt, Artificial Sequence
  Description of Artificial Sequence: Synthetic oligonucleotide
  Antisense strand to SEQ ID NO: 921744
ugggaucaggacuuugcga

SEQ ID NO: 921746 - RNA, 19 nt, Artificial Sequence
  Description of Artificial Sequence: Synthetic oligonucleotide
  Sense strand starting at position 1186 of SEQ ID NO: 913367
aaagacagccuguguaauu

SEQ ID NO: 921747 - RNA, 19 nt, Artificial Sequence
  Description of Artificial Sequence: Synthetic oligonucleotide
  Antisense strand to SEQ ID NO: 921746
aauuacacaggcugucuuu

SEQ ID NO: 921748 - RNA, 19 nt, Artificial Sequence
  Description of Artificial Sequence: Synthetic oligonucleotide
  Sense strand starting at position 1049 of SEQ ID NO: 913367
gcccaaaguguugggauca

SEQ ID NO: 921749 - RNA, 19 nt, Artificial Sequence
  Description of Artificial Sequence: Synthetic oligonucleotide
  Antisense strand to SEQ ID NO: 921748
ugaucccaacacuuugggc

SEQ ID NO: 921750 - RNA, 19 nt, Artificial Sequence
  Description of Artificial Sequence: Synthetic oligonucleotide
  Sense strand starting at position 2676 of SEQ ID NO: 913367
gguggaggcuaaucuugua

SEQ ID NO: 921751 - RNA, 19 nt, Artificial Sequence
  Description of Artificial Sequence: Synthetic oligonucleotide
  Antisense strand to SEQ ID NO: 921750
uacaagauuagccuccacc

SEQ ID NO: 921752 - RNA, 19 nt, Artificial Sequence
  Description of Artificial Sequence: Synthetic oligonucleotide
  Sense strand starting at position 1090 of SEQ ID NO: 913367
gcucaucuugugcaaauua

SEQ ID NO: 921753 - RNA, 19 nt, Artificial Sequence
  Description of Artificial Sequence: Synthetic oligonucleotide
  Antisense strand to SEQ ID NO: 921752
uaauuugcacaagaugagc

SEQ ID NO: 921754 - RNA, 19 nt, Artificial Sequence
  Description of Artificial Sequence: Synthetic oligonucleotide
  Sense strand starting at position 662 of SEQ ID NO: 913367
gugugaccauuaccaaguu

SEQ ID NO: 921755 - RNA, 19 nt, Artificial Sequence
  Description of Artificial Sequence: Synthetic oligonucleotide
  Antisense strand to SEQ ID NO: 921754
aacuugguaauggucacac

SEQ ID NO: 921756 - RNA, 19 nt, Artificial Sequence
  Description of Artificial Sequence: Synthetic oligonucleotide
  Sense strand starting at position 748 of SEQ ID NO: 913367
ucagcuguuagcgaacaau

SEQ ID NO: 921757 - RNA, 19 nt, Artificial Sequence
  Description of Artificial Sequence: Synthetic oligonucleotide
  Antisense strand to SEQ ID NO: 921756
auuguucgcuaacagcuga

SEQ ID NO: 921758 - RNA, 19 nt, Artificial Sequence
  Description of Artificial Sequence: Synthetic oligonucleotide
  Sense strand starting at position 1089 of SEQ ID NO: 913367
ggcucaucuugugcaaauu

SEQ ID NO: 921759 - RNA, 19 nt, Artificial Sequence
  Description of Artificial Sequence: Synthetic oligonucleotide
  Antisense strand to SEQ ID NO: 921758
aauuugcacaagaugagcc

SEQ ID NO: 921760 - RNA, 19 nt, Artificial Sequence
  Description of Artificial Sequence: Synthetic oligonucleotide
  Sense strand starting at position 690 of SEQ ID NO: 913367
uacauauauuuggguguuu

SEQ ID NO: 921761 - RNA, 19 nt, Artificial Sequence
  Description of Artificial Sequence: Synthetic oligonucleotide
  Antisense strand to SEQ ID NO: 921760
aaacacccaaauauaugua

SEQ ID NO: 921762 - RNA, 19 nt, Artificial Sequence
  Description of Artificial Sequence: Synthetic oligonucleotide
  Sense strand starting at position 2679 of SEQ ID NO: 913367
ggaggcuaaucuuguauuu

SEQ ID NO: 921763 - RNA, 19 nt, Artificial Sequence
  Description of Artificial Sequence: Synthetic oligonucleotide
  Antisense strand to SEQ ID NO: 921762
aaauacaagauuagccucc

SEQ ID NO: 921764 - RNA, 19 nt, Artificial Sequence
  Description of Artificial Sequence: Synthetic oligonucleotide
  Sense strand starting at position 2193 of SEQ ID NO: 913367
aaaguucuguguucgccaa

SEQ ID NO: 921765 - RNA, 19 nt, Artificial Sequence
  Description of Artificial Sequence: Synthetic oligonucleotide
  Antisense strand to SEQ ID NO: 921764
uuggcgaacacagaacuuu

SEQ ID NO: 921766 - RNA, 19 nt, Artificial Sequence
  Description of Artificial Sequence: Synthetic oligonucleotide
  Sense strand starting at position 1425 of SEQ ID NO: 913367
guacauauauuaugggaau

SEQ ID NO: 921767 - RNA, 19 nt, Artificial Sequence
  Description of Artificial Sequence: Synthetic oligonucleotide
  Antisense strand to SEQ ID NO: 921766
auucccauaauauauguac

SEQ ID NO: 921768 - RNA, 19 nt, Artificial Sequence
  Description of Artificial Sequence: Synthetic oligonucleotide
  Sense strand starting at position 3215 of SEQ ID NO: 913367
guauucccuucugaugaau

SEQ ID NO: 921769 - RNA, 19 nt, Artificial Sequence
  Description of Artificial Sequence: Synthetic oligonucleotide
  Antisense strand to SEQ ID NO: 921768
auucaucagaagggaauac

SEQ ID NO: 921770 - RNA, 19 nt, Artificial Sequence
  Description of Artificial Sequence: Synthetic oligonucleotide
  Sense strand starting at position 654 of SEQ ID NO: 913367
aguauaaagugugaccauu

SEQ ID NO: 921771 - RNA, 19 nt, Artificial Sequence
  Description of Artificial Sequence: Synthetic oligonucleotide
  Antisense strand to SEQ ID NO: 921770
aauggucacacuuuauacu

SEQ ID NO: 921772 - RNA, 19 nt, Artificial Sequence
  Description of Artificial Sequence: Synthetic oligonucleotide
  Sense strand starting at position 1258 of SEQ ID NO: 913367
gaacucgcauccugagaaa

SEQ ID NO: 921773 - RNA, 19 nt, Artificial Sequence
  Description of Artificial Sequence: Synthetic oligonucleotide
  Antisense strand to SEQ ID NO: 921772
uuucucaggaugcgaguuc

SEQ ID NO: 921774 - RNA, 19 nt, Artificial Sequence
  Description of Artificial Sequence: Synthetic oligonucleotide
  Sense strand starting at position 3214 of SEQ ID NO: 913367
uguauucccuucugaugaa

SEQ ID NO: 921775 - RNA, 19 nt, Artificial Sequence
  Description of Artificial Sequence: Synthetic oligonucleotide
  Antisense strand to SEQ ID NO: 921774
uucaucagaagggaauaca

SEQ ID NO: 921776 - RNA, 19 nt, Artificial Sequence
  Description of Artificial Sequence: Synthetic oligonucleotide
  Sense strand starting at position 3245 of SEQ ID NO: 913367
gugccaguuuaucacuaga

SEQ ID NO: 921777 - RNA, 19 nt, Artificial Sequence
  Description of Artificial Sequence: Synthetic oligonucleotide
  Antisense strand to SEQ ID NO: 921776
ucuagugauaaacuggcac

SEQ ID NO: 921778 - RNA, 19 nt, Artificial Sequence
  Description of Artificial Sequence: Synthetic oligonucleotide
  Sense strand starting at position 1088 of SEQ ID NO: 913367
cggcucaucuugugcaaau

SEQ ID NO: 921779 - RNA, 19 nt, Artificial Sequence
  Description of Artificial Sequence: Synthetic oligonucleotide
  Antisense strand to SEQ ID NO: 921778
auuugcacaagaugagccg

SEQ ID NO: 921780 - RNA, 19 nt, Artificial Sequence
  Description of Artificial Sequence: Synthetic oligonucleotide
  Sense strand starting at position 443 of SEQ ID NO: 913367
agugcuugcuucugagcuu

SEQ ID NO: 921781 - RNA, 19 nt, Artificial Sequence
  Description of Artificial Sequence: Synthetic oligonucleotide
  Antisense strand to SEQ ID NO: 921780
aagcucagaagcaagcacu

SEQ ID NO: 921782 - RNA, 19 nt, Artificial Sequence
  Description of Artificial Sequence: Synthetic oligonucleotide
  Sense strand starting at position 2269 of SEQ ID NO: 913368
agguuauuugugugacacu

SEQ ID NO: 921783 - RNA, 19 nt, Artificial Sequence
  Description of Artificial Sequence: Synthetic oligonucleotide
  Antisense strand to SEQ ID NO: 921782
agugucacacaaauaaccu

SEQ ID NO: 921784 - RNA, 19 nt, Artificial Sequence
  Description of Artificial Sequence: Synthetic oligonucleotide
  Sense strand starting at position 2175 of SEQ ID NO: 913368
uguucauuggaagaguuag

SEQ ID NO: 921785 - RNA, 19 nt, Artificial Sequence
  Description of Artificial Sequence: Synthetic oligonucleotide
  Antisense strand to SEQ ID NO: 921784
cuaacucuuccaaugaaca

SEQ ID NO: 921786 - RNA, 19 nt, Artificial Sequence
  Description of Artificial Sequence: Synthetic oligonucleotide
  Sense strand starting at position 446 of SEQ ID NO: 913368
ccaagaguagcagaacagu

SEQ ID NO: 921787 - RNA, 19 nt, Artificial Sequence
  Description of Artificial Sequence: Synthetic oligonucleotide
  Antisense strand to SEQ ID NO: 921786
acuguucugcuacucuugg

SEQ ID NO: 921788 - RNA, 19 nt, Artificial Sequence
  Description of Artificial Sequence: Synthetic oligonucleotide
  Sense strand starting at position 1086 of SEQ ID NO: 913368
auagaagucauuugcguga

SEQ ID NO: 921789 - RNA, 19 nt, Artificial Sequence
  Description of Artificial Sequence: Synthetic oligonucleotide
  Antisense strand to SEQ ID NO: 921788
ucacgcaaaugacuucuau

SEQ ID NO: 921790 - RNA, 19 nt, Artificial Sequence
  Description of Artificial Sequence: Synthetic oligonucleotide
  Sense strand starting at position 2509 of SEQ ID NO: 913368
aggauugggcacuggaauu

SEQ ID NO: 921791 - RNA, 19 nt, Artificial Sequence
  Description of Artificial Sequence: Synthetic oligonucleotide
  Antisense strand to SEQ ID NO: 921790
aauuccagugcccaauccu

SEQ ID NO: 921792 - RNA, 19 nt, Artificial Sequence
  Description of Artificial Sequence: Synthetic oligonucleotide
  Sense strand starting at position 2695 of SEQ ID NO: 913368
agguccaagagugaguauu

SEQ ID NO: 921793 - RNA, 19 nt, Artificial Sequence
  Description of Artificial Sequence: Synthetic oligonucleotide
  Antisense strand to SEQ ID NO: 921792
aauacucacucuuggaccu

SEQ ID NO: 921794 - RNA, 19 nt, Artificial Sequence
  Description of Artificial Sequence: Synthetic oligonucleotide
  Sense strand starting at position 1993 of SEQ ID NO: 913368
ucuguuaugguugacagga

SEQ ID NO: 921795 - RNA, 19 nt, Artificial Sequence
  Description of Artificial Sequence: Synthetic oligonucleotide
  Antisense strand to SEQ ID NO: 921794
uccugucaaccauaacaga

SEQ ID NO: 921796 - RNA, 19 nt, Artificial Sequence
  Description of Artificial Sequence: Synthetic oligonucleotide
  Sense strand starting at position 2748 of SEQ ID NO: 913368
augacaucaccuuggaagu

SEQ ID NO: 921797 - RNA, 19 nt, Artificial Sequence
  Description of Artificial Sequence: Synthetic oligonucleotide
  Antisense strand to SEQ ID NO: 921796
acuuccaaggugaugucau

SEQ ID NO: 921798 - RNA, 19 nt, Artificial Sequence
  Description of Artificial Sequence: Synthetic oligonucleotide
  Sense strand starting at position 945 of SEQ ID NO: 913368
ucugaaaguguaggaacua

SEQ ID NO: 921799 - RNA, 19 nt, Artificial Sequence
  Description of Artificial Sequence: Synthetic oligonucleotide
  Antisense strand to SEQ ID NO: 921798
uaguuccuacacuuucaga

SEQ ID NO: 921800 - RNA, 19 nt, Artificial Sequence
  Description of Artificial Sequence: Synthetic oligonucleotide
  Sense strand starting at position 1984 of SEQ ID NO: 913368
acagaauucucuguuaugg

SEQ ID NO: 921801 - RNA, 19 nt, Artificial Sequence
  Description of Artificial Sequence: Synthetic oligonucleotide
  Antisense strand to SEQ ID NO: 921800
ccauaacagagaauucugu

SEQ ID NO: 921802 - RNA, 19 nt, Artificial Sequence
  Description of Artificial Sequence: Synthetic oligonucleotide
  Sense strand starting at position 2010 of SEQ ID NO: 913368
gaagguugacauggugacu

SEQ ID NO: 921803 - RNA, 19 nt, Artificial Sequence
  Description of Artificial Sequence: Synthetic oligonucleotide
  Antisense strand to SEQ ID NO: 921802
agucaccaugucaaccuuc

SEQ ID NO: 921804 - RNA, 19 nt, Artificial Sequence
  Description of Artificial Sequence: Synthetic oligonucleotide
  Sense strand starting at position 2344 of SEQ ID NO: 913368
agucuuugugaaugaggga

SEQ ID NO: 921805 - RNA, 19 nt, Artificial Sequence
  Description of Artificial Sequence: Synthetic oligonucleotide
  Antisense strand to SEQ ID NO: 921804
ucccucauucacaaagacu

SEQ ID NO: 921806 - RNA, 19 nt, Artificial Sequence
  Description of Artificial Sequence: Synthetic oligonucleotide
  Sense strand starting at position 307 of SEQ ID NO: 913368
cacacuuggcaaggugaaa

SEQ ID NO: 921807 - RNA, 19 nt, Artificial Sequence
  Description of Artificial Sequence: Synthetic oligonucleotide
  Antisense strand to SEQ ID NO: 921806
uuucaccuugccaagugug

SEQ ID NO: 921808 - RNA, 19 nt, Artificial Sequence
  Description of Artificial Sequence: Synthetic oligonucleotide
  Sense strand starting at position 3034 of SEQ ID NO: 913368
uuguaugcacaagagugau

SEQ ID NO: 921809 - RNA, 19 nt, Artificial Sequence
  Description of Artificial Sequence: Synthetic oligonucleotide
  Antisense strand to SEQ ID NO: 921808
aucacucuugugcauacaa

SEQ ID NO: 921810 - RNA, 19 nt, Artificial Sequence
  Description of Artificial Sequence: Synthetic oligonucleotide
  Sense strand starting at position 834 of SEQ ID NO: 913368
aggcaaucucuccaaagcu

SEQ ID NO: 921811 - RNA, 19 nt, Artificial Sequence
  Description of Artificial Sequence: Synthetic oligonucleotide
  Antisense strand to SEQ ID NO: 921810
agcuuuggagagauugccu

SEQ ID NO: 921812 - RNA, 19 nt, Artificial Sequence
  Description of Artificial Sequence: Synthetic oligonucleotide
  Sense strand starting at position 3289 of SEQ ID NO: 913368
uugguauuagcauacuuua

SEQ ID NO: 921813 - RNA, 19 nt, Artificial Sequence
  Description of Artificial Sequence: Synthetic oligonucleotide
  Antisense strand to SEQ ID NO: 921812
uaaaguaugcuaauaccaa

SEQ ID NO: 921814 - RNA, 19 nt, Artificial Sequence
  Description of Artificial Sequence: Synthetic oligonucleotide
  Sense strand starting at position 3280 of SEQ ID NO: 913368
ucuugauacuugguauuag

SEQ ID NO: 921815 - RNA, 19 nt, Artificial Sequence
  Description of Artificial Sequence: Synthetic oligonucleotide
  Antisense strand to SEQ ID NO: 921814
cuaauaccaaguaucaaga

SEQ ID NO: 921816 - RNA, 19 nt, Artificial Sequence
  Description of Artificial Sequence: Synthetic oligonucleotide
  Sense strand starting at position 1030 of SEQ ID NO: 913368
gugacauuagaaugcccaa

SEQ ID NO: 921817 - RNA, 19 nt, Artificial Sequence
  Description of Artificial Sequence: Synthetic oligonucleotide
  Antisense strand to SEQ ID NO: 921816
uugggcauucuaaugucac

SEQ ID NO: 921818 - RNA, 19 nt, Artificial Sequence
  Description of Artificial Sequence: Synthetic oligonucleotide
  Sense strand starting at position 735 of SEQ ID NO: 913368
cagaaagugcugcaacauu

SEQ ID NO: 921819 - RNA, 19 nt, Artificial Sequence
  Description of Artificial Sequence: Synthetic oligonucleotide
  Antisense strand to SEQ ID NO: 921818
aauguugcagcacuuucug

SEQ ID NO: 921820 - RNA, 19 nt, Artificial Sequence
  Description of Artificial Sequence: Synthetic oligonucleotide
  Sense strand starting at position 2906 of SEQ ID NO: 913368
caacgcuuugaauagcaga

SEQ ID NO: 921821 - RNA, 19 nt, Artificial Sequence
  Description of Artificial Sequence: Synthetic oligonucleotide
  Antisense strand to SEQ ID NO: 921820
ucugcuauucaaagcguug

SEQ ID NO: 921822 - RNA, 19 nt, Artificial Sequence
  Description of Artificial Sequence: Synthetic oligonucleotide
  Sense strand starting at position 2727 of SEQ ID NO: 913368
gcagaaacuguagagcuuu

SEQ ID NO: 921823 - RNA, 19 nt, Artificial Sequence
  Description of Artificial Sequence: Synthetic oligonucleotide
  Antisense strand to SEQ ID NO: 921822
aaagcucuacaguuucugc

SEQ ID NO: 921824 - RNA, 19 nt, Artificial Sequence
  Description of Artificial Sequence: Synthetic oligonucleotide
  Sense strand starting at position 3658 of SEQ ID NO: 913368
gucuuuauauauccuggau

SEQ ID NO: 921825 - RNA, 19 nt, Artificial Sequence
  Description of Artificial Sequence: Synthetic oligonucleotide
  Antisense strand to SEQ ID NO: 921824
auccaggauauauaaagac

SEQ ID NO: 921826 - RNA, 19 nt, Artificial Sequence
  Description of Artificial Sequence: Synthetic oligonucleotide
  Sense strand starting at position 2258 of SEQ ID NO: 913368
uuggcaaugggagguuauu

SEQ ID NO: 921827 - RNA, 19 nt, Artificial Sequence
  Description of Artificial Sequence: Synthetic oligonucleotide
  Antisense strand to SEQ ID NO: 921826
aauaaccucccauugccaa

SEQ ID NO: 921828 - RNA, 19 nt, Artificial Sequence
  Description of Artificial Sequence: Synthetic oligonucleotide
  Sense strand starting at position 2902 of SEQ ID NO: 913368
ugaccaacgcuuugaauag

SEQ ID NO: 921829 - RNA, 19 nt, Artificial Sequence
  Description of Artificial Sequence: Synthetic oligonucleotide
  Antisense strand to SEQ ID NO: 921828
cuauucaaagcguugguca

SEQ ID NO: 921830 - RNA, 19 nt, Artificial Sequence
  Description of Artificial Sequence: Synthetic oligonucleotide
  Sense strand starting at position 2374 of SEQ ID NO: 913368
ucuacugcuguguaacaga

SEQ ID NO: 921831 - RNA, 19 nt, Artificial Sequence
  Description of Artificial Sequence: Synthetic oligonucleotide
  Antisense strand to SEQ ID NO: 921830
ucuguuacacagcaguaga

SEQ ID NO: 921832 - RNA, 19 nt, Artificial Sequence
  Description of Artificial Sequence: Synthetic oligonucleotide
  Sense strand starting at position 388 of SEQ ID NO: 913368
aagacuauguggcuaguga

SEQ ID NO: 921833 - RNA, 19 nt, Artificial Sequence
  Description of Artificial Sequence: Synthetic oligonucleotide
  Antisense strand to SEQ ID NO: 921832
ucacuagccacauagucuu

SEQ ID NO: 921834 - RNA, 19 nt, Artificial Sequence
  Description of Artificial Sequence: Synthetic oligonucleotide
  Sense strand starting at position 3544 of SEQ ID NO: 913368
gucaccuacucacuugauu

SEQ ID NO: 921835 - RNA, 19 nt, Artificial Sequence
  Description of Artificial Sequence: Synthetic oligonucleotide
  Antisense strand to SEQ ID NO: 921834
aaucaagugaguaggugac

SEQ ID NO: 921836 - RNA, 19 nt, Artificial Sequence
  Description of Artificial Sequence: Synthetic oligonucleotide
  Sense strand starting at position 1349 of SEQ ID NO: 913368
cuaggucuggucugaccaa

SEQ ID NO: 921837 - RNA, 19 nt, Artificial Sequence
  Description of Artificial Sequence: Synthetic oligonucleotide
  Antisense strand to SEQ ID NO: 921836
uuggucagaccagaccuag

SEQ ID NO: 921838 - RNA, 19 nt, Artificial Sequence
  Description of Artificial Sequence: Synthetic oligonucleotide
  Sense strand starting at position 2926 of SEQ ID NO: 913368
agguuacaguguguggaaa

SEQ ID NO: 921839 - RNA, 19 nt, Artificial Sequence
  Description of Artificial Sequence: Synthetic oligonucleotide
  Antisense strand to SEQ ID NO: 921838
uuuccacacacuguaaccu

SEQ ID NO: 921840 - RNA, 19 nt, Artificial Sequence
  Description of Artificial Sequence: Synthetic oligonucleotide
  Sense strand starting at position 941 of SEQ ID NO: 913368
cuguucugaaaguguagga

SEQ ID NO: 921841 - RNA, 19 nt, Artificial Sequence
  Description of Artificial Sequence: Synthetic oligonucleotide
  Antisense strand to SEQ ID NO: 921840
uccuacacuuucagaacag

SEQ ID NO: 921842 - RNA, 19 nt, Artificial Sequence
  Description of Artificial Sequence: Synthetic oligonucleotide
  Sense strand starting at position 3452 of SEQ ID NO: 913368
cucccaagcgcugagauua

SEQ ID NO: 921843 - RNA, 19 nt, Artificial Sequence
  Description of Artificial Sequence: Synthetic oligonucleotide
  Antisense strand to SEQ ID NO: 921842
uaaucucagcgcuugggag

SEQ ID NO: 921844 - RNA, 19 nt, Artificial Sequence
  Description of Artificial Sequence: Synthetic oligonucleotide
  Sense strand starting at position 2211 of SEQ ID NO: 913368
aggacauugcuguggguga

SEQ ID NO: 921845 - RNA, 19 nt, Artificial Sequence
  Description of Artificial Sequence: Synthetic oligonucleotide
  Antisense strand to SEQ ID NO: 921844
ucacccacagcaauguccu

SEQ ID NO: 921846 - RNA, 19 nt, Artificial Sequence
  Description of Artificial Sequence: Synthetic oligonucleotide
  Sense strand starting at position 166 of SEQ ID NO: 913368
cauccagucugucugggau

SEQ ID NO: 921847 - RNA, 19 nt, Artificial Sequence
  Description of Artificial Sequence: Synthetic oligonucleotide
  Antisense strand to SEQ ID NO: 921846
aucccagacagacuggaug

SEQ ID NO: 921848 - RNA, 19 nt, Artificial Sequence
  Description of Artificial Sequence: Synthetic oligonucleotide
  Sense strand starting at position 2925 of SEQ ID NO: 913368
gagguuacaguguguggaa

SEQ ID NO: 921849 - RNA, 19 nt, Artificial Sequence
  Description of Artificial Sequence: Synthetic oligonucleotide
  Antisense strand to SEQ ID NO: 921848
uuccacacacuguaaccuc

SEQ ID NO: 921850 - RNA, 19 nt, Artificial Sequence
  Description of Artificial Sequence: Synthetic oligonucleotide
  Sense strand starting at position 2789 of SEQ ID NO: 913368
gcucuauugguccaagcag

SEQ ID NO: 921851 - RNA, 19 nt, Artificial Sequence
  Description of Artificial Sequence: Synthetic oligonucleotide
  Antisense strand to SEQ ID NO: 921850
cugcuuggaccaauagagc

SEQ ID NO: 921852 - RNA, 19 nt, Artificial Sequence
  Description of Artificial Sequence: Synthetic oligonucleotide
  Sense strand starting at position 2523 of SEQ ID NO: 913368
gaauuaucuggaggcugcu

SEQ ID NO: 921853 - RNA, 19 nt, Artificial Sequence
  Description of Artificial Sequence: Synthetic oligonucleotide
  Antisense strand to SEQ ID NO: 921852
agcagccuccagauaauuc

SEQ ID NO: 921854 - RNA, 19 nt, Artificial Sequence
  Description of Artificial Sequence: Synthetic oligonucleotide
  Sense strand starting at position 1019 of SEQ ID NO: 913368
uucucuaagcagugacauu

SEQ ID NO: 921855 - RNA, 19 nt, Artificial Sequence
  Description of Artificial Sequence: Synthetic oligonucleotide
  Antisense strand to SEQ ID NO: 921854
aaugucacugcuuagagaa

SEQ ID NO: 921856 - RNA, 19 nt, Artificial Sequence
  Description of Artificial Sequence: Synthetic oligonucleotide
  Sense strand starting at position 743 of SEQ ID NO: 913368
gcugcaacauucuccugaa

SEQ ID NO: 921857 - RNA, 19 nt, Artificial Sequence
  Description of Artificial Sequence: Synthetic oligonucleotide
  Antisense strand to SEQ ID NO: 921856
uucaggagaauguugcagc

SEQ ID NO: 921858 - RNA, 19 nt, Artificial Sequence
  Description of Artificial Sequence: Synthetic oligonucleotide
  Sense strand starting at position 2339 of SEQ ID NO: 913368
gccagagucuuugugaaug

SEQ ID NO: 921859 - RNA, 19 nt, Artificial Sequence
  Description of Artificial Sequence: Synthetic oligonucleotide
  Antisense strand to SEQ ID NO: 921858
cauucacaaagacucuggc

SEQ ID NO: 921860 - RNA, 19 nt, Artificial Sequence
  Description of Artificial Sequence: Synthetic oligonucleotide
  Sense strand starting at position 2272 of SEQ ID NO: 913368
uuauuugugugacacugaa

SEQ ID NO: 921861 - RNA, 19 nt, Artificial Sequence
  Description of Artificial Sequence: Synthetic oligonucleotide
  Antisense strand to SEQ ID NO: 921860
uucagugucacacaaauaa

SEQ ID NO: 921862 - RNA, 19 nt, Artificial Sequence
  Description of Artificial Sequence: Synthetic oligonucleotide
  Sense strand starting at position 2282 of SEQ ID NO: 913369
acgcauuuccuuuauagca

SEQ ID NO: 921863 - RNA, 19 nt, Artificial Sequence
  Description of Artificial Sequence: Synthetic oligonucleotide
  Antisense strand to SEQ ID NO: 921862
ugcuauaaaggaaaugcgu

SEQ ID NO: 921864 - RNA, 19 nt, Artificial Sequence
  Description of Artificial Sequence: Synthetic oligonucleotide
  Sense strand starting at position 3112 of SEQ ID NO: 913369
acaagugcuccugaacaga

SEQ ID NO: 921865 - RNA, 19 nt, Artificial Sequence
  Description of Artificial Sequence: Synthetic oligonucleotide
  Antisense strand to SEQ ID NO: 921864
ucuguucaggagcacuugu

SEQ ID NO: 921866 - RNA, 19 nt, Artificial Sequence
  Description of Artificial Sequence: Synthetic oligonucleotide
  Sense strand starting at position 938 of SEQ ID NO: 913369
gccgaaucucuacagagag

SEQ ID NO: 921867 - RNA, 19 nt, Artificial Sequence
  Description of Artificial Sequence: Synthetic oligonucleotide
  Antisense strand to SEQ ID NO: 921866
cucucuguagagauucggc

SEQ ID NO: 921868 - RNA, 19 nt, Artificial Sequence
  Description of Artificial Sequence: Synthetic oligonucleotide
  Sense strand starting at position 2361 of SEQ ID NO: 913369
gugacuaucguggagaaac

SEQ ID NO: 921869 - RNA, 19 nt, Artificial Sequence
  Description of Artificial Sequence: Synthetic oligonucleotide
  Antisense strand to SEQ ID NO: 921868
guuucuccacgauagucac

SEQ ID NO: 921870 - RNA, 19 nt, Artificial Sequence
  Description of Artificial Sequence: Synthetic oligonucleotide
  Sense strand starting at position 1041 of SEQ ID NO: 913369
cuccaaagucucuagguaa

SEQ ID NO: 921871 - RNA, 19 nt, Artificial Sequence
  Description of Artificial Sequence: Synthetic oligonucleotide
  Antisense strand to SEQ ID NO: 921870
uuaccuagagacuuuggag

SEQ ID NO: 921872 - RNA, 19 nt, Artificial Sequence
  Description of Artificial Sequence: Synthetic oligonucleotide
  Sense strand starting at position 2730 of SEQ ID NO: 913369
aaaggucacccagguaaua

SEQ ID NO: 921873 - RNA, 19 nt, Artificial Sequence
  Description of Artificial Sequence: Synthetic oligonucleotide
  Antisense strand to SEQ ID NO: 921872
uauuaccugggugaccuuu

SEQ ID NO: 921874 - RNA, 19 nt, Artificial Sequence
  Description of Artificial Sequence: Synthetic oligonucleotide
  Sense strand starting at position 3713 of SEQ ID NO: 913369
ccgggcgcucagucauauu

SEQ ID NO: 921875 - RNA, 19 nt, Artificial Sequence
  Description of Artificial Sequence: Synthetic oligonucleotide
  Antisense strand to SEQ ID NO: 921874
aauaugacugagcgcccgg

SEQ ID NO: 921876 - RNA, 19 nt, Artificial Sequence
  Description of Artificial Sequence: Synthetic oligonucleotide
  Sense strand starting at position 3099 of SEQ ID NO: 913369
agggucuuuccauacaagu

SEQ ID NO: 921877 - RNA, 19 nt, Artificial Sequence
  Description of Artificial Sequence: Synthetic oligonucleotide
  Antisense strand to SEQ ID NO: 921876
acuuguauggaaagacccu

SEQ ID NO: 921878 - RNA, 19 nt, Artificial Sequence
  Description of Artificial Sequence: Synthetic oligonucleotide
  Sense strand starting at position 406 of SEQ ID NO: 913369
gugacacccaucugggaua

SEQ ID NO: 921879 - RNA, 19 nt, Artificial Sequence
  Description of Artificial Sequence: Synthetic oligonucleotide
  Antisense strand to SEQ ID NO: 921878
uaucccagaugggugucac

SEQ ID NO: 921880 - RNA, 19 nt, Artificial Sequence
  Description of Artificial Sequence: Synthetic oligonucleotide
  Sense strand starting at position 3395 of SEQ ID NO: 913369
aguugcuggaucuacagau

SEQ ID NO: 921881 - RNA, 19 nt, Artificial Sequence
  Description of Artificial Sequence: Synthetic oligonucleotide
  Antisense strand to SEQ ID NO: 921880
aucuguagauccagcaacu

SEQ ID NO: 921882 - RNA, 19 nt, Artificial Sequence
  Description of Artificial Sequence: Synthetic oligonucleotide
  Sense strand starting at position 3582 of SEQ ID NO: 913369
agucgcucugaacaauaaa

SEQ ID NO: 921883 - RNA, 19 nt, Artificial Sequence
  Description of Artificial Sequence: Synthetic oligonucleotide
  Antisense strand to SEQ ID NO: 921882
uuuauuguucagagcgacu

SEQ ID NO: 921884 - RNA, 19 nt, Artificial Sequence
  Description of Artificial Sequence: Synthetic oligonucleotide
  Sense strand starting at position 2753 of SEQ ID NO: 913369
cauauaugguagguauaca

SEQ ID NO: 921885 - RNA, 19 nt, Artificial Sequence
  Description of Artificial Sequence: Synthetic oligonucleotide
  Antisense strand to SEQ ID NO: 921884
uguauaccuaccauauaug

SEQ ID NO: 921886 - RNA, 19 nt, Artificial Sequence
  Description of Artificial Sequence: Synthetic oligonucleotide
  Sense strand starting at position 1297 of SEQ ID NO: 913369
ccaguuucggaggaaaguu

SEQ ID NO: 921887 - RNA, 19 nt, Artificial Sequence
  Description of Artificial Sequence: Synthetic oligonucleotide
  Antisense strand to SEQ ID NO: 921886
aacuuuccuccgaaacugg

SEQ ID NO: 921888 - RNA, 19 nt, Artificial Sequence
  Description of Artificial Sequence: Synthetic oligonucleotide
  Sense strand starting at position 3085 of SEQ ID NO: 913369
ucacuauaucuuggagggu

SEQ ID NO: 921889 - RNA, 19 nt, Artificial Sequence
  Description of Artificial Sequence: Synthetic oligonucleotide
  Antisense strand to SEQ ID NO: 921888
acccuccaagauauaguga

SEQ ID NO: 921890 - RNA, 19 nt, Artificial Sequence
  Description of Artificial Sequence: Synthetic oligonucleotide
  Sense strand starting at position 2659 of SEQ ID NO: 913369
uuaugagaauucccuguau

SEQ ID NO: 921891 - RNA, 19 nt, Artificial Sequence
  Description of Artificial Sequence: Synthetic oligonucleotide
  Antisense strand to SEQ ID NO: 921890
auacagggaauucucauaa

SEQ ID NO: 921892 - RNA, 19 nt, Artificial Sequence
  Description of Artificial Sequence: Synthetic oligonucleotide
  Sense strand starting at position 2360 of SEQ ID NO: 913369
agugacuaucguggagaaa

SEQ ID NO: 921893 - RNA, 19 nt, Artificial Sequence
  Description of Artificial Sequence: Synthetic oligonucleotide
  Antisense strand to SEQ ID NO: 921892
uuucuccacgauagucacu

SEQ ID NO: 921894 - RNA, 19 nt, Artificial Sequence
  Description of Artificial Sequence: Synthetic oligonucleotide
  Sense strand starting at position 3910 of SEQ ID NO: 913369
agacucucagaguggguua

SEQ ID NO: 921895 - RNA, 19 nt, Artificial Sequence
  Description of Artificial Sequence: Synthetic oligonucleotide
  Antisense strand to SEQ ID NO: 921894
uaacccacucugagagucu

SEQ ID NO: 921896 - RNA, 19 nt, Artificial Sequence
  Description of Artificial Sequence: Synthetic oligonucleotide
  Sense strand starting at position 2661 of SEQ ID NO: 913369
augagaauucccuguauuc

SEQ ID NO: 921897 - RNA, 19 nt, Artificial Sequence
  Description of Artificial Sequence: Synthetic oligonucleotide
  Antisense strand to SEQ ID NO: 921896
gaauacagggaauucucau

SEQ ID NO: 921898 - RNA, 19 nt, Artificial Sequence
  Description of Artificial Sequence: Synthetic oligonucleotide
  Sense strand starting at position 2240 of SEQ ID NO: 913369
ucucuuuaaggucgagaaa

SEQ ID NO: 921899 - RNA, 19 nt, Artificial Sequence
  Description of Artificial Sequence: Synthetic oligonucleotide
  Antisense strand to SEQ ID NO: 921898
uuucucgaccuuaaagaga

SEQ ID NO: 921900 - RNA, 19 nt, Artificial Sequence
  Description of Artificial Sequence: Synthetic oligonucleotide
  Sense strand starting at position 3094 of SEQ ID NO: 913369
cuuggagggucuuuccaua

SEQ ID NO: 921901 - RNA, 19 nt, Artificial Sequence
  Description of Artificial Sequence: Synthetic oligonucleotide
  Antisense strand to SEQ ID NO: 921900
uauggaaagacccuccaag

SEQ ID NO: 921902 - RNA, 19 nt, Artificial Sequence
  Description of Artificial Sequence: Synthetic oligonucleotide
  Sense strand starting at position 1289 of SEQ ID NO: 913369
gcgugcucccaguuucgga

SEQ ID NO: 921903 - RNA, 19 nt, Artificial Sequence
  Description of Artificial Sequence: Synthetic oligonucleotide
  Antisense strand to SEQ ID NO: 921902
uccgaaacugggagcacgc

SEQ ID NO: 921904 - RNA, 19 nt, Artificial Sequence
  Description of Artificial Sequence: Synthetic oligonucleotide
  Sense strand starting at position 2513 of SEQ ID NO: 913369
aggcccuugccauauacau

SEQ ID NO: 921905 - RNA, 19 nt, Artificial Sequence
  Description of Artificial Sequence: Synthetic oligonucleotide
  Antisense strand to SEQ ID NO: 921904
auguauauggcaagggccu

SEQ ID NO: 921906 - RNA, 19 nt, Artificial Sequence
  Description of Artificial Sequence: Synthetic oligonucleotide
  Sense strand starting at position 259 of SEQ ID NO: 913369
ugagcuuagcaugagcuaa

SEQ ID NO: 921907 - RNA, 19 nt, Artificial Sequence
  Description of Artificial Sequence: Synthetic oligonucleotide
  Antisense strand to SEQ ID NO: 921906
uuagcucaugcuaagcuca

SEQ ID NO: 921908 - RNA, 19 nt, Artificial Sequence
  Description of Artificial Sequence: Synthetic oligonucleotide
  Sense strand starting at position 3913 of SEQ ID NO: 913369
cucucagaguggguuauua

SEQ ID NO: 921909 - RNA, 19 nt, Artificial Sequence
  Description of Artificial Sequence: Synthetic oligonucleotide
  Antisense strand to SEQ ID NO: 921908
uaauaacccacucugagag

SEQ ID NO: 921910 - RNA, 19 nt, Artificial Sequence
  Description of Artificial Sequence: Synthetic oligonucleotide
  Sense strand starting at position 3108 of SEQ ID NO: 913369
ccauacaagugcuccugaa

SEQ ID NO: 921911 - RNA, 19 nt, Artificial Sequence
  Description of Artificial Sequence: Synthetic oligonucleotide
  Antisense strand to SEQ ID NO: 921910
uucaggagcacuuguaugg

SEQ ID NO: 921912 - RNA, 19 nt, Artificial Sequence
  Description of Artificial Sequence: Synthetic oligonucleotide
  Sense strand starting at position 1040 of SEQ ID NO: 913369
ccuccaaagucucuaggua

SEQ ID NO: 921913 - RNA, 19 nt, Artificial Sequence
  Description of Artificial Sequence: Synthetic oligonucleotide
  Antisense strand to SEQ ID NO: 921912
uaccuagagacuuuggagg

SEQ ID NO: 921914 - RNA, 19 nt, Artificial Sequence
  Description of Artificial Sequence: Synthetic oligonucleotide
  Sense strand starting at position 456 of SEQ ID NO: 913369
cugacugguccguaccuga

SEQ ID NO: 921915 - RNA, 19 nt, Artificial Sequence
  Description of Artificial Sequence: Synthetic oligonucleotide
  Antisense strand to SEQ ID NO: 921914
ucagguacggaccagucag

SEQ ID NO: 921916 - RNA, 19 nt, Artificial Sequence
  Description of Artificial Sequence: Synthetic oligonucleotide
  Sense strand starting at position 1296 of SEQ ID NO: 913369
cccaguuucggaggaaagu

SEQ ID NO: 921917 - RNA, 19 nt, Artificial Sequence
  Description of Artificial Sequence: Synthetic oligonucleotide
  Antisense strand to SEQ ID NO: 921916
acuuuccuccgaaacuggg

SEQ ID NO: 921918 - RNA, 19 nt, Artificial Sequence
  Description of Artificial Sequence: Synthetic oligonucleotide
  Sense strand starting at position 2233 of SEQ ID NO: 913369
uagugacucucuuuaaggu

SEQ ID NO: 921919 - RNA, 19 nt, Artificial Sequence
  Description of Artificial Sequence: Synthetic oligonucleotide
  Antisense strand to SEQ ID NO: 921918
accuuaaagagagucacua

SEQ ID NO: 921920 - RNA, 19 nt, Artificial Sequence
  Description of Artificial Sequence: Synthetic oligonucleotide
  Sense strand starting at position 2231 of SEQ ID NO: 913369
guuagugacucucuuuaag

SEQ ID NO: 921921 - RNA, 19 nt, Artificial Sequence
  Description of Artificial Sequence: Synthetic oligonucleotide
  Antisense strand to SEQ ID NO: 921920
cuuaaagagagucacuaac

SEQ ID NO: 921922 - RNA, 19 nt, Artificial Sequence
  Description of Artificial Sequence: Synthetic oligonucleotide
  Sense strand starting at position 2372 of SEQ ID NO: 913369
ggagaaaccugacaaacca

SEQ ID NO: 921923 - RNA, 19 nt, Artificial Sequence
  Description of Artificial Sequence: Synthetic oligonucleotide
  Antisense strand to SEQ ID NO: 921922
ugguuugucagguuucucc

SEQ ID NO: 921924 - RNA, 19 nt, Artificial Sequence
  Description of Artificial Sequence: Synthetic oligonucleotide
  Sense strand starting at position 2752 of SEQ ID NO: 913369
gcauauaugguagguauac

SEQ ID NO: 921925 - RNA, 19 nt, Artificial Sequence
  Description of Artificial Sequence: Synthetic oligonucleotide
  Antisense strand to SEQ ID NO: 921924
guauaccuaccauauaugc

SEQ ID NO: 921926 - RNA, 19 nt, Artificial Sequence
  Description of Artificial Sequence: Synthetic oligonucleotide
  Sense strand starting at position 519 of SEQ ID NO: 913369
gccugugaggcagggauua

SEQ ID NO: 921927 - RNA, 19 nt, Artificial Sequence
  Description of Artificial Sequence: Synthetic oligonucleotide
  Antisense strand to SEQ ID NO: 921926
uaaucccugccucacaggc

SEQ ID NO: 921928 - RNA, 19 nt, Artificial Sequence
  Description of Artificial Sequence: Synthetic oligonucleotide
  Sense strand starting at position 469 of SEQ ID NO: 913369
accugagcucuguauuguu

SEQ ID NO: 921929 - RNA, 19 nt, Artificial Sequence
  Description of Artificial Sequence: Synthetic oligonucleotide
  Antisense strand to SEQ ID NO: 921928
aacaauacagagcucaggu

SEQ ID NO: 921930 - RNA, 19 nt, Artificial Sequence
  Description of Artificial Sequence: Synthetic oligonucleotide
  Sense strand starting at position 2975 of SEQ ID NO: 913369
uuagguguguccuuccaaa

SEQ ID NO: 921931 - RNA, 19 nt, Artificial Sequence
  Description of Artificial Sequence: Synthetic oligonucleotide
  Antisense strand to SEQ ID NO: 921930
uuuggaaggacacaccuaa

SEQ ID NO: 921932 - RNA, 19 nt, Artificial Sequence
  Description of Artificial Sequence: Synthetic oligonucleotide
  Sense strand starting at position 258 of SEQ ID NO: 913369
augagcuuagcaugagcua

SEQ ID NO: 921933 - RNA, 19 nt, Artificial Sequence
  Description of Artificial Sequence: Synthetic oligonucleotide
  Antisense strand to SEQ ID NO: 921932
uagcucaugcuaagcucau

SEQ ID NO: 921934 - RNA, 19 nt, Artificial Sequence
  Description of Artificial Sequence: Synthetic oligonucleotide
  Sense strand starting at position 2350 of SEQ ID NO: 913369
gggagcggucagugacuau

SEQ ID NO: 921935 - RNA, 19 nt, Artificial Sequence
  Description of Artificial Sequence: Synthetic oligonucleotide
  Antisense strand to SEQ ID NO: 921934
auagucacugaccgcuccc

SEQ ID NO: 921936 - RNA, 19 nt, Artificial Sequence
  Description of Artificial Sequence: Synthetic oligonucleotide
  Sense strand starting at position 474 of SEQ ID NO: 913369
agcucuguauuguuauuaa

SEQ ID NO: 921937 - RNA, 19 nt, Artificial Sequence
  Description of Artificial Sequence: Synthetic oligonucleotide
  Antisense strand to SEQ ID NO: 921936
uuaauaacaauacagagcu

SEQ ID NO: 921938 - RNA, 19 nt, Artificial Sequence
  Description of Artificial Sequence: Synthetic oligonucleotide
  Sense strand starting at position 1068 of SEQ ID NO: 913369
gcgugucuccuuuaaacca

SEQ ID NO: 921939 - RNA, 19 nt, Artificial Sequence
  Description of Artificial Sequence: Synthetic oligonucleotide
  Antisense strand to SEQ ID NO: 921938
ugguuuaaaggagacacgc

SEQ ID NO: 921940 - RNA, 19 nt, Artificial Sequence
  Description of Artificial Sequence: Synthetic oligonucleotide
  Sense strand starting at position 467 of SEQ ID NO: 913369
guaccugagcucuguauug

SEQ ID NO: 921941 - RNA, 19 nt, Artificial Sequence
  Description of Artificial Sequence: Synthetic oligonucleotide
  Antisense strand to SEQ ID NO: 921940
caauacagagcucagguac

SEQ ID NO: 921942 - RNA, 19 nt, Artificial Sequence
  Description of Artificial Sequence: Synthetic oligonucleotide
  Sense strand starting at position 2177 of SEQ ID NO: 913370
acgcauuuccuuuauagca

SEQ ID NO: 921943 - RNA, 19 nt, Artificial Sequence
  Description of Artificial Sequence: Synthetic oligonucleotide
  Antisense strand to SEQ ID NO: 921942
ugcuauaaaggaaaugcgu

SEQ ID NO: 921944 - RNA, 19 nt, Artificial Sequence
  Description of Artificial Sequence: Synthetic oligonucleotide
  Sense strand starting at position 3007 of SEQ ID NO: 913370
acaagugcuccugaacaga

SEQ ID NO: 921945 - RNA, 19 nt, Artificial Sequence
  Description of Artificial Sequence: Synthetic oligonucleotide
  Antisense strand to SEQ ID NO: 921944
ucuguucaggagcacuugu

SEQ ID NO: 921946 - RNA, 19 nt, Artificial Sequence
  Description of Artificial Sequence: Synthetic oligonucleotide
  Sense strand starting at position 833 of SEQ ID NO: 913370
gccgaaucucuacagagag

SEQ ID NO: 921947 - RNA, 19 nt, Artificial Sequence
  Description of Artificial Sequence: Synthetic oligonucleotide
  Antisense strand to SEQ ID NO: 921946
cucucuguagagauucggc

SEQ ID NO: 921948 - RNA, 19 nt, Artificial Sequence
  Description of Artificial Sequence: Synthetic oligonucleotide
  Sense strand starting at position 2256 of SEQ ID NO: 913370
gugacuaucguggagaaac

SEQ ID NO: 921949 - RNA, 19 nt, Artificial Sequence
  Description of Artificial Sequence: Synthetic oligonucleotide
  Antisense strand to SEQ ID NO: 921948
guuucuccacgauagucac

SEQ ID NO: 921950 - RNA, 19 nt, Artificial Sequence
  Description of Artificial Sequence: Synthetic oligonucleotide
  Sense strand starting at position 936 of SEQ ID NO: 913370
cuccaaagucucuagguaa

SEQ ID NO: 921951 - RNA, 19 nt, Artificial Sequence
  Description of Artificial Sequence: Synthetic oligonucleotide
  Antisense strand to SEQ ID NO: 921950
uuaccuagagacuuuggag

SEQ ID NO: 921952 - RNA, 19 nt, Artificial Sequence
  Description of Artificial Sequence: Synthetic oligonucleotide
  Sense strand starting at position 2625 of SEQ ID NO: 913370
aaaggucacccagguaaua

SEQ ID NO: 921953 - RNA, 19 nt, Artificial Sequence
  Description of Artificial Sequence: Synthetic oligonucleotide
  Antisense strand to SEQ ID NO: 921952
uauuaccugggugaccuuu

SEQ ID NO: 921954 - RNA, 19 nt, Artificial Sequence
  Description of Artificial Sequence: Synthetic oligonucleotide
  Sense strand starting at position 3608 of SEQ ID NO: 913370
ccgggcgcucagucauauu

SEQ ID NO: 921955 - RNA, 19 nt, Artificial Sequence
  Description of Artificial Sequence: Synthetic oligonucleotide
  Antisense strand to SEQ ID NO: 921954
aauaugacugagcgcccgg

SEQ ID NO: 921956 - RNA, 19 nt, Artificial Sequence
  Description of Artificial Sequence: Synthetic oligonucleotide
  Sense strand starting at position 2994 of SEQ ID NO: 913370
agggucuuuccauacaagu

SEQ ID NO: 921957 - RNA, 19 nt, Artificial Sequence
  Description of Artificial Sequence: Synthetic oligonucleotide
  Antisense strand to SEQ ID NO: 921956
acuuguauggaaagacccu

SEQ ID NO: 921958 - RNA, 19 nt, Artificial Sequence
  Description of Artificial Sequence: Synthetic oligonucleotide
  Sense strand starting at position 301 of SEQ ID NO: 913370
gugacacccaucugggaua

SEQ ID NO: 921959 - RNA, 19 nt, Artificial Sequence
  Description of Artificial Sequence: Synthetic oligonucleotide
  Antisense strand to SEQ ID NO: 921958
uaucccagaugggugucac

SEQ ID NO: 921960 - RNA, 19 nt, Artificial Sequence
  Description of Artificial Sequence: Synthetic oligonucleotide
  Sense strand starting at position 3290 of SEQ ID NO: 913370
aguugcuggaucuacagau

SEQ ID NO: 921961 - RNA, 19 nt, Artificial Sequence
  Description of Artificial Sequence: Synthetic oligonucleotide
  Antisense strand to SEQ ID NO: 921960
aucuguagauccagcaacu

SEQ ID NO: 921962 - RNA, 19 nt, Artificial Sequence
  Description of Artificial Sequence: Synthetic oligonucleotide
  Sense strand starting at position 3477 of SEQ ID NO: 913370
agucgcucugaacaauaaa

SEQ ID NO: 921963 - RNA, 19 nt, Artificial Sequence
  Description of Artificial Sequence: Synthetic oligonucleotide
  Antisense strand to SEQ ID NO: 921962
uuuauuguucagagcgacu

SEQ ID NO: 921964 - RNA, 19 nt, Artificial Sequence
  Description of Artificial Sequence: Synthetic oligonucleotide
  Sense strand starting at position 2648 of SEQ ID NO: 913370
cauauaugguagguauaca

SEQ ID NO: 921965 - RNA, 19 nt, Artificial Sequence
  Description of Artificial Sequence: Synthetic oligonucleotide
  Antisense strand to SEQ ID NO: 921964
uguauaccuaccauauaug

SEQ ID NO: 921966 - RNA, 19 nt, Artificial Sequence
  Description of Artificial Sequence: Synthetic oligonucleotide
  Sense strand starting at position 3892 of SEQ ID NO: 913370
caagaaaucugugugaauu

SEQ ID NO: 921967 - RNA, 19 nt, Artificial Sequence
  Description of Artificial Sequence: Synthetic oligonucleotide
  Antisense strand to SEQ ID NO: 921966
aauucacacagauuucuug

SEQ ID NO: 921968 - RNA, 19 nt, Artificial Sequence
  Description of Artificial Sequence: Synthetic oligonucleotide
  Sense strand starting at position 1192 of SEQ ID NO: 913370
ccaguuucggaggaaaguu

SEQ ID NO: 921969 - RNA, 19 nt, Artificial Sequence
  Description of Artificial Sequence: Synthetic oligonucleotide
  Antisense strand to SEQ ID NO: 921968
aacuuuccuccgaaacugg

SEQ ID NO: 921970 - RNA, 19 nt, Artificial Sequence
  Description of Artificial Sequence: Synthetic oligonucleotide
  Sense strand starting at position 3891 of SEQ ID NO: 913370
ccaagaaaucugugugaau

SEQ ID NO: 921971 - RNA, 19 nt, Artificial Sequence
  Description of Artificial Sequence: Synthetic oligonucleotide
  Antisense strand to SEQ ID NO: 921970
auucacacagauuucuugg

SEQ ID NO: 921972 - RNA, 19 nt, Artificial Sequence
  Description of Artificial Sequence: Synthetic oligonucleotide
  Sense strand starting at position 2980 of SEQ ID NO: 913370
ucacuauaucuuggagggu

SEQ ID NO: 921973 - RNA, 19 nt, Artificial Sequence
  Description of Artificial Sequence: Synthetic oligonucleotide
  Antisense strand to SEQ ID NO: 921972
acccuccaagauauaguga

SEQ ID NO: 921974 - RNA, 19 nt, Artificial Sequence
  Description of Artificial Sequence: Synthetic oligonucleotide
  Sense strand starting at position 2554 of SEQ ID NO: 913370
uuaugagaauucccuguau

SEQ ID NO: 921975 - RNA, 19 nt, Artificial Sequence
  Description of Artificial Sequence: Synthetic oligonucleotide
  Antisense strand to SEQ ID NO: 921974
auacagggaauucucauaa

SEQ ID NO: 921976 - RNA, 19 nt, Artificial Sequence
  Description of Artificial Sequence: Synthetic oligonucleotide
  Sense strand starting at position 2255 of SEQ ID NO: 913370
agugacuaucguggagaaa

SEQ ID NO: 921977 - RNA, 19 nt, Artificial Sequence
  Description of Artificial Sequence: Synthetic oligonucleotide
  Antisense strand to SEQ ID NO: 921976
uuucuccacgauagucacu

SEQ ID NO: 921978 - RNA, 19 nt, Artificial Sequence
  Description of Artificial Sequence: Synthetic oligonucleotide
  Sense strand starting at position 3805 of SEQ ID NO: 913370
agacucucagaguggguua

SEQ ID NO: 921979 - RNA, 19 nt, Artificial Sequence
  Description of Artificial Sequence: Synthetic oligonucleotide
  Antisense strand to SEQ ID NO: 921978
uaacccacucugagagucu

SEQ ID NO: 921980 - RNA, 19 nt, Artificial Sequence
  Description of Artificial Sequence: Synthetic oligonucleotide
  Sense strand starting at position 2556 of SEQ ID NO: 913370
augagaauucccuguauuc

SEQ ID NO: 921981 - RNA, 19 nt, Artificial Sequence
  Description of Artificial Sequence: Synthetic oligonucleotide
  Antisense strand to SEQ ID NO: 921980
gaauacagggaauucucau

SEQ ID NO: 921982 - RNA, 19 nt, Artificial Sequence
  Description of Artificial Sequence: Synthetic oligonucleotide
  Sense strand starting at position 2135 of SEQ ID NO: 913370
ucucuuuaaggucgagaaa

SEQ ID NO: 921983 - RNA, 19 nt, Artificial Sequence
  Description of Artificial Sequence: Synthetic oligonucleotide
  Antisense strand to SEQ ID NO: 921982
uuucucgaccuuaaagaga

SEQ ID NO: 921984 - RNA, 19 nt, Artificial Sequence
  Description of Artificial Sequence: Synthetic oligonucleotide
  Sense strand starting at position 2989 of SEQ ID NO: 913370
cuuggagggucuuuccaua

SEQ ID NO: 921985 - RNA, 19 nt, Artificial Sequence
  Description of Artificial Sequence: Synthetic oligonucleotide
  Antisense strand to SEQ ID NO: 921984
uauggaaagacccuccaag

SEQ ID NO: 921986 - RNA, 19 nt, Artificial Sequence
  Description of Artificial Sequence: Synthetic oligonucleotide
  Sense strand starting at position 1184 of SEQ ID NO: 913370
gcgugcucccaguuucgga

SEQ ID NO: 921987 - RNA, 19 nt, Artificial Sequence
  Description of Artificial Sequence: Synthetic oligonucleotide
  Antisense strand to SEQ ID NO: 921986
uccgaaacugggagcacgc

SEQ ID NO: 921988 - RNA, 19 nt, Artificial Sequence
  Description of Artificial Sequence: Synthetic oligonucleotide
  Sense strand starting at position 2408 of SEQ ID NO: 913370
aggcccuugccauauacau

SEQ ID NO: 921989 - RNA, 19 nt, Artificial Sequence
  Description of Artificial Sequence: Synthetic oligonucleotide
  Antisense strand to SEQ ID NO: 921988
auguauauggcaagggccu

SEQ ID NO: 921990 - RNA, 19 nt, Artificial Sequence
  Description of Artificial Sequence: Synthetic oligonucleotide
  Sense strand starting at position 3952 of SEQ ID NO: 913370
gggauugguccgggaaggu

SEQ ID NO: 921991 - RNA, 19 nt, Artificial Sequence
  Description of Artificial Sequence: Synthetic oligonucleotide
  Antisense strand to SEQ ID NO: 921990
accuucccggaccaauccc

SEQ ID NO: 921992 - RNA, 19 nt, Artificial Sequence
  Description of Artificial Sequence: Synthetic oligonucleotide
  Sense strand starting at position 154 of SEQ ID NO: 913370
ugagcuuagcaugagcuaa

SEQ ID NO: 921993 - RNA, 19 nt, Artificial Sequence
  Description of Artificial Sequence: Synthetic oligonucleotide
  Antisense strand to SEQ ID NO: 921992
uuagcucaugcuaagcuca

SEQ ID NO: 921994 - RNA, 19 nt, Artificial Sequence
  Description of Artificial Sequence: Synthetic oligonucleotide
  Sense strand starting at position 3808 of SEQ ID NO: 913370
cucucagaguggguuauua

SEQ ID NO: 921995 - RNA, 19 nt, Artificial Sequence
  Description of Artificial Sequence: Synthetic oligonucleotide
  Antisense strand to SEQ ID NO: 921994
uaauaacccacucugagag

SEQ ID NO: 921996 - RNA, 19 nt, Artificial Sequence
  Description of Artificial Sequence: Synthetic oligonucleotide
  Sense strand starting at position 3003 of SEQ ID NO: 913370
ccauacaagugcuccugaa

SEQ ID NO: 921997 - RNA, 19 nt, Artificial Sequence
  Description of Artificial Sequence: Synthetic oligonucleotide
  Antisense strand to SEQ ID NO: 921996
uucaggagcacuuguaugg

SEQ ID NO: 921998 - RNA, 19 nt, Artificial Sequence
  Description of Artificial Sequence: Synthetic oligonucleotide
  Sense strand starting at position 935 of SEQ ID NO: 913370
ccuccaaagucucuaggua

SEQ ID NO: 921999 - RNA, 19 nt, Artificial Sequence
  Description of Artificial Sequence: Synthetic oligonucleotide
  Antisense strand to SEQ ID NO: 921998
uaccuagagacuuuggagg

SEQ ID NO: 922000 - RNA, 19 nt, Artificial Sequence
  Description of Artificial Sequence: Synthetic oligonucleotide
  Sense strand starting at position 351 of SEQ ID NO: 913370
cugacugguccguaccuga

SEQ ID NO: 922001 - RNA, 19 nt, Artificial Sequence
  Description of Artificial Sequence: Synthetic oligonucleotide
  Antisense strand to SEQ ID NO: 922000
ucagguacggaccagucag

SEQ ID NO: 922002 - RNA, 19 nt, Artificial Sequence
  Description of Artificial Sequence: Synthetic oligonucleotide
  Sense strand starting at position 1191 of SEQ ID NO: 913370
cccaguuucggaggaaagu

SEQ ID NO: 922003 - RNA, 19 nt, Artificial Sequence
  Description of Artificial Sequence: Synthetic oligonucleotide
  Antisense strand to SEQ ID NO: 922002
acuuuccuccgaaacuggg

SEQ ID NO: 922004 - RNA, 19 nt, Artificial Sequence
  Description of Artificial Sequence: Synthetic oligonucleotide
  Sense strand starting at position 2128 of SEQ ID NO: 913370
uagugacucucuuuaaggu

SEQ ID NO: 922005 - RNA, 19 nt, Artificial Sequence
  Description of Artificial Sequence: Synthetic oligonucleotide
  Antisense strand to SEQ ID NO: 922004
accuuaaagagagucacua

SEQ ID NO: 922006 - RNA, 19 nt, Artificial Sequence
  Description of Artificial Sequence: Synthetic oligonucleotide
  Sense strand starting at position 2126 of SEQ ID NO: 913370
guuagugacucucuuuaag

SEQ ID NO: 922007 - RNA, 19 nt, Artificial Sequence
  Description of Artificial Sequence: Synthetic oligonucleotide
  Antisense strand to SEQ ID NO: 922006
cuuaaagagagucacuaac

SEQ ID NO: 922008 - RNA, 19 nt, Artificial Sequence
  Description of Artificial Sequence: Synthetic oligonucleotide
  Sense strand starting at position 2267 of SEQ ID NO: 913370
ggagaaaccugacaaacca

SEQ ID NO: 922009 - RNA, 19 nt, Artificial Sequence
  Description of Artificial Sequence: Synthetic oligonucleotide
  Antisense strand to SEQ ID NO: 922008
ugguuugucagguuucucc

SEQ ID NO: 922010 - RNA, 19 nt, Artificial Sequence
  Description of Artificial Sequence: Synthetic oligonucleotide
  Sense strand starting at position 2647 of SEQ ID NO: 913370
gcauauaugguagguauac

SEQ ID NO: 922011 - RNA, 19 nt, Artificial Sequence
  Description of Artificial Sequence: Synthetic oligonucleotide
  Antisense strand to SEQ ID NO: 922010
guauaccuaccauauaugc

SEQ ID NO: 922012 - RNA, 19 nt, Artificial Sequence
  Description of Artificial Sequence: Synthetic oligonucleotide
  Sense strand starting at position 3894 of SEQ ID NO: 913370
agaaaucugugugaauuuc

SEQ ID NO: 922013 - RNA, 19 nt, Artificial Sequence
  Description of Artificial Sequence: Synthetic oligonucleotide
  Antisense strand to SEQ ID NO: 922012
gaaauucacacagauuucu

SEQ ID NO: 922014 - RNA, 19 nt, Artificial Sequence
  Description of Artificial Sequence: Synthetic oligonucleotide
  Sense strand starting at position 414 of SEQ ID NO: 913370
gccugugaggcagggauua

SEQ ID NO: 922015 - RNA, 19 nt, Artificial Sequence
  Description of Artificial Sequence: Synthetic oligonucleotide
  Antisense strand to SEQ ID NO: 922014
uaaucccugccucacaggc

SEQ ID NO: 922016 - RNA, 19 nt, Artificial Sequence
  Description of Artificial Sequence: Synthetic oligonucleotide
  Sense strand starting at position 364 of SEQ ID NO: 913370
accugagcucuguauuguu

SEQ ID NO: 922017 - RNA, 19 nt, Artificial Sequence
  Description of Artificial Sequence: Synthetic oligonucleotide
  Antisense strand to SEQ ID NO: 922016
aacaauacagagcucaggu

SEQ ID NO: 922018 - RNA, 19 nt, Artificial Sequence
  Description of Artificial Sequence: Synthetic oligonucleotide
  Sense strand starting at position 2870 of SEQ ID NO: 913370
uuagguguguccuuccaaa

SEQ ID NO: 922019 - RNA, 19 nt, Artificial Sequence
  Description of Artificial Sequence: Synthetic oligonucleotide
  Antisense strand to SEQ ID NO: 922018
uuuggaaggacacaccuaa

SEQ ID NO: 922020 - RNA, 19 nt, Artificial Sequence
  Description of Artificial Sequence: Synthetic oligonucleotide
  Sense strand starting at position 153 of SEQ ID NO: 913370
augagcuuagcaugagcua

SEQ ID NO: 922021 - RNA, 19 nt, Artificial Sequence
  Description of Artificial Sequence: Synthetic oligonucleotide
  Antisense strand to SEQ ID NO: 922020
uagcucaugcuaagcucau

SEQ ID NO: 922022 - RNA, 19 nt, Artificial Sequence
  Description of Artificial Sequence: Synthetic oligonucleotide
  Sense strand starting at position 3363 of SEQ ID NO: 913371
acgcauuuccuuuauagca

SEQ ID NO: 922023 - RNA, 19 nt, Artificial Sequence
  Description of Artificial Sequence: Synthetic oligonucleotide
  Antisense strand to SEQ ID NO: 922022
ugcuauaaaggaaaugcgu

SEQ ID NO: 922024 - RNA, 19 nt, Artificial Sequence
  Description of Artificial Sequence: Synthetic oligonucleotide
  Sense strand starting at position 2019 of SEQ ID NO: 913371
gccgaaucucuacagagag

SEQ ID NO: 922025 - RNA, 19 nt, Artificial Sequence
  Description of Artificial Sequence: Synthetic oligonucleotide
  Antisense strand to SEQ ID NO: 922024
cucucuguagagauucggc

SEQ ID NO: 922026 - RNA, 19 nt, Artificial Sequence
  Description of Artificial Sequence: Synthetic oligonucleotide
  Sense strand starting at position 3442 of SEQ ID NO: 913371
gugacuaucguggagaaac

SEQ ID NO: 922027 - RNA, 19 nt, Artificial Sequence
  Description of Artificial Sequence: Synthetic oligonucleotide
  Antisense strand to SEQ ID NO: 922026
guuucuccacgauagucac

SEQ ID NO: 922028 - RNA, 19 nt, Artificial Sequence
  Description of Artificial Sequence: Synthetic oligonucleotide
  Sense strand starting at position 2122 of SEQ ID NO: 913371
cuccaaagucucuagguaa

SEQ ID NO: 922029 - RNA, 19 nt, Artificial Sequence
  Description of Artificial Sequence: Synthetic oligonucleotide
  Antisense strand to SEQ ID NO: 922028
uuaccuagagacuuuggag

SEQ ID NO: 922030 - RNA, 19 nt, Artificial Sequence
  Description of Artificial Sequence: Synthetic oligonucleotide
  Sense strand starting at position 3811 of SEQ ID NO: 913371
aaaggucacccagguaaua

SEQ ID NO: 922031 - RNA, 19 nt, Artificial Sequence
  Description of Artificial Sequence: Synthetic oligonucleotide
  Antisense strand to SEQ ID NO: 922030
uauuaccugggugaccuuu

SEQ ID NO: 922032 - RNA, 19 nt, Artificial Sequence
  Description of Artificial Sequence: Synthetic oligonucleotide
  Sense strand starting at position 1487 of SEQ ID NO: 913371
gugacacccaucugggaua

SEQ ID NO: 922033 - RNA, 19 nt, Artificial Sequence
  Description of Artificial Sequence: Synthetic oligonucleotide
  Antisense strand to SEQ ID NO: 922032
uaucccagaugggugucac

SEQ ID NO: 922034 - RNA, 19 nt, Artificial Sequence
  Description of Artificial Sequence: Synthetic oligonucleotide
  Sense strand starting at position 3834 of SEQ ID NO: 913371
cauauaugguagguauaca

SEQ ID NO: 922035 - RNA, 19 nt, Artificial Sequence
  Description of Artificial Sequence: Synthetic oligonucleotide
  Antisense strand to SEQ ID NO: 922034
uguauaccuaccauauaug

SEQ ID NO: 922036 - RNA, 19 nt, Artificial Sequence
  Description of Artificial Sequence: Synthetic oligonucleotide
  Sense strand starting at position 2378 of SEQ ID NO: 913371
ccaguuucggaggaaaguu

SEQ ID NO: 922037 - RNA, 19 nt, Artificial Sequence
  Description of Artificial Sequence: Synthetic oligonucleotide
  Antisense strand to SEQ ID NO: 922036
aacuuuccuccgaaacugg

SEQ ID NO: 922038 - RNA, 19 nt, Artificial Sequence
  Description of Artificial Sequence: Synthetic oligonucleotide
  Sense strand starting at position 3740 of SEQ ID NO: 913371
uuaugagaauucccuguau

SEQ ID NO: 922039 - RNA, 19 nt, Artificial Sequence
  Description of Artificial Sequence: Synthetic oligonucleotide
  Antisense strand to SEQ ID NO: 922038
auacagggaauucucauaa

SEQ ID NO: 922040 - RNA, 19 nt, Artificial Sequence
  Description of Artificial Sequence: Synthetic oligonucleotide
  Sense strand starting at position 3441 of SEQ ID NO: 913371
agugacuaucguggagaaa

SEQ ID NO: 922041 - RNA, 19 nt, Artificial Sequence
  Description of Artificial Sequence: Synthetic oligonucleotide
  Antisense strand to SEQ ID NO: 922040
uuucuccacgauagucacu

SEQ ID NO: 922042 - RNA, 19 nt, Artificial Sequence
  Description of Artificial Sequence: Synthetic oligonucleotide
  Sense strand starting at position 3742 of SEQ ID NO: 913371
augagaauucccuguauuc

SEQ ID NO: 922043 - RNA, 19 nt, Artificial Sequence
  Description of Artificial Sequence: Synthetic oligonucleotide
  Antisense strand to SEQ ID NO: 922042
gaauacagggaauucucau

SEQ ID NO: 922044 - RNA, 19 nt, Artificial Sequence
  Description of Artificial Sequence: Synthetic oligonucleotide
  Sense strand starting at position 3321 of SEQ ID NO: 913371
ucucuuuaaggucgagaaa

SEQ ID NO: 922045 - RNA, 19 nt, Artificial Sequence
  Description of Artificial Sequence: Synthetic oligonucleotide
  Antisense strand to SEQ ID NO: 922044
uuucucgaccuuaaagaga

SEQ ID NO: 922046 - RNA, 19 nt, Artificial Sequence
  Description of Artificial Sequence: Synthetic oligonucleotide
  Sense strand starting at position 802 of SEQ ID NO: 913371
acgugaacuaggcaucacu

SEQ ID NO: 922047 - RNA, 19 nt, Artificial Sequence
  Description of Artificial Sequence: Synthetic oligonucleotide
  Antisense strand to SEQ ID NO: 922046
agugaugccuaguucacgu

SEQ ID NO: 922048 - RNA, 19 nt, Artificial Sequence
  Description of Artificial Sequence: Synthetic oligonucleotide
  Sense strand starting at position 2370 of SEQ ID NO: 913371
gcgugcucccaguuucgga

SEQ ID NO: 922049 - RNA, 19 nt, Artificial Sequence
  Description of Artificial Sequence: Synthetic oligonucleotide
  Antisense strand to SEQ ID NO: 922048
uccgaaacugggagcacgc

SEQ ID NO: 922050 - RNA, 19 nt, Artificial Sequence
  Description of Artificial Sequence: Synthetic oligonucleotide
  Sense strand starting at position 3594 of SEQ ID NO: 913371
aggcccuugccauauacau

SEQ ID NO: 922051 - RNA, 19 nt, Artificial Sequence
  Description of Artificial Sequence: Synthetic oligonucleotide
  Antisense strand to SEQ ID NO: 922050
auguauauggcaagggccu

SEQ ID NO: 922052 - RNA, 19 nt, Artificial Sequence
  Description of Artificial Sequence: Synthetic oligonucleotide
  Sense strand starting at position 1340 of SEQ ID NO: 913371
ugagcuuagcaugagcuaa

SEQ ID NO: 922053 - RNA, 19 nt, Artificial Sequence
  Description of Artificial Sequence: Synthetic oligonucleotide
  Antisense strand to SEQ ID NO: 922052
uuagcucaugcuaagcuca

SEQ ID NO: 922054 - RNA, 19 nt, Artificial Sequence
  Description of Artificial Sequence: Synthetic oligonucleotide
  Sense strand starting at position 2121 of SEQ ID NO: 913371
ccuccaaagucucuaggua

SEQ ID NO: 922055 - RNA, 19 nt, Artificial Sequence
  Description of Artificial Sequence: Synthetic oligonucleotide
  Antisense strand to SEQ ID NO: 922054
uaccuagagacuuuggagg

SEQ ID NO: 922056 - RNA, 19 nt, Artificial Sequence
  Description of Artificial Sequence: Synthetic oligonucleotide
  Sense strand starting at position 62 of SEQ ID NO: 913371
cuuuccuaucuagguauca

SEQ ID NO: 922057 - RNA, 19 nt, Artificial Sequence
  Description of Artificial Sequence: Synthetic oligonucleotide
  Antisense strand to SEQ ID NO: 922056
ugauaccuagauaggaaag

SEQ ID NO: 922058 - RNA, 19 nt, Artificial Sequence
  Description of Artificial Sequence: Synthetic oligonucleotide
  Sense strand starting at position 1537 of SEQ ID NO: 913371
cugacugguccguaccuga

SEQ ID NO: 922059 - RNA, 19 nt, Artificial Sequence
  Description of Artificial Sequence: Synthetic oligonucleotide
  Antisense strand to SEQ ID NO: 922058
ucagguacggaccagucag

SEQ ID NO: 922060 - RNA, 19 nt, Artificial Sequence
  Description of Artificial Sequence: Synthetic oligonucleotide
  Sense strand starting at position 2377 of SEQ ID NO: 913371
cccaguuucggaggaaagu

SEQ ID NO: 922061 - RNA, 19 nt, Artificial Sequence
  Description of Artificial Sequence: Synthetic oligonucleotide
  Antisense strand to SEQ ID NO: 922060
acuuuccuccgaaacuggg

SEQ ID NO: 922062 - RNA, 19 nt, Artificial Sequence
  Description of Artificial Sequence: Synthetic oligonucleotide
  Sense strand starting at position 3314 of SEQ ID NO: 913371
uagugacucucuuuaaggu

SEQ ID NO: 922063 - RNA, 19 nt, Artificial Sequence
  Description of Artificial Sequence: Synthetic oligonucleotide
  Antisense strand to SEQ ID NO: 922062
accuuaaagagagucacua

SEQ ID NO: 922064 - RNA, 19 nt, Artificial Sequence
  Description of Artificial Sequence: Synthetic oligonucleotide
  Sense strand starting at position 3312 of SEQ ID NO: 913371
guuagugacucucuuuaag

SEQ ID NO: 922065 - RNA, 19 nt, Artificial Sequence
  Description of Artificial Sequence: Synthetic oligonucleotide
  Antisense strand to SEQ ID NO: 922064
cuuaaagagagucacuaac

SEQ ID NO: 922066 - RNA, 19 nt, Artificial Sequence
  Description of Artificial Sequence: Synthetic oligonucleotide
  Sense strand starting at position 3453 of SEQ ID NO: 913371
ggagaaaccugacaaacca

SEQ ID NO: 922067 - RNA, 19 nt, Artificial Sequence
  Description of Artificial Sequence: Synthetic oligonucleotide
  Antisense strand to SEQ ID NO: 922066
ugguuugucagguuucucc

SEQ ID NO: 922068 - RNA, 19 nt, Artificial Sequence
  Description of Artificial Sequence: Synthetic oligonucleotide
  Sense strand starting at position 3833 of SEQ ID NO: 913371
gcauauaugguagguauac

SEQ ID NO: 922069 - RNA, 19 nt, Artificial Sequence
  Description of Artificial Sequence: Synthetic oligonucleotide
  Antisense strand to SEQ ID NO: 922068
guauaccuaccauauaugc

SEQ ID NO: 922070 - RNA, 19 nt, Artificial Sequence
  Description of Artificial Sequence: Synthetic oligonucleotide
  Sense strand starting at position 59 of SEQ ID NO: 913371
gagcuuuccuaucuaggua

SEQ ID NO: 922071 - RNA, 19 nt, Artificial Sequence
  Description of Artificial Sequence: Synthetic oligonucleotide
  Antisense strand to SEQ ID NO: 922070
uaccuagauaggaaagcuc

SEQ ID NO: 922072 - RNA, 19 nt, Artificial Sequence
  Description of Artificial Sequence: Synthetic oligonucleotide
  Sense strand starting at position 1600 of SEQ ID NO: 913371
gccugugaggcagggauua

SEQ ID NO: 922073 - RNA, 19 nt, Artificial Sequence
  Description of Artificial Sequence: Synthetic oligonucleotide
  Antisense strand to SEQ ID NO: 922072
uaaucccugccucacaggc

SEQ ID NO: 922074 - RNA, 19 nt, Artificial Sequence
  Description of Artificial Sequence: Synthetic oligonucleotide
  Sense strand starting at position 1550 of SEQ ID NO: 913371
accugagcucuguauuguu

SEQ ID NO: 922075 - RNA, 19 nt, Artificial Sequence
  Description of Artificial Sequence: Synthetic oligonucleotide
  Antisense strand to SEQ ID NO: 922074
aacaauacagagcucaggu

SEQ ID NO: 922076 - RNA, 19 nt, Artificial Sequence
  Description of Artificial Sequence: Synthetic oligonucleotide
  Sense strand starting at position 1339 of SEQ ID NO: 913371
augagcuuagcaugagcua

SEQ ID NO: 922077 - RNA, 19 nt, Artificial Sequence
  Description of Artificial Sequence: Synthetic oligonucleotide
  Antisense strand to SEQ ID NO: 922076
uagcucaugcuaagcucau

SEQ ID NO: 922078 - RNA, 19 nt, Artificial Sequence
  Description of Artificial Sequence: Synthetic oligonucleotide
  Sense strand starting at position 3431 of SEQ ID NO: 913371
gggagcggucagugacuau

SEQ ID NO: 922079 - RNA, 19 nt, Artificial Sequence
  Description of Artificial Sequence: Synthetic oligonucleotide
  Antisense strand to SEQ ID NO: 922078
auagucacugaccgcuccc

SEQ ID NO: 922080 - RNA, 19 nt, Artificial Sequence
  Description of Artificial Sequence: Synthetic oligonucleotide
  Sense strand starting at position 1555 of SEQ ID NO: 913371
agcucuguauuguuauuaa

SEQ ID NO: 922081 - RNA, 19 nt, Artificial Sequence
  Description of Artificial Sequence: Synthetic oligonucleotide
  Antisense strand to SEQ ID NO: 922080
uuaauaacaauacagagcu

SEQ ID NO: 922082 - RNA, 19 nt, Artificial Sequence
  Description of Artificial Sequence: Synthetic oligonucleotide
  Sense strand starting at position 2149 of SEQ ID NO: 913371
gcgugucuccuuuaaacca

SEQ ID NO: 922083 - RNA, 19 nt, Artificial Sequence
  Description of Artificial Sequence: Synthetic oligonucleotide
  Antisense strand to SEQ ID NO: 922082
ugguuuaaaggagacacgc

SEQ ID NO: 922084 - RNA, 19 nt, Artificial Sequence
  Description of Artificial Sequence: Synthetic oligonucleotide
  Sense strand starting at position 1548 of SEQ ID NO: 913371
guaccugagcucuguauug

SEQ ID NO: 922085 - RNA, 19 nt, Artificial Sequence
  Description of Artificial Sequence: Synthetic oligonucleotide
  Antisense strand to SEQ ID NO: 922084
caauacagagcucagguac

SEQ ID NO: 922086 - RNA, 19 nt, Artificial Sequence
  Description of Artificial Sequence: Synthetic oligonucleotide
  Sense strand starting at position 2073 of SEQ ID NO: 913371
ggcugacuguuuccagcuu

SEQ ID NO: 922087 - RNA, 19 nt, Artificial Sequence
  Description of Artificial Sequence: Synthetic oligonucleotide
  Antisense strand to SEQ ID NO: 922086
aagcuggaaacagucagcc

SEQ ID NO: 922088 - RNA, 19 nt, Artificial Sequence
  Description of Artificial Sequence: Synthetic oligonucleotide
  Sense strand starting at position 2387 of SEQ ID NO: 913371
gaggaaaguuccugaagau

SEQ ID NO: 922089 - RNA, 19 nt, Artificial Sequence
  Description of Artificial Sequence: Synthetic oligonucleotide
  Antisense strand to SEQ ID NO: 922088
aucuucaggaacuuuccuc

SEQ ID NO: 922090 - RNA, 19 nt, Artificial Sequence
  Description of Artificial Sequence: Synthetic oligonucleotide
  Sense strand starting at position 1750 of SEQ ID NO: 913371
ggccucucuuaucagggaa

SEQ ID NO: 922091 - RNA, 19 nt, Artificial Sequence
  Description of Artificial Sequence: Synthetic oligonucleotide
  Antisense strand to SEQ ID NO: 922090
uucccugauaagagaggcc

SEQ ID NO: 922092 - RNA, 19 nt, Artificial Sequence
  Description of Artificial Sequence: Synthetic oligonucleotide
  Sense strand starting at position 1752 of SEQ ID NO: 913371
ccucucuuaucagggaaca

SEQ ID NO: 922093 - RNA, 19 nt, Artificial Sequence
  Description of Artificial Sequence: Synthetic oligonucleotide
  Antisense strand to SEQ ID NO: 922092
uguucccugauaagagagg

SEQ ID NO: 922094 - RNA, 19 nt, Artificial Sequence
  Description of Artificial Sequence: Synthetic oligonucleotide
  Sense strand starting at position 2147 of SEQ ID NO: 913371
ucgcgugucuccuuuaaac

SEQ ID NO: 922095 - RNA, 19 nt, Artificial Sequence
  Description of Artificial Sequence: Synthetic oligonucleotide
  Antisense strand to SEQ ID NO: 922094
guuuaaaggagacacgcga

SEQ ID NO: 922096 - RNA, 19 nt, Artificial Sequence
  Description of Artificial Sequence: Synthetic oligonucleotide
  Sense strand starting at position 3831 of SEQ ID NO: 913371
augcauauaugguagguau

SEQ ID NO: 922097 - RNA, 19 nt, Artificial Sequence
  Description of Artificial Sequence: Synthetic oligonucleotide
  Antisense strand to SEQ ID NO: 922096
auaccuaccauauaugcau

SEQ ID NO: 922098 - RNA, 19 nt, Artificial Sequence
  Description of Artificial Sequence: Synthetic oligonucleotide
  Sense strand starting at position 2145 of SEQ ID NO: 913371
cuucgcgugucuccuuuaa

SEQ ID NO: 922099 - RNA, 19 nt, Artificial Sequence
  Description of Artificial Sequence: Synthetic oligonucleotide
  Antisense strand to SEQ ID NO: 922098
uuaaaggagacacgcgaag

SEQ ID NO: 922100 - RNA, 19 nt, Artificial Sequence
  Description of Artificial Sequence: Synthetic oligonucleotide
  Sense strand starting at position 864 of SEQ ID NO: 913371
uuucuauaguaucaugcau

SEQ ID NO: 922101 - RNA, 19 nt, Artificial Sequence
  Description of Artificial Sequence: Synthetic oligonucleotide
  Antisense strand to SEQ ID NO: 922100
augcaugauacuauagaaa

SEQ ID NO: 922102 - RNA, 19 nt, Artificial Sequence
  Description of Artificial Sequence: Synthetic oligonucleotide
  Sense strand starting at position 1079 of SEQ ID NO: 913372
gaaagacaguccucacuga

SEQ ID NO: 922103 - RNA, 19 nt, Artificial Sequence
  Description of Artificial Sequence: Synthetic oligonucleotide
  Antisense strand to SEQ ID NO: 922102
ucagugaggacugucuuuc

SEQ ID NO: 922104 - RNA, 19 nt, Artificial Sequence
  Description of Artificial Sequence: Synthetic oligonucleotide
  Sense strand starting at position 2926 of SEQ ID NO: 913372
guauuugaggcaggucauu

SEQ ID NO: 922105 - RNA, 19 nt, Artificial Sequence
  Description of Artificial Sequence: Synthetic oligonucleotide
  Antisense strand to SEQ ID NO: 922104
aaugaccugccucaaauac

SEQ ID NO: 922106 - RNA, 19 nt, Artificial Sequence
  Description of Artificial Sequence: Synthetic oligonucleotide
  Sense strand starting at position 2655 of SEQ ID NO: 913372
cguguuaguaacgcagauu

SEQ ID NO: 922107 - RNA, 19 nt, Artificial Sequence
  Description of Artificial Sequence: Synthetic oligonucleotide
  Antisense strand to SEQ ID NO: 922106
aaucugcguuacuaacacg

SEQ ID NO: 922108 - RNA, 19 nt, Artificial Sequence
  Description of Artificial Sequence: Synthetic oligonucleotide
  Sense strand starting at position 2843 of SEQ ID NO: 913372
gguggaauagaguggauua

SEQ ID NO: 922109 - RNA, 19 nt, Artificial Sequence
  Description of Artificial Sequence: Synthetic oligonucleotide
  Antisense strand to SEQ ID NO: 922108
uaauccacucuauuccacc

SEQ ID NO: 922110 - RNA, 19 nt, Artificial Sequence
  Description of Artificial Sequence: Synthetic oligonucleotide
  Sense strand starting at position 2396 of SEQ ID NO: 913372
ggaaaucuuaguuggaacu

SEQ ID NO: 922111 - RNA, 19 nt, Artificial Sequence
  Description of Artificial Sequence: Synthetic oligonucleotide
  Antisense strand to SEQ ID NO: 922110
aguuccaacuaagauuucc

SEQ ID NO: 922112 - RNA, 19 nt, Artificial Sequence
  Description of Artificial Sequence: Synthetic oligonucleotide
  Sense strand starting at position 1168 of SEQ ID NO: 913372
ccuggaagguaacucauua

SEQ ID NO: 922113 - RNA, 19 nt, Artificial Sequence
  Description of Artificial Sequence: Synthetic oligonucleotide
  Antisense strand to SEQ ID NO: 922112
uaaugaguuaccuuccagg

SEQ ID NO: 922114 - RNA, 19 nt, Artificial Sequence
  Description of Artificial Sequence: Synthetic oligonucleotide
  Sense strand starting at position 2950 of SEQ ID NO: 913372
auuuaacaaugguagacaa

SEQ ID NO: 922115 - RNA, 19 nt, Artificial Sequence
  Description of Artificial Sequence: Synthetic oligonucleotide
  Antisense strand to SEQ ID NO: 922114
uugucuaccauuguuaaau

SEQ ID NO: 922116 - RNA, 19 nt, Artificial Sequence
  Description of Artificial Sequence: Synthetic oligonucleotide
  Sense strand starting at position 2982 of SEQ ID NO: 913372
cuaggugaccagcauuaau

SEQ ID NO: 922117 - RNA, 19 nt, Artificial Sequence
  Description of Artificial Sequence: Synthetic oligonucleotide
  Antisense strand to SEQ ID NO: 922116
auuaaugcuggucaccuag

SEQ ID NO: 922118 - RNA, 19 nt, Artificial Sequence
  Description of Artificial Sequence: Synthetic oligonucleotide
  Sense strand starting at position 3217 of SEQ ID NO: 913372
gcaggaauaguccaauagu

SEQ ID NO: 922119 - RNA, 19 nt, Artificial Sequence
  Description of Artificial Sequence: Synthetic oligonucleotide
  Antisense strand to SEQ ID NO: 922118
acuauuggacuauuccugc

SEQ ID NO: 922120 - RNA, 19 nt, Artificial Sequence
  Description of Artificial Sequence: Synthetic oligonucleotide
  Sense strand starting at position 2160 of SEQ ID NO: 913372
ucacauuuaucugucgcaa

SEQ ID NO: 922121 - RNA, 19 nt, Artificial Sequence
  Description of Artificial Sequence: Synthetic oligonucleotide
  Antisense strand to SEQ ID NO: 922120
uugcgacagauaaauguga

SEQ ID NO: 922122 - RNA, 19 nt, Artificial Sequence
  Description of Artificial Sequence: Synthetic oligonucleotide
  Sense strand starting at position 1407 of SEQ ID NO: 913372
cuggaaugcuauucuagaa

SEQ ID NO: 922123 - RNA, 19 nt, Artificial Sequence
  Description of Artificial Sequence: Synthetic oligonucleotide
  Antisense strand to SEQ ID NO: 922122
uucuagaauagcauuccag

SEQ ID NO: 922124 - RNA, 19 nt, Artificial Sequence
  Description of Artificial Sequence: Synthetic oligonucleotide
  Sense strand starting at position 388 of SEQ ID NO: 913372
agugaauaguaagucuaga

SEQ ID NO: 922125 - RNA, 19 nt, Artificial Sequence
  Description of Artificial Sequence: Synthetic oligonucleotide
  Antisense strand to SEQ ID NO: 922124
ucuagacuuacuauucacu

SEQ ID NO: 922126 - RNA, 19 nt, Artificial Sequence
  Description of Artificial Sequence: Synthetic oligonucleotide
  Sense strand starting at position 1276 of SEQ ID NO: 913372
gcgucaugucugucacuuu

SEQ ID NO: 922127 - RNA, 19 nt, Artificial Sequence
  Description of Artificial Sequence: Synthetic oligonucleotide
  Antisense strand to SEQ ID NO: 922126
aaagugacagacaugacgc

SEQ ID NO: 922128 - RNA, 19 nt, Artificial Sequence
  Description of Artificial Sequence: Synthetic oligonucleotide
  Sense strand starting at position 2323 of SEQ ID NO: 913372
uaccguccuccagguauuu

SEQ ID NO: 922129 - RNA, 19 nt, Artificial Sequence
  Description of Artificial Sequence: Synthetic oligonucleotide
  Antisense strand to SEQ ID NO: 922128
aaauaccuggaggacggua

SEQ ID NO: 922130 - RNA, 19 nt, Artificial Sequence
  Description of Artificial Sequence: Synthetic oligonucleotide
  Sense strand starting at position 3726 of SEQ ID NO: 913372
ggauguauuacaggcauga

SEQ ID NO: 922131 - RNA, 19 nt, Artificial Sequence
  Description of Artificial Sequence: Synthetic oligonucleotide
  Antisense strand to SEQ ID NO: 922130
ucaugccuguaauacaucc

SEQ ID NO: 922132 - RNA, 19 nt, Artificial Sequence
  Description of Artificial Sequence: Synthetic oligonucleotide
  Sense strand starting at position 1401 of SEQ ID NO: 913372
ucaaaucuggaaugcuauu

SEQ ID NO: 922133 - RNA, 19 nt, Artificial Sequence
  Description of Artificial Sequence: Synthetic oligonucleotide
  Antisense strand to SEQ ID NO: 922132
aauagcauuccagauuuga

SEQ ID NO: 922134 - RNA, 19 nt, Artificial Sequence
  Description of Artificial Sequence: Synthetic oligonucleotide
  Sense strand starting at position 971 of SEQ ID NO: 913372
cuagguaugguaggaucau

SEQ ID NO: 922135 - RNA, 19 nt, Artificial Sequence
  Description of Artificial Sequence: Synthetic oligonucleotide
  Antisense strand to SEQ ID NO: 922134
augauccuaccauaccuag

SEQ ID NO: 922136 - RNA, 19 nt, Artificial Sequence
  Description of Artificial Sequence: Synthetic oligonucleotide
  Sense strand starting at position 374 of SEQ ID NO: 913372
cucaacuuugcccaaguga

SEQ ID NO: 922137 - RNA, 19 nt, Artificial Sequence
  Description of Artificial Sequence: Synthetic oligonucleotide
  Antisense strand to SEQ ID NO: 922136
ucacuugggcaaaguugag

SEQ ID NO: 922138 - RNA, 19 nt, Artificial Sequence
  Description of Artificial Sequence: Synthetic oligonucleotide
  Sense strand starting at position 2935 of SEQ ID NO: 913372
gcaggucauugccucauuu

SEQ ID NO: 922139 - RNA, 19 nt, Artificial Sequence
  Description of Artificial Sequence: Synthetic oligonucleotide
  Antisense strand to SEQ ID NO: 922138
aaaugaggcaaugaccugc

SEQ ID NO: 922140 - RNA, 19 nt, Artificial Sequence
  Description of Artificial Sequence: Synthetic oligonucleotide
  Sense strand starting at position 3078 of SEQ ID NO: 913372
uuaagccuucccugagaag

SEQ ID NO: 922141 - RNA, 19 nt, Artificial Sequence
  Description of Artificial Sequence: Synthetic oligonucleotide
  Antisense strand to SEQ ID NO: 922140
cuucucagggaaggcuuaa

SEQ ID NO: 922142 - RNA, 19 nt, Artificial Sequence
  Description of Artificial Sequence: Synthetic oligonucleotide
  Sense strand starting at position 3324 of SEQ ID NO: 913372
gcuaccucugcuuagaaag

SEQ ID NO: 922143 - RNA, 19 nt, Artificial Sequence
  Description of Artificial Sequence: Synthetic oligonucleotide
  Antisense strand to SEQ ID NO: 922142
cuuucuaagcagagguagc

SEQ ID NO: 922144 - RNA, 19 nt, Artificial Sequence
  Description of Artificial Sequence: Synthetic oligonucleotide
  Sense strand starting at position 2210 of SEQ ID NO: 913372
ucaagucaccuaggaaguu

SEQ ID NO: 922145 - RNA, 19 nt, Artificial Sequence
  Description of Artificial Sequence: Synthetic oligonucleotide
  Antisense strand to SEQ ID NO: 922144
aacuuccuaggugacuuga

SEQ ID NO: 922146 - RNA, 19 nt, Artificial Sequence
  Description of Artificial Sequence: Synthetic oligonucleotide
  Sense strand starting at position 1204 of SEQ ID NO: 913372
ggacacauuuagcagauua

SEQ ID NO: 922147 - RNA, 19 nt, Artificial Sequence
  Description of Artificial Sequence: Synthetic oligonucleotide
  Antisense strand to SEQ ID NO: 922146
uaaucugcuaaaugugucc

SEQ ID NO: 922148 - RNA, 19 nt, Artificial Sequence
  Description of Artificial Sequence: Synthetic oligonucleotide
  Sense strand starting at position 3206 of SEQ ID NO: 913372
uuuccugagcugcaggaau

SEQ ID NO: 922149 - RNA, 19 nt, Artificial Sequence
  Description of Artificial Sequence: Synthetic oligonucleotide
  Antisense strand to SEQ ID NO: 922148
auuccugcagcucaggaaa

SEQ ID NO: 922150 - RNA, 19 nt, Artificial Sequence
  Description of Artificial Sequence: Synthetic oligonucleotide
  Sense strand starting at position 2402 of SEQ ID NO: 913372
cuuaguuggaacuguagau

SEQ ID NO: 922151 - RNA, 19 nt, Artificial Sequence
  Description of Artificial Sequence: Synthetic oligonucleotide
  Antisense strand to SEQ ID NO: 922150
aucuacaguuccaacuaag

SEQ ID NO: 922152 - RNA, 19 nt, Artificial Sequence
  Description of Artificial Sequence: Synthetic oligonucleotide
  Sense strand starting at position 1160 of SEQ ID NO: 913372
uuuccuugccuggaaggua

SEQ ID NO: 922153 - RNA, 19 nt, Artificial Sequence
  Description of Artificial Sequence: Synthetic oligonucleotide
  Antisense strand to SEQ ID NO: 922152
uaccuuccaggcaaggaaa

SEQ ID NO: 922154 - RNA, 19 nt, Artificial Sequence
  Description of Artificial Sequence: Synthetic oligonucleotide
  Sense strand starting at position 3015 of SEQ ID NO: 913372
cagucugucuaccuggaaa

SEQ ID NO: 922155 - RNA, 19 nt, Artificial Sequence
  Description of Artificial Sequence: Synthetic oligonucleotide
  Antisense strand to SEQ ID NO: 922154
uuuccagguagacagacug

SEQ ID NO: 922156 - RNA, 19 nt, Artificial Sequence
  Description of Artificial Sequence: Synthetic oligonucleotide
  Sense strand starting at position 2658 of SEQ ID NO: 913372
guuaguaacgcagauuauu

SEQ ID NO: 922157 - RNA, 19 nt, Artificial Sequence
  Description of Artificial Sequence: Synthetic oligonucleotide
  Antisense strand to SEQ ID NO: 922156
aauaaucugcguuacuaac

SEQ ID NO: 922158 - RNA, 19 nt, Artificial Sequence
  Description of Artificial Sequence: Synthetic oligonucleotide
  Sense strand starting at position 3717 of SEQ ID NO: 913372
caaagugcuggauguauua

SEQ ID NO: 922159 - RNA, 19 nt, Artificial Sequence
  Description of Artificial Sequence: Synthetic oligonucleotide
  Antisense strand to SEQ ID NO: 922158
uaauacauccagcacuuug

SEQ ID NO: 922160 - RNA, 19 nt, Artificial Sequence
  Description of Artificial Sequence: Synthetic oligonucleotide
  Sense strand starting at position 2887 of SEQ ID NO: 913372
aaauauacguggcuuccaa

SEQ ID NO: 922161 - RNA, 19 nt, Artificial Sequence
  Description of Artificial Sequence: Synthetic oligonucleotide
  Antisense strand to SEQ ID NO: 922160
uuggaagccacguauauuu

SEQ ID NO: 922162 - RNA, 19 nt, Artificial Sequence
  Description of Artificial Sequence: Synthetic oligonucleotide
  Sense strand starting at position 2382 of SEQ ID NO: 913372
aaguaauauuugugggaaa

SEQ ID NO: 922163 - RNA, 19 nt, Artificial Sequence
  Description of Artificial Sequence: Synthetic oligonucleotide
  Antisense strand to SEQ ID NO: 922162
uuucccacaaauauuacuu

SEQ ID NO: 922164 - RNA, 19 nt, Artificial Sequence
  Description of Artificial Sequence: Synthetic oligonucleotide
  Sense strand starting at position 1149 of SEQ ID NO: 913372
gcuugaaacucuuuccuug

SEQ ID NO: 922165 - RNA, 19 nt, Artificial Sequence
  Description of Artificial Sequence: Synthetic oligonucleotide
  Antisense strand to SEQ ID NO: 922164
caaggaaagaguuucaagc

SEQ ID NO: 922166 - RNA, 19 nt, Artificial Sequence
  Description of Artificial Sequence: Synthetic oligonucleotide
  Sense strand starting at position 1156 of SEQ ID NO: 913372
acucuuuccuugccuggaa

SEQ ID NO: 922167 - RNA, 19 nt, Artificial Sequence
  Description of Artificial Sequence: Synthetic oligonucleotide
  Antisense strand to SEQ ID NO: 922166
uuccaggcaaggaaagagu

SEQ ID NO: 922168 - RNA, 19 nt, Artificial Sequence
  Description of Artificial Sequence: Synthetic oligonucleotide
  Sense strand starting at position 3334 of SEQ ID NO: 913372
cuuagaaagcacugcucau

SEQ ID NO: 922169 - RNA, 19 nt, Artificial Sequence
  Description of Artificial Sequence: Synthetic oligonucleotide
  Antisense strand to SEQ ID NO: 922168
augagcagugcuuucuaag

SEQ ID NO: 922170 - RNA, 19 nt, Artificial Sequence
  Description of Artificial Sequence: Synthetic oligonucleotide
  Sense strand starting at position 3403 of SEQ ID NO: 913372
uccgucuugcuccaauaaa

SEQ ID NO: 922171 - RNA, 19 nt, Artificial Sequence
  Description of Artificial Sequence: Synthetic oligonucleotide
  Antisense strand to SEQ ID NO: 922170
uuuauuggagcaagacgga

SEQ ID NO: 922172 - RNA, 19 nt, Artificial Sequence
  Description of Artificial Sequence: Synthetic oligonucleotide
  Sense strand starting at position 996 of SEQ ID NO: 913372
ccgucagugauguggagaa

SEQ ID NO: 922173 - RNA, 19 nt, Artificial Sequence
  Description of Artificial Sequence: Synthetic oligonucleotide
  Antisense strand to SEQ ID NO: 922172
uucuccacaucacugacgg

SEQ ID NO: 922174 - RNA, 19 nt, Artificial Sequence
  Description of Artificial Sequence: Synthetic oligonucleotide
  Sense strand starting at position 3323 of SEQ ID NO: 913372
ugcuaccucugcuuagaaa

SEQ ID NO: 922175 - RNA, 19 nt, Artificial Sequence
  Description of Artificial Sequence: Synthetic oligonucleotide
  Antisense strand to SEQ ID NO: 922174
uuucuaagcagagguagca

SEQ ID NO: 922176 - RNA, 19 nt, Artificial Sequence
  Description of Artificial Sequence: Synthetic oligonucleotide
  Sense strand starting at position 835 of SEQ ID NO: 913372
ccguuucucauugauggca

SEQ ID NO: 922177 - RNA, 19 nt, Artificial Sequence
  Description of Artificial Sequence: Synthetic oligonucleotide
  Antisense strand to SEQ ID NO: 922176
ugccaucaaugagaaacgg

SEQ ID NO: 922178 - RNA, 19 nt, Artificial Sequence
  Description of Artificial Sequence: Synthetic oligonucleotide
  Sense strand starting at position 2656 of SEQ ID NO: 913372
guguuaguaacgcagauua

SEQ ID NO: 922179 - RNA, 19 nt, Artificial Sequence
  Description of Artificial Sequence: Synthetic oligonucleotide
  Antisense strand to SEQ ID NO: 922178
uaaucugcguuacuaacac

SEQ ID NO: 922180 - RNA, 19 nt, Artificial Sequence
  Description of Artificial Sequence: Synthetic oligonucleotide
  Sense strand starting at position 1287 of SEQ ID NO: 913372
gucacuuuacgguggacau

SEQ ID NO: 922181 - RNA, 19 nt, Artificial Sequence
  Description of Artificial Sequence: Synthetic oligonucleotide
  Antisense strand to SEQ ID NO: 922180
auguccaccguaaagugac

SEQ ID NO: 922182 - RNA, 19 nt, Artificial Sequence
  Description of Artificial Sequence: Synthetic oligonucleotide
  Sense strand starting at position 1793 of SEQ ID NO: 913373
caccuuucccagggagaug

SEQ ID NO: 922183 - RNA, 19 nt, Artificial Sequence
  Description of Artificial Sequence: Synthetic oligonucleotide
  Antisense strand to SEQ ID NO: 922182
caucucccugggaaaggug

SEQ ID NO: 922184 - RNA, 19 nt, Artificial Sequence
  Description of Artificial Sequence: Synthetic oligonucleotide
  Sense strand starting at position 1792 of SEQ ID NO: 913373
gcaccuuucccagggagau

SEQ ID NO: 922185 - RNA, 19 nt, Artificial Sequence
  Description of Artificial Sequence: Synthetic oligonucleotide
  Antisense strand to SEQ ID NO: 922184
aucucccugggaaaggugc

SEQ ID NO: 922186 - RNA, 19 nt, Artificial Sequence
  Description of Artificial Sequence: Synthetic oligonucleotide
  Sense strand starting at position 2239 of SEQ ID NO: 913373
ccuaauagccauggaguau

SEQ ID NO: 922187 - RNA, 19 nt, Artificial Sequence
  Description of Artificial Sequence: Synthetic oligonucleotide
  Antisense strand to SEQ ID NO: 922186
auacuccauggcuauuagg

SEQ ID NO: 922188 - RNA, 19 nt, Artificial Sequence
  Description of Artificial Sequence: Synthetic oligonucleotide
  Sense strand starting at position 2238 of SEQ ID NO: 913373
uccuaauagccauggagua

SEQ ID NO: 922189 - RNA, 19 nt, Artificial Sequence
  Description of Artificial Sequence: Synthetic oligonucleotide
  Antisense strand to SEQ ID NO: 922188
uacuccauggcuauuagga

SEQ ID NO: 922190 - RNA, 19 nt, Artificial Sequence
  Description of Artificial Sequence: Synthetic oligonucleotide
  Sense strand starting at position 2248 of SEQ ID NO: 913373
cauggaguaugccauuuaa

SEQ ID NO: 922191 - RNA, 19 nt, Artificial Sequence
  Description of Artificial Sequence: Synthetic oligonucleotide
  Antisense strand to SEQ ID NO: 922190
uuaaauggcauacuccaug

SEQ ID NO: 922192 - RNA, 19 nt, Artificial Sequence
  Description of Artificial Sequence: Synthetic oligonucleotide
  Sense strand starting at position 2031 of SEQ ID NO: 913373
acaacucacuggcagauau

SEQ ID NO: 922193 - RNA, 19 nt, Artificial Sequence
  Description of Artificial Sequence: Synthetic oligonucleotide
  Antisense strand to SEQ ID NO: 922192
auaucugccagugaguugu

SEQ ID NO: 922194 - RNA, 19 nt, Artificial Sequence
  Description of Artificial Sequence: Synthetic oligonucleotide
  Sense strand starting at position 964 of SEQ ID NO: 913373
auggaaagcucccgagaac

SEQ ID NO: 922195 - RNA, 19 nt, Artificial Sequence
  Description of Artificial Sequence: Synthetic oligonucleotide
  Antisense strand to SEQ ID NO: 922194
guucucgggagcuuuccau

SEQ ID NO: 922196 - RNA, 19 nt, Artificial Sequence
  Description of Artificial Sequence: Synthetic oligonucleotide
  Sense strand starting at position 3382 of SEQ ID NO: 913373
ccagaaguauggugagcaa

SEQ ID NO: 922197 - RNA, 19 nt, Artificial Sequence
  Description of Artificial Sequence: Synthetic oligonucleotide
  Antisense strand to SEQ ID NO: 922196
uugcucaccauacuucugg

SEQ ID NO: 922198 - RNA, 19 nt, Artificial Sequence
  Description of Artificial Sequence: Synthetic oligonucleotide
  Sense strand starting at position 2457 of SEQ ID NO: 913374
agaggcaucacuggaggau

SEQ ID NO: 922199 - RNA, 19 nt, Artificial Sequence
  Description of Artificial Sequence: Synthetic oligonucleotide
  Antisense strand to SEQ ID NO: 922198
auccuccagugaugccucu

SEQ ID NO: 922200 - RNA, 19 nt, Artificial Sequence
  Description of Artificial Sequence: Synthetic oligonucleotide
  Sense strand starting at position 3183 of SEQ ID NO: 913374
accugaaagcuguauauag

SEQ ID NO: 922201 - RNA, 19 nt, Artificial Sequence
  Description of Artificial Sequence: Synthetic oligonucleotide
  Antisense strand to SEQ ID NO: 922200
cuauauacagcuuucaggu

SEQ ID NO: 922202 - RNA, 19 nt, Artificial Sequence
  Description of Artificial Sequence: Synthetic oligonucleotide
  Sense strand starting at position 202 of SEQ ID NO: 913374
ccuugugagguucaaggga

SEQ ID NO: 922203 - RNA, 19 nt, Artificial Sequence
  Description of Artificial Sequence: Synthetic oligonucleotide
  Antisense strand to SEQ ID NO: 922202
ucccuugaaccucacaagg

SEQ ID NO: 922204 - RNA, 19 nt, Artificial Sequence
  Description of Artificial Sequence: Synthetic oligonucleotide
  Sense strand starting at position 607 of SEQ ID NO: 913374
cgacaucuaugauccagag

SEQ ID NO: 922205 - RNA, 19 nt, Artificial Sequence
  Description of Artificial Sequence: Synthetic oligonucleotide
  Antisense strand to SEQ ID NO: 922204
cucuggaucauagaugucg

SEQ ID NO: 922206 - RNA, 19 nt, Artificial Sequence
  Description of Artificial Sequence: Synthetic oligonucleotide
  Sense strand starting at position 229 of SEQ ID NO: 913374
augugaggugcuuagagaa

SEQ ID NO: 922207 - RNA, 19 nt, Artificial Sequence
  Description of Artificial Sequence: Synthetic oligonucleotide
  Antisense strand to SEQ ID NO: 922206
uucucuaagcaccucacau

SEQ ID NO: 922208 - RNA, 19 nt, Artificial Sequence
  Description of Artificial Sequence: Synthetic oligonucleotide
  Sense strand starting at position 939 of SEQ ID NO: 913374
ccgagaacccaucaguucu

SEQ ID NO: 922209 - RNA, 19 nt, Artificial Sequence
  Description of Artificial Sequence: Synthetic oligonucleotide
  Antisense strand to SEQ ID NO: 922208
agaacugauggguucucgg

SEQ ID NO: 922210 - RNA, 19 nt, Artificial Sequence
  Description of Artificial Sequence: Synthetic oligonucleotide
  Sense strand starting at position 2988 of SEQ ID NO: 913374
guaacuguccagcagaaau

SEQ ID NO: 922211 - RNA, 19 nt, Artificial Sequence
  Description of Artificial Sequence: Synthetic oligonucleotide
  Antisense strand to SEQ ID NO: 922210
auuucugcuggacaguuac

SEQ ID NO: 922212 - RNA, 19 nt, Artificial Sequence
  Description of Artificial Sequence: Synthetic oligonucleotide
  Sense strand starting at position 1056 of SEQ ID NO: 913374
aucauugaucccugaggug

SEQ ID NO: 922213 - RNA, 19 nt, Artificial Sequence
  Description of Artificial Sequence: Synthetic oligonucleotide
  Antisense strand to SEQ ID NO: 922212
caccucagggaucaaugau

SEQ ID NO: 922214 - RNA, 19 nt, Artificial Sequence
  Description of Artificial Sequence: Synthetic oligonucleotide
  Sense strand starting at position 2948 of SEQ ID NO: 913374
gaugaugagcagugacuca

SEQ ID NO: 922215 - RNA, 19 nt, Artificial Sequence
  Description of Artificial Sequence: Synthetic oligonucleotide
  Antisense strand to SEQ ID NO: 922214
ugagucacugcucaucauc

SEQ ID NO: 922216 - RNA, 19 nt, Artificial Sequence
  Description of Artificial Sequence: Synthetic oligonucleotide
  Sense strand starting at position 1055 of SEQ ID NO: 913374
caucauugaucccugaggu

SEQ ID NO: 922217 - RNA, 19 nt, Artificial Sequence
  Description of Artificial Sequence: Synthetic oligonucleotide
  Antisense strand to SEQ ID NO: 922216
accucagggaucaaugaug

SEQ ID NO: 922218 - RNA, 19 nt, Artificial Sequence
  Description of Artificial Sequence: Synthetic oligonucleotide
  Sense strand starting at position 3185 of SEQ ID NO: 913374
cugaaagcuguauauaguu

SEQ ID NO: 922219 - RNA, 19 nt, Artificial Sequence
  Description of Artificial Sequence: Synthetic oligonucleotide
  Antisense strand to SEQ ID NO: 922218
aacuauauacagcuuucag

SEQ ID NO: 922220 - RNA, 19 nt, Artificial Sequence
  Description of Artificial Sequence: Synthetic oligonucleotide
  Sense strand starting at position 2203 of SEQ ID NO: 913374
ccuaauagccauggaguau

SEQ ID NO: 922221 - RNA, 19 nt, Artificial Sequence
  Description of Artificial Sequence: Synthetic oligonucleotide
  Antisense strand to SEQ ID NO: 922220
auacuccauggcuauuagg

SEQ ID NO: 922222 - RNA, 19 nt, Artificial Sequence
  Description of Artificial Sequence: Synthetic oligonucleotide
  Sense strand starting at position 2202 of SEQ ID NO: 913374
uccuaauagccauggagua

SEQ ID NO: 922223 - RNA, 19 nt, Artificial Sequence
  Description of Artificial Sequence: Synthetic oligonucleotide
  Antisense strand to SEQ ID NO: 922222
uacuccauggcuauuagga

SEQ ID NO: 922224 - RNA, 19 nt, Artificial Sequence
  Description of Artificial Sequence: Synthetic oligonucleotide
  Sense strand starting at position 2626 of SEQ ID NO: 913374
uaaauauucugggccaggu

SEQ ID NO: 922225 - RNA, 19 nt, Artificial Sequence
  Description of Artificial Sequence: Synthetic oligonucleotide
  Antisense strand to SEQ ID NO: 922224
accuggcccagaauauuua

SEQ ID NO: 922226 - RNA, 19 nt, Artificial Sequence
  Description of Artificial Sequence: Synthetic oligonucleotide
  Sense strand starting at position 2985 of SEQ ID NO: 913374
ucuguaacuguccagcaga

SEQ ID NO: 922227 - RNA, 19 nt, Artificial Sequence
  Description of Artificial Sequence: Synthetic oligonucleotide
  Antisense strand to SEQ ID NO: 922226
ucugcuggacaguuacaga

SEQ ID NO: 922228 - RNA, 19 nt, Artificial Sequence
  Description of Artificial Sequence: Synthetic oligonucleotide
  Sense strand starting at position 602 of SEQ ID NO: 913374
gguugcgacaucuaugauc

SEQ ID NO: 922229 - RNA, 19 nt, Artificial Sequence
  Description of Artificial Sequence: Synthetic oligonucleotide
  Antisense strand to SEQ ID NO: 922228
gaucauagaugucgcaacc

SEQ ID NO: 922230 - RNA, 19 nt, Artificial Sequence
  Description of Artificial Sequence: Synthetic oligonucleotide
  Sense strand starting at position 267 of SEQ ID NO: 913374
ggacucagugagugucaca

SEQ ID NO: 922231 - RNA, 19 nt, Artificial Sequence
  Description of Artificial Sequence: Synthetic oligonucleotide
  Antisense strand to SEQ ID NO: 922230
ugugacacucacugagucc

SEQ ID NO: 922232 - RNA, 19 nt, Artificial Sequence
  Description of Artificial Sequence: Synthetic oligonucleotide
  Sense strand starting at position 604 of SEQ ID NO: 913374
uugcgacaucuaugaucca

SEQ ID NO: 922233 - RNA, 19 nt, Artificial Sequence
  Description of Artificial Sequence: Synthetic oligonucleotide
  Antisense strand to SEQ ID NO: 922232
uggaucauagaugucgcaa

SEQ ID NO: 922234 - RNA, 19 nt, Artificial Sequence
  Description of Artificial Sequence: Synthetic oligonucleotide
  Sense strand starting at position 2212 of SEQ ID NO: 913374
cauggaguaugccauuuaa

SEQ ID NO: 922235 - RNA, 19 nt, Artificial Sequence
  Description of Artificial Sequence: Synthetic oligonucleotide
  Antisense strand to SEQ ID NO: 922234
uuaaauggcauacuccaug

SEQ ID NO: 922236 - RNA, 19 nt, Artificial Sequence
  Description of Artificial Sequence: Synthetic oligonucleotide
  Sense strand starting at position 2023 of SEQ ID NO: 913374
ggcuguuacgcauacugga

SEQ ID NO: 922237 - RNA, 19 nt, Artificial Sequence
  Description of Artificial Sequence: Synthetic oligonucleotide
  Antisense strand to SEQ ID NO: 922236
uccaguaugcguaacagcc

SEQ ID NO: 922238 - RNA, 19 nt, Artificial Sequence
  Description of Artificial Sequence: Synthetic oligonucleotide
  Sense strand starting at position 3102 of SEQ ID NO: 913374
gcaagaacaucucaagaaa

SEQ ID NO: 922239 - RNA, 19 nt, Artificial Sequence
  Description of Artificial Sequence: Synthetic oligonucleotide
  Antisense strand to SEQ ID NO: 922238
uuucuugagauguucuugc

SEQ ID NO: 922240 - RNA, 19 nt, Artificial Sequence
  Description of Artificial Sequence: Synthetic oligonucleotide
  Sense strand starting at position 2538 of SEQ ID NO: 913374
cuucucucaugagaagaaa

SEQ ID NO: 922241 - RNA, 19 nt, Artificial Sequence
  Description of Artificial Sequence: Synthetic oligonucleotide
  Antisense strand to SEQ ID NO: 922240
uuucuucucaugagagaag

SEQ ID NO: 922242 - RNA, 19 nt, Artificial Sequence
  Description of Artificial Sequence: Synthetic oligonucleotide
  Sense strand starting at position 1995 of SEQ ID NO: 913374
acaacucacuggcagauau

SEQ ID NO: 922243 - RNA, 19 nt, Artificial Sequence
  Description of Artificial Sequence: Synthetic oligonucleotide
  Antisense strand to SEQ ID NO: 922242
auaucugccagugaguugu

SEQ ID NO: 922244 - RNA, 19 nt, Artificial Sequence
  Description of Artificial Sequence: Synthetic oligonucleotide
  Sense strand starting at position 928 of SEQ ID NO: 913374
acagaaagcucccgagaac

SEQ ID NO: 922245 - RNA, 19 nt, Artificial Sequence
  Description of Artificial Sequence: Synthetic oligonucleotide
  Antisense strand to SEQ ID NO: 922244
guucucgggagcuuucugu

SEQ ID NO: 922246 - RNA, 19 nt, Artificial Sequence
  Description of Artificial Sequence: Synthetic oligonucleotide
  Sense strand starting at position 173 of SEQ ID NO: 913374
uaaggauacuggugucuac

SEQ ID NO: 922247 - RNA, 19 nt, Artificial Sequence
  Description of Artificial Sequence: Synthetic oligonucleotide
  Antisense strand to SEQ ID NO: 922246
guagacaccaguauccuua

SEQ ID NO: 922248 - RNA, 19 nt, Artificial Sequence
  Description of Artificial Sequence: Synthetic oligonucleotide
  Sense strand starting at position 272 of SEQ ID NO: 913374
cagugagugucacagugau

SEQ ID NO: 922249 - RNA, 19 nt, Artificial Sequence
  Description of Artificial Sequence: Synthetic oligonucleotide
  Antisense strand to SEQ ID NO: 922248
aucacugugacacucacug

SEQ ID NO: 922250 - RNA, 19 nt, Artificial Sequence
  Description of Artificial Sequence: Synthetic oligonucleotide
  Sense strand starting at position 195 of SEQ ID NO: 913374
auagacuccuugugagguu

SEQ ID NO: 922251 - RNA, 19 nt, Artificial Sequence
  Description of Artificial Sequence: Synthetic oligonucleotide
  Antisense strand to SEQ ID NO: 922250
aaccucacaaggagucuau

SEQ ID NO: 922252 - RNA, 19 nt, Artificial Sequence
  Description of Artificial Sequence: Synthetic oligonucleotide
  Sense strand starting at position 1106 of SEQ ID NO: 913374
agguuacucucaugcucaa

SEQ ID NO: 922253 - RNA, 19 nt, Artificial Sequence
  Description of Artificial Sequence: Synthetic oligonucleotide
  Antisense strand to SEQ ID NO: 922252
uugagcaugagaguaaccu

SEQ ID NO: 922254 - RNA, 19 nt, Artificial Sequence
  Description of Artificial Sequence: Synthetic oligonucleotide
  Sense strand starting at position 2026 of SEQ ID NO: 913374
uguuacgcauacuggaaau

SEQ ID NO: 922255 - RNA, 19 nt, Artificial Sequence
  Description of Artificial Sequence: Synthetic oligonucleotide
  Antisense strand to SEQ ID NO: 922254
auuuccaguaugcguaaca

SEQ ID NO: 922256 - RNA, 19 nt, Artificial Sequence
  Description of Artificial Sequence: Synthetic oligonucleotide
  Sense strand starting at position 223 of SEQ ID NO: 913374
uauugaaugugaggugcuu

SEQ ID NO: 922257 - RNA, 19 nt, Artificial Sequence
  Description of Artificial Sequence: Synthetic oligonucleotide
  Antisense strand to SEQ ID NO: 922256
aagcaccucacauucaaua

SEQ ID NO: 922258 - RNA, 19 nt, Artificial Sequence
  Description of Artificial Sequence: Synthetic oligonucleotide
  Sense strand starting at position 3089 of SEQ ID NO: 913374
ugcccugaguccugcaaga

SEQ ID NO: 922259 - RNA, 19 nt, Artificial Sequence
  Description of Artificial Sequence: Synthetic oligonucleotide
  Antisense strand to SEQ ID NO: 922258
ucuugcaggacucagggca

SEQ ID NO: 922260 - RNA, 19 nt, Artificial Sequence
  Description of Artificial Sequence: Synthetic oligonucleotide
  Sense strand starting at position 3941 of SEQ ID NO: 913375
agacucaaagugugauaau

SEQ ID NO: 922261 - RNA, 19 nt, Artificial Sequence
  Description of Artificial Sequence: Synthetic oligonucleotide
  Antisense strand to SEQ ID NO: 922260
auuaucacacuuugagucu

SEQ ID NO: 922262 - RNA, 19 nt, Artificial Sequence
  Description of Artificial Sequence: Synthetic oligonucleotide
  Sense strand starting at position 183 of SEQ ID NO: 913375
ccuaaagauacguaagguu

SEQ ID NO: 922263 - RNA, 19 nt, Artificial Sequence
  Description of Artificial Sequence: Synthetic oligonucleotide
  Antisense strand to SEQ ID NO: 922262
aaccuuacguaucuuuagg

SEQ ID NO: 922264 - RNA, 19 nt, Artificial Sequence
  Description of Artificial Sequence: Synthetic oligonucleotide
  Sense strand starting at position 3771 of SEQ ID NO: 913375
gagagcauuccuuaggcaa

SEQ ID NO: 922265 - RNA, 19 nt, Artificial Sequence
  Description of Artificial Sequence: Synthetic oligonucleotide
  Antisense strand to SEQ ID NO: 922264
uugccuaaggaaugcucuc

SEQ ID NO: 922266 - RNA, 19 nt, Artificial Sequence
  Description of Artificial Sequence: Synthetic oligonucleotide
  Sense strand starting at position 1782 of SEQ ID NO: 913375
ccaggaaauugccugauua

SEQ ID NO: 922267 - RNA, 19 nt, Artificial Sequence
  Description of Artificial Sequence: Synthetic oligonucleotide
  Antisense strand to SEQ ID NO: 922266
uaaucaggcaauuuccugg

SEQ ID NO: 922268 - RNA, 19 nt, Artificial Sequence
  Description of Artificial Sequence: Synthetic oligonucleotide
  Sense strand starting at position 1006 of SEQ ID NO: 913375
gggucucaccuugaaaguc

SEQ ID NO: 922269 - RNA, 19 nt, Artificial Sequence
  Description of Artificial Sequence: Synthetic oligonucleotide
  Antisense strand to SEQ ID NO: 922268
gacuuucaaggugagaccc

SEQ ID NO: 922270 - RNA, 19 nt, Artificial Sequence
  Description of Artificial Sequence: Synthetic oligonucleotide
  Sense strand starting at position 1705 of SEQ ID NO: 913375
cagugauucggcgccggau

SEQ ID NO: 922271 - RNA, 19 nt, Artificial Sequence
  Description of Artificial Sequence: Synthetic oligonucleotide
  Antisense strand to SEQ ID NO: 922270
auccggcgccgaaucacug

SEQ ID NO: 922272 - RNA, 19 nt, Artificial Sequence
  Description of Artificial Sequence: Synthetic oligonucleotide
  Sense strand starting at position 3617 of SEQ ID NO: 913375
acaguucugugaucaaagg

SEQ ID NO: 922273 - RNA, 19 nt, Artificial Sequence
  Description of Artificial Sequence: Synthetic oligonucleotide
  Antisense strand to SEQ ID NO: 922272
ccuuugaucacagaacugu

SEQ ID NO: 922274 - RNA, 19 nt, Artificial Sequence
  Description of Artificial Sequence: Synthetic oligonucleotide
  Sense strand starting at position 648 of SEQ ID NO: 913375
ccuucucuucugggagaca

SEQ ID NO: 922275 - RNA, 19 nt, Artificial Sequence
  Description of Artificial Sequence: Synthetic oligonucleotide
  Antisense strand to SEQ ID NO: 922274
ugucucccagaagagaagg

SEQ ID NO: 922276 - RNA, 19 nt, Artificial Sequence
  Description of Artificial Sequence: Synthetic oligonucleotide
  Sense strand starting at position 1908 of SEQ ID NO: 913375
cuacauaauccagggccua

SEQ ID NO: 922277 - RNA, 19 nt, Artificial Sequence
  Description of Artificial Sequence: Synthetic oligonucleotide
  Antisense strand to SEQ ID NO: 922276
uaggcccuggauuauguag

SEQ ID NO: 922278 - RNA, 19 nt, Artificial Sequence
  Description of Artificial Sequence: Synthetic oligonucleotide
  Sense strand starting at position 3983 of SEQ ID NO: 913375
uaugaugacuugcuugaca

SEQ ID NO: 922279 - RNA, 19 nt, Artificial Sequence
  Description of Artificial Sequence: Synthetic oligonucleotide
  Antisense strand to SEQ ID NO: 922278
ugucaagcaagucaucaua

SEQ ID NO: 922280 - RNA, 19 nt, Artificial Sequence
  Description of Artificial Sequence: Synthetic oligonucleotide
  Sense strand starting at position 1156 of SEQ ID NO: 913375
cacauaaggcuguaaguuu

SEQ ID NO: 922281 - RNA, 19 nt, Artificial Sequence
  Description of Artificial Sequence: Synthetic oligonucleotide
  Antisense strand to SEQ ID NO: 922280
aaacuuacagccuuaugug

SEQ ID NO: 922282 - RNA, 19 nt, Artificial Sequence
  Description of Artificial Sequence: Synthetic oligonucleotide
  Sense strand starting at position 3614 of SEQ ID NO: 913375
uggacaguucugugaucaa

SEQ ID NO: 922283 - RNA, 19 nt, Artificial Sequence
  Description of Artificial Sequence: Synthetic oligonucleotide
  Antisense strand to SEQ ID NO: 922282
uugaucacagaacugucca

SEQ ID NO: 922284 - RNA, 19 nt, Artificial Sequence
  Description of Artificial Sequence: Synthetic oligonucleotide
  Sense strand starting at position 3601 of SEQ ID NO: 913375
uuuauuaucuuguuggaca

SEQ ID NO: 922285 - RNA, 19 nt, Artificial Sequence
  Description of Artificial Sequence: Synthetic oligonucleotide
  Antisense strand to SEQ ID NO: 922284
uguccaacaagauaauaaa

SEQ ID NO: 922286 - RNA, 19 nt, Artificial Sequence
  Description of Artificial Sequence: Synthetic oligonucleotide
  Sense strand starting at position 1887 of SEQ ID NO: 913375
gaggcuuaguaucuaaauc

SEQ ID NO: 922287 - RNA, 19 nt, Artificial Sequence
  Description of Artificial Sequence: Synthetic oligonucleotide
  Antisense strand to SEQ ID NO: 922286
gauuuagauacuaagccuc

SEQ ID NO: 922288 - RNA, 19 nt, Artificial Sequence
  Description of Artificial Sequence: Synthetic oligonucleotide
  Sense strand starting at position 2996 of SEQ ID NO: 913375
uuugaugauuuggaaaugu

SEQ ID NO: 922289 - RNA, 19 nt, Artificial Sequence
  Description of Artificial Sequence: Synthetic oligonucleotide
  Antisense strand to SEQ ID NO: 922288
acauuuccaaaucaucaaa

SEQ ID NO: 922290 - RNA, 19 nt, Artificial Sequence
  Description of Artificial Sequence: Synthetic oligonucleotide
  Sense strand starting at position 3007 of SEQ ID NO: 913375
ggaaauguucgcugaaagg

SEQ ID NO: 922291 - RNA, 19 nt, Artificial Sequence
  Description of Artificial Sequence: Synthetic oligonucleotide
  Antisense strand to SEQ ID NO: 922290
ccuuucagcgaacauuucc

SEQ ID NO: 922292 - RNA, 19 nt, Artificial Sequence
  Description of Artificial Sequence: Synthetic oligonucleotide
  Sense strand starting at position 3613 of SEQ ID NO: 913375
uuggacaguucugugauca

SEQ ID NO: 922293 - RNA, 19 nt, Artificial Sequence
  Description of Artificial Sequence: Synthetic oligonucleotide
  Antisense strand to SEQ ID NO: 922292
ugaucacagaacuguccaa

SEQ ID NO: 922294 - RNA, 19 nt, Artificial Sequence
  Description of Artificial Sequence: Synthetic oligonucleotide
  Sense strand starting at position 3006 of SEQ ID NO: 913375
uggaaauguucgcugaaag

SEQ ID NO: 922295 - RNA, 19 nt, Artificial Sequence
  Description of Artificial Sequence: Synthetic oligonucleotide
  Antisense strand to SEQ ID NO: 922294
cuuucagcgaacauuucca

SEQ ID NO: 922296 - RNA, 19 nt, Artificial Sequence
  Description of Artificial Sequence: Synthetic oligonucleotide
  Sense strand starting at position 1005 of SEQ ID NO: 913375
ugggucucaccuugaaagu

SEQ ID NO: 922297 - RNA, 19 nt, Artificial Sequence
  Description of Artificial Sequence: Synthetic oligonucleotide
  Antisense strand to SEQ ID NO: 922296
acuuucaaggugagaccca

SEQ ID NO: 922298 - RNA, 19 nt, Artificial Sequence
  Description of Artificial Sequence: Synthetic oligonucleotide
  Sense strand starting at position 2995 of SEQ ID NO: 913375
cuuugaugauuuggaaaug

SEQ ID NO: 922299 - RNA, 19 nt, Artificial Sequence
  Description of Artificial Sequence: Synthetic oligonucleotide
  Antisense strand to SEQ ID NO: 922298
cauuuccaaaucaucaaag

SEQ ID NO: 922300 - RNA, 19 nt, Artificial Sequence
  Description of Artificial Sequence: Synthetic oligonucleotide
  Sense strand starting at position 3224 of SEQ ID NO: 913375
ugaacaaauccuugccagu

SEQ ID NO: 922301 - RNA, 19 nt, Artificial Sequence
  Description of Artificial Sequence: Synthetic oligonucleotide
  Antisense strand to SEQ ID NO: 922300
acuggcaaggauuuguuca

SEQ ID NO: 922302 - RNA, 19 nt, Artificial Sequence
  Description of Artificial Sequence: Synthetic oligonucleotide
  Sense strand starting at position 3005 of SEQ ID NO: 913375
uuggaaauguucgcugaaa

SEQ ID NO: 922303 - RNA, 19 nt, Artificial Sequence
  Description of Artificial Sequence: Synthetic oligonucleotide
  Antisense strand to SEQ ID NO: 922302
uuucagcgaacauuuccaa

SEQ ID NO: 922304 - RNA, 19 nt, Artificial Sequence
  Description of Artificial Sequence: Synthetic oligonucleotide
  Sense strand starting at position 1820 of SEQ ID NO: 913375
cucugucuaccguauuaga

SEQ ID NO: 922305 - RNA, 19 nt, Artificial Sequence
  Description of Artificial Sequence: Synthetic oligonucleotide
  Antisense strand to SEQ ID NO: 922304
ucuaauacgguagacagag

SEQ ID NO: 922306 - RNA, 19 nt, Artificial Sequence
  Description of Artificial Sequence: Synthetic oligonucleotide
  Sense strand starting at position 2905 of SEQ ID NO: 913375
cucacaugugauugauguu

SEQ ID NO: 922307 - RNA, 19 nt, Artificial Sequence
  Description of Artificial Sequence: Synthetic oligonucleotide
  Antisense strand to SEQ ID NO: 922306
aacaucaaucacaugugag

SEQ ID NO: 922308 - RNA, 19 nt, Artificial Sequence
  Description of Artificial Sequence: Synthetic oligonucleotide
  Sense strand starting at position 3603 of SEQ ID NO: 913375
uauuaucuuguuggacagu

SEQ ID NO: 922309 - RNA, 19 nt, Artificial Sequence
  Description of Artificial Sequence: Synthetic oligonucleotide
  Antisense strand to SEQ ID NO: 922308
acuguccaacaagauaaua

SEQ ID NO: 922310 - RNA, 19 nt, Artificial Sequence
  Description of Artificial Sequence: Synthetic oligonucleotide
  Sense strand starting at position 3774 of SEQ ID NO: 913375
agcauuccuuaggcaacua

SEQ ID NO: 922311 - RNA, 19 nt, Artificial Sequence
  Description of Artificial Sequence: Synthetic oligonucleotide
  Antisense strand to SEQ ID NO: 922310
uaguugccuaaggaaugcu

SEQ ID NO: 922312 - RNA, 19 nt, Artificial Sequence
  Description of Artificial Sequence: Synthetic oligonucleotide
  Sense strand starting at position 3952 of SEQ ID NO: 913375
gugauaaugcauugaguau

SEQ ID NO: 922313 - RNA, 19 nt, Artificial Sequence
  Description of Artificial Sequence: Synthetic oligonucleotide
  Antisense strand to SEQ ID NO: 922312
auacucaaugcauuaucac

SEQ ID NO: 922314 - RNA, 19 nt, Artificial Sequence
  Description of Artificial Sequence: Synthetic oligonucleotide
  Sense strand starting at position 1028 of SEQ ID NO: 913375
cgggcuuaauucucauaau

SEQ ID NO: 922315 - RNA, 19 nt, Artificial Sequence
  Description of Artificial Sequence: Synthetic oligonucleotide
  Antisense strand to SEQ ID NO: 922314
auuaugagaauuaagcccg

SEQ ID NO: 922316 - RNA, 19 nt, Artificial Sequence
  Description of Artificial Sequence: Synthetic oligonucleotide
  Sense strand starting at position 515 of SEQ ID NO: 913375
uggccaagauucguaaauu

SEQ ID NO: 922317 - RNA, 19 nt, Artificial Sequence
  Description of Artificial Sequence: Synthetic oligonucleotide
  Antisense strand to SEQ ID NO: 922316
aauuuacgaaucuuggcca

SEQ ID NO: 922318 - RNA, 19 nt, Artificial Sequence
  Description of Artificial Sequence: Synthetic oligonucleotide
  Sense strand starting at position 1883 of SEQ ID NO: 913375
ucuugaggcuuaguaucua

SEQ ID NO: 922319 - RNA, 19 nt, Artificial Sequence
  Description of Artificial Sequence: Synthetic oligonucleotide
  Antisense strand to SEQ ID NO: 922318
uagauacuaagccucaaga

SEQ ID NO: 922320 - RNA, 19 nt, Artificial Sequence
  Description of Artificial Sequence: Synthetic oligonucleotide
  Sense strand starting at position 2746 of SEQ ID NO: 913375
ucugaaagcccguaccuuu

SEQ ID NO: 922321 - RNA, 19 nt, Artificial Sequence
  Description of Artificial Sequence: Synthetic oligonucleotide
  Antisense strand to SEQ ID NO: 922320
aaagguacgggcuuucaga

SEQ ID NO: 922322 - RNA, 19 nt, Artificial Sequence
  Description of Artificial Sequence: Synthetic oligonucleotide
  Sense strand starting at position 514 of SEQ ID NO: 913375
cuggccaagauucguaaau

SEQ ID NO: 922323 - RNA, 19 nt, Artificial Sequence
  Description of Artificial Sequence: Synthetic oligonucleotide
  Antisense strand to SEQ ID NO: 922322
auuuacgaaucuuggccag

SEQ ID NO: 922324 - RNA, 19 nt, Artificial Sequence
  Description of Artificial Sequence: Synthetic oligonucleotide
  Sense strand starting at position 3004 of SEQ ID NO: 913375
uuuggaaauguucgcugaa

SEQ ID NO: 922325 - RNA, 19 nt, Artificial Sequence
  Description of Artificial Sequence: Synthetic oligonucleotide
  Antisense strand to SEQ ID NO: 922324
uucagcgaacauuuccaaa

SEQ ID NO: 922326 - RNA, 19 nt, Artificial Sequence
  Description of Artificial Sequence: Synthetic oligonucleotide
  Sense strand starting at position 821 of SEQ ID NO: 913375
agucuuuccucaguuacua

SEQ ID NO: 922327 - RNA, 19 nt, Artificial Sequence
  Description of Artificial Sequence: Synthetic oligonucleotide
  Antisense strand to SEQ ID NO: 922326
uaguaacugaggaaagacu

SEQ ID NO: 922328 - RNA, 19 nt, Artificial Sequence
  Description of Artificial Sequence: Synthetic oligonucleotide
  Sense strand starting at position 1693 of SEQ ID NO: 913375
accugugccagucagugau

SEQ ID NO: 922329 - RNA, 19 nt, Artificial Sequence
  Description of Artificial Sequence: Synthetic oligonucleotide
  Antisense strand to SEQ ID NO: 922328
aucacugacuggcacaggu

SEQ ID NO: 922330 - RNA, 19 nt, Artificial Sequence
  Description of Artificial Sequence: Synthetic oligonucleotide
  Sense strand starting at position 3149 of SEQ ID NO: 913375
aggaaucacucacaauuga

SEQ ID NO: 922331 - RNA, 19 nt, Artificial Sequence
  Description of Artificial Sequence: Synthetic oligonucleotide
  Antisense strand to SEQ ID NO: 922330
ucaauugugagugauuccu

SEQ ID NO: 922332 - RNA, 19 nt, Artificial Sequence
  Description of Artificial Sequence: Synthetic oligonucleotide
  Sense strand starting at position 1825 of SEQ ID NO: 913375
ucuaccguauuagaaauuu

SEQ ID NO: 922333 - RNA, 19 nt, Artificial Sequence
  Description of Artificial Sequence: Synthetic oligonucleotide
  Antisense strand to SEQ ID NO: 922332
aaauuucuaauacgguaga

SEQ ID NO: 922334 - RNA, 19 nt, Artificial Sequence
  Description of Artificial Sequence: Synthetic oligonucleotide
  Sense strand starting at position 3444 of SEQ ID NO: 913375
aguauuuccuuauaaggca

SEQ ID NO: 922335 - RNA, 19 nt, Artificial Sequence
  Description of Artificial Sequence: Synthetic oligonucleotide
  Antisense strand to SEQ ID NO: 922334
ugccuuauaaggaaauacu

SEQ ID NO: 922336 - RNA, 19 nt, Artificial Sequence
  Description of Artificial Sequence: Synthetic oligonucleotide
  Sense strand starting at position 819 of SEQ ID NO: 913375
gcagucuuuccucaguuac

SEQ ID NO: 922337 - RNA, 19 nt, Artificial Sequence
  Description of Artificial Sequence: Synthetic oligonucleotide
  Antisense strand to SEQ ID NO: 922336
guaacugaggaaagacugc

SEQ ID NO: 922338 - RNA, 19 nt, Artificial Sequence
  Description of Artificial Sequence: Synthetic oligonucleotide
  Sense strand starting at position 1935 of SEQ ID NO: 913375
guggguuucucuccaucua

SEQ ID NO: 922339 - RNA, 19 nt, Artificial Sequence
  Description of Artificial Sequence: Synthetic oligonucleotide
  Antisense strand to SEQ ID NO: 922338
uagauggagagaaacccac

SEQ ID NO: 922340 - RNA, 19 nt, Artificial Sequence
  Description of Artificial Sequence: Synthetic oligonucleotide
  Sense strand starting at position 618 of SEQ ID NO: 913376
uaguacuccgucucgucaa

SEQ ID NO: 922341 - RNA, 19 nt, Artificial Sequence
  Description of Artificial Sequence: Synthetic oligonucleotide
  Antisense strand to SEQ ID NO: 922340
uugacgagacggaguacua

SEQ ID NO: 922342 - RNA, 19 nt, Artificial Sequence
  Description of Artificial Sequence: Synthetic oligonucleotide
  Sense strand starting at position 2708 of SEQ ID NO: 913376
uguguuaauuaggcaauuu

SEQ ID NO: 922343 - RNA, 19 nt, Artificial Sequence
  Description of Artificial Sequence: Synthetic oligonucleotide
  Antisense strand to SEQ ID NO: 922342
aaauugccuaauuaacaca

SEQ ID NO: 922344 - RNA, 19 nt, Artificial Sequence
  Description of Artificial Sequence: Synthetic oligonucleotide
  Sense strand starting at position 1710 of SEQ ID NO: 913376
caaacauaugcguaaagga

SEQ ID NO: 922345 - RNA, 19 nt, Artificial Sequence
  Description of Artificial Sequence: Synthetic oligonucleotide
  Antisense strand to SEQ ID NO: 922344
uccuuuacgcauauguuug

SEQ ID NO: 922346 - RNA, 19 nt, Artificial Sequence
  Description of Artificial Sequence: Synthetic oligonucleotide
  Sense strand starting at position 3824 of SEQ ID NO: 913376
ggaagagaauuugauguga

SEQ ID NO: 922347 - RNA, 19 nt, Artificial Sequence
  Description of Artificial Sequence: Synthetic oligonucleotide
  Antisense strand to SEQ ID NO: 922346
ucacaucaaauucucuucc

SEQ ID NO: 922348 - RNA, 19 nt, Artificial Sequence
  Description of Artificial Sequence: Synthetic oligonucleotide
  Sense strand starting at position 104 of SEQ ID NO: 913376
ggagaaguuaugcaaguua

SEQ ID NO: 922349 - RNA, 19 nt, Artificial Sequence
  Description of Artificial Sequence: Synthetic oligonucleotide
  Antisense strand to SEQ ID NO: 922348
uaacuugcauaacuucucc

SEQ ID NO: 922350 - RNA, 19 nt, Artificial Sequence
  Description of Artificial Sequence: Synthetic oligonucleotide
  Sense strand starting at position 2257 of SEQ ID NO: 913376
cguuuaaccacgcucaguu

SEQ ID NO: 922351 - RNA, 19 nt, Artificial Sequence
  Description of Artificial Sequence: Synthetic oligonucleotide
  Antisense strand to SEQ ID NO: 922350
aacugagcgugguuaaacg

SEQ ID NO: 922352 - RNA, 19 nt, Artificial Sequence
  Description of Artificial Sequence: Synthetic oligonucleotide
  Sense strand starting at position 2750 of SEQ ID NO: 913376
augagaaacuauucguaag

SEQ ID NO: 922353 - RNA, 19 nt, Artificial Sequence
  Description of Artificial Sequence: Synthetic oligonucleotide
  Antisense strand to SEQ ID NO: 922352
cuuacgaauaguuucucau

SEQ ID NO: 922354 - RNA, 19 nt, Artificial Sequence
  Description of Artificial Sequence: Synthetic oligonucleotide
  Sense strand starting at position 629 of SEQ ID NO: 913376
cucgucaaggaucacauua

SEQ ID NO: 922355 - RNA, 19 nt, Artificial Sequence
  Description of Artificial Sequence: Synthetic oligonucleotide
  Antisense strand to SEQ ID NO: 922354
uaaugugauccuugacgag

SEQ ID NO: 922356 - RNA, 19 nt, Artificial Sequence
  Description of Artificial Sequence: Synthetic oligonucleotide
  Sense strand starting at position 3209 of SEQ ID NO: 913376
uuugguacuccugaaaucu

SEQ ID NO: 922357 - RNA, 19 nt, Artificial Sequence
  Description of Artificial Sequence: Synthetic oligonucleotide
  Antisense strand to SEQ ID NO: 922356
agauuucaggaguaccaaa

SEQ ID NO: 922358 - RNA, 19 nt, Artificial Sequence
  Description of Artificial Sequence: Synthetic oligonucleotide
  Sense strand starting at position 256 of SEQ ID NO: 913376
auaguuuaaggaugaaguu

SEQ ID NO: 922359 - RNA, 19 nt, Artificial Sequence
  Description of Artificial Sequence: Synthetic oligonucleotide
  Antisense strand to SEQ ID NO: 922358
aacuucauccuuaaacuau

SEQ ID NO: 922360 - RNA, 19 nt, Artificial Sequence
  Description of Artificial Sequence: Synthetic oligonucleotide
  Sense strand starting at position 2597 of SEQ ID NO: 913376
augauuuguaaaugcgguu

SEQ ID NO: 922361 - RNA, 19 nt, Artificial Sequence
  Description of Artificial Sequence: Synthetic oligonucleotide
  Antisense strand to SEQ ID NO: 922360
aaccgcauuuacaaaucau

SEQ ID NO: 922362 - RNA, 19 nt, Artificial Sequence
  Description of Artificial Sequence: Synthetic oligonucleotide
  Sense strand starting at position 2883 of SEQ ID NO: 913376
caaggaauguaacuaguuu

SEQ ID NO: 922363 - RNA, 19 nt, Artificial Sequence
  Description of Artificial Sequence: Synthetic oligonucleotide
  Antisense strand to SEQ ID NO: 922362
aaacuaguuacauuccuug

SEQ ID NO: 922364 - RNA, 19 nt, Artificial Sequence
  Description of Artificial Sequence: Synthetic oligonucleotide
  Sense strand starting at position 3910 of SEQ ID NO: 913376
caaugagagugacuuucuu

SEQ ID NO: 922365 - RNA, 19 nt, Artificial Sequence
  Description of Artificial Sequence: Synthetic oligonucleotide
  Antisense strand to SEQ ID NO: 922364
aagaaagucacucucauug

SEQ ID NO: 922366 - RNA, 19 nt, Artificial Sequence
  Description of Artificial Sequence: Synthetic oligonucleotide
  Sense strand starting at position 3862 of SEQ ID NO: 913376
gaagguucugagcagaguu

SEQ ID NO: 922367 - RNA, 19 nt, Artificial Sequence
  Description of Artificial Sequence: Synthetic oligonucleotide
  Antisense strand to SEQ ID NO: 922366
aacucugcucagaaccuuc

SEQ ID NO: 922368 - RNA, 19 nt, Artificial Sequence
  Description of Artificial Sequence: Synthetic oligonucleotide
  Sense strand starting at position 2874 of SEQ ID NO: 913376
uuaacaugucaaggaaugu

SEQ ID NO: 922369 - RNA, 19 nt, Artificial Sequence
  Description of Artificial Sequence: Synthetic oligonucleotide
  Antisense strand to SEQ ID NO: 922368
acauuccuugacauguuaa

SEQ ID NO: 922370 - RNA, 19 nt, Artificial Sequence
  Description of Artificial Sequence: Synthetic oligonucleotide
  Sense strand starting at position 3796 of SEQ ID NO: 913376
cccagauugugugcuauuu

SEQ ID NO: 922371 - RNA, 19 nt, Artificial Sequence
  Description of Artificial Sequence: Synthetic oligonucleotide
  Antisense strand to SEQ ID NO: 922370
aaauagcacacaaucuggg

SEQ ID NO: 922372 - RNA, 19 nt, Artificial Sequence
  Description of Artificial Sequence: Synthetic oligonucleotide
  Sense strand starting at position 437 of SEQ ID NO: 913376
cugcucuagguuuaugaaa

SEQ ID NO: 922373 - RNA, 19 nt, Artificial Sequence
  Description of Artificial Sequence: Synthetic oligonucleotide
  Antisense strand to SEQ ID NO: 922372
uuucauaaaccuagagcag

SEQ ID NO: 922374 - RNA, 19 nt, Artificial Sequence
  Description of Artificial Sequence: Synthetic oligonucleotide
  Sense strand starting at position 1707 of SEQ ID NO: 913376
agacaaacauaugcguaaa

SEQ ID NO: 922375 - RNA, 19 nt, Artificial Sequence
  Description of Artificial Sequence: Synthetic oligonucleotide
  Antisense strand to SEQ ID NO: 922374
uuuacgcauauguuugucu

SEQ ID NO: 922376 - RNA, 19 nt, Artificial Sequence
  Description of Artificial Sequence: Synthetic oligonucleotide
  Sense strand starting at position 3785 of SEQ ID NO: 913376
aggaaauggugcccagauu

SEQ ID NO: 922377 - RNA, 19 nt, Artificial Sequence
  Description of Artificial Sequence: Synthetic oligonucleotide
  Antisense strand to SEQ ID NO: 922376
aaucugggcaccauuuccu

SEQ ID NO: 922378 - RNA, 19 nt, Artificial Sequence
  Description of Artificial Sequence: Synthetic oligonucleotide
  Sense strand starting at position 2658 of SEQ ID NO: 913376
cuuauaugucagggaaggu

SEQ ID NO: 922379 - RNA, 19 nt, Artificial Sequence
  Description of Artificial Sequence: Synthetic oligonucleotide
  Antisense strand to SEQ ID NO: 922378
accuucccugacauauaag

SEQ ID NO: 922380 - RNA, 19 nt, Artificial Sequence
  Description of Artificial Sequence: Synthetic oligonucleotide
  Sense strand starting at position 527 of SEQ ID NO: 913376
ggcaccuuuguuuaaacca

SEQ ID NO: 922381 - RNA, 19 nt, Artificial Sequence
  Description of Artificial Sequence: Synthetic oligonucleotide
  Antisense strand to SEQ ID NO: 922380
ugguuuaaacaaaggugcc

SEQ ID NO: 922382 - RNA, 19 nt, Artificial Sequence
  Description of Artificial Sequence: Synthetic oligonucleotide
  Sense strand starting at position 3586 of SEQ ID NO: 913376
agugacacuugagcuagau

SEQ ID NO: 922383 - RNA, 19 nt, Artificial Sequence
  Description of Artificial Sequence: Synthetic oligonucleotide
  Antisense strand to SEQ ID NO: 922382
aucuagcucaagugucacu

SEQ ID NO: 922384 - RNA, 19 nt, Artificial Sequence
  Description of Artificial Sequence: Synthetic oligonucleotide
  Sense strand starting at position 78 of SEQ ID NO: 913376
cuuuacugacguuaucuga

SEQ ID NO: 922385 - RNA, 19 nt, Artificial Sequence
  Description of Artificial Sequence: Synthetic oligonucleotide
  Antisense strand to SEQ ID NO: 922384
ucagauaacgucaguaaag

SEQ ID NO: 922386 - RNA, 19 nt, Artificial Sequence
  Description of Artificial Sequence: Synthetic oligonucleotide
  Sense strand starting at position 2954 of SEQ ID NO: 913376
ugcuguauuaauuagggua

SEQ ID NO: 922387 - RNA, 19 nt, Artificial Sequence
  Description of Artificial Sequence: Synthetic oligonucleotide
  Antisense strand to SEQ ID NO: 922386
uacccuaauuaauacagca

SEQ ID NO: 922388 - RNA, 19 nt, Artificial Sequence
  Description of Artificial Sequence: Synthetic oligonucleotide
  Sense strand starting at position 3725 of SEQ ID NO: 913376
aggaaauuaguacggcuga

SEQ ID NO: 922389 - RNA, 19 nt, Artificial Sequence
  Description of Artificial Sequence: Synthetic oligonucleotide
  Antisense strand to SEQ ID NO: 922388
ucagccguacuaauuuccu

SEQ ID NO: 922390 - RNA, 19 nt, Artificial Sequence
  Description of Artificial Sequence: Synthetic oligonucleotide
  Sense strand starting at position 103 of SEQ ID NO: 913376
gggagaaguuaugcaaguu

SEQ ID NO: 922391 - RNA, 19 nt, Artificial Sequence
  Description of Artificial Sequence: Synthetic oligonucleotide
  Antisense strand to SEQ ID NO: 922390
aacuugcauaacuucuccc

SEQ ID NO: 922392 - RNA, 19 nt, Artificial Sequence
  Description of Artificial Sequence: Synthetic oligonucleotide
  Sense strand starting at position 2752 of SEQ ID NO: 913376
gagaaacuauucguaagca

SEQ ID NO: 922393 - RNA, 19 nt, Artificial Sequence
  Description of Artificial Sequence: Synthetic oligonucleotide
  Antisense strand to SEQ ID NO: 922392
ugcuuacgaauaguuucuc

SEQ ID NO: 922394 - RNA, 19 nt, Artificial Sequence
  Description of Artificial Sequence: Synthetic oligonucleotide
  Sense strand starting at position 3339 of SEQ ID NO: 913376
uguuaucagccuuacugau

SEQ ID NO: 922395 - RNA, 19 nt, Artificial Sequence
  Description of Artificial Sequence: Synthetic oligonucleotide
  Antisense strand to SEQ ID NO: 922394
aucaguaaggcugauaaca

SEQ ID NO: 922396 - RNA, 19 nt, Artificial Sequence
  Description of Artificial Sequence: Synthetic oligonucleotide
  Sense strand starting at position 3598 of SEQ ID NO: 913376
gcuagaucuaaauggcaug

SEQ ID NO: 922397 - RNA, 19 nt, Artificial Sequence
  Description of Artificial Sequence: Synthetic oligonucleotide
  Antisense strand to SEQ ID NO: 922396
caugccauuuagaucuagc

SEQ ID NO: 922398 - RNA, 19 nt, Artificial Sequence
  Description of Artificial Sequence: Synthetic oligonucleotide
  Sense strand starting at position 2692 of SEQ ID NO: 913376
acagaaauuaggugcaugu

SEQ ID NO: 922399 - RNA, 19 nt, Artificial Sequence
  Description of Artificial Sequence: Synthetic oligonucleotide
  Antisense strand to SEQ ID NO: 922398
acaugcaccuaauuucugu

SEQ ID NO: 922400 - RNA, 19 nt, Artificial Sequence
  Description of Artificial Sequence: Synthetic oligonucleotide
  Sense strand starting at position 2292 of SEQ ID NO: 913376
gaggaauagcacugucuuc

SEQ ID NO: 922401 - RNA, 19 nt, Artificial Sequence
  Description of Artificial Sequence: Synthetic oligonucleotide
  Antisense strand to SEQ ID NO: 922400
gaagacagugcuauuccuc

SEQ ID NO: 922402 - RNA, 19 nt, Artificial Sequence
  Description of Artificial Sequence: Synthetic oligonucleotide
  Sense strand starting at position 606 of SEQ ID NO: 913376
guuacuuuccucuaguacu

SEQ ID NO: 922403 - RNA, 19 nt, Artificial Sequence
  Description of Artificial Sequence: Synthetic oligonucleotide
  Antisense strand to SEQ ID NO: 922402
aguacuagaggaaaguaac

SEQ ID NO: 922404 - RNA, 19 nt, Artificial Sequence
  Description of Artificial Sequence: Synthetic oligonucleotide
  Sense strand starting at position 2832 of SEQ ID NO: 913376
gcauucuaguugguagaaa

SEQ ID NO: 922405 - RNA, 19 nt, Artificial Sequence
  Description of Artificial Sequence: Synthetic oligonucleotide
  Antisense strand to SEQ ID NO: 922404
uuucuaccaacuagaaugc

SEQ ID NO: 922406 - RNA, 19 nt, Artificial Sequence
  Description of Artificial Sequence: Synthetic oligonucleotide
  Sense strand starting at position 3559 of SEQ ID NO: 913376
accugaaacugguauuucu

SEQ ID NO: 922407 - RNA, 19 nt, Artificial Sequence
  Description of Artificial Sequence: Synthetic oligonucleotide
  Antisense strand to SEQ ID NO: 922406
agaaauaccaguuucaggu

SEQ ID NO: 922408 - RNA, 19 nt, Artificial Sequence
  Description of Artificial Sequence: Synthetic oligonucleotide
  Sense strand starting at position 2512 of SEQ ID NO: 913376
ggaaauagcaccugucagu

SEQ ID NO: 922409 - RNA, 19 nt, Artificial Sequence
  Description of Artificial Sequence: Synthetic oligonucleotide
  Antisense strand to SEQ ID NO: 922408
acugacaggugcuauuucc

SEQ ID NO: 922410 - RNA, 19 nt, Artificial Sequence
  Description of Artificial Sequence: Synthetic oligonucleotide
  Sense strand starting at position 2705 of SEQ ID NO: 913376
gcauguguuaauuaggcaa

SEQ ID NO: 922411 - RNA, 19 nt, Artificial Sequence
  Description of Artificial Sequence: Synthetic oligonucleotide
  Antisense strand to SEQ ID NO: 922410
uugccuaauuaacacaugc

SEQ ID NO: 922412 - RNA, 19 nt, Artificial Sequence
  Description of Artificial Sequence: Synthetic oligonucleotide
  Sense strand starting at position 359 of SEQ ID NO: 913376
uugcuaauuucgccagcca

SEQ ID NO: 922413 - RNA, 19 nt, Artificial Sequence
  Description of Artificial Sequence: Synthetic oligonucleotide
  Antisense strand to SEQ ID NO: 922412
uggcuggcgaaauuagcaa

SEQ ID NO: 922414 - RNA, 19 nt, Artificial Sequence
  Description of Artificial Sequence: Synthetic oligonucleotide
  Sense strand starting at position 3826 of SEQ ID NO: 913376
aagagaauuugaugugagu

SEQ ID NO: 922415 - RNA, 19 nt, Artificial Sequence
  Description of Artificial Sequence: Synthetic oligonucleotide
  Antisense strand to SEQ ID NO: 922414
acucacaucaaauucucuu

SEQ ID NO: 922416 - RNA, 19 nt, Artificial Sequence
  Description of Artificial Sequence: Synthetic oligonucleotide
  Sense strand starting at position 1741 of SEQ ID NO: 913376
ggcugcuuucuccaacuca

SEQ ID NO: 922417 - RNA, 19 nt, Artificial Sequence
  Description of Artificial Sequence: Synthetic oligonucleotide
  Antisense strand to SEQ ID NO: 922416
ugaguuggagaaagcagcc

SEQ ID NO: 922418 - RNA, 19 nt, Artificial Sequence
  Description of Artificial Sequence: Synthetic oligonucleotide
  Sense strand starting at position 81 of SEQ ID NO: 913376
uacugacguuaucugaagu

SEQ ID NO: 922419 - RNA, 19 nt, Artificial Sequence
  Description of Artificial Sequence: Synthetic oligonucleotide
  Antisense strand to SEQ ID NO: 922418
acuucagauaacgucagua

SEQ ID NO: 922420 - RNA, 19 nt, Artificial Sequence
  Description of Artificial Sequence: Synthetic oligonucleotide
  Sense strand starting at position 923 of SEQ ID NO: 913377
guggccauuucuucucaaa

SEQ ID NO: 922421 - RNA, 19 nt, Artificial Sequence
  Description of Artificial Sequence: Synthetic oligonucleotide
  Antisense strand to SEQ ID NO: 922420
uuugagaagaaauggccac

SEQ ID NO: 922422 - RNA, 19 nt, Artificial Sequence
  Description of Artificial Sequence: Synthetic oligonucleotide
  Sense strand starting at position 812 of SEQ ID NO: 913377
ucgugcuuuagccuuugaa

SEQ ID NO: 922423 - RNA, 19 nt, Artificial Sequence
  Description of Artificial Sequence: Synthetic oligonucleotide
  Antisense strand to SEQ ID NO: 922422
uucaaaggcuaaagcacga

SEQ ID NO: 922424 - RNA, 19 nt, Artificial Sequence
  Description of Artificial Sequence: Synthetic oligonucleotide
  Sense strand starting at position 3311 of SEQ ID NO: 913377
guuucuaacccguucuguu

SEQ ID NO: 922425 - RNA, 19 nt, Artificial Sequence
  Description of Artificial Sequence: Synthetic oligonucleotide
  Antisense strand to SEQ ID NO: 922424
aacagaacggguuagaaac

SEQ ID NO: 922426 - RNA, 19 nt, Artificial Sequence
  Description of Artificial Sequence: Synthetic oligonucleotide
  Sense strand starting at position 3890 of SEQ ID NO: 913377
agauuugagucugauuugu

SEQ ID NO: 922427 - RNA, 19 nt, Artificial Sequence
  Description of Artificial Sequence: Synthetic oligonucleotide
  Antisense strand to SEQ ID NO: 922426
acaaaucagacucaaaucu

SEQ ID NO: 922428 - RNA, 19 nt, Artificial Sequence
  Description of Artificial Sequence: Synthetic oligonucleotide
  Sense strand starting at position 567 of SEQ ID NO: 913377
aggucuaaccucuagaagu

SEQ ID NO: 922429 - RNA, 19 nt, Artificial Sequence
  Description of Artificial Sequence: Synthetic oligonucleotide
  Antisense strand to SEQ ID NO: 922428
acuucuagagguuagaccu

SEQ ID NO: 922430 - RNA, 19 nt, Artificial Sequence
  Description of Artificial Sequence: Synthetic oligonucleotide
  Sense strand starting at position 2365 of SEQ ID NO: 913377
cggaaauuccacugggaca

SEQ ID NO: 922431 - RNA, 19 nt, Artificial Sequence
  Description of Artificial Sequence: Synthetic oligonucleotide
  Antisense strand to SEQ ID NO: 922430
ugucccaguggaauuuccg

SEQ ID NO: 922432 - RNA, 19 nt, Artificial Sequence
  Description of Artificial Sequence: Synthetic oligonucleotide
  Sense strand starting at position 3703 of SEQ ID NO: 913377
gagagcuaugaucauaugu

SEQ ID NO: 922433 - RNA, 19 nt, Artificial Sequence
  Description of Artificial Sequence: Synthetic oligonucleotide
  Antisense strand to SEQ ID NO: 922432
acauaugaucauagcucuc

SEQ ID NO: 922434 - RNA, 19 nt, Artificial Sequence
  Description of Artificial Sequence: Synthetic oligonucleotide
  Sense strand starting at position 1067 of SEQ ID NO: 913377
ggagauuccgcccagauaa

SEQ ID NO: 922435 - RNA, 19 nt, Artificial Sequence
  Description of Artificial Sequence: Synthetic oligonucleotide
  Antisense strand to SEQ ID NO: 922434
uuaucugggcggaaucucc

SEQ ID NO: 922436 - RNA, 19 nt, Artificial Sequence
  Description of Artificial Sequence: Synthetic oligonucleotide
  Sense strand starting at position 3699 of SEQ ID NO: 913377
gauggagagcuaugaucau

SEQ ID NO: 922437 - RNA, 19 nt, Artificial Sequence
  Description of Artificial Sequence: Synthetic oligonucleotide
  Antisense strand to SEQ ID NO: 922436
augaucauagcucuccauc

SEQ ID NO: 922438 - RNA, 19 nt, Artificial Sequence
  Description of Artificial Sequence: Synthetic oligonucleotide
  Sense strand starting at position 3830 of SEQ ID NO: 913377
uaugaaguagcagagaguu

SEQ ID NO: 922439 - RNA, 19 nt, Artificial Sequence
  Description of Artificial Sequence: Synthetic oligonucleotide
  Antisense strand to SEQ ID NO: 922438
aacucucugcuacuucaua

SEQ ID NO: 922440 - RNA, 19 nt, Artificial Sequence
  Description of Artificial Sequence: Synthetic oligonucleotide
  Sense strand starting at position 763 of SEQ ID NO: 913377
cuccacuugggaugacauu

SEQ ID NO: 922441 - RNA, 19 nt, Artificial Sequence
  Description of Artificial Sequence: Synthetic oligonucleotide
  Antisense strand to SEQ ID NO: 922440
aaugucaucccaaguggag

SEQ ID NO: 922442 - RNA, 19 nt, Artificial Sequence
  Description of Artificial Sequence: Synthetic oligonucleotide
  Sense strand starting at position 2789 of SEQ ID NO: 913377
ggcuucuaggucuagaaua

SEQ ID NO: 922443 - RNA, 19 nt, Artificial Sequence
  Description of Artificial Sequence: Synthetic oligonucleotide
  Antisense strand to SEQ ID NO: 922442
uauucuagaccuagaagcc

SEQ ID NO: 922444 - RNA, 19 nt, Artificial Sequence
  Description of Artificial Sequence: Synthetic oligonucleotide
  Sense strand starting at position 55 of SEQ ID NO: 913377
uacagacggcauuaucuua

SEQ ID NO: 922445 - RNA, 19 nt, Artificial Sequence
  Description of Artificial Sequence: Synthetic oligonucleotide
  Antisense strand to SEQ ID NO: 922444
uaagauaaugccgucugua

SEQ ID NO: 922446 - RNA, 19 nt, Artificial Sequence
  Description of Artificial Sequence: Synthetic oligonucleotide
  Sense strand starting at position 3894 of SEQ ID NO: 913377
uugagucugauuuguuugu

SEQ ID NO: 922447 - RNA, 19 nt, Artificial Sequence
  Description of Artificial Sequence: Synthetic oligonucleotide
  Antisense strand to SEQ ID NO: 922446
acaaacaaaucagacucaa

SEQ ID NO: 922448 - RNA, 19 nt, Artificial Sequence
  Description of Artificial Sequence: Synthetic oligonucleotide
  Sense strand starting at position 2803 of SEQ ID NO: 913377
gaauacagugagugugaga

SEQ ID NO: 922449 - RNA, 19 nt, Artificial Sequence
  Description of Artificial Sequence: Synthetic oligonucleotide
  Antisense strand to SEQ ID NO: 922448
ucucacacucacuguauuc

SEQ ID NO: 922450 - RNA, 19 nt, Artificial Sequence
  Description of Artificial Sequence: Synthetic oligonucleotide
  Sense strand starting at position 2537 of SEQ ID NO: 913377
accaguccgucagcauuua

SEQ ID NO: 922451 - RNA, 19 nt, Artificial Sequence
  Description of Artificial Sequence: Synthetic oligonucleotide
  Antisense strand to SEQ ID NO: 922450
uaaaugcugacggacuggu

SEQ ID NO: 922452 - RNA, 19 nt, Artificial Sequence
  Description of Artificial Sequence: Synthetic oligonucleotide
  Sense strand starting at position 3896 of SEQ ID NO: 913377
gagucugauuuguuugugu

SEQ ID NO: 922453 - RNA, 19 nt, Artificial Sequence
  Description of Artificial Sequence: Synthetic oligonucleotide
  Antisense strand to SEQ ID NO: 922452
acacaaacaaaucagacuc

SEQ ID NO: 922454 - RNA, 19 nt, Artificial Sequence
  Description of Artificial Sequence: Synthetic oligonucleotide
  Sense strand starting at position 3088 of SEQ ID NO: 913377
cgaagaauccgguagggca

SEQ ID NO: 922455 - RNA, 19 nt, Artificial Sequence
  Description of Artificial Sequence: Synthetic oligonucleotide
  Antisense strand to SEQ ID NO: 922454
ugcccuaccggauucuucg

SEQ ID NO: 922456 - RNA, 19 nt, Artificial Sequence
  Description of Artificial Sequence: Synthetic oligonucleotide
  Sense strand starting at position 3903 of SEQ ID NO: 913377
auuuguuuguguguauauc

SEQ ID NO: 922457 - RNA, 19 nt, Artificial Sequence
  Description of Artificial Sequence: Synthetic oligonucleotide
  Antisense strand to SEQ ID NO: 922456
gauauacacacaaacaaau

SEQ ID NO: 922458 - RNA, 19 nt, Artificial Sequence
  Description of Artificial Sequence: Synthetic oligonucleotide
  Sense strand starting at position 1064 of SEQ ID NO: 913377
ugaggagauuccgcccaga

SEQ ID NO: 922459 - RNA, 19 nt, Artificial Sequence
  Description of Artificial Sequence: Synthetic oligonucleotide
  Antisense strand to SEQ ID NO: 922458
ucugggcggaaucuccuca

SEQ ID NO: 922460 - RNA, 19 nt, Artificial Sequence
  Description of Artificial Sequence: Synthetic oligonucleotide
  Sense strand starting at position 3817 of SEQ ID NO: 913377
uuaacuggcuucuuaugaa

SEQ ID NO: 922461 - RNA, 19 nt, Artificial Sequence
  Description of Artificial Sequence: Synthetic oligonucleotide
  Antisense strand to SEQ ID NO: 922460
uucauaagaagccaguuaa

SEQ ID NO: 922462 - RNA, 19 nt, Artificial Sequence
  Description of Artificial Sequence: Synthetic oligonucleotide
  Sense strand starting at position 556 of SEQ ID NO: 913377
ggagucucccaaggucuaa

SEQ ID NO: 922463 - RNA, 19 nt, Artificial Sequence
  Description of Artificial Sequence: Synthetic oligonucleotide
  Antisense strand to SEQ ID NO: 922462
uuagaccuugggagacucc

SEQ ID NO: 922464 - RNA, 19 nt, Artificial Sequence
  Description of Artificial Sequence: Synthetic oligonucleotide
  Sense strand starting at position 3067 of SEQ ID NO: 913377
cgaauugugccuuacagga

SEQ ID NO: 922465 - RNA, 19 nt, Artificial Sequence
  Description of Artificial Sequence: Synthetic oligonucleotide
  Antisense strand to SEQ ID NO: 922464
uccuguaaggcacaauucg

SEQ ID NO: 922466 - RNA, 19 nt, Artificial Sequence
  Description of Artificial Sequence: Synthetic oligonucleotide
  Sense strand starting at position 77 of SEQ ID NO: 913377
aucaaugagucaucagucu

SEQ ID NO: 922467 - RNA, 19 nt, Artificial Sequence
  Description of Artificial Sequence: Synthetic oligonucleotide
  Antisense strand to SEQ ID NO: 922466
agacugaugacucauugau

SEQ ID NO: 922468 - RNA, 19 nt, Artificial Sequence
  Description of Artificial Sequence: Synthetic oligonucleotide
  Sense strand starting at position 3899 of SEQ ID NO: 913377
ucugauuuguuugugugua

SEQ ID NO: 922469 - RNA, 19 nt, Artificial Sequence
  Description of Artificial Sequence: Synthetic oligonucleotide
  Antisense strand to SEQ ID NO: 922468
uacacacaaacaaaucaga

SEQ ID NO: 922470 - RNA, 19 nt, Artificial Sequence
  Description of Artificial Sequence: Synthetic oligonucleotide
  Sense strand starting at position 2194 of SEQ ID NO: 913377
aggagugggaagcguuaaa

SEQ ID NO: 922471 - RNA, 19 nt, Artificial Sequence
  Description of Artificial Sequence: Synthetic oligonucleotide
  Antisense strand to SEQ ID NO: 922470
uuuaacgcuucccacuccu

SEQ ID NO: 922472 - RNA, 19 nt, Artificial Sequence
  Description of Artificial Sequence: Synthetic oligonucleotide
  Sense strand starting at position 654 of SEQ ID NO: 913377
augccuaaauagucgauaa

SEQ ID NO: 922473 - RNA, 19 nt, Artificial Sequence
  Description of Artificial Sequence: Synthetic oligonucleotide
  Antisense strand to SEQ ID NO: 922472
uuaucgacuauuuaggcau

SEQ ID NO: 922474 - RNA, 19 nt, Artificial Sequence
  Description of Artificial Sequence: Synthetic oligonucleotide
  Sense strand starting at position 2799 of SEQ ID NO: 913377
ucuagaauacagugagugu

SEQ ID NO: 922475 - RNA, 19 nt, Artificial Sequence
  Description of Artificial Sequence: Synthetic oligonucleotide
  Antisense strand to SEQ ID NO: 922474
acacucacuguauucuaga

SEQ ID NO: 922476 - RNA, 19 nt, Artificial Sequence
  Description of Artificial Sequence: Synthetic oligonucleotide
  Sense strand starting at position 1158 of SEQ ID NO: 913377
ccgguuuaaggucaacagu

SEQ ID NO: 922477 - RNA, 19 nt, Artificial Sequence
  Description of Artificial Sequence: Synthetic oligonucleotide
  Antisense strand to SEQ ID NO: 922476
acuguugaccuuaaaccgg

SEQ ID NO: 922478 - RNA, 19 nt, Artificial Sequence
  Description of Artificial Sequence: Synthetic oligonucleotide
  Sense strand starting at position 93 of SEQ ID NO: 913377
ucuucuccagcuugaugaa

SEQ ID NO: 922479 - RNA, 19 nt, Artificial Sequence
  Description of Artificial Sequence: Synthetic oligonucleotide
  Antisense strand to SEQ ID NO: 922478
uucaucaagcuggagaaga

SEQ ID NO: 922480 - RNA, 19 nt, Artificial Sequence
  Description of Artificial Sequence: Synthetic oligonucleotide
  Sense strand starting at position 1168 of SEQ ID NO: 913377
gucaacaguccucgaggga

SEQ ID NO: 922481 - RNA, 19 nt, Artificial Sequence
  Description of Artificial Sequence: Synthetic oligonucleotide
  Antisense strand to SEQ ID NO: 922480
ucccucgaggacuguugac

SEQ ID NO: 922482 - RNA, 19 nt, Artificial Sequence
  Description of Artificial Sequence: Synthetic oligonucleotide
  Sense strand starting at position 3587 of SEQ ID NO: 913377
cagccuaaucucggaugau

SEQ ID NO: 922483 - RNA, 19 nt, Artificial Sequence
  Description of Artificial Sequence: Synthetic oligonucleotide
  Antisense strand to SEQ ID NO: 922482
aucauccgagauuaggcug

SEQ ID NO: 922484 - RNA, 19 nt, Artificial Sequence
  Description of Artificial Sequence: Synthetic oligonucleotide
  Sense strand starting at position 3454 of SEQ ID NO: 913377
auaggaaugcgcugauaac

SEQ ID NO: 922485 - RNA, 19 nt, Artificial Sequence
  Description of Artificial Sequence: Synthetic oligonucleotide
  Antisense strand to SEQ ID NO: 922484
guuaucagcgcauuccuau

SEQ ID NO: 922486 - RNA, 19 nt, Artificial Sequence
  Description of Artificial Sequence: Synthetic oligonucleotide
  Sense strand starting at position 2596 of SEQ ID NO: 913377
cagggucauuguccaaagu

SEQ ID NO: 922487 - RNA, 19 nt, Artificial Sequence
  Description of Artificial Sequence: Synthetic oligonucleotide
  Antisense strand to SEQ ID NO: 922486
acuuuggacaaugacccug

SEQ ID NO: 922488 - RNA, 19 nt, Artificial Sequence
  Description of Artificial Sequence: Synthetic oligonucleotide
  Sense strand starting at position 1146 of SEQ ID NO: 913377
agaagaaaguguccgguuu

SEQ ID NO: 922489 - RNA, 19 nt, Artificial Sequence
  Description of Artificial Sequence: Synthetic oligonucleotide
  Antisense strand to SEQ ID NO: 922488
aaaccggacacuuucuucu

SEQ ID NO: 922490 - RNA, 19 nt, Artificial Sequence
  Description of Artificial Sequence: Synthetic oligonucleotide
  Sense strand starting at position 1147 of SEQ ID NO: 913377
gaagaaaguguccgguuua

SEQ ID NO: 922491 - RNA, 19 nt, Artificial Sequence
  Description of Artificial Sequence: Synthetic oligonucleotide
  Antisense strand to SEQ ID NO: 922490
uaaaccggacacuuucuuc

SEQ ID NO: 922492 - RNA, 19 nt, Artificial Sequence
  Description of Artificial Sequence: Synthetic oligonucleotide
  Sense strand starting at position 3172 of SEQ ID NO: 913377
guguuaagauagucuccau

SEQ ID NO: 922493 - RNA, 19 nt, Artificial Sequence
  Description of Artificial Sequence: Synthetic oligonucleotide
  Antisense strand to SEQ ID NO: 922492
auggagacuaucuuaacac

SEQ ID NO: 922494 - RNA, 19 nt, Artificial Sequence
  Description of Artificial Sequence: Synthetic oligonucleotide
  Sense strand starting at position 3248 of SEQ ID NO: 913377
ugucucuaucguugcauuu

SEQ ID NO: 922495 - RNA, 19 nt, Artificial Sequence
  Description of Artificial Sequence: Synthetic oligonucleotide
  Antisense strand to SEQ ID NO: 922494
aaaugcaacgauagagaca

SEQ ID NO: 922496 - RNA, 19 nt, Artificial Sequence
  Description of Artificial Sequence: Synthetic oligonucleotide
  Sense strand starting at position 787 of SEQ ID NO: 913377
uuucgauaaagguguacuu

SEQ ID NO: 922497 - RNA, 19 nt, Artificial Sequence
  Description of Artificial Sequence: Synthetic oligonucleotide
  Antisense strand to SEQ ID NO: 922496
aaguacaccuuuaucgaaa

SEQ ID NO: 922498 - RNA, 19 nt, Artificial Sequence
  Description of Artificial Sequence: Synthetic oligonucleotide
  Sense strand starting at position 2535 of SEQ ID NO: 913377
gaaccaguccgucagcauu

SEQ ID NO: 922499 - RNA, 19 nt, Artificial Sequence
  Description of Artificial Sequence: Synthetic oligonucleotide
  Antisense strand to SEQ ID NO: 922498
aaugcugacggacugguuc

SEQ ID NO: 922500 - RNA, 19 nt, Artificial Sequence
  Description of Artificial Sequence: Synthetic oligonucleotide
  Sense strand starting at position 3388 of SEQ ID NO: 913378
acaaguacugagcauauua

SEQ ID NO: 922501 - RNA, 19 nt, Artificial Sequence
  Description of Artificial Sequence: Synthetic oligonucleotide
  Antisense strand to SEQ ID NO: 922500
uaauaugcucaguacuugu

SEQ ID NO: 922502 - RNA, 19 nt, Artificial Sequence
  Description of Artificial Sequence: Synthetic oligonucleotide
  Sense strand starting at position 1506 of SEQ ID NO: 913378
gauuauaacuggguccaaa

SEQ ID NO: 922503 - RNA, 19 nt, Artificial Sequence
  Description of Artificial Sequence: Synthetic oligonucleotide
  Antisense strand to SEQ ID NO: 922502
uuuggacccaguuauaauc

SEQ ID NO: 922504 - RNA, 19 nt, Artificial Sequence
  Description of Artificial Sequence: Synthetic oligonucleotide
  Sense strand starting at position 854 of SEQ ID NO: 913378
ccugaagacuucuuggaac

SEQ ID NO: 922505 - RNA, 19 nt, Artificial Sequence
  Description of Artificial Sequence: Synthetic oligonucleotide
  Antisense strand to SEQ ID NO: 922504
guuccaagaagucuucagg

SEQ ID NO: 922506 - RNA, 19 nt, Artificial Sequence
  Description of Artificial Sequence: Synthetic oligonucleotide
  Sense strand starting at position 1024 of SEQ ID NO: 913378
ccugucaugguauaagaau

SEQ ID NO: 922507 - RNA, 19 nt, Artificial Sequence
  Description of Artificial Sequence: Synthetic oligonucleotide
  Antisense strand to SEQ ID NO: 922506
auucuuauaccaugacagg

SEQ ID NO: 922508 - RNA, 19 nt, Artificial Sequence
  Description of Artificial Sequence: Synthetic oligonucleotide
  Sense strand starting at position 2452 of SEQ ID NO: 913378
acggguuuaaaugaucacu

SEQ ID NO: 922509 - RNA, 19 nt, Artificial Sequence
  Description of Artificial Sequence: Synthetic oligonucleotide
  Antisense strand to SEQ ID NO: 922508
agugaucauuuaaacccgu

SEQ ID NO: 922510 - RNA, 19 nt, Artificial Sequence
  Description of Artificial Sequence: Synthetic oligonucleotide
  Sense strand starting at position 1333 of SEQ ID NO: 913378
acaagauuguuccugggag

SEQ ID NO: 922511 - RNA, 19 nt, Artificial Sequence
  Description of Artificial Sequence: Synthetic oligonucleotide
  Antisense strand to SEQ ID NO: 922510
cucccaggaacaaucuugu

SEQ ID NO: 922512 - RNA, 19 nt, Artificial Sequence
  Description of Artificial Sequence: Synthetic oligonucleotide
  Sense strand starting at position 751 of SEQ ID NO: 913378
ccagacuaauacucaguga

SEQ ID NO: 922513 - RNA, 19 nt, Artificial Sequence
  Description of Artificial Sequence: Synthetic oligonucleotide
  Antisense strand to SEQ ID NO: 922512
ucacugaguauuagucugg

SEQ ID NO: 922514 - RNA, 19 nt, Artificial Sequence
  Description of Artificial Sequence: Synthetic oligonucleotide
  Sense strand starting at position 3668 of SEQ ID NO: 913378
aaaccaagaucgcugaaga

SEQ ID NO: 922515 - RNA, 19 nt, Artificial Sequence
  Description of Artificial Sequence: Synthetic oligonucleotide
  Antisense strand to SEQ ID NO: 922514
ucuucagcgaucuugguuu

SEQ ID NO: 922516 - RNA, 19 nt, Artificial Sequence
  Description of Artificial Sequence: Synthetic oligonucleotide
  Sense strand starting at position 1432 of SEQ ID NO: 913378
aggagaaugugagucauug

SEQ ID NO: 922517 - RNA, 19 nt, Artificial Sequence
  Description of Artificial Sequence: Synthetic oligonucleotide
  Antisense strand to SEQ ID NO: 922516
caaugacucacauucuccu

SEQ ID NO: 922518 - RNA, 19 nt, Artificial Sequence
  Description of Artificial Sequence: Synthetic oligonucleotide
  Sense strand starting at position 774 of SEQ ID NO: 913378
aaguguggauacuuagaca

SEQ ID NO: 922519 - RNA, 19 nt, Artificial Sequence
  Description of Artificial Sequence: Synthetic oligonucleotide
  Antisense strand to SEQ ID NO: 922518
ugucuaaguauccacacuu

SEQ ID NO: 922520 - RNA, 19 nt, Artificial Sequence
  Description of Artificial Sequence: Synthetic oligonucleotide
  Sense strand starting at position 1505 of SEQ ID NO: 913378
ugauuauaacuggguccaa

SEQ ID NO: 922521 - RNA, 19 nt, Artificial Sequence
  Description of Artificial Sequence: Synthetic oligonucleotide
  Antisense strand to SEQ ID NO: 922520
uuggacccaguuauaauca

SEQ ID NO: 922522 - RNA, 19 nt, Artificial Sequence
  Description of Artificial Sequence: Synthetic oligonucleotide
  Sense strand starting at position 2455 of SEQ ID NO: 913378
gguuuaaaugaucacugca

SEQ ID NO: 922523 - RNA, 19 nt, Artificial Sequence
  Description of Artificial Sequence: Synthetic oligonucleotide
  Antisense strand to SEQ ID NO: 922522
ugcagugaucauuuaaacc

SEQ ID NO: 922524 - RNA, 19 nt, Artificial Sequence
  Description of Artificial Sequence: Synthetic oligonucleotide
  Sense strand starting at position 1412 of SEQ ID NO: 913378
cuauucuggcuggaaacuu

SEQ ID NO: 922525 - RNA, 19 nt, Artificial Sequence
  Description of Artificial Sequence: Synthetic oligonucleotide
  Antisense strand to SEQ ID NO: 922524
aaguuuccagccagaauag

SEQ ID NO: 922526 - RNA, 19 nt, Artificial Sequence
  Description of Artificial Sequence: Synthetic oligonucleotide
  Sense strand starting at position 1654 of SEQ ID NO: 913378
cguggaguuauuuggcaga

SEQ ID NO: 922527 - RNA, 19 nt, Artificial Sequence
  Description of Artificial Sequence: Synthetic oligonucleotide
  Antisense strand to SEQ ID NO: 922526
ucugccaaauaacuccacg

SEQ ID NO: 922528 - RNA, 19 nt, Artificial Sequence
  Description of Artificial Sequence: Synthetic oligonucleotide
  Sense strand starting at position 2617 of SEQ ID NO: 913378
aagacaaggucauauuuga

SEQ ID NO: 922529 - RNA, 19 nt, Artificial Sequence
  Description of Artificial Sequence: Synthetic oligonucleotide
  Antisense strand to SEQ ID NO: 922528
ucaaauaugaccuugucuu

SEQ ID NO: 922530 - RNA, 19 nt, Artificial Sequence
  Description of Artificial Sequence: Synthetic oligonucleotide
  Sense strand starting at position 2226 of SEQ ID NO: 913378
agccgauaacuggaacagu

SEQ ID NO: 922531 - RNA, 19 nt, Artificial Sequence
  Description of Artificial Sequence: Synthetic oligonucleotide
  Antisense strand to SEQ ID NO: 922530
acuguuccaguuaucggcu

SEQ ID NO: 922532 - RNA, 19 nt, Artificial Sequence
  Description of Artificial Sequence: Synthetic oligonucleotide
  Sense strand starting at position 1907 of SEQ ID NO: 913378
ccacuucugucagccauuu

SEQ ID NO: 922533 - RNA, 19 nt, Artificial Sequence
  Description of Artificial Sequence: Synthetic oligonucleotide
  Antisense strand to SEQ ID NO: 922532
aaauggcugacagaagugg

SEQ ID NO: 922534 - RNA, 19 nt, Artificial Sequence
  Description of Artificial Sequence: Synthetic oligonucleotide
  Sense strand starting at position 1427 of SEQ ID NO: 913378
acuuuaggagaaugugagu

SEQ ID NO: 922535 - RNA, 19 nt, Artificial Sequence
  Description of Artificial Sequence: Synthetic oligonucleotide
  Antisense strand to SEQ ID NO: 922534
acucacauucuccuaaagu

SEQ ID NO: 922536 - RNA, 19 nt, Artificial Sequence
  Description of Artificial Sequence: Synthetic oligonucleotide
  Sense strand starting at position 1708 of SEQ ID NO: 913378
gcgcgugaccuccuucaca

SEQ ID NO: 922537 - RNA, 19 nt, Artificial Sequence
  Description of Artificial Sequence: Synthetic oligonucleotide
  Antisense strand to SEQ ID NO: 922536
ugugaaggaggucacgcgc

SEQ ID NO: 922538 - RNA, 19 nt, Artificial Sequence
  Description of Artificial Sequence: Synthetic oligonucleotide
  Sense strand starting at position 1434 of SEQ ID NO: 913378
gagaaugugagucauuguu

SEQ ID NO: 922539 - RNA, 19 nt, Artificial Sequence
  Description of Artificial Sequence: Synthetic oligonucleotide
  Antisense strand to SEQ ID NO: 922538
aacaaugacucacauucuc

SEQ ID NO: 922540 - RNA, 19 nt, Artificial Sequence
  Description of Artificial Sequence: Synthetic oligonucleotide
  Sense strand starting at position 1547 of SEQ ID NO: 913378
agaccuguuccuugaacag

SEQ ID NO: 922541 - RNA, 19 nt, Artificial Sequence
  Description of Artificial Sequence: Synthetic oligonucleotide
  Antisense strand to SEQ ID NO: 922540
cuguucaaggaacaggucu

SEQ ID NO: 922542 - RNA, 19 nt, Artificial Sequence
  Description of Artificial Sequence: Synthetic oligonucleotide
  Sense strand starting at position 1527 of SEQ ID NO: 913378
ucugauuggcaucacgaau

SEQ ID NO: 922543 - RNA, 19 nt, Artificial Sequence
  Description of Artificial Sequence: Synthetic oligonucleotide
  Antisense strand to SEQ ID NO: 922542
auucgugaugccaaucaga

SEQ ID NO: 922544 - RNA, 19 nt, Artificial Sequence
  Description of Artificial Sequence: Synthetic oligonucleotide
  Sense strand starting at position 2586 of SEQ ID NO: 913378
uaaagagggucuuugcaga

SEQ ID NO: 922545 - RNA, 19 nt, Artificial Sequence
  Description of Artificial Sequence: Synthetic oligonucleotide
  Antisense strand to SEQ ID NO: 922544
ucugcaaagacccucuuua

SEQ ID NO: 922546 - RNA, 19 nt, Artificial Sequence
  Description of Artificial Sequence: Synthetic oligonucleotide
  Sense strand starting at position 3418 of SEQ ID NO: 913378
agguguaguaaccaucauu

SEQ ID NO: 922547 - RNA, 19 nt, Artificial Sequence
  Description of Artificial Sequence: Synthetic oligonucleotide
  Antisense strand to SEQ ID NO: 922546
aaugaugguuacuacaccu

SEQ ID NO: 922548 - RNA, 19 nt, Artificial Sequence
  Description of Artificial Sequence: Synthetic oligonucleotide
  Sense strand starting at position 1325 of SEQ ID NO: 913378
gcggaaucacaagauuguu

SEQ ID NO: 922549 - RNA, 19 nt, Artificial Sequence
  Description of Artificial Sequence: Synthetic oligonucleotide
  Antisense strand to SEQ ID NO: 922548
aacaaucuugugauuccgc

SEQ ID NO: 922550 - RNA, 19 nt, Artificial Sequence
  Description of Artificial Sequence: Synthetic oligonucleotide
  Sense strand starting at position 2411 of SEQ ID NO: 913378
gcauuacggguuuaaauga

SEQ ID NO: 922551 - RNA, 19 nt, Artificial Sequence
  Description of Artificial Sequence: Synthetic oligonucleotide
  Antisense strand to SEQ ID NO: 922550
ucauuuaaacccguaaugc

SEQ ID NO: 922552 - RNA, 19 nt, Artificial Sequence
  Description of Artificial Sequence: Synthetic oligonucleotide
  Sense strand starting at position 3251 of SEQ ID NO: 913378
guuuguaguauuugucaca

SEQ ID NO: 922553 - RNA, 19 nt, Artificial Sequence
  Description of Artificial Sequence: Synthetic oligonucleotide
  Antisense strand to SEQ ID NO: 922552
ugugacaaauacuacaaac

SEQ ID NO: 922554 - RNA, 19 nt, Artificial Sequence
  Description of Artificial Sequence: Synthetic oligonucleotide
  Sense strand starting at position 1496 of SEQ ID NO: 913378
gucugaccuugauuauaac

SEQ ID NO: 922555 - RNA, 19 nt, Artificial Sequence
  Description of Artificial Sequence: Synthetic oligonucleotide
  Antisense strand to SEQ ID NO: 922554
guuauaaucaaggucagac

SEQ ID NO: 922556 - RNA, 19 nt, Artificial Sequence
  Description of Artificial Sequence: Synthetic oligonucleotide
  Sense strand starting at position 765 of SEQ ID NO: 913378
agugaaaucaaguguggau

SEQ ID NO: 922557 - RNA, 19 nt, Artificial Sequence
  Description of Artificial Sequence: Synthetic oligonucleotide
  Antisense strand to SEQ ID NO: 922556
auccacacuugauuucacu

SEQ ID NO: 922558 - RNA, 19 nt, Artificial Sequence
  Description of Artificial Sequence: Synthetic oligonucleotide
  Sense strand starting at position 2560 of SEQ ID NO: 913378
aggaucugugaaugugacu

SEQ ID NO: 922559 - RNA, 19 nt, Artificial Sequence
  Description of Artificial Sequence: Synthetic oligonucleotide
  Antisense strand to SEQ ID NO: 922558
agucacauucacagauccu

SEQ ID NO: 922560 - RNA, 19 nt, Artificial Sequence
  Description of Artificial Sequence: Synthetic oligonucleotide
  Sense strand starting at position 660 of SEQ ID NO: 913378
acuguuccacuguauuaua

SEQ ID NO: 922561 - RNA, 19 nt, Artificial Sequence
  Description of Artificial Sequence: Synthetic oligonucleotide
  Antisense strand to SEQ ID NO: 922560
uauaauacaguggaacagu

SEQ ID NO: 922562 - RNA, 19 nt, Artificial Sequence
  Description of Artificial Sequence: Synthetic oligonucleotide
  Sense strand starting at position 1493 of SEQ ID NO: 913378
acagucugaccuugauuau

SEQ ID NO: 922563 - RNA, 19 nt, Artificial Sequence
  Description of Artificial Sequence: Synthetic oligonucleotide
  Antisense strand to SEQ ID NO: 922562
auaaucaaggucagacugu

SEQ ID NO: 922564 - RNA, 19 nt, Artificial Sequence
  Description of Artificial Sequence: Synthetic oligonucleotide
  Sense strand starting at position 1615 of SEQ ID NO: 913378
uucuguugaucucugaaga

SEQ ID NO: 922565 - RNA, 19 nt, Artificial Sequence
  Description of Artificial Sequence: Synthetic oligonucleotide
  Antisense strand to SEQ ID NO: 922564
ucuucagagaucaacagaa

SEQ ID NO: 922566 - RNA, 19 nt, Artificial Sequence
  Description of Artificial Sequence: Synthetic oligonucleotide
  Sense strand starting at position 1490 of SEQ ID NO: 913378
uugacagucugaccuugau

SEQ ID NO: 922567 - RNA, 19 nt, Artificial Sequence
  Description of Artificial Sequence: Synthetic oligonucleotide
  Antisense strand to SEQ ID NO: 922566
aucaaggucagacugucaa

SEQ ID NO: 922568 - RNA, 19 nt, Artificial Sequence
  Description of Artificial Sequence: Synthetic oligonucleotide
  Sense strand starting at position 1616 of SEQ ID NO: 913378
ucuguugaucucugaagau

SEQ ID NO: 922569 - RNA, 19 nt, Artificial Sequence
  Description of Artificial Sequence: Synthetic oligonucleotide
  Antisense strand to SEQ ID NO: 922568
aucuucagagaucaacaga

SEQ ID NO: 922570 - RNA, 19 nt, Artificial Sequence
  Description of Artificial Sequence: Synthetic oligonucleotide
  Sense strand starting at position 2574 of SEQ ID NO: 913378
ugacuuuauuuguaaagag

SEQ ID NO: 922571 - RNA, 19 nt, Artificial Sequence
  Description of Artificial Sequence: Synthetic oligonucleotide
  Antisense strand to SEQ ID NO: 922570
cucuuuacaaauaaaguca

SEQ ID NO: 922572 - RNA, 19 nt, Artificial Sequence
  Description of Artificial Sequence: Synthetic oligonucleotide
  Sense strand starting at position 3494 of SEQ ID NO: 913378
gucaauuagucacugauac

SEQ ID NO: 922573 - RNA, 19 nt, Artificial Sequence
  Description of Artificial Sequence: Synthetic oligonucleotide
  Antisense strand to SEQ ID NO: 922572
guaucagugacuaauugac

SEQ ID NO: 922574 - RNA, 19 nt, Artificial Sequence
  Description of Artificial Sequence: Synthetic oligonucleotide
  Sense strand starting at position 670 of SEQ ID NO: 913378
uguauuauagccuaggcaa

SEQ ID NO: 922575 - RNA, 19 nt, Artificial Sequence
  Description of Artificial Sequence: Synthetic oligonucleotide
  Antisense strand to SEQ ID NO: 922574
uugccuaggcuauaauaca

SEQ ID NO: 922576 - RNA, 19 nt, Artificial Sequence
  Description of Artificial Sequence: Synthetic oligonucleotide
  Sense strand starting at position 2902 of SEQ ID NO: 913378
ugaaguugugguggaccaa

SEQ ID NO: 922577 - RNA, 19 nt, Artificial Sequence
  Description of Artificial Sequence: Synthetic oligonucleotide
  Antisense strand to SEQ ID NO: 922576
uugguccaccacaacuuca

SEQ ID NO: 922578 - RNA, 19 nt, Artificial Sequence
  Description of Artificial Sequence: Synthetic oligonucleotide
  Sense strand starting at position 1411 of SEQ ID NO: 913378
ccuauucuggcuggaaacu

SEQ ID NO: 922579 - RNA, 19 nt, Artificial Sequence
  Description of Artificial Sequence: Synthetic oligonucleotide
  Antisense strand to SEQ ID NO: 922578
aguuuccagccagaauagg

SEQ ID NO: 922580 - RNA, 19 nt, Artificial Sequence
  Description of Artificial Sequence: Synthetic oligonucleotide
  Sense strand starting at position 2765 of SEQ ID NO: 913379
agccauaggucauuucuuu

SEQ ID NO: 922581 - RNA, 19 nt, Artificial Sequence
  Description of Artificial Sequence: Synthetic oligonucleotide
  Antisense strand to SEQ ID NO: 922580
aaagaaaugaccuauggcu

SEQ ID NO: 922582 - RNA, 19 nt, Artificial Sequence
  Description of Artificial Sequence: Synthetic oligonucleotide
  Sense strand starting at position 3064 of SEQ ID NO: 913379
uccucaaugguaggaauaa

SEQ ID NO: 922583 - RNA, 19 nt, Artificial Sequence
  Description of Artificial Sequence: Synthetic oligonucleotide
  Antisense strand to SEQ ID NO: 922582
uuauuccuaccauugagga

SEQ ID NO: 922584 - RNA, 19 nt, Artificial Sequence
  Description of Artificial Sequence: Synthetic oligonucleotide
  Sense strand starting at position 3135 of SEQ ID NO: 913379
gaggcaacauaugugagaa

SEQ ID NO: 922585 - RNA, 19 nt, Artificial Sequence
  Description of Artificial Sequence: Synthetic oligonucleotide
  Antisense strand to SEQ ID NO: 922584
uucucacauauguugccuc

SEQ ID NO: 922586 - RNA, 19 nt, Artificial Sequence
  Description of Artificial Sequence: Synthetic oligonucleotide
  Sense strand starting at position 1067 of SEQ ID NO: 913379
cugaguuacacugaggcaa

SEQ ID NO: 922587 - RNA, 19 nt, Artificial Sequence
  Description of Artificial Sequence: Synthetic oligonucleotide
  Antisense strand to SEQ ID NO: 922586
uugccucaguguaacucag

SEQ ID NO: 922588 - RNA, 19 nt, Artificial Sequence
  Description of Artificial Sequence: Synthetic oligonucleotide
  Sense strand starting at position 1560 of SEQ ID NO: 913379
ugaggaauucgcuaaccag

SEQ ID NO: 922589 - RNA, 19 nt, Artificial Sequence
  Description of Artificial Sequence: Synthetic oligonucleotide
  Antisense strand to SEQ ID NO: 922588
cugguuagcgaauuccuca

SEQ ID NO: 922590 - RNA, 19 nt, Artificial Sequence
  Description of Artificial Sequence: Synthetic oligonucleotide
  Sense strand starting at position 3522 of SEQ ID NO: 913379
uagucauuugugugacuau

SEQ ID NO: 922591 - RNA, 19 nt, Artificial Sequence
  Description of Artificial Sequence: Synthetic oligonucleotide
  Antisense strand to SEQ ID NO: 922590
auagucacacaaaugacua

SEQ ID NO: 922592 - RNA, 19 nt, Artificial Sequence
  Description of Artificial Sequence: Synthetic oligonucleotide
  Sense strand starting at position 998 of SEQ ID NO: 913379
uucccaagauucuuggaau

SEQ ID NO: 922593 - RNA, 19 nt, Artificial Sequence
  Description of Artificial Sequence: Synthetic oligonucleotide
  Antisense strand to SEQ ID NO: 922592
auuccaagaaucuugggaa

SEQ ID NO: 922594 - RNA, 19 nt, Artificial Sequence
  Description of Artificial Sequence: Synthetic oligonucleotide
  Sense strand starting at position 2071 of SEQ ID NO: 913379
accugaaccguuuaauaua

SEQ ID NO: 922595 - RNA, 19 nt, Artificial Sequence
  Description of Artificial Sequence: Synthetic oligonucleotide
  Antisense strand to SEQ ID NO: 922594
uauauuaaacgguucaggu

SEQ ID NO: 922596 - RNA, 19 nt, Artificial Sequence
  Description of Artificial Sequence: Synthetic oligonucleotide
  Sense strand starting at position 2772 of SEQ ID NO: 913379
ggucauuucuuucuuccuu

SEQ ID NO: 922597 - RNA, 19 nt, Artificial Sequence
  Description of Artificial Sequence: Synthetic oligonucleotide
  Antisense strand to SEQ ID NO: 922596
aaggaagaaagaaaugacc

SEQ ID NO: 922598 - RNA, 19 nt, Artificial Sequence
  Description of Artificial Sequence: Synthetic oligonucleotide
  Sense strand starting at position 2248 of SEQ ID NO: 913379
gucagaaaucaccagccua

SEQ ID NO: 922599 - RNA, 19 nt, Artificial Sequence
  Description of Artificial Sequence: Synthetic oligonucleotide
  Antisense strand to SEQ ID NO: 922598
uaggcuggugauuucugac

SEQ ID NO: 922600 - RNA, 19 nt, Artificial Sequence
  Description of Artificial Sequence: Synthetic oligonucleotide
  Sense strand starting at position 3113 of SEQ ID NO: 913379
acacuucuccuagggauua

SEQ ID NO: 922601 - RNA, 19 nt, Artificial Sequence
  Description of Artificial Sequence: Synthetic oligonucleotide
  Antisense strand to SEQ ID NO: 922600
uaaucccuaggagaagugu

SEQ ID NO: 922602 - RNA, 19 nt, Artificial Sequence
  Description of Artificial Sequence: Synthetic oligonucleotide
  Sense strand starting at position 3145 of SEQ ID NO: 913379
augugagaacauuguaaau

SEQ ID NO: 922603 - RNA, 19 nt, Artificial Sequence
  Description of Artificial Sequence: Synthetic oligonucleotide
  Antisense strand to SEQ ID NO: 922602
auuuacaauguucucacau

SEQ ID NO: 922604 - RNA, 19 nt, Artificial Sequence
  Description of Artificial Sequence: Synthetic oligonucleotide
  Sense strand starting at position 3404 of SEQ ID NO: 913379
augucacuggcucaaagau

SEQ ID NO: 922605 - RNA, 19 nt, Artificial Sequence
  Description of Artificial Sequence: Synthetic oligonucleotide
  Antisense strand to SEQ ID NO: 922604
aucuuugagccagugacau

SEQ ID NO: 922606 - RNA, 19 nt, Artificial Sequence
  Description of Artificial Sequence: Synthetic oligonucleotide
  Sense strand starting at position 2934 of SEQ ID NO: 913379
gcuggagucggucauuucu

SEQ ID NO: 922607 - RNA, 19 nt, Artificial Sequence
  Description of Artificial Sequence: Synthetic oligonucleotide
  Antisense strand to SEQ ID NO: 922606
agaaaugaccgacuccagc

SEQ ID NO: 922608 - RNA, 19 nt, Artificial Sequence
  Description of Artificial Sequence: Synthetic oligonucleotide
  Sense strand starting at position 3927 of SEQ ID NO: 913379
ugauaaauguguccaaaua

SEQ ID NO: 922609 - RNA, 19 nt, Artificial Sequence
  Description of Artificial Sequence: Synthetic oligonucleotide
  Antisense strand to SEQ ID NO: 922608
uauuuggacacauuuauca

SEQ ID NO: 922610 - RNA, 19 nt, Artificial Sequence
  Description of Artificial Sequence: Synthetic oligonucleotide
  Sense strand starting at position 3134 of SEQ ID NO: 913379
ugaggcaacauaugugaga

SEQ ID NO: 922611 - RNA, 19 nt, Artificial Sequence
  Description of Artificial Sequence: Synthetic oligonucleotide
  Antisense strand to SEQ ID NO: 922610
ucucacauauguugccuca

SEQ ID NO: 922612 - RNA, 19 nt, Artificial Sequence
  Description of Artificial Sequence: Synthetic oligonucleotide
  Sense strand starting at position 2317 of SEQ ID NO: 913379
cuuugaaagugacucauca

SEQ ID NO: 922613 - RNA, 19 nt, Artificial Sequence
  Description of Artificial Sequence: Synthetic oligonucleotide
  Antisense strand to SEQ ID NO: 922612
ugaugagucacuuucaaag

SEQ ID NO: 922614 - RNA, 19 nt, Artificial Sequence
  Description of Artificial Sequence: Synthetic oligonucleotide
  Sense strand starting at position 1434 of SEQ ID NO: 913379
gaagucgagagagguuuaa

SEQ ID NO: 922615 - RNA, 19 nt, Artificial Sequence
  Description of Artificial Sequence: Synthetic oligonucleotide
  Antisense strand to SEQ ID NO: 922614
uuaaaccucucucgacuuc

SEQ ID NO: 922616 - RNA, 19 nt, Artificial Sequence
  Description of Artificial Sequence: Synthetic oligonucleotide
  Sense strand starting at position 1176 of SEQ ID NO: 913379
ucgaaauucucuccugaaa

SEQ ID NO: 922617 - RNA, 19 nt, Artificial Sequence
  Description of Artificial Sequence: Synthetic oligonucleotide
  Antisense strand to SEQ ID NO: 922616
uuucaggagagaauuucga

SEQ ID NO: 922618 - RNA, 19 nt, Artificial Sequence
  Description of Artificial Sequence: Synthetic oligonucleotide
  Sense strand starting at position 3413 of SEQ ID NO: 913379
gcucaaagaucuuccauga

SEQ ID NO: 922619 - RNA, 19 nt, Artificial Sequence
  Description of Artificial Sequence: Synthetic oligonucleotide
  Antisense strand to SEQ ID NO: 922618
ucauggaagaucuuugagc

SEQ ID NO: 922620 - RNA, 19 nt, Artificial Sequence
  Description of Artificial Sequence: Synthetic oligonucleotide
  Sense strand starting at position 3949 of SEQ ID NO: 913379
uugcauuuaguuugauguu

SEQ ID NO: 922621 - RNA, 19 nt, Artificial Sequence
  Description of Artificial Sequence: Synthetic oligonucleotide
  Antisense strand to SEQ ID NO: 922620
aacaucaaacuaaaugcaa

SEQ ID NO: 922622 - RNA, 19 nt, Artificial Sequence
  Description of Artificial Sequence: Synthetic oligonucleotide
  Sense strand starting at position 3925 of SEQ ID NO: 913379
uuugauaaauguguccaaa

SEQ ID NO: 922623 - RNA, 19 nt, Artificial Sequence
  Description of Artificial Sequence: Synthetic oligonucleotide
  Antisense strand to SEQ ID NO: 922622
uuuggacacauuuaucaaa

SEQ ID NO: 922624 - RNA, 19 nt, Artificial Sequence
  Description of Artificial Sequence: Synthetic oligonucleotide
  Sense strand starting at position 1016 of SEQ ID NO: 913379
ucucuuauucgguacaaau

SEQ ID NO: 922625 - RNA, 19 nt, Artificial Sequence
  Description of Artificial Sequence: Synthetic oligonucleotide
  Antisense strand to SEQ ID NO: 922624
auuuguaccgaauaagaga

SEQ ID NO: 922626 - RNA, 19 nt, Artificial Sequence
  Description of Artificial Sequence: Synthetic oligonucleotide
  Sense strand starting at position 1358 of SEQ ID NO: 913379
cuuuaaauggauugucuua

SEQ ID NO: 922627 - RNA, 19 nt, Artificial Sequence
  Description of Artificial Sequence: Synthetic oligonucleotide
  Antisense strand to SEQ ID NO: 922626
uaagacaauccauuuaaag

SEQ ID NO: 922628 - RNA, 19 nt, Artificial Sequence
  Description of Artificial Sequence: Synthetic oligonucleotide
  Sense strand starting at position 1549 of SEQ ID NO: 913379
gugugcaacagugaggaau

SEQ ID NO: 922629 - RNA, 19 nt, Artificial Sequence
  Description of Artificial Sequence: Synthetic oligonucleotide
  Antisense strand to SEQ ID NO: 922628
auuccucacuguugcacac

SEQ ID NO: 922630 - RNA, 19 nt, Artificial Sequence
  Description of Artificial Sequence: Synthetic oligonucleotide
  Sense strand starting at position 1247 of SEQ ID NO: 913379
ucaugauguccuggacuac

SEQ ID NO: 922631 - RNA, 19 nt, Artificial Sequence
  Description of Artificial Sequence: Synthetic oligonucleotide
  Antisense strand to SEQ ID NO: 922630
guaguccaggacaucauga

SEQ ID NO: 922632 - RNA, 19 nt, Artificial Sequence
  Description of Artificial Sequence: Synthetic oligonucleotide
  Sense strand starting at position 1291 of SEQ ID NO: 913379
gcuguucuacuaggaagaa

SEQ ID NO: 922633 - RNA, 19 nt, Artificial Sequence
  Description of Artificial Sequence: Synthetic oligonucleotide
  Antisense strand to SEQ ID NO: 922632
uucuuccuaguagaacagc

SEQ ID NO: 922634 - RNA, 19 nt, Artificial Sequence
  Description of Artificial Sequence: Synthetic oligonucleotide
  Sense strand starting at position 2324 of SEQ ID NO: 913379
agugacucaucacuuucua

SEQ ID NO: 922635 - RNA, 19 nt, Artificial Sequence
  Description of Artificial Sequence: Synthetic oligonucleotide
  Antisense strand to SEQ ID NO: 922634
uagaaagugaugagucacu

SEQ ID NO: 922636 - RNA, 19 nt, Artificial Sequence
  Description of Artificial Sequence: Synthetic oligonucleotide
  Sense strand starting at position 988 of SEQ ID NO: 913379
aguuauuaguuucccaaga

SEQ ID NO: 922637 - RNA, 19 nt, Artificial Sequence
  Description of Artificial Sequence: Synthetic oligonucleotide
  Antisense strand to SEQ ID NO: 922636
ucuugggaaacuaauaacu

SEQ ID NO: 922638 - RNA, 19 nt, Artificial Sequence
  Description of Artificial Sequence: Synthetic oligonucleotide
  Sense strand starting at position 1517 of SEQ ID NO: 913379
cacaaagugccucggagaa

SEQ ID NO: 922639 - RNA, 19 nt, Artificial Sequence
  Description of Artificial Sequence: Synthetic oligonucleotide
  Antisense strand to SEQ ID NO: 922638
uucuccgaggcacuuugug

SEQ ID NO: 922640 - RNA, 19 nt, Artificial Sequence
  Description of Artificial Sequence: Synthetic oligonucleotide
  Sense strand starting at position 1015 of SEQ ID NO: 913379
aucucuuauucgguacaaa

SEQ ID NO: 922641 - RNA, 19 nt, Artificial Sequence
  Description of Artificial Sequence: Synthetic oligonucleotide
  Antisense strand to SEQ ID NO: 922640
uuuguaccgaauaagagau

SEQ ID NO: 922642 - RNA, 19 nt, Artificial Sequence
  Description of Artificial Sequence: Synthetic oligonucleotide
  Sense strand starting at position 1174 of SEQ ID NO: 913379
ccucgaaauucucuccuga

SEQ ID NO: 922643 - RNA, 19 nt, Artificial Sequence
  Description of Artificial Sequence: Synthetic oligonucleotide
  Antisense strand to SEQ ID NO: 922642
ucaggagagaauuucgagg

SEQ ID NO: 922644 - RNA, 19 nt, Artificial Sequence
  Description of Artificial Sequence: Synthetic oligonucleotide
  Sense strand starting at position 1165 of SEQ ID NO: 913379
gcaacaccaccucgaaauu

SEQ ID NO: 922645 - RNA, 19 nt, Artificial Sequence
  Description of Artificial Sequence: Synthetic oligonucleotide
  Antisense strand to SEQ ID NO: 922644
aauuucgaggugguguugc

SEQ ID NO: 922646 - RNA, 19 nt, Artificial Sequence
  Description of Artificial Sequence: Synthetic oligonucleotide
  Sense strand starting at position 3147 of SEQ ID NO: 913379
gugagaacauuguaaauuu

SEQ ID NO: 922647 - RNA, 19 nt, Artificial Sequence
  Description of Artificial Sequence: Synthetic oligonucleotide
  Antisense strand to SEQ ID NO: 922646
aaauuuacaauguucucac

SEQ ID NO: 922648 - RNA, 19 nt, Artificial Sequence
  Description of Artificial Sequence: Synthetic oligonucleotide
  Sense strand starting at position 989 of SEQ ID NO: 913379
guuauuaguuucccaagau

SEQ ID NO: 922649 - RNA, 19 nt, Artificial Sequence
  Description of Artificial Sequence: Synthetic oligonucleotide
  Antisense strand to SEQ ID NO: 922648
aucuugggaaacuaauaac

SEQ ID NO: 922650 - RNA, 19 nt, Artificial Sequence
  Description of Artificial Sequence: Synthetic oligonucleotide
  Sense strand starting at position 3229 of SEQ ID NO: 913379
cuguauugauccuucugau

SEQ ID NO: 922651 - RNA, 19 nt, Artificial Sequence
  Description of Artificial Sequence: Synthetic oligonucleotide
  Antisense strand to SEQ ID NO: 922650
aucagaaggaucaauacag

SEQ ID NO: 922652 - RNA, 19 nt, Artificial Sequence
  Description of Artificial Sequence: Synthetic oligonucleotide
  Sense strand starting at position 1331 of SEQ ID NO: 913379
gucauuaucggcuaaacuc

SEQ ID NO: 922653 - RNA, 19 nt, Artificial Sequence
  Description of Artificial Sequence: Synthetic oligonucleotide
  Antisense strand to SEQ ID NO: 922652
gaguuuagccgauaaugac

SEQ ID NO: 922654 - RNA, 19 nt, Artificial Sequence
  Description of Artificial Sequence: Synthetic oligonucleotide
  Sense strand starting at position 1011 of SEQ ID NO: 913379
uggaaucucuuauucggua

SEQ ID NO: 922655 - RNA, 19 nt, Artificial Sequence
  Description of Artificial Sequence: Synthetic oligonucleotide
  Antisense strand to SEQ ID NO: 922654
uaccgaauaagagauucca

SEQ ID NO: 922656 - RNA, 19 nt, Artificial Sequence
  Description of Artificial Sequence: Synthetic oligonucleotide
  Sense strand starting at position 1312 of SEQ ID NO: 913379
aaaucuauugcguagaguu

SEQ ID NO: 922657 - RNA, 19 nt, Artificial Sequence
  Description of Artificial Sequence: Synthetic oligonucleotide
  Antisense strand to SEQ ID NO: 922656
aacucuacgcaauagauuu

SEQ ID NO: 922658 - RNA, 19 nt, Artificial Sequence
  Description of Artificial Sequence: Synthetic oligonucleotide
  Sense strand starting at position 3035 of SEQ ID NO: 913379
gcaugacuuugucccaaac

SEQ ID NO: 922659 - RNA, 19 nt, Artificial Sequence
  Description of Artificial Sequence: Synthetic oligonucleotide
  Antisense strand to SEQ ID NO: 922658
guuugggacaaagucaugc

SEQ ID NO: 922660 - RNA, 19 nt, Artificial Sequence
  Description of Artificial Sequence: Synthetic oligonucleotide
  Sense strand starting at position 3726 of SEQ ID NO: 913380
uggccaauaugucuuauuu

SEQ ID NO: 922661 - RNA, 19 nt, Artificial Sequence
  Description of Artificial Sequence: Synthetic oligonucleotide
  Antisense strand to SEQ ID NO: 922660
aaauaagacauauuggcca

SEQ ID NO: 922662 - RNA, 19 nt, Artificial Sequence
  Description of Artificial Sequence: Synthetic oligonucleotide
  Sense strand starting at position 896 of SEQ ID NO: 913380
agaagcacgggucaauaua

SEQ ID NO: 922663 - RNA, 19 nt, Artificial Sequence
  Description of Artificial Sequence: Synthetic oligonucleotide
  Antisense strand to SEQ ID NO: 922662
uauauugacccgugcuucu

SEQ ID NO: 922664 - RNA, 19 nt, Artificial Sequence
  Description of Artificial Sequence: Synthetic oligonucleotide
  Sense strand starting at position 1926 of SEQ ID NO: 913380
aaaguuucugaugaggcau

SEQ ID NO: 922665 - RNA, 19 nt, Artificial Sequence
  Description of Artificial Sequence: Synthetic oligonucleotide
  Antisense strand to SEQ ID NO: 922664
augccucaucagaaacuuu

SEQ ID NO: 922666 - RNA, 19 nt, Artificial Sequence
  Description of Artificial Sequence: Synthetic oligonucleotide
  Sense strand starting at position 503 of SEQ ID NO: 913380
cuacauggauaauuguuaa

SEQ ID NO: 922667 - RNA, 19 nt, Artificial Sequence
  Description of Artificial Sequence: Synthetic oligonucleotide
  Antisense strand to SEQ ID NO: 922666
uuaacaauuauccauguag

SEQ ID NO: 922668 - RNA, 19 nt, Artificial Sequence
  Description of Artificial Sequence: Synthetic oligonucleotide
  Sense strand starting at position 3810 of SEQ ID NO: 913380
ggcagaugaagccaucuga

SEQ ID NO: 922669 - RNA, 19 nt, Artificial Sequence
  Description of Artificial Sequence: Synthetic oligonucleotide
  Antisense strand to SEQ ID NO: 922668
ucagauggcuucaucugcc

SEQ ID NO: 922670 - RNA, 19 nt, Artificial Sequence
  Description of Artificial Sequence: Synthetic oligonucleotide
  Sense strand starting at position 1246 of SEQ ID NO: 913380
uacuguacauaagugagaa

SEQ ID NO: 922671 - RNA, 19 nt, Artificial Sequence
  Description of Artificial Sequence: Synthetic oligonucleotide
  Antisense strand to SEQ ID NO: 922670
uucucacuuauguacagua

SEQ ID NO: 922672 - RNA, 19 nt, Artificial Sequence
  Description of Artificial Sequence: Synthetic oligonucleotide
  Sense strand starting at position 3177 of SEQ ID NO: 913380
gccucuauugaugaucaua

SEQ ID NO: 922673 - RNA, 19 nt, Artificial Sequence
  Description of Artificial Sequence: Synthetic oligonucleotide
  Antisense strand to SEQ ID NO: 922672
uaugaucaucaauagaggc

SEQ ID NO: 922674 - RNA, 19 nt, Artificial Sequence
  Description of Artificial Sequence: Synthetic oligonucleotide
  Sense strand starting at position 3776 of SEQ ID NO: 913380
aguguuauuucuucuguaa

SEQ ID NO: 922675 - RNA, 19 nt, Artificial Sequence
  Description of Artificial Sequence: Synthetic oligonucleotide
  Antisense strand to SEQ ID NO: 922674
uuacagaagaaauaacacu

SEQ ID NO: 922676 - RNA, 19 nt, Artificial Sequence
  Description of Artificial Sequence: Synthetic oligonucleotide
  Sense strand starting at position 2101 of SEQ ID NO: 913380
agcacucaucugcaagaag

SEQ ID NO: 922677 - RNA, 19 nt, Artificial Sequence
  Description of Artificial Sequence: Synthetic oligonucleotide
  Antisense strand to SEQ ID NO: 922676
cuucuugcagaugagugcu

SEQ ID NO: 922678 - RNA, 19 nt, Artificial Sequence
  Description of Artificial Sequence: Synthetic oligonucleotide
  Sense strand starting at position 3348 of SEQ ID NO: 913380
aagugagauuggucuuaaa

SEQ ID NO: 922679 - RNA, 19 nt, Artificial Sequence
  Description of Artificial Sequence: Synthetic oligonucleotide
  Antisense strand to SEQ ID NO: 922678
uuuaagaccaaucucacuu

SEQ ID NO: 922680 - RNA, 19 nt, Artificial Sequence
  Description of Artificial Sequence: Synthetic oligonucleotide
  Sense strand starting at position 2156 of SEQ ID NO: 913380
uguauuugccaaugcauag

SEQ ID NO: 922681 - RNA, 19 nt, Artificial Sequence
  Description of Artificial Sequence: Synthetic oligonucleotide
  Antisense strand to SEQ ID NO: 922680
cuaugcauuggcaaauaca

SEQ ID NO: 922682 - RNA, 19 nt, Artificial Sequence
  Description of Artificial Sequence: Synthetic oligonucleotide
  Sense strand starting at position 3881 of SEQ ID NO: 913380
guguuaugggacuacucac

SEQ ID NO: 922683 - RNA, 19 nt, Artificial Sequence
  Description of Artificial Sequence: Synthetic oligonucleotide
  Antisense strand to SEQ ID NO: 922682
gugaguagucccauaacac

SEQ ID NO: 922684 - RNA, 19 nt, Artificial Sequence
  Description of Artificial Sequence: Synthetic oligonucleotide
  Sense strand starting at position 209 of SEQ ID NO: 913380
guuuguauccauuaacaau

SEQ ID NO: 922685 - RNA, 19 nt, Artificial Sequence
  Description of Artificial Sequence: Synthetic oligonucleotide
  Antisense strand to SEQ ID NO: 922684
auuguuaauggauacaaac

SEQ ID NO: 922686 - RNA, 19 nt, Artificial Sequence
  Description of Artificial Sequence: Synthetic oligonucleotide
  Sense strand starting at position 3775 of SEQ ID NO: 913380
uaguguuauuucuucugua

SEQ ID NO: 922687 - RNA, 19 nt, Artificial Sequence
  Description of Artificial Sequence: Synthetic oligonucleotide
  Antisense strand to SEQ ID NO: 922686
uacagaagaaauaacacua

SEQ ID NO: 922688 - RNA, 19 nt, Artificial Sequence
  Description of Artificial Sequence: Synthetic oligonucleotide
  Sense strand starting at position 1913 of SEQ ID NO: 913380
uacauaagugcugaaaguu

SEQ ID NO: 922689 - RNA, 19 nt, Artificial Sequence
  Description of Artificial Sequence: Synthetic oligonucleotide
  Antisense strand to SEQ ID NO: 922688
aacuuucagcacuuaugua

SEQ ID NO: 922690 - RNA, 19 nt, Artificial Sequence
  Description of Artificial Sequence: Synthetic oligonucleotide
  Sense strand starting at position 2822 of SEQ ID NO: 913380
ugacaugaucaguaacgca

SEQ ID NO: 922691 - RNA, 19 nt, Artificial Sequence
  Description of Artificial Sequence: Synthetic oligonucleotide
  Antisense strand to SEQ ID NO: 922690
ugcguuacugaucauguca

SEQ ID NO: 922692 - RNA, 19 nt, Artificial Sequence
  Description of Artificial Sequence: Synthetic oligonucleotide
  Sense strand starting at position 695 of SEQ ID NO: 913380
aggaauguauguccucaag

SEQ ID NO: 922693 - RNA, 19 nt, Artificial Sequence
  Description of Artificial Sequence: Synthetic oligonucleotide
  Antisense strand to SEQ ID NO: 922692
cuugaggacauacauuccu

SEQ ID NO: 922694 - RNA, 19 nt, Artificial Sequence
  Description of Artificial Sequence: Synthetic oligonucleotide
  Sense strand starting at position 1934 of SEQ ID NO: 913380
ugaugaggcauugguaaau

SEQ ID NO: 922695 - RNA, 19 nt, Artificial Sequence
  Description of Artificial Sequence: Synthetic oligonucleotide
  Antisense strand to SEQ ID NO: 922694
auuuaccaaugccucauca

SEQ ID NO: 922696 - RNA, 19 nt, Artificial Sequence
  Description of Artificial Sequence: Synthetic oligonucleotide
  Sense strand starting at position 3130 of SEQ ID NO: 913380
guguauugguguuuaauuu

SEQ ID NO: 922697 - RNA, 19 nt, Artificial Sequence
  Description of Artificial Sequence: Synthetic oligonucleotide
  Antisense strand to SEQ ID NO: 922696
aaauuaaacaccaauacac

SEQ ID NO: 922698 - RNA, 19 nt, Artificial Sequence
  Description of Artificial Sequence: Synthetic oligonucleotide
  Sense strand starting at position 2978 of SEQ ID NO: 913380
ucaguuugcuauguuauuu

SEQ ID NO: 922699 - RNA, 19 nt, Artificial Sequence
  Description of Artificial Sequence: Synthetic oligonucleotide
  Antisense strand to SEQ ID NO: 922698
aaauaacauagcaaacuga

SEQ ID NO: 922700 - RNA, 19 nt, Artificial Sequence
  Description of Artificial Sequence: Synthetic oligonucleotide
  Sense strand starting at position 2029 of SEQ ID NO: 913380
acgcaaauuccagacaugu

SEQ ID NO: 922701 - RNA, 19 nt, Artificial Sequence
  Description of Artificial Sequence: Synthetic oligonucleotide
  Antisense strand to SEQ ID NO: 922700
acaugucuggaauuugcgu

SEQ ID NO: 922702 - RNA, 19 nt, Artificial Sequence
  Description of Artificial Sequence: Synthetic oligonucleotide
  Sense strand starting at position 3694 of SEQ ID NO: 913380
cuugguaucccacaagcau

SEQ ID NO: 922703 - RNA, 19 nt, Artificial Sequence
  Description of Artificial Sequence: Synthetic oligonucleotide
  Antisense strand to SEQ ID NO: 922702
augcuugugggauaccaag

SEQ ID NO: 922704 - RNA, 19 nt, Artificial Sequence
  Description of Artificial Sequence: Synthetic oligonucleotide
  Sense strand starting at position 329 of SEQ ID NO: 913380
aucucagucgggcagaauu

SEQ ID NO: 922705 - RNA, 19 nt, Artificial Sequence
  Description of Artificial Sequence: Synthetic oligonucleotide
  Antisense strand to SEQ ID NO: 922704
aauucugcccgacugagau

SEQ ID NO: 922706 - RNA, 19 nt, Artificial Sequence
  Description of Artificial Sequence: Synthetic oligonucleotide
  Sense strand starting at position 2277 of SEQ ID NO: 913380
ggugaucccuaccucacau

SEQ ID NO: 922707 - RNA, 19 nt, Artificial Sequence
  Description of Artificial Sequence: Synthetic oligonucleotide
  Antisense strand to SEQ ID NO: 922706
augugagguagggaucacc

SEQ ID NO: 922708 - RNA, 19 nt, Artificial Sequence
  Description of Artificial Sequence: Synthetic oligonucleotide
  Sense strand starting at position 1921 of SEQ ID NO: 913380
ugcugaaaguuucugauga

SEQ ID NO: 922709 - RNA, 19 nt, Artificial Sequence
  Description of Artificial Sequence: Synthetic oligonucleotide
  Antisense strand to SEQ ID NO: 922708
ucaucagaaacuuucagca

SEQ ID NO: 922710 - RNA, 19 nt, Artificial Sequence
  Description of Artificial Sequence: Synthetic oligonucleotide
  Sense strand starting at position 893 of SEQ ID NO: 913380
ucaagaagcacgggucaau

SEQ ID NO: 922711 - RNA, 19 nt, Artificial Sequence
  Description of Artificial Sequence: Synthetic oligonucleotide
  Antisense strand to SEQ ID NO: 922710
auugacccgugcuucuuga

SEQ ID NO: 922712 - RNA, 19 nt, Artificial Sequence
  Description of Artificial Sequence: Synthetic oligonucleotide
  Sense strand starting at position 2143 of SEQ ID NO: 913380
ccaguuaauuaacuguauu

SEQ ID NO: 922713 - RNA, 19 nt, Artificial Sequence
  Description of Artificial Sequence: Synthetic oligonucleotide
  Antisense strand to SEQ ID NO: 922712
aauacaguuaauuaacugg

SEQ ID NO: 922714 - RNA, 19 nt, Artificial Sequence
  Description of Artificial Sequence: Synthetic oligonucleotide
  Sense strand starting at position 3351 of SEQ ID NO: 913380
ugagauuggucuuaaauuu

SEQ ID NO: 922715 - RNA, 19 nt, Artificial Sequence
  Description of Artificial Sequence: Synthetic oligonucleotide
  Antisense strand to SEQ ID NO: 922714
aaauuuaagaccaaucuca

SEQ ID NO: 922716 - RNA, 19 nt, Artificial Sequence
  Description of Artificial Sequence: Synthetic oligonucleotide
  Sense strand starting at position 3394 of SEQ ID NO: 913380
uuauaucaagguuguucua

SEQ ID NO: 922717 - RNA, 19 nt, Artificial Sequence
  Description of Artificial Sequence: Synthetic oligonucleotide
  Antisense strand to SEQ ID NO: 922716
uagaacaaccuugauauaa

SEQ ID NO: 922718 - RNA, 19 nt, Artificial Sequence
  Description of Artificial Sequence: Synthetic oligonucleotide
  Sense strand starting at position 2202 of SEQ ID NO: 913380
ccacuuaagcuaugcuaga

SEQ ID NO: 922719 - RNA, 19 nt, Artificial Sequence
  Description of Artificial Sequence: Synthetic oligonucleotide
  Antisense strand to SEQ ID NO: 922718
ucuagcauagcuuaagugg

SEQ ID NO: 922720 - RNA, 19 nt, Artificial Sequence
  Description of Artificial Sequence: Synthetic oligonucleotide
  Sense strand starting at position 198 of SEQ ID NO: 913380
gcagacacauaguuuguau

SEQ ID NO: 922721 - RNA, 19 nt, Artificial Sequence
  Description of Artificial Sequence: Synthetic oligonucleotide
  Antisense strand to SEQ ID NO: 922720
auacaaacuaugugucugc

SEQ ID NO: 922722 - RNA, 19 nt, Artificial Sequence
  Description of Artificial Sequence: Synthetic oligonucleotide
  Sense strand starting at position 1797 of SEQ ID NO: 913380
agaaauguauaggacuaaa

SEQ ID NO: 922723 - RNA, 19 nt, Artificial Sequence
  Description of Artificial Sequence: Synthetic oligonucleotide
  Antisense strand to SEQ ID NO: 922722
uuuaguccuauacauuucu

SEQ ID NO: 922724 - RNA, 19 nt, Artificial Sequence
  Description of Artificial Sequence: Synthetic oligonucleotide
  Sense strand starting at position 232 of SEQ ID NO: 913380
ucuaauggcuuguucuaau

SEQ ID NO: 922725 - RNA, 19 nt, Artificial Sequence
  Description of Artificial Sequence: Synthetic oligonucleotide
  Antisense strand to SEQ ID NO: 922724
auuagaacaagccauuaga

SEQ ID NO: 922726 - RNA, 19 nt, Artificial Sequence
  Description of Artificial Sequence: Synthetic oligonucleotide
  Sense strand starting at position 1670 of SEQ ID NO: 913380
aagaguuacagcggguuau

SEQ ID NO: 922727 - RNA, 19 nt, Artificial Sequence
  Description of Artificial Sequence: Synthetic oligonucleotide
  Antisense strand to SEQ ID NO: 922726
auaacccgcuguaacucuu

SEQ ID NO: 922728 - RNA, 19 nt, Artificial Sequence
  Description of Artificial Sequence: Synthetic oligonucleotide
  Sense strand starting at position 3314 of SEQ ID NO: 913380
guuugcuaauagucuagau

SEQ ID NO: 922729 - RNA, 19 nt, Artificial Sequence
  Description of Artificial Sequence: Synthetic oligonucleotide
  Antisense strand to SEQ ID NO: 922728
aucuagacuauuagcaaac

SEQ ID NO: 922730 - RNA, 19 nt, Artificial Sequence
  Description of Artificial Sequence: Synthetic oligonucleotide
  Sense strand starting at position 230 of SEQ ID NO: 913380
auucuaauggcuuguucua

SEQ ID NO: 922731 - RNA, 19 nt, Artificial Sequence
  Description of Artificial Sequence: Synthetic oligonucleotide
  Antisense strand to SEQ ID NO: 922730
uagaacaagccauuagaau

SEQ ID NO: 922732 - RNA, 19 nt, Artificial Sequence
  Description of Artificial Sequence: Synthetic oligonucleotide
  Sense strand starting at position 2611 of SEQ ID NO: 913380
auuugaacguacuauccau

SEQ ID NO: 922733 - RNA, 19 nt, Artificial Sequence
  Description of Artificial Sequence: Synthetic oligonucleotide
  Antisense strand to SEQ ID NO: 922732
auggauaguacguucaaau

SEQ ID NO: 922734 - RNA, 19 nt, Artificial Sequence
  Description of Artificial Sequence: Synthetic oligonucleotide
  Sense strand starting at position 1250 of SEQ ID NO: 913380
guacauaagugagaaagaa

SEQ ID NO: 922735 - RNA, 19 nt, Artificial Sequence
  Description of Artificial Sequence: Synthetic oligonucleotide
  Antisense strand to SEQ ID NO: 922734
uucuuucucacuuauguac

SEQ ID NO: 922736 - RNA, 19 nt, Artificial Sequence
  Description of Artificial Sequence: Synthetic oligonucleotide
  Sense strand starting at position 1671 of SEQ ID NO: 913380
agaguuacagcggguuauu

SEQ ID NO: 922737 - RNA, 19 nt, Artificial Sequence
  Description of Artificial Sequence: Synthetic oligonucleotide
  Antisense strand to SEQ ID NO: 922736
aauaacccgcuguaacucu

SEQ ID NO: 922738 - RNA, 19 nt, Artificial Sequence
  Description of Artificial Sequence: Synthetic oligonucleotide
  Sense strand starting at position 3126 of SEQ ID NO: 913380
aauuguguauugguguuua

SEQ ID NO: 922739 - RNA, 19 nt, Artificial Sequence
  Description of Artificial Sequence: Synthetic oligonucleotide
  Antisense strand to SEQ ID NO: 922738
uaaacaccaauacacaauu

SEQ ID NO: 922740 - RNA, 19 nt, Artificial Sequence
  Description of Artificial Sequence: Synthetic oligonucleotide
  Sense strand starting at position 627 of SEQ ID NO: 913381
guuaaaggucaugaacuuu

SEQ ID NO: 922741 - RNA, 19 nt, Artificial Sequence
  Description of Artificial Sequence: Synthetic oligonucleotide
  Antisense strand to SEQ ID NO: 922740
aaaguucaugaccuuuaac

SEQ ID NO: 922742 - RNA, 19 nt, Artificial Sequence
  Description of Artificial Sequence: Synthetic oligonucleotide
  Sense strand starting at position 3253 of SEQ ID NO: 913381
agcguuugucaccuuguca

SEQ ID NO: 922743 - RNA, 19 nt, Artificial Sequence
  Description of Artificial Sequence: Synthetic oligonucleotide
  Antisense strand to SEQ ID NO: 922742
ugacaaggugacaaacgcu

SEQ ID NO: 922744 - RNA, 19 nt, Artificial Sequence
  Description of Artificial Sequence: Synthetic oligonucleotide
  Sense strand starting at position 2627 of SEQ ID NO: 913381
ugcagacuccagggaucaa

SEQ ID NO: 922745 - RNA, 19 nt, Artificial Sequence
  Description of Artificial Sequence: Synthetic oligonucleotide
  Antisense strand to SEQ ID NO: 922744
uugaucccuggagucugca

SEQ ID NO: 922746 - RNA, 19 nt, Artificial Sequence
  Description of Artificial Sequence: Synthetic oligonucleotide
  Sense strand starting at position 3754 of SEQ ID NO: 913381
gucagcuaauaaucaagaa

SEQ ID NO: 922747 - RNA, 19 nt, Artificial Sequence
  Description of Artificial Sequence: Synthetic oligonucleotide
  Antisense strand to SEQ ID NO: 922746
uucuugauuauuagcugac

SEQ ID NO: 922748 - RNA, 19 nt, Artificial Sequence
  Description of Artificial Sequence: Synthetic oligonucleotide
  Sense strand starting at position 3685 of SEQ ID NO: 913381
agacguugacgagaucauu

SEQ ID NO: 922749 - RNA, 19 nt, Artificial Sequence
  Description of Artificial Sequence: Synthetic oligonucleotide
  Antisense strand to SEQ ID NO: 922748
aaugaucucgucaacgucu

SEQ ID NO: 922750 - RNA, 19 nt, Artificial Sequence
  Description of Artificial Sequence: Synthetic oligonucleotide
  Sense strand starting at position 3231 of SEQ ID NO: 913381
ggaguugcucgcagucaga

SEQ ID NO: 922751 - RNA, 19 nt, Artificial Sequence
  Description of Artificial Sequence: Synthetic oligonucleotide
  Antisense strand to SEQ ID NO: 922750
ucugacugcgagcaacucc

SEQ ID NO: 922752 - RNA, 19 nt, Artificial Sequence
  Description of Artificial Sequence: Synthetic oligonucleotide
  Sense strand starting at position 3669 of SEQ ID NO: 913381
gcuucaauucgagggaaga

SEQ ID NO: 922753 - RNA, 19 nt, Artificial Sequence
  Description of Artificial Sequence: Synthetic oligonucleotide
  Antisense strand to SEQ ID NO: 922752
ucuucccucgaauugaagc

SEQ ID NO: 922754 - RNA, 19 nt, Artificial Sequence
  Description of Artificial Sequence: Synthetic oligonucleotide
  Sense strand starting at position 3704 of SEQ ID NO: 913381
uuuauauggccaugaaauu

SEQ ID NO: 922755 - RNA, 19 nt, Artificial Sequence
  Description of Artificial Sequence: Synthetic oligonucleotide
  Antisense strand to SEQ ID NO: 922754
aauuucauggccauauaaa

SEQ ID NO: 922756 - RNA, 19 nt, Artificial Sequence
  Description of Artificial Sequence: Synthetic oligonucleotide
  Sense strand starting at position 621 of SEQ ID NO: 913381
cgagaaguuaaaggucaug

SEQ ID NO: 922757 - RNA, 19 nt, Artificial Sequence
  Description of Artificial Sequence: Synthetic oligonucleotide
  Antisense strand to SEQ ID NO: 922756
caugaccuuuaacuucucg

SEQ ID NO: 922758 - RNA, 19 nt, Artificial Sequence
  Description of Artificial Sequence: Synthetic oligonucleotide
  Sense strand starting at position 934 of SEQ ID NO: 913381
ggacacuucggugaaguuu

SEQ ID NO: 922759 - RNA, 19 nt, Artificial Sequence
  Description of Artificial Sequence: Synthetic oligonucleotide
  Antisense strand to SEQ ID NO: 922758
aaacuucaccgaagugucc

SEQ ID NO: 922760 - RNA, 19 nt, Artificial Sequence
  Description of Artificial Sequence: Synthetic oligonucleotide
  Sense strand starting at position 3714 of SEQ ID NO: 913381
caugaaauuugcguguucu

SEQ ID NO: 922761 - RNA, 19 nt, Artificial Sequence
  Description of Artificial Sequence: Synthetic oligonucleotide
  Antisense strand to SEQ ID NO: 922760
agaacacgcaaauuucaug

SEQ ID NO: 922762 - RNA, 19 nt, Artificial Sequence
  Description of Artificial Sequence: Synthetic oligonucleotide
  Sense strand starting at position 3718 of SEQ ID NO: 913381
aaauuugcguguucuugac

SEQ ID NO: 922763 - RNA, 19 nt, Artificial Sequence
  Description of Artificial Sequence: Synthetic oligonucleotide
  Antisense strand to SEQ ID NO: 922762
gucaagaacacgcaaauuu

SEQ ID NO: 922764 - RNA, 19 nt, Artificial Sequence
  Description of Artificial Sequence: Synthetic oligonucleotide
  Sense strand starting at position 3715 of SEQ ID NO: 913381
augaaauuugcguguucuu

SEQ ID NO: 922765 - RNA, 19 nt, Artificial Sequence
  Description of Artificial Sequence: Synthetic oligonucleotide
  Antisense strand to SEQ ID NO: 922764
aagaacacgcaaauuucau

SEQ ID NO: 922766 - RNA, 19 nt, Artificial Sequence
  Description of Artificial Sequence: Synthetic oligonucleotide
  Sense strand starting at position 363 of SEQ ID NO: 913381
gacaacgugccagggaaua

SEQ ID NO: 922767 - RNA, 19 nt, Artificial Sequence
  Description of Artificial Sequence: Synthetic oligonucleotide
  Antisense strand to SEQ ID NO: 922766
uauucccuggcacguuguc

SEQ ID NO: 922768 - RNA, 19 nt, Artificial Sequence
  Description of Artificial Sequence: Synthetic oligonucleotide
  Sense strand starting at position 2552 of SEQ ID NO: 913381
gcuugcucccgggaaagga

SEQ ID NO: 922769 - RNA, 19 nt, Artificial Sequence
  Description of Artificial Sequence: Synthetic oligonucleotide
  Antisense strand to SEQ ID NO: 922768
uccuuucccgggagcaagc

SEQ ID NO: 922770 - RNA, 19 nt, Artificial Sequence
  Description of Artificial Sequence: Synthetic oligonucleotide
  Sense strand starting at position 875 of SEQ ID NO: 913381
augucuuuccuggguagag

SEQ ID NO: 922771 - RNA, 19 nt, Artificial Sequence
  Description of Artificial Sequence: Synthetic oligonucleotide
  Antisense strand to SEQ ID NO: 922770
cucuacccaggaaagacau

SEQ ID NO: 922772 - RNA, 19 nt, Artificial Sequence
  Description of Artificial Sequence: Synthetic oligonucleotide
  Sense strand starting at position 877 of SEQ ID NO: 913381
gucuuuccuggguagagca

SEQ ID NO: 922773 - RNA, 19 nt, Artificial Sequence
  Description of Artificial Sequence: Synthetic oligonucleotide
  Antisense strand to SEQ ID NO: 922772
ugcucuacccaggaaagac

SEQ ID NO: 922774 - RNA, 19 nt, Artificial Sequence
  Description of Artificial Sequence: Synthetic oligonucleotide
  Sense strand starting at position 933 of SEQ ID NO: 913381
gggacacuucggugaaguu

SEQ ID NO: 922775 - RNA, 19 nt, Artificial Sequence
  Description of Artificial Sequence: Synthetic oligonucleotide
  Antisense strand to SEQ ID NO: 922774
aacuucaccgaaguguccc

SEQ ID NO: 922776 - RNA, 19 nt, Artificial Sequence
  Description of Artificial Sequence: Synthetic oligonucleotide
  Sense strand starting at position 3806 of SEQ ID NO: 913381
ucagucagaugguaauuua

SEQ ID NO: 922777 - RNA, 19 nt, Artificial Sequence
  Description of Artificial Sequence: Synthetic oligonucleotide
  Antisense strand to SEQ ID NO: 922776
uaaauuaccaucugacuga

SEQ ID NO: 922778 - RNA, 19 nt, Artificial Sequence
  Description of Artificial Sequence: Synthetic oligonucleotide
  Sense strand starting at position 874 of SEQ ID NO: 913381
caugucuuuccuggguaga

SEQ ID NO: 922779 - RNA, 19 nt, Artificial Sequence
  Description of Artificial Sequence: Synthetic oligonucleotide
  Antisense strand to SEQ ID NO: 922778
ucuacccaggaaagacaug

SEQ ID NO: 922780 - RNA, 19 nt, Artificial Sequence
  Description of Artificial Sequence: Synthetic oligonucleotide
  Sense strand starting at position 3870 of SEQ ID NO: 913381
ugaguaaauuaacaagaag

SEQ ID NO: 922781 - RNA, 19 nt, Artificial Sequence
  Description of Artificial Sequence: Synthetic oligonucleotide
  Antisense strand to SEQ ID NO: 922780
cuucuuguuaauuuacuca

SEQ ID NO: 922782 - RNA, 19 nt, Artificial Sequence
  Description of Artificial Sequence: Synthetic oligonucleotide
  Sense strand starting at position 2257 of SEQ ID NO: 913381
gcggauuucucgcuucuuc

SEQ ID NO: 922783 - RNA, 19 nt, Artificial Sequence
  Description of Artificial Sequence: Synthetic oligonucleotide
  Antisense strand to SEQ ID NO: 922782
gaagaagcgagaaauccgc

SEQ ID NO: 922784 - RNA, 19 nt, Artificial Sequence
  Description of Artificial Sequence: Synthetic oligonucleotide
  Sense strand starting at position 2550 of SEQ ID NO: 913381
gggcuugcucccgggaaag

SEQ ID NO: 922785 - RNA, 19 nt, Artificial Sequence
  Description of Artificial Sequence: Synthetic oligonucleotide
  Antisense strand to SEQ ID NO: 922784
cuuucccgggagcaagccc

SEQ ID NO: 922786 - RNA, 19 nt, Artificial Sequence
  Description of Artificial Sequence: Synthetic oligonucleotide
  Sense strand starting at position 3375 of SEQ ID NO: 913381
agcuauugugucugaucag

SEQ ID NO: 922787 - RNA, 19 nt, Artificial Sequence
  Description of Artificial Sequence: Synthetic oligonucleotide
  Antisense strand to SEQ ID NO: 922786
cugaucagacacaauagcu

SEQ ID NO: 922788 - RNA, 19 nt, Artificial Sequence
  Description of Artificial Sequence: Synthetic oligonucleotide
  Sense strand starting at position 3374 of SEQ ID NO: 913381
cagcuauugugucugauca

SEQ ID NO: 922789 - RNA, 19 nt, Artificial Sequence
  Description of Artificial Sequence: Synthetic oligonucleotide
  Antisense strand to SEQ ID NO: 922788
ugaucagacacaauagcug

SEQ ID NO: 922790 - RNA, 19 nt, Artificial Sequence
  Description of Artificial Sequence: Synthetic oligonucleotide
  Sense strand starting at position 3845 of SEQ ID NO: 913381
agcaguauccagugcuaga

SEQ ID NO: 922791 - RNA, 19 nt, Artificial Sequence
  Description of Artificial Sequence: Synthetic oligonucleotide
  Antisense strand to SEQ ID NO: 922790
ucuagcacuggauacugcu

SEQ ID NO: 922792 - RNA, 19 nt, Artificial Sequence
  Description of Artificial Sequence: Synthetic oligonucleotide
  Sense strand starting at position 3328 of SEQ ID NO: 913381
ggugcuguugagggucauu

SEQ ID NO: 922793 - RNA, 19 nt, Artificial Sequence
  Description of Artificial Sequence: Synthetic oligonucleotide
  Antisense strand to SEQ ID NO: 922792
aaugacccucaacagcacc

SEQ ID NO: 922794 - RNA, 19 nt, Artificial Sequence
  Description of Artificial Sequence: Synthetic oligonucleotide
  Sense strand starting at position 2640 of SEQ ID NO: 913381
gaucaaagguccuagauug

SEQ ID NO: 922795 - RNA, 19 nt, Artificial Sequence
  Description of Artificial Sequence: Synthetic oligonucleotide
  Antisense strand to SEQ ID NO: 922794
caaucuaggaccuuugauc

SEQ ID NO: 922796 - RNA, 19 nt, Artificial Sequence
  Description of Artificial Sequence: Synthetic oligonucleotide
  Sense strand starting at position 3486 of SEQ ID NO: 913381
ccuguagacuuagaaacau

SEQ ID NO: 922797 - RNA, 19 nt, Artificial Sequence
  Description of Artificial Sequence: Synthetic oligonucleotide
  Antisense strand to SEQ ID NO: 922796
auguuucuaagucuacagg

SEQ ID NO: 922798 - RNA, 19 nt, Artificial Sequence
  Description of Artificial Sequence: Synthetic oligonucleotide
  Sense strand starting at position 692 of SEQ ID NO: 913381
gcguuuccucccgagcaaa

SEQ ID NO: 922799 - RNA, 19 nt, Artificial Sequence
  Description of Artificial Sequence: Synthetic oligonucleotide
  Antisense strand to SEQ ID NO: 922798
uuugcucgggaggaaacgc

SEQ ID NO: 922800 - RNA, 19 nt, Artificial Sequence
  Description of Artificial Sequence: Synthetic oligonucleotide
  Sense strand starting at position 3372 of SEQ ID NO: 913381
gccagcuauugugucugau

SEQ ID NO: 922801 - RNA, 19 nt, Artificial Sequence
  Description of Artificial Sequence: Synthetic oligonucleotide
  Antisense strand to SEQ ID NO: 922800
aucagacacaauagcuggc

SEQ ID NO: 922802 - RNA, 19 nt, Artificial Sequence
  Description of Artificial Sequence: Synthetic oligonucleotide
  Sense strand starting at position 1431 of SEQ ID NO: 913381
uauggacuuucucaaaggu

SEQ ID NO: 922803 - RNA, 19 nt, Artificial Sequence
  Description of Artificial Sequence: Synthetic oligonucleotide
  Antisense strand to SEQ ID NO: 922802
accuuugagaaaguccaua

SEQ ID NO: 922804 - RNA, 19 nt, Artificial Sequence
  Description of Artificial Sequence: Synthetic oligonucleotide
  Sense strand starting at position 1582 of SEQ ID NO: 913381
gccgcaggcucgguuaaua

SEQ ID NO: 922805 - RNA, 19 nt, Artificial Sequence
  Description of Artificial Sequence: Synthetic oligonucleotide
  Antisense strand to SEQ ID NO: 922804
uauuaaccgagccugcggc

SEQ ID NO: 922806 - RNA, 19 nt, Artificial Sequence
  Description of Artificial Sequence: Synthetic oligonucleotide
  Sense strand starting at position 1581 of SEQ ID NO: 913381
ggccgcaggcucgguuaau

SEQ ID NO: 922807 - RNA, 19 nt, Artificial Sequence
  Description of Artificial Sequence: Synthetic oligonucleotide
  Antisense strand to SEQ ID NO: 922806
auuaaccgagccugcggcc

SEQ ID NO: 922808 - RNA, 19 nt, Artificial Sequence
  Description of Artificial Sequence: Synthetic oligonucleotide
  Sense strand starting at position 3713 of SEQ ID NO: 913381
ccaugaaauuugcguguuc

SEQ ID NO: 922809 - RNA, 19 nt, Artificial Sequence
  Description of Artificial Sequence: Synthetic oligonucleotide
  Antisense strand to SEQ ID NO: 922808
gaacacgcaaauuucaugg

SEQ ID NO: 922810 - RNA, 19 nt, Artificial Sequence
  Description of Artificial Sequence: Synthetic oligonucleotide
  Sense strand starting at position 3667 of SEQ ID NO: 913381
ccgcuucaauucgagggaa

SEQ ID NO: 922811 - RNA, 19 nt, Artificial Sequence
  Description of Artificial Sequence: Synthetic oligonucleotide
  Antisense strand to SEQ ID NO: 922810
uucccucgaauugaagcgg

SEQ ID NO: 922812 - RNA, 19 nt, Artificial Sequence
  Description of Artificial Sequence: Synthetic oligonucleotide
  Sense strand starting at position 1228 of SEQ ID NO: 913381
gggcaugauucuggagcua

SEQ ID NO: 922813 - RNA, 19 nt, Artificial Sequence
  Description of Artificial Sequence: Synthetic oligonucleotide
  Antisense strand to SEQ ID NO: 922812
uagcuccagaaucaugccc

SEQ ID NO: 922814 - RNA, 19 nt, Artificial Sequence
  Description of Artificial Sequence: Synthetic oligonucleotide
  Sense strand starting at position 2549 of SEQ ID NO: 913381
ugggcuugcucccgggaaa

SEQ ID NO: 922815 - RNA, 19 nt, Artificial Sequence
  Description of Artificial Sequence: Synthetic oligonucleotide
  Antisense strand to SEQ ID NO: 922814
uuucccgggagcaagccca

SEQ ID NO: 922816 - RNA, 19 nt, Artificial Sequence
  Description of Artificial Sequence: Synthetic oligonucleotide
  Sense strand starting at position 691 of SEQ ID NO: 913381
cgcguuuccucccgagcaa

SEQ ID NO: 922817 - RNA, 19 nt, Artificial Sequence
  Description of Artificial Sequence: Synthetic oligonucleotide
  Antisense strand to SEQ ID NO: 922816
uugcucgggaggaaacgcg

SEQ ID NO: 922818 - RNA, 19 nt, Artificial Sequence
  Description of Artificial Sequence: Synthetic oligonucleotide
  Sense strand starting at position 2303 of SEQ ID NO: 913382
aauguaaacuccucaggag

SEQ ID NO: 922819 - RNA, 19 nt, Artificial Sequence
  Description of Artificial Sequence: Synthetic oligonucleotide
  Antisense strand to SEQ ID NO: 922818
cuccugaggaguuuacauu

SEQ ID NO: 922820 - RNA, 19 nt, Artificial Sequence
  Description of Artificial Sequence: Synthetic oligonucleotide
  Sense strand starting at position 673 of SEQ ID NO: 913382
gcuugcagugugcuaauaa

SEQ ID NO: 922821 - RNA, 19 nt, Artificial Sequence
  Description of Artificial Sequence: Synthetic oligonucleotide
  Antisense strand to SEQ ID NO: 922820
uuauuagcacacugcaagc

SEQ ID NO: 922822 - RNA, 19 nt, Artificial Sequence
  Description of Artificial Sequence: Synthetic oligonucleotide
  Sense strand starting at position 327 of SEQ ID NO: 913382
ugagauauuguacauucuu

SEQ ID NO: 922823 - RNA, 19 nt, Artificial Sequence
  Description of Artificial Sequence: Synthetic oligonucleotide
  Antisense strand to SEQ ID NO: 922822
aagaauguacaauaucuca

SEQ ID NO: 922824 - RNA, 19 nt, Artificial Sequence
  Description of Artificial Sequence: Synthetic oligonucleotide
  Sense strand starting at position 507 of SEQ ID NO: 913382
uugggucaucacuagacuu

SEQ ID NO: 922825 - RNA, 19 nt, Artificial Sequence
  Description of Artificial Sequence: Synthetic oligonucleotide
  Antisense strand to SEQ ID NO: 922824
aagucuagugaugacccaa

SEQ ID NO: 922826 - RNA, 19 nt, Artificial Sequence
  Description of Artificial Sequence: Synthetic oligonucleotide
  Sense strand starting at position 3652 of SEQ ID NO: 913382
uccugauuccaccagcaga

SEQ ID NO: 922827 - RNA, 19 nt, Artificial Sequence
  Description of Artificial Sequence: Synthetic oligonucleotide
  Antisense strand to SEQ ID NO: 922826
ucugcugguggaaucagga

SEQ ID NO: 922828 - RNA, 19 nt, Artificial Sequence
  Description of Artificial Sequence: Synthetic oligonucleotide
  Sense strand starting at position 3958 of SEQ ID NO: 913382
ugacaaugucuugagcaau

SEQ ID NO: 922829 - RNA, 19 nt, Artificial Sequence
  Description of Artificial Sequence: Synthetic oligonucleotide
  Antisense strand to SEQ ID NO: 922828
auugcucaagacauuguca

SEQ ID NO: 922830 - RNA, 19 nt, Artificial Sequence
  Description of Artificial Sequence: Synthetic oligonucleotide
  Sense strand starting at position 2337 of SEQ ID NO: 913382
augccuguuagggauacua

SEQ ID NO: 922831 - RNA, 19 nt, Artificial Sequence
  Description of Artificial Sequence: Synthetic oligonucleotide
  Antisense strand to SEQ ID NO: 922830
uaguaucccuaacaggcau

SEQ ID NO: 922832 - RNA, 19 nt, Artificial Sequence
  Description of Artificial Sequence: Synthetic oligonucleotide
  Sense strand starting at position 643 of SEQ ID NO: 913382
gcuggucccauccaggaaa

SEQ ID NO: 922833 - RNA, 19 nt, Artificial Sequence
  Description of Artificial Sequence: Synthetic oligonucleotide
  Antisense strand to SEQ ID NO: 922832
uuuccuggaugggaccagc

SEQ ID NO: 922834 - RNA, 19 nt, Artificial Sequence
  Description of Artificial Sequence: Synthetic oligonucleotide
  Sense strand starting at position 1163 of SEQ ID NO: 913382
aggaaauacugucugcaaa

SEQ ID NO: 922835 - RNA, 19 nt, Artificial Sequence
  Description of Artificial Sequence: Synthetic oligonucleotide
  Antisense strand to SEQ ID NO: 922834
uuugcagacaguauuuccu

SEQ ID NO: 922836 - RNA, 19 nt, Artificial Sequence
  Description of Artificial Sequence: Synthetic oligonucleotide
  Sense strand starting at position 3267 of SEQ ID NO: 913382
gguagaguccauggacaca

SEQ ID NO: 922837 - RNA, 19 nt, Artificial Sequence
  Description of Artificial Sequence: Synthetic oligonucleotide
  Antisense strand to SEQ ID NO: 922836
uguguccauggacucuacc

SEQ ID NO: 922838 - RNA, 19 nt, Artificial Sequence
  Description of Artificial Sequence: Synthetic oligonucleotide
  Sense strand starting at position 3158 of SEQ ID NO: 913382
ggcaguccucccuagggaa

SEQ ID NO: 922839 - RNA, 19 nt, Artificial Sequence
  Description of Artificial Sequence: Synthetic oligonucleotide
  Antisense strand to SEQ ID NO: 922838
uucccuagggaggacugcc

SEQ ID NO: 922840 - RNA, 19 nt, Artificial Sequence
  Description of Artificial Sequence: Synthetic oligonucleotide
  Sense strand starting at position 2173 of SEQ ID NO: 913382
agcgcuuuggugagaaggu

SEQ ID NO: 922841 - RNA, 19 nt, Artificial Sequence
  Description of Artificial Sequence: Synthetic oligonucleotide
  Antisense strand to SEQ ID NO: 922840
accuucucaccaaagcgcu

SEQ ID NO: 922842 - RNA, 19 nt, Artificial Sequence
  Description of Artificial Sequence: Synthetic oligonucleotide
  Sense strand starting at position 3351 of SEQ ID NO: 913382
aguaccuuggcauaacauu

SEQ ID NO: 922843 - RNA, 19 nt, Artificial Sequence
  Description of Artificial Sequence: Synthetic oligonucleotide
  Antisense strand to SEQ ID NO: 922842
aauguuaugccaagguacu

SEQ ID NO: 922844 - RNA, 19 nt, Artificial Sequence
  Description of Artificial Sequence: Synthetic oligonucleotide
  Sense strand starting at position 1164 of SEQ ID NO: 913382
ggaaauacugucugcaaag

SEQ ID NO: 922845 - RNA, 19 nt, Artificial Sequence
  Description of Artificial Sequence: Synthetic oligonucleotide
  Antisense strand to SEQ ID NO: 922844
cuuugcagacaguauuucc

SEQ ID NO: 922846 - RNA, 19 nt, Artificial Sequence
  Description of Artificial Sequence: Synthetic oligonucleotide
  Sense strand starting at position 670 of SEQ ID NO: 913382
agugcuugcagugugcuaa

SEQ ID NO: 922847 - RNA, 19 nt, Artificial Sequence
  Description of Artificial Sequence: Synthetic oligonucleotide
  Antisense strand to SEQ ID NO: 922846
uuagcacacugcaagcacu

SEQ ID NO: 922848 - RNA, 19 nt, Artificial Sequence
  Description of Artificial Sequence: Synthetic oligonucleotide
  Sense strand starting at position 2339 of SEQ ID NO: 913382
gccuguuagggauacuauu

SEQ ID NO: 922849 - RNA, 19 nt, Artificial Sequence
  Description of Artificial Sequence: Synthetic oligonucleotide
  Antisense strand to SEQ ID NO: 922848
aauaguaucccuaacaggc

SEQ ID NO: 922850 - RNA, 19 nt, Artificial Sequence
  Description of Artificial Sequence: Synthetic oligonucleotide
  Sense strand starting at position 392 of SEQ ID NO: 913382
ggacuagugacaugccaag

SEQ ID NO: 922851 - RNA, 19 nt, Artificial Sequence
  Description of Artificial Sequence: Synthetic oligonucleotide
  Antisense strand to SEQ ID NO: 922850
cuuggcaugucacuagucc

SEQ ID NO: 922852 - RNA, 19 nt, Artificial Sequence
  Description of Artificial Sequence: Synthetic oligonucleotide
  Sense strand starting at position 3395 of SEQ ID NO: 913382
uggacuccucucugaccua

SEQ ID NO: 922853 - RNA, 19 nt, Artificial Sequence
  Description of Artificial Sequence: Synthetic oligonucleotide
  Antisense strand to SEQ ID NO: 922852
uaggucagagaggagucca

SEQ ID NO: 922854 - RNA, 19 nt, Artificial Sequence
  Description of Artificial Sequence: Synthetic oligonucleotide
  Sense strand starting at position 195 of SEQ ID NO: 913382
ucacauauguacuuguaaa

SEQ ID NO: 922855 - RNA, 19 nt, Artificial Sequence
  Description of Artificial Sequence: Synthetic oligonucleotide
  Antisense strand to SEQ ID NO: 922854
uuuacaaguacauauguga

SEQ ID NO: 922856 - RNA, 19 nt, Artificial Sequence
  Description of Artificial Sequence: Synthetic oligonucleotide
  Sense strand starting at position 3346 of SEQ ID NO: 913382
gaaugaguaccuuggcaua

SEQ ID NO: 922857 - RNA, 19 nt, Artificial Sequence
  Description of Artificial Sequence: Synthetic oligonucleotide
  Antisense strand to SEQ ID NO: 922856
uaugccaagguacucauuc

SEQ ID NO: 922858 - RNA, 19 nt, Artificial Sequence
  Description of Artificial Sequence: Synthetic oligonucleotide
  Sense strand starting at position 3098 of SEQ ID NO: 913382
auugguauguaaucaacuu

SEQ ID NO: 922859 - RNA, 19 nt, Artificial Sequence
  Description of Artificial Sequence: Synthetic oligonucleotide
  Antisense strand to SEQ ID NO: 922858
aaguugauuacauaccaau

SEQ ID NO: 922860 - RNA, 19 nt, Artificial Sequence
  Description of Artificial Sequence: Synthetic oligonucleotide
  Sense strand starting at position 3143 of SEQ ID NO: 913382
ccaggagaucacuguggca

SEQ ID NO: 922861 - RNA, 19 nt, Artificial Sequence
  Description of Artificial Sequence: Synthetic oligonucleotide
  Antisense strand to SEQ ID NO: 922860
ugccacagugaucuccugg

SEQ ID NO: 922862 - RNA, 19 nt, Artificial Sequence
  Description of Artificial Sequence: Synthetic oligonucleotide
  Sense strand starting at position 1848 of SEQ ID NO: 913382
cuacauaaaccucgaugca

SEQ ID NO: 922863 - RNA, 19 nt, Artificial Sequence
  Description of Artificial Sequence: Synthetic oligonucleotide
  Antisense strand to SEQ ID NO: 922862
ugcaucgagguuuauguag

SEQ ID NO: 922864 - RNA, 19 nt, Artificial Sequence
  Description of Artificial Sequence: Synthetic oligonucleotide
  Sense strand starting at position 1274 of SEQ ID NO: 913382
agggcaaaucuugggcauu

SEQ ID NO: 922865 - RNA, 19 nt, Artificial Sequence
  Description of Artificial Sequence: Synthetic oligonucleotide
  Antisense strand to SEQ ID NO: 922864
aaugcccaagauuugcccu

SEQ ID NO: 922866 - RNA, 19 nt, Artificial Sequence
  Description of Artificial Sequence: Synthetic oligonucleotide
  Sense strand starting at position 932 of SEQ ID NO: 913382
agaaguuguuguccaugga

SEQ ID NO: 922867 - RNA, 19 nt, Artificial Sequence
  Description of Artificial Sequence: Synthetic oligonucleotide
  Antisense strand to SEQ ID NO: 922866
uccauggacaacaacuucu

SEQ ID NO: 922868 - RNA, 19 nt, Artificial Sequence
  Description of Artificial Sequence: Synthetic oligonucleotide
  Sense strand starting at position 685 of SEQ ID NO: 913382
cuaauaagauggguguguu

SEQ ID NO: 922869 - RNA, 19 nt, Artificial Sequence
  Description of Artificial Sequence: Synthetic oligonucleotide
  Antisense strand to SEQ ID NO: 922868
aacacacccaucuuauuag

SEQ ID NO: 922870 - RNA, 19 nt, Artificial Sequence
  Description of Artificial Sequence: Synthetic oligonucleotide
  Sense strand starting at position 3094 of SEQ ID NO: 913382
uccuauugguauguaauca

SEQ ID NO: 922871 - RNA, 19 nt, Artificial Sequence
  Description of Artificial Sequence: Synthetic oligonucleotide
  Antisense strand to SEQ ID NO: 922870
ugauuacauaccaauagga

SEQ ID NO: 922872 - RNA, 19 nt, Artificial Sequence
  Description of Artificial Sequence: Synthetic oligonucleotide
  Sense strand starting at position 686 of SEQ ID NO: 913382
uaauaagauggguguguuc

SEQ ID NO: 922873 - RNA, 19 nt, Artificial Sequence
  Description of Artificial Sequence: Synthetic oligonucleotide
  Antisense strand to SEQ ID NO: 922872
gaacacacccaucuuauua

SEQ ID NO: 922874 - RNA, 19 nt, Artificial Sequence
  Description of Artificial Sequence: Synthetic oligonucleotide
  Sense strand starting at position 3145 of SEQ ID NO: 913382
aggagaucacuguggcagu

SEQ ID NO: 922875 - RNA, 19 nt, Artificial Sequence
  Description of Artificial Sequence: Synthetic oligonucleotide
  Antisense strand to SEQ ID NO: 922874
acugccacagugaucuccu

SEQ ID NO: 922876 - RNA, 19 nt, Artificial Sequence
  Description of Artificial Sequence: Synthetic oligonucleotide
  Sense strand starting at position 2956 of SEQ ID NO: 913382
gggccugagaacuguguga

SEQ ID NO: 922877 - RNA, 19 nt, Artificial Sequence
  Description of Artificial Sequence: Synthetic oligonucleotide
  Antisense strand to SEQ ID NO: 922876
ucacacaguucucaggccc

SEQ ID NO: 922878 - RNA, 19 nt, Artificial Sequence
  Description of Artificial Sequence: Synthetic oligonucleotide
  Sense strand starting at position 2420 of SEQ ID NO: 913382
auaggaagaucugaauuga

SEQ ID NO: 922879 - RNA, 19 nt, Artificial Sequence
  Description of Artificial Sequence: Synthetic oligonucleotide
  Antisense strand to SEQ ID NO: 922878
ucaauucagaucuuccuau

SEQ ID NO: 922880 - RNA, 19 nt, Artificial Sequence
  Description of Artificial Sequence: Synthetic oligonucleotide
  Sense strand starting at position 1309 of SEQ ID NO: 913382
agcaaaguuuccuuaaagu

SEQ ID NO: 922881 - RNA, 19 nt, Artificial Sequence
  Description of Artificial Sequence: Synthetic oligonucleotide
  Antisense strand to SEQ ID NO: 922880
acuuuaaggaaacuuugcu

SEQ ID NO: 922882 - RNA, 19 nt, Artificial Sequence
  Description of Artificial Sequence: Synthetic oligonucleotide
  Sense strand starting at position 1916 of SEQ ID NO: 913382
cucaguaaucacugcugau

SEQ ID NO: 922883 - RNA, 19 nt, Artificial Sequence
  Description of Artificial Sequence: Synthetic oligonucleotide
  Antisense strand to SEQ ID NO: 922882
aucagcagugauuacugag

SEQ ID NO: 922884 - RNA, 19 nt, Artificial Sequence
  Description of Artificial Sequence: Synthetic oligonucleotide
  Sense strand starting at position 935 of SEQ ID NO: 913382
aguuguuguccauggagau

SEQ ID NO: 922885 - RNA, 19 nt, Artificial Sequence
  Description of Artificial Sequence: Synthetic oligonucleotide
  Antisense strand to SEQ ID NO: 922884
aucuccauggacaacaacu

SEQ ID NO: 922886 - RNA, 19 nt, Artificial Sequence
  Description of Artificial Sequence: Synthetic oligonucleotide
  Sense strand starting at position 936 of SEQ ID NO: 913382
guuguuguccauggagaug

SEQ ID NO: 922887 - RNA, 19 nt, Artificial Sequence
  Description of Artificial Sequence: Synthetic oligonucleotide
  Antisense strand to SEQ ID NO: 922886
caucuccauggacaacaac

SEQ ID NO: 922888 - RNA, 19 nt, Artificial Sequence
  Description of Artificial Sequence: Synthetic oligonucleotide
  Sense strand starting at position 214 of SEQ ID NO: 913382
uguucuaguagcuauagua

SEQ ID NO: 922889 - RNA, 19 nt, Artificial Sequence
  Description of Artificial Sequence: Synthetic oligonucleotide
  Antisense strand to SEQ ID NO: 922888
uacuauagcuacuagaaca

SEQ ID NO: 922890 - RNA, 19 nt, Artificial Sequence
  Description of Artificial Sequence: Synthetic oligonucleotide
  Sense strand starting at position 471 of SEQ ID NO: 913382
uaagcucucgcagagguau

SEQ ID NO: 922891 - RNA, 19 nt, Artificial Sequence
  Description of Artificial Sequence: Synthetic oligonucleotide
  Antisense strand to SEQ ID NO: 922890
auaccucugcgagagcuua

SEQ ID NO: 922892 - RNA, 19 nt, Artificial Sequence
  Description of Artificial Sequence: Synthetic oligonucleotide
  Sense strand starting at position 615 of SEQ ID NO: 913382
uccugacgucuguggaaca

SEQ ID NO: 922893 - RNA, 19 nt, Artificial Sequence
  Description of Artificial Sequence: Synthetic oligonucleotide
  Antisense strand to SEQ ID NO: 922892
uguuccacagacgucagga

SEQ ID NO: 922894 - RNA, 19 nt, Artificial Sequence
  Description of Artificial Sequence: Synthetic oligonucleotide
  Sense strand starting at position 2904 of SEQ ID NO: 913382
gauaaucacuccguguauc

SEQ ID NO: 922895 - RNA, 19 nt, Artificial Sequence
  Description of Artificial Sequence: Synthetic oligonucleotide
  Antisense strand to SEQ ID NO: 922894
gauacacggagugauuauc

SEQ ID NO: 922896 - RNA, 19 nt, Artificial Sequence
  Description of Artificial Sequence: Synthetic oligonucleotide
  Sense strand starting at position 917 of SEQ ID NO: 913382
cacuuuccguggcuaagaa

SEQ ID NO: 922897 - RNA, 19 nt, Artificial Sequence
  Description of Artificial Sequence: Synthetic oligonucleotide
  Antisense strand to SEQ ID NO: 922896
uucuuagccacggaaagug

SEQ ID NO: 922898 - RNA, 19 nt, Artificial Sequence
  Description of Artificial Sequence: Synthetic oligonucleotide
  Sense strand starting at position 2695 of SEQ ID NO: 913383
uauugauagugaccugaaa

SEQ ID NO: 922899 - RNA, 19 nt, Artificial Sequence
  Description of Artificial Sequence: Synthetic oligonucleotide
  Antisense strand to SEQ ID NO: 922898
uuucaggucacuaucaaua

SEQ ID NO: 922900 - RNA, 19 nt, Artificial Sequence
  Description of Artificial Sequence: Synthetic oligonucleotide
  Sense strand starting at position 3689 of SEQ ID NO: 913383
ccaguucuccuguuugcuu

SEQ ID NO: 922901 - RNA, 19 nt, Artificial Sequence
  Description of Artificial Sequence: Synthetic oligonucleotide
  Antisense strand to SEQ ID NO: 922900
aagcaaacaggagaacugg

SEQ ID NO: 922902 - RNA, 19 nt, Artificial Sequence
  Description of Artificial Sequence: Synthetic oligonucleotide
  Sense strand starting at position 356 of SEQ ID NO: 913383
aagugagauccagggaagu

SEQ ID NO: 922903 - RNA, 19 nt, Artificial Sequence
  Description of Artificial Sequence: Synthetic oligonucleotide
  Antisense strand to SEQ ID NO: 922902
acuucccuggaucucacuu

SEQ ID NO: 922904 - RNA, 19 nt, Artificial Sequence
  Description of Artificial Sequence: Synthetic oligonucleotide
  Sense strand starting at position 1418 of SEQ ID NO: 913383
gguccuuggacauaggagu

SEQ ID NO: 922905 - RNA, 19 nt, Artificial Sequence
  Description of Artificial Sequence: Synthetic oligonucleotide
  Antisense strand to SEQ ID NO: 922904
acuccuauguccaaggacc

SEQ ID NO: 922906 - RNA, 19 nt, Artificial Sequence
  Description of Artificial Sequence: Synthetic oligonucleotide
  Sense strand starting at position 1460 of SEQ ID NO: 913383
agagcccugagucauuaga

SEQ ID NO: 922907 - RNA, 19 nt, Artificial Sequence
  Description of Artificial Sequence: Synthetic oligonucleotide
  Antisense strand to SEQ ID NO: 922906
ucuaaugacucagggcucu

SEQ ID NO: 922908 - RNA, 19 nt, Artificial Sequence
  Description of Artificial Sequence: Synthetic oligonucleotide
  Sense strand starting at position 1994 of SEQ ID NO: 913383
uuggaauggccuugagaaa

SEQ ID NO: 922909 - RNA, 19 nt, Artificial Sequence
  Description of Artificial Sequence: Synthetic oligonucleotide
  Antisense strand to SEQ ID NO: 922908
uuucucaaggccauuccaa

SEQ ID NO: 922910 - RNA, 19 nt, Artificial Sequence
  Description of Artificial Sequence: Synthetic oligonucleotide
  Sense strand starting at position 3396 of SEQ ID NO: 913383
gggacauaauaccugcuaa

SEQ ID NO: 922911 - RNA, 19 nt, Artificial Sequence
  Description of Artificial Sequence: Synthetic oligonucleotide
  Antisense strand to SEQ ID NO: 922910
uuagcagguauuauguccc

SEQ ID NO: 922912 - RNA, 19 nt, Artificial Sequence
  Description of Artificial Sequence: Synthetic oligonucleotide
  Sense strand starting at position 3169 of SEQ ID NO: 913383
gagugcaaggcugauaaga

SEQ ID NO: 922913 - RNA, 19 nt, Artificial Sequence
  Description of Artificial Sequence: Synthetic oligonucleotide
  Antisense strand to SEQ ID NO: 922912
ucuuaucagccuugcacuc

SEQ ID NO: 922914 - RNA, 19 nt, Artificial Sequence
  Description of Artificial Sequence: Synthetic oligonucleotide
  Sense strand starting at position 2623 of SEQ ID NO: 913383
gagggcaugcaucaggauu

SEQ ID NO: 922915 - RNA, 19 nt, Artificial Sequence
  Description of Artificial Sequence: Synthetic oligonucleotide
  Antisense strand to SEQ ID NO: 922914
aauccugaugcaugcccuc

SEQ ID NO: 922916 - RNA, 19 nt, Artificial Sequence
  Description of Artificial Sequence: Synthetic oligonucleotide
  Sense strand starting at position 1297 of SEQ ID NO: 913383
cugagauguccucacuauu

SEQ ID NO: 922917 - RNA, 19 nt, Artificial Sequence
  Description of Artificial Sequence: Synthetic oligonucleotide
  Antisense strand to SEQ ID NO: 922916
aauagugaggacaucucag

SEQ ID NO: 922918 - RNA, 19 nt, Artificial Sequence
  Description of Artificial Sequence: Synthetic oligonucleotide
  Sense strand starting at position 2235 of SEQ ID NO: 913383
gcaaauuugcagugacuuc

SEQ ID NO: 922919 - RNA, 19 nt, Artificial Sequence
  Description of Artificial Sequence: Synthetic oligonucleotide
  Antisense strand to SEQ ID NO: 922918
gaagucacugcaaauuugc

SEQ ID NO: 922920 - RNA, 19 nt, Artificial Sequence
  Description of Artificial Sequence: Synthetic oligonucleotide
  Sense strand starting at position 2488 of SEQ ID NO: 913383
gcgauauuuaugcagccau

SEQ ID NO: 922921 - RNA, 19 nt, Artificial Sequence
  Description of Artificial Sequence: Synthetic oligonucleotide
  Antisense strand to SEQ ID NO: 922920
auggcugcauaaauaucgc

SEQ ID NO: 922922 - RNA, 19 nt, Artificial Sequence
  Description of Artificial Sequence: Synthetic oligonucleotide
  Sense strand starting at position 3973 of SEQ ID NO: 913383
ggucucaucccaggaauag

SEQ ID NO: 922923 - RNA, 19 nt, Artificial Sequence
  Description of Artificial Sequence: Synthetic oligonucleotide
  Antisense strand to SEQ ID NO: 922922
cuauuccugggaugagacc

SEQ ID NO: 922924 - RNA, 19 nt, Artificial Sequence
  Description of Artificial Sequence: Synthetic oligonucleotide
  Sense strand starting at position 3144 of SEQ ID NO: 913383
gcaguaauuuggguugcaa

SEQ ID NO: 922925 - RNA, 19 nt, Artificial Sequence
  Description of Artificial Sequence: Synthetic oligonucleotide
  Antisense strand to SEQ ID NO: 922924
uugcaacccaaauuacugc

SEQ ID NO: 922926 - RNA, 19 nt, Artificial Sequence
  Description of Artificial Sequence: Synthetic oligonucleotide
  Sense strand starting at position 3297 of SEQ ID NO: 913383
uuucgagugcuuggaauuu

SEQ ID NO: 922927 - RNA, 19 nt, Artificial Sequence
  Description of Artificial Sequence: Synthetic oligonucleotide
  Antisense strand to SEQ ID NO: 922926
aaauuccaagcacucgaaa

SEQ ID NO: 922928 - RNA, 19 nt, Artificial Sequence
  Description of Artificial Sequence: Synthetic oligonucleotide
  Sense strand starting at position 1285 of SEQ ID NO: 913383
uagugaggguuacugagau

SEQ ID NO: 922929 - RNA, 19 nt, Artificial Sequence
  Description of Artificial Sequence: Synthetic oligonucleotide
  Antisense strand to SEQ ID NO: 922928
aucucaguaacccucacua

SEQ ID NO: 922930 - RNA, 19 nt, Artificial Sequence
  Description of Artificial Sequence: Synthetic oligonucleotide
  Sense strand starting at position 3421 of SEQ ID NO: 913383
auguauaguugaccugaaa

SEQ ID NO: 922931 - RNA, 19 nt, Artificial Sequence
  Description of Artificial Sequence: Synthetic oligonucleotide
  Antisense strand to SEQ ID NO: 922930
uuucaggucaacuauacau

SEQ ID NO: 922932 - RNA, 19 nt, Artificial Sequence
  Description of Artificial Sequence: Synthetic oligonucleotide
  Sense strand starting at position 369 of SEQ ID NO: 913383
ggaaguugacagugugaga

SEQ ID NO: 922933 - RNA, 19 nt, Artificial Sequence
  Description of Artificial Sequence: Synthetic oligonucleotide
  Antisense strand to SEQ ID NO: 922932
ucucacacugucaacuucc

SEQ ID NO: 922934 - RNA, 19 nt, Artificial Sequence
  Description of Artificial Sequence: Synthetic oligonucleotide
  Sense strand starting at position 3388 of SEQ ID NO: 913383
uauugcgugggacauaaua

SEQ ID NO: 922935 - RNA, 19 nt, Artificial Sequence
  Description of Artificial Sequence: Synthetic oligonucleotide
  Antisense strand to SEQ ID NO: 922934
uauuaugucccacgcaaua

SEQ ID NO: 922936 - RNA, 19 nt, Artificial Sequence
  Description of Artificial Sequence: Synthetic oligonucleotide
  Sense strand starting at position 288 of SEQ ID NO: 913383
agguauuaggcuugaacag

SEQ ID NO: 922937 - RNA, 19 nt, Artificial Sequence
  Description of Artificial Sequence: Synthetic oligonucleotide
  Antisense strand to SEQ ID NO: 922936
cuguucaagccuaauaccu

SEQ ID NO: 922938 - RNA, 19 nt, Artificial Sequence
  Description of Artificial Sequence: Synthetic oligonucleotide
  Sense strand starting at position 3419 of SEQ ID NO: 913383
guauguauaguugaccuga

SEQ ID NO: 922939 - RNA, 19 nt, Artificial Sequence
  Description of Artificial Sequence: Synthetic oligonucleotide
  Antisense strand to SEQ ID NO: 922938
ucaggucaacuauacauac

SEQ ID NO: 922940 - RNA, 19 nt, Artificial Sequence
  Description of Artificial Sequence: Synthetic oligonucleotide
  Sense strand starting at position 2029 of SEQ ID NO: 913383
guaucaguuccucaaaucu

SEQ ID NO: 922941 - RNA, 19 nt, Artificial Sequence
  Description of Artificial Sequence: Synthetic oligonucleotide
  Antisense strand to SEQ ID NO: 922940
agauuugaggaacugauac

SEQ ID NO: 922942 - RNA, 19 nt, Artificial Sequence
  Description of Artificial Sequence: Synthetic oligonucleotide
  Sense strand starting at position 289 of SEQ ID NO: 913383
gguauuaggcuugaacagu

SEQ ID NO: 922943 - RNA, 19 nt, Artificial Sequence
  Description of Artificial Sequence: Synthetic oligonucleotide
  Antisense strand to SEQ ID NO: 922942
acuguucaagccuaauacc

SEQ ID NO: 922944 - RNA, 19 nt, Artificial Sequence
  Description of Artificial Sequence: Synthetic oligonucleotide
  Sense strand starting at position 1718 of SEQ ID NO: 913383
ugaaauaucuggcugcaaa

SEQ ID NO: 922945 - RNA, 19 nt, Artificial Sequence
  Description of Artificial Sequence: Synthetic oligonucleotide
  Antisense strand to SEQ ID NO: 922944
uuugcagccagauauuuca

SEQ ID NO: 922946 - RNA, 19 nt, Artificial Sequence
  Description of Artificial Sequence: Synthetic oligonucleotide
  Sense strand starting at position 2509 of SEQ ID NO: 913383
gcaucauugacauaguggu

SEQ ID NO: 922947 - RNA, 19 nt, Artificial Sequence
  Description of Artificial Sequence: Synthetic oligonucleotide
  Antisense strand to SEQ ID NO: 922946
accacuaugucaaugaugc

SEQ ID NO: 922948 - RNA, 19 nt, Artificial Sequence
  Description of Artificial Sequence: Synthetic oligonucleotide
  Sense strand starting at position 527 of SEQ ID NO: 913383
cugggcuugguccacuaua

SEQ ID NO: 922949 - RNA, 19 nt, Artificial Sequence
  Description of Artificial Sequence: Synthetic oligonucleotide
  Antisense strand to SEQ ID NO: 922948
uauaguggaccaagcccag

SEQ ID NO: 922950 - RNA, 19 nt, Artificial Sequence
  Description of Artificial Sequence: Synthetic oligonucleotide
  Sense strand starting at position 2027 of SEQ ID NO: 913383
ggguaucaguuccucaaau

SEQ ID NO: 922951 - RNA, 19 nt, Artificial Sequence
  Description of Artificial Sequence: Synthetic oligonucleotide
  Antisense strand to SEQ ID NO: 922950
auuugaggaacugauaccc

SEQ ID NO: 922952 - RNA, 19 nt, Artificial Sequence
  Description of Artificial Sequence: Synthetic oligonucleotide
  Sense strand starting at position 1455 of SEQ ID NO: 913383
caaucagagcccugaguca

SEQ ID NO: 922953 - RNA, 19 nt, Artificial Sequence
  Description of Artificial Sequence: Synthetic oligonucleotide
  Antisense strand to SEQ ID NO: 922952
ugacucagggcucugauug

SEQ ID NO: 922954 - RNA, 19 nt, Artificial Sequence
  Description of Artificial Sequence: Synthetic oligonucleotide
  Sense strand starting at position 2244 of SEQ ID NO: 913383
cagugacuuccaggaugca

SEQ ID NO: 922955 - RNA, 19 nt, Artificial Sequence
  Description of Artificial Sequence: Synthetic oligonucleotide
  Antisense strand to SEQ ID NO: 922954
ugcauccuggaagucacug

SEQ ID NO: 922956 - RNA, 19 nt, Artificial Sequence
  Description of Artificial Sequence: Synthetic oligonucleotide
  Sense strand starting at position 1609 of SEQ ID NO: 913383
ggugcucucagccacaaga

SEQ ID NO: 922957 - RNA, 19 nt, Artificial Sequence
  Description of Artificial Sequence: Synthetic oligonucleotide
  Antisense strand to SEQ ID NO: 922956
ucuuguggcugagagcacc

SEQ ID NO: 922958 - RNA, 19 nt, Artificial Sequence
  Description of Artificial Sequence: Synthetic oligonucleotide
  Sense strand starting at position 1280 of SEQ ID NO: 913383
cacuuuagugaggguuacu

SEQ ID NO: 922959 - RNA, 19 nt, Artificial Sequence
  Description of Artificial Sequence: Synthetic oligonucleotide
  Antisense strand to SEQ ID NO: 922958
aguaacccucacuaaagug

SEQ ID NO: 922960 - RNA, 19 nt, Artificial Sequence
  Description of Artificial Sequence: Synthetic oligonucleotide
  Sense strand starting at position 3073 of SEQ ID NO: 913383
gcacucaacugcuugaaga

SEQ ID NO: 922961 - RNA, 19 nt, Artificial Sequence
  Description of Artificial Sequence: Synthetic oligonucleotide
  Antisense strand to SEQ ID NO: 922960
ucuucaagcaguugagugc

SEQ ID NO: 922962 - RNA, 19 nt, Artificial Sequence
  Description of Artificial Sequence: Synthetic oligonucleotide
  Sense strand starting at position 2028 of SEQ ID NO: 913383
gguaucaguuccucaaauc

SEQ ID NO: 922963 - RNA, 19 nt, Artificial Sequence
  Description of Artificial Sequence: Synthetic oligonucleotide
  Antisense strand to SEQ ID NO: 922962
gauuugaggaacugauacc

SEQ ID NO: 922964 - RNA, 19 nt, Artificial Sequence
  Description of Artificial Sequence: Synthetic oligonucleotide
  Sense strand starting at position 2964 of SEQ ID NO: 913383
cugcuaauguucucagaag

SEQ ID NO: 922965 - RNA, 19 nt, Artificial Sequence
  Description of Artificial Sequence: Synthetic oligonucleotide
  Antisense strand to SEQ ID NO: 922964
cuucugagaacauuagcag

SEQ ID NO: 922966 - RNA, 19 nt, Artificial Sequence
  Description of Artificial Sequence: Synthetic oligonucleotide
  Sense strand starting at position 99 of SEQ ID NO: 913383
agguaugucaugcaguaug

SEQ ID NO: 922967 - RNA, 19 nt, Artificial Sequence
  Description of Artificial Sequence: Synthetic oligonucleotide
  Antisense strand to SEQ ID NO: 922966
cauacugcaugacauaccu

SEQ ID NO: 922968 - RNA, 19 nt, Artificial Sequence
  Description of Artificial Sequence: Synthetic oligonucleotide
  Sense strand starting at position 1291 of SEQ ID NO: 913383
ggguuacugagauguccuc

SEQ ID NO: 922969 - RNA, 19 nt, Artificial Sequence
  Description of Artificial Sequence: Synthetic oligonucleotide
  Antisense strand to SEQ ID NO: 922968
gaggacaucucaguaaccc

SEQ ID NO: 922970 - RNA, 19 nt, Artificial Sequence
  Description of Artificial Sequence: Synthetic oligonucleotide
  Sense strand starting at position 2409 of SEQ ID NO: 913383
cuggaaauuuagcaucauu

SEQ ID NO: 922971 - RNA, 19 nt, Artificial Sequence
  Description of Artificial Sequence: Synthetic oligonucleotide
  Antisense strand to SEQ ID NO: 922970
aaugaugcuaaauuuccag

SEQ ID NO: 922972 - RNA, 19 nt, Artificial Sequence
  Description of Artificial Sequence: Synthetic oligonucleotide
  Sense strand starting at position 3384 of SEQ ID NO: 913383
uaaauauugcgugggacau

SEQ ID NO: 922973 - RNA, 19 nt, Artificial Sequence
  Description of Artificial Sequence: Synthetic oligonucleotide
  Antisense strand to SEQ ID NO: 922972
augucccacgcaauauuua

SEQ ID NO: 922974 - RNA, 19 nt, Artificial Sequence
  Description of Artificial Sequence: Synthetic oligonucleotide
  Sense strand starting at position 3383 of SEQ ID NO: 913383
cuaaauauugcgugggaca

SEQ ID NO: 922975 - RNA, 19 nt, Artificial Sequence
  Description of Artificial Sequence: Synthetic oligonucleotide
  Antisense strand to SEQ ID NO: 922974
ugucccacgcaauauuuag

SEQ ID NO: 922976 - RNA, 19 nt, Artificial Sequence
  Description of Artificial Sequence: Synthetic oligonucleotide
  Sense strand starting at position 2918 of SEQ ID NO: 913383
gaaugucaucuuggcccau

SEQ ID NO: 922977 - RNA, 19 nt, Artificial Sequence
  Description of Artificial Sequence: Synthetic oligonucleotide
  Antisense strand to SEQ ID NO: 922976
augggccaagaugacauuc

SEQ ID NO: 922978 - RNA, 19 nt, Artificial Sequence
  Description of Artificial Sequence: Synthetic oligonucleotide
  Sense strand starting at position 3884 of SEQ ID NO: 913384
cucuuaauagcugaggauc

SEQ ID NO: 922979 - RNA, 19 nt, Artificial Sequence
  Description of Artificial Sequence: Synthetic oligonucleotide
  Antisense strand to SEQ ID NO: 922978
gauccucagcuauuaagag

SEQ ID NO: 922980 - RNA, 19 nt, Artificial Sequence
  Description of Artificial Sequence: Synthetic oligonucleotide
  Sense strand starting at position 2620 of SEQ ID NO: 913384
ggauucugugcgccaguca

SEQ ID NO: 922981 - RNA, 19 nt, Artificial Sequence
  Description of Artificial Sequence: Synthetic oligonucleotide
  Antisense strand to SEQ ID NO: 922980
ugacuggcgcacagaaucc

SEQ ID NO: 922982 - RNA, 19 nt, Artificial Sequence
  Description of Artificial Sequence: Synthetic oligonucleotide
  Sense strand starting at position 3769 of SEQ ID NO: 913384
gaauaauuagucgaagguc

SEQ ID NO: 922983 - RNA, 19 nt, Artificial Sequence
  Description of Artificial Sequence: Synthetic oligonucleotide
  Antisense strand to SEQ ID NO: 922982
gaccuucgacuaauuauuc

SEQ ID NO: 922984 - RNA, 19 nt, Artificial Sequence
  Description of Artificial Sequence: Synthetic oligonucleotide
  Sense strand starting at position 3381 of SEQ ID NO: 913384
cgacuuucucuauagaacu

SEQ ID NO: 922985 - RNA, 19 nt, Artificial Sequence
  Description of Artificial Sequence: Synthetic oligonucleotide
  Antisense strand to SEQ ID NO: 922984
aguucuauagagaaagucg

SEQ ID NO: 922986 - RNA, 19 nt, Artificial Sequence
  Description of Artificial Sequence: Synthetic oligonucleotide
  Sense strand starting at position 3832 of SEQ ID NO: 913384
aagggaaauuaguugccaa

SEQ ID NO: 922987 - RNA, 19 nt, Artificial Sequence
  Description of Artificial Sequence: Synthetic oligonucleotide
  Antisense strand to SEQ ID NO: 922986
uuggcaacuaauuucccuu

SEQ ID NO: 922988 - RNA, 19 nt, Artificial Sequence
  Description of Artificial Sequence: Synthetic oligonucleotide
  Sense strand starting at position 2796 of SEQ ID NO: 913384
ggcaaugagcaccaaacuu

SEQ ID NO: 922989 - RNA, 19 nt, Artificial Sequence
  Description of Artificial Sequence: Synthetic oligonucleotide
  Antisense strand to SEQ ID NO: 922988
aaguuuggugcucauugcc

SEQ ID NO: 922990 - RNA, 19 nt, Artificial Sequence
  Description of Artificial Sequence: Synthetic oligonucleotide
  Sense strand starting at position 3756 of SEQ ID NO: 913384
gcuacagaagguugaauaa

SEQ ID NO: 922991 - RNA, 19 nt, Artificial Sequence
  Description of Artificial Sequence: Synthetic oligonucleotide
  Antisense strand to SEQ ID NO: 922990
uuauucaaccuucuguagc

SEQ ID NO: 922992 - RNA, 19 nt, Artificial Sequence
  Description of Artificial Sequence: Synthetic oligonucleotide
  Sense strand starting at position 798 of SEQ ID NO: 913384
agagauauaaugugagcua

SEQ ID NO: 922993 - RNA, 19 nt, Artificial Sequence
  Description of Artificial Sequence: Synthetic oligonucleotide
  Antisense strand to SEQ ID NO: 922992
uagcucacauuauaucucu

SEQ ID NO: 922994 - RNA, 19 nt, Artificial Sequence
  Description of Artificial Sequence: Synthetic oligonucleotide
  Sense strand starting at position 3468 of SEQ ID NO: 913384
acgacuuaugaaggaaugu

SEQ ID NO: 922995 - RNA, 19 nt, Artificial Sequence
  Description of Artificial Sequence: Synthetic oligonucleotide
  Antisense strand to SEQ ID NO: 922994
acauuccuucauaagucgu

SEQ ID NO: 922996 - RNA, 19 nt, Artificial Sequence
  Description of Artificial Sequence: Synthetic oligonucleotide
  Sense strand starting at position 782 of SEQ ID NO: 913384
agcagugugauccaacaga

SEQ ID NO: 922997 - RNA, 19 nt, Artificial Sequence
  Description of Artificial Sequence: Synthetic oligonucleotide
  Antisense strand to SEQ ID NO: 922996
ucuguuggaucacacugcu

SEQ ID NO: 922998 - RNA, 19 nt, Artificial Sequence
  Description of Artificial Sequence: Synthetic oligonucleotide
  Sense strand starting at position 2271 of SEQ ID NO: 913384
ccaccagguauuggagauu

SEQ ID NO: 922999 - RNA, 19 nt, Artificial Sequence
  Description of Artificial Sequence: Synthetic oligonucleotide
  Antisense strand to SEQ ID NO: 922998
aaucuccaauaccuggugg

SEQ ID NO: 923000 - RNA, 19 nt, Artificial Sequence
  Description of Artificial Sequence: Synthetic oligonucleotide
  Sense strand starting at position 2338 of SEQ ID NO: 913384
uugagauaguuacuuaauc

SEQ ID NO: 923001 - RNA, 19 nt, Artificial Sequence
  Description of Artificial Sequence: Synthetic oligonucleotide
  Antisense strand to SEQ ID NO: 923000
gauuaaguaacuaucucaa

SEQ ID NO: 923002 - RNA, 19 nt, Artificial Sequence
  Description of Artificial Sequence: Synthetic oligonucleotide
  Sense strand starting at position 2339 of SEQ ID NO: 913384
ugagauaguuacuuaaucu

SEQ ID NO: 923003 - RNA, 19 nt, Artificial Sequence
  Description of Artificial Sequence: Synthetic oligonucleotide
  Antisense strand to SEQ ID NO: 923002
agauuaaguaacuaucuca

SEQ ID NO: 923004 - RNA, 19 nt, Artificial Sequence
  Description of Artificial Sequence: Synthetic oligonucleotide
  Sense strand starting at position 2299 of SEQ ID NO: 913384
augggagaagccugaugua

SEQ ID NO: 923005 - RNA, 19 nt, Artificial Sequence
  Description of Artificial Sequence: Synthetic oligonucleotide
  Antisense strand to SEQ ID NO: 923004
uacaucaggcuucucccau

SEQ ID NO: 923006 - RNA, 19 nt, Artificial Sequence
  Description of Artificial Sequence: Synthetic oligonucleotide
  Sense strand starting at position 2807 of SEQ ID NO: 913384
ccaaacuuugcucaguaag

SEQ ID NO: 923007 - RNA, 19 nt, Artificial Sequence
  Description of Artificial Sequence: Synthetic oligonucleotide
  Antisense strand to SEQ ID NO: 923006
cuuacugagcaaaguuugg

SEQ ID NO: 923008 - RNA, 19 nt, Artificial Sequence
  Description of Artificial Sequence: Synthetic oligonucleotide
  Sense strand starting at position 343 of SEQ ID NO: 913384
cucugagcuccugaacuua

SEQ ID NO: 923009 - RNA, 19 nt, Artificial Sequence
  Description of Artificial Sequence: Synthetic oligonucleotide
  Antisense strand to SEQ ID NO: 923008
uaaguucaggagcucagag

SEQ ID NO: 923010 - RNA, 19 nt, Artificial Sequence
  Description of Artificial Sequence: Synthetic oligonucleotide
  Sense strand starting at position 2106 of SEQ ID NO: 913384
gguuguucugcauccgcau

SEQ ID NO: 923011 - RNA, 19 nt, Artificial Sequence
  Description of Artificial Sequence: Synthetic oligonucleotide
  Antisense strand to SEQ ID NO: 923010
augcggaugcagaacaacc

SEQ ID NO: 923012 - RNA, 19 nt, Artificial Sequence
  Description of Artificial Sequence: Synthetic oligonucleotide
  Sense strand starting at position 3833 of SEQ ID NO: 913384
agggaaauuaguugccaac

SEQ ID NO: 923013 - RNA, 19 nt, Artificial Sequence
  Description of Artificial Sequence: Synthetic oligonucleotide
  Antisense strand to SEQ ID NO: 923012
guuggcaacuaauuucccu

SEQ ID NO: 923014 - RNA, 19 nt, Artificial Sequence
  Description of Artificial Sequence: Synthetic oligonucleotide
  Sense strand starting at position 3378 of SEQ ID NO: 913384
acacgacuuucucuauaga

SEQ ID NO: 923015 - RNA, 19 nt, Artificial Sequence
  Description of Artificial Sequence: Synthetic oligonucleotide
  Antisense strand to SEQ ID NO: 923014
ucuauagagaaagucgugu

SEQ ID NO: 923016 - RNA, 19 nt, Artificial Sequence
  Description of Artificial Sequence: Synthetic oligonucleotide
  Sense strand starting at position 3823 of SEQ ID NO: 913384
cggucacccaagggaaauu

SEQ ID NO: 923017 - RNA, 19 nt, Artificial Sequence
  Description of Artificial Sequence: Synthetic oligonucleotide
  Antisense strand to SEQ ID NO: 923016
aauuucccuugggugaccg

SEQ ID NO: 923018 - RNA, 19 nt, Artificial Sequence
  Description of Artificial Sequence: Synthetic oligonucleotide
  Sense strand starting at position 805 of SEQ ID NO: 913384
uaaugugagcuacauguga

SEQ ID NO: 923019 - RNA, 19 nt, Artificial Sequence
  Description of Artificial Sequence: Synthetic oligonucleotide
  Antisense strand to SEQ ID NO: 923018
ucacauguagcucacauua

SEQ ID NO: 923020 - RNA, 19 nt, Artificial Sequence
  Description of Artificial Sequence: Synthetic oligonucleotide
  Sense strand starting at position 3318 of SEQ ID NO: 913384
aauccuucccugggugaga

SEQ ID NO: 923021 - RNA, 19 nt, Artificial Sequence
  Description of Artificial Sequence: Synthetic oligonucleotide
  Antisense strand to SEQ ID NO: 923020
ucucacccagggaaggauu

SEQ ID NO: 923022 - RNA, 19 nt, Artificial Sequence
  Description of Artificial Sequence: Synthetic oligonucleotide
  Sense strand starting at position 90 of SEQ ID NO: 913384
ugaacacuugugggaucuu

SEQ ID NO: 923023 - RNA, 19 nt, Artificial Sequence
  Description of Artificial Sequence: Synthetic oligonucleotide
  Antisense strand to SEQ ID NO: 923022
aagaucccacaaguguuca

SEQ ID NO: 923024 - RNA, 19 nt, Artificial Sequence
  Description of Artificial Sequence: Synthetic oligonucleotide
  Sense strand starting at position 3316 of SEQ ID NO: 913384
agaauccuucccuggguga

SEQ ID NO: 923025 - RNA, 19 nt, Artificial Sequence
  Description of Artificial Sequence: Synthetic oligonucleotide
  Antisense strand to SEQ ID NO: 923024
ucacccagggaaggauucu

SEQ ID NO: 923026 - RNA, 19 nt, Artificial Sequence
  Description of Artificial Sequence: Synthetic oligonucleotide
  Sense strand starting at position 801 of SEQ ID NO: 913384
gauauaaugugagcuacau

SEQ ID NO: 923027 - RNA, 19 nt, Artificial Sequence
  Description of Artificial Sequence: Synthetic oligonucleotide
  Antisense strand to SEQ ID NO: 923026
auguagcucacauuauauc

SEQ ID NO: 923028 - RNA, 19 nt, Artificial Sequence
  Description of Artificial Sequence: Synthetic oligonucleotide
  Sense strand starting at position 3453 of SEQ ID NO: 913384
cugugaaaggaauguacga

SEQ ID NO: 923029 - RNA, 19 nt, Artificial Sequence
  Description of Artificial Sequence: Synthetic oligonucleotide
  Antisense strand to SEQ ID NO: 923028
ucguacauuccuuucacag

SEQ ID NO: 923030 - RNA, 19 nt, Artificial Sequence
  Description of Artificial Sequence: Synthetic oligonucleotide
  Sense strand starting at position 3078 of SEQ ID NO: 913384
ccuacuguucuuggaauaa

SEQ ID NO: 923031 - RNA, 19 nt, Artificial Sequence
  Description of Artificial Sequence: Synthetic oligonucleotide
  Antisense strand to SEQ ID NO: 923030
uuauuccaagaacaguagg

SEQ ID NO: 923032 - RNA, 19 nt, Artificial Sequence
  Description of Artificial Sequence: Synthetic oligonucleotide
  Sense strand starting at position 3766 of SEQ ID NO: 913384
guugaauaauuagucgaag

SEQ ID NO: 923033 - RNA, 19 nt, Artificial Sequence
  Description of Artificial Sequence: Synthetic oligonucleotide
  Antisense strand to SEQ ID NO: 923032
cuucgacuaauuauucaac

SEQ ID NO: 923034 - RNA, 19 nt, Artificial Sequence
  Description of Artificial Sequence: Synthetic oligonucleotide
  Sense strand starting at position 2143 of SEQ ID NO: 913384
gcacuuguccugcuguguu

SEQ ID NO: 923035 - RNA, 19 nt, Artificial Sequence
  Description of Artificial Sequence: Synthetic oligonucleotide
  Antisense strand to SEQ ID NO: 923034
aacacagcaggacaagugc

SEQ ID NO: 923036 - RNA, 19 nt, Artificial Sequence
  Description of Artificial Sequence: Synthetic oligonucleotide
  Sense strand starting at position 1615 of SEQ ID NO: 913384
ccagauguaccaggcugaa

SEQ ID NO: 923037 - RNA, 19 nt, Artificial Sequence
  Description of Artificial Sequence: Synthetic oligonucleotide
  Antisense strand to SEQ ID NO: 923036
uucagccugguacaucugg

SEQ ID NO: 923038 - RNA, 19 nt, Artificial Sequence
  Description of Artificial Sequence: Synthetic oligonucleotide
  Sense strand starting at position 478 of SEQ ID NO: 913384
guaacugauaugugugaaa

SEQ ID NO: 923039 - RNA, 19 nt, Artificial Sequence
  Description of Artificial Sequence: Synthetic oligonucleotide
  Antisense strand to SEQ ID NO: 923038
uuucacacauaucaguuac

SEQ ID NO: 923040 - RNA, 19 nt, Artificial Sequence
  Description of Artificial Sequence: Synthetic oligonucleotide
  Sense strand starting at position 3768 of SEQ ID NO: 913384
ugaauaauuagucgaaggu

SEQ ID NO: 923041 - RNA, 19 nt, Artificial Sequence
  Description of Artificial Sequence: Synthetic oligonucleotide
  Antisense strand to SEQ ID NO: 923040
accuucgacuaauuauuca

SEQ ID NO: 923042 - RNA, 19 nt, Artificial Sequence
  Description of Artificial Sequence: Synthetic oligonucleotide
  Sense strand starting at position 20 of SEQ ID NO: 913384
gagacuggcacacgugaaa

SEQ ID NO: 923043 - RNA, 19 nt, Artificial Sequence
  Description of Artificial Sequence: Synthetic oligonucleotide
  Antisense strand to SEQ ID NO: 923042
uuucacgugugccagucuc

SEQ ID NO: 923044 - RNA, 19 nt, Artificial Sequence
  Description of Artificial Sequence: Synthetic oligonucleotide
  Sense strand starting at position 545 of SEQ ID NO: 913384
guugucaauugaucaaauu

SEQ ID NO: 923045 - RNA, 19 nt, Artificial Sequence
  Description of Artificial Sequence: Synthetic oligonucleotide
  Antisense strand to SEQ ID NO: 923044
aauuugaucaauugacaac

SEQ ID NO: 923046 - RNA, 19 nt, Artificial Sequence
  Description of Artificial Sequence: Synthetic oligonucleotide
  Sense strand starting at position 780 of SEQ ID NO: 913384
agagcagugugauccaaca

SEQ ID NO: 923047 - RNA, 19 nt, Artificial Sequence
  Description of Artificial Sequence: Synthetic oligonucleotide
  Antisense strand to SEQ ID NO: 923046
uguuggaucacacugcucu

SEQ ID NO: 923048 - RNA, 19 nt, Artificial Sequence
  Description of Artificial Sequence: Synthetic oligonucleotide
  Sense strand starting at position 476 of SEQ ID NO: 913384
ggguaacugauauguguga

SEQ ID NO: 923049 - RNA, 19 nt, Artificial Sequence
  Description of Artificial Sequence: Synthetic oligonucleotide
  Antisense strand to SEQ ID NO: 923048
ucacacauaucaguuaccc

SEQ ID NO: 923050 - RNA, 19 nt, Artificial Sequence
  Description of Artificial Sequence: Synthetic oligonucleotide
  Sense strand starting at position 3772 of SEQ ID NO: 913384
uaauuagucgaaggucaca

SEQ ID NO: 923051 - RNA, 19 nt, Artificial Sequence
  Description of Artificial Sequence: Synthetic oligonucleotide
  Antisense strand to SEQ ID NO: 923050
ugugaccuucgacuaauua

SEQ ID NO: 923052 - RNA, 19 nt, Artificial Sequence
  Description of Artificial Sequence: Synthetic oligonucleotide
  Sense strand starting at position 2020 of SEQ ID NO: 913384
ugcauuuaucagugcccga

SEQ ID NO: 923053 - RNA, 19 nt, Artificial Sequence
  Description of Artificial Sequence: Synthetic oligonucleotide
  Antisense strand to SEQ ID NO: 923052
ucgggcacugauaaaugca

SEQ ID NO: 923054 - RNA, 19 nt, Artificial Sequence
  Description of Artificial Sequence: Synthetic oligonucleotide
  Sense strand starting at position 480 of SEQ ID NO: 913384
aacugauaugugugaaagc

SEQ ID NO: 923055 - RNA, 19 nt, Artificial Sequence
  Description of Artificial Sequence: Synthetic oligonucleotide
  Antisense strand to SEQ ID NO: 923054
gcuuucacacauaucaguu

SEQ ID NO: 923056 - RNA, 19 nt, Artificial Sequence
  Description of Artificial Sequence: Synthetic oligonucleotide
  Sense strand starting at position 807 of SEQ ID NO: 913384
augugagcuacaugugaaa

SEQ ID NO: 923057 - RNA, 19 nt, Artificial Sequence
  Description of Artificial Sequence: Synthetic oligonucleotide
  Antisense strand to SEQ ID NO: 923056
uuucacauguagcucacau

SEQ ID NO: 923058 - RNA, 19 nt, Artificial Sequence
  Description of Artificial Sequence: Synthetic oligonucleotide
  Sense strand starting at position 184 of SEQ ID NO: 913385
augaauaccguggagugaa

SEQ ID NO: 923059 - RNA, 19 nt, Artificial Sequence
  Description of Artificial Sequence: Synthetic oligonucleotide
  Antisense strand to SEQ ID NO: 923058
uucacuccacgguauucau

SEQ ID NO: 923060 - RNA, 19 nt, Artificial Sequence
  Description of Artificial Sequence: Synthetic oligonucleotide
  Sense strand starting at position 1375 of SEQ ID NO: 913385
acaugaaccuucuugauug

SEQ ID NO: 923061 - RNA, 19 nt, Artificial Sequence
  Description of Artificial Sequence: Synthetic oligonucleotide
  Antisense strand to SEQ ID NO: 923060
caaucaagaagguucaugu

SEQ ID NO: 923062 - RNA, 19 nt, Artificial Sequence
  Description of Artificial Sequence: Synthetic oligonucleotide
  Sense strand starting at position 3199 of SEQ ID NO: 913385
ucaguaaggcuauaaucua

SEQ ID NO: 923063 - RNA, 19 nt, Artificial Sequence
  Description of Artificial Sequence: Synthetic oligonucleotide
  Antisense strand to SEQ ID NO: 923062
uagauuauagccuuacuga

SEQ ID NO: 923064 - RNA, 19 nt, Artificial Sequence
  Description of Artificial Sequence: Synthetic oligonucleotide
  Sense strand starting at position 1336 of SEQ ID NO: 913385
uuacuuaaggagugauuau

SEQ ID NO: 923065 - RNA, 19 nt, Artificial Sequence
  Description of Artificial Sequence: Synthetic oligonucleotide
  Antisense strand to SEQ ID NO: 923064
auaaucacuccuuaaguaa

SEQ ID NO: 923066 - RNA, 19 nt, Artificial Sequence
  Description of Artificial Sequence: Synthetic oligonucleotide
  Sense strand starting at position 2201 of SEQ ID NO: 913385
gugcuaagacuuuaaugac

SEQ ID NO: 923067 - RNA, 19 nt, Artificial Sequence
  Description of Artificial Sequence: Synthetic oligonucleotide
  Antisense strand to SEQ ID NO: 923066
gucauuaaagucuuagcac

SEQ ID NO: 923068 - RNA, 19 nt, Artificial Sequence
  Description of Artificial Sequence: Synthetic oligonucleotide
  Sense strand starting at position 3669 of SEQ ID NO: 913385
aggugagacugaucucuac

SEQ ID NO: 923069 - RNA, 19 nt, Artificial Sequence
  Description of Artificial Sequence: Synthetic oligonucleotide
  Antisense strand to SEQ ID NO: 923068
guagagaucagucucaccu

SEQ ID NO: 923070 - RNA, 19 nt, Artificial Sequence
  Description of Artificial Sequence: Synthetic oligonucleotide
  Sense strand starting at position 621 of SEQ ID NO: 913385
guuguuagacaagaagcau

SEQ ID NO: 923071 - RNA, 19 nt, Artificial Sequence
  Description of Artificial Sequence: Synthetic oligonucleotide
  Antisense strand to SEQ ID NO: 923070
augcuucuugucuaacaac

SEQ ID NO: 923072 - RNA, 19 nt, Artificial Sequence
  Description of Artificial Sequence: Synthetic oligonucleotide
  Sense strand starting at position 2211 of SEQ ID NO: 913385
uuuaaugaccgcgagggaa

SEQ ID NO: 923073 - RNA, 19 nt, Artificial Sequence
  Description of Artificial Sequence: Synthetic oligonucleotide
  Antisense strand to SEQ ID NO: 923072
uucccucgcggucauuaaa

SEQ ID NO: 923074 - RNA, 19 nt, Artificial Sequence
  Description of Artificial Sequence: Synthetic oligonucleotide
  Sense strand starting at position 2825 of SEQ ID NO: 913385
ggaacauaucacuguacuc

SEQ ID NO: 923075 - RNA, 19 nt, Artificial Sequence
  Description of Artificial Sequence: Synthetic oligonucleotide
  Antisense strand to SEQ ID NO: 923074
gaguacagugauauguucc

SEQ ID NO: 923076 - RNA, 19 nt, Artificial Sequence
  Description of Artificial Sequence: Synthetic oligonucleotide
  Sense strand starting at position 3890 of SEQ ID NO: 913385
aagaguagcuaagugaaua

SEQ ID NO: 923077 - RNA, 19 nt, Artificial Sequence
  Description of Artificial Sequence: Synthetic oligonucleotide
  Antisense strand to SEQ ID NO: 923076
uauucacuuagcuacucuu

SEQ ID NO: 923078 - RNA, 19 nt, Artificial Sequence
  Description of Artificial Sequence: Synthetic oligonucleotide
  Sense strand starting at position 368 of SEQ ID NO: 913385
uggguuucuuuauuaaaga

SEQ ID NO: 923079 - RNA, 19 nt, Artificial Sequence
  Description of Artificial Sequence: Synthetic oligonucleotide
  Antisense strand to SEQ ID NO: 923078
ucuuuaauaaagaaaccca

SEQ ID NO: 923080 - RNA, 19 nt, Artificial Sequence
  Description of Artificial Sequence: Synthetic oligonucleotide
  Sense strand starting at position 1163 of SEQ ID NO: 913385
uauugagagcuaugacuau

SEQ ID NO: 923081 - RNA, 19 nt, Artificial Sequence
  Description of Artificial Sequence: Synthetic oligonucleotide
  Antisense strand to SEQ ID NO: 923080
auagucauagcucucaaua

SEQ ID NO: 923082 - RNA, 19 nt, Artificial Sequence
  Description of Artificial Sequence: Synthetic oligonucleotide
  Sense strand starting at position 576 of SEQ ID NO: 913385
agcucuuagcucuaaagga

SEQ ID NO: 923083 - RNA, 19 nt, Artificial Sequence
  Description of Artificial Sequence: Synthetic oligonucleotide
  Antisense strand to SEQ ID NO: 923082
uccuuuagagcuaagagcu

SEQ ID NO: 923084 - RNA, 19 nt, Artificial Sequence
  Description of Artificial Sequence: Synthetic oligonucleotide
  Sense strand starting at position 2090 of SEQ ID NO: 913385
ugccacguuccaugaauuu

SEQ ID NO: 923085 - RNA, 19 nt, Artificial Sequence
  Description of Artificial Sequence: Synthetic oligonucleotide
  Antisense strand to SEQ ID NO: 923084
aaauucauggaacguggca

SEQ ID NO: 923086 - RNA, 19 nt, Artificial Sequence
  Description of Artificial Sequence: Synthetic oligonucleotide
  Sense strand starting at position 1714 of SEQ ID NO: 913385
gaaaguagcgauuacccau

SEQ ID NO: 923087 - RNA, 19 nt, Artificial Sequence
  Description of Artificial Sequence: Synthetic oligonucleotide
  Antisense strand to SEQ ID NO: 923086
auggguaaucgcuacuuuc

SEQ ID NO: 923088 - RNA, 19 nt, Artificial Sequence
  Description of Artificial Sequence: Synthetic oligonucleotide
  Sense strand starting at position 3891 of SEQ ID NO: 913385
agaguagcuaagugaauaa

SEQ ID NO: 923089 - RNA, 19 nt, Artificial Sequence
  Description of Artificial Sequence: Synthetic oligonucleotide
  Antisense strand to SEQ ID NO: 923088
uuauucacuuagcuacucu

SEQ ID NO: 923090 - RNA, 19 nt, Artificial Sequence
  Description of Artificial Sequence: Synthetic oligonucleotide
  Sense strand starting at position 2158 of SEQ ID NO: 913385
gaagacuuuguguagcaca

SEQ ID NO: 923091 - RNA, 19 nt, Artificial Sequence
  Description of Artificial Sequence: Synthetic oligonucleotide
  Antisense strand to SEQ ID NO: 923090
ugugcuacacaaagucuuc

SEQ ID NO: 923092 - RNA, 19 nt, Artificial Sequence
  Description of Artificial Sequence: Synthetic oligonucleotide
  Sense strand starting at position 487 of SEQ ID NO: 913385
ugcauauugguagaguaua

SEQ ID NO: 923093 - RNA, 19 nt, Artificial Sequence
  Description of Artificial Sequence: Synthetic oligonucleotide
  Antisense strand to SEQ ID NO: 923092
uauacucuaccaauaugca

SEQ ID NO: 923094 - RNA, 19 nt, Artificial Sequence
  Description of Artificial Sequence: Synthetic oligonucleotide
  Sense strand starting at position 704 of SEQ ID NO: 913385
uccgaaaccuaagugacau

SEQ ID NO: 923095 - RNA, 19 nt, Artificial Sequence
  Description of Artificial Sequence: Synthetic oligonucleotide
  Antisense strand to SEQ ID NO: 923094
augucacuuagguuucgga

SEQ ID NO: 923096 - RNA, 19 nt, Artificial Sequence
  Description of Artificial Sequence: Synthetic oligonucleotide
  Sense strand starting at position 183 of SEQ ID NO: 913385
aaugaauaccguggaguga

SEQ ID NO: 923097 - RNA, 19 nt, Artificial Sequence
  Description of Artificial Sequence: Synthetic oligonucleotide
  Antisense strand to SEQ ID NO: 923096
ucacuccacgguauucauu

SEQ ID NO: 923098 - RNA, 19 nt, Artificial Sequence
  Description of Artificial Sequence: Synthetic oligonucleotide
  Sense strand starting at position 3120 of SEQ ID NO: 913385
gcuuaugcucuggaaacau

SEQ ID NO: 923099 - RNA, 19 nt, Artificial Sequence
  Description of Artificial Sequence: Synthetic oligonucleotide
  Antisense strand to SEQ ID NO: 923098
auguuuccagagcauaagc

SEQ ID NO: 923100 - RNA, 19 nt, Artificial Sequence
  Description of Artificial Sequence: Synthetic oligonucleotide
  Sense strand starting at position 2154 of SEQ ID NO: 913385
uuuagaagacuuuguguag

SEQ ID NO: 923101 - RNA, 19 nt, Artificial Sequence
  Description of Artificial Sequence: Synthetic oligonucleotide
  Antisense strand to SEQ ID NO: 923100
cuacacaaagucuucuaaa

SEQ ID NO: 923102 - RNA, 19 nt, Artificial Sequence
  Description of Artificial Sequence: Synthetic oligonucleotide
  Sense strand starting at position 1516 of SEQ ID NO: 913385
guggaagcucaguaaagca

SEQ ID NO: 923103 - RNA, 19 nt, Artificial Sequence
  Description of Artificial Sequence: Synthetic oligonucleotide
  Antisense strand to SEQ ID NO: 923102
ugcuuuacugagcuuccac

SEQ ID NO: 923104 - RNA, 19 nt, Artificial Sequence
  Description of Artificial Sequence: Synthetic oligonucleotide
  Sense strand starting at position 3441 of SEQ ID NO: 913385
ugucauuugcuaggucagu

SEQ ID NO: 923105 - RNA, 19 nt, Artificial Sequence
  Description of Artificial Sequence: Synthetic oligonucleotide
  Antisense strand to SEQ ID NO: 923104
acugaccuagcaaaugaca

SEQ ID NO: 923106 - RNA, 19 nt, Artificial Sequence
  Description of Artificial Sequence: Synthetic oligonucleotide
  Sense strand starting at position 448 of SEQ ID NO: 913385
ggcagcccucauuauuaca

SEQ ID NO: 923107 - RNA, 19 nt, Artificial Sequence
  Description of Artificial Sequence: Synthetic oligonucleotide
  Antisense strand to SEQ ID NO: 923106
uguaauaaugagggcugcc

SEQ ID NO: 923108 - RNA, 19 nt, Artificial Sequence
  Description of Artificial Sequence: Synthetic oligonucleotide
  Sense strand starting at position 3151 of SEQ ID NO: 913385
ugaguuugcacugggaaug

SEQ ID NO: 923109 - RNA, 19 nt, Artificial Sequence
  Description of Artificial Sequence: Synthetic oligonucleotide
  Antisense strand to SEQ ID NO: 923108
cauucccagugcaaacuca

SEQ ID NO: 923110 - RNA, 19 nt, Artificial Sequence
  Description of Artificial Sequence: Synthetic oligonucleotide
  Sense strand starting at position 3961 of SEQ ID NO: 913385
gagugcuuugcauacaaua

SEQ ID NO: 923111 - RNA, 19 nt, Artificial Sequence
  Description of Artificial Sequence: Synthetic oligonucleotide
  Antisense strand to SEQ ID NO: 923110
uauuguaugcaaagcacuc

SEQ ID NO: 923112 - RNA, 19 nt, Artificial Sequence
  Description of Artificial Sequence: Synthetic oligonucleotide
  Sense strand starting at position 661 of SEQ ID NO: 913385
aggcuuugagcucaaucuu

SEQ ID NO: 923113 - RNA, 19 nt, Artificial Sequence
  Description of Artificial Sequence: Synthetic oligonucleotide
  Antisense strand to SEQ ID NO: 923112
aagauugagcucaaagccu

SEQ ID NO: 923114 - RNA, 19 nt, Artificial Sequence
  Description of Artificial Sequence: Synthetic oligonucleotide
  Sense strand starting at position 3413 of SEQ ID NO: 913385
acaucuuugucccucuaga

SEQ ID NO: 923115 - RNA, 19 nt, Artificial Sequence
  Description of Artificial Sequence: Synthetic oligonucleotide
  Antisense strand to SEQ ID NO: 923114
ucuagagggacaaagaugu

SEQ ID NO: 923116 - RNA, 19 nt, Artificial Sequence
  Description of Artificial Sequence: Synthetic oligonucleotide
  Sense strand starting at position 3191 of SEQ ID NO: 913385
uugguaucucaguaaggcu

SEQ ID NO: 923117 - RNA, 19 nt, Artificial Sequence
  Description of Artificial Sequence: Synthetic oligonucleotide
  Antisense strand to SEQ ID NO: 923116
agccuuacugagauaccaa

SEQ ID NO: 923118 - RNA, 19 nt, Artificial Sequence
  Description of Artificial Sequence: Synthetic oligonucleotide
  Sense strand starting at position 3946 of SEQ ID NO: 913385
acaagucacucuucugagu

SEQ ID NO: 923119 - RNA, 19 nt, Artificial Sequence
  Description of Artificial Sequence: Synthetic oligonucleotide
  Antisense strand to SEQ ID NO: 923118
acucagaagagugacuugu

SEQ ID NO: 923120 - RNA, 19 nt, Artificial Sequence
  Description of Artificial Sequence: Synthetic oligonucleotide
  Sense strand starting at position 3150 of SEQ ID NO: 913385
uugaguuugcacugggaau

SEQ ID NO: 923121 - RNA, 19 nt, Artificial Sequence
  Description of Artificial Sequence: Synthetic oligonucleotide
  Antisense strand to SEQ ID NO: 923120
auucccagugcaaacucaa

SEQ ID NO: 923122 - RNA, 19 nt, Artificial Sequence
  Description of Artificial Sequence: Synthetic oligonucleotide
  Sense strand starting at position 3714 of SEQ ID NO: 913385
gcaguacccuuacugauag

SEQ ID NO: 923123 - RNA, 19 nt, Artificial Sequence
  Description of Artificial Sequence: Synthetic oligonucleotide
  Antisense strand to SEQ ID NO: 923122
cuaucaguaaggguacugc

SEQ ID NO: 923124 - RNA, 19 nt, Artificial Sequence
  Description of Artificial Sequence: Synthetic oligonucleotide
  Sense strand starting at position 3024 of SEQ ID NO: 913385
ucuuuccuguccucauaga

SEQ ID NO: 923125 - RNA, 19 nt, Artificial Sequence
  Description of Artificial Sequence: Synthetic oligonucleotide
  Antisense strand to SEQ ID NO: 923124
ucuaugaggacaggaaaga

SEQ ID NO: 923126 - RNA, 19 nt, Artificial Sequence
  Description of Artificial Sequence: Synthetic oligonucleotide
  Sense strand starting at position 1032 of SEQ ID NO: 913385
ggguuagccugauuccaug

SEQ ID NO: 923127 - RNA, 19 nt, Artificial Sequence
  Description of Artificial Sequence: Synthetic oligonucleotide
  Antisense strand to SEQ ID NO: 923126
cauggaaucaggcuaaccc

SEQ ID NO: 923128 - RNA, 19 nt, Artificial Sequence
  Description of Artificial Sequence: Synthetic oligonucleotide
  Sense strand starting at position 1395 of SEQ ID NO: 913385
uguuaaucuuacuuaggca

SEQ ID NO: 923129 - RNA, 19 nt, Artificial Sequence
  Description of Artificial Sequence: Synthetic oligonucleotide
  Antisense strand to SEQ ID NO: 923128
ugccuaaguaagauuaaca

SEQ ID NO: 923130 - RNA, 19 nt, Artificial Sequence
  Description of Artificial Sequence: Synthetic oligonucleotide
  Sense strand starting at position 2163 of SEQ ID NO: 913385
cuuuguguagcacagaagu

SEQ ID NO: 923131 - RNA, 19 nt, Artificial Sequence
  Description of Artificial Sequence: Synthetic oligonucleotide
  Antisense strand to SEQ ID NO: 923130
acuucugugcuacacaaag

SEQ ID NO: 923132 - RNA, 19 nt, Artificial Sequence
  Description of Artificial Sequence: Synthetic oligonucleotide
  Sense strand starting at position 3660 of SEQ ID NO: 913385
uuguucuuuaggugagacu

SEQ ID NO: 923133 - RNA, 19 nt, Artificial Sequence
  Description of Artificial Sequence: Synthetic oligonucleotide
  Antisense strand to SEQ ID NO: 923132
agucucaccuaaagaacaa

SEQ ID NO: 923134 - RNA, 19 nt, Artificial Sequence
  Description of Artificial Sequence: Synthetic oligonucleotide
  Sense strand starting at position 2210 of SEQ ID NO: 913385
cuuuaaugaccgcgaggga

SEQ ID NO: 923135 - RNA, 19 nt, Artificial Sequence
  Description of Artificial Sequence: Synthetic oligonucleotide
  Antisense strand to SEQ ID NO: 923134
ucccucgcggucauuaaag

SEQ ID NO: 923136 - RNA, 19 nt, Artificial Sequence
  Description of Artificial Sequence: Synthetic oligonucleotide
  Sense strand starting at position 1626 of SEQ ID NO: 913385
ccuaaacgcuggucugaaa

SEQ ID NO: 923137 - RNA, 19 nt, Artificial Sequence
  Description of Artificial Sequence: Synthetic oligonucleotide
  Antisense strand to SEQ ID NO: 923136
uuucagaccagcguuuagg

SEQ ID NO: 923138 - RNA, 19 nt, Artificial Sequence
  Description of Artificial Sequence: Synthetic oligonucleotide
  Sense strand starting at position 3102 of SEQ ID NO: 913386
gaaacuugaucugugauaa

SEQ ID NO: 923139 - RNA, 19 nt, Artificial Sequence
  Description of Artificial Sequence: Synthetic oligonucleotide
  Antisense strand to SEQ ID NO: 923138
uuaucacagaucaaguuuc

SEQ ID NO: 923140 - RNA, 19 nt, Artificial Sequence
  Description of Artificial Sequence: Synthetic oligonucleotide
  Sense strand starting at position 2109 of SEQ ID NO: 913386
uguagauuuguuugauagu

SEQ ID NO: 923141 - RNA, 19 nt, Artificial Sequence
  Description of Artificial Sequence: Synthetic oligonucleotide
  Antisense strand to SEQ ID NO: 923140
acuaucaaacaaaucuaca

SEQ ID NO: 923142 - RNA, 19 nt, Artificial Sequence
  Description of Artificial Sequence: Synthetic oligonucleotide
  Sense strand starting at position 2806 of SEQ ID NO: 913386
gaaacuuaagagcgacaga

SEQ ID NO: 923143 - RNA, 19 nt, Artificial Sequence
  Description of Artificial Sequence: Synthetic oligonucleotide
  Antisense strand to SEQ ID NO: 923142
ucugucgcucuuaaguuuc

SEQ ID NO: 923144 - RNA, 19 nt, Artificial Sequence
  Description of Artificial Sequence: Synthetic oligonucleotide
  Sense strand starting at position 2763 of SEQ ID NO: 913386
agcauugcgagguuugcau

SEQ ID NO: 923145 - RNA, 19 nt, Artificial Sequence
  Description of Artificial Sequence: Synthetic oligonucleotide
  Antisense strand to SEQ ID NO: 923144
augcaaaccucgcaaugcu

SEQ ID NO: 923146 - RNA, 19 nt, Artificial Sequence
  Description of Artificial Sequence: Synthetic oligonucleotide
  Sense strand starting at position 3281 of SEQ ID NO: 913386
gugacuugagguggaaaga

SEQ ID NO: 923147 - RNA, 19 nt, Artificial Sequence
  Description of Artificial Sequence: Synthetic oligonucleotide
  Antisense strand to SEQ ID NO: 923146
ucuuuccaccucaagucac

SEQ ID NO: 923148 - RNA, 19 nt, Artificial Sequence
  Description of Artificial Sequence: Synthetic oligonucleotide
  Sense strand starting at position 2212 of SEQ ID NO: 913386
uggguuaucgauuauauaa

SEQ ID NO: 923149 - RNA, 19 nt, Artificial Sequence
  Description of Artificial Sequence: Synthetic oligonucleotide
  Antisense strand to SEQ ID NO: 923148
uuauauaaucgauaaccca

SEQ ID NO: 923150 - RNA, 19 nt, Artificial Sequence
  Description of Artificial Sequence: Synthetic oligonucleotide
  Sense strand starting at position 743 of SEQ ID NO: 913386
ugcagaagugaauacagua

SEQ ID NO: 923151 - RNA, 19 nt, Artificial Sequence
  Description of Artificial Sequence: Synthetic oligonucleotide
  Antisense strand to SEQ ID NO: 923150
uacuguauucacuucugca

SEQ ID NO: 923152 - RNA, 19 nt, Artificial Sequence
  Description of Artificial Sequence: Synthetic oligonucleotide
  Sense strand starting at position 2372 of SEQ ID NO: 913386
auaaacgaugcaugauaaa

SEQ ID NO: 923153 - RNA, 19 nt, Artificial Sequence
  Description of Artificial Sequence: Synthetic oligonucleotide
  Antisense strand to SEQ ID NO: 923152
uuuaucaugcaucguuuau

SEQ ID NO: 923154 - RNA, 19 nt, Artificial Sequence
  Description of Artificial Sequence: Synthetic oligonucleotide
  Sense strand starting at position 3959 of SEQ ID NO: 913386
cguauuugagaucgacucu

SEQ ID NO: 923155 - RNA, 19 nt, Artificial Sequence
  Description of Artificial Sequence: Synthetic oligonucleotide
  Antisense strand to SEQ ID NO: 923154
agagucgaucucaaauacg

SEQ ID NO: 923156 - RNA, 19 nt, Artificial Sequence
  Description of Artificial Sequence: Synthetic oligonucleotide
  Sense strand starting at position 2902 of SEQ ID NO: 913386
uuucgcaguguugauuuaa

SEQ ID NO: 923157 - RNA, 19 nt, Artificial Sequence
  Description of Artificial Sequence: Synthetic oligonucleotide
  Antisense strand to SEQ ID NO: 923156
uuaaaucaacacugcgaaa

SEQ ID NO: 923158 - RNA, 19 nt, Artificial Sequence
  Description of Artificial Sequence: Synthetic oligonucleotide
  Sense strand starting at position 3075 of SEQ ID NO: 913386
gaauaaggucuguauagua

SEQ ID NO: 923159 - RNA, 19 nt, Artificial Sequence
  Description of Artificial Sequence: Synthetic oligonucleotide
  Antisense strand to SEQ ID NO: 923158
uacuauacagaccuuauuc

SEQ ID NO: 923160 - RNA, 19 nt, Artificial Sequence
  Description of Artificial Sequence: Synthetic oligonucleotide
  Sense strand starting at position 2701 of SEQ ID NO: 913386
gggcaugaaccguaagaca

SEQ ID NO: 923161 - RNA, 19 nt, Artificial Sequence
  Description of Artificial Sequence: Synthetic oligonucleotide
  Antisense strand to SEQ ID NO: 923160
ugucuuacgguucaugccc

SEQ ID NO: 923162 - RNA, 19 nt, Artificial Sequence
  Description of Artificial Sequence: Synthetic oligonucleotide
  Sense strand starting at position 3073 of SEQ ID NO: 913386
gggaauaaggucuguauag

SEQ ID NO: 923163 - RNA, 19 nt, Artificial Sequence
  Description of Artificial Sequence: Synthetic oligonucleotide
  Antisense strand to SEQ ID NO: 923162
cuauacagaccuuauuccc

SEQ ID NO: 923164 - RNA, 19 nt, Artificial Sequence
  Description of Artificial Sequence: Synthetic oligonucleotide
  Sense strand starting at position 1516 of SEQ ID NO: 913386
gcgaaauaccuggagugag

SEQ ID NO: 923165 - RNA, 19 nt, Artificial Sequence
  Description of Artificial Sequence: Synthetic oligonucleotide
  Antisense strand to SEQ ID NO: 923164
cucacuccagguauuucgc

SEQ ID NO: 923166 - RNA, 19 nt, Artificial Sequence
  Description of Artificial Sequence: Synthetic oligonucleotide
  Sense strand starting at position 2411 of SEQ ID NO: 913386
gucugcucagaauaugaau

SEQ ID NO: 923167 - RNA, 19 nt, Artificial Sequence
  Description of Artificial Sequence: Synthetic oligonucleotide
  Antisense strand to SEQ ID NO: 923166
auucauauucugagcagac

SEQ ID NO: 923168 - RNA, 19 nt, Artificial Sequence
  Description of Artificial Sequence: Synthetic oligonucleotide
  Sense strand starting at position 500 of SEQ ID NO: 913386
ugugauguucaagaggcaa

SEQ ID NO: 923169 - RNA, 19 nt, Artificial Sequence
  Description of Artificial Sequence: Synthetic oligonucleotide
  Antisense strand to SEQ ID NO: 923168
uugccucuugaacaucaca

SEQ ID NO: 923170 - RNA, 19 nt, Artificial Sequence
  Description of Artificial Sequence: Synthetic oligonucleotide
  Sense strand starting at position 594 of SEQ ID NO: 913386
acccuucucgaacaaguua

SEQ ID NO: 923171 - RNA, 19 nt, Artificial Sequence
  Description of Artificial Sequence: Synthetic oligonucleotide
  Antisense strand to SEQ ID NO: 923170
uaacuuguucgagaagggu

SEQ ID NO: 923172 - RNA, 19 nt, Artificial Sequence
  Description of Artificial Sequence: Synthetic oligonucleotide
  Sense strand starting at position 2444 of SEQ ID NO: 913386
cugcgugugcauucuuuaa

SEQ ID NO: 923173 - RNA, 19 nt, Artificial Sequence
  Description of Artificial Sequence: Synthetic oligonucleotide
  Antisense strand to SEQ ID NO: 923172
uuaaagaaugcacacgcag

SEQ ID NO: 923174 - RNA, 19 nt, Artificial Sequence
  Description of Artificial Sequence: Synthetic oligonucleotide
  Sense strand starting at position 2084 of SEQ ID NO: 913386
uuagcagauuugcuguuau

SEQ ID NO: 923175 - RNA, 19 nt, Artificial Sequence
  Description of Artificial Sequence: Synthetic oligonucleotide
  Antisense strand to SEQ ID NO: 923174
auaacagcaaaucugcuaa

SEQ ID NO: 923176 - RNA, 19 nt, Artificial Sequence
  Description of Artificial Sequence: Synthetic oligonucleotide
  Sense strand starting at position 2548 of SEQ ID NO: 913386
gcgcuacaggaauaauaua

SEQ ID NO: 923177 - RNA, 19 nt, Artificial Sequence
  Description of Artificial Sequence: Synthetic oligonucleotide
  Antisense strand to SEQ ID NO: 923176
uauauuauuccuguagcgc

SEQ ID NO: 923178 - RNA, 19 nt, Artificial Sequence
  Description of Artificial Sequence: Synthetic oligonucleotide
  Sense strand starting at position 1348 of SEQ ID NO: 913386
guaugaucagugcagggau

SEQ ID NO: 923179 - RNA, 19 nt, Artificial Sequence
  Description of Artificial Sequence: Synthetic oligonucleotide
  Antisense strand to SEQ ID NO: 923178
aucccugcacugaucauac

SEQ ID NO: 923180 - RNA, 19 nt, Artificial Sequence
  Description of Artificial Sequence: Synthetic oligonucleotide
  Sense strand starting at position 2392 of SEQ ID NO: 913386
caauaaaugcgagaagcga

SEQ ID NO: 923181 - RNA, 19 nt, Artificial Sequence
  Description of Artificial Sequence: Synthetic oligonucleotide
  Antisense strand to SEQ ID NO: 923180
ucgcuucucgcauuuauug

SEQ ID NO: 923182 - RNA, 19 nt, Artificial Sequence
  Description of Artificial Sequence: Synthetic oligonucleotide
  Sense strand starting at position 3878 of SEQ ID NO: 913386
ugucguguuagcguaaaua

SEQ ID NO: 923183 - RNA, 19 nt, Artificial Sequence
  Description of Artificial Sequence: Synthetic oligonucleotide
  Antisense strand to SEQ ID NO: 923182
uauuuacgcuaacacgaca

SEQ ID NO: 923184 - RNA, 19 nt, Artificial Sequence
  Description of Artificial Sequence: Synthetic oligonucleotide
  Sense strand starting at position 1127 of SEQ ID NO: 913386
uaauguagccaucagagca

SEQ ID NO: 923185 - RNA, 19 nt, Artificial Sequence
  Description of Artificial Sequence: Synthetic oligonucleotide
  Antisense strand to SEQ ID NO: 923184
ugcucugauggcuacauua

SEQ ID NO: 923186 - RNA, 19 nt, Artificial Sequence
  Description of Artificial Sequence: Synthetic oligonucleotide
  Sense strand starting at position 3099 of SEQ ID NO: 913386
guugaaacuugaucuguga

SEQ ID NO: 923187 - RNA, 19 nt, Artificial Sequence
  Description of Artificial Sequence: Synthetic oligonucleotide
  Antisense strand to SEQ ID NO: 923186
ucacagaucaaguuucaac

SEQ ID NO: 923188 - RNA, 19 nt, Artificial Sequence
  Description of Artificial Sequence: Synthetic oligonucleotide
  Sense strand starting at position 637 of SEQ ID NO: 913386
uuggauccucuuuguaaag

SEQ ID NO: 923189 - RNA, 19 nt, Artificial Sequence
  Description of Artificial Sequence: Synthetic oligonucleotide
  Antisense strand to SEQ ID NO: 923188
cuuuacaaagaggauccaa

SEQ ID NO: 923190 - RNA, 19 nt, Artificial Sequence
  Description of Artificial Sequence: Synthetic oligonucleotide
  Sense strand starting at position 3074 of SEQ ID NO: 913386
ggaauaaggucuguauagu

SEQ ID NO: 923191 - RNA, 19 nt, Artificial Sequence
  Description of Artificial Sequence: Synthetic oligonucleotide
  Antisense strand to SEQ ID NO: 923190
acuauacagaccuuauucc

SEQ ID NO: 923192 - RNA, 19 nt, Artificial Sequence
  Description of Artificial Sequence: Synthetic oligonucleotide
  Sense strand starting at position 3965 of SEQ ID NO: 913386
ugagaucgacucugaguca

SEQ ID NO: 923193 - RNA, 19 nt, Artificial Sequence
  Description of Artificial Sequence: Synthetic oligonucleotide
  Antisense strand to SEQ ID NO: 923192
ugacucagagucgaucuca

SEQ ID NO: 923194 - RNA, 19 nt, Artificial Sequence
  Description of Artificial Sequence: Synthetic oligonucleotide
  Sense strand starting at position 2095 of SEQ ID NO: 913386
gcuguuauuagacauguag

SEQ ID NO: 923195 - RNA, 19 nt, Artificial Sequence
  Description of Artificial Sequence: Synthetic oligonucleotide
  Antisense strand to SEQ ID NO: 923194
cuacaugucuaauaacagc

SEQ ID NO: 923196 - RNA, 19 nt, Artificial Sequence
  Description of Artificial Sequence: Synthetic oligonucleotide
  Sense strand starting at position 1515 of SEQ ID NO: 913386
agcgaaauaccuggaguga

SEQ ID NO: 923197 - RNA, 19 nt, Artificial Sequence
  Description of Artificial Sequence: Synthetic oligonucleotide
  Antisense strand to SEQ ID NO: 923196
ucacuccagguauuucgcu

SEQ ID NO: 923198 - RNA, 19 nt, Artificial Sequence
  Description of Artificial Sequence: Synthetic oligonucleotide
  Sense strand starting at position 1211 of SEQ ID NO: 913386
gauauaacgcuggguggaa

SEQ ID NO: 923199 - RNA, 19 nt, Artificial Sequence
  Description of Artificial Sequence: Synthetic oligonucleotide
  Antisense strand to SEQ ID NO: 923198
uuccacccagcguuauauc

SEQ ID NO: 923200 - RNA, 19 nt, Artificial Sequence
  Description of Artificial Sequence: Synthetic oligonucleotide
  Sense strand starting at position 1210 of SEQ ID NO: 913386
agauauaacgcugggugga

SEQ ID NO: 923201 - RNA, 19 nt, Artificial Sequence
  Description of Artificial Sequence: Synthetic oligonucleotide
  Antisense strand to SEQ ID NO: 923200
uccacccagcguuauaucu

SEQ ID NO: 923202 - RNA, 19 nt, Artificial Sequence
  Description of Artificial Sequence: Synthetic oligonucleotide
  Sense strand starting at position 3508 of SEQ ID NO: 913386
aagagccgguauucugaaa

SEQ ID NO: 923203 - RNA, 19 nt, Artificial Sequence
  Description of Artificial Sequence: Synthetic oligonucleotide
  Antisense strand to SEQ ID NO: 923202
uuucagaauaccggcucuu

SEQ ID NO: 923204 - RNA, 19 nt, Artificial Sequence
  Description of Artificial Sequence: Synthetic oligonucleotide
  Sense strand starting at position 185 of SEQ ID NO: 913386
gagagauaguuguuaaugc

SEQ ID NO: 923205 - RNA, 19 nt, Artificial Sequence
  Description of Artificial Sequence: Synthetic oligonucleotide
  Antisense strand to SEQ ID NO: 923204
gcauuaacaacuaucucuc

SEQ ID NO: 923206 - RNA, 19 nt, Artificial Sequence
  Description of Artificial Sequence: Synthetic oligonucleotide
  Sense strand starting at position 267 of SEQ ID NO: 913386
uugaauguauuauuccagu

SEQ ID NO: 923207 - RNA, 19 nt, Artificial Sequence
  Description of Artificial Sequence: Synthetic oligonucleotide
  Antisense strand to SEQ ID NO: 923206
acuggaauaauacauucaa

SEQ ID NO: 923208 - RNA, 19 nt, Artificial Sequence
  Description of Artificial Sequence: Synthetic oligonucleotide
  Sense strand starting at position 636 of SEQ ID NO: 913386
guuggauccucuuuguaaa

SEQ ID NO: 923209 - RNA, 19 nt, Artificial Sequence
  Description of Artificial Sequence: Synthetic oligonucleotide
  Antisense strand to SEQ ID NO: 923208
uuuacaaagaggauccaac

SEQ ID NO: 923210 - RNA, 19 nt, Artificial Sequence
  Description of Artificial Sequence: Synthetic oligonucleotide
  Sense strand starting at position 3242 of SEQ ID NO: 913386
aguuaauacacccggcaga

SEQ ID NO: 923211 - RNA, 19 nt, Artificial Sequence
  Description of Artificial Sequence: Synthetic oligonucleotide
  Antisense strand to SEQ ID NO: 923210
ucugccggguguauuaacu

SEQ ID NO: 923212 - RNA, 19 nt, Artificial Sequence
  Description of Artificial Sequence: Synthetic oligonucleotide
  Sense strand starting at position 3759 of SEQ ID NO: 913386
gcagacguuugauuagaau

SEQ ID NO: 923213 - RNA, 19 nt, Artificial Sequence
  Description of Artificial Sequence: Synthetic oligonucleotide
  Antisense strand to SEQ ID NO: 923212
auucuaaucaaacgucugc

SEQ ID NO: 923214 - RNA, 19 nt, Artificial Sequence
  Description of Artificial Sequence: Synthetic oligonucleotide
  Sense strand starting at position 2003 of SEQ ID NO: 913386
acaggaccugcuuguauau

SEQ ID NO: 923215 - RNA, 19 nt, Artificial Sequence
  Description of Artificial Sequence: Synthetic oligonucleotide
  Antisense strand to SEQ ID NO: 923214
auauacaagcagguccugu

SEQ ID NO: 923216 - RNA, 19 nt, Artificial Sequence
  Description of Artificial Sequence: Synthetic oligonucleotide
  Sense strand starting at position 273 of SEQ ID NO: 913386
guauuauuccaguaccugu

SEQ ID NO: 923217 - RNA, 19 nt, Artificial Sequence
  Description of Artificial Sequence: Synthetic oligonucleotide
  Antisense strand to SEQ ID NO: 923216
acagguacuggaauaauac

SEQ ID NO: 923218 - RNA, 19 nt, Artificial Sequence
  Description of Artificial Sequence: Synthetic oligonucleotide
  Sense strand starting at position 3956 of SEQ ID NO: 913387
ugugcacuucugcuuguaa

SEQ ID NO: 923219 - RNA, 19 nt, Artificial Sequence
  Description of Artificial Sequence: Synthetic oligonucleotide
  Antisense strand to SEQ ID NO: 923218
uuacaagcagaagugcaca

SEQ ID NO: 923220 - RNA, 19 nt, Artificial Sequence
  Description of Artificial Sequence: Synthetic oligonucleotide
  Sense strand starting at position 173 of SEQ ID NO: 913387
aauuuacuguggccuguaa

SEQ ID NO: 923221 - RNA, 19 nt, Artificial Sequence
  Description of Artificial Sequence: Synthetic oligonucleotide
  Antisense strand to SEQ ID NO: 923220
uuacaggccacaguaaauu

SEQ ID NO: 923222 - RNA, 19 nt, Artificial Sequence
  Description of Artificial Sequence: Synthetic oligonucleotide
  Sense strand starting at position 1077 of SEQ ID NO: 913387
aaagguuucgaaggaaauu

SEQ ID NO: 923223 - RNA, 19 nt, Artificial Sequence
  Description of Artificial Sequence: Synthetic oligonucleotide
  Antisense strand to SEQ ID NO: 923222
aauuuccuucgaaaccuuu

SEQ ID NO: 923224 - RNA, 19 nt, Artificial Sequence
  Description of Artificial Sequence: Synthetic oligonucleotide
  Sense strand starting at position 1153 of SEQ ID NO: 913387
aucggucaucaccaacaau

SEQ ID NO: 923225 - RNA, 19 nt, Artificial Sequence
  Description of Artificial Sequence: Synthetic oligonucleotide
  Antisense strand to SEQ ID NO: 923224
auuguuggugaugaccgau

SEQ ID NO: 923226 - RNA, 19 nt, Artificial Sequence
  Description of Artificial Sequence: Synthetic oligonucleotide
  Sense strand starting at position 3836 of SEQ ID NO: 913387
gucucaguggucuuugugu

SEQ ID NO: 923227 - RNA, 19 nt, Artificial Sequence
  Description of Artificial Sequence: Synthetic oligonucleotide
  Antisense strand to SEQ ID NO: 923226
acacaaagaccacugagac

SEQ ID NO: 923228 - RNA, 19 nt, Artificial Sequence
  Description of Artificial Sequence: Synthetic oligonucleotide
  Sense strand starting at position 737 of SEQ ID NO: 913387
ugacuauaaguuugaugac

SEQ ID NO: 923229 - RNA, 19 nt, Artificial Sequence
  Description of Artificial Sequence: Synthetic oligonucleotide
  Antisense strand to SEQ ID NO: 923228
gucaucaaacuuauaguca

SEQ ID NO: 923230 - RNA, 19 nt, Artificial Sequence
  Description of Artificial Sequence: Synthetic oligonucleotide
  Sense strand starting at position 729 of SEQ ID NO: 913387
uggagcagugacuauaagu

SEQ ID NO: 923231 - RNA, 19 nt, Artificial Sequence
  Description of Artificial Sequence: Synthetic oligonucleotide
  Antisense strand to SEQ ID NO: 923230
acuuauagucacugcucca

SEQ ID NO: 923232 - RNA, 19 nt, Artificial Sequence
  Description of Artificial Sequence: Synthetic oligonucleotide
  Sense strand starting at position 402 of SEQ ID NO: 913387
acagcucacguauaaauga

SEQ ID NO: 923233 - RNA, 19 nt, Artificial Sequence
  Description of Artificial Sequence: Synthetic oligonucleotide
  Antisense strand to SEQ ID NO: 923232
ucauuuauacgugagcugu

SEQ ID NO: 923234 - RNA, 19 nt, Artificial Sequence
  Description of Artificial Sequence: Synthetic oligonucleotide
  Sense strand starting at position 734 of SEQ ID NO: 913387
cagugacuauaaguuugau

SEQ ID NO: 923235 - RNA, 19 nt, Artificial Sequence
  Description of Artificial Sequence: Synthetic oligonucleotide
  Antisense strand to SEQ ID NO: 923234
aucaaacuuauagucacug

SEQ ID NO: 923236 - RNA, 19 nt, Artificial Sequence
  Description of Artificial Sequence: Synthetic oligonucleotide
  Sense strand starting at position 492 of SEQ ID NO: 913387
ugaaaugugauuggcaacu

SEQ ID NO: 923237 - RNA, 19 nt, Artificial Sequence
  Description of Artificial Sequence: Synthetic oligonucleotide
  Antisense strand to SEQ ID NO: 923236
aguugccaaucacauuuca

SEQ ID NO: 923238 - RNA, 19 nt, Artificial Sequence
  Description of Artificial Sequence: Synthetic oligonucleotide
  Sense strand starting at position 2567 of SEQ ID NO: 913387
gcugaaagcacaggugaaa

SEQ ID NO: 923239 - RNA, 19 nt, Artificial Sequence
  Description of Artificial Sequence: Synthetic oligonucleotide
  Antisense strand to SEQ ID NO: 923238
uuucaccugugcuuucagc

SEQ ID NO: 923240 - RNA, 19 nt, Artificial Sequence
  Description of Artificial Sequence: Synthetic oligonucleotide
  Sense strand starting at position 913 of SEQ ID NO: 913387
uuuagaauuugggaaagcu

SEQ ID NO: 923241 - RNA, 19 nt, Artificial Sequence
  Description of Artificial Sequence: Synthetic oligonucleotide
  Antisense strand to SEQ ID NO: 923240
agcuuucccaaauucuaaa

SEQ ID NO: 923242 - RNA, 19 nt, Artificial Sequence
  Description of Artificial Sequence: Synthetic oligonucleotide
  Sense strand starting at position 3879 of SEQ ID NO: 913387
ccuugaucuuccucugaug

SEQ ID NO: 923243 - RNA, 19 nt, Artificial Sequence
  Description of Artificial Sequence: Synthetic oligonucleotide
  Antisense strand to SEQ ID NO: 923242
caucagaggaagaucaagg

SEQ ID NO: 923244 - RNA, 19 nt, Artificial Sequence
  Description of Artificial Sequence: Synthetic oligonucleotide
  Sense strand starting at position 3897 of SEQ ID NO: 913387
gugaguaccagcgaugaug

SEQ ID NO: 923245 - RNA, 19 nt, Artificial Sequence
  Description of Artificial Sequence: Synthetic oligonucleotide
  Antisense strand to SEQ ID NO: 923244
caucaucgcugguacucac

SEQ ID NO: 923246 - RNA, 19 nt, Artificial Sequence
  Description of Artificial Sequence: Synthetic oligonucleotide
  Sense strand starting at position 3599 of SEQ ID NO: 913387
ggugaugaauggaggugau

SEQ ID NO: 923247 - RNA, 19 nt, Artificial Sequence
  Description of Artificial Sequence: Synthetic oligonucleotide
  Antisense strand to SEQ ID NO: 923246
aucaccuccauucaucacc

SEQ ID NO: 923248 - RNA, 19 nt, Artificial Sequence
  Description of Artificial Sequence: Synthetic oligonucleotide
  Sense strand starting at position 490 of SEQ ID NO: 913387
ugugaaaugugauuggcaa

SEQ ID NO: 923249 - RNA, 19 nt, Artificial Sequence
  Description of Artificial Sequence: Synthetic oligonucleotide
  Antisense strand to SEQ ID NO: 923248
uugccaaucacauuucaca

SEQ ID NO: 923250 - RNA, 19 nt, Artificial Sequence
  Description of Artificial Sequence: Synthetic oligonucleotide
  Sense strand starting at position 491 of SEQ ID NO: 913387
gugaaaugugauuggcaac

SEQ ID NO: 923251 - RNA, 19 nt, Artificial Sequence
  Description of Artificial Sequence: Synthetic oligonucleotide
  Antisense strand to SEQ ID NO: 923250
guugccaaucacauuucac

SEQ ID NO: 923252 - RNA, 19 nt, Artificial Sequence
  Description of Artificial Sequence: Synthetic oligonucleotide
  Sense strand starting at position 3975 of SEQ ID NO: 913387
gaggauaccucagaaggaa

SEQ ID NO: 923253 - RNA, 19 nt, Artificial Sequence
  Description of Artificial Sequence: Synthetic oligonucleotide
  Antisense strand to SEQ ID NO: 923252
uuccuucugagguauccuc

SEQ ID NO: 923254 - RNA, 19 nt, Artificial Sequence
  Description of Artificial Sequence: Synthetic oligonucleotide
  Sense strand starting at position 888 of SEQ ID NO: 913387
acggucagaucugucacaa

SEQ ID NO: 923255 - RNA, 19 nt, Artificial Sequence
  Description of Artificial Sequence: Synthetic oligonucleotide
  Antisense strand to SEQ ID NO: 923254
uugugacagaucugaccgu

SEQ ID NO: 923256 - RNA, 19 nt, Artificial Sequence
  Description of Artificial Sequence: Synthetic oligonucleotide
  Sense strand starting at position 177 of SEQ ID NO: 913387
uacuguggccuguaauuau

SEQ ID NO: 923257 - RNA, 19 nt, Artificial Sequence
  Description of Artificial Sequence: Synthetic oligonucleotide
  Antisense strand to SEQ ID NO: 923256
auaauuacaggccacagua

SEQ ID NO: 923258 - RNA, 19 nt, Artificial Sequence
  Description of Artificial Sequence: Synthetic oligonucleotide
  Sense strand starting at position 3684 of SEQ ID NO: 913387
ggagguugcucuuucuaag

SEQ ID NO: 923259 - RNA, 19 nt, Artificial Sequence
  Description of Artificial Sequence: Synthetic oligonucleotide
  Antisense strand to SEQ ID NO: 923258
cuuagaaagagcaaccucc

SEQ ID NO: 923260 - RNA, 19 nt, Artificial Sequence
  Description of Artificial Sequence: Synthetic oligonucleotide
  Sense strand starting at position 447 of SEQ ID NO: 913387
ucuguuuagccugagguua

SEQ ID NO: 923261 - RNA, 19 nt, Artificial Sequence
  Description of Artificial Sequence: Synthetic oligonucleotide
  Antisense strand to SEQ ID NO: 923260
uaaccucaggcuaaacaga

SEQ ID NO: 923262 - RNA, 19 nt, Artificial Sequence
  Description of Artificial Sequence: Synthetic oligonucleotide
  Sense strand starting at position 180 of SEQ ID NO: 913387
uguggccuguaauuauaaa

SEQ ID NO: 923263 - RNA, 19 nt, Artificial Sequence
  Description of Artificial Sequence: Synthetic oligonucleotide
  Antisense strand to SEQ ID NO: 923262
uuuauaauuacaggccaca

SEQ ID NO: 923264 - RNA, 19 nt, Artificial Sequence
  Description of Artificial Sequence: Synthetic oligonucleotide
  Sense strand starting at position 878 of SEQ ID NO: 913387
cagagugucaacggucaga

SEQ ID NO: 923265 - RNA, 19 nt, Artificial Sequence
  Description of Artificial Sequence: Synthetic oligonucleotide
  Antisense strand to SEQ ID NO: 923264
ucugaccguugacacucug

SEQ ID NO: 923266 - RNA, 19 nt, Artificial Sequence
  Description of Artificial Sequence: Synthetic oligonucleotide
  Sense strand starting at position 2315 of SEQ ID NO: 913387
ugagauugcuguccugacu

SEQ ID NO: 923267 - RNA, 19 nt, Artificial Sequence
  Description of Artificial Sequence: Synthetic oligonucleotide
  Antisense strand to SEQ ID NO: 923266
agucaggacagcaaucuca

SEQ ID NO: 923268 - RNA, 19 nt, Artificial Sequence
  Description of Artificial Sequence: Synthetic oligonucleotide
  Sense strand starting at position 478 of SEQ ID NO: 913387
aaguguagcaagugugaaa

SEQ ID NO: 923269 - RNA, 19 nt, Artificial Sequence
  Description of Artificial Sequence: Synthetic oligonucleotide
  Antisense strand to SEQ ID NO: 923268
uuucacacuugcuacacuu

SEQ ID NO: 923270 - RNA, 19 nt, Artificial Sequence
  Description of Artificial Sequence: Synthetic oligonucleotide
  Sense strand starting at position 485 of SEQ ID NO: 913387
gcaagugugaaaugugauu

SEQ ID NO: 923271 - RNA, 19 nt, Artificial Sequence
  Description of Artificial Sequence: Synthetic oligonucleotide
  Antisense strand to SEQ ID NO: 923270
aaucacauuucacacuugc

SEQ ID NO: 923272 - RNA, 19 nt, Artificial Sequence
  Description of Artificial Sequence: Synthetic oligonucleotide
  Sense strand starting at position 291 of SEQ ID NO: 913387
aucucaaucucuguugguu

SEQ ID NO: 923273 - RNA, 19 nt, Artificial Sequence
  Description of Artificial Sequence: Synthetic oligonucleotide
  Antisense strand to SEQ ID NO: 923272
aaccaacagagauugagau

SEQ ID NO: 923274 - RNA, 19 nt, Artificial Sequence
  Description of Artificial Sequence: Synthetic oligonucleotide
  Sense strand starting at position 592 of SEQ ID NO: 913387
acuggauaaucugaccaaa

SEQ ID NO: 923275 - RNA, 19 nt, Artificial Sequence
  Description of Artificial Sequence: Synthetic oligonucleotide
  Antisense strand to SEQ ID NO: 923274
uuuggucagauuauccagu

SEQ ID NO: 923276 - RNA, 19 nt, Artificial Sequence
  Description of Artificial Sequence: Synthetic oligonucleotide
  Sense strand starting at position 93 of SEQ ID NO: 913387
uguauacaacaguguugua

SEQ ID NO: 923277 - RNA, 19 nt, Artificial Sequence
  Description of Artificial Sequence: Synthetic oligonucleotide
  Antisense strand to SEQ ID NO: 923276
uacaacacuguuguauaca

SEQ ID NO: 923278 - RNA, 19 nt, Artificial Sequence
  Description of Artificial Sequence: Synthetic oligonucleotide
  Sense strand starting at position 3899 of SEQ ID NO: 913387
gaguaccagcgaugauguu

SEQ ID NO: 923279 - RNA, 19 nt, Artificial Sequence
  Description of Artificial Sequence: Synthetic oligonucleotide
  Antisense strand to SEQ ID NO: 923278
aacaucaucgcugguacuc

SEQ ID NO: 923280 - RNA, 19 nt, Artificial Sequence
  Description of Artificial Sequence: Synthetic oligonucleotide
  Sense strand starting at position 1467 of SEQ ID NO: 913387
gaccgauugcccgggaagu

SEQ ID NO: 923281 - RNA, 19 nt, Artificial Sequence
  Description of Artificial Sequence: Synthetic oligonucleotide
  Antisense strand to SEQ ID NO: 923280
acuucccgggcaaucgguc

SEQ ID NO: 923282 - RNA, 19 nt, Artificial Sequence
  Description of Artificial Sequence: Synthetic oligonucleotide
  Sense strand starting at position 446 of SEQ ID NO: 913387
aucuguuuagccugagguu

SEQ ID NO: 923283 - RNA, 19 nt, Artificial Sequence
  Description of Artificial Sequence: Synthetic oligonucleotide
  Antisense strand to SEQ ID NO: 923282
aaccucaggcuaaacagau

SEQ ID NO: 923284 - RNA, 19 nt, Artificial Sequence
  Description of Artificial Sequence: Synthetic oligonucleotide
  Sense strand starting at position 120 of SEQ ID NO: 913387
guaaauuuguuguauacug

SEQ ID NO: 923285 - RNA, 19 nt, Artificial Sequence
  Description of Artificial Sequence: Synthetic oligonucleotide
  Antisense strand to SEQ ID NO: 923284
caguauacaacaaauuuac

SEQ ID NO: 923286 - RNA, 19 nt, Artificial Sequence
  Description of Artificial Sequence: Synthetic oligonucleotide
  Sense strand starting at position 738 of SEQ ID NO: 913387
gacuauaaguuugaugaca

SEQ ID NO: 923287 - RNA, 19 nt, Artificial Sequence
  Description of Artificial Sequence: Synthetic oligonucleotide
  Antisense strand to SEQ ID NO: 923286
ugucaucaaacuuauaguc

SEQ ID NO: 923288 - RNA, 19 nt, Artificial Sequence
  Description of Artificial Sequence: Synthetic oligonucleotide
  Sense strand starting at position 175 of SEQ ID NO: 913387
uuuacuguggccuguaauu

SEQ ID NO: 923289 - RNA, 19 nt, Artificial Sequence
  Description of Artificial Sequence: Synthetic oligonucleotide
  Antisense strand to SEQ ID NO: 923288
aauuacaggccacaguaaa

SEQ ID NO: 923290 - RNA, 19 nt, Artificial Sequence
  Description of Artificial Sequence: Synthetic oligonucleotide
  Sense strand starting at position 3844 of SEQ ID NO: 913387
ggucuuugugucugaccuu

SEQ ID NO: 923291 - RNA, 19 nt, Artificial Sequence
  Description of Artificial Sequence: Synthetic oligonucleotide
  Antisense strand to SEQ ID NO: 923290
aaggucagacacaaagacc

SEQ ID NO: 923292 - RNA, 19 nt, Artificial Sequence
  Description of Artificial Sequence: Synthetic oligonucleotide
  Sense strand starting at position 128 of SEQ ID NO: 913387
guuguauacugugccaauu

SEQ ID NO: 923293 - RNA, 19 nt, Artificial Sequence
  Description of Artificial Sequence: Synthetic oligonucleotide
  Antisense strand to SEQ ID NO: 923292
aauuggcacaguauacaac

SEQ ID NO: 923294 - RNA, 19 nt, Artificial Sequence
  Description of Artificial Sequence: Synthetic oligonucleotide
  Sense strand starting at position 1289 of SEQ ID NO: 913387
cuuugugucgugggacuua

SEQ ID NO: 923295 - RNA, 19 nt, Artificial Sequence
  Description of Artificial Sequence: Synthetic oligonucleotide
  Antisense strand to SEQ ID NO: 923294
uaagucccacgacacaaag

SEQ ID NO: 923296 - RNA, 19 nt, Artificial Sequence
  Description of Artificial Sequence: Synthetic oligonucleotide
  Sense strand starting at position 127 of SEQ ID NO: 913387
uguuguauacugugccaau

SEQ ID NO: 923297 - RNA, 19 nt, Artificial Sequence
  Description of Artificial Sequence: Synthetic oligonucleotide
  Antisense strand to SEQ ID NO: 923296
auuggcacaguauacaaca

SEQ ID NO: 923298 - RNA, 19 nt, Artificial Sequence
  Description of Artificial Sequence: Synthetic oligonucleotide
  Sense strand starting at position 2841 of SEQ ID NO: 913388
agccaauucgcuguguaau

SEQ ID NO: 923299 - RNA, 19 nt, Artificial Sequence
  Description of Artificial Sequence: Synthetic oligonucleotide
  Antisense strand to SEQ ID NO: 923298
auuacacagcgaauuggcu

SEQ ID NO: 923300 - RNA, 19 nt, Artificial Sequence
  Description of Artificial Sequence: Synthetic oligonucleotide
  Sense strand starting at position 2356 of SEQ ID NO: 913388
ccguuugcugcucuuagaa

SEQ ID NO: 923301 - RNA, 19 nt, Artificial Sequence
  Description of Artificial Sequence: Synthetic oligonucleotide
  Antisense strand to SEQ ID NO: 923300
uucuaagagcagcaaacgg

SEQ ID NO: 923302 - RNA, 19 nt, Artificial Sequence
  Description of Artificial Sequence: Synthetic oligonucleotide
  Sense strand starting at position 3123 of SEQ ID NO: 913388
gacuuagaugcaggauaau

SEQ ID NO: 923303 - RNA, 19 nt, Artificial Sequence
  Description of Artificial Sequence: Synthetic oligonucleotide
  Antisense strand to SEQ ID NO: 923302
auuauccugcaucuaaguc

SEQ ID NO: 923304 - RNA, 19 nt, Artificial Sequence
  Description of Artificial Sequence: Synthetic oligonucleotide
  Sense strand starting at position 3237 of SEQ ID NO: 913388
ucaguuggaccauaaaugu

SEQ ID NO: 923305 - RNA, 19 nt, Artificial Sequence
  Description of Artificial Sequence: Synthetic oligonucleotide
  Antisense strand to SEQ ID NO: 923304
acauuuaugguccaacuga

SEQ ID NO: 923306 - RNA, 19 nt, Artificial Sequence
  Description of Artificial Sequence: Synthetic oligonucleotide
  Sense strand starting at position 1426 of SEQ ID NO: 913388
agcuguaucccgcuuuacu

SEQ ID NO: 923307 - RNA, 19 nt, Artificial Sequence
  Description of Artificial Sequence: Synthetic oligonucleotide
  Antisense strand to SEQ ID NO: 923306
aguaaagcgggauacagcu

SEQ ID NO: 923308 - RNA, 19 nt, Artificial Sequence
  Description of Artificial Sequence: Synthetic oligonucleotide
  Sense strand starting at position 1087 of SEQ ID NO: 913388
acuaauuacggacacguaa

SEQ ID NO: 923309 - RNA, 19 nt, Artificial Sequence
  Description of Artificial Sequence: Synthetic oligonucleotide
  Antisense strand to SEQ ID NO: 923308
uuacguguccguaauuagu

SEQ ID NO: 923310 - RNA, 19 nt, Artificial Sequence
  Description of Artificial Sequence: Synthetic oligonucleotide
  Sense strand starting at position 1085 of SEQ ID NO: 913388
agacuaauuacggacacgu

SEQ ID NO: 923311 - RNA, 19 nt, Artificial Sequence
  Description of Artificial Sequence: Synthetic oligonucleotide
  Antisense strand to SEQ ID NO: 923310
acguguccguaauuagucu

SEQ ID NO: 923312 - RNA, 19 nt, Artificial Sequence
  Description of Artificial Sequence: Synthetic oligonucleotide
  Sense strand starting at position 3359 of SEQ ID NO: 913388
guuagacauggauguaaac

SEQ ID NO: 923313 - RNA, 19 nt, Artificial Sequence
  Description of Artificial Sequence: Synthetic oligonucleotide
  Antisense strand to SEQ ID NO: 923312
guuuacauccaugucuaac

SEQ ID NO: 923314 - RNA, 19 nt, Artificial Sequence
  Description of Artificial Sequence: Synthetic oligonucleotide
  Sense strand starting at position 1427 of SEQ ID NO: 913388
gcuguaucccgcuuuacuu

SEQ ID NO: 923315 - RNA, 19 nt, Artificial Sequence
  Description of Artificial Sequence: Synthetic oligonucleotide
  Antisense strand to SEQ ID NO: 923314
aaguaaagcgggauacagc

SEQ ID NO: 923316 - RNA, 19 nt, Artificial Sequence
  Description of Artificial Sequence: Synthetic oligonucleotide
  Sense strand starting at position 2143 of SEQ ID NO: 913388
uuucacuuccgguaggaga

SEQ ID NO: 923317 - RNA, 19 nt, Artificial Sequence
  Description of Artificial Sequence: Synthetic oligonucleotide
  Antisense strand to SEQ ID NO: 923316
ucuccuaccggaagugaaa

SEQ ID NO: 923318 - RNA, 19 nt, Artificial Sequence
  Description of Artificial Sequence: Synthetic oligonucleotide
  Sense strand starting at position 2934 of SEQ ID NO: 913388
acugaauguccuugaaacc

SEQ ID NO: 923319 - RNA, 19 nt, Artificial Sequence
  Description of Artificial Sequence: Synthetic oligonucleotide
  Antisense strand to SEQ ID NO: 923318
gguuucaaggacauucagu

SEQ ID NO: 923320 - RNA, 19 nt, Artificial Sequence
  Description of Artificial Sequence: Synthetic oligonucleotide
  Sense strand starting at position 3043 of SEQ ID NO: 913388
ugccaaacucuugaguuaa

SEQ ID NO: 923321 - RNA, 19 nt, Artificial Sequence
  Description of Artificial Sequence: Synthetic oligonucleotide
  Antisense strand to SEQ ID NO: 923320
uuaacucaagaguuuggca

SEQ ID NO: 923322 - RNA, 19 nt, Artificial Sequence
  Description of Artificial Sequence: Synthetic oligonucleotide
  Sense strand starting at position 3231 of SEQ ID NO: 913388
ugacuaucaguuggaccau

SEQ ID NO: 923323 - RNA, 19 nt, Artificial Sequence
  Description of Artificial Sequence: Synthetic oligonucleotide
  Antisense strand to SEQ ID NO: 923322
augguccaacugauaguca

SEQ ID NO: 923324 - RNA, 19 nt, Artificial Sequence
  Description of Artificial Sequence: Synthetic oligonucleotide
  Sense strand starting at position 3356 of SEQ ID NO: 913388
auuguuagacauggaugua

SEQ ID NO: 923325 - RNA, 19 nt, Artificial Sequence
  Description of Artificial Sequence: Synthetic oligonucleotide
  Antisense strand to SEQ ID NO: 923324
uacauccaugucuaacaau

SEQ ID NO: 923326 - RNA, 19 nt, Artificial Sequence
  Description of Artificial Sequence: Synthetic oligonucleotide
  Sense strand starting at position 3097 of SEQ ID NO: 913388
agugcuaugguuuaaagac

SEQ ID NO: 923327 - RNA, 19 nt, Artificial Sequence
  Description of Artificial Sequence: Synthetic oligonucleotide
  Antisense strand to SEQ ID NO: 923326
gucuuuaaaccauagcacu

SEQ ID NO: 923328 - RNA, 19 nt, Artificial Sequence
  Description of Artificial Sequence: Synthetic oligonucleotide
  Sense strand starting at position 1190 of SEQ ID NO: 913388
cgugcaucugaauaggaca

SEQ ID NO: 923329 - RNA, 19 nt, Artificial Sequence
  Description of Artificial Sequence: Synthetic oligonucleotide
  Antisense strand to SEQ ID NO: 923328
uguccuauucagaugcacg

SEQ ID NO: 923330 - RNA, 19 nt, Artificial Sequence
  Description of Artificial Sequence: Synthetic oligonucleotide
  Sense strand starting at position 2223 of SEQ ID NO: 913388
gugcgugcuccuucugaug

SEQ ID NO: 923331 - RNA, 19 nt, Artificial Sequence
  Description of Artificial Sequence: Synthetic oligonucleotide
  Antisense strand to SEQ ID NO: 923330
caucagaaggagcacgcac

SEQ ID NO: 923332 - RNA, 19 nt, Artificial Sequence
  Description of Artificial Sequence: Synthetic oligonucleotide
  Sense strand starting at position 2276 of SEQ ID NO: 913388
auuugagucucugcugcua

SEQ ID NO: 923333 - RNA, 19 nt, Artificial Sequence
  Description of Artificial Sequence: Synthetic oligonucleotide
  Antisense strand to SEQ ID NO: 923332
uagcagcagagacucaaau

SEQ ID NO: 923334 - RNA, 19 nt, Artificial Sequence
  Description of Artificial Sequence: Synthetic oligonucleotide
  Sense strand starting at position 3410 of SEQ ID NO: 913388
ucggauuucuaagaaacca

SEQ ID NO: 923335 - RNA, 19 nt, Artificial Sequence
  Description of Artificial Sequence: Synthetic oligonucleotide
  Antisense strand to SEQ ID NO: 923334
ugguuucuuagaaauccga

SEQ ID NO: 923336 - RNA, 19 nt, Artificial Sequence
  Description of Artificial Sequence: Synthetic oligonucleotide
  Sense strand starting at position 28 of SEQ ID NO: 913388
ccucuagucugaguaagga

SEQ ID NO: 923337 - RNA, 19 nt, Artificial Sequence
  Description of Artificial Sequence: Synthetic oligonucleotide
  Antisense strand to SEQ ID NO: 923336
uccuuacucagacuagagg

SEQ ID NO: 923338 - RNA, 19 nt, Artificial Sequence
  Description of Artificial Sequence: Synthetic oligonucleotide
  Sense strand starting at position 3954 of SEQ ID NO: 913388
aacuuuaguguugaaguuu

SEQ ID NO: 923339 - RNA, 19 nt, Artificial Sequence
  Description of Artificial Sequence: Synthetic oligonucleotide
  Antisense strand to SEQ ID NO: 923338
aaacuucaacacuaaaguu

SEQ ID NO: 923340 - RNA, 19 nt, Artificial Sequence
  Description of Artificial Sequence: Synthetic oligonucleotide
  Sense strand starting at position 3132 of SEQ ID NO: 913388
gcaggauaauaugcuccaa

SEQ ID NO: 923341 - RNA, 19 nt, Artificial Sequence
  Description of Artificial Sequence: Synthetic oligonucleotide
  Antisense strand to SEQ ID NO: 923340
uuggagcauauuauccugc

SEQ ID NO: 923342 - RNA, 19 nt, Artificial Sequence
  Description of Artificial Sequence: Synthetic oligonucleotide
  Sense strand starting at position 2996 of SEQ ID NO: 913388
ucagucagaugguuggauu

SEQ ID NO: 923343 - RNA, 19 nt, Artificial Sequence
  Description of Artificial Sequence: Synthetic oligonucleotide
  Antisense strand to SEQ ID NO: 923342
aauccaaccaucugacuga

SEQ ID NO: 923344 - RNA, 19 nt, Artificial Sequence
  Description of Artificial Sequence: Synthetic oligonucleotide
  Sense strand starting at position 3329 of SEQ ID NO: 913388
acuuuagauuccguaacag

SEQ ID NO: 923345 - RNA, 19 nt, Artificial Sequence
  Description of Artificial Sequence: Synthetic oligonucleotide
  Antisense strand to SEQ ID NO: 923344
cuguuacggaaucuaaagu

SEQ ID NO: 923346 - RNA, 19 nt, Artificial Sequence
  Description of Artificial Sequence: Synthetic oligonucleotide
  Sense strand starting at position 1471 of SEQ ID NO: 913388
uggauucugggacgccaaa

SEQ ID NO: 923347 - RNA, 19 nt, Artificial Sequence
  Description of Artificial Sequence: Synthetic oligonucleotide
  Antisense strand to SEQ ID NO: 923346
uuuggcgucccagaaucca

SEQ ID NO: 923348 - RNA, 19 nt, Artificial Sequence
  Description of Artificial Sequence: Synthetic oligonucleotide
  Sense strand starting at position 1695 of SEQ ID NO: 913388
uucucaccuugguuacaga

SEQ ID NO: 923349 - RNA, 19 nt, Artificial Sequence
  Description of Artificial Sequence: Synthetic oligonucleotide
  Antisense strand to SEQ ID NO: 923348
ucuguaaccaaggugagaa

SEQ ID NO: 923350 - RNA, 19 nt, Artificial Sequence
  Description of Artificial Sequence: Synthetic oligonucleotide
  Sense strand starting at position 2210 of SEQ ID NO: 913388
gaaauuucccuuggugcgu

SEQ ID NO: 923351 - RNA, 19 nt, Artificial Sequence
  Description of Artificial Sequence: Synthetic oligonucleotide
  Antisense strand to SEQ ID NO: 923350
acgcaccaagggaaauuuc

SEQ ID NO: 923352 - RNA, 19 nt, Artificial Sequence
  Description of Artificial Sequence: Synthetic oligonucleotide
  Sense strand starting at position 3136 of SEQ ID NO: 913388
gauaauaugcuccaacguu

SEQ ID NO: 923353 - RNA, 19 nt, Artificial Sequence
  Description of Artificial Sequence: Synthetic oligonucleotide
  Antisense strand to SEQ ID NO: 923352
aacguuggagcauauuauc

SEQ ID NO: 923354 - RNA, 19 nt, Artificial Sequence
  Description of Artificial Sequence: Synthetic oligonucleotide
  Sense strand starting at position 2328 of SEQ ID NO: 913388
gaccauagguucucuaagu

SEQ ID NO: 923355 - RNA, 19 nt, Artificial Sequence
  Description of Artificial Sequence: Synthetic oligonucleotide
  Antisense strand to SEQ ID NO: 923354
acuuagagaaccuaugguc

SEQ ID NO: 923356 - RNA, 19 nt, Artificial Sequence
  Description of Artificial Sequence: Synthetic oligonucleotide
  Sense strand starting at position 2394 of SEQ ID NO: 913388
uguuucuuuccugacuuau

SEQ ID NO: 923357 - RNA, 19 nt, Artificial Sequence
  Description of Artificial Sequence: Synthetic oligonucleotide
  Antisense strand to SEQ ID NO: 923356
auaagucaggaaagaaaca

SEQ ID NO: 923358 - RNA, 19 nt, Artificial Sequence
  Description of Artificial Sequence: Synthetic oligonucleotide
  Sense strand starting at position 3072 of SEQ ID NO: 913388
gagaauguaugacuuacgu

SEQ ID NO: 923359 - RNA, 19 nt, Artificial Sequence
  Description of Artificial Sequence: Synthetic oligonucleotide
  Antisense strand to SEQ ID NO: 923358
acguaagucauacauucuc

SEQ ID NO: 923360 - RNA, 19 nt, Artificial Sequence
  Description of Artificial Sequence: Synthetic oligonucleotide
  Sense strand starting at position 1238 of SEQ ID NO: 913388
gcgaaaucagagugaaagu

SEQ ID NO: 923361 - RNA, 19 nt, Artificial Sequence
  Description of Artificial Sequence: Synthetic oligonucleotide
  Antisense strand to SEQ ID NO: 923360
acuuucacucugauuucgc

SEQ ID NO: 923362 - RNA, 19 nt, Artificial Sequence
  Description of Artificial Sequence: Synthetic oligonucleotide
  Sense strand starting at position 607 of SEQ ID NO: 913388
aaguaauauuaucuguggu

SEQ ID NO: 923363 - RNA, 19 nt, Artificial Sequence
  Description of Artificial Sequence: Synthetic oligonucleotide
  Antisense strand to SEQ ID NO: 923362
accacagauaauauuacuu

SEQ ID NO: 923364 - RNA, 19 nt, Artificial Sequence
  Description of Artificial Sequence: Synthetic oligonucleotide
  Sense strand starting at position 25 of SEQ ID NO: 913388
uuaccucuagucugaguaa

SEQ ID NO: 923365 - RNA, 19 nt, Artificial Sequence
  Description of Artificial Sequence: Synthetic oligonucleotide
  Antisense strand to SEQ ID NO: 923364
uuacucagacuagagguaa

SEQ ID NO: 923366 - RNA, 19 nt, Artificial Sequence
  Description of Artificial Sequence: Synthetic oligonucleotide
  Sense strand starting at position 2389 of SEQ ID NO: 913388
aagaguguuucuuuccuga

SEQ ID NO: 923367 - RNA, 19 nt, Artificial Sequence
  Description of Artificial Sequence: Synthetic oligonucleotide
  Antisense strand to SEQ ID NO: 923366
ucaggaaagaaacacucuu

SEQ ID NO: 923368 - RNA, 19 nt, Artificial Sequence
  Description of Artificial Sequence: Synthetic oligonucleotide
  Sense strand starting at position 1058 of SEQ ID NO: 913388
acuuccaggugucucauua

SEQ ID NO: 923369 - RNA, 19 nt, Artificial Sequence
  Description of Artificial Sequence: Synthetic oligonucleotide
  Antisense strand to SEQ ID NO: 923368
uaaugagacaccuggaagu

SEQ ID NO: 923370 - RNA, 19 nt, Artificial Sequence
  Description of Artificial Sequence: Synthetic oligonucleotide
  Sense strand starting at position 609 of SEQ ID NO: 913388
guaauauuaucugugguua

SEQ ID NO: 923371 - RNA, 19 nt, Artificial Sequence
  Description of Artificial Sequence: Synthetic oligonucleotide
  Antisense strand to SEQ ID NO: 923370
uaaccacagauaauauuac

SEQ ID NO: 923372 - RNA, 19 nt, Artificial Sequence
  Description of Artificial Sequence: Synthetic oligonucleotide
  Sense strand starting at position 2387 of SEQ ID NO: 913388
ugaagaguguuucuuuccu

SEQ ID NO: 923373 - RNA, 19 nt, Artificial Sequence
  Description of Artificial Sequence: Synthetic oligonucleotide
  Antisense strand to SEQ ID NO: 923372
aggaaagaaacacucuuca

SEQ ID NO: 923374 - RNA, 19 nt, Artificial Sequence
  Description of Artificial Sequence: Synthetic oligonucleotide
  Sense strand starting at position 130 of SEQ ID NO: 913388
caacuacuucgguaacguu

SEQ ID NO: 923375 - RNA, 19 nt, Artificial Sequence
  Description of Artificial Sequence: Synthetic oligonucleotide
  Antisense strand to SEQ ID NO: 923374
aacguuaccgaaguaguug

SEQ ID NO: 923376 - RNA, 19 nt, Artificial Sequence
  Description of Artificial Sequence: Synthetic oligonucleotide
  Sense strand starting at position 608 of SEQ ID NO: 913388
aguaauauuaucugugguu

SEQ ID NO: 923377 - RNA, 19 nt, Artificial Sequence
  Description of Artificial Sequence: Synthetic oligonucleotide
  Antisense strand to SEQ ID NO: 923376
aaccacagauaauauuacu

SEQ ID NO: 923378 - RNA, 19 nt, Artificial Sequence
  Description of Artificial Sequence: Synthetic oligonucleotide
  Sense strand starting at position 1398 of SEQ ID NO: 913389
aggauaaaucucuagcagu

SEQ ID NO: 923379 - RNA, 19 nt, Artificial Sequence
  Description of Artificial Sequence: Synthetic oligonucleotide
  Antisense strand to SEQ ID NO: 923378
acugcuagagauuuauccu

SEQ ID NO: 923380 - RNA, 19 nt, Artificial Sequence
  Description of Artificial Sequence: Synthetic oligonucleotide
  Sense strand starting at position 1414 of SEQ ID NO: 913389
aguaaauuaacugggugaa

SEQ ID NO: 923381 - RNA, 19 nt, Artificial Sequence
  Description of Artificial Sequence: Synthetic oligonucleotide
  Antisense strand to SEQ ID NO: 923380
uucacccaguuaauuuacu

SEQ ID NO: 923382 - RNA, 19 nt, Artificial Sequence
  Description of Artificial Sequence: Synthetic oligonucleotide
  Sense strand starting at position 1415 of SEQ ID NO: 913389
guaaauuaacugggugaaa

SEQ ID NO: 923383 - RNA, 19 nt, Artificial Sequence
  Description of Artificial Sequence: Synthetic oligonucleotide
  Antisense strand to SEQ ID NO: 923382
uuucacccaguuaauuuac

SEQ ID NO: 923384 - RNA, 19 nt, Artificial Sequence
  Description of Artificial Sequence: Synthetic oligonucleotide
  Sense strand starting at position 2953 of SEQ ID NO: 913389
ugugcaauaccugaaauau

SEQ ID NO: 923385 - RNA, 19 nt, Artificial Sequence
  Description of Artificial Sequence: Synthetic oligonucleotide
  Antisense strand to SEQ ID NO: 923384
auauuucagguauugcaca

SEQ ID NO: 923386 - RNA, 19 nt, Artificial Sequence
  Description of Artificial Sequence: Synthetic oligonucleotide
  Sense strand starting at position 1658 of SEQ ID NO: 913389
aacggaaucugacuugauc

SEQ ID NO: 923387 - RNA, 19 nt, Artificial Sequence
  Description of Artificial Sequence: Synthetic oligonucleotide
  Antisense strand to SEQ ID NO: 923386
gaucaagucagauuccguu

SEQ ID NO: 923388 - RNA, 19 nt, Artificial Sequence
  Description of Artificial Sequence: Synthetic oligonucleotide
  Sense strand starting at position 3343 of SEQ ID NO: 913389
gaauauaagcgucaucaag

SEQ ID NO: 923389 - RNA, 19 nt, Artificial Sequence
  Description of Artificial Sequence: Synthetic oligonucleotide
  Antisense strand to SEQ ID NO: 923388
cuugaugacgcuuauauuc

SEQ ID NO: 923390 - RNA, 19 nt, Artificial Sequence
  Description of Artificial Sequence: Synthetic oligonucleotide
  Sense strand starting at position 1344 of SEQ ID NO: 913389
gaaagaacguccuuggaca

SEQ ID NO: 923391 - RNA, 19 nt, Artificial Sequence
  Description of Artificial Sequence: Synthetic oligonucleotide
  Antisense strand to SEQ ID NO: 923390
uguccaaggacguucuuuc

SEQ ID NO: 923392 - RNA, 19 nt, Artificial Sequence
  Description of Artificial Sequence: Synthetic oligonucleotide
  Sense strand starting at position 565 of SEQ ID NO: 913389
ugauccuuacaaggguaau

SEQ ID NO: 923393 - RNA, 19 nt, Artificial Sequence
  Description of Artificial Sequence: Synthetic oligonucleotide
  Antisense strand to SEQ ID NO: 923392
auuacccuuguaaggauca

SEQ ID NO: 923394 - RNA, 19 nt, Artificial Sequence
  Description of Artificial Sequence: Synthetic oligonucleotide
  Sense strand starting at position 488 of SEQ ID NO: 913389
ucaccauauuggguaugau

SEQ ID NO: 923395 - RNA, 19 nt, Artificial Sequence
  Description of Artificial Sequence: Synthetic oligonucleotide
  Antisense strand to SEQ ID NO: 923394
aucauacccaauaugguga

SEQ ID NO: 923396 - RNA, 19 nt, Artificial Sequence
  Description of Artificial Sequence: Synthetic oligonucleotide
  Sense strand starting at position 107 of SEQ ID NO: 913389
acaguauugcaaugauaga

SEQ ID NO: 923397 - RNA, 19 nt, Artificial Sequence
  Description of Artificial Sequence: Synthetic oligonucleotide
  Antisense strand to SEQ ID NO: 923396
ucuaucauugcaauacugu

SEQ ID NO: 923398 - RNA, 19 nt, Artificial Sequence
  Description of Artificial Sequence: Synthetic oligonucleotide
  Sense strand starting at position 1346 of SEQ ID NO: 913389
aagaacguccuuggacaua

SEQ ID NO: 923399 - RNA, 19 nt, Artificial Sequence
  Description of Artificial Sequence: Synthetic oligonucleotide
  Antisense strand to SEQ ID NO: 923398
uauguccaaggacguucuu

SEQ ID NO: 923400 - RNA, 19 nt, Artificial Sequence
  Description of Artificial Sequence: Synthetic oligonucleotide
  Sense strand starting at position 1345 of SEQ ID NO: 913389
aaagaacguccuuggacau

SEQ ID NO: 923401 - RNA, 19 nt, Artificial Sequence
  Description of Artificial Sequence: Synthetic oligonucleotide
  Antisense strand to SEQ ID NO: 923400
auguccaaggacguucuuu

SEQ ID NO: 923402 - RNA, 19 nt, Artificial Sequence
  Description of Artificial Sequence: Synthetic oligonucleotide
  Sense strand starting at position 3928 of SEQ ID NO: 913389
ggauauaugcccuauugug

SEQ ID NO: 923403 - RNA, 19 nt, Artificial Sequence
  Description of Artificial Sequence: Synthetic oligonucleotide
  Antisense strand to SEQ ID NO: 923402
cacaauagggcauauaucc

SEQ ID NO: 923404 - RNA, 19 nt, Artificial Sequence
  Description of Artificial Sequence: Synthetic oligonucleotide
  Sense strand starting at position 3244 of SEQ ID NO: 913389
gugugacuucuguauagaa

SEQ ID NO: 923405 - RNA, 19 nt, Artificial Sequence
  Description of Artificial Sequence: Synthetic oligonucleotide
  Antisense strand to SEQ ID NO: 923404
uucuauacagaagucacac

SEQ ID NO: 923406 - RNA, 19 nt, Artificial Sequence
  Description of Artificial Sequence: Synthetic oligonucleotide
  Sense strand starting at position 2605 of SEQ ID NO: 913389
ggccuucuggcugagaaau

SEQ ID NO: 923407 - RNA, 19 nt, Artificial Sequence
  Description of Artificial Sequence: Synthetic oligonucleotide
  Antisense strand to SEQ ID NO: 923406
auuucucagccagaaggcc

SEQ ID NO: 923408 - RNA, 19 nt, Artificial Sequence
  Description of Artificial Sequence: Synthetic oligonucleotide
  Sense strand starting at position 547 of SEQ ID NO: 913389
ggcaaugagcuauggagau

SEQ ID NO: 923409 - RNA, 19 nt, Artificial Sequence
  Description of Artificial Sequence: Synthetic oligonucleotide
  Antisense strand to SEQ ID NO: 923408
aucuccauagcucauugcc

SEQ ID NO: 923410 - RNA, 19 nt, Artificial Sequence
  Description of Artificial Sequence: Synthetic oligonucleotide
  Sense strand starting at position 118 of SEQ ID NO: 913389
augauagagugucuccuaa

SEQ ID NO: 923411 - RNA, 19 nt, Artificial Sequence
  Description of Artificial Sequence: Synthetic oligonucleotide
  Antisense strand to SEQ ID NO: 923410
uuaggagacacucuaucau

SEQ ID NO: 923412 - RNA, 19 nt, Artificial Sequence
  Description of Artificial Sequence: Synthetic oligonucleotide
  Sense strand starting at position 1617 of SEQ ID NO: 913389
ucaagaaaucgaggccacu

SEQ ID NO: 923413 - RNA, 19 nt, Artificial Sequence
  Description of Artificial Sequence: Synthetic oligonucleotide
  Antisense strand to SEQ ID NO: 923412
aguggccucgauuucuuga

SEQ ID NO: 923414 - RNA, 19 nt, Artificial Sequence
  Description of Artificial Sequence: Synthetic oligonucleotide
  Sense strand starting at position 1529 of SEQ ID NO: 913389
uguauuuguucuucgugaa

SEQ ID NO: 923415 - RNA, 19 nt, Artificial Sequence
  Description of Artificial Sequence: Synthetic oligonucleotide
  Antisense strand to SEQ ID NO: 923414
uucacgaagaacaaauaca

SEQ ID NO: 923416 - RNA, 19 nt, Artificial Sequence
  Description of Artificial Sequence: Synthetic oligonucleotide
  Sense strand starting at position 491 of SEQ ID NO: 913389
ccauauuggguaugauagu

SEQ ID NO: 923417 - RNA, 19 nt, Artificial Sequence
  Description of Artificial Sequence: Synthetic oligonucleotide
  Antisense strand to SEQ ID NO: 923416
acuaucauacccaauaugg

SEQ ID NO: 923418 - RNA, 19 nt, Artificial Sequence
  Description of Artificial Sequence: Synthetic oligonucleotide
  Sense strand starting at position 2948 of SEQ ID NO: 913389
ggucaugugcaauaccuga

SEQ ID NO: 923419 - RNA, 19 nt, Artificial Sequence
  Description of Artificial Sequence: Synthetic oligonucleotide
  Antisense strand to SEQ ID NO: 923418
ucagguauugcacaugacc

SEQ ID NO: 923420 - RNA, 19 nt, Artificial Sequence
  Description of Artificial Sequence: Synthetic oligonucleotide
  Sense strand starting at position 1530 of SEQ ID NO: 913389
guauuuguucuucgugaac

SEQ ID NO: 923421 - RNA, 19 nt, Artificial Sequence
  Description of Artificial Sequence: Synthetic oligonucleotide
  Antisense strand to SEQ ID NO: 923420
guucacgaagaacaaauac

SEQ ID NO: 923422 - RNA, 19 nt, Artificial Sequence
  Description of Artificial Sequence: Synthetic oligonucleotide
  Sense strand starting at position 3969 of SEQ ID NO: 913389
guugaaauuucccagggau

SEQ ID NO: 923423 - RNA, 19 nt, Artificial Sequence
  Description of Artificial Sequence: Synthetic oligonucleotide
  Antisense strand to SEQ ID NO: 923422
aucccugggaaauuucaac

SEQ ID NO: 923424 - RNA, 19 nt, Artificial Sequence
  Description of Artificial Sequence: Synthetic oligonucleotide
  Sense strand starting at position 3027 of SEQ ID NO: 913389
uuugauugccuuuagcaaa

SEQ ID NO: 923425 - RNA, 19 nt, Artificial Sequence
  Description of Artificial Sequence: Synthetic oligonucleotide
  Antisense strand to SEQ ID NO: 923424
uuugcuaaaggcaaucaaa

SEQ ID NO: 923426 - RNA, 19 nt, Artificial Sequence
  Description of Artificial Sequence: Synthetic oligonucleotide
  Sense strand starting at position 3624 of SEQ ID NO: 913389
agacuauagugaccuguuu

SEQ ID NO: 923427 - RNA, 19 nt, Artificial Sequence
  Description of Artificial Sequence: Synthetic oligonucleotide
  Antisense strand to SEQ ID NO: 923426
aaacaggucacuauagucu

SEQ ID NO: 923428 - RNA, 19 nt, Artificial Sequence
  Description of Artificial Sequence: Synthetic oligonucleotide
  Sense strand starting at position 1291 of SEQ ID NO: 913389
agucucugauuguugaaau

SEQ ID NO: 923429 - RNA, 19 nt, Artificial Sequence
  Description of Artificial Sequence: Synthetic oligonucleotide
  Antisense strand to SEQ ID NO: 923428
auuucaacaaucagagacu

SEQ ID NO: 923430 - RNA, 19 nt, Artificial Sequence
  Description of Artificial Sequence: Synthetic oligonucleotide
  Sense strand starting at position 2265 of SEQ ID NO: 913389
cggaaucucuaugcagaug

SEQ ID NO: 923431 - RNA, 19 nt, Artificial Sequence
  Description of Artificial Sequence: Synthetic oligonucleotide
  Antisense strand to SEQ ID NO: 923430
caucugcauagagauuccg

SEQ ID NO: 923432 - RNA, 19 nt, Artificial Sequence
  Description of Artificial Sequence: Synthetic oligonucleotide
  Sense strand starting at position 3339 of SEQ ID NO: 913389
ucaagaauauaagcgucau

SEQ ID NO: 923433 - RNA, 19 nt, Artificial Sequence
  Description of Artificial Sequence: Synthetic oligonucleotide
  Antisense strand to SEQ ID NO: 923432
augacgcuuauauucuuga

SEQ ID NO: 923434 - RNA, 19 nt, Artificial Sequence
  Description of Artificial Sequence: Synthetic oligonucleotide
  Sense strand starting at position 1528 of SEQ ID NO: 913389
uuguauuuguucuucguga

SEQ ID NO: 923435 - RNA, 19 nt, Artificial Sequence
  Description of Artificial Sequence: Synthetic oligonucleotide
  Antisense strand to SEQ ID NO: 923434
ucacgaagaacaaauacaa

SEQ ID NO: 923436 - RNA, 19 nt, Artificial Sequence
  Description of Artificial Sequence: Synthetic oligonucleotide
  Sense strand starting at position 3361 of SEQ ID NO: 913389
guguuauaugauuggaccu

SEQ ID NO: 923437 - RNA, 19 nt, Artificial Sequence
  Description of Artificial Sequence: Synthetic oligonucleotide
  Antisense strand to SEQ ID NO: 923436
agguccaaucauauaacac

SEQ ID NO: 923438 - RNA, 19 nt, Artificial Sequence
  Description of Artificial Sequence: Synthetic oligonucleotide
  Sense strand starting at position 2676 of SEQ ID NO: 913389
uccagaaaucaucguucca

SEQ ID NO: 923439 - RNA, 19 nt, Artificial Sequence
  Description of Artificial Sequence: Synthetic oligonucleotide
  Antisense strand to SEQ ID NO: 923438
uggaacgaugauuucugga

SEQ ID NO: 923440 - RNA, 19 nt, Artificial Sequence
  Description of Artificial Sequence: Synthetic oligonucleotide
  Sense strand starting at position 1579 of SEQ ID NO: 913389
ugaguucugcuuugagaag

SEQ ID NO: 923441 - RNA, 19 nt, Artificial Sequence
  Description of Artificial Sequence: Synthetic oligonucleotide
  Antisense strand to SEQ ID NO: 923440
cuucucaaagcagaacuca

SEQ ID NO: 923442 - RNA, 19 nt, Artificial Sequence
  Description of Artificial Sequence: Synthetic oligonucleotide
  Sense strand starting at position 3705 of SEQ ID NO: 913389
auugcugcuguauauaaua

SEQ ID NO: 923443 - RNA, 19 nt, Artificial Sequence
  Description of Artificial Sequence: Synthetic oligonucleotide
  Antisense strand to SEQ ID NO: 923442
uauuauauacagcagcaau

SEQ ID NO: 923444 - RNA, 19 nt, Artificial Sequence
  Description of Artificial Sequence: Synthetic oligonucleotide
  Sense strand starting at position 2109 of SEQ ID NO: 913389
ccgcgauuaccugaaucca

SEQ ID NO: 923445 - RNA, 19 nt, Artificial Sequence
  Description of Artificial Sequence: Synthetic oligonucleotide
  Antisense strand to SEQ ID NO: 923444
uggauucagguaaucgcgg

SEQ ID NO: 923446 - RNA, 19 nt, Artificial Sequence
  Description of Artificial Sequence: Synthetic oligonucleotide
  Sense strand starting at position 832 of SEQ ID NO: 913389
uggagaguggccugaucuu

SEQ ID NO: 923447 - RNA, 19 nt, Artificial Sequence
  Description of Artificial Sequence: Synthetic oligonucleotide
  Antisense strand to SEQ ID NO: 923446
aagaucaggccacucucca

SEQ ID NO: 923448 - RNA, 19 nt, Artificial Sequence
  Description of Artificial Sequence: Synthetic oligonucleotide
  Sense strand starting at position 2264 of SEQ ID NO: 913389
ccggaaucucuaugcagau

SEQ ID NO: 923449 - RNA, 19 nt, Artificial Sequence
  Description of Artificial Sequence: Synthetic oligonucleotide
  Antisense strand to SEQ ID NO: 923448
aucugcauagagauuccgg

SEQ ID NO: 923450 - RNA, 19 nt, Artificial Sequence
  Description of Artificial Sequence: Synthetic oligonucleotide
  Sense strand starting at position 1289 of SEQ ID NO: 913389
ccagucucugauuguugaa

SEQ ID NO: 923451 - RNA, 19 nt, Artificial Sequence
  Description of Artificial Sequence: Synthetic oligonucleotide
  Antisense strand to SEQ ID NO: 923450
uucaacaaucagagacugg

SEQ ID NO: 923452 - RNA, 19 nt, Artificial Sequence
  Description of Artificial Sequence: Synthetic oligonucleotide
  Sense strand starting at position 2604 of SEQ ID NO: 913389
uggccuucuggcugagaaa

SEQ ID NO: 923453 - RNA, 19 nt, Artificial Sequence
  Description of Artificial Sequence: Synthetic oligonucleotide
  Antisense strand to SEQ ID NO: 923452
uuucucagccagaaggcca

SEQ ID NO: 923454 - RNA, 19 nt, Artificial Sequence
  Description of Artificial Sequence: Synthetic oligonucleotide
  Sense strand starting at position 2678 of SEQ ID NO: 913389
cagaaaucaucguuccagu

SEQ ID NO: 923455 - RNA, 19 nt, Artificial Sequence
  Description of Artificial Sequence: Synthetic oligonucleotide
  Antisense strand to SEQ ID NO: 923454
acuggaacgaugauuucug

SEQ ID NO: 923456 - RNA, 19 nt, Artificial Sequence
  Description of Artificial Sequence: Synthetic oligonucleotide
  Sense strand starting at position 73 of SEQ ID NO: 913389
uugcauagugcagagguua

SEQ ID NO: 923457 - RNA, 19 nt, Artificial Sequence
  Description of Artificial Sequence: Synthetic oligonucleotide
  Antisense strand to SEQ ID NO: 923456
uaaccucugcacuaugcaa

SEQ ID NO: 923458 - RNA, 19 nt, Artificial Sequence
  Description of Artificial Sequence: Synthetic oligonucleotide
  Sense strand starting at position 926 of SEQ ID NO: 913390
gcuuaagaaccauaguuaa

SEQ ID NO: 923459 - RNA, 19 nt, Artificial Sequence
  Description of Artificial Sequence: Synthetic oligonucleotide
  Antisense strand to SEQ ID NO: 923458
uuaacuaugguucuuaagc

SEQ ID NO: 923460 - RNA, 19 nt, Artificial Sequence
  Description of Artificial Sequence: Synthetic oligonucleotide
  Sense strand starting at position 2555 of SEQ ID NO: 913390
augguagaauacucugaua

SEQ ID NO: 923461 - RNA, 19 nt, Artificial Sequence
  Description of Artificial Sequence: Synthetic oligonucleotide
  Antisense strand to SEQ ID NO: 923460
uaucagaguauucuaccau

SEQ ID NO: 923462 - RNA, 19 nt, Artificial Sequence
  Description of Artificial Sequence: Synthetic oligonucleotide
  Sense strand starting at position 3414 of SEQ ID NO: 913390
aggagauacuaccugcaga

SEQ ID NO: 923463 - RNA, 19 nt, Artificial Sequence
  Description of Artificial Sequence: Synthetic oligonucleotide
  Antisense strand to SEQ ID NO: 923462
ucugcagguaguaucuccu

SEQ ID NO: 923464 - RNA, 19 nt, Artificial Sequence
  Description of Artificial Sequence: Synthetic oligonucleotide
  Sense strand starting at position 2997 of SEQ ID NO: 913390
agauauuuguccuuuguuu

SEQ ID NO: 923465 - RNA, 19 nt, Artificial Sequence
  Description of Artificial Sequence: Synthetic oligonucleotide
  Antisense strand to SEQ ID NO: 923464
aaacaaaggacaaauaucu

SEQ ID NO: 923466 - RNA, 19 nt, Artificial Sequence
  Description of Artificial Sequence: Synthetic oligonucleotide
  Sense strand starting at position 2666 of SEQ ID NO: 913390
accuuuguccauuaagaug

SEQ ID NO: 923467 - RNA, 19 nt, Artificial Sequence
  Description of Artificial Sequence: Synthetic oligonucleotide
  Antisense strand to SEQ ID NO: 923466
caucuuaauggacaaaggu

SEQ ID NO: 923468 - RNA, 19 nt, Artificial Sequence
  Description of Artificial Sequence: Synthetic oligonucleotide
  Sense strand starting at position 288 of SEQ ID NO: 913390
uugcuaaccgaugagaaau

SEQ ID NO: 923469 - RNA, 19 nt, Artificial Sequence
  Description of Artificial Sequence: Synthetic oligonucleotide
  Antisense strand to SEQ ID NO: 923468
auuucucaucgguuagcaa

SEQ ID NO: 923470 - RNA, 19 nt, Artificial Sequence
  Description of Artificial Sequence: Synthetic oligonucleotide
  Sense strand starting at position 237 of SEQ ID NO: 913390
gcacaaauuuguucugggu

SEQ ID NO: 923471 - RNA, 19 nt, Artificial Sequence
  Description of Artificial Sequence: Synthetic oligonucleotide
  Antisense strand to SEQ ID NO: 923470
acccagaacaaauuugugc

SEQ ID NO: 923472 - RNA, 19 nt, Artificial Sequence
  Description of Artificial Sequence: Synthetic oligonucleotide
  Sense strand starting at position 3507 of SEQ ID NO: 913390
uggauuacagucugagaca

SEQ ID NO: 923473 - RNA, 19 nt, Artificial Sequence
  Description of Artificial Sequence: Synthetic oligonucleotide
  Antisense strand to SEQ ID NO: 923472
ugucucagacuguaaucca

SEQ ID NO: 923474 - RNA, 19 nt, Artificial Sequence
  Description of Artificial Sequence: Synthetic oligonucleotide
  Sense strand starting at position 322 of SEQ ID NO: 913390
acauaaacauguucugaug

SEQ ID NO: 923475 - RNA, 19 nt, Artificial Sequence
  Description of Artificial Sequence: Synthetic oligonucleotide
  Antisense strand to SEQ ID NO: 923474
caucagaacauguuuaugu

SEQ ID NO: 923476 - RNA, 19 nt, Artificial Sequence
  Description of Artificial Sequence: Synthetic oligonucleotide
  Sense strand starting at position 3384 of SEQ ID NO: 913390
aguuguuaggaauggaaua

SEQ ID NO: 923477 - RNA, 19 nt, Artificial Sequence
  Description of Artificial Sequence: Synthetic oligonucleotide
  Antisense strand to SEQ ID NO: 923476
uauuccauuccuaacaacu

SEQ ID NO: 923478 - RNA, 19 nt, Artificial Sequence
  Description of Artificial Sequence: Synthetic oligonucleotide
  Sense strand starting at position 441 of SEQ ID NO: 913390
aaaggcuuaggugaaaguu

SEQ ID NO: 923479 - RNA, 19 nt, Artificial Sequence
  Description of Artificial Sequence: Synthetic oligonucleotide
  Antisense strand to SEQ ID NO: 923478
aacuuucaccuaagccuuu

SEQ ID NO: 923480 - RNA, 19 nt, Artificial Sequence
  Description of Artificial Sequence: Synthetic oligonucleotide
  Sense strand starting at position 199 of SEQ ID NO: 913390
auaccaaaguggucaugaa

SEQ ID NO: 923481 - RNA, 19 nt, Artificial Sequence
  Description of Artificial Sequence: Synthetic oligonucleotide
  Antisense strand to SEQ ID NO: 923480
uucaugaccacuuugguau

SEQ ID NO: 923482 - RNA, 19 nt, Artificial Sequence
  Description of Artificial Sequence: Synthetic oligonucleotide
  Sense strand starting at position 1459 of SEQ ID NO: 913390
gacccuaaguuuccaggaa

SEQ ID NO: 923483 - RNA, 19 nt, Artificial Sequence
  Description of Artificial Sequence: Synthetic oligonucleotide
  Antisense strand to SEQ ID NO: 923482
uuccuggaaacuuaggguc

SEQ ID NO: 923484 - RNA, 19 nt, Artificial Sequence
  Description of Artificial Sequence: Synthetic oligonucleotide
  Sense strand starting at position 241 of SEQ ID NO: 913390
aaauuuguucuggguguuu

SEQ ID NO: 923485 - RNA, 19 nt, Artificial Sequence
  Description of Artificial Sequence: Synthetic oligonucleotide
  Antisense strand to SEQ ID NO: 923484
aaacacccagaacaaauuu

SEQ ID NO: 923486 - RNA, 19 nt, Artificial Sequence
  Description of Artificial Sequence: Synthetic oligonucleotide
  Sense strand starting at position 1472 of SEQ ID NO: 913390
caggaauggauucgguaag

SEQ ID NO: 923487 - RNA, 19 nt, Artificial Sequence
  Description of Artificial Sequence: Synthetic oligonucleotide
  Antisense strand to SEQ ID NO: 923486
cuuaccgaauccauuccug

SEQ ID NO: 923488 - RNA, 19 nt, Artificial Sequence
  Description of Artificial Sequence: Synthetic oligonucleotide
  Sense strand starting at position 663 of SEQ ID NO: 913390
acagaaauguaacauuuga

SEQ ID NO: 923489 - RNA, 19 nt, Artificial Sequence
  Description of Artificial Sequence: Synthetic oligonucleotide
  Antisense strand to SEQ ID NO: 923488
ucaaauguuacauuucugu

SEQ ID NO: 923490 - RNA, 19 nt, Artificial Sequence
  Description of Artificial Sequence: Synthetic oligonucleotide
  Sense strand starting at position 1033 of SEQ ID NO: 913390
uuacauaaacugggauguu

SEQ ID NO: 923491 - RNA, 19 nt, Artificial Sequence
  Description of Artificial Sequence: Synthetic oligonucleotide
  Antisense strand to SEQ ID NO: 923490
aacaucccaguuuauguaa

SEQ ID NO: 923492 - RNA, 19 nt, Artificial Sequence
  Description of Artificial Sequence: Synthetic oligonucleotide
  Sense strand starting at position 2557 of SEQ ID NO: 913390
gguagaauacucugauacu

SEQ ID NO: 923493 - RNA, 19 nt, Artificial Sequence
  Description of Artificial Sequence: Synthetic oligonucleotide
  Antisense strand to SEQ ID NO: 923492
aguaucagaguauucuacc

SEQ ID NO: 923494 - RNA, 19 nt, Artificial Sequence
  Description of Artificial Sequence: Synthetic oligonucleotide
  Sense strand starting at position 2567 of SEQ ID NO: 913390
ucugauacucaccgggaaa

SEQ ID NO: 923495 - RNA, 19 nt, Artificial Sequence
  Description of Artificial Sequence: Synthetic oligonucleotide
  Antisense strand to SEQ ID NO: 923494
uuucccggugaguaucaga

SEQ ID NO: 923496 - RNA, 19 nt, Artificial Sequence
  Description of Artificial Sequence: Synthetic oligonucleotide
  Sense strand starting at position 3427 of SEQ ID NO: 913390
ugcagagaagcuuagacuu

SEQ ID NO: 923497 - RNA, 19 nt, Artificial Sequence
  Description of Artificial Sequence: Synthetic oligonucleotide
  Antisense strand to SEQ ID NO: 923496
aagucuaagcuucucugca

SEQ ID NO: 923498 - RNA, 19 nt, Artificial Sequence
  Description of Artificial Sequence: Synthetic oligonucleotide
  Sense strand starting at position 1317 of SEQ ID NO: 913390
gcagaaguuacucaguaag

SEQ ID NO: 923499 - RNA, 19 nt, Artificial Sequence
  Description of Artificial Sequence: Synthetic oligonucleotide
  Antisense strand to SEQ ID NO: 923498
cuuacugaguaacuucugc

SEQ ID NO: 923500 - RNA, 19 nt, Artificial Sequence
  Description of Artificial Sequence: Synthetic oligonucleotide
  Sense strand starting at position 1062 of SEQ ID NO: 913390
gggaaucacuuagcacuca

SEQ ID NO: 923501 - RNA, 19 nt, Artificial Sequence
  Description of Artificial Sequence: Synthetic oligonucleotide
  Antisense strand to SEQ ID NO: 923500
ugagugcuaagugauuccc

SEQ ID NO: 923502 - RNA, 19 nt, Artificial Sequence
  Description of Artificial Sequence: Synthetic oligonucleotide
  Sense strand starting at position 3661 of SEQ ID NO: 913390
uuuaaucagcuguaugaca

SEQ ID NO: 923503 - RNA, 19 nt, Artificial Sequence
  Description of Artificial Sequence: Synthetic oligonucleotide
  Antisense strand to SEQ ID NO: 923502
ugucauacagcugauuaaa

SEQ ID NO: 923504 - RNA, 19 nt, Artificial Sequence
  Description of Artificial Sequence: Synthetic oligonucleotide
  Sense strand starting at position 2566 of SEQ ID NO: 913390
cucugauacucaccgggaa

SEQ ID NO: 923505 - RNA, 19 nt, Artificial Sequence
  Description of Artificial Sequence: Synthetic oligonucleotide
  Antisense strand to SEQ ID NO: 923504
uucccggugaguaucagag

SEQ ID NO: 923506 - RNA, 19 nt, Artificial Sequence
  Description of Artificial Sequence: Synthetic oligonucleotide
  Sense strand starting at position 287 of SEQ ID NO: 913390
auugcuaaccgaugagaaa

SEQ ID NO: 923507 - RNA, 19 nt, Artificial Sequence
  Description of Artificial Sequence: Synthetic oligonucleotide
  Antisense strand to SEQ ID NO: 923506
uuucucaucgguuagcaau

SEQ ID NO: 923508 - RNA, 19 nt, Artificial Sequence
  Description of Artificial Sequence: Synthetic oligonucleotide
  Sense strand starting at position 2458 of SEQ ID NO: 913390
uuguauguaccugaaaucu

SEQ ID NO: 923509 - RNA, 19 nt, Artificial Sequence
  Description of Artificial Sequence: Synthetic oligonucleotide
  Antisense strand to SEQ ID NO: 923508
agauuucagguacauacaa

SEQ ID NO: 923510 - RNA, 19 nt, Artificial Sequence
  Description of Artificial Sequence: Synthetic oligonucleotide
  Sense strand starting at position 3966 of SEQ ID NO: 913390
ccagucacucccugaagga

SEQ ID NO: 923511 - RNA, 19 nt, Artificial Sequence
  Description of Artificial Sequence: Synthetic oligonucleotide
  Antisense strand to SEQ ID NO: 923510
uccuucagggagugacugg

SEQ ID NO: 923512 - RNA, 19 nt, Artificial Sequence
  Description of Artificial Sequence: Synthetic oligonucleotide
  Sense strand starting at position 1297 of SEQ ID NO: 913390
auacacugcuuucugagaa

SEQ ID NO: 923513 - RNA, 19 nt, Artificial Sequence
  Description of Artificial Sequence: Synthetic oligonucleotide
  Antisense strand to SEQ ID NO: 923512
uucucagaaagcaguguau

SEQ ID NO: 923514 - RNA, 19 nt, Artificial Sequence
  Description of Artificial Sequence: Synthetic oligonucleotide
  Sense strand starting at position 1253 of SEQ ID NO: 913390
agaucuaugaaaugugguu

SEQ ID NO: 923515 - RNA, 19 nt, Artificial Sequence
  Description of Artificial Sequence: Synthetic oligonucleotide
  Antisense strand to SEQ ID NO: 923514
aaccacauuucauagaucu

SEQ ID NO: 923516 - RNA, 19 nt, Artificial Sequence
  Description of Artificial Sequence: Synthetic oligonucleotide
  Sense strand starting at position 1163 of SEQ ID NO: 913390
gaaacccauucgguaauca

SEQ ID NO: 923517 - RNA, 19 nt, Artificial Sequence
  Description of Artificial Sequence: Synthetic oligonucleotide
  Antisense strand to SEQ ID NO: 923516
ugauuaccgaauggguuuc

SEQ ID NO: 923518 - RNA, 19 nt, Artificial Sequence
  Description of Artificial Sequence: Synthetic oligonucleotide
  Sense strand starting at position 3704 of SEQ ID NO: 913390
guggaugccagccagagau

SEQ ID NO: 923519 - RNA, 19 nt, Artificial Sequence
  Description of Artificial Sequence: Synthetic oligonucleotide
  Antisense strand to SEQ ID NO: 923518
aucucuggcuggcauccac

SEQ ID NO: 923520 - RNA, 19 nt, Artificial Sequence
  Description of Artificial Sequence: Synthetic oligonucleotide
  Sense strand starting at position 792 of SEQ ID NO: 913390
aggcaagaucaauguuauu

SEQ ID NO: 923521 - RNA, 19 nt, Artificial Sequence
  Description of Artificial Sequence: Synthetic oligonucleotide
  Antisense strand to SEQ ID NO: 923520
aauaacauugaucuugccu

SEQ ID NO: 923522 - RNA, 19 nt, Artificial Sequence
  Description of Artificial Sequence: Synthetic oligonucleotide
  Sense strand starting at position 294 of SEQ ID NO: 913390
accgaugagaaaugcuuua

SEQ ID NO: 923523 - RNA, 19 nt, Artificial Sequence
  Description of Artificial Sequence: Synthetic oligonucleotide
  Antisense strand to SEQ ID NO: 923522
uaaagcauuucucaucggu

SEQ ID NO: 923524 - RNA, 19 nt, Artificial Sequence
  Description of Artificial Sequence: Synthetic oligonucleotide
  Sense strand starting at position 742 of SEQ ID NO: 913390
gaagguuggugaguuuaag

SEQ ID NO: 923525 - RNA, 19 nt, Artificial Sequence
  Description of Artificial Sequence: Synthetic oligonucleotide
  Antisense strand to SEQ ID NO: 923524
cuuaaacucaccaaccuuc

SEQ ID NO: 923526 - RNA, 19 nt, Artificial Sequence
  Description of Artificial Sequence: Synthetic oligonucleotide
  Sense strand starting at position 1144 of SEQ ID NO: 913390
ccagcaucauuagugaaau

SEQ ID NO: 923527 - RNA, 19 nt, Artificial Sequence
  Description of Artificial Sequence: Synthetic oligonucleotide
  Antisense strand to SEQ ID NO: 923526
auuucacuaaugaugcugg

SEQ ID NO: 923528 - RNA, 19 nt, Artificial Sequence
  Description of Artificial Sequence: Synthetic oligonucleotide
  Sense strand starting at position 1258 of SEQ ID NO: 913390
uaugaaaugugguugguaa

SEQ ID NO: 923529 - RNA, 19 nt, Artificial Sequence
  Description of Artificial Sequence: Synthetic oligonucleotide
  Antisense strand to SEQ ID NO: 923528
uuaccaaccacauuucaua

SEQ ID NO: 923530 - RNA, 19 nt, Artificial Sequence
  Description of Artificial Sequence: Synthetic oligonucleotide
  Sense strand starting at position 3606 of SEQ ID NO: 913390
gucccaguccuggaagcaa

SEQ ID NO: 923531 - RNA, 19 nt, Artificial Sequence
  Description of Artificial Sequence: Synthetic oligonucleotide
  Antisense strand to SEQ ID NO: 923530
uugcuuccaggacugggac

SEQ ID NO: 923532 - RNA, 19 nt, Artificial Sequence
  Description of Artificial Sequence: Synthetic oligonucleotide
  Sense strand starting at position 1421 of SEQ ID NO: 913390
ccaccagacucguuacaag

SEQ ID NO: 923533 - RNA, 19 nt, Artificial Sequence
  Description of Artificial Sequence: Synthetic oligonucleotide
  Antisense strand to SEQ ID NO: 923532
cuuguaacgagucuggugg

SEQ ID NO: 923534 - RNA, 19 nt, Artificial Sequence
  Description of Artificial Sequence: Synthetic oligonucleotide
  Sense strand starting at position 3684 of SEQ ID NO: 913390
ggagcauuacuggguccaa

SEQ ID NO: 923535 - RNA, 19 nt, Artificial Sequence
  Description of Artificial Sequence: Synthetic oligonucleotide
  Antisense strand to SEQ ID NO: 923534
uuggacccaguaaugcucc

SEQ ID NO: 923536 - RNA, 19 nt, Artificial Sequence
  Description of Artificial Sequence: Synthetic oligonucleotide
  Sense strand starting at position 768 of SEQ ID NO: 913390
caggguggccuaugacaau

SEQ ID NO: 923537 - RNA, 19 nt, Artificial Sequence
  Description of Artificial Sequence: Synthetic oligonucleotide
  Antisense strand to SEQ ID NO: 923536
auugucauaggccacccug

SEQ ID NO: 923538 - RNA, 19 nt, Artificial Sequence
  Description of Artificial Sequence: Synthetic oligonucleotide
  Sense strand starting at position 649 of SEQ ID NO: 913391
aaauauggucgacauuacu

SEQ ID NO: 923539 - RNA, 19 nt, Artificial Sequence
  Description of Artificial Sequence: Synthetic oligonucleotide
  Antisense strand to SEQ ID NO: 923538
aguaaugucgaccauauuu

SEQ ID NO: 923540 - RNA, 19 nt, Artificial Sequence
  Description of Artificial Sequence: Synthetic oligonucleotide
  Sense strand starting at position 1711 of SEQ ID NO: 913391
uuguaagaagcugaucaau

SEQ ID NO: 923541 - RNA, 19 nt, Artificial Sequence
  Description of Artificial Sequence: Synthetic oligonucleotide
  Antisense strand to SEQ ID NO: 923540
auugaucagcuucuuacaa

SEQ ID NO: 923542 - RNA, 19 nt, Artificial Sequence
  Description of Artificial Sequence: Synthetic oligonucleotide
  Sense strand starting at position 3655 of SEQ ID NO: 913391
aagugauuacguuaaagac

SEQ ID NO: 923543 - RNA, 19 nt, Artificial Sequence
  Description of Artificial Sequence: Synthetic oligonucleotide
  Antisense strand to SEQ ID NO: 923542
gucuuuaacguaaucacuu

SEQ ID NO: 923544 - RNA, 19 nt, Artificial Sequence
  Description of Artificial Sequence: Synthetic oligonucleotide
  Sense strand starting at position 2902 of SEQ ID NO: 913391
ugguucugugaauagggau

SEQ ID NO: 923545 - RNA, 19 nt, Artificial Sequence
  Description of Artificial Sequence: Synthetic oligonucleotide
  Antisense strand to SEQ ID NO: 923544
aucccuauucacagaacca

SEQ ID NO: 923546 - RNA, 19 nt, Artificial Sequence
  Description of Artificial Sequence: Synthetic oligonucleotide
  Sense strand starting at position 3068 of SEQ ID NO: 913391
ucauuagaaucagcuaaag

SEQ ID NO: 923547 - RNA, 19 nt, Artificial Sequence
  Description of Artificial Sequence: Synthetic oligonucleotide
  Antisense strand to SEQ ID NO: 923546
cuuuagcugauucuaauga

SEQ ID NO: 923548 - RNA, 19 nt, Artificial Sequence
  Description of Artificial Sequence: Synthetic oligonucleotide
  Sense strand starting at position 530 of SEQ ID NO: 913391
guuaauauuggguauauac

SEQ ID NO: 923549 - RNA, 19 nt, Artificial Sequence
  Description of Artificial Sequence: Synthetic oligonucleotide
  Antisense strand to SEQ ID NO: 923548
guauauacccaauauuaac

SEQ ID NO: 923550 - RNA, 19 nt, Artificial Sequence
  Description of Artificial Sequence: Synthetic oligonucleotide
  Sense strand starting at position 3187 of SEQ ID NO: 913391
guggcaguugcuuccagua

SEQ ID NO: 923551 - RNA, 19 nt, Artificial Sequence
  Description of Artificial Sequence: Synthetic oligonucleotide
  Antisense strand to SEQ ID NO: 923550
uacuggaagcaacugccac

SEQ ID NO: 923552 - RNA, 19 nt, Artificial Sequence
  Description of Artificial Sequence: Synthetic oligonucleotide
  Sense strand starting at position 3684 of SEQ ID NO: 913391
uggaaugggucacuuugaa

SEQ ID NO: 923553 - RNA, 19 nt, Artificial Sequence
  Description of Artificial Sequence: Synthetic oligonucleotide
  Antisense strand to SEQ ID NO: 923552
uucaaagugacccauucca

SEQ ID NO: 923554 - RNA, 19 nt, Artificial Sequence
  Description of Artificial Sequence: Synthetic oligonucleotide
  Sense strand starting at position 3638 of SEQ ID NO: 913391
uguguaaugaaucagugaa

SEQ ID NO: 923555 - RNA, 19 nt, Artificial Sequence
  Description of Artificial Sequence: Synthetic oligonucleotide
  Antisense strand to SEQ ID NO: 923554
uucacugauucauuacaca

SEQ ID NO: 923556 - RNA, 19 nt, Artificial Sequence
  Description of Artificial Sequence: Synthetic oligonucleotide
  Sense strand starting at position 3581 of SEQ ID NO: 913391
uuaugacaucuguauuauc

SEQ ID NO: 923557 - RNA, 19 nt, Artificial Sequence
  Description of Artificial Sequence: Synthetic oligonucleotide
  Antisense strand to SEQ ID NO: 923556
gauaauacagaugucauaa

SEQ ID NO: 923558 - RNA, 19 nt, Artificial Sequence
  Description of Artificial Sequence: Synthetic oligonucleotide
  Sense strand starting at position 3334 of SEQ ID NO: 913391
cugccaucucuacaaggau

SEQ ID NO: 923559 - RNA, 19 nt, Artificial Sequence
  Description of Artificial Sequence: Synthetic oligonucleotide
  Antisense strand to SEQ ID NO: 923558
auccuuguagagauggcag

SEQ ID NO: 923560 - RNA, 19 nt, Artificial Sequence
  Description of Artificial Sequence: Synthetic oligonucleotide
  Sense strand starting at position 3807 of SEQ ID NO: 913391
gcuucuaucccacagaaug

SEQ ID NO: 923561 - RNA, 19 nt, Artificial Sequence
  Description of Artificial Sequence: Synthetic oligonucleotide
  Antisense strand to SEQ ID NO: 923560
cauucugugggauagaagc

SEQ ID NO: 923562 - RNA, 19 nt, Artificial Sequence
  Description of Artificial Sequence: Synthetic oligonucleotide
  Sense strand starting at position 719 of SEQ ID NO: 913391
gacuacgauguuuauaauu

SEQ ID NO: 923563 - RNA, 19 nt, Artificial Sequence
  Description of Artificial Sequence: Synthetic oligonucleotide
  Antisense strand to SEQ ID NO: 923562
aauuauaaacaucguaguc

SEQ ID NO: 923564 - RNA, 19 nt, Artificial Sequence
  Description of Artificial Sequence: Synthetic oligonucleotide
  Sense strand starting at position 652 of SEQ ID NO: 913391
uauggucgacauuacuaau

SEQ ID NO: 923565 - RNA, 19 nt, Artificial Sequence
  Description of Artificial Sequence: Synthetic oligonucleotide
  Antisense strand to SEQ ID NO: 923564
auuaguaaugucgaccaua

SEQ ID NO: 923566 - RNA, 19 nt, Artificial Sequence
  Description of Artificial Sequence: Synthetic oligonucleotide
  Sense strand starting at position 1227 of SEQ ID NO: 913391
cagaguuaaccaggaaguc

SEQ ID NO: 923567 - RNA, 19 nt, Artificial Sequence
  Description of Artificial Sequence: Synthetic oligonucleotide
  Antisense strand to SEQ ID NO: 923566
gacuuccugguuaacucug

SEQ ID NO: 923568 - RNA, 19 nt, Artificial Sequence
  Description of Artificial Sequence: Synthetic oligonucleotide
  Sense strand starting at position 1713 of SEQ ID NO: 913391
guaagaagcugaucaauac

SEQ ID NO: 923569 - RNA, 19 nt, Artificial Sequence
  Description of Artificial Sequence: Synthetic oligonucleotide
  Antisense strand to SEQ ID NO: 923568
guauugaucagcuucuuac

SEQ ID NO: 923570 - RNA, 19 nt, Artificial Sequence
  Description of Artificial Sequence: Synthetic oligonucleotide
  Sense strand starting at position 1363 of SEQ ID NO: 913391
gccauugaacccugaacaa

SEQ ID NO: 923571 - RNA, 19 nt, Artificial Sequence
  Description of Artificial Sequence: Synthetic oligonucleotide
  Antisense strand to SEQ ID NO: 923570
uuguucaggguucaauggc

SEQ ID NO: 923572 - RNA, 19 nt, Artificial Sequence
  Description of Artificial Sequence: Synthetic oligonucleotide
  Sense strand starting at position 1767 of SEQ ID NO: 913391
gaaggaucuauaugguagu

SEQ ID NO: 923573 - RNA, 19 nt, Artificial Sequence
  Description of Artificial Sequence: Synthetic oligonucleotide
  Antisense strand to SEQ ID NO: 923572
acuaccauauagauccuuc

SEQ ID NO: 923574 - RNA, 19 nt, Artificial Sequence
  Description of Artificial Sequence: Synthetic oligonucleotide
  Sense strand starting at position 3630 of SEQ ID NO: 913391
uuggaagcuguguaaugaa

SEQ ID NO: 923575 - RNA, 19 nt, Artificial Sequence
  Description of Artificial Sequence: Synthetic oligonucleotide
  Antisense strand to SEQ ID NO: 923574
uucauuacacagcuuccaa

SEQ ID NO: 923576 - RNA, 19 nt, Artificial Sequence
  Description of Artificial Sequence: Synthetic oligonucleotide
  Sense strand starting at position 1170 of SEQ ID NO: 913391
auaucauuccagugacaug

SEQ ID NO: 923577 - RNA, 19 nt, Artificial Sequence
  Description of Artificial Sequence: Synthetic oligonucleotide
  Antisense strand to SEQ ID NO: 923576
caugucacuggaaugauau

SEQ ID NO: 923578 - RNA, 19 nt, Artificial Sequence
  Description of Artificial Sequence: Synthetic oligonucleotide
  Sense strand starting at position 529 of SEQ ID NO: 913391
gguuaauauuggguauaua

SEQ ID NO: 923579 - RNA, 19 nt, Artificial Sequence
  Description of Artificial Sequence: Synthetic oligonucleotide
  Antisense strand to SEQ ID NO: 923578
uauauacccaauauuaacc

SEQ ID NO: 923580 - RNA, 19 nt, Artificial Sequence
  Description of Artificial Sequence: Synthetic oligonucleotide
  Sense strand starting at position 2626 of SEQ ID NO: 913391
ugccucuuuguagaaauga

SEQ ID NO: 923581 - RNA, 19 nt, Artificial Sequence
  Description of Artificial Sequence: Synthetic oligonucleotide
  Antisense strand to SEQ ID NO: 923580
ucauuucuacaaagaggca

SEQ ID NO: 923582 - RNA, 19 nt, Artificial Sequence
  Description of Artificial Sequence: Synthetic oligonucleotide
  Sense strand starting at position 2462 of SEQ ID NO: 913391
guuauauguauguagauca

SEQ ID NO: 923583 - RNA, 19 nt, Artificial Sequence
  Description of Artificial Sequence: Synthetic oligonucleotide
  Antisense strand to SEQ ID NO: 923582
ugaucuacauacauauaac

SEQ ID NO: 923584 - RNA, 19 nt, Artificial Sequence
  Description of Artificial Sequence: Synthetic oligonucleotide
  Sense strand starting at position 1284 of SEQ ID NO: 913391
agaguucaaguucgagaga

SEQ ID NO: 923585 - RNA, 19 nt, Artificial Sequence
  Description of Artificial Sequence: Synthetic oligonucleotide
  Antisense strand to SEQ ID NO: 923584
ucucucgaacuugaacucu

SEQ ID NO: 923586 - RNA, 19 nt, Artificial Sequence
  Description of Artificial Sequence: Synthetic oligonucleotide
  Sense strand starting at position 3712 of SEQ ID NO: 913391
uuaucagauuggcuuaaug

SEQ ID NO: 923587 - RNA, 19 nt, Artificial Sequence
  Description of Artificial Sequence: Synthetic oligonucleotide
  Antisense strand to SEQ ID NO: 923586
cauuaagccaaucugauaa

SEQ ID NO: 923588 - RNA, 19 nt, Artificial Sequence
  Description of Artificial Sequence: Synthetic oligonucleotide
  Sense strand starting at position 794 of SEQ ID NO: 913391
uuggauaaugcuggugaga

SEQ ID NO: 923589 - RNA, 19 nt, Artificial Sequence
  Description of Artificial Sequence: Synthetic oligonucleotide
  Antisense strand to SEQ ID NO: 923588
ucucaccagcauuauccaa

SEQ ID NO: 923590 - RNA, 19 nt, Artificial Sequence
  Description of Artificial Sequence: Synthetic oligonucleotide
  Sense strand starting at position 1287 of SEQ ID NO: 913391
guucaaguucgagagacga

SEQ ID NO: 923591 - RNA, 19 nt, Artificial Sequence
  Description of Artificial Sequence: Synthetic oligonucleotide
  Antisense strand to SEQ ID NO: 923590
ucgucucucgaacuugaac

SEQ ID NO: 923592 - RNA, 19 nt, Artificial Sequence
  Description of Artificial Sequence: Synthetic oligonucleotide
  Sense strand starting at position 3653 of SEQ ID NO: 913391
ugaagugauuacguuaaag

SEQ ID NO: 923593 - RNA, 19 nt, Artificial Sequence
  Description of Artificial Sequence: Synthetic oligonucleotide
  Antisense strand to SEQ ID NO: 923592
cuuuaacguaaucacuuca

SEQ ID NO: 923594 - RNA, 19 nt, Artificial Sequence
  Description of Artificial Sequence: Synthetic oligonucleotide
  Sense strand starting at position 2866 of SEQ ID NO: 913391
ggauguugcagaggugaaa

SEQ ID NO: 923595 - RNA, 19 nt, Artificial Sequence
  Description of Artificial Sequence: Synthetic oligonucleotide
  Antisense strand to SEQ ID NO: 923594
uuucaccucugcaacaucc

SEQ ID NO: 923596 - RNA, 19 nt, Artificial Sequence
  Description of Artificial Sequence: Synthetic oligonucleotide
  Sense strand starting at position 2803 of SEQ ID NO: 913391
uuggauccuccuuguagaa

SEQ ID NO: 923597 - RNA, 19 nt, Artificial Sequence
  Description of Artificial Sequence: Synthetic oligonucleotide
  Antisense strand to SEQ ID NO: 923596
uucuacaaggaggauccaa

SEQ ID NO: 923598 - RNA, 19 nt, Artificial Sequence
  Description of Artificial Sequence: Synthetic oligonucleotide
  Sense strand starting at position 2132 of SEQ ID NO: 913391
uagaucucuguguaacgau

SEQ ID NO: 923599 - RNA, 19 nt, Artificial Sequence
  Description of Artificial Sequence: Synthetic oligonucleotide
  Antisense strand to SEQ ID NO: 923598
aucguuacacagagaucua

SEQ ID NO: 923600 - RNA, 19 nt, Artificial Sequence
  Description of Artificial Sequence: Synthetic oligonucleotide
  Sense strand starting at position 3711 of SEQ ID NO: 913391
cuuaucagauuggcuuaau

SEQ ID NO: 923601 - RNA, 19 nt, Artificial Sequence
  Description of Artificial Sequence: Synthetic oligonucleotide
  Antisense strand to SEQ ID NO: 923600
auuaagccaaucugauaag

SEQ ID NO: 923602 - RNA, 19 nt, Artificial Sequence
  Description of Artificial Sequence: Synthetic oligonucleotide
  Sense strand starting at position 3350 of SEQ ID NO: 913391
gauccucuucccgagguau

SEQ ID NO: 923603 - RNA, 19 nt, Artificial Sequence
  Description of Artificial Sequence: Synthetic oligonucleotide
  Antisense strand to SEQ ID NO: 923602
auaccucgggaagaggauc

SEQ ID NO: 923604 - RNA, 19 nt, Artificial Sequence
  Description of Artificial Sequence: Synthetic oligonucleotide
  Sense strand starting at position 718 of SEQ ID NO: 913391
ugacuacgauguuuauaau

SEQ ID NO: 923605 - RNA, 19 nt, Artificial Sequence
  Description of Artificial Sequence: Synthetic oligonucleotide
  Antisense strand to SEQ ID NO: 923604
auuauaaacaucguaguca

SEQ ID NO: 923606 - RNA, 19 nt, Artificial Sequence
  Description of Artificial Sequence: Synthetic oligonucleotide
  Sense strand starting at position 3650 of SEQ ID NO: 913391
cagugaagugauuacguua

SEQ ID NO: 923607 - RNA, 19 nt, Artificial Sequence
  Description of Artificial Sequence: Synthetic oligonucleotide
  Antisense strand to SEQ ID NO: 923606
uaacguaaucacuucacug

SEQ ID NO: 923608 - RNA, 19 nt, Artificial Sequence
  Description of Artificial Sequence: Synthetic oligonucleotide
  Sense strand starting at position 2802 of SEQ ID NO: 913391
cuuggauccuccuuguaga

SEQ ID NO: 923609 - RNA, 19 nt, Artificial Sequence
  Description of Artificial Sequence: Synthetic oligonucleotide
  Antisense strand to SEQ ID NO: 923608
ucuacaaggaggauccaag

SEQ ID NO: 923610 - RNA, 19 nt, Artificial Sequence
  Description of Artificial Sequence: Synthetic oligonucleotide
  Sense strand starting at position 1484 of SEQ ID NO: 913391
accauagaaaguuguaguu

SEQ ID NO: 923611 - RNA, 19 nt, Artificial Sequence
  Description of Artificial Sequence: Synthetic oligonucleotide
  Antisense strand to SEQ ID NO: 923610
aacuacaacuuucuauggu

SEQ ID NO: 923612 - RNA, 19 nt, Artificial Sequence
  Description of Artificial Sequence: Synthetic oligonucleotide
  Sense strand starting at position 2011 of SEQ ID NO: 913391
gccuuaguugaugauguca

SEQ ID NO: 923613 - RNA, 19 nt, Artificial Sequence
  Description of Artificial Sequence: Synthetic oligonucleotide
  Antisense strand to SEQ ID NO: 923612
ugacaucaucaacuaaggc

SEQ ID NO: 923614 - RNA, 19 nt, Artificial Sequence
  Description of Artificial Sequence: Synthetic oligonucleotide
  Sense strand starting at position 2376 of SEQ ID NO: 913391
guuguaauuauugaguagu

SEQ ID NO: 923615 - RNA, 19 nt, Artificial Sequence
  Description of Artificial Sequence: Synthetic oligonucleotide
  Antisense strand to SEQ ID NO: 923614
acuacucaauaauuacaac

SEQ ID NO: 923616 - RNA, 19 nt, Artificial Sequence
  Description of Artificial Sequence: Synthetic oligonucleotide
  Sense strand starting at position 3709 of SEQ ID NO: 913391
uucuuaucagauuggcuua

SEQ ID NO: 923617 - RNA, 19 nt, Artificial Sequence
  Description of Artificial Sequence: Synthetic oligonucleotide
  Antisense strand to SEQ ID NO: 923616
uaagccaaucugauaagaa

SEQ ID NO: 923618 - RNA, 19 nt, Artificial Sequence
  Description of Artificial Sequence: Synthetic oligonucleotide
  Sense strand starting at position 777 of SEQ ID NO: 913392
gcuuaagaaccauaguuaa

SEQ ID NO: 923619 - RNA, 19 nt, Artificial Sequence
  Description of Artificial Sequence: Synthetic oligonucleotide
  Antisense strand to SEQ ID NO: 923618
uuaacuaugguucuuaagc

SEQ ID NO: 923620 - RNA, 19 nt, Artificial Sequence
  Description of Artificial Sequence: Synthetic oligonucleotide
  Sense strand starting at position 2406 of SEQ ID NO: 913392
augguagaauacucugaua

SEQ ID NO: 923621 - RNA, 19 nt, Artificial Sequence
  Description of Artificial Sequence: Synthetic oligonucleotide
  Antisense strand to SEQ ID NO: 923620
uaucagaguauucuaccau

SEQ ID NO: 923622 - RNA, 19 nt, Artificial Sequence
  Description of Artificial Sequence: Synthetic oligonucleotide
  Sense strand starting at position 3265 of SEQ ID NO: 913392
aggagauacuaccugcaga

SEQ ID NO: 923623 - RNA, 19 nt, Artificial Sequence
  Description of Artificial Sequence: Synthetic oligonucleotide
  Antisense strand to SEQ ID NO: 923622
ucugcagguaguaucuccu

SEQ ID NO: 923624 - RNA, 19 nt, Artificial Sequence
  Description of Artificial Sequence: Synthetic oligonucleotide
  Sense strand starting at position 2848 of SEQ ID NO: 913392
agauauuuguccuuuguuu

SEQ ID NO: 923625 - RNA, 19 nt, Artificial Sequence
  Description of Artificial Sequence: Synthetic oligonucleotide
  Antisense strand to SEQ ID NO: 923624
aaacaaaggacaaauaucu

SEQ ID NO: 923626 - RNA, 19 nt, Artificial Sequence
  Description of Artificial Sequence: Synthetic oligonucleotide
  Sense strand starting at position 2517 of SEQ ID NO: 913392
accuuuguccauuaagaug

SEQ ID NO: 923627 - RNA, 19 nt, Artificial Sequence
  Description of Artificial Sequence: Synthetic oligonucleotide
  Antisense strand to SEQ ID NO: 923626
caucuuaauggacaaaggu

SEQ ID NO: 923628 - RNA, 19 nt, Artificial Sequence
  Description of Artificial Sequence: Synthetic oligonucleotide
  Sense strand starting at position 139 of SEQ ID NO: 913392
uugcuaaccgaugagaaau

SEQ ID NO: 923629 - RNA, 19 nt, Artificial Sequence
  Description of Artificial Sequence: Synthetic oligonucleotide
  Antisense strand to SEQ ID NO: 923628
auuucucaucgguuagcaa

SEQ ID NO: 923630 - RNA, 19 nt, Artificial Sequence
  Description of Artificial Sequence: Synthetic oligonucleotide
  Sense strand starting at position 88 of SEQ ID NO: 913392
gcacaaauuuguucugggu

SEQ ID NO: 923631 - RNA, 19 nt, Artificial Sequence
  Description of Artificial Sequence: Synthetic oligonucleotide
  Antisense strand to SEQ ID NO: 923630
acccagaacaaauuugugc

SEQ ID NO: 923632 - RNA, 19 nt, Artificial Sequence
  Description of Artificial Sequence: Synthetic oligonucleotide
  Sense strand starting at position 3358 of SEQ ID NO: 913392
uggauuacagucugagaca

SEQ ID NO: 923633 - RNA, 19 nt, Artificial Sequence
  Description of Artificial Sequence: Synthetic oligonucleotide
  Antisense strand to SEQ ID NO: 923632
ugucucagacuguaaucca

SEQ ID NO: 923634 - RNA, 19 nt, Artificial Sequence
  Description of Artificial Sequence: Synthetic oligonucleotide
  Sense strand starting at position 173 of SEQ ID NO: 913392
acauaaacauguucugaug

SEQ ID NO: 923635 - RNA, 19 nt, Artificial Sequence
  Description of Artificial Sequence: Synthetic oligonucleotide
  Antisense strand to SEQ ID NO: 923634
caucagaacauguuuaugu

SEQ ID NO: 923636 - RNA, 19 nt, Artificial Sequence
  Description of Artificial Sequence: Synthetic oligonucleotide
  Sense strand starting at position 3235 of SEQ ID NO: 913392
aguuguuaggaauggaaua

SEQ ID NO: 923637 - RNA, 19 nt, Artificial Sequence
  Description of Artificial Sequence: Synthetic oligonucleotide
  Antisense strand to SEQ ID NO: 923636
uauuccauuccuaacaacu

SEQ ID NO: 923638 - RNA, 19 nt, Artificial Sequence
  Description of Artificial Sequence: Synthetic oligonucleotide
  Sense strand starting at position 292 of SEQ ID NO: 913392
aaaggcuuaggugaaaguu

SEQ ID NO: 923639 - RNA, 19 nt, Artificial Sequence
  Description of Artificial Sequence: Synthetic oligonucleotide
  Antisense strand to SEQ ID NO: 923638
aacuuucaccuaagccuuu

SEQ ID NO: 923640 - RNA, 19 nt, Artificial Sequence
  Description of Artificial Sequence: Synthetic oligonucleotide
  Sense strand starting at position 50 of SEQ ID NO: 913392
auaccaaaguggucaugaa

SEQ ID NO: 923641 - RNA, 19 nt, Artificial Sequence
  Description of Artificial Sequence: Synthetic oligonucleotide
  Antisense strand to SEQ ID NO: 923640
uucaugaccacuuugguau

SEQ ID NO: 923642 - RNA, 19 nt, Artificial Sequence
  Description of Artificial Sequence: Synthetic oligonucleotide
  Sense strand starting at position 1310 of SEQ ID NO: 913392
gacccuaaguuuccaggaa

SEQ ID NO: 923643 - RNA, 19 nt, Artificial Sequence
  Description of Artificial Sequence: Synthetic oligonucleotide
  Antisense strand to SEQ ID NO: 923642
uuccuggaaacuuaggguc

SEQ ID NO: 923644 - RNA, 19 nt, Artificial Sequence
  Description of Artificial Sequence: Synthetic oligonucleotide
  Sense strand starting at position 92 of SEQ ID NO: 913392
aaauuuguucuggguguuu

SEQ ID NO: 923645 - RNA, 19 nt, Artificial Sequence
  Description of Artificial Sequence: Synthetic oligonucleotide
  Antisense strand to SEQ ID NO: 923644
aaacacccagaacaaauuu

SEQ ID NO: 923646 - RNA, 19 nt, Artificial Sequence
  Description of Artificial Sequence: Synthetic oligonucleotide
  Sense strand starting at position 1323 of SEQ ID NO: 913392
caggaauggauucgguaag

SEQ ID NO: 923647 - RNA, 19 nt, Artificial Sequence
  Description of Artificial Sequence: Synthetic oligonucleotide
  Antisense strand to SEQ ID NO: 923646
cuuaccgaauccauuccug

SEQ ID NO: 923648 - RNA, 19 nt, Artificial Sequence
  Description of Artificial Sequence: Synthetic oligonucleotide
  Sense strand starting at position 514 of SEQ ID NO: 913392
acagaaauguaacauuuga

SEQ ID NO: 923649 - RNA, 19 nt, Artificial Sequence
  Description of Artificial Sequence: Synthetic oligonucleotide
  Antisense strand to SEQ ID NO: 923648
ucaaauguuacauuucugu

SEQ ID NO: 923650 - RNA, 19 nt, Artificial Sequence
  Description of Artificial Sequence: Synthetic oligonucleotide
  Sense strand starting at position 884 of SEQ ID NO: 913392
uuacauaaacugggauguu

SEQ ID NO: 923651 - RNA, 19 nt, Artificial Sequence
  Description of Artificial Sequence: Synthetic oligonucleotide
  Antisense strand to SEQ ID NO: 923650
aacaucccaguuuauguaa

SEQ ID NO: 923652 - RNA, 19 nt, Artificial Sequence
  Description of Artificial Sequence: Synthetic oligonucleotide
  Sense strand starting at position 2408 of SEQ ID NO: 913392
gguagaauacucugauacu

SEQ ID NO: 923653 - RNA, 19 nt, Artificial Sequence
  Description of Artificial Sequence: Synthetic oligonucleotide
  Antisense strand to SEQ ID NO: 923652
aguaucagaguauucuacc

SEQ ID NO: 923654 - RNA, 19 nt, Artificial Sequence
  Description of Artificial Sequence: Synthetic oligonucleotide
  Sense strand starting at position 2418 of SEQ ID NO: 913392
ucugauacucaccgggaaa

SEQ ID NO: 923655 - RNA, 19 nt, Artificial Sequence
  Description of Artificial Sequence: Synthetic oligonucleotide
  Antisense strand to SEQ ID NO: 923654
uuucccggugaguaucaga

SEQ ID NO: 923656 - RNA, 19 nt, Artificial Sequence
  Description of Artificial Sequence: Synthetic oligonucleotide
  Sense strand starting at position 3278 of SEQ ID NO: 913392
ugcagagaagcuuagacuu

SEQ ID NO: 923657 - RNA, 19 nt, Artificial Sequence
  Description of Artificial Sequence: Synthetic oligonucleotide
  Antisense strand to SEQ ID NO: 923656
aagucuaagcuucucugca

SEQ ID NO: 923658 - RNA, 19 nt, Artificial Sequence
  Description of Artificial Sequence: Synthetic oligonucleotide
  Sense strand starting at position 1168 of SEQ ID NO: 913392
gcagaaguuacucaguaag

SEQ ID NO: 923659 - RNA, 19 nt, Artificial Sequence
  Description of Artificial Sequence: Synthetic oligonucleotide
  Antisense strand to SEQ ID NO: 923658
cuuacugaguaacuucugc

SEQ ID NO: 923660 - RNA, 19 nt, Artificial Sequence
  Description of Artificial Sequence: Synthetic oligonucleotide
  Sense strand starting at position 913 of SEQ ID NO: 913392
gggaaucacuuagcacuca

SEQ ID NO: 923661 - RNA, 19 nt, Artificial Sequence
  Description of Artificial Sequence: Synthetic oligonucleotide
  Antisense strand to SEQ ID NO: 923660
ugagugcuaagugauuccc

SEQ ID NO: 923662 - RNA, 19 nt, Artificial Sequence
  Description of Artificial Sequence: Synthetic oligonucleotide
  Sense strand starting at position 3512 of SEQ ID NO: 913392
uuuaaucagcuguaugaca

SEQ ID NO: 923663 - RNA, 19 nt, Artificial Sequence
  Description of Artificial Sequence: Synthetic oligonucleotide
  Antisense strand to SEQ ID NO: 923662
ugucauacagcugauuaaa

SEQ ID NO: 923664 - RNA, 19 nt, Artificial Sequence
  Description of Artificial Sequence: Synthetic oligonucleotide
  Sense strand starting at position 2417 of SEQ ID NO: 913392
cucugauacucaccgggaa

SEQ ID NO: 923665 - RNA, 19 nt, Artificial Sequence
  Description of Artificial Sequence: Synthetic oligonucleotide
  Antisense strand to SEQ ID NO: 923664
uucccggugaguaucagag

SEQ ID NO: 923666 - RNA, 19 nt, Artificial Sequence
  Description of Artificial Sequence: Synthetic oligonucleotide
  Sense strand starting at position 138 of SEQ ID NO: 913392
auugcuaaccgaugagaaa

SEQ ID NO: 923667 - RNA, 19 nt, Artificial Sequence
  Description of Artificial Sequence: Synthetic oligonucleotide
  Antisense strand to SEQ ID NO: 923666
uuucucaucgguuagcaau

SEQ ID NO: 923668 - RNA, 19 nt, Artificial Sequence
  Description of Artificial Sequence: Synthetic oligonucleotide
  Sense strand starting at position 2309 of SEQ ID NO: 913392
uuguauguaccugaaaucu

SEQ ID NO: 923669 - RNA, 19 nt, Artificial Sequence
  Description of Artificial Sequence: Synthetic oligonucleotide
  Antisense strand to SEQ ID NO: 923668
agauuucagguacauacaa

SEQ ID NO: 923670 - RNA, 19 nt, Artificial Sequence
  Description of Artificial Sequence: Synthetic oligonucleotide
  Sense strand starting at position 3817 of SEQ ID NO: 913392
ccagucacucccugaagga

SEQ ID NO: 923671 - RNA, 19 nt, Artificial Sequence
  Description of Artificial Sequence: Synthetic oligonucleotide
  Antisense strand to SEQ ID NO: 923670
uccuucagggagugacugg

SEQ ID NO: 923672 - RNA, 19 nt, Artificial Sequence
  Description of Artificial Sequence: Synthetic oligonucleotide
  Sense strand starting at position 1148 of SEQ ID NO: 913392
auacacugcuuucugagaa

SEQ ID NO: 923673 - RNA, 19 nt, Artificial Sequence
  Description of Artificial Sequence: Synthetic oligonucleotide
  Antisense strand to SEQ ID NO: 923672
uucucagaaagcaguguau

SEQ ID NO: 923674 - RNA, 19 nt, Artificial Sequence
  Description of Artificial Sequence: Synthetic oligonucleotide
  Sense strand starting at position 1104 of SEQ ID NO: 913392
agaucuaugaaaugugguu

SEQ ID NO: 923675 - RNA, 19 nt, Artificial Sequence
  Description of Artificial Sequence: Synthetic oligonucleotide
  Antisense strand to SEQ ID NO: 923674
aaccacauuucauagaucu

SEQ ID NO: 923676 - RNA, 19 nt, Artificial Sequence
  Description of Artificial Sequence: Synthetic oligonucleotide
  Sense strand starting at position 1014 of SEQ ID NO: 913392
gaaacccauucgguaauca

SEQ ID NO: 923677 - RNA, 19 nt, Artificial Sequence
  Description of Artificial Sequence: Synthetic oligonucleotide
  Antisense strand to SEQ ID NO: 923676
ugauuaccgaauggguuuc

SEQ ID NO: 923678 - RNA, 19 nt, Artificial Sequence
  Description of Artificial Sequence: Synthetic oligonucleotide
  Sense strand starting at position 3555 of SEQ ID NO: 913392
guggaugccagccagagau

SEQ ID NO: 923679 - RNA, 19 nt, Artificial Sequence
  Description of Artificial Sequence: Synthetic oligonucleotide
  Antisense strand to SEQ ID NO: 923678
aucucuggcuggcauccac

SEQ ID NO: 923680 - RNA, 19 nt, Artificial Sequence
  Description of Artificial Sequence: Synthetic oligonucleotide
  Sense strand starting at position 643 of SEQ ID NO: 913392
aggcaagaucaauguuauu

SEQ ID NO: 923681 - RNA, 19 nt, Artificial Sequence
  Description of Artificial Sequence: Synthetic oligonucleotide
  Antisense strand to SEQ ID NO: 923680
aauaacauugaucuugccu

SEQ ID NO: 923682 - RNA, 19 nt, Artificial Sequence
  Description of Artificial Sequence: Synthetic oligonucleotide
  Sense strand starting at position 145 of SEQ ID NO: 913392
accgaugagaaaugcuuua

SEQ ID NO: 923683 - RNA, 19 nt, Artificial Sequence
  Description of Artificial Sequence: Synthetic oligonucleotide
  Antisense strand to SEQ ID NO: 923682
uaaagcauuucucaucggu

SEQ ID NO: 923684 - RNA, 19 nt, Artificial Sequence
  Description of Artificial Sequence: Synthetic oligonucleotide
  Sense strand starting at position 593 of SEQ ID NO: 913392
gaagguuggugaguuuaag

SEQ ID NO: 923685 - RNA, 19 nt, Artificial Sequence
  Description of Artificial Sequence: Synthetic oligonucleotide
  Antisense strand to SEQ ID NO: 923684
cuuaaacucaccaaccuuc

SEQ ID NO: 923686 - RNA, 19 nt, Artificial Sequence
  Description of Artificial Sequence: Synthetic oligonucleotide
  Sense strand starting at position 995 of SEQ ID NO: 913392
ccagcaucauuagugaaau

SEQ ID NO: 923687 - RNA, 19 nt, Artificial Sequence
  Description of Artificial Sequence: Synthetic oligonucleotide
  Antisense strand to SEQ ID NO: 923686
auuucacuaaugaugcugg

SEQ ID NO: 923688 - RNA, 19 nt, Artificial Sequence
  Description of Artificial Sequence: Synthetic oligonucleotide
  Sense strand starting at position 1109 of SEQ ID NO: 913392
uaugaaaugugguugguaa

SEQ ID NO: 923689 - RNA, 19 nt, Artificial Sequence
  Description of Artificial Sequence: Synthetic oligonucleotide
  Antisense strand to SEQ ID NO: 923688
uuaccaaccacauuucaua

SEQ ID NO: 923690 - RNA, 19 nt, Artificial Sequence
  Description of Artificial Sequence: Synthetic oligonucleotide
  Sense strand starting at position 3457 of SEQ ID NO: 913392
gucccaguccuggaagcaa

SEQ ID NO: 923691 - RNA, 19 nt, Artificial Sequence
  Description of Artificial Sequence: Synthetic oligonucleotide
  Antisense strand to SEQ ID NO: 923690
uugcuuccaggacugggac

SEQ ID NO: 923692 - RNA, 19 nt, Artificial Sequence
  Description of Artificial Sequence: Synthetic oligonucleotide
  Sense strand starting at position 1272 of SEQ ID NO: 913392
ccaccagacucguuacaag

SEQ ID NO: 923693 - RNA, 19 nt, Artificial Sequence
  Description of Artificial Sequence: Synthetic oligonucleotide
  Antisense strand to SEQ ID NO: 923692
cuuguaacgagucuggugg

SEQ ID NO: 923694 - RNA, 19 nt, Artificial Sequence
  Description of Artificial Sequence: Synthetic oligonucleotide
  Sense strand starting at position 3535 of SEQ ID NO: 913392
ggagcauuacuggguccaa

SEQ ID NO: 923695 - RNA, 19 nt, Artificial Sequence
  Description of Artificial Sequence: Synthetic oligonucleotide
  Antisense strand to SEQ ID NO: 923694
uuggacccaguaaugcucc

SEQ ID NO: 923696 - RNA, 19 nt, Artificial Sequence
  Description of Artificial Sequence: Synthetic oligonucleotide
  Sense strand starting at position 619 of SEQ ID NO: 913392
caggguggccuaugacaau

SEQ ID NO: 923697 - RNA, 19 nt, Artificial Sequence
  Description of Artificial Sequence: Synthetic oligonucleotide
  Antisense strand to SEQ ID NO: 923696
auugucauaggccacccug

SEQ ID NO: 923698 - RNA, 19 nt, Artificial Sequence
  Description of Artificial Sequence: Synthetic oligonucleotide
  Sense strand starting at position 305 of SEQ ID NO: 913393
ucugaagcacuuuagaauu

SEQ ID NO: 923699 - RNA, 19 nt, Artificial Sequence
  Description of Artificial Sequence: Synthetic oligonucleotide
  Antisense strand to SEQ ID NO: 923698
aauucuaaagugcuucaga

SEQ ID NO: 923700 - RNA, 19 nt, Artificial Sequence
  Description of Artificial Sequence: Synthetic oligonucleotide
  Sense strand starting at position 820 of SEQ ID NO: 913393
cgcgcucacauuuagaaca

SEQ ID NO: 923701 - RNA, 19 nt, Artificial Sequence
  Description of Artificial Sequence: Synthetic oligonucleotide
  Antisense strand to SEQ ID NO: 923700
uguucuaaaugugagcgcg

SEQ ID NO: 923702 - RNA, 19 nt, Artificial Sequence
  Description of Artificial Sequence: Synthetic oligonucleotide
  Sense strand starting at position 2224 of SEQ ID NO: 913393
uugauuguagaucauagua

SEQ ID NO: 923703 - RNA, 19 nt, Artificial Sequence
  Description of Artificial Sequence: Synthetic oligonucleotide
  Antisense strand to SEQ ID NO: 923702
uacuaugaucuacaaucaa

SEQ ID NO: 923704 - RNA, 19 nt, Artificial Sequence
  Description of Artificial Sequence: Synthetic oligonucleotide
  Sense strand starting at position 2138 of SEQ ID NO: 913393
aacagaggucccuaguauc

SEQ ID NO: 923705 - RNA, 19 nt, Artificial Sequence
  Description of Artificial Sequence: Synthetic oligonucleotide
  Antisense strand to SEQ ID NO: 923704
gauacuagggaccucuguu

SEQ ID NO: 923706 - RNA, 19 nt, Artificial Sequence
  Description of Artificial Sequence: Synthetic oligonucleotide
  Sense strand starting at position 952 of SEQ ID NO: 913393
guucucucauuugucuaau

SEQ ID NO: 923707 - RNA, 19 nt, Artificial Sequence
  Description of Artificial Sequence: Synthetic oligonucleotide
  Antisense strand to SEQ ID NO: 923706
auuagacaaaugagagaac

SEQ ID NO: 923708 - RNA, 19 nt, Artificial Sequence
  Description of Artificial Sequence: Synthetic oligonucleotide
  Sense strand starting at position 1195 of SEQ ID NO: 913393
cuggaaagccgugagaaua

SEQ ID NO: 923709 - RNA, 19 nt, Artificial Sequence
  Description of Artificial Sequence: Synthetic oligonucleotide
  Antisense strand to SEQ ID NO: 923708
uauucucacggcuuuccag

SEQ ID NO: 923710 - RNA, 19 nt, Artificial Sequence
  Description of Artificial Sequence: Synthetic oligonucleotide
  Sense strand starting at position 857 of SEQ ID NO: 913393
augguuuaacauugaauca

SEQ ID NO: 923711 - RNA, 19 nt, Artificial Sequence
  Description of Artificial Sequence: Synthetic oligonucleotide
  Antisense strand to SEQ ID NO: 923710
ugauucaauguuaaaccau

SEQ ID NO: 923712 - RNA, 19 nt, Artificial Sequence
  Description of Artificial Sequence: Synthetic oligonucleotide
  Sense strand starting at position 1004 of SEQ ID NO: 913393
uuccguaagcauuagaaag

SEQ ID NO: 923713 - RNA, 19 nt, Artificial Sequence
  Description of Artificial Sequence: Synthetic oligonucleotide
  Antisense strand to SEQ ID NO: 923712
cuuucuaaugcuuacggaa

SEQ ID NO: 923714 - RNA, 19 nt, Artificial Sequence
  Description of Artificial Sequence: Synthetic oligonucleotide
  Sense strand starting at position 2427 of SEQ ID NO: 913393
guaagcauucgggaaaucu

SEQ ID NO: 923715 - RNA, 19 nt, Artificial Sequence
  Description of Artificial Sequence: Synthetic oligonucleotide
  Antisense strand to SEQ ID NO: 923714
agauuucccgaaugcuuac

SEQ ID NO: 923716 - RNA, 19 nt, Artificial Sequence
  Description of Artificial Sequence: Synthetic oligonucleotide
  Sense strand starting at position 3756 of SEQ ID NO: 913393
gugaauauaugauccagca

SEQ ID NO: 923717 - RNA, 19 nt, Artificial Sequence
  Description of Artificial Sequence: Synthetic oligonucleotide
  Antisense strand to SEQ ID NO: 923716
ugcuggaucauauauucac

SEQ ID NO: 923718 - RNA, 19 nt, Artificial Sequence
  Description of Artificial Sequence: Synthetic oligonucleotide
  Sense strand starting at position 3538 of SEQ ID NO: 913393
augagaagaugcuuggcau

SEQ ID NO: 923719 - RNA, 19 nt, Artificial Sequence
  Description of Artificial Sequence: Synthetic oligonucleotide
  Antisense strand to SEQ ID NO: 923718
augccaagcaucuucucau

SEQ ID NO: 923720 - RNA, 19 nt, Artificial Sequence
  Description of Artificial Sequence: Synthetic oligonucleotide
  Sense strand starting at position 1092 of SEQ ID NO: 913393
cuguaaggcccagauucuu

SEQ ID NO: 923721 - RNA, 19 nt, Artificial Sequence
  Description of Artificial Sequence: Synthetic oligonucleotide
  Antisense strand to SEQ ID NO: 923720
aagaaucugggccuuacag

SEQ ID NO: 923722 - RNA, 19 nt, Artificial Sequence
  Description of Artificial Sequence: Synthetic oligonucleotide
  Sense strand starting at position 1194 of SEQ ID NO: 913393
acuggaaagccgugagaau

SEQ ID NO: 923723 - RNA, 19 nt, Artificial Sequence
  Description of Artificial Sequence: Synthetic oligonucleotide
  Antisense strand to SEQ ID NO: 923722
auucucacggcuuuccagu

SEQ ID NO: 923724 - RNA, 19 nt, Artificial Sequence
  Description of Artificial Sequence: Synthetic oligonucleotide
  Sense strand starting at position 678 of SEQ ID NO: 913393
cauggcaugugaucaaauu

SEQ ID NO: 923725 - RNA, 19 nt, Artificial Sequence
  Description of Artificial Sequence: Synthetic oligonucleotide
  Antisense strand to SEQ ID NO: 923724
aauuugaucacaugccaug

SEQ ID NO: 923726 - RNA, 19 nt, Artificial Sequence
  Description of Artificial Sequence: Synthetic oligonucleotide
  Sense strand starting at position 2276 of SEQ ID NO: 913393
guuacugugguaugagaaa

SEQ ID NO: 923727 - RNA, 19 nt, Artificial Sequence
  Description of Artificial Sequence: Synthetic oligonucleotide
  Antisense strand to SEQ ID NO: 923726
uuucucauaccacaguaac

SEQ ID NO: 923728 - RNA, 19 nt, Artificial Sequence
  Description of Artificial Sequence: Synthetic oligonucleotide
  Sense strand starting at position 813 of SEQ ID NO: 913393
agcugagcgcgcucacauu

SEQ ID NO: 923729 - RNA, 19 nt, Artificial Sequence
  Description of Artificial Sequence: Synthetic oligonucleotide
  Antisense strand to SEQ ID NO: 923728
aaugugagcgcgcucagcu

SEQ ID NO: 923730 - RNA, 19 nt, Artificial Sequence
  Description of Artificial Sequence: Synthetic oligonucleotide
  Sense strand starting at position 2160 of SEQ ID NO: 913393
ugaaaucaucugugaagcu

SEQ ID NO: 923731 - RNA, 19 nt, Artificial Sequence
  Description of Artificial Sequence: Synthetic oligonucleotide
  Antisense strand to SEQ ID NO: 923730
agcuucacagaugauuuca

SEQ ID NO: 923732 - RNA, 19 nt, Artificial Sequence
  Description of Artificial Sequence: Synthetic oligonucleotide
  Sense strand starting at position 949 of SEQ ID NO: 913393
uguguucucucauuugucu

SEQ ID NO: 923733 - RNA, 19 nt, Artificial Sequence
  Description of Artificial Sequence: Synthetic oligonucleotide
  Antisense strand to SEQ ID NO: 923732
agacaaaugagagaacaca

SEQ ID NO: 923734 - RNA, 19 nt, Artificial Sequence
  Description of Artificial Sequence: Synthetic oligonucleotide
  Sense strand starting at position 296 of SEQ ID NO: 913393
uugagaauuucugaagcac

SEQ ID NO: 923735 - RNA, 19 nt, Artificial Sequence
  Description of Artificial Sequence: Synthetic oligonucleotide
  Antisense strand to SEQ ID NO: 923734
gugcuucagaaauucucaa

SEQ ID NO: 923736 - RNA, 19 nt, Artificial Sequence
  Description of Artificial Sequence: Synthetic oligonucleotide
  Sense strand starting at position 3539 of SEQ ID NO: 913393
ugagaagaugcuuggcauc

SEQ ID NO: 923737 - RNA, 19 nt, Artificial Sequence
  Description of Artificial Sequence: Synthetic oligonucleotide
  Antisense strand to SEQ ID NO: 923736
gaugccaagcaucuucuca

SEQ ID NO: 923738 - RNA, 19 nt, Artificial Sequence
  Description of Artificial Sequence: Synthetic oligonucleotide
  Sense strand starting at position 1039 of SEQ ID NO: 913393
uuggcaacauggucucuaa

SEQ ID NO: 923739 - RNA, 19 nt, Artificial Sequence
  Description of Artificial Sequence: Synthetic oligonucleotide
  Antisense strand to SEQ ID NO: 923738
uuagagaccauguugccaa

SEQ ID NO: 923740 - RNA, 19 nt, Artificial Sequence
  Description of Artificial Sequence: Synthetic oligonucleotide
  Sense strand starting at position 3612 of SEQ ID NO: 913393
gcacuaagguagccagaau

SEQ ID NO: 923741 - RNA, 19 nt, Artificial Sequence
  Description of Artificial Sequence: Synthetic oligonucleotide
  Antisense strand to SEQ ID NO: 923740
auucuggcuaccuuagugc

SEQ ID NO: 923742 - RNA, 19 nt, Artificial Sequence
  Description of Artificial Sequence: Synthetic oligonucleotide
  Sense strand starting at position 1098 of SEQ ID NO: 913393
ggcccagauucuuucucua

SEQ ID NO: 923743 - RNA, 19 nt, Artificial Sequence
  Description of Artificial Sequence: Synthetic oligonucleotide
  Antisense strand to SEQ ID NO: 923742
uagagaaagaaucugggcc

SEQ ID NO: 923744 - RNA, 19 nt, Artificial Sequence
  Description of Artificial Sequence: Synthetic oligonucleotide
  Sense strand starting at position 2424 of SEQ ID NO: 913393
gugguaagcauucgggaaa

SEQ ID NO: 923745 - RNA, 19 nt, Artificial Sequence
  Description of Artificial Sequence: Synthetic oligonucleotide
  Antisense strand to SEQ ID NO: 923744
uuucccgaaugcuuaccac

SEQ ID NO: 923746 - RNA, 19 nt, Artificial Sequence
  Description of Artificial Sequence: Synthetic oligonucleotide
  Sense strand starting at position 1542 of SEQ ID NO: 913393
gcaccugaaggcugguuaa

SEQ ID NO: 923747 - RNA, 19 nt, Artificial Sequence
  Description of Artificial Sequence: Synthetic oligonucleotide
  Antisense strand to SEQ ID NO: 923746
uuaaccagccuucaggugc

SEQ ID NO: 923748 - RNA, 19 nt, Artificial Sequence
  Description of Artificial Sequence: Synthetic oligonucleotide
  Sense strand starting at position 3776 of SEQ ID NO: 913393
uuccauuccuagguagcua

SEQ ID NO: 923749 - RNA, 19 nt, Artificial Sequence
  Description of Artificial Sequence: Synthetic oligonucleotide
  Antisense strand to SEQ ID NO: 923748
uagcuaccuaggaauggaa

SEQ ID NO: 923750 - RNA, 19 nt, Artificial Sequence
  Description of Artificial Sequence: Synthetic oligonucleotide
  Sense strand starting at position 2436 of SEQ ID NO: 913393
cgggaaaucugagauaagg

SEQ ID NO: 923751 - RNA, 19 nt, Artificial Sequence
  Description of Artificial Sequence: Synthetic oligonucleotide
  Antisense strand to SEQ ID NO: 923750
ccuuaucucagauuucccg

SEQ ID NO: 923752 - RNA, 19 nt, Artificial Sequence
  Description of Artificial Sequence: Synthetic oligonucleotide
  Sense strand starting at position 538 of SEQ ID NO: 913393
cuauguauuuguuaagauc

SEQ ID NO: 923753 - RNA, 19 nt, Artificial Sequence
  Description of Artificial Sequence: Synthetic oligonucleotide
  Antisense strand to SEQ ID NO: 923752
gaucuuaacaaauacauag

SEQ ID NO: 923754 - RNA, 19 nt, Artificial Sequence
  Description of Artificial Sequence: Synthetic oligonucleotide
  Sense strand starting at position 1042 of SEQ ID NO: 913393
gcaacauggucucuaagcu

SEQ ID NO: 923755 - RNA, 19 nt, Artificial Sequence
  Description of Artificial Sequence: Synthetic oligonucleotide
  Antisense strand to SEQ ID NO: 923754
agcuuagagaccauguugc

SEQ ID NO: 923756 - RNA, 19 nt, Artificial Sequence
  Description of Artificial Sequence: Synthetic oligonucleotide
  Sense strand starting at position 944 of SEQ ID NO: 913393
accuuuguguucucucauu

SEQ ID NO: 923757 - RNA, 19 nt, Artificial Sequence
  Description of Artificial Sequence: Synthetic oligonucleotide
  Antisense strand to SEQ ID NO: 923756
aaugagagaacacaaaggu

SEQ ID NO: 923758 - RNA, 19 nt, Artificial Sequence
  Description of Artificial Sequence: Synthetic oligonucleotide
  Sense strand starting at position 2628 of SEQ ID NO: 913393
agcuuauuguggccucaac

SEQ ID NO: 923759 - RNA, 19 nt, Artificial Sequence
  Description of Artificial Sequence: Synthetic oligonucleotide
  Antisense strand to SEQ ID NO: 923758
guugaggccacaauaagcu

SEQ ID NO: 923760 - RNA, 19 nt, Artificial Sequence
  Description of Artificial Sequence: Synthetic oligonucleotide
  Sense strand starting at position 1058 of SEQ ID NO: 913393
gcugcuugaugucuaaauu

SEQ ID NO: 923761 - RNA, 19 nt, Artificial Sequence
  Description of Artificial Sequence: Synthetic oligonucleotide
  Antisense strand to SEQ ID NO: 923760
aauuuagacaucaagcagc

SEQ ID NO: 923762 - RNA, 19 nt, Artificial Sequence
  Description of Artificial Sequence: Synthetic oligonucleotide
  Sense strand starting at position 997 of SEQ ID NO: 913393
gccacaguuccguaagcau

SEQ ID NO: 923763 - RNA, 19 nt, Artificial Sequence
  Description of Artificial Sequence: Synthetic oligonucleotide
  Antisense strand to SEQ ID NO: 923762
augcuuacggaacuguggc

SEQ ID NO: 923764 - RNA, 19 nt, Artificial Sequence
  Description of Artificial Sequence: Synthetic oligonucleotide
  Sense strand starting at position 710 of SEQ ID NO: 913393
gguaaaguaucagacagau

SEQ ID NO: 923765 - RNA, 19 nt, Artificial Sequence
  Description of Artificial Sequence: Synthetic oligonucleotide
  Antisense strand to SEQ ID NO: 923764
aucugucugauacuuuacc

SEQ ID NO: 923766 - RNA, 19 nt, Artificial Sequence
  Description of Artificial Sequence: Synthetic oligonucleotide
  Sense strand starting at position 619 of SEQ ID NO: 913393
gcaguccaucuuugcauua

SEQ ID NO: 923767 - RNA, 19 nt, Artificial Sequence
  Description of Artificial Sequence: Synthetic oligonucleotide
  Antisense strand to SEQ ID NO: 923766
uaaugcaaagauggacugc

SEQ ID NO: 923768 - RNA, 19 nt, Artificial Sequence
  Description of Artificial Sequence: Synthetic oligonucleotide
  Sense strand starting at position 3637 of SEQ ID NO: 913393
gucagaugauaacaaguau

SEQ ID NO: 923769 - RNA, 19 nt, Artificial Sequence
  Description of Artificial Sequence: Synthetic oligonucleotide
  Antisense strand to SEQ ID NO: 923768
auacuuguuaucaucugac

SEQ ID NO: 923770 - RNA, 19 nt, Artificial Sequence
  Description of Artificial Sequence: Synthetic oligonucleotide
  Sense strand starting at position 2229 of SEQ ID NO: 913393
uguagaucauaguauugaa

SEQ ID NO: 923771 - RNA, 19 nt, Artificial Sequence
  Description of Artificial Sequence: Synthetic oligonucleotide
  Antisense strand to SEQ ID NO: 923770
uucaauacuaugaucuaca

SEQ ID NO: 923772 - RNA, 19 nt, Artificial Sequence
  Description of Artificial Sequence: Synthetic oligonucleotide
  Sense strand starting at position 3908 of SEQ ID NO: 913393
acagauaaauuauggcaua

SEQ ID NO: 923773 - RNA, 19 nt, Artificial Sequence
  Description of Artificial Sequence: Synthetic oligonucleotide
  Antisense strand to SEQ ID NO: 923772
uaugccauaauuuaucugu

SEQ ID NO: 923774 - RNA, 19 nt, Artificial Sequence
  Description of Artificial Sequence: Synthetic oligonucleotide
  Sense strand starting at position 2232 of SEQ ID NO: 913393
agaucauaguauugaauca

SEQ ID NO: 923775 - RNA, 19 nt, Artificial Sequence
  Description of Artificial Sequence: Synthetic oligonucleotide
  Antisense strand to SEQ ID NO: 923774
ugauucaauacuaugaucu

SEQ ID NO: 923776 - RNA, 19 nt, Artificial Sequence
  Description of Artificial Sequence: Synthetic oligonucleotide
  Sense strand starting at position 597 of SEQ ID NO: 913393
cuaaaucaguugcaugaga

SEQ ID NO: 923777 - RNA, 19 nt, Artificial Sequence
  Description of Artificial Sequence: Synthetic oligonucleotide
  Antisense strand to SEQ ID NO: 923776
ucucaugcaacugauuuag

SEQ ID NO: 923778 - RNA, 19 nt, Artificial Sequence
  Description of Artificial Sequence: Synthetic oligonucleotide
  Sense strand starting at position 2953 of SEQ ID NO: 913394
acgaauuuguaugucaucu

SEQ ID NO: 923779 - RNA, 19 nt, Artificial Sequence
  Description of Artificial Sequence: Synthetic oligonucleotide
  Antisense strand to SEQ ID NO: 923778
agaugacauacaaauucgu

SEQ ID NO: 923780 - RNA, 19 nt, Artificial Sequence
  Description of Artificial Sequence: Synthetic oligonucleotide
  Sense strand starting at position 3752 of SEQ ID NO: 913394
agauuagugagaggucaag

SEQ ID NO: 923781 - RNA, 19 nt, Artificial Sequence
  Description of Artificial Sequence: Synthetic oligonucleotide
  Antisense strand to SEQ ID NO: 923780
cuugaccucucacuaaucu

SEQ ID NO: 923782 - RNA, 19 nt, Artificial Sequence
  Description of Artificial Sequence: Synthetic oligonucleotide
  Sense strand starting at position 3528 of SEQ ID NO: 913394
ggaaauaauccuuguugga

SEQ ID NO: 923783 - RNA, 19 nt, Artificial Sequence
  Description of Artificial Sequence: Synthetic oligonucleotide
  Antisense strand to SEQ ID NO: 923782
uccaacaaggauuauuucc

SEQ ID NO: 923784 - RNA, 19 nt, Artificial Sequence
  Description of Artificial Sequence: Synthetic oligonucleotide
  Sense strand starting at position 1077 of SEQ ID NO: 913394
uucuuagagcaguaagaug

SEQ ID NO: 923785 - RNA, 19 nt, Artificial Sequence
  Description of Artificial Sequence: Synthetic oligonucleotide
  Antisense strand to SEQ ID NO: 923784
caucuuacugcucuaagaa

SEQ ID NO: 923786 - RNA, 19 nt, Artificial Sequence
  Description of Artificial Sequence: Synthetic oligonucleotide
  Sense strand starting at position 3626 of SEQ ID NO: 913394
gcaaucauagaauggugaa

SEQ ID NO: 923787 - RNA, 19 nt, Artificial Sequence
  Description of Artificial Sequence: Synthetic oligonucleotide
  Antisense strand to SEQ ID NO: 923786
uucaccauucuaugauugc

SEQ ID NO: 923788 - RNA, 19 nt, Artificial Sequence
  Description of Artificial Sequence: Synthetic oligonucleotide
  Sense strand starting at position 2442 of SEQ ID NO: 913394
ugggcaaccacagauguuu

SEQ ID NO: 923789 - RNA, 19 nt, Artificial Sequence
  Description of Artificial Sequence: Synthetic oligonucleotide
  Antisense strand to SEQ ID NO: 923788
aaacaucugugguugccca

SEQ ID NO: 923790 - RNA, 19 nt, Artificial Sequence
  Description of Artificial Sequence: Synthetic oligonucleotide
  Sense strand starting at position 3767 of SEQ ID NO: 913394
caaggaaagggcuguauca

SEQ ID NO: 923791 - RNA, 19 nt, Artificial Sequence
  Description of Artificial Sequence: Synthetic oligonucleotide
  Antisense strand to SEQ ID NO: 923790
ugauacagcccuuuccuug

SEQ ID NO: 923792 - RNA, 19 nt, Artificial Sequence
  Description of Artificial Sequence: Synthetic oligonucleotide
  Sense strand starting at position 1660 of SEQ ID NO: 913394
cgggaaaguuaguugaaag

SEQ ID NO: 923793 - RNA, 19 nt, Artificial Sequence
  Description of Artificial Sequence: Synthetic oligonucleotide
  Antisense strand to SEQ ID NO: 923792
cuuucaacuaacuuucccg

SEQ ID NO: 923794 - RNA, 19 nt, Artificial Sequence
  Description of Artificial Sequence: Synthetic oligonucleotide
  Sense strand starting at position 1471 of SEQ ID NO: 913394
cucaguucccuggaaaggu

SEQ ID NO: 923795 - RNA, 19 nt, Artificial Sequence
  Description of Artificial Sequence: Synthetic oligonucleotide
  Antisense strand to SEQ ID NO: 923794
accuuuccagggaacugag

SEQ ID NO: 923796 - RNA, 19 nt, Artificial Sequence
  Description of Artificial Sequence: Synthetic oligonucleotide
  Sense strand starting at position 1157 of SEQ ID NO: 913394
ggguuaauucccuagugac

SEQ ID NO: 923797 - RNA, 19 nt, Artificial Sequence
  Description of Artificial Sequence: Synthetic oligonucleotide
  Antisense strand to SEQ ID NO: 923796
gucacuagggaauuaaccc

SEQ ID NO: 923798 - RNA, 19 nt, Artificial Sequence
  Description of Artificial Sequence: Synthetic oligonucleotide
  Sense strand starting at position 3569 of SEQ ID NO: 913394
uuccaacuaguauauguau

SEQ ID NO: 923799 - RNA, 19 nt, Artificial Sequence
  Description of Artificial Sequence: Synthetic oligonucleotide
  Antisense strand to SEQ ID NO: 923798
auacauauacuaguuggaa

SEQ ID NO: 923800 - RNA, 19 nt, Artificial Sequence
  Description of Artificial Sequence: Synthetic oligonucleotide
  Sense strand starting at position 3532 of SEQ ID NO: 913394
auaauccuuguuggaauau

SEQ ID NO: 923801 - RNA, 19 nt, Artificial Sequence
  Description of Artificial Sequence: Synthetic oligonucleotide
  Antisense strand to SEQ ID NO: 923800
auauuccaacaaggauuau

SEQ ID NO: 923802 - RNA, 19 nt, Artificial Sequence
  Description of Artificial Sequence: Synthetic oligonucleotide
  Sense strand starting at position 2959 of SEQ ID NO: 913394
uuguaugucaucuugcgca

SEQ ID NO: 923803 - RNA, 19 nt, Artificial Sequence
  Description of Artificial Sequence: Synthetic oligonucleotide
  Antisense strand to SEQ ID NO: 923802
ugcgcaagaugacauacaa

SEQ ID NO: 923804 - RNA, 19 nt, Artificial Sequence
  Description of Artificial Sequence: Synthetic oligonucleotide
  Sense strand starting at position 42 of SEQ ID NO: 913394
gccacacccggauaauauu

SEQ ID NO: 923805 - RNA, 19 nt, Artificial Sequence
  Description of Artificial Sequence: Synthetic oligonucleotide
  Antisense strand to SEQ ID NO: 923804
aauauuauccggguguggc

SEQ ID NO: 923806 - RNA, 19 nt, Artificial Sequence
  Description of Artificial Sequence: Synthetic oligonucleotide
  Sense strand starting at position 1468 of SEQ ID NO: 913394
gaccucaguucccuggaaa

SEQ ID NO: 923807 - RNA, 19 nt, Artificial Sequence
  Description of Artificial Sequence: Synthetic oligonucleotide
  Antisense strand to SEQ ID NO: 923806
uuuccagggaacugagguc

SEQ ID NO: 923808 - RNA, 19 nt, Artificial Sequence
  Description of Artificial Sequence: Synthetic oligonucleotide
  Sense strand starting at position 452 of SEQ ID NO: 913394
caaguucugggaugacgga

SEQ ID NO: 923809 - RNA, 19 nt, Artificial Sequence
  Description of Artificial Sequence: Synthetic oligonucleotide
  Antisense strand to SEQ ID NO: 923808
uccgucaucccagaacuug

SEQ ID NO: 923810 - RNA, 19 nt, Artificial Sequence
  Description of Artificial Sequence: Synthetic oligonucleotide
  Sense strand starting at position 3560 of SEQ ID NO: 913394
uuggaauauuuccaacuag

SEQ ID NO: 923811 - RNA, 19 nt, Artificial Sequence
  Description of Artificial Sequence: Synthetic oligonucleotide
  Antisense strand to SEQ ID NO: 923810
cuaguuggaaauauuccaa

SEQ ID NO: 923812 - RNA, 19 nt, Artificial Sequence
  Description of Artificial Sequence: Synthetic oligonucleotide
  Sense strand starting at position 1469 of SEQ ID NO: 913394
accucaguucccuggaaag

SEQ ID NO: 923813 - RNA, 19 nt, Artificial Sequence
  Description of Artificial Sequence: Synthetic oligonucleotide
  Antisense strand to SEQ ID NO: 923812
cuuuccagggaacugaggu

SEQ ID NO: 923814 - RNA, 19 nt, Artificial Sequence
  Description of Artificial Sequence: Synthetic oligonucleotide
  Sense strand starting at position 2337 of SEQ ID NO: 913394
cuggcaaacguauauacau

SEQ ID NO: 923815 - RNA, 19 nt, Artificial Sequence
  Description of Artificial Sequence: Synthetic oligonucleotide
  Antisense strand to SEQ ID NO: 923814
auguauauacguuugccag

SEQ ID NO: 923816 - RNA, 19 nt, Artificial Sequence
  Description of Artificial Sequence: Synthetic oligonucleotide
  Sense strand starting at position 3067 of SEQ ID NO: 913394
ccacaauuauauguguaua

SEQ ID NO: 923817 - RNA, 19 nt, Artificial Sequence
  Description of Artificial Sequence: Synthetic oligonucleotide
  Antisense strand to SEQ ID NO: 923816
uauacacauauaauugugg

SEQ ID NO: 923818 - RNA, 19 nt, Artificial Sequence
  Description of Artificial Sequence: Synthetic oligonucleotide
  Sense strand starting at position 2264 of SEQ ID NO: 913394
gaagucaaguuuguugaga

SEQ ID NO: 923819 - RNA, 19 nt, Artificial Sequence
  Description of Artificial Sequence: Synthetic oligonucleotide
  Antisense strand to SEQ ID NO: 923818
ucucaacaaacuugacuuc

SEQ ID NO: 923820 - RNA, 19 nt, Artificial Sequence
  Description of Artificial Sequence: Synthetic oligonucleotide
  Sense strand starting at position 726 of SEQ ID NO: 913394
gugcugauggagugaggaa

SEQ ID NO: 923821 - RNA, 19 nt, Artificial Sequence
  Description of Artificial Sequence: Synthetic oligonucleotide
  Antisense strand to SEQ ID NO: 923820
uuccucacuccaucagcac

SEQ ID NO: 923822 - RNA, 19 nt, Artificial Sequence
  Description of Artificial Sequence: Synthetic oligonucleotide
  Sense strand starting at position 3550 of SEQ ID NO: 913394
uuucuacagcuuggaauau

SEQ ID NO: 923823 - RNA, 19 nt, Artificial Sequence
  Description of Artificial Sequence: Synthetic oligonucleotide
  Antisense strand to SEQ ID NO: 923822
auauuccaagcuguagaaa

SEQ ID NO: 923824 - RNA, 19 nt, Artificial Sequence
  Description of Artificial Sequence: Synthetic oligonucleotide
  Sense strand starting at position 40 of SEQ ID NO: 913394
ccgccacacccggauaaua

SEQ ID NO: 923825 - RNA, 19 nt, Artificial Sequence
  Description of Artificial Sequence: Synthetic oligonucleotide
  Antisense strand to SEQ ID NO: 923824
uauuauccggguguggcgg

SEQ ID NO: 923826 - RNA, 19 nt, Artificial Sequence
  Description of Artificial Sequence: Synthetic oligonucleotide
  Sense strand starting at position 1167 of SEQ ID NO: 913394
ccuagugaccugcaucauu

SEQ ID NO: 923827 - RNA, 19 nt, Artificial Sequence
  Description of Artificial Sequence: Synthetic oligonucleotide
  Antisense strand to SEQ ID NO: 923826
aaugaugcaggucacuagg

SEQ ID NO: 923828 - RNA, 19 nt, Artificial Sequence
  Description of Artificial Sequence: Synthetic oligonucleotide
  Sense strand starting at position 791 of SEQ ID NO: 913394
gcauaucuugaauggcaga

SEQ ID NO: 923829 - RNA, 19 nt, Artificial Sequence
  Description of Artificial Sequence: Synthetic oligonucleotide
  Antisense strand to SEQ ID NO: 923828
ucugccauucaagauaugc

SEQ ID NO: 923830 - RNA, 19 nt, Artificial Sequence
  Description of Artificial Sequence: Synthetic oligonucleotide
  Sense strand starting at position 2265 of SEQ ID NO: 913394
aagucaaguuuguugagau

SEQ ID NO: 923831 - RNA, 19 nt, Artificial Sequence
  Description of Artificial Sequence: Synthetic oligonucleotide
  Antisense strand to SEQ ID NO: 923830
aucucaacaaacuugacuu

SEQ ID NO: 923832 - RNA, 19 nt, Artificial Sequence
  Description of Artificial Sequence: Synthetic oligonucleotide
  Sense strand starting at position 3456 of SEQ ID NO: 913394
ucugaugucaauuaguugu

SEQ ID NO: 923833 - RNA, 19 nt, Artificial Sequence
  Description of Artificial Sequence: Synthetic oligonucleotide
  Antisense strand to SEQ ID NO: 923832
acaacuaauugacaucaga

SEQ ID NO: 923834 - RNA, 19 nt, Artificial Sequence
  Description of Artificial Sequence: Synthetic oligonucleotide
  Sense strand starting at position 1060 of SEQ ID NO: 913394
cccagacucaucggagguu

SEQ ID NO: 923835 - RNA, 19 nt, Artificial Sequence
  Description of Artificial Sequence: Synthetic oligonucleotide
  Antisense strand to SEQ ID NO: 923834
aaccuccgaugagucuggg

SEQ ID NO: 923836 - RNA, 19 nt, Artificial Sequence
  Description of Artificial Sequence: Synthetic oligonucleotide
  Sense strand starting at position 1063 of SEQ ID NO: 913394
agacucaucggagguucuu

SEQ ID NO: 923837 - RNA, 19 nt, Artificial Sequence
  Description of Artificial Sequence: Synthetic oligonucleotide
  Antisense strand to SEQ ID NO: 923836
aagaaccuccgaugagucu

SEQ ID NO: 923838 - RNA, 19 nt, Artificial Sequence
  Description of Artificial Sequence: Synthetic oligonucleotide
  Sense strand starting at position 3462 of SEQ ID NO: 913394
gucaauuaguuguuacaaa

SEQ ID NO: 923839 - RNA, 19 nt, Artificial Sequence
  Description of Artificial Sequence: Synthetic oligonucleotide
  Antisense strand to SEQ ID NO: 923838
uuuguaacaacuaauugac

SEQ ID NO: 923840 - RNA, 19 nt, Artificial Sequence
  Description of Artificial Sequence: Synthetic oligonucleotide
  Sense strand starting at position 1659 of SEQ ID NO: 913394
gcgggaaaguuaguugaaa

SEQ ID NO: 923841 - RNA, 19 nt, Artificial Sequence
  Description of Artificial Sequence: Synthetic oligonucleotide
  Antisense strand to SEQ ID NO: 923840
uuucaacuaacuuucccgc

SEQ ID NO: 923842 - RNA, 19 nt, Artificial Sequence
  Description of Artificial Sequence: Synthetic oligonucleotide
  Sense strand starting at position 2326 of SEQ ID NO: 913394
uucugugaacucuggcaaa

SEQ ID NO: 923843 - RNA, 19 nt, Artificial Sequence
  Description of Artificial Sequence: Synthetic oligonucleotide
  Antisense strand to SEQ ID NO: 923842
uuugccagaguucacagaa

SEQ ID NO: 923844 - RNA, 19 nt, Artificial Sequence
  Description of Artificial Sequence: Synthetic oligonucleotide
  Sense strand starting at position 3421 of SEQ ID NO: 913394
ucugguugauauccagcua

SEQ ID NO: 923845 - RNA, 19 nt, Artificial Sequence
  Description of Artificial Sequence: Synthetic oligonucleotide
  Antisense strand to SEQ ID NO: 923844
uagcuggauaucaaccaga

SEQ ID NO: 923846 - RNA, 19 nt, Artificial Sequence
  Description of Artificial Sequence: Synthetic oligonucleotide
  Sense strand starting at position 3458 of SEQ ID NO: 913394
ugaugucaauuaguuguua

SEQ ID NO: 923847 - RNA, 19 nt, Artificial Sequence
  Description of Artificial Sequence: Synthetic oligonucleotide
  Antisense strand to SEQ ID NO: 923846
uaacaacuaauugacauca

SEQ ID NO: 923848 - RNA, 19 nt, Artificial Sequence
  Description of Artificial Sequence: Synthetic oligonucleotide
  Sense strand starting at position 768 of SEQ ID NO: 913394
uugauuagugggugcugaa

SEQ ID NO: 923849 - RNA, 19 nt, Artificial Sequence
  Description of Artificial Sequence: Synthetic oligonucleotide
  Antisense strand to SEQ ID NO: 923848
uucagcacccacuaaucaa

SEQ ID NO: 923850 - RNA, 19 nt, Artificial Sequence
  Description of Artificial Sequence: Synthetic oligonucleotide
  Sense strand starting at position 3542 of SEQ ID NO: 913394
uuggaauauuucuacagcu

SEQ ID NO: 923851 - RNA, 19 nt, Artificial Sequence
  Description of Artificial Sequence: Synthetic oligonucleotide
  Antisense strand to SEQ ID NO: 923850
agcuguagaaauauuccaa

SEQ ID NO: 923852 - RNA, 19 nt, Artificial Sequence
  Description of Artificial Sequence: Synthetic oligonucleotide
  Sense strand starting at position 1156 of SEQ ID NO: 913394
cggguuaauucccuaguga

SEQ ID NO: 923853 - RNA, 19 nt, Artificial Sequence
  Description of Artificial Sequence: Synthetic oligonucleotide
  Antisense strand to SEQ ID NO: 923852
ucacuagggaauuaacccg

SEQ ID NO: 923854 - RNA, 19 nt, Artificial Sequence
  Description of Artificial Sequence: Synthetic oligonucleotide
  Sense strand starting at position 2543 of SEQ ID NO: 913394
gguuguauuuaggaaagca

SEQ ID NO: 923855 - RNA, 19 nt, Artificial Sequence
  Description of Artificial Sequence: Synthetic oligonucleotide
  Antisense strand to SEQ ID NO: 923854
ugcuuuccuaaauacaacc

SEQ ID NO: 923856 - RNA, 19 nt, Artificial Sequence
  Description of Artificial Sequence: Synthetic oligonucleotide
  Sense strand starting at position 822 of SEQ ID NO: 913394
gacuguauucugugagcau

SEQ ID NO: 923857 - RNA, 19 nt, Artificial Sequence
  Description of Artificial Sequence: Synthetic oligonucleotide
  Antisense strand to SEQ ID NO: 923856
augcucacagaauacaguc

SEQ ID NO: 923858 - RNA, 19 nt, Artificial Sequence
  Description of Artificial Sequence: Synthetic oligonucleotide
  Sense strand starting at position 3600 of SEQ ID NO: 913395
ggccuuauuuaucuaaguu

SEQ ID NO: 923859 - RNA, 19 nt, Artificial Sequence
  Description of Artificial Sequence: Synthetic oligonucleotide
  Antisense strand to SEQ ID NO: 923858
aacuuagauaaauaaggcc

SEQ ID NO: 923860 - RNA, 19 nt, Artificial Sequence
  Description of Artificial Sequence: Synthetic oligonucleotide
  Sense strand starting at position 2488 of SEQ ID NO: 913395
uggucauggacuuaguaga

SEQ ID NO: 923861 - RNA, 19 nt, Artificial Sequence
  Description of Artificial Sequence: Synthetic oligonucleotide
  Antisense strand to SEQ ID NO: 923860
ucuacuaaguccaugacca

SEQ ID NO: 923862 - RNA, 19 nt, Artificial Sequence
  Description of Artificial Sequence: Synthetic oligonucleotide
  Sense strand starting at position 1286 of SEQ ID NO: 913395
gagaucugagaucaugugu

SEQ ID NO: 923863 - RNA, 19 nt, Artificial Sequence
  Description of Artificial Sequence: Synthetic oligonucleotide
  Antisense strand to SEQ ID NO: 923862
acacaugaucucagaucuc

SEQ ID NO: 923864 - RNA, 19 nt, Artificial Sequence
  Description of Artificial Sequence: Synthetic oligonucleotide
  Sense strand starting at position 3856 of SEQ ID NO: 913395
gugacuuaugaucaacuuc

SEQ ID NO: 923865 - RNA, 19 nt, Artificial Sequence
  Description of Artificial Sequence: Synthetic oligonucleotide
  Antisense strand to SEQ ID NO: 923864
gaaguugaucauaagucac

SEQ ID NO: 923866 - RNA, 19 nt, Artificial Sequence
  Description of Artificial Sequence: Synthetic oligonucleotide
  Sense strand starting at position 1995 of SEQ ID NO: 913395
ggccauuucuucucaggua

SEQ ID NO: 923867 - RNA, 19 nt, Artificial Sequence
  Description of Artificial Sequence: Synthetic oligonucleotide
  Antisense strand to SEQ ID NO: 923866
uaccugagaagaaauggcc

SEQ ID NO: 923868 - RNA, 19 nt, Artificial Sequence
  Description of Artificial Sequence: Synthetic oligonucleotide
  Sense strand starting at position 3916 of SEQ ID NO: 913395
gccucugaacucuaaggau

SEQ ID NO: 923869 - RNA, 19 nt, Artificial Sequence
  Description of Artificial Sequence: Synthetic oligonucleotide
  Antisense strand to SEQ ID NO: 923868
auccuuagaguucagaggc

SEQ ID NO: 923870 - RNA, 19 nt, Artificial Sequence
  Description of Artificial Sequence: Synthetic oligonucleotide
  Sense strand starting at position 1962 of SEQ ID NO: 913395
caggaaugucuccaaguua

SEQ ID NO: 923871 - RNA, 19 nt, Artificial Sequence
  Description of Artificial Sequence: Synthetic oligonucleotide
  Antisense strand to SEQ ID NO: 923870
uaacuuggagacauuccug

SEQ ID NO: 923872 - RNA, 19 nt, Artificial Sequence
  Description of Artificial Sequence: Synthetic oligonucleotide
  Sense strand starting at position 3243 of SEQ ID NO: 913395
aagccugagaggugaaaug

SEQ ID NO: 923873 - RNA, 19 nt, Artificial Sequence
  Description of Artificial Sequence: Synthetic oligonucleotide
  Antisense strand to SEQ ID NO: 923872
cauuucaccucucaggcuu

SEQ ID NO: 923874 - RNA, 19 nt, Artificial Sequence
  Description of Artificial Sequence: Synthetic oligonucleotide
  Sense strand starting at position 1583 of SEQ ID NO: 913395
auuacuagaccuugacgaa

SEQ ID NO: 923875 - RNA, 19 nt, Artificial Sequence
  Description of Artificial Sequence: Synthetic oligonucleotide
  Antisense strand to SEQ ID NO: 923874
uucgucaaggucuaguaau

SEQ ID NO: 923876 - RNA, 19 nt, Artificial Sequence
  Description of Artificial Sequence: Synthetic oligonucleotide
  Sense strand starting at position 3504 of SEQ ID NO: 913395
cagcauucccgugugccaa

SEQ ID NO: 923877 - RNA, 19 nt, Artificial Sequence
  Description of Artificial Sequence: Synthetic oligonucleotide
  Antisense strand to SEQ ID NO: 923876
uuggcacacgggaaugcug

SEQ ID NO: 923878 - RNA, 19 nt, Artificial Sequence
  Description of Artificial Sequence: Synthetic oligonucleotide
  Sense strand starting at position 1762 of SEQ ID NO: 913395
uaaguacacguagaacuau

SEQ ID NO: 923879 - RNA, 19 nt, Artificial Sequence
  Description of Artificial Sequence: Synthetic oligonucleotide
  Antisense strand to SEQ ID NO: 923878
auaguucuacguguacuua

SEQ ID NO: 923880 - RNA, 19 nt, Artificial Sequence
  Description of Artificial Sequence: Synthetic oligonucleotide
  Sense strand starting at position 3666 of SEQ ID NO: 913395
ggugaaagaucagucuaac

SEQ ID NO: 923881 - RNA, 19 nt, Artificial Sequence
  Description of Artificial Sequence: Synthetic oligonucleotide
  Antisense strand to SEQ ID NO: 923880
guuagacugaucuuucacc

SEQ ID NO: 923882 - RNA, 19 nt, Artificial Sequence
  Description of Artificial Sequence: Synthetic oligonucleotide
  Sense strand starting at position 2876 of SEQ ID NO: 913395
gaaaucugacuccagcagu

SEQ ID NO: 923883 - RNA, 19 nt, Artificial Sequence
  Description of Artificial Sequence: Synthetic oligonucleotide
  Antisense strand to SEQ ID NO: 923882
acugcuggagucagauuuc

SEQ ID NO: 923884 - RNA, 19 nt, Artificial Sequence
  Description of Artificial Sequence: Synthetic oligonucleotide
  Sense strand starting at position 3339 of SEQ ID NO: 913395
ggcaacaauguagauguau

SEQ ID NO: 923885 - RNA, 19 nt, Artificial Sequence
  Description of Artificial Sequence: Synthetic oligonucleotide
  Antisense strand to SEQ ID NO: 923884
auacaucuacauuguugcc

SEQ ID NO: 923886 - RNA, 19 nt, Artificial Sequence
  Description of Artificial Sequence: Synthetic oligonucleotide
  Sense strand starting at position 2079 of SEQ ID NO: 913395
gccaaccgagguuaagaua

SEQ ID NO: 923887 - RNA, 19 nt, Artificial Sequence
  Description of Artificial Sequence: Synthetic oligonucleotide
  Antisense strand to SEQ ID NO: 923886
uaucuuaaccucgguuggc

SEQ ID NO: 923888 - RNA, 19 nt, Artificial Sequence
  Description of Artificial Sequence: Synthetic oligonucleotide
  Sense strand starting at position 3142 of SEQ ID NO: 913395
uucccuguccuuuaaggga

SEQ ID NO: 923889 - RNA, 19 nt, Artificial Sequence
  Description of Artificial Sequence: Synthetic oligonucleotide
  Antisense strand to SEQ ID NO: 923888
ucccuuaaaggacagggaa

SEQ ID NO: 923890 - RNA, 19 nt, Artificial Sequence
  Description of Artificial Sequence: Synthetic oligonucleotide
  Sense strand starting at position 1806 of SEQ ID NO: 913395
uguccacaguaaucaagaa

SEQ ID NO: 923891 - RNA, 19 nt, Artificial Sequence
  Description of Artificial Sequence: Synthetic oligonucleotide
  Antisense strand to SEQ ID NO: 923890
uucuugauuacuguggaca

SEQ ID NO: 923892 - RNA, 19 nt, Artificial Sequence
  Description of Artificial Sequence: Synthetic oligonucleotide
  Sense strand starting at position 1609 of SEQ ID NO: 913395
cugugcuuagaucaaugga

SEQ ID NO: 923893 - RNA, 19 nt, Artificial Sequence
  Description of Artificial Sequence: Synthetic oligonucleotide
  Antisense strand to SEQ ID NO: 923892
uccauugaucuaagcacag

SEQ ID NO: 923894 - RNA, 19 nt, Artificial Sequence
  Description of Artificial Sequence: Synthetic oligonucleotide
  Sense strand starting at position 2353 of SEQ ID NO: 913395
cauuuauggcgaugaugcu

SEQ ID NO: 923895 - RNA, 19 nt, Artificial Sequence
  Description of Artificial Sequence: Synthetic oligonucleotide
  Antisense strand to SEQ ID NO: 923894
agcaucaucgccauaaaug

SEQ ID NO: 923896 - RNA, 19 nt, Artificial Sequence
  Description of Artificial Sequence: Synthetic oligonucleotide
  Sense strand starting at position 1771 of SEQ ID NO: 913395
guagaacuaucagcagaca

SEQ ID NO: 923897 - RNA, 19 nt, Artificial Sequence
  Description of Artificial Sequence: Synthetic oligonucleotide
  Antisense strand to SEQ ID NO: 923896
ugucugcugauaguucuac

SEQ ID NO: 923898 - RNA, 19 nt, Artificial Sequence
  Description of Artificial Sequence: Synthetic oligonucleotide
  Sense strand starting at position 1301 of SEQ ID NO: 913395
guguucucucuacaacaaa

SEQ ID NO: 923899 - RNA, 19 nt, Artificial Sequence
  Description of Artificial Sequence: Synthetic oligonucleotide
  Antisense strand to SEQ ID NO: 923898
uuuguuguagagagaacac

SEQ ID NO: 923900 - RNA, 19 nt, Artificial Sequence
  Description of Artificial Sequence: Synthetic oligonucleotide
  Sense strand starting at position 2363 of SEQ ID NO: 913395
gaugaugcuguuuauggau

SEQ ID NO: 923901 - RNA, 19 nt, Artificial Sequence
  Description of Artificial Sequence: Synthetic oligonucleotide
  Antisense strand to SEQ ID NO: 923900
auccauaaacagcaucauc

SEQ ID NO: 923902 - RNA, 19 nt, Artificial Sequence
  Description of Artificial Sequence: Synthetic oligonucleotide
  Sense strand starting at position 3848 of SEQ ID NO: 913395
ucagaucugugacuuauga

SEQ ID NO: 923903 - RNA, 19 nt, Artificial Sequence
  Description of Artificial Sequence: Synthetic oligonucleotide
  Antisense strand to SEQ ID NO: 923902
ucauaagucacagaucuga

SEQ ID NO: 923904 - RNA, 19 nt, Artificial Sequence
  Description of Artificial Sequence: Synthetic oligonucleotide
  Sense strand starting at position 2910 of SEQ ID NO: 913395
ccacuuacuggaugacuuu

SEQ ID NO: 923905 - RNA, 19 nt, Artificial Sequence
  Description of Artificial Sequence: Synthetic oligonucleotide
  Antisense strand to SEQ ID NO: 923904
aaagucauccaguaagugg

SEQ ID NO: 923906 - RNA, 19 nt, Artificial Sequence
  Description of Artificial Sequence: Synthetic oligonucleotide
  Sense strand starting at position 110 of SEQ ID NO: 913395
accaaauucuagguggagu

SEQ ID NO: 923907 - RNA, 19 nt, Artificial Sequence
  Description of Artificial Sequence: Synthetic oligonucleotide
  Antisense strand to SEQ ID NO: 923906
acuccaccuagaauuuggu

SEQ ID NO: 923908 - RNA, 19 nt, Artificial Sequence
  Description of Artificial Sequence: Synthetic oligonucleotide
  Sense strand starting at position 1120 of SEQ ID NO: 913395
acaguuauguaaccuaaca

SEQ ID NO: 923909 - RNA, 19 nt, Artificial Sequence
  Description of Artificial Sequence: Synthetic oligonucleotide
  Antisense strand to SEQ ID NO: 923908
uguuagguuacauaacugu

SEQ ID NO: 923910 - RNA, 19 nt, Artificial Sequence
  Description of Artificial Sequence: Synthetic oligonucleotide
  Sense strand starting at position 1803 of SEQ ID NO: 913395
ugguguccacaguaaucaa

SEQ ID NO: 923911 - RNA, 19 nt, Artificial Sequence
  Description of Artificial Sequence: Synthetic oligonucleotide
  Antisense strand to SEQ ID NO: 923910
uugauuacuguggacacca

SEQ ID NO: 923912 - RNA, 19 nt, Artificial Sequence
  Description of Artificial Sequence: Synthetic oligonucleotide
  Sense strand starting at position 2525 of SEQ ID NO: 913395
aggugaaacccguaacuuu

SEQ ID NO: 923913 - RNA, 19 nt, Artificial Sequence
  Description of Artificial Sequence: Synthetic oligonucleotide
  Antisense strand to SEQ ID NO: 923912
aaaguuacggguuucaccu

SEQ ID NO: 923914 - RNA, 19 nt, Artificial Sequence
  Description of Artificial Sequence: Synthetic oligonucleotide
  Sense strand starting at position 112 of SEQ ID NO: 913395
caaauucuagguggaguua

SEQ ID NO: 923915 - RNA, 19 nt, Artificial Sequence
  Description of Artificial Sequence: Synthetic oligonucleotide
  Antisense strand to SEQ ID NO: 923914
uaacuccaccuagaauuug

SEQ ID NO: 923916 - RNA, 19 nt, Artificial Sequence
  Description of Artificial Sequence: Synthetic oligonucleotide
  Sense strand starting at position 3855 of SEQ ID NO: 913395
ugugacuuaugaucaacuu

SEQ ID NO: 923917 - RNA, 19 nt, Artificial Sequence
  Description of Artificial Sequence: Synthetic oligonucleotide
  Antisense strand to SEQ ID NO: 923916
aaguugaucauaagucaca

SEQ ID NO: 923918 - RNA, 19 nt, Artificial Sequence
  Description of Artificial Sequence: Synthetic oligonucleotide
  Sense strand starting at position 52 of SEQ ID NO: 913395
augugaugaaucugguaug

SEQ ID NO: 923919 - RNA, 19 nt, Artificial Sequence
  Description of Artificial Sequence: Synthetic oligonucleotide
  Antisense strand to SEQ ID NO: 923918
cauaccagauucaucacau

SEQ ID NO: 923920 - RNA, 19 nt, Artificial Sequence
  Description of Artificial Sequence: Synthetic oligonucleotide
  Sense strand starting at position 1299 of SEQ ID NO: 913395
auguguucucucuacaaca

SEQ ID NO: 923921 - RNA, 19 nt, Artificial Sequence
  Description of Artificial Sequence: Synthetic oligonucleotide
  Antisense strand to SEQ ID NO: 923920
uguuguagagagaacacau

SEQ ID NO: 923922 - RNA, 19 nt, Artificial Sequence
  Description of Artificial Sequence: Synthetic oligonucleotide
  Sense strand starting at position 1261 of SEQ ID NO: 913395
uuuccagguucucuggaaa

SEQ ID NO: 923923 - RNA, 19 nt, Artificial Sequence
  Description of Artificial Sequence: Synthetic oligonucleotide
  Antisense strand to SEQ ID NO: 923922
uuuccagagaaccuggaaa

SEQ ID NO: 923924 - RNA, 19 nt, Artificial Sequence
  Description of Artificial Sequence: Synthetic oligonucleotide
  Sense strand starting at position 3879 of SEQ ID NO: 913395
gucaguuuccaggagucag

SEQ ID NO: 923925 - RNA, 19 nt, Artificial Sequence
  Description of Artificial Sequence: Synthetic oligonucleotide
  Antisense strand to SEQ ID NO: 923924
cugacuccuggaaacugac

SEQ ID NO: 923926 - RNA, 19 nt, Artificial Sequence
  Description of Artificial Sequence: Synthetic oligonucleotide
  Sense strand starting at position 910 of SEQ ID NO: 913395
ugccuacugcuggaucaga

SEQ ID NO: 923927 - RNA, 19 nt, Artificial Sequence
  Description of Artificial Sequence: Synthetic oligonucleotide
  Antisense strand to SEQ ID NO: 923926
ucugauccagcaguaggca

SEQ ID NO: 923928 - RNA, 19 nt, Artificial Sequence
  Description of Artificial Sequence: Synthetic oligonucleotide
  Sense strand starting at position 111 of SEQ ID NO: 913395
ccaaauucuagguggaguu

SEQ ID NO: 923929 - RNA, 19 nt, Artificial Sequence
  Description of Artificial Sequence: Synthetic oligonucleotide
  Antisense strand to SEQ ID NO: 923928
aacuccaccuagaauuugg

SEQ ID NO: 923930 - RNA, 19 nt, Artificial Sequence
  Description of Artificial Sequence: Synthetic oligonucleotide
  Sense strand starting at position 2087 of SEQ ID NO: 913395
agguuaagauaucuuagcu

SEQ ID NO: 923931 - RNA, 19 nt, Artificial Sequence
  Description of Artificial Sequence: Synthetic oligonucleotide
  Antisense strand to SEQ ID NO: 923930
agcuaagauaucuuaaccu

SEQ ID NO: 923932 - RNA, 19 nt, Artificial Sequence
  Description of Artificial Sequence: Synthetic oligonucleotide
  Sense strand starting at position 3844 of SEQ ID NO: 913395
caagucagaucugugacuu

SEQ ID NO: 923933 - RNA, 19 nt, Artificial Sequence
  Description of Artificial Sequence: Synthetic oligonucleotide
  Antisense strand to SEQ ID NO: 923932
aagucacagaucugacuug

SEQ ID NO: 923934 - RNA, 19 nt, Artificial Sequence
  Description of Artificial Sequence: Synthetic oligonucleotide
  Sense strand starting at position 1961 of SEQ ID NO: 913395
ucaggaaugucuccaaguu

SEQ ID NO: 923935 - RNA, 19 nt, Artificial Sequence
  Description of Artificial Sequence: Synthetic oligonucleotide
  Antisense strand to SEQ ID NO: 923934
aacuuggagacauuccuga

SEQ ID NO: 923936 - RNA, 19 nt, Artificial Sequence
  Description of Artificial Sequence: Synthetic oligonucleotide
  Sense strand starting at position 1173 of SEQ ID NO: 913395
ccaaucuuuguguaaaugu

SEQ ID NO: 923937 - RNA, 19 nt, Artificial Sequence
  Description of Artificial Sequence: Synthetic oligonucleotide
  Antisense strand to SEQ ID NO: 923936
acauuuacacaaagauugg

SEQ ID NO: 923938 - RNA, 19 nt, Artificial Sequence
  Description of Artificial Sequence: Synthetic oligonucleotide
  Sense strand starting at position 363 of SEQ ID NO: 913396
acuuguugucaagaacuca

SEQ ID NO: 923939 - RNA, 19 nt, Artificial Sequence
  Description of Artificial Sequence: Synthetic oligonucleotide
  Antisense strand to SEQ ID NO: 923938
ugaguucuugacaacaagu

SEQ ID NO: 923940 - RNA, 19 nt, Artificial Sequence
  Description of Artificial Sequence: Synthetic oligonucleotide
  Sense strand starting at position 1798 of SEQ ID NO: 913396
uccguuaaaggugaaauau

SEQ ID NO: 923941 - RNA, 19 nt, Artificial Sequence
  Description of Artificial Sequence: Synthetic oligonucleotide
  Antisense strand to SEQ ID NO: 923940
auauuucaccuuuaacgga

SEQ ID NO: 923942 - RNA, 19 nt, Artificial Sequence
  Description of Artificial Sequence: Synthetic oligonucleotide
  Sense strand starting at position 3477 of SEQ ID NO: 913396
ucaguauccggguagauaa

SEQ ID NO: 923943 - RNA, 19 nt, Artificial Sequence
  Description of Artificial Sequence: Synthetic oligonucleotide
  Antisense strand to SEQ ID NO: 923942
uuaucuacccggauacuga

SEQ ID NO: 923944 - RNA, 19 nt, Artificial Sequence
  Description of Artificial Sequence: Synthetic oligonucleotide
  Sense strand starting at position 266 of SEQ ID NO: 913396
cuaauugugguccaucaau

SEQ ID NO: 923945 - RNA, 19 nt, Artificial Sequence
  Description of Artificial Sequence: Synthetic oligonucleotide
  Antisense strand to SEQ ID NO: 923944
auugauggaccacaauuag

SEQ ID NO: 923946 - RNA, 19 nt, Artificial Sequence
  Description of Artificial Sequence: Synthetic oligonucleotide
  Sense strand starting at position 3412 of SEQ ID NO: 913396
cuuaucugugaagagcuua

SEQ ID NO: 923947 - RNA, 19 nt, Artificial Sequence
  Description of Artificial Sequence: Synthetic oligonucleotide
  Antisense strand to SEQ ID NO: 923946
uaagcucuucacagauaag

SEQ ID NO: 923948 - RNA, 19 nt, Artificial Sequence
  Description of Artificial Sequence: Synthetic oligonucleotide
  Sense strand starting at position 1316 of SEQ ID NO: 913396
uggauauagcuaugaucug

SEQ ID NO: 923949 - RNA, 19 nt, Artificial Sequence
  Description of Artificial Sequence: Synthetic oligonucleotide
  Antisense strand to SEQ ID NO: 923948
cagaucauagcuauaucca

SEQ ID NO: 923950 - RNA, 19 nt, Artificial Sequence
  Description of Artificial Sequence: Synthetic oligonucleotide
  Sense strand starting at position 1173 of SEQ ID NO: 913396
agaauaucaggcugcauaa

SEQ ID NO: 923951 - RNA, 19 nt, Artificial Sequence
  Description of Artificial Sequence: Synthetic oligonucleotide
  Antisense strand to SEQ ID NO: 923950
uuaugcagccugauauucu

SEQ ID NO: 923952 - RNA, 19 nt, Artificial Sequence
  Description of Artificial Sequence: Synthetic oligonucleotide
  Sense strand starting at position 313 of SEQ ID NO: 913396
ucguuucuucuauauagga

SEQ ID NO: 923953 - RNA, 19 nt, Artificial Sequence
  Description of Artificial Sequence: Synthetic oligonucleotide
  Antisense strand to SEQ ID NO: 923952
uccuauauagaagaaacga

SEQ ID NO: 923954 - RNA, 19 nt, Artificial Sequence
  Description of Artificial Sequence: Synthetic oligonucleotide
  Sense strand starting at position 645 of SEQ ID NO: 913396
caauacuugccggaguaua

SEQ ID NO: 923955 - RNA, 19 nt, Artificial Sequence
  Description of Artificial Sequence: Synthetic oligonucleotide
  Antisense strand to SEQ ID NO: 923954
uauacuccggcaaguauug

SEQ ID NO: 923956 - RNA, 19 nt, Artificial Sequence
  Description of Artificial Sequence: Synthetic oligonucleotide
  Sense strand starting at position 3408 of SEQ ID NO: 913396
uucccuuaucugugaagag

SEQ ID NO: 923957 - RNA, 19 nt, Artificial Sequence
  Description of Artificial Sequence: Synthetic oligonucleotide
  Antisense strand to SEQ ID NO: 923956
cucuucacagauaagggaa

SEQ ID NO: 923958 - RNA, 19 nt, Artificial Sequence
  Description of Artificial Sequence: Synthetic oligonucleotide
  Sense strand starting at position 656 of SEQ ID NO: 913396
ggaguauaucccugugaua

SEQ ID NO: 923959 - RNA, 19 nt, Artificial Sequence
  Description of Artificial Sequence: Synthetic oligonucleotide
  Antisense strand to SEQ ID NO: 923958
uaucacagggauauacucc

SEQ ID NO: 923960 - RNA, 19 nt, Artificial Sequence
  Description of Artificial Sequence: Synthetic oligonucleotide
  Sense strand starting at position 1543 of SEQ ID NO: 913396
acugaauagcugugggauu

SEQ ID NO: 923961 - RNA, 19 nt, Artificial Sequence
  Description of Artificial Sequence: Synthetic oligonucleotide
  Antisense strand to SEQ ID NO: 923960
aaucccacagcuauucagu

SEQ ID NO: 923962 - RNA, 19 nt, Artificial Sequence
  Description of Artificial Sequence: Synthetic oligonucleotide
  Sense strand starting at position 3407 of SEQ ID NO: 913396
cuucccuuaucugugaaga

SEQ ID NO: 923963 - RNA, 19 nt, Artificial Sequence
  Description of Artificial Sequence: Synthetic oligonucleotide
  Antisense strand to SEQ ID NO: 923962
ucuucacagauaagggaag

SEQ ID NO: 923964 - RNA, 19 nt, Artificial Sequence
  Description of Artificial Sequence: Synthetic oligonucleotide
  Sense strand starting at position 3176 of SEQ ID NO: 913396
gaggaugcaucuucuucua

SEQ ID NO: 923965 - RNA, 19 nt, Artificial Sequence
  Description of Artificial Sequence: Synthetic oligonucleotide
  Antisense strand to SEQ ID NO: 923964
uagaagaagaugcauccuc

SEQ ID NO: 923966 - RNA, 19 nt, Artificial Sequence
  Description of Artificial Sequence: Synthetic oligonucleotide
  Sense strand starting at position 2236 of SEQ ID NO: 913396
cgccuuaguccuccgcgaa

SEQ ID NO: 923967 - RNA, 19 nt, Artificial Sequence
  Description of Artificial Sequence: Synthetic oligonucleotide
  Antisense strand to SEQ ID NO: 923966
uucgcggaggacuaaggcg

SEQ ID NO: 923968 - RNA, 19 nt, Artificial Sequence
  Description of Artificial Sequence: Synthetic oligonucleotide
  Sense strand starting at position 3361 of SEQ ID NO: 913396
cuauauacugggugcuaaa

SEQ ID NO: 923969 - RNA, 19 nt, Artificial Sequence
  Description of Artificial Sequence: Synthetic oligonucleotide
  Antisense strand to SEQ ID NO: 923968
uuuagcacccaguauauag

SEQ ID NO: 923970 - RNA, 19 nt, Artificial Sequence
  Description of Artificial Sequence: Synthetic oligonucleotide
  Sense strand starting at position 1797 of SEQ ID NO: 913396
cuccguuaaaggugaaaua

SEQ ID NO: 923971 - RNA, 19 nt, Artificial Sequence
  Description of Artificial Sequence: Synthetic oligonucleotide
  Antisense strand to SEQ ID NO: 923970
uauuucaccuuuaacggag

SEQ ID NO: 923972 - RNA, 19 nt, Artificial Sequence
  Description of Artificial Sequence: Synthetic oligonucleotide
  Sense strand starting at position 658 of SEQ ID NO: 913396
aguauaucccugugauaug

SEQ ID NO: 923973 - RNA, 19 nt, Artificial Sequence
  Description of Artificial Sequence: Synthetic oligonucleotide
  Antisense strand to SEQ ID NO: 923972
cauaucacagggauauacu

SEQ ID NO: 923974 - RNA, 19 nt, Artificial Sequence
  Description of Artificial Sequence: Synthetic oligonucleotide
  Sense strand starting at position 1305 of SEQ ID NO: 913396
gugccagugaauggauaua

SEQ ID NO: 923975 - RNA, 19 nt, Artificial Sequence
  Description of Artificial Sequence: Synthetic oligonucleotide
  Antisense strand to SEQ ID NO: 923974
uauauccauucacuggcac

SEQ ID NO: 923976 - RNA, 19 nt, Artificial Sequence
  Description of Artificial Sequence: Synthetic oligonucleotide
  Sense strand starting at position 1269 of SEQ ID NO: 913396
auaaauguuuggucuaucu

SEQ ID NO: 923977 - RNA, 19 nt, Artificial Sequence
  Description of Artificial Sequence: Synthetic oligonucleotide
  Antisense strand to SEQ ID NO: 923976
agauagaccaaacauuuau

SEQ ID NO: 923978 - RNA, 19 nt, Artificial Sequence
  Description of Artificial Sequence: Synthetic oligonucleotide
  Sense strand starting at position 359 of SEQ ID NO: 913396
ucucacuuguugucaagaa

SEQ ID NO: 923979 - RNA, 19 nt, Artificial Sequence
  Description of Artificial Sequence: Synthetic oligonucleotide
  Antisense strand to SEQ ID NO: 923978
uucuugacaacaagugaga

SEQ ID NO: 923980 - RNA, 19 nt, Artificial Sequence
  Description of Artificial Sequence: Synthetic oligonucleotide
  Sense strand starting at position 1219 of SEQ ID NO: 913396
gggaaagggugccauuuca

SEQ ID NO: 923981 - RNA, 19 nt, Artificial Sequence
  Description of Artificial Sequence: Synthetic oligonucleotide
  Antisense strand to SEQ ID NO: 923980
ugaaauggcacccuuuccc

SEQ ID NO: 923982 - RNA, 19 nt, Artificial Sequence
  Description of Artificial Sequence: Synthetic oligonucleotide
  Sense strand starting at position 594 of SEQ ID NO: 913396
agcacaguaucugucacaa

SEQ ID NO: 923983 - RNA, 19 nt, Artificial Sequence
  Description of Artificial Sequence: Synthetic oligonucleotide
  Antisense strand to SEQ ID NO: 923982
uugugacagauacugugcu

SEQ ID NO: 923984 - RNA, 19 nt, Artificial Sequence
  Description of Artificial Sequence: Synthetic oligonucleotide
  Sense strand starting at position 2344 of SEQ ID NO: 913396
caccgugcccgggacaaau

SEQ ID NO: 923985 - RNA, 19 nt, Artificial Sequence
  Description of Artificial Sequence: Synthetic oligonucleotide
  Antisense strand to SEQ ID NO: 923984
auuugucccgggcacggug

SEQ ID NO: 923986 - RNA, 19 nt, Artificial Sequence
  Description of Artificial Sequence: Synthetic oligonucleotide
  Sense strand starting at position 1304 of SEQ ID NO: 913396
ugugccagugaauggauau

SEQ ID NO: 923987 - RNA, 19 nt, Artificial Sequence
  Description of Artificial Sequence: Synthetic oligonucleotide
  Antisense strand to SEQ ID NO: 923986
auauccauucacuggcaca

SEQ ID NO: 923988 - RNA, 19 nt, Artificial Sequence
  Description of Artificial Sequence: Synthetic oligonucleotide
  Sense strand starting at position 1358 of SEQ ID NO: 913396
guaccuuccgugcaauaag

SEQ ID NO: 923989 - RNA, 19 nt, Artificial Sequence
  Description of Artificial Sequence: Synthetic oligonucleotide
  Antisense strand to SEQ ID NO: 923988
cuuauugcacggaagguac

SEQ ID NO: 923990 - RNA, 19 nt, Artificial Sequence
  Description of Artificial Sequence: Synthetic oligonucleotide
  Sense strand starting at position 655 of SEQ ID NO: 913396
cggaguauaucccugugau

SEQ ID NO: 923991 - RNA, 19 nt, Artificial Sequence
  Description of Artificial Sequence: Synthetic oligonucleotide
  Antisense strand to SEQ ID NO: 923990
aucacagggauauacuccg

SEQ ID NO: 923992 - RNA, 19 nt, Artificial Sequence
  Description of Artificial Sequence: Synthetic oligonucleotide
  Sense strand starting at position 99 of SEQ ID NO: 913396
agcauucucuugcuuagaa

SEQ ID NO: 923993 - RNA, 19 nt, Artificial Sequence
  Description of Artificial Sequence: Synthetic oligonucleotide
  Antisense strand to SEQ ID NO: 923992
uucuaagcaagagaaugcu

SEQ ID NO: 923994 - RNA, 19 nt, Artificial Sequence
  Description of Artificial Sequence: Synthetic oligonucleotide
  Sense strand starting at position 488 of SEQ ID NO: 913396
auguaaucaucuguucucu

SEQ ID NO: 923995 - RNA, 19 nt, Artificial Sequence
  Description of Artificial Sequence: Synthetic oligonucleotide
  Antisense strand to SEQ ID NO: 923994
agagaacagaugauuacau

SEQ ID NO: 923996 - RNA, 19 nt, Artificial Sequence
  Description of Artificial Sequence: Synthetic oligonucleotide
  Sense strand starting at position 1030 of SEQ ID NO: 913396
aguaucuguaugugugaga

SEQ ID NO: 923997 - RNA, 19 nt, Artificial Sequence
  Description of Artificial Sequence: Synthetic oligonucleotide
  Antisense strand to SEQ ID NO: 923996
ucucacacauacagauacu

SEQ ID NO: 923998 - RNA, 19 nt, Artificial Sequence
  Description of Artificial Sequence: Synthetic oligonucleotide
  Sense strand starting at position 3178 of SEQ ID NO: 913396
ggaugcaucuucuucuagu

SEQ ID NO: 923999 - RNA, 19 nt, Artificial Sequence
  Description of Artificial Sequence: Synthetic oligonucleotide
  Antisense strand to SEQ ID NO: 923998
acuagaagaagaugcaucc

SEQ ID NO: 924000 - RNA, 19 nt, Artificial Sequence
  Description of Artificial Sequence: Synthetic oligonucleotide
  Sense strand starting at position 3360 of SEQ ID NO: 913396
gcuauauacugggugcuaa

SEQ ID NO: 924001 - RNA, 19 nt, Artificial Sequence
  Description of Artificial Sequence: Synthetic oligonucleotide
  Antisense strand to SEQ ID NO: 924000
uuagcacccaguauauagc

SEQ ID NO: 924002 - RNA, 19 nt, Artificial Sequence
  Description of Artificial Sequence: Synthetic oligonucleotide
  Sense strand starting at position 825 of SEQ ID NO: 913396
gucacaugucgcuaccaua

SEQ ID NO: 924003 - RNA, 19 nt, Artificial Sequence
  Description of Artificial Sequence: Synthetic oligonucleotide
  Antisense strand to SEQ ID NO: 924002
uaugguagcgacaugugac

SEQ ID NO: 924004 - RNA, 19 nt, Artificial Sequence
  Description of Artificial Sequence: Synthetic oligonucleotide
  Sense strand starting at position 152 of SEQ ID NO: 913396
agugaaggcucaguagcau

SEQ ID NO: 924005 - RNA, 19 nt, Artificial Sequence
  Description of Artificial Sequence: Synthetic oligonucleotide
  Antisense strand to SEQ ID NO: 924004
augcuacugagccuucacu

SEQ ID NO: 924006 - RNA, 19 nt, Artificial Sequence
  Description of Artificial Sequence: Synthetic oligonucleotide
  Sense strand starting at position 13 of SEQ ID NO: 913396
ucaguccucugccuauaca

SEQ ID NO: 924007 - RNA, 19 nt, Artificial Sequence
  Description of Artificial Sequence: Synthetic oligonucleotide
  Antisense strand to SEQ ID NO: 924006
uguauaggcagaggacuga

SEQ ID NO: 924008 - RNA, 19 nt, Artificial Sequence
  Description of Artificial Sequence: Synthetic oligonucleotide
  Sense strand starting at position 1795 of SEQ ID NO: 913396
gccuccguuaaaggugaaa

SEQ ID NO: 924009 - RNA, 19 nt, Artificial Sequence
  Description of Artificial Sequence: Synthetic oligonucleotide
  Antisense strand to SEQ ID NO: 924008
uuucaccuuuaacggaggc

SEQ ID NO: 924010 - RNA, 19 nt, Artificial Sequence
  Description of Artificial Sequence: Synthetic oligonucleotide
  Sense strand starting at position 100 of SEQ ID NO: 913396
gcauucucuugcuuagaau

SEQ ID NO: 924011 - RNA, 19 nt, Artificial Sequence
  Description of Artificial Sequence: Synthetic oligonucleotide
  Antisense strand to SEQ ID NO: 924010
auucuaagcaagagaaugc

SEQ ID NO: 924012 - RNA, 19 nt, Artificial Sequence
  Description of Artificial Sequence: Synthetic oligonucleotide
  Sense strand starting at position 3761 of SEQ ID NO: 913396
ucucuagugagcgagcuua

SEQ ID NO: 924013 - RNA, 19 nt, Artificial Sequence
  Description of Artificial Sequence: Synthetic oligonucleotide
  Antisense strand to SEQ ID NO: 924012
uaagcucgcucacuagaga

SEQ ID NO: 924014 - RNA, 19 nt, Artificial Sequence
  Description of Artificial Sequence: Synthetic oligonucleotide
  Sense strand starting at position 490 of SEQ ID NO: 913396
guaaucaucuguucucuuu

SEQ ID NO: 924015 - RNA, 19 nt, Artificial Sequence
  Description of Artificial Sequence: Synthetic oligonucleotide
  Antisense strand to SEQ ID NO: 924014
aaagagaacagaugauuac

SEQ ID NO: 924016 - RNA, 19 nt, Artificial Sequence
  Description of Artificial Sequence: Synthetic oligonucleotide
  Sense strand starting at position 1031 of SEQ ID NO: 913396
guaucuguaugugugagau

SEQ ID NO: 924017 - RNA, 19 nt, Artificial Sequence
  Description of Artificial Sequence: Synthetic oligonucleotide
  Antisense strand to SEQ ID NO: 924016
aucucacacauacagauac

SEQ ID NO: 924018 - RNA, 19 nt, Artificial Sequence
  Description of Artificial Sequence: Synthetic oligonucleotide
  Sense strand starting at position 2975 of SEQ ID NO: 913397
ucaccugaccuguacugaa

SEQ ID NO: 924019 - RNA, 19 nt, Artificial Sequence
  Description of Artificial Sequence: Synthetic oligonucleotide
  Antisense strand to SEQ ID NO: 924018
uucaguacaggucagguga

SEQ ID NO: 924020 - RNA, 19 nt, Artificial Sequence
  Description of Artificial Sequence: Synthetic oligonucleotide
  Sense strand starting at position 2511 of SEQ ID NO: 913397
ugcaaauguguccugugca

SEQ ID NO: 924021 - RNA, 19 nt, Artificial Sequence
  Description of Artificial Sequence: Synthetic oligonucleotide
  Antisense strand to SEQ ID NO: 924020
ugcacaggacacauuugca

SEQ ID NO: 924022 - RNA, 19 nt, Artificial Sequence
  Description of Artificial Sequence: Synthetic oligonucleotide
  Sense strand starting at position 3654 of SEQ ID NO: 913397
agaaaugcauucccugaaa

SEQ ID NO: 924023 - RNA, 19 nt, Artificial Sequence
  Description of Artificial Sequence: Synthetic oligonucleotide
  Antisense strand to SEQ ID NO: 924022
uuucagggaaugcauuucu

SEQ ID NO: 924024 - RNA, 19 nt, Artificial Sequence
  Description of Artificial Sequence: Synthetic oligonucleotide
  Sense strand starting at position 2183 of SEQ ID NO: 913397
gugugcuugcaucugcaaa

SEQ ID NO: 924025 - RNA, 19 nt, Artificial Sequence
  Description of Artificial Sequence: Synthetic oligonucleotide
  Antisense strand to SEQ ID NO: 924024
uuugcagaugcaagcacac

SEQ ID NO: 924026 - RNA, 19 nt, Artificial Sequence
  Description of Artificial Sequence: Synthetic oligonucleotide
  Sense strand starting at position 1186 of SEQ ID NO: 913397
ggaugaauaugcuuuagau

SEQ ID NO: 924027 - RNA, 19 nt, Artificial Sequence
  Description of Artificial Sequence: Synthetic oligonucleotide
  Antisense strand to SEQ ID NO: 924026
aucuaaagcauauucaucc

SEQ ID NO: 924028 - RNA, 19 nt, Artificial Sequence
  Description of Artificial Sequence: Synthetic oligonucleotide
  Sense strand starting at position 2066 of SEQ ID NO: 913397
gaccgagccgggaguugua

SEQ ID NO: 924029 - RNA, 19 nt, Artificial Sequence
  Description of Artificial Sequence: Synthetic oligonucleotide
  Antisense strand to SEQ ID NO: 924028
uacaacucccggcucgguc

SEQ ID NO: 924030 - RNA, 19 nt, Artificial Sequence
  Description of Artificial Sequence: Synthetic oligonucleotide
  Sense strand starting at position 2537 of SEQ ID NO: 913397
gucuguguccacgugcaaa

SEQ ID NO: 924031 - RNA, 19 nt, Artificial Sequence
  Description of Artificial Sequence: Synthetic oligonucleotide
  Antisense strand to SEQ ID NO: 924030
uuugcacguggacacagac

SEQ ID NO: 924032 - RNA, 19 nt, Artificial Sequence
  Description of Artificial Sequence: Synthetic oligonucleotide
  Sense strand starting at position 3790 of SEQ ID NO: 913397
cugcaauguguagaaugaa

SEQ ID NO: 924033 - RNA, 19 nt, Artificial Sequence
  Description of Artificial Sequence: Synthetic oligonucleotide
  Antisense strand to SEQ ID NO: 924032
uucauucuacacauugcag

SEQ ID NO: 924034 - RNA, 19 nt, Artificial Sequence
  Description of Artificial Sequence: Synthetic oligonucleotide
  Sense strand starting at position 2600 of SEQ ID NO: 913397
gaugaugcuccagaguacu

SEQ ID NO: 924035 - RNA, 19 nt, Artificial Sequence
  Description of Artificial Sequence: Synthetic oligonucleotide
  Antisense strand to SEQ ID NO: 924034
aguacucuggagcaucauc

SEQ ID NO: 924036 - RNA, 19 nt, Artificial Sequence
  Description of Artificial Sequence: Synthetic oligonucleotide
  Sense strand starting at position 3550 of SEQ ID NO: 913397
gcaaguauuugcuuauuau

SEQ ID NO: 924037 - RNA, 19 nt, Artificial Sequence
  Description of Artificial Sequence: Synthetic oligonucleotide
  Antisense strand to SEQ ID NO: 924036
auaauaagcaaauacuugc

SEQ ID NO: 924038 - RNA, 19 nt, Artificial Sequence
  Description of Artificial Sequence: Synthetic oligonucleotide
  Sense strand starting at position 3385 of SEQ ID NO: 913397
uggcaaugucguguuugua

SEQ ID NO: 924039 - RNA, 19 nt, Artificial Sequence
  Description of Artificial Sequence: Synthetic oligonucleotide
  Antisense strand to SEQ ID NO: 924038
uacaaacacgacauugcca

SEQ ID NO: 924040 - RNA, 19 nt, Artificial Sequence
  Description of Artificial Sequence: Synthetic oligonucleotide
  Sense strand starting at position 3386 of SEQ ID NO: 913397
ggcaaugucguguuuguau

SEQ ID NO: 924041 - RNA, 19 nt, Artificial Sequence
  Description of Artificial Sequence: Synthetic oligonucleotide
  Antisense strand to SEQ ID NO: 924040
auacaaacacgacauugcc

SEQ ID NO: 924042 - RNA, 19 nt, Artificial Sequence
  Description of Artificial Sequence: Synthetic oligonucleotide
  Sense strand starting at position 924 of SEQ ID NO: 913397
aagcuucugccguuagcua

SEQ ID NO: 924043 - RNA, 19 nt, Artificial Sequence
  Description of Artificial Sequence: Synthetic oligonucleotide
  Antisense strand to SEQ ID NO: 924042
uagcuaacggcagaagcuu

SEQ ID NO: 924044 - RNA, 19 nt, Artificial Sequence
  Description of Artificial Sequence: Synthetic oligonucleotide
  Sense strand starting at position 2914 of SEQ ID NO: 913397
ccaaguuuagaagguuuaa

SEQ ID NO: 924045 - RNA, 19 nt, Artificial Sequence
  Description of Artificial Sequence: Synthetic oligonucleotide
  Antisense strand to SEQ ID NO: 924044
uuaaaccuucuaaacuugg

SEQ ID NO: 924046 - RNA, 19 nt, Artificial Sequence
  Description of Artificial Sequence: Synthetic oligonucleotide
  Sense strand starting at position 2924 of SEQ ID NO: 913397
aagguuuaaccuugugaaa

SEQ ID NO: 924047 - RNA, 19 nt, Artificial Sequence
  Description of Artificial Sequence: Synthetic oligonucleotide
  Antisense strand to SEQ ID NO: 924046
uuucacaagguuaaaccuu

SEQ ID NO: 924048 - RNA, 19 nt, Artificial Sequence
  Description of Artificial Sequence: Synthetic oligonucleotide
  Sense strand starting at position 2318 of SEQ ID NO: 913397
acaugcguccguguguaaa

SEQ ID NO: 924049 - RNA, 19 nt, Artificial Sequence
  Description of Artificial Sequence: Synthetic oligonucleotide
  Antisense strand to SEQ ID NO: 924048
uuuacacacggacgcaugu

SEQ ID NO: 924050 - RNA, 19 nt, Artificial Sequence
  Description of Artificial Sequence: Synthetic oligonucleotide
  Sense strand starting at position 531 of SEQ ID NO: 913397
gcauuacaggcaugagaga

SEQ ID NO: 924051 - RNA, 19 nt, Artificial Sequence
  Description of Artificial Sequence: Synthetic oligonucleotide
  Antisense strand to SEQ ID NO: 924050
ucucucaugccuguaaugc

SEQ ID NO: 924052 - RNA, 19 nt, Artificial Sequence
  Description of Artificial Sequence: Synthetic oligonucleotide
  Sense strand starting at position 2842 of SEQ ID NO: 913397
ccggaauaauacccaguca

SEQ ID NO: 924053 - RNA, 19 nt, Artificial Sequence
  Description of Artificial Sequence: Synthetic oligonucleotide
  Antisense strand to SEQ ID NO: 924052
ugacuggguauuauuccgg

SEQ ID NO: 924054 - RNA, 19 nt, Artificial Sequence
  Description of Artificial Sequence: Synthetic oligonucleotide
  Sense strand starting at position 1634 of SEQ ID NO: 913397
guggguuugcgguugcgaa

SEQ ID NO: 924055 - RNA, 19 nt, Artificial Sequence
  Description of Artificial Sequence: Synthetic oligonucleotide
  Antisense strand to SEQ ID NO: 924054
uucgcaaccgcaaacccac

SEQ ID NO: 924056 - RNA, 19 nt, Artificial Sequence
  Description of Artificial Sequence: Synthetic oligonucleotide
  Sense strand starting at position 3391 of SEQ ID NO: 913397
ugucguguuuguaugauug

SEQ ID NO: 924057 - RNA, 19 nt, Artificial Sequence
  Description of Artificial Sequence: Synthetic oligonucleotide
  Antisense strand to SEQ ID NO: 924056
caaucauacaaacacgaca

SEQ ID NO: 924058 - RNA, 19 nt, Artificial Sequence
  Description of Artificial Sequence: Synthetic oligonucleotide
  Sense strand starting at position 3434 of SEQ ID NO: 913397
gacgaagugucaucuaaau

SEQ ID NO: 924059 - RNA, 19 nt, Artificial Sequence
  Description of Artificial Sequence: Synthetic oligonucleotide
  Antisense strand to SEQ ID NO: 924058
auuuagaugacacuucguc

SEQ ID NO: 924060 - RNA, 19 nt, Artificial Sequence
  Description of Artificial Sequence: Synthetic oligonucleotide
  Sense strand starting at position 662 of SEQ ID NO: 913397
cuggaauggcaguauuguu

SEQ ID NO: 924061 - RNA, 19 nt, Artificial Sequence
  Description of Artificial Sequence: Synthetic oligonucleotide
  Antisense strand to SEQ ID NO: 924060
aacaauacugccauuccag

SEQ ID NO: 924062 - RNA, 19 nt, Artificial Sequence
  Description of Artificial Sequence: Synthetic oligonucleotide
  Sense strand starting at position 2959 of SEQ ID NO: 913397
ucaggagauucgucacuca

SEQ ID NO: 924063 - RNA, 19 nt, Artificial Sequence
  Description of Artificial Sequence: Synthetic oligonucleotide
  Antisense strand to SEQ ID NO: 924062
ugagugacgaaucuccuga

SEQ ID NO: 924064 - RNA, 19 nt, Artificial Sequence
  Description of Artificial Sequence: Synthetic oligonucleotide
  Sense strand starting at position 2382 of SEQ ID NO: 913397
auggauauguguuuccaug

SEQ ID NO: 924065 - RNA, 19 nt, Artificial Sequence
  Description of Artificial Sequence: Synthetic oligonucleotide
  Antisense strand to SEQ ID NO: 924064
cauggaaacacauauccau

SEQ ID NO: 924066 - RNA, 19 nt, Artificial Sequence
  Description of Artificial Sequence: Synthetic oligonucleotide
  Sense strand starting at position 3521 of SEQ ID NO: 913397
auccaaguguuuccuaaac

SEQ ID NO: 924067 - RNA, 19 nt, Artificial Sequence
  Description of Artificial Sequence: Synthetic oligonucleotide
  Antisense strand to SEQ ID NO: 924066
guuuaggaaacacuuggau

SEQ ID NO: 924068 - RNA, 19 nt, Artificial Sequence
  Description of Artificial Sequence: Synthetic oligonucleotide
  Sense strand starting at position 3079 of SEQ ID NO: 913397
ccaguuugaucucucacac

SEQ ID NO: 924069 - RNA, 19 nt, Artificial Sequence
  Description of Artificial Sequence: Synthetic oligonucleotide
  Antisense strand to SEQ ID NO: 924068
gugugagagaucaaacugg

SEQ ID NO: 924070 - RNA, 19 nt, Artificial Sequence
  Description of Artificial Sequence: Synthetic oligonucleotide
  Sense strand starting at position 2861 of SEQ ID NO: 913397
acaauugaguaagggauuu

SEQ ID NO: 924071 - RNA, 19 nt, Artificial Sequence
  Description of Artificial Sequence: Synthetic oligonucleotide
  Antisense strand to SEQ ID NO: 924070
aaaucccuuacucaauugu

SEQ ID NO: 924072 - RNA, 19 nt, Artificial Sequence
  Description of Artificial Sequence: Synthetic oligonucleotide
  Sense strand starting at position 1057 of SEQ ID NO: 913397
gaucaugucaaaggugguu

SEQ ID NO: 924073 - RNA, 19 nt, Artificial Sequence
  Description of Artificial Sequence: Synthetic oligonucleotide
  Antisense strand to SEQ ID NO: 924072
aaccaccuuugacaugauc

SEQ ID NO: 924074 - RNA, 19 nt, Artificial Sequence
  Description of Artificial Sequence: Synthetic oligonucleotide
  Sense strand starting at position 2371 of SEQ ID NO: 913397
cuuugcaaagcauggauau

SEQ ID NO: 924075 - RNA, 19 nt, Artificial Sequence
  Description of Artificial Sequence: Synthetic oligonucleotide
  Antisense strand to SEQ ID NO: 924074
auauccaugcuuugcaaag

SEQ ID NO: 924076 - RNA, 19 nt, Artificial Sequence
  Description of Artificial Sequence: Synthetic oligonucleotide
  Sense strand starting at position 2962 of SEQ ID NO: 913397
ggagauucgucacucaccu

SEQ ID NO: 924077 - RNA, 19 nt, Artificial Sequence
  Description of Artificial Sequence: Synthetic oligonucleotide
  Antisense strand to SEQ ID NO: 924076
aggugagugacgaaucucc

SEQ ID NO: 924078 - RNA, 19 nt, Artificial Sequence
  Description of Artificial Sequence: Synthetic oligonucleotide
  Sense strand starting at position 3005 of SEQ ID NO: 913397
aaguuaguuugggcucaaa

SEQ ID NO: 924079 - RNA, 19 nt, Artificial Sequence
  Description of Artificial Sequence: Synthetic oligonucleotide
  Antisense strand to SEQ ID NO: 924078
uuugagcccaaacuaacuu

SEQ ID NO: 924080 - RNA, 19 nt, Artificial Sequence
  Description of Artificial Sequence: Synthetic oligonucleotide
  Sense strand starting at position 3519 of SEQ ID NO: 913397
uuauccaaguguuuccuaa

SEQ ID NO: 924081 - RNA, 19 nt, Artificial Sequence
  Description of Artificial Sequence: Synthetic oligonucleotide
  Antisense strand to SEQ ID NO: 924080
uuaggaaacacuuggauaa

SEQ ID NO: 924082 - RNA, 19 nt, Artificial Sequence
  Description of Artificial Sequence: Synthetic oligonucleotide
  Sense strand starting at position 1059 of SEQ ID NO: 913397
ucaugucaaaggugguuau

SEQ ID NO: 924083 - RNA, 19 nt, Artificial Sequence
  Description of Artificial Sequence: Synthetic oligonucleotide
  Antisense strand to SEQ ID NO: 924082
auaaccaccuuugacauga

SEQ ID NO: 924084 - RNA, 19 nt, Artificial Sequence
  Description of Artificial Sequence: Synthetic oligonucleotide
  Sense strand starting at position 1060 of SEQ ID NO: 913397
caugucaaaggugguuauu

SEQ ID NO: 924085 - RNA, 19 nt, Artificial Sequence
  Description of Artificial Sequence: Synthetic oligonucleotide
  Antisense strand to SEQ ID NO: 924084
aauaaccaccuuugacaug

SEQ ID NO: 924086 - RNA, 19 nt, Artificial Sequence
  Description of Artificial Sequence: Synthetic oligonucleotide
  Sense strand starting at position 599 of SEQ ID NO: 913397
uccagaauuugaggucaga

SEQ ID NO: 924087 - RNA, 19 nt, Artificial Sequence
  Description of Artificial Sequence: Synthetic oligonucleotide
  Antisense strand to SEQ ID NO: 924086
ucugaccucaaauucugga

SEQ ID NO: 924088 - RNA, 19 nt, Artificial Sequence
  Description of Artificial Sequence: Synthetic oligonucleotide
  Sense strand starting at position 2774 of SEQ ID NO: 913397
cccuaagcugcuuagcaaa

SEQ ID NO: 924089 - RNA, 19 nt, Artificial Sequence
  Description of Artificial Sequence: Synthetic oligonucleotide
  Antisense strand to SEQ ID NO: 924088
uuugcuaagcagcuuaggg

SEQ ID NO: 924090 - RNA, 19 nt, Artificial Sequence
  Description of Artificial Sequence: Synthetic oligonucleotide
  Sense strand starting at position 3761 of SEQ ID NO: 913397
cuaagucuuugagucccau

SEQ ID NO: 924091 - RNA, 19 nt, Artificial Sequence
  Description of Artificial Sequence: Synthetic oligonucleotide
  Antisense strand to SEQ ID NO: 924090
augggacucaaagacuuag

SEQ ID NO: 924092 - RNA, 19 nt, Artificial Sequence
  Description of Artificial Sequence: Synthetic oligonucleotide
  Sense strand starting at position 2251 of SEQ ID NO: 913397
acuuguccuauguaaacgu

SEQ ID NO: 924093 - RNA, 19 nt, Artificial Sequence
  Description of Artificial Sequence: Synthetic oligonucleotide
  Antisense strand to SEQ ID NO: 924092
acguuuacauaggacaagu

SEQ ID NO: 924094 - RNA, 19 nt, Artificial Sequence
  Description of Artificial Sequence: Synthetic oligonucleotide
  Sense strand starting at position 2384 of SEQ ID NO: 913397
ggauauguguuuccaugug

SEQ ID NO: 924095 - RNA, 19 nt, Artificial Sequence
  Description of Artificial Sequence: Synthetic oligonucleotide
  Antisense strand to SEQ ID NO: 924094
cacauggaaacacauaucc

SEQ ID NO: 924096 - RNA, 19 nt, Artificial Sequence
  Description of Artificial Sequence: Synthetic oligonucleotide
  Sense strand starting at position 2332 of SEQ ID NO: 913397
guaaacuuguauccauugu

SEQ ID NO: 924097 - RNA, 19 nt, Artificial Sequence
  Description of Artificial Sequence: Synthetic oligonucleotide
  Antisense strand to SEQ ID NO: 924096
acaauggauacaaguuuac

SEQ ID NO: 924098 - RNA, 19 nt, Artificial Sequence
  Description of Artificial Sequence: Synthetic oligonucleotide
  Sense strand starting at position 2817 of SEQ ID NO: 913398
cgaauagaucugcacaaug

SEQ ID NO: 924099 - RNA, 19 nt, Artificial Sequence
  Description of Artificial Sequence: Synthetic oligonucleotide
  Antisense strand to SEQ ID NO: 924098
cauugugcagaucuauucg

SEQ ID NO: 924100 - RNA, 19 nt, Artificial Sequence
  Description of Artificial Sequence: Synthetic oligonucleotide
  Sense strand starting at position 1742 of SEQ ID NO: 913398
ggcccugaaucaucaaaga

SEQ ID NO: 924101 - RNA, 19 nt, Artificial Sequence
  Description of Artificial Sequence: Synthetic oligonucleotide
  Antisense strand to SEQ ID NO: 924100
ucuuugaugauucagggcc

SEQ ID NO: 924102 - RNA, 19 nt, Artificial Sequence
  Description of Artificial Sequence: Synthetic oligonucleotide
  Sense strand starting at position 2477 of SEQ ID NO: 913398
guaauaauuugccuuugua

SEQ ID NO: 924103 - RNA, 19 nt, Artificial Sequence
  Description of Artificial Sequence: Synthetic oligonucleotide
  Antisense strand to SEQ ID NO: 924102
uacaaaggcaaauuauuac

SEQ ID NO: 924104 - RNA, 19 nt, Artificial Sequence
  Description of Artificial Sequence: Synthetic oligonucleotide
  Sense strand starting at position 3804 of SEQ ID NO: 913398
aggcuuaaucauuaaguau

SEQ ID NO: 924105 - RNA, 19 nt, Artificial Sequence
  Description of Artificial Sequence: Synthetic oligonucleotide
  Antisense strand to SEQ ID NO: 924104
auacuuaaugauuaagccu

SEQ ID NO: 924106 - RNA, 19 nt, Artificial Sequence
  Description of Artificial Sequence: Synthetic oligonucleotide
  Sense strand starting at position 1408 of SEQ ID NO: 913398
uuagcaauacucgaugaca

SEQ ID NO: 924107 - RNA, 19 nt, Artificial Sequence
  Description of Artificial Sequence: Synthetic oligonucleotide
  Antisense strand to SEQ ID NO: 924106
ugucaucgaguauugcuaa

SEQ ID NO: 924108 - RNA, 19 nt, Artificial Sequence
  Description of Artificial Sequence: Synthetic oligonucleotide
  Sense strand starting at position 1411 of SEQ ID NO: 913398
gcaauacucgaugacauca

SEQ ID NO: 924109 - RNA, 19 nt, Artificial Sequence
  Description of Artificial Sequence: Synthetic oligonucleotide
  Antisense strand to SEQ ID NO: 924108
ugaugucaucgaguauugc

SEQ ID NO: 924110 - RNA, 19 nt, Artificial Sequence
  Description of Artificial Sequence: Synthetic oligonucleotide
  Sense strand starting at position 1397 of SEQ ID NO: 913398
agggcacaucauuagcaau

SEQ ID NO: 924111 - RNA, 19 nt, Artificial Sequence
  Description of Artificial Sequence: Synthetic oligonucleotide
  Antisense strand to SEQ ID NO: 924110
auugcuaaugaugugcccu

SEQ ID NO: 924112 - RNA, 19 nt, Artificial Sequence
  Description of Artificial Sequence: Synthetic oligonucleotide
  Sense strand starting at position 2613 of SEQ ID NO: 913398
gaaguaaauguuuaagcau

SEQ ID NO: 924113 - RNA, 19 nt, Artificial Sequence
  Description of Artificial Sequence: Synthetic oligonucleotide
  Antisense strand to SEQ ID NO: 924112
augcuuaaacauuuacuuc

SEQ ID NO: 924114 - RNA, 19 nt, Artificial Sequence
  Description of Artificial Sequence: Synthetic oligonucleotide
  Sense strand starting at position 603 of SEQ ID NO: 913398
agggauauuuaauacacuu

SEQ ID NO: 924115 - RNA, 19 nt, Artificial Sequence
  Description of Artificial Sequence: Synthetic oligonucleotide
  Antisense strand to SEQ ID NO: 924114
aaguguauuaaauaucccu

SEQ ID NO: 924116 - RNA, 19 nt, Artificial Sequence
  Description of Artificial Sequence: Synthetic oligonucleotide
  Sense strand starting at position 3750 of SEQ ID NO: 913398
ggucaaaggaaaugcuaau

SEQ ID NO: 924117 - RNA, 19 nt, Artificial Sequence
  Description of Artificial Sequence: Synthetic oligonucleotide
  Antisense strand to SEQ ID NO: 924116
auuagcauuuccuuugacc

SEQ ID NO: 924118 - RNA, 19 nt, Artificial Sequence
  Description of Artificial Sequence: Synthetic oligonucleotide
  Sense strand starting at position 1339 of SEQ ID NO: 913398
agaagagguuucgugagaa

SEQ ID NO: 924119 - RNA, 19 nt, Artificial Sequence
  Description of Artificial Sequence: Synthetic oligonucleotide
  Antisense strand to SEQ ID NO: 924118
uucucacgaaaccucuucu

SEQ ID NO: 924120 - RNA, 19 nt, Artificial Sequence
  Description of Artificial Sequence: Synthetic oligonucleotide
  Sense strand starting at position 2399 of SEQ ID NO: 913398
gcaucuauuugguuugggu

SEQ ID NO: 924121 - RNA, 19 nt, Artificial Sequence
  Description of Artificial Sequence: Synthetic oligonucleotide
  Antisense strand to SEQ ID NO: 924120
acccaaaccaaauagaugc

SEQ ID NO: 924122 - RNA, 19 nt, Artificial Sequence
  Description of Artificial Sequence: Synthetic oligonucleotide
  Sense strand starting at position 1718 of SEQ ID NO: 913398
cugcaauaucgugagggaa

SEQ ID NO: 924123 - RNA, 19 nt, Artificial Sequence
  Description of Artificial Sequence: Synthetic oligonucleotide
  Antisense strand to SEQ ID NO: 924122
uucccucacgauauugcag

SEQ ID NO: 924124 - RNA, 19 nt, Artificial Sequence
  Description of Artificial Sequence: Synthetic oligonucleotide
  Sense strand starting at position 2476 of SEQ ID NO: 913398
uguaauaauuugccuuugu

SEQ ID NO: 924125 - RNA, 19 nt, Artificial Sequence
  Description of Artificial Sequence: Synthetic oligonucleotide
  Antisense strand to SEQ ID NO: 924124
acaaaggcaaauuauuaca

SEQ ID NO: 924126 - RNA, 19 nt, Artificial Sequence
  Description of Artificial Sequence: Synthetic oligonucleotide
  Sense strand starting at position 2788 of SEQ ID NO: 913398
cuggcaaacugguugaaga

SEQ ID NO: 924127 - RNA, 19 nt, Artificial Sequence
  Description of Artificial Sequence: Synthetic oligonucleotide
  Antisense strand to SEQ ID NO: 924126
ucuucaaccaguuugccag

SEQ ID NO: 924128 - RNA, 19 nt, Artificial Sequence
  Description of Artificial Sequence: Synthetic oligonucleotide
  Sense strand starting at position 2789 of SEQ ID NO: 913398
uggcaaacugguugaagau

SEQ ID NO: 924129 - RNA, 19 nt, Artificial Sequence
  Description of Artificial Sequence: Synthetic oligonucleotide
  Antisense strand to SEQ ID NO: 924128
aucuucaaccaguuugcca

SEQ ID NO: 924130 - RNA, 19 nt, Artificial Sequence
  Description of Artificial Sequence: Synthetic oligonucleotide
  Sense strand starting at position 3803 of SEQ ID NO: 913398
gaggcuuaaucauuaagua

SEQ ID NO: 924131 - RNA, 19 nt, Artificial Sequence
  Description of Artificial Sequence: Synthetic oligonucleotide
  Antisense strand to SEQ ID NO: 924130
uacuuaaugauuaagccuc

SEQ ID NO: 924132 - RNA, 19 nt, Artificial Sequence
  Description of Artificial Sequence: Synthetic oligonucleotide
  Sense strand starting at position 2538 of SEQ ID NO: 913398
aggcauauaucuguuagaa

SEQ ID NO: 924133 - RNA, 19 nt, Artificial Sequence
  Description of Artificial Sequence: Synthetic oligonucleotide
  Antisense strand to SEQ ID NO: 924132
uucuaacagauauaugccu

SEQ ID NO: 924134 - RNA, 19 nt, Artificial Sequence
  Description of Artificial Sequence: Synthetic oligonucleotide
  Sense strand starting at position 699 of SEQ ID NO: 913398
ucuguuaaagcacaguuaa

SEQ ID NO: 924135 - RNA, 19 nt, Artificial Sequence
  Description of Artificial Sequence: Synthetic oligonucleotide
  Antisense strand to SEQ ID NO: 924134
uuaacugugcuuuaacaga

SEQ ID NO: 924136 - RNA, 19 nt, Artificial Sequence
  Description of Artificial Sequence: Synthetic oligonucleotide
  Sense strand starting at position 3559 of SEQ ID NO: 913398
cguuaaugacuuugaauag

SEQ ID NO: 924137 - RNA, 19 nt, Artificial Sequence
  Description of Artificial Sequence: Synthetic oligonucleotide
  Antisense strand to SEQ ID NO: 924136
cuauucaaagucauuaacg

SEQ ID NO: 924138 - RNA, 19 nt, Artificial Sequence
  Description of Artificial Sequence: Synthetic oligonucleotide
  Sense strand starting at position 2647 of SEQ ID NO: 913398
gcaaucuguguccacaaag

SEQ ID NO: 924139 - RNA, 19 nt, Artificial Sequence
  Description of Artificial Sequence: Synthetic oligonucleotide
  Antisense strand to SEQ ID NO: 924138
cuuuguggacacagauugc

SEQ ID NO: 924140 - RNA, 19 nt, Artificial Sequence
  Description of Artificial Sequence: Synthetic oligonucleotide
  Sense strand starting at position 3385 of SEQ ID NO: 913398
guguaaagugcuuaauaga

SEQ ID NO: 924141 - RNA, 19 nt, Artificial Sequence
  Description of Artificial Sequence: Synthetic oligonucleotide
  Antisense strand to SEQ ID NO: 924140
ucuauuaagcacuuuacac

SEQ ID NO: 924142 - RNA, 19 nt, Artificial Sequence
  Description of Artificial Sequence: Synthetic oligonucleotide
  Sense strand starting at position 2612 of SEQ ID NO: 913398
ugaaguaaauguuuaagca

SEQ ID NO: 924143 - RNA, 19 nt, Artificial Sequence
  Description of Artificial Sequence: Synthetic oligonucleotide
  Antisense strand to SEQ ID NO: 924142
ugcuuaaacauuuacuuca

SEQ ID NO: 924144 - RNA, 19 nt, Artificial Sequence
  Description of Artificial Sequence: Synthetic oligonucleotide
  Sense strand starting at position 1410 of SEQ ID NO: 913398
agcaauacucgaugacauc

SEQ ID NO: 924145 - RNA, 19 nt, Artificial Sequence
  Description of Artificial Sequence: Synthetic oligonucleotide
  Antisense strand to SEQ ID NO: 924144
gaugucaucgaguauugcu

SEQ ID NO: 924146 - RNA, 19 nt, Artificial Sequence
  Description of Artificial Sequence: Synthetic oligonucleotide
  Sense strand starting at position 925 of SEQ ID NO: 913398
cagcuuagauagucuugaa

SEQ ID NO: 924147 - RNA, 19 nt, Artificial Sequence
  Description of Artificial Sequence: Synthetic oligonucleotide
  Antisense strand to SEQ ID NO: 924146
uucaagacuaucuaagcug

SEQ ID NO: 924148 - RNA, 19 nt, Artificial Sequence
  Description of Artificial Sequence: Synthetic oligonucleotide
  Sense strand starting at position 1631 of SEQ ID NO: 913398
acgagacugcucggaagga

SEQ ID NO: 924149 - RNA, 19 nt, Artificial Sequence
  Description of Artificial Sequence: Synthetic oligonucleotide
  Antisense strand to SEQ ID NO: 924148
uccuuccgagcagucucgu

SEQ ID NO: 924150 - RNA, 19 nt, Artificial Sequence
  Description of Artificial Sequence: Synthetic oligonucleotide
  Sense strand starting at position 3550 of SEQ ID NO: 913398
guaacucuccguuaaugac

SEQ ID NO: 924151 - RNA, 19 nt, Artificial Sequence
  Description of Artificial Sequence: Synthetic oligonucleotide
  Antisense strand to SEQ ID NO: 924150
gucauuaacggagaguuac

SEQ ID NO: 924152 - RNA, 19 nt, Artificial Sequence
  Description of Artificial Sequence: Synthetic oligonucleotide
  Sense strand starting at position 1455 of SEQ ID NO: 913398
ccucuaaaguucucaacga

SEQ ID NO: 924153 - RNA, 19 nt, Artificial Sequence
  Description of Artificial Sequence: Synthetic oligonucleotide
  Antisense strand to SEQ ID NO: 924152
ucguugagaacuuuagagg

SEQ ID NO: 924154 - RNA, 19 nt, Artificial Sequence
  Description of Artificial Sequence: Synthetic oligonucleotide
  Sense strand starting at position 2719 of SEQ ID NO: 913398
ggccaagucccaggauacu

SEQ ID NO: 924155 - RNA, 19 nt, Artificial Sequence
  Description of Artificial Sequence: Synthetic oligonucleotide
  Antisense strand to SEQ ID NO: 924154
aguauccugggacuuggcc

SEQ ID NO: 924156 - RNA, 19 nt, Artificial Sequence
  Description of Artificial Sequence: Synthetic oligonucleotide
  Sense strand starting at position 157 of SEQ ID NO: 913398
uguccauggcuuugaaaga

SEQ ID NO: 924157 - RNA, 19 nt, Artificial Sequence
  Description of Artificial Sequence: Synthetic oligonucleotide
  Antisense strand to SEQ ID NO: 924156
ucuuucaaagccauggaca

SEQ ID NO: 924158 - RNA, 19 nt, Artificial Sequence
  Description of Artificial Sequence: Synthetic oligonucleotide
  Sense strand starting at position 1736 of SEQ ID NO: 913398
agccgaggcccugaaucau

SEQ ID NO: 924159 - RNA, 19 nt, Artificial Sequence
  Description of Artificial Sequence: Synthetic oligonucleotide
  Antisense strand to SEQ ID NO: 924158
augauucagggccucggcu

SEQ ID NO: 924160 - RNA, 19 nt, Artificial Sequence
  Description of Artificial Sequence: Synthetic oligonucleotide
  Sense strand starting at position 3556 of SEQ ID NO: 913398
cuccguuaaugacuuugaa

SEQ ID NO: 924161 - RNA, 19 nt, Artificial Sequence
  Description of Artificial Sequence: Synthetic oligonucleotide
  Antisense strand to SEQ ID NO: 924160
uucaaagucauuaacggag

SEQ ID NO: 924162 - RNA, 19 nt, Artificial Sequence
  Description of Artificial Sequence: Synthetic oligonucleotide
  Sense strand starting at position 2152 of SEQ ID NO: 913398
gcagacgugcgauaggaaa

SEQ ID NO: 924163 - RNA, 19 nt, Artificial Sequence
  Description of Artificial Sequence: Synthetic oligonucleotide
  Antisense strand to SEQ ID NO: 924162
uuuccuaucgcacgucugc

SEQ ID NO: 924164 - RNA, 19 nt, Artificial Sequence
  Description of Artificial Sequence: Synthetic oligonucleotide
  Sense strand starting at position 3596 of SEQ ID NO: 913398
uuacuaagccuguaacugu

SEQ ID NO: 924165 - RNA, 19 nt, Artificial Sequence
  Description of Artificial Sequence: Synthetic oligonucleotide
  Antisense strand to SEQ ID NO: 924164
acaguuacaggcuuaguaa

SEQ ID NO: 924166 - RNA, 19 nt, Artificial Sequence
  Description of Artificial Sequence: Synthetic oligonucleotide
  Sense strand starting at position 3681 of SEQ ID NO: 913398
gguugaguauccuuaaucc

SEQ ID NO: 924167 - RNA, 19 nt, Artificial Sequence
  Description of Artificial Sequence: Synthetic oligonucleotide
  Antisense strand to SEQ ID NO: 924166
ggauuaaggauacucaacc

SEQ ID NO: 924168 - RNA, 19 nt, Artificial Sequence
  Description of Artificial Sequence: Synthetic oligonucleotide
  Sense strand starting at position 2582 of SEQ ID NO: 913398
auaugaaugcgaggucauc

SEQ ID NO: 924169 - RNA, 19 nt, Artificial Sequence
  Description of Artificial Sequence: Synthetic oligonucleotide
  Antisense strand to SEQ ID NO: 924168
gaugaccucgcauucauau

SEQ ID NO: 924170 - RNA, 19 nt, Artificial Sequence
  Description of Artificial Sequence: Synthetic oligonucleotide
  Sense strand starting at position 2646 of SEQ ID NO: 913398
agcaaucuguguccacaaa

SEQ ID NO: 924171 - RNA, 19 nt, Artificial Sequence
  Description of Artificial Sequence: Synthetic oligonucleotide
  Antisense strand to SEQ ID NO: 924170
uuuguggacacagauugcu

SEQ ID NO: 924172 - RNA, 19 nt, Artificial Sequence
  Description of Artificial Sequence: Synthetic oligonucleotide
  Sense strand starting at position 3672 of SEQ ID NO: 913398
guuauuacagguugaguau

SEQ ID NO: 924173 - RNA, 19 nt, Artificial Sequence
  Description of Artificial Sequence: Synthetic oligonucleotide
  Antisense strand to SEQ ID NO: 924172
auacucaaccuguaauaac

SEQ ID NO: 924174 - RNA, 19 nt, Artificial Sequence
  Description of Artificial Sequence: Synthetic oligonucleotide
  Sense strand starting at position 2816 of SEQ ID NO: 913398
gcgaauagaucugcacaau

SEQ ID NO: 924175 - RNA, 19 nt, Artificial Sequence
  Description of Artificial Sequence: Synthetic oligonucleotide
  Antisense strand to SEQ ID NO: 924174
auugugcagaucuauucgc

SEQ ID NO: 924176 - RNA, 19 nt, Artificial Sequence
  Description of Artificial Sequence: Synthetic oligonucleotide
  Sense strand starting at position 2154 of SEQ ID NO: 913398
agacgugcgauaggaaauu

SEQ ID NO: 924177 - RNA, 19 nt, Artificial Sequence
  Description of Artificial Sequence: Synthetic oligonucleotide
  Antisense strand to SEQ ID NO: 924176
aauuuccuaucgcacgucu

SEQ ID NO: 924178 - RNA, 19 nt, Artificial Sequence
  Description of Artificial Sequence: Synthetic oligonucleotide
  Sense strand starting at position 2485 of SEQ ID NO: 913399
cgaauagaucugcacaaug

SEQ ID NO: 924179 - RNA, 19 nt, Artificial Sequence
  Description of Artificial Sequence: Synthetic oligonucleotide
  Antisense strand to SEQ ID NO: 924178
cauugugcagaucuauucg

SEQ ID NO: 924180 - RNA, 19 nt, Artificial Sequence
  Description of Artificial Sequence: Synthetic oligonucleotide
  Sense strand starting at position 1410 of SEQ ID NO: 913399
ggcccugaaucaucaaaga

SEQ ID NO: 924181 - RNA, 19 nt, Artificial Sequence
  Description of Artificial Sequence: Synthetic oligonucleotide
  Antisense strand to SEQ ID NO: 924180
ucuuugaugauucagggcc

SEQ ID NO: 924182 - RNA, 19 nt, Artificial Sequence
  Description of Artificial Sequence: Synthetic oligonucleotide
  Sense strand starting at position 2145 of SEQ ID NO: 913399
guaauaauuugccuuugua

SEQ ID NO: 924183 - RNA, 19 nt, Artificial Sequence
  Description of Artificial Sequence: Synthetic oligonucleotide
  Antisense strand to SEQ ID NO: 924182
uacaaaggcaaauuauuac

SEQ ID NO: 924184 - RNA, 19 nt, Artificial Sequence
  Description of Artificial Sequence: Synthetic oligonucleotide
  Sense strand starting at position 3472 of SEQ ID NO: 913399
aggcuuaaucauuaaguau

SEQ ID NO: 924185 - RNA, 19 nt, Artificial Sequence
  Description of Artificial Sequence: Synthetic oligonucleotide
  Antisense strand to SEQ ID NO: 924184
auacuuaaugauuaagccu

SEQ ID NO: 924186 - RNA, 19 nt, Artificial Sequence
  Description of Artificial Sequence: Synthetic oligonucleotide
  Sense strand starting at position 1076 of SEQ ID NO: 913399
uuagcaauacucgaugaca

SEQ ID NO: 924187 - RNA, 19 nt, Artificial Sequence
  Description of Artificial Sequence: Synthetic oligonucleotide
  Antisense strand to SEQ ID NO: 924186
ugucaucgaguauugcuaa

SEQ ID NO: 924188 - RNA, 19 nt, Artificial Sequence
  Description of Artificial Sequence: Synthetic oligonucleotide
  Sense strand starting at position 1079 of SEQ ID NO: 913399
gcaauacucgaugacauca

SEQ ID NO: 924189 - RNA, 19 nt, Artificial Sequence
  Description of Artificial Sequence: Synthetic oligonucleotide
  Antisense strand to SEQ ID NO: 924188
ugaugucaucgaguauugc

SEQ ID NO: 924190 - RNA, 19 nt, Artificial Sequence
  Description of Artificial Sequence: Synthetic oligonucleotide
  Sense strand starting at position 1065 of SEQ ID NO: 913399
agggcacaucauuagcaau

SEQ ID NO: 924191 - RNA, 19 nt, Artificial Sequence
  Description of Artificial Sequence: Synthetic oligonucleotide
  Antisense strand to SEQ ID NO: 924190
auugcuaaugaugugcccu

SEQ ID NO: 924192 - RNA, 19 nt, Artificial Sequence
  Description of Artificial Sequence: Synthetic oligonucleotide
  Sense strand starting at position 2281 of SEQ ID NO: 913399
gaaguaaauguuuaagcau

SEQ ID NO: 924193 - RNA, 19 nt, Artificial Sequence
  Description of Artificial Sequence: Synthetic oligonucleotide
  Antisense strand to SEQ ID NO: 924192
augcuuaaacauuuacuuc

SEQ ID NO: 924194 - RNA, 19 nt, Artificial Sequence
  Description of Artificial Sequence: Synthetic oligonucleotide
  Sense strand starting at position 271 of SEQ ID NO: 913399
agggauauuuaauacacuu

SEQ ID NO: 924195 - RNA, 19 nt, Artificial Sequence
  Description of Artificial Sequence: Synthetic oligonucleotide
  Antisense strand to SEQ ID NO: 924194
aaguguauuaaauaucccu

SEQ ID NO: 924196 - RNA, 19 nt, Artificial Sequence
  Description of Artificial Sequence: Synthetic oligonucleotide
  Sense strand starting at position 3418 of SEQ ID NO: 913399
ggucaaaggaaaugcuaau

SEQ ID NO: 924197 - RNA, 19 nt, Artificial Sequence
  Description of Artificial Sequence: Synthetic oligonucleotide
  Antisense strand to SEQ ID NO: 924196
auuagcauuuccuuugacc

SEQ ID NO: 924198 - RNA, 19 nt, Artificial Sequence
  Description of Artificial Sequence: Synthetic oligonucleotide
  Sense strand starting at position 1007 of SEQ ID NO: 913399
agaagagguuucgugagaa

SEQ ID NO: 924199 - RNA, 19 nt, Artificial Sequence
  Description of Artificial Sequence: Synthetic oligonucleotide
  Antisense strand to SEQ ID NO: 924198
uucucacgaaaccucuucu

SEQ ID NO: 924200 - RNA, 19 nt, Artificial Sequence
  Description of Artificial Sequence: Synthetic oligonucleotide
  Sense strand starting at position 2067 of SEQ ID NO: 913399
gcaucuauuugguuugggu

SEQ ID NO: 924201 - RNA, 19 nt, Artificial Sequence
  Description of Artificial Sequence: Synthetic oligonucleotide
  Antisense strand to SEQ ID NO: 924200
acccaaaccaaauagaugc

SEQ ID NO: 924202 - RNA, 19 nt, Artificial Sequence
  Description of Artificial Sequence: Synthetic oligonucleotide
  Sense strand starting at position 1386 of SEQ ID NO: 913399
cugcaauaucgugagggaa

SEQ ID NO: 924203 - RNA, 19 nt, Artificial Sequence
  Description of Artificial Sequence: Synthetic oligonucleotide
  Antisense strand to SEQ ID NO: 924202
uucccucacgauauugcag

SEQ ID NO: 924204 - RNA, 19 nt, Artificial Sequence
  Description of Artificial Sequence: Synthetic oligonucleotide
  Sense strand starting at position 2144 of SEQ ID NO: 913399
uguaauaauuugccuuugu

SEQ ID NO: 924205 - RNA, 19 nt, Artificial Sequence
  Description of Artificial Sequence: Synthetic oligonucleotide
  Antisense strand to SEQ ID NO: 924204
acaaaggcaaauuauuaca

SEQ ID NO: 924206 - RNA, 19 nt, Artificial Sequence
  Description of Artificial Sequence: Synthetic oligonucleotide
  Sense strand starting at position 2456 of SEQ ID NO: 913399
cuggcaaacugguugaaga

SEQ ID NO: 924207 - RNA, 19 nt, Artificial Sequence
  Description of Artificial Sequence: Synthetic oligonucleotide
  Antisense strand to SEQ ID NO: 924206
ucuucaaccaguuugccag

SEQ ID NO: 924208 - RNA, 19 nt, Artificial Sequence
  Description of Artificial Sequence: Synthetic oligonucleotide
  Sense strand starting at position 3902 of SEQ ID NO: 913399
aaaugauguguccacaguc

SEQ ID NO: 924209 - RNA, 19 nt, Artificial Sequence
  Description of Artificial Sequence: Synthetic oligonucleotide
  Antisense strand to SEQ ID NO: 924208
gacuguggacacaucauuu

SEQ ID NO: 924210 - RNA, 19 nt, Artificial Sequence
  Description of Artificial Sequence: Synthetic oligonucleotide
  Sense strand starting at position 2457 of SEQ ID NO: 913399
uggcaaacugguugaagau

SEQ ID NO: 924211 - RNA, 19 nt, Artificial Sequence
  Description of Artificial Sequence: Synthetic oligonucleotide
  Antisense strand to SEQ ID NO: 924210
aucuucaaccaguuugcca

SEQ ID NO: 924212 - RNA, 19 nt, Artificial Sequence
  Description of Artificial Sequence: Synthetic oligonucleotide
  Sense strand starting at position 3471 of SEQ ID NO: 913399
gaggcuuaaucauuaagua

SEQ ID NO: 924213 - RNA, 19 nt, Artificial Sequence
  Description of Artificial Sequence: Synthetic oligonucleotide
  Antisense strand to SEQ ID NO: 924212
uacuuaaugauuaagccuc

SEQ ID NO: 924214 - RNA, 19 nt, Artificial Sequence
  Description of Artificial Sequence: Synthetic oligonucleotide
  Sense strand starting at position 2206 of SEQ ID NO: 913399
aggcauauaucuguuagaa

SEQ ID NO: 924215 - RNA, 19 nt, Artificial Sequence
  Description of Artificial Sequence: Synthetic oligonucleotide
  Antisense strand to SEQ ID NO: 924214
uucuaacagauauaugccu

SEQ ID NO: 924216 - RNA, 19 nt, Artificial Sequence
  Description of Artificial Sequence: Synthetic oligonucleotide
  Sense strand starting at position 367 of SEQ ID NO: 913399
ucuguuaaagcacaguuaa

SEQ ID NO: 924217 - RNA, 19 nt, Artificial Sequence
  Description of Artificial Sequence: Synthetic oligonucleotide
  Antisense strand to SEQ ID NO: 924216
uuaacugugcuuuaacaga

SEQ ID NO: 924218 - RNA, 19 nt, Artificial Sequence
  Description of Artificial Sequence: Synthetic oligonucleotide
  Sense strand starting at position 3227 of SEQ ID NO: 913399
cguuaaugacuuugaauag

SEQ ID NO: 924219 - RNA, 19 nt, Artificial Sequence
  Description of Artificial Sequence: Synthetic oligonucleotide
  Antisense strand to SEQ ID NO: 924218
cuauucaaagucauuaacg

SEQ ID NO: 924220 - RNA, 19 nt, Artificial Sequence
  Description of Artificial Sequence: Synthetic oligonucleotide
  Sense strand starting at position 2315 of SEQ ID NO: 913399
gcaaucuguguccacaaag

SEQ ID NO: 924221 - RNA, 19 nt, Artificial Sequence
  Description of Artificial Sequence: Synthetic oligonucleotide
  Antisense strand to SEQ ID NO: 924220
cuuuguggacacagauugc

SEQ ID NO: 924222 - RNA, 19 nt, Artificial Sequence
  Description of Artificial Sequence: Synthetic oligonucleotide
  Sense strand starting at position 3053 of SEQ ID NO: 913399
guguaaagugcuuaauaga

SEQ ID NO: 924223 - RNA, 19 nt, Artificial Sequence
  Description of Artificial Sequence: Synthetic oligonucleotide
  Antisense strand to SEQ ID NO: 924222
ucuauuaagcacuuuacac

SEQ ID NO: 924224 - RNA, 19 nt, Artificial Sequence
  Description of Artificial Sequence: Synthetic oligonucleotide
  Sense strand starting at position 2280 of SEQ ID NO: 913399
ugaaguaaauguuuaagca

SEQ ID NO: 924225 - RNA, 19 nt, Artificial Sequence
  Description of Artificial Sequence: Synthetic oligonucleotide
  Antisense strand to SEQ ID NO: 924224
ugcuuaaacauuuacuuca

SEQ ID NO: 924226 - RNA, 19 nt, Artificial Sequence
  Description of Artificial Sequence: Synthetic oligonucleotide
  Sense strand starting at position 1078 of SEQ ID NO: 913399
agcaauacucgaugacauc

SEQ ID NO: 924227 - RNA, 19 nt, Artificial Sequence
  Description of Artificial Sequence: Synthetic oligonucleotide
  Antisense strand to SEQ ID NO: 924226
gaugucaucgaguauugcu

SEQ ID NO: 924228 - RNA, 19 nt, Artificial Sequence
  Description of Artificial Sequence: Synthetic oligonucleotide
  Sense strand starting at position 593 of SEQ ID NO: 913399
cagcuuagauagucuugaa

SEQ ID NO: 924229 - RNA, 19 nt, Artificial Sequence
  Description of Artificial Sequence: Synthetic oligonucleotide
  Antisense strand to SEQ ID NO: 924228
uucaagacuaucuaagcug

SEQ ID NO: 924230 - RNA, 19 nt, Artificial Sequence
  Description of Artificial Sequence: Synthetic oligonucleotide
  Sense strand starting at position 1299 of SEQ ID NO: 913399
acgagacugcucggaagga

SEQ ID NO: 924231 - RNA, 19 nt, Artificial Sequence
  Description of Artificial Sequence: Synthetic oligonucleotide
  Antisense strand to SEQ ID NO: 924230
uccuuccgagcagucucgu

SEQ ID NO: 924232 - RNA, 19 nt, Artificial Sequence
  Description of Artificial Sequence: Synthetic oligonucleotide
  Sense strand starting at position 3915 of SEQ ID NO: 913399
acagucaugcagcaaguaa

SEQ ID NO: 924233 - RNA, 19 nt, Artificial Sequence
  Description of Artificial Sequence: Synthetic oligonucleotide
  Antisense strand to SEQ ID NO: 924232
uuacuugcugcaugacugu

SEQ ID NO: 924234 - RNA, 19 nt, Artificial Sequence
  Description of Artificial Sequence: Synthetic oligonucleotide
  Sense strand starting at position 3218 of SEQ ID NO: 913399
guaacucuccguuaaugac

SEQ ID NO: 924235 - RNA, 19 nt, Artificial Sequence
  Description of Artificial Sequence: Synthetic oligonucleotide
  Antisense strand to SEQ ID NO: 924234
gucauuaacggagaguuac

SEQ ID NO: 924236 - RNA, 19 nt, Artificial Sequence
  Description of Artificial Sequence: Synthetic oligonucleotide
  Sense strand starting at position 1123 of SEQ ID NO: 913399
ccucuaaaguucucaacga

SEQ ID NO: 924237 - RNA, 19 nt, Artificial Sequence
  Description of Artificial Sequence: Synthetic oligonucleotide
  Antisense strand to SEQ ID NO: 924236
ucguugagaacuuuagagg

SEQ ID NO: 924238 - RNA, 19 nt, Artificial Sequence
  Description of Artificial Sequence: Synthetic oligonucleotide
  Sense strand starting at position 2387 of SEQ ID NO: 913399
ggccaagucccaggauacu

SEQ ID NO: 924239 - RNA, 19 nt, Artificial Sequence
  Description of Artificial Sequence: Synthetic oligonucleotide
  Antisense strand to SEQ ID NO: 924238
aguauccugggacuuggcc

SEQ ID NO: 924240 - RNA, 19 nt, Artificial Sequence
  Description of Artificial Sequence: Synthetic oligonucleotide
  Sense strand starting at position 1404 of SEQ ID NO: 913399
agccgaggcccugaaucau

SEQ ID NO: 924241 - RNA, 19 nt, Artificial Sequence
  Description of Artificial Sequence: Synthetic oligonucleotide
  Antisense strand to SEQ ID NO: 924240
augauucagggccucggcu

SEQ ID NO: 924242 - RNA, 19 nt, Artificial Sequence
  Description of Artificial Sequence: Synthetic oligonucleotide
  Sense strand starting at position 3224 of SEQ ID NO: 913399
cuccguuaaugacuuugaa

SEQ ID NO: 924243 - RNA, 19 nt, Artificial Sequence
  Description of Artificial Sequence: Synthetic oligonucleotide
  Antisense strand to SEQ ID NO: 924242
uucaaagucauuaacggag

SEQ ID NO: 924244 - RNA, 19 nt, Artificial Sequence
  Description of Artificial Sequence: Synthetic oligonucleotide
  Sense strand starting at position 3899 of SEQ ID NO: 913399
guuaaaugauguguccaca

SEQ ID NO: 924245 - RNA, 19 nt, Artificial Sequence
  Description of Artificial Sequence: Synthetic oligonucleotide
  Antisense strand to SEQ ID NO: 924244
uguggacacaucauuuaac

SEQ ID NO: 924246 - RNA, 19 nt, Artificial Sequence
  Description of Artificial Sequence: Synthetic oligonucleotide
  Sense strand starting at position 1820 of SEQ ID NO: 913399
gcagacgugcgauaggaaa

SEQ ID NO: 924247 - RNA, 19 nt, Artificial Sequence
  Description of Artificial Sequence: Synthetic oligonucleotide
  Antisense strand to SEQ ID NO: 924246
uuuccuaucgcacgucugc

SEQ ID NO: 924248 - RNA, 19 nt, Artificial Sequence
  Description of Artificial Sequence: Synthetic oligonucleotide
  Sense strand starting at position 3264 of SEQ ID NO: 913399
uuacuaagccuguaacugu

SEQ ID NO: 924249 - RNA, 19 nt, Artificial Sequence
  Description of Artificial Sequence: Synthetic oligonucleotide
  Antisense strand to SEQ ID NO: 924248
acaguuacaggcuuaguaa

SEQ ID NO: 924250 - RNA, 19 nt, Artificial Sequence
  Description of Artificial Sequence: Synthetic oligonucleotide
  Sense strand starting at position 3349 of SEQ ID NO: 913399
gguugaguauccuuaaucc

SEQ ID NO: 924251 - RNA, 19 nt, Artificial Sequence
  Description of Artificial Sequence: Synthetic oligonucleotide
  Antisense strand to SEQ ID NO: 924250
ggauuaaggauacucaacc

SEQ ID NO: 924252 - RNA, 19 nt, Artificial Sequence
  Description of Artificial Sequence: Synthetic oligonucleotide
  Sense strand starting at position 2250 of SEQ ID NO: 913399
auaugaaugcgaggucauc

SEQ ID NO: 924253 - RNA, 19 nt, Artificial Sequence
  Description of Artificial Sequence: Synthetic oligonucleotide
  Antisense strand to SEQ ID NO: 924252
gaugaccucgcauucauau

SEQ ID NO: 924254 - RNA, 19 nt, Artificial Sequence
  Description of Artificial Sequence: Synthetic oligonucleotide
  Sense strand starting at position 2314 of SEQ ID NO: 913399
agcaaucuguguccacaaa

SEQ ID NO: 924255 - RNA, 19 nt, Artificial Sequence
  Description of Artificial Sequence: Synthetic oligonucleotide
  Antisense strand to SEQ ID NO: 924254
uuuguggacacagauugcu

SEQ ID NO: 924256 - RNA, 19 nt, Artificial Sequence
  Description of Artificial Sequence: Synthetic oligonucleotide
  Sense strand starting at position 3340 of SEQ ID NO: 913399
guuauuacagguugaguau

SEQ ID NO: 924257 - RNA, 19 nt, Artificial Sequence
  Description of Artificial Sequence: Synthetic oligonucleotide
  Antisense strand to SEQ ID NO: 924256
auacucaaccuguaauaac

SEQ ID NO: 924258 - RNA, 19 nt, Artificial Sequence
  Description of Artificial Sequence: Synthetic oligonucleotide
  Sense strand starting at position 1481 of SEQ ID NO: 913400
acgaauacagccuaugaca

SEQ ID NO: 924259 - RNA, 19 nt, Artificial Sequence
  Description of Artificial Sequence: Synthetic oligonucleotide
  Antisense strand to SEQ ID NO: 924258
ugucauaggcuguauucgu

SEQ ID NO: 924260 - RNA, 19 nt, Artificial Sequence
  Description of Artificial Sequence: Synthetic oligonucleotide
  Sense strand starting at position 3682 of SEQ ID NO: 913400
gcuuuaaaggaugggauga

SEQ ID NO: 924261 - RNA, 19 nt, Artificial Sequence
  Description of Artificial Sequence: Synthetic oligonucleotide
  Antisense strand to SEQ ID NO: 924260
ucaucccauccuuuaaagc

SEQ ID NO: 924262 - RNA, 19 nt, Artificial Sequence
  Description of Artificial Sequence: Synthetic oligonucleotide
  Sense strand starting at position 2388 of SEQ ID NO: 913400
ugcagaaaugcucugcgua

SEQ ID NO: 924263 - RNA, 19 nt, Artificial Sequence
  Description of Artificial Sequence: Synthetic oligonucleotide
  Antisense strand to SEQ ID NO: 924262
uacgcagagcauuucugca

SEQ ID NO: 924264 - RNA, 19 nt, Artificial Sequence
  Description of Artificial Sequence: Synthetic oligonucleotide
  Sense strand starting at position 810 of SEQ ID NO: 913400
cccagucaucaagauagua

SEQ ID NO: 924265 - RNA, 19 nt, Artificial Sequence
  Description of Artificial Sequence: Synthetic oligonucleotide
  Antisense strand to SEQ ID NO: 924264
uacuaucuugaugacuggg

SEQ ID NO: 924266 - RNA, 19 nt, Artificial Sequence
  Description of Artificial Sequence: Synthetic oligonucleotide
  Sense strand starting at position 1723 of SEQ ID NO: 913400
gacaaagauucccucggga

SEQ ID NO: 924267 - RNA, 19 nt, Artificial Sequence
  Description of Artificial Sequence: Synthetic oligonucleotide
  Antisense strand to SEQ ID NO: 924266
ucccgagggaaucuuuguc

SEQ ID NO: 924268 - RNA, 19 nt, Artificial Sequence
  Description of Artificial Sequence: Synthetic oligonucleotide
  Sense strand starting at position 2871 of SEQ ID NO: 913400
gacagagucggugagacua

SEQ ID NO: 924269 - RNA, 19 nt, Artificial Sequence
  Description of Artificial Sequence: Synthetic oligonucleotide
  Antisense strand to SEQ ID NO: 924268
uagucucaccgacucuguc

SEQ ID NO: 924270 - RNA, 19 nt, Artificial Sequence
  Description of Artificial Sequence: Synthetic oligonucleotide
  Sense strand starting at position 3862 of SEQ ID NO: 913400
cuagacuauuuagagagau

SEQ ID NO: 924271 - RNA, 19 nt, Artificial Sequence
  Description of Artificial Sequence: Synthetic oligonucleotide
  Antisense strand to SEQ ID NO: 924270
aucucucuaaauagucuag

SEQ ID NO: 924272 - RNA, 19 nt, Artificial Sequence
  Description of Artificial Sequence: Synthetic oligonucleotide
  Sense strand starting at position 1726 of SEQ ID NO: 913400
aaagauucccucgggaaug

SEQ ID NO: 924273 - RNA, 19 nt, Artificial Sequence
  Description of Artificial Sequence: Synthetic oligonucleotide
  Antisense strand to SEQ ID NO: 924272
cauucccgagggaaucuuu

SEQ ID NO: 924274 - RNA, 19 nt, Artificial Sequence
  Description of Artificial Sequence: Synthetic oligonucleotide
  Sense strand starting at position 1933 of SEQ ID NO: 913400
cgagacgguccuuaaagga

SEQ ID NO: 924275 - RNA, 19 nt, Artificial Sequence
  Description of Artificial Sequence: Synthetic oligonucleotide
  Antisense strand to SEQ ID NO: 924274
uccuuuaaggaccgucucg

SEQ ID NO: 924276 - RNA, 19 nt, Artificial Sequence
  Description of Artificial Sequence: Synthetic oligonucleotide
  Sense strand starting at position 1725 of SEQ ID NO: 913400
caaagauucccucgggaau

SEQ ID NO: 924277 - RNA, 19 nt, Artificial Sequence
  Description of Artificial Sequence: Synthetic oligonucleotide
  Antisense strand to SEQ ID NO: 924276
auucccgagggaaucuuug

SEQ ID NO: 924278 - RNA, 19 nt, Artificial Sequence
  Description of Artificial Sequence: Synthetic oligonucleotide
  Sense strand starting at position 1826 of SEQ ID NO: 913400
ggagguuaauccucuagau

SEQ ID NO: 924279 - RNA, 19 nt, Artificial Sequence
  Description of Artificial Sequence: Synthetic oligonucleotide
  Antisense strand to SEQ ID NO: 924278
aucuagaggauuaaccucc

SEQ ID NO: 924280 - RNA, 19 nt, Artificial Sequence
  Description of Artificial Sequence: Synthetic oligonucleotide
  Sense strand starting at position 3910 of SEQ ID NO: 913400
agacgaggacaauguucau

SEQ ID NO: 924281 - RNA, 19 nt, Artificial Sequence
  Description of Artificial Sequence: Synthetic oligonucleotide
  Antisense strand to SEQ ID NO: 924280
augaacauuguccucgucu

SEQ ID NO: 924282 - RNA, 19 nt, Artificial Sequence
  Description of Artificial Sequence: Synthetic oligonucleotide
  Sense strand starting at position 3088 of SEQ ID NO: 913400
gagaaaucgucucuacaaa

SEQ ID NO: 924283 - RNA, 19 nt, Artificial Sequence
  Description of Artificial Sequence: Synthetic oligonucleotide
  Antisense strand to SEQ ID NO: 924282
uuuguagagacgauuucuc

SEQ ID NO: 924284 - RNA, 19 nt, Artificial Sequence
  Description of Artificial Sequence: Synthetic oligonucleotide
  Sense strand starting at position 318 of SEQ ID NO: 913400
auauaugacgcccacuaua

SEQ ID NO: 924285 - RNA, 19 nt, Artificial Sequence
  Description of Artificial Sequence: Synthetic oligonucleotide
  Antisense strand to SEQ ID NO: 924284
uauagugggcgucauauau

SEQ ID NO: 924286 - RNA, 19 nt, Artificial Sequence
  Description of Artificial Sequence: Synthetic oligonucleotide
  Sense strand starting at position 1525 of SEQ ID NO: 913400
gagggcagguuauuauuaa

SEQ ID NO: 924287 - RNA, 19 nt, Artificial Sequence
  Description of Artificial Sequence: Synthetic oligonucleotide
  Antisense strand to SEQ ID NO: 924286
uuaauaauaaccugcccuc

SEQ ID NO: 924288 - RNA, 19 nt, Artificial Sequence
  Description of Artificial Sequence: Synthetic oligonucleotide
  Sense strand starting at position 3559 of SEQ ID NO: 913400
ggaacauaggucugucuaa

SEQ ID NO: 924289 - RNA, 19 nt, Artificial Sequence
  Description of Artificial Sequence: Synthetic oligonucleotide
  Antisense strand to SEQ ID NO: 924288
uuagacagaccuauguucc

SEQ ID NO: 924290 - RNA, 19 nt, Artificial Sequence
  Description of Artificial Sequence: Synthetic oligonucleotide
  Sense strand starting at position 1263 of SEQ ID NO: 913400
uuguuaggcaaauauggua

SEQ ID NO: 924291 - RNA, 19 nt, Artificial Sequence
  Description of Artificial Sequence: Synthetic oligonucleotide
  Antisense strand to SEQ ID NO: 924290
uaccauauuugccuaacaa

SEQ ID NO: 924292 - RNA, 19 nt, Artificial Sequence
  Description of Artificial Sequence: Synthetic oligonucleotide
  Sense strand starting at position 996 of SEQ ID NO: 913400
uguagacuguaacuauaua

SEQ ID NO: 924293 - RNA, 19 nt, Artificial Sequence
  Description of Artificial Sequence: Synthetic oligonucleotide
  Antisense strand to SEQ ID NO: 924292
uauauaguuacagucuaca

SEQ ID NO: 924294 - RNA, 19 nt, Artificial Sequence
  Description of Artificial Sequence: Synthetic oligonucleotide
  Sense strand starting at position 2953 of SEQ ID NO: 913400
aucaucuuugauggcuaaa

SEQ ID NO: 924295 - RNA, 19 nt, Artificial Sequence
  Description of Artificial Sequence: Synthetic oligonucleotide
  Antisense strand to SEQ ID NO: 924294
uuuagccaucaaagaugau

SEQ ID NO: 924296 - RNA, 19 nt, Artificial Sequence
  Description of Artificial Sequence: Synthetic oligonucleotide
  Sense strand starting at position 2908 of SEQ ID NO: 913400
cccuguguuccucaggaag

SEQ ID NO: 924297 - RNA, 19 nt, Artificial Sequence
  Description of Artificial Sequence: Synthetic oligonucleotide
  Antisense strand to SEQ ID NO: 924296
cuuccugaggaacacaggg

SEQ ID NO: 924298 - RNA, 19 nt, Artificial Sequence
  Description of Artificial Sequence: Synthetic oligonucleotide
  Sense strand starting at position 571 of SEQ ID NO: 913400
gucuuuauuccacaaaguu

SEQ ID NO: 924299 - RNA, 19 nt, Artificial Sequence
  Description of Artificial Sequence: Synthetic oligonucleotide
  Antisense strand to SEQ ID NO: 924298
aacuuuguggaauaaagac

SEQ ID NO: 924300 - RNA, 19 nt, Artificial Sequence
  Description of Artificial Sequence: Synthetic oligonucleotide
  Sense strand starting at position 3560 of SEQ ID NO: 913400
gaacauaggucugucuaau

SEQ ID NO: 924301 - RNA, 19 nt, Artificial Sequence
  Description of Artificial Sequence: Synthetic oligonucleotide
  Antisense strand to SEQ ID NO: 924300
auuagacagaccuauguuc

SEQ ID NO: 924302 - RNA, 19 nt, Artificial Sequence
  Description of Artificial Sequence: Synthetic oligonucleotide
  Sense strand starting at position 263 of SEQ ID NO: 913400
uggccuagggaugguaaau

SEQ ID NO: 924303 - RNA, 19 nt, Artificial Sequence
  Description of Artificial Sequence: Synthetic oligonucleotide
  Antisense strand to SEQ ID NO: 924302
auuuaccaucccuaggcca

SEQ ID NO: 924304 - RNA, 19 nt, Artificial Sequence
  Description of Artificial Sequence: Synthetic oligonucleotide
  Sense strand starting at position 1823 of SEQ ID NO: 913400
cuuggagguuaauccucua

SEQ ID NO: 924305 - RNA, 19 nt, Artificial Sequence
  Description of Artificial Sequence: Synthetic oligonucleotide
  Antisense strand to SEQ ID NO: 924304
uagaggauuaaccuccaag

SEQ ID NO: 924306 - RNA, 19 nt, Artificial Sequence
  Description of Artificial Sequence: Synthetic oligonucleotide
  Sense strand starting at position 1468 of SEQ ID NO: 913400
gcauaaaggcccuacgaau

SEQ ID NO: 924307 - RNA, 19 nt, Artificial Sequence
  Description of Artificial Sequence: Synthetic oligonucleotide
  Antisense strand to SEQ ID NO: 924306
auucguagggccuuuaugc

SEQ ID NO: 924308 - RNA, 19 nt, Artificial Sequence
  Description of Artificial Sequence: Synthetic oligonucleotide
  Sense strand starting at position 3601 of SEQ ID NO: 913400
ucucuuugagaugguaauu

SEQ ID NO: 924309 - RNA, 19 nt, Artificial Sequence
  Description of Artificial Sequence: Synthetic oligonucleotide
  Antisense strand to SEQ ID NO: 924308
aauuaccaucucaaagaga

SEQ ID NO: 924310 - RNA, 19 nt, Artificial Sequence
  Description of Artificial Sequence: Synthetic oligonucleotide
  Sense strand starting at position 784 of SEQ ID NO: 913400
acaaauuagggcuguuaug

SEQ ID NO: 924311 - RNA, 19 nt, Artificial Sequence
  Description of Artificial Sequence: Synthetic oligonucleotide
  Antisense strand to SEQ ID NO: 924310
cauaacagcccuaauuugu

SEQ ID NO: 924312 - RNA, 19 nt, Artificial Sequence
  Description of Artificial Sequence: Synthetic oligonucleotide
  Sense strand starting at position 2350 of SEQ ID NO: 913400
gggcgcaacccugacaaau

SEQ ID NO: 924313 - RNA, 19 nt, Artificial Sequence
  Description of Artificial Sequence: Synthetic oligonucleotide
  Antisense strand to SEQ ID NO: 924312
auuugucaggguugcgccc

SEQ ID NO: 924314 - RNA, 19 nt, Artificial Sequence
  Description of Artificial Sequence: Synthetic oligonucleotide
  Sense strand starting at position 3308 of SEQ ID NO: 913400
cugauuguuaacgaauguu

SEQ ID NO: 924315 - RNA, 19 nt, Artificial Sequence
  Description of Artificial Sequence: Synthetic oligonucleotide
  Antisense strand to SEQ ID NO: 924314
aacauucguuaacaaucag

SEQ ID NO: 924316 - RNA, 19 nt, Artificial Sequence
  Description of Artificial Sequence: Synthetic oligonucleotide
  Sense strand starting at position 1331 of SEQ ID NO: 913400
aucguacuaccucaucuau

SEQ ID NO: 924317 - RNA, 19 nt, Artificial Sequence
  Description of Artificial Sequence: Synthetic oligonucleotide
  Antisense strand to SEQ ID NO: 924316
auagaugagguaguacgau

SEQ ID NO: 924318 - RNA, 19 nt, Artificial Sequence
  Description of Artificial Sequence: Synthetic oligonucleotide
  Sense strand starting at position 2303 of SEQ ID NO: 913400
ugggaaggcgcuuaucaca

SEQ ID NO: 924319 - RNA, 19 nt, Artificial Sequence
  Description of Artificial Sequence: Synthetic oligonucleotide
  Antisense strand to SEQ ID NO: 924318
ugugauaagcgccuuccca

SEQ ID NO: 924320 - RNA, 19 nt, Artificial Sequence
  Description of Artificial Sequence: Synthetic oligonucleotide
  Sense strand starting at position 3842 of SEQ ID NO: 913400
ugaagcuagguuugggauu

SEQ ID NO: 924321 - RNA, 19 nt, Artificial Sequence
  Description of Artificial Sequence: Synthetic oligonucleotide
  Antisense strand to SEQ ID NO: 924320
aaucccaaaccuagcuuca

SEQ ID NO: 924322 - RNA, 19 nt, Artificial Sequence
  Description of Artificial Sequence: Synthetic oligonucleotide
  Sense strand starting at position 2227 of SEQ ID NO: 913400
gacugagacuuucugcgaa

SEQ ID NO: 924323 - RNA, 19 nt, Artificial Sequence
  Description of Artificial Sequence: Synthetic oligonucleotide
  Antisense strand to SEQ ID NO: 924322
uucgcagaaagucucaguc

SEQ ID NO: 924324 - RNA, 19 nt, Artificial Sequence
  Description of Artificial Sequence: Synthetic oligonucleotide
  Sense strand starting at position 1196 of SEQ ID NO: 913400
guacauauacgaugauagu

SEQ ID NO: 924325 - RNA, 19 nt, Artificial Sequence
  Description of Artificial Sequence: Synthetic oligonucleotide
  Antisense strand to SEQ ID NO: 924324
acuaucaucguauauguac

SEQ ID NO: 924326 - RNA, 19 nt, Artificial Sequence
  Description of Artificial Sequence: Synthetic oligonucleotide
  Sense strand starting at position 2376 of SEQ ID NO: 913400
ccuucuugagagugcagaa

SEQ ID NO: 924327 - RNA, 19 nt, Artificial Sequence
  Description of Artificial Sequence: Synthetic oligonucleotide
  Antisense strand to SEQ ID NO: 924326
uucugcacucucaagaagg

SEQ ID NO: 924328 - RNA, 19 nt, Artificial Sequence
  Description of Artificial Sequence: Synthetic oligonucleotide
  Sense strand starting at position 2361 of SEQ ID NO: 913400
ugacaaaucgggcagccuu

SEQ ID NO: 924329 - RNA, 19 nt, Artificial Sequence
  Description of Artificial Sequence: Synthetic oligonucleotide
  Antisense strand to SEQ ID NO: 924328
aaggcugcccgauuuguca

SEQ ID NO: 924330 - RNA, 19 nt, Artificial Sequence
  Description of Artificial Sequence: Synthetic oligonucleotide
  Sense strand starting at position 3339 of SEQ ID NO: 913400
cuuguaauaauguggugaa

SEQ ID NO: 924331 - RNA, 19 nt, Artificial Sequence
  Description of Artificial Sequence: Synthetic oligonucleotide
  Antisense strand to SEQ ID NO: 924330
uucaccacauuauuacaag

SEQ ID NO: 924332 - RNA, 19 nt, Artificial Sequence
  Description of Artificial Sequence: Synthetic oligonucleotide
  Sense strand starting at position 3316 of SEQ ID NO: 913400
uaacgaauguuacuaguua

SEQ ID NO: 924333 - RNA, 19 nt, Artificial Sequence
  Description of Artificial Sequence: Synthetic oligonucleotide
  Antisense strand to SEQ ID NO: 924332
uaacuaguaacauucguua

SEQ ID NO: 924334 - RNA, 19 nt, Artificial Sequence
  Description of Artificial Sequence: Synthetic oligonucleotide
  Sense strand starting at position 3684 of SEQ ID NO: 913400
uuuaaaggaugggaugaaa

SEQ ID NO: 924335 - RNA, 19 nt, Artificial Sequence
  Description of Artificial Sequence: Synthetic oligonucleotide
  Antisense strand to SEQ ID NO: 924334
uuucaucccauccuuuaaa

SEQ ID NO: 924336 - RNA, 19 nt, Artificial Sequence
  Description of Artificial Sequence: Synthetic oligonucleotide
  Sense strand starting at position 2895 of SEQ ID NO: 913400
uaaugagaguucucccugu

SEQ ID NO: 924337 - RNA, 19 nt, Artificial Sequence
  Description of Artificial Sequence: Synthetic oligonucleotide
  Antisense strand to SEQ ID NO: 924336
acagggagaacucucauua

SEQ ID NO: 924338 - RNA, 19 nt, Artificial Sequence
  Description of Artificial Sequence: Synthetic oligonucleotide
  Sense strand starting at position 206 of SEQ ID NO: 913401
auaugacaggcuugauaga

SEQ ID NO: 924339 - RNA, 19 nt, Artificial Sequence
  Description of Artificial Sequence: Synthetic oligonucleotide
  Antisense strand to SEQ ID NO: 924338
ucuaucaagccugucauau

SEQ ID NO: 924340 - RNA, 19 nt, Artificial Sequence
  Description of Artificial Sequence: Synthetic oligonucleotide
  Sense strand starting at position 2755 of SEQ ID NO: 913401
ggguucgcaaauuaaagaa

SEQ ID NO: 924341 - RNA, 19 nt, Artificial Sequence
  Description of Artificial Sequence: Synthetic oligonucleotide
  Antisense strand to SEQ ID NO: 924340
uucuuuaauuugcgaaccc

SEQ ID NO: 924342 - RNA, 19 nt, Artificial Sequence
  Description of Artificial Sequence: Synthetic oligonucleotide
  Sense strand starting at position 2590 of SEQ ID NO: 913401
ggagguugugauuauccca

SEQ ID NO: 924343 - RNA, 19 nt, Artificial Sequence
  Description of Artificial Sequence: Synthetic oligonucleotide
  Antisense strand to SEQ ID NO: 924342
ugggauaaucacaaccucc

SEQ ID NO: 924344 - RNA, 19 nt, Artificial Sequence
  Description of Artificial Sequence: Synthetic oligonucleotide
  Sense strand starting at position 3616 of SEQ ID NO: 913401
gaguuccaacaagguaaua

SEQ ID NO: 924345 - RNA, 19 nt, Artificial Sequence
  Description of Artificial Sequence: Synthetic oligonucleotide
  Antisense strand to SEQ ID NO: 924344
uauuaccuuguuggaacuc

SEQ ID NO: 924346 - RNA, 19 nt, Artificial Sequence
  Description of Artificial Sequence: Synthetic oligonucleotide
  Sense strand starting at position 304 of SEQ ID NO: 913401
ggaguuacccaauaagccu

SEQ ID NO: 924347 - RNA, 19 nt, Artificial Sequence
  Description of Artificial Sequence: Synthetic oligonucleotide
  Antisense strand to SEQ ID NO: 924346
aggcuuauuggguaacucc

SEQ ID NO: 924348 - RNA, 19 nt, Artificial Sequence
  Description of Artificial Sequence: Synthetic oligonucleotide
  Sense strand starting at position 1821 of SEQ ID NO: 913401
gcgguagaaguccucgcua

SEQ ID NO: 924349 - RNA, 19 nt, Artificial Sequence
  Description of Artificial Sequence: Synthetic oligonucleotide
  Antisense strand to SEQ ID NO: 924348
uagcgaggacuucuaccgc

SEQ ID NO: 924350 - RNA, 19 nt, Artificial Sequence
  Description of Artificial Sequence: Synthetic oligonucleotide
  Sense strand starting at position 1826 of SEQ ID NO: 913401
agaaguccucgcuagggaa

SEQ ID NO: 924351 - RNA, 19 nt, Artificial Sequence
  Description of Artificial Sequence: Synthetic oligonucleotide
  Antisense strand to SEQ ID NO: 924350
uucccuagcgaggacuucu

SEQ ID NO: 924352 - RNA, 19 nt, Artificial Sequence
  Description of Artificial Sequence: Synthetic oligonucleotide
  Sense strand starting at position 672 of SEQ ID NO: 913401
acugucacgauuuggugua

SEQ ID NO: 924353 - RNA, 19 nt, Artificial Sequence
  Description of Artificial Sequence: Synthetic oligonucleotide
  Antisense strand to SEQ ID NO: 924352
uacaccaaaucgugacagu

SEQ ID NO: 924354 - RNA, 19 nt, Artificial Sequence
  Description of Artificial Sequence: Synthetic oligonucleotide
  Sense strand starting at position 3819 of SEQ ID NO: 913401
guguuagauauguaccuag

SEQ ID NO: 924355 - RNA, 19 nt, Artificial Sequence
  Description of Artificial Sequence: Synthetic oligonucleotide
  Antisense strand to SEQ ID NO: 924354
cuagguacauaucuaacac

SEQ ID NO: 924356 - RNA, 19 nt, Artificial Sequence
  Description of Artificial Sequence: Synthetic oligonucleotide
  Sense strand starting at position 1322 of SEQ ID NO: 913401
uguacauucguccagggaa

SEQ ID NO: 924357 - RNA, 19 nt, Artificial Sequence
  Description of Artificial Sequence: Synthetic oligonucleotide
  Antisense strand to SEQ ID NO: 924356
uucccuggacgaauguaca

SEQ ID NO: 924358 - RNA, 19 nt, Artificial Sequence
  Description of Artificial Sequence: Synthetic oligonucleotide
  Sense strand starting at position 900 of SEQ ID NO: 913401
accguuaucgaccaaauca

SEQ ID NO: 924359 - RNA, 19 nt, Artificial Sequence
  Description of Artificial Sequence: Synthetic oligonucleotide
  Antisense strand to SEQ ID NO: 924358
ugauuuggucgauaacggu

SEQ ID NO: 924360 - RNA, 19 nt, Artificial Sequence
  Description of Artificial Sequence: Synthetic oligonucleotide
  Sense strand starting at position 2593 of SEQ ID NO: 913401
gguugugauuaucccaaag

SEQ ID NO: 924361 - RNA, 19 nt, Artificial Sequence
  Description of Artificial Sequence: Synthetic oligonucleotide
  Antisense strand to SEQ ID NO: 924360
cuuugggauaaucacaacc

SEQ ID NO: 924362 - RNA, 19 nt, Artificial Sequence
  Description of Artificial Sequence: Synthetic oligonucleotide
  Sense strand starting at position 3628 of SEQ ID NO: 913401
gguaauaugccuuaucuuu

SEQ ID NO: 924363 - RNA, 19 nt, Artificial Sequence
  Description of Artificial Sequence: Synthetic oligonucleotide
  Antisense strand to SEQ ID NO: 924362
aaagauaaggcauauuacc

SEQ ID NO: 924364 - RNA, 19 nt, Artificial Sequence
  Description of Artificial Sequence: Synthetic oligonucleotide
  Sense strand starting at position 811 of SEQ ID NO: 913401
acuucuaacgauugcauaa

SEQ ID NO: 924365 - RNA, 19 nt, Artificial Sequence
  Description of Artificial Sequence: Synthetic oligonucleotide
  Antisense strand to SEQ ID NO: 924364
uuaugcaaucguuagaagu

SEQ ID NO: 924366 - RNA, 19 nt, Artificial Sequence
  Description of Artificial Sequence: Synthetic oligonucleotide
  Sense strand starting at position 1828 of SEQ ID NO: 913401
aaguccucgcuagggaaau

SEQ ID NO: 924367 - RNA, 19 nt, Artificial Sequence
  Description of Artificial Sequence: Synthetic oligonucleotide
  Antisense strand to SEQ ID NO: 924366
auuucccuagcgaggacuu

SEQ ID NO: 924368 - RNA, 19 nt, Artificial Sequence
  Description of Artificial Sequence: Synthetic oligonucleotide
  Sense strand starting at position 1324 of SEQ ID NO: 913401
uacauucguccagggaagu

SEQ ID NO: 924369 - RNA, 19 nt, Artificial Sequence
  Description of Artificial Sequence: Synthetic oligonucleotide
  Antisense strand to SEQ ID NO: 924368
acuucccuggacgaaugua

SEQ ID NO: 924370 - RNA, 19 nt, Artificial Sequence
  Description of Artificial Sequence: Synthetic oligonucleotide
  Sense strand starting at position 3818 of SEQ ID NO: 913401
uguguuagauauguaccua

SEQ ID NO: 924371 - RNA, 19 nt, Artificial Sequence
  Description of Artificial Sequence: Synthetic oligonucleotide
  Antisense strand to SEQ ID NO: 924370
uagguacauaucuaacaca

SEQ ID NO: 924372 - RNA, 19 nt, Artificial Sequence
  Description of Artificial Sequence: Synthetic oligonucleotide
  Sense strand starting at position 487 of SEQ ID NO: 913401
agacauuuauguuagccaa

SEQ ID NO: 924373 - RNA, 19 nt, Artificial Sequence
  Description of Artificial Sequence: Synthetic oligonucleotide
  Antisense strand to SEQ ID NO: 924372
uuggcuaacauaaaugucu

SEQ ID NO: 924374 - RNA, 19 nt, Artificial Sequence
  Description of Artificial Sequence: Synthetic oligonucleotide
  Sense strand starting at position 3815 of SEQ ID NO: 913401
gccuguguuagauauguac

SEQ ID NO: 924375 - RNA, 19 nt, Artificial Sequence
  Description of Artificial Sequence: Synthetic oligonucleotide
  Antisense strand to SEQ ID NO: 924374
guacauaucuaacacaggc

SEQ ID NO: 924376 - RNA, 19 nt, Artificial Sequence
  Description of Artificial Sequence: Synthetic oligonucleotide
  Sense strand starting at position 454 of SEQ ID NO: 913401
caggcagguuucuucgaca

SEQ ID NO: 924377 - RNA, 19 nt, Artificial Sequence
  Description of Artificial Sequence: Synthetic oligonucleotide
  Antisense strand to SEQ ID NO: 924376
ugucgaagaaaccugccug

SEQ ID NO: 924378 - RNA, 19 nt, Artificial Sequence
  Description of Artificial Sequence: Synthetic oligonucleotide
  Sense strand starting at position 2622 of SEQ ID NO: 913401
cgggucucggauugaaagu

SEQ ID NO: 924379 - RNA, 19 nt, Artificial Sequence
  Description of Artificial Sequence: Synthetic oligonucleotide
  Antisense strand to SEQ ID NO: 924378
acuuucaauccgagacccg

SEQ ID NO: 924380 - RNA, 19 nt, Artificial Sequence
  Description of Artificial Sequence: Synthetic oligonucleotide
  Sense strand starting at position 3673 of SEQ ID NO: 913401
ccugucuguccucauaguu

SEQ ID NO: 924381 - RNA, 19 nt, Artificial Sequence
  Description of Artificial Sequence: Synthetic oligonucleotide
  Antisense strand to SEQ ID NO: 924380
aacuaugaggacagacagg

SEQ ID NO: 924382 - RNA, 19 nt, Artificial Sequence
  Description of Artificial Sequence: Synthetic oligonucleotide
  Sense strand starting at position 3817 of SEQ ID NO: 913401
cuguguuagauauguaccu

SEQ ID NO: 924383 - RNA, 19 nt, Artificial Sequence
  Description of Artificial Sequence: Synthetic oligonucleotide
  Antisense strand to SEQ ID NO: 924382
agguacauaucuaacacag

SEQ ID NO: 924384 - RNA, 19 nt, Artificial Sequence
  Description of Artificial Sequence: Synthetic oligonucleotide
  Sense strand starting at position 1841 of SEQ ID NO: 913401
ggaaauaguccacgacgcu

SEQ ID NO: 924385 - RNA, 19 nt, Artificial Sequence
  Description of Artificial Sequence: Synthetic oligonucleotide
  Antisense strand to SEQ ID NO: 924384
agcgucguggacuauuucc

SEQ ID NO: 924386 - RNA, 19 nt, Artificial Sequence
  Description of Artificial Sequence: Synthetic oligonucleotide
  Sense strand starting at position 1554 of SEQ ID NO: 913401
caccacgauuucgagagua

SEQ ID NO: 924387 - RNA, 19 nt, Artificial Sequence
  Description of Artificial Sequence: Synthetic oligonucleotide
  Antisense strand to SEQ ID NO: 924386
uacucucgaaaucguggug

SEQ ID NO: 924388 - RNA, 19 nt, Artificial Sequence
  Description of Artificial Sequence: Synthetic oligonucleotide
  Sense strand starting at position 1309 of SEQ ID NO: 913401
ggcucauccuuccuguaca

SEQ ID NO: 924389 - RNA, 19 nt, Artificial Sequence
  Description of Artificial Sequence: Synthetic oligonucleotide
  Antisense strand to SEQ ID NO: 924388
uguacaggaaggaugagcc

SEQ ID NO: 924390 - RNA, 19 nt, Artificial Sequence
  Description of Artificial Sequence: Synthetic oligonucleotide
  Sense strand starting at position 2733 of SEQ ID NO: 913401
gcagguauuccgugaaugg

SEQ ID NO: 924391 - RNA, 19 nt, Artificial Sequence
  Description of Artificial Sequence: Synthetic oligonucleotide
  Antisense strand to SEQ ID NO: 924390
ccauucacggaauaccugc

SEQ ID NO: 924392 - RNA, 19 nt, Artificial Sequence
  Description of Artificial Sequence: Synthetic oligonucleotide
  Sense strand starting at position 2812 of SEQ ID NO: 913401
gacaguugcugucuuguac

SEQ ID NO: 924393 - RNA, 19 nt, Artificial Sequence
  Description of Artificial Sequence: Synthetic oligonucleotide
  Antisense strand to SEQ ID NO: 924392
guacaagacagcaacuguc

SEQ ID NO: 924394 - RNA, 19 nt, Artificial Sequence
  Description of Artificial Sequence: Synthetic oligonucleotide
  Sense strand starting at position 2749 of SEQ ID NO: 913401
uggcgaggguucgcaaauu

SEQ ID NO: 924395 - RNA, 19 nt, Artificial Sequence
  Description of Artificial Sequence: Synthetic oligonucleotide
  Antisense strand to SEQ ID NO: 924394
aauuugcgaacccucgcca

SEQ ID NO: 924396 - RNA, 19 nt, Artificial Sequence
  Description of Artificial Sequence: Synthetic oligonucleotide
  Sense strand starting at position 1097 of SEQ ID NO: 913401
aaaucugaaucacgaugga

SEQ ID NO: 924397 - RNA, 19 nt, Artificial Sequence
  Description of Artificial Sequence: Synthetic oligonucleotide
  Antisense strand to SEQ ID NO: 924396
uccaucgugauucagauuu

SEQ ID NO: 924398 - RNA, 19 nt, Artificial Sequence
  Description of Artificial Sequence: Synthetic oligonucleotide
  Sense strand starting at position 224 of SEQ ID NO: 913401
agcagaauauagugggaaa

SEQ ID NO: 924399 - RNA, 19 nt, Artificial Sequence
  Description of Artificial Sequence: Synthetic oligonucleotide
  Antisense strand to SEQ ID NO: 924398
uuucccacuauauucugcu

SEQ ID NO: 924400 - RNA, 19 nt, Artificial Sequence
  Description of Artificial Sequence: Synthetic oligonucleotide
  Sense strand starting at position 1553 of SEQ ID NO: 913401
ccaccacgauuucgagagu

SEQ ID NO: 924401 - RNA, 19 nt, Artificial Sequence
  Description of Artificial Sequence: Synthetic oligonucleotide
  Antisense strand to SEQ ID NO: 924400
acucucgaaaucguggugg

SEQ ID NO: 924402 - RNA, 19 nt, Artificial Sequence
  Description of Artificial Sequence: Synthetic oligonucleotide
  Sense strand starting at position 3672 of SEQ ID NO: 913401
gccugucuguccucauagu

SEQ ID NO: 924403 - RNA, 19 nt, Artificial Sequence
  Description of Artificial Sequence: Synthetic oligonucleotide
  Antisense strand to SEQ ID NO: 924402
acuaugaggacagacaggc

SEQ ID NO: 924404 - RNA, 19 nt, Artificial Sequence
  Description of Artificial Sequence: Synthetic oligonucleotide
  Sense strand starting at position 93 of SEQ ID NO: 913401
caaagauugugccacugaa

SEQ ID NO: 924405 - RNA, 19 nt, Artificial Sequence
  Description of Artificial Sequence: Synthetic oligonucleotide
  Antisense strand to SEQ ID NO: 924404
uucaguggcacaaucuuug

SEQ ID NO: 924406 - RNA, 19 nt, Artificial Sequence
  Description of Artificial Sequence: Synthetic oligonucleotide
  Sense strand starting at position 736 of SEQ ID NO: 913401
ccauuugcauccuguugau

SEQ ID NO: 924407 - RNA, 19 nt, Artificial Sequence
  Description of Artificial Sequence: Synthetic oligonucleotide
  Antisense strand to SEQ ID NO: 924406
aucaacaggaugcaaaugg

SEQ ID NO: 924408 - RNA, 19 nt, Artificial Sequence
  Description of Artificial Sequence: Synthetic oligonucleotide
  Sense strand starting at position 1030 of SEQ ID NO: 913401
gcaaaugcauggcaagaga

SEQ ID NO: 924409 - RNA, 19 nt, Artificial Sequence
  Description of Artificial Sequence: Synthetic oligonucleotide
  Antisense strand to SEQ ID NO: 924408
ucucuugccaugcauuugc

SEQ ID NO: 924410 - RNA, 19 nt, Artificial Sequence
  Description of Artificial Sequence: Synthetic oligonucleotide
  Sense strand starting at position 986 of SEQ ID NO: 913401
gcuagacuguucuauuaaa

SEQ ID NO: 924411 - RNA, 19 nt, Artificial Sequence
  Description of Artificial Sequence: Synthetic oligonucleotide
  Antisense strand to SEQ ID NO: 924410
uuuaauagaacagucuagc

SEQ ID NO: 924412 - RNA, 19 nt, Artificial Sequence
  Description of Artificial Sequence: Synthetic oligonucleotide
  Sense strand starting at position 2595 of SEQ ID NO: 913401
uugugauuaucccaaaguc

SEQ ID NO: 924413 - RNA, 19 nt, Artificial Sequence
  Description of Artificial Sequence: Synthetic oligonucleotide
  Antisense strand to SEQ ID NO: 924412
gacuuugggauaaucacaa

SEQ ID NO: 924414 - RNA, 19 nt, Artificial Sequence
  Description of Artificial Sequence: Synthetic oligonucleotide
  Sense strand starting at position 3811 of SEQ ID NO: 913401
aagggccuguguuagauau

SEQ ID NO: 924415 - RNA, 19 nt, Artificial Sequence
  Description of Artificial Sequence: Synthetic oligonucleotide
  Antisense strand to SEQ ID NO: 924414
auaucuaacacaggcccuu

SEQ ID NO: 924416 - RNA, 19 nt, Artificial Sequence
  Description of Artificial Sequence: Synthetic oligonucleotide
  Sense strand starting at position 2071 of SEQ ID NO: 913401
agggcagcuuuccacuauu

SEQ ID NO: 924417 - RNA, 19 nt, Artificial Sequence
  Description of Artificial Sequence: Synthetic oligonucleotide
  Antisense strand to SEQ ID NO: 924416
aauaguggaaagcugcccu

SEQ ID NO: 924418 - RNA, 19 nt, Artificial Sequence
  Description of Artificial Sequence: Synthetic oligonucleotide
  Sense strand starting at position 3457 of SEQ ID NO: 913402
auuuaugucuggcuuuaca

SEQ ID NO: 924419 - RNA, 19 nt, Artificial Sequence
  Description of Artificial Sequence: Synthetic oligonucleotide
  Antisense strand to SEQ ID NO: 924418
uguaaagccagacauaaau

SEQ ID NO: 924420 - RNA, 19 nt, Artificial Sequence
  Description of Artificial Sequence: Synthetic oligonucleotide
  Sense strand starting at position 3453 of SEQ ID NO: 913402
ccagauuuaugucuggcuu

SEQ ID NO: 924421 - RNA, 19 nt, Artificial Sequence
  Description of Artificial Sequence: Synthetic oligonucleotide
  Antisense strand to SEQ ID NO: 924420
aagccagacauaaaucugg

SEQ ID NO: 924422 - RNA, 19 nt, Artificial Sequence
  Description of Artificial Sequence: Synthetic oligonucleotide
  Sense strand starting at position 3557 of SEQ ID NO: 913402
guaaauagaacguaugauc

SEQ ID NO: 924423 - RNA, 19 nt, Artificial Sequence
  Description of Artificial Sequence: Synthetic oligonucleotide
  Antisense strand to SEQ ID NO: 924422
gaucauacguucuauuuac

SEQ ID NO: 924424 - RNA, 19 nt, Artificial Sequence
  Description of Artificial Sequence: Synthetic oligonucleotide
  Sense strand starting at position 2017 of SEQ ID NO: 913402
ggguucgcaaauuaaagaa

SEQ ID NO: 924425 - RNA, 19 nt, Artificial Sequence
  Description of Artificial Sequence: Synthetic oligonucleotide
  Antisense strand to SEQ ID NO: 924424
uucuuuaauuugcgaaccc

SEQ ID NO: 924426 - RNA, 19 nt, Artificial Sequence
  Description of Artificial Sequence: Synthetic oligonucleotide
  Sense strand starting at position 3454 of SEQ ID NO: 913402
cagauuuaugucuggcuuu

SEQ ID NO: 924427 - RNA, 19 nt, Artificial Sequence
  Description of Artificial Sequence: Synthetic oligonucleotide
  Antisense strand to SEQ ID NO: 924426
aaagccagacauaaaucug

SEQ ID NO: 924428 - RNA, 19 nt, Artificial Sequence
  Description of Artificial Sequence: Synthetic oligonucleotide
  Sense strand starting at position 1852 of SEQ ID NO: 913402
ggagguugugauuauccca

SEQ ID NO: 924429 - RNA, 19 nt, Artificial Sequence
  Description of Artificial Sequence: Synthetic oligonucleotide
  Antisense strand to SEQ ID NO: 924428
ugggauaaucacaaccucc

SEQ ID NO: 924430 - RNA, 19 nt, Artificial Sequence
  Description of Artificial Sequence: Synthetic oligonucleotide
  Sense strand starting at position 2878 of SEQ ID NO: 913402
gaguuccaacaagguaaua

SEQ ID NO: 924431 - RNA, 19 nt, Artificial Sequence
  Description of Artificial Sequence: Synthetic oligonucleotide
  Antisense strand to SEQ ID NO: 924430
uauuaccuuguuggaacuc

SEQ ID NO: 924432 - RNA, 19 nt, Artificial Sequence
  Description of Artificial Sequence: Synthetic oligonucleotide
  Sense strand starting at position 1083 of SEQ ID NO: 913402
gcgguagaaguccucgcua

SEQ ID NO: 924433 - RNA, 19 nt, Artificial Sequence
  Description of Artificial Sequence: Synthetic oligonucleotide
  Antisense strand to SEQ ID NO: 924432
uagcgaggacuucuaccgc

SEQ ID NO: 924434 - RNA, 19 nt, Artificial Sequence
  Description of Artificial Sequence: Synthetic oligonucleotide
  Sense strand starting at position 1088 of SEQ ID NO: 913402
agaaguccucgcuagggaa

SEQ ID NO: 924435 - RNA, 19 nt, Artificial Sequence
  Description of Artificial Sequence: Synthetic oligonucleotide
  Antisense strand to SEQ ID NO: 924434
uucccuagcgaggacuucu

SEQ ID NO: 924436 - RNA, 19 nt, Artificial Sequence
  Description of Artificial Sequence: Synthetic oligonucleotide
  Sense strand starting at position 3081 of SEQ ID NO: 913402
guguuagauauguaccuag

SEQ ID NO: 924437 - RNA, 19 nt, Artificial Sequence
  Description of Artificial Sequence: Synthetic oligonucleotide
  Antisense strand to SEQ ID NO: 924436
cuagguacauaucuaacac

SEQ ID NO: 924438 - RNA, 19 nt, Artificial Sequence
  Description of Artificial Sequence: Synthetic oligonucleotide
  Sense strand starting at position 584 of SEQ ID NO: 913402
uguacauucguccagggaa

SEQ ID NO: 924439 - RNA, 19 nt, Artificial Sequence
  Description of Artificial Sequence: Synthetic oligonucleotide
  Antisense strand to SEQ ID NO: 924438
uucccuggacgaauguaca

SEQ ID NO: 924440 - RNA, 19 nt, Artificial Sequence
  Description of Artificial Sequence: Synthetic oligonucleotide
  Sense strand starting at position 162 of SEQ ID NO: 913402
accguuaucgaccaaauca

SEQ ID NO: 924441 - RNA, 19 nt, Artificial Sequence
  Description of Artificial Sequence: Synthetic oligonucleotide
  Antisense strand to SEQ ID NO: 924440
ugauuuggucgauaacggu

SEQ ID NO: 924442 - RNA, 19 nt, Artificial Sequence
  Description of Artificial Sequence: Synthetic oligonucleotide
  Sense strand starting at position 1855 of SEQ ID NO: 913402
gguugugauuaucccaaag

SEQ ID NO: 924443 - RNA, 19 nt, Artificial Sequence
  Description of Artificial Sequence: Synthetic oligonucleotide
  Antisense strand to SEQ ID NO: 924442
cuuugggauaaucacaacc

SEQ ID NO: 924444 - RNA, 19 nt, Artificial Sequence
  Description of Artificial Sequence: Synthetic oligonucleotide
  Sense strand starting at position 2890 of SEQ ID NO: 913402
gguaauaugccuuaucuuu

SEQ ID NO: 924445 - RNA, 19 nt, Artificial Sequence
  Description of Artificial Sequence: Synthetic oligonucleotide
  Antisense strand to SEQ ID NO: 924444
aaagauaaggcauauuacc

SEQ ID NO: 924446 - RNA, 19 nt, Artificial Sequence
  Description of Artificial Sequence: Synthetic oligonucleotide
  Sense strand starting at position 73 of SEQ ID NO: 913402
acuucuaacgauugcauaa

SEQ ID NO: 924447 - RNA, 19 nt, Artificial Sequence
  Description of Artificial Sequence: Synthetic oligonucleotide
  Antisense strand to SEQ ID NO: 924446
uuaugcaaucguuagaagu

SEQ ID NO: 924448 - RNA, 19 nt, Artificial Sequence
  Description of Artificial Sequence: Synthetic oligonucleotide
  Sense strand starting at position 1090 of SEQ ID NO: 913402
aaguccucgcuagggaaau

SEQ ID NO: 924449 - RNA, 19 nt, Artificial Sequence
  Description of Artificial Sequence: Synthetic oligonucleotide
  Antisense strand to SEQ ID NO: 924448
auuucccuagcgaggacuu

SEQ ID NO: 924450 - RNA, 19 nt, Artificial Sequence
  Description of Artificial Sequence: Synthetic oligonucleotide
  Sense strand starting at position 586 of SEQ ID NO: 913402
uacauucguccagggaagu

SEQ ID NO: 924451 - RNA, 19 nt, Artificial Sequence
  Description of Artificial Sequence: Synthetic oligonucleotide
  Antisense strand to SEQ ID NO: 924450
acuucccuggacgaaugua

SEQ ID NO: 924452 - RNA, 19 nt, Artificial Sequence
  Description of Artificial Sequence: Synthetic oligonucleotide
  Sense strand starting at position 3080 of SEQ ID NO: 913402
uguguuagauauguaccua

SEQ ID NO: 924453 - RNA, 19 nt, Artificial Sequence
  Description of Artificial Sequence: Synthetic oligonucleotide
  Antisense strand to SEQ ID NO: 924452
uagguacauaucuaacaca

SEQ ID NO: 924454 - RNA, 19 nt, Artificial Sequence
  Description of Artificial Sequence: Synthetic oligonucleotide
  Sense strand starting at position 3562 of SEQ ID NO: 913402
uagaacguaugaucgaguu

SEQ ID NO: 924455 - RNA, 19 nt, Artificial Sequence
  Description of Artificial Sequence: Synthetic oligonucleotide
  Antisense strand to SEQ ID NO: 924454
aacucgaucauacguucua

SEQ ID NO: 924456 - RNA, 19 nt, Artificial Sequence
  Description of Artificial Sequence: Synthetic oligonucleotide
  Sense strand starting at position 3817 of SEQ ID NO: 913402
cauugugucccuggauacu

SEQ ID NO: 924457 - RNA, 19 nt, Artificial Sequence
  Description of Artificial Sequence: Synthetic oligonucleotide
  Antisense strand to SEQ ID NO: 924456
aguauccagggacacaaug

SEQ ID NO: 924458 - RNA, 19 nt, Artificial Sequence
  Description of Artificial Sequence: Synthetic oligonucleotide
  Sense strand starting at position 3077 of SEQ ID NO: 913402
gccuguguuagauauguac

SEQ ID NO: 924459 - RNA, 19 nt, Artificial Sequence
  Description of Artificial Sequence: Synthetic oligonucleotide
  Antisense strand to SEQ ID NO: 924458
guacauaucuaacacaggc

SEQ ID NO: 924460 - RNA, 19 nt, Artificial Sequence
  Description of Artificial Sequence: Synthetic oligonucleotide
  Sense strand starting at position 1884 of SEQ ID NO: 913402
cgggucucggauugaaagu

SEQ ID NO: 924461 - RNA, 19 nt, Artificial Sequence
  Description of Artificial Sequence: Synthetic oligonucleotide
  Antisense strand to SEQ ID NO: 924460
acuuucaauccgagacccg

SEQ ID NO: 924462 - RNA, 19 nt, Artificial Sequence
  Description of Artificial Sequence: Synthetic oligonucleotide
  Sense strand starting at position 2935 of SEQ ID NO: 913402
ccugucuguccucauaguu

SEQ ID NO: 924463 - RNA, 19 nt, Artificial Sequence
  Description of Artificial Sequence: Synthetic oligonucleotide
  Antisense strand to SEQ ID NO: 924462
aacuaugaggacagacagg

SEQ ID NO: 924464 - RNA, 19 nt, Artificial Sequence
  Description of Artificial Sequence: Synthetic oligonucleotide
  Sense strand starting at position 3079 of SEQ ID NO: 913402
cuguguuagauauguaccu

SEQ ID NO: 924465 - RNA, 19 nt, Artificial Sequence
  Description of Artificial Sequence: Synthetic oligonucleotide
  Antisense strand to SEQ ID NO: 924464
agguacauaucuaacacag

SEQ ID NO: 924466 - RNA, 19 nt, Artificial Sequence
  Description of Artificial Sequence: Synthetic oligonucleotide
  Sense strand starting at position 1103 of SEQ ID NO: 913402
ggaaauaguccacgacgcu

SEQ ID NO: 924467 - RNA, 19 nt, Artificial Sequence
  Description of Artificial Sequence: Synthetic oligonucleotide
  Antisense strand to SEQ ID NO: 924466
agcgucguggacuauuucc

SEQ ID NO: 924468 - RNA, 19 nt, Artificial Sequence
  Description of Artificial Sequence: Synthetic oligonucleotide
  Sense strand starting at position 816 of SEQ ID NO: 913402
caccacgauuucgagagua

SEQ ID NO: 924469 - RNA, 19 nt, Artificial Sequence
  Description of Artificial Sequence: Synthetic oligonucleotide
  Antisense strand to SEQ ID NO: 924468
uacucucgaaaucguggug

SEQ ID NO: 924470 - RNA, 19 nt, Artificial Sequence
  Description of Artificial Sequence: Synthetic oligonucleotide
  Sense strand starting at position 571 of SEQ ID NO: 913402
ggcucauccuuccuguaca

SEQ ID NO: 924471 - RNA, 19 nt, Artificial Sequence
  Description of Artificial Sequence: Synthetic oligonucleotide
  Antisense strand to SEQ ID NO: 924470
uguacaggaaggaugagcc

SEQ ID NO: 924472 - RNA, 19 nt, Artificial Sequence
  Description of Artificial Sequence: Synthetic oligonucleotide
  Sense strand starting at position 1995 of SEQ ID NO: 913402
gcagguauuccgugaaugg

SEQ ID NO: 924473 - RNA, 19 nt, Artificial Sequence
  Description of Artificial Sequence: Synthetic oligonucleotide
  Antisense strand to SEQ ID NO: 924472
ccauucacggaauaccugc

SEQ ID NO: 924474 - RNA, 19 nt, Artificial Sequence
  Description of Artificial Sequence: Synthetic oligonucleotide
  Sense strand starting at position 3815 of SEQ ID NO: 913402
ugcauugugucccuggaua

SEQ ID NO: 924475 - RNA, 19 nt, Artificial Sequence
  Description of Artificial Sequence: Synthetic oligonucleotide
  Antisense strand to SEQ ID NO: 924474
uauccagggacacaaugca

SEQ ID NO: 924476 - RNA, 19 nt, Artificial Sequence
  Description of Artificial Sequence: Synthetic oligonucleotide
  Sense strand starting at position 2074 of SEQ ID NO: 913402
gacaguugcugucuuguac

SEQ ID NO: 924477 - RNA, 19 nt, Artificial Sequence
  Description of Artificial Sequence: Synthetic oligonucleotide
  Antisense strand to SEQ ID NO: 924476
guacaagacagcaacuguc

SEQ ID NO: 924478 - RNA, 19 nt, Artificial Sequence
  Description of Artificial Sequence: Synthetic oligonucleotide
  Sense strand starting at position 2011 of SEQ ID NO: 913402
uggcgaggguucgcaaauu

SEQ ID NO: 924479 - RNA, 19 nt, Artificial Sequence
  Description of Artificial Sequence: Synthetic oligonucleotide
  Antisense strand to SEQ ID NO: 924478
aauuugcgaacccucgcca

SEQ ID NO: 924480 - RNA, 19 nt, Artificial Sequence
  Description of Artificial Sequence: Synthetic oligonucleotide
  Sense strand starting at position 359 of SEQ ID NO: 913402
aaaucugaaucacgaugga

SEQ ID NO: 924481 - RNA, 19 nt, Artificial Sequence
  Description of Artificial Sequence: Synthetic oligonucleotide
  Antisense strand to SEQ ID NO: 924480
uccaucgugauucagauuu

SEQ ID NO: 924482 - RNA, 19 nt, Artificial Sequence
  Description of Artificial Sequence: Synthetic oligonucleotide
  Sense strand starting at position 3455 of SEQ ID NO: 913402
agauuuaugucuggcuuua

SEQ ID NO: 924483 - RNA, 19 nt, Artificial Sequence
  Description of Artificial Sequence: Synthetic oligonucleotide
  Antisense strand to SEQ ID NO: 924482
uaaagccagacauaaaucu

SEQ ID NO: 924484 - RNA, 19 nt, Artificial Sequence
  Description of Artificial Sequence: Synthetic oligonucleotide
  Sense strand starting at position 815 of SEQ ID NO: 913402
ccaccacgauuucgagagu

SEQ ID NO: 924485 - RNA, 19 nt, Artificial Sequence
  Description of Artificial Sequence: Synthetic oligonucleotide
  Antisense strand to SEQ ID NO: 924484
acucucgaaaucguggugg

SEQ ID NO: 924486 - RNA, 19 nt, Artificial Sequence
  Description of Artificial Sequence: Synthetic oligonucleotide
  Sense strand starting at position 2934 of SEQ ID NO: 913402
gccugucuguccucauagu

SEQ ID NO: 924487 - RNA, 19 nt, Artificial Sequence
  Description of Artificial Sequence: Synthetic oligonucleotide
  Antisense strand to SEQ ID NO: 924486
acuaugaggacagacaggc

SEQ ID NO: 924488 - RNA, 19 nt, Artificial Sequence
  Description of Artificial Sequence: Synthetic oligonucleotide
  Sense strand starting at position 292 of SEQ ID NO: 913402
gcaaaugcauggcaagaga

SEQ ID NO: 924489 - RNA, 19 nt, Artificial Sequence
  Description of Artificial Sequence: Synthetic oligonucleotide
  Antisense strand to SEQ ID NO: 924488
ucucuugccaugcauuugc

SEQ ID NO: 924490 - RNA, 19 nt, Artificial Sequence
  Description of Artificial Sequence: Synthetic oligonucleotide
  Sense strand starting at position 248 of SEQ ID NO: 913402
gcuagacuguucuauuaaa

SEQ ID NO: 924491 - RNA, 19 nt, Artificial Sequence
  Description of Artificial Sequence: Synthetic oligonucleotide
  Antisense strand to SEQ ID NO: 924490
uuuaauagaacagucuagc

SEQ ID NO: 924492 - RNA, 19 nt, Artificial Sequence
  Description of Artificial Sequence: Synthetic oligonucleotide
  Sense strand starting at position 1857 of SEQ ID NO: 913402
uugugauuaucccaaaguc

SEQ ID NO: 924493 - RNA, 19 nt, Artificial Sequence
  Description of Artificial Sequence: Synthetic oligonucleotide
  Antisense strand to SEQ ID NO: 924492
gacuuugggauaaucacaa

SEQ ID NO: 924494 - RNA, 19 nt, Artificial Sequence
  Description of Artificial Sequence: Synthetic oligonucleotide
  Sense strand starting at position 3073 of SEQ ID NO: 913402
aagggccuguguuagauau

SEQ ID NO: 924495 - RNA, 19 nt, Artificial Sequence
  Description of Artificial Sequence: Synthetic oligonucleotide
  Antisense strand to SEQ ID NO: 924494
auaucuaacacaggcccuu

SEQ ID NO: 924496 - RNA, 19 nt, Artificial Sequence
  Description of Artificial Sequence: Synthetic oligonucleotide
  Sense strand starting at position 1333 of SEQ ID NO: 913402
agggcagcuuuccacuauu

SEQ ID NO: 924497 - RNA, 19 nt, Artificial Sequence
  Description of Artificial Sequence: Synthetic oligonucleotide
  Antisense strand to SEQ ID NO: 924496
aauaguggaaagcugcccu

SEQ ID NO: 924498 - RNA, 19 nt, Artificial Sequence
  Description of Artificial Sequence: Synthetic oligonucleotide
  Sense strand starting at position 2721 of SEQ ID NO: 913403
ugggaaaugcacugagaug

SEQ ID NO: 924499 - RNA, 19 nt, Artificial Sequence
  Description of Artificial Sequence: Synthetic oligonucleotide
  Antisense strand to SEQ ID NO: 924498
caucucagugcauuuccca

SEQ ID NO: 924500 - RNA, 19 nt, Artificial Sequence
  Description of Artificial Sequence: Synthetic oligonucleotide
  Sense strand starting at position 3526 of SEQ ID NO: 913403
ggaaaucugcccuauuaau

SEQ ID NO: 924501 - RNA, 19 nt, Artificial Sequence
  Description of Artificial Sequence: Synthetic oligonucleotide
  Antisense strand to SEQ ID NO: 924500
auuaauagggcagauuucc

SEQ ID NO: 924502 - RNA, 19 nt, Artificial Sequence
  Description of Artificial Sequence: Synthetic oligonucleotide
  Sense strand starting at position 418 of SEQ ID NO: 913403
ggaagcauucuauaucauc

SEQ ID NO: 924503 - RNA, 19 nt, Artificial Sequence
  Description of Artificial Sequence: Synthetic oligonucleotide
  Antisense strand to SEQ ID NO: 924502
gaugauauagaaugcuucc

SEQ ID NO: 924504 - RNA, 19 nt, Artificial Sequence
  Description of Artificial Sequence: Synthetic oligonucleotide
  Sense strand starting at position 3358 of SEQ ID NO: 913403
auuaaugaucuccagcaug

SEQ ID NO: 924505 - RNA, 19 nt, Artificial Sequence
  Description of Artificial Sequence: Synthetic oligonucleotide
  Antisense strand to SEQ ID NO: 924504
caugcuggagaucauuaau

SEQ ID NO: 924506 - RNA, 19 nt, Artificial Sequence
  Description of Artificial Sequence: Synthetic oligonucleotide
  Sense strand starting at position 2313 of SEQ ID NO: 913403
aaacuuaaccgagacuugu

SEQ ID NO: 924507 - RNA, 19 nt, Artificial Sequence
  Description of Artificial Sequence: Synthetic oligonucleotide
  Antisense strand to SEQ ID NO: 924506
acaagucucgguuaaguuu

SEQ ID NO: 924508 - RNA, 19 nt, Artificial Sequence
  Description of Artificial Sequence: Synthetic oligonucleotide
  Sense strand starting at position 2019 of SEQ ID NO: 913403
gagaauuuauagcaaagag

SEQ ID NO: 924509 - RNA, 19 nt, Artificial Sequence
  Description of Artificial Sequence: Synthetic oligonucleotide
  Antisense strand to SEQ ID NO: 924508
cucuuugcuauaaauucuc

SEQ ID NO: 924510 - RNA, 19 nt, Artificial Sequence
  Description of Artificial Sequence: Synthetic oligonucleotide
  Sense strand starting at position 3669 of SEQ ID NO: 913403
gcuaaugagauguaugauu

SEQ ID NO: 924511 - RNA, 19 nt, Artificial Sequence
  Description of Artificial Sequence: Synthetic oligonucleotide
  Antisense strand to SEQ ID NO: 924510
aaucauacaucucauuagc

SEQ ID NO: 924512 - RNA, 19 nt, Artificial Sequence
  Description of Artificial Sequence: Synthetic oligonucleotide
  Sense strand starting at position 3065 of SEQ ID NO: 913403
ccagaauccuuacuggauu

SEQ ID NO: 924513 - RNA, 19 nt, Artificial Sequence
  Description of Artificial Sequence: Synthetic oligonucleotide
  Antisense strand to SEQ ID NO: 924512
aauccaguaaggauucugg

SEQ ID NO: 924514 - RNA, 19 nt, Artificial Sequence
  Description of Artificial Sequence: Synthetic oligonucleotide
  Sense strand starting at position 952 of SEQ ID NO: 913403
ugaugaugcgaauaaaggu

SEQ ID NO: 924515 - RNA, 19 nt, Artificial Sequence
  Description of Artificial Sequence: Synthetic oligonucleotide
  Antisense strand to SEQ ID NO: 924514
accuuuauucgcaucauca

SEQ ID NO: 924516 - RNA, 19 nt, Artificial Sequence
  Description of Artificial Sequence: Synthetic oligonucleotide
  Sense strand starting at position 2541 of SEQ ID NO: 913403
gcaaauaauuuggcuguuu

SEQ ID NO: 924517 - RNA, 19 nt, Artificial Sequence
  Description of Artificial Sequence: Synthetic oligonucleotide
  Antisense strand to SEQ ID NO: 924516
aaacagccaaauuauuugc

SEQ ID NO: 924518 - RNA, 19 nt, Artificial Sequence
  Description of Artificial Sequence: Synthetic oligonucleotide
  Sense strand starting at position 3810 of SEQ ID NO: 913403
agcagauaccuaugauaug

SEQ ID NO: 924519 - RNA, 19 nt, Artificial Sequence
  Description of Artificial Sequence: Synthetic oligonucleotide
  Antisense strand to SEQ ID NO: 924518
cauaucauagguaucugcu

SEQ ID NO: 924520 - RNA, 19 nt, Artificial Sequence
  Description of Artificial Sequence: Synthetic oligonucleotide
  Sense strand starting at position 192 of SEQ ID NO: 913403
cugcuuaauguggauaaua

SEQ ID NO: 924521 - RNA, 19 nt, Artificial Sequence
  Description of Artificial Sequence: Synthetic oligonucleotide
  Antisense strand to SEQ ID NO: 924520
uauuauccacauuaagcag

SEQ ID NO: 924522 - RNA, 19 nt, Artificial Sequence
  Description of Artificial Sequence: Synthetic oligonucleotide
  Sense strand starting at position 2652 of SEQ ID NO: 913403
ucagauacuuaggcaaauc

SEQ ID NO: 924523 - RNA, 19 nt, Artificial Sequence
  Description of Artificial Sequence: Synthetic oligonucleotide
  Antisense strand to SEQ ID NO: 924522
gauuugccuaaguaucuga

SEQ ID NO: 924524 - RNA, 19 nt, Artificial Sequence
  Description of Artificial Sequence: Synthetic oligonucleotide
  Sense strand starting at position 3420 of SEQ ID NO: 913403
guuacuuugggucauaaca

SEQ ID NO: 924525 - RNA, 19 nt, Artificial Sequence
  Description of Artificial Sequence: Synthetic oligonucleotide
  Antisense strand to SEQ ID NO: 924524
uguuaugacccaaaguaac

SEQ ID NO: 924526 - RNA, 19 nt, Artificial Sequence
  Description of Artificial Sequence: Synthetic oligonucleotide
  Sense strand starting at position 3692 of SEQ ID NO: 913403
aggccauguacccaggauu

SEQ ID NO: 924527 - RNA, 19 nt, Artificial Sequence
  Description of Artificial Sequence: Synthetic oligonucleotide
  Antisense strand to SEQ ID NO: 924526
aauccuggguacauggccu

SEQ ID NO: 924528 - RNA, 19 nt, Artificial Sequence
  Description of Artificial Sequence: Synthetic oligonucleotide
  Sense strand starting at position 1750 of SEQ ID NO: 913403
ggaugaccaggcugauauc

SEQ ID NO: 924529 - RNA, 19 nt, Artificial Sequence
  Description of Artificial Sequence: Synthetic oligonucleotide
  Antisense strand to SEQ ID NO: 924528
gauaucagccuggucaucc

SEQ ID NO: 924530 - RNA, 19 nt, Artificial Sequence
  Description of Artificial Sequence: Synthetic oligonucleotide
  Sense strand starting at position 998 of SEQ ID NO: 913403
aggauugcauccuuagaau

SEQ ID NO: 924531 - RNA, 19 nt, Artificial Sequence
  Description of Artificial Sequence: Synthetic oligonucleotide
  Antisense strand to SEQ ID NO: 924530
auucuaaggaugcaauccu

SEQ ID NO: 924532 - RNA, 19 nt, Artificial Sequence
  Description of Artificial Sequence: Synthetic oligonucleotide
  Sense strand starting at position 2148 of SEQ ID NO: 913403
cugacauuacagcauuagu

SEQ ID NO: 924533 - RNA, 19 nt, Artificial Sequence
  Description of Artificial Sequence: Synthetic oligonucleotide
  Antisense strand to SEQ ID NO: 924532
acuaaugcuguaaugucag

SEQ ID NO: 924534 - RNA, 19 nt, Artificial Sequence
  Description of Artificial Sequence: Synthetic oligonucleotide
  Sense strand starting at position 1936 of SEQ ID NO: 913403
gaugaacucuuucccgaag

SEQ ID NO: 924535 - RNA, 19 nt, Artificial Sequence
  Description of Artificial Sequence: Synthetic oligonucleotide
  Antisense strand to SEQ ID NO: 924534
cuucgggaaagaguucauc

SEQ ID NO: 924536 - RNA, 19 nt, Artificial Sequence
  Description of Artificial Sequence: Synthetic oligonucleotide
  Sense strand starting at position 3363 of SEQ ID NO: 913403
ugaucuccagcaugacaga

SEQ ID NO: 924537 - RNA, 19 nt, Artificial Sequence
  Description of Artificial Sequence: Synthetic oligonucleotide
  Antisense strand to SEQ ID NO: 924536
ucugucaugcuggagauca

SEQ ID NO: 924538 - RNA, 19 nt, Artificial Sequence
  Description of Artificial Sequence: Synthetic oligonucleotide
  Sense strand starting at position 1917 of SEQ ID NO: 913403
ugagacuccuuugcaggaa

SEQ ID NO: 924539 - RNA, 19 nt, Artificial Sequence
  Description of Artificial Sequence: Synthetic oligonucleotide
  Antisense strand to SEQ ID NO: 924538
uuccugcaaaggagucuca

SEQ ID NO: 924540 - RNA, 19 nt, Artificial Sequence
  Description of Artificial Sequence: Synthetic oligonucleotide
  Sense strand starting at position 2340 of SEQ ID NO: 913403
agacaucaucugugugaaa

SEQ ID NO: 924541 - RNA, 19 nt, Artificial Sequence
  Description of Artificial Sequence: Synthetic oligonucleotide
  Antisense strand to SEQ ID NO: 924540
uuucacacagaugaugucu

SEQ ID NO: 924542 - RNA, 19 nt, Artificial Sequence
  Description of Artificial Sequence: Synthetic oligonucleotide
  Sense strand starting at position 3124 of SEQ ID NO: 913403
uggauaugucagcauuauu

SEQ ID NO: 924543 - RNA, 19 nt, Artificial Sequence
  Description of Artificial Sequence: Synthetic oligonucleotide
  Antisense strand to SEQ ID NO: 924542
aauaaugcugacauaucca

SEQ ID NO: 924544 - RNA, 19 nt, Artificial Sequence
  Description of Artificial Sequence: Synthetic oligonucleotide
  Sense strand starting at position 1920 of SEQ ID NO: 913403
gacuccuuugcaggaagau

SEQ ID NO: 924545 - RNA, 19 nt, Artificial Sequence
  Description of Artificial Sequence: Synthetic oligonucleotide
  Antisense strand to SEQ ID NO: 924544
aucuuccugcaaaggaguc

SEQ ID NO: 924546 - RNA, 19 nt, Artificial Sequence
  Description of Artificial Sequence: Synthetic oligonucleotide
  Sense strand starting at position 3651 of SEQ ID NO: 913403
gauguuauuguccaaagug

SEQ ID NO: 924547 - RNA, 19 nt, Artificial Sequence
  Description of Artificial Sequence: Synthetic oligonucleotide
  Antisense strand to SEQ ID NO: 924546
cacuuuggacaauaacauc

SEQ ID NO: 924548 - RNA, 19 nt, Artificial Sequence
  Description of Artificial Sequence: Synthetic oligonucleotide
  Sense strand starting at position 2393 of SEQ ID NO: 913403
uguaguauaagaggaugua

SEQ ID NO: 924549 - RNA, 19 nt, Artificial Sequence
  Description of Artificial Sequence: Synthetic oligonucleotide
  Antisense strand to SEQ ID NO: 924548
uacauccucuuauacuaca

SEQ ID NO: 924550 - RNA, 19 nt, Artificial Sequence
  Description of Artificial Sequence: Synthetic oligonucleotide
  Sense strand starting at position 1655 of SEQ ID NO: 913403
gccucuucugagcaaauaa

SEQ ID NO: 924551 - RNA, 19 nt, Artificial Sequence
  Description of Artificial Sequence: Synthetic oligonucleotide
  Antisense strand to SEQ ID NO: 924550
uuauuugcucagaagaggc

SEQ ID NO: 924552 - RNA, 19 nt, Artificial Sequence
  Description of Artificial Sequence: Synthetic oligonucleotide
  Sense strand starting at position 3436 of SEQ ID NO: 913403
acagucuugguugggaaca

SEQ ID NO: 924553 - RNA, 19 nt, Artificial Sequence
  Description of Artificial Sequence: Synthetic oligonucleotide
  Antisense strand to SEQ ID NO: 924552
uguucccaaccaagacugu

SEQ ID NO: 924554 - RNA, 19 nt, Artificial Sequence
  Description of Artificial Sequence: Synthetic oligonucleotide
  Sense strand starting at position 2339 of SEQ ID NO: 913403
uagacaucaucugugugaa

SEQ ID NO: 924555 - RNA, 19 nt, Artificial Sequence
  Description of Artificial Sequence: Synthetic oligonucleotide
  Antisense strand to SEQ ID NO: 924554
uucacacagaugaugucua

SEQ ID NO: 924556 - RNA, 19 nt, Artificial Sequence
  Description of Artificial Sequence: Synthetic oligonucleotide
  Sense strand starting at position 1976 of SEQ ID NO: 913403
gcgcaguagcugucggaga

SEQ ID NO: 924557 - RNA, 19 nt, Artificial Sequence
  Description of Artificial Sequence: Synthetic oligonucleotide
  Antisense strand to SEQ ID NO: 924556
ucuccgacagcuacugcgc

SEQ ID NO: 924558 - RNA, 19 nt, Artificial Sequence
  Description of Artificial Sequence: Synthetic oligonucleotide
  Sense strand starting at position 2476 of SEQ ID NO: 913403
guuauuaaguaaguuggaa

SEQ ID NO: 924559 - RNA, 19 nt, Artificial Sequence
  Description of Artificial Sequence: Synthetic oligonucleotide
  Antisense strand to SEQ ID NO: 924558
uuccaacuuacuuaauaac

SEQ ID NO: 924560 - RNA, 19 nt, Artificial Sequence
  Description of Artificial Sequence: Synthetic oligonucleotide
  Sense strand starting at position 3867 of SEQ ID NO: 913403
ggucuuagagggcauguau

SEQ ID NO: 924561 - RNA, 19 nt, Artificial Sequence
  Description of Artificial Sequence: Synthetic oligonucleotide
  Antisense strand to SEQ ID NO: 924560
auacaugcccucuaagacc

SEQ ID NO: 924562 - RNA, 19 nt, Artificial Sequence
  Description of Artificial Sequence: Synthetic oligonucleotide
  Sense strand starting at position 751 of SEQ ID NO: 913403
gauuauuucucugaggacu

SEQ ID NO: 924563 - RNA, 19 nt, Artificial Sequence
  Description of Artificial Sequence: Synthetic oligonucleotide
  Antisense strand to SEQ ID NO: 924562
aguccucagagaaauaauc

SEQ ID NO: 924564 - RNA, 19 nt, Artificial Sequence
  Description of Artificial Sequence: Synthetic oligonucleotide
  Sense strand starting at position 3123 of SEQ ID NO: 913403
auggauaugucagcauuau

SEQ ID NO: 924565 - RNA, 19 nt, Artificial Sequence
  Description of Artificial Sequence: Synthetic oligonucleotide
  Antisense strand to SEQ ID NO: 924564
auaaugcugacauauccau

SEQ ID NO: 924566 - RNA, 19 nt, Artificial Sequence
  Description of Artificial Sequence: Synthetic oligonucleotide
  Sense strand starting at position 2416 of SEQ ID NO: 913403
uguugagaagugugacaau

SEQ ID NO: 924567 - RNA, 19 nt, Artificial Sequence
  Description of Artificial Sequence: Synthetic oligonucleotide
  Antisense strand to SEQ ID NO: 924566
auugucacacuucucaaca

SEQ ID NO: 924568 - RNA, 19 nt, Artificial Sequence
  Description of Artificial Sequence: Synthetic oligonucleotide
  Sense strand starting at position 402 of SEQ ID NO: 913403
ccacaucuuugcucaggga

SEQ ID NO: 924569 - RNA, 19 nt, Artificial Sequence
  Description of Artificial Sequence: Synthetic oligonucleotide
  Antisense strand to SEQ ID NO: 924568
ucccugagcaaagaugugg

SEQ ID NO: 924570 - RNA, 19 nt, Artificial Sequence
  Description of Artificial Sequence: Synthetic oligonucleotide
  Sense strand starting at position 2363 of SEQ ID NO: 913403
ugguuucggcauuaugaga

SEQ ID NO: 924571 - RNA, 19 nt, Artificial Sequence
  Description of Artificial Sequence: Synthetic oligonucleotide
  Antisense strand to SEQ ID NO: 924570
ucucauaaugccgaaacca

SEQ ID NO: 924572 - RNA, 19 nt, Artificial Sequence
  Description of Artificial Sequence: Synthetic oligonucleotide
  Sense strand starting at position 2168 of SEQ ID NO: 913403
uguugaaguuucuccaaag

SEQ ID NO: 924573 - RNA, 19 nt, Artificial Sequence
  Description of Artificial Sequence: Synthetic oligonucleotide
  Antisense strand to SEQ ID NO: 924572
cuuuggagaaacuucaaca

SEQ ID NO: 924574 - RNA, 19 nt, Artificial Sequence
  Description of Artificial Sequence: Synthetic oligonucleotide
  Sense strand starting at position 2953 of SEQ ID NO: 913403
ugacgaucuaauugaugca

SEQ ID NO: 924575 - RNA, 19 nt, Artificial Sequence
  Description of Artificial Sequence: Synthetic oligonucleotide
  Antisense strand to SEQ ID NO: 924574
ugcaucaauuagaucguca

SEQ ID NO: 924576 - RNA, 19 nt, Artificial Sequence
  Description of Artificial Sequence: Synthetic oligonucleotide
  Sense strand starting at position 2633 of SEQ ID NO: 913403
auaauuggguugcuugaau

SEQ ID NO: 924577 - RNA, 19 nt, Artificial Sequence
  Description of Artificial Sequence: Synthetic oligonucleotide
  Antisense strand to SEQ ID NO: 924576
auucaagcaacccaauuau

SEQ ID NO: 924578 - RNA, 19 nt, Artificial Sequence
  Description of Artificial Sequence: Synthetic oligonucleotide
  Sense strand starting at position 3184 of SEQ ID NO: 913404
ggaauaaucuaauccagug

SEQ ID NO: 924579 - RNA, 19 nt, Artificial Sequence
  Description of Artificial Sequence: Synthetic oligonucleotide
  Antisense strand to SEQ ID NO: 924578
cacuggauuagauuauucc

SEQ ID NO: 924580 - RNA, 19 nt, Artificial Sequence
  Description of Artificial Sequence: Synthetic oligonucleotide
  Sense strand starting at position 120 of SEQ ID NO: 913404
gaacacuguugauugauga

SEQ ID NO: 924581 - RNA, 19 nt, Artificial Sequence
  Description of Artificial Sequence: Synthetic oligonucleotide
  Antisense strand to SEQ ID NO: 924580
ucaucaaucaacaguguuc

SEQ ID NO: 924582 - RNA, 19 nt, Artificial Sequence
  Description of Artificial Sequence: Synthetic oligonucleotide
  Sense strand starting at position 593 of SEQ ID NO: 913404
gguuaacaagugggacaau

SEQ ID NO: 924583 - RNA, 19 nt, Artificial Sequence
  Description of Artificial Sequence: Synthetic oligonucleotide
  Antisense strand to SEQ ID NO: 924582
auugucccacuuguuaacc

SEQ ID NO: 924584 - RNA, 19 nt, Artificial Sequence
  Description of Artificial Sequence: Synthetic oligonucleotide
  Sense strand starting at position 1550 of SEQ ID NO: 913404
ugcugauuagcugagggaa

SEQ ID NO: 924585 - RNA, 19 nt, Artificial Sequence
  Description of Artificial Sequence: Synthetic oligonucleotide
  Antisense strand to SEQ ID NO: 924584
uucccucagcuaaucagca

SEQ ID NO: 924586 - RNA, 19 nt, Artificial Sequence
  Description of Artificial Sequence: Synthetic oligonucleotide
  Sense strand starting at position 3080 of SEQ ID NO: 913404
uaaagaggugguugauuga

SEQ ID NO: 924587 - RNA, 19 nt, Artificial Sequence
  Description of Artificial Sequence: Synthetic oligonucleotide
  Antisense strand to SEQ ID NO: 924586
ucaaucaaccaccucuuua

SEQ ID NO: 924588 - RNA, 19 nt, Artificial Sequence
  Description of Artificial Sequence: Synthetic oligonucleotide
  Sense strand starting at position 121 of SEQ ID NO: 913404
aacacuguugauugaugau

SEQ ID NO: 924589 - RNA, 19 nt, Artificial Sequence
  Description of Artificial Sequence: Synthetic oligonucleotide
  Antisense strand to SEQ ID NO: 924588
aucaucaaucaacaguguu

SEQ ID NO: 924590 - RNA, 19 nt, Artificial Sequence
  Description of Artificial Sequence: Synthetic oligonucleotide
  Sense strand starting at position 3282 of SEQ ID NO: 913404
ggaauaccuguauaugcau

SEQ ID NO: 924591 - RNA, 19 nt, Artificial Sequence
  Description of Artificial Sequence: Synthetic oligonucleotide
  Antisense strand to SEQ ID NO: 924590
augcauauacagguauucc

SEQ ID NO: 924592 - RNA, 19 nt, Artificial Sequence
  Description of Artificial Sequence: Synthetic oligonucleotide
  Sense strand starting at position 3076 of SEQ ID NO: 913404
ccauuaaagaggugguuga

SEQ ID NO: 924593 - RNA, 19 nt, Artificial Sequence
  Description of Artificial Sequence: Synthetic oligonucleotide
  Antisense strand to SEQ ID NO: 924592
ucaaccaccucuuuaaugg

SEQ ID NO: 924594 - RNA, 19 nt, Artificial Sequence
  Description of Artificial Sequence: Synthetic oligonucleotide
  Sense strand starting at position 3077 of SEQ ID NO: 913404
cauuaaagaggugguugau

SEQ ID NO: 924595 - RNA, 19 nt, Artificial Sequence
  Description of Artificial Sequence: Synthetic oligonucleotide
  Antisense strand to SEQ ID NO: 924594
aucaaccaccucuuuaaug

SEQ ID NO: 924596 - RNA, 19 nt, Artificial Sequence
  Description of Artificial Sequence: Synthetic oligonucleotide
  Sense strand starting at position 900 of SEQ ID NO: 913404
agggaauugcuacgacaca

SEQ ID NO: 924597 - RNA, 19 nt, Artificial Sequence
  Description of Artificial Sequence: Synthetic oligonucleotide
  Antisense strand to SEQ ID NO: 924596
ugugucguagcaauucccu

SEQ ID NO: 924598 - RNA, 19 nt, Artificial Sequence
  Description of Artificial Sequence: Synthetic oligonucleotide
  Sense strand starting at position 889 of SEQ ID NO: 913404
cuguuaagagcagggaauu

SEQ ID NO: 924599 - RNA, 19 nt, Artificial Sequence
  Description of Artificial Sequence: Synthetic oligonucleotide
  Antisense strand to SEQ ID NO: 924598
aauucccugcucuuaacag

SEQ ID NO: 924600 - RNA, 19 nt, Artificial Sequence
  Description of Artificial Sequence: Synthetic oligonucleotide
  Sense strand starting at position 3013 of SEQ ID NO: 913404
caaggagucugggcagauc

SEQ ID NO: 924601 - RNA, 19 nt, Artificial Sequence
  Description of Artificial Sequence: Synthetic oligonucleotide
  Antisense strand to SEQ ID NO: 924600
gaucugcccagacuccuug

SEQ ID NO: 924602 - RNA, 19 nt, Artificial Sequence
  Description of Artificial Sequence: Synthetic oligonucleotide
  Sense strand starting at position 223 of SEQ ID NO: 913404
aguaguugucuugaacuga

SEQ ID NO: 924603 - RNA, 19 nt, Artificial Sequence
  Description of Artificial Sequence: Synthetic oligonucleotide
  Antisense strand to SEQ ID NO: 924602
ucaguucaagacaacuacu

SEQ ID NO: 924604 - RNA, 19 nt, Artificial Sequence
  Description of Artificial Sequence: Synthetic oligonucleotide
  Sense strand starting at position 1545 of SEQ ID NO: 913404
ggaagugcugauuagcuga

SEQ ID NO: 924605 - RNA, 19 nt, Artificial Sequence
  Description of Artificial Sequence: Synthetic oligonucleotide
  Antisense strand to SEQ ID NO: 924604
ucagcuaaucagcacuucc

SEQ ID NO: 924606 - RNA, 19 nt, Artificial Sequence
  Description of Artificial Sequence: Synthetic oligonucleotide
  Sense strand starting at position 591 of SEQ ID NO: 913404
gugguuaacaagugggaca

SEQ ID NO: 924607 - RNA, 19 nt, Artificial Sequence
  Description of Artificial Sequence: Synthetic oligonucleotide
  Antisense strand to SEQ ID NO: 924606
ugucccacuuguuaaccac

SEQ ID NO: 924608 - RNA, 19 nt, Artificial Sequence
  Description of Artificial Sequence: Synthetic oligonucleotide
  Sense strand starting at position 3039 of SEQ ID NO: 913404
gccuuauauggcuacacua

SEQ ID NO: 924609 - RNA, 19 nt, Artificial Sequence
  Description of Artificial Sequence: Synthetic oligonucleotide
  Antisense strand to SEQ ID NO: 924608
uaguguagccauauaaggc

SEQ ID NO: 924610 - RNA, 19 nt, Artificial Sequence
  Description of Artificial Sequence: Synthetic oligonucleotide
  Sense strand starting at position 180 of SEQ ID NO: 913404
ggaccuuuauaugcugauu

SEQ ID NO: 924611 - RNA, 19 nt, Artificial Sequence
  Description of Artificial Sequence: Synthetic oligonucleotide
  Antisense strand to SEQ ID NO: 924610
aaucagcauauaaaggucc

SEQ ID NO: 924612 - RNA, 19 nt, Artificial Sequence
  Description of Artificial Sequence: Synthetic oligonucleotide
  Sense strand starting at position 480 of SEQ ID NO: 913404
ggcacugucccaggaaacu

SEQ ID NO: 924613 - RNA, 19 nt, Artificial Sequence
  Description of Artificial Sequence: Synthetic oligonucleotide
  Antisense strand to SEQ ID NO: 924612
aguuuccugggacagugcc

SEQ ID NO: 924614 - RNA, 19 nt, Artificial Sequence
  Description of Artificial Sequence: Synthetic oligonucleotide
  Sense strand starting at position 3291 of SEQ ID NO: 913404
guauaugcauuaucuaaug

SEQ ID NO: 924615 - RNA, 19 nt, Artificial Sequence
  Description of Artificial Sequence: Synthetic oligonucleotide
  Antisense strand to SEQ ID NO: 924614
cauuagauaaugcauauac

SEQ ID NO: 924616 - RNA, 19 nt, Artificial Sequence
  Description of Artificial Sequence: Synthetic oligonucleotide
  Sense strand starting at position 2627 of SEQ ID NO: 913404
gggcaaugccaguaacagu

SEQ ID NO: 924617 - RNA, 19 nt, Artificial Sequence
  Description of Artificial Sequence: Synthetic oligonucleotide
  Antisense strand to SEQ ID NO: 924616
acuguuacuggcauugccc

SEQ ID NO: 924618 - RNA, 19 nt, Artificial Sequence
  Description of Artificial Sequence: Synthetic oligonucleotide
  Sense strand starting at position 220 of SEQ ID NO: 913404
aacaguaguugucuugaac

SEQ ID NO: 924619 - RNA, 19 nt, Artificial Sequence
  Description of Artificial Sequence: Synthetic oligonucleotide
  Antisense strand to SEQ ID NO: 924618
guucaagacaacuacuguu

SEQ ID NO: 924620 - RNA, 19 nt, Artificial Sequence
  Description of Artificial Sequence: Synthetic oligonucleotide
  Sense strand starting at position 3669 of SEQ ID NO: 913404
agacaugcagucuguaaca

SEQ ID NO: 924621 - RNA, 19 nt, Artificial Sequence
  Description of Artificial Sequence: Synthetic oligonucleotide
  Antisense strand to SEQ ID NO: 924620
uguuacagacugcaugucu

SEQ ID NO: 924622 - RNA, 19 nt, Artificial Sequence
  Description of Artificial Sequence: Synthetic oligonucleotide
  Sense strand starting at position 1372 of SEQ ID NO: 913404
gcucucugacucgaucgaa

SEQ ID NO: 924623 - RNA, 19 nt, Artificial Sequence
  Description of Artificial Sequence: Synthetic oligonucleotide
  Antisense strand to SEQ ID NO: 924622
uucgaucgagucagagagc

SEQ ID NO: 924624 - RNA, 19 nt, Artificial Sequence
  Description of Artificial Sequence: Synthetic oligonucleotide
  Sense strand starting at position 3201 of SEQ ID NO: 913404
uguuucugcaagugaagga

SEQ ID NO: 924625 - RNA, 19 nt, Artificial Sequence
  Description of Artificial Sequence: Synthetic oligonucleotide
  Antisense strand to SEQ ID NO: 924624
uccuucacuugcagaaaca

SEQ ID NO: 924626 - RNA, 19 nt, Artificial Sequence
  Description of Artificial Sequence: Synthetic oligonucleotide
  Sense strand starting at position 954 of SEQ ID NO: 913404
uccagauuccgucaagcuu

SEQ ID NO: 924627 - RNA, 19 nt, Artificial Sequence
  Description of Artificial Sequence: Synthetic oligonucleotide
  Antisense strand to SEQ ID NO: 924626
aagcuugacggaaucugga

SEQ ID NO: 924628 - RNA, 19 nt, Artificial Sequence
  Description of Artificial Sequence: Synthetic oligonucleotide
  Sense strand starting at position 862 of SEQ ID NO: 913404
acuguagcgccuuagaaau

SEQ ID NO: 924629 - RNA, 19 nt, Artificial Sequence
  Description of Artificial Sequence: Synthetic oligonucleotide
  Antisense strand to SEQ ID NO: 924628
auuucuaaggcgcuacagu

SEQ ID NO: 924630 - RNA, 19 nt, Artificial Sequence
  Description of Artificial Sequence: Synthetic oligonucleotide
  Sense strand starting at position 583 of SEQ ID NO: 913404
ucugcugagugguuaacaa

SEQ ID NO: 924631 - RNA, 19 nt, Artificial Sequence
  Description of Artificial Sequence: Synthetic oligonucleotide
  Antisense strand to SEQ ID NO: 924630
uuguuaaccacucagcaga

SEQ ID NO: 924632 - RNA, 19 nt, Artificial Sequence
  Description of Artificial Sequence: Synthetic oligonucleotide
  Sense strand starting at position 3955 of SEQ ID NO: 913404
guuauagguuugguuauua

SEQ ID NO: 924633 - RNA, 19 nt, Artificial Sequence
  Description of Artificial Sequence: Synthetic oligonucleotide
  Antisense strand to SEQ ID NO: 924632
uaauaaccaaaccuauaac

SEQ ID NO: 924634 - RNA, 19 nt, Artificial Sequence
  Description of Artificial Sequence: Synthetic oligonucleotide
  Sense strand starting at position 3434 of SEQ ID NO: 913404
uagugaggguccucuucuu

SEQ ID NO: 924635 - RNA, 19 nt, Artificial Sequence
  Description of Artificial Sequence: Synthetic oligonucleotide
  Antisense strand to SEQ ID NO: 924634
aagaagaggacccucacua

SEQ ID NO: 924636 - RNA, 19 nt, Artificial Sequence
  Description of Artificial Sequence: Synthetic oligonucleotide
  Sense strand starting at position 414 of SEQ ID NO: 913404
acauuaaugcguggcaaga

SEQ ID NO: 924637 - RNA, 19 nt, Artificial Sequence
  Description of Artificial Sequence: Synthetic oligonucleotide
  Antisense strand to SEQ ID NO: 924636
ucuugccacgcauuaaugu

SEQ ID NO: 924638 - RNA, 19 nt, Artificial Sequence
  Description of Artificial Sequence: Synthetic oligonucleotide
  Sense strand starting at position 413 of SEQ ID NO: 913404
aacauuaaugcguggcaag

SEQ ID NO: 924639 - RNA, 19 nt, Artificial Sequence
  Description of Artificial Sequence: Synthetic oligonucleotide
  Antisense strand to SEQ ID NO: 924638
cuugccacgcauuaauguu

SEQ ID NO: 924640 - RNA, 19 nt, Artificial Sequence
  Description of Artificial Sequence: Synthetic oligonucleotide
  Sense strand starting at position 124 of SEQ ID NO: 913404
acuguugauugaugauuua

SEQ ID NO: 924641 - RNA, 19 nt, Artificial Sequence
  Description of Artificial Sequence: Synthetic oligonucleotide
  Antisense strand to SEQ ID NO: 924640
uaaaucaucaaucaacagu

SEQ ID NO: 924642 - RNA, 19 nt, Artificial Sequence
  Description of Artificial Sequence: Synthetic oligonucleotide
  Sense strand starting at position 445 of SEQ ID NO: 913404
gagagcugauguucgcaga

SEQ ID NO: 924643 - RNA, 19 nt, Artificial Sequence
  Description of Artificial Sequence: Synthetic oligonucleotide
  Antisense strand to SEQ ID NO: 924642
ucugcgaacaucagcucuc

SEQ ID NO: 924644 - RNA, 19 nt, Artificial Sequence
  Description of Artificial Sequence: Synthetic oligonucleotide
  Sense strand starting at position 412 of SEQ ID NO: 913404
uaacauuaaugcguggcaa

SEQ ID NO: 924645 - RNA, 19 nt, Artificial Sequence
  Description of Artificial Sequence: Synthetic oligonucleotide
  Antisense strand to SEQ ID NO: 924644
uugccacgcauuaauguua

SEQ ID NO: 924646 - RNA, 19 nt, Artificial Sequence
  Description of Artificial Sequence: Synthetic oligonucleotide
  Sense strand starting at position 3953 of SEQ ID NO: 913404
cuguuauagguuugguuau

SEQ ID NO: 924647 - RNA, 19 nt, Artificial Sequence
  Description of Artificial Sequence: Synthetic oligonucleotide
  Antisense strand to SEQ ID NO: 924646
auaaccaaaccuauaacag

SEQ ID NO: 924648 - RNA, 19 nt, Artificial Sequence
  Description of Artificial Sequence: Synthetic oligonucleotide
  Sense strand starting at position 1107 of SEQ ID NO: 913404
aguugcaugucaguuaaca

SEQ ID NO: 924649 - RNA, 19 nt, Artificial Sequence
  Description of Artificial Sequence: Synthetic oligonucleotide
  Antisense strand to SEQ ID NO: 924648
uguuaacugacaugcaacu

SEQ ID NO: 924650 - RNA, 19 nt, Artificial Sequence
  Description of Artificial Sequence: Synthetic oligonucleotide
  Sense strand starting at position 3307 of SEQ ID NO: 913404
augucuuagucugcuugga

SEQ ID NO: 924651 - RNA, 19 nt, Artificial Sequence
  Description of Artificial Sequence: Synthetic oligonucleotide
  Antisense strand to SEQ ID NO: 924650
uccaagcagacuaagacau

SEQ ID NO: 924652 - RNA, 19 nt, Artificial Sequence
  Description of Artificial Sequence: Synthetic oligonucleotide
  Sense strand starting at position 2660 of SEQ ID NO: 913404
ugacuugacucuuaagaga

SEQ ID NO: 924653 - RNA, 19 nt, Artificial Sequence
  Description of Artificial Sequence: Synthetic oligonucleotide
  Antisense strand to SEQ ID NO: 924652
ucucuuaagagucaaguca

SEQ ID NO: 924654 - RNA, 19 nt, Artificial Sequence
  Description of Artificial Sequence: Synthetic oligonucleotide
  Sense strand starting at position 2817 of SEQ ID NO: 913404
auggauuuaucugguuuau

SEQ ID NO: 924655 - RNA, 19 nt, Artificial Sequence
  Description of Artificial Sequence: Synthetic oligonucleotide
  Antisense strand to SEQ ID NO: 924654
auaaaccagauaaauccau

SEQ ID NO: 924656 - RNA, 19 nt, Artificial Sequence
  Description of Artificial Sequence: Synthetic oligonucleotide
  Sense strand starting at position 579 of SEQ ID NO: 913404
aaugucugcugagugguua

SEQ ID NO: 924657 - RNA, 19 nt, Artificial Sequence
  Description of Artificial Sequence: Synthetic oligonucleotide
  Antisense strand to SEQ ID NO: 924656
uaaccacucagcagacauu

SEQ ID NO: 924658 - RNA, 19 nt, Artificial Sequence
  Description of Artificial Sequence: Synthetic oligonucleotide
  Sense strand starting at position 3429 of SEQ ID NO: 913405
gcagguuaggaguaaugaa

SEQ ID NO: 924659 - RNA, 19 nt, Artificial Sequence
  Description of Artificial Sequence: Synthetic oligonucleotide
  Antisense strand to SEQ ID NO: 924658
uucauuacuccuaaccugc

SEQ ID NO: 924660 - RNA, 19 nt, Artificial Sequence
  Description of Artificial Sequence: Synthetic oligonucleotide
  Sense strand starting at position 3855 of SEQ ID NO: 913405
gauccuguucuggaucaca

SEQ ID NO: 924661 - RNA, 19 nt, Artificial Sequence
  Description of Artificial Sequence: Synthetic oligonucleotide
  Antisense strand to SEQ ID NO: 924660
ugugauccagaacaggauc

SEQ ID NO: 924662 - RNA, 19 nt, Artificial Sequence
  Description of Artificial Sequence: Synthetic oligonucleotide
  Sense strand starting at position 751 of SEQ ID NO: 913405
acauaaagcgcuuagaaga

SEQ ID NO: 924663 - RNA, 19 nt, Artificial Sequence
  Description of Artificial Sequence: Synthetic oligonucleotide
  Antisense strand to SEQ ID NO: 924662
ucuucuaagcgcuuuaugu

SEQ ID NO: 924664 - RNA, 19 nt, Artificial Sequence
  Description of Artificial Sequence: Synthetic oligonucleotide
  Sense strand starting at position 3397 of SEQ ID NO: 913405
gcaacucagaaagguugaa

SEQ ID NO: 924665 - RNA, 19 nt, Artificial Sequence
  Description of Artificial Sequence: Synthetic oligonucleotide
  Antisense strand to SEQ ID NO: 924664
uucaaccuuucugaguugc

SEQ ID NO: 924666 - RNA, 19 nt, Artificial Sequence
  Description of Artificial Sequence: Synthetic oligonucleotide
  Sense strand starting at position 3851 of SEQ ID NO: 913405
ggaagauccuguucuggau

SEQ ID NO: 924667 - RNA, 19 nt, Artificial Sequence
  Description of Artificial Sequence: Synthetic oligonucleotide
  Antisense strand to SEQ ID NO: 924666
auccagaacaggaucuucc

SEQ ID NO: 924668 - RNA, 19 nt, Artificial Sequence
  Description of Artificial Sequence: Synthetic oligonucleotide
  Sense strand starting at position 673 of SEQ ID NO: 913405
cucgauuucucuccguaaa

SEQ ID NO: 924669 - RNA, 19 nt, Artificial Sequence
  Description of Artificial Sequence: Synthetic oligonucleotide
  Antisense strand to SEQ ID NO: 924668
uuuacggagagaaaucgag

SEQ ID NO: 924670 - RNA, 19 nt, Artificial Sequence
  Description of Artificial Sequence: Synthetic oligonucleotide
  Sense strand starting at position 675 of SEQ ID NO: 913405
cgauuucucuccguaaauc

SEQ ID NO: 924671 - RNA, 19 nt, Artificial Sequence
  Description of Artificial Sequence: Synthetic oligonucleotide
  Antisense strand to SEQ ID NO: 924670
gauuuacggagagaaaucg

SEQ ID NO: 924672 - RNA, 19 nt, Artificial Sequence
  Description of Artificial Sequence: Synthetic oligonucleotide
  Sense strand starting at position 674 of SEQ ID NO: 913405
ucgauuucucuccguaaau

SEQ ID NO: 924673 - RNA, 19 nt, Artificial Sequence
  Description of Artificial Sequence: Synthetic oligonucleotide
  Antisense strand to SEQ ID NO: 924672
auuuacggagagaaaucga

SEQ ID NO: 924674 - RNA, 19 nt, Artificial Sequence
  Description of Artificial Sequence: Synthetic oligonucleotide
  Sense strand starting at position 3516 of SEQ ID NO: 913405
ucuuccuucggugaauaaa

SEQ ID NO: 924675 - RNA, 19 nt, Artificial Sequence
  Description of Artificial Sequence: Synthetic oligonucleotide
  Antisense strand to SEQ ID NO: 924674
uuuauucaccgaaggaaga

SEQ ID NO: 924676 - RNA, 19 nt, Artificial Sequence
  Description of Artificial Sequence: Synthetic oligonucleotide
  Sense strand starting at position 1066 of SEQ ID NO: 913405
ucuggaacgcucgagaaau

SEQ ID NO: 924677 - RNA, 19 nt, Artificial Sequence
  Description of Artificial Sequence: Synthetic oligonucleotide
  Antisense strand to SEQ ID NO: 924676
auuucucgagcguuccaga

SEQ ID NO: 924678 - RNA, 19 nt, Artificial Sequence
  Description of Artificial Sequence: Synthetic oligonucleotide
  Sense strand starting at position 685 of SEQ ID NO: 913405
ccguaaauccagcauaaua

SEQ ID NO: 924679 - RNA, 19 nt, Artificial Sequence
  Description of Artificial Sequence: Synthetic oligonucleotide
  Antisense strand to SEQ ID NO: 924678
uauuaugcuggauuuacgg

SEQ ID NO: 924680 - RNA, 19 nt, Artificial Sequence
  Description of Artificial Sequence: Synthetic oligonucleotide
  Sense strand starting at position 3437 of SEQ ID NO: 913405
ggaguaaugaacugagcuu

SEQ ID NO: 924681 - RNA, 19 nt, Artificial Sequence
  Description of Artificial Sequence: Synthetic oligonucleotide
  Antisense strand to SEQ ID NO: 924680
aagcucaguucauuacucc

SEQ ID NO: 924682 - RNA, 19 nt, Artificial Sequence
  Description of Artificial Sequence: Synthetic oligonucleotide
  Sense strand starting at position 114 of SEQ ID NO: 913405
uggcuaucagccuaacaau

SEQ ID NO: 924683 - RNA, 19 nt, Artificial Sequence
  Description of Artificial Sequence: Synthetic oligonucleotide
  Antisense strand to SEQ ID NO: 924682
auuguuaggcugauagcca

SEQ ID NO: 924684 - RNA, 19 nt, Artificial Sequence
  Description of Artificial Sequence: Synthetic oligonucleotide
  Sense strand starting at position 3139 of SEQ ID NO: 913405
ccauauauccucgaguuac

SEQ ID NO: 924685 - RNA, 19 nt, Artificial Sequence
  Description of Artificial Sequence: Synthetic oligonucleotide
  Antisense strand to SEQ ID NO: 924684
guaacucgaggauauaugg

SEQ ID NO: 924686 - RNA, 19 nt, Artificial Sequence
  Description of Artificial Sequence: Synthetic oligonucleotide
  Sense strand starting at position 3410 of SEQ ID NO: 913405
guugaaauauuggccaaug

SEQ ID NO: 924687 - RNA, 19 nt, Artificial Sequence
  Description of Artificial Sequence: Synthetic oligonucleotide
  Antisense strand to SEQ ID NO: 924686
cauuggccaauauuucaac

SEQ ID NO: 924688 - RNA, 19 nt, Artificial Sequence
  Description of Artificial Sequence: Synthetic oligonucleotide
  Sense strand starting at position 719 of SEQ ID NO: 913405
agaguuguuguagggaaua

SEQ ID NO: 924689 - RNA, 19 nt, Artificial Sequence
  Description of Artificial Sequence: Synthetic oligonucleotide
  Antisense strand to SEQ ID NO: 924688
uauucccuacaacaacucu

SEQ ID NO: 924690 - RNA, 19 nt, Artificial Sequence
  Description of Artificial Sequence: Synthetic oligonucleotide
  Sense strand starting at position 2895 of SEQ ID NO: 913405
cuccaucugggacgauauu

SEQ ID NO: 924691 - RNA, 19 nt, Artificial Sequence
  Description of Artificial Sequence: Synthetic oligonucleotide
  Antisense strand to SEQ ID NO: 924690
aauaucgucccagauggag

SEQ ID NO: 924692 - RNA, 19 nt, Artificial Sequence
  Description of Artificial Sequence: Synthetic oligonucleotide
  Sense strand starting at position 3409 of SEQ ID NO: 913405
gguugaaauauuggccaau

SEQ ID NO: 924693 - RNA, 19 nt, Artificial Sequence
  Description of Artificial Sequence: Synthetic oligonucleotide
  Antisense strand to SEQ ID NO: 924692
auuggccaauauuucaacc

SEQ ID NO: 924694 - RNA, 19 nt, Artificial Sequence
  Description of Artificial Sequence: Synthetic oligonucleotide
  Sense strand starting at position 3261 of SEQ ID NO: 913405
guuuguuguaacuacauag

SEQ ID NO: 924695 - RNA, 19 nt, Artificial Sequence
  Description of Artificial Sequence: Synthetic oligonucleotide
  Antisense strand to SEQ ID NO: 924694
cuauguaguuacaacaaac

SEQ ID NO: 924696 - RNA, 19 nt, Artificial Sequence
  Description of Artificial Sequence: Synthetic oligonucleotide
  Sense strand starting at position 200 of SEQ ID NO: 913405
cuaagaagcugacuuucuu

SEQ ID NO: 924697 - RNA, 19 nt, Artificial Sequence
  Description of Artificial Sequence: Synthetic oligonucleotide
  Antisense strand to SEQ ID NO: 924696
aagaaagucagcuucuuag

SEQ ID NO: 924698 - RNA, 19 nt, Artificial Sequence
  Description of Artificial Sequence: Synthetic oligonucleotide
  Sense strand starting at position 928 of SEQ ID NO: 913405
ucacaaugcgcauguauuu

SEQ ID NO: 924699 - RNA, 19 nt, Artificial Sequence
  Description of Artificial Sequence: Synthetic oligonucleotide
  Antisense strand to SEQ ID NO: 924698
aaauacaugcgcauuguga

SEQ ID NO: 924700 - RNA, 19 nt, Artificial Sequence
  Description of Artificial Sequence: Synthetic oligonucleotide
  Sense strand starting at position 3903 of SEQ ID NO: 913405
gaagaauucuuucuagugu

SEQ ID NO: 924701 - RNA, 19 nt, Artificial Sequence
  Description of Artificial Sequence: Synthetic oligonucleotide
  Antisense strand to SEQ ID NO: 924700
acacuagaaagaauucuuc

SEQ ID NO: 924702 - RNA, 19 nt, Artificial Sequence
  Description of Artificial Sequence: Synthetic oligonucleotide
  Sense strand starting at position 663 of SEQ ID NO: 913405
aauguaucgccucgauuuc

SEQ ID NO: 924703 - RNA, 19 nt, Artificial Sequence
  Description of Artificial Sequence: Synthetic oligonucleotide
  Antisense strand to SEQ ID NO: 924702
gaaaucgaggcgauacauu

SEQ ID NO: 924704 - RNA, 19 nt, Artificial Sequence
  Description of Artificial Sequence: Synthetic oligonucleotide
  Sense strand starting at position 640 of SEQ ID NO: 913405
uguaauccuggccaaguua

SEQ ID NO: 924705 - RNA, 19 nt, Artificial Sequence
  Description of Artificial Sequence: Synthetic oligonucleotide
  Antisense strand to SEQ ID NO: 924704
uaacuuggccaggauuaca

SEQ ID NO: 924706 - RNA, 19 nt, Artificial Sequence
  Description of Artificial Sequence: Synthetic oligonucleotide
  Sense strand starting at position 1003 of SEQ ID NO: 913405
gggcaucauaacugauugu

SEQ ID NO: 924707 - RNA, 19 nt, Artificial Sequence
  Description of Artificial Sequence: Synthetic oligonucleotide
  Antisense strand to SEQ ID NO: 924706
acaaucaguuaugaugccc

SEQ ID NO: 924708 - RNA, 19 nt, Artificial Sequence
  Description of Artificial Sequence: Synthetic oligonucleotide
  Sense strand starting at position 2906 of SEQ ID NO: 913405
acgauauucugccuugaaa

SEQ ID NO: 924709 - RNA, 19 nt, Artificial Sequence
  Description of Artificial Sequence: Synthetic oligonucleotide
  Antisense strand to SEQ ID NO: 924708
uuucaaggcagaauaucgu

SEQ ID NO: 924710 - RNA, 19 nt, Artificial Sequence
  Description of Artificial Sequence: Synthetic oligonucleotide
  Sense strand starting at position 3560 of SEQ ID NO: 913405
auaccucagcagugacuua

SEQ ID NO: 924711 - RNA, 19 nt, Artificial Sequence
  Description of Artificial Sequence: Synthetic oligonucleotide
  Antisense strand to SEQ ID NO: 924710
uaagucacugcugagguau

SEQ ID NO: 924712 - RNA, 19 nt, Artificial Sequence
  Description of Artificial Sequence: Synthetic oligonucleotide
  Sense strand starting at position 3494 of SEQ ID NO: 913405
cuucuauuagcagaugcuu

SEQ ID NO: 924713 - RNA, 19 nt, Artificial Sequence
  Description of Artificial Sequence: Synthetic oligonucleotide
  Antisense strand to SEQ ID NO: 924712
aagcaucugcuaauagaag

SEQ ID NO: 924714 - RNA, 19 nt, Artificial Sequence
  Description of Artificial Sequence: Synthetic oligonucleotide
  Sense strand starting at position 2904 of SEQ ID NO: 913405
ggacgauauucugccuuga

SEQ ID NO: 924715 - RNA, 19 nt, Artificial Sequence
  Description of Artificial Sequence: Synthetic oligonucleotide
  Antisense strand to SEQ ID NO: 924714
ucaaggcagaauaucgucc

SEQ ID NO: 924716 - RNA, 19 nt, Artificial Sequence
  Description of Artificial Sequence: Synthetic oligonucleotide
  Sense strand starting at position 3027 of SEQ ID NO: 913405
ccaagauuggcuggcauau

SEQ ID NO: 924717 - RNA, 19 nt, Artificial Sequence
  Description of Artificial Sequence: Synthetic oligonucleotide
  Antisense strand to SEQ ID NO: 924716
auaugccagccaaucuugg

SEQ ID NO: 924718 - RNA, 19 nt, Artificial Sequence
  Description of Artificial Sequence: Synthetic oligonucleotide
  Sense strand starting at position 602 of SEQ ID NO: 913405
ccagcugauuuggaaucau

SEQ ID NO: 924719 - RNA, 19 nt, Artificial Sequence
  Description of Artificial Sequence: Synthetic oligonucleotide
  Antisense strand to SEQ ID NO: 924718
augauuccaaaucagcugg

SEQ ID NO: 924720 - RNA, 19 nt, Artificial Sequence
  Description of Artificial Sequence: Synthetic oligonucleotide
  Sense strand starting at position 3515 of SEQ ID NO: 913405
uucuuccuucggugaauaa

SEQ ID NO: 924721 - RNA, 19 nt, Artificial Sequence
  Description of Artificial Sequence: Synthetic oligonucleotide
  Antisense strand to SEQ ID NO: 924720
uuauucaccgaaggaagaa

SEQ ID NO: 924722 - RNA, 19 nt, Artificial Sequence
  Description of Artificial Sequence: Synthetic oligonucleotide
  Sense strand starting at position 628 of SEQ ID NO: 913405
cccuuacuacuguguaauc

SEQ ID NO: 924723 - RNA, 19 nt, Artificial Sequence
  Description of Artificial Sequence: Synthetic oligonucleotide
  Antisense strand to SEQ ID NO: 924722
gauuacacaguaguaaggg

SEQ ID NO: 924724 - RNA, 19 nt, Artificial Sequence
  Description of Artificial Sequence: Synthetic oligonucleotide
  Sense strand starting at position 8 of SEQ ID NO: 913405
aaaguaugcuguguuuaaa

SEQ ID NO: 924725 - RNA, 19 nt, Artificial Sequence
  Description of Artificial Sequence: Synthetic oligonucleotide
  Antisense strand to SEQ ID NO: 924724
uuuaaacacagcauacuuu

SEQ ID NO: 924726 - RNA, 19 nt, Artificial Sequence
  Description of Artificial Sequence: Synthetic oligonucleotide
  Sense strand starting at position 7 of SEQ ID NO: 913405
gaaaguaugcuguguuuaa

SEQ ID NO: 924727 - RNA, 19 nt, Artificial Sequence
  Description of Artificial Sequence: Synthetic oligonucleotide
  Antisense strand to SEQ ID NO: 924726
uuaaacacagcauacuuuc

SEQ ID NO: 924728 - RNA, 19 nt, Artificial Sequence
  Description of Artificial Sequence: Synthetic oligonucleotide
  Sense strand starting at position 3137 of SEQ ID NO: 913405
agccauauauccucgaguu

SEQ ID NO: 924729 - RNA, 19 nt, Artificial Sequence
  Description of Artificial Sequence: Synthetic oligonucleotide
  Antisense strand to SEQ ID NO: 924728
aacucgaggauauauggcu

SEQ ID NO: 924730 - RNA, 19 nt, Artificial Sequence
  Description of Artificial Sequence: Synthetic oligonucleotide
  Sense strand starting at position 3138 of SEQ ID NO: 913405
gccauauauccucgaguua

SEQ ID NO: 924731 - RNA, 19 nt, Artificial Sequence
  Description of Artificial Sequence: Synthetic oligonucleotide
  Antisense strand to SEQ ID NO: 924730
uaacucgaggauauauggc

SEQ ID NO: 924732 - RNA, 19 nt, Artificial Sequence
  Description of Artificial Sequence: Synthetic oligonucleotide
  Sense strand starting at position 3514 of SEQ ID NO: 913405
guucuuccuucggugaaua

SEQ ID NO: 924733 - RNA, 19 nt, Artificial Sequence
  Description of Artificial Sequence: Synthetic oligonucleotide
  Antisense strand to SEQ ID NO: 924732
uauucaccgaaggaagaac

SEQ ID NO: 924734 - RNA, 19 nt, Artificial Sequence
  Description of Artificial Sequence: Synthetic oligonucleotide
  Sense strand starting at position 32 of SEQ ID NO: 913405
aggaaauuguccuagaaua

SEQ ID NO: 924735 - RNA, 19 nt, Artificial Sequence
  Description of Artificial Sequence: Synthetic oligonucleotide
  Antisense strand to SEQ ID NO: 924734
uauucuaggacaauuuccu

SEQ ID NO: 924736 - RNA, 19 nt, Artificial Sequence
  Description of Artificial Sequence: Synthetic oligonucleotide
  Sense strand starting at position 2759 of SEQ ID NO: 913405
cauugcugccucgggaaua

SEQ ID NO: 924737 - RNA, 19 nt, Artificial Sequence
  Description of Artificial Sequence: Synthetic oligonucleotide
  Antisense strand to SEQ ID NO: 924736
uauucccgaggcagcaaug

SEQ ID NO: 924738 - RNA, 19 nt, Artificial Sequence
  Description of Artificial Sequence: Synthetic oligonucleotide
  Sense strand starting at position 2756 of SEQ ID NO: 913406
caauguuauggcuauaaga

SEQ ID NO: 924739 - RNA, 19 nt, Artificial Sequence
  Description of Artificial Sequence: Synthetic oligonucleotide
  Antisense strand to SEQ ID NO: 924738
ucuuauagccauaacauug

SEQ ID NO: 924740 - RNA, 19 nt, Artificial Sequence
  Description of Artificial Sequence: Synthetic oligonucleotide
  Sense strand starting at position 280 of SEQ ID NO: 913406
aggugauagcaauaaucuc

SEQ ID NO: 924741 - RNA, 19 nt, Artificial Sequence
  Description of Artificial Sequence: Synthetic oligonucleotide
  Antisense strand to SEQ ID NO: 924740
gagauuauugcuaucaccu

SEQ ID NO: 924742 - RNA, 19 nt, Artificial Sequence
  Description of Artificial Sequence: Synthetic oligonucleotide
  Sense strand starting at position 18 of SEQ ID NO: 913406
gcaauaagugaagaacugu

SEQ ID NO: 924743 - RNA, 19 nt, Artificial Sequence
  Description of Artificial Sequence: Synthetic oligonucleotide
  Antisense strand to SEQ ID NO: 924742
acaguucuucacuuauugc

SEQ ID NO: 924744 - RNA, 19 nt, Artificial Sequence
  Description of Artificial Sequence: Synthetic oligonucleotide
  Sense strand starting at position 2856 of SEQ ID NO: 913406
aggaguugaaacuggucaa

SEQ ID NO: 924745 - RNA, 19 nt, Artificial Sequence
  Description of Artificial Sequence: Synthetic oligonucleotide
  Antisense strand to SEQ ID NO: 924744
uugaccaguuucaacuccu

SEQ ID NO: 924746 - RNA, 19 nt, Artificial Sequence
  Description of Artificial Sequence: Synthetic oligonucleotide
  Sense strand starting at position 2857 of SEQ ID NO: 913406
ggaguugaaacuggucaaa

SEQ ID NO: 924747 - RNA, 19 nt, Artificial Sequence
  Description of Artificial Sequence: Synthetic oligonucleotide
  Antisense strand to SEQ ID NO: 924746
uuugaccaguuucaacucc

SEQ ID NO: 924748 - RNA, 19 nt, Artificial Sequence
  Description of Artificial Sequence: Synthetic oligonucleotide
  Sense strand starting at position 269 of SEQ ID NO: 913406
uccaauaacccaggugaua

SEQ ID NO: 924749 - RNA, 19 nt, Artificial Sequence
  Description of Artificial Sequence: Synthetic oligonucleotide
  Antisense strand to SEQ ID NO: 924748
uaucaccuggguuauugga

SEQ ID NO: 924750 - RNA, 19 nt, Artificial Sequence
  Description of Artificial Sequence: Synthetic oligonucleotide
  Sense strand starting at position 2859 of SEQ ID NO: 913406
aguugaaacuggucaaaug

SEQ ID NO: 924751 - RNA, 19 nt, Artificial Sequence
  Description of Artificial Sequence: Synthetic oligonucleotide
  Antisense strand to SEQ ID NO: 924750
cauuugaccaguuucaacu

SEQ ID NO: 924752 - RNA, 19 nt, Artificial Sequence
  Description of Artificial Sequence: Synthetic oligonucleotide
  Sense strand starting at position 3293 of SEQ ID NO: 913406
guguuugugcacuuguuca

SEQ ID NO: 924753 - RNA, 19 nt, Artificial Sequence
  Description of Artificial Sequence: Synthetic oligonucleotide
  Antisense strand to SEQ ID NO: 924752
ugaacaagugcacaaacac

SEQ ID NO: 924754 - RNA, 19 nt, Artificial Sequence
  Description of Artificial Sequence: Synthetic oligonucleotide
  Sense strand starting at position 2726 of SEQ ID NO: 913406
aaacauggaguaugugauu

SEQ ID NO: 924755 - RNA, 19 nt, Artificial Sequence
  Description of Artificial Sequence: Synthetic oligonucleotide
  Antisense strand to SEQ ID NO: 924754
aaucacauacuccauguuu

SEQ ID NO: 924756 - RNA, 19 nt, Artificial Sequence
  Description of Artificial Sequence: Synthetic oligonucleotide
  Sense strand starting at position 1031 of SEQ ID NO: 913406
gggcuauagaaucauuguc

SEQ ID NO: 924757 - RNA, 19 nt, Artificial Sequence
  Description of Artificial Sequence: Synthetic oligonucleotide
  Antisense strand to SEQ ID NO: 924756
gacaaugauucuauagccc

SEQ ID NO: 924758 - RNA, 19 nt, Artificial Sequence
  Description of Artificial Sequence: Synthetic oligonucleotide
  Sense strand starting at position 2030 of SEQ ID NO: 913406
caaucaucggugggagaca

SEQ ID NO: 924759 - RNA, 19 nt, Artificial Sequence
  Description of Artificial Sequence: Synthetic oligonucleotide
  Antisense strand to SEQ ID NO: 924758
ugucucccaccgaugauug

SEQ ID NO: 924760 - RNA, 19 nt, Artificial Sequence
  Description of Artificial Sequence: Synthetic oligonucleotide
  Sense strand starting at position 496 of SEQ ID NO: 913406
gagguaugccgagacaacu

SEQ ID NO: 924761 - RNA, 19 nt, Artificial Sequence
  Description of Artificial Sequence: Synthetic oligonucleotide
  Antisense strand to SEQ ID NO: 924760
aguugucucggcauaccuc

SEQ ID NO: 924762 - RNA, 19 nt, Artificial Sequence
  Description of Artificial Sequence: Synthetic oligonucleotide
  Sense strand starting at position 2732 of SEQ ID NO: 913406
ggaguaugugauuacaguu

SEQ ID NO: 924763 - RNA, 19 nt, Artificial Sequence
  Description of Artificial Sequence: Synthetic oligonucleotide
  Antisense strand to SEQ ID NO: 924762
aacuguaaucacauacucc

SEQ ID NO: 924764 - RNA, 19 nt, Artificial Sequence
  Description of Artificial Sequence: Synthetic oligonucleotide
  Sense strand starting at position 2631 of SEQ ID NO: 913406
cuugauaggccguaaacaa

SEQ ID NO: 924765 - RNA, 19 nt, Artificial Sequence
  Description of Artificial Sequence: Synthetic oligonucleotide
  Antisense strand to SEQ ID NO: 924764
uuguuuacggccuaucaag

SEQ ID NO: 924766 - RNA, 19 nt, Artificial Sequence
  Description of Artificial Sequence: Synthetic oligonucleotide
  Sense strand starting at position 577 of SEQ ID NO: 913406
ccagaccaguucucauaua

SEQ ID NO: 924767 - RNA, 19 nt, Artificial Sequence
  Description of Artificial Sequence: Synthetic oligonucleotide
  Antisense strand to SEQ ID NO: 924766
uauaugagaacuggucugg

SEQ ID NO: 924768 - RNA, 19 nt, Artificial Sequence
  Description of Artificial Sequence: Synthetic oligonucleotide
  Sense strand starting at position 1008 of SEQ ID NO: 913406
gggaaaggcuguuugacua

SEQ ID NO: 924769 - RNA, 19 nt, Artificial Sequence
  Description of Artificial Sequence: Synthetic oligonucleotide
  Antisense strand to SEQ ID NO: 924768
uagucaaacagccuuuccc

SEQ ID NO: 924770 - RNA, 19 nt, Artificial Sequence
  Description of Artificial Sequence: Synthetic oligonucleotide
  Sense strand starting at position 150 of SEQ ID NO: 913406
acagcuauucuaggagagu

SEQ ID NO: 924771 - RNA, 19 nt, Artificial Sequence
  Description of Artificial Sequence: Synthetic oligonucleotide
  Antisense strand to SEQ ID NO: 924770
acucuccuagaauagcugu

SEQ ID NO: 924772 - RNA, 19 nt, Artificial Sequence
  Description of Artificial Sequence: Synthetic oligonucleotide
  Sense strand starting at position 502 of SEQ ID NO: 913406
ugccgagacaacuggauau

SEQ ID NO: 924773 - RNA, 19 nt, Artificial Sequence
  Description of Artificial Sequence: Synthetic oligonucleotide
  Antisense strand to SEQ ID NO: 924772
auauccaguugucucggca

SEQ ID NO: 924774 - RNA, 19 nt, Artificial Sequence
  Description of Artificial Sequence: Synthetic oligonucleotide
  Sense strand starting at position 2744 of SEQ ID NO: 913406
uacaguugugaucaauguu

SEQ ID NO: 924775 - RNA, 19 nt, Artificial Sequence
  Description of Artificial Sequence: Synthetic oligonucleotide
  Antisense strand to SEQ ID NO: 924774
aacauugaucacaacugua

SEQ ID NO: 924776 - RNA, 19 nt, Artificial Sequence
  Description of Artificial Sequence: Synthetic oligonucleotide
  Sense strand starting at position 2528 of SEQ ID NO: 913406
ugggucauuugugcgacuu

SEQ ID NO: 924777 - RNA, 19 nt, Artificial Sequence
  Description of Artificial Sequence: Synthetic oligonucleotide
  Antisense strand to SEQ ID NO: 924776
aagucgcacaaaugaccca

SEQ ID NO: 924778 - RNA, 19 nt, Artificial Sequence
  Description of Artificial Sequence: Synthetic oligonucleotide
  Sense strand starting at position 3248 of SEQ ID NO: 913406
ccaguaggccucugauaaa

SEQ ID NO: 924779 - RNA, 19 nt, Artificial Sequence
  Description of Artificial Sequence: Synthetic oligonucleotide
  Antisense strand to SEQ ID NO: 924778
uuuaucagaggccuacugg

SEQ ID NO: 924780 - RNA, 19 nt, Artificial Sequence
  Description of Artificial Sequence: Synthetic oligonucleotide
  Sense strand starting at position 2529 of SEQ ID NO: 913406
gggucauuugugcgacuuu

SEQ ID NO: 924781 - RNA, 19 nt, Artificial Sequence
  Description of Artificial Sequence: Synthetic oligonucleotide
  Antisense strand to SEQ ID NO: 924780
aaagucgcacaaaugaccc

SEQ ID NO: 924782 - RNA, 19 nt, Artificial Sequence
  Description of Artificial Sequence: Synthetic oligonucleotide
  Sense strand starting at position 2594 of SEQ ID NO: 913406
cggaaauguucauuaguga

SEQ ID NO: 924783 - RNA, 19 nt, Artificial Sequence
  Description of Artificial Sequence: Synthetic oligonucleotide
  Antisense strand to SEQ ID NO: 924782
ucacuaaugaacauuuccg

SEQ ID NO: 924784 - RNA, 19 nt, Artificial Sequence
  Description of Artificial Sequence: Synthetic oligonucleotide
  Sense strand starting at position 1033 of SEQ ID NO: 913406
gcuauagaaucauugucau

SEQ ID NO: 924785 - RNA, 19 nt, Artificial Sequence
  Description of Artificial Sequence: Synthetic oligonucleotide
  Antisense strand to SEQ ID NO: 924784
augacaaugauucuauagc

SEQ ID NO: 924786 - RNA, 19 nt, Artificial Sequence
  Description of Artificial Sequence: Synthetic oligonucleotide
  Sense strand starting at position 2731 of SEQ ID NO: 913406
uggaguaugugauuacagu

SEQ ID NO: 924787 - RNA, 19 nt, Artificial Sequence
  Description of Artificial Sequence: Synthetic oligonucleotide
  Antisense strand to SEQ ID NO: 924786
acuguaaucacauacucca

SEQ ID NO: 924788 - RNA, 19 nt, Artificial Sequence
  Description of Artificial Sequence: Synthetic oligonucleotide
  Sense strand starting at position 1069 of SEQ ID NO: 913406
ucaacaaaucuguguacuu

SEQ ID NO: 924789 - RNA, 19 nt, Artificial Sequence
  Description of Artificial Sequence: Synthetic oligonucleotide
  Antisense strand to SEQ ID NO: 924788
aaguacacagauuuguuga

SEQ ID NO: 924790 - RNA, 19 nt, Artificial Sequence
  Description of Artificial Sequence: Synthetic oligonucleotide
  Sense strand starting at position 2947 of SEQ ID NO: 913406
cuuggcuccggaggaauua

SEQ ID NO: 924791 - RNA, 19 nt, Artificial Sequence
  Description of Artificial Sequence: Synthetic oligonucleotide
  Antisense strand to SEQ ID NO: 924790
uaauuccuccggagccaag

SEQ ID NO: 924792 - RNA, 19 nt, Artificial Sequence
  Description of Artificial Sequence: Synthetic oligonucleotide
  Sense strand starting at position 2028 of SEQ ID NO: 913406
gccaaucaucggugggaga

SEQ ID NO: 924793 - RNA, 19 nt, Artificial Sequence
  Description of Artificial Sequence: Synthetic oligonucleotide
  Antisense strand to SEQ ID NO: 924792
ucucccaccgaugauuggc

SEQ ID NO: 924794 - RNA, 19 nt, Artificial Sequence
  Description of Artificial Sequence: Synthetic oligonucleotide
  Sense strand starting at position 3081 of SEQ ID NO: 913406
auguacuguguuuauguaa

SEQ ID NO: 924795 - RNA, 19 nt, Artificial Sequence
  Description of Artificial Sequence: Synthetic oligonucleotide
  Antisense strand to SEQ ID NO: 924794
uuacauaaacacaguacau

SEQ ID NO: 924796 - RNA, 19 nt, Artificial Sequence
  Description of Artificial Sequence: Synthetic oligonucleotide
  Sense strand starting at position 2747 of SEQ ID NO: 913406
aguugugaucaauguuaug

SEQ ID NO: 924797 - RNA, 19 nt, Artificial Sequence
  Description of Artificial Sequence: Synthetic oligonucleotide
  Antisense strand to SEQ ID NO: 924796
cauaacauugaucacaacu

SEQ ID NO: 924798 - RNA, 19 nt, Artificial Sequence
  Description of Artificial Sequence: Synthetic oligonucleotide
  Sense strand starting at position 2773 of SEQ ID NO: 913406
gaggauaaauauggaggaa

SEQ ID NO: 924799 - RNA, 19 nt, Artificial Sequence
  Description of Artificial Sequence: Synthetic oligonucleotide
  Antisense strand to SEQ ID NO: 924798
uuccuccauauuuauccuc

SEQ ID NO: 924800 - RNA, 19 nt, Artificial Sequence
  Description of Artificial Sequence: Synthetic oligonucleotide
  Sense strand starting at position 420 of SEQ ID NO: 913406
aucuguggcuccucaaaug

SEQ ID NO: 924801 - RNA, 19 nt, Artificial Sequence
  Description of Artificial Sequence: Synthetic oligonucleotide
  Antisense strand to SEQ ID NO: 924800
cauuugaggagccacagau

SEQ ID NO: 924802 - RNA, 19 nt, Artificial Sequence
  Description of Artificial Sequence: Synthetic oligonucleotide
  Sense strand starting at position 715 of SEQ ID NO: 913406
caaguugcucgucaucaaa

SEQ ID NO: 924803 - RNA, 19 nt, Artificial Sequence
  Description of Artificial Sequence: Synthetic oligonucleotide
  Antisense strand to SEQ ID NO: 924802
uuugaugacgagcaacuug

SEQ ID NO: 924804 - RNA, 19 nt, Artificial Sequence
  Description of Artificial Sequence: Synthetic oligonucleotide
  Sense strand starting at position 163 of SEQ ID NO: 913406
gagaguaucucacugcagu

SEQ ID NO: 924805 - RNA, 19 nt, Artificial Sequence
  Description of Artificial Sequence: Synthetic oligonucleotide
  Antisense strand to SEQ ID NO: 924804
acugcagugagauacucuc

SEQ ID NO: 924806 - RNA, 19 nt, Artificial Sequence
  Description of Artificial Sequence: Synthetic oligonucleotide
  Sense strand starting at position 115 of SEQ ID NO: 913406
ugagcacucuuugcaauau

SEQ ID NO: 924807 - RNA, 19 nt, Artificial Sequence
  Description of Artificial Sequence: Synthetic oligonucleotide
  Antisense strand to SEQ ID NO: 924806
auauugcaaagagugcuca

SEQ ID NO: 924808 - RNA, 19 nt, Artificial Sequence
  Description of Artificial Sequence: Synthetic oligonucleotide
  Sense strand starting at position 977 of SEQ ID NO: 913406
augcaugcugguugaauga

SEQ ID NO: 924809 - RNA, 19 nt, Artificial Sequence
  Description of Artificial Sequence: Synthetic oligonucleotide
  Antisense strand to SEQ ID NO: 924808
ucauucaaccagcaugcau

SEQ ID NO: 924810 - RNA, 19 nt, Artificial Sequence
  Description of Artificial Sequence: Synthetic oligonucleotide
  Sense strand starting at position 2738 of SEQ ID NO: 913406
ugugauuacaguugugauc

SEQ ID NO: 924811 - RNA, 19 nt, Artificial Sequence
  Description of Artificial Sequence: Synthetic oligonucleotide
  Antisense strand to SEQ ID NO: 924810
gaucacaacuguaaucaca

SEQ ID NO: 924812 - RNA, 19 nt, Artificial Sequence
  Description of Artificial Sequence: Synthetic oligonucleotide
  Sense strand starting at position 114 of SEQ ID NO: 913406
uugagcacucuuugcaaua

SEQ ID NO: 924813 - RNA, 19 nt, Artificial Sequence
  Description of Artificial Sequence: Synthetic oligonucleotide
  Antisense strand to SEQ ID NO: 924812
uauugcaaagagugcucaa

SEQ ID NO: 924814 - RNA, 19 nt, Artificial Sequence
  Description of Artificial Sequence: Synthetic oligonucleotide
  Sense strand starting at position 1396 of SEQ ID NO: 913406
gcuucuguagauuguggaa

SEQ ID NO: 924815 - RNA, 19 nt, Artificial Sequence
  Description of Artificial Sequence: Synthetic oligonucleotide
  Antisense strand to SEQ ID NO: 924814
uuccacaaucuacagaagc

SEQ ID NO: 924816 - RNA, 19 nt, Artificial Sequence
  Description of Artificial Sequence: Synthetic oligonucleotide
  Sense strand starting at position 3032 of SEQ ID NO: 913406
gaagguugcaugugauccu

SEQ ID NO: 924817 - RNA, 19 nt, Artificial Sequence
  Description of Artificial Sequence: Synthetic oligonucleotide
  Antisense strand to SEQ ID NO: 924816
aggaucacaugcaaccuuc

SEQ ID NO: 924818 - RNA, 19 nt, Artificial Sequence
  Description of Artificial Sequence: Synthetic oligonucleotide
  Sense strand starting at position 3568 of SEQ ID NO: 913407
gaugaugacguuuaugaug

SEQ ID NO: 924819 - RNA, 19 nt, Artificial Sequence
  Description of Artificial Sequence: Synthetic oligonucleotide
  Antisense strand to SEQ ID NO: 924818
caucauaaacgucaucauc

SEQ ID NO: 924820 - RNA, 19 nt, Artificial Sequence
  Description of Artificial Sequence: Synthetic oligonucleotide
  Sense strand starting at position 3583 of SEQ ID NO: 913407
gaugaucacguccacuaaa

SEQ ID NO: 924821 - RNA, 19 nt, Artificial Sequence
  Description of Artificial Sequence: Synthetic oligonucleotide
  Antisense strand to SEQ ID NO: 924820
uuuaguggacgugaucauc

SEQ ID NO: 924822 - RNA, 19 nt, Artificial Sequence
  Description of Artificial Sequence: Synthetic oligonucleotide
  Sense strand starting at position 3586 of SEQ ID NO: 913407
gaucacguccacuaaauga

SEQ ID NO: 924823 - RNA, 19 nt, Artificial Sequence
  Description of Artificial Sequence: Synthetic oligonucleotide
  Antisense strand to SEQ ID NO: 924822
ucauuuaguggacgugauc

SEQ ID NO: 924824 - RNA, 19 nt, Artificial Sequence
  Description of Artificial Sequence: Synthetic oligonucleotide
  Sense strand starting at position 631 of SEQ ID NO: 913407
caguuauuuguguacuggu

SEQ ID NO: 924825 - RNA, 19 nt, Artificial Sequence
  Description of Artificial Sequence: Synthetic oligonucleotide
  Antisense strand to SEQ ID NO: 924824
accaguacacaaauaacug

SEQ ID NO: 924826 - RNA, 19 nt, Artificial Sequence
  Description of Artificial Sequence: Synthetic oligonucleotide
  Sense strand starting at position 781 of SEQ ID NO: 913407
agaucucuagucuagaucu

SEQ ID NO: 924827 - RNA, 19 nt, Artificial Sequence
  Description of Artificial Sequence: Synthetic oligonucleotide
  Antisense strand to SEQ ID NO: 924826
agaucuagacuagagaucu

SEQ ID NO: 924828 - RNA, 19 nt, Artificial Sequence
  Description of Artificial Sequence: Synthetic oligonucleotide
  Sense strand starting at position 2546 of SEQ ID NO: 913407
gaaaguuucguugcagcuu

SEQ ID NO: 924829 - RNA, 19 nt, Artificial Sequence
  Description of Artificial Sequence: Synthetic oligonucleotide
  Antisense strand to SEQ ID NO: 924828
aagcugcaacgaaacuuuc

SEQ ID NO: 924830 - RNA, 19 nt, Artificial Sequence
  Description of Artificial Sequence: Synthetic oligonucleotide
  Sense strand starting at position 3356 of SEQ ID NO: 913407
cagauuacuguacaguuga

SEQ ID NO: 924831 - RNA, 19 nt, Artificial Sequence
  Description of Artificial Sequence: Synthetic oligonucleotide
  Antisense strand to SEQ ID NO: 924830
ucaacuguacaguaaucug

SEQ ID NO: 924832 - RNA, 19 nt, Artificial Sequence
  Description of Artificial Sequence: Synthetic oligonucleotide
  Sense strand starting at position 2660 of SEQ ID NO: 913407
accgaauaaccaugacauu

SEQ ID NO: 924833 - RNA, 19 nt, Artificial Sequence
  Description of Artificial Sequence: Synthetic oligonucleotide
  Antisense strand to SEQ ID NO: 924832
aaugucaugguuauucggu

SEQ ID NO: 924834 - RNA, 19 nt, Artificial Sequence
  Description of Artificial Sequence: Synthetic oligonucleotide
  Sense strand starting at position 2813 of SEQ ID NO: 913407
ucuagaaauugggcaacau

SEQ ID NO: 924835 - RNA, 19 nt, Artificial Sequence
  Description of Artificial Sequence: Synthetic oligonucleotide
  Antisense strand to SEQ ID NO: 924834
auguugcccaauuucuaga

SEQ ID NO: 924836 - RNA, 19 nt, Artificial Sequence
  Description of Artificial Sequence: Synthetic oligonucleotide
  Sense strand starting at position 2549 of SEQ ID NO: 913407
aguuucguugcagcuuuaa

SEQ ID NO: 924837 - RNA, 19 nt, Artificial Sequence
  Description of Artificial Sequence: Synthetic oligonucleotide
  Antisense strand to SEQ ID NO: 924836
uuaaagcugcaacgaaacu

SEQ ID NO: 924838 - RNA, 19 nt, Artificial Sequence
  Description of Artificial Sequence: Synthetic oligonucleotide
  Sense strand starting at position 3593 of SEQ ID NO: 913407
uccacuaaaugaguaguaa

SEQ ID NO: 924839 - RNA, 19 nt, Artificial Sequence
  Description of Artificial Sequence: Synthetic oligonucleotide
  Antisense strand to SEQ ID NO: 924838
uuacuacucauuuagugga

SEQ ID NO: 924840 - RNA, 19 nt, Artificial Sequence
  Description of Artificial Sequence: Synthetic oligonucleotide
  Sense strand starting at position 614 of SEQ ID NO: 913407
acaagaguaucauuaguca

SEQ ID NO: 924841 - RNA, 19 nt, Artificial Sequence
  Description of Artificial Sequence: Synthetic oligonucleotide
  Antisense strand to SEQ ID NO: 924840
ugacuaaugauacucuugu

SEQ ID NO: 924842 - RNA, 19 nt, Artificial Sequence
  Description of Artificial Sequence: Synthetic oligonucleotide
  Sense strand starting at position 2222 of SEQ ID NO: 913407
gcggguuucggcuuucaua

SEQ ID NO: 924843 - RNA, 19 nt, Artificial Sequence
  Description of Artificial Sequence: Synthetic oligonucleotide
  Antisense strand to SEQ ID NO: 924842
uaugaaagccgaaacccgc

SEQ ID NO: 924844 - RNA, 19 nt, Artificial Sequence
  Description of Artificial Sequence: Synthetic oligonucleotide
  Sense strand starting at position 3686 of SEQ ID NO: 913407
acuuuauugcacgaauaca

SEQ ID NO: 924845 - RNA, 19 nt, Artificial Sequence
  Description of Artificial Sequence: Synthetic oligonucleotide
  Antisense strand to SEQ ID NO: 924844
uguauucgugcaauaaagu

SEQ ID NO: 924846 - RNA, 19 nt, Artificial Sequence
  Description of Artificial Sequence: Synthetic oligonucleotide
  Sense strand starting at position 2316 of SEQ ID NO: 913407
guccuuccuguacaaacaa

SEQ ID NO: 924847 - RNA, 19 nt, Artificial Sequence
  Description of Artificial Sequence: Synthetic oligonucleotide
  Antisense strand to SEQ ID NO: 924846
uuguuuguacaggaaggac

SEQ ID NO: 924848 - RNA, 19 nt, Artificial Sequence
  Description of Artificial Sequence: Synthetic oligonucleotide
  Sense strand starting at position 3375 of SEQ ID NO: 913407
cccuuaacauggguuugaa

SEQ ID NO: 924849 - RNA, 19 nt, Artificial Sequence
  Description of Artificial Sequence: Synthetic oligonucleotide
  Antisense strand to SEQ ID NO: 924848
uucaaacccauguuaaggg

SEQ ID NO: 924850 - RNA, 19 nt, Artificial Sequence
  Description of Artificial Sequence: Synthetic oligonucleotide
  Sense strand starting at position 626 of SEQ ID NO: 913407
uuagucaguuauuugugua

SEQ ID NO: 924851 - RNA, 19 nt, Artificial Sequence
  Description of Artificial Sequence: Synthetic oligonucleotide
  Antisense strand to SEQ ID NO: 924850
uacacaaauaacugacuaa

SEQ ID NO: 924852 - RNA, 19 nt, Artificial Sequence
  Description of Artificial Sequence: Synthetic oligonucleotide
  Sense strand starting at position 2822 of SEQ ID NO: 913407
ugggcaacaucuccauuaa

SEQ ID NO: 924853 - RNA, 19 nt, Artificial Sequence
  Description of Artificial Sequence: Synthetic oligonucleotide
  Antisense strand to SEQ ID NO: 924852
uuaauggagauguugccca

SEQ ID NO: 924854 - RNA, 19 nt, Artificial Sequence
  Description of Artificial Sequence: Synthetic oligonucleotide
  Sense strand starting at position 779 of SEQ ID NO: 913407
ucagaucucuagucuagau

SEQ ID NO: 924855 - RNA, 19 nt, Artificial Sequence
  Description of Artificial Sequence: Synthetic oligonucleotide
  Antisense strand to SEQ ID NO: 924854
aucuagacuagagaucuga

SEQ ID NO: 924856 - RNA, 19 nt, Artificial Sequence
  Description of Artificial Sequence: Synthetic oligonucleotide
  Sense strand starting at position 689 of SEQ ID NO: 913407
agcgaaugccauuauaaau

SEQ ID NO: 924857 - RNA, 19 nt, Artificial Sequence
  Description of Artificial Sequence: Synthetic oligonucleotide
  Antisense strand to SEQ ID NO: 924856
auuuauaauggcauucgcu

SEQ ID NO: 924858 - RNA, 19 nt, Artificial Sequence
  Description of Artificial Sequence: Synthetic oligonucleotide
  Sense strand starting at position 1008 of SEQ ID NO: 913407
ggagaacuugagcgguaaa

SEQ ID NO: 924859 - RNA, 19 nt, Artificial Sequence
  Description of Artificial Sequence: Synthetic oligonucleotide
  Antisense strand to SEQ ID NO: 924858
uuuaccgcucaaguucucc

SEQ ID NO: 924860 - RNA, 19 nt, Artificial Sequence
  Description of Artificial Sequence: Synthetic oligonucleotide
  Sense strand starting at position 776 of SEQ ID NO: 913407
gucucagaucucuagucua

SEQ ID NO: 924861 - RNA, 19 nt, Artificial Sequence
  Description of Artificial Sequence: Synthetic oligonucleotide
  Antisense strand to SEQ ID NO: 924860
uagacuagagaucugagac

SEQ ID NO: 924862 - RNA, 19 nt, Artificial Sequence
  Description of Artificial Sequence: Synthetic oligonucleotide
  Sense strand starting at position 3544 of SEQ ID NO: 913407
cagccuccacgugaagaua

SEQ ID NO: 924863 - RNA, 19 nt, Artificial Sequence
  Description of Artificial Sequence: Synthetic oligonucleotide
  Antisense strand to SEQ ID NO: 924862
uaucuucacguggaggcug

SEQ ID NO: 924864 - RNA, 19 nt, Artificial Sequence
  Description of Artificial Sequence: Synthetic oligonucleotide
  Sense strand starting at position 3316 of SEQ ID NO: 913407
agaaaugauugagagaaau

SEQ ID NO: 924865 - RNA, 19 nt, Artificial Sequence
  Description of Artificial Sequence: Synthetic oligonucleotide
  Antisense strand to SEQ ID NO: 924864
auuucucucaaucauuucu

SEQ ID NO: 924866 - RNA, 19 nt, Artificial Sequence
  Description of Artificial Sequence: Synthetic oligonucleotide
  Sense strand starting at position 562 of SEQ ID NO: 913407
agaaguauauauccuugca

SEQ ID NO: 924867 - RNA, 19 nt, Artificial Sequence
  Description of Artificial Sequence: Synthetic oligonucleotide
  Antisense strand to SEQ ID NO: 924866
ugcaaggauauauacuucu

SEQ ID NO: 924868 - RNA, 19 nt, Artificial Sequence
  Description of Artificial Sequence: Synthetic oligonucleotide
  Sense strand starting at position 1007 of SEQ ID NO: 913407
uggagaacuugagcgguaa

SEQ ID NO: 924869 - RNA, 19 nt, Artificial Sequence
  Description of Artificial Sequence: Synthetic oligonucleotide
  Antisense strand to SEQ ID NO: 924868
uuaccgcucaaguucucca

SEQ ID NO: 924870 - RNA, 19 nt, Artificial Sequence
  Description of Artificial Sequence: Synthetic oligonucleotide
  Sense strand starting at position 2604 of SEQ ID NO: 913407
augguagagauugguucuu

SEQ ID NO: 924871 - RNA, 19 nt, Artificial Sequence
  Description of Artificial Sequence: Synthetic oligonucleotide
  Antisense strand to SEQ ID NO: 924870
aagaaccaaucucuaccau

SEQ ID NO: 924872 - RNA, 19 nt, Artificial Sequence
  Description of Artificial Sequence: Synthetic oligonucleotide
  Sense strand starting at position 2004 of SEQ ID NO: 913407
ugagucaucggcuauaauc

SEQ ID NO: 924873 - RNA, 19 nt, Artificial Sequence
  Description of Artificial Sequence: Synthetic oligonucleotide
  Antisense strand to SEQ ID NO: 924872
gauuauagccgaugacuca

SEQ ID NO: 924874 - RNA, 19 nt, Artificial Sequence
  Description of Artificial Sequence: Synthetic oligonucleotide
  Sense strand starting at position 617 of SEQ ID NO: 913407
agaguaucauuagucaguu

SEQ ID NO: 924875 - RNA, 19 nt, Artificial Sequence
  Description of Artificial Sequence: Synthetic oligonucleotide
  Antisense strand to SEQ ID NO: 924874
aacugacuaaugauacucu

SEQ ID NO: 924876 - RNA, 19 nt, Artificial Sequence
  Description of Artificial Sequence: Synthetic oligonucleotide
  Sense strand starting at position 618 of SEQ ID NO: 913407
gaguaucauuagucaguua

SEQ ID NO: 924877 - RNA, 19 nt, Artificial Sequence
  Description of Artificial Sequence: Synthetic oligonucleotide
  Antisense strand to SEQ ID NO: 924876
uaacugacuaaugauacuc

SEQ ID NO: 924878 - RNA, 19 nt, Artificial Sequence
  Description of Artificial Sequence: Synthetic oligonucleotide
  Sense strand starting at position 2609 of SEQ ID NO: 913407
agagauugguucuugcuau

SEQ ID NO: 924879 - RNA, 19 nt, Artificial Sequence
  Description of Artificial Sequence: Synthetic oligonucleotide
  Antisense strand to SEQ ID NO: 924878
auagcaagaaccaaucucu

SEQ ID NO: 924880 - RNA, 19 nt, Artificial Sequence
  Description of Artificial Sequence: Synthetic oligonucleotide
  Sense strand starting at position 387 of SEQ ID NO: 913407
cccagacggcguuaacaau

SEQ ID NO: 924881 - RNA, 19 nt, Artificial Sequence
  Description of Artificial Sequence: Synthetic oligonucleotide
  Antisense strand to SEQ ID NO: 924880
auuguuaacgccgucuggg

SEQ ID NO: 924882 - RNA, 19 nt, Artificial Sequence
  Description of Artificial Sequence: Synthetic oligonucleotide
  Sense strand starting at position 3601 of SEQ ID NO: 913407
augaguaguaaguguacua

SEQ ID NO: 924883 - RNA, 19 nt, Artificial Sequence
  Description of Artificial Sequence: Synthetic oligonucleotide
  Antisense strand to SEQ ID NO: 924882
uaguacacuuacuacucau

SEQ ID NO: 924884 - RNA, 19 nt, Artificial Sequence
  Description of Artificial Sequence: Synthetic oligonucleotide
  Sense strand starting at position 593 of SEQ ID NO: 913407
agacauacuucugcuguau

SEQ ID NO: 924885 - RNA, 19 nt, Artificial Sequence
  Description of Artificial Sequence: Synthetic oligonucleotide
  Antisense strand to SEQ ID NO: 924884
auacagcagaaguaugucu

SEQ ID NO: 924886 - RNA, 19 nt, Artificial Sequence
  Description of Artificial Sequence: Synthetic oligonucleotide
  Sense strand starting at position 3754 of SEQ ID NO: 913407
aaggcuuuccgucaagagu

SEQ ID NO: 924887 - RNA, 19 nt, Artificial Sequence
  Description of Artificial Sequence: Synthetic oligonucleotide
  Antisense strand to SEQ ID NO: 924886
acucuugacggaaagccuu

SEQ ID NO: 924888 - RNA, 19 nt, Artificial Sequence
  Description of Artificial Sequence: Synthetic oligonucleotide
  Sense strand starting at position 953 of SEQ ID NO: 913407
agagucauugggugccuaa

SEQ ID NO: 924889 - RNA, 19 nt, Artificial Sequence
  Description of Artificial Sequence: Synthetic oligonucleotide
  Antisense strand to SEQ ID NO: 924888
uuaggcacccaaugacucu

SEQ ID NO: 924890 - RNA, 19 nt, Artificial Sequence
  Description of Artificial Sequence: Synthetic oligonucleotide
  Sense strand starting at position 2638 of SEQ ID NO: 913407
gacccugauuugggaagua

SEQ ID NO: 924891 - RNA, 19 nt, Artificial Sequence
  Description of Artificial Sequence: Synthetic oligonucleotide
  Antisense strand to SEQ ID NO: 924890
uacuucccaaaucaggguc

SEQ ID NO: 924892 - RNA, 19 nt, Artificial Sequence
  Description of Artificial Sequence: Synthetic oligonucleotide
  Sense strand starting at position 952 of SEQ ID NO: 913407
cagagucauugggugccua

SEQ ID NO: 924893 - RNA, 19 nt, Artificial Sequence
  Description of Artificial Sequence: Synthetic oligonucleotide
  Antisense strand to SEQ ID NO: 924892
uaggcacccaaugacucug

SEQ ID NO: 924894 - RNA, 19 nt, Artificial Sequence
  Description of Artificial Sequence: Synthetic oligonucleotide
  Sense strand starting at position 48 of SEQ ID NO: 913407
ggugguuugaaaugagugu

SEQ ID NO: 924895 - RNA, 19 nt, Artificial Sequence
  Description of Artificial Sequence: Synthetic oligonucleotide
  Antisense strand to SEQ ID NO: 924894
acacucauuucaaaccacc

SEQ ID NO: 924896 - RNA, 19 nt, Artificial Sequence
  Description of Artificial Sequence: Synthetic oligonucleotide
  Sense strand starting at position 3543 of SEQ ID NO: 913407
ucagccuccacgugaagau

SEQ ID NO: 924897 - RNA, 19 nt, Artificial Sequence
  Description of Artificial Sequence: Synthetic oligonucleotide
  Antisense strand to SEQ ID NO: 924896
aucuucacguggaggcuga

SEQ ID NO: 924898 - RNA, 19 nt, Artificial Sequence
  Description of Artificial Sequence: Synthetic oligonucleotide
  Sense strand starting at position 1128 of SEQ ID NO: 913408
agaaauacacccugaggca

SEQ ID NO: 924899 - RNA, 19 nt, Artificial Sequence
  Description of Artificial Sequence: Synthetic oligonucleotide
  Antisense strand to SEQ ID NO: 924898
ugccucaggguguauuucu

SEQ ID NO: 924900 - RNA, 19 nt, Artificial Sequence
  Description of Artificial Sequence: Synthetic oligonucleotide
  Sense strand starting at position 600 of SEQ ID NO: 913408
ucggguuauuucuuucuaa

SEQ ID NO: 924901 - RNA, 19 nt, Artificial Sequence
  Description of Artificial Sequence: Synthetic oligonucleotide
  Antisense strand to SEQ ID NO: 924900
uuagaaagaaauaacccga

SEQ ID NO: 924902 - RNA, 19 nt, Artificial Sequence
  Description of Artificial Sequence: Synthetic oligonucleotide
  Sense strand starting at position 538 of SEQ ID NO: 913408
acagaacaguagguagauu

SEQ ID NO: 924903 - RNA, 19 nt, Artificial Sequence
  Description of Artificial Sequence: Synthetic oligonucleotide
  Antisense strand to SEQ ID NO: 924902
aaucuaccuacuguucugu

SEQ ID NO: 924904 - RNA, 19 nt, Artificial Sequence
  Description of Artificial Sequence: Synthetic oligonucleotide
  Sense strand starting at position 2565 of SEQ ID NO: 913408
ccgccaugggaucaauaaa

SEQ ID NO: 924905 - RNA, 19 nt, Artificial Sequence
  Description of Artificial Sequence: Synthetic oligonucleotide
  Antisense strand to SEQ ID NO: 924904
uuuauugaucccauggcgg

SEQ ID NO: 924906 - RNA, 19 nt, Artificial Sequence
  Description of Artificial Sequence: Synthetic oligonucleotide
  Sense strand starting at position 135 of SEQ ID NO: 913408
guauguagugauuaaacaa

SEQ ID NO: 924907 - RNA, 19 nt, Artificial Sequence
  Description of Artificial Sequence: Synthetic oligonucleotide
  Antisense strand to SEQ ID NO: 924906
uuguuuaaucacuacauac

SEQ ID NO: 924908 - RNA, 19 nt, Artificial Sequence
  Description of Artificial Sequence: Synthetic oligonucleotide
  Sense strand starting at position 3088 of SEQ ID NO: 913408
ucaugcuaaggugagaauu

SEQ ID NO: 924909 - RNA, 19 nt, Artificial Sequence
  Description of Artificial Sequence: Synthetic oligonucleotide
  Antisense strand to SEQ ID NO: 924908
aauucucaccuuagcauga

SEQ ID NO: 924910 - RNA, 19 nt, Artificial Sequence
  Description of Artificial Sequence: Synthetic oligonucleotide
  Sense strand starting at position 2899 of SEQ ID NO: 913408
ccgcuuuggaaggaauuaa

SEQ ID NO: 924911 - RNA, 19 nt, Artificial Sequence
  Description of Artificial Sequence: Synthetic oligonucleotide
  Antisense strand to SEQ ID NO: 924910
uuaauuccuuccaaagcgg

SEQ ID NO: 924912 - RNA, 19 nt, Artificial Sequence
  Description of Artificial Sequence: Synthetic oligonucleotide
  Sense strand starting at position 3249 of SEQ ID NO: 913408
gcaggauguaguuaaugaa

SEQ ID NO: 924913 - RNA, 19 nt, Artificial Sequence
  Description of Artificial Sequence: Synthetic oligonucleotide
  Antisense strand to SEQ ID NO: 924912
uucauuaacuacauccugc

SEQ ID NO: 924914 - RNA, 19 nt, Artificial Sequence
  Description of Artificial Sequence: Synthetic oligonucleotide
  Sense strand starting at position 2869 of SEQ ID NO: 913408
gguggucuugcuguaguuu

SEQ ID NO: 924915 - RNA, 19 nt, Artificial Sequence
  Description of Artificial Sequence: Synthetic oligonucleotide
  Antisense strand to SEQ ID NO: 924914
aaacuacagcaagaccacc

SEQ ID NO: 924916 - RNA, 19 nt, Artificial Sequence
  Description of Artificial Sequence: Synthetic oligonucleotide
  Sense strand starting at position 3137 of SEQ ID NO: 913408
agacaugagcuuugagacu

SEQ ID NO: 924917 - RNA, 19 nt, Artificial Sequence
  Description of Artificial Sequence: Synthetic oligonucleotide
  Antisense strand to SEQ ID NO: 924916
agucucaaagcucaugucu

SEQ ID NO: 924918 - RNA, 19 nt, Artificial Sequence
  Description of Artificial Sequence: Synthetic oligonucleotide
  Sense strand starting at position 2927 of SEQ ID NO: 913408
ucauuaucugagggaaugu

SEQ ID NO: 924919 - RNA, 19 nt, Artificial Sequence
  Description of Artificial Sequence: Synthetic oligonucleotide
  Antisense strand to SEQ ID NO: 924918
acauucccucagauaauga

SEQ ID NO: 924920 - RNA, 19 nt, Artificial Sequence
  Description of Artificial Sequence: Synthetic oligonucleotide
  Sense strand starting at position 1019 of SEQ ID NO: 913408
cagagauacgcugagugau

SEQ ID NO: 924921 - RNA, 19 nt, Artificial Sequence
  Description of Artificial Sequence: Synthetic oligonucleotide
  Antisense strand to SEQ ID NO: 924920
aucacucagcguaucucug

SEQ ID NO: 924922 - RNA, 19 nt, Artificial Sequence
  Description of Artificial Sequence: Synthetic oligonucleotide
  Sense strand starting at position 2801 of SEQ ID NO: 913408
ugaucuccuccuugagaug

SEQ ID NO: 924923 - RNA, 19 nt, Artificial Sequence
  Description of Artificial Sequence: Synthetic oligonucleotide
  Antisense strand to SEQ ID NO: 924922
caucucaaggaggagauca

SEQ ID NO: 924924 - RNA, 19 nt, Artificial Sequence
  Description of Artificial Sequence: Synthetic oligonucleotide
  Sense strand starting at position 3431 of SEQ ID NO: 913408
acagcagguuucucagaaa

SEQ ID NO: 924925 - RNA, 19 nt, Artificial Sequence
  Description of Artificial Sequence: Synthetic oligonucleotide
  Antisense strand to SEQ ID NO: 924924
uuucugagaaaccugcugu

SEQ ID NO: 924926 - RNA, 19 nt, Artificial Sequence
  Description of Artificial Sequence: Synthetic oligonucleotide
  Sense strand starting at position 2771 of SEQ ID NO: 913408
ggcugacccugaucaauau

SEQ ID NO: 924927 - RNA, 19 nt, Artificial Sequence
  Description of Artificial Sequence: Synthetic oligonucleotide
  Antisense strand to SEQ ID NO: 924926
auauugaucagggucagcc

SEQ ID NO: 924928 - RNA, 19 nt, Artificial Sequence
  Description of Artificial Sequence: Synthetic oligonucleotide
  Sense strand starting at position 3172 of SEQ ID NO: 913408
ugucuugaggacugaaagu

SEQ ID NO: 924929 - RNA, 19 nt, Artificial Sequence
  Description of Artificial Sequence: Synthetic oligonucleotide
  Antisense strand to SEQ ID NO: 924928
acuuucaguccucaagaca

SEQ ID NO: 924930 - RNA, 19 nt, Artificial Sequence
  Description of Artificial Sequence: Synthetic oligonucleotide
  Sense strand starting at position 3926 of SEQ ID NO: 913408
ggaaacuuucaggguaugu

SEQ ID NO: 924931 - RNA, 19 nt, Artificial Sequence
  Description of Artificial Sequence: Synthetic oligonucleotide
  Antisense strand to SEQ ID NO: 924930
acauacccugaaaguuucc

SEQ ID NO: 924932 - RNA, 19 nt, Artificial Sequence
  Description of Artificial Sequence: Synthetic oligonucleotide
  Sense strand starting at position 2769 of SEQ ID NO: 913408
ccggcugacccugaucaau

SEQ ID NO: 924933 - RNA, 19 nt, Artificial Sequence
  Description of Artificial Sequence: Synthetic oligonucleotide
  Antisense strand to SEQ ID NO: 924932
auugaucagggucagccgg

SEQ ID NO: 924934 - RNA, 19 nt, Artificial Sequence
  Description of Artificial Sequence: Synthetic oligonucleotide
  Sense strand starting at position 2800 of SEQ ID NO: 913408
gugaucuccuccuugagau

SEQ ID NO: 924935 - RNA, 19 nt, Artificial Sequence
  Description of Artificial Sequence: Synthetic oligonucleotide
  Antisense strand to SEQ ID NO: 924934
aucucaaggaggagaucac

SEQ ID NO: 924936 - RNA, 19 nt, Artificial Sequence
  Description of Artificial Sequence: Synthetic oligonucleotide
  Sense strand starting at position 1022 of SEQ ID NO: 913408
agauacgcugagugauaca

SEQ ID NO: 924937 - RNA, 19 nt, Artificial Sequence
  Description of Artificial Sequence: Synthetic oligonucleotide
  Antisense strand to SEQ ID NO: 924936
uguaucacucagcguaucu

SEQ ID NO: 924938 - RNA, 19 nt, Artificial Sequence
  Description of Artificial Sequence: Synthetic oligonucleotide
  Sense strand starting at position 1021 of SEQ ID NO: 913408
gagauacgcugagugauac

SEQ ID NO: 924939 - RNA, 19 nt, Artificial Sequence
  Description of Artificial Sequence: Synthetic oligonucleotide
  Antisense strand to SEQ ID NO: 924938
guaucacucagcguaucuc

SEQ ID NO: 924940 - RNA, 19 nt, Artificial Sequence
  Description of Artificial Sequence: Synthetic oligonucleotide
  Sense strand starting at position 2898 of SEQ ID NO: 913408
uccgcuuuggaaggaauua

SEQ ID NO: 924941 - RNA, 19 nt, Artificial Sequence
  Description of Artificial Sequence: Synthetic oligonucleotide
  Antisense strand to SEQ ID NO: 924940
uaauuccuuccaaagcgga

SEQ ID NO: 924942 - RNA, 19 nt, Artificial Sequence
  Description of Artificial Sequence: Synthetic oligonucleotide
  Sense strand starting at position 158 of SEQ ID NO: 913408
gucugcuuuagucaagaug

SEQ ID NO: 924943 - RNA, 19 nt, Artificial Sequence
  Description of Artificial Sequence: Synthetic oligonucleotide
  Antisense strand to SEQ ID NO: 924942
caucuugacuaaagcagac

SEQ ID NO: 924944 - RNA, 19 nt, Artificial Sequence
  Description of Artificial Sequence: Synthetic oligonucleotide
  Sense strand starting at position 3283 of SEQ ID NO: 913408
uaauguuuaugugcagaaa

SEQ ID NO: 924945 - RNA, 19 nt, Artificial Sequence
  Description of Artificial Sequence: Synthetic oligonucleotide
  Antisense strand to SEQ ID NO: 924944
uuucugcacauaaacauua

SEQ ID NO: 924946 - RNA, 19 nt, Artificial Sequence
  Description of Artificial Sequence: Synthetic oligonucleotide
  Sense strand starting at position 3281 of SEQ ID NO: 913408
aauaauguuuaugugcaga

SEQ ID NO: 924947 - RNA, 19 nt, Artificial Sequence
  Description of Artificial Sequence: Synthetic oligonucleotide
  Antisense strand to SEQ ID NO: 924946
ucugcacauaaacauuauu

SEQ ID NO: 924948 - RNA, 19 nt, Artificial Sequence
  Description of Artificial Sequence: Synthetic oligonucleotide
  Sense strand starting at position 3498 of SEQ ID NO: 913408
uuagaacuuccuggcuacu

SEQ ID NO: 924949 - RNA, 19 nt, Artificial Sequence
  Description of Artificial Sequence: Synthetic oligonucleotide
  Antisense strand to SEQ ID NO: 924948
aguagccaggaaguucuaa

SEQ ID NO: 924950 - RNA, 19 nt, Artificial Sequence
  Description of Artificial Sequence: Synthetic oligonucleotide
  Sense strand starting at position 3486 of SEQ ID NO: 913408
ggccgaguuugauuagaac

SEQ ID NO: 924951 - RNA, 19 nt, Artificial Sequence
  Description of Artificial Sequence: Synthetic oligonucleotide
  Antisense strand to SEQ ID NO: 924950
guucuaaucaaacucggcc

SEQ ID NO: 924952 - RNA, 19 nt, Artificial Sequence
  Description of Artificial Sequence: Synthetic oligonucleotide
  Sense strand starting at position 161 of SEQ ID NO: 913408
ugcuuuagucaagauggcu

SEQ ID NO: 924953 - RNA, 19 nt, Artificial Sequence
  Description of Artificial Sequence: Synthetic oligonucleotide
  Antisense strand to SEQ ID NO: 924952
agccaucuugacuaaagca

SEQ ID NO: 924954 - RNA, 19 nt, Artificial Sequence
  Description of Artificial Sequence: Synthetic oligonucleotide
  Sense strand starting at position 2597 of SEQ ID NO: 913408
gacuguugauccguuagga

SEQ ID NO: 924955 - RNA, 19 nt, Artificial Sequence
  Description of Artificial Sequence: Synthetic oligonucleotide
  Antisense strand to SEQ ID NO: 924954
uccuaacggaucaacaguc

SEQ ID NO: 924956 - RNA, 19 nt, Artificial Sequence
  Description of Artificial Sequence: Synthetic oligonucleotide
  Sense strand starting at position 3230 of SEQ ID NO: 913408
guugaaagucugcagagcu

SEQ ID NO: 924957 - RNA, 19 nt, Artificial Sequence
  Description of Artificial Sequence: Synthetic oligonucleotide
  Antisense strand to SEQ ID NO: 924956
agcucugcagacuuucaac

SEQ ID NO: 924958 - RNA, 19 nt, Artificial Sequence
  Description of Artificial Sequence: Synthetic oligonucleotide
  Sense strand starting at position 3096 of SEQ ID NO: 913408
aggugagaauuauaaagac

SEQ ID NO: 924959 - RNA, 19 nt, Artificial Sequence
  Description of Artificial Sequence: Synthetic oligonucleotide
  Antisense strand to SEQ ID NO: 924958
gucuuuauaauucucaccu

SEQ ID NO: 924960 - RNA, 19 nt, Artificial Sequence
  Description of Artificial Sequence: Synthetic oligonucleotide
  Sense strand starting at position 156 of SEQ ID NO: 913408
augucugcuuuagucaaga

SEQ ID NO: 924961 - RNA, 19 nt, Artificial Sequence
  Description of Artificial Sequence: Synthetic oligonucleotide
  Antisense strand to SEQ ID NO: 924960
ucuugacuaaagcagacau

SEQ ID NO: 924962 - RNA, 19 nt, Artificial Sequence
  Description of Artificial Sequence: Synthetic oligonucleotide
  Sense strand starting at position 2594 of SEQ ID NO: 913408
acugacuguugauccguua

SEQ ID NO: 924963 - RNA, 19 nt, Artificial Sequence
  Description of Artificial Sequence: Synthetic oligonucleotide
  Antisense strand to SEQ ID NO: 924962
uaacggaucaacagucagu

SEQ ID NO: 924964 - RNA, 19 nt, Artificial Sequence
  Description of Artificial Sequence: Synthetic oligonucleotide
  Sense strand starting at position 276 of SEQ ID NO: 913408
cgguaucugugacuucaug

SEQ ID NO: 924965 - RNA, 19 nt, Artificial Sequence
  Description of Artificial Sequence: Synthetic oligonucleotide
  Antisense strand to SEQ ID NO: 924964
caugaagucacagauaccg

SEQ ID NO: 924966 - RNA, 19 nt, Artificial Sequence
  Description of Artificial Sequence: Synthetic oligonucleotide
  Sense strand starting at position 128 of SEQ ID NO: 913408
cguuacuguauguagugau

SEQ ID NO: 924967 - RNA, 19 nt, Artificial Sequence
  Description of Artificial Sequence: Synthetic oligonucleotide
  Antisense strand to SEQ ID NO: 924966
aucacuacauacaguaacg

SEQ ID NO: 924968 - RNA, 19 nt, Artificial Sequence
  Description of Artificial Sequence: Synthetic oligonucleotide
  Sense strand starting at position 2768 of SEQ ID NO: 913408
gccggcugacccugaucaa

SEQ ID NO: 924969 - RNA, 19 nt, Artificial Sequence
  Description of Artificial Sequence: Synthetic oligonucleotide
  Antisense strand to SEQ ID NO: 924968
uugaucagggucagccggc

SEQ ID NO: 924970 - RNA, 19 nt, Artificial Sequence
  Description of Artificial Sequence: Synthetic oligonucleotide
  Sense strand starting at position 435 of SEQ ID NO: 913408
gggcuagcuuaugcuuuaa

SEQ ID NO: 924971 - RNA, 19 nt, Artificial Sequence
  Description of Artificial Sequence: Synthetic oligonucleotide
  Antisense strand to SEQ ID NO: 924970
uuaaagcauaagcuagccc

SEQ ID NO: 924972 - RNA, 19 nt, Artificial Sequence
  Description of Artificial Sequence: Synthetic oligonucleotide
  Sense strand starting at position 3515 of SEQ ID NO: 913408
cuagaaccuugacaaguua

SEQ ID NO: 924973 - RNA, 19 nt, Artificial Sequence
  Description of Artificial Sequence: Synthetic oligonucleotide
  Antisense strand to SEQ ID NO: 924972
uaacuugucaagguucuag

SEQ ID NO: 924974 - RNA, 19 nt, Artificial Sequence
  Description of Artificial Sequence: Synthetic oligonucleotide
  Sense strand starting at position 217 of SEQ ID NO: 913408
guccgcagccgucagaaau

SEQ ID NO: 924975 - RNA, 19 nt, Artificial Sequence
  Description of Artificial Sequence: Synthetic oligonucleotide
  Antisense strand to SEQ ID NO: 924974
auuucugacggcugcggac

SEQ ID NO: 924976 - RNA, 19 nt, Artificial Sequence
  Description of Artificial Sequence: Synthetic oligonucleotide
  Sense strand starting at position 3090 of SEQ ID NO: 913408
augcuaaggugagaauuau

SEQ ID NO: 924977 - RNA, 19 nt, Artificial Sequence
  Description of Artificial Sequence: Synthetic oligonucleotide
  Antisense strand to SEQ ID NO: 924976
auaauucucaccuuagcau

SEQ ID NO: 924978 - RNA, 19 nt, Artificial Sequence
  Description of Artificial Sequence: Synthetic oligonucleotide
  Sense strand starting at position 3907 of SEQ ID NO: 913409
aacuuagacugaguaugau

SEQ ID NO: 924979 - RNA, 19 nt, Artificial Sequence
  Description of Artificial Sequence: Synthetic oligonucleotide
  Antisense strand to SEQ ID NO: 924978
aucauacucagucuaaguu

SEQ ID NO: 924980 - RNA, 19 nt, Artificial Sequence
  Description of Artificial Sequence: Synthetic oligonucleotide
  Sense strand starting at position 3869 of SEQ ID NO: 913409
aggaauaaaguaugcaaau

SEQ ID NO: 924981 - RNA, 19 nt, Artificial Sequence
  Description of Artificial Sequence: Synthetic oligonucleotide
  Antisense strand to SEQ ID NO: 924980
auuugcauacuuuauuccu

SEQ ID NO: 924982 - RNA, 19 nt, Artificial Sequence
  Description of Artificial Sequence: Synthetic oligonucleotide
  Sense strand starting at position 3870 of SEQ ID NO: 913409
ggaauaaaguaugcaaaug

SEQ ID NO: 924983 - RNA, 19 nt, Artificial Sequence
  Description of Artificial Sequence: Synthetic oligonucleotide
  Antisense strand to SEQ ID NO: 924982
cauuugcauacuuuauucc

SEQ ID NO: 924984 - RNA, 19 nt, Artificial Sequence
  Description of Artificial Sequence: Synthetic oligonucleotide
  Sense strand starting at position 1158 of SEQ ID NO: 913409
gagugaaaguacuuaauag

SEQ ID NO: 924985 - RNA, 19 nt, Artificial Sequence
  Description of Artificial Sequence: Synthetic oligonucleotide
  Antisense strand to SEQ ID NO: 924984
cuauuaaguacuuucacuc

SEQ ID NO: 924986 - RNA, 19 nt, Artificial Sequence
  Description of Artificial Sequence: Synthetic oligonucleotide
  Sense strand starting at position 815 of SEQ ID NO: 913409
cuuagaguucuugacucaa

SEQ ID NO: 924987 - RNA, 19 nt, Artificial Sequence
  Description of Artificial Sequence: Synthetic oligonucleotide
  Antisense strand to SEQ ID NO: 924986
uugagucaagaacucuaag

SEQ ID NO: 924988 - RNA, 19 nt, Artificial Sequence
  Description of Artificial Sequence: Synthetic oligonucleotide
  Sense strand starting at position 870 of SEQ ID NO: 913409
uuuguaaagggccauauaa

SEQ ID NO: 924989 - RNA, 19 nt, Artificial Sequence
  Description of Artificial Sequence: Synthetic oligonucleotide
  Antisense strand to SEQ ID NO: 924988
uuauauggcccuuuacaaa

SEQ ID NO: 924990 - RNA, 19 nt, Artificial Sequence
  Description of Artificial Sequence: Synthetic oligonucleotide
  Sense strand starting at position 798 of SEQ ID NO: 913409
cgguauuaccaagaugacu

SEQ ID NO: 924991 - RNA, 19 nt, Artificial Sequence
  Description of Artificial Sequence: Synthetic oligonucleotide
  Antisense strand to SEQ ID NO: 924990
agucaucuugguaauaccg

SEQ ID NO: 924992 - RNA, 19 nt, Artificial Sequence
  Description of Artificial Sequence: Synthetic oligonucleotide
  Sense strand starting at position 3904 of SEQ ID NO: 913409
uggaacuuagacugaguau

SEQ ID NO: 924993 - RNA, 19 nt, Artificial Sequence
  Description of Artificial Sequence: Synthetic oligonucleotide
  Antisense strand to SEQ ID NO: 924992
auacucagucuaaguucca

SEQ ID NO: 924994 - RNA, 19 nt, Artificial Sequence
  Description of Artificial Sequence: Synthetic oligonucleotide
  Sense strand starting at position 934 of SEQ ID NO: 913409
acuguagaccugcaggaau

SEQ ID NO: 924995 - RNA, 19 nt, Artificial Sequence
  Description of Artificial Sequence: Synthetic oligonucleotide
  Antisense strand to SEQ ID NO: 924994
auuccugcaggucuacagu

SEQ ID NO: 924996 - RNA, 19 nt, Artificial Sequence
  Description of Artificial Sequence: Synthetic oligonucleotide
  Sense strand starting at position 1677 of SEQ ID NO: 913409
cguguaauccggaguauga

SEQ ID NO: 924997 - RNA, 19 nt, Artificial Sequence
  Description of Artificial Sequence: Synthetic oligonucleotide
  Antisense strand to SEQ ID NO: 924996
ucauacuccggauuacacg

SEQ ID NO: 924998 - RNA, 19 nt, Artificial Sequence
  Description of Artificial Sequence: Synthetic oligonucleotide
  Sense strand starting at position 3752 of SEQ ID NO: 913409
uguguacuugaagagacuu

SEQ ID NO: 924999 - RNA, 19 nt, Artificial Sequence
  Description of Artificial Sequence: Synthetic oligonucleotide
  Antisense strand to SEQ ID NO: 924998
aagucucuucaaguacaca

SEQ ID NO: 925000 - RNA, 19 nt, Artificial Sequence
  Description of Artificial Sequence: Synthetic oligonucleotide
  Sense strand starting at position 3441 of SEQ ID NO: 913409
agauguggacuguauagua

SEQ ID NO: 925001 - RNA, 19 nt, Artificial Sequence
  Description of Artificial Sequence: Synthetic oligonucleotide
  Antisense strand to SEQ ID NO: 925000
uacuauacaguccacaucu

SEQ ID NO: 925002 - RNA, 19 nt, Artificial Sequence
  Description of Artificial Sequence: Synthetic oligonucleotide
  Sense strand starting at position 916 of SEQ ID NO: 913409
caacacguuguuuaagaaa

SEQ ID NO: 925003 - RNA, 19 nt, Artificial Sequence
  Description of Artificial Sequence: Synthetic oligonucleotide
  Antisense strand to SEQ ID NO: 925002
uuucuuaaacaacguguug

SEQ ID NO: 925004 - RNA, 19 nt, Artificial Sequence
  Description of Artificial Sequence: Synthetic oligonucleotide
  Sense strand starting at position 3760 of SEQ ID NO: 913409
ugaagagacuuagcuauug

SEQ ID NO: 925005 - RNA, 19 nt, Artificial Sequence
  Description of Artificial Sequence: Synthetic oligonucleotide
  Antisense strand to SEQ ID NO: 925004
caauagcuaagucucuuca

SEQ ID NO: 925006 - RNA, 19 nt, Artificial Sequence
  Description of Artificial Sequence: Synthetic oligonucleotide
  Sense strand starting at position 3326 of SEQ ID NO: 913409
uguugcuuuguaucguaau

SEQ ID NO: 925007 - RNA, 19 nt, Artificial Sequence
  Description of Artificial Sequence: Synthetic oligonucleotide
  Antisense strand to SEQ ID NO: 925006
auuacgauacaaagcaaca

SEQ ID NO: 925008 - RNA, 19 nt, Artificial Sequence
  Description of Artificial Sequence: Synthetic oligonucleotide
  Sense strand starting at position 268 of SEQ ID NO: 913409
ugauaaauugaaggucucu

SEQ ID NO: 925009 - RNA, 19 nt, Artificial Sequence
  Description of Artificial Sequence: Synthetic oligonucleotide
  Antisense strand to SEQ ID NO: 925008
agagaccuucaauuuauca

SEQ ID NO: 925010 - RNA, 19 nt, Artificial Sequence
  Description of Artificial Sequence: Synthetic oligonucleotide
  Sense strand starting at position 1679 of SEQ ID NO: 913409
uguaauccggaguaugaau

SEQ ID NO: 925011 - RNA, 19 nt, Artificial Sequence
  Description of Artificial Sequence: Synthetic oligonucleotide
  Antisense strand to SEQ ID NO: 925010
auucauacuccggauuaca

SEQ ID NO: 925012 - RNA, 19 nt, Artificial Sequence
  Description of Artificial Sequence: Synthetic oligonucleotide
  Sense strand starting at position 719 of SEQ ID NO: 913409
guugacuggcuggauauua

SEQ ID NO: 925013 - RNA, 19 nt, Artificial Sequence
  Description of Artificial Sequence: Synthetic oligonucleotide
  Antisense strand to SEQ ID NO: 925012
uaauauccagccagucaac

SEQ ID NO: 925014 - RNA, 19 nt, Artificial Sequence
  Description of Artificial Sequence: Synthetic oligonucleotide
  Sense strand starting at position 679 of SEQ ID NO: 913409
agcagaaauuaagucgaga

SEQ ID NO: 925015 - RNA, 19 nt, Artificial Sequence
  Description of Artificial Sequence: Synthetic oligonucleotide
  Antisense strand to SEQ ID NO: 925014
ucucgacuuaauuucugcu

SEQ ID NO: 925016 - RNA, 19 nt, Artificial Sequence
  Description of Artificial Sequence: Synthetic oligonucleotide
  Sense strand starting at position 860 of SEQ ID NO: 913409
guaugauaacuuuguaaag

SEQ ID NO: 925017 - RNA, 19 nt, Artificial Sequence
  Description of Artificial Sequence: Synthetic oligonucleotide
  Antisense strand to SEQ ID NO: 925016
cuuuacaaaguuaucauac

SEQ ID NO: 925018 - RNA, 19 nt, Artificial Sequence
  Description of Artificial Sequence: Synthetic oligonucleotide
  Sense strand starting at position 1681 of SEQ ID NO: 913409
uaauccggaguaugaauua

SEQ ID NO: 925019 - RNA, 19 nt, Artificial Sequence
  Description of Artificial Sequence: Synthetic oligonucleotide
  Antisense strand to SEQ ID NO: 925018
uaauucauacuccggauua

SEQ ID NO: 925020 - RNA, 19 nt, Artificial Sequence
  Description of Artificial Sequence: Synthetic oligonucleotide
  Sense strand starting at position 259 of SEQ ID NO: 913409
cugaauuucugauaaauug

SEQ ID NO: 925021 - RNA, 19 nt, Artificial Sequence
  Description of Artificial Sequence: Synthetic oligonucleotide
  Antisense strand to SEQ ID NO: 925020
caauuuaucagaaauucag

SEQ ID NO: 925022 - RNA, 19 nt, Artificial Sequence
  Description of Artificial Sequence: Synthetic oligonucleotide
  Sense strand starting at position 3532 of SEQ ID NO: 913409
uaccgagugcgucuaguuu

SEQ ID NO: 925023 - RNA, 19 nt, Artificial Sequence
  Description of Artificial Sequence: Synthetic oligonucleotide
  Antisense strand to SEQ ID NO: 925022
aaacuagacgcacucggua

SEQ ID NO: 925024 - RNA, 19 nt, Artificial Sequence
  Description of Artificial Sequence: Synthetic oligonucleotide
  Sense strand starting at position 2895 of SEQ ID NO: 913409
gcgaguuguagcccuucga

SEQ ID NO: 925025 - RNA, 19 nt, Artificial Sequence
  Description of Artificial Sequence: Synthetic oligonucleotide
  Antisense strand to SEQ ID NO: 925024
ucgaagggcuacaacucgc

SEQ ID NO: 925026 - RNA, 19 nt, Artificial Sequence
  Description of Artificial Sequence: Synthetic oligonucleotide
  Sense strand starting at position 3886 of SEQ ID NO: 913409
augaccauucgccacauau

SEQ ID NO: 925027 - RNA, 19 nt, Artificial Sequence
  Description of Artificial Sequence: Synthetic oligonucleotide
  Antisense strand to SEQ ID NO: 925026
auauguggcgaauggucau

SEQ ID NO: 925028 - RNA, 19 nt, Artificial Sequence
  Description of Artificial Sequence: Synthetic oligonucleotide
  Sense strand starting at position 3543 of SEQ ID NO: 913409
ucuaguuucuacucaagag

SEQ ID NO: 925029 - RNA, 19 nt, Artificial Sequence
  Description of Artificial Sequence: Synthetic oligonucleotide
  Antisense strand to SEQ ID NO: 925028
cucuugaguagaaacuaga

SEQ ID NO: 925030 - RNA, 19 nt, Artificial Sequence
  Description of Artificial Sequence: Synthetic oligonucleotide
  Sense strand starting at position 1665 of SEQ ID NO: 913409
caggaaacuggacguguaa

SEQ ID NO: 925031 - RNA, 19 nt, Artificial Sequence
  Description of Artificial Sequence: Synthetic oligonucleotide
  Antisense strand to SEQ ID NO: 925030
uuacacguccaguuuccug

SEQ ID NO: 925032 - RNA, 19 nt, Artificial Sequence
  Description of Artificial Sequence: Synthetic oligonucleotide
  Sense strand starting at position 95 of SEQ ID NO: 913409
uuaacugcugcauauagau

SEQ ID NO: 925033 - RNA, 19 nt, Artificial Sequence
  Description of Artificial Sequence: Synthetic oligonucleotide
  Antisense strand to SEQ ID NO: 925032
aucuauaugcagcaguuaa

SEQ ID NO: 925034 - RNA, 19 nt, Artificial Sequence
  Description of Artificial Sequence: Synthetic oligonucleotide
  Sense strand starting at position 2 of SEQ ID NO: 913409
ggaaaucuuaagggugucu

SEQ ID NO: 925035 - RNA, 19 nt, Artificial Sequence
  Description of Artificial Sequence: Synthetic oligonucleotide
  Antisense strand to SEQ ID NO: 925034
agacacccuuaagauuucc

SEQ ID NO: 925036 - RNA, 19 nt, Artificial Sequence
  Description of Artificial Sequence: Synthetic oligonucleotide
  Sense strand starting at position 553 of SEQ ID NO: 913409
aacacaucuccacggguaa

SEQ ID NO: 925037 - RNA, 19 nt, Artificial Sequence
  Description of Artificial Sequence: Synthetic oligonucleotide
  Antisense strand to SEQ ID NO: 925036
uuacccguggagauguguu

SEQ ID NO: 925038 - RNA, 19 nt, Artificial Sequence
  Description of Artificial Sequence: Synthetic oligonucleotide
  Sense strand starting at position 813 of SEQ ID NO: 913409
gacuuagaguucuugacuc

SEQ ID NO: 925039 - RNA, 19 nt, Artificial Sequence
  Description of Artificial Sequence: Synthetic oligonucleotide
  Antisense strand to SEQ ID NO: 925038
gagucaagaacucuaaguc

SEQ ID NO: 925040 - RNA, 19 nt, Artificial Sequence
  Description of Artificial Sequence: Synthetic oligonucleotide
  Sense strand starting at position 1120 of SEQ ID NO: 913409
ucugaaguucccgaauucu

SEQ ID NO: 925041 - RNA, 19 nt, Artificial Sequence
  Description of Artificial Sequence: Synthetic oligonucleotide
  Antisense strand to SEQ ID NO: 925040
agaauucgggaacuucaga

SEQ ID NO: 925042 - RNA, 19 nt, Artificial Sequence
  Description of Artificial Sequence: Synthetic oligonucleotide
  Sense strand starting at position 527 of SEQ ID NO: 913409
uuacuuccugcugggaaga

SEQ ID NO: 925043 - RNA, 19 nt, Artificial Sequence
  Description of Artificial Sequence: Synthetic oligonucleotide
  Antisense strand to SEQ ID NO: 925042
ucuucccagcaggaaguaa

SEQ ID NO: 925044 - RNA, 19 nt, Artificial Sequence
  Description of Artificial Sequence: Synthetic oligonucleotide
  Sense strand starting at position 300 of SEQ ID NO: 913409
aagugucuugggcauccaa

SEQ ID NO: 925045 - RNA, 19 nt, Artificial Sequence
  Description of Artificial Sequence: Synthetic oligonucleotide
  Antisense strand to SEQ ID NO: 925044
uuggaugcccaagacacuu

SEQ ID NO: 925046 - RNA, 19 nt, Artificial Sequence
  Description of Artificial Sequence: Synthetic oligonucleotide
  Sense strand starting at position 2728 of SEQ ID NO: 913409
ccgagucguguaaaucguu

SEQ ID NO: 925047 - RNA, 19 nt, Artificial Sequence
  Description of Artificial Sequence: Synthetic oligonucleotide
  Antisense strand to SEQ ID NO: 925046
aacgauuuacacgacucgg

SEQ ID NO: 925048 - RNA, 19 nt, Artificial Sequence
  Description of Artificial Sequence: Synthetic oligonucleotide
  Sense strand starting at position 3204 of SEQ ID NO: 913409
uguguuauuguggaauuau

SEQ ID NO: 925049 - RNA, 19 nt, Artificial Sequence
  Description of Artificial Sequence: Synthetic oligonucleotide
  Antisense strand to SEQ ID NO: 925048
auaauuccacaauaacaca

SEQ ID NO: 925050 - RNA, 19 nt, Artificial Sequence
  Description of Artificial Sequence: Synthetic oligonucleotide
  Sense strand starting at position 1667 of SEQ ID NO: 913409
ggaaacuggacguguaauc

SEQ ID NO: 925051 - RNA, 19 nt, Artificial Sequence
  Description of Artificial Sequence: Synthetic oligonucleotide
  Antisense strand to SEQ ID NO: 925050
gauuacacguccaguuucc

SEQ ID NO: 925052 - RNA, 19 nt, Artificial Sequence
  Description of Artificial Sequence: Synthetic oligonucleotide
  Sense strand starting at position 1824 of SEQ ID NO: 913409
cuacgucacccuggaaaca

SEQ ID NO: 925053 - RNA, 19 nt, Artificial Sequence
  Description of Artificial Sequence: Synthetic oligonucleotide
  Antisense strand to SEQ ID NO: 925052
uguuuccagggugacguag

SEQ ID NO: 925054 - RNA, 19 nt, Artificial Sequence
  Description of Artificial Sequence: Synthetic oligonucleotide
  Sense strand starting at position 257 of SEQ ID NO: 913409
agcugaauuucugauaaau

SEQ ID NO: 925055 - RNA, 19 nt, Artificial Sequence
  Description of Artificial Sequence: Synthetic oligonucleotide
  Antisense strand to SEQ ID NO: 925054
auuuaucagaaauucagcu

SEQ ID NO: 925056 - RNA, 19 nt, Artificial Sequence
  Description of Artificial Sequence: Synthetic oligonucleotide
  Sense strand starting at position 3459 of SEQ ID NO: 913409
auuugccuccagcgugaua

SEQ ID NO: 925057 - RNA, 19 nt, Artificial Sequence
  Description of Artificial Sequence: Synthetic oligonucleotide
  Antisense strand to SEQ ID NO: 925056
uaucacgcuggaggcaaau

SEQ ID NO: 925058 - RNA, 19 nt, Artificial Sequence
  Description of Artificial Sequence: Synthetic oligonucleotide
  Sense strand starting at position 1588 of SEQ ID NO: 913410
gagugaaaguacuuaauag

SEQ ID NO: 925059 - RNA, 19 nt, Artificial Sequence
  Description of Artificial Sequence: Synthetic oligonucleotide
  Antisense strand to SEQ ID NO: 925058
cuauuaaguacuuucacuc

SEQ ID NO: 925060 - RNA, 19 nt, Artificial Sequence
  Description of Artificial Sequence: Synthetic oligonucleotide
  Sense strand starting at position 1245 of SEQ ID NO: 913410
cuuagaguucuugacucaa

SEQ ID NO: 925061 - RNA, 19 nt, Artificial Sequence
  Description of Artificial Sequence: Synthetic oligonucleotide
  Antisense strand to SEQ ID NO: 925060
uugagucaagaacucuaag

SEQ ID NO: 925062 - RNA, 19 nt, Artificial Sequence
  Description of Artificial Sequence: Synthetic oligonucleotide
  Sense strand starting at position 309 of SEQ ID NO: 913410
aagauauuccuggguaaau

SEQ ID NO: 925063 - RNA, 19 nt, Artificial Sequence
  Description of Artificial Sequence: Synthetic oligonucleotide
  Antisense strand to SEQ ID NO: 925062
auuuacccaggaauaucuu

SEQ ID NO: 925064 - RNA, 19 nt, Artificial Sequence
  Description of Artificial Sequence: Synthetic oligonucleotide
  Sense strand starting at position 1300 of SEQ ID NO: 913410
uuuguaaagggccauauaa

SEQ ID NO: 925065 - RNA, 19 nt, Artificial Sequence
  Description of Artificial Sequence: Synthetic oligonucleotide
  Antisense strand to SEQ ID NO: 925064
uuauauggcccuuuacaaa

SEQ ID NO: 925066 - RNA, 19 nt, Artificial Sequence
  Description of Artificial Sequence: Synthetic oligonucleotide
  Sense strand starting at position 1228 of SEQ ID NO: 913410
cgguauuaccaagaugacu

SEQ ID NO: 925067 - RNA, 19 nt, Artificial Sequence
  Description of Artificial Sequence: Synthetic oligonucleotide
  Antisense strand to SEQ ID NO: 925066
agucaucuugguaauaccg

SEQ ID NO: 925068 - RNA, 19 nt, Artificial Sequence
  Description of Artificial Sequence: Synthetic oligonucleotide
  Sense strand starting at position 1364 of SEQ ID NO: 913410
acuguagaccugcaggaau

SEQ ID NO: 925069 - RNA, 19 nt, Artificial Sequence
  Description of Artificial Sequence: Synthetic oligonucleotide
  Antisense strand to SEQ ID NO: 925068
auuccugcaggucuacagu

SEQ ID NO: 925070 - RNA, 19 nt, Artificial Sequence
  Description of Artificial Sequence: Synthetic oligonucleotide
  Sense strand starting at position 31 of SEQ ID NO: 913410
aggcuuagucaugacuaga

SEQ ID NO: 925071 - RNA, 19 nt, Artificial Sequence
  Description of Artificial Sequence: Synthetic oligonucleotide
  Antisense strand to SEQ ID NO: 925070
ucuagucaugacuaagccu

SEQ ID NO: 925072 - RNA, 19 nt, Artificial Sequence
  Description of Artificial Sequence: Synthetic oligonucleotide
  Sense strand starting at position 2107 of SEQ ID NO: 913410
cguguaauccggaguauga

SEQ ID NO: 925073 - RNA, 19 nt, Artificial Sequence
  Description of Artificial Sequence: Synthetic oligonucleotide
  Antisense strand to SEQ ID NO: 925072
ucauacuccggauuacacg

SEQ ID NO: 925074 - RNA, 19 nt, Artificial Sequence
  Description of Artificial Sequence: Synthetic oligonucleotide
  Sense strand starting at position 310 of SEQ ID NO: 913410
agauauuccuggguaaauu

SEQ ID NO: 925075 - RNA, 19 nt, Artificial Sequence
  Description of Artificial Sequence: Synthetic oligonucleotide
  Antisense strand to SEQ ID NO: 925074
aauuuacccaggaauaucu

SEQ ID NO: 925076 - RNA, 19 nt, Artificial Sequence
  Description of Artificial Sequence: Synthetic oligonucleotide
  Sense strand starting at position 3871 of SEQ ID NO: 913410
agauguggacuguauagua

SEQ ID NO: 925077 - RNA, 19 nt, Artificial Sequence
  Description of Artificial Sequence: Synthetic oligonucleotide
  Antisense strand to SEQ ID NO: 925076
uacuauacaguccacaucu

SEQ ID NO: 925078 - RNA, 19 nt, Artificial Sequence
  Description of Artificial Sequence: Synthetic oligonucleotide
  Sense strand starting at position 1346 of SEQ ID NO: 913410
caacacguuguuuaagaaa

SEQ ID NO: 925079 - RNA, 19 nt, Artificial Sequence
  Description of Artificial Sequence: Synthetic oligonucleotide
  Antisense strand to SEQ ID NO: 925078
uuucuuaaacaacguguug

SEQ ID NO: 925080 - RNA, 19 nt, Artificial Sequence
  Description of Artificial Sequence: Synthetic oligonucleotide
  Sense strand starting at position 3756 of SEQ ID NO: 913410
uguugcuuuguaucguaau

SEQ ID NO: 925081 - RNA, 19 nt, Artificial Sequence
  Description of Artificial Sequence: Synthetic oligonucleotide
  Antisense strand to SEQ ID NO: 925080
auuacgauacaaagcaaca

SEQ ID NO: 925082 - RNA, 19 nt, Artificial Sequence
  Description of Artificial Sequence: Synthetic oligonucleotide
  Sense strand starting at position 698 of SEQ ID NO: 913410
ugauaaauugaaggucucu

SEQ ID NO: 925083 - RNA, 19 nt, Artificial Sequence
  Description of Artificial Sequence: Synthetic oligonucleotide
  Antisense strand to SEQ ID NO: 925082
agagaccuucaauuuauca

SEQ ID NO: 925084 - RNA, 19 nt, Artificial Sequence
  Description of Artificial Sequence: Synthetic oligonucleotide
  Sense strand starting at position 12 of SEQ ID NO: 913410
cguauagcugcguuugaga

SEQ ID NO: 925085 - RNA, 19 nt, Artificial Sequence
  Description of Artificial Sequence: Synthetic oligonucleotide
  Antisense strand to SEQ ID NO: 925084
ucucaaacgcagcuauacg

SEQ ID NO: 925086 - RNA, 19 nt, Artificial Sequence
  Description of Artificial Sequence: Synthetic oligonucleotide
  Sense strand starting at position 2109 of SEQ ID NO: 913410
uguaauccggaguaugaau

SEQ ID NO: 925087 - RNA, 19 nt, Artificial Sequence
  Description of Artificial Sequence: Synthetic oligonucleotide
  Antisense strand to SEQ ID NO: 925086
auucauacuccggauuaca

SEQ ID NO: 925088 - RNA, 19 nt, Artificial Sequence
  Description of Artificial Sequence: Synthetic oligonucleotide
  Sense strand starting at position 1149 of SEQ ID NO: 913410
guugacuggcuggauauua

SEQ ID NO: 925089 - RNA, 19 nt, Artificial Sequence
  Description of Artificial Sequence: Synthetic oligonucleotide
  Antisense strand to SEQ ID NO: 925088
uaauauccagccagucaac

SEQ ID NO: 925090 - RNA, 19 nt, Artificial Sequence
  Description of Artificial Sequence: Synthetic oligonucleotide
  Sense strand starting at position 1109 of SEQ ID NO: 913410
agcagaaauuaagucgaga

SEQ ID NO: 925091 - RNA, 19 nt, Artificial Sequence
  Description of Artificial Sequence: Synthetic oligonucleotide
  Antisense strand to SEQ ID NO: 925090
ucucgacuuaauuucugcu

SEQ ID NO: 925092 - RNA, 19 nt, Artificial Sequence
  Description of Artificial Sequence: Synthetic oligonucleotide
  Sense strand starting at position 1290 of SEQ ID NO: 913410
guaugauaacuuuguaaag

SEQ ID NO: 925093 - RNA, 19 nt, Artificial Sequence
  Description of Artificial Sequence: Synthetic oligonucleotide
  Antisense strand to SEQ ID NO: 925092
cuuuacaaaguuaucauac

SEQ ID NO: 925094 - RNA, 19 nt, Artificial Sequence
  Description of Artificial Sequence: Synthetic oligonucleotide
  Sense strand starting at position 2111 of SEQ ID NO: 913410
uaauccggaguaugaauua

SEQ ID NO: 925095 - RNA, 19 nt, Artificial Sequence
  Description of Artificial Sequence: Synthetic oligonucleotide
  Antisense strand to SEQ ID NO: 925094
uaauucauacuccggauua

SEQ ID NO: 925096 - RNA, 19 nt, Artificial Sequence
  Description of Artificial Sequence: Synthetic oligonucleotide
  Sense strand starting at position 689 of SEQ ID NO: 913410
cugaauuucugauaaauug

SEQ ID NO: 925097 - RNA, 19 nt, Artificial Sequence
  Description of Artificial Sequence: Synthetic oligonucleotide
  Antisense strand to SEQ ID NO: 925096
caauuuaucagaaauucag

SEQ ID NO: 925098 - RNA, 19 nt, Artificial Sequence
  Description of Artificial Sequence: Synthetic oligonucleotide
  Sense strand starting at position 26 of SEQ ID NO: 913410
ugagaaggcuuagucauga

SEQ ID NO: 925099 - RNA, 19 nt, Artificial Sequence
  Description of Artificial Sequence: Synthetic oligonucleotide
  Antisense strand to SEQ ID NO: 925098
ucaugacuaagccuucuca

SEQ ID NO: 925100 - RNA, 19 nt, Artificial Sequence
  Description of Artificial Sequence: Synthetic oligonucleotide
  Sense strand starting at position 3962 of SEQ ID NO: 913410
uaccgagugcgucuaguuu

SEQ ID NO: 925101 - RNA, 19 nt, Artificial Sequence
  Description of Artificial Sequence: Synthetic oligonucleotide
  Antisense strand to SEQ ID NO: 925100
aaacuagacgcacucggua

SEQ ID NO: 925102 - RNA, 19 nt, Artificial Sequence
  Description of Artificial Sequence: Synthetic oligonucleotide
  Sense strand starting at position 3325 of SEQ ID NO: 913410
gcgaguuguagcccuucga

SEQ ID NO: 925103 - RNA, 19 nt, Artificial Sequence
  Description of Artificial Sequence: Synthetic oligonucleotide
  Antisense strand to SEQ ID NO: 925102
ucgaagggcuacaacucgc

SEQ ID NO: 925104 - RNA, 19 nt, Artificial Sequence
  Description of Artificial Sequence: Synthetic oligonucleotide
  Sense strand starting at position 3973 of SEQ ID NO: 913410
ucuaguuucuacucaagag

SEQ ID NO: 925105 - RNA, 19 nt, Artificial Sequence
  Description of Artificial Sequence: Synthetic oligonucleotide
  Antisense strand to SEQ ID NO: 925104
cucuugaguagaaacuaga

SEQ ID NO: 925106 - RNA, 19 nt, Artificial Sequence
  Description of Artificial Sequence: Synthetic oligonucleotide
  Sense strand starting at position 2095 of SEQ ID NO: 913410
caggaaacuggacguguaa

SEQ ID NO: 925107 - RNA, 19 nt, Artificial Sequence
  Description of Artificial Sequence: Synthetic oligonucleotide
  Antisense strand to SEQ ID NO: 925106
uuacacguccaguuuccug

SEQ ID NO: 925108 - RNA, 19 nt, Artificial Sequence
  Description of Artificial Sequence: Synthetic oligonucleotide
  Sense strand starting at position 92 of SEQ ID NO: 913410
agcuuaagccucuagacua

SEQ ID NO: 925109 - RNA, 19 nt, Artificial Sequence
  Description of Artificial Sequence: Synthetic oligonucleotide
  Antisense strand to SEQ ID NO: 925108
uagucuagaggcuuaagcu

SEQ ID NO: 925110 - RNA, 19 nt, Artificial Sequence
  Description of Artificial Sequence: Synthetic oligonucleotide
  Sense strand starting at position 525 of SEQ ID NO: 913410
uuaacugcugcauauagau

SEQ ID NO: 925111 - RNA, 19 nt, Artificial Sequence
  Description of Artificial Sequence: Synthetic oligonucleotide
  Antisense strand to SEQ ID NO: 925110
aucuauaugcagcaguuaa

SEQ ID NO: 925112 - RNA, 19 nt, Artificial Sequence
  Description of Artificial Sequence: Synthetic oligonucleotide
  Sense strand starting at position 432 of SEQ ID NO: 913410
ggaaaucuuaagggugucu

SEQ ID NO: 925113 - RNA, 19 nt, Artificial Sequence
  Description of Artificial Sequence: Synthetic oligonucleotide
  Antisense strand to SEQ ID NO: 925112
agacacccuuaagauuucc

SEQ ID NO: 925114 - RNA, 19 nt, Artificial Sequence
  Description of Artificial Sequence: Synthetic oligonucleotide
  Sense strand starting at position 983 of SEQ ID NO: 913410
aacacaucuccacggguaa

SEQ ID NO: 925115 - RNA, 19 nt, Artificial Sequence
  Description of Artificial Sequence: Synthetic oligonucleotide
  Antisense strand to SEQ ID NO: 925114
uuacccguggagauguguu

SEQ ID NO: 925116 - RNA, 19 nt, Artificial Sequence
  Description of Artificial Sequence: Synthetic oligonucleotide
  Sense strand starting at position 1243 of SEQ ID NO: 913410
gacuuagaguucuugacuc

SEQ ID NO: 925117 - RNA, 19 nt, Artificial Sequence
  Description of Artificial Sequence: Synthetic oligonucleotide
  Antisense strand to SEQ ID NO: 925116
gagucaagaacucuaaguc

SEQ ID NO: 925118 - RNA, 19 nt, Artificial Sequence
  Description of Artificial Sequence: Synthetic oligonucleotide
  Sense strand starting at position 1550 of SEQ ID NO: 913410
ucugaaguucccgaauucu

SEQ ID NO: 925119 - RNA, 19 nt, Artificial Sequence
  Description of Artificial Sequence: Synthetic oligonucleotide
  Antisense strand to SEQ ID NO: 925118
agaauucgggaacuucaga

SEQ ID NO: 925120 - RNA, 19 nt, Artificial Sequence
  Description of Artificial Sequence: Synthetic oligonucleotide
  Sense strand starting at position 957 of SEQ ID NO: 913410
uuacuuccugcugggaaga

SEQ ID NO: 925121 - RNA, 19 nt, Artificial Sequence
  Description of Artificial Sequence: Synthetic oligonucleotide
  Antisense strand to SEQ ID NO: 925120
ucuucccagcaggaaguaa

SEQ ID NO: 925122 - RNA, 19 nt, Artificial Sequence
  Description of Artificial Sequence: Synthetic oligonucleotide
  Sense strand starting at position 730 of SEQ ID NO: 913410
aagugucuugggcauccaa

SEQ ID NO: 925123 - RNA, 19 nt, Artificial Sequence
  Description of Artificial Sequence: Synthetic oligonucleotide
  Antisense strand to SEQ ID NO: 925122
uuggaugcccaagacacuu

SEQ ID NO: 925124 - RNA, 19 nt, Artificial Sequence
  Description of Artificial Sequence: Synthetic oligonucleotide
  Sense strand starting at position 3158 of SEQ ID NO: 913410
ccgagucguguaaaucguu

SEQ ID NO: 925125 - RNA, 19 nt, Artificial Sequence
  Description of Artificial Sequence: Synthetic oligonucleotide
  Antisense strand to SEQ ID NO: 925124
aacgauuuacacgacucgg

SEQ ID NO: 925126 - RNA, 19 nt, Artificial Sequence
  Description of Artificial Sequence: Synthetic oligonucleotide
  Sense strand starting at position 3634 of SEQ ID NO: 913410
uguguuauuguggaauuau

SEQ ID NO: 925127 - RNA, 19 nt, Artificial Sequence
  Description of Artificial Sequence: Synthetic oligonucleotide
  Antisense strand to SEQ ID NO: 925126
auaauuccacaauaacaca

SEQ ID NO: 925128 - RNA, 19 nt, Artificial Sequence
  Description of Artificial Sequence: Synthetic oligonucleotide
  Sense strand starting at position 2097 of SEQ ID NO: 913410
ggaaacuggacguguaauc

SEQ ID NO: 925129 - RNA, 19 nt, Artificial Sequence
  Description of Artificial Sequence: Synthetic oligonucleotide
  Antisense strand to SEQ ID NO: 925128
gauuacacguccaguuucc

SEQ ID NO: 925130 - RNA, 19 nt, Artificial Sequence
  Description of Artificial Sequence: Synthetic oligonucleotide
  Sense strand starting at position 2254 of SEQ ID NO: 913410
cuacgucacccuggaaaca

SEQ ID NO: 925131 - RNA, 19 nt, Artificial Sequence
  Description of Artificial Sequence: Synthetic oligonucleotide
  Antisense strand to SEQ ID NO: 925130
uguuuccagggugacguag

SEQ ID NO: 925132 - RNA, 19 nt, Artificial Sequence
  Description of Artificial Sequence: Synthetic oligonucleotide
  Sense strand starting at position 687 of SEQ ID NO: 913410
agcugaauuucugauaaau

SEQ ID NO: 925133 - RNA, 19 nt, Artificial Sequence
  Description of Artificial Sequence: Synthetic oligonucleotide
  Antisense strand to SEQ ID NO: 925132
auuuaucagaaauucagcu

SEQ ID NO: 925134 - RNA, 19 nt, Artificial Sequence
  Description of Artificial Sequence: Synthetic oligonucleotide
  Sense strand starting at position 3889 of SEQ ID NO: 913410
auuugccuccagcgugaua

SEQ ID NO: 925135 - RNA, 19 nt, Artificial Sequence
  Description of Artificial Sequence: Synthetic oligonucleotide
  Antisense strand to SEQ ID NO: 925134
uaucacgcuggaggcaaau

SEQ ID NO: 925136 - RNA, 19 nt, Artificial Sequence
  Description of Artificial Sequence: Synthetic oligonucleotide
  Sense strand starting at position 3694 of SEQ ID NO: 913410
gaaagaagaugcuuugugu

SEQ ID NO: 925137 - RNA, 19 nt, Artificial Sequence
  Description of Artificial Sequence: Synthetic oligonucleotide
  Antisense strand to SEQ ID NO: 925136
acacaaagcaucuucuuuc

SEQ ID NO: 925138 - RNA, 19 nt, Artificial Sequence
  Description of Artificial Sequence: Synthetic oligonucleotide
  Sense strand starting at position 26 of SEQ ID NO: 913411
cuaacuuagccagauuaug

SEQ ID NO: 925139 - RNA, 19 nt, Artificial Sequence
  Description of Artificial Sequence: Synthetic oligonucleotide
  Antisense strand to SEQ ID NO: 925138
cauaaucuggcuaaguuag

SEQ ID NO: 925140 - RNA, 19 nt, Artificial Sequence
  Description of Artificial Sequence: Synthetic oligonucleotide
  Sense strand starting at position 1079 of SEQ ID NO: 913411
gggcaugaauuauuauaca

SEQ ID NO: 925141 - RNA, 19 nt, Artificial Sequence
  Description of Artificial Sequence: Synthetic oligonucleotide
  Antisense strand to SEQ ID NO: 925140
uguauaauaauucaugccc

SEQ ID NO: 925142 - RNA, 19 nt, Artificial Sequence
  Description of Artificial Sequence: Synthetic oligonucleotide
  Sense strand starting at position 162 of SEQ ID NO: 913411
guaaauaaugcucaucuag

SEQ ID NO: 925143 - RNA, 19 nt, Artificial Sequence
  Description of Artificial Sequence: Synthetic oligonucleotide
  Antisense strand to SEQ ID NO: 925142
cuagaugagcauuauuuac

SEQ ID NO: 925144 - RNA, 19 nt, Artificial Sequence
  Description of Artificial Sequence: Synthetic oligonucleotide
  Sense strand starting at position 3234 of SEQ ID NO: 913411
gguagucuagguuaaagac

SEQ ID NO: 925145 - RNA, 19 nt, Artificial Sequence
  Description of Artificial Sequence: Synthetic oligonucleotide
  Antisense strand to SEQ ID NO: 925144
gucuuuaaccuagacuacc

SEQ ID NO: 925146 - RNA, 19 nt, Artificial Sequence
  Description of Artificial Sequence: Synthetic oligonucleotide
  Sense strand starting at position 895 of SEQ ID NO: 913411
augauagagguguggacua

SEQ ID NO: 925147 - RNA, 19 nt, Artificial Sequence
  Description of Artificial Sequence: Synthetic oligonucleotide
  Antisense strand to SEQ ID NO: 925146
uaguccacaccucuaucau

SEQ ID NO: 925148 - RNA, 19 nt, Artificial Sequence
  Description of Artificial Sequence: Synthetic oligonucleotide
  Sense strand starting at position 3585 of SEQ ID NO: 913411
gcccauaaucguguucugu

SEQ ID NO: 925149 - RNA, 19 nt, Artificial Sequence
  Description of Artificial Sequence: Synthetic oligonucleotide
  Antisense strand to SEQ ID NO: 925148
acagaacacgauuaugggc

SEQ ID NO: 925150 - RNA, 19 nt, Artificial Sequence
  Description of Artificial Sequence: Synthetic oligonucleotide
  Sense strand starting at position 37 of SEQ ID NO: 913411
agauuaugugagcagcaaa

SEQ ID NO: 925151 - RNA, 19 nt, Artificial Sequence
  Description of Artificial Sequence: Synthetic oligonucleotide
  Antisense strand to SEQ ID NO: 925150
uuugcugcucacauaaucu

SEQ ID NO: 925152 - RNA, 19 nt, Artificial Sequence
  Description of Artificial Sequence: Synthetic oligonucleotide
  Sense strand starting at position 3449 of SEQ ID NO: 913411
ggauauguuugauucuagg

SEQ ID NO: 925153 - RNA, 19 nt, Artificial Sequence
  Description of Artificial Sequence: Synthetic oligonucleotide
  Antisense strand to SEQ ID NO: 925152
ccuagaaucaaacauaucc

SEQ ID NO: 925154 - RNA, 19 nt, Artificial Sequence
  Description of Artificial Sequence: Synthetic oligonucleotide
  Sense strand starting at position 960 of SEQ ID NO: 913411
uacugaugggcuggauaua

SEQ ID NO: 925155 - RNA, 19 nt, Artificial Sequence
  Description of Artificial Sequence: Synthetic oligonucleotide
  Antisense strand to SEQ ID NO: 925154
uauauccagcccaucagua

SEQ ID NO: 925156 - RNA, 19 nt, Artificial Sequence
  Description of Artificial Sequence: Synthetic oligonucleotide
  Sense strand starting at position 3380 of SEQ ID NO: 913411
aucagcuuucuaggaauaa

SEQ ID NO: 925157 - RNA, 19 nt, Artificial Sequence
  Description of Artificial Sequence: Synthetic oligonucleotide
  Antisense strand to SEQ ID NO: 925156
uuauuccuagaaagcugau

SEQ ID NO: 925158 - RNA, 19 nt, Artificial Sequence
  Description of Artificial Sequence: Synthetic oligonucleotide
  Sense strand starting at position 1166 of SEQ ID NO: 913411
guccuaauuguuuacuaaa

SEQ ID NO: 925159 - RNA, 19 nt, Artificial Sequence
  Description of Artificial Sequence: Synthetic oligonucleotide
  Antisense strand to SEQ ID NO: 925158
uuuaguaaacaauuaggac

SEQ ID NO: 925160 - RNA, 19 nt, Artificial Sequence
  Description of Artificial Sequence: Synthetic oligonucleotide
  Sense strand starting at position 1112 of SEQ ID NO: 913411
caaguuaaggcugagguau

SEQ ID NO: 925161 - RNA, 19 nt, Artificial Sequence
  Description of Artificial Sequence: Synthetic oligonucleotide
  Antisense strand to SEQ ID NO: 925160
auaccucagccuuaacuug

SEQ ID NO: 925162 - RNA, 19 nt, Artificial Sequence
  Description of Artificial Sequence: Synthetic oligonucleotide
  Sense strand starting at position 213 of SEQ ID NO: 913411
accucugucccagacuauu

SEQ ID NO: 925163 - RNA, 19 nt, Artificial Sequence
  Description of Artificial Sequence: Synthetic oligonucleotide
  Antisense strand to SEQ ID NO: 925162
aauagucugggacagaggu

SEQ ID NO: 925164 - RNA, 19 nt, Artificial Sequence
  Description of Artificial Sequence: Synthetic oligonucleotide
  Sense strand starting at position 3518 of SEQ ID NO: 913411
cugauaaaucagugauccu

SEQ ID NO: 925165 - RNA, 19 nt, Artificial Sequence
  Description of Artificial Sequence: Synthetic oligonucleotide
  Antisense strand to SEQ ID NO: 925164
aggaucacugauuuaucag

SEQ ID NO: 925166 - RNA, 19 nt, Artificial Sequence
  Description of Artificial Sequence: Synthetic oligonucleotide
  Sense strand starting at position 3459 of SEQ ID NO: 913411
gauucuaggaaugguguga

SEQ ID NO: 925167 - RNA, 19 nt, Artificial Sequence
  Description of Artificial Sequence: Synthetic oligonucleotide
  Antisense strand to SEQ ID NO: 925166
ucacaccauuccuagaauc

SEQ ID NO: 925168 - RNA, 19 nt, Artificial Sequence
  Description of Artificial Sequence: Synthetic oligonucleotide
  Sense strand starting at position 908 of SEQ ID NO: 913411
ggacuacgauggucucaga

SEQ ID NO: 925169 - RNA, 19 nt, Artificial Sequence
  Description of Artificial Sequence: Synthetic oligonucleotide
  Antisense strand to SEQ ID NO: 925168
ucugagaccaucguagucc

SEQ ID NO: 925170 - RNA, 19 nt, Artificial Sequence
  Description of Artificial Sequence: Synthetic oligonucleotide
  Sense strand starting at position 1668 of SEQ ID NO: 913411
ggagaaaccugagaaagaa

SEQ ID NO: 925171 - RNA, 19 nt, Artificial Sequence
  Description of Artificial Sequence: Synthetic oligonucleotide
  Antisense strand to SEQ ID NO: 925170
uucuuucucagguuucucc

SEQ ID NO: 925172 - RNA, 19 nt, Artificial Sequence
  Description of Artificial Sequence: Synthetic oligonucleotide
  Sense strand starting at position 807 of SEQ ID NO: 913411
uggaguauagacugauugu

SEQ ID NO: 925173 - RNA, 19 nt, Artificial Sequence
  Description of Artificial Sequence: Synthetic oligonucleotide
  Antisense strand to SEQ ID NO: 925172
acaaucagucuauacucca

SEQ ID NO: 925174 - RNA, 19 nt, Artificial Sequence
  Description of Artificial Sequence: Synthetic oligonucleotide
  Sense strand starting at position 785 of SEQ ID NO: 913411
auaagaucucucugacugu

SEQ ID NO: 925175 - RNA, 19 nt, Artificial Sequence
  Description of Artificial Sequence: Synthetic oligonucleotide
  Antisense strand to SEQ ID NO: 925174
acagucagagagaucuuau

SEQ ID NO: 925176 - RNA, 19 nt, Artificial Sequence
  Description of Artificial Sequence: Synthetic oligonucleotide
  Sense strand starting at position 3440 of SEQ ID NO: 913411
ggguggguuggauauguuu

SEQ ID NO: 925177 - RNA, 19 nt, Artificial Sequence
  Description of Artificial Sequence: Synthetic oligonucleotide
  Antisense strand to SEQ ID NO: 925176
aaacauauccaacccaccc

SEQ ID NO: 925178 - RNA, 19 nt, Artificial Sequence
  Description of Artificial Sequence: Synthetic oligonucleotide
  Sense strand starting at position 875 of SEQ ID NO: 913411
aauaguaguccaggcaaga

SEQ ID NO: 925179 - RNA, 19 nt, Artificial Sequence
  Description of Artificial Sequence: Synthetic oligonucleotide
  Antisense strand to SEQ ID NO: 925178
ucuugccuggacuacuauu

SEQ ID NO: 925180 - RNA, 19 nt, Artificial Sequence
  Description of Artificial Sequence: Synthetic oligonucleotide
  Sense strand starting at position 1100 of SEQ ID NO: 913411
uucugcuuuggacaaguua

SEQ ID NO: 925181 - RNA, 19 nt, Artificial Sequence
  Description of Artificial Sequence: Synthetic oligonucleotide
  Antisense strand to SEQ ID NO: 925180
uaacuuguccaaagcagaa

SEQ ID NO: 925182 - RNA, 19 nt, Artificial Sequence
  Description of Artificial Sequence: Synthetic oligonucleotide
  Sense strand starting at position 254 of SEQ ID NO: 913411
cggcaaauggauuaucugu

SEQ ID NO: 925183 - RNA, 19 nt, Artificial Sequence
  Description of Artificial Sequence: Synthetic oligonucleotide
  Antisense strand to SEQ ID NO: 925182
acagauaauccauuugccg

SEQ ID NO: 925184 - RNA, 19 nt, Artificial Sequence
  Description of Artificial Sequence: Synthetic oligonucleotide
  Sense strand starting at position 3591 of SEQ ID NO: 913411
aaucguguucugugauuuc

SEQ ID NO: 925185 - RNA, 19 nt, Artificial Sequence
  Description of Artificial Sequence: Synthetic oligonucleotide
  Antisense strand to SEQ ID NO: 925184
gaaaucacagaacacgauu

SEQ ID NO: 925186 - RNA, 19 nt, Artificial Sequence
  Description of Artificial Sequence: Synthetic oligonucleotide
  Sense strand starting at position 3443 of SEQ ID NO: 913411
uggguuggauauguuugau

SEQ ID NO: 925187 - RNA, 19 nt, Artificial Sequence
  Description of Artificial Sequence: Synthetic oligonucleotide
  Antisense strand to SEQ ID NO: 925186
aucaaacauauccaaccca

SEQ ID NO: 925188 - RNA, 19 nt, Artificial Sequence
  Description of Artificial Sequence: Synthetic oligonucleotide
  Sense strand starting at position 374 of SEQ ID NO: 913411
gaauuaagacugugguggu

SEQ ID NO: 925189 - RNA, 19 nt, Artificial Sequence
  Description of Artificial Sequence: Synthetic oligonucleotide
  Antisense strand to SEQ ID NO: 925188
accaccacagucuuaauuc

SEQ ID NO: 925190 - RNA, 19 nt, Artificial Sequence
  Description of Artificial Sequence: Synthetic oligonucleotide
  Sense strand starting at position 557 of SEQ ID NO: 913411
uggugucaccucuaauccu

SEQ ID NO: 925191 - RNA, 19 nt, Artificial Sequence
  Description of Artificial Sequence: Synthetic oligonucleotide
  Antisense strand to SEQ ID NO: 925190
aggauuagaggugacacca

SEQ ID NO: 925192 - RNA, 19 nt, Artificial Sequence
  Description of Artificial Sequence: Synthetic oligonucleotide
  Sense strand starting at position 1165 of SEQ ID NO: 913411
aguccuaauuguuuacuaa

SEQ ID NO: 925193 - RNA, 19 nt, Artificial Sequence
  Description of Artificial Sequence: Synthetic oligonucleotide
  Antisense strand to SEQ ID NO: 925192
uuaguaaacaauuaggacu

SEQ ID NO: 925194 - RNA, 19 nt, Artificial Sequence
  Description of Artificial Sequence: Synthetic oligonucleotide
  Sense strand starting at position 3391 of SEQ ID NO: 913411
aggaauaagaucugcgguu

SEQ ID NO: 925195 - RNA, 19 nt, Artificial Sequence
  Description of Artificial Sequence: Synthetic oligonucleotide
  Antisense strand to SEQ ID NO: 925194
aaccgcagaucuuauuccu

SEQ ID NO: 925196 - RNA, 19 nt, Artificial Sequence
  Description of Artificial Sequence: Synthetic oligonucleotide
  Sense strand starting at position 36 of SEQ ID NO: 913411
cagauuaugugagcagcaa

SEQ ID NO: 925197 - RNA, 19 nt, Artificial Sequence
  Description of Artificial Sequence: Synthetic oligonucleotide
  Antisense strand to SEQ ID NO: 925196
uugcugcucacauaaucug

SEQ ID NO: 925198 - RNA, 19 nt, Artificial Sequence
  Description of Artificial Sequence: Synthetic oligonucleotide
  Sense strand starting at position 3254 of SEQ ID NO: 913411
cgagccuauuuggagagaa

SEQ ID NO: 925199 - RNA, 19 nt, Artificial Sequence
  Description of Artificial Sequence: Synthetic oligonucleotide
  Antisense strand to SEQ ID NO: 925198
uucucuccaaauaggcucg

SEQ ID NO: 925200 - RNA, 19 nt, Artificial Sequence
  Description of Artificial Sequence: Synthetic oligonucleotide
  Sense strand starting at position 3578 of SEQ ID NO: 913411
ccagauugcccauaaucgu

SEQ ID NO: 925201 - RNA, 19 nt, Artificial Sequence
  Description of Artificial Sequence: Synthetic oligonucleotide
  Antisense strand to SEQ ID NO: 925200
acgauuaugggcaaucugg

SEQ ID NO: 925202 - RNA, 19 nt, Artificial Sequence
  Description of Artificial Sequence: Synthetic oligonucleotide
  Sense strand starting at position 353 of SEQ ID NO: 913411
cccucauucccaggugauu

SEQ ID NO: 925203 - RNA, 19 nt, Artificial Sequence
  Description of Artificial Sequence: Synthetic oligonucleotide
  Antisense strand to SEQ ID NO: 925202
aaucaccugggaaugaggg

SEQ ID NO: 925204 - RNA, 19 nt, Artificial Sequence
  Description of Artificial Sequence: Synthetic oligonucleotide
  Sense strand starting at position 3638 of SEQ ID NO: 913411
cagccaugucauggauauu

SEQ ID NO: 925205 - RNA, 19 nt, Artificial Sequence
  Description of Artificial Sequence: Synthetic oligonucleotide
  Antisense strand to SEQ ID NO: 925204
aauauccaugacauggcug

SEQ ID NO: 925206 - RNA, 19 nt, Artificial Sequence
  Description of Artificial Sequence: Synthetic oligonucleotide
  Sense strand starting at position 789 of SEQ ID NO: 913411
gaucucucugacuguaagu

SEQ ID NO: 925207 - RNA, 19 nt, Artificial Sequence
  Description of Artificial Sequence: Synthetic oligonucleotide
  Antisense strand to SEQ ID NO: 925206
acuuacagucagagagauc

SEQ ID NO: 925208 - RNA, 19 nt, Artificial Sequence
  Description of Artificial Sequence: Synthetic oligonucleotide
  Sense strand starting at position 23 of SEQ ID NO: 913411
augcuaacuuagccagauu

SEQ ID NO: 925209 - RNA, 19 nt, Artificial Sequence
  Description of Artificial Sequence: Synthetic oligonucleotide
  Antisense strand to SEQ ID NO: 925208
aaucuggcuaaguuagcau

SEQ ID NO: 925210 - RNA, 19 nt, Artificial Sequence
  Description of Artificial Sequence: Synthetic oligonucleotide
  Sense strand starting at position 3575 of SEQ ID NO: 913411
agcccagauugcccauaau

SEQ ID NO: 925211 - RNA, 19 nt, Artificial Sequence
  Description of Artificial Sequence: Synthetic oligonucleotide
  Antisense strand to SEQ ID NO: 925210
auuaugggcaaucugggcu

SEQ ID NO: 925212 - RNA, 19 nt, Artificial Sequence
  Description of Artificial Sequence: Synthetic oligonucleotide
  Sense strand starting at position 3498 of SEQ ID NO: 913411
cuguuuaagcaggguaaca

SEQ ID NO: 925213 - RNA, 19 nt, Artificial Sequence
  Description of Artificial Sequence: Synthetic oligonucleotide
  Antisense strand to SEQ ID NO: 925212
uguuacccugcuuaaacag

SEQ ID NO: 925214 - RNA, 19 nt, Artificial Sequence
  Description of Artificial Sequence: Synthetic oligonucleotide
  Sense strand starting at position 3442 of SEQ ID NO: 913411
guggguuggauauguuuga

SEQ ID NO: 925215 - RNA, 19 nt, Artificial Sequence
  Description of Artificial Sequence: Synthetic oligonucleotide
  Antisense strand to SEQ ID NO: 925214
ucaaacauauccaacccac

SEQ ID NO: 925216 - RNA, 19 nt, Artificial Sequence
  Description of Artificial Sequence: Synthetic oligonucleotide
  Sense strand starting at position 3446 of SEQ ID NO: 913411
guuggauauguuugauucu

SEQ ID NO: 925217 - RNA, 19 nt, Artificial Sequence
  Description of Artificial Sequence: Synthetic oligonucleotide
  Antisense strand to SEQ ID NO: 925216
agaaucaaacauauccaac

SEQ ID NO: 925218 - RNA, 19 nt, Artificial Sequence
  Description of Artificial Sequence: Synthetic oligonucleotide
  Sense strand starting at position 3834 of SEQ ID NO: 913412
acuauacuccuuggacaag

SEQ ID NO: 925219 - RNA, 19 nt, Artificial Sequence
  Description of Artificial Sequence: Synthetic oligonucleotide
  Antisense strand to SEQ ID NO: 925218
cuuguccaaggaguauagu

SEQ ID NO: 925220 - RNA, 19 nt, Artificial Sequence
  Description of Artificial Sequence: Synthetic oligonucleotide
  Sense strand starting at position 1038 of SEQ ID NO: 913412
ugcacuuaggaucaauuau

SEQ ID NO: 925221 - RNA, 19 nt, Artificial Sequence
  Description of Artificial Sequence: Synthetic oligonucleotide
  Antisense strand to SEQ ID NO: 925220
auaauugauccuaagugca

SEQ ID NO: 925222 - RNA, 19 nt, Artificial Sequence
  Description of Artificial Sequence: Synthetic oligonucleotide
  Sense strand starting at position 1669 of SEQ ID NO: 913412
auacguucccggcuaguua

SEQ ID NO: 925223 - RNA, 19 nt, Artificial Sequence
  Description of Artificial Sequence: Synthetic oligonucleotide
  Antisense strand to SEQ ID NO: 925222
uaacuagccgggaacguau

SEQ ID NO: 925224 - RNA, 19 nt, Artificial Sequence
  Description of Artificial Sequence: Synthetic oligonucleotide
  Sense strand starting at position 87 of SEQ ID NO: 913412
uguaauauugcacagauag

SEQ ID NO: 925225 - RNA, 19 nt, Artificial Sequence
  Description of Artificial Sequence: Synthetic oligonucleotide
  Antisense strand to SEQ ID NO: 925224
cuaucugugcaauauuaca

SEQ ID NO: 925226 - RNA, 19 nt, Artificial Sequence
  Description of Artificial Sequence: Synthetic oligonucleotide
  Sense strand starting at position 1329 of SEQ ID NO: 913412
ugucuaauugaacaugagu

SEQ ID NO: 925227 - RNA, 19 nt, Artificial Sequence
  Description of Artificial Sequence: Synthetic oligonucleotide
  Antisense strand to SEQ ID NO: 925226
acucauguucaauuagaca

SEQ ID NO: 925228 - RNA, 19 nt, Artificial Sequence
  Description of Artificial Sequence: Synthetic oligonucleotide
  Sense strand starting at position 1415 of SEQ ID NO: 913412
ggagaaauauucuaauuug

SEQ ID NO: 925229 - RNA, 19 nt, Artificial Sequence
  Description of Artificial Sequence: Synthetic oligonucleotide
  Antisense strand to SEQ ID NO: 925228
caaauuagaauauuucucc

SEQ ID NO: 925230 - RNA, 19 nt, Artificial Sequence
  Description of Artificial Sequence: Synthetic oligonucleotide
  Sense strand starting at position 3122 of SEQ ID NO: 913412
gccugaagacuccaaguga

SEQ ID NO: 925231 - RNA, 19 nt, Artificial Sequence
  Description of Artificial Sequence: Synthetic oligonucleotide
  Antisense strand to SEQ ID NO: 925230
ucacuuggagucuucaggc

SEQ ID NO: 925232 - RNA, 19 nt, Artificial Sequence
  Description of Artificial Sequence: Synthetic oligonucleotide
  Sense strand starting at position 1399 of SEQ ID NO: 913412
uggcauaugcuugagagga

SEQ ID NO: 925233 - RNA, 19 nt, Artificial Sequence
  Description of Artificial Sequence: Synthetic oligonucleotide
  Antisense strand to SEQ ID NO: 925232
uccucucaagcauaugcca

SEQ ID NO: 925234 - RNA, 19 nt, Artificial Sequence
  Description of Artificial Sequence: Synthetic oligonucleotide
  Sense strand starting at position 2509 of SEQ ID NO: 913412
gguggaucacccgagaucu

SEQ ID NO: 925235 - RNA, 19 nt, Artificial Sequence
  Description of Artificial Sequence: Synthetic oligonucleotide
  Antisense strand to SEQ ID NO: 925234
agaucucgggugauccacc

SEQ ID NO: 925236 - RNA, 19 nt, Artificial Sequence
  Description of Artificial Sequence: Synthetic oligonucleotide
  Sense strand starting at position 2048 of SEQ ID NO: 913412
gaaccuucugagggcaaau

SEQ ID NO: 925237 - RNA, 19 nt, Artificial Sequence
  Description of Artificial Sequence: Synthetic oligonucleotide
  Antisense strand to SEQ ID NO: 925236
auuugcccucagaagguuc

SEQ ID NO: 925238 - RNA, 19 nt, Artificial Sequence
  Description of Artificial Sequence: Synthetic oligonucleotide
  Sense strand starting at position 2803 of SEQ ID NO: 913412
gaagucugugcugagagga

SEQ ID NO: 925239 - RNA, 19 nt, Artificial Sequence
  Description of Artificial Sequence: Synthetic oligonucleotide
  Antisense strand to SEQ ID NO: 925238
uccucucagcacagacuuc

SEQ ID NO: 925240 - RNA, 19 nt, Artificial Sequence
  Description of Artificial Sequence: Synthetic oligonucleotide
  Sense strand starting at position 3960 of SEQ ID NO: 913412
gauacaugugagggcaaca

SEQ ID NO: 925241 - RNA, 19 nt, Artificial Sequence
  Description of Artificial Sequence: Synthetic oligonucleotide
  Antisense strand to SEQ ID NO: 925240
uguugcccucacauguauc

SEQ ID NO: 925242 - RNA, 19 nt, Artificial Sequence
  Description of Artificial Sequence: Synthetic oligonucleotide
  Sense strand starting at position 3597 of SEQ ID NO: 913412
uccaguuaucauuagucaa

SEQ ID NO: 925243 - RNA, 19 nt, Artificial Sequence
  Description of Artificial Sequence: Synthetic oligonucleotide
  Antisense strand to SEQ ID NO: 925242
uugacuaaugauaacugga

SEQ ID NO: 925244 - RNA, 19 nt, Artificial Sequence
  Description of Artificial Sequence: Synthetic oligonucleotide
  Sense strand starting at position 3615 of SEQ ID NO: 913412
augacuucuccagguauag

SEQ ID NO: 925245 - RNA, 19 nt, Artificial Sequence
  Description of Artificial Sequence: Synthetic oligonucleotide
  Antisense strand to SEQ ID NO: 925244
cuauaccuggagaagucau

SEQ ID NO: 925246 - RNA, 19 nt, Artificial Sequence
  Description of Artificial Sequence: Synthetic oligonucleotide
  Sense strand starting at position 2515 of SEQ ID NO: 913412
ucacccgagaucuggaauu

SEQ ID NO: 925247 - RNA, 19 nt, Artificial Sequence
  Description of Artificial Sequence: Synthetic oligonucleotide
  Antisense strand to SEQ ID NO: 925246
aauuccagaucucggguga

SEQ ID NO: 925248 - RNA, 19 nt, Artificial Sequence
  Description of Artificial Sequence: Synthetic oligonucleotide
  Sense strand starting at position 1133 of SEQ ID NO: 913412
cagguuucucuguagaacu

SEQ ID NO: 925249 - RNA, 19 nt, Artificial Sequence
  Description of Artificial Sequence: Synthetic oligonucleotide
  Antisense strand to SEQ ID NO: 925248
aguucuacagagaaaccug

SEQ ID NO: 925250 - RNA, 19 nt, Artificial Sequence
  Description of Artificial Sequence: Synthetic oligonucleotide
  Sense strand starting at position 3600 of SEQ ID NO: 913412
aguuaucauuagucaauga

SEQ ID NO: 925251 - RNA, 19 nt, Artificial Sequence
  Description of Artificial Sequence: Synthetic oligonucleotide
  Antisense strand to SEQ ID NO: 925250
ucauugacuaaugauaacu

SEQ ID NO: 925252 - RNA, 19 nt, Artificial Sequence
  Description of Artificial Sequence: Synthetic oligonucleotide
  Sense strand starting at position 973 of SEQ ID NO: 913412
cagacagcaucuguuaaga

SEQ ID NO: 925253 - RNA, 19 nt, Artificial Sequence
  Description of Artificial Sequence: Synthetic oligonucleotide
  Antisense strand to SEQ ID NO: 925252
ucuuaacagaugcugucug

SEQ ID NO: 925254 - RNA, 19 nt, Artificial Sequence
  Description of Artificial Sequence: Synthetic oligonucleotide
  Sense strand starting at position 3823 of SEQ ID NO: 913412
ggaguuuaguaacuauacu

SEQ ID NO: 925255 - RNA, 19 nt, Artificial Sequence
  Description of Artificial Sequence: Synthetic oligonucleotide
  Antisense strand to SEQ ID NO: 925254
aguauaguuacuaaacucc

SEQ ID NO: 925256 - RNA, 19 nt, Artificial Sequence
  Description of Artificial Sequence: Synthetic oligonucleotide
  Sense strand starting at position 1973 of SEQ ID NO: 913412
cucugcucuguagauauaa

SEQ ID NO: 925257 - RNA, 19 nt, Artificial Sequence
  Description of Artificial Sequence: Synthetic oligonucleotide
  Antisense strand to SEQ ID NO: 925256
uuauaucuacagagcagag

SEQ ID NO: 925258 - RNA, 19 nt, Artificial Sequence
  Description of Artificial Sequence: Synthetic oligonucleotide
  Sense strand starting at position 3810 of SEQ ID NO: 913412
ccugaaauccuuuggaguu

SEQ ID NO: 925259 - RNA, 19 nt, Artificial Sequence
  Description of Artificial Sequence: Synthetic oligonucleotide
  Antisense strand to SEQ ID NO: 925258
aacuccaaaggauuucagg

SEQ ID NO: 925260 - RNA, 19 nt, Artificial Sequence
  Description of Artificial Sequence: Synthetic oligonucleotide
  Sense strand starting at position 1560 of SEQ ID NO: 913412
cuacuuucucgagaggcua

SEQ ID NO: 925261 - RNA, 19 nt, Artificial Sequence
  Description of Artificial Sequence: Synthetic oligonucleotide
  Antisense strand to SEQ ID NO: 925260
uagccucucgagaaaguag

SEQ ID NO: 925262 - RNA, 19 nt, Artificial Sequence
  Description of Artificial Sequence: Synthetic oligonucleotide
  Sense strand starting at position 2260 of SEQ ID NO: 913412
gcagaaacaugucucccaa

SEQ ID NO: 925263 - RNA, 19 nt, Artificial Sequence
  Description of Artificial Sequence: Synthetic oligonucleotide
  Antisense strand to SEQ ID NO: 925262
uugggagacauguuucugc

SEQ ID NO: 925264 - RNA, 19 nt, Artificial Sequence
  Description of Artificial Sequence: Synthetic oligonucleotide
  Sense strand starting at position 3335 of SEQ ID NO: 913412
acugaauauucucugguuu

SEQ ID NO: 925265 - RNA, 19 nt, Artificial Sequence
  Description of Artificial Sequence: Synthetic oligonucleotide
  Antisense strand to SEQ ID NO: 925264
aaaccagagaauauucagu

SEQ ID NO: 925266 - RNA, 19 nt, Artificial Sequence
  Description of Artificial Sequence: Synthetic oligonucleotide
  Sense strand starting at position 1634 of SEQ ID NO: 913412
aggcaaaugcgguauuaau

SEQ ID NO: 925267 - RNA, 19 nt, Artificial Sequence
  Description of Artificial Sequence: Synthetic oligonucleotide
  Antisense strand to SEQ ID NO: 925266
auuaauaccgcauuugccu

SEQ ID NO: 925268 - RNA, 19 nt, Artificial Sequence
  Description of Artificial Sequence: Synthetic oligonucleotide
  Sense strand starting at position 1132 of SEQ ID NO: 913412
ccagguuucucuguagaac

SEQ ID NO: 925269 - RNA, 19 nt, Artificial Sequence
  Description of Artificial Sequence: Synthetic oligonucleotide
  Antisense strand to SEQ ID NO: 925268
guucuacagagaaaccugg

SEQ ID NO: 925270 - RNA, 19 nt, Artificial Sequence
  Description of Artificial Sequence: Synthetic oligonucleotide
  Sense strand starting at position 3611 of SEQ ID NO: 913412
gucaaugacuucuccaggu

SEQ ID NO: 925271 - RNA, 19 nt, Artificial Sequence
  Description of Artificial Sequence: Synthetic oligonucleotide
  Antisense strand to SEQ ID NO: 925270
accuggagaagucauugac

SEQ ID NO: 925272 - RNA, 19 nt, Artificial Sequence
  Description of Artificial Sequence: Synthetic oligonucleotide
  Sense strand starting at position 3336 of SEQ ID NO: 913412
cugaauauucucugguuuc

SEQ ID NO: 925273 - RNA, 19 nt, Artificial Sequence
  Description of Artificial Sequence: Synthetic oligonucleotide
  Antisense strand to SEQ ID NO: 925272
gaaaccagagaauauucag

SEQ ID NO: 925274 - RNA, 19 nt, Artificial Sequence
  Description of Artificial Sequence: Synthetic oligonucleotide
  Sense strand starting at position 443 of SEQ ID NO: 913412
auaauaauaucagaggaug

SEQ ID NO: 925275 - RNA, 19 nt, Artificial Sequence
  Description of Artificial Sequence: Synthetic oligonucleotide
  Antisense strand to SEQ ID NO: 925274
cauccucugauauuauuau

SEQ ID NO: 925276 - RNA, 19 nt, Artificial Sequence
  Description of Artificial Sequence: Synthetic oligonucleotide
  Sense strand starting at position 2067 of SEQ ID NO: 913412
cugcuuugucaugaccuca

SEQ ID NO: 925277 - RNA, 19 nt, Artificial Sequence
  Description of Artificial Sequence: Synthetic oligonucleotide
  Antisense strand to SEQ ID NO: 925276
ugaggucaugacaaagcag

SEQ ID NO: 925278 - RNA, 19 nt, Artificial Sequence
  Description of Artificial Sequence: Synthetic oligonucleotide
  Sense strand starting at position 2791 of SEQ ID NO: 913412
gcaguaacugcagaagucu

SEQ ID NO: 925279 - RNA, 19 nt, Artificial Sequence
  Description of Artificial Sequence: Synthetic oligonucleotide
  Antisense strand to SEQ ID NO: 925278
agacuucugcaguuacugc

SEQ ID NO: 925280 - RNA, 19 nt, Artificial Sequence
  Description of Artificial Sequence: Synthetic oligonucleotide
  Sense strand starting at position 3914 of SEQ ID NO: 913412
cguuccuuuacgcaaagaa

SEQ ID NO: 925281 - RNA, 19 nt, Artificial Sequence
  Description of Artificial Sequence: Synthetic oligonucleotide
  Antisense strand to SEQ ID NO: 925280
uucuuugcguaaaggaacg

SEQ ID NO: 925282 - RNA, 19 nt, Artificial Sequence
  Description of Artificial Sequence: Synthetic oligonucleotide
  Sense strand starting at position 3626 of SEQ ID NO: 913412
agguauagauaccaggaaa

SEQ ID NO: 925283 - RNA, 19 nt, Artificial Sequence
  Description of Artificial Sequence: Synthetic oligonucleotide
  Antisense strand to SEQ ID NO: 925282
uuuccugguaucuauaccu

SEQ ID NO: 925284 - RNA, 19 nt, Artificial Sequence
  Description of Artificial Sequence: Synthetic oligonucleotide
  Sense strand starting at position 1757 of SEQ ID NO: 913412
cggguaugccugcacugaa

SEQ ID NO: 925285 - RNA, 19 nt, Artificial Sequence
  Description of Artificial Sequence: Synthetic oligonucleotide
  Antisense strand to SEQ ID NO: 925284
uucagugcaggcauacccg

SEQ ID NO: 925286 - RNA, 19 nt, Artificial Sequence
  Description of Artificial Sequence: Synthetic oligonucleotide
  Sense strand starting at position 1586 of SEQ ID NO: 913412
gggugugucuggaagaggu

SEQ ID NO: 925287 - RNA, 19 nt, Artificial Sequence
  Description of Artificial Sequence: Synthetic oligonucleotide
  Antisense strand to SEQ ID NO: 925286
accucuuccagacacaccc

SEQ ID NO: 925288 - RNA, 19 nt, Artificial Sequence
  Description of Artificial Sequence: Synthetic oligonucleotide
  Sense strand starting at position 2866 of SEQ ID NO: 913412
ggcagaguguggaaaguuu

SEQ ID NO: 925289 - RNA, 19 nt, Artificial Sequence
  Description of Artificial Sequence: Synthetic oligonucleotide
  Antisense strand to SEQ ID NO: 925288
aaacuuuccacacucugcc

SEQ ID NO: 925290 - RNA, 19 nt, Artificial Sequence
  Description of Artificial Sequence: Synthetic oligonucleotide
  Sense strand starting at position 1379 of SEQ ID NO: 913412
acaauauugcuauguguug

SEQ ID NO: 925291 - RNA, 19 nt, Artificial Sequence
  Description of Artificial Sequence: Synthetic oligonucleotide
  Antisense strand to SEQ ID NO: 925290
caacacauagcaauauugu

SEQ ID NO: 925292 - RNA, 19 nt, Artificial Sequence
  Description of Artificial Sequence: Synthetic oligonucleotide
  Sense strand starting at position 1971 of SEQ ID NO: 913412
gccucugcucuguagauau

SEQ ID NO: 925293 - RNA, 19 nt, Artificial Sequence
  Description of Artificial Sequence: Synthetic oligonucleotide
  Antisense strand to SEQ ID NO: 925292
auaucuacagagcagaggc

SEQ ID NO: 925294 - RNA, 19 nt, Artificial Sequence
  Description of Artificial Sequence: Synthetic oligonucleotide
  Sense strand starting at position 2800 of SEQ ID NO: 913412
gcagaagucugugcugaga

SEQ ID NO: 925295 - RNA, 19 nt, Artificial Sequence
  Description of Artificial Sequence: Synthetic oligonucleotide
  Antisense strand to SEQ ID NO: 925294
ucucagcacagacuucugc

SEQ ID NO: 925296 - RNA, 19 nt, Artificial Sequence
  Description of Artificial Sequence: Synthetic oligonucleotide
  Sense strand starting at position 3453 of SEQ ID NO: 913412
agcacuuuguggcucuaga

SEQ ID NO: 925297 - RNA, 19 nt, Artificial Sequence
  Description of Artificial Sequence: Synthetic oligonucleotide
  Antisense strand to SEQ ID NO: 925296
ucuagagccacaaagugcu

SEQ ID NO: 925298 - RNA, 19 nt, Artificial Sequence
  Description of Artificial Sequence: Synthetic oligonucleotide
  Sense strand starting at position 105 of SEQ ID NO: 913413
uugaacuucccagaagcua

SEQ ID NO: 925299 - RNA, 19 nt, Artificial Sequence
  Description of Artificial Sequence: Synthetic oligonucleotide
  Antisense strand to SEQ ID NO: 925298
uagcuucugggaaguucaa

SEQ ID NO: 925300 - RNA, 19 nt, Artificial Sequence
  Description of Artificial Sequence: Synthetic oligonucleotide
  Sense strand starting at position 3083 of SEQ ID NO: 913413
cuguguuggcgagcuggau

SEQ ID NO: 925301 - RNA, 19 nt, Artificial Sequence
  Description of Artificial Sequence: Synthetic oligonucleotide
  Antisense strand to SEQ ID NO: 925300
auccagcucgccaacacag

SEQ ID NO: 925302 - RNA, 19 nt, Artificial Sequence
  Description of Artificial Sequence: Synthetic oligonucleotide
  Sense strand starting at position 1035 of SEQ ID NO: 913413
uccaguaugguugaagauu

SEQ ID NO: 925303 - RNA, 19 nt, Artificial Sequence
  Description of Artificial Sequence: Synthetic oligonucleotide
  Antisense strand to SEQ ID NO: 925302
aaucuucaaccauacugga

SEQ ID NO: 925304 - RNA, 19 nt, Artificial Sequence
  Description of Artificial Sequence: Synthetic oligonucleotide
  Sense strand starting at position 3558 of SEQ ID NO: 913413
aacugagaccgugggaaau

SEQ ID NO: 925305 - RNA, 19 nt, Artificial Sequence
  Description of Artificial Sequence: Synthetic oligonucleotide
  Antisense strand to SEQ ID NO: 925304
auuucccacggucucaguu

SEQ ID NO: 925306 - RNA, 19 nt, Artificial Sequence
  Description of Artificial Sequence: Synthetic oligonucleotide
  Sense strand starting at position 3525 of SEQ ID NO: 913413
aggaauugacccugugaug

SEQ ID NO: 925307 - RNA, 19 nt, Artificial Sequence
  Description of Artificial Sequence: Synthetic oligonucleotide
  Antisense strand to SEQ ID NO: 925306
caucacagggucaauuccu

SEQ ID NO: 925308 - RNA, 19 nt, Artificial Sequence
  Description of Artificial Sequence: Synthetic oligonucleotide
  Sense strand starting at position 1119 of SEQ ID NO: 913413
gucagacacccauagcaua

SEQ ID NO: 925309 - RNA, 19 nt, Artificial Sequence
  Description of Artificial Sequence: Synthetic oligonucleotide
  Antisense strand to SEQ ID NO: 925308
uaugcuaugggugucugac

SEQ ID NO: 925310 - RNA, 19 nt, Artificial Sequence
  Description of Artificial Sequence: Synthetic oligonucleotide
  Sense strand starting at position 3534 of SEQ ID NO: 913413
cccugugauggguacagau

SEQ ID NO: 925311 - RNA, 19 nt, Artificial Sequence
  Description of Artificial Sequence: Synthetic oligonucleotide
  Antisense strand to SEQ ID NO: 925310
aucuguacccaucacaggg

SEQ ID NO: 925312 - RNA, 19 nt, Artificial Sequence
  Description of Artificial Sequence: Synthetic oligonucleotide
  Sense strand starting at position 3473 of SEQ ID NO: 913413
gaauaugcugaagguaaau

SEQ ID NO: 925313 - RNA, 19 nt, Artificial Sequence
  Description of Artificial Sequence: Synthetic oligonucleotide
  Antisense strand to SEQ ID NO: 925312
auuuaccuucagcauauuc

SEQ ID NO: 925314 - RNA, 19 nt, Artificial Sequence
  Description of Artificial Sequence: Synthetic oligonucleotide
  Sense strand starting at position 1157 of SEQ ID NO: 913413
aauguaacucaagaugugu

SEQ ID NO: 925315 - RNA, 19 nt, Artificial Sequence
  Description of Artificial Sequence: Synthetic oligonucleotide
  Antisense strand to SEQ ID NO: 925314
acacaucuugaguuacauu

SEQ ID NO: 925316 - RNA, 19 nt, Artificial Sequence
  Description of Artificial Sequence: Synthetic oligonucleotide
  Sense strand starting at position 399 of SEQ ID NO: 913413
gucuuacuugaagaguuua

SEQ ID NO: 925317 - RNA, 19 nt, Artificial Sequence
  Description of Artificial Sequence: Synthetic oligonucleotide
  Antisense strand to SEQ ID NO: 925316
uaaacucuucaaguaagac

SEQ ID NO: 925318 - RNA, 19 nt, Artificial Sequence
  Description of Artificial Sequence: Synthetic oligonucleotide
  Sense strand starting at position 422 of SEQ ID NO: 913413
agaaguaacuguccucaaa

SEQ ID NO: 925319 - RNA, 19 nt, Artificial Sequence
  Description of Artificial Sequence: Synthetic oligonucleotide
  Antisense strand to SEQ ID NO: 925318
uuugaggacaguuacuucu

SEQ ID NO: 925320 - RNA, 19 nt, Artificial Sequence
  Description of Artificial Sequence: Synthetic oligonucleotide
  Sense strand starting at position 538 of SEQ ID NO: 913413
gaggaaagccuguagcaca

SEQ ID NO: 925321 - RNA, 19 nt, Artificial Sequence
  Description of Artificial Sequence: Synthetic oligonucleotide
  Antisense strand to SEQ ID NO: 925320
ugugcuacaggcuuuccuc

SEQ ID NO: 925322 - RNA, 19 nt, Artificial Sequence
  Description of Artificial Sequence: Synthetic oligonucleotide
  Sense strand starting at position 3713 of SEQ ID NO: 913413
agagcaucugcacacuuaa

SEQ ID NO: 925323 - RNA, 19 nt, Artificial Sequence
  Description of Artificial Sequence: Synthetic oligonucleotide
  Antisense strand to SEQ ID NO: 925322
uuaagugugcagaugcucu

SEQ ID NO: 925324 - RNA, 19 nt, Artificial Sequence
  Description of Artificial Sequence: Synthetic oligonucleotide
  Sense strand starting at position 909 of SEQ ID NO: 913413
ggaaaugagccacaucggu

SEQ ID NO: 925325 - RNA, 19 nt, Artificial Sequence
  Description of Artificial Sequence: Synthetic oligonucleotide
  Antisense strand to SEQ ID NO: 925324
accgauguggcucauuucc

SEQ ID NO: 925326 - RNA, 19 nt, Artificial Sequence
  Description of Artificial Sequence: Synthetic oligonucleotide
  Sense strand starting at position 895 of SEQ ID NO: 913413
ucucuuuggaugugggaaa

SEQ ID NO: 925327 - RNA, 19 nt, Artificial Sequence
  Description of Artificial Sequence: Synthetic oligonucleotide
  Antisense strand to SEQ ID NO: 925326
uuucccacauccaaagaga

SEQ ID NO: 925328 - RNA, 19 nt, Artificial Sequence
  Description of Artificial Sequence: Synthetic oligonucleotide
  Sense strand starting at position 81 of SEQ ID NO: 913413
acuucuaaagcucagguua

SEQ ID NO: 925329 - RNA, 19 nt, Artificial Sequence
  Description of Artificial Sequence: Synthetic oligonucleotide
  Antisense strand to SEQ ID NO: 925328
uaaccugagcuuuagaagu

SEQ ID NO: 925330 - RNA, 19 nt, Artificial Sequence
  Description of Artificial Sequence: Synthetic oligonucleotide
  Sense strand starting at position 504 of SEQ ID NO: 913413
uagggauguuugucaauaa

SEQ ID NO: 925331 - RNA, 19 nt, Artificial Sequence
  Description of Artificial Sequence: Synthetic oligonucleotide
  Antisense strand to SEQ ID NO: 925330
uuauugacaaacaucccua

SEQ ID NO: 925332 - RNA, 19 nt, Artificial Sequence
  Description of Artificial Sequence: Synthetic oligonucleotide
  Sense strand starting at position 681 of SEQ ID NO: 913413
agggcuaaaucauucccau

SEQ ID NO: 925333 - RNA, 19 nt, Artificial Sequence
  Description of Artificial Sequence: Synthetic oligonucleotide
  Antisense strand to SEQ ID NO: 925332
augggaaugauuuagcccu

SEQ ID NO: 925334 - RNA, 19 nt, Artificial Sequence
  Description of Artificial Sequence: Synthetic oligonucleotide
  Sense strand starting at position 3160 of SEQ ID NO: 913413
aaggucagucucugacaga

SEQ ID NO: 925335 - RNA, 19 nt, Artificial Sequence
  Description of Artificial Sequence: Synthetic oligonucleotide
  Antisense strand to SEQ ID NO: 925334
ucugucagagacugaccuu

SEQ ID NO: 925336 - RNA, 19 nt, Artificial Sequence
  Description of Artificial Sequence: Synthetic oligonucleotide
  Sense strand starting at position 396 of SEQ ID NO: 913413
acggucuuacuugaagagu

SEQ ID NO: 925337 - RNA, 19 nt, Artificial Sequence
  Description of Artificial Sequence: Synthetic oligonucleotide
  Antisense strand to SEQ ID NO: 925336
acucuucaaguaagaccgu

SEQ ID NO: 925338 - RNA, 19 nt, Artificial Sequence
  Description of Artificial Sequence: Synthetic oligonucleotide
  Sense strand starting at position 704 of SEQ ID NO: 913413
cgaugcauugacugauaaa

SEQ ID NO: 925339 - RNA, 19 nt, Artificial Sequence
  Description of Artificial Sequence: Synthetic oligonucleotide
  Antisense strand to SEQ ID NO: 925338
uuuaucagucaaugcaucg

SEQ ID NO: 925340 - RNA, 19 nt, Artificial Sequence
  Description of Artificial Sequence: Synthetic oligonucleotide
  Sense strand starting at position 2531 of SEQ ID NO: 913413
ggaguauccacguaauucc

SEQ ID NO: 925341 - RNA, 19 nt, Artificial Sequence
  Description of Artificial Sequence: Synthetic oligonucleotide
  Antisense strand to SEQ ID NO: 925340
ggaauuacguggauacucc

SEQ ID NO: 925342 - RNA, 19 nt, Artificial Sequence
  Description of Artificial Sequence: Synthetic oligonucleotide
  Sense strand starting at position 498 of SEQ ID NO: 913413
acacauuagggauguuugu

SEQ ID NO: 925343 - RNA, 19 nt, Artificial Sequence
  Description of Artificial Sequence: Synthetic oligonucleotide
  Antisense strand to SEQ ID NO: 925342
acaaacaucccuaaugugu

SEQ ID NO: 925344 - RNA, 19 nt, Artificial Sequence
  Description of Artificial Sequence: Synthetic oligonucleotide
  Sense strand starting at position 215 of SEQ ID NO: 913413
aaaggaugaguaugugcua

SEQ ID NO: 925345 - RNA, 19 nt, Artificial Sequence
  Description of Artificial Sequence: Synthetic oligonucleotide
  Antisense strand to SEQ ID NO: 925344
uagcacauacucauccuuu

SEQ ID NO: 925346 - RNA, 19 nt, Artificial Sequence
  Description of Artificial Sequence: Synthetic oligonucleotide
  Sense strand starting at position 1033 of SEQ ID NO: 913413
gguccaguaugguugaaga

SEQ ID NO: 925347 - RNA, 19 nt, Artificial Sequence
  Description of Artificial Sequence: Synthetic oligonucleotide
  Antisense strand to SEQ ID NO: 925346
ucuucaaccauacuggacc

SEQ ID NO: 925348 - RNA, 19 nt, Artificial Sequence
  Description of Artificial Sequence: Synthetic oligonucleotide
  Sense strand starting at position 1306 of SEQ ID NO: 913413
gucuuaagccuugacaucu

SEQ ID NO: 925349 - RNA, 19 nt, Artificial Sequence
  Description of Artificial Sequence: Synthetic oligonucleotide
  Antisense strand to SEQ ID NO: 925348
agaugucaaggcuuaagac

SEQ ID NO: 925350 - RNA, 19 nt, Artificial Sequence
  Description of Artificial Sequence: Synthetic oligonucleotide
  Sense strand starting at position 1800 of SEQ ID NO: 913413
agggaugccuaccuuguaa

SEQ ID NO: 925351 - RNA, 19 nt, Artificial Sequence
  Description of Artificial Sequence: Synthetic oligonucleotide
  Antisense strand to SEQ ID NO: 925350
uuacaagguaggcaucccu

SEQ ID NO: 925352 - RNA, 19 nt, Artificial Sequence
  Description of Artificial Sequence: Synthetic oligonucleotide
  Sense strand starting at position 3449 of SEQ ID NO: 913413
ggcacaggccucuggauaa

SEQ ID NO: 925353 - RNA, 19 nt, Artificial Sequence
  Description of Artificial Sequence: Synthetic oligonucleotide
  Antisense strand to SEQ ID NO: 925352
uuauccagaggccugugcc

SEQ ID NO: 925354 - RNA, 19 nt, Artificial Sequence
  Description of Artificial Sequence: Synthetic oligonucleotide
  Sense strand starting at position 3436 of SEQ ID NO: 913413
gagccauaucacuggcaca

SEQ ID NO: 925355 - RNA, 19 nt, Artificial Sequence
  Description of Artificial Sequence: Synthetic oligonucleotide
  Antisense strand to SEQ ID NO: 925354
ugugccagugauauggcuc

SEQ ID NO: 925356 - RNA, 19 nt, Artificial Sequence
  Description of Artificial Sequence: Synthetic oligonucleotide
  Sense strand starting at position 3123 of SEQ ID NO: 913413
cugucuugucagggacuga

SEQ ID NO: 925357 - RNA, 19 nt, Artificial Sequence
  Description of Artificial Sequence: Synthetic oligonucleotide
  Antisense strand to SEQ ID NO: 925356
ucagucccugacaagacag

SEQ ID NO: 925358 - RNA, 19 nt, Artificial Sequence
  Description of Artificial Sequence: Synthetic oligonucleotide
  Sense strand starting at position 3818 of SEQ ID NO: 913413
aggguuuauguaggagcau

SEQ ID NO: 925359 - RNA, 19 nt, Artificial Sequence
  Description of Artificial Sequence: Synthetic oligonucleotide
  Antisense strand to SEQ ID NO: 925358
augcuccuacauaaacccu

SEQ ID NO: 925360 - RNA, 19 nt, Artificial Sequence
  Description of Artificial Sequence: Synthetic oligonucleotide
  Sense strand starting at position 1802 of SEQ ID NO: 913413
ggaugccuaccuuguaaca

SEQ ID NO: 925361 - RNA, 19 nt, Artificial Sequence
  Description of Artificial Sequence: Synthetic oligonucleotide
  Antisense strand to SEQ ID NO: 925360
uguuacaagguaggcaucc

SEQ ID NO: 925362 - RNA, 19 nt, Artificial Sequence
  Description of Artificial Sequence: Synthetic oligonucleotide
  Sense strand starting at position 218 of SEQ ID NO: 913413
ggaugaguaugugcuacua

SEQ ID NO: 925363 - RNA, 19 nt, Artificial Sequence
  Description of Artificial Sequence: Synthetic oligonucleotide
  Antisense strand to SEQ ID NO: 925362
uaguagcacauacucaucc

SEQ ID NO: 925364 - RNA, 19 nt, Artificial Sequence
  Description of Artificial Sequence: Synthetic oligonucleotide
  Sense strand starting at position 701 of SEQ ID NO: 913413
cugcgaugcauugacugau

SEQ ID NO: 925365 - RNA, 19 nt, Artificial Sequence
  Description of Artificial Sequence: Synthetic oligonucleotide
  Antisense strand to SEQ ID NO: 925364
aucagucaaugcaucgcag

SEQ ID NO: 925366 - RNA, 19 nt, Artificial Sequence
  Description of Artificial Sequence: Synthetic oligonucleotide
  Sense strand starting at position 1329 of SEQ ID NO: 913413
agcguuucccaauagugag

SEQ ID NO: 925367 - RNA, 19 nt, Artificial Sequence
  Description of Artificial Sequence: Synthetic oligonucleotide
  Antisense strand to SEQ ID NO: 925366
cucacuauugggaaacgcu

SEQ ID NO: 925368 - RNA, 19 nt, Artificial Sequence
  Description of Artificial Sequence: Synthetic oligonucleotide
  Sense strand starting at position 140 of SEQ ID NO: 913413
uuguuugugcgcaggugaa

SEQ ID NO: 925369 - RNA, 19 nt, Artificial Sequence
  Description of Artificial Sequence: Synthetic oligonucleotide
  Antisense strand to SEQ ID NO: 925368
uucaccugcgcacaaacaa

SEQ ID NO: 925370 - RNA, 19 nt, Artificial Sequence
  Description of Artificial Sequence: Synthetic oligonucleotide
  Sense strand starting at position 3119 of SEQ ID NO: 913413
agggcugucuugucaggga

SEQ ID NO: 925371 - RNA, 19 nt, Artificial Sequence
  Description of Artificial Sequence: Synthetic oligonucleotide
  Antisense strand to SEQ ID NO: 925370
ucccugacaagacagcccu

SEQ ID NO: 925372 - RNA, 19 nt, Artificial Sequence
  Description of Artificial Sequence: Synthetic oligonucleotide
  Sense strand starting at position 3231 of SEQ ID NO: 913413
cucugucaagcuuggauau

SEQ ID NO: 925373 - RNA, 19 nt, Artificial Sequence
  Description of Artificial Sequence: Synthetic oligonucleotide
  Antisense strand to SEQ ID NO: 925372
auauccaagcuugacagag

SEQ ID NO: 925374 - RNA, 19 nt, Artificial Sequence
  Description of Artificial Sequence: Synthetic oligonucleotide
  Sense strand starting at position 618 of SEQ ID NO: 913413
acauguuguucucucuuaa

SEQ ID NO: 925375 - RNA, 19 nt, Artificial Sequence
  Description of Artificial Sequence: Synthetic oligonucleotide
  Antisense strand to SEQ ID NO: 925374
uuaagagagaacaacaugu

SEQ ID NO: 925376 - RNA, 19 nt, Artificial Sequence
  Description of Artificial Sequence: Synthetic oligonucleotide
  Sense strand starting at position 2805 of SEQ ID NO: 913413
aagaaaucaugcccgucuu

SEQ ID NO: 925377 - RNA, 19 nt, Artificial Sequence
  Description of Artificial Sequence: Synthetic oligonucleotide
  Antisense strand to SEQ ID NO: 925376
aagacgggcaugauuucuu

SEQ ID NO: 925378 - RNA, 19 nt, Artificial Sequence
  Description of Artificial Sequence: Synthetic oligonucleotide
  Sense strand starting at position 1113 of SEQ ID NO: 913414
ccaugaugccauuacaaug

SEQ ID NO: 925379 - RNA, 19 nt, Artificial Sequence
  Description of Artificial Sequence: Synthetic oligonucleotide
  Antisense strand to SEQ ID NO: 925378
cauuguaauggcaucaugg

SEQ ID NO: 925380 - RNA, 19 nt, Artificial Sequence
  Description of Artificial Sequence: Synthetic oligonucleotide
  Sense strand starting at position 1835 of SEQ ID NO: 913414
uuguaagagacacgaauaa

SEQ ID NO: 925381 - RNA, 19 nt, Artificial Sequence
  Description of Artificial Sequence: Synthetic oligonucleotide
  Antisense strand to SEQ ID NO: 925380
uuauucgugucucuuacaa

SEQ ID NO: 925382 - RNA, 19 nt, Artificial Sequence
  Description of Artificial Sequence: Synthetic oligonucleotide
  Sense strand starting at position 3441 of SEQ ID NO: 913414
ccagguaaccuugauuauu

SEQ ID NO: 925383 - RNA, 19 nt, Artificial Sequence
  Description of Artificial Sequence: Synthetic oligonucleotide
  Antisense strand to SEQ ID NO: 925382
aauaaucaagguuaccugg

SEQ ID NO: 925384 - RNA, 19 nt, Artificial Sequence
  Description of Artificial Sequence: Synthetic oligonucleotide
  Sense strand starting at position 3473 of SEQ ID NO: 913414
gccuaugaauuucugguuu

SEQ ID NO: 925385 - RNA, 19 nt, Artificial Sequence
  Description of Artificial Sequence: Synthetic oligonucleotide
  Antisense strand to SEQ ID NO: 925384
aaaccagaaauucauaggc

SEQ ID NO: 925386 - RNA, 19 nt, Artificial Sequence
  Description of Artificial Sequence: Synthetic oligonucleotide
  Sense strand starting at position 2327 of SEQ ID NO: 913414
uaaaguuauggauaagcuu

SEQ ID NO: 925387 - RNA, 19 nt, Artificial Sequence
  Description of Artificial Sequence: Synthetic oligonucleotide
  Antisense strand to SEQ ID NO: 925386
aagcuuauccauaacuuua

SEQ ID NO: 925388 - RNA, 19 nt, Artificial Sequence
  Description of Artificial Sequence: Synthetic oligonucleotide
  Sense strand starting at position 3135 of SEQ ID NO: 913414
cuucuccugggucagaaua

SEQ ID NO: 925389 - RNA, 19 nt, Artificial Sequence
  Description of Artificial Sequence: Synthetic oligonucleotide
  Antisense strand to SEQ ID NO: 925388
uauucugacccaggagaag

SEQ ID NO: 925390 - RNA, 19 nt, Artificial Sequence
  Description of Artificial Sequence: Synthetic oligonucleotide
  Sense strand starting at position 3372 of SEQ ID NO: 913414
guggaaaccguggauggau

SEQ ID NO: 925391 - RNA, 19 nt, Artificial Sequence
  Description of Artificial Sequence: Synthetic oligonucleotide
  Antisense strand to SEQ ID NO: 925390
auccauccacgguuuccac

SEQ ID NO: 925392 - RNA, 19 nt, Artificial Sequence
  Description of Artificial Sequence: Synthetic oligonucleotide
  Sense strand starting at position 1118 of SEQ ID NO: 913414
augccauuacaaugagaca

SEQ ID NO: 925393 - RNA, 19 nt, Artificial Sequence
  Description of Artificial Sequence: Synthetic oligonucleotide
  Antisense strand to SEQ ID NO: 925392
ugucucauuguaauggcau

SEQ ID NO: 925394 - RNA, 19 nt, Artificial Sequence
  Description of Artificial Sequence: Synthetic oligonucleotide
  Sense strand starting at position 2565 of SEQ ID NO: 913414
ggagaugaacucuaucguc

SEQ ID NO: 925395 - RNA, 19 nt, Artificial Sequence
  Description of Artificial Sequence: Synthetic oligonucleotide
  Antisense strand to SEQ ID NO: 925394
gacgauagaguucaucucc

SEQ ID NO: 925396 - RNA, 19 nt, Artificial Sequence
  Description of Artificial Sequence: Synthetic oligonucleotide
  Sense strand starting at position 2034 of SEQ ID NO: 913414
auaaucaugugaucuggau

SEQ ID NO: 925397 - RNA, 19 nt, Artificial Sequence
  Description of Artificial Sequence: Synthetic oligonucleotide
  Antisense strand to SEQ ID NO: 925396
auccagaucacaugauuau

SEQ ID NO: 925398 - RNA, 19 nt, Artificial Sequence
  Description of Artificial Sequence: Synthetic oligonucleotide
  Sense strand starting at position 3110 of SEQ ID NO: 913414
uccaacauuuaucaaggga

SEQ ID NO: 925399 - RNA, 19 nt, Artificial Sequence
  Description of Artificial Sequence: Synthetic oligonucleotide
  Antisense strand to SEQ ID NO: 925398
ucccuugauaaauguugga

SEQ ID NO: 925400 - RNA, 19 nt, Artificial Sequence
  Description of Artificial Sequence: Synthetic oligonucleotide
  Sense strand starting at position 576 of SEQ ID NO: 913414
ucuugaaaugguugaacac

SEQ ID NO: 925401 - RNA, 19 nt, Artificial Sequence
  Description of Artificial Sequence: Synthetic oligonucleotide
  Antisense strand to SEQ ID NO: 925400
guguucaaccauuucaaga

SEQ ID NO: 925402 - RNA, 19 nt, Artificial Sequence
  Description of Artificial Sequence: Synthetic oligonucleotide
  Sense strand starting at position 3588 of SEQ ID NO: 913414
gacaauguugcaugagaaa

SEQ ID NO: 925403 - RNA, 19 nt, Artificial Sequence
  Description of Artificial Sequence: Synthetic oligonucleotide
  Antisense strand to SEQ ID NO: 925402
uuucucaugcaacauuguc

SEQ ID NO: 925404 - RNA, 19 nt, Artificial Sequence
  Description of Artificial Sequence: Synthetic oligonucleotide
  Sense strand starting at position 2596 of SEQ ID NO: 913414
uccuuauugccugauagag

SEQ ID NO: 925405 - RNA, 19 nt, Artificial Sequence
  Description of Artificial Sequence: Synthetic oligonucleotide
  Antisense strand to SEQ ID NO: 925404
cucuaucaggcaauaagga

SEQ ID NO: 925406 - RNA, 19 nt, Artificial Sequence
  Description of Artificial Sequence: Synthetic oligonucleotide
  Sense strand starting at position 3203 of SEQ ID NO: 913414
ccaagaucuggcugaagac

SEQ ID NO: 925407 - RNA, 19 nt, Artificial Sequence
  Description of Artificial Sequence: Synthetic oligonucleotide
  Antisense strand to SEQ ID NO: 925406
gucuucagccagaucuugg

SEQ ID NO: 925408 - RNA, 19 nt, Artificial Sequence
  Description of Artificial Sequence: Synthetic oligonucleotide
  Sense strand starting at position 288 of SEQ ID NO: 913414
agugacagccucuguauuu

SEQ ID NO: 925409 - RNA, 19 nt, Artificial Sequence
  Description of Artificial Sequence: Synthetic oligonucleotide
  Antisense strand to SEQ ID NO: 925408
aaauacagaggcugucacu

SEQ ID NO: 925410 - RNA, 19 nt, Artificial Sequence
  Description of Artificial Sequence: Synthetic oligonucleotide
  Sense strand starting at position 2065 of SEQ ID NO: 913414
uggugauuacuccacuuug

SEQ ID NO: 925411 - RNA, 19 nt, Artificial Sequence
  Description of Artificial Sequence: Synthetic oligonucleotide
  Antisense strand to SEQ ID NO: 925410
caaaguggaguaaucacca

SEQ ID NO: 925412 - RNA, 19 nt, Artificial Sequence
  Description of Artificial Sequence: Synthetic oligonucleotide
  Sense strand starting at position 221 of SEQ ID NO: 913414
uaguuucugcuggacagaa

SEQ ID NO: 925413 - RNA, 19 nt, Artificial Sequence
  Description of Artificial Sequence: Synthetic oligonucleotide
  Antisense strand to SEQ ID NO: 925412
uucuguccagcagaaacua

SEQ ID NO: 925414 - RNA, 19 nt, Artificial Sequence
  Description of Artificial Sequence: Synthetic oligonucleotide
  Sense strand starting at position 3499 of SEQ ID NO: 913414
uguuuaggagcagaaucuu

SEQ ID NO: 925415 - RNA, 19 nt, Artificial Sequence
  Description of Artificial Sequence: Synthetic oligonucleotide
  Antisense strand to SEQ ID NO: 925414
aagauucugcuccuaaaca

SEQ ID NO: 925416 - RNA, 19 nt, Artificial Sequence
  Description of Artificial Sequence: Synthetic oligonucleotide
  Sense strand starting at position 2455 of SEQ ID NO: 913414
guaacaguuuacucagaga

SEQ ID NO: 925417 - RNA, 19 nt, Artificial Sequence
  Description of Artificial Sequence: Synthetic oligonucleotide
  Antisense strand to SEQ ID NO: 925416
ucucugaguaaacuguuac

SEQ ID NO: 925418 - RNA, 19 nt, Artificial Sequence
  Description of Artificial Sequence: Synthetic oligonucleotide
  Sense strand starting at position 664 of SEQ ID NO: 913414
gcauaagaccuguauucua

SEQ ID NO: 925419 - RNA, 19 nt, Artificial Sequence
  Description of Artificial Sequence: Synthetic oligonucleotide
  Antisense strand to SEQ ID NO: 925418
uagaauacaggucuuaugc

SEQ ID NO: 925420 - RNA, 19 nt, Artificial Sequence
  Description of Artificial Sequence: Synthetic oligonucleotide
  Sense strand starting at position 2237 of SEQ ID NO: 913414
augcuauaacugggaacuu

SEQ ID NO: 925421 - RNA, 19 nt, Artificial Sequence
  Description of Artificial Sequence: Synthetic oligonucleotide
  Antisense strand to SEQ ID NO: 925420
aaguucccaguuauagcau

SEQ ID NO: 925422 - RNA, 19 nt, Artificial Sequence
  Description of Artificial Sequence: Synthetic oligonucleotide
  Sense strand starting at position 2604 of SEQ ID NO: 913414
gccugauagagucaggagu

SEQ ID NO: 925423 - RNA, 19 nt, Artificial Sequence
  Description of Artificial Sequence: Synthetic oligonucleotide
  Antisense strand to SEQ ID NO: 925422
acuccugacucuaucaggc

SEQ ID NO: 925424 - RNA, 19 nt, Artificial Sequence
  Description of Artificial Sequence: Synthetic oligonucleotide
  Sense strand starting at position 821 of SEQ ID NO: 913414
ucuaauauguagucagaau

SEQ ID NO: 925425 - RNA, 19 nt, Artificial Sequence
  Description of Artificial Sequence: Synthetic oligonucleotide
  Antisense strand to SEQ ID NO: 925424
auucugacuacauauuaga

SEQ ID NO: 925426 - RNA, 19 nt, Artificial Sequence
  Description of Artificial Sequence: Synthetic oligonucleotide
  Sense strand starting at position 2248 of SEQ ID NO: 913414
gggaacuuccugggcucaa

SEQ ID NO: 925427 - RNA, 19 nt, Artificial Sequence
  Description of Artificial Sequence: Synthetic oligonucleotide
  Antisense strand to SEQ ID NO: 925426
uugagcccaggaaguuccc

SEQ ID NO: 925428 - RNA, 19 nt, Artificial Sequence
  Description of Artificial Sequence: Synthetic oligonucleotide
  Sense strand starting at position 613 of SEQ ID NO: 913414
aucccagaucauugaugca

SEQ ID NO: 925429 - RNA, 19 nt, Artificial Sequence
  Description of Artificial Sequence: Synthetic oligonucleotide
  Antisense strand to SEQ ID NO: 925428
ugcaucaaugaucugggau

SEQ ID NO: 925430 - RNA, 19 nt, Artificial Sequence
  Description of Artificial Sequence: Synthetic oligonucleotide
  Sense strand starting at position 3485 of SEQ ID NO: 913414
cugguuugaccagauguuu

SEQ ID NO: 925431 - RNA, 19 nt, Artificial Sequence
  Description of Artificial Sequence: Synthetic oligonucleotide
  Antisense strand to SEQ ID NO: 925430
aaacaucuggucaaaccag

SEQ ID NO: 925432 - RNA, 19 nt, Artificial Sequence
  Description of Artificial Sequence: Synthetic oligonucleotide
  Sense strand starting at position 1638 of SEQ ID NO: 913414
aguccacuucccuauagua

SEQ ID NO: 925433 - RNA, 19 nt, Artificial Sequence
  Description of Artificial Sequence: Synthetic oligonucleotide
  Antisense strand to SEQ ID NO: 925432
uacuauagggaaguggacu

SEQ ID NO: 925434 - RNA, 19 nt, Artificial Sequence
  Description of Artificial Sequence: Synthetic oligonucleotide
  Sense strand starting at position 2830 of SEQ ID NO: 913414
aggccaucucaaggucaga

SEQ ID NO: 925435 - RNA, 19 nt, Artificial Sequence
  Description of Artificial Sequence: Synthetic oligonucleotide
  Antisense strand to SEQ ID NO: 925434
ucugaccuugagauggccu

SEQ ID NO: 925436 - RNA, 19 nt, Artificial Sequence
  Description of Artificial Sequence: Synthetic oligonucleotide
  Sense strand starting at position 2571 of SEQ ID NO: 913414
gaacucuaucgucagaugu

SEQ ID NO: 925437 - RNA, 19 nt, Artificial Sequence
  Description of Artificial Sequence: Synthetic oligonucleotide
  Antisense strand to SEQ ID NO: 925436
acaucugacgauagaguuc

SEQ ID NO: 925438 - RNA, 19 nt, Artificial Sequence
  Description of Artificial Sequence: Synthetic oligonucleotide
  Sense strand starting at position 573 of SEQ ID NO: 913414
uguucuugaaaugguugaa

SEQ ID NO: 925439 - RNA, 19 nt, Artificial Sequence
  Description of Artificial Sequence: Synthetic oligonucleotide
  Antisense strand to SEQ ID NO: 925438
uucaaccauuucaagaaca

SEQ ID NO: 925440 - RNA, 19 nt, Artificial Sequence
  Description of Artificial Sequence: Synthetic oligonucleotide
  Sense strand starting at position 572 of SEQ ID NO: 913414
auguucuugaaaugguuga

SEQ ID NO: 925441 - RNA, 19 nt, Artificial Sequence
  Description of Artificial Sequence: Synthetic oligonucleotide
  Antisense strand to SEQ ID NO: 925440
ucaaccauuucaagaacau

SEQ ID NO: 925442 - RNA, 19 nt, Artificial Sequence
  Description of Artificial Sequence: Synthetic oligonucleotide
  Sense strand starting at position 1518 of SEQ ID NO: 913414
agcuuuacacuuuauugua

SEQ ID NO: 925443 - RNA, 19 nt, Artificial Sequence
  Description of Artificial Sequence: Synthetic oligonucleotide
  Antisense strand to SEQ ID NO: 925442
uacaauaaaguguaaagcu

SEQ ID NO: 925444 - RNA, 19 nt, Artificial Sequence
  Description of Artificial Sequence: Synthetic oligonucleotide
  Sense strand starting at position 1229 of SEQ ID NO: 913414
uugagaggcuuguuaugga

SEQ ID NO: 925445 - RNA, 19 nt, Artificial Sequence
  Description of Artificial Sequence: Synthetic oligonucleotide
  Antisense strand to SEQ ID NO: 925444
uccauaacaagccucucaa

SEQ ID NO: 925446 - RNA, 19 nt, Artificial Sequence
  Description of Artificial Sequence: Synthetic oligonucleotide
  Sense strand starting at position 2074 of SEQ ID NO: 913414
cuccacuuuguguaaacuu

SEQ ID NO: 925447 - RNA, 19 nt, Artificial Sequence
  Description of Artificial Sequence: Synthetic oligonucleotide
  Antisense strand to SEQ ID NO: 925446
aaguuuacacaaaguggag

SEQ ID NO: 925448 - RNA, 19 nt, Artificial Sequence
  Description of Artificial Sequence: Synthetic oligonucleotide
  Sense strand starting at position 2570 of SEQ ID NO: 913414
ugaacucuaucgucagaug

SEQ ID NO: 925449 - RNA, 19 nt, Artificial Sequence
  Description of Artificial Sequence: Synthetic oligonucleotide
  Antisense strand to SEQ ID NO: 925448
caucugacgauagaguuca

SEQ ID NO: 925450 - RNA, 19 nt, Artificial Sequence
  Description of Artificial Sequence: Synthetic oligonucleotide
  Sense strand starting at position 2103 of SEQ ID NO: 913414
accuauugggcaggcaaau

SEQ ID NO: 925451 - RNA, 19 nt, Artificial Sequence
  Description of Artificial Sequence: Synthetic oligonucleotide
  Antisense strand to SEQ ID NO: 925450
auuugccugcccaauaggu

SEQ ID NO: 925452 - RNA, 19 nt, Artificial Sequence
  Description of Artificial Sequence: Synthetic oligonucleotide
  Sense strand starting at position 2968 of SEQ ID NO: 913414
uuuaccuguuguuuaaaga

SEQ ID NO: 925453 - RNA, 19 nt, Artificial Sequence
  Description of Artificial Sequence: Synthetic oligonucleotide
  Antisense strand to SEQ ID NO: 925452
ucuuuaaacaacagguaaa

SEQ ID NO: 925454 - RNA, 19 nt, Artificial Sequence
  Description of Artificial Sequence: Synthetic oligonucleotide
  Sense strand starting at position 1847 of SEQ ID NO: 913414
cgaauaacuguccaguggu

SEQ ID NO: 925455 - RNA, 19 nt, Artificial Sequence
  Description of Artificial Sequence: Synthetic oligonucleotide
  Antisense strand to SEQ ID NO: 925454
accacuggacaguuauucg

SEQ ID NO: 925456 - RNA, 19 nt, Artificial Sequence
  Description of Artificial Sequence: Synthetic oligonucleotide
  Sense strand starting at position 2063 of SEQ ID NO: 913414
cuuggugauuacuccacuu

SEQ ID NO: 925457 - RNA, 19 nt, Artificial Sequence
  Description of Artificial Sequence: Synthetic oligonucleotide
  Antisense strand to SEQ ID NO: 925456
aaguggaguaaucaccaag

SEQ ID NO: 925458 - RNA, 19 nt, Artificial Sequence
  Description of Artificial Sequence: Synthetic oligonucleotide
  Sense strand starting at position 1173 of SEQ ID NO: 913415
ccaugaugccauuacaaug

SEQ ID NO: 925459 - RNA, 19 nt, Artificial Sequence
  Description of Artificial Sequence: Synthetic oligonucleotide
  Antisense strand to SEQ ID NO: 925458
cauuguaauggcaucaugg

SEQ ID NO: 925460 - RNA, 19 nt, Artificial Sequence
  Description of Artificial Sequence: Synthetic oligonucleotide
  Sense strand starting at position 1895 of SEQ ID NO: 913415
uuguaagagacacgaauaa

SEQ ID NO: 925461 - RNA, 19 nt, Artificial Sequence
  Description of Artificial Sequence: Synthetic oligonucleotide
  Antisense strand to SEQ ID NO: 925460
uuauucgugucucuuacaa

SEQ ID NO: 925462 - RNA, 19 nt, Artificial Sequence
  Description of Artificial Sequence: Synthetic oligonucleotide
  Sense strand starting at position 3501 of SEQ ID NO: 913415
ccagguaaccuugauuauu

SEQ ID NO: 925463 - RNA, 19 nt, Artificial Sequence
  Description of Artificial Sequence: Synthetic oligonucleotide
  Antisense strand to SEQ ID NO: 925462
aauaaucaagguuaccugg

SEQ ID NO: 925464 - RNA, 19 nt, Artificial Sequence
  Description of Artificial Sequence: Synthetic oligonucleotide
  Sense strand starting at position 3533 of SEQ ID NO: 913415
gccuaugaauuucugguuu

SEQ ID NO: 925465 - RNA, 19 nt, Artificial Sequence
  Description of Artificial Sequence: Synthetic oligonucleotide
  Antisense strand to SEQ ID NO: 925464
aaaccagaaauucauaggc

SEQ ID NO: 925466 - RNA, 19 nt, Artificial Sequence
  Description of Artificial Sequence: Synthetic oligonucleotide
  Sense strand starting at position 2387 of SEQ ID NO: 913415
uaaaguuauggauaagcuu

SEQ ID NO: 925467 - RNA, 19 nt, Artificial Sequence
  Description of Artificial Sequence: Synthetic oligonucleotide
  Antisense strand to SEQ ID NO: 925466
aagcuuauccauaacuuua

SEQ ID NO: 925468 - RNA, 19 nt, Artificial Sequence
  Description of Artificial Sequence: Synthetic oligonucleotide
  Sense strand starting at position 3195 of SEQ ID NO: 913415
cuucuccugggucagaaua

SEQ ID NO: 925469 - RNA, 19 nt, Artificial Sequence
  Description of Artificial Sequence: Synthetic oligonucleotide
  Antisense strand to SEQ ID NO: 925468
uauucugacccaggagaag

SEQ ID NO: 925470 - RNA, 19 nt, Artificial Sequence
  Description of Artificial Sequence: Synthetic oligonucleotide
  Sense strand starting at position 3432 of SEQ ID NO: 913415
guggaaaccguggauggau

SEQ ID NO: 925471 - RNA, 19 nt, Artificial Sequence
  Description of Artificial Sequence: Synthetic oligonucleotide
  Antisense strand to SEQ ID NO: 925470
auccauccacgguuuccac

SEQ ID NO: 925472 - RNA, 19 nt, Artificial Sequence
  Description of Artificial Sequence: Synthetic oligonucleotide
  Sense strand starting at position 1178 of SEQ ID NO: 913415
augccauuacaaugagaca

SEQ ID NO: 925473 - RNA, 19 nt, Artificial Sequence
  Description of Artificial Sequence: Synthetic oligonucleotide
  Antisense strand to SEQ ID NO: 925472
ugucucauuguaauggcau

SEQ ID NO: 925474 - RNA, 19 nt, Artificial Sequence
  Description of Artificial Sequence: Synthetic oligonucleotide
  Sense strand starting at position 2625 of SEQ ID NO: 913415
ggagaugaacucuaucguc

SEQ ID NO: 925475 - RNA, 19 nt, Artificial Sequence
  Description of Artificial Sequence: Synthetic oligonucleotide
  Antisense strand to SEQ ID NO: 925474
gacgauagaguucaucucc

SEQ ID NO: 925476 - RNA, 19 nt, Artificial Sequence
  Description of Artificial Sequence: Synthetic oligonucleotide
  Sense strand starting at position 2094 of SEQ ID NO: 913415
auaaucaugugaucuggau

SEQ ID NO: 925477 - RNA, 19 nt, Artificial Sequence
  Description of Artificial Sequence: Synthetic oligonucleotide
  Antisense strand to SEQ ID NO: 925476
auccagaucacaugauuau

SEQ ID NO: 925478 - RNA, 19 nt, Artificial Sequence
  Description of Artificial Sequence: Synthetic oligonucleotide
  Sense strand starting at position 3170 of SEQ ID NO: 913415
uccaacauuuaucaaggga

SEQ ID NO: 925479 - RNA, 19 nt, Artificial Sequence
  Description of Artificial Sequence: Synthetic oligonucleotide
  Antisense strand to SEQ ID NO: 925478
ucccuugauaaauguugga

SEQ ID NO: 925480 - RNA, 19 nt, Artificial Sequence
  Description of Artificial Sequence: Synthetic oligonucleotide
  Sense strand starting at position 636 of SEQ ID NO: 913415
ucuugaaaugguugaacac

SEQ ID NO: 925481 - RNA, 19 nt, Artificial Sequence
  Description of Artificial Sequence: Synthetic oligonucleotide
  Antisense strand to SEQ ID NO: 925480
guguucaaccauuucaaga

SEQ ID NO: 925482 - RNA, 19 nt, Artificial Sequence
  Description of Artificial Sequence: Synthetic oligonucleotide
  Sense strand starting at position 3648 of SEQ ID NO: 913415
gacaauguugcaugagaaa

SEQ ID NO: 925483 - RNA, 19 nt, Artificial Sequence
  Description of Artificial Sequence: Synthetic oligonucleotide
  Antisense strand to SEQ ID NO: 925482
uuucucaugcaacauuguc

SEQ ID NO: 925484 - RNA, 19 nt, Artificial Sequence
  Description of Artificial Sequence: Synthetic oligonucleotide
  Sense strand starting at position 2656 of SEQ ID NO: 913415
uccuuauugccugauagag

SEQ ID NO: 925485 - RNA, 19 nt, Artificial Sequence
  Description of Artificial Sequence: Synthetic oligonucleotide
  Antisense strand to SEQ ID NO: 925484
cucuaucaggcaauaagga

SEQ ID NO: 925486 - RNA, 19 nt, Artificial Sequence
  Description of Artificial Sequence: Synthetic oligonucleotide
  Sense strand starting at position 3263 of SEQ ID NO: 913415
ccaagaucuggcugaagac

SEQ ID NO: 925487 - RNA, 19 nt, Artificial Sequence
  Description of Artificial Sequence: Synthetic oligonucleotide
  Antisense strand to SEQ ID NO: 925486
gucuucagccagaucuugg

SEQ ID NO: 925488 - RNA, 19 nt, Artificial Sequence
  Description of Artificial Sequence: Synthetic oligonucleotide
  Sense strand starting at position 348 of SEQ ID NO: 913415
agugacagccucuguauuu

SEQ ID NO: 925489 - RNA, 19 nt, Artificial Sequence
  Description of Artificial Sequence: Synthetic oligonucleotide
  Antisense strand to SEQ ID NO: 925488
aaauacagaggcugucacu

SEQ ID NO: 925490 - RNA, 19 nt, Artificial Sequence
  Description of Artificial Sequence: Synthetic oligonucleotide
  Sense strand starting at position 2125 of SEQ ID NO: 913415
uggugauuacuccacuuug

SEQ ID NO: 925491 - RNA, 19 nt, Artificial Sequence
  Description of Artificial Sequence: Synthetic oligonucleotide
  Antisense strand to SEQ ID NO: 925490
caaaguggaguaaucacca

SEQ ID NO: 925492 - RNA, 19 nt, Artificial Sequence
  Description of Artificial Sequence: Synthetic oligonucleotide
  Sense strand starting at position 281 of SEQ ID NO: 913415
uaguuucugcuggacagaa

SEQ ID NO: 925493 - RNA, 19 nt, Artificial Sequence
  Description of Artificial Sequence: Synthetic oligonucleotide
  Antisense strand to SEQ ID NO: 925492
uucuguccagcagaaacua

SEQ ID NO: 925494 - RNA, 19 nt, Artificial Sequence
  Description of Artificial Sequence: Synthetic oligonucleotide
  Sense strand starting at position 3559 of SEQ ID NO: 913415
uguuuaggagcagaaucuu

SEQ ID NO: 925495 - RNA, 19 nt, Artificial Sequence
  Description of Artificial Sequence: Synthetic oligonucleotide
  Antisense strand to SEQ ID NO: 925494
aagauucugcuccuaaaca

SEQ ID NO: 925496 - RNA, 19 nt, Artificial Sequence
  Description of Artificial Sequence: Synthetic oligonucleotide
  Sense strand starting at position 2515 of SEQ ID NO: 913415
guaacaguuuacucagaga

SEQ ID NO: 925497 - RNA, 19 nt, Artificial Sequence
  Description of Artificial Sequence: Synthetic oligonucleotide
  Antisense strand to SEQ ID NO: 925496
ucucugaguaaacuguuac

SEQ ID NO: 925498 - RNA, 19 nt, Artificial Sequence
  Description of Artificial Sequence: Synthetic oligonucleotide
  Sense strand starting at position 41 of SEQ ID NO: 913415
ggaugcuuggguuacuuaa

SEQ ID NO: 925499 - RNA, 19 nt, Artificial Sequence
  Description of Artificial Sequence: Synthetic oligonucleotide
  Antisense strand to SEQ ID NO: 925498
uuaaguaacccaagcaucc

SEQ ID NO: 925500 - RNA, 19 nt, Artificial Sequence
  Description of Artificial Sequence: Synthetic oligonucleotide
  Sense strand starting at position 724 of SEQ ID NO: 913415
gcauaagaccuguauucua

SEQ ID NO: 925501 - RNA, 19 nt, Artificial Sequence
  Description of Artificial Sequence: Synthetic oligonucleotide
  Antisense strand to SEQ ID NO: 925500
uagaauacaggucuuaugc

SEQ ID NO: 925502 - RNA, 19 nt, Artificial Sequence
  Description of Artificial Sequence: Synthetic oligonucleotide
  Sense strand starting at position 2297 of SEQ ID NO: 913415
augcuauaacugggaacuu

SEQ ID NO: 925503 - RNA, 19 nt, Artificial Sequence
  Description of Artificial Sequence: Synthetic oligonucleotide
  Antisense strand to SEQ ID NO: 925502
aaguucccaguuauagcau

SEQ ID NO: 925504 - RNA, 19 nt, Artificial Sequence
  Description of Artificial Sequence: Synthetic oligonucleotide
  Sense strand starting at position 2664 of SEQ ID NO: 913415
gccugauagagucaggagu

SEQ ID NO: 925505 - RNA, 19 nt, Artificial Sequence
  Description of Artificial Sequence: Synthetic oligonucleotide
  Antisense strand to SEQ ID NO: 925504
acuccugacucuaucaggc

SEQ ID NO: 925506 - RNA, 19 nt, Artificial Sequence
  Description of Artificial Sequence: Synthetic oligonucleotide
  Sense strand starting at position 881 of SEQ ID NO: 913415
ucuaauauguagucagaau

SEQ ID NO: 925507 - RNA, 19 nt, Artificial Sequence
  Description of Artificial Sequence: Synthetic oligonucleotide
  Antisense strand to SEQ ID NO: 925506
auucugacuacauauuaga

SEQ ID NO: 925508 - RNA, 19 nt, Artificial Sequence
  Description of Artificial Sequence: Synthetic oligonucleotide
  Sense strand starting at position 2308 of SEQ ID NO: 913415
gggaacuuccugggcucaa

SEQ ID NO: 925509 - RNA, 19 nt, Artificial Sequence
  Description of Artificial Sequence: Synthetic oligonucleotide
  Antisense strand to SEQ ID NO: 925508
uugagcccaggaaguuccc

SEQ ID NO: 925510 - RNA, 19 nt, Artificial Sequence
  Description of Artificial Sequence: Synthetic oligonucleotide
  Sense strand starting at position 673 of SEQ ID NO: 913415
aucccagaucauugaugca

SEQ ID NO: 925511 - RNA, 19 nt, Artificial Sequence
  Description of Artificial Sequence: Synthetic oligonucleotide
  Antisense strand to SEQ ID NO: 925510
ugcaucaaugaucugggau

SEQ ID NO: 925512 - RNA, 19 nt, Artificial Sequence
  Description of Artificial Sequence: Synthetic oligonucleotide
  Sense strand starting at position 3545 of SEQ ID NO: 913415
cugguuugaccagauguuu

SEQ ID NO: 925513 - RNA, 19 nt, Artificial Sequence
  Description of Artificial Sequence: Synthetic oligonucleotide
  Antisense strand to SEQ ID NO: 925512
aaacaucuggucaaaccag

SEQ ID NO: 925514 - RNA, 19 nt, Artificial Sequence
  Description of Artificial Sequence: Synthetic oligonucleotide
  Sense strand starting at position 1698 of SEQ ID NO: 913415
aguccacuucccuauagua

SEQ ID NO: 925515 - RNA, 19 nt, Artificial Sequence
  Description of Artificial Sequence: Synthetic oligonucleotide
  Antisense strand to SEQ ID NO: 925514
uacuauagggaaguggacu

SEQ ID NO: 925516 - RNA, 19 nt, Artificial Sequence
  Description of Artificial Sequence: Synthetic oligonucleotide
  Sense strand starting at position 2890 of SEQ ID NO: 913415
aggccaucucaaggucaga

SEQ ID NO: 925517 - RNA, 19 nt, Artificial Sequence
  Description of Artificial Sequence: Synthetic oligonucleotide
  Antisense strand to SEQ ID NO: 925516
ucugaccuugagauggccu

SEQ ID NO: 925518 - RNA, 19 nt, Artificial Sequence
  Description of Artificial Sequence: Synthetic oligonucleotide
  Sense strand starting at position 2631 of SEQ ID NO: 913415
gaacucuaucgucagaugu

SEQ ID NO: 925519 - RNA, 19 nt, Artificial Sequence
  Description of Artificial Sequence: Synthetic oligonucleotide
  Antisense strand to SEQ ID NO: 925518
acaucugacgauagaguuc

SEQ ID NO: 925520 - RNA, 19 nt, Artificial Sequence
  Description of Artificial Sequence: Synthetic oligonucleotide
  Sense strand starting at position 633 of SEQ ID NO: 913415
uguucuugaaaugguugaa

SEQ ID NO: 925521 - RNA, 19 nt, Artificial Sequence
  Description of Artificial Sequence: Synthetic oligonucleotide
  Antisense strand to SEQ ID NO: 925520
uucaaccauuucaagaaca

SEQ ID NO: 925522 - RNA, 19 nt, Artificial Sequence
  Description of Artificial Sequence: Synthetic oligonucleotide
  Sense strand starting at position 632 of SEQ ID NO: 913415
auguucuugaaaugguuga

SEQ ID NO: 925523 - RNA, 19 nt, Artificial Sequence
  Description of Artificial Sequence: Synthetic oligonucleotide
  Antisense strand to SEQ ID NO: 925522
ucaaccauuucaagaacau

SEQ ID NO: 925524 - RNA, 19 nt, Artificial Sequence
  Description of Artificial Sequence: Synthetic oligonucleotide
  Sense strand starting at position 1578 of SEQ ID NO: 913415
agcuuuacacuuuauugua

SEQ ID NO: 925525 - RNA, 19 nt, Artificial Sequence
  Description of Artificial Sequence: Synthetic oligonucleotide
  Antisense strand to SEQ ID NO: 925524
uacaauaaaguguaaagcu

SEQ ID NO: 925526 - RNA, 19 nt, Artificial Sequence
  Description of Artificial Sequence: Synthetic oligonucleotide
  Sense strand starting at position 1289 of SEQ ID NO: 913415
uugagaggcuuguuaugga

SEQ ID NO: 925527 - RNA, 19 nt, Artificial Sequence
  Description of Artificial Sequence: Synthetic oligonucleotide
  Antisense strand to SEQ ID NO: 925526
uccauaacaagccucucaa

SEQ ID NO: 925528 - RNA, 19 nt, Artificial Sequence
  Description of Artificial Sequence: Synthetic oligonucleotide
  Sense strand starting at position 2134 of SEQ ID NO: 913415
cuccacuuuguguaaacuu

SEQ ID NO: 925529 - RNA, 19 nt, Artificial Sequence
  Description of Artificial Sequence: Synthetic oligonucleotide
  Antisense strand to SEQ ID NO: 925528
aaguuuacacaaaguggag

SEQ ID NO: 925530 - RNA, 19 nt, Artificial Sequence
  Description of Artificial Sequence: Synthetic oligonucleotide
  Sense strand starting at position 2630 of SEQ ID NO: 913415
ugaacucuaucgucagaug

SEQ ID NO: 925531 - RNA, 19 nt, Artificial Sequence
  Description of Artificial Sequence: Synthetic oligonucleotide
  Antisense strand to SEQ ID NO: 925530
caucugacgauagaguuca

SEQ ID NO: 925532 - RNA, 19 nt, Artificial Sequence
  Description of Artificial Sequence: Synthetic oligonucleotide
  Sense strand starting at position 2163 of SEQ ID NO: 913415
accuauugggcaggcaaau

SEQ ID NO: 925533 - RNA, 19 nt, Artificial Sequence
  Description of Artificial Sequence: Synthetic oligonucleotide
  Antisense strand to SEQ ID NO: 925532
auuugccugcccaauaggu

SEQ ID NO: 925534 - RNA, 19 nt, Artificial Sequence
  Description of Artificial Sequence: Synthetic oligonucleotide
  Sense strand starting at position 3028 of SEQ ID NO: 913415
uuuaccuguuguuuaaaga

SEQ ID NO: 925535 - RNA, 19 nt, Artificial Sequence
  Description of Artificial Sequence: Synthetic oligonucleotide
  Antisense strand to SEQ ID NO: 925534
ucuuuaaacaacagguaaa

SEQ ID NO: 925536 - RNA, 19 nt, Artificial Sequence
  Description of Artificial Sequence: Synthetic oligonucleotide
  Sense strand starting at position 1907 of SEQ ID NO: 913415
cgaauaacuguccaguggu

SEQ ID NO: 925537 - RNA, 19 nt, Artificial Sequence
  Description of Artificial Sequence: Synthetic oligonucleotide
  Antisense strand to SEQ ID NO: 925536
accacuggacaguuauucg

SEQ ID NO: 925538 - RNA, 19 nt, Artificial Sequence
  Description of Artificial Sequence: Synthetic oligonucleotide
  Sense strand starting at position 1779 of SEQ ID NO: 913416
ccggcagagcucagugaug

SEQ ID NO: 925539 - RNA, 19 nt, Artificial Sequence
  Description of Artificial Sequence: Synthetic oligonucleotide
  Antisense strand to SEQ ID NO: 925538
caucacugagcucugccgg

SEQ ID NO: 925540 - RNA, 19 nt, Artificial Sequence
  Description of Artificial Sequence: Synthetic oligonucleotide
  Sense strand starting at position 2940 of SEQ ID NO: 913416
agguguacagaguacuuaa

SEQ ID NO: 925541 - RNA, 19 nt, Artificial Sequence
  Description of Artificial Sequence: Synthetic oligonucleotide
  Antisense strand to SEQ ID NO: 925540
uuaaguacucuguacaccu

SEQ ID NO: 925542 - RNA, 19 nt, Artificial Sequence
  Description of Artificial Sequence: Synthetic oligonucleotide
  Sense strand starting at position 2891 of SEQ ID NO: 913416
auacacucugguuaucuua

SEQ ID NO: 925543 - RNA, 19 nt, Artificial Sequence
  Description of Artificial Sequence: Synthetic oligonucleotide
  Antisense strand to SEQ ID NO: 925542
uaagauaaccagaguguau

SEQ ID NO: 925544 - RNA, 19 nt, Artificial Sequence
  Description of Artificial Sequence: Synthetic oligonucleotide
  Sense strand starting at position 3386 of SEQ ID NO: 913416
acgugaucucggcucagcu

SEQ ID NO: 925545 - RNA, 19 nt, Artificial Sequence
  Description of Artificial Sequence: Synthetic oligonucleotide
  Antisense strand to SEQ ID NO: 925544
agcugagccgagaucacgu

SEQ ID NO: 925546 - RNA, 19 nt, Artificial Sequence
  Description of Artificial Sequence: Synthetic oligonucleotide
  Sense strand starting at position 2887 of SEQ ID NO: 913416
gaggauacacucugguuau

SEQ ID NO: 925547 - RNA, 19 nt, Artificial Sequence
  Description of Artificial Sequence: Synthetic oligonucleotide
  Antisense strand to SEQ ID NO: 925546
auaaccagaguguauccuc

SEQ ID NO: 925548 - RNA, 19 nt, Artificial Sequence
  Description of Artificial Sequence: Synthetic oligonucleotide
  Sense strand starting at position 3612 of SEQ ID NO: 913416
gcgugagucacugugcuag

SEQ ID NO: 925549 - RNA, 19 nt, Artificial Sequence
  Description of Artificial Sequence: Synthetic oligonucleotide
  Antisense strand to SEQ ID NO: 925548
cuagcacagugacucacgc

SEQ ID NO: 925550 - RNA, 19 nt, Artificial Sequence
  Description of Artificial Sequence: Synthetic oligonucleotide
  Sense strand starting at position 2424 of SEQ ID NO: 913416
gggcgauuccggagccgaa

SEQ ID NO: 925551 - RNA, 19 nt, Artificial Sequence
  Description of Artificial Sequence: Synthetic oligonucleotide
  Antisense strand to SEQ ID NO: 925550
uucggcuccggaaucgccc

SEQ ID NO: 925552 - RNA, 19 nt, Artificial Sequence
  Description of Artificial Sequence: Synthetic oligonucleotide
  Sense strand starting at position 2538 of SEQ ID NO: 913416
agggaucacucaucuugua

SEQ ID NO: 925553 - RNA, 19 nt, Artificial Sequence
  Description of Artificial Sequence: Synthetic oligonucleotide
  Antisense strand to SEQ ID NO: 925552
uacaagaugagugaucccu

SEQ ID NO: 925554 - RNA, 19 nt, Artificial Sequence
  Description of Artificial Sequence: Synthetic oligonucleotide
  Sense strand starting at position 2761 of SEQ ID NO: 913416
ucccaauguccugaguuaa

SEQ ID NO: 925555 - RNA, 19 nt, Artificial Sequence
  Description of Artificial Sequence: Synthetic oligonucleotide
  Antisense strand to SEQ ID NO: 925554
uuaacucaggacauuggga

SEQ ID NO: 925556 - RNA, 19 nt, Artificial Sequence
  Description of Artificial Sequence: Synthetic oligonucleotide
  Sense strand starting at position 2733 of SEQ ID NO: 913416
auugaucccugguccuaaa

SEQ ID NO: 925557 - RNA, 19 nt, Artificial Sequence
  Description of Artificial Sequence: Synthetic oligonucleotide
  Antisense strand to SEQ ID NO: 925556
uuuaggaccagggaucaau

SEQ ID NO: 925558 - RNA, 19 nt, Artificial Sequence
  Description of Artificial Sequence: Synthetic oligonucleotide
  Sense strand starting at position 1261 of SEQ ID NO: 913416
gucccaaaggauggguuau

SEQ ID NO: 925559 - RNA, 19 nt, Artificial Sequence
  Description of Artificial Sequence: Synthetic oligonucleotide
  Antisense strand to SEQ ID NO: 925558
auaacccauccuuugggac

SEQ ID NO: 925560 - RNA, 19 nt, Artificial Sequence
  Description of Artificial Sequence: Synthetic oligonucleotide
  Sense strand starting at position 1348 of SEQ ID NO: 913416
ucuuuaucccgguaaacac

SEQ ID NO: 925561 - RNA, 19 nt, Artificial Sequence
  Description of Artificial Sequence: Synthetic oligonucleotide
  Antisense strand to SEQ ID NO: 925560
guguuuaccgggauaaaga

SEQ ID NO: 925562 - RNA, 19 nt, Artificial Sequence
  Description of Artificial Sequence: Synthetic oligonucleotide
  Sense strand starting at position 2857 of SEQ ID NO: 913416
gaaagcuuagacuguaacu

SEQ ID NO: 925563 - RNA, 19 nt, Artificial Sequence
  Description of Artificial Sequence: Synthetic oligonucleotide
  Antisense strand to SEQ ID NO: 925562
aguuacagucuaagcuuuc

SEQ ID NO: 925564 - RNA, 19 nt, Artificial Sequence
  Description of Artificial Sequence: Synthetic oligonucleotide
  Sense strand starting at position 1540 of SEQ ID NO: 913416
uucucauuagucuauguua

SEQ ID NO: 925565 - RNA, 19 nt, Artificial Sequence
  Description of Artificial Sequence: Synthetic oligonucleotide
  Antisense strand to SEQ ID NO: 925564
uaacauagacuaaugagaa

SEQ ID NO: 925566 - RNA, 19 nt, Artificial Sequence
  Description of Artificial Sequence: Synthetic oligonucleotide
  Sense strand starting at position 1543 of SEQ ID NO: 913416
ucauuagucuauguuacag

SEQ ID NO: 925567 - RNA, 19 nt, Artificial Sequence
  Description of Artificial Sequence: Synthetic oligonucleotide
  Antisense strand to SEQ ID NO: 925566
cuguaacauagacuaauga

SEQ ID NO: 925568 - RNA, 19 nt, Artificial Sequence
  Description of Artificial Sequence: Synthetic oligonucleotide
  Sense strand starting at position 1491 of SEQ ID NO: 913416
gcacuucuugauuacuguu

SEQ ID NO: 925569 - RNA, 19 nt, Artificial Sequence
  Description of Artificial Sequence: Synthetic oligonucleotide
  Antisense strand to SEQ ID NO: 925568
aacaguaaucaagaagugc

SEQ ID NO: 925570 - RNA, 19 nt, Artificial Sequence
  Description of Artificial Sequence: Synthetic oligonucleotide
  Sense strand starting at position 2400 of SEQ ID NO: 913416
gccucaggucuaugacaca

SEQ ID NO: 925571 - RNA, 19 nt, Artificial Sequence
  Description of Artificial Sequence: Synthetic oligonucleotide
  Antisense strand to SEQ ID NO: 925570
ugugucauagaccugaggc

SEQ ID NO: 925572 - RNA, 19 nt, Artificial Sequence
  Description of Artificial Sequence: Synthetic oligonucleotide
  Sense strand starting at position 1499 of SEQ ID NO: 913416
ugauuacuguugcuggaua

SEQ ID NO: 925573 - RNA, 19 nt, Artificial Sequence
  Description of Artificial Sequence: Synthetic oligonucleotide
  Antisense strand to SEQ ID NO: 925572
uauccagcaacaguaauca

SEQ ID NO: 925574 - RNA, 19 nt, Artificial Sequence
  Description of Artificial Sequence: Synthetic oligonucleotide
  Sense strand starting at position 1542 of SEQ ID NO: 913416
cucauuagucuauguuaca

SEQ ID NO: 925575 - RNA, 19 nt, Artificial Sequence
  Description of Artificial Sequence: Synthetic oligonucleotide
  Antisense strand to SEQ ID NO: 925574
uguaacauagacuaaugag

SEQ ID NO: 925576 - RNA, 19 nt, Artificial Sequence
  Description of Artificial Sequence: Synthetic oligonucleotide
  Sense strand starting at position 1307 of SEQ ID NO: 913416
ccuaaaucugcaggucacu

SEQ ID NO: 925577 - RNA, 19 nt, Artificial Sequence
  Description of Artificial Sequence: Synthetic oligonucleotide
  Antisense strand to SEQ ID NO: 925576
agugaccugcagauuuagg

SEQ ID NO: 925578 - RNA, 19 nt, Artificial Sequence
  Description of Artificial Sequence: Synthetic oligonucleotide
  Sense strand starting at position 2899 of SEQ ID NO: 913416
ugguuaucuuaauugcauu

SEQ ID NO: 925579 - RNA, 19 nt, Artificial Sequence
  Description of Artificial Sequence: Synthetic oligonucleotide
  Antisense strand to SEQ ID NO: 925578
aaugcaauuaagauaacca

SEQ ID NO: 925580 - RNA, 19 nt, Artificial Sequence
  Description of Artificial Sequence: Synthetic oligonucleotide
  Sense strand starting at position 2561 of SEQ ID NO: 913416
ucacgacccgucugggaau

SEQ ID NO: 925581 - RNA, 19 nt, Artificial Sequence
  Description of Artificial Sequence: Synthetic oligonucleotide
  Antisense strand to SEQ ID NO: 925580
auucccagacgggucguga

SEQ ID NO: 925582 - RNA, 19 nt, Artificial Sequence
  Description of Artificial Sequence: Synthetic oligonucleotide
  Sense strand starting at position 1346 of SEQ ID NO: 913416
ucucuuuaucccgguaaac

SEQ ID NO: 925583 - RNA, 19 nt, Artificial Sequence
  Description of Artificial Sequence: Synthetic oligonucleotide
  Antisense strand to SEQ ID NO: 925582
guuuaccgggauaaagaga

SEQ ID NO: 925584 - RNA, 19 nt, Artificial Sequence
  Description of Artificial Sequence: Synthetic oligonucleotide
  Sense strand starting at position 3622 of SEQ ID NO: 913416
cugugcuaggccuagaagu

SEQ ID NO: 925585 - RNA, 19 nt, Artificial Sequence
  Description of Artificial Sequence: Synthetic oligonucleotide
  Antisense strand to SEQ ID NO: 925584
acuucuaggccuagcacag

SEQ ID NO: 925586 - RNA, 19 nt, Artificial Sequence
  Description of Artificial Sequence: Synthetic oligonucleotide
  Sense strand starting at position 3124 of SEQ ID NO: 913416
uuucuuaucccugguuauc

SEQ ID NO: 925587 - RNA, 19 nt, Artificial Sequence
  Description of Artificial Sequence: Synthetic oligonucleotide
  Antisense strand to SEQ ID NO: 925586
gauaaccagggauaagaaa

SEQ ID NO: 925588 - RNA, 19 nt, Artificial Sequence
  Description of Artificial Sequence: Synthetic oligonucleotide
  Sense strand starting at position 2459 of SEQ ID NO: 913416
gcuguugugaauugaucca

SEQ ID NO: 925589 - RNA, 19 nt, Artificial Sequence
  Description of Artificial Sequence: Synthetic oligonucleotide
  Antisense strand to SEQ ID NO: 925588
uggaucaauucacaacagc

SEQ ID NO: 925590 - RNA, 19 nt, Artificial Sequence
  Description of Artificial Sequence: Synthetic oligonucleotide
  Sense strand starting at position 3840 of SEQ ID NO: 913416
agaauaaugucagaaccca

SEQ ID NO: 925591 - RNA, 19 nt, Artificial Sequence
  Description of Artificial Sequence: Synthetic oligonucleotide
  Antisense strand to SEQ ID NO: 925590
uggguucugacauuauucu

SEQ ID NO: 925592 - RNA, 19 nt, Artificial Sequence
  Description of Artificial Sequence: Synthetic oligonucleotide
  Sense strand starting at position 2698 of SEQ ID NO: 913416
gguugucucguccacacuu

SEQ ID NO: 925593 - RNA, 19 nt, Artificial Sequence
  Description of Artificial Sequence: Synthetic oligonucleotide
  Antisense strand to SEQ ID NO: 925592
aaguguggacgagacaacc

SEQ ID NO: 925594 - RNA, 19 nt, Artificial Sequence
  Description of Artificial Sequence: Synthetic oligonucleotide
  Sense strand starting at position 1781 of SEQ ID NO: 913416
ggcagagcucagugauguc

SEQ ID NO: 925595 - RNA, 19 nt, Artificial Sequence
  Description of Artificial Sequence: Synthetic oligonucleotide
  Antisense strand to SEQ ID NO: 925594
gacaucacugagcucugcc

SEQ ID NO: 925596 - RNA, 19 nt, Artificial Sequence
  Description of Artificial Sequence: Synthetic oligonucleotide
  Sense strand starting at position 3835 of SEQ ID NO: 913416
auggaagaauaaugucaga

SEQ ID NO: 925597 - RNA, 19 nt, Artificial Sequence
  Description of Artificial Sequence: Synthetic oligonucleotide
  Antisense strand to SEQ ID NO: 925596
ucugacauuauucuuccau

SEQ ID NO: 925598 - RNA, 19 nt, Artificial Sequence
  Description of Artificial Sequence: Synthetic oligonucleotide
  Sense strand starting at position 518 of SEQ ID NO: 913416
gcaagaacauuacagaagu

SEQ ID NO: 925599 - RNA, 19 nt, Artificial Sequence
  Description of Artificial Sequence: Synthetic oligonucleotide
  Antisense strand to SEQ ID NO: 925598
acuucuguaauguucuugc

SEQ ID NO: 925600 - RNA, 19 nt, Artificial Sequence
  Description of Artificial Sequence: Synthetic oligonucleotide
  Sense strand starting at position 3676 of SEQ ID NO: 913416
cucuauaccuccuagagag

SEQ ID NO: 925601 - RNA, 19 nt, Artificial Sequence
  Description of Artificial Sequence: Synthetic oligonucleotide
  Antisense strand to SEQ ID NO: 925600
cucucuaggagguauagag

SEQ ID NO: 925602 - RNA, 19 nt, Artificial Sequence
  Description of Artificial Sequence: Synthetic oligonucleotide
  Sense strand starting at position 2854 of SEQ ID NO: 913416
gaagaaagcuuagacugua

SEQ ID NO: 925603 - RNA, 19 nt, Artificial Sequence
  Description of Artificial Sequence: Synthetic oligonucleotide
  Antisense strand to SEQ ID NO: 925602
uacagucuaagcuuucuuc

SEQ ID NO: 925604 - RNA, 19 nt, Artificial Sequence
  Description of Artificial Sequence: Synthetic oligonucleotide
  Sense strand starting at position 576 of SEQ ID NO: 913416
gaagcagacuaagauguau

SEQ ID NO: 925605 - RNA, 19 nt, Artificial Sequence
  Description of Artificial Sequence: Synthetic oligonucleotide
  Antisense strand to SEQ ID NO: 925604
auacaucuuagucugcuuc

SEQ ID NO: 925606 - RNA, 19 nt, Artificial Sequence
  Description of Artificial Sequence: Synthetic oligonucleotide
  Sense strand starting at position 555 of SEQ ID NO: 913416
ucaaguagauauugaggga

SEQ ID NO: 925607 - RNA, 19 nt, Artificial Sequence
  Description of Artificial Sequence: Synthetic oligonucleotide
  Antisense strand to SEQ ID NO: 925606
ucccucaauaucuacuuga

SEQ ID NO: 925608 - RNA, 19 nt, Artificial Sequence
  Description of Artificial Sequence: Synthetic oligonucleotide
  Sense strand starting at position 2509 of SEQ ID NO: 913416
gcgagcucaucccuacagu

SEQ ID NO: 925609 - RNA, 19 nt, Artificial Sequence
  Description of Artificial Sequence: Synthetic oligonucleotide
  Antisense strand to SEQ ID NO: 925608
acuguagggaugagcucgc

SEQ ID NO: 925610 - RNA, 19 nt, Artificial Sequence
  Description of Artificial Sequence: Synthetic oligonucleotide
  Sense strand starting at position 3822 of SEQ ID NO: 913416
cccacauggucuuauggaa

SEQ ID NO: 925611 - RNA, 19 nt, Artificial Sequence
  Description of Artificial Sequence: Synthetic oligonucleotide
  Antisense strand to SEQ ID NO: 925610
uuccauaagaccauguggg

SEQ ID NO: 925612 - RNA, 19 nt, Artificial Sequence
  Description of Artificial Sequence: Synthetic oligonucleotide
  Sense strand starting at position 2667 of SEQ ID NO: 913416
aaagauugcucagggaauc

SEQ ID NO: 925613 - RNA, 19 nt, Artificial Sequence
  Description of Artificial Sequence: Synthetic oligonucleotide
  Antisense strand to SEQ ID NO: 925612
gauucccugagcaaucuuu

SEQ ID NO: 925614 - RNA, 19 nt, Artificial Sequence
  Description of Artificial Sequence: Synthetic oligonucleotide
  Sense strand starting at position 1253 of SEQ ID NO: 913416
cuagucaugucccaaagga

SEQ ID NO: 925615 - RNA, 19 nt, Artificial Sequence
  Description of Artificial Sequence: Synthetic oligonucleotide
  Antisense strand to SEQ ID NO: 925614
uccuuugggacaugacuag

SEQ ID NO: 925616 - RNA, 19 nt, Artificial Sequence
  Description of Artificial Sequence: Synthetic oligonucleotide
  Sense strand starting at position 2888 of SEQ ID NO: 913416
aggauacacucugguuauc

SEQ ID NO: 925617 - RNA, 19 nt, Artificial Sequence
  Description of Artificial Sequence: Synthetic oligonucleotide
  Antisense strand to SEQ ID NO: 925616
gauaaccagaguguauccu

SEQ ID NO: 925618 - RNA, 19 nt, Artificial Sequence
  Description of Artificial Sequence: Synthetic oligonucleotide
  Sense strand starting at position 1431 of SEQ ID NO: 913417
ccggcagagcucagugaug

SEQ ID NO: 925619 - RNA, 19 nt, Artificial Sequence
  Description of Artificial Sequence: Synthetic oligonucleotide
  Antisense strand to SEQ ID NO: 925618
caucacugagcucugccgg

SEQ ID NO: 925620 - RNA, 19 nt, Artificial Sequence
  Description of Artificial Sequence: Synthetic oligonucleotide
  Sense strand starting at position 2592 of SEQ ID NO: 913417
agguguacagaguacuuaa

SEQ ID NO: 925621 - RNA, 19 nt, Artificial Sequence
  Description of Artificial Sequence: Synthetic oligonucleotide
  Antisense strand to SEQ ID NO: 925620
uuaaguacucuguacaccu

SEQ ID NO: 925622 - RNA, 19 nt, Artificial Sequence
  Description of Artificial Sequence: Synthetic oligonucleotide
  Sense strand starting at position 2543 of SEQ ID NO: 913417
auacacucugguuaucuua

SEQ ID NO: 925623 - RNA, 19 nt, Artificial Sequence
  Description of Artificial Sequence: Synthetic oligonucleotide
  Antisense strand to SEQ ID NO: 925622
uaagauaaccagaguguau

SEQ ID NO: 925624 - RNA, 19 nt, Artificial Sequence
  Description of Artificial Sequence: Synthetic oligonucleotide
  Sense strand starting at position 3038 of SEQ ID NO: 913417
acgugaucucggcucagcu

SEQ ID NO: 925625 - RNA, 19 nt, Artificial Sequence
  Description of Artificial Sequence: Synthetic oligonucleotide
  Antisense strand to SEQ ID NO: 925624
agcugagccgagaucacgu

SEQ ID NO: 925626 - RNA, 19 nt, Artificial Sequence
  Description of Artificial Sequence: Synthetic oligonucleotide
  Sense strand starting at position 2539 of SEQ ID NO: 913417
gaggauacacucugguuau

SEQ ID NO: 925627 - RNA, 19 nt, Artificial Sequence
  Description of Artificial Sequence: Synthetic oligonucleotide
  Antisense strand to SEQ ID NO: 925626
auaaccagaguguauccuc

SEQ ID NO: 925628 - RNA, 19 nt, Artificial Sequence
  Description of Artificial Sequence: Synthetic oligonucleotide
  Sense strand starting at position 3264 of SEQ ID NO: 913417
gcgugagucacugugcuag

SEQ ID NO: 925629 - RNA, 19 nt, Artificial Sequence
  Description of Artificial Sequence: Synthetic oligonucleotide
  Antisense strand to SEQ ID NO: 925628
cuagcacagugacucacgc

SEQ ID NO: 925630 - RNA, 19 nt, Artificial Sequence
  Description of Artificial Sequence: Synthetic oligonucleotide
  Sense strand starting at position 2076 of SEQ ID NO: 913417
gggcgauuccggagccgaa

SEQ ID NO: 925631 - RNA, 19 nt, Artificial Sequence
  Description of Artificial Sequence: Synthetic oligonucleotide
  Antisense strand to SEQ ID NO: 925630
uucggcuccggaaucgccc

SEQ ID NO: 925632 - RNA, 19 nt, Artificial Sequence
  Description of Artificial Sequence: Synthetic oligonucleotide
  Sense strand starting at position 2190 of SEQ ID NO: 913417
agggaucacucaucuugua

SEQ ID NO: 925633 - RNA, 19 nt, Artificial Sequence
  Description of Artificial Sequence: Synthetic oligonucleotide
  Antisense strand to SEQ ID NO: 925632
uacaagaugagugaucccu

SEQ ID NO: 925634 - RNA, 19 nt, Artificial Sequence
  Description of Artificial Sequence: Synthetic oligonucleotide
  Sense strand starting at position 2413 of SEQ ID NO: 913417
ucccaauguccugaguuaa

SEQ ID NO: 925635 - RNA, 19 nt, Artificial Sequence
  Description of Artificial Sequence: Synthetic oligonucleotide
  Antisense strand to SEQ ID NO: 925634
uuaacucaggacauuggga

SEQ ID NO: 925636 - RNA, 19 nt, Artificial Sequence
  Description of Artificial Sequence: Synthetic oligonucleotide
  Sense strand starting at position 2385 of SEQ ID NO: 913417
auugaucccugguccuaaa

SEQ ID NO: 925637 - RNA, 19 nt, Artificial Sequence
  Description of Artificial Sequence: Synthetic oligonucleotide
  Antisense strand to SEQ ID NO: 925636
uuuaggaccagggaucaau

SEQ ID NO: 925638 - RNA, 19 nt, Artificial Sequence
  Description of Artificial Sequence: Synthetic oligonucleotide
  Sense strand starting at position 913 of SEQ ID NO: 913417
gucccaaaggauggguuau

SEQ ID NO: 925639 - RNA, 19 nt, Artificial Sequence
  Description of Artificial Sequence: Synthetic oligonucleotide
  Antisense strand to SEQ ID NO: 925638
auaacccauccuuugggac

SEQ ID NO: 925640 - RNA, 19 nt, Artificial Sequence
  Description of Artificial Sequence: Synthetic oligonucleotide
  Sense strand starting at position 1000 of SEQ ID NO: 913417
ucuuuaucccgguaaacac

SEQ ID NO: 925641 - RNA, 19 nt, Artificial Sequence
  Description of Artificial Sequence: Synthetic oligonucleotide
  Antisense strand to SEQ ID NO: 925640
guguuuaccgggauaaaga

SEQ ID NO: 925642 - RNA, 19 nt, Artificial Sequence
  Description of Artificial Sequence: Synthetic oligonucleotide
  Sense strand starting at position 2509 of SEQ ID NO: 913417
gaaagcuuagacuguaacu

SEQ ID NO: 925643 - RNA, 19 nt, Artificial Sequence
  Description of Artificial Sequence: Synthetic oligonucleotide
  Antisense strand to SEQ ID NO: 925642
aguuacagucuaagcuuuc

SEQ ID NO: 925644 - RNA, 19 nt, Artificial Sequence
  Description of Artificial Sequence: Synthetic oligonucleotide
  Sense strand starting at position 1192 of SEQ ID NO: 913417
uucucauuagucuauguua

SEQ ID NO: 925645 - RNA, 19 nt, Artificial Sequence
  Description of Artificial Sequence: Synthetic oligonucleotide
  Antisense strand to SEQ ID NO: 925644
uaacauagacuaaugagaa

SEQ ID NO: 925646 - RNA, 19 nt, Artificial Sequence
  Description of Artificial Sequence: Synthetic oligonucleotide
  Sense strand starting at position 1195 of SEQ ID NO: 913417
ucauuagucuauguuacag

SEQ ID NO: 925647 - RNA, 19 nt, Artificial Sequence
  Description of Artificial Sequence: Synthetic oligonucleotide
  Antisense strand to SEQ ID NO: 925646
cuguaacauagacuaauga

SEQ ID NO: 925648 - RNA, 19 nt, Artificial Sequence
  Description of Artificial Sequence: Synthetic oligonucleotide
  Sense strand starting at position 1143 of SEQ ID NO: 913417
gcacuucuugauuacuguu

SEQ ID NO: 925649 - RNA, 19 nt, Artificial Sequence
  Description of Artificial Sequence: Synthetic oligonucleotide
  Antisense strand to SEQ ID NO: 925648
aacaguaaucaagaagugc

SEQ ID NO: 925650 - RNA, 19 nt, Artificial Sequence
  Description of Artificial Sequence: Synthetic oligonucleotide
  Sense strand starting at position 2052 of SEQ ID NO: 913417
gccucaggucuaugacaca

SEQ ID NO: 925651 - RNA, 19 nt, Artificial Sequence
  Description of Artificial Sequence: Synthetic oligonucleotide
  Antisense strand to SEQ ID NO: 925650
ugugucauagaccugaggc

SEQ ID NO: 925652 - RNA, 19 nt, Artificial Sequence
  Description of Artificial Sequence: Synthetic oligonucleotide
  Sense strand starting at position 1151 of SEQ ID NO: 913417
ugauuacuguugcuggaua

SEQ ID NO: 925653 - RNA, 19 nt, Artificial Sequence
  Description of Artificial Sequence: Synthetic oligonucleotide
  Antisense strand to SEQ ID NO: 925652
uauccagcaacaguaauca

SEQ ID NO: 925654 - RNA, 19 nt, Artificial Sequence
  Description of Artificial Sequence: Synthetic oligonucleotide
  Sense strand starting at position 3667 of SEQ ID NO: 913417
ccgggagugccucacacuu

SEQ ID NO: 925655 - RNA, 19 nt, Artificial Sequence
  Description of Artificial Sequence: Synthetic oligonucleotide
  Antisense strand to SEQ ID NO: 925654
aagugugaggcacucccgg

SEQ ID NO: 925656 - RNA, 19 nt, Artificial Sequence
  Description of Artificial Sequence: Synthetic oligonucleotide
  Sense strand starting at position 1194 of SEQ ID NO: 913417
cucauuagucuauguuaca

SEQ ID NO: 925657 - RNA, 19 nt, Artificial Sequence
  Description of Artificial Sequence: Synthetic oligonucleotide
  Antisense strand to SEQ ID NO: 925656
uguaacauagacuaaugag

SEQ ID NO: 925658 - RNA, 19 nt, Artificial Sequence
  Description of Artificial Sequence: Synthetic oligonucleotide
  Sense strand starting at position 959 of SEQ ID NO: 913417
ccuaaaucugcaggucacu

SEQ ID NO: 925659 - RNA, 19 nt, Artificial Sequence
  Description of Artificial Sequence: Synthetic oligonucleotide
  Antisense strand to SEQ ID NO: 925658
agugaccugcagauuuagg

SEQ ID NO: 925660 - RNA, 19 nt, Artificial Sequence
  Description of Artificial Sequence: Synthetic oligonucleotide
  Sense strand starting at position 2551 of SEQ ID NO: 913417
ugguuaucuuaauugcauu

SEQ ID NO: 925661 - RNA, 19 nt, Artificial Sequence
  Description of Artificial Sequence: Synthetic oligonucleotide
  Antisense strand to SEQ ID NO: 925660
aaugcaauuaagauaacca

SEQ ID NO: 925662 - RNA, 19 nt, Artificial Sequence
  Description of Artificial Sequence: Synthetic oligonucleotide
  Sense strand starting at position 2213 of SEQ ID NO: 913417
ucacgacccgucugggaau

SEQ ID NO: 925663 - RNA, 19 nt, Artificial Sequence
  Description of Artificial Sequence: Synthetic oligonucleotide
  Antisense strand to SEQ ID NO: 925662
auucccagacgggucguga

SEQ ID NO: 925664 - RNA, 19 nt, Artificial Sequence
  Description of Artificial Sequence: Synthetic oligonucleotide
  Sense strand starting at position 998 of SEQ ID NO: 913417
ucucuuuaucccgguaaac

SEQ ID NO: 925665 - RNA, 19 nt, Artificial Sequence
  Description of Artificial Sequence: Synthetic oligonucleotide
  Antisense strand to SEQ ID NO: 925664
guuuaccgggauaaagaga

SEQ ID NO: 925666 - RNA, 19 nt, Artificial Sequence
  Description of Artificial Sequence: Synthetic oligonucleotide
  Sense strand starting at position 3274 of SEQ ID NO: 913417
cugugcuaggccuagaagu

SEQ ID NO: 925667 - RNA, 19 nt, Artificial Sequence
  Description of Artificial Sequence: Synthetic oligonucleotide
  Antisense strand to SEQ ID NO: 925666
acuucuaggccuagcacag

SEQ ID NO: 925668 - RNA, 19 nt, Artificial Sequence
  Description of Artificial Sequence: Synthetic oligonucleotide
  Sense strand starting at position 2776 of SEQ ID NO: 913417
uuucuuaucccugguuauc

SEQ ID NO: 925669 - RNA, 19 nt, Artificial Sequence
  Description of Artificial Sequence: Synthetic oligonucleotide
  Antisense strand to SEQ ID NO: 925668
gauaaccagggauaagaaa

SEQ ID NO: 925670 - RNA, 19 nt, Artificial Sequence
  Description of Artificial Sequence: Synthetic oligonucleotide
  Sense strand starting at position 2111 of SEQ ID NO: 913417
gcuguugugaauugaucca

SEQ ID NO: 925671 - RNA, 19 nt, Artificial Sequence
  Description of Artificial Sequence: Synthetic oligonucleotide
  Antisense strand to SEQ ID NO: 925670
uggaucaauucacaacagc

SEQ ID NO: 925672 - RNA, 19 nt, Artificial Sequence
  Description of Artificial Sequence: Synthetic oligonucleotide
  Sense strand starting at position 3946 of SEQ ID NO: 913417
ucuuuauccuguuuguuaa

SEQ ID NO: 925673 - RNA, 19 nt, Artificial Sequence
  Description of Artificial Sequence: Synthetic oligonucleotide
  Antisense strand to SEQ ID NO: 925672
uuaacaaacaggauaaaga

SEQ ID NO: 925674 - RNA, 19 nt, Artificial Sequence
  Description of Artificial Sequence: Synthetic oligonucleotide
  Sense strand starting at position 3656 of SEQ ID NO: 913417
uagacuuugcuccgggagu

SEQ ID NO: 925675 - RNA, 19 nt, Artificial Sequence
  Description of Artificial Sequence: Synthetic oligonucleotide
  Antisense strand to SEQ ID NO: 925674
acucccggagcaaagucua

SEQ ID NO: 925676 - RNA, 19 nt, Artificial Sequence
  Description of Artificial Sequence: Synthetic oligonucleotide
  Sense strand starting at position 3492 of SEQ ID NO: 913417
agaauaaugucagaaccca

SEQ ID NO: 925677 - RNA, 19 nt, Artificial Sequence
  Description of Artificial Sequence: Synthetic oligonucleotide
  Antisense strand to SEQ ID NO: 925676
uggguucugacauuauucu

SEQ ID NO: 925678 - RNA, 19 nt, Artificial Sequence
  Description of Artificial Sequence: Synthetic oligonucleotide
  Sense strand starting at position 2350 of SEQ ID NO: 913417
gguugucucguccacacuu

SEQ ID NO: 925679 - RNA, 19 nt, Artificial Sequence
  Description of Artificial Sequence: Synthetic oligonucleotide
  Antisense strand to SEQ ID NO: 925678
aaguguggacgagacaacc

SEQ ID NO: 925680 - RNA, 19 nt, Artificial Sequence
  Description of Artificial Sequence: Synthetic oligonucleotide
  Sense strand starting at position 1433 of SEQ ID NO: 913417
ggcagagcucagugauguc

SEQ ID NO: 925681 - RNA, 19 nt, Artificial Sequence
  Description of Artificial Sequence: Synthetic oligonucleotide
  Antisense strand to SEQ ID NO: 925680
gacaucacugagcucugcc

SEQ ID NO: 925682 - RNA, 19 nt, Artificial Sequence
  Description of Artificial Sequence: Synthetic oligonucleotide
  Sense strand starting at position 3487 of SEQ ID NO: 913417
auggaagaauaaugucaga

SEQ ID NO: 925683 - RNA, 19 nt, Artificial Sequence
  Description of Artificial Sequence: Synthetic oligonucleotide
  Antisense strand to SEQ ID NO: 925682
ucugacauuauucuuccau

SEQ ID NO: 925684 - RNA, 19 nt, Artificial Sequence
  Description of Artificial Sequence: Synthetic oligonucleotide
  Sense strand starting at position 170 of SEQ ID NO: 913417
gcaagaacauuacagaagu

SEQ ID NO: 925685 - RNA, 19 nt, Artificial Sequence
  Description of Artificial Sequence: Synthetic oligonucleotide
  Antisense strand to SEQ ID NO: 925684
acuucuguaauguucuugc

SEQ ID NO: 925686 - RNA, 19 nt, Artificial Sequence
  Description of Artificial Sequence: Synthetic oligonucleotide
  Sense strand starting at position 3328 of SEQ ID NO: 913417
cucuauaccuccuagagag

SEQ ID NO: 925687 - RNA, 19 nt, Artificial Sequence
  Description of Artificial Sequence: Synthetic oligonucleotide
  Antisense strand to SEQ ID NO: 925686
cucucuaggagguauagag

SEQ ID NO: 925688 - RNA, 19 nt, Artificial Sequence
  Description of Artificial Sequence: Synthetic oligonucleotide
  Sense strand starting at position 2506 of SEQ ID NO: 913417
gaagaaagcuuagacugua

SEQ ID NO: 925689 - RNA, 19 nt, Artificial Sequence
  Description of Artificial Sequence: Synthetic oligonucleotide
  Antisense strand to SEQ ID NO: 925688
uacagucuaagcuuucuuc

SEQ ID NO: 925690 - RNA, 19 nt, Artificial Sequence
  Description of Artificial Sequence: Synthetic oligonucleotide
  Sense strand starting at position 228 of SEQ ID NO: 913417
gaagcagacuaagauguau

SEQ ID NO: 925691 - RNA, 19 nt, Artificial Sequence
  Description of Artificial Sequence: Synthetic oligonucleotide
  Antisense strand to SEQ ID NO: 925690
auacaucuuagucugcuuc

SEQ ID NO: 925692 - RNA, 19 nt, Artificial Sequence
  Description of Artificial Sequence: Synthetic oligonucleotide
  Sense strand starting at position 207 of SEQ ID NO: 913417
ucaaguagauauugaggga

SEQ ID NO: 925693 - RNA, 19 nt, Artificial Sequence
  Description of Artificial Sequence: Synthetic oligonucleotide
  Antisense strand to SEQ ID NO: 925692
ucccucaauaucuacuuga

SEQ ID NO: 925694 - RNA, 19 nt, Artificial Sequence
  Description of Artificial Sequence: Synthetic oligonucleotide
  Sense strand starting at position 2161 of SEQ ID NO: 913417
gcgagcucaucccuacagu

SEQ ID NO: 925695 - RNA, 19 nt, Artificial Sequence
  Description of Artificial Sequence: Synthetic oligonucleotide
  Antisense strand to SEQ ID NO: 925694
acuguagggaugagcucgc

SEQ ID NO: 925696 - RNA, 19 nt, Artificial Sequence
  Description of Artificial Sequence: Synthetic oligonucleotide
  Sense strand starting at position 3474 of SEQ ID NO: 913417
cccacauggucuuauggaa

SEQ ID NO: 925697 - RNA, 19 nt, Artificial Sequence
  Description of Artificial Sequence: Synthetic oligonucleotide
  Antisense strand to SEQ ID NO: 925696
uuccauaagaccauguggg

SEQ ID NO: 925698 - RNA, 19 nt, Artificial Sequence
  Description of Artificial Sequence: Synthetic oligonucleotide
  Sense strand starting at position 1765 of SEQ ID NO: 913418
ccggcagagcucagugaug

SEQ ID NO: 925699 - RNA, 19 nt, Artificial Sequence
  Description of Artificial Sequence: Synthetic oligonucleotide
  Antisense strand to SEQ ID NO: 925698
caucacugagcucugccgg

SEQ ID NO: 925700 - RNA, 19 nt, Artificial Sequence
  Description of Artificial Sequence: Synthetic oligonucleotide
  Sense strand starting at position 2926 of SEQ ID NO: 913418
agguguacagaguacuuaa

SEQ ID NO: 925701 - RNA, 19 nt, Artificial Sequence
  Description of Artificial Sequence: Synthetic oligonucleotide
  Antisense strand to SEQ ID NO: 925700
uuaaguacucuguacaccu

SEQ ID NO: 925702 - RNA, 19 nt, Artificial Sequence
  Description of Artificial Sequence: Synthetic oligonucleotide
  Sense strand starting at position 2877 of SEQ ID NO: 913418
auacacucugguuaucuua

SEQ ID NO: 925703 - RNA, 19 nt, Artificial Sequence
  Description of Artificial Sequence: Synthetic oligonucleotide
  Antisense strand to SEQ ID NO: 925702
uaagauaaccagaguguau

SEQ ID NO: 925704 - RNA, 19 nt, Artificial Sequence
  Description of Artificial Sequence: Synthetic oligonucleotide
  Sense strand starting at position 3372 of SEQ ID NO: 913418
acgugaucucggcucagcu

SEQ ID NO: 925705 - RNA, 19 nt, Artificial Sequence
  Description of Artificial Sequence: Synthetic oligonucleotide
  Antisense strand to SEQ ID NO: 925704
agcugagccgagaucacgu

SEQ ID NO: 925706 - RNA, 19 nt, Artificial Sequence
  Description of Artificial Sequence: Synthetic oligonucleotide
  Sense strand starting at position 2873 of SEQ ID NO: 913418
gaggauacacucugguuau

SEQ ID NO: 925707 - RNA, 19 nt, Artificial Sequence
  Description of Artificial Sequence: Synthetic oligonucleotide
  Antisense strand to SEQ ID NO: 925706
auaaccagaguguauccuc

SEQ ID NO: 925708 - RNA, 19 nt, Artificial Sequence
  Description of Artificial Sequence: Synthetic oligonucleotide
  Sense strand starting at position 3598 of SEQ ID NO: 913418
gcgugagucacugugcuag

SEQ ID NO: 925709 - RNA, 19 nt, Artificial Sequence
  Description of Artificial Sequence: Synthetic oligonucleotide
  Antisense strand to SEQ ID NO: 925708
cuagcacagugacucacgc

SEQ ID NO: 925710 - RNA, 19 nt, Artificial Sequence
  Description of Artificial Sequence: Synthetic oligonucleotide
  Sense strand starting at position 2410 of SEQ ID NO: 913418
gggcgauuccggagccgaa

SEQ ID NO: 925711 - RNA, 19 nt, Artificial Sequence
  Description of Artificial Sequence: Synthetic oligonucleotide
  Antisense strand to SEQ ID NO: 925710
uucggcuccggaaucgccc

SEQ ID NO: 925712 - RNA, 19 nt, Artificial Sequence
  Description of Artificial Sequence: Synthetic oligonucleotide
  Sense strand starting at position 2524 of SEQ ID NO: 913418
agggaucacucaucuugua

SEQ ID NO: 925713 - RNA, 19 nt, Artificial Sequence
  Description of Artificial Sequence: Synthetic oligonucleotide
  Antisense strand to SEQ ID NO: 925712
uacaagaugagugaucccu

SEQ ID NO: 925714 - RNA, 19 nt, Artificial Sequence
  Description of Artificial Sequence: Synthetic oligonucleotide
  Sense strand starting at position 2747 of SEQ ID NO: 913418
ucccaauguccugaguuaa

SEQ ID NO: 925715 - RNA, 19 nt, Artificial Sequence
  Description of Artificial Sequence: Synthetic oligonucleotide
  Antisense strand to SEQ ID NO: 925714
uuaacucaggacauuggga

SEQ ID NO: 925716 - RNA, 19 nt, Artificial Sequence
  Description of Artificial Sequence: Synthetic oligonucleotide
  Sense strand starting at position 2719 of SEQ ID NO: 913418
auugaucccugguccuaaa

SEQ ID NO: 925717 - RNA, 19 nt, Artificial Sequence
  Description of Artificial Sequence: Synthetic oligonucleotide
  Antisense strand to SEQ ID NO: 925716
uuuaggaccagggaucaau

SEQ ID NO: 925718 - RNA, 19 nt, Artificial Sequence
  Description of Artificial Sequence: Synthetic oligonucleotide
  Sense strand starting at position 1247 of SEQ ID NO: 913418
gucccaaaggauggguuau

SEQ ID NO: 925719 - RNA, 19 nt, Artificial Sequence
  Description of Artificial Sequence: Synthetic oligonucleotide
  Antisense strand to SEQ ID NO: 925718
auaacccauccuuugggac

SEQ ID NO: 925720 - RNA, 19 nt, Artificial Sequence
  Description of Artificial Sequence: Synthetic oligonucleotide
  Sense strand starting at position 1334 of SEQ ID NO: 913418
ucuuuaucccgguaaacac

SEQ ID NO: 925721 - RNA, 19 nt, Artificial Sequence
  Description of Artificial Sequence: Synthetic oligonucleotide
  Antisense strand to SEQ ID NO: 925720
guguuuaccgggauaaaga

SEQ ID NO: 925722 - RNA, 19 nt, Artificial Sequence
  Description of Artificial Sequence: Synthetic oligonucleotide
  Sense strand starting at position 2843 of SEQ ID NO: 913418
gaaagcuuagacuguaacu

SEQ ID NO: 925723 - RNA, 19 nt, Artificial Sequence
  Description of Artificial Sequence: Synthetic oligonucleotide
  Antisense strand to SEQ ID NO: 925722
aguuacagucuaagcuuuc

SEQ ID NO: 925724 - RNA, 19 nt, Artificial Sequence
  Description of Artificial Sequence: Synthetic oligonucleotide
  Sense strand starting at position 1526 of SEQ ID NO: 913418
uucucauuagucuauguua

SEQ ID NO: 925725 - RNA, 19 nt, Artificial Sequence
  Description of Artificial Sequence: Synthetic oligonucleotide
  Antisense strand to SEQ ID NO: 925724
uaacauagacuaaugagaa

SEQ ID NO: 925726 - RNA, 19 nt, Artificial Sequence
  Description of Artificial Sequence: Synthetic oligonucleotide
  Sense strand starting at position 1529 of SEQ ID NO: 913418
ucauuagucuauguuacag

SEQ ID NO: 925727 - RNA, 19 nt, Artificial Sequence
  Description of Artificial Sequence: Synthetic oligonucleotide
  Antisense strand to SEQ ID NO: 925726
cuguaacauagacuaauga

SEQ ID NO: 925728 - RNA, 19 nt, Artificial Sequence
  Description of Artificial Sequence: Synthetic oligonucleotide
  Sense strand starting at position 1477 of SEQ ID NO: 913418
gcacuucuugauuacuguu

SEQ ID NO: 925729 - RNA, 19 nt, Artificial Sequence
  Description of Artificial Sequence: Synthetic oligonucleotide
  Antisense strand to SEQ ID NO: 925728
aacaguaaucaagaagugc

SEQ ID NO: 925730 - RNA, 19 nt, Artificial Sequence
  Description of Artificial Sequence: Synthetic oligonucleotide
  Sense strand starting at position 2386 of SEQ ID NO: 913418
gccucaggucuaugacaca

SEQ ID NO: 925731 - RNA, 19 nt, Artificial Sequence
  Description of Artificial Sequence: Synthetic oligonucleotide
  Antisense strand to SEQ ID NO: 925730
ugugucauagaccugaggc

SEQ ID NO: 925732 - RNA, 19 nt, Artificial Sequence
  Description of Artificial Sequence: Synthetic oligonucleotide
  Sense strand starting at position 1485 of SEQ ID NO: 913418
ugauuacuguugcuggaua

SEQ ID NO: 925733 - RNA, 19 nt, Artificial Sequence
  Description of Artificial Sequence: Synthetic oligonucleotide
  Antisense strand to SEQ ID NO: 925732
uauccagcaacaguaauca

SEQ ID NO: 925734 - RNA, 19 nt, Artificial Sequence
  Description of Artificial Sequence: Synthetic oligonucleotide
  Sense strand starting at position 1528 of SEQ ID NO: 913418
cucauuagucuauguuaca

SEQ ID NO: 925735 - RNA, 19 nt, Artificial Sequence
  Description of Artificial Sequence: Synthetic oligonucleotide
  Antisense strand to SEQ ID NO: 925734
uguaacauagacuaaugag

SEQ ID NO: 925736 - RNA, 19 nt, Artificial Sequence
  Description of Artificial Sequence: Synthetic oligonucleotide
  Sense strand starting at position 1293 of SEQ ID NO: 913418
ccuaaaucugcaggucacu

SEQ ID NO: 925737 - RNA, 19 nt, Artificial Sequence
  Description of Artificial Sequence: Synthetic oligonucleotide
  Antisense strand to SEQ ID NO: 925736
agugaccugcagauuuagg

SEQ ID NO: 925738 - RNA, 19 nt, Artificial Sequence
  Description of Artificial Sequence: Synthetic oligonucleotide
  Sense strand starting at position 2885 of SEQ ID NO: 913418
ugguuaucuuaauugcauu

SEQ ID NO: 925739 - RNA, 19 nt, Artificial Sequence
  Description of Artificial Sequence: Synthetic oligonucleotide
  Antisense strand to SEQ ID NO: 925738
aaugcaauuaagauaacca

SEQ ID NO: 925740 - RNA, 19 nt, Artificial Sequence
  Description of Artificial Sequence: Synthetic oligonucleotide
  Sense strand starting at position 2547 of SEQ ID NO: 913418
ucacgacccgucugggaau

SEQ ID NO: 925741 - RNA, 19 nt, Artificial Sequence
  Description of Artificial Sequence: Synthetic oligonucleotide
  Antisense strand to SEQ ID NO: 925740
auucccagacgggucguga

SEQ ID NO: 925742 - RNA, 19 nt, Artificial Sequence
  Description of Artificial Sequence: Synthetic oligonucleotide
  Sense strand starting at position 1332 of SEQ ID NO: 913418
ucucuuuaucccgguaaac

SEQ ID NO: 925743 - RNA, 19 nt, Artificial Sequence
  Description of Artificial Sequence: Synthetic oligonucleotide
  Antisense strand to SEQ ID NO: 925742
guuuaccgggauaaagaga

SEQ ID NO: 925744 - RNA, 19 nt, Artificial Sequence
  Description of Artificial Sequence: Synthetic oligonucleotide
  Sense strand starting at position 3608 of SEQ ID NO: 913418
cugugcuaggccuagaagu

SEQ ID NO: 925745 - RNA, 19 nt, Artificial Sequence
  Description of Artificial Sequence: Synthetic oligonucleotide
  Antisense strand to SEQ ID NO: 925744
acuucuaggccuagcacag

SEQ ID NO: 925746 - RNA, 19 nt, Artificial Sequence
  Description of Artificial Sequence: Synthetic oligonucleotide
  Sense strand starting at position 3110 of SEQ ID NO: 913418
uuucuuaucccugguuauc

SEQ ID NO: 925747 - RNA, 19 nt, Artificial Sequence
  Description of Artificial Sequence: Synthetic oligonucleotide
  Antisense strand to SEQ ID NO: 925746
gauaaccagggauaagaaa

SEQ ID NO: 925748 - RNA, 19 nt, Artificial Sequence
  Description of Artificial Sequence: Synthetic oligonucleotide
  Sense strand starting at position 2445 of SEQ ID NO: 913418
gcuguugugaauugaucca

SEQ ID NO: 925749 - RNA, 19 nt, Artificial Sequence
  Description of Artificial Sequence: Synthetic oligonucleotide
  Antisense strand to SEQ ID NO: 925748
uggaucaauucacaacagc

SEQ ID NO: 925750 - RNA, 19 nt, Artificial Sequence
  Description of Artificial Sequence: Synthetic oligonucleotide
  Sense strand starting at position 3826 of SEQ ID NO: 913418
agaauaaugucagaaccca

SEQ ID NO: 925751 - RNA, 19 nt, Artificial Sequence
  Description of Artificial Sequence: Synthetic oligonucleotide
  Antisense strand to SEQ ID NO: 925750
uggguucugacauuauucu

SEQ ID NO: 925752 - RNA, 19 nt, Artificial Sequence
  Description of Artificial Sequence: Synthetic oligonucleotide
  Sense strand starting at position 2684 of SEQ ID NO: 913418
gguugucucguccacacuu

SEQ ID NO: 925753 - RNA, 19 nt, Artificial Sequence
  Description of Artificial Sequence: Synthetic oligonucleotide
  Antisense strand to SEQ ID NO: 925752
aaguguggacgagacaacc

SEQ ID NO: 925754 - RNA, 19 nt, Artificial Sequence
  Description of Artificial Sequence: Synthetic oligonucleotide
  Sense strand starting at position 1767 of SEQ ID NO: 913418
ggcagagcucagugauguc

SEQ ID NO: 925755 - RNA, 19 nt, Artificial Sequence
  Description of Artificial Sequence: Synthetic oligonucleotide
  Antisense strand to SEQ ID NO: 925754
gacaucacugagcucugcc

SEQ ID NO: 925756 - RNA, 19 nt, Artificial Sequence
  Description of Artificial Sequence: Synthetic oligonucleotide
  Sense strand starting at position 3821 of SEQ ID NO: 913418
auggaagaauaaugucaga

SEQ ID NO: 925757 - RNA, 19 nt, Artificial Sequence
  Description of Artificial Sequence: Synthetic oligonucleotide
  Antisense strand to SEQ ID NO: 925756
ucugacauuauucuuccau

SEQ ID NO: 925758 - RNA, 19 nt, Artificial Sequence
  Description of Artificial Sequence: Synthetic oligonucleotide
  Sense strand starting at position 504 of SEQ ID NO: 913418
gcaagaacauuacagaagu

SEQ ID NO: 925759 - RNA, 19 nt, Artificial Sequence
  Description of Artificial Sequence: Synthetic oligonucleotide
  Antisense strand to SEQ ID NO: 925758
acuucuguaauguucuugc

SEQ ID NO: 925760 - RNA, 19 nt, Artificial Sequence
  Description of Artificial Sequence: Synthetic oligonucleotide
  Sense strand starting at position 3662 of SEQ ID NO: 913418
cucuauaccuccuagagag

SEQ ID NO: 925761 - RNA, 19 nt, Artificial Sequence
  Description of Artificial Sequence: Synthetic oligonucleotide
  Antisense strand to SEQ ID NO: 925760
cucucuaggagguauagag

SEQ ID NO: 925762 - RNA, 19 nt, Artificial Sequence
  Description of Artificial Sequence: Synthetic oligonucleotide
  Sense strand starting at position 2840 of SEQ ID NO: 913418
gaagaaagcuuagacugua

SEQ ID NO: 925763 - RNA, 19 nt, Artificial Sequence
  Description of Artificial Sequence: Synthetic oligonucleotide
  Antisense strand to SEQ ID NO: 925762
uacagucuaagcuuucuuc

SEQ ID NO: 925764 - RNA, 19 nt, Artificial Sequence
  Description of Artificial Sequence: Synthetic oligonucleotide
  Sense strand starting at position 562 of SEQ ID NO: 913418
gaagcagacuaagauguau

SEQ ID NO: 925765 - RNA, 19 nt, Artificial Sequence
  Description of Artificial Sequence: Synthetic oligonucleotide
  Antisense strand to SEQ ID NO: 925764
auacaucuuagucugcuuc

SEQ ID NO: 925766 - RNA, 19 nt, Artificial Sequence
  Description of Artificial Sequence: Synthetic oligonucleotide
  Sense strand starting at position 541 of SEQ ID NO: 913418
ucaaguagauauugaggga

SEQ ID NO: 925767 - RNA, 19 nt, Artificial Sequence
  Description of Artificial Sequence: Synthetic oligonucleotide
  Antisense strand to SEQ ID NO: 925766
ucccucaauaucuacuuga

SEQ ID NO: 925768 - RNA, 19 nt, Artificial Sequence
  Description of Artificial Sequence: Synthetic oligonucleotide
  Sense strand starting at position 2495 of SEQ ID NO: 913418
gcgagcucaucccuacagu

SEQ ID NO: 925769 - RNA, 19 nt, Artificial Sequence
  Description of Artificial Sequence: Synthetic oligonucleotide
  Antisense strand to SEQ ID NO: 925768
acuguagggaugagcucgc

SEQ ID NO: 925770 - RNA, 19 nt, Artificial Sequence
  Description of Artificial Sequence: Synthetic oligonucleotide
  Sense strand starting at position 3808 of SEQ ID NO: 913418
cccacauggucuuauggaa

SEQ ID NO: 925771 - RNA, 19 nt, Artificial Sequence
  Description of Artificial Sequence: Synthetic oligonucleotide
  Antisense strand to SEQ ID NO: 925770
uuccauaagaccauguggg

SEQ ID NO: 925772 - RNA, 19 nt, Artificial Sequence
  Description of Artificial Sequence: Synthetic oligonucleotide
  Sense strand starting at position 2653 of SEQ ID NO: 913418
aaagauugcucagggaauc

SEQ ID NO: 925773 - RNA, 19 nt, Artificial Sequence
  Description of Artificial Sequence: Synthetic oligonucleotide
  Antisense strand to SEQ ID NO: 925772
gauucccugagcaaucuuu

SEQ ID NO: 925774 - RNA, 19 nt, Artificial Sequence
  Description of Artificial Sequence: Synthetic oligonucleotide
  Sense strand starting at position 1239 of SEQ ID NO: 913418
cuagucaugucccaaagga

SEQ ID NO: 925775 - RNA, 19 nt, Artificial Sequence
  Description of Artificial Sequence: Synthetic oligonucleotide
  Antisense strand to SEQ ID NO: 925774
uccuuugggacaugacuag

SEQ ID NO: 925776 - RNA, 19 nt, Artificial Sequence
  Description of Artificial Sequence: Synthetic oligonucleotide
  Sense strand starting at position 2874 of SEQ ID NO: 913418
aggauacacucugguuauc

SEQ ID NO: 925777 - RNA, 19 nt, Artificial Sequence
  Description of Artificial Sequence: Synthetic oligonucleotide
  Antisense strand to SEQ ID NO: 925776
gauaaccagaguguauccu

SEQ ID NO: 925778 - RNA, 19 nt, Artificial Sequence
  Description of Artificial Sequence: Synthetic oligonucleotide
  Sense strand starting at position 2782 of SEQ ID NO: 913419
guuuccuccguguuuaacu

SEQ ID NO: 925779 - RNA, 19 nt, Artificial Sequence
  Description of Artificial Sequence: Synthetic oligonucleotide
  Antisense strand to SEQ ID NO: 925778
aguuaaacacggaggaaac

SEQ ID NO: 925780 - RNA, 19 nt, Artificial Sequence
  Description of Artificial Sequence: Synthetic oligonucleotide
  Sense strand starting at position 957 of SEQ ID NO: 913419
cccuuucuucgggagagga

SEQ ID NO: 925781 - RNA, 19 nt, Artificial Sequence
  Description of Artificial Sequence: Synthetic oligonucleotide
  Antisense strand to SEQ ID NO: 925780
uccucucccgaagaaaggg

SEQ ID NO: 925782 - RNA, 19 nt, Artificial Sequence
  Description of Artificial Sequence: Synthetic oligonucleotide
  Sense strand starting at position 331 of SEQ ID NO: 913419
acuguaaaucucugggaaa

SEQ ID NO: 925783 - RNA, 19 nt, Artificial Sequence
  Description of Artificial Sequence: Synthetic oligonucleotide
  Antisense strand to SEQ ID NO: 925782
uuucccagagauuuacagu

SEQ ID NO: 925784 - RNA, 19 nt, Artificial Sequence
  Description of Artificial Sequence: Synthetic oligonucleotide
  Sense strand starting at position 3743 of SEQ ID NO: 913419
gucuuaaaugggcaauaua

SEQ ID NO: 925785 - RNA, 19 nt, Artificial Sequence
  Description of Artificial Sequence: Synthetic oligonucleotide
  Antisense strand to SEQ ID NO: 925784
uauauugcccauuuaagac

SEQ ID NO: 925786 - RNA, 19 nt, Artificial Sequence
  Description of Artificial Sequence: Synthetic oligonucleotide
  Sense strand starting at position 282 of SEQ ID NO: 913419
gcaagugguaaugaucaaa

SEQ ID NO: 925787 - RNA, 19 nt, Artificial Sequence
  Description of Artificial Sequence: Synthetic oligonucleotide
  Antisense strand to SEQ ID NO: 925786
uuugaucauuaccacuugc

SEQ ID NO: 925788 - RNA, 19 nt, Artificial Sequence
  Description of Artificial Sequence: Synthetic oligonucleotide
  Sense strand starting at position 103 of SEQ ID NO: 913419
gaguuaagguuccuauaaa

SEQ ID NO: 925789 - RNA, 19 nt, Artificial Sequence
  Description of Artificial Sequence: Synthetic oligonucleotide
  Antisense strand to SEQ ID NO: 925788
uuuauaggaaccuuaacuc

SEQ ID NO: 925790 - RNA, 19 nt, Artificial Sequence
  Description of Artificial Sequence: Synthetic oligonucleotide
  Sense strand starting at position 177 of SEQ ID NO: 913419
ggauaaauaugcucggaau

SEQ ID NO: 925791 - RNA, 19 nt, Artificial Sequence
  Description of Artificial Sequence: Synthetic oligonucleotide
  Antisense strand to SEQ ID NO: 925790
auuccgagcauauuuaucc

SEQ ID NO: 925792 - RNA, 19 nt, Artificial Sequence
  Description of Artificial Sequence: Synthetic oligonucleotide
  Sense strand starting at position 3742 of SEQ ID NO: 913419
agucuuaaaugggcaauau

SEQ ID NO: 925793 - RNA, 19 nt, Artificial Sequence
  Description of Artificial Sequence: Synthetic oligonucleotide
  Antisense strand to SEQ ID NO: 925792
auauugcccauuuaagacu

SEQ ID NO: 925794 - RNA, 19 nt, Artificial Sequence
  Description of Artificial Sequence: Synthetic oligonucleotide
  Sense strand starting at position 513 of SEQ ID NO: 913419
uuuaguagaagucgagaga

SEQ ID NO: 925795 - RNA, 19 nt, Artificial Sequence
  Description of Artificial Sequence: Synthetic oligonucleotide
  Antisense strand to SEQ ID NO: 925794
ucucucgacuucuacuaaa

SEQ ID NO: 925796 - RNA, 19 nt, Artificial Sequence
  Description of Artificial Sequence: Synthetic oligonucleotide
  Sense strand starting at position 3464 of SEQ ID NO: 913419
ucgguuauuugcccucaca

SEQ ID NO: 925797 - RNA, 19 nt, Artificial Sequence
  Description of Artificial Sequence: Synthetic oligonucleotide
  Antisense strand to SEQ ID NO: 925796
ugugagggcaaauaaccga

SEQ ID NO: 925798 - RNA, 19 nt, Artificial Sequence
  Description of Artificial Sequence: Synthetic oligonucleotide
  Sense strand starting at position 178 of SEQ ID NO: 913419
gauaaauaugcucggaauu

SEQ ID NO: 925799 - RNA, 19 nt, Artificial Sequence
  Description of Artificial Sequence: Synthetic oligonucleotide
  Antisense strand to SEQ ID NO: 925798
aauuccgagcauauuuauc

SEQ ID NO: 925800 - RNA, 19 nt, Artificial Sequence
  Description of Artificial Sequence: Synthetic oligonucleotide
  Sense strand starting at position 58 of SEQ ID NO: 913419
auaucaacuguuuagugua

SEQ ID NO: 925801 - RNA, 19 nt, Artificial Sequence
  Description of Artificial Sequence: Synthetic oligonucleotide
  Antisense strand to SEQ ID NO: 925800
uacacuaaacaguugauau

SEQ ID NO: 925802 - RNA, 19 nt, Artificial Sequence
  Description of Artificial Sequence: Synthetic oligonucleotide
  Sense strand starting at position 3552 of SEQ ID NO: 913419
aagguuaugcuguauacac

SEQ ID NO: 925803 - RNA, 19 nt, Artificial Sequence
  Description of Artificial Sequence: Synthetic oligonucleotide
  Antisense strand to SEQ ID NO: 925802
guguauacagcauaaccuu

SEQ ID NO: 925804 - RNA, 19 nt, Artificial Sequence
  Description of Artificial Sequence: Synthetic oligonucleotide
  Sense strand starting at position 503 of SEQ ID NO: 913419
gagugcauccuuuaguaga

SEQ ID NO: 925805 - RNA, 19 nt, Artificial Sequence
  Description of Artificial Sequence: Synthetic oligonucleotide
  Antisense strand to SEQ ID NO: 925804
ucuacuaaaggaugcacuc

SEQ ID NO: 925806 - RNA, 19 nt, Artificial Sequence
  Description of Artificial Sequence: Synthetic oligonucleotide
  Sense strand starting at position 12 of SEQ ID NO: 913419
agagucucauaacuuguua

SEQ ID NO: 925807 - RNA, 19 nt, Artificial Sequence
  Description of Artificial Sequence: Synthetic oligonucleotide
  Antisense strand to SEQ ID NO: 925806
uaacaaguuaugagacucu

SEQ ID NO: 925808 - RNA, 19 nt, Artificial Sequence
  Description of Artificial Sequence: Synthetic oligonucleotide
  Sense strand starting at position 3554 of SEQ ID NO: 913419
gguuaugcuguauacacau

SEQ ID NO: 925809 - RNA, 19 nt, Artificial Sequence
  Description of Artificial Sequence: Synthetic oligonucleotide
  Antisense strand to SEQ ID NO: 925808
auguguauacagcauaacc

SEQ ID NO: 925810 - RNA, 19 nt, Artificial Sequence
  Description of Artificial Sequence: Synthetic oligonucleotide
  Sense strand starting at position 68 of SEQ ID NO: 913419
uuuaguguagcuuauaaug

SEQ ID NO: 925811 - RNA, 19 nt, Artificial Sequence
  Description of Artificial Sequence: Synthetic oligonucleotide
  Antisense strand to SEQ ID NO: 925810
cauuauaagcuacacuaaa

SEQ ID NO: 925812 - RNA, 19 nt, Artificial Sequence
  Description of Artificial Sequence: Synthetic oligonucleotide
  Sense strand starting at position 3690 of SEQ ID NO: 913419
ugaaauaaauucguuguca

SEQ ID NO: 925813 - RNA, 19 nt, Artificial Sequence
  Description of Artificial Sequence: Synthetic oligonucleotide
  Antisense strand to SEQ ID NO: 925812
ugacaacgaauuuauuuca

SEQ ID NO: 925814 - RNA, 19 nt, Artificial Sequence
  Description of Artificial Sequence: Synthetic oligonucleotide
  Sense strand starting at position 3691 of SEQ ID NO: 913419
gaaauaaauucguugucau

SEQ ID NO: 925815 - RNA, 19 nt, Artificial Sequence
  Description of Artificial Sequence: Synthetic oligonucleotide
  Antisense strand to SEQ ID NO: 925814
augacaacgaauuuauuuc

SEQ ID NO: 925816 - RNA, 19 nt, Artificial Sequence
  Description of Artificial Sequence: Synthetic oligonucleotide
  Sense strand starting at position 78 of SEQ ID NO: 913419
cuuauaauguguuuccaga

SEQ ID NO: 925817 - RNA, 19 nt, Artificial Sequence
  Description of Artificial Sequence: Synthetic oligonucleotide
  Antisense strand to SEQ ID NO: 925816
ucuggaaacacauuauaag

SEQ ID NO: 925818 - RNA, 19 nt, Artificial Sequence
  Description of Artificial Sequence: Synthetic oligonucleotide
  Sense strand starting at position 356 of SEQ ID NO: 913419
augccauaucacugucaag

SEQ ID NO: 925819 - RNA, 19 nt, Artificial Sequence
  Description of Artificial Sequence: Synthetic oligonucleotide
  Antisense strand to SEQ ID NO: 925818
cuugacagugauauggcau

SEQ ID NO: 925820 - RNA, 19 nt, Artificial Sequence
  Description of Artificial Sequence: Synthetic oligonucleotide
  Sense strand starting at position 445 of SEQ ID NO: 913419
gaccuaugcugacauuuag

SEQ ID NO: 925821 - RNA, 19 nt, Artificial Sequence
  Description of Artificial Sequence: Synthetic oligonucleotide
  Antisense strand to SEQ ID NO: 925820
cuaaaugucagcauagguc

SEQ ID NO: 925822 - RNA, 19 nt, Artificial Sequence
  Description of Artificial Sequence: Synthetic oligonucleotide
  Sense strand starting at position 954 of SEQ ID NO: 913419
gagcccuuucuucgggaga

SEQ ID NO: 925823 - RNA, 19 nt, Artificial Sequence
  Description of Artificial Sequence: Synthetic oligonucleotide
  Antisense strand to SEQ ID NO: 925822
ucucccgaagaaagggcuc

SEQ ID NO: 925824 - RNA, 19 nt, Artificial Sequence
  Description of Artificial Sequence: Synthetic oligonucleotide
  Sense strand starting at position 2790 of SEQ ID NO: 913419
cguguuuaacuuuaauccu

SEQ ID NO: 925825 - RNA, 19 nt, Artificial Sequence
  Description of Artificial Sequence: Synthetic oligonucleotide
  Antisense strand to SEQ ID NO: 925824
aggauuaaaguuaaacacg

SEQ ID NO: 925826 - RNA, 19 nt, Artificial Sequence
  Description of Artificial Sequence: Synthetic oligonucleotide
  Sense strand starting at position 63 of SEQ ID NO: 913419
aacuguuuaguguagcuua

SEQ ID NO: 925827 - RNA, 19 nt, Artificial Sequence
  Description of Artificial Sequence: Synthetic oligonucleotide
  Antisense strand to SEQ ID NO: 925826
uaagcuacacuaaacaguu

SEQ ID NO: 925828 - RNA, 19 nt, Artificial Sequence
  Description of Artificial Sequence: Synthetic oligonucleotide
  Sense strand starting at position 3694 of SEQ ID NO: 913419
auaaauucguugucauauc

SEQ ID NO: 925829 - RNA, 19 nt, Artificial Sequence
  Description of Artificial Sequence: Synthetic oligonucleotide
  Antisense strand to SEQ ID NO: 925828
gauaugacaacgaauuuau

SEQ ID NO: 925830 - RNA, 19 nt, Artificial Sequence
  Description of Artificial Sequence: Synthetic oligonucleotide
  Sense strand starting at position 376 of SEQ ID NO: 913419
ccaagugacugcguaaaca

SEQ ID NO: 925831 - RNA, 19 nt, Artificial Sequence
  Description of Artificial Sequence: Synthetic oligonucleotide
  Antisense strand to SEQ ID NO: 925830
uguuuacgcagucacuugg

SEQ ID NO: 925832 - RNA, 19 nt, Artificial Sequence
  Description of Artificial Sequence: Synthetic oligonucleotide
  Sense strand starting at position 165 of SEQ ID NO: 913419
acacuugcauuuggauaaa

SEQ ID NO: 925833 - RNA, 19 nt, Artificial Sequence
  Description of Artificial Sequence: Synthetic oligonucleotide
  Antisense strand to SEQ ID NO: 925832
uuuauccaaaugcaagugu

SEQ ID NO: 925834 - RNA, 19 nt, Artificial Sequence
  Description of Artificial Sequence: Synthetic oligonucleotide
  Sense strand starting at position 386 of SEQ ID NO: 913419
gcguaaacauaugcaauca

SEQ ID NO: 925835 - RNA, 19 nt, Artificial Sequence
  Description of Artificial Sequence: Synthetic oligonucleotide
  Antisense strand to SEQ ID NO: 925834
ugauugcauauguuuacgc

SEQ ID NO: 925836 - RNA, 19 nt, Artificial Sequence
  Description of Artificial Sequence: Synthetic oligonucleotide
  Sense strand starting at position 76 of SEQ ID NO: 913419
agcuuauaauguguuucca

SEQ ID NO: 925837 - RNA, 19 nt, Artificial Sequence
  Description of Artificial Sequence: Synthetic oligonucleotide
  Antisense strand to SEQ ID NO: 925836
uggaaacacauuauaagcu

SEQ ID NO: 925838 - RNA, 19 nt, Artificial Sequence
  Description of Artificial Sequence: Synthetic oligonucleotide
  Sense strand starting at position 501 of SEQ ID NO: 913419
cugagugcauccuuuagua

SEQ ID NO: 925839 - RNA, 19 nt, Artificial Sequence
  Description of Artificial Sequence: Synthetic oligonucleotide
  Antisense strand to SEQ ID NO: 925838
uacuaaaggaugcacucag

SEQ ID NO: 925840 - RNA, 19 nt, Artificial Sequence
  Description of Artificial Sequence: Synthetic oligonucleotide
  Sense strand starting at position 3432 of SEQ ID NO: 913419
aagcguuuccucggaaaua

SEQ ID NO: 925841 - RNA, 19 nt, Artificial Sequence
  Description of Artificial Sequence: Synthetic oligonucleotide
  Antisense strand to SEQ ID NO: 925840
uauuuccgaggaaacgcuu

SEQ ID NO: 925842 - RNA, 19 nt, Artificial Sequence
  Description of Artificial Sequence: Synthetic oligonucleotide
  Sense strand starting at position 2787 of SEQ ID NO: 913419
cuccguguuuaacuuuaau

SEQ ID NO: 925843 - RNA, 19 nt, Artificial Sequence
  Description of Artificial Sequence: Synthetic oligonucleotide
  Antisense strand to SEQ ID NO: 925842
auuaaaguuaaacacggag

SEQ ID NO: 925844 - RNA, 19 nt, Artificial Sequence
  Description of Artificial Sequence: Synthetic oligonucleotide
  Sense strand starting at position 91 of SEQ ID NO: 913419
uccagaacaugggaguuaa

SEQ ID NO: 925845 - RNA, 19 nt, Artificial Sequence
  Description of Artificial Sequence: Synthetic oligonucleotide
  Antisense strand to SEQ ID NO: 925844
uuaacucccauguucugga

SEQ ID NO: 925846 - RNA, 19 nt, Artificial Sequence
  Description of Artificial Sequence: Synthetic oligonucleotide
  Sense strand starting at position 2210 of SEQ ID NO: 913419
ggaauuagugucgguguag

SEQ ID NO: 925847 - RNA, 19 nt, Artificial Sequence
  Description of Artificial Sequence: Synthetic oligonucleotide
  Antisense strand to SEQ ID NO: 925846
cuacaccgacacuaauucc

SEQ ID NO: 925848 - RNA, 19 nt, Artificial Sequence
  Description of Artificial Sequence: Synthetic oligonucleotide
  Sense strand starting at position 66 of SEQ ID NO: 913419
uguuuaguguagcuuauaa

SEQ ID NO: 925849 - RNA, 19 nt, Artificial Sequence
  Description of Artificial Sequence: Synthetic oligonucleotide
  Antisense strand to SEQ ID NO: 925848
uuauaagcuacacuaaaca

SEQ ID NO: 925850 - RNA, 19 nt, Artificial Sequence
  Description of Artificial Sequence: Synthetic oligonucleotide
  Sense strand starting at position 2211 of SEQ ID NO: 913419
gaauuagugucgguguagu

SEQ ID NO: 925851 - RNA, 19 nt, Artificial Sequence
  Description of Artificial Sequence: Synthetic oligonucleotide
  Antisense strand to SEQ ID NO: 925850
acuacaccgacacuaauuc

SEQ ID NO: 925852 - RNA, 19 nt, Artificial Sequence
  Description of Artificial Sequence: Synthetic oligonucleotide
  Sense strand starting at position 129 of SEQ ID NO: 913419
uugaacuacucauaacguu

SEQ ID NO: 925853 - RNA, 19 nt, Artificial Sequence
  Description of Artificial Sequence: Synthetic oligonucleotide
  Antisense strand to SEQ ID NO: 925852
aacguuaugaguaguucaa

SEQ ID NO: 925854 - RNA, 19 nt, Artificial Sequence
  Description of Artificial Sequence: Synthetic oligonucleotide
  Sense strand starting at position 2779 of SEQ ID NO: 913419
aucguuuccuccguguuua

SEQ ID NO: 925855 - RNA, 19 nt, Artificial Sequence
  Description of Artificial Sequence: Synthetic oligonucleotide
  Antisense strand to SEQ ID NO: 925854
uaaacacggaggaaacgau

SEQ ID NO: 925856 - RNA, 19 nt, Artificial Sequence
  Description of Artificial Sequence: Synthetic oligonucleotide
  Sense strand starting at position 2780 of SEQ ID NO: 913419
ucguuuccuccguguuuaa

SEQ ID NO: 925857 - RNA, 19 nt, Artificial Sequence
  Description of Artificial Sequence: Synthetic oligonucleotide
  Antisense strand to SEQ ID NO: 925856
uuaaacacggaggaaacga

SEQ ID NO: 925858 - RNA, 19 nt, Artificial Sequence
  Description of Artificial Sequence: Synthetic oligonucleotide
  Sense strand starting at position 3282 of SEQ ID NO: 913420
ugaagagguguuuagauuc

SEQ ID NO: 925859 - RNA, 19 nt, Artificial Sequence
  Description of Artificial Sequence: Synthetic oligonucleotide
  Antisense strand to SEQ ID NO: 925858
gaaucuaaacaccucuuca

SEQ ID NO: 925860 - RNA, 19 nt, Artificial Sequence
  Description of Artificial Sequence: Synthetic oligonucleotide
  Sense strand starting at position 892 of SEQ ID NO: 913420
cguuguaaggauuaaauga

SEQ ID NO: 925861 - RNA, 19 nt, Artificial Sequence
  Description of Artificial Sequence: Synthetic oligonucleotide
  Antisense strand to SEQ ID NO: 925860
ucauuuaauccuuacaacg

SEQ ID NO: 925862 - RNA, 19 nt, Artificial Sequence
  Description of Artificial Sequence: Synthetic oligonucleotide
  Sense strand starting at position 3302 of SEQ ID NO: 913420
aggguauucccuuauauuc

SEQ ID NO: 925863 - RNA, 19 nt, Artificial Sequence
  Description of Artificial Sequence: Synthetic oligonucleotide
  Antisense strand to SEQ ID NO: 925862
gaauauaagggaauacccu

SEQ ID NO: 925864 - RNA, 19 nt, Artificial Sequence
  Description of Artificial Sequence: Synthetic oligonucleotide
  Sense strand starting at position 509 of SEQ ID NO: 913420
aucagagaauugcccauau

SEQ ID NO: 925865 - RNA, 19 nt, Artificial Sequence
  Description of Artificial Sequence: Synthetic oligonucleotide
  Antisense strand to SEQ ID NO: 925864
auaugggcaauucucugau

SEQ ID NO: 925866 - RNA, 19 nt, Artificial Sequence
  Description of Artificial Sequence: Synthetic oligonucleotide
  Sense strand starting at position 1145 of SEQ ID NO: 913420
ggcaauccagcagaaaguu

SEQ ID NO: 925867 - RNA, 19 nt, Artificial Sequence
  Description of Artificial Sequence: Synthetic oligonucleotide
  Antisense strand to SEQ ID NO: 925866
aacuuucugcuggauugcc

SEQ ID NO: 925868 - RNA, 19 nt, Artificial Sequence
  Description of Artificial Sequence: Synthetic oligonucleotide
  Sense strand starting at position 2840 of SEQ ID NO: 913420
gaauuccagcggcauaaga

SEQ ID NO: 925869 - RNA, 19 nt, Artificial Sequence
  Description of Artificial Sequence: Synthetic oligonucleotide
  Antisense strand to SEQ ID NO: 925868
ucuuaugccgcuggaauuc

SEQ ID NO: 925870 - RNA, 19 nt, Artificial Sequence
  Description of Artificial Sequence: Synthetic oligonucleotide
  Sense strand starting at position 3332 of SEQ ID NO: 913420
uuugaauucccguguauuu

SEQ ID NO: 925871 - RNA, 19 nt, Artificial Sequence
  Description of Artificial Sequence: Synthetic oligonucleotide
  Antisense strand to SEQ ID NO: 925870
aaauacacgggaauucaaa

SEQ ID NO: 925872 - RNA, 19 nt, Artificial Sequence
  Description of Artificial Sequence: Synthetic oligonucleotide
  Sense strand starting at position 3269 of SEQ ID NO: 913420
acacauucuugccugaaga

SEQ ID NO: 925873 - RNA, 19 nt, Artificial Sequence
  Description of Artificial Sequence: Synthetic oligonucleotide
  Antisense strand to SEQ ID NO: 925872
ucuucaggcaagaaugugu

SEQ ID NO: 925874 - RNA, 19 nt, Artificial Sequence
  Description of Artificial Sequence: Synthetic oligonucleotide
  Sense strand starting at position 2564 of SEQ ID NO: 913420
gaaauaaggucgcugggaa

SEQ ID NO: 925875 - RNA, 19 nt, Artificial Sequence
  Description of Artificial Sequence: Synthetic oligonucleotide
  Antisense strand to SEQ ID NO: 925874
uucccagcgaccuuauuuc

SEQ ID NO: 925876 - RNA, 19 nt, Artificial Sequence
  Description of Artificial Sequence: Synthetic oligonucleotide
  Sense strand starting at position 277 of SEQ ID NO: 913420
cccucuuugacggaagguu

SEQ ID NO: 925877 - RNA, 19 nt, Artificial Sequence
  Description of Artificial Sequence: Synthetic oligonucleotide
  Antisense strand to SEQ ID NO: 925876
aaccuuccgucaaagaggg

SEQ ID NO: 925878 - RNA, 19 nt, Artificial Sequence
  Description of Artificial Sequence: Synthetic oligonucleotide
  Sense strand starting at position 882 of SEQ ID NO: 913420
aaaccagaaucguuguaag

SEQ ID NO: 925879 - RNA, 19 nt, Artificial Sequence
  Description of Artificial Sequence: Synthetic oligonucleotide
  Antisense strand to SEQ ID NO: 925878
cuuacaacgauucugguuu

SEQ ID NO: 925880 - RNA, 19 nt, Artificial Sequence
  Description of Artificial Sequence: Synthetic oligonucleotide
  Sense strand starting at position 2842 of SEQ ID NO: 913420
auuccagcggcauaagaua

SEQ ID NO: 925881 - RNA, 19 nt, Artificial Sequence
  Description of Artificial Sequence: Synthetic oligonucleotide
  Antisense strand to SEQ ID NO: 925880
uaucuuaugccgcuggaau

SEQ ID NO: 925882 - RNA, 19 nt, Artificial Sequence
  Description of Artificial Sequence: Synthetic oligonucleotide
  Sense strand starting at position 980 of SEQ ID NO: 913420
gcaggaguuugaccaaauu

SEQ ID NO: 925883 - RNA, 19 nt, Artificial Sequence
  Description of Artificial Sequence: Synthetic oligonucleotide
  Antisense strand to SEQ ID NO: 925882
aauuuggucaaacuccugc

SEQ ID NO: 925884 - RNA, 19 nt, Artificial Sequence
  Description of Artificial Sequence: Synthetic oligonucleotide
  Sense strand starting at position 2836 of SEQ ID NO: 913420
ccgcgaauuccagcggcau

SEQ ID NO: 925885 - RNA, 19 nt, Artificial Sequence
  Description of Artificial Sequence: Synthetic oligonucleotide
  Antisense strand to SEQ ID NO: 925884
augccgcuggaauucgcgg

SEQ ID NO: 925886 - RNA, 19 nt, Artificial Sequence
  Description of Artificial Sequence: Synthetic oligonucleotide
  Sense strand starting at position 3322 of SEQ ID NO: 913420
gguauaaauguuugaauuc

SEQ ID NO: 925887 - RNA, 19 nt, Artificial Sequence
  Description of Artificial Sequence: Synthetic oligonucleotide
  Antisense strand to SEQ ID NO: 925886
gaauucaaacauuuauacc

SEQ ID NO: 925888 - RNA, 19 nt, Artificial Sequence
  Description of Artificial Sequence: Synthetic oligonucleotide
  Sense strand starting at position 3292 of SEQ ID NO: 913420
uuuagauuccaggguauuc

SEQ ID NO: 925889 - RNA, 19 nt, Artificial Sequence
  Description of Artificial Sequence: Synthetic oligonucleotide
  Antisense strand to SEQ ID NO: 925888
gaauacccuggaaucuaaa

SEQ ID NO: 925890 - RNA, 19 nt, Artificial Sequence
  Description of Artificial Sequence: Synthetic oligonucleotide
  Sense strand starting at position 1016 of SEQ ID NO: 913420
gaaagaguaccacgcucaa

SEQ ID NO: 925891 - RNA, 19 nt, Artificial Sequence
  Description of Artificial Sequence: Synthetic oligonucleotide
  Antisense strand to SEQ ID NO: 925890
uugagcgugguacucuuuc

SEQ ID NO: 925892 - RNA, 19 nt, Artificial Sequence
  Description of Artificial Sequence: Synthetic oligonucleotide
  Sense strand starting at position 3531 of SEQ ID NO: 913420
ucuugcuaugcaggaagaa

SEQ ID NO: 925893 - RNA, 19 nt, Artificial Sequence
  Description of Artificial Sequence: Synthetic oligonucleotide
  Antisense strand to SEQ ID NO: 925892
uucuuccugcauagcaaga

SEQ ID NO: 925894 - RNA, 19 nt, Artificial Sequence
  Description of Artificial Sequence: Synthetic oligonucleotide
  Sense strand starting at position 942 of SEQ ID NO: 913420
cucugaacaguuuguuaac

SEQ ID NO: 925895 - RNA, 19 nt, Artificial Sequence
  Description of Artificial Sequence: Synthetic oligonucleotide
  Antisense strand to SEQ ID NO: 925894
guuaacaaacuguucagag

SEQ ID NO: 925896 - RNA, 19 nt, Artificial Sequence
  Description of Artificial Sequence: Synthetic oligonucleotide
  Sense strand starting at position 437 of SEQ ID NO: 913420
aacugagucugguucuacu

SEQ ID NO: 925897 - RNA, 19 nt, Artificial Sequence
  Description of Artificial Sequence: Synthetic oligonucleotide
  Antisense strand to SEQ ID NO: 925896
aguagaaccagacucaguu

SEQ ID NO: 925898 - RNA, 19 nt, Artificial Sequence
  Description of Artificial Sequence: Synthetic oligonucleotide
  Sense strand starting at position 3054 of SEQ ID NO: 913420
uucgaugacccguauguga

SEQ ID NO: 925899 - RNA, 19 nt, Artificial Sequence
  Description of Artificial Sequence: Synthetic oligonucleotide
  Antisense strand to SEQ ID NO: 925898
ucacauacgggucaucgaa

SEQ ID NO: 925900 - RNA, 19 nt, Artificial Sequence
  Description of Artificial Sequence: Synthetic oligonucleotide
  Sense strand starting at position 3509 of SEQ ID NO: 913420
uugacagucauggguugua

SEQ ID NO: 925901 - RNA, 19 nt, Artificial Sequence
  Description of Artificial Sequence: Synthetic oligonucleotide
  Antisense strand to SEQ ID NO: 925900
uacaacccaugacugucaa

SEQ ID NO: 925902 - RNA, 19 nt, Artificial Sequence
  Description of Artificial Sequence: Synthetic oligonucleotide
  Sense strand starting at position 771 of SEQ ID NO: 913420
auucguuugccagaauacg

SEQ ID NO: 925903 - RNA, 19 nt, Artificial Sequence
  Description of Artificial Sequence: Synthetic oligonucleotide
  Antisense strand to SEQ ID NO: 925902
cguauucuggcaaacgaau

SEQ ID NO: 925904 - RNA, 19 nt, Artificial Sequence
  Description of Artificial Sequence: Synthetic oligonucleotide
  Sense strand starting at position 788 of SEQ ID NO: 913420
cgauguuccuggguucaaa

SEQ ID NO: 925905 - RNA, 19 nt, Artificial Sequence
  Description of Artificial Sequence: Synthetic oligonucleotide
  Antisense strand to SEQ ID NO: 925904
uuugaacccaggaacaucg

SEQ ID NO: 925906 - RNA, 19 nt, Artificial Sequence
  Description of Artificial Sequence: Synthetic oligonucleotide
  Sense strand starting at position 2552 of SEQ ID NO: 913420
gucagcuggcgugaaauaa

SEQ ID NO: 925907 - RNA, 19 nt, Artificial Sequence
  Description of Artificial Sequence: Synthetic oligonucleotide
  Antisense strand to SEQ ID NO: 925906
uuauuucacgccagcugac

SEQ ID NO: 925908 - RNA, 19 nt, Artificial Sequence
  Description of Artificial Sequence: Synthetic oligonucleotide
  Sense strand starting at position 3556 of SEQ ID NO: 913420
acgugagauuacuugcauc

SEQ ID NO: 925909 - RNA, 19 nt, Artificial Sequence
  Description of Artificial Sequence: Synthetic oligonucleotide
  Antisense strand to SEQ ID NO: 925908
gaugcaaguaaucucacgu

SEQ ID NO: 925910 - RNA, 19 nt, Artificial Sequence
  Description of Artificial Sequence: Synthetic oligonucleotide
  Sense strand starting at position 3512 of SEQ ID NO: 913420
acagucauggguuguagua

SEQ ID NO: 925911 - RNA, 19 nt, Artificial Sequence
  Description of Artificial Sequence: Synthetic oligonucleotide
  Antisense strand to SEQ ID NO: 925910
uacuacaacccaugacugu

SEQ ID NO: 925912 - RNA, 19 nt, Artificial Sequence
  Description of Artificial Sequence: Synthetic oligonucleotide
  Sense strand starting at position 3528 of SEQ ID NO: 913420
guaucuugcuaugcaggaa

SEQ ID NO: 925913 - RNA, 19 nt, Artificial Sequence
  Description of Artificial Sequence: Synthetic oligonucleotide
  Antisense strand to SEQ ID NO: 925912
uuccugcauagcaagauac

SEQ ID NO: 925914 - RNA, 19 nt, Artificial Sequence
  Description of Artificial Sequence: Synthetic oligonucleotide
  Sense strand starting at position 779 of SEQ ID NO: 913420
gccagaauacgauguuccu

SEQ ID NO: 925915 - RNA, 19 nt, Artificial Sequence
  Description of Artificial Sequence: Synthetic oligonucleotide
  Antisense strand to SEQ ID NO: 925914
aggaacaucguauucuggc

SEQ ID NO: 925916 - RNA, 19 nt, Artificial Sequence
  Description of Artificial Sequence: Synthetic oligonucleotide
  Sense strand starting at position 767 of SEQ ID NO: 913420
ccuaauucguuugccagaa

SEQ ID NO: 925917 - RNA, 19 nt, Artificial Sequence
  Description of Artificial Sequence: Synthetic oligonucleotide
  Antisense strand to SEQ ID NO: 925916
uucuggcaaacgaauuagg

SEQ ID NO: 925918 - RNA, 19 nt, Artificial Sequence
  Description of Artificial Sequence: Synthetic oligonucleotide
  Sense strand starting at position 768 of SEQ ID NO: 913420
cuaauucguuugccagaau

SEQ ID NO: 925919 - RNA, 19 nt, Artificial Sequence
  Description of Artificial Sequence: Synthetic oligonucleotide
  Antisense strand to SEQ ID NO: 925918
auucuggcaaacgaauuag

SEQ ID NO: 925920 - RNA, 19 nt, Artificial Sequence
  Description of Artificial Sequence: Synthetic oligonucleotide
  Sense strand starting at position 501 of SEQ ID NO: 913420
auuccuagaucagagaauu

SEQ ID NO: 925921 - RNA, 19 nt, Artificial Sequence
  Description of Artificial Sequence: Synthetic oligonucleotide
  Antisense strand to SEQ ID NO: 925920
aauucucugaucuaggaau

SEQ ID NO: 925922 - RNA, 19 nt, Artificial Sequence
  Description of Artificial Sequence: Synthetic oligonucleotide
  Sense strand starting at position 3854 of SEQ ID NO: 913420
guuaauagguguucucgau

SEQ ID NO: 925923 - RNA, 19 nt, Artificial Sequence
  Description of Artificial Sequence: Synthetic oligonucleotide
  Antisense strand to SEQ ID NO: 925922
aucgagaacaccuauuaac

SEQ ID NO: 925924 - RNA, 19 nt, Artificial Sequence
  Description of Artificial Sequence: Synthetic oligonucleotide
  Sense strand starting at position 828 of SEQ ID NO: 913420
uaguuaaccucuuugcgac

SEQ ID NO: 925925 - RNA, 19 nt, Artificial Sequence
  Description of Artificial Sequence: Synthetic oligonucleotide
  Antisense strand to SEQ ID NO: 925924
gucgcaaagagguuaacua

SEQ ID NO: 925926 - RNA, 19 nt, Artificial Sequence
  Description of Artificial Sequence: Synthetic oligonucleotide
  Sense strand starting at position 1354 of SEQ ID NO: 913420
ggagccaaaucacaaauau

SEQ ID NO: 925927 - RNA, 19 nt, Artificial Sequence
  Description of Artificial Sequence: Synthetic oligonucleotide
  Antisense strand to SEQ ID NO: 925926
auauuugugauuuggcucc

SEQ ID NO: 925928 - RNA, 19 nt, Artificial Sequence
  Description of Artificial Sequence: Synthetic oligonucleotide
  Sense strand starting at position 829 of SEQ ID NO: 913420
aguuaaccucuuugcgacu

SEQ ID NO: 925929 - RNA, 19 nt, Artificial Sequence
  Description of Artificial Sequence: Synthetic oligonucleotide
  Antisense strand to SEQ ID NO: 925928
agucgcaaagagguuaacu

SEQ ID NO: 925930 - RNA, 19 nt, Artificial Sequence
  Description of Artificial Sequence: Synthetic oligonucleotide
  Sense strand starting at position 766 of SEQ ID NO: 913420
uccuaauucguuugccaga

SEQ ID NO: 925931 - RNA, 19 nt, Artificial Sequence
  Description of Artificial Sequence: Synthetic oligonucleotide
  Antisense strand to SEQ ID NO: 925930
ucuggcaaacgaauuagga

SEQ ID NO: 925932 - RNA, 19 nt, Artificial Sequence
  Description of Artificial Sequence: Synthetic oligonucleotide
  Sense strand starting at position 3423 of SEQ ID NO: 913420
gcagauagccucugucauu

SEQ ID NO: 925933 - RNA, 19 nt, Artificial Sequence
  Description of Artificial Sequence: Synthetic oligonucleotide
  Antisense strand to SEQ ID NO: 925932
aaugacagaggcuaucugc

SEQ ID NO: 925934 - RNA, 19 nt, Artificial Sequence
  Description of Artificial Sequence: Synthetic oligonucleotide
  Sense strand starting at position 3329 of SEQ ID NO: 913420
auguuugaauucccgugua

SEQ ID NO: 925935 - RNA, 19 nt, Artificial Sequence
  Description of Artificial Sequence: Synthetic oligonucleotide
  Antisense strand to SEQ ID NO: 925934
uacacgggaauucaaacau

SEQ ID NO: 925936 - RNA, 19 nt, Artificial Sequence
  Description of Artificial Sequence: Synthetic oligonucleotide
  Sense strand starting at position 234 of SEQ ID NO: 913420
gguguuaacuaauaagaaa

SEQ ID NO: 925937 - RNA, 19 nt, Artificial Sequence
  Description of Artificial Sequence: Synthetic oligonucleotide
  Antisense strand to SEQ ID NO: 925936
uuucuuauuaguuaacacc

SEQ ID NO: 925938 - RNA, 19 nt, Artificial Sequence
  Description of Artificial Sequence: Synthetic oligonucleotide
  Sense strand starting at position 770 of SEQ ID NO: 913421
ugagauaggacugguucua

SEQ ID NO: 925939 - RNA, 19 nt, Artificial Sequence
  Description of Artificial Sequence: Synthetic oligonucleotide
  Antisense strand to SEQ ID NO: 925938
uagaaccaguccuaucuca

SEQ ID NO: 925940 - RNA, 19 nt, Artificial Sequence
  Description of Artificial Sequence: Synthetic oligonucleotide
  Sense strand starting at position 2925 of SEQ ID NO: 913421
cugcauauucuagauacug

SEQ ID NO: 925941 - RNA, 19 nt, Artificial Sequence
  Description of Artificial Sequence: Synthetic oligonucleotide
  Antisense strand to SEQ ID NO: 925940
caguaucuagaauaugcag

SEQ ID NO: 925942 - RNA, 19 nt, Artificial Sequence
  Description of Artificial Sequence: Synthetic oligonucleotide
  Sense strand starting at position 399 of SEQ ID NO: 913421
agcaguaucuauuucugca

SEQ ID NO: 925943 - RNA, 19 nt, Artificial Sequence
  Description of Artificial Sequence: Synthetic oligonucleotide
  Antisense strand to SEQ ID NO: 925942
ugcagaaauagauacugcu

SEQ ID NO: 925944 - RNA, 19 nt, Artificial Sequence
  Description of Artificial Sequence: Synthetic oligonucleotide
  Sense strand starting at position 868 of SEQ ID NO: 913421
auuggcaaucacugaauua

SEQ ID NO: 925945 - RNA, 19 nt, Artificial Sequence
  Description of Artificial Sequence: Synthetic oligonucleotide
  Antisense strand to SEQ ID NO: 925944
uaauucagugauugccaau

SEQ ID NO: 925946 - RNA, 19 nt, Artificial Sequence
  Description of Artificial Sequence: Synthetic oligonucleotide
  Sense strand starting at position 849 of SEQ ID NO: 913421
gggaaucuguggcuaauaa

SEQ ID NO: 925947 - RNA, 19 nt, Artificial Sequence
  Description of Artificial Sequence: Synthetic oligonucleotide
  Antisense strand to SEQ ID NO: 925946
uuauuagccacagauuccc

SEQ ID NO: 925948 - RNA, 19 nt, Artificial Sequence
  Description of Artificial Sequence: Synthetic oligonucleotide
  Sense strand starting at position 836 of SEQ ID NO: 913421
uucugaguuaccugggaau

SEQ ID NO: 925949 - RNA, 19 nt, Artificial Sequence
  Description of Artificial Sequence: Synthetic oligonucleotide
  Antisense strand to SEQ ID NO: 925948
auucccagguaacucagaa

SEQ ID NO: 925950 - RNA, 19 nt, Artificial Sequence
  Description of Artificial Sequence: Synthetic oligonucleotide
  Sense strand starting at position 838 of SEQ ID NO: 913421
cugaguuaccugggaaucu

SEQ ID NO: 925951 - RNA, 19 nt, Artificial Sequence
  Description of Artificial Sequence: Synthetic oligonucleotide
  Antisense strand to SEQ ID NO: 925950
agauucccagguaacucag

SEQ ID NO: 925952 - RNA, 19 nt, Artificial Sequence
  Description of Artificial Sequence: Synthetic oligonucleotide
  Sense strand starting at position 1224 of SEQ ID NO: 913421
gaacacuggccaggaguua

SEQ ID NO: 925953 - RNA, 19 nt, Artificial Sequence
  Description of Artificial Sequence: Synthetic oligonucleotide
  Antisense strand to SEQ ID NO: 925952
uaacuccuggccaguguuc

SEQ ID NO: 925954 - RNA, 19 nt, Artificial Sequence
  Description of Artificial Sequence: Synthetic oligonucleotide
  Sense strand starting at position 331 of SEQ ID NO: 913421
ugaguuaccucucuuaaga

SEQ ID NO: 925955 - RNA, 19 nt, Artificial Sequence
  Description of Artificial Sequence: Synthetic oligonucleotide
  Antisense strand to SEQ ID NO: 925954
ucuuaagagagguaacuca

SEQ ID NO: 925956 - RNA, 19 nt, Artificial Sequence
  Description of Artificial Sequence: Synthetic oligonucleotide
  Sense strand starting at position 769 of SEQ ID NO: 913421
gugagauaggacugguucu

SEQ ID NO: 925957 - RNA, 19 nt, Artificial Sequence
  Description of Artificial Sequence: Synthetic oligonucleotide
  Antisense strand to SEQ ID NO: 925956
agaaccaguccuaucucac

SEQ ID NO: 925958 - RNA, 19 nt, Artificial Sequence
  Description of Artificial Sequence: Synthetic oligonucleotide
  Sense strand starting at position 860 of SEQ ID NO: 913421
gcuaauaaauuggcaauca

SEQ ID NO: 925959 - RNA, 19 nt, Artificial Sequence
  Description of Artificial Sequence: Synthetic oligonucleotide
  Antisense strand to SEQ ID NO: 925958
ugauugccaauuuauuagc

SEQ ID NO: 925960 - RNA, 19 nt, Artificial Sequence
  Description of Artificial Sequence: Synthetic oligonucleotide
  Sense strand starting at position 763 of SEQ ID NO: 913421
guacgugugagauaggacu

SEQ ID NO: 925961 - RNA, 19 nt, Artificial Sequence
  Description of Artificial Sequence: Synthetic oligonucleotide
  Antisense strand to SEQ ID NO: 925960
aguccuaucucacacguac

SEQ ID NO: 925962 - RNA, 19 nt, Artificial Sequence
  Description of Artificial Sequence: Synthetic oligonucleotide
  Sense strand starting at position 1004 of SEQ ID NO: 913421
auuugugucugucuacgau

SEQ ID NO: 925963 - RNA, 19 nt, Artificial Sequence
  Description of Artificial Sequence: Synthetic oligonucleotide
  Antisense strand to SEQ ID NO: 925962
aucguagacagacacaaau

SEQ ID NO: 925964 - RNA, 19 nt, Artificial Sequence
  Description of Artificial Sequence: Synthetic oligonucleotide
  Sense strand starting at position 3573 of SEQ ID NO: 913421
auuguuccaagugaguauu

SEQ ID NO: 925965 - RNA, 19 nt, Artificial Sequence
  Description of Artificial Sequence: Synthetic oligonucleotide
  Antisense strand to SEQ ID NO: 925964
aauacucacuuggaacaau

SEQ ID NO: 925966 - RNA, 19 nt, Artificial Sequence
  Description of Artificial Sequence: Synthetic oligonucleotide
  Sense strand starting at position 468 of SEQ ID NO: 913421
acaugugguuacuuacaau

SEQ ID NO: 925967 - RNA, 19 nt, Artificial Sequence
  Description of Artificial Sequence: Synthetic oligonucleotide
  Antisense strand to SEQ ID NO: 925966
auuguaaguaaccacaugu

SEQ ID NO: 925968 - RNA, 19 nt, Artificial Sequence
  Description of Artificial Sequence: Synthetic oligonucleotide
  Sense strand starting at position 2751 of SEQ ID NO: 913421
gaggaugcaucuuccuuua

SEQ ID NO: 925969 - RNA, 19 nt, Artificial Sequence
  Description of Artificial Sequence: Synthetic oligonucleotide
  Antisense strand to SEQ ID NO: 925968
uaaaggaagaugcauccuc

SEQ ID NO: 925970 - RNA, 19 nt, Artificial Sequence
  Description of Artificial Sequence: Synthetic oligonucleotide
  Sense strand starting at position 671 of SEQ ID NO: 913421
auaugaucgcaguauuacu

SEQ ID NO: 925971 - RNA, 19 nt, Artificial Sequence
  Description of Artificial Sequence: Synthetic oligonucleotide
  Antisense strand to SEQ ID NO: 925970
aguaauacugcgaucauau

SEQ ID NO: 925972 - RNA, 19 nt, Artificial Sequence
  Description of Artificial Sequence: Synthetic oligonucleotide
  Sense strand starting at position 1356 of SEQ ID NO: 913421
ucuuucuucuuggugggaa

SEQ ID NO: 925973 - RNA, 19 nt, Artificial Sequence
  Description of Artificial Sequence: Synthetic oligonucleotide
  Antisense strand to SEQ ID NO: 925972
uucccaccaagaagaaaga

SEQ ID NO: 925974 - RNA, 19 nt, Artificial Sequence
  Description of Artificial Sequence: Synthetic oligonucleotide
  Sense strand starting at position 3206 of SEQ ID NO: 913421
aggucuaucuauccuccua

SEQ ID NO: 925975 - RNA, 19 nt, Artificial Sequence
  Description of Artificial Sequence: Synthetic oligonucleotide
  Antisense strand to SEQ ID NO: 925974
uaggaggauagauagaccu

SEQ ID NO: 925976 - RNA, 19 nt, Artificial Sequence
  Description of Artificial Sequence: Synthetic oligonucleotide
  Sense strand starting at position 899 of SEQ ID NO: 913421
aggaaaucgggcugcauaa

SEQ ID NO: 925977 - RNA, 19 nt, Artificial Sequence
  Description of Artificial Sequence: Synthetic oligonucleotide
  Antisense strand to SEQ ID NO: 925976
uuaugcagcccgauuuccu

SEQ ID NO: 925978 - RNA, 19 nt, Artificial Sequence
  Description of Artificial Sequence: Synthetic oligonucleotide
  Sense strand starting at position 3347 of SEQ ID NO: 913421
gcuuaaacucaauggccaa

SEQ ID NO: 925979 - RNA, 19 nt, Artificial Sequence
  Description of Artificial Sequence: Synthetic oligonucleotide
  Antisense strand to SEQ ID NO: 925978
uuggccauugaguuuaagc

SEQ ID NO: 925980 - RNA, 19 nt, Artificial Sequence
  Description of Artificial Sequence: Synthetic oligonucleotide
  Sense strand starting at position 2094 of SEQ ID NO: 913421
aauggacuaucgcuugauu

SEQ ID NO: 925981 - RNA, 19 nt, Artificial Sequence
  Description of Artificial Sequence: Synthetic oligonucleotide
  Antisense strand to SEQ ID NO: 925980
aaucaagcgauaguccauu

SEQ ID NO: 925982 - RNA, 19 nt, Artificial Sequence
  Description of Artificial Sequence: Synthetic oligonucleotide
  Sense strand starting at position 3311 of SEQ ID NO: 913421
acuguuucuuccuuuauga

SEQ ID NO: 925983 - RNA, 19 nt, Artificial Sequence
  Description of Artificial Sequence: Synthetic oligonucleotide
  Antisense strand to SEQ ID NO: 925982
ucauaaaggaagaaacagu

SEQ ID NO: 925984 - RNA, 19 nt, Artificial Sequence
  Description of Artificial Sequence: Synthetic oligonucleotide
  Sense strand starting at position 3421 of SEQ ID NO: 913421
ccuaucugcuugguaagau

SEQ ID NO: 925985 - RNA, 19 nt, Artificial Sequence
  Description of Artificial Sequence: Synthetic oligonucleotide
  Antisense strand to SEQ ID NO: 925984
aucuuaccaagcagauagg

SEQ ID NO: 925986 - RNA, 19 nt, Artificial Sequence
  Description of Artificial Sequence: Synthetic oligonucleotide
  Sense strand starting at position 2763 of SEQ ID NO: 913421
uccuuuagucuuggagggu

SEQ ID NO: 925987 - RNA, 19 nt, Artificial Sequence
  Description of Artificial Sequence: Synthetic oligonucleotide
  Antisense strand to SEQ ID NO: 925986
acccuccaagacuaaagga

SEQ ID NO: 925988 - RNA, 19 nt, Artificial Sequence
  Description of Artificial Sequence: Synthetic oligonucleotide
  Sense strand starting at position 3420 of SEQ ID NO: 913421
uccuaucugcuugguaaga

SEQ ID NO: 925989 - RNA, 19 nt, Artificial Sequence
  Description of Artificial Sequence: Synthetic oligonucleotide
  Antisense strand to SEQ ID NO: 925988
ucuuaccaagcagauagga

SEQ ID NO: 925990 - RNA, 19 nt, Artificial Sequence
  Description of Artificial Sequence: Synthetic oligonucleotide
  Sense strand starting at position 752 of SEQ ID NO: 913421
uagaaauagcuguacgugu

SEQ ID NO: 925991 - RNA, 19 nt, Artificial Sequence
  Description of Artificial Sequence: Synthetic oligonucleotide
  Antisense strand to SEQ ID NO: 925990
acacguacagcuauuucua

SEQ ID NO: 925992 - RNA, 19 nt, Artificial Sequence
  Description of Artificial Sequence: Synthetic oligonucleotide
  Sense strand starting at position 2995 of SEQ ID NO: 913421
aagagcuuagaguguugua

SEQ ID NO: 925993 - RNA, 19 nt, Artificial Sequence
  Description of Artificial Sequence: Synthetic oligonucleotide
  Antisense strand to SEQ ID NO: 925992
uacaacacucuaagcucuu

SEQ ID NO: 925994 - RNA, 19 nt, Artificial Sequence
  Description of Artificial Sequence: Synthetic oligonucleotide
  Sense strand starting at position 1054 of SEQ ID NO: 913421
gcuauuaucugacuugcag

SEQ ID NO: 925995 - RNA, 19 nt, Artificial Sequence
  Description of Artificial Sequence: Synthetic oligonucleotide
  Antisense strand to SEQ ID NO: 925994
cugcaagucagauaauagc

SEQ ID NO: 925996 - RNA, 19 nt, Artificial Sequence
  Description of Artificial Sequence: Synthetic oligonucleotide
  Sense strand starting at position 666 of SEQ ID NO: 913421
cuccaauaugaucgcagua

SEQ ID NO: 925997 - RNA, 19 nt, Artificial Sequence
  Description of Artificial Sequence: Synthetic oligonucleotide
  Antisense strand to SEQ ID NO: 925996
uacugcgaucauauuggag

SEQ ID NO: 925998 - RNA, 19 nt, Artificial Sequence
  Description of Artificial Sequence: Synthetic oligonucleotide
  Sense strand starting at position 2131 of SEQ ID NO: 913421
cuuuaaagauuacagauga

SEQ ID NO: 925999 - RNA, 19 nt, Artificial Sequence
  Description of Artificial Sequence: Synthetic oligonucleotide
  Antisense strand to SEQ ID NO: 925998
ucaucuguaaucuuuaaag

SEQ ID NO: 926000 - RNA, 19 nt, Artificial Sequence
  Description of Artificial Sequence: Synthetic oligonucleotide
  Sense strand starting at position 2753 of SEQ ID NO: 913421
ggaugcaucuuccuuuagu

SEQ ID NO: 926001 - RNA, 19 nt, Artificial Sequence
  Description of Artificial Sequence: Synthetic oligonucleotide
  Antisense strand to SEQ ID NO: 926000
acuaaaggaagaugcaucc

SEQ ID NO: 926002 - RNA, 19 nt, Artificial Sequence
  Description of Artificial Sequence: Synthetic oligonucleotide
  Sense strand starting at position 1355 of SEQ ID NO: 913421
gucuuucuucuugguggga

SEQ ID NO: 926003 - RNA, 19 nt, Artificial Sequence
  Description of Artificial Sequence: Synthetic oligonucleotide
  Antisense strand to SEQ ID NO: 926002
ucccaccaagaagaaagac

SEQ ID NO: 926004 - RNA, 19 nt, Artificial Sequence
  Description of Artificial Sequence: Synthetic oligonucleotide
  Sense strand starting at position 3877 of SEQ ID NO: 913421
cucuucucaucgucacaua

SEQ ID NO: 926005 - RNA, 19 nt, Artificial Sequence
  Description of Artificial Sequence: Synthetic oligonucleotide
  Antisense strand to SEQ ID NO: 926004
uaugugacgaugagaagag

SEQ ID NO: 926006 - RNA, 19 nt, Artificial Sequence
  Description of Artificial Sequence: Synthetic oligonucleotide
  Sense strand starting at position 1102 of SEQ ID NO: 913421
acgcaauaagggcgacauu

SEQ ID NO: 926007 - RNA, 19 nt, Artificial Sequence
  Description of Artificial Sequence: Synthetic oligonucleotide
  Antisense strand to SEQ ID NO: 926006
aaugucgcccuuauugcgu

SEQ ID NO: 926008 - RNA, 19 nt, Artificial Sequence
  Description of Artificial Sequence: Synthetic oligonucleotide
  Sense strand starting at position 3419 of SEQ ID NO: 913421
cuccuaucugcuugguaag

SEQ ID NO: 926009 - RNA, 19 nt, Artificial Sequence
  Description of Artificial Sequence: Synthetic oligonucleotide
  Antisense strand to SEQ ID NO: 926008
cuuaccaagcagauaggag

SEQ ID NO: 926010 - RNA, 19 nt, Artificial Sequence
  Description of Artificial Sequence: Synthetic oligonucleotide
  Sense strand starting at position 3418 of SEQ ID NO: 913421
ucuccuaucugcuugguaa

SEQ ID NO: 926011 - RNA, 19 nt, Artificial Sequence
  Description of Artificial Sequence: Synthetic oligonucleotide
  Antisense strand to SEQ ID NO: 926010
uuaccaagcagauaggaga

SEQ ID NO: 926012 - RNA, 19 nt, Artificial Sequence
  Description of Artificial Sequence: Synthetic oligonucleotide
  Sense strand starting at position 388 of SEQ ID NO: 913421
gugucaacaucagcaguau

SEQ ID NO: 926013 - RNA, 19 nt, Artificial Sequence
  Description of Artificial Sequence: Synthetic oligonucleotide
  Antisense strand to SEQ ID NO: 926012
auacugcugauguugacac

SEQ ID NO: 926014 - RNA, 19 nt, Artificial Sequence
  Description of Artificial Sequence: Synthetic oligonucleotide
  Sense strand starting at position 482 of SEQ ID NO: 913421
acaauauacuuagggaaac

SEQ ID NO: 926015 - RNA, 19 nt, Artificial Sequence
  Description of Artificial Sequence: Synthetic oligonucleotide
  Antisense strand to SEQ ID NO: 926014
guuucccuaaguauauugu

SEQ ID NO: 926016 - RNA, 19 nt, Artificial Sequence
  Description of Artificial Sequence: Synthetic oligonucleotide
  Sense strand starting at position 1300 of SEQ ID NO: 913421
auguuucuucucugcuaua

SEQ ID NO: 926017 - RNA, 19 nt, Artificial Sequence
  Description of Artificial Sequence: Synthetic oligonucleotide
  Antisense strand to SEQ ID NO: 926016
uauagcagagaagaaacau

SEQ ID NO: 926018 - RNA, 19 nt, Artificial Sequence
  Description of Artificial Sequence: Synthetic oligonucleotide
  Sense strand starting at position 2994 of SEQ ID NO: 913422
gaaagcauuguugauccaa

SEQ ID NO: 926019 - RNA, 19 nt, Artificial Sequence
  Description of Artificial Sequence: Synthetic oligonucleotide
  Antisense strand to SEQ ID NO: 926018
uuggaucaacaaugcuuuc

SEQ ID NO: 926020 - RNA, 19 nt, Artificial Sequence
  Description of Artificial Sequence: Synthetic oligonucleotide
  Sense strand starting at position 3899 of SEQ ID NO: 913422
aggguuuaugcacaucaag

SEQ ID NO: 926021 - RNA, 19 nt, Artificial Sequence
  Description of Artificial Sequence: Synthetic oligonucleotide
  Antisense strand to SEQ ID NO: 926020
cuugaugugcauaaacccu

SEQ ID NO: 926022 - RNA, 19 nt, Artificial Sequence
  Description of Artificial Sequence: Synthetic oligonucleotide
  Sense strand starting at position 3538 of SEQ ID NO: 913422
agauacauagcauagcauu

SEQ ID NO: 926023 - RNA, 19 nt, Artificial Sequence
  Description of Artificial Sequence: Synthetic oligonucleotide
  Antisense strand to SEQ ID NO: 926022
aaugcuaugcuauguaucu

SEQ ID NO: 926024 - RNA, 19 nt, Artificial Sequence
  Description of Artificial Sequence: Synthetic oligonucleotide
  Sense strand starting at position 327 of SEQ ID NO: 913422
gcacaaugucaggaguaac

SEQ ID NO: 926025 - RNA, 19 nt, Artificial Sequence
  Description of Artificial Sequence: Synthetic oligonucleotide
  Antisense strand to SEQ ID NO: 926024
guuacuccugacauugugc

SEQ ID NO: 926026 - RNA, 19 nt, Artificial Sequence
  Description of Artificial Sequence: Synthetic oligonucleotide
  Sense strand starting at position 3757 of SEQ ID NO: 913422
auguguaugccagaaugaa

SEQ ID NO: 926027 - RNA, 19 nt, Artificial Sequence
  Description of Artificial Sequence: Synthetic oligonucleotide
  Antisense strand to SEQ ID NO: 926026
uucauucuggcauacacau

SEQ ID NO: 926028 - RNA, 19 nt, Artificial Sequence
  Description of Artificial Sequence: Synthetic oligonucleotide
  Sense strand starting at position 241 of SEQ ID NO: 913422
guguaaguuacauauugga

SEQ ID NO: 926029 - RNA, 19 nt, Artificial Sequence
  Description of Artificial Sequence: Synthetic oligonucleotide
  Antisense strand to SEQ ID NO: 926028
uccaauauguaacuuacac

SEQ ID NO: 926030 - RNA, 19 nt, Artificial Sequence
  Description of Artificial Sequence: Synthetic oligonucleotide
  Sense strand starting at position 1440 of SEQ ID NO: 913422
ccaauacuggucugaacua

SEQ ID NO: 926031 - RNA, 19 nt, Artificial Sequence
  Description of Artificial Sequence: Synthetic oligonucleotide
  Antisense strand to SEQ ID NO: 926030
uaguucagaccaguauugg

SEQ ID NO: 926032 - RNA, 19 nt, Artificial Sequence
  Description of Artificial Sequence: Synthetic oligonucleotide
  Sense strand starting at position 3782 of SEQ ID NO: 913422
aaccuauucgagggaguca

SEQ ID NO: 926033 - RNA, 19 nt, Artificial Sequence
  Description of Artificial Sequence: Synthetic oligonucleotide
  Antisense strand to SEQ ID NO: 926032
ugacucccucgaauagguu

SEQ ID NO: 926034 - RNA, 19 nt, Artificial Sequence
  Description of Artificial Sequence: Synthetic oligonucleotide
  Sense strand starting at position 3644 of SEQ ID NO: 913422
ucacuugagccugauaguu

SEQ ID NO: 926035 - RNA, 19 nt, Artificial Sequence
  Description of Artificial Sequence: Synthetic oligonucleotide
  Antisense strand to SEQ ID NO: 926034
aacuaucaggcucaaguga

SEQ ID NO: 926036 - RNA, 19 nt, Artificial Sequence
  Description of Artificial Sequence: Synthetic oligonucleotide
  Sense strand starting at position 1331 of SEQ ID NO: 913422
gcguucacccuugaggaaa

SEQ ID NO: 926037 - RNA, 19 nt, Artificial Sequence
  Description of Artificial Sequence: Synthetic oligonucleotide
  Antisense strand to SEQ ID NO: 926036
uuuccucaagggugaacgc

SEQ ID NO: 926038 - RNA, 19 nt, Artificial Sequence
  Description of Artificial Sequence: Synthetic oligonucleotide
  Sense strand starting at position 726 of SEQ ID NO: 913422
cuaaguccugccuaguaaa

SEQ ID NO: 926039 - RNA, 19 nt, Artificial Sequence
  Description of Artificial Sequence: Synthetic oligonucleotide
  Antisense strand to SEQ ID NO: 926038
uuuacuaggcaggacuuag

SEQ ID NO: 926040 - RNA, 19 nt, Artificial Sequence
  Description of Artificial Sequence: Synthetic oligonucleotide
  Sense strand starting at position 3870 of SEQ ID NO: 913422
uuucccauaugaguuucua

SEQ ID NO: 926041 - RNA, 19 nt, Artificial Sequence
  Description of Artificial Sequence: Synthetic oligonucleotide
  Antisense strand to SEQ ID NO: 926040
uagaaacucauaugggaaa

SEQ ID NO: 926042 - RNA, 19 nt, Artificial Sequence
  Description of Artificial Sequence: Synthetic oligonucleotide
  Sense strand starting at position 3731 of SEQ ID NO: 913422
acauaaggauuacaaugaa

SEQ ID NO: 926043 - RNA, 19 nt, Artificial Sequence
  Description of Artificial Sequence: Synthetic oligonucleotide
  Antisense strand to SEQ ID NO: 926042
uucauuguaauccuuaugu

SEQ ID NO: 926044 - RNA, 19 nt, Artificial Sequence
  Description of Artificial Sequence: Synthetic oligonucleotide
  Sense strand starting at position 1218 of SEQ ID NO: 913422
uuucuuaacccguaaguca

SEQ ID NO: 926045 - RNA, 19 nt, Artificial Sequence
  Description of Artificial Sequence: Synthetic oligonucleotide
  Antisense strand to SEQ ID NO: 926044
ugacuuacggguuaagaaa

SEQ ID NO: 926046 - RNA, 19 nt, Artificial Sequence
  Description of Artificial Sequence: Synthetic oligonucleotide
  Sense strand starting at position 3559 of SEQ ID NO: 913422
uaauuucgauaguagaacu

SEQ ID NO: 926047 - RNA, 19 nt, Artificial Sequence
  Description of Artificial Sequence: Synthetic oligonucleotide
  Antisense strand to SEQ ID NO: 926046
aguucuacuaucgaaauua

SEQ ID NO: 926048 - RNA, 19 nt, Artificial Sequence
  Description of Artificial Sequence: Synthetic oligonucleotide
  Sense strand starting at position 3780 of SEQ ID NO: 913422
ggaaccuauucgagggagu

SEQ ID NO: 926049 - RNA, 19 nt, Artificial Sequence
  Description of Artificial Sequence: Synthetic oligonucleotide
  Antisense strand to SEQ ID NO: 926048
acucccucgaauagguucc

SEQ ID NO: 926050 - RNA, 19 nt, Artificial Sequence
  Description of Artificial Sequence: Synthetic oligonucleotide
  Sense strand starting at position 461 of SEQ ID NO: 913422
guaauuagccaauguuuaa

SEQ ID NO: 926051 - RNA, 19 nt, Artificial Sequence
  Description of Artificial Sequence: Synthetic oligonucleotide
  Antisense strand to SEQ ID NO: 926050
uuaaacauuggcuaauuac

SEQ ID NO: 926052 - RNA, 19 nt, Artificial Sequence
  Description of Artificial Sequence: Synthetic oligonucleotide
  Sense strand starting at position 3881 of SEQ ID NO: 913422
aguuucuacuucguggaaa

SEQ ID NO: 926053 - RNA, 19 nt, Artificial Sequence
  Description of Artificial Sequence: Synthetic oligonucleotide
  Antisense strand to SEQ ID NO: 926052
uuuccacgaaguagaaacu

SEQ ID NO: 926054 - RNA, 19 nt, Artificial Sequence
  Description of Artificial Sequence: Synthetic oligonucleotide
  Sense strand starting at position 3189 of SEQ ID NO: 913422
uugaaucgucucuagucuu

SEQ ID NO: 926055 - RNA, 19 nt, Artificial Sequence
  Description of Artificial Sequence: Synthetic oligonucleotide
  Antisense strand to SEQ ID NO: 926054
aagacuagagacgauucaa

SEQ ID NO: 926056 - RNA, 19 nt, Artificial Sequence
  Description of Artificial Sequence: Synthetic oligonucleotide
  Sense strand starting at position 237 of SEQ ID NO: 913422
gccuguguaaguuacauau

SEQ ID NO: 926057 - RNA, 19 nt, Artificial Sequence
  Description of Artificial Sequence: Synthetic oligonucleotide
  Antisense strand to SEQ ID NO: 926056
auauguaacuuacacaggc

SEQ ID NO: 926058 - RNA, 19 nt, Artificial Sequence
  Description of Artificial Sequence: Synthetic oligonucleotide
  Sense strand starting at position 3916 of SEQ ID NO: 913422
agagguauuugccaccaua

SEQ ID NO: 926059 - RNA, 19 nt, Artificial Sequence
  Description of Artificial Sequence: Synthetic oligonucleotide
  Antisense strand to SEQ ID NO: 926058
uaugguggcaaauaccucu

SEQ ID NO: 926060 - RNA, 19 nt, Artificial Sequence
  Description of Artificial Sequence: Synthetic oligonucleotide
  Sense strand starting at position 3880 of SEQ ID NO: 913422
gaguuucuacuucguggaa

SEQ ID NO: 926061 - RNA, 19 nt, Artificial Sequence
  Description of Artificial Sequence: Synthetic oligonucleotide
  Antisense strand to SEQ ID NO: 926060
uuccacgaaguagaaacuc

SEQ ID NO: 926062 - RNA, 19 nt, Artificial Sequence
  Description of Artificial Sequence: Synthetic oligonucleotide
  Sense strand starting at position 1419 of SEQ ID NO: 913422
cuugguguuuggucauuaa

SEQ ID NO: 926063 - RNA, 19 nt, Artificial Sequence
  Description of Artificial Sequence: Synthetic oligonucleotide
  Antisense strand to SEQ ID NO: 926062
uuaaugaccaaacaccaag

SEQ ID NO: 926064 - RNA, 19 nt, Artificial Sequence
  Description of Artificial Sequence: Synthetic oligonucleotide
  Sense strand starting at position 3643 of SEQ ID NO: 913422
gucacuugagccugauagu

SEQ ID NO: 926065 - RNA, 19 nt, Artificial Sequence
  Description of Artificial Sequence: Synthetic oligonucleotide
  Antisense strand to SEQ ID NO: 926064
acuaucaggcucaagugac

SEQ ID NO: 926066 - RNA, 19 nt, Artificial Sequence
  Description of Artificial Sequence: Synthetic oligonucleotide
  Sense strand starting at position 2696 of SEQ ID NO: 913422
cgagcagagucgaaagagu

SEQ ID NO: 926067 - RNA, 19 nt, Artificial Sequence
  Description of Artificial Sequence: Synthetic oligonucleotide
  Antisense strand to SEQ ID NO: 926066
acucuuucgacucugcucg

SEQ ID NO: 926068 - RNA, 19 nt, Artificial Sequence
  Description of Artificial Sequence: Synthetic oligonucleotide
  Sense strand starting at position 1092 of SEQ ID NO: 913422
gcguuucccgcugcgugaa

SEQ ID NO: 926069 - RNA, 19 nt, Artificial Sequence
  Description of Artificial Sequence: Synthetic oligonucleotide
  Antisense strand to SEQ ID NO: 926068
uucacgcagcgggaaacgc

SEQ ID NO: 926070 - RNA, 19 nt, Artificial Sequence
  Description of Artificial Sequence: Synthetic oligonucleotide
  Sense strand starting at position 982 of SEQ ID NO: 913422
gcccgcuucccugagcaaa

SEQ ID NO: 926071 - RNA, 19 nt, Artificial Sequence
  Description of Artificial Sequence: Synthetic oligonucleotide
  Antisense strand to SEQ ID NO: 926070
uuugcucagggaagcgggc

SEQ ID NO: 926072 - RNA, 19 nt, Artificial Sequence
  Description of Artificial Sequence: Synthetic oligonucleotide
  Sense strand starting at position 228 of SEQ ID NO: 913422
gacucagcagccuguguaa

SEQ ID NO: 926073 - RNA, 19 nt, Artificial Sequence
  Description of Artificial Sequence: Synthetic oligonucleotide
  Antisense strand to SEQ ID NO: 926072
uuacacaggcugcugaguc

SEQ ID NO: 926074 - RNA, 19 nt, Artificial Sequence
  Description of Artificial Sequence: Synthetic oligonucleotide
  Sense strand starting at position 1330 of SEQ ID NO: 913422
cgcguucacccuugaggaa

SEQ ID NO: 926075 - RNA, 19 nt, Artificial Sequence
  Description of Artificial Sequence: Synthetic oligonucleotide
  Antisense strand to SEQ ID NO: 926074
uuccucaagggugaacgcg

SEQ ID NO: 926076 - RNA, 19 nt, Artificial Sequence
  Description of Artificial Sequence: Synthetic oligonucleotide
  Sense strand starting at position 3938 of SEQ ID NO: 913422
agacuugcuugcucagcua

SEQ ID NO: 926077 - RNA, 19 nt, Artificial Sequence
  Description of Artificial Sequence: Synthetic oligonucleotide
  Antisense strand to SEQ ID NO: 926076
uagcugagcaagcaagucu

SEQ ID NO: 926078 - RNA, 19 nt, Artificial Sequence
  Description of Artificial Sequence: Synthetic oligonucleotide
  Sense strand starting at position 675 of SEQ ID NO: 913422
gcuuguaguguucauaugu

SEQ ID NO: 926079 - RNA, 19 nt, Artificial Sequence
  Description of Artificial Sequence: Synthetic oligonucleotide
  Antisense strand to SEQ ID NO: 926078
acauaugaacacuacaagc

SEQ ID NO: 926080 - RNA, 19 nt, Artificial Sequence
  Description of Artificial Sequence: Synthetic oligonucleotide
  Sense strand starting at position 3188 of SEQ ID NO: 913422
guugaaucgucucuagucu

SEQ ID NO: 926081 - RNA, 19 nt, Artificial Sequence
  Description of Artificial Sequence: Synthetic oligonucleotide
  Antisense strand to SEQ ID NO: 926080
agacuagagacgauucaac

SEQ ID NO: 926082 - RNA, 19 nt, Artificial Sequence
  Description of Artificial Sequence: Synthetic oligonucleotide
  Sense strand starting at position 3941 of SEQ ID NO: 913422
cuugcuugcucagcuaaua

SEQ ID NO: 926083 - RNA, 19 nt, Artificial Sequence
  Description of Artificial Sequence: Synthetic oligonucleotide
  Antisense strand to SEQ ID NO: 926082
uauuagcugagcaagcaag

SEQ ID NO: 926084 - RNA, 19 nt, Artificial Sequence
  Description of Artificial Sequence: Synthetic oligonucleotide
  Sense strand starting at position 3195 of SEQ ID NO: 913422
cgucucuagucuuuggagu

SEQ ID NO: 926085 - RNA, 19 nt, Artificial Sequence
  Description of Artificial Sequence: Synthetic oligonucleotide
  Antisense strand to SEQ ID NO: 926084
acuccaaagacuagagacg

SEQ ID NO: 926086 - RNA, 19 nt, Artificial Sequence
  Description of Artificial Sequence: Synthetic oligonucleotide
  Sense strand starting at position 3594 of SEQ ID NO: 913422
agugguucuuguguguaau

SEQ ID NO: 926087 - RNA, 19 nt, Artificial Sequence
  Description of Artificial Sequence: Synthetic oligonucleotide
  Antisense strand to SEQ ID NO: 926086
auuacacacaagaaccacu

SEQ ID NO: 926088 - RNA, 19 nt, Artificial Sequence
  Description of Artificial Sequence: Synthetic oligonucleotide
  Sense strand starting at position 3175 of SEQ ID NO: 913422
ccugcucuugccuguugaa

SEQ ID NO: 926089 - RNA, 19 nt, Artificial Sequence
  Description of Artificial Sequence: Synthetic oligonucleotide
  Antisense strand to SEQ ID NO: 926088
uucaacaggcaagagcagg

SEQ ID NO: 926090 - RNA, 19 nt, Artificial Sequence
  Description of Artificial Sequence: Synthetic oligonucleotide
  Sense strand starting at position 3595 of SEQ ID NO: 913422
gugguucuuguguguaauc

SEQ ID NO: 926091 - RNA, 19 nt, Artificial Sequence
  Description of Artificial Sequence: Synthetic oligonucleotide
  Antisense strand to SEQ ID NO: 926090
gauuacacacaagaaccac

SEQ ID NO: 926092 - RNA, 19 nt, Artificial Sequence
  Description of Artificial Sequence: Synthetic oligonucleotide
  Sense strand starting at position 3264 of SEQ ID NO: 913422
gggcgcaugucuuucaucu

SEQ ID NO: 926093 - RNA, 19 nt, Artificial Sequence
  Description of Artificial Sequence: Synthetic oligonucleotide
  Antisense strand to SEQ ID NO: 926092
agaugaaagacaugcgccc

SEQ ID NO: 926094 - RNA, 19 nt, Artificial Sequence
  Description of Artificial Sequence: Synthetic oligonucleotide
  Sense strand starting at position 3755 of SEQ ID NO: 913422
gaauguguaugccagaaug

SEQ ID NO: 926095 - RNA, 19 nt, Artificial Sequence
  Description of Artificial Sequence: Synthetic oligonucleotide
  Antisense strand to SEQ ID NO: 926094
cauucuggcauacacauuc

SEQ ID NO: 926096 - RNA, 19 nt, Artificial Sequence
  Description of Artificial Sequence: Synthetic oligonucleotide
  Sense strand starting at position 709 of SEQ ID NO: 913422
ucaauauauuacgguaacu

SEQ ID NO: 926097 - RNA, 19 nt, Artificial Sequence
  Description of Artificial Sequence: Synthetic oligonucleotide
  Antisense strand to SEQ ID NO: 926096
aguuaccguaauauauuga

SEQ ID NO: 926098 - RNA, 19 nt, Artificial Sequence
  Description of Artificial Sequence: Synthetic oligonucleotide
  Sense strand starting at position 2652 of SEQ ID NO: 913423
ugccaaguuugauuucuca

SEQ ID NO: 926099 - RNA, 19 nt, Artificial Sequence
  Description of Artificial Sequence: Synthetic oligonucleotide
  Antisense strand to SEQ ID NO: 926098
ugagaaaucaaacuuggca

SEQ ID NO: 926100 - RNA, 19 nt, Artificial Sequence
  Description of Artificial Sequence: Synthetic oligonucleotide
  Sense strand starting at position 1120 of SEQ ID NO: 913423
uacagagggucaccaaauu

SEQ ID NO: 926101 - RNA, 19 nt, Artificial Sequence
  Description of Artificial Sequence: Synthetic oligonucleotide
  Antisense strand to SEQ ID NO: 926100
aauuuggugacccucugua

SEQ ID NO: 926102 - RNA, 19 nt, Artificial Sequence
  Description of Artificial Sequence: Synthetic oligonucleotide
  Sense strand starting at position 3878 of SEQ ID NO: 913423
gccuacucugguugaauuu

SEQ ID NO: 926103 - RNA, 19 nt, Artificial Sequence
  Description of Artificial Sequence: Synthetic oligonucleotide
  Antisense strand to SEQ ID NO: 926102
aaauucaaccagaguaggc

SEQ ID NO: 926104 - RNA, 19 nt, Artificial Sequence
  Description of Artificial Sequence: Synthetic oligonucleotide
  Sense strand starting at position 3664 of SEQ ID NO: 913423
ggcgguguucaugcuauua

SEQ ID NO: 926105 - RNA, 19 nt, Artificial Sequence
  Description of Artificial Sequence: Synthetic oligonucleotide
  Antisense strand to SEQ ID NO: 926104
uaauagcaugaacaccgcc

SEQ ID NO: 926106 - RNA, 19 nt, Artificial Sequence
  Description of Artificial Sequence: Synthetic oligonucleotide
  Sense strand starting at position 3949 of SEQ ID NO: 913423
gugcuauguaaagagaaug

SEQ ID NO: 926107 - RNA, 19 nt, Artificial Sequence
  Description of Artificial Sequence: Synthetic oligonucleotide
  Antisense strand to SEQ ID NO: 926106
cauucucuuuacauagcac

SEQ ID NO: 926108 - RNA, 19 nt, Artificial Sequence
  Description of Artificial Sequence: Synthetic oligonucleotide
  Sense strand starting at position 114 of SEQ ID NO: 913423
ccacucagucauugagaaa

SEQ ID NO: 926109 - RNA, 19 nt, Artificial Sequence
  Description of Artificial Sequence: Synthetic oligonucleotide
  Antisense strand to SEQ ID NO: 926108
uuucucaaugacugagugg

SEQ ID NO: 926110 - RNA, 19 nt, Artificial Sequence
  Description of Artificial Sequence: Synthetic oligonucleotide
  Sense strand starting at position 1163 of SEQ ID NO: 913423
uucuaucauaccggaggaa

SEQ ID NO: 926111 - RNA, 19 nt, Artificial Sequence
  Description of Artificial Sequence: Synthetic oligonucleotide
  Antisense strand to SEQ ID NO: 926110
uuccuccgguaugauagaa

SEQ ID NO: 926112 - RNA, 19 nt, Artificial Sequence
  Description of Artificial Sequence: Synthetic oligonucleotide
  Sense strand starting at position 2631 of SEQ ID NO: 913423
aggucuucugaccaacgau

SEQ ID NO: 926113 - RNA, 19 nt, Artificial Sequence
  Description of Artificial Sequence: Synthetic oligonucleotide
  Antisense strand to SEQ ID NO: 926112
aucguuggucagaagaccu

SEQ ID NO: 926114 - RNA, 19 nt, Artificial Sequence
  Description of Artificial Sequence: Synthetic oligonucleotide
  Sense strand starting at position 113 of SEQ ID NO: 913423
cccacucagucauugagaa

SEQ ID NO: 926115 - RNA, 19 nt, Artificial Sequence
  Description of Artificial Sequence: Synthetic oligonucleotide
  Antisense strand to SEQ ID NO: 926114
uucucaaugacugaguggg

SEQ ID NO: 926116 - RNA, 19 nt, Artificial Sequence
  Description of Artificial Sequence: Synthetic oligonucleotide
  Sense strand starting at position 841 of SEQ ID NO: 913423
gggcuucucccacacacua

SEQ ID NO: 926117 - RNA, 19 nt, Artificial Sequence
  Description of Artificial Sequence: Synthetic oligonucleotide
  Antisense strand to SEQ ID NO: 926116
uagugugugggagaagccc

SEQ ID NO: 926118 - RNA, 19 nt, Artificial Sequence
  Description of Artificial Sequence: Synthetic oligonucleotide
  Sense strand starting at position 3495 of SEQ ID NO: 913423
ccauauaauuuguagggaa

SEQ ID NO: 926119 - RNA, 19 nt, Artificial Sequence
  Description of Artificial Sequence: Synthetic oligonucleotide
  Antisense strand to SEQ ID NO: 926118
uucccuacaaauuauaugg

SEQ ID NO: 926120 - RNA, 19 nt, Artificial Sequence
  Description of Artificial Sequence: Synthetic oligonucleotide
  Sense strand starting at position 3945 of SEQ ID NO: 913423
uuaugugcuauguaaagag

SEQ ID NO: 926121 - RNA, 19 nt, Artificial Sequence
  Description of Artificial Sequence: Synthetic oligonucleotide
  Antisense strand to SEQ ID NO: 926120
cucuuuacauagcacauaa

SEQ ID NO: 926122 - RNA, 19 nt, Artificial Sequence
  Description of Artificial Sequence: Synthetic oligonucleotide
  Sense strand starting at position 1329 of SEQ ID NO: 913423
auacgauaauuggcuuaag

SEQ ID NO: 926123 - RNA, 19 nt, Artificial Sequence
  Description of Artificial Sequence: Synthetic oligonucleotide
  Antisense strand to SEQ ID NO: 926122
cuuaagccaauuaucguau

SEQ ID NO: 926124 - RNA, 19 nt, Artificial Sequence
  Description of Artificial Sequence: Synthetic oligonucleotide
  Sense strand starting at position 881 of SEQ ID NO: 913423
ucuguaaggaauggguuau

SEQ ID NO: 926125 - RNA, 19 nt, Artificial Sequence
  Description of Artificial Sequence: Synthetic oligonucleotide
  Antisense strand to SEQ ID NO: 926124
auaacccauuccuuacaga

SEQ ID NO: 926126 - RNA, 19 nt, Artificial Sequence
  Description of Artificial Sequence: Synthetic oligonucleotide
  Sense strand starting at position 2612 of SEQ ID NO: 913423
ugccuagguauuggagaga

SEQ ID NO: 926127 - RNA, 19 nt, Artificial Sequence
  Description of Artificial Sequence: Synthetic oligonucleotide
  Antisense strand to SEQ ID NO: 926126
ucucuccaauaccuaggca

SEQ ID NO: 926128 - RNA, 19 nt, Artificial Sequence
  Description of Artificial Sequence: Synthetic oligonucleotide
  Sense strand starting at position 2557 of SEQ ID NO: 913423
ucgcuaugacacugaagaa

SEQ ID NO: 926129 - RNA, 19 nt, Artificial Sequence
  Description of Artificial Sequence: Synthetic oligonucleotide
  Antisense strand to SEQ ID NO: 926128
uucuucagugucauagcga

SEQ ID NO: 926130 - RNA, 19 nt, Artificial Sequence
  Description of Artificial Sequence: Synthetic oligonucleotide
  Sense strand starting at position 3635 of SEQ ID NO: 913423
gucaccucucuguaucaga

SEQ ID NO: 926131 - RNA, 19 nt, Artificial Sequence
  Description of Artificial Sequence: Synthetic oligonucleotide
  Antisense strand to SEQ ID NO: 926130
ucugauacagagaggugac

SEQ ID NO: 926132 - RNA, 19 nt, Artificial Sequence
  Description of Artificial Sequence: Synthetic oligonucleotide
  Sense strand starting at position 1473 of SEQ ID NO: 913423
cggucucuuagauaauagu

SEQ ID NO: 926133 - RNA, 19 nt, Artificial Sequence
  Description of Artificial Sequence: Synthetic oligonucleotide
  Antisense strand to SEQ ID NO: 926132
acuauuaucuaagagaccg

SEQ ID NO: 926134 - RNA, 19 nt, Artificial Sequence
  Description of Artificial Sequence: Synthetic oligonucleotide
  Sense strand starting at position 3272 of SEQ ID NO: 913423
gcuucucauuaccugaaga

SEQ ID NO: 926135 - RNA, 19 nt, Artificial Sequence
  Description of Artificial Sequence: Synthetic oligonucleotide
  Antisense strand to SEQ ID NO: 926134
ucuucagguaaugagaagc

SEQ ID NO: 926136 - RNA, 19 nt, Artificial Sequence
  Description of Artificial Sequence: Synthetic oligonucleotide
  Sense strand starting at position 2604 of SEQ ID NO: 913423
agaaguucugccuagguau

SEQ ID NO: 926137 - RNA, 19 nt, Artificial Sequence
  Description of Artificial Sequence: Synthetic oligonucleotide
  Antisense strand to SEQ ID NO: 926136
auaccuaggcagaacuucu

SEQ ID NO: 926138 - RNA, 19 nt, Artificial Sequence
  Description of Artificial Sequence: Synthetic oligonucleotide
  Sense strand starting at position 1332 of SEQ ID NO: 913423
cgauaauuggcuuaagguu

SEQ ID NO: 926139 - RNA, 19 nt, Artificial Sequence
  Description of Artificial Sequence: Synthetic oligonucleotide
  Antisense strand to SEQ ID NO: 926138
aaccuuaagccaauuaucg

SEQ ID NO: 926140 - RNA, 19 nt, Artificial Sequence
  Description of Artificial Sequence: Synthetic oligonucleotide
  Sense strand starting at position 152 of SEQ ID NO: 913423
ccguaaagagauuaguguu

SEQ ID NO: 926141 - RNA, 19 nt, Artificial Sequence
  Description of Artificial Sequence: Synthetic oligonucleotide
  Antisense strand to SEQ ID NO: 926140
aacacuaaucucuuuacgg

SEQ ID NO: 926142 - RNA, 19 nt, Artificial Sequence
  Description of Artificial Sequence: Synthetic oligonucleotide
  Sense strand starting at position 1467 of SEQ ID NO: 913423
auuagacggucucuuagau

SEQ ID NO: 926143 - RNA, 19 nt, Artificial Sequence
  Description of Artificial Sequence: Synthetic oligonucleotide
  Antisense strand to SEQ ID NO: 926142
aucuaagagaccgucuaau

SEQ ID NO: 926144 - RNA, 19 nt, Artificial Sequence
  Description of Artificial Sequence: Synthetic oligonucleotide
  Sense strand starting at position 1778 of SEQ ID NO: 913423
uccagagcccagugacaau

SEQ ID NO: 926145 - RNA, 19 nt, Artificial Sequence
  Description of Artificial Sequence: Synthetic oligonucleotide
  Antisense strand to SEQ ID NO: 926144
auugucacugggcucugga

SEQ ID NO: 926146 - RNA, 19 nt, Artificial Sequence
  Description of Artificial Sequence: Synthetic oligonucleotide
  Sense strand starting at position 880 of SEQ ID NO: 913423
gucuguaaggaauggguua

SEQ ID NO: 926147 - RNA, 19 nt, Artificial Sequence
  Description of Artificial Sequence: Synthetic oligonucleotide
  Antisense strand to SEQ ID NO: 926146
uaacccauuccuuacagac

SEQ ID NO: 926148 - RNA, 19 nt, Artificial Sequence
  Description of Artificial Sequence: Synthetic oligonucleotide
  Sense strand starting at position 3475 of SEQ ID NO: 913423
gggcacaugacaugcauua

SEQ ID NO: 926149 - RNA, 19 nt, Artificial Sequence
  Description of Artificial Sequence: Synthetic oligonucleotide
  Antisense strand to SEQ ID NO: 926148
uaaugcaugucaugugccc

SEQ ID NO: 926150 - RNA, 19 nt, Artificial Sequence
  Description of Artificial Sequence: Synthetic oligonucleotide
  Sense strand starting at position 2403 of SEQ ID NO: 913423
aguccaaguccuggaacuu

SEQ ID NO: 926151 - RNA, 19 nt, Artificial Sequence
  Description of Artificial Sequence: Synthetic oligonucleotide
  Antisense strand to SEQ ID NO: 926150
aaguuccaggacuuggacu

SEQ ID NO: 926152 - RNA, 19 nt, Artificial Sequence
  Description of Artificial Sequence: Synthetic oligonucleotide
  Sense strand starting at position 1070 of SEQ ID NO: 913423
ggugaauccauccgaucac

SEQ ID NO: 926153 - RNA, 19 nt, Artificial Sequence
  Description of Artificial Sequence: Synthetic oligonucleotide
  Antisense strand to SEQ ID NO: 926152
gugaucggauggauucacc

SEQ ID NO: 926154 - RNA, 19 nt, Artificial Sequence
  Description of Artificial Sequence: Synthetic oligonucleotide
  Sense strand starting at position 2324 of SEQ ID NO: 913423
gagggugucuagucuuaaa

SEQ ID NO: 926155 - RNA, 19 nt, Artificial Sequence
  Description of Artificial Sequence: Synthetic oligonucleotide
  Antisense strand to SEQ ID NO: 926154
uuuaagacuagacacccuc

SEQ ID NO: 926156 - RNA, 19 nt, Artificial Sequence
  Description of Artificial Sequence: Synthetic oligonucleotide
  Sense strand starting at position 1184 of SEQ ID NO: 913423
aguaauguuucuccuauag

SEQ ID NO: 926157 - RNA, 19 nt, Artificial Sequence
  Description of Artificial Sequence: Synthetic oligonucleotide
  Antisense strand to SEQ ID NO: 926156
cuauaggagaaacauuacu

SEQ ID NO: 926158 - RNA, 19 nt, Artificial Sequence
  Description of Artificial Sequence: Synthetic oligonucleotide
  Sense strand starting at position 1188 of SEQ ID NO: 913423
auguuucuccuauagcuau

SEQ ID NO: 926159 - RNA, 19 nt, Artificial Sequence
  Description of Artificial Sequence: Synthetic oligonucleotide
  Antisense strand to SEQ ID NO: 926158
auagcuauaggagaaacau

SEQ ID NO: 926160 - RNA, 19 nt, Artificial Sequence
  Description of Artificial Sequence: Synthetic oligonucleotide
  Sense strand starting at position 61 of SEQ ID NO: 913423
agugcuacucuuugaaaca

SEQ ID NO: 926161 - RNA, 19 nt, Artificial Sequence
  Description of Artificial Sequence: Synthetic oligonucleotide
  Antisense strand to SEQ ID NO: 926160
uguuucaaagaguagcacu

SEQ ID NO: 926162 - RNA, 19 nt, Artificial Sequence
  Description of Artificial Sequence: Synthetic oligonucleotide
  Sense strand starting at position 1363 of SEQ ID NO: 913423
uuggaauguuuacugccaa

SEQ ID NO: 926163 - RNA, 19 nt, Artificial Sequence
  Description of Artificial Sequence: Synthetic oligonucleotide
  Antisense strand to SEQ ID NO: 926162
uuggcaguaaacauuccaa

SEQ ID NO: 926164 - RNA, 19 nt, Artificial Sequence
  Description of Artificial Sequence: Synthetic oligonucleotide
  Sense strand starting at position 60 of SEQ ID NO: 913423
gagugcuacucuuugaaac

SEQ ID NO: 926165 - RNA, 19 nt, Artificial Sequence
  Description of Artificial Sequence: Synthetic oligonucleotide
  Antisense strand to SEQ ID NO: 926164
guuucaaagaguagcacuc

SEQ ID NO: 926166 - RNA, 19 nt, Artificial Sequence
  Description of Artificial Sequence: Synthetic oligonucleotide
  Sense strand starting at position 653 of SEQ ID NO: 913423
gcauuuauaugggagguaa

SEQ ID NO: 926167 - RNA, 19 nt, Artificial Sequence
  Description of Artificial Sequence: Synthetic oligonucleotide
  Antisense strand to SEQ ID NO: 926166
uuaccucccauauaaaugc

SEQ ID NO: 926168 - RNA, 19 nt, Artificial Sequence
  Description of Artificial Sequence: Synthetic oligonucleotide
  Sense strand starting at position 1561 of SEQ ID NO: 913423
uuagaauacugagaaagau

SEQ ID NO: 926169 - RNA, 19 nt, Artificial Sequence
  Description of Artificial Sequence: Synthetic oligonucleotide
  Antisense strand to SEQ ID NO: 926168
aucuuucucaguauucuaa

SEQ ID NO: 926170 - RNA, 19 nt, Artificial Sequence
  Description of Artificial Sequence: Synthetic oligonucleotide
  Sense strand starting at position 3792 of SEQ ID NO: 913423
gaucguguacagcaaucau

SEQ ID NO: 926171 - RNA, 19 nt, Artificial Sequence
  Description of Artificial Sequence: Synthetic oligonucleotide
  Antisense strand to SEQ ID NO: 926170
augauugcuguacacgauc

SEQ ID NO: 926172 - RNA, 19 nt, Artificial Sequence
  Description of Artificial Sequence: Synthetic oligonucleotide
  Sense strand starting at position 2580 of SEQ ID NO: 913423
cucagauguuugucauuau

SEQ ID NO: 926173 - RNA, 19 nt, Artificial Sequence
  Description of Artificial Sequence: Synthetic oligonucleotide
  Antisense strand to SEQ ID NO: 926172
auaaugacaaacaucugag

SEQ ID NO: 926174 - RNA, 19 nt, Artificial Sequence
  Description of Artificial Sequence: Synthetic oligonucleotide
  Sense strand starting at position 667 of SEQ ID NO: 913423
gguaacaaauuagaagaua

SEQ ID NO: 926175 - RNA, 19 nt, Artificial Sequence
  Description of Artificial Sequence: Synthetic oligonucleotide
  Antisense strand to SEQ ID NO: 926174
uaucuucuaauuuguuacc

SEQ ID NO: 926176 - RNA, 19 nt, Artificial Sequence
  Description of Artificial Sequence: Synthetic oligonucleotide
  Sense strand starting at position 3843 of SEQ ID NO: 913423
acuggaacuucugaagaaa

SEQ ID NO: 926177 - RNA, 19 nt, Artificial Sequence
  Description of Artificial Sequence: Synthetic oligonucleotide
  Antisense strand to SEQ ID NO: 926176
uuucuucagaaguuccagu

SEQ ID NO: 926178 - RNA, 19 nt, Artificial Sequence
  Description of Artificial Sequence: Synthetic oligonucleotide
  Sense strand starting at position 376 of SEQ ID NO: 913424
cuauuuauuggcuguuuaa

SEQ ID NO: 926179 - RNA, 19 nt, Artificial Sequence
  Description of Artificial Sequence: Synthetic oligonucleotide
  Antisense strand to SEQ ID NO: 926178
uuaaacagccaauaaauag

SEQ ID NO: 926180 - RNA, 19 nt, Artificial Sequence
  Description of Artificial Sequence: Synthetic oligonucleotide
  Sense strand starting at position 3525 of SEQ ID NO: 913424
auguaugcacguguguuaa

SEQ ID NO: 926181 - RNA, 19 nt, Artificial Sequence
  Description of Artificial Sequence: Synthetic oligonucleotide
  Antisense strand to SEQ ID NO: 926180
uuaacacacgugcauacau

SEQ ID NO: 926182 - RNA, 19 nt, Artificial Sequence
  Description of Artificial Sequence: Synthetic oligonucleotide
  Sense strand starting at position 3451 of SEQ ID NO: 913424
ucugcuucuguguuugagu

SEQ ID NO: 926183 - RNA, 19 nt, Artificial Sequence
  Description of Artificial Sequence: Synthetic oligonucleotide
  Antisense strand to SEQ ID NO: 926182
acucaaacacagaagcaga

SEQ ID NO: 926184 - RNA, 19 nt, Artificial Sequence
  Description of Artificial Sequence: Synthetic oligonucleotide
  Sense strand starting at position 3113 of SEQ ID NO: 913424
ggcugugaucuagaaacua

SEQ ID NO: 926185 - RNA, 19 nt, Artificial Sequence
  Description of Artificial Sequence: Synthetic oligonucleotide
  Antisense strand to SEQ ID NO: 926184
uaguuucuagaucacagcc

SEQ ID NO: 926186 - RNA, 19 nt, Artificial Sequence
  Description of Artificial Sequence: Synthetic oligonucleotide
  Sense strand starting at position 375 of SEQ ID NO: 913424
ucuauuuauuggcuguuua

SEQ ID NO: 926187 - RNA, 19 nt, Artificial Sequence
  Description of Artificial Sequence: Synthetic oligonucleotide
  Antisense strand to SEQ ID NO: 926186
uaaacagccaauaaauaga

SEQ ID NO: 926188 - RNA, 19 nt, Artificial Sequence
  Description of Artificial Sequence: Synthetic oligonucleotide
  Sense strand starting at position 1223 of SEQ ID NO: 913424
ugaugaacuccucagcuua

SEQ ID NO: 926189 - RNA, 19 nt, Artificial Sequence
  Description of Artificial Sequence: Synthetic oligonucleotide
  Antisense strand to SEQ ID NO: 926188
uaagcugaggaguucauca

SEQ ID NO: 926190 - RNA, 19 nt, Artificial Sequence
  Description of Artificial Sequence: Synthetic oligonucleotide
  Sense strand starting at position 3865 of SEQ ID NO: 913424
agaagaauguaggcgacaa

SEQ ID NO: 926191 - RNA, 19 nt, Artificial Sequence
  Description of Artificial Sequence: Synthetic oligonucleotide
  Antisense strand to SEQ ID NO: 926190
uugucgccuacauucuucu

SEQ ID NO: 926192 - RNA, 19 nt, Artificial Sequence
  Description of Artificial Sequence: Synthetic oligonucleotide
  Sense strand starting at position 3806 of SEQ ID NO: 913424
cuagcucuucuggagauca

SEQ ID NO: 926193 - RNA, 19 nt, Artificial Sequence
  Description of Artificial Sequence: Synthetic oligonucleotide
  Antisense strand to SEQ ID NO: 926192
ugaucuccagaagagcuag

SEQ ID NO: 926194 - RNA, 19 nt, Artificial Sequence
  Description of Artificial Sequence: Synthetic oligonucleotide
  Sense strand starting at position 1513 of SEQ ID NO: 913424
cucaauggccuggaaaugu

SEQ ID NO: 926195 - RNA, 19 nt, Artificial Sequence
  Description of Artificial Sequence: Synthetic oligonucleotide
  Antisense strand to SEQ ID NO: 926194
acauuuccaggccauugag

SEQ ID NO: 926196 - RNA, 19 nt, Artificial Sequence
  Description of Artificial Sequence: Synthetic oligonucleotide
  Sense strand starting at position 2264 of SEQ ID NO: 913424
acuagaagcuucucagaug

SEQ ID NO: 926197 - RNA, 19 nt, Artificial Sequence
  Description of Artificial Sequence: Synthetic oligonucleotide
  Antisense strand to SEQ ID NO: 926196
caucugagaagcuucuagu

SEQ ID NO: 926198 - RNA, 19 nt, Artificial Sequence
  Description of Artificial Sequence: Synthetic oligonucleotide
  Sense strand starting at position 1511 of SEQ ID NO: 913424
aucucaauggccuggaaau

SEQ ID NO: 926199 - RNA, 19 nt, Artificial Sequence
  Description of Artificial Sequence: Synthetic oligonucleotide
  Antisense strand to SEQ ID NO: 926198
auuuccaggccauugagau

SEQ ID NO: 926200 - RNA, 19 nt, Artificial Sequence
  Description of Artificial Sequence: Synthetic oligonucleotide
  Sense strand starting at position 2499 of SEQ ID NO: 913424
aguggaaauguuugggauu

SEQ ID NO: 926201 - RNA, 19 nt, Artificial Sequence
  Description of Artificial Sequence: Synthetic oligonucleotide
  Antisense strand to SEQ ID NO: 926200
aaucccaaacauuuccacu

SEQ ID NO: 926202 - RNA, 19 nt, Artificial Sequence
  Description of Artificial Sequence: Synthetic oligonucleotide
  Sense strand starting at position 1512 of SEQ ID NO: 913424
ucucaauggccuggaaaug

SEQ ID NO: 926203 - RNA, 19 nt, Artificial Sequence
  Description of Artificial Sequence: Synthetic oligonucleotide
  Antisense strand to SEQ ID NO: 926202
cauuuccaggccauugaga

SEQ ID NO: 926204 - RNA, 19 nt, Artificial Sequence
  Description of Artificial Sequence: Synthetic oligonucleotide
  Sense strand starting at position 140 of SEQ ID NO: 913424
gucagagaucuguaucuuc

SEQ ID NO: 926205 - RNA, 19 nt, Artificial Sequence
  Description of Artificial Sequence: Synthetic oligonucleotide
  Antisense strand to SEQ ID NO: 926204
gaagauacagaucucugac

SEQ ID NO: 926206 - RNA, 19 nt, Artificial Sequence
  Description of Artificial Sequence: Synthetic oligonucleotide
  Sense strand starting at position 110 of SEQ ID NO: 913424
augaaauagucuuccaagu

SEQ ID NO: 926207 - RNA, 19 nt, Artificial Sequence
  Description of Artificial Sequence: Synthetic oligonucleotide
  Antisense strand to SEQ ID NO: 926206
acuuggaagacuauuucau

SEQ ID NO: 926208 - RNA, 19 nt, Artificial Sequence
  Description of Artificial Sequence: Synthetic oligonucleotide
  Sense strand starting at position 2990 of SEQ ID NO: 913424
agaaaucccuaguuacagu

SEQ ID NO: 926209 - RNA, 19 nt, Artificial Sequence
  Description of Artificial Sequence: Synthetic oligonucleotide
  Antisense strand to SEQ ID NO: 926208
acuguaacuagggauuucu

SEQ ID NO: 926210 - RNA, 19 nt, Artificial Sequence
  Description of Artificial Sequence: Synthetic oligonucleotide
  Sense strand starting at position 2489 of SEQ ID NO: 913424
uggcauccagaguggaaau

SEQ ID NO: 926211 - RNA, 19 nt, Artificial Sequence
  Description of Artificial Sequence: Synthetic oligonucleotide
  Antisense strand to SEQ ID NO: 926210
auuuccacucuggaugcca

SEQ ID NO: 926212 - RNA, 19 nt, Artificial Sequence
  Description of Artificial Sequence: Synthetic oligonucleotide
  Sense strand starting at position 134 of SEQ ID NO: 913424
aguuaugucagagaucugu

SEQ ID NO: 926213 - RNA, 19 nt, Artificial Sequence
  Description of Artificial Sequence: Synthetic oligonucleotide
  Antisense strand to SEQ ID NO: 926212
acagaucucugacauaacu

SEQ ID NO: 926214 - RNA, 19 nt, Artificial Sequence
  Description of Artificial Sequence: Synthetic oligonucleotide
  Sense strand starting at position 1093 of SEQ ID NO: 913424
agaggugcacuugaguuua

SEQ ID NO: 926215 - RNA, 19 nt, Artificial Sequence
  Description of Artificial Sequence: Synthetic oligonucleotide
  Antisense strand to SEQ ID NO: 926214
uaaacucaagugcaccucu

SEQ ID NO: 926216 - RNA, 19 nt, Artificial Sequence
  Description of Artificial Sequence: Synthetic oligonucleotide
  Sense strand starting at position 3111 of SEQ ID NO: 913424
guggcugugaucuagaaac

SEQ ID NO: 926217 - RNA, 19 nt, Artificial Sequence
  Description of Artificial Sequence: Synthetic oligonucleotide
  Antisense strand to SEQ ID NO: 926216
guuucuagaucacagccac

SEQ ID NO: 926218 - RNA, 19 nt, Artificial Sequence
  Description of Artificial Sequence: Synthetic oligonucleotide
  Sense strand starting at position 2305 of SEQ ID NO: 913424
ggugcucuauuucuagcau

SEQ ID NO: 926219 - RNA, 19 nt, Artificial Sequence
  Description of Artificial Sequence: Synthetic oligonucleotide
  Antisense strand to SEQ ID NO: 926218
augcuagaaauagagcacc

SEQ ID NO: 926220 - RNA, 19 nt, Artificial Sequence
  Description of Artificial Sequence: Synthetic oligonucleotide
  Sense strand starting at position 121 of SEQ ID NO: 913424
uuccaagugguauaguuau

SEQ ID NO: 926221 - RNA, 19 nt, Artificial Sequence
  Description of Artificial Sequence: Synthetic oligonucleotide
  Antisense strand to SEQ ID NO: 926220
auaacuauaccacuuggaa

SEQ ID NO: 926222 - RNA, 19 nt, Artificial Sequence
  Description of Artificial Sequence: Synthetic oligonucleotide
  Sense strand starting at position 2251 of SEQ ID NO: 913424
aggagaagauuagacuaga

SEQ ID NO: 926223 - RNA, 19 nt, Artificial Sequence
  Description of Artificial Sequence: Synthetic oligonucleotide
  Antisense strand to SEQ ID NO: 926222
ucuagucuaaucuucuccu

SEQ ID NO: 926224 - RNA, 19 nt, Artificial Sequence
  Description of Artificial Sequence: Synthetic oligonucleotide
  Sense strand starting at position 1302 of SEQ ID NO: 913424
uaaggaaucugagaagaga

SEQ ID NO: 926225 - RNA, 19 nt, Artificial Sequence
  Description of Artificial Sequence: Synthetic oligonucleotide
  Antisense strand to SEQ ID NO: 926224
ucucuucucagauuccuua

SEQ ID NO: 926226 - RNA, 19 nt, Artificial Sequence
  Description of Artificial Sequence: Synthetic oligonucleotide
  Sense strand starting at position 3344 of SEQ ID NO: 913424
uggguaauuggauguccua

SEQ ID NO: 926227 - RNA, 19 nt, Artificial Sequence
  Description of Artificial Sequence: Synthetic oligonucleotide
  Antisense strand to SEQ ID NO: 926226
uaggacauccaauuaccca

SEQ ID NO: 926228 - RNA, 19 nt, Artificial Sequence
  Description of Artificial Sequence: Synthetic oligonucleotide
  Sense strand starting at position 2394 of SEQ ID NO: 913424
aaugaaguacuuugcugau

SEQ ID NO: 926229 - RNA, 19 nt, Artificial Sequence
  Description of Artificial Sequence: Synthetic oligonucleotide
  Antisense strand to SEQ ID NO: 926228
aucagcaaaguacuucauu

SEQ ID NO: 926230 - RNA, 19 nt, Artificial Sequence
  Description of Artificial Sequence: Synthetic oligonucleotide
  Sense strand starting at position 3891 of SEQ ID NO: 913424
aagacacuggcaugucuua

SEQ ID NO: 926231 - RNA, 19 nt, Artificial Sequence
  Description of Artificial Sequence: Synthetic oligonucleotide
  Antisense strand to SEQ ID NO: 926230
uaagacaugccagugucuu

SEQ ID NO: 926232 - RNA, 19 nt, Artificial Sequence
  Description of Artificial Sequence: Synthetic oligonucleotide
  Sense strand starting at position 2396 of SEQ ID NO: 913424
ugaaguacuuugcugauga

SEQ ID NO: 926233 - RNA, 19 nt, Artificial Sequence
  Description of Artificial Sequence: Synthetic oligonucleotide
  Antisense strand to SEQ ID NO: 926232
ucaucagcaaaguacuuca

SEQ ID NO: 926234 - RNA, 19 nt, Artificial Sequence
  Description of Artificial Sequence: Synthetic oligonucleotide
  Sense strand starting at position 3417 of SEQ ID NO: 913424
ugcacaugugauuauguau

SEQ ID NO: 926235 - RNA, 19 nt, Artificial Sequence
  Description of Artificial Sequence: Synthetic oligonucleotide
  Antisense strand to SEQ ID NO: 926234
auacauaaucacaugugca

SEQ ID NO: 926236 - RNA, 19 nt, Artificial Sequence
  Description of Artificial Sequence: Synthetic oligonucleotide
  Sense strand starting at position 2365 of SEQ ID NO: 913424
agcauuccgcauuauuaaa

SEQ ID NO: 926237 - RNA, 19 nt, Artificial Sequence
  Description of Artificial Sequence: Synthetic oligonucleotide
  Antisense strand to SEQ ID NO: 926236
uuuaauaaugcggaaugcu

SEQ ID NO: 926238 - RNA, 19 nt, Artificial Sequence
  Description of Artificial Sequence: Synthetic oligonucleotide
  Sense strand starting at position 968 of SEQ ID NO: 913424
aaagaaacgugucugggua

SEQ ID NO: 926239 - RNA, 19 nt, Artificial Sequence
  Description of Artificial Sequence: Synthetic oligonucleotide
  Antisense strand to SEQ ID NO: 926238
uacccagacacguuucuuu

SEQ ID NO: 926240 - RNA, 19 nt, Artificial Sequence
  Description of Artificial Sequence: Synthetic oligonucleotide
  Sense strand starting at position 302 of SEQ ID NO: 913424
agugucagaugguuucaga

SEQ ID NO: 926241 - RNA, 19 nt, Artificial Sequence
  Description of Artificial Sequence: Synthetic oligonucleotide
  Antisense strand to SEQ ID NO: 926240
ucugaaaccaucugacacu

SEQ ID NO: 926242 - RNA, 19 nt, Artificial Sequence
  Description of Artificial Sequence: Synthetic oligonucleotide
  Sense strand starting at position 2928 of SEQ ID NO: 913424
gucagagucacauggguca

SEQ ID NO: 926243 - RNA, 19 nt, Artificial Sequence
  Description of Artificial Sequence: Synthetic oligonucleotide
  Antisense strand to SEQ ID NO: 926242
ugacccaugugacucugac

SEQ ID NO: 926244 - RNA, 19 nt, Artificial Sequence
  Description of Artificial Sequence: Synthetic oligonucleotide
  Sense strand starting at position 1707 of SEQ ID NO: 913424
ggucuagacaggugcuaag

SEQ ID NO: 926245 - RNA, 19 nt, Artificial Sequence
  Description of Artificial Sequence: Synthetic oligonucleotide
  Antisense strand to SEQ ID NO: 926244
cuuagcaccugucuagacc

SEQ ID NO: 926246 - RNA, 19 nt, Artificial Sequence
  Description of Artificial Sequence: Synthetic oligonucleotide
  Sense strand starting at position 26 of SEQ ID NO: 913424
auaucugcaucuguauaua

SEQ ID NO: 926247 - RNA, 19 nt, Artificial Sequence
  Description of Artificial Sequence: Synthetic oligonucleotide
  Antisense strand to SEQ ID NO: 926246
uauauacagaugcagauau

SEQ ID NO: 926248 - RNA, 19 nt, Artificial Sequence
  Description of Artificial Sequence: Synthetic oligonucleotide
  Sense strand starting at position 972 of SEQ ID NO: 913424
aaacgugucuggguacaaa

SEQ ID NO: 926249 - RNA, 19 nt, Artificial Sequence
  Description of Artificial Sequence: Synthetic oligonucleotide
  Antisense strand to SEQ ID NO: 926248
uuuguacccagacacguuu

SEQ ID NO: 926250 - RNA, 19 nt, Artificial Sequence
  Description of Artificial Sequence: Synthetic oligonucleotide
  Sense strand starting at position 2199 of SEQ ID NO: 913424
ggcacagccucagugagaa

SEQ ID NO: 926251 - RNA, 19 nt, Artificial Sequence
  Description of Artificial Sequence: Synthetic oligonucleotide
  Antisense strand to SEQ ID NO: 926250
uucucacugaggcugugcc

SEQ ID NO: 926252 - RNA, 19 nt, Artificial Sequence
  Description of Artificial Sequence: Synthetic oligonucleotide
  Sense strand starting at position 623 of SEQ ID NO: 913424
guguguauuuccuuugcca

SEQ ID NO: 926253 - RNA, 19 nt, Artificial Sequence
  Description of Artificial Sequence: Synthetic oligonucleotide
  Antisense strand to SEQ ID NO: 926252
uggcaaaggaaauacacac

SEQ ID NO: 926254 - RNA, 19 nt, Artificial Sequence
  Description of Artificial Sequence: Synthetic oligonucleotide
  Sense strand starting at position 2502 of SEQ ID NO: 913424
ggaaauguuugggauuugu

SEQ ID NO: 926255 - RNA, 19 nt, Artificial Sequence
  Description of Artificial Sequence: Synthetic oligonucleotide
  Antisense strand to SEQ ID NO: 926254
acaaaucccaaacauuucc

SEQ ID NO: 926256 - RNA, 19 nt, Artificial Sequence
  Description of Artificial Sequence: Synthetic oligonucleotide
  Sense strand starting at position 3484 of SEQ ID NO: 913424
gguguuuguacccaccuau

SEQ ID NO: 926257 - RNA, 19 nt, Artificial Sequence
  Description of Artificial Sequence: Synthetic oligonucleotide
  Antisense strand to SEQ ID NO: 926256
auagguggguacaaacacc

SEQ ID NO: 926258 - RNA, 19 nt, Artificial Sequence
  Description of Artificial Sequence: Synthetic oligonucleotide
  Sense strand starting at position 14 of SEQ ID NO: 913425
gagucaacccucuaaguag

SEQ ID NO: 926259 - RNA, 19 nt, Artificial Sequence
  Description of Artificial Sequence: Synthetic oligonucleotide
  Antisense strand to SEQ ID NO: 926258
cuacuuagaggguugacuc

SEQ ID NO: 926260 - RNA, 19 nt, Artificial Sequence
  Description of Artificial Sequence: Synthetic oligonucleotide
  Sense strand starting at position 3658 of SEQ ID NO: 913425
caguuauuuccucguggag

SEQ ID NO: 926261 - RNA, 19 nt, Artificial Sequence
  Description of Artificial Sequence: Synthetic oligonucleotide
  Antisense strand to SEQ ID NO: 926260
cuccacgaggaaauaacug

SEQ ID NO: 926262 - RNA, 19 nt, Artificial Sequence
  Description of Artificial Sequence: Synthetic oligonucleotide
  Sense strand starting at position 1583 of SEQ ID NO: 913425
gccucucauccacaagaug

SEQ ID NO: 926263 - RNA, 19 nt, Artificial Sequence
  Description of Artificial Sequence: Synthetic oligonucleotide
  Antisense strand to SEQ ID NO: 926262
caucuuguggaugagaggc

SEQ ID NO: 926264 - RNA, 19 nt, Artificial Sequence
  Description of Artificial Sequence: Synthetic oligonucleotide
  Sense strand starting at position 2520 of SEQ ID NO: 913425
acuucucccgaggaaucuu

SEQ ID NO: 926265 - RNA, 19 nt, Artificial Sequence
  Description of Artificial Sequence: Synthetic oligonucleotide
  Antisense strand to SEQ ID NO: 926264
aagauuccucgggagaagu

SEQ ID NO: 926266 - RNA, 19 nt, Artificial Sequence
  Description of Artificial Sequence: Synthetic oligonucleotide
  Sense strand starting at position 3961 of SEQ ID NO: 913425
gaguauuccaggcaaaggu

SEQ ID NO: 926267 - RNA, 19 nt, Artificial Sequence
  Description of Artificial Sequence: Synthetic oligonucleotide
  Antisense strand to SEQ ID NO: 926266
accuuugccuggaauacuc

SEQ ID NO: 926268 - RNA, 19 nt, Artificial Sequence
  Description of Artificial Sequence: Synthetic oligonucleotide
  Sense strand starting at position 2195 of SEQ ID NO: 913425
guuuacagccucuaaggau

SEQ ID NO: 926269 - RNA, 19 nt, Artificial Sequence
  Description of Artificial Sequence: Synthetic oligonucleotide
  Antisense strand to SEQ ID NO: 926268
auccuuagaggcuguaaac

SEQ ID NO: 926270 - RNA, 19 nt, Artificial Sequence
  Description of Artificial Sequence: Synthetic oligonucleotide
  Sense strand starting at position 2157 of SEQ ID NO: 913425
ugccauuacgcagaggaaa

SEQ ID NO: 926271 - RNA, 19 nt, Artificial Sequence
  Description of Artificial Sequence: Synthetic oligonucleotide
  Antisense strand to SEQ ID NO: 926270
uuuccucugcguaauggca

SEQ ID NO: 926272 - RNA, 19 nt, Artificial Sequence
  Description of Artificial Sequence: Synthetic oligonucleotide
  Sense strand starting at position 439 of SEQ ID NO: 913425
gcaagacuggacugcaaau

SEQ ID NO: 926273 - RNA, 19 nt, Artificial Sequence
  Description of Artificial Sequence: Synthetic oligonucleotide
  Antisense strand to SEQ ID NO: 926272
auuugcaguccagucuugc

SEQ ID NO: 926274 - RNA, 19 nt, Artificial Sequence
  Description of Artificial Sequence: Synthetic oligonucleotide
  Sense strand starting at position 2581 of SEQ ID NO: 913425
agaaauucucaguguuuag

SEQ ID NO: 926275 - RNA, 19 nt, Artificial Sequence
  Description of Artificial Sequence: Synthetic oligonucleotide
  Antisense strand to SEQ ID NO: 926274
cuaaacacugagaauuucu

SEQ ID NO: 926276 - RNA, 19 nt, Artificial Sequence
  Description of Artificial Sequence: Synthetic oligonucleotide
  Sense strand starting at position 2750 of SEQ ID NO: 913425
gguacaauauggguuuauu

SEQ ID NO: 926277 - RNA, 19 nt, Artificial Sequence
  Description of Artificial Sequence: Synthetic oligonucleotide
  Antisense strand to SEQ ID NO: 926276
aauaaacccauauuguacc

SEQ ID NO: 926278 - RNA, 19 nt, Artificial Sequence
  Description of Artificial Sequence: Synthetic oligonucleotide
  Sense strand starting at position 248 of SEQ ID NO: 913425
uuuagugaauuugacuaga

SEQ ID NO: 926279 - RNA, 19 nt, Artificial Sequence
  Description of Artificial Sequence: Synthetic oligonucleotide
  Antisense strand to SEQ ID NO: 926278
ucuagucaaauucacuaaa

SEQ ID NO: 926280 - RNA, 19 nt, Artificial Sequence
  Description of Artificial Sequence: Synthetic oligonucleotide
  Sense strand starting at position 2799 of SEQ ID NO: 913425
aacucuaggguuugguuaa

SEQ ID NO: 926281 - RNA, 19 nt, Artificial Sequence
  Description of Artificial Sequence: Synthetic oligonucleotide
  Antisense strand to SEQ ID NO: 926280
uuaaccaaacccuagaguu

SEQ ID NO: 926282 - RNA, 19 nt, Artificial Sequence
  Description of Artificial Sequence: Synthetic oligonucleotide
  Sense strand starting at position 2276 of SEQ ID NO: 913425
ggcauuugauaucaagaug

SEQ ID NO: 926283 - RNA, 19 nt, Artificial Sequence
  Description of Artificial Sequence: Synthetic oligonucleotide
  Antisense strand to SEQ ID NO: 926282
caucuugauaucaaaugcc

SEQ ID NO: 926284 - RNA, 19 nt, Artificial Sequence
  Description of Artificial Sequence: Synthetic oligonucleotide
  Sense strand starting at position 1190 of SEQ ID NO: 913425
agaguuugucaacaguagu

SEQ ID NO: 926285 - RNA, 19 nt, Artificial Sequence
  Description of Artificial Sequence: Synthetic oligonucleotide
  Antisense strand to SEQ ID NO: 926284
acuacuguugacaaacucu

SEQ ID NO: 926286 - RNA, 19 nt, Artificial Sequence
  Description of Artificial Sequence: Synthetic oligonucleotide
  Sense strand starting at position 327 of SEQ ID NO: 913425
auccauguuuaucuggauu

SEQ ID NO: 926287 - RNA, 19 nt, Artificial Sequence
  Description of Artificial Sequence: Synthetic oligonucleotide
  Antisense strand to SEQ ID NO: 926286
aauccagauaaacauggau

SEQ ID NO: 926288 - RNA, 19 nt, Artificial Sequence
  Description of Artificial Sequence: Synthetic oligonucleotide
  Sense strand starting at position 2138 of SEQ ID NO: 913425
aagccagauuuagauaagu

SEQ ID NO: 926289 - RNA, 19 nt, Artificial Sequence
  Description of Artificial Sequence: Synthetic oligonucleotide
  Antisense strand to SEQ ID NO: 926288
acuuaucuaaaucuggcuu

SEQ ID NO: 926290 - RNA, 19 nt, Artificial Sequence
  Description of Artificial Sequence: Synthetic oligonucleotide
  Sense strand starting at position 1185 of SEQ ID NO: 913425
cuuccagaguuugucaaca

SEQ ID NO: 926291 - RNA, 19 nt, Artificial Sequence
  Description of Artificial Sequence: Synthetic oligonucleotide
  Antisense strand to SEQ ID NO: 926290
uguugacaaacucuggaag

SEQ ID NO: 926292 - RNA, 19 nt, Artificial Sequence
  Description of Artificial Sequence: Synthetic oligonucleotide
  Sense strand starting at position 2423 of SEQ ID NO: 913425
agguuugcgacccagagua

SEQ ID NO: 926293 - RNA, 19 nt, Artificial Sequence
  Description of Artificial Sequence: Synthetic oligonucleotide
  Antisense strand to SEQ ID NO: 926292
uacucugggucgcaaaccu

SEQ ID NO: 926294 - RNA, 19 nt, Artificial Sequence
  Description of Artificial Sequence: Synthetic oligonucleotide
  Sense strand starting at position 2340 of SEQ ID NO: 913425
gcaagaaucacggguccua

SEQ ID NO: 926295 - RNA, 19 nt, Artificial Sequence
  Description of Artificial Sequence: Synthetic oligonucleotide
  Antisense strand to SEQ ID NO: 926294
uaggacccgugauucuugc

SEQ ID NO: 926296 - RNA, 19 nt, Artificial Sequence
  Description of Artificial Sequence: Synthetic oligonucleotide
  Sense strand starting at position 3500 of SEQ ID NO: 913425
ucacuacuuggguggcuaa

SEQ ID NO: 926297 - RNA, 19 nt, Artificial Sequence
  Description of Artificial Sequence: Synthetic oligonucleotide
  Antisense strand to SEQ ID NO: 926296
uuagccacccaaguaguga

SEQ ID NO: 926298 - RNA, 19 nt, Artificial Sequence
  Description of Artificial Sequence: Synthetic oligonucleotide
  Sense strand starting at position 1156 of SEQ ID NO: 913425
uccuuaucuucuuuaguga

SEQ ID NO: 926299 - RNA, 19 nt, Artificial Sequence
  Description of Artificial Sequence: Synthetic oligonucleotide
  Antisense strand to SEQ ID NO: 926298
ucacuaaagaagauaagga

SEQ ID NO: 926300 - RNA, 19 nt, Artificial Sequence
  Description of Artificial Sequence: Synthetic oligonucleotide
  Sense strand starting at position 396 of SEQ ID NO: 913425
ggaguaagauuuggaguga

SEQ ID NO: 926301 - RNA, 19 nt, Artificial Sequence
  Description of Artificial Sequence: Synthetic oligonucleotide
  Antisense strand to SEQ ID NO: 926300
ucacuccaaaucuuacucc

SEQ ID NO: 926302 - RNA, 19 nt, Artificial Sequence
  Description of Artificial Sequence: Synthetic oligonucleotide
  Sense strand starting at position 1079 of SEQ ID NO: 913425
uuguaauucuagcuuacag

SEQ ID NO: 926303 - RNA, 19 nt, Artificial Sequence
  Description of Artificial Sequence: Synthetic oligonucleotide
  Antisense strand to SEQ ID NO: 926302
cuguaagcuagaauuacaa

SEQ ID NO: 926304 - RNA, 19 nt, Artificial Sequence
  Description of Artificial Sequence: Synthetic oligonucleotide
  Sense strand starting at position 2681 of SEQ ID NO: 913425
guccuucaacgguggaaua

SEQ ID NO: 926305 - RNA, 19 nt, Artificial Sequence
  Description of Artificial Sequence: Synthetic oligonucleotide
  Antisense strand to SEQ ID NO: 926304
uauuccaccguugaaggac

SEQ ID NO: 926306 - RNA, 19 nt, Artificial Sequence
  Description of Artificial Sequence: Synthetic oligonucleotide
  Sense strand starting at position 591 of SEQ ID NO: 913425
acuauacgaguuugccaaa

SEQ ID NO: 926307 - RNA, 19 nt, Artificial Sequence
  Description of Artificial Sequence: Synthetic oligonucleotide
  Antisense strand to SEQ ID NO: 926306
uuuggcaaacucguauagu

SEQ ID NO: 926308 - RNA, 19 nt, Artificial Sequence
  Description of Artificial Sequence: Synthetic oligonucleotide
  Sense strand starting at position 340 of SEQ ID NO: 913425
uggauuuguuacgguauuu

SEQ ID NO: 926309 - RNA, 19 nt, Artificial Sequence
  Description of Artificial Sequence: Synthetic oligonucleotide
  Antisense strand to SEQ ID NO: 926308
aaauaccguaacaaaucca

SEQ ID NO: 926310 - RNA, 19 nt, Artificial Sequence
  Description of Artificial Sequence: Synthetic oligonucleotide
  Sense strand starting at position 2625 of SEQ ID NO: 913425
uugcuaacugugggaugua

SEQ ID NO: 926311 - RNA, 19 nt, Artificial Sequence
  Description of Artificial Sequence: Synthetic oligonucleotide
  Antisense strand to SEQ ID NO: 926310
uacaucccacaguuagcaa

SEQ ID NO: 926312 - RNA, 19 nt, Artificial Sequence
  Description of Artificial Sequence: Synthetic oligonucleotide
  Sense strand starting at position 3329 of SEQ ID NO: 913425
uugugacagccuuguacaa

SEQ ID NO: 926313 - RNA, 19 nt, Artificial Sequence
  Description of Artificial Sequence: Synthetic oligonucleotide
  Antisense strand to SEQ ID NO: 926312
uuguacaaggcugucacaa

SEQ ID NO: 926314 - RNA, 19 nt, Artificial Sequence
  Description of Artificial Sequence: Synthetic oligonucleotide
  Sense strand starting at position 2637 of SEQ ID NO: 913425
ggauguaagcccugcacua

SEQ ID NO: 926315 - RNA, 19 nt, Artificial Sequence
  Description of Artificial Sequence: Synthetic oligonucleotide
  Antisense strand to SEQ ID NO: 926314
uagugcagggcuuacaucc

SEQ ID NO: 926316 - RNA, 19 nt, Artificial Sequence
  Description of Artificial Sequence: Synthetic oligonucleotide
  Sense strand starting at position 476 of SEQ ID NO: 913425
gccaccuguuaagcuuaaa

SEQ ID NO: 926317 - RNA, 19 nt, Artificial Sequence
  Description of Artificial Sequence: Synthetic oligonucleotide
  Antisense strand to SEQ ID NO: 926316
uuuaagcuuaacagguggc

SEQ ID NO: 926318 - RNA, 19 nt, Artificial Sequence
  Description of Artificial Sequence: Synthetic oligonucleotide
  Sense strand starting at position 2621 of SEQ ID NO: 913425
gcuauugcuaacuguggga

SEQ ID NO: 926319 - RNA, 19 nt, Artificial Sequence
  Description of Artificial Sequence: Synthetic oligonucleotide
  Antisense strand to SEQ ID NO: 926318
ucccacaguuagcaauagc

SEQ ID NO: 926320 - RNA, 19 nt, Artificial Sequence
  Description of Artificial Sequence: Synthetic oligonucleotide
  Sense strand starting at position 1466 of SEQ ID NO: 913425
ggcguuucuccagagagcu

SEQ ID NO: 926321 - RNA, 19 nt, Artificial Sequence
  Description of Artificial Sequence: Synthetic oligonucleotide
  Antisense strand to SEQ ID NO: 926320
agcucucuggagaaacgcc

SEQ ID NO: 926322 - RNA, 19 nt, Artificial Sequence
  Description of Artificial Sequence: Synthetic oligonucleotide
  Sense strand starting at position 329 of SEQ ID NO: 913425
ccauguuuaucuggauuug

SEQ ID NO: 926323 - RNA, 19 nt, Artificial Sequence
  Description of Artificial Sequence: Synthetic oligonucleotide
  Antisense strand to SEQ ID NO: 926322
caaauccagauaaacaugg

SEQ ID NO: 926324 - RNA, 19 nt, Artificial Sequence
  Description of Artificial Sequence: Synthetic oligonucleotide
  Sense strand starting at position 1476 of SEQ ID NO: 913425
cagagagcuuccuccgcuu

SEQ ID NO: 926325 - RNA, 19 nt, Artificial Sequence
  Description of Artificial Sequence: Synthetic oligonucleotide
  Antisense strand to SEQ ID NO: 926324
aagcggaggaagcucucug

SEQ ID NO: 926326 - RNA, 19 nt, Artificial Sequence
  Description of Artificial Sequence: Synthetic oligonucleotide
  Sense strand starting at position 2042 of SEQ ID NO: 913425
auuuguaguucuggaacuu

SEQ ID NO: 926327 - RNA, 19 nt, Artificial Sequence
  Description of Artificial Sequence: Synthetic oligonucleotide
  Antisense strand to SEQ ID NO: 926326
aaguuccagaacuacaaau

SEQ ID NO: 926328 - RNA, 19 nt, Artificial Sequence
  Description of Artificial Sequence: Synthetic oligonucleotide
  Sense strand starting at position 339 of SEQ ID NO: 913425
cuggauuuguuacgguauu

SEQ ID NO: 926329 - RNA, 19 nt, Artificial Sequence
  Description of Artificial Sequence: Synthetic oligonucleotide
  Antisense strand to SEQ ID NO: 926328
aauaccguaacaaauccag

SEQ ID NO: 926330 - RNA, 19 nt, Artificial Sequence
  Description of Artificial Sequence: Synthetic oligonucleotide
  Sense strand starting at position 2578 of SEQ ID NO: 913425
ucaagaaauucucaguguu

SEQ ID NO: 926331 - RNA, 19 nt, Artificial Sequence
  Description of Artificial Sequence: Synthetic oligonucleotide
  Antisense strand to SEQ ID NO: 926330
aacacugagaauuucuuga

SEQ ID NO: 926332 - RNA, 19 nt, Artificial Sequence
  Description of Artificial Sequence: Synthetic oligonucleotide
  Sense strand starting at position 2230 of SEQ ID NO: 913425
acgggugucuccgugguua

SEQ ID NO: 926333 - RNA, 19 nt, Artificial Sequence
  Description of Artificial Sequence: Synthetic oligonucleotide
  Antisense strand to SEQ ID NO: 926332
uaaccacggagacacccgu

SEQ ID NO: 926334 - RNA, 19 nt, Artificial Sequence
  Description of Artificial Sequence: Synthetic oligonucleotide
  Sense strand starting at position 2172 of SEQ ID NO: 913425
gaaaucggcugaugggaau

SEQ ID NO: 926335 - RNA, 19 nt, Artificial Sequence
  Description of Artificial Sequence: Synthetic oligonucleotide
  Antisense strand to SEQ ID NO: 926334
auucccaucagccgauuuc

SEQ ID NO: 926336 - RNA, 19 nt, Artificial Sequence
  Description of Artificial Sequence: Synthetic oligonucleotide
  Sense strand starting at position 594 of SEQ ID NO: 913425
auacgaguuugccaaagau

SEQ ID NO: 926337 - RNA, 19 nt, Artificial Sequence
  Description of Artificial Sequence: Synthetic oligonucleotide
  Antisense strand to SEQ ID NO: 926336
aucuuuggcaaacucguau

SEQ ID NO: 926338 - RNA, 19 nt, Artificial Sequence
  Description of Artificial Sequence: Synthetic oligonucleotide
  Sense strand starting at position 4 of SEQ ID NO: 913426
accgaaaggaaauguauca

SEQ ID NO: 926339 - RNA, 19 nt, Artificial Sequence
  Description of Artificial Sequence: Synthetic oligonucleotide
  Antisense strand to SEQ ID NO: 926338
ugauacauuuccuuucggu

SEQ ID NO: 926340 - RNA, 19 nt, Artificial Sequence
  Description of Artificial Sequence: Synthetic oligonucleotide
  Sense strand starting at position 734 of SEQ ID NO: 913426
aaagcaaguggucacuaaa

SEQ ID NO: 926341 - RNA, 19 nt, Artificial Sequence
  Description of Artificial Sequence: Synthetic oligonucleotide
  Antisense strand to SEQ ID NO: 926340
uuuagugaccacuugcuuu

SEQ ID NO: 926342 - RNA, 19 nt, Artificial Sequence
  Description of Artificial Sequence: Synthetic oligonucleotide
  Sense strand starting at position 3856 of SEQ ID NO: 913426
ucauuaagugacugaaaug

SEQ ID NO: 926343 - RNA, 19 nt, Artificial Sequence
  Description of Artificial Sequence: Synthetic oligonucleotide
  Antisense strand to SEQ ID NO: 926342
cauuucagucacuuaauga

SEQ ID NO: 926344 - RNA, 19 nt, Artificial Sequence
  Description of Artificial Sequence: Synthetic oligonucleotide
  Sense strand starting at position 2460 of SEQ ID NO: 913426
ucaaguucugcugaagaaa

SEQ ID NO: 926345 - RNA, 19 nt, Artificial Sequence
  Description of Artificial Sequence: Synthetic oligonucleotide
  Antisense strand to SEQ ID NO: 926344
uuucuucagcagaacuuga

SEQ ID NO: 926346 - RNA, 19 nt, Artificial Sequence
  Description of Artificial Sequence: Synthetic oligonucleotide
  Sense strand starting at position 3764 of SEQ ID NO: 913426
uaguuucuggauuaguaaa

SEQ ID NO: 926347 - RNA, 19 nt, Artificial Sequence
  Description of Artificial Sequence: Synthetic oligonucleotide
  Antisense strand to SEQ ID NO: 926346
uuuacuaauccagaaacua

SEQ ID NO: 926348 - RNA, 19 nt, Artificial Sequence
  Description of Artificial Sequence: Synthetic oligonucleotide
  Sense strand starting at position 3038 of SEQ ID NO: 913426
gguuaaagugauuaacuuu

SEQ ID NO: 926349 - RNA, 19 nt, Artificial Sequence
  Description of Artificial Sequence: Synthetic oligonucleotide
  Antisense strand to SEQ ID NO: 926348
aaaguuaaucacuuuaacc

SEQ ID NO: 926350 - RNA, 19 nt, Artificial Sequence
  Description of Artificial Sequence: Synthetic oligonucleotide
  Sense strand starting at position 3394 of SEQ ID NO: 913426
ccaagauucugagcaugaa

SEQ ID NO: 926351 - RNA, 19 nt, Artificial Sequence
  Description of Artificial Sequence: Synthetic oligonucleotide
  Antisense strand to SEQ ID NO: 926350
uucaugcucagaaucuugg

SEQ ID NO: 926352 - RNA, 19 nt, Artificial Sequence
  Description of Artificial Sequence: Synthetic oligonucleotide
  Sense strand starting at position 3073 of SEQ ID NO: 913426
gaaaguguugaugaucuuu

SEQ ID NO: 926353 - RNA, 19 nt, Artificial Sequence
  Description of Artificial Sequence: Synthetic oligonucleotide
  Antisense strand to SEQ ID NO: 926352
aaagaucaucaacacuuuc

SEQ ID NO: 926354 - RNA, 19 nt, Artificial Sequence
  Description of Artificial Sequence: Synthetic oligonucleotide
  Sense strand starting at position 2888 of SEQ ID NO: 913426
gaaugaagugacugaguua

SEQ ID NO: 926355 - RNA, 19 nt, Artificial Sequence
  Description of Artificial Sequence: Synthetic oligonucleotide
  Antisense strand to SEQ ID NO: 926354
uaacucagucacuucauuc

SEQ ID NO: 926356 - RNA, 19 nt, Artificial Sequence
  Description of Artificial Sequence: Synthetic oligonucleotide
  Sense strand starting at position 3361 of SEQ ID NO: 913426
ucucccaguuguuuauuua

SEQ ID NO: 926357 - RNA, 19 nt, Artificial Sequence
  Description of Artificial Sequence: Synthetic oligonucleotide
  Antisense strand to SEQ ID NO: 926356
uaaauaaacaacugggaga

SEQ ID NO: 926358 - RNA, 19 nt, Artificial Sequence
  Description of Artificial Sequence: Synthetic oligonucleotide
  Sense strand starting at position 509 of SEQ ID NO: 913426
ucacauuaccuugaucagu

SEQ ID NO: 926359 - RNA, 19 nt, Artificial Sequence
  Description of Artificial Sequence: Synthetic oligonucleotide
  Antisense strand to SEQ ID NO: 926358
acugaucaagguaauguga

SEQ ID NO: 926360 - RNA, 19 nt, Artificial Sequence
  Description of Artificial Sequence: Synthetic oligonucleotide
  Sense strand starting at position 3397 of SEQ ID NO: 913426
agauucugagcaugaauua

SEQ ID NO: 926361 - RNA, 19 nt, Artificial Sequence
  Description of Artificial Sequence: Synthetic oligonucleotide
  Antisense strand to SEQ ID NO: 926360
uaauucaugcucagaaucu

SEQ ID NO: 926362 - RNA, 19 nt, Artificial Sequence
  Description of Artificial Sequence: Synthetic oligonucleotide
  Sense strand starting at position 3492 of SEQ ID NO: 913426
cccgacucgauuugaguuu

SEQ ID NO: 926363 - RNA, 19 nt, Artificial Sequence
  Description of Artificial Sequence: Synthetic oligonucleotide
  Antisense strand to SEQ ID NO: 926362
aaacucaaaucgagucggg

SEQ ID NO: 926364 - RNA, 19 nt, Artificial Sequence
  Description of Artificial Sequence: Synthetic oligonucleotide
  Sense strand starting at position 342 of SEQ ID NO: 913426
uucuguaaucaguaacuua

SEQ ID NO: 926365 - RNA, 19 nt, Artificial Sequence
  Description of Artificial Sequence: Synthetic oligonucleotide
  Antisense strand to SEQ ID NO: 926364
uaaguuacugauuacagaa

SEQ ID NO: 926366 - RNA, 19 nt, Artificial Sequence
  Description of Artificial Sequence: Synthetic oligonucleotide
  Sense strand starting at position 3855 of SEQ ID NO: 913426
gucauuaagugacugaaau

SEQ ID NO: 926367 - RNA, 19 nt, Artificial Sequence
  Description of Artificial Sequence: Synthetic oligonucleotide
  Antisense strand to SEQ ID NO: 926366
auuucagucacuuaaugac

SEQ ID NO: 926368 - RNA, 19 nt, Artificial Sequence
  Description of Artificial Sequence: Synthetic oligonucleotide
  Sense strand starting at position 2236 of SEQ ID NO: 913426
gaaguuagucucugaaaca

SEQ ID NO: 926369 - RNA, 19 nt, Artificial Sequence
  Description of Artificial Sequence: Synthetic oligonucleotide
  Antisense strand to SEQ ID NO: 926368
uguuucagagacuaacuuc

SEQ ID NO: 926370 - RNA, 19 nt, Artificial Sequence
  Description of Artificial Sequence: Synthetic oligonucleotide
  Sense strand starting at position 3037 of SEQ ID NO: 913426
ggguuaaagugauuaacuu

SEQ ID NO: 926371 - RNA, 19 nt, Artificial Sequence
  Description of Artificial Sequence: Synthetic oligonucleotide
  Antisense strand to SEQ ID NO: 926370
aaguuaaucacuuuaaccc

SEQ ID NO: 926372 - RNA, 19 nt, Artificial Sequence
  Description of Artificial Sequence: Synthetic oligonucleotide
  Sense strand starting at position 2573 of SEQ ID NO: 913426
uggaaagaugcauguaauc

SEQ ID NO: 926373 - RNA, 19 nt, Artificial Sequence
  Description of Artificial Sequence: Synthetic oligonucleotide
  Antisense strand to SEQ ID NO: 926372
gauuacaugcaucuuucca

SEQ ID NO: 926374 - RNA, 19 nt, Artificial Sequence
  Description of Artificial Sequence: Synthetic oligonucleotide
  Sense strand starting at position 2642 of SEQ ID NO: 913426
gggagacaguacucugcaa

SEQ ID NO: 926375 - RNA, 19 nt, Artificial Sequence
  Description of Artificial Sequence: Synthetic oligonucleotide
  Antisense strand to SEQ ID NO: 926374
uugcagaguacugucuccc

SEQ ID NO: 926376 - RNA, 19 nt, Artificial Sequence
  Description of Artificial Sequence: Synthetic oligonucleotide
  Sense strand starting at position 2900 of SEQ ID NO: 913426
ugaguuauucuugaauguc

SEQ ID NO: 926377 - RNA, 19 nt, Artificial Sequence
  Description of Artificial Sequence: Synthetic oligonucleotide
  Antisense strand to SEQ ID NO: 926376
gacauucaagaauaacuca

SEQ ID NO: 926378 - RNA, 19 nt, Artificial Sequence
  Description of Artificial Sequence: Synthetic oligonucleotide
  Sense strand starting at position 261 of SEQ ID NO: 913426
ccaaauacuugagugucaa

SEQ ID NO: 926379 - RNA, 19 nt, Artificial Sequence
  Description of Artificial Sequence: Synthetic oligonucleotide
  Antisense strand to SEQ ID NO: 926378
uugacacucaaguauuugg

SEQ ID NO: 926380 - RNA, 19 nt, Artificial Sequence
  Description of Artificial Sequence: Synthetic oligonucleotide
  Sense strand starting at position 801 of SEQ ID NO: 913426
gcuagcugaggguaaacau

SEQ ID NO: 926381 - RNA, 19 nt, Artificial Sequence
  Description of Artificial Sequence: Synthetic oligonucleotide
  Antisense strand to SEQ ID NO: 926380
auguuuacccucagcuagc

SEQ ID NO: 926382 - RNA, 19 nt, Artificial Sequence
  Description of Artificial Sequence: Synthetic oligonucleotide
  Sense strand starting at position 3264 of SEQ ID NO: 913426
acaaguuaauggcugaauu

SEQ ID NO: 926383 - RNA, 19 nt, Artificial Sequence
  Description of Artificial Sequence: Synthetic oligonucleotide
  Antisense strand to SEQ ID NO: 926382
aauucagccauuaacuugu

SEQ ID NO: 926384 - RNA, 19 nt, Artificial Sequence
  Description of Artificial Sequence: Synthetic oligonucleotide
  Sense strand starting at position 2235 of SEQ ID NO: 913426
ugaaguuagucucugaaac

SEQ ID NO: 926385 - RNA, 19 nt, Artificial Sequence
  Description of Artificial Sequence: Synthetic oligonucleotide
  Antisense strand to SEQ ID NO: 926384
guuucagagacuaacuuca

SEQ ID NO: 926386 - RNA, 19 nt, Artificial Sequence
  Description of Artificial Sequence: Synthetic oligonucleotide
  Sense strand starting at position 11 of SEQ ID NO: 913426
ggaaauguaucaucuaguu

SEQ ID NO: 926387 - RNA, 19 nt, Artificial Sequence
  Description of Artificial Sequence: Synthetic oligonucleotide
  Antisense strand to SEQ ID NO: 926386
aacuagaugauacauuucc

SEQ ID NO: 926388 - RNA, 19 nt, Artificial Sequence
  Description of Artificial Sequence: Synthetic oligonucleotide
  Sense strand starting at position 750 of SEQ ID NO: 913426
aaacuccugugucuggaaa

SEQ ID NO: 926389 - RNA, 19 nt, Artificial Sequence
  Description of Artificial Sequence: Synthetic oligonucleotide
  Antisense strand to SEQ ID NO: 926388
uuuccagacacaggaguuu

SEQ ID NO: 926390 - RNA, 19 nt, Artificial Sequence
  Description of Artificial Sequence: Synthetic oligonucleotide
  Sense strand starting at position 508 of SEQ ID NO: 913426
gucacauuaccuugaucag

SEQ ID NO: 926391 - RNA, 19 nt, Artificial Sequence
  Description of Artificial Sequence: Synthetic oligonucleotide
  Antisense strand to SEQ ID NO: 926390
cugaucaagguaaugugac

SEQ ID NO: 926392 - RNA, 19 nt, Artificial Sequence
  Description of Artificial Sequence: Synthetic oligonucleotide
  Sense strand starting at position 2194 of SEQ ID NO: 913426
cgggaaagaucuuuacagc

SEQ ID NO: 926393 - RNA, 19 nt, Artificial Sequence
  Description of Artificial Sequence: Synthetic oligonucleotide
  Antisense strand to SEQ ID NO: 926392
gcuguaaagaucuuucccg

SEQ ID NO: 926394 - RNA, 19 nt, Artificial Sequence
  Description of Artificial Sequence: Synthetic oligonucleotide
  Sense strand starting at position 737 of SEQ ID NO: 913426
gcaaguggucacuaaacuc

SEQ ID NO: 926395 - RNA, 19 nt, Artificial Sequence
  Description of Artificial Sequence: Synthetic oligonucleotide
  Antisense strand to SEQ ID NO: 926394
gaguuuagugaccacuugc

SEQ ID NO: 926396 - RNA, 19 nt, Artificial Sequence
  Description of Artificial Sequence: Synthetic oligonucleotide
  Sense strand starting at position 1319 of SEQ ID NO: 913426
accggucaucugcagaaca

SEQ ID NO: 926397 - RNA, 19 nt, Artificial Sequence
  Description of Artificial Sequence: Synthetic oligonucleotide
  Antisense strand to SEQ ID NO: 926396
uguucugcagaugaccggu

SEQ ID NO: 926398 - RNA, 19 nt, Artificial Sequence
  Description of Artificial Sequence: Synthetic oligonucleotide
  Sense strand starting at position 2891 of SEQ ID NO: 913426
ugaagugacugaguuauuc

SEQ ID NO: 926399 - RNA, 19 nt, Artificial Sequence
  Description of Artificial Sequence: Synthetic oligonucleotide
  Antisense strand to SEQ ID NO: 926398
gaauaacucagucacuuca

SEQ ID NO: 926400 - RNA, 19 nt, Artificial Sequence
  Description of Artificial Sequence: Synthetic oligonucleotide
  Sense strand starting at position 3079 of SEQ ID NO: 913426
guugaugaucuuuaugcau

SEQ ID NO: 926401 - RNA, 19 nt, Artificial Sequence
  Description of Artificial Sequence: Synthetic oligonucleotide
  Antisense strand to SEQ ID NO: 926400
augcauaaagaucaucaac

SEQ ID NO: 926402 - RNA, 19 nt, Artificial Sequence
  Description of Artificial Sequence: Synthetic oligonucleotide
  Sense strand starting at position 2644 of SEQ ID NO: 913426
gagacaguacucugcaaug

SEQ ID NO: 926403 - RNA, 19 nt, Artificial Sequence
  Description of Artificial Sequence: Synthetic oligonucleotide
  Antisense strand to SEQ ID NO: 926402
cauugcagaguacugucuc

SEQ ID NO: 926404 - RNA, 19 nt, Artificial Sequence
  Description of Artificial Sequence: Synthetic oligonucleotide
  Sense strand starting at position 3700 of SEQ ID NO: 913426
ccuaguuaccugugagaga

SEQ ID NO: 926405 - RNA, 19 nt, Artificial Sequence
  Description of Artificial Sequence: Synthetic oligonucleotide
  Antisense strand to SEQ ID NO: 926404
ucucucacagguaacuagg

SEQ ID NO: 926406 - RNA, 19 nt, Artificial Sequence
  Description of Artificial Sequence: Synthetic oligonucleotide
  Sense strand starting at position 2646 of SEQ ID NO: 913426
gacaguacucugcaaugug

SEQ ID NO: 926407 - RNA, 19 nt, Artificial Sequence
  Description of Artificial Sequence: Synthetic oligonucleotide
  Antisense strand to SEQ ID NO: 926406
cacauugcagaguacuguc

SEQ ID NO: 926408 - RNA, 19 nt, Artificial Sequence
  Description of Artificial Sequence: Synthetic oligonucleotide
  Sense strand starting at position 353 of SEQ ID NO: 913426
guaacuuaaugguuaucau

SEQ ID NO: 926409 - RNA, 19 nt, Artificial Sequence
  Description of Artificial Sequence: Synthetic oligonucleotide
  Antisense strand to SEQ ID NO: 926408
augauaaccauuaaguuac

SEQ ID NO: 926410 - RNA, 19 nt, Artificial Sequence
  Description of Artificial Sequence: Synthetic oligonucleotide
  Sense strand starting at position 898 of SEQ ID NO: 913426
aguuuagaguuacuccaca

SEQ ID NO: 926411 - RNA, 19 nt, Artificial Sequence
  Description of Artificial Sequence: Synthetic oligonucleotide
  Antisense strand to SEQ ID NO: 926410
uguggaguaacucuaaacu

SEQ ID NO: 926412 - RNA, 19 nt, Artificial Sequence
  Description of Artificial Sequence: Synthetic oligonucleotide
  Sense strand starting at position 2903 of SEQ ID NO: 913426
guuauucuugaaugucaaa

SEQ ID NO: 926413 - RNA, 19 nt, Artificial Sequence
  Description of Artificial Sequence: Synthetic oligonucleotide
  Antisense strand to SEQ ID NO: 926412
uuugacauucaagaauaac

SEQ ID NO: 926414 - RNA, 19 nt, Artificial Sequence
  Description of Artificial Sequence: Synthetic oligonucleotide
  Sense strand starting at position 3075 of SEQ ID NO: 913426
aaguguugaugaucuuuau

SEQ ID NO: 926415 - RNA, 19 nt, Artificial Sequence
  Description of Artificial Sequence: Synthetic oligonucleotide
  Antisense strand to SEQ ID NO: 926414
auaaagaucaucaacacuu

SEQ ID NO: 926416 - RNA, 19 nt, Artificial Sequence
  Description of Artificial Sequence: Synthetic oligonucleotide
  Sense strand starting at position 911 of SEQ ID NO: 913426
uccacaagcguguaacaga

SEQ ID NO: 926417 - RNA, 19 nt, Artificial Sequence
  Description of Artificial Sequence: Synthetic oligonucleotide
  Antisense strand to SEQ ID NO: 926416
ucuguuacacgcuugugga

SEQ ID NO: 926418 - RNA, 19 nt, Artificial Sequence
  Description of Artificial Sequence: Synthetic oligonucleotide
  Sense strand starting at position 3457 of SEQ ID NO: 913427
auuagcaaugagcagauua

SEQ ID NO: 926419 - RNA, 19 nt, Artificial Sequence
  Description of Artificial Sequence: Synthetic oligonucleotide
  Antisense strand to SEQ ID NO: 926418
uaaucugcucauugcuaau

SEQ ID NO: 926420 - RNA, 19 nt, Artificial Sequence
  Description of Artificial Sequence: Synthetic oligonucleotide
  Sense strand starting at position 1561 of SEQ ID NO: 913427
guaggaaaugcaugaaaua

SEQ ID NO: 926421 - RNA, 19 nt, Artificial Sequence
  Description of Artificial Sequence: Synthetic oligonucleotide
  Antisense strand to SEQ ID NO: 926420
uauuucaugcauuuccuac

SEQ ID NO: 926422 - RNA, 19 nt, Artificial Sequence
  Description of Artificial Sequence: Synthetic oligonucleotide
  Sense strand starting at position 3438 of SEQ ID NO: 913427
cuggcucuucuuugaauuu

SEQ ID NO: 926423 - RNA, 19 nt, Artificial Sequence
  Description of Artificial Sequence: Synthetic oligonucleotide
  Antisense strand to SEQ ID NO: 926422
aaauucaaagaagagccag

SEQ ID NO: 926424 - RNA, 19 nt, Artificial Sequence
  Description of Artificial Sequence: Synthetic oligonucleotide
  Sense strand starting at position 3295 of SEQ ID NO: 913427
cuugaauucuaggugggaa

SEQ ID NO: 926425 - RNA, 19 nt, Artificial Sequence
  Description of Artificial Sequence: Synthetic oligonucleotide
  Antisense strand to SEQ ID NO: 926424
uucccaccuagaauucaag

SEQ ID NO: 926426 - RNA, 19 nt, Artificial Sequence
  Description of Artificial Sequence: Synthetic oligonucleotide
  Sense strand starting at position 2439 of SEQ ID NO: 913427
gugcuuucggaggauuugu

SEQ ID NO: 926427 - RNA, 19 nt, Artificial Sequence
  Description of Artificial Sequence: Synthetic oligonucleotide
  Antisense strand to SEQ ID NO: 926426
acaaauccuccgaaagcac

SEQ ID NO: 926428 - RNA, 19 nt, Artificial Sequence
  Description of Artificial Sequence: Synthetic oligonucleotide
  Sense strand starting at position 2438 of SEQ ID NO: 913427
ggugcuuucggaggauuug

SEQ ID NO: 926429 - RNA, 19 nt, Artificial Sequence
  Description of Artificial Sequence: Synthetic oligonucleotide
  Antisense strand to SEQ ID NO: 926428
caaauccuccgaaagcacc

SEQ ID NO: 926430 - RNA, 19 nt, Artificial Sequence
  Description of Artificial Sequence: Synthetic oligonucleotide
  Sense strand starting at position 3296 of SEQ ID NO: 913427
uugaauucuaggugggaac

SEQ ID NO: 926431 - RNA, 19 nt, Artificial Sequence
  Description of Artificial Sequence: Synthetic oligonucleotide
  Antisense strand to SEQ ID NO: 926430
guucccaccuagaauucaa

SEQ ID NO: 926432 - RNA, 19 nt, Artificial Sequence
  Description of Artificial Sequence: Synthetic oligonucleotide
  Sense strand starting at position 3297 of SEQ ID NO: 913427
ugaauucuaggugggaacu

SEQ ID NO: 926433 - RNA, 19 nt, Artificial Sequence
  Description of Artificial Sequence: Synthetic oligonucleotide
  Antisense strand to SEQ ID NO: 926432
aguucccaccuagaauuca

SEQ ID NO: 926434 - RNA, 19 nt, Artificial Sequence
  Description of Artificial Sequence: Synthetic oligonucleotide
  Sense strand starting at position 1433 of SEQ ID NO: 913427
gaggaaggcuggguuuaaa

SEQ ID NO: 926435 - RNA, 19 nt, Artificial Sequence
  Description of Artificial Sequence: Synthetic oligonucleotide
  Antisense strand to SEQ ID NO: 926434
uuuaaacccagccuuccuc

SEQ ID NO: 926436 - RNA, 19 nt, Artificial Sequence
  Description of Artificial Sequence: Synthetic oligonucleotide
  Sense strand starting at position 1092 of SEQ ID NO: 913427
cguggucucccgaauugug

SEQ ID NO: 926437 - RNA, 19 nt, Artificial Sequence
  Description of Artificial Sequence: Synthetic oligonucleotide
  Antisense strand to SEQ ID NO: 926436
cacaauucgggagaccacg

SEQ ID NO: 926438 - RNA, 19 nt, Artificial Sequence
  Description of Artificial Sequence: Synthetic oligonucleotide
  Sense strand starting at position 2444 of SEQ ID NO: 913427
uucggaggauuuguuuguu

SEQ ID NO: 926439 - RNA, 19 nt, Artificial Sequence
  Description of Artificial Sequence: Synthetic oligonucleotide
  Antisense strand to SEQ ID NO: 926438
aacaaacaaauccuccgaa

SEQ ID NO: 926440 - RNA, 19 nt, Artificial Sequence
  Description of Artificial Sequence: Synthetic oligonucleotide
  Sense strand starting at position 1432 of SEQ ID NO: 913427
agaggaaggcuggguuuaa

SEQ ID NO: 926441 - RNA, 19 nt, Artificial Sequence
  Description of Artificial Sequence: Synthetic oligonucleotide
  Antisense strand to SEQ ID NO: 926440
uuaaacccagccuuccucu

SEQ ID NO: 926442 - RNA, 19 nt, Artificial Sequence
  Description of Artificial Sequence: Synthetic oligonucleotide
  Sense strand starting at position 3465 of SEQ ID NO: 913427
ugagcagauuagucaagag

SEQ ID NO: 926443 - RNA, 19 nt, Artificial Sequence
  Description of Artificial Sequence: Synthetic oligonucleotide
  Antisense strand to SEQ ID NO: 926442
cucuugacuaaucugcuca

SEQ ID NO: 926444 - RNA, 19 nt, Artificial Sequence
  Description of Artificial Sequence: Synthetic oligonucleotide
  Sense strand starting at position 3294 of SEQ ID NO: 913427
ucuugaauucuagguggga

SEQ ID NO: 926445 - RNA, 19 nt, Artificial Sequence
  Description of Artificial Sequence: Synthetic oligonucleotide
  Antisense strand to SEQ ID NO: 926444
ucccaccuagaauucaaga

SEQ ID NO: 926446 - RNA, 19 nt, Artificial Sequence
  Description of Artificial Sequence: Synthetic oligonucleotide
  Sense strand starting at position 314 of SEQ ID NO: 913427
guaacaucuccucauguga

SEQ ID NO: 926447 - RNA, 19 nt, Artificial Sequence
  Description of Artificial Sequence: Synthetic oligonucleotide
  Antisense strand to SEQ ID NO: 926446
ucacaugaggagauguuac

SEQ ID NO: 926448 - RNA, 19 nt, Artificial Sequence
  Description of Artificial Sequence: Synthetic oligonucleotide
  Sense strand starting at position 3459 of SEQ ID NO: 913427
uagcaaugagcagauuagu

SEQ ID NO: 926449 - RNA, 19 nt, Artificial Sequence
  Description of Artificial Sequence: Synthetic oligonucleotide
  Antisense strand to SEQ ID NO: 926448
acuaaucugcucauugcua

SEQ ID NO: 926450 - RNA, 19 nt, Artificial Sequence
  Description of Artificial Sequence: Synthetic oligonucleotide
  Sense strand starting at position 3450 of SEQ ID NO: 913427
ugaauuuauuagcaaugag

SEQ ID NO: 926451 - RNA, 19 nt, Artificial Sequence
  Description of Artificial Sequence: Synthetic oligonucleotide
  Antisense strand to SEQ ID NO: 926450
cucauugcuaauaaauuca

SEQ ID NO: 926452 - RNA, 19 nt, Artificial Sequence
  Description of Artificial Sequence: Synthetic oligonucleotide
  Sense strand starting at position 1552 of SEQ ID NO: 913427
cgggauguuguaggaaaug

SEQ ID NO: 926453 - RNA, 19 nt, Artificial Sequence
  Description of Artificial Sequence: Synthetic oligonucleotide
  Antisense strand to SEQ ID NO: 926452
cauuuccuacaacaucccg

SEQ ID NO: 926454 - RNA, 19 nt, Artificial Sequence
  Description of Artificial Sequence: Synthetic oligonucleotide
  Sense strand starting at position 252 of SEQ ID NO: 913427
cacagauguuaaguaaguu

SEQ ID NO: 926455 - RNA, 19 nt, Artificial Sequence
  Description of Artificial Sequence: Synthetic oligonucleotide
  Antisense strand to SEQ ID NO: 926454
aacuuacuuaacaucugug

SEQ ID NO: 926456 - RNA, 19 nt, Artificial Sequence
  Description of Artificial Sequence: Synthetic oligonucleotide
  Sense strand starting at position 3041 of SEQ ID NO: 913427
gcaucuguccaggagugac

SEQ ID NO: 926457 - RNA, 19 nt, Artificial Sequence
  Description of Artificial Sequence: Synthetic oligonucleotide
  Antisense strand to SEQ ID NO: 926456
gucacuccuggacagaugc

SEQ ID NO: 926458 - RNA, 19 nt, Artificial Sequence
  Description of Artificial Sequence: Synthetic oligonucleotide
  Sense strand starting at position 3038 of SEQ ID NO: 913427
acugcaucuguccaggagu

SEQ ID NO: 926459 - RNA, 19 nt, Artificial Sequence
  Description of Artificial Sequence: Synthetic oligonucleotide
  Antisense strand to SEQ ID NO: 926458
acuccuggacagaugcagu

SEQ ID NO: 926460 - RNA, 19 nt, Artificial Sequence
  Description of Artificial Sequence: Synthetic oligonucleotide
  Sense strand starting at position 1915 of SEQ ID NO: 913427
cccugagcagugugaagaa

SEQ ID NO: 926461 - RNA, 19 nt, Artificial Sequence
  Description of Artificial Sequence: Synthetic oligonucleotide
  Antisense strand to SEQ ID NO: 926460
uucuucacacugcucaggg

SEQ ID NO: 926462 - RNA, 19 nt, Artificial Sequence
  Description of Artificial Sequence: Synthetic oligonucleotide
  Sense strand starting at position 1557 of SEQ ID NO: 913427
uguuguaggaaaugcauga

SEQ ID NO: 926463 - RNA, 19 nt, Artificial Sequence
  Description of Artificial Sequence: Synthetic oligonucleotide
  Antisense strand to SEQ ID NO: 926462
ucaugcauuuccuacaaca

SEQ ID NO: 926464 - RNA, 19 nt, Artificial Sequence
  Description of Artificial Sequence: Synthetic oligonucleotide
  Sense strand starting at position 3284 of SEQ ID NO: 913427
agucccaaguucuugaauu

SEQ ID NO: 926465 - RNA, 19 nt, Artificial Sequence
  Description of Artificial Sequence: Synthetic oligonucleotide
  Antisense strand to SEQ ID NO: 926464
aauucaagaacuugggacu

SEQ ID NO: 926466 - RNA, 19 nt, Artificial Sequence
  Description of Artificial Sequence: Synthetic oligonucleotide
  Sense strand starting at position 2690 of SEQ ID NO: 913427
gggugucuucccuaagagc

SEQ ID NO: 926467 - RNA, 19 nt, Artificial Sequence
  Description of Artificial Sequence: Synthetic oligonucleotide
  Antisense strand to SEQ ID NO: 926466
gcucuuagggaagacaccc

SEQ ID NO: 926468 - RNA, 19 nt, Artificial Sequence
  Description of Artificial Sequence: Synthetic oligonucleotide
  Sense strand starting at position 2251 of SEQ ID NO: 913427
ucaugacuccugugaaguu

SEQ ID NO: 926469 - RNA, 19 nt, Artificial Sequence
  Description of Artificial Sequence: Synthetic oligonucleotide
  Antisense strand to SEQ ID NO: 926468
aacuucacaggagucauga

SEQ ID NO: 926470 - RNA, 19 nt, Artificial Sequence
  Description of Artificial Sequence: Synthetic oligonucleotide
  Sense strand starting at position 3615 of SEQ ID NO: 913427
caugucuggccugagucau

SEQ ID NO: 926471 - RNA, 19 nt, Artificial Sequence
  Description of Artificial Sequence: Synthetic oligonucleotide
  Antisense strand to SEQ ID NO: 926470
augacucaggccagacaug

SEQ ID NO: 926472 - RNA, 19 nt, Artificial Sequence
  Description of Artificial Sequence: Synthetic oligonucleotide
  Sense strand starting at position 2473 of SEQ ID NO: 913427
ccagauaugaggugcuagu

SEQ ID NO: 926473 - RNA, 19 nt, Artificial Sequence
  Description of Artificial Sequence: Synthetic oligonucleotide
  Antisense strand to SEQ ID NO: 926472
acuagcaccucauaucugg

SEQ ID NO: 926474 - RNA, 19 nt, Artificial Sequence
  Description of Artificial Sequence: Synthetic oligonucleotide
  Sense strand starting at position 1100 of SEQ ID NO: 913427
cccgaauugugggcagaug

SEQ ID NO: 926475 - RNA, 19 nt, Artificial Sequence
  Description of Artificial Sequence: Synthetic oligonucleotide
  Antisense strand to SEQ ID NO: 926474
caucugcccacaauucggg

SEQ ID NO: 926476 - RNA, 19 nt, Artificial Sequence
  Description of Artificial Sequence: Synthetic oligonucleotide
  Sense strand starting at position 653 of SEQ ID NO: 913427
guggucuugccagggaaug

SEQ ID NO: 926477 - RNA, 19 nt, Artificial Sequence
  Description of Artificial Sequence: Synthetic oligonucleotide
  Antisense strand to SEQ ID NO: 926476
cauucccuggcaagaccac

SEQ ID NO: 926478 - RNA, 19 nt, Artificial Sequence
  Description of Artificial Sequence: Synthetic oligonucleotide
  Sense strand starting at position 472 of SEQ ID NO: 913427
ccagcaugcucucuacaga

SEQ ID NO: 926479 - RNA, 19 nt, Artificial Sequence
  Description of Artificial Sequence: Synthetic oligonucleotide
  Antisense strand to SEQ ID NO: 926478
ucuguagagagcaugcugg

SEQ ID NO: 926480 - RNA, 19 nt, Artificial Sequence
  Description of Artificial Sequence: Synthetic oligonucleotide
  Sense strand starting at position 3040 of SEQ ID NO: 913427
ugcaucuguccaggaguga

SEQ ID NO: 926481 - RNA, 19 nt, Artificial Sequence
  Description of Artificial Sequence: Synthetic oligonucleotide
  Antisense strand to SEQ ID NO: 926480
ucacuccuggacagaugca

SEQ ID NO: 926482 - RNA, 19 nt, Artificial Sequence
  Description of Artificial Sequence: Synthetic oligonucleotide
  Sense strand starting at position 1099 of SEQ ID NO: 913427
ucccgaauugugggcagau

SEQ ID NO: 926483 - RNA, 19 nt, Artificial Sequence
  Description of Artificial Sequence: Synthetic oligonucleotide
  Antisense strand to SEQ ID NO: 926482
aucugcccacaauucggga

SEQ ID NO: 926484 - RNA, 19 nt, Artificial Sequence
  Description of Artificial Sequence: Synthetic oligonucleotide
  Sense strand starting at position 177 of SEQ ID NO: 913427
gcgguuacacgucagaaug

SEQ ID NO: 926485 - RNA, 19 nt, Artificial Sequence
  Description of Artificial Sequence: Synthetic oligonucleotide
  Antisense strand to SEQ ID NO: 926484
cauucugacguguaaccgc

SEQ ID NO: 926486 - RNA, 19 nt, Artificial Sequence
  Description of Artificial Sequence: Synthetic oligonucleotide
  Sense strand starting at position 1551 of SEQ ID NO: 913427
ccgggauguuguaggaaau

SEQ ID NO: 926487 - RNA, 19 nt, Artificial Sequence
  Description of Artificial Sequence: Synthetic oligonucleotide
  Antisense strand to SEQ ID NO: 926486
auuuccuacaacaucccgg

SEQ ID NO: 926488 - RNA, 19 nt, Artificial Sequence
  Description of Artificial Sequence: Synthetic oligonucleotide
  Sense strand starting at position 3439 of SEQ ID NO: 913427
uggcucuucuuugaauuua

SEQ ID NO: 926489 - RNA, 19 nt, Artificial Sequence
  Description of Artificial Sequence: Synthetic oligonucleotide
  Antisense strand to SEQ ID NO: 926488
uaaauucaaagaagagcca

SEQ ID NO: 926490 - RNA, 19 nt, Artificial Sequence
  Description of Artificial Sequence: Synthetic oligonucleotide
  Sense strand starting at position 3437 of SEQ ID NO: 913427
gcuggcucuucuuugaauu

SEQ ID NO: 926491 - RNA, 19 nt, Artificial Sequence
  Description of Artificial Sequence: Synthetic oligonucleotide
  Antisense strand to SEQ ID NO: 926490
aauucaaagaagagccagc

SEQ ID NO: 926492 - RNA, 19 nt, Artificial Sequence
  Description of Artificial Sequence: Synthetic oligonucleotide
  Sense strand starting at position 249 of SEQ ID NO: 913427
gaacacagauguuaaguaa

SEQ ID NO: 926493 - RNA, 19 nt, Artificial Sequence
  Description of Artificial Sequence: Synthetic oligonucleotide
  Antisense strand to SEQ ID NO: 926492
uuacuuaacaucuguguuc

SEQ ID NO: 926494 - RNA, 19 nt, Artificial Sequence
  Description of Artificial Sequence: Synthetic oligonucleotide
  Sense strand starting at position 3612 of SEQ ID NO: 913427
aggcaugucuggccugagu

SEQ ID NO: 926495 - RNA, 19 nt, Artificial Sequence
  Description of Artificial Sequence: Synthetic oligonucleotide
  Antisense strand to SEQ ID NO: 926494
acucaggccagacaugccu

SEQ ID NO: 926496 - RNA, 19 nt, Artificial Sequence
  Description of Artificial Sequence: Synthetic oligonucleotide
  Sense strand starting at position 878 of SEQ ID NO: 913427
cacugaaacgugcggugau

SEQ ID NO: 926497 - RNA, 19 nt, Artificial Sequence
  Description of Artificial Sequence: Synthetic oligonucleotide
  Antisense strand to SEQ ID NO: 926496
aucaccgcacguuucagug

SEQ ID NO: 926498 - RNA, 19 nt, Artificial Sequence
  Description of Artificial Sequence: Synthetic oligonucleotide
  Sense strand starting at position 3709 of SEQ ID NO: 913428
uccauagugccauagagag

SEQ ID NO: 926499 - RNA, 19 nt, Artificial Sequence
  Description of Artificial Sequence: Synthetic oligonucleotide
  Antisense strand to SEQ ID NO: 926498
cucucuauggcacuaugga

SEQ ID NO: 926500 - RNA, 19 nt, Artificial Sequence
  Description of Artificial Sequence: Synthetic oligonucleotide
  Sense strand starting at position 3514 of SEQ ID NO: 913428
ggcauaaauccagagggcu

SEQ ID NO: 926501 - RNA, 19 nt, Artificial Sequence
  Description of Artificial Sequence: Synthetic oligonucleotide
  Antisense strand to SEQ ID NO: 926500
agcccucuggauuuaugcc

SEQ ID NO: 926502 - RNA, 19 nt, Artificial Sequence
  Description of Artificial Sequence: Synthetic oligonucleotide
  Sense strand starting at position 819 of SEQ ID NO: 913428
ggcagucugaaaugggaga

SEQ ID NO: 926503 - RNA, 19 nt, Artificial Sequence
  Description of Artificial Sequence: Synthetic oligonucleotide
  Antisense strand to SEQ ID NO: 926502
ucucccauuucagacugcc

SEQ ID NO: 926504 - RNA, 19 nt, Artificial Sequence
  Description of Artificial Sequence: Synthetic oligonucleotide
  Sense strand starting at position 3442 of SEQ ID NO: 913428
uccuaagguuucucaggga

SEQ ID NO: 926505 - RNA, 19 nt, Artificial Sequence
  Description of Artificial Sequence: Synthetic oligonucleotide
  Antisense strand to SEQ ID NO: 926504
ucccugagaaaccuuagga

SEQ ID NO: 926506 - RNA, 19 nt, Artificial Sequence
  Description of Artificial Sequence: Synthetic oligonucleotide
  Sense strand starting at position 363 of SEQ ID NO: 913428
ucaggucacgcucagagaa

SEQ ID NO: 926507 - RNA, 19 nt, Artificial Sequence
  Description of Artificial Sequence: Synthetic oligonucleotide
  Antisense strand to SEQ ID NO: 926506
uucucugagcgugaccuga

SEQ ID NO: 926508 - RNA, 19 nt, Artificial Sequence
  Description of Artificial Sequence: Synthetic oligonucleotide
  Sense strand starting at position 1984 of SEQ ID NO: 913428
ccuggcuuugucuagaaga

SEQ ID NO: 926509 - RNA, 19 nt, Artificial Sequence
  Description of Artificial Sequence: Synthetic oligonucleotide
  Antisense strand to SEQ ID NO: 926508
ucuucuagacaaagccagg

SEQ ID NO: 926510 - RNA, 19 nt, Artificial Sequence
  Description of Artificial Sequence: Synthetic oligonucleotide
  Sense strand starting at position 2581 of SEQ ID NO: 913428
acuggaggcucuuuccaaa

SEQ ID NO: 926511 - RNA, 19 nt, Artificial Sequence
  Description of Artificial Sequence: Synthetic oligonucleotide
  Antisense strand to SEQ ID NO: 926510
uuuggaaagagccuccagu

SEQ ID NO: 926512 - RNA, 19 nt, Artificial Sequence
  Description of Artificial Sequence: Synthetic oligonucleotide
  Sense strand starting at position 3657 of SEQ ID NO: 913428
gugcccagucuagagauga

SEQ ID NO: 926513 - RNA, 19 nt, Artificial Sequence
  Description of Artificial Sequence: Synthetic oligonucleotide
  Antisense strand to SEQ ID NO: 926512
ucaucucuagacugggcac

SEQ ID NO: 926514 - RNA, 19 nt, Artificial Sequence
  Description of Artificial Sequence: Synthetic oligonucleotide
  Sense strand starting at position 1313 of SEQ ID NO: 913428
uccuguggcaacgagagau

SEQ ID NO: 926515 - RNA, 19 nt, Artificial Sequence
  Description of Artificial Sequence: Synthetic oligonucleotide
  Antisense strand to SEQ ID NO: 926514
aucucucguugccacagga

SEQ ID NO: 926516 - RNA, 19 nt, Artificial Sequence
  Description of Artificial Sequence: Synthetic oligonucleotide
  Sense strand starting at position 316 of SEQ ID NO: 913428
gauaacaguugaguuucua

SEQ ID NO: 926517 - RNA, 19 nt, Artificial Sequence
  Description of Artificial Sequence: Synthetic oligonucleotide
  Antisense strand to SEQ ID NO: 926516
uagaaacucaacuguuauc

SEQ ID NO: 926518 - RNA, 19 nt, Artificial Sequence
  Description of Artificial Sequence: Synthetic oligonucleotide
  Sense strand starting at position 2901 of SEQ ID NO: 913428
uuuccuauggacuguuaaa

SEQ ID NO: 926519 - RNA, 19 nt, Artificial Sequence
  Description of Artificial Sequence: Synthetic oligonucleotide
  Antisense strand to SEQ ID NO: 926518
uuuaacaguccauaggaaa

SEQ ID NO: 926520 - RNA, 19 nt, Artificial Sequence
  Description of Artificial Sequence: Synthetic oligonucleotide
  Sense strand starting at position 1475 of SEQ ID NO: 913428
gaaucaucuggagggcagu

SEQ ID NO: 926521 - RNA, 19 nt, Artificial Sequence
  Description of Artificial Sequence: Synthetic oligonucleotide
  Antisense strand to SEQ ID NO: 926520
acugcccuccagaugauuc

SEQ ID NO: 926522 - RNA, 19 nt, Artificial Sequence
  Description of Artificial Sequence: Synthetic oligonucleotide
  Sense strand starting at position 186 of SEQ ID NO: 913428
auucuacugacguggacaa

SEQ ID NO: 926523 - RNA, 19 nt, Artificial Sequence
  Description of Artificial Sequence: Synthetic oligonucleotide
  Antisense strand to SEQ ID NO: 926522
uuguccacgucaguagaau

SEQ ID NO: 926524 - RNA, 19 nt, Artificial Sequence
  Description of Artificial Sequence: Synthetic oligonucleotide
  Sense strand starting at position 1286 of SEQ ID NO: 913428
uggaguuguaauuagcauc

SEQ ID NO: 926525 - RNA, 19 nt, Artificial Sequence
  Description of Artificial Sequence: Synthetic oligonucleotide
  Antisense strand to SEQ ID NO: 926524
gaugcuaauuacaacucca

SEQ ID NO: 926526 - RNA, 19 nt, Artificial Sequence
  Description of Artificial Sequence: Synthetic oligonucleotide
  Sense strand starting at position 609 of SEQ ID NO: 913428
gugugaugcccgucuagcu

SEQ ID NO: 926527 - RNA, 19 nt, Artificial Sequence
  Description of Artificial Sequence: Synthetic oligonucleotide
  Antisense strand to SEQ ID NO: 926526
agcuagacgggcaucacac

SEQ ID NO: 926528 - RNA, 19 nt, Artificial Sequence
  Description of Artificial Sequence: Synthetic oligonucleotide
  Sense strand starting at position 3694 of SEQ ID NO: 913428
gggcuaaaguacuuaucca

SEQ ID NO: 926529 - RNA, 19 nt, Artificial Sequence
  Description of Artificial Sequence: Synthetic oligonucleotide
  Antisense strand to SEQ ID NO: 926528
uggauaaguacuuuagccc

SEQ ID NO: 926530 - RNA, 19 nt, Artificial Sequence
  Description of Artificial Sequence: Synthetic oligonucleotide
  Sense strand starting at position 1986 of SEQ ID NO: 913428
uggcuuugucuagaagagu

SEQ ID NO: 926531 - RNA, 19 nt, Artificial Sequence
  Description of Artificial Sequence: Synthetic oligonucleotide
  Antisense strand to SEQ ID NO: 926530
acucuucuagacaaagcca

SEQ ID NO: 926532 - RNA, 19 nt, Artificial Sequence
  Description of Artificial Sequence: Synthetic oligonucleotide
  Sense strand starting at position 3599 of SEQ ID NO: 913428
gacgcuuugcaagaugacu

SEQ ID NO: 926533 - RNA, 19 nt, Artificial Sequence
  Description of Artificial Sequence: Synthetic oligonucleotide
  Antisense strand to SEQ ID NO: 926532
agucaucuugcaaagcguc

SEQ ID NO: 926534 - RNA, 19 nt, Artificial Sequence
  Description of Artificial Sequence: Synthetic oligonucleotide
  Sense strand starting at position 1535 of SEQ ID NO: 913428
ggcccugcucuggacauau

SEQ ID NO: 926535 - RNA, 19 nt, Artificial Sequence
  Description of Artificial Sequence: Synthetic oligonucleotide
  Antisense strand to SEQ ID NO: 926534
auauguccagagcagggcc

SEQ ID NO: 926536 - RNA, 19 nt, Artificial Sequence
  Description of Artificial Sequence: Synthetic oligonucleotide
  Sense strand starting at position 2446 of SEQ ID NO: 913428
gaaggugucuggcuacaga

SEQ ID NO: 926537 - RNA, 19 nt, Artificial Sequence
  Description of Artificial Sequence: Synthetic oligonucleotide
  Antisense strand to SEQ ID NO: 926536
ucuguagccagacaccuuc

SEQ ID NO: 926538 - RNA, 19 nt, Artificial Sequence
  Description of Artificial Sequence: Synthetic oligonucleotide
  Sense strand starting at position 1293 of SEQ ID NO: 913428
guaauuagcaucugaguag

SEQ ID NO: 926539 - RNA, 19 nt, Artificial Sequence
  Description of Artificial Sequence: Synthetic oligonucleotide
  Antisense strand to SEQ ID NO: 926538
cuacucagaugcuaauuac

SEQ ID NO: 926540 - RNA, 19 nt, Artificial Sequence
  Description of Artificial Sequence: Synthetic oligonucleotide
  Sense strand starting at position 1981 of SEQ ID NO: 913428
ggaccuggcuuugucuaga

SEQ ID NO: 926541 - RNA, 19 nt, Artificial Sequence
  Description of Artificial Sequence: Synthetic oligonucleotide
  Antisense strand to SEQ ID NO: 926540
ucuagacaaagccaggucc

SEQ ID NO: 926542 - RNA, 19 nt, Artificial Sequence
  Description of Artificial Sequence: Synthetic oligonucleotide
  Sense strand starting at position 1546 of SEQ ID NO: 913428
ggacauaucucugcaagcu

SEQ ID NO: 926543 - RNA, 19 nt, Artificial Sequence
  Description of Artificial Sequence: Synthetic oligonucleotide
  Antisense strand to SEQ ID NO: 926542
agcuugcagagauaugucc

SEQ ID NO: 926544 - RNA, 19 nt, Artificial Sequence
  Description of Artificial Sequence: Synthetic oligonucleotide
  Sense strand starting at position 3595 of SEQ ID NO: 913428
ccaagacgcuuugcaagau

SEQ ID NO: 926545 - RNA, 19 nt, Artificial Sequence
  Description of Artificial Sequence: Synthetic oligonucleotide
  Antisense strand to SEQ ID NO: 926544
aucuugcaaagcgucuugg

SEQ ID NO: 926546 - RNA, 19 nt, Artificial Sequence
  Description of Artificial Sequence: Synthetic oligonucleotide
  Sense strand starting at position 2412 of SEQ ID NO: 913428
uuucccucagcuuguagaa

SEQ ID NO: 926547 - RNA, 19 nt, Artificial Sequence
  Description of Artificial Sequence: Synthetic oligonucleotide
  Antisense strand to SEQ ID NO: 926546
uucuacaagcugagggaaa

SEQ ID NO: 926548 - RNA, 19 nt, Artificial Sequence
  Description of Artificial Sequence: Synthetic oligonucleotide
  Sense strand starting at position 2229 of SEQ ID NO: 913428
gucggaaguuugaauggua

SEQ ID NO: 926549 - RNA, 19 nt, Artificial Sequence
  Description of Artificial Sequence: Synthetic oligonucleotide
  Antisense strand to SEQ ID NO: 926548
uaccauucaaacuuccgac

SEQ ID NO: 926550 - RNA, 19 nt, Artificial Sequence
  Description of Artificial Sequence: Synthetic oligonucleotide
  Sense strand starting at position 163 of SEQ ID NO: 913428
aggucagcaugugugauau

SEQ ID NO: 926551 - RNA, 19 nt, Artificial Sequence
  Description of Artificial Sequence: Synthetic oligonucleotide
  Antisense strand to SEQ ID NO: 926550
auaucacacaugcugaccu

SEQ ID NO: 926552 - RNA, 19 nt, Artificial Sequence
  Description of Artificial Sequence: Synthetic oligonucleotide
  Sense strand starting at position 2763 of SEQ ID NO: 913428
gagucauggcccuguccaa

SEQ ID NO: 926553 - RNA, 19 nt, Artificial Sequence
  Description of Artificial Sequence: Synthetic oligonucleotide
  Antisense strand to SEQ ID NO: 926552
uuggacagggccaugacuc

SEQ ID NO: 926554 - RNA, 19 nt, Artificial Sequence
  Description of Artificial Sequence: Synthetic oligonucleotide
  Sense strand starting at position 2442 of SEQ ID NO: 913428
cuuugaaggugucuggcua

SEQ ID NO: 926555 - RNA, 19 nt, Artificial Sequence
  Description of Artificial Sequence: Synthetic oligonucleotide
  Antisense strand to SEQ ID NO: 926554
uagccagacaccuucaaag

SEQ ID NO: 926556 - RNA, 19 nt, Artificial Sequence
  Description of Artificial Sequence: Synthetic oligonucleotide
  Sense strand starting at position 162 of SEQ ID NO: 913428
caggucagcaugugugaua

SEQ ID NO: 926557 - RNA, 19 nt, Artificial Sequence
  Description of Artificial Sequence: Synthetic oligonucleotide
  Antisense strand to SEQ ID NO: 926556
uaucacacaugcugaccug

SEQ ID NO: 926558 - RNA, 19 nt, Artificial Sequence
  Description of Artificial Sequence: Synthetic oligonucleotide
  Sense strand starting at position 2897 of SEQ ID NO: 913428
gagauuuccuauggacugu

SEQ ID NO: 926559 - RNA, 19 nt, Artificial Sequence
  Description of Artificial Sequence: Synthetic oligonucleotide
  Antisense strand to SEQ ID NO: 926558
acaguccauaggaaaucuc

SEQ ID NO: 926560 - RNA, 19 nt, Artificial Sequence
  Description of Artificial Sequence: Synthetic oligonucleotide
  Sense strand starting at position 1845 of SEQ ID NO: 913428
ggucuucucagcuguggaa

SEQ ID NO: 926561 - RNA, 19 nt, Artificial Sequence
  Description of Artificial Sequence: Synthetic oligonucleotide
  Antisense strand to SEQ ID NO: 926560
uuccacagcugagaagacc

SEQ ID NO: 926562 - RNA, 19 nt, Artificial Sequence
  Description of Artificial Sequence: Synthetic oligonucleotide
  Sense strand starting at position 3637 of SEQ ID NO: 913428
cugcaaggcuggucaucau

SEQ ID NO: 926563 - RNA, 19 nt, Artificial Sequence
  Description of Artificial Sequence: Synthetic oligonucleotide
  Antisense strand to SEQ ID NO: 926562
augaugaccagccuugcag

SEQ ID NO: 926564 - RNA, 19 nt, Artificial Sequence
  Description of Artificial Sequence: Synthetic oligonucleotide
  Sense strand starting at position 167 of SEQ ID NO: 913428
cagcaugugugauauuuaa

SEQ ID NO: 926565 - RNA, 19 nt, Artificial Sequence
  Description of Artificial Sequence: Synthetic oligonucleotide
  Antisense strand to SEQ ID NO: 926564
uuaaauaucacacaugcug

SEQ ID NO: 926566 - RNA, 19 nt, Artificial Sequence
  Description of Artificial Sequence: Synthetic oligonucleotide
  Sense strand starting at position 3965 of SEQ ID NO: 913428
gcugauugaggcugucauu

SEQ ID NO: 926567 - RNA, 19 nt, Artificial Sequence
  Description of Artificial Sequence: Synthetic oligonucleotide
  Antisense strand to SEQ ID NO: 926566
aaugacagccucaaucagc

SEQ ID NO: 926568 - RNA, 19 nt, Artificial Sequence
  Description of Artificial Sequence: Synthetic oligonucleotide
  Sense strand starting at position 352 of SEQ ID NO: 913428
gaggaaagaugucagguca

SEQ ID NO: 926569 - RNA, 19 nt, Artificial Sequence
  Description of Artificial Sequence: Synthetic oligonucleotide
  Antisense strand to SEQ ID NO: 926568
ugaccugacaucuuuccuc

SEQ ID NO: 926570 - RNA, 19 nt, Artificial Sequence
  Description of Artificial Sequence: Synthetic oligonucleotide
  Sense strand starting at position 2260 of SEQ ID NO: 913428
gccagagguucgcuauuca

SEQ ID NO: 926571 - RNA, 19 nt, Artificial Sequence
  Description of Artificial Sequence: Synthetic oligonucleotide
  Antisense strand to SEQ ID NO: 926570
ugaauagcgaaccucuggc

SEQ ID NO: 926572 - RNA, 19 nt, Artificial Sequence
  Description of Artificial Sequence: Synthetic oligonucleotide
  Sense strand starting at position 2258 of SEQ ID NO: 913428
cagccagagguucgcuauu

SEQ ID NO: 926573 - RNA, 19 nt, Artificial Sequence
  Description of Artificial Sequence: Synthetic oligonucleotide
  Antisense strand to SEQ ID NO: 926572
aauagcgaaccucuggcug

SEQ ID NO: 926574 - RNA, 19 nt, Artificial Sequence
  Description of Artificial Sequence: Synthetic oligonucleotide
  Sense strand starting at position 1207 of SEQ ID NO: 913428
gaaucaugccacugcgcua

SEQ ID NO: 926575 - RNA, 19 nt, Artificial Sequence
  Description of Artificial Sequence: Synthetic oligonucleotide
  Antisense strand to SEQ ID NO: 926574
uagcgcaguggcaugauuc

SEQ ID NO: 926576 - RNA, 19 nt, Artificial Sequence
  Description of Artificial Sequence: Synthetic oligonucleotide
  Sense strand starting at position 165 of SEQ ID NO: 913428
gucagcaugugugauauuu

SEQ ID NO: 926577 - RNA, 19 nt, Artificial Sequence
  Description of Artificial Sequence: Synthetic oligonucleotide
  Antisense strand to SEQ ID NO: 926576
aaauaucacacaugcugac

SEQ ID NO: 926578 - RNA, 19 nt, Artificial Sequence
  Description of Artificial Sequence: Synthetic oligonucleotide
  Sense strand starting at position 1690 of SEQ ID NO: 913429
ggaauuuccucugcagcau

SEQ ID NO: 926579 - RNA, 19 nt, Artificial Sequence
  Description of Artificial Sequence: Synthetic oligonucleotide
  Antisense strand to SEQ ID NO: 926578
augcugcagaggaaauucc

SEQ ID NO: 926580 - RNA, 19 nt, Artificial Sequence
  Description of Artificial Sequence: Synthetic oligonucleotide
  Sense strand starting at position 2580 of SEQ ID NO: 913429
ggaucuggucccuacugga

SEQ ID NO: 926581 - RNA, 19 nt, Artificial Sequence
  Description of Artificial Sequence: Synthetic oligonucleotide
  Antisense strand to SEQ ID NO: 926580
uccaguagggaccagaucc

SEQ ID NO: 926582 - RNA, 19 nt, Artificial Sequence
  Description of Artificial Sequence: Synthetic oligonucleotide
  Sense strand starting at position 507 of SEQ ID NO: 913429
cccuuuaaagguggaaaca

SEQ ID NO: 926583 - RNA, 19 nt, Artificial Sequence
  Description of Artificial Sequence: Synthetic oligonucleotide
  Antisense strand to SEQ ID NO: 926582
uguuuccaccuuuaaaggg

SEQ ID NO: 926584 - RNA, 19 nt, Artificial Sequence
  Description of Artificial Sequence: Synthetic oligonucleotide
  Sense strand starting at position 341 of SEQ ID NO: 913429
ccuguauuuccacagugcu

SEQ ID NO: 926585 - RNA, 19 nt, Artificial Sequence
  Description of Artificial Sequence: Synthetic oligonucleotide
  Antisense strand to SEQ ID NO: 926584
agcacuguggaaauacagg

SEQ ID NO: 926586 - RNA, 19 nt, Artificial Sequence
  Description of Artificial Sequence: Synthetic oligonucleotide
  Sense strand starting at position 3468 of SEQ ID NO: 913429
ccaaguagaguccagguaa

SEQ ID NO: 926587 - RNA, 19 nt, Artificial Sequence
  Description of Artificial Sequence: Synthetic oligonucleotide
  Antisense strand to SEQ ID NO: 926586
uuaccuggacucuacuugg

SEQ ID NO: 926588 - RNA, 19 nt, Artificial Sequence
  Description of Artificial Sequence: Synthetic oligonucleotide
  Sense strand starting at position 1904 of SEQ ID NO: 913429
cugugauuccagccgcagu

SEQ ID NO: 926589 - RNA, 19 nt, Artificial Sequence
  Description of Artificial Sequence: Synthetic oligonucleotide
  Antisense strand to SEQ ID NO: 926588
acugcggcuggaaucacag

SEQ ID NO: 926590 - RNA, 19 nt, Artificial Sequence
  Description of Artificial Sequence: Synthetic oligonucleotide
  Sense strand starting at position 3971 of SEQ ID NO: 913429
cugagagaccacuggcuaa

SEQ ID NO: 926591 - RNA, 19 nt, Artificial Sequence
  Description of Artificial Sequence: Synthetic oligonucleotide
  Antisense strand to SEQ ID NO: 926590
uuagccaguggucucucag

SEQ ID NO: 926592 - RNA, 19 nt, Artificial Sequence
  Description of Artificial Sequence: Synthetic oligonucleotide
  Sense strand starting at position 859 of SEQ ID NO: 913429
ccaagaucagagcaguagu

SEQ ID NO: 926593 - RNA, 19 nt, Artificial Sequence
  Description of Artificial Sequence: Synthetic oligonucleotide
  Antisense strand to SEQ ID NO: 926592
acuacugcucugaucuugg

SEQ ID NO: 926594 - RNA, 19 nt, Artificial Sequence
  Description of Artificial Sequence: Synthetic oligonucleotide
  Sense strand starting at position 862 of SEQ ID NO: 913429
agaucagagcaguagucau

SEQ ID NO: 926595 - RNA, 19 nt, Artificial Sequence
  Description of Artificial Sequence: Synthetic oligonucleotide
  Antisense strand to SEQ ID NO: 926594
augacuacugcucugaucu

SEQ ID NO: 926596 - RNA, 19 nt, Artificial Sequence
  Description of Artificial Sequence: Synthetic oligonucleotide
  Sense strand starting at position 1103 of SEQ ID NO: 913429
gucagaaugcaugagaguu

SEQ ID NO: 926597 - RNA, 19 nt, Artificial Sequence
  Description of Artificial Sequence: Synthetic oligonucleotide
  Antisense strand to SEQ ID NO: 926596
aacucucaugcauucugac

SEQ ID NO: 926598 - RNA, 19 nt, Artificial Sequence
  Description of Artificial Sequence: Synthetic oligonucleotide
  Sense strand starting at position 2194 of SEQ ID NO: 913429
gcaauaucuggccaccaga

SEQ ID NO: 926599 - RNA, 19 nt, Artificial Sequence
  Description of Artificial Sequence: Synthetic oligonucleotide
  Antisense strand to SEQ ID NO: 926598
ucugguggccagauauugc

SEQ ID NO: 926600 - RNA, 19 nt, Artificial Sequence
  Description of Artificial Sequence: Synthetic oligonucleotide
  Sense strand starting at position 1004 of SEQ ID NO: 913429
ugaucacagcaguaaaugu

SEQ ID NO: 926601 - RNA, 19 nt, Artificial Sequence
  Description of Artificial Sequence: Synthetic oligonucleotide
  Antisense strand to SEQ ID NO: 926600
acauuuacugcugugauca

SEQ ID NO: 926602 - RNA, 19 nt, Artificial Sequence
  Description of Artificial Sequence: Synthetic oligonucleotide
  Sense strand starting at position 2557 of SEQ ID NO: 913429
gcugauguuccagaaccca

SEQ ID NO: 926603 - RNA, 19 nt, Artificial Sequence
  Description of Artificial Sequence: Synthetic oligonucleotide
  Antisense strand to SEQ ID NO: 926602
uggguucuggaacaucagc

SEQ ID NO: 926604 - RNA, 19 nt, Artificial Sequence
  Description of Artificial Sequence: Synthetic oligonucleotide
  Sense strand starting at position 1017 of SEQ ID NO: 913429
aaauguaugcccugagaga

SEQ ID NO: 926605 - RNA, 19 nt, Artificial Sequence
  Description of Artificial Sequence: Synthetic oligonucleotide
  Antisense strand to SEQ ID NO: 926604
ucucucagggcauacauuu

SEQ ID NO: 926606 - RNA, 19 nt, Artificial Sequence
  Description of Artificial Sequence: Synthetic oligonucleotide
  Sense strand starting at position 1616 of SEQ ID NO: 913429
cugagagcugccuacagau

SEQ ID NO: 926607 - RNA, 19 nt, Artificial Sequence
  Description of Artificial Sequence: Synthetic oligonucleotide
  Antisense strand to SEQ ID NO: 926606
aucuguaggcagcucucag

SEQ ID NO: 926608 - RNA, 19 nt, Artificial Sequence
  Description of Artificial Sequence: Synthetic oligonucleotide
  Sense strand starting at position 1276 of SEQ ID NO: 913429
cccugagaacagugugaua

SEQ ID NO: 926609 - RNA, 19 nt, Artificial Sequence
  Description of Artificial Sequence: Synthetic oligonucleotide
  Antisense strand to SEQ ID NO: 926608
uaucacacuguucucaggg

SEQ ID NO: 926610 - RNA, 19 nt, Artificial Sequence
  Description of Artificial Sequence: Synthetic oligonucleotide
  Sense strand starting at position 2056 of SEQ ID NO: 913429
auuugacagucagaaauuc

SEQ ID NO: 926611 - RNA, 19 nt, Artificial Sequence
  Description of Artificial Sequence: Synthetic oligonucleotide
  Antisense strand to SEQ ID NO: 926610
gaauuucugacugucaaau

SEQ ID NO: 926612 - RNA, 19 nt, Artificial Sequence
  Description of Artificial Sequence: Synthetic oligonucleotide
  Sense strand starting at position 666 of SEQ ID NO: 913429
agagcucuugaguaaguuc

SEQ ID NO: 926613 - RNA, 19 nt, Artificial Sequence
  Description of Artificial Sequence: Synthetic oligonucleotide
  Antisense strand to SEQ ID NO: 926612
gaacuuacucaagagcucu

SEQ ID NO: 926614 - RNA, 19 nt, Artificial Sequence
  Description of Artificial Sequence: Synthetic oligonucleotide
  Sense strand starting at position 1376 of SEQ ID NO: 913429
gguagagucuuggcaagag

SEQ ID NO: 926615 - RNA, 19 nt, Artificial Sequence
  Description of Artificial Sequence: Synthetic oligonucleotide
  Antisense strand to SEQ ID NO: 926614
cucuugccaagacucuacc

SEQ ID NO: 926616 - RNA, 19 nt, Artificial Sequence
  Description of Artificial Sequence: Synthetic oligonucleotide
  Sense strand starting at position 960 of SEQ ID NO: 913429
ccuuccuaaguguacgaua

SEQ ID NO: 926617 - RNA, 19 nt, Artificial Sequence
  Description of Artificial Sequence: Synthetic oligonucleotide
  Antisense strand to SEQ ID NO: 926616
uaucguacacuuaggaagg

SEQ ID NO: 926618 - RNA, 19 nt, Artificial Sequence
  Description of Artificial Sequence: Synthetic oligonucleotide
  Sense strand starting at position 1015 of SEQ ID NO: 913429
guaaauguaugcccugaga

SEQ ID NO: 926619 - RNA, 19 nt, Artificial Sequence
  Description of Artificial Sequence: Synthetic oligonucleotide
  Antisense strand to SEQ ID NO: 926618
ucucagggcauacauuuac

SEQ ID NO: 926620 - RNA, 19 nt, Artificial Sequence
  Description of Artificial Sequence: Synthetic oligonucleotide
  Sense strand starting at position 665 of SEQ ID NO: 913429
aagagcucuugaguaaguu

SEQ ID NO: 926621 - RNA, 19 nt, Artificial Sequence
  Description of Artificial Sequence: Synthetic oligonucleotide
  Antisense strand to SEQ ID NO: 926620
aacuuacucaagagcucuu

SEQ ID NO: 926622 - RNA, 19 nt, Artificial Sequence
  Description of Artificial Sequence: Synthetic oligonucleotide
  Sense strand starting at position 1285 of SEQ ID NO: 913429
cagugugauagguauuguu

SEQ ID NO: 926623 - RNA, 19 nt, Artificial Sequence
  Description of Artificial Sequence: Synthetic oligonucleotide
  Antisense strand to SEQ ID NO: 926622
aacaauaccuaucacacug

SEQ ID NO: 926624 - RNA, 19 nt, Artificial Sequence
  Description of Artificial Sequence: Synthetic oligonucleotide
  Sense strand starting at position 3225 of SEQ ID NO: 913429
gaugaaacccgccaguguu

SEQ ID NO: 926625 - RNA, 19 nt, Artificial Sequence
  Description of Artificial Sequence: Synthetic oligonucleotide
  Antisense strand to SEQ ID NO: 926624
aacacuggcggguuucauc

SEQ ID NO: 926626 - RNA, 19 nt, Artificial Sequence
  Description of Artificial Sequence: Synthetic oligonucleotide
  Sense strand starting at position 3368 of SEQ ID NO: 913429
gcauuugcaagcuguguga

SEQ ID NO: 926627 - RNA, 19 nt, Artificial Sequence
  Description of Artificial Sequence: Synthetic oligonucleotide
  Antisense strand to SEQ ID NO: 926626
ucacacagcuugcaaaugc

SEQ ID NO: 926628 - RNA, 19 nt, Artificial Sequence
  Description of Artificial Sequence: Synthetic oligonucleotide
  Sense strand starting at position 962 of SEQ ID NO: 913429
uuccuaaguguacgauaca

SEQ ID NO: 926629 - RNA, 19 nt, Artificial Sequence
  Description of Artificial Sequence: Synthetic oligonucleotide
  Antisense strand to SEQ ID NO: 926628
uguaucguacacuuaggaa

SEQ ID NO: 926630 - RNA, 19 nt, Artificial Sequence
  Description of Artificial Sequence: Synthetic oligonucleotide
  Sense strand starting at position 2314 of SEQ ID NO: 913429
ggaagcuuugcucaugcua

SEQ ID NO: 926631 - RNA, 19 nt, Artificial Sequence
  Description of Artificial Sequence: Synthetic oligonucleotide
  Antisense strand to SEQ ID NO: 926630
uagcaugagcaaagcuucc

SEQ ID NO: 926632 - RNA, 19 nt, Artificial Sequence
  Description of Artificial Sequence: Synthetic oligonucleotide
  Sense strand starting at position 1729 of SEQ ID NO: 913429
ccaugaguccugugcagag

SEQ ID NO: 926633 - RNA, 19 nt, Artificial Sequence
  Description of Artificial Sequence: Synthetic oligonucleotide
  Antisense strand to SEQ ID NO: 926632
cucugcacaggacucaugg

SEQ ID NO: 926634 - RNA, 19 nt, Artificial Sequence
  Description of Artificial Sequence: Synthetic oligonucleotide
  Sense strand starting at position 869 of SEQ ID NO: 913429
agcaguagucauuguggga

SEQ ID NO: 926635 - RNA, 19 nt, Artificial Sequence
  Description of Artificial Sequence: Synthetic oligonucleotide
  Antisense strand to SEQ ID NO: 926634
ucccacaaugacuacugcu

SEQ ID NO: 926636 - RNA, 19 nt, Artificial Sequence
  Description of Artificial Sequence: Synthetic oligonucleotide
  Sense strand starting at position 2553 of SEQ ID NO: 913429
guuugcugauguuccagaa

SEQ ID NO: 926637 - RNA, 19 nt, Artificial Sequence
  Description of Artificial Sequence: Synthetic oligonucleotide
  Antisense strand to SEQ ID NO: 926636
uucuggaacaucagcaaac

SEQ ID NO: 926638 - RNA, 19 nt, Artificial Sequence
  Description of Artificial Sequence: Synthetic oligonucleotide
  Sense strand starting at position 2507 of SEQ ID NO: 913429
agggccuccuuuguaaagu

SEQ ID NO: 926639 - RNA, 19 nt, Artificial Sequence
  Description of Artificial Sequence: Synthetic oligonucleotide
  Antisense strand to SEQ ID NO: 926638
acuuuacaaaggaggcccu

SEQ ID NO: 926640 - RNA, 19 nt, Artificial Sequence
  Description of Artificial Sequence: Synthetic oligonucleotide
  Sense strand starting at position 3432 of SEQ ID NO: 913429
gagaacaguugcuuucugu

SEQ ID NO: 926641 - RNA, 19 nt, Artificial Sequence
  Description of Artificial Sequence: Synthetic oligonucleotide
  Antisense strand to SEQ ID NO: 926640
acagaaagcaacuguucuc

SEQ ID NO: 926642 - RNA, 19 nt, Artificial Sequence
  Description of Artificial Sequence: Synthetic oligonucleotide
  Sense strand starting at position 1175 of SEQ ID NO: 913429
agcccuguggugugaggaa

SEQ ID NO: 926643 - RNA, 19 nt, Artificial Sequence
  Description of Artificial Sequence: Synthetic oligonucleotide
  Antisense strand to SEQ ID NO: 926642
uuccucacaccacagggcu

SEQ ID NO: 926644 - RNA, 19 nt, Artificial Sequence
  Description of Artificial Sequence: Synthetic oligonucleotide
  Sense strand starting at position 2642 of SEQ ID NO: 913429
ggcuguaggucucugacca

SEQ ID NO: 926645 - RNA, 19 nt, Artificial Sequence
  Description of Artificial Sequence: Synthetic oligonucleotide
  Antisense strand to SEQ ID NO: 926644
uggucagagaccuacagcc

SEQ ID NO: 926646 - RNA, 19 nt, Artificial Sequence
  Description of Artificial Sequence: Synthetic oligonucleotide
  Sense strand starting at position 648 of SEQ ID NO: 913429
gggcauggcucugcuauaa

SEQ ID NO: 926647 - RNA, 19 nt, Artificial Sequence
  Description of Artificial Sequence: Synthetic oligonucleotide
  Antisense strand to SEQ ID NO: 926646
uuauagcagagccaugccc

SEQ ID NO: 926648 - RNA, 19 nt, Artificial Sequence
  Description of Artificial Sequence: Synthetic oligonucleotide
  Sense strand starting at position 647 of SEQ ID NO: 913429
agggcauggcucugcuaua

SEQ ID NO: 926649 - RNA, 19 nt, Artificial Sequence
  Description of Artificial Sequence: Synthetic oligonucleotide
  Antisense strand to SEQ ID NO: 926648
uauagcagagccaugcccu

SEQ ID NO: 926650 - RNA, 19 nt, Artificial Sequence
  Description of Artificial Sequence: Synthetic oligonucleotide
  Sense strand starting at position 1042 of SEQ ID NO: 913429
auaauaaggugucagggaa

SEQ ID NO: 926651 - RNA, 19 nt, Artificial Sequence
  Description of Artificial Sequence: Synthetic oligonucleotide
  Antisense strand to SEQ ID NO: 926650
uucccugacaccuuauuau

SEQ ID NO: 926652 - RNA, 19 nt, Artificial Sequence
  Description of Artificial Sequence: Synthetic oligonucleotide
  Sense strand starting at position 1559 of SEQ ID NO: 913429
gcucauaagugguuggguu

SEQ ID NO: 926653 - RNA, 19 nt, Artificial Sequence
  Description of Artificial Sequence: Synthetic oligonucleotide
  Antisense strand to SEQ ID NO: 926652
aacccaaccacuuaugagc

SEQ ID NO: 926654 - RNA, 19 nt, Artificial Sequence
  Description of Artificial Sequence: Synthetic oligonucleotide
  Sense strand starting at position 1105 of SEQ ID NO: 913429
cagaaugcaugagaguuaa

SEQ ID NO: 926655 - RNA, 19 nt, Artificial Sequence
  Description of Artificial Sequence: Synthetic oligonucleotide
  Antisense strand to SEQ ID NO: 926654
uuaacucucaugcauucug

SEQ ID NO: 926656 - RNA, 19 nt, Artificial Sequence
  Description of Artificial Sequence: Synthetic oligonucleotide
  Sense strand starting at position 3393 of SEQ ID NO: 913429
cugguuguuccauguuucu

SEQ ID NO: 926657 - RNA, 19 nt, Artificial Sequence
  Description of Artificial Sequence: Synthetic oligonucleotide
  Antisense strand to SEQ ID NO: 926656
agaaacauggaacaaccag

SEQ ID NO: 926658 - RNA, 19 nt, Artificial Sequence
  Description of Artificial Sequence: Synthetic oligonucleotide
  Sense strand starting at position 2952 of SEQ ID NO: 913430
ccuaguaguggucuguguu

SEQ ID NO: 926659 - RNA, 19 nt, Artificial Sequence
  Description of Artificial Sequence: Synthetic oligonucleotide
  Antisense strand to SEQ ID NO: 926658
aacacagaccacuacuagg

SEQ ID NO: 926660 - RNA, 19 nt, Artificial Sequence
  Description of Artificial Sequence: Synthetic oligonucleotide
  Sense strand starting at position 272 of SEQ ID NO: 913430
cgaauuagcgugucaucuu

SEQ ID NO: 926661 - RNA, 19 nt, Artificial Sequence
  Description of Artificial Sequence: Synthetic oligonucleotide
  Antisense strand to SEQ ID NO: 926660
aagaugacacgcuaauucg

SEQ ID NO: 926662 - RNA, 19 nt, Artificial Sequence
  Description of Artificial Sequence: Synthetic oligonucleotide
  Sense strand starting at position 371 of SEQ ID NO: 913430
auugcaugucaugagaaua

SEQ ID NO: 926663 - RNA, 19 nt, Artificial Sequence
  Description of Artificial Sequence: Synthetic oligonucleotide
  Antisense strand to SEQ ID NO: 926662
uauucucaugacaugcaau

SEQ ID NO: 926664 - RNA, 19 nt, Artificial Sequence
  Description of Artificial Sequence: Synthetic oligonucleotide
  Sense strand starting at position 841 of SEQ ID NO: 913430
ugccuuaguggucugcauu

SEQ ID NO: 926665 - RNA, 19 nt, Artificial Sequence
  Description of Artificial Sequence: Synthetic oligonucleotide
  Antisense strand to SEQ ID NO: 926664
aaugcagaccacuaaggca

SEQ ID NO: 926666 - RNA, 19 nt, Artificial Sequence
  Description of Artificial Sequence: Synthetic oligonucleotide
  Sense strand starting at position 3029 of SEQ ID NO: 913430
gacagcugccaggauaaua

SEQ ID NO: 926667 - RNA, 19 nt, Artificial Sequence
  Description of Artificial Sequence: Synthetic oligonucleotide
  Antisense strand to SEQ ID NO: 926666
uauuauccuggcagcuguc

SEQ ID NO: 926668 - RNA, 19 nt, Artificial Sequence
  Description of Artificial Sequence: Synthetic oligonucleotide
  Sense strand starting at position 3753 of SEQ ID NO: 913430
ugguuaucucagggagagg

SEQ ID NO: 926669 - RNA, 19 nt, Artificial Sequence
  Description of Artificial Sequence: Synthetic oligonucleotide
  Antisense strand to SEQ ID NO: 926668
ccucucccugagauaacca

SEQ ID NO: 926670 - RNA, 19 nt, Artificial Sequence
  Description of Artificial Sequence: Synthetic oligonucleotide
  Sense strand starting at position 2186 of SEQ ID NO: 913430
cccugaauccucugggaga

SEQ ID NO: 926671 - RNA, 19 nt, Artificial Sequence
  Description of Artificial Sequence: Synthetic oligonucleotide
  Antisense strand to SEQ ID NO: 926670
ucucccagaggauucaggg

SEQ ID NO: 926672 - RNA, 19 nt, Artificial Sequence
  Description of Artificial Sequence: Synthetic oligonucleotide
  Sense strand starting at position 3577 of SEQ ID NO: 913430
auuucucuaacguggaguu

SEQ ID NO: 926673 - RNA, 19 nt, Artificial Sequence
  Description of Artificial Sequence: Synthetic oligonucleotide
  Antisense strand to SEQ ID NO: 926672
aacuccacguuagagaaau

SEQ ID NO: 926674 - RNA, 19 nt, Artificial Sequence
  Description of Artificial Sequence: Synthetic oligonucleotide
  Sense strand starting at position 1433 of SEQ ID NO: 913430
ucaguccaucaccaguaaa

SEQ ID NO: 926675 - RNA, 19 nt, Artificial Sequence
  Description of Artificial Sequence: Synthetic oligonucleotide
  Antisense strand to SEQ ID NO: 926674
uuuacuggugauggacuga

SEQ ID NO: 926676 - RNA, 19 nt, Artificial Sequence
  Description of Artificial Sequence: Synthetic oligonucleotide
  Sense strand starting at position 269 of SEQ ID NO: 913430
cagcgaauuagcgugucau

SEQ ID NO: 926677 - RNA, 19 nt, Artificial Sequence
  Description of Artificial Sequence: Synthetic oligonucleotide
  Antisense strand to SEQ ID NO: 926676
augacacgcuaauucgcug

SEQ ID NO: 926678 - RNA, 19 nt, Artificial Sequence
  Description of Artificial Sequence: Synthetic oligonucleotide
  Sense strand starting at position 2715 of SEQ ID NO: 913430
augaguauucuugacuucu

SEQ ID NO: 926679 - RNA, 19 nt, Artificial Sequence
  Description of Artificial Sequence: Synthetic oligonucleotide
  Antisense strand to SEQ ID NO: 926678
agaagucaagaauacucau

SEQ ID NO: 926680 - RNA, 19 nt, Artificial Sequence
  Description of Artificial Sequence: Synthetic oligonucleotide
  Sense strand starting at position 3642 of SEQ ID NO: 913430
cugccauuucuuugacagu

SEQ ID NO: 926681 - RNA, 19 nt, Artificial Sequence
  Description of Artificial Sequence: Synthetic oligonucleotide
  Antisense strand to SEQ ID NO: 926680
acugucaaagaaauggcag

SEQ ID NO: 926682 - RNA, 19 nt, Artificial Sequence
  Description of Artificial Sequence: Synthetic oligonucleotide
  Sense strand starting at position 753 of SEQ ID NO: 913430
agggaauaauaggcuuagu

SEQ ID NO: 926683 - RNA, 19 nt, Artificial Sequence
  Description of Artificial Sequence: Synthetic oligonucleotide
  Antisense strand to SEQ ID NO: 926682
acuaagccuauuauucccu

SEQ ID NO: 926684 - RNA, 19 nt, Artificial Sequence
  Description of Artificial Sequence: Synthetic oligonucleotide
  Sense strand starting at position 979 of SEQ ID NO: 913430
aagaaugucguuuagacca

SEQ ID NO: 926685 - RNA, 19 nt, Artificial Sequence
  Description of Artificial Sequence: Synthetic oligonucleotide
  Antisense strand to SEQ ID NO: 926684
uggucuaaacgacauucuu

SEQ ID NO: 926686 - RNA, 19 nt, Artificial Sequence
  Description of Artificial Sequence: Synthetic oligonucleotide
  Sense strand starting at position 3741 of SEQ ID NO: 913430
acaguaauaggaugguuau

SEQ ID NO: 926687 - RNA, 19 nt, Artificial Sequence
  Description of Artificial Sequence: Synthetic oligonucleotide
  Antisense strand to SEQ ID NO: 926686
auaaccauccuauuacugu

SEQ ID NO: 926688 - RNA, 19 nt, Artificial Sequence
  Description of Artificial Sequence: Synthetic oligonucleotide
  Sense strand starting at position 1653 of SEQ ID NO: 913430
agccguccaauggaagaau

SEQ ID NO: 926689 - RNA, 19 nt, Artificial Sequence
  Description of Artificial Sequence: Synthetic oligonucleotide
  Antisense strand to SEQ ID NO: 926688
auucuuccauuggacggcu

SEQ ID NO: 926690 - RNA, 19 nt, Artificial Sequence
  Description of Artificial Sequence: Synthetic oligonucleotide
  Sense strand starting at position 3278 of SEQ ID NO: 913430
uucugaaggagcuaguuua

SEQ ID NO: 926691 - RNA, 19 nt, Artificial Sequence
  Description of Artificial Sequence: Synthetic oligonucleotide
  Antisense strand to SEQ ID NO: 926690
uaaacuagcuccuucagaa

SEQ ID NO: 926692 - RNA, 19 nt, Artificial Sequence
  Description of Artificial Sequence: Synthetic oligonucleotide
  Sense strand starting at position 3884 of SEQ ID NO: 913430
ucaguaagaagugauguuu

SEQ ID NO: 926693 - RNA, 19 nt, Artificial Sequence
  Description of Artificial Sequence: Synthetic oligonucleotide
  Antisense strand to SEQ ID NO: 926692
aaacaucacuucuuacuga

SEQ ID NO: 926694 - RNA, 19 nt, Artificial Sequence
  Description of Artificial Sequence: Synthetic oligonucleotide
  Sense strand starting at position 3640 of SEQ ID NO: 913430
ugcugccauuucuuugaca

SEQ ID NO: 926695 - RNA, 19 nt, Artificial Sequence
  Description of Artificial Sequence: Synthetic oligonucleotide
  Antisense strand to SEQ ID NO: 926694
ugucaaagaaauggcagca

SEQ ID NO: 926696 - RNA, 19 nt, Artificial Sequence
  Description of Artificial Sequence: Synthetic oligonucleotide
  Sense strand starting at position 928 of SEQ ID NO: 913430
ccuuguguuuccucauuua

SEQ ID NO: 926697 - RNA, 19 nt, Artificial Sequence
  Description of Artificial Sequence: Synthetic oligonucleotide
  Antisense strand to SEQ ID NO: 926696
uaaaugaggaaacacaagg

SEQ ID NO: 926698 - RNA, 19 nt, Artificial Sequence
  Description of Artificial Sequence: Synthetic oligonucleotide
  Sense strand starting at position 2355 of SEQ ID NO: 913430
acugauugauguuugauac

SEQ ID NO: 926699 - RNA, 19 nt, Artificial Sequence
  Description of Artificial Sequence: Synthetic oligonucleotide
  Antisense strand to SEQ ID NO: 926698
guaucaaacaucaaucagu

SEQ ID NO: 926700 - RNA, 19 nt, Artificial Sequence
  Description of Artificial Sequence: Synthetic oligonucleotide
  Sense strand starting at position 328 of SEQ ID NO: 913430
uugauuucuucuguuuguu

SEQ ID NO: 926701 - RNA, 19 nt, Artificial Sequence
  Description of Artificial Sequence: Synthetic oligonucleotide
  Antisense strand to SEQ ID NO: 926700
aacaaacagaagaaaucaa

SEQ ID NO: 926702 - RNA, 19 nt, Artificial Sequence
  Description of Artificial Sequence: Synthetic oligonucleotide
  Sense strand starting at position 271 of SEQ ID NO: 913430
gcgaauuagcgugucaucu

SEQ ID NO: 926703 - RNA, 19 nt, Artificial Sequence
  Description of Artificial Sequence: Synthetic oligonucleotide
  Antisense strand to SEQ ID NO: 926702
agaugacacgcuaauucgc

SEQ ID NO: 926704 - RNA, 19 nt, Artificial Sequence
  Description of Artificial Sequence: Synthetic oligonucleotide
  Sense strand starting at position 3906 of SEQ ID NO: 913430
acccauuagccugaagguu

SEQ ID NO: 926705 - RNA, 19 nt, Artificial Sequence
  Description of Artificial Sequence: Synthetic oligonucleotide
  Antisense strand to SEQ ID NO: 926704
aaccuucaggcuaaugggu

SEQ ID NO: 926706 - RNA, 19 nt, Artificial Sequence
  Description of Artificial Sequence: Synthetic oligonucleotide
  Sense strand starting at position 2723 of SEQ ID NO: 913430
ucuugacuucuuuggauga

SEQ ID NO: 926707 - RNA, 19 nt, Artificial Sequence
  Description of Artificial Sequence: Synthetic oligonucleotide
  Antisense strand to SEQ ID NO: 926706
ucauccaaagaagucaaga

SEQ ID NO: 926708 - RNA, 19 nt, Artificial Sequence
  Description of Artificial Sequence: Synthetic oligonucleotide
  Sense strand starting at position 903 of SEQ ID NO: 913430
ugagcaaggcauggaauua

SEQ ID NO: 926709 - RNA, 19 nt, Artificial Sequence
  Description of Artificial Sequence: Synthetic oligonucleotide
  Antisense strand to SEQ ID NO: 926708
uaauuccaugccuugcuca

SEQ ID NO: 926710 - RNA, 19 nt, Artificial Sequence
  Description of Artificial Sequence: Synthetic oligonucleotide
  Sense strand starting at position 26 of SEQ ID NO: 913430
uguaaagaauuugaucuga

SEQ ID NO: 926711 - RNA, 19 nt, Artificial Sequence
  Description of Artificial Sequence: Synthetic oligonucleotide
  Antisense strand to SEQ ID NO: 926710
ucagaucaaauucuuuaca

SEQ ID NO: 926712 - RNA, 19 nt, Artificial Sequence
  Description of Artificial Sequence: Synthetic oligonucleotide
  Sense strand starting at position 2765 of SEQ ID NO: 913430
auguacuuggcuuguauuu

SEQ ID NO: 926713 - RNA, 19 nt, Artificial Sequence
  Description of Artificial Sequence: Synthetic oligonucleotide
  Antisense strand to SEQ ID NO: 926712
aaauacaagccaaguacau

SEQ ID NO: 926714 - RNA, 19 nt, Artificial Sequence
  Description of Artificial Sequence: Synthetic oligonucleotide
  Sense strand starting at position 3742 of SEQ ID NO: 913430
caguaauaggaugguuauc

SEQ ID NO: 926715 - RNA, 19 nt, Artificial Sequence
  Description of Artificial Sequence: Synthetic oligonucleotide
  Antisense strand to SEQ ID NO: 926714
gauaaccauccuauuacug

SEQ ID NO: 926716 - RNA, 19 nt, Artificial Sequence
  Description of Artificial Sequence: Synthetic oligonucleotide
  Sense strand starting at position 292 of SEQ ID NO: 913430
guaaaugaacacugcuaau

SEQ ID NO: 926717 - RNA, 19 nt, Artificial Sequence
  Description of Artificial Sequence: Synthetic oligonucleotide
  Antisense strand to SEQ ID NO: 926716
auuagcaguguucauuuac

SEQ ID NO: 926718 - RNA, 19 nt, Artificial Sequence
  Description of Artificial Sequence: Synthetic oligonucleotide
  Sense strand starting at position 2721 of SEQ ID NO: 913430
auucuugacuucuuuggau

SEQ ID NO: 926719 - RNA, 19 nt, Artificial Sequence
  Description of Artificial Sequence: Synthetic oligonucleotide
  Antisense strand to SEQ ID NO: 926718
auccaaagaagucaagaau

SEQ ID NO: 926720 - RNA, 19 nt, Artificial Sequence
  Description of Artificial Sequence: Synthetic oligonucleotide
  Sense strand starting at position 182 of SEQ ID NO: 913430
augacacagcucuaugcau

SEQ ID NO: 926721 - RNA, 19 nt, Artificial Sequence
  Description of Artificial Sequence: Synthetic oligonucleotide
  Antisense strand to SEQ ID NO: 926720
augcauagagcugugucau

SEQ ID NO: 926722 - RNA, 19 nt, Artificial Sequence
  Description of Artificial Sequence: Synthetic oligonucleotide
  Sense strand starting at position 1276 of SEQ ID NO: 913430
acugguguccaaggagauu

SEQ ID NO: 926723 - RNA, 19 nt, Artificial Sequence
  Description of Artificial Sequence: Synthetic oligonucleotide
  Antisense strand to SEQ ID NO: 926722
aaucuccuuggacaccagu

SEQ ID NO: 926724 - RNA, 19 nt, Artificial Sequence
  Description of Artificial Sequence: Synthetic oligonucleotide
  Sense strand starting at position 3403 of SEQ ID NO: 913430
uagugauugcuagaguuag

SEQ ID NO: 926725 - RNA, 19 nt, Artificial Sequence
  Description of Artificial Sequence: Synthetic oligonucleotide
  Antisense strand to SEQ ID NO: 926724
cuaacucuagcaaucacua

SEQ ID NO: 926726 - RNA, 19 nt, Artificial Sequence
  Description of Artificial Sequence: Synthetic oligonucleotide
  Sense strand starting at position 2450 of SEQ ID NO: 913430
uuuagagauacaugccgaa

SEQ ID NO: 926727 - RNA, 19 nt, Artificial Sequence
  Description of Artificial Sequence: Synthetic oligonucleotide
  Antisense strand to SEQ ID NO: 926726
uucggcauguaucucuaaa

SEQ ID NO: 926728 - RNA, 19 nt, Artificial Sequence
  Description of Artificial Sequence: Synthetic oligonucleotide
  Sense strand starting at position 2356 of SEQ ID NO: 913430
cugauugauguuugauacu

SEQ ID NO: 926729 - RNA, 19 nt, Artificial Sequence
  Description of Artificial Sequence: Synthetic oligonucleotide
  Antisense strand to SEQ ID NO: 926728
aguaucaaacaucaaucag

SEQ ID NO: 926730 - RNA, 19 nt, Artificial Sequence
  Description of Artificial Sequence: Synthetic oligonucleotide
  Sense strand starting at position 2564 of SEQ ID NO: 913430
cuagauuaggcaugugaau

SEQ ID NO: 926731 - RNA, 19 nt, Artificial Sequence
  Description of Artificial Sequence: Synthetic oligonucleotide
  Antisense strand to SEQ ID NO: 926730
auucacaugccuaaucuag

SEQ ID NO: 926732 - RNA, 19 nt, Artificial Sequence
  Description of Artificial Sequence: Synthetic oligonucleotide
  Sense strand starting at position 2365 of SEQ ID NO: 913430
guuugauacuaagcaauca

SEQ ID NO: 926733 - RNA, 19 nt, Artificial Sequence
  Description of Artificial Sequence: Synthetic oligonucleotide
  Antisense strand to SEQ ID NO: 926732
ugauugcuuaguaucaaac

SEQ ID NO: 926734 - RNA, 19 nt, Artificial Sequence
  Description of Artificial Sequence: Synthetic oligonucleotide
  Sense strand starting at position 630 of SEQ ID NO: 913430
uauguauguguacacugau

SEQ ID NO: 926735 - RNA, 19 nt, Artificial Sequence
  Description of Artificial Sequence: Synthetic oligonucleotide
  Antisense strand to SEQ ID NO: 926734
aucaguguacacauacaua

SEQ ID NO: 926736 - RNA, 19 nt, Artificial Sequence
  Description of Artificial Sequence: Synthetic oligonucleotide
  Sense strand starting at position 3010 of SEQ ID NO: 913430
gauguuaguccauauugua

SEQ ID NO: 926737 - RNA, 19 nt, Artificial Sequence
  Description of Artificial Sequence: Synthetic oligonucleotide
  Antisense strand to SEQ ID NO: 926736
uacaauauggacuaacauc

SEQ ID NO: 926738 - RNA, 19 nt, Artificial Sequence
  Description of Artificial Sequence: Synthetic oligonucleotide
  Sense strand starting at position 3646 of SEQ ID NO: 913431
agggaagauucugcuacag

SEQ ID NO: 926739 - RNA, 19 nt, Artificial Sequence
  Description of Artificial Sequence: Synthetic oligonucleotide
  Antisense strand to SEQ ID NO: 926738
cuguagcagaaucuucccu

SEQ ID NO: 926740 - RNA, 19 nt, Artificial Sequence
  Description of Artificial Sequence: Synthetic oligonucleotide
  Sense strand starting at position 3839 of SEQ ID NO: 913431
aaguuugagcuugaaauug

SEQ ID NO: 926741 - RNA, 19 nt, Artificial Sequence
  Description of Artificial Sequence: Synthetic oligonucleotide
  Antisense strand to SEQ ID NO: 926740
caauuucaagcucaaacuu

SEQ ID NO: 926742 - RNA, 19 nt, Artificial Sequence
  Description of Artificial Sequence: Synthetic oligonucleotide
  Sense strand starting at position 3095 of SEQ ID NO: 913431
ugaaucgaaucauccauga

SEQ ID NO: 926743 - RNA, 19 nt, Artificial Sequence
  Description of Artificial Sequence: Synthetic oligonucleotide
  Antisense strand to SEQ ID NO: 926742
ucauggaugauucgauuca

SEQ ID NO: 926744 - RNA, 19 nt, Artificial Sequence
  Description of Artificial Sequence: Synthetic oligonucleotide
  Sense strand starting at position 2569 of SEQ ID NO: 913431
uggauuaaggaaggcuauu

SEQ ID NO: 926745 - RNA, 19 nt, Artificial Sequence
  Description of Artificial Sequence: Synthetic oligonucleotide
  Antisense strand to SEQ ID NO: 926744
aauagccuuccuuaaucca

SEQ ID NO: 926746 - RNA, 19 nt, Artificial Sequence
  Description of Artificial Sequence: Synthetic oligonucleotide
  Sense strand starting at position 1503 of SEQ ID NO: 913431
aggacuaugugaucgagga

SEQ ID NO: 926747 - RNA, 19 nt, Artificial Sequence
  Description of Artificial Sequence: Synthetic oligonucleotide
  Antisense strand to SEQ ID NO: 926746
uccucgaucacauaguccu

SEQ ID NO: 926748 - RNA, 19 nt, Artificial Sequence
  Description of Artificial Sequence: Synthetic oligonucleotide
  Sense strand starting at position 2650 of SEQ ID NO: 913431
ucagcaggucaucaacaau

SEQ ID NO: 926749 - RNA, 19 nt, Artificial Sequence
  Description of Artificial Sequence: Synthetic oligonucleotide
  Antisense strand to SEQ ID NO: 926748
auuguugaugaccugcuga

SEQ ID NO: 926750 - RNA, 19 nt, Artificial Sequence
  Description of Artificial Sequence: Synthetic oligonucleotide
  Sense strand starting at position 1114 of SEQ ID NO: 913431
cuuacaucauggucaagga

SEQ ID NO: 926751 - RNA, 19 nt, Artificial Sequence
  Description of Artificial Sequence: Synthetic oligonucleotide
  Antisense strand to SEQ ID NO: 926750
uccuugaccaugauguaag

SEQ ID NO: 926752 - RNA, 19 nt, Artificial Sequence
  Description of Artificial Sequence: Synthetic oligonucleotide
  Sense strand starting at position 888 of SEQ ID NO: 913431
agggcauauccuuaaucuu

SEQ ID NO: 926753 - RNA, 19 nt, Artificial Sequence
  Description of Artificial Sequence: Synthetic oligonucleotide
  Antisense strand to SEQ ID NO: 926752
aagauuaaggauaugcccu

SEQ ID NO: 926754 - RNA, 19 nt, Artificial Sequence
  Description of Artificial Sequence: Synthetic oligonucleotide
  Sense strand starting at position 2492 of SEQ ID NO: 913431
uccucacagcaggauuauu

SEQ ID NO: 926755 - RNA, 19 nt, Artificial Sequence
  Description of Artificial Sequence: Synthetic oligonucleotide
  Antisense strand to SEQ ID NO: 926754
aauaauccugcugugagga

SEQ ID NO: 926756 - RNA, 19 nt, Artificial Sequence
  Description of Artificial Sequence: Synthetic oligonucleotide
  Sense strand starting at position 3650 of SEQ ID NO: 913431
aagauucugcuacagugau

SEQ ID NO: 926757 - RNA, 19 nt, Artificial Sequence
  Description of Artificial Sequence: Synthetic oligonucleotide
  Antisense strand to SEQ ID NO: 926756
aucacuguagcagaaucuu

SEQ ID NO: 926758 - RNA, 19 nt, Artificial Sequence
  Description of Artificial Sequence: Synthetic oligonucleotide
  Sense strand starting at position 1498 of SEQ ID NO: 913431
uuaugaggacuaugugauc

SEQ ID NO: 926759 - RNA, 19 nt, Artificial Sequence
  Description of Artificial Sequence: Synthetic oligonucleotide
  Antisense strand to SEQ ID NO: 926758
gaucacauaguccucauaa

SEQ ID NO: 926760 - RNA, 19 nt, Artificial Sequence
  Description of Artificial Sequence: Synthetic oligonucleotide
  Sense strand starting at position 1707 of SEQ ID NO: 913431
cgacucuuugauuaagggu

SEQ ID NO: 926761 - RNA, 19 nt, Artificial Sequence
  Description of Artificial Sequence: Synthetic oligonucleotide
  Antisense strand to SEQ ID NO: 926760
acccuuaaucaaagagucg

SEQ ID NO: 926762 - RNA, 19 nt, Artificial Sequence
  Description of Artificial Sequence: Synthetic oligonucleotide
  Sense strand starting at position 2227 of SEQ ID NO: 913431
gauguuaagugacucaaua

SEQ ID NO: 926763 - RNA, 19 nt, Artificial Sequence
  Description of Artificial Sequence: Synthetic oligonucleotide
  Antisense strand to SEQ ID NO: 926762
uauugagucacuuaacauc

SEQ ID NO: 926764 - RNA, 19 nt, Artificial Sequence
  Description of Artificial Sequence: Synthetic oligonucleotide
  Sense strand starting at position 925 of SEQ ID NO: 913431
gggcauuucgcuugauuga

SEQ ID NO: 926765 - RNA, 19 nt, Artificial Sequence
  Description of Artificial Sequence: Synthetic oligonucleotide
  Antisense strand to SEQ ID NO: 926764
ucaaucaagcgaaaugccc

SEQ ID NO: 926766 - RNA, 19 nt, Artificial Sequence
  Description of Artificial Sequence: Synthetic oligonucleotide
  Sense strand starting at position 3598 of SEQ ID NO: 913431
ggccaaugaggaggucaau

SEQ ID NO: 926767 - RNA, 19 nt, Artificial Sequence
  Description of Artificial Sequence: Synthetic oligonucleotide
  Antisense strand to SEQ ID NO: 926766
auugaccuccucauuggcc

SEQ ID NO: 926768 - RNA, 19 nt, Artificial Sequence
  Description of Artificial Sequence: Synthetic oligonucleotide
  Sense strand starting at position 1175 of SEQ ID NO: 913431
ucaucuaaagcugagucua

SEQ ID NO: 926769 - RNA, 19 nt, Artificial Sequence
  Description of Artificial Sequence: Synthetic oligonucleotide
  Antisense strand to SEQ ID NO: 926768
uagacucagcuuuagauga

SEQ ID NO: 926770 - RNA, 19 nt, Artificial Sequence
  Description of Artificial Sequence: Synthetic oligonucleotide
  Sense strand starting at position 3435 of SEQ ID NO: 913431
gagaaaugauguuucuucu

SEQ ID NO: 926771 - RNA, 19 nt, Artificial Sequence
  Description of Artificial Sequence: Synthetic oligonucleotide
  Antisense strand to SEQ ID NO: 926770
agaagaaacaucauuucuc

SEQ ID NO: 926772 - RNA, 19 nt, Artificial Sequence
  Description of Artificial Sequence: Synthetic oligonucleotide
  Sense strand starting at position 1504 of SEQ ID NO: 913431
ggacuaugugaucgaggac

SEQ ID NO: 926773 - RNA, 19 nt, Artificial Sequence
  Description of Artificial Sequence: Synthetic oligonucleotide
  Antisense strand to SEQ ID NO: 926772
guccucgaucacauagucc

SEQ ID NO: 926774 - RNA, 19 nt, Artificial Sequence
  Description of Artificial Sequence: Synthetic oligonucleotide
  Sense strand starting at position 676 of SEQ ID NO: 913431
cauaaucuagaguguaaug

SEQ ID NO: 926775 - RNA, 19 nt, Artificial Sequence
  Description of Artificial Sequence: Synthetic oligonucleotide
  Antisense strand to SEQ ID NO: 926774
cauuacacucuagauuaug

SEQ ID NO: 926776 - RNA, 19 nt, Artificial Sequence
  Description of Artificial Sequence: Synthetic oligonucleotide
  Sense strand starting at position 2977 of SEQ ID NO: 913431
cgcagaauuaguuaugaau

SEQ ID NO: 926777 - RNA, 19 nt, Artificial Sequence
  Description of Artificial Sequence: Synthetic oligonucleotide
  Antisense strand to SEQ ID NO: 926776
auucauaacuaauucugcg

SEQ ID NO: 926778 - RNA, 19 nt, Artificial Sequence
  Description of Artificial Sequence: Synthetic oligonucleotide
  Sense strand starting at position 1507 of SEQ ID NO: 913431
cuaugugaucgaggacaca

SEQ ID NO: 926779 - RNA, 19 nt, Artificial Sequence
  Description of Artificial Sequence: Synthetic oligonucleotide
  Antisense strand to SEQ ID NO: 926778
uguguccucgaucacauag

SEQ ID NO: 926780 - RNA, 19 nt, Artificial Sequence
  Description of Artificial Sequence: Synthetic oligonucleotide
  Sense strand starting at position 1428 of SEQ ID NO: 913431
guaagaauggugcaacuuu

SEQ ID NO: 926781 - RNA, 19 nt, Artificial Sequence
  Description of Artificial Sequence: Synthetic oligonucleotide
  Antisense strand to SEQ ID NO: 926780
aaaguugcaccauucuuac

SEQ ID NO: 926782 - RNA, 19 nt, Artificial Sequence
  Description of Artificial Sequence: Synthetic oligonucleotide
  Sense strand starting at position 3664 of SEQ ID NO: 913431
gugauaucaaggcaagucu

SEQ ID NO: 926783 - RNA, 19 nt, Artificial Sequence
  Description of Artificial Sequence: Synthetic oligonucleotide
  Antisense strand to SEQ ID NO: 926782
agacuugccuugauaucac

SEQ ID NO: 926784 - RNA, 19 nt, Artificial Sequence
  Description of Artificial Sequence: Synthetic oligonucleotide
  Sense strand starting at position 2185 of SEQ ID NO: 913431
cgaccucaggcugaaagua

SEQ ID NO: 926785 - RNA, 19 nt, Artificial Sequence
  Description of Artificial Sequence: Synthetic oligonucleotide
  Antisense strand to SEQ ID NO: 926784
uacuuucagccugaggucg

SEQ ID NO: 926786 - RNA, 19 nt, Artificial Sequence
  Description of Artificial Sequence: Synthetic oligonucleotide
  Sense strand starting at position 3246 of SEQ ID NO: 913431
auuguuguucuccacaaac

SEQ ID NO: 926787 - RNA, 19 nt, Artificial Sequence
  Description of Artificial Sequence: Synthetic oligonucleotide
  Antisense strand to SEQ ID NO: 926786
guuuguggagaacaacaau

SEQ ID NO: 926788 - RNA, 19 nt, Artificial Sequence
  Description of Artificial Sequence: Synthetic oligonucleotide
  Sense strand starting at position 2066 of SEQ ID NO: 913431
uguugacucuacuuggaac

SEQ ID NO: 926789 - RNA, 19 nt, Artificial Sequence
  Description of Artificial Sequence: Synthetic oligonucleotide
  Antisense strand to SEQ ID NO: 926788
guuccaaguagagucaaca

SEQ ID NO: 926790 - RNA, 19 nt, Artificial Sequence
  Description of Artificial Sequence: Synthetic oligonucleotide
  Sense strand starting at position 2676 of SEQ ID NO: 913431
aaaucuugccgagaugcaa

SEQ ID NO: 926791 - RNA, 19 nt, Artificial Sequence
  Description of Artificial Sequence: Synthetic oligonucleotide
  Antisense strand to SEQ ID NO: 926790
uugcaucucggcaagauuu

SEQ ID NO: 926792 - RNA, 19 nt, Artificial Sequence
  Description of Artificial Sequence: Synthetic oligonucleotide
  Sense strand starting at position 1285 of SEQ ID NO: 913431
gcaguaagucuuuacagau

SEQ ID NO: 926793 - RNA, 19 nt, Artificial Sequence
  Description of Artificial Sequence: Synthetic oligonucleotide
  Antisense strand to SEQ ID NO: 926792
aucuguaaagacuuacugc

SEQ ID NO: 926794 - RNA, 19 nt, Artificial Sequence
  Description of Artificial Sequence: Synthetic oligonucleotide
  Sense strand starting at position 2965 of SEQ ID NO: 913431
ugagauugaccucgcagaa

SEQ ID NO: 926795 - RNA, 19 nt, Artificial Sequence
  Description of Artificial Sequence: Synthetic oligonucleotide
  Antisense strand to SEQ ID NO: 926794
uucugcgaggucaaucuca

SEQ ID NO: 926796 - RNA, 19 nt, Artificial Sequence
  Description of Artificial Sequence: Synthetic oligonucleotide
  Sense strand starting at position 821 of SEQ ID NO: 913431
gccauaagauauuccagua

SEQ ID NO: 926797 - RNA, 19 nt, Artificial Sequence
  Description of Artificial Sequence: Synthetic oligonucleotide
  Antisense strand to SEQ ID NO: 926796
uacuggaauaucuuauggc

SEQ ID NO: 926798 - RNA, 19 nt, Artificial Sequence
  Description of Artificial Sequence: Synthetic oligonucleotide
  Sense strand starting at position 3838 of SEQ ID NO: 913431
caaguuugagcuugaaauu

SEQ ID NO: 926799 - RNA, 19 nt, Artificial Sequence
  Description of Artificial Sequence: Synthetic oligonucleotide
  Antisense strand to SEQ ID NO: 926798
aauuucaagcucaaacuug

SEQ ID NO: 926800 - RNA, 19 nt, Artificial Sequence
  Description of Artificial Sequence: Synthetic oligonucleotide
  Sense strand starting at position 982 of SEQ ID NO: 913431
caccaugucccagguaaug

SEQ ID NO: 926801 - RNA, 19 nt, Artificial Sequence
  Description of Artificial Sequence: Synthetic oligonucleotide
  Antisense strand to SEQ ID NO: 926800
cauuaccugggacauggug

SEQ ID NO: 926802 - RNA, 19 nt, Artificial Sequence
  Description of Artificial Sequence: Synthetic oligonucleotide
  Sense strand starting at position 3662 of SEQ ID NO: 913431
cagugauaucaaggcaagu

SEQ ID NO: 926803 - RNA, 19 nt, Artificial Sequence
  Description of Artificial Sequence: Synthetic oligonucleotide
  Antisense strand to SEQ ID NO: 926802
acuugccuugauaucacug

SEQ ID NO: 926804 - RNA, 19 nt, Artificial Sequence
  Description of Artificial Sequence: Synthetic oligonucleotide
  Sense strand starting at position 2058 of SEQ ID NO: 913431
uggcuuuauguugacucua

SEQ ID NO: 926805 - RNA, 19 nt, Artificial Sequence
  Description of Artificial Sequence: Synthetic oligonucleotide
  Antisense strand to SEQ ID NO: 926804
uagagucaacauaaagcca

SEQ ID NO: 926806 - RNA, 19 nt, Artificial Sequence
  Description of Artificial Sequence: Synthetic oligonucleotide
  Sense strand starting at position 1177 of SEQ ID NO: 913431
aucuaaagcugagucuauu

SEQ ID NO: 926807 - RNA, 19 nt, Artificial Sequence
  Description of Artificial Sequence: Synthetic oligonucleotide
  Antisense strand to SEQ ID NO: 926806
aauagacucagcuuuagau

SEQ ID NO: 926808 - RNA, 19 nt, Artificial Sequence
  Description of Artificial Sequence: Synthetic oligonucleotide
  Sense strand starting at position 3461 of SEQ ID NO: 913431
aaauguaucggagguuauu

SEQ ID NO: 926809 - RNA, 19 nt, Artificial Sequence
  Description of Artificial Sequence: Synthetic oligonucleotide
  Antisense strand to SEQ ID NO: 926808
aauaaccuccgauacauuu

SEQ ID NO: 926810 - RNA, 19 nt, Artificial Sequence
  Description of Artificial Sequence: Synthetic oligonucleotide
  Sense strand starting at position 2579 of SEQ ID NO: 913431
aaggcuauuugugacaaag

SEQ ID NO: 926811 - RNA, 19 nt, Artificial Sequence
  Description of Artificial Sequence: Synthetic oligonucleotide
  Antisense strand to SEQ ID NO: 926810
cuuugucacaaauagccuu

SEQ ID NO: 926812 - RNA, 19 nt, Artificial Sequence
  Description of Artificial Sequence: Synthetic oligonucleotide
  Sense strand starting at position 1284 of SEQ ID NO: 913431
agcaguaagucuuuacaga

SEQ ID NO: 926813 - RNA, 19 nt, Artificial Sequence
  Description of Artificial Sequence: Synthetic oligonucleotide
  Antisense strand to SEQ ID NO: 926812
ucuguaaagacuuacugcu

SEQ ID NO: 926814 - RNA, 19 nt, Artificial Sequence
  Description of Artificial Sequence: Synthetic oligonucleotide
  Sense strand starting at position 3569 of SEQ ID NO: 913431
auugcugcaccauauaagu

SEQ ID NO: 926815 - RNA, 19 nt, Artificial Sequence
  Description of Artificial Sequence: Synthetic oligonucleotide
  Antisense strand to SEQ ID NO: 926814
acuuauauggugcagcaau

SEQ ID NO: 926816 - RNA, 19 nt, Artificial Sequence
  Description of Artificial Sequence: Synthetic oligonucleotide
  Sense strand starting at position 784 of SEQ ID NO: 913431
uucugccuugcugaaauau

SEQ ID NO: 926817 - RNA, 19 nt, Artificial Sequence
  Description of Artificial Sequence: Synthetic oligonucleotide
  Antisense strand to SEQ ID NO: 926816
auauuucagcaaggcagaa

SEQ ID NO: 926818 - RNA, 19 nt, Artificial Sequence
  Description of Artificial Sequence: Synthetic oligonucleotide
  Sense strand starting at position 184 of SEQ ID NO: 913432
agaggaacaugucuucuaa

SEQ ID NO: 926819 - RNA, 19 nt, Artificial Sequence
  Description of Artificial Sequence: Synthetic oligonucleotide
  Antisense strand to SEQ ID NO: 926818
uuagaagacauguuccucu

SEQ ID NO: 926820 - RNA, 19 nt, Artificial Sequence
  Description of Artificial Sequence: Synthetic oligonucleotide
  Sense strand starting at position 1328 of SEQ ID NO: 913432
ggacacuggacgggauauu

SEQ ID NO: 926821 - RNA, 19 nt, Artificial Sequence
  Description of Artificial Sequence: Synthetic oligonucleotide
  Antisense strand to SEQ ID NO: 926820
aauaucccguccagugucc

SEQ ID NO: 926822 - RNA, 19 nt, Artificial Sequence
  Description of Artificial Sequence: Synthetic oligonucleotide
  Sense strand starting at position 3862 of SEQ ID NO: 913432
agggacuaauguguauaaa

SEQ ID NO: 926823 - RNA, 19 nt, Artificial Sequence
  Description of Artificial Sequence: Synthetic oligonucleotide
  Antisense strand to SEQ ID NO: 926822
uuuauacacauuagucccu

SEQ ID NO: 926824 - RNA, 19 nt, Artificial Sequence
  Description of Artificial Sequence: Synthetic oligonucleotide
  Sense strand starting at position 350 of SEQ ID NO: 913432
cgagaugaugcucaaacua

SEQ ID NO: 926825 - RNA, 19 nt, Artificial Sequence
  Description of Artificial Sequence: Synthetic oligonucleotide
  Antisense strand to SEQ ID NO: 926824
uaguuugagcaucaucucg

SEQ ID NO: 926826 - RNA, 19 nt, Artificial Sequence
  Description of Artificial Sequence: Synthetic oligonucleotide
  Sense strand starting at position 2892 of SEQ ID NO: 913432
aacuuauuugaacguguuu

SEQ ID NO: 926827 - RNA, 19 nt, Artificial Sequence
  Description of Artificial Sequence: Synthetic oligonucleotide
  Antisense strand to SEQ ID NO: 926826
aaacacguucaaauaaguu

SEQ ID NO: 926828 - RNA, 19 nt, Artificial Sequence
  Description of Artificial Sequence: Synthetic oligonucleotide
  Sense strand starting at position 447 of SEQ ID NO: 913432
gucucuauuugucuuugga

SEQ ID NO: 926829 - RNA, 19 nt, Artificial Sequence
  Description of Artificial Sequence: Synthetic oligonucleotide
  Antisense strand to SEQ ID NO: 926828
uccaaagacaaauagagac

SEQ ID NO: 926830 - RNA, 19 nt, Artificial Sequence
  Description of Artificial Sequence: Synthetic oligonucleotide
  Sense strand starting at position 341 of SEQ ID NO: 913432
aauguaagccgagaugaug

SEQ ID NO: 926831 - RNA, 19 nt, Artificial Sequence
  Description of Artificial Sequence: Synthetic oligonucleotide
  Antisense strand to SEQ ID NO: 926830
caucaucucggcuuacauu

SEQ ID NO: 926832 - RNA, 19 nt, Artificial Sequence
  Description of Artificial Sequence: Synthetic oligonucleotide
  Sense strand starting at position 2658 of SEQ ID NO: 913432
aggccaccgucauuucuaa

SEQ ID NO: 926833 - RNA, 19 nt, Artificial Sequence
  Description of Artificial Sequence: Synthetic oligonucleotide
  Antisense strand to SEQ ID NO: 926832
uuagaaaugacgguggccu

SEQ ID NO: 926834 - RNA, 19 nt, Artificial Sequence
  Description of Artificial Sequence: Synthetic oligonucleotide
  Sense strand starting at position 197 of SEQ ID NO: 913432
uucuaauccgcacaagaga

SEQ ID NO: 926835 - RNA, 19 nt, Artificial Sequence
  Description of Artificial Sequence: Synthetic oligonucleotide
  Antisense strand to SEQ ID NO: 926834
ucucuugugcggauuagaa

SEQ ID NO: 926836 - RNA, 19 nt, Artificial Sequence
  Description of Artificial Sequence: Synthetic oligonucleotide
  Sense strand starting at position 186 of SEQ ID NO: 913432
aggaacaugucuucuaauc

SEQ ID NO: 926837 - RNA, 19 nt, Artificial Sequence
  Description of Artificial Sequence: Synthetic oligonucleotide
  Antisense strand to SEQ ID NO: 926836
gauuagaagacauguuccu

SEQ ID NO: 926838 - RNA, 19 nt, Artificial Sequence
  Description of Artificial Sequence: Synthetic oligonucleotide
  Sense strand starting at position 3739 of SEQ ID NO: 913432
ucaugaggucugugagaaa

SEQ ID NO: 926839 - RNA, 19 nt, Artificial Sequence
  Description of Artificial Sequence: Synthetic oligonucleotide
  Antisense strand to SEQ ID NO: 926838
uuucucacagaccucauga

SEQ ID NO: 926840 - RNA, 19 nt, Artificial Sequence
  Description of Artificial Sequence: Synthetic oligonucleotide
  Sense strand starting at position 2589 of SEQ ID NO: 913432
gggagauucuaccuucuuu

SEQ ID NO: 926841 - RNA, 19 nt, Artificial Sequence
  Description of Artificial Sequence: Synthetic oligonucleotide
  Antisense strand to SEQ ID NO: 926840
aaagaagguagaaucuccc

SEQ ID NO: 926842 - RNA, 19 nt, Artificial Sequence
  Description of Artificial Sequence: Synthetic oligonucleotide
  Sense strand starting at position 600 of SEQ ID NO: 913432
cuguguaaccuccaaugau

SEQ ID NO: 926843 - RNA, 19 nt, Artificial Sequence
  Description of Artificial Sequence: Synthetic oligonucleotide
  Antisense strand to SEQ ID NO: 926842
aucauuggagguuacacag

SEQ ID NO: 926844 - RNA, 19 nt, Artificial Sequence
  Description of Artificial Sequence: Synthetic oligonucleotide
  Sense strand starting at position 1155 of SEQ ID NO: 913432
gaggcucauuaggucagaa

SEQ ID NO: 926845 - RNA, 19 nt, Artificial Sequence
  Description of Artificial Sequence: Synthetic oligonucleotide
  Antisense strand to SEQ ID NO: 926844
uucugaccuaaugagccuc

SEQ ID NO: 926846 - RNA, 19 nt, Artificial Sequence
  Description of Artificial Sequence: Synthetic oligonucleotide
  Sense strand starting at position 195 of SEQ ID NO: 913432
ucuucuaauccgcacaaga

SEQ ID NO: 926847 - RNA, 19 nt, Artificial Sequence
  Description of Artificial Sequence: Synthetic oligonucleotide
  Antisense strand to SEQ ID NO: 926846
ucuugugcggauuagaaga

SEQ ID NO: 926848 - RNA, 19 nt, Artificial Sequence
  Description of Artificial Sequence: Synthetic oligonucleotide
  Sense strand starting at position 3260 of SEQ ID NO: 913432
auuguuuagauguagguua

SEQ ID NO: 926849 - RNA, 19 nt, Artificial Sequence
  Description of Artificial Sequence: Synthetic oligonucleotide
  Antisense strand to SEQ ID NO: 926848
uaaccuacaucuaaacaau

SEQ ID NO: 926850 - RNA, 19 nt, Artificial Sequence
  Description of Artificial Sequence: Synthetic oligonucleotide
  Sense strand starting at position 3688 of SEQ ID NO: 913432
ggcuuuauuguauaauuac

SEQ ID NO: 926851 - RNA, 19 nt, Artificial Sequence
  Description of Artificial Sequence: Synthetic oligonucleotide
  Antisense strand to SEQ ID NO: 926850
guaauuauacaauaaagcc

SEQ ID NO: 926852 - RNA, 19 nt, Artificial Sequence
  Description of Artificial Sequence: Synthetic oligonucleotide
  Sense strand starting at position 1241 of SEQ ID NO: 913432
uguuauucggccgcuucau

SEQ ID NO: 926853 - RNA, 19 nt, Artificial Sequence
  Description of Artificial Sequence: Synthetic oligonucleotide
  Antisense strand to SEQ ID NO: 926852
augaagcggccgaauaaca

SEQ ID NO: 926854 - RNA, 19 nt, Artificial Sequence
  Description of Artificial Sequence: Synthetic oligonucleotide
  Sense strand starting at position 3642 of SEQ ID NO: 913432
cuggauguucccuaagcau

SEQ ID NO: 926855 - RNA, 19 nt, Artificial Sequence
  Description of Artificial Sequence: Synthetic oligonucleotide
  Antisense strand to SEQ ID NO: 926854
augcuuagggaacauccag

SEQ ID NO: 926856 - RNA, 19 nt, Artificial Sequence
  Description of Artificial Sequence: Synthetic oligonucleotide
  Sense strand starting at position 1220 of SEQ ID NO: 913432
ccagauuccugagcuuuaa

SEQ ID NO: 926857 - RNA, 19 nt, Artificial Sequence
  Description of Artificial Sequence: Synthetic oligonucleotide
  Antisense strand to SEQ ID NO: 926856
uuaaagcucaggaaucugg

SEQ ID NO: 926858 - RNA, 19 nt, Artificial Sequence
  Description of Artificial Sequence: Synthetic oligonucleotide
  Sense strand starting at position 3585 of SEQ ID NO: 913432
aaaguuccucugugaggac

SEQ ID NO: 926859 - RNA, 19 nt, Artificial Sequence
  Description of Artificial Sequence: Synthetic oligonucleotide
  Antisense strand to SEQ ID NO: 926858
guccucacagaggaacuuu

SEQ ID NO: 926860 - RNA, 19 nt, Artificial Sequence
  Description of Artificial Sequence: Synthetic oligonucleotide
  Sense strand starting at position 311 of SEQ ID NO: 913432
aauguaauggcugauguuu

SEQ ID NO: 926861 - RNA, 19 nt, Artificial Sequence
  Description of Artificial Sequence: Synthetic oligonucleotide
  Antisense strand to SEQ ID NO: 926860
aaacaucagccauuacauu

SEQ ID NO: 926862 - RNA, 19 nt, Artificial Sequence
  Description of Artificial Sequence: Synthetic oligonucleotide
  Sense strand starting at position 1831 of SEQ ID NO: 913432
gggccuaaacucgagucua

SEQ ID NO: 926863 - RNA, 19 nt, Artificial Sequence
  Description of Artificial Sequence: Synthetic oligonucleotide
  Antisense strand to SEQ ID NO: 926862
uagacucgaguuuaggccc

SEQ ID NO: 926864 - RNA, 19 nt, Artificial Sequence
  Description of Artificial Sequence: Synthetic oligonucleotide
  Sense strand starting at position 349 of SEQ ID NO: 913432
ccgagaugaugcucaaacu

SEQ ID NO: 926865 - RNA, 19 nt, Artificial Sequence
  Description of Artificial Sequence: Synthetic oligonucleotide
  Antisense strand to SEQ ID NO: 926864
aguuugagcaucaucucgg

SEQ ID NO: 926866 - RNA, 19 nt, Artificial Sequence
  Description of Artificial Sequence: Synthetic oligonucleotide
  Sense strand starting at position 230 of SEQ ID NO: 913432
cgucauagaggagguuaau

SEQ ID NO: 926867 - RNA, 19 nt, Artificial Sequence
  Description of Artificial Sequence: Synthetic oligonucleotide
  Antisense strand to SEQ ID NO: 926866
auuaaccuccucuaugacg

SEQ ID NO: 926868 - RNA, 19 nt, Artificial Sequence
  Description of Artificial Sequence: Synthetic oligonucleotide
  Sense strand starting at position 3784 of SEQ ID NO: 913432
caucguggauaaucgauaa

SEQ ID NO: 926869 - RNA, 19 nt, Artificial Sequence
  Description of Artificial Sequence: Synthetic oligonucleotide
  Antisense strand to SEQ ID NO: 926868
uuaucgauuauccacgaug

SEQ ID NO: 926870 - RNA, 19 nt, Artificial Sequence
  Description of Artificial Sequence: Synthetic oligonucleotide
  Sense strand starting at position 671 of SEQ ID NO: 913432
gguucuacauagguacuua

SEQ ID NO: 926871 - RNA, 19 nt, Artificial Sequence
  Description of Artificial Sequence: Synthetic oligonucleotide
  Antisense strand to SEQ ID NO: 926870
uaaguaccuauguagaacc

SEQ ID NO: 926872 - RNA, 19 nt, Artificial Sequence
  Description of Artificial Sequence: Synthetic oligonucleotide
  Sense strand starting at position 1669 of SEQ ID NO: 913432
cgggauaccauuggcuaua

SEQ ID NO: 926873 - RNA, 19 nt, Artificial Sequence
  Description of Artificial Sequence: Synthetic oligonucleotide
  Antisense strand to SEQ ID NO: 926872
uauagccaaugguaucccg

SEQ ID NO: 926874 - RNA, 19 nt, Artificial Sequence
  Description of Artificial Sequence: Synthetic oligonucleotide
  Sense strand starting at position 244 of SEQ ID NO: 913432
uuaauaaacuugccuaggu

SEQ ID NO: 926875 - RNA, 19 nt, Artificial Sequence
  Description of Artificial Sequence: Synthetic oligonucleotide
  Antisense strand to SEQ ID NO: 926874
accuaggcaaguuuauuaa

SEQ ID NO: 926876 - RNA, 19 nt, Artificial Sequence
  Description of Artificial Sequence: Synthetic oligonucleotide
  Sense strand starting at position 400 of SEQ ID NO: 913432
auggaugucuccuucccau

SEQ ID NO: 926877 - RNA, 19 nt, Artificial Sequence
  Description of Artificial Sequence: Synthetic oligonucleotide
  Antisense strand to SEQ ID NO: 926876
augggaaggagacauccau

SEQ ID NO: 926878 - RNA, 19 nt, Artificial Sequence
  Description of Artificial Sequence: Synthetic oligonucleotide
  Sense strand starting at position 3262 of SEQ ID NO: 913432
uguuuagauguagguuaag

SEQ ID NO: 926879 - RNA, 19 nt, Artificial Sequence
  Description of Artificial Sequence: Synthetic oligonucleotide
  Antisense strand to SEQ ID NO: 926878
cuuaaccuacaucuaaaca

SEQ ID NO: 926880 - RNA, 19 nt, Artificial Sequence
  Description of Artificial Sequence: Synthetic oligonucleotide
  Sense strand starting at position 3873 of SEQ ID NO: 913432
uguauaaagacuugcaggu

SEQ ID NO: 926881 - RNA, 19 nt, Artificial Sequence
  Description of Artificial Sequence: Synthetic oligonucleotide
  Antisense strand to SEQ ID NO: 926880
accugcaagucuuuauaca

SEQ ID NO: 926882 - RNA, 19 nt, Artificial Sequence
  Description of Artificial Sequence: Synthetic oligonucleotide
  Sense strand starting at position 1668 of SEQ ID NO: 913432
ucgggauaccauuggcuau

SEQ ID NO: 926883 - RNA, 19 nt, Artificial Sequence
  Description of Artificial Sequence: Synthetic oligonucleotide
  Antisense strand to SEQ ID NO: 926882
auagccaaugguaucccga

SEQ ID NO: 926884 - RNA, 19 nt, Artificial Sequence
  Description of Artificial Sequence: Synthetic oligonucleotide
  Sense strand starting at position 3238 of SEQ ID NO: 913432
cuccauacuuccuuuggua

SEQ ID NO: 926885 - RNA, 19 nt, Artificial Sequence
  Description of Artificial Sequence: Synthetic oligonucleotide
  Antisense strand to SEQ ID NO: 926884
uaccaaaggaaguauggag

SEQ ID NO: 926886 - RNA, 19 nt, Artificial Sequence
  Description of Artificial Sequence: Synthetic oligonucleotide
  Sense strand starting at position 2577 of SEQ ID NO: 913432
cacuacugugucgggagau

SEQ ID NO: 926887 - RNA, 19 nt, Artificial Sequence
  Description of Artificial Sequence: Synthetic oligonucleotide
  Antisense strand to SEQ ID NO: 926886
aucucccgacacaguagug

SEQ ID NO: 926888 - RNA, 19 nt, Artificial Sequence
  Description of Artificial Sequence: Synthetic oligonucleotide
  Sense strand starting at position 3254 of SEQ ID NO: 913432
guaggcauuguuuagaugu

SEQ ID NO: 926889 - RNA, 19 nt, Artificial Sequence
  Description of Artificial Sequence: Synthetic oligonucleotide
  Antisense strand to SEQ ID NO: 926888
acaucuaaacaaugccuac

SEQ ID NO: 926890 - RNA, 19 nt, Artificial Sequence
  Description of Artificial Sequence: Synthetic oligonucleotide
  Sense strand starting at position 152 of SEQ ID NO: 913432
auguguuccgcacauaaua

SEQ ID NO: 926891 - RNA, 19 nt, Artificial Sequence
  Description of Artificial Sequence: Synthetic oligonucleotide
  Antisense strand to SEQ ID NO: 926890
uauuaugugcggaacacau

SEQ ID NO: 926892 - RNA, 19 nt, Artificial Sequence
  Description of Artificial Sequence: Synthetic oligonucleotide
  Sense strand starting at position 3737 of SEQ ID NO: 913432
gcucaugaggucugugaga

SEQ ID NO: 926893 - RNA, 19 nt, Artificial Sequence
  Description of Artificial Sequence: Synthetic oligonucleotide
  Antisense strand to SEQ ID NO: 926892
ucucacagaccucaugagc

SEQ ID NO: 926894 - RNA, 19 nt, Artificial Sequence
  Description of Artificial Sequence: Synthetic oligonucleotide
  Sense strand starting at position 3681 of SEQ ID NO: 913432
ugcaucaggcuuuauugua

SEQ ID NO: 926895 - RNA, 19 nt, Artificial Sequence
  Description of Artificial Sequence: Synthetic oligonucleotide
  Antisense strand to SEQ ID NO: 926894
uacaauaaagccugaugca

SEQ ID NO: 926896 - RNA, 19 nt, Artificial Sequence
  Description of Artificial Sequence: Synthetic oligonucleotide
  Sense strand starting at position 310 of SEQ ID NO: 913432
uaauguaauggcugauguu

SEQ ID NO: 926897 - RNA, 19 nt, Artificial Sequence
  Description of Artificial Sequence: Synthetic oligonucleotide
  Antisense strand to SEQ ID NO: 926896
aacaucagccauuacauua

SEQ ID NO: 926898 - RNA, 19 nt, Artificial Sequence
  Description of Artificial Sequence: Synthetic oligonucleotide
  Sense strand starting at position 893 of SEQ ID NO: 913433
uuguucugacaugaacuau

SEQ ID NO: 926899 - RNA, 19 nt, Artificial Sequence
  Description of Artificial Sequence: Synthetic oligonucleotide
  Antisense strand to SEQ ID NO: 926898
auaguucaugucagaacaa

SEQ ID NO: 926900 - RNA, 19 nt, Artificial Sequence
  Description of Artificial Sequence: Synthetic oligonucleotide
  Sense strand starting at position 657 of SEQ ID NO: 913433
uuugauaguggccaacaaa

SEQ ID NO: 926901 - RNA, 19 nt, Artificial Sequence
  Description of Artificial Sequence: Synthetic oligonucleotide
  Antisense strand to SEQ ID NO: 926900
uuuguuggccacuaucaaa

SEQ ID NO: 926902 - RNA, 19 nt, Artificial Sequence
  Description of Artificial Sequence: Synthetic oligonucleotide
  Sense strand starting at position 2338 of SEQ ID NO: 913433
ggagauaggccuuaggguu

SEQ ID NO: 926903 - RNA, 19 nt, Artificial Sequence
  Description of Artificial Sequence: Synthetic oligonucleotide
  Antisense strand to SEQ ID NO: 926902
aacccuaaggccuaucucc

SEQ ID NO: 926904 - RNA, 19 nt, Artificial Sequence
  Description of Artificial Sequence: Synthetic oligonucleotide
  Sense strand starting at position 3830 of SEQ ID NO: 913433
uuggaauagcaucagugau

SEQ ID NO: 926905 - RNA, 19 nt, Artificial Sequence
  Description of Artificial Sequence: Synthetic oligonucleotide
  Antisense strand to SEQ ID NO: 926904
aucacugaugcuauuccaa

SEQ ID NO: 926906 - RNA, 19 nt, Artificial Sequence
  Description of Artificial Sequence: Synthetic oligonucleotide
  Sense strand starting at position 2760 of SEQ ID NO: 913433
gguccucaucagcagagaa

SEQ ID NO: 926907 - RNA, 19 nt, Artificial Sequence
  Description of Artificial Sequence: Synthetic oligonucleotide
  Antisense strand to SEQ ID NO: 926906
uucucugcugaugaggacc

SEQ ID NO: 926908 - RNA, 19 nt, Artificial Sequence
  Description of Artificial Sequence: Synthetic oligonucleotide
  Sense strand starting at position 3087 of SEQ ID NO: 913433
cuacaucccugaguaagaa

SEQ ID NO: 926909 - RNA, 19 nt, Artificial Sequence
  Description of Artificial Sequence: Synthetic oligonucleotide
  Antisense strand to SEQ ID NO: 926908
uucuuacucagggauguag

SEQ ID NO: 926910 - RNA, 19 nt, Artificial Sequence
  Description of Artificial Sequence: Synthetic oligonucleotide
  Sense strand starting at position 3754 of SEQ ID NO: 913433
uuccuaagugacugaaaca

SEQ ID NO: 926911 - RNA, 19 nt, Artificial Sequence
  Description of Artificial Sequence: Synthetic oligonucleotide
  Antisense strand to SEQ ID NO: 926910
uguuucagucacuuaggaa

SEQ ID NO: 926912 - RNA, 19 nt, Artificial Sequence
  Description of Artificial Sequence: Synthetic oligonucleotide
  Sense strand starting at position 596 of SEQ ID NO: 913433
aaagauggguauucucuua

SEQ ID NO: 926913 - RNA, 19 nt, Artificial Sequence
  Description of Artificial Sequence: Synthetic oligonucleotide
  Antisense strand to SEQ ID NO: 926912
uaagagaauacccaucuuu

SEQ ID NO: 926914 - RNA, 19 nt, Artificial Sequence
  Description of Artificial Sequence: Synthetic oligonucleotide
  Sense strand starting at position 2107 of SEQ ID NO: 913433
aagucuguagaaugaaauu

SEQ ID NO: 926915 - RNA, 19 nt, Artificial Sequence
  Description of Artificial Sequence: Synthetic oligonucleotide
  Antisense strand to SEQ ID NO: 926914
aauuucauucuacagacuu

SEQ ID NO: 926916 - RNA, 19 nt, Artificial Sequence
  Description of Artificial Sequence: Synthetic oligonucleotide
  Sense strand starting at position 1263 of SEQ ID NO: 913433
gagaguaacucaguaauug

SEQ ID NO: 926917 - RNA, 19 nt, Artificial Sequence
  Description of Artificial Sequence: Synthetic oligonucleotide
  Antisense strand to SEQ ID NO: 926916
caauuacugaguuacucuc

SEQ ID NO: 926918 - RNA, 19 nt, Artificial Sequence
  Description of Artificial Sequence: Synthetic oligonucleotide
  Sense strand starting at position 923 of SEQ ID NO: 913433
agaauagugccugacacuu

SEQ ID NO: 926919 - RNA, 19 nt, Artificial Sequence
  Description of Artificial Sequence: Synthetic oligonucleotide
  Antisense strand to SEQ ID NO: 926918
aagugucaggcacuauucu

SEQ ID NO: 926920 - RNA, 19 nt, Artificial Sequence
  Description of Artificial Sequence: Synthetic oligonucleotide
  Sense strand starting at position 3832 of SEQ ID NO: 913433
ggaauagcaucagugauga

SEQ ID NO: 926921 - RNA, 19 nt, Artificial Sequence
  Description of Artificial Sequence: Synthetic oligonucleotide
  Antisense strand to SEQ ID NO: 926920
ucaucacugaugcuauucc

SEQ ID NO: 926922 - RNA, 19 nt, Artificial Sequence
  Description of Artificial Sequence: Synthetic oligonucleotide
  Sense strand starting at position 1617 of SEQ ID NO: 913433
cuuaaucuaggucagugau

SEQ ID NO: 926923 - RNA, 19 nt, Artificial Sequence
  Description of Artificial Sequence: Synthetic oligonucleotide
  Antisense strand to SEQ ID NO: 926922
aucacugaccuagauuaag

SEQ ID NO: 926924 - RNA, 19 nt, Artificial Sequence
  Description of Artificial Sequence: Synthetic oligonucleotide
  Sense strand starting at position 3380 of SEQ ID NO: 913433
ucuuuaggcagugaugaua

SEQ ID NO: 926925 - RNA, 19 nt, Artificial Sequence
  Description of Artificial Sequence: Synthetic oligonucleotide
  Antisense strand to SEQ ID NO: 926924
uaucaucacugccuaaaga

SEQ ID NO: 926926 - RNA, 19 nt, Artificial Sequence
  Description of Artificial Sequence: Synthetic oligonucleotide
  Sense strand starting at position 3595 of SEQ ID NO: 913433
agauguguggugggagaaa

SEQ ID NO: 926927 - RNA, 19 nt, Artificial Sequence
  Description of Artificial Sequence: Synthetic oligonucleotide
  Antisense strand to SEQ ID NO: 926926
uuucucccaccacacaucu

SEQ ID NO: 926928 - RNA, 19 nt, Artificial Sequence
  Description of Artificial Sequence: Synthetic oligonucleotide
  Sense strand starting at position 943 of SEQ ID NO: 913433
ggaaccacucgguaaguau

SEQ ID NO: 926929 - RNA, 19 nt, Artificial Sequence
  Description of Artificial Sequence: Synthetic oligonucleotide
  Antisense strand to SEQ ID NO: 926928
auacuuaccgagugguucc

SEQ ID NO: 926930 - RNA, 19 nt, Artificial Sequence
  Description of Artificial Sequence: Synthetic oligonucleotide
  Sense strand starting at position 491 of SEQ ID NO: 913433
gaugcucguggauagaaca

SEQ ID NO: 926931 - RNA, 19 nt, Artificial Sequence
  Description of Artificial Sequence: Synthetic oligonucleotide
  Antisense strand to SEQ ID NO: 926930
uguucuauccacgagcauc

SEQ ID NO: 926932 - RNA, 19 nt, Artificial Sequence
  Description of Artificial Sequence: Synthetic oligonucleotide
  Sense strand starting at position 1619 of SEQ ID NO: 913433
uaaucuaggucagugauaa

SEQ ID NO: 926933 - RNA, 19 nt, Artificial Sequence
  Description of Artificial Sequence: Synthetic oligonucleotide
  Antisense strand to SEQ ID NO: 926932
uuaucacugaccuagauua

SEQ ID NO: 926934 - RNA, 19 nt, Artificial Sequence
  Description of Artificial Sequence: Synthetic oligonucleotide
  Sense strand starting at position 3149 of SEQ ID NO: 913433
agcaccuguccagaacauu

SEQ ID NO: 926935 - RNA, 19 nt, Artificial Sequence
  Description of Artificial Sequence: Synthetic oligonucleotide
  Antisense strand to SEQ ID NO: 926934
aauguucuggacaggugcu

SEQ ID NO: 926936 - RNA, 19 nt, Artificial Sequence
  Description of Artificial Sequence: Synthetic oligonucleotide
  Sense strand starting at position 1274 of SEQ ID NO: 913433
aguaauugcuugcugauuu

SEQ ID NO: 926937 - RNA, 19 nt, Artificial Sequence
  Description of Artificial Sequence: Synthetic oligonucleotide
  Antisense strand to SEQ ID NO: 926936
aaaucagcaagcaauuacu

SEQ ID NO: 926938 - RNA, 19 nt, Artificial Sequence
  Description of Artificial Sequence: Synthetic oligonucleotide
  Sense strand starting at position 1620 of SEQ ID NO: 913433
aaucuaggucagugauaac

SEQ ID NO: 926939 - RNA, 19 nt, Artificial Sequence
  Description of Artificial Sequence: Synthetic oligonucleotide
  Antisense strand to SEQ ID NO: 926938
guuaucacugaccuagauu

SEQ ID NO: 926940 - RNA, 19 nt, Artificial Sequence
  Description of Artificial Sequence: Synthetic oligonucleotide
  Sense strand starting at position 3745 of SEQ ID NO: 913433
gcuuguuauuuccuaagug

SEQ ID NO: 926941 - RNA, 19 nt, Artificial Sequence
  Description of Artificial Sequence: Synthetic oligonucleotide
  Antisense strand to SEQ ID NO: 926940
cacuuaggaaauaacaagc

SEQ ID NO: 926942 - RNA, 19 nt, Artificial Sequence
  Description of Artificial Sequence: Synthetic oligonucleotide
  Sense strand starting at position 1567 of SEQ ID NO: 913433
aaagaaacugugcauuguu

SEQ ID NO: 926943 - RNA, 19 nt, Artificial Sequence
  Description of Artificial Sequence: Synthetic oligonucleotide
  Antisense strand to SEQ ID NO: 926942
aacaaugcacaguuucuuu

SEQ ID NO: 926944 - RNA, 19 nt, Artificial Sequence
  Description of Artificial Sequence: Synthetic oligonucleotide
  Sense strand starting at position 1826 of SEQ ID NO: 913433
augacugguugauuaguaa

SEQ ID NO: 926945 - RNA, 19 nt, Artificial Sequence
  Description of Artificial Sequence: Synthetic oligonucleotide
  Antisense strand to SEQ ID NO: 926944
uuacuaaucaaccagucau

SEQ ID NO: 926946 - RNA, 19 nt, Artificial Sequence
  Description of Artificial Sequence: Synthetic oligonucleotide
  Sense strand starting at position 2795 of SEQ ID NO: 913433
uguaucuuucuggaauucu

SEQ ID NO: 926947 - RNA, 19 nt, Artificial Sequence
  Description of Artificial Sequence: Synthetic oligonucleotide
  Antisense strand to SEQ ID NO: 926946
agaauuccagaaagauaca

SEQ ID NO: 926948 - RNA, 19 nt, Artificial Sequence
  Description of Artificial Sequence: Synthetic oligonucleotide
  Sense strand starting at position 3085 of SEQ ID NO: 913433
gccuacaucccugaguaag

SEQ ID NO: 926949 - RNA, 19 nt, Artificial Sequence
  Description of Artificial Sequence: Synthetic oligonucleotide
  Antisense strand to SEQ ID NO: 926948
cuuacucagggauguaggc

SEQ ID NO: 926950 - RNA, 19 nt, Artificial Sequence
  Description of Artificial Sequence: Synthetic oligonucleotide
  Sense strand starting at position 2078 of SEQ ID NO: 913433
uuuguugacugauuaugag

SEQ ID NO: 926951 - RNA, 19 nt, Artificial Sequence
  Description of Artificial Sequence: Synthetic oligonucleotide
  Antisense strand to SEQ ID NO: 926950
cucauaaucagucaacaaa

SEQ ID NO: 926952 - RNA, 19 nt, Artificial Sequence
  Description of Artificial Sequence: Synthetic oligonucleotide
  Sense strand starting at position 3000 of SEQ ID NO: 913433
ugaagaguaguguaaguuu

SEQ ID NO: 926953 - RNA, 19 nt, Artificial Sequence
  Description of Artificial Sequence: Synthetic oligonucleotide
  Antisense strand to SEQ ID NO: 926952
aaacuuacacuacucuuca

SEQ ID NO: 926954 - RNA, 19 nt, Artificial Sequence
  Description of Artificial Sequence: Synthetic oligonucleotide
  Sense strand starting at position 1907 of SEQ ID NO: 913433
ccaugcuuuccauagagua

SEQ ID NO: 926955 - RNA, 19 nt, Artificial Sequence
  Description of Artificial Sequence: Synthetic oligonucleotide
  Antisense strand to SEQ ID NO: 926954
uacucuauggaaagcaugg

SEQ ID NO: 926956 - RNA, 19 nt, Artificial Sequence
  Description of Artificial Sequence: Synthetic oligonucleotide
  Sense strand starting at position 2806 of SEQ ID NO: 913433
ggaauucuucucugacccu

SEQ ID NO: 926957 - RNA, 19 nt, Artificial Sequence
  Description of Artificial Sequence: Synthetic oligonucleotide
  Antisense strand to SEQ ID NO: 926956
agggucagagaagaauucc

SEQ ID NO: 926958 - RNA, 19 nt, Artificial Sequence
  Description of Artificial Sequence: Synthetic oligonucleotide
  Sense strand starting at position 3626 of SEQ ID NO: 913433
gaauaacacgugcaaaugu

SEQ ID NO: 926959 - RNA, 19 nt, Artificial Sequence
  Description of Artificial Sequence: Synthetic oligonucleotide
  Antisense strand to SEQ ID NO: 926958
acauuugcacguguuauuc

SEQ ID NO: 926960 - RNA, 19 nt, Artificial Sequence
  Description of Artificial Sequence: Synthetic oligonucleotide
  Sense strand starting at position 3422 of SEQ ID NO: 913433
ggaacucuucguuaucuua

SEQ ID NO: 926961 - RNA, 19 nt, Artificial Sequence
  Description of Artificial Sequence: Synthetic oligonucleotide
  Antisense strand to SEQ ID NO: 926960
uaagauaacgaagaguucc

SEQ ID NO: 926962 - RNA, 19 nt, Artificial Sequence
  Description of Artificial Sequence: Synthetic oligonucleotide
  Sense strand starting at position 2583 of SEQ ID NO: 913433
uggagaugcguuuaggacu

SEQ ID NO: 926963 - RNA, 19 nt, Artificial Sequence
  Description of Artificial Sequence: Synthetic oligonucleotide
  Antisense strand to SEQ ID NO: 926962
aguccuaaacgcaucucca

SEQ ID NO: 926964 - RNA, 19 nt, Artificial Sequence
  Description of Artificial Sequence: Synthetic oligonucleotide
  Sense strand starting at position 3624 of SEQ ID NO: 913433
gggaauaacacgugcaaau

SEQ ID NO: 926965 - RNA, 19 nt, Artificial Sequence
  Description of Artificial Sequence: Synthetic oligonucleotide
  Antisense strand to SEQ ID NO: 926964
auuugcacguguuauuccc

SEQ ID NO: 926966 - RNA, 19 nt, Artificial Sequence
  Description of Artificial Sequence: Synthetic oligonucleotide
  Sense strand starting at position 2759 of SEQ ID NO: 913433
ggguccucaucagcagaga

SEQ ID NO: 926967 - RNA, 19 nt, Artificial Sequence
  Description of Artificial Sequence: Synthetic oligonucleotide
  Antisense strand to SEQ ID NO: 926966
ucucugcugaugaggaccc

SEQ ID NO: 926968 - RNA, 19 nt, Artificial Sequence
  Description of Artificial Sequence: Synthetic oligonucleotide
  Sense strand starting at position 488 of SEQ ID NO: 913433
aaagaugcucguggauaga

SEQ ID NO: 926969 - RNA, 19 nt, Artificial Sequence
  Description of Artificial Sequence: Synthetic oligonucleotide
  Antisense strand to SEQ ID NO: 926968
ucuauccacgagcaucuuu

SEQ ID NO: 926970 - RNA, 19 nt, Artificial Sequence
  Description of Artificial Sequence: Synthetic oligonucleotide
  Sense strand starting at position 1787 of SEQ ID NO: 913433
ucaugucuggaauguacau

SEQ ID NO: 926971 - RNA, 19 nt, Artificial Sequence
  Description of Artificial Sequence: Synthetic oligonucleotide
  Antisense strand to SEQ ID NO: 926970
auguacauuccagacauga

SEQ ID NO: 926972 - RNA, 19 nt, Artificial Sequence
  Description of Artificial Sequence: Synthetic oligonucleotide
  Sense strand starting at position 1627 of SEQ ID NO: 913433
gucagugauaacugcaaag

SEQ ID NO: 926973 - RNA, 19 nt, Artificial Sequence
  Description of Artificial Sequence: Synthetic oligonucleotide
  Antisense strand to SEQ ID NO: 926972
cuuugcaguuaucacugac

SEQ ID NO: 926974 - RNA, 19 nt, Artificial Sequence
  Description of Artificial Sequence: Synthetic oligonucleotide
  Sense strand starting at position 1995 of SEQ ID NO: 913433
gggcauuguuaccuuggaa

SEQ ID NO: 926975 - RNA, 19 nt, Artificial Sequence
  Description of Artificial Sequence: Synthetic oligonucleotide
  Antisense strand to SEQ ID NO: 926974
uuccaagguaacaaugccc

SEQ ID NO: 926976 - RNA, 19 nt, Artificial Sequence
  Description of Artificial Sequence: Synthetic oligonucleotide
  Sense strand starting at position 1065 of SEQ ID NO: 913433
uugugcacucuguaaggau

SEQ ID NO: 926977 - RNA, 19 nt, Artificial Sequence
  Description of Artificial Sequence: Synthetic oligonucleotide
  Antisense strand to SEQ ID NO: 926976
auccuuacagagugcacaa

SEQ ID NO: 926978 - RNA, 19 nt, Artificial Sequence
  Description of Artificial Sequence: Synthetic oligonucleotide
  Sense strand starting at position 2023 of SEQ ID NO: 913434
gagugaaacuauccacuga

SEQ ID NO: 926979 - RNA, 19 nt, Artificial Sequence
  Description of Artificial Sequence: Synthetic oligonucleotide
  Antisense strand to SEQ ID NO: 926978
ucaguggauaguuucacuc

SEQ ID NO: 926980 - RNA, 19 nt, Artificial Sequence
  Description of Artificial Sequence: Synthetic oligonucleotide
  Sense strand starting at position 3026 of SEQ ID NO: 913434
gguuuauaaguccacaaca

SEQ ID NO: 926981 - RNA, 19 nt, Artificial Sequence
  Description of Artificial Sequence: Synthetic oligonucleotide
  Antisense strand to SEQ ID NO: 926980
uguuguggacuuauaaacc

SEQ ID NO: 926982 - RNA, 19 nt, Artificial Sequence
  Description of Artificial Sequence: Synthetic oligonucleotide
  Sense strand starting at position 3981 of SEQ ID NO: 913434
cucuguauggauuauaauu

SEQ ID NO: 926983 - RNA, 19 nt, Artificial Sequence
  Description of Artificial Sequence: Synthetic oligonucleotide
  Antisense strand to SEQ ID NO: 926982
aauuauaauccauacagag

SEQ ID NO: 926984 - RNA, 19 nt, Artificial Sequence
  Description of Artificial Sequence: Synthetic oligonucleotide
  Sense strand starting at position 2060 of SEQ ID NO: 913434
cgauuuagugguuggaagu

SEQ ID NO: 926985 - RNA, 19 nt, Artificial Sequence
  Description of Artificial Sequence: Synthetic oligonucleotide
  Antisense strand to SEQ ID NO: 926984
acuuccaaccacuaaaucg

SEQ ID NO: 926986 - RNA, 19 nt, Artificial Sequence
  Description of Artificial Sequence: Synthetic oligonucleotide
  Sense strand starting at position 3071 of SEQ ID NO: 913434
uacaaaucuuggguuuaga

SEQ ID NO: 926987 - RNA, 19 nt, Artificial Sequence
  Description of Artificial Sequence: Synthetic oligonucleotide
  Antisense strand to SEQ ID NO: 926986
ucuaaacccaagauuugua

SEQ ID NO: 926988 - RNA, 19 nt, Artificial Sequence
  Description of Artificial Sequence: Synthetic oligonucleotide
  Sense strand starting at position 3760 of SEQ ID NO: 913434
guaagucacccaggacaaa

SEQ ID NO: 926989 - RNA, 19 nt, Artificial Sequence
  Description of Artificial Sequence: Synthetic oligonucleotide
  Antisense strand to SEQ ID NO: 926988
uuuguccugggugacuuac

SEQ ID NO: 926990 - RNA, 19 nt, Artificial Sequence
  Description of Artificial Sequence: Synthetic oligonucleotide
  Sense strand starting at position 2011 of SEQ ID NO: 913434
ugagguaucccggagugaa

SEQ ID NO: 926991 - RNA, 19 nt, Artificial Sequence
  Description of Artificial Sequence: Synthetic oligonucleotide
  Antisense strand to SEQ ID NO: 926990
uucacuccgggauaccuca

SEQ ID NO: 926992 - RNA, 19 nt, Artificial Sequence
  Description of Artificial Sequence: Synthetic oligonucleotide
  Sense strand starting at position 2000 of SEQ ID NO: 913434
auuagaugcagugagguau

SEQ ID NO: 926993 - RNA, 19 nt, Artificial Sequence
  Description of Artificial Sequence: Synthetic oligonucleotide
  Antisense strand to SEQ ID NO: 926992
auaccucacugcaucuaau

SEQ ID NO: 926994 - RNA, 19 nt, Artificial Sequence
  Description of Artificial Sequence: Synthetic oligonucleotide
  Sense strand starting at position 2355 of SEQ ID NO: 913434
ugagauucaguguacaggu

SEQ ID NO: 926995 - RNA, 19 nt, Artificial Sequence
  Description of Artificial Sequence: Synthetic oligonucleotide
  Antisense strand to SEQ ID NO: 926994
accuguacacugaaucuca

SEQ ID NO: 926996 - RNA, 19 nt, Artificial Sequence
  Description of Artificial Sequence: Synthetic oligonucleotide
  Sense strand starting at position 2198 of SEQ ID NO: 913434
cgagucuacgaacaaaucu

SEQ ID NO: 926997 - RNA, 19 nt, Artificial Sequence
  Description of Artificial Sequence: Synthetic oligonucleotide
  Antisense strand to SEQ ID NO: 926996
agauuuguucguagacucg

SEQ ID NO: 926998 - RNA, 19 nt, Artificial Sequence
  Description of Artificial Sequence: Synthetic oligonucleotide
  Sense strand starting at position 2440 of SEQ ID NO: 913434
gggacuucgacugauuguu

SEQ ID NO: 926999 - RNA, 19 nt, Artificial Sequence
  Description of Artificial Sequence: Synthetic oligonucleotide
  Antisense strand to SEQ ID NO: 926998
aacaaucagucgaaguccc

SEQ ID NO: 927000 - RNA, 19 nt, Artificial Sequence
  Description of Artificial Sequence: Synthetic oligonucleotide
  Sense strand starting at position 3458 of SEQ ID NO: 913434
ugaccaauuggucaugcua

SEQ ID NO: 927001 - RNA, 19 nt, Artificial Sequence
  Description of Artificial Sequence: Synthetic oligonucleotide
  Antisense strand to SEQ ID NO: 927000
uagcaugaccaauugguca

SEQ ID NO: 927002 - RNA, 19 nt, Artificial Sequence
  Description of Artificial Sequence: Synthetic oligonucleotide
  Sense strand starting at position 3447 of SEQ ID NO: 913434
guuucucagcaugaccaau

SEQ ID NO: 927003 - RNA, 19 nt, Artificial Sequence
  Description of Artificial Sequence: Synthetic oligonucleotide
  Antisense strand to SEQ ID NO: 927002
auuggucaugcugagaaac

SEQ ID NO: 927004 - RNA, 19 nt, Artificial Sequence
  Description of Artificial Sequence: Synthetic oligonucleotide
  Sense strand starting at position 3069 of SEQ ID NO: 913434
aguacaaaucuuggguuua

SEQ ID NO: 927005 - RNA, 19 nt, Artificial Sequence
  Description of Artificial Sequence: Synthetic oligonucleotide
  Antisense strand to SEQ ID NO: 927004
uaaacccaagauuuguacu

SEQ ID NO: 927006 - RNA, 19 nt, Artificial Sequence
  Description of Artificial Sequence: Synthetic oligonucleotide
  Sense strand starting at position 3810 of SEQ ID NO: 913434
gugugaaagggugaugcua

SEQ ID NO: 927007 - RNA, 19 nt, Artificial Sequence
  Description of Artificial Sequence: Synthetic oligonucleotide
  Antisense strand to SEQ ID NO: 927006
uagcaucacccuuucacac

SEQ ID NO: 927008 - RNA, 19 nt, Artificial Sequence
  Description of Artificial Sequence: Synthetic oligonucleotide
  Sense strand starting at position 2371 of SEQ ID NO: 913434
ggucguucagaacacgaau

SEQ ID NO: 927009 - RNA, 19 nt, Artificial Sequence
  Description of Artificial Sequence: Synthetic oligonucleotide
  Antisense strand to SEQ ID NO: 927008
auucguguucugaacgacc

SEQ ID NO: 927010 - RNA, 19 nt, Artificial Sequence
  Description of Artificial Sequence: Synthetic oligonucleotide
  Sense strand starting at position 3015 of SEQ ID NO: 913434
aaauaaucguggguuuaua

SEQ ID NO: 927011 - RNA, 19 nt, Artificial Sequence
  Description of Artificial Sequence: Synthetic oligonucleotide
  Antisense strand to SEQ ID NO: 927010
uauaaacccacgauuauuu

SEQ ID NO: 927012 - RNA, 19 nt, Artificial Sequence
  Description of Artificial Sequence: Synthetic oligonucleotide
  Sense strand starting at position 2965 of SEQ ID NO: 913434
aacucugguuggucaacau

SEQ ID NO: 927013 - RNA, 19 nt, Artificial Sequence
  Description of Artificial Sequence: Synthetic oligonucleotide
  Antisense strand to SEQ ID NO: 927012
auguugaccaaccagaguu

SEQ ID NO: 927014 - RNA, 19 nt, Artificial Sequence
  Description of Artificial Sequence: Synthetic oligonucleotide
  Sense strand starting at position 2445 of SEQ ID NO: 913434
uucgacugauuguuagaau

SEQ ID NO: 927015 - RNA, 19 nt, Artificial Sequence
  Description of Artificial Sequence: Synthetic oligonucleotide
  Antisense strand to SEQ ID NO: 927014
auucuaacaaucagucgaa

SEQ ID NO: 927016 - RNA, 19 nt, Artificial Sequence
  Description of Artificial Sequence: Synthetic oligonucleotide
  Sense strand starting at position 2714 of SEQ ID NO: 913434
ccuggcuaucuguauuaua

SEQ ID NO: 927017 - RNA, 19 nt, Artificial Sequence
  Description of Artificial Sequence: Synthetic oligonucleotide
  Antisense strand to SEQ ID NO: 927016
uauaauacagauagccagg

SEQ ID NO: 927018 - RNA, 19 nt, Artificial Sequence
  Description of Artificial Sequence: Synthetic oligonucleotide
  Sense strand starting at position 2962 of SEQ ID NO: 913434
auuaacucugguuggucaa

SEQ ID NO: 927019 - RNA, 19 nt, Artificial Sequence
  Description of Artificial Sequence: Synthetic oligonucleotide
  Antisense strand to SEQ ID NO: 927018
uugaccaaccagaguuaau

SEQ ID NO: 927020 - RNA, 19 nt, Artificial Sequence
  Description of Artificial Sequence: Synthetic oligonucleotide
  Sense strand starting at position 3492 of SEQ ID NO: 913434
uacccuuuccugggaguau

SEQ ID NO: 927021 - RNA, 19 nt, Artificial Sequence
  Description of Artificial Sequence: Synthetic oligonucleotide
  Antisense strand to SEQ ID NO: 927020
auacucccaggaaagggua

SEQ ID NO: 927022 - RNA, 19 nt, Artificial Sequence
  Description of Artificial Sequence: Synthetic oligonucleotide
  Sense strand starting at position 3491 of SEQ ID NO: 913434
cuacccuuuccugggagua

SEQ ID NO: 927023 - RNA, 19 nt, Artificial Sequence
  Description of Artificial Sequence: Synthetic oligonucleotide
  Antisense strand to SEQ ID NO: 927022
uacucccaggaaaggguag

SEQ ID NO: 927024 - RNA, 19 nt, Artificial Sequence
  Description of Artificial Sequence: Synthetic oligonucleotide
  Sense strand starting at position 3439 of SEQ ID NO: 913434
uuaagauaguuucucagca

SEQ ID NO: 927025 - RNA, 19 nt, Artificial Sequence
  Description of Artificial Sequence: Synthetic oligonucleotide
  Antisense strand to SEQ ID NO: 927024
ugcugagaaacuaucuuaa

SEQ ID NO: 927026 - RNA, 19 nt, Artificial Sequence
  Description of Artificial Sequence: Synthetic oligonucleotide
  Sense strand starting at position 2352 of SEQ ID NO: 913434
gguugagauucaguguaca

SEQ ID NO: 927027 - RNA, 19 nt, Artificial Sequence
  Description of Artificial Sequence: Synthetic oligonucleotide
  Antisense strand to SEQ ID NO: 927026
uguacacugaaucucaacc

SEQ ID NO: 927028 - RNA, 19 nt, Artificial Sequence
  Description of Artificial Sequence: Synthetic oligonucleotide
  Sense strand starting at position 3847 of SEQ ID NO: 913434
ggcaauaccugcuuagaca

SEQ ID NO: 927029 - RNA, 19 nt, Artificial Sequence
  Description of Artificial Sequence: Synthetic oligonucleotide
  Antisense strand to SEQ ID NO: 927028
ugucuaagcagguauugcc

SEQ ID NO: 927030 - RNA, 19 nt, Artificial Sequence
  Description of Artificial Sequence: Synthetic oligonucleotide
  Sense strand starting at position 3446 of SEQ ID NO: 913434
aguuucucagcaugaccaa

SEQ ID NO: 927031 - RNA, 19 nt, Artificial Sequence
  Description of Artificial Sequence: Synthetic oligonucleotide
  Antisense strand to SEQ ID NO: 927030
uuggucaugcugagaaacu

SEQ ID NO: 927032 - RNA, 19 nt, Artificial Sequence
  Description of Artificial Sequence: Synthetic oligonucleotide
  Sense strand starting at position 3443 of SEQ ID NO: 913434
gauaguuucucagcaugac

SEQ ID NO: 927033 - RNA, 19 nt, Artificial Sequence
  Description of Artificial Sequence: Synthetic oligonucleotide
  Antisense strand to SEQ ID NO: 927032
gucaugcugagaaacuauc

SEQ ID NO: 927034 - RNA, 19 nt, Artificial Sequence
  Description of Artificial Sequence: Synthetic oligonucleotide
  Sense strand starting at position 2961 of SEQ ID NO: 913434
uauuaacucugguugguca

SEQ ID NO: 927035 - RNA, 19 nt, Artificial Sequence
  Description of Artificial Sequence: Synthetic oligonucleotide
  Antisense strand to SEQ ID NO: 927034
ugaccaaccagaguuaaua

SEQ ID NO: 927036 - RNA, 19 nt, Artificial Sequence
  Description of Artificial Sequence: Synthetic oligonucleotide
  Sense strand starting at position 3014 of SEQ ID NO: 913434
uaaauaaucguggguuuau

SEQ ID NO: 927037 - RNA, 19 nt, Artificial Sequence
  Description of Artificial Sequence: Synthetic oligonucleotide
  Antisense strand to SEQ ID NO: 927036
auaaacccacgauuauuua

SEQ ID NO: 927038 - RNA, 19 nt, Artificial Sequence
  Description of Artificial Sequence: Synthetic oligonucleotide
  Sense strand starting at position 3013 of SEQ ID NO: 913434
uuaaauaaucguggguuua

SEQ ID NO: 927039 - RNA, 19 nt, Artificial Sequence
  Description of Artificial Sequence: Synthetic oligonucleotide
  Antisense strand to SEQ ID NO: 927038
uaaacccacgauuauuuaa

SEQ ID NO: 927040 - RNA, 19 nt, Artificial Sequence
  Description of Artificial Sequence: Synthetic oligonucleotide
  Sense strand starting at position 3023 of SEQ ID NO: 913434
guggguuuauaaguccaca

SEQ ID NO: 927041 - RNA, 19 nt, Artificial Sequence
  Description of Artificial Sequence: Synthetic oligonucleotide
  Antisense strand to SEQ ID NO: 927040
uguggacuuauaaacccac

SEQ ID NO: 927042 - RNA, 19 nt, Artificial Sequence
  Description of Artificial Sequence: Synthetic oligonucleotide
  Sense strand starting at position 3575 of SEQ ID NO: 913434
gcagucucuuaagugagga

SEQ ID NO: 927043 - RNA, 19 nt, Artificial Sequence
  Description of Artificial Sequence: Synthetic oligonucleotide
  Antisense strand to SEQ ID NO: 927042
uccucacuuaagagacugc

SEQ ID NO: 927044 - RNA, 19 nt, Artificial Sequence
  Description of Artificial Sequence: Synthetic oligonucleotide
  Sense strand starting at position 2478 of SEQ ID NO: 913434
ucuguugaguucucacuag

SEQ ID NO: 927045 - RNA, 19 nt, Artificial Sequence
  Description of Artificial Sequence: Synthetic oligonucleotide
  Antisense strand to SEQ ID NO: 927044
cuagugagaacucaacaga

SEQ ID NO: 927046 - RNA, 19 nt, Artificial Sequence
  Description of Artificial Sequence: Synthetic oligonucleotide
  Sense strand starting at position 2010 of SEQ ID NO: 913434
gugagguaucccggaguga

SEQ ID NO: 927047 - RNA, 19 nt, Artificial Sequence
  Description of Artificial Sequence: Synthetic oligonucleotide
  Antisense strand to SEQ ID NO: 927046
ucacuccgggauaccucac

SEQ ID NO: 927048 - RNA, 19 nt, Artificial Sequence
  Description of Artificial Sequence: Synthetic oligonucleotide
  Sense strand starting at position 3672 of SEQ ID NO: 913434
uugcuacauucuccgagau

SEQ ID NO: 927049 - RNA, 19 nt, Artificial Sequence
  Description of Artificial Sequence: Synthetic oligonucleotide
  Antisense strand to SEQ ID NO: 927048
aucucggagaauguagcaa

SEQ ID NO: 927050 - RNA, 19 nt, Artificial Sequence
  Description of Artificial Sequence: Synthetic oligonucleotide
  Sense strand starting at position 3673 of SEQ ID NO: 913434
ugcuacauucuccgagauc

SEQ ID NO: 927051 - RNA, 19 nt, Artificial Sequence
  Description of Artificial Sequence: Synthetic oligonucleotide
  Antisense strand to SEQ ID NO: 927050
gaucucggagaauguagca

SEQ ID NO: 927052 - RNA, 19 nt, Artificial Sequence
  Description of Artificial Sequence: Synthetic oligonucleotide
  Sense strand starting at position 3895 of SEQ ID NO: 913434
ucuggaugucuggguugua

SEQ ID NO: 927053 - RNA, 19 nt, Artificial Sequence
  Description of Artificial Sequence: Synthetic oligonucleotide
  Antisense strand to SEQ ID NO: 927052
uacaacccagacauccaga

SEQ ID NO: 927054 - RNA, 19 nt, Artificial Sequence
  Description of Artificial Sequence: Synthetic oligonucleotide
  Sense strand starting at position 2342 of SEQ ID NO: 913434
cucagugccugguugagau

SEQ ID NO: 927055 - RNA, 19 nt, Artificial Sequence
  Description of Artificial Sequence: Synthetic oligonucleotide
  Antisense strand to SEQ ID NO: 927054
aucucaaccaggcacugag

SEQ ID NO: 927056 - RNA, 19 nt, Artificial Sequence
  Description of Artificial Sequence: Synthetic oligonucleotide
  Sense strand starting at position 3010 of SEQ ID NO: 913434
cuguuaaauaaucgugggu

SEQ ID NO: 927057 - RNA, 19 nt, Artificial Sequence
  Description of Artificial Sequence: Synthetic oligonucleotide
  Antisense strand to SEQ ID NO: 927056
acccacgauuauuuaacag

SEQ ID NO: 927058 - RNA, 19 nt, Artificial Sequence
  Description of Artificial Sequence: Synthetic oligonucleotide
  Sense strand starting at position 2573 of SEQ ID NO: 913435
gucagauuucuugguaagu

SEQ ID NO: 927059 - RNA, 19 nt, Artificial Sequence
  Description of Artificial Sequence: Synthetic oligonucleotide
  Antisense strand to SEQ ID NO: 927058
acuuaccaagaaaucugac

SEQ ID NO: 927060 - RNA, 19 nt, Artificial Sequence
  Description of Artificial Sequence: Synthetic oligonucleotide
  Sense strand starting at position 1582 of SEQ ID NO: 913435
cuccauauccugcaagaag

SEQ ID NO: 927061 - RNA, 19 nt, Artificial Sequence
  Description of Artificial Sequence: Synthetic oligonucleotide
  Antisense strand to SEQ ID NO: 927060
cuucuugcaggauauggag

SEQ ID NO: 927062 - RNA, 19 nt, Artificial Sequence
  Description of Artificial Sequence: Synthetic oligonucleotide
  Sense strand starting at position 3919 of SEQ ID NO: 913435
ccuggucaacuccagauau

SEQ ID NO: 927063 - RNA, 19 nt, Artificial Sequence
  Description of Artificial Sequence: Synthetic oligonucleotide
  Antisense strand to SEQ ID NO: 927062
auaucuggaguugaccagg
